United States Patent Application Publication US 2011/0177960 A1 - sequence listing, part 14

SEQ ID NO: 227781 - DNA, 25 bp, Artificial
  probe
  misc_feature (1)..(25): SEQ ID NO: 1043; WAN024FZW_at; Start 280; Stop 304
gatatcatactctgtccgctgtttc

SEQ ID NO: 227782 - DNA, 25 bp, Artificial
  probe
  misc_feature (1)..(25): SEQ ID NO: 4161; WAN024FZX_at; Start 67; Stop 91
gacataggcctctggctggtaataa

SEQ ID NO: 227783 - DNA, 25 bp, Artificial
  probe
  misc_feature (1)..(25): SEQ ID NO: 4161; WAN024FZX_at; Start 1; Stop 25
gtggcgaagcttgtcaatctcgtca

SEQ ID NO: 227784 - DNA, 25 bp, Artificial
  probe
  misc_feature (1)..(25): SEQ ID NO: 4161; WAN024FZX_at; Start 56; Stop 80
tcgctagaagggacataggcctctg

SEQ ID NO: 227785 - DNA, 25 bp, Artificial
  probe
  misc_feature (1)..(25): SEQ ID NO: 4161; WAN024FZX_at; Start 19; Stop 43
ctcgtcattgacagaactatccttc

SEQ ID NO: 227786 - DNA, 25 bp, Artificial
  probe
  misc_feature (1)..(25): SEQ ID NO: 4161; WAN024FZX_at; Start 45; Stop 69
caatataggtatcgctagaagggac

SEQ ID NO: 227787 - DNA, 25 bp, Artificial
  probe
  misc_feature (1)..(25): SEQ ID NO: 4161; WAN024FZX_at; Start 52; Stop 76
ggtatcgctagaagggacataggcc

SEQ ID NO: 227788 - DNA, 25 bp, Artificial
  probe
  misc_feature (1)..(25): SEQ ID NO: 4161; WAN024FZX_at; Start 296; Stop 320
tccaccaactgctcgatagcttggg

SEQ ID NO: 227789 - DNA, 25 bp, Artificial
  probe
  misc_feature (1)..(25): SEQ ID NO: 4161; WAN024FZX_at; Start 287; Stop 311
tcaatgttatccaccaactgctcga

SEQ ID NO: 227790 - DNA, 25 bp, Artificial
  probe
  misc_feature (1)..(25): SEQ ID NO: 4161; WAN024FZX_at; Start 201; Stop 225
tattgactttagaaatgacctgact

SEQ ID NO: 227791 - DNA, 25 bp, Artificial
  probe
  misc_feature (1)..(25): SEQ ID NO: 4161; WAN024FZX_at; Start 38; Stop 62
tccttctcaatataggtatcgctag

SEQ ID NO: 227792 - DNA, 25 bp, Artificial
  probe
  misc_feature (1)..(25): SEQ ID NO: 4161; WAN024FZX_at; Start 309; Stop 333
cgatagcttggggttgatctcctga

SEQ ID NO: 227793 - DNA, 25 bp, Artificial
  probe
  misc_feature (1)..(25): SEQ ID NO: 4161; WAN024FZX_at; Start 78; Stop 102
ctggctggtaataatcatagtagga

SEQ ID NO: 227794 - DNA, 25 bp, Artificial
  probe
  misc_feature (1)..(25): SEQ ID NO: 4161; WAN024FZX_at; Start 93; Stop 117
catagtaggatacgaaatactcaac

SEQ ID NO: 227795 - DNA, 25 bp, Artificial
  probe
  misc_feature (1)..(25): SEQ ID NO: 4161; WAN024FZX_at; Start 189; Stop 213
ccagagttggtttattgactttaga

SEQ ID NO: 227796 - DNA, 25 bp, Artificial
  probe
  misc_feature (1)..(25): SEQ ID NO: 4161; WAN024FZX_at; Start 161; Stop 185
ccagccagagttttattgtgggcaa

SEQ ID NO: 227797 - DNA, 25 bp, Artificial
  probe
  misc_feature (1)..(25): SEQ ID NO: 4161; WAN024FZX_at; Start 205; Stop 229
gactttagaaatgacctgactcata

SEQ ID NO: 227798 - DNA, 25 bp, Artificial
  probe
  misc_feature (1)..(25): SEQ ID NO: 4161; WAN024FZX_at; Start 98; Stop 122
taggatacgaaatactcaactgcat

SEQ ID NO: 227799 - DNA, 25 bp, Artificial
  probe
  misc_feature (1)..(25): SEQ ID NO: 4161; WAN024FZX_at; Start 6; Stop 30
gaagcttgtcaatctcgtcattgac

SEQ ID NO: 227800 - DNA, 25 bp, Artificial
  probe
  misc_feature (1)..(25): SEQ ID NO: 4161; WAN024FZX_at; Start 134; Stop 158
aattccttaaactccccatagagct

SEQ ID NO: 227801 - DNA, 25 bp, Artificial
  probe
  misc_feature (1)..(25): SEQ ID NO: 4161; WAN024FZX_at; Start 141; Stop 165
taaactccccatagagctgaccagc

SEQ ID NO: 227802 - DNA, 25 bp, Artificial
  probe
  misc_feature (1)..(25): SEQ ID NO: 4161; WAN024FZX_at; Start 154; Stop 178
gagctgaccagccagagttttattg

SEQ ID NO: 227803 - DNA, 25 bp, Artificial
  probe
  misc_feature (1)..(25): SEQ ID NO: 4161; WAN024FZX_at; Start 259; Stop 283
catcagaatctgagctttttctccc

SEQ ID NO: 227804 - DNA, 25 bp, Artificial
  probe
  misc_feature (1)..(25): SEQ ID NO: 4161; WAN024FZX_at; Start 72; Stop 96
aggcctctggctggtaataatcata

SEQ ID NO: 227805 - DNA, 25 bp, Artificial
  probe
  misc_feature (1)..(25): SEQ ID NO: 4161; WAN024FZX_at; Start 150; Stop 174
catagagctgaccagccagagtttt

SEQ ID NO: 227806 - DNA, 25 bp, Artificial
  probe
  misc_feature (1)..(25): SEQ ID NO: 4161; WAN024FZX_at; Start 174; Stop 198
tattgtgggcaataaccagagttgg

SEQ ID NO: 227807 - DNA, 25 bp, Artificial
  probe
  misc_feature (1)..(25): SEQ ID NO: 4161; WAN024FZX_at; Start 212; Stop 236
gaaatgacctgactcatagtatagg

SEQ ID NO: 227808 - DNA, 25 bp, Artificial
  probe
  misc_feature (1)..(25): SEQ ID NO: 4161; WAN024FZX_at; Start 118; Stop 142
tgcattttcagggaaaaattcctta

SEQ ID NO: 227809 - DNA, 25 bp, Artificial
  probe
  misc_feature (1)..(25): SEQ ID NO: 4161; WAN024FZX_at; Start 28; Stop 52
gacagaactatccttctcaatatag

SEQ ID NO: 227810 - DNA, 25 bp, Artificial
  probe
  misc_feature (1)..(25): SEQ ID NO: 4161; WAN024FZX_at; Start 231; Stop 255
tataggtcttccctgttccagtcgc

SEQ ID NO: 227811 - DNA, 25 bp, Artificial
  probe
  misc_feature (1)..(25): SEQ ID NO: 4161; WAN024FZX_at; Start 60; Stop 84
tagaagggacataggcctctggctg

SEQ ID NO: 227812 - DNA, 25 bp, Artificial
  probe
  misc_feature (1)..(25): SEQ ID NO: 4161; WAN024FZX_at; Start 221; Stop 245
tgactcatagtataggtcttccctg

SEQ ID NO: 227813 - DNA, 25 bp, Artificial
  probe
  misc_feature (1)..(25): SEQ ID NO: 4161; WAN024FZX_at; Start 110; Stop 134
tactcaactgcattttcagggaaaa

SEQ ID NO: 227814 - DNA, 25 bp, Artificial
  probe
  misc_feature (1)..(25): SEQ ID NO: 4161; WAN024FZX_at; Start 106; Stop 130
gaaatactcaactgcattttcaggg

SEQ ID NO: 227815 - DNA, 25 bp, Artificial
  probe
  misc_feature (1)..(25): SEQ ID NO: 4161; WAN024FZX_at; Start 269; Stop 293
tgagctttttctcccccctcaatgt

SEQ ID NO: 227816 - DNA, 25 bp, Artificial
  probe
  misc_feature (1)..(25): SEQ ID NO: 4263; WAN024FZY_at; Start 106; Stop 130
gaaaggcatgttcatctcgggaagc

SEQ ID NO: 227817 - DNA, 25 bp, Artificial
  probe
  misc_feature (1)..(25): SEQ ID NO: 4263; WAN024FZY_at; Start 175; Stop 199
gttggaaatcaatatcattacgttc

SEQ ID NO: 227818 - DNA, 25 bp, Artificial
  probe
  misc_feature (1)..(25): SEQ ID NO: 4263; WAN024FZY_at; Start 95; Stop 119
aaattctactcgaaaggcatgttca

SEQ ID NO: 227819 - DNA, 25 bp, Artificial
  probe
  misc_feature (1)..(25): SEQ ID NO: 4263; WAN024FZY_at; Start 163; Stop 187
gaaatcttccgcgttggaaatcaat

SEQ ID NO: 227820 - DNA, 25 bp, Artificial
  probe
  misc_feature (1)..(25): SEQ ID NO: 4263; WAN024FZY_at; Start 120; Stop 144
tctcgggaagctgggaaaatctcta

SEQ ID NO: 227821 - DNA, 25 bp, Artificial
  probe
  misc_feature (1)..(25): SEQ ID NO: 4263; WAN024FZY_at; Start 195; Stop 219
cgttcaaactgaatatcgaccaagt

SEQ ID NO: 227822 - DNA, 25 bp, Artificial
  probe
  misc_feature (1)..(25): SEQ ID NO: 4263; WAN024FZY_at; Start 5; Stop 29
cgctgggaaaatcgctaaatgatcc

SEQ ID NO: 227823 - DNA, 25 bp, Artificial
  probe
  misc_feature (1)..(25): SEQ ID NO: 4263; WAN024FZY_at; Start 235; Stop 259
cacgagaaatctctagaccaggacg

SEQ ID NO: 227824 - DNA, 25 bp, Artificial
  probe
  misc_feature (1)..(25): SEQ ID NO: 4263; WAN024FZY_at; Start 114; Stop 138
tgttcatctcgggaagctgggaaaa

SEQ ID NO: 227825 - DNA, 25 bp, Artificial
  probe
  misc_feature (1)..(25): SEQ ID NO: 4263; WAN024FZY_at; Start 117; Stop 141
tcatctcgggaagctgggaaaatct

SEQ ID NO: 227826 - DNA, 25 bp, Artificial
  probe
  misc_feature (1)..(25): SEQ ID NO: 4263; WAN024FZY_at; Start 91; Stop 115
caaaaaattctactcgaaaggcatg

SEQ ID NO: 227827 - DNA, 25 bp, Artificial
  probe
  misc_feature (1)..(25): SEQ ID NO: 4263; WAN024FZY_at; Start 131; Stop 155
tgggaaaatctctaccacatcccca

SEQ ID NO: 227828 - DNA, 25 bp, Artificial
  probe
  misc_feature (1)..(25): SEQ ID NO: 4263; WAN024FZY_at; Start 10; Stop 34
ggaaaatcgctaaatgatccacttc

SEQ ID NO: 227829 - DNA, 25 bp, Artificial
  probe
  misc_feature (1)..(25): SEQ ID NO: 4263; WAN024FZY_at; Start 205; Stop 229
gaatatcgaccaagtcattcaagag

SEQ ID NO: 227830 - DNA, 25 bp, Artificial
  probe
  misc_feature (1)..(25): SEQ ID NO: 4263; WAN024FZY_at; Start 157; Stop 181
gaacgcgaaatcttccgcgttggaa

SEQ ID NO: 227831 - DNA, 25 bp, Artificial
  probe
  misc_feature (1)..(25): SEQ ID NO: 4263; WAN024FZY_at; Start 167; Stop 191
tcttccgcgttggaaatcaatatca

SEQ ID NO: 227832 - DNA, 25 bp, Artificial
  probe
  misc_feature (1)..(25): SEQ ID NO: 4263; WAN024FZY_at; Start 183; Stop 207
tcaatatcattacgttcaaactgaa

SEQ ID NO: 227833 - DNA, 25 bp, Artificial
  probe
  misc_feature (1)..(25): SEQ ID NO: 4263; WAN024FZY_at; Start 232; Stop 256
tatcacgagaaatctctagaccagg

SEQ ID NO: 227834 - DNA, 25 bp, Artificial
  probe
  misc_feature (1)..(25): SEQ ID NO: 4263; WAN024FZY_at; Start 125; Stop 149
ggaagctgggaaaatctctaccaca

SEQ ID NO: 227835 - DNA, 25 bp, Artificial
  probe
  misc_feature (1)..(25): SEQ ID NO: 4263; WAN024FZY_at; Start 238; Stop 262
gagaaatctctagaccaggacggag

SEQ ID NO: 227836 - DNA, 25 bp, Artificial
  probe
  misc_feature (1)..(25): SEQ ID NO: 4263; WAN024FZY_at; Start 223; Stop 247
tcaagagtttatcacgagaaatctc

SEQ ID NO: 227837 - DNA, 25 bp, Artificial
  probe
  misc_feature (1)..(25): SEQ ID NO: 4263; WAN024FZY_at; Start 170; Stop 194
tccgcgttggaaatcaatatcatta

SEQ ID NO: 227838 - DNA, 25 bp, Artificial
  probe
  misc_feature (1)..(25): SEQ ID NO: 4263; WAN024FZY_at; Start 1; Stop 25
gtgtcgctgggaaaatcgctaaatg

SEQ ID NO: 227839 - DNA, 25 bp, Artificial
  probe
  misc_feature (1)..(25): SEQ ID NO: 4263; WAN024FZY_at; Start 211; Stop 235
cgaccaagtcattcaagagtttatc

SEQ ID NO: 227840 - DNA, 25 bp, Artificial
  probe
  misc_feature (1)..(25): SEQ ID NO: 4263; WAN024FZY_at; Start 83; Stop 107
ttcgtctccaaaaaattctactcga

SEQ ID NO: 227841 - DNA, 25 bp, Artificial
  probe
  misc_feature (1)..(25): SEQ ID NO: 4263; WAN024FZY_at; Start 198; Stop 222
tcaaactgaatatcgaccaagtcat

SEQ ID NO: 227842 - DNA, 25 bp, Artificial
  probe
  misc_feature (1)..(25): SEQ ID NO: 4263; WAN024FZY_at; Start 154; Stop 178
cacgaacgcgaaatcttccgcgttg

SEQ ID NO: 227843 - DNA, 25 bp, Artificial
  probe
  misc_feature (1)..(25): SEQ ID NO: 4263; WAN024FZY_at; Start 16; Stop 40
tcgctaaatgatccacttctcccaa

SEQ ID NO: 227844 - DNA, 25 bp, Artificial
  probe
  misc_feature (1)..(25): SEQ ID NO: 4263; WAN024FZY_at; Start 122; Stop 146
tcgggaagctgggaaaatctctacc

SEQ ID NO: 227845 - DNA, 25 bp, Artificial
  probe
  misc_feature (1)..(25): SEQ ID NO: 4263; WAN024FZY_at; Start 243; Stop 267
atctctagaccaggacggagactaa

SEQ ID NO: 227846 - DNA, 25 bp, Artificial
  probe
  misc_feature (1)..(25): SEQ ID NO: 4263; WAN024FZY_at; Start 240; Stop 264
gaaatctctagaccaggacggagac

SEQ ID NO: 227847 - DNA, 25 bp, Artificial
  probe
  misc_feature (1)..(25): SEQ ID NO: 4263; WAN024FZY_at; Start 108; Stop 132
aaggcatgttcatctcgggaagctg

SEQ ID NO: 227848 - DNA, 25 bp, Artificial
  probe
  misc_feature (1)..(25): SEQ ID NO: 4263; WAN024FZY_at; Start 216; Stop 240
aagtcattcaagagtttatcacgag

SEQ ID NO: 227849 - DNA, 25 bp, Artificial
  probe
  misc_feature (1)..(25): SEQ ID NO: 4263; WAN024FZY_at; Start 101; Stop 125
tactcgaaaggcatgttcatctcgg

SEQ ID NO: 227850 - DNA, 25 bp, Artificial
  probe
  misc_feature (1)..(25): SEQ ID NO: 5869; WAN024FZZ_at; Start 622; Stop 646
gatttgctcaatcactgtctcggtc

SEQ ID NO: 227851 - DNA, 25 bp, Artificial
  probe
  misc_feature (1)..(25): SEQ ID NO: 5869; WAN024FZZ_at; Start 41; Stop 65
tccttagcaactgccttggtcacgg

SEQ ID NO: 227852 - DNA, 25 bp, Artificial
  probe
  misc_feature (1)..(25): SEQ ID NO: 5869; WAN024FZZ_at; Start 168; Stop 192
cacgttgcatagactgggtaaccgt

SEQ ID NO: 227853 - DNA, 25 bp, Artificial
  probe
  misc_feature (1)..(25): SEQ ID NO: 5869; WAN024FZZ_at; Start 391; Stop 415
gataatctccgtccgttccaaggtc

SEQ ID NO: 227854 - DNA, 25 bp, Artificial
  probe
  misc_feature (1)..(25): SEQ ID NO: 5869; WAN024FZZ_at; Start 654; Stop 678
tttcatagtcaccaggtgtcgctga

SEQ ID NO: 227855 - DNA, 25 bp, Artificial
  probe
  misc_feature (1)..(25): SEQ ID NO: 5869; WAN024FZZ_at; Start 575; Stop 599
gtcggacggacttccacctctggat

SEQ ID NO: 227856 - DNA, 25 bp, Artificial
  probe
  misc_feature (1)..(25): SEQ ID NO: 5869; WAN024FZZ_at; Start 396; Stop 420
tctccgtccgttccaaggtcttgat

SEQ ID NO: 227857 - DNA, 25 bp, Artificial
  probe
  misc_feature (1)..(25): SEQ ID NO: 5869; WAN024FZZ_at; Start 90; Stop 114
tgattgtctgtggtacgataccatg

SEQ ID NO: 227858 - DNA, 25 bp, Artificial
  probe
  misc_feature (1)..(25): SEQ ID NO: 5869; WAN024FZZ_at; Start 12; Stop 36
ggctattgatgtcgacttccttgtc

SEQ ID NO: 227859 - DNA, 25 bp, Artificial
  probe
  misc_feature (1)..(25): SEQ ID NO: 5869; WAN024FZZ_at; Start 153; Stop 177
cagtttcatcgatagcacgttgcat

SEQ ID NO: 227860 - DNA, 25 bp, Artificial
  probe
  misc_feature (1)..(25): SEQ ID NO: 5869; WAN024FZZ_at; Start 273; Stop 297
ggaaaccttccttgtcagcatcgag

SEQ ID NO: 227861 - DNA, 25 bp, Artificial
  probe
  misc_feature (1)..(25): SEQ ID NO: 5869; WAN024FZZ_at; Start 600; Stop 624
ccaagagtcccgttggacgaatgat

SEQ ID NO: 227862 - DNA, 25 bp, Artificial
  probe
  misc_feature (1)..(25): SEQ ID NO: 5869; WAN024FZZ_at; Start 407; Stop 431
tccaaggtcttgatatccgagtgca

SEQ ID NO: 227863 - DNA, 25 bp, Artificial
  probe
  misc_feature (1)..(25): SEQ ID NO: 5869; WAN024FZZ_at; Start 607; Stop 631
tcccgttggacgaatgatttgctca

SEQ ID NO: 227864 - DNA, 25 bp, Artificial
  probe
  misc_feature (1)..(25): SEQ ID NO: 5869; WAN024FZZ_at; Start 555; Stop 579
ggtcatcaatctgtcccatagtcgg

SEQ ID NO: 227865 - DNA, 25 bp, Artificial
  probe
  misc_feature (1)..(25): SEQ ID NO: 5869; WAN024FZZ_at; Start 418; Stop 442
gatatccgagtgcatgtacttgacc

SEQ ID NO: 227866 - DNA, 25 bp, Artificial
  probe
  misc_feature (1)..(25): SEQ ID NO: 5869; WAN024FZZ_at; Start 357; Stop 381
ccaagacatcaaagacacccaagcg

SEQ ID NO: 227867 - DNA, 25 bp, Artificial
  probe
  misc_feature (1)..(25): SEQ ID NO: 5869; WAN024FZZ_at; Start 3; Stop 27
gtttgttgaggctattgatgtcgac

SEQ ID NO: 227868 - DNA, 25 bp, Artificial
  probe
  misc_feature (1)..(25): SEQ ID NO: 5869; WAN024FZZ_at; Start 144; Stop 168
gacggcgggcagtttcatcgatagc

SEQ ID NO: 227869 - DNA, 25 bp, Artificial
  probe
  misc_feature (1)..(25): SEQ ID NO: 5869; WAN024FZZ_at; Start 423; Stop 447
ccgagtgcatgtacttgaccttgat

SEQ ID NO: 227870 - DNA, 25 bp, Artificial
  probe
  misc_feature (1)..(25): SEQ ID NO: 5869; WAN024FZZ_at; Start 561; Stop 585
caatctgtcccatagtcggacggac

SEQ ID NO: 227871 - DNA, 25 bp, Artificial
  probe
  misc_feature (1)..(25): SEQ ID NO: 5869; WAN024FZZ_at; Start 148; Stop 172
gcgggcagtttcatcgatagcacgt

SEQ ID NO: 227872 - DNA, 25 bp, Artificial
  probe
  misc_feature (1)..(25): SEQ ID NO: 5869; WAN024FZZ_at; Start 276; Stop 300
aaccttccttgtcagcatcgagaat

SEQ ID NO: 227873 - DNA, 25 bp, Artificial
  probe
  misc_feature (1)..(25): SEQ ID NO: 5869; WAN024FZZ_at; Start 60; Stop 84
tcacggcaatcaggtcacggatttc

SEQ ID NO: 227874 - DNA, 25 bp, Artificial
  probe
  misc_feature (1)..(25): SEQ ID NO: 5869; WAN024FZZ_at; Start 551; Stop 575
aagaggtcatcaatctgtcccatag

SEQ ID NO: 227875 - DNA, 25 bp, Artificial
  probe
  misc_feature (1)..(25): SEQ ID NO: 5869; WAN024FZZ_at; Start 647; Stop 671
tgttcattttcatagtcaccaggtg

SEQ ID NO: 227876 - DNA, 25 bp, Artificial
  probe
  misc_feature (1)..(25): SEQ ID NO: 5869; WAN024FZZ_at; Start 75; Stop 99
cacggatttctttcttgattgtctg

SEQ ID NO: 227877 - DNA, 25 bp, Artificial
  probe
  misc_feature (1)..(25): SEQ ID NO: 5869; WAN024FZZ_at; Start 634; Stop 658
cactgtctcggtctgttcattttca

SEQ ID NO: 227878 - DNA, 25 bp, Artificial
  probe
  misc_feature (1)..(25): SEQ ID NO: 5869; WAN024FZZ_at; Start 161; Stop 185
tcgatagcacgttgcatagactggg

SEQ ID NO: 227879 - DNA, 25 bp, Artificial
  probe
  misc_feature (1)..(25): SEQ ID NO: 5869; WAN024FZZ_at; Start 25; Stop 49
gacttccttgtcctcttccttagca

SEQ ID NO: 227880 - DNA, 25 bp, Artificial
  probe
  misc_feature (1)..(25): SEQ ID NO: 5869; WAN024FZZ_at; Start 593; Stop 617
tctggatccaagagtcccgttggac

SEQ ID NO: 227881 - DNA, 25 bp, Artificial
  probe
  misc_feature (1)..(25): SEQ ID NO: 5869; WAN024FZZ_at; Start 56; Stop 80
ttggtcacggcaatcaggtcacgga

SEQ ID NO: 227882 - DNA, 25 bp, Artificial
  probe
  misc_feature (1)..(25): SEQ ID NO: 5869; WAN024FZZ_at; Start 87; Stop 111
tcttgattgtctgtggtacgatacc

SEQ ID NO: 227883 - DNA, 25 bp, Artificial
  probe
  misc_feature (1)..(25): SEQ ID NO: 5869; WAN024FZZ_at; Start 582; Stop 606
ggacttccacctctggatccaagag

SEQ ID NO: 227884 - DNA, 25 bp, Artificial
  probe
  misc_feature (1)..(25): SEQ ID NO: 2276; WAN024G22_at; Start 463; Stop 487
tgtatctatggtttgggttcgccca

SEQ ID NO: 227885 - DNA, 25 bp, Artificial
  probe
  misc_feature (1)..(25): SEQ ID NO: 2276; WAN024G22_at; Start 327; Stop 351
agaggcctatgtcccttctagcgat

SEQ ID NO: 227886 - DNA, 25 bp, Artificial
  probe
  misc_feature (1)..(25): SEQ ID NO: 2276; WAN024G22_at; Start 416; Stop 440
cagcccttttggagcgtaatgatgt

SEQ ID NO: 227887 - DNA, 25 bp, Artificial
  probe
  misc_feature (1)..(25): SEQ ID NO: 2276; WAN024G22_at; Start 1080; Stop 1104
catgtacaatggagaccgttcgcgt

SEQ ID NO: 227888 - DNA, 25 bp, Artificial
  probe
  misc_feature (1)..(25): SEQ ID NO: 2276; WAN024G22_at; Start 1217; Stop 1241
cacctggtgactatgaaaatgaaca

SEQ ID NO: 227889 - DNA, 25 bp, Artificial
  probe
  misc_feature (1)..(25): SEQ ID NO: 2276; WAN024G22_at; Start 1590; Stop 1614
tctcgatgctgacaaggaaggtttc

SEQ ID NO: 227890 - DNA, 25 bp, Artificial
  probe
  misc_feature (1)..(25): SEQ ID NO: 2276; WAN024G22_at; Start 432; Stop 456
taatgatgttattgtcgtggcctca

SEQ ID NO: 227891 - DNA, 25 bp, Artificial
  probe
  misc_feature (1)..(25): SEQ ID NO: 2276; WAN024G22_at; Start 1300; Stop 1324
gaagtccgtccgactatgggacaga

SEQ ID NO: 227892 - DNA, 25 bp, Artificial
  probe
  misc_feature (1)..(25): SEQ ID NO: 2276; WAN024G22_at; Start 1868; Stop 1892
tcaatagcctcaacaaacaagagcg

SEQ ID NO: 227893 - DNA, 25 bp, Artificial
  probe
  misc_feature (1)..(25): SEQ ID NO: 2276; WAN024G22_at; Start 88; Stop 112
caagctatcgagcagttggtggata

SEQ ID NO: 227894 - DNA, 25 bp, Artificial
  probe
  misc_feature (1)..(25): SEQ ID NO: 2276; WAN024G22_at; Start 541; Stop 565
gataaactcttgaatgacttggtcg

SEQ ID NO: 227895 - DNA, 25 bp, Artificial
  probe
  misc_feature (1)..(25): SEQ ID NO: 2276; WAN024G22_at; Start 1718; Stop 1742
gtgctatcgatgaaactgcccgccg

SEQ ID NO: 227896 - DNA, 25 bp, Artificial
  probe
  misc_feature (1)..(25): SEQ ID NO: 2276; WAN024G22_at; Start 499; Stop 523
gatagtgtcgttagtctccgtcctg

SEQ ID NO: 227897 - DNA, 25 bp, Artificial
  probe
  misc_feature (1)..(25): SEQ ID NO: 2276; WAN024G22_at; Start 55; Stop 79
gtatcaaaatatcaaccatcaggag

SEQ ID NO: 227898 - DNA, 25 bp, Artificial
  probe
  misc_feature (1)..(25): SEQ ID NO: 2276; WAN024G22_at; Start 646; Stop 670
gcttcccgagatgaacatgcctttc

SEQ ID NO: 227899 - DNA, 25 bp, Artificial
  probe
  misc_feature (1)..(25): SEQ ID NO: 2276; WAN024G22_at; Start 952; Stop 976
gaaaattattctcgccacatggatg

SEQ ID NO: 227900 - DNA, 25 bp, Artificial
  probe
  misc_feature (1)..(25): SEQ ID NO: 2276; WAN024G22_at; Start 515; Stop 539
tccgtcctggtctagagatttctcg

SEQ ID NO: 227901 - DNA, 25 bp, Artificial
  probe
  misc_feature (1)..(25): SEQ ID NO: 2276; WAN024G22_at; Start 582; Stop 606
taatgatattgatttccaacgcgga

SEQ ID NO: 227902 - DNA, 25 bp, Artificial
  probe
  misc_feature (1)..(25): SEQ ID NO: 2276; WAN024G22_at; Start 363; Stop 387
gaaggatagttctgtcaatgacgag

SEQ ID NO: 227903 - DNA, 25 bp, Artificial
  probe
  misc_feature (1)..(25): SEQ ID NO: 2276; WAN024G22_at; Start 228; Stop 252
caataaaactctggctggtcagctc

SEQ ID NO: 227904 - DNA, 25 bp, Artificial
  probe
  misc_feature (1)..(25): SEQ ID NO: 2276; WAN024G22_at; Start 632; Stop 656
tagagattttcccagcttcccgaga

SEQ ID NO: 227905 - DNA, 25 bp, Artificial
  probe
  misc_feature (1)..(25): SEQ ID NO: 2276; WAN024G22_at; Start 1698; Stop 1722
ggttacccagtctatgcaacgtgct

SEQ ID NO: 227906 - DNA, 25 bp, Artificial
  probe
  misc_feature (1)..(25): SEQ ID NO: 2276; WAN024G22_at; Start 448; Stop 472
gtggcctcagtctcttgtatctatg

SEQ ID NO: 227907 - DNA, 25 bp, Artificial
  probe
  misc_feature (1)..(25): SEQ ID NO: 2276; WAN024G22_at; Start 151; Stop 175
gcgactggaacagggaagacctata

SEQ ID NO: 227908 - DNA, 25 bp, Artificial
  probe
  misc_feature (1)..(25): SEQ ID NO: 2276; WAN024G22_at; Start 73; Stop 97
tcaggagatcaaccccaagctatcg

SEQ ID NO: 227909 - DNA, 25 bp, Artificial
  probe
  misc_feature (1)..(25): SEQ ID NO: 2276; WAN024G22_at; Start 310; Stop 334
tatgattattaccagccagaggcct

SEQ ID NO: 227910 - DNA, 25 bp, Artificial
  probe
  misc_feature (1)..(25): SEQ ID NO: 2276; WAN024G22_at; Start 1473; Stop 1497
gaccttggaacggacggagattatc

SEQ ID NO: 227911 - DNA, 25 bp, Artificial
  probe
  misc_feature (1)..(25): SEQ ID NO: 2276; WAN024G22_at; Start 385; Stop 409
gagattgacaagcttcgccactcag

SEQ ID NO: 227912 - DNA, 25 bp, Artificial
  probe
  misc_feature (1)..(25): SEQ ID NO: 2276; WAN024G22_at; Start 1826; Stop 1850
tgaccaaggcagttgctaaggaaga

SEQ ID NO: 227913 - DNA, 25 bp, Artificial
  probe
  misc_feature (1)..(25): SEQ ID NO: 2276; WAN024G22_at; Start 1442; Stop 1466
tcaaggtcaagtacatgcactcgga

SEQ ID NO: 227914 - DNA, 25 bp, Artificial
  probe
  misc_feature (1)..(25): SEQ ID NO: 2276; WAN024G22_at; Start 1457; Stop 1481
tgcactcggatatcaagaccttgga

SEQ ID NO: 227915 - DNA, 25 bp, Artificial
  probe
  misc_feature (1)..(25): SEQ ID NO: 2276; WAN024G22_at; Start 344; Stop 368
ctagcgatacctatattgagaagga

SEQ ID NO: 227916 - DNA, 25 bp, Artificial
  probe
  misc_feature (1)..(25): SEQ ID NO: 2276; WAN024G22_at; Start 478; Stop 502
ggttcgcccaaggaatacgctgata

SEQ ID NO: 227917 - DNA, 25 bp, Artificial
  probe
  misc_feature (1)..(25): SEQ ID NO: 2276; WAN024G22_at; Start 193; Stop 217
tctaaagtcaataaaccaactctgg

SEQ ID NO: 227918 - DNA, 25 bp, Artificial
  probe
  misc_feature (1)..(25): SEQ ID NO: 4164; WAN024G23_at; Start 282; Stop 306
caccgtgtacaaaggcaggtgtacc

SEQ ID NO: 227919 - DNA, 25 bp, Artificial
  probe
  misc_feature (1)..(25): SEQ ID NO: 4164; WAN024G23_at; Start 456; Stop 480
tgtccgttgccaagcaaagaattgc

SEQ ID NO: 227920 - DNA, 25 bp, Artificial
  probe
  misc_feature (1)..(25): SEQ ID NO: 4164; WAN024G23_at; Start 198; Stop 222
cagtaacagtgtaatcagccaagtg

SEQ ID NO: 227921 - DNA, 25 bp, Artificial
  probe
  misc_feature (1)..(25): SEQ ID NO: 4164; WAN024G23_at; Start 417; Stop 441
caataacgatattcgccaaacgacg

SEQ ID NO: 227922 - DNA, 25 bp, Artificial
  probe
  misc_feature (1)..(25): SEQ ID NO: 4164; WAN024G23_at; Start 52; Stop 76
agtcagagcgtctttagccacacca

SEQ ID NO: 227923 - DNA, 25 bp, Artificial
  probe
  misc_feature (1)..(25): SEQ ID NO: 4164; WAN024G23_at; Start 38; Stop 62
tctacattttcttcagtcagagcgt

SEQ ID NO: 227924 - DNA, 25 bp, Artificial
  probe
  misc_feature (1)..(25): SEQ ID NO: 4164; WAN024G23_at; Start 91; Stop 115
ggcacgaagggttgcgacaataaca

SEQ ID NO: 227925 - DNA, 25 bp, Artificial
  probe
  misc_feature (1)..(25): SEQ ID NO: 4164; WAN024G23_at; Start 346; Stop 370
caaaatcaaagccaaggcaccctca

SEQ ID NO: 227926 - DNA, 25 bp, Artificial
  probe
  misc_feature (1)..(25): SEQ ID NO: 4164; WAN024G23_at; Start 68; Stop 92
gccacaccaccattcatcttaaggg

SEQ ID NO: 227927 - DNA, 25 bp, Artificial
  probe
  misc_feature (1)..(25): SEQ ID NO: 4164; WAN024G23_at; Start 2; Stop 26
tggcgtttcaagttagcaaaacctg

SEQ ID NO: 227928 - DNA, 25 bp, Artificial
  probe
  misc_feature (1)..(25): SEQ ID NO: 4164; WAN024G23_at; Start 120; Stop 144
catctggagatgttggcaagtttgg

SEQ ID NO: 227929 - DNA, 25 bp, Artificial
  probe
  misc_feature (1)..(25): SEQ ID NO: 4164; WAN024G23_at; Start 431; Stop 455
gccaaacgacgtttcaagtcctcga

SEQ ID NO: 227930 - DNA, 25 bp, Artificial
  probe
  misc_feature (1)..(25): SEQ ID NO: 4164; WAN024G23_at; Start 104; Stop 128
gcgacaataacaactgcatctggag

SEQ ID NO: 227931 - DNA, 25 bp, Artificial
  probe
  misc_feature (1)..(25): SEQ ID NO: 4164; WAN024G23_at; Start 374; Stop 398
tgcaaatcacctacagaaacaggcg

SEQ ID NO: 227932 - DNA, 25 bp, Artificial
  probe
  misc_feature (1)..(25): SEQ ID NO: 4164; WAN024G23_at; Start 151; Stop 175
gatatcaaggaatttctcagcacca

SEQ ID NO: 227933 - DNA, 25 bp, Artificial
  probe
  misc_feature (1)..(25): SEQ ID NO: 4164; WAN024G23_at; Start 177; Stop 201
ggtccgcaccaaaaccagcttcagt

SEQ ID NO: 227934 - DNA, 25 bp, Artificial
  probe
  misc_feature (1)..(25): SEQ ID NO: 4164; WAN024G23_at; Start 203; Stop 227
acagtgtaatcagccaagtgaaggg

SEQ ID NO: 227935 - DNA, 25 bp, Artificial
  probe
  misc_feature (1)..(25): SEQ ID NO: 4164; WAN024G23_at; Start 402; Stop 426
ggtcatagcgataaccaataacgat

SEQ ID NO: 227936 - DNA, 25 bp, Artificial
  probe
  misc_feature (1)..(25): SEQ ID NO: 4164; WAN024G23_at; Start 267; Stop 291
tattggcaaatggaccaccgtgtac

SEQ ID NO: 227937 - DNA, 25 bp, Artificial
  probe
  misc_feature (1)..(25): SEQ ID NO: 4164; WAN024G23_at; Start 217; Stop 241
caagtgaagggctgttgtcgtcgcc

SEQ ID NO: 227938 - DNA, 25 bp, Artificial
  probe
  misc_feature (1)..(25): SEQ ID NO: 4164; WAN024G23_at; Start 464; Stop 488
gccaagcaaagaattgccatgattt

SEQ ID NO: 227939 - DNA, 25 bp, Artificial
  probe
  misc_feature (1)..(25): SEQ ID NO: 4164; WAN024G23_at; Start 17; Stop 41
gcaaaacctgcacgaactgcctcta

SEQ ID NO: 227940 - DNA, 25 bp, Artificial
  probe
  misc_feature (1)..(25): SEQ ID NO: 4164; WAN024G23_at; Start 329; Stop 353
ggcttaatagcatccttcaaaatca

SEQ ID NO: 227941 - DNA, 25 bp, Artificial
  probe
  misc_feature (1)..(25): SEQ ID NO: 4164; WAN024G23_at; Start 240; Stop 264
ccaaaacagagttacagccatgagc

SEQ ID NO: 227942 - DNA, 25 bp, Artificial
  probe
  misc_feature (1)..(25): SEQ ID NO: 4164; WAN024G23_at; Start 78; Stop 102
cattcatcttaagggcacgaagggt

SEQ ID NO: 227943 - DNA, 25 bp, Artificial
  probe
  misc_feature (1)..(25): SEQ ID NO: 4164; WAN024G23_at; Start 445; Stop 469
caagtcctcgatgtccgttgccaag

SEQ ID NO: 227944 - DNA, 25 bp, Artificial
  probe
  misc_feature (1)..(25): SEQ ID NO: 4164; WAN024G23_at; Start 308; Stop 332
taaattgtctgaaccaagtttggct

SEQ ID NO: 227945 - DNA, 25 bp, Artificial
  probe
  misc_feature (1)..(25): SEQ ID NO: 4164; WAN024G23_at; Start 232; Stop 256
tgtcgtcgccaaaacagagttacag

SEQ ID NO: 227946 - DNA, 25 bp, Artificial
  probe
  misc_feature (1)..(25): SEQ ID NO: 4164; WAN024G23_at; Start 186; Stop 210
caaaaccagcttcagtaacagtgta

SEQ ID NO: 227947 - DNA, 25 bp, Artificial
  probe
  misc_feature (1)..(25): SEQ ID NO: 4164; WAN024G23_at; Start 136; Stop 160
caagtttggtgtcttgatatcaagg

SEQ ID NO: 227948 - DNA, 25 bp, Artificial
  probe
  misc_feature (1)..(25): SEQ ID NO: 4164; WAN024G23_at; Start 319; Stop 343
aaccaagtttggcttaatagcatcc

SEQ ID NO: 227949 - DNA, 25 bp, Artificial
  probe
  misc_feature (1)..(25): SEQ ID NO: 4164; WAN024G23_at; Start 389; Stop 413
gaaacaggcgtacggtcatagcgat

SEQ ID NO: 227950 - DNA, 25 bp, Artificial
  probe
  misc_feature (1)..(25): SEQ ID NO: 4164; WAN024G23_at; Start 160; Stop 184
gaatttctcagcaccaaggtccgca

SEQ ID NO: 227951 - DNA, 25 bp, Artificial
  probe
  misc_feature (1)..(25): SEQ ID NO: 4164; WAN024G23_at; Start 297; Stop 321
caggtgtaccgtaaattgtctgaac

SEQ ID NO: 227952 - DNA, 25 bp, Artificial
  probe
  misc_feature (1)..(25): SEQ ID NO: 5164; WAN024G24_at; Start 47; Stop 71
acgatttgagcaatttgtgtttgag

SEQ ID NO: 227953 - DNA, 25 bp, Artificial
  probe
  misc_feature (1)..(25): SEQ ID NO: 5164; WAN024G24_at; Start 177; Stop 201
ctggattttcagcaattgtcttaac

SEQ ID NO: 227954 - DNA, 25 bp, Artificial
  probe
  misc_feature (1)..(25): SEQ ID NO: 5164; WAN024G24_at; Start 188; Stop 212
gcaattgtcttaacaactgtttcgg

SEQ ID NO: 227955 - DNA, 25 bp, Artificial
  probe
  misc_feature (1)..(25): SEQ ID NO: 5164; WAN024G24_at; Start 91; Stop 115
tttgctaccacgatagatttcagtg

SEQ ID NO: 227956 - DNA, 25 bp, Artificial
  probe
  misc_feature (1)..(25): SEQ ID NO: 5164; WAN024G24_at; Start 82; Stop 106
aaagttcactttgctaccacgatag

SEQ ID NO: 227957 - DNA, 25 bp, Artificial
  probe
  misc_feature (1)..(25): SEQ ID NO: 5164; WAN024G24_at; Start 11; Stop 35
gccatacagattggcaatttgtccc

SEQ ID NO: 227958 - DNA, 25 bp, Artificial
  probe
  misc_feature (1)..(25): SEQ ID NO: 5164; WAN024G24_at; Start 198; Stop 222
taacaactgtttcggcaagtgctac

SEQ ID NO: 227959 - DNA, 25 bp, Artificial
  probe
  misc_feature (1)..(25): SEQ ID NO: 5164; WAN024G24_at; Start 15; Stop 39
tacagattggcaatttgtcccaacc

SEQ ID NO: 227960 - DNA, 25 bp, Artificial
  probe
  misc_feature (1)..(25): SEQ ID NO: 5164; WAN024G24_at; Start 141; Stop 165
cagaaaggtcattatcatacaaacg

SEQ ID NO: 227961 - DNA, 25 bp, Artificial
  probe
  misc_feature (1)..(25): SEQ ID NO: 5164; WAN024G24_at; Start 255; Stop 279
ccaattcaactggtacatcgattga

SEQ ID NO: 227962 - DNA, 25 bp, Artificial
  probe
  misc_feature (1)..(25): SEQ ID NO: 5164; WAN024G24_at; Start 106; Stop 130
gatttcagtgacaattttttcaatc

SEQ ID NO: 227963 - DNA, 25 bp, Artificial
  probe
  misc_feature (1)..(25): SEQ ID NO: 5164; WAN024G24_at; Start 211; Stop 235
ggcaagtgctactccaccttctgct

SEQ ID NO: 227964 - DNA, 25 bp, Artificial
  probe
  misc_feature (1)..(25): SEQ ID NO: 5164; WAN024G24_at; Start 205; Stop 229
tgtttcggcaagtgctactccacct

SEQ ID NO: 227965 - DNA, 25 bp, Artificial
  probe
  misc_feature (1)..(25): SEQ ID NO: 5164; WAN024G24_at; Start 2; Stop 26
tgagttttagccatacagattggca

SEQ ID NO: 227966 - DNA, 25 bp, Artificial
  probe
  misc_feature (1)..(25): SEQ ID NO: 5164; WAN024G24_at; Start 94; Stop 118
gctaccacgatagatttcagtgaca

SEQ ID NO: 227967 - DNA, 25 bp, Artificial
  probe
  misc_feature (1)..(25): SEQ ID NO: 5164; WAN024G24_at; Start 156; Stop 180
catacaaacgtttatagttagctgg

SEQ ID NO: 227968 - DNA, 25 bp, Artificial
  probe
  misc_feature (1)..(25): SEQ ID NO: 5164; WAN024G24_at; Start 247; Stop 271
gacactagccaattcaactggtaca

SEQ ID NO: 227969 - DNA, 25 bp, Artificial
  probe
  misc_feature (1)..(25): SEQ ID NO: 5164; WAN024G24_at; Start 18; Stop 42
agattggcaatttgtcccaaccgtt

SEQ ID NO: 227970 - DNA, 25 bp, Artificial
  probe
  misc_feature (1)..(25): SEQ ID NO: 5164; WAN024G24_at; Start 209; Stop 233
tcggcaagtgctactccaccttctg

SEQ ID NO: 227971 - DNA, 25 bp, Artificial
  probe
  misc_feature (1)..(25): SEQ ID NO: 5164; WAN024G24_at; Start 134; Stop 158
tcttggacagaaaggtcattatcat

SEQ ID NO: 227972 - DNA, 25 bp, Artificial
  probe
  misc_feature (1)..(25): SEQ ID NO: 5164; WAN024G24_at; Start 202; Stop 226
aactgtttcggcaagtgctactcca

SEQ ID NO: 227973 - DNA, 25 bp, Artificial
  probe
  misc_feature (1)..(25): SEQ ID NO: 5164; WAN024G24_at; Start 85; Stop 109
gttcactttgctaccacgatagatt

SEQ ID NO: 227974 - DNA, 25 bp, Artificial
  probe
  misc_feature (1)..(25): SEQ ID NO: 5164; WAN024G24_at; Start 239; Stop 263
tcagcccagacactagccaattcaa

SEQ ID NO: 227975 - DNA, 25 bp, Artificial
  probe
  misc_feature (1)..(25): SEQ ID NO: 5164; WAN024G24_at; Start 195; Stop 219
tcttaacaactgtttcggcaagtgc

SEQ ID NO: 227976 - DNA, 25 bp, Artificial
  probe
  misc_feature (1)..(25): SEQ ID NO: 5164; WAN024G24_at; Start 34; Stop 58
ccaaccgttttgaacgatttgagca

SEQ ID NO: 227977 - DNA, 25 bp, Artificial
  probe
  misc_feature (1)..(25): SEQ ID NO: 5164; WAN024G24_at; Start 252; Stop 276
tagccaattcaactggtacatcgat

SEQ ID NO: 227978 - DNA, 25 bp, Artificial
  probe
  misc_feature (1)..(25): SEQ ID NO: 5164; WAN024G24_at; Start 88; Stop 112
cactttgctaccacgatagatttca

SEQ ID NO: 227979 - DNA, 25 bp, Artificial
  probe
  misc_feature (1)..(25): SEQ ID NO: 5164; WAN024G24_at; Start 38; Stop 62
ccgttttgaacgatttgagcaattt

SEQ ID NO: 227980 - DNA, 25 bp, Artificial
  probe
  misc_feature (1)..(25): SEQ ID NO: 5164; WAN024G24_at; Start 143; Stop 167
gaaaggtcattatcatacaaacgtt

SEQ ID NO: 227981 - DNA, 25 bp, Artificial
  probe
  misc_feature (1)..(25): SEQ ID NO: 5164; WAN024G24_at; Start 245; Stop 269
cagacactagccaattcaactggta

SEQ ID NO: 227982 - DNA, 25 bp, Artificial
  probe
  misc_feature (1)..(25): SEQ ID NO: 5164; WAN024G24_at; Start 126; Stop 150
caatcttttcttggacagaaaggtc

SEQ ID NO: 227983 - DNA, 25 bp, Artificial
  probe
  misc_feature (1)..(25): SEQ ID NO: 5164; WAN024G24_at; Start 98; Stop 122
ccacgatagatttcagtgacaattt

SEQ ID NO: 227984 - DNA, 25 bp, Artificial
  probe
  misc_feature (1)..(25): SEQ ID NO: 5164; WAN024G24_at; Start 164; Stop 188
cgtttatagttagctggattttcag

SEQ ID NO: 227985 - DNA, 25 bp, Artificial
  probe
  misc_feature (1)..(25): SEQ ID NO: 5164; WAN024G24_at; Start 226; Stop 250
accttctgctccatcagcccagaca

SEQ ID NO: 227986 - DNA, 25 bp, Artificial
  probe
  misc_feature (1)..(25): SEQ ID NO: 2470; WAN024G25_at; Start 46; Stop 70
gatacgacgttgatcaattcccagc

SEQ ID NO: 227987 - DNA, 25 bp, Artificial
  probe
  misc_feature (1)..(25): SEQ ID NO: 2470; WAN024G25_at; Start 85; Stop 109
caagtggttgtcaatcaaggcagaa

SEQ ID NO: 227988 - DNA, 25 bp, Artificial
  probe
  misc_feature (1)..(25): SEQ ID NO: 2470; WAN024G25_at; Start 114; Stop 138
cattgttggcagttgtaatagcatg

SEQ ID NO: 227989 - DNA, 25 bp, Artificial
  probe
  misc_feature (1)..(25): SEQ ID NO: 2470; WAN024G25_at; Start 99; Stop 123
tcaaggcagaaagggcattgttggc

SEQ ID NO: 227990 - DNA, 25 bp, Artificial
  probe
  misc_feature (1)..(25): SEQ ID NO: 2470; WAN024G25_at; Start 61; Stop 85
aattcccagctcattcccttggtgc

SEQ ID NO: 227991 - DNA, 25 bp, Artificial
  probe
  misc_feature (1)..(25): SEQ ID NO: 2470; WAN024G25_at; Start 253; Stop 277
agcaatcatggttttcttgccaatc

SEQ ID NO: 227992 - DNA, 25 bp, Artificial
  probe
  misc_feature (1)..(25): SEQ ID NO: 2470; WAN024G25_at; Start 216; Stop 240
tgatccccatgactggaccaagaga

SEQ ID NO: 227993 - DNA, 25 bp, Artificial
  probe
  misc_feature (1)..(25): SEQ ID NO: 2470; WAN024G25_at; Start 157; Stop 181
gaggttgatgtcttccattggcaga

SEQ ID NO: 227994 - DNA, 25 bp, Artificial
  probe
  misc_feature (1)..(25): SEQ ID NO: 2470; WAN024G25_at; Start 406; Stop 430
gctgagtttagccttgtactttccg

SEQ ID NO: 227995 - DNA, 25 bp, Artificial
  probe
  misc_feature (1)..(25): SEQ ID NO: 2470; WAN024G25_at; Start 467; Stop 491
tctacaacatcaacaattggcttca

SEQ ID NO: 227996 - DNA, 25 bp, Artificial
  probe
  misc_feature (1)..(25): SEQ ID NO: 2470; WAN024G25_at; Start 452; Stop 476
gaaataccaagtttctctacaacat

SEQ ID NO: 227997 - DNA, 25 bp, Artificial
  probe
  misc_feature (1)..(25): SEQ ID NO: 2470; WAN024G25_at; Start 239; Stop 263
gacggttcgcggatagcaatcatgg

SEQ ID NO: 227998 - DNA, 25 bp, Artificial
  probe
  misc_feature (1)..(25): SEQ ID NO: 2470; WAN024G25_at; Start 28; Stop 52
cacaacgcgtttccagaggatacga

SEQ ID NO: 227999 - DNA, 25 bp, Artificial
  probe
  misc_feature (1)..(25): SEQ ID NO: 2470; WAN024G25_at; Start 172; Stop 196
cattggcagaacttgtgcataccca

SEQ ID NO: 228000 - DNA, 25 bp, Artificial
  probe
  misc_feature (1)..(25): SEQ ID NO: 2470; WAN024G25_at; Start 225; Stop 249
tgactggaccaagagacggttcgcg

SEQ ID NO: 228001 - DNA, 25 bp, Artificial
  probe
  misc_feature (1)..(25): SEQ ID NO: 2470; WAN024G25_at; Start 308; Stop 332
agcgtcgactttccttcacctgcag

SEQ ID NO: 228002 - DNA, 25 bp, Artificial
  probe
  misc_feature (1)..(25): SEQ ID NO: 2470; WAN024G25_at; Start 14; Stop 38
cggtcgttcaagtccacaacgcgtt

SEQ ID NO: 228003 - DNA, 25 bp, Artificial
  probe
  misc_feature (1)..(25): SEQ ID NO: 2470; WAN024G25_at; Start 294; Stop 318
caagaccaatggtaagcgtcgactt

SEQ ID NO: 228004 - DNA, 25 bp, Artificial
  probe
  misc_feature (1)..(25): SEQ ID NO: 2470; WAN024G25_at; Start 388; Stop 412
tgcacgaattttatcaaagctgagt

SEQ ID NO: 228005 - DNA, 25 bp, Artificial
  probe
  misc_feature (1)..(25): SEQ ID NO: 2470; WAN024G25_at; Start 366; Stop 390
taccgactggattgctctcaactgc

SEQ ID NO: 228006 - DNA, 25 bp, Artificial
  probe
  misc_feature (1)..(25): SEQ ID NO: 2470; WAN024G25_at; Start 420; Stop 444
tgtactttccgtacaactccaaatc

SEQ ID NO: 228007 - DNA, 25 bp, Artificial
  probe
  misc_feature (1)..(25): SEQ ID NO: 2470; WAN024G25_at; Start 484; Stop 508
tggcttcaactcaatactctgtgcg

SEQ ID NO: 228008 - DNA, 25 bp, Artificial
  probe
  misc_feature (1)..(25): SEQ ID NO: 2470; WAN024G25_at; Start 34; Stop 58
gcgtttccagaggatacgacgttga

SEQ ID NO: 228009 - DNA, 25 bp, Artificial
  probe
  misc_feature (1)..(25): SEQ ID NO: 2470; WAN024G25_at; Start 498; Stop 522
tactctgtgcgatttcaatatctgt

SEQ ID NO: 228010 - DNA, 25 bp, Artificial
  probe
  misc_feature (1)..(25): SEQ ID NO: 2470; WAN024G25_at; Start 179; Stop 203
agaacttgtgcatacccaccaccag

SEQ ID NO: 228011 - DNA, 25 bp, Artificial
  probe
  misc_feature (1)..(25): SEQ ID NO: 2470; WAN024G25_at; Start 373; Stop 397
tggattgctctcaactgcacgaatt

SEQ ID NO: 228012 - DNA, 25 bp, Artificial
  probe
  misc_feature (1)..(25): SEQ ID NO: 2470; WAN024G25_at; Start 76; Stop 100
cccttggtgcaagtggttgtcaatc

SEQ ID NO: 228013 - DNA, 25 bp, Artificial
  probe
  misc_feature (1)..(25): SEQ ID NO: 2470; WAN024G25_at; Start 351; Stop 375
taaccaagatcaatttaccgactgg

SEQ ID NO: 228014 - DNA, 25 bp, Artificial
  probe
  misc_feature (1)..(25): SEQ ID NO: 2470; WAN024G25_at; Start 282; Stop 306
tcaaggcatccgcaagaccaatggt

SEQ ID NO: 228015 - DNA, 25 bp, Artificial
  probe
  misc_feature (1)..(25): SEQ ID NO: 2470; WAN024G25_at; Start 147; Stop 171
cagtaaagtggaggttgatgtcttc

SEQ ID NO: 228016 - DNA, 25 bp, Artificial
  probe
  misc_feature (1)..(25): SEQ ID NO: 2470; WAN024G25_at; Start 338; Stop 362
gggttgatggcagtaaccaagatca

SEQ ID NO: 228017 - DNA, 25 bp, Artificial
  probe
  misc_feature (1)..(25): SEQ ID NO: 2470; WAN024G25_at; Start 132; Stop 156
tagcatgcatatctccagtaaagtg

SEQ ID NO: 228018 - DNA, 25 bp, Artificial
  probe
  misc_feature (1)..(25): SEQ ID NO: 2470; WAN024G25_at; Start 269; Stop 293
ttgccaatcttgttcaaggcatccg

SEQ ID NO: 228019 - DNA, 25 bp, Artificial
  probe
  misc_feature (1)..(25): SEQ ID NO: 2470; WAN024G25_at; Start 320; Stop 344
ccttcacctgcaggtgttgggttga

SEQ ID NO: 228020 - DNA, 25 bp, Artificial
  probe
  misc_feature (1)..(25): SEQ ID NO: 703; WAN024G26_at; Start 551; Stop 575
ctctaaacggtattccacgtgagga

SEQ ID NO: 228021 - DNA, 25 bp, Artificial
  probe
  misc_feature (1)..(25): SEQ ID NO: 703; WAN024G26_at; Start 139; Stop 163
gcagttgagagcaatccagtcggta

SEQ ID NO: 228022 - DNA, 25 bp, Artificial
  probe
  misc_feature (1)..(25): SEQ ID NO: 703; WAN024G26_at; Start 994; Stop 1018
cgtgcccttaagatgaatggtggtg

SEQ ID NO: 228023 - DNA, 25 bp, Artificial
  probe
  misc_feature (1)..(25): SEQ ID NO: 703; WAN024G26_at; Start 532; Stop 556
actgttggtcttggtggtcctctaa

SEQ ID NO: 228024 - DNA, 25 bp, Artificial
  probe
  misc_feature (1)..(25): SEQ ID NO: 703; WAN024G26_at; Start 829; Stop 853
catggctgtaactctgttttggcga

SEQ ID NO: 228025 - DNA, 25 bp, Artificial
  probe
  misc_feature (1)..(25): SEQ ID NO: 703; WAN024G26_at; Start 798; Stop 822
tgtacacggtggtccatttgccaat

SEQ ID NO: 228026 - DNA, 25 bp, Artificial
  probe
  misc_feature (1)..(25): SEQ ID NO: 703; WAN024G26_at; Start 1106; Stop 1130
agttcggtattccagcagttgtagc

SEQ ID NO: 228027 - DNA, 25 bp, Artificial
  probe
  misc_feature (1)..(25): SEQ ID NO: 703; WAN024G26_at; Start 348; Stop 372
tctgccaatggaagacatcaacctc

SEQ ID NO: 228028 - DNA, 25 bp, Artificial
  probe
  misc_feature (1)..(25): SEQ ID NO: 703; WAN024G26_at; Start 456; Stop 480
tgagctgggaattgatcaacgtcgt

SEQ ID NO: 228029 - DNA, 25 bp, Artificial
  probe
  misc_feature (1)..(25): SEQ ID NO: 703; WAN024G26_at; Start 372; Stop 396
ccactttactggagatatgcatgct

SEQ ID NO: 228030 - DNA, 25 bp, Artificial
  probe
  misc_feature (1)..(25): SEQ ID NO: 703; WAN024G26_at; Start 845; Stop 869
ttttggcgacgacaacagcccttca

SEQ ID NO: 228031 - DNA, 25 bp, Artificial
  probe
  misc_feature (1)..(25): SEQ ID NO: 703; WAN024G26_at; Start 906; Stop 930
tgcggaccttggtgctgagaaattc

SEQ ID NO: 228032 - DNA, 25 bp, Artificial
  probe
  misc_feature (1)..(25): SEQ ID NO: 703; WAN024G26_at; Start 429; Stop 453
gattgacaaccacttgcaccaaggg

SEQ ID NO: 228033 - DNA, 25 bp, Artificial
  probe
  misc_feature (1)..(25): SEQ ID NO: 703; WAN024G26_at; Start 480; Stop 504
tatcctctggaaacgcgttgtggac

SEQ ID NO: 228034 - DNA, 25 bp, Artificial
  probe
  misc_feature (1)..(25): SEQ ID NO: 703; WAN024G26_at; Start 619; Stop 643
tgcttggcaacggacatcgaggact

SEQ ID NO: 228035 - DNA, 25 bp, Artificial
  probe
  misc_feature (1)..(25): SEQ ID NO: 703; WAN024G26_at; Start 267; Stop 291
catgattgctatccgcgaaccgtct

SEQ ID NO: 228036 - DNA, 25 bp, Artificial
  probe
  misc_feature (1)..(25): SEQ ID NO: 703; WAN024G26_at; Start 330; Stop 354
tggtgggtatgcacaagttctgcca

SEQ ID NO: 228037 - DNA, 25 bp, Artificial
  probe
  misc_feature (1)..(25): SEQ ID NO: 703; WAN024G26_at; Start 588; Stop 612
tacagttgcttcagaaatcatggca

SEQ ID NO: 228038 - DNA, 25 bp, Artificial
  probe
  misc_feature (1)..(25): SEQ ID NO: 703; WAN024G26_at; Start 1543; Stop 1567
ccaaaattaggtgcaggcttcatcg

SEQ ID NO: 228039 - DNA, 25 bp, Artificial
  probe
  misc_feature (1)..(25): SEQ ID NO: 703; WAN024G26_at; Start 197; Stop 221
ctgcaggtgaaggaaagtcgacgct

SEQ ID NO: 228040 - DNA, 25 bp, Artificial
  probe
  misc_feature (1)..(25): SEQ ID NO: 703; WAN024G26_at; Start 673; Stop 697
ggttatcgctatgaccgtacgcctg

SEQ ID NO: 228041 - DNA, 25 bp, Artificial
  probe
  misc_feature (1)..(25): SEQ ID NO: 703; WAN024G26_at; Start 283; Stop 307
gaaccgtctcttggtccagtcatgg

SEQ ID NO: 228042 - DNA, 25 bp, Artificial
  probe
  misc_feature (1)..(25): SEQ ID NO: 703; WAN024G26_at; Start 1494; Stop 1518
tgcgcttggagcaccagaaaacttt

SEQ ID NO: 228043 - DNA, 25 bp, Artificial
  probe
  misc_feature (1)..(25): SEQ ID NO: 703; WAN024G26_at; Start 888; Stop 912
tactgaagctggttttggtgcggac

SEQ ID NO: 228044 - DNA, 25 bp, Artificial
  probe
  misc_feature (1)..(25): SEQ ID NO: 703; WAN024G26_at; Start 1638; Stop 1662
tgaaagcgatggaactgtactaggc

SEQ ID NO: 228045 - DNA, 25 bp, Artificial
  probe
  misc_feature (1)..(25): SEQ ID NO: 703; WAN024G26_at; Start 21; Stop 45
cgcacagagtattgagttgaagcca

SEQ ID NO: 228046 - DNA, 25 bp, Artificial
  probe
  misc_feature (1)..(25): SEQ ID NO: 703; WAN024G26_at; Start 1600; Stop 1624
ggtcttccaaaacgtccagcagctc

SEQ ID NO: 228047 - DNA, 25 bp, Artificial
  probe
  misc_feature (1)..(25): SEQ ID NO: 703; WAN024G26_at; Start 1049; Stop 1073
tagaggcagttcgtgcaggttttgc

SEQ ID NO: 228048 - DNA, 25 bp, Artificial
  probe
  misc_feature (1)..(25): SEQ ID NO: 703; WAN024G26_at; Start 1364; Stop 1388
tctatcgtggtagcaaagtgaactt

SEQ ID NO: 228049 - DNA, 25 bp, Artificial
  probe
  misc_feature (1)..(25): SEQ ID NO: 703; WAN024G26_at; Start 635; Stop 659
tcgaggacttgaaacgtcgtttggc

SEQ ID NO: 228050 - DNA, 25 bp, Artificial
  probe
  misc_feature (1)..(25): SEQ ID NO: 703; WAN024G26_at; Start 1069; Stop 1093
tttgctaacttgaaacgccacgttg

SEQ ID NO: 228051 - DNA, 25 bp, Artificial
  probe
  misc_feature (1)..(25): SEQ ID NO: 703; WAN024G26_at; Start 222; Stop 246
taccattggtcttgcggatgccttg

SEQ ID NO: 228052 - DNA, 25 bp, Artificial
  probe
  misc_feature (1)..(25): SEQ ID NO: 703; WAN024G26_at; Start 1574; Stop 1598
taactggtgatgttatgaccatgcc

SEQ ID NO: 228053 - DNA, 25 bp, Artificial
  probe
  misc_feature (1)..(25): SEQ ID NO: 703; WAN024G26_at; Start 975; Stop 999
tgttattgtcgcaacccttcgtgcc

SEQ ID NO: 228054 - DNA, 25 bp, Artificial
  probe
  misc_feature (1)..(25): SEQ ID NO: 5236; WAN024G27_at; Start 191; Stop 215
ggtccaatccctttcaagctggaaa

SEQ ID NO: 228055 - DNA, 25 bp, Artificial
  probe
  misc_feature (1)..(25): SEQ ID NO: 5236; WAN024G27_at; Start 156; Stop 180
taaaagcaatactggaaatggctcc

SEQ ID NO: 228056 - DNA, 25 bp, Artificial
  probe
  misc_feature (1)..(25): SEQ ID NO: 5236; WAN024G27_at; Start 20; Stop 44
cgatccggattaatcaagatctcca

SEQ ID NO: 228057 - DNA, 25 bp, Artificial
  probe
  misc_feature (1)..(25): SEQ ID NO: 5236; WAN024G27_at; Start 288; Stop 312
gaactcgagaataatagcccaagcc

SEQ ID NO: 228058 - DNA, 25 bp, Artificial
  probe
  misc_feature (1)..(25): SEQ ID NO: 5236; WAN024G27_at; Start 2; Stop 26
tgattaaaatcacccggacgatccg

SEQ ID NO: 228059 - DNA, 25 bp, Artificial
  probe
  misc_feature (1)..(25): SEQ ID NO: 5236; WAN024G27_at; Start 30; Stop 54
taatcaagatctccatcattgcctg

SEQ ID NO: 228060 - DNA, 25 bp, Artificial
  probe
  misc_feature (1)..(25): SEQ ID NO: 5236; WAN024G27_at; Start 134; Stop 158
tctacagctggctcaggcaagttaa

SEQ ID NO: 228061 - DNA, 25 bp, Artificial
  probe
  misc_feature (1)..(25): SEQ ID NO: 5236; WAN024G27_at; Start 69; Stop 93
tacttggaatcccaatatcgtggtt

SEQ ID NO: 228062 - DNA, 25 bp, Artificial
  probe
  misc_feature (1)..(25): SEQ ID NO: 5236; WAN024G27_at; Start 252; Stop 276
cagtcataatctgctgggctgcagc

SEQ ID NO: 228063 - DNA, 25 bp, Artificial
  probe
  misc_feature (1)..(25): SEQ ID NO: 5236; WAN024G27_at; Start 222; Stop 246
cataggtatttggaaattggccacc

SEQ ID NO: 228064 - DNA, 25 bp, Artificial
  probe
  misc_feature (1)..(25): SEQ ID NO: 5236; WAN024G27_at; Start 284; Stop 308
ttgcgaactcgagaataatagccca

SEQ ID NO: 228065 - DNA, 25 bp, Artificial
  probe
  misc_feature (1)..(25): SEQ ID NO: 5236; WAN024G27_at; Start 178; Stop 202
tcctgctgtgtaaggtccaatccct

SEQ ID NO: 228066 - DNA, 25 bp, Artificial
  probe
  misc_feature (1)..(25): SEQ ID NO: 5236; WAN024G27_at; Start 110; Stop 134
gccaagacccgcatgacattaccat

SEQ ID NO: 228067 - DNA, 25 bp, Artificial
  probe
  misc_feature (1)..(25): SEQ ID NO: 5236; WAN024G27_at; Start 259; Stop 283
aatctgctgggctgcagcctgcata

SEQ ID NO: 228068 - DNA, 25 bp, Artificial
  probe
  misc_feature (1)..(25): SEQ ID NO: 5236; WAN024G27_at; Start 34; Stop 58
caagatctccatcattgcctgaaaa

SEQ ID NO: 228069 - DNA, 25 bp, Artificial
  probe
  misc_feature (1)..(25): SEQ ID NO: 5236; WAN024G27_at; Start 171; Stop 195
aaatggctcctgctgtgtaaggtcc

SEQ ID NO: 228070 - DNA, 25 bp, Artificial
  probe
  misc_feature (1)..(25): SEQ ID NO: 5236; WAN024G27_at; Start 239; Stop 263
tggccaccaaagtcagtcataatct

SEQ ID NO: 228071 - DNA, 25 bp, Artificial
  probe
  misc_feature (1)..(25): SEQ ID NO: 5236; WAN024G27_at; Start 140; Stop 164
gctggctcaggcaagttaaaagcaa

SEQ ID NO: 228072 - DNA, 25 bp, Artificial
  probe
  misc_feature (1)..(25): SEQ ID NO: 5236; WAN024G27_at; Start 15; Stop 39
ccggacgatccggattaatcaagat

SEQ ID NO: 228073 - DNA, 25 bp, Artificial
  probe
  misc_feature (1)..(25): SEQ ID NO: 5236; WAN024G27_at; Start 78; Stop 102
tcccaatatcgtggttgacttcaaa

SEQ ID NO: 228074 - DNA, 25 bp, Artificial
  probe
  misc_feature (1)..(25): SEQ ID NO: 5236; WAN024G27_at; Start 42; Stop 66
ccatcattgcctgaaaaatttttcg

SEQ ID NO: 228075 - DNA, 25 bp, Artificial
  probe
  misc_feature (1)..(25): SEQ ID NO: 5236; WAN024G27_at; Start 93; Stop 117
tgacttcaaacagacgcgccaagac

SEQ ID NO: 228076 - DNA, 25 bp, Artificial
  probe
  misc_feature (1)..(25): SEQ ID NO: 5236; WAN024G27_at; Start 232; Stop 256
tggaaattggccaccaaagtcagtc

SEQ ID NO: 228077 - DNA, 25 bp, Artificial
  probe
  misc_feature (1)..(25): SEQ ID NO: 5236; WAN024G27_at; Start 120; Stop 144
gcatgacattaccatctacagctgg

SEQ ID NO: 228078 - DNA, 25 bp, Artificial
  probe
  misc_feature (1)..(25): SEQ ID NO: 5236; WAN024G27_at; Start 129; Stop 153
taccatctacagctggctcaggcaa

SEQ ID NO: 228079 - DNA, 25 bp, Artificial
  probe
  misc_feature (1)..(25): SEQ ID NO: 5236; WAN024G27_at; Start 61; Stop 85
ttttcgattacttggaatcccaata

SEQ ID NO: 228080 - DNA, 25 bp, Artificial
  probe
  misc_feature (1)..(25): SEQ ID NO: 5236; WAN024G27_at; Start 295; Stop 319
agaataatagcccaagccctcccaa

SEQ ID NO: 228081 - DNA, 25 bp, Artificial
  probe
  misc_feature (1)..(25): SEQ ID NO: 5236; WAN024G27_at; Start 90; Stop 114
ggttgacttcaaacagacgcgccaa

SEQ ID NO: 228082 - DNA, 25 bp, Artificial
  probe
  misc_feature (1)..(25): SEQ ID NO: 5236; WAN024G27_at; Start 246; Stop 270
caaagtcagtcataatctgctgggc

SEQ ID NO: 228083 - DNA, 25 bp, Artificial
  probe
  misc_feature (1)..(25): SEQ ID NO: 5236; WAN024G27_at; Start 205; Stop 229
caagctggaaattccttcataggta

SEQ ID NO: 228084 - DNA, 25 bp, Artificial
  probe
  misc_feature (1)..(25): SEQ ID NO: 5236; WAN024G27_at; Start 162; Stop 186
caatactggaaatggctcctgctgt

SEQ ID NO: 228085 - DNA, 25 bp, Artificial
  probe
  misc_feature (1)..(25): SEQ ID NO: 5236; WAN024G27_at; Start 86; Stop 110
tcgtggttgacttcaaacagacgcg

SEQ ID NO: 228086 - DNA, 25 bp, Artificial
  probe
  misc_feature (1)..(25): SEQ ID NO: 5236; WAN024G27_at; Start 272; Stop 296
gcagcctgcatattgcgaactcgag

SEQ ID NO: 228087 - DNA, 25 bp, Artificial
  probe
  misc_feature (1)..(25): SEQ ID NO: 5236; WAN024G27_at; Start 146; Stop 170
tcaggcaagttaaaagcaatactgg

SEQ ID NO: 228088 - DNA, 25 bp, Artificial
  probe
  misc_feature (1)..(25): SEQ ID NO: 3459; WAN024G28_at; Start 929; Stop 953
ccagtccagaagagagtttccagca

SEQ ID NO: 228089 - DNA, 25 bp, Artificial
  probe
  misc_feature (1)..(25): SEQ ID NO: 3459; WAN024G28_at; Start 664; Stop 688
ccagtcaaggactttagtgcggcat

SEQ ID NO: 228090 - DNA, 25 bp, Artificial
  probe
  misc_feature (1)..(25): SEQ ID NO: 3459; WAN024G28_at; Start 998; Stop 1022
cagtccagcatgtttttagtcatcg

SEQ ID NO: 228091 - DNA, 25 bp, Artificial
  probe
  misc_feature (1)..(25): SEQ ID NO: 3459; WAN024G28_at; Start 645; Stop 669
tcccagacctgaagaaagcccagtc

SEQ ID NO: 228092 - DNA, 25 bp, Artificial
  probe
  misc_feature (1)..(25): SEQ ID NO: 3459; WAN024G28_at; Start 865; Stop 889
ttttcgcaagaagagcagtttgacc

SEQ ID NO: 228093 - DNA, 25 bp, Artificial
  probe
  misc_feature (1)..(25): SEQ ID NO: 3459; WAN024G28_at; Start 509; Stop 533
tcaaccacgatattgggattccaag

SEQ ID NO: 228094 - DNA, 25 bp, Artificial
  probe
  misc_feature (1)..(25): SEQ ID NO: 3459; WAN024G28_at; Start 627; Stop 651
tattgagtctcctgtaaatcccaga

SEQ ID NO: 228095 - DNA, 25 bp, Artificial
  probe
  misc_feature (1)..(25): SEQ ID NO: 3459; WAN024G28_at; Start 405; Stop 429
gattggaccttacacagcaggagcc

SEQ ID NO: 228096 - DNA, 25 bp, Artificial
  probe
  misc_feature (1)..(25): SEQ ID NO: 3459; WAN024G28_at; Start 181; Stop 205
cagaccagggtggatacagttatcc

SEQ ID NO: 228097 - DNA, 25 bp, Artificial
  probe
  misc_feature (1)..(25): SEQ ID NO: 3459; WAN024G28_at; Start 237; Stop 261
aactgtcgaaagtctggcaactgcg

SEQ ID NO: 228098 - DNA, 25 bp, Artificial
  probe
  misc_feature (1)..(25): SEQ ID NO: 3459; WAN024G28_at; Start 419; Stop 443
cagcaggagccatttccagtattgc

SEQ ID NO: 228099 - DNA, 25 bp, Artificial
  probe
  misc_feature (1)..(25): SEQ ID NO: 3459; WAN024G28_at; Start 600; Stop 624
tcaagccttgatggacttagggtct

SEQ ID NO: 228100 - DNA, 25 bp, Artificial
  probe
  misc_feature (1)..(25): SEQ ID NO: 3459; WAN024G28_at; Start 447; Stop 471
taacttgcctgagccagctgtagat

SEQ ID NO: 228101 - DNA, 25 bp, Artificial
  probe
  misc_feature (1)..(25): SEQ ID NO: 3459; WAN024G28_at; Start 693; Stop 717
gaatggaaccatggaccgttatcca

SEQ ID NO: 228102 - DNA, 25 bp, Artificial
  probe
  misc_feature (1)..(25): SEQ ID NO: 3459; WAN024G28_at; Start 166; Stop 190
gaaatcatgcttcagcagaccaggg

SEQ ID NO: 228103 - DNA, 25 bp, Artificial
  probe
  misc_feature (1)..(25): SEQ ID NO: 3459; WAN024G28_at; Start 807; Stop 831
tgaaagcgaaaagctcttggcaggt

SEQ ID NO: 228104 - DNA, 25 bp, Artificial
  probe
  misc_feature (1)..(25): SEQ ID NO: 3459; WAN024G28_at; Start 50; Stop 74
tgtggccggaggagaaagtcatttc

SEQ ID NO: 228105 - DNA, 25 bp, Artificial
  probe
  misc_feature (1)..(25): SEQ ID NO: 3459; WAN024G28_at; Start 490; Stop 514
ttggcgcgtctgtttgaagtcaacc

SEQ ID NO: 228106 - DNA, 25 bp, Artificial
  probe
  misc_feature (1)..(25): SEQ ID NO: 3459; WAN024G28_at; Start 296; Stop 320
tgggctattattctcgagttcgcaa

SEQ ID NO: 228107 - DNA, 25 bp, Artificial
  probe
  misc_feature (1)..(25): SEQ ID NO: 3459; WAN024G28_at; Start 382; Stop 406
gaaggaatttccagcttgaaaggga

SEQ ID NO: 228108 - DNA, 25 bp, Artificial
  probe
  misc_feature (1)..(25): SEQ ID NO: 3459; WAN024G28_at; Start 886; Stop 910
gacctctttcatcaggttgcggaag

SEQ ID NO: 228109 - DNA, 25 bp, Artificial
  probe
  misc_feature (1)..(25): SEQ ID NO: 3459; WAN024G28_at; Start 327; Stop 351
ggctgcagcccagcagattatgact

SEQ ID NO: 228110 - DNA, 25 bp, Artificial
  probe
  misc_feature (1)..(25): SEQ ID NO: 3459; WAN024G28_at; Start 678; Stop 702
tagtgcggcatatcagaatggaacc

SEQ ID NO: 228111 - DNA, 25 bp, Artificial
  probe
  misc_feature (1)..(25): SEQ ID NO: 3459; WAN024G28_at; Start 311; Stop 335
gagttcgcaatatgcaggctgcagc

SEQ ID NO: 228112 - DNA, 25 bp, Artificial
  probe
  misc_feature (1)..(25): SEQ ID NO: 3459; WAN024G28_at; Start 1165; Stop 1189
caagccaacttagacagtagccaag

SEQ ID NO: 228113 - DNA, 25 bp, Artificial
  probe
  misc_feature (1)..(25): SEQ ID NO: 3459; WAN024G28_at; Start 122; Stop 146
tgccttggaggagaagtaaaaatcc

SEQ ID NO: 228114 - DNA, 25 bp, Artificial
  probe
  misc_feature (1)..(25): SEQ ID NO: 3459; WAN024G28_at; Start 35; Stop 59
aatacggtatcgtcatgtggccgga

SEQ ID NO: 228115 - DNA, 25 bp, Artificial
  probe
  misc_feature (1)..(25): SEQ ID NO: 3459; WAN024G28_at; Start 151; Stop 175
cacatctgggtatctgaaatcatgc

SEQ ID NO: 228116 - DNA, 25 bp, Artificial
  probe
  misc_feature (1)..(25): SEQ ID NO: 3459; WAN024G28_at; Start 1094; Stop 1118
ggctttcaccagaagaattcaagaa

SEQ ID NO: 228117 - DNA, 25 bp, Artificial
  probe
  misc_feature (1)..(25): SEQ ID NO: 3459; WAN024G28_at; Start 342; Stop 366
gattatgactgactttggtggccaa

SEQ ID NO: 228118 - DNA, 25 bp, Artificial
  probe
  misc_feature (1)..(25): SEQ ID NO: 3459; WAN024G28_at; Start 84; Stop 108
gaaacttctcgcttggtatgatgaa

SEQ ID NO: 228119 - DNA, 25 bp, Artificial
  probe
  misc_feature (1)..(25): SEQ ID NO: 3459; WAN024G28_at; Start 1043; Stop 1067
tagcaggtcaggtgagtgacttcca

SEQ ID NO: 228120 - DNA, 25 bp, Artificial
  probe
  misc_feature (1)..(25): SEQ ID NO: 3459; WAN024G28_at; Start 475; Stop 499
aatgtcatgcgggtcttggcgcgtc

SEQ ID NO: 228121 - DNA, 25 bp, Artificial
  probe
  misc_feature (1)..(25): SEQ ID NO: 3459; WAN024G28_at; Start 944; Stop 968
gtttccagcaggactatgacctaga

SEQ ID NO: 228122 - DNA, 25 bp, Artificial
  probe
  misc_feature (1)..(25): SEQ ID NO: 835; WAN024G29_at; Start 231; Stop 255
gcgtgatgacttgacctgtatgcga

SEQ ID NO: 228123 - DNA, 25 bp, Artificial
  probe
  misc_feature (1)..(25): SEQ ID NO: 835; WAN024G29_at; Start 153; Stop 177
gacgtcgtacagtcacatcaactgt

SEQ ID NO: 228124 - DNA, 25 bp, Artificial
  probe
  misc_feature (1)..(25): SEQ ID NO: 835; WAN024G29_at; Start 93; Stop 117
caccacggcgcgtcaagatatactc

SEQ ID NO: 228125 - DNA, 25 bp, Artificial
  probe
  misc_feature (1)..(25): SEQ ID NO: 835; WAN024G29_at; Start 65; Stop 89
caagcattatttctcatgtaatacc

SEQ ID NO: 228126 - DNA, 25 bp, Artificial
  probe
  misc_feature (1)..(25): SEQ ID NO: 835; WAN024G29_at; Start 53; Stop 77
gtttcagtaaatcaagcattatttc

SEQ ID NO: 228127 - DNA, 25 bp, Artificial
  probe
  misc_feature (1)..(25): SEQ ID NO: 835; WAN024G29_at; Start 227; Stop 251
tcgcgcgtgatgacttgacctgtat

SEQ ID NO: 228128 - DNA, 25 bp, Artificial
  probe
  misc_feature (1)..(25): SEQ ID NO: 835; WAN024G29_at; Start 119; Stop 143
ggtcggctgggcgtatcttcaatct

SEQ ID NO: 228129 - DNA, 25 bp, Artificial
  probe
  misc_feature (1)..(25): SEQ ID NO: 835; WAN024G29_at; Start 25; Stop 49
aagataaaatctctggtaaaaatgg

SEQ ID NO: 228130 - DNA, 25 bp, Artificial
  probe
  misc_feature (1)..(25): SEQ ID NO: 835; WAN024G29_at; Start 146; Stop 170
tcacgcagacgtcgtacagtcacat

SEQ ID NO: 228131 - DNA, 25 bp, Artificial
  probe
  misc_feature (1)..(25): SEQ ID NO: 835; WAN024G29_at; Start 200; Stop 224
taaccccagacagtctcaagcaagt

SEQ ID NO: 228132 - DNA, 25 bp, Artificial
  probe
  misc_feature (1)..(25): SEQ ID NO: 835; WAN024G29_at; Start 45; Stop 69
aatggtttgtttcagtaaatcaagc

SEQ ID NO: 228133 - DNA, 25 bp, Artificial
  probe
  misc_feature (1)..(25): SEQ ID NO: 835; WAN024G29_at; Start 106; Stop 130
caagatatactctggtcggctgggc

SEQ ID NO: 228134 - DNA, 25 bp, Artificial
  probe
  misc_feature (1)..(25): SEQ ID NO: 835; WAN024G29_at; Start 101; Stop 125
cgcgtcaagatatactctggtcggc

SEQ ID NO: 228135 - DNA, 25 bp, Artificial
  probe
  misc_feature (1)..(25): SEQ ID NO: 835; WAN024G29_at; Start 194; Stop 218
tagtcataaccccagacagtctcaa

SEQ ID NO: 228136 - DNA, 25 bp, Artificial
  probe
  misc_feature (1)..(25): SEQ ID NO: 835; WAN024G29_at; Start 212; Stop 236
gtctcaagcaagtgttcgcgcgtga

SEQ ID NO: 228137 - DNA, 25 bp, Artificial
  probe
  misc_feature (1)..(25): SEQ ID NO: 835; WAN024G29_at; Start 17; Stop 41
tcaggataaagataaaatctctggt

SEQ ID NO: 228138 - DNA, 25 bp, Artificial
  probe
  misc_feature (1)..(25): SEQ ID NO: 835; WAN024G29_at; Start 185; Stop 209
tcaccaaaatagtcataaccccaga

SEQ ID NO: 228139 - DNA, 25 bp, Artificial
  probe
  misc_feature (1)..(25): SEQ ID NO: 835; WAN024G29_at; Start 205; Stop 229
ccagacagtctcaagcaagtgttcg

SEQ ID NO: 228140 - DNA, 25 bp, Artificial
  probe
  misc_feature (1)..(25): SEQ ID NO: 835; WAN024G29_at; Start 237; Stop 261
tgacttgacctgtatgcgatgctaa

SEQ ID NO: 228141 - DNA, 25 bp, Artificial
  probe
  misc_feature (1)..(25): SEQ ID NO: 835; WAN024G29_at; Start 78; Stop 102
tcatgtaataccctacaccacggcg

SEQ ID NO: 228142 - DNA, 25 bp, Artificial
  probe
  misc_feature (1)..(25): SEQ ID NO: 835; WAN024G29_at; Start 132; Stop 156
tatcttcaatcttctcacgcagacg

SEQ ID NO: 228143 - DNA, 25 bp, Artificial
  probe
  misc_feature (1)..(25): SEQ ID NO: 835; WAN024G29_at; Start 179; Stop 203
cggacatcaccaaaatagtcataac

SEQ ID NO: 228144 - DNA, 25 bp, Artificial
  probe
  misc_feature (1)..(25): SEQ ID NO: 835; WAN024G29_at; Start 80; Stop 104
atgtaataccctacaccacggcgcg

SEQ ID NO: 228145 - DNA, 25 bp, Artificial
  probe
  misc_feature (1)..(25): SEQ ID NO: 835; WAN024G29_at; Start 141; Stop 165
tcttctcacgcagacgtcgtacagt

SEQ ID NO: 228146 - DNA, 25 bp, Artificial
  probe
  misc_feature (1)..(25): SEQ ID NO: 835; WAN024G29_at; Start 34; Stop 58
tctctggtaaaaatggtttgtttca

SEQ ID NO: 228147 - DNA, 25 bp, Artificial
  probe
  misc_feature (1)..(25): SEQ ID NO: 835; WAN024G29_at; Start 124; Stop 148
gctgggcgtatcttcaatcttctca

SEQ ID NO: 228148 - DNA, 25 bp, Artificial
  probe
  misc_feature (1)..(25): SEQ ID NO: 835; WAN024G29_at; Start 2; Stop 26
tgaaacctaacaaaatcaggataaa

SEQ ID NO: 228149 - DNA, 25 bp, Artificial
  probe
  misc_feature (1)..(25): SEQ ID NO: 835; WAN024G29_at; Start 224; Stop 248
tgttcgcgcgtgatgacttgacctg

SEQ ID NO: 228150 - DNA, 25 bp, Artificial
  probe
  misc_feature (1)..(25): SEQ ID NO: 835; WAN024G29_at; Start 96; Stop 120
cacggcgcgtcaagatatactctgg

SEQ ID NO: 228151 - DNA, 25 bp, Artificial
  probe
  misc_feature (1)..(25): SEQ ID NO: 835; WAN024G29_at; Start 109; Stop 133
gatatactctggtcggctgggcgta

SEQ ID NO: 228152 - DNA, 25 bp, Artificial
  probe
  misc_feature (1)..(25): SEQ ID NO: 835; WAN024G29_at; Start 113; Stop 137
tactctggtcggctgggcgtatctt

SEQ ID NO: 228153 - DNA, 25 bp, Artificial
  probe
  misc_feature (1)..(25): SEQ ID NO: 835; WAN024G29_at; Start 137; Stop 161
tcaatcttctcacgcagacgtcgta

SEQ ID NO: 228154 - DNA, 25 bp, Artificial
  probe
  misc_feature (1)..(25): SEQ ID NO: 835; WAN024G29_at; Start 149; Stop 173
cgcagacgtcgtacagtcacatcaa

SEQ ID NO: 228155 - DNA, 25 bp, Artificial
  probe
  misc_feature (1)..(25): SEQ ID NO: 835; WAN024G29_at; Start 208; Stop 232
gacagtctcaagcaagtgttcgcgc

SEQ ID NO: 228156 - DNA, 25 bp, Artificial
  probe
  misc_feature (1)..(25): SEQ ID NO: 2119; WAN024G2A_at; Start 679; Stop 703
gtaaaatcctatcttgaagccttgg

SEQ ID NO: 228157 - DNA, 25 bp, Artificial
  probe
  misc_feature (1)..(25): SEQ ID NO: 2119; WAN024G2A_at; Start 539; Stop 563
ccttgatacgtcgagagtctggctt

SEQ ID NO: 228158 - DNA, 25 bp, Artificial
  probe
  misc_feature (1)..(25): SEQ ID NO: 2119; WAN024G2A_at; Start 756; Stop 780
tgatgagaccaaccgtatgatgcgc

SEQ ID NO: 228159 - DNA, 25 bp, Artificial
  probe
  misc_feature (1)..(25): SEQ ID NO: 2119; WAN024G2A_at; Start 1228; Stop 1252
caacataagggctttatttgggcca

SEQ ID NO: 228160 - DNA, 25 bp, Artificial
  probe
  misc_feature (1)..(25): SEQ ID NO: 2119; WAN024G2A_at; Start 726; Stop 750
tgtagcaccagactttatcaaggtt

SEQ ID NO: 228161 - DNA, 25 bp, Artificial
  probe
  misc_feature (1)..(25): SEQ ID NO: 2119; WAN024G2A_at; Start 1085; Stop 1109
tatccatttctgaccacggtttggg

SEQ ID NO: 228162 - DNA, 25 bp, Artificial
  probe
  misc_feature (1)..(25): SEQ ID NO: 2119; WAN024G2A_at; Start 183; Stop 207
tatgcaaggtgggtctgaaatcacc

SEQ ID NO: 228163 - DNA, 25 bp, Artificial
  probe
  misc_feature (1)..(25): SEQ ID NO: 2119; WAN024G2A_at; Start 773; Stop 797
tgatgcgcatggtgacggatctcct

SEQ ID NO: 228164 - DNA, 25 bp, Artificial
  probe
  misc_feature (1)..(25): SEQ ID NO: 2119; WAN024G2A_at; Start 467; Stop 491
cccaaagtccagaattgttgctaga

SEQ ID NO: 228165 - DNA, 25 bp, Artificial
  probe
  misc_feature (1)..(25): SEQ ID NO: 2119; WAN024G2A_at; Start 452; Stop 476
tgcgtgatttgattacccaaagtcc

SEQ ID NO: 228166 - DNA, 25 bp, Artificial
  probe
  misc_feature (1)..(25): SEQ ID NO: 2119; WAN024G2A_at; Start 1110; Stop 1134
gattcctaagcaggatttaccacgt

SEQ ID NO: 228167 - DNA, 25 bp, Artificial
  probe
  misc_feature (1)..(25): SEQ ID NO: 2119; WAN024G2A_at; Start 1150; Stop 1174
tatcgtgtggatcgtgctagaagtc

SEQ ID NO: 228168 - DNA, 25 bp, Artificial
  probe
  misc_feature (1)..(25): SEQ ID NO: 2119; WAN024G2A_at; Start 1053; Stop 1077
cagaatgaagacaactgaagaccag

SEQ ID NO: 228169 - DNA, 25 bp, Artificial
  probe
  misc_feature (1)..(25): SEQ ID NO: 2119; WAN024G2A_at; Start 216; Stop 240
caataatttgaatgacttgtcggag

SEQ ID NO: 228170 - DNA, 25 bp, Artificial
  probe
  misc_feature (1)..(25): SEQ ID NO: 2119; WAN024G2A_at; Start 883; Stop 907
cgttttgacaagatgaaaggacagg

SEQ ID NO: 228171 - DNA, 25 bp, Artificial
  probe
  misc_feature (1)..(25): SEQ ID NO: 2119; WAN024G2A_at; Start 1014; Stop 1038
tgctattaagtattcgccagatggg

SEQ ID NO: 228172 - DNA, 25 bp, Artificial
  probe
  misc_feature (1)..(25): SEQ ID NO: 2119; WAN024G2A_at; Start 485; Stop 509
tgctagattcccaagatatcaatgg

SEQ ID NO: 228173 - DNA, 25 bp, Artificial
  probe
  misc_feature (1)..(25): SEQ ID NO: 2119; WAN024G2A_at; Start 264; Stop 288
tctagaacaagagagtaagaggcta

SEQ ID NO: 228174 - DNA, 25 bp, Artificial
  probe
  misc_feature (1)..(25): SEQ ID NO: 2119; WAN024G2A_at; Start 837; Stop 861
tgtggaactgattaacttcactgct

SEQ ID NO: 228175 - DNA, 25 bp, Artificial
  probe
  misc_feature (1)..(25): SEQ ID NO: 2119; WAN024G2A_at; Start 661; Stop 685
cggactcctctgactagcgtaaaat

SEQ ID NO: 228176 - DNA, 25 bp, Artificial
  probe
  misc_feature (1)..(25): SEQ ID NO: 2119; WAN024G2A_at; Start 1136; Stop 1160
tctttgaccgtttctatcgtgtgga

SEQ ID NO: 228177 - DNA, 25 bp, Artificial
  probe
  misc_feature (1)..(25): SEQ ID NO: 2119; WAN024G2A_at; Start 1196; Stop 1220
taggactgtctatcgctaaagaaat

SEQ ID NO: 228178 - DNA, 25 bp, Artificial
  probe
  misc_feature (1)..(25): SEQ ID NO: 2119; WAN024G2A_at; Start 711; Stop 735
ggctttgtgtgaaactgtagcacca

SEQ ID NO: 228179 - DNA, 25 bp, Artificial
  probe
  misc_feature (1)..(25): SEQ ID NO: 2119; WAN024G2A_at; Start 519; Stop 543
gaaccttcgagttcgctttgccttg

SEQ ID NO: 228180 - DNA, 25 bp, Artificial
  probe
  misc_feature (1)..(25): SEQ ID NO: 2119; WAN024G2A_at; Start 75; Stop 99
tgttgtgaccctcttattactggaa

SEQ ID NO: 228181 - DNA, 25 bp, Artificial
  probe
  misc_feature (1)..(25): SEQ ID NO: 2119; WAN024G2A_at; Start 1242; Stop 1266
tatttgggccaagagtgaatacggc

SEQ ID NO: 228182 - DNA, 25 bp, Artificial
  probe
  misc_feature (1)..(25): SEQ ID NO: 2119; WAN024G2A_at; Start 976; Stop 1000
gataagatgacgcaggttgtcgaca

SEQ ID NO: 228183 - DNA, 25 bp, Artificial
  probe
  misc_feature (1)..(25): SEQ ID NO: 2119; WAN024G2A_at; Start 1254; Stop 1278
gagtgaatacggcaagggttcaacc

SEQ ID NO: 228184 - DNA, 25 bp, Artificial
  probe
  misc_feature (1)..(25): SEQ ID NO: 2119; WAN024G2A_at; Start 1165; Stop 1189
gctagaagtcgtgcacaaggtggta

SEQ ID NO: 228185 - DNA, 25 bp, Artificial
  probe
  misc_feature (1)..(25): SEQ ID NO: 2119; WAN024G2A_at; Start 641; Stop 665
ccaatgttagccatgagttacggac

SEQ ID NO: 228186 - DNA, 25 bp, Artificial
  probe
  misc_feature (1)..(25): SEQ ID NO: 2119; WAN024G2A_at; Start 156; Stop 180
tgcaggagattattccaaggttctt

SEQ ID NO: 228187 - DNA, 25 bp, Artificial
  probe
  misc_feature (1)..(25): SEQ ID NO: 2119; WAN024G2A_at; Start 584; Stop 608
ttttgcatgatacgacggagcagga

SEQ ID NO: 228188 - DNA, 25 bp, Artificial
  probe
  misc_feature (1)..(25): SEQ ID NO: 2119; WAN024G2A_at; Start 237; Stop 261
ggaggttattcgtctcactcaggaa

SEQ ID NO: 228189 - DNA, 25 bp, Artificial
  probe
  misc_feature (1)..(25): SEQ ID NO: 2119; WAN024G2A_at; Start 1178; Stop 1202
cacaaggtggtacaggtctaggact

SEQ ID NO: 228190 - DNA, 25 bp, Artificial
  probe
  misc_feature (1)..(25): SEQ ID NO: 611; WAN024G2B_at; Start 110; Stop 134
cgctagagcaatttgaagcagagca

SEQ ID NO: 228191 - DNA, 25 bp, Artificial
  probe
  misc_feature (1)..(25): SEQ ID NO: 611; WAN024G2B_at; Start 11; Stop 35
tactaattgtagatgatgagaaacc

SEQ ID NO: 228192 - DNA, 25 bp, Artificial
  probe
  misc_feature (1)..(25): SEQ ID NO: 611; WAN024G2B_at; Start 124; Stop 148
gaagcagagcaaccagatattatta

SEQ ID NO: 228193 - DNA, 25 bp, Artificial
  probe
  misc_feature (1)..(25): SEQ ID NO: 611; WAN024G2B_at; Start 566; Stop 590
gttatgactattttggtgatgtccg

SEQ ID NO: 228194 - DNA, 25 bp, Artificial
  probe
  misc_feature (1)..(25): SEQ ID NO: 611; WAN024G2B_at; Start 421; Stop 445
ttagaaattgttccagacgcctacg

SEQ ID NO: 228195 - DNA, 25 bp, Artificial
  probe
  misc_feature (1)..(25): SEQ ID NO: 611; WAN024G2B_at; Start 336; Stop 360
taaagctcttctgcgtcgttctcaa

SEQ ID NO: 228196 - DNA, 25 bp, Artificial
  probe
  misc_feature (1)..(25): SEQ ID NO: 611; WAN024G2B_at; Start 308; Stop 332
tctccaatcgtgagttgcaggcgcg

SEQ ID NO: 228197 - DNA, 25 bp, Artificial
  probe
  misc_feature (1)..(25): SEQ ID NO: 611; WAN024G2B_at; Start 323; Stop 347
tgcaggcgcgtgttaaagctcttct

SEQ ID NO: 228198 - DNA, 25 bp, Artificial
  probe
  misc_feature (1)..(25): SEQ ID NO: 611; WAN024G2B_at; Start 516; Stop 540
gcatacaggtcaagtcatcacgcgc

SEQ ID NO: 228199 - DNA, 25 bp, Artificial
  probe
  misc_feature (1)..(25): SEQ ID NO: 611; WAN024G2B_at; Start 152; Stop 176
tggatttgatgcttccagaaattga

SEQ ID NO: 228200 - DNA, 25 bp, Artificial
  probe
  misc_feature (1)..(25): SEQ ID NO: 611; WAN024G2B_at; Start 431; Stop 455
ttccagacgcctacgtggctaaaaa

SEQ ID NO: 228201 - DNA, 25 bp, Artificial
  probe
  misc_feature (1)..(25): SEQ ID NO: 611; WAN024G2B_at; Start 198; Stop 222
cattcgtaagacaagcagtgtgccc

SEQ ID NO: 228202 - DNA, 25 bp, Artificial
  probe
  misc_feature (1)..(25): SEQ ID NO: 611; WAN024G2B_at; Start 463; Stop 487
gaagaactagacttaacccatcgtg

SEQ ID NO: 228203 - DNA, 25 bp, Artificial
  probe
  misc_feature (1)..(25): SEQ ID NO: 611; WAN024G2B_at; Start 639; Stop 663
gcccagccgaccagagtatatcttg

SEQ ID NO: 228204 - DNA, 25 bp, Artificial
  probe
  misc_feature (1)..(25): SEQ ID NO: 611; WAN024G2B_at; Start 596; Stop 620
ttgatgtgactgtacgacgtctgcg

SEQ ID NO: 228205 - DNA, 25 bp, Artificial
  probe
  misc_feature (1)..(25): SEQ ID NO: 611; WAN024G2B_at; Start 167; Stop 191
cagaaattgatggtttagaagttgc

SEQ ID NO: 228206 - DNA, 25 bp, Artificial
  probe
  misc_feature (1)..(25): SEQ ID NO: 611; WAN024G2B_at; Start 623; Stop 647
agaagattgaagatacgcccagccg

SEQ ID NO: 228207 - DNA, 25 bp, Artificial
  probe
  misc_feature (1)..(25): SEQ ID NO: 611; WAN024G2B_at; Start 51; Stop 75
caagtttaatatgaccaaggaaggt

SEQ ID NO: 228208 - DNA, 25 bp, Artificial
  probe
  misc_feature (1)..(25): SEQ ID NO: 611; WAN024G2B_at; Start 541; Stop 565
gaacacttgcttgagactgtctggg

SEQ ID NO: 228209 - DNA, 25 bp, Artificial
  probe
  misc_feature (1)..(25): SEQ ID NO: 611; WAN024G2B_at; Start 348; Stop 372
gcgtcgttctcaacctatgccagta

SEQ ID NO: 228210 - DNA, 25 bp, Artificial
  probe
  misc_feature (1)..(25): SEQ ID NO: 611; WAN024G2B_at; Start 376; Stop 400
ggtcaggaagcagatagtaaacctc

SEQ ID NO: 228211 - DNA, 25 bp, Artificial
  probe
  misc_feature (1)..(25): SEQ ID NO: 611; WAN024G2B_at; Start 22; Stop 46
gatgatgagaaaccaatctcggata

SEQ ID NO: 228212 - DNA, 25 bp, Artificial
  probe
  misc_feature (1)..(25): SEQ ID NO: 611; WAN024G2B_at; Start 446; Stop 470
tggctaaaaaatatggcgaagaact

SEQ ID NO: 228213 - DNA, 25 bp, Artificial
  probe
  misc_feature (1)..(25): SEQ ID NO: 611; WAN024G2B_at; Start 479; Stop 503
cccatcgtgaatttgagcttttgta

SEQ ID NO: 228214 - DNA, 25 bp, Artificial
  probe
  misc_feature (1)..(25): SEQ ID NO: 611; WAN024G2B_at; Start 184; Stop 208
gaagttgctaagaccattcgtaaga

SEQ ID NO: 228215 - DNA, 25 bp, Artificial
  probe
  misc_feature (1)..(25): SEQ ID NO: 611; WAN024G2B_at; Start 391; Stop 415
agtaaacctcaacctatccaaattg

SEQ ID NO: 228216 - DNA, 25 bp, Artificial
  probe
  misc_feature (1)..(25): SEQ ID NO: 611; WAN024G2B_at; Start 95; Stop 119
ttaatggtcgtgaagcgctagagca

SEQ ID NO: 228217 - DNA, 25 bp, Artificial
  probe
  misc_feature (1)..(25): SEQ ID NO: 611; WAN024G2B_at; Start 667; Stop 691
cgccgtggtgtagggtattacatga

SEQ ID NO: 228218 - DNA, 25 bp, Artificial
  probe
  misc_feature (1)..(25): SEQ ID NO: 611; WAN024G2B_at; Start 228; Stop 252
tatgctttcagccaaagatagtgaa

SEQ ID NO: 228219 - DNA, 25 bp, Artificial
  probe
  misc_feature (1)..(25): SEQ ID NO: 611; WAN024G2B_at; Start 608; Stop 632
tacgacgtctgcgtgagaagattga

SEQ ID NO: 228220 - DNA, 25 bp, Artificial
  probe
  misc_feature (1)..(25): SEQ ID NO: 611; WAN024G2B_at; Start 80; Stop 104
aagttgtaactgcttttaatggtcg

SEQ ID NO: 228221 - DNA, 25 bp, Artificial
  probe
  misc_feature (1)..(25): SEQ ID NO: 611; WAN024G2B_at; Start 213; Stop 237
cagtgtgcccattcttatgctttca

SEQ ID NO: 228222 - DNA, 25 bp, Artificial
  probe
  misc_feature (1)..(25): SEQ ID NO: 611; WAN024G2B_at; Start 363; Stop 387
tatgccagtagatggtcaggaagca

SEQ ID NO: 228223 - DNA, 25 bp, Artificial
  probe
  misc_feature (1)..(25): SEQ ID NO: 611; WAN024G2B_at; Start 533; Stop 557
tcacgcgcgaacacttgcttgagac

SEQ ID NO: 228224 - DNA, 25 bp, Artificial
  probe
  misc_feature (1)..(25): SEQ ID NO: 5633; WAN024G2C_at; Start 70; Stop 94
gcttcagaaacttttaatgtaatag

SEQ ID NO: 228225 - DNA, 25 bp, Artificial
  probe
  misc_feature (1)..(25): SEQ ID NO: 5633; WAN024G2C_at; Start 2; Stop 26
tggtgcgaataagttccgaaaggga

SEQ ID NO: 228226 - DNA, 25 bp, Artificial
  probe
  misc_feature (1)..(25): SEQ ID NO: 5633; WAN024G2C_at; Start 170; Stop 194
gaacaccttctcagcgttctttcta

SEQ ID NO: 228227 - DNA, 25 bp, Artificial
  probe
  misc_feature (1)..(25): SEQ ID NO: 5633; WAN024G2C_at; Start 92; Stop 116
tagtagtcatcttttgtgctccctt

SEQ ID NO: 228228 - DNA, 25 bp, Artificial
  probe
  misc_feature (1)..(25): SEQ ID NO: 5633; WAN024G2C_at; Start 132; Stop 156
cattgtattactttttaggtgttca

SEQ ID NO: 228229 - DNA, 25 bp, Artificial
  probe
  misc_feature (1)..(25): SEQ ID NO: 5633; WAN024G2C_at; Start 197; Stop 221
tctctgtcaatggtgttgcggtatc

SEQ ID NO: 228230 - DNA, 25 bp, Artificial
  probe
  misc_feature (1)..(25): SEQ ID NO: 5633; WAN024G2C_at; Start 195; Stop 219
tatctctgtcaatggtgttgcggta

SEQ ID NO: 228231 - DNA, 25 bp, Artificial
  probe
  misc_feature (1)..(25): SEQ ID NO: 5633; WAN024G2C_at; Start 27; Stop 51
aactccttcaaacttagccattgct

SEQ ID NO: 228232 - DNA, 25 bp, Artificial
  probe
  misc_feature (1)..(25): SEQ ID NO: 5633; WAN024G2C_at; Start 89; Stop 113
taatagtagtcatcttttgtgctcc

SEQ ID NO: 228233 - DNA, 25 bp, Artificial
  probe
  misc_feature (1)..(25): SEQ ID NO: 5633; WAN024G2C_at; Start 147; Stop 171
taggtgttcagtcaatataaaaaga

SEQ ID NO: 228234 - DNA, 25 bp, Artificial
  probe
  misc_feature (1)..(25): SEQ ID NO: 5633; WAN024G2C_at; Start 31; Stop 55
ccttcaaacttagccattgctttca

SEQ ID NO: 228235 - DNA, 25 bp, Artificial
  probe
  misc_feature (1)..(25): SEQ ID NO: 5633; WAN024G2C_at; Start 162; Stop 186
tataaaaagaacaccttctcagcgt

SEQ ID NO: 228236 - DNA, 25 bp, Artificial
  probe
  misc_feature (1)..(25): SEQ ID NO: 5633; WAN024G2C_at; Start 25; Stop 49
gaaactccttcaaacttagccattg

SEQ ID NO: 228237 - DNA, 25 bp, Artificial
  probe
  misc_feature (1)..(25): SEQ ID NO: 5633; WAN024G2C_at; Start 54; Stop 78
cataaatgttttatcagcttcagaa

SEQ ID NO: 228238 - DNA, 25 bp, Artificial
  probe
  misc_feature (1)..(25): SEQ ID NO: 5633; WAN024G2C_at; Start 191; Stop 215
tctatatctctgtcaatggtgttgc

SEQ ID NO: 228239 - DNA, 25 bp, Artificial
  probe
  misc_feature (1)..(25): SEQ ID NO: 5633; WAN024G2C_at; Start 164; Stop 188
taaaaagaacaccttctcagcgttc

SEQ ID NO: 228240 - DNA, 25 bp, Artificial
  probe
  misc_feature (1)..(25): SEQ ID NO: 5633; WAN024G2C_at; Start 64; Stop 88
ttatcagcttcagaaacttttaatg

SEQ ID NO: 228241 - DNA, 25 bp, Artificial
  probe
  misc_feature (1)..(25): SEQ ID NO: 5633; WAN024G2C_at; Start 35; Stop 59
caaacttagccattgctttcataaa

SEQ ID NO: 228242 - DNA, 25 bp, Artificial
  probe
  misc_feature (1)..(25): SEQ ID NO: 5633; WAN024G2C_at; Start 173; Stop 197
caccttctcagcgttctttctatat

SEQ ID NO: 228243 - DNA, 25 bp, Artificial
  probe
  misc_feature (1)..(25): SEQ ID NO: 5633; WAN024G2C_at; Start 118; Stop 142
tttaatggtaacaccattgtattac

SEQ ID NO: 228244 - DNA, 25 bp, Artificial
  probe
  misc_feature (1)..(25): SEQ ID NO: 5633; WAN024G2C_at; Start 182; Stop 206
agcgttctttctatatctctgtcaa

SEQ ID NO: 228245 - DNA, 25 bp, Artificial
  probe
  misc_feature (1)..(25): SEQ ID NO: 5633; WAN024G2C_at; Start 106; Stop 130
tgtgctcccttttttaatggtaaca

SEQ ID NO: 228246 - DNA, 25 bp, Artificial
  probe
  misc_feature (1)..(25): SEQ ID NO: 5633; WAN024G2C_at; Start 199; Stop 223
tctgtcaatggtgttgcggtatctg

SEQ ID NO: 228247 - DNA, 25 bp, Artificial
  probe
  misc_feature (1)..(25): SEQ ID NO: 5633; WAN024G2C_at; Start 155; Stop 179
cagtcaatataaaaagaacaccttc

SEQ ID NO: 228248 - DNA, 25 bp, Artificial
  probe
  misc_feature (1)..(25): SEQ ID NO: 5633; WAN024G2C_at; Start 193; Stop 217
tatatctctgtcaatggtgttgcgg

SEQ ID NO: 228249 - DNA, 25 bp, Artificial
  probe
  misc_feature (1)..(25): SEQ ID NO: 5633; WAN024G2C_at; Start 201; Stop 225
tgtcaatggtgttgcggtatctggt

SEQ ID NO: 228250 - DNA, 25 bp, Artificial
  probe
  misc_feature (1)..(25): SEQ ID NO: 5633; WAN024G2C_at; Start 213; Stop 237
tgcggtatctggtgaggtatcataa

SEQ ID NO: 228251 - DNA, 25 bp, Artificial
  probe
  misc_feature (1)..(25): SEQ ID NO: 5633; WAN024G2C_at; Start 98; Stop 122
tcatcttttgtgctcccttttttaa

SEQ ID NO: 228252 - DNA, 25 bp, Artificial
  probe
  misc_feature (1)..(25): SEQ ID NO: 5633; WAN024G2C_at; Start 210; Stop 234
tgttgcggtatctggtgaggtatca

SEQ ID NO: 228253 - DNA, 25 bp, Artificial
  probe
  misc_feature (1)..(25): SEQ ID NO: 5633; WAN024G2C_at; Start 39; Stop 63
cttagccattgctttcataaatgtt

SEQ ID NO: 228254 - DNA, 25 bp, Artificial
  probe
  misc_feature (1)..(25): SEQ ID NO: 5633; WAN024G2C_at; Start 187; Stop 211
tctttctatatctctgtcaatggtg

SEQ ID NO: 228255 - DNA, 25 bp, Artificial
  probe
  misc_feature (1)..(25): SEQ ID NO: 5633; WAN024G2C_at; Start 76; Stop 100
gaaacttttaatgtaatagtagtca

SEQ ID NO: 228256 - DNA, 25 bp, Artificial
  probe
  misc_feature (1)..(25): SEQ ID NO: 5633; WAN024G2C_at; Start 56; Stop 80
taaatgttttatcagcttcagaaac

SEQ ID NO: 228257 - DNA, 25 bp, Artificial
  probe
  misc_feature (1)..(25): SEQ ID NO: 5633; WAN024G2C_at; Start 137; Stop 161
tattactttttaggtgttcagtcaa

SEQ ID NO: 228258 - DNA, 25 bp, Artificial
  probe
  misc_feature (1)..(25): SEQ ID NO: 2716; WAN024G2D_at; Start 63; Stop 87
cataacctgtatctgtcaagaggac

SEQ ID NO: 228259 - DNA, 25 bp, Artificial
  probe
  misc_feature (1)..(25): SEQ ID NO: 2716; WAN024G2D_at; Start 54; Stop 78
ggtcactgacataacctgtatctgt

SEQ ID NO: 228260 - DNA, 25 bp, Artificial
  probe
  misc_feature (1)..(25): SEQ ID NO: 2716; WAN024G2D_at; Start 108; Stop 132
taaagcgatagaactgcggtgcgac

SEQ ID NO: 228261 - DNA, 25 bp, Artificial
  probe
  misc_feature (1)..(25): SEQ ID NO: 2716; WAN024G2D_at; Start 191; Stop 215
cccatttcaaaaatatgcttttgcg

SEQ ID NO: 228262 - DNA, 25 bp, Artificial
  probe
  misc_feature (1)..(25): SEQ ID NO: 2716; WAN024G2D_at; Start 129; Stop 153
cgactgcatcatggcttacaccaaa

SEQ ID NO: 228263 - DNA, 25 bp, Artificial
  probe
  misc_feature (1)..(25): SEQ ID NO: 2716; WAN024G2D_at; Start 124; Stop 148
cggtgcgactgcatcatggcttaca

SEQ ID NO: 228264 - DNA, 25 bp, Artificial
  probe
  misc_feature (1)..(25): SEQ ID NO: 2716; WAN024G2D_at; Start 252; Stop 276
tagcttgccaggtcttttcattggc

SEQ ID NO: 228265 - DNA, 25 bp, Artificial
  probe
  misc_feature (1)..(25): SEQ ID NO: 2716; WAN024G2D_at; Start 142; Stop 166
gcttacaccaaaactctcgatgtcg

SEQ ID NO: 228266 - DNA, 25 bp, Artificial
  probe
  misc_feature (1)..(25): SEQ ID NO: 2716; WAN024G2D_at; Start 286; Stop 310
cataccatacttgcgagccaaaacg

SEQ ID NO: 228267 - DNA, 25 bp, Artificial
  probe
  misc_feature (1)..(25): SEQ ID NO: 2716; WAN024G2D_at; Start 223; Stop 247
caccttgccaagatatttactattt

SEQ ID NO: 228268 - DNA, 25 bp, Artificial
  probe
  misc_feature (1)..(25): SEQ ID NO: 2716; WAN024G2D_at; Start 278; Stop 302
taaagatccataccatacttgcgag

SEQ ID NO: 228269 - DNA, 25 bp, Artificial
  probe
  misc_feature (1)..(25): SEQ ID NO: 2716; WAN024G2D_at; Start 293; Stop 317
tacttgcgagccaaaacgcctactc

SEQ ID NO: 228270 - DNA, 25 bp, Artificial
  probe
  misc_feature (1)..(25): SEQ ID NO: 2716; WAN024G2D_at; Start 79; Stop 103
caagaggacaaaactcttatcatcc

SEQ ID NO: 228271 - DNA, 25 bp, Artificial
  probe
  misc_feature (1)..(25): SEQ ID NO: 2716; WAN024G2D_at; Start 47; Stop 71
gccatacggtcactgacataacctg

SEQ ID NO: 228272 - DNA, 25 bp, Artificial
  probe
  misc_feature (1)..(25): SEQ ID NO: 2716; WAN024G2D_at; Start 118; Stop 142
gaactgcggtgcgactgcatcatgg

SEQ ID NO: 228273 - DNA, 25 bp, Artificial
  probe
  misc_feature (1)..(25): SEQ ID NO: 2716; WAN024G2D_at; Start 70; Stop 94
tgtatctgtcaagaggacaaaactc

SEQ ID NO: 228274 - DNA, 25 bp, Artificial
  probe
  misc_feature (1)..(25): SEQ ID NO: 2716; WAN024G2D_at; Start 282; Stop 306
gatccataccatacttgcgagccaa

SEQ ID NO: 228275 - DNA, 25 bp, Artificial
  probe
  misc_feature (1)..(25): SEQ ID NO: 2716; WAN024G2D_at; Start 213; Stop 237
gcgaagaatccaccttgccaagata

SEQ ID NO: 228276 - DNA, 25 bp, Artificial
  probe
  misc_feature (1)..(25): SEQ ID NO: 2716; WAN024G2D_at; Start 267; Stop 291
tttcattggcataaagatccatacc

SEQ ID NO: 228277 - DNA, 25 bp, Artificial
  probe
  misc_feature (1)..(25): SEQ ID NO: 2716; WAN024G2D_at; Start 114; Stop 138
gatagaactgcggtgcgactgcatc

SEQ ID NO: 228278 - DNA, 25 bp, Artificial
  probe
  misc_feature (1)..(25): SEQ ID NO: 2716; WAN024G2D_at; Start 90; Stop 114
aactcttatcatccttcataaagcg

SEQ ID NO: 228279 - DNA, 25 bp, Artificial
  probe
  misc_feature (1)..(25): SEQ ID NO: 2716; WAN024G2D_at; Start 18; Stop 42
gataaccatccgcattttcgacaat

SEQ ID NO: 228280 - DNA, 25 bp, Artificial
  probe
  misc_feature (1)..(25): SEQ ID NO: 2716; WAN024G2D_at; Start 162; Stop 186
tgtcgatatctccaaaggttttggt

SEQ ID NO: 228281 - DNA, 25 bp, Artificial
  probe
  misc_feature (1)..(25): SEQ ID NO: 2716; WAN024G2D_at; Start 3; Stop 27
ggttggcctcgataagataaccatc

SEQ ID NO: 228282 - DNA, 25 bp, Artificial
  probe
  misc_feature (1)..(25): SEQ ID NO: 2716; WAN024G2D_at; Start 40; Stop 64
aatgcccgccatacggtcactgaca

SEQ ID NO: 228283 - DNA, 25 bp, Artificial
  probe
  misc_feature (1)..(25): SEQ ID NO: 2716; WAN024G2D_at; Start 105; Stop 129
tcataaagcgatagaactgcggtgc

SEQ ID NO: 228284 - DNA, 25 bp, Artificial
  probe
  misc_feature (1)..(25): SEQ ID NO: 2716; WAN024G2D_at; Start 13; Stop 37
gataagataaccatccgcattttcg

SEQ ID NO: 228285 - DNA, 25 bp, Artificial
  probe
  misc_feature (1)..(25): SEQ ID NO: 2716; WAN024G2D_at; Start 309; Stop 333
cgcctactccatggatatgatctga

SEQ ID NO: 228286 - DNA, 25 bp, Artificial
  probe
  misc_feature (1)..(25): SEQ ID NO: 2716; WAN024G2D_at; Start 240; Stop 264
tactattttccatagcttgccaggt

SEQ ID NO: 228287 - DNA, 25 bp, Artificial
  probe
  misc_feature (1)..(25): SEQ ID NO: 2716; WAN024G2D_at; Start 156; Stop 180
tctcgatgtcgatatctccaaaggt

SEQ ID NO: 228288 - DNA, 25 bp, Artificial
  probe
  misc_feature (1)..(25): SEQ ID NO: 2716; WAN024G2D_at; Start 31; Stop 55
attttcgacaatgcccgccatacgg

SEQ ID NO: 228289 - DNA, 25 bp, Artificial
  probe
  misc_feature (1)..(25): SEQ ID NO: 2716; WAN024G2D_at; Start 7; Stop 31
ggcctcgataagataaccatccgca

SEQ ID NO: 228290 - DNA, 25 bp, Artificial
  probe
  misc_feature (1)..(25): SEQ ID NO: 2716; WAN024G2D_at; Start 300; Stop 324
gagccaaaacgcctactccatggat

SEQ ID NO: 228291 - DNA, 25 bp, Artificial
  probe
  misc_feature (1)..(25): SEQ ID NO: 2716; WAN024G2D_at; Start 206; Stop 230
tgcttttgcgaagaatccaccttgc

SEQ ID NO: 228292 - DNA, 25 bp, Artificial
  probe
  misc_feature (1)..(25): SEQ ID NO: 1633; WAN024G2E_at; Start 781; Stop 805
gataccgcaacaccattgacagaga

SEQ ID NO: 228293 - DNA, 25 bp, Artificial
  probe
  misc_feature (1)..(25): SEQ ID NO: 1633; WAN024G2E_at; Start 217; Stop 241
ttggctcgcaagtatggtatggatc

SEQ ID NO: 228294 - DNA, 25 bp, Artificial
  probe
  misc_feature (1)..(25): SEQ ID NO: 1633; WAN024G2E_at; Start 258; Stop 282
gacctggcaagctatggaaaatagt

SEQ ID NO: 228295 - DNA, 25 bp, Artificial
  probe
  misc_feature (1)..(25): SEQ ID NO: 1633; WAN024G2E_at; Start 678; Stop 702
ggaaaacaatatcaaggaactggct

SEQ ID NO: 228296 - DNA, 25 bp, Artificial
  probe
  misc_feature (1)..(25): SEQ ID NO: 1633; WAN024G2E_at; Start 22; Stop 46
tacagtattttagcgtcgggttcca

SEQ ID NO: 228297 - DNA, 25 bp, Artificial
  probe
  misc_feature (1)..(25): SEQ ID NO: 1633; WAN024G2E_at; Start 184; Stop 208
gagcattcagatcatatccatggag

SEQ ID NO: 228298 - DNA, 25 bp, Artificial
  probe
  misc_feature (1)..(25): SEQ ID NO: 1633; WAN024G2E_at; Start 446; Stop 470
cagatacaggttatgtcagtgaccg

SEQ ID NO: 228299 - DNA, 25 bp, Artificial
  probe
  misc_feature (1)..(25): SEQ ID NO: 1633; WAN024G2E_at; Start 553; Stop 577
gcttggcgactcaaacaacgaatcc

SEQ ID NO: 228300 - DNA, 25 bp, Artificial
  probe
  misc_feature (1)..(25): SEQ ID NO: 1633; WAN024G2E_at; Start 462; Stop 486
cagtgaccgtatggcgggcattgtc

SEQ ID NO: 228301 - DNA, 25 bp, Artificial
  probe
  misc_feature (1)..(25): SEQ ID NO: 1633; WAN024G2E_at; Start 202; Stop 226
catggagtaggcgttttggctcgca

SEQ ID NO: 228302 - DNA, 25 bp, Artificial
  probe
  misc_feature (1)..(25): SEQ ID NO: 1633; WAN024G2E_at; Start 293; Stop 317
gcaaggtggattcttcgcaaaagca

SEQ ID NO: 228303 - DNA, 25 bp, Artificial
  probe
  misc_feature (1)..(25): SEQ ID NO: 1633; WAN024G2E_at; Start 163; Stop 187
gatgccatcttgattacccatgagc

SEQ ID NO: 228304 - DNA, 25 bp, Artificial
  probe
  misc_feature (1)..(25): SEQ ID NO: 1633; WAN024G2E_at; Start 61; Stop 85
tatctggaaacctcaaaaaagaagc

SEQ ID NO: 228305 - DNA, 25 bp, Artificial
  probe
  misc_feature (1)..(25): SEQ ID NO: 1633; WAN024G2E_at; Start 122; Stop 146
ccagtctgctagctgaaattaaccg

SEQ ID NO: 228306 - DNA, 25 bp, Artificial
  probe
  misc_feature (1)..(25): SEQ ID NO: 1633; WAN024G2E_at; Start 375; Stop 399
tgtaagccatgatgcagtcgcaccg

SEQ ID NO: 228307 - DNA, 25 bp, Artificial
  probe
  misc_feature (1)..(25): SEQ ID NO: 1633; WAN024G2E_at; Start 507; Stop 531
tatcgaggccaaccatgatgtagag

SEQ ID NO: 228308 - DNA, 25 bp, Artificial
  probe
  misc_feature (1)..(25): SEQ ID NO: 1633; WAN024G2E_at; Start 710; Stop 734
ccatggtcaatcagctggctcaagc

SEQ ID NO: 228309 - DNA, 25 bp, Artificial
  probe
  misc_feature (1)..(25): SEQ ID NO: 1633; WAN024G2E_at; Start 630; Stop 654
gacgctaggaaatcgtactaagaag

SEQ ID NO: 228310 - DNA, 25 bp, Artificial
  probe
  misc_feature (1)..(25): SEQ ID NO: 1633; WAN024G2E_at; Start 94; Stop 118
gatgcaggcttgtctggcaagaaaa

SEQ ID NO: 228311 - DNA, 25 bp, Artificial
  probe
  misc_feature (1)..(25): SEQ ID NO: 1633; WAN024G2E_at; Start 616; Stop 640
gaagctatgattcggacgctaggaa

SEQ ID NO: 228312 - DNA, 25 bp, Artificial
  probe
  misc_feature (1)..(25): SEQ ID NO: 1633; WAN024G2E_at; Start 586; Stop 610
cttggtcacctttctaacgaggacg

SEQ ID NO: 228313 - DNA, 25 bp, Artificial
  probe
  misc_feature (1)..(25): SEQ ID NO: 1633; WAN024G2E_at; Start 394; Stop 418
gcaccgcagttctatcgctttatga

SEQ ID NO: 228314 - DNA, 25 bp, Artificial
  probe
  misc_feature (1)..(25): SEQ ID NO: 1633; WAN024G2E_at; Start 277; Stop 301
aatagtaaatatcttggcaaggtgg

SEQ ID NO: 228315 - DNA, 25 bp, Artificial
  probe
  misc_feature (1)..(25): SEQ ID NO: 1633; WAN024G2E_at; Start 109; Stop 133
ggcaagaaaattaccagtctgctag

SEQ ID NO: 228316 - DNA, 25 bp, Artificial
  probe
  misc_feature (1)..(25): SEQ ID NO: 1633; WAN024G2E_at; Start 538; Stop 562
cgatcaggttcttacgcttggcgac

SEQ ID NO: 228317 - DNA, 25 bp, Artificial
  probe
  misc_feature (1)..(25): SEQ ID NO: 1633; WAN024G2E_at; Start 645; Stop 669
tactaagaagatttaccttgggcat

SEQ ID NO: 228318 - DNA, 25 bp, Artificial
  probe
  misc_feature (1)..(25): SEQ ID NO: 1633; WAN024G2E_at; Start 242; Stop 266
tttatgccaatgaaaagacctggca

SEQ ID NO: 228319 - DNA, 25 bp, Artificial
  probe
  misc_feature (1)..(25): SEQ ID NO: 1633; WAN024G2E_at; Start 150; Stop 174
gccagaagacctggatgccatcttg

SEQ ID NO: 228320 - DNA, 25 bp, Artificial
  probe
  misc_feature (1)..(25): SEQ ID NO: 1633; WAN024G2E_at; Start 359; Stop 383
acatcgagagttttggtgtaagcca

SEQ ID NO: 228321 - DNA, 25 bp, Artificial
  probe
  misc_feature (1)..(25): SEQ ID NO: 1633; WAN024G2E_at; Start 600; Stop 624
taacgaggacggtgctgaagctatg

SEQ ID NO: 228322 - DNA, 25 bp, Artificial
  probe
  misc_feature (1)..(25): SEQ ID NO: 1633; WAN024G2E_at; Start 766; Stop 790
tatgatacctcaccagataccgcaa

SEQ ID NO: 228323 - DNA, 25 bp, Artificial
  probe
  misc_feature (1)..(25): SEQ ID NO: 1633; WAN024G2E_at; Start 569; Stop 593
aacgaatcctatctgaccttggtca

SEQ ID NO: 228324 - DNA, 25 bp, Artificial
  probe
  misc_feature (1)..(25): SEQ ID NO: 1633; WAN024G2E_at; Start 729; Stop 753
tcaagctgatctgggagtcggagta

SEQ ID NO: 228325 - DNA, 25 bp, Artificial
  probe
  misc_feature (1)..(25): SEQ ID NO: 1633; WAN024G2E_at; Start 694; Stop 718
gaactggctcatatgaccatggtca

SEQ ID NO: 228326 - DNA, 25 bp, Artificial
  probe
  misc_feature (1)..(25): SEQ ID NO: 5075; WAN024G2F_at; Start 174; Stop 198
cctagaagatgaatacgatgctcgt

SEQ ID NO: 228327 - DNA, 25 bp, Artificial
  probe
  misc_feature (1)..(25): SEQ ID NO: 5075; WAN024G2F_at; Start 179; Stop 203
aagatgaatacgatgctcgtgtggc

SEQ ID NO: 228328 - DNA, 25 bp, Artificial
  probe
  misc_feature (1)..(25): SEQ ID NO: 5075; WAN024G2F_at; Start 41; Stop 65
taaaaaagggagcacaaaagatgac

SEQ ID NO: 228329 - DNA, 25 bp, Artificial
  probe
  misc_feature (1)..(25): SEQ ID NO: 5075; WAN024G2F_at; Start 264; Stop 288
ggaagaaatgatgcatgatttaggc

SEQ ID NO: 228330 - DNA, 25 bp, Artificial
  probe
  misc_feature (1)..(25): SEQ ID NO: 5075; WAN024G2F_at; Start 284; Stop 308
taggcttgaaggatgaataactaat

SEQ ID NO: 228331 - DNA, 25 bp, Artificial
  probe
  misc_feature (1)..(25): SEQ ID NO: 5075; WAN024G2F_at; Start 68; Stop 92
ctattacattaaaagtttctgaagc

SEQ ID NO: 228332 - DNA, 25 bp, Artificial
  probe
  misc_feature (1)..(25): SEQ ID NO: 5075; WAN024G2F_at; Start 48; Stop 72
gggagcacaaaagatgactactatt

SEQ ID NO: 228333 - DNA, 25 bp, Artificial
  probe
  misc_feature (1)..(25): SEQ ID NO: 5075; WAN024G2F_at; Start 96; Stop 120
taaaacatttatgaaagcaatggct

SEQ ID NO: 228334 - DNA, 25 bp, Artificial
  probe
  misc_feature (1)..(25): SEQ ID NO: 5075; WAN024G2F_at; Start 158; Stop 182
ccaaaactcttgaagccctagaaga

SEQ ID NO: 228335 - DNA, 25 bp, Artificial
  probe
  misc_feature (1)..(25): SEQ ID NO: 5075; WAN024G2F_at; Start 32; Stop 56
tgttaccattaaaaaagggagcaca

SEQ ID NO: 228336 - DNA, 25 bp, Artificial
  probe
  misc_feature (1)..(25): SEQ ID NO: 5075; WAN024G2F_at; Start 10; Stop 34
cacctaaaaagtaatacaatggtgt

SEQ ID NO: 228337 - DNA, 25 bp, Artificial
  probe
  misc_feature (1)..(25): SEQ ID NO: 5075; WAN024G2F_at; Start 145; Stop 169
gaacttattcgcaccaaaactcttg

SEQ ID NO: 228338 - DNA, 25 bp, Artificial
  probe
  misc_feature (1)..(25): SEQ ID NO: 5075; WAN024G2F_at; Start 188; Stop 212
acgatgctcgtgtggcagatttagc

SEQ ID NO: 228339 - DNA, 25 bp, Artificial
  probe
  misc_feature (1)..(25): SEQ ID NO: 5075; WAN024G2F_at; Start 44; Stop 68
aaaagggagcacaaaagatgactac

SEQ ID NO: 228340 - DNA, 25 bp, Artificial
  probe
  misc_feature (1)..(25): SEQ ID NO: 5075; WAN024G2F_at; Start 165; Stop 189
tcttgaagccctagaagatgaatac

SEQ ID NO: 228341 - DNA, 25 bp, Artificial
  probe
  misc_feature (1)..(25): SEQ ID NO: 5075; WAN024G2F_at; Start 172; Stop 196
gccctagaagatgaatacgatgctc

SEQ ID NO: 228342 - DNA, 25 bp, Artificial
  probe
  misc_feature (1)..(25): SEQ ID NO: 5075; WAN024G2F_at; Start 249; Stop 273
tgaacccattacttgggaagaaatg

SEQ ID NO: 228343 - DNA, 25 bp, Artificial
  probe
  misc_feature (1)..(25): SEQ ID NO: 5075; WAN024G2F_at; Start 192; Stop 216
tgctcgtgtggcagatttagcctat

SEQ ID NO: 228344 - DNA, 25 bp, Artificial
  probe
  misc_feature (1)..(25): SEQ ID NO: 5075; WAN024G2F_at; Start 113; Stop 137
caatggctaagtttgaaggagtttc

SEQ ID NO: 228345 - DNA, 25 bp, Artificial
  probe
  misc_feature (1)..(25): SEQ ID NO: 5075; WAN024G2F_at; Start 77; Stop 101
taaaagtttctgaagctgataaaac

SEQ ID NO: 228346 - DNA, 25 bp, Artificial
  probe
  misc_feature (1)..(25): SEQ ID NO: 5075; WAN024G2F_at; Start 272; Stop 296
tgatgcatgatttaggcttgaagga

SEQ ID NO: 228347 - DNA, 25 bp, Artificial
  probe
  misc_feature (1)..(25): SEQ ID NO: 5075; WAN024G2F_at; Start 183; Stop 207
tgaatacgatgctcgtgtggcagat

SEQ ID NO: 228348 - DNA, 25 bp, Artificial
  probe
  misc_feature (1)..(25): SEQ ID NO: 5075; WAN024G2F_at; Start 108; Stop 132
gaaagcaatggctaagtttgaagga

SEQ ID NO: 228349 - DNA, 25 bp, Artificial
  probe
  misc_feature (1)..(25): SEQ ID NO: 5075; WAN024G2F_at; Start 84; Stop 108
ttctgaagctgataaaacatttatg

SEQ ID NO: 228350 - DNA, 25 bp, Artificial
  probe
  misc_feature (1)..(25): SEQ ID NO: 5075; WAN024G2F_at; Start 142; Stop 166
tcggaacttattcgcaccaaaactc

SEQ ID NO: 228351 - DNA, 25 bp, Artificial
  probe
  misc_feature (1)..(25): SEQ ID NO: 5075; WAN024G2F_at; Start 16; Stop 40
aaaagtaatacaatggtgttaccat

SEQ ID NO: 228352 - DNA, 25 bp, Artificial
  probe
  misc_feature (1)..(25): SEQ ID NO: 5075; WAN024G2F_at; Start 194; Stop 218
ctcgtgtggcagatttagcctatca

SEQ ID NO: 228353 - DNA, 25 bp, Artificial
  probe
  misc_feature (1)..(25): SEQ ID NO: 5075; WAN024G2F_at; Start 150; Stop 174
tattcgcaccaaaactcttgaagcc

SEQ ID NO: 228354 - DNA, 25 bp, Artificial
  probe
  misc_feature (1)..(25): SEQ ID NO: 5075; WAN024G2F_at; Start 169; Stop 193
gaagccctagaagatgaatacgatg

SEQ ID NO: 228355 - DNA, 25 bp, Artificial
  probe
  misc_feature (1)..(25): SEQ ID NO: 5075; WAN024G2F_at; Start 227; Stop 251
tagaagacttggaaaaaggagttga

SEQ ID NO: 228356 - DNA, 25 bp, Artificial
  probe
  misc_feature (1)..(25): SEQ ID NO: 5075; WAN024G2F_at; Start 136; Stop 160
tccctttcggaacttattcgcacca

SEQ ID NO: 228357 - DNA, 25 bp, Artificial
  probe
  misc_feature (1)..(25): SEQ ID NO: 5075; WAN024G2F_at; Start 52; Stop 76
gcacaaaagatgactactattacat

SEQ ID NO: 228358 - DNA, 25 bp, Artificial
  probe
  misc_feature (1)..(25): SEQ ID NO: 5075; WAN024G2F_at; Start 155; Stop 179
gcaccaaaactcttgaagccctaga

SEQ ID NO: 228359 - DNA, 25 bp, Artificial
  probe
  misc_feature (1)..(25): SEQ ID NO: 5075; WAN024G2F_at; Start 245; Stop 269
gagttgaacccattacttgggaaga

SEQ ID NO: 228360 - DNA, 25 bp, Artificial
  probe
  misc_feature (1)..(25): SEQ ID NO: 5405; WAN024G2G_at; Start 569; Stop 593
tggcgcgtgagaatcttttggcaac

SEQ ID NO: 228361 - DNA, 25 bp, Artificial
  probe
  misc_feature (1)..(25): SEQ ID NO: 5405; WAN024G2G_at; Start 402; Stop 426
taccgtaactggtgaggaaattcca

SEQ ID NO: 228362 - DNA, 25 bp, Artificial
  probe
  misc_feature (1)..(25): SEQ ID NO: 5405; WAN024G2G_at; Start 30; Stop 54
aagtttggctaaagaatcggctgac

SEQ ID NO: 228363 - DNA, 25 bp, Artificial
  probe
  misc_feature (1)..(25): SEQ ID NO: 5405; WAN024G2G_at; Start 820; Stop 844
aatagaatgataggttttgagcgcc

SEQ ID NO: 228364 - DNA, 25 bp, Artificial
  probe
  misc_feature (1)..(25): SEQ ID NO: 5405; WAN024G2G_at; Start 136; Stop 160
ggatttgctccaagtgatcgcatca

SEQ ID NO: 228365 - DNA, 25 bp, Artificial
  probe
  misc_feature (1)..(25): SEQ ID NO: 5405; WAN024G2G_at; Start 90; Stop 114
gaaatcaattgtttgggctacgcat

SEQ ID NO: 228366 - DNA, 25 bp, Artificial
  probe
  misc_feature (1)..(25): SEQ ID NO: 5405; WAN024G2G_at; Start 232; Stop 256
aaagatcggacaaaaataagggcag

SEQ ID NO: 228367 - DNA, 25 bp, Artificial
  probe
  misc_feature (1)..(25): SEQ ID NO: 5405; WAN024G2G_at; Start 179; Stop 203
gaaactttgccaacttgattcagcc

SEQ ID NO: 228368 - DNA, 25 bp, Artificial
  probe
  misc_feature (1)..(25): SEQ ID NO: 5405; WAN024G2G_at; Start 1430; Stop 1454
gaattggctccgaacgtgtttatcg

SEQ ID NO: 228369 - DNA, 25 bp, Artificial
  probe
  misc_feature (1)..(25): SEQ ID NO: 5405; WAN024G2G_at; Start 1548; Stop 1572
agtcttatcaacacccctaatcggg

SEQ ID NO: 228370 - DNA, 25 bp, Artificial
  probe
  misc_feature (1)..(25): SEQ ID NO: 5405; WAN024G2G_at; Start 754; Stop 778
tttgcggatgagctagaagtccaag

SEQ ID NO: 228371 - DNA, 25 bp, Artificial
  probe
  misc_feature (1)..(25): SEQ ID NO: 5405; WAN024G2G_at; Start 418; Stop 442
gaaattccattatctgagcgagttg

SEQ ID NO: 228372 - DNA, 25 bp, Artificial
  probe
  misc_feature (1)..(25): SEQ ID NO: 5405; WAN024G2G_at; Start 976; Stop 1000
tctatactaatcaccccagcaaggt

SEQ ID NO: 228373 - DNA, 25 bp, Artificial
  probe
  misc_feature (1)..(25): SEQ ID NO: 5405; WAN024G2G_at; Start 609; Stop 633
tctagctaagactggaaatcaacca

SEQ ID NO: 228374 - DNA, 25 bp, Artificial
  probe
  misc_feature (1)..(25): SEQ ID NO: 5405; WAN024G2G_at; Start 356; Stop 380
tagaggtaacttgtggtgaagcacc

SEQ ID NO: 228375 - DNA, 25 bp, Artificial
  probe
  misc_feature (1)..(25): SEQ ID NO: 5405; WAN024G2G_at; Start 837; Stop 861
tgagcgcctatctagcgaggaaagt

SEQ ID NO: 228376 - DNA, 25 bp, Artificial
  probe
  misc_feature (1)..(25): SEQ ID NO: 5405; WAN024G2G_at; Start 1744; Stop 1768
caagactttacggtcaattcggaca

SEQ ID NO: 228377 - DNA, 25 bp, Artificial
  probe
  misc_feature (1)..(25): SEQ ID NO: 5405; WAN024G2G_at; Start 554; Stop 578
gagattctctccttttggcgcgtga

SEQ ID NO: 228378 - DNA, 25 bp, Artificial
  probe
  misc_feature (1)..(25): SEQ ID NO: 5405; WAN024G2G_at; Start 1516; Stop 1540
ccagaagctaatggaagtggtgcct

SEQ ID NO: 228379 - DNA, 25 bp, Artificial
  probe
  misc_feature (1)..(25): SEQ ID NO: 5405; WAN024G2G_at; Start 1798; Stop 1822
gaccgccagcttgatcaaaaatatg

SEQ ID NO: 228380 - DNA, 25 bp, Artificial
  probe
  misc_feature (1)..(25): SEQ ID NO: 5405; WAN024G2G_at; Start 895; Stop 919
ccgtatcaggaaacaggagaagcca

SEQ ID NO: 228381 - DNA, 25 bp, Artificial
  probe
  misc_feature (1)..(25): SEQ ID NO: 5405; WAN024G2G_at; Start 151; Stop 175
gatcgcatcaatccaagtaaggtta

SEQ ID NO: 228382 - DNA, 25 bp, Artificial
  probe
  misc_feature (1)..(25): SEQ ID NO: 5405; WAN024G2G_at; Start 463; Stop 487
caacggattagtcgtgaggtttcag

SEQ ID NO: 228383 - DNA, 25 bp, Artificial
  probe
  misc_feature (1)..(25): SEQ ID NO: 5405; WAN024G2G_at; Start 873; Stop 897
tgatgtcgtgataggaaatcctccg

SEQ ID NO: 228384 - DNA, 25 bp, Artificial
  probe
  misc_feature (1)..(25): SEQ ID NO: 5405; WAN024G2G_at; Start 908; Stop 932
caggagaagccagagatgagccgat

SEQ ID NO: 228385 - DNA, 25 bp, Artificial
  probe
  misc_feature (1)..(25): SEQ ID NO: 5405; WAN024G2G_at; Start 1408; Stop 1432
gaccatgttgctctacttggaagaa

SEQ ID NO: 228386 - DNA, 25 bp, Artificial
  probe
  misc_feature (1)..(25): SEQ ID NO: 5405; WAN024G2G_at; Start 1783; Stop 1807
tcagtgactgatattgaccgccagc

SEQ ID NO: 228387 - DNA, 25 bp, Artificial
  probe
  misc_feature (1)..(25): SEQ ID NO: 5405; WAN024G2G_at; Start 1011; Stop 1035
agctggtcaaactcctaaaaattgg

SEQ ID NO: 228388 - DNA, 25 bp, Artificial
  probe
  misc_feature (1)..(25): SEQ ID NO: 5405; WAN024G2G_at; Start 1316; Stop 1340
ctgaaaagctgcaaggaaaagggac

SEQ ID NO: 228389 - DNA, 25 bp, Artificial
  probe
  misc_feature (1)..(25): SEQ ID NO: 5405; WAN024G2G_at; Start 1571; Stop 1595
gggaacccctaatcgggcatacaga

SEQ ID NO: 228390 - DNA, 25 bp, Artificial
  probe
  misc_feature (1)..(25): SEQ ID NO: 5405; WAN024G2G_at; Start 253; Stop 277
gcagaagtgtttacaccaacgtggt

SEQ ID NO: 228391 - DNA, 25 bp, Artificial
  probe
  misc_feature (1)..(25): SEQ ID NO: 5405; WAN024G2G_at; Start 268; Stop 292
ccaacgtggttggtcgcaaagcaaa

SEQ ID NO: 228392 - DNA, 25 bp, Artificial
  probe
  misc_feature (1)..(25): SEQ ID NO: 5405; WAN024G2G_at; Start 1704; Stop 1728
tcagcataattcacgcaaaacttgg

SEQ ID NO: 228393 - DNA, 25 bp, Artificial
  probe
  misc_feature (1)..(25): SEQ ID NO: 5405; WAN024G2G_at; Start 372; Stop 396
tgaagcaccttatatggtaacgaga

SEQ ID NO: 228394 - DNA, 25 bp, Artificial
  probe
  misc_feature (1)..(25): SEQ ID NO: 5657; WAN024G2H_at; Start 48; Stop 72
gatctttaaaataatccgccaactc

SEQ ID NO: 228395 - DNA, 25 bp, Artificial
  probe
  misc_feature (1)..(25): SEQ ID NO: 5657; WAN024G2H_at; Start 222; Stop 246
aggcatcaaaattatcaagtgttag

SEQ ID NO: 228396 - DNA, 25 bp, Artificial
  probe
  misc_feature (1)..(25): SEQ ID NO: 5657; WAN024G2H_at; Start 180; Stop 204
tcgtaatccctgttacttcataaaa

SEQ ID NO: 228397 - DNA, 25 bp, Artificial
  probe
  misc_feature (1)..(25): SEQ ID NO: 5657; WAN024G2H_at; Start 127; Stop 151
gagatgccctgcaaaatcctgccca

SEQ ID NO: 228398 - DNA, 25 bp, Artificial
  probe
  misc_feature (1)..(25): SEQ ID NO: 5657; WAN024G2H_at; Start 92; Stop 116
tcttgaatagcttcgtcaaatgttg

SEQ ID NO: 228399 - DNA, 25 bp, Artificial
  probe
  misc_feature (1)..(25): SEQ ID NO: 5657; WAN024G2H_at; Start 9; Stop 33
tcttctgcggtggaatatagtcaaa

SEQ ID NO: 228400 - DNA, 25 bp, Artificial
  probe
  misc_feature (1)..(25): SEQ ID NO: 5657; WAN024G2H_at; Start 159; Stop 183
gcaaatatctaaactgatcaatcgt

SEQ ID NO: 228401 - DNA, 25 bp, Artificial
  probe
  misc_feature (1)..(25): SEQ ID NO: 5657; WAN024G2H_at; Start 16; Stop 40
cggtggaatatagtcaaaaatgtct

SEQ ID NO: 228402 - DNA, 25 bp, Artificial
  probe
  misc_feature (1)..(25): SEQ ID NO: 5657; WAN024G2H_at; Start 105; Stop 129
cgtcaaatgttgctttatcaaagag

SEQ ID NO: 228403 - DNA, 25 bp, Artificial
  probe
  misc_feature (1)..(25): SEQ ID NO: 5657; WAN024G2H_at; Start 72; Stop 96
cctttttcttgcgaagaaattcttg

SEQ ID NO: 228404 - DNA, 25 bp, Artificial
  probe
  misc_feature (1)..(25): SEQ ID NO: 5657; WAN024G2H_at; Start 153; Stop 177
catctcgcaaatatctaaactgatc

SEQ ID NO: 228405 - DNA, 25 bp, Artificial
  probe
  misc_feature (1)..(25): SEQ ID NO: 5657; WAN024G2H_at; Start 207; Stop 231
catgttcaggaacaaaggcatcaaa

SEQ ID NO: 228406 - DNA, 25 bp, Artificial
  probe
  misc_feature (1)..(25): SEQ ID NO: 5657; WAN024G2H_at; Start 168; Stop 192
taaactgatcaatcgtaatccctgt

SEQ ID NO: 228407 - DNA, 25 bp, Artificial
  probe
  misc_feature (1)..(25): SEQ ID NO: 5657; WAN024G2H_at; Start 20; Stop 44
ggaatatagtcaaaaatgtcttctt

SEQ ID NO: 228408 - DNA, 25 bp, Artificial
  probe
  misc_feature (1)..(25): SEQ ID NO: 5657; WAN024G2H_at; Start 44; Stop 68
ttttgatctttaaaataatccgcca

SEQ ID NO: 228409 - DNA, 25 bp, Artificial
  probe
  misc_feature (1)..(25): SEQ ID NO: 5657; WAN024G2H_at; Start 81; Stop 105
tgcgaagaaattcttgaatagcttc

SEQ ID NO: 228410 - DNA, 25 bp, Artificial
  probe
  misc_feature (1)..(25): SEQ ID NO: 5657; WAN024G2H_at; Start 192; Stop 216
ttacttcataaaaaacatgttcagg

SEQ ID NO: 228411 - DNA, 25 bp, Artificial
  probe
  misc_feature (1)..(25): SEQ ID NO: 5657; WAN024G2H_at; Start 59; Stop 83
taatccgccaactcctttttcttgc

SEQ ID NO: 228412 - DNA, 25 bp, Artificial
  probe
  misc_feature (1)..(25): SEQ ID NO: 5657; WAN024G2H_at; Start 114; Stop 138
ttgctttatcaaagagatgccctgc

SEQ ID NO: 228413 - DNA, 25 bp, Artificial
  probe
  misc_feature (1)..(25): SEQ ID NO: 5657; WAN024G2H_at; Start 219; Stop 243
caaaggcatcaaaattatcaagtgt

SEQ ID NO: 228414 - DNA, 25 bp, Artificial
  probe
  misc_feature (1)..(25): SEQ ID NO: 5657; WAN024G2H_at; Start 124; Stop 148
aaagagatgccctgcaaaatcctgc

SEQ ID NO: 228415 - DNA, 25 bp, Artificial
  probe
  misc_feature (1)..(25): SEQ ID NO: 5657; WAN024G2H_at; Start 87; Stop 111
gaaattcttgaatagcttcgtcaaa

SEQ ID NO: 228416 - DNA, 25 bp, Artificial
  probe
  misc_feature (1)..(25): SEQ ID NO: 5657; WAN024G2H_at; Start 171; Stop 195
actgatcaatcgtaatccctgttac

SEQ ID NO: 228417 - DNA, 25 bp, Artificial
  probe
  misc_feature (1)..(25): SEQ ID NO: 5657; WAN024G2H_at; Start 65; Stop 89
gccaactcctttttcttgcgaagaa

SEQ ID NO: 228418 - DNA, 25 bp, Artificial
  probe
  misc_feature (1)..(25): SEQ ID NO: 5657; WAN024G2H_at; Start 116; Stop 140
gctttatcaaagagatgccctgcaa

SEQ ID NO: 228419 - DNA, 25 bp, Artificial
  probe
  misc_feature (1)..(25): SEQ ID NO: 5657; WAN024G2H_at; Start 150; Stop 174
caccatctcgcaaatatctaaactg

SEQ ID NO: 228420 - DNA, 25 bp, Artificial
  probe
  misc_feature (1)..(25): SEQ ID NO: 5657; WAN024G2H_at; Start 174; Stop 198
gatcaatcgtaatccctgttacttc

SEQ ID NO: 228421 - DNA, 25 bp, Artificial
  probe
  misc_feature (1)..(25): SEQ ID NO: 5657; WAN024G2H_at; Start 12; Stop 36
tctgcggtggaatatagtcaaaaat

SEQ ID NO: 228422 - DNA, 25 bp, Artificial
  probe
  misc_feature (1)..(25): SEQ ID NO: 5657; WAN024G2H_at; Start 2; Stop 26
tggttggtcttctgcggtggaatat

SEQ ID NO: 228423 - DNA, 25 bp, Artificial
  probe
  misc_feature (1)..(25): SEQ ID NO: 5657; WAN024G2H_at; Start 197; Stop 221
tcataaaaaacatgttcaggaacaa

SEQ ID NO: 228424 - DNA, 25 bp, Artificial
  probe
  misc_feature (1)..(25): SEQ ID NO: 5657; WAN024G2H_at; Start 146; Stop 170
tgcccaccatctcgcaaatatctaa

SEQ ID NO: 228425 - DNA, 25 bp, Artificial
  probe
  misc_feature (1)..(25): SEQ ID NO: 5657; WAN024G2H_at; Start 110; Stop 134
aatgttgctttatcaaagagatgcc

SEQ ID NO: 228426 - DNA, 25 bp, Artificial
  probe
  misc_feature (1)..(25): SEQ ID NO: 5657; WAN024G2H_at; Start 120; Stop 144
tatcaaagagatgccctgcaaaatc

SEQ ID NO: 228427 - DNA, 25 bp, Artificial
  probe
  misc_feature (1)..(25): SEQ ID NO: 5657; WAN024G2H_at; Start 7; Stop 31
ggtcttctgcggtggaatatagtca

SEQ ID NO: 228428 - DNA, 25 bp, Artificial
  probe
  misc_feature (1)..(25): SEQ ID NO: 5454; WAN024G2I_at; Start 39; Stop 63
tatctggcgaggagtggttagaact

SEQ ID NO: 228429 - DNA, 25 bp, Artificial
  probe
  misc_feature (1)..(25): SEQ ID NO: 5454; WAN024G2I_at; Start 28; Stop 52
tctctagcttttatctggcgaggag

SEQ ID NO: 228430 - DNA, 25 bp, Artificial
  probe
  misc_feature (1)..(25): SEQ ID NO: 5454; WAN024G2I_at; Start 70; Stop 94
gcatcaatttcaaccatcttaccag

SEQ ID NO: 228431 - DNA, 25 bp, Artificial
  probe
  misc_feature (1)..(25): SEQ ID NO: 5454; WAN024G2I_at; Start 23; Stop 47
gaacttctctagcttttatctggcg

SEQ ID NO: 228432 - DNA, 25 bp, Artificial
  probe
  misc_feature (1)..(25): SEQ ID NO: 5454; WAN024G2I_at; Start 59; Stop 83
gaactgcctttgcatcaatttcaac

SEQ ID NO: 228433 - DNA, 25 bp, Artificial
  probe
  misc_feature (1)..(25): SEQ ID NO: 5454; WAN024G2I_at; Start 221; Stop 245
tcaaggttctttccggcgcaaagtc

SEQ ID NO: 228434 - DNA, 25 bp, Artificial
  probe
  misc_feature (1)..(25): SEQ ID NO: 5454; WAN024G2I_at; Start 197; Stop 221
tgttggcaaactcatcaaagagaat

SEQ ID NO: 228435 - DNA, 25 bp, Artificial
  probe
  misc_feature (1)..(25): SEQ ID NO: 5454; WAN024G2I_at; Start 92; Stop 116
cagcacggtcttcggcaataattgg

SEQ ID NO: 228436 - DNA, 25 bp, Artificial
  probe
  misc_feature (1)..(25): SEQ ID NO: 5454; WAN024G2I_at; Start 50; Stop 74
gagtggttagaactgcctttgcatc

SEQ ID NO: 228437 - DNA, 25 bp, Artificial
  probe
  misc_feature (1)..(25): SEQ ID NO: 5454; WAN024G2I_at; Start 12; Stop 36
acctcgtttaagaacttctctagct

SEQ ID NO: 228438 - DNA, 25 bp, Artificial
  probe
  misc_feature (1)..(25): SEQ ID NO: 5454; WAN024G2I_at; Start 143; Stop 167
tttcttcgcgtgtagctgaagttcc

SEQ ID NO: 228439 - DNA, 25 bp, Artificial
  probe
  misc_feature (1)..(25): SEQ ID NO: 5454; WAN024G2I_at; Start 130; Stop 154
aattctctaatattttcttcgcgtg

SEQ ID NO: 228440 - DNA, 25 bp, Artificial
  probe
  misc_feature (1)..(25): SEQ ID NO: 5454; WAN024G2I_at; Start 206; Stop 230
actcatcaaagagaatcaaggttct

SEQ ID NO: 228441 - DNA, 25 bp, Artificial
  probe
  misc_feature (1)..(25): SEQ ID NO: 5454; WAN024G2I_at; Start 151; Stop 175
cgtgtagctgaagttcctctaccag

SEQ ID NO: 228442 - DNA, 25 bp, Artificial
  probe
  misc_feature (1)..(25): SEQ ID NO: 5454; WAN024G2I_at; Start 218; Stop 242
gaatcaaggttctttccggcgcaaa

SEQ ID NO: 228443 - DNA, 25 bp, Artificial
  probe
  misc_feature (1)..(25): SEQ ID NO: 5454; WAN024G2I_at; Start 137; Stop 161
taatattttcttcgcgtgtagctga

SEQ ID NO: 228444 - DNA, 25 bp, Artificial
  probe
  misc_feature (1)..(25): SEQ ID NO: 5454; WAN024G2I_at; Start 103; Stop 127
tcggcaataattggaaagaagttta

SEQ ID NO: 228445 - DNA, 25 bp, Artificial
  probe
  misc_feature (1)..(25): SEQ ID NO: 5454; WAN024G2I_at; Start 157; Stop 181
gctgaagttcctctaccagctgcag

SEQ ID NO: 228446 - DNA, 25 bp, Artificial
  probe
  misc_feature (1)..(25): SEQ ID NO: 5454; WAN024G2I_at; Start 192; Stop 216
taagttgttggcaaactcatcaaag

SEQ ID NO: 228447 - DNA, 25 bp, Artificial
  probe
  misc_feature (1)..(25): SEQ ID NO: 5454; WAN024G2I_at; Start 54; Stop 78
ggttagaactgcctttgcatcaatt

SEQ ID NO: 228448 - DNA, 25 bp, Artificial
  probe
  misc_feature (1)..(25): SEQ ID NO: 5454; WAN024G2I_at; Start 75; Stop 99
aatttcaaccatcttaccagcacgg

SEQ ID NO: 228449 - DNA, 25 bp, Artificial
  probe
  misc_feature (1)..(25): SEQ ID NO: 5454; WAN024G2I_at; Start 216; Stop 240
gagaatcaaggttctttccggcgca

SEQ ID NO: 228450 - DNA, 25 bp, Artificial
  probe
  misc_feature (1)..(25): SEQ ID NO: 5454; WAN024G2I_at; Start 31; Stop 55
ctagcttttatctggcgaggagtgg

SEQ ID NO: 228451 - DNA, 25 bp, Artificial
  probe
  misc_feature (1)..(25): SEQ ID NO: 5454; WAN024G2I_at; Start 202; Stop 226
gcaaactcatcaaagagaatcaagg

SEQ ID NO: 228452 - DNA, 25 bp, Artificial
  probe
  misc_feature (1)..(25): SEQ ID NO: 5454; WAN024G2I_at; Start 160; Stop 184
gaagttcctctaccagctgcagtta

SEQ ID NO: 228453 - DNA, 25 bp, Artificial
  probe
  misc_feature (1)..(25): SEQ ID NO: 5454; WAN024G2I_at; Start 89; Stop 113
taccagcacggtcttcggcaataat

SEQ ID NO: 228454 - DNA, 25 bp, Artificial
  probe
  misc_feature (1)..(25): SEQ ID NO: 5454; WAN024G2I_at; Start 45; Stop 69
gcgaggagtggttagaactgccttt

SEQ ID NO: 228455 - DNA, 25 bp, Artificial
  probe
  misc_feature (1)..(25): SEQ ID NO: 5454; WAN024G2I_at; Start 84; Stop 108
catcttaccagcacggtcttcggca

SEQ ID NO: 228456 - DNA, 25 bp, Artificial
  probe
  misc_feature (1)..(25): SEQ ID NO: 5454; WAN024G2I_at; Start 147; Stop 171
ttcgcgtgtagctgaagttcctcta

SEQ ID NO: 228457 - DNA, 25 bp, Artificial
  probe
  misc_feature (1)..(25): SEQ ID NO: 5454; WAN024G2I_at; Start 165; Stop 189
tcctctaccagctgcagttacaagc

SEQ ID NO: 228458 - DNA, 25 bp, Artificial
  probe
  misc_feature (1)..(25): SEQ ID NO: 5454; WAN024G2I_at; Start 228; Stop 252
tctttccggcgcaaagtcaaataca

SEQ ID NO: 228459 - DNA, 25 bp, Artificial
  probe
  misc_feature (1)..(25): SEQ ID NO: 5454; WAN024G2I_at; Start 114; Stop 138
tggaaagaagtttaataattctcta

SEQ ID NO: 228460 - DNA, 25 bp, Artificial
  probe
  misc_feature (1)..(25): SEQ ID NO: 5454; WAN024G2I_at; Start 231; Stop 255
ttccggcgcaaagtcaaatacatag

SEQ ID NO: 228461 - DNA, 25 bp, Artificial
  probe
  misc_feature (1)..(25): SEQ ID NO: 5454; WAN024G2I_at; Start 95; Stop 119
cacggtcttcggcaataattggaaa

SEQ ID NO: 228462 - DNA, 25 bp, Artificial
  probe
  misc_feature (1)..(25): SEQ ID NO: 3602; WAN024G2J-3_at; Start 499; Stop 523
tagtcacaaaagatgaggaacgaac

SEQ ID NO: 228463 - DNA, 25 bp, Artificial
  probe
  misc_feature (1)..(25): SEQ ID NO: 3602; WAN024G2J-3_at; Start 890; Stop 914
tgtggaacagttgaaacaatcagct

SEQ ID NO: 228464 - DNA, 25 bp, Artificial
  probe
  misc_feature (1)..(25): SEQ ID NO: 3602; WAN024G2J-3_at; Start 1101; Stop 1125
gcagggcatctctttgataaagcaa

SEQ ID NO: 228465 - DNA, 25 bp, Artificial
  probe
  misc_feature (1)..(25): SEQ ID NO: 3602; WAN024G2J-3_at; Start 1566; Stop 1590
ccagcggctaaagaagggagcattc

SEQ ID NO: 228466 - DNA, 25 bp, Artificial
  probe
  misc_feature (1)..(25): SEQ ID NO: 3602; WAN024G2J-3_at; Start 1549; Stop 1573
ttttagcagataccattccagcggc

SEQ ID NO: 228467 - DNA, 25 bp, Artificial
  probe
  misc_feature (1)..(25): SEQ ID NO: 3602; WAN024G2J-3_at; Start 5; Stop 29
ctatgtatttgactttgcgccggaa

SEQ ID NO: 228468 - DNA, 25 bp, Artificial
  probe
  misc_feature (1)..(25): SEQ ID NO: 3602; WAN024G2J-3_at; Start 411; Stop 435
gcagtagtagaccatgaaattgtag

SEQ ID NO: 228469 - DNA, 25 bp, Artificial
  probe
  misc_feature (1)..(25): SEQ ID NO: 3602; WAN024G2J-3_at; Start 76; Stop 100
taactgcagctggtagaggaacttc

SEQ ID NO: 228470 - DNA, 25 bp, Artificial
  probe
  misc_feature (1)..(25): SEQ ID NO: 3602; WAN024G2J-3_at; Start 1385; Stop 1409
taatagcaatggcttgaaagaggcc

SEQ ID NO: 228471 - DNA, 25 bp, Artificial
  probe
  misc_feature (1)..(25): SEQ ID NO: 3602; WAN024G2J-3_at; Start 186; Stop 210
gatgcaaaggcagttctaaccactc

SEQ ID NO: 228472 - DNA, 25 bp, Artificial
  probe
  misc_feature (1)..(25): SEQ ID NO: 3602; WAN024G2J-3_at; Start 145; Stop 169
caattattgccgaagaccgtgctgg

SEQ ID NO: 228473 - DNA, 25 bp, Artificial
  probe
  misc_feature (1)..(25): SEQ ID NO: 3602; WAN024G2J-3_at; Start 239; Stop 263
taaacgaggttttatgtccaatctc

SEQ ID NO: 228474 - DNA, 25 bp, Artificial
  probe
  misc_feature (1)..(25): SEQ ID NO: 3602; WAN024G2J-3_at; Start 1088; Stop 1112
tgggcaggattttgcagggcatctc

SEQ ID NO: 228475 - DNA, 25 bp, Artificial
  probe
  misc_feature (1)..(25): SEQ ID NO: 3602; WAN024G2J-3_at; Start 971; Stop 995
tatggcttacggtgatcaaactcta

SEQ ID NO: 228476 - DNA, 25 bp, Artificial
  probe
  misc_feature (1)..(25): SEQ ID NO: 3602; WAN024G2J-3_at; Start 312; Stop 336
gatattttaaatgagctgccagttg

SEQ ID NO: 228477 - DNA, 25 bp, Artificial
  probe
  misc_feature (1)..(25): SEQ ID NO: 3602; WAN024G2J-3_at; Start 690; Stop 714
tctgaagctcatatcaagcaagagt

SEQ ID NO: 228478 - DNA, 25 bp, Artificial
  probe
  misc_feature (1)..(25): SEQ ID NO: 3602; WAN024G2J-3_at; Start 873; Stop 897
caggttgagataaaacgtgtggaac

SEQ ID NO: 228479 - DNA, 25 bp, Artificial
  probe
  misc_feature (1)..(25): SEQ ID NO: 3602; WAN024G2J-3_at; Start 1343; Stop 1367
gaagtcaggcctctatattgcagaa

SEQ ID NO: 228480 - DNA, 25 bp, Artificial
  probe
  misc_feature (1)..(25): SEQ ID NO: 3602; WAN024G2J-3_at; Start 858; Stop 882
gagaaatttatcgaacaggttgaga

SEQ ID NO: 228481 - DNA, 25 bp, Artificial
  probe
  misc_feature (1)..(25): SEQ ID NO: 3602; WAN024G2J-3_at; Start 909; Stop 933
tcagctcaagatgaaattcgtgacc

SEQ ID NO: 228482 - DNA, 25 bp, Artificial
  probe
  misc_feature (1)..(25): SEQ ID NO: 3602; WAN024G2J-3_at; Start 482; Stop 506
tgaatctgttgctgagttagtcaca

SEQ ID NO: 228483 - DNA, 25 bp, Artificial
  probe
  misc_feature (1)..(25): SEQ ID NO: 3602; WAN024G2J-3_at; Start 1209; Stop 1233
gactatattccaccgcagaagacca

SEQ ID NO: 228484 - DNA, 25 bp, Artificial
  probe
  misc_feature (1)..(25): SEQ ID NO: 3602; WAN024G2J-3_at; Start 937; Stop 961
tacgagggtttgcaagaacaattcc

SEQ ID NO: 228485 - DNA, 25 bp, Artificial
  probe
  misc_feature (1)..(25): SEQ ID NO: 3602; WAN024G2J-3_at; Start 538; Stop 562
tcaatgacttgagtaagaccgtttc

SEQ ID NO: 228486 - DNA, 25 bp, Artificial
  probe
  misc_feature (1)..(25): SEQ ID NO: 3602; WAN024G2J-3_at; Start 515; Stop 539
ggaacgaactcaaaaacagctggtc

SEQ ID NO: 228487 - DNA, 25 bp, Artificial
  probe
  misc_feature (1)..(25): SEQ ID NO: 3602; WAN024G2J-3_at; Start 1248; Stop 1272
cctaaacgagtggtgaaaaggatgg

SEQ ID NO: 228488 - DNA, 25 bp, Artificial
  probe
  misc_feature (1)..(25): SEQ ID NO: 3602; WAN024G2J-3_at; Start 89; Stop 113
tagaggaacttcagctacacgcgaa

SEQ ID NO: 228489 - DNA, 25 bp, Artificial
  probe
  misc_feature (1)..(25): SEQ ID NO: 3602; WAN024G2J-3_at; Start 1151; Stop 1175
tcttcgcaagaaaaaggagttggcg

SEQ ID NO: 228490 - DNA, 25 bp, Artificial
  probe
  misc_feature (1)..(25): SEQ ID NO: 3602; WAN024G2J-3_at; Start 18; Stop 42
tttgcgccggaaagaaccttgattc

SEQ ID NO: 228491 - DNA, 25 bp, Artificial
  probe
  misc_feature (1)..(25): SEQ ID NO: 3602; WAN024G2J-3_at; Start 206; Stop 230
cactcctcgccagataaaagctaga

SEQ ID NO: 228492 - DNA, 25 bp, Artificial
  probe
  misc_feature (1)..(25): SEQ ID NO: 3602; WAN024G2J-3_at; Start 389; Stop 413
tacagtcgatgatgagggaaatgca

SEQ ID NO: 228493 - DNA, 25 bp, Artificial
  probe
  misc_feature (1)..(25): SEQ ID NO: 3602; WAN024G2J-3_at; Start 707; Stop 731
gcaagagttgcaacagcagctcaaa

SEQ ID NO: 228494 - DNA, 25 bp, Artificial
  probe
  misc_feature (1)..(25): SEQ ID NO: 3602; WAN024G2J-3_at; Start 1400; Stop 1424
gaaagaggcctttccaaatcctgaa

SEQ ID NO: 228495 - DNA, 25 bp, Artificial
  probe
  misc_feature (1)..(25): SEQ ID NO: 3602; WAN024G2J-3_at; Start 597; Stop 621
tctctaaaaacaagggaaactgagc

SEQ ID NO: 228496 - DNA, 25 bp, Artificial
  probe
  misc_feature (1)..(25): SEQ ID NO: 1991; WAN024G2J-5_at; Start 1060; Stop 1084
caaatgtctcagatgattggcgaaa

SEQ ID NO: 228497 - DNA, 25 bp, Artificial
  probe
  misc_feature (1)..(25): SEQ ID NO: 1991; WAN024G2J-5_at; Start 976; Stop 1000
caggctgctaagtattcgtggtctc

SEQ ID NO: 228498 - DNA, 25 bp, Artificial
  probe
  misc_feature (1)..(25): SEQ ID NO: 1991; WAN024G2J-5_at; Start 899; Stop 923
caggtacatcatttaaagcattggc

SEQ ID NO: 228499 - DNA, 25 bp, Artificial
  probe
  misc_feature (1)..(25): SEQ ID NO: 1991; WAN024G2J-5_at; Start 1088; Stop 1112
tagaaaaaggcgctcagatcgatgg

SEQ ID NO: 228500 - DNA, 25 bp, Artificial
  probe
  misc_feature (1)..(25): SEQ ID NO: 1991; WAN024G2J-5_at; Start 754; Stop 778
ttaggtggagagcacgataaactca

SEQ ID NO: 228501 - DNA, 25 bp, Artificial
  probe
  misc_feature (1)..(25): SEQ ID NO: 1991; WAN024G2J-5_at; Start 181; Stop 205
gatgcagcttatacagaagagcctg

SEQ ID NO: 228502 - DNA, 25 bp, Artificial
  probe
  misc_feature (1)..(25): SEQ ID NO: 1991; WAN024G2J-5_at; Start 1361; Stop 1385
ttctagctgctggtgacggacgtat

SEQ ID NO: 228503 - DNA, 25 bp, Artificial
  probe
  misc_feature (1)..(25): SEQ ID NO: 1991; WAN024G2J-5_at; Start 112; Stop 136
gatgtcacacaacgtatcaaggagc

SEQ ID NO: 228504 - DNA, 25 bp, Artificial
  probe
  misc_feature (1)..(25): SEQ ID NO: 1991; WAN024G2J-5_at; Start 819; Stop 843
cgaggctcatgaaggagttgatacc

SEQ ID NO: 228505 - DNA, 25 bp, Artificial
  probe
  misc_feature (1)..(25): SEQ ID NO: 1991; WAN024G2J-5_at; Start 393; Stop 417
gcgacaagagcaagaagaagcagtt

SEQ ID NO: 228506 - DNA, 25 bp, Artificial
  probe
  misc_feature (1)..(25): SEQ ID NO: 1991; WAN024G2J-5_at; Start 61; Stop 85
ccgacagtaaccagtaatgaaggct

SEQ ID NO: 228507 - DNA, 25 bp, Artificial
  probe
  misc_feature (1)..(25): SEQ ID NO: 1991; WAN024G2J-5_at; Start 268; Stop 292
cgtcgtcccaagacggaatggttct

SEQ ID NO: 228508 - DNA, 25 bp, Artificial
  probe
  misc_feature (1)..(25): SEQ ID NO: 1991; WAN024G2J-5_at; Start 637; Stop 661
tcagatagccttaagagtcgtccaa

SEQ ID NO: 228509 - DNA, 25 bp, Artificial
  probe
  misc_feature (1)..(25): SEQ ID NO: 1991; WAN024G2J-5_at; Start 1286; Stop 1310
tagaacgtgtcgcttcggccaaagc

SEQ ID NO: 228510 - DNA, 25 bp, Artificial
  probe
  misc_feature (1)..(25): SEQ ID NO: 1991; WAN024G2J-5_at; Start 252; Stop 276
tttccatgatgtagaacgtcgtccc

SEQ ID NO: 228511 - DNA, 25 bp, Artificial
  probe
  misc_feature (1)..(25): SEQ ID NO: 1991; WAN024G2J-5_at; Start 1543; Stop 1567
tcaccagctctttatatgcaggccg

SEQ ID NO: 228512 - DNA, 25 bp, Artificial
  probe
  misc_feature (1)..(25): SEQ ID NO: 1991; WAN024G2J-5_at; Start 464; Stop 488
tctggaatgccaagccacgctttgg

SEQ ID NO: 228513 - DNA, 25 bp, Artificial
  probe
  misc_feature (1)..(25): SEQ ID NO: 1991; WAN024G2J-5_at; Start 520; Stop 544
cggatggaagctgtcaatgtcctaa

SEQ ID NO: 228514 - DNA, 25 bp, Artificial
  probe
  misc_feature (1)..(25): SEQ ID NO: 1991; WAN024G2J-5_at; Start 360; Stop 384
ttatcagcctggaaaaggacaggac

SEQ ID NO: 228515 - DNA, 25 bp, Artificial
  probe
  misc_feature (1)..(25): SEQ ID NO: 1991; WAN024G2J-5_at; Start 953; Stop 977
acaactggtcttatgctgatgagca

SEQ ID NO: 228516 - DNA, 25 bp, Artificial
  probe
  misc_feature (1)..(25): SEQ ID NO: 1991; WAN024G2J-5_at; Start 1245; Stop 1269
caaagaactccgtaatgaactcaag

SEQ ID NO: 228517 - DNA, 25 bp, Artificial
  probe
  misc_feature (1)..(25): SEQ ID NO: 1991; WAN024G2J-5_at; Start 501; Stop 525
tacctatgacctagctcgacggatg

SEQ ID NO: 228518 - DNA, 25 bp, Artificial
  probe
  misc_feature (1)..(25): SEQ ID NO: 1991; WAN024G2J-5_at; Start 377; Stop 401
gacaggactatactctgcgacaaga

SEQ ID NO: 228519 - DNA, 25 bp, Artificial
  probe
  misc_feature (1)..(25): SEQ ID NO: 1991; WAN024G2J-5_at; Start 692; Stop 716
tagctgacgatgtaagacaacttgc

SEQ ID NO: 228520 - DNA, 25 bp, Artificial
  probe
  misc_feature (1)..(25): SEQ ID NO: 1991; WAN024G2J-5_at; Start 39; Stop 63
taaaatctatgcctacaccacaccg

SEQ ID NO: 228521 - DNA, 25 bp, Artificial
  probe
  misc_feature (1)..(25): SEQ ID NO: 1991; WAN024G2J-5_at; Start 838; Stop 862
gataccttcaagactgaccaagcct

SEQ ID NO: 228522 - DNA, 25 bp, Artificial
  probe
  misc_feature (1)..(25): SEQ ID NO: 1991; WAN024G2J-5_at; Start 1469; Stop 1493
tatccgttggtcagctgacgacagg

SEQ ID NO: 228523 - DNA, 25 bp, Artificial
  probe
  misc_feature (1)..(25): SEQ ID NO: 1991; WAN024G2J-5_at; Start 542; Stop 566
taattgtaacaaaccgccctgccat

SEQ ID NO: 228524 - DNA, 25 bp, Artificial
  probe
  misc_feature (1)..(25): SEQ ID NO: 1991; WAN024G2J-5_at; Start 803; Stop 827
acttgttggttattgacgaggctca

SEQ ID NO: 228525 - DNA, 25 bp, Artificial
  probe
  misc_feature (1)..(25): SEQ ID NO: 1991; WAN024G2J-5_at; Start 1485; Stop 1509
gacgacaggtgtcactatccctgaa

SEQ ID NO: 228526 - DNA, 25 bp, Artificial
  probe
  misc_feature (1)..(25): SEQ ID NO: 1991; WAN024G2J-5_at; Start 126; Stop 150
tatcaaggagcaaacgcatacagct

SEQ ID NO: 228527 - DNA, 25 bp, Artificial
  probe
  misc_feature (1)..(25): SEQ ID NO: 1991; WAN024G2J-5_at; Start 1588; Stop 1612
tactcatggagcgataacaaaggaa

SEQ ID NO: 228528 - DNA, 25 bp, Artificial
  probe
  misc_feature (1)..(25): SEQ ID NO: 1991; WAN024G2J-5_at; Start 781; Stop 805
tgggtaactgatctgcattgggact

SEQ ID NO: 228529 - DNA, 25 bp, Artificial
  probe
  misc_feature (1)..(25): SEQ ID NO: 1991; WAN024G2J-5_at; Start 592; Stop 616
gaaacattcatagcaggtcaaacga

SEQ ID NO: 228530 - DNA, 25 bp, Artificial
  probe
  misc_feature (1)..(25): SEQ ID NO: 939; WAN024G2K_at; Start 1; Stop 25
atgaaatacagaaaacgcttcctaa

SEQ ID NO: 228531 - DNA, 25 bp, Artificial
  probe
  misc_feature (1)..(25): SEQ ID NO: 939; WAN024G2K_at; Start 39; Stop 63
tgatataattatcaagaaaaaagat

SEQ ID NO: 228532 - DNA, 25 bp, Artificial
  probe
  misc_feature (1)..(25): SEQ ID NO: 939; WAN024G2K_at; Start 26; Stop 50
aacctaaagtttgtgatataattat

SEQ ID NO: 228533 - DNA, 25 bp, Artificial
  probe
  misc_feature (1)..(25): SEQ ID NO: 939; WAN024G2K_at; Start 2; Stop 26
tgaaatacagaaaacgcttcctaaa

SEQ ID NO: 228534 - DNA, 25 bp, Artificial
  probe
  misc_feature (1)..(25): SEQ ID NO: 939; WAN024G2K_at; Start 38; Stop 62
gtgatataattatcaagaaaaaaga

SEQ ID NO: 228535 - DNA, 25 bp, Artificial
  probe
  misc_feature (1)..(25): SEQ ID NO: 939; WAN024G2K_at; Start 37; Stop 61
tgtgatataattatcaagaaaaaag

SEQ ID NO: 228536 - DNA, 25 bp, Artificial
  probe
  misc_feature (1)..(25): SEQ ID NO: 939; WAN024G2K_at; Start 27; Stop 51
acctaaagtttgtgatataattatc

SEQ ID NO: 228537 - DNA, 25 bp, Artificial
  probe
  misc_feature (1)..(25): SEQ ID NO: 2760; WAN024G2L_at; Start 72; Stop 96
caaatttaagtatgcgattcgttcg

SEQ ID NO: 228538 - DNA, 25 bp, Artificial
  probe
  misc_feature (1)..(25): SEQ ID NO: 2760; WAN024G2L_at; Start 439; Stop 463
gagatgaagttaggccgctcaaatg

SEQ ID NO: 228539 - DNA, 25 bp, Artificial
  probe
  misc_feature (1)..(25): SEQ ID NO: 2760; WAN024G2L_at; Start 604; Stop 628
cacattgcggcgaactttgcttctt

SEQ ID NO: 228540 - DNA, 25 bp, Artificial
  probe
  misc_feature (1)..(25): SEQ ID NO: 2760; WAN024G2L_at; Start 668; Stop 692
ccaacttcggtgttggaaatatgct

SEQ ID NO: 228541 - DNA, 25 bp, Artificial
  probe
  misc_feature (1)..(25): SEQ ID NO: 2760; WAN024G2L_at; Start 407; Stop 431
tgacacacgatagtttcatctcagg

SEQ ID NO: 228542 - DNA, 25 bp, Artificial
  probe
  misc_feature (1)..(25): SEQ ID NO: 2760; WAN024G2L_at; Start 350; Stop 374
ttatcggagccttgatagcagggtg

SEQ ID NO: 228543 - DNA, 25 bp, Artificial
  probe
  misc_feature (1)..(25): SEQ ID NO: 2760; WAN024G2L_at; Start 654; Stop 678
tgcggattcaattgccaacttcggt

SEQ ID NO: 228544 - DNA, 25 bp, Artificial
  probe
  misc_feature (1)..(25): SEQ ID NO: 2760; WAN024G2L_at; Start 392; Stop 416
cagcctatgcgaatctgacacacga

SEQ ID NO: 228545 - DNA, 25 bp, Artificial
  probe
  misc_feature (1)..(25): SEQ ID NO: 2760; WAN024G2L_at; Start 639; Stop 663
gaaattcagtgttgctgcggattca

SEQ ID NO: 228546 - DNA, 25 bp, Artificial
  probe
  misc_feature (1)..(25): SEQ ID NO: 2760; WAN024G2L_at; Start 147; Stop 171
ggctgacttgattaataaaattgca

SEQ ID NO: 228547 - DNA, 25 bp, Artificial
  probe
  misc_feature (1)..(25): SEQ ID NO: 2760; WAN024G2L_at; Start 746; Stop 770
tgggtcttccatatgccttcctcaa

SEQ ID NO: 228548 - DNA, 25 bp, Artificial
  probe
  misc_feature (1)..(25): SEQ ID NO: 2760; WAN024G2L_at; Start 590; Stop 614
tcttaacaaacgagcacattgcggc

SEQ ID NO: 228549 - DNA, 25 bp, Artificial
  probe
  misc_feature (1)..(25): SEQ ID NO: 2760; WAN024G2L_at; Start 334; Stop 358
tgtaccttgttcaaccttatcggag

SEQ ID NO: 228550 - DNA, 25 bp, Artificial
  probe
  misc_feature (1)..(25): SEQ ID NO: 2760; WAN024G2L_at; Start 731; Stop 755
gaggaggcctcttgatgggtcttcc

SEQ ID NO: 228551 - DNA, 25 bp, Artificial
  probe
  misc_feature (1)..(25): SEQ ID NO: 2760; WAN024G2L_at; Start 616; Stop 640
aactttgcttctttcgcgattgtga

SEQ ID NO: 228552 - DNA, 25 bp, Artificial
  probe
  misc_feature (1)..(25): SEQ ID NO: 2760; WAN024G2L_at; Start 473; Stop 497
tgcttgaggcgattttggcaaatat

SEQ ID NO: 228553 - DNA, 25 bp, Artificial
  probe
  misc_feature (1)..(25): SEQ ID NO: 2760; WAN024G2L_at; Start 714; Stop 738
catcggaaactttatcggaggaggc

SEQ ID NO: 228554 - DNA, 25 bp, Artificial
  probe
  misc_feature (1)..(25): SEQ ID NO: 2760; WAN024G2L_at; Start 87; Stop 111
gattcgttcgatgttcgcaggtgca

SEQ ID NO: 228555 - DNA, 25 bp, Artificial
  probe
  misc_feature (1)..(25): SEQ ID NO: 2760; WAN024G2L_at; Start 703; Stop 727
ggtgtgactttcatcggaaacttta

SEQ ID NO: 228556 - DNA, 25 bp, Artificial
  probe
  misc_feature (1)..(25): SEQ ID NO: 2760; WAN024G2L_at; Start 237; Stop 261
gaatgccgagttggtcacttcaaac

SEQ ID NO: 228557 - DNA, 25 bp, Artificial
  probe
  misc_feature (1)..(25): SEQ ID NO: 2760; WAN024G2L_at; Start 162; Stop 186
taaaattgcaccaggtagtggacgc

SEQ ID NO: 228558 - DNA, 25 bp, Artificial
  probe
  misc_feature (1)..(25): SEQ ID NO: 2760; WAN024G2L_at; Start 36; Stop 60
tgcttgcaataagaaagaaagtctt

SEQ ID NO: 228559 - DNA, 25 bp, Artificial
  probe
  misc_feature (1)..(25): SEQ ID NO: 2760; WAN024G2L_at; Start 316; Stop 340
gctgagattttactatactgtacct

SEQ ID NO: 228560 - DNA, 25 bp, Artificial
  probe
  misc_feature (1)..(25): SEQ ID NO: 2760; WAN024G2L_at; Start 377; Stop 401
gctttgctcattcggcagcctatgc

SEQ ID NO: 228561 - DNA, 25 bp, Artificial
  probe
  misc_feature (1)..(25): SEQ ID NO: 2760; WAN024G2L_at; Start 101; Stop 125
tcgcaggtgcatttttaaccttcag

SEQ ID NO: 228562 - DNA, 25 bp, Artificial
  probe
  misc_feature (1)..(25): SEQ ID NO: 2760; WAN024G2L_at; Start 297; Stop 321
aatctcttggagaaaaacagctgag

SEQ ID NO: 228563 - DNA, 25 bp, Artificial
  probe
  misc_feature (1)..(25): SEQ ID NO: 2760; WAN024G2L_at; Start 116; Stop 140
taaccttcagtactgctgcaggtgc

SEQ ID NO: 228564 - DNA, 25 bp, Artificial
  probe
  misc_feature (1)..(25): SEQ ID NO: 2760; WAN024G2L_at; Start 679; Stop 703
gttggaaatatgcttcgccactggg

SEQ ID NO: 228565 - DNA, 25 bp, Artificial
  probe
  misc_feature (1)..(25): SEQ ID NO: 2760; WAN024G2L_at; Start 178; Stop 202
agtggacgcttcctctttccattcg

SEQ ID NO: 228566 - DNA, 25 bp, Artificial
  probe
  misc_feature (1)..(25): SEQ ID NO: 2760; WAN024G2L_at; Start 549; Stop 573
caaactttggcttgtgttgtcagct

SEQ ID NO: 228567 - DNA, 25 bp, Artificial
  probe
  misc_feature (1)..(25): SEQ ID NO: 2760; WAN024G2L_at; Start 530; Stop 554
tggtcaaagatggtggtgccaaact

SEQ ID NO: 228568 - DNA, 25 bp, Artificial
  probe
  misc_feature (1)..(25): SEQ ID NO: 2760; WAN024G2L_at; Start 760; Stop 784
gccttcctcaataaaaacgaagata

SEQ ID NO: 228569 - DNA, 25 bp, Artificial
  probe
  misc_feature (1)..(25): SEQ ID NO: 2760; WAN024G2L_at; Start 458; Stop 482
caaatgaattggtcttgcttgaggc

SEQ ID NO: 228570 - DNA, 25 bp, Artificial
  probe
  misc_feature (1)..(25): SEQ ID NO: 2760; WAN024G2L_at; Start 257; Stop 281
caaacatgatgttcttgactgctgg

SEQ ID NO: 228571 - DNA, 25 bp, Artificial
  probe
  misc_feature (1)..(25): SEQ ID NO: 5234; WAN024G2M_at; Start 107; Stop 131
gcttctacttcctccaaattatcaa

SEQ ID NO: 228572 - DNA, 25 bp, Artificial
  probe
  misc_feature (1)..(25): SEQ ID NO: 5234; WAN024G2M_at; Start 190; Stop 214
ggttccaccgtaaatagtcgaagca

SEQ ID NO: 228573 - DNA, 25 bp, Artificial
  probe
  misc_feature (1)..(25): SEQ ID NO: 5234; WAN024G2M_at; Start 9; Stop 33
tatgagcaatctctgccagtttttc

SEQ ID NO: 228574 - DNA, 25 bp, Artificial
  probe
  misc_feature (1)..(25): SEQ ID NO: 5234; WAN024G2M_at; Start 13; Stop 37
agcaatctctgccagtttttccagg

SEQ ID NO: 228575 - DNA, 25 bp, Artificial
  probe
  misc_feature (1)..(25): SEQ ID NO: 5234; WAN024G2M_at; Start 198; Stop 222
cgtaaatagtcgaagcagccactac

SEQ ID NO: 228576 - DNA, 25 bp, Artificial
  probe
  misc_feature (1)..(25): SEQ ID NO: 5234; WAN024G2M_at; Start 62; Stop 86
cccaaggtttcaatcaagacaagct

SEQ ID NO: 228577 - DNA, 25 bp, Artificial
  probe
  misc_feature (1)..(25): SEQ ID NO: 5234; WAN024G2M_at; Start 58; Stop 82
gttacccaaggtttcaatcaagaca

SEQ ID NO: 228578 - DNA, 25 bp, Artificial
  probe
  misc_feature (1)..(25): SEQ ID NO: 5234; WAN024G2M_at; Start 67; Stop 91
ggtttcaatcaagacaagcttggta

SEQ ID NO: 228579 - DNA, 25 bp, Artificial
  probe
  misc_feature (1)..(25): SEQ ID NO: 5234; WAN024G2M_at; Start 201; Stop 225
aaatagtcgaagcagccactacatg

SEQ ID NO: 228580 - DNA, 25 bp, Artificial
  probe
  misc_feature (1)..(25): SEQ ID NO: 5234; WAN024G2M_at; Start 193; Stop 217
tccaccgtaaatagtcgaagcagcc

SEQ ID NO: 228581 - DNA, 25 bp, Artificial
  probe
  misc_feature (1)..(25): SEQ ID NO: 5234; WAN024G2M_at; Start 5; Stop 29
tgtttatgagcaatctctgccagtt

SEQ ID NO: 228582 - DNA, 25 bp, Artificial
  probe
  misc_feature (1)..(25): SEQ ID NO: 5234; WAN024G2M_at; Start 20; Stop 44
tctgccagtttttccaggtctggaa

SEQ ID NO: 228583 - DNA, 25 bp, Artificial
  probe
  misc_feature (1)..(25): SEQ ID NO: 5234; WAN024G2M_at; Start 182; Stop 206
agattgaaggttccaccgtaaatag

SEQ ID NO: 228584 - DNA, 25 bp, Artificial
  probe
  misc_feature (1)..(25): SEQ ID NO: 5234; WAN024G2M_at; Start 88; Stop 112
ggtattgtctttgatagctgcttct

SEQ ID NO: 228585 - DNA, 25 bp, Artificial
  probe
  misc_feature (1)..(25): SEQ ID NO: 5234; WAN024G2M_at; Start 100; Stop 124
gatagctgcttctacttcctccaaa

SEQ ID NO: 228586 - DNA, 25 bp, Artificial
  probe
  misc_feature (1)..(25): SEQ ID NO: 5234; WAN024G2M_at; Start 252; Stop 276
tcgtataagtcactgcagtcatacc

SEQ ID NO: 228587 - DNA, 25 bp, Artificial
  probe
  misc_feature (1)..(25): SEQ ID NO: 5234; WAN024G2M_at; Start 139; Stop 163
aaaggttgttgtgataccataacga

SEQ ID NO: 228588 - DNA, 25 bp, Artificial
  probe
  misc_feature (1)..(25): SEQ ID NO: 5234; WAN024G2M_at; Start 142; Stop 166
ggttgttgtgataccataacgagga

SEQ ID NO: 228589 - DNA, 25 bp, Artificial
  probe
  misc_feature (1)..(25): SEQ ID NO: 5234; WAN024G2M_at; Start 33; Stop 57
ccaggtctggaatattaatcaaggg

SEQ ID NO: 228590 - DNA, 25 bp, Artificial
  probe
  misc_feature (1)..(25): SEQ ID NO: 5234; WAN024G2M_at; Start 3; Stop 27
gatgtttatgagcaatctctgccag

SEQ ID NO: 228591 - DNA, 25 bp, Artificial
  probe
  misc_feature (1)..(25): SEQ ID NO: 5234; WAN024G2M_at; Start 247; Stop 271
caaaatcgtataagtcactgcagtc

SEQ ID NO: 228592 - DNA, 25 bp, Artificial
  probe
  misc_feature (1)..(25): SEQ ID NO: 5234; WAN024G2M_at; Start 81; Stop 105
caagcttggtattgtctttgatagc

SEQ ID NO: 228593 - DNA, 25 bp, Artificial
  probe
  misc_feature (1)..(25): SEQ ID NO: 5234; WAN024G2M_at; Start 72; Stop 96
caatcaagacaagcttggtattgtc

SEQ ID NO: 228594 - DNA, 25 bp, Artificial
  probe
  misc_feature (1)..(25): SEQ ID NO: 5234; WAN024G2M_at; Start 1; Stop 25
ttgatgtttatgagcaatctctgcc

SEQ ID NO: 228595 - DNA, 25 bp, Artificial
  probe
  misc_feature (1)..(25): SEQ ID NO: 5234; WAN024G2M_at; Start 245; Stop 269
gccaaaatcgtataagtcactgcag

SEQ ID NO: 228596 - DNA, 25 bp, Artificial
  probe
  misc_feature (1)..(25): SEQ ID NO: 5234; WAN024G2M_at; Start 15; Stop 39
caatctctgccagtttttccaggtc

SEQ ID NO: 228597 - DNA, 25 bp, Artificial
  probe
  misc_feature (1)..(25): SEQ ID NO: 5234; WAN024G2M_at; Start 84; Stop 108
gcttggtattgtctttgatagctgc

SEQ ID NO: 228598 - DNA, 25 bp, Artificial
  probe
  misc_feature (1)..(25): SEQ ID NO: 5234; WAN024G2M_at; Start 255; Stop 279
tataagtcactgcagtcatacctga

SEQ ID NO: 228599 - DNA, 25 bp, Artificial
  probe
  misc_feature (1)..(25): SEQ ID NO: 5234; WAN024G2M_at; Start 173; Stop 197
tctttcaaaagattgaaggttccac

SEQ ID NO: 228600 - DNA, 25 bp, Artificial
  probe
  misc_feature (1)..(25): SEQ ID NO: 5234; WAN024G2M_at; Start 104; Stop 128
gctgcttctacttcctccaaattat

SEQ ID NO: 228601 - DNA, 25 bp, Artificial
  probe
  misc_feature (1)..(25): SEQ ID NO: 5234; WAN024G2M_at; Start 195; Stop 219
caccgtaaatagtcgaagcagccac

SEQ ID NO: 228602 - DNA, 25 bp, Artificial
  probe
  misc_feature (1)..(25): SEQ ID NO: 5234; WAN024G2M_at; Start 146; Stop 170
gttgtgataccataacgaggaaggg

SEQ ID NO: 228603 - DNA, 25 bp, Artificial
  probe
  misc_feature (1)..(25): SEQ ID NO: 5234; WAN024G2M_at; Start 60; Stop 84
tacccaaggtttcaatcaagacaag

SEQ ID NO: 228604 - DNA, 25 bp, Artificial
  probe
  misc_feature (1)..(25): SEQ ID NO: 5234; WAN024G2M_at; Start 177; Stop 201
tcaaaagattgaaggttccaccgta

SEQ ID NO: 228605 - DNA, 25 bp, Artificial
  probe
  misc_feature (1)..(25): SEQ ID NO: 3469; WAN024G2N_at; Start 993; Stop 1017
cactcacggtcaattgtcagaaaaa

SEQ ID NO: 228606 - DNA, 25 bp, Artificial
  probe
  misc_feature (1)..(25): SEQ ID NO: 3469; WAN024G2N_at; Start 1022; Stop 1046
tagaagcagcaggtgtcacaccaaa

SEQ ID NO: 228607 - DNA, 25 bp, Artificial
  probe
  misc_feature (1)..(25): SEQ ID NO: 3469; WAN024G2N_at; Start 464; Stop 488
ctaagtttatcggtgggcatggtac

SEQ ID NO: 228608 - DNA, 25 bp, Artificial
  probe
  misc_feature (1)..(25): SEQ ID NO: 3469; WAN024G2N_at; Start 271; Stop 295
gctatcaaagacaataccaagcttg

SEQ ID NO: 228609 - DNA, 25 bp, Artificial
  probe
  misc_feature (1)..(25): SEQ ID NO: 3469; WAN024G2N_at; Start 46; Stop 70
aatcctacaacagctgcccttgaag

SEQ ID NO: 228610 - DNA, 25 bp, Artificial
  probe
  misc_feature (1)..(25): SEQ ID NO: 3469; WAN024G2N_at; Start 249; Stop 273
taatttggaggaagtagaagcagct

SEQ ID NO: 228611 - DNA, 25 bp, Artificial
  probe
  misc_feature (1)..(25): SEQ ID NO: 3469; WAN024G2N_at; Start 961; Stop 985
gctaaatcgcttgttgtccatccag

SEQ ID NO: 228612 - DNA, 25 bp, Artificial
  probe
  misc_feature (1)..(25): SEQ ID NO: 3469; WAN024G2N_at; Start 160; Stop 184
gctgcttcgactatttacggtggaa

SEQ ID NO: 228613 - DNA, 25 bp, Artificial
  probe
  misc_feature (1)..(25): SEQ ID NO: 3469; WAN024G2N_at; Start 682; Stop 706
gctttcctcttgctacaaagacttg

SEQ ID NO: 228614 - DNA, 25 bp, Artificial
  probe
  misc_feature (1)..(25): SEQ ID NO: 3469; WAN024G2N_at; Start 928; Stop 952
gaaatcttttctgaccttgcaaacg

SEQ ID NO: 228615 - DNA, 25 bp, Artificial
  probe
  misc_feature (1)..(25): SEQ ID NO: 3469; WAN024G2N_at; Start 862; Stop 886
ggttcaatctttaccttccacgtca

SEQ ID NO: 228616 - DNA, 25 bp, Artificial
  probe
  misc_feature (1)..(25): SEQ ID NO: 3469; WAN024G2N_at; Start 1050; Stop 1074
aatccacttgtctatcggtcttgaa

SEQ ID NO: 228617 - DNA, 25 bp, Artificial
  probe
  misc_feature (1)..(25): SEQ ID NO: 3469; WAN024G2N_at; Start 211; Stop 235
cctcgttatggtatcacaacaacct

SEQ ID NO: 228618 - DNA, 25 bp, Artificial
  probe
  misc_feature (1)..(25): SEQ ID NO: 3469; WAN024G2N_at; Start 478; Stop 502
gggcatggtacaactattggaggaa

SEQ ID NO: 228619 - DNA, 25 bp, Artificial
  probe
  misc_feature (1)..(25): SEQ ID NO: 3469; WAN024G2N_at; Start 4; Stop 28
tttgccttgaggaaaccagggaaca

SEQ ID NO: 228620 - DNA, 25 bp, Artificial
  probe
  misc_feature (1)..(25): SEQ ID NO: 3469; WAN024G2N_at; Start 320; Stop 344
ccttgattaatattccagacctgga

SEQ ID NO: 228621 - DNA, 25 bp, Artificial
  probe
  misc_feature (1)..(25): SEQ ID NO: 3469; WAN024G2N_at; Start 716; Stop 740
cacttcgtgtggaacgccatgtaca

SEQ ID NO: 228622 - DNA, 25 bp, Artificial
  probe
  misc_feature (1)..(25): SEQ ID NO: 3469; WAN024G2N_at; Start 727; Stop 751
gaacgccatgtacaaaatgctgaga

SEQ ID NO: 228623 - DNA, 25 bp, Artificial
  probe
  misc_feature (1)..(25): SEQ ID NO: 3469; WAN024G2N_at; Start 1009; Stop 1033
tcagaaaaagacctagaagcagcag

SEQ ID NO: 228624 - DNA, 25 bp, Artificial
  probe
  misc_feature (1)..(25): SEQ ID NO: 3469; WAN024G2N_at; Start 1093; Stop 1117
gaagacttacgcttggccttggaaa

SEQ ID NO: 228625 - DNA, 25 bp, Artificial
  probe
  misc_feature (1)..(25): SEQ ID NO: 3469; WAN024G2N_at; Start 543; Stop 567
gaaattccctcaatttgttgacgag

SEQ ID NO: 228626 - DNA, 25 bp, Artificial
  probe
  misc_feature (1)..(25): SEQ ID NO: 3469; WAN024G2N_at; Start 436; Stop 460
ggcgttgacattgccattcactctg

SEQ ID NO: 228627 - DNA, 25 bp, Artificial
  probe
  misc_feature (1)..(25): SEQ ID NO: 3469; WAN024G2N_at; Start 760; Stop 784
gattttcttgtcaaccatcctaagg

SEQ ID NO: 228628 - DNA, 25 bp, Artificial
  probe
  misc_feature (1)..(25): SEQ ID NO: 3469; WAN024G2N_at; Start 92; Stop 116
cagcatcaggtatgactgcagtgac

SEQ ID NO: 228629 - DNA, 25 bp, Artificial
  probe
  misc_feature (1)..(25): SEQ ID NO: 3469; WAN024G2N_at; Start 372; Stop 396
tcaaatcccacttgtgtcagacaat

SEQ ID NO: 228630 - DNA, 25 bp, Artificial
  probe
  misc_feature (1)..(25): SEQ ID NO: 3469; WAN024G2N_at; Start 62; Stop 86
cccttgaaggtggtgttgaagcgct

SEQ ID NO: 228631 - DNA, 25 bp, Artificial
  probe
  misc_feature (1)..(25): SEQ ID NO: 3469; WAN024G2N_at; Start 901; Stop 925
gaagcacgcaaggtcattgataatt

SEQ ID NO: 228632 - DNA, 25 bp, Artificial
  probe
  misc_feature (1)..(25): SEQ ID NO: 3469; WAN024G2N_at; Start 175; Stop 199
tacggtggaaccttcaatcttttga

SEQ ID NO: 228633 - DNA, 25 bp, Artificial
  probe
  misc_feature (1)..(25): SEQ ID NO: 3469; WAN024G2N_at; Start 108; Stop 132
tgcagtgacttatacgattttggcg

SEQ ID NO: 228634 - DNA, 25 bp, Artificial
  probe
  misc_feature (1)..(25): SEQ ID NO: 3469; WAN024G2N_at; Start 421; Stop 445
aacgtcttctctcatggcgttgaca

SEQ ID NO: 228635 - DNA, 25 bp, Artificial
  probe
  misc_feature (1)..(25): SEQ ID NO: 3469; WAN024G2N_at; Start 641; Stop 665
aattgcttcgtgatacaggtgcagc

SEQ ID NO: 228636 - DNA, 25 bp, Artificial
  probe
  misc_feature (1)..(25): SEQ ID NO: 3469; WAN024G2N_at; Start 658; Stop 682
ggtgcagccttgtcaccattcaatg

SEQ ID NO: 228637 - DNA, 25 bp, Artificial
  probe
  misc_feature (1)..(25): SEQ ID NO: 3469; WAN024G2N_at; Start 626; Stop 650
tagctgttcgagttcaattgcttcg

SEQ ID NO: 228638 - DNA, 25 bp, Artificial
  probe
  misc_feature (1)..(25): SEQ ID NO: 3469; WAN024G2N_at; Start 77; Stop 101
ttgaagcgctagcaacagcatcagg

SEQ ID NO: 228639 - DNA, 25 bp, Artificial
  probe
  misc_feature (1)..(25): SEQ ID NO: 7370; WAN024G2O_at; Start 185; Stop 209
tgtcgatttcatcaatagcttttcc

SEQ ID NO: 228640 - DNA, 25 bp, Artificial
  probe
  misc_feature (1)..(25): SEQ ID NO: 7370; WAN024G2O_at; Start 139; Stop 163
gatgtggtcaggaatttcttaacct

SEQ ID NO: 228641 - DNA, 25 bp, Artificial
  probe
  misc_feature (1)..(25): SEQ ID NO: 7370; WAN024G2O_at; Start 59; Stop 83
tcattgttggatttttccgggtcaa

SEQ ID NO: 228642 - DNA, 25 bp, Artificial
  probe
  misc_feature (1)..(25): SEQ ID NO: 7370; WAN024G2O_at; Start 189; Stop 213
gatttcatcaatagcttttccaaag

SEQ ID NO: 228643 - DNA, 25 bp, Artificial
  probe
  misc_feature (1)..(25): SEQ ID NO: 7370; WAN024G2O_at; Start 8; Stop 32
taccgttcatttttgctttctactc

SEQ ID NO: 228644 - DNA, 25 bp, Artificial
  probe
  misc_feature (1)..(25): SEQ ID NO: 7370; WAN024G2O_at; Start 197; Stop 221
caatagcttttccaaagttagtcga

SEQ ID NO: 228645 - DNA, 25 bp, Artificial
  probe
  misc_feature (1)..(25): SEQ ID NO: 7370; WAN024G2O_at; Start 168; Stop 192
catgcgtttgatggccttgtcgatt

SEQ ID NO: 228646 - DNA, 25 bp, Artificial
  probe
  misc_feature (1)..(25): SEQ ID NO: 7370; WAN024G2O_at; Start 127; Stop 151
agttggttttcagatgtggtcagga

SEQ ID NO: 228647 - DNA, 25 bp, Artificial
  probe
  misc_feature (1)..(25): SEQ ID NO: 7370; WAN024G2O_at; Start 180; Stop 204
ggccttgtcgatttcatcaatagct

SEQ ID NO: 228648 - DNA, 25 bp, Artificial
  probe
  misc_feature (1)..(25): SEQ ID NO: 7370; WAN024G2O_at; Start 54; Stop 78
cgctttcattgttggatttttccgg

SEQ ID NO: 228649 - DNA, 25 bp, Artificial
  probe
  misc_feature (1)..(25): SEQ ID NO: 7370; WAN024G2O_at; Start 19; Stop 43
tttgctttctactcccccttcagtg

SEQ ID NO: 228650 - DNA, 25 bp, Artificial
  probe
  misc_feature (1)..(25): SEQ ID NO: 7370; WAN024G2O_at; Start 171; Stop 195
gcgtttgatggccttgtcgatttca

SEQ ID NO: 228651 - DNA, 25 bp, Artificial
  probe
  misc_feature (1)..(25): SEQ ID NO: 7370; WAN024G2O_at; Start 210; Stop 234
aaagttagtcgaagctgaattatag

SEQ ID NO: 228652 - DNA, 25 bp, Artificial
  probe
  misc_feature (1)..(25): SEQ ID NO: 7370; WAN024G2O_at; Start 203; Stop 227
cttttccaaagttagtcgaagctga

SEQ ID NO: 228653 - DNA, 25 bp, Artificial
  probe
  misc_feature (1)..(25): SEQ ID NO: 7370; WAN024G2O_at; Start 81; Stop 105
caattttttaacagagacatcttcc

SEQ ID NO: 228654 - DNA, 25 bp, Artificial
  probe
  misc_feature (1)..(25): SEQ ID NO: 7370; WAN024G2O_at; Start 76; Stop 100
cgggtcaattttttaacagagacat

SEQ ID NO: 228655 - DNA, 25 bp, Artificial
  probe
  misc_feature (1)..(25): SEQ ID NO: 7370; WAN024G2O_at; Start 158; Stop 182
taacctcttccatgcgtttgatggc

SEQ ID NO: 228656 - DNA, 25 bp, Artificial
  probe
  misc_feature (1)..(25): SEQ ID NO: 7370; WAN024G2O_at; Start 116; Stop 140
tagctaaacggagttggttttcaga

SEQ ID NO: 228657 - DNA, 25 bp, Artificial
  probe
  misc_feature (1)..(25): SEQ ID NO: 7370; WAN024G2O_at; Start 162; Stop 186
ctcttccatgcgtttgatggccttg

SEQ ID NO: 228658 - DNA, 25 bp, Artificial
  probe
  misc_feature (1)..(25): SEQ ID NO: 7370; WAN024G2O_at; Start 166; Stop 190
tccatgcgtttgatggccttgtcga

SEQ ID NO: 228659 - DNA, 25 bp, Artificial
  probe
  misc_feature (1)..(25): SEQ ID NO: 7370; WAN024G2O_at; Start 124; Stop 148
cggagttggttttcagatgtggtca

SEQ ID NO: 228660 - DNA, 25 bp, Artificial
  probe
  misc_feature (1)..(25): SEQ ID NO: 7370; WAN024G2O_at; Start 88; Stop 112
ttaacagagacatcttccaatttgt

SEQ ID NO: 228661 - DNA, 25 bp, Artificial
  probe
  misc_feature (1)..(25): SEQ ID NO: 7370; WAN024G2O_at; Start 137; Stop 161
cagatgtggtcaggaatttcttaac

SEQ ID NO: 228662 - DNA, 25 bp, Artificial
  probe
  misc_feature (1)..(25): SEQ ID NO: 7370; WAN024G2O_at; Start 200; Stop 224
tagcttttccaaagttagtcgaagc

SEQ ID NO: 228663 - DNA, 25 bp, Artificial
  probe
  misc_feature (1)..(25): SEQ ID NO: 7370; WAN024G2O_at; Start 94; Stop 118
gagacatcttccaatttgttgttag

SEQ ID NO: 228664 - DNA, 25 bp, Artificial
  probe
  misc_feature (1)..(25): SEQ ID NO: 7370; WAN024G2O_at; Start 34; Stop 58
cccttcagtgcttcgaacttcgctt

SEQ ID NO: 228665 - DNA, 25 bp, Artificial
  probe
  misc_feature (1)..(25): SEQ ID NO: 7370; WAN024G2O_at; Start 38; Stop 62
tcagtgcttcgaacttcgctttcat

SEQ ID NO: 228666 - DNA, 25 bp, Artificial
  probe
  misc_feature (1)..(25): SEQ ID NO: 7370; WAN024G2O_at; Start 132; Stop 156
gttttcagatgtggtcaggaatttc

SEQ ID NO: 228667 - DNA, 25 bp, Artificial
  probe
  misc_feature (1)..(25): SEQ ID NO: 7370; WAN024G2O_at; Start 150; Stop 174
gaatttcttaacctcttccatgcgt

SEQ ID NO: 228668 - DNA, 25 bp, Artificial
  probe
  misc_feature (1)..(25): SEQ ID NO: 7370; WAN024G2O_at; Start 104; Stop 128
ccaatttgttgttagctaaacggag

SEQ ID NO: 228669 - DNA, 25 bp, Artificial
  probe
  misc_feature (1)..(25): SEQ ID NO: 7370; WAN024G2O_at; Start 207; Stop 231
tccaaagttagtcgaagctgaatta

SEQ ID NO: 228670 - DNA, 25 bp, Artificial
  probe
  misc_feature (1)..(25): SEQ ID NO: 7370; WAN024G2O_at; Start 143; Stop 167
tggtcaggaatttcttaacctcttc

SEQ ID NO: 228671 - DNA, 25 bp, Artificial
  probe
  misc_feature (1)..(25): SEQ ID NO: 7370; WAN024G2O_at; Start 177; Stop 201
gatggccttgtcgatttcatcaata

SEQ ID NO: 228672 - DNA, 25 bp, Artificial
  probe
  misc_feature (1)..(25): SEQ ID NO: 7370; WAN024G2O_at; Start 46; Stop 70
tcgaacttcgctttcattgttggat

SEQ ID NO: 228673 - DNA, 25 bp, Artificial
  probe
  misc_feature (1)..(25): SEQ ID NO: 5480; WAN024G2P_at; Start 84; Stop 108
tatcagcctcaagcatggtcaccaa

SEQ ID NO: 228674 - DNA, 25 bp, Artificial
  probe
  misc_feature (1)..(25): SEQ ID NO: 5480; WAN024G2P_at; Start 300; Stop 324
tatccttctcaaagtaagcatttgg

SEQ ID NO: 228675 - DNA, 25 bp, Artificial
  probe
  misc_feature (1)..(25): SEQ ID NO: 5480; WAN024G2P_at; Start 282; Stop 306
cacgcgaagagaccttgttatcctt

SEQ ID NO: 228676 - DNA, 25 bp, Artificial
  probe
  misc_feature (1)..(25): SEQ ID NO: 5480; WAN024G2P_at; Start 336; Stop 360
tacgaaccttgttaaactcactctc

SEQ ID NO: 228677 - DNA, 25 bp, Artificial
  probe
  misc_feature (1)..(25): SEQ ID NO: 5480; WAN024G2P_at; Start 57; Stop 81
caacaatccctgtgttaaagtagtc

SEQ ID NO: 228678 - DNA, 25 bp, Artificial
  probe
  misc_feature (1)..(25): SEQ ID NO: 5480; WAN024G2P_at; Start 173; Stop 197
ttgtgcttcttctctgttccgtccg

SEQ ID NO: 228679 - DNA, 25 bp, Artificial
  probe
  misc_feature (1)..(25): SEQ ID NO: 5480; WAN024G2P_at; Start 217; Stop 241
catgatagaaatgatttcaactcca

SEQ ID NO: 228680 - DNA, 25 bp, Artificial
  probe
  misc_feature (1)..(25): SEQ ID NO: 5480; WAN024G2P_at; Start 96; Stop 120
gcatggtcaccaaaacggcatactc

SEQ ID NO: 228681 - DNA, 25 bp, Artificial
  probe
  misc_feature (1)..(25): SEQ ID NO: 5480; WAN024G2P_at; Start 135; Stop 159
gacggtccttgtccaattccttgta

SEQ ID NO: 228682 - DNA, 25 bp, Artificial
  probe
  misc_feature (1)..(25): SEQ ID NO: 5480; WAN024G2P_at; Start 31; Stop 55
cattttttcatactcgtgactgacg

SEQ ID NO: 228683 - DNA, 25 bp, Artificial
  probe
  misc_feature (1)..(25): SEQ ID NO: 5480; WAN024G2P_at; Start 52; Stop 76
gacgtcaacaatccctgtgttaaag

SEQ ID NO: 228684 - DNA, 25 bp, Artificial
  probe
  misc_feature (1)..(25): SEQ ID NO: 5480; WAN024G2P_at; Start 116; Stop 140
tactcacagttcttctcccgacggt

SEQ ID NO: 228685 - DNA, 25 bp, Artificial
  probe
  misc_feature (1)..(25): SEQ ID NO: 5480; WAN024G2P_at; Start 316; Stop 340
agcatttggaaaggcgaaactacga

SEQ ID NO: 228686 - DNA, 25 bp, Artificial
  probe
  misc_feature (1)..(25): SEQ ID NO: 5480; WAN024G2P_at; Start 251; Stop 275
cactcacggaagataaagtcccctt

SEQ ID NO: 228687 - DNA, 25 bp, Artificial
  probe
  misc_feature (1)..(25): SEQ ID NO: 5480; WAN024G2P_at; Start 272; Stop 296
cctttagacccacgcgaagagacct

SEQ ID NO: 228688 - DNA, 25 bp, Artificial
  probe
  misc_feature (1)..(25): SEQ ID NO: 5480; WAN024G2P_at; Start 192; Stop 216
cgtccgcttcgtttttcatctcaaa

SEQ ID NO: 228689 - DNA, 25 bp, Artificial
  probe
  misc_feature (1)..(25): SEQ ID NO: 5480; WAN024G2P_at; Start 77; Stop 101
tagtcattatcagcctcaagcatgg

SEQ ID NO: 228690 - DNA, 25 bp, Artificial
  probe
  misc_feature (1)..(25): SEQ ID NO: 5480; WAN024G2P_at; Start 1; Stop 25
ttggataaagaattgaggacgaaca

SEQ ID NO: 228691 - DNA, 25 bp, Artificial
  probe
  misc_feature (1)..(25): SEQ ID NO: 5480; WAN024G2P_at; Start 145; Stop 169
gtccaattccttgtaaaaatctgca

SEQ ID NO: 228692 - DNA, 25 bp, Artificial
  probe
  misc_feature (1)..(25): SEQ ID NO: 5480; WAN024G2P_at; Start 201; Stop 225
cgtttttcatctcaaacatgataga

SEQ ID NO: 228693 - DNA, 25 bp, Artificial
  probe
  misc_feature (1)..(25): SEQ ID NO: 5480; WAN024G2P_at; Start 102; Stop 126
tcaccaaaacggcatactcacagtt

SEQ ID NO: 228694 - DNA, 25 bp, Artificial
  probe
  misc_feature (1)..(25): SEQ ID NO: 5480; WAN024G2P_at; Start 345; Stop 369
tgttaaactcactctctgcatactg

SEQ ID NO: 228695 - DNA, 25 bp, Artificial
  probe
  misc_feature (1)..(25): SEQ ID NO: 5480; WAN024G2P_at; Start 46; Stop 70
gtgactgacgtcaacaatccctgtg

SEQ ID NO: 228696 - DNA, 25 bp, Artificial
  probe
  misc_feature (1)..(25): SEQ ID NO: 5480; WAN024G2P_at; Start 92; Stop 116
tcaagcatggtcaccaaaacggcat

SEQ ID NO: 228697 - DNA, 25 bp, Artificial
  probe
  misc_feature (1)..(25): SEQ ID NO: 5480; WAN024G2P_at; Start 158; Stop 182
taaaaatctgcattcttgtgcttct

SEQ ID NO: 228698 - DNA, 25 bp, Artificial
  probe
  misc_feature (1)..(25): SEQ ID NO: 5480; WAN024G2P_at; Start 290; Stop 314
gagaccttgttatccttctcaaagt

SEQ ID NO: 228699 - DNA, 25 bp, Artificial
  probe
  misc_feature (1)..(25): SEQ ID NO: 5480; WAN024G2P_at; Start 238; Stop 262
tccattttcatcacactcacggaag

SEQ ID NO: 228700 - DNA, 25 bp, Artificial
  probe
  misc_feature (1)..(25): SEQ ID NO: 5480; WAN024G2P_at; Start 245; Stop 269
tcatcacactcacggaagataaagt

SEQ ID NO: 228701 - DNA, 25 bp, Artificial
  probe
  misc_feature (1)..(25): SEQ ID NO: 5480; WAN024G2P_at; Start 14; Stop 38
tgaggacgaacaacatacatttttt

SEQ ID NO: 228702 - DNA, 25 bp, Artificial
  probe
  misc_feature (1)..(25): SEQ ID NO: 5480; WAN024G2P_at; Start 351; Stop 375
actcactctctgcatactgttctag

SEQ ID NO: 228703 - DNA, 25 bp, Artificial
  probe
  misc_feature (1)..(25): SEQ ID NO: 5480; WAN024G2P_at; Start 179; Stop 203
ttcttctctgttccgtccgcttcgt

SEQ ID NO: 228704 - DNA, 25 bp, Artificial
  probe
  misc_feature (1)..(25): SEQ ID NO: 5480; WAN024G2P_at; Start 276; Stop 300
tagacccacgcgaagagaccttgtt

SEQ ID NO: 228705 - DNA, 25 bp, Artificial
  probe
  misc_feature (1)..(25): SEQ ID NO: 5480; WAN024G2P_at; Start 72; Stop 96
taaagtagtcattatcagcctcaag

SEQ ID NO: 228706 - DNA, 25 bp, Artificial
  probe
  misc_feature (1)..(25): SEQ ID NO: 5480; WAN024G2P_at; Start 309; Stop 333
caaagtaagcatttggaaaggcgaa

SEQ ID NO: 228707 - DNA, 25 bp, Artificial
  probe
  misc_feature (1)..(25): SEQ ID NO: 1037; WAN024G2Q_at; Start 772; Stop 796
tacaaggaattggacaaggaccgtc

SEQ ID NO: 228708 - DNA, 25 bp, Artificial
  probe
  misc_feature (1)..(25): SEQ ID NO: 1037; WAN024G2Q_at; Start 792; Stop 816
ccgtcgggagaagaactgtgagtat

SEQ ID NO: 228709 - DNA, 25 bp, Artificial
  probe
  misc_feature (1)..(25): SEQ ID NO: 1037; WAN024G2Q_at; Start 591; Stop 615
tcgtagtttcgcctttccaaatgct

SEQ ID NO: 228710 - DNA, 25 bp, Artificial
  probe
  misc_feature (1)..(25): SEQ ID NO: 1037; WAN024G2Q_at; Start 6; Stop 30
cgaaatcaaatgtcccaactgtggg

SEQ ID NO: 228711 - DNA, 25 bp, Artificial
  probe
  misc_feature (1)..(25): SEQ ID NO: 1037; WAN024G2Q_at; Start 715; Stop 739
tttgagatgaaaaacgaagcggacg

SEQ ID NO: 228712 - DNA, 25 bp, Artificial
  probe
  misc_feature (1)..(25): SEQ ID NO: 1037; WAN024G2Q_at; Start 616; Stop 640
tactttgagaaggataacaaggtct

SEQ ID NO: 228713 - DNA, 25 bp, Artificial
  probe
  misc_feature (1)..(25): SEQ ID NO: 1037; WAN024G2Q_at; Start 982; Stop 1006
gagttggccttggttcgcgagcaaa

SEQ ID NO: 228714 - DNA, 25 bp, Artificial
  probe
  misc_feature (1)..(25): SEQ ID NO: 1037; WAN024G2Q_at; Start 177; Stop 201
ggctcagaaggatcaagaaattgcg

SEQ ID NO: 228715 - DNA, 25 bp, Artificial
  probe
  misc_feature (1)..(25): SEQ ID NO: 1037; WAN024G2Q_at; Start 874; Stop 898
gacgtcagtcacgagtatgaaaaaa

SEQ ID NO: 228716 - DNA, 25 bp, Artificial
  probe
  misc_feature (1)..(25): SEQ ID NO: 1037; WAN024G2Q_at; Start 454; Stop 478
gttaagcaaaactacgaagcccagc

SEQ ID NO: 228717 - DNA, 25 bp, Artificial
  probe
  misc_feature (1)..(25): SEQ ID NO: 1037; WAN024G2Q_at; Start 332; Stop 356
ccttgcgtttggagcatgaaaatca

SEQ ID NO: 228718 - DNA, 25 bp, Artificial
  probe
  misc_feature (1)..(25): SEQ ID NO: 1037; WAN024G2Q_at; Start 555; Stop 579
cctagaacagtatgcagagagtgag

SEQ ID NO: 228719 - DNA, 25 bp, Artificial
  probe
  misc_feature (1)..(25): SEQ ID NO: 1037; WAN024G2Q_at; Start 96; Stop 120
tgataaggaactacacgataggatg

SEQ ID NO: 228720 - DNA, 25 bp, Artificial
  probe
  misc_feature (1)..(25): SEQ ID NO: 1037; WAN024G2Q_at; Start 519; Stop 543
taaggctcaacaatctacaaaagcg

SEQ ID NO: 228721 - DNA, 25 bp, Artificial
  probe
  misc_feature (1)..(25): SEQ ID NO: 1037; WAN024G2Q_at; Start 861; Stop 885
cacagggattgttgacgtcagtcac

SEQ ID NO: 228722 - DNA, 25 bp, Artificial
  probe
  misc_feature (1)..(25): SEQ ID NO: 1037; WAN024G2Q_at; Start 1107; Stop 1131
tgaaatcgacaaggccatcaaacgc

SEQ ID NO: 228723 - DNA, 25 bp, Artificial
  probe
  misc_feature (1)..(25): SEQ ID NO: 1037; WAN024G2Q_at; Start 933; Stop 957
gattggtctcttacgtaatgcggcg

SEQ ID NO: 228724 - DNA, 25 bp, Artificial
  probe
  misc_feature (1)..(25): SEQ ID NO: 1037; WAN024G2Q_at; Start 967; Stop 991
ctaaaatacaagcaggagttggcct

SEQ ID NO: 228725 - DNA, 25 bp, Artificial
  probe
  misc_feature (1)..(25): SEQ ID NO: 1037; WAN024G2Q_at; Start 1092; Stop 1116
tggaaaagctattgatgaaatcgac

SEQ ID NO: 228726 - DNA, 25 bp, Artificial
  probe
  misc_feature (1)..(25): SEQ ID NO: 1037; WAN024G2Q_at; Start 659; Stop 683
gggactttatcttccgtgagtgtga

SEQ ID NO: 228727 - DNA, 25 bp, Artificial
  probe
  misc_feature (1)..(25): SEQ ID NO: 1037; WAN024G2Q_at; Start 124; Stop 148
caggaactggccttggctgagcaaa

SEQ ID NO: 228728 - DNA, 25 bp, Artificial
  probe
  misc_feature (1)..(25): SEQ ID NO: 1037; WAN024G2Q_at; Start 1234; Stop 1258
ccaacaatgaaagcgaagttcgaag

SEQ ID NO: 228729 - DNA, 25 bp, Artificial
  probe
  misc_feature (1)..(25): SEQ ID NO: 1037; WAN024G2Q_at; Start 632; Stop 656
acaaggtctcttcgcgtgggtctaa

SEQ ID NO: 228730 - DNA, 25 bp, Artificial
  probe
  misc_feature (1)..(25): SEQ ID NO: 1037; WAN024G2Q_at; Start 1122; Stop 1146
catcaaacgcatggaagaggttaag

SEQ ID NO: 228731 - DNA, 25 bp, Artificial
  probe
  misc_feature (1)..(25): SEQ ID NO: 1037; WAN024G2Q_at; Start 811; Stop 835
gagtatgccgttttggtgaccatgc

SEQ ID NO: 228732 - DNA, 25 bp, Artificial
  probe
  misc_feature (1)..(25): SEQ ID NO: 1037; WAN024G2Q_at; Start 1075; Stop 1099
tcagcttcgactaactttggaaaag

SEQ ID NO: 228733 - DNA, 25 bp, Artificial
  probe
  misc_feature (1)..(25): SEQ ID NO: 1037; WAN024G2Q_at; Start 844; Stop 868
gataatgactactttaacacaggga

SEQ ID NO: 228734 - DNA, 25 bp, Artificial
  probe
  misc_feature (1)..(25): SEQ ID NO: 1037; WAN024G2Q_at; Start 1219; Stop 1243
ttgacccggaaaaatccaacaatga

SEQ ID NO: 228735 - DNA, 25 bp, Artificial
  probe
  misc_feature (1)..(25): SEQ ID NO: 1037; WAN024G2Q_at; Start 893; Stop 917
aaaaaatgtatgttgttcgtcctca

SEQ ID NO: 228736 - DNA, 25 bp, Artificial
  probe
  misc_feature (1)..(25): SEQ ID NO: 1037; WAN024G2Q_at; Start 828; Stop 852
gaccatgcttgaggctgataatgac

SEQ ID NO: 228737 - DNA, 25 bp, Artificial
  probe
  misc_feature (1)..(25): SEQ ID NO: 1037; WAN024G2Q_at; Start 155; Stop 179
tgaatgagcaacagactaaactggc

SEQ ID NO: 228738 - DNA, 25 bp, Artificial
  probe
  misc_feature (1)..(25): SEQ ID NO: 1037; WAN024G2Q_at; Start 948; Stop 972
taatgcggcgctaaattccctaaaa

SEQ ID NO: 228739 - DNA, 25 bp, Artificial
  probe
  misc_feature (1)..(25): SEQ ID NO: 1037; WAN024G2Q_at; Start 734; Stop 758
cggacggaacagagaagaagcacaa

SEQ ID NO: 228740 - DNA, 25 bp, Artificial
  probe
  misc_feature (1)..(25): SEQ ID NO: 1037; WAN024G2Q_at; Start 228; Stop 252
tgatacagaaaaagaattggccaag

SEQ ID NO: 228741 - DNA, 25 bp, Artificial
  probe
  misc_feature (1)..(25): SEQ ID NO: 7627; WAN024G2R_at; Start 168; Stop 192
tagcaatcgcttcatcaacaagctt

SEQ ID NO: 228742 - DNA, 25 bp, Artificial
  probe
  misc_feature (1)..(25): SEQ ID NO: 7627; WAN024G2R_at; Start 367; Stop 391
cggatccaaggttccaccatgacca

SEQ ID NO: 228743 - DNA, 25 bp, Artificial
  probe
  misc_feature (1)..(25): SEQ ID NO: 7627; WAN024G2R_at; Start 33; Stop 57
caaattgataaatggtcacctgacg

SEQ ID NO: 228744 - DNA, 25 bp, Artificial
  probe
  misc_feature (1)..(25): SEQ ID NO: 7627; WAN024G2R_at; Start 147; Stop 171
gagtaataggcccagtcaagctagc

SEQ ID NO: 228745 - DNA, 25 bp, Artificial
  probe
  misc_feature (1)..(25): SEQ ID NO: 7627; WAN024G2R_at; Start 208; Stop 232
caaaacaggggtttctgcgaccact

SEQ ID NO: 228746 - DNA, 25 bp, Artificial
  probe
  misc_feature (1)..(25): SEQ ID NO: 7627; WAN024G2R_at; Start 193; Stop 217
ttcatccaagagagacaaaacaggg

SEQ ID NO: 228747 - DNA, 25 bp, Artificial
  probe
  misc_feature (1)..(25): SEQ ID NO: 7627; WAN024G2R_at; Start 113; Stop 137
ttaaccttaactgccgaatacatag

SEQ ID NO: 228748 - DNA, 25 bp, Artificial
  probe
  misc_feature (1)..(25): SEQ ID NO: 7627; WAN024G2R_at; Start 363; Stop 387
catccggatccaaggttccaccatg

SEQ ID NO: 228749 - DNA, 25 bp, Artificial
  probe
  misc_feature (1)..(25): SEQ ID NO: 7627; WAN024G2R_at; Start 347; Stop 371
ggcaaaacacccaccacatccggat

SEQ ID NO: 228750 - DNA, 25 bp, Artificial
  probe
  misc_feature (1)..(25): SEQ ID NO: 7627; WAN024G2R_at; Start 182; Stop 206
tcaacaagcttttcatccaagagag

SEQ ID NO: 228751 - DNA, 25 bp, Artificial
  probe
  misc_feature (1)..(25): SEQ ID NO: 7627; WAN024G2R_at; Start 267; Stop 291
ccagagtgatttccccctcatagat

SEQ ID NO: 228752 - DNA, 25 bp, Artificial
  probe
  misc_feature (1)..(25): SEQ ID NO: 7627; WAN024G2R_at; Start 140; Stop 164
ggaatctgagtaataggcccagtca

SEQ ID NO: 228753 - DNA, 25 bp, Artificial
  probe
  misc_feature (1)..(25): SEQ ID NO: 7627; WAN024G2R_at; Start 45; Stop 69
tggtcacctgacgttctggacgctc

SEQ ID NO: 228754 - DNA, 25 bp, Artificial
  probe
  misc_feature (1)..(25): SEQ ID NO: 7627; WAN024G2R_at; Start 39; Stop 63
gataaatggtcacctgacgttctgg

SEQ ID NO: 228755 - DNA, 25 bp, Artificial
  probe
  misc_feature (1)..(25): SEQ ID NO: 7627; WAN024G2R_at; Start 153; Stop 177
taggcccagtcaagctagcaatcgc

SEQ ID NO: 228756 - DNA, 25 bp, Artificial
  probe
  misc_feature (1)..(25): SEQ ID NO: 7627; WAN024G2R_at; Start 248; Stop 272
tcagtcttcgtggaatagcccagag

SEQ ID NO: 228757 - DNA, 25 bp, Artificial
  probe
  misc_feature (1)..(25): SEQ ID NO: 7627; WAN024G2R_at; Start 332; Stop 356
ttgccaaccgcaatcggcaaaacac

SEQ ID NO: 228758 - DNA, 25 bp, Artificial
  probe
  misc_feature (1)..(25): SEQ ID NO: 7627; WAN024G2R_at; Start 2; Stop 26
tggccatcataagaaatcggacttg

SEQ ID NO: 228759 - DNA, 25 bp, Artificial
  probe
  misc_feature (1)..(25): SEQ ID NO: 7627; WAN024G2R_at; Start 89; Stop 113
gcatactcatagagcttgcgaccat

SEQ ID NO: 228760 - DNA, 25 bp, Artificial
  probe
  misc_feature (1)..(25): SEQ ID NO: 7627; WAN024G2R_at; Start 253; Stop 277
cttcgtggaatagcccagagtgatt

SEQ ID NO: 228761 - DNA, 25 bp, Artificial
  probe
  misc_feature (1)..(25): SEQ ID NO: 7627; WAN024G2R_at; Start 293; Stop 317
ttaccctcgtcctgcataaactcga

SEQ ID NO: 228762 - DNA, 25 bp, Artificial
  probe
  misc_feature (1)..(25): SEQ ID NO: 7627; WAN024G2R_at; Start 305; Stop 329
tgcataaactcgaccatgcgtgtcg

SEQ ID NO: 228763 - DNA, 25 bp, Artificial
  probe
  misc_feature (1)..(25): SEQ ID NO: 7627; WAN024G2R_at; Start 324; Stop 348
gtgtcgccttgccaaccgcaatcgg

SEQ ID NO: 228764 - DNA, 25 bp, Artificial
  probe
  misc_feature (1)..(25): SEQ ID NO: 7627; WAN024G2R_at; Start 98; Stop 122
tagagcttgcgaccattaaccttaa

SEQ ID NO: 228765 - DNA, 25 bp, Artificial
  probe
  misc_feature (1)..(25): SEQ ID NO: 7627; WAN024G2R_at; Start 310; Stop 334
aaactcgaccatgcgtgtcgccttg

SEQ ID NO: 228766 - DNA, 25 bp, Artificial
  probe
  misc_feature (1)..(25): SEQ ID NO: 7627; WAN024G2R_at; Start 55; Stop 79
acgttctggacgctccacttcctga

SEQ ID NO: 228767 - DNA, 25 bp, Artificial
  probe
  misc_feature (1)..(25): SEQ ID NO: 7627; WAN024G2R_at; Start 19; Stop 43
cggacttgttcgctcaaattgataa

SEQ ID NO: 228768 - DNA, 25 bp, Artificial
  probe
  misc_feature (1)..(25): SEQ ID NO: 7627; WAN024G2R_at; Start 12; Stop 36
aagaaatcggacttgttcgctcaaa

SEQ ID NO: 228769 - DNA, 25 bp, Artificial
  probe
  misc_feature (1)..(25): SEQ ID NO: 7627; WAN024G2R_at; Start 237; Stop 261
cactagcatcctcagtcttcgtgga

SEQ ID NO: 228770 - DNA, 25 bp, Artificial
  probe
  misc_feature (1)..(25): SEQ ID NO: 7627; WAN024G2R_at; Start 78; Stop 102
gaccagcacgcgcatactcatagag

SEQ ID NO: 228771 - DNA, 25 bp, Artificial
  probe
  misc_feature (1)..(25): SEQ ID NO: 7627; WAN024G2R_at; Start 106; Stop 130
gcgaccattaaccttaactgccgaa

SEQ ID NO: 228772 - DNA, 25 bp, Artificial
  probe
  misc_feature (1)..(25): SEQ ID NO: 7627; WAN024G2R_at; Start 124; Stop 148
tgccgaatacatagggggaatctga

SEQ ID NO: 228773 - DNA, 25 bp, Artificial
  probe
  misc_feature (1)..(25): SEQ ID NO: 7627; WAN024G2R_at; Start 165; Stop 189
agctagcaatcgcttcatcaacaag

SEQ ID NO: 228774 - DNA, 25 bp, Artificial
  probe
  misc_feature (1)..(25): SEQ ID NO: 7627; WAN024G2R_at; Start 284; Stop 308
tcatagatcttaccctcgtcctgca

SEQ ID NO: 228775 - DNA, 25 bp, Artificial
  probe
  misc_feature (1)..(25): SEQ ID NO: 5343; WAN024G2S_at; Start 200; Stop 224
caatttcctccaaggcaagagcgtc

SEQ ID NO: 228776 - DNA, 25 bp, Artificial
  probe
  misc_feature (1)..(25): SEQ ID NO: 5343; WAN024G2S_at; Start 167; Stop 191
gaaaatctaattgcccagcctctac

SEQ ID NO: 228777 - DNA, 25 bp, Artificial
  probe
  misc_feature (1)..(25): SEQ ID NO: 5343; WAN024G2S_at; Start 234; Stop 258
taagccagcagcactagtacgagtc

SEQ ID NO: 228778 - DNA, 25 bp, Artificial
  probe
  misc_feature (1)..(25): SEQ ID NO: 5343; WAN024G2S_at; Start 192; Stop 216
tttttcagcaatttcctccaaggca

SEQ ID NO: 228779 - DNA, 25 bp, Artificial
  probe
  misc_feature (1)..(25): SEQ ID NO: 5343; WAN024G2S_at; Start 164; Stop 188
ggagaaaatctaattgcccagcctc

SEQ ID NO: 228780 - DNA, 25 bp, Artificial
  probe
  misc_feature (1)..(25): SEQ ID NO: 5343; WAN024G2S_at; Start 32; Stop 56
tatcatcttcaaaggcagccagttc

SEQ ID NO: 228781 - DNA, 25 bp, Artificial
  probe
  misc_feature (1)..(25): SEQ ID NO: 5343; WAN024G2S_at; Start 228; Stop 252
taattgtaagccagcagcactagta

SEQ ID NO: 228782 - DNA, 25 bp, Artificial
  probe
  misc_feature (1)..(25): SEQ ID NO: 5343; WAN024G2S_at; Start 67; Stop 91
tggtctagctcaataaaacgaccaa

SEQ ID NO: 228783 - DNA, 25 bp, Artificial
  probe
  misc_feature (1)..(25): SEQ ID NO: 5343; WAN024G2S_at; Start 179; Stop 203
gcccagcctctactttttcagcaat

SEQ ID NO: 228784 - DNA, 25 bp, Artificial
  probe
  misc_feature (1)..(25): SEQ ID NO: 5343; WAN024G2S_at; Start 142; Stop 166
cctgtcccaatctctaaaggatgga

SEQ ID NO: 228785 - DNA, 25 bp, Artificial
  probe
  misc_feature (1)..(25): SEQ ID NO: 5343; WAN024G2S_at; Start 175; Stop 199
aattgcccagcctctactttttcag

SEQ ID NO: 228786 - DNA, 25 bp, Artificial
  probe
  misc_feature (1)..(25): SEQ ID NO: 5343; WAN024G2S_at; Start 218; Stop 242
gagcgtcttctaattgtaagccagc

SEQ ID NO: 228787 - DNA, 25 bp, Artificial
  probe
  misc_feature (1)..(25): SEQ ID NO: 5343; WAN024G2S_at; Start 149; Stop 173
caatctctaaaggatggagaaaatc

SEQ ID NO: 228788 - DNA, 25 bp, Artificial
  probe
  misc_feature (1)..(25): SEQ ID NO: 5343; WAN024G2S_at; Start 245; Stop 269
cactagtacgagtcaaatgggacat

SEQ ID NO: 228789 - DNA, 25 bp, Artificial
  probe
  misc_feature (1)..(25): SEQ ID NO: 5343; WAN024G2S_at; Start 6; Stop 30
ccgtttttctagaatggctaacaat

SEQ ID NO: 228790 - DNA, 25 bp, Artificial
  probe
  misc_feature (1)..(25): SEQ ID NO: 5343; WAN024G2S_at; Start 45; Stop 69
ggcagccagttctttgtccgtttgg

SEQ ID NO: 228791 - DNA, 25 bp, Artificial
  probe
  misc_feature (1)..(25): SEQ ID NO: 5343; WAN024G2S_at; Start 40; Stop 64
tcaaaggcagccagttctttgtccg

SEQ ID NO: 228792 - DNA, 25 bp, Artificial
  probe
  misc_feature (1)..(25): SEQ ID NO: 5343; WAN024G2S_at; Start 55; Stop 79
tctttgtccgtttggtctagctcaa

SEQ ID NO: 228793 - DNA, 25 bp, Artificial
  probe
  misc_feature (1)..(25): SEQ ID NO: 5343; WAN024G2S_at; Start 2; Stop 26
tgccccgtttttctagaatggctaa

SEQ ID NO: 228794 - DNA, 25 bp, Artificial
  probe
  misc_feature (1)..(25): SEQ ID NO: 5343; WAN024G2S_at; Start 126; Stop 150
aactttgacaaggtcacctgtccca

SEQ ID NO: 228795 - DNA, 25 bp, Artificial
  probe
  misc_feature (1)..(25): SEQ ID NO: 5343; WAN024G2S_at; Start 14; Stop 38
ctagaatggctaacaatttatcatc

SEQ ID NO: 228796 - DNA, 25 bp, Artificial
  probe
  misc_feature (1)..(25): SEQ ID NO: 5343; WAN024G2S_at; Start 223; Stop 247
tcttctaattgtaagccagcagcac

SEQ ID NO: 228797 - DNA, 25 bp, Artificial
  probe
  misc_feature (1)..(25): SEQ ID NO: 5343; WAN024G2S_at; Start 204; Stop 228
ttcctccaaggcaagagcgtcttct

SEQ ID NO: 228798 - DNA, 25 bp, Artificial
  probe
  misc_feature (1)..(25): SEQ ID NO: 5343; WAN024G2S_at; Start 241; Stop 265
gcagcactagtacgagtcaaatggg

SEQ ID NO: 228799 - DNA, 25 bp, Artificial
  probe
  misc_feature (1)..(25): SEQ ID NO: 5343; WAN024G2S_at; Start 249; Stop 273
agtacgagtcaaatgggacatatga

SEQ ID NO: 228800 - DNA, 25 bp, Artificial
  probe
  misc_feature (1)..(25): SEQ ID NO: 5343; WAN024G2S_at; Start 215; Stop 239
caagagcgtcttctaattgtaagcc

SEQ ID NO: 228801 - DNA, 25 bp, Artificial
  probe
  misc_feature (1)..(25): SEQ ID NO: 5343; WAN024G2S_at; Start 158; Stop 182
aaggatggagaaaatctaattgccc

SEQ ID NO: 228802 - DNA, 25 bp, Artificial
  probe
  misc_feature (1)..(25): SEQ ID NO: 5343; WAN024G2S_at; Start 196; Stop 220
tcagcaatttcctccaaggcaagag

SEQ ID NO: 228803 - DNA, 25 bp, Artificial
  probe
  misc_feature (1)..(25): SEQ ID NO: 5343; WAN024G2S_at; Start 60; Stop 84
gtccgtttggtctagctcaataaaa

SEQ ID NO: 228804 - DNA, 25 bp, Artificial
  probe
  misc_feature (1)..(25): SEQ ID NO: 5343; WAN024G2S_at; Start 208; Stop 232
tccaaggcaagagcgtcttctaatt

SEQ ID NO: 228805 - DNA, 25 bp, Artificial
  probe
  misc_feature (1)..(25): SEQ ID NO: 5343; WAN024G2S_at; Start 137; Stop 161
ggtcacctgtcccaatctctaaagg

SEQ ID NO: 228806 - DNA, 25 bp, Artificial
  probe
  misc_feature (1)..(25): SEQ ID NO: 5343; WAN024G2S_at; Start 27; Stop 51
caatttatcatcttcaaaggcagcc

SEQ ID NO: 228807 - DNA, 25 bp, Artificial
  probe
  misc_feature (1)..(25): SEQ ID NO: 5343; WAN024G2S_at; Start 121; Stop 145
aggaaaactttgacaaggtcacctg

SEQ ID NO: 228808 - DNA, 25 bp, Artificial
  probe
  misc_feature (1)..(25): SEQ ID NO: 5343; WAN024G2S_at; Start 237; Stop 261
gccagcagcactagtacgagtcaaa

SEQ ID NO: 228809 - DNA, 25 bp, Artificial
  probe
  misc_feature (1)..(25): SEQ ID NO: 1042; WAN024G2T_at; Start 688; Stop 712
cctttagagattgggacaggtgacc

SEQ ID NO: 228810 - DNA, 25 bp, Artificial
  probe
  misc_feature (1)..(25): SEQ ID NO: 1042; WAN024G2T_at; Start 136; Stop 160
ccgattgcggttggcaaggcgacac

SEQ ID NO: 228811 - DNA, 25 bp, Artificial
  probe
  misc_feature (1)..(25): SEQ ID NO: 1042; WAN024G2T_at; Start 31; Stop 55
gcaggaatgacctcgcatgatgcgg

SEQ ID NO: 228812 - DNA, 25 bp, Artificial
  probe
  misc_feature (1)..(25): SEQ ID NO: 1042; WAN024G2T_at; Start 765; Stop 789
ttttattgagctagaccaaacggac

SEQ ID NO: 228813 - DNA, 25 bp, Artificial
  probe
  misc_feature (1)..(25): SEQ ID NO: 1042; WAN024G2T_at; Start 290; Stop 314
aaaagcttgttgatgaagcgattgc

SEQ ID NO: 228814 - DNA, 25 bp, Artificial
  probe
  misc_feature (1)..(25): SEQ ID NO: 1042; WAN024G2T_at; Start 441; Stop 465
ttatcaatttgagcgaacaagtccg

SEQ ID NO: 228815 - DNA, 25 bp, Artificial
  probe
  misc_feature (1)..(25): SEQ ID NO: 1042; WAN024G2T_at; Start 793; Stop 817
gaactggctgcctttgaagatgata

SEQ ID NO: 228816 - DNA, 25 bp, Artificial
  probe
  misc_feature (1)..(25): SEQ ID NO: 1042; WAN024G2T_at; Start 500; Stop 524
ttcgtgtaaaatgcagtaaagggac

SEQ ID NO: 228817 - DNA, 25 bp, Artificial
  probe
  misc_feature (1)..(25): SEQ ID NO: 1042; WAN024G2T_at; Start 382; Stop 406
ctctatgagtatgcgcgtgctggtc

SEQ ID NO: 228818 - DNA, 25 bp, Artificial
  probe
  misc_feature (1)..(25): SEQ ID NO: 1042; WAN024G2T_at; Start 635; Stop 659
ccttggaggaaattgctgaaaaagt

SEQ ID NO: 228819 - DNA, 25 bp, Artificial
  probe
  misc_feature (1)..(25): SEQ ID NO: 1042; WAN024G2T_at; Start 307; Stop 331
gcgattgctagcttgactgggccta

SEQ ID NO: 228820 - DNA, 25 bp, Artificial
  probe
  misc_feature (1)..(25): SEQ ID NO: 1042; WAN024G2T_at; Start 162; Stop 186
catggtcgagtttatgcaggacgag

SEQ ID NO: 228821 - DNA, 25 bp, Artificial
  probe
  misc_feature (1)..(25): SEQ ID NO: 1042; WAN024G2T_at; Start 344; Stop 368
cccctatgtattcggcagttaaggt

SEQ ID NO: 228822 - DNA, 25 bp, Artificial
  probe
  misc_feature (1)..(25): SEQ ID NO: 1042; WAN024G2T_at; Start 845; Stop 869
gcaatctctataagccaaggaaggt

SEQ ID NO: 228823 - DNA, 25 bp, Artificial
  probe
  misc_feature (1)..(25): SEQ ID NO: 1042; WAN024G2T_at; Start 359; Stop 383
cagttaaggttaatggtcgcaagct

SEQ ID NO: 228824 - DNA, 25 bp, Artificial
  probe
  misc_feature (1)..(25): SEQ ID NO: 1042; WAN024G2T_at; Start 556; Stop 580
gaaaagcttggttatgcggctcata

SEQ ID NO: 228825 - DNA, 25 bp, Artificial
  probe
  misc_feature (1)..(25): SEQ ID NO: 1042; WAN024G2T_at; Start 542; Stop 566
cagttgatttgggtgaaaagcttgg

SEQ ID NO: 228826 - DNA, 25 bp, Artificial
  probe
  misc_feature (1)..(25): SEQ ID NO: 1042; WAN024G2T_at; Start 702; Stop 726
gacaggtgaccttgtcaaagttttc

SEQ ID NO: 228827 - DNA, 25 bp, Artificial
  probe
  misc_feature (1)..(25): SEQ ID NO: 1042; WAN024G2T_at; Start 369; Stop 393
taatggtcgcaagctctatgagtat

SEQ ID NO: 228828 - DNA, 25 bp, Artificial
  probe
  misc_feature (1)..(25): SEQ ID NO: 1042; WAN024G2T_at; Start 601; Stop 625
agtgctgctggcttacaattagaag

SEQ ID NO: 228829 - DNA, 25 bp, Artificial
  probe
  misc_feature (1)..(25): SEQ ID NO: 1042; WAN024G2T_at; Start 649; Stop 673
gctgaaaaagtagaggctgggcaat

SEQ ID NO: 228830 - DNA, 25 bp, Artificial
  probe
  misc_feature (1)..(25): SEQ ID NO: 1042; WAN024G2T_at; Start 781; Stop 805
caaacggacaaagaactggctgcct

SEQ ID NO: 228831 - DNA, 25 bp, Artificial
  probe
  misc_feature (1)..(25): SEQ ID NO: 1042; WAN024G2T_at; Start 77; Stop 101
tgggaaccaagaaaattggtcatgg

SEQ ID NO: 228832 - DNA, 25 bp, Artificial
  probe
  misc_feature (1)..(25): SEQ ID NO: 1042; WAN024G2T_at; Start 586; Stop 610
catttgactcgtactagtgctgctg

SEQ ID NO: 228833 - DNA, 25 bp, Artificial
  probe
  misc_feature (1)..(25): SEQ ID NO: 1042; WAN024G2T_at; Start 63; Stop 87
actgcgtaagattttgggaaccaag

SEQ ID NO: 228834 - DNA, 25 bp, Artificial
  probe
  misc_feature (1)..(25): SEQ ID NO: 1042; WAN024G2T_at; Start 176; Stop 200
tgcaggacgagggtaagatctatga

SEQ ID NO: 228835 - DNA, 25 bp, Artificial
  probe
  misc_feature (1)..(25): SEQ ID NO: 1042; WAN024G2T_at; Start 568; Stop 592
tatgcggctcatatgtcccatttga

SEQ ID NO: 228836 - DNA, 25 bp, Artificial
  probe
  misc_feature (1)..(25): SEQ ID NO: 1042; WAN024G2T_at; Start 819; Stop 843
attgttagccattctagaaaaacgg

SEQ ID NO: 228837 - DNA, 25 bp, Artificial
  probe
  misc_feature (1)..(25): SEQ ID NO: 1042; WAN024G2T_at; Start 526; Stop 550
tacatccgtactttgtcagttgatt

SEQ ID NO: 228838 - DNA, 25 bp, Artificial
  probe
  misc_feature (1)..(25): SEQ ID NO: 1042; WAN024G2T_at; Start 405; Stop 429
tcaggaagtggagcgtccagaacgt

SEQ ID NO: 228839 - DNA, 25 bp, Artificial
  probe
  misc_feature (1)..(25): SEQ ID NO: 1042; WAN024G2T_at; Start 661; Stop 685
gaggctgggcaattagattttctcc

SEQ ID NO: 228840 - DNA, 25 bp, Artificial
  probe
  misc_feature (1)..(25): SEQ ID NO: 1042; WAN024G2T_at; Start 46; Stop 70
catgatgcggtttttaaactgcgta

SEQ ID NO: 228841 - DNA, 25 bp, Artificial
  probe
  misc_feature (1)..(25): SEQ ID NO: 1042; WAN024G2T_at; Start 150; Stop 174
caaggcgacacgcatggtcgagttt

SEQ ID NO: 228842 - DNA, 25 bp, Artificial
  probe
  misc_feature (1)..(25): SEQ ID NO: 1042; WAN024G2T_at; Start 458; Stop 482
caagtccgatttcttatgatggcca

SEQ ID NO: 228843 - DNA, 25 bp, Artificial
  probe
  misc_feature (1)..(25): SEQ ID NO: 2163; WAN024G2U_at; Start 114; Stop 138
ctccgttattttatccgtcgtctat

SEQ ID NO: 228844 - DNA, 25 bp, Artificial
  probe
  misc_feature (1)..(25): SEQ ID NO: 2163; WAN024G2U_at; Start 98; Stop 122
tattttgcatgctatcctccgttat

SEQ ID NO: 228845 - DNA, 25 bp, Artificial
  probe
  misc_feature (1)..(25): SEQ ID NO: 2163; WAN024G2U_at; Start 164; Stop 188
tagtctcatcagcaaaaaacaccag

SEQ ID NO: 228846 - DNA, 25 bp, Artificial
  probe
  misc_feature (1)..(25): SEQ ID NO: 2163; WAN024G2U_at; Start 82; Stop 106
ccaataatgattggtctattttgca

SEQ ID NO: 228847 - DNA, 25 bp, Artificial
  probe
  misc_feature (1)..(25): SEQ ID NO: 2163; WAN024G2U_at; Start 230; Stop 254
tagggtttgagcaagcatctgcaag

SEQ ID NO: 228848 - DNA, 25 bp, Artificial
  probe
  misc_feature (1)..(25): SEQ ID NO: 2163; WAN024G2U_at; Start 226; Stop 250
cctgtagggtttgagcaagcatctg

SEQ ID NO: 228849 - DNA, 25 bp, Artificial
  probe
  misc_feature (1)..(25): SEQ ID NO: 2163; WAN024G2U_at; Start 4; Stop 28
gaaatcttttcatcaggaaaatgcg

SEQ ID NO: 228850 - DNA, 25 bp, Artificial
  probe
  misc_feature (1)..(25): SEQ ID NO: 2163; WAN024G2U_at; Start 66; Stop 90
agaaccacctgtcactccaataatg

SEQ ID NO: 228851 - DNA, 25 bp, Artificial
  probe
  misc_feature (1)..(25): SEQ ID NO: 2163; WAN024G2U_at; Start 71; Stop 95
cacctgtcactccaataatgattgg

SEQ ID NO: 228852 - DNA, 25 bp, Artificial
  probe
  misc_feature (1)..(25): SEQ ID NO: 2163; WAN024G2U_at; Start 244; Stop 268
gcatctgcaagaaagccagtctccc

SEQ ID NO: 228853 - DNA, 25 bp, Artificial
  probe
  misc_feature (1)..(25): SEQ ID NO: 2163; WAN024G2U_at; Start 132; Stop 156
cgtctattctatcacattttttaca

SEQ ID NO: 228854 - DNA, 25 bp, Artificial
  probe
  misc_feature (1)..(25): SEQ ID NO: 2163; WAN024G2U_at; Start 28; Stop 52
gataaaatggctcttgaaacactgg

SEQ ID NO: 228855 - DNA, 25 bp, Artificial
  probe
  misc_feature (1)..(25): SEQ ID NO: 2163; WAN024G2U_at; Start 16; Stop 40
tcaggaaaatgcgataaaatggctc

SEQ ID NO: 228856 - DNA, 25 bp, Artificial
  probe
  misc_feature (1)..(25): SEQ ID NO: 2163; WAN024G2U_at; Start 169; Stop 193
tcatcagcaaaaaacaccagagtct

SEQ ID NO: 228857 - DNA, 25 bp, Artificial
  probe
  misc_feature (1)..(25): SEQ ID NO: 2163; WAN024G2U_at; Start 241; Stop 265
caagcatctgcaagaaagccagtct

SEQ ID NO: 228858 - DNA, 25 bp, Artificial
  probe
  misc_feature (1)..(25): SEQ ID NO: 2163; WAN024G2U_at; Start 108; Stop 132
gctatcctccgttattttatccgtc

SEQ ID NO: 228859 - DNA, 25 bp, Artificial
  probe
  misc_feature (1)..(25): SEQ ID NO: 2163; WAN024G2U_at; Start 94; Stop 118
ggtctattttgcatgctatcctccg

SEQ ID NO: 228860 - DNA, 25 bp, Artificial
  probe
  misc_feature (1)..(25): SEQ ID NO: 2163; WAN024G2U_at; Start 153; Stop 177
tacaaaatttatagtctcatcagca

SEQ ID NO: 228861 - DNA, 25 bp, Artificial
  probe
  misc_feature (1)..(25): SEQ ID NO: 2163; WAN024G2U_at; Start 23; Stop 47
aatgcgataaaatggctcttgaaac

SEQ ID NO: 228862 - DNA, 25 bp, Artificial
  probe
  misc_feature (1)..(25): SEQ ID NO: 2163; WAN024G2U_at; Start 125; Stop 149
tatccgtcgtctattctatcacatt

SEQ ID NO: 228863 - DNA, 25 bp, Artificial
  probe
  misc_feature (1)..(25): SEQ ID NO: 2163; WAN024G2U_at; Start 254; Stop 278
gaaagccagtctccctctttcctgg

SEQ ID NO: 228864 - DNA, 25 bp, Artificial
  probe
  misc_feature (1)..(25): SEQ ID NO: 2163; WAN024G2U_at; Start 180; Stop 204
aaacaccagagtcttccctctgatg

SEQ ID NO: 228865 - DNA, 25 bp, Artificial
  probe
  misc_feature (1)..(25): SEQ ID NO: 2163; WAN024G2U_at; Start 195; Stop 219
ccctctgatgttcgacagttttaac

SEQ ID NO: 228866 - DNA, 25 bp, Artificial
  probe
  misc_feature (1)..(25): SEQ ID NO: 2163; WAN024G2U_at; Start 103; Stop 127
tgcatgctatcctccgttattttat

SEQ ID NO: 228867 - DNA, 25 bp, Artificial
  probe
  misc_feature (1)..(25): SEQ ID NO: 2163; WAN024G2U_at; Start 249; Stop 273
tgcaagaaagccagtctccctcttt

SEQ ID NO: 228868 - DNA, 25 bp, Artificial
  probe
  misc_feature (1)..(25): SEQ ID NO: 2163; WAN024G2U_at; Start 42; Stop 66
tgaaacactggttttaccaccacca

SEQ ID NO: 228869 - DNA, 25 bp, Artificial
  probe
  misc_feature (1)..(25): SEQ ID NO: 2163; WAN024G2U_at; Start 236; Stop 260
ttgagcaagcatctgcaagaaagcc

SEQ ID NO: 228870 - DNA, 25 bp, Artificial
  probe
  misc_feature (1)..(25): SEQ ID NO: 2163; WAN024G2U_at; Start 224; Stop 248
gccctgtagggtttgagcaagcatc

SEQ ID NO: 228871 - DNA, 25 bp, Artificial
  probe
  misc_feature (1)..(25): SEQ ID NO: 2163; WAN024G2U_at; Start 238; Stop 262
gagcaagcatctgcaagaaagccag

SEQ ID NO: 228872 - DNA, 25 bp, Artificial
  probe
  misc_feature (1)..(25): SEQ ID NO: 2163; WAN024G2U_at; Start 172; Stop 196
tcagcaaaaaacaccagagtcttcc

SEQ ID NO: 228873 - DNA, 25 bp, Artificial
  probe
  misc_feature (1)..(25): SEQ ID NO: 2163; WAN024G2U_at; Start 36; Stop 60
ggctcttgaaacactggttttacca

SEQ ID NO: 228874 - DNA, 25 bp, Artificial
  probe
  misc_feature (1)..(25): SEQ ID NO: 2163; WAN024G2U_at; Start 30; Stop 54
taaaatggctcttgaaacactggtt

SEQ ID NO: 228875 - DNA, 25 bp, Artificial
  probe
  misc_feature (1)..(25): SEQ ID NO: 2163; WAN024G2U_at; Start 188; Stop 212
gagtcttccctctgatgttcgacag

SEQ ID NO: 228876 - DNA, 25 bp, Artificial
  probe
  misc_feature (1)..(25): SEQ ID NO: 2163; WAN024G2U_at; Start 175; Stop 199
gcaaaaaacaccagagtcttccctc

SEQ ID NO: 228877 - DNA, 25 bp, Artificial
  probe
  misc_feature (1)..(25): SEQ ID NO: 1907; WAN024G2V_at; Start 91; Stop 115
gatgaaaagatttccatgattgagc

SEQ ID NO: 228878 - DNA, 25 bp, Artificial
  probe
  misc_feature (1)..(25): SEQ ID NO: 1907; WAN024G2V_at; Start 118; Stop 142
gattcatactacaaggatcagtctc

SEQ ID NO: 228879 - DNA, 25 bp, Artificial
  probe
  misc_feature (1)..(25): SEQ ID NO: 1907; WAN024G2V_at; Start 463; Stop 487
gatagcgttattaaccagtacttag

SEQ ID NO: 228880 - DNA, 25 bp, Artificial
  probe
  misc_feature (1)..(25): SEQ ID NO: 1907; WAN024G2V_at; Start 619; Stop 643
gaagctcgaaacagcaaataactaa

SEQ ID NO: 228881 - DNA, 25 bp, Artificial
  probe
  misc_feature (1)..(25): SEQ ID NO: 1907; WAN024G2V_at; Start 133; Stop 157
gatcagtctcatttgacctttgaag

SEQ ID NO: 228882 - DNA, 25 bp, Artificial
  probe
  misc_feature (1)..(25): SEQ ID NO: 1907; WAN024G2V_at; Start 500; Stop 524
caatgtaccaccagtttatcgagtc

SEQ ID NO: 228883 - DNA, 25 bp, Artificial
  probe
  misc_feature (1)..(25): SEQ ID NO: 1907; WAN024G2V_at; Start 68; Stop 92
gagccattttatcgcattttcctga

SEQ ID NO: 228884 - DNA, 25 bp, Artificial
  probe
  misc_feature (1)..(25): SEQ ID NO: 1907; WAN024G2V_at; Start 340; Stop 364
ttggtcttggaggacaagcgtctgc

SEQ ID NO: 228885 - DNA, 25 bp, Artificial
  probe
  misc_feature (1)..(25): SEQ ID NO: 1907; WAN024G2V_at; Start 604; Stop 628
gcaaagattttggaagaagctcgaa

SEQ ID NO: 228886 - DNA, 25 bp, Artificial
  probe
  misc_feature (1)..(25): SEQ ID NO: 1907; WAN024G2V_at; Start 524; Stop 548
caactaagcgttatgctgatatcgt

SEQ ID NO: 228887 - DNA, 25 bp, Artificial
  probe
  misc_feature (1)..(25): SEQ ID NO: 1907; WAN024G2V_at; Start 537; Stop 561
tgctgatatcgtcattcctgaaggg

SEQ ID NO: 228888 - DNA, 25 bp, Artificial
  probe
  misc_feature (1)..(25): SEQ ID NO: 1907; WAN024G2V_at; Start 178; Stop 202
gaccatccttttgcctttgatacag

SEQ ID NO: 228889 - DNA, 25 bp, Artificial
  probe
  misc_feature (1)..(25): SEQ ID NO: 1907; WAN024G2V_at; Start 221; Stop 245
ttaaggaattgttggcagggcgtcc

SEQ ID NO: 228890 - DNA, 25 bp, Artificial
  probe
  misc_feature (1)..(25): SEQ ID NO: 1907; WAN024G2V_at; Start 510; Stop 534
ccagtttatcgagtcaactaagcgt

SEQ ID NO: 228891 - DNA, 25 bp, Artificial
  probe
  misc_feature (1)..(25): SEQ ID NO: 1907; WAN024G2V_at; Start 583; Stop 607
gacctgttgacgaccaagattgcaa

SEQ ID NO: 228892 - DNA, 25 bp, Artificial
  probe
  misc_feature (1)..(25): SEQ ID NO: 1907; WAN024G2V_at; Start 355; Stop 379
aagcgtctgcgcgatttgatggata

SEQ ID NO: 228893 - DNA, 25 bp, Artificial
  probe
  misc_feature (1)..(25): SEQ ID NO: 1907; WAN024G2V_at; Start 284; Stop 308
ggagtagcaagacctatcgtcagga

SEQ ID NO: 228894 - DNA, 25 bp, Artificial
  probe
  misc_feature (1)..(25): SEQ ID NO: 1907; WAN024G2V_at; Start 105; Stop 129
catgattgagcatgattcatactac

SEQ ID NO: 228895 - DNA, 25 bp, Artificial
  probe
  misc_feature (1)..(25): SEQ ID NO: 1907; WAN024G2V_at; Start 276; Stop 300
gcatacacggagtagcaagacctat

SEQ ID NO: 228896 - DNA, 25 bp, Artificial
  probe
  misc_feature (1)..(25): SEQ ID NO: 1907; WAN024G2V_at; Start 311; Stop 335
ctcaagatgtctttatcgttgaggg

SEQ ID NO: 228897 - DNA, 25 bp, Artificial
  probe
  misc_feature (1)..(25): SEQ ID NO: 1907; WAN024G2V_at; Start 246; Stop 270
ggtggacatcccgacctacgactat

SEQ ID NO: 228898 - DNA, 25 bp, Artificial
  probe
  misc_feature (1)..(25): SEQ ID NO: 1907; WAN024G2V_at; Start 207; Stop 231
gatgatcgagcagattaaggaattg

SEQ ID NO: 228899 - DNA, 25 bp, Artificial
  probe
  misc_feature (1)..(25): SEQ ID NO: 1907; WAN024G2V_at; Start 570; Stop 594
taccgtggctatcgacctgttgacg

SEQ ID NO: 228900 - DNA, 25 bp, Artificial
  probe
  misc_feature (1)..(25): SEQ ID NO: 1907; WAN024G2V_at; Start 485; Stop 509
taggtgtggtcaaaccaatgtacca

SEQ ID NO: 228901 - DNA, 25 bp, Artificial
  probe
  misc_feature (1)..(25): SEQ ID NO: 1907; WAN024G2V_at; Start 450; Stop 474
tggccgtagccttgatagcgttatt

SEQ ID NO: 228902 - DNA, 25 bp, Artificial
  probe
  misc_feature (1)..(25): SEQ ID NO: 1907; WAN024G2V_at; Start 560; Stop 584
gggttagcaataccgtggctatcga

SEQ ID NO: 228903 - DNA, 25 bp, Artificial
  probe
  misc_feature (1)..(25): SEQ ID NO: 1907; WAN024G2V_at; Start 42; Stop 66
tggtggtggtaaaaccagtgtttca

SEQ ID NO: 228904 - DNA, 25 bp, Artificial
  probe
  misc_feature (1)..(25): SEQ ID NO: 1907; WAN024G2V_at; Start 477; Stop 501
ccagtacttaggtgtggtcaaacca

SEQ ID NO: 228905 - DNA, 25 bp, Artificial
  probe
  misc_feature (1)..(25): SEQ ID NO: 1907; WAN024G2V_at; Start 262; Stop 286
tacgactatacagagcatacacgga

SEQ ID NO: 228906 - DNA, 25 bp, Artificial
  probe
  misc_feature (1)..(25): SEQ ID NO: 1907; WAN024G2V_at; Start 195; Stop 219
tgatacagacttgatgatcgagcag

SEQ ID NO: 228907 - DNA, 25 bp, Artificial
  probe
  misc_feature (1)..(25): SEQ ID NO: 1907; WAN024G2V_at; Start 57; Stop 81
cagtgtttcaagagccattttatcg

SEQ ID NO: 228908 - DNA, 25 bp, Artificial
  probe
  misc_feature (1)..(25): SEQ ID NO: 1907; WAN024G2V_at; Start 381; Stop 405
caagatttttgtggatacggatgac

SEQ ID NO: 228909 - DNA, 25 bp, Artificial
  probe
  misc_feature (1)..(25): SEQ ID NO: 1907; WAN024G2V_at; Start 18; Stop 42
cattattggagtgacaggtggttct

SEQ ID NO: 228910 - DNA, 25 bp, Artificial
  probe
  misc_feature (1)..(25): SEQ ID NO: 1907; WAN024G2V_at; Start 154; Stop 178
gaagagcgtgtcaaaaccaactatg

SEQ ID NO: 228911 - DNA, 25 bp, Artificial
  probe
  misc_feature (1)..(25): SEQ ID NO: 1750; WAN024G2W_at; Start 199; Stop 223
tctgtcattgattttggtttatgga

SEQ ID NO: 228912 - DNA, 25 bp, Artificial
  probe
  misc_feature (1)..(25): SEQ ID NO: 1750; WAN024G2W_at; Start 16; Stop 40
tttcgagaaagggtggagcaacttc

SEQ ID NO: 228913 - DNA, 25 bp, Artificial
  probe
  misc_feature (1)..(25): SEQ ID NO: 1750; WAN024G2W_at; Start 276; Stop 300
tgctcaaaccctacagggctttcgt

SEQ ID NO: 228914 - DNA, 25 bp, Artificial
  probe
  misc_feature (1)..(25): SEQ ID NO: 1750; WAN024G2W_at; Start 79; Stop 103
cacctgtttcgtcttgctatacaaa

SEQ ID NO: 228915 - DNA, 25 bp, Artificial
  probe
  misc_feature (1)..(25): SEQ ID NO: 1750; WAN024G2W_at; Start 240; Stop 264
ccaggaaagagggagactggctttc

SEQ ID NO: 228916 - DNA, 25 bp, Artificial
  probe
  misc_feature (1)..(25): SEQ ID NO: 1750; WAN024G2W_at; Start 105; Stop 129
tttagacagaaatgaaaaataccaa

SEQ ID NO: 228917 - DNA, 25 bp, Artificial
  probe
  misc_feature (1)..(25): SEQ ID NO: 1750; WAN024G2W_at; Start 140; Stop 164
ccaatttgagtcaagggttgtcact

SEQ ID NO: 228918 - DNA, 25 bp, Artificial
  probe
  misc_feature (1)..(25): SEQ ID NO: 1750; WAN024G2W_at; Start 37; Stop 61
cttcttcaacaaaaagaaataaatg

SEQ ID NO: 228919 - DNA, 25 bp, Artificial
  probe
  misc_feature (1)..(25): SEQ ID NO: 1750; WAN024G2W_at; Start 22; Stop 46
gaaagggtggagcaacttcttcaac

SEQ ID NO: 228920 - DNA, 25 bp, Artificial
  probe
  misc_feature (1)..(25): SEQ ID NO: 1750; WAN024G2W_at; Start 258; Stop 282
ggctttcttgcagatgcttgctcaa

SEQ ID NO: 228921 - DNA, 25 bp, Artificial
  probe
  misc_feature (1)..(25): SEQ ID NO: 1750; WAN024G2W_at; Start 254; Stop 278
gactggctttcttgcagatgcttgc

SEQ ID NO: 228922 - DNA, 25 bp, Artificial
  probe
  misc_feature (1)..(25): SEQ ID NO: 1750; WAN024G2W_at; Start 186; Stop 210
ccaggcacctaagtctgtcattgat

SEQ ID NO: 228923 - DNA, 25 bp, Artificial
  probe
  misc_feature (1)..(25): SEQ ID NO: 1750; WAN024G2W_at; Start 134; Stop 158
tcatggccaatttgagtcaagggtt

SEQ ID NO: 228924 - DNA, 25 bp, Artificial
  probe
  misc_feature (1)..(25): SEQ ID NO: 1750; WAN024G2W_at; Start 131; Stop 155
cggtcatggccaatttgagtcaagg

SEQ ID NO: 228925 - DNA, 25 bp, Artificial
  probe
  misc_feature (1)..(25): SEQ ID NO: 1750; WAN024G2W_at; Start 272; Stop 296
tgcttgctcaaaccctacagggctt

SEQ ID NO: 228926 - DNA, 25 bp, Artificial
  probe
  misc_feature (1)..(25): SEQ ID NO: 1750; WAN024G2W_at; Start 180; Stop 204
tcattaccaggcacctaagtctgtc

SEQ ID NO: 228927 - DNA, 25 bp, Artificial
  probe
  misc_feature (1)..(25): SEQ ID NO: 1750; WAN024G2W_at; Start 94; Stop 118
gctatacaaaatttagacagaaatg

SEQ ID NO: 228928 - DNA, 25 bp, Artificial
  probe
  misc_feature (1)..(25): SEQ ID NO: 1750; WAN024G2W_at; Start 155; Stop 179
ggttgtcactttacctcatgacgca

SEQ ID NO: 228929 - DNA, 25 bp, Artificial
  probe
  misc_feature (1)..(25): SEQ ID NO: 1750; WAN024G2W_at; Start 270; Stop 294
gatgcttgctcaaaccctacagggc

SEQ ID NO: 228930 - DNA, 25 bp, Artificial
  probe
  misc_feature (1)..(25): SEQ ID NO: 1750; WAN024G2W_at; Start 3; Stop 27
gatgcgaaatgagtttcgagaaagg

SEQ ID NO: 228931 - DNA, 25 bp, Artificial
  probe
  misc_feature (1)..(25): SEQ ID NO: 1750; WAN024G2W_at; Start 166; Stop 190
tacctcatgacgcatcattaccagg

SEQ ID NO: 228932 - DNA, 25 bp, Artificial
  probe
  misc_feature (1)..(25): SEQ ID NO: 1750; WAN024G2W_at; Start 250; Stop 274
gggagactggctttcttgcagatgc

SEQ ID NO: 228933 - DNA, 25 bp, Artificial
  probe
  misc_feature (1)..(25): SEQ ID NO: 1750; WAN024G2W_at; Start 229; Stop 253
aaagctcctagccaggaaagaggga

SEQ ID NO: 228934 - DNA, 25 bp, Artificial
  probe
  misc_feature (1)..(25): SEQ ID NO: 1750; WAN024G2W_at; Start 191; Stop 215
cacctaagtctgtcattgattttgg

SEQ ID NO: 228935 - DNA, 25 bp, Artificial
  probe
  misc_feature (1)..(25): SEQ ID NO: 1750; WAN024G2W_at; Start 147; Stop 171
gagtcaagggttgtcactttacctc

SEQ ID NO: 228936 - DNA, 25 bp, Artificial
  probe
  misc_feature (1)..(25): SEQ ID NO: 1750; WAN024G2W_at; Start 75; Stop 99
gagtcacctgtttcgtcttgctata

SEQ ID NO: 228937 - DNA, 25 bp, Artificial
  probe
  misc_feature (1)..(25): SEQ ID NO: 1750; WAN024G2W_at; Start 60; Stop 84
tgaaaatagtgagttgagtcacctg

SEQ ID NO: 228938 - DNA, 25 bp, Artificial
  probe
  misc_feature (1)..(25): SEQ ID NO: 1750; WAN024G2W_at; Start 245; Stop 269
aaagagggagactggctttcttgca

SEQ ID NO: 228939 - DNA, 25 bp, Artificial
  probe
  misc_feature (1)..(25): SEQ ID NO: 1750; WAN024G2W_at; Start 234; Stop 258
tcctagccaggaaagagggagactg

SEQ ID NO: 228940 - DNA, 25 bp, Artificial
  probe
  misc_feature (1)..(25): SEQ ID NO: 1750; WAN024G2W_at; Start 263; Stop 287
tcttgcagatgcttgctcaaaccct

SEQ ID NO: 228941 - DNA, 25 bp, Artificial
  probe
  misc_feature (1)..(25): SEQ ID NO: 1750; WAN024G2W_at; Start 24; Stop 48
aagggtggagcaacttcttcaacaa

SEQ ID NO: 228942 - DNA, 25 bp, Artificial
  probe
  misc_feature (1)..(25): SEQ ID NO: 1750; WAN024G2W_at; Start 87; Stop 111
tcgtcttgctatacaaaatttagac

SEQ ID NO: 228943 - DNA, 25 bp, Artificial
  probe
  misc_feature (1)..(25): SEQ ID NO: 1750; WAN024G2W_at; Start 70; Stop 94
gagttgagtcacctgtttcgtcttg

SEQ ID NO: 228944 - DNA, 25 bp, Artificial
  probe
  misc_feature (1)..(25): SEQ ID NO: 1750; WAN024G2W_at; Start 174; Stop 198
gacgcatcattaccaggcacctaag

SEQ ID NO: 228945 - DNA, 25 bp, Artificial
  probe
  misc_feature (1)..(25): SEQ ID NO: 1995; WAN024G2X_at; Start 176; Stop 200
ccttcaccttgaaccttggtcggat

SEQ ID NO: 228946 - DNA, 25 bp, Artificial
  probe
  misc_feature (1)..(25): SEQ ID NO: 1995; WAN024G2X_at; Start 189; Stop 213
ccttggtcggataaagaaggatgtc

SEQ ID NO: 228947 - DNA, 25 bp, Artificial
  probe
  misc_feature (1)..(25): SEQ ID NO: 1995; WAN024G2X_at; Start 360; Stop 384
tcttaagttgttcaaactgaatcgc

SEQ ID NO: 228948 - DNA, 25 bp, Artificial
  probe
  misc_feature (1)..(25): SEQ ID NO: 1995; WAN024G2X_at; Start 455; Stop 479
tgtacacgcccaatcacattgatct

SEQ ID NO: 228949 - DNA, 25 bp, Artificial
  probe
  misc_feature (1)..(25): SEQ ID NO: 1995; WAN024G2X_at; Start 433; Stop 457
gctaccacttggttcatagacctgt

SEQ ID NO: 228950 - DNA, 25 bp, Artificial
  probe
  misc_feature (1)..(25): SEQ ID NO: 1995; WAN024G2X_at; Start 231; Stop 255
tgctgacggtcgtgataatatctcg

SEQ ID NO: 228951 - DNA, 25 bp, Artificial
  probe
  misc_feature (1)..(25): SEQ ID NO: 1995; WAN024G2X_at; Start 255; Stop 279
gaataacggctccactacggctggt

SEQ ID NO: 228952 - DNA, 25 bp, Artificial
  probe
  misc_feature (1)..(25): SEQ ID NO: 1995; WAN024G2X_at; Start 1; Stop 25
atgccccacactagagataactggc

SEQ ID NO: 228953 - DNA, 25 bp, Artificial
  probe
  misc_feature (1)..(25): SEQ ID NO: 1995; WAN024G2X_at; Start 260; Stop 284
acggctccactacggctggttacta

SEQ ID NO: 228954 - DNA, 25 bp, Artificial
  probe
  misc_feature (1)..(25): SEQ ID NO: 1995; WAN024G2X_at; Start 108; Stop 132
taatgagcaaatccaaatcgtcccg

SEQ ID NO: 228955 - DNA, 25 bp, Artificial
  probe
  misc_feature (1)..(25): SEQ ID NO: 1995; WAN024G2X_at; Start 22; Stop 46
tggcaaacgagattcaaaaatagct

SEQ ID NO: 228956 - DNA, 25 bp, Artificial
  probe
  misc_feature (1)..(25): SEQ ID NO: 1995; WAN024G2X_at; Start 223; Stop 247
gaatcgcctgctgacggtcgtgata

SEQ ID NO: 228957 - DNA, 25 bp, Artificial
  probe
  misc_feature (1)..(25): SEQ ID NO: 1995; WAN024G2X_at; Start 66; Stop 90
taaaggcccagagatcctcaataga

SEQ ID NO: 228958 - DNA, 25 bp, Artificial
  probe
  misc_feature (1)..(25): SEQ ID NO: 1995; WAN024G2X_at; Start 308; Stop 332
ggcagagcttgcttgaagcgttctt

SEQ ID NO: 228959 - DNA, 25 bp, Artificial
  probe
  misc_feature (1)..(25): SEQ ID NO: 1995; WAN024G2X_at; Start 208; Stop 232
gatgtcaacacctgggaatcgcctg

SEQ ID NO: 228960 - DNA, 25 bp, Artificial
  probe
  misc_feature (1)..(25): SEQ ID NO: 1995; WAN024G2X_at; Start 135; Stop 159
gattagcacgcgcaatatttctagc

SEQ ID NO: 228961 - DNA, 25 bp, Artificial
  probe
  misc_feature (1)..(25): SEQ ID NO: 1995; WAN024G2X_at; Start 76; Stop 100
gagatcctcaatagaaccacctcca

SEQ ID NO: 228962 - DNA, 25 bp, Artificial
  probe
  misc_feature (1)..(25): SEQ ID NO: 1995; WAN024G2X_at; Start 97; Stop 121
tccacgaccaataatgagcaaatcc

SEQ ID NO: 228963 - DNA, 25 bp, Artificial
  probe
  misc_feature (1)..(25): SEQ ID NO: 1995; WAN024G2X_at; Start 368; Stop 392
tgttcaaactgaatcgcaagcgccc

SEQ ID NO: 228964 - DNA, 25 bp, Artificial
  probe
  misc_feature (1)..(25): SEQ ID NO: 1995; WAN024G2X_at; Start 89; Stop 113
gaaccacctccacgaccaataatga

SEQ ID NO: 228965 - DNA, 25 bp, Artificial
  probe
  misc_feature (1)..(25): SEQ ID NO: 1995; WAN024G2X_at; Start 333; Stop 357
gaaacaggccttcttctgtcaattt

SEQ ID NO: 228966 - DNA, 25 bp, Artificial
  probe
  misc_feature (1)..(25): SEQ ID NO: 1995; WAN024G2X_at; Start 9; Stop 33
cactagagataactggcaaacgaga

SEQ ID NO: 228967 - DNA, 25 bp, Artificial
  probe
  misc_feature (1)..(25): SEQ ID NO: 1995; WAN024G2X_at; Start 414; Stop 438
tttcaatgatgatggagtagctacc

SEQ ID NO: 228968 - DNA, 25 bp, Artificial
  probe
  misc_feature (1)..(25): SEQ ID NO: 1995; WAN024G2X_at; Start 318; Stop 342
gcttgaagcgttcttgaaacaggcc

SEQ ID NO: 228969 - DNA, 25 bp, Artificial
  probe
  misc_feature (1)..(25): SEQ ID NO: 1995; WAN024G2X_at; Start 40; Stop 64
aatagctcgtaccacaatttcttcg

SEQ ID NO: 228970 - DNA, 25 bp, Artificial
  probe
  misc_feature (1)..(25): SEQ ID NO: 1995; WAN024G2X_at; Start 32; Stop 56
gattcaaaaatagctcgtaccacaa

SEQ ID NO: 228971 - DNA, 25 bp, Artificial
  probe
  misc_feature (1)..(25): SEQ ID NO: 1995; WAN024G2X_at; Start 150; Stop 174
tatttctagcaatttcctccgcagc

SEQ ID NO: 228972 - DNA, 25 bp, Artificial
  probe
  misc_feature (1)..(25): SEQ ID NO: 1995; WAN024G2X_at; Start 122; Stop 146
aaatcgtcccgttgattagcacgcg

SEQ ID NO: 228973 - DNA, 25 bp, Artificial
  probe
  misc_feature (1)..(25): SEQ ID NO: 1995; WAN024G2X_at; Start 475; Stop 499
gatcttcattccttcttccaggtca

SEQ ID NO: 228974 - DNA, 25 bp, Artificial
  probe
  misc_feature (1)..(25): SEQ ID NO: 1995; WAN024G2X_at; Start 200; Stop 224
taaagaaggatgtcaacacctggga

SEQ ID NO: 228975 - DNA, 25 bp, Artificial
  probe
  misc_feature (1)..(25): SEQ ID NO: 1995; WAN024G2X_at; Start 424; Stop 448
gatggagtagctaccacttggttca

SEQ ID NO: 228976 - DNA, 25 bp, Artificial
  probe
  misc_feature (1)..(25): SEQ ID NO: 1995; WAN024G2X_at; Start 54; Stop 78
caatttcttcgttaaaggcccagag

SEQ ID NO: 228977 - DNA, 25 bp, Artificial
  probe
  misc_feature (1)..(25): SEQ ID NO: 1995; WAN024G2X_at; Start 443; Stop 467
ggttcatagacctgtacacgcccaa

SEQ ID NO: 228978 - DNA, 25 bp, Artificial
  probe
  misc_feature (1)..(25): SEQ ID NO: 1995; WAN024G2X_at; Start 244; Stop 268
gataatatctcgaataacggctcca

SEQ ID NO: 228979 - DNA, 25 bp, Artificial
  probe
  misc_feature (1)..(25): SEQ ID NO: 2814; WAN024G2Y_at; Start 150; Stop 174
caaggctgaaaagaccttggtcaag

SEQ ID NO: 228980 - DNA, 25 bp, Artificial
  probe
  misc_feature (1)..(25): SEQ ID NO: 2814; WAN024G2Y_at; Start 41; Stop 65
tggaaaccattgtccaaagtttgga

SEQ ID NO: 228981 - DNA, 25 bp, Artificial
  probe
  misc_feature (1)..(25): SEQ ID NO: 2814; WAN024G2Y_at; Start 171; Stop 195
caaggtcatgcaagaagacggaaca

SEQ ID NO: 228982 - DNA, 25 bp, Artificial
  probe
  misc_feature (1)..(25): SEQ ID NO: 2814; WAN024G2Y_at; Start 108; Stop 132
aaagggcatggtcttgtcaaaagag

SEQ ID NO: 228983 - DNA, 25 bp, Artificial
  probe
  misc_feature (1)..(25): SEQ ID NO: 2814; WAN024G2Y_at; Start 143; Stop 167
cgctggacaaggctgaaaagacctt

SEQ ID NO: 228984 - DNA, 25 bp, Artificial
  probe
  misc_feature (1)..(25): SEQ ID NO: 2814; WAN024G2Y_at; Start 121; Stop 145
ttgtcaaaagagctccaagctacgc

SEQ ID NO: 228985 - DNA, 25 bp, Artificial
  probe
  misc_feature (1)..(25): SEQ ID NO: 2814; WAN024G2Y_at; Start 177; Stop 201
catgcaagaagacggaacagaaagt

SEQ ID NO: 228986 - DNA, 25 bp, Artificial
  probe
  misc_feature (1)..(25): SEQ ID NO: 2814; WAN024G2Y_at; Start 141; Stop 165
tacgctggacaaggctgaaaagacc

SEQ ID NO: 228987 - DNA, 25 bp, Artificial
  probe
  misc_feature (1)..(25): SEQ ID NO: 2814; WAN024G2Y_at; Start 90; Stop 114
tgcgattactgcctttcaaaagggc

SEQ ID NO: 228988 - DNA, 25 bp, Artificial
  probe
  misc_feature (1)..(25): SEQ ID NO: 2814; WAN024G2Y_at; Start 69; Stop 93
tggtgaaattgctctggaagatgcg

SEQ ID NO: 228989 - DNA, 25 bp, Artificial
  probe
  misc_feature (1)..(25): SEQ ID NO: 2814; WAN024G2Y_at; Start 51; Stop 75
tgtccaaagtttggaaaatggtgaa

SEQ ID NO: 228990 - DNA, 25 bp, Artificial
  probe
  misc_feature (1)..(25): SEQ ID NO: 2814; WAN024G2Y_at; Start 35; Stop 59
cagaactggaaaccattgtccaaag

SEQ ID NO: 228991 - DNA, 25 bp, Artificial
  probe
  misc_feature (1)..(25): SEQ ID NO: 2814; WAN024G2Y_at; Start 162; Stop 186
gaccttggtcaaggtcatgcaagaa

SEQ ID NO: 228992 - DNA, 25 bp, Artificial
  probe
  misc_feature (1)..(25): SEQ ID NO: 2814; WAN024G2Y_at; Start 81; Stop 105
tctggaagatgcgattactgccttt

SEQ ID NO: 228993 - DNA, 25 bp, Artificial
  probe
  misc_feature (1)..(25): SEQ ID NO: 2814; WAN024G2Y_at; Start 130; Stop 154
gagctccaagctacgctggacaagg

SEQ ID NO: 228994 - DNA, 25 bp, Artificial
  probe
  misc_feature (1)..(25): SEQ ID NO: 2814; WAN024G2Y_at; Start 136; Stop 160
caagctacgctggacaaggctgaaa

SEQ ID NO: 228995 - DNA, 25 bp, Artificial
  probe
  misc_feature (1)..(25): SEQ ID NO: 2814; WAN024G2Y_at; Start 13; Stop 37
aagaaatttgaggaaaatctagcag

SEQ ID NO: 228996 - DNA, 25 bp, Artificial
  probe
  misc_feature (1)..(25): SEQ ID NO: 2814; WAN024G2Y_at; Start 99; Stop 123
tgcctttcaaaagggcatggtcttg

SEQ ID NO: 228997 - DNA, 25 bp, Artificial
  probe
  misc_feature (1)..(25): SEQ ID NO: 2814; WAN024G2Y_at; Start 113; Stop 137
gcatggtcttgtcaaaagagctcca

SEQ ID NO: 228998 - DNA, 25 bp, Artificial
  probe
  misc_feature (1)..(25): SEQ ID NO: 2814; WAN024G2Y_at; Start 134; Stop 158
tccaagctacgctggacaaggctga

SEQ ID NO: 228999 - DNA, 25 bp, Artificial
  probe
  misc_feature (1)..(25): SEQ ID NO: 2814; WAN024G2Y_at; Start 105; Stop 129
tcaaaagggcatggtcttgtcaaaa

SEQ ID NO: 229000 - DNA, 25 bp, Artificial
  probe
  misc_feature (1)..(25): SEQ ID NO: 2814; WAN024G2Y_at; Start 186; Stop 210
agacggaacagaaagtgattttgaa

SEQ ID NO: 229001 - DNA, 25 bp, Artificial
  probe
  misc_feature (1)..(25): SEQ ID NO: 2814; WAN024G2Y_at; Start 63; Stop 87
ggaaaatggtgaaattgctctggaa

SEQ ID NO: 229002 - DNA, 25 bp, Artificial
  probe
  misc_feature (1)..(25): SEQ ID NO: 2814; WAN024G2Y_at; Start 20; Stop 44
ttgaggaaaatctagcagaactgga

SEQ ID NO: 229003 - DNA, 25 bp, Artificial
  probe
  misc_feature (1)..(25): SEQ ID NO: 2814; WAN024G2Y_at; Start 167; Stop 191
tggtcaaggtcatgcaagaagacgg

SEQ ID NO: 229004 - DNA, 25 bp, Artificial
  probe
  misc_feature (1)..(25): SEQ ID NO: 2814; WAN024G2Y_at; Start 117; Stop 141
ggtcttgtcaaaagagctccaagct

SEQ ID NO: 229005 - DNA, 25 bp, Artificial
  probe
  misc_feature (1)..(25): SEQ ID NO: 2814; WAN024G2Y_at; Start 93; Stop 117
gattactgcctttcaaaagggcatg

SEQ ID NO: 229006 - DNA, 25 bp, Artificial
  probe
  misc_feature (1)..(25): SEQ ID NO: 2814; WAN024G2Y_at; Start 78; Stop 102
tgctctggaagatgcgattactgcc

SEQ ID NO: 229007 - DNA, 25 bp, Artificial
  probe
  misc_feature (1)..(25): SEQ ID NO: 2814; WAN024G2Y_at; Start 30; Stop 54
tctagcagaactggaaaccattgtc

SEQ ID NO: 229008 - DNA, 25 bp, Artificial
  probe
  misc_feature (1)..(25): SEQ ID NO: 2814; WAN024G2Y_at; Start 127; Stop 151
aaagagctccaagctacgctggaca

SEQ ID NO: 229009 - DNA, 25 bp, Artificial
  probe
  misc_feature (1)..(25): SEQ ID NO: 2814; WAN024G2Y_at; Start 181; Stop 205
caagaagacggaacagaaagtgatt

SEQ ID NO: 229010 - DNA, 25 bp, Artificial
  probe
  misc_feature (1)..(25): SEQ ID NO: 2814; WAN024G2Y_at; Start 124; Stop 148
tcaaaagagctccaagctacgctgg

SEQ ID NO: 229011 - DNA, 25 bp, Artificial
  probe
  misc_feature (1)..(25): SEQ ID NO: 2814; WAN024G2Y_at; Start 25; Stop 49
gaaaatctagcagaactggaaacca

SEQ ID NO: 229012 - DNA, 25 bp, Artificial
  probe
  misc_feature (1)..(25): SEQ ID NO: 2814; WAN024G2Y_at; Start 88; Stop 112
gatgcgattactgcctttcaaaagg

SEQ ID NO: 229013 - DNA, 25 bp, Artificial
  probe
  misc_feature (1)..(25): SEQ ID NO: 4129; WAN024G2Z_at; Start 139; Stop 163
ttctccctaaaggatgaccatgcag

SEQ ID NO: 229014 - DNA, 25 bp, Artificial
  probe
  misc_feature (1)..(25): SEQ ID NO: 4129; WAN024G2Z_at; Start 845; Stop 869
cggcagtccgaaatgttctatctaa

SEQ ID NO: 229015 - DNA, 25 bp, Artificial
  probe
  misc_feature (1)..(25): SEQ ID NO: 4129; WAN024G2Z_at; Start 262; Stop 286
gaaccaagtggtagctactccatca

SEQ ID NO: 229016 - DNA, 25 bp, Artificial
  probe
  misc_feature (1)..(25): SEQ ID NO: 4129; WAN024G2Z_at; Start 471; Stop 495
cgtcagcaggcgattcccaggtgtt

SEQ ID NO: 229017 - DNA, 25 bp, Artificial
  probe
  misc_feature (1)..(25): SEQ ID NO: 4129; WAN024G2Z_at; Start 762; Stop 786
aacagcggcggctgaactggcaaca

SEQ ID NO: 229018 - DNA, 25 bp, Artificial
  probe
  misc_feature (1)..(25): SEQ ID NO: 4129; WAN024G2Z_at; Start 425; Stop 449
tagtaaccagccgtagtggagccgt

SEQ ID NO: 229019 - DNA, 25 bp, Artificial
  probe
  misc_feature (1)..(25): SEQ ID NO: 4129; WAN024G2Z_at; Start 1158; Stop 1182
gcgactttcggaagctttgctcatg

SEQ ID NO: 229020 - DNA, 25 bp, Artificial
  probe
  misc_feature (1)..(25): SEQ ID NO: 4129; WAN024G2Z_at; Start 1203; Stop 1227
ggcgcgtggttatgctattgtcaaa

SEQ ID NO: 229021 - DNA, 25 bp, Artificial
  probe
  misc_feature (1)..(25): SEQ ID NO: 4129; WAN024G2Z_at; Start 455; Stop 479
gagatattatcacgaccgtcagcag

SEQ ID NO: 229022 - DNA, 25 bp, Artificial
  probe
  misc_feature (1)..(25): SEQ ID NO: 4129; WAN024G2Z_at; Start 934; Stop 958
gacggttatttgcaacgcttggacc

SEQ ID NO: 229023 - DNA, 25 bp, Artificial
  probe
  misc_feature (1)..(25): SEQ ID NO: 4129; WAN024G2Z_at; Start 779; Stop 803
tggcaacacctgtgaccaagttgga

SEQ ID NO: 229024 - DNA, 25 bp, Artificial
  probe
  misc_feature (1)..(25): SEQ ID NO: 4129; WAN024G2Z_at; Start 1101; Stop 1125
caagctcttaggtagccaaatggcg

SEQ ID NO: 229025 - DNA, 25 bp, Artificial
  probe
  misc_feature (1)..(25): SEQ ID NO: 4129; WAN024G2Z_at; Start 77; Stop 101
tggaacgggtctatttaactggtca

SEQ ID NO: 229026 - DNA, 25 bp, Artificial
  probe
  misc_feature (1)..(25): SEQ ID NO: 4129; WAN024G2Z_at; Start 813; Stop 837
tcatttgcaaaatcaggaaaaacgg

SEQ ID NO: 229027 - DNA, 25 bp, Artificial
  probe
  misc_feature (1)..(25): SEQ ID NO: 4129; WAN024G2Z_at; Start 317; Stop 341
gggcgcttgcgattcagtttgaaca

SEQ ID NO: 229028 - DNA, 25 bp, Artificial
  probe
  misc_feature (1)..(25): SEQ ID NO: 4129; WAN024G2Z_at; Start 1273; Stop 1297
gaccaagtaacgcttttgatgcgag

SEQ ID NO: 229029 - DNA, 25 bp, Artificial
  probe
  misc_feature (1)..(25): SEQ ID NO: 4129; WAN024G2Z_at; Start 1124; Stop 1148
cgttagtttatgacgccaaggttgc

SEQ ID NO: 229030 - DNA, 25 bp, Artificial
  probe
  misc_feature (1)..(25): SEQ ID NO: 4129; WAN024G2Z_at; Start 173; Stop 197
cgaccatctggtctgggatttatca

SEQ ID NO: 229031 - DNA, 25 bp, Artificial
  probe
  misc_feature (1)..(25): SEQ ID NO: 4129; WAN024G2Z_at; Start 1186; Stop 1210
gatactagccgaatcgtggcgcgtg

SEQ ID NO: 229032 - DNA, 25 bp, Artificial
  probe
  misc_feature (1)..(25): SEQ ID NO: 4129; WAN024G2Z_at; Start 950; Stop 974
gcttggaccaactgcaactgcgttt

SEQ ID NO: 229033 - DNA, 25 bp, Artificial
  probe
  misc_feature (1)..(25): SEQ ID NO: 4129; WAN024G2Z_at; Start 627; Stop 651
ggatctctgggcctttaacgaagaa

SEQ ID NO: 229034 - DNA, 25 bp, Artificial
  probe
  misc_feature (1)..(25): SEQ ID NO: 4129; WAN024G2Z_at; Start 987; Stop 1011
gcgaactcggatttctgataacaaa

SEQ ID NO: 229035 - DNA, 25 bp, Artificial
  probe
  misc_feature (1)..(25): SEQ ID NO: 4129; WAN024G2Z_at; Start 1062; Stop 1086
caaaatccaacgctatcaagaccgt

SEQ ID NO: 229036 - DNA, 25 bp, Artificial
  probe
  misc_feature (1)..(25): SEQ ID NO: 4129; WAN024G2Z_at; Start 642; Stop 666
taacgaagaaattgtggtacgagct

SEQ ID NO: 229037 - DNA, 25 bp, Artificial
  probe
  misc_feature (1)..(25): SEQ ID NO: 4129; WAN024G2Z_at; Start 361; Stop 385
gaagaaggcctgtttcaagaacgct

SEQ ID NO: 229038 - DNA, 25 bp, Artificial
  probe
  misc_feature (1)..(25): SEQ ID NO: 4129; WAN024G2Z_at; Start 60; Stop 84
cgataaagacccatacttggaacgg

SEQ ID NO: 229039 - DNA, 25 bp, Artificial
  probe
  misc_feature (1)..(25): SEQ ID NO: 4129; WAN024G2Z_at; Start 728; Stop 752
cagattttgtggcagatcgacgcgc

SEQ ID NO: 229040 - DNA, 25 bp, Artificial
  probe
  misc_feature (1)..(25): SEQ ID NO: 4129; WAN024G2Z_at; Start 874; Stop 898
caagaggctttgaaaaaatgcagtc

SEQ ID NO: 229041 - DNA, 25 bp, Artificial
  probe
  misc_feature (1)..(25): SEQ ID NO: 4129; WAN024G2Z_at; Start 906; Stop 930
tatctttagacaacctgagcgcttg

SEQ ID NO: 229042 - DNA, 25 bp, Artificial
  probe
  misc_feature (1)..(25): SEQ ID NO: 4129; WAN024G2Z_at; Start 545; Stop 569
aaattgctagaaatattgcgcgtgc

SEQ ID NO: 229043 - DNA, 25 bp, Artificial
  probe
  misc_feature (1)..(25): SEQ ID NO: 4129; WAN024G2Z_at; Start 596; Stop 620
tcattattggtcgtggaggtggttc

SEQ ID NO: 229044 - DNA, 25 bp, Artificial
  probe
  misc_feature (1)..(25): SEQ ID NO: 4129; WAN024G2Z_at; Start 154; Stop 178
gaccatgcagttattcaagcgacca

SEQ ID NO: 229045 - DNA, 25 bp, Artificial
  probe
  misc_feature (1)..(25): SEQ ID NO: 4129; WAN024G2Z_at; Start 705; Stop 729
gcatgagacggatgtgaccttggca

SEQ ID NO: 229046 - DNA, 25 bp, Artificial
  probe
  misc_feature (1)..(25): SEQ ID NO: 4129; WAN024G2Z_at; Start 1083; Stop 1107
ccgtttaggacagttggacaagctc

SEQ ID NO: 229047 - DNA, 25 bp, Artificial
  probe
  misc_feature (1)..(25): SEQ ID NO: 7649; WAN024G32_at; Start 44; Stop 68
gtagcatgacatcggtaaaacctcc

SEQ ID NO: 229048 - DNA, 25 bp, Artificial
  probe
  misc_feature (1)..(25): SEQ ID NO: 7649; WAN024G32_at; Start 205; Stop 229
ggaattttctctcctggcttgtcaa

SEQ ID NO: 229049 - DNA, 25 bp, Artificial
  probe
  misc_feature (1)..(25): SEQ ID NO: 7649; WAN024G32_at; Start 249; Stop 273
tgctacgactagaccagccatcaca

SEQ ID NO: 229050 - DNA, 25 bp, Artificial
  probe
  misc_feature (1)..(25): SEQ ID NO: 7649; WAN024G32_at; Start 109; Stop 133
gacaaatcaaagacctgcaaggcct

SEQ ID NO: 229051 - DNA, 25 bp, Artificial
  probe
  misc_feature (1)..(25): SEQ ID NO: 7649; WAN024G32_at; Start 124; Stop 148
tgcaaggccttttccagtttcaaac

SEQ ID NO: 229052 - DNA, 25 bp, Artificial
  probe
  misc_feature (1)..(25): SEQ ID NO: 7649; WAN024G32_at; Start 210; Stop 234
tttctctcctggcttgtcaaaccgt

SEQ ID NO: 229053 - DNA, 25 bp, Artificial
  probe
  misc_feature (1)..(25): SEQ ID NO: 7649; WAN024G32_at; Start 24; Stop 48
gaccaacttggcactattctgtagc

SEQ ID NO: 229054 - DNA, 25 bp, Artificial
  probe
  misc_feature (1)..(25): SEQ ID NO: 7649; WAN024G32_at; Start 216; Stop 240
tcctggcttgtcaaaccgttctcca

SEQ ID NO: 229055 - DNA, 25 bp, Artificial
  probe
  misc_feature (1)..(25): SEQ ID NO: 7649; WAN024G32_at; Start 259; Stop 283
agaccagccatcacacctcgcttgg

SEQ ID NO: 229056 - DNA, 25 bp, Artificial
  probe
  misc_feature (1)..(25): SEQ ID NO: 7649; WAN024G32_at; Start 136; Stop 160
tccagtttcaaaccaccacggctga

SEQ ID NO: 229057 - DNA, 25 bp, Artificial
  probe
  misc_feature (1)..(25): SEQ ID NO: 7649; WAN024G32_at; Start 2; Stop 26
tggtaccaacatcgactgcaaagac

SEQ ID NO: 229058 - DNA, 25 bp, Artificial
  probe
  misc_feature (1)..(25): SEQ ID NO: 7649; WAN024G32_at; Start 146; Stop 170
aaccaccacggctgacatacttgag

SEQ ID NO: 229059 - DNA, 25 bp, Artificial
  probe
  misc_feature (1)..(25): SEQ ID NO: 7649; WAN024G32_at; Start 151; Stop 175
ccacggctgacatacttgagtttct

SEQ ID NO: 229060 - DNA, 25 bp, Artificial
  probe
  misc_feature (1)..(25): SEQ ID NO: 7649; WAN024G32_at; Start 70; Stop 94
gtagaggccccgatatcaatcgtag

SEQ ID NO: 229061 - DNA, 25 bp, Artificial
  probe
  misc_feature (1)..(25): SEQ ID NO: 7649; WAN024G32_at; Start 238; Stop 262
ccattaaggactgctacgactagac

SEQ ID NO: 229062 - DNA, 25 bp, Artificial
  probe
  misc_feature (1)..(25): SEQ ID NO: 7649; WAN024G32_at; Start 282; Stop 306
ggcctgctctctcgtttcaaacaac

SEQ ID NO: 229063 - DNA, 25 bp, Artificial
  probe
  misc_feature (1)..(25): SEQ ID NO: 7649; WAN024G32_at; Start 34; Stop 58
gcactattctgtagcatgacatcgg

SEQ ID NO: 229064 - DNA, 25 bp, Artificial
  probe
  misc_feature (1)..(25): SEQ ID NO: 7649; WAN024G32_at; Start 140; Stop 164
gtttcaaaccaccacggctgacata

SEQ ID NO: 229065 - DNA, 25 bp, Artificial
  probe
  misc_feature (1)..(25): SEQ ID NO: 7649; WAN024G32_at; Start 193; Stop 217
tcggtgtcatctggaattttctctc

SEQ ID NO: 229066 - DNA, 25 bp, Artificial
  probe
  misc_feature (1)..(25): SEQ ID NO: 7649; WAN024G32_at; Start 226; Stop 250
tcaaaccgttctccattaaggactg

SEQ ID NO: 229067 - DNA, 25 bp, Artificial
  probe
  misc_feature (1)..(25): SEQ ID NO: 7649; WAN024G32_at; Start 242; Stop 266
taaggactgctacgactagaccagc

SEQ ID NO: 229068 - DNA, 25 bp, Artificial
  probe
  misc_feature (1)..(25): SEQ ID NO: 7649; WAN024G32_at; Start 278; Stop 302
gcttggcctgctctctcgtttcaaa

SEQ ID NO: 229069 - DNA, 25 bp, Artificial
  probe
  misc_feature (1)..(25): SEQ ID NO: 7649; WAN024G32_at; Start 117; Stop 141
aaagacctgcaaggccttttccagt

SEQ ID NO: 229070 - DNA, 25 bp, Artificial
  probe
  misc_feature (1)..(25): SEQ ID NO: 7649; WAN024G32_at; Start 179; Stop 203
ccttgagttttaattcggtgtcatc

SEQ ID NO: 229071 - DNA, 25 bp, Artificial
  probe
  misc_feature (1)..(25): SEQ ID NO: 7649; WAN024G32_at; Start 155; Stop 179
ggctgacatacttgagtttctcccc

SEQ ID NO: 229072 - DNA, 25 bp, Artificial
  probe
  misc_feature (1)..(25): SEQ ID NO: 7649; WAN024G32_at; Start 81; Stop 105
gatatcaatcgtagtcgcgccatcc

SEQ ID NO: 229073 - DNA, 25 bp, Artificial
  probe
  misc_feature (1)..(25): SEQ ID NO: 7649; WAN024G32_at; Start 232; Stop 256
cgttctccattaaggactgctacga

SEQ ID NO: 229074 - DNA, 25 bp, Artificial
  probe
  misc_feature (1)..(25): SEQ ID NO: 7649; WAN024G32_at; Start 101; Stop 125
catccaccgacaaatcaaagacctg

SEQ ID NO: 229075 - DNA, 25 bp, Artificial
  probe
  misc_feature (1)..(25): SEQ ID NO: 7649; WAN024G32_at; Start 61; Stop 85
aaacctccagtagaggccccgatat

SEQ ID NO: 229076 - DNA, 25 bp, Artificial
  probe
  misc_feature (1)..(25): SEQ ID NO: 7649; WAN024G32_at; Start 11; Stop 35
catcgactgcaaagaccaacttggc

SEQ ID NO: 229077 - DNA, 25 bp, Artificial
  probe
  misc_feature (1)..(25): SEQ ID NO: 7649; WAN024G32_at; Start 15; Stop 39
gactgcaaagaccaacttggcacta

SEQ ID NO: 229078 - DNA, 25 bp, Artificial
  probe
  misc_feature (1)..(25): SEQ ID NO: 7649; WAN024G32_at; Start 73; Stop 97
gaggccccgatatcaatcgtagtcg

SEQ ID NO: 229079 - DNA, 25 bp, Artificial
  probe
  misc_feature (1)..(25): SEQ ID NO: 7649; WAN024G32_at; Start 51; Stop 75
gacatcggtaaaacctccagtagag

SEQ ID NO: 229080 - DNA, 25 bp, Artificial
  probe
  misc_feature (1)..(25): SEQ ID NO: 7649; WAN024G32_at; Start 91; Stop 115
gtagtcgcgccatccaccgacaaat

SEQ ID NO: 229081 - DNA, 25 bp, Artificial
  probe
  misc_feature (1)..(25): SEQ ID NO: 1291; WAN024G33_at; Start 161; Stop 185
gcaaagctcggctcctgctcgaaat

SEQ ID NO: 229082 - DNA, 25 bp, Artificial
  probe
  misc_feature (1)..(25): SEQ ID NO: 1291; WAN024G33_at; Start 74; Stop 98
agtgctaccacctgaccttgatcag

SEQ ID NO: 229083 - DNA, 25 bp, Artificial
  probe
  misc_feature (1)..(25): SEQ ID NO: 1291; WAN024G33_at; Start 164; Stop 188
aagctcggctcctgctcgaaatcag

SEQ ID NO: 229084 - DNA, 25 bp, Artificial
  probe
  misc_feature (1)..(25): SEQ ID NO: 1291; WAN024G33_at; Start 168; Stop 192
tcggctcctgctcgaaatcagtctt

SEQ ID NO: 229085 - DNA, 25 bp, Artificial
  probe
  misc_feature (1)..(25): SEQ ID NO: 1291; WAN024G33_at; Start 129; Stop 153
gactaagggaaatgaaactcacatc

SEQ ID NO: 229086 - DNA, 25 bp, Artificial
  probe
  misc_feature (1)..(25): SEQ ID NO: 1291; WAN024G33_at; Start 154; Stop 178
aatactggcaaagctcggctcctgc

SEQ ID NO: 229087 - DNA, 25 bp, Artificial
  probe
  misc_feature (1)..(25): SEQ ID NO: 1291; WAN024G33_at; Start 116; Stop 140
gctggcaaaatcagactaagggaaa

SEQ ID NO: 229088 - DNA, 25 bp, Artificial
  probe
  misc_feature (1)..(25): SEQ ID NO: 1291; WAN024G33_at; Start 61; Stop 85
ctgaggtttgacaagtgctaccacc

SEQ ID NO: 229089 - DNA, 25 bp, Artificial
  probe
  misc_feature (1)..(25): SEQ ID NO: 1291; WAN024G33_at; Start 107; Stop 131
cggtgcaaggctggcaaaatcagac

SEQ ID NO: 229090 - DNA, 25 bp, Artificial
  probe
  misc_feature (1)..(25): SEQ ID NO: 1291; WAN024G33_at; Start 65; Stop 89
ggtttgacaagtgctaccacctgac

SEQ ID NO: 229091 - DNA, 25 bp, Artificial
  probe
  misc_feature (1)..(25): SEQ ID NO: 1291; WAN024G33_at; Start 44; Stop 68
tcacgtcctgcctcaaactgaggtt

SEQ ID NO: 229092 - DNA, 25 bp, Artificial
  probe
  misc_feature (1)..(25): SEQ ID NO: 1291; WAN024G33_at; Start 29; Stop 53
tttttcccaatctgctcacgtcctg

SEQ ID NO: 229093 - DNA, 25 bp, Artificial
  probe
  misc_feature (1)..(25): SEQ ID NO: 1291; WAN024G33_at; Start 126; Stop 150
tcagactaagggaaatgaaactcac

SEQ ID NO: 229094 - DNA, 25 bp, Artificial
  probe
  misc_feature (1)..(25): SEQ ID NO: 1291; WAN024G33_at; Start 92; Stop 116
tgatcagccaagacacggtgcaagg

SEQ ID NO: 229095 - DNA, 25 bp, Artificial
  probe
  misc_feature (1)..(25): SEQ ID NO: 1291; WAN024G33_at; Start 79; Stop 103
taccacctgaccttgatcagccaag

SEQ ID NO: 229096 - DNA, 25 bp, Artificial
  probe
  misc_feature (1)..(25): SEQ ID NO: 1291; WAN024G33_at; Start 103; Stop 127
gacacggtgcaaggctggcaaaatc

SEQ ID NO: 229097 - DNA, 25 bp, Artificial
  probe
  misc_feature (1)..(25): SEQ ID NO: 1291; WAN024G33_at; Start 180; Stop 204
cgaaatcagtcttttcagcatagcg

SEQ ID NO: 229098 - DNA, 25 bp, Artificial
  probe
  misc_feature (1)..(25): SEQ ID NO: 1291; WAN024G33_at; Start 150; Stop 174
catcaatactggcaaagctcggctc

SEQ ID NO: 229099 - DNA, 25 bp, Artificial
  probe
  misc_feature (1)..(25): SEQ ID NO: 1291; WAN024G33_at; Start 170; Stop 194
ggctcctgctcgaaatcagtctttt

SEQ ID NO: 229100 - DNA, 25 bp, Artificial
  probe
  misc_feature (1)..(25): SEQ ID NO: 1291; WAN024G33_at; Start 224; Stop 248
ctgacaactcgtgggtcttggcgta

SEQ ID NO: 229101 - DNA, 25 bp, Artificial
  probe
  misc_feature (1)..(25): SEQ ID NO: 1291; WAN024G33_at; Start 98; Stop 122
gccaagacacggtgcaaggctggca

SEQ ID NO: 229102 - DNA, 25 bp, Artificial
  probe
  misc_feature (1)..(25): SEQ ID NO: 1291; WAN024G33_at; Start 18; Stop 42
gaataattccatttttcccaatctg

SEQ ID NO: 229103 - DNA, 25 bp, Artificial
  probe
  misc_feature (1)..(25): SEQ ID NO: 1291; WAN024G33_at; Start 215; Stop 239
tgctccatgctgacaactcgtgggt

SEQ ID NO: 229104 - DNA, 25 bp, Artificial
  probe
  misc_feature (1)..(25): SEQ ID NO: 1291; WAN024G33_at; Start 206; Stop 230
aaattgaactgctccatgctgacaa

SEQ ID NO: 229105 - DNA, 25 bp, Artificial
  probe
  misc_feature (1)..(25): SEQ ID NO: 1291; WAN024G33_at; Start 220; Stop 244
catgctgacaactcgtgggtcttgg

SEQ ID NO: 229106 - DNA, 25 bp, Artificial
  probe
  misc_feature (1)..(25): SEQ ID NO: 1291; WAN024G33_at; Start 112; Stop 136
caaggctggcaaaatcagactaagg

SEQ ID NO: 229107 - DNA, 25 bp, Artificial
  probe
  misc_feature (1)..(25): SEQ ID NO: 1291; WAN024G33_at; Start 86; Stop 110
tgaccttgatcagccaagacacggt

SEQ ID NO: 229108 - DNA, 25 bp, Artificial
  probe
  misc_feature (1)..(25): SEQ ID NO: 1291; WAN024G33_at; Start 147; Stop 171
tcacatcaatactggcaaagctcgg

SEQ ID NO: 229109 - DNA, 25 bp, Artificial
  probe
  misc_feature (1)..(25): SEQ ID NO: 1291; WAN024G33_at; Start 137; Stop 161
gaaatgaaactcacatcaatactgg

SEQ ID NO: 229110 - DNA, 25 bp, Artificial
  probe
  misc_feature (1)..(25): SEQ ID NO: 1291; WAN024G33_at; Start 211; Stop 235
gaactgctccatgctgacaactcgt

SEQ ID NO: 229111 - DNA, 25 bp, Artificial
  probe
  misc_feature (1)..(25): SEQ ID NO: 1291; WAN024G33_at; Start 7; Stop 31
cttagcatctcgaataattccattt

SEQ ID NO: 229112 - DNA, 25 bp, Artificial
  probe
  misc_feature (1)..(25): SEQ ID NO: 1291; WAN024G33_at; Start 142; Stop 166
gaaactcacatcaatactggcaaag

SEQ ID NO: 229113 - DNA, 25 bp, Artificial
  probe
  misc_feature (1)..(25): SEQ ID NO: 1291; WAN024G33_at; Start 70; Stop 94
gacaagtgctaccacctgaccttga

SEQ ID NO: 229114 - DNA, 25 bp, Artificial
  probe
  misc_feature (1)..(25): SEQ ID NO: 1291; WAN024G33_at; Start 57; Stop 81
caaactgaggtttgacaagtgctac

SEQ ID NO: 229115 - DNA, 25 bp, Artificial
  probe
  misc_feature (1)..(25): SEQ ID NO: 2485; WAN024G34_at; Start 204; Stop 228
gaaactggaaaaggccttgcaggtc

SEQ ID NO: 229116 - DNA, 25 bp, Artificial
  probe
  misc_feature (1)..(25): SEQ ID NO: 2485; WAN024G34_at; Start 119; Stop 143
ttgacaagccaggagagaaaattcc

SEQ ID NO: 229117 - DNA, 25 bp, Artificial
  probe
  misc_feature (1)..(25): SEQ ID NO: 2485; WAN024G34_at; Start 145; Stop 169
gatgacaccgaattaaaactcaagg

SEQ ID NO: 229118 - DNA, 25 bp, Artificial
  probe
  misc_feature (1)..(25): SEQ ID NO: 2485; WAN024G34_at; Start 222; Stop 246
gcaggtctttgatttgtcggtggat

SEQ ID NO: 229119 - DNA, 25 bp, Artificial
  probe
  misc_feature (1)..(25): SEQ ID NO: 2485; WAN024G34_at; Start 46; Stop 70
tttgaaacgagagagcaggccaagc

SEQ ID NO: 229120 - DNA, 25 bp, Artificial
  probe
  misc_feature (1)..(25): SEQ ID NO: 2485; WAN024G34_at; Start 345; Stop 369
caatcagttggcttggaaattacgc

SEQ ID NO: 229121 - DNA, 25 bp, Artificial
  probe
  misc_feature (1)..(25): SEQ ID NO: 2485; WAN024G34_at; Start 131; Stop 155
gagagaaaattccagatgacaccga

SEQ ID NO: 229122 - DNA, 25 bp, Artificial
  probe
  misc_feature (1)..(25): SEQ ID NO: 2485; WAN024G34_at; Start 439; Stop 463
gagccgagctttgccagtattgatg

SEQ ID NO: 229123 - DNA, 25 bp, Artificial
  probe
  misc_feature (1)..(25): SEQ ID NO: 2485; WAN024G34_at; Start 462; Stop 486
tgtgagtttcatttcccttagtctg

SEQ ID NO: 229124 - DNA, 25 bp, Artificial
  probe
  misc_feature (1)..(25): SEQ ID NO: 2485; WAN024G34_at; Start 295; Stop 319
gtcatgctacagaatagtgccaagt

SEQ ID NO: 229125 - DNA, 25 bp, Artificial
  probe
  misc_feature (1)..(25): SEQ ID NO: 2485; WAN024G34_at; Start 509; Stop 533
tcttggctgatcaaggtcaggtggt

SEQ ID NO: 229126 - DNA, 25 bp, Artificial
  probe
  misc_feature (1)..(25): SEQ ID NO: 2485; WAN024G34_at; Start 771; Stop 795
taaagaagcagtagagagggcgcat

SEQ ID NO: 229127 - DNA, 25 bp, Artificial
  probe
  misc_feature (1)..(25): SEQ ID NO: 2485; WAN024G34_at; Start 89; Stop 113
tagtcgtagcagtccttaatggaga

SEQ ID NO: 229128 - DNA, 25 bp, Artificial
  probe
  misc_feature (1)..(25): SEQ ID NO: 2485; WAN024G34_at; Start 675; Stop 699
ggacttttctcccatccaaggtgga

SEQ ID NO: 229129 - DNA, 25 bp, Artificial
  probe
  misc_feature (1)..(25): SEQ ID NO: 2485; WAN024G34_at; Start 105; Stop 129
taatggagaacggtttgacaagcca

SEQ ID NO: 229130 - DNA, 25 bp, Artificial
  probe
  misc_feature (1)..(25): SEQ ID NO: 2485; WAN024G34_at; Start 615; Stop 639
gaatgtccttgaatctgtaacagct

SEQ ID NO: 229131 - DNA, 25 bp, Artificial
  probe
  misc_feature (1)..(25): SEQ ID NO: 2485; WAN024G34_at; Start 280; Stop 304
ggaggttttaccgatgtcatgctac

SEQ ID NO: 229132 - DNA, 25 bp, Artificial
  probe
  misc_feature (1)..(25): SEQ ID NO: 2485; WAN024G34_at; Start 362; Stop 386
aattacgccaagacccacgagttgt

SEQ ID NO: 229133 - DNA, 25 bp, Artificial
  probe
  misc_feature (1)..(25): SEQ ID NO: 2485; WAN024G34_at; Start 560; Stop 584
caggacgtgagcagattgggaaaaa

SEQ ID NO: 229134 - DNA, 25 bp, Artificial
  probe
  misc_feature (1)..(25): SEQ ID NO: 2485; WAN024G34_at; Start 174; Stop 198
gaaactcaagtatgtcagccgtggt

SEQ ID NO: 229135 - DNA, 25 bp, Artificial
  probe
  misc_feature (1)..(25): SEQ ID NO: 2485; WAN024G34_at; Start 17; Stop 41
tggatgtactagcttataaacaggg

SEQ ID NO: 229136 - DNA, 25 bp, Artificial
  probe
  misc_feature (1)..(25): SEQ ID NO: 2485; WAN024G34_at; Start 326; Stop 350
ttgcagtcgatgttggtaccaatca

SEQ ID NO: 229137 - DNA, 25 bp, Artificial
  probe
  misc_feature (1)..(25): SEQ ID NO: 2485; WAN024G34_at; Start 690; Stop 714
ccaaggtggacatggaaatattgaa

SEQ ID NO: 229138 - DNA, 25 bp, Artificial
  probe
  misc_feature (1)..(25): SEQ ID NO: 2485; WAN024G34_at; Start 423; Stop 447
gactgatttcgagcaggagccgagc

SEQ ID NO: 229139 - DNA, 25 bp, Artificial
  probe
  misc_feature (1)..(25): SEQ ID NO: 2485; WAN024G34_at; Start 313; Stop 337
gccaagttggtctttgcagtcgatg

SEQ ID NO: 229140 - DNA, 25 bp, Artificial
  probe
  misc_feature (1)..(25): SEQ ID NO: 2485; WAN024G34_at; Start 543; Stop 567
caaacctcagtttgaggcaggacgt

SEQ ID NO: 229141 - DNA, 25 bp, Artificial
  probe
  misc_feature (1)..(25): SEQ ID NO: 2485; WAN024G34_at; Start 528; Stop 552
ggtggtagcacttgtcaaacctcag

SEQ ID NO: 229142 - DNA, 25 bp, Artificial
  probe
  misc_feature (1)..(25): SEQ ID NO: 2485; WAN024G34_at; Start 189; Stop 213
cagccgtggtggtttgaaactggaa

SEQ ID NO: 229143 - DNA, 25 bp, Artificial
  probe
  misc_feature (1)..(25): SEQ ID NO: 2485; WAN024G34_at; Start 2; Stop 26
tggctaaggaaagagtggatgtact

SEQ ID NO: 229144 - DNA, 25 bp, Artificial
  probe
  misc_feature (1)..(25): SEQ ID NO: 2485; WAN024G34_at; Start 786; Stop 810
gagggcgcatagtcaatttaaaaat

SEQ ID NO: 229145 - DNA, 25 bp, Artificial
  probe
  misc_feature (1)..(25): SEQ ID NO: 2485; WAN024G34_at; Start 244; Stop 268
gatggcgcgactacgattgatatcg

SEQ ID NO: 229146 - DNA, 25 bp, Artificial
  probe
  misc_feature (1)..(25): SEQ ID NO: 2485; WAN024G34_at; Start 409; Stop 433
cgctatgctgaaaagactgatttcg

SEQ ID NO: 229147 - DNA, 25 bp, Artificial
  probe
  misc_feature (1)..(25): SEQ ID NO: 2485; WAN024G34_at; Start 479; Stop 503
ttagtctgattttgccagccttgca

SEQ ID NO: 229148 - DNA, 25 bp, Artificial
  probe
  misc_feature (1)..(25): SEQ ID NO: 2485; WAN024G34_at; Start 628; Stop 652
tctgtaacagctatggcagtagagg

SEQ ID NO: 229149 - DNA, 25 bp, Artificial
  probe
  misc_feature (1)..(25): SEQ ID NO: 4229; WAN024G35_at; Start 182; Stop 206
tgataggtttctttcaagtcccaaa

SEQ ID NO: 229150 - DNA, 25 bp, Artificial
  probe
  misc_feature (1)..(25): SEQ ID NO: 4229; WAN024G35_at; Start 168; Stop 192
catcaaaactcgtttgataggtttc

SEQ ID NO: 229151 - DNA, 25 bp, Artificial
  probe
  misc_feature (1)..(25): SEQ ID NO: 4229; WAN024G35_at; Start 26; Stop 50
tgattgagagccaagtcttctccag

SEQ ID NO: 229152 - DNA, 25 bp, Artificial
  probe
  misc_feature (1)..(25): SEQ ID NO: 4229; WAN024G35_at; Start 100; Stop 124
gatacgtgccttgtgttcctgttgg

SEQ ID NO: 229153 - DNA, 25 bp, Artificial
  probe
  misc_feature (1)..(25): SEQ ID NO: 4229; WAN024G35_at; Start 193; Stop 217
tttcaagtcccaaaaagcggcatca

SEQ ID NO: 229154 - DNA, 25 bp, Artificial
  probe
  misc_feature (1)..(25): SEQ ID NO: 4229; WAN024G35_at; Start 202; Stop 226
ccaaaaagcggcatcaccaaattca

SEQ ID NO: 229155 - DNA, 25 bp, Artificial
  probe
  misc_feature (1)..(25): SEQ ID NO: 4229; WAN024G35_at; Start 1; Stop 25
gtggttgaggagtttatctcgctct

SEQ ID NO: 229156 - DNA, 25 bp, Artificial
  probe
  misc_feature (1)..(25): SEQ ID NO: 4229; WAN024G35_at; Start 15; Stop 39
tatctcgctcttgattgagagccaa

SEQ ID NO: 229157 - DNA, 25 bp, Artificial
  probe
  misc_feature (1)..(25): SEQ ID NO: 4229; WAN024G35_at; Start 94; Stop 118
catttcgatacgtgccttgtgttcc

SEQ ID NO: 229158 - DNA, 25 bp, Artificial
  probe
  misc_feature (1)..(25): SEQ ID NO: 4229; WAN024G35_at; Start 90; Stop 114
ccaacatttcgatacgtgccttgtg

SEQ ID NO: 229159 - DNA, 25 bp, Artificial
  probe
  misc_feature (1)..(25): SEQ ID NO: 4229; WAN024G35_at; Start 144; Stop 168
cctgcttgcgcattttccgataggc

SEQ ID NO: 229160 - DNA, 25 bp, Artificial
  probe
  misc_feature (1)..(25): SEQ ID NO: 4229; WAN024G35_at; Start 227; Stop 251
tccaacatctggatatgcagttggg

SEQ ID NO: 229161 - DNA, 25 bp, Artificial
  probe
  misc_feature (1)..(25): SEQ ID NO: 4229; WAN024G35_at; Start 62; Stop 86
gctgcctcaatctctgccatttgaa

SEQ ID NO: 229162 - DNA, 25 bp, Artificial
  probe
  misc_feature (1)..(25): SEQ ID NO: 4229; WAN024G35_at; Start 207; Stop 231
aagcggcatcaccaaattcatccaa

SEQ ID NO: 229163 - DNA, 25 bp, Artificial
  probe
  misc_feature (1)..(25): SEQ ID NO: 4229; WAN024G35_at; Start 150; Stop 174
tgcgcattttccgataggcatcaaa

SEQ ID NO: 229164 - DNA, 25 bp, Artificial
  probe
  misc_feature (1)..(25): SEQ ID NO: 4229; WAN024G35_at; Start 84; Stop 108
gaaattccaacatttcgatacgtgc

SEQ ID NO: 229165 - DNA, 25 bp, Artificial
  probe
  misc_feature (1)..(25): SEQ ID NO: 4229; WAN024G35_at; Start 117; Stop 141
cctgttggtttttcttgacttccag

SEQ ID NO: 229166 - DNA, 25 bp, Artificial
  probe
  misc_feature (1)..(25): SEQ ID NO: 4229; WAN024G35_at; Start 35; Stop 59
gccaagtcttctccagcctgcaagt

SEQ ID NO: 229167 - DNA, 25 bp, Artificial
  probe
  misc_feature (1)..(25): SEQ ID NO: 4229; WAN024G35_at; Start 69; Stop 93
caatctctgccatttgaaattccaa

SEQ ID NO: 229168 - DNA, 25 bp, Artificial
  probe
  misc_feature (1)..(25): SEQ ID NO: 4229; WAN024G35_at; Start 159; Stop 183
tccgataggcatcaaaactcgtttg

SEQ ID NO: 229169 - DNA, 25 bp, Artificial
  probe
  misc_feature (1)..(25): SEQ ID NO: 4229; WAN024G35_at; Start 133; Stop 157
gacttccagaacctgcttgcgcatt

SEQ ID NO: 229170 - DNA, 25 bp, Artificial
  probe
  misc_feature (1)..(25): SEQ ID NO: 4229; WAN024G35_at; Start 41; Stop 65
tcttctccagcctgcaagtttgctg

SEQ ID NO: 229171 - DNA, 25 bp, Artificial
  probe
  misc_feature (1)..(25): SEQ ID NO: 4229; WAN024G35_at; Start 215; Stop 239
tcaccaaattcatccaacatctgga

SEQ ID NO: 229172 - DNA, 25 bp, Artificial
  probe
  misc_feature (1)..(25): SEQ ID NO: 4229; WAN024G35_at; Start 129; Stop 153
tcttgacttccagaacctgcttgcg

SEQ ID NO: 229173 - DNA, 25 bp, Artificial
  probe
  misc_feature (1)..(25): SEQ ID NO: 4229; WAN024G35_at; Start 164; Stop 188
taggcatcaaaactcgtttgatagg

SEQ ID NO: 229174 - DNA, 25 bp, Artificial
  probe
  misc_feature (1)..(25): SEQ ID NO: 4229; WAN024G35_at; Start 48; Stop 72
cagcctgcaagtttgctgcctcaat

SEQ ID NO: 229175 - DNA, 25 bp, Artificial
  probe
  misc_feature (1)..(25): SEQ ID NO: 4229; WAN024G35_at; Start 191; Stop 215
tctttcaagtcccaaaaagcggcat

SEQ ID NO: 229176 - DNA, 25 bp, Artificial
  probe
  misc_feature (1)..(25): SEQ ID NO: 4229; WAN024G35_at; Start 102; Stop 126
tacgtgccttgtgttcctgttggtt

SEQ ID NO: 229177 - DNA, 25 bp, Artificial
  probe
  misc_feature (1)..(25): SEQ ID NO: 4229; WAN024G35_at; Start 33; Stop 57
gagccaagtcttctccagcctgcaa

SEQ ID NO: 229178 - DNA, 25 bp, Artificial
  probe
  misc_feature (1)..(25): SEQ ID NO: 4229; WAN024G35_at; Start 19; Stop 43
tcgctcttgattgagagccaagtct

SEQ ID NO: 229179 - DNA, 25 bp, Artificial
  probe
  misc_feature (1)..(25): SEQ ID NO: 4229; WAN024G35_at; Start 139; Stop 163
cagaacctgcttgcgcattttccga

SEQ ID NO: 229180 - DNA, 25 bp, Artificial
  probe
  misc_feature (1)..(25): SEQ ID NO: 4229; WAN024G35_at; Start 197; Stop 221
aagtcccaaaaagcggcatcaccaa

SEQ ID NO: 229181 - DNA, 25 bp, Artificial
  probe
  misc_feature (1)..(25): SEQ ID NO: 4229; WAN024G35_at; Start 56; Stop 80
aagtttgctgcctcaatctctgcca

SEQ ID NO: 229182 - DNA, 25 bp, Artificial
  probe
  misc_feature (1)..(25): SEQ ID NO: 4229; WAN024G35_at; Start 7; Stop 31
gaggagtttatctcgctcttgattg

SEQ ID NO: 229183 - DNA, 25 bp, Artificial
  probe
  misc_feature (1)..(25): SEQ ID NO: 5314; WAN024G36_at; Start 1; Stop 25
ttgcagttcttgtttaatctcagct

SEQ ID NO: 229184 - DNA, 25 bp, Artificial
  probe
  misc_feature (1)..(25): SEQ ID NO: 5314; WAN024G36_at; Start 300; Stop 324
ccaaacgtttgctaatgtcttctaa

SEQ ID NO: 229185 - DNA, 25 bp, Artificial
  probe
  misc_feature (1)..(25): SEQ ID NO: 5314; WAN024G36_at; Start 66; Stop 90
gacctgccaaattgacaagattgac

SEQ ID NO: 229186 - DNA, 25 bp, Artificial
  probe
  misc_feature (1)..(25): SEQ ID NO: 5314; WAN024G36_at; Start 73; Stop 97
caaattgacaagattgacttccaac

SEQ ID NO: 229187 - DNA, 25 bp, Artificial
  probe
  misc_feature (1)..(25): SEQ ID NO: 5314; WAN024G36_at; Start 261; Stop 285
ggcgattgccatcaaaatcaaggtc

SEQ ID NO: 229188 - DNA, 25 bp, Artificial
  probe
  misc_feature (1)..(25): SEQ ID NO: 5314; WAN024G36_at; Start 117; Stop 141
tgtcctcagacgaaagattattgcc

SEQ ID NO: 229189 - DNA, 25 bp, Artificial
  probe
  misc_feature (1)..(25): SEQ ID NO: 5314; WAN024G36_at; Start 87; Stop 111
tgacttccaacttcttaagctctgc

SEQ ID NO: 229190 - DNA, 25 bp, Artificial
  probe
  misc_feature (1)..(25): SEQ ID NO: 5314; WAN024G36_at; Start 28; Stop 52
gagttgctgagccaaattatgacga

SEQ ID NO: 229191 - DNA, 25 bp, Artificial
  probe
  misc_feature (1)..(25): SEQ ID NO: 5314; WAN024G36_at; Start 140; Stop 164
cctgtcaagagattgtattcttccg

SEQ ID NO: 229192 - DNA, 25 bp, Artificial
  probe
  misc_feature (1)..(25): SEQ ID NO: 5314; WAN024G36_at; Start 132; Stop 156
gattattgcctgtcaagagattgta

SEQ ID NO: 229193 - DNA, 25 bp, Artificial
  probe
  misc_feature (1)..(25): SEQ ID NO: 5314; WAN024G36_at; Start 102; Stop 126
taagctctgcttccatgtcctcaga

SEQ ID NO: 229194 - DNA, 25 bp, Artificial
  probe
  misc_feature (1)..(25): SEQ ID NO: 5314; WAN024G36_at; Start 35; Stop 59
tgagccaaattatgacgagcagaag

SEQ ID NO: 229195 - DNA, 25 bp, Artificial
  probe
  misc_feature (1)..(25): SEQ ID NO: 5314; WAN024G36_at; Start 171; Stop 195
tggcaaaataaagcaaaacatcatc

SEQ ID NO: 229196 - DNA, 25 bp, Artificial
  probe
  misc_feature (1)..(25): SEQ ID NO: 5314; WAN024G36_at; Start 225; Stop 249
tatgaaggaggtccaaacgattctc

SEQ ID NO: 229197 - DNA, 25 bp, Artificial
  probe
  misc_feature (1)..(25): SEQ ID NO: 5314; WAN024G36_at; Start 110; Stop 134
gcttccatgtcctcagacgaaagat

SEQ ID NO: 229198 - DNA, 25 bp, Artificial
  probe
  misc_feature (1)..(25): SEQ ID NO: 5314; WAN024G36_at; Start 150; Stop 174
gattgtattcttccgtaatcttggc

SEQ ID NO: 229199 - DNA, 25 bp, Artificial
  probe
  misc_feature (1)..(25): SEQ ID NO: 5314; WAN024G36_at; Start 15; Stop 39
taatctcagcttcgagttgctgagc

SEQ ID NO: 229200 - DNA, 25 bp, Artificial
  probe
  misc_feature (1)..(25): SEQ ID NO: 5314; WAN024G36_at; Start 219; Stop 243
taatagtatgaaggaggtccaaacg

SEQ ID NO: 229201 - DNA, 25 bp, Artificial
  probe
  misc_feature (1)..(25): SEQ ID NO: 5314; WAN024G36_at; Start 179; Stop 203
taaagcaaaacatcatcaacagtcc

SEQ ID NO: 229202 - DNA, 25 bp, Artificial
  probe
  misc_feature (1)..(25): SEQ ID NO: 5314; WAN024G36_at; Start 45; Stop 69
tatgacgagcagaagcaagttgacc

SEQ ID NO: 229203 - DNA, 25 bp, Artificial
  probe
  misc_feature (1)..(25): SEQ ID NO: 5314; WAN024G36_at; Start 162; Stop 186
ccgtaatcttggcaaaataaagcaa

SEQ ID NO: 229204 - DNA, 25 bp, Artificial
  probe
  misc_feature (1)..(25): SEQ ID NO: 5314; WAN024G36_at; Start 215; Stop 239
cgagtaatagtatgaaggaggtcca

SEQ ID NO: 229205 - DNA, 25 bp, Artificial
  probe
  misc_feature (1)..(25): SEQ ID NO: 5314; WAN024G36_at; Start 288; Stop 312
caatgatagcttccaaacgtttgct

SEQ ID NO: 229206 - DNA, 25 bp, Artificial
  probe
  misc_feature (1)..(25): SEQ ID NO: 5314; WAN024G36_at; Start 278; Stop 302
tcaaggtcctcaatgatagcttcca

SEQ ID NO: 229207 - DNA, 25 bp, Artificial
  probe
  misc_feature (1)..(25): SEQ ID NO: 5314; WAN024G36_at; Start 282; Stop 306
ggtcctcaatgatagcttccaaacg

SEQ ID NO: 229208 - DNA, 25 bp, Artificial
  probe
  misc_feature (1)..(25): SEQ ID NO: 5314; WAN024G36_at; Start 200; Stop 224
gtcccaccatacttacgagtaatag

SEQ ID NO: 229209 - DNA, 25 bp, Artificial
  probe
  misc_feature (1)..(25): SEQ ID NO: 5314; WAN024G36_at; Start 234; Stop 258
ggtccaaacgattctcaacctgcat

SEQ ID NO: 229210 - DNA, 25 bp, Artificial
  probe
  misc_feature (1)..(25): SEQ ID NO: 5314; WAN024G36_at; Start 228; Stop 252
gaaggaggtccaaacgattctcaac

SEQ ID NO: 229211 - DNA, 25 bp, Artificial
  probe
  misc_feature (1)..(25): SEQ ID NO: 5314; WAN024G36_at; Start 56; Stop 80
gaagcaagttgacctgccaaattga

SEQ ID NO: 229212 - DNA, 25 bp, Artificial
  probe
  misc_feature (1)..(25): SEQ ID NO: 5314; WAN024G36_at; Start 267; Stop 291
tgccatcaaaatcaaggtcctcaat

SEQ ID NO: 229213 - DNA, 25 bp, Artificial
  probe
  misc_feature (1)..(25): SEQ ID NO: 5314; WAN024G36_at; Start 61; Stop 85
aagttgacctgccaaattgacaaga

SEQ ID NO: 229214 - DNA, 25 bp, Artificial
  probe
  misc_feature (1)..(25): SEQ ID NO: 5314; WAN024G36_at; Start 127; Stop 151
cgaaagattattgcctgtcaagaga

SEQ ID NO: 229215 - DNA, 25 bp, Artificial
  probe
  misc_feature (1)..(25): SEQ ID NO: 5314; WAN024G36_at; Start 20; Stop 44
tcagcttcgagttgctgagccaaat

SEQ ID NO: 229216 - DNA, 25 bp, Artificial
  probe
  misc_feature (1)..(25): SEQ ID NO: 5314; WAN024G36_at; Start 194; Stop 218
tcaacagtcccaccatacttacgag

SEQ ID NO: 229217 - DNA, 25 bp, Artificial
  probe
  misc_feature (1)..(25): SEQ ID NO: 3002; WAN024G37_at; Start 75; Stop 99
tgtcctgactggtgaaacgggtgca

SEQ ID NO: 229218 - DNA, 25 bp, Artificial
  probe
  misc_feature (1)..(25): SEQ ID NO: 3002; WAN024G37_at; Start 169; Stop 193
catggtgcaccaaaggcagagattg

SEQ ID NO: 229219 - DNA, 25 bp, Artificial
  probe
  misc_feature (1)..(25): SEQ ID NO: 3002; WAN024G37_at; Start 450; Stop 474
tgatgccgctttttgggacttgaaa

SEQ ID NO: 229220 - DNA, 25 bp, Artificial
  probe
  misc_feature (1)..(25): SEQ ID NO: 3002; WAN024G37_at; Start 155; Stop 179
cagatgttattcgtcatggtgcacc

SEQ ID NO: 229221 - DNA, 25 bp, Artificial
  probe
  misc_feature (1)..(25): SEQ ID NO: 3002; WAN024G37_at; Start 1338; Stop 1362
ttcacgtaaagaaggcaagactagc

SEQ ID NO: 229222 - DNA, 25 bp, Artificial
  probe
  misc_feature (1)..(25): SEQ ID NO: 3002; WAN024G37_at; Start 1030; Stop 1054
tctgaggacatggaagcagagctta

SEQ ID NO: 229223 - DNA, 25 bp, Artificial
  probe
  misc_feature (1)..(25): SEQ ID NO: 3002; WAN024G37_at; Start 1606; Stop 1630
gatgatgtgacagaagcagccctga

SEQ ID NO: 229224 - DNA, 25 bp, Artificial
  probe
  misc_feature (1)..(25): SEQ ID NO: 3002; WAN024G37_at; Start 499; Stop 523
gcctatcggaaaatgcgcaagcagg

SEQ ID NO: 229225 - DNA, 25 bp, Artificial
  probe
  misc_feature (1)..(25): SEQ ID NO: 3002; WAN024G37_at; Start 901; Stop 925
caggttgagaatcgtttggacctcc

SEQ ID NO: 229226 - DNA, 25 bp, Artificial
  probe
  misc_feature (1)..(25): SEQ ID NO: 3002; WAN024G37_at; Start 583; Stop 607
caaatggcagagattgaggcagcaa

SEQ ID NO: 229227 - DNA, 25 bp, Artificial
  probe
  misc_feature (1)..(25): SEQ ID NO: 3002; WAN024G37_at; Start 280; Stop 304
cgtcgggaaatcttgcaaaatggtc

SEQ ID NO: 229228 - DNA, 25 bp, Artificial
  probe
  misc_feature (1)..(25): SEQ ID NO: 3002; WAN024G37_at; Start 1240; Stop 1264
tatatttcaaccaaccctggagaag

SEQ ID NO: 229229 - DNA, 25 bp, Artificial
  probe
  misc_feature (1)..(25): SEQ ID NO: 3002; WAN024G37_at; Start 635; Stop 659
tcaatcaagagcgagataaactcct

SEQ ID NO: 229230 - DNA, 25 bp, Artificial
  probe
  misc_feature (1)..(25): SEQ ID NO: 3002; WAN024G37_at; Start 397; Stop 421
catgaggagttaatgcgtccccaac

SEQ ID NO: 229231 - DNA, 25 bp, Artificial
  probe
  misc_feature (1)..(25): SEQ ID NO: 3002; WAN024G37_at; Start 295; Stop 319
caaaatggtcgtagtatcagccgtg

SEQ ID NO: 229232 - DNA, 25 bp, Artificial
  probe
  misc_feature (1)..(25): SEQ ID NO: 3002; WAN024G37_at; Start 484; Stop 508
caaacgagttttgatgcctatcgga

SEQ ID NO: 229233 - DNA, 25 bp, Artificial
  probe
  misc_feature (1)..(25): SEQ ID NO: 3002; WAN024G37_at; Start 1472; Stop 1496
tgccacaagtaattgcgattgcaga

SEQ ID NO: 229234 - DNA, 25 bp, Artificial
  probe
  misc_feature (1)..(25): SEQ ID NO: 3002; WAN024G37_at; Start 605; Stop 629
caaacttgcaggctggagaagactt

SEQ ID NO: 229235 - DNA, 25 bp, Artificial
  probe
  misc_feature (1)..(25): SEQ ID NO: 3002; WAN024G37_at; Start 1162; Stop 1186
tatatggaaaaagcccagtttcagg

SEQ ID NO: 229236 - DNA, 25 bp, Artificial
  probe
  misc_feature (1)..(25): SEQ ID NO: 3002; WAN024G37_at; Start 932; Stop 956
ctattactcgtaagtatggtgggac

SEQ ID NO: 229237 - DNA, 25 bp, Artificial
  probe
  misc_feature (1)..(25): SEQ ID NO: 3002; WAN024G37_at; Start 1390; Stop 1414
gtttcaggtcgtgttgctcaagcta

SEQ ID NO: 229238 - DNA, 25 bp, Artificial
  probe
  misc_feature (1)..(25): SEQ ID NO: 3002; WAN024G37_at; Start 90; Stop 114
aacgggtgcagggaagtcgattatc

SEQ ID NO: 229239 - DNA, 25 bp, Artificial
  probe
  misc_feature (1)..(25): SEQ ID NO: 3002; WAN024G37_at; Start 1300; Stop 1324
gaattatctcgtctcatgttagcca

SEQ ID NO: 229240 - DNA, 25 bp, Artificial
  probe
  misc_feature (1)..(25): SEQ ID NO: 3002; WAN024G37_at; Start 1015; Stop 1039
ggcaataatctttcgtctgaggaca

SEQ ID NO: 229241 - DNA, 25 bp, Artificial
  probe
  misc_feature (1)..(25): SEQ ID NO: 3002; WAN024G37_at; Start 1068; Stop 1092
caatcttgtcaatttggcaggtcaa

SEQ ID NO: 229242 - DNA, 25 bp, Artificial
  probe
  misc_feature (1)..(25): SEQ ID NO: 3002; WAN024G37_at; Start 514; Stop 538
cgcaagcaggttctggaagtcaaga

SEQ ID NO: 229243 - DNA, 25 bp, Artificial
  probe
  misc_feature (1)..(25): SEQ ID NO: 3002; WAN024G37_at; Start 546; Stop 570
acaggaacacaaggcacgtatcgaa

SEQ ID NO: 229244 - DNA, 25 bp, Artificial
  probe
  misc_feature (1)..(25): SEQ ID NO: 3002; WAN024G37_at; Start 676; Stop 700
gcggatacactgaccaatgcctaca

SEQ ID NO: 229245 - DNA, 25 bp, Artificial
  probe
  misc_feature (1)..(25): SEQ ID NO: 3002; WAN024G37_at; Start 850; Stop 874
cgtttggaagctatcattgaggacc

SEQ ID NO: 229246 - DNA, 25 bp, Artificial
  probe
  misc_feature (1)..(25): SEQ ID NO: 3002; WAN024G37_at; Start 871; Stop 895
gaccttgattttgatggcaatcgcc

SEQ ID NO: 229247 - DNA, 25 bp, Artificial
  probe
  misc_feature (1)..(25): SEQ ID NO: 3002; WAN024G37_at; Start 1110; Stop 1134
taatttggctcagcaactcgaagct

SEQ ID NO: 229248 - DNA, 25 bp, Artificial
  probe
  misc_feature (1)..(25): SEQ ID NO: 3002; WAN024G37_at; Start 128; Stop 152
atatgatgttgggagctcgtgcgac

SEQ ID NO: 229249 - DNA, 25 bp, Artificial
  probe
  misc_feature (1)..(25): SEQ ID NO: 3002; WAN024G37_at; Start 311; Stop 335
tcagccgtgtaaatggtcagatggt

SEQ ID NO: 229250 - DNA, 25 bp, Artificial
  probe
  misc_feature (1)..(25): SEQ ID NO: 3002; WAN024G37_at; Start 725; Stop 749
caagtctggccaatgttcgttcagc

SEQ ID NO: 229251 - DNA, 25 bp, Artificial
  probe
  misc_feature (1)..(25): SEQ ID NO: 1409; WAN024G38_at; Start 39; Stop 63
ctccgtggaatggttttctaagcca

SEQ ID NO: 229252 - DNA, 25 bp, Artificial
  probe
  misc_feature (1)..(25): SEQ ID NO: 1409; WAN024G38_at; Start 271; Stop 295
tgtatctccaccattgcgactataa

SEQ ID NO: 229253 - DNA, 25 bp, Artificial
  probe
  misc_feature (1)..(25): SEQ ID NO: 1409; WAN024G38_at; Start 138; Stop 162
tgtctgtctctactacaaatggcat

SEQ ID NO: 229254 - DNA, 25 bp, Artificial
  probe
  misc_feature (1)..(25): SEQ ID NO: 1409; WAN024G38_at; Start 27; Stop 51
tatgattttcagctccgtggaatgg

SEQ ID NO: 229255 - DNA, 25 bp, Artificial
  probe
  misc_feature (1)..(25): SEQ ID NO: 1409; WAN024G38_at; Start 175; Stop 199
ttcgaccaagtctgccgcttcagcg

SEQ ID NO: 229256 - DNA, 25 bp, Artificial
  probe
  misc_feature (1)..(25): SEQ ID NO: 1409; WAN024G38_at; Start 72; Stop 96
tataatctgttgtttcatgccagtc

SEQ ID NO: 229257 - DNA, 25 bp, Artificial
  probe
  misc_feature (1)..(25): SEQ ID NO: 1409; WAN024G38_at; Start 225; Stop 249
catcaactggtgcatccaagggacg

SEQ ID NO: 229258 - DNA, 25 bp, Artificial
  probe
  misc_feature (1)..(25): SEQ ID NO: 1409; WAN024G38_at; Start 103; Stop 127
ggtcaaatcaatacctgcgtgaaca

SEQ ID NO: 229259 - DNA, 25 bp, Artificial
  probe
  misc_feature (1)..(25): SEQ ID NO: 1409; WAN024G38_at; Start 191; Stop 215
gcttcagcggcaacccgcttggcat

SEQ ID NO: 229260 - DNA, 25 bp, Artificial
  probe
  misc_feature (1)..(25): SEQ ID NO: 1409; WAN024G38_at; Start 119; Stop 143
gcgtgaacaaagatatacttgtctg

SEQ ID NO: 229261 - DNA, 25 bp, Artificial
  probe
  misc_feature (1)..(25): SEQ ID NO: 1409; WAN024G38_at; Start 15; Stop 39
tggtttttccagtatgattttcagc

SEQ ID NO: 229262 - DNA, 25 bp, Artificial
  probe
  misc_feature (1)..(25): SEQ ID NO: 1409; WAN024G38_at; Start 57; Stop 81
taagccatacttttttataatctgt

SEQ ID NO: 229263 - DNA, 25 bp, Artificial
  probe
  misc_feature (1)..(25): SEQ ID NO: 1409; WAN024G38_at; Start 258; Stop 282
tagagttaatggttgtatctccacc

SEQ ID NO: 229264 - DNA, 25 bp, Artificial
  probe
  misc_feature (1)..(25): SEQ ID NO: 1409; WAN024G38_at; Start 7; Stop 31
gaagacaatggtttttccagtatga

SEQ ID NO: 229265 - DNA, 25 bp, Artificial
  probe
  misc_feature (1)..(25): SEQ ID NO: 1409; WAN024G38_at; Start 228; Stop 252
caactggtgcatccaagggacgacc

SEQ ID NO: 229266 - DNA, 25 bp, Artificial
  probe
  misc_feature (1)..(25): SEQ ID NO: 1409; WAN024G38_at; Start 239; Stop 263
tccaagggacgacctaggatagagt

SEQ ID NO: 229267 - DNA, 25 bp, Artificial
  probe
  misc_feature (1)..(25): SEQ ID NO: 1409; WAN024G38_at; Start 220; Stop 244
tactccatcaactggtgcatccaag

SEQ ID NO: 229268 - DNA, 25 bp, Artificial
  probe
  misc_feature (1)..(25): SEQ ID NO: 1409; WAN024G38_at; Start 142; Stop 166
tgtctctactacaaatggcatttga

SEQ ID NO: 229269 - DNA, 25 bp, Artificial
  probe
  misc_feature (1)..(25): SEQ ID NO: 1409; WAN024G38_at; Start 268; Stop 292
ggttgtatctccaccattgcgacta

SEQ ID NO: 229270 - DNA, 25 bp, Artificial
  probe
  misc_feature (1)..(25): SEQ ID NO: 1409; WAN024G38_at; Start 245; Stop 269
ggacgacctaggatagagttaatgg

SEQ ID NO: 229271 - DNA, 25 bp, Artificial
  probe
  misc_feature (1)..(25): SEQ ID NO: 1409; WAN024G38_at; Start 36; Stop 60
cagctccgtggaatggttttctaag

SEQ ID NO: 229272 - DNA, 25 bp, Artificial
  probe
  misc_feature (1)..(25): SEQ ID NO: 1409; WAN024G38_at; Start 44; Stop 68
tggaatggttttctaagccatactt

SEQ ID NO: 229273 - DNA, 25 bp, Artificial
  probe
  misc_feature (1)..(25): SEQ ID NO: 1409; WAN024G38_at; Start 197; Stop 221
gcggcaacccgcttggcatcttcta

SEQ ID NO: 229274 - DNA, 25 bp, Artificial
  probe
  misc_feature (1)..(25): SEQ ID NO: 1409; WAN024G38_at; Start 98; Stop 122
tccaaggtcaaatcaatacctgcgt

SEQ ID NO: 229275 - DNA, 25 bp, Artificial
  probe
  misc_feature (1)..(25): SEQ ID NO: 1409; WAN024G38_at; Start 157; Stop 181
tggcatttgacgaatgaattcgacc

SEQ ID NO: 229276 - DNA, 25 bp, Artificial
  probe
  misc_feature (1)..(25): SEQ ID NO: 1409; WAN024G38_at; Start 211; Stop 235
ggcatcttctactccatcaactggt

SEQ ID NO: 229277 - DNA, 25 bp, Artificial
  probe
  misc_feature (1)..(25): SEQ ID NO: 1409; WAN024G38_at; Start 2; Stop 26
tgaccgaagacaatggtttttccag

SEQ ID NO: 229278 - DNA, 25 bp, Artificial
  probe
  misc_feature (1)..(25): SEQ ID NO: 1409; WAN024G38_at; Start 168; Stop 192
gaatgaattcgaccaagtctgccgc

SEQ ID NO: 229279 - DNA, 25 bp, Artificial
  probe
  misc_feature (1)..(25): SEQ ID NO: 1409; WAN024G38_at; Start 172; Stop 196
gaattcgaccaagtctgccgcttca

SEQ ID NO: 229280 - DNA, 25 bp, Artificial
  probe
  misc_feature (1)..(25): SEQ ID NO: 1409; WAN024G38_at; Start 232; Stop 256
tggtgcatccaagggacgacctagg

SEQ ID NO: 229281 - DNA, 25 bp, Artificial
  probe
  misc_feature (1)..(25): SEQ ID NO: 1409; WAN024G38_at; Start 130; Stop 154
gatatacttgtctgtctctactaca

SEQ ID NO: 229282 - DNA, 25 bp, Artificial
  probe
  misc_feature (1)..(25): SEQ ID NO: 1409; WAN024G38_at; Start 110; Stop 134
tcaatacctgcgtgaacaaagatat

SEQ ID NO: 229283 - DNA, 25 bp, Artificial
  probe
  misc_feature (1)..(25): SEQ ID NO: 1409; WAN024G38_at; Start 114; Stop 138
tacctgcgtgaacaaagatatactt

SEQ ID NO: 229284 - DNA, 25 bp, Artificial
  probe
  misc_feature (1)..(25): SEQ ID NO: 1409; WAN024G38_at; Start 24; Stop 48
cagtatgattttcagctccgtggaa

SEQ ID NO: 229285 - DNA, 25 bp, Artificial
  probe
  misc_feature (1)..(25): SEQ ID NO: 1369; WAN024G39_at; Start 497; Stop 521
tccacggagctgaaaatcatactgg

SEQ ID NO: 229286 - DNA, 25 bp, Artificial
  probe
  misc_feature (1)..(25): SEQ ID NO: 1369; WAN024G39_at; Start 276; Stop 300
cattaactctatcctaggtcgtccc

SEQ ID NO: 229287 - DNA, 25 bp, Artificial
  probe
  misc_feature (1)..(25): SEQ ID NO: 1369; WAN024G39_at; Start 38; Stop 62
aagctgggatgctggaagaccttct

SEQ ID NO: 229288 - DNA, 25 bp, Artificial
  probe
  misc_feature (1)..(25): SEQ ID NO: 1369; WAN024G39_at; Start 290; Stop 314
taggtcgtcccttggatgcaccagt

SEQ ID NO: 229289 - DNA, 25 bp, Artificial
  probe
  misc_feature (1)..(25): SEQ ID NO: 1369; WAN024G39_at; Start 126; Stop 150
tagtcaccgtgttcttgaaatggtc

SEQ ID NO: 229290 - DNA, 25 bp, Artificial
  probe
  misc_feature (1)..(25): SEQ ID NO: 1369; WAN024G39_at; Start 356; Stop 380
cagacttggtcgaattcattcgtca

SEQ ID NO: 229291 - DNA, 25 bp, Artificial
  probe
  misc_feature (1)..(25): SEQ ID NO: 1369; WAN024G39_at; Start 666; Stop 690
tacagaccaaggaatgacagaacac

SEQ ID NO: 229292 - DNA, 25 bp, Artificial
  probe
  misc_feature (1)..(25): SEQ ID NO: 1369; WAN024G39_at; Start 691; Stop 715
cactttatcgaaaatgacggctttg

SEQ ID NO: 229293 - DNA, 25 bp, Artificial
  probe
  misc_feature (1)..(25): SEQ ID NO: 1369; WAN024G39_at; Start 514; Stop 538
catactggaaaaaccattgtcttcg

SEQ ID NO: 229294 - DNA, 25 bp, Artificial
  probe
  misc_feature (1)..(25): SEQ ID NO: 1369; WAN024G39_at; Start 417; Stop 441
tgttcacgcaggtattgatttgacc

SEQ ID NO: 229295 - DNA, 25 bp, Artificial
  probe
  misc_feature (1)..(25): SEQ ID NO: 1369; WAN024G39_at; Start 314; Stop 338
ttgatggagtagaagatgccaagcg

SEQ ID NO: 229296 - DNA, 25 bp, Artificial
  probe
  misc_feature (1)..(25): SEQ ID NO: 1369; WAN024G39_at; Start 299; Stop 323
ccttggatgcaccagttgatggagt

SEQ ID NO: 229297 - DNA, 25 bp, Artificial
  probe
  misc_feature (1)..(25): SEQ ID NO: 1369; WAN024G39_at; Start 10; Stop 34
tattatgtaattggagatgttcacg

SEQ ID NO: 229298 - DNA, 25 bp, Artificial
  probe
  misc_feature (1)..(25): SEQ ID NO: 1369; WAN024G39_at; Start 557; Stop 581
gtttgttacagcaagaacgcggtac

SEQ ID NO: 229299 - DNA, 25 bp, Artificial
  probe
  misc_feature (1)..(25): SEQ ID NO: 1369; WAN024G39_at; Start 676; Stop 700
ggaatgacagaacaccactttatcg

SEQ ID NO: 229300 - DNA, 25 bp, Artificial
  probe
  misc_feature (1)..(25): SEQ ID NO: 1369; WAN024G39_at; Start 261; Stop 285
tggtggagatacaaccattaactct

SEQ ID NO: 229301 - DNA, 25 bp, Artificial
  probe
  misc_feature (1)..(25): SEQ ID NO: 1369; WAN024G39_at; Start 97; Stop 121
ctaggtgatttgattgacagaggtg

SEQ ID NO: 229302 - DNA, 25 bp, Artificial
  probe
  misc_feature (1)..(25): SEQ ID NO: 1369; WAN024G39_at; Start 572; Stop 596
aacgcggtacatctgagctttggac

SEQ ID NO: 229303 - DNA, 25 bp, Artificial
  probe
  misc_feature (1)..(25): SEQ ID NO: 1369; WAN024G39_at; Start 25; Stop 49
gatgttcacggaaaagctgggatgc

SEQ ID NO: 229304 - DNA, 25 bp, Artificial
  probe
  misc_feature (1)..(25): SEQ ID NO: 1369; WAN024G39_at; Start 528; Stop 552
cattgtcttcggtcatacaccggtc

SEQ ID NO: 229305 - DNA, 25 bp, Artificial
  probe
  misc_feature (1)..(25): SEQ ID NO: 1369; WAN024G39_at; Start 448; Stop 472
gactggcatgaaacaacagattata

SEQ ID NO: 229306 - DNA, 25 bp, Artificial
  probe
  misc_feature (1)..(25): SEQ ID NO: 1369; WAN024G39_at; Start 323; Stop 347
tagaagatgccaagcgggttgccgc

SEQ ID NO: 229307 - DNA, 25 bp, Artificial
  probe
  misc_feature (1)..(25): SEQ ID NO: 1369; WAN024G39_at; Start 196; Stop 220
cacgagtatatgtttttgacttggc

SEQ ID NO: 229308 - DNA, 25 bp, Artificial
  probe
  misc_feature (1)..(25): SEQ ID NO: 1369; WAN024G39_at; Start 648; Stop 672
ccttcacgggattgtctttacagac

SEQ ID NO: 229309 - DNA, 25 bp, Artificial
  probe
  misc_feature (1)..(25): SEQ ID NO: 1369; WAN024G39_at; Start 228; Stop 252
cccagaagaaagttatgaccattat

SEQ ID NO: 229310 - DNA, 25 bp, Artificial
  probe
  misc_feature (1)..(25): SEQ ID NO: 1369; WAN024G39_at; Start 83; Stop 107
cccagttgctctttctaggtgattt

SEQ ID NO: 229311 - DNA, 25 bp, Artificial
  probe
  misc_feature (1)..(25): SEQ ID NO: 1369; WAN024G39_at; Start 586; Stop 610
gagctttggactacagaagatggca

SEQ ID NO: 229312 - DNA, 25 bp, Artificial
  probe
  misc_feature (1)..(25): SEQ ID NO: 1369; WAN024G39_at; Start 599; Stop 623
cagaagatggcaagattggaatgga

SEQ ID NO: 229313 - DNA, 25 bp, Artificial
  probe
  misc_feature (1)..(25): SEQ ID NO: 1369; WAN024G39_at; Start 545; Stop 569
caccggtctatggtttgttacagca

SEQ ID NO: 229314 - DNA, 25 bp, Artificial
  probe
  misc_feature (1)..(25): SEQ ID NO: 1369; WAN024G39_at; Start 481; Stop 505
tggcttagaaaaccattccacggag

SEQ ID NO: 229315 - DNA, 25 bp, Artificial
  probe
  misc_feature (1)..(25): SEQ ID NO: 1369; WAN024G39_at; Start 629; Stop 653
gagctgtttatggtggtgtccttca

SEQ ID NO: 229316 - DNA, 25 bp, Artificial
  probe
  misc_feature (1)..(25): SEQ ID NO: 1369; WAN024G39_at; Start 149; Stop 173
tcaaggacttggtggacaatcaagg

SEQ ID NO: 229317 - DNA, 25 bp, Artificial
  probe
  misc_feature (1)..(25): SEQ ID NO: 1369; WAN024G39_at; Start 702; Stop 726
aaatgacggctttgtcgctgaagat

SEQ ID NO: 229318 - DNA, 25 bp, Artificial
  probe
  misc_feature (1)..(25): SEQ ID NO: 1369; WAN024G39_at; Start 111; Stop 135
tgacagaggtgaggatagtcaccgt

SEQ ID NO: 229319 - DNA, 25 bp, Artificial
  probe
  misc_feature (1)..(25): SEQ ID NO: 7206; WAN024G3A_at; Start 418; Stop 442
ggtagtgccttacaatatgaaactg

SEQ ID NO: 229320 - DNA, 25 bp, Artificial
  probe
  misc_feature (1)..(25): SEQ ID NO: 7206; WAN024G3A_at; Start 156; Stop 180
gagcccagaggaaaataccaataat

SEQ ID NO: 229321 - DNA, 25 bp, Artificial
  probe
  misc_feature (1)..(25): SEQ ID NO: 7206; WAN024G3A_at; Start 192; Stop 216
ggatgaagattcaaaaccagatgaa

SEQ ID NO: 229322 - DNA, 25 bp, Artificial
  probe
  misc_feature (1)..(25): SEQ ID NO: 7206; WAN024G3A_at; Start 430; Stop 454
caatatgaaactgaaaaatttgacg

SEQ ID NO: 229323 - DNA, 25 bp, Artificial
  probe
  misc_feature (1)..(25): SEQ ID NO: 7206; WAN024G3A_at; Start 221; Stop 245
gttcagttgagggagaagctagcct

SEQ ID NO: 229324 - DNA, 25 bp, Artificial
  probe
  misc_feature (1)..(25): SEQ ID NO: 7206; WAN024G3A_at; Start 70; Stop 94
tcttattacctagtagatcctgaca

SEQ ID NO: 229325 - DNA, 25 bp, Artificial
  probe
  misc_feature (1)..(25): SEQ ID NO: 7206; WAN024G3A_at; Start 412; Stop 436
gacgatggtagtgccttacaatatg

SEQ ID NO: 229326 - DNA, 25 bp, Artificial
  probe
  misc_feature (1)..(25): SEQ ID NO: 7206; WAN024G3A_at; Start 384; Stop 408
cgatgataagggaaatattattgct

SEQ ID NO: 229327 - DNA, 25 bp, Artificial
  probe
  misc_feature (1)..(25): SEQ ID NO: 7206; WAN024G3A_at; Start 402; Stop 426
tattgcttatgacgatggtagtgcc

SEQ ID NO: 229328 - DNA, 25 bp, Artificial
  probe
  misc_feature (1)..(25): SEQ ID NO: 7206; WAN024G3A_at; Start 115; Stop 139
aaacttggtgaaatttctgaagata

SEQ ID NO: 229329 - DNA, 25 bp, Artificial
  probe
  misc_feature (1)..(25): SEQ ID NO: 7206; WAN024G3A_at; Start 76; Stop 100
tacctagtagatcctgacaaagatg

SEQ ID NO: 229330 - DNA, 25 bp, Artificial
  probe
  misc_feature (1)..(25): SEQ ID NO: 7206; WAN024G3A_at; Start 559; Stop 583
ggaaatagctataaatcgatagaaa

SEQ ID NO: 229331 - DNA, 25 bp, Artificial
  probe
  misc_feature (1)..(25): SEQ ID NO: 7206; WAN024G3A_at; Start 604; Stop 628
tcacattcaaaaacgatgatatttg

SEQ ID NO: 229332 - DNA, 25 bp, Artificial
  probe
  misc_feature (1)..(25): SEQ ID NO: 7206; WAN024G3A_at; Start 184; Stop 208
caagctaaggatgaagattcaaaac

SEQ ID NO: 229333 - DNA, 25 bp, Artificial
  probe
  misc_feature (1)..(25): SEQ ID NO: 7206; WAN024G3A_at; Start 150; Stop 174
tgcaaagagcccagaggaaaatacc

SEQ ID NO: 229334 - DNA, 25 bp, Artificial
  probe
  misc_feature (1)..(25): SEQ ID NO: 7206; WAN024G3A_at; Start 589; Stop 613
gcgactaagtatgattcacattcaa

SEQ ID NO: 229335 - DNA, 25 bp, Artificial
  probe
  misc_feature (1)..(25): SEQ ID NO: 7206; WAN024G3A_at; Start 224; Stop 248
cagttgagggagaagctagccttga

SEQ ID NO: 229336 - DNA, 25 bp, Artificial
  probe
  misc_feature (1)..(25): SEQ ID NO: 7206; WAN024G3A_at; Start 700; Stop 724
gatgacaatcaaataaaagctgaaa

SEQ ID NO: 229337 - DNA, 25 bp, Artificial
  probe
  misc_feature (1)..(25): SEQ ID NO: 7206; WAN024G3A_at; Start 100; Stop 124
gcttctaaatatgaaaaacttggtg

SEQ ID NO: 229338 - DNA, 25 bp, Artificial
  probe
  misc_feature (1)..(25): SEQ ID NO: 7206; WAN024G3A_at; Start 129; Stop 153
ttctgaagataaactcaaaaatgca

SEQ ID NO: 229339 - DNA, 25 bp, Artificial
  probe
  misc_feature (1)..(25): SEQ ID NO: 7206; WAN024G3A_at; Start 165; Stop 189
ggaaaataccaataataatcaagct

SEQ ID NO: 229340 - DNA, 25 bp, Artificial
  probe
  misc_feature (1)..(25): SEQ ID NO: 7206; WAN024G3A_at; Start 235; Stop 259
gaagctagccttgaaataaataaaa

SEQ ID NO: 229341 - DNA, 25 bp, Artificial
  probe
  misc_feature (1)..(25): SEQ ID NO: 7206; WAN024G3A_at; Start 85; Stop 109
gatcctgacaaagatgcttctaaat

SEQ ID NO: 229342 - DNA, 25 bp, Artificial
  probe
  misc_feature (1)..(25): SEQ ID NO: 7206; WAN024G3A_at; Start 143; Stop 167
tcaaaaatgcaaagagcccagagga

SEQ ID NO: 229343 - DNA, 25 bp, Artificial
  probe
  misc_feature (1)..(25): SEQ ID NO: 7206; WAN024G3A_at; Start 584; Stop 608
tcaaagcgactaagtatgattcaca

SEQ ID NO: 229344 - DNA, 25 bp, Artificial
  probe
  misc_feature (1)..(25): SEQ ID NO: 7206; WAN024G3A_at; Start 202; Stop 226
tcaaaaccagatgaaaaaagttcag

SEQ ID NO: 229345 - DNA, 25 bp, Artificial
  probe
  misc_feature (1)..(25): SEQ ID NO: 7206; WAN024G3A_at; Start 80; Stop 104
tagtagatcctgacaaagatgcttc

SEQ ID NO: 229346 - DNA, 25 bp, Artificial
  probe
  misc_feature (1)..(25): SEQ ID NO: 7206; WAN024G3A_at; Start 395; Stop 419
gaaatattattgcttatgacgatgg

SEQ ID NO: 229347 - DNA, 25 bp, Artificial
  probe
  misc_feature (1)..(25): SEQ ID NO: 7206; WAN024G3A_at; Start 713; Stop 737
taaaagctgaaactaagattagaat

SEQ ID NO: 229348 - DNA, 25 bp, Artificial
  probe
  misc_feature (1)..(25): SEQ ID NO: 7206; WAN024G3A_at; Start 406; Stop 430
gcttatgacgatggtagtgccttac

SEQ ID NO: 229349 - DNA, 25 bp, Artificial
  probe
  misc_feature (1)..(25): SEQ ID NO: 7206; WAN024G3A_at; Start 229; Stop 253
gagggagaagctagccttgaaataa

SEQ ID NO: 229350 - DNA, 25 bp, Artificial
  probe
  misc_feature (1)..(25): SEQ ID NO: 7206; WAN024G3A_at; Start 173; Stop 197
ccaataataatcaagctaaggatga

SEQ ID NO: 229351 - DNA, 25 bp, Artificial
  probe
  misc_feature (1)..(25): SEQ ID NO: 7206; WAN024G3A_at; Start 213; Stop 237
tgaaaaaagttcagttgagggagaa

SEQ ID NO: 229352 - DNA, 25 bp, Artificial
  probe
  misc_feature (1)..(25): SEQ ID NO: 7206; WAN024G3A_at; Start 553; Stop 577
tattatggaaatagctataaatcga

SEQ ID NO: 229353 - DNA, 25 bp, Artificial
  probe
  misc_feature (1)..(25): SEQ ID NO: 3670; WAN024G3B_at; Start 333; Stop 357
cgactttgtaaatggtggaacaaga

SEQ ID NO: 229354 - DNA, 25 bp, Artificial
  probe
  misc_feature (1)..(25): SEQ ID NO: 3670; WAN024G3B_at; Start 5; Stop 29
gcaactttaccaaaatccataggat

SEQ ID NO: 229355 - DNA, 25 bp, Artificial
  probe
  misc_feature (1)..(25): SEQ ID NO: 3670; WAN024G3B_at; Start 381; Stop 405
cgatgataaaggaaatataatagcc

SEQ ID NO: 229356 - DNA, 25 bp, Artificial
  probe
  misc_feature (1)..(25): SEQ ID NO: 3670; WAN024G3B_at; Start 173; Stop 197
taaacaaagagacagctgaggtgga

SEQ ID NO: 229357 - DNA, 25 bp, Artificial
  probe
  misc_feature (1)..(25): SEQ ID NO: 3670; WAN024G3B_at; Start 109; Stop 133
caaaagcttggcgaaattcctgaat

SEQ ID NO: 229358 - DNA, 25 bp, Artificial
  probe
  misc_feature (1)..(25): SEQ ID NO: 3670; WAN024G3B_at; Start 177; Stop 201
caaagagacagctgaggtggaaaat

SEQ ID NO: 229359 - DNA, 25 bp, Artificial
  probe
  misc_feature (1)..(25): SEQ ID NO: 3670; WAN024G3B_at; Start 328; Stop 352
gaagacgactttgtaaatggtggaa

SEQ ID NO: 229360 - DNA, 25 bp, Artificial
  probe
  misc_feature (1)..(25): SEQ ID NO: 3670; WAN024G3B_at; Start 553; Stop 577
tatgggaataactataaatctatag

SEQ ID NO: 229361 - DNA, 25 bp, Artificial
  probe
  misc_feature (1)..(25): SEQ ID NO: 3670; WAN024G3B_at; Start 222; Stop 246
gtctatcgaaggaaaatctctcttt

SEQ ID NO: 229362 - DNA, 25 bp, Artificial
  probe
  misc_feature (1)..(25): SEQ ID NO: 3670; WAN024G3B_at; Start 686; Stop 710
tatttgttaaagataatgatcagaa

SEQ ID NO: 229363 - DNA, 25 bp, Artificial
  probe
  misc_feature (1)..(25): SEQ ID NO: 3670; WAN024G3B_at; Start 17; Stop 41
aaatccataggattaaatttgctaa

SEQ ID NO: 229364 - DNA, 25 bp, Artificial
  probe
  misc_feature (1)..(25): SEQ ID NO: 3670; WAN024G3B_at; Start 106; Stop 130
taccaaaagcttggcgaaattcctg

SEQ ID NO: 229365 - DNA, 25 bp, Artificial
  probe
  misc_feature (1)..(25): SEQ ID NO: 3670; WAN024G3B_at; Start 398; Stop 422
taatagcctacgatgatgggactga

SEQ ID NO: 229366 - DNA, 25 bp, Artificial
  probe
  misc_feature (1)..(25): SEQ ID NO: 3670; WAN024G3B_at; Start 319; Stop 343
tataagcaagaagacgactttgtaa

SEQ ID NO: 229367 - DNA, 25 bp, Artificial
  probe
  misc_feature (1)..(25): SEQ ID NO: 3670; WAN024G3B_at; Start 396; Stop 420
tataatagcctacgatgatgggact

SEQ ID NO: 229368 - DNA, 25 bp, Artificial
  probe
  misc_feature (1)..(25): SEQ ID NO: 3670; WAN024G3B_at; Start 401; Stop 425
tagcctacgatgatgggactgatct

SEQ ID NO: 229369 - DNA, 25 bp, Artificial
  probe
  misc_feature (1)..(25): SEQ ID NO: 3670; WAN024G3B_at; Start 586; Stop 610
gcgaccaagtatgatttccactcaa

SEQ ID NO: 229370 - DNA, 25 bp, Artificial
  probe
  misc_feature (1)..(25): SEQ ID NO: 3670; WAN024G3B_at; Start 793; Stop 817
gtcatagaattaggggaaggagatc

SEQ ID NO: 229371 - DNA, 25 bp, Artificial
  probe
  misc_feature (1)..(25): SEQ ID NO: 3670; WAN024G3B_at; Start 312; Stop 336
aaagaaatataagcaagaagacgac

SEQ ID NO: 229372 - DNA, 25 bp, Artificial
  probe
  misc_feature (1)..(25): SEQ ID NO: 3670; WAN024G3B_at; Start 581; Stop 605
tcaaagcgaccaagtatgatttcca

SEQ ID NO: 229373 - DNA, 25 bp, Artificial
  probe
  misc_feature (1)..(25): SEQ ID NO: 3670; WAN024G3B_at; Start 417; Stop 441
gactgatctagaatatgaaactgag

SEQ ID NO: 229374 - DNA, 25 bp, Artificial
  probe
  misc_feature (1)..(25): SEQ ID NO: 3670; WAN024G3B_at; Start 1; Stop 25
gcaagcaactttaccaaaatccata

SEQ ID NO: 229375 - DNA, 25 bp, Artificial
  probe
  misc_feature (1)..(25): SEQ ID NO: 3670; WAN024G3B_at; Start 597; Stop 621
tgatttccactcaaaaacgatgaca

SEQ ID NO: 229376 - DNA, 25 bp, Artificial
  probe
  misc_feature (1)..(25): SEQ ID NO: 3670; WAN024G3B_at; Start 406; Stop 430
tacgatgatgggactgatctagaat

SEQ ID NO: 229377 - DNA, 25 bp, Artificial
  probe
  misc_feature (1)..(25): SEQ ID NO: 3670; WAN024G3B_at; Start 114; Stop 138
gcttggcgaaattcctgaatctaaa

SEQ ID NO: 229378 - DNA, 25 bp, Artificial
  probe
  misc_feature (1)..(25): SEQ ID NO: 3670; WAN024G3B_at; Start 209; Stop 233
tagtagataatcagtctatcgaagg

SEQ ID NO: 229379 - DNA, 25 bp, Artificial
  probe
  misc_feature (1)..(25): SEQ ID NO: 3670; WAN024G3B_at; Start 181; Stop 205
gagacagctgaggtggaaaataacc

SEQ ID NO: 229380 - DNA, 25 bp, Artificial
  probe
  misc_feature (1)..(25): SEQ ID NO: 3670; WAN024G3B_at; Start 232; Stop 256
ggaaaatctctctttaatattcata

SEQ ID NO: 229381 - DNA, 25 bp, Artificial
  probe
  misc_feature (1)..(25): SEQ ID NO: 3670; WAN024G3B_at; Start 185; Stop 209
cagctgaggtggaaaataacctttt

SEQ ID NO: 229382 - DNA, 25 bp, Artificial
  probe
  misc_feature (1)..(25): SEQ ID NO: 3670; WAN024G3B_at; Start 424; Stop 448
ctagaatatgaaactgagaaacttg

SEQ ID NO: 229383 - DNA, 25 bp, Artificial
  probe
  misc_feature (1)..(25): SEQ ID NO: 3670; WAN024G3B_at; Start 219; Stop 243
tcagtctatcgaaggaaaatctctc

SEQ ID NO: 229384 - DNA, 25 bp, Artificial
  probe
  misc_feature (1)..(25): SEQ ID NO: 3670; WAN024G3B_at; Start 414; Stop 438
tgggactgatctagaatatgaaact

SEQ ID NO: 229385 - DNA, 25 bp, Artificial
  probe
  misc_feature (1)..(25): SEQ ID NO: 3670; WAN024G3B_at; Start 170; Stop 194
gcctaaacaaagagacagctgaggt

SEQ ID NO: 229386 - DNA, 25 bp, Artificial
  probe
  misc_feature (1)..(25): SEQ ID NO: 3670; WAN024G3B_at; Start 121; Stop 145
gaaattcctgaatctaaatttaaga

SEQ ID NO: 229387 - DNA, 25 bp, Artificial
  probe
  misc_feature (1)..(25): SEQ ID NO: 3776; WAN024G3C_at; Start 254; Stop 278
ttgatagaaatatttcaacaattag

SEQ ID NO: 229388 - DNA, 25 bp, Artificial
  probe
  misc_feature (1)..(25): SEQ ID NO: 3776; WAN024G3C_at; Start 126; Stop 150
gattgcagaatctaaatttaaaaat

SEQ ID NO: 229389 - DNA, 25 bp, Artificial
  probe
  misc_feature (1)..(25): SEQ ID NO: 3776; WAN024G3C_at; Start 120; Stop 144
tggcgagattgcagaatctaaattt

SEQ ID NO: 229390 - DNA, 25 bp, Artificial
  probe
  misc_feature (1)..(25): SEQ ID NO: 3776; WAN024G3C_at; Start 113; Stop 137
aaaagcttggcgagattgcagaatc

SEQ ID NO: 229391 - DNA, 25 bp, Artificial
  probe
  misc_feature (1)..(25): SEQ ID NO: 3776; WAN024G3C_at; Start 249; Stop 273
tactattgatagaaatatttcaaca

SEQ ID NO: 229392 - DNA, 25 bp, Artificial
  probe
  misc_feature (1)..(25): SEQ ID NO: 3776; WAN024G3C_at; Start 235; Stop 259
gaaaaatctagttttactattgata

SEQ ID NO: 229393 - DNA, 25 bp, Artificial
  probe
  misc_feature (1)..(25): SEQ ID NO: 3776; WAN024G3C_at; Start 201; Stop 225
acatcatcatcaagaaaatgaagag

SEQ ID NO: 229394 - DNA, 25 bp, Artificial
  probe
  misc_feature (1)..(25): SEQ ID NO: 3776; WAN024G3C_at; Start 112; Stop 136
caaaagcttggcgagattgcagaat

SEQ ID NO: 229395 - DNA, 25 bp, Artificial
  probe
  misc_feature (1)..(25): SEQ ID NO: 3776; WAN024G3C_at; Start 199; Stop 223
gaacatcatcatcaagaaaatgaag

SEQ ID NO: 229396 - DNA, 25 bp, Artificial
  probe
  misc_feature (1)..(25): SEQ ID NO: 3776; WAN024G3C_at; Start 194; Stop 218
gggtagaacatcatcatcaagaaaa

SEQ ID NO: 229397 - DNA, 25 bp, Artificial
  probe
  misc_feature (1)..(25): SEQ ID NO: 3776; WAN024G3C_at; Start 114; Stop 138
aaagcttggcgagattgcagaatct

SEQ ID NO: 229398 - DNA, 25 bp, Artificial
  probe
  misc_feature (1)..(25): SEQ ID NO: 3776; WAN024G3C_at; Start 238; Stop 262
aaatctagttttactattgatagaa

SEQ ID NO: 229399 - DNA, 25 bp, Artificial
  probe
  misc_feature (1)..(25): SEQ ID NO: 3776; WAN024G3C_at; Start 121; Stop 145
ggcgagattgcagaatctaaattta

SEQ ID NO: 229400 - DNA, 25 bp, Artificial
  probe
  misc_feature (1)..(25): SEQ ID NO: 3776; WAN024G3C_at; Start 207; Stop 231
tcatcaagaaaatgaagagtctatt

SEQ ID NO: 229401 - DNA, 25 bp, Artificial
  probe
  misc_feature (1)..(25): SEQ ID NO: 3776; WAN024G3C_at; Start 108; Stop 132
atatcaaaagcttggcgagattgca

SEQ ID NO: 229402 - DNA, 25 bp, Artificial
  probe
  misc_feature (1)..(25): SEQ ID NO: 3776; WAN024G3C_at; Start 106; Stop 130
aaatatcaaaagcttggcgagattg

SEQ ID NO: 229403 - DNA, 25 bp, Artificial
  probe
  misc_feature (1)..(25): SEQ ID NO: 3776; WAN024G3C_at; Start 109; Stop 133
tatcaaaagcttggcgagattgcag

SEQ ID NO: 229404 - DNA, 25 bp, Artificial
  probe
  misc_feature (1)..(25): SEQ ID NO: 3776; WAN024G3C_at; Start 118; Stop 142
cttggcgagattgcagaatctaaat

SEQ ID NO: 229405 - DNA, 25 bp, Artificial
  probe
  misc_feature (1)..(25): SEQ ID NO: 3776; WAN024G3C_at; Start 195; Stop 219
ggtagaacatcatcatcaagaaaat

SEQ ID NO: 229406 - DNA, 25 bp, Artificial
  probe
  misc_feature (1)..(25): SEQ ID NO: 3776; WAN024G3C_at; Start 197; Stop 221
tagaacatcatcatcaagaaaatga

SEQ ID NO: 229407 - DNA, 25 bp, Artificial
  probe
  misc_feature (1)..(25): SEQ ID NO: 3776; WAN024G3C_at; Start 107; Stop 131
aatatcaaaagcttggcgagattgc

SEQ ID NO: 229408 - DNA, 25 bp, Artificial
  probe
  misc_feature (1)..(25): SEQ ID NO: 3776; WAN024G3C_at; Start 181; Stop 205
aaagatacaactggggtagaacatc

SEQ ID NO: 229409 - DNA, 25 bp, Artificial
  probe
  misc_feature (1)..(25): SEQ ID NO: 3776; WAN024G3C_at; Start 208; Stop 232
catcaagaaaatgaagagtctatta

SEQ ID NO: 229410 - DNA, 25 bp, Artificial
  probe
  misc_feature (1)..(25): SEQ ID NO: 3776; WAN024G3C_at; Start 123; Stop 147
cgagattgcagaatctaaatttaaa

SEQ ID NO: 229411 - DNA, 25 bp, Artificial
  probe
  misc_feature (1)..(25): SEQ ID NO: 3776; WAN024G3C_at; Start 211; Stop 235
caagaaaatgaagagtctattaaag

SEQ ID NO: 229412 - DNA, 25 bp, Artificial
  probe
  misc_feature (1)..(25): SEQ ID NO: 3776; WAN024G3C_at; Start 196; Stop 220
gtagaacatcatcatcaagaaaatg

SEQ ID NO: 229413 - DNA, 25 bp, Artificial
  probe
  misc_feature (1)..(25): SEQ ID NO: 3776; WAN024G3C_at; Start 117; Stop 141
gcttggcgagattgcagaatctaaa

SEQ ID NO: 229414 - DNA, 25 bp, Artificial
  probe
  misc_feature (1)..(25): SEQ ID NO: 3776; WAN024G3C_at; Start 214; Stop 238
gaaaatgaagagtctattaaagaaa

SEQ ID NO: 229415 - DNA, 25 bp, Artificial
  probe
  misc_feature (1)..(25): SEQ ID NO: 3776; WAN024G3C_at; Start 116; Stop 140
agcttggcgagattgcagaatctaa

SEQ ID NO: 229416 - DNA, 25 bp, Artificial
  probe
  misc_feature (1)..(25): SEQ ID NO: 3776; WAN024G3C_at; Start 222; Stop 246
agagtctattaaagaaaaatctagt

SEQ ID NO: 229417 - DNA, 25 bp, Artificial
  probe
  misc_feature (1)..(25): SEQ ID NO: 3776; WAN024G3C_at; Start 115; Stop 139
aagcttggcgagattgcagaatcta

SEQ ID NO: 229418 - DNA, 25 bp, Artificial
  probe
  misc_feature (1)..(25): SEQ ID NO: 3776; WAN024G3C_at; Start 219; Stop 243
tgaagagtctattaaagaaaaatct

SEQ ID NO: 229419 - DNA, 25 bp, Artificial
  probe
  misc_feature (1)..(25): SEQ ID NO: 3776; WAN024G3C_at; Start 204; Stop 228
tcatcatcaagaaaatgaagagtct

SEQ ID NO: 229420 - DNA, 25 bp, Artificial
  probe
  misc_feature (1)..(25): SEQ ID NO: 3776; WAN024G3C_at; Start 122; Stop 146
gcgagattgcagaatctaaatttaa

SEQ ID NO: 229421 - DNA, 25 bp, Artificial
  probe
  misc_feature (1)..(25): SEQ ID NO: 3801; WAN024G3D_at; Start 759; Stop 783
taagctgaatgttaaagacggtgac

SEQ ID NO: 229422 - DNA, 25 bp, Artificial
  probe
  misc_feature (1)..(25): SEQ ID NO: 3801; WAN024G3D_at; Start 161; Stop 185
taaaagtgactacctataatcctgg

SEQ ID NO: 229423 - DNA, 25 bp, Artificial
  probe
  misc_feature (1)..(25): SEQ ID NO: 3801; WAN024G3D_at; Start 338; Stop 362
taatgtcggctttggacggctttaa

SEQ ID NO: 229424 - DNA, 25 bp, Artificial
  probe
  misc_feature (1)..(25): SEQ ID NO: 3801; WAN024G3D_at; Start 962; Stop 986
gaaatactagtatcgaatatgctga

SEQ ID NO: 229425 - DNA, 25 bp, Artificial
  probe
  misc_feature (1)..(25): SEQ ID NO: 3801; WAN024G3D_at; Start 420; Stop 444
taaagacggaaatcttgtgacagat

SEQ ID NO: 229426 - DNA, 25 bp, Artificial
  probe
  misc_feature (1)..(25): SEQ ID NO: 3801; WAN024G3D_at; Start 1257; Stop 1281
aatgagttcaacgatagtgtcggaa

SEQ ID NO: 229427 - DNA, 25 bp, Artificial
  probe
  misc_feature (1)..(25): SEQ ID NO: 3801; WAN024G3D_at; Start 304; Stop 328
aatgttgaagatggaagaagtaccc

SEQ ID NO: 229428 - DNA, 25 bp, Artificial
  probe
  misc_feature (1)..(25): SEQ ID NO: 3801; WAN024G3D_at; Start 1358; Stop 1382
tcgaaggtaaaaaagacgctggcta

SEQ ID NO: 229429 - DNA, 25 bp, Artificial
  probe
  misc_feature (1)..(25): SEQ ID NO: 3801; WAN024G3D_at; Start 1030; Stop 1054
ggattcgatggtgagattcaagaac

SEQ ID NO: 229430 - DNA, 25 bp, Artificial
  probe
  misc_feature (1)..(25): SEQ ID NO: 3801; WAN024G3D_at; Start 1179; Stop 1203
cattttaaataaagatacgggagag

SEQ ID NO: 229431 - DNA, 25 bp, Artificial
  probe
  misc_feature (1)..(25): SEQ ID NO: 3801; WAN024G3D_at; Start 940; Stop 964
gaagtaaacattgatcctaagggaa

SEQ ID NO: 229432 - DNA, 25 bp, Artificial
  probe
  misc_feature (1)..(25): SEQ ID NO: 3801; WAN024G3D_at; Start 1576; Stop 1600
tcaactaaggatgttacagctacag

SEQ ID NO: 229433 - DNA, 25 bp, Artificial
  probe
  misc_feature (1)..(25): SEQ ID NO: 3801; WAN024G3D_at; Start 885; Stop 909
gaatgctaaagcagttggagtccac

SEQ ID NO: 229434 - DNA, 25 bp, Artificial
  probe
  misc_feature (1)..(25): SEQ ID NO: 3801; WAN024G3D_at; Start 1663; Stop 1687
actggaacagcaagcggagcccaga

SEQ ID NO: 229435 - DNA, 25 bp, Artificial
  probe
  misc_feature (1)..(25): SEQ ID NO: 3801; WAN024G3D_at; Start 724; Stop 748
gatttacacattgataacactagag

SEQ ID NO: 229436 - DNA, 25 bp, Artificial
  probe
  misc_feature (1)..(25): SEQ ID NO: 3801; WAN024G3D_at; Start 514; Stop 538
gctataaaagaagatggctccatgt

SEQ ID NO: 229437 - DNA, 25 bp, Artificial
  probe
  misc_feature (1)..(25): SEQ ID NO: 3801; WAN024G3D_at; Start 472; Stop 496
gatgataaagaatacactggagagg

SEQ ID NO: 229438 - DNA, 25 bp, Artificial
  probe
  misc_feature (1)..(25): SEQ ID NO: 3801; WAN024G3D_at; Start 805; Stop 829
gactataaagcaaacggatttccag

SEQ ID NO: 229439 - DNA, 25 bp, Artificial
  probe
  misc_feature (1)..(25): SEQ ID NO: 3801; WAN024G3D_at; Start 819; Stop 843
cggatttccagataaggtaacagat

SEQ ID NO: 229440 - DNA, 25 bp, Artificial
  probe
  misc_feature (1)..(25): SEQ ID NO: 3801; WAN024G3D_at; Start 1147; Stop 1171
gattttgcaagaaatacaaccgtaa

SEQ ID NO: 229441 - DNA, 25 bp, Artificial
  probe
  misc_feature (1)..(25): SEQ ID NO: 3801; WAN024G3D_at; Start 979; Stop 1003
tatgctgatggaaaatctgtagtct

SEQ ID NO: 229442 - DNA, 25 bp, Artificial
  probe
  misc_feature (1)..(25): SEQ ID NO: 3801; WAN024G3D_at; Start 1693; Stop 1717
ttagctgccggaataatgtttatag

SEQ ID NO: 229443 - DNA, 25 bp, Artificial
  probe
  misc_feature (1)..(25): SEQ ID NO: 3801; WAN024G3D_at; Start 229; Stop 253
gatatagcaaaaatacaaaaggcca

SEQ ID NO: 229444 - DNA, 25 bp, Artificial
  probe
  misc_feature (1)..(25): SEQ ID NO: 3801; WAN024G3D_at; Start 205; Stop 229
ggaaatggagtctatagcaaggaag

SEQ ID NO: 229445 - DNA, 25 bp, Artificial
  probe
  misc_feature (1)..(25): SEQ ID NO: 3801; WAN024G3D_at; Start 244; Stop 268
caaaaggccaatcctaatctaagag

SEQ ID NO: 229446 - DNA, 25 bp, Artificial
  probe
  misc_feature (1)..(25): SEQ ID NO: 3801; WAN024G3D_at; Start 1316; Stop 1340
tagaaaaaggataccaatttgatgg

SEQ ID NO: 229447 - DNA, 25 bp, Artificial
  probe
  misc_feature (1)..(25): SEQ ID NO: 3801; WAN024G3D_at; Start 407; Stop 431
gggaagctatcgataaagacggaaa

SEQ ID NO: 229448 - DNA, 25 bp, Artificial
  probe
  misc_feature (1)..(25): SEQ ID NO: 3801; WAN024G3D_at; Start 772; Stop 796
aaagacggtgacatcatggactggg

SEQ ID NO: 229449 - DNA, 25 bp, Artificial
  probe
  misc_feature (1)..(25): SEQ ID NO: 3801; WAN024G3D_at; Start 556; Stop 580
ccagtaaacctttcaatggataaga

SEQ ID NO: 229450 - DNA, 25 bp, Artificial
  probe
  misc_feature (1)..(25): SEQ ID NO: 3801; WAN024G3D_at; Start 1522; Stop 1546
gaaagtcacagaaaagaggatttac

SEQ ID NO: 229451 - DNA, 25 bp, Artificial
  probe
  misc_feature (1)..(25): SEQ ID NO: 3801; WAN024G3D_at; Start 137; Stop 161
tcattctaagaaaaggctatgcact

SEQ ID NO: 229452 - DNA, 25 bp, Artificial
  probe
  misc_feature (1)..(25): SEQ ID NO: 3801; WAN024G3D_at; Start 1458; Stop 1482
taaacctacttttgatgtatcgaaa

SEQ ID NO: 229453 - DNA, 25 bp, Artificial
  probe
  misc_feature (1)..(25): SEQ ID NO: 3801; WAN024G3D_at; Start 1678; Stop 1702
ggagcccagacactattagctgccg

SEQ ID NO: 229454 - DNA, 25 bp, Artificial
  probe
  misc_feature (1)..(25): SEQ ID NO: 3801; WAN024G3D_at; Start 1372; Stop 1396
gacgctggctatgttattaatctat

SEQ ID NO: 229455 - DNA, 25 bp, Artificial
  probe
  misc_feature (1)..(25): SEQ ID NO: 5470; WAN024G3E_at; Start 188; Stop 212
atctctgtacgcacgcgctccggat

SEQ ID NO: 229456 - DNA, 25 bp, Artificial
  probe
  misc_feature (1)..(25): SEQ ID NO: 5470; WAN024G3E_at; Start 29; Stop 53
taaacagagtcgaaaatcaaggcct

SEQ ID NO: 229457 - DNA, 25 bp, Artificial
  probe
  misc_feature (1)..(25): SEQ ID NO: 5470; WAN024G3E_at; Start 194; Stop 218
gtacgcacgcgctccggatctgcag

SEQ ID NO: 229458 - DNA, 25 bp, Artificial
  probe
  misc_feature (1)..(25): SEQ ID NO: 5470; WAN024G3E_at; Start 13; Stop 37
cccacggtaagcatcgtaaacagag

SEQ ID NO: 229459 - DNA, 25 bp, Artificial
  probe
  misc_feature (1)..(25): SEQ ID NO: 5470; WAN024G3E_at; Start 264; Stop 288
tatccaaagccagataaacgttggc

SEQ ID NO: 229460 - DNA, 25 bp, Artificial
  probe
  misc_feature (1)..(25): SEQ ID NO: 5470; WAN024G3E_at; Start 134; Stop 158
gccttggcagaagccaaaactgctt

SEQ ID NO: 229461 - DNA, 25 bp, Artificial
  probe
  misc_feature (1)..(25): SEQ ID NO: 5470; WAN024G3E_at; Start 310; Stop 334
ttgagccgcatcgaccaccaaaata

SEQ ID NO: 229462 - DNA, 25 bp, Artificial
  probe
  misc_feature (1)..(25): SEQ ID NO: 5470; WAN024G3E_at; Start 112; Stop 136
gatttcttcaatcccaataccagcc

SEQ ID NO: 229463 - DNA, 25 bp, Artificial
  probe
  misc_feature (1)..(25): SEQ ID NO: 5470; WAN024G3E_at; Start 18; Stop 42
ggtaagcatcgtaaacagagtcgaa

SEQ ID NO: 229464 - DNA, 25 bp, Artificial
  probe
  misc_feature (1)..(25): SEQ ID NO: 5470; WAN024G3E_at; Start 326; Stop 350
accaaaatagcaccctcacaggcag

SEQ ID NO: 229465 - DNA, 25 bp, Artificial
  probe
  misc_feature (1)..(25): SEQ ID NO: 5470; WAN024G3E_at; Start 206; Stop 230
tccggatctgcagccggcaggtcaa

SEQ ID NO: 229466 - DNA, 25 bp, Artificial
  probe
  misc_feature (1)..(25): SEQ ID NO: 5470; WAN024G3E_at; Start 330; Stop 354
aaatagcaccctcacaggcagctag

SEQ ID NO: 229467 - DNA, 25 bp, Artificial
  probe
  misc_feature (1)..(25): SEQ ID NO: 5470; WAN024G3E_at; Start 237; Stop 261
taatgataggcatgatttccaaatc

SEQ ID NO: 229468 - DNA, 25 bp, Artificial
  probe
  misc_feature (1)..(25): SEQ ID NO: 5470; WAN024G3E_at; Start 76; Stop 100
cgttggtgctggtactttttctaca

SEQ ID NO: 229469 - DNA, 25 bp, Artificial
  probe
  misc_feature (1)..(25): SEQ ID NO: 5470; WAN024G3E_at; Start 3; Stop 27
ggaggataaccccacggtaagcatc

SEQ ID NO: 229470 - DNA, 25 bp, Artificial
  probe
  misc_feature (1)..(25): SEQ ID NO: 5470; WAN024G3E_at; Start 7; Stop 31
gataaccccacggtaagcatcgtaa

SEQ ID NO: 229471 - DNA, 25 bp, Artificial
  probe
  misc_feature (1)..(25): SEQ ID NO: 5470; WAN024G3E_at; Start 59; Stop 83
ggcgccgtcacatcacccgttggtg

SEQ ID NO: 229472 - DNA, 25 bp, Artificial
  probe
  misc_feature (1)..(25): SEQ ID NO: 5470; WAN024G3E_at; Start 67; Stop 91
cacatcacccgttggtgctggtact

SEQ ID NO: 229473 - DNA, 25 bp, Artificial
  probe
  misc_feature (1)..(25): SEQ ID NO: 5470; WAN024G3E_at; Start 224; Stop 248
aggtcaattttattaatgataggca

SEQ ID NO: 229474 - DNA, 25 bp, Artificial
  probe
  misc_feature (1)..(25): SEQ ID NO: 5470; WAN024G3E_at; Start 47; Stop 71
aaggccttaagtggcgccgtcacat

SEQ ID NO: 229475 - DNA, 25 bp, Artificial
  probe
  misc_feature (1)..(25): SEQ ID NO: 5470; WAN024G3E_at; Start 148; Stop 172
caaaactgcttcactggcatccaaa

SEQ ID NO: 229476 - DNA, 25 bp, Artificial
  probe
  misc_feature (1)..(25): SEQ ID NO: 5470; WAN024G3E_at; Start 215; Stop 239
gcagccggcaggtcaattttattaa

SEQ ID NO: 229477 - DNA, 25 bp, Artificial
  probe
  misc_feature (1)..(25): SEQ ID NO: 5470; WAN024G3E_at; Start 155; Stop 179
gcttcactggcatccaaaccaatca

SEQ ID NO: 229478 - DNA, 25 bp, Artificial
  probe
  misc_feature (1)..(25): SEQ ID NO: 5470; WAN024G3E_at; Start 163; Stop 187
ggcatccaaaccaatcacatcttca

SEQ ID NO: 229479 - DNA, 25 bp, Artificial
  probe
  misc_feature (1)..(25): SEQ ID NO: 5470; WAN024G3E_at; Start 293; Stop 317
gtttgagcctcaattccttgagccg

SEQ ID NO: 229480 - DNA, 25 bp, Artificial
  probe
  misc_feature (1)..(25): SEQ ID NO: 5470; WAN024G3E_at; Start 97; Stop 121
tacaatttgctcgaggatttcttca

SEQ ID NO: 229481 - DNA, 25 bp, Artificial
  probe
  misc_feature (1)..(25): SEQ ID NO: 5470; WAN024G3E_at; Start 252; Stop 276
tttccaaatcattatccaaagccag

SEQ ID NO: 229482 - DNA, 25 bp, Artificial
  probe
  misc_feature (1)..(25): SEQ ID NO: 5470; WAN024G3E_at; Start 33; Stop 57
cagagtcgaaaatcaaggccttaag

SEQ ID NO: 229483 - DNA, 25 bp, Artificial
  probe
  misc_feature (1)..(25): SEQ ID NO: 5470; WAN024G3E_at; Start 40; Stop 64
gaaaatcaaggccttaagtggcgcc

SEQ ID NO: 229484 - DNA, 25 bp, Artificial
  probe
  misc_feature (1)..(25): SEQ ID NO: 5470; WAN024G3E_at; Start 88; Stop 112
tactttttctacaatttgctcgagg

SEQ ID NO: 229485 - DNA, 25 bp, Artificial
  probe
  misc_feature (1)..(25): SEQ ID NO: 5470; WAN024G3E_at; Start 299; Stop 323
gcctcaattccttgagccgcatcga

SEQ ID NO: 229486 - DNA, 25 bp, Artificial
  probe
  misc_feature (1)..(25): SEQ ID NO: 5470; WAN024G3E_at; Start 279; Stop 303
aaacgttggcaagagtttgagcctc

SEQ ID NO: 229487 - DNA, 25 bp, Artificial
  probe
  misc_feature (1)..(25): SEQ ID NO: 5470; WAN024G3E_at; Start 126; Stop 150
caataccagccttggcagaagccaa

SEQ ID NO: 229488 - DNA, 25 bp, Artificial
  probe
  misc_feature (1)..(25): SEQ ID NO: 5470; WAN024G3E_at; Start 180; Stop 204
catcttcaatctctgtacgcacgcg

SEQ ID NO: 229489 - DNA, 25 bp, Artificial
  probe
  misc_feature (1)..(25): SEQ ID NO: 2445; WAN024G3F_at; Start 130; Stop 154
ccgtggtcaatatgggcgataatag

SEQ ID NO: 229490 - DNA, 25 bp, Artificial
  probe
  misc_feature (1)..(25): SEQ ID NO: 2445; WAN024G3F_at; Start 47; Stop 71
tgctatccaaaagctgggcctgcat

SEQ ID NO: 229491 - DNA, 25 bp, Artificial
  probe
  misc_feature (1)..(25): SEQ ID NO: 2445; WAN024G3F_at; Start 43; Stop 67
tccatgctatccaaaagctgggcct

SEQ ID NO: 229492 - DNA, 25 bp, Artificial
  probe
  misc_feature (1)..(25): SEQ ID NO: 2445; WAN024G3F_at; Start 50; Stop 74
tatccaaaagctgggcctgcatttc

SEQ ID NO: 229493 - DNA, 25 bp, Artificial
  probe
  misc_feature (1)..(25): SEQ ID NO: 2445; WAN024G3F_at; Start 104; Stop 128
aaatgcggtctgctagagttgattt

SEQ ID NO: 229494 - DNA, 25 bp, Artificial
  probe
  misc_feature (1)..(25): SEQ ID NO: 2445; WAN024G3F_at; Start 136; Stop 160
tcaatatgggcgataatagagaagt

SEQ ID NO: 229495 - DNA, 25 bp, Artificial
  probe
  misc_feature (1)..(25): SEQ ID NO: 2445; WAN024G3F_at; Start 200; Stop 224
tcatgattctcttcctttcagggta

SEQ ID NO: 229496 - DNA, 25 bp, Artificial
  probe
  misc_feature (1)..(25): SEQ ID NO: 2445; WAN024G3F_at; Start 48; Stop 72
gctatccaaaagctgggcctgcatt

SEQ ID NO: 229497 - DNA, 25 bp, Artificial
  probe
  misc_feature (1)..(25): SEQ ID NO: 2445; WAN024G3F_at; Start 54; Stop 78
caaaagctgggcctgcatttcacga

SEQ ID NO: 229498 - DNA, 25 bp, Artificial
  probe
  misc_feature (1)..(25): SEQ ID NO: 2445; WAN024G3F_at; Start 91; Stop 115
tctgttttttccaaaatgcggtctg

SEQ ID NO: 229499 - DNA, 25 bp, Artificial
  probe
  misc_feature (1)..(25): SEQ ID NO: 2445; WAN024G3F_at; Start 140; Stop 164
tatgggcgataatagagaagttacg

SEQ ID NO: 229500 - DNA, 25 bp, Artificial
  probe
  misc_feature (1)..(25): SEQ ID NO: 2445; WAN024G3F_at; Start 45; Stop 69
catgctatccaaaagctgggcctgc

SEQ ID NO: 229501 - DNA, 25 bp, Artificial
  probe
  misc_feature (1)..(25): SEQ ID NO: 2445; WAN024G3F_at; Start 74; Stop 98
cacgacttgaaaccgtctctgtttt

SEQ ID NO: 229502 - DNA, 25 bp, Artificial
  probe
  misc_feature (1)..(25): SEQ ID NO: 2445; WAN024G3F_at; Start 14; Stop 38
taatagtaattccacgttcccgctc

SEQ ID NO: 229503 - DNA, 25 bp, Artificial
  probe
  misc_feature (1)..(25): SEQ ID NO: 2445; WAN024G3F_at; Start 100; Stop 124
tccaaaatgcggtctgctagagttg

SEQ ID NO: 229504 - DNA, 25 bp, Artificial
  probe
  misc_feature (1)..(25): SEQ ID NO: 2445; WAN024G3F_at; Start 2; Stop 26
tggcattcaacttaatagtaattcc

SEQ ID NO: 229505 - DNA, 25 bp, Artificial
  probe
  misc_feature (1)..(25): SEQ ID NO: 2445; WAN024G3F_at; Start 68; Stop 92
gcatttcacgacttgaaaccgtctc

SEQ ID NO: 229506 - DNA, 25 bp, Artificial
  probe
  misc_feature (1)..(25): SEQ ID NO: 2445; WAN024G3F_at; Start 144; Stop 168
ggcgataatagagaagttacggatc

SEQ ID NO: 229507 - DNA, 25 bp, Artificial
  probe
  misc_feature (1)..(25): SEQ ID NO: 2445; WAN024G3F_at; Start 147; Stop 171
gataatagagaagttacggatcttc

SEQ ID NO: 229508 - DNA, 25 bp, Artificial
  probe
  misc_feature (1)..(25): SEQ ID NO: 2445; WAN024G3F_at; Start 198; Stop 222
gttcatgattctcttcctttcaggg

SEQ ID NO: 229509 - DNA, 25 bp, Artificial
  probe
  misc_feature (1)..(25): SEQ ID NO: 2445; WAN024G3F_at; Start 186; Stop 210
caattcttctaagttcatgattctc

SEQ ID NO: 229510 - DNA, 25 bp, Artificial
  probe
  misc_feature (1)..(25): SEQ ID NO: 2445; WAN024G3F_at; Start 102; Stop 126
caaaatgcggtctgctagagttgat

SEQ ID NO: 229511 - DNA, 25 bp, Artificial
  probe
  misc_feature (1)..(25): SEQ ID NO: 2445; WAN024G3F_at; Start 72; Stop 96
ttcacgacttgaaaccgtctctgtt

SEQ ID NO: 229512 - DNA, 25 bp, Artificial
  probe
  misc_feature (1)..(25): SEQ ID NO: 2445; WAN024G3F_at; Start 96; Stop 120
tttttccaaaatgcggtctgctaga

SEQ ID NO: 229513 - DNA, 25 bp, Artificial
  probe
  misc_feature (1)..(25): SEQ ID NO: 2445; WAN024G3F_at; Start 61; Stop 85
tgggcctgcatttcacgacttgaaa

SEQ ID NO: 229514 - DNA, 25 bp, Artificial
  probe
  misc_feature (1)..(25): SEQ ID NO: 2445; WAN024G3F_at; Start 56; Stop 80
aaagctgggcctgcatttcacgact

SEQ ID NO: 229515 - DNA, 25 bp, Artificial
  probe
  misc_feature (1)..(25): SEQ ID NO: 2445; WAN024G3F_at; Start 59; Stop 83
gctgggcctgcatttcacgacttga

SEQ ID NO: 229516 - DNA, 25 bp, Artificial
  probe
  misc_feature (1)..(25): SEQ ID NO: 2445; WAN024G3F_at; Start 64; Stop 88
gcctgcatttcacgacttgaaaccg

SEQ ID NO: 229517 - DNA, 25 bp, Artificial
  probe
  misc_feature (1)..(25): SEQ ID NO: 2445; WAN024G3F_at; Start 174; Stop 198
ctgtcgttttttcaattcttctaag

SEQ ID NO: 229518 - DNA, 25 bp, Artificial
  probe
  misc_feature (1)..(25): SEQ ID NO: 2445; WAN024G3F_at; Start 17; Stop 41
tagtaattccacgttcccgctctag

SEQ ID NO: 229519 - DNA, 25 bp, Artificial
  probe
  misc_feature (1)..(25): SEQ ID NO: 2445; WAN024G3F_at; Start 213; Stop 237
cctttcagggtatctatttattata

SEQ ID NO: 229520 - DNA, 25 bp, Artificial
  probe
  misc_feature (1)..(25): SEQ ID NO: 2445; WAN024G3F_at; Start 87; Stop 111
cgtctctgttttttccaaaatgcgg

SEQ ID NO: 229521 - DNA, 25 bp, Artificial
  probe
  misc_feature (1)..(25): SEQ ID NO: 2445; WAN024G3F_at; Start 204; Stop 228
gattctcttcctttcagggtatcta

SEQ ID NO: 229522 - DNA, 25 bp, Artificial
  probe
  misc_feature (1)..(25): SEQ ID NO: 2445; WAN024G3F_at; Start 94; Stop 118
gttttttccaaaatgcggtctgcta

SEQ ID NO: 229523 - DNA, 25 bp, Artificial
  probe
  misc_feature (1)..(25): SEQ ID NO: 5878; WAN024G3G_at; Start 121; Stop 145
gattggaacttcaaattgttggcga

SEQ ID NO: 229524 - DNA, 25 bp, Artificial
  probe
  misc_feature (1)..(25): SEQ ID NO: 5878; WAN024G3G_at; Start 6; Stop 30
tttcaaggagtttacgcttacgaga

SEQ ID NO: 229525 - DNA, 25 bp, Artificial
  probe
  misc_feature (1)..(25): SEQ ID NO: 5878; WAN024G3G_at; Start 94; Stop 118
gacaatcttgtgtccaatagccgct

SEQ ID NO: 229526 - DNA, 25 bp, Artificial
  probe
  misc_feature (1)..(25): SEQ ID NO: 5878; WAN024G3G_at; Start 181; Stop 205
cccacgttcgtaggcaaagtccttg

SEQ ID NO: 229527 - DNA, 25 bp, Artificial
  probe
  misc_feature (1)..(25): SEQ ID NO: 5878; WAN024G3G_at; Start 113; Stop 137
gccgcttggattggaacttcaaatt

SEQ ID NO: 229528 - DNA, 25 bp, Artificial
  probe
  misc_feature (1)..(25): SEQ ID NO: 5878; WAN024G3G_at; Start 256; Stop 280
cattttcaccagcttagatgggcga

SEQ ID NO: 229529 - DNA, 25 bp, Artificial
  probe
  misc_feature (1)..(25): SEQ ID NO: 5878; WAN024G3G_at; Start 162; Stop 186
gtttatcaacgatgagtttcccacg

SEQ ID NO: 229530 - DNA, 25 bp, Artificial
  probe
  misc_feature (1)..(25): SEQ ID NO: 5878; WAN024G3G_at; Start 134; Stop 158
aattgttggcgagggatgattttct

SEQ ID NO: 229531 - DNA, 25 bp, Artificial
  probe
  misc_feature (1)..(25): SEQ ID NO: 5878; WAN024G3G_at; Start 73; Stop 97
ggccttgatatcagtacgagcgaca

SEQ ID NO: 229532 - DNA, 25 bp, Artificial
  probe
  misc_feature (1)..(25): SEQ ID NO: 5878; WAN024G3G_at; Start 159; Stop 183
tgagtttatcaacgatgagtttccc

SEQ ID NO: 229533 - DNA, 25 bp, Artificial
  probe
  misc_feature (1)..(25): SEQ ID NO: 5878; WAN024G3G_at; Start 79; Stop 103
gatatcagtacgagcgacaatcttg

SEQ ID NO: 229534 - DNA, 25 bp, Artificial
  probe
  misc_feature (1)..(25): SEQ ID NO: 5878; WAN024G3G_at; Start 201; Stop 225
ccttgtgaacgataaagctgagggc

SEQ ID NO: 229535 - DNA, 25 bp, Artificial
  probe
  misc_feature (1)..(25): SEQ ID NO: 5878; WAN024G3G_at; Start 217; Stop 241
gctgagggcatccaccttatctcca

SEQ ID NO: 229536 - DNA, 25 bp, Artificial
  probe
  misc_feature (1)..(25): SEQ ID NO: 5878; WAN024G3G_at; Start 58; Stop 82
tacgttcttacgaagggccttgata

SEQ ID NO: 229537 - DNA, 25 bp, Artificial
  probe
  misc_feature (1)..(25): SEQ ID NO: 5878; WAN024G3G_at; Start 13; Stop 37
gagtttacgcttacgagaaacgtca

SEQ ID NO: 229538 - DNA, 25 bp, Artificial
  probe
  misc_feature (1)..(25): SEQ ID NO: 5878; WAN024G3G_at; Start 38; Stop 62
ccaccataacatttagcaagtacgt

SEQ ID NO: 229539 - DNA, 25 bp, Artificial
  probe
  misc_feature (1)..(25): SEQ ID NO: 5878; WAN024G3G_at; Start 29; Stop 53
gaaacgtcaccaccataacatttag

SEQ ID NO: 229540 - DNA, 25 bp, Artificial
  probe
  misc_feature (1)..(25): SEQ ID NO: 5878; WAN024G3G_at; Start 109; Stop 133
aatagccgcttggattggaacttca

SEQ ID NO: 229541 - DNA, 25 bp, Artificial
  probe
  misc_feature (1)..(25): SEQ ID NO: 5878; WAN024G3G_at; Start 83; Stop 107
tcagtacgagcgacaatcttgtgtc

SEQ ID NO: 229542 - DNA, 25 bp, Artificial
  probe
  misc_feature (1)..(25): SEQ ID NO: 5878; WAN024G3G_at; Start 194; Stop 218
gcaaagtccttgtgaacgataaagc

SEQ ID NO: 229543 - DNA, 25 bp, Artificial
  probe
  misc_feature (1)..(25): SEQ ID NO: 5878; WAN024G3G_at; Start 51; Stop 75
tagcaagtacgttcttacgaagggc

SEQ ID NO: 229544 - DNA, 25 bp, Artificial
  probe
  misc_feature (1)..(25): SEQ ID NO: 5878; WAN024G3G_at; Start 69; Stop 93
gaagggccttgatatcagtacgagc

SEQ ID NO: 229545 - DNA, 25 bp, Artificial
  probe
  misc_feature (1)..(25): SEQ ID NO: 5878; WAN024G3G_at; Start 262; Stop 286
caccagcttagatgggcgatattct

SEQ ID NO: 229546 - DNA, 25 bp, Artificial
  probe
  misc_feature (1)..(25): SEQ ID NO: 5878; WAN024G3G_at; Start 21; Stop 45
gcttacgagaaacgtcaccaccata

SEQ ID NO: 229547 - DNA, 25 bp, Artificial
  probe
  misc_feature (1)..(25): SEQ ID NO: 5878; WAN024G3G_at; Start 207; Stop 231
gaacgataaagctgagggcatccac

SEQ ID NO: 229548 - DNA, 25 bp, Artificial
  probe
  misc_feature (1)..(25): SEQ ID NO: 5878; WAN024G3G_at; Start 223; Stop 247
ggcatccaccttatctccattgaga

SEQ ID NO: 229549 - DNA, 25 bp, Artificial
  probe
  misc_feature (1)..(25): SEQ ID NO: 5878; WAN024G3G_at; Start 187; Stop 211
ttcgtaggcaaagtccttgtgaacg

SEQ ID NO: 229550 - DNA, 25 bp, Artificial
  probe
  misc_feature (1)..(25): SEQ ID NO: 5878; WAN024G3G_at; Start 210; Stop 234
cgataaagctgagggcatccacctt

SEQ ID NO: 229551 - DNA, 25 bp, Artificial
  probe
  misc_feature (1)..(25): SEQ ID NO: 5878; WAN024G3G_at; Start 99; Stop 123
tcttgtgtccaatagccgcttggat

SEQ ID NO: 229552 - DNA, 25 bp, Artificial
  probe
  misc_feature (1)..(25): SEQ ID NO: 5878; WAN024G3G_at; Start 252; Stop 276
tatccattttcaccagcttagatgg

SEQ ID NO: 229553 - DNA, 25 bp, Artificial
  probe
  misc_feature (1)..(25): SEQ ID NO: 5878; WAN024G3G_at; Start 142; Stop 166
gcgagggatgattttcttgagttta

SEQ ID NO: 229554 - DNA, 25 bp, Artificial
  probe
  misc_feature (1)..(25): SEQ ID NO: 5878; WAN024G3G_at; Start 172; Stop 196
gatgagtttcccacgttcgtaggca

SEQ ID NO: 229555 - DNA, 25 bp, Artificial
  probe
  misc_feature (1)..(25): SEQ ID NO: 5878; WAN024G3G_at; Start 66; Stop 90
tacgaagggccttgatatcagtacg

SEQ ID NO: 229556 - DNA, 25 bp, Artificial
  probe
  misc_feature (1)..(25): SEQ ID NO: 5878; WAN024G3G_at; Start 128; Stop 152
acttcaaattgttggcgagggatga

SEQ ID NO: 229557 - DNA, 25 bp, Artificial
  probe
  misc_feature (1)..(25): SEQ ID NO: 2668; WAN024G3H_at; Start 144; Stop 168
aactctagcagaccgcattttggaa

SEQ ID NO: 229558 - DNA, 25 bp, Artificial
  probe
  misc_feature (1)..(25): SEQ ID NO: 2668; WAN024G3H_at; Start 1849; Stop 1873
gaagccttcctcagcgtcttgagta

SEQ ID NO: 229559 - DNA, 25 bp, Artificial
  probe
  misc_feature (1)..(25): SEQ ID NO: 2668; WAN024G3H_at; Start 1831; Stop 1855
tcagttgaagttccgcaagaagcct

SEQ ID NO: 229560 - DNA, 25 bp, Artificial
  probe
  misc_feature (1)..(25): SEQ ID NO: 2668; WAN024G3H_at; Start 1665; Stop 1689
tgaagttccaatccaagcggctatt

SEQ ID NO: 229561 - DNA, 25 bp, Artificial
  probe
  misc_feature (1)..(25): SEQ ID NO: 2668; WAN024G3H_at; Start 618; Stop 642
tgtagaaaaagtaccagcaccaacg

SEQ ID NO: 229562 - DNA, 25 bp, Artificial
  probe
  misc_feature (1)..(25): SEQ ID NO: 2668; WAN024G3H_at; Start 480; Stop 504
taataaaattgacctgccggctgca

SEQ ID NO: 229563 - DNA, 25 bp, Artificial
  probe
  misc_feature (1)..(25): SEQ ID NO: 2668; WAN024G3H_at; Start 859; Stop 883
tacattgcggcgtctatcaagacgg

SEQ ID NO: 229564 - DNA, 25 bp, Artificial
  probe
  misc_feature (1)..(25): SEQ ID NO: 2668; WAN024G3H_at; Start 349; Stop 373
gaagtttcacgttcgctagctgcct

SEQ ID NO: 229565 - DNA, 25 bp, Artificial
  probe
  misc_feature (1)..(25): SEQ ID NO: 2668; WAN024G3H_at; Start 1343; Stop 1367
taatggagctagctcagcgtaagcg

SEQ ID NO: 229566 - DNA, 25 bp, Artificial
  probe
  misc_feature (1)..(25): SEQ ID NO: 2668; WAN024G3H_at; Start 199; Stop 223
caggcccagcttttggatagcatgg

SEQ ID NO: 229567 - DNA, 25 bp, Artificial
  probe
  misc_feature (1)..(25): SEQ ID NO: 2668; WAN024G3H_at; Start 1069; Stop 1093
gaaccagaaacatctcaggcacttg

SEQ ID NO: 229568 - DNA, 25 bp, Artificial
  probe
  misc_feature (1)..(25): SEQ ID NO: 2668; WAN024G3H_at; Start 774; Stop 798
tagtaagacctttgatgtggccgaa

SEQ ID NO: 229569 - DNA, 25 bp, Artificial
  probe
  misc_feature (1)..(25): SEQ ID NO: 2668; WAN024G3H_at; Start 1257; Stop 1281
gtttccagacccaactaagattgcg

SEQ ID NO: 229570 - DNA, 25 bp, Artificial
  probe
  misc_feature (1)..(25): SEQ ID NO: 2668; WAN024G3H_at; Start 1513; Stop 1537
gaatatcgcccatctaagctggtga

SEQ ID NO: 229571 - DNA, 25 bp, Artificial
  probe
  misc_feature (1)..(25): SEQ ID NO: 2668; WAN024G3H_at; Start 1011; Stop 1035
caatgacctgcgtgaagcgcttgaa

SEQ ID NO: 229572 - DNA, 25 bp, Artificial
  probe
  misc_feature (1)..(25): SEQ ID NO: 2668; WAN024G3H_at; Start 927; Stop 951
tcctgcggcagaaccattacatggt

SEQ ID NO: 229573 - DNA, 25 bp, Artificial
  probe
  misc_feature (1)..(25): SEQ ID NO: 2668; WAN024G3H_at; Start 963; Stop 987
gaatcctatggtctttgcgggtctc

SEQ ID NO: 229574 - DNA, 25 bp, Artificial
  probe
  misc_feature (1)..(25): SEQ ID NO: 2668; WAN024G3H_at; Start 1272; Stop 1296
taagattgcgaccattgaagagcct

SEQ ID NO: 229575 - DNA, 25 bp, Artificial
  probe
  misc_feature (1)..(25): SEQ ID NO: 2668; WAN024G3H_at; Start 1716; Stop 1740
tatcaaggcccttcgtaagaacgta

SEQ ID NO: 229576 - DNA, 25 bp, Artificial
  probe
  misc_feature (1)..(25): SEQ ID NO: 2668; WAN024G3H_at; Start 183; Stop 207
ttcaagtcgtgaaatgcaggcccag

SEQ ID NO: 229577 - DNA, 25 bp, Artificial
  probe
  misc_feature (1)..(25): SEQ ID NO: 2668; WAN024G3H_at; Start 45; Stop 69
ccctgaaaggaagagaatcatgaac

SEQ ID NO: 229578 - DNA, 25 bp, Artificial
  probe
  misc_feature (1)..(25): SEQ ID NO: 2668; WAN024G3H_at; Start 1701; Stop 1725
tgtcgctcgtactgatatcaaggcc

SEQ ID NO: 229579 - DNA, 25 bp, Artificial
  probe
  misc_feature (1)..(25): SEQ ID NO: 2668; WAN024G3H_at; Start 640; Stop 664
acgggtgatgtgacggcgccactta

SEQ ID NO: 229580 - DNA, 25 bp, Artificial
  probe
  misc_feature (1)..(25): SEQ ID NO: 2668; WAN024G3H_at; Start 1297; Stop 1321
tatgtcaaggcgcaaatcatggtac

SEQ ID NO: 229581 - DNA, 25 bp, Artificial
  probe
  misc_feature (1)..(25): SEQ ID NO: 2668; WAN024G3H_at; Start 314; Stop 338
tgattgacacaccagggcacgttga

SEQ ID NO: 229582 - DNA, 25 bp, Artificial
  probe
  misc_feature (1)..(25): SEQ ID NO: 2668; WAN024G3H_at; Start 384; Stop 408
tattttggtggtcgatgcggctcaa

SEQ ID NO: 229583 - DNA, 25 bp, Artificial
  probe
  misc_feature (1)..(25): SEQ ID NO: 2668; WAN024G3H_at; Start 741; Stop 765
caaacctggtgataagattcagctc

SEQ ID NO: 229584 - DNA, 25 bp, Artificial
  probe
  misc_feature (1)..(25): SEQ ID NO: 2668; WAN024G3H_at; Start 598; Stop 622
gaagaaatcctcgagcaaattgtag

SEQ ID NO: 229585 - DNA, 25 bp, Artificial
  probe
  misc_feature (1)..(25): SEQ ID NO: 2668; WAN024G3H_at; Start 1140; Stop 1164
tatccaggaacgtttagagcgtgag

SEQ ID NO: 229586 - DNA, 25 bp, Artificial
  probe
  misc_feature (1)..(25): SEQ ID NO: 2668; WAN024G3H_at; Start 1593; Stop 1617
caaggactttgcctacgaacgtggg

SEQ ID NO: 229587 - DNA, 25 bp, Artificial
  probe
  misc_feature (1)..(25): SEQ ID NO: 2668; WAN024G3H_at; Start 1314; Stop 1338
catggtaccacaggagttcgtcgga

SEQ ID NO: 229588 - DNA, 25 bp, Artificial
  probe
  misc_feature (1)..(25): SEQ ID NO: 2668; WAN024G3H_at; Start 910; Stop 934
gttaccttggcaaccaatcctgcgg

SEQ ID NO: 229589 - DNA, 25 bp, Artificial
  probe
  misc_feature (1)..(25): SEQ ID NO: 2668; WAN024G3H_at; Start 1206; Stop 1230
caaagttaatttgaccgacggtgag

SEQ ID NO: 229590 - DNA, 25 bp, Artificial
  probe
  misc_feature (1)..(25): SEQ ID NO: 2668; WAN024G3H_at; Start 891; Stop 915
tactcgtgtgggtgataccgttacc

SEQ ID NO: 229591 - DNA, 25 bp, Artificial
  probe
  misc_feature (1)..(25): SEQ ID NO: 2096; WAN024G3I_at; Start 37; Stop 61
aaacagtcaattagtcctcacaaac

SEQ ID NO: 229592 - DNA, 25 bp, Artificial
  probe
  misc_feature (1)..(25): SEQ ID NO: 2096; WAN024G3I_at; Start 194; Stop 218
tcttcttatcttctaaatgatctcc

SEQ ID NO: 229593 - DNA, 25 bp, Artificial
  probe
  misc_feature (1)..(25): SEQ ID NO: 2096; WAN024G3I_at; Start 234; Stop 258
tgacaagccagaccatggttcaaag

SEQ ID NO: 229594 - DNA, 25 bp, Artificial
  probe
  misc_feature (1)..(25): SEQ ID NO: 2096; WAN024G3I_at; Start 35; Stop 59
aaaaacagtcaattagtcctcacaa

SEQ ID NO: 229595 - DNA, 25 bp, Artificial
  probe
  misc_feature (1)..(25): SEQ ID NO: 2096; WAN024G3I_at; Start 156; Stop 180
taattcttcaacctgattggcttct

SEQ ID NO: 229596 - DNA, 25 bp, Artificial
  probe
  misc_feature (1)..(25): SEQ ID NO: 2096; WAN024G3I_at; Start 162; Stop 186
ttcaacctgattggcttctaagaga

SEQ ID NO: 229597 - DNA, 25 bp, Artificial
  probe
  misc_feature (1)..(25): SEQ ID NO: 2096; WAN024G3I_at; Start 170; Stop 194
gattggcttctaagagacaaacatt

SEQ ID NO: 229598 - DNA, 25 bp, Artificial
  probe
  misc_feature (1)..(25): SEQ ID NO: 2096; WAN024G3I_at; Start 231; Stop 255
tgttgacaagccagaccatggttca

SEQ ID NO: 229599 - DNA, 25 bp, Artificial
  probe
  misc_feature (1)..(25): SEQ ID NO: 2096; WAN024G3I_at; Start 185; Stop 209
gacaaacattcttcttatcttctaa

SEQ ID NO: 229600 - DNA, 25 bp, Artificial
  probe
  misc_feature (1)..(25): SEQ ID NO: 2096; WAN024G3I_at; Start 172; Stop 196
ttggcttctaagagacaaacattct

SEQ ID NO: 229601 - DNA, 25 bp, Artificial
  probe
  misc_feature (1)..(25): SEQ ID NO: 2096; WAN024G3I_at; Start 230; Stop 254
atgttgacaagccagaccatggttc

SEQ ID NO: 229602 - DNA, 25 bp, Artificial
  probe
  misc_feature (1)..(25): SEQ ID NO: 2096; WAN024G3I_at; Start 165; Stop 189
aacctgattggcttctaagagacaa

SEQ ID NO: 229603 - DNA, 25 bp, Artificial
  probe
  misc_feature (1)..(25): SEQ ID NO: 2096; WAN024G3I_at; Start 26; Stop 50
ctgtctttaaaaaacagtcaattag

SEQ ID NO: 229604 - DNA, 25 bp, Artificial
  probe
  misc_feature (1)..(25): SEQ ID NO: 2096; WAN024G3I_at; Start 167; Stop 191
cctgattggcttctaagagacaaac

SEQ ID NO: 229605 - DNA, 25 bp, Artificial
  probe
  misc_feature (1)..(25): SEQ ID NO: 2096; WAN024G3I_at; Start 151; Stop 175
aaccctaattcttcaacctgattgg

SEQ ID NO: 229606 - DNA, 25 bp, Artificial
  probe
  misc_feature (1)..(25): SEQ ID NO: 2096; WAN024G3I_at; Start 148; Stop 172
tcaaaccctaattcttcaacctgat

SEQ ID NO: 229607 - DNA, 25 bp, Artificial
  probe
  misc_feature (1)..(25): SEQ ID NO: 2096; WAN024G3I_at; Start 164; Stop 188
caacctgattggcttctaagagaca

SEQ ID NO: 229608 - DNA, 25 bp, Artificial
  probe
  misc_feature (1)..(25): SEQ ID NO: 2096; WAN024G3I_at; Start 175; Stop 199
gcttctaagagacaaacattcttct

SEQ ID NO: 229609 - DNA, 25 bp, Artificial
  probe
  misc_feature (1)..(25): SEQ ID NO: 2096; WAN024G3I_at; Start 153; Stop 177
ccctaattcttcaacctgattggct

SEQ ID NO: 229610 - DNA, 25 bp, Artificial
  probe
  misc_feature (1)..(25): SEQ ID NO: 2096; WAN024G3I_at; Start 161; Stop 185
cttcaacctgattggcttctaagag

SEQ ID NO: 229611 - DNA, 25 bp, Artificial
  probe
  misc_feature (1)..(25): SEQ ID NO: 2096; WAN024G3I_at; Start 235; Stop 259
gacaagccagaccatggttcaaagg

SEQ ID NO: 229612 - DNA, 25 bp, Artificial
  probe
  misc_feature (1)..(25): SEQ ID NO: 2096; WAN024G3I_at; Start 238; Stop 262
aagccagaccatggttcaaaggtaa

SEQ ID NO: 229613 - DNA, 25 bp, Artificial
  probe
  misc_feature (1)..(25): SEQ ID NO: 2096; WAN024G3I_at; Start 168; Stop 192
ctgattggcttctaagagacaaaca

SEQ ID NO: 229614 - DNA, 25 bp, Artificial
  probe
  misc_feature (1)..(25): SEQ ID NO: 2096; WAN024G3I_at; Start 146; Stop 170
tctcaaaccctaattcttcaacctg

SEQ ID NO: 229615 - DNA, 25 bp, Artificial
  probe
  misc_feature (1)..(25): SEQ ID NO: 2096; WAN024G3I_at; Start 159; Stop 183
ttcttcaacctgattggcttctaag

SEQ ID NO: 229616 - DNA, 25 bp, Artificial
  probe
  misc_feature (1)..(25): SEQ ID NO: 2096; WAN024G3I_at; Start 33; Stop 57
taaaaaacagtcaattagtcctcac

SEQ ID NO: 229617 - DNA, 25 bp, Artificial
  probe
  misc_feature (1)..(25): SEQ ID NO: 2096; WAN024G3I_at; Start 174; Stop 198
ggcttctaagagacaaacattcttc

SEQ ID NO: 229618 - DNA, 25 bp, Artificial
  probe
  misc_feature (1)..(25): SEQ ID NO: 2096; WAN024G3I_at; Start 204; Stop 228
ttctaaatgatctccttcttcaagg

SEQ ID NO: 229619 - DNA, 25 bp, Artificial
  probe
  misc_feature (1)..(25): SEQ ID NO: 2096; WAN024G3I_at; Start 71; Stop 95
tactattgtttgaagaagtcaacag

SEQ ID NO: 229620 - DNA, 25 bp, Artificial
  probe
  misc_feature (1)..(25): SEQ ID NO: 2096; WAN024G3I_at; Start 133; Stop 157
tataaaacttctatctcaaacccta

SEQ ID NO: 229621 - DNA, 25 bp, Artificial
  probe
  misc_feature (1)..(25): SEQ ID NO: 2096; WAN024G3I_at; Start 237; Stop 261
caagccagaccatggttcaaaggta

SEQ ID NO: 229622 - DNA, 25 bp, Artificial
  probe
  misc_feature (1)..(25): SEQ ID NO: 2096; WAN024G3I_at; Start 69; Stop 93
actactattgtttgaagaagtcaac

SEQ ID NO: 229623 - DNA, 25 bp, Artificial
  probe
  misc_feature (1)..(25): SEQ ID NO: 2096; WAN024G3I_at; Start 232; Stop 256
gttgacaagccagaccatggttcaa

SEQ ID NO: 229624 - DNA, 25 bp, Artificial
  probe
  misc_feature (1)..(25): SEQ ID NO: 2096; WAN024G3I_at; Start 66; Stop 90
tatactactattgtttgaagaagtc

SEQ ID NO: 229625 - DNA, 25 bp, Artificial
  probe
  misc_feature (1)..(25): SEQ ID NO: 3063; WAN024G3J_at; Start 307; Stop 331
caggttgaagaattagggtttgaga

SEQ ID NO: 229626 - DNA, 25 bp, Artificial
  probe
  misc_feature (1)..(25): SEQ ID NO: 3063; WAN024G3J_at; Start 144; Stop 168
gggattgaaagtgcattttgcagaa

SEQ ID NO: 229627 - DNA, 25 bp, Artificial
  probe
  misc_feature (1)..(25): SEQ ID NO: 3063; WAN024G3J_at; Start 190; Stop 214
tcaactttgaacaagggacctttca

SEQ ID NO: 229628 - DNA, 25 bp, Artificial
  probe
  misc_feature (1)..(25): SEQ ID NO: 3063; WAN024G3J_at; Start 206; Stop 230
gacctttcattacctttgaaccatg

SEQ ID NO: 229629 - DNA, 25 bp, Artificial
  probe
  misc_feature (1)..(25): SEQ ID NO: 3063; WAN024G3J_at; Start 118; Stop 142
gcccttcgttctcttaaacatgata

SEQ ID NO: 229630 - DNA, 25 bp, Artificial
  probe
  misc_feature (1)..(25): SEQ ID NO: 3063; WAN024G3J_at; Start 320; Stop 344
tagggtttgagatagaagttttata

SEQ ID NO: 229631 - DNA, 25 bp, Artificial
  probe
  misc_feature (1)..(25): SEQ ID NO: 3063; WAN024G3J_at; Start 16; Stop 40
gatagaagtccatggctagagggac

SEQ ID NO: 229632 - DNA, 25 bp, Artificial
  probe
  misc_feature (1)..(25): SEQ ID NO: 3063; WAN024G3J_at; Start 182; Stop 206
tcatctggtcaactttgaacaaggg

SEQ ID NO: 229633 - DNA, 25 bp, Artificial
  probe
  misc_feature (1)..(25): SEQ ID NO: 3063; WAN024G3J_at; Start 289; Stop 313
tgtctcttagaagccaatcaggttg

SEQ ID NO: 229634 - DNA, 25 bp, Artificial
  probe
  misc_feature (1)..(25): SEQ ID NO: 3063; WAN024G3J_at; Start 313; Stop 337
gaagaattagggtttgagatagaag

SEQ ID NO: 229635 - DNA, 25 bp, Artificial
  probe
  misc_feature (1)..(25): SEQ ID NO: 3063; WAN024G3J_at; Start 216; Stop 240
tacctttgaaccatggtctggcttg

SEQ ID NO: 229636 - DNA, 25 bp, Artificial
  probe
  misc_feature (1)..(25): SEQ ID NO: 3063; WAN024G3J_at; Start 294; Stop 318
cttagaagccaatcaggttgaagaa

SEQ ID NO: 229637 - DNA, 25 bp, Artificial
  probe
  misc_feature (1)..(25): SEQ ID NO: 3063; WAN024G3J_at; Start 301; Stop 325
gccaatcaggttgaagaattagggt

SEQ ID NO: 229638 - DNA, 25 bp, Artificial
  probe
  misc_feature (1)..(25): SEQ ID NO: 3063; WAN024G3J_at; Start 185; Stop 209
tctggtcaactttgaacaagggacc

SEQ ID NO: 229639 - DNA, 25 bp, Artificial
  probe
  misc_feature (1)..(25): SEQ ID NO: 3063; WAN024G3J_at; Start 213; Stop 237
cattacctttgaaccatggtctggc

SEQ ID NO: 229640 - DNA, 25 bp, Artificial
  probe
  misc_feature (1)..(25): SEQ ID NO: 3063; WAN024G3J_at; Start 256; Stop 280
gaaggagatcatttagaagataaga

SEQ ID NO: 229641 - DNA, 25 bp, Artificial
  probe
  misc_feature (1)..(25): SEQ ID NO: 3063; WAN024G3J_at; Start 79; Stop 103
gatgcagtgactttggatgaattgc

SEQ ID NO: 229642 - DNA, 25 bp, Artificial
  probe
  misc_feature (1)..(25): SEQ ID NO: 3063; WAN024G3J_at; Start 101; Stop 125
tgcaatctcgaacaattgcccttcg

SEQ ID NO: 229643 - DNA, 25 bp, Artificial
  probe
  misc_feature (1)..(25): SEQ ID NO: 3063; WAN024G3J_at; Start 153; Stop 177
agtgcattttgcagaatttccaaac

SEQ ID NO: 229644 - DNA, 25 bp, Artificial
  probe
  misc_feature (1)..(25): SEQ ID NO: 3063; WAN024G3J_at; Start 94; Stop 118
gatgaattgcaatctcgaacaattg

SEQ ID NO: 229645 - DNA, 25 bp, Artificial
  probe
  misc_feature (1)..(25): SEQ ID NO: 3063; WAN024G3J_at; Start 7; Stop 31
gatttccaagatagaagtccatggc

SEQ ID NO: 229646 - DNA, 25 bp, Artificial
  probe
  misc_feature (1)..(25): SEQ ID NO: 3063; WAN024G3J_at; Start 279; Stop 303
gaagaatgtttgtctcttagaagcc

SEQ ID NO: 229647 - DNA, 25 bp, Artificial
  probe
  misc_feature (1)..(25): SEQ ID NO: 3063; WAN024G3J_at; Start 286; Stop 310
gtttgtctcttagaagccaatcagg

SEQ ID NO: 229648 - DNA, 25 bp, Artificial
  probe
  misc_feature (1)..(25): SEQ ID NO: 3063; WAN024G3J_at; Start 166; Stop 190
gaatttccaaacctcatcatctggt

SEQ ID NO: 229649 - DNA, 25 bp, Artificial
  probe
  misc_feature (1)..(25): SEQ ID NO: 3063; WAN024G3J_at; Start 175; Stop 199
aacctcatcatctggtcaactttga

SEQ ID NO: 229650 - DNA, 25 bp, Artificial
  probe
  misc_feature (1)..(25): SEQ ID NO: 3063; WAN024G3J_at; Start 113; Stop 137
caattgcccttcgttctcttaaaca

SEQ ID NO: 229651 - DNA, 25 bp, Artificial
  probe
  misc_feature (1)..(25): SEQ ID NO: 3063; WAN024G3J_at; Start 20; Stop 44
gaagtccatggctagagggacaaaa

SEQ ID NO: 229652 - DNA, 25 bp, Artificial
  probe
  misc_feature (1)..(25): SEQ ID NO: 3063; WAN024G3J_at; Start 2; Stop 26
tgttggatttccaagatagaagtcc

SEQ ID NO: 229653 - DNA, 25 bp, Artificial
  probe
  misc_feature (1)..(25): SEQ ID NO: 3063; WAN024G3J_at; Start 26; Stop 50
catggctagagggacaaaaagaaat

SEQ ID NO: 229654 - DNA, 25 bp, Artificial
  probe
  misc_feature (1)..(25): SEQ ID NO: 3063; WAN024G3J_at; Start 223; Stop 247
gaaccatggtctggcttgtcaacat

SEQ ID NO: 229655 - DNA, 25 bp, Artificial
  probe
  misc_feature (1)..(25): SEQ ID NO: 3063; WAN024G3J_at; Start 249; Stop 273
ccttgaagaaggagatcatttagaa

SEQ ID NO: 229656 - DNA, 25 bp, Artificial
  probe
  misc_feature (1)..(25): SEQ ID NO: 3063; WAN024G3J_at; Start 268; Stop 292
ttagaagataagaagaatgtttgtc

SEQ ID NO: 229657 - DNA, 25 bp, Artificial
  probe
  misc_feature (1)..(25): SEQ ID NO: 3063; WAN024G3J_at; Start 13; Stop 37
caagatagaagtccatggctagagg

SEQ ID NO: 229658 - DNA, 25 bp, Artificial
  probe
  misc_feature (1)..(25): SEQ ID NO: 3063; WAN024G3J_at; Start 31; Stop 55
ctagagggacaaaaagaaatagatc

SEQ ID NO: 229659 - DNA, 25 bp, Artificial
  probe
  misc_feature (1)..(25): SEQ ID NO: 5310; WAN024G3K_at; Start 7; Stop 31
gagaaaggtcagttttatagtgaat

SEQ ID NO: 229660 - DNA, 25 bp, Artificial
  probe
  misc_feature (1)..(25): SEQ ID NO: 5310; WAN024G3K_at; Start 83; Stop 107
tgaatttcccaataaatttgttcag

SEQ ID NO: 229661 - DNA, 25 bp, Artificial
  probe
  misc_feature (1)..(25): SEQ ID NO: 5310; WAN024G3K_at; Start 60; Stop 84
taaaatattttcagaaagcgatttg

SEQ ID NO: 229662 - DNA, 25 bp, Artificial
  probe
  misc_feature (1)..(25): SEQ ID NO: 5310; WAN024G3K_at; Start 56; Stop 80
ttcctaaaatattttcagaaagcga

SEQ ID NO: 229663 - DNA, 25 bp, Artificial
  probe
  misc_feature (1)..(25): SEQ ID NO: 5310; WAN024G3K_at; Start 2; Stop 26
tgcaggagaaaggtcagttttatag

SEQ ID NO: 229664 - DNA, 25 bp, Artificial
  probe
  misc_feature (1)..(25): SEQ ID NO: 5310; WAN024G3K_at; Start 9; Stop 33
gaaaggtcagttttatagtgaattg

SEQ ID NO: 229665 - DNA, 25 bp, Artificial
  probe
  misc_feature (1)..(25): SEQ ID NO: 5310; WAN024G3K_at; Start 31; Stop 55
ttgaatctggaatattacactacgg

SEQ ID NO: 229666 - DNA, 25 bp, Artificial
  probe
  misc_feature (1)..(25): SEQ ID NO: 5310; WAN024G3K_at; Start 3; Stop 27
gcaggagaaaggtcagttttatagt

SEQ ID NO: 229667 - DNA, 25 bp, Artificial
  probe
  misc_feature (1)..(25): SEQ ID NO: 5310; WAN024G3K_at; Start 35; Stop 59
atctggaatattacactacggttcc

SEQ ID NO: 229668 - DNA, 25 bp, Artificial
  probe
  misc_feature (1)..(25): SEQ ID NO: 5310; WAN024G3K_at; Start 71; Stop 95
cagaaagcgatttgaatttcccaat

SEQ ID NO: 229669 - DNA, 25 bp, Artificial
  probe
  misc_feature (1)..(25): SEQ ID NO: 5310; WAN024G3K_at; Start 75; Stop 99
aagcgatttgaatttcccaataaat

SEQ ID NO: 229670 - DNA, 25 bp, Artificial
  probe
  misc_feature (1)..(25): SEQ ID NO: 5310; WAN024G3K_at; Start 37; Stop 61
ctggaatattacactacggttccta

SEQ ID NO: 229671 - DNA, 25 bp, Artificial
  probe
  misc_feature (1)..(25): SEQ ID NO: 5310; WAN024G3K_at; Start 33; Stop 57
gaatctggaatattacactacggtt

SEQ ID NO: 229672 - DNA, 25 bp, Artificial
  probe
  misc_feature (1)..(25): SEQ ID NO: 5310; WAN024G3K_at; Start 69; Stop 93
ttcagaaagcgatttgaatttccca

SEQ ID NO: 229673 - DNA, 25 bp, Artificial
  probe
  misc_feature (1)..(25): SEQ ID NO: 5310; WAN024G3K_at; Start 30; Stop 54
attgaatctggaatattacactacg

SEQ ID NO: 229674 - DNA, 25 bp, Artificial
  probe
  misc_feature (1)..(25): SEQ ID NO: 5310; WAN024G3K_at; Start 16; Stop 40
cagttttatagtgaattgaatctgg

SEQ ID NO: 229675 - DNA, 25 bp, Artificial
  probe
  misc_feature (1)..(25): SEQ ID NO: 5310; WAN024G3K_at; Start 78; Stop 102
cgatttgaatttcccaataaatttg

SEQ ID NO: 229676 - DNA, 25 bp, Artificial
  probe
  misc_feature (1)..(25): SEQ ID NO: 5310; WAN024G3K_at; Start 28; Stop 52
gaattgaatctggaatattacacta

SEQ ID NO: 229677 - DNA, 25 bp, Artificial
  probe
  misc_feature (1)..(25): SEQ ID NO: 5310; WAN024G3K_at; Start 18; Stop 42
gttttatagtgaattgaatctggaa

SEQ ID NO: 229678 - DNA, 25 bp, Artificial
  probe
  misc_feature (1)..(25): SEQ ID NO: 5310; WAN024G3K_at; Start 58; Stop 82
cctaaaatattttcagaaagcgatt

SEQ ID NO: 229679 - DNA, 25 bp, Artificial
  probe
  misc_feature (1)..(25): SEQ ID NO: 5310; WAN024G3K_at; Start 13; Stop 37
ggtcagttttatagtgaattgaatc

SEQ ID NO: 229680 - DNA, 25 bp, Artificial
  probe
  misc_feature (1)..(25): SEQ ID NO: 5310; WAN024G3K_at; Start 24; Stop 48
tagtgaattgaatctggaatattac

SEQ ID NO: 229681 - DNA, 25 bp, Artificial
  probe
  misc_feature (1)..(25): SEQ ID NO: 5310; WAN024G3K_at; Start 4; Stop 28
caggagaaaggtcagttttatagtg

SEQ ID NO: 229682 - DNA, 25 bp, Artificial
  probe
  misc_feature (1)..(25): SEQ ID NO: 5310; WAN024G3K_at; Start 29; Stop 53
aattgaatctggaatattacactac

SEQ ID NO: 229683 - DNA, 25 bp, Artificial
  probe
  misc_feature (1)..(25): SEQ ID NO: 5310; WAN024G3K_at; Start 32; Stop 56
tgaatctggaatattacactacggt

SEQ ID NO: 229684 - DNA, 25 bp, Artificial
  probe
  misc_feature (1)..(25): SEQ ID NO: 5310; WAN024G3K_at; Start 70; Stop 94
tcagaaagcgatttgaatttcccaa

SEQ ID NO: 229685 - DNA, 25 bp, Artificial
  probe
  misc_feature (1)..(25): SEQ ID NO: 5310; WAN024G3K_at; Start 1; Stop 25
ttgcaggagaaaggtcagttttata

SEQ ID NO: 229686 - DNA, 25 bp, Artificial
  probe
  misc_feature (1)..(25): SEQ ID NO: 5310; WAN024G3K_at; Start 73; Stop 97
gaaagcgatttgaatttcccaataa

SEQ ID NO: 229687 - DNA, 25 bp, Artificial
  probe
  misc_feature (1)..(25): SEQ ID NO: 5310; WAN024G3K_at; Start 38; Stop 62
tggaatattacactacggttcctaa

SEQ ID NO: 229688 - DNA, 25 bp, Artificial
  probe
  misc_feature (1)..(25): SEQ ID NO: 5310; WAN024G3K_at; Start 26; Stop 50
gtgaattgaatctggaatattacac

SEQ ID NO: 229689 - DNA, 25 bp, Artificial
  probe
  misc_feature (1)..(25): SEQ ID NO: 5310; WAN024G3K_at; Start 36; Stop 60
tctggaatattacactacggttcct

SEQ ID NO: 229690 - DNA, 25 bp, Artificial
  probe
  misc_feature (1)..(25): SEQ ID NO: 5310; WAN024G3K_at; Start 68; Stop 92
tttcagaaagcgatttgaatttccc

SEQ ID NO: 229691 - DNA, 25 bp, Artificial
  probe
  misc_feature (1)..(25): SEQ ID NO: 5310; WAN024G3K_at; Start 6; Stop 30
ggagaaaggtcagttttatagtgaa

SEQ ID NO: 229692 - DNA, 25 bp, Artificial
  probe
  misc_feature (1)..(25): SEQ ID NO: 5310; WAN024G3K_at; Start 34; Stop 58
aatctggaatattacactacggttc

SEQ ID NO: 229693 - DNA, 25 bp, Artificial
  probe
  misc_feature (1)..(25): SEQ ID NO: 1325; WAN024G3L_at; Start 76; Stop 100
cctagtggagctggagttgtccatg

SEQ ID NO: 229694 - DNA, 25 bp, Artificial
  probe
  misc_feature (1)..(25): SEQ ID NO: 1325; WAN024G3L_at; Start 417; Stop 441
gagaaggttcaagttaacttcggca

SEQ ID NO: 229695 - DNA, 25 bp, Artificial
  probe
  misc_feature (1)..(25): SEQ ID NO: 1325; WAN024G3L_at; Start 217; Stop 241
ggtgcaccaaacaagattggttcat

SEQ ID NO: 229696 - DNA, 25 bp, Artificial
  probe
  misc_feature (1)..(25): SEQ ID NO: 1325; WAN024G3L_at; Start 143; Stop 167
agaatttgaaaatccatacgtttgc

SEQ ID NO: 229697 - DNA, 25 bp, Artificial
  probe
  misc_feature (1)..(25): SEQ ID NO: 1325; WAN024G3L_at; Start 43; Stop 67
gatagcacttggaagttagttccaa

SEQ ID NO: 229698 - DNA, 25 bp, Artificial
  probe
  misc_feature (1)..(25): SEQ ID NO: 1325; WAN024G3L_at; Start 72; Stop 96
tagacctagtggagctggagttgtc

SEQ ID NO: 229699 - DNA, 25 bp, Artificial
  probe
  misc_feature (1)..(25): SEQ ID NO: 1325; WAN024G3L_at; Start 268; Stop 292
gaagcacgtccgattgcacggttac

SEQ ID NO: 229700 - DNA, 25 bp, Artificial
  probe
  misc_feature (1)..(25): SEQ ID NO: 1325; WAN024G3L_at; Start 27; Stop 51
ggcagcaagaatgaatgatagcact

SEQ ID NO: 229701 - DNA, 25 bp, Artificial
  probe
  misc_feature (1)..(25): SEQ ID NO: 1325; WAN024G3L_at; Start 264; Stop 288
tactgaagcacgtccgattgcacgg

SEQ ID NO: 229702 - DNA, 25 bp, Artificial
  probe
  misc_feature (1)..(25): SEQ ID NO: 1325; WAN024G3L_at; Start 14; Stop 38
ccacgattagaagggcagcaagaat

SEQ ID NO: 229703 - DNA, 25 bp, Artificial
  probe
  misc_feature (1)..(25): SEQ ID NO: 1325; WAN024G3L_at; Start 377; Stop 401
taccagaagtaagaatcttgtctgc

SEQ ID NO: 229704 - DNA, 25 bp, Artificial
  probe
  misc_feature (1)..(25): SEQ ID NO: 1325; WAN024G3L_at; Start 104; Stop 128
gattagcagtgaatgagttcattcc

SEQ ID NO: 229705 - DNA, 25 bp, Artificial
  probe
  misc_feature (1)..(25): SEQ ID NO: 1325; WAN024G3L_at; Start 386; Stop 410
taagaatcttgtctgcatgcatccc

SEQ ID NO: 229706 - DNA, 25 bp, Artificial
  probe
  misc_feature (1)..(25): SEQ ID NO: 1325; WAN024G3L_at; Start 405; Stop 429
catcccttgttggagaaggttcaag

SEQ ID NO: 229707 - DNA, 25 bp, Artificial
  probe
  misc_feature (1)..(25): SEQ ID NO: 1325; WAN024G3L_at; Start 389; Stop 413
gaatcttgtctgcatgcatcccttg

SEQ ID NO: 229708 - DNA, 25 bp, Artificial
  probe
  misc_feature (1)..(25): SEQ ID NO: 1325; WAN024G3L_at; Start 399; Stop 423
tgcatgcatcccttgttggagaagg

SEQ ID NO: 229709 - DNA, 25 bp, Artificial
  probe
  misc_feature (1)..(25): SEQ ID NO: 1325; WAN024G3L_at; Start 35; Stop 59
gaatgaatgatagcacttggaagtt

SEQ ID NO: 229710 - DNA, 25 bp, Artificial
  probe
  misc_feature (1)..(25): SEQ ID NO: 1325; WAN024G3L_at; Start 21; Stop 45
tagaagggcagcaagaatgaatgat

SEQ ID NO: 229711 - DNA, 25 bp, Artificial
  probe
  misc_feature (1)..(25): SEQ ID NO: 1325; WAN024G3L_at; Start 88; Stop 112
ggagttgtccatggtagattagcag

SEQ ID NO: 229712 - DNA, 25 bp, Artificial
  probe
  misc_feature (1)..(25): SEQ ID NO: 1325; WAN024G3L_at; Start 8; Stop 32
cgtcaaccacgattagaagggcagc

SEQ ID NO: 229713 - DNA, 25 bp, Artificial
  probe
  misc_feature (1)..(25): SEQ ID NO: 1325; WAN024G3L_at; Start 96; Stop 120
ccatggtagattagcagtgaatgag

SEQ ID NO: 229714 - DNA, 25 bp, Artificial
  probe
  misc_feature (1)..(25): SEQ ID NO: 1325; WAN024G3L_at; Start 114; Stop 138
gaatgagttcattccaagagtttca

SEQ ID NO: 229715 - DNA, 25 bp, Artificial
  probe
  misc_feature (1)..(25): SEQ ID NO: 1325; WAN024G3L_at; Start 59; Stop 83
tagttccaagaactagacctagtgg

SEQ ID NO: 229716 - DNA, 25 bp, Artificial
  probe
  misc_feature (1)..(25): SEQ ID NO: 1325; WAN024G3L_at; Start 126; Stop 150
tccaagagtttcaataaagaatttg

SEQ ID NO: 229717 - DNA, 25 bp, Artificial
  probe
  misc_feature (1)..(25): SEQ ID NO: 1325; WAN024G3L_at; Start 395; Stop 419
tgtctgcatgcatcccttgttggag

SEQ ID NO: 229718 - DNA, 25 bp, Artificial
  probe
  misc_feature (1)..(25): SEQ ID NO: 1325; WAN024G3L_at; Start 11; Stop 35
caaccacgattagaagggcagcaag

SEQ ID NO: 229719 - DNA, 25 bp, Artificial
  probe
  misc_feature (1)..(25): SEQ ID NO: 1325; WAN024G3L_at; Start 425; Stop 449
tcaagttaacttcggcattggcata

SEQ ID NO: 229720 - DNA, 25 bp, Artificial
  probe
  misc_feature (1)..(25): SEQ ID NO: 1325; WAN024G3L_at; Start 180; Stop 204
gataaatggaatgaagaagattgga

SEQ ID NO: 229721 - DNA, 25 bp, Artificial
  probe
  misc_feature (1)..(25): SEQ ID NO: 1325; WAN024G3L_at; Start 171; Stop 195
tggagcaaagataaatggaatgaag

SEQ ID NO: 229722 - DNA, 25 bp, Artificial
  probe
  misc_feature (1)..(25): SEQ ID NO: 1325; WAN024G3L_at; Start 259; Stop 283
ggaactactgaagcacgtccgattg

SEQ ID NO: 229723 - DNA, 25 bp, Artificial
  probe
  misc_feature (1)..(25): SEQ ID NO: 1325; WAN024G3L_at; Start 2; Stop 26
tgacaacgtcaaccacgattagaag

SEQ ID NO: 229724 - DNA, 25 bp, Artificial
  probe
  misc_feature (1)..(25): SEQ ID NO: 1325; WAN024G3L_at; Start 224; Stop 248
caaacaagattggttcatttacacc

SEQ ID NO: 229725 - DNA, 25 bp, Artificial
  probe
  misc_feature (1)..(25): SEQ ID NO: 1325; WAN024G3L_at; Start 272; Stop 296
cacgtccgattgcacggttacgttt

SEQ ID NO: 229726 - DNA, 25 bp, Artificial
  probe
  misc_feature (1)..(25): SEQ ID NO: 1325; WAN024G3L_at; Start 65; Stop 89
caagaactagacctagtggagctgg

SEQ ID NO: 229727 - DNA, 25 bp, Artificial
  probe
  misc_feature (1)..(25): SEQ ID NO: 4938; WAN024G3M_at; Start 118; Stop 142
ggttttatttccagtatgccagcag

SEQ ID NO: 229728 - DNA, 25 bp, Artificial
  probe
  misc_feature (1)..(25): SEQ ID NO: 4938; WAN024G3M_at; Start 511; Stop 535
tgtaaccattagacttcctgaagag

SEQ ID NO: 229729 - DNA, 25 bp, Artificial
  probe
  misc_feature (1)..(25): SEQ ID NO: 4938; WAN024G3M_at; Start 681; Stop 705
tttcagctactgatggttatatcgg

SEQ ID NO: 229730 - DNA, 25 bp, Artificial
  probe
  misc_feature (1)..(25): SEQ ID NO: 4938; WAN024G3M_at; Start 809; Stop 833
gaagctaatgttcagcttgtgcaag

SEQ ID NO: 229731 - DNA, 25 bp, Artificial
  probe
  misc_feature (1)..(25): SEQ ID NO: 4938; WAN024G3M_at; Start 754; Stop 778
tcatgggccatctgttgtagaacct

SEQ ID NO: 229732 - DNA, 25 bp, Artificial
  probe
  misc_feature (1)..(25): SEQ ID NO: 4938; WAN024G3M_at; Start 365; Stop 389
gcagctgttgttggattgttaatac

SEQ ID NO: 229733 - DNA, 25 bp, Artificial
  probe
  misc_feature (1)..(25): SEQ ID NO: 4938; WAN024G3M_at; Start 635; Stop 659
ggtacaaatgtagcagaatctgttg

SEQ ID NO: 229734 - DNA, 25 bp, Artificial
  probe
  misc_feature (1)..(25): SEQ ID NO: 4938; WAN024G3M_at; Start 967; Stop 991
cggacgtgcgtctgtagttcctact

SEQ ID NO: 229735 - DNA, 25 bp, Artificial
  probe
  misc_feature (1)..(25): SEQ ID NO: 4938; WAN024G3M_at; Start 1197; Stop 1221
cattgtcattcgtcttggctataac

SEQ ID NO: 229736 - DNA, 25 bp, Artificial
  probe
  misc_feature (1)..(25): SEQ ID NO: 4938; WAN024G3M_at; Start 274; Stop 298
gctgggacaactgcaaaatcgttaa

SEQ ID NO: 229737 - DNA, 25 bp, Artificial
  probe
  misc_feature (1)..(25): SEQ ID NO: 4938; WAN024G3M_at; Start 230; Stop 254
tgaaaccttacaactactcaatggg

SEQ ID NO: 229738 - DNA, 25 bp, Artificial
  probe
  misc_feature (1)..(25): SEQ ID NO: 4938; WAN024G3M_at; Start 898; Stop 922
tactggtgcaacactagtagttcca

SEQ ID NO: 229739 - DNA, 25 bp, Artificial
  probe
  misc_feature (1)..(25): SEQ ID NO: 4938; WAN024G3M_at; Start 1273; Stop 1297
ccatcaaattttagaagaagaacgg

SEQ ID NO: 229740 - DNA, 25 bp, Artificial
  probe
  misc_feature (1)..(25): SEQ ID NO: 4938; WAN024G3M_at; Start 162; Stop 186
tatactaatagctgctgtgcccaat

SEQ ID NO: 229741 - DNA, 25 bp, Artificial
  probe
  misc_feature (1)..(25): SEQ ID NO: 4938; WAN024G3M_at; Start 441; Stop 465
gaggattacttactgcatttttggc

SEQ ID NO: 229742 - DNA, 25 bp, Artificial
  probe
  misc_feature (1)..(25): SEQ ID NO: 4938; WAN024G3M_at; Start 885; Stop 909
taacaatgggtggtactggtgcaac

SEQ ID NO: 229743 - DNA, 25 bp, Artificial
  probe
  misc_feature (1)..(25): SEQ ID NO: 4938; WAN024G3M_at; Start 993; Stop 1017
tctttggcgtaaatgaaccaatcct

SEQ ID NO: 229744 - DNA, 25 bp, Artificial
  probe
  misc_feature (1)..(25): SEQ ID NO: 4938; WAN024G3M_at; Start 829; Stop 853
gcaagctggtatgcacgcagataaa

SEQ ID NO: 229745 - DNA, 25 bp, Artificial
  probe
  misc_feature (1)..(25): SEQ ID NO: 4938; WAN024G3M_at; Start 1022; Stop 1046
ggtgctccaattgttttaaatccta

SEQ ID NO: 229746 - DNA, 25 bp, Artificial
  probe
  misc_feature (1)..(25): SEQ ID NO: 4938; WAN024G3M_at; Start 1182; Stop 1206
gaacggcgctggctccattgtcatt

SEQ ID NO: 229747 - DNA, 25 bp, Artificial
  probe
  misc_feature (1)..(25): SEQ ID NO: 4938; WAN024G3M_at; Start 347; Stop 371
tacatgtcaacttttttagcagctg

SEQ ID NO: 229748 - DNA, 25 bp, Artificial
  probe
  misc_feature (1)..(25): SEQ ID NO: 4938; WAN024G3M_at; Start 533; Stop 557
gaggttccaccaaatattgcacaag

SEQ ID NO: 229749 - DNA, 25 bp, Artificial
  probe
  misc_feature (1)..(25): SEQ ID NO: 4938; WAN024G3M_at; Start 312; Stop 336
tacacgtagtatgggagaaaaccaa

SEQ ID NO: 229750 - DNA, 25 bp, Artificial
  probe
  misc_feature (1)..(25): SEQ ID NO: 4938; WAN024G3M_at; Start 1689; Stop 1713
aaggtgccctagcattcgtacaaga

SEQ ID NO: 229751 - DNA, 25 bp, Artificial
  probe
  misc_feature (1)..(25): SEQ ID NO: 4938; WAN024G3M_at; Start 1164; Stop 1188
caattggtattgttatgggaacggc

SEQ ID NO: 229752 - DNA, 25 bp, Artificial
  probe
  misc_feature (1)..(25): SEQ ID NO: 4938; WAN024G3M_at; Start 952; Stop 976
aagaaatagaattgtcggacgtgcg

SEQ ID NO: 229753 - DNA, 25 bp, Artificial
  probe
  misc_feature (1)..(25): SEQ ID NO: 4938; WAN024G3M_at; Start 421; Stop 445
taatggtcttttaggtactagagga

SEQ ID NO: 229754 - DNA, 25 bp, Artificial
  probe
  misc_feature (1)..(25): SEQ ID NO: 4938; WAN024G3M_at; Start 387; Stop 411
tactggcagctgatccaattgaagg

SEQ ID NO: 229755 - DNA, 25 bp, Artificial
  probe
  misc_feature (1)..(25): SEQ ID NO: 4938; WAN024G3M_at; Start 1138; Stop 1162
tattttaccttggacaacacctgct

SEQ ID NO: 229756 - DNA, 25 bp, Artificial
  probe
  misc_feature (1)..(25): SEQ ID NO: 4938; WAN024G3M_at; Start 1149; Stop 1173
ggacaacacctgctccaattggtat

SEQ ID NO: 229757 - DNA, 25 bp, Artificial
  probe
  misc_feature (1)..(25): SEQ ID NO: 4938; WAN024G3M_at; Start 132; Stop 156
tatgccagcagtattattctcaagt

SEQ ID NO: 229758 - DNA, 25 bp, Artificial
  probe
  misc_feature (1)..(25): SEQ ID NO: 4938; WAN024G3M_at; Start 653; Stop 677
tctgttggtaaaatattagcccctc

SEQ ID NO: 229759 - DNA, 25 bp, Artificial
  probe
  misc_feature (1)..(25): SEQ ID NO: 4938; WAN024G3M_at; Start 260; Stop 284
tagctctcttagtagctgggacaac

SEQ ID NO: 229760 - DNA, 25 bp, Artificial
  probe
  misc_feature (1)..(25): SEQ ID NO: 4938; WAN024G3M_at; Start 1292; Stop 1316
gaacggaaaggaaactcttcatctg

SEQ ID NO: 229761 - DNA, 25 bp, Artificial
  probe
  misc_feature (1)..(25): SEQ ID NO: 3960; WAN024G3N_at; Start 74; Stop 98
gcaaggagaccacttgttcctccac

SEQ ID NO: 229762 - DNA, 25 bp, Artificial
  probe
  misc_feature (1)..(25): SEQ ID NO: 3960; WAN024G3N_at; Start 168; Stop 192
caagaatagcatccgcttttgcagt

SEQ ID NO: 229763 - DNA, 25 bp, Artificial
  probe
  misc_feature (1)..(25): SEQ ID NO: 3960; WAN024G3N_at; Start 138; Stop 162
tattttgtgctgcatcgacacccgc

SEQ ID NO: 229764 - DNA, 25 bp, Artificial
  probe
  misc_feature (1)..(25): SEQ ID NO: 3960; WAN024G3N_at; Start 60; Stop 84
tattcaaagcatttgcaaggagacc

SEQ ID NO: 229765 - DNA, 25 bp, Artificial
  probe
  misc_feature (1)..(25): SEQ ID NO: 3960; WAN024G3N_at; Start 146; Stop 170
gctgcatcgacacccgctttttcaa

SEQ ID NO: 229766 - DNA, 25 bp, Artificial
  probe
  misc_feature (1)..(25): SEQ ID NO: 3960; WAN024G3N_at; Start 160; Stop 184
cgctttttcaagaatagcatccgct

SEQ ID NO: 229767 - DNA, 25 bp, Artificial
  probe
  misc_feature (1)..(25): SEQ ID NO: 3960; WAN024G3N_at; Start 225; Stop 249
catcattagacttacctgaacgttc

SEQ ID NO: 229768 - DNA, 25 bp, Artificial
  probe
  misc_feature (1)..(25): SEQ ID NO: 3960; WAN024G3N_at; Start 202; Stop 226
tgcagcaactttttctttcaattca

SEQ ID NO: 229769 - DNA, 25 bp, Artificial
  probe
  misc_feature (1)..(25): SEQ ID NO: 3960; WAN024G3N_at; Start 16; Stop 40
gcctgctgctgctttcacagggaca

SEQ ID NO: 229770 - DNA, 25 bp, Artificial
  probe
  misc_feature (1)..(25): SEQ ID NO: 3960; WAN024G3N_at; Start 50; Stop 74
gctgctgccttattcaaagcatttg

SEQ ID NO: 229771 - DNA, 25 bp, Artificial
  probe
  misc_feature (1)..(25): SEQ ID NO: 3960; WAN024G3N_at; Start 44; Stop 68
tattctgctgctgccttattcaaag

SEQ ID NO: 229772 - DNA, 25 bp, Artificial
  probe
  misc_feature (1)..(25): SEQ ID NO: 3960; WAN024G3N_at; Start 174; Stop 198
tagcatccgcttttgcagtgttgaa

SEQ ID NO: 229773 - DNA, 25 bp, Artificial
  probe
  misc_feature (1)..(25): SEQ ID NO: 3960; WAN024G3N_at; Start 187; Stop 211
tgcagtgttgaagtttgcagcaact

SEQ ID NO: 229774 - DNA, 25 bp, Artificial
  probe
  misc_feature (1)..(25): SEQ ID NO: 3960; WAN024G3N_at; Start 126; Stop 150
cttcagtgatggtattttgtgctgc

SEQ ID NO: 229775 - DNA, 25 bp, Artificial
  probe
  misc_feature (1)..(25): SEQ ID NO: 3960; WAN024G3N_at; Start 37; Stop 61
gacattgtattctgctgctgcctta

SEQ ID NO: 229776 - DNA, 25 bp, Artificial
  probe
  misc_feature (1)..(25): SEQ ID NO: 3960; WAN024G3N_at; Start 10; Stop 34
atagccgcctgctgctgctttcaca

SEQ ID NO: 229777 - DNA, 25 bp, Artificial
  probe
  misc_feature (1)..(25): SEQ ID NO: 3960; WAN024G3N_at; Start 94; Stop 118
tccacctgcacagagaacgaggaca

SEQ ID NO: 229778 - DNA, 25 bp, Artificial
  probe
  misc_feature (1)..(25): SEQ ID NO: 3960; WAN024G3N_at; Start 218; Stop 242
ttcaattcatcattagacttacctg

SEQ ID NO: 229779 - DNA, 25 bp, Artificial
  probe
  misc_feature (1)..(25): SEQ ID NO: 3960; WAN024G3N_at; Start 31; Stop 55
cacagggacattgtattctgctgct

SEQ ID NO: 229780 - DNA, 25 bp, Artificial
  probe
  misc_feature (1)..(25): SEQ ID NO: 3960; WAN024G3N_at; Start 112; Stop 136
gaggacatttgtttcttcagtgatg

SEQ ID NO: 229781 - DNA, 25 bp, Artificial
  probe
  misc_feature (1)..(25): SEQ ID NO: 3960; WAN024G3N_at; Start 26; Stop 50
gctttcacagggacattgtattctg

SEQ ID NO: 229782 - DNA, 25 bp, Artificial
  probe
  misc_feature (1)..(25): SEQ ID NO: 3960; WAN024G3N_at; Start 85; Stop 109
acttgttcctccacctgcacagaga

SEQ ID NO: 229783 - DNA, 25 bp, Artificial
  probe
  misc_feature (1)..(25): SEQ ID NO: 3960; WAN024G3N_at; Start 98; Stop 122
cctgcacagagaacgaggacatttg

SEQ ID NO: 229784 - DNA, 25 bp, Artificial
  probe
  misc_feature (1)..(25): SEQ ID NO: 3960; WAN024G3N_at; Start 63; Stop 87
tcaaagcatttgcaaggagaccact

SEQ ID NO: 229785 - DNA, 25 bp, Artificial
  probe
  misc_feature (1)..(25): SEQ ID NO: 3960; WAN024G3N_at; Start 69; Stop 93
catttgcaaggagaccacttgttcc

SEQ ID NO: 229786 - DNA, 25 bp, Artificial
  probe
  misc_feature (1)..(25): SEQ ID NO: 3960; WAN024G3N_at; Start 102; Stop 126
cacagagaacgaggacatttgtttc

SEQ ID NO: 229787 - DNA, 25 bp, Artificial
  probe
  misc_feature (1)..(25): SEQ ID NO: 3960; WAN024G3N_at; Start 90; Stop 114
ttcctccacctgcacagagaacgag

SEQ ID NO: 229788 - DNA, 25 bp, Artificial
  probe
  misc_feature (1)..(25): SEQ ID NO: 3960; WAN024G3N_at; Start 141; Stop 165
tttgtgctgcatcgacacccgcttt

SEQ ID NO: 229789 - DNA, 25 bp, Artificial
  probe
  misc_feature (1)..(25): SEQ ID NO: 3960; WAN024G3N_at; Start 152; Stop 176
tcgacacccgctttttcaagaatag

SEQ ID NO: 229790 - DNA, 25 bp, Artificial
  probe
  misc_feature (1)..(25): SEQ ID NO: 3960; WAN024G3N_at; Start 250; Stop 274
ttcttcaagaatttgttcatcatag

SEQ ID NO: 229791 - DNA, 25 bp, Artificial
  probe
  misc_feature (1)..(25): SEQ ID NO: 3960; WAN024G3N_at; Start 237; Stop 261
tacctgaacgttcttcttcaagaat

SEQ ID NO: 229792 - DNA, 25 bp, Artificial
  probe
  misc_feature (1)..(25): SEQ ID NO: 3960; WAN024G3N_at; Start 20; Stop 44
gctgctgctttcacagggacattgt

SEQ ID NO: 229793 - DNA, 25 bp, Artificial
  probe
  misc_feature (1)..(25): SEQ ID NO: 3960; WAN024G3N_at; Start 180; Stop 204
ccgcttttgcagtgttgaagtttgc

SEQ ID NO: 229794 - DNA, 25 bp, Artificial
  probe
  misc_feature (1)..(25): SEQ ID NO: 3960; WAN024G3N_at; Start 231; Stop 255
tagacttacctgaacgttcttcttc

SEQ ID NO: 229795 - DNA, 25 bp, Artificial
  probe
  misc_feature (1)..(25): SEQ ID NO: 1289; WAN024G3O_at; Start 181; Stop 205
gaagttgtagcctttctgatgaaac

SEQ ID NO: 229796 - DNA, 25 bp, Artificial
  probe
  misc_feature (1)..(25): SEQ ID NO: 1289; WAN024G3O_at; Start 138; Stop 162
gattgcctttgtaccaaactcatgg

SEQ ID NO: 229797 - DNA, 25 bp, Artificial
  probe
  misc_feature (1)..(25): SEQ ID NO: 1289; WAN024G3O_at; Start 604; Stop 628
tctagtgtggcagaatcaatcggta

SEQ ID NO: 229798 - DNA, 25 bp, Artificial
  probe
  misc_feature (1)..(25): SEQ ID NO: 1289; WAN024G3O_at; Start 474; Stop 498
caacgtcactattcgtatgcctgac

SEQ ID NO: 229799 - DNA, 25 bp, Artificial
  probe
  misc_feature (1)..(25): SEQ ID NO: 1289; WAN024G3O_at; Start 652; Stop 676
gcagcagacggataccttggtatta

SEQ ID NO: 229800 - DNA, 25 bp, Artificial
  probe
  misc_feature (1)..(25): SEQ ID NO: 1289; WAN024G3O_at; Start 85; Stop 109
gatggtttcattgcaggtatgcctg

SEQ ID NO: 229801 - DNA, 25 bp, Artificial
  probe
  misc_feature (1)..(25): SEQ ID NO: 1289; WAN024G3O_at; Start 1101; Stop 1125
tgctaatctaccatggacaactcca

SEQ ID NO: 229802 - DNA, 25 bp, Artificial
  probe
  misc_feature (1)..(25): SEQ ID NO: 1289; WAN024G3O_at; Start 1671; Stop 1695
cgtacaagcgcaattcgattaacta

SEQ ID NO: 229803 - DNA, 25 bp, Artificial
  probe
  misc_feature (1)..(25): SEQ ID NO: 1289; WAN024G3O_at; Start 1180; Stop 1204
gctgcccttctaatcgtggttgacg

SEQ ID NO: 229804 - DNA, 25 bp, Artificial
  probe
  misc_feature (1)..(25): SEQ ID NO: 1289; WAN024G3O_at; Start 1161; Stop 1185
agtgctatcattcattcttgctgcc

SEQ ID NO: 229805 - DNA, 25 bp, Artificial
  probe
  misc_feature (1)..(25): SEQ ID NO: 1289; WAN024G3O_at; Start 15; Stop 39
tgcatttatcgagaaaggaaagcct

SEQ ID NO: 229806 - DNA, 25 bp, Artificial
  probe
  misc_feature (1)..(25): SEQ ID NO: 1289; WAN024G3O_at; Start 200; Stop 224
tgaaaccttatagctattctatggg

SEQ ID NO: 229807 - DNA, 25 bp, Artificial
  probe
  misc_feature (1)..(25): SEQ ID NO: 1289; WAN024G3O_at; Start 1129; Stop 1153
ccactaggtctagttcttggaacta

SEQ ID NO: 229808 - DNA, 25 bp, Artificial
  probe
  misc_feature (1)..(25): SEQ ID NO: 1289; WAN024G3O_at; Start 217; Stop 241
tctatgggtattctggctctcttgg

SEQ ID NO: 229809 - DNA, 25 bp, Artificial
  probe
  misc_feature (1)..(25): SEQ ID NO: 1289; WAN024G3O_at; Start 1147; Stop 1171
ggaactaacttccaagtgctatcat

SEQ ID NO: 229810 - DNA, 25 bp, Artificial
  probe
  misc_feature (1)..(25): SEQ ID NO: 1289; WAN024G3O_at; Start 65; Stop 89
tctatcttcgtgctattcgtgatgg

SEQ ID NO: 229811 - DNA, 25 bp, Artificial
  probe
  misc_feature (1)..(25): SEQ ID NO: 1289; WAN024G3O_at; Start 1220; Stop 1244
cattccttaaggtctatgatgaaca

SEQ ID NO: 229812 - DNA, 25 bp, Artificial
  probe
  misc_feature (1)..(25): SEQ ID NO: 1289; WAN024G3O_at; Start 1201; Stop 1225
gacgttgtcatttactatccattcc

SEQ ID NO: 229813 - DNA, 25 bp, Artificial
  probe
  misc_feature (1)..(25): SEQ ID NO: 1289; WAN024G3O_at; Start 101; Stop 125
gtatgcctgttattctcttctcaag

SEQ ID NO: 229814 - DNA, 25 bp, Artificial
  probe
  misc_feature (1)..(25): SEQ ID NO: 1289; WAN024G3O_at; Start 351; Stop 375
gatgttggcagctgatcctatcgaa

SEQ ID NO: 229815 - DNA, 25 bp, Artificial
  probe
  misc_feature (1)..(25): SEQ ID NO: 1289; WAN024G3O_at; Start 688; Stop 712
ggtgcctttgccttcttctggtttg

SEQ ID NO: 229816 - DNA, 25 bp, Artificial
  probe
  misc_feature (1)..(25): SEQ ID NO: 1289; WAN024G3O_at; Start 1655; Stop 1679
aaggtgctcttgcattcgtacaagc

SEQ ID NO: 229817 - DNA, 25 bp, Artificial
  probe
  misc_feature (1)..(25): SEQ ID NO: 1289; WAN024G3O_at; Start 1602; Stop 1626
taaactagcgaaaacagaaggcgct

SEQ ID NO: 229818 - DNA, 25 bp, Artificial
  probe
  misc_feature (1)..(25): SEQ ID NO: 1289; WAN024G3O_at; Start 619; Stop 643
tcaatcggtaaattcttcgcaccac

SEQ ID NO: 229819 - DNA, 25 bp, Artificial
  probe
  misc_feature (1)..(25): SEQ ID NO: 1289; WAN024G3O_at; Start 675; Stop 699
taccattatctttggtgcctttgcc

SEQ ID NO: 229820 - DNA, 25 bp, Artificial
  probe
  misc_feature (1)..(25): SEQ ID NO: 1289; WAN024G3O_at; Start 500; Stop 524
aagttccaccaaatatctcacaagt

SEQ ID NO: 229821 - DNA, 25 bp, Artificial
  probe
  misc_feature (1)..(25): SEQ ID NO: 1289; WAN024G3O_at; Start 641; Stop 665
cactcttctcagcagcagacggata

SEQ ID NO: 229822 - DNA, 25 bp, Artificial
  probe
  misc_feature (1)..(25): SEQ ID NO: 1289; WAN024G3O_at; Start 964; Stop 988
ggtgtaaatgaaccaatcttgtttg

SEQ ID NO: 229823 - DNA, 25 bp, Artificial
  probe
  misc_feature (1)..(25): SEQ ID NO: 1289; WAN024G3O_at; Start 1528; Stop 1552
gatcttgttatccttgcccctcaag

SEQ ID NO: 229824 - DNA, 25 bp, Artificial
  probe
  misc_feature (1)..(25): SEQ ID NO: 1289; WAN024G3O_at; Start 1115; Stop 1139
ggacaactccagctccactaggtct

SEQ ID NO: 229825 - DNA, 25 bp, Artificial
  probe
  misc_feature (1)..(25): SEQ ID NO: 1289; WAN024G3O_at; Start 232; Stop 256
gctctcttggtagctggtacaacag

SEQ ID NO: 229826 - DNA, 25 bp, Artificial
  probe
  misc_feature (1)..(25): SEQ ID NO: 1289; WAN024G3O_at; Start 1248; Stop 1272
tcttgaagaagaacgttcaggtaag

SEQ ID NO: 229827 - DNA, 25 bp, Artificial
  probe
  misc_feature (1)..(25): SEQ ID NO: 1289; WAN024G3O_at; Start 402; Stop 426
gacaaaaggtttgctttcagccttc

SEQ ID NO: 229828 - DNA, 25 bp, Artificial
  probe
  misc_feature (1)..(25): SEQ ID NO: 1289; WAN024G3O_at; Start 425; Stop 449
tccttgctgcctttgttactgtagc

SEQ ID NO: 229829 - DNA, 25 bp, Artificial
  probe
  misc_feature (1)..(25): SEQ ID NO: 2316; WAN024G3P_at; Start 181; Stop 205
ccagctattgtctggatgagaaaag

SEQ ID NO: 229830 - DNA, 25 bp, Artificial
  probe
  misc_feature (1)..(25): SEQ ID NO: 2316; WAN024G3P_at; Start 946; Stop 970
tcggtaggtaaagctacaattactc

SEQ ID NO: 229831 - DNA, 25 bp, Artificial
  probe
  misc_feature (1)..(25): SEQ ID NO: 2316; WAN024G3P_at; Start 386; Stop 410
cgggatctacaagtttgtcgacaaa

SEQ ID NO: 229832 - DNA, 25 bp, Artificial
  probe
  misc_feature (1)..(25): SEQ ID NO: 2316; WAN024G3P_at; Start 802; Stop 826
gctcaacttcttgcaaatgggcagt

SEQ ID NO: 229833 - DNA, 25 bp, Artificial
  probe
  misc_feature (1)..(25): SEQ ID NO: 2316; WAN024G3P_at; Start 472; Stop 496
taccgattctgtattaagcgagaca

SEQ ID NO: 229834 - DNA, 25 bp, Artificial
  probe
  misc_feature (1)..(25): SEQ ID NO: 2316; WAN024G3P_at; Start 991; Stop 1015
gaacctcttctatttggtatgcctg

SEQ ID NO: 229835 - DNA, 25 bp, Artificial
  probe
  misc_feature (1)..(25): SEQ ID NO: 2316; WAN024G3P_at; Start 613; Stop 637
agtttagatgttccttttgcccaag

SEQ ID NO: 229836 - DNA, 25 bp, Artificial
  probe
  misc_feature (1)..(25): SEQ ID NO: 2316; WAN024G3P_at; Start 1653; Stop 1677
tgtattggagcattaccaagctgtg

SEQ ID NO: 229837 - DNA, 25 bp, Artificial
  probe
  misc_feature (1)..(25): SEQ ID NO: 2316; WAN024G3P_at; Start 742; Stop 766
ggaccatctattgtcttacctgctg

SEQ ID NO: 229838 - DNA, 25 bp, Artificial
  probe
  misc_feature (1)..(25): SEQ ID NO: 2316; WAN024G3P_at; Start 1529; Stop 1553
cacaagttcggagttattatagaga

SEQ ID NO: 229839 - DNA, 25 bp, Artificial
  probe
  misc_feature (1)..(25): SEQ ID NO: 2316; WAN024G3P_at; Start 977; Stop 1001
tatttgcggtaaatgaacctcttct

SEQ ID NO: 229840 - DNA, 25 bp, Artificial
  probe
  misc_feature (1)..(25): SEQ ID NO: 2316; WAN024G3P_at; Start 83; Stop 107
aagatggattcattgctactatgcc

SEQ ID NO: 229841 - DNA, 25 bp, Artificial
  probe
  misc_feature (1)..(25): SEQ ID NO: 2316; WAN024G3P_at; Start 862; Stop 886
tatatcgctgctattggaggaacgg

SEQ ID NO: 229842 - DNA, 25 bp, Artificial
  probe
  misc_feature (1)..(25): SEQ ID NO: 2316; WAN024G3P_at; Start 200; Stop 224
gaaaagtgtatatgttaaccatggg

SEQ ID NO: 229843 - DNA, 25 bp, Artificial
  probe
  misc_feature (1)..(25): SEQ ID NO: 2316; WAN024G3P_at; Start 405; Stop 429
gacaaactatttaggatctcaagga

SEQ ID NO: 229844 - DNA, 25 bp, Artificial
  probe
  misc_feature (1)..(25): SEQ ID NO: 2316; WAN024G3P_at; Start 2; Stop 26
tggataagctagtcgctgccattga

SEQ ID NO: 229845 - DNA, 25 bp, Artificial
  probe
  misc_feature (1)..(25): SEQ ID NO: 2316; WAN024G3P_at; Start 1373; Stop 1397
tactggttctttgtgcagggtctgg

SEQ ID NO: 229846 - DNA, 25 bp, Artificial
  probe
  misc_feature (1)..(25): SEQ ID NO: 2316; WAN024G3P_at; Start 1581; Stop 1605
tattcagatagttgctaccagagga

SEQ ID NO: 229847 - DNA, 25 bp, Artificial
  probe
  misc_feature (1)..(25): SEQ ID NO: 2316; WAN024G3P_at; Start 527; Stop 551
gggctatatcacaagcttttagaga

SEQ ID NO: 229848 - DNA, 25 bp, Artificial
  probe
  misc_feature (1)..(25): SEQ ID NO: 2316; WAN024G3P_at; Start 820; Stop 844
gggcagttcccttatcattctttaa

SEQ ID NO: 229849 - DNA, 25 bp, Artificial
  probe
  misc_feature (1)..(25): SEQ ID NO: 2316; WAN024G3P_at; Start 785; Stop 809
gcaatatggaagagaatgctcaact

SEQ ID NO: 229850 - DNA, 25 bp, Artificial
  probe
  misc_feature (1)..(25): SEQ ID NO: 2316; WAN024G3P_at; Start 13; Stop 37
gtcgctgccattgaaaagcaacaag

SEQ ID NO: 229851 - DNA, 25 bp, Artificial
  probe
  misc_feature (1)..(25): SEQ ID NO: 2316; WAN024G3P_at; Start 1469; Stop 1493
caggagcgtacggagctcattatga

SEQ ID NO: 229852 - DNA, 25 bp, Artificial
  probe
  misc_feature (1)..(25): SEQ ID NO: 2316; WAN024G3P_at; Start 1227; Stop 1251
gatttatttgccattctgtagagcg

SEQ ID NO: 229853 - DNA, 25 bp, Artificial
  probe
  misc_feature (1)..(25): SEQ ID NO: 2316; WAN024G3P_at; Start 1245; Stop 1269
tagagcgtatgatagacagttactg

SEQ ID NO: 229854 - DNA, 25 bp, Artificial
  probe
  misc_feature (1)..(25): SEQ ID NO: 2316; WAN024G3P_at; Start 290; Stop 314
tgcctcacggaaaggtaataaatga

SEQ ID NO: 229855 - DNA, 25 bp, Artificial
  probe
  misc_feature (1)..(25): SEQ ID NO: 2316; WAN024G3P_at; Start 1005; Stop 1029
tggtatgcctgttattttgaatccc

SEQ ID NO: 229856 - DNA, 25 bp, Artificial
  probe
  misc_feature (1)..(25): SEQ ID NO: 2316; WAN024G3P_at; Start 371; Stop 395
tagttgatgagaagacgggatctac

SEQ ID NO: 229857 - DNA, 25 bp, Artificial
  probe
  misc_feature (1)..(25): SEQ ID NO: 2316; WAN024G3P_at; Start 1040; Stop 1064
tcccttttttgatgactccaccagt

SEQ ID NO: 229858 - DNA, 25 bp, Artificial
  probe
  misc_feature (1)..(25): SEQ ID NO: 2316; WAN024G3P_at; Start 1409; Stop 1433
aattagccaatgcaattaacgaggg

SEQ ID NO: 229859 - DNA, 25 bp, Artificial
  probe
  misc_feature (1)..(25): SEQ ID NO: 2316; WAN024G3P_at; Start 924; Stop 948
tatgcggtctaaacaattaaaatcg

SEQ ID NO: 229860 - DNA, 25 bp, Artificial
  probe
  misc_feature (1)..(25): SEQ ID NO: 2316; WAN024G3P_at; Start 163; Stop 187
ggagtagagttaccgagtccagcta

SEQ ID NO: 229861 - DNA, 25 bp, Artificial
  probe
  misc_feature (1)..(25): SEQ ID NO: 2316; WAN024G3P_at; Start 1545; Stop 1569
ttatagagagatgaaggtggatgca

SEQ ID NO: 229862 - DNA, 25 bp, Artificial
  probe
  misc_feature (1)..(25): SEQ ID NO: 2316; WAN024G3P_at; Start 431; Stop 455
tgataacttcgtttgtcagtgcctt

SEQ ID NO: 229863 - DNA, 25 bp, Artificial
  probe
  misc_feature (1)..(25): SEQ ID NO: 4316; WAN024G3Q_at; Start 204; Stop 228
gacgaccaacacctttgatttgata

SEQ ID NO: 229864 - DNA, 25 bp, Artificial
  probe
  misc_feature (1)..(25): SEQ ID NO: 4316; WAN024G3Q_at; Start 283; Stop 307
aaaggcttccatccagtcactcata

SEQ ID NO: 229865 - DNA, 25 bp, Artificial
  probe
  misc_feature (1)..(25): SEQ ID NO: 4316; WAN024G3Q_at; Start 52; Stop 76
gaactcatctttatagccgagacca

SEQ ID NO: 229866 - DNA, 25 bp, Artificial
  probe
  misc_feature (1)..(25): SEQ ID NO: 4316; WAN024G3Q_at; Start 292; Stop 316
catccagtcactcatatagtagttg

SEQ ID NO: 229867 - DNA, 25 bp, Artificial
  probe
  misc_feature (1)..(25): SEQ ID NO: 4316; WAN024G3Q_at; Start 264; Stop 288
taatttcagtttctccatcaaaggc

SEQ ID NO: 229868 - DNA, 25 bp, Artificial
  probe
  misc_feature (1)..(25): SEQ ID NO: 4316; WAN024G3Q_at; Start 70; Stop 94
gagaccattttcagtgatgtaaatc

SEQ ID NO: 229869 - DNA, 25 bp, Artificial
  probe
  misc_feature (1)..(25): SEQ ID NO: 4316; WAN024G3Q_at; Start 121; Stop 145
cacacgcatgatttggtcatacaaa

SEQ ID NO: 229870 - DNA, 25 bp, Artificial
  probe
  misc_feature (1)..(25): SEQ ID NO: 4316; WAN024G3Q_at; Start 181; Stop 205
tggtacatagtcaggagctacacga

SEQ ID NO: 229871 - DNA, 25 bp, Artificial
  probe
  misc_feature (1)..(25): SEQ ID NO: 4316; WAN024G3Q_at; Start 248; Stop 272
cctttaccattatggataatttcag

SEQ ID NO: 229872 - DNA, 25 bp, Artificial
  probe
  misc_feature (1)..(25): SEQ ID NO: 4316; WAN024G3Q_at; Start 133; Stop 157
ttggtcatacaaaccttgagggtag

SEQ ID NO: 229873 - DNA, 25 bp, Artificial
  probe
  misc_feature (1)..(25): SEQ ID NO: 4316; WAN024G3Q_at; Start 94; Stop 118
cttcttgtagttaggataatctttc

SEQ ID NO: 229874 - DNA, 25 bp, Artificial
  probe
  misc_feature (1)..(25): SEQ ID NO: 4316; WAN024G3Q_at; Start 61; Stop 85
tttatagccgagaccattttcagtg

SEQ ID NO: 229875 - DNA, 25 bp, Artificial
  probe
  misc_feature (1)..(25): SEQ ID NO: 4316; WAN024G3Q_at; Start 189; Stop 213
agtcaggagctacacgacgaccaac

SEQ ID NO: 229876 - DNA, 25 bp, Artificial
  probe
  misc_feature (1)..(25): SEQ ID NO: 4316; WAN024G3Q_at; Start 212; Stop 236
acacctttgatttgatacttagagc

SEQ ID NO: 229877 - DNA, 25 bp, Artificial
  probe
  misc_feature (1)..(25): SEQ ID NO: 4316; WAN024G3Q_at; Start 220; Stop 244
gatttgatacttagagcttcctttt

SEQ ID NO: 229878 - DNA, 25 bp, Artificial
  probe
  misc_feature (1)..(25): SEQ ID NO: 4316; WAN024G3Q_at; Start 142; Stop 166
caaaccttgagggtagataatccaa

SEQ ID NO: 229879 - DNA, 25 bp, Artificial
  probe
  misc_feature (1)..(25): SEQ ID NO: 4316; WAN024G3Q_at; Start 85; Stop 109
gatgtaaatcttcttgtagttagga

SEQ ID NO: 229880 - DNA, 25 bp, Artificial
  probe
  misc_feature (1)..(25): SEQ ID NO: 4316; WAN024G3Q_at; Start 152; Stop 176
gggtagataatccaatcccaatccg

SEQ ID NO: 229881 - DNA, 25 bp, Artificial
  probe
  misc_feature (1)..(25): SEQ ID NO: 4316; WAN024G3Q_at; Start 146; Stop 170
ccttgagggtagataatccaatccc

SEQ ID NO: 229882 - DNA, 25 bp, Artificial
  probe
  misc_feature (1)..(25): SEQ ID NO: 4316; WAN024G3Q_at; Start 196; Stop 220
agctacacgacgaccaacacctttg

SEQ ID NO: 229883 - DNA, 25 bp, Artificial
  probe
  misc_feature (1)..(25): SEQ ID NO: 4316; WAN024G3Q_at; Start 10; Stop 34
cacgtaatcaatacgaccatcatcg

SEQ ID NO: 229884 - DNA, 25 bp, Artificial
  probe
  misc_feature (1)..(25): SEQ ID NO: 4316; WAN024G3Q_at; Start 186; Stop 210
catagtcaggagctacacgacgacc

SEQ ID NO: 229885 - DNA, 25 bp, Artificial
  probe
  misc_feature (1)..(25): SEQ ID NO: 4316; WAN024G3Q_at; Start 164; Stop 188
caatcccaatccgtgcgtggtacat

SEQ ID NO: 229886 - DNA, 25 bp, Artificial
  probe
  misc_feature (1)..(25): SEQ ID NO: 4316; WAN024G3Q_at; Start 107; Stop 131
ggataatctttcttcacacgcatga

SEQ ID NO: 229887 - DNA, 25 bp, Artificial
  probe
  misc_feature (1)..(25): SEQ ID NO: 4316; WAN024G3Q_at; Start 130; Stop 154
gatttggtcatacaaaccttgaggg

SEQ ID NO: 229888 - DNA, 25 bp, Artificial
  probe
  misc_feature (1)..(25): SEQ ID NO: 4316; WAN024G3Q_at; Start 24; Stop 48
gaccatcatcgtaaacagtgttatc

SEQ ID NO: 229889 - DNA, 25 bp, Artificial
  probe
  misc_feature (1)..(25): SEQ ID NO: 4316; WAN024G3Q_at; Start 113; Stop 137
tctttcttcacacgcatgatttggt

SEQ ID NO: 229890 - DNA, 25 bp, Artificial
  probe
  misc_feature (1)..(25): SEQ ID NO: 4316; WAN024G3Q_at; Start 170; Stop 194
caatccgtgcgtggtacatagtcag

SEQ ID NO: 229891 - DNA, 25 bp, Artificial
  probe
  misc_feature (1)..(25): SEQ ID NO: 4316; WAN024G3Q_at; Start 175; Stop 199
cgtgcgtggtacatagtcaggagct

SEQ ID NO: 229892 - DNA, 25 bp, Artificial
  probe
  misc_feature (1)..(25): SEQ ID NO: 4316; WAN024G3Q_at; Start 67; Stop 91
gccgagaccattttcagtgatgtaa

SEQ ID NO: 229893 - DNA, 25 bp, Artificial
  probe
  misc_feature (1)..(25): SEQ ID NO: 4316; WAN024G3Q_at; Start 159; Stop 183
taatccaatcccaatccgtgcgtgg

SEQ ID NO: 229894 - DNA, 25 bp, Artificial
  probe
  misc_feature (1)..(25): SEQ ID NO: 4316; WAN024G3Q_at; Start 277; Stop 301
tccatcaaaggcttccatccagtca

SEQ ID NO: 229895 - DNA, 25 bp, Artificial
  probe
  misc_feature (1)..(25): SEQ ID NO: 4316; WAN024G3Q_at; Start 300; Stop 324
cactcatatagtagttgattcctag

SEQ ID NO: 229896 - DNA, 25 bp, Artificial
  probe
  misc_feature (1)..(25): SEQ ID NO: 4316; WAN024G3Q_at; Start 270; Stop 294
cagtttctccatcaaaggcttccat

SEQ ID NO: 229897 - DNA, 25 bp, Artificial
  probe
  misc_feature (1)..(25): SEQ ID NO: 3834; WAN024G3R_at; Start 1280; Stop 1304
tggatgtcttctcatggtcaaacgg

SEQ ID NO: 229898 - DNA, 25 bp, Artificial
  probe
  misc_feature (1)..(25): SEQ ID NO: 3834; WAN024G3R_at; Start 918; Stop 942
gatggaagcctttgatggagaaact

SEQ ID NO: 229899 - DNA, 25 bp, Artificial
  probe
  misc_feature (1)..(25): SEQ ID NO: 3834; WAN024G3R_at; Start 871; Stop 895
aaagacttgaatgatttcctaggaa

SEQ ID NO: 229900 - DNA, 25 bp, Artificial
  probe
  misc_feature (1)..(25): SEQ ID NO: 3834; WAN024G3R_at; Start 1325; Stop 1349
tcttctacgtagattttgaaactca

SEQ ID NO: 229901 - DNA, 25 bp, Artificial
  probe
  misc_feature (1)..(25): SEQ ID NO: 3834; WAN024G3R_at; Start 904; Stop 928
tatatgagtgactggatggaagcct

SEQ ID NO: 229902 - DNA, 25 bp, Artificial
  probe
  misc_feature (1)..(25): SEQ ID NO: 3834; WAN024G3R_at; Start 887; Stop 911
tcctaggaatcaactactatatgag

SEQ ID NO: 229903 - DNA, 25 bp, Artificial
  probe
  misc_feature (1)..(25): SEQ ID NO: 3834; WAN024G3R_at; Start 487; Stop 511
gaaattggaccaatcggtgatggtc

SEQ ID NO: 229904 - DNA, 25 bp, Artificial
  probe
  misc_feature (1)..(25): SEQ ID NO: 3834; WAN024G3R_at; Start 382; Stop 406
tcaaatggagacttcttaaaccgtg

SEQ ID NO: 229905 - DNA, 25 bp, Artificial
  probe
  misc_feature (1)..(25): SEQ ID NO: 3834; WAN024G3R_at; Start 160; Stop 184
gatttttacaatcgatatccagttg

SEQ ID NO: 229906 - DNA, 25 bp, Artificial
  probe
  misc_feature (1)..(25): SEQ ID NO: 3834; WAN024G3R_at; Start 935; Stop 959
gagaaactgaaattatccataatgg

SEQ ID NO: 229907 - DNA, 25 bp, Artificial
  probe
  misc_feature (1)..(25): SEQ ID NO: 3834; WAN024G3R_at; Start 1309; Stop 1333
gagaaacgttatggtctcttctacg

SEQ ID NO: 229908 - DNA, 25 bp, Artificial
  probe
  misc_feature (1)..(25): SEQ ID NO: 3834; WAN024G3R_at; Start 1031; Stop 1055
cacgcacggattgggattggattat

SEQ ID NO: 229909 - DNA, 25 bp, Artificial
  probe
  misc_feature (1)..(25): SEQ ID NO: 3834; WAN024G3R_at; Start 366; Stop 390
gccagaagctctccactcaaatgga

SEQ ID NO: 229910 - DNA, 25 bp, Artificial
  probe
  misc_feature (1)..(25): SEQ ID NO: 3834; WAN024G3R_at; Start 857; Stop 881
cattagaagctgcaaaagacttgaa

SEQ ID NO: 229911 - DNA, 25 bp, Artificial
  probe
  misc_feature (1)..(25): SEQ ID NO: 3834; WAN024G3R_at; Start 1390; Stop 1414
gtagcggaaactcagattatagact

SEQ ID NO: 229912 - DNA, 25 bp, Artificial
  probe
  misc_feature (1)..(25): SEQ ID NO: 3834; WAN024G3R_at; Start 1357; Stop 1381
tatcctaagaaatcagctcactggt

SEQ ID NO: 229913 - DNA, 25 bp, Artificial
  probe
  misc_feature (1)..(25): SEQ ID NO: 3834; WAN024G3R_at; Start 1292; Stop 1316
catggtcaaacggttatgagaaacg

SEQ ID NO: 229914 - DNA, 25 bp, Artificial
  probe
  misc_feature (1)..(25): SEQ ID NO: 3834; WAN024G3R_at; Start 189; Stop 213
caagctagcagaagagtatggtgtc

SEQ ID NO: 229915 - DNA, 25 bp, Artificial
  probe
  misc_feature (1)..(25): SEQ ID NO: 3834; WAN024G3R_at; Start 457; Stop 481
ccagaagtaaactattggacaacct

SEQ ID NO: 229916 - DNA, 25 bp, Artificial
  probe
  misc_feature (1)..(25): SEQ ID NO: 3834; WAN024G3R_at; Start 313; Stop 337
gagtgtcacaaacgtcatgttgagc

SEQ ID NO: 229917 - DNA, 25 bp, Artificial
  probe
  misc_feature (1)..(25): SEQ ID NO: 3834; WAN024G3R_at; Start 298; Stop 322
cataatttatttgcagagtgtcaca

SEQ ID NO: 229918 - DNA, 25 bp, Artificial
  probe
  misc_feature (1)..(25): SEQ ID NO: 3834; WAN024G3R_at; Start 413; Stop 437
tcgaacattttgtagactacgctgc

SEQ ID NO: 229919 - DNA, 25 bp, Artificial
  probe
  misc_feature (1)..(25): SEQ ID NO: 3834; WAN024G3R_at; Start 1373; Stop 1397
ctcactggtacaagaaagtagcgga

SEQ ID NO: 229920 - DNA, 25 bp, Artificial
  probe
  misc_feature (1)..(25): SEQ ID NO: 3834; WAN024G3R_at; Start 351; Stop 375
tcatcactttgacacgccagaagct

SEQ ID NO: 229921 - DNA, 25 bp, Artificial
  probe
  misc_feature (1)..(25): SEQ ID NO: 3834; WAN024G3R_at; Start 576; Stop 600
ccacaatatgatggtgtctcatgca

SEQ ID NO: 229922 - DNA, 25 bp, Artificial
  probe
  misc_feature (1)..(25): SEQ ID NO: 3834; WAN024G3R_at; Start 1057; Stop 1081
taccctcaaggtttgtatgaccaaa

SEQ ID NO: 229923 - DNA, 25 bp, Artificial
  probe
  misc_feature (1)..(25): SEQ ID NO: 3834; WAN024G3R_at; Start 68; Stop 92
cagaaggtgctacacatactgatgg

SEQ ID NO: 229924 - DNA, 25 bp, Artificial
  probe
  misc_feature (1)..(25): SEQ ID NO: 3834; WAN024G3R_at; Start 1236; Stop 1260
tgcagatggagctaatgtaaaaggt

SEQ ID NO: 229925 - DNA, 25 bp, Artificial
  probe
  misc_feature (1)..(25): SEQ ID NO: 3834; WAN024G3R_at; Start 689; Stop 713
aaaatccagcagatgttcgtgcagc

SEQ ID NO: 229926 - DNA, 25 bp, Artificial
  probe
  misc_feature (1)..(25): SEQ ID NO: 3834; WAN024G3R_at; Start 1043; Stop 1067
gggattggattatctaccctcaagg

SEQ ID NO: 229927 - DNA, 25 bp, Artificial
  probe
  misc_feature (1)..(25): SEQ ID NO: 3834; WAN024G3R_at; Start 1003; Stop 1027
ggtcgtcgtgtagctcctgactatg

SEQ ID NO: 229928 - DNA, 25 bp, Artificial
  probe
  misc_feature (1)..(25): SEQ ID NO: 3834; WAN024G3R_at; Start 395; Stop 419
tcttaaaccgtgaaaatatcgaaca

SEQ ID NO: 229929 - DNA, 25 bp, Artificial
  probe
  misc_feature (1)..(25): SEQ ID NO: 3834; WAN024G3R_at; Start 641; Stop 665
aaattggtgttgttcacgccctgcc

SEQ ID NO: 229930 - DNA, 25 bp, Artificial
  probe
  misc_feature (1)..(25): SEQ ID NO: 3834; WAN024G3R_at; Start 1342; Stop 1366
gaaactcaagaacgttatcctaaga

SEQ ID NO: 229931 - DNA, 25 bp, Artificial
  probe
  misc_feature (1)..(25): SEQ ID NO: 5638; WAN024G3S_at; Start 166; Stop 190
cgctcattagtcaaaagggagttgg

SEQ ID NO: 229932 - DNA, 25 bp, Artificial
  probe
  misc_feature (1)..(25): SEQ ID NO: 5638; WAN024G3S_at; Start 93; Stop 117
tactagactgcctgcaaaatgggct

SEQ ID NO: 229933 - DNA, 25 bp, Artificial
  probe
  misc_feature (1)..(25): SEQ ID NO: 5638; WAN024G3S_at; Start 20; Stop 44
tgtcaataggcaactcacgcgcaaa

SEQ ID NO: 229934 - DNA, 25 bp, Artificial
  probe
  misc_feature (1)..(25): SEQ ID NO: 5638; WAN024G3S_at; Start 234; Stop 258
tttatcagctaattcctgtaaatag

SEQ ID NO: 229935 - DNA, 25 bp, Artificial
  probe
  misc_feature (1)..(25): SEQ ID NO: 5638; WAN024G3S_at; Start 101; Stop 125
tgcctgcaaaatgggctatttcttg

SEQ ID NO: 229936 - DNA, 25 bp, Artificial
  probe
  misc_feature (1)..(25): SEQ ID NO: 5638; WAN024G3S_at; Start 189; Stop 213
ggttcgaagtttttcagctccacca

SEQ ID NO: 229937 - DNA, 25 bp, Artificial
  probe
  misc_feature (1)..(25): SEQ ID NO: 5638; WAN024G3S_at; Start 98; Stop 122
gactgcctgcaaaatgggctatttc

SEQ ID NO: 229938 - DNA, 25 bp, Artificial
  probe
  misc_feature (1)..(25): SEQ ID NO: 5638; WAN024G3S_at; Start 154; Stop 178
tcaatatttgatcgctcattagtca

SEQ ID NO: 229939 - DNA, 25 bp, Artificial
  probe
  misc_feature (1)..(25): SEQ ID NO: 5638; WAN024G3S_at; Start 6; Stop 30
tacgacgcggatattgtcaataggc

SEQ ID NO: 229940 - DNA, 25 bp, Artificial
  probe
  misc_feature (1)..(25): SEQ ID NO: 5638; WAN024G3S_at; Start 212; Stop 236
catgcacacgaatcagcaaatcttt

SEQ ID NO: 229941 - DNA, 25 bp, Artificial
  probe
  misc_feature (1)..(25): SEQ ID NO: 5638; WAN024G3S_at; Start 75; Stop 99
aatagtttctctttcttctactaga

SEQ ID NO: 229942 - DNA, 25 bp, Artificial
  probe
  misc_feature (1)..(25): SEQ ID NO: 5638; WAN024G3S_at; Start 60; Stop 84
tcctggtccaatgaaaatagtttct

SEQ ID NO: 229943 - DNA, 25 bp, Artificial
  probe
  misc_feature (1)..(25): SEQ ID NO: 5638; WAN024G3S_at; Start 184; Stop 208
gagttggttcgaagtttttcagctc

SEQ ID NO: 229944 - DNA, 25 bp, Artificial
  probe
  misc_feature (1)..(25): SEQ ID NO: 5638; WAN024G3S_at; Start 218; Stop 242
cacgaatcagcaaatctttatcagc

SEQ ID NO: 229945 - DNA, 25 bp, Artificial
  probe
  misc_feature (1)..(25): SEQ ID NO: 5638; WAN024G3S_at; Start 110; Stop 134
aatgggctatttcttgtttttctgc

SEQ ID NO: 229946 - DNA, 25 bp, Artificial
  probe
  misc_feature (1)..(25): SEQ ID NO: 5638; WAN024G3S_at; Start 29; Stop 53
gcaactcacgcgcaaaaaactctaa

SEQ ID NO: 229947 - DNA, 25 bp, Artificial
  probe
  misc_feature (1)..(25): SEQ ID NO: 5638; WAN024G3S_at; Start 193; Stop 217
cgaagtttttcagctccaccatgca

SEQ ID NO: 229948 - DNA, 25 bp, Artificial
  probe
  misc_feature (1)..(25): SEQ ID NO: 5638; WAN024G3S_at; Start 116; Stop 140
ctatttcttgtttttctgccgtttg

SEQ ID NO: 229949 - DNA, 25 bp, Artificial
  probe
  misc_feature (1)..(25): SEQ ID NO: 5638; WAN024G3S_at; Start 207; Stop 231
tccaccatgcacacgaatcagcaaa

SEQ ID NO: 229950 - DNA, 25 bp, Artificial
  probe
  misc_feature (1)..(25): SEQ ID NO: 5638; WAN024G3S_at; Start 34; Stop 58
tcacgcgcaaaaaactctaatgttg

SEQ ID NO: 229951 - DNA, 25 bp, Artificial
  probe
  misc_feature (1)..(25): SEQ ID NO: 5638; WAN024G3S_at; Start 15; Stop 39
gatattgtcaataggcaactcacgc

SEQ ID NO: 229952 - DNA, 25 bp, Artificial
  probe
  misc_feature (1)..(25): SEQ ID NO: 5638; WAN024G3S_at; Start 200; Stop 224
tttcagctccaccatgcacacgaat

SEQ ID NO: 229953 - DNA, 25 bp, Artificial
  probe
  misc_feature (1)..(25): SEQ ID NO: 5638; WAN024G3S_at; Start 140; Stop 164
ggagggcttgtttttcaatatttga

SEQ ID NO: 229954 - DNA, 25 bp, Artificial
  probe
  misc_feature (1)..(25): SEQ ID NO: 5638; WAN024G3S_at; Start 51; Stop 75
taatgttgttcctggtccaatgaaa

SEQ ID NO: 229955 - DNA, 25 bp, Artificial
  probe
  misc_feature (1)..(25): SEQ ID NO: 5638; WAN024G3S_at; Start 23; Stop 47
caataggcaactcacgcgcaaaaaa

SEQ ID NO: 229956 - DNA, 25 bp, Artificial
  probe
  misc_feature (1)..(25): SEQ ID NO: 5638; WAN024G3S_at; Start 46; Stop 70
aactctaatgttgttcctggtccaa

SEQ ID NO: 229957 - DNA, 25 bp, Artificial
  probe
  misc_feature (1)..(25): SEQ ID NO: 5638; WAN024G3S_at; Start 9; Stop 33
gacgcggatattgtcaataggcaac

SEQ ID NO: 229958 - DNA, 25 bp, Artificial
  probe
  misc_feature (1)..(25): SEQ ID NO: 5638; WAN024G3S_at; Start 3; Stop 27
ggttacgacgcggatattgtcaata

SEQ ID NO: 229959 - DNA, 25 bp, Artificial
  probe
  misc_feature (1)..(25): SEQ ID NO: 5638; WAN024G3S_at; Start 197; Stop 221
gtttttcagctccaccatgcacacg

SEQ ID NO: 229960 - DNA, 25 bp, Artificial
  probe
  misc_feature (1)..(25): SEQ ID NO: 5638; WAN024G3S_at; Start 41; Stop 65
caaaaaactctaatgttgttcctgg

SEQ ID NO: 229961 - DNA, 25 bp, Artificial
  probe
  misc_feature (1)..(25): SEQ ID NO: 5638; WAN024G3S_at; Start 84; Stop 108
tctttcttctactagactgcctgca

SEQ ID NO: 229962 - DNA, 25 bp, Artificial
  probe
  misc_feature (1)..(25): SEQ ID NO: 5638; WAN024G3S_at; Start 162; Stop 186
tgatcgctcattagtcaaaagggag

SEQ ID NO: 229963 - DNA, 25 bp, Artificial
  probe
  misc_feature (1)..(25): SEQ ID NO: 5638; WAN024G3S_at; Start 225; Stop 249
cagcaaatctttatcagctaattcc

SEQ ID NO: 229964 - DNA, 25 bp, Artificial
  probe
  misc_feature (1)..(25): SEQ ID NO: 5638; WAN024G3S_at; Start 170; Stop 194
cattagtcaaaagggagttggttcg

SEQ ID NO: 229965 - DNA, 25 bp, Artificial
  probe
  misc_feature (1)..(25): SEQ ID NO: 5637; WAN024G3T_at; Start 61; Stop 85
aaactagctcatcattcaaatacaa

SEQ ID NO: 229966 - DNA, 25 bp, Artificial
  probe
  misc_feature (1)..(25): SEQ ID NO: 5637; WAN024G3T_at; Start 19; Stop 43
ttgagcatattatcacctcgtttcc

SEQ ID NO: 229967 - DNA, 25 bp, Artificial
  probe
  misc_feature (1)..(25): SEQ ID NO: 5637; WAN024G3T_at; Start 50; Stop 74
tatcttaccataaactagctcatca

SEQ ID NO: 229968 - DNA, 25 bp, Artificial
  probe
  misc_feature (1)..(25): SEQ ID NO: 5637; WAN024G3T_at; Start 52; Stop 76
tcttaccataaactagctcatcatt

SEQ ID NO: 229969 - DNA, 25 bp, Artificial
  probe
  misc_feature (1)..(25): SEQ ID NO: 5637; WAN024G3T_at; Start 35; Stop 59
ctcgtttcctactactatcttacca

SEQ ID NO: 229970 - DNA, 25 bp, Artificial
  probe
  misc_feature (1)..(25): SEQ ID NO: 5637; WAN024G3T_at; Start 53; Stop 77
cttaccataaactagctcatcattc

SEQ ID NO: 229971 - DNA, 25 bp, Artificial
  probe
  misc_feature (1)..(25): SEQ ID NO: 5637; WAN024G3T_at; Start 32; Stop 56
cacctcgtttcctactactatctta

SEQ ID NO: 229972 - DNA, 25 bp, Artificial
  probe
  misc_feature (1)..(25): SEQ ID NO: 5637; WAN024G3T_at; Start 65; Stop 89
tagctcatcattcaaatacaaaaac

SEQ ID NO: 229973 - DNA, 25 bp, Artificial
  probe
  misc_feature (1)..(25): SEQ ID NO: 5637; WAN024G3T_at; Start 16; Stop 40
tgtttgagcatattatcacctcgtt

SEQ ID NO: 229974 - DNA, 25 bp, Artificial
  probe
  misc_feature (1)..(25): SEQ ID NO: 5637; WAN024G3T_at; Start 58; Stop 82
cataaactagctcatcattcaaata

SEQ ID NO: 229975 - DNA, 25 bp, Artificial
  probe
  misc_feature (1)..(25): SEQ ID NO: 5637; WAN024G3T_at; Start 67; Stop 91
gctcatcattcaaatacaaaaacaa

SEQ ID NO: 229976 - DNA, 25 bp, Artificial
  probe
  misc_feature (1)..(25): SEQ ID NO: 5637; WAN024G3T_at; Start 47; Stop 71
tactatcttaccataaactagctca

SEQ ID NO: 229977 - DNA, 25 bp, Artificial
  probe
  misc_feature (1)..(25): SEQ ID NO: 5637; WAN024G3T_at; Start 15; Stop 39
ttgtttgagcatattatcacctcgt

SEQ ID NO: 229978 - DNA, 25 bp, Artificial
  probe
  misc_feature (1)..(25): SEQ ID NO: 5637; WAN024G3T_at; Start 3; Stop 27
ggttaatttttcttgtttgagcata

SEQ ID NO: 229979 - DNA, 25 bp, Artificial
  probe
  misc_feature (1)..(25): SEQ ID NO: 5637; WAN024G3T_at; Start 37; Stop 61
cgtttcctactactatcttaccata

SEQ ID NO: 229980 - DNA, 25 bp, Artificial
  probe
  misc_feature (1)..(25): SEQ ID NO: 5637; WAN024G3T_at; Start 22; Stop 46
agcatattatcacctcgtttcctac

SEQ ID NO: 229981 - DNA, 25 bp, Artificial
  probe
  misc_feature (1)..(25): SEQ ID NO: 5637; WAN024G3T_at; Start 13; Stop 37
tcttgtttgagcatattatcacctc

SEQ ID NO: 229982 - DNA, 25 bp, Artificial
  probe
  misc_feature (1)..(25): SEQ ID NO: 5637; WAN024G3T_at; Start 23; Stop 47
gcatattatcacctcgtttcctact

SEQ ID NO: 229983 - DNA, 25 bp, Artificial
  probe
  misc_feature (1)..(25): SEQ ID NO: 5637; WAN024G3T_at; Start 38; Stop 62
gtttcctactactatcttaccataa

SEQ ID NO: 229984 - DNA, 25 bp, Artificial
  probe
  misc_feature (1)..(25): SEQ ID NO: 5637; WAN024G3T_at; Start 24; Stop 48
catattatcacctcgtttcctacta

SEQ ID NO: 229985 - DNA, 25 bp, Artificial
  probe
  misc_feature (1)..(25): SEQ ID NO: 5637; WAN024G3T_at; Start 44; Stop 68
tactactatcttaccataaactagc

SEQ ID NO: 229986 - DNA, 25 bp, Artificial
  probe
  misc_feature (1)..(25): SEQ ID NO: 5637; WAN024G3T_at; Start 72; Stop 96
tcattcaaatacaaaaacaacaaaa

SEQ ID NO: 229987 - DNA, 25 bp, Artificial
  probe
  misc_feature (1)..(25): SEQ ID NO: 5637; WAN024G3T_at; Start 21; Stop 45
gagcatattatcacctcgtttccta

SEQ ID NO: 229988 - DNA, 25 bp, Artificial
  probe
  misc_feature (1)..(25): SEQ ID NO: 5637; WAN024G3T_at; Start 17; Stop 41
gtttgagcatattatcacctcgttt

SEQ ID NO: 229989 - DNA, 25 bp, Artificial
  probe
  misc_feature (1)..(25): SEQ ID NO: 5637; WAN024G3T_at; Start 70; Stop 94
catcattcaaatacaaaaacaacaa

SEQ ID NO: 229990 - DNA, 25 bp, Artificial
  probe
  misc_feature (1)..(25): SEQ ID NO: 5637; WAN024G3T_at; Start 56; Stop 80
accataaactagctcatcattcaaa

SEQ ID NO: 229991 - DNA, 25 bp, Artificial
  probe
  misc_feature (1)..(25): SEQ ID NO: 5637; WAN024G3T_at; Start 26; Stop 50
tattatcacctcgtttcctactact

SEQ ID NO: 229992 - DNA, 25 bp, Artificial
  probe
  misc_feature (1)..(25): SEQ ID NO: 5637; WAN024G3T_at; Start 62; Stop 86
aactagctcatcattcaaatacaaa

SEQ ID NO: 229993 - DNA, 25 bp, Artificial
  probe
  misc_feature (1)..(25): SEQ ID NO: 5637; WAN024G3T_at; Start 11; Stop 35
tttcttgtttgagcatattatcacc

SEQ ID NO: 229994 - DNA, 25 bp, Artificial
  probe
  misc_feature (1)..(25): SEQ ID NO: 5637; WAN024G3T_at; Start 55; Stop 79
taccataaactagctcatcattcaa

SEQ ID NO: 229995 - DNA, 25 bp, Artificial
  probe
  misc_feature (1)..(25): SEQ ID NO: 5637; WAN024G3T_at; Start 14; Stop 38
cttgtttgagcatattatcacctcg

SEQ ID NO: 229996 - DNA, 25 bp, Artificial
  probe
  misc_feature (1)..(25): SEQ ID NO: 5637; WAN024G3T_at; Start 20; Stop 44
tgagcatattatcacctcgtttcct

SEQ ID NO: 229997 - DNA, 25 bp, Artificial
  probe
  misc_feature (1)..(25): SEQ ID NO: 5637; WAN024G3T_at; Start 29; Stop 53
tatcacctcgtttcctactactatc

SEQ ID NO: 229998 - DNA, 25 bp, Artificial
  probe
  misc_feature (1)..(25): SEQ ID NO: 5637; WAN024G3T_at; Start 60; Stop 84
taaactagctcatcattcaaataca

SEQ ID NO: 229999 - DNA, 25 bp, Artificial
  probe
  misc_feature (1)..(25): SEQ ID NO: 111; WAN024G3U_at; Start 523; Stop 547
aaagctttcgttagctgtaatggta

SEQ ID NO: 230000 - DNA, 25 bp, Artificial
  probe
  misc_feature (1)..(25): SEQ ID NO: 111; WAN024G3U_at; Start 374; Stop 398
gcgtcgtaaccaacagtctacctgt

SEQ ID NO: 230001 - DNA, 25 bp, Artificial
  probe
  misc_feature (1)..(25): SEQ ID NO: 111; WAN024G3U_at; Start 273; Stop 297
ccattttgcaggcagtctagtagaa

SEQ ID NO: 230002 - DNA, 25 bp, Artificial
  probe
  misc_feature (1)..(25): SEQ ID NO: 111; WAN024G3U_at; Start 623; Stop 647
aaaaatatttactcgcagatcatag

SEQ ID NO: 230003 - DNA, 25 bp, Artificial
  probe
  misc_feature (1)..(25): SEQ ID NO: 111; WAN024G3U_at; Start 49; Stop 73
gagatagtaaatagtaaaggaacca

SEQ ID NO: 230004 - DNA, 25 bp, Artificial
  probe
  misc_feature (1)..(25): SEQ ID NO: 111; WAN024G3U_at; Start 360; Stop 384
tattgacaatatccgcgtcgtaacc

SEQ ID NO: 230005 - DNA, 25 bp, Artificial
  probe
  misc_feature (1)..(25): SEQ ID NO: 111; WAN024G3U_at; Start 709; Stop 733
tcagattctaaactaagtgattcaa

SEQ ID NO: 230006 - DNA, 25 bp, Artificial
  probe
  misc_feature (1)..(25): SEQ ID NO: 111; WAN024G3U_at; Start 345; Stop 369
tgcgcgtgagttgcctattgacaat

SEQ ID NO: 230007 - DNA, 25 bp, Artificial
  probe
  misc_feature (1)..(25): SEQ ID NO: 111; WAN024G3U_at; Start 175; Stop 199
ggtggagctgaaaaacttcgaacca

SEQ ID NO: 230008 - DNA, 25 bp, Artificial
  probe
  misc_feature (1)..(25): SEQ ID NO: 111; WAN024G3U_at; Start 223; Stop 247
tcaaatattgaaaaacaagccctcc

SEQ ID NO: 230009 - DNA, 25 bp, Artificial
  probe
  misc_feature (1)..(25): SEQ ID NO: 111; WAN024G3U_at; Start 330; Stop 354
aacattagagttttttgcgcgtgag

SEQ ID NO: 230010 - DNA, 25 bp, Artificial
  probe
  misc_feature (1)..(25): SEQ ID NO: 111; WAN024G3U_at; Start 121; Stop 145
gcaaggcgctatttacaggaattag

SEQ ID NO: 230011 - DNA, 25 bp, Artificial
  probe
  misc_feature (1)..(25): SEQ ID NO: 111; WAN024G3U_at; Start 591; Stop 615
ggctcaacgcatcgctttaaataat

SEQ ID NO: 230012 - DNA, 25 bp, Artificial
  probe
  misc_feature (1)..(25): SEQ ID NO: 111; WAN024G3U_at; Start 4; Stop 28
cgaggtgataatatgctcaaacaag

SEQ ID NO: 230013 - DNA, 25 bp, Artificial
  probe
  misc_feature (1)..(25): SEQ ID NO: 111; WAN024G3U_at; Start 302; Stop 326
gagaaactattttcattggaccagg

SEQ ID NO: 230014 - DNA, 25 bp, Artificial
  probe
  misc_feature (1)..(25): SEQ ID NO: 111; WAN024G3U_at; Start 108; Stop 132
ttcagatatgactgcaaggcgctat

SEQ ID NO: 230015 - DNA, 25 bp, Artificial
  probe
  misc_feature (1)..(25): SEQ ID NO: 111; WAN024G3U_at; Start 538; Stop 562
tgtaatggtattcaaaacggagctc

SEQ ID NO: 230016 - DNA, 25 bp, Artificial
  probe
  misc_feature (1)..(25): SEQ ID NO: 111; WAN024G3U_at; Start 96; Stop 120
cgaaatagccgtttcagatatgact

SEQ ID NO: 230017 - DNA, 25 bp, Artificial
  probe
  misc_feature (1)..(25): SEQ ID NO: 111; WAN024G3U_at; Start 553; Stop 577
aacggagctctagctacttttagcg

SEQ ID NO: 230018 - DNA, 25 bp, Artificial
  probe
  misc_feature (1)..(25): SEQ ID NO: 111; WAN024G3U_at; Start 585; Stop 609
gggagaggctcaacgcatcgcttta

SEQ ID NO: 230019 - DNA, 25 bp, Artificial
  probe
  misc_feature (1)..(25): SEQ ID NO: 111; WAN024G3U_at; Start 454; Stop 478
tatcgcgatattacaggtgcttttg

SEQ ID NO: 230020 - DNA, 25 bp, Artificial
  probe
  misc_feature (1)..(25): SEQ ID NO: 111; WAN024G3U_at; Start 262; Stop 286
caagaaatagcccattttgcaggca

SEQ ID NO: 230021 - DNA, 25 bp, Artificial
  probe
  misc_feature (1)..(25): SEQ ID NO: 111; WAN024G3U_at; Start 152; Stop 176
aagatttgctgattcgtgtgcatgg

SEQ ID NO: 230022 - DNA, 25 bp, Artificial
  probe
  misc_feature (1)..(25): SEQ ID NO: 111; WAN024G3U_at; Start 65; Stop 89
aaggaaccataacagttaaacagat

SEQ ID NO: 230023 - DNA, 25 bp, Artificial
  probe
  misc_feature (1)..(25): SEQ ID NO: 111; WAN024G3U_at; Start 194; Stop 218
gaaccaactcccttttgactaatga

SEQ ID NO: 230024 - DNA, 25 bp, Artificial
  probe
  misc_feature (1)..(25): SEQ ID NO: 111; WAN024G3U_at; Start 750; Stop 774
taaacacattaaagtcatcaagcct

SEQ ID NO: 230025 - DNA, 25 bp, Artificial
  probe
  misc_feature (1)..(25): SEQ ID NO: 111; WAN024G3U_at; Start 566; Stop 590
ctacttttagcgaggaagagggaga

SEQ ID NO: 230026 - DNA, 25 bp, Artificial
  probe
  misc_feature (1)..(25): SEQ ID NO: 111; WAN024G3U_at; Start 81; Stop 105
taaacagattatggacgaaatagcc

SEQ ID NO: 230027 - DNA, 25 bp, Artificial
  probe
  misc_feature (1)..(25): SEQ ID NO: 111; WAN024G3U_at; Start 315; Stop 339
cattggaccaggaacaacattagag

SEQ ID NO: 230028 - DNA, 25 bp, Artificial
  probe
  misc_feature (1)..(25): SEQ ID NO: 111; WAN024G3U_at; Start 136; Stop 160
caggaattagctgataaagatttgc

SEQ ID NO: 230029 - DNA, 25 bp, Artificial
  probe
  misc_feature (1)..(25): SEQ ID NO: 111; WAN024G3U_at; Start 508; Stop 532
aatctccaattttctaaagctttcg

SEQ ID NO: 230030 - DNA, 25 bp, Artificial
  probe
  misc_feature (1)..(25): SEQ ID NO: 111; WAN024G3U_at; Start 413; Stop 437
gcgaacgaaaattaacagatttgat

SEQ ID NO: 230031 - DNA, 25 bp, Artificial
  probe
  misc_feature (1)..(25): SEQ ID NO: 111; WAN024G3U_at; Start 210; Stop 234
gactaatgagcgatcaaatattgaa

SEQ ID NO: 230032 - DNA, 25 bp, Artificial
  probe
  misc_feature (1)..(25): SEQ ID NO: 111; WAN024G3U_at; Start 485; Stop 509
cattgaccctacaaaatctctctaa

SEQ ID NO: 230033 - DNA, 25 bp, Artificial
  probe
  misc_feature (1)..(25): SEQ ID NO: 4299; WAN024G3V_at; Start 57; Stop 81
cagaagtgtagtaaggaatggtttc

SEQ ID NO: 230034 - DNA, 25 bp, Artificial
  probe
  misc_feature (1)..(25): SEQ ID NO: 4299; WAN024G3V_at; Start 81; Stop 105
ctgtagacaagccagcagcagggta

SEQ ID NO: 230035 - DNA, 25 bp, Artificial
  probe
  misc_feature (1)..(25): SEQ ID NO: 4299; WAN024G3V_at; Start 46; Stop 70
catatcgtaggcagaagtgtagtaa

SEQ ID NO: 230036 - DNA, 25 bp, Artificial
  probe
  misc_feature (1)..(25): SEQ ID NO: 4299; WAN024G3V_at; Start 265; Stop 289
ttcagcccaatcagcaacaccaggg

SEQ ID NO: 230037 - DNA, 25 bp, Artificial
  probe
  misc_feature (1)..(25): SEQ ID NO: 4299; WAN024G3V_at; Start 161; Stop 185
tggatagaagcagaaacgtcgttga

SEQ ID NO: 230038 - DNA, 25 bp, Artificial
  probe
  misc_feature (1)..(25): SEQ ID NO: 4299; WAN024G3V_at; Start 269; Stop 293
gcccaatcagcaacaccagggataa

SEQ ID NO: 230039 - DNA, 25 bp, Artificial
  probe
  misc_feature (1)..(25): SEQ ID NO: 4299; WAN024G3V_at; Start 227; Stop 251
tggtggtaaagaccatcttcttgaa

SEQ ID NO: 230040 - DNA, 25 bp, Artificial
  probe
  misc_feature (1)..(25): SEQ ID NO: 4299; WAN024G3V_at; Start 11; Stop 35
gcagcagcgtaaacatcgatgactt

SEQ ID NO: 230041 - DNA, 25 bp, Artificial
  probe
  misc_feature (1)..(25): SEQ ID NO: 4299; WAN024G3V_at; Start 249; Stop 273
gaaccttgtcgcgaagttcagccca

SEQ ID NO: 230042 - DNA, 25 bp, Artificial
  probe
  misc_feature (1)..(25): SEQ ID NO: 4299; WAN024G3V_at; Start 128; Stop 152
tcttggcgttcttcgatacgttgcg

SEQ ID NO: 230043 - DNA, 25 bp, Artificial
  probe
  misc_feature (1)..(25): SEQ ID NO: 4299; WAN024G3V_at; Start 156; Stop 180
tcgggtggatagaagcagaaacgtc

SEQ ID NO: 230044 - DNA, 25 bp, Artificial
  probe
  misc_feature (1)..(25): SEQ ID NO: 4299; WAN024G3V_at; Start 173; Stop 197
gaaacgtcgttgatatagctgatag

SEQ ID NO: 230045 - DNA, 25 bp, Artificial
  probe
  misc_feature (1)..(25): SEQ ID NO: 4299; WAN024G3V_at; Start 132; Stop 156
ggcgttcttcgatacgttgcgtaat

SEQ ID NO: 230046 - DNA, 25 bp, Artificial
  probe
  misc_feature (1)..(25): SEQ ID NO: 4299; WAN024G3V_at; Start 237; Stop 261
gaccatcttcttgaaccttgtcgcg

SEQ ID NO: 230047 - DNA, 25 bp, Artificial
  probe
  misc_feature (1)..(25): SEQ ID NO: 4299; WAN024G3V_at; Start 114; Stop 138
taccaattttcttctcttggcgttc

SEQ ID NO: 230048 - DNA, 25 bp, Artificial
  probe
  misc_feature (1)..(25): SEQ ID NO: 4299; WAN024G3V_at; Start 5; Stop 29
tcagtcgcagcagcgtaaacatcga

SEQ ID NO: 230049 - DNA, 25 bp, Artificial
  probe
  misc_feature (1)..(25): SEQ ID NO: 4299; WAN024G3V_at; Start 279; Stop 303
caacaccagggataaagacattttt

SEQ ID NO: 230050 - DNA, 25 bp, Artificial
  probe
  misc_feature (1)..(25): SEQ ID NO: 4299; WAN024G3V_at; Start 1; Stop 25
gtgttcagtcgcagcagcgtaaaca

SEQ ID NO: 230051 - DNA, 25 bp, Artificial
  probe
  misc_feature (1)..(25): SEQ ID NO: 4299; WAN024G3V_at; Start 186; Stop 210
tatagctgatagaaccatttggcgc

SEQ ID NO: 230052 - DNA, 25 bp, Artificial
  probe
  misc_feature (1)..(25): SEQ ID NO: 4299; WAN024G3V_at; Start 255; Stop 279
tgtcgcgaagttcagcccaatcagc

SEQ ID NO: 230053 - DNA, 25 bp, Artificial
  probe
  misc_feature (1)..(25): SEQ ID NO: 4299; WAN024G3V_at; Start 68; Stop 92
taaggaatggtttctgtagacaagc

SEQ ID NO: 230054 - DNA, 25 bp, Artificial
  probe
  misc_feature (1)..(25): SEQ ID NO: 4299; WAN024G3V_at; Start 220; Stop 244
gcgattttggtggtaaagaccatct

SEQ ID NO: 230055 - DNA, 25 bp, Artificial
  probe
  misc_feature (1)..(25): SEQ ID NO: 4299; WAN024G3V_at; Start 20; Stop 44
taaacatcgatgactttacgcatat

SEQ ID NO: 230056 - DNA, 25 bp, Artificial
  probe
  misc_feature (1)..(25): SEQ ID NO: 4299; WAN024G3V_at; Start 275; Stop 299
tcagcaacaccagggataaagacat

SEQ ID NO: 230057 - DNA, 25 bp, Artificial
  probe
  misc_feature (1)..(25): SEQ ID NO: 4299; WAN024G3V_at; Start 76; Stop 100
ggtttctgtagacaagccagcagca

SEQ ID NO: 230058 - DNA, 25 bp, Artificial
  probe
  misc_feature (1)..(25): SEQ ID NO: 4299; WAN024G3V_at; Start 213; Stop 237
cagcaaggcgattttggtggtaaag

SEQ ID NO: 230059 - DNA, 25 bp, Artificial
  probe
  misc_feature (1)..(25): SEQ ID NO: 4299; WAN024G3V_at; Start 38; Stop 62
cgcatatccatatcgtaggcagaag

SEQ ID NO: 230060 - DNA, 25 bp, Artificial
  probe
  misc_feature (1)..(25): SEQ ID NO: 4299; WAN024G3V_at; Start 288; Stop 312
ggataaagacatttttgaagagttc

SEQ ID NO: 230061 - DNA, 25 bp, Artificial
  probe
  misc_feature (1)..(25): SEQ ID NO: 4299; WAN024G3V_at; Start 204; Stop 228
ttggcgctacagcaaggcgattttg

SEQ ID NO: 230062 - DNA, 25 bp, Artificial
  probe
  misc_feature (1)..(25): SEQ ID NO: 4299; WAN024G3V_at; Start 303; Stop 327
tgaagagttctttaacacggtctga

SEQ ID NO: 230063 - DNA, 25 bp, Artificial
  probe
  misc_feature (1)..(25): SEQ ID NO: 4299; WAN024G3V_at; Start 200; Stop 224
ccatttggcgctacagcaaggcgat

SEQ ID NO: 230064 - DNA, 25 bp, Artificial
  probe
  misc_feature (1)..(25): SEQ ID NO: 4299; WAN024G3V_at; Start 193; Stop 217
gatagaaccatttggcgctacagca

SEQ ID NO: 230065 - DNA, 25 bp, Artificial
  probe
  misc_feature (1)..(25): SEQ ID NO: 4299; WAN024G3V_at; Start 142; Stop 166
gatacgttgcgtaatcgggtggata

SEQ ID NO: 230066 - DNA, 25 bp, Artificial
  probe
  misc_feature (1)..(25): SEQ ID NO: 4299; WAN024G3V_at; Start 28; Stop 52
gatgactttacgcatatccatatcg

SEQ ID NO: 230067 - DNA, 25 bp, Artificial
  probe
  misc_feature (1)..(25): SEQ ID NO: 4961; WAN024G3W_at; Start 281; Stop 305
tctacagagtaagggctgaagaggt

SEQ ID NO: 230068 - DNA, 25 bp, Artificial
  probe
  misc_feature (1)..(25): SEQ ID NO: 4961; WAN024G3W_at; Start 263; Stop 287
ggcacaccgtattctttttctacag

SEQ ID NO: 230069 - DNA, 25 bp, Artificial
  probe
  misc_feature (1)..(25): SEQ ID NO: 4961; WAN024G3W_at; Start 246; Stop 270
tgtcgatgtaattgaatggcacacc

SEQ ID NO: 230070 - DNA, 25 bp, Artificial
  probe
  misc_feature (1)..(25): SEQ ID NO: 4961; WAN024G3W_at; Start 131; Stop 155
taaggatagccagactcttgttgca

SEQ ID NO: 230071 - DNA, 25 bp, Artificial
  probe
  misc_feature (1)..(25): SEQ ID NO: 4961; WAN024G3W_at; Start 59; Stop 83
gaacacaagttactcatgataatct

SEQ ID NO: 230072 - DNA, 25 bp, Artificial
  probe
  misc_feature (1)..(25): SEQ ID NO: 4961; WAN024G3W_at; Start 117; Stop 141
cgatgttgactacataaggatagcc

SEQ ID NO: 230073 - DNA, 25 bp, Artificial
  probe
  misc_feature (1)..(25): SEQ ID NO: 4961; WAN024G3W_at; Start 250; Stop 274
gatgtaattgaatggcacaccgtat

SEQ ID NO: 230074 - DNA, 25 bp, Artificial
  probe
  misc_feature (1)..(25): SEQ ID NO: 4961; WAN024G3W_at; Start 73; Stop 97
catgataatctttccatcaacagga

SEQ ID NO: 230075 - DNA, 25 bp, Artificial
  probe
  misc_feature (1)..(25): SEQ ID NO: 4961; WAN024G3W_at; Start 124; Stop 148
gactacataaggatagccagactct

SEQ ID NO: 230076 - DNA, 25 bp, Artificial
  probe
  misc_feature (1)..(25): SEQ ID NO: 4961; WAN024G3W_at; Start 211; Stop 235
tggatttgcgaccaattcatcgtat

SEQ ID NO: 230077 - DNA, 25 bp, Artificial
  probe
  misc_feature (1)..(25): SEQ ID NO: 4961; WAN024G3W_at; Start 82; Stop 106
ctttccatcaacaggatttgcacgg

SEQ ID NO: 230078 - DNA, 25 bp, Artificial
  probe
  misc_feature (1)..(25): SEQ ID NO: 4961; WAN024G3W_at; Start 167; Stop 191
tcagtttccaaatcccgcgccttga

SEQ ID NO: 230079 - DNA, 25 bp, Artificial
  probe
  misc_feature (1)..(25): SEQ ID NO: 4961; WAN024G3W_at; Start 182; Stop 206
cgcgccttgatttttgtcttgcgaa

SEQ ID NO: 230080 - DNA, 25 bp, Artificial
  probe
  misc_feature (1)..(25): SEQ ID NO: 4961; WAN024G3W_at; Start 342; Stop 366
tatcaggtactacaacaccaagtga

SEQ ID NO: 230081 - DNA, 25 bp, Artificial
  probe
  misc_feature (1)..(25): SEQ ID NO: 4961; WAN024G3W_at; Start 161; Stop 185
gagatttcagtttccaaatcccgcg

SEQ ID NO: 230082 - DNA, 25 bp, Artificial
  probe
  misc_feature (1)..(25): SEQ ID NO: 4961; WAN024G3W_at; Start 272; Stop 296
tattctttttctacagagtaagggc

SEQ ID NO: 230083 - DNA, 25 bp, Artificial
  probe
  misc_feature (1)..(25): SEQ ID NO: 4961; WAN024G3W_at; Start 41; Stop 65
tgaacttgaagaatctcagaacaca

SEQ ID NO: 230084 - DNA, 25 bp, Artificial
  probe
  misc_feature (1)..(25): SEQ ID NO: 4961; WAN024G3W_at; Start 301; Stop 325
gaggtacatttcttcatttttacga

SEQ ID NO: 230085 - DNA, 25 bp, Artificial
  probe
  misc_feature (1)..(25): SEQ ID NO: 4961; WAN024G3W_at; Start 102; Stop 126
cacggttagccgtatcgatgttgac

SEQ ID NO: 230086 - DNA, 25 bp, Artificial
  probe
  misc_feature (1)..(25): SEQ ID NO: 4961; WAN024G3W_at; Start 337; Stop 361
gaatttatcaggtactacaacacca

SEQ ID NO: 230087 - DNA, 25 bp, Artificial
  probe
  misc_feature (1)..(25): SEQ ID NO: 4961; WAN024G3W_at; Start 106; Stop 130
gttagccgtatcgatgttgactaca

SEQ ID NO: 230088 - DNA, 25 bp, Artificial
  probe
  misc_feature (1)..(25): SEQ ID NO: 4961; WAN024G3W_at; Start 28; Stop 52
caagcttggttcttgaacttgaaga

SEQ ID NO: 230089 - DNA, 25 bp, Artificial
  probe
  misc_feature (1)..(25): SEQ ID NO: 4961; WAN024G3W_at; Start 89; Stop 113
tcaacaggatttgcacggttagccg

SEQ ID NO: 230090 - DNA, 25 bp, Artificial
  probe
  misc_feature (1)..(25): SEQ ID NO: 4961; WAN024G3W_at; Start 138; Stop 162
agccagactcttgttgcaatttaga

SEQ ID NO: 230091 - DNA, 25 bp, Artificial
  probe
  misc_feature (1)..(25): SEQ ID NO: 4961; WAN024G3W_at; Start 218; Stop 242
gcgaccaattcatcgtatttttcag

SEQ ID NO: 230092 - DNA, 25 bp, Artificial
  probe
  misc_feature (1)..(25): SEQ ID NO: 4961; WAN024G3W_at; Start 51; Stop 75
gaatctcagaacacaagttactcat

SEQ ID NO: 230093 - DNA, 25 bp, Artificial
  probe
  misc_feature (1)..(25): SEQ ID NO: 4961; WAN024G3W_at; Start 153; Stop 177
gcaatttagagatttcagtttccaa

SEQ ID NO: 230094 - DNA, 25 bp, Artificial
  probe
  misc_feature (1)..(25): SEQ ID NO: 4961; WAN024G3W_at; Start 324; Stop 348
gagccaattcgtagaatttatcagg

SEQ ID NO: 230095 - DNA, 25 bp, Artificial
  probe
  misc_feature (1)..(25): SEQ ID NO: 4961; WAN024G3W_at; Start 15; Stop 39
gagcatcgttgatcaagcttggttc

SEQ ID NO: 230096 - DNA, 25 bp, Artificial
  probe
  misc_feature (1)..(25): SEQ ID NO: 4961; WAN024G3W_at; Start 289; Stop 313
gtaagggctgaagaggtacatttct

SEQ ID NO: 230097 - DNA, 25 bp, Artificial
  probe
  misc_feature (1)..(25): SEQ ID NO: 4961; WAN024G3W_at; Start 310; Stop 334
ttcttcatttttacgagccaattcg

SEQ ID NO: 230098 - DNA, 25 bp, Artificial
  probe
  misc_feature (1)..(25): SEQ ID NO: 4961; WAN024G3W_at; Start 231; Stop 255
cgtatttttcagtaatgtcgatgta

SEQ ID NO: 230099 - DNA, 25 bp, Artificial
  probe
  misc_feature (1)..(25): SEQ ID NO: 4961; WAN024G3W_at; Start 199; Stop 223
cttgcgaatatttggatttgcgacc

SEQ ID NO: 230100 - DNA, 25 bp, Artificial
  probe
  misc_feature (1)..(25): SEQ ID NO: 4961; WAN024G3W_at; Start 3; Stop 27
gaaggaattcttgagcatcgttgat

SEQ ID NO: 230101 - DNA, 25 bp, Artificial
  probe
  misc_feature (1)..(25): SEQ ID NO: 2561; WAN024G3X_at; Start 1845; Stop 1869
tgctgctggcttgtctacagaaacc

SEQ ID NO: 230102 - DNA, 25 bp, Artificial
  probe
  misc_feature (1)..(25): SEQ ID NO: 2561; WAN024G3X_at; Start 642; Stop 666
tatcaaaggctatgaaggagctgct

SEQ ID NO: 230103 - DNA, 25 bp, Artificial
  probe
  misc_feature (1)..(25): SEQ ID NO: 2561; WAN024G3X_at; Start 1791; Stop 1815
tacgcaacgtatcgaagaacgccaa

SEQ ID NO: 230104 - DNA, 25 bp, Artificial
  probe
  misc_feature (1)..(25): SEQ ID NO: 2561; WAN024G3X_at; Start 1045; Stop 1069
tctaaattgcaacaagagtctggct

SEQ ID NO: 230105 - DNA, 25 bp, Artificial
  probe
  misc_feature (1)..(25): SEQ ID NO: 2561; WAN024G3X_at; Start 1392; Stop 1416
tgccatgggactgcacagctacctt

SEQ ID NO: 230106 - DNA, 25 bp, Artificial
  probe
  misc_feature (1)..(25): SEQ ID NO: 2561; WAN024G3X_at; Start 393; Stop 417
cgctgatgggaatgaagctgttgca

SEQ ID NO: 230107 - DNA, 25 bp, Artificial
  probe
  misc_feature (1)..(25): SEQ ID NO: 2561; WAN024G3X_at; Start 619; Stop 643
aaccttcgtgaagctggtgcaccta

SEQ ID NO: 230108 - DNA, 25 bp, Artificial
  probe
  misc_feature (1)..(25): SEQ ID NO: 2561; WAN024G3X_at; Start 1359; Stop 1383
tggaaatagccaagcccacaccttt

SEQ ID NO: 230109 - DNA, 25 bp, Artificial
  probe
  misc_feature (1)..(25): SEQ ID NO: 2561; WAN024G3X_at; Start 1603; Stop 1627
gaatttgttccaacatcagaccgtg

SEQ ID NO: 230110 - DNA, 25 bp, Artificial
  probe
  misc_feature (1)..(25): SEQ ID NO: 2561; WAN024G3X_at; Start 1199; Stop 1223
tccttcaaatgggaacagatgtttc

SEQ ID NO: 230111 - DNA, 25 bp, Artificial
  probe
  misc_feature (1)..(25): SEQ ID NO: 2561; WAN024G3X_at; Start 984; Stop 1008
ggtcgcaaatccaaatattcgcaag

SEQ ID NO: 230112 - DNA, 25 bp, Artificial
  probe
  misc_feature (1)..(25): SEQ ID NO: 2561; WAN024G3X_at; Start 2100; Stop 2124
tacctttacagatgacggtggagaa

SEQ ID NO: 230113 - DNA, 25 bp, Artificial
  probe
  misc_feature (1)..(25): SEQ ID NO: 2561; WAN024G3X_at; Start 1094; Stop 1118
cggctaaccgtgcaaatcctgttga

SEQ ID NO: 230114 - DNA, 25 bp, Artificial
  probe
  misc_feature (1)..(25): SEQ ID NO: 2561; WAN024G3X_at; Start 316; Stop 340
tatgccttaaagactaatgacggtg

SEQ ID NO: 230115 - DNA, 25 bp, Artificial
  probe
  misc_feature (1)..(25): SEQ ID NO: 2561; WAN024G3X_at; Start 210; Stop 234
tatcaagaaataccgtccagagttc

SEQ ID NO: 230116 - DNA, 25 bp, Artificial
  probe
  misc_feature (1)..(25): SEQ ID NO: 2561; WAN024G3X_at; Start 1717; Stop 1741
caaaatcgccttgctgtagcgccaa

SEQ ID NO: 230117 - DNA, 25 bp, Artificial
  probe
  misc_feature (1)..(25): SEQ ID NO: 2561; WAN024G3X_at; Start 2075; Stop 2099
gaatcaagtctatctactacgtccg

SEQ ID NO: 230118 - DNA, 25 bp, Artificial
  probe
  misc_feature (1)..(25): SEQ ID NO: 2561; WAN024G3X_at; Start 1476; Stop 1500
tatgcttatgaactactggaccttg

SEQ ID NO: 230119 - DNA, 25 bp, Artificial
  probe
  misc_feature (1)..(25): SEQ ID NO: 2561; WAN024G3X_at; Start 1282; Stop 1306
tctatccgtgctatggttcgtgccc

SEQ ID NO: 230120 - DNA, 25 bp, Artificial
  probe
  misc_feature (1)..(25): SEQ ID NO: 2561; WAN024G3X_at; Start 1005; Stop 1029
caagacaaaaatcaaggcgcgggat

SEQ ID NO: 230121 - DNA, 25 bp, Artificial
  probe
  misc_feature (1)..(25): SEQ ID NO: 2561; WAN024G3X_at; Start 1911; Stop 1935
agtcatcgatgtttacgctgctgcg

SEQ ID NO: 230122 - DNA, 25 bp, Artificial
  probe
  misc_feature (1)..(25): SEQ ID NO: 2561; WAN024G3X_at; Start 602; Stop 626
tgggaattaccctcagcaaccttcg

SEQ ID NO: 230123 - DNA, 25 bp, Artificial
  probe
  misc_feature (1)..(25): SEQ ID NO: 2561; WAN024G3X_at; Start 2122; Stop 2146
gaagtcggcgccaaccaatgtgaaa

SEQ ID NO: 230124 - DNA, 25 bp, Artificial
  probe
  misc_feature (1)..(25): SEQ ID NO: 2561; WAN024G3X_at; Start 1178; Stop 1202
tgatcaacgatgctcaagaattcct

SEQ ID NO: 230125 - DNA, 25 bp, Artificial
  probe
  misc_feature (1)..(25): SEQ ID NO: 2561; WAN024G3X_at; Start 1991; Stop 2015
caaaaggcctttacgaatggaagag

SEQ ID NO: 230126 - DNA, 25 bp, Artificial
  probe
  misc_feature (1)..(25): SEQ ID NO: 2561; WAN024G3X_at; Start 1241; Stop 1265
ccaacgtggttaacatgatgacttc

SEQ ID NO: 230127 - DNA, 25 bp, Artificial
  probe
  misc_feature (1)..(25): SEQ ID NO: 2561; WAN024G3X_at; Start 348; Stop 372
tcttgaaaatatggaagaccgtgtc

SEQ ID NO: 230128 - DNA, 25 bp, Artificial
  probe
  misc_feature (1)..(25): SEQ ID NO: 2561; WAN024G3X_at; Start 1489; Stop 1513
tactggaccttggtagagtcaaaca

SEQ ID NO: 230129 - DNA, 25 bp, Artificial
  probe
  misc_feature (1)..(25): SEQ ID NO: 2561; WAN024G3X_at; Start 524; Stop 548
tccaagtgacggatgatatgaactc

SEQ ID NO: 230130 - DNA, 25 bp, Artificial
  probe
  misc_feature (1)..(25): SEQ ID NO: 2561; WAN024G3X_at; Start 470; Stop 494
ccttcttgaatgctggacgtgctcg

SEQ ID NO: 230131 - DNA, 25 bp, Artificial
  probe
  misc_feature (1)..(25): SEQ ID NO: 2561; WAN024G3X_at; Start 1337; Stop 1361
tagctgtaccaacgattgaccatgg

SEQ ID NO: 230132 - DNA, 25 bp, Artificial
  probe
  misc_feature (1)..(25): SEQ ID NO: 2561; WAN024G3X_at; Start 656; Stop 680
aaggagctgcttcaggtgtcgttcc

SEQ ID NO: 230133 - DNA, 25 bp, Artificial
  probe
  misc_feature (1)..(25): SEQ ID NO: 2561; WAN024G3X_at; Start 1926; Stop 1950
cgctgctgcgactgaacacgtggat

SEQ ID NO: 230134 - DNA, 25 bp, Artificial
  probe
  misc_feature (1)..(25): SEQ ID NO: 2561; WAN024G3X_at; Start 1883; Stop 1907
cttctgcctacgatatggatatgcg

SEQ ID NO: 230135 - DNA, 25 bp, Artificial
  probe
  misc_feature (1)..(25): SEQ ID NO: 4869; WAN024G3Y_at; Start 1; Stop 25
ttgaaaaatggatttcctgacctca

SEQ ID NO: 230136 - DNA, 25 bp, Artificial
  probe
  misc_feature (1)..(25): SEQ ID NO: 4869; WAN024G3Y_at; Start 10; Stop 34
ggatttcctgacctcacaattgagt

SEQ ID NO: 230137 - DNA, 25 bp, Artificial
  probe
  misc_feature (1)..(25): SEQ ID NO: 4869; WAN024G3Y_at; Start 30; Stop 54
tgagtcttggtctcaattgtgcccc

SEQ ID NO: 230138 - DNA, 25 bp, Artificial
  probe
  misc_feature (1)..(25): SEQ ID NO: 4869; WAN024G3Y_at; Start 22; Stop 46
ctcacaattgagtcttggtctcaat

SEQ ID NO: 230139 - DNA, 25 bp, Artificial
  probe
  misc_feature (1)..(25): SEQ ID NO: 4869; WAN024G3Y_at; Start 18; Stop 42
tgacctcacaattgagtcttggtct

SEQ ID NO: 230140 - DNA, 25 bp, Artificial
  probe
  misc_feature (1)..(25): SEQ ID NO: 4869; WAN024G3Y_at; Start 20; Stop 44
acctcacaattgagtcttggtctca

SEQ ID NO: 230141 - DNA, 25 bp, Artificial
  probe
  misc_feature (1)..(25): SEQ ID NO: 4869; WAN024G3Y_at; Start 59; Stop 83
caatctacagattggcaatcacacc

SEQ ID NO: 230142 - DNA, 25 bp, Artificial
  probe
  misc_feature (1)..(25): SEQ ID NO: 4869; WAN024G3Y_at; Start 15; Stop 39
tcctgacctcacaattgagtcttgg

SEQ ID NO: 230143 - DNA, 25 bp, Artificial
  probe
  misc_feature (1)..(25): SEQ ID NO: 4869; WAN024G3Y_at; Start 9; Stop 33
tggatttcctgacctcacaattgag

SEQ ID NO: 230144 - DNA, 25 bp, Artificial
  probe
  misc_feature (1)..(25): SEQ ID NO: 4869; WAN024G3Y_at; Start 3; Stop 27
gaaaaatggatttcctgacctcaca

SEQ ID NO: 230145 - DNA, 25 bp, Artificial
  probe
  misc_feature (1)..(25): SEQ ID NO: 4869; WAN024G3Y_at; Start 47; Stop 71
tgtgccccttgccaatctacagatt

SEQ ID NO: 230146 - DNA, 25 bp, Artificial
  probe
  misc_feature (1)..(25): SEQ ID NO: 4869; WAN024G3Y_at; Start 33; Stop 57
gtcttggtctcaattgtgccccttg

SEQ ID NO: 230147 - DNA, 25 bp, Artificial
  probe
  misc_feature (1)..(25): SEQ ID NO: 4869; WAN024G3Y_at; Start 37; Stop 61
tggtctcaattgtgccccttgccaa

SEQ ID NO: 230148 - DNA, 25 bp, Artificial
  probe
  misc_feature (1)..(25): SEQ ID NO: 4869; WAN024G3Y_at; Start 4; Stop 28
aaaaatggatttcctgacctcacaa

SEQ ID NO: 230149 - DNA, 25 bp, Artificial
  probe
  misc_feature (1)..(25): SEQ ID NO: 4869; WAN024G3Y_at; Start 31; Stop 55
gagtcttggtctcaattgtgcccct

SEQ ID NO: 230150 - DNA, 25 bp, Artificial
  probe
  misc_feature (1)..(25): SEQ ID NO: 4869; WAN024G3Y_at; Start 48; Stop 72
gtgccccttgccaatctacagattg

SEQ ID NO: 230151 - DNA, 25 bp, Artificial
  probe
  misc_feature (1)..(25): SEQ ID NO: 4869; WAN024G3Y_at; Start 16; Stop 40
cctgacctcacaattgagtcttggt

SEQ ID NO: 230152 - DNA, 25 bp, Artificial
  probe
  misc_feature (1)..(25): SEQ ID NO: 4869; WAN024G3Y_at; Start 45; Stop 69
attgtgccccttgccaatctacaga

SEQ ID NO: 230153 - DNA, 25 bp, Artificial
  probe
  misc_feature (1)..(25): SEQ ID NO: 4869; WAN024G3Y_at; Start 13; Stop 37
tttcctgacctcacaattgagtctt

SEQ ID NO: 230154 - DNA, 25 bp, Artificial
  probe
  misc_feature (1)..(25): SEQ ID NO: 4869; WAN024G3Y_at; Start 60; Stop 84
aatctacagattggcaatcacacca

SEQ ID NO: 230155 - DNA, 25 bp, Artificial
  probe
  misc_feature (1)..(25): SEQ ID NO: 4869; WAN024G3Y_at; Start 64; Stop 88
tacagattggcaatcacaccacagc

SEQ ID NO: 230156 - DNA, 25 bp, Artificial
  probe
  misc_feature (1)..(25): SEQ ID NO: 4869; WAN024G3Y_at; Start 32; Stop 56
agtcttggtctcaattgtgcccctt

SEQ ID NO: 230157 - DNA, 25 bp, Artificial
  probe
  misc_feature (1)..(25): SEQ ID NO: 4869; WAN024G3Y_at; Start 62; Stop 86
tctacagattggcaatcacaccaca

SEQ ID NO: 230158 - DNA, 25 bp, Artificial
  probe
  misc_feature (1)..(25): SEQ ID NO: 4869; WAN024G3Y_at; Start 43; Stop 67
caattgtgccccttgccaatctaca

SEQ ID NO: 230159 - DNA, 25 bp, Artificial
  probe
  misc_feature (1)..(25): SEQ ID NO: 4869; WAN024G3Y_at; Start 44; Stop 68
aattgtgccccttgccaatctacag

SEQ ID NO: 230160 - DNA, 25 bp, Artificial
  probe
  misc_feature (1)..(25): SEQ ID NO: 4869; WAN024G3Y_at; Start 34; Stop 58
tcttggtctcaattgtgccccttgc

SEQ ID NO: 230161 - DNA, 25 bp, Artificial
  probe
  misc_feature (1)..(25): SEQ ID NO: 4869; WAN024G3Y_at; Start 65; Stop 89
acagattggcaatcacaccacagca

SEQ ID NO: 230162 - DNA, 25 bp, Artificial
  probe
  misc_feature (1)..(25): SEQ ID NO: 4869; WAN024G3Y_at; Start 7; Stop 31
aatggatttcctgacctcacaattg

SEQ ID NO: 230163 - DNA, 25 bp, Artificial
  probe
  misc_feature (1)..(25): SEQ ID NO: 4869; WAN024G3Y_at; Start 66; Stop 90
cagattggcaatcacaccacagcaa

SEQ ID NO: 230164 - DNA, 25 bp, Artificial
  probe
  misc_feature (1)..(25): SEQ ID NO: 4869; WAN024G3Y_at; Start 5; Stop 29
aaaatggatttcctgacctcacaat

SEQ ID NO: 230165 - DNA, 25 bp, Artificial
  probe
  misc_feature (1)..(25): SEQ ID NO: 4869; WAN024G3Y_at; Start 21; Stop 45
cctcacaattgagtcttggtctcaa

SEQ ID NO: 230166 - DNA, 25 bp, Artificial
  probe
  misc_feature (1)..(25): SEQ ID NO: 4869; WAN024G3Y_at; Start 35; Stop 59
cttggtctcaattgtgccccttgcc

SEQ ID NO: 230167 - DNA, 25 bp, Artificial
  probe
  misc_feature (1)..(25): SEQ ID NO: 4869; WAN024G3Y_at; Start 49; Stop 73
tgccccttgccaatctacagattgg

SEQ ID NO: 230168 - DNA, 25 bp, Artificial
  probe
  misc_feature (1)..(25): SEQ ID NO: 4869; WAN024G3Y_at; Start 11; Stop 35
gatttcctgacctcacaattgagtc

SEQ ID NO: 230169 - DNA, 25 bp, Artificial
  probe
  misc_feature (1)..(25): SEQ ID NO: 5624; WAN024G3Z_at; Start 287; Stop 311
ggcatatcgaagtaaggaagttcct

SEQ ID NO: 230170 - DNA, 25 bp, Artificial
  probe
  misc_feature (1)..(25): SEQ ID NO: 5624; WAN024G3Z_at; Start 1; Stop 25
ttggtctgcaagcatagccgctgca

SEQ ID NO: 230171 - DNA, 25 bp, Artificial
  probe
  misc_feature (1)..(25): SEQ ID NO: 5624; WAN024G3Z_at; Start 355; Stop 379
gttcattccttcaagaacagccttg

SEQ ID NO: 230172 - DNA, 25 bp, Artificial
  probe
  misc_feature (1)..(25): SEQ ID NO: 5624; WAN024G3Z_at; Start 531; Stop 555
taccgtcagcagtcactgtttgagc

SEQ ID NO: 230173 - DNA, 25 bp, Artificial
  probe
  misc_feature (1)..(25): SEQ ID NO: 5624; WAN024G3Z_at; Start 401; Stop 425
tcagttgggaagtcttgagaatcca

SEQ ID NO: 230174 - DNA, 25 bp, Artificial
  probe
  misc_feature (1)..(25): SEQ ID NO: 5624; WAN024G3Z_at; Start 655; Stop 679
tccagtgatcccgttaacagcaagg

SEQ ID NO: 230175 - DNA, 25 bp, Artificial
  probe
  misc_feature (1)..(25): SEQ ID NO: 5624; WAN024G3Z_at; Start 166; Stop 190
caattgaccgtgaacagacgcacga

SEQ ID NO: 230176 - DNA, 25 bp, Artificial
  probe
  misc_feature (1)..(25): SEQ ID NO: 5624; WAN024G3Z_at; Start 464; Stop 488
gcaccgttgttgttaacaccttcaa

SEQ ID NO: 230177 - DNA, 25 bp, Artificial
  probe
  misc_feature (1)..(25): SEQ ID NO: 5624; WAN024G3Z_at; Start 302; Stop 326
ggaagttccttatctccaccgatat

SEQ ID NO: 230178 - DNA, 25 bp, Artificial
  probe
  misc_feature (1)..(25): SEQ ID NO: 5624; WAN024G3Z_at; Start 582; Stop 606
tttgtttcgcataggcttcaccagc

SEQ ID NO: 230179 - DNA, 25 bp, Artificial
  probe
  misc_feature (1)..(25): SEQ ID NO: 5624; WAN024G3Z_at; Start 387; Stop 411
catactgctcatcttcagttgggaa

SEQ ID NO: 230180 - DNA, 25 bp, Artificial
  probe
  misc_feature (1)..(25): SEQ ID NO: 5624; WAN024G3Z_at; Start 62; Stop 86
gcaactgcaacaccttcagcaagaa

SEQ ID NO: 230181 - DNA, 25 bp, Artificial
  probe
  misc_feature (1)..(25): SEQ ID NO: 5624; WAN024G3Z_at; Start 512; Stop 536
gcagccaactcgaagtgtttaccgt

SEQ ID NO: 230182 - DNA, 25 bp, Artificial
  probe
  misc_feature (1)..(25): SEQ ID NO: 5624; WAN024G3Z_at; Start 674; Stop 698
gcaaggatgtcaccgtctttaacga

SEQ ID NO: 230183 - DNA, 25 bp, Artificial
  probe
  misc_feature (1)..(25): SEQ ID NO: 5624; WAN024G3Z_at; Start 105; Stop 129
caaagactgctttcgctgcacggaa

SEQ ID NO: 230184 - DNA, 25 bp, Artificial
  probe
  misc_feature (1)..(25): SEQ ID NO: 5624; WAN024G3Z_at; Start 182; Stop 206
gacgcacgaagaagagcacggattt

SEQ ID NO: 230185 - DNA, 25 bp, Artificial
  probe
  misc_feature (1)..(25): SEQ ID NO: 5624; WAN024G3Z_at; Start 446; Stop 470
taaagtccaacagcttctgcaccgt

SEQ ID NO: 230186 - DNA, 25 bp, Artificial
  probe
  misc_feature (1)..(25): SEQ ID NO: 5624; WAN024G3Z_at; Start 233; Stop 257
tcagagatagagatacgaagagcac

SEQ ID NO: 230187 - DNA, 25 bp, Artificial
  probe
  misc_feature (1)..(25): SEQ ID NO: 5624; WAN024G3Z_at; Start 599; Stop 623
tcaccagctgctttaaattctgccg

SEQ ID NO: 230188 - DNA, 25 bp, Artificial
  probe
  misc_feature (1)..(25): SEQ ID NO: 5624; WAN024G3Z_at; Start 45; Stop 69
caacttgaatgttatccgcaactgc

SEQ ID NO: 230189 - DNA, 25 bp, Artificial
  probe
  misc_feature (1)..(25): SEQ ID NO: 5624; WAN024G3Z_at; Start 214; Stop 238
gaacatagcatctccagtctcagag

SEQ ID NO: 230190 - DNA, 25 bp, Artificial
  probe
  misc_feature (1)..(25): SEQ ID NO: 5624; WAN024G3Z_at; Start 151; Stop 175
tgggaacatgatacgcaattgaccg

SEQ ID NO: 230191 - DNA, 25 bp, Artificial
  probe
  misc_feature (1)..(25): SEQ ID NO: 5624; WAN024G3Z_at; Start 614; Stop 638
aattctgccgcttgttcatctgttg

SEQ ID NO: 230192 - DNA, 25 bp, Artificial
  probe
  misc_feature (1)..(25): SEQ ID NO: 5624; WAN024G3Z_at; Start 198; Stop 222
cacggatttgtgtgcggaacatagc

SEQ ID NO: 230193 - DNA, 25 bp, Artificial
  probe
  misc_feature (1)..(25): SEQ ID NO: 5624; WAN024G3Z_at; Start 430; Stop 454
caagaactctgtacggtaaagtcca

SEQ ID NO: 230194 - DNA, 25 bp, Artificial
  probe
  misc_feature (1)..(25): SEQ ID NO: 5624; WAN024G3Z_at; Start 630; Stop 654
catctgttgggttgataatcacttc

SEQ ID NO: 230195 - DNA, 25 bp, Artificial
  probe
  misc_feature (1)..(25): SEQ ID NO: 5624; WAN024G3Z_at; Start 135; Stop 159
tcaagagcgcaaccattgggaacat

SEQ ID NO: 230196 - DNA, 25 bp, Artificial
  probe
  misc_feature (1)..(25): SEQ ID NO: 5624; WAN024G3Z_at; Start 555; Stop 579
catctttcaaaagtgcccattcagc

SEQ ID NO: 230197 - DNA, 25 bp, Artificial
  probe
  misc_feature (1)..(25): SEQ ID NO: 5624; WAN024G3Z_at; Start 324; Stop 348
tatccattgtacgaacgacaacagg

SEQ ID NO: 230198 - DNA, 25 bp, Artificial
  probe
  misc_feature (1)..(25): SEQ ID NO: 5624; WAN024G3Z_at; Start 255; Stop 279
cacggaatccaaggaatgggttcat

SEQ ID NO: 230199 - DNA, 25 bp, Artificial
  probe
  misc_feature (1)..(25): SEQ ID NO: 5624; WAN024G3Z_at; Start 271; Stop 295
tgggttcatttcgtgaggcatatcg

SEQ ID NO: 230200 - DNA, 25 bp, Artificial
  probe
  misc_feature (1)..(25): SEQ ID NO: 5624; WAN024G3Z_at; Start 15; Stop 39
tagccgctgcaggaatctcgatcat

SEQ ID NO: 230201 - DNA, 25 bp, Artificial
  probe
  misc_feature (1)..(25): SEQ ID NO: 5624; WAN024G3Z_at; Start 416; Stop 440
tgagaatccatgtacaagaactctg

SEQ ID NO: 230202 - DNA, 25 bp, Artificial
  probe
  misc_feature (1)..(25): SEQ ID NO: 5624; WAN024G3Z_at; Start 119; Stop 143
gctgcacggaattctttcaagagcg

SEQ ID NO: 230203 - DNA, 25 bp, Artificial
  probe
  misc_feature (1)..(25): SEQ ID NO: 2033; WAN024G42_at; Start 82; Stop 106
tgtcacgtcgcggatatccgctgcg

SEQ ID NO: 230204 - DNA, 25 bp, Artificial
  probe
  misc_feature (1)..(25): SEQ ID NO: 2033; WAN024G42_at; Start 225; Stop 249
ggctgatcatttctgggtcagcaag

SEQ ID NO: 230205 - DNA, 25 bp, Artificial
  probe
  misc_feature (1)..(25): SEQ ID NO: 2033; WAN024G42_at; Start 188; Stop 212
gcattcactttcttcgcacggatag

SEQ ID NO: 230206 - DNA, 25 bp, Artificial
  probe
  misc_feature (1)..(25): SEQ ID NO: 2033; WAN024G42_at; Start 73; Stop 97
tacacgttttgtcacgtcgcggata

SEQ ID NO: 230207 - DNA, 25 bp, Artificial
  probe
  misc_feature (1)..(25): SEQ ID NO: 2033; WAN024G42_at; Start 96; Stop 120
tatccgctgcgcgttcttgcatgta

SEQ ID NO: 230208 - DNA, 25 bp, Artificial
  probe
  misc_feature (1)..(25): SEQ ID NO: 2033; WAN024G42_at; Start 16; Stop 40
cacttcttcattgatagaagctggg

SEQ ID NO: 230209 - DNA, 25 bp, Artificial
  probe
  misc_feature (1)..(25): SEQ ID NO: 2033; WAN024G42_at; Start 174; Stop 198
tcagacctgcttctgcattcacttt

SEQ ID NO: 230210 - DNA, 25 bp, Artificial
  probe
  misc_feature (1)..(25): SEQ ID NO: 2033; WAN024G42_at; Start 54; Stop 78
taccaagaaggtttgccaatacacg

SEQ ID NO: 230211 - DNA, 25 bp, Artificial
  probe
  misc_feature (1)..(25): SEQ ID NO: 2033; WAN024G42_at; Start 121; Stop 145
tgggttgtcttccatgccttcaaag

SEQ ID NO: 230212 - DNA, 25 bp, Artificial
  probe
  misc_feature (1)..(25): SEQ ID NO: 2033; WAN024G42_at; Start 159; Stop 183
tatctgtaacttctttcagacctgc

SEQ ID NO: 230213 - DNA, 25 bp, Artificial
  probe
  misc_feature (1)..(25): SEQ ID NO: 2033; WAN024G42_at; Start 166; Stop 190
aacttctttcagacctgcttctgca

SEQ ID NO: 230214 - DNA, 25 bp, Artificial
  probe
  misc_feature (1)..(25): SEQ ID NO: 2033; WAN024G42_at; Start 198; Stop 222
tcttcgcacggatagtttccttgat

SEQ ID NO: 230215 - DNA, 25 bp, Artificial
  probe
  misc_feature (1)..(25): SEQ ID NO: 2033; WAN024G42_at; Start 133; Stop 157
catgccttcaaagatagtgataaac

SEQ ID NO: 230216 - DNA, 25 bp, Artificial
  probe
  misc_feature (1)..(25): SEQ ID NO: 2033; WAN024G42_at; Start 110; Stop 134
tcttgcatgtatgggttgtcttcca

SEQ ID NO: 230217 - DNA, 25 bp, Artificial
  probe
  misc_feature (1)..(25): SEQ ID NO: 2033; WAN024G42_at; Start 105; Stop 129
cgcgttcttgcatgtatgggttgtc

SEQ ID NO: 230218 - DNA, 25 bp, Artificial
  probe
  misc_feature (1)..(25): SEQ ID NO: 2033; WAN024G42_at; Start 236; Stop 260
tctgggtcagcaagaaccattaagt

SEQ ID NO: 230219 - DNA, 25 bp, Artificial
  probe
  misc_feature (1)..(25): SEQ ID NO: 2033; WAN024G42_at; Start 92; Stop 116
cggatatccgctgcgcgttcttgca

SEQ ID NO: 230220 - DNA, 25 bp, Artificial
  probe
  misc_feature (1)..(25): SEQ ID NO: 2033; WAN024G42_at; Start 2; Stop 26
tgcgcaatcacaatcacttcttcat

SEQ ID NO: 230221 - DNA, 25 bp, Artificial
  probe
  misc_feature (1)..(25): SEQ ID NO: 2033; WAN024G42_at; Start 23; Stop 47
tcattgatagaagctgggtttggca

SEQ ID NO: 230222 - DNA, 25 bp, Artificial
  probe
  misc_feature (1)..(25): SEQ ID NO: 2033; WAN024G42_at; Start 63; Stop 87
ggtttgccaatacacgttttgtcac

SEQ ID NO: 230223 - DNA, 25 bp, Artificial
  probe
  misc_feature (1)..(25): SEQ ID NO: 2033; WAN024G42_at; Start 127; Stop 151
gtcttccatgccttcaaagatagtg

SEQ ID NO: 230224 - DNA, 25 bp, Artificial
  probe
  misc_feature (1)..(25): SEQ ID NO: 2033; WAN024G42_at; Start 206; Stop 230
cggatagtttccttgatttggctga

SEQ ID NO: 230225 - DNA, 25 bp, Artificial
  probe
  misc_feature (1)..(25): SEQ ID NO: 2033; WAN024G42_at; Start 238; Stop 262
tgggtcagcaagaaccattaagtga

SEQ ID NO: 230226 - DNA, 25 bp, Artificial
  probe
  misc_feature (1)..(25): SEQ ID NO: 2033; WAN024G42_at; Start 193; Stop 217
cactttcttcgcacggatagtttcc

SEQ ID NO: 230227 - DNA, 25 bp, Artificial
  probe
  misc_feature (1)..(25): SEQ ID NO: 2033; WAN024G42_at; Start 78; Stop 102
gttttgtcacgtcgcggatatccgc

SEQ ID NO: 230228 - DNA, 25 bp, Artificial
  probe
  misc_feature (1)..(25): SEQ ID NO: 2033; WAN024G42_at; Start 70; Stop 94
caatacacgttttgtcacgtcgcgg

SEQ ID NO: 230229 - DNA, 25 bp, Artificial
  probe
  misc_feature (1)..(25): SEQ ID NO: 2033; WAN024G42_at; Start 56; Stop 80
ccaagaaggtttgccaatacacgtt

SEQ ID NO: 230230 - DNA, 25 bp, Artificial
  probe
  misc_feature (1)..(25): SEQ ID NO: 2033; WAN024G42_at; Start 115; Stop 139
catgtatgggttgtcttccatgcct

SEQ ID NO: 230231 - DNA, 25 bp, Artificial
  probe
  misc_feature (1)..(25): SEQ ID NO: 2033; WAN024G42_at; Start 232; Stop 256
catttctgggtcagcaagaaccatt

SEQ ID NO: 230232 - DNA, 25 bp, Artificial
  probe
  misc_feature (1)..(25): SEQ ID NO: 2033; WAN024G42_at; Start 101; Stop 125
gctgcgcgttcttgcatgtatgggt

SEQ ID NO: 230233 - DNA, 25 bp, Artificial
  probe
  misc_feature (1)..(25): SEQ ID NO: 2033; WAN024G42_at; Start 145; Stop 169
gatagtgataaacatatctgtaact

SEQ ID NO: 230234 - DNA, 25 bp, Artificial
  probe
  misc_feature (1)..(25): SEQ ID NO: 2033; WAN024G42_at; Start 28; Stop 52
gatagaagctgggtttggcaatttt

SEQ ID NO: 230235 - DNA, 25 bp, Artificial
  probe
  misc_feature (1)..(25): SEQ ID NO: 2033; WAN024G42_at; Start 229; Stop 253
gatcatttctgggtcagcaagaacc

SEQ ID NO: 230236 - DNA, 25 bp, Artificial
  probe
  misc_feature (1)..(25): SEQ ID NO: 2033; WAN024G42_at; Start 210; Stop 234
tagtttccttgatttggctgatcat

SEQ ID NO: 230237 - DNA, 25 bp, Artificial
  probe
  misc_feature (1)..(25): SEQ ID NO: 1358; WAN024G43_at; Start 1391; Stop 1415
caatggcagcagaccgtatgaacga

SEQ ID NO: 230238 - DNA, 25 bp, Artificial
  probe
  misc_feature (1)..(25): SEQ ID NO: 1358; WAN024G43_at; Start 278; Stop 302
ctatccgtgcgaagaaagtgaatgc

SEQ ID NO: 230239 - DNA, 25 bp, Artificial
  probe
  misc_feature (1)..(25): SEQ ID NO: 1358; WAN024G43_at; Start 707; Stop 731
aacaagcggcagaatttaaagcagc

SEQ ID NO: 230240 - DNA, 25 bp, Artificial
  probe
  misc_feature (1)..(25): SEQ ID NO: 1358; WAN024G43_at; Start 344; Stop 368
tctttgaaggcatggaagacaaccc

SEQ ID NO: 230241 - DNA, 25 bp, Artificial
  probe
  misc_feature (1)..(25): SEQ ID NO: 1358; WAN024G43_at; Start 29; Stop 53
catctgacggtgttgcagttgcaaa

SEQ ID NO: 230242 - DNA, 25 bp, Artificial
  probe
  misc_feature (1)..(25): SEQ ID NO: 1358; WAN024G43_at; Start 1572; Stop 1596
ggatgagttctctatgtcagcaaca

SEQ ID NO: 230243 - DNA, 25 bp, Artificial
  probe
  misc_feature (1)..(25): SEQ ID NO: 1358; WAN024G43_at; Start 229; Stop 253
cacttaatggttcttgctgacccag

SEQ ID NO: 230244 - DNA, 25 bp, Artificial
  probe
  misc_feature (1)..(25): SEQ ID NO: 1358; WAN024G43_at; Start 1311; Stop 1335
tgcagcggctatgcttgcagaccaa

SEQ ID NO: 230245 - DNA, 25 bp, Artificial
  probe
  misc_feature (1)..(25): SEQ ID NO: 1358; WAN024G43_at; Start 872; Stop 896
cagaagctgttggactttaccgtac

SEQ ID NO: 230246 - DNA, 25 bp, Artificial
  probe
  misc_feature (1)..(25): SEQ ID NO: 1358; WAN024G43_at; Start 556; Stop 580
ggtggacgtacaagccactcagcta

SEQ ID NO: 230247 - DNA, 25 bp, Artificial
  probe
  misc_feature (1)..(25): SEQ ID NO: 1358; WAN024G43_at; Start 1114; Stop 1138
gctatgttccgcacacaaatccgtg

SEQ ID NO: 230248 - DNA, 25 bp, Artificial
  probe
  misc_feature (1)..(25): SEQ ID NO: 1358; WAN024G43_at; Start 15; Stop 39
taaaggaatcgcagcatctgacggt

SEQ ID NO: 230249 - DNA, 25 bp, Artificial
  probe
  misc_feature (1)..(25): SEQ ID NO: 1358; WAN024G43_at; Start 911; Stop 935
tggattctcaagacttcccaactga

SEQ ID NO: 230250 - DNA, 25 bp, Artificial
  probe
  misc_feature (1)..(25): SEQ ID NO: 1358; WAN024G43_at; Start 192; Stop 216
tacgctcggtgaagaagcagctcaa

SEQ ID NO: 230251 - DNA, 25 bp, Artificial
  probe
  misc_feature (1)..(25): SEQ ID NO: 1358; WAN024G43_at; Start 53; Stop 77
aagcatatctactcgttcagccgga

SEQ ID NO: 230252 - DNA, 25 bp, Artificial
  probe
  misc_feature (1)..(25): SEQ ID NO: 1358; WAN024G43_at; Start 1011; Stop 1035
tatcggtggagataaggaacttcct

SEQ ID NO: 230253 - DNA, 25 bp, Artificial
  probe
  misc_feature (1)..(25): SEQ ID NO: 1358; WAN024G43_at; Start 742; Stop 766
tatgcgaaacaaaaagctgaatggg

SEQ ID NO: 230254 - DNA, 25 bp, Artificial
  probe
  misc_feature (1)..(25): SEQ ID NO: 1358; WAN024G43_at; Start 361; Stop 385
gacaacccatacatgcaagaacgcg

SEQ ID NO: 230255 - DNA, 25 bp, Artificial
  probe
  misc_feature (1)..(25): SEQ ID NO: 1358; WAN024G43_at; Start 1130; Stop 1154
aaatccgtgctcttcttcgtgcgtc

SEQ ID NO: 230256 - DNA, 25 bp, Artificial
  probe
  misc_feature (1)..(25): SEQ ID NO: 1358; WAN024G43_at; Start 141; Stop 165
tctacaggcatcacaagacgagctt

SEQ ID NO: 230257 - DNA, 25 bp, Artificial
  probe
  misc_feature (1)..(25): SEQ ID NO: 1358; WAN024G43_at; Start 996; Stop 1020
cgttcgtacaatggatatcggtgga

SEQ ID NO: 230258 - DNA, 25 bp, Artificial
  probe
  misc_feature (1)..(25): SEQ ID NO: 1358; WAN024G43_at; Start 784; Stop 808
caaacagtgactgctgacggtaaac

SEQ ID NO: 230259 - DNA, 25 bp, Artificial
  probe
  misc_feature (1)..(25): SEQ ID NO: 1358; WAN024G43_at; Start 260; Stop 284
tcagccaaatcaaggaaactatccg

SEQ ID NO: 230260 - DNA, 25 bp, Artificial
  probe
  misc_feature (1)..(25): SEQ ID NO: 1358; WAN024G43_at; Start 857; Stop 881
ttaacaacaacggtgcagaagctgt

SEQ ID NO: 230261 - DNA, 25 bp, Artificial
  probe
  misc_feature (1)..(25): SEQ ID NO: 1358; WAN024G43_at; Start 157; Stop 181
gacgagctttctgttattcgcgaga

SEQ ID NO: 230262 - DNA, 25 bp, Artificial
  probe
  misc_feature (1)..(25): SEQ ID NO: 1358; WAN024G43_at; Start 171; Stop 195
tattcgcgagaaagcagtaggtacg

SEQ ID NO: 230263 - DNA, 25 bp, Artificial
  probe
  misc_feature (1)..(25): SEQ ID NO: 1358; WAN024G43_at; Start 577; Stop 601
gctatcatggcacgtacacttgaaa

SEQ ID NO: 230264 - DNA, 25 bp, Artificial
  probe
  misc_feature (1)..(25): SEQ ID NO: 1358; WAN024G43_at; Start 1042; Stop 1066
gatatgcctcacgaaatgaacccat

SEQ ID NO: 230265 - DNA, 25 bp, Artificial
  probe
  misc_feature (1)..(25): SEQ ID NO: 1358; WAN024G43_at; Start 106; Stop 130
gatacaaacgcagaagaagctcgcc

SEQ ID NO: 230266 - DNA, 25 bp, Artificial
  probe
  misc_feature (1)..(25): SEQ ID NO: 1358; WAN024G43_at; Start 1183; Stop 1207
ccaatggttgcgctcttgaaagaat

SEQ ID NO: 230267 - DNA, 25 bp, Artificial
  probe
  misc_feature (1)..(25): SEQ ID NO: 1358; WAN024G43_at; Start 1161; Stop 1185
cggtcaattgcgtatcatgttccca

SEQ ID NO: 230268 - DNA, 25 bp, Artificial
  probe
  misc_feature (1)..(25): SEQ ID NO: 1358; WAN024G43_at; Start 1204; Stop 1228
gaattccgtgcagcgaaagcagtct

SEQ ID NO: 230269 - DNA, 25 bp, Artificial
  probe
  misc_feature (1)..(25): SEQ ID NO: 1358; WAN024G43_at; Start 1550; Stop 1574
cacttcttgtcggaatgggcttgga

SEQ ID NO: 230270 - DNA, 25 bp, Artificial
  probe
  misc_feature (1)..(25): SEQ ID NO: 1358; WAN024G43_at; Start 799; Stop 823
gacggtaaacacttcgagttggctg

SEQ ID NO: 230271 - DNA, 25 bp, Artificial
  probe
  misc_feature (1)..(25): SEQ ID NO: 7608; WAN024G44_at; Start 118; Stop 142
tgtgaagtttccatagcactatgga

SEQ ID NO: 230272 - DNA, 25 bp, Artificial
  probe
  misc_feature (1)..(25): SEQ ID NO: 7608; WAN024G44_at; Start 90; Stop 114
gactgctgttttcttctctttaaaa

SEQ ID NO: 230273 - DNA, 25 bp, Artificial
  probe
  misc_feature (1)..(25): SEQ ID NO: 7608; WAN024G44_at; Start 134; Stop 158
cactatggatattttcatgtttctc

SEQ ID NO: 230274 - DNA, 25 bp, Artificial
  probe
  misc_feature (1)..(25): SEQ ID NO: 7608; WAN024G44_at; Start 36; Stop 60
gctagtgttattgtctatcacagga

SEQ ID NO: 230275 - DNA, 25 bp, Artificial
  probe
  misc_feature (1)..(25): SEQ ID NO: 7608; WAN024G44_at; Start 38; Stop 62
tagtgttattgtctatcacaggatt

SEQ ID NO: 230276 - DNA, 25 bp, Artificial
  probe
  misc_feature (1)..(25): SEQ ID NO: 7608; WAN024G44_at; Start 225; Stop 249
taagactacctcattaggggcatag

SEQ ID NO: 230277 - DNA, 25 bp, Artificial
  probe
  misc_feature (1)..(25): SEQ ID NO: 7608; WAN024G44_at; Start 179; Stop 203
ctttatcagagatgtttaaagcatc

SEQ ID NO: 230278 - DNA, 25 bp, Artificial
  probe
  misc_feature (1)..(25): SEQ ID NO: 7608; WAN024G44_at; Start 202; Stop 226
tcttcagagctagatgtgtctgcta

SEQ ID NO: 230279 - DNA, 25 bp, Artificial
  probe
  misc_feature (1)..(25): SEQ ID NO: 7608; WAN024G44_at; Start 128; Stop 152
ccatagcactatggatattttcatg

SEQ ID NO: 230280 - DNA, 25 bp, Artificial
  probe
  misc_feature (1)..(25): SEQ ID NO: 7608; WAN024G44_at; Start 112; Stop 136
aaatcctgtgaagtttccatagcac

SEQ ID NO: 230281 - DNA, 25 bp, Artificial
  probe
  misc_feature (1)..(25): SEQ ID NO: 7608; WAN024G44_at; Start 43; Stop 67
ttattgtctatcacaggatttttac

SEQ ID NO: 230282 - DNA, 25 bp, Artificial
  probe
  misc_feature (1)..(25): SEQ ID NO: 7608; WAN024G44_at; Start 116; Stop 140
cctgtgaagtttccatagcactatg

SEQ ID NO: 230283 - DNA, 25 bp, Artificial
  probe
  misc_feature (1)..(25): SEQ ID NO: 7608; WAN024G44_at; Start 24; Stop 48
tgcttcttcattgctagtgttattg

SEQ ID NO: 230284 - DNA, 25 bp, Artificial
  probe
  misc_feature (1)..(25): SEQ ID NO: 7608; WAN024G44_at; Start 146; Stop 170
tttcatgtttctctttattttctgc

SEQ ID NO: 230285 - DNA, 25 bp, Artificial
  probe
  misc_feature (1)..(25): SEQ ID NO: 7608; WAN024G44_at; Start 32; Stop 56
cattgctagtgttattgtctatcac

SEQ ID NO: 230286 - DNA, 25 bp, Artificial
  probe
  misc_feature (1)..(25): SEQ ID NO: 7608; WAN024G44_at; Start 200; Stop 224
catcttcagagctagatgtgtctgc

SEQ ID NO: 230287 - DNA, 25 bp, Artificial
  probe
  misc_feature (1)..(25): SEQ ID NO: 7608; WAN024G44_at; Start 54; Stop 78
cacaggatttttactaacaacttct

SEQ ID NO: 230288 - DNA, 25 bp, Artificial
  probe
  misc_feature (1)..(25): SEQ ID NO: 7608; WAN024G44_at; Start 83; Stop 107
ccttaatgactgctgttttcttctc

SEQ ID NO: 230289 - DNA, 25 bp, Artificial
  probe
  misc_feature (1)..(25): SEQ ID NO: 7608; WAN024G44_at; Start 212; Stop 236
tagatgtgtctgctaagactacctc

SEQ ID NO: 230290 - DNA, 25 bp, Artificial
  probe
  misc_feature (1)..(25): SEQ ID NO: 7608; WAN024G44_at; Start 191; Stop 215
tgtttaaagcatcttcagagctaga

SEQ ID NO: 230291 - DNA, 25 bp, Artificial
  probe
  misc_feature (1)..(25): SEQ ID NO: 7608; WAN024G44_at; Start 106; Stop 130
tctttaaaatcctgtgaagtttcca

SEQ ID NO: 230292 - DNA, 25 bp, Artificial
  probe
  misc_feature (1)..(25): SEQ ID NO: 7608; WAN024G44_at; Start 195; Stop 219
taaagcatcttcagagctagatgtg

SEQ ID NO: 230293 - DNA, 25 bp, Artificial
  probe
  misc_feature (1)..(25): SEQ ID NO: 7608; WAN024G44_at; Start 51; Stop 75
tatcacaggatttttactaacaact

SEQ ID NO: 230294 - DNA, 25 bp, Artificial
  probe
  misc_feature (1)..(25): SEQ ID NO: 7608; WAN024G44_at; Start 76; Stop 100
tctttttccttaatgactgctgttt

SEQ ID NO: 230295 - DNA, 25 bp, Artificial
  probe
  misc_feature (1)..(25): SEQ ID NO: 7608; WAN024G44_at; Start 210; Stop 234
gctagatgtgtctgctaagactacc

SEQ ID NO: 230296 - DNA, 25 bp, Artificial
  probe
  misc_feature (1)..(25): SEQ ID NO: 7608; WAN024G44_at; Start 110; Stop 134
taaaatcctgtgaagtttccatagc

SEQ ID NO: 230297 - DNA, 25 bp, Artificial
  probe
  misc_feature (1)..(25): SEQ ID NO: 7608; WAN024G44_at; Start 217; Stop 241
gtgtctgctaagactacctcattag

SEQ ID NO: 230298 - DNA, 25 bp, Artificial
  probe
  misc_feature (1)..(25): SEQ ID NO: 7608; WAN024G44_at; Start 161; Stop 185
tattttctgctactttttctttatc

SEQ ID NO: 230299 - DNA, 25 bp, Artificial
  probe
  misc_feature (1)..(25): SEQ ID NO: 7608; WAN024G44_at; Start 206; Stop 230
cagagctagatgtgtctgctaagac

SEQ ID NO: 230300 - DNA, 25 bp, Artificial
  probe
  misc_feature (1)..(25): SEQ ID NO: 7608; WAN024G44_at; Start 214; Stop 238
gatgtgtctgctaagactacctcat

SEQ ID NO: 230301 - DNA, 25 bp, Artificial
  probe
  misc_feature (1)..(25): SEQ ID NO: 7608; WAN024G44_at; Start 71; Stop 95
caacttctttttccttaatgactgc

SEQ ID NO: 230302 - DNA, 25 bp, Artificial
  probe
  misc_feature (1)..(25): SEQ ID NO: 7608; WAN024G44_at; Start 187; Stop 211
gagatgtttaaagcatcttcagagc

SEQ ID NO: 230303 - DNA, 25 bp, Artificial
  probe
  misc_feature (1)..(25): SEQ ID NO: 7608; WAN024G44_at; Start 219; Stop 243
gtctgctaagactacctcattaggg

SEQ ID NO: 230304 - DNA, 25 bp, Artificial
  probe
  misc_feature (1)..(25): SEQ ID NO: 7608; WAN024G44_at; Start 18; Stop 42
gatttttgcttcttcattgctagtg

SEQ ID NO: 230305 - DNA, 25 bp, Artificial
  probe
  misc_feature (1)..(25): SEQ ID NO: 826; WAN024G45_at; Start 144; Stop 168
ctgcaatatgcatcccatgtgggtc

SEQ ID NO: 230306 - DNA, 25 bp, Artificial
  probe
  misc_feature (1)..(25): SEQ ID NO: 826; WAN024G45_at; Start 3; Stop 27
gaaacattgtttcatcacccgcaaa

SEQ ID NO: 230307 - DNA, 25 bp, Artificial
  probe
  misc_feature (1)..(25): SEQ ID NO: 826; WAN024G45_at; Start 59; Stop 83
gagaaaatttgtgcattaggtgcaa

SEQ ID NO: 230308 - DNA, 25 bp, Artificial
  probe
  misc_feature (1)..(25): SEQ ID NO: 826; WAN024G45_at; Start 113; Stop 137
tcttgttcagtatcatttccagcaa

SEQ ID NO: 230309 - DNA, 25 bp, Artificial
  probe
  misc_feature (1)..(25): SEQ ID NO: 826; WAN024G45_at; Start 205; Stop 229
gattttgccaccattataataattg

SEQ ID NO: 230310 - DNA, 25 bp, Artificial
  probe
  misc_feature (1)..(25): SEQ ID NO: 826; WAN024G45_at; Start 75; Stop 99
taggtgcaattccatctatgccgtt

SEQ ID NO: 230311 - DNA, 25 bp, Artificial
  probe
  misc_feature (1)..(25): SEQ ID NO: 826; WAN024G45_at; Start 234; Stop 258
catgagggattttatcactcaacca

SEQ ID NO: 230312 - DNA, 25 bp, Artificial
  probe
  misc_feature (1)..(25): SEQ ID NO: 826; WAN024G45_at; Start 249; Stop 273
cactcaaccaataatttttatcagt

SEQ ID NO: 230313 - DNA, 25 bp, Artificial
  probe
  misc_feature (1)..(25): SEQ ID NO: 826; WAN024G45_at; Start 70; Stop 94
tgcattaggtgcaattccatctatg

SEQ ID NO: 230314 - DNA, 25 bp, Artificial
  probe
  misc_feature (1)..(25): SEQ ID NO: 826; WAN024G45_at; Start 181; Stop 205
tccatcatcatatttttctacagtg

SEQ ID NO: 230315 - DNA, 25 bp, Artificial
  probe
  misc_feature (1)..(25): SEQ ID NO: 826; WAN024G45_at; Start 8; Stop 32
attgtttcatcacccgcaaacccag

SEQ ID NO: 230316 - DNA, 25 bp, Artificial
  probe
  misc_feature (1)..(25): SEQ ID NO: 826; WAN024G45_at; Start 219; Stop 243
tataataattgaacgcatgagggat

SEQ ID NO: 230317 - DNA, 25 bp, Artificial
  probe
  misc_feature (1)..(25): SEQ ID NO: 826; WAN024G45_at; Start 237; Stop 261
gagggattttatcactcaaccaata

SEQ ID NO: 230318 - DNA, 25 bp, Artificial
  probe
  misc_feature (1)..(25): SEQ ID NO: 826; WAN024G45_at; Start 165; Stop 189
ggtcaaaataatcccttccatcatc

SEQ ID NO: 230319 - DNA, 25 bp, Artificial
  probe
  misc_feature (1)..(25): SEQ ID NO: 826; WAN024G45_at; Start 38; Stop 62
gcgtcagaatacattttgtaagaga

SEQ ID NO: 230320 - DNA, 25 bp, Artificial
  probe
  misc_feature (1)..(25): SEQ ID NO: 826; WAN024G45_at; Start 86; Stop 110
ccatctatgccgttaaagtttttga

SEQ ID NO: 230321 - DNA, 25 bp, Artificial
  probe
  misc_feature (1)..(25): SEQ ID NO: 826; WAN024G45_at; Start 132; Stop 156
cagcaagaatccctgcaatatgcat

SEQ ID NO: 230322 - DNA, 25 bp, Artificial
  probe
  misc_feature (1)..(25): SEQ ID NO: 826; WAN024G45_at; Start 147; Stop 171
caatatgcatcccatgtgggtcaaa

SEQ ID NO: 230323 - DNA, 25 bp, Artificial
  probe
  misc_feature (1)..(25): SEQ ID NO: 826; WAN024G45_at; Start 193; Stop 217
tttttctacagtgattttgccacca

SEQ ID NO: 230324 - DNA, 25 bp, Artificial
  probe
  misc_feature (1)..(25): SEQ ID NO: 826; WAN024G45_at; Start 35; Stop 59
cctgcgtcagaatacattttgtaag

SEQ ID NO: 230325 - DNA, 25 bp, Artificial
  probe
  misc_feature (1)..(25): SEQ ID NO: 826; WAN024G45_at; Start 23; Stop 47
gcaaacccagatcctgcgtcagaat

SEQ ID NO: 230326 - DNA, 25 bp, Artificial
  probe
  misc_feature (1)..(25): SEQ ID NO: 826; WAN024G45_at; Start 120; Stop 144
cagtatcatttccagcaagaatccc

SEQ ID NO: 230327 - DNA, 25 bp, Artificial
  probe
  misc_feature (1)..(25): SEQ ID NO: 826; WAN024G45_at; Start 154; Stop 178
catcccatgtgggtcaaaataatcc

SEQ ID NO: 230328 - DNA, 25 bp, Artificial
  probe
  misc_feature (1)..(25): SEQ ID NO: 826; WAN024G45_at; Start 141; Stop 165
tccctgcaatatgcatcccatgtgg

SEQ ID NO: 230329 - DNA, 25 bp, Artificial
  probe
  misc_feature (1)..(25): SEQ ID NO: 826; WAN024G45_at; Start 66; Stop 90
tttgtgcattaggtgcaattccatc

SEQ ID NO: 230330 - DNA, 25 bp, Artificial
  probe
  misc_feature (1)..(25): SEQ ID NO: 826; WAN024G45_at; Start 32; Stop 56
gatcctgcgtcagaatacattttgt

SEQ ID NO: 230331 - DNA, 25 bp, Artificial
  probe
  misc_feature (1)..(25): SEQ ID NO: 826; WAN024G45_at; Start 159; Stop 183
catgtgggtcaaaataatcccttcc

SEQ ID NO: 230332 - DNA, 25 bp, Artificial
  probe
  misc_feature (1)..(25): SEQ ID NO: 826; WAN024G45_at; Start 229; Stop 253
gaacgcatgagggattttatcactc

SEQ ID NO: 230333 - DNA, 25 bp, Artificial
  probe
  misc_feature (1)..(25): SEQ ID NO: 826; WAN024G45_at; Start 199; Stop 223
tacagtgattttgccaccattataa

SEQ ID NO: 230334 - DNA, 25 bp, Artificial
  probe
  misc_feature (1)..(25): SEQ ID NO: 826; WAN024G45_at; Start 49; Stop 73
cattttgtaagagaaaatttgtgca

SEQ ID NO: 230335 - DNA, 25 bp, Artificial
  probe
  misc_feature (1)..(25): SEQ ID NO: 826; WAN024G45_at; Start 138; Stop 162
gaatccctgcaatatgcatcccatg

SEQ ID NO: 230336 - DNA, 25 bp, Artificial
  probe
  misc_feature (1)..(25): SEQ ID NO: 826; WAN024G45_at; Start 79; Stop 103
tgcaattccatctatgccgttaaag

SEQ ID NO: 230337 - DNA, 25 bp, Artificial
  probe
  misc_feature (1)..(25): SEQ ID NO: 826; WAN024G45_at; Start 26; Stop 50
aacccagatcctgcgtcagaataca

SEQ ID NO: 230338 - DNA, 25 bp, Artificial
  probe
  misc_feature (1)..(25): SEQ ID NO: 826; WAN024G45_at; Start 116; Stop 140
tgttcagtatcatttccagcaagaa

SEQ ID NO: 230339 - DNA, 25 bp, Artificial
  probe
  misc_feature (1)..(25): SEQ ID NO: 606; WAN024G46_at; Start 1123; Stop 1147
tttttaacattatctggtaataata

SEQ ID NO: 230340 - DNA, 25 bp, Artificial
  probe
  misc_feature (1)..(25): SEQ ID NO: 606; WAN024G46_at; Start 1126; Stop 1150
ttaacattatctggtaataatatca

SEQ ID NO: 230341 - DNA, 25 bp, Artificial
  probe
  misc_feature (1)..(25): SEQ ID NO: 606; WAN024G46_at; Start 1125; Stop 1149
tttaacattatctggtaataatatc

SEQ ID NO: 230342 - DNA, 25 bp, Artificial
  probe
  misc_feature (1)..(25): SEQ ID NO: 606; WAN024G46_at; Start 1127; Stop 1151
taacattatctggtaataatatcaa

SEQ ID NO: 230343 - DNA, 25 bp, Artificial
  probe
  misc_feature (1)..(25): SEQ ID NO: 606; WAN024G46_at; Start 1124; Stop 1148
ttttaacattatctggtaataatat

SEQ ID NO: 230344 - DNA, 25 bp, Artificial
  probe
  misc_feature (1)..(25): SEQ ID NO: 2702; WAN024G47_at; Start 118; Stop 142
ttagttcgtggaggtagactaccaa

SEQ ID NO: 230345 - DNA, 25 bp, Artificial
  probe
  misc_feature (1)..(25): SEQ ID NO: 2702; WAN024G47_at; Start 828; Stop 852
gcgtggatatgaaatgtactctgcc

SEQ ID NO: 230346 - DNA, 25 bp, Artificial
  probe
  misc_feature (1)..(25): SEQ ID NO: 2702; WAN024G47_at; Start 39; Stop 63
tttaattttatcgagctcagaactg

SEQ ID NO: 230347 - DNA, 25 bp, Artificial
  probe
  misc_feature (1)..(25): SEQ ID NO: 2702; WAN024G47_at; Start 1019; Stop 1043
tcatactattcgttttatgggtact

SEQ ID NO: 230348 - DNA, 25 bp, Artificial
  probe
  misc_feature (1)..(25): SEQ ID NO: 2702; WAN024G47_at; Start 149; Stop 173
ttccaggagcgaaatattattttac

SEQ ID NO: 230349 - DNA, 25 bp, Artificial
  probe
  misc_feature (1)..(25): SEQ ID NO: 2702; WAN024G47_at; Start 1090; Stop 1114
aattttataaaaggtcttgctgtgg

SEQ ID NO: 230350 - DNA, 25 bp, Artificial
  probe
  misc_feature (1)..(25): SEQ ID NO: 2702; WAN024G47_at; Start 782; Stop 806
cgttttctaaatcgtcatggtccca

SEQ ID NO: 230351 - DNA, 25 bp, Artificial
  probe
  misc_feature (1)..(25): SEQ ID NO: 2702; WAN024G47_at; Start 454; Stop 478
tcagagtttggtcgaggttcctata

SEQ ID NO: 230352 - DNA, 25 bp, Artificial
  probe
  misc_feature (1)..(25): SEQ ID NO: 2702; WAN024G47_at; Start 878; Stop 902
tattagagcaaattttaggaggagg

SEQ ID NO: 230353 - DNA, 25 bp, Artificial
  probe
  misc_feature (1)..(25): SEQ ID NO: 2702; WAN024G47_at; Start 679; Stop 703
gcaggaacattgatattagcaggtg

SEQ ID NO: 230354 - DNA, 25 bp, Artificial
  probe
  misc_feature (1)..(25): SEQ ID NO: 2702; WAN024G47_at; Start 576; Stop 600
gattttgatacatttttctaggaca

SEQ ID NO: 230355 - DNA, 25 bp, Artificial
  probe
  misc_feature (1)..(25): SEQ ID NO: 2702; WAN024G47_at; Start 766; Stop 790
tcaacgacggaaatcacgttttcta

SEQ ID NO: 230356 - DNA, 25 bp, Artificial
  probe
  misc_feature (1)..(25): SEQ ID NO: 2702; WAN024G47_at; Start 413; Stop 437
tgtctagaactaaggaaattgttga

SEQ ID NO: 230357 - DNA, 25 bp, Artificial
  probe
  misc_feature (1)..(25): SEQ ID NO: 2702; WAN024G47_at; Start 904; Stop 928
tttggaacagttttatacataggcg

SEQ ID NO: 230358 - DNA, 25 bp, Artificial
  probe
  misc_feature (1)..(25): SEQ ID NO: 2702; WAN024G47_at; Start 1189; Stop 1213
gcactttttagtaataatcatggag

SEQ ID NO: 230359 - DNA, 25 bp, Artificial
  probe
  misc_feature (1)..(25): SEQ ID NO: 2702; WAN024G47_at; Start 1158; Stop 1182
tgtttcacaagccaccttcttgctt

SEQ ID NO: 230360 - DNA, 25 bp, Artificial
  probe
  misc_feature (1)..(25): SEQ ID NO: 2702; WAN024G47_at; Start 810; Stop 834
agatatcatatggaattggcgtgga

SEQ ID NO: 230361 - DNA, 25 bp, Artificial
  probe
  misc_feature (1)..(25): SEQ ID NO: 2702; WAN024G47_at; Start 511; Stop 535
tattctagagaaataaagttgagca

SEQ ID NO: 230362 - DNA, 25 bp, Artificial
  probe
  misc_feature (1)..(25): SEQ ID NO: 2702; WAN024G47_at; Start 50; Stop 74
cgagctcagaactgttttctaaaga

SEQ ID NO: 230363 - DNA, 25 bp, Artificial
  probe
  misc_feature (1)..(25): SEQ ID NO: 2702; WAN024G47_at; Start 398; Stop 422
caatcattagtttcttgtctagaac

SEQ ID NO: 230364 - DNA, 25 bp, Artificial
  probe
  misc_feature (1)..(25): SEQ ID NO: 2702; WAN024G47_at; Start 327; Stop 351
caagcaaaacaatattaaggaatca

SEQ ID NO: 230365 - DNA, 25 bp, Artificial
  probe
  misc_feature (1)..(25): SEQ ID NO: 2702; WAN024G47_at; Start 342; Stop 366
taaggaatcaattgttataacagca

SEQ ID NO: 230366 - DNA, 25 bp, Artificial
  probe
  misc_feature (1)..(25): SEQ ID NO: 2702; WAN024G47_at; Start 1127; Stop 1151
ccacatattttgtaaatggtcctct

SEQ ID NO: 230367 - DNA, 25 bp, Artificial
  probe
  misc_feature (1)..(25): SEQ ID NO: 2702; WAN024G47_at; Start 1061; Stop 1085
gcaagtatgttaatgatacccaaga

SEQ ID NO: 230368 - DNA, 25 bp, Artificial
  probe
  misc_feature (1)..(25): SEQ ID NO: 2702; WAN024G47_at; Start 442; Stop 466
tatagtttacggtcagagtttggtc

SEQ ID NO: 230369 - DNA, 25 bp, Artificial
  probe
  misc_feature (1)..(25): SEQ ID NO: 2702; WAN024G47_at; Start 919; Stop 943
tacataggcgaatatgcgtatttcg

SEQ ID NO: 230370 - DNA, 25 bp, Artificial
  probe
  misc_feature (1)..(25): SEQ ID NO: 2702; WAN024G47_at; Start 795; Stop 819
gtcatggtcccataaagatatcata

SEQ ID NO: 230371 - DNA, 25 bp, Artificial
  probe
  misc_feature (1)..(25): SEQ ID NO: 2702; WAN024G47_at; Start 467; Stop 491
gaggttcctatataccaattattgc

SEQ ID NO: 230372 - DNA, 25 bp, Artificial
  probe
  misc_feature (1)..(25): SEQ ID NO: 2702; WAN024G47_at; Start 1143; Stop 1167
tggtcctcttttttctgtttcacaa

SEQ ID NO: 230373 - DNA, 25 bp, Artificial
  probe
  misc_feature (1)..(25): SEQ ID NO: 2702; WAN024G47_at; Start 137; Stop 161
taccaatttcaattccaggagcgaa

SEQ ID NO: 230374 - DNA, 25 bp, Artificial
  probe
  misc_feature (1)..(25): SEQ ID NO: 2702; WAN024G47_at; Start 933; Stop 957
tgcgtatttcgtaagcgatttaccg

SEQ ID NO: 230375 - DNA, 25 bp, Artificial
  probe
  misc_feature (1)..(25): SEQ ID NO: 2702; WAN024G47_at; Start 753; Stop 777
taaaatatctcaatcaacgacggaa

SEQ ID NO: 230376 - DNA, 25 bp, Artificial
  probe
  misc_feature (1)..(25): SEQ ID NO: 2702; WAN024G47_at; Start 889; Stop 913
attttaggaggaggatttggaacag

SEQ ID NO: 230377 - DNA, 25 bp, Artificial
  probe
  misc_feature (1)..(25): SEQ ID NO: 2702; WAN024G47_at; Start 284; Stop 308
ggcagtttggatgtgttctgtcaaa

SEQ ID NO: 230378 - DNA, 25 bp, Artificial
  probe
  misc_feature (1)..(25): SEQ ID NO: 607; WAN024G48_s_at; Start 406; Stop 430
ggcttccatggaagtaaagctaaaa

SEQ ID NO: 230379 - DNA, 25 bp, Artificial
  probe
  misc_feature (1)..(25): SEQ ID NO: 607; WAN024G48_s_at; Start 843; Stop 867
gacaaaagaacttgcatcatattcg

SEQ ID NO: 230380 - DNA, 25 bp, Artificial
  probe
  misc_feature (1)..(25): SEQ ID NO: 607; WAN024G48_s_at; Start 1216; Stop 1240
gatacatttgcaattcctgaaactg

SEQ ID NO: 230381 - DNA, 25 bp, Artificial
  probe
  misc_feature (1)..(25): SEQ ID NO: 607; WAN024G48_s_at; Start 342; Stop 366
tagaattgtctactatcctagctct

SEQ ID NO: 230382 - DNA, 25 bp, Artificial
  probe
  misc_feature (1)..(25): SEQ ID NO: 607; WAN024G48_s_at; Start 1113; Stop 1137
taataatatcaactcattgccgtcc

SEQ ID NO: 230383 - DNA, 25 bp, Artificial
  probe
  misc_feature (1)..(25): SEQ ID NO: 607; WAN024G48_s_at; Start 222; Stop 246
tgaagctggtcaagatggaaaacca

SEQ ID NO: 230384 - DNA, 25 bp, Artificial
  probe
  misc_feature (1)..(25): SEQ ID NO: 607; WAN024G48_s_at; Start 887; Stop 911
tgaaaaaactcgaattgaatgaagg

SEQ ID NO: 230385 - DNA, 25 bp, Artificial
  probe
  misc_feature (1)..(25): SEQ ID NO: 607; WAN024G48_s_at; Start 158; Stop 182
ttctaactgtagaaggtaacatagg

SEQ ID NO: 230386 - DNA, 25 bp, Artificial
  probe
  misc_feature (1)..(25): SEQ ID NO: 607; WAN024G48_s_at; Start 14; Stop 38
caatattatcattaactacagctgc

SEQ ID NO: 230387 - DNA, 25 bp, Artificial
  probe
  misc_feature (1)..(25): SEQ ID NO: 607; WAN024G48_s_at; Start 104; Stop 128
tcaaagagactaaagttggaagtat

SEQ ID NO: 230388 - DNA, 25 bp, Artificial
  probe
  misc_feature (1)..(25): SEQ ID NO: 607; WAN024G48_s_at; Start 209; Stop 233
ctcctgtagagtttgaagctggtca

SEQ ID NO: 230389 - DNA, 25 bp, Artificial
  probe
  misc_feature (1)..(25): SEQ ID NO: 607; WAN024G48_s_at; Start 290; Stop 314
ccgttactgaagtagctagtcaagc

SEQ ID NO: 230390 - DNA, 25 bp, Artificial
  probe
  misc_feature (1)..(25): SEQ ID NO: 607; WAN024G48_s_at; Start 1150; Stop 1174
ggcgtcttagattcattaaaggaaa

SEQ ID NO: 230391 - DNA, 25 bp, Artificial
  probe
  misc_feature (1)..(25): SEQ ID NO: 607; WAN024G48_s_at; Start 47; Stop 71
tagcagcatatgtccctaatgaacc

SEQ ID NO: 230392 - DNA, 25 bp, Artificial
  probe
  misc_feature (1)..(25): SEQ ID NO: 607; WAN024G48_s_at; Start 739; Stop 763
gaatcgtttgcctcagttgatggtg

SEQ ID NO: 230393 - DNA, 25 bp, Artificial
  probe
  misc_feature (1)..(25): SEQ ID NO: 607; WAN024G48_s_at; Start 63; Stop 87
taatgaaccaatcctagcagatact

SEQ ID NO: 230394 - DNA, 25 bp, Artificial
  probe
  misc_feature (1)..(25): SEQ ID NO: 607; WAN024G48_s_at; Start 497; Stop 521
tagaagagattgaattgcctgcatc

SEQ ID NO: 230395 - DNA, 25 bp, Artificial
  probe
  misc_feature (1)..(25): SEQ ID NO: 607; WAN024G48_s_at; Start 833; Stop 857
cgcctaaggagacaaaagaacttgc

SEQ ID NO: 230396 - DNA, 25 bp, Artificial
  probe
  misc_feature (1)..(25): SEQ ID NO: 607; WAN024G48_s_at; Start 308; Stop 332
gtcaagcttttagttattatccaga

SEQ ID NO: 230397 - DNA, 25 bp, Artificial
  probe
  misc_feature (1)..(25): SEQ ID NO: 607; WAN024G48_s_at; Start 611; Stop 635
cacatgaggcttttgctaatttatc

SEQ ID NO: 230398 - DNA, 25 bp, Artificial
  probe
  misc_feature (1)..(25): SEQ ID NO: 607; WAN024G48_s_at; Start 235; Stop 259
gatggaaaaccattcacgattccta

SEQ ID NO: 230399 - DNA, 25 bp, Artificial
  probe
  misc_feature (1)..(25): SEQ ID NO: 607; WAN024G48_s_at; Start 77; Stop 101
tagcagatactcctagttcggaagt

SEQ ID NO: 230400 - DNA, 25 bp, Artificial
  probe
  misc_feature (1)..(25): SEQ ID NO: 607; WAN024G48_s_at; Start 1127; Stop 1151
cattgccgtccttcttcctaagtgg

SEQ ID NO: 230401 - DNA, 25 bp, Artificial
  probe
  misc_feature (1)..(25): SEQ ID NO: 607; WAN024G48_s_at; Start 359; Stop 383
ctagctctattactatcccatcaag

SEQ ID NO: 230402 - DNA, 25 bp, Artificial
  probe
  misc_feature (1)..(25): SEQ ID NO: 607; WAN024G48_s_at; Start 267; Stop 291
cacagtaggtgataaagtatttacc

SEQ ID NO: 230403 - DNA, 25 bp, Artificial
  probe
  misc_feature (1)..(25): SEQ ID NO: 607; WAN024G48_s_at; Start 188; Stop 212
ttcaagtgggtaatggagttactcc

SEQ ID NO: 230404 - DNA, 25 bp, Artificial
  probe
  misc_feature (1)..(25): SEQ ID NO: 607; WAN024G48_s_at; Start 513; Stop 537
gcctgcatctctagaatatattgga

SEQ ID NO: 230405 - DNA, 25 bp, Artificial
  probe
  misc_feature (1)..(25): SEQ ID NO: 607; WAN024G48_s_at; Start 251; Stop 275
cgattcctacaaaaatcacagtagg

SEQ ID NO: 230406 - DNA, 25 bp, Artificial
  probe
  misc_feature (1)..(25): SEQ ID NO: 607; WAN024G48_s_at; Start 596; Stop 620
aattagaattaatatcacatgaggc

SEQ ID NO: 230407 - DNA, 25 bp, Artificial
  probe
  misc_feature (1)..(25): SEQ ID NO: 607; WAN024G48_s_at; Start 957; Stop 981
tgaagaaattagcttaccaaatagt

SEQ ID NO: 230408 - DNA, 25 bp, Artificial
  probe
  misc_feature (1)..(25): SEQ ID NO: 607; WAN024G48_s_at; Start 327; Stop 351
tccagatgaaacaggtagaattgtc

SEQ ID NO: 230409 - DNA, 25 bp, Artificial
  probe
  misc_feature (1)..(25): SEQ ID NO: 607; WAN024G48_s_at; Start 89; Stop 113
ctagttcggaagtaatcaaagagac

SEQ ID NO: 230410 - DNA, 25 bp, Artificial
  probe
  misc_feature (1)..(25): SEQ ID NO: 607; WAN024G48_s_at; Start 730; Stop 754
gaaggaaatgaatcgtttgcctcag

SEQ ID NO: 230411 - DNA, 25 bp, Artificial
  probe
  misc_feature (1)..(25): SEQ ID NO: 607; WAN024G48_s_at; Start 642; Stop 666
agagaaactaacattaccaaaatcg

SEQ ID NO: 230412 - DNA, 25 bp, Artificial
  probe
  misc_feature (1)..(25): SEQ ID NO: 914; WAN024G49_at; Start 565; Stop 589
tataagacaaccatttgcatgattt

SEQ ID NO: 230413 - DNA, 25 bp, Artificial
  probe
  misc_feature (1)..(25): SEQ ID NO: 914; WAN024G49_at; Start 120; Stop 144
tgggaaatcaacactcattaaaacc

SEQ ID NO: 230414 - DNA, 25 bp, Artificial
  probe
  misc_feature (1)..(25): SEQ ID NO: 914; WAN024G49_at; Start 244; Stop 268
ttacctcaatctccaataatccctg

SEQ ID NO: 230415 - DNA, 25 bp, Artificial
  probe
  misc_feature (1)..(25): SEQ ID NO: 914; WAN024G49_at; Start 330; Stop 354
gagtcttggaaaagatgaccttgaa

SEQ ID NO: 230416 - DNA, 25 bp, Artificial
  probe
  misc_feature (1)..(25): SEQ ID NO: 914; WAN024G49_at; Start 440; Stop 464
gagtatggatagctctagccctagc

SEQ ID NO: 230417 - DNA, 25 bp, Artificial
  probe
  misc_feature (1)..(25): SEQ ID NO: 914; WAN024G49_at; Start 731; Stop 755
tacgtgaccctatttccaattcgcc

SEQ ID NO: 230418 - DNA, 25 bp, Artificial
  probe
  misc_feature (1)..(25): SEQ ID NO: 914; WAN024G49_at; Start 99; Stop 123
tattattgggtcaaatggttgtggg

SEQ ID NO: 230419 - DNA, 25 bp, Artificial
  probe
  misc_feature (1)..(25): SEQ ID NO: 914; WAN024G49_at; Start 226; Stop 250
gcaaaacacatagctatattacctc

SEQ ID NO: 230420 - DNA, 25 bp, Artificial
  probe
  misc_feature (1)..(25): SEQ ID NO: 914; WAN024G49_at; Start 538; Stop 562
gacctcttgactgatctaaaccaaa

SEQ ID NO: 230421 - DNA, 25 bp, Artificial
  probe
  misc_feature (1)..(25): SEQ ID NO: 914; WAN024G49_at; Start 343; Stop 367
gatgaccttgaaataataaacagat

SEQ ID NO: 230422 - DNA, 25 bp, Artificial
  probe
  misc_feature (1)..(25): SEQ ID NO: 914; WAN024G49_at; Start 523; Stop 547
caaatagaactattagacctcttga

SEQ ID NO: 230423 - DNA, 25 bp, Artificial
  probe
  misc_feature (1)..(25): SEQ ID NO: 914; WAN024G49_at; Start 716; Stop 740
ttgaagcaaaaattatacgtgaccc

SEQ ID NO: 230424 - DNA, 25 bp, Artificial
  probe
  misc_feature (1)..(25): SEQ ID NO: 914; WAN024G49_at; Start 429; Stop 453
tcaaaggcaaagagtatggatagct

SEQ ID NO: 230425 - DNA, 25 bp, Artificial
  probe
  misc_feature (1)..(25): SEQ ID NO: 914; WAN024G49_at; Start 587; Stop 611
ttttgcacgatataaatctaacagc

SEQ ID NO: 230426 - DNA, 25 bp, Artificial
  probe
  misc_feature (1)..(25): SEQ ID NO: 914; WAN024G49_at; Start 488; Stop 512
tagatgagccaactacttacttgga

SEQ ID NO: 230427 - DNA, 25 bp, Artificial
  probe
  misc_feature (1)..(25): SEQ ID NO: 914; WAN024G49_at; Start 401; Stop 425
ataacctagttgaagaactttctgg

SEQ ID NO: 230428 - DNA, 25 bp, Artificial
  probe
  misc_feature (1)..(25): SEQ ID NO: 914; WAN024G49_at; Start 473; Stop 497
caagtatcctacttttagatgagcc

SEQ ID NO: 230429 - DNA, 25 bp, Artificial
  probe
  misc_feature (1)..(25): SEQ ID NO: 914; WAN024G49_at; Start 614; Stop 638
gatacgctgattacctatttgcaat

SEQ ID NO: 230430 - DNA, 25 bp, Artificial
  probe
  misc_feature (1)..(25): SEQ ID NO: 914; WAN024G49_at; Start 141; Stop 165
aaccttgtctcgacttataaagcca

SEQ ID NO: 230431 - DNA, 25 bp, Artificial
  probe
  misc_feature (1)..(25): SEQ ID NO: 914; WAN024G49_at; Start 359; Stop 383
taaacagatcaatggttaaggccaa

SEQ ID NO: 230432 - DNA, 25 bp, Artificial
  probe
  misc_feature (1)..(25): SEQ ID NO: 914; WAN024G49_at; Start 315; Stop 339
cagaaagccttttaagagtcttgga

SEQ ID NO: 230433 - DNA, 25 bp, Artificial
  probe
  misc_feature (1)..(25): SEQ ID NO: 914; WAN024G49_at; Start 283; Stop 307
gctgatcttgtaagccgtggtcgtt

SEQ ID NO: 230434 - DNA, 25 bp, Artificial
  probe
  misc_feature (1)..(25): SEQ ID NO: 914; WAN024G49_at; Start 665; Stop 689
gaaagcctgaagatatactaaatga

SEQ ID NO: 230435 - DNA, 25 bp, Artificial
  probe
  misc_feature (1)..(25): SEQ ID NO: 914; WAN024G49_at; Start 745; Stop 769
tccaattcgcctctaatgattccta

SEQ ID NO: 230436 - DNA, 25 bp, Artificial
  probe
  misc_feature (1)..(25): SEQ ID NO: 914; WAN024G49_at; Start 275; Stop 299
taacagtagctgatcttgtaagccg

SEQ ID NO: 230437 - DNA, 25 bp, Artificial
  probe
  misc_feature (1)..(25): SEQ ID NO: 914; WAN024G49_at; Start 455; Stop 479
tagccctagcccaagatacaagtat

SEQ ID NO: 230438 - DNA, 25 bp, Artificial
  probe
  misc_feature (1)..(25): SEQ ID NO: 914; WAN024G49_at; Start 599; Stop 623
taaatctaacagcaagatacgctga

SEQ ID NO: 230439 - DNA, 25 bp, Artificial
  probe
  misc_feature (1)..(25): SEQ ID NO: 914; WAN024G49_at; Start 650; Stop 674
aacttgttgcagagggaaagcctga

SEQ ID NO: 230440 - DNA, 25 bp, Artificial
  probe
  misc_feature (1)..(25): SEQ ID NO: 914; WAN024G49_at; Start 374; Stop 398
ttaaggccaatgttgaagatctagc

SEQ ID NO: 230441 - DNA, 25 bp, Artificial
  probe
  misc_feature (1)..(25): SEQ ID NO: 914; WAN024G49_at; Start 214; Stop 238
gaaaaagatttagcaaaacacatag

SEQ ID NO: 230442 - DNA, 25 bp, Artificial
  probe
  misc_feature (1)..(25): SEQ ID NO: 914; WAN024G49_at; Start 388; Stop 412
gaagatctagcaaataacctagttg

SEQ ID NO: 230443 - DNA, 25 bp, Artificial
  probe
  misc_feature (1)..(25): SEQ ID NO: 914; WAN024G49_at; Start 260; Stop 284
taatccctgaatcaataacagtagc

SEQ ID NO: 230444 - DNA, 25 bp, Artificial
  probe
  misc_feature (1)..(25): SEQ ID NO: 914; WAN024G49_at; Start 762; Stop 786
gattcctattggcaagcaccatgtt

SEQ ID NO: 230445 - DNA, 25 bp, Artificial
  probe
  misc_feature (1)..(25): SEQ ID NO: 914; WAN024G49_at; Start 25; Stop 49
cttacctgcggttatgatgaaaaaa

SEQ ID NO: 230446 - DNA, 25 bp, Artificial
  probe
  misc_feature (1)..(25): SEQ ID NO: 609; WAN024G4A_at; Start 1267; Stop 1291
catctgaaaatgaccgacactggaa

SEQ ID NO: 230447 - DNA, 25 bp, Artificial
  probe
  misc_feature (1)..(25): SEQ ID NO: 609; WAN024G4A_at; Start 1991; Stop 2015
taaaacccgatgtttcagcacctgg

SEQ ID NO: 230448 - DNA, 25 bp, Artificial
  probe
  misc_feature (1)..(25): SEQ ID NO: 609; WAN024G4A_at; Start 2236; Stop 2260
cctatgatggatgcaacttcttgga

SEQ ID NO: 230449 - DNA, 25 bp, Artificial
  probe
  misc_feature (1)..(25): SEQ ID NO: 609; WAN024G4A_at; Start 2557; Stop 2581
tctccagatggtaagcaaattgttc

SEQ ID NO: 230450 - DNA, 25 bp, Artificial
  probe
  misc_feature (1)..(25): SEQ ID NO: 609; WAN024G4A_at; Start 819; Stop 843
gagtgataaaatccctcatgcgttc

SEQ ID NO: 230451 - DNA, 25 bp, Artificial
  probe
  misc_feature (1)..(25): SEQ ID NO: 609; WAN024G4A_at; Start 1684; Stop 1708
gaagcggatgaaggtactaaaagtc

SEQ ID NO: 230452 - DNA, 25 bp, Artificial
  probe
  misc_feature (1)..(25): SEQ ID NO: 609; WAN024G4A_at; Start 1443; Stop 1467
tgaagatggaacaaaagctcctagt

SEQ ID NO: 230453 - DNA, 25 bp, Artificial
  probe
  misc_feature (1)..(25): SEQ ID NO: 609; WAN024G4A_at; Start 1024; Stop 1048
tattctgacgcaggatctgggtttg

SEQ ID NO: 230454 - DNA, 25 bp, Artificial
  probe
  misc_feature (1)..(25): SEQ ID NO: 609; WAN024G4A_at; Start 1669; Stop 1693
ccagctatgggatatgaagcggatg

SEQ ID NO: 230455 - DNA, 25 bp, Artificial
  probe
  misc_feature (1)..(25): SEQ ID NO: 609; WAN024G4A_at; Start 495; Stop 519
taacggtagtgccatagaaacaact

SEQ ID NO: 230456 - DNA, 25 bp, Artificial
  probe
  misc_feature (1)..(25): SEQ ID NO: 609; WAN024G4A_at; Start 919; Stop 943
catattgcagggattcttgctggaa

SEQ ID NO: 230457 - DNA, 25 bp, Artificial
  probe
  misc_feature (1)..(25): SEQ ID NO: 609; WAN024G4A_at; Start 3124; Stop 3148
tcaaatggaaatcctcaagatgctc

SEQ ID NO: 230458 - DNA, 25 bp, Artificial
  probe
  misc_feature (1)..(25): SEQ ID NO: 609; WAN024G4A_at; Start 1649; Stop 1673
gagataattggacagagcttccagc

SEQ ID NO: 230459 - DNA, 25 bp, Artificial
  probe
  misc_feature (1)..(25): SEQ ID NO: 609; WAN024G4A_at; Start 3502; Stop 3526
ttaactaaagattacccatggcagg

SEQ ID NO: 230460 - DNA, 25 bp, Artificial
  probe
  misc_feature (1)..(25): SEQ ID NO: 609; WAN024G4A_at; Start 1288; Stop 1312
ggaaatgtaacacgaactgcagcac

SEQ ID NO: 230461 - DNA, 25 bp, Artificial
  probe
  misc_feature (1)..(25): SEQ ID NO: 609; WAN024G4A_at; Start 1891; Stop 1915
gactttaagtttgcacctgacacag

SEQ ID NO: 230462 - DNA, 25 bp, Artificial
  probe
  misc_feature (1)..(25): SEQ ID NO: 609; WAN024G4A_at; Start 1194; Stop 1218
tccaatggttgtcgctacgggtaac

SEQ ID NO: 230463 - DNA, 25 bp, Artificial
  probe
  misc_feature (1)..(25): SEQ ID NO: 609; WAN024G4A_at; Start 962; Stop 986
tcaaaaactttaacggcatagatgg

SEQ ID NO: 230464 - DNA, 25 bp, Artificial
  probe
  misc_feature (1)..(25): SEQ ID NO: 609; WAN024G4A_at; Start 45; Stop 69
tttagcagcctatgcccctaatgag

SEQ ID NO: 230465 - DNA, 25 bp, Artificial
  probe
  misc_feature (1)..(25): SEQ ID NO: 609; WAN024G4A_at; Start 1209; Stop 1233
tacgggtaactatgcgacttctgct

SEQ ID NO: 230466 - DNA, 25 bp, Artificial
  probe
  misc_feature (1)..(25): SEQ ID NO: 609; WAN024G4A_at; Start 1855; Stop 1879
tccaacaaaccgaatgtaggtgacg

SEQ ID NO: 230467 - DNA, 25 bp, Artificial
  probe
  misc_feature (1)..(25): SEQ ID NO: 609; WAN024G4A_at; Start 890; Stop 914
gaagggattattttgacccacatgg

SEQ ID NO: 230468 - DNA, 25 bp, Artificial
  probe
  misc_feature (1)..(25): SEQ ID NO: 609; WAN024G4A_at; Start 573; Stop 597
ggcacaaaaagtccaacccatgatg

SEQ ID NO: 230469 - DNA, 25 bp, Artificial
  probe
  misc_feature (1)..(25): SEQ ID NO: 609; WAN024G4A_at; Start 61; Stop 85
cctaatgaggtagtcttagcagaca

SEQ ID NO: 230470 - DNA, 25 bp, Artificial
  probe
  misc_feature (1)..(25): SEQ ID NO: 609; WAN024G4A_at; Start 1590; Stop 1614
agctatggataagggtgcacgcgcc

SEQ ID NO: 230471 - DNA, 25 bp, Artificial
  probe
  misc_feature (1)..(25): SEQ ID NO: 609; WAN024G4A_at; Start 1235; Stop 1259
caagttcttcatgggatttagtagc

SEQ ID NO: 230472 - DNA, 25 bp, Artificial
  probe
  misc_feature (1)..(25): SEQ ID NO: 609; WAN024G4A_at; Start 1933; Stop 1957
gaagatatcatcgttccagcaggat

SEQ ID NO: 230473 - DNA, 25 bp, Artificial
  probe
  misc_feature (1)..(25): SEQ ID NO: 609; WAN024G4A_at; Start 2819; Stop 2843
gatttgctgggaattggaaccacga

SEQ ID NO: 230474 - DNA, 25 bp, Artificial
  probe
  misc_feature (1)..(25): SEQ ID NO: 609; WAN024G4A_at; Start 2846; Stop 2870
caatccttgataaatgggcttggga

SEQ ID NO: 230475 - DNA, 25 bp, Artificial
  probe
  misc_feature (1)..(25): SEQ ID NO: 609; WAN024G4A_at; Start 1130; Stop 1154
caggaacaggtcttgtaggtgagaa

SEQ ID NO: 230476 - DNA, 25 bp, Artificial
  probe
  misc_feature (1)..(25): SEQ ID NO: 609; WAN024G4A_at; Start 1115; Stop 1139
tatcatctggttttacaggaacagg

SEQ ID NO: 230477 - DNA, 25 bp, Artificial
  probe
  misc_feature (1)..(25): SEQ ID NO: 609; WAN024G4A_at; Start 1172; Stop 1196
gggcattaagaaaagcaggcattcc

SEQ ID NO: 230478 - DNA, 25 bp, Artificial
  probe
  misc_feature (1)..(25): SEQ ID NO: 609; WAN024G4A_at; Start 1327; Stop 1351
gcggtcgcttctgctaaaaatcaaa

SEQ ID NO: 230479 - DNA, 25 bp, Artificial
  probe
  misc_feature (1)..(25): SEQ ID NO: 609; WAN024G4A_at; Start 904; Stop 928
gacccacatgggatgcatattgcag

SEQ ID NO: 230480 - DNA, 25 bp, Artificial
  probe
  misc_feature (1)..(25): SEQ ID NO: 5817; WAN024G4B_at; Start 498; Stop 522
gcaaattgctggatttagtaaagaa

SEQ ID NO: 230481 - DNA, 25 bp, Artificial
  probe
  misc_feature (1)..(25): SEQ ID NO: 5817; WAN024G4B_at; Start 315; Stop 339
tgatctcttggacagcctcattgag

SEQ ID NO: 230482 - DNA, 25 bp, Artificial
  probe
  misc_feature (1)..(25): SEQ ID NO: 5817; WAN024G4B_at; Start 25; Stop 49
gacctcgaccacactcttcttgatt

SEQ ID NO: 230483 - DNA, 25 bp, Artificial
  probe
  misc_feature (1)..(25): SEQ ID NO: 5817; WAN024G4B_at; Start 9; Stop 33
caaatttctactcttcgacctcgac

SEQ ID NO: 230484 - DNA, 25 bp, Artificial
  probe
  misc_feature (1)..(25): SEQ ID NO: 5817; WAN024G4B_at; Start 556; Stop 580
gacattcaaggtggcaataatgcgg

SEQ ID NO: 230485 - DNA, 25 bp, Artificial
  probe
  misc_feature (1)..(25): SEQ ID NO: 5817; WAN024G4B_at; Start 168; Stop 192
gctgaagaaaatcagtaaacaagag

SEQ ID NO: 230486 - DNA, 25 bp, Artificial
  probe
  misc_feature (1)..(25): SEQ ID NO: 5817; WAN024G4B_at; Start 371; Stop 395
gcattactgccattcagacaggacg

SEQ ID NO: 230487 - DNA, 25 bp, Artificial
  probe
  misc_feature (1)..(25): SEQ ID NO: 5817; WAN024G4B_at; Start 381; Stop 405
cattcagacaggacgtttggctcaa

SEQ ID NO: 230488 - DNA, 25 bp, Artificial
  probe
  misc_feature (1)..(25): SEQ ID NO: 5817; WAN024G4B_at; Start 526; Stop 550
acgctgatgattggagattctctaa

SEQ ID NO: 230489 - DNA, 25 bp, Artificial
  probe
  misc_feature (1)..(25): SEQ ID NO: 5817; WAN024G4B_at; Start 97; Stop 121
ggagttgcggatattcaggcttata

SEQ ID NO: 230490 - DNA, 25 bp, Artificial
  probe
  misc_feature (1)..(25): SEQ ID NO: 5817; WAN024G4B_at; Start 138; Stop 162
tatgaacaaggctctctggaaagac

SEQ ID NO: 230491 - DNA, 25 bp, Artificial
  probe
  misc_feature (1)..(25): SEQ ID NO: 5817; WAN024G4B_at; Start 445; Stop 469
gaacagttgcaaactcaaaagccgg

SEQ ID NO: 230492 - DNA, 25 bp, Artificial
  probe
  misc_feature (1)..(25): SEQ ID NO: 5817; WAN024G4B_at; Start 355; Stop 379
tatgctgcgacaaatggcattactg

SEQ ID NO: 230493 - DNA, 25 bp, Artificial
  probe
  misc_feature (1)..(25): SEQ ID NO: 5817; WAN024G4B_at; Start 65; Stop 89
atgtggctttgacccaacttctaaa

SEQ ID NO: 230494 - DNA, 25 bp, Artificial
  probe
  misc_feature (1)..(25): SEQ ID NO: 5817; WAN024G4B_at; Start 658; Stop 682
taccaagacttgctggattgtttag

SEQ ID NO: 230495 - DNA, 25 bp, Artificial
  probe
  misc_feature (1)..(25): SEQ ID NO: 5817; WAN024G4B_at; Start 484; Stop 508
gaaaagattggccagcaaattgctg

SEQ ID NO: 230496 - DNA, 25 bp, Artificial
  probe
  misc_feature (1)..(25): SEQ ID NO: 5817; WAN024G4B_at; Start 643; Stop 667
tacgaagtctattcttaccaagact

SEQ ID NO: 230497 - DNA, 25 bp, Artificial
  probe
  misc_feature (1)..(25): SEQ ID NO: 5817; WAN024G4B_at; Start 254; Stop 278
ttcttgcccagcgttaccaatttta

SEQ ID NO: 230498 - DNA, 25 bp, Artificial
  probe
  misc_feature (1)..(25): SEQ ID NO: 5817; WAN024G4B_at; Start 595; Stop 619
tggtataatcctcatcacctcgaaa

SEQ ID NO: 230499 - DNA, 25 bp, Artificial
  probe
  misc_feature (1)..(25): SEQ ID NO: 5817; WAN024G4B_at; Start 287; Stop 311
agcagggacaaacactatcgggcgc

SEQ ID NO: 230500 - DNA, 25 bp, Artificial
  probe
  misc_feature (1)..(25): SEQ ID NO: 5817; WAN024G4B_at; Start 452; Stop 476
tgcaaactcaaaagccggatgctct

SEQ ID NO: 230501 - DNA, 25 bp, Artificial
  probe
  misc_feature (1)..(25): SEQ ID NO: 5817; WAN024G4B_at; Start 242; Stop 266
aagacggtagttttcttgcccagcg

SEQ ID NO: 230502 - DNA, 25 bp, Artificial
  probe
  misc_feature (1)..(25): SEQ ID NO: 5817; WAN024G4B_at; Start 224; Stop 248
ctcattttggacaggaaaaagacgg

SEQ ID NO: 230503 - DNA, 25 bp, Artificial
  probe
  misc_feature (1)..(25): SEQ ID NO: 5817; WAN024G4B_at; Start 607; Stop 631
catcacctcgaaaatcacacacaag

SEQ ID NO: 230504 - DNA, 25 bp, Artificial
  probe
  misc_feature (1)..(25): SEQ ID NO: 5817; WAN024G4B_at; Start 39; Stop 63
tcttcttgattttgatgctgctgag

SEQ ID NO: 230505 - DNA, 25 bp, Artificial
  probe
  misc_feature (1)..(25): SEQ ID NO: 5817; WAN024G4B_at; Start 152; Stop 176
tctggaaagacttggagctgaagaa

SEQ ID NO: 230506 - DNA, 25 bp, Artificial
  probe
  misc_feature (1)..(25): SEQ ID NO: 5817; WAN024G4B_at; Start 628; Stop 652
caagcccagccgacttacgaagtct

SEQ ID NO: 230507 - DNA, 25 bp, Artificial
  probe
  misc_feature (1)..(25): SEQ ID NO: 5817; WAN024G4B_at; Start 426; Stop 450
caatcaagtctttatctcagaacag

SEQ ID NO: 230508 - DNA, 25 bp, Artificial
  probe
  misc_feature (1)..(25): SEQ ID NO: 5817; WAN024G4B_at; Start 127; Stop 151
tattacgttcctatgaacaaggctc

SEQ ID NO: 230509 - DNA, 25 bp, Artificial
  probe
  misc_feature (1)..(25): SEQ ID NO: 5817; WAN024G4B_at; Start 112; Stop 136
caggcttataaagattattacgttc

SEQ ID NO: 230510 - DNA, 25 bp, Artificial
  probe
  misc_feature (1)..(25): SEQ ID NO: 5817; WAN024G4B_at; Start 391; Stop 415
ggacgtttggctcaatctggtctag

SEQ ID NO: 230511 - DNA, 25 bp, Artificial
  probe
  misc_feature (1)..(25): SEQ ID NO: 5817; WAN024G4B_at; Start 580; Stop 604
gggattgacactatctggtataatc

SEQ ID NO: 230512 - DNA, 25 bp, Artificial
  probe
  misc_feature (1)..(25): SEQ ID NO: 5817; WAN024G4B_at; Start 324; Stop 348
ggacagcctcattgagcgtgattat

SEQ ID NO: 230513 - DNA, 25 bp, Artificial
  probe
  misc_feature (1)..(25): SEQ ID NO: 5817; WAN024G4B_at; Start 302; Stop 326
tatcgggcgctcatgatctcttgga

SEQ ID NO: 230514 - DNA, 25 bp, Artificial
  probe
  misc_feature (1)..(25): SEQ ID NO: 4244; WAN024G4C_at; Start 195; Stop 219
catgagcagttctttcccattatca

SEQ ID NO: 230515 - DNA, 25 bp, Artificial
  probe
  misc_feature (1)..(25): SEQ ID NO: 4244; WAN024G4C_at; Start 185; Stop 209
tacgatggagcatgagcagttcttt

SEQ ID NO: 230516 - DNA, 25 bp, Artificial
  probe
  misc_feature (1)..(25): SEQ ID NO: 4244; WAN024G4C_at; Start 57; Stop 81
tggcttggctttgagccctgtttct

SEQ ID NO: 230517 - DNA, 25 bp, Artificial
  probe
  misc_feature (1)..(25): SEQ ID NO: 4244; WAN024G4C_at; Start 16; Stop 40
tctggtgtaaattcaggaaaagtga

SEQ ID NO: 230518 - DNA, 25 bp, Artificial
  probe
  misc_feature (1)..(25): SEQ ID NO: 4244; WAN024G4C_at; Start 142; Stop 166
acaccaatccatttcccttcatgga

SEQ ID NO: 230519 - DNA, 25 bp, Artificial
  probe
  misc_feature (1)..(25): SEQ ID NO: 4244; WAN024G4C_at; Start 174; Stop 198
gggtttcttattacgatggagcatg

SEQ ID NO: 230520 - DNA, 25 bp, Artificial
  probe
  misc_feature (1)..(25): SEQ ID NO: 4244; WAN024G4C_at; Start 179; Stop 203
tcttattacgatggagcatgagcag

SEQ ID NO: 230521 - DNA, 25 bp, Artificial
  probe
  misc_feature (1)..(25): SEQ ID NO: 4244; WAN024G4C_at; Start 153; Stop 177
tttcccttcatggacatcattgggt

SEQ ID NO: 230522 - DNA, 25 bp, Artificial
  probe
  misc_feature (1)..(25): SEQ ID NO: 4244; WAN024G4C_at; Start 69; Stop 93
gagccctgtttcttcaaggatttca

SEQ ID NO: 230523 - DNA, 25 bp, Artificial
  probe
  misc_feature (1)..(25): SEQ ID NO: 4244; WAN024G4C_at; Start 71; Stop 95
gccctgtttcttcaaggatttcacg

SEQ ID NO: 230524 - DNA, 25 bp, Artificial
  probe
  misc_feature (1)..(25): SEQ ID NO: 4244; WAN024G4C_at; Start 39; Stop 63
gatgacaccttttagaactggcttg

SEQ ID NO: 230525 - DNA, 25 bp, Artificial
  probe
  misc_feature (1)..(25): SEQ ID NO: 4244; WAN024G4C_at; Start 23; Stop 47
taaattcaggaaaagtgatgacacc

SEQ ID NO: 230526 - DNA, 25 bp, Artificial
  probe
  misc_feature (1)..(25): SEQ ID NO: 4244; WAN024G4C_at; Start 50; Stop 74
ttagaactggcttggctttgagccc

SEQ ID NO: 230527 - DNA, 25 bp, Artificial
  probe
  misc_feature (1)..(25): SEQ ID NO: 4244; WAN024G4C_at; Start 111; Stop 135
gggcgtctctcctctctctagctta

SEQ ID NO: 230528 - DNA, 25 bp, Artificial
  probe
  misc_feature (1)..(25): SEQ ID NO: 4244; WAN024G4C_at; Start 191; Stop 215
ggagcatgagcagttctttcccatt

SEQ ID NO: 230529 - DNA, 25 bp, Artificial
  probe
  misc_feature (1)..(25): SEQ ID NO: 4244; WAN024G4C_at; Start 1; Stop 25
gtgtaccagtctaaatctggtgtaa

SEQ ID NO: 230530 - DNA, 25 bp, Artificial
  probe
  misc_feature (1)..(25): SEQ ID NO: 4244; WAN024G4C_at; Start 200; Stop 224
gcagttctttcccattatcaatgta

SEQ ID NO: 230531 - DNA, 25 bp, Artificial
  probe
  misc_feature (1)..(25): SEQ ID NO: 4244; WAN024G4C_at; Start 46; Stop 70
ccttttagaactggcttggctttga

SEQ ID NO: 230532 - DNA, 25 bp, Artificial
  probe
  misc_feature (1)..(25): SEQ ID NO: 4244; WAN024G4C_at; Start 125; Stop 149
tctctagcttaccacccacaccaat

SEQ ID NO: 230533 - DNA, 25 bp, Artificial
  probe
  misc_feature (1)..(25): SEQ ID NO: 4244; WAN024G4C_at; Start 64; Stop 88
gctttgagccctgtttcttcaagga

SEQ ID NO: 230534 - DNA, 25 bp, Artificial
  probe
  misc_feature (1)..(25): SEQ ID NO: 4244; WAN024G4C_at; Start 188; Stop 212
gatggagcatgagcagttctttccc

SEQ ID NO: 230535 - DNA, 25 bp, Artificial
  probe
  misc_feature (1)..(25): SEQ ID NO: 4244; WAN024G4C_at; Start 165; Stop 189
gacatcattgggtttcttattacga

SEQ ID NO: 230536 - DNA, 25 bp, Artificial
  probe
  misc_feature (1)..(25): SEQ ID NO: 4244; WAN024G4C_at; Start 176; Stop 200
gtttcttattacgatggagcatgag

SEQ ID NO: 230537 - DNA, 25 bp, Artificial
  probe
  misc_feature (1)..(25): SEQ ID NO: 4244; WAN024G4C_at; Start 26; Stop 50
attcaggaaaagtgatgacaccttt

SEQ ID NO: 230538 - DNA, 25 bp, Artificial
  probe
  misc_feature (1)..(25): SEQ ID NO: 4244; WAN024G4C_at; Start 11; Stop 35
ctaaatctggtgtaaattcaggaaa

SEQ ID NO: 230539 - DNA, 25 bp, Artificial
  probe
  misc_feature (1)..(25): SEQ ID NO: 4244; WAN024G4C_at; Start 42; Stop 66
gacaccttttagaactggcttggct

SEQ ID NO: 230540 - DNA, 25 bp, Artificial
  probe
  misc_feature (1)..(25): SEQ ID NO: 4244; WAN024G4C_at; Start 170; Stop 194
cattgggtttcttattacgatggag

SEQ ID NO: 230541 - DNA, 25 bp, Artificial
  probe
  misc_feature (1)..(25): SEQ ID NO: 4244; WAN024G4C_at; Start 7; Stop 31
cagtctaaatctggtgtaaattcag

SEQ ID NO: 230542 - DNA, 25 bp, Artificial
  probe
  misc_feature (1)..(25): SEQ ID NO: 4244; WAN024G4C_at; Start 182; Stop 206
tattacgatggagcatgagcagttc

SEQ ID NO: 230543 - DNA, 25 bp, Artificial
  probe
  misc_feature (1)..(25): SEQ ID NO: 4244; WAN024G4C_at; Start 36; Stop 60
agtgatgacaccttttagaactggc

SEQ ID NO: 230544 - DNA, 25 bp, Artificial
  probe
  misc_feature (1)..(25): SEQ ID NO: 4244; WAN024G4C_at; Start 151; Stop 175
catttcccttcatggacatcattgg

SEQ ID NO: 230545 - DNA, 25 bp, Artificial
  probe
  misc_feature (1)..(25): SEQ ID NO: 4244; WAN024G4C_at; Start 198; Stop 222
gagcagttctttcccattatcaatg

SEQ ID NO: 230546 - DNA, 25 bp, Artificial
  probe
  misc_feature (1)..(25): SEQ ID NO: 4244; WAN024G4C_at; Start 53; Stop 77
gaactggcttggctttgagccctgt

SEQ ID NO: 230547 - DNA, 25 bp, Artificial
  probe
  misc_feature (1)..(25): SEQ ID NO: 4244; WAN024G4C_at; Start 157; Stop 181
ccttcatggacatcattgggtttct

SEQ ID NO: 230548 - DNA, 25 bp, Artificial
  probe
  misc_feature (1)..(25): SEQ ID NO: 3117; WAN024G4D_at; Start 639; Stop 663
catttttgatattccgctcgaacca

SEQ ID NO: 230549 - DNA, 25 bp, Artificial
  probe
  misc_feature (1)..(25): SEQ ID NO: 3117; WAN024G4D_at; Start 694; Stop 718
gataagccttggaatcaattttctg

SEQ ID NO: 230550 - DNA, 25 bp, Artificial
  probe
  misc_feature (1)..(25): SEQ ID NO: 3117; WAN024G4D_at; Start 186; Stop 210
gattgactgcaagttaattggctca

SEQ ID NO: 230551 - DNA, 25 bp, Artificial
  probe
  misc_feature (1)..(25): SEQ ID NO: 3117; WAN024G4D_at; Start 415; Stop 439
gtcggcttcaatgctggtgttctct

SEQ ID NO: 230552 - DNA, 25 bp, Artificial
  probe
  misc_feature (1)..(25): SEQ ID NO: 3117; WAN024G4D_at; Start 386; Stop 410
cagcagctcgttcttgctttggagc

SEQ ID NO: 230553 - DNA, 25 bp, Artificial
  probe
  misc_feature (1)..(25): SEQ ID NO: 3117; WAN024G4D_at; Start 59; Stop 83
tcgaaacggcgatgaagtcactctg

SEQ ID NO: 230554 - DNA, 25 bp, Artificial
  probe
  misc_feature (1)..(25): SEQ ID NO: 3117; WAN024G4D_at; Start 129; Stop 153
tcctcaggaatggtttagtcaaata

SEQ ID NO: 230555 - DNA, 25 bp, Artificial
  probe
  misc_feature (1)..(25): SEQ ID NO: 3117; WAN024G4D_at; Start 972; Stop 996
tgttaccgtatatccaaattcctta

SEQ ID NO: 230556 - DNA, 25 bp, Artificial
  probe
  misc_feature (1)..(25): SEQ ID NO: 3117; WAN024G4D_at; Start 709; Stop 733
caattttctgttggacgtctaagag

SEQ ID NO: 230557 - DNA, 25 bp, Artificial
  probe
  misc_feature (1)..(25): SEQ ID NO: 3117; WAN024G4D_at; Start 870; Stop 894
gaaaatcgattatttggcggagcaa

SEQ ID NO: 230558 - DNA, 25 bp, Artificial
  probe
  misc_feature (1)..(25): SEQ ID NO: 3117; WAN024G4D_at; Start 938; Stop 962
caaatgaactactagctttaacgcg

SEQ ID NO: 230559 - DNA, 25 bp, Artificial
  probe
  misc_feature (1)..(25): SEQ ID NO: 3117; WAN024G4D_at; Start 1153; Stop 1177
tatgaaggtatctatccaagctcca

SEQ ID NO: 230560 - DNA, 25 bp, Artificial
  probe
  misc_feature (1)..(25): SEQ ID NO: 3117; WAN024G4D_at; Start 114; Stop 138
gctaaatcaggacattcctcaggaa

SEQ ID NO: 230561 - DNA, 25 bp, Artificial
  probe
  misc_feature (1)..(25): SEQ ID NO: 3117; WAN024G4D_at; Start 848; Stop 872
taacgaattcttggtgtgtcgagaa

SEQ ID NO: 230562 - DNA, 25 bp, Artificial
  probe
  misc_feature (1)..(25): SEQ ID NO: 3117; WAN024G4D_at; Start 1083; Stop 1107
tgtgcttaagtacaaaaaaccaatg

SEQ ID NO: 230563 - DNA, 25 bp, Artificial
  probe
  misc_feature (1)..(25): SEQ ID NO: 3117; WAN024G4D_at; Start 523; Stop 547
gaaggagaccagtcaattttgaata

SEQ ID NO: 230564 - DNA, 25 bp, Artificial
  probe
  misc_feature (1)..(25): SEQ ID NO: 3117; WAN024G4D_at; Start 246; Stop 270
tatcaatcatatgacatttgcacgc

SEQ ID NO: 230565 - DNA, 25 bp, Artificial
  probe
  misc_feature (1)..(25): SEQ ID NO: 3117; WAN024G4D_at; Start 654; Stop 678
gctcgaaccactgccactaatttta

SEQ ID NO: 230566 - DNA, 25 bp, Artificial
  probe
  misc_feature (1)..(25): SEQ ID NO: 3117; WAN024G4D_at; Start 1122; Stop 1146
tacttgctctgaaaatctttctgag

SEQ ID NO: 230567 - DNA, 25 bp, Artificial
  probe
  misc_feature (1)..(25): SEQ ID NO: 3117; WAN024G4D_at; Start 677; Stop 701
tacactatatttctcaggataagcc

SEQ ID NO: 230568 - DNA, 25 bp, Artificial
  probe
  misc_feature (1)..(25): SEQ ID NO: 3117; WAN024G4D_at; Start 400; Stop 424
tgctttggagcaggagtcggcttca

SEQ ID NO: 230569 - DNA, 25 bp, Artificial
  probe
  misc_feature (1)..(25): SEQ ID NO: 3117; WAN024G4D_at; Start 46; Stop 70
tatattcgacaaatcgaaacggcga

SEQ ID NO: 230570 - DNA, 25 bp, Artificial
  probe
  misc_feature (1)..(25): SEQ ID NO: 3117; WAN024G4D_at; Start 32; Stop 56
caggtgattacgcttatattcgaca

SEQ ID NO: 230571 - DNA, 25 bp, Artificial
  probe
  misc_feature (1)..(25): SEQ ID NO: 3117; WAN024G4D_at; Start 1195; Stop 1219
gcagcaatcagatcttacatgaggc

SEQ ID NO: 230572 - DNA, 25 bp, Artificial
  probe
  misc_feature (1)..(25): SEQ ID NO: 3117; WAN024G4D_at; Start 745; Stop 769
gaatactctttgatggattggtctg

SEQ ID NO: 230573 - DNA, 25 bp, Artificial
  probe
  misc_feature (1)..(25): SEQ ID NO: 3117; WAN024G4D_at; Start 326; Stop 350
tgattgtgactggtgatttgaccga

SEQ ID NO: 230574 - DNA, 25 bp, Artificial
  probe
  misc_feature (1)..(25): SEQ ID NO: 3117; WAN024G4D_at; Start 71; Stop 95
tgaagtcactctgtagacacaatag

SEQ ID NO: 230575 - DNA, 25 bp, Artificial
  probe
  misc_feature (1)..(25): SEQ ID NO: 3117; WAN024G4D_at; Start 726; Stop 750
tctaagagaagtttggtgggaatac

SEQ ID NO: 230576 - DNA, 25 bp, Artificial
  probe
  misc_feature (1)..(25): SEQ ID NO: 3117; WAN024G4D_at; Start 508; Stop 532
catgagaatgtggaagaaggagacc

SEQ ID NO: 230577 - DNA, 25 bp, Artificial
  probe
  misc_feature (1)..(25): SEQ ID NO: 3117; WAN024G4D_at; Start 885; Stop 909
ggcggagcaattgccagaagttcat

SEQ ID NO: 230578 - DNA, 25 bp, Artificial
  probe
  misc_feature (1)..(25): SEQ ID NO: 3117; WAN024G4D_at; Start 372; Stop 396
tgaaaattatttggcagcagctcgt

SEQ ID NO: 230579 - DNA, 25 bp, Artificial
  probe
  misc_feature (1)..(25): SEQ ID NO: 3117; WAN024G4D_at; Start 260; Stop 284
catttgcacgctattttattccaga

SEQ ID NO: 230580 - DNA, 25 bp, Artificial
  probe
  misc_feature (1)..(25): SEQ ID NO: 3117; WAN024G4D_at; Start 200; Stop 224
taattggctcacagtttcaaatgaa

SEQ ID NO: 230581 - DNA, 25 bp, Artificial
  probe
  misc_feature (1)..(25): SEQ ID NO: 3117; WAN024G4D_at; Start 1100; Stop 1124
aaccaatgatagctttcgacaatac

SEQ ID NO: 230582 - DNA, 25 bp, Artificial
  probe
  misc_feature (1)..(25): SEQ ID NO: 2015; WAN024G4E_at; Start 162; Stop 186
ccttgaagaaacagggctcaaagcc

SEQ ID NO: 230583 - DNA, 25 bp, Artificial
  probe
  misc_feature (1)..(25): SEQ ID NO: 2015; WAN024G4E_at; Start 116; Stop 140
agctagagagaggagagacgcccca

SEQ ID NO: 230584 - DNA, 25 bp, Artificial
  probe
  misc_feature (1)..(25): SEQ ID NO: 2015; WAN024G4E_at; Start 264; Stop 288
gacggagtttgagggcgacttgatt

SEQ ID NO: 230585 - DNA, 25 bp, Artificial
  probe
  misc_feature (1)..(25): SEQ ID NO: 2015; WAN024G4E_at; Start 230; Stop 254
cagatttagactggtacacctatgt

SEQ ID NO: 230586 - DNA, 25 bp, Artificial
  probe
  misc_feature (1)..(25): SEQ ID NO: 2015; WAN024G4E_at; Start 57; Stop 81
ccatcgtaataagaaacccaatgat

SEQ ID NO: 230587 - DNA, 25 bp, Artificial
  probe
  misc_feature (1)..(25): SEQ ID NO: 2015; WAN024G4E_at; Start 33; Stop 57
taatgggaaagaactgctcatgctc

SEQ ID NO: 230588 - DNA, 25 bp, Artificial
  probe
  misc_feature (1)..(25): SEQ ID NO: 2015; WAN024G4E_at; Start 179; Stop 203
tcaaagccaagccagttctaaaagg

SEQ ID NO: 230589 - DNA, 25 bp, Artificial
  probe
  misc_feature (1)..(25): SEQ ID NO: 2015; WAN024G4E_at; Start 48; Stop 72
gctcatgctccatcgtaataagaaa

SEQ ID NO: 230590 - DNA, 25 bp, Artificial
  probe
  misc_feature (1)..(25): SEQ ID NO: 2015; WAN024G4E_at; Start 355; Stop 379
ggtgaccacacctttgttgagtggc

SEQ ID NO: 230591 - DNA, 25 bp, Artificial
  probe
  misc_feature (1)..(25): SEQ ID NO: 2015; WAN024G4E_at; Start 199; Stop 223
aaaggtgtcatcacttttcctgaat

SEQ ID NO: 230592 - DNA, 25 bp, Artificial
  probe
  misc_feature (1)..(25): SEQ ID NO: 2015; WAN024G4E_at; Start 39; Stop 63
gaaagaactgctcatgctccatcgt

SEQ ID NO: 230593 - DNA, 25 bp, Artificial
  probe
  misc_feature (1)..(25): SEQ ID NO: 2015; WAN024G4E_at; Start 43; Stop 67
gaactgctcatgctccatcgtaata

SEQ ID NO: 230594 - DNA, 25 bp, Artificial
  probe
  misc_feature (1)..(25): SEQ ID NO: 2015; WAN024G4E_at; Start 443; Stop 467
cccaagttgatttctatgaataact

SEQ ID NO: 230595 - DNA, 25 bp, Artificial
  probe
  misc_feature (1)..(25): SEQ ID NO: 2015; WAN024G4E_at; Start 158; Stop 182
aaatccttgaagaaacagggctcaa

SEQ ID NO: 230596 - DNA, 25 bp, Artificial
  probe
  misc_feature (1)..(25): SEQ ID NO: 2015; WAN024G4E_at; Start 385; Stop 409
gaggataaacccttcttttcagcca

SEQ ID NO: 230597 - DNA, 25 bp, Artificial
  probe
  misc_feature (1)..(25): SEQ ID NO: 2015; WAN024G4E_at; Start 219; Stop 243
tgaatttacaccagatttagactgg

SEQ ID NO: 230598 - DNA, 25 bp, Artificial
  probe
  misc_feature (1)..(25): SEQ ID NO: 2015; WAN024G4E_at; Start 372; Stop 396
tgagtggcttttagaggataaaccc

SEQ ID NO: 230599 - DNA, 25 bp, Artificial
  probe
  misc_feature (1)..(25): SEQ ID NO: 2015; WAN024G4E_at; Start 438; Stop 462
ggatacccaagttgatttctatgaa

SEQ ID NO: 230600 - DNA, 25 bp, Artificial
  probe
  misc_feature (1)..(25): SEQ ID NO: 2015; WAN024G4E_at; Start 184; Stop 208
gccaagccagttctaaaaggtgtca

SEQ ID NO: 230601 - DNA, 25 bp, Artificial
  probe
  misc_feature (1)..(25): SEQ ID NO: 2015; WAN024G4E_at; Start 258; Stop 282
taaggtgacggagtttgagggcgac

SEQ ID NO: 230602 - DNA, 25 bp, Artificial
  probe
  misc_feature (1)..(25): SEQ ID NO: 2015; WAN024G4E_at; Start 175; Stop 199
gggctcaaagccaagccagttctaa

SEQ ID NO: 230603 - DNA, 25 bp, Artificial
  probe
  misc_feature (1)..(25): SEQ ID NO: 2015; WAN024G4E_at; Start 237; Stop 261
agactggtacacctatgtttttaag

SEQ ID NO: 230604 - DNA, 25 bp, Artificial
  probe
  misc_feature (1)..(25): SEQ ID NO: 2015; WAN024G4E_at; Start 189; Stop 213
gccagttctaaaaggtgtcatcact

SEQ ID NO: 230605 - DNA, 25 bp, Artificial
  probe
  misc_feature (1)..(25): SEQ ID NO: 2015; WAN024G4E_at; Start 169; Stop 193
gaaacagggctcaaagccaagccag

SEQ ID NO: 230606 - DNA, 25 bp, Artificial
  probe
  misc_feature (1)..(25): SEQ ID NO: 2015; WAN024G4E_at; Start 427; Stop 451
gataaattgttggatacccaagttg

SEQ ID NO: 230607 - DNA, 25 bp, Artificial
  probe
  misc_feature (1)..(25): SEQ ID NO: 2015; WAN024G4E_at; Start 246; Stop 270
cacctatgtttttaaggtgacggag

SEQ ID NO: 230608 - DNA, 25 bp, Artificial
  probe
  misc_feature (1)..(25): SEQ ID NO: 2015; WAN024G4E_at; Start 114; Stop 138
taagctagagagaggagagacgccc

SEQ ID NO: 230609 - DNA, 25 bp, Artificial
  probe
  misc_feature (1)..(25): SEQ ID NO: 2015; WAN024G4E_at; Start 349; Stop 373
tgggaaggtgaccacacctttgttg

SEQ ID NO: 230610 - DNA, 25 bp, Artificial
  probe
  misc_feature (1)..(25): SEQ ID NO: 2015; WAN024G4E_at; Start 209; Stop 233
tcacttttcctgaatttacaccaga

SEQ ID NO: 230611 - DNA, 25 bp, Artificial
  probe
  misc_feature (1)..(25): SEQ ID NO: 2015; WAN024G4E_at; Start 402; Stop 426
ttcagccaagtttgtttatgatggg

SEQ ID NO: 230612 - DNA, 25 bp, Artificial
  probe
  misc_feature (1)..(25): SEQ ID NO: 2015; WAN024G4E_at; Start 363; Stop 387
cacctttgttgagtggcttttagag

SEQ ID NO: 230613 - DNA, 25 bp, Artificial
  probe
  misc_feature (1)..(25): SEQ ID NO: 2015; WAN024G4E_at; Start 53; Stop 77
tgctccatcgtaataagaaacccaa

SEQ ID NO: 230614 - DNA, 25 bp, Artificial
  probe
  misc_feature (1)..(25): SEQ ID NO: 2015; WAN024G4E_at; Start 27; Stop 51
cattgataatgggaaagaactgctc

SEQ ID NO: 230615 - DNA, 25 bp, Artificial
  probe
  misc_feature (1)..(25): SEQ ID NO: 2015; WAN024G4E_at; Start 94; Stop 118
aaatggattggtgtgggtggtaagc

SEQ ID NO: 230616 - DNA, 25 bp, Artificial
  probe
  misc_feature (1)..(25): SEQ ID NO: 1268; WAN024G4F_at; Start 154; Stop 178
tattgtcgtacatgtgcgtgttggc

SEQ ID NO: 230617 - DNA, 25 bp, Artificial
  probe
  misc_feature (1)..(25): SEQ ID NO: 1268; WAN024G4F_at; Start 73; Stop 97
cgttccaaaattcaatatgaaacta

SEQ ID NO: 230618 - DNA, 25 bp, Artificial
  probe
  misc_feature (1)..(25): SEQ ID NO: 1268; WAN024G4F_at; Start 231; Stop 255
gaaactctttggtttagataaatca

SEQ ID NO: 230619 - DNA, 25 bp, Artificial
  probe
  misc_feature (1)..(25): SEQ ID NO: 1268; WAN024G4F_at; Start 17; Stop 41
aacgtagggagagacaagcgaaatc

SEQ ID NO: 230620 - DNA, 25 bp, Artificial
  probe
  misc_feature (1)..(25): SEQ ID NO: 1268; WAN024G4F_at; Start 147; Stop 171
aagctattattgtcgtacatgtgcg

SEQ ID NO: 230621 - DNA, 25 bp, Artificial
  probe
  misc_feature (1)..(25): SEQ ID NO: 1268; WAN024G4F_at; Start 112; Stop 136
catgcggttcaatatgataacggag

SEQ ID NO: 230622 - DNA, 25 bp, Artificial
  probe
  misc_feature (1)..(25): SEQ ID NO: 1268; WAN024G4F_at; Start 21; Stop 45
tagggagagacaagcgaaatctaat

SEQ ID NO: 230623 - DNA, 25 bp, Artificial
  probe
  misc_feature (1)..(25): SEQ ID NO: 1268; WAN024G4F_at; Start 141; Stop 165
agttagaagctattattgtcgtaca

SEQ ID NO: 230624 - DNA, 25 bp, Artificial
  probe
  misc_feature (1)..(25): SEQ ID NO: 1268; WAN024G4F_at; Start 91; Stop 115
gaaactaaagaaaaagctgaccatg

SEQ ID NO: 230625 - DNA, 25 bp, Artificial
  probe
  misc_feature (1)..(25): SEQ ID NO: 1268; WAN024G4F_at; Start 67; Stop 91
gctaatcgttccaaaattcaatatg

SEQ ID NO: 230626 - DNA, 25 bp, Artificial
  probe
  misc_feature (1)..(25): SEQ ID NO: 1268; WAN024G4F_at; Start 218; Stop 242
aaaactatggtctgaaactctttgg

SEQ ID NO: 230627 - DNA, 25 bp, Artificial
  probe
  misc_feature (1)..(25): SEQ ID NO: 1268; WAN024G4F_at; Start 116; Stop 140
cggttcaatatgataacggaggttt

SEQ ID NO: 230628 - DNA, 25 bp, Artificial
  probe
  misc_feature (1)..(25): SEQ ID NO: 1268; WAN024G4F_at; Start 88; Stop 112
tatgaaactaaagaaaaagctgacc

SEQ ID NO: 230629 - DNA, 25 bp, Artificial
  probe
  misc_feature (1)..(25): SEQ ID NO: 1268; WAN024G4F_at; Start 126; Stop 150
tgataacggaggtttagttagaagc

SEQ ID NO: 230630 - DNA, 25 bp, Artificial
  probe
  misc_feature (1)..(25): SEQ ID NO: 1268; WAN024G4F_at; Start 11; Stop 35
ttcgaaaacgtagggagagacaagc

SEQ ID NO: 230631 - DNA, 25 bp, Artificial
  probe
  misc_feature (1)..(25): SEQ ID NO: 1268; WAN024G4F_at; Start 95; Stop 119
ctaaagaaaaagctgaccatgcggt

SEQ ID NO: 230632 - DNA, 25 bp, Artificial
  probe
  misc_feature (1)..(25): SEQ ID NO: 1268; WAN024G4F_at; Start 109; Stop 133
gaccatgcggttcaatatgataacg

SEQ ID NO: 230633 - DNA, 25 bp, Artificial
  probe
  misc_feature (1)..(25): SEQ ID NO: 1268; WAN024G4F_at; Start 100; Stop 124
gaaaaagctgaccatgcggttcaat

SEQ ID NO: 230634 - DNA, 25 bp, Artificial
  probe
  misc_feature (1)..(25): SEQ ID NO: 1268; WAN024G4F_at; Start 27; Stop 51
gagacaagcgaaatctaatagtgga

SEQ ID NO: 230635 - DNA, 25 bp, Artificial
  probe
  misc_feature (1)..(25): SEQ ID NO: 1268; WAN024G4F_at; Start 188; Stop 212
caaaatctaataaacctccgctaag

SEQ ID NO: 230636 - DNA, 25 bp, Artificial
  probe
  misc_feature (1)..(25): SEQ ID NO: 1268; WAN024G4F_at; Start 106; Stop 130
gctgaccatgcggttcaatatgata

SEQ ID NO: 230637 - DNA, 25 bp, Artificial
  probe
  misc_feature (1)..(25): SEQ ID NO: 1268; WAN024G4F_at; Start 175; Stop 199
tggcatactacttcaaaatctaata

SEQ ID NO: 230638 - DNA, 25 bp, Artificial
  probe
  misc_feature (1)..(25): SEQ ID NO: 1268; WAN024G4F_at; Start 164; Stop 188
catgtgcgtgttggcatactacttc

SEQ ID NO: 230639 - DNA, 25 bp, Artificial
  probe
  misc_feature (1)..(25): SEQ ID NO: 1268; WAN024G4F_at; Start 64; Stop 88
gcagctaatcgttccaaaattcaat

SEQ ID NO: 230640 - DNA, 25 bp, Artificial
  probe
  misc_feature (1)..(25): SEQ ID NO: 1268; WAN024G4F_at; Start 14; Stop 38
gaaaacgtagggagagacaagcgaa

SEQ ID NO: 230641 - DNA, 25 bp, Artificial
  probe
  misc_feature (1)..(25): SEQ ID NO: 1268; WAN024G4F_at; Start 103; Stop 127
aaagctgaccatgcggttcaatatg

SEQ ID NO: 230642 - DNA, 25 bp, Artificial
  probe
  misc_feature (1)..(25): SEQ ID NO: 1268; WAN024G4F_at; Start 169; Stop 193
gcgtgttggcatactacttcaaaat

SEQ ID NO: 230643 - DNA, 25 bp, Artificial
  probe
  misc_feature (1)..(25): SEQ ID NO: 1268; WAN024G4F_at; Start 214; Stop 238
ttgaaaaactatggtctgaaactct

SEQ ID NO: 230644 - DNA, 25 bp, Artificial
  probe
  misc_feature (1)..(25): SEQ ID NO: 1268; WAN024G4F_at; Start 202; Stop 226
cctccgctaagtttgaaaaactatg

SEQ ID NO: 230645 - DNA, 25 bp, Artificial
  probe
  misc_feature (1)..(25): SEQ ID NO: 1268; WAN024G4F_at; Start 160; Stop 184
cgtacatgtgcgtgttggcatacta

SEQ ID NO: 230646 - DNA, 25 bp, Artificial
  probe
  misc_feature (1)..(25): SEQ ID NO: 1268; WAN024G4F_at; Start 193; Stop 217
tctaataaacctccgctaagtttga

SEQ ID NO: 230647 - DNA, 25 bp, Artificial
  probe
  misc_feature (1)..(25): SEQ ID NO: 1268; WAN024G4F_at; Start 237; Stop 261
ctttggtttagataaatcagaatag

SEQ ID NO: 230648 - DNA, 25 bp, Artificial
  probe
  misc_feature (1)..(25): SEQ ID NO: 1268; WAN024G4F_at; Start 223; Stop 247
tatggtctgaaactctttggtttag

SEQ ID NO: 230649 - DNA, 25 bp, Artificial
  probe
  misc_feature (1)..(25): SEQ ID NO: 1268; WAN024G4F_at; Start 38; Stop 62
aatctaatagtggaatttactgtcc

SEQ ID NO: 230650 - DNA, 25 bp, Artificial
  probe
  misc_feature (1)..(25): SEQ ID NO: 2788; WAN024G4G_at; Start 715; Stop 739
gaaggagttcgtttaggtctgccta

SEQ ID NO: 230651 - DNA, 25 bp, Artificial
  probe
  misc_feature (1)..(25): SEQ ID NO: 2788; WAN024G4G_at; Start 608; Stop 632
cctactgggtcttgcttgggatttc

SEQ ID NO: 230652 - DNA, 25 bp, Artificial
  probe
  misc_feature (1)..(25): SEQ ID NO: 2788; WAN024G4G_at; Start 662; Stop 686
tcaaagccttacaccttgagaaacg

SEQ ID NO: 230653 - DNA, 25 bp, Artificial
  probe
  misc_feature (1)..(25): SEQ ID NO: 2788; WAN024G4G_at; Start 319; Stop 343
gggatggtacttttcttggcaccaa

SEQ ID NO: 230654 - DNA, 25 bp, Artificial
  probe
  misc_feature (1)..(25): SEQ ID NO: 2788; WAN024G4G_at; Start 291; Stop 315
ggccttgggcctatctgtggtcttg

SEQ ID NO: 230655 - DNA, 25 bp, Artificial
  probe
  misc_feature (1)..(25): SEQ ID NO: 2788; WAN024G4G_at; Start 148; Stop 172
gtatctatggcaaccagtatctgga

SEQ ID NO: 230656 - DNA, 25 bp, Artificial
  probe
  misc_feature (1)..(25): SEQ ID NO: 2788; WAN024G4G_at; Start 593; Stop 617
taggaacatccttggcctactgggt

SEQ ID NO: 230657 - DNA, 25 bp, Artificial
  probe
  misc_feature (1)..(25): SEQ ID NO: 2788; WAN024G4G_at; Start 1116; Stop 1140
tgcggcgccgcttcagggaattttg

SEQ ID NO: 230658 - DNA, 25 bp, Artificial
  probe
  misc_feature (1)..(25): SEQ ID NO: 2788; WAN024G4G_at; Start 1242; Stop 1266
tggagcttattcttactggatcggc

SEQ ID NO: 230659 - DNA, 25 bp, Artificial
  probe
  misc_feature (1)..(25): SEQ ID NO: 2788; WAN024G4G_at; Start 1084; Stop 1108
tatagtcttttcttccagttagcag

SEQ ID NO: 230660 - DNA, 25 bp, Artificial
  probe
  misc_feature (1)..(25): SEQ ID NO: 2788; WAN024G4G_at; Start 531; Stop 555
taactatctcttgatttacggtgcc

SEQ ID NO: 230661 - DNA, 25 bp, Artificial
  probe
  misc_feature (1)..(25): SEQ ID NO: 2788; WAN024G4G_at; Start 962; Stop 986
gatggactgccctcatttttgcggc

SEQ ID NO: 230662 - DNA, 25 bp, Artificial
  probe
  misc_feature (1)..(25): SEQ ID NO: 2788; WAN024G4G_at; Start 1102; Stop 1126
ttagcagatacctttgcggcgccgc

SEQ ID NO: 230663 - DNA, 25 bp, Artificial
  probe
  misc_feature (1)..(25): SEQ ID NO: 2788; WAN024G4G_at; Start 547; Stop 571
tacggtgcctttggtgttccagaac

SEQ ID NO: 230664 - DNA, 25 bp, Artificial
  probe
  misc_feature (1)..(25): SEQ ID NO: 2788; WAN024G4G_at; Start 455; Stop 479
ccttgctggattcgctgggcttgac

SEQ ID NO: 230665 - DNA, 25 bp, Artificial
  probe
  misc_feature (1)..(25): SEQ ID NO: 2788; WAN024G4G_at; Start 351; Stop 375
gaatcatattgggttagaagcagca

SEQ ID NO: 230666 - DNA, 25 bp, Artificial
  probe
  misc_feature (1)..(25): SEQ ID NO: 2788; WAN024G4G_at; Start 855; Stop 879
tatgtacgcctttcctatgagtatc

SEQ ID NO: 230667 - DNA, 25 bp, Artificial
  probe
  misc_feature (1)..(25): SEQ ID NO: 2788; WAN024G4G_at; Start 813; Stop 837
gattatagctagtcaccagtcagct

SEQ ID NO: 230668 - DNA, 25 bp, Artificial
  probe
  misc_feature (1)..(25): SEQ ID NO: 2788; WAN024G4G_at; Start 122; Stop 146
aatacaacactatggacttggctgg

SEQ ID NO: 230669 - DNA, 25 bp, Artificial
  probe
  misc_feature (1)..(25): SEQ ID NO: 2788; WAN024G4G_at; Start 1027; Stop 1051
gccagtctttatggtaacgacccaa

SEQ ID NO: 230670 - DNA, 25 bp, Artificial
  probe
  misc_feature (1)..(25): SEQ ID NO: 2788; WAN024G4G_at; Start 646; Stop 670
tttaaacaggagaagctcaaagcct

SEQ ID NO: 230671 - DNA, 25 bp, Artificial
  probe
  misc_feature (1)..(25): SEQ ID NO: 2788; WAN024G4G_at; Start 365; Stop 389
tagaagcagcagtagcggcagtagc

SEQ ID NO: 230672 - DNA, 25 bp, Artificial
  probe
  misc_feature (1)..(25): SEQ ID NO: 2788; WAN024G4G_at; Start 902; Stop 926
tttcctatgaagtgggagccaagcg

SEQ ID NO: 230673 - DNA, 25 bp, Artificial
  probe
  misc_feature (1)..(25): SEQ ID NO: 2788; WAN024G4G_at; Start 470; Stop 494
tgggcttgaccaaactgtccatgta

SEQ ID NO: 230674 - DNA, 25 bp, Artificial
  probe
  misc_feature (1)..(25): SEQ ID NO: 2788; WAN024G4G_at; Start 504; Stop 528
tttgttactccctctcaatagcgga

SEQ ID NO: 230675 - DNA, 25 bp, Artificial
  probe
  misc_feature (1)..(25): SEQ ID NO: 2788; WAN024G4G_at; Start 441; Stop 465
tagcgtcattcgttccttgctggat

SEQ ID NO: 230676 - DNA, 25 bp, Artificial
  probe
  misc_feature (1)..(25): SEQ ID NO: 2788; WAN024G4G_at; Start 917; Stop 941
gagccaagcgatttgatgatgcgaa

SEQ ID NO: 230677 - DNA, 25 bp, Artificial
  probe
  misc_feature (1)..(25): SEQ ID NO: 2788; WAN024G4G_at; Start 418; Stop 442
gggattatccccttgttgctcttta

SEQ ID NO: 230678 - DNA, 25 bp, Artificial
  probe
  misc_feature (1)..(25): SEQ ID NO: 2788; WAN024G4G_at; Start 189; Stop 213
tctaacagggattgtgtcagccttg

SEQ ID NO: 230679 - DNA, 25 bp, Artificial
  probe
  misc_feature (1)..(25): SEQ ID NO: 2788; WAN024G4G_at; Start 221; Stop 245
tcattggtcaccatcttggtcgagg

SEQ ID NO: 230680 - DNA, 25 bp, Artificial
  probe
  misc_feature (1)..(25): SEQ ID NO: 2788; WAN024G4G_at; Start 870; Stop 894
tatgagtatctcatcggctatggct

SEQ ID NO: 230681 - DNA, 25 bp, Artificial
  probe
  misc_feature (1)..(25): SEQ ID NO: 2788; WAN024G4G_at; Start 206; Stop 230
cagccttggtgcctatcattggtca

SEQ ID NO: 230682 - DNA, 25 bp, Artificial
  probe
  misc_feature (1)..(25): SEQ ID NO: 2788; WAN024G4G_at; Start 948; Stop 972
tattggtctaggaagatggactgcc

SEQ ID NO: 230683 - DNA, 25 bp, Artificial
  probe
  misc_feature (1)..(25): SEQ ID NO: 2788; WAN024G4G_at; Start 579; Stop 603
ggctggtgctggtttaggaacatcc

SEQ ID NO: 230684 - DNA, 25 bp, Artificial
  probe
  misc_feature (1)..(25): SEQ ID NO: 5133; WAN024G4H_at; Start 179; Stop 203
gacggatttcttccatcttacggaa

SEQ ID NO: 230685 - DNA, 25 bp, Artificial
  probe
  misc_feature (1)..(25): SEQ ID NO: 5133; WAN024G4H_at; Start 182; Stop 206
ggatttcttccatcttacggaacat

SEQ ID NO: 230686 - DNA, 25 bp, Artificial
  probe
  misc_feature (1)..(25): SEQ ID NO: 5133; WAN024G4H_at; Start 224; Stop 248
tatctaaagttgacatcttcttgcc

SEQ ID NO: 230687 - DNA, 25 bp, Artificial
  probe
  misc_feature (1)..(25): SEQ ID NO: 5133; WAN024G4H_at; Start 5; Stop 29
ggtcaatccctttagcaatagcttg

SEQ ID NO: 230688 - DNA, 25 bp, Artificial
  probe
  misc_feature (1)..(25): SEQ ID NO: 5133; WAN024G4H_at; Start 64; Stop 88
tctggattgagagctaacatagccc

SEQ ID NO: 230689 - DNA, 25 bp, Artificial
  probe
  misc_feature (1)..(25): SEQ ID NO: 5133; WAN024G4H_at; Start 113; Stop 137
cagaaaagtgcgtcattcctggcac

SEQ ID NO: 230690 - DNA, 25 bp, Artificial
  probe
  misc_feature (1)..(25): SEQ ID NO: 5133; WAN024G4H_at; Start 57; Stop 81
cagatcatctggattgagagctaac

SEQ ID NO: 230691 - DNA, 25 bp, Artificial
  probe
  misc_feature (1)..(25): SEQ ID NO: 5133; WAN024G4H_at; Start 34; Stop 58
tgtccacggtggtttgaggtaatca

SEQ ID NO: 230692 - DNA, 25 bp, Artificial
  probe
  misc_feature (1)..(25): SEQ ID NO: 5133; WAN024G4H_at; Start 190; Stop 214
tccatcttacggaacatttctagca

SEQ ID NO: 230693 - DNA, 25 bp, Artificial
  probe
  misc_feature (1)..(25): SEQ ID NO: 5133; WAN024G4H_at; Start 106; Stop 130
tcaccaacagaaaagtgcgtcattc

SEQ ID NO: 230694 - DNA, 25 bp, Artificial
  probe
  misc_feature (1)..(25): SEQ ID NO: 5133; WAN024G4H_at; Start 44; Stop 68
ggtttgaggtaatcagatcatctgg

SEQ ID NO: 230695 - DNA, 25 bp, Artificial
  probe
  misc_feature (1)..(25): SEQ ID NO: 5133; WAN024G4H_at; Start 100; Stop 124
gcctcttcaccaacagaaaagtgcg

SEQ ID NO: 230696 - DNA, 25 bp, Artificial
  probe
  misc_feature (1)..(25): SEQ ID NO: 5133; WAN024G4H_at; Start 17; Stop 41
tagcaatagcttgcccgtgtccacg

SEQ ID NO: 230697 - DNA, 25 bp, Artificial
  probe
  misc_feature (1)..(25): SEQ ID NO: 5133; WAN024G4H_at; Start 103; Stop 127
tcttcaccaacagaaaagtgcgtca

SEQ ID NO: 230698 - DNA, 25 bp, Artificial
  probe
  misc_feature (1)..(25): SEQ ID NO: 5133; WAN024G4H_at; Start 92; Stop 116
cgttagctgcctcttcaccaacaga

SEQ ID NO: 230699 - DNA, 25 bp, Artificial
  probe
  misc_feature (1)..(25): SEQ ID NO: 5133; WAN024G4H_at; Start 160; Stop 184
gcaatttttaagtccatgcgacgga

SEQ ID NO: 230700 - DNA, 25 bp, Artificial
  probe
  misc_feature (1)..(25): SEQ ID NO: 5133; WAN024G4H_at; Start 119; Stop 143
agtgcgtcattcctggcactttccc

SEQ ID NO: 230701 - DNA, 25 bp, Artificial
  probe
  misc_feature (1)..(25): SEQ ID NO: 5133; WAN024G4H_at; Start 9; Stop 33
aatccctttagcaatagcttgcccg

SEQ ID NO: 230702 - DNA, 25 bp, Artificial
  probe
  misc_feature (1)..(25): SEQ ID NO: 5133; WAN024G4H_at; Start 168; Stop 192
taagtccatgcgacggatttcttcc

SEQ ID NO: 230703 - DNA, 25 bp, Artificial
  probe
  misc_feature (1)..(25): SEQ ID NO: 5133; WAN024G4H_at; Start 126; Stop 150
cattcctggcactttccctttcttt

SEQ ID NO: 230704 - DNA, 25 bp, Artificial
  probe
  misc_feature (1)..(25): SEQ ID NO: 5133; WAN024G4H_at; Start 231; Stop 255
agttgacatcttcttgcctttctaa

SEQ ID NO: 230705 - DNA, 25 bp, Artificial
  probe
  misc_feature (1)..(25): SEQ ID NO: 5133; WAN024G4H_at; Start 164; Stop 188
tttttaagtccatgcgacggatttc

SEQ ID NO: 230706 - DNA, 25 bp, Artificial
  probe
  misc_feature (1)..(25): SEQ ID NO: 5133; WAN024G4H_at; Start 72; Stop 96
gagagctaacatagcccccacgtta

SEQ ID NO: 230707 - DNA, 25 bp, Artificial
  probe
  misc_feature (1)..(25): SEQ ID NO: 5133; WAN024G4H_at; Start 153; Stop 177
taattgtgcaatttttaagtccatg

SEQ ID NO: 230708 - DNA, 25 bp, Artificial
  probe
  misc_feature (1)..(25): SEQ ID NO: 5133; WAN024G4H_at; Start 38; Stop 62
cacggtggtttgaggtaatcagatc

SEQ ID NO: 230709 - DNA, 25 bp, Artificial
  probe
  misc_feature (1)..(25): SEQ ID NO: 5133; WAN024G4H_at; Start 212; Stop 236
gcaaaagatttttatctaaagttga

SEQ ID NO: 230710 - DNA, 25 bp, Artificial
  probe
  misc_feature (1)..(25): SEQ ID NO: 5133; WAN024G4H_at; Start 26; Stop 50
cttgcccgtgtccacggtggtttga

SEQ ID NO: 230711 - DNA, 25 bp, Artificial
  probe
  misc_feature (1)..(25): SEQ ID NO: 5133; WAN024G4H_at; Start 21; Stop 45
aatagcttgcccgtgtccacggtgg

SEQ ID NO: 230712 - DNA, 25 bp, Artificial
  probe
  misc_feature (1)..(25): SEQ ID NO: 5133; WAN024G4H_at; Start 97; Stop 121
gctgcctcttcaccaacagaaaagt

SEQ ID NO: 230713 - DNA, 25 bp, Artificial
  probe
  misc_feature (1)..(25): SEQ ID NO: 5133; WAN024G4H_at; Start 177; Stop 201
gcgacggatttcttccatcttacgg

SEQ ID NO: 230714 - DNA, 25 bp, Artificial
  probe
  misc_feature (1)..(25): SEQ ID NO: 5133; WAN024G4H_at; Start 199; Stop 223
cggaacatttctagcaaaagatttt

SEQ ID NO: 230715 - DNA, 25 bp, Artificial
  probe
  misc_feature (1)..(25): SEQ ID NO: 5133; WAN024G4H_at; Start 2; Stop 26
tgaggtcaatccctttagcaatagc

SEQ ID NO: 230716 - DNA, 25 bp, Artificial
  probe
  misc_feature (1)..(25): SEQ ID NO: 5133; WAN024G4H_at; Start 194; Stop 218
tcttacggaacatttctagcaaaag

SEQ ID NO: 230717 - DNA, 25 bp, Artificial
  probe
  misc_feature (1)..(25): SEQ ID NO: 5133; WAN024G4H_at; Start 110; Stop 134
caacagaaaagtgcgtcattcctgg

SEQ ID NO: 230718 - DNA, 25 bp, Artificial
  probe
  misc_feature (1)..(25): SEQ ID NO: 3928; WAN024G4I_at; Start 146; Stop 170
gcgctacgttgatggatatgttcta

SEQ ID NO: 230719 - DNA, 25 bp, Artificial
  probe
  misc_feature (1)..(25): SEQ ID NO: 3928; WAN024G4I_at; Start 274; Stop 298
gaaaacaccttcattggtcgcacca

SEQ ID NO: 230720 - DNA, 25 bp, Artificial
  probe
  misc_feature (1)..(25): SEQ ID NO: 3928; WAN024G4I_at; Start 37; Stop 61
gactggaccattgccactgcgaaca

SEQ ID NO: 230721 - DNA, 25 bp, Artificial
  probe
  misc_feature (1)..(25): SEQ ID NO: 3928; WAN024G4I_at; Start 69; Stop 93
cagctttctgaaatccttcatagac

SEQ ID NO: 230722 - DNA, 25 bp, Artificial
  probe
  misc_feature (1)..(25): SEQ ID NO: 3928; WAN024G4I_at; Start 108; Stop 132
taccgtcttcgatgaacattccagg

SEQ ID NO: 230723 - DNA, 25 bp, Artificial
  probe
  misc_feature (1)..(25): SEQ ID NO: 3928; WAN024G4I_at; Start 156; Stop 180
gatggatatgttctatattggtcat

SEQ ID NO: 230724 - DNA, 25 bp, Artificial
  probe
  misc_feature (1)..(25): SEQ ID NO: 3928; WAN024G4I_at; Start 33; Stop 57
tcaagactggaccattgccactgcg

SEQ ID NO: 230725 - DNA, 25 bp, Artificial
  probe
  misc_feature (1)..(25): SEQ ID NO: 3928; WAN024G4I_at; Start 41; Stop 65
ggaccattgccactgcgaacatggt

SEQ ID NO: 230726 - DNA, 25 bp, Artificial
  probe
  misc_feature (1)..(25): SEQ ID NO: 3928; WAN024G4I_at; Start 187; Stop 211
gatatccgcagagataccgtaaccg

SEQ ID NO: 230727 - DNA, 25 bp, Artificial
  probe
  misc_feature (1)..(25): SEQ ID NO: 3928; WAN024G4I_at; Start 175; Stop 199
ggtcattttcttgatatccgcagag

SEQ ID NO: 230728 - DNA, 25 bp, Artificial
  probe
  misc_feature (1)..(25): SEQ ID NO: 3928; WAN024G4I_at; Start 232; Stop 256
gactggcaggttccagatagaagcc

SEQ ID NO: 230729 - DNA, 25 bp, Artificial
  probe
  misc_feature (1)..(25): SEQ ID NO: 3928; WAN024G4I_at; Start 124; Stop 148
cattccaggaattccataagcggcg

SEQ ID NO: 230730 - DNA, 25 bp, Artificial
  probe
  misc_feature (1)..(25): SEQ ID NO: 3928; WAN024G4I_at; Start 288; Stop 312
tggtcgcaccatctccaaagaagca

SEQ ID NO: 230731 - DNA, 25 bp, Artificial
  probe
  misc_feature (1)..(25): SEQ ID NO: 3928; WAN024G4I_at; Start 240; Stop 264
ggttccagatagaagccatgttcac

SEQ ID NO: 230732 - DNA, 25 bp, Artificial
  probe
  misc_feature (1)..(25): SEQ ID NO: 3928; WAN024G4I_at; Start 129; Stop 153
caggaattccataagcggcgctacg

SEQ ID NO: 230733 - DNA, 25 bp, Artificial
  probe
  misc_feature (1)..(25): SEQ ID NO: 3928; WAN024G4I_at; Start 254; Stop 278
gccatgttcactgcttcgtggaaaa

SEQ ID NO: 230734 - DNA, 25 bp, Artificial
  probe
  misc_feature (1)..(25): SEQ ID NO: 3928; WAN024G4I_at; Start 346; Stop 370
actgagggctgcaccgacagcgatc

SEQ ID NO: 230735 - DNA, 25 bp, Artificial
  probe
  misc_feature (1)..(25): SEQ ID NO: 3928; WAN024G4I_at; Start 259; Stop 283
gttcactgcttcgtggaaaacacct

SEQ ID NO: 230736 - DNA, 25 bp, Artificial
  probe
  misc_feature (1)..(25): SEQ ID NO: 3928; WAN024G4I_at; Start 89; Stop 113
tagacatcgatgacattgttaccgt

SEQ ID NO: 230737 - DNA, 25 bp, Artificial
  probe
  misc_feature (1)..(25): SEQ ID NO: 3928; WAN024G4I_at; Start 203; Stop 227
ccgtaaccgttgttaatgcaataga

SEQ ID NO: 230738 - DNA, 25 bp, Artificial
  probe
  misc_feature (1)..(25): SEQ ID NO: 3928; WAN024G4I_at; Start 214; Stop 238
gttaatgcaatagaaaatgactggc

SEQ ID NO: 230739 - DNA, 25 bp, Artificial
  probe
  misc_feature (1)..(25): SEQ ID NO: 3928; WAN024G4I_at; Start 1; Stop 25
gtgaccaagccagcgataagttaca

SEQ ID NO: 230740 - DNA, 25 bp, Artificial
  probe
  misc_feature (1)..(25): SEQ ID NO: 3928; WAN024G4I_at; Start 140; Stop 164
taagcggcgctacgttgatggatat

SEQ ID NO: 230741 - DNA, 25 bp, Artificial
  probe
  misc_feature (1)..(25): SEQ ID NO: 3928; WAN024G4I_at; Start 113; Stop 137
tcttcgatgaacattccaggaattc

SEQ ID NO: 230742 - DNA, 25 bp, Artificial
  probe
  misc_feature (1)..(25): SEQ ID NO: 3928; WAN024G4I_at; Start 270; Stop 294
cgtggaaaacaccttcattggtcgc

SEQ ID NO: 230743 - DNA, 25 bp, Artificial
  probe
  misc_feature (1)..(25): SEQ ID NO: 3928; WAN024G4I_at; Start 330; Stop 354
tattttgcatttgctgactgagggc

SEQ ID NO: 230744 - DNA, 25 bp, Artificial
  probe
  misc_feature (1)..(25): SEQ ID NO: 3928; WAN024G4I_at; Start 319; Stop 343
gattttaccggtattttgcatttgc

SEQ ID NO: 230745 - DNA, 25 bp, Artificial
  probe
  misc_feature (1)..(25): SEQ ID NO: 3928; WAN024G4I_at; Start 193; Stop 217
cgcagagataccgtaaccgttgtta

SEQ ID NO: 230746 - DNA, 25 bp, Artificial
  probe
  misc_feature (1)..(25): SEQ ID NO: 3928; WAN024G4I_at; Start 221; Stop 245
caatagaaaatgactggcaggttcc

SEQ ID NO: 230747 - DNA, 25 bp, Artificial
  probe
  misc_feature (1)..(25): SEQ ID NO: 3928; WAN024G4I_at; Start 78; Stop 102
gaaatccttcatagacatcgatgac

SEQ ID NO: 230748 - DNA, 25 bp, Artificial
  probe
  misc_feature (1)..(25): SEQ ID NO: 3928; WAN024G4I_at; Start 100; Stop 124
gacattgttaccgtcttcgatgaac

SEQ ID NO: 230749 - DNA, 25 bp, Artificial
  probe
  misc_feature (1)..(25): SEQ ID NO: 3928; WAN024G4I_at; Start 339; Stop 363
tttgctgactgagggctgcaccgac

SEQ ID NO: 230750 - DNA, 25 bp, Artificial
  probe
  misc_feature (1)..(25): SEQ ID NO: 3928; WAN024G4I_at; Start 22; Stop 46
tacactttcaatcaagactggacca

SEQ ID NO: 230751 - DNA, 25 bp, Artificial
  probe
  misc_feature (1)..(25): SEQ ID NO: 3928; WAN024G4I_at; Start 9; Stop 33
gccagcgataagttacactttcaat

SEQ ID NO: 230752 - DNA, 25 bp, Artificial
  probe
  misc_feature (1)..(25): SEQ ID NO: 4097; WAN024G4J_at; Start 90; Stop 114
tagcagcttggttgacgatattgtc

SEQ ID NO: 230753 - DNA, 25 bp, Artificial
  probe
  misc_feature (1)..(25): SEQ ID NO: 4097; WAN024G4J_at; Start 360; Stop 384
tggtgtcacggaaggacattgtttt

SEQ ID NO: 230754 - DNA, 25 bp, Artificial
  probe
  misc_feature (1)..(25): SEQ ID NO: 4097; WAN024G4J_at; Start 25; Stop 49
gttaccagctgcacaacgaacagtc

SEQ ID NO: 230755 - DNA, 25 bp, Artificial
  probe
  misc_feature (1)..(25): SEQ ID NO: 4097; WAN024G4J_at; Start 123; Stop 147
taacagagaagtccatgaaggtcat

SEQ ID NO: 230756 - DNA, 25 bp, Artificial
  probe
  misc_feature (1)..(25): SEQ ID NO: 4097; WAN024G4J_at; Start 190; Stop 214
tgctccagagatggcagcttcagaa

SEQ ID NO: 230757 - DNA, 25 bp, Artificial
  probe
  misc_feature (1)..(25): SEQ ID NO: 4097; WAN024G4J_at; Start 157; Stop 181
tggacgaagtcctgtcatggctgct

SEQ ID NO: 230758 - DNA, 25 bp, Artificial
  probe
  misc_feature (1)..(25): SEQ ID NO: 4097; WAN024G4J_at; Start 250; Stop 274
ttcaagcattccaacagaagtaccg

SEQ ID NO: 230759 - DNA, 25 bp, Artificial
  probe
  misc_feature (1)..(25): SEQ ID NO: 4097; WAN024G4J_at; Start 181; Stop 205
tcctgctgctgctccagagatggca

SEQ ID NO: 230760 - DNA, 25 bp, Artificial
  probe
  misc_feature (1)..(25): SEQ ID NO: 4097; WAN024G4J_at; Start 323; Stop 347
tcatcgcgacgcatttcctcagaca

SEQ ID NO: 230761 - DNA, 25 bp, Artificial
  probe
  misc_feature (1)..(25): SEQ ID NO: 4097; WAN024G4J_at; Start 11; Stop 35
gcagagccaactccgttaccagctg

SEQ ID NO: 230762 - DNA, 25 bp, Artificial
  probe
  misc_feature (1)..(25): SEQ ID NO: 4097; WAN024G4J_at; Start 205; Stop 229
agcttcagaaatcggacagtcacgg

SEQ ID NO: 230763 - DNA, 25 bp, Artificial
  probe
  misc_feature (1)..(25): SEQ ID NO: 4097; WAN024G4J_at; Start 224; Stop 248
tcacggacacgttctggaccaaatt

SEQ ID NO: 230764 - DNA, 25 bp, Artificial
  probe
  misc_feature (1)..(25): SEQ ID NO: 4097; WAN024G4J_at; Start 258; Stop 282
ttccaacagaagtaccgaagtctcc

SEQ ID NO: 230765 - DNA, 25 bp, Artificial
  probe
  misc_feature (1)..(25): SEQ ID NO: 4097; WAN024G4J_at; Start 169; Stop 193
tgtcatggctgctcctgctgctgct

SEQ ID NO: 230766 - DNA, 25 bp, Artificial
  probe
  misc_feature (1)..(25): SEQ ID NO: 4097; WAN024G4J_at; Start 348; Stop 372
tagcaaggataatggtgtcacggaa

SEQ ID NO: 230767 - DNA, 25 bp, Artificial
  probe
  misc_feature (1)..(25): SEQ ID NO: 4097; WAN024G4J_at; Start 390; Stop 414
ccattttatctctttctccttagtc

SEQ ID NO: 230768 - DNA, 25 bp, Artificial
  probe
  misc_feature (1)..(25): SEQ ID NO: 4097; WAN024G4J_at; Start 38; Stop 62
caacgaacagtcattggaacctgac

SEQ ID NO: 230769 - DNA, 25 bp, Artificial
  probe
  misc_feature (1)..(25): SEQ ID NO: 4097; WAN024G4J_at; Start 338; Stop 362
tcctcagacatagcaaggataatgg

SEQ ID NO: 230770 - DNA, 25 bp, Artificial
  probe
  misc_feature (1)..(25): SEQ ID NO: 4097; WAN024G4J_at; Start 233; Stop 257
cgttctggaccaaattcttcaagca

SEQ ID NO: 230771 - DNA, 25 bp, Artificial
  probe
  misc_feature (1)..(25): SEQ ID NO: 4097; WAN024G4J_at; Start 63; Stop 87
ctttaccaccaaacatgtaacgtgt

SEQ ID NO: 230772 - DNA, 25 bp, Artificial
  probe
  misc_feature (1)..(25): SEQ ID NO: 4097; WAN024G4J_at; Start 111; Stop 135
tgtccatggcaataacagagaagtc

SEQ ID NO: 230773 - DNA, 25 bp, Artificial
  probe
  misc_feature (1)..(25): SEQ ID NO: 4097; WAN024G4J_at; Start 2; Stop 26
tgctgggcggcagagccaactccgt

SEQ ID NO: 230774 - DNA, 25 bp, Artificial
  probe
  misc_feature (1)..(25): SEQ ID NO: 4097; WAN024G4J_at; Start 299; Stop 323
tcttctcccatcaagaacacatttt

SEQ ID NO: 230775 - DNA, 25 bp, Artificial
  probe
  misc_feature (1)..(25): SEQ ID NO: 4097; WAN024G4J_at; Start 199; Stop 223
gatggcagcttcagaaatcggacag

SEQ ID NO: 230776 - DNA, 25 bp, Artificial
  probe
  misc_feature (1)..(25): SEQ ID NO: 4097; WAN024G4J_at; Start 311; Stop 335
aagaacacattttcatcgcgacgca

SEQ ID NO: 230777 - DNA, 25 bp, Artificial
  probe
  misc_feature (1)..(25): SEQ ID NO: 4097; WAN024G4J_at; Start 98; Stop 122
tggttgacgatattgtccatggcaa

SEQ ID NO: 230778 - DNA, 25 bp, Artificial
  probe
  misc_feature (1)..(25): SEQ ID NO: 4097; WAN024G4J_at; Start 162; Stop 186
gaagtcctgtcatggctgctcctgc

SEQ ID NO: 230779 - DNA, 25 bp, Artificial
  probe
  misc_feature (1)..(25): SEQ ID NO: 4097; WAN024G4J_at; Start 330; Stop 354
gacgcatttcctcagacatagcaag

SEQ ID NO: 230780 - DNA, 25 bp, Artificial
  probe
  misc_feature (1)..(25): SEQ ID NO: 4097; WAN024G4J_at; Start 130; Stop 154
gaagtccatgaaggtcatatcgacg

SEQ ID NO: 230781 - DNA, 25 bp, Artificial
  probe
  misc_feature (1)..(25): SEQ ID NO: 4097; WAN024G4J_at; Start 266; Stop 290
gaagtaccgaagtctcctccgaaga

SEQ ID NO: 230782 - DNA, 25 bp, Artificial
  probe
  misc_feature (1)..(25): SEQ ID NO: 4097; WAN024G4J_at; Start 212; Stop 236
gaaatcggacagtcacggacacgtt

SEQ ID NO: 230783 - DNA, 25 bp, Artificial
  probe
  misc_feature (1)..(25): SEQ ID NO: 4097; WAN024G4J_at; Start 49; Stop 73
cattggaacctgacctttaccacca

SEQ ID NO: 230784 - DNA, 25 bp, Artificial
  probe
  misc_feature (1)..(25): SEQ ID NO: 4097; WAN024G4J_at; Start 76; Stop 100
catgtaacgtgttttagcagcttgg

SEQ ID NO: 230785 - DNA, 25 bp, Artificial
  probe
  misc_feature (1)..(25): SEQ ID NO: 4097; WAN024G4J_at; Start 144; Stop 168
tcatatcgacgattggacgaagtcc

SEQ ID NO: 230786 - DNA, 25 bp, Artificial
  probe
  misc_feature (1)..(25): SEQ ID NO: 2144; WAN024G4K_at; Start 137; Stop 161
tgcttgaagaatttggtccagaacg

SEQ ID NO: 230787 - DNA, 25 bp, Artificial
  probe
  misc_feature (1)..(25): SEQ ID NO: 2144; WAN024G4K_at; Start 313; Stop 337
tacatgtttggtggtaaaggtcagg

SEQ ID NO: 230788 - DNA, 25 bp, Artificial
  probe
  misc_feature (1)..(25): SEQ ID NO: 2144; WAN024G4K_at; Start 650; Stop 674
gccgtgtggttcaagctgctgaaga

SEQ ID NO: 230789 - DNA, 25 bp, Artificial
  probe
  misc_feature (1)..(25): SEQ ID NO: 2144; WAN024G4K_at; Start 600; Stop 624
caaacgccaaggaacggatgtaaca

SEQ ID NO: 230790 - DNA, 25 bp, Artificial
  probe
  misc_feature (1)..(25): SEQ ID NO: 2144; WAN024G4K_at; Start 120; Stop 144
cggtacttctgttggaatgcttgaa

SEQ ID NO: 230791 - DNA, 25 bp, Artificial
  probe
  misc_feature (1)..(25): SEQ ID NO: 2144; WAN024G4K_at; Start 169; Stop 193
gactgtccgatttctgaagctgcca

SEQ ID NO: 230792 - DNA, 25 bp, Artificial
  probe
  misc_feature (1)..(25): SEQ ID NO: 2144; WAN024G4K_at; Start 949; Stop 973
gaaagtatcaaagatgcaatccgaa

SEQ ID NO: 230793 - DNA, 25 bp, Artificial
  probe
  misc_feature (1)..(25): SEQ ID NO: 2144; WAN024G4K_at; Start 280; Stop 304
gacaatatcgtcaaccaagctgcta

SEQ ID NO: 230794 - DNA, 25 bp, Artificial
  probe
  misc_feature (1)..(25): SEQ ID NO: 2144; WAN024G4K_at; Start 746; Stop 770
tcataaactcagtgaagaagactgg

SEQ ID NO: 230795 - DNA, 25 bp, Artificial
  probe
  misc_feature (1)..(25): SEQ ID NO: 2144; WAN024G4K_at; Start 258; Stop 282
ggacttctctgttattgccatggac

SEQ ID NO: 230796 - DNA, 25 bp, Artificial
  probe
  misc_feature (1)..(25): SEQ ID NO: 2144; WAN024G4K_at; Start 440; Stop 464
ttgtggcacctggaacacctgcgga

SEQ ID NO: 230797 - DNA, 25 bp, Artificial
  probe
  misc_feature (1)..(25): SEQ ID NO: 2144; WAN024G4K_at; Start 423; Stop 447
cattccaggacttaaggttgtggca

SEQ ID NO: 230798 - DNA, 25 bp, Artificial
  probe
  misc_feature (1)..(25): SEQ ID NO: 2144; WAN024G4K_at; Start 42; Stop 66
tgctatgtctgaggaaatgcgtcgc

SEQ ID NO: 230799 - DNA, 25 bp, Artificial
  probe
  misc_feature (1)..(25): SEQ ID NO: 2144; WAN024G4K_at; Start 798; Stop 822
caaaacaagtggctatatcggtgaa

SEQ ID NO: 230800 - DNA, 25 bp, Artificial
  probe
  misc_feature (1)..(25): SEQ ID NO: 2144; WAN024G4K_at; Start 104; Stop 128
tcttcggaggagacttcggtacttc

SEQ ID NO: 230801 - DNA, 25 bp, Artificial
  probe
  misc_feature (1)..(25): SEQ ID NO: 2144; WAN024G4K_at; Start 406; Stop 430
gagtcttggtttactcacattccag

SEQ ID NO: 230802 - DNA, 25 bp, Artificial
  probe
  misc_feature (1)..(25): SEQ ID NO: 2144; WAN024G4K_at; Start 155; Stop 179
cagaacgtgtccgtgactgtccgat

SEQ ID NO: 230803 - DNA, 25 bp, Artificial
  probe
  misc_feature (1)..(25): SEQ ID NO: 2144; WAN024G4K_at; Start 887; Stop 911
caggagaagatgtgccgatgcctta

SEQ ID NO: 230804 - DNA, 25 bp, Artificial
  probe
  misc_feature (1)..(25): SEQ ID NO: 2144; WAN024G4K_at; Start 903; Stop 927
gatgccttatgcacaaaacctagaa

SEQ ID NO: 230805 - DNA, 25 bp, Artificial
  probe
  misc_feature (1)..(25): SEQ ID NO: 2144; WAN024G4K_at; Start 57; Stop 81
aatgcgtcgcgatgaaaatgtgttc

SEQ ID NO: 230806 - DNA, 25 bp, Artificial
  probe
  misc_feature (1)..(25): SEQ ID NO: 2144; WAN024G4K_at; Start 10; Stop 34
aaaacaatgtccttccgtgacacca

SEQ ID NO: 230807 - DNA, 25 bp, Artificial
  probe
  misc_feature (1)..(25): SEQ ID NO: 2144; WAN024G4K_at; Start 189; Stop 213
tgccatctctggagcagcagcagga

SEQ ID NO: 230808 - DNA, 25 bp, Artificial
  probe
  misc_feature (1)..(25): SEQ ID NO: 2144; WAN024G4K_at; Start 549; Stop 573
ggaagtgccagttgatccagactac

SEQ ID NO: 230809 - DNA, 25 bp, Artificial
  probe
  misc_feature (1)..(25): SEQ ID NO: 2144; WAN024G4K_at; Start 359; Stop 383
cagctggtaacggagttggctctgc

SEQ ID NO: 230810 - DNA, 25 bp, Artificial
  probe
  misc_feature (1)..(25): SEQ ID NO: 2144; WAN024G4K_at; Start 713; Stop 737
cacgtacccttgttccgcttgataa

SEQ ID NO: 230811 - DNA, 25 bp, Artificial
  probe
  misc_feature (1)..(25): SEQ ID NO: 2144; WAN024G4K_at; Start 634; Stop 658
tatggaaaaatgcttcgccgtgtgg

SEQ ID NO: 230812 - DNA, 25 bp, Artificial
  probe
  misc_feature (1)..(25): SEQ ID NO: 2144; WAN024G4K_at; Start 341; Stop 365
caatgactgttcgttgtgcagctgg

SEQ ID NO: 230813 - DNA, 25 bp, Artificial
  probe
  misc_feature (1)..(25): SEQ ID NO: 2144; WAN024G4K_at; Start 207; Stop 231
agcaggagcagccatgacaggactt

SEQ ID NO: 230814 - DNA, 25 bp, Artificial
  probe
  misc_feature (1)..(25): SEQ ID NO: 2144; WAN024G4K_at; Start 780; Stop 804
tctggtcaacgatgcccacaaaaca

SEQ ID NO: 230815 - DNA, 25 bp, Artificial
  probe
  misc_feature (1)..(25): SEQ ID NO: 2144; WAN024G4K_at; Start 455; Stop 479
cacctgcggacatgaaaggcctgct

SEQ ID NO: 230816 - DNA, 25 bp, Artificial
  probe
  misc_feature (1)..(25): SEQ ID NO: 2144; WAN024G4K_at; Start 222; Stop 246
gacaggacttcgtccaatcgtcgat

SEQ ID NO: 230817 - DNA, 25 bp, Artificial
  probe
  misc_feature (1)..(25): SEQ ID NO: 2144; WAN024G4K_at; Start 236; Stop 260
caatcgtcgatatgaccttcatgga

SEQ ID NO: 230818 - DNA, 25 bp, Artificial
  probe
  misc_feature (1)..(25): SEQ ID NO: 2144; WAN024G4K_at; Start 470; Stop 494
aaggcctgcttaagtcttctatccg

SEQ ID NO: 230819 - DNA, 25 bp, Artificial
  probe
  misc_feature (1)..(25): SEQ ID NO: 2144; WAN024G4K_at; Start 564; Stop 588
tccagactacacaattccacttggg

SEQ ID NO: 230820 - DNA, 25 bp, Artificial
  probe
  misc_feature (1)..(25): SEQ ID NO: 2831; WAN024G4L_at; Start 330; Stop 354
ccttggtgccaatggtatcgtaggt

SEQ ID NO: 230821 - DNA, 25 bp, Artificial
  probe
  misc_feature (1)..(25): SEQ ID NO: 2831; WAN024G4L_at; Start 866; Stop 890
tccaagcgcaagtaaaggaagcagt

SEQ ID NO: 230822 - DNA, 25 bp, Artificial
  probe
  misc_feature (1)..(25): SEQ ID NO: 2831; WAN024G4L_at; Start 315; Stop 339
ccttgatgctgggaaccttggtgcc

SEQ ID NO: 230823 - DNA, 25 bp, Artificial
  probe
  misc_feature (1)..(25): SEQ ID NO: 2831; WAN024G4L_at; Start 56; Stop 80
tccgtcgcatggacttaaaaattgc

SEQ ID NO: 230824 - DNA, 25 bp, Artificial
  probe
  misc_feature (1)..(25): SEQ ID NO: 2831; WAN024G4L_at; Start 459; Stop 483
tttccacgaagcagtgaacatggct

SEQ ID NO: 230825 - DNA, 25 bp, Artificial
  probe
  misc_feature (1)..(25): SEQ ID NO: 2831; WAN024G4L_at; Start 182; Stop 206
tgattacctcaaaccaccgtggaca

SEQ ID NO: 230826 - DNA, 25 bp, Artificial
  probe
  misc_feature (1)..(25): SEQ ID NO: 2831; WAN024G4L_at; Start 257; Stop 281
tccttggtaaatacactggaacctg

SEQ ID NO: 230827 - DNA, 25 bp, Artificial
  probe
  misc_feature (1)..(25): SEQ ID NO: 2831; WAN024G4L_at; Start 619; Stop 643
gaagacggtaacaatgtcatcgatg

SEQ ID NO: 230828 - DNA, 25 bp, Artificial
  probe
  misc_feature (1)..(25): SEQ ID NO: 2831; WAN024G4L_at; Start 444; Stop 468
gaccaatgaaggtgttttccacgaa

SEQ ID NO: 230829 - DNA, 25 bp, Artificial
  probe
  misc_feature (1)..(25): SEQ ID NO: 2831; WAN024G4L_at; Start 604; Stop 628
cctggaatgttcatcgaagacggta

SEQ ID NO: 230830 - DNA, 25 bp, Artificial
  probe
  misc_feature (1)..(25): SEQ ID NO: 2831; WAN024G4L_at; Start 828; Stop 852
tgaaaataacattgcaagtgccgaa

SEQ ID NO: 230831 - DNA, 25 bp, Artificial
  probe
  misc_feature (1)..(25): SEQ ID NO: 2831; WAN024G4L_at; Start 757; Stop 781
tatcgtacgcgtgaagaagtggaat

SEQ ID NO: 230832 - DNA, 25 bp, Artificial
  probe
  misc_feature (1)..(25): SEQ ID NO: 2831; WAN024G4L_at; Start 424; Stop 448
tgcttctttggagatggtgcgacca

SEQ ID NO: 230833 - DNA, 25 bp, Artificial
  probe
  misc_feature (1)..(25): SEQ ID NO: 2831; WAN024G4L_at; Start 903; Stop 927
taaatttgcagaggaaagcccattc

SEQ ID NO: 230834 - DNA, 25 bp, Artificial
  probe
  misc_feature (1)..(25): SEQ ID NO: 2831; WAN024G4L_at; Start 491; Stop 515
ggaacctgccagtcattttctattg

SEQ ID NO: 230835 - DNA, 25 bp, Artificial
  probe
  misc_feature (1)..(25): SEQ ID NO: 2831; WAN024G4L_at; Start 104; Stop 128
tgccaggaatgacgcacttttctgt

SEQ ID NO: 230836 - DNA, 25 bp, Artificial
  probe
  misc_feature (1)..(25): SEQ ID NO: 2831; WAN024G4L_at; Start 201; Stop 225
tggacacgggcaagctattgctaaa

SEQ ID NO: 230837 - DNA, 25 bp, Artificial
  probe
  misc_feature (1)..(25): SEQ ID NO: 2831; WAN024G4L_at; Start 38; Stop 62
tccgtaagatggaagaaatccgtcg

SEQ ID NO: 230838 - DNA, 25 bp, Artificial
  probe
  misc_feature (1)..(25): SEQ ID NO: 2831; WAN024G4L_at; Start 474; Stop 498
gaacatggcttctatctggaacctg

SEQ ID NO: 230839 - DNA, 25 bp, Artificial
  probe
  misc_feature (1)..(25): SEQ ID NO: 2831; WAN024G4L_at; Start 568; Stop 592
gaacatatccatcaacgtagcgccg

SEQ ID NO: 230840 - DNA, 25 bp, Artificial
  probe
  misc_feature (1)..(25): SEQ ID NO: 2831; WAN024G4L_at; Start 234; Stop 258
cctcaacggaatgatggctgaaatc

SEQ ID NO: 230841 - DNA, 25 bp, Artificial
  probe
  misc_feature (1)..(25): SEQ ID NO: 2831; WAN024G4L_at; Start 519; Stop 543
taacaacggttacggtatctctgcg

SEQ ID NO: 230842 - DNA, 25 bp, Artificial
  probe
  misc_feature (1)..(25): SEQ ID NO: 2831; WAN024G4L_at; Start 219; Stop 243
tgctaaagggattgacctcaacgga

SEQ ID NO: 230843 - DNA, 25 bp, Artificial
  probe
  misc_feature (1)..(25): SEQ ID NO: 2831; WAN024G4L_at; Start 673; Stop 697
catgttcgcagtggcaatggtccag

SEQ ID NO: 230844 - DNA, 25 bp, Artificial
  probe
  misc_feature (1)..(25): SEQ ID NO: 2831; WAN024G4L_at; Start 742; Stop 766
tctgaccctggtaaatatcgtacgc

SEQ ID NO: 230845 - DNA, 25 bp, Artificial
  probe
  misc_feature (1)..(25): SEQ ID NO: 2831; WAN024G4L_at; Start 374; Stop 398
tcggtgcagccctcagtcagcaaat

SEQ ID NO: 230846 - DNA, 25 bp, Artificial
  probe
  misc_feature (1)..(25): SEQ ID NO: 2831; WAN024G4L_at; Start 288; Stop 312
gaaaggtggatctatgcatatcgct

SEQ ID NO: 230847 - DNA, 25 bp, Artificial
  probe
  misc_feature (1)..(25): SEQ ID NO: 2831; WAN024G4L_at; Start 304; Stop 328
catatcgctgaccttgatgctggga

SEQ ID NO: 230848 - DNA, 25 bp, Artificial
  probe
  misc_feature (1)..(25): SEQ ID NO: 2831; WAN024G4L_at; Start 636; Stop 660
catcgatgtctatgaaggatttcag

SEQ ID NO: 230849 - DNA, 25 bp, Artificial
  probe
  misc_feature (1)..(25): SEQ ID NO: 2831; WAN024G4L_at; Start 793; Stop 817
aaagatccaatcgaaaacctccgca

SEQ ID NO: 230850 - DNA, 25 bp, Artificial
  probe
  misc_feature (1)..(25): SEQ ID NO: 2831; WAN024G4L_at; Start 119; Stop 143
acttttctgttggtgaagaggcagc

SEQ ID NO: 230851 - DNA, 25 bp, Artificial
  probe
  misc_feature (1)..(25): SEQ ID NO: 2831; WAN024G4L_at; Start 152; Stop 176
gggctatgttagctctcaatccaga

SEQ ID NO: 230852 - DNA, 25 bp, Artificial
  probe
  misc_feature (1)..(25): SEQ ID NO: 2831; WAN024G4L_at; Start 390; Stop 414
tcagcaaatgcaaaataccggtaaa

SEQ ID NO: 230853 - DNA, 25 bp, Artificial
  probe
  misc_feature (1)..(25): SEQ ID NO: 2831; WAN024G4L_at; Start 585; Stop 609
tagcgccgcttatggaattcctgga

SEQ ID NO: 230854 - DNA, 25 bp, Artificial
  probe
  misc_feature (1)..(25): SEQ ID NO: 4322; WAN024G4M_at; Start 278; Stop 302
ggagatttgatgctatcgttttcga

SEQ ID NO: 230855 - DNA, 25 bp, Artificial
  probe
  misc_feature (1)..(25): SEQ ID NO: 4322; WAN024G4M_at; Start 366; Stop 390
ggatttcctgccaagcaatgttatg

SEQ ID NO: 230856 - DNA, 25 bp, Artificial
  probe
  misc_feature (1)..(25): SEQ ID NO: 4322; WAN024G4M_at; Start 392; Stop 416
tcgagggcaattcgttttgcaagtg

SEQ ID NO: 230857 - DNA, 25 bp, Artificial
  probe
  misc_feature (1)..(25): SEQ ID NO: 4322; WAN024G4M_at; Start 210; Stop 234
gaatacgctcgattttaccatatgg

SEQ ID NO: 230858 - DNA, 25 bp, Artificial
  probe
  misc_feature (1)..(25): SEQ ID NO: 4322; WAN024G4M_at; Start 454; Stop 478
cacgtcttctttgtggacacgaccg

SEQ ID NO: 230859 - DNA, 25 bp, Artificial
  probe
  misc_feature (1)..(25): SEQ ID NO: 4322; WAN024G4M_at; Start 182; Stop 206
gcaataaccttacgcattggtgtca

SEQ ID NO: 230860 - DNA, 25 bp, Artificial
  probe
  misc_feature (1)..(25): SEQ ID NO: 4322; WAN024G4M_at; Start 102; Stop 126
gagccaacatttcagtcatatcaac

SEQ ID NO: 230861 - DNA, 25 bp, Artificial
  probe
  misc_feature (1)..(25): SEQ ID NO: 4322; WAN024G4M_at; Start 236; Stop 260
gttacgttatcagggacttcttcca

SEQ ID NO: 230862 - DNA, 25 bp, Artificial
  probe
  misc_feature (1)..(25): SEQ ID NO: 4322; WAN024G4M_at; Start 225; Stop 249
taccatatggtgttacgttatcagg

SEQ ID NO: 230863 - DNA, 25 bp, Artificial
  probe
  misc_feature (1)..(25): SEQ ID NO: 4322; WAN024G4M_at; Start 9; Stop 33
taagagtcttaacaactgcaagcga

SEQ ID NO: 230864 - DNA, 25 bp, Artificial
  probe
  misc_feature (1)..(25): SEQ ID NO: 4322; WAN024G4M_at; Start 438; Stop 462
tgtctttataagtttccacgtcttc

SEQ ID NO: 230865 - DNA, 25 bp, Artificial
  probe
  misc_feature (1)..(25): SEQ ID NO: 4322; WAN024G4M_at; Start 377; Stop 401
caagcaatgttatgttcgagggcaa

SEQ ID NO: 230866 - DNA, 25 bp, Artificial
  probe
  misc_feature (1)..(25): SEQ ID NO: 4322; WAN024G4M_at; Start 46; Stop 70
tacagtagtcttcttcccagttgct

SEQ ID NO: 230867 - DNA, 25 bp, Artificial
  probe
  misc_feature (1)..(25): SEQ ID NO: 4322; WAN024G4M_at; Start 318; Stop 342
gggccaaaacatccttcttcatgat

SEQ ID NO: 230868 - DNA, 25 bp, Artificial
  probe
  misc_feature (1)..(25): SEQ ID NO: 4322; WAN024G4M_at; Start 31; Stop 55
cgaaagaaggtctgttacagtagtc

SEQ ID NO: 230869 - DNA, 25 bp, Artificial
  probe
  misc_feature (1)..(25): SEQ ID NO: 4322; WAN024G4M_at; Start 298; Stop 322
ttcgatattttcaggaagcagggcc

SEQ ID NO: 230870 - DNA, 25 bp, Artificial
  probe
  misc_feature (1)..(25): SEQ ID NO: 4322; WAN024G4M_at; Start 61; Stop 85
cccagttgcttccatgattggctca

SEQ ID NO: 230871 - DNA, 25 bp, Artificial
  probe
  misc_feature (1)..(25): SEQ ID NO: 4322; WAN024G4M_at; Start 123; Stop 147
caacttcatagttgagggtgaaggt

SEQ ID NO: 230872 - DNA, 25 bp, Artificial
  probe
  misc_feature (1)..(25): SEQ ID NO: 4322; WAN024G4M_at; Start 424; Stop 448
gcgaaccacgtttgtgtctttataa

SEQ ID NO: 230873 - DNA, 25 bp, Artificial
  probe
  misc_feature (1)..(25): SEQ ID NO: 4322; WAN024G4M_at; Start 87; Stop 111
gaaccttcttacgaagagccaacat

SEQ ID NO: 230874 - DNA, 25 bp, Artificial
  probe
  misc_feature (1)..(25): SEQ ID NO: 4322; WAN024G4M_at; Start 407; Stop 431
tttgcaagtggcgaaatgcgaacca

SEQ ID NO: 230875 - DNA, 25 bp, Artificial
  probe
  misc_feature (1)..(25): SEQ ID NO: 4322; WAN024G4M_at; Start 306; Stop 330
tttcaggaagcagggccaaaacatc

SEQ ID NO: 230876 - DNA, 25 bp, Artificial
  probe
  misc_feature (1)..(25): SEQ ID NO: 4322; WAN024G4M_at; Start 337; Stop 361
catgattttaccacgatgaccggtt

SEQ ID NO: 230877 - DNA, 25 bp, Artificial
  probe
  misc_feature (1)..(25): SEQ ID NO: 4322; WAN024G4M_at; Start 21; Stop 45
caactgcaagcgaaagaaggtctgt

SEQ ID NO: 230878 - DNA, 25 bp, Artificial
  probe
  misc_feature (1)..(25): SEQ ID NO: 4322; WAN024G4M_at; Start 351; Stop 375
gatgaccggttccttggatttcctg

SEQ ID NO: 230879 - DNA, 25 bp, Artificial
  probe
  misc_feature (1)..(25): SEQ ID NO: 4322; WAN024G4M_at; Start 250; Stop 274
gacttcttccactttttcaatctga

SEQ ID NO: 230880 - DNA, 25 bp, Artificial
  probe
  misc_feature (1)..(25): SEQ ID NO: 4322; WAN024G4M_at; Start 142; Stop 166
gaaggttggcgcagtcaagtaagat

SEQ ID NO: 230881 - DNA, 25 bp, Artificial
  probe
  misc_feature (1)..(25): SEQ ID NO: 4322; WAN024G4M_at; Start 73; Stop 97
catgattggctcaagaaccttctta

SEQ ID NO: 230882 - DNA, 25 bp, Artificial
  probe
  misc_feature (1)..(25): SEQ ID NO: 4322; WAN024G4M_at; Start 415; Stop 439
tggcgaaatgcgaaccacgtttgtg

SEQ ID NO: 230883 - DNA, 25 bp, Artificial
  probe
  misc_feature (1)..(25): SEQ ID NO: 4322; WAN024G4M_at; Start 196; Stop 220
cattggtgtcattggaatacgctcg

SEQ ID NO: 230884 - DNA, 25 bp, Artificial
  probe
  misc_feature (1)..(25): SEQ ID NO: 4322; WAN024G4M_at; Start 153; Stop 177
cagtcaagtaagattcaaccatgcg

SEQ ID NO: 230885 - DNA, 25 bp, Artificial
  probe
  misc_feature (1)..(25): SEQ ID NO: 4322; WAN024G4M_at; Start 267; Stop 291
caatctgagcaggagatttgatgct

SEQ ID NO: 230886 - DNA, 25 bp, Artificial
  probe
  misc_feature (1)..(25): SEQ ID NO: 4322; WAN024G4M_at; Start 167; Stop 191
tcaaccatgcgttgggcaataacct

SEQ ID NO: 230887 - DNA, 25 bp, Artificial
  probe
  misc_feature (1)..(25): SEQ ID NO: 4322; WAN024G4M_at; Start 464; Stop 488
ttgtggacacgaccgtttgcacctg

SEQ ID NO: 230888 - DNA, 25 bp, Artificial
  probe
  misc_feature (1)..(25): SEQ ID NO: 5547; WAN024G4N_at; Start 358; Stop 382
gaaaacgatagcatcaaatctcctg

SEQ ID NO: 230889 - DNA, 25 bp, Artificial
  probe
  misc_feature (1)..(25): SEQ ID NO: 5547; WAN024G4N_at; Start 227; Stop 251
tggttcgcatttcgccacttgcaaa

SEQ ID NO: 230890 - DNA, 25 bp, Artificial
  probe
  misc_feature (1)..(25): SEQ ID NO: 5547; WAN024G4N_at; Start 101; Stop 125
taagagcgactcctgcagctagaaa

SEQ ID NO: 230891 - DNA, 25 bp, Artificial
  probe
  misc_feature (1)..(25): SEQ ID NO: 5547; WAN024G4N_at; Start 1025; Stop 1049
taggattaaccattgaccaccgtgt

SEQ ID NO: 230892 - DNA, 25 bp, Artificial
  probe
  misc_feature (1)..(25): SEQ ID NO: 5547; WAN024G4N_at; Start 573; Stop 597
tgagccaatcatggaagcaactggg

SEQ ID NO: 230893 - DNA, 25 bp, Artificial
  probe
  misc_feature (1)..(25): SEQ ID NO: 5547; WAN024G4N_at; Start 1005; Stop 1029
gattcgcccaatcatgagtttagga

SEQ ID NO: 230894 - DNA, 25 bp, Artificial
  probe
  misc_feature (1)..(25): SEQ ID NO: 5547; WAN024G4N_at; Start 1041; Stop 1065
ccaccgtgtcgtagatggtatggct

SEQ ID NO: 230895 - DNA, 25 bp, Artificial
  probe
  misc_feature (1)..(25): SEQ ID NO: 5547; WAN024G4N_at; Start 211; Stop 235
tataaagacacaaacgtggttcgca

SEQ ID NO: 230896 - DNA, 25 bp, Artificial
  probe
  misc_feature (1)..(25): SEQ ID NO: 5547; WAN024G4N_at; Start 280; Stop 304
tggcaggaaatccaaggaaccggtc

SEQ ID NO: 230897 - DNA, 25 bp, Artificial
  probe
  misc_feature (1)..(25): SEQ ID NO: 5547; WAN024G4N_at; Start 590; Stop 614
caactgggaagaagactactgtaac

SEQ ID NO: 230898 - DNA, 25 bp, Artificial
  probe
  misc_feature (1)..(25): SEQ ID NO: 5547; WAN024G4N_at; Start 320; Stop 344
tgaagaaggatgttttggccctgct

SEQ ID NO: 230899 - DNA, 25 bp, Artificial
  probe
  misc_feature (1)..(25): SEQ ID NO: 5547; WAN024G4N_at; Start 176; Stop 200
caaacggtcgtgtccacaaagaaga

SEQ ID NO: 230900 - DNA, 25 bp, Artificial
  probe
  misc_feature (1)..(25): SEQ ID NO: 5547; WAN024G4N_at; Start 975; Stop 999
gaagccagttgtcgtcaatggtgaa

SEQ ID NO: 230901 - DNA, 25 bp, Artificial
  probe
  misc_feature (1)..(25): SEQ ID NO: 5547; WAN024G4N_at; Start 242; Stop 266
cacttgcaaaacgaattgccctcga

SEQ ID NO: 230902 - DNA, 25 bp, Artificial
  probe
  misc_feature (1)..(25): SEQ ID NO: 5547; WAN024G4N_at; Start 709; Stop 733
aactatgtcaatcttgccatggcag

SEQ ID NO: 230903 - DNA, 25 bp, Artificial
  probe
  misc_feature (1)..(25): SEQ ID NO: 5547; WAN024G4N_at; Start 959; Stop 983
tcagttcgacaatcgagaagccagt

SEQ ID NO: 230904 - DNA, 25 bp, Artificial
  probe
  misc_feature (1)..(25): SEQ ID NO: 5547; WAN024G4N_at; Start 819; Stop 843
tgttattggccgtaccttggatggt

SEQ ID NO: 230905 - DNA, 25 bp, Artificial
  probe
  misc_feature (1)..(25): SEQ ID NO: 5547; WAN024G4N_at; Start 263; Stop 287
tcgaacataacattgcttggcagga

SEQ ID NO: 230906 - DNA, 25 bp, Artificial
  probe
  misc_feature (1)..(25): SEQ ID NO: 5547; WAN024G4N_at; Start 84; Stop 108
catggctgatgacaagctaagagcg

SEQ ID NO: 230907 - DNA, 25 bp, Artificial
  probe
  misc_feature (1)..(25): SEQ ID NO: 5547; WAN024G4N_at; Start 336; Stop 360
ggccctgcttcctgaaaatatcgaa

SEQ ID NO: 230908 - DNA, 25 bp, Artificial
  probe
  misc_feature (1)..(25): SEQ ID NO: 5547; WAN024G4N_at; Start 756; Stop 780
gacacctgttgtttacaatgctgag

SEQ ID NO: 230909 - DNA, 25 bp, Artificial
  probe
  misc_feature (1)..(25): SEQ ID NO: 5547; WAN024G4N_at; Start 297; Stop 321
aaccggtcatcgtggtaaaatcatg

SEQ ID NO: 230910 - DNA, 25 bp, Artificial
  probe
  misc_feature (1)..(25): SEQ ID NO: 5547; WAN024G4N_at; Start 146; Stop 170
taaacctctacgacgtttctggctc

SEQ ID NO: 230911 - DNA, 25 bp, Artificial
  probe
  misc_feature (1)..(25): SEQ ID NO: 5547; WAN024G4N_at; Start 794; Stop 818
cagaactggttgtagcctttaagga

SEQ ID NO: 230912 - DNA, 25 bp, Artificial
  probe
  misc_feature (1)..(25): SEQ ID NO: 5547; WAN024G4N_at; Start 65; Stop 89
taaatagaattggagaggtcatggc

SEQ ID NO: 230913 - DNA, 25 bp, Artificial
  probe
  misc_feature (1)..(25): SEQ ID NO: 5547; WAN024G4N_at; Start 400; Stop 424
gaagaagtccctgataacgtaacac

SEQ ID NO: 230914 - DNA, 25 bp, Artificial
  probe
  misc_feature (1)..(25): SEQ ID NO: 5547; WAN024G4N_at; Start 990; Stop 1014
caatggtgaaattgtgattcgccca

SEQ ID NO: 230915 - DNA, 25 bp, Artificial
  probe
  misc_feature (1)..(25): SEQ ID NO: 5547; WAN024G4N_at; Start 924; Stop 948
gattattaaccaacccaactcagct

SEQ ID NO: 230916 - DNA, 25 bp, Artificial
  probe
  misc_feature (1)..(25): SEQ ID NO: 5547; WAN024G4N_at; Start 486; Stop 510
ggttgaatcttacttgactgcgcca

SEQ ID NO: 230917 - DNA, 25 bp, Artificial
  probe
  misc_feature (1)..(25): SEQ ID NO: 5547; WAN024G4N_at; Start 540; Stop 564
gactgaaatgttggctcttcgtaag

SEQ ID NO: 230918 - DNA, 25 bp, Artificial
  probe
  misc_feature (1)..(25): SEQ ID NO: 5547; WAN024G4N_at; Start 441; Stop 465
gcgtattccaatgacaccaatgcgt

SEQ ID NO: 230919 - DNA, 25 bp, Artificial
  probe
  misc_feature (1)..(25): SEQ ID NO: 5547; WAN024G4N_at; Start 463; Stop 487
cgtaaggttattgcccaacgcatgg

SEQ ID NO: 230920 - DNA, 25 bp, Artificial
  probe
  misc_feature (1)..(25): SEQ ID NO: 5547; WAN024G4N_at; Start 161; Stop 185
tttctggctcaggtgcaaacggtcg

SEQ ID NO: 230921 - DNA, 25 bp, Artificial
  probe
  misc_feature (1)..(25): SEQ ID NO: 5547; WAN024G4N_at; Start 376; Stop 400
tctcctgctcagattgaaaaagtgg

SEQ ID NO: 230922 - DNA, 25 bp, Artificial
  probe
  misc_feature (1)..(25): SEQ ID NO: 4242; WAN024G4O_at; Start 303; Stop 327
ctggtgcataaatgcctggaactga

SEQ ID NO: 230923 - DNA, 25 bp, Artificial
  probe
  misc_feature (1)..(25): SEQ ID NO: 4242; WAN024G4O_at; Start 40; Stop 64
aacttttacgaaaccttgagctgcg

SEQ ID NO: 230924 - DNA, 25 bp, Artificial
  probe
  misc_feature (1)..(25): SEQ ID NO: 4242; WAN024G4O_at; Start 66; Stop 90
cagatgcaatagcacgaccgttagc

SEQ ID NO: 230925 - DNA, 25 bp, Artificial
  probe
  misc_feature (1)..(25): SEQ ID NO: 4242; WAN024G4O_at; Start 245; Stop 269
gaaacttcacccatgcggaaagctg

SEQ ID NO: 230926 - DNA, 25 bp, Artificial
  probe
  misc_feature (1)..(25): SEQ ID NO: 4242; WAN024G4O_at; Start 30; Stop 54
tatcagcgataacttttacgaaacc

SEQ ID NO: 230927 - DNA, 25 bp, Artificial
  probe
  misc_feature (1)..(25): SEQ ID NO: 4242; WAN024G4O_at; Start 228; Stop 252
taagggcattttcagcggaaacttc

SEQ ID NO: 230928 - DNA, 25 bp, Artificial
  probe
  misc_feature (1)..(25): SEQ ID NO: 4242; WAN024G4O_at; Start 75; Stop 99
tagcacgaccgttagcagcaaagtt

SEQ ID NO: 230929 - DNA, 25 bp, Artificial
  probe
  misc_feature (1)..(25): SEQ ID NO: 4242; WAN024G4O_at; Start 288; Stop 312
taccgttgatgtcacctggtgcata

SEQ ID NO: 230930 - DNA, 25 bp, Artificial
  probe
  misc_feature (1)..(25): SEQ ID NO: 4242; WAN024G4O_at; Start 1; Stop 25
gtgtacaccaaggatttctccgtat

SEQ ID NO: 230931 - DNA, 25 bp, Artificial
  probe
  misc_feature (1)..(25): SEQ ID NO: 4242; WAN024G4O_at; Start 163; Stop 187
tacttcagggagagtgtagatggct

SEQ ID NO: 230932 - DNA, 25 bp, Artificial
  probe
  misc_feature (1)..(25): SEQ ID NO: 4242; WAN024G4O_at; Start 184; Stop 208
ggctgcaggagtcaaattcaatttg

SEQ ID NO: 230933 - DNA, 25 bp, Artificial
  probe
  misc_feature (1)..(25): SEQ ID NO: 4242; WAN024G4O_at; Start 117; Stop 141
catcgtatttctcacgggcttgttc

SEQ ID NO: 230934 - DNA, 25 bp, Artificial
  probe
  misc_feature (1)..(25): SEQ ID NO: 4242; WAN024G4O_at; Start 111; Stop 135
tggcaacatcgtatttctcacgggc

SEQ ID NO: 230935 - DNA, 25 bp, Artificial
  probe
  misc_feature (1)..(25): SEQ ID NO: 4242; WAN024G4O_at; Start 49; Stop 73
gaaaccttgagctgcgtcagatgca

SEQ ID NO: 230936 - DNA, 25 bp, Artificial
  probe
  misc_feature (1)..(25): SEQ ID NO: 4242; WAN024G4O_at; Start 260; Stop 284
cggaaagctgcgtgagccaacatct

SEQ ID NO: 230937 - DNA, 25 bp, Artificial
  probe
  misc_feature (1)..(25): SEQ ID NO: 4242; WAN024G4O_at; Start 150; Stop 174
aacctactgctgctacttcagggag

SEQ ID NO: 230938 - DNA, 25 bp, Artificial
  probe
  misc_feature (1)..(25): SEQ ID NO: 4242; WAN024G4O_at; Start 297; Stop 321
tgtcacctggtgcataaatgcctgg

SEQ ID NO: 230939 - DNA, 25 bp, Artificial
  probe
  misc_feature (1)..(25): SEQ ID NO: 4242; WAN024G4O_at; Start 205; Stop 229
tttggcaactgcatgatttccttta

SEQ ID NO: 230940 - DNA, 25 bp, Artificial
  probe
  misc_feature (1)..(25): SEQ ID NO: 4242; WAN024G4O_at; Start 282; Stop 306
tcttagtaccgttgatgtcacctgg

SEQ ID NO: 230941 - DNA, 25 bp, Artificial
  probe
  misc_feature (1)..(25): SEQ ID NO: 4242; WAN024G4O_at; Start 196; Stop 220
caaattcaatttggcaactgcatga

SEQ ID NO: 230942 - DNA, 25 bp, Artificial
  probe
  misc_feature (1)..(25): SEQ ID NO: 4242; WAN024G4O_at; Start 92; Stop 116
gcaaagttaaacttaccgatggcaa

SEQ ID NO: 230943 - DNA, 25 bp, Artificial
  probe
  misc_feature (1)..(25): SEQ ID NO: 4242; WAN024G4O_at; Start 255; Stop 279
ccatgcggaaagctgcgtgagccaa

SEQ ID NO: 230944 - DNA, 25 bp, Artificial
  probe
  misc_feature (1)..(25): SEQ ID NO: 4242; WAN024G4O_at; Start 17; Stop 41
tctccgtatttcttatcagcgataa

SEQ ID NO: 230945 - DNA, 25 bp, Artificial
  probe
  misc_feature (1)..(25): SEQ ID NO: 4242; WAN024G4O_at; Start 179; Stop 203
tagatggctgcaggagtcaaattca

SEQ ID NO: 230946 - DNA, 25 bp, Artificial
  probe
  misc_feature (1)..(25): SEQ ID NO: 4242; WAN024G4O_at; Start 223; Stop 247
tcctttaagggcattttcagcggaa

SEQ ID NO: 230947 - DNA, 25 bp, Artificial
  probe
  misc_feature (1)..(25): SEQ ID NO: 4242; WAN024G4O_at; Start 129; Stop 153
cacgggcttgttcttctgtcaaacc

SEQ ID NO: 230948 - DNA, 25 bp, Artificial
  probe
  misc_feature (1)..(25): SEQ ID NO: 4242; WAN024G4O_at; Start 238; Stop 262
ttcagcggaaacttcacccatgcgg

SEQ ID NO: 230949 - DNA, 25 bp, Artificial
  probe
  misc_feature (1)..(25): SEQ ID NO: 4242; WAN024G4O_at; Start 80; Stop 104
cgaccgttagcagcaaagttaaact

SEQ ID NO: 230950 - DNA, 25 bp, Artificial
  probe
  misc_feature (1)..(25): SEQ ID NO: 4242; WAN024G4O_at; Start 97; Stop 121
gttaaacttaccgatggcaacatcg

SEQ ID NO: 230951 - DNA, 25 bp, Artificial
  probe
  misc_feature (1)..(25): SEQ ID NO: 4242; WAN024G4O_at; Start 140; Stop 164
tcttctgtcaaacctactgctgcta

SEQ ID NO: 230952 - DNA, 25 bp, Artificial
  probe
  misc_feature (1)..(25): SEQ ID NO: 4242; WAN024G4O_at; Start 154; Stop 178
tactgctgctacttcagggagagtg

SEQ ID NO: 230953 - DNA, 25 bp, Artificial
  probe
  misc_feature (1)..(25): SEQ ID NO: 4242; WAN024G4O_at; Start 13; Stop 37
gatttctccgtatttcttatcagcg

SEQ ID NO: 230954 - DNA, 25 bp, Artificial
  probe
  misc_feature (1)..(25): SEQ ID NO: 4242; WAN024G4O_at; Start 56; Stop 80
tgagctgcgtcagatgcaatagcac

SEQ ID NO: 230955 - DNA, 25 bp, Artificial
  probe
  misc_feature (1)..(25): SEQ ID NO: 4242; WAN024G4O_at; Start 268; Stop 292
tgcgtgagccaacatcttagtaccg

SEQ ID NO: 230956 - DNA, 25 bp, Artificial
  probe
  misc_feature (1)..(25): SEQ ID NO: 5091; WAN024G4P_at; Start 82; Stop 106
tctccttcttttacaaattctccga

SEQ ID NO: 230957 - DNA, 25 bp, Artificial
  probe
  misc_feature (1)..(25): SEQ ID NO: 5091; WAN024G4P_at; Start 18; Stop 42
gtacccatcttcttcggcttccaat

SEQ ID NO: 230958 - DNA, 25 bp, Artificial
  probe
  misc_feature (1)..(25): SEQ ID NO: 5091; WAN024G4P_at; Start 130; Stop 154
tgtccttctgtcatatccacgccgg

SEQ ID NO: 230959 - DNA, 25 bp, Artificial
  probe
  misc_feature (1)..(25): SEQ ID NO: 5091; WAN024G4P_at; Start 145; Stop 169
tccacgccggcttttggcataatta

SEQ ID NO: 230960 - DNA, 25 bp, Artificial
  probe
  misc_feature (1)..(25): SEQ ID NO: 5091; WAN024G4P_at; Start 160; Stop 184
ggcataattacttctaaggccatgt

SEQ ID NO: 230961 - DNA, 25 bp, Artificial
  probe
  misc_feature (1)..(25): SEQ ID NO: 5091; WAN024G4P_at; Start 59; Stop 83
cagtcatgatttccaaaaggatttc

SEQ ID NO: 230962 - DNA, 25 bp, Artificial
  probe
  misc_feature (1)..(25): SEQ ID NO: 5091; WAN024G4P_at; Start 164; Stop 188
taattacttctaaggccatgtcttc

SEQ ID NO: 230963 - DNA, 25 bp, Artificial
  probe
  misc_feature (1)..(25): SEQ ID NO: 5091; WAN024G4P_at; Start 62; Stop 86
tcatgatttccaaaaggatttctcc

SEQ ID NO: 230964 - DNA, 25 bp, Artificial
  probe
  misc_feature (1)..(25): SEQ ID NO: 5091; WAN024G4P_at; Start 65; Stop 89
tgatttccaaaaggatttctccttc

SEQ ID NO: 230965 - DNA, 25 bp, Artificial
  probe
  misc_feature (1)..(25): SEQ ID NO: 5091; WAN024G4P_at; Start 100; Stop 124
tctccgacttttttattccattgga

SEQ ID NO: 230966 - DNA, 25 bp, Artificial
  probe
  misc_feature (1)..(25): SEQ ID NO: 5091; WAN024G4P_at; Start 175; Stop 199
aaggccatgtcttccttcctttatc

SEQ ID NO: 230967 - DNA, 25 bp, Artificial
  probe
  misc_feature (1)..(25): SEQ ID NO: 5091; WAN024G4P_at; Start 136; Stop 160
tctgtcatatccacgccggcttttg

SEQ ID NO: 230968 - DNA, 25 bp, Artificial
  probe
  misc_feature (1)..(25): SEQ ID NO: 5091; WAN024G4P_at; Start 147; Stop 171
cacgccggcttttggcataattact

SEQ ID NO: 230969 - DNA, 25 bp, Artificial
  probe
  misc_feature (1)..(25): SEQ ID NO: 5091; WAN024G4P_at; Start 207; Stop 231
taaaaatgaatactcttgctcttaa

SEQ ID NO: 230970 - DNA, 25 bp, Artificial
  probe
  misc_feature (1)..(25): SEQ ID NO: 5091; WAN024G4P_at; Start 12; Stop 36
aatcaagtacccatcttcttcggct

SEQ ID NO: 230971 - DNA, 25 bp, Artificial
  probe
  misc_feature (1)..(25): SEQ ID NO: 5091; WAN024G4P_at; Start 9; Stop 33
ggcaatcaagtacccatcttcttcg

SEQ ID NO: 230972 - DNA, 25 bp, Artificial
  probe
  misc_feature (1)..(25): SEQ ID NO: 5091; WAN024G4P_at; Start 2; Stop 26
tgagaatggcaatcaagtacccatc

SEQ ID NO: 230973 - DNA, 25 bp, Artificial
  probe
  misc_feature (1)..(25): SEQ ID NO: 5091; WAN024G4P_at; Start 104; Stop 128
cgacttttttattccattggacgat

SEQ ID NO: 230974 - DNA, 25 bp, Artificial
  probe
  misc_feature (1)..(25): SEQ ID NO: 5091; WAN024G4P_at; Start 151; Stop 175
ccggcttttggcataattacttcta

SEQ ID NO: 230975 - DNA, 25 bp, Artificial
  probe
  misc_feature (1)..(25): SEQ ID NO: 5091; WAN024G4P_at; Start 168; Stop 192
tacttctaaggccatgtcttccttc

SEQ ID NO: 230976 - DNA, 25 bp, Artificial
  probe
  misc_feature (1)..(25): SEQ ID NO: 5091; WAN024G4P_at; Start 55; Stop 79
ttatcagtcatgatttccaaaagga

SEQ ID NO: 230977 - DNA, 25 bp, Artificial
  probe
  misc_feature (1)..(25): SEQ ID NO: 5091; WAN024G4P_at; Start 28; Stop 52
tcttcggcttccaattccatgctga

SEQ ID NO: 230978 - DNA, 25 bp, Artificial
  probe
  misc_feature (1)..(25): SEQ ID NO: 5091; WAN024G4P_at; Start 5; Stop 29
gaatggcaatcaagtacccatcttc

SEQ ID NO: 230979 - DNA, 25 bp, Artificial
  probe
  misc_feature (1)..(25): SEQ ID NO: 5091; WAN024G4P_at; Start 113; Stop 137
tattccattggacgatttgtccttc

SEQ ID NO: 230980 - DNA, 25 bp, Artificial
  probe
  misc_feature (1)..(25): SEQ ID NO: 5091; WAN024G4P_at; Start 202; Stop 226
tatcttaaaaatgaatactcttgct

SEQ ID NO: 230981 - DNA, 25 bp, Artificial
  probe
  misc_feature (1)..(25): SEQ ID NO: 5091; WAN024G4P_at; Start 143; Stop 167
tatccacgccggcttttggcataat

SEQ ID NO: 230982 - DNA, 25 bp, Artificial
  probe
  misc_feature (1)..(25): SEQ ID NO: 5091; WAN024G4P_at; Start 122; Stop 146
ggacgatttgtccttctgtcatatc

SEQ ID NO: 230983 - DNA, 25 bp, Artificial
  probe
  misc_feature (1)..(25): SEQ ID NO: 5091; WAN024G4P_at; Start 37; Stop 61
tccaattccatgctgactttatcag

SEQ ID NO: 230984 - DNA, 25 bp, Artificial
  probe
  misc_feature (1)..(25): SEQ ID NO: 5091; WAN024G4P_at; Start 30; Stop 54
ttcggcttccaattccatgctgact

SEQ ID NO: 230985 - DNA, 25 bp, Artificial
  probe
  misc_feature (1)..(25): SEQ ID NO: 5091; WAN024G4P_at; Start 44; Stop 68
ccatgctgactttatcagtcatgat

SEQ ID NO: 230986 - DNA, 25 bp, Artificial
  probe
  misc_feature (1)..(25): SEQ ID NO: 5091; WAN024G4P_at; Start 33; Stop 57
ggcttccaattccatgctgacttta

SEQ ID NO: 230987 - DNA, 25 bp, Artificial
  probe
  misc_feature (1)..(25): SEQ ID NO: 5091; WAN024G4P_at; Start 126; Stop 150
gatttgtccttctgtcatatccacg

SEQ ID NO: 230988 - DNA, 25 bp, Artificial
  probe
  misc_feature (1)..(25): SEQ ID NO: 5091; WAN024G4P_at; Start 118; Stop 142
cattggacgatttgtccttctgtca

SEQ ID NO: 230989 - DNA, 25 bp, Artificial
  probe
  misc_feature (1)..(25): SEQ ID NO: 5091; WAN024G4P_at; Start 39; Stop 63
caattccatgctgactttatcagtc

SEQ ID NO: 230990 - DNA, 25 bp, Artificial
  probe
  misc_feature (1)..(25): SEQ ID NO: 2460; WAN024G4Q_at; Start 817; Stop 841
gaaatgaacgaagtgccagaaagcc

SEQ ID NO: 230991 - DNA, 25 bp, Artificial
  probe
  misc_feature (1)..(25): SEQ ID NO: 2460; WAN024G4Q_at; Start 911; Stop 935
tgactgttatcgaaatgatggaccg

SEQ ID NO: 230992 - DNA, 25 bp, Artificial
  probe
  misc_feature (1)..(25): SEQ ID NO: 2460; WAN024G4Q_at; Start 291; Stop 315
tgtagcaagtacctcaaacgatgat

SEQ ID NO: 230993 - DNA, 25 bp, Artificial
  probe
  misc_feature (1)..(25): SEQ ID NO: 2460; WAN024G4Q_at; Start 408; Stop 432
ggttgcccttgttgagaaatctgaa

SEQ ID NO: 230994 - DNA, 25 bp, Artificial
  probe
  misc_feature (1)..(25): SEQ ID NO: 2460; WAN024G4Q_at; Start 126; Stop 150
taaagtcagcatggaattggaagcc

SEQ ID NO: 230995 - DNA, 25 bp, Artificial
  probe
  misc_feature (1)..(25): SEQ ID NO: 2460; WAN024G4Q_at; Start 1452; Stop 1476
tattgcatctgacgcagctcaaggt

SEQ ID NO: 230996 - DNA, 25 bp, Artificial
  probe
  misc_feature (1)..(25): SEQ ID NO: 2460; WAN024G4Q_at; Start 864; Stop 888
tgtcggtatcgaactcggtcaggcc

SEQ ID NO: 230997 - DNA, 25 bp, Artificial
  probe
  misc_feature (1)..(25): SEQ ID NO: 2460; WAN024G4Q_at; Start 423; Stop 447
gaaatctgaacttggtggaacctgc

SEQ ID NO: 230998 - DNA, 25 bp, Artificial
  probe
  misc_feature (1)..(25): SEQ ID NO: 2460; WAN024G4Q_at; Start 14; Stop 38
taattatgccaaaagccggcgtgga

SEQ ID NO: 230999 - DNA, 25 bp, Artificial
  probe
  misc_feature (1)..(25): SEQ ID NO: 2460; WAN024G4Q_at; Start 779; Stop 803
tggaatctccacttgtcatgactag

SEQ ID NO: 231000 - DNA, 25 bp, Artificial
  probe
  misc_feature (1)..(25): SEQ ID NO: 2460; WAN024G4Q_at; Start 29; Stop 53
ccggcgtggatatgacagaaggaca

SEQ ID NO: 231001 - DNA, 25 bp, Artificial
  probe
  misc_feature (1)..(25): SEQ ID NO: 2460; WAN024G4Q_at; Start 985; Stop 1009
cttgagcgtaaaggaatgaccatct

SEQ ID NO: 231002 - DNA, 25 bp, Artificial
  probe
  misc_feature (1)..(25): SEQ ID NO: 2460; WAN024G4Q_at; Start 256; Stop 280
gctggagcagcatcgccagaagcta

SEQ ID NO: 231003 - DNA, 25 bp, Artificial
  probe
  misc_feature (1)..(25): SEQ ID NO: 2460; WAN024G4Q_at; Start 241; Stop 265
gaaaacatcccaacagctggagcag

SEQ ID NO: 231004 - DNA, 25 bp, Artificial
  probe
  misc_feature (1)..(25): SEQ ID NO: 2460; WAN024G4Q_at; Start 1263; Stop 1287
tttccgcatgggtgaagtttccgct

SEQ ID NO: 231005 - DNA, 25 bp, Artificial
  probe
  misc_feature (1)..(25): SEQ ID NO: 2460; WAN024G4Q_at; Start 1216; Stop 1240
tatgcaccaggtgacatcaacggta

SEQ ID NO: 231006 - DNA, 25 bp, Artificial
  probe
  misc_feature (1)..(25): SEQ ID NO: 2460; WAN024G4Q_at; Start 833; Stop 857
cagaaagccttgttatcatcggtgg

SEQ ID NO: 231007 - DNA, 25 bp, Artificial
  probe
  misc_feature (1)..(25): SEQ ID NO: 2460; WAN024G4Q_at; Start 1599; Stop 1623
ggaaatgctgaagaccatccacggg

SEQ ID NO: 231008 - DNA, 25 bp, Artificial
  probe
  misc_feature (1)..(25): SEQ ID NO: 2460; WAN024G4Q_at; Start 1393; Stop 1417
gcccgtgagaaatacgatgttgcca

SEQ ID NO: 231009 - DNA, 25 bp, Artificial
  probe
  misc_feature (1)..(25): SEQ ID NO: 2460; WAN024G4Q_at; Start 1373; Stop 1397
taggtttgacagaagaacaagcccg

SEQ ID NO: 231010 - DNA, 25 bp, Artificial
  probe
  misc_feature (1)..(25): SEQ ID NO: 2460; WAN024G4Q_at; Start 142; Stop 166
ttggaagccgaagaagatgggtact

SEQ ID NO: 231011 - DNA, 25 bp, Artificial
  probe
  misc_feature (1)..(25): SEQ ID NO: 2460; WAN024G4Q_at; Start 1321; Stop 1345
aaattgaatttgactcctgcagcca

SEQ ID NO: 231012 - DNA, 25 bp, Artificial
  probe
  misc_feature (1)..(25): SEQ ID NO: 2460; WAN024G4Q_at; Start 1525; Stop 1549
cacattattggtcctgcagccgcag

SEQ ID NO: 231013 - DNA, 25 bp, Artificial
  probe
  misc_feature (1)..(25): SEQ ID NO: 2460; WAN024G4Q_at; Start 187; Stop 211
gatggtgaaactgtccctgtaacgg

SEQ ID NO: 231014 - DNA, 25 bp, Artificial
  probe
  misc_feature (1)..(25): SEQ ID NO: 2460; WAN024G4Q_at; Start 438; Stop 462
tggaacctgcttaaaccgtggatgt

SEQ ID NO: 231015 - DNA, 25 bp, Artificial
  probe
  misc_feature (1)..(25): SEQ ID NO: 2460; WAN024G4Q_at; Start 1428; Stop 1452
taactttgctgctaacggtcgtgct

SEQ ID NO: 231016 - DNA, 25 bp, Artificial
  probe
  misc_feature (1)..(25): SEQ ID NO: 2460; WAN024G4Q_at; Start 883; Stop 907
caggccttcatgacatttggttcaa

SEQ ID NO: 231017 - DNA, 25 bp, Artificial
  probe
  misc_feature (1)..(25): SEQ ID NO: 2460; WAN024G4Q_at; Start 604; Stop 628
actcttgttggtggtgttgcaggac

SEQ ID NO: 231018 - DNA, 25 bp, Artificial
  probe
  misc_feature (1)..(25): SEQ ID NO: 2460; WAN024G4Q_at; Start 622; Stop 646
gcaggacttcttcgtagctacggag

SEQ ID NO: 231019 - DNA, 25 bp, Artificial
  probe
  misc_feature (1)..(25): SEQ ID NO: 2460; WAN024G4Q_at; Start 1504; Stop 1528
tacggagaaatccttggtgtacaca

SEQ ID NO: 231020 - DNA, 25 bp, Artificial
  probe
  misc_feature (1)..(25): SEQ ID NO: 2460; WAN024G4Q_at; Start 1239; Stop 1263
tactaagatgttggctcacgcagct

SEQ ID NO: 231021 - DNA, 25 bp, Artificial
  probe
  misc_feature (1)..(25): SEQ ID NO: 2460; WAN024G4Q_at; Start 514; Stop 538
catgctgcaaatcgtggtatcgtga

SEQ ID NO: 231022 - DNA, 25 bp, Artificial
  probe
  misc_feature (1)..(25): SEQ ID NO: 2460; WAN024G4Q_at; Start 456; Stop 480
tggatgtattccaaccaagacctac

SEQ ID NO: 231023 - DNA, 25 bp, Artificial
  probe
  misc_feature (1)..(25): SEQ ID NO: 2460; WAN024G4Q_at; Start 1657; Stop 1681
tttgcagatgttctaggaatggcca

SEQ ID NO: 231024 - DNA, 25 bp, Artificial
  probe
  misc_feature (1)..(25): SEQ ID NO: 1049; WAN024G4R_at; Start 59; Stop 83
ccttcgctagatacttcttctggaa

SEQ ID NO: 231025 - DNA, 25 bp, Artificial
  probe
  misc_feature (1)..(25): SEQ ID NO: 1049; WAN024G4R_at; Start 84; Stop 108
gcattttttccagcatggcttcata

SEQ ID NO: 231026 - DNA, 25 bp, Artificial
  probe
  misc_feature (1)..(25): SEQ ID NO: 1049; WAN024G4R_at; Start 153; Stop 177
gagtgacaagaccaagtggcataag

SEQ ID NO: 231027 - DNA, 25 bp, Artificial
  probe
  misc_feature (1)..(25): SEQ ID NO: 1049; WAN024G4R_at; Start 180; Stop 204
tgcgaatatctcctaccatctcagt

SEQ ID NO: 231028 - DNA, 25 bp, Artificial
  probe
  misc_feature (1)..(25): SEQ ID NO: 1049; WAN024G4R_at; Start 162; Stop 186
gaccaagtggcataaggttgcgaat

SEQ ID NO: 231029 - DNA, 25 bp, Artificial
  probe
  misc_feature (1)..(25): SEQ ID NO: 1049; WAN024G4R_at; Start 156; Stop 180
tgacaagaccaagtggcataaggtt

SEQ ID NO: 231030 - DNA, 25 bp, Artificial
  probe
  misc_feature (1)..(25): SEQ ID NO: 1049; WAN024G4R_at; Start 96; Stop 120
gcatggcttcatagactggcgtacc

SEQ ID NO: 231031 - DNA, 25 bp, Artificial
  probe
  misc_feature (1)..(25): SEQ ID NO: 1049; WAN024G4R_at; Start 141; Stop 165
tataagaaacaagagtgacaagacc

SEQ ID NO: 231032 - DNA, 25 bp, Artificial
  probe
  misc_feature (1)..(25): SEQ ID NO: 1049; WAN024G4R_at; Start 3; Stop 27
gaacttgtttcccagcaattttatc

SEQ ID NO: 231033 - DNA, 25 bp, Artificial
  probe
  misc_feature (1)..(25): SEQ ID NO: 1049; WAN024G4R_at; Start 15; Stop 39
cagcaattttatcagaaactggtat

SEQ ID NO: 231034 - DNA, 25 bp, Artificial
  probe
  misc_feature (1)..(25): SEQ ID NO: 1049; WAN024G4R_at; Start 105; Stop 129
catagactggcgtacctttgagcaa

SEQ ID NO: 231035 - DNA, 25 bp, Artificial
  probe
  misc_feature (1)..(25): SEQ ID NO: 1049; WAN024G4R_at; Start 109; Stop 133
gactggcgtacctttgagcaaatcc

SEQ ID NO: 231036 - DNA, 25 bp, Artificial
  probe
  misc_feature (1)..(25): SEQ ID NO: 1049; WAN024G4R_at; Start 196; Stop 220
catctcagttacgaggatcatagcg

SEQ ID NO: 231037 - DNA, 25 bp, Artificial
  probe
  misc_feature (1)..(25): SEQ ID NO: 1049; WAN024G4R_at; Start 201; Stop 225
cagttacgaggatcatagcggttaa

SEQ ID NO: 231038 - DNA, 25 bp, Artificial
  probe
  misc_feature (1)..(25): SEQ ID NO: 1049; WAN024G4R_at; Start 12; Stop 36
tcccagcaattttatcagaaactgg

SEQ ID NO: 231039 - DNA, 25 bp, Artificial
  probe
  misc_feature (1)..(25): SEQ ID NO: 1049; WAN024G4R_at; Start 171; Stop 195
gcataaggttgcgaatatctcctac

SEQ ID NO: 231040 - DNA, 25 bp, Artificial
  probe
  misc_feature (1)..(25): SEQ ID NO: 1049; WAN024G4R_at; Start 198; Stop 222
tctcagttacgaggatcatagcggt

SEQ ID NO: 231041 - DNA, 25 bp, Artificial
  probe
  misc_feature (1)..(25): SEQ ID NO: 1049; WAN024G4R_at; Start 174; Stop 198
taaggttgcgaatatctcctaccat

SEQ ID NO: 231042 - DNA, 25 bp, Artificial
  probe
  misc_feature (1)..(25): SEQ ID NO: 1049; WAN024G4R_at; Start 33; Stop 57
ctggtatttcgataagtgtaacttc

SEQ ID NO: 231043 - DNA, 25 bp, Artificial
  probe
  misc_feature (1)..(25): SEQ ID NO: 1049; WAN024G4R_at; Start 131; Stop 155
tccatgataatataagaaacaagag

SEQ ID NO: 231044 - DNA, 25 bp, Artificial
  probe
  misc_feature (1)..(25): SEQ ID NO: 1049; WAN024G4R_at; Start 99; Stop 123
tggcttcatagactggcgtaccttt

SEQ ID NO: 231045 - DNA, 25 bp, Artificial
  probe
  misc_feature (1)..(25): SEQ ID NO: 1049; WAN024G4R_at; Start 63; Stop 87
cgctagatacttcttctggaagcat

SEQ ID NO: 231046 - DNA, 25 bp, Artificial
  probe
  misc_feature (1)..(25): SEQ ID NO: 1049; WAN024G4R_at; Start 146; Stop 170
gaaacaagagtgacaagaccaagtg

SEQ ID NO: 231047 - DNA, 25 bp, Artificial
  probe
  misc_feature (1)..(25): SEQ ID NO: 1049; WAN024G4R_at; Start 49; Stop 73
tgtaacttctccttcgctagatact

SEQ ID NO: 231048 - DNA, 25 bp, Artificial
  probe
  misc_feature (1)..(25): SEQ ID NO: 1049; WAN024G4R_at; Start 184; Stop 208
aatatctcctaccatctcagttacg

SEQ ID NO: 231049 - DNA, 25 bp, Artificial
  probe
  misc_feature (1)..(25): SEQ ID NO: 1049; WAN024G4R_at; Start 26; Stop 50
tcagaaactggtatttcgataagtg

SEQ ID NO: 231050 - DNA, 25 bp, Artificial
  probe
  misc_feature (1)..(25): SEQ ID NO: 1049; WAN024G4R_at; Start 119; Stop 143
cctttgagcaaatccatgataatat

SEQ ID NO: 231051 - DNA, 25 bp, Artificial
  probe
  misc_feature (1)..(25): SEQ ID NO: 1049; WAN024G4R_at; Start 168; Stop 192
gtggcataaggttgcgaatatctcc

SEQ ID NO: 231052 - DNA, 25 bp, Artificial
  probe
  misc_feature (1)..(25): SEQ ID NO: 1049; WAN024G4R_at; Start 191; Stop 215
cctaccatctcagttacgaggatca

SEQ ID NO: 231053 - DNA, 25 bp, Artificial
  probe
  misc_feature (1)..(25): SEQ ID NO: 1049; WAN024G4R_at; Start 150; Stop 174
caagagtgacaagaccaagtggcat

SEQ ID NO: 231054 - DNA, 25 bp, Artificial
  probe
  misc_feature (1)..(25): SEQ ID NO: 1049; WAN024G4R_at; Start 45; Stop 69
taagtgtaacttctccttcgctaga

SEQ ID NO: 231055 - DNA, 25 bp, Artificial
  probe
  misc_feature (1)..(25): SEQ ID NO: 1049; WAN024G4R_at; Start 113; Stop 137
ggcgtacctttgagcaaatccatga

SEQ ID NO: 231056 - DNA, 25 bp, Artificial
  probe
  misc_feature (1)..(25): SEQ ID NO: 1049; WAN024G4R_at; Start 92; Stop 116
tccagcatggcttcatagactggcg

SEQ ID NO: 231057 - DNA, 25 bp, Artificial
  probe
  misc_feature (1)..(25): SEQ ID NO: 1049; WAN024G4R_at; Start 79; Stop 103
tggaagcattttttccagcatggct

SEQ ID NO: 231058 - DNA, 25 bp, Artificial
  probe
  misc_feature (1)..(25): SEQ ID NO: 4903; WAN024G4S_at; Start 580; Stop 604
gaagtctatcaccatttttcgcgct

SEQ ID NO: 231059 - DNA, 25 bp, Artificial
  probe
  misc_feature (1)..(25): SEQ ID NO: 4903; WAN024G4S_at; Start 1110; Stop 1134
tgtcagtcaagagcaattccctata

SEQ ID NO: 231060 - DNA, 25 bp, Artificial
  probe
  misc_feature (1)..(25): SEQ ID NO: 4903; WAN024G4S_at; Start 1340; Stop 1364
tatctagcgaaggagaagttacact

SEQ ID NO: 231061 - DNA, 25 bp, Artificial
  probe
  misc_feature (1)..(25): SEQ ID NO: 4903; WAN024G4S_at; Start 187; Stop 211
caagatcaagggtacttagtgcgca

SEQ ID NO: 231062 - DNA, 25 bp, Artificial
  probe
  misc_feature (1)..(25): SEQ ID NO: 4903; WAN024G4S_at; Start 1288; Stop 1312
aaaggtacgccagtctatgaagcca

SEQ ID NO: 231063 - DNA, 25 bp, Artificial
  probe
  misc_feature (1)..(25): SEQ ID NO: 4903; WAN024G4S_at; Start 254; Stop 278
tcagtgccaaactaacacggtcaga

SEQ ID NO: 231064 - DNA, 25 bp, Artificial
  probe
  misc_feature (1)..(25): SEQ ID NO: 4903; WAN024G4S_at; Start 520; Stop 544
gcagcaggtttagccgcagccttta

SEQ ID NO: 231065 - DNA, 25 bp, Artificial
  probe
  misc_feature (1)..(25): SEQ ID NO: 4903; WAN024G4S_at; Start 1206; Stop 1230
aactgagatggtaggagatattcgc

SEQ ID NO: 231066 - DNA, 25 bp, Artificial
  probe
  misc_feature (1)..(25): SEQ ID NO: 4903; WAN024G4S_at; Start 671; Stop 695
tgacaccagtattggatatgccaga

SEQ ID NO: 231067 - DNA, 25 bp, Artificial
  probe
  misc_feature (1)..(25): SEQ ID NO: 4903; WAN024G4S_at; Start 654; Stop 678
tctactcatgttcggtttgacacca

SEQ ID NO: 231068 - DNA, 25 bp, Artificial
  probe
  misc_feature (1)..(25): SEQ ID NO: 4903; WAN024G4S_at; Start 611; Stop 635
gggtctcaactctagcagccagcat

SEQ ID NO: 231069 - DNA, 25 bp, Artificial
  probe
  misc_feature (1)..(25): SEQ ID NO: 4903; WAN024G4S_at; Start 395; Stop 419
ccagtggactcatgctgggtcgaga

SEQ ID NO: 231070 - DNA, 25 bp, Artificial
  probe
  misc_feature (1)..(25): SEQ ID NO: 4903; WAN024G4S_at; Start 478; Stop 502
tccagtccagtagaggaacgttcct

SEQ ID NO: 231071 - DNA, 25 bp, Artificial
  probe
  misc_feature (1)..(25): SEQ ID NO: 4903; WAN024G4S_at; Start 1446; Stop 1470
tcaagtccataatggcaagagccaa

SEQ ID NO: 231072 - DNA, 25 bp, Artificial
  probe
  misc_feature (1)..(25): SEQ ID NO: 4903; WAN024G4S_at; Start 1004; Stop 1028
tgattagctatggaagtggactgcc

SEQ ID NO: 231073 - DNA, 25 bp, Artificial
  probe
  misc_feature (1)..(25): SEQ ID NO: 4903; WAN024G4S_at; Start 694; Stop 718
gataacattcctcccatgaccctag

SEQ ID NO: 231074 - DNA, 25 bp, Artificial
  probe
  misc_feature (1)..(25): SEQ ID NO: 4903; WAN024G4S_at; Start 463; Stop 487
gccaagtggctcaaatccagtccag

SEQ ID NO: 231075 - DNA, 25 bp, Artificial
  probe
  misc_feature (1)..(25): SEQ ID NO: 4903; WAN024G4S_at; Start 908; Stop 932
ttggtggcggaaatcagcttgtcct

SEQ ID NO: 231076 - DNA, 25 bp, Artificial
  probe
  misc_feature (1)..(25): SEQ ID NO: 4903; WAN024G4S_at; Start 75; Stop 99
tatactatcccaagttggtcgagga

SEQ ID NO: 231077 - DNA, 25 bp, Artificial
  probe
  misc_feature (1)..(25): SEQ ID NO: 4903; WAN024G4S_at; Start 450; Stop 474
tggtaaaggaattgccaagtggctc

SEQ ID NO: 231078 - DNA, 25 bp, Artificial
  probe
  misc_feature (1)..(25): SEQ ID NO: 4903; WAN024G4S_at; Start 1476; Stop 1500
taacggctcaaccagaatgtatctg

SEQ ID NO: 231079 - DNA, 25 bp, Artificial
  probe
  misc_feature (1)..(25): SEQ ID NO: 4903; WAN024G4S_at; Start 1187; Stop 1211
taaccgctatgatcctcgtaactga

SEQ ID NO: 231080 - DNA, 25 bp, Artificial
  probe
  misc_feature (1)..(25): SEQ ID NO: 4903; WAN024G4S_at; Start 295; Stop 319
tcaggaattcctcaagtcgaagccg

SEQ ID NO: 231081 - DNA, 25 bp, Artificial
  probe
  misc_feature (1)..(25): SEQ ID NO: 4903; WAN024G4S_at; Start 1392; Stop 1416
tgctgggaaacaagttcatgaactc

SEQ ID NO: 231082 - DNA, 25 bp, Artificial
  probe
  misc_feature (1)..(25): SEQ ID NO: 4903; WAN024G4S_at; Start 1018; Stop 1042
agtggactgccaggaggaattttcc

SEQ ID NO: 231083 - DNA, 25 bp, Artificial
  probe
  misc_feature (1)..(25): SEQ ID NO: 4903; WAN024G4S_at; Start 1303; Stop 1327
tatgaagccatgctggaaaaaatgc

SEQ ID NO: 231084 - DNA, 25 bp, Artificial
  probe
  misc_feature (1)..(25): SEQ ID NO: 4903; WAN024G4S_at; Start 501; Stop 525
cttgattgccagtggagctgcagca

SEQ ID NO: 231085 - DNA, 25 bp, Artificial
  probe
  misc_feature (1)..(25): SEQ ID NO: 4903; WAN024G4S_at; Start 628; Stop 652
gccagcatcgtagcaaactttgtgt

SEQ ID NO: 231086 - DNA, 25 bp, Artificial
  probe
  misc_feature (1)..(25): SEQ ID NO: 4903; WAN024G4S_at; Start 8; Stop 32
gaaataccatggaggaacagtcgga

SEQ ID NO: 231087 - DNA, 25 bp, Artificial
  probe
  misc_feature (1)..(25): SEQ ID NO: 4903; WAN024G4S_at; Start 324; Stop 348
gaaaggcctcatgtccctcaactgg

SEQ ID NO: 231088 - DNA, 25 bp, Artificial
  probe
  misc_feature (1)..(25): SEQ ID NO: 4903; WAN024G4S_at; Start 237; Stop 261
tatactcatctgttggctcagtgcc

SEQ ID NO: 231089 - DNA, 25 bp, Artificial
  probe
  misc_feature (1)..(25): SEQ ID NO: 4903; WAN024G4S_at; Start 35; Stop 59
tagtccgttctaagaaagaattcgc

SEQ ID NO: 231090 - DNA, 25 bp, Artificial
  probe
  misc_feature (1)..(25): SEQ ID NO: 4903; WAN024G4S_at; Start 310; Stop 334
gtcgaagccgaactgaaaggcctca

SEQ ID NO: 231091 - DNA, 25 bp, Artificial
  probe
  misc_feature (1)..(25): SEQ ID NO: 4903; WAN024G4S_at; Start 1274; Stop 1298
tcatggatttgctcaaaggtacgcc

SEQ ID NO: 231092 - DNA, 25 bp, Artificial
  probe
  misc_feature (1)..(25): SEQ ID NO: 3047; WAN024G4T_at; Start 114; Stop 138
taggccagagaatccccggtgtatc

SEQ ID NO: 231093 - DNA, 25 bp, Artificial
  probe
  misc_feature (1)..(25): SEQ ID NO: 3047; WAN024G4T_at; Start 299; Stop 323
tgaatcccacgttctttctggcgag

SEQ ID NO: 231094 - DNA, 25 bp, Artificial
  probe
  misc_feature (1)..(25): SEQ ID NO: 3047; WAN024G4T_at; Start 267; Stop 291
tcccgataatcatggtacgcaaggt

SEQ ID NO: 231095 - DNA, 25 bp, Artificial
  probe
  misc_feature (1)..(25): SEQ ID NO: 3047; WAN024G4T_at; Start 349; Stop 373
ggccgcatctgttacaacttttaca

SEQ ID NO: 231096 - DNA, 25 bp, Artificial
  probe
  misc_feature (1)..(25): SEQ ID NO: 3047; WAN024G4T_at; Start 285; Stop 309
gcaaggtttcaatctgaatcccacg

SEQ ID NO: 231097 - DNA, 25 bp, Artificial
  probe
  misc_feature (1)..(25): SEQ ID NO: 3047; WAN024G4T_at; Start 99; Stop 123
tttcatcctcaaacttaggccagag

SEQ ID NO: 231098 - DNA, 25 bp, Artificial
  probe
  misc_feature (1)..(25): SEQ ID NO: 3047; WAN024G4T_at; Start 330; Stop 354
tatcagccatgagcttcttggccgc

SEQ ID NO: 231099 - DNA, 25 bp, Artificial
  probe
  misc_feature (1)..(25): SEQ ID NO: 3047; WAN024G4T_at; Start 24; Stop 48
caaaaatggtaacctcatccatagg

SEQ ID NO: 231100 - DNA, 25 bp, Artificial
  probe
  misc_feature (1)..(25): SEQ ID NO: 3047; WAN024G4T_at; Start 319; Stop 343
gcgagcaatcttatcagccatgagc

SEQ ID NO: 231101 - DNA, 25 bp, Artificial
  probe
  misc_feature (1)..(25): SEQ ID NO: 3047; WAN024G4T_at; Start 63; Stop 87
tgatagctccagtcaatgccaactt

SEQ ID NO: 231102 - DNA, 25 bp, Artificial
  probe
  misc_feature (1)..(25): SEQ ID NO: 3047; WAN024G4T_at; Start 194; Stop 218
ggcttgtttccaacaacagcaatct

SEQ ID NO: 231103 - DNA, 25 bp, Artificial
  probe
  misc_feature (1)..(25): SEQ ID NO: 3047; WAN024G4T_at; Start 107; Stop 131
tcaaacttaggccagagaatccccg

SEQ ID NO: 231104 - DNA, 25 bp, Artificial
  probe
  misc_feature (1)..(25): SEQ ID NO: 3047; WAN024G4T_at; Start 126; Stop 150
tccccggtgtatccaagatttccag

SEQ ID NO: 231105 - DNA, 25 bp, Artificial
  probe
  misc_feature (1)..(25): SEQ ID NO: 3047; WAN024G4T_at; Start 9; Stop 33
tgaaataattgataccaaaaatggt

SEQ ID NO: 231106 - DNA, 25 bp, Artificial
  probe
  misc_feature (1)..(25): SEQ ID NO: 3047; WAN024G4T_at; Start 75; Stop 99
tcaatgccaacttaagtgcaacagt

SEQ ID NO: 231107 - DNA, 25 bp, Artificial
  probe
  misc_feature (1)..(25): SEQ ID NO: 3047; WAN024G4T_at; Start 33; Stop 57
taacctcatccataggaagcaactg

SEQ ID NO: 231108 - DNA, 25 bp, Artificial
  probe
  misc_feature (1)..(25): SEQ ID NO: 3047; WAN024G4T_at; Start 68; Stop 92
gctccagtcaatgccaacttaagtg

SEQ ID NO: 231109 - DNA, 25 bp, Artificial
  probe
  misc_feature (1)..(25): SEQ ID NO: 3047; WAN024G4T_at; Start 156; Stop 180
tattggttttaagccattgttgacc

SEQ ID NO: 231110 - DNA, 25 bp, Artificial
  probe
  misc_feature (1)..(25): SEQ ID NO: 3047; WAN024G4T_at; Start 337; Stop 361
catgagcttcttggccgcatctgtt

SEQ ID NO: 231111 - DNA, 25 bp, Artificial
  probe
  misc_feature (1)..(25): SEQ ID NO: 3047; WAN024G4T_at; Start 170; Stop 194
cattgttgaccttttgtgacccctg

SEQ ID NO: 231112 - DNA, 25 bp, Artificial
  probe
  misc_feature (1)..(25): SEQ ID NO: 3047; WAN024G4T_at; Start 361; Stop 385
tacaacttttacagtcacttgctct

SEQ ID NO: 231113 - DNA, 25 bp, Artificial
  probe
  misc_feature (1)..(25): SEQ ID NO: 3047; WAN024G4T_at; Start 121; Stop 145
gagaatccccggtgtatccaagatt

SEQ ID NO: 231114 - DNA, 25 bp, Artificial
  probe
  misc_feature (1)..(25): SEQ ID NO: 3047; WAN024G4T_at; Start 311; Stop 335
tctttctggcgagcaatcttatcag

SEQ ID NO: 231115 - DNA, 25 bp, Artificial
  probe
  misc_feature (1)..(25): SEQ ID NO: 3047; WAN024G4T_at; Start 185; Stop 209
gtgacccctggcttgtttccaacaa

SEQ ID NO: 231116 - DNA, 25 bp, Artificial
  probe
  misc_feature (1)..(25): SEQ ID NO: 3047; WAN024G4T_at; Start 248; Stop 272
gatttaccagcgtttggaatcccga

SEQ ID NO: 231117 - DNA, 25 bp, Artificial
  probe
  misc_feature (1)..(25): SEQ ID NO: 3047; WAN024G4T_at; Start 262; Stop 286
tggaatcccgataatcatggtacgc

SEQ ID NO: 231118 - DNA, 25 bp, Artificial
  probe
  misc_feature (1)..(25): SEQ ID NO: 3047; WAN024G4T_at; Start 211; Stop 235
agcaatctttttaccagccaaacgg

SEQ ID NO: 231119 - DNA, 25 bp, Artificial
  probe
  misc_feature (1)..(25): SEQ ID NO: 3047; WAN024G4T_at; Start 221; Stop 245
ttaccagccaaacggttcatcagag

SEQ ID NO: 231120 - DNA, 25 bp, Artificial
  probe
  misc_feature (1)..(25): SEQ ID NO: 3047; WAN024G4T_at; Start 254; Stop 278
ccagcgtttggaatcccgataatca

SEQ ID NO: 231121 - DNA, 25 bp, Artificial
  probe
  misc_feature (1)..(25): SEQ ID NO: 3047; WAN024G4T_at; Start 87; Stop 111
taagtgcaacagtttcatcctcaaa

SEQ ID NO: 231122 - DNA, 25 bp, Artificial
  probe
  misc_feature (1)..(25): SEQ ID NO: 3047; WAN024G4T_at; Start 176; Stop 200
tgaccttttgtgacccctggcttgt

SEQ ID NO: 231123 - DNA, 25 bp, Artificial
  probe
  misc_feature (1)..(25): SEQ ID NO: 3047; WAN024G4T_at; Start 277; Stop 301
catggtacgcaaggtttcaatctga

SEQ ID NO: 231124 - DNA, 25 bp, Artificial
  probe
  misc_feature (1)..(25): SEQ ID NO: 3047; WAN024G4T_at; Start 342; Stop 366
gcttcttggccgcatctgttacaac

SEQ ID NO: 231125 - DNA, 25 bp, Artificial
  probe
  misc_feature (1)..(25): SEQ ID NO: 3047; WAN024G4T_at; Start 376; Stop 400
cacttgctctttggagttgatagct

SEQ ID NO: 231126 - DNA, 25 bp, Artificial
  probe
  misc_feature (1)..(25): SEQ ID NO: 5388; WAN024G4U_at; Start 159; Stop 183
gaccaagattgttggtgataaacca

SEQ ID NO: 231127 - DNA, 25 bp, Artificial
  probe
  misc_feature (1)..(25): SEQ ID NO: 5388; WAN024G4U_at; Start 317; Stop 341
cagatgcggccaagaagctcatggc

SEQ ID NO: 231128 - DNA, 25 bp, Artificial
  probe
  misc_feature (1)..(25): SEQ ID NO: 5388; WAN024G4U_at; Start 462; Stop 486
tgctgttgttggaaacaagccaggg

SEQ ID NO: 231129 - DNA, 25 bp, Artificial
  probe
  misc_feature (1)..(25): SEQ ID NO: 5388; WAN024G4U_at; Start 856; Stop 880
gacctcgatggcaacgattaactaa

SEQ ID NO: 231130 - DNA, 25 bp, Artificial
  probe
  misc_feature (1)..(25): SEQ ID NO: 5388; WAN024G4U_at; Start 665; Stop 689
tcaaagaacattatccagaaaagct

SEQ ID NO: 231131 - DNA, 25 bp, Artificial
  probe
  misc_feature (1)..(25): SEQ ID NO: 5388; WAN024G4U_at; Start 367; Stop 391
cgtgggattcagattgaaaccttgc

SEQ ID NO: 231132 - DNA, 25 bp, Artificial
  probe
  misc_feature (1)..(25): SEQ ID NO: 5388; WAN024G4U_at; Start 829; Stop 853
ggtaactataccttagatacattgg

SEQ ID NO: 231133 - DNA, 25 bp, Artificial
  probe
  misc_feature (1)..(25): SEQ ID NO: 5388; WAN024G4U_at; Start 562; Stop 586
aagtttgaggatgaaactgttgcac

SEQ ID NO: 231134 - DNA, 25 bp, Artificial
  probe
  misc_feature (1)..(25): SEQ ID NO: 5388; WAN024G4U_at; Start 399; Stop 423
gattatcgggattccaaacgctggt

SEQ ID NO: 231135 - DNA, 25 bp, Artificial
  probe
  misc_feature (1)..(25): SEQ ID NO: 5388; WAN024G4U_at; Start 348; Stop 372
gattgctcgccagaaagaacgtggg

SEQ ID NO: 231136 - DNA, 25 bp, Artificial
  probe
  misc_feature (1)..(25): SEQ ID NO: 5388; WAN024G4U_at; Start 171; Stop 195
tggtgataaaccaaaactcttgatt

SEQ ID NO: 231137 - DNA, 25 bp, Artificial
  probe
  misc_feature (1)..(25): SEQ ID NO: 5388; WAN024G4U_at; Start 755; Stop 779
gcgccctcggtttccgtgatgacta

SEQ ID NO: 231138 - DNA, 25 bp, Artificial
  probe
  misc_feature (1)..(25): SEQ ID NO: 5388; WAN024G4U_at; Start 41; Stop 65
ggtttcctggtcacatgtctaaagc

SEQ ID NO: 231139 - DNA, 25 bp, Artificial
  probe
  misc_feature (1)..(25): SEQ ID NO: 5388; WAN024G4U_at; Start 844; Stop 868
gatacattggaagacctcgatggca

SEQ ID NO: 231140 - DNA, 25 bp, Artificial
  probe
  misc_feature (1)..(25): SEQ ID NO: 5388; WAN024G4U_at; Start 441; Stop 465
ccgtttggctggtaaaaagattgct

SEQ ID NO: 231141 - DNA, 25 bp, Artificial
  probe
  misc_feature (1)..(25): SEQ ID NO: 5388; WAN024G4U_at; Start 431; Stop 455
ctctgatgaaccgtttggctggtaa

SEQ ID NO: 231142 - DNA, 25 bp, Artificial
  probe
  misc_feature (1)..(25): SEQ ID NO: 5388; WAN024G4U_at; Start 235; Stop 259
gaatggcgtcagtattttgaatcac

SEQ ID NO: 231143 - DNA, 25 bp, Artificial
  probe
  misc_feature (1)..(25): SEQ ID NO: 5388; WAN024G4U_at; Start 496; Stop 520
ggtcaacaatggcttaaaaccaata

SEQ ID NO: 231144 - DNA, 25 bp, Artificial
  probe
  misc_feature (1)..(25): SEQ ID NO: 5388; WAN024G4U_at; Start 574; Stop 598
gaaactgttgcacttaagttggcat

SEQ ID NO: 231145 - DNA, 25 bp, Artificial
  probe
  misc_feature (1)..(25): SEQ ID NO: 5388; WAN024G4U_at; Start 676; Stop 700
tatccagaaaagctggctgaacgct

SEQ ID NO: 231146 - DNA, 25 bp, Artificial
  probe
  misc_feature (1)..(25): SEQ ID NO: 5388; WAN024G4U_at; Start 814; Stop 838
cgtgatggcaaactcggtaactata

SEQ ID NO: 231147 - DNA, 25 bp, Artificial
  probe
  misc_feature (1)..(25): SEQ ID NO: 5388; WAN024G4U_at; Start 690; Stop 714
ggctgaacgcttcaaacaaatgaaa

SEQ ID NO: 231148 - DNA, 25 bp, Artificial
  probe
  misc_feature (1)..(25): SEQ ID NO: 5388; WAN024G4U_at; Start 768; Stop 792
ccgtgatgactatgaccgtttttac

SEQ ID NO: 231149 - DNA, 25 bp, Artificial
  probe
  misc_feature (1)..(25): SEQ ID NO: 5388; WAN024G4U_at; Start 220; Stop 244
ccagcaatgaccaaggaatggcgtc

SEQ ID NO: 231150 - DNA, 25 bp, Artificial
  probe
  misc_feature (1)..(25): SEQ ID NO: 5388; WAN024G4U_at; Start 333; Stop 357
gctcatggctgataagattgctcgc

SEQ ID NO: 231151 - DNA, 25 bp, Artificial
  probe
  misc_feature (1)..(25): SEQ ID NO: 5388; WAN024G4U_at; Start 548; Stop 572
ggattctctggcctaagtttgagga

SEQ ID NO: 231152 - DNA, 25 bp, Artificial
  probe
  misc_feature (1)..(25): SEQ ID NO: 5388; WAN024G4U_at; Start 619; Stop 643
cagttgcttcctatggatgaggtta

SEQ ID NO: 231153 - DNA, 25 bp, Artificial
  probe
  misc_feature (1)..(25): SEQ ID NO: 5388; WAN024G4U_at; Start 588; Stop 612
taagttggcattgactggagctatc

SEQ ID NO: 231154 - DNA, 25 bp, Artificial
  probe
  misc_feature (1)..(25): SEQ ID NO: 5388; WAN024G4U_at; Start 778; Stop 802
tatgaccgtttttacagtctcttcg

SEQ ID NO: 231155 - DNA, 25 bp, Artificial
  probe
  misc_feature (1)..(25): SEQ ID NO: 5388; WAN024G4U_at; Start 23; Stop 47
caatggctactattcaatggtttcc

SEQ ID NO: 231156 - DNA, 25 bp, Artificial
  probe
  misc_feature (1)..(25): SEQ ID NO: 5388; WAN024G4U_at; Start 141; Stop 165
tagtcaaaatcctatgttgaccaag

SEQ ID NO: 231157 - DNA, 25 bp, Artificial
  probe
  misc_feature (1)..(25): SEQ ID NO: 5388; WAN024G4U_at; Start 485; Stop 509
gggtcacaaaaggtcaacaatggct

SEQ ID NO: 231158 - DNA, 25 bp, Artificial
  probe
  misc_feature (1)..(25): SEQ ID NO: 5388; WAN024G4U_at; Start 303; Stop 327
tgtaaaagttgtaacagatgcggcc

SEQ ID NO: 231159 - DNA, 25 bp, Artificial
  probe
  misc_feature (1)..(25): SEQ ID NO: 5388; WAN024G4U_at; Start 212; Stop 236
tggctgatccagcaatgaccaagga

SEQ ID NO: 231160 - DNA, 25 bp, Artificial
  probe
  misc_feature (1)..(25): SEQ ID NO: 2621; WAN024G4V_at; Start 153; Stop 177
catagattttatagacctgctggcg

SEQ ID NO: 231161 - DNA, 25 bp, Artificial
  probe
  misc_feature (1)..(25): SEQ ID NO: 2621; WAN024G4V_at; Start 80; Stop 104
tcagctttctcaaatcctttgagga

SEQ ID NO: 231162 - DNA, 25 bp, Artificial
  probe
  misc_feature (1)..(25): SEQ ID NO: 2621; WAN024G4V_at; Start 257; Stop 281
tgcgcttcaaagacctcatgaaaga

SEQ ID NO: 231163 - DNA, 25 bp, Artificial
  probe
  misc_feature (1)..(25): SEQ ID NO: 2621; WAN024G4V_at; Start 15; Stop 39
agctttccaaatcccaaagggcttg

SEQ ID NO: 231164 - DNA, 25 bp, Artificial
  probe
  misc_feature (1)..(25): SEQ ID NO: 2621; WAN024G4V_at; Start 94; Stop 118
tcctttgaggaaagattcactcagc

SEQ ID NO: 231165 - DNA, 25 bp, Artificial
  probe
  misc_feature (1)..(25): SEQ ID NO: 2621; WAN024G4V_at; Start 268; Stop 292
gacctcatgaaagacttcgttttcg

SEQ ID NO: 231166 - DNA, 25 bp, Artificial
  probe
  misc_feature (1)..(25): SEQ ID NO: 2621; WAN024G4V_at; Start 252; Stop 276
ggtaatgcgcttcaaagacctcatg

SEQ ID NO: 231167 - DNA, 25 bp, Artificial
  probe
  misc_feature (1)..(25): SEQ ID NO: 2621; WAN024G4V_at; Start 213; Stop 237
ttttcagcaaatgactaaaggtctc

SEQ ID NO: 231168 - DNA, 25 bp, Artificial
  probe
  misc_feature (1)..(25): SEQ ID NO: 2621; WAN024G4V_at; Start 198; Stop 222
cacgcccagcaaagtttttcagcaa

SEQ ID NO: 231169 - DNA, 25 bp, Artificial
  probe
  misc_feature (1)..(25): SEQ ID NO: 2621; WAN024G4V_at; Start 114; Stop 138
tcagccacttttgaggattactggt

SEQ ID NO: 231170 - DNA, 25 bp, Artificial
  probe
  misc_feature (1)..(25): SEQ ID NO: 2621; WAN024G4V_at; Start 160; Stop 184
tttatagacctgctggcgcagaccc

SEQ ID NO: 231171 - DNA, 25 bp, Artificial
  probe
  misc_feature (1)..(25): SEQ ID NO: 2621; WAN024G4V_at; Start 263; Stop 287
tcaaagacctcatgaaagacttcgt

SEQ ID NO: 231172 - DNA, 25 bp, Artificial
  probe
  misc_feature (1)..(25): SEQ ID NO: 2621; WAN024G4V_at; Start 73; Stop 97
ggtaaaatcagctttctcaaatcct

SEQ ID NO: 231173 - DNA, 25 bp, Artificial
  probe
  misc_feature (1)..(25): SEQ ID NO: 2621; WAN024G4V_at; Start 65; Stop 89
ttttcactggtaaaatcagctttct

SEQ ID NO: 231174 - DNA, 25 bp, Artificial
  probe
  misc_feature (1)..(25): SEQ ID NO: 2621; WAN024G4V_at; Start 29; Stop 53
caaagggcttgtttgatttgctcgg

SEQ ID NO: 231175 - DNA, 25 bp, Artificial
  probe
  misc_feature (1)..(25): SEQ ID NO: 2621; WAN024G4V_at; Start 246; Stop 270
taccttggtaatgcgcttcaaagac

SEQ ID NO: 231176 - DNA, 25 bp, Artificial
  probe
  misc_feature (1)..(25): SEQ ID NO: 2621; WAN024G4V_at; Start 100; Stop 124
gaggaaagattcactcagccacttt

SEQ ID NO: 231177 - DNA, 25 bp, Artificial
  probe
  misc_feature (1)..(25): SEQ ID NO: 2621; WAN024G4V_at; Start 21; Stop 45
ccaaatcccaaagggcttgtttgat

SEQ ID NO: 231178 - DNA, 25 bp, Artificial
  probe
  misc_feature (1)..(25): SEQ ID NO: 2621; WAN024G4V_at; Start 34; Stop 58
ggcttgtttgatttgctcggtcagt

SEQ ID NO: 231179 - DNA, 25 bp, Artificial
  probe
  misc_feature (1)..(25): SEQ ID NO: 2621; WAN024G4V_at; Start 139; Stop 163
ggattggaggaagtcatagatttta

SEQ ID NO: 231180 - DNA, 25 bp, Artificial
  probe
  misc_feature (1)..(25): SEQ ID NO: 2621; WAN024G4V_at; Start 119; Stop 143
cacttttgaggattactggtggatt

SEQ ID NO: 231181 - DNA, 25 bp, Artificial
  probe
  misc_feature (1)..(25): SEQ ID NO: 2621; WAN024G4V_at; Start 157; Stop 181
gattttatagacctgctggcgcaga

SEQ ID NO: 231182 - DNA, 25 bp, Artificial
  probe
  misc_feature (1)..(25): SEQ ID NO: 2621; WAN024G4V_at; Start 192; Stop 216
ccttgccacgcccagcaaagttttt

SEQ ID NO: 231183 - DNA, 25 bp, Artificial
  probe
  misc_feature (1)..(25): SEQ ID NO: 2621; WAN024G4V_at; Start 237; Stop 261
ctttctgtttaccttggtaatgcgc

SEQ ID NO: 231184 - DNA, 25 bp, Artificial
  probe
  misc_feature (1)..(25): SEQ ID NO: 2621; WAN024G4V_at; Start 47; Stop 71
tgctcggtcagtttttctttttcac

SEQ ID NO: 231185 - DNA, 25 bp, Artificial
  probe
  misc_feature (1)..(25): SEQ ID NO: 2621; WAN024G4V_at; Start 284; Stop 308
tcgttttcgagaataagttgctcgc

SEQ ID NO: 231186 - DNA, 25 bp, Artificial
  probe
  misc_feature (1)..(25): SEQ ID NO: 2621; WAN024G4V_at; Start 132; Stop 156
tactggtggattggaggaagtcata

SEQ ID NO: 231187 - DNA, 25 bp, Artificial
  probe
  misc_feature (1)..(25): SEQ ID NO: 2621; WAN024G4V_at; Start 224; Stop 248
tgactaaaggtctctttctgtttac

SEQ ID NO: 231188 - DNA, 25 bp, Artificial
  probe
  misc_feature (1)..(25): SEQ ID NO: 2621; WAN024G4V_at; Start 273; Stop 297
catgaaagacttcgttttcgagaat

SEQ ID NO: 231189 - DNA, 25 bp, Artificial
  probe
  misc_feature (1)..(25): SEQ ID NO: 2621; WAN024G4V_at; Start 203; Stop 227
ccagcaaagtttttcagcaaatgac

SEQ ID NO: 231190 - DNA, 25 bp, Artificial
  probe
  misc_feature (1)..(25): SEQ ID NO: 2621; WAN024G4V_at; Start 177; Stop 201
gcagaccccgttcgtccttgccacg

SEQ ID NO: 231191 - DNA, 25 bp, Artificial
  probe
  misc_feature (1)..(25): SEQ ID NO: 2621; WAN024G4V_at; Start 219; Stop 243
gcaaatgactaaaggtctctttctg

SEQ ID NO: 231192 - DNA, 25 bp, Artificial
  probe
  misc_feature (1)..(25): SEQ ID NO: 2621; WAN024G4V_at; Start 105; Stop 129
aagattcactcagccacttttgagg

SEQ ID NO: 231193 - DNA, 25 bp, Artificial
  probe
  misc_feature (1)..(25): SEQ ID NO: 2621; WAN024G4V_at; Start 290; Stop 314
tcgagaataagttgctcgctttggt

SEQ ID NO: 231194 - DNA, 25 bp, Artificial
  probe
  misc_feature (1)..(25): SEQ ID NO: 5575; WAN024G4W_at; Start 175; Stop 199
gacttcatggaagcgctcctgataa

SEQ ID NO: 231195 - DNA, 25 bp, Artificial
  probe
  misc_feature (1)..(25): SEQ ID NO: 5575; WAN024G4W_at; Start 105; Stop 129
tgtggccattagacaacaattccag

SEQ ID NO: 231196 - DNA, 25 bp, Artificial
  probe
  misc_feature (1)..(25): SEQ ID NO: 5575; WAN024G4W_at; Start 45; Stop 69
gcgggtctgcctgacggaaacgata

SEQ ID NO: 231197 - DNA, 25 bp, Artificial
  probe
  misc_feature (1)..(25): SEQ ID NO: 5575; WAN024G4W_at; Start 4; Stop 28
gggattttgcgcatagcgttggaat

SEQ ID NO: 231198 - DNA, 25 bp, Artificial
  probe
  misc_feature (1)..(25): SEQ ID NO: 5575; WAN024G4W_at; Start 99; Stop 123
agcgattgtggccattagacaacaa

SEQ ID NO: 231199 - DNA, 25 bp, Artificial
  probe
  misc_feature (1)..(25): SEQ ID NO: 5575; WAN024G4W_at; Start 74; Stop 98
gattgcttgatatctcccaccataa

SEQ ID NO: 231200 - DNA, 25 bp, Artificial
  probe
  misc_feature (1)..(25): SEQ ID NO: 5575; WAN024G4W_at; Start 197; Stop 221
taagactcacgaacttgtgggaaat

SEQ ID NO: 231201 - DNA, 25 bp, Artificial
  probe
  misc_feature (1)..(25): SEQ ID NO: 5575; WAN024G4W_at; Start 113; Stop 137
ttagacaacaattccagcatccgtt

SEQ ID NO: 231202 - DNA, 25 bp, Artificial
  probe
  misc_feature (1)..(25): SEQ ID NO: 5575; WAN024G4W_at; Start 203; Stop 227
tcacgaacttgtgggaaattctcta

SEQ ID NO: 231203 - DNA, 25 bp, Artificial
  probe
  misc_feature (1)..(25): SEQ ID NO: 5575; WAN024G4W_at; Start 151; Stop 175
ggtatcctgatactcatcgaccatg

SEQ ID NO: 231204 - DNA, 25 bp, Artificial
  probe
  misc_feature (1)..(25): SEQ ID NO: 5575; WAN024G4W_at; Start 159; Stop 183
gatactcatcgaccatgacttcatg

SEQ ID NO: 231205 - DNA, 25 bp, Artificial
  probe
  misc_feature (1)..(25): SEQ ID NO: 5575; WAN024G4W_at; Start 54; Stop 78
cctgacggaaacgatagatggattg

SEQ ID NO: 231206 - DNA, 25 bp, Artificial
  probe
  misc_feature (1)..(25): SEQ ID NO: 5575; WAN024G4W_at; Start 180; Stop 204
catggaagcgctcctgataagactc

SEQ ID NO: 231207 - DNA, 25 bp, Artificial
  probe
  misc_feature (1)..(25): SEQ ID NO: 5575; WAN024G4W_at; Start 33; Stop 57
cattgaaaatctgcgggtctgcctg

SEQ ID NO: 231208 - DNA, 25 bp, Artificial
  probe
  misc_feature (1)..(25): SEQ ID NO: 5575; WAN024G4W_at; Start 118; Stop 142
caacaattccagcatccgttcttga

SEQ ID NO: 231209 - DNA, 25 bp, Artificial
  probe
  misc_feature (1)..(25): SEQ ID NO: 5575; WAN024G4W_at; Start 189; Stop 213
gctcctgataagactcacgaacttg

SEQ ID NO: 231210 - DNA, 25 bp, Artificial
  probe
  misc_feature (1)..(25): SEQ ID NO: 5575; WAN024G4W_at; Start 70; Stop 94
gatggattgcttgatatctcccacc

SEQ ID NO: 231211 - DNA, 25 bp, Artificial
  probe
  misc_feature (1)..(25): SEQ ID NO: 5575; WAN024G4W_at; Start 94; Stop 118
cataaagcgattgtggccattagac

SEQ ID NO: 231212 - DNA, 25 bp, Artificial
  probe
  misc_feature (1)..(25): SEQ ID NO: 5575; WAN024G4W_at; Start 91; Stop 115
caccataaagcgattgtggccatta

SEQ ID NO: 231213 - DNA, 25 bp, Artificial
  probe
  misc_feature (1)..(25): SEQ ID NO: 5575; WAN024G4W_at; Start 59; Stop 83
cggaaacgatagatggattgcttga

SEQ ID NO: 231214 - DNA, 25 bp, Artificial
  probe
  misc_feature (1)..(25): SEQ ID NO: 5575; WAN024G4W_at; Start 133; Stop 157
ccgttcttgaatatggttggtatcc

SEQ ID NO: 231215 - DNA, 25 bp, Artificial
  probe
  misc_feature (1)..(25): SEQ ID NO: 5575; WAN024G4W_at; Start 172; Stop 196
catgacttcatggaagcgctcctga

SEQ ID NO: 231216 - DNA, 25 bp, Artificial
  probe
  misc_feature (1)..(25): SEQ ID NO: 5575; WAN024G4W_at; Start 125; Stop 149
tccagcatccgttcttgaatatggt

SEQ ID NO: 231217 - DNA, 25 bp, Artificial
  probe
  misc_feature (1)..(25): SEQ ID NO: 5575; WAN024G4W_at; Start 11; Stop 35
tgcgcatagcgttggaatttctcat

SEQ ID NO: 231218 - DNA, 25 bp, Artificial
  probe
  misc_feature (1)..(25): SEQ ID NO: 5575; WAN024G4W_at; Start 82; Stop 106
gatatctcccaccataaagcgattg

SEQ ID NO: 231219 - DNA, 25 bp, Artificial
  probe
  misc_feature (1)..(25): SEQ ID NO: 5575; WAN024G4W_at; Start 141; Stop 165
gaatatggttggtatcctgatactc

SEQ ID NO: 231220 - DNA, 25 bp, Artificial
  probe
  misc_feature (1)..(25): SEQ ID NO: 5575; WAN024G4W_at; Start 15; Stop 39
catagcgttggaatttctcattgaa

SEQ ID NO: 231221 - DNA, 25 bp, Artificial
  probe
  misc_feature (1)..(25): SEQ ID NO: 5575; WAN024G4W_at; Start 38; Stop 62
aaaatctgcgggtctgcctgacgga

SEQ ID NO: 231222 - DNA, 25 bp, Artificial
  probe
  misc_feature (1)..(25): SEQ ID NO: 5575; WAN024G4W_at; Start 50; Stop 74
tctgcctgacggaaacgatagatgg

SEQ ID NO: 231223 - DNA, 25 bp, Artificial
  probe
  misc_feature (1)..(25): SEQ ID NO: 5575; WAN024G4W_at; Start 30; Stop 54
tctcattgaaaatctgcgggtctgc

SEQ ID NO: 231224 - DNA, 25 bp, Artificial
  probe
  misc_feature (1)..(25): SEQ ID NO: 5575; WAN024G4W_at; Start 184; Stop 208
gaagcgctcctgataagactcacga

SEQ ID NO: 231225 - DNA, 25 bp, Artificial
  probe
  misc_feature (1)..(25): SEQ ID NO: 5575; WAN024G4W_at; Start 108; Stop 132
ggccattagacaacaattccagcat

SEQ ID NO: 231226 - DNA, 25 bp, Artificial
  probe
  misc_feature (1)..(25): SEQ ID NO: 5575; WAN024G4W_at; Start 194; Stop 218
tgataagactcacgaacttgtggga

SEQ ID NO: 231227 - DNA, 25 bp, Artificial
  probe
  misc_feature (1)..(25): SEQ ID NO: 5575; WAN024G4W_at; Start 40; Stop 64
aatctgcgggtctgcctgacggaaa

SEQ ID NO: 231228 - DNA, 25 bp, Artificial
  probe
  misc_feature (1)..(25): SEQ ID NO: 5078; WAN024G4X_at; Start 135; Stop 159
aaggttgctcgcgataaagatggtc

SEQ ID NO: 231229 - DNA, 25 bp, Artificial
  probe
  misc_feature (1)..(25): SEQ ID NO: 5078; WAN024G4X_at; Start 66; Stop 90
gatagccatcaaggataccacggac

SEQ ID NO: 231230 - DNA, 25 bp, Artificial
  probe
  misc_feature (1)..(25): SEQ ID NO: 5078; WAN024G4X_at; Start 223; Stop 247
gatcttgtctctgacagcttggcta

SEQ ID NO: 231231 - DNA, 25 bp, Artificial
  probe
  misc_feature (1)..(25): SEQ ID NO: 5078; WAN024G4X_at; Start 202; Stop 226
agcaagaattttatcaagattgatc

SEQ ID NO: 231232 - DNA, 25 bp, Artificial
  probe
  misc_feature (1)..(25): SEQ ID NO: 5078; WAN024G4X_at; Start 63; Stop 87
gcagatagccatcaaggataccacg

SEQ ID NO: 231233 - DNA, 25 bp, Artificial
  probe
  misc_feature (1)..(25): SEQ ID NO: 5078; WAN024G4X_at; Start 182; Stop 206
ccgagtactgtgtcaaagaaagcaa

SEQ ID NO: 231234 - DNA, 25 bp, Artificial
  probe
  misc_feature (1)..(25): SEQ ID NO: 5078; WAN024G4X_at; Start 149; Stop 173
taaagatggtcggtattagcaagaa

SEQ ID NO: 231235 - DNA, 25 bp, Artificial
  probe
  misc_feature (1)..(25): SEQ ID NO: 5078; WAN024G4X_at; Start 17; Stop 41
tagcggtctgtcttgtagtcgaaca

SEQ ID NO: 231236 - DNA, 25 bp, Artificial
  probe
  misc_feature (1)..(25): SEQ ID NO: 5078; WAN024G4X_at; Start 84; Stop 108
cacggacaacaaagtcttcctgact

SEQ ID NO: 231237 - DNA, 25 bp, Artificial
  probe
  misc_feature (1)..(25): SEQ ID NO: 5078; WAN024G4X_at; Start 7; Stop 31
tggttcatcatagcggtctgtcttg

SEQ ID NO: 231238 - DNA, 25 bp, Artificial
  probe
  misc_feature (1)..(25): SEQ ID NO: 5078; WAN024G4X_at; Start 79; Stop 103
gataccacggacaacaaagtcttcc

SEQ ID NO: 231239 - DNA, 25 bp, Artificial
  probe
  misc_feature (1)..(25): SEQ ID NO: 5078; WAN024G4X_at; Start 51; Stop 75
tgttttcgtaaagcagatagccatc

SEQ ID NO: 231240 - DNA, 25 bp, Artificial
  probe
  misc_feature (1)..(25): SEQ ID NO: 5078; WAN024G4X_at; Start 172; Stop 196
aatttcctgaccgagtactgtgtca

SEQ ID NO: 231241 - DNA, 25 bp, Artificial
  probe
  misc_feature (1)..(25): SEQ ID NO: 5078; WAN024G4X_at; Start 74; Stop 98
tcaaggataccacggacaacaaagt

SEQ ID NO: 231242 - DNA, 25 bp, Artificial
  probe
  misc_feature (1)..(25): SEQ ID NO: 5078; WAN024G4X_at; Start 167; Stop 191
gcaagaatttcctgaccgagtactg

SEQ ID NO: 231243 - DNA, 25 bp, Artificial
  probe
  misc_feature (1)..(25): SEQ ID NO: 5078; WAN024G4X_at; Start 156; Stop 180
ggtcggtattagcaagaatttcctg

SEQ ID NO: 231244 - DNA, 25 bp, Artificial
  probe
  misc_feature (1)..(25): SEQ ID NO: 5078; WAN024G4X_at; Start 252; Stop 276
gaacttgtttgagtgtttctgttag

SEQ ID NO: 231245 - DNA, 25 bp, Artificial
  probe
  misc_feature (1)..(25): SEQ ID NO: 5078; WAN024G4X_at; Start 93; Stop 117
caaagtcttcctgactcttttggtc

SEQ ID NO: 231246 - DNA, 25 bp, Artificial
  probe
  misc_feature (1)..(25): SEQ ID NO: 5078; WAN024G4X_at; Start 2; Stop 26
tgacttggttcatcatagcggtctg

SEQ ID NO: 231247 - DNA, 25 bp, Artificial
  probe
  misc_feature (1)..(25): SEQ ID NO: 5078; WAN024G4X_at; Start 24; Stop 48
ctgtcttgtagtcgaacagaacaat

SEQ ID NO: 231248 - DNA, 25 bp, Artificial
  probe
  misc_feature (1)..(25): SEQ ID NO: 5078; WAN024G4X_at; Start 57; Stop 81
cgtaaagcagatagccatcaaggat

SEQ ID NO: 231249 - DNA, 25 bp, Artificial
  probe
  misc_feature (1)..(25): SEQ ID NO: 5078; WAN024G4X_at; Start 105; Stop 129
gactcttttggtctcgtttgagcat

SEQ ID NO: 231250 - DNA, 25 bp, Artificial
  probe
  misc_feature (1)..(25): SEQ ID NO: 5078; WAN024G4X_at; Start 127; Stop 151
catggagaaaggttgctcgcgataa

SEQ ID NO: 231251 - DNA, 25 bp, Artificial
  probe
  misc_feature (1)..(25): SEQ ID NO: 5078; WAN024G4X_at; Start 118; Stop 142
tcgtttgagcatggagaaaggttgc

SEQ ID NO: 231252 - DNA, 25 bp, Artificial
  probe
  misc_feature (1)..(25): SEQ ID NO: 5078; WAN024G4X_at; Start 30; Stop 54
tgtagtcgaacagaacaattttgtt

SEQ ID NO: 231253 - DNA, 25 bp, Artificial
  probe
  misc_feature (1)..(25): SEQ ID NO: 5078; WAN024G4X_at; Start 162; Stop 186
tattagcaagaatttcctgaccgag

SEQ ID NO: 231254 - DNA, 25 bp, Artificial
  probe
  misc_feature (1)..(25): SEQ ID NO: 5078; WAN024G4X_at; Start 187; Stop 211
tactgtgtcaaagaaagcaagaatt

SEQ ID NO: 231255 - DNA, 25 bp, Artificial
  probe
  misc_feature (1)..(25): SEQ ID NO: 5078; WAN024G4X_at; Start 239; Stop 263
gcttggctagtttgaacttgtttga

SEQ ID NO: 231256 - DNA, 25 bp, Artificial
  probe
  misc_feature (1)..(25): SEQ ID NO: 5078; WAN024G4X_at; Start 231; Stop 255
ctctgacagcttggctagtttgaac

SEQ ID NO: 231257 - DNA, 25 bp, Artificial
  probe
  misc_feature (1)..(25): SEQ ID NO: 5078; WAN024G4X_at; Start 142; Stop 166
ctcgcgataaagatggtcggtatta

SEQ ID NO: 231258 - DNA, 25 bp, Artificial
  probe
  misc_feature (1)..(25): SEQ ID NO: 5078; WAN024G4X_at; Start 70; Stop 94
gccatcaaggataccacggacaaca

SEQ ID NO: 231259 - DNA, 25 bp, Artificial
  probe
  misc_feature (1)..(25): SEQ ID NO: 5078; WAN024G4X_at; Start 216; Stop 240
caagattgatcttgtctctgacagc

SEQ ID NO: 231260 - DNA, 25 bp, Artificial
  probe
  misc_feature (1)..(25): SEQ ID NO: 5078; WAN024G4X_at; Start 45; Stop 69
caattttgttttcgtaaagcagata

SEQ ID NO: 231261 - DNA, 25 bp, Artificial
  probe
  misc_feature (1)..(25): SEQ ID NO: 5078; WAN024G4X_at; Start 15; Stop 39
catagcggtctgtcttgtagtcgaa

SEQ ID NO: 231262 - DNA, 25 bp, Artificial
  probe
  misc_feature (1)..(25): SEQ ID NO: 107; WAN024G4Y-3_at; Start 128; Stop 152
gagctagcacgtttgtcccttcaga

SEQ ID NO: 231263 - DNA, 25 bp, Artificial
  probe
  misc_feature (1)..(25): SEQ ID NO: 107; WAN024G4Y-3_at; Start 772; Stop 796
cgaagaggaattacagctagcaagc

SEQ ID NO: 231264 - DNA, 25 bp, Artificial
  probe
  misc_feature (1)..(25): SEQ ID NO: 107; WAN024G4Y-3_at; Start 1653; Stop 1677
tgttcgactacaagacagaccgcta

SEQ ID NO: 231265 - DNA, 25 bp, Artificial
  probe
  misc_feature (1)..(25): SEQ ID NO: 107; WAN024G4Y-3_at; Start 478; Stop 502
gattgaccaagtcttagaagcccag

SEQ ID NO: 231266 - DNA, 25 bp, Artificial
  probe
  misc_feature (1)..(25): SEQ ID NO: 107; WAN024G4Y-3_at; Start 14; Stop 38
caatccctagaagtgcaagtcatgc

SEQ ID NO: 231267 - DNA, 25 bp, Artificial
  probe
  misc_feature (1)..(25): SEQ ID NO: 107; WAN024G4Y-3_at; Start 1160; Stop 1184
gtttataatactcttcaccgcgcag

SEQ ID NO: 231268 - DNA, 25 bp, Artificial
  probe
  misc_feature (1)..(25): SEQ ID NO: 107; WAN024G4Y-3_at; Start 959; Stop 983
caagattggctttgggctatcagta

SEQ ID NO: 231269 - DNA, 25 bp, Artificial
  probe
  misc_feature (1)..(25): SEQ ID NO: 107; WAN024G4Y-3_at; Start 1619; Stop 1643
gatggctatctgctttacgaaaaca

SEQ ID NO: 231270 - DNA, 25 bp, Artificial
  probe
  misc_feature (1)..(25): SEQ ID NO: 107; WAN024G4Y-3_at; Start 1267; Stop 1291
tgctggtcaaggtcagtcagtaggc

SEQ ID NO: 231271 - DNA, 25 bp, Artificial
  probe
  misc_feature (1)..(25): SEQ ID NO: 107; WAN024G4Y-3_at; Start 1037; Stop 1061
cagttgaccagagaagctatcggag

SEQ ID NO: 231272 - DNA, 25 bp, Artificial
  probe
  misc_feature (1)..(25): SEQ ID NO: 107; WAN024G4Y-3_at; Start 1682; Stop 1706
gaaccaagtcaactcgtagaccgct

SEQ ID NO: 231273 - DNA, 25 bp, Artificial
  probe
  misc_feature (1)..(25): SEQ ID NO: 107; WAN024G4Y-3_at; Start 861; Stop 885
tcggcaagggttctcgtgaaaagct

SEQ ID NO: 231274 - DNA, 25 bp, Artificial
  probe
  misc_feature (1)..(25): SEQ ID NO: 107; WAN024G4Y-3_at; Start 528; Stop 552
caccgccaaaagatgcagtagagct

SEQ ID NO: 231275 - DNA, 25 bp, Artificial
  probe
  misc_feature (1)..(25): SEQ ID NO: 107; WAN024G4Y-3_at; Start 1442; Stop 1466
caaactagccaagctgtcagagaca

SEQ ID NO: 231276 - DNA, 25 bp, Artificial
  probe
  misc_feature (1)..(25): SEQ ID NO: 107; WAN024G4Y-3_at; Start 930; Stop 954
gcaatactagactgcaagcacggaa

SEQ ID NO: 231277 - DNA, 25 bp, Artificial
  probe
  misc_feature (1)..(25): SEQ ID NO: 107; WAN024G4Y-3_at; Start 556; Stop 580
gaccatccacaagagtaaagggctg

SEQ ID NO: 231278 - DNA, 25 bp, Artificial
  probe
  misc_feature (1)..(25): SEQ ID NO: 107; WAN024G4Y-3_at; Start 1283; Stop 1307
tcagtaggcaagaaaatcagcttcg

SEQ ID NO: 231279 - DNA, 25 bp, Artificial
  probe
  misc_feature (1)..(25): SEQ ID NO: 107; WAN024G4Y-3_at; Start 821; Stop 845
tatgttgctatgacgcgggctgaga

SEQ ID NO: 231280 - DNA, 25 bp, Artificial
  probe
  misc_feature (1)..(25): SEQ ID NO: 107; WAN024G4Y-3_at; Start 1056; Stop 1080
tcggagagttggaaaccaagagtcc

SEQ ID NO: 231281 - DNA, 25 bp, Artificial
  probe
  misc_feature (1)..(25): SEQ ID NO: 107; WAN024G4Y-3_at; Start 705; Stop 729
gggcagtagaagaccactatcctaa

SEQ ID NO: 231282 - DNA, 25 bp, Artificial
  probe
  misc_feature (1)..(25): SEQ ID NO: 107; WAN024G4Y-3_at; Start 1021; Stop 1045
ttttattggcgaagatcagttgacc

SEQ ID NO: 231283 - DNA, 25 bp, Artificial
  probe
  misc_feature (1)..(25): SEQ ID NO: 107; WAN024G4Y-3_at; Start 416; Stop 440
gcactgcgtgctgatcaatttgaaa

SEQ ID NO: 231284 - DNA, 25 bp, Artificial
  probe
  misc_feature (1)..(25): SEQ ID NO: 107; WAN024G4Y-3_at; Start 74; Stop 98
gactacgccttggttgcccttatga

SEQ ID NO: 231285 - DNA, 25 bp, Artificial
  probe
  misc_feature (1)..(25): SEQ ID NO: 107; WAN024G4Y-3_at; Start 401; Stop 425
aatctctatgccctagcactgcgtg

SEQ ID NO: 231286 - DNA, 25 bp, Artificial
  probe
  misc_feature (1)..(25): SEQ ID NO: 107; WAN024G4Y-3_at; Start 494; Stop 518
gaagcccagcacgatttggcaagcg

SEQ ID NO: 231287 - DNA, 25 bp, Artificial
  probe
  misc_feature (1)..(25): SEQ ID NO: 107; WAN024G4Y-3_at; Start 1090; Stop 1114
tagctcccaagcagacaatcgtcag

SEQ ID NO: 231288 - DNA, 25 bp, Artificial
  probe
  misc_feature (1)..(25): SEQ ID NO: 107; WAN024G4Y-3_at; Start 143; Stop 167
tcccttcagaaagcagaggataaag

SEQ ID NO: 231289 - DNA, 25 bp, Artificial
  probe
  misc_feature (1)..(25): SEQ ID NO: 107; WAN024G4Y-3_at; Start 1666; Stop 1690
gacagaccgctatgatgaaccaagt

SEQ ID NO: 231290 - DNA, 25 bp, Artificial
  probe
  misc_feature (1)..(25): SEQ ID NO: 107; WAN024G4Y-3_at; Start 324; Stop 348
tgatttggaagatttacaacgaccg

SEQ ID NO: 231291 - DNA, 25 bp, Artificial
  probe
  misc_feature (1)..(25): SEQ ID NO: 107; WAN024G4Y-3_at; Start 268; Stop 292
catggatatcctagcttcttggcgc

SEQ ID NO: 231292 - DNA, 25 bp, Artificial
  probe
  misc_feature (1)..(25): SEQ ID NO: 107; WAN024G4Y-3_at; Start 370; Stop 394
ggctttgccgaatggtcctgctagg

SEQ ID NO: 231293 - DNA, 25 bp, Artificial
  probe
  misc_feature (1)..(25): SEQ ID NO: 107; WAN024G4Y-3_at; Start 787; Stop 811
gctagcaagctattctgagcagatg

SEQ ID NO: 231294 - DNA, 25 bp, Artificial
  probe
  misc_feature (1)..(25): SEQ ID NO: 107; WAN024G4Y-3_at; Start 845; Stop 869
aaaaagctctatcttgtcggcaagg

SEQ ID NO: 231295 - DNA, 25 bp, Artificial
  probe
  misc_feature (1)..(25): SEQ ID NO: 107; WAN024G4Y-3_at; Start 228; Stop 252
gcttgattcacacagctctagctga

SEQ ID NO: 231296 - DNA, 25 bp, Artificial
  probe
  misc_feature (1)..(25): SEQ ID NO: 1116; WAN024G4Y-5_at; Start 1610; Stop 1634
tctacgacaaggacgatacaggtga

SEQ ID NO: 231297 - DNA, 25 bp, Artificial
  probe
  misc_feature (1)..(25): SEQ ID NO: 1116; WAN024G4Y-5_at; Start 1167; Stop 1191
tgatatcagccattacaccattgag

SEQ ID NO: 231298 - DNA, 25 bp, Artificial
  probe
  misc_feature (1)..(25): SEQ ID NO: 1116; WAN024G4Y-5_at; Start 763; Stop 787
taccatctggataacgatgccaagg

SEQ ID NO: 231299 - DNA, 25 bp, Artificial
  probe
  misc_feature (1)..(25): SEQ ID NO: 1116; WAN024G4Y-5_at; Start 1326; Stop 1350
tatggtgggagatatcaagcaatcc

SEQ ID NO: 231300 - DNA, 25 bp, Artificial
  probe
  misc_feature (1)..(25): SEQ ID NO: 1116; WAN024G4Y-5_at; Start 1574; Stop 1598
tgactcccaatccagacaacaaggc

SEQ ID NO: 231301 - DNA, 25 bp, Artificial
  probe
  misc_feature (1)..(25): SEQ ID NO: 1116; WAN024G4Y-5_at; Start 948; Stop 972
taaggctgatttgaagcccctggct

SEQ ID NO: 231302 - DNA, 25 bp, Artificial
  probe
  misc_feature (1)..(25): SEQ ID NO: 1116; WAN024G4Y-5_at; Start 49; Stop 73
gaagcagaagcaaattcgagcaagg

SEQ ID NO: 231303 - DNA, 25 bp, Artificial
  probe
  misc_feature (1)..(25): SEQ ID NO: 1116; WAN024G4Y-5_at; Start 979; Stop 1003
tacaacgaagagagaaagacccagt

SEQ ID NO: 231304 - DNA, 25 bp, Artificial
  probe
  misc_feature (1)..(25): SEQ ID NO: 1116; WAN024G4Y-5_at; Start 1350; Stop 1374
catctatcgtttccgtcaggcagac

SEQ ID NO: 231305 - DNA, 25 bp, Artificial
  probe
  misc_feature (1)..(25): SEQ ID NO: 1116; WAN024G4Y-5_at; Start 496; Stop 520
gaggtctttgaagcgcattaccaag

SEQ ID NO: 231306 - DNA, 25 bp, Artificial
  probe
  misc_feature (1)..(25): SEQ ID NO: 1116; WAN024G4Y-5_at; Start 195; Stop 219
ggcgcgtggtgtcgaaatttctcaa

SEQ ID NO: 231307 - DNA, 25 bp, Artificial
  probe
  misc_feature (1)..(25): SEQ ID NO: 1116; WAN024G4Y-5_at; Start 1275; Stop 1299
ccatattcaagaacggatgctggaa

SEQ ID NO: 231308 - DNA, 25 bp, Artificial
  probe
  misc_feature (1)..(25): SEQ ID NO: 1116; WAN024G4Y-5_at; Start 1515; Stop 1539
agaggtcggcgaaatcaactatgat

SEQ ID NO: 231309 - DNA, 25 bp, Artificial
  probe
  misc_feature (1)..(25): SEQ ID NO: 1116; WAN024G4Y-5_at; Start 1368; Stop 1392
ggcagacccgcagattttcaatgag

SEQ ID NO: 231310 - DNA, 25 bp, Artificial
  probe
  misc_feature (1)..(25): SEQ ID NO: 1116; WAN024G4Y-5_at; Start 123; Stop 147
gaatatcctggtctcagcatcggct

SEQ ID NO: 231311 - DNA, 25 bp, Artificial
  probe
  misc_feature (1)..(25): SEQ ID NO: 1116; WAN024G4Y-5_at; Start 968; Stop 992
tggctgatgcctacaacgaagagag

SEQ ID NO: 231312 - DNA, 25 bp, Artificial
  probe
  misc_feature (1)..(25): SEQ ID NO: 1116; WAN024G4Y-5_at; Start 1455; Stop 1479
ccgtagtagttcagaagtgctgtca

SEQ ID NO: 231313 - DNA, 25 bp, Artificial
  probe
  misc_feature (1)..(25): SEQ ID NO: 1116; WAN024G4Y-5_at; Start 1471; Stop 1495
gtgctgtcagcaaccaatgatgtct

SEQ ID NO: 231314 - DNA, 25 bp, Artificial
  probe
  misc_feature (1)..(25): SEQ ID NO: 1116; WAN024G4Y-5_at; Start 832; Stop 856
gatgaaattggctccctaaatcagg

SEQ ID NO: 231315 - DNA, 25 bp, Artificial
  probe
  misc_feature (1)..(25): SEQ ID NO: 1116; WAN024G4Y-5_at; Start 1008; Stop 1032
taaactaggacaattatcagaccag

SEQ ID NO: 231316 - DNA, 25 bp, Artificial
  probe
  misc_feature (1)..(25): SEQ ID NO: 1116; WAN024G4Y-5_at; Start 1498; Stop 1522
gaacgtctcatggaccaagaggtcg

SEQ ID NO: 231317 - DNA, 25 bp, Artificial
  probe
  misc_feature (1)..(25): SEQ ID NO: 1116; WAN024G4Y-5_at; Start 1308; Stop 1332
taatggccacaatcgctttatggtg

SEQ ID NO: 231318 - DNA, 25 bp, Artificial
  probe
  misc_feature (1)..(25): SEQ ID NO: 1116; WAN024G4Y-5_at; Start 1387; Stop 1411
aatgagaaattccaacgctatgcgc

SEQ ID NO: 231319 - DNA, 25 bp, Artificial
  probe
  misc_feature (1)..(25): SEQ ID NO: 1116; WAN024G4Y-5_at; Start 919; Stop 943
aacggtcgagctctgactaatgcca

SEQ ID NO: 231320 - DNA, 25 bp, Artificial
  probe
  misc_feature (1)..(25): SEQ ID NO: 1116; WAN024G4Y-5_at; Start 1227; Stop 1251
tcaggagcgcttccatgaagtcatg

SEQ ID NO: 231321 - DNA, 25 bp, Artificial
  probe
  misc_feature (1)..(25): SEQ ID NO: 1116; WAN024G4Y-5_at; Start 1293; Stop 1317
gctggaattgttgtctaatggccac

SEQ ID NO: 231322 - DNA, 25 bp, Artificial
  probe
  misc_feature (1)..(25): SEQ ID NO: 1116; WAN024G4Y-5_at; Start 892; Stop 916
cgtgttgtcgccatctctaaggaga

SEQ ID NO: 231323 - DNA, 25 bp, Artificial
  probe
  misc_feature (1)..(25): SEQ ID NO: 1116; WAN024G4Y-5_at; Start 444; Stop 468
tattttacaaaaccaaagcgagcaa

SEQ ID NO: 231324 - DNA, 25 bp, Artificial
  probe
  misc_feature (1)..(25): SEQ ID NO: 1116; WAN024G4Y-5_at; Start 246; Stop 270
ggctgcaactgaacttaaagaacgt

SEQ ID NO: 231325 - DNA, 25 bp, Artificial
  probe
  misc_feature (1)..(25): SEQ ID NO: 1116; WAN024G4Y-5_at; Start 1656; Stop 1680
aacgaaactaacaggcgaaatgcgc

SEQ ID NO: 231326 - DNA, 25 bp, Artificial
  probe
  misc_feature (1)..(25): SEQ ID NO: 1116; WAN024G4Y-5_at; Start 549; Stop 573
gctgaaaaactttgctgggcgtggc

SEQ ID NO: 231327 - DNA, 25 bp, Artificial
  probe
  misc_feature (1)..(25): SEQ ID NO: 1116; WAN024G4Y-5_at; Start 780; Stop 804
tgccaaggagtttgcaaaggctgcc

SEQ ID NO: 231328 - DNA, 25 bp, Artificial
  probe
  misc_feature (1)..(25): SEQ ID NO: 1116; WAN024G4Y-5_at; Start 1210; Stop 1234
caagttcgtgagtcttatcaggagc

SEQ ID NO: 231329 - DNA, 25 bp, Artificial
  probe
  misc_feature (1)..(25): SEQ ID NO: 1116; WAN024G4Y-5_at; Start 907; Stop 931
tctaaggagaaaaacggtcgagctc

SEQ ID NO: 231330 - DNA, 25 bp, Artificial
  probe
  misc_feature (1)..(25): SEQ ID NO: 3995; WAN024G4Z_at; Start 169; Stop 193
caagaacaactgcttacgagcagaa

SEQ ID NO: 231331 - DNA, 25 bp, Artificial
  probe
  misc_feature (1)..(25): SEQ ID NO: 3995; WAN024G4Z_at; Start 124; Stop 148
ggcagattccttactttcactttcg

SEQ ID NO: 231332 - DNA, 25 bp, Artificial
  probe
  misc_feature (1)..(25): SEQ ID NO: 3995; WAN024G4Z_at; Start 22; Stop 46
caaaagactgtgataggaccccata

SEQ ID NO: 231333 - DNA, 25 bp, Artificial
  probe
  misc_feature (1)..(25): SEQ ID NO: 3995; WAN024G4Z_at; Start 231; Stop 255
gattttcactgctggcaatcagtaa

SEQ ID NO: 231334 - DNA, 25 bp, Artificial
  probe
  misc_feature (1)..(25): SEQ ID NO: 3995; WAN024G4Z_at; Start 20; Stop 44
gacaaaagactgtgataggacccca

SEQ ID NO: 231335 - DNA, 25 bp, Artificial
  probe
  misc_feature (1)..(25): SEQ ID NO: 3995; WAN024G4Z_at; Start 159; Stop 183
ttggagccgacaagaacaactgctt

SEQ ID NO: 231336 - DNA, 25 bp, Artificial
  probe
  misc_feature (1)..(25): SEQ ID NO: 3995; WAN024G4Z_at; Start 54; Stop 78
tagacagtcctttgtgattcatcct

SEQ ID NO: 231337 - DNA, 25 bp, Artificial
  probe
  misc_feature (1)..(25): SEQ ID NO: 3995; WAN024G4Z_at; Start 97; Stop 121
tccaaaatggatcaactcttgaaga

SEQ ID NO: 231338 - DNA, 25 bp, Artificial
  probe
  misc_feature (1)..(25): SEQ ID NO: 3995; WAN024G4Z_at; Start 198; Stop 222
ccaaggaaagcatagtgtagcgatt

SEQ ID NO: 231339 - DNA, 25 bp, Artificial
  probe
  misc_feature (1)..(25): SEQ ID NO: 3995; WAN024G4Z_at; Start 5; Stop 29
taggcaaccagactagacaaaagac

SEQ ID NO: 231340 - DNA, 25 bp, Artificial
  probe
  misc_feature (1)..(25): SEQ ID NO: 3995; WAN024G4Z_at; Start 105; Stop 129
ggatcaactcttgaagataggcaga

SEQ ID NO: 231341 - DNA, 25 bp, Artificial
  probe
  misc_feature (1)..(25): SEQ ID NO: 3995; WAN024G4Z_at; Start 166; Stop 190
cgacaagaacaactgcttacgagca

SEQ ID NO: 231342 - DNA, 25 bp, Artificial
  probe
  misc_feature (1)..(25): SEQ ID NO: 3995; WAN024G4Z_at; Start 25; Stop 49
aagactgtgataggaccccatatcc

SEQ ID NO: 231343 - DNA, 25 bp, Artificial
  probe
  misc_feature (1)..(25): SEQ ID NO: 3995; WAN024G4Z_at; Start 185; Stop 209
cgagcagaattgaccaaggaaagca

SEQ ID NO: 231344 - DNA, 25 bp, Artificial
  probe
  misc_feature (1)..(25): SEQ ID NO: 3995; WAN024G4Z_at; Start 150; Stop 174
taaaaaggcttggagccgacaagaa

SEQ ID NO: 231345 - DNA, 25 bp, Artificial
  probe
  misc_feature (1)..(25): SEQ ID NO: 3995; WAN024G4Z_at; Start 9; Stop 33
caaccagactagacaaaagactgtg

SEQ ID NO: 231346 - DNA, 25 bp, Artificial
  probe
  misc_feature (1)..(25): SEQ ID NO: 3995; WAN024G4Z_at; Start 45; Stop 69
tatcctccttagacagtcctttgtg

SEQ ID NO: 231347 - DNA, 25 bp, Artificial
  probe
  misc_feature (1)..(25): SEQ ID NO: 3995; WAN024G4Z_at; Start 146; Stop 170
tcgttaaaaaggcttggagccgaca

SEQ ID NO: 231348 - DNA, 25 bp, Artificial
  probe
  misc_feature (1)..(25): SEQ ID NO: 3995; WAN024G4Z_at; Start 195; Stop 219
tgaccaaggaaagcatagtgtagcg

SEQ ID NO: 231349 - DNA, 25 bp, Artificial
  probe
  misc_feature (1)..(25): SEQ ID NO: 3995; WAN024G4Z_at; Start 223; Stop 247
tttcttgagattttcactgctggca

SEQ ID NO: 231350 - DNA, 25 bp, Artificial
  probe
  misc_feature (1)..(25): SEQ ID NO: 3995; WAN024G4Z_at; Start 81; Stop 105
tctctctccgcctaaatccaaaatg

SEQ ID NO: 231351 - DNA, 25 bp, Artificial
  probe
  misc_feature (1)..(25): SEQ ID NO: 3995; WAN024G4Z_at; Start 114; Stop 138
cttgaagataggcagattccttact

SEQ ID NO: 231352 - DNA, 25 bp, Artificial
  probe
  misc_feature (1)..(25): SEQ ID NO: 3995; WAN024G4Z_at; Start 228; Stop 252
tgagattttcactgctggcaatcag

SEQ ID NO: 231353 - DNA, 25 bp, Artificial
  probe
  misc_feature (1)..(25): SEQ ID NO: 3995; WAN024G4Z_at; Start 33; Stop 57
gataggaccccatatcctccttaga

SEQ ID NO: 231354 - DNA, 25 bp, Artificial
  probe
  misc_feature (1)..(25): SEQ ID NO: 3995; WAN024G4Z_at; Start 109; Stop 133
caactcttgaagataggcagattcc

SEQ ID NO: 231355 - DNA, 25 bp, Artificial
  probe
  misc_feature (1)..(25): SEQ ID NO: 3995; WAN024G4Z_at; Start 1; Stop 25
gtgataggcaaccagactagacaaa

SEQ ID NO: 231356 - DNA, 25 bp, Artificial
  probe
  misc_feature (1)..(25): SEQ ID NO: 3995; WAN024G4Z_at; Start 208; Stop 232
catagtgtagcgatttttcttgaga

SEQ ID NO: 231357 - DNA, 25 bp, Artificial
  probe
  misc_feature (1)..(25): SEQ ID NO: 3995; WAN024G4Z_at; Start 66; Stop 90
tgtgattcatcctcttctctctccg

SEQ ID NO: 231358 - DNA, 25 bp, Artificial
  probe
  misc_feature (1)..(25): SEQ ID NO: 3995; WAN024G4Z_at; Start 189; Stop 213
cagaattgaccaaggaaagcatagt

SEQ ID NO: 231359 - DNA, 25 bp, Artificial
  probe
  misc_feature (1)..(25): SEQ ID NO: 3995; WAN024G4Z_at; Start 37; Stop 61
ggaccccatatcctccttagacagt

SEQ ID NO: 231360 - DNA, 25 bp, Artificial
  probe
  misc_feature (1)..(25): SEQ ID NO: 3995; WAN024G4Z_at; Start 120; Stop 144
gataggcagattccttactttcact

SEQ ID NO: 231361 - DNA, 25 bp, Artificial
  probe
  misc_feature (1)..(25): SEQ ID NO: 3995; WAN024G4Z_at; Start 179; Stop 203
tgcttacgagcagaattgaccaagg

SEQ ID NO: 231362 - DNA, 25 bp, Artificial
  probe
  misc_feature (1)..(25): SEQ ID NO: 3995; WAN024G4Z_at; Start 162; Stop 186
gagccgacaagaacaactgcttacg

SEQ ID NO: 231363 - DNA, 25 bp, Artificial
  probe
  misc_feature (1)..(25): SEQ ID NO: 3995; WAN024G4Z_at; Start 85; Stop 109
tctccgcctaaatccaaaatggatc

SEQ ID NO: 231364 - DNA, 25 bp, Artificial
  probe
  misc_feature (1)..(25): SEQ ID NO: 2632; WAN024G52_at; Start 217; Stop 241
catttttgtaggagtttttcagcct

SEQ ID NO: 231365 - DNA, 25 bp, Artificial
  probe
  misc_feature (1)..(25): SEQ ID NO: 2632; WAN024G52_at; Start 35; Stop 59
ggagcaaggctaggaagtcttccag

SEQ ID NO: 231366 - DNA, 25 bp, Artificial
  probe
  misc_feature (1)..(25): SEQ ID NO: 2632; WAN024G52_at; Start 186; Stop 210
ggtcacagctccttcttttagaaag

SEQ ID NO: 231367 - DNA, 25 bp, Artificial
  probe
  misc_feature (1)..(25): SEQ ID NO: 2632; WAN024G52_at; Start 29; Stop 53
cagaatggagcaaggctaggaagtc

SEQ ID NO: 231368 - DNA, 25 bp, Artificial
  probe
  misc_feature (1)..(25): SEQ ID NO: 2632; WAN024G52_at; Start 284; Stop 308
ttctcaggcggaggacattcaaacg

SEQ ID NO: 231369 - DNA, 25 bp, Artificial
  probe
  misc_feature (1)..(25): SEQ ID NO: 2632; WAN024G52_at; Start 47; Stop 71
ggaagtcttccagactaacctgtga

SEQ ID NO: 231370 - DNA, 25 bp, Artificial
  probe
  misc_feature (1)..(25): SEQ ID NO: 2632; WAN024G52_at; Start 106; Stop 130
tggcagaaagccttccaaacttcgg

SEQ ID NO: 231371 - DNA, 25 bp, Artificial
  probe
  misc_feature (1)..(25): SEQ ID NO: 2632; WAN024G52_at; Start 2; Stop 26
tggtacggtattgggacaaactcat

SEQ ID NO: 231372 - DNA, 25 bp, Artificial
  probe
  misc_feature (1)..(25): SEQ ID NO: 2632; WAN024G52_at; Start 147; Stop 171
tacagcttccaaagtggttgtcaaa

SEQ ID NO: 231373 - DNA, 25 bp, Artificial
  probe
  misc_feature (1)..(25): SEQ ID NO: 2632; WAN024G52_at; Start 13; Stop 37
tgggacaaactcattccagaatgga

SEQ ID NO: 231374 - DNA, 25 bp, Artificial
  probe
  misc_feature (1)..(25): SEQ ID NO: 2632; WAN024G52_at; Start 156; Stop 180
caaagtggttgtcaaatcttgtaac

SEQ ID NO: 231375 - DNA, 25 bp, Artificial
  probe
  misc_feature (1)..(25): SEQ ID NO: 2632; WAN024G52_at; Start 303; Stop 327
caaacgctcaagattaaattttcca

SEQ ID NO: 231376 - DNA, 25 bp, Artificial
  probe
  misc_feature (1)..(25): SEQ ID NO: 2632; WAN024G52_at; Start 268; Stop 292
tcaagaggtgctaaaattctcaggc

SEQ ID NO: 231377 - DNA, 25 bp, Artificial
  probe
  misc_feature (1)..(25): SEQ ID NO: 2632; WAN024G52_at; Start 257; Stop 281
caaagagggtttcaagaggtgctaa

SEQ ID NO: 231378 - DNA, 25 bp, Artificial
  probe
  misc_feature (1)..(25): SEQ ID NO: 2632; WAN024G52_at; Start 247; Stop 271
tttcggctggcaaagagggtttcaa

SEQ ID NO: 231379 - DNA, 25 bp, Artificial
  probe
  misc_feature (1)..(25): SEQ ID NO: 2632; WAN024G52_at; Start 311; Stop 335
caagattaaattttccatggtggga

SEQ ID NO: 231380 - DNA, 25 bp, Artificial
  probe
  misc_feature (1)..(25): SEQ ID NO: 2632; WAN024G52_at; Start 206; Stop 230
gaaagacactccatttttgtaggag

SEQ ID NO: 231381 - DNA, 25 bp, Artificial
  probe
  misc_feature (1)..(25): SEQ ID NO: 2632; WAN024G52_at; Start 55; Stop 79
tccagactaacctgtgaaccagcaa

SEQ ID NO: 231382 - DNA, 25 bp, Artificial
  probe
  misc_feature (1)..(25): SEQ ID NO: 2632; WAN024G52_at; Start 8; Stop 32
ggtattgggacaaactcattccaga

SEQ ID NO: 231383 - DNA, 25 bp, Artificial
  probe
  misc_feature (1)..(25): SEQ ID NO: 2632; WAN024G52_at; Start 87; Stop 111
cgcaaattgttctaaaacatggcag

SEQ ID NO: 231384 - DNA, 25 bp, Artificial
  probe
  misc_feature (1)..(25): SEQ ID NO: 2632; WAN024G52_at; Start 67; Stop 91
tgtgaaccagcaaaaacagtcgcaa

SEQ ID NO: 231385 - DNA, 25 bp, Artificial
  probe
  misc_feature (1)..(25): SEQ ID NO: 2632; WAN024G52_at; Start 97; Stop 121
tctaaaacatggcagaaagccttcc

SEQ ID NO: 231386 - DNA, 25 bp, Artificial
  probe
  misc_feature (1)..(25): SEQ ID NO: 2632; WAN024G52_at; Start 293; Stop 317
ggaggacattcaaacgctcaagatt

SEQ ID NO: 231387 - DNA, 25 bp, Artificial
  probe
  misc_feature (1)..(25): SEQ ID NO: 2632; WAN024G52_at; Start 276; Stop 300
tgctaaaattctcaggcggaggaca

SEQ ID NO: 231388 - DNA, 25 bp, Artificial
  probe
  misc_feature (1)..(25): SEQ ID NO: 2632; WAN024G52_at; Start 236; Stop 260
cagccttttgttttcggctggcaaa

SEQ ID NO: 231389 - DNA, 25 bp, Artificial
  probe
  misc_feature (1)..(25): SEQ ID NO: 2632; WAN024G52_at; Start 175; Stop 199
tgtaactgcttggtcacagctcctt

SEQ ID NO: 231390 - DNA, 25 bp, Artificial
  probe
  misc_feature (1)..(25): SEQ ID NO: 2632; WAN024G52_at; Start 288; Stop 312
caggcggaggacattcaaacgctca

SEQ ID NO: 231391 - DNA, 25 bp, Artificial
  probe
  misc_feature (1)..(25): SEQ ID NO: 2632; WAN024G52_at; Start 319; Stop 343
aattttccatggtgggatttggtga

SEQ ID NO: 231392 - DNA, 25 bp, Artificial
  probe
  misc_feature (1)..(25): SEQ ID NO: 2632; WAN024G52_at; Start 73; Stop 97
ccagcaaaaacagtcgcaaattgtt

SEQ ID NO: 231393 - DNA, 25 bp, Artificial
  probe
  misc_feature (1)..(25): SEQ ID NO: 2632; WAN024G52_at; Start 193; Stop 217
gctccttcttttagaaagacactcc

SEQ ID NO: 231394 - DNA, 25 bp, Artificial
  probe
  misc_feature (1)..(25): SEQ ID NO: 2632; WAN024G52_at; Start 119; Stop 143
tccaaacttcggcttgtctttcctg

SEQ ID NO: 231395 - DNA, 25 bp, Artificial
  probe
  misc_feature (1)..(25): SEQ ID NO: 2632; WAN024G52_at; Start 168; Stop 192
caaatcttgtaactgcttggtcaca

SEQ ID NO: 231396 - DNA, 25 bp, Artificial
  probe
  misc_feature (1)..(25): SEQ ID NO: 2632; WAN024G52_at; Start 23; Stop 47
tcattccagaatggagcaaggctag

SEQ ID NO: 231397 - DNA, 25 bp, Artificial
  probe
  misc_feature (1)..(25): SEQ ID NO: 2632; WAN024G52_at; Start 139; Stop 163
tcctgttctacagcttccaaagtgg

SEQ ID NO: 231398 - DNA, 25 bp, Artificial
  probe
  misc_feature (1)..(25): SEQ ID NO: 3192; WAN024G53-3_at; Start 1496; Stop 1520
gcaacatcaggctattacaggcttt

SEQ ID NO: 231399 - DNA, 25 bp, Artificial
  probe
  misc_feature (1)..(25): SEQ ID NO: 3192; WAN024G53-3_at; Start 1437; Stop 1461
ggccggttcgccatcaatccttata

SEQ ID NO: 231400 - DNA, 25 bp, Artificial
  probe
  misc_feature (1)..(25): SEQ ID NO: 3192; WAN024G53-3_at; Start 809; Stop 833
tcaagaaaccagtcaagaacgcgaa

SEQ ID NO: 231401 - DNA, 25 bp, Artificial
  probe
  misc_feature (1)..(25): SEQ ID NO: 3192; WAN024G53-3_at; Start 774; Stop 798
gaagattcctttgaccaacgtctag

SEQ ID NO: 231402 - DNA, 25 bp, Artificial
  probe
  misc_feature (1)..(25): SEQ ID NO: 3192; WAN024G53-3_at; Start 249; Stop 273
aagcagttgttcttgtcggctccaa

SEQ ID NO: 231403 - DNA, 25 bp, Artificial
  probe
  misc_feature (1)..(25): SEQ ID NO: 3192; WAN024G53-3_at; Start 445; Stop 469
tgagcgatactgagcaagatttgac

SEQ ID NO: 231404 - DNA, 25 bp, Artificial
  probe
  misc_feature (1)..(25): SEQ ID NO: 3192; WAN024G53-3_at; Start 284; Stop 308
cgaaagtgaaagtaaggaatctgcc

SEQ ID NO: 231405 - DNA, 25 bp, Artificial
  probe
  misc_feature (1)..(25): SEQ ID NO: 3192; WAN024G53-3_at; Start 1151; Stop 1175
tcttgctgccctaaaaagagaaggg

SEQ ID NO: 231406 - DNA, 25 bp, Artificial
  probe
  misc_feature (1)..(25): SEQ ID NO: 3192; WAN024G53-3_at; Start 1521; Stop 1545
gaagccaattaccatctgggccaag

SEQ ID NO: 231407 - DNA, 25 bp, Artificial
  probe
  misc_feature (1)..(25): SEQ ID NO: 3192; WAN024G53-3_at; Start 750; Stop 774
gaacgcgccttacagttgcctaatg

SEQ ID NO: 231408 - DNA, 25 bp, Artificial
  probe
  misc_feature (1)..(25): SEQ ID NO: 3192; WAN024G53-3_at; Start 1196; Stop 1220
catgtacttggaaatggctgaacct

SEQ ID NO: 231409 - DNA, 25 bp, Artificial
  probe
  misc_feature (1)..(25): SEQ ID NO: 3192; WAN024G53-3_at; Start 667; Stop 691
tacgctacgttttaggcttgcagga

SEQ ID NO: 231410 - DNA, 25 bp, Artificial
  probe
  misc_feature (1)..(25): SEQ ID NO: 3192; WAN024G53-3_at; Start 1424; Stop 1448
gaagattttagcaggccggttcgcc

SEQ ID NO: 231411 - DNA, 25 bp, Artificial
  probe
  misc_feature (1)..(25): SEQ ID NO: 3192; WAN024G53-3_at; Start 1463; Stop 1487
tgaaaatggcagaagcattgcccca

SEQ ID NO: 231412 - DNA, 25 bp, Artificial
  probe
  misc_feature (1)..(25): SEQ ID NO: 3192; WAN024G53-3_at; Start 846; Stop 870
tatcaagaaagtttggaagcccagt

SEQ ID NO: 231413 - DNA, 25 bp, Artificial
  probe
  misc_feature (1)..(25): SEQ ID NO: 3192; WAN024G53-3_at; Start 1367; Stop 1391
tgaggaatttcagctcctactggac

SEQ ID NO: 231414 - DNA, 25 bp, Artificial
  probe
  misc_feature (1)..(25): SEQ ID NO: 3192; WAN024G53-3_at; Start 327; Stop 351
cattttggatttaggcggagagaga

SEQ ID NO: 231415 - DNA, 25 bp, Artificial
  probe
  misc_feature (1)..(25): SEQ ID NO: 3192; WAN024G53-3_at; Start 1580; Stop 1604
caagcgtctggtcggagaaaaactc

SEQ ID NO: 231416 - DNA, 25 bp, Artificial
  probe
  misc_feature (1)..(25): SEQ ID NO: 3192; WAN024G53-3_at; Start 1040; Stop 1064
tgaccgtttgaaagctaatggagcg

SEQ ID NO: 231417 - DNA, 25 bp, Artificial
  probe
  misc_feature (1)..(25): SEQ ID NO: 3192; WAN024G53-3_at; Start 66; Stop 90
tatgctattggactaactcaggaca

SEQ ID NO: 231418 - DNA, 25 bp, Artificial
  probe
  misc_feature (1)..(25): SEQ ID NO: 3192; WAN024G53-3_at; Start 524; Stop 548
ggaaaatccagctatcccaaccagt

SEQ ID NO: 231419 - DNA, 25 bp, Artificial
  probe
  misc_feature (1)..(25): SEQ ID NO: 3192; WAN024G53-3_at; Start 1252; Stop 1276
caggagcagtggtagaagccagcaa

SEQ ID NO: 231420 - DNA, 25 bp, Artificial
  probe
  misc_feature (1)..(25): SEQ ID NO: 3192; WAN024G53-3_at; Start 1178; Stop 1202
gcagaactttttcggcgccatgtac

SEQ ID NO: 231421 - DNA, 25 bp, Artificial
  probe
  misc_feature (1)..(25): SEQ ID NO: 3192; WAN024G53-3_at; Start 1564; Stop 1588
tggacctagctgatggcaagcgtct

SEQ ID NO: 231422 - DNA, 25 bp, Artificial
  probe
  misc_feature (1)..(25): SEQ ID NO: 3192; WAN024G53-3_at; Start 4; Stop 28
cagtggacactgttctggtgcagag

SEQ ID NO: 231423 - DNA, 25 bp, Artificial
  probe
  misc_feature (1)..(25): SEQ ID NO: 3192; WAN024G53-3_at; Start 182; Stop 206
gattgccagcagtgaaaatctcaag

SEQ ID NO: 231424 - DNA, 25 bp, Artificial
  probe
  misc_feature (1)..(25): SEQ ID NO: 3192; WAN024G53-3_at; Start 1003; Stop 1027
gacgcagtgtctttgtacgaggcaa

SEQ ID NO: 231425 - DNA, 25 bp, Artificial
  probe
  misc_feature (1)..(25): SEQ ID NO: 3192; WAN024G53-3_at; Start 363; Stop 387
cacaaaggactgtctaaggaggata

SEQ ID NO: 231426 - DNA, 25 bp, Artificial
  probe
  misc_feature (1)..(25): SEQ ID NO: 3192; WAN024G53-3_at; Start 1274; Stop 1298
caaatctatgaaataccaagggctc

SEQ ID NO: 231427 - DNA, 25 bp, Artificial
  probe
  misc_feature (1)..(25): SEQ ID NO: 3192; WAN024G53-3_at; Start 33; Stop 57
gatttgattgcaccattgactgctg

SEQ ID NO: 231428 - DNA, 25 bp, Artificial
  probe
  misc_feature (1)..(25): SEQ ID NO: 3192; WAN024G53-3_at; Start 165; Stop 189
gaaggcgttcaattactgattgcca

SEQ ID NO: 231429 - DNA, 25 bp, Artificial
  probe
  misc_feature (1)..(25): SEQ ID NO: 3192; WAN024G53-3_at; Start 1229; Stop 1253
tctgatggcggtaaaaagtctggca

SEQ ID NO: 231430 - DNA, 25 bp, Artificial
  probe
  misc_feature (1)..(25): SEQ ID NO: 3192; WAN024G53-3_at; Start 1346; Stop 1370
caaggctaatcaactgacagatgag

SEQ ID NO: 231431 - DNA, 25 bp, Artificial
  probe
  misc_feature (1)..(25): SEQ ID NO: 3192; WAN024G53-3_at; Start 475; Stop 499
tcaaggttctgtcgcgtgtcatagg

SEQ ID NO: 231432 - DNA, 25 bp, Artificial
  probe
  misc_feature (1)..(25): SEQ ID NO: 4003; WAN024G53-5_at; Start 997; Stop 1021
gacctgagctacaagcattttcgta

SEQ ID NO: 231433 - DNA, 25 bp, Artificial
  probe
  misc_feature (1)..(25): SEQ ID NO: 4003; WAN024G53-5_at; Start 295; Stop 319
ttttacaaatgccttgccgaactcg

SEQ ID NO: 231434 - DNA, 25 bp, Artificial
  probe
  misc_feature (1)..(25): SEQ ID NO: 4003; WAN024G53-5_at; Start 72; Stop 96
tctaacaagagaggcagaagagcta

SEQ ID NO: 231435 - DNA, 25 bp, Artificial
  probe
  misc_feature (1)..(25): SEQ ID NO: 4003; WAN024G53-5_at; Start 142; Stop 166
tcttttgaaaaggaacgcgccgtgc

SEQ ID NO: 231436 - DNA, 25 bp, Artificial
  probe
  misc_feature (1)..(25): SEQ ID NO: 4003; WAN024G53-5_at; Start 642; Stop 666
tgtggacttacttcacggcaaaggt

SEQ ID NO: 231437 - DNA, 25 bp, Artificial
  probe
  misc_feature (1)..(25): SEQ ID NO: 4003; WAN024G53-5_at; Start 201; Stop 225
taccgtcacgcgctttgctcaaatg

SEQ ID NO: 231438 - DNA, 25 bp, Artificial
  probe
  misc_feature (1)..(25): SEQ ID NO: 4003; WAN024G53-5_at; Start 1593; Stop 1617
ggaagacttcctagccttgctccat

SEQ ID NO: 231439 - DNA, 25 bp, Artificial
  probe
  misc_feature (1)..(25): SEQ ID NO: 4003; WAN024G53-5_at; Start 1380; Stop 1404
tgaaaccctctttgccagccgaaaa

SEQ ID NO: 231440 - DNA, 25 bp, Artificial
  probe
  misc_feature (1)..(25): SEQ ID NO: 4003; WAN024G53-5_at; Start 343; Stop 367
ggcgctattaagcaggatcctcaat

SEQ ID NO: 231441 - DNA, 25 bp, Artificial
  probe
  misc_feature (1)..(25): SEQ ID NO: 4003; WAN024G53-5_at; Start 790; Stop 814
gctcaggactgttctcaaactcatg

SEQ ID NO: 231442 - DNA, 25 bp, Artificial
  probe
  misc_feature (1)..(25): SEQ ID NO: 4003; WAN024G53-5_at; Start 1572; Stop 1596
tgctggttcacaggttagtctggaa

SEQ ID NO: 231443 - DNA, 25 bp, Artificial
  probe
  misc_feature (1)..(25): SEQ ID NO: 4003; WAN024G53-5_at; Start 3; Stop 27
gatgaaaaattccaacgaggctgag

SEQ ID NO: 231444 - DNA, 25 bp, Artificial
  probe
  misc_feature (1)..(25): SEQ ID NO: 4003; WAN024G53-5_at; Start 1260; Stop 1284
tatccgctatcttggtatcaatggc

SEQ ID NO: 231445 - DNA, 25 bp, Artificial
  probe
  misc_feature (1)..(25): SEQ ID NO: 4003; WAN024G53-5_at; Start 1279; Stop 1303
aatggcttgccagcctttcagcaaa

SEQ ID NO: 231446 - DNA, 25 bp, Artificial
  probe
  misc_feature (1)..(25): SEQ ID NO: 4003; WAN024G53-5_at; Start 1342; Stop 1366
cgtttgaatgtcctccgcctgagaa

SEQ ID NO: 231447 - DNA, 25 bp, Artificial
  probe
  misc_feature (1)..(25): SEQ ID NO: 4003; WAN024G53-5_at; Start 706; Stop 730
tataccagtccttttagcgagggca

SEQ ID NO: 231448 - DNA, 25 bp, Artificial
  probe
  misc_feature (1)..(25): SEQ ID NO: 4003; WAN024G53-5_at; Start 615; Stop 639
tcgtttttctgctgaggaagagcgg

SEQ ID NO: 231449 - DNA, 25 bp, Artificial
  probe
  misc_feature (1)..(25): SEQ ID NO: 4003; WAN024G53-5_at; Start 499; Stop 523
cttaatcaaggtcagttagcccagg

SEQ ID NO: 231450 - DNA, 25 bp, Artificial
  probe
  misc_feature (1)..(25): SEQ ID NO: 4003; WAN024G53-5_at; Start 1168; Stop 1192
taccgttttcgtcaggaggatttga

SEQ ID NO: 231451 - DNA, 25 bp, Artificial
  probe
  misc_feature (1)..(25): SEQ ID NO: 4003; WAN024G53-5_at; Start 99; Stop 123
tgcagctggcaagcgggtcttctac

SEQ ID NO: 231452 - DNA, 25 bp, Artificial
  probe
  misc_feature (1)..(25): SEQ ID NO: 4003; WAN024G53-5_at; Start 324; Stop 348
caaggacttgcgtgtttatggcgct

SEQ ID NO: 231453 - DNA, 25 bp, Artificial
  probe
  misc_feature (1)..(25): SEQ ID NO: 4003; WAN024G53-5_at; Start 874; Stop 898
gaactcgctttggatgtcgatgaga

SEQ ID NO: 231454 - DNA, 25 bp, Artificial
  probe
  misc_feature (1)..(25): SEQ ID NO: 4003; WAN024G53-5_at; Start 270; Stop 294
tgatgatatcggtcttgggttggcc

SEQ ID NO: 231455 - DNA, 25 bp, Artificial
  probe
  misc_feature (1)..(25): SEQ ID NO: 4003; WAN024G53-5_at; Start 724; Stop 748
gagggcaatctctaccaagccagcg

SEQ ID NO: 231456 - DNA, 25 bp, Artificial
  probe
  misc_feature (1)..(25): SEQ ID NO: 4003; WAN024G53-5_at; Start 309; Stop 333
tgccgaactcgatcccaaggacttg

SEQ ID NO: 231457 - DNA, 25 bp, Artificial
  probe
  misc_feature (1)..(25): SEQ ID NO: 4003; WAN024G53-5_at; Start 1622; Stop 1646
gaatgagtttgtcccaataccgtac

SEQ ID NO: 231458 - DNA, 25 bp, Artificial
  probe
  misc_feature (1)..(25): SEQ ID NO: 4003; WAN024G53-5_at; Start 1520; Stop 1544
ccgaagtttggaaggctttctgcca

SEQ ID NO: 231459 - DNA, 25 bp, Artificial
  probe
  misc_feature (1)..(25): SEQ ID NO: 4003; WAN024G53-5_at; Start 529; Stop 553
cagttgtcccatttgattgaggcta

SEQ ID NO: 231460 - DNA, 25 bp, Artificial
  probe
  misc_feature (1)..(25): SEQ ID NO: 4003; WAN024G53-5_at; Start 1487; Stop 1511
ccactttggaagctgtagaacagga

SEQ ID NO: 231461 - DNA, 25 bp, Artificial
  probe
  misc_feature (1)..(25): SEQ ID NO: 4003; WAN024G53-5_at; Start 690; Stop 714
tgctagtaagaaagcctataccagt

SEQ ID NO: 231462 - DNA, 25 bp, Artificial
  probe
  misc_feature (1)..(25): SEQ ID NO: 4003; WAN024G53-5_at; Start 772; Stop 796
tctaaataccaaacgcctgctcagg

SEQ ID NO: 231463 - DNA, 25 bp, Artificial
  probe
  misc_feature (1)..(25): SEQ ID NO: 4003; WAN024G53-5_at; Start 86; Stop 110
cagaagagctagttgcagctggcaa

SEQ ID NO: 231464 - DNA, 25 bp, Artificial
  probe
  misc_feature (1)..(25): SEQ ID NO: 4003; WAN024G53-5_at; Start 916; Stop 940
caaatctggtcttgtttgacgcaaa

SEQ ID NO: 231465 - DNA, 25 bp, Artificial
  probe
  misc_feature (1)..(25): SEQ ID NO: 4003; WAN024G53-5_at; Start 982; Stop 1006
ttacatgagaactcagacctgagct

SEQ ID NO: 231466 - DNA, 25 bp, Artificial
  probe
  misc_feature (1)..(25): SEQ ID NO: 5432; WAN024G54_at; Start 136; Stop 160
tacagcgatagacacaccgaggatt

SEQ ID NO: 231467 - DNA, 25 bp, Artificial
  probe
  misc_feature (1)..(25): SEQ ID NO: 5432; WAN024G54_at; Start 10; Stop 34
gattggagcgtcagagtgagaacca

SEQ ID NO: 231468 - DNA, 25 bp, Artificial
  probe
  misc_feature (1)..(25): SEQ ID NO: 5432; WAN024G54_at; Start 338; Stop 362
agttcaactgcttcgtgttcaccag

SEQ ID NO: 231469 - DNA, 25 bp, Artificial
  probe
  misc_feature (1)..(25): SEQ ID NO: 5432; WAN024G54_at; Start 150; Stop 174
caccgaggattgcattcgcacccaa

SEQ ID NO: 231470 - DNA, 25 bp, Artificial
  probe
  misc_feature (1)..(25): SEQ ID NO: 5432; WAN024G54_at; Start 189; Stop 213
gagtaccgtcaagtgcgatcatagc

SEQ ID NO: 231471 - DNA, 25 bp, Artificial
  probe
  misc_feature (1)..(25): SEQ ID NO: 5432; WAN024G54_at; Start 181; Stop 205
tttgttaggagtaccgtcaagtgcg

SEQ ID NO: 231472 - DNA, 25 bp, Artificial
  probe
  misc_feature (1)..(25): SEQ ID NO: 5432; WAN024G54_at; Start 29; Stop 53
gaaccaccgttgatgatgttcatca

SEQ ID NO: 231473 - DNA, 25 bp, Artificial
  probe
  misc_feature (1)..(25): SEQ ID NO: 5432; WAN024G54_at; Start 326; Stop 350
tcaccgtcgcgaagttcaactgctt

SEQ ID NO: 231474 - DNA, 25 bp, Artificial
  probe
  misc_feature (1)..(25): SEQ ID NO: 5432; WAN024G54_at; Start 248; Stop 272
ccaatgatagcttcagcaatgatgt

SEQ ID NO: 231475 - DNA, 25 bp, Artificial
  probe
  misc_feature (1)..(25): SEQ ID NO: 5432; WAN024G54_at; Start 106; Stop 130
gatttcaaggtagtcagcagcagca

SEQ ID NO: 231476 - DNA, 25 bp, Artificial
  probe
  misc_feature (1)..(25): SEQ ID NO: 5432; WAN024G54_at; Start 296; Stop 320
tgtgtaccaagaccaccgtaacgag

SEQ ID NO: 231477 - DNA, 25 bp, Artificial
  probe
  misc_feature (1)..(25): SEQ ID NO: 5432; WAN024G54_at; Start 264; Stop 288
caatgatgttgtttacgttgtcaac

SEQ ID NO: 231478 - DNA, 25 bp, Artificial
  probe
  misc_feature (1)..(25): SEQ ID NO: 5432; WAN024G54_at; Start 197; Stop 221
tcaagtgcgatcatagcacggtcaa

SEQ ID NO: 231479 - DNA, 25 bp, Artificial
  probe
  misc_feature (1)..(25): SEQ ID NO: 5432; WAN024G54_at; Start 230; Stop 254
tgatcacgtacatcgtagccaatga

SEQ ID NO: 231480 - DNA, 25 bp, Artificial
  probe
  misc_feature (1)..(25): SEQ ID NO: 5432; WAN024G54_at; Start 66; Stop 90
gaactttagtgttgaatccaccaag

SEQ ID NO: 231481 - DNA, 25 bp, Artificial
  probe
  misc_feature (1)..(25): SEQ ID NO: 5432; WAN024G54_at; Start 160; Stop 184
tgcattcgcacccaatttacctttg

SEQ ID NO: 231482 - DNA, 25 bp, Artificial
  probe
  misc_feature (1)..(25): SEQ ID NO: 5432; WAN024G54_at; Start 303; Stop 327
caagaccaccgtaacgagatttgtc

SEQ ID NO: 231483 - DNA, 25 bp, Artificial
  probe
  misc_feature (1)..(25): SEQ ID NO: 5432; WAN024G54_at; Start 49; Stop 73
catcattggagttggaagaacttta

SEQ ID NO: 231484 - DNA, 25 bp, Artificial
  probe
  misc_feature (1)..(25): SEQ ID NO: 5432; WAN024G54_at; Start 112; Stop 136
aaggtagtcagcagcagcacgagct

SEQ ID NO: 231485 - DNA, 25 bp, Artificial
  probe
  misc_feature (1)..(25): SEQ ID NO: 5432; WAN024G54_at; Start 23; Stop 47
gagtgagaaccaccgttgatgatgt

SEQ ID NO: 231486 - DNA, 25 bp, Artificial
  probe
  misc_feature (1)..(25): SEQ ID NO: 5432; WAN024G54_at; Start 208; Stop 232
catagcacggtcaatagcttgttga

SEQ ID NO: 231487 - DNA, 25 bp, Artificial
  probe
  misc_feature (1)..(25): SEQ ID NO: 5432; WAN024G54_at; Start 42; Stop 66
tgatgttcatcattggagttggaag

SEQ ID NO: 231488 - DNA, 25 bp, Artificial
  probe
  misc_feature (1)..(25): SEQ ID NO: 5432; WAN024G54_at; Start 220; Stop 244
aatagcttgttgatcacgtacatcg

SEQ ID NO: 231489 - DNA, 25 bp, Artificial
  probe
  misc_feature (1)..(25): SEQ ID NO: 5432; WAN024G54_at; Start 122; Stop 146
gcagcagcacgagctacagcgatag

SEQ ID NO: 231490 - DNA, 25 bp, Artificial
  probe
  misc_feature (1)..(25): SEQ ID NO: 5432; WAN024G54_at; Start 314; Stop 338
taacgagatttgtcaccgtcgcgaa

SEQ ID NO: 231491 - DNA, 25 bp, Artificial
  probe
  misc_feature (1)..(25): SEQ ID NO: 5432; WAN024G54_at; Start 92; Stop 116
tagctgtaaagtgggatttcaaggt

SEQ ID NO: 231492 - DNA, 25 bp, Artificial
  probe
  misc_feature (1)..(25): SEQ ID NO: 5432; WAN024G54_at; Start 351; Stop 375
cgtgttcaccagtagaagctcctga

SEQ ID NO: 231493 - DNA, 25 bp, Artificial
  probe
  misc_feature (1)..(25): SEQ ID NO: 5432; WAN024G54_at; Start 285; Stop 309
caacagctttttgtgtaccaagacc

SEQ ID NO: 231494 - DNA, 25 bp, Artificial
  probe
  misc_feature (1)..(25): SEQ ID NO: 5432; WAN024G54_at; Start 144; Stop 168
tagacacaccgaggattgcattcgc

SEQ ID NO: 231495 - DNA, 25 bp, Artificial
  probe
  misc_feature (1)..(25): SEQ ID NO: 5432; WAN024G54_at; Start 240; Stop 264
catcgtagccaatgatagcttcagc

SEQ ID NO: 231496 - DNA, 25 bp, Artificial
  probe
  misc_feature (1)..(25): SEQ ID NO: 5432; WAN024G54_at; Start 15; Stop 39
gagcgtcagagtgagaaccaccgtt

SEQ ID NO: 231497 - DNA, 25 bp, Artificial
  probe
  misc_feature (1)..(25): SEQ ID NO: 5432; WAN024G54_at; Start 279; Stop 303
cgttgtcaacagctttttgtgtacc

SEQ ID NO: 231498 - DNA, 25 bp, Artificial
  probe
  misc_feature (1)..(25): SEQ ID NO: 5432; WAN024G54_at; Start 320; Stop 344
gatttgtcaccgtcgcgaagttcaa

SEQ ID NO: 231499 - DNA, 25 bp, Artificial
  probe
  misc_feature (1)..(25): SEQ ID NO: 5432; WAN024G54_at; Start 63; Stop 87
gaagaactttagtgttgaatccacc

SEQ ID NO: 231500 - DNA, 25 bp, Artificial
  probe
  misc_feature (1)..(25): SEQ ID NO: 5484; WAN024G55_at; Start 157; Stop 181
caattcttcaaggtagtcgatttgt

SEQ ID NO: 231501 - DNA, 25 bp, Artificial
  probe
  misc_feature (1)..(25): SEQ ID NO: 5484; WAN024G55_at; Start 106; Stop 130
gtcgttttcatccataccatcttca

SEQ ID NO: 231502 - DNA, 25 bp, Artificial
  probe
  misc_feature (1)..(25): SEQ ID NO: 5484; WAN024G55_at; Start 174; Stop 198
cgatttgttctgcagatgtacgaac

SEQ ID NO: 231503 - DNA, 25 bp, Artificial
  probe
  misc_feature (1)..(25): SEQ ID NO: 5484; WAN024G55_at; Start 75; Stop 99
gacgttcagtaagagctttccaacc

SEQ ID NO: 231504 - DNA, 25 bp, Artificial
  probe
  misc_feature (1)..(25): SEQ ID NO: 5484; WAN024G55_at; Start 179; Stop 203
tgttctgcagatgtacgaacagcag

SEQ ID NO: 231505 - DNA, 25 bp, Artificial
  probe
  misc_feature (1)..(25): SEQ ID NO: 5484; WAN024G55_at; Start 186; Stop 210
cagatgtacgaacagcagcaccttc

SEQ ID NO: 231506 - DNA, 25 bp, Artificial
  probe
  misc_feature (1)..(25): SEQ ID NO: 5484; WAN024G55_at; Start 27; Stop 51
tgtttgttacgaagaagtcgtcacc

SEQ ID NO: 231507 - DNA, 25 bp, Artificial
  probe
  misc_feature (1)..(25): SEQ ID NO: 5484; WAN024G55_at; Start 59; Stop 83
tgtactttcttaccaagacgttcag

SEQ ID NO: 231508 - DNA, 25 bp, Artificial
  probe
  misc_feature (1)..(25): SEQ ID NO: 5484; WAN024G55_at; Start 4; Stop 28
gataccacgtgcaaggtagtcagtg

SEQ ID NO: 231509 - DNA, 25 bp, Artificial
  probe
  misc_feature (1)..(25): SEQ ID NO: 5484; WAN024G55_at; Start 101; Stop 125
tcccagtcgttttcatccataccat

SEQ ID NO: 231510 - DNA, 25 bp, Artificial
  probe
  misc_feature (1)..(25): SEQ ID NO: 5484; WAN024G55_at; Start 79; Stop 103
ttcagtaagagctttccaaccatcc

SEQ ID NO: 231511 - DNA, 25 bp, Artificial
  probe
  misc_feature (1)..(25): SEQ ID NO: 5484; WAN024G55_at; Start 153; Stop 177
taaccaattcttcaaggtagtcgat

SEQ ID NO: 231512 - DNA, 25 bp, Artificial
  probe
  misc_feature (1)..(25): SEQ ID NO: 5484; WAN024G55_at; Start 54; Stop 78
caagttgtactttcttaccaagacg

SEQ ID NO: 231513 - DNA, 25 bp, Artificial
  probe
  misc_feature (1)..(25): SEQ ID NO: 5484; WAN024G55_at; Start 150; Stop 174
tgttaaccaattcttcaaggtagtc

SEQ ID NO: 231514 - DNA, 25 bp, Artificial
  probe
  misc_feature (1)..(25): SEQ ID NO: 5484; WAN024G55_at; Start 170; Stop 194
tagtcgatttgttctgcagatgtac

SEQ ID NO: 231515 - DNA, 25 bp, Artificial
  probe
  misc_feature (1)..(25): SEQ ID NO: 5484; WAN024G55_at; Start 122; Stop 146
ccatcttcaatagtgatgattgggt

SEQ ID NO: 231516 - DNA, 25 bp, Artificial
  probe
  misc_feature (1)..(25): SEQ ID NO: 5484; WAN024G55_at; Start 22; Stop 46
gtcagtgtttgttacgaagaagtcg

SEQ ID NO: 231517 - DNA, 25 bp, Artificial
  probe
  misc_feature (1)..(25): SEQ ID NO: 5484; WAN024G55_at; Start 31; Stop 55
tgttacgaagaagtcgtcaccaaca

SEQ ID NO: 231518 - DNA, 25 bp, Artificial
  probe
  misc_feature (1)..(25): SEQ ID NO: 5484; WAN024G55_at; Start 1; Stop 25
ttggataccacgtgcaaggtagtca

SEQ ID NO: 231519 - DNA, 25 bp, Artificial
  probe
  misc_feature (1)..(25): SEQ ID NO: 5484; WAN024G55_at; Start 112; Stop 136
ttcatccataccatcttcaatagtg

SEQ ID NO: 231520 - DNA, 25 bp, Artificial
  probe
  misc_feature (1)..(25): SEQ ID NO: 5484; WAN024G55_at; Start 83; Stop 107
gtaagagctttccaaccatcccagt

SEQ ID NO: 231521 - DNA, 25 bp, Artificial
  probe
  misc_feature (1)..(25): SEQ ID NO: 5484; WAN024G55_at; Start 135; Stop 159
tgatgattgggtatttgttaaccaa

SEQ ID NO: 231522 - DNA, 25 bp, Artificial
  probe
  misc_feature (1)..(25): SEQ ID NO: 5484; WAN024G55_at; Start 87; Stop 111
gagctttccaaccatcccagtcgtt

SEQ ID NO: 231523 - DNA, 25 bp, Artificial
  probe
  misc_feature (1)..(25): SEQ ID NO: 5484; WAN024G55_at; Start 72; Stop 96
caagacgttcagtaagagctttcca

SEQ ID NO: 231524 - DNA, 25 bp, Artificial
  probe
  misc_feature (1)..(25): SEQ ID NO: 5484; WAN024G55_at; Start 6; Stop 30
taccacgtgcaaggtagtcagtgtt

SEQ ID NO: 231525 - DNA, 25 bp, Artificial
  probe
  misc_feature (1)..(25): SEQ ID NO: 5484; WAN024G55_at; Start 68; Stop 92
ttaccaagacgttcagtaagagctt

SEQ ID NO: 231526 - DNA, 25 bp, Artificial
  probe
  misc_feature (1)..(25): SEQ ID NO: 5484; WAN024G55_at; Start 37; Stop 61
gaagaagtcgtcaccaacaagttgt

SEQ ID NO: 231527 - DNA, 25 bp, Artificial
  probe
  misc_feature (1)..(25): SEQ ID NO: 5484; WAN024G55_at; Start 9; Stop 33
cacgtgcaaggtagtcagtgtttgt

SEQ ID NO: 231528 - DNA, 25 bp, Artificial
  probe
  misc_feature (1)..(25): SEQ ID NO: 5484; WAN024G55_at; Start 184; Stop 208
tgcagatgtacgaacagcagcacct

SEQ ID NO: 231529 - DNA, 25 bp, Artificial
  probe
  misc_feature (1)..(25): SEQ ID NO: 5484; WAN024G55_at; Start 96; Stop 120
aaccatcccagtcgttttcatccat

SEQ ID NO: 231530 - DNA, 25 bp, Artificial
  probe
  misc_feature (1)..(25): SEQ ID NO: 5484; WAN024G55_at; Start 165; Stop 189
caaggtagtcgatttgttctgcaga

SEQ ID NO: 231531 - DNA, 25 bp, Artificial
  probe
  misc_feature (1)..(25): SEQ ID NO: 5484; WAN024G55_at; Start 15; Stop 39
caaggtagtcagtgtttgttacgaa

SEQ ID NO: 231532 - DNA, 25 bp, Artificial
  probe
  misc_feature (1)..(25): SEQ ID NO: 5484; WAN024G55_at; Start 240; Stop 264
tacgttctttatcgtagaattctga

SEQ ID NO: 231533 - DNA, 25 bp, Artificial
  probe
  misc_feature (1)..(25): SEQ ID NO: 5484; WAN024G55_at; Start 40; Stop 64
gaagtcgtcaccaacaagttgtact

SEQ ID NO: 231534 - DNA, 25 bp, Artificial
  probe
  misc_feature (1)..(25): SEQ ID NO: 2840; WAN024G56_at; Start 968; Stop 992
caaacactgactaccttgcacgtgg

SEQ ID NO: 231535 - DNA, 25 bp, Artificial
  probe
  misc_feature (1)..(25): SEQ ID NO: 2840; WAN024G56_at; Start 1076; Stop 1100
tggctaaagaagctggttacactgc

SEQ ID NO: 231536 - DNA, 25 bp, Artificial
  probe
  misc_feature (1)..(25): SEQ ID NO: 2840; WAN024G56_at; Start 142; Stop 166
gcagttgaacttcgcgacggtgaca

SEQ ID NO: 231537 - DNA, 25 bp, Artificial
  probe
  misc_feature (1)..(25): SEQ ID NO: 2840; WAN024G56_at; Start 183; Stop 207
tcttggtacacaaaaagctgttgac

SEQ ID NO: 231538 - DNA, 25 bp, Artificial
  probe
  misc_feature (1)..(25): SEQ ID NO: 2840; WAN024G56_at; Start 652; Stop 676
ggtgttgaaactatccttgctgcga

SEQ ID NO: 231539 - DNA, 25 bp, Artificial
  probe
  misc_feature (1)..(25): SEQ ID NO: 2840; WAN024G56_at; Start 450; Stop 474
caacggtggttctcactctgacgct

SEQ ID NO: 231540 - DNA, 25 bp, Artificial
  probe
  misc_feature (1)..(25): SEQ ID NO: 2840; WAN024G56_at; Start 241; Stop 265
ggctacgatgtacgtgatcaacaag

SEQ ID NO: 231541 - DNA, 25 bp, Artificial
  probe
  misc_feature (1)..(25): SEQ ID NO: 2840; WAN024G56_at; Start 345; Stop 369
tatcgctgtagctcgtgctgctgct

SEQ ID NO: 231542 - DNA, 25 bp, Artificial
  probe
  misc_feature (1)..(25): SEQ ID NO: 2840; WAN024G56_at; Start 256; Stop 280
gatcaacaagctattgaccgtgcta

SEQ ID NO: 231543 - DNA, 25 bp, Artificial
  probe
  misc_feature (1)..(25): SEQ ID NO: 2840; WAN024G56_at; Start 361; Stop 385
gctgctgctgactaccttgaaatcc

SEQ ID NO: 231544 - DNA, 25 bp, Artificial
  probe
  misc_feature (1)..(25): SEQ ID NO: 2840; WAN024G56_at; Start 312; Stop 336
taaattgggtgcgaatgcaatcctc

SEQ ID NO: 231545 - DNA, 25 bp, Artificial
  probe
  misc_feature (1)..(25): SEQ ID NO: 2840; WAN024G56_at; Start 31; Stop 55
gaagtcctagactcacgcggtaacc

SEQ ID NO: 231546 - DNA, 25 bp, Artificial
  probe
  misc_feature (1)..(25): SEQ ID NO: 2840; WAN024G56_at; Start 1153; Stop 1177
gcagttgcaactaacgcaggacaaa

SEQ ID NO: 231547 - DNA, 25 bp, Artificial
  probe
  misc_feature (1)..(25): SEQ ID NO: 2840; WAN024G56_at; Start 159; Stop 183
cggtgacaaatctcgttacggtggt

SEQ ID NO: 231548 - DNA, 25 bp, Artificial
  probe
  misc_feature (1)..(25): SEQ ID NO: 2840; WAN024G56_at; Start 510; Stop 534
tggtgcgccaacatttaaagaagcc

SEQ ID NO: 231549 - DNA, 25 bp, Artificial
  probe
  misc_feature (1)..(25): SEQ ID NO: 2840; WAN024G56_at; Start 579; Stop 603
taaatcacgtggtttggaaactgcc

SEQ ID NO: 231550 - DNA, 25 bp, Artificial
  probe
  misc_feature (1)..(25): SEQ ID NO: 2840; WAN024G56_at; Start 905; Stop 929
ggaaagctcttactgaacgtcttgg

SEQ ID NO: 231551 - DNA, 25 bp, Artificial
  probe
  misc_feature (1)..(25): SEQ ID NO: 2840; WAN024G56_at; Start 329; Stop 353
caatcctcggtgtgtctatcgctgt

SEQ ID NO: 231552 - DNA, 25 bp, Artificial
  probe
  misc_feature (1)..(25): SEQ ID NO: 2840; WAN024G56_at; Start 113; Stop 137
catcaggagcttctactggtgaaca

SEQ ID NO: 231553 - DNA, 25 bp, Artificial
  probe
  misc_feature (1)..(25): SEQ ID NO: 2840; WAN024G56_at; Start 529; Stop 553
gaagcccttcgttacggtgctgaaa

SEQ ID NO: 231554 - DNA, 25 bp, Artificial
  probe
  misc_feature (1)..(25): SEQ ID NO: 2840; WAN024G56_at; Start 1231; Stop 1255
cttcgtatcgaagaccaacttggtg

SEQ ID NO: 231555 - DNA, 25 bp, Artificial
  probe
  misc_feature (1)..(25): SEQ ID NO: 2840; WAN024G56_at; Start 495; Stop 519
catgatcttgccagttggtgcgcca

SEQ ID NO: 231556 - DNA, 25 bp, Artificial
  probe
  misc_feature (1)..(25): SEQ ID NO: 2840; WAN024G56_at; Start 82; Stop 106
gaatcaggtgctttcggacgtggta

SEQ ID NO: 231557 - DNA, 25 bp, Artificial
  probe
  misc_feature (1)..(25): SEQ ID NO: 2840; WAN024G56_at; Start 675; Stop 699
gattgaagctgctggatatgtacca

SEQ ID NO: 231558 - DNA, 25 bp, Artificial
  probe
  misc_feature (1)..(25): SEQ ID NO: 2840; WAN024G56_at; Start 1179; Stop 1203
caagactggttcactttcacgtaca

SEQ ID NO: 231559 - DNA, 25 bp, Artificial
  probe
  misc_feature (1)..(25): SEQ ID NO: 2840; WAN024G56_at; Start 790; Stop 814
gaaggtgctgctgttcgtacatctg

SEQ ID NO: 231560 - DNA, 25 bp, Artificial
  probe
  misc_feature (1)..(25): SEQ ID NO: 2840; WAN024G56_at; Start 940; Stop 964
caacttgttggtgacgacttcttcg

SEQ ID NO: 231561 - DNA, 25 bp, Artificial
  probe
  misc_feature (1)..(25): SEQ ID NO: 2840; WAN024G56_at; Start 1099; Stop 1123
gctgttgtatcacaccgttcaggtg

SEQ ID NO: 231562 - DNA, 25 bp, Artificial
  probe
  misc_feature (1)..(25): SEQ ID NO: 2840; WAN024G56_at; Start 986; Stop 1010
cacgtggtatccaagaaggtgctgc

SEQ ID NO: 231563 - DNA, 25 bp, Artificial
  probe
  misc_feature (1)..(25): SEQ ID NO: 2840; WAN024G56_at; Start 468; Stop 492
tgacgctccaatcgctttccaagag

SEQ ID NO: 231564 - DNA, 25 bp, Artificial
  probe
  misc_feature (1)..(25): SEQ ID NO: 2840; WAN024G56_at; Start 16; Stop 40
gatgtttacgctcgcgaagtcctag

SEQ ID NO: 231565 - DNA, 25 bp, Artificial
  probe
  misc_feature (1)..(25): SEQ ID NO: 2840; WAN024G56_at; Start 614; Stop 638
aaggtggattcgctcctcgtttcga

SEQ ID NO: 231566 - DNA, 25 bp, Artificial
  probe
  misc_feature (1)..(25): SEQ ID NO: 2840; WAN024G56_at; Start 889; Stop 913
aacgactgggatggttggaaagctc

SEQ ID NO: 231567 - DNA, 25 bp, Artificial
  probe
  misc_feature (1)..(25): SEQ ID NO: 2840; WAN024G56_at; Start 811; Stop 835
tctgcagaacaaatcgactaccttg

SEQ ID NO: 231568 - DNA, 25 bp, Artificial
  probe
  misc_feature (1)..(25): SEQ ID NO: 7467; WAN024G57_at; Start 188; Stop 212
gaccttctttgacttcaagctggtt

SEQ ID NO: 231569 - DNA, 25 bp, Artificial
  probe
  misc_feature (1)..(25): SEQ ID NO: 7467; WAN024G57_at; Start 108; Stop 132
tagtttctttctccatttttccaga

SEQ ID NO: 231570 - DNA, 25 bp, Artificial
  probe
  misc_feature (1)..(25): SEQ ID NO: 7467; WAN024G57_at; Start 6; Stop 30
cacttctttggcacaaaaggcgatt

SEQ ID NO: 231571 - DNA, 25 bp, Artificial
  probe
  misc_feature (1)..(25): SEQ ID NO: 7467; WAN024G57_at; Start 19; Stop 43
caaaaggcgattcctaactccgccg

SEQ ID NO: 231572 - DNA, 25 bp, Artificial
  probe
  misc_feature (1)..(25): SEQ ID NO: 7467; WAN024G57_at; Start 40; Stop 64
gccgacttcaacattaatagattat

SEQ ID NO: 231573 - DNA, 25 bp, Artificial
  probe
  misc_feature (1)..(25): SEQ ID NO: 7467; WAN024G57_at; Start 183; Stop 207
taaaagaccttctttgacttcaagc

SEQ ID NO: 231574 - DNA, 25 bp, Artificial
  probe
  misc_feature (1)..(25): SEQ ID NO: 7467; WAN024G57_at; Start 10; Stop 34
tctttggcacaaaaggcgattccta

SEQ ID NO: 231575 - DNA, 25 bp, Artificial
  probe
  misc_feature (1)..(25): SEQ ID NO: 7467; WAN024G57_at; Start 59; Stop 83
gattattaaccccatcaccgattgc

SEQ ID NO: 231576 - DNA, 25 bp, Artificial
  probe
  misc_feature (1)..(25): SEQ ID NO: 7467; WAN024G57_at; Start 33; Stop 57
taactccgccgacttcaacattaat

SEQ ID NO: 231577 - DNA, 25 bp, Artificial
  probe
  misc_feature (1)..(25): SEQ ID NO: 7467; WAN024G57_at; Start 17; Stop 41
cacaaaaggcgattcctaactccgc

SEQ ID NO: 231578 - DNA, 25 bp, Artificial
  probe
  misc_feature (1)..(25): SEQ ID NO: 7467; WAN024G57_at; Start 5; Stop 29
gcacttctttggcacaaaaggcgat

SEQ ID NO: 231579 - DNA, 25 bp, Artificial
  probe
  misc_feature (1)..(25): SEQ ID NO: 7467; WAN024G57_at; Start 23; Stop 47
aggcgattcctaactccgccgactt

SEQ ID NO: 231580 - DNA, 25 bp, Artificial
  probe
  misc_feature (1)..(25): SEQ ID NO: 7467; WAN024G57_at; Start 190; Stop 214
ccttctttgacttcaagctggttgg

SEQ ID NO: 231581 - DNA, 25 bp, Artificial
  probe
  misc_feature (1)..(25): SEQ ID NO: 7467; WAN024G57_at; Start 15; Stop 39
ggcacaaaaggcgattcctaactcc

SEQ ID NO: 231582 - DNA, 25 bp, Artificial
  probe
  misc_feature (1)..(25): SEQ ID NO: 7467; WAN024G57_at; Start 113; Stop 137
tctttctccatttttccagagtctt

SEQ ID NO: 231583 - DNA, 25 bp, Artificial
  probe
  misc_feature (1)..(25): SEQ ID NO: 7467; WAN024G57_at; Start 16; Stop 40
gcacaaaaggcgattcctaactccg

SEQ ID NO: 231584 - DNA, 25 bp, Artificial
  probe
  misc_feature (1)..(25): SEQ ID NO: 7467; WAN024G57_at; Start 77; Stop 101
cgattgccacccttctttctttaga

SEQ ID NO: 231585 - DNA, 25 bp, Artificial
  probe
  misc_feature (1)..(25): SEQ ID NO: 7467; WAN024G57_at; Start 37; Stop 61
tccgccgacttcaacattaatagat

SEQ ID NO: 231586 - DNA, 25 bp, Artificial
  probe
  misc_feature (1)..(25): SEQ ID NO: 7467; WAN024G57_at; Start 35; Stop 59
actccgccgacttcaacattaatag

SEQ ID NO: 231587 - DNA, 25 bp, Artificial
  probe
  misc_feature (1)..(25): SEQ ID NO: 7467; WAN024G57_at; Start 54; Stop 78
taatagattattaaccccatcaccg

SEQ ID NO: 231588 - DNA, 25 bp, Artificial
  probe
  misc_feature (1)..(25): SEQ ID NO: 7467; WAN024G57_at; Start 61; Stop 85
ttattaaccccatcaccgattgcca

SEQ ID NO: 231589 - DNA, 25 bp, Artificial
  probe
  misc_feature (1)..(25): SEQ ID NO: 7467; WAN024G57_at; Start 39; Stop 63
cgccgacttcaacattaatagatta

SEQ ID NO: 231590 - DNA, 25 bp, Artificial
  probe
  misc_feature (1)..(25): SEQ ID NO: 7467; WAN024G57_at; Start 157; Stop 181
ataatttgtccaactaattttcctg

SEQ ID NO: 231591 - DNA, 25 bp, Artificial
  probe
  misc_feature (1)..(25): SEQ ID NO: 7467; WAN024G57_at; Start 22; Stop 46
aaggcgattcctaactccgccgact

SEQ ID NO: 231592 - DNA, 25 bp, Artificial
  probe
  misc_feature (1)..(25): SEQ ID NO: 7467; WAN024G57_at; Start 3; Stop 27
gagcacttctttggcacaaaaggcg

SEQ ID NO: 231593 - DNA, 25 bp, Artificial
  probe
  misc_feature (1)..(25): SEQ ID NO: 7467; WAN024G57_at; Start 12; Stop 36
tttggcacaaaaggcgattcctaac

SEQ ID NO: 231594 - DNA, 25 bp, Artificial
  probe
  misc_feature (1)..(25): SEQ ID NO: 7467; WAN024G57_at; Start 1; Stop 25
ttgagcacttctttggcacaaaagg

SEQ ID NO: 231595 - DNA, 25 bp, Artificial
  probe
  misc_feature (1)..(25): SEQ ID NO: 7467; WAN024G57_at; Start 180; Stop 204
tgttaaaagaccttctttgacttca

SEQ ID NO: 231596 - DNA, 25 bp, Artificial
  probe
  misc_feature (1)..(25): SEQ ID NO: 7467; WAN024G57_at; Start 55; Stop 79
aatagattattaaccccatcaccga

SEQ ID NO: 231597 - DNA, 25 bp, Artificial
  probe
  misc_feature (1)..(25): SEQ ID NO: 7467; WAN024G57_at; Start 186; Stop 210
aagaccttctttgacttcaagctgg

SEQ ID NO: 231598 - DNA, 25 bp, Artificial
  probe
  misc_feature (1)..(25): SEQ ID NO: 7467; WAN024G57_at; Start 143; Stop 167
tgacctggggacttataatttgtcc

SEQ ID NO: 231599 - DNA, 25 bp, Artificial
  probe
  misc_feature (1)..(25): SEQ ID NO: 7467; WAN024G57_at; Start 78; Stop 102
gattgccacccttctttctttagaa

SEQ ID NO: 231600 - DNA, 25 bp, Artificial
  probe
  misc_feature (1)..(25): SEQ ID NO: 7467; WAN024G57_at; Start 8; Stop 32
cttctttggcacaaaaggcgattcc

SEQ ID NO: 231601 - DNA, 25 bp, Artificial
  probe
  misc_feature (1)..(25): SEQ ID NO: 7467; WAN024G57_at; Start 191; Stop 215
cttctttgacttcaagctggttggc

SEQ ID NO: 231602 - DNA, 25 bp, Artificial
  probe
  misc_feature (1)..(25): SEQ ID NO: 3466; WAN024G58_s_at; Start 488; Stop 512
tgtctggaattgatacctgcttgga

SEQ ID NO: 231603 - DNA, 25 bp, Artificial
  probe
  misc_feature (1)..(25): SEQ ID NO: 3466; WAN024G58_s_at; Start 503; Stop 527
cctgcttggacttaatcaactttga

SEQ ID NO: 231604 - DNA, 25 bp, Artificial
  probe
  misc_feature (1)..(25): SEQ ID NO: 3466; WAN024G58_s_at; Start 297; Stop 321
tggtcttggaaaaattccgctagag

SEQ ID NO: 231605 - DNA, 25 bp, Artificial
  probe
  misc_feature (1)..(25): SEQ ID NO: 3466; WAN024G58_s_at; Start 109; Stop 133
tcgatagcagatgtagaatgtctcc

SEQ ID NO: 231606 - DNA, 25 bp, Artificial
  probe
  misc_feature (1)..(25): SEQ ID NO: 3466; WAN024G58_s_at; Start 284; Stop 308
tagctgacttggttggtcttggaaa

SEQ ID NO: 231607 - DNA, 25 bp, Artificial
  probe
  misc_feature (1)..(25): SEQ ID NO: 3466; WAN024G58_s_at; Start 172; Stop 196
gctatccgacattctcttgacctaa

SEQ ID NO: 231608 - DNA, 25 bp, Artificial
  probe
  misc_feature (1)..(25): SEQ ID NO: 3466; WAN024G58_s_at; Start 36; Stop 60
tgcaccggattcgtttaaggaaagc

SEQ ID NO: 231609 - DNA, 25 bp, Artificial
  probe
  misc_feature (1)..(25): SEQ ID NO: 3466; WAN024G58_s_at; Start 419; Stop 443
gcacggccagtaatgatggaggact

SEQ ID NO: 231610 - DNA, 25 bp, Artificial
  probe
  misc_feature (1)..(25): SEQ ID NO: 3466; WAN024G58_s_at; Start 312; Stop 336
tccgctagagaaacgaaatccactt

SEQ ID NO: 231611 - DNA, 25 bp, Artificial
  probe
  misc_feature (1)..(25): SEQ ID NO: 3466; WAN024G58_s_at; Start 667; Stop 691
gctgaagatttacctcccctaccat

SEQ ID NO: 231612 - DNA, 25 bp, Artificial
  probe
  misc_feature (1)..(25): SEQ ID NO: 3466; WAN024G58_s_at; Start 228; Stop 252
tggacaaaaagaagccatgcgctat

SEQ ID NO: 231613 - DNA, 25 bp, Artificial
  probe
  misc_feature (1)..(25): SEQ ID NO: 3466; WAN024G58_s_at; Start 472; Stop 496
gctcaggcaagtatcgtgtctggaa

SEQ ID NO: 231614 - DNA, 25 bp, Artificial
  probe
  misc_feature (1)..(25): SEQ ID NO: 3466; WAN024G58_s_at; Start 342; Stop 366
ccaaacttgtggtattggagagttg

SEQ ID NO: 231615 - DNA, 25 bp, Artificial
  probe
  misc_feature (1)..(25): SEQ ID NO: 3466; WAN024G58_s_at; Start 240; Stop 264
agccatgcgctattttcaaaaaggg

SEQ ID NO: 231616 - DNA, 25 bp, Artificial
  probe
  misc_feature (1)..(25): SEQ ID NO: 3466; WAN024G58_s_at; Start 157; Stop 181
gaaggtactgtagatgctatccgac

SEQ ID NO: 231617 - DNA, 25 bp, Artificial
  probe
  misc_feature (1)..(25): SEQ ID NO: 3466; WAN024G58_s_at; Start 612; Stop 636
tgttgcaaaaagaacccctgttgga

SEQ ID NO: 231618 - DNA, 25 bp, Artificial
  probe
  misc_feature (1)..(25): SEQ ID NO: 3466; WAN024G58_s_at; Start 582; Stop 606
tcaaagctttgctgggaaagcgcct

SEQ ID NO: 231619 - DNA, 25 bp, Artificial
  probe
  misc_feature (1)..(25): SEQ ID NO: 3466; WAN024G58_s_at; Start 75; Stop 99
ggtagctgaagcaataaaaagaggc

SEQ ID NO: 231620 - DNA, 25 bp, Artificial
  probe
  misc_feature (1)..(25): SEQ ID NO: 3466; WAN024G58_s_at; Start 265; Stop 289
gaactggcactatttgaagtagctg

SEQ ID NO: 231621 - DNA, 25 bp, Artificial
  probe
  misc_feature (1)..(25): SEQ ID NO: 3466; WAN024G58_s_at; Start 326; Stop 350
gaaatccacttcaaatccaaacttg

SEQ ID NO: 231622 - DNA, 25 bp, Artificial
  probe
  misc_feature (1)..(25): SEQ ID NO: 3466; WAN024G58_s_at; Start 688; Stop 712
ccatttgaaaatatccaagctgtct

SEQ ID NO: 231623 - DNA, 25 bp, Artificial
  probe
  misc_feature (1)..(25): SEQ ID NO: 3466; WAN024G58_s_at; Start 634; Stop 658
ggagttcctgttattgctatttgcg

SEQ ID NO: 231624 - DNA, 25 bp, Artificial
  probe
  misc_feature (1)..(25): SEQ ID NO: 3466; WAN024G58_s_at; Start 56; Stop 80
aaagcttgacagctcaacaggtagc

SEQ ID NO: 231625 - DNA, 25 bp, Artificial
  probe
  misc_feature (1)..(25): SEQ ID NO: 3466; WAN024G58_s_at; Start 703; Stop 727
caagctgtcttttctattttggaga

SEQ ID NO: 231626 - DNA, 25 bp, Artificial
  probe
  misc_feature (1)..(25): SEQ ID NO: 3466; WAN024G58_s_at; Start 775; Stop 799
gagcgcacggctgccaatattgggc

SEQ ID NO: 231627 - DNA, 25 bp, Artificial
  probe
  misc_feature (1)..(25): SEQ ID NO: 3466; WAN024G58_s_at; Start 528; Stop 552
taagaaagtttcagatgctgacttg

SEQ ID NO: 231628 - DNA, 25 bp, Artificial
  probe
  misc_feature (1)..(25): SEQ ID NO: 3466; WAN024G58_s_at; Start 124; Stop 148
gaatgtctcctctgccctgttggtg

SEQ ID NO: 231629 - DNA, 25 bp, Artificial
  probe
  misc_feature (1)..(25): SEQ ID NO: 3466; WAN024G58_s_at; Start 21; Stop 45
tatgaagattgtaattgcaccggat

SEQ ID NO: 231630 - DNA, 25 bp, Artificial
  probe
  misc_feature (1)..(25): SEQ ID NO: 3466; WAN024G58_s_at; Start 649; Stop 673
gctatttgcggtagtcttgctgaag

SEQ ID NO: 231631 - DNA, 25 bp, Artificial
  probe
  misc_feature (1)..(25): SEQ ID NO: 3466; WAN024G58_s_at; Start 597; Stop 621
gaaagcgcctataggtgttgcaaaa

SEQ ID NO: 231632 - DNA, 25 bp, Artificial
  probe
  misc_feature (1)..(25): SEQ ID NO: 3466; WAN024G58_s_at; Start 456; Stop 480
tggtttgtgtgcctttgctcaggca

SEQ ID NO: 231633 - DNA, 25 bp, Artificial
  probe
  misc_feature (1)..(25): SEQ ID NO: 3466; WAN024G58_s_at; Start 543; Stop 567
tgctgacttggttgttgttggagaa

SEQ ID NO: 231634 - DNA, 25 bp, Artificial
  probe
  misc_feature (1)..(25): SEQ ID NO: 3466; WAN024G58_s_at; Start 199; Stop 223
gaaaaatggatccaagtgacagacc

SEQ ID NO: 231635 - DNA, 25 bp, Artificial
  probe
  misc_feature (1)..(25): SEQ ID NO: 3466; WAN024G58_s_at; Start 95; Stop 119
gaggcttccaacaatcgatagcaga

SEQ ID NO: 231636 - DNA, 25 bp, Artificial
  probe
  misc_feature (1)..(25): SEQ ID NO: 2898; WAN024G59_at; Start 42; Stop 66
cagggcagaggagacattctacatc

SEQ ID NO: 231637 - DNA, 25 bp, Artificial
  probe
  misc_feature (1)..(25): SEQ ID NO: 2898; WAN024G59_at; Start 2; Stop 26
tgtcggatagcatctacagtacctt

SEQ ID NO: 231638 - DNA, 25 bp, Artificial
  probe
  misc_feature (1)..(25): SEQ ID NO: 2898; WAN024G59_at; Start 51; Stop 75
ggagacattctacatctgctatcga

SEQ ID NO: 231639 - DNA, 25 bp, Artificial
  probe
  misc_feature (1)..(25): SEQ ID NO: 2898; WAN024G59_at; Start 128; Stop 152
tccttaaacgaatccggtgcaatta

SEQ ID NO: 231640 - DNA, 25 bp, Artificial
  probe
  misc_feature (1)..(25): SEQ ID NO: 2898; WAN024G59_at; Start 4; Stop 28
tcggatagcatctacagtaccttct

SEQ ID NO: 231641 - DNA, 25 bp, Artificial
  probe
  misc_feature (1)..(25): SEQ ID NO: 2898; WAN024G59_at; Start 146; Stop 170
gcaattacaatcttcatattttccc

SEQ ID NO: 231642 - DNA, 25 bp, Artificial
  probe
  misc_feature (1)..(25): SEQ ID NO: 2898; WAN024G59_at; Start 39; Stop 63
caacagggcagaggagacattctac

SEQ ID NO: 231643 - DNA, 25 bp, Artificial
  probe
  misc_feature (1)..(25): SEQ ID NO: 2898; WAN024G59_at; Start 118; Stop 142
tgtcaagctttccttaaacgaatcc

SEQ ID NO: 231644 - DNA, 25 bp, Artificial
  probe
  misc_feature (1)..(25): SEQ ID NO: 2898; WAN024G59_at; Start 68; Stop 92
gctatcgattgttggaagcctcttt

SEQ ID NO: 231645 - DNA, 25 bp, Artificial
  probe
  misc_feature (1)..(25): SEQ ID NO: 2898; WAN024G59_at; Start 114; Stop 138
gagctgtcaagctttccttaaacga

SEQ ID NO: 231646 - DNA, 25 bp, Artificial
  probe
  misc_feature (1)..(25): SEQ ID NO: 2898; WAN024G59_at; Start 73; Stop 97
cgattgttggaagcctctttttatt

SEQ ID NO: 231647 - DNA, 25 bp, Artificial
  probe
  misc_feature (1)..(25): SEQ ID NO: 2898; WAN024G59_at; Start 170; Stop 194
ctcattctaaacagtcaatcaaagg

SEQ ID NO: 231648 - DNA, 25 bp, Artificial
  probe
  misc_feature (1)..(25): SEQ ID NO: 2898; WAN024G59_at; Start 59; Stop 83
tctacatctgctatcgattgttgga

SEQ ID NO: 231649 - DNA, 25 bp, Artificial
  probe
  misc_feature (1)..(25): SEQ ID NO: 2898; WAN024G59_at; Start 204; Stop 228
taaaaaatccctcttgtcaacatga

SEQ ID NO: 231650 - DNA, 25 bp, Artificial
  probe
  misc_feature (1)..(25): SEQ ID NO: 2898; WAN024G59_at; Start 54; Stop 78
gacattctacatctgctatcgattg

SEQ ID NO: 231651 - DNA, 25 bp, Artificial
  probe
  misc_feature (1)..(25): SEQ ID NO: 2898; WAN024G59_at; Start 106; Stop 130
tacctgttgagctgtcaagctttcc

SEQ ID NO: 231652 - DNA, 25 bp, Artificial
  probe
  misc_feature (1)..(25): SEQ ID NO: 2898; WAN024G59_at; Start 159; Stop 183
tcatattttccctcattctaaacag

SEQ ID NO: 231653 - DNA, 25 bp, Artificial
  probe
  misc_feature (1)..(25): SEQ ID NO: 2898; WAN024G59_at; Start 124; Stop 148
gctttccttaaacgaatccggtgca

SEQ ID NO: 231654 - DNA, 25 bp, Artificial
  probe
  misc_feature (1)..(25): SEQ ID NO: 2898; WAN024G59_at; Start 137; Stop 161
gaatccggtgcaattacaatcttca

SEQ ID NO: 231655 - DNA, 25 bp, Artificial
  probe
  misc_feature (1)..(25): SEQ ID NO: 2898; WAN024G59_at; Start 92; Stop 116
tttattgcttcagctacctgttgag

SEQ ID NO: 231656 - DNA, 25 bp, Artificial
  probe
  misc_feature (1)..(25): SEQ ID NO: 2898; WAN024G59_at; Start 32; Stop 56
ccatcaccaacagggcagaggagac

SEQ ID NO: 231657 - DNA, 25 bp, Artificial
  probe
  misc_feature (1)..(25): SEQ ID NO: 2898; WAN024G59_at; Start 7; Stop 31
gatagcatctacagtaccttctccc

SEQ ID NO: 231658 - DNA, 25 bp, Artificial
  probe
  misc_feature (1)..(25): SEQ ID NO: 2898; WAN024G59_at; Start 162; Stop 186
tattttccctcattctaaacagtca

SEQ ID NO: 231659 - DNA, 25 bp, Artificial
  probe
  misc_feature (1)..(25): SEQ ID NO: 2898; WAN024G59_at; Start 47; Stop 71
cagaggagacattctacatctgcta

SEQ ID NO: 231660 - DNA, 25 bp, Artificial
  probe
  misc_feature (1)..(25): SEQ ID NO: 2898; WAN024G59_at; Start 77; Stop 101
tgttggaagcctctttttattgctt

SEQ ID NO: 231661 - DNA, 25 bp, Artificial
  probe
  misc_feature (1)..(25): SEQ ID NO: 2898; WAN024G59_at; Start 141; Stop 165
ccggtgcaattacaatcttcatatt

SEQ ID NO: 231662 - DNA, 25 bp, Artificial
  probe
  misc_feature (1)..(25): SEQ ID NO: 2898; WAN024G59_at; Start 98; Stop 122
gcttcagctacctgttgagctgtca

SEQ ID NO: 231663 - DNA, 25 bp, Artificial
  probe
  misc_feature (1)..(25): SEQ ID NO: 2898; WAN024G59_at; Start 37; Stop 61
accaacagggcagaggagacattct

SEQ ID NO: 231664 - DNA, 25 bp, Artificial
  probe
  misc_feature (1)..(25): SEQ ID NO: 2898; WAN024G59_at; Start 30; Stop 54
ccccatcaccaacagggcagaggag

SEQ ID NO: 231665 - DNA, 25 bp, Artificial
  probe
  misc_feature (1)..(25): SEQ ID NO: 2898; WAN024G59_at; Start 94; Stop 118
tattgcttcagctacctgttgagct

SEQ ID NO: 231666 - DNA, 25 bp, Artificial
  probe
  misc_feature (1)..(25): SEQ ID NO: 2898; WAN024G59_at; Start 101; Stop 125
tcagctacctgttgagctgtcaagc

SEQ ID NO: 231667 - DNA, 25 bp, Artificial
  probe
  misc_feature (1)..(25): SEQ ID NO: 2898; WAN024G59_at; Start 132; Stop 156
taaacgaatccggtgcaattacaat

SEQ ID NO: 231668 - DNA, 25 bp, Artificial
  probe
  misc_feature (1)..(25): SEQ ID NO: 2898; WAN024G59_at; Start 63; Stop 87
catctgctatcgattgttggaagcc

SEQ ID NO: 231669 - DNA, 25 bp, Artificial
  probe
  misc_feature (1)..(25): SEQ ID NO: 2898; WAN024G59_at; Start 65; Stop 89
tctgctatcgattgttggaagcctc

SEQ ID NO: 231670 - DNA, 25 bp, Artificial
  probe
  misc_feature (1)..(25): SEQ ID NO: 3465; WAN024G5A_at; Start 475; Stop 499
tatgatagggatggaaatgtcttgc

SEQ ID NO: 231671 - DNA, 25 bp, Artificial
  probe
  misc_feature (1)..(25): SEQ ID NO: 3465; WAN024G5A_at; Start 591; Stop 615
agatgtcgtgagtcccttatgtggt

SEQ ID NO: 231672 - DNA, 25 bp, Artificial
  probe
  misc_feature (1)..(25): SEQ ID NO: 3465; WAN024G5A_at; Start 568; Stop 592
ggtgttcaaattcatattttagcag

SEQ ID NO: 231673 - DNA, 25 bp, Artificial
  probe
  misc_feature (1)..(25): SEQ ID NO: 3465; WAN024G5A_at; Start 682; Stop 706
gatcaggcgatccaagatttttatg

SEQ ID NO: 231674 - DNA, 25 bp, Artificial
  probe
  misc_feature (1)..(25): SEQ ID NO: 3465; WAN024G5A_at; Start 715; Stop 739
tcacctgcaacattagaaattaaag

SEQ ID NO: 231675 - DNA, 25 bp, Artificial
  probe
  misc_feature (1)..(25): SEQ ID NO: 3465; WAN024G5A_at; Start 699; Stop 723
tttttatgaaaaattctcacctgca

SEQ ID NO: 231676 - DNA, 25 bp, Artificial
  probe
  misc_feature (1)..(25): SEQ ID NO: 3465; WAN024G5A_at; Start 618; Stop 642
tcaaggtgcgacttacacttttggc

SEQ ID NO: 231677 - DNA, 25 bp, Artificial
  probe
  misc_feature (1)..(25): SEQ ID NO: 3465; WAN024G5A_at; Start 625; Stop 649
gcgacttacacttttggcaatcaaa

SEQ ID NO: 231678 - DNA, 25 bp, Artificial
  probe
  misc_feature (1)..(25): SEQ ID NO: 3465; WAN024G5A_at; Start 557; Stop 581
aaattcctgaaggtgttcaaattca

SEQ ID NO: 231679 - DNA, 25 bp, Artificial
  probe
  misc_feature (1)..(25): SEQ ID NO: 3465; WAN024G5A_at; Start 640; Stop 664
ggcaatcaaaaaggtctacatccga

SEQ ID NO: 231680 - DNA, 25 bp, Artificial
  probe
  misc_feature (1)..(25): SEQ ID NO: 3465; WAN024G5A_at; Start 488; Stop 512
gaaatgtcttgcctgcttccggtca

SEQ ID NO: 231681 - DNA, 25 bp, Artificial
  probe
  misc_feature (1)..(25): SEQ ID NO: 3465; WAN024G5A_at; Start 674; Stop 698
cagtcgtagatcaggcgatccaaga

SEQ ID NO: 231682 - DNA, 25 bp, Artificial
  probe
  misc_feature (1)..(25): SEQ ID NO: 3465; WAN024G5A_at; Start 480; Stop 504
tagggatggaaatgtcttgcctgct

SEQ ID NO: 231683 - DNA, 25 bp, Artificial
  probe
  misc_feature (1)..(25): SEQ ID NO: 3465; WAN024G5A_at; Start 582; Stop 606
tattttagcagatgtcgtgagtccc

SEQ ID NO: 231684 - DNA, 25 bp, Artificial
  probe
  misc_feature (1)..(25): SEQ ID NO: 3465; WAN024G5A_at; Start 484; Stop 508
gatggaaatgtcttgcctgcttccg

SEQ ID NO: 231685 - DNA, 25 bp, Artificial
  probe
  misc_feature (1)..(25): SEQ ID NO: 3465; WAN024G5A_at; Start 706; Stop 730
gaaaaattctcacctgcaacattag

SEQ ID NO: 231686 - DNA, 25 bp, Artificial
  probe
  misc_feature (1)..(25): SEQ ID NO: 3465; WAN024G5A_at; Start 645; Stop 669
tcaaaaaggtctacatccgactatg

SEQ ID NO: 231687 - DNA, 25 bp, Artificial
  probe
  misc_feature (1)..(25): SEQ ID NO: 3465; WAN024G5A_at; Start 670; Stop 694
tttgcagtcgtagatcaggcgatcc

SEQ ID NO: 231688 - DNA, 25 bp, Artificial
  probe
  misc_feature (1)..(25): SEQ ID NO: 3465; WAN024G5A_at; Start 461; Stop 485
taggttatcaattttatgataggga

SEQ ID NO: 231689 - DNA, 25 bp, Artificial
  probe
  misc_feature (1)..(25): SEQ ID NO: 3465; WAN024G5A_at; Start 620; Stop 644
aaggtgcgacttacacttttggcaa

SEQ ID NO: 231690 - DNA, 25 bp, Artificial
  probe
  misc_feature (1)..(25): SEQ ID NO: 3465; WAN024G5A_at; Start 652; Stop 676
ggtctacatccgactatgtttgcag

SEQ ID NO: 231691 - DNA, 25 bp, Artificial
  probe
  misc_feature (1)..(25): SEQ ID NO: 3465; WAN024G5A_at; Start 637; Stop 661
tttggcaatcaaaaaggtctacatc

SEQ ID NO: 231692 - DNA, 25 bp, Artificial
  probe
  misc_feature (1)..(25): SEQ ID NO: 3465; WAN024G5A_at; Start 740; Stop 764
gagcaggagcaggtggaggccttgc

SEQ ID NO: 231693 - DNA, 25 bp, Artificial
  probe
  misc_feature (1)..(25): SEQ ID NO: 3465; WAN024G5A_at; Start 498; Stop 522
gcctgcttccggtcaatccttatta

SEQ ID NO: 231694 - DNA, 25 bp, Artificial
  probe
  misc_feature (1)..(25): SEQ ID NO: 3465; WAN024G5A_at; Start 492; Stop 516
tgtcttgcctgcttccggtcaatcc

SEQ ID NO: 231695 - DNA, 25 bp, Artificial
  probe
  misc_feature (1)..(25): SEQ ID NO: 3465; WAN024G5A_at; Start 758; Stop 782
gccttgctggtggtttgtgtgcctt

SEQ ID NO: 231696 - DNA, 25 bp, Artificial
  probe
  misc_feature (1)..(25): SEQ ID NO: 3465; WAN024G5A_at; Start 507; Stop 531
cggtcaatccttattaaacttagct

SEQ ID NO: 231697 - DNA, 25 bp, Artificial
  probe
  misc_feature (1)..(25): SEQ ID NO: 3465; WAN024G5A_at; Start 666; Stop 690
tatgtttgcagtcgtagatcaggcg

SEQ ID NO: 231698 - DNA, 25 bp, Artificial
  probe
  misc_feature (1)..(25): SEQ ID NO: 3465; WAN024G5A_at; Start 685; Stop 709
caggcgatccaagatttttatgaaa

SEQ ID NO: 231699 - DNA, 25 bp, Artificial
  probe
  misc_feature (1)..(25): SEQ ID NO: 3465; WAN024G5A_at; Start 551; Stop 575
gctataaaattcctgaaggtgttca

SEQ ID NO: 231700 - DNA, 25 bp, Artificial
  probe
  misc_feature (1)..(25): SEQ ID NO: 3465; WAN024G5A_at; Start 521; Stop 545
taaacttagcttctgtttcaacaga

SEQ ID NO: 231701 - DNA, 25 bp, Artificial
  probe
  misc_feature (1)..(25): SEQ ID NO: 3465; WAN024G5A_at; Start 728; Stop 752
tagaaattaaaggagcaggagcagg

SEQ ID NO: 231702 - DNA, 25 bp, Artificial
  probe
  misc_feature (1)..(25): SEQ ID NO: 3465; WAN024G5A_at; Start 447; Stop 471
gattgctgctggtttaggttatcaa

SEQ ID NO: 231703 - DNA, 25 bp, Artificial
  probe
  misc_feature (1)..(25): SEQ ID NO: 3465; WAN024G5A_at; Start 587; Stop 611
tagcagatgtcgtgagtcccttatg

SEQ ID NO: 231704 - DNA, 25 bp, Artificial
  probe
  misc_feature (1)..(25): SEQ ID NO: 3371; WAN024G5B_at; Start 40; Stop 64
gatggaaccttaatcctagaagaag

SEQ ID NO: 231705 - DNA, 25 bp, Artificial
  probe
  misc_feature (1)..(25): SEQ ID NO: 3371; WAN024G5B_at; Start 74; Stop 98
ttttagggagagaggcaggtcatga

SEQ ID NO: 231706 - DNA, 25 bp, Artificial
  probe
  misc_feature (1)..(25): SEQ ID NO: 3371; WAN024G5B_at; Start 34; Stop 58
gatgtagatggaaccttaatcctag

SEQ ID NO: 231707 - DNA, 25 bp, Artificial
  probe
  misc_feature (1)..(25): SEQ ID NO: 3371; WAN024G5B_at; Start 128; Stop 152
caatgcgaggagagttggtctttga

SEQ ID NO: 231708 - DNA, 25 bp, Artificial
  probe
  misc_feature (1)..(25): SEQ ID NO: 3371; WAN024G5B_at; Start 47; Stop 71
ccttaatcctagaagaagtgattga

SEQ ID NO: 231709 - DNA, 25 bp, Artificial
  probe
  misc_feature (1)..(25): SEQ ID NO: 3371; WAN024G5B_at; Start 250; Stop 274
gagttcatctctattctccaaaaga

SEQ ID NO: 231710 - DNA, 25 bp, Artificial
  probe
  misc_feature (1)..(25): SEQ ID NO: 3371; WAN024G5B_at; Start 301; Stop 325
ggtggatttacaccaatagttggag

SEQ ID NO: 231711 - DNA, 25 bp, Artificial
  probe
  misc_feature (1)..(25): SEQ ID NO: 3371; WAN024G5B_at; Start 172; Stop 196
gtgtccttgttggaaggtcttccta

SEQ ID NO: 231712 - DNA, 25 bp, Artificial
  probe
  misc_feature (1)..(25): SEQ ID NO: 3371; WAN024G5B_at; Start 214; Stop 238
gtcttcaactcaattcatctatcgc

SEQ ID NO: 231713 - DNA, 25 bp, Artificial
  probe
  misc_feature (1)..(25): SEQ ID NO: 3371; WAN024G5B_at; Start 91; Stop 115
ggtcatgaggcggaaatttcgcaga

SEQ ID NO: 231714 - DNA, 25 bp, Artificial
  probe
  misc_feature (1)..(25): SEQ ID NO: 3371; WAN024G5B_at; Start 133; Stop 157
cgaggagagttggtctttgaaagca

SEQ ID NO: 231715 - DNA, 25 bp, Artificial
  probe
  misc_feature (1)..(25): SEQ ID NO: 3371; WAN024G5B_at; Start 201; Stop 225
ggtctttgataacgtcttcaactca

SEQ ID NO: 231716 - DNA, 25 bp, Artificial
  probe
  misc_feature (1)..(25): SEQ ID NO: 3371; WAN024G5B_at; Start 261; Stop 285
tattctccaaaagaatggcatccta

SEQ ID NO: 231717 - DNA, 25 bp, Artificial
  probe
  misc_feature (1)..(25): SEQ ID NO: 3371; WAN024G5B_at; Start 228; Stop 252
tcatctatcgctaaatgtcccagag

SEQ ID NO: 231718 - DNA, 25 bp, Artificial
  probe
  misc_feature (1)..(25): SEQ ID NO: 3371; WAN024G5B_at; Start 208; Stop 232
gataacgtcttcaactcaattcatc

SEQ ID NO: 231719 - DNA, 25 bp, Artificial
  probe
  misc_feature (1)..(25): SEQ ID NO: 3371; WAN024G5B_at; Start 310; Stop 334
acaccaatagttggagagattagca

SEQ ID NO: 231720 - DNA, 25 bp, Artificial
  probe
  misc_feature (1)..(25): SEQ ID NO: 3371; WAN024G5B_at; Start 192; Stop 216
tcctattttggtctttgataacgtc

SEQ ID NO: 231721 - DNA, 25 bp, Artificial
  probe
  misc_feature (1)..(25): SEQ ID NO: 3371; WAN024G5B_at; Start 291; Stop 315
tctggtgtctggtggatttacacca

SEQ ID NO: 231722 - DNA, 25 bp, Artificial
  probe
  misc_feature (1)..(25): SEQ ID NO: 3371; WAN024G5B_at; Start 5; Stop 29
tgtctcaagtaaaaggcttgtgtgt

SEQ ID NO: 231723 - DNA, 25 bp, Artificial
  probe
  misc_feature (1)..(25): SEQ ID NO: 3371; WAN024G5B_at; Start 141; Stop 165
gttggtctttgaaagcagtttaaga

SEQ ID NO: 231724 - DNA, 25 bp, Artificial
  probe
  misc_feature (1)..(25): SEQ ID NO: 3371; WAN024G5B_at; Start 86; Stop 110
aggcaggtcatgaggcggaaatttc

SEQ ID NO: 231725 - DNA, 25 bp, Artificial
  probe
  misc_feature (1)..(25): SEQ ID NO: 3371; WAN024G5B_at; Start 156; Stop 180
cagtttaagaaaaagagtgtccttg

SEQ ID NO: 231726 - DNA, 25 bp, Artificial
  probe
  misc_feature (1)..(25): SEQ ID NO: 3371; WAN024G5B_at; Start 265; Stop 289
ctccaaaagaatggcatcctagttg

SEQ ID NO: 231727 - DNA, 25 bp, Artificial
  probe
  misc_feature (1)..(25): SEQ ID NO: 3371; WAN024G5B_at; Start 43; Stop 67
ggaaccttaatcctagaagaagtga

SEQ ID NO: 231728 - DNA, 25 bp, Artificial
  probe
  misc_feature (1)..(25): SEQ ID NO: 3371; WAN024G5B_at; Start 237; Stop 261
gctaaatgtcccagagttcatctct

SEQ ID NO: 231729 - DNA, 25 bp, Artificial
  probe
  misc_feature (1)..(25): SEQ ID NO: 3371; WAN024G5B_at; Start 161; Stop 185
taagaaaaagagtgtccttgttgga

SEQ ID NO: 231730 - DNA, 25 bp, Artificial
  probe
  misc_feature (1)..(25): SEQ ID NO: 3371; WAN024G5B_at; Start 232; Stop 256
ctatcgctaaatgtcccagagttca

SEQ ID NO: 231731 - DNA, 25 bp, Artificial
  probe
  misc_feature (1)..(25): SEQ ID NO: 3371; WAN024G5B_at; Start 187; Stop 211
ggtcttcctattttggtctttgata

SEQ ID NO: 231732 - DNA, 25 bp, Artificial
  probe
  misc_feature (1)..(25): SEQ ID NO: 3371; WAN024G5B_at; Start 97; Stop 121
gaggcggaaatttcgcagattacaa

SEQ ID NO: 231733 - DNA, 25 bp, Artificial
  probe
  misc_feature (1)..(25): SEQ ID NO: 3371; WAN024G5B_at; Start 17; Stop 41
aaggcttgtgtgttttggatgtaga

SEQ ID NO: 231734 - DNA, 25 bp, Artificial
  probe
  misc_feature (1)..(25): SEQ ID NO: 3371; WAN024G5B_at; Start 101; Stop 125
cggaaatttcgcagattacaagtcg

SEQ ID NO: 231735 - DNA, 25 bp, Artificial
  probe
  misc_feature (1)..(25): SEQ ID NO: 3371; WAN024G5B_at; Start 1; Stop 25
ctgatgtctcaagtaaaaggcttgt

SEQ ID NO: 231736 - DNA, 25 bp, Artificial
  probe
  misc_feature (1)..(25): SEQ ID NO: 3371; WAN024G5B_at; Start 170; Stop 194
gagtgtccttgttggaaggtcttcc

SEQ ID NO: 231737 - DNA, 25 bp, Artificial
  probe
  misc_feature (1)..(25): SEQ ID NO: 3371; WAN024G5B_at; Start 25; Stop 49
tgtgttttggatgtagatggaacct

SEQ ID NO: 231738 - DNA, 25 bp, Artificial
  probe
  misc_feature (1)..(25): SEQ ID NO: 5458; WAN024G5C_at; Start 86; Stop 110
tagttggacaaattataagtcccca

SEQ ID NO: 231739 - DNA, 25 bp, Artificial
  probe
  misc_feature (1)..(25): SEQ ID NO: 5458; WAN024G5C_at; Start 77; Stop 101
caggaaaattagttggacaaattat

SEQ ID NO: 231740 - DNA, 25 bp, Artificial
  probe
  misc_feature (1)..(25): SEQ ID NO: 5458; WAN024G5C_at; Start 91; Stop 115
ggacaaattataagtccccaggtca

SEQ ID NO: 231741 - DNA, 25 bp, Artificial
  probe
  misc_feature (1)..(25): SEQ ID NO: 5458; WAN024G5C_at; Start 90; Stop 114
tggacaaattataagtccccaggtc

SEQ ID NO: 231742 - DNA, 25 bp, Artificial
  probe
  misc_feature (1)..(25): SEQ ID NO: 5458; WAN024G5C_at; Start 87; Stop 111
agttggacaaattataagtccccag

SEQ ID NO: 231743 - DNA, 25 bp, Artificial
  probe
  misc_feature (1)..(25): SEQ ID NO: 5458; WAN024G5C_at; Start 50; Stop 74
agcttgaagtcaaagaaggtctttt

SEQ ID NO: 231744 - DNA, 25 bp, Artificial
  probe
  misc_feature (1)..(25): SEQ ID NO: 5458; WAN024G5C_at; Start 92; Stop 116
gacaaattataagtccccaggtcaa

SEQ ID NO: 231745 - DNA, 25 bp, Artificial
  probe
  misc_feature (1)..(25): SEQ ID NO: 4890; WAN024G5D_at; Start 22; Stop 46
gaatacctgccttcatccagttcag

SEQ ID NO: 231746 - DNA, 25 bp, Artificial
  probe
  misc_feature (1)..(25): SEQ ID NO: 4890; WAN024G5D_at; Start 161; Stop 185
aactgtttcaatgtcctcataggct

SEQ ID NO: 231747 - DNA, 25 bp, Artificial
  probe
  misc_feature (1)..(25): SEQ ID NO: 4890; WAN024G5D_at; Start 169; Stop 193
caatgtcctcataggcttgaatcca

SEQ ID NO: 231748 - DNA, 25 bp, Artificial
  probe
  misc_feature (1)..(25): SEQ ID NO: 4890; WAN024G5D_at; Start 158; Stop 182
taaaactgtttcaatgtcctcatag

SEQ ID NO: 231749 - DNA, 25 bp, Artificial
  probe
  misc_feature (1)..(25): SEQ ID NO: 4890; WAN024G5D_at; Start 10; Stop 34
ggttcgcatagagaatacctgcctt

SEQ ID NO: 231750 - DNA, 25 bp, Artificial
  probe
  misc_feature (1)..(25): SEQ ID NO: 4890; WAN024G5D_at; Start 141; Stop 165
tctaaattatgaatggttaaaactg

SEQ ID NO: 231751 - DNA, 25 bp, Artificial
  probe
  misc_feature (1)..(25): SEQ ID NO: 4890; WAN024G5D_at; Start 72; Stop 96
tcagcgtaacgttcaaagccaactc

SEQ ID NO: 231752 - DNA, 25 bp, Artificial
  probe
  misc_feature (1)..(25): SEQ ID NO: 4890; WAN024G5D_at; Start 81; Stop 105
cgttcaaagccaactccaaacaaat

SEQ ID NO: 231753 - DNA, 25 bp, Artificial
  probe
  misc_feature (1)..(25): SEQ ID NO: 4890; WAN024G5D_at; Start 178; Stop 202
cataggcttgaatccaacggtattt

SEQ ID NO: 231754 - DNA, 25 bp, Artificial
  probe
  misc_feature (1)..(25): SEQ ID NO: 4890; WAN024G5D_at; Start 59; Stop 83
tcgaagggtgccatcagcgtaacgt

SEQ ID NO: 231755 - DNA, 25 bp, Artificial
  probe
  misc_feature (1)..(25): SEQ ID NO: 4890; WAN024G5D_at; Start 18; Stop 42
tagagaatacctgccttcatccagt

SEQ ID NO: 231756 - DNA, 25 bp, Artificial
  probe
  misc_feature (1)..(25): SEQ ID NO: 4890; WAN024G5D_at; Start 4; Stop 28
aaacacggttcgcatagagaatacc

SEQ ID NO: 231757 - DNA, 25 bp, Artificial
  probe
  misc_feature (1)..(25): SEQ ID NO: 4890; WAN024G5D_at; Start 186; Stop 210
tgaatccaacggtatttttccttca

SEQ ID NO: 231758 - DNA, 25 bp, Artificial
  probe
  misc_feature (1)..(25): SEQ ID NO: 4890; WAN024G5D_at; Start 174; Stop 198
tcctcataggcttgaatccaacggt

SEQ ID NO: 231759 - DNA, 25 bp, Artificial
  probe
  misc_feature (1)..(25): SEQ ID NO: 4890; WAN024G5D_at; Start 120; Stop 144
tctgaaaattgtccttggaattcta

SEQ ID NO: 231760 - DNA, 25 bp, Artificial
  probe
  misc_feature (1)..(25): SEQ ID NO: 4890; WAN024G5D_at; Start 34; Stop 58
tcatccagttcagacagttgttcca

SEQ ID NO: 231761 - DNA, 25 bp, Artificial
  probe
  misc_feature (1)..(25): SEQ ID NO: 4890; WAN024G5D_at; Start 56; Stop 80
ccatcgaagggtgccatcagcgtaa

SEQ ID NO: 231762 - DNA, 25 bp, Artificial
  probe
  misc_feature (1)..(25): SEQ ID NO: 4890; WAN024G5D_at; Start 38; Stop 62
ccagttcagacagttgttccatcga

SEQ ID NO: 231763 - DNA, 25 bp, Artificial
  probe
  misc_feature (1)..(25): SEQ ID NO: 4890; WAN024G5D_at; Start 113; Stop 137
cattccttctgaaaattgtccttgg

SEQ ID NO: 231764 - DNA, 25 bp, Artificial
  probe
  misc_feature (1)..(25): SEQ ID NO: 4890; WAN024G5D_at; Start 75; Stop 99
gcgtaacgttcaaagccaactccaa

SEQ ID NO: 231765 - DNA, 25 bp, Artificial
  probe
  misc_feature (1)..(25): SEQ ID NO: 4890; WAN024G5D_at; Start 62; Stop 86
aagggtgccatcagcgtaacgttca

SEQ ID NO: 231766 - DNA, 25 bp, Artificial
  probe
  misc_feature (1)..(25): SEQ ID NO: 4890; WAN024G5D_at; Start 46; Stop 70
gacagttgttccatcgaagggtgcc

SEQ ID NO: 231767 - DNA, 25 bp, Artificial
  probe
  misc_feature (1)..(25): SEQ ID NO: 4890; WAN024G5D_at; Start 1; Stop 25
ttgaaacacggttcgcatagagaat

SEQ ID NO: 231768 - DNA, 25 bp, Artificial
  probe
  misc_feature (1)..(25): SEQ ID NO: 4890; WAN024G5D_at; Start 204; Stop 228
tccttcaacaagaaaggaatcatag

SEQ ID NO: 231769 - DNA, 25 bp, Artificial
  probe
  misc_feature (1)..(25): SEQ ID NO: 4890; WAN024G5D_at; Start 129; Stop 153
tgtccttggaattctaaattatgaa

SEQ ID NO: 231770 - DNA, 25 bp, Artificial
  probe
  misc_feature (1)..(25): SEQ ID NO: 4890; WAN024G5D_at; Start 99; Stop 123
aacaaatcacccaacattccttctg

SEQ ID NO: 231771 - DNA, 25 bp, Artificial
  probe
  misc_feature (1)..(25): SEQ ID NO: 4890; WAN024G5D_at; Start 43; Stop 67
tcagacagttgttccatcgaagggt

SEQ ID NO: 231772 - DNA, 25 bp, Artificial
  probe
  misc_feature (1)..(25): SEQ ID NO: 4890; WAN024G5D_at; Start 7; Stop 31
cacggttcgcatagagaatacctgc

SEQ ID NO: 231773 - DNA, 25 bp, Artificial
  probe
  misc_feature (1)..(25): SEQ ID NO: 4890; WAN024G5D_at; Start 84; Stop 108
tcaaagccaactccaaacaaatcac

SEQ ID NO: 231774 - DNA, 25 bp, Artificial
  probe
  misc_feature (1)..(25): SEQ ID NO: 4890; WAN024G5D_at; Start 48; Stop 72
cagttgttccatcgaagggtgccat

SEQ ID NO: 231775 - DNA, 25 bp, Artificial
  probe
  misc_feature (1)..(25): SEQ ID NO: 4890; WAN024G5D_at; Start 68; Stop 92
gccatcagcgtaacgttcaaagcca

SEQ ID NO: 231776 - DNA, 25 bp, Artificial
  probe
  misc_feature (1)..(25): SEQ ID NO: 4890; WAN024G5D_at; Start 65; Stop 89
ggtgccatcagcgtaacgttcaaag

SEQ ID NO: 231777 - DNA, 25 bp, Artificial
  probe
  misc_feature (1)..(25): SEQ ID NO: 4890; WAN024G5D_at; Start 52; Stop 76
tgttccatcgaagggtgccatcagc

SEQ ID NO: 231778 - DNA, 25 bp, Artificial
  probe
  misc_feature (1)..(25): SEQ ID NO: 4890; WAN024G5D_at; Start 29; Stop 53
tgccttcatccagttcagacagttg

SEQ ID NO: 231779 - DNA, 25 bp, Artificial
  probe
  misc_feature (1)..(25): SEQ ID NO: 797; WAN024G5E_at; Start 565; Stop 589
gatggcacccttcgatggaacaact

SEQ ID NO: 231780 - DNA, 25 bp, Artificial
  probe
  misc_feature (1)..(25): SEQ ID NO: 797; WAN024G5E_at; Start 1351; Stop 1375
caaaaacaagctatggagagtgact

SEQ ID NO: 231781 - DNA, 25 bp, Artificial
  probe
  misc_feature (1)..(25): SEQ ID NO: 797; WAN024G5E_at; Start 1230; Stop 1254
tccaatcgaaggaagcggtactggc

SEQ ID NO: 231782 - DNA, 25 bp, Artificial
  probe
  misc_feature (1)..(25): SEQ ID NO: 797; WAN024G5E_at; Start 1115; Stop 1139
tcatgccaagtcgttttgaaccgtg

SEQ ID NO: 231783 - DNA, 25 bp, Artificial
  probe
  misc_feature (1)..(25): SEQ ID NO: 797; WAN024G5E_at; Start 335; Stop 359
aactggctgccattgaggctatgga

SEQ ID NO: 231784 - DNA, 25 bp, Artificial
  probe
  misc_feature (1)..(25): SEQ ID NO: 797; WAN024G5E_at; Start 720; Stop 744
taaagtatctggtatcgtgaatggg

SEQ ID NO: 231785 - DNA, 25 bp, Artificial
  probe
  misc_feature (1)..(25): SEQ ID NO: 797; WAN024G5E_at; Start 451; Stop 475
caagcctatgaggacattgaaacag

SEQ ID NO: 231786 - DNA, 25 bp, Artificial
  probe
  misc_feature (1)..(25): SEQ ID NO: 797; WAN024G5E_at; Start 1327; Stop 1351
catccagacatttggagaaacctac

SEQ ID NO: 231787 - DNA, 25 bp, Artificial
  probe
  misc_feature (1)..(25): SEQ ID NO: 797; WAN024G5E_at; Start 585; Stop 609
caactgtctgaactggatgaaggca

SEQ ID NO: 231788 - DNA, 25 bp, Artificial
  probe
  misc_feature (1)..(25): SEQ ID NO: 797; WAN024G5E_at; Start 1372; Stop 1396
gacttctcatgggatacagcctgca

SEQ ID NO: 231789 - DNA, 25 bp, Artificial
  probe
  misc_feature (1)..(25): SEQ ID NO: 797; WAN024G5E_at; Start 1171; Stop 1195
ggaaccttgccattggtccatgaag

SEQ ID NO: 231790 - DNA, 25 bp, Artificial
  probe
  misc_feature (1)..(25): SEQ ID NO: 797; WAN024G5E_at; Start 990; Stop 1014
tggcgatccagcctttgaaggagct

SEQ ID NO: 231791 - DNA, 25 bp, Artificial
  probe
  misc_feature (1)..(25): SEQ ID NO: 797; WAN024G5E_at; Start 11; Stop 35
tatttgtagcagcagagggtgcacc

SEQ ID NO: 231792 - DNA, 25 bp, Artificial
  probe
  misc_feature (1)..(25): SEQ ID NO: 797; WAN024G5E_at; Start 54; Stop 78
tttgggagacgtcattggcgctctt

SEQ ID NO: 231793 - DNA, 25 bp, Artificial
  probe
  misc_feature (1)..(25): SEQ ID NO: 797; WAN024G5E_at; Start 1188; Stop 1212
ccatgaagttggaggcttgcgagat

SEQ ID NO: 231794 - DNA, 25 bp, Artificial
  probe
  misc_feature (1)..(25): SEQ ID NO: 797; WAN024G5E_at; Start 1018; Stop 1042
tcatggtttgctcagatttacccag

SEQ ID NO: 231795 - DNA, 25 bp, Artificial
  probe
  misc_feature (1)..(25): SEQ ID NO: 797; WAN024G5E_at; Start 1386; Stop 1410
tacagcctgcaagtcataccttgac

SEQ ID NO: 231796 - DNA, 25 bp, Artificial
  probe
  misc_feature (1)..(25): SEQ ID NO: 797; WAN024G5E_at; Start 1152; Stop 1176
aatgatggctatgcgttatggaacc

SEQ ID NO: 231797 - DNA, 25 bp, Artificial
  probe
  misc_feature (1)..(25): SEQ ID NO: 797; WAN024G5E_at; Start 69; Stop 93
tggcgctcttccaaaatcactggta

SEQ ID NO: 231798 - DNA, 25 bp, Artificial
  probe
  misc_feature (1)..(25): SEQ ID NO: 797; WAN024G5E_at; Start 890; Stop 914
gaattgtttctcgtttgacacgtca

SEQ ID NO: 231799 - DNA, 25 bp, Artificial
  probe
  misc_feature (1)..(25): SEQ ID NO: 797; WAN024G5E_at; Start 551; Stop 575
ttgaacgttacgctgatggcaccct

SEQ ID NO: 231800 - DNA, 25 bp, Artificial
  probe
  misc_feature (1)..(25): SEQ ID NO: 797; WAN024G5E_at; Start 105; Stop 129
cgaagttgcagtgattttaccctac

SEQ ID NO: 231801 - DNA, 25 bp, Artificial
  probe
  misc_feature (1)..(25): SEQ ID NO: 797; WAN024G5E_at; Start 303; Stop 327
ttttgatgacggagaacgctttgcc

SEQ ID NO: 231802 - DNA, 25 bp, Artificial
  probe
  misc_feature (1)..(25): SEQ ID NO: 797; WAN024G5E_at; Start 925; Stop 949
gatgtggtggtcgaaagtcttcacc

SEQ ID NO: 231803 - DNA, 25 bp, Artificial
  probe
  misc_feature (1)..(25): SEQ ID NO: 797; WAN024G5E_at; Start 603; Stop 627
gaaggcaggtattctctatgcgaac

SEQ ID NO: 231804 - DNA, 25 bp, Artificial
  probe
  misc_feature (1)..(25): SEQ ID NO: 797; WAN024G5E_at; Start 1311; Stop 1335
ggacttgtatagaaaccatccagac

SEQ ID NO: 231805 - DNA, 25 bp, Artificial
  probe
  misc_feature (1)..(25): SEQ ID NO: 797; WAN024G5E_at; Start 1087; Stop 1111
gaaatctacgctgcttgtgacctct

SEQ ID NO: 231806 - DNA, 25 bp, Artificial
  probe
  misc_feature (1)..(25): SEQ ID NO: 797; WAN024G5E_at; Start 813; Stop 837
gtctgggaaagccaaaaataaggca

SEQ ID NO: 231807 - DNA, 25 bp, Artificial
  probe
  misc_feature (1)..(25): SEQ ID NO: 797; WAN024G5E_at; Start 1073; Stop 1097
tcaaacttgctcaggaaatctacgc

SEQ ID NO: 231808 - DNA, 25 bp, Artificial
  probe
  misc_feature (1)..(25): SEQ ID NO: 797; WAN024G5E_at; Start 1244; Stop 1268
gcggtactggctttagctttgacaa

SEQ ID NO: 231809 - DNA, 25 bp, Artificial
  probe
  misc_feature (1)..(25): SEQ ID NO: 797; WAN024G5E_at; Start 85; Stop 109
tcactggtaaaagctgggcacgaag

SEQ ID NO: 231810 - DNA, 25 bp, Artificial
  probe
  misc_feature (1)..(25): SEQ ID NO: 797; WAN024G5E_at; Start 975; Stop 999
tgttcttttgggaactggcgatcca

SEQ ID NO: 231811 - DNA, 25 bp, Artificial
  probe
  misc_feature (1)..(25): SEQ ID NO: 797; WAN024G5E_at; Start 390; Stop 414
tgttcatgactaccatacagctatg

SEQ ID NO: 231812 - DNA, 25 bp, Artificial
  probe
  misc_feature (1)..(25): SEQ ID NO: 797; WAN024G5E_at; Start 766; Stop 790
cctcagacggatgctcttttagact

SEQ ID NO: 231813 - DNA, 25 bp, Artificial
  probe
  misc_feature (1)..(25): SEQ ID NO: 6762; WAN024G5F_at; Start 1519; Stop 1543
gattggattaccaaccatggtgacc

SEQ ID NO: 231814 - DNA, 25 bp, Artificial
  probe
  misc_feature (1)..(25): SEQ ID NO: 6762; WAN024G5F_at; Start 729; Stop 753
tcatgcccatcgagcggaaaaagcg

SEQ ID NO: 231815 - DNA, 25 bp, Artificial
  probe
  misc_feature (1)..(25): SEQ ID NO: 6762; WAN024G5F_at; Start 826; Stop 850
ggctcaactatctttgacggttcag

SEQ ID NO: 231816 - DNA, 25 bp, Artificial
  probe
  misc_feature (1)..(25): SEQ ID NO: 6762; WAN024G5F_at; Start 1363; Stop 1387
cctgtaacagaccaatacggagttc

SEQ ID NO: 231817 - DNA, 25 bp, Artificial
  probe
  misc_feature (1)..(25): SEQ ID NO: 6762; WAN024G5F_at; Start 898; Stop 922
aatgactcagctttatggacgttcg

SEQ ID NO: 231818 - DNA, 25 bp, Artificial
  probe
  misc_feature (1)..(25): SEQ ID NO: 6762; WAN024G5F_at; Start 1263; Stop 1287
tagcgggatattactggaggacttt

SEQ ID NO: 231819 - DNA, 25 bp, Artificial
  probe
  misc_feature (1)..(25): SEQ ID NO: 6762; WAN024G5F_at; Start 1006; Stop 1030
gataggattccatcagatgcagagg

SEQ ID NO: 231820 - DNA, 25 bp, Artificial
  probe
  misc_feature (1)..(25): SEQ ID NO: 6762; WAN024G5F_at; Start 1150; Stop 1174
cacattacagatggtgttccgacta

SEQ ID NO: 231821 - DNA, 25 bp, Artificial
  probe
  misc_feature (1)..(25): SEQ ID NO: 6762; WAN024G5F_at; Start 1560; Stop 1584
taacggaaatatggctcaggatggc

SEQ ID NO: 231822 - DNA, 25 bp, Artificial
  probe
  misc_feature (1)..(25): SEQ ID NO: 6762; WAN024G5F_at; Start 1875; Stop 1899
tagttcgttggtgaataatgtccct

SEQ ID NO: 231823 - DNA, 25 bp, Artificial
  probe
  misc_feature (1)..(25): SEQ ID NO: 6762; WAN024G5F_at; Start 1436; Stop 1460
cagcgggatataggttctatggaac

SEQ ID NO: 231824 - DNA, 25 bp, Artificial
  probe
  misc_feature (1)..(25): SEQ ID NO: 6762; WAN024G5F_at; Start 757; Stop 781
gaagcgacacgagcccttgtagata

SEQ ID NO: 231825 - DNA, 25 bp, Artificial
  probe
  misc_feature (1)..(25): SEQ ID NO: 6762; WAN024G5F_at; Start 841; Stop 865
gacggttcagaagctactgtggaaa

SEQ ID NO: 231826 - DNA, 25 bp, Artificial
  probe
  misc_feature (1)..(25): SEQ ID NO: 6762; WAN024G5F_at; Start 1109; Stop 1133
tgacaaagcaggcaagaccaaacag

SEQ ID NO: 231827 - DNA, 25 bp, Artificial
  probe
  misc_feature (1)..(25): SEQ ID NO: 6762; WAN024G5F_at; Start 654; Stop 678
gaaagaagcctctactccgctagat

SEQ ID NO: 231828 - DNA, 25 bp, Artificial
  probe
  misc_feature (1)..(25): SEQ ID NO: 6762; WAN024G5F_at; Start 1092; Stop 1116
gaccgctgatgatatcttgacaaag

SEQ ID NO: 231829 - DNA, 25 bp, Artificial
  probe
  misc_feature (1)..(25): SEQ ID NO: 6762; WAN024G5F_at; Start 1048; Stop 1072
ttgatgtatcaattcggcgcgactt

SEQ ID NO: 231830 - DNA, 25 bp, Artificial
  probe
  misc_feature (1)..(25): SEQ ID NO: 6762; WAN024G5F_at; Start 1290; Stop 1314
tacatggtcagcagatggtgaacat

SEQ ID NO: 231831 - DNA, 25 bp, Artificial
  probe
  misc_feature (1)..(25): SEQ ID NO: 6762; WAN024G5F_at; Start 1194; Stop 1218
taaatatacaggaacgacgcaatcg

SEQ ID NO: 231832 - DNA, 25 bp, Artificial
  probe
  misc_feature (1)..(25): SEQ ID NO: 6762; WAN024G5F_at; Start 1076; Stop 1100
cccagaaggctttgatgaccgctga

SEQ ID NO: 231833 - DNA, 25 bp, Artificial
  probe
  misc_feature (1)..(25): SEQ ID NO: 6762; WAN024G5F_at; Start 1789; Stop 1813
gacccgatgggtgaactaattgatt

SEQ ID NO: 231834 - DNA, 25 bp, Artificial
  probe
  misc_feature (1)..(25): SEQ ID NO: 6762; WAN024G5F_at; Start 811; Stop 835
gcacttgtgacttatggctcaacta

SEQ ID NO: 231835 - DNA, 25 bp, Artificial
  probe
  misc_feature (1)..(25): SEQ ID NO: 6762; WAN024G5F_at; Start 2065; Stop 2089
tatgacacgaatggtcgaacaaccc

SEQ ID NO: 231836 - DNA, 25 bp, Artificial
  probe
  misc_feature (1)..(25): SEQ ID NO: 6762; WAN024G5F_at; Start 1209; Stop 1233
gacgcaatcgtacagaactcagctg

SEQ ID NO: 231837 - DNA, 25 bp, Artificial
  probe
  misc_feature (1)..(25): SEQ ID NO: 6762; WAN024G5F_at; Start 1061; Stop 1085
tcggcgcgacttttacccagaaggc

SEQ ID NO: 231838 - DNA, 25 bp, Artificial
  probe
  misc_feature (1)..(25): SEQ ID NO: 6762; WAN024G5F_at; Start 921; Stop 945
cgatcgtacgacgtttacagctaaa

SEQ ID NO: 231839 - DNA, 25 bp, Artificial
  probe
  misc_feature (1)..(25): SEQ ID NO: 6762; WAN024G5F_at; Start 1246; Stop 1270
gcaaaaactccaaatagtagcggga

SEQ ID NO: 231840 - DNA, 25 bp, Artificial
  probe
  misc_feature (1)..(25): SEQ ID NO: 6762; WAN024G5F_at; Start 1534; Stop 1558
catggtgaccctacgacttggtatt

SEQ ID NO: 231841 - DNA, 25 bp, Artificial
  probe
  misc_feature (1)..(25): SEQ ID NO: 6762; WAN024G5F_at; Start 2551; Stop 2575
aatgagccaattcctccaaaaagag

SEQ ID NO: 231842 - DNA, 25 bp, Artificial
  probe
  misc_feature (1)..(25): SEQ ID NO: 6762; WAN024G5F_at; Start 1392; Stop 1416
aatactttcaatcacctccatggag

SEQ ID NO: 231843 - DNA, 25 bp, Artificial
  probe
  misc_feature (1)..(25): SEQ ID NO: 6762; WAN024G5F_at; Start 1662; Stop 1686
gagcatctctagttctcctgacaac

SEQ ID NO: 231844 - DNA, 25 bp, Artificial
  probe
  misc_feature (1)..(25): SEQ ID NO: 6762; WAN024G5F_at; Start 795; Stop 819
tccagataatcgagtagcacttgtg

SEQ ID NO: 231845 - DNA, 25 bp, Artificial
  probe
  misc_feature (1)..(25): SEQ ID NO: 6762; WAN024G5F_at; Start 1406; Stop 1430
cctccatggagcagagagctaaatt

SEQ ID NO: 231846 - DNA, 25 bp, Artificial
  probe
  misc_feature (1)..(25): SEQ ID NO: 6762; WAN024G5F_at; Start 1689; Stop 1713
cactaacgtagcagatccatctcag

SEQ ID NO: 231847 - DNA, 25 bp, Artificial
  probe
  misc_feature (1)..(25): SEQ ID NO: 4113; WAN024G5G_at; Start 296; Stop 320
ggatcgcctataactgcataaccag

SEQ ID NO: 231848 - DNA, 25 bp, Artificial
  probe
  misc_feature (1)..(25): SEQ ID NO: 4113; WAN024G5G_at; Start 119; Stop 143
ggatctccgttaataccaataccta

SEQ ID NO: 231849 - DNA, 25 bp, Artificial
  probe
  misc_feature (1)..(25): SEQ ID NO: 4113; WAN024G5G_at; Start 147; Stop 171
taaagacatcatacccatcaggagc

SEQ ID NO: 231850 - DNA, 25 bp, Artificial
  probe
  misc_feature (1)..(25): SEQ ID NO: 4113; WAN024G5G_at; Start 24; Stop 48
ccaatatttttgtcgtgtcagtaac

SEQ ID NO: 231851 - DNA, 25 bp, Artificial
  probe
  misc_feature (1)..(25): SEQ ID NO: 4113; WAN024G5G_at; Start 362; Stop 386
gctgcaggagcacctttttcataaa

SEQ ID NO: 231852 - DNA, 25 bp, Artificial
  probe
  misc_feature (1)..(25): SEQ ID NO: 4113; WAN024G5G_at; Start 63; Stop 87
caggtttactagaaatactttgcat

SEQ ID NO: 231853 - DNA, 25 bp, Artificial
  probe
  misc_feature (1)..(25): SEQ ID NO: 4113; WAN024G5G_at; Start 284; Stop 308
ccaccattaattggatcgcctataa

SEQ ID NO: 231854 - DNA, 25 bp, Artificial
  probe
  misc_feature (1)..(25): SEQ ID NO: 4113; WAN024G5G_at; Start 368; Stop 392
ggagcacctttttcataaactgtct

SEQ ID NO: 231855 - DNA, 25 bp, Artificial
  probe
  misc_feature (1)..(25): SEQ ID NO: 4113; WAN024G5G_at; Start 440; Stop 464
tgttctccactagttgcttgcgtaa

SEQ ID NO: 231856 - DNA, 25 bp, Artificial
  probe
  misc_feature (1)..(25): SEQ ID NO: 4113; WAN024G5G_at; Start 351; Stop 375
taactgggaaagctgcaggagcacc

SEQ ID NO: 231857 - DNA, 25 bp, Artificial
  probe
  misc_feature (1)..(25): SEQ ID NO: 4113; WAN024G5G_at; Start 314; Stop 338
taaccagccgccttcatttcagaat

SEQ ID NO: 231858 - DNA, 25 bp, Artificial
  probe
  misc_feature (1)..(25): SEQ ID NO: 4113; WAN024G5G_at; Start 252; Stop 276
gaatactctctctccaattaagcca

SEQ ID NO: 231859 - DNA, 25 bp, Artificial
  probe
  misc_feature (1)..(25): SEQ ID NO: 4113; WAN024G5G_at; Start 266; Stop 290
caattaagccaaatatatccaccat

SEQ ID NO: 231860 - DNA, 25 bp, Artificial
  probe
  misc_feature (1)..(25): SEQ ID NO: 4113; WAN024G5G_at; Start 132; Stop 156
taccaatacctaccgtaaagacatc

SEQ ID NO: 231861 - DNA, 25 bp, Artificial
  probe
  misc_feature (1)..(25): SEQ ID NO: 4113; WAN024G5G_at; Start 80; Stop 104
ctttgcataaaactagtagccgttg

SEQ ID NO: 231862 - DNA, 25 bp, Artificial
  probe
  misc_feature (1)..(25): SEQ ID NO: 4113; WAN024G5G_at; Start 417; Stop 441
gcccatctccgcgtacaattgtatg

SEQ ID NO: 231863 - DNA, 25 bp, Artificial
  probe
  misc_feature (1)..(25): SEQ ID NO: 4113; WAN024G5G_at; Start 395; Stop 419
tctgtaaacatctggtaactttgcc

SEQ ID NO: 231864 - DNA, 25 bp, Artificial
  probe
  misc_feature (1)..(25): SEQ ID NO: 4113; WAN024G5G_at; Start 3; Stop 27
ggaaataacgattcaactgttccaa

SEQ ID NO: 231865 - DNA, 25 bp, Artificial
  probe
  misc_feature (1)..(25): SEQ ID NO: 4113; WAN024G5G_at; Start 427; Stop 451
gcgtacaattgtatgttctccacta

SEQ ID NO: 231866 - DNA, 25 bp, Artificial
  probe
  misc_feature (1)..(25): SEQ ID NO: 4113; WAN024G5G_at; Start 343; Stop 367
ttcaggtttaactgggaaagctgca

SEQ ID NO: 231867 - DNA, 25 bp, Artificial
  probe
  misc_feature (1)..(25): SEQ ID NO: 4113; WAN024G5G_at; Start 452; Stop 476
gttgcttgcgtaataaaatcactta

SEQ ID NO: 231868 - DNA, 25 bp, Artificial
  probe
  misc_feature (1)..(25): SEQ ID NO: 4113; WAN024G5G_at; Start 104; Stop 128
gcttcatccgtaccaggatctccgt

SEQ ID NO: 231869 - DNA, 25 bp, Artificial
  probe
  misc_feature (1)..(25): SEQ ID NO: 4113; WAN024G5G_at; Start 238; Stop 262
aaacggataagccagaatactctct

SEQ ID NO: 231870 - DNA, 25 bp, Artificial
  probe
  misc_feature (1)..(25): SEQ ID NO: 4113; WAN024G5G_at; Start 204; Stop 228
caccatgattggtaattttagcagt

SEQ ID NO: 231871 - DNA, 25 bp, Artificial
  probe
  misc_feature (1)..(25): SEQ ID NO: 4113; WAN024G5G_at; Start 183; Stop 207
tatagtaccatcttgtagggtcacc

SEQ ID NO: 231872 - DNA, 25 bp, Artificial
  probe
  misc_feature (1)..(25): SEQ ID NO: 4113; WAN024G5G_at; Start 170; Stop 194
gcaatattcccgttatagtaccatc

SEQ ID NO: 231873 - DNA, 25 bp, Artificial
  probe
  misc_feature (1)..(25): SEQ ID NO: 4113; WAN024G5G_at; Start 380; Stop 404
tcataaactgtcttatctgtaaaca

SEQ ID NO: 231874 - DNA, 25 bp, Artificial
  probe
  misc_feature (1)..(25): SEQ ID NO: 4113; WAN024G5G_at; Start 228; Stop 252
tattagaattaaacggataagccag

SEQ ID NO: 231875 - DNA, 25 bp, Artificial
  probe
  misc_feature (1)..(25): SEQ ID NO: 4113; WAN024G5G_at; Start 95; Stop 119
gtagccgttgcttcatccgtaccag

SEQ ID NO: 231876 - DNA, 25 bp, Artificial
  probe
  misc_feature (1)..(25): SEQ ID NO: 4113; WAN024G5G_at; Start 158; Stop 182
tacccatcaggagcaatattcccgt

SEQ ID NO: 231877 - DNA, 25 bp, Artificial
  probe
  misc_feature (1)..(25): SEQ ID NO: 4113; WAN024G5G_at; Start 193; Stop 217
tcttgtagggtcaccatgattggta

SEQ ID NO: 231878 - DNA, 25 bp, Artificial
  probe
  misc_feature (1)..(25): SEQ ID NO: 4113; WAN024G5G_at; Start 48; Stop 72
cattggtatagttttcaggtttact

SEQ ID NO: 231879 - DNA, 25 bp, Artificial
  probe
  misc_feature (1)..(25): SEQ ID NO: 4113; WAN024G5G_at; Start 408; Stop 432
ggtaactttgcccatctccgcgtac

SEQ ID NO: 231880 - DNA, 25 bp, Artificial
  probe
  misc_feature (1)..(25): SEQ ID NO: 4113; WAN024G5G_at; Start 34; Stop 58
tgtcgtgtcagtaacattggtatag

SEQ ID NO: 231881 - DNA, 25 bp, Artificial
  probe
  misc_feature (1)..(25): SEQ ID NO: 4171; WAN024G5H_at; Start 231; Stop 255
ggcacgtttaatcttagctccttga

SEQ ID NO: 231882 - DNA, 25 bp, Artificial
  probe
  misc_feature (1)..(25): SEQ ID NO: 4171; WAN024G5H_at; Start 31; Stop 55
caaatggcaaacttgctactggacg

SEQ ID NO: 231883 - DNA, 25 bp, Artificial
  probe
  misc_feature (1)..(25): SEQ ID NO: 4171; WAN024G5H_at; Start 214; Stop 238
gcaccttcaccaataatggcacgtt

SEQ ID NO: 231884 - DNA, 25 bp, Artificial
  probe
  misc_feature (1)..(25): SEQ ID NO: 4171; WAN024G5H_at; Start 35; Stop 59
tggcaaacttgctactggacggtgg

SEQ ID NO: 231885 - DNA, 25 bp, Artificial
  probe
  misc_feature (1)..(25): SEQ ID NO: 4171; WAN024G5H_at; Start 19; Stop 43
gatatttcccaccaaatggcaaact

SEQ ID NO: 231886 - DNA, 25 bp, Artificial
  probe
  misc_feature (1)..(25): SEQ ID NO: 4171; WAN024G5H_at; Start 104; Stop 128
aatggcagaatatttatcaatcttc

SEQ ID NO: 231887 - DNA, 25 bp, Artificial
  probe
  misc_feature (1)..(25): SEQ ID NO: 4171; WAN024G5H_at; Start 23; Stop 47
tttcccaccaaatggcaaacttgct

SEQ ID NO: 231888 - DNA, 25 bp, Artificial
  probe
  misc_feature (1)..(25): SEQ ID NO: 4171; WAN024G5H_at; Start 5; Stop 29
gaagtcaatcaaacgatatttccca

SEQ ID NO: 231889 - DNA, 25 bp, Artificial
  probe
  misc_feature (1)..(25): SEQ ID NO: 4171; WAN024G5H_at; Start 91; Stop 115
ctgtatttcctaaaatggcagaata

SEQ ID NO: 231890 - DNA, 25 bp, Artificial
  probe
  misc_feature (1)..(25): SEQ ID NO: 4171; WAN024G5H_at; Start 184; Stop 208
ccatcaatttcgacaccgtcagaaa

SEQ ID NO: 231891 - DNA, 25 bp, Artificial
  probe
  misc_feature (1)..(25): SEQ ID NO: 4171; WAN024G5H_at; Start 191; Stop 215
tttcgacaccgtcagaaataatcgc

SEQ ID NO: 231892 - DNA, 25 bp, Artificial
  probe
  misc_feature (1)..(25): SEQ ID NO: 4171; WAN024G5H_at; Start 99; Stop 123
cctaaaatggcagaatatttatcaa

SEQ ID NO: 231893 - DNA, 25 bp, Artificial
  probe
  misc_feature (1)..(25): SEQ ID NO: 4171; WAN024G5H_at; Start 41; Stop 65
acttgctactggacggtggtccgtc

SEQ ID NO: 231894 - DNA, 25 bp, Artificial
  probe
  misc_feature (1)..(25): SEQ ID NO: 4171; WAN024G5H_at; Start 13; Stop 37
tcaaacgatatttcccaccaaatgg

SEQ ID NO: 231895 - DNA, 25 bp, Artificial
  probe
  misc_feature (1)..(25): SEQ ID NO: 4171; WAN024G5H_at; Start 38; Stop 62
caaacttgctactggacggtggtcc

SEQ ID NO: 231896 - DNA, 25 bp, Artificial
  probe
  misc_feature (1)..(25): SEQ ID NO: 4171; WAN024G5H_at; Start 118; Stop 142
tatcaatcttcatctgttgctaccc

SEQ ID NO: 231897 - DNA, 25 bp, Artificial
  probe
  misc_feature (1)..(25): SEQ ID NO: 4171; WAN024G5H_at; Start 54; Stop 78
cggtggtccgtcaatgtcgacatat

SEQ ID NO: 231898 - DNA, 25 bp, Artificial
  probe
  misc_feature (1)..(25): SEQ ID NO: 4171; WAN024G5H_at; Start 1; Stop 25
gtgggaagtcaatcaaacgatattt

SEQ ID NO: 231899 - DNA, 25 bp, Artificial
  probe
  misc_feature (1)..(25): SEQ ID NO: 4171; WAN024G5H_at; Start 72; Stop 96
gacatattgtgaaaaccaactgtat

SEQ ID NO: 231900 - DNA, 25 bp, Artificial
  probe
  misc_feature (1)..(25): SEQ ID NO: 4171; WAN024G5H_at; Start 58; Stop 82
ggtccgtcaatgtcgacatattgtg

SEQ ID NO: 231901 - DNA, 25 bp, Artificial
  probe
  misc_feature (1)..(25): SEQ ID NO: 4171; WAN024G5H_at; Start 171; Stop 195
tacttcatctgttccatcaatttcg

SEQ ID NO: 231902 - DNA, 25 bp, Artificial
  probe
  misc_feature (1)..(25): SEQ ID NO: 4171; WAN024G5H_at; Start 132; Stop 156
tgttgctacccccactacttcatta

SEQ ID NO: 231903 - DNA, 25 bp, Artificial
  probe
  misc_feature (1)..(25): SEQ ID NO: 4171; WAN024G5H_at; Start 201; Stop 225
gtcagaaataatcgcaccttcacca

SEQ ID NO: 231904 - DNA, 25 bp, Artificial
  probe
  misc_feature (1)..(25): SEQ ID NO: 4171; WAN024G5H_at; Start 51; Stop 75
ggacggtggtccgtcaatgtcgaca

SEQ ID NO: 231905 - DNA, 25 bp, Artificial
  probe
  misc_feature (1)..(25): SEQ ID NO: 4171; WAN024G5H_at; Start 227; Stop 251
taatggcacgtttaatcttagctcc

SEQ ID NO: 231906 - DNA, 25 bp, Artificial
  probe
  misc_feature (1)..(25): SEQ ID NO: 4171; WAN024G5H_at; Start 181; Stop 205
gttccatcaatttcgacaccgtcag

SEQ ID NO: 231907 - DNA, 25 bp, Artificial
  probe
  misc_feature (1)..(25): SEQ ID NO: 4171; WAN024G5H_at; Start 47; Stop 71
tactggacggtggtccgtcaatgtc

SEQ ID NO: 231908 - DNA, 25 bp, Artificial
  probe
  misc_feature (1)..(25): SEQ ID NO: 4171; WAN024G5H_at; Start 87; Stop 111
ccaactgtatttcctaaaatggcag

SEQ ID NO: 231909 - DNA, 25 bp, Artificial
  probe
  misc_feature (1)..(25): SEQ ID NO: 4171; WAN024G5H_at; Start 61; Stop 85
ccgtcaatgtcgacatattgtgaaa

SEQ ID NO: 231910 - DNA, 25 bp, Artificial
  probe
  misc_feature (1)..(25): SEQ ID NO: 4171; WAN024G5H_at; Start 162; Stop 186
tacaacttgtacttcatctgttcca

SEQ ID NO: 231911 - DNA, 25 bp, Artificial
  probe
  misc_feature (1)..(25): SEQ ID NO: 4171; WAN024G5H_at; Start 209; Stop 233
taatcgcaccttcaccaataatggc

SEQ ID NO: 231912 - DNA, 25 bp, Artificial
  probe
  misc_feature (1)..(25): SEQ ID NO: 4171; WAN024G5H_at; Start 68; Stop 92
tgtcgacatattgtgaaaaccaact

SEQ ID NO: 231913 - DNA, 25 bp, Artificial
  probe
  misc_feature (1)..(25): SEQ ID NO: 4171; WAN024G5H_at; Start 195; Stop 219
gacaccgtcagaaataatcgcacct

SEQ ID NO: 231914 - DNA, 25 bp, Artificial
  probe
  misc_feature (1)..(25): SEQ ID NO: 4171; WAN024G5H_at; Start 147; Stop 171
tacttcattatatcctacaacttgt

SEQ ID NO: 231915 - DNA, 25 bp, Artificial
  probe
  misc_feature (1)..(25): SEQ ID NO: 4379; WAN024G5I_at; Start 58; Stop 82
gattggtgtaaaagaaagtctgaat

SEQ ID NO: 231916 - DNA, 25 bp, Artificial
  probe
  misc_feature (1)..(25): SEQ ID NO: 4379; WAN024G5I_at; Start 214; Stop 238
gaagggcatgtaccaaattggttag

SEQ ID NO: 231917 - DNA, 25 bp, Artificial
  probe
  misc_feature (1)..(25): SEQ ID NO: 4379; WAN024G5I_at; Start 576; Stop 600
catcaaatatggaaaacatctattg

SEQ ID NO: 231918 - DNA, 25 bp, Artificial
  probe
  misc_feature (1)..(25): SEQ ID NO: 4379; WAN024G5I_at; Start 356; Stop 380
cagagaaatttgttctttttaatga

SEQ ID NO: 231919 - DNA, 25 bp, Artificial
  probe
  misc_feature (1)..(25): SEQ ID NO: 4379; WAN024G5I_at; Start 975; Stop 999
gtttcctgagaaatcgagttttgag

SEQ ID NO: 231920 - DNA, 25 bp, Artificial
  probe
  misc_feature (1)..(25): SEQ ID NO: 4379; WAN024G5I_at; Start 48; Stop 72
taaagatgtagattggtgtaaaaga

SEQ ID NO: 231921 - DNA, 25 bp, Artificial
  probe
  misc_feature (1)..(25): SEQ ID NO: 4379; WAN024G5I_at; Start 563; Stop 587
ctaagttttttaacatcaaatatgg

SEQ ID NO: 231922 - DNA, 25 bp, Artificial
  probe
  misc_feature (1)..(25): SEQ ID NO: 4379; WAN024G5I_at; Start 600; Stop 624
gaagaatatttgtttactgccatgg

SEQ ID NO: 231923 - DNA, 25 bp, Artificial
  probe
  misc_feature (1)..(25): SEQ ID NO: 4379; WAN024G5I_at; Start 500; Stop 524
taaacaatatggagattattaacaa

SEQ ID NO: 231924 - DNA, 25 bp, Artificial
  probe
  misc_feature (1)..(25): SEQ ID NO: 4379; WAN024G5I_at; Start 979; Stop 1003
cctgagaaatcgagttttgagaaaa

SEQ ID NO: 231925 - DNA, 25 bp, Artificial
  probe
  misc_feature (1)..(25): SEQ ID NO: 4379; WAN024G5I_at; Start 785; Stop 809
aattgtctagcggtaatttcatacc

SEQ ID NO: 231926 - DNA, 25 bp, Artificial
  probe
  misc_feature (1)..(25): SEQ ID NO: 4379; WAN024G5I_at; Start 762; Stop 786
tcattggttaattagatattggcaa

SEQ ID NO: 231927 - DNA, 25 bp, Artificial
  probe
  misc_feature (1)..(25): SEQ ID NO: 4379; WAN024G5I_at; Start 101; Stop 125
tatttcaagatttaaatagtgaaga

SEQ ID NO: 231928 - DNA, 25 bp, Artificial
  probe
  misc_feature (1)..(25): SEQ ID NO: 4379; WAN024G5I_at; Start 238; Stop 262
gatgtaaatcatcctaaattggttc

SEQ ID NO: 231929 - DNA, 25 bp, Artificial
  probe
  misc_feature (1)..(25): SEQ ID NO: 4379; WAN024G5I_at; Start 307; Stop 331
tttaattcaaacgttatagagatga

SEQ ID NO: 231930 - DNA, 25 bp, Artificial
  probe
  misc_feature (1)..(25): SEQ ID NO: 4379; WAN024G5I_at; Start 336; Stop 360
gattcatttgaaagatttatcagag

SEQ ID NO: 231931 - DNA, 25 bp, Artificial
  probe
  misc_feature (1)..(25): SEQ ID NO: 4379; WAN024G5I_at; Start 776; Stop 800
gatattggcaattgtctagcggtaa

SEQ ID NO: 231932 - DNA, 25 bp, Artificial
  probe
  misc_feature (1)..(25): SEQ ID NO: 4379; WAN024G5I_at; Start 826; Stop 850
gggaaaaattatgccatttcaaatg

SEQ ID NO: 231933 - DNA, 25 bp, Artificial
  probe
  misc_feature (1)..(25): SEQ ID NO: 4379; WAN024G5I_at; Start 389; Stop 413
tcataaatgattttgtaaaacaaag

SEQ ID NO: 231934 - DNA, 25 bp, Artificial
  probe
  misc_feature (1)..(25): SEQ ID NO: 4379; WAN024G5I_at; Start 603; Stop 627
gaatatttgtttactgccatggtca

SEQ ID NO: 231935 - DNA, 25 bp, Artificial
  probe
  misc_feature (1)..(25): SEQ ID NO: 4379; WAN024G5I_at; Start 583; Stop 607
tatggaaaacatctattgaagaata

SEQ ID NO: 231936 - DNA, 25 bp, Artificial
  probe
  misc_feature (1)..(25): SEQ ID NO: 4379; WAN024G5I_at; Start 71; Stop 95
gaaagtctgaatttgagaaagaata

SEQ ID NO: 231937 - DNA, 25 bp, Artificial
  probe
  misc_feature (1)..(25): SEQ ID NO: 4379; WAN024G5I_at; Start 614; Stop 638
tactgccatggtcagatttgttagg

SEQ ID NO: 231938 - DNA, 25 bp, Artificial
  probe
  misc_feature (1)..(25): SEQ ID NO: 4379; WAN024G5I_at; Start 897; Stop 921
tatatgtattaatgatggtgaaagt

SEQ ID NO: 231939 - DNA, 25 bp, Artificial
  probe
  misc_feature (1)..(25): SEQ ID NO: 4379; WAN024G5I_at; Start 490; Stop 514
cctattgtattaaacaatatggaga

SEQ ID NO: 231940 - DNA, 25 bp, Artificial
  probe
  misc_feature (1)..(25): SEQ ID NO: 4379; WAN024G5I_at; Start 250; Stop 274
cctaaattggttcatgttaaacatg

SEQ ID NO: 231941 - DNA, 25 bp, Artificial
  probe
  misc_feature (1)..(25): SEQ ID NO: 4379; WAN024G5I_at; Start 620; Stop 644
catggtcagatttgttaggctttta

SEQ ID NO: 231942 - DNA, 25 bp, Artificial
  probe
  misc_feature (1)..(25): SEQ ID NO: 4379; WAN024G5I_at; Start 168; Stop 192
tgtggaaaaatatgccccttgggta

SEQ ID NO: 231943 - DNA, 25 bp, Artificial
  probe
  misc_feature (1)..(25): SEQ ID NO: 4379; WAN024G5I_at; Start 739; Stop 763
tttaggaataaaaatgagattaatc

SEQ ID NO: 231944 - DNA, 25 bp, Artificial
  probe
  misc_feature (1)..(25): SEQ ID NO: 4379; WAN024G5I_at; Start 16; Stop 40
caaattgattttgtggtgacatggg

SEQ ID NO: 231945 - DNA, 25 bp, Artificial
  probe
  misc_feature (1)..(25): SEQ ID NO: 4379; WAN024G5I_at; Start 648; Stop 672
tagtcatattccagtaagttattgt

SEQ ID NO: 231946 - DNA, 25 bp, Artificial
  probe
  misc_feature (1)..(25): SEQ ID NO: 4379; WAN024G5I_at; Start 853; Stop 877
cctacggatattattaatgaattaa

SEQ ID NO: 231947 - DNA, 25 bp, Artificial
  probe
  misc_feature (1)..(25): SEQ ID NO: 4379; WAN024G5I_at; Start 226; Stop 250
ccaaattggttagatgtaaatcatc

SEQ ID NO: 231948 - DNA, 25 bp, Artificial
  probe
  misc_feature (1)..(25): SEQ ID NO: 4379; WAN024G5I_at; Start 164; Stop 188
gagctgtggaaaaatatgccccttg

SEQ ID NO: 231949 - DNA, 25 bp, Artificial
  probe
  misc_feature (1)..(25): SEQ ID NO: 2106; WAN024G5J_at; Start 1148; Stop 1172
tccatattacggatggtgtcccaac

SEQ ID NO: 231950 - DNA, 25 bp, Artificial
  probe
  misc_feature (1)..(25): SEQ ID NO: 2106; WAN024G5J_at; Start 668; Stop 692
tgccgctggatgtcgttatcttgct

SEQ ID NO: 231951 - DNA, 25 bp, Artificial
  probe
  misc_feature (1)..(25): SEQ ID NO: 2106; WAN024G5J_at; Start 1705; Stop 1729
gttactgacacgacaaaaatattgg

SEQ ID NO: 231952 - DNA, 25 bp, Artificial
  probe
  misc_feature (1)..(25): SEQ ID NO: 2106; WAN024G5J_at; Start 829; Stop 853
tccactatctttgatgggaccgagt

SEQ ID NO: 231953 - DNA, 25 bp, Artificial
  probe
  misc_feature (1)..(25): SEQ ID NO: 2106; WAN024G5J_at; Start 2011; Stop 2035
gatgaaaaagttacgttgacctaca

SEQ ID NO: 231954 - DNA, 25 bp, Artificial
  probe
  misc_feature (1)..(25): SEQ ID NO: 2106; WAN024G5J_at; Start 1569; Stop 1593
taacgggaatattgctcctgatggg

SEQ ID NO: 231955 - DNA, 25 bp, Artificial
  probe
  misc_feature (1)..(25): SEQ ID NO: 2106; WAN024G5J_at; Start 790; Stop 814
tctgattcagaaaatagggtagcgc

SEQ ID NO: 231956 - DNA, 25 bp, Artificial
  probe
  misc_feature (1)..(25): SEQ ID NO: 2106; WAN024G5J_at; Start 722; Stop 746
gaaacaagaatgctcgacgtgcgga

SEQ ID NO: 231957 - DNA, 25 bp, Artificial
  probe
  misc_feature (1)..(25): SEQ ID NO: 2106; WAN024G5J_at; Start 1046; Stop 1070
gattgatgtaccaattcggtgccac

SEQ ID NO: 231958 - DNA, 25 bp, Artificial
  probe
  misc_feature (1)..(25): SEQ ID NO: 2106; WAN024G5J_at; Start 1076; Stop 1100
ctcagaaagctttgatgaaggcaga

SEQ ID NO: 231959 - DNA, 25 bp, Artificial
  probe
  misc_feature (1)..(25): SEQ ID NO: 2106; WAN024G5J_at; Start 1334; Stop 1358
ggcaaagttaccagatgtttacaga

SEQ ID NO: 231960 - DNA, 25 bp, Artificial
  probe
  misc_feature (1)..(25): SEQ ID NO: 2106; WAN024G5J_at; Start 1554; Stop 1578
tacaagatggtactataacgggaat

SEQ ID NO: 231961 - DNA, 25 bp, Artificial
  probe
  misc_feature (1)..(25): SEQ ID NO: 2106; WAN024G5J_at; Start 1162; Stop 1186
ggtgtcccaactatgtcgtatccga

SEQ ID NO: 231962 - DNA, 25 bp, Artificial
  probe
  misc_feature (1)..(25): SEQ ID NO: 2106; WAN024G5J_at; Start 1901; Stop 1925
gacaagctgtaggtggtccacaaaa

SEQ ID NO: 231963 - DNA, 25 bp, Artificial
  probe
  misc_feature (1)..(25): SEQ ID NO: 2106; WAN024G5J_at; Start 1794; Stop 1818
tacagatccgatgggtgagttaatt

SEQ ID NO: 231964 - DNA, 25 bp, Artificial
  probe
  misc_feature (1)..(25): SEQ ID NO: 2106; WAN024G5J_at; Start 2076; Stop 2100
tgataccaatggtcgaacaacctta

SEQ ID NO: 231965 - DNA, 25 bp, Artificial
  probe
  misc_feature (1)..(25): SEQ ID NO: 2106; WAN024G5J_at; Start 1367; Stop 1391
tttatgaaaaaggtgctcctgcagc

SEQ ID NO: 231966 - DNA, 25 bp, Artificial
  probe
  misc_feature (1)..(25): SEQ ID NO: 2106; WAN024G5J_at; Start 1013; Stop 1037
tacctaccgaggcagaagaccatga

SEQ ID NO: 231967 - DNA, 25 bp, Artificial
  probe
  misc_feature (1)..(25): SEQ ID NO: 2106; WAN024G5J_at; Start 1874; Stop 1898
caaacgatggtagtcgcttggagaa

SEQ ID NO: 231968 - DNA, 25 bp, Artificial
  probe
  misc_feature (1)..(25): SEQ ID NO: 2106; WAN024G5J_at; Start 751; Stop 775
gctggtgaggcgacacgttctctta

SEQ ID NO: 231969 - DNA, 25 bp, Artificial
  probe
  misc_feature (1)..(25): SEQ ID NO: 2106; WAN024G5J_at; Start 1102; Stop 1126
gagattttgacacaacaagcgagac

SEQ ID NO: 231970 - DNA, 25 bp, Artificial
  probe
  misc_feature (1)..(25): SEQ ID NO: 2106; WAN024G5J_at; Start 1061; Stop 1085
tcggtgccacttttactcagaaagc

SEQ ID NO: 231971 - DNA, 25 bp, Artificial
  probe
  misc_feature (1)..(25): SEQ ID NO: 2106; WAN024G5J_at; Start 1312; Stop 1336
catacaattgtacgcggagatgggc

SEQ ID NO: 231972 - DNA, 25 bp, Artificial
  probe
  misc_feature (1)..(25): SEQ ID NO: 2106; WAN024G5J_at; Start 1412; Stop 1436
aatattctgaaatgaaggcggctgg

SEQ ID NO: 231973 - DNA, 25 bp, Artificial
  probe
  misc_feature (1)..(25): SEQ ID NO: 2106; WAN024G5J_at; Start 809; Stop 833
tagcgcttgtgacttatgcttccac

SEQ ID NO: 231974 - DNA, 25 bp, Artificial
  probe
  misc_feature (1)..(25): SEQ ID NO: 2106; WAN024G5J_at; Start 653; Stop 677
aaaaagataagtctgtgccgctgga

SEQ ID NO: 231975 - DNA, 25 bp, Artificial
  probe
  misc_feature (1)..(25): SEQ ID NO: 2106; WAN024G5J_at; Start 919; Stop 943
tatgatcagacgagttttacaacca

SEQ ID NO: 231976 - DNA, 25 bp, Artificial
  probe
  misc_feature (1)..(25): SEQ ID NO: 2106; WAN024G5J_at; Start 2560; Stop 2584
aatgaacctattcctccaaagagag

SEQ ID NO: 231977 - DNA, 25 bp, Artificial
  probe
  misc_feature (1)..(25): SEQ ID NO: 2106; WAN024G5J_at; Start 1539; Stop 1563
caatcatggtgaccctacaagatgg

SEQ ID NO: 231978 - DNA, 25 bp, Artificial
  probe
  misc_feature (1)..(25): SEQ ID NO: 2106; WAN024G5J_at; Start 1435; Stop 1459
ggttatgcagttataggcgatccaa

SEQ ID NO: 231979 - DNA, 25 bp, Artificial
  probe
  misc_feature (1)..(25): SEQ ID NO: 2106; WAN024G5J_at; Start 1833; Stop 1857
cacagatggaagatttgatccagca

SEQ ID NO: 231980 - DNA, 25 bp, Artificial
  probe
  misc_feature (1)..(25): SEQ ID NO: 2106; WAN024G5J_at; Start 1619; Stop 1643
gtattaacggagatcctggtacgga

SEQ ID NO: 231981 - DNA, 25 bp, Artificial
  probe
  misc_feature (1)..(25): SEQ ID NO: 2106; WAN024G5J_at; Start 841; Stop 865
gatgggaccgagtttacagtagaaa

SEQ ID NO: 231982 - DNA, 25 bp, Artificial
  probe
  misc_feature (1)..(25): SEQ ID NO: 2106; WAN024G5J_at; Start 1290; Stop 1314
tacgcaagcaactagtggagaacat

SEQ ID NO: 231983 - DNA, 25 bp, Artificial
  probe
  misc_feature (1)..(25): SEQ ID NO: 1099; WAN024G5K_at; Start 259; Stop 283
tatctaggaatttacaatacccgtg

SEQ ID NO: 231984 - DNA, 25 bp, Artificial
  probe
  misc_feature (1)..(25): SEQ ID NO: 1099; WAN024G5K_at; Start 582; Stop 606
tatctttgtcgttgatacaccttgg

SEQ ID NO: 231985 - DNA, 25 bp, Artificial
  probe
  misc_feature (1)..(25): SEQ ID NO: 1099; WAN024G5K_at; Start 942; Stop 966
tattcatgtccataaggatagcttg

SEQ ID NO: 231986 - DNA, 25 bp, Artificial
  probe
  misc_feature (1)..(25): SEQ ID NO: 1099; WAN024G5K_at; Start 715; Stop 739
ggctatctagccaatattcactctg

SEQ ID NO: 231987 - DNA, 25 bp, Artificial
  probe
  misc_feature (1)..(25): SEQ ID NO: 1099; WAN024G5K_at; Start 273; Stop 297
caatacccgtgtagaaagtagtaca

SEQ ID NO: 231988 - DNA, 25 bp, Artificial
  probe
  misc_feature (1)..(25): SEQ ID NO: 1099; WAN024G5K_at; Start 1068; Stop 1092
gattcgaggaactgcagaacatcca

SEQ ID NO: 231989 - DNA, 25 bp, Artificial
  probe
  misc_feature (1)..(25): SEQ ID NO: 1099; WAN024G5K_at; Start 536; Stop 560
tctttgatagcaagtcaacagctga

SEQ ID NO: 231990 - DNA, 25 bp, Artificial
  probe
  misc_feature (1)..(25): SEQ ID NO: 1099; WAN024G5K_at; Start 973; Stop 997
gatagcctgctcttccctcgtgttg

SEQ ID NO: 231991 - DNA, 25 bp, Artificial
  probe
  misc_feature (1)..(25): SEQ ID NO: 1099; WAN024G5K_at; Start 1108; Stop 1132
ggtgctaaagtaacagaggatattc

SEQ ID NO: 231992 - DNA, 25 bp, Artificial
  probe
  misc_feature (1)..(25): SEQ ID NO: 1099; WAN024G5K_at; Start 1089; Stop 1113
tccagttgtggttaagaaaggtgct

SEQ ID NO: 231993 - DNA, 25 bp, Artificial
  probe
  misc_feature (1)..(25): SEQ ID NO: 1099; WAN024G5K_at; Start 137; Stop 161
gccttgctaatgcaggtgttcgtag

SEQ ID NO: 231994 - DNA, 25 bp, Artificial
  probe
  misc_feature (1)..(25): SEQ ID NO: 1099; WAN024G5K_at; Start 758; Stop 782
cgaatatcgatatgcttgaatcaca

SEQ ID NO: 231995 - DNA, 25 bp, Artificial
  probe
  misc_feature (1)..(25): SEQ ID NO: 1099; WAN024G5K_at; Start 176; Stop 200
tccagcaggataatatcagctcagt

SEQ ID NO: 231996 - DNA, 25 bp, Artificial
  probe
  misc_feature (1)..(25): SEQ ID NO: 1099; WAN024G5K_at; Start 1019; Stop 1043
tcgaatatgctatcttggacaaagg

SEQ ID NO: 231997 - DNA, 25 bp, Artificial
  probe
  misc_feature (1)..(25): SEQ ID NO: 1099; WAN024G5K_at; Start 822; Stop 846
tacaaaggtcaaaaacgaagagcca

SEQ ID NO: 231998 - DNA, 25 bp, Artificial
  probe
  misc_feature (1)..(25): SEQ ID NO: 1099; WAN024G5K_at; Start 69; Stop 93
ggaccaccgtccagtagcaagtttg

SEQ ID NO: 231999 - DNA, 25 bp, Artificial
  probe
  misc_feature (1)..(25): SEQ ID NO: 1099; WAN024G5K_at; Start 651; Stop 675
gaaattgcgctatgttttacgggat

SEQ ID NO: 232000 - DNA, 25 bp, Artificial
  probe
  misc_feature (1)..(25): SEQ ID NO: 1099; WAN024G5K_at; Start 700; Stop 724
gcctacgagtacacgggctatctag

SEQ ID NO: 232001 - DNA, 25 bp, Artificial
  probe
  misc_feature (1)..(25): SEQ ID NO: 1099; WAN024G5K_at; Start 875; Stop 899
gcacttctcagtttgcctctggtag

SEQ ID NO: 232002 - DNA, 25 bp, Artificial
  probe
  misc_feature (1)..(25): SEQ ID NO: 1099; WAN024G5K_at; Start 673; Stop 697
gatttggctgtaaaagagggagctt

SEQ ID NO: 232003 - DNA, 25 bp, Artificial
  probe
  misc_feature (1)..(25): SEQ ID NO: 1099; WAN024G5K_at; Start 121; Stop 145
gacttcccactttcaagccttgcta

SEQ ID NO: 232004 - DNA, 25 bp, Artificial
  probe
  misc_feature (1)..(25): SEQ ID NO: 1099; WAN024G5K_at; Start 398; Stop 422
tgaaccaagttttccacctacatag

SEQ ID NO: 232005 - DNA, 25 bp, Artificial
  probe
  misc_feature (1)..(25): SEQ ID NO: 1099; WAN024G5K_at; Start 84; Stop 108
agcaagtttgccatttggtgggaaa

SEQ ID NO: 232006 - DNA, 25 bp, Artificial
  probe
  misc_feature (1)..(25): SEQ ID NO: 1099; WAN024G5K_at; Start 342; Stop 366
ttctggctcaaaccaaacggttgcc

SEQ ID NO: 232007 - DNA, 25 bp, Artificial
  probe
  misc_feature (1)..(25): SEQ ID NO: 1099; WAN024G5K_at; Start 301; Stop 325
ggaaaagaatactaccaacagcttc

SEQ ID NO: 232008 - DNA, 25 bp, Artificial
  probe
  misc_feature (1)..(25): SEQ ID NO: 1099; WAN024G5K_at; Start 360; Stop 384
ggttgccctcaactgcgatgttctt

SEQ ID NO: 232009 - DNA, 25 bp, Artificial
  probe
  misc_feature (1)..(25): SEQ ID NO: 1099; WAN024G5K_at; Start 494; Stop 518
tcttggatgtagatgaaacagacca

SEQ ID NO: 232010 - DNA, 25 bp, Artificial
  probe
  misc_feature (1)..(25): SEQ ID NO: 1099; WAN024G5K_at; Start 105; Stop 129
gaaatatcgtttgattgacttccca

SEQ ID NO: 232011 - DNA, 25 bp, Artificial
  probe
  misc_feature (1)..(25): SEQ ID NO: 1099; WAN024G5K_at; Start 958; Stop 982
gatagcttggttaaagatagcctgc

SEQ ID NO: 232012 - DNA, 25 bp, Artificial
  probe
  misc_feature (1)..(25): SEQ ID NO: 1099; WAN024G5K_at; Start 599; Stop 623
caccttggttgattgaacacttgga

SEQ ID NO: 232013 - DNA, 25 bp, Artificial
  probe
  misc_feature (1)..(25): SEQ ID NO: 1099; WAN024G5K_at; Start 861; Stop 885
tacatctaaggtaagcacttctcag

SEQ ID NO: 232014 - DNA, 25 bp, Artificial
  probe
  misc_feature (1)..(25): SEQ ID NO: 1099; WAN024G5K_at; Start 327; Stop 351
tacttatttgaaacgttctggctca

SEQ ID NO: 232015 - DNA, 25 bp, Artificial
  probe
  misc_feature (1)..(25): SEQ ID NO: 1099; WAN024G5K_at; Start 414; Stop 438
cctacatagtacaacaaaagagcct

SEQ ID NO: 232016 - DNA, 25 bp, Artificial
  probe
  misc_feature (1)..(25): SEQ ID NO: 1099; WAN024G5K_at; Start 54; Stop 78
tatgtcgacattgacggaccaccgt

SEQ ID NO: 232017 - DNA, 25 bp, Artificial
  probe
  misc_feature (1)..(25): SEQ ID NO: 695; WAN024G5L_at; Start 580; Stop 604
tacatttttgattggcaacgccttc

SEQ ID NO: 232018 - DNA, 25 bp, Artificial
  probe
  misc_feature (1)..(25): SEQ ID NO: 695; WAN024G5L_at; Start 614; Stop 638
tagtcgctgctgaaaagagcaaggt

SEQ ID NO: 232019 - DNA, 25 bp, Artificial
  probe
  misc_feature (1)..(25): SEQ ID NO: 695; WAN024G5L_at; Start 876; Stop 900
ggaagactcattagttgtagacgga

SEQ ID NO: 232020 - DNA, 25 bp, Artificial
  probe
  misc_feature (1)..(25): SEQ ID NO: 695; WAN024G5L_at; Start 836; Stop 860
tgatttcaccaccaaacttcctcgg

SEQ ID NO: 232021 - DNA, 25 bp, Artificial
  probe
  misc_feature (1)..(25): SEQ ID NO: 695; WAN024G5L_at; Start 186; Stop 210
acttgctctcaacaaccatattggg

SEQ ID NO: 232022 - DNA, 25 bp, Artificial
  probe
  misc_feature (1)..(25): SEQ ID NO: 695; WAN024G5L_at; Start 669; Stop 693
tccaaattaccttgagtcaggtgaa

SEQ ID NO: 232023 - DNA, 25 bp, Artificial
  probe
  misc_feature (1)..(25): SEQ ID NO: 695; WAN024G5L_at; Start 861; Stop 885
ggcaaatgctcatgtggaagactca

SEQ ID NO: 232024 - DNA, 25 bp, Artificial
  probe
  misc_feature (1)..(25): SEQ ID NO: 695; WAN024G5L_at; Start 804; Stop 828
taaccgtcaatggaagatttactca

SEQ ID NO: 232025 - DNA, 25 bp, Artificial
  probe
  misc_feature (1)..(25): SEQ ID NO: 695; WAN024G5L_at; Start 202; Stop 226
catattgggaatggttcaagctggg

SEQ ID NO: 232026 - DNA, 25 bp, Artificial
  probe
  misc_feature (1)..(25): SEQ ID NO: 695; WAN024G5L_at; Start 164; Stop 188
gggtcgttacacagtatcaaccact

SEQ ID NO: 232027 - DNA, 25 bp, Artificial
  probe
  misc_feature (1)..(25): SEQ ID NO: 695; WAN024G5L_at; Start 785; Stop 809
aaaatgccttggatagtcgtaaccg

SEQ ID NO: 232028 - DNA, 25 bp, Artificial
  probe
  misc_feature (1)..(25): SEQ ID NO: 695; WAN024G5L_at; Start 1030; Stop 1054
gccattattggtgaaggtgcgatta

SEQ ID NO: 232029 - DNA, 25 bp, Artificial
  probe
  misc_feature (1)..(25): SEQ ID NO: 695; WAN024G5L_at; Start 68; Stop 92
aaagcatcgcaaaaccagctgtgca

SEQ ID NO: 232030 - DNA, 25 bp, Artificial
  probe
  misc_feature (1)..(25): SEQ ID NO: 695; WAN024G5L_at; Start 949; Stop 973
caagttcgcgaaggagcggaagtcc

SEQ ID NO: 232031 - DNA, 25 bp, Artificial
  probe
  misc_feature (1)..(25): SEQ ID NO: 695; WAN024G5L_at; Start 403; Stop 427
gatgatatgctccagtctcataagg

SEQ ID NO: 232032 - DNA, 25 bp, Artificial
  probe
  misc_feature (1)..(25): SEQ ID NO: 695; WAN024G5L_at; Start 17; Stop 41
tagctttgattcttgctggtgggca

SEQ ID NO: 232033 - DNA, 25 bp, Artificial
  probe
  misc_feature (1)..(25): SEQ ID NO: 695; WAN024G5L_at; Start 991; Stop 1015
agtggagctatcattggtcaaggag

SEQ ID NO: 232034 - DNA, 25 bp, Artificial
  probe
  misc_feature (1)..(25): SEQ ID NO: 695; WAN024G5L_at; Start 118; Stop 142
gactttgccctatcaaactgtgcca

SEQ ID NO: 232035 - DNA, 25 bp, Artificial
  probe
  misc_feature (1)..(25): SEQ ID NO: 695; WAN024G5L_at; Start 976; Stop 1000
gattcagttatcatgagtggagcta

SEQ ID NO: 232036 - DNA, 25 bp, Artificial
  probe
  misc_feature (1)..(25): SEQ ID NO: 695; WAN024G5L_at; Start 738; Stop 762
tactattgagtcactttgggaagcg

SEQ ID NO: 232037 - DNA, 25 bp, Artificial
  probe
  misc_feature (1)..(25): SEQ ID NO: 695; WAN024G5L_at; Start 100; Stop 124
gggcgctaccgtatcattgactttg

SEQ ID NO: 232038 - DNA, 25 bp, Artificial
  probe
  misc_feature (1)..(25): SEQ ID NO: 695; WAN024G5L_at; Start 85; Stop 109
gctgtgcaatttggtgggcgctacc

SEQ ID NO: 232039 - DNA, 25 bp, Artificial
  probe
  misc_feature (1)..(25): SEQ ID NO: 695; WAN024G5L_at; Start 36; Stop 60
tgggcaaggaactcgtctcggtaaa

SEQ ID NO: 232040 - DNA, 25 bp, Artificial
  probe
  misc_feature (1)..(25): SEQ ID NO: 695; WAN024G5L_at; Start 53; Stop 77
tcggtaaactcactcaaagcatcgc

SEQ ID NO: 232041 - DNA, 25 bp, Artificial
  probe
  misc_feature (1)..(25): SEQ ID NO: 695; WAN024G5L_at; Start 429; Stop 453
taataatgccagcttgacagtagca

SEQ ID NO: 232042 - DNA, 25 bp, Artificial
  probe
  misc_feature (1)..(25): SEQ ID NO: 695; WAN024G5L_at; Start 558; Stop 582
tacaaaagcttctatgggaatctac

SEQ ID NO: 232043 - DNA, 25 bp, Artificial
  probe
  misc_feature (1)..(25): SEQ ID NO: 695; WAN024G5L_at; Start 271; Stop 295
tctgcaagtgaaggaaatcgttggt

SEQ ID NO: 232044 - DNA, 25 bp, Artificial
  probe
  misc_feature (1)..(25): SEQ ID NO: 695; WAN024G5L_at; Start 482; Stop 506
gccgttttggtatcatgaacacaga

SEQ ID NO: 232045 - DNA, 25 bp, Artificial
  probe
  misc_feature (1)..(25): SEQ ID NO: 695; WAN024G5L_at; Start 466; Stop 490
cctcttaaagaagcaagccgttttg

SEQ ID NO: 232046 - DNA, 25 bp, Artificial
  probe
  misc_feature (1)..(25): SEQ ID NO: 695; WAN024G5L_at; Start 1008; Stop 1032
tcaaggagctaagattaaacgtgcc

SEQ ID NO: 232047 - DNA, 25 bp, Artificial
  probe
  misc_feature (1)..(25): SEQ ID NO: 695; WAN024G5L_at; Start 599; Stop 623
gccttcgtaatatgttagtcgctgc

SEQ ID NO: 232048 - DNA, 25 bp, Artificial
  probe
  misc_feature (1)..(25): SEQ ID NO: 695; WAN024G5L_at; Start 751; Stop 775
ctttgggaagcgaacatggagtata

SEQ ID NO: 232049 - DNA, 25 bp, Artificial
  probe
  misc_feature (1)..(25): SEQ ID NO: 695; WAN024G5L_at; Start 131; Stop 155
caaactgtgccaactcagggattca

SEQ ID NO: 232050 - DNA, 25 bp, Artificial
  probe
  misc_feature (1)..(25): SEQ ID NO: 695; WAN024G5L_at; Start 1058; Stop 1082
ctgacggtgtcgaaattgatggaac

SEQ ID NO: 232051 - DNA, 25 bp, Artificial
  probe
  misc_feature (1)..(25): SEQ ID NO: 3921; WAN024G5M_at; Start 28; Stop 52
gcgcaagcctgcgaattgattgtaa

SEQ ID NO: 232052 - DNA, 25 bp, Artificial
  probe
  misc_feature (1)..(25): SEQ ID NO: 3921; WAN024G5M_at; Start 1; Stop 25
gtgacaaatttggtacgtatagaga

SEQ ID NO: 232053 - DNA, 25 bp, Artificial
  probe
  misc_feature (1)..(25): SEQ ID NO: 3921; WAN024G5M_at; Start 227; Stop 251
cagcccatgttccatttgtagtcaa

SEQ ID NO: 232054 - DNA, 25 bp, Artificial
  probe
  misc_feature (1)..(25): SEQ ID NO: 3921; WAN024G5M_at; Start 121; Stop 145
gagataattctccttgaaaacatac

SEQ ID NO: 232055 - DNA, 25 bp, Artificial
  probe
  misc_feature (1)..(25): SEQ ID NO: 3921; WAN024G5M_at; Start 216; Stop 240
tatcattcatccagcccatgttcca

SEQ ID NO: 232056 - DNA, 25 bp, Artificial
  probe
  misc_feature (1)..(25): SEQ ID NO: 3921; WAN024G5M_at; Start 69; Stop 93
tatgcatcatactcttcttgccatg

SEQ ID NO: 232057 - DNA, 25 bp, Artificial
  probe
  misc_feature (1)..(25): SEQ ID NO: 3921; WAN024G5M_at; Start 93; Stop 117
gaaccacttcatcgtgcgagaatgg

SEQ ID NO: 232058 - DNA, 25 bp, Artificial
  probe
  misc_feature (1)..(25): SEQ ID NO: 3921; WAN024G5M_at; Start 54; Stop 78
gatctccccacatcttatgcatcat

SEQ ID NO: 232059 - DNA, 25 bp, Artificial
  probe
  misc_feature (1)..(25): SEQ ID NO: 3921; WAN024G5M_at; Start 102; Stop 126
catcgtgcgagaatggcaagagata

SEQ ID NO: 232060 - DNA, 25 bp, Artificial
  probe
  misc_feature (1)..(25): SEQ ID NO: 3921; WAN024G5M_at; Start 211; Stop 235
gaggatatcattcatccagcccatg

SEQ ID NO: 232061 - DNA, 25 bp, Artificial
  probe
  misc_feature (1)..(25): SEQ ID NO: 3921; WAN024G5M_at; Start 162; Stop 186
ccaggttaaagtcatatttacgata

SEQ ID NO: 232062 - DNA, 25 bp, Artificial
  probe
  misc_feature (1)..(25): SEQ ID NO: 3921; WAN024G5M_at; Start 75; Stop 99
tcatactcttcttgccatgaaccac

SEQ ID NO: 232063 - DNA, 25 bp, Artificial
  probe
  misc_feature (1)..(25): SEQ ID NO: 3921; WAN024G5M_at; Start 31; Stop 55
caagcctgcgaattgattgtaacga

SEQ ID NO: 232064 - DNA, 25 bp, Artificial
  probe
  misc_feature (1)..(25): SEQ ID NO: 3921; WAN024G5M_at; Start 234; Stop 258
tgttccatttgtagtcaaatcctag

SEQ ID NO: 232065 - DNA, 25 bp, Artificial
  probe
  misc_feature (1)..(25): SEQ ID NO: 3921; WAN024G5M_at; Start 223; Stop 247
catccagcccatgttccatttgtag

SEQ ID NO: 232066 - DNA, 25 bp, Artificial
  probe
  misc_feature (1)..(25): SEQ ID NO: 3921; WAN024G5M_at; Start 130; Stop 154
ctccttgaaaacatacataaagctg

SEQ ID NO: 232067 - DNA, 25 bp, Artificial
  probe
  misc_feature (1)..(25): SEQ ID NO: 3921; WAN024G5M_at; Start 151; Stop 175
gctgaaagtcaccaggttaaagtca

SEQ ID NO: 232068 - DNA, 25 bp, Artificial
  probe
  misc_feature (1)..(25): SEQ ID NO: 3921; WAN024G5M_at; Start 159; Stop 183
tcaccaggttaaagtcatatttacg

SEQ ID NO: 232069 - DNA, 25 bp, Artificial
  probe
  misc_feature (1)..(25): SEQ ID NO: 3921; WAN024G5M_at; Start 203; Stop 227
tagaaacggaggatatcattcatcc

SEQ ID NO: 232070 - DNA, 25 bp, Artificial
  probe
  misc_feature (1)..(25): SEQ ID NO: 3921; WAN024G5M_at; Start 98; Stop 122
acttcatcgtgcgagaatggcaaga

SEQ ID NO: 232071 - DNA, 25 bp, Artificial
  probe
  misc_feature (1)..(25): SEQ ID NO: 3921; WAN024G5M_at; Start 143; Stop 167
tacataaagctgaaagtcaccaggt

SEQ ID NO: 232072 - DNA, 25 bp, Artificial
  probe
  misc_feature (1)..(25): SEQ ID NO: 3921; WAN024G5M_at; Start 20; Stop 44
tagagattgcgcaagcctgcgaatt

SEQ ID NO: 232073 - DNA, 25 bp, Artificial
  probe
  misc_feature (1)..(25): SEQ ID NO: 3921; WAN024G5M_at; Start 192; Stop 216
gatcttcttcgtagaaacggaggat

SEQ ID NO: 232074 - DNA, 25 bp, Artificial
  probe
  misc_feature (1)..(25): SEQ ID NO: 3921; WAN024G5M_at; Start 40; Stop 64
gaattgattgtaacgatctccccac

SEQ ID NO: 232075 - DNA, 25 bp, Artificial
  probe
  misc_feature (1)..(25): SEQ ID NO: 3921; WAN024G5M_at; Start 84; Stop 108
tcttgccatgaaccacttcatcgtg

SEQ ID NO: 232076 - DNA, 25 bp, Artificial
  probe
  misc_feature (1)..(25): SEQ ID NO: 3921; WAN024G5M_at; Start 90; Stop 114
catgaaccacttcatcgtgcgagaa

SEQ ID NO: 232077 - DNA, 25 bp, Artificial
  probe
  misc_feature (1)..(25): SEQ ID NO: 3921; WAN024G5M_at; Start 7; Stop 31
aatttggtacgtatagagattgcgc

SEQ ID NO: 232078 - DNA, 25 bp, Artificial
  probe
  misc_feature (1)..(25): SEQ ID NO: 3921; WAN024G5M_at; Start 50; Stop 74
taacgatctccccacatcttatgca

SEQ ID NO: 232079 - DNA, 25 bp, Artificial
  probe
  misc_feature (1)..(25): SEQ ID NO: 3921; WAN024G5M_at; Start 45; Stop 69
gattgtaacgatctccccacatctt

SEQ ID NO: 232080 - DNA, 25 bp, Artificial
  probe
  misc_feature (1)..(25): SEQ ID NO: 3921; WAN024G5M_at; Start 109; Stop 133
cgagaatggcaagagataattctcc

SEQ ID NO: 232081 - DNA, 25 bp, Artificial
  probe
  misc_feature (1)..(25): SEQ ID NO: 3921; WAN024G5M_at; Start 16; Stop 40
cgtatagagattgcgcaagcctgcg

SEQ ID NO: 232082 - DNA, 25 bp, Artificial
  probe
  misc_feature (1)..(25): SEQ ID NO: 3921; WAN024G5M_at; Start 14; Stop 38
tacgtatagagattgcgcaagcctg

SEQ ID NO: 232083 - DNA, 25 bp, Artificial
  probe
  misc_feature (1)..(25): SEQ ID NO: 3921; WAN024G5M_at; Start 189; Stop 213
tcggatcttcttcgtagaaacggag

SEQ ID NO: 232084 - DNA, 25 bp, Artificial
  probe
  misc_feature (1)..(25): SEQ ID NO: 3921; WAN024G5M_at; Start 197; Stop 221
tcttcgtagaaacggaggatatcat

SEQ ID NO: 232085 - DNA, 25 bp, Artificial
  probe
  misc_feature (1)..(25): SEQ ID NO: 4382; WAN024G5N_at; Start 120; Stop 144
gacgagcctcatacctgacagcaaa

SEQ ID NO: 232086 - DNA, 25 bp, Artificial
  probe
  misc_feature (1)..(25): SEQ ID NO: 4382; WAN024G5N_at; Start 329; Stop 353
caaacacggaaggtatagccatgct

SEQ ID NO: 232087 - DNA, 25 bp, Artificial
  probe
  misc_feature (1)..(25): SEQ ID NO: 4382; WAN024G5N_at; Start 100; Stop 124
tacgattgcccctgttcctggacga

SEQ ID NO: 232088 - DNA, 25 bp, Artificial
  probe
  misc_feature (1)..(25): SEQ ID NO: 4382; WAN024G5N_at; Start 125; Stop 149
gcctcatacctgacagcaaaagggt

SEQ ID NO: 232089 - DNA, 25 bp, Artificial
  probe
  misc_feature (1)..(25): SEQ ID NO: 4382; WAN024G5N_at; Start 217; Stop 241
catattggtaaagacttcccagacc

SEQ ID NO: 232090 - DNA, 25 bp, Artificial
  probe
  misc_feature (1)..(25): SEQ ID NO: 4382; WAN024G5N_at; Start 141; Stop 165
caaaagggtcaatcttcatcagttg

SEQ ID NO: 232091 - DNA, 25 bp, Artificial
  probe
  misc_feature (1)..(25): SEQ ID NO: 4382; WAN024G5N_at; Start 51; Stop 75
ttcgtgccagccaaagtccatcctt

SEQ ID NO: 232092 - DNA, 25 bp, Artificial
  probe
  misc_feature (1)..(25): SEQ ID NO: 4382; WAN024G5N_at; Start 191; Stop 215
tatttgtaaatatgcccttcttgag

SEQ ID NO: 232093 - DNA, 25 bp, Artificial
  probe
  misc_feature (1)..(25): SEQ ID NO: 4382; WAN024G5N_at; Start 323; Stop 347
ggtgcccaaacacggaaggtatagc

SEQ ID NO: 232094 - DNA, 25 bp, Artificial
  probe
  misc_feature (1)..(25): SEQ ID NO: 4382; WAN024G5N_at; Start 339; Stop 363
aggtatagccatgctctccatttag

SEQ ID NO: 232095 - DNA, 25 bp, Artificial
  probe
  misc_feature (1)..(25): SEQ ID NO: 4382; WAN024G5N_at; Start 296; Stop 320
ccaaccaagtgaacagcctgagcat

SEQ ID NO: 232096 - DNA, 25 bp, Artificial
  probe
  misc_feature (1)..(25): SEQ ID NO: 4382; WAN024G5N_at; Start 36; Stop 60
agccccaacgttttcttcgtgccag

SEQ ID NO: 232097 - DNA, 25 bp, Artificial
  probe
  misc_feature (1)..(25): SEQ ID NO: 4382; WAN024G5N_at; Start 253; Stop 277
tcttaccattggaatctgattttca

SEQ ID NO: 232098 - DNA, 25 bp, Artificial
  probe
  misc_feature (1)..(25): SEQ ID NO: 4382; WAN024G5N_at; Start 263; Stop 287
ggaatctgattttcaatccagttgg

SEQ ID NO: 232099 - DNA, 25 bp, Artificial
  probe
  misc_feature (1)..(25): SEQ ID NO: 4382; WAN024G5N_at; Start 112; Stop 136
tgttcctggacgagcctcatacctg

SEQ ID NO: 232100 - DNA, 25 bp, Artificial
  probe
  misc_feature (1)..(25): SEQ ID NO: 4382; WAN024G5N_at; Start 176; Stop 200
tgacgtgtgacatgatatttgtaaa

SEQ ID NO: 232101 - DNA, 25 bp, Artificial
  probe
  misc_feature (1)..(25): SEQ ID NO: 4382; WAN024G5N_at; Start 168; Stop 192
gaccattttgacgtgtgacatgata

SEQ ID NO: 232102 - DNA, 25 bp, Artificial
  probe
  misc_feature (1)..(25): SEQ ID NO: 4382; WAN024G5N_at; Start 66; Stop 90
gtccatccttccatttcttctcagg

SEQ ID NO: 232103 - DNA, 25 bp, Artificial
  probe
  misc_feature (1)..(25): SEQ ID NO: 4382; WAN024G5N_at; Start 212; Stop 236
tgagccatattggtaaagacttccc

SEQ ID NO: 232104 - DNA, 25 bp, Artificial
  probe
  misc_feature (1)..(25): SEQ ID NO: 4382; WAN024G5N_at; Start 228; Stop 252
agacttcccagaccccaaaatcatt

SEQ ID NO: 232105 - DNA, 25 bp, Artificial
  probe
  misc_feature (1)..(25): SEQ ID NO: 4382; WAN024G5N_at; Start 131; Stop 155
tacctgacagcaaaagggtcaatct

SEQ ID NO: 232106 - DNA, 25 bp, Artificial
  probe
  misc_feature (1)..(25): SEQ ID NO: 4382; WAN024G5N_at; Start 318; Stop 342
cattaggtgcccaaacacggaaggt

SEQ ID NO: 232107 - DNA, 25 bp, Artificial
  probe
  misc_feature (1)..(25): SEQ ID NO: 4382; WAN024G5N_at; Start 308; Stop 332
acagcctgagcattaggtgcccaaa

SEQ ID NO: 232108 - DNA, 25 bp, Artificial
  probe
  misc_feature (1)..(25): SEQ ID NO: 4382; WAN024G5N_at; Start 243; Stop 267
caaaatcatttcttaccattggaat

SEQ ID NO: 232109 - DNA, 25 bp, Artificial
  probe
  misc_feature (1)..(25): SEQ ID NO: 4382; WAN024G5N_at; Start 81; Stop 105
tcttctcaggaagctctgttacgat

SEQ ID NO: 232110 - DNA, 25 bp, Artificial
  probe
  misc_feature (1)..(25): SEQ ID NO: 4382; WAN024G5N_at; Start 203; Stop 227
tgcccttcttgagccatattggtaa

SEQ ID NO: 232111 - DNA, 25 bp, Artificial
  probe
  misc_feature (1)..(25): SEQ ID NO: 4382; WAN024G5N_at; Start 90; Stop 114
gaagctctgttacgattgcccctgt

SEQ ID NO: 232112 - DNA, 25 bp, Artificial
  probe
  misc_feature (1)..(25): SEQ ID NO: 4382; WAN024G5N_at; Start 333; Stop 357
cacggaaggtatagccatgctctcc

SEQ ID NO: 232113 - DNA, 25 bp, Artificial
  probe
  misc_feature (1)..(25): SEQ ID NO: 4382; WAN024G5N_at; Start 163; Stop 187
ttgatgaccattttgacgtgtgaca

SEQ ID NO: 232114 - DNA, 25 bp, Artificial
  probe
  misc_feature (1)..(25): SEQ ID NO: 4382; WAN024G5N_at; Start 156; Stop 180
tcatcagttgatgaccattttgacg

SEQ ID NO: 232115 - DNA, 25 bp, Artificial
  probe
  misc_feature (1)..(25): SEQ ID NO: 4382; WAN024G5N_at; Start 285; Stop 309
tggtaaaatcaccaaccaagtgaac

SEQ ID NO: 232116 - DNA, 25 bp, Artificial
  probe
  misc_feature (1)..(25): SEQ ID NO: 4382; WAN024G5N_at; Start 41; Stop 65
caacgttttcttcgtgccagccaaa

SEQ ID NO: 232117 - DNA, 25 bp, Artificial
  probe
  misc_feature (1)..(25): SEQ ID NO: 4382; WAN024G5N_at; Start 314; Stop 338
tgagcattaggtgcccaaacacgga

SEQ ID NO: 232118 - DNA, 25 bp, Artificial
  probe
  misc_feature (1)..(25): SEQ ID NO: 4382; WAN024G5N_at; Start 275; Stop 299
tcaatccagttggtaaaatcaccaa

SEQ ID NO: 232119 - DNA, 25 bp, Artificial
  probe
  misc_feature (1)..(25): SEQ ID NO: 2318; WAN024G5O_at; Start 306; Stop 330
tgctgtcaggtatgaggctcgtcca

SEQ ID NO: 232120 - DNA, 25 bp, Artificial
  probe
  misc_feature (1)..(25): SEQ ID NO: 2318; WAN024G5O_at; Start 546; Stop 570
tattgagtttatgcccttgatgtcc

SEQ ID NO: 232121 - DNA, 25 bp, Artificial
  probe
  misc_feature (1)..(25): SEQ ID NO: 2318; WAN024G5O_at; Start 1334; Stop 1358
caggcttgcgcaatctctatacgta

SEQ ID NO: 232122 - DNA, 25 bp, Artificial
  probe
  misc_feature (1)..(25): SEQ ID NO: 2318; WAN024G5O_at; Start 1153; Stop 1177
gatatcctccgtttctacgaagaag

SEQ ID NO: 232123 - DNA, 25 bp, Artificial
  probe
  misc_feature (1)..(25): SEQ ID NO: 2318; WAN024G5O_at; Start 1688; Stop 1712
gactacccgttgcaggaatttacga

SEQ ID NO: 232124 - DNA, 25 bp, Artificial
  probe
  misc_feature (1)..(25): SEQ ID NO: 2318; WAN024G5O_at; Start 1829; Stop 1853
taccggctatgggagcaagtgtatg

SEQ ID NO: 232125 - DNA, 25 bp, Artificial
  probe
  misc_feature (1)..(25): SEQ ID NO: 2318; WAN024G5O_at; Start 1515; Stop 1539
caaagatcatcgctgtctgtgggaa

SEQ ID NO: 232126 - DNA, 25 bp, Artificial
  probe
  misc_feature (1)..(25): SEQ ID NO: 2318; WAN024G5O_at; Start 953; Stop 977
catggacacctaataaagatggcgg

SEQ ID NO: 232127 - DNA, 25 bp, Artificial
  probe
  misc_feature (1)..(25): SEQ ID NO: 2318; WAN024G5O_at; Start 1122; Stop 1146
tgactacaaatggaacatgggctgg

SEQ ID NO: 232128 - DNA, 25 bp, Artificial
  probe
  misc_feature (1)..(25): SEQ ID NO: 2318; WAN024G5O_at; Start 655; Stop 679
gattttgtcgaggagtgtcataccc

SEQ ID NO: 232129 - DNA, 25 bp, Artificial
  probe
  misc_feature (1)..(25): SEQ ID NO: 2318; WAN024G5O_at; Start 1568; Stop 1592
tcattgatgcggataatcgagacca

SEQ ID NO: 232130 - DNA, 25 bp, Artificial
  probe
  misc_feature (1)..(25): SEQ ID NO: 2318; WAN024G5O_at; Start 291; Stop 315
gaagattgacccttttgctgtcagg

SEQ ID NO: 232131 - DNA, 25 bp, Artificial
  probe
  misc_feature (1)..(25): SEQ ID NO: 2318; WAN024G5O_at; Start 1792; Stop 1816
ctatggaaagattatgagcagacct

SEQ ID NO: 232132 - DNA, 25 bp, Artificial
  probe
  misc_feature (1)..(25): SEQ ID NO: 2318; WAN024G5O_at; Start 256; Stop 280
tatcatgtcacacgtcaaaatggtc

SEQ ID NO: 232133 - DNA, 25 bp, Artificial
  probe
  misc_feature (1)..(25): SEQ ID NO: 2318; WAN024G5O_at; Start 602; Stop 626
ttatgggttacttcgctttagagca

SEQ ID NO: 232134 - DNA, 25 bp, Artificial
  probe
  misc_feature (1)..(25): SEQ ID NO: 2318; WAN024G5O_at; Start 1435; Stop 1459
gaacagttggaatggtctaacctag

SEQ ID NO: 232135 - DNA, 25 bp, Artificial
  probe
  misc_feature (1)..(25): SEQ ID NO: 2318; WAN024G5O_at; Start 114; Stop 138
tgtttgggcacctaatgctcaggct

SEQ ID NO: 232136 - DNA, 25 bp, Artificial
  probe
  misc_feature (1)..(25): SEQ ID NO: 2318; WAN024G5O_at; Start 99; Stop 123
tggctataccttccgtgtttgggca

SEQ ID NO: 232137 - DNA, 25 bp, Artificial
  probe
  misc_feature (1)..(25): SEQ ID NO: 2318; WAN024G5O_at; Start 63; Stop 87
tctaggagcacatagggaagaacta

SEQ ID NO: 232138 - DNA, 25 bp, Artificial
  probe
  misc_feature (1)..(25): SEQ ID NO: 2318; WAN024G5O_at; Start 1581; Stop 1605
taatcgagaccagagtgttctttcc

SEQ ID NO: 232139 - DNA, 25 bp, Artificial
  probe
  misc_feature (1)..(25): SEQ ID NO: 2318; WAN024G5O_at; Start 129; Stop 153
tgctcaggctgttcacttggttggt

SEQ ID NO: 232140 - DNA, 25 bp, Artificial
  probe
  misc_feature (1)..(25): SEQ ID NO: 2318; WAN024G5O_at; Start 700; Stop 724
gactgggtaccaggtcactttacca

SEQ ID NO: 232141 - DNA, 25 bp, Artificial
  probe
  misc_feature (1)..(25): SEQ ID NO: 2318; WAN024G5O_at; Start 1655; Stop 1679
tggtacctgttgagcggaaagattt

SEQ ID NO: 232142 - DNA, 25 bp, Artificial
  probe
  misc_feature (1)..(25): SEQ ID NO: 2318; WAN024G5O_at; Start 751; Stop 775
gatgggacaccgacttttgaatacc

SEQ ID NO: 232143 - DNA, 25 bp, Artificial
  probe
  misc_feature (1)..(25): SEQ ID NO: 2318; WAN024G5O_at; Start 1388; Stop 1412
tcttcatgggtagcgaatacggtca

SEQ ID NO: 232144 - DNA, 25 bp, Artificial
  probe
  misc_feature (1)..(25): SEQ ID NO: 2318; WAN024G5O_at; Start 380; Stop 404
gactttggctggcacgaagaaaacg

SEQ ID NO: 232145 - DNA, 25 bp, Artificial
  probe
  misc_feature (1)..(25): SEQ ID NO: 2318; WAN024G5O_at; Start 1848; Stop 1872
tgtatggaaaatcaaacgtcgcttg

SEQ ID NO: 232146 - DNA, 25 bp, Artificial
  probe
  misc_feature (1)..(25): SEQ ID NO: 2318; WAN024G5O_at; Start 900; Stop 924
tattcgtgtggatgctgttagcaac

SEQ ID NO: 232147 - DNA, 25 bp, Artificial
  probe
  misc_feature (1)..(25): SEQ ID NO: 2318; WAN024G5O_at; Start 1137; Stop 1161
catgggctggatgaatgatatcctc

SEQ ID NO: 232148 - DNA, 25 bp, Artificial
  probe
  misc_feature (1)..(25): SEQ ID NO: 2318; WAN024G5O_at; Start 222; Stop 246
taccaatatggctcaagaagggcat

SEQ ID NO: 232149 - DNA, 25 bp, Artificial
  probe
  misc_feature (1)..(25): SEQ ID NO: 2318; WAN024G5O_at; Start 1319; Stop 1343
gttacaatcaattcgcaggcttgcg

SEQ ID NO: 232150 - DNA, 25 bp, Artificial
  probe
  misc_feature (1)..(25): SEQ ID NO: 2318; WAN024G5O_at; Start 783; Stop 807
taataaggctcataaccatggttgg

SEQ ID NO: 232151 - DNA, 25 bp, Artificial
  probe
  misc_feature (1)..(25): SEQ ID NO: 2318; WAN024G5O_at; Start 1256; Stop 1280
cattctcgcacgatgaagtggttca

SEQ ID NO: 232152 - DNA, 25 bp, Artificial
  probe
  misc_feature (1)..(25): SEQ ID NO: 2318; WAN024G5O_at; Start 1452; Stop 1476
taacctagaagacccaatgaatgct

SEQ ID NO: 232153 - DNA, 25 bp, Artificial
  probe
  misc_feature (1)..(25): SEQ ID NO: 3026; WAN024G5P_at; Start 59; Stop 83
gaaaaggcaccagtttttgtcttca

SEQ ID NO: 232154 - DNA, 25 bp, Artificial
  probe
  misc_feature (1)..(25): SEQ ID NO: 3026; WAN024G5P_at; Start 82; Stop 106
caatcggatgacttgacggataaac

SEQ ID NO: 232155 - DNA, 25 bp, Artificial
  probe
  misc_feature (1)..(25): SEQ ID NO: 3026; WAN024G5P_at; Start 239; Stop 263
ttggtacgaccaaattcttgaccga

SEQ ID NO: 232156 - DNA, 25 bp, Artificial
  probe
  misc_feature (1)..(25): SEQ ID NO: 3026; WAN024G5P_at; Start 254; Stop 278
tcttgaccgatttccataaaggcca

SEQ ID NO: 232157 - DNA, 25 bp, Artificial
  probe
  misc_feature (1)..(25): SEQ ID NO: 3026; WAN024G5P_at; Start 182; Stop 206
atcgcacgctctctatcatcatggg

SEQ ID NO: 232158 - DNA, 25 bp, Artificial
  probe
  misc_feature (1)..(25): SEQ ID NO: 3026; WAN024G5P_at; Start 265; Stop 289
ttccataaaggccatcccctgcatg

SEQ ID NO: 232159 - DNA, 25 bp, Artificial
  probe
  misc_feature (1)..(25): SEQ ID NO: 3026; WAN024G5P_at; Start 153; Stop 177
tcacactgtcaggagcattatagct

SEQ ID NO: 232160 - DNA, 25 bp, Artificial
  probe
  misc_feature (1)..(25): SEQ ID NO: 3026; WAN024G5P_at; Start 279; Stop 303
tcccctgcatgagcagattcatggc

SEQ ID NO: 232161 - DNA, 25 bp, Artificial
  probe
  misc_feature (1)..(25): SEQ ID NO: 3026; WAN024G5P_at; Start 133; Stop 157
caagttccagttcacttggttcaca

SEQ ID NO: 232162 - DNA, 25 bp, Artificial
  probe
  misc_feature (1)..(25): SEQ ID NO: 3026; WAN024G5P_at; Start 100; Stop 124
gataaactcaatactgtcttgacgc

SEQ ID NO: 232163 - DNA, 25 bp, Artificial
  probe
  misc_feature (1)..(25): SEQ ID NO: 3026; WAN024G5P_at; Start 209; Stop 233
aactcaccattttcaccagtcgcaa

SEQ ID NO: 232164 - DNA, 25 bp, Artificial
  probe
  misc_feature (1)..(25): SEQ ID NO: 3026; WAN024G5P_at; Start 315; Stop 339
cgaccttgcgcatgatttgctctga

SEQ ID NO: 232165 - DNA, 25 bp, Artificial
  probe
  misc_feature (1)..(25): SEQ ID NO: 3026; WAN024G5P_at; Start 195; Stop 219
tatcatcatgggtcaactcaccatt

SEQ ID NO: 232166 - DNA, 25 bp, Artificial
  probe
  misc_feature (1)..(25): SEQ ID NO: 3026; WAN024G5P_at; Start 65; Stop 89
gcaccagtttttgtcttcaatcgga

SEQ ID NO: 232167 - DNA, 25 bp, Artificial
  probe
  misc_feature (1)..(25): SEQ ID NO: 3026; WAN024G5P_at; Start 167; Stop 191
gcattatagctattcatcgcacgct

SEQ ID NO: 232168 - DNA, 25 bp, Artificial
  probe
  misc_feature (1)..(25): SEQ ID NO: 3026; WAN024G5P_at; Start 219; Stop 243
tttcaccagtcgcaaccagtttggt

SEQ ID NO: 232169 - DNA, 25 bp, Artificial
  probe
  misc_feature (1)..(25): SEQ ID NO: 3026; WAN024G5P_at; Start 32; Stop 56
tggtaaatttcatcatagctagagt

SEQ ID NO: 232170 - DNA, 25 bp, Artificial
  probe
  misc_feature (1)..(25): SEQ ID NO: 3026; WAN024G5P_at; Start 91; Stop 115
gacttgacggataaactcaatactg

SEQ ID NO: 232171 - DNA, 25 bp, Artificial
  probe
  misc_feature (1)..(25): SEQ ID NO: 3026; WAN024G5P_at; Start 145; Stop 169
cacttggttcacactgtcaggagca

SEQ ID NO: 232172 - DNA, 25 bp, Artificial
  probe
  misc_feature (1)..(25): SEQ ID NO: 3026; WAN024G5P_at; Start 186; Stop 210
cacgctctctatcatcatgggtcaa

SEQ ID NO: 232173 - DNA, 25 bp, Artificial
  probe
  misc_feature (1)..(25): SEQ ID NO: 3026; WAN024G5P_at; Start 76; Stop 100
tgtcttcaatcggatgacttgacgg

SEQ ID NO: 232174 - DNA, 25 bp, Artificial
  probe
  misc_feature (1)..(25): SEQ ID NO: 3026; WAN024G5P_at; Start 49; Stop 73
gctagagtaagaaaaggcaccagtt

SEQ ID NO: 232175 - DNA, 25 bp, Artificial
  probe
  misc_feature (1)..(25): SEQ ID NO: 3026; WAN024G5P_at; Start 227; Stop 251
gtcgcaaccagtttggtacgaccaa

SEQ ID NO: 232176 - DNA, 25 bp, Artificial
  probe
  misc_feature (1)..(25): SEQ ID NO: 3026; WAN024G5P_at; Start 286; Stop 310
catgagcagattcatggctgtggca

SEQ ID NO: 232177 - DNA, 25 bp, Artificial
  probe
  misc_feature (1)..(25): SEQ ID NO: 3026; WAN024G5P_at; Start 302; Stop 326
gctgtggcagtttcgaccttgcgca

SEQ ID NO: 232178 - DNA, 25 bp, Artificial
  probe
  misc_feature (1)..(25): SEQ ID NO: 3026; WAN024G5P_at; Start 294; Stop 318
gattcatggctgtggcagtttcgac

SEQ ID NO: 232179 - DNA, 25 bp, Artificial
  probe
  misc_feature (1)..(25): SEQ ID NO: 3026; WAN024G5P_at; Start 2; Stop 26
tgttcaatcgcagaatgcacaaaga

SEQ ID NO: 232180 - DNA, 25 bp, Artificial
  probe
  misc_feature (1)..(25): SEQ ID NO: 3026; WAN024G5P_at; Start 19; Stop 43
cacaaagacatgatggtaaatttca

SEQ ID NO: 232181 - DNA, 25 bp, Artificial
  probe
  misc_feature (1)..(25): SEQ ID NO: 3026; WAN024G5P_at; Start 307; Stop 331
ggcagtttcgaccttgcgcatgatt

SEQ ID NO: 232182 - DNA, 25 bp, Artificial
  probe
  misc_feature (1)..(25): SEQ ID NO: 3026; WAN024G5P_at; Start 45; Stop 69
catagctagagtaagaaaaggcacc

SEQ ID NO: 232183 - DNA, 25 bp, Artificial
  probe
  misc_feature (1)..(25): SEQ ID NO: 3026; WAN024G5P_at; Start 120; Stop 144
gacgctcattaatcaagttccagtt

SEQ ID NO: 232184 - DNA, 25 bp, Artificial
  probe
  misc_feature (1)..(25): SEQ ID NO: 3026; WAN024G5P_at; Start 11; Stop 35
gcagaatgcacaaagacatgatggt

SEQ ID NO: 232185 - DNA, 25 bp, Artificial
  probe
  misc_feature (1)..(25): SEQ ID NO: 3026; WAN024G5P_at; Start 108; Stop 132
caatactgtcttgacgctcattaat

SEQ ID NO: 232186 - DNA, 25 bp, Artificial
  probe
  misc_feature (1)..(25): SEQ ID NO: 3026; WAN024G5P_at; Start 272; Stop 296
aaggccatcccctgcatgagcagat

SEQ ID NO: 232187 - DNA, 25 bp, Artificial
  probe
  misc_feature (1)..(25): SEQ ID NO: 2786; WAN024G5Q_at; Start 2119; Stop 2143
gaagttcacggcaaagaacacctct

SEQ ID NO: 232188 - DNA, 25 bp, Artificial
  probe
  misc_feature (1)..(25): SEQ ID NO: 2786; WAN024G5Q_at; Start 1315; Stop 1339
gattctcttctatactgggtgcagg

SEQ ID NO: 232189 - DNA, 25 bp, Artificial
  probe
  misc_feature (1)..(25): SEQ ID NO: 2786; WAN024G5Q_at; Start 1821; Stop 1845
gatggcctttatggaaatcggtcaa

SEQ ID NO: 232190 - DNA, 25 bp, Artificial
  probe
  misc_feature (1)..(25): SEQ ID NO: 2786; WAN024G5Q_at; Start 960; Stop 984
gcaaccaattgcagaccgtcataaa

SEQ ID NO: 232191 - DNA, 25 bp, Artificial
  probe
  misc_feature (1)..(25): SEQ ID NO: 2786; WAN024G5Q_at; Start 402; Stop 426
ccgtgtagaggacaatcaggctcat

SEQ ID NO: 232192 - DNA, 25 bp, Artificial
  probe
  misc_feature (1)..(25): SEQ ID NO: 2786; WAN024G5Q_at; Start 1609; Stop 1633
ggtgctgcgacagagccaattctag

SEQ ID NO: 232193 - DNA, 25 bp, Artificial
  probe
  misc_feature (1)..(25): SEQ ID NO: 2786; WAN024G5Q_at; Start 490; Stop 514
gatgcacccgtttggaagacttttg

SEQ ID NO: 232194 - DNA, 25 bp, Artificial
  probe
  misc_feature (1)..(25): SEQ ID NO: 2786; WAN024G5Q_at; Start 997; Stop 1021
gatggaaatgtaacctacaactggg

SEQ ID NO: 232195 - DNA, 25 bp, Artificial
  probe
  misc_feature (1)..(25): SEQ ID NO: 2786; WAN024G5Q_at; Start 1410; Stop 1434
tcaaagcttggatgaaatcgactcc

SEQ ID NO: 232196 - DNA, 25 bp, Artificial
  probe
  misc_feature (1)..(25): SEQ ID NO: 2786; WAN024G5Q_at; Start 2207; Stop 2231
tggtaaccaacagtcgctcaaaaga

SEQ ID NO: 232197 - DNA, 25 bp, Artificial
  probe
  misc_feature (1)..(25): SEQ ID NO: 2786; WAN024G5Q_at; Start 1860; Stop 1884
caaactggttgcgactggtgaaaat

SEQ ID NO: 232198 - DNA, 25 bp, Artificial
  probe
  misc_feature (1)..(25): SEQ ID NO: 2786; WAN024G5Q_at; Start 1746; Stop 1770
tcatccagaccaaagttcagagcaa

SEQ ID NO: 232199 - DNA, 25 bp, Artificial
  probe
  misc_feature (1)..(25): SEQ ID NO: 2786; WAN024G5Q_at; Start 740; Stop 764
ttaagcacggttcggaggctacttg

SEQ ID NO: 232200 - DNA, 25 bp, Artificial
  probe
  misc_feature (1)..(25): SEQ ID NO: 2786; WAN024G5Q_at; Start 1386; Stop 1410
tgtcaagaccatgcagatgattcgt

SEQ ID NO: 232201 - DNA, 25 bp, Artificial
  probe
  misc_feature (1)..(25): SEQ ID NO: 2786; WAN024G5Q_at; Start 475; Stop 499
gaatcagctgctaatgatgcacccg

SEQ ID NO: 232202 - DNA, 25 bp, Artificial
  probe
  misc_feature (1)..(25): SEQ ID NO: 2786; WAN024G5Q_at; Start 1068; Stop 1092
taatccagatgatccagctcaggtc

SEQ ID NO: 232203 - DNA, 25 bp, Artificial
  probe
  misc_feature (1)..(25): SEQ ID NO: 2786; WAN024G5Q_at; Start 2012; Stop 2036
tccgattgaagacaaaaactggtgc

SEQ ID NO: 232204 - DNA, 25 bp, Artificial
  probe
  misc_feature (1)..(25): SEQ ID NO: 2786; WAN024G5Q_at; Start 1027; Stop 1051
gatccacaaaactataacgcgccag

SEQ ID NO: 232205 - DNA, 25 bp, Artificial
  probe
  misc_feature (1)..(25): SEQ ID NO: 2786; WAN024G5Q_at; Start 648; Stop 672
gacacgtgatccttatacaatcgcg

SEQ ID NO: 232206 - DNA, 25 bp, Artificial
  probe
  misc_feature (1)..(25): SEQ ID NO: 2786; WAN024G5Q_at; Start 2083; Stop 2107
cattctgcgattgaacatagcggct

SEQ ID NO: 232207 - DNA, 25 bp, Artificial
  probe
  misc_feature (1)..(25): SEQ ID NO: 2786; WAN024G5Q_at; Start 922; Stop 946
gattacatcaagaagctgggctaca

SEQ ID NO: 232208 - DNA, 25 bp, Artificial
  probe
  misc_feature (1)..(25): SEQ ID NO: 2786; WAN024G5Q_at; Start 1993; Stop 2017
gagtttatccgtcaagtcatccgat

SEQ ID NO: 232209 - DNA, 25 bp, Artificial
  probe
  misc_feature (1)..(25): SEQ ID NO: 2786; WAN024G5Q_at; Start 1500; Stop 1524
gaaggacaatgcctaccagatgcca

SEQ ID NO: 232210 - DNA, 25 bp, Artificial
  probe
  misc_feature (1)..(25): SEQ ID NO: 2786; WAN024G5Q_at; Start 1932; Stop 1956
tgctcctgacagtgtgaaccaagtg

SEQ ID NO: 232211 - DNA, 25 bp, Artificial
  probe
  misc_feature (1)..(25): SEQ ID NO: 2786; WAN024G5Q_at; Start 1767; Stop 1791
gcaaatcatgcgcaaggtcgaaact

SEQ ID NO: 232212 - DNA, 25 bp, Artificial
  probe
  misc_feature (1)..(25): SEQ ID NO: 2786; WAN024G5Q_at; Start 670; Stop 694
gcgaccagccctgatggcaaacgtt

SEQ ID NO: 232213 - DNA, 25 bp, Artificial
  probe
  misc_feature (1)..(25): SEQ ID NO: 2786; WAN024G5Q_at; Start 702; Stop 726
tctgagccatgtagaaaagcaagtt

SEQ ID NO: 232214 - DNA, 25 bp, Artificial
  probe
  misc_feature (1)..(25): SEQ ID NO: 2786; WAN024G5Q_at; Start 1535; Stop 1559
tctttaatgacaatcagcgcgatgc

SEQ ID NO: 232215 - DNA, 25 bp, Artificial
  probe
  misc_feature (1)..(25): SEQ ID NO: 2786; WAN024G5Q_at; Start 1631; Stop 1655
tagctaaagcaatcctaggaagtcg

SEQ ID NO: 232216 - DNA, 25 bp, Artificial
  probe
  misc_feature (1)..(25): SEQ ID NO: 2786; WAN024G5Q_at; Start 860; Stop 884
gaactttcttgggtgctgctcaggc

SEQ ID NO: 232217 - DNA, 25 bp, Artificial
  probe
  misc_feature (1)..(25): SEQ ID NO: 2786; WAN024G5Q_at; Start 1895; Stop 1919
cccatgatgatagagagcgtgcgat

SEQ ID NO: 232218 - DNA, 25 bp, Artificial
  probe
  misc_feature (1)..(25): SEQ ID NO: 2786; WAN024G5Q_at; Start 887; Stop 911
gaacagttaaccaatacggccagtc

SEQ ID NO: 232219 - DNA, 25 bp, Artificial
  probe
  misc_feature (1)..(25): SEQ ID NO: 2786; WAN024G5Q_at; Start 1782; Stop 1806
ggtcgaaactgccacagccatgaat

SEQ ID NO: 232220 - DNA, 25 bp, Artificial
  probe
  misc_feature (1)..(25): SEQ ID NO: 2786; WAN024G5Q_at; Start 757; Stop 781
gctacttggcgcttggaaaatccat

SEQ ID NO: 232221 - DNA, 25 bp, Artificial
  probe
  misc_feature (1)..(25): SEQ ID NO: 1707; WAN024G5R_at; Start 92; Stop 116
tccttatgaaagaaatagccagaca

SEQ ID NO: 232222 - DNA, 25 bp, Artificial
  probe
  misc_feature (1)..(25): SEQ ID NO: 1707; WAN024G5R_at; Start 196; Stop 220
ttgacgagaatagatgtgacgagct

SEQ ID NO: 232223 - DNA, 25 bp, Artificial
  probe
  misc_feature (1)..(25): SEQ ID NO: 1707; WAN024G5R_at; Start 204; Stop 228
aatagatgtgacgagctcagaaatc

SEQ ID NO: 232224 - DNA, 25 bp, Artificial
  probe
  misc_feature (1)..(25): SEQ ID NO: 1707; WAN024G5R_at; Start 37; Stop 61
gcaatagcctgcacaatgttagcaa

SEQ ID NO: 232225 - DNA, 25 bp, Artificial
  probe
  misc_feature (1)..(25): SEQ ID NO: 1707; WAN024G5R_at; Start 50; Stop 74
caatgttagcaacaatcaaagcgcc

SEQ ID NO: 232226 - DNA, 25 bp, Artificial
  probe
  misc_feature (1)..(25): SEQ ID NO: 1707; WAN024G5R_at; Start 53; Stop 77
tgttagcaacaatcaaagcgccaat

SEQ ID NO: 232227 - DNA, 25 bp, Artificial
  probe
  misc_feature (1)..(25): SEQ ID NO: 1707; WAN024G5R_at; Start 25; Stop 49
gaaaaggcaaaagcaatagcctgca

SEQ ID NO: 232228 - DNA, 25 bp, Artificial
  probe
  misc_feature (1)..(25): SEQ ID NO: 1707; WAN024G5R_at; Start 179; Stop 203
taactccgccaaagggattgacgag

SEQ ID NO: 232229 - DNA, 25 bp, Artificial
  probe
  misc_feature (1)..(25): SEQ ID NO: 1707; WAN024G5R_at; Start 14; Stop 38
tggctgtgcgagaaaaggcaaaagc

SEQ ID NO: 232230 - DNA, 25 bp, Artificial
  probe
  misc_feature (1)..(25): SEQ ID NO: 1707; WAN024G5R_at; Start 56; Stop 80
tagcaacaatcaaagcgccaatcat

SEQ ID NO: 232231 - DNA, 25 bp, Artificial
  probe
  misc_feature (1)..(25): SEQ ID NO: 1707; WAN024G5R_at; Start 20; Stop 44
tgcgagaaaaggcaaaagcaatagc

SEQ ID NO: 232232 - DNA, 25 bp, Artificial
  probe
  misc_feature (1)..(25): SEQ ID NO: 1707; WAN024G5R_at; Start 111; Stop 135
cagacaaagaatcccacaaacaaga

SEQ ID NO: 232233 - DNA, 25 bp, Artificial
  probe
  misc_feature (1)..(25): SEQ ID NO: 1707; WAN024G5R_at; Start 127; Stop 151
caaacaagatctgccgtcattaaaa

SEQ ID NO: 232234 - DNA, 25 bp, Artificial
  probe
  misc_feature (1)..(25): SEQ ID NO: 1707; WAN024G5R_at; Start 172; Stop 196
tctgaaataactccgccaaagggat

SEQ ID NO: 232235 - DNA, 25 bp, Artificial
  probe
  misc_feature (1)..(25): SEQ ID NO: 1707; WAN024G5R_at; Start 8; Stop 32
ctttattggctgtgcgagaaaaggc

SEQ ID NO: 232236 - DNA, 25 bp, Artificial
  probe
  misc_feature (1)..(25): SEQ ID NO: 1707; WAN024G5R_at; Start 103; Stop 127
gaaatagccagacaaagaatcccac

SEQ ID NO: 232237 - DNA, 25 bp, Artificial
  probe
  misc_feature (1)..(25): SEQ ID NO: 1707; WAN024G5R_at; Start 152; Stop 176
tcttacgacgagaaaaacggtctga

SEQ ID NO: 232238 - DNA, 25 bp, Artificial
  probe
  misc_feature (1)..(25): SEQ ID NO: 1707; WAN024G5R_at; Start 183; Stop 207
tccgccaaagggattgacgagaata

SEQ ID NO: 232239 - DNA, 25 bp, Artificial
  probe
  misc_feature (1)..(25): SEQ ID NO: 1707; WAN024G5R_at; Start 89; Stop 113
cattccttatgaaagaaatagccag

SEQ ID NO: 232240 - DNA, 25 bp, Artificial
  probe
  misc_feature (1)..(25): SEQ ID NO: 1707; WAN024G5R_at; Start 69; Stop 93
agcgccaatcatccagctatcattc

SEQ ID NO: 232241 - DNA, 25 bp, Artificial
  probe
  misc_feature (1)..(25): SEQ ID NO: 1707; WAN024G5R_at; Start 62; Stop 86
caatcaaagcgccaatcatccagct

SEQ ID NO: 232242 - DNA, 25 bp, Artificial
  probe
  misc_feature (1)..(25): SEQ ID NO: 1707; WAN024G5R_at; Start 169; Stop 193
cggtctgaaataactccgccaaagg

SEQ ID NO: 232243 - DNA, 25 bp, Artificial
  probe
  misc_feature (1)..(25): SEQ ID NO: 1707; WAN024G5R_at; Start 124; Stop 148
ccacaaacaagatctgccgtcatta

SEQ ID NO: 232244 - DNA, 25 bp, Artificial
  probe
  misc_feature (1)..(25): SEQ ID NO: 1707; WAN024G5R_at; Start 107; Stop 131
tagccagacaaagaatcccacaaac

SEQ ID NO: 232245 - DNA, 25 bp, Artificial
  probe
  misc_feature (1)..(25): SEQ ID NO: 1707; WAN024G5R_at; Start 43; Stop 67
gcctgcacaatgttagcaacaatca

SEQ ID NO: 232246 - DNA, 25 bp, Artificial
  probe
  misc_feature (1)..(25): SEQ ID NO: 1707; WAN024G5R_at; Start 134; Stop 158
gatctgccgtcattaaaatcttacg

SEQ ID NO: 232247 - DNA, 25 bp, Artificial
  probe
  misc_feature (1)..(25): SEQ ID NO: 1707; WAN024G5R_at; Start 65; Stop 89
tcaaagcgccaatcatccagctatc

SEQ ID NO: 232248 - DNA, 25 bp, Artificial
  probe
  misc_feature (1)..(25): SEQ ID NO: 1707; WAN024G5R_at; Start 139; Stop 163
gccgtcattaaaatcttacgacgag

SEQ ID NO: 232249 - DNA, 25 bp, Artificial
  probe
  misc_feature (1)..(25): SEQ ID NO: 1707; WAN024G5R_at; Start 207; Stop 231
agatgtgacgagctcagaaatctga

SEQ ID NO: 232250 - DNA, 25 bp, Artificial
  probe
  misc_feature (1)..(25): SEQ ID NO: 1707; WAN024G5R_at; Start 187; Stop 211
ccaaagggattgacgagaatagatg

SEQ ID NO: 232251 - DNA, 25 bp, Artificial
  probe
  misc_feature (1)..(25): SEQ ID NO: 1707; WAN024G5R_at; Start 119; Stop 143
gaatcccacaaacaagatctgccgt

SEQ ID NO: 232252 - DNA, 25 bp, Artificial
  probe
  misc_feature (1)..(25): SEQ ID NO: 1707; WAN024G5R_at; Start 3; Stop 27
gatagctttattggctgtgcgagaa

SEQ ID NO: 232253 - DNA, 25 bp, Artificial
  probe
  misc_feature (1)..(25): SEQ ID NO: 1707; WAN024G5R_at; Start 200; Stop 224
cgagaatagatgtgacgagctcaga

SEQ ID NO: 232254 - DNA, 25 bp, Artificial
  probe
  misc_feature (1)..(25): SEQ ID NO: 1707; WAN024G5R_at; Start 31; Stop 55
gcaaaagcaatagcctgcacaatgt

SEQ ID NO: 232255 - DNA, 25 bp, Artificial
  probe
  misc_feature (1)..(25): SEQ ID NO: 1235; WAN024G5S_at; Start 500; Stop 524
tagactcgctgacttttttcattgc

SEQ ID NO: 232256 - DNA, 25 bp, Artificial
  probe
  misc_feature (1)..(25): SEQ ID NO: 1235; WAN024G5S_at; Start 653; Stop 677
tcttccttttgctggtagcttccag

SEQ ID NO: 232257 - DNA, 25 bp, Artificial
  probe
  misc_feature (1)..(25): SEQ ID NO: 1235; WAN024G5S_at; Start 337; Stop 361
tctcgcacagccaataaagctatca

SEQ ID NO: 232258 - DNA, 25 bp, Artificial
  probe
  misc_feature (1)..(25): SEQ ID NO: 1235; WAN024G5S_at; Start 533; Stop 557
tagtggctttccttccaaaagagga

SEQ ID NO: 232259 - DNA, 25 bp, Artificial
  probe
  misc_feature (1)..(25): SEQ ID NO: 1235; WAN024G5S_at; Start 632; Stop 656
tctggcatcagcaagaaattttctt

SEQ ID NO: 232260 - DNA, 25 bp, Artificial
  probe
  misc_feature (1)..(25): SEQ ID NO: 1235; WAN024G5S_at; Start 139; Stop 163
tctgagctcgtcacatctattctcg

SEQ ID NO: 232261 - DNA, 25 bp, Artificial
  probe
  misc_feature (1)..(25): SEQ ID NO: 1235; WAN024G5S_at; Start 620; Stop 644
ggttacactatatctggcatcagca

SEQ ID NO: 232262 - DNA, 25 bp, Artificial
  probe
  misc_feature (1)..(25): SEQ ID NO: 1235; WAN024G5S_at; Start 270; Stop 294
gaatgatagctggatgattggcgct

SEQ ID NO: 232263 - DNA, 25 bp, Artificial
  probe
  misc_feature (1)..(25): SEQ ID NO: 1235; WAN024G5S_at; Start 187; Stop 211
tcagaccgtttttctcgtcgtaaga

SEQ ID NO: 232264 - DNA, 25 bp, Artificial
  probe
  misc_feature (1)..(25): SEQ ID NO: 1235; WAN024G5S_at; Start 843; Stop 867
tttactggctttgacaggtgtcgga

SEQ ID NO: 232265 - DNA, 25 bp, Artificial
  probe
  misc_feature (1)..(25): SEQ ID NO: 1235; WAN024G5S_at; Start 303; Stop 327
tgctaacattgtgcaggctattgct

SEQ ID NO: 232266 - DNA, 25 bp, Artificial
  probe
  misc_feature (1)..(25): SEQ ID NO: 1235; WAN024G5S_at; Start 486; Stop 510
tatgacgctactgctagactcgctg

SEQ ID NO: 232267 - DNA, 25 bp, Artificial
  probe
  misc_feature (1)..(25): SEQ ID NO: 1235; WAN024G5S_at; Start 247; Stop 271
tgtctggctatttctttcataagga

SEQ ID NO: 232268 - DNA, 25 bp, Artificial
  probe
  misc_feature (1)..(25): SEQ ID NO: 1235; WAN024G5S_at; Start 325; Stop 349
gcttttgccttttctcgcacagcca

SEQ ID NO: 232269 - DNA, 25 bp, Artificial
  probe
  misc_feature (1)..(25): SEQ ID NO: 1235; WAN024G5S_at; Start 712; Stop 736
cttcccttttcgaatcagctttacg

SEQ ID NO: 232270 - DNA, 25 bp, Artificial
  probe
  misc_feature (1)..(25): SEQ ID NO: 1235; WAN024G5S_at; Start 674; Stop 698
ccagcgttaatttcttttttgcagc

SEQ ID NO: 232271 - DNA, 25 bp, Artificial
  probe
  misc_feature (1)..(25): SEQ ID NO: 1235; WAN024G5S_at; Start 973; Stop 997
caaaccaaggttgagagcgaatttc

SEQ ID NO: 232272 - DNA, 25 bp, Artificial
  probe
  misc_feature (1)..(25): SEQ ID NO: 1235; WAN024G5S_at; Start 102; Stop 126
gactataggacagacagttttagga

SEQ ID NO: 232273 - DNA, 25 bp, Artificial
  probe
  misc_feature (1)..(25): SEQ ID NO: 1235; WAN024G5S_at; Start 575; Stop 599
aaaaggcttttactgggagagatat

SEQ ID NO: 232274 - DNA, 25 bp, Artificial
  probe
  misc_feature (1)..(25): SEQ ID NO: 1235; WAN024G5S_at; Start 170; Stop 194
cctttggcggagttatttcagaccg

SEQ ID NO: 232275 - DNA, 25 bp, Artificial
  probe
  misc_feature (1)..(25): SEQ ID NO: 1235; WAN024G5S_at; Start 794; Stop 818
gggctcttctagctagtaaaattaa

SEQ ID NO: 232276 - DNA, 25 bp, Artificial
  probe
  misc_feature (1)..(25): SEQ ID NO: 1235; WAN024G5S_at; Start 1050; Stop 1074
tgcaaaaggatttatgacagtcttg

SEQ ID NO: 232277 - DNA, 25 bp, Artificial
  probe
  misc_feature (1)..(25): SEQ ID NO: 1235; WAN024G5S_at; Start 355; Stop 379
gctatcataactgaagtggtggaga

SEQ ID NO: 232278 - DNA, 25 bp, Artificial
  probe
  misc_feature (1)..(25): SEQ ID NO: 1235; WAN024G5S_at; Start 205; Stop 229
cgtaagattttaatgacggcagatc

SEQ ID NO: 232279 - DNA, 25 bp, Artificial
  probe
  misc_feature (1)..(25): SEQ ID NO: 1235; WAN024G5S_at; Start 39; Stop 63
tatcaataaaatgggaaatatgctc

SEQ ID NO: 232280 - DNA, 25 bp, Artificial
  probe
  misc_feature (1)..(25): SEQ ID NO: 1235; WAN024G5S_at; Start 73; Stop 97
ggaaatagtgtctggttggcttcta

SEQ ID NO: 232281 - DNA, 25 bp, Artificial
  probe
  misc_feature (1)..(25): SEQ ID NO: 1235; WAN024G5S_at; Start 10; Stop 34
tatgcagtgcagttgattagccgtg

SEQ ID NO: 232282 - DNA, 25 bp, Artificial
  probe
  misc_feature (1)..(25): SEQ ID NO: 1235; WAN024G5S_at; Start 605; Stop 629
tagatatcaaggatgggttacacta

SEQ ID NO: 232283 - DNA, 25 bp, Artificial
  probe
  misc_feature (1)..(25): SEQ ID NO: 1235; WAN024G5S_at; Start 156; Stop 180
tattctcgtcaatccctttggcgga

SEQ ID NO: 232284 - DNA, 25 bp, Artificial
  probe
  misc_feature (1)..(25): SEQ ID NO: 1235; WAN024G5S_at; Start 285; Stop 309
gattggcgctttgattgttgctaac

SEQ ID NO: 232285 - DNA, 25 bp, Artificial
  probe
  misc_feature (1)..(25): SEQ ID NO: 1235; WAN024G5S_at; Start 221; Stop 245
cggcagatcttgtttgtgggattct

SEQ ID NO: 232286 - DNA, 25 bp, Artificial
  probe
  misc_feature (1)..(25): SEQ ID NO: 1235; WAN024G5S_at; Start 124; Stop 148
ggaatgtatcagatttctgagctcg

SEQ ID NO: 232287 - DNA, 25 bp, Artificial
  probe
  misc_feature (1)..(25): SEQ ID NO: 1235; WAN024G5S_at; Start 422; Stop 446
tgcaggttgtaggtgttagctctcc

SEQ ID NO: 232288 - DNA, 25 bp, Artificial
  probe
  misc_feature (1)..(25): SEQ ID NO: 1235; WAN024G5S_at; Start 873; Stop 897
tatgatgggattaccacttccaact

SEQ ID NO: 232289 - DNA, 25 bp, Artificial
  probe
  misc_feature (1)..(25): SEQ ID NO: 5623; WAN024G5T_at; Start 160; Stop 184
ggtgtcagtttgaaatcattccaga

SEQ ID NO: 232290 - DNA, 25 bp, Artificial
  probe
  misc_feature (1)..(25): SEQ ID NO: 5623; WAN024G5T_at; Start 32; Stop 56
tgttttccatagacaatttagctaa

SEQ ID NO: 232291 - DNA, 25 bp, Artificial
  probe
  misc_feature (1)..(25): SEQ ID NO: 5623; WAN024G5T_at; Start 181; Stop 205
cagagttcatccagcaccgtattac

SEQ ID NO: 232292 - DNA, 25 bp, Artificial
  probe
  misc_feature (1)..(25): SEQ ID NO: 5623; WAN024G5T_at; Start 45; Stop 69
caatttagctaaaagcaaacgagct

SEQ ID NO: 232293 - DNA, 25 bp, Artificial
  probe
  misc_feature (1)..(25): SEQ ID NO: 5623; WAN024G5T_at; Start 212; Stop 236
tcagcttgctttgggtttggtcata

SEQ ID NO: 232294 - DNA, 25 bp, Artificial
  probe
  misc_feature (1)..(25): SEQ ID NO: 5623; WAN024G5T_at; Start 62; Stop 86
aacgagctttttcgccaccagatag

SEQ ID NO: 232295 - DNA, 25 bp, Artificial
  probe
  misc_feature (1)..(25): SEQ ID NO: 5623; WAN024G5T_at; Start 107; Stop 131
catcatctcctgagaaaaggaaggc

SEQ ID NO: 232296 - DNA, 25 bp, Artificial
  probe
  misc_feature (1)..(25): SEQ ID NO: 5623; WAN024G5T_at; Start 97; Stop 121
gattttttaacatcatctcctgaga

SEQ ID NO: 232297 - DNA, 25 bp, Artificial
  probe
  misc_feature (1)..(25): SEQ ID NO: 5623; WAN024G5T_at; Start 171; Stop 195
gaaatcattccagagttcatccagc

SEQ ID NO: 232298 - DNA, 25 bp, Artificial
  probe
  misc_feature (1)..(25): SEQ ID NO: 5623; WAN024G5T_at; Start 69; Stop 93
tttttcgccaccagatagcatgccg

SEQ ID NO: 232299 - DNA, 25 bp, Artificial
  probe
  misc_feature (1)..(25): SEQ ID NO: 5623; WAN024G5T_at; Start 2; Stop 26
tggtcggctcatccagaatcaaaaa

SEQ ID NO: 232300 - DNA, 25 bp, Artificial
  probe
  misc_feature (1)..(25): SEQ ID NO: 5623; WAN024G5T_at; Start 178; Stop 202
ttccagagttcatccagcaccgtat

SEQ ID NO: 232301 - DNA, 25 bp, Artificial
  probe
  misc_feature (1)..(25): SEQ ID NO: 5623; WAN024G5T_at; Start 110; Stop 134
catctcctgagaaaaggaaggctcc

SEQ ID NO: 232302 - DNA, 25 bp, Artificial
  probe
  misc_feature (1)..(25): SEQ ID NO: 5623; WAN024G5T_at; Start 197; Stop 221
ccgtattacttggtgtcagcttgct

SEQ ID NO: 232303 - DNA, 25 bp, Artificial
  probe
  misc_feature (1)..(25): SEQ ID NO: 5623; WAN024G5T_at; Start 112; Stop 136
tctcctgagaaaaggaaggctccaa

SEQ ID NO: 232304 - DNA, 25 bp, Artificial
  probe
  misc_feature (1)..(25): SEQ ID NO: 5623; WAN024G5T_at; Start 164; Stop 188
tcagtttgaaatcattccagagttc

SEQ ID NO: 232305 - DNA, 25 bp, Artificial
  probe
  misc_feature (1)..(25): SEQ ID NO: 5623; WAN024G5T_at; Start 41; Stop 65
tagacaatttagctaaaagcaaacg

SEQ ID NO: 232306 - DNA, 25 bp, Artificial
  probe
  misc_feature (1)..(25): SEQ ID NO: 5623; WAN024G5T_at; Start 203; Stop 227
tacttggtgtcagcttgctttgggt

SEQ ID NO: 232307 - DNA, 25 bp, Artificial
  probe
  misc_feature (1)..(25): SEQ ID NO: 5623; WAN024G5T_at; Start 137; Stop 161
gacggttgcggatttcaacttctgg

SEQ ID NO: 232308 - DNA, 25 bp, Artificial
  probe
  misc_feature (1)..(25): SEQ ID NO: 5623; WAN024G5T_at; Start 73; Stop 97
tcgccaccagatagcatgccgactg

SEQ ID NO: 232309 - DNA, 25 bp, Artificial
  probe
  misc_feature (1)..(25): SEQ ID NO: 5623; WAN024G5T_at; Start 191; Stop 215
ccagcaccgtattacttggtgtcag

SEQ ID NO: 232310 - DNA, 25 bp, Artificial
  probe
  misc_feature (1)..(25): SEQ ID NO: 5623; WAN024G5T_at; Start 84; Stop 108
tagcatgccgactgattttttaaca

SEQ ID NO: 232311 - DNA, 25 bp, Artificial
  probe
  misc_feature (1)..(25): SEQ ID NO: 5623; WAN024G5T_at; Start 152; Stop 176
caacttctggtgtcagtttgaaatc

SEQ ID NO: 232312 - DNA, 25 bp, Artificial
  probe
  misc_feature (1)..(25): SEQ ID NO: 5623; WAN024G5T_at; Start 76; Stop 100
ccaccagatagcatgccgactgatt

SEQ ID NO: 232313 - DNA, 25 bp, Artificial
  probe
  misc_feature (1)..(25): SEQ ID NO: 5623; WAN024G5T_at; Start 117; Stop 141
tgagaaaaggaaggctccaagacgg

SEQ ID NO: 232314 - DNA, 25 bp, Artificial
  probe
  misc_feature (1)..(25): SEQ ID NO: 5623; WAN024G5T_at; Start 185; Stop 209
gttcatccagcaccgtattacttgg

SEQ ID NO: 232315 - DNA, 25 bp, Artificial
  probe
  misc_feature (1)..(25): SEQ ID NO: 5623; WAN024G5T_at; Start 143; Stop 167
tgcggatttcaacttctggtgtcag

SEQ ID NO: 232316 - DNA, 25 bp, Artificial
  probe
  misc_feature (1)..(25): SEQ ID NO: 5623; WAN024G5T_at; Start 59; Stop 83
gcaaacgagctttttcgccaccaga

SEQ ID NO: 232317 - DNA, 25 bp, Artificial
  probe
  misc_feature (1)..(25): SEQ ID NO: 5623; WAN024G5T_at; Start 132; Stop 156
tccaagacggttgcggatttcaact

SEQ ID NO: 232318 - DNA, 25 bp, Artificial
  probe
  misc_feature (1)..(25): SEQ ID NO: 5623; WAN024G5T_at; Start 129; Stop 153
ggctccaagacggttgcggatttca

SEQ ID NO: 232319 - DNA, 25 bp, Artificial
  probe
  misc_feature (1)..(25): SEQ ID NO: 5623; WAN024G5T_at; Start 175; Stop 199
tcattccagagttcatccagcaccg

SEQ ID NO: 232320 - DNA, 25 bp, Artificial
  probe
  misc_feature (1)..(25): SEQ ID NO: 5623; WAN024G5T_at; Start 65; Stop 89
gagctttttcgccaccagatagcat

SEQ ID NO: 232321 - DNA, 25 bp, Artificial
  probe
  misc_feature (1)..(25): SEQ ID NO: 5623; WAN024G5T_at; Start 82; Stop 106
gatagcatgccgactgattttttaa

SEQ ID NO: 232322 - DNA, 25 bp, Artificial
  probe
  misc_feature (1)..(25): SEQ ID NO: 5623; WAN024G5T_at; Start 126; Stop 150
gaaggctccaagacggttgcggatt

SEQ ID NO: 232323 - DNA, 25 bp, Artificial
  probe
  misc_feature (1)..(25): SEQ ID NO: 1811; WAN024G5U_at; Start 946; Stop 970
ttccagtctgaaaaaacgtcgggca

SEQ ID NO: 232324 - DNA, 25 bp, Artificial
  probe
  misc_feature (1)..(25): SEQ ID NO: 1811; WAN024G5U_at; Start 1841; Stop 1865
aaatcagccatcgtcaggaagaagc

SEQ ID NO: 232325 - DNA, 25 bp, Artificial
  probe
  misc_feature (1)..(25): SEQ ID NO: 1811; WAN024G5U_at; Start 1807; Stop 1831
gacaaactcatggaattacaggctg

SEQ ID NO: 232326 - DNA, 25 bp, Artificial
  probe
  misc_feature (1)..(25): SEQ ID NO: 1811; WAN024G5U_at; Start 610; Stop 634
tacttggtaaactatagcggtgccc

SEQ ID NO: 232327 - DNA, 25 bp, Artificial
  probe
  misc_feature (1)..(25): SEQ ID NO: 1811; WAN024G5U_at; Start 1180; Stop 1204
tatgaccaaacccaaagcaagctga

SEQ ID NO: 232328 - DNA, 25 bp, Artificial
  probe
  misc_feature (1)..(25): SEQ ID NO: 1811; WAN024G5U_at; Start 798; Stop 822
gaaggaaatcgctgctctggaagac

SEQ ID NO: 232329 - DNA, 25 bp, Artificial
  probe
  misc_feature (1)..(25): SEQ ID NO: 1811; WAN024G5U_at; Start 1333; Stop 1357
tctggtggcgaaaaagctcgtttgc

SEQ ID NO: 232330 - DNA, 25 bp, Artificial
  probe
  misc_feature (1)..(25): SEQ ID NO: 1811; WAN024G5U_at; Start 1545; Stop 1569
gaatggttcaactctctaccttgga

SEQ ID NO: 232331 - DNA, 25 bp, Artificial
  probe
  misc_feature (1)..(25): SEQ ID NO: 1811; WAN024G5U_at; Start 387; Stop 411
ttttcgccaagcaggtggctttacc

SEQ ID NO: 232332 - DNA, 25 bp, Artificial
  probe
  misc_feature (1)..(25): SEQ ID NO: 1811; WAN024G5U_at; Start 1785; Stop 1809
aatgttggaaacaaacgatgccgac

SEQ ID NO: 232333 - DNA, 25 bp, Artificial
  probe
  misc_feature (1)..(25): SEQ ID NO: 1811; WAN024G5U_at; Start 1661; Stop 1685
cagtcaatgactatcaggcccagaa

SEQ ID NO: 232334 - DNA, 25 bp, Artificial
  probe
  misc_feature (1)..(25): SEQ ID NO: 1811; WAN024G5U_at; Start 68; Stop 92
acctgcaggttgatgaacgagatcg

SEQ ID NO: 232335 - DNA, 25 bp, Artificial
  probe
  misc_feature (1)..(25): SEQ ID NO: 1811; WAN024G5U_at; Start 1196; Stop 1220
gcaagctgacaccaagtaatacggt

SEQ ID NO: 232336 - DNA, 25 bp, Artificial
  probe
  misc_feature (1)..(25): SEQ ID NO: 1811; WAN024G5U_at; Start 1249; Stop 1273
ctgacaccagaagttgaaatccgca

SEQ ID NO: 232337 - DNA, 25 bp, Artificial
  probe
  misc_feature (1)..(25): SEQ ID NO: 1811; WAN024G5U_at; Start 476; Stop 500
aaattgctgagctttctggtggtca

SEQ ID NO: 232338 - DNA, 25 bp, Artificial
  probe
  misc_feature (1)..(25): SEQ ID NO: 1811; WAN024G5U_at; Start 1823; Stop 1847
tacaggctgagctggacaaaatcag

SEQ ID NO: 232339 - DNA, 25 bp, Artificial
  probe
  misc_feature (1)..(25): SEQ ID NO: 1811; WAN024G5U_at; Start 648; Stop 672
ccacgaccgttatttcttggacaag

SEQ ID NO: 232340 - DNA, 25 bp, Artificial
  probe
  misc_feature (1)..(25): SEQ ID NO: 1811; WAN024G5U_at; Start 298; Stop 322
caactgcgtcagatggagctggaga

SEQ ID NO: 232341 - DNA, 25 bp, Artificial
  probe
  misc_feature (1)..(25): SEQ ID NO: 1811; WAN024G5U_at; Start 1106; Stop 1130
tcaagtctattgtggaccagattcc

SEQ ID NO: 232342 - DNA, 25 bp, Artificial
  probe
  misc_feature (1)..(25): SEQ ID NO: 1811; WAN024G5U_at; Start 1752; Stop 1776
gctagaaagtcaaagccaagccatt

SEQ ID NO: 232343 - DNA, 25 bp, Artificial
  probe
  misc_feature (1)..(25): SEQ ID NO: 1811; WAN024G5U_at; Start 557; Stop 581
tggacgagccaactaaccacttgga

SEQ ID NO: 232344 - DNA, 25 bp, Artificial
  probe
  misc_feature (1)..(25): SEQ ID NO: 1811; WAN024G5U_at; Start 1501; Stop 1525
tactttatcaatcgtgtggcaactc

SEQ ID NO: 232345 - DNA, 25 bp, Artificial
  probe
  misc_feature (1)..(25): SEQ ID NO: 1811; WAN024G5U_at; Start 1056; Stop 1080
gaatgctgtcgctatcgttggtcca

SEQ ID NO: 232346 - DNA, 25 bp, Artificial
  probe
  misc_feature (1)..(25): SEQ ID NO: 1811; WAN024G5U_at; Start 1561; Stop 1585
taccttggagattacgactactatg

SEQ ID NO: 232347 - DNA, 25 bp, Artificial
  probe
  misc_feature (1)..(25): SEQ ID NO: 1811; WAN024G5U_at; Start 624; Stop 648
tagcggtgccctcattatcgtcagc

SEQ ID NO: 232348 - DNA, 25 bp, Artificial
  probe
  misc_feature (1)..(25): SEQ ID NO: 1811; WAN024G5U_at; Start 1611; Stop 1635
gagtcagactgaggaagcttcaact

SEQ ID NO: 232349 - DNA, 25 bp, Artificial
  probe
  misc_feature (1)..(25): SEQ ID NO: 1811; WAN024G5U_at; Start 667; Stop 691
gacaaggttgcgacaattacgctag

SEQ ID NO: 232350 - DNA, 25 bp, Artificial
  probe
  misc_feature (1)..(25): SEQ ID NO: 1811; WAN024G5U_at; Start 447; Stop 471
caagtttgacgagtctatgtggcag

SEQ ID NO: 232351 - DNA, 25 bp, Artificial
  probe
  misc_feature (1)..(25): SEQ ID NO: 1811; WAN024G5U_at; Start 408; Stop 432
tacctatgaagctgatattcgagcg

SEQ ID NO: 232352 - DNA, 25 bp, Artificial
  probe
  misc_feature (1)..(25): SEQ ID NO: 1811; WAN024G5U_at; Start 1637; Stop 1661
gcaatcaagcaaaggaagcaagtcc

SEQ ID NO: 232353 - DNA, 25 bp, Artificial
  probe
  misc_feature (1)..(25): SEQ ID NO: 1811; WAN024G5U_at; Start 1075; Stop 1099
ggtccaaatggtatcggcaagtcaa

SEQ ID NO: 232354 - DNA, 25 bp, Artificial
  probe
  misc_feature (1)..(25): SEQ ID NO: 1811; WAN024G5U_at; Start 1319; Stop 1343
cagtcggcatgctatctggtggcga

SEQ ID NO: 232355 - DNA, 25 bp, Artificial
  probe
  misc_feature (1)..(25): SEQ ID NO: 1811; WAN024G5U_at; Start 109; Stop 133
aaaaatggtgcaggtaagtctactc

SEQ ID NO: 232356 - DNA, 25 bp, Artificial
  probe
  misc_feature (1)..(25): SEQ ID NO: 1811; WAN024G5U_at; Start 1212; Stop 1236
taatacggtgctggatgaactctgg

SEQ ID NO: 232357 - DNA, 25 bp, Artificial
  probe
  misc_feature (1)..(25): SEQ ID NO: 4170; WAN024G5V_at; Start 212; Stop 236
tcatggataaggcaaggaattttca

SEQ ID NO: 232358 - DNA, 25 bp, Artificial
  probe
  misc_feature (1)..(25): SEQ ID NO: 4170; WAN024G5V_at; Start 632; Stop 656
gttaccagcattgtttagagcattc

SEQ ID NO: 232359 - DNA, 25 bp, Artificial
  probe
  misc_feature (1)..(25): SEQ ID NO: 4170; WAN024G5V_at; Start 299; Stop 323
caggttttcaaaagcttcaaagaga

SEQ ID NO: 232360 - DNA, 25 bp, Artificial
  probe
  misc_feature (1)..(25): SEQ ID NO: 4170; WAN024G5V_at; Start 768; Stop 792
tcaaaaaggacagtgtaaagaaggc

SEQ ID NO: 232361 - DNA, 25 bp, Artificial
  probe
  misc_feature (1)..(25): SEQ ID NO: 4170; WAN024G5V_at; Start 463; Stop 487
ttcaaaacagaagaatggaccatgt

SEQ ID NO: 232362 - DNA, 25 bp, Artificial
  probe
  misc_feature (1)..(25): SEQ ID NO: 4170; WAN024G5V_at; Start 523; Stop 547
tacgatgtagactatgtcactcgga

SEQ ID NO: 232363 - DNA, 25 bp, Artificial
  probe
  misc_feature (1)..(25): SEQ ID NO: 4170; WAN024G5V_at; Start 86; Stop 110
taaaggaagcagcaggcgaatcctg

SEQ ID NO: 232364 - DNA, 25 bp, Artificial
  probe
  misc_feature (1)..(25): SEQ ID NO: 4170; WAN024G5V_at; Start 79; Stop 103
tattctttaaaggaagcagcaggcg

SEQ ID NO: 232365 - DNA, 25 bp, Artificial
  probe
  misc_feature (1)..(25): SEQ ID NO: 4170; WAN024G5V_at; Start 100; Stop 124
ggcgaatcctgctctacctctcagt

SEQ ID NO: 232366 - DNA, 25 bp, Artificial
  probe
  misc_feature (1)..(25): SEQ ID NO: 4170; WAN024G5V_at; Start 844; Stop 868
gagcaagtagcctattatcaggaac

SEQ ID NO: 232367 - DNA, 25 bp, Artificial
  probe
  misc_feature (1)..(25): SEQ ID NO: 4170; WAN024G5V_at; Start 391; Stop 415
ggtctgatttgtcaaagagatgcga

SEQ ID NO: 232368 - DNA, 25 bp, Artificial
  probe
  misc_feature (1)..(25): SEQ ID NO: 4170; WAN024G5V_at; Start 540; Stop 564
cactcggattggtagagaagttatg

SEQ ID NO: 232369 - DNA, 25 bp, Artificial
  probe
  misc_feature (1)..(25): SEQ ID NO: 4170; WAN024G5V_at; Start 826; Stop 850
gatgtgttaggtcttccagagcaag

SEQ ID NO: 232370 - DNA, 25 bp, Artificial
  probe
  misc_feature (1)..(25): SEQ ID NO: 4170; WAN024G5V_at; Start 575; Stop 599
aattttaccaagagattagtcgcca

SEQ ID NO: 232371 - DNA, 25 bp, Artificial
  probe
  misc_feature (1)..(25): SEQ ID NO: 4170; WAN024G5V_at; Start 253; Stop 277
tctatgatggcacagattatcccac

SEQ ID NO: 232372 - DNA, 25 bp, Artificial
  probe
  misc_feature (1)..(25): SEQ ID NO: 4170; WAN024G5V_at; Start 53; Stop 77
ttcgtgaatttcgaacaagtggaaa

SEQ ID NO: 232373 - DNA, 25 bp, Artificial
  probe
  misc_feature (1)..(25): SEQ ID NO: 4170; WAN024G5V_at; Start 372; Stop 396
gaactggattttgctacaaggtctg

SEQ ID NO: 232374 - DNA, 25 bp, Artificial
  probe
  misc_feature (1)..(25): SEQ ID NO: 4170; WAN024G5V_at; Start 241; Stop 265
catgaacatgtgtctatgatggcac

SEQ ID NO: 232375 - DNA, 25 bp, Artificial
  probe
  misc_feature (1)..(25): SEQ ID NO: 4170; WAN024G5V_at; Start 671; Stop 695
ccaactattttgaggcttatacaga

SEQ ID NO: 232376 - DNA, 25 bp, Artificial
  probe
  misc_feature (1)..(25): SEQ ID NO: 4170; WAN024G5V_at; Start 487; Stop 511
tatgagttgattcttttcggtaacc

SEQ ID NO: 232377 - DNA, 25 bp, Artificial
  probe
  misc_feature (1)..(25): SEQ ID NO: 4170; WAN024G5V_at; Start 203; Stop 227
tcgaaaatttcatggataaggcaag

SEQ ID NO: 232378 - DNA, 25 bp, Artificial
  probe
  misc_feature (1)..(25): SEQ ID NO: 4170; WAN024G5V_at; Start 356; Stop 380
ccctttattttgagctgaactggat

SEQ ID NO: 232379 - DNA, 25 bp, Artificial
  probe
  misc_feature (1)..(25): SEQ ID NO: 4170; WAN024G5V_at; Start 719; Stop 743
agctttatgagcgtaatgttttcca

SEQ ID NO: 232380 - DNA, 25 bp, Artificial
  probe
  misc_feature (1)..(25): SEQ ID NO: 4170; WAN024G5V_at; Start 615; Stop 639
gattttggccctcaattgttaccag

SEQ ID NO: 232381 - DNA, 25 bp, Artificial
  probe
  misc_feature (1)..(25): SEQ ID NO: 4170; WAN024G5V_at; Start 280; Stop 304
tactattcaaacgatattgcaggtt

SEQ ID NO: 232382 - DNA, 25 bp, Artificial
  probe
  misc_feature (1)..(25): SEQ ID NO: 4170; WAN024G5V_at; Start 783; Stop 807
taaagaaggctgtaagcagatgcaa

SEQ ID NO: 232383 - DNA, 25 bp, Artificial
  probe
  misc_feature (1)..(25): SEQ ID NO: 4170; WAN024G5V_at; Start 151; Stop 175
gacctggcagtctcccgtttctttg

SEQ ID NO: 232384 - DNA, 25 bp, Artificial
  probe
  misc_feature (1)..(25): SEQ ID NO: 4170; WAN024G5V_at; Start 183; Stop 207
ggataacattcatgtaacaatcgaa

SEQ ID NO: 232385 - DNA, 25 bp, Artificial
  probe
  misc_feature (1)..(25): SEQ ID NO: 4170; WAN024G5V_at; Start 32; Stop 56
tggaacatcttggaaaagtatttcg

SEQ ID NO: 232386 - DNA, 25 bp, Artificial
  probe
  misc_feature (1)..(25): SEQ ID NO: 4170; WAN024G5V_at; Start 861; Stop 885
tcaggaacactacgaaaaatttgtc

SEQ ID NO: 232387 - DNA, 25 bp, Artificial
  probe
  misc_feature (1)..(25): SEQ ID NO: 4170; WAN024G5V_at; Start 418; Stop 442
tatgatatgaagcaggatgatttgg

SEQ ID NO: 232388 - DNA, 25 bp, Artificial
  probe
  misc_feature (1)..(25): SEQ ID NO: 4170; WAN024G5V_at; Start 560; Stop 584
ttatggagagggaggaattttacca

SEQ ID NO: 232389 - DNA, 25 bp, Artificial
  probe
  misc_feature (1)..(25): SEQ ID NO: 4170; WAN024G5V_at; Start 586; Stop 610
gagattagtcgccataagagattag

SEQ ID NO: 232390 - DNA, 25 bp, Artificial
  probe
  misc_feature (1)..(25): SEQ ID NO: 4170; WAN024G5V_at; Start 120; Stop 144
tcagttatctcgctttgagcttggg

SEQ ID NO: 232391 - DNA, 25 bp, Artificial
  probe
  misc_feature (1)..(25): SEQ ID NO: 2580; WAN024G5W_at; Start 140; Stop 164
aaagtaacacctcttccgaggtcat

SEQ ID NO: 232392 - DNA, 25 bp, Artificial
  probe
  misc_feature (1)..(25): SEQ ID NO: 2580; WAN024G5W_at; Start 272; Stop 296
tcaaacaaaagcgtgtaggaaacca

SEQ ID NO: 232393 - DNA, 25 bp, Artificial
  probe
  misc_feature (1)..(25): SEQ ID NO: 2580; WAN024G5W_at; Start 26; Stop 50
gcttgaggatcgattcgatgaatca

SEQ ID NO: 232394 - DNA, 25 bp, Artificial
  probe
  misc_feature (1)..(25): SEQ ID NO: 2580; WAN024G5W_at; Start 180; Stop 204
caagttggtcaggacgttttgtgat

SEQ ID NO: 232395 - DNA, 25 bp, Artificial
  probe
  misc_feature (1)..(25): SEQ ID NO: 2580; WAN024G5W_at; Start 174; Stop 198
ccttagcaagttggtcaggacgttt

SEQ ID NO: 232396 - DNA, 25 bp, Artificial
  probe
  misc_feature (1)..(25): SEQ ID NO: 2580; WAN024G5W_at; Start 59; Stop 83
gttttcacaatttcatttcttccga

SEQ ID NO: 232397 - DNA, 25 bp, Artificial
  probe
  misc_feature (1)..(25): SEQ ID NO: 2580; WAN024G5W_at; Start 36; Stop 60
cgattcgatgaatcatttccttcgt

SEQ ID NO: 232398 - DNA, 25 bp, Artificial
  probe
  misc_feature (1)..(25): SEQ ID NO: 2580; WAN024G5W_at; Start 119; Stop 143
tagtagccttgaccagaaataaaag

SEQ ID NO: 232399 - DNA, 25 bp, Artificial
  probe
  misc_feature (1)..(25): SEQ ID NO: 2580; WAN024G5W_at; Start 21; Stop 45
taaaggcttgaggatcgattcgatg

SEQ ID NO: 232400 - DNA, 25 bp, Artificial
  probe
  misc_feature (1)..(25): SEQ ID NO: 2580; WAN024G5W_at; Start 277; Stop 301
caaaagcgtgtaggaaaccaatctc

SEQ ID NO: 232401 - DNA, 25 bp, Artificial
  probe
  misc_feature (1)..(25): SEQ ID NO: 2580; WAN024G5W_at; Start 294; Stop 318
ccaatctcaaatccttgaagattag

SEQ ID NO: 232402 - DNA, 25 bp, Artificial
  probe
  misc_feature (1)..(25): SEQ ID NO: 2580; WAN024G5W_at; Start 223; Stop 247
ggcatatcctccttcaccaatcaaa

SEQ ID NO: 232403 - DNA, 25 bp, Artificial
  probe
  misc_feature (1)..(25): SEQ ID NO: 2580; WAN024G5W_at; Start 289; Stop 313
ggaaaccaatctcaaatccttgaag

SEQ ID NO: 232404 - DNA, 25 bp, Artificial
  probe
  misc_feature (1)..(25): SEQ ID NO: 2580; WAN024G5W_at; Start 87; Stop 111
tacagtagatgattttcaaattttc

SEQ ID NO: 232405 - DNA, 25 bp, Artificial
  probe
  misc_feature (1)..(25): SEQ ID NO: 2580; WAN024G5W_at; Start 267; Stop 291
taaaatcaaacaaaagcgtgtagga

SEQ ID NO: 232406 - DNA, 25 bp, Artificial
  probe
  misc_feature (1)..(25): SEQ ID NO: 2580; WAN024G5W_at; Start 151; Stop 175
tcttccgaggtcatcattaatcgcc

SEQ ID NO: 232407 - DNA, 25 bp, Artificial
  probe
  misc_feature (1)..(25): SEQ ID NO: 2580; WAN024G5W_at; Start 282; Stop 306
gcgtgtaggaaaccaatctcaaatc

SEQ ID NO: 232408 - DNA, 25 bp, Artificial
  probe
  misc_feature (1)..(25): SEQ ID NO: 2580; WAN024G5W_at; Start 236; Stop 260
tcaccaatcaaatcaataacacgag

SEQ ID NO: 232409 - DNA, 25 bp, Artificial
  probe
  misc_feature (1)..(25): SEQ ID NO: 2580; WAN024G5W_at; Start 168; Stop 192
taatcgccttagcaagttggtcagg

SEQ ID NO: 232410 - DNA, 25 bp, Artificial
  probe
  misc_feature (1)..(25): SEQ ID NO: 2580; WAN024G5W_at; Start 74; Stop 98
tttcttccgacaatacagtagatga

SEQ ID NO: 232411 - DNA, 25 bp, Artificial
  probe
  misc_feature (1)..(25): SEQ ID NO: 2580; WAN024G5W_at; Start 45; Stop 69
gaatcatttccttcgttttcacaat

SEQ ID NO: 232412 - DNA, 25 bp, Artificial
  probe
  misc_feature (1)..(25): SEQ ID NO: 2580; WAN024G5W_at; Start 102; Stop 126
tcaaattttctttactatagtagcc

SEQ ID NO: 232413 - DNA, 25 bp, Artificial
  probe
  misc_feature (1)..(25): SEQ ID NO: 2580; WAN024G5W_at; Start 159; Stop 183
ggtcatcattaatcgccttagcaag

SEQ ID NO: 232414 - DNA, 25 bp, Artificial
  probe
  misc_feature (1)..(25): SEQ ID NO: 2580; WAN024G5W_at; Start 199; Stop 223
tgtgataatcataaagcctttgccg

SEQ ID NO: 232415 - DNA, 25 bp, Artificial
  probe
  misc_feature (1)..(25): SEQ ID NO: 2580; WAN024G5W_at; Start 208; Stop 232
cataaagcctttgccggcatatcct

SEQ ID NO: 232416 - DNA, 25 bp, Artificial
  probe
  misc_feature (1)..(25): SEQ ID NO: 2580; WAN024G5W_at; Start 128; Stop 152
tgaccagaaataaaagtaacacctc

SEQ ID NO: 232417 - DNA, 25 bp, Artificial
  probe
  misc_feature (1)..(25): SEQ ID NO: 2580; WAN024G5W_at; Start 3; Stop 27
gggcttctgtaatagttataaaggc

SEQ ID NO: 232418 - DNA, 25 bp, Artificial
  probe
  misc_feature (1)..(25): SEQ ID NO: 2580; WAN024G5W_at; Start 185; Stop 209
tggtcaggacgttttgtgataatca

SEQ ID NO: 232419 - DNA, 25 bp, Artificial
  probe
  misc_feature (1)..(25): SEQ ID NO: 2580; WAN024G5W_at; Start 252; Stop 276
taacacgagaaacaataaaatcaaa

SEQ ID NO: 232420 - DNA, 25 bp, Artificial
  probe
  misc_feature (1)..(25): SEQ ID NO: 2580; WAN024G5W_at; Start 18; Stop 42
ttataaaggcttgaggatcgattcg

SEQ ID NO: 232421 - DNA, 25 bp, Artificial
  probe
  misc_feature (1)..(25): SEQ ID NO: 2580; WAN024G5W_at; Start 243; Stop 267
tcaaatcaataacacgagaaacaat

SEQ ID NO: 232422 - DNA, 25 bp, Artificial
  probe
  misc_feature (1)..(25): SEQ ID NO: 2580; WAN024G5W_at; Start 114; Stop 138
tactatagtagccttgaccagaaat

SEQ ID NO: 232423 - DNA, 25 bp, Artificial
  probe
  misc_feature (1)..(25): SEQ ID NO: 2580; WAN024G5W_at; Start 80; Stop 104
ccgacaatacagtagatgattttca

SEQ ID NO: 232424 - DNA, 25 bp, Artificial
  probe
  misc_feature (1)..(25): SEQ ID NO: 2580; WAN024G5W_at; Start 202; Stop 226
gataatcataaagcctttgccggca

SEQ ID NO: 232425 - DNA, 25 bp, Artificial
  probe
  misc_feature (1)..(25): SEQ ID NO: 1769; WAN024G5X_at; Start 781; Stop 805
caagcctttataactattacagaag

SEQ ID NO: 232426 - DNA, 25 bp, Artificial
  probe
  misc_feature (1)..(25): SEQ ID NO: 1769; WAN024G5X_at; Start 277; Stop 301
gagcatattccccttcatattgatc

SEQ ID NO: 232427 - DNA, 25 bp, Artificial
  probe
  misc_feature (1)..(25): SEQ ID NO: 1769; WAN024G5X_at; Start 617; Stop 641
gtcctgaccaacttgctaaggcgat

SEQ ID NO: 232428 - DNA, 25 bp, Artificial
  probe
  misc_feature (1)..(25): SEQ ID NO: 1769; WAN024G5X_at; Start 821; Stop 845
gagaaggcttcacctttgaaaaaga

SEQ ID NO: 232429 - DNA, 25 bp, Artificial
  probe
  misc_feature (1)..(25): SEQ ID NO: 1769; WAN024G5X_at; Start 602; Stop 626
tgattatcacaaaacgtcctgacca

SEQ ID NO: 232430 - DNA, 25 bp, Artificial
  probe
  misc_feature (1)..(25): SEQ ID NO: 1769; WAN024G5X_at; Start 711; Stop 735
aatcatctactgtattgtcggaaga

SEQ ID NO: 232431 - DNA, 25 bp, Artificial
  probe
  misc_feature (1)..(25): SEQ ID NO: 1769; WAN024G5X_at; Start 341; Stop 365
tcctattgggaattggccttggaat

SEQ ID NO: 232432 - DNA, 25 bp, Artificial
  probe
  misc_feature (1)..(25): SEQ ID NO: 1769; WAN024G5X_at; Start 292; Stop 316
catattgatcttcaaggtgatttac

SEQ ID NO: 232433 - DNA, 25 bp, Artificial
  probe
  misc_feature (1)..(25): SEQ ID NO: 1769; WAN024G5X_at; Start 423; Stop 447
caaatacactcatatatccatagga

SEQ ID NO: 232434 - DNA, 25 bp, Artificial
  probe
  misc_feature (1)..(25): SEQ ID NO: 1769; WAN024G5X_at; Start 371; Stop 395
ttaatgctggaggtacaactggcgg

SEQ ID NO: 232435 - DNA, 25 bp, Artificial
  probe
  misc_feature (1)..(25): SEQ ID NO: 1769; WAN024G5X_at; Start 400; Stop 424
gatattctagctcgtattctcaaca

SEQ ID NO: 232436 - DNA, 25 bp, Artificial
  probe
  misc_feature (1)..(25): SEQ ID NO: 1769; WAN024G5X_at; Start 77; Stop 101
tagttccccatcatctctttgaagg

SEQ ID NO: 232437 - DNA, 25 bp, Artificial
  probe
  misc_feature (1)..(25): SEQ ID NO: 1769; WAN024G5X_at; Start 23; Stop 47
tttttaccattttactaggtgctgc

SEQ ID NO: 232438 - DNA, 25 bp, Artificial
  probe
  misc_feature (1)..(25): SEQ ID NO: 1769; WAN024G5X_at; Start 386; Stop 410
caactggcggaactgatattctagc

SEQ ID NO: 232439 - DNA, 25 bp, Artificial
  probe
  misc_feature (1)..(25): SEQ ID NO: 1769; WAN024G5X_at; Start 161; Stop 185
tgaacctgctgattaatattcccct

SEQ ID NO: 232440 - DNA, 25 bp, Artificial
  probe
  misc_feature (1)..(25): SEQ ID NO: 1769; WAN024G5X_at; Start 645; Stop 669
tgatgacctcggaagaggtgttact

SEQ ID NO: 232441 - DNA, 25 bp, Artificial
  probe
  misc_feature (1)..(25): SEQ ID NO: 1769; WAN024G5X_at; Start 313; Stop 337
ttactaatcacagcccttatagcgg

SEQ ID NO: 232442 - DNA, 25 bp, Artificial
  probe
  misc_feature (1)..(25): SEQ ID NO: 1769; WAN024G5X_at; Start 181; Stop 205
ccccttttcatcctagcttggaaga

SEQ ID NO: 232443 - DNA, 25 bp, Artificial
  probe
  misc_feature (1)..(25): SEQ ID NO: 1769; WAN024G5X_at; Start 46; Stop 70
gctatttatgcttttggactgactt

SEQ ID NO: 232444 - DNA, 25 bp, Artificial
  probe
  misc_feature (1)..(25): SEQ ID NO: 1769; WAN024G5X_at; Start 209; Stop 233
ttggagccaaatccctctattctag

SEQ ID NO: 232445 - DNA, 25 bp, Artificial
  probe
  misc_feature (1)..(25): SEQ ID NO: 1769; WAN024G5X_at; Start 327; Stop 351
ccttatagcgggaatcctattggga

SEQ ID NO: 232446 - DNA, 25 bp, Artificial
  probe
  misc_feature (1)..(25): SEQ ID NO: 1769; WAN024G5X_at; Start 631; Stop 655
gctaaggcgattaatgatgacctcg

SEQ ID NO: 232447 - DNA, 25 bp, Artificial
  probe
  misc_feature (1)..(25): SEQ ID NO: 1769; WAN024G5X_at; Start 811; Stop 835
gaaatcctaggagaaggcttcacct

SEQ ID NO: 232448 - DNA, 25 bp, Artificial
  probe
  misc_feature (1)..(25): SEQ ID NO: 1769; WAN024G5X_at; Start 482; Stop 506
tgttgattctcctaatcttcaagga

SEQ ID NO: 232449 - DNA, 25 bp, Artificial
  probe
  misc_feature (1)..(25): SEQ ID NO: 1769; WAN024G5X_at; Start 62; Stop 86
gactgacttattttgtagttcccca

SEQ ID NO: 232450 - DNA, 25 bp, Artificial
  probe
  misc_feature (1)..(25): SEQ ID NO: 1769; WAN024G5X_at; Start 505; Stop 529
gatttgagattggtttcctacacgc

SEQ ID NO: 232451 - DNA, 25 bp, Artificial
  probe
  misc_feature (1)..(25): SEQ ID NO: 1769; WAN024G5X_at; Start 437; Stop 461
tatccataggaaaactgctctttat

SEQ ID NO: 232452 - DNA, 25 bp, Artificial
  probe
  misc_feature (1)..(25): SEQ ID NO: 1769; WAN024G5X_at; Start 141; Stop 165
taaaatccctgtttccctcatgaac

SEQ ID NO: 232453 - DNA, 25 bp, Artificial
  probe
  misc_feature (1)..(25): SEQ ID NO: 1769; WAN024G5X_at; Start 766; Stop 790
catcgaatcgatcctcaagccttta

SEQ ID NO: 232454 - DNA, 25 bp, Artificial
  probe
  misc_feature (1)..(25): SEQ ID NO: 1769; WAN024G5X_at; Start 515; Stop 539
tggtttcctacacgcttttgtttga

SEQ ID NO: 232455 - DNA, 25 bp, Artificial
  probe
  misc_feature (1)..(25): SEQ ID NO: 1769; WAN024G5X_at; Start 659; Stop 683
gaggtgttacttttatttctggtca

SEQ ID NO: 232456 - DNA, 25 bp, Artificial
  probe
  misc_feature (1)..(25): SEQ ID NO: 1769; WAN024G5X_at; Start 676; Stop 700
tctggtcaaggctactatagtaaag

SEQ ID NO: 232457 - DNA, 25 bp, Artificial
  probe
  misc_feature (1)..(25): SEQ ID NO: 1769; WAN024G5X_at; Start 797; Stop 821
ttacagaagcccatgaaatcctagg

SEQ ID NO: 232458 - DNA, 25 bp, Artificial
  probe
  misc_feature (1)..(25): SEQ ID NO: 1769; WAN024G5X_at; Start 580; Stop 604
ggatatgccggcaaaggctttatga

SEQ ID NO: 232459 - DNA, 25 bp, Artificial
  probe
  misc_feature (1)..(25): SEQ ID NO: 5703; WAN024G5Y_at; Start 21; Stop 45
gaaatcgtggctctacgaacaggaa

SEQ ID NO: 232460 - DNA, 25 bp, Artificial
  probe
  misc_feature (1)..(25): SEQ ID NO: 5703; WAN024G5Y_at; Start 5; Stop 29
cagaagaagggatagcgaaatcgtg

SEQ ID NO: 232461 - DNA, 25 bp, Artificial
  probe
  misc_feature (1)..(25): SEQ ID NO: 5703; WAN024G5Y_at; Start 65; Stop 89
tagcggataagagggcatcaaactc

SEQ ID NO: 232462 - DNA, 25 bp, Artificial
  probe
  misc_feature (1)..(25): SEQ ID NO: 5703; WAN024G5Y_at; Start 59; Stop 83
cgtatatagcggataagagggcatc

SEQ ID NO: 232463 - DNA, 25 bp, Artificial
  probe
  misc_feature (1)..(25): SEQ ID NO: 5703; WAN024G5Y_at; Start 1; Stop 25
ttgtcagaagaagggatagcgaaat

SEQ ID NO: 232464 - DNA, 25 bp, Artificial
  probe
  misc_feature (1)..(25): SEQ ID NO: 5703; WAN024G5Y_at; Start 97; Stop 121
caaaaaggtagtcgtaacctatatg

SEQ ID NO: 232465 - DNA, 25 bp, Artificial
  probe
  misc_feature (1)..(25): SEQ ID NO: 5703; WAN024G5Y_at; Start 10; Stop 34
gaagggatagcgaaatcgtggctct

SEQ ID NO: 232466 - DNA, 25 bp, Artificial
  probe
  misc_feature (1)..(25): SEQ ID NO: 5703; WAN024G5Y_at; Start 11; Stop 35
aagggatagcgaaatcgtggctcta

SEQ ID NO: 232467 - DNA, 25 bp, Artificial
  probe
  misc_feature (1)..(25): SEQ ID NO: 5703; WAN024G5Y_at; Start 25; Stop 49
tcgtggctctacgaacaggaacgtg

SEQ ID NO: 232468 - DNA, 25 bp, Artificial
  probe
  misc_feature (1)..(25): SEQ ID NO: 5703; WAN024G5Y_at; Start 33; Stop 57
ctacgaacaggaacgtgataataag

SEQ ID NO: 232469 - DNA, 25 bp, Artificial
  probe
  misc_feature (1)..(25): SEQ ID NO: 5703; WAN024G5Y_at; Start 27; Stop 51
gtggctctacgaacaggaacgtgat

SEQ ID NO: 232470 - DNA, 25 bp, Artificial
  probe
  misc_feature (1)..(25): SEQ ID NO: 5703; WAN024G5Y_at; Start 44; Stop 68
aacgtgataataaggcgtatatagc

SEQ ID NO: 232471 - DNA, 25 bp, Artificial
  probe
  misc_feature (1)..(25): SEQ ID NO: 5703; WAN024G5Y_at; Start 23; Stop 47
aatcgtggctctacgaacaggaacg

SEQ ID NO: 232472 - DNA, 25 bp, Artificial
  probe
  misc_feature (1)..(25): SEQ ID NO: 5703; WAN024G5Y_at; Start 72; Stop 96
taagagggcatcaaactctaaagtc

SEQ ID NO: 232473 - DNA, 25 bp, Artificial
  probe
  misc_feature (1)..(25): SEQ ID NO: 5703; WAN024G5Y_at; Start 77; Stop 101
gggcatcaaactctaaagtccaaaa

SEQ ID NO: 232474 - DNA, 25 bp, Artificial
  probe
  misc_feature (1)..(25): SEQ ID NO: 5703; WAN024G5Y_at; Start 17; Stop 41
tagcgaaatcgtggctctacgaaca

SEQ ID NO: 232475 - DNA, 25 bp, Artificial
  probe
  misc_feature (1)..(25): SEQ ID NO: 5703; WAN024G5Y_at; Start 63; Stop 87
tatagcggataagagggcatcaaac

SEQ ID NO: 232476 - DNA, 25 bp, Artificial
  probe
  misc_feature (1)..(25): SEQ ID NO: 5703; WAN024G5Y_at; Start 80; Stop 104
catcaaactctaaagtccaaaaagg

SEQ ID NO: 232477 - DNA, 25 bp, Artificial
  probe
  misc_feature (1)..(25): SEQ ID NO: 5703; WAN024G5Y_at; Start 49; Stop 73
gataataaggcgtatatagcggata

SEQ ID NO: 232478 - DNA, 25 bp, Artificial
  probe
  misc_feature (1)..(25): SEQ ID NO: 5703; WAN024G5Y_at; Start 4; Stop 28
tcagaagaagggatagcgaaatcgt

SEQ ID NO: 232479 - DNA, 25 bp, Artificial
  probe
  misc_feature (1)..(25): SEQ ID NO: 5703; WAN024G5Y_at; Start 99; Stop 123
aaaaggtagtcgtaacctatatgcg

SEQ ID NO: 232480 - DNA, 25 bp, Artificial
  probe
  misc_feature (1)..(25): SEQ ID NO: 5703; WAN024G5Y_at; Start 75; Stop 99
gagggcatcaaactctaaagtccaa

SEQ ID NO: 232481 - DNA, 25 bp, Artificial
  probe
  misc_feature (1)..(25): SEQ ID NO: 5703; WAN024G5Y_at; Start 19; Stop 43
gcgaaatcgtggctctacgaacagg

SEQ ID NO: 232482 - DNA, 25 bp, Artificial
  probe
  misc_feature (1)..(25): SEQ ID NO: 5703; WAN024G5Y_at; Start 13; Stop 37
gggatagcgaaatcgtggctctacg

SEQ ID NO: 232483 - DNA, 25 bp, Artificial
  probe
  misc_feature (1)..(25): SEQ ID NO: 5703; WAN024G5Y_at; Start 26; Stop 50
cgtggctctacgaacaggaacgtga

SEQ ID NO: 232484 - DNA, 25 bp, Artificial
  probe
  misc_feature (1)..(25): SEQ ID NO: 5703; WAN024G5Y_at; Start 28; Stop 52
tggctctacgaacaggaacgtgata

SEQ ID NO: 232485 - DNA, 25 bp, Artificial
  probe
  misc_feature (1)..(25): SEQ ID NO: 5703; WAN024G5Y_at; Start 54; Stop 78
taaggcgtatatagcggataagagg

SEQ ID NO: 232486 - DNA, 25 bp, Artificial
  probe
  misc_feature (1)..(25): SEQ ID NO: 5703; WAN024G5Y_at; Start 69; Stop 93
ggataagagggcatcaaactctaaa

SEQ ID NO: 232487 - DNA, 25 bp, Artificial
  probe
  misc_feature (1)..(25): SEQ ID NO: 5703; WAN024G5Y_at; Start 40; Stop 64
caggaacgtgataataaggcgtata

SEQ ID NO: 232488 - DNA, 25 bp, Artificial
  probe
  misc_feature (1)..(25): SEQ ID NO: 5703; WAN024G5Y_at; Start 15; Stop 39
gatagcgaaatcgtggctctacgaa

SEQ ID NO: 232489 - DNA, 25 bp, Artificial
  probe
  misc_feature (1)..(25): SEQ ID NO: 5703; WAN024G5Y_at; Start 22; Stop 46
aaatcgtggctctacgaacaggaac

SEQ ID NO: 232490 - DNA, 25 bp, Artificial
  probe
  misc_feature (1)..(25): SEQ ID NO: 5703; WAN024G5Y_at; Start 30; Stop 54
gctctacgaacaggaacgtgataat

SEQ ID NO: 232491 - DNA, 25 bp, Artificial
  probe
  misc_feature (1)..(25): SEQ ID NO: 5703; WAN024G5Y_at; Start 51; Stop 75
taataaggcgtatatagcggataag

SEQ ID NO: 232492 - DNA, 25 bp, Artificial
  probe
  misc_feature (1)..(25): SEQ ID NO: 5703; WAN024G5Y_at; Start 61; Stop 85
tatatagcggataagagggcatcaa

SEQ ID NO: 232493 - DNA, 25 bp, Artificial
  probe
  misc_feature (1)..(25): SEQ ID NO: 5054; WAN024G5Z_at; Start 88; Stop 112
agttccaactacagtagctccagca

SEQ ID NO: 232494 - DNA, 25 bp, Artificial
  probe
  misc_feature (1)..(25): SEQ ID NO: 5054; WAN024G5Z_at; Start 165; Stop 189
taaaagtaacttcttgaccagcttc

SEQ ID NO: 232495 - DNA, 25 bp, Artificial
  probe
  misc_feature (1)..(25): SEQ ID NO: 5054; WAN024G5Z_at; Start 97; Stop 121
tacagtagctccagcaacaagtgga

SEQ ID NO: 232496 - DNA, 25 bp, Artificial
  probe
  misc_feature (1)..(25): SEQ ID NO: 5054; WAN024G5Z_at; Start 102; Stop 126
tagctccagcaacaagtggagttcc

SEQ ID NO: 232497 - DNA, 25 bp, Artificial
  probe
  misc_feature (1)..(25): SEQ ID NO: 5054; WAN024G5Z_at; Start 237; Stop 261
cttgttttccgccagttttgataat

SEQ ID NO: 232498 - DNA, 25 bp, Artificial
  probe
  misc_feature (1)..(25): SEQ ID NO: 5054; WAN024G5Z_at; Start 83; Stop 107
tcaacagttccaactacagtagctc

SEQ ID NO: 232499 - DNA, 25 bp, Artificial
  probe
  misc_feature (1)..(25): SEQ ID NO: 5054; WAN024G5Z_at; Start 240; Stop 264
gttttccgccagttttgataattgc

SEQ ID NO: 232500 - DNA, 25 bp, Artificial
  probe
  misc_feature (1)..(25): SEQ ID NO: 5054; WAN024G5Z_at; Start 120; Stop 144
gagttccgacaacagtgttttcacc

SEQ ID NO: 232501 - DNA, 25 bp, Artificial
  probe
  misc_feature (1)..(25): SEQ ID NO: 5054; WAN024G5Z_at; Start 268; Stop 292
tgtgctcattatgcacctcctatga

SEQ ID NO: 232502 - DNA, 25 bp, Artificial
  probe
  misc_feature (1)..(25): SEQ ID NO: 5054; WAN024G5Z_at; Start 99; Stop 123
cagtagctccagcaacaagtggagt

SEQ ID NO: 232503 - DNA, 25 bp, Artificial
  probe
  misc_feature (1)..(25): SEQ ID NO: 5054; WAN024G5Z_at; Start 112; Stop 136
aacaagtggagttccgacaacagtg

SEQ ID NO: 232504 - DNA, 25 bp, Artificial
  probe
  misc_feature (1)..(25): SEQ ID NO: 5054; WAN024G5Z_at; Start 106; Stop 130
tccagcaacaagtggagttccgaca

SEQ ID NO: 232505 - DNA, 25 bp, Artificial
  probe
  misc_feature (1)..(25): SEQ ID NO: 5054; WAN024G5Z_at; Start 139; Stop 163
ttcaccaccaacaagaacaacttcg

SEQ ID NO: 232506 - DNA, 25 bp, Artificial
  probe
  misc_feature (1)..(25): SEQ ID NO: 5054; WAN024G5Z_at; Start 126; Stop 150
cgacaacagtgttttcaccaccaac

SEQ ID NO: 232507 - DNA, 25 bp, Artificial
  probe
  misc_feature (1)..(25): SEQ ID NO: 5054; WAN024G5Z_at; Start 182; Stop 206
ccagcttcaacgttcaatttttcaa

SEQ ID NO: 232508 - DNA, 25 bp, Artificial
  probe
  misc_feature (1)..(25): SEQ ID NO: 5054; WAN024G5Z_at; Start 180; Stop 204
gaccagcttcaacgttcaatttttc

SEQ ID NO: 232509 - DNA, 25 bp, Artificial
  probe
  misc_feature (1)..(25): SEQ ID NO: 5054; WAN024G5Z_at; Start 248; Stop 272
ccagttttgataattgcgtatgtgc

SEQ ID NO: 232510 - DNA, 25 bp, Artificial
  probe
  misc_feature (1)..(25): SEQ ID NO: 5054; WAN024G5Z_at; Start 108; Stop 132
cagcaacaagtggagttccgacaac

SEQ ID NO: 232511 - DNA, 25 bp, Artificial
  probe
  misc_feature (1)..(25): SEQ ID NO: 5054; WAN024G5Z_at; Start 258; Stop 282
taattgcgtatgtgctcattatgca

SEQ ID NO: 232512 - DNA, 25 bp, Artificial
  probe
  misc_feature (1)..(25): SEQ ID NO: 5054; WAN024G5Z_at; Start 196; Stop 220
caatttttcaacgtaaactgcttga

SEQ ID NO: 232513 - DNA, 25 bp, Artificial
  probe
  misc_feature (1)..(25): SEQ ID NO: 5054; WAN024G5Z_at; Start 214; Stop 238
tgcttgaccaacttcaactttaact

SEQ ID NO: 232514 - DNA, 25 bp, Artificial
  probe
  misc_feature (1)..(25): SEQ ID NO: 5054; WAN024G5Z_at; Start 77; Stop 101
tgtttttcaacagttccaactacag

SEQ ID NO: 232515 - DNA, 25 bp, Artificial
  probe
  misc_feature (1)..(25): SEQ ID NO: 5054; WAN024G5Z_at; Start 2; Stop 26
tgacggtgaccttgtttacggtggc

SEQ ID NO: 232516 - DNA, 25 bp, Artificial
  probe
  misc_feature (1)..(25): SEQ ID NO: 5054; WAN024G5Z_at; Start 134; Stop 158
gtgttttcaccaccaacaagaacaa

SEQ ID NO: 232517 - DNA, 25 bp, Artificial
  probe
  misc_feature (1)..(25): SEQ ID NO: 5054; WAN024G5Z_at; Start 277; Stop 301
tatgcacctcctatgatttttatgg

SEQ ID NO: 232518 - DNA, 25 bp, Artificial
  probe
  misc_feature (1)..(25): SEQ ID NO: 5054; WAN024G5Z_at; Start 118; Stop 142
tggagttccgacaacagtgttttca

SEQ ID NO: 232519 - DNA, 25 bp, Artificial
  probe
  misc_feature (1)..(25): SEQ ID NO: 5054; WAN024G5Z_at; Start 262; Stop 286
tgcgtatgtgctcattatgcacctc

SEQ ID NO: 232520 - DNA, 25 bp, Artificial
  probe
  misc_feature (1)..(25): SEQ ID NO: 5054; WAN024G5Z_at; Start 169; Stop 193
agtaacttcttgaccagcttcaacg

SEQ ID NO: 232521 - DNA, 25 bp, Artificial
  probe
  misc_feature (1)..(25): SEQ ID NO: 5054; WAN024G5Z_at; Start 205; Stop 229
aacgtaaactgcttgaccaacttca

SEQ ID NO: 232522 - DNA, 25 bp, Artificial
  probe
  misc_feature (1)..(25): SEQ ID NO: 5054; WAN024G5Z_at; Start 129; Stop 153
caacagtgttttcaccaccaacaag

SEQ ID NO: 232523 - DNA, 25 bp, Artificial
  probe
  misc_feature (1)..(25): SEQ ID NO: 5054; WAN024G5Z_at; Start 173; Stop 197
acttcttgaccagcttcaacgttca

SEQ ID NO: 232524 - DNA, 25 bp, Artificial
  probe
  misc_feature (1)..(25): SEQ ID NO: 5054; WAN024G5Z_at; Start 115; Stop 139
aagtggagttccgacaacagtgttt

SEQ ID NO: 232525 - DNA, 25 bp, Artificial
  probe
  misc_feature (1)..(25): SEQ ID NO: 5054; WAN024G5Z_at; Start 93; Stop 117
caactacagtagctccagcaacaag

SEQ ID NO: 232526 - DNA, 25 bp, Artificial
  probe
  misc_feature (1)..(25): SEQ ID NO: 5054; WAN024G5Z_at; Start 110; Stop 134
gcaacaagtggagttccgacaacag

SEQ ID NO: 232527 - DNA, 25 bp, Artificial
  probe
  misc_feature (1)..(25): SEQ ID NO: 1562; WAN024G62_at; Start 160; Stop 184
cttgttgctggagctactgtagttg

SEQ ID NO: 232528 - DNA, 25 bp, Artificial
  probe
  misc_feature (1)..(25): SEQ ID NO: 1562; WAN024G62_at; Start 165; Stop 189
tgctggagctactgtagttggaact

SEQ ID NO: 232529 - DNA, 25 bp, Artificial
  probe
  misc_feature (1)..(25): SEQ ID NO: 1562; WAN024G62_at; Start 54; Stop 78
tggtcaagcagtttacgttgaaaaa

SEQ ID NO: 232530 - DNA, 25 bp, Artificial
  probe
  misc_feature (1)..(25): SEQ ID NO: 1562; WAN024G62_at; Start 147; Stop 171
tgtcggaactccacttgttgctgga

SEQ ID NO: 232531 - DNA, 25 bp, Artificial
  probe
  misc_feature (1)..(25): SEQ ID NO: 1562; WAN024G62_at; Start 76; Stop 100
aaattgaacgttgaagctggtcaag

SEQ ID NO: 232532 - DNA, 25 bp, Artificial
  probe
  misc_feature (1)..(25): SEQ ID NO: 1562; WAN024G62_at; Start 157; Stop 181
ccacttgttgctggagctactgtag

SEQ ID NO: 232533 - DNA, 25 bp, Artificial
  probe
  misc_feature (1)..(25): SEQ ID NO: 1562; WAN024G62_at; Start 13; Stop 37
gcaattatcaaaactggcggaaaac

SEQ ID NO: 232534 - DNA, 25 bp, Artificial
  probe
  misc_feature (1)..(25): SEQ ID NO: 1562; WAN024G62_at; Start 296; Stop 320
tcaacgcaatcaacgcttaactaat

SEQ ID NO: 232535 - DNA, 25 bp, Artificial
  probe
  misc_feature (1)..(25): SEQ ID NO: 1562; WAN024G62_at; Start 142; Stop 166
actgttgtcggaactccacttgttg

SEQ ID NO: 232536 - DNA, 25 bp, Artificial
  probe
  misc_feature (1)..(25): SEQ ID NO: 1562; WAN024G62_at; Start 10; Stop 34
tacgcaattatcaaaactggcggaa

SEQ ID NO: 232537 - DNA, 25 bp, Artificial
  probe
  misc_feature (1)..(25): SEQ ID NO: 1562; WAN024G62_at; Start 152; Stop 176
gaactccacttgttgctggagctac

SEQ ID NO: 232538 - DNA, 25 bp, Artificial
  probe
  misc_feature (1)..(25): SEQ ID NO: 1562; WAN024G62_at; Start 144; Stop 168
tgttgtcggaactccacttgttgct

SEQ ID NO: 232539 - DNA, 25 bp, Artificial
  probe
  misc_feature (1)..(25): SEQ ID NO: 1562; WAN024G62_at; Start 172; Stop 196
gctactgtagttggaactgttgaaa

SEQ ID NO: 232540 - DNA, 25 bp, Artificial
  probe
  misc_feature (1)..(25): SEQ ID NO: 1562; WAN024G62_at; Start 73; Stop 97
gaaaaattgaacgttgaagctggtc

SEQ ID NO: 232541 - DNA, 25 bp, Artificial
  probe
  misc_feature (1)..(25): SEQ ID NO: 1562; WAN024G62_at; Start 5; Stop 29
gcacatacgcaattatcaaaactgg

SEQ ID NO: 232542 - DNA, 25 bp, Artificial
  probe
  misc_feature (1)..(25): SEQ ID NO: 1562; WAN024G62_at; Start 256; Stop 280
cgtaaacaaggtcaccgtcaaccat

SEQ ID NO: 232543 - DNA, 25 bp, Artificial
  probe
  misc_feature (1)..(25): SEQ ID NO: 1562; WAN024G62_at; Start 71; Stop 95
ttgaaaaattgaacgttgaagctgg

SEQ ID NO: 232544 - DNA, 25 bp, Artificial
  probe
  misc_feature (1)..(25): SEQ ID NO: 1562; WAN024G62_at; Start 177; Stop 201
tgtagttggaactgttgaaaaacaa

SEQ ID NO: 232545 - DNA, 25 bp, Artificial
  probe
  misc_feature (1)..(25): SEQ ID NO: 1562; WAN024G62_at; Start 282; Stop 306
tacaaaagttgtcatcaacgcaatc

SEQ ID NO: 232546 - DNA, 25 bp, Artificial
  probe
  misc_feature (1)..(25): SEQ ID NO: 1562; WAN024G62_at; Start 88; Stop 112
gaagctggtcaagaagttactttta

SEQ ID NO: 232547 - DNA, 25 bp, Artificial
  probe
  misc_feature (1)..(25): SEQ ID NO: 1562; WAN024G62_at; Start 41; Stop 65
ttaaagttgaagttggtcaagcagt

SEQ ID NO: 232548 - DNA, 25 bp, Artificial
  probe
  misc_feature (1)..(25): SEQ ID NO: 1562; WAN024G62_at; Start 251; Stop 275
gccaccgtaaacaaggtcaccgtca

SEQ ID NO: 232549 - DNA, 25 bp, Artificial
  probe
  misc_feature (1)..(25): SEQ ID NO: 1562; WAN024G62_at; Start 265; Stop 289
ggtcaccgtcaaccatatacaaaag

SEQ ID NO: 232550 - DNA, 25 bp, Artificial
  probe
  misc_feature (1)..(25): SEQ ID NO: 1562; WAN024G62_at; Start 271; Stop 295
cgtcaaccatatacaaaagttgtca

SEQ ID NO: 232551 - DNA, 25 bp, Artificial
  probe
  misc_feature (1)..(25): SEQ ID NO: 1562; WAN024G62_at; Start 16; Stop 40
attatcaaaactggcggaaaacaag

SEQ ID NO: 232552 - DNA, 25 bp, Artificial
  probe
  misc_feature (1)..(25): SEQ ID NO: 1562; WAN024G62_at; Start 291; Stop 315
tgtcatcaacgcaatcaacgcttaa

SEQ ID NO: 232553 - DNA, 25 bp, Artificial
  probe
  misc_feature (1)..(25): SEQ ID NO: 1562; WAN024G62_at; Start 170; Stop 194
gagctactgtagttggaactgttga

SEQ ID NO: 232554 - DNA, 25 bp, Artificial
  probe
  misc_feature (1)..(25): SEQ ID NO: 1562; WAN024G62_at; Start 2; Stop 26
tgagcacatacgcaattatcaaaac

SEQ ID NO: 232555 - DNA, 25 bp, Artificial
  probe
  misc_feature (1)..(25): SEQ ID NO: 1562; WAN024G62_at; Start 8; Stop 32
catacgcaattatcaaaactggcgg

SEQ ID NO: 232556 - DNA, 25 bp, Artificial
  probe
  misc_feature (1)..(25): SEQ ID NO: 1562; WAN024G62_at; Start 262; Stop 286
caaggtcaccgtcaaccatatacaa

SEQ ID NO: 232557 - DNA, 25 bp, Artificial
  probe
  misc_feature (1)..(25): SEQ ID NO: 1562; WAN024G62_at; Start 258; Stop 282
taaacaaggtcaccgtcaaccatat

SEQ ID NO: 232558 - DNA, 25 bp, Artificial
  probe
  misc_feature (1)..(25): SEQ ID NO: 1562; WAN024G62_at; Start 49; Stop 73
gaagttggtcaagcagtttacgttg

SEQ ID NO: 232559 - DNA, 25 bp, Artificial
  probe
  misc_feature (1)..(25): SEQ ID NO: 1562; WAN024G62_at; Start 149; Stop 173
tcggaactccacttgttgctggagc

SEQ ID NO: 232560 - DNA, 25 bp, Artificial
  probe
  misc_feature (1)..(25): SEQ ID NO: 1562; WAN024G62_at; Start 287; Stop 311
aagttgtcatcaacgcaatcaacgc

SEQ ID NO: 232561 - DNA, 25 bp, Artificial
  probe
  misc_feature (1)..(25): SEQ ID NO: 2864; WAN024G63_at; Start 363; Stop 387
ggctggagttgatcgtatcctgact

SEQ ID NO: 232562 - DNA, 25 bp, Artificial
  probe
  misc_feature (1)..(25): SEQ ID NO: 2864; WAN024G63_at; Start 734; Stop 758
aaatttatgctgtttctagccacgg

SEQ ID NO: 232563 - DNA, 25 bp, Artificial
  probe
  misc_feature (1)..(25): SEQ ID NO: 2864; WAN024G63_at; Start 521; Stop 545
aaaattcaggtgtcaaacgtgcgcg

SEQ ID NO: 232564 - DNA, 25 bp, Artificial
  probe
  misc_feature (1)..(25): SEQ ID NO: 2864; WAN024G63_at; Start 535; Stop 559
aaacgtgcgcgtagcctggctgaat

SEQ ID NO: 232565 - DNA, 25 bp, Artificial
  probe
  misc_feature (1)..(25): SEQ ID NO: 2864; WAN024G63_at; Start 118; Stop 142
gacggagaaatccaagtaaatatcg

SEQ ID NO: 232566 - DNA, 25 bp, Artificial
  probe
  misc_feature (1)..(25): SEQ ID NO: 2864; WAN024G63_at; Start 775; Stop 799
gctgctgagcttcttgacaatacta

SEQ ID NO: 232567 - DNA, 25 bp, Artificial
  probe
  misc_feature (1)..(25): SEQ ID NO: 2864; WAN024G63_at; Start 577; Stop 601
gccattatcgactaccctcaagacg

SEQ ID NO: 232568 - DNA, 25 bp, Artificial
  probe
  misc_feature (1)..(25): SEQ ID NO: 2864; WAN024G63_at; Start 395; Stop 419
tgcatgccgttcaggttcaaggttt

SEQ ID NO: 232569 - DNA, 25 bp, Artificial
  probe
  misc_feature (1)..(25): SEQ ID NO: 2864; WAN024G63_at; Start 235; Stop 259
gcttgtgtgcgtgcaagtgcccaca

SEQ ID NO: 232570 - DNA, 25 bp, Artificial
  probe
  misc_feature (1)..(25): SEQ ID NO: 2864; WAN024G63_at; Start 282; Stop 306
ttttggctatgcacgtcaagaccgc

SEQ ID NO: 232571 - DNA, 25 bp, Artificial
  probe
  misc_feature (1)..(25): SEQ ID NO: 2864; WAN024G63_at; Start 596; Stop 620
aagacgatgcaactcgtaacgaagg

SEQ ID NO: 232572 - DNA, 25 bp, Artificial
  probe
  misc_feature (1)..(25): SEQ ID NO: 2864; WAN024G63_at; Start 98; Stop 122
tatcatcacgtcaattttcagacgg

SEQ ID NO: 232573 - DNA, 25 bp, Artificial
  probe
  misc_feature (1)..(25): SEQ ID NO: 2864; WAN024G63_at; Start 906; Stop 930
tattcacgaaagaaaaccagtcagc

SEQ ID NO: 232574 - DNA, 25 bp, Artificial
  probe
  misc_feature (1)..(25): SEQ ID NO: 2864; WAN024G63_at; Start 62; Stop 86
aaattgcccaagctgttggtgtccc

SEQ ID NO: 232575 - DNA, 25 bp, Artificial
  probe
  misc_feature (1)..(25): SEQ ID NO: 2864; WAN024G63_at; Start 221; Stop 245
taatcatggtcgatgcttgtgtgcg

SEQ ID NO: 232576 - DNA, 25 bp, Artificial
  probe
  misc_feature (1)..(25): SEQ ID NO: 2864; WAN024G63_at; Start 750; Stop 774
tagccacggtctcttcgtcgaggga

SEQ ID NO: 232577 - DNA, 25 bp, Artificial
  probe
  misc_feature (1)..(25): SEQ ID NO: 2864; WAN024G63_at; Start 380; Stop 404
tcctgactcttgatttgcatgccgt

SEQ ID NO: 232578 - DNA, 25 bp, Artificial
  probe
  misc_feature (1)..(25): SEQ ID NO: 2864; WAN024G63_at; Start 678; Stop 702
tacaggacgtaccttctctgaagct

SEQ ID NO: 232579 - DNA, 25 bp, Artificial
  probe
  misc_feature (1)..(25): SEQ ID NO: 2864; WAN024G63_at; Start 190; Stop 214
ttccctgtcaacaaccacctaatgg

SEQ ID NO: 232580 - DNA, 25 bp, Artificial
  probe
  misc_feature (1)..(25): SEQ ID NO: 2864; WAN024G63_at; Start 300; Stop 324
agaccgcattgcttgtcctcgtgag

SEQ ID NO: 232581 - DNA, 25 bp, Artificial
  probe
  misc_feature (1)..(25): SEQ ID NO: 2864; WAN024G63_at; Start 134; Stop 158
taaatatcgaagaaagtgtccgtgg

SEQ ID NO: 232582 - DNA, 25 bp, Artificial
  probe
  misc_feature (1)..(25): SEQ ID NO: 2864; WAN024G63_at; Start 249; Stop 273
aagtgcccacagtatcaacgttgtc

SEQ ID NO: 232583 - DNA, 25 bp, Artificial
  probe
  misc_feature (1)..(25): SEQ ID NO: 2864; WAN024G63_at; Start 708; Stop 732
aatcgttgaacgtgaaggagctaca

SEQ ID NO: 232584 - DNA, 25 bp, Artificial
  probe
  misc_feature (1)..(25): SEQ ID NO: 2864; WAN024G63_at; Start 819; Stop 843
gactgattcagtagcaacaaaagaa

SEQ ID NO: 232585 - DNA, 25 bp, Artificial
  probe
  misc_feature (1)..(25): SEQ ID NO: 2864; WAN024G63_at; Start 264; Stop 288
caacgttgtccttccatattttggc

SEQ ID NO: 232586 - DNA, 25 bp, Artificial
  probe
  misc_feature (1)..(25): SEQ ID NO: 2864; WAN024G63_at; Start 322; Stop 346
gagccacttacagcaaaactagttg

SEQ ID NO: 232587 - DNA, 25 bp, Artificial
  probe
  misc_feature (1)..(25): SEQ ID NO: 2864; WAN024G63_at; Start 856; Stop 880
aatgtatgctacatcactgctagtg

SEQ ID NO: 232588 - DNA, 25 bp, Artificial
  probe
  misc_feature (1)..(25): SEQ ID NO: 2864; WAN024G63_at; Start 21; Stop 45
gaaacttttcgcactcaactctaac

SEQ ID NO: 232589 - DNA, 25 bp, Artificial
  probe
  misc_feature (1)..(25): SEQ ID NO: 2864; WAN024G63_at; Start 346; Stop 370
gccaatatgctggttaaggctggag

SEQ ID NO: 232590 - DNA, 25 bp, Artificial
  probe
  misc_feature (1)..(25): SEQ ID NO: 2864; WAN024G63_at; Start 925; Stop 949
gtcagcccactctttgcctacaata

SEQ ID NO: 232591 - DNA, 25 bp, Artificial
  probe
  misc_feature (1)..(25): SEQ ID NO: 2864; WAN024G63_at; Start 469; Stop 493
cattactgcgataaaggattgcttg

SEQ ID NO: 232592 - DNA, 25 bp, Artificial
  probe
  misc_feature (1)..(25): SEQ ID NO: 2864; WAN024G63_at; Start 761; Stop 785
tcttcgtcgagggagctgctgagct

SEQ ID NO: 232593 - DNA, 25 bp, Artificial
  probe
  misc_feature (1)..(25): SEQ ID NO: 2864; WAN024G63_at; Start 83; Stop 107
tcccacttggaaaactatcatcacg

SEQ ID NO: 232594 - DNA, 25 bp, Artificial
  probe
  misc_feature (1)..(25): SEQ ID NO: 2864; WAN024G63_at; Start 548; Stop 572
gcctggctgaatatcttgatgctcc

SEQ ID NO: 232595 - DNA, 25 bp, Artificial
  probe
  misc_feature (1)..(25): SEQ ID NO: 5010; WAN024G64_at; Start 184; Stop 208
ttcagtcccaccagaagtgaaaaag

SEQ ID NO: 232596 - DNA, 25 bp, Artificial
  probe
  misc_feature (1)..(25): SEQ ID NO: 5010; WAN024G64_at; Start 139; Stop 163
ttcttggtgacgaagacagtagcca

SEQ ID NO: 232597 - DNA, 25 bp, Artificial
  probe
  misc_feature (1)..(25): SEQ ID NO: 5010; WAN024G64_at; Start 50; Stop 74
gcttcaaacccaaagtgttgaacca

SEQ ID NO: 232598 - DNA, 25 bp, Artificial
  probe
  misc_feature (1)..(25): SEQ ID NO: 5010; WAN024G64_at; Start 147; Stop 171
gacgaagacagtagccaatgatggt

SEQ ID NO: 232599 - DNA, 25 bp, Artificial
  probe
  misc_feature (1)..(25): SEQ ID NO: 5010; WAN024G64_at; Start 189; Stop 213
tcccaccagaagtgaaaaagatatg

SEQ ID NO: 232600 - DNA, 25 bp, Artificial
  probe
  misc_feature (1)..(25): SEQ ID NO: 5010; WAN024G64_at; Start 46; Stop 70
ggttgcttcaaacccaaagtgttga

SEQ ID NO: 232601 - DNA, 25 bp, Artificial
  probe
  misc_feature (1)..(25): SEQ ID NO: 5010; WAN024G64_at; Start 42; Stop 66
taatggttgcttcaaacccaaagtg

SEQ ID NO: 232602 - DNA, 25 bp, Artificial
  probe
  misc_feature (1)..(25): SEQ ID NO: 5010; WAN024G64_at; Start 207; Stop 231
agatatgttgaggttttgtccttag

SEQ ID NO: 232603 - DNA, 25 bp, Artificial
  probe
  misc_feature (1)..(25): SEQ ID NO: 5010; WAN024G64_at; Start 157; Stop 181
gtagccaatgatggtagtattattg

SEQ ID NO: 232604 - DNA, 25 bp, Artificial
  probe
  misc_feature (1)..(25): SEQ ID NO: 5010; WAN024G64_at; Start 144; Stop 168
ggtgacgaagacagtagccaatgat

SEQ ID NO: 232605 - DNA, 25 bp, Artificial
  probe
  misc_feature (1)..(25): SEQ ID NO: 5010; WAN024G64_at; Start 91; Stop 115
aaggacagcatggtgctcgatggca

SEQ ID NO: 232606 - DNA, 25 bp, Artificial
  probe
  misc_feature (1)..(25): SEQ ID NO: 5010; WAN024G64_at; Start 27; Stop 51
gattttctggctggataatggttgc

SEQ ID NO: 232607 - DNA, 25 bp, Artificial
  probe
  misc_feature (1)..(25): SEQ ID NO: 5010; WAN024G64_at; Start 76; Stop 100
gtaatcaattgtttcaaggacagca

SEQ ID NO: 232608 - DNA, 25 bp, Artificial
  probe
  misc_feature (1)..(25): SEQ ID NO: 5010; WAN024G64_at; Start 111; Stop 135
tggcagttgtgatgatatgttttcc

SEQ ID NO: 232609 - DNA, 25 bp, Artificial
  probe
  misc_feature (1)..(25): SEQ ID NO: 5010; WAN024G64_at; Start 38; Stop 62
tggataatggttgcttcaaacccaa

SEQ ID NO: 232610 - DNA, 25 bp, Artificial
  probe
  misc_feature (1)..(25): SEQ ID NO: 5010; WAN024G64_at; Start 95; Stop 119
acagcatggtgctcgatggcagttg

SEQ ID NO: 232611 - DNA, 25 bp, Artificial
  probe
  misc_feature (1)..(25): SEQ ID NO: 5010; WAN024G64_at; Start 133; Stop 157
tccttgttcttggtgacgaagacag

SEQ ID NO: 232612 - DNA, 25 bp, Artificial
  probe
  misc_feature (1)..(25): SEQ ID NO: 5010; WAN024G64_at; Start 105; Stop 129
gctcgatggcagttgtgatgatatg

SEQ ID NO: 232613 - DNA, 25 bp, Artificial
  probe
  misc_feature (1)..(25): SEQ ID NO: 5010; WAN024G64_at; Start 150; Stop 174
gaagacagtagccaatgatggtagt

SEQ ID NO: 232614 - DNA, 25 bp, Artificial
  probe
  misc_feature (1)..(25): SEQ ID NO: 5010; WAN024G64_at; Start 4; Stop 28
aatttgctgggctgtgatttcttga

SEQ ID NO: 232615 - DNA, 25 bp, Artificial
  probe
  misc_feature (1)..(25): SEQ ID NO: 5010; WAN024G64_at; Start 126; Stop 150
tatgttttccttgttcttggtgacg

SEQ ID NO: 232616 - DNA, 25 bp, Artificial
  probe
  misc_feature (1)..(25): SEQ ID NO: 5010; WAN024G64_at; Start 89; Stop 113
tcaaggacagcatggtgctcgatgg

SEQ ID NO: 232617 - DNA, 25 bp, Artificial
  probe
  misc_feature (1)..(25): SEQ ID NO: 5010; WAN024G64_at; Start 73; Stop 97
caagtaatcaattgtttcaaggaca

SEQ ID NO: 232618 - DNA, 25 bp, Artificial
  probe
  misc_feature (1)..(25): SEQ ID NO: 5010; WAN024G64_at; Start 99; Stop 123
catggtgctcgatggcagttgtgat

SEQ ID NO: 232619 - DNA, 25 bp, Artificial
  probe
  misc_feature (1)..(25): SEQ ID NO: 5010; WAN024G64_at; Start 192; Stop 216
caccagaagtgaaaaagatatgttg

SEQ ID NO: 232620 - DNA, 25 bp, Artificial
  probe
  misc_feature (1)..(25): SEQ ID NO: 5010; WAN024G64_at; Start 153; Stop 177
gacagtagccaatgatggtagtatt

SEQ ID NO: 232621 - DNA, 25 bp, Artificial
  probe
  misc_feature (1)..(25): SEQ ID NO: 5010; WAN024G64_at; Start 58; Stop 82
cccaaagtgttgaaccaagtaatca

SEQ ID NO: 232622 - DNA, 25 bp, Artificial
  probe
  misc_feature (1)..(25): SEQ ID NO: 5010; WAN024G64_at; Start 31; Stop 55
ttctggctggataatggttgcttca

SEQ ID NO: 232623 - DNA, 25 bp, Artificial
  probe
  misc_feature (1)..(25): SEQ ID NO: 5010; WAN024G64_at; Start 34; Stop 58
tggctggataatggttgcttcaaac

SEQ ID NO: 232624 - DNA, 25 bp, Artificial
  probe
  misc_feature (1)..(25): SEQ ID NO: 5010; WAN024G64_at; Start 82; Stop 106
aattgtttcaaggacagcatggtgc

SEQ ID NO: 232625 - DNA, 25 bp, Artificial
  probe
  misc_feature (1)..(25): SEQ ID NO: 5010; WAN024G64_at; Start 9; Stop 33
gctgggctgtgatttcttgattttc

SEQ ID NO: 232626 - DNA, 25 bp, Artificial
  probe
  misc_feature (1)..(25): SEQ ID NO: 5010; WAN024G64_at; Start 195; Stop 219
cagaagtgaaaaagatatgttgagg

SEQ ID NO: 232627 - DNA, 25 bp, Artificial
  probe
  misc_feature (1)..(25): SEQ ID NO: 5010; WAN024G64_at; Start 19; Stop 43
gatttcttgattttctggctggata

SEQ ID NO: 232628 - DNA, 25 bp, Artificial
  probe
  misc_feature (1)..(25): SEQ ID NO: 5010; WAN024G64_at; Start 85; Stop 109
tgtttcaaggacagcatggtgctcg

SEQ ID NO: 232629 - DNA, 25 bp, Artificial
  probe
  misc_feature (1)..(25): SEQ ID NO: 5257; WAN024G65_at; Start 800; Stop 824
cctttctggcagagctggagggcat

SEQ ID NO: 232630 - DNA, 25 bp, Artificial
  probe
  misc_feature (1)..(25): SEQ ID NO: 5257; WAN024G65_at; Start 289; Stop 313
gagcaccatgctgtccttgaaacaa

SEQ ID NO: 232631 - DNA, 25 bp, Artificial
  probe
  misc_feature (1)..(25): SEQ ID NO: 5257; WAN024G65_at; Start 24; Stop 48
aacgactcctatgtcagcagttgct

SEQ ID NO: 232632 - DNA, 25 bp, Artificial
  probe
  misc_feature (1)..(25): SEQ ID NO: 5257; WAN024G65_at; Start 481; Stop 505
ggccaaatactcaagcaacaccctg

SEQ ID NO: 232633 - DNA, 25 bp, Artificial
  probe
  misc_feature (1)..(25): SEQ ID NO: 5257; WAN024G65_at; Start 241; Stop 265
tgtcttcgtcaccaagaacaaggaa

SEQ ID NO: 232634 - DNA, 25 bp, Artificial
  probe
  misc_feature (1)..(25): SEQ ID NO: 5257; WAN024G65_at; Start 928; Stop 952
ggaatttcaatctctactggctcag

SEQ ID NO: 232635 - DNA, 25 bp, Artificial
  probe
  misc_feature (1)..(25): SEQ ID NO: 5257; WAN024G65_at; Start 369; Stop 393
tcaagaaatcacagcccagcaaatt

SEQ ID NO: 232636 - DNA, 25 bp, Artificial
  probe
  misc_feature (1)..(25): SEQ ID NO: 5257; WAN024G65_at; Start 103; Stop 127
catggtcatggtcgtcaagctggca

SEQ ID NO: 232637 - DNA, 25 bp, Artificial
  probe
  misc_feature (1)..(25): SEQ ID NO: 5257; WAN024G65_at; Start 837; Stop 861
gaatagaggaaaacatcatctccct

SEQ ID NO: 232638 - DNA, 25 bp, Artificial
  probe
  misc_feature (1)..(25): SEQ ID NO: 5257; WAN024G65_at; Start 68; Stop 92
ttatgcaagaaacccacggaaatcc

SEQ ID NO: 232639 - DNA, 25 bp, Artificial
  probe
  misc_feature (1)..(25): SEQ ID NO: 5257; WAN024G65_at; Start 895; Stop 919
aatgacctcttactccttcggctag

SEQ ID NO: 232640 - DNA, 25 bp, Artificial
  probe
  misc_feature (1)..(25): SEQ ID NO: 5257; WAN024G65_at; Start 123; Stop 147
tggcaaactcttgcgagaagcccgt

SEQ ID NO: 232641 - DNA, 25 bp, Artificial
  probe
  misc_feature (1)..(25): SEQ ID NO: 5257; WAN024G65_at; Start 676; Stop 700
caggaacagaaaaaacgtgcaggaa

SEQ ID NO: 232642 - DNA, 25 bp, Artificial
  probe
  misc_feature (1)..(25): SEQ ID NO: 5257; WAN024G65_at; Start 524; Stop 548
cagttcaggctattggtaaaatccc

SEQ ID NO: 232643 - DNA, 25 bp, Artificial
  probe
  misc_feature (1)..(25): SEQ ID NO: 5257; WAN024G65_at; Start 343; Stop 367
gaagcaaccattatccagccagaaa

SEQ ID NO: 232644 - DNA, 25 bp, Artificial
  probe
  misc_feature (1)..(25): SEQ ID NO: 5257; WAN024G65_at; Start 1045; Stop 1069
ttgtcgccacaaaataccgttgaag

SEQ ID NO: 232645 - DNA, 25 bp, Artificial
  probe
  misc_feature (1)..(25): SEQ ID NO: 5257; WAN024G65_at; Start 227; Stop 251
ccatcattggctactgtcttcgtca

SEQ ID NO: 232646 - DNA, 25 bp, Artificial
  probe
  misc_feature (1)..(25): SEQ ID NO: 5257; WAN024G65_at; Start 695; Stop 719
caggaactgaaaatctgcctgccat

SEQ ID NO: 232647 - DNA, 25 bp, Artificial
  probe
  misc_feature (1)..(25): SEQ ID NO: 5257; WAN024G65_at; Start 393; Stop 417
tcaaaaggctttacgtgacgatacg

SEQ ID NO: 232648 - DNA, 25 bp, Artificial
  probe
  misc_feature (1)..(25): SEQ ID NO: 5257; WAN024G65_at; Start 957; Stop 981
tactgcaggcgttgtccaatccagc

SEQ ID NO: 232649 - DNA, 25 bp, Artificial
  probe
  misc_feature (1)..(25): SEQ ID NO: 5257; WAN024G65_at; Start 649; Stop 673
tttgattcctatctacatggcggag

SEQ ID NO: 232650 - DNA, 25 bp, Artificial
  probe
  misc_feature (1)..(25): SEQ ID NO: 5257; WAN024G65_at; Start 629; Stop 653
tctacgcatctagcatggactttga

SEQ ID NO: 232651 - DNA, 25 bp, Artificial
  probe
  misc_feature (1)..(25): SEQ ID NO: 5257; WAN024G65_at; Start 592; Stop 616
gcccacaaattccatggtcctaagg

SEQ ID NO: 232652 - DNA, 25 bp, Artificial
  probe
  misc_feature (1)..(25): SEQ ID NO: 5257; WAN024G65_at; Start 1012; Stop 1036
tcagaacgcttgaaggaatcccttc

SEQ ID NO: 232653 - DNA, 25 bp, Artificial
  probe
  misc_feature (1)..(25): SEQ ID NO: 5257; WAN024G65_at; Start 328; Stop 352
caacactttgggtttgaagcaacca

SEQ ID NO: 232654 - DNA, 25 bp, Artificial
  probe
  misc_feature (1)..(25): SEQ ID NO: 5257; WAN024G65_at; Start 53; Stop 77
cagctatgaccaaggttatgcaaga

SEQ ID NO: 232655 - DNA, 25 bp, Artificial
  probe
  misc_feature (1)..(25): SEQ ID NO: 5257; WAN024G65_at; Start 1027; Stop 1051
gaatcccttcgcatcagtttgtcgc

SEQ ID NO: 232656 - DNA, 25 bp, Artificial
  probe
  misc_feature (1)..(25): SEQ ID NO: 5257; WAN024G65_at; Start 184; Stop 208
catatctttttcacttctggtggga

SEQ ID NO: 232657 - DNA, 25 bp, Artificial
  probe
  misc_feature (1)..(25): SEQ ID NO: 5257; WAN024G65_at; Start 9; Stop 33
tttggacaatgctgcaacgactcct

SEQ ID NO: 232658 - DNA, 25 bp, Artificial
  probe
  misc_feature (1)..(25): SEQ ID NO: 5257; WAN024G65_at; Start 268; Stop 292
catatcatcacaactgccatcgagc

SEQ ID NO: 232659 - DNA, 25 bp, Artificial
  probe
  misc_feature (1)..(25): SEQ ID NO: 5257; WAN024G65_at; Start 612; Stop 636
taagggaatcggttttctctacgca

SEQ ID NO: 232660 - DNA, 25 bp, Artificial
  probe
  misc_feature (1)..(25): SEQ ID NO: 5257; WAN024G65_at; Start 1063; Stop 1087
gttgaagacctacaaaccctcgcaa

SEQ ID NO: 232661 - DNA, 25 bp, Artificial
  probe
  misc_feature (1)..(25): SEQ ID NO: 5257; WAN024G65_at; Start 140; Stop 164
aagcccgtcaggaactagcccagtt

SEQ ID NO: 232662 - DNA, 25 bp, Artificial
  probe
  misc_feature (1)..(25): SEQ ID NO: 5257; WAN024G65_at; Start 499; Stop 523
caccctgctgcctatcatgttgatg

SEQ ID NO: 232663 - DNA, 25 bp, Artificial
  probe
  misc_feature (1)..(25): SEQ ID NO: 3861; WAN024G66_at; Start 583; Stop 607
tatgtcgatttgacaagtgaactcc

SEQ ID NO: 232664 - DNA, 25 bp, Artificial
  probe
  misc_feature (1)..(25): SEQ ID NO: 3861; WAN024G66_at; Start 333; Stop 357
gaagattatcatggcctttgaccta

SEQ ID NO: 232665 - DNA, 25 bp, Artificial
  probe
  misc_feature (1)..(25): SEQ ID NO: 3861; WAN024G66_at; Start 385; Stop 409
actcctgacgggattcccatttacg

SEQ ID NO: 232666 - DNA, 25 bp, Artificial
  probe
  misc_feature (1)..(25): SEQ ID NO: 3861; WAN024G66_at; Start 368; Stop 392
ctgaagtcggtacccaaactcctga

SEQ ID NO: 232667 - DNA, 25 bp, Artificial
  probe
  misc_feature (1)..(25): SEQ ID NO: 3861; WAN024G66_at; Start 40; Stop 64
aaaagactctctctctactatcgaa

SEQ ID NO: 232668 - DNA, 25 bp, Artificial
  probe
  misc_feature (1)..(25): SEQ ID NO: 3861; WAN024G66_at; Start 361; Stop 385
gaccatcctgaagtcggtacccaaa

SEQ ID NO: 232669 - DNA, 25 bp, Artificial
  probe
  misc_feature (1)..(25): SEQ ID NO: 3861; WAN024G66_at; Start 134; Stop 158
ttgattcagcgaccgtacgtcgtga

SEQ ID NO: 232670 - DNA, 25 bp, Artificial
  probe
  misc_feature (1)..(25): SEQ ID NO: 3861; WAN024G66_at; Start 247; Stop 271
aactctattaccaatgtcatgctgg

SEQ ID NO: 232671 - DNA, 25 bp, Artificial
  probe
  misc_feature (1)..(25): SEQ ID NO: 3861; WAN024G66_at; Start 608; Stop 632
aaaccctcctctacttcatgcgaaa

SEQ ID NO: 232672 - DNA, 25 bp, Artificial
  probe
  misc_feature (1)..(25): SEQ ID NO: 3861; WAN024G66_at; Start 94; Stop 118
gaacgtgccaactctaagcaaattg

SEQ ID NO: 232673 - DNA, 25 bp, Artificial
  probe
  misc_feature (1)..(25): SEQ ID NO: 3861; WAN024G66_at; Start 187; Stop 211
cgtggttttggctatgatgtcaaaa

SEQ ID NO: 232674 - DNA, 25 bp, Artificial
  probe
  misc_feature (1)..(25): SEQ ID NO: 3861; WAN024G66_at; Start 28; Stop 52
aaagctacagcaaaaagactctctc

SEQ ID NO: 232675 - DNA, 25 bp, Artificial
  probe
  misc_feature (1)..(25): SEQ ID NO: 3861; WAN024G66_at; Start 445; Stop 469
gatgtgaagactgctatcctaactg

SEQ ID NO: 232676 - DNA, 25 bp, Artificial
  probe
  misc_feature (1)..(25): SEQ ID NO: 3861; WAN024G66_at; Start 593; Stop 617
tgacaagtgaactccaaaccctcct

SEQ ID NO: 232677 - DNA, 25 bp, Artificial
  probe
  misc_feature (1)..(25): SEQ ID NO: 3861; WAN024G66_at; Start 544; Stop 568
ccagtccatctgcatttaccaaaag

SEQ ID NO: 232678 - DNA, 25 bp, Artificial
  probe
  misc_feature (1)..(25): SEQ ID NO: 3861; WAN024G66_at; Start 315; Stop 339
ccacgaacgtaacaagatgaagatt

SEQ ID NO: 232679 - DNA, 25 bp, Artificial
  probe
  misc_feature (1)..(25): SEQ ID NO: 3861; WAN024G66_at; Start 78; Stop 102
tcatgcagaaaagattgaacgtgcc

SEQ ID NO: 232680 - DNA, 25 bp, Artificial
  probe
  misc_feature (1)..(25): SEQ ID NO: 3861; WAN024G66_at; Start 471; Stop 495
tcccagcgtcaagtcacaagaggtt

SEQ ID NO: 232681 - DNA, 25 bp, Artificial
  probe
  misc_feature (1)..(25): SEQ ID NO: 3861; WAN024G66_at; Start 216; Stop 240
aatgacattttttgccgatttgctc

SEQ ID NO: 232682 - DNA, 25 bp, Artificial
  probe
  misc_feature (1)..(25): SEQ ID NO: 3861; WAN024G66_at; Start 229; Stop 253
gccgatttgctcaatgacaactcta

SEQ ID NO: 232683 - DNA, 25 bp, Artificial
  probe
  misc_feature (1)..(25): SEQ ID NO: 3861; WAN024G66_at; Start 496; Stop 520
gctaatctcttggttgatgctggtg

SEQ ID NO: 232684 - DNA, 25 bp, Artificial
  probe
  misc_feature (1)..(25): SEQ ID NO: 3861; WAN024G66_at; Start 568; Stop 592
gacgtggtcgttcagtatgtcgatt

SEQ ID NO: 232685 - DNA, 25 bp, Artificial
  probe
  misc_feature (1)..(25): SEQ ID NO: 3861; WAN024G66_at; Start 554; Stop 578
tgcatttaccaaaagacgtggtcgt

SEQ ID NO: 232686 - DNA, 25 bp, Artificial
  probe
  misc_feature (1)..(25): SEQ ID NO: 3861; WAN024G66_at; Start 276; Stop 300
tattggaaatatgggccatgccctt

SEQ ID NO: 232687 - DNA, 25 bp, Artificial
  probe
  misc_feature (1)..(25): SEQ ID NO: 3861; WAN024G66_at; Start 617; Stop 641
tctacttcatgcgaaaagaggatta

SEQ ID NO: 232688 - DNA, 25 bp, Artificial
  probe
  misc_feature (1)..(25): SEQ ID NO: 3861; WAN024G66_at; Start 511; Stop 535
gatgctggtgtgaaaggaattctca

SEQ ID NO: 232689 - DNA, 25 bp, Artificial
  probe
  misc_feature (1)..(25): SEQ ID NO: 3861; WAN024G66_at; Start 307; Stop 331
taccgcttccacgaacgtaacaaga

SEQ ID NO: 232690 - DNA, 25 bp, Artificial
  probe
  misc_feature (1)..(25): SEQ ID NO: 3861; WAN024G66_at; Start 480; Stop 504
caagtcacaagaggttgctaatctc

SEQ ID NO: 232691 - DNA, 25 bp, Artificial
  probe
  misc_feature (1)..(25): SEQ ID NO: 3861; WAN024G66_at; Start 527; Stop 551
gaattctcagtttttcaccagtcca

SEQ ID NO: 232692 - DNA, 25 bp, Artificial
  probe
  misc_feature (1)..(25): SEQ ID NO: 3861; WAN024G66_at; Start 61; Stop 85
cgaatttttaagagatttcatgcag

SEQ ID NO: 232693 - DNA, 25 bp, Artificial
  probe
  misc_feature (1)..(25): SEQ ID NO: 3861; WAN024G66_at; Start 459; Stop 483
tatcctaactgttcccagcgtcaag

SEQ ID NO: 232694 - DNA, 25 bp, Artificial
  probe
  misc_feature (1)..(25): SEQ ID NO: 3861; WAN024G66_at; Start 13; Stop 37
cagtttgctattccaaaagctacag

SEQ ID NO: 232695 - DNA, 25 bp, Artificial
  probe
  misc_feature (1)..(25): SEQ ID NO: 3861; WAN024G66_at; Start 415; Stop 439
tctcagatcaaggataaaatcaagg

SEQ ID NO: 232696 - DNA, 25 bp, Artificial
  probe
  misc_feature (1)..(25): SEQ ID NO: 3861; WAN024G66_at; Start 261; Stop 285
tgtcatgctggttggtattggaaat

SEQ ID NO: 232697 - DNA, 25 bp, Artificial
  probe
  misc_feature (1)..(25): SEQ ID NO: 4221; WAN024G67_at; Start 261; Stop 285
tatcaatggttttgggttcgccata

SEQ ID NO: 232698 - DNA, 25 bp, Artificial
  probe
  misc_feature (1)..(25): SEQ ID NO: 4221; WAN024G67_at; Start 228; Stop 252
cgaagatatctctttgaaggtgata

SEQ ID NO: 232699 - DNA, 25 bp, Artificial
  probe
  misc_feature (1)..(25): SEQ ID NO: 4221; WAN024G67_at; Start 82; Stop 106
tgtgtactcaacagaagaatcctgc

SEQ ID NO: 232700 - DNA, 25 bp, Artificial
  probe
  misc_feature (1)..(25): SEQ ID NO: 4221; WAN024G67_at; Start 33; Stop 57
catagatttcttggagaacggtatc

SEQ ID NO: 232701 - DNA, 25 bp, Artificial
  probe
  misc_feature (1)..(25): SEQ ID NO: 4221; WAN024G67_at; Start 344; Stop 368
tagtggcaggccatttcttgatcac

SEQ ID NO: 232702 - DNA, 25 bp, Artificial
  probe
  misc_feature (1)..(25): SEQ ID NO: 4221; WAN024G67_at; Start 168; Stop 192
cacggcagacagagaaaatgggctt

SEQ ID NO: 232703 - DNA, 25 bp, Artificial
  probe
  misc_feature (1)..(25): SEQ ID NO: 4221; WAN024G67_at; Start 206; Stop 230
gcttccttgatgagggccagttcga

SEQ ID NO: 232704 - DNA, 25 bp, Artificial
  probe
  misc_feature (1)..(25): SEQ ID NO: 4221; WAN024G67_at; Start 186; Stop 210
tgggctttttctgtttaatagcttc

SEQ ID NO: 232705 - DNA, 25 bp, Artificial
  probe
  misc_feature (1)..(25): SEQ ID NO: 4221; WAN024G67_at; Start 308; Stop 332
ccacctgtcaagatgagcttgtcaa

SEQ ID NO: 232706 - DNA, 25 bp, Artificial
  probe
  misc_feature (1)..(25): SEQ ID NO: 4221; WAN024G67_at; Start 287; Stop 311
aattttggatcgacattttgcccac

SEQ ID NO: 232707 - DNA, 25 bp, Artificial
  probe
  misc_feature (1)..(25): SEQ ID NO: 4221; WAN024G67_at; Start 348; Stop 372
ggcaggccatttcttgatcaccaat

SEQ ID NO: 232708 - DNA, 25 bp, Artificial
  probe
  misc_feature (1)..(25): SEQ ID NO: 4221; WAN024G67_at; Start 354; Stop 378
ccatttcttgatcaccaatcggtag

SEQ ID NO: 232709 - DNA, 25 bp, Artificial
  probe
  misc_feature (1)..(25): SEQ ID NO: 4221; WAN024G67_at; Start 172; Stop 196
gcagacagagaaaatgggctttttc

SEQ ID NO: 232710 - DNA, 25 bp, Artificial
  probe
  misc_feature (1)..(25): SEQ ID NO: 4221; WAN024G67_at; Start 67; Stop 91
taccaagcgttgagttgtgtactca

SEQ ID NO: 232711 - DNA, 25 bp, Artificial
  probe
  misc_feature (1)..(25): SEQ ID NO: 4221; WAN024G67_at; Start 98; Stop 122
gaatcctgccaatggtcttcgatat

SEQ ID NO: 232712 - DNA, 25 bp, Artificial
  probe
  misc_feature (1)..(25): SEQ ID NO: 4221; WAN024G67_at; Start 201; Stop 225
taatagcttccttgatgagggccag

SEQ ID NO: 232713 - DNA, 25 bp, Artificial
  probe
  misc_feature (1)..(25): SEQ ID NO: 4221; WAN024G67_at; Start 118; Stop 142
gatatcttggtacaaagttccaccc

SEQ ID NO: 232714 - DNA, 25 bp, Artificial
  probe
  misc_feature (1)..(25): SEQ ID NO: 4221; WAN024G67_at; Start 220; Stop 244
ggccagttcgaagatatctctttga

SEQ ID NO: 232715 - DNA, 25 bp, Artificial
  probe
  misc_feature (1)..(25): SEQ ID NO: 4221; WAN024G67_at; Start 107; Stop 131
caatggtcttcgatatcttggtaca

SEQ ID NO: 232716 - DNA, 25 bp, Artificial
  probe
  misc_feature (1)..(25): SEQ ID NO: 4221; WAN024G67_at; Start 153; Stop 177
taaagagttgggtaccacggcagac

SEQ ID NO: 232717 - DNA, 25 bp, Artificial
  probe
  misc_feature (1)..(25): SEQ ID NO: 4221; WAN024G67_at; Start 8; Stop 32
aaggagttgatatgagagatttctc

SEQ ID NO: 232718 - DNA, 25 bp, Artificial
  probe
  misc_feature (1)..(25): SEQ ID NO: 4221; WAN024G67_at; Start 140; Stop 164
cccatggcaacgttaaagagttggg

SEQ ID NO: 232719 - DNA, 25 bp, Artificial
  probe
  misc_feature (1)..(25): SEQ ID NO: 4221; WAN024G67_at; Start 302; Stop 326
ttttgcccacctgtcaagatgagct

SEQ ID NO: 232720 - DNA, 25 bp, Artificial
  probe
  misc_feature (1)..(25): SEQ ID NO: 4221; WAN024G67_at; Start 334; Stop 358
caaactgatatagtggcaggccatt

SEQ ID NO: 232721 - DNA, 25 bp, Artificial
  probe
  misc_feature (1)..(25): SEQ ID NO: 4221; WAN024G67_at; Start 316; Stop 340
caagatgagcttgtcaatcaaactg

SEQ ID NO: 232722 - DNA, 25 bp, Artificial
  probe
  misc_feature (1)..(25): SEQ ID NO: 4221; WAN024G67_at; Start 161; Stop 185
tgggtaccacggcagacagagaaaa

SEQ ID NO: 232723 - DNA, 25 bp, Artificial
  probe
  misc_feature (1)..(25): SEQ ID NO: 4221; WAN024G67_at; Start 90; Stop 114
caacagaagaatcctgccaatggtc

SEQ ID NO: 232724 - DNA, 25 bp, Artificial
  probe
  misc_feature (1)..(25): SEQ ID NO: 4221; WAN024G67_at; Start 21; Stop 45
gagagatttctccatagatttcttg

SEQ ID NO: 232725 - DNA, 25 bp, Artificial
  probe
  misc_feature (1)..(25): SEQ ID NO: 4221; WAN024G67_at; Start 293; Stop 317
ggatcgacattttgcccacctgtca

SEQ ID NO: 232726 - DNA, 25 bp, Artificial
  probe
  misc_feature (1)..(25): SEQ ID NO: 4221; WAN024G67_at; Start 330; Stop 354
caatcaaactgatatagtggcaggc

SEQ ID NO: 232727 - DNA, 25 bp, Artificial
  probe
  misc_feature (1)..(25): SEQ ID NO: 4221; WAN024G67_at; Start 214; Stop 238
gatgagggccagttcgaagatatct

SEQ ID NO: 232728 - DNA, 25 bp, Artificial
  probe
  misc_feature (1)..(25): SEQ ID NO: 4221; WAN024G67_at; Start 125; Stop 149
tggtacaaagttccacccatggcaa

SEQ ID NO: 232729 - DNA, 25 bp, Artificial
  probe
  misc_feature (1)..(25): SEQ ID NO: 4221; WAN024G67_at; Start 136; Stop 160
tccacccatggcaacgttaaagagt

SEQ ID NO: 232730 - DNA, 25 bp, Artificial
  probe
  misc_feature (1)..(25): SEQ ID NO: 4221; WAN024G67_at; Start 61; Stop 85
ttctgttaccaagcgttgagttgtg

SEQ ID NO: 232731 - DNA, 25 bp, Artificial
  probe
  misc_feature (1)..(25): SEQ ID NO: 633; WAN024G68_at; Start 65; Stop 89
tgagctacgcagcaaaaggctttgt

SEQ ID NO: 232732 - DNA, 25 bp, Artificial
  probe
  misc_feature (1)..(25): SEQ ID NO: 633; WAN024G68_at; Start 191; Stop 215
caggtgggcaaaatgtcgatccaaa

SEQ ID NO: 232733 - DNA, 25 bp, Artificial
  probe
  misc_feature (1)..(25): SEQ ID NO: 633; WAN024G68_at; Start 313; Stop 337
aagcccattttctctgtctgccgtg

SEQ ID NO: 232734 - DNA, 25 bp, Artificial
  probe
  misc_feature (1)..(25): SEQ ID NO: 633; WAN024G68_at; Start 473; Stop 497
gagaaatctctcatatcaactcctt

SEQ ID NO: 232735 - DNA, 25 bp, Artificial
  probe
  misc_feature (1)..(25): SEQ ID NO: 633; WAN024G68_at; Start 609; Stop 633
tgtccaatggcatccagaacttctt

SEQ ID NO: 232736 - DNA, 25 bp, Artificial
  probe
  misc_feature (1)..(25): SEQ ID NO: 633; WAN024G68_at; Start 147; Stop 171
aatggcctgccactatatcagtttg

SEQ ID NO: 232737 - DNA, 25 bp, Artificial
  probe
  misc_feature (1)..(25): SEQ ID NO: 633; WAN024G68_at; Start 76; Stop 100
gcaaaaggctttgttgaaggcgtta

SEQ ID NO: 232738 - DNA, 25 bp, Artificial
  probe
  misc_feature (1)..(25): SEQ ID NO: 633; WAN024G68_at; Start 162; Stop 186
tatcagtttgattgacaagctcatc

SEQ ID NO: 232739 - DNA, 25 bp, Artificial
  probe
  misc_feature (1)..(25): SEQ ID NO: 633; WAN024G68_at; Start 55; Stop 79
gacatcatgatgagctacgcagcaa

SEQ ID NO: 232740 - DNA, 25 bp, Artificial
  probe
  misc_feature (1)..(25): SEQ ID NO: 633; WAN024G68_at; Start 262; Stop 286
caaagagatatcttcgaactggccc

SEQ ID NO: 232741 - DNA, 25 bp, Artificial
  probe
  misc_feature (1)..(25): SEQ ID NO: 633; WAN024G68_at; Start 112; Stop 136
gggattcccatcatcctaccgattg

SEQ ID NO: 232742 - DNA, 25 bp, Artificial
  probe
  misc_feature (1)..(25): SEQ ID NO: 633; WAN024G68_at; Start 448; Stop 472
gataccgttctccaagaaatctatg

SEQ ID NO: 232743 - DNA, 25 bp, Artificial
  probe
  misc_feature (1)..(25): SEQ ID NO: 633; WAN024G68_at; Start 579; Stop 603
catgagtacggatgatgtcgccttt

SEQ ID NO: 232744 - DNA, 25 bp, Artificial
  probe
  misc_feature (1)..(25): SEQ ID NO: 633; WAN024G68_at; Start 374; Stop 398
tgtaccaagatatcgaagaccattg

SEQ ID NO: 232745 - DNA, 25 bp, Artificial
  probe
  misc_feature (1)..(25): SEQ ID NO: 633; WAN024G68_at; Start 345; Stop 369
actctttaacgttgccatgggtgga

SEQ ID NO: 232746 - DNA, 25 bp, Artificial
  probe
  misc_feature (1)..(25): SEQ ID NO: 633; WAN024G68_at; Start 399; Stop 423
gcaggattcttctgttgagtacaca

SEQ ID NO: 232747 - DNA, 25 bp, Artificial
  probe
  misc_feature (1)..(25): SEQ ID NO: 633; WAN024G68_at; Start 133; Stop 157
attggtgatcaagaaatggcctgcc

SEQ ID NO: 232748 - DNA, 25 bp, Artificial
  probe
  misc_feature (1)..(25): SEQ ID NO: 633; WAN024G68_at; Start 526; Stop 550
ccaaatttaaaagttgtggctcatg

SEQ ID NO: 232749 - DNA, 25 bp, Artificial
  probe
  misc_feature (1)..(25): SEQ ID NO: 633; WAN024G68_at; Start 567; Stop 591
cattgaggctgtcatgagtacggat

SEQ ID NO: 232750 - DNA, 25 bp, Artificial
  probe
  misc_feature (1)..(25): SEQ ID NO: 633; WAN024G68_at; Start 220; Stop 244
tatggcgaacccaaaaccattgata

SEQ ID NO: 232751 - DNA, 25 bp, Artificial
  probe
  misc_feature (1)..(25): SEQ ID NO: 633; WAN024G68_at; Start 384; Stop 408
tatcgaagaccattggcaggattct

SEQ ID NO: 232752 - DNA, 25 bp, Artificial
  probe
  misc_feature (1)..(25): SEQ ID NO: 633; WAN024G68_at; Start 359; Stop 383
ccatgggtggaactttgtaccaaga

SEQ ID NO: 232753 - DNA, 25 bp, Artificial
  probe
  misc_feature (1)..(25): SEQ ID NO: 633; WAN024G68_at; Start 540; Stop 564
tgtggctcatgatcctaaagatggt

SEQ ID NO: 232754 - DNA, 25 bp, Artificial
  probe
  misc_feature (1)..(25): SEQ ID NO: 633; WAN024G68_at; Start 460; Stop 484
caagaaatctatggagaaatctctc

SEQ ID NO: 232755 - DNA, 25 bp, Artificial
  probe
  misc_feature (1)..(25): SEQ ID NO: 633; WAN024G68_at; Start 594; Stop 618
tgtcgcctttctcggtgtccaatgg

SEQ ID NO: 232756 - DNA, 25 bp, Artificial
  probe
  misc_feature (1)..(25): SEQ ID NO: 633; WAN024G68_at; Start 96; Stop 120
cgttaaagatgctggagggattccc

SEQ ID NO: 232757 - DNA, 25 bp, Artificial
  probe
  misc_feature (1)..(25): SEQ ID NO: 633; WAN024G68_at; Start 295; Stop 319
gaagctattaaacagaaaaagccca

SEQ ID NO: 232758 - DNA, 25 bp, Artificial
  probe
  misc_feature (1)..(25): SEQ ID NO: 633; WAN024G68_at; Start 328; Stop 352
gtctgccgtggtacccaactcttta

SEQ ID NO: 232759 - DNA, 25 bp, Artificial
  probe
  misc_feature (1)..(25): SEQ ID NO: 633; WAN024G68_at; Start 277; Stop 301
gaactggccctcatcaaggaagcta

SEQ ID NO: 232760 - DNA, 25 bp, Artificial
  probe
  misc_feature (1)..(25): SEQ ID NO: 633; WAN024G68_at; Start 10; Stop 34
ccagttattgggattacaggaaacg

SEQ ID NO: 232761 - DNA, 25 bp, Artificial
  probe
  misc_feature (1)..(25): SEQ ID NO: 633; WAN024G68_at; Start 555; Stop 579
taaagatggtatcattgaggctgtc

SEQ ID NO: 232762 - DNA, 25 bp, Artificial
  probe
  misc_feature (1)..(25): SEQ ID NO: 633; WAN024G68_at; Start 507; Stop 531
gagcatcaaggacttagcaccaaat

SEQ ID NO: 232763 - DNA, 25 bp, Artificial
  probe
  misc_feature (1)..(25): SEQ ID NO: 633; WAN024G68_at; Start 413; Stop 437
ttgagtacacaactcaacgcttggt

SEQ ID NO: 232764 - DNA, 25 bp, Artificial
  probe
  misc_feature (1)..(25): SEQ ID NO: 633; WAN024G68_at; Start 496; Stop 520
ttccaccaccagagcatcaaggact

SEQ ID NO: 232765 - DNA, 25 bp, Artificial
  probe
  misc_feature (1)..(25): SEQ ID NO: 2107; WAN024G69_at; Start 35; Stop 59
gcatcatattggcaaaatcccagat

SEQ ID NO: 232766 - DNA, 25 bp, Artificial
  probe
  misc_feature (1)..(25): SEQ ID NO: 2107; WAN024G69_at; Start 225; Stop 249
caaattagcaataaggttgagataa

SEQ ID NO: 232767 - DNA, 25 bp, Artificial
  probe
  misc_feature (1)..(25): SEQ ID NO: 2107; WAN024G69_at; Start 110; Stop 134
catccagcatagacatattttgcaa

SEQ ID NO: 232768 - DNA, 25 bp, Artificial
  probe
  misc_feature (1)..(25): SEQ ID NO: 2107; WAN024G69_at; Start 131; Stop 155
gcaaatttgcaaaatcacggatttt

SEQ ID NO: 232769 - DNA, 25 bp, Artificial
  probe
  misc_feature (1)..(25): SEQ ID NO: 2107; WAN024G69_at; Start 218; Stop 242
tgtcactcaaattagcaataaggtt

SEQ ID NO: 232770 - DNA, 25 bp, Artificial
  probe
  misc_feature (1)..(25): SEQ ID NO: 2107; WAN024G69_at; Start 22; Stop 46
tcccgcaaatcaagcatcatattgg

SEQ ID NO: 232771 - DNA, 25 bp, Artificial
  probe
  misc_feature (1)..(25): SEQ ID NO: 2107; WAN024G69_at; Start 44; Stop 68
tggcaaaatcccagatagattgggc

SEQ ID NO: 232772 - DNA, 25 bp, Artificial
  probe
  misc_feature (1)..(25): SEQ ID NO: 2107; WAN024G69_at; Start 57; Stop 81
gatagattgggctgccttacccttg

SEQ ID NO: 232773 - DNA, 25 bp, Artificial
  probe
  misc_feature (1)..(25): SEQ ID NO: 2107; WAN024G69_at; Start 106; Stop 130
gaagcatccagcatagacatatttt

SEQ ID NO: 232774 - DNA, 25 bp, Artificial
  probe
  misc_feature (1)..(25): SEQ ID NO: 2107; WAN024G69_at; Start 159; Stop 183
aactgtacctagaccaattccacgt

SEQ ID NO: 232775 - DNA, 25 bp, Artificial
  probe
  misc_feature (1)..(25): SEQ ID NO: 2107; WAN024G69_at; Start 203; Stop 227
gctcaaaactaatattgtcactcaa

SEQ ID NO: 232776 - DNA, 25 bp, Artificial
  probe
  misc_feature (1)..(25): SEQ ID NO: 2107; WAN024G69_at; Start 142; Stop 166
aaatcacggattttctcaactgtac

SEQ ID NO: 232777 - DNA, 25 bp, Artificial
  probe
  misc_feature (1)..(25): SEQ ID NO: 2107; WAN024G69_at; Start 80; Stop 104
tgataccagacaacataatattagc

SEQ ID NO: 232778 - DNA, 25 bp, Artificial
  probe
  misc_feature (1)..(25): SEQ ID NO: 2107; WAN024G69_at; Start 178; Stop 202
ccacgtttaggctcgttgataatac

SEQ ID NO: 232779 - DNA, 25 bp, Artificial
  probe
  misc_feature (1)..(25): SEQ ID NO: 2107; WAN024G69_at; Start 11; Stop 35
ggtctagctgctcccgcaaatcaag

SEQ ID NO: 232780 - DNA, 25 bp, Artificial
  probe
  misc_feature (1)..(25): SEQ ID NO: 2107; WAN024G69_at; Start 15; Stop 39
tagctgctcccgcaaatcaagcatc

SEQ ID NO: 232781 - DNA, 25 bp, Artificial
  probe
  misc_feature (1)..(25): SEQ ID NO: 2107; WAN024G69_at; Start 101; Stop 125
tagcagaagcatccagcatagacat

SEQ ID NO: 232782 - DNA, 25 bp, Artificial
  probe
  misc_feature (1)..(25): SEQ ID NO: 2107; WAN024G69_at; Start 95; Stop 119
taatattagcagaagcatccagcat

SEQ ID NO: 232783 - DNA, 25 bp, Artificial
  probe
  misc_feature (1)..(25): SEQ ID NO: 2107; WAN024G69_at; Start 64; Stop 88
tgggctgccttacccttgataccag

SEQ ID NO: 232784 - DNA, 25 bp, Artificial
  probe
  misc_feature (1)..(25): SEQ ID NO: 2107; WAN024G69_at; Start 5; Stop 29
ttaagtggtctagctgctcccgcaa

SEQ ID NO: 232785 - DNA, 25 bp, Artificial
  probe
  misc_feature (1)..(25): SEQ ID NO: 2107; WAN024G69_at; Start 90; Stop 114
caacataatattagcagaagcatcc

SEQ ID NO: 232786 - DNA, 25 bp, Artificial
  probe
  misc_feature (1)..(25): SEQ ID NO: 2107; WAN024G69_at; Start 150; Stop 174
gattttctcaactgtacctagacca

SEQ ID NO: 232787 - DNA, 25 bp, Artificial
  probe
  misc_feature (1)..(25): SEQ ID NO: 2107; WAN024G69_at; Start 185; Stop 209
taggctcgttgataatacgctcaaa

SEQ ID NO: 232788 - DNA, 25 bp, Artificial
  probe
  misc_feature (1)..(25): SEQ ID NO: 2107; WAN024G69_at; Start 197; Stop 221
taatacgctcaaaactaatattgtc

SEQ ID NO: 232789 - DNA, 25 bp, Artificial
  probe
  misc_feature (1)..(25): SEQ ID NO: 2107; WAN024G69_at; Start 70; Stop 94
gccttacccttgataccagacaaca

SEQ ID NO: 232790 - DNA, 25 bp, Artificial
  probe
  misc_feature (1)..(25): SEQ ID NO: 2107; WAN024G69_at; Start 98; Stop 122
tattagcagaagcatccagcataga

SEQ ID NO: 232791 - DNA, 25 bp, Artificial
  probe
  misc_feature (1)..(25): SEQ ID NO: 2107; WAN024G69_at; Start 146; Stop 170
cacggattttctcaactgtacctag

SEQ ID NO: 232792 - DNA, 25 bp, Artificial
  probe
  misc_feature (1)..(25): SEQ ID NO: 2107; WAN024G69_at; Start 168; Stop 192
tagaccaattccacgtttaggctcg

SEQ ID NO: 232793 - DNA, 25 bp, Artificial
  probe
  misc_feature (1)..(25): SEQ ID NO: 2107; WAN024G69_at; Start 48; Stop 72
aaaatcccagatagattgggctgcc

SEQ ID NO: 232794 - DNA, 25 bp, Artificial
  probe
  misc_feature (1)..(25): SEQ ID NO: 2107; WAN024G69_at; Start 116; Stop 140
gcatagacatattttgcaaatttgc

SEQ ID NO: 232795 - DNA, 25 bp, Artificial
  probe
  misc_feature (1)..(25): SEQ ID NO: 2107; WAN024G69_at; Start 53; Stop 77
cccagatagattgggctgccttacc

SEQ ID NO: 232796 - DNA, 25 bp, Artificial
  probe
  misc_feature (1)..(25): SEQ ID NO: 2107; WAN024G69_at; Start 31; Stop 55
tcaagcatcatattggcaaaatccc

SEQ ID NO: 232797 - DNA, 25 bp, Artificial
  probe
  misc_feature (1)..(25): SEQ ID NO: 2107; WAN024G69_at; Start 172; Stop 196
ccaattccacgtttaggctcgttga

SEQ ID NO: 232798 - DNA, 25 bp, Artificial
  probe
  misc_feature (1)..(25): SEQ ID NO: 2107; WAN024G69_at; Start 2; Stop 26
tgcttaagtggtctagctgctcccg

SEQ ID NO: 232799 - DNA, 25 bp, Artificial
  probe
  misc_feature (1)..(25): SEQ ID NO: 5597; WAN024G6A_at; Start 161; Stop 185
tgataggctgtataacactgggcca

SEQ ID NO: 232800 - DNA, 25 bp, Artificial
  probe
  misc_feature (1)..(25): SEQ ID NO: 5597; WAN024G6A_at; Start 315; Stop 339
tgagaatacgtttcatgagcgttcg

SEQ ID NO: 232801 - DNA, 25 bp, Artificial
  probe
  misc_feature (1)..(25): SEQ ID NO: 5597; WAN024G6A_at; Start 479; Stop 503
tctttcatctcacgcgcagccttgt

SEQ ID NO: 232802 - DNA, 25 bp, Artificial
  probe
  misc_feature (1)..(25): SEQ ID NO: 5597; WAN024G6A_at; Start 99; Stop 123
gacgcaaggtcagcataatcaaatc

SEQ ID NO: 232803 - DNA, 25 bp, Artificial
  probe
  misc_feature (1)..(25): SEQ ID NO: 5597; WAN024G6A_at; Start 201; Stop 225
tatcgccagcttgggcagcataagc

SEQ ID NO: 232804 - DNA, 25 bp, Artificial
  probe
  misc_feature (1)..(25): SEQ ID NO: 5597; WAN024G6A_at; Start 5; Stop 29
tactgagcgtggttggtatcttggt

SEQ ID NO: 232805 - DNA, 25 bp, Artificial
  probe
  misc_feature (1)..(25): SEQ ID NO: 5597; WAN024G6A_at; Start 176; Stop 200
cactgggccacaatttgcgtataca

SEQ ID NO: 232806 - DNA, 25 bp, Artificial
  probe
  misc_feature (1)..(25): SEQ ID NO: 5597; WAN024G6A_at; Start 551; Stop 575
tcaatcaaataagcgatacggtggg

SEQ ID NO: 232807 - DNA, 25 bp, Artificial
  probe
  misc_feature (1)..(25): SEQ ID NO: 5597; WAN024G6A_at; Start 245; Stop 269
ttcttagcattggaaatggtcccca

SEQ ID NO: 232808 - DNA, 25 bp, Artificial
  probe
  misc_feature (1)..(25): SEQ ID NO: 5597; WAN024G6A_at; Start 594; Stop 618
cagaaccagcccctgccatgattag

SEQ ID NO: 232809 - DNA, 25 bp, Artificial
  probe
  misc_feature (1)..(25): SEQ ID NO: 5597; WAN024G6A_at; Start 341; Stop 365
tgttcaccaggatccacaattgtaa

SEQ ID NO: 232810 - DNA, 25 bp, Artificial
  probe
  misc_feature (1)..(25): SEQ ID NO: 5597; WAN024G6A_at; Start 300; Stop 324
ccaagttcaactgtttgagaatacg

SEQ ID NO: 232811 - DNA, 25 bp, Artificial
  probe
  misc_feature (1)..(25): SEQ ID NO: 5597; WAN024G6A_at; Start 505; Stop 529
ggtaaaggtaatggccaagatattc

SEQ ID NO: 232812 - DNA, 25 bp, Artificial
  probe
  misc_feature (1)..(25): SEQ ID NO: 5597; WAN024G6A_at; Start 130; Stop 154
gtcaacggattcagactgacgaagt

SEQ ID NO: 232813 - DNA, 25 bp, Artificial
  probe
  misc_feature (1)..(25): SEQ ID NO: 5597; WAN024G6A_at; Start 114; Stop 138
taatcaaatcatcaaagtcaacgga

SEQ ID NO: 232814 - DNA, 25 bp, Artificial
  probe
  misc_feature (1)..(25): SEQ ID NO: 5597; WAN024G6A_at; Start 384; Stop 408
tatggtccgcatcgcgacgcaaaat

SEQ ID NO: 232815 - DNA, 25 bp, Artificial
  probe
  misc_feature (1)..(25): SEQ ID NO: 5597; WAN024G6A_at; Start 457; Stop 481
tggattgaggctataagcacgctct

SEQ ID NO: 232816 - DNA, 25 bp, Artificial
  probe
  misc_feature (1)..(25): SEQ ID NO: 5597; WAN024G6A_at; Start 491; Stop 515
cgcgcagccttgttggtaaaggtaa

SEQ ID NO: 232817 - DNA, 25 bp, Artificial
  probe
  misc_feature (1)..(25): SEQ ID NO: 5597; WAN024G6A_at; Start 260; Stop 284
atggtccccaaaatagttcgttcat

SEQ ID NO: 232818 - DNA, 25 bp, Artificial
  probe
  misc_feature (1)..(25): SEQ ID NO: 5597; WAN024G6A_at; Start 84; Stop 108
gattttgatcaaagagacgcaaggt

SEQ ID NO: 232819 - DNA, 25 bp, Artificial
  probe
  misc_feature (1)..(25): SEQ ID NO: 5597; WAN024G6A_at; Start 191; Stop 215
tgcgtatacatatcgccagcttggg

SEQ ID NO: 232820 - DNA, 25 bp, Artificial
  probe
  misc_feature (1)..(25): SEQ ID NO: 5597; WAN024G6A_at; Start 328; Stop 352
catgagcgttcgctgttcaccagga

SEQ ID NO: 232821 - DNA, 25 bp, Artificial
  probe
  misc_feature (1)..(25): SEQ ID NO: 5597; WAN024G6A_at; Start 63; Stop 87
ggtagtaggtcaaaacatcaggatt

SEQ ID NO: 232822 - DNA, 25 bp, Artificial
  probe
  misc_feature (1)..(25): SEQ ID NO: 5597; WAN024G6A_at; Start 30; Stop 54
actcatcaacgtggatgtattggaa

SEQ ID NO: 232823 - DNA, 25 bp, Artificial
  probe
  misc_feature (1)..(25): SEQ ID NO: 5597; WAN024G6A_at; Start 51; Stop 75
ggaatttttgctggtagtaggtcaa

SEQ ID NO: 232824 - DNA, 25 bp, Artificial
  probe
  misc_feature (1)..(25): SEQ ID NO: 5597; WAN024G6A_at; Start 398; Stop 422
cgacgcaaaatacgcacacacatgg

SEQ ID NO: 232825 - DNA, 25 bp, Artificial
  probe
  misc_feature (1)..(25): SEQ ID NO: 5597; WAN024G6A_at; Start 146; Stop 170
tgacgaagttctttttgataggctg

SEQ ID NO: 232826 - DNA, 25 bp, Artificial
  probe
  misc_feature (1)..(25): SEQ ID NO: 5597; WAN024G6A_at; Start 412; Stop 436
cacacacatggagtggaaggtcgca

SEQ ID NO: 232827 - DNA, 25 bp, Artificial
  probe
  misc_feature (1)..(25): SEQ ID NO: 5597; WAN024G6A_at; Start 530; Stop 554
caaggattgaccagcttttcatcaa

SEQ ID NO: 232828 - DNA, 25 bp, Artificial
  probe
  misc_feature (1)..(25): SEQ ID NO: 5597; WAN024G6A_at; Start 213; Stop 237
gggcagcataagcaacatcatcaat

SEQ ID NO: 232829 - DNA, 25 bp, Artificial
  probe
  misc_feature (1)..(25): SEQ ID NO: 5597; WAN024G6A_at; Start 520; Stop 544
caagatattccaaggattgaccagc

SEQ ID NO: 232830 - DNA, 25 bp, Artificial
  probe
  misc_feature (1)..(25): SEQ ID NO: 5597; WAN024G6A_at; Start 19; Stop 43
ggtatcttggtactcatcaacgtgg

SEQ ID NO: 232831 - DNA, 25 bp, Artificial
  probe
  misc_feature (1)..(25): SEQ ID NO: 5597; WAN024G6A_at; Start 369; Stop 393
tacgattgtagccaatatggtccgc

SEQ ID NO: 232832 - DNA, 25 bp, Artificial
  probe
  misc_feature (1)..(25): SEQ ID NO: 5597; WAN024G6A_at; Start 427; Stop 451
gaaggtcgcaatcagacagtcctga

SEQ ID NO: 232833 - DNA, 25 bp, Artificial
  probe
  misc_feature (1)..(25): SEQ ID NO: 1040; WAN024G6B_at; Start 1393; Stop 1417
gatttgcgggagcagctagaccact

SEQ ID NO: 232834 - DNA, 25 bp, Artificial
  probe
  misc_feature (1)..(25): SEQ ID NO: 1040; WAN024G6B_at; Start 180; Stop 204
taccaacaaggctgcgcgtgagatg

SEQ ID NO: 232835 - DNA, 25 bp, Artificial
  probe
  misc_feature (1)..(25): SEQ ID NO: 1040; WAN024G6B_at; Start 1635; Stop 1659
cacagattcaggtagtcaggagaca

SEQ ID NO: 232836 - DNA, 25 bp, Artificial
  probe
  misc_feature (1)..(25): SEQ ID NO: 1040; WAN024G6B_at; Start 915; Stop 939
tctctggactcaaaacgctgatggg

SEQ ID NO: 232837 - DNA, 25 bp, Artificial
  probe
  misc_feature (1)..(25): SEQ ID NO: 1040; WAN024G6B_at; Start 1113; Stop 1137
tccttataccatggttggcggaacc

SEQ ID NO: 232838 - DNA, 25 bp, Artificial
  probe
  misc_feature (1)..(25): SEQ ID NO: 1040; WAN024G6B_at; Start 2114; Stop 2138
cagcatctagcgaggcaaattggtc

SEQ ID NO: 232839 - DNA, 25 bp, Artificial
  probe
  misc_feature (1)..(25): SEQ ID NO: 1040; WAN024G6B_at; Start 58; Stop 82
gaaggtcccttgctaatcatggcag

SEQ ID NO: 232840 - DNA, 25 bp, Artificial
  probe
  misc_feature (1)..(25): SEQ ID NO: 1040; WAN024G6B_at; Start 14; Stop 38
taaatggaatgaatgaccgtcaggc

SEQ ID NO: 232841 - DNA, 25 bp, Artificial
  probe
  misc_feature (1)..(25): SEQ ID NO: 1040; WAN024G6B_at; Start 986; Stop 1010
tatttgtagccagaaccatcgatga

SEQ ID NO: 232842 - DNA, 25 bp, Artificial
  probe
  misc_feature (1)..(25): SEQ ID NO: 1040; WAN024G6B_at; Start 1224; Stop 1248
tattatcaacgagcctaaacgtgga

SEQ ID NO: 232843 - DNA, 25 bp, Artificial
  probe
  misc_feature (1)..(25): SEQ ID NO: 1040; WAN024G6B_at; Start 334; Stop 358
gatcctggtgaacagcgaacgctca

SEQ ID NO: 232844 - DNA, 25 bp, Artificial
  probe
  misc_feature (1)..(25): SEQ ID NO: 1040; WAN024G6B_at; Start 1772; Stop 1796
cagatgaattagaagaagagcgccg

SEQ ID NO: 232845 - DNA, 25 bp, Artificial
  probe
  misc_feature (1)..(25): SEQ ID NO: 1040; WAN024G6B_at; Start 1802; Stop 1826
cctatgtaggtatcacgcgtgcaga

SEQ ID NO: 232846 - DNA, 25 bp, Artificial
  probe
  misc_feature (1)..(25): SEQ ID NO: 1040; WAN024G6B_at; Start 1680; Stop 1704
cctgcatgctgccaaaggtctcgaa

SEQ ID NO: 232847 - DNA, 25 bp, Artificial
  probe
  misc_feature (1)..(25): SEQ ID NO: 1040; WAN024G6B_at; Start 136; Stop 160
gatgaaaagctggtcaatccttgga

SEQ ID NO: 232848 - DNA, 25 bp, Artificial
  probe
  misc_feature (1)..(25): SEQ ID NO: 1040; WAN024G6B_at; Start 1615; Stop 1639
gacttggctttgattgccgacacag

SEQ ID NO: 232849 - DNA, 25 bp, Artificial
  probe
  misc_feature (1)..(25): SEQ ID NO: 1040; WAN024G6B_at; Start 2057; Stop 2081
caaaatcaatccagtcaagcggtct

SEQ ID NO: 232850 - DNA, 25 bp, Artificial
  probe
  misc_feature (1)..(25): SEQ ID NO: 1040; WAN024G6B_at; Start 43; Stop 67
gcggtgcaaacgacagaaggtccct

SEQ ID NO: 232851 - DNA, 25 bp, Artificial
  probe
  misc_feature (1)..(25): SEQ ID NO: 1040; WAN024G6B_at; Start 1482; Stop 1506
ccaagcgactctagaaagcaaggca

SEQ ID NO: 232852 - DNA, 25 bp, Artificial
  probe
  misc_feature (1)..(25): SEQ ID NO: 1040; WAN024G6B_at; Start 249; Stop 273
gattgcgaccttccactccatgtgt

SEQ ID NO: 232853 - DNA, 25 bp, Artificial
  probe
  misc_feature (1)..(25): SEQ ID NO: 1040; WAN024G6B_at; Start 1075; Stop 1099
tcccgtacaattgaggaagccctgc

SEQ ID NO: 232854 - DNA, 25 bp, Artificial
  probe
  misc_feature (1)..(25): SEQ ID NO: 1040; WAN024G6B_at; Start 2084; Stop 2108
catttggtcaatttacagctggcgc

SEQ ID NO: 232855 - DNA, 25 bp, Artificial
  probe
  misc_feature (1)..(25): SEQ ID NO: 1040; WAN024G6B_at; Start 1786; Stop 1810
gaagagcgccgtctagcctatgtag

SEQ ID NO: 232856 - DNA, 25 bp, Artificial
  probe
  misc_feature (1)..(25): SEQ ID NO: 1040; WAN024G6B_at; Start 1338; Stop 1362
tggtatcaagggtaaggcagcccaa

SEQ ID NO: 232857 - DNA, 25 bp, Artificial
  probe
  misc_feature (1)..(25): SEQ ID NO: 1040; WAN024G6B_at; Start 289; Stop 313
cgcgatgcggaccatattggctaca

SEQ ID NO: 232858 - DNA, 25 bp, Artificial
  probe
  misc_feature (1)..(25): SEQ ID NO: 1040; WAN024G6B_at; Start 2184; Stop 2208
tctggaagtttcaggtagcggtgct

SEQ ID NO: 232859 - DNA, 25 bp, Artificial
  probe
  misc_feature (1)..(25): SEQ ID NO: 1040; WAN024G6B_at; Start 1940; Stop 1964
gtctggctcgtcctgcaaatacaag

SEQ ID NO: 232860 - DNA, 25 bp, Artificial
  probe
  misc_feature (1)..(25): SEQ ID NO: 1040; WAN024G6B_at; Start 1142; Stop 1166
tctacagccgtaaggaaattcgcga

SEQ ID NO: 232861 - DNA, 25 bp, Artificial
  probe
  misc_feature (1)..(25): SEQ ID NO: 1040; WAN024G6B_at; Start 454; Stop 478
gatgatgttgcttatgctgcccaag

SEQ ID NO: 232862 - DNA, 25 bp, Artificial
  probe
  misc_feature (1)..(25): SEQ ID NO: 1040; WAN024G6B_at; Start 736; Stop 760
gatgcggaccagtctatctacggtt

SEQ ID NO: 232863 - DNA, 25 bp, Artificial
  probe
  misc_feature (1)..(25): SEQ ID NO: 1040; WAN024G6B_at; Start 1663; Stop 1687
gaagtgaccttgatgaccctgcatg

SEQ ID NO: 232864 - DNA, 25 bp, Artificial
  probe
  misc_feature (1)..(25): SEQ ID NO: 1040; WAN024G6B_at; Start 897; Stop 921
aaatcgccgtcctaaaaatctctgg

SEQ ID NO: 232865 - DNA, 25 bp, Artificial
  probe
  misc_feature (1)..(25): SEQ ID NO: 1040; WAN024G6B_at; Start 486; Stop 510
tatgtatacgcaaattgtggcccag

SEQ ID NO: 232866 - DNA, 25 bp, Artificial
  probe
  misc_feature (1)..(25): SEQ ID NO: 1040; WAN024G6B_at; Start 1425; Stop 1449
tacagagttggttgagtccgtccta

SEQ ID NO: 232867 - DNA, 25 bp, Artificial
  probe
  misc_feature (1)..(25): SEQ ID NO: 2146; WAN024G6C_at; Start 233; Stop 257
gatttccttcgttatctgtgataga

SEQ ID NO: 232868 - DNA, 25 bp, Artificial
  probe
  misc_feature (1)..(25): SEQ ID NO: 2146; WAN024G6C_at; Start 149; Stop 173
cattgaccttagcagaagttgaccc

SEQ ID NO: 232869 - DNA, 25 bp, Artificial
  probe
  misc_feature (1)..(25): SEQ ID NO: 2146; WAN024G6C_at; Start 40; Stop 64
tgtttggcttcgatatcaccagctt

SEQ ID NO: 232870 - DNA, 25 bp, Artificial
  probe
  misc_feature (1)..(25): SEQ ID NO: 2146; WAN024G6C_at; Start 127; Stop 151
ttcaagtacatacggacagggtcat

SEQ ID NO: 232871 - DNA, 25 bp, Artificial
  probe
  misc_feature (1)..(25): SEQ ID NO: 2146; WAN024G6C_at; Start 152; Stop 176
tgaccttagcagaagttgacccaat

SEQ ID NO: 232872 - DNA, 25 bp, Artificial
  probe
  misc_feature (1)..(25): SEQ ID NO: 2146; WAN024G6C_at; Start 95; Stop 119
cattggtcaagagaggaacgacccc

SEQ ID NO: 232873 - DNA, 25 bp, Artificial
  probe
  misc_feature (1)..(25): SEQ ID NO: 2146; WAN024G6C_at; Start 9; Stop 33
aaccaaacgaagattggcttccgca

SEQ ID NO: 232874 - DNA, 25 bp, Artificial
  probe
  misc_feature (1)..(25): SEQ ID NO: 2146; WAN024G6C_at; Start 53; Stop 77
tatcaccagcttcaacagccagtgc

SEQ ID NO: 232875 - DNA, 25 bp, Artificial
  probe
  misc_feature (1)..(25): SEQ ID NO: 2146; WAN024G6C_at; Start 163; Stop 187
gaagttgacccaatcaagtcctcat

SEQ ID NO: 232876 - DNA, 25 bp, Artificial
  probe
  misc_feature (1)..(25): SEQ ID NO: 2146; WAN024G6C_at; Start 98; Stop 122
tggtcaagagaggaacgacccctat

SEQ ID NO: 232877 - DNA, 25 bp, Artificial
  probe
  misc_feature (1)..(25): SEQ ID NO: 2146; WAN024G6C_at; Start 29; Stop 53
ccgcaagacgttgtttggcttcgat

SEQ ID NO: 232878 - DNA, 25 bp, Artificial
  probe
  misc_feature (1)..(25): SEQ ID NO: 2146; WAN024G6C_at; Start 79; Stop 103
aactctttctcctcttcattggtca

SEQ ID NO: 232879 - DNA, 25 bp, Artificial
  probe
  misc_feature (1)..(25): SEQ ID NO: 2146; WAN024G6C_at; Start 61; Stop 85
gcttcaacagccagtgccaactctt

SEQ ID NO: 232880 - DNA, 25 bp, Artificial
  probe
  misc_feature (1)..(25): SEQ ID NO: 2146; WAN024G6C_at; Start 20; Stop 44
gattggcttccgcaagacgttgttt

SEQ ID NO: 232881 - DNA, 25 bp, Artificial
  probe
  misc_feature (1)..(25): SEQ ID NO: 2146; WAN024G6C_at; Start 185; Stop 209
catcgctgagttctggttcttcttc

SEQ ID NO: 232882 - DNA, 25 bp, Artificial
  probe
  misc_feature (1)..(25): SEQ ID NO: 2146; WAN024G6C_at; Start 113; Stop 137
cgacccctatttctttcaagtacat

SEQ ID NO: 232883 - DNA, 25 bp, Artificial
  probe
  misc_feature (1)..(25): SEQ ID NO: 2146; WAN024G6C_at; Start 123; Stop 147
ttctttcaagtacatacggacaggg

SEQ ID NO: 232884 - DNA, 25 bp, Artificial
  probe
  misc_feature (1)..(25): SEQ ID NO: 2146; WAN024G6C_at; Start 176; Stop 200
tcaagtcctcatcgctgagttctgg

SEQ ID NO: 232885 - DNA, 25 bp, Artificial
  probe
  misc_feature (1)..(25): SEQ ID NO: 2146; WAN024G6C_at; Start 2; Stop 26
tggaaacaaccaaacgaagattggc

SEQ ID NO: 232886 - DNA, 25 bp, Artificial
  probe
  misc_feature (1)..(25): SEQ ID NO: 2146; WAN024G6C_at; Start 226; Stop 250
gcacttggatttccttcgttatctg

SEQ ID NO: 232887 - DNA, 25 bp, Artificial
  probe
  misc_feature (1)..(25): SEQ ID NO: 2146; WAN024G6C_at; Start 133; Stop 157
tacatacggacagggtcattgacct

SEQ ID NO: 232888 - DNA, 25 bp, Artificial
  probe
  misc_feature (1)..(25): SEQ ID NO: 2146; WAN024G6C_at; Start 158; Stop 182
tagcagaagttgacccaatcaagtc

SEQ ID NO: 232889 - DNA, 25 bp, Artificial
  probe
  misc_feature (1)..(25): SEQ ID NO: 2146; WAN024G6C_at; Start 143; Stop 167
cagggtcattgaccttagcagaagt

SEQ ID NO: 232890 - DNA, 25 bp, Artificial
  probe
  misc_feature (1)..(25): SEQ ID NO: 2146; WAN024G6C_at; Start 102; Stop 126
caagagaggaacgacccctatttct

SEQ ID NO: 232891 - DNA, 25 bp, Artificial
  probe
  misc_feature (1)..(25): SEQ ID NO: 2146; WAN024G6C_at; Start 91; Stop 115
tcttcattggtcaagagaggaacga

SEQ ID NO: 232892 - DNA, 25 bp, Artificial
  probe
  misc_feature (1)..(25): SEQ ID NO: 2146; WAN024G6C_at; Start 17; Stop 41
gaagattggcttccgcaagacgttg

SEQ ID NO: 232893 - DNA, 25 bp, Artificial
  probe
  misc_feature (1)..(25): SEQ ID NO: 2146; WAN024G6C_at; Start 191; Stop 215
tgagttctggttcttcttcattgct

SEQ ID NO: 232894 - DNA, 25 bp, Artificial
  probe
  misc_feature (1)..(25): SEQ ID NO: 2146; WAN024G6C_at; Start 51; Stop 75
gatatcaccagcttcaacagccagt

SEQ ID NO: 232895 - DNA, 25 bp, Artificial
  probe
  misc_feature (1)..(25): SEQ ID NO: 2146; WAN024G6C_at; Start 45; Stop 69
ggcttcgatatcaccagcttcaaca

SEQ ID NO: 232896 - DNA, 25 bp, Artificial
  probe
  misc_feature (1)..(25): SEQ ID NO: 2146; WAN024G6C_at; Start 137; Stop 161
tacggacagggtcattgaccttagc

SEQ ID NO: 232897 - DNA, 25 bp, Artificial
  probe
  misc_feature (1)..(25): SEQ ID NO: 2146; WAN024G6C_at; Start 219; Stop 243
aacacgcgcacttggatttccttcg

SEQ ID NO: 232898 - DNA, 25 bp, Artificial
  probe
  misc_feature (1)..(25): SEQ ID NO: 2146; WAN024G6C_at; Start 73; Stop 97
agtgccaactctttctcctcttcat

SEQ ID NO: 232899 - DNA, 25 bp, Artificial
  probe
  misc_feature (1)..(25): SEQ ID NO: 2146; WAN024G6C_at; Start 14; Stop 38
aacgaagattggcttccgcaagacg

SEQ ID NO: 232900 - DNA, 25 bp, Artificial
  probe
  misc_feature (1)..(25): SEQ ID NO: 2146; WAN024G6C_at; Start 24; Stop 48
ggcttccgcaagacgttgtttggct

SEQ ID NO: 232901 - DNA, 25 bp, Artificial
  probe
  misc_feature (1)..(25): SEQ ID NO: 4166; WAN024G6D_at; Start 215; Stop 239
gcttggtccgcaatagcacgagtga

SEQ ID NO: 232902 - DNA, 25 bp, Artificial
  probe
  misc_feature (1)..(25): SEQ ID NO: 4166; WAN024G6D_at; Start 102; Stop 126
cagcaatctgttctggtgtcggatc

SEQ ID NO: 232903 - DNA, 25 bp, Artificial
  probe
  misc_feature (1)..(25): SEQ ID NO: 4166; WAN024G6D_at; Start 153; Stop 177
gctgttcacgaaccaatttattgat

SEQ ID NO: 232904 - DNA, 25 bp, Artificial
  probe
  misc_feature (1)..(25): SEQ ID NO: 4166; WAN024G6D_at; Start 129; Stop 153
gccccaattcttgaaggagattccg

SEQ ID NO: 232905 - DNA, 25 bp, Artificial
  probe
  misc_feature (1)..(25): SEQ ID NO: 4166; WAN024G6D_at; Start 64; Stop 88
gatttcacgaaccttatcaggtgtc

SEQ ID NO: 232906 - DNA, 25 bp, Artificial
  probe
  misc_feature (1)..(25): SEQ ID NO: 4166; WAN024G6D_at; Start 182; Stop 206
tcaaccatgtgaactgggatacgga

SEQ ID NO: 232907 - DNA, 25 bp, Artificial
  probe
  misc_feature (1)..(25): SEQ ID NO: 4166; WAN024G6D_at; Start 133; Stop 157
caattcttgaaggagattccgctgt

SEQ ID NO: 232908 - DNA, 25 bp, Artificial
  probe
  misc_feature (1)..(25): SEQ ID NO: 4166; WAN024G6D_at; Start 159; Stop 183
cacgaaccaatttattgatagtttc

SEQ ID NO: 232909 - DNA, 25 bp, Artificial
  probe
  misc_feature (1)..(25): SEQ ID NO: 4166; WAN024G6D_at; Start 24; Stop 48
taggagtttcaagagatactggttc

SEQ ID NO: 232910 - DNA, 25 bp, Artificial
  probe
  misc_feature (1)..(25): SEQ ID NO: 4166; WAN024G6D_at; Start 221; Stop 245
tccgcaatagcacgagtgatagcct

SEQ ID NO: 232911 - DNA, 25 bp, Artificial
  probe
  misc_feature (1)..(25): SEQ ID NO: 4166; WAN024G6D_at; Start 38; Stop 62
gatactggttcttgggcaatcttca

SEQ ID NO: 232912 - DNA, 25 bp, Artificial
  probe
  misc_feature (1)..(25): SEQ ID NO: 4166; WAN024G6D_at; Start 12; Stop 36
cctcttcaccgataggagtttcaag

SEQ ID NO: 232913 - DNA, 25 bp, Artificial
  probe
  misc_feature (1)..(25): SEQ ID NO: 4166; WAN024G6D_at; Start 240; Stop 264
tagcctgacgaatccaccaagttgc

SEQ ID NO: 232914 - DNA, 25 bp, Artificial
  probe
  misc_feature (1)..(25): SEQ ID NO: 4166; WAN024G6D_at; Start 175; Stop 199
gatagtttcaaccatgtgaactggg

SEQ ID NO: 232915 - DNA, 25 bp, Artificial
  probe
  misc_feature (1)..(25): SEQ ID NO: 4166; WAN024G6D_at; Start 199; Stop 223
gatacggatggtacgagcttggtcc

SEQ ID NO: 232916 - DNA, 25 bp, Artificial
  probe
  misc_feature (1)..(25): SEQ ID NO: 4166; WAN024G6D_at; Start 1; Stop 25
gtggctatcgtcctcttcaccgata

SEQ ID NO: 232917 - DNA, 25 bp, Artificial
  probe
  misc_feature (1)..(25): SEQ ID NO: 4166; WAN024G6D_at; Start 115; Stop 139
tggtgtcggatcttgccccaattct

SEQ ID NO: 232918 - DNA, 25 bp, Artificial
  probe
  misc_feature (1)..(25): SEQ ID NO: 4166; WAN024G6D_at; Start 187; Stop 211
catgtgaactgggatacggatggta

SEQ ID NO: 232919 - DNA, 25 bp, Artificial
  probe
  misc_feature (1)..(25): SEQ ID NO: 4166; WAN024G6D_at; Start 81; Stop 105
caggtgtcatatccattcgttcagc

SEQ ID NO: 232920 - DNA, 25 bp, Artificial
  probe
  misc_feature (1)..(25): SEQ ID NO: 4166; WAN024G6D_at; Start 88; Stop 112
catatccattcgttcagcaatctgt

SEQ ID NO: 232921 - DNA, 25 bp, Artificial
  probe
  misc_feature (1)..(25): SEQ ID NO: 4166; WAN024G6D_at; Start 210; Stop 234
tacgagcttggtccgcaatagcacg

SEQ ID NO: 232922 - DNA, 25 bp, Artificial
  probe
  misc_feature (1)..(25): SEQ ID NO: 4166; WAN024G6D_at; Start 228; Stop 252
tagcacgagtgatagcctgacgaat

SEQ ID NO: 232923 - DNA, 25 bp, Artificial
  probe
  misc_feature (1)..(25): SEQ ID NO: 4166; WAN024G6D_at; Start 108; Stop 132
tctgttctggtgtcggatcttgccc

SEQ ID NO: 232924 - DNA, 25 bp, Artificial
  probe
  misc_feature (1)..(25): SEQ ID NO: 4166; WAN024G6D_at; Start 18; Stop 42
caccgataggagtttcaagagatac

SEQ ID NO: 232925 - DNA, 25 bp, Artificial
  probe
  misc_feature (1)..(25): SEQ ID NO: 4166; WAN024G6D_at; Start 144; Stop 168
ggagattccgctgttcacgaaccaa

SEQ ID NO: 232926 - DNA, 25 bp, Artificial
  probe
  misc_feature (1)..(25): SEQ ID NO: 4166; WAN024G6D_at; Start 60; Stop 84
tcaagatttcacgaaccttatcagg

SEQ ID NO: 232927 - DNA, 25 bp, Artificial
  probe
  misc_feature (1)..(25): SEQ ID NO: 4166; WAN024G6D_at; Start 123; Stop 147
gatcttgccccaattcttgaaggag

SEQ ID NO: 232928 - DNA, 25 bp, Artificial
  probe
  misc_feature (1)..(25): SEQ ID NO: 4166; WAN024G6D_at; Start 47; Stop 71
tcttgggcaatcttcaagatttcac

SEQ ID NO: 232929 - DNA, 25 bp, Artificial
  probe
  misc_feature (1)..(25): SEQ ID NO: 4166; WAN024G6D_at; Start 75; Stop 99
ccttatcaggtgtcatatccattcg

SEQ ID NO: 232930 - DNA, 25 bp, Artificial
  probe
  misc_feature (1)..(25): SEQ ID NO: 4166; WAN024G6D_at; Start 249; Stop 273
gaatccaccaagttgcataagttga

SEQ ID NO: 232931 - DNA, 25 bp, Artificial
  probe
  misc_feature (1)..(25): SEQ ID NO: 4166; WAN024G6D_at; Start 245; Stop 269
tgacgaatccaccaagttgcataag

SEQ ID NO: 232932 - DNA, 25 bp, Artificial
  probe
  misc_feature (1)..(25): SEQ ID NO: 4166; WAN024G6D_at; Start 137; Stop 161
tcttgaaggagattccgctgttcac

SEQ ID NO: 232933 - DNA, 25 bp, Artificial
  probe
  misc_feature (1)..(25): SEQ ID NO: 4166; WAN024G6D_at; Start 205; Stop 229
gatggtacgagcttggtccgcaata

SEQ ID NO: 232934 - DNA, 25 bp, Artificial
  probe
  misc_feature (1)..(25): SEQ ID NO: 4166; WAN024G6D_at; Start 193; Stop 217
aactgggatacggatggtacgagct

SEQ ID NO: 232935 - DNA, 25 bp, Artificial
  probe
  misc_feature (1)..(25): SEQ ID NO: 5297; WAN024G6E_at; Start 151; Stop 175
tgttgccattattactccattcttc

SEQ ID NO: 232936 - DNA, 25 bp, Artificial
  probe
  misc_feature (1)..(25): SEQ ID NO: 5297; WAN024G6E_at; Start 20; Stop 44
ccatcagcgtccaaggtaaaaggaa

SEQ ID NO: 232937 - DNA, 25 bp, Artificial
  probe
  misc_feature (1)..(25): SEQ ID NO: 5297; WAN024G6E_at; Start 61; Stop 85
gatttcatcatctgttgctgtccct

SEQ ID NO: 232938 - DNA, 25 bp, Artificial
  probe
  misc_feature (1)..(25): SEQ ID NO: 5297; WAN024G6E_at; Start 145; Stop 169
ttgttttgttgccattattactcca

SEQ ID NO: 232939 - DNA, 25 bp, Artificial
  probe
  misc_feature (1)..(25): SEQ ID NO: 5297; WAN024G6E_at; Start 234; Stop 258
gctagcttcctgcaccttctttttg

SEQ ID NO: 232940 - DNA, 25 bp, Artificial
  probe
  misc_feature (1)..(25): SEQ ID NO: 5297; WAN024G6E_at; Start 105; Stop 129
taaattctgctacctgtacgtcaaa

SEQ ID NO: 232941 - DNA, 25 bp, Artificial
  probe
  misc_feature (1)..(25): SEQ ID NO: 5297; WAN024G6E_at; Start 163; Stop 187
tactccattcttctcttttgggaaa

SEQ ID NO: 232942 - DNA, 25 bp, Artificial
  probe
  misc_feature (1)..(25): SEQ ID NO: 5297; WAN024G6E_at; Start 102; Stop 126
ggataaattctgctacctgtacgtc

SEQ ID NO: 232943 - DNA, 25 bp, Artificial
  probe
  misc_feature (1)..(25): SEQ ID NO: 5297; WAN024G6E_at; Start 215; Stop 239
tatctgtatctcctacatggctagc

SEQ ID NO: 232944 - DNA, 25 bp, Artificial
  probe
  misc_feature (1)..(25): SEQ ID NO: 5297; WAN024G6E_at; Start 23; Stop 47
tcagcgtccaaggtaaaaggaataa

SEQ ID NO: 232945 - DNA, 25 bp, Artificial
  probe
  misc_feature (1)..(25): SEQ ID NO: 5297; WAN024G6E_at; Start 73; Stop 97
tgttgctgtccctttttgcttatga

SEQ ID NO: 232946 - DNA, 25 bp, Artificial
  probe
  misc_feature (1)..(25): SEQ ID NO: 5297; WAN024G6E_at; Start 117; Stop 141
cctgtacgtcaaatgttgttacttc

SEQ ID NO: 232947 - DNA, 25 bp, Artificial
  probe
  misc_feature (1)..(25): SEQ ID NO: 5297; WAN024G6E_at; Start 66; Stop 90
catcatctgttgctgtccctttttg

SEQ ID NO: 232948 - DNA, 25 bp, Artificial
  probe
  misc_feature (1)..(25): SEQ ID NO: 5297; WAN024G6E_at; Start 7; Stop 31
gagatcttcaatcccatcagcgtcc

SEQ ID NO: 232949 - DNA, 25 bp, Artificial
  probe
  misc_feature (1)..(25): SEQ ID NO: 5297; WAN024G6E_at; Start 190; Stop 214
aaacgttccaattcttctagggctg

SEQ ID NO: 232950 - DNA, 25 bp, Artificial
  probe
  misc_feature (1)..(25): SEQ ID NO: 5297; WAN024G6E_at; Start 193; Stop 217
cgttccaattcttctagggctgtat

SEQ ID NO: 232951 - DNA, 25 bp, Artificial
  probe
  misc_feature (1)..(25): SEQ ID NO: 5297; WAN024G6E_at; Start 46; Stop 70
aaccagacttgcattgatttcatca

SEQ ID NO: 232952 - DNA, 25 bp, Artificial
  probe
  misc_feature (1)..(25): SEQ ID NO: 5297; WAN024G6E_at; Start 221; Stop 245
tatctcctacatggctagcttcctg

SEQ ID NO: 232953 - DNA, 25 bp, Artificial
  probe
  misc_feature (1)..(25): SEQ ID NO: 5297; WAN024G6E_at; Start 34; Stop 58
ggtaaaaggaataaccagacttgca

SEQ ID NO: 232954 - DNA, 25 bp, Artificial
  probe
  misc_feature (1)..(25): SEQ ID NO: 5297; WAN024G6E_at; Start 110; Stop 134
tctgctacctgtacgtcaaatgttg

SEQ ID NO: 232955 - DNA, 25 bp, Artificial
  probe
  misc_feature (1)..(25): SEQ ID NO: 5297; WAN024G6E_at; Start 113; Stop 137
gctacctgtacgtcaaatgttgtta

SEQ ID NO: 232956 - DNA, 25 bp, Artificial
  probe
  misc_feature (1)..(25): SEQ ID NO: 5297; WAN024G6E_at; Start 166; Stop 190
tccattcttctcttttgggaaatta

SEQ ID NO: 232957 - DNA, 25 bp, Artificial
  probe
  misc_feature (1)..(25): SEQ ID NO: 5297; WAN024G6E_at; Start 210; Stop 234
ggctgtatctgtatctcctacatgg

SEQ ID NO: 232958 - DNA, 25 bp, Artificial
  probe
  misc_feature (1)..(25): SEQ ID NO: 5297; WAN024G6E_at; Start 18; Stop 42
tcccatcagcgtccaaggtaaaagg

SEQ ID NO: 232959 - DNA, 25 bp, Artificial
  probe
  misc_feature (1)..(25): SEQ ID NO: 5297; WAN024G6E_at; Start 241; Stop 265
tcctgcaccttctttttgattctca

SEQ ID NO: 232960 - DNA, 25 bp, Artificial
  probe
  misc_feature (1)..(25): SEQ ID NO: 5297; WAN024G6E_at; Start 96; Stop 120
gattacggataaattctgctacctg

SEQ ID NO: 232961 - DNA, 25 bp, Artificial
  probe
  misc_feature (1)..(25): SEQ ID NO: 5297; WAN024G6E_at; Start 2; Stop 26
tgcaagagatcttcaatcccatcag

SEQ ID NO: 232962 - DNA, 25 bp, Artificial
  probe
  misc_feature (1)..(25): SEQ ID NO: 5297; WAN024G6E_at; Start 252; Stop 276
ctttttgattctcatattgtcctga

SEQ ID NO: 232963 - DNA, 25 bp, Artificial
  probe
  misc_feature (1)..(25): SEQ ID NO: 5297; WAN024G6E_at; Start 39; Stop 63
aaggaataaccagacttgcattgat

SEQ ID NO: 232964 - DNA, 25 bp, Artificial
  probe
  misc_feature (1)..(25): SEQ ID NO: 5297; WAN024G6E_at; Start 197; Stop 221
ccaattcttctagggctgtatctgt

SEQ ID NO: 232965 - DNA, 25 bp, Artificial
  probe
  misc_feature (1)..(25): SEQ ID NO: 5297; WAN024G6E_at; Start 228; Stop 252
tacatggctagcttcctgcaccttc

SEQ ID NO: 232966 - DNA, 25 bp, Artificial
  probe
  misc_feature (1)..(25): SEQ ID NO: 5297; WAN024G6E_at; Start 82; Stop 106
ccctttttgcttatgattacggata

SEQ ID NO: 232967 - DNA, 25 bp, Artificial
  probe
  misc_feature (1)..(25): SEQ ID NO: 5297; WAN024G6E_at; Start 203; Stop 227
cttctagggctgtatctgtatctcc

SEQ ID NO: 232968 - DNA, 25 bp, Artificial
  probe
  misc_feature (1)..(25): SEQ ID NO: 5297; WAN024G6E_at; Start 13; Stop 37
ttcaatcccatcagcgtccaaggta

SEQ ID NO: 232969 - DNA, 25 bp, Artificial
  probe
  misc_feature (1)..(25): SEQ ID NO: 45; WAN024G6F_at; Start 353; Stop 377
aagagttggcactggctgttgaagc

SEQ ID NO: 232970 - DNA, 25 bp, Artificial
  probe
  misc_feature (1)..(25): SEQ ID NO: 45; WAN024G6F_at; Start 54; Stop 78
tatccgtaatcataagcaaaaaggg

SEQ ID NO: 232971 - DNA, 25 bp, Artificial
  probe
  misc_feature (1)..(25): SEQ ID NO: 45; WAN024G6F_at; Start 887; Stop 911
tgcgtgagcaattggatgaaatctt

SEQ ID NO: 232972 - DNA, 25 bp, Artificial
  probe
  misc_feature (1)..(25): SEQ ID NO: 45; WAN024G6F_at; Start 781; Stop 805
gtatctcttgaaactcctatcggtg

SEQ ID NO: 232973 - DNA, 25 bp, Artificial
  probe
  misc_feature (1)..(25): SEQ ID NO: 45; WAN024G6F_at; Start 69; Stop 93
gcaaaaagggacagcaacagatgat

SEQ ID NO: 232974 - DNA, 25 bp, Artificial
  probe
  misc_feature (1)..(25): SEQ ID NO: 45; WAN024G6F_at; Start 911; Stop 935
tagatactcttacagaccgtgaaga

SEQ ID NO: 232975 - DNA, 25 bp, Artificial
  probe
  misc_feature (1)..(25): SEQ ID NO: 45; WAN024G6F_at; Start 25; Stop 49
acaacatttgacgtacaggtagcag

SEQ ID NO: 232976 - DNA, 25 bp, Artificial
  probe
  misc_feature (1)..(25): SEQ ID NO: 45; WAN024G6F_at; Start 229; Stop 253
gaagaagaaccagaactcagcgatg

SEQ ID NO: 232977 - DNA, 25 bp, Artificial
  probe
  misc_feature (1)..(25): SEQ ID NO: 45; WAN024G6F_at; Start 648; Stop 672
caataaattggttcgtgaacagcgg

SEQ ID NO: 232978 - DNA, 25 bp, Artificial
  probe
  misc_feature (1)..(25): SEQ ID NO: 45; WAN024G6F_at; Start 388; Stop 412
gaagccaaacaacgtcttgcggaag

SEQ ID NO: 232979 - DNA, 25 bp, Artificial
  probe
  misc_feature (1)..(25): SEQ ID NO: 45; WAN024G6F_at; Start 856; Stop 880
aatccagtggattatacgactcgta

SEQ ID NO: 232980 - DNA, 25 bp, Artificial
  probe
  misc_feature (1)..(25): SEQ ID NO: 45; WAN024G6F_at; Start 718; Stop 742
gctgaacgaatggatatgacacctg

SEQ ID NO: 232981 - DNA, 25 bp, Artificial
  probe
  misc_feature (1)..(25): SEQ ID NO: 45; WAN024G6F_at; Start 145; Stop 169
gaagatctcttgcaacggattcagg

SEQ ID NO: 232982 - DNA, 25 bp, Artificial
  probe
  misc_feature (1)..(25): SEQ ID NO: 45; WAN024G6F_at; Start 335; Stop 359
tgaccaatgaagaggagaaagagtt

SEQ ID NO: 232983 - DNA, 25 bp, Artificial
  probe
  misc_feature (1)..(25): SEQ ID NO: 45; WAN024G6F_at; Start 739; Stop 763
cctgataaggttcgtgaaatcttga

SEQ ID NO: 232984 - DNA, 25 bp, Artificial
  probe
  misc_feature (1)..(25): SEQ ID NO: 45; WAN024G6F_at; Start 269; Stop 293
caacttctgctaaggtcaatgaccc

SEQ ID NO: 232985 - DNA, 25 bp, Artificial
  probe
  misc_feature (1)..(25): SEQ ID NO: 45; WAN024G6F_at; Start 873; Stop 897
gactcgtatcgtcttgcgtgagcaa

SEQ ID NO: 232986 - DNA, 25 bp, Artificial
  probe
  misc_feature (1)..(25): SEQ ID NO: 45; WAN024G6F_at; Start 664; Stop 688
gaacagcggaatctccttcaagaat

SEQ ID NO: 232987 - DNA, 25 bp, Artificial
  probe
  misc_feature (1)..(25): SEQ ID NO: 45; WAN024G6F_at; Start 570; Stop 594
gattcgtcaggctatcactcgtgct

SEQ ID NO: 232988 - DNA, 25 bp, Artificial
  probe
  misc_feature (1)..(25): SEQ ID NO: 45; WAN024G6F_at; Start 437; Stop 461
ttgccaaacgctatgtcggtcgtgg

SEQ ID NO: 232989 - DNA, 25 bp, Artificial
  probe
  misc_feature (1)..(25): SEQ ID NO: 45; WAN024G6F_at; Start 1028; Stop 1052
tccgtcagattgaagcaaaggcttt

SEQ ID NO: 232990 - DNA, 25 bp, Artificial
  probe
  misc_feature (1)..(25): SEQ ID NO: 45; WAN024G6F_at; Start 289; Stop 313
gaccctgtccgtatgtacttgaaag

SEQ ID NO: 232991 - DNA, 25 bp, Artificial
  probe
  misc_feature (1)..(25): SEQ ID NO: 45; WAN024G6F_at; Start 551; Stop 575
caacttatgcaacttggtggattcg

SEQ ID NO: 232992 - DNA, 25 bp, Artificial
  probe
  misc_feature (1)..(25): SEQ ID NO: 45; WAN024G6F_at; Start 1013; Stop 1037
taactcgtgagcgtatccgtcagat

SEQ ID NO: 232993 - DNA, 25 bp, Artificial
  probe
  misc_feature (1)..(25): SEQ ID NO: 45; WAN024G6F_at; Start 959; Stop 983
gactagatgatggaaaaatgcgcac

SEQ ID NO: 232994 - DNA, 25 bp, Artificial
  probe
  misc_feature (1)..(25): SEQ ID NO: 45; WAN024G6F_at; Start 123; Stop 147
taccttggacgctgatgggattgaa

SEQ ID NO: 232995 - DNA, 25 bp, Artificial
  probe
  misc_feature (1)..(25): SEQ ID NO: 45; WAN024G6F_at; Start 761; Stop 785
tgaagattgcccaagaaccagtatc

SEQ ID NO: 232996 - DNA, 25 bp, Artificial
  probe
  misc_feature (1)..(25): SEQ ID NO: 45; WAN024G6F_at; Start 816; Stop 840
tagccaccttggagactttatcgaa

SEQ ID NO: 232997 - DNA, 25 bp, Artificial
  probe
  misc_feature (1)..(25): SEQ ID NO: 45; WAN024G6F_at; Start 617; Stop 641
tccgtatcccagttcacatggttga

SEQ ID NO: 232998 - DNA, 25 bp, Artificial
  probe
  misc_feature (1)..(25): SEQ ID NO: 45; WAN024G6F_at; Start 697; Stop 721
gatccgacaccagaacagattgctg

SEQ ID NO: 232999 - DNA, 25 bp, Artificial
  probe
  misc_feature (1)..(25): SEQ ID NO: 45; WAN024G6F_at; Start 798; Stop 822
tatcggtgaagaggacgatagccac

SEQ ID NO: 233000 - DNA, 25 bp, Artificial
  probe
  misc_feature (1)..(25): SEQ ID NO: 45; WAN024G6F_at; Start 937; Stop 961
aatgttctgcgtctacgttttggac

SEQ ID NO: 233001 - DNA, 25 bp, Artificial
  probe
  misc_feature (1)..(25): SEQ ID NO: 45; WAN024G6F_at; Start 195; Stop 219
cgaaggaaatccaagtgcgcgtgtt

SEQ ID NO: 233002 - DNA, 25 bp, Artificial
  probe
  misc_feature (1)..(25): SEQ ID NO: 45; WAN024G6F_at; Start 320; Stop 344
gggtcgttcctctcttgaccaatga

SEQ ID NO: 233003 - DNA, 25 bp, Artificial
  probe
  misc_feature (1)..(25): SEQ ID NO: 2291; WAN024G6G_at; Start 1233; Stop 1257
tattttagctgacagtctggcgtcc

SEQ ID NO: 233004 - DNA, 25 bp, Artificial
  probe
  misc_feature (1)..(25): SEQ ID NO: 2291; WAN024G6G_at; Start 810; Stop 834
catggatgttattgcagcctatcgg

SEQ ID NO: 233005 - DNA, 25 bp, Artificial
  probe
  misc_feature (1)..(25): SEQ ID NO: 2291; WAN024G6G_at; Start 1388; Stop 1412
gggcagaagcccatctactctatcg

SEQ ID NO: 233006 - DNA, 25 bp, Artificial
  probe
  misc_feature (1)..(25): SEQ ID NO: 2291; WAN024G6G_at; Start 1720; Stop 1744
gatacagccctagaagaattggaac

SEQ ID NO: 233007 - DNA, 25 bp, Artificial
  probe
  misc_feature (1)..(25): SEQ ID NO: 2291; WAN024G6G_at; Start 1196; Stop 1220
aagaaaagtccatcgctgctcaaaa

SEQ ID NO: 233008 - DNA, 25 bp, Artificial
  probe
  misc_feature (1)..(25): SEQ ID NO: 2291; WAN024G6G_at; Start 1296; Stop 1320
tcgtcaggtgcaaaggcagaatcgc

SEQ ID NO: 233009 - DNA, 25 bp, Artificial
  probe
  misc_feature (1)..(25): SEQ ID NO: 2291; WAN024G6G_at; Start 92; Stop 116
tacaaaaggcaggacggaactatct

SEQ ID NO: 233010 - DNA, 25 bp, Artificial
  probe
  misc_feature (1)..(25): SEQ ID NO: 2291; WAN024G6G_at; Start 1682; Stop 1706
aaaagaaggtgcaggaagctagcca

SEQ ID NO: 233011 - DNA, 25 bp, Artificial
  probe
  misc_feature (1)..(25): SEQ ID NO: 2291; WAN024G6G_at; Start 1010; Stop 1034
gcatgcctgataacttggatcctga

SEQ ID NO: 233012 - DNA, 25 bp, Artificial
  probe
  misc_feature (1)..(25): SEQ ID NO: 2291; WAN024G6G_at; Start 56; Stop 80
ccaacattgtggaagtcataggaga

SEQ ID NO: 233013 - DNA, 25 bp, Artificial
  probe
  misc_feature (1)..(25): SEQ ID NO: 2291; WAN024G6G_at; Start 655; Stop 679
tcaggtcgtatctggcaaaaaacgg

SEQ ID NO: 233014 - DNA, 25 bp, Artificial
  probe
  misc_feature (1)..(25): SEQ ID NO: 2291; WAN024G6G_at; Start 692; Stop 716
ctaagtataaaaacagccgatcgac

SEQ ID NO: 233015 - DNA, 25 bp, Artificial
  probe
  misc_feature (1)..(25): SEQ ID NO: 2291; WAN024G6G_at; Start 891; Stop 915
tgagcatctgaaaaggttaaccaag

SEQ ID NO: 233016 - DNA, 25 bp, Artificial
  probe
  misc_feature (1)..(25): SEQ ID NO: 2291; WAN024G6G_at; Start 418; Stop 442
gccagaaattacctttatcagcggg

SEQ ID NO: 233017 - DNA, 25 bp, Artificial
  probe
  misc_feature (1)..(25): SEQ ID NO: 2291; WAN024G6G_at; Start 872; Stop 896
ccttgagtcgagagcatgttgagca

SEQ ID NO: 233018 - DNA, 25 bp, Artificial
  probe
  misc_feature (1)..(25): SEQ ID NO: 2291; WAN024G6G_at; Start 1369; Stop 1393
cagttatcggctattatgagggcag

SEQ ID NO: 233019 - DNA, 25 bp, Artificial
  probe
  misc_feature (1)..(25): SEQ ID NO: 2291; WAN024G6G_at; Start 1465; Stop 1489
gcatttgctacacctgaatttcagg

SEQ ID NO: 233020 - DNA, 25 bp, Artificial
  probe
  misc_feature (1)..(25): SEQ ID NO: 2291; WAN024G6G_at; Start 1502; Stop 1526
tgcttggccagtatggaaatcttcc

SEQ ID NO: 233021 - DNA, 25 bp, Artificial
  probe
  misc_feature (1)..(25): SEQ ID NO: 2291; WAN024G6G_at; Start 118; Stop 142
gggctctgtccttttcatggtgaaa

SEQ ID NO: 233022 - DNA, 25 bp, Artificial
  probe
  misc_feature (1)..(25): SEQ ID NO: 2291; WAN024G6G_at; Start 340; Stop 364
caagctctttatgatatgcacgaag

SEQ ID NO: 233023 - DNA, 25 bp, Artificial
  probe
  misc_feature (1)..(25): SEQ ID NO: 2291; WAN024G6G_at; Start 614; Stop 638
tgtttcccctgacaaatgaccaagg

SEQ ID NO: 233024 - DNA, 25 bp, Artificial
  probe
  misc_feature (1)..(25): SEQ ID NO: 2291; WAN024G6G_at; Start 976; Stop 1000
gatgaaattggtgatatgcctgtgc

SEQ ID NO: 233025 - DNA, 25 bp, Artificial
  probe
  misc_feature (1)..(25): SEQ ID NO: 2291; WAN024G6G_at; Start 535; Stop 559
gaagaggatttactggattcaggcc

SEQ ID NO: 233026 - DNA, 25 bp, Artificial
  probe
  misc_feature (1)..(25): SEQ ID NO: 2291; WAN024G6G_at; Start 1545; Stop 1569
gcagacagaggaagttgaaagagct

SEQ ID NO: 233027 - DNA, 25 bp, Artificial
  probe
  misc_feature (1)..(25): SEQ ID NO: 2291; WAN024G6G_at; Start 1418; Stop 1442
tggaatcccctcttgttttgaacga

SEQ ID NO: 233028 - DNA, 25 bp, Artificial
  probe
  misc_feature (1)..(25): SEQ ID NO: 2291; WAN024G6G_at; Start 1607; Stop 1631
tatcgccgcaggaacttagtgaagt

SEQ ID NO: 233029 - DNA, 25 bp, Artificial
  probe
  misc_feature (1)..(25): SEQ ID NO: 2291; WAN024G6G_at; Start 1438; Stop 1462
aacgattaccgtttgcgagaagact

SEQ ID NO: 233030 - DNA, 25 bp, Artificial
  probe
  misc_feature (1)..(25): SEQ ID NO: 2291; WAN024G6G_at; Start 929; Stop 953
tttacgatggagataaggctgggca

SEQ ID NO: 233031 - DNA, 25 bp, Artificial
  probe
  misc_feature (1)..(25): SEQ ID NO: 2291; WAN024G6G_at; Start 1573; Stop 1597
taccaagttttagctcaggatttgc

SEQ ID NO: 233032 - DNA, 25 bp, Artificial
  probe
  misc_feature (1)..(25): SEQ ID NO: 2291; WAN024G6G_at; Start 1705; Stop 1729
catgtaggagatacagatacagccc

SEQ ID NO: 233033 - DNA, 25 bp, Artificial
  probe
  misc_feature (1)..(25): SEQ ID NO: 2291; WAN024G6G_at; Start 1527; Stop 1551
tccagaagttttagcagagcagaca

SEQ ID NO: 233034 - DNA, 25 bp, Artificial
  probe
  misc_feature (1)..(25): SEQ ID NO: 2291; WAN024G6G_at; Start 474; Stop 498
gattggtttagcacctccagaacga

SEQ ID NO: 233035 - DNA, 25 bp, Artificial
  probe
  misc_feature (1)..(25): SEQ ID NO: 2291; WAN024G6G_at; Start 1403; Stop 1427
tactctatcggatgatggaatcccc

SEQ ID NO: 233036 - DNA, 25 bp, Artificial
  probe
  misc_feature (1)..(25): SEQ ID NO: 2291; WAN024G6G_at; Start 639; Stop 663
aaaggtcattgccttctcaggtcgt

SEQ ID NO: 233037 - DNA, 25 bp, Artificial
  probe
  misc_feature (1)..(25): SEQ ID NO: 7485; WAN024G6H_at; Start 201; Stop 225
ccagggcagcagtatgctcgtctaa

SEQ ID NO: 233038 - DNA, 25 bp, Artificial
  probe
  misc_feature (1)..(25): SEQ ID NO: 7485; WAN024G6H_at; Start 38; Stop 62
tcttgtttcaaatcttggataaccc

SEQ ID NO: 233039 - DNA, 25 bp, Artificial
  probe
  misc_feature (1)..(25): SEQ ID NO: 7485; WAN024G6H_at; Start 133; Stop 157
ggctgtcaattgatctttcttaaca

SEQ ID NO: 233040 - DNA, 25 bp, Artificial
  probe
  misc_feature (1)..(25): SEQ ID NO: 7485; WAN024G6H_at; Start 104; Stop 128
gcatcttccatatgatgggtaatca

SEQ ID NO: 233041 - DNA, 25 bp, Artificial
  probe
  misc_feature (1)..(25): SEQ ID NO: 7485; WAN024G6H_at; Start 180; Stop 204
aagcaacactagtctttggatccag

SEQ ID NO: 233042 - DNA, 25 bp, Artificial
  probe
  misc_feature (1)..(25): SEQ ID NO: 7485; WAN024G6H_at; Start 82; Stop 106
caagcgattgccatatttgagagca

SEQ ID NO: 233043 - DNA, 25 bp, Artificial
  probe
  misc_feature (1)..(25): SEQ ID NO: 7485; WAN024G6H_at; Start 182; Stop 206
gcaacactagtctttggatccaggg

SEQ ID NO: 233044 - DNA, 25 bp, Artificial
  probe
  misc_feature (1)..(25): SEQ ID NO: 7485; WAN024G6H_at; Start 189; Stop 213
tagtctttggatccagggcagcagt

SEQ ID NO: 233045 - DNA, 25 bp, Artificial
  probe
  misc_feature (1)..(25): SEQ ID NO: 7485; WAN024G6H_at; Start 170; Stop 194
aattccatcaaagcaacactagtct

SEQ ID NO: 233046 - DNA, 25 bp, Artificial
  probe
  misc_feature (1)..(25): SEQ ID NO: 7485; WAN024G6H_at; Start 162; Stop 186
catctgtcaattccatcaaagcaac

SEQ ID NO: 233047 - DNA, 25 bp, Artificial
  probe
  misc_feature (1)..(25): SEQ ID NO: 7485; WAN024G6H_at; Start 98; Stop 122
ttgagagcatcttccatatgatggg

SEQ ID NO: 233048 - DNA, 25 bp, Artificial
  probe
  misc_feature (1)..(25): SEQ ID NO: 7485; WAN024G6H_at; Start 184; Stop 208
aacactagtctttggatccagggca

SEQ ID NO: 233049 - DNA, 25 bp, Artificial
  probe
  misc_feature (1)..(25): SEQ ID NO: 7485; WAN024G6H_at; Start 57; Stop 81
taacccgtccttctttcatgacaat

SEQ ID NO: 233050 - DNA, 25 bp, Artificial
  probe
  misc_feature (1)..(25): SEQ ID NO: 7485; WAN024G6H_at; Start 196; Stop 220
tggatccagggcagcagtatgctcg

SEQ ID NO: 233051 - DNA, 25 bp, Artificial
  probe
  misc_feature (1)..(25): SEQ ID NO: 7485; WAN024G6H_at; Start 158; Stop 182
aattcatctgtcaattccatcaaag

SEQ ID NO: 233052 - DNA, 25 bp, Artificial
  probe
  misc_feature (1)..(25): SEQ ID NO: 7485; WAN024G6H_at; Start 192; Stop 216
tctttggatccagggcagcagtatg

SEQ ID NO: 233053 - DNA, 25 bp, Artificial
  probe
  misc_feature (1)..(25): SEQ ID NO: 7485; WAN024G6H_at; Start 120; Stop 144
gggtaatcataagggctgtcaattg

SEQ ID NO: 233054 - DNA, 25 bp, Artificial
  probe
  misc_feature (1)..(25): SEQ ID NO: 7485; WAN024G6H_at; Start 46; Stop 70
caaatcttggataacccgtccttct

SEQ ID NO: 233055 - DNA, 25 bp, Artificial
  probe
  misc_feature (1)..(25): SEQ ID NO: 7485; WAN024G6H_at; Start 69; Stop 93
ctttcatgacaatcaagcgattgcc

SEQ ID NO: 233056 - DNA, 25 bp, Artificial
  probe
  misc_feature (1)..(25): SEQ ID NO: 7485; WAN024G6H_at; Start 139; Stop 163
caattgatctttcttaacaaattca

SEQ ID NO: 233057 - DNA, 25 bp, Artificial
  probe
  misc_feature (1)..(25): SEQ ID NO: 7485; WAN024G6H_at; Start 73; Stop 97
catgacaatcaagcgattgccatat

SEQ ID NO: 233058 - DNA, 25 bp, Artificial
  probe
  misc_feature (1)..(25): SEQ ID NO: 7485; WAN024G6H_at; Start 198; Stop 222
gatccagggcagcagtatgctcgtc

SEQ ID NO: 233059 - DNA, 25 bp, Artificial
  probe
  misc_feature (1)..(25): SEQ ID NO: 7485; WAN024G6H_at; Start 186; Stop 210
cactagtctttggatccagggcagc

SEQ ID NO: 233060 - DNA, 25 bp, Artificial
  probe
  misc_feature (1)..(25): SEQ ID NO: 7485; WAN024G6H_at; Start 117; Stop 141
gatgggtaatcataagggctgtcaa

SEQ ID NO: 233061 - DNA, 25 bp, Artificial
  probe
  misc_feature (1)..(25): SEQ ID NO: 7485; WAN024G6H_at; Start 100; Stop 124
gagagcatcttccatatgatgggta

SEQ ID NO: 233062 - DNA, 25 bp, Artificial
  probe
  misc_feature (1)..(25): SEQ ID NO: 7485; WAN024G6H_at; Start 41; Stop 65
tgtttcaaatcttggataacccgtc

SEQ ID NO: 233063 - DNA, 25 bp, Artificial
  probe
  misc_feature (1)..(25): SEQ ID NO: 7485; WAN024G6H_at; Start 63; Stop 87
gtccttctttcatgacaatcaagcg

SEQ ID NO: 233064 - DNA, 25 bp, Artificial
  probe
  misc_feature (1)..(25): SEQ ID NO: 7485; WAN024G6H_at; Start 167; Stop 191
gtcaattccatcaaagcaacactag

SEQ ID NO: 233065 - DNA, 25 bp, Artificial
  probe
  misc_feature (1)..(25): SEQ ID NO: 7485; WAN024G6H_at; Start 91; Stop 115
gccatatttgagagcatcttccata

SEQ ID NO: 233066 - DNA, 25 bp, Artificial
  probe
  misc_feature (1)..(25): SEQ ID NO: 7485; WAN024G6H_at; Start 85; Stop 109
gcgattgccatatttgagagcatct

SEQ ID NO: 233067 - DNA, 25 bp, Artificial
  probe
  misc_feature (1)..(25): SEQ ID NO: 7485; WAN024G6H_at; Start 54; Stop 78
ggataacccgtccttctttcatgac

SEQ ID NO: 233068 - DNA, 25 bp, Artificial
  probe
  misc_feature (1)..(25): SEQ ID NO: 7485; WAN024G6H_at; Start 111; Stop 135
ccatatgatgggtaatcataagggc

SEQ ID NO: 233069 - DNA, 25 bp, Artificial
  probe
  misc_feature (1)..(25): SEQ ID NO: 7485; WAN024G6H_at; Start 12; Stop 36
cagagattttcatttttgctttttc

SEQ ID NO: 233070 - DNA, 25 bp, Artificial
  probe
  misc_feature (1)..(25): SEQ ID NO: 7485; WAN024G6H_at; Start 127; Stop 151
cataagggctgtcaattgatctttc

SEQ ID NO: 233071 - DNA, 25 bp, Artificial
  probe
  misc_feature (1)..(25): SEQ ID NO: 4330; WAN024G6I_at; Start 222; Stop 246
aatctccaaggcctgccagagttcc

SEQ ID NO: 233072 - DNA, 25 bp, Artificial
  probe
  misc_feature (1)..(25): SEQ ID NO: 4330; WAN024G6I_at; Start 205; Stop 229
aaatccttagcttgcgcaatctcca

SEQ ID NO: 233073 - DNA, 25 bp, Artificial
  probe
  misc_feature (1)..(25): SEQ ID NO: 4330; WAN024G6I_at; Start 96; Stop 120
ctggcgcaagactgctcgggcgata

SEQ ID NO: 233074 - DNA, 25 bp, Artificial
  probe
  misc_feature (1)..(25): SEQ ID NO: 4330; WAN024G6I_at; Start 53; Stop 77
tatccagtgccgaggttgcatcatc

SEQ ID NO: 233075 - DNA, 25 bp, Artificial
  probe
  misc_feature (1)..(25): SEQ ID NO: 4330; WAN024G6I_at; Start 162; Stop 186
tgcctcaactagagcatccaagagt

SEQ ID NO: 233076 - DNA, 25 bp, Artificial
  probe
  misc_feature (1)..(25): SEQ ID NO: 4330; WAN024G6I_at; Start 25; Stop 49
gctttcaagagcttggactctgtaa

SEQ ID NO: 233077 - DNA, 25 bp, Artificial
  probe
  misc_feature (1)..(25): SEQ ID NO: 4330; WAN024G6I_at; Start 171; Stop 195
tagagcatccaagagtccttccttt

SEQ ID NO: 233078 - DNA, 25 bp, Artificial
  probe
  misc_feature (1)..(25): SEQ ID NO: 4330; WAN024G6I_at; Start 228; Stop 252
caaggcctgccagagttcctggtca

SEQ ID NO: 233079 - DNA, 25 bp, Artificial
  probe
  misc_feature (1)..(25): SEQ ID NO: 4330; WAN024G6I_at; Start 99; Stop 123
gcgcaagactgctcgggcgatagac

SEQ ID NO: 233080 - DNA, 25 bp, Artificial
  probe
  misc_feature (1)..(25): SEQ ID NO: 4330; WAN024G6I_at; Start 61; Stop 85
gccgaggttgcatcatctaggatga

SEQ ID NO: 233081 - DNA, 25 bp, Artificial
  probe
  misc_feature (1)..(25): SEQ ID NO: 4330; WAN024G6I_at; Start 134; Stop 158
tttgtccacctgagaaatttcgccc

SEQ ID NO: 233082 - DNA, 25 bp, Artificial
  probe
  misc_feature (1)..(25): SEQ ID NO: 4330; WAN024G6I_at; Start 20; Stop 44
taatagctttcaagagcttggactc

SEQ ID NO: 233083 - DNA, 25 bp, Artificial
  probe
  misc_feature (1)..(25): SEQ ID NO: 4330; WAN024G6I_at; Start 85; Stop 109
agaaacggagcctggcgcaagactg

SEQ ID NO: 233084 - DNA, 25 bp, Artificial
  probe
  misc_feature (1)..(25): SEQ ID NO: 4330; WAN024G6I_at; Start 82; Stop 106
atgagaaacggagcctggcgcaaga

SEQ ID NO: 233085 - DNA, 25 bp, Artificial
  probe
  misc_feature (1)..(25): SEQ ID NO: 4330; WAN024G6I_at; Start 123; Stop 147
caatctttgtttttgtccacctgag

SEQ ID NO: 233086 - DNA, 25 bp, Artificial
  probe
  misc_feature (1)..(25): SEQ ID NO: 4330; WAN024G6I_at; Start 76; Stop 100
tctaggatgagaaacggagcctggc

SEQ ID NO: 233087 - DNA, 25 bp, Artificial
  probe
  misc_feature (1)..(25): SEQ ID NO: 4330; WAN024G6I_at; Start 166; Stop 190
tcaactagagcatccaagagtcctt

SEQ ID NO: 233088 - DNA, 25 bp, Artificial
  probe
  misc_feature (1)..(25): SEQ ID NO: 4330; WAN024G6I_at; Start 47; Stop 71
taatggtatccagtgccgaggttgc

SEQ ID NO: 233089 - DNA, 25 bp, Artificial
  probe
  misc_feature (1)..(25): SEQ ID NO: 4330; WAN024G6I_at; Start 33; Stop 57
gagcttggactctgtaatggtatcc

SEQ ID NO: 233090 - DNA, 25 bp, Artificial
  probe
  misc_feature (1)..(25): SEQ ID NO: 4330; WAN024G6I_at; Start 201; Stop 225
gacaaaatccttagcttgcgcaatc

SEQ ID NO: 233091 - DNA, 25 bp, Artificial
  probe
  misc_feature (1)..(25): SEQ ID NO: 4330; WAN024G6I_at; Start 43; Stop 67
tctgtaatggtatccagtgccgagg

SEQ ID NO: 233092 - DNA, 25 bp, Artificial
  probe
  misc_feature (1)..(25): SEQ ID NO: 4330; WAN024G6I_at; Start 109; Stop 133
gctcgggcgatagacaatctttgtt

SEQ ID NO: 233093 - DNA, 25 bp, Artificial
  probe
  misc_feature (1)..(25): SEQ ID NO: 4330; WAN024G6I_at; Start 40; Stop 64
gactctgtaatggtatccagtgccg

SEQ ID NO: 233094 - DNA, 25 bp, Artificial
  probe
  misc_feature (1)..(25): SEQ ID NO: 4330; WAN024G6I_at; Start 240; Stop 264
gagttcctggtcagatacttcttga

SEQ ID NO: 233095 - DNA, 25 bp, Artificial
  probe
  misc_feature (1)..(25): SEQ ID NO: 4330; WAN024G6I_at; Start 57; Stop 81
cagtgccgaggttgcatcatctagg

SEQ ID NO: 233096 - DNA, 25 bp, Artificial
  probe
  misc_feature (1)..(25): SEQ ID NO: 4330; WAN024G6I_at; Start 212; Stop 236
tagcttgcgcaatctccaaggcctg

SEQ ID NO: 233097 - DNA, 25 bp, Artificial
  probe
  misc_feature (1)..(25): SEQ ID NO: 4330; WAN024G6I_at; Start 105; Stop 129
gactgctcgggcgatagacaatctt

SEQ ID NO: 233098 - DNA, 25 bp, Artificial
  probe
  misc_feature (1)..(25): SEQ ID NO: 4330; WAN024G6I_at; Start 7; Stop 31
ggaaaattttctctaatagctttca

SEQ ID NO: 233099 - DNA, 25 bp, Artificial
  probe
  misc_feature (1)..(25): SEQ ID NO: 4330; WAN024G6I_at; Start 183; Stop 207
gagtccttccttttcactgacaaaa

SEQ ID NO: 233100 - DNA, 25 bp, Artificial
  probe
  misc_feature (1)..(25): SEQ ID NO: 4330; WAN024G6I_at; Start 73; Stop 97
tcatctaggatgagaaacggagcct

SEQ ID NO: 233101 - DNA, 25 bp, Artificial
  probe
  misc_feature (1)..(25): SEQ ID NO: 4330; WAN024G6I_at; Start 232; Stop 256
gcctgccagagttcctggtcagata

SEQ ID NO: 233102 - DNA, 25 bp, Artificial
  probe
  misc_feature (1)..(25): SEQ ID NO: 4330; WAN024G6I_at; Start 216; Stop 240
ttgcgcaatctccaaggcctgccag

SEQ ID NO: 233103 - DNA, 25 bp, Artificial
  probe
  misc_feature (1)..(25): SEQ ID NO: 4330; WAN024G6I_at; Start 180; Stop 204
caagagtccttccttttcactgaca

SEQ ID NO: 233104 - DNA, 25 bp, Artificial
  probe
  misc_feature (1)..(25): SEQ ID NO: 4330; WAN024G6I_at; Start 196; Stop 220
tcactgacaaaatccttagcttgcg

SEQ ID NO: 233105 - DNA, 25 bp, Artificial
  probe
  misc_feature (1)..(25): SEQ ID NO: 5508; WAN024G6J_at; Start 309; Stop 333
taattctacaattgctgtcatttgc

SEQ ID NO: 233106 - DNA, 25 bp, Artificial
  probe
  misc_feature (1)..(25): SEQ ID NO: 5508; WAN024G6J_at; Start 63; Stop 87
gaagactcgagacagatacttagcg

SEQ ID NO: 233107 - DNA, 25 bp, Artificial
  probe
  misc_feature (1)..(25): SEQ ID NO: 5508; WAN024G6J_at; Start 58; Stop 82
tcttggaagactcgagacagatact

SEQ ID NO: 233108 - DNA, 25 bp, Artificial
  probe
  misc_feature (1)..(25): SEQ ID NO: 5508; WAN024G6J_at; Start 9; Stop 33
caggagattctctgccactgtcata

SEQ ID NO: 233109 - DNA, 25 bp, Artificial
  probe
  misc_feature (1)..(25): SEQ ID NO: 5508; WAN024G6J_at; Start 14; Stop 38
gattctctgccactgtcatacgagg

SEQ ID NO: 233110 - DNA, 25 bp, Artificial
  probe
  misc_feature (1)..(25): SEQ ID NO: 5508; WAN024G6J_at; Start 1; Stop 25
ttggcaatcaggagattctctgcca

SEQ ID NO: 233111 - DNA, 25 bp, Artificial
  probe
  misc_feature (1)..(25): SEQ ID NO: 5508; WAN024G6J_at; Start 279; Stop 303
gccatttttaacgattttggttgca

SEQ ID NO: 233112 - DNA, 25 bp, Artificial
  probe
  misc_feature (1)..(25): SEQ ID NO: 5508; WAN024G6J_at; Start 54; Stop 78
tggatcttggaagactcgagacaga

SEQ ID NO: 233113 - DNA, 25 bp, Artificial
  probe
  misc_feature (1)..(25): SEQ ID NO: 5508; WAN024G6J_at; Start 22; Stop 46
gccactgtcatacgaggagctgtcc

SEQ ID NO: 233114 - DNA, 25 bp, Artificial
  probe
  misc_feature (1)..(25): SEQ ID NO: 5508; WAN024G6J_at; Start 335; Stop 359
taacttggctcctttcaagattgtt

SEQ ID NO: 233115 - DNA, 25 bp, Artificial
  probe
  misc_feature (1)..(25): SEQ ID NO: 5508; WAN024G6J_at; Start 47; Stop 71
ccatctttggatcttggaagactcg

SEQ ID NO: 233116 - DNA, 25 bp, Artificial
  probe
  misc_feature (1)..(25): SEQ ID NO: 5508; WAN024G6J_at; Start 19; Stop 43
tctgccactgtcatacgaggagctg

SEQ ID NO: 233117 - DNA, 25 bp, Artificial
  probe
  misc_feature (1)..(25): SEQ ID NO: 5508; WAN024G6J_at; Start 294; Stop 318
tttggttgcattttttaattctaca

SEQ ID NO: 233118 - DNA, 25 bp, Artificial
  probe
  misc_feature (1)..(25): SEQ ID NO: 5508; WAN024G6J_at; Start 51; Stop 75
ctttggatcttggaagactcgagac

SEQ ID NO: 233119 - DNA, 25 bp, Artificial
  probe
  misc_feature (1)..(25): SEQ ID NO: 5508; WAN024G6J_at; Start 42; Stop 66
tgtccccatctttggatcttggaag

SEQ ID NO: 233120 - DNA, 25 bp, Artificial
  probe
  misc_feature (1)..(25): SEQ ID NO: 5508; WAN024G6J_at; Start 25; Stop 49
actgtcatacgaggagctgtcccca

SEQ ID NO: 233121 - DNA, 25 bp, Artificial
  probe
  misc_feature (1)..(25): SEQ ID NO: 5508; WAN024G6J_at; Start 86; Stop 110
cgcgcttctctggtgaaaacttggt

SEQ ID NO: 233122 - DNA, 25 bp, Artificial
  probe
  misc_feature (1)..(25): SEQ ID NO: 5508; WAN024G6J_at; Start 271; Stop 295
tcatcaaagccatttttaacgattt

SEQ ID NO: 233123 - DNA, 25 bp, Artificial
  probe
  misc_feature (1)..(25): SEQ ID NO: 5508; WAN024G6J_at; Start 327; Stop 351
catttgcttaacttggctcctttca

SEQ ID NO: 233124 - DNA, 25 bp, Artificial
  probe
  misc_feature (1)..(25): SEQ ID NO: 5508; WAN024G6J_at; Start 257; Stop 281
aaataatcttttcttcatcaaagcc

SEQ ID NO: 233125 - DNA, 25 bp, Artificial
  probe
  misc_feature (1)..(25): SEQ ID NO: 5508; WAN024G6J_at; Start 27; Stop 51
tgtcatacgaggagctgtccccatc

SEQ ID NO: 233126 - DNA, 25 bp, Artificial
  probe
  misc_feature (1)..(25): SEQ ID NO: 5508; WAN024G6J_at; Start 79; Stop 103
tacttagcgcgcttctctggtgaaa

SEQ ID NO: 233127 - DNA, 25 bp, Artificial
  probe
  misc_feature (1)..(25): SEQ ID NO: 5508; WAN024G6J_at; Start 66; Stop 90
gactcgagacagatacttagcgcgc

SEQ ID NO: 233128 - DNA, 25 bp, Artificial
  probe
  misc_feature (1)..(25): SEQ ID NO: 5508; WAN024G6J_at; Start 240; Stop 264
taaggaaacatcatttaaaataatc

SEQ ID NO: 233129 - DNA, 25 bp, Artificial
  probe
  misc_feature (1)..(25): SEQ ID NO: 5508; WAN024G6J_at; Start 12; Stop 36
gagattctctgccactgtcatacga

SEQ ID NO: 233130 - DNA, 25 bp, Artificial
  probe
  misc_feature (1)..(25): SEQ ID NO: 5508; WAN024G6J_at; Start 38; Stop 62
gagctgtccccatctttggatcttg

SEQ ID NO: 233131 - DNA, 25 bp, Artificial
  probe
  misc_feature (1)..(25): SEQ ID NO: 5508; WAN024G6J_at; Start 4; Stop 28
gcaatcaggagattctctgccactg

SEQ ID NO: 233132 - DNA, 25 bp, Artificial
  probe
  misc_feature (1)..(25): SEQ ID NO: 5508; WAN024G6J_at; Start 322; Stop 346
gctgtcatttgcttaacttggctcc

SEQ ID NO: 233133 - DNA, 25 bp, Artificial
  probe
  misc_feature (1)..(25): SEQ ID NO: 5508; WAN024G6J_at; Start 82; Stop 106
ttagcgcgcttctctggtgaaaact

SEQ ID NO: 233134 - DNA, 25 bp, Artificial
  probe
  misc_feature (1)..(25): SEQ ID NO: 5508; WAN024G6J_at; Start 32; Stop 56
tacgaggagctgtccccatctttgg

SEQ ID NO: 233135 - DNA, 25 bp, Artificial
  probe
  misc_feature (1)..(25): SEQ ID NO: 5508; WAN024G6J_at; Start 342; Stop 366
gctcctttcaagattgtttgcttaa

SEQ ID NO: 233136 - DNA, 25 bp, Artificial
  probe
  misc_feature (1)..(25): SEQ ID NO: 5508; WAN024G6J_at; Start 73; Stop 97
gacagatacttagcgcgcttctctg

SEQ ID NO: 233137 - DNA, 25 bp, Artificial
  probe
  misc_feature (1)..(25): SEQ ID NO: 5508; WAN024G6J_at; Start 118; Stop 142
tcacctaaaatacggatagttccac

SEQ ID NO: 233138 - DNA, 25 bp, Artificial
  probe
  misc_feature (1)..(25): SEQ ID NO: 5508; WAN024G6J_at; Start 69; Stop 93
tcgagacagatacttagcgcgcttc

SEQ ID NO: 233139 - DNA, 25 bp, Artificial
  probe
  misc_feature (1)..(25): SEQ ID NO: 1372; WAN024G6K_at; Start 655; Stop 679
ggcaatcgcttgattgtcatgaaag

SEQ ID NO: 233140 - DNA, 25 bp, Artificial
  probe
  misc_feature (1)..(25): SEQ ID NO: 1372; WAN024G6K_at; Start 421; Stop 445
cttgagaaacacttgaatacaccga

SEQ ID NO: 233141 - DNA, 25 bp, Artificial
  probe
  misc_feature (1)..(25): SEQ ID NO: 1372; WAN024G6K_at; Start 495; Stop 519
aaccttgaagcgacctgaattactc

SEQ ID NO: 233142 - DNA, 25 bp, Artificial
  probe
  misc_feature (1)..(25): SEQ ID NO: 1372; WAN024G6K_at; Start 426; Stop 450
gaaacacttgaatacaccgattgag

SEQ ID NO: 233143 - DNA, 25 bp, Artificial
  probe
  misc_feature (1)..(25): SEQ ID NO: 1372; WAN024G6K_at; Start 69; Stop 93
tattttaaatgatgtttccttagaa

SEQ ID NO: 233144 - DNA, 25 bp, Artificial
  probe
  misc_feature (1)..(25): SEQ ID NO: 1372; WAN024G6K_at; Start 430; Stop 454
cacttgaatacaccgattgagttct

SEQ ID NO: 233145 - DNA, 25 bp, Artificial
  probe
  misc_feature (1)..(25): SEQ ID NO: 1372; WAN024G6K_at; Start 529; Stop 553
gagcatactgctgccctggatccaa

SEQ ID NO: 233146 - DNA, 25 bp, Artificial
  probe
  misc_feature (1)..(25): SEQ ID NO: 1372; WAN024G6K_at; Start 188; Stop 212
gtggaactatccgtattttaggtga

SEQ ID NO: 233147 - DNA, 25 bp, Artificial
  probe
  misc_feature (1)..(25): SEQ ID NO: 1372; WAN024G6K_at; Start 27; Stop 51
tgcaaccaaaatcgttaaaaatggc

SEQ ID NO: 233148 - DNA, 25 bp, Artificial
  probe
  misc_feature (1)..(25): SEQ ID NO: 1372; WAN024G6K_at; Start 534; Stop 558
tactgctgccctggatccaaagact

SEQ ID NO: 233149 - DNA, 25 bp, Artificial
  probe
  misc_feature (1)..(25): SEQ ID NO: 1372; WAN024G6K_at; Start 39; Stop 63
cgttaaaaatggctttgatgaagaa

SEQ ID NO: 233150 - DNA, 25 bp, Artificial
  probe
  misc_feature (1)..(25): SEQ ID NO: 1372; WAN024G6K_at; Start 492; Stop 516
ggcaaccttgaagcgacctgaatta

SEQ ID NO: 233151 - DNA, 25 bp, Artificial
  probe
  misc_feature (1)..(25): SEQ ID NO: 1372; WAN024G6K_at; Start 538; Stop 562
gctgccctggatccaaagactagtg

SEQ ID NO: 233152 - DNA, 25 bp, Artificial
  probe
  misc_feature (1)..(25): SEQ ID NO: 1372; WAN024G6K_at; Start 712; Stop 736
gaaaaagcaaaaatgaaaatctctg

SEQ ID NO: 233153 - DNA, 25 bp, Artificial
  probe
  misc_feature (1)..(25): SEQ ID NO: 1372; WAN024G6K_at; Start 266; Stop 290
tccaagatccaaagatggggacagc

SEQ ID NO: 233154 - DNA, 25 bp, Artificial
  probe
  misc_feature (1)..(25): SEQ ID NO: 1372; WAN024G6K_at; Start 628; Stop 652
catcatatggaagatgctctcaaat

SEQ ID NO: 233155 - DNA, 25 bp, Artificial
  probe
  misc_feature (1)..(25): SEQ ID NO: 1372; WAN024G6K_at; Start 736; Stop 760
gattattatcaactctttgaataac

SEQ ID NO: 233156 - DNA, 25 bp, Artificial
  probe
  misc_feature (1)..(25): SEQ ID NO: 1372; WAN024G6K_at; Start 550; Stop 574
ccaaagactagtgttgctttgatgg

SEQ ID NO: 233157 - DNA, 25 bp, Artificial
  probe
  misc_feature (1)..(25): SEQ ID NO: 1372; WAN024G6K_at; Start 49; Stop 73
ggctttgatgaagaaaagattattt

SEQ ID NO: 233158 - DNA, 25 bp, Artificial
  probe
  misc_feature (1)..(25): SEQ ID NO: 1372; WAN024G6K_at; Start 434; Stop 458
tgaatacaccgattgagttcttatc

SEQ ID NO: 233159 - DNA, 25 bp, Artificial
  probe
  misc_feature (1)..(25): SEQ ID NO: 1372; WAN024G6K_at; Start 485; Stop 509
tcttgatggcaaccttgaagcgacc

SEQ ID NO: 233160 - DNA, 25 bp, Artificial
  probe
  misc_feature (1)..(25): SEQ ID NO: 1372; WAN024G6K_at; Start 489; Stop 513
gatggcaaccttgaagcgacctgaa

SEQ ID NO: 233161 - DNA, 25 bp, Artificial
  probe
  misc_feature (1)..(25): SEQ ID NO: 1372; WAN024G6K_at; Start 543; Stop 567
cctggatccaaagactagtgttgct

SEQ ID NO: 233162 - DNA, 25 bp, Artificial
  probe
  misc_feature (1)..(25): SEQ ID NO: 1372; WAN024G6K_at; Start 467; Stop 491
aaagacaggctttgagtctcttgat

SEQ ID NO: 233163 - DNA, 25 bp, Artificial
  probe
  misc_feature (1)..(25): SEQ ID NO: 1372; WAN024G6K_at; Start 581; Stop 605
cagatgaatttgttaagaaagatca

SEQ ID NO: 233164 - DNA, 25 bp, Artificial
  probe
  misc_feature (1)..(25): SEQ ID NO: 1372; WAN024G6K_at; Start 532; Stop 556
catactgctgccctggatccaaaga

SEQ ID NO: 233165 - DNA, 25 bp, Artificial
  probe
  misc_feature (1)..(25): SEQ ID NO: 1372; WAN024G6K_at; Start 475; Stop 499
gctttgagtctcttgatggcaacct

SEQ ID NO: 233166 - DNA, 25 bp, Artificial
  probe
  misc_feature (1)..(25): SEQ ID NO: 1372; WAN024G6K_at; Start 418; Stop 442
ggtcttgagaaacacttgaatacac

SEQ ID NO: 233167 - DNA, 25 bp, Artificial
  probe
  misc_feature (1)..(25): SEQ ID NO: 1372; WAN024G6K_at; Start 472; Stop 496
caggctttgagtctcttgatggcaa

SEQ ID NO: 233168 - DNA, 25 bp, Artificial
  probe
  misc_feature (1)..(25): SEQ ID NO: 1372; WAN024G6K_at; Start 480; Stop 504
gagtctcttgatggcaaccttgaag

SEQ ID NO: 233169 - DNA, 25 bp, Artificial
  probe
  misc_feature (1)..(25): SEQ ID NO: 1372; WAN024G6K_at; Start 662; Stop 686
gcttgattgtcatgaaagaaggacg

SEQ ID NO: 233170 - DNA, 25 bp, Artificial
  probe
  misc_feature (1)..(25): SEQ ID NO: 1372; WAN024G6K_at; Start 325; Stop 349
gccaagtttcgtggtgaaaagcgtg

SEQ ID NO: 233171 - DNA, 25 bp, Artificial
  probe
  misc_feature (1)..(25): SEQ ID NO: 1372; WAN024G6K_at; Start 726; Stop 750
gaaaatctctgattattatcaactc

SEQ ID NO: 233172 - DNA, 25 bp, Artificial
  probe
  misc_feature (1)..(25): SEQ ID NO: 1372; WAN024G6K_at; Start 327; Stop 351
caagtttcgtggtgaaaagcgtgga

SEQ ID NO: 233173 - DNA, 25 bp, Artificial
  probe
  misc_feature (1)..(25): SEQ ID NO: 1854; WAN024G6L_at; Start 15; Stop 39
tatttctcaaggatttgtctgggct

SEQ ID NO: 233174 - DNA, 25 bp, Artificial
  probe
  misc_feature (1)..(25): SEQ ID NO: 1854; WAN024G6L_at; Start 480; Stop 504
tcctgatatggctagaagtttcggg

SEQ ID NO: 233175 - DNA, 25 bp, Artificial
  probe
  misc_feature (1)..(25): SEQ ID NO: 1854; WAN024G6L_at; Start 89; Stop 113
atatgacgacagaaggttccttccc

SEQ ID NO: 233176 - DNA, 25 bp, Artificial
  probe
  misc_feature (1)..(25): SEQ ID NO: 1854; WAN024G6L_at; Start 519; Stop 543
catggagctcatgggcttggtctta

SEQ ID NO: 233177 - DNA, 25 bp, Artificial
  probe
  misc_feature (1)..(25): SEQ ID NO: 1854; WAN024G6L_at; Start 210; Stop 234
ggcagcaggccttctttatacaaaa

SEQ ID NO: 233178 - DNA, 25 bp, Artificial
  probe
  misc_feature (1)..(25): SEQ ID NO: 1854; WAN024G6L_at; Start 595; Stop 619
tatgccgatgtgtctcgagggatcg

SEQ ID NO: 233179 - DNA, 25 bp, Artificial
  probe
  misc_feature (1)..(25): SEQ ID NO: 1854; WAN024G6L_at; Start 230; Stop 254
caaaagggaagatcccaaccttgct

SEQ ID NO: 233180 - DNA, 25 bp, Artificial
  probe
  misc_feature (1)..(25): SEQ ID NO: 1854; WAN024G6L_at; Start 383; Stop 407
tcttgacaggtctcatctttgtgag

SEQ ID NO: 233181 - DNA, 25 bp, Artificial
  probe
  misc_feature (1)..(25): SEQ ID NO: 1854; WAN024G6L_at; Start 493; Stop 517
agaagtttcgggattcatactggac

SEQ ID NO: 233182 - DNA, 25 bp, Artificial
  probe
  misc_feature (1)..(25): SEQ ID NO: 1854; WAN024G6L_at; Start 132; Stop 156
tgtcactttgataaccaaaggcgtg

SEQ ID NO: 233183 - DNA, 25 bp, Artificial
  probe
  misc_feature (1)..(25): SEQ ID NO: 1854; WAN024G6L_at; Start 436; Stop 460
ttggacactaaactcggacaagcct

SEQ ID NO: 233184 - DNA, 25 bp, Artificial
  probe
  misc_feature (1)..(25): SEQ ID NO: 1854; WAN024G6L_at; Start 272; Stop 296
tgacttcttgtcactcaatcatgct

SEQ ID NO: 233185 - DNA, 25 bp, Artificial
  probe
  misc_feature (1)..(25): SEQ ID NO: 1854; WAN024G6L_at; Start 668; Stop 692
tcaagagtttgagcttggcagagcg

SEQ ID NO: 233186 - DNA, 25 bp, Artificial
  probe
  misc_feature (1)..(25): SEQ ID NO: 1854; WAN024G6L_at; Start 316; Stop 340
aatttaggcctgcttggaaccaagc

SEQ ID NO: 233187 - DNA, 25 bp, Artificial
  probe
  misc_feature (1)..(25): SEQ ID NO: 1854; WAN024G6L_at; Start 683; Stop 707
tggcagagcgtttggttactatcgt

SEQ ID NO: 233188 - DNA, 25 bp, Artificial
  probe
  misc_feature (1)..(25): SEQ ID NO: 1854; WAN024G6L_at; Start 368; Stop 392
cggatttgaatcaactcttgacagg

SEQ ID NO: 233189 - DNA, 25 bp, Artificial
  probe
  misc_feature (1)..(25): SEQ ID NO: 1854; WAN024G6L_at; Start 42; Stop 66
tctaggtctgggaatctttatgaca

SEQ ID NO: 233190 - DNA, 25 bp, Artificial
  probe
  misc_feature (1)..(25): SEQ ID NO: 1854; WAN024G6L_at; Start 418; Stop 442
gctctcatgctctttttcttggaca

SEQ ID NO: 233191 - DNA, 25 bp, Artificial
  probe
  misc_feature (1)..(25): SEQ ID NO: 1854; WAN024G6L_at; Start 167; Stop 191
tagcgacacttgttgctgtaggagc

SEQ ID NO: 233192 - DNA, 25 bp, Artificial
  probe
  misc_feature (1)..(25): SEQ ID NO: 1854; WAN024G6L_at; Start 532; Stop 556
ggcttggtcttatcaaatggtgtga

SEQ ID NO: 233193 - DNA, 25 bp, Artificial
  probe
  misc_feature (1)..(25): SEQ ID NO: 1854; WAN024G6L_at; Start 545; Stop 569
caaatggtgtgattgcccttgcagg

SEQ ID NO: 233194 - DNA, 25 bp, Artificial
  probe
  misc_feature (1)..(25): SEQ ID NO: 1854; WAN024G6L_at; Start 257; Stop 281
cagggattttggtgatgacttcttg

SEQ ID NO: 233195 - DNA, 25 bp, Artificial
  probe
  misc_feature (1)..(25): SEQ ID NO: 1854; WAN024G6L_at; Start 290; Stop 314
tcatgctcttgattatgggacgtgc

SEQ ID NO: 233196 - DNA, 25 bp, Artificial
  probe
  misc_feature (1)..(25): SEQ ID NO: 1854; WAN024G6L_at; Start 331; Stop 355
ggaaccaagcaaattcaggatgttt

SEQ ID NO: 233197 - DNA, 25 bp, Artificial
  probe
  misc_feature (1)..(25): SEQ ID NO: 1854; WAN024G6L_at; Start 767; Stop 791
caagttaccttcgtttatacagtgc

SEQ ID NO: 233198 - DNA, 25 bp, Artificial
  probe
  misc_feature (1)..(25): SEQ ID NO: 1854; WAN024G6L_at; Start 30; Stop 54
tgtctgggctattctaggtctggga

SEQ ID NO: 233199 - DNA, 25 bp, Artificial
  probe
  misc_feature (1)..(25): SEQ ID NO: 1854; WAN024G6L_at; Start 121; Stop 145
ggagctgttgctgtcactttgataa

SEQ ID NO: 233200 - DNA, 25 bp, Artificial
  probe
  misc_feature (1)..(25): SEQ ID NO: 1854; WAN024G6L_at; Start 450; Stop 474
cggacaagcctatattgctacaggg

SEQ ID NO: 233201 - DNA, 25 bp, Artificial
  probe
  misc_feature (1)..(25): SEQ ID NO: 1854; WAN024G6L_at; Start 564; Stop 588
tgcaggtgccctcattgctcagcaa

SEQ ID NO: 233202 - DNA, 25 bp, Artificial
  probe
  misc_feature (1)..(25): SEQ ID NO: 1854; WAN024G6L_at; Start 720; Stop 744
cgcttatcaatttttagtgtgggca

SEQ ID NO: 233203 - DNA, 25 bp, Artificial
  probe
  misc_feature (1)..(25): SEQ ID NO: 1854; WAN024G6L_at; Start 828; Stop 852
taagcaaacaatcttgaaaggagcc

SEQ ID NO: 233204 - DNA, 25 bp, Artificial
  probe
  misc_feature (1)..(25): SEQ ID NO: 1854; WAN024G6L_at; Start 800; Stop 824
tagcagtctgcctcatgattccaac

SEQ ID NO: 233205 - DNA, 25 bp, Artificial
  probe
  misc_feature (1)..(25): SEQ ID NO: 1854; WAN024G6L_at; Start 699; Stop 723
tactatcgttgtaggttctatcgct

SEQ ID NO: 233206 - DNA, 25 bp, Artificial
  probe
  misc_feature (1)..(25): SEQ ID NO: 1854; WAN024G6L_at; Start 740; Stop 764
gggcagttatcgcacttggctttaa

SEQ ID NO: 233207 - DNA, 25 bp, Artificial
  probe
  misc_feature (1)..(25): SEQ ID NO: 993; WAN024G6M_at; Start 31; Stop 55
tacatcaaggaatcaattttagccc

SEQ ID NO: 233208 - DNA, 25 bp, Artificial
  probe
  misc_feature (1)..(25): SEQ ID NO: 993; WAN024G6M_at; Start 280; Stop 304
cgtcatattctttccttgcccaagg

SEQ ID NO: 233209 - DNA, 25 bp, Artificial
  probe
  misc_feature (1)..(25): SEQ ID NO: 993; WAN024G6M_at; Start 117; Stop 141
tgttgaccaatctttacctcaggga

SEQ ID NO: 233210 - DNA, 25 bp, Artificial
  probe
  misc_feature (1)..(25): SEQ ID NO: 993; WAN024G6M_at; Start 16; Stop 40
tcttacttcaaaccctacatcaagg

SEQ ID NO: 233211 - DNA, 25 bp, Artificial
  probe
  misc_feature (1)..(25): SEQ ID NO: 993; WAN024G6M_at; Start 372; Stop 396
gactggtatcaatcaattcctgcgt

SEQ ID NO: 233212 - DNA, 25 bp, Artificial
  probe
  misc_feature (1)..(25): SEQ ID NO: 993; WAN024G6M_at; Start 580; Stop 604
gaaacgcgccagcaattgcaaggga

SEQ ID NO: 233213 - DNA, 25 bp, Artificial
  probe
  misc_feature (1)..(25): SEQ ID NO: 993; WAN024G6M_at; Start 793; Stop 817
ggagtgctcagtcaaggtgctctca

SEQ ID NO: 233214 - DNA, 25 bp, Artificial
  probe
  misc_feature (1)..(25): SEQ ID NO: 993; WAN024G6M_at; Start 407; Stop 431
gagcgcccattatcgtttttggtgc

SEQ ID NO: 233215 - DNA, 25 bp, Artificial
  probe
  misc_feature (1)..(25): SEQ ID NO: 993; WAN024G6M_at; Start 715; Stop 739
ttaacacctctgacctatctgattg

SEQ ID NO: 233216 - DNA, 25 bp, Artificial
  probe
  misc_feature (1)..(25): SEQ ID NO: 993; WAN024G6M_at; Start 450; Stop 474
aatctcagctgagttgactttctgg

SEQ ID NO: 233217 - DNA, 25 bp, Artificial
  probe
  misc_feature (1)..(25): SEQ ID NO: 993; WAN024G6M_at; Start 565; Stop 589
gaccaactggttcaggaaacgcgcc

SEQ ID NO: 233218 - DNA, 25 bp, Artificial
  probe
  misc_feature (1)..(25): SEQ ID NO: 993; WAN024G6M_at; Start 145; Stop 169
caaggtcatctctggatgcagattg

SEQ ID NO: 233219 - DNA, 25 bp, Artificial
  probe
  misc_feature (1)..(25): SEQ ID NO: 993; WAN024G6M_at; Start 1366; Stop 1390
aaggaaggactcttggatgctctag

SEQ ID NO: 233220 - DNA, 25 bp, Artificial
  probe
  misc_feature (1)..(25): SEQ ID NO: 993; WAN024G6M_at; Start 220; Stop 244
caattttactcagcaaaggcagcag

SEQ ID NO: 233221 - DNA, 25 bp, Artificial
  probe
  misc_feature (1)..(25): SEQ ID NO: 993; WAN024G6M_at; Start 752; Stop 776
ttctcgttattatctggcaaggcta

SEQ ID NO: 233222 - DNA, 25 bp, Artificial
  probe
  misc_feature (1)..(25): SEQ ID NO: 993; WAN024G6M_at; Start 733; Stop 757
ctgattgtcaatggaactcttctcg

SEQ ID NO: 233223 - DNA, 25 bp, Artificial
  probe
  misc_feature (1)..(25): SEQ ID NO: 993; WAN024G6M_at; Start 79; Stop 103
gtttttgagctcttggttcccatgg

SEQ ID NO: 233224 - DNA, 25 bp, Artificial
  probe
  misc_feature (1)..(25): SEQ ID NO: 993; WAN024G6M_at; Start 55; Stop 79
cccttgttcaagctgttagaagctg

SEQ ID NO: 233225 - DNA, 25 bp, Artificial
  probe
  misc_feature (1)..(25): SEQ ID NO: 993; WAN024G6M_at; Start 198; Stop 222
cgttttagtggccttgatagctcaa

SEQ ID NO: 233226 - DNA, 25 bp, Artificial
  probe
  misc_feature (1)..(25): SEQ ID NO: 993; WAN024G6M_at; Start 176; Stop 200
tccttatctttgcagtaattggcgt

SEQ ID NO: 233227 - DNA, 25 bp, Artificial
  probe
  misc_feature (1)..(25): SEQ ID NO: 993; WAN024G6M_at; Start 624; Stop 648
tggtcaagaaaaacgagagttacag

SEQ ID NO: 233228 - DNA, 25 bp, Artificial
  probe
  misc_feature (1)..(25): SEQ ID NO: 993; WAN024G6M_at; Start 805; Stop 829
caaggtgctctcattgctcttatca

SEQ ID NO: 233229 - DNA, 25 bp, Artificial
  probe
  misc_feature (1)..(25): SEQ ID NO: 993; WAN024G6M_at; Start 606; Stop 630
gcgggttattcgtgcttttggtcaa

SEQ ID NO: 233230 - DNA, 25 bp, Artificial
  probe
  misc_feature (1)..(25): SEQ ID NO: 993; WAN024G6M_at; Start 1602; Stop 1626
ggcggaccagattctcctcttggaa

SEQ ID NO: 233231 - DNA, 25 bp, Artificial
  probe
  misc_feature (1)..(25): SEQ ID NO: 993; WAN024G6M_at; Start 131; Stop 155
tacctcagggagatcaaggtcatct

SEQ ID NO: 233232 - DNA, 25 bp, Artificial
  probe
  misc_feature (1)..(25): SEQ ID NO: 993; WAN024G6M_at; Start 1619; Stop 1643
tcttggaaaaaggtgagttgctagc

SEQ ID NO: 233233 - DNA, 25 bp, Artificial
  probe
  misc_feature (1)..(25): SEQ ID NO: 993; WAN024G6M_at; Start 99; Stop 123
catggtgattgctgggattgttgac

SEQ ID NO: 233234 - DNA, 25 bp, Artificial
  probe
  misc_feature (1)..(25): SEQ ID NO: 993; WAN024G6M_at; Start 676; Stop 700
gctagattacaagaaaagacaggtt

SEQ ID NO: 233235 - DNA, 25 bp, Artificial
  probe
  misc_feature (1)..(25): SEQ ID NO: 993; WAN024G6M_at; Start 438; Stop 462
tatggcttatcgaatctcagctgag

SEQ ID NO: 233236 - DNA, 25 bp, Artificial
  probe
  misc_feature (1)..(25): SEQ ID NO: 993; WAN024G6M_at; Start 330; Stop 354
tagtttggtcactcgcttgacttcg

SEQ ID NO: 233237 - DNA, 25 bp, Artificial
  probe
  misc_feature (1)..(25): SEQ ID NO: 993; WAN024G6M_at; Start 777; Stop 801
tatttcaattcaaggaggagtgctc

SEQ ID NO: 233238 - DNA, 25 bp, Artificial
  probe
  misc_feature (1)..(25): SEQ ID NO: 993; WAN024G6M_at; Start 313; Stop 337
gaccgtctgacaacttctagtttgg

SEQ ID NO: 233239 - DNA, 25 bp, Artificial
  probe
  misc_feature (1)..(25): SEQ ID NO: 993; WAN024G6M_at; Start 549; Stop 573
tctcagaaagaaaacggaccaactg

SEQ ID NO: 233240 - DNA, 25 bp, Artificial
  probe
  misc_feature (1)..(25): SEQ ID NO: 993; WAN024G6M_at; Start 512; Stop 536
tagggttatctcgattggtcaatcc

SEQ ID NO: 233241 - DNA, 25 bp, Artificial
  probe
  misc_feature (1)..(25): SEQ ID NO: 3870; WAN024G6N_at; Start 1566; Stop 1590
cattgatacacggacagaagtgctg

SEQ ID NO: 233242 - DNA, 25 bp, Artificial
  probe
  misc_feature (1)..(25): SEQ ID NO: 3870; WAN024G6N_at; Start 607; Stop 631
ttccagaagcaaacagagacgaggg

SEQ ID NO: 233243 - DNA, 25 bp, Artificial
  probe
  misc_feature (1)..(25): SEQ ID NO: 3870; WAN024G6N_at; Start 988; Stop 1012
tatggagtcttagatagccctgaag

SEQ ID NO: 233244 - DNA, 25 bp, Artificial
  probe
  misc_feature (1)..(25): SEQ ID NO: 3870; WAN024G6N_at; Start 1169; Stop 1193
cgacaggtgctggaaaatcaactct

SEQ ID NO: 233245 - DNA, 25 bp, Artificial
  probe
  misc_feature (1)..(25): SEQ ID NO: 3870; WAN024G6N_at; Start 947; Stop 971
tagctgagttgcaaagtgctctggc

SEQ ID NO: 233246 - DNA, 25 bp, Artificial
  probe
  misc_feature (1)..(25): SEQ ID NO: 3870; WAN024G6N_at; Start 238; Stop 262
cagatgctcttggtggtaataggaa

SEQ ID NO: 233247 - DNA, 25 bp, Artificial
  probe
  misc_feature (1)..(25): SEQ ID NO: 3870; WAN024G6N_at; Start 411; Stop 435
tgtaaccacggacatcgaacagttg

SEQ ID NO: 233248 - DNA, 25 bp, Artificial
  probe
  misc_feature (1)..(25): SEQ ID NO: 3870; WAN024G6N_at; Start 314; Stop 338
cttataccagagatttacgggagcg

SEQ ID NO: 233249 - DNA, 25 bp, Artificial
  probe
  misc_feature (1)..(25): SEQ ID NO: 3870; WAN024G6N_at; Start 1366; Stop 1390
gaagccagtcgagagcaagtaattg

SEQ ID NO: 233250 - DNA, 25 bp, Artificial
  probe
  misc_feature (1)..(25): SEQ ID NO: 3870; WAN024G6N_at; Start 1436; Stop 1460
cacagggatacgataccaagttgga

SEQ ID NO: 233251 - DNA, 25 bp, Artificial
  probe
  misc_feature (1)..(25): SEQ ID NO: 3870; WAN024G6N_at; Start 1041; Stop 1065
gaccagtgaccaagttaagggagct

SEQ ID NO: 233252 - DNA, 25 bp, Artificial
  probe
  misc_feature (1)..(25): SEQ ID NO: 3870; WAN024G6N_at; Start 548; Stop 572
tgttgacgccactgtccatggtgat

SEQ ID NO: 233253 - DNA, 25 bp, Artificial
  probe
  misc_feature (1)..(25): SEQ ID NO: 3870; WAN024G6N_at; Start 16; Stop 40
cccaacatggaaaggaggactagaa

SEQ ID NO: 233254 - DNA, 25 bp, Artificial
  probe
  misc_feature (1)..(25): SEQ ID NO: 3870; WAN024G6N_at; Start 168; Stop 192
tctgattgggcaggtcattgaccaa

SEQ ID NO: 233255 - DNA, 25 bp, Artificial
  probe
  misc_feature (1)..(25): SEQ ID NO: 3870; WAN024G6N_at; Start 1301; Stop 1325
tggtgcttcaagaaacctggctcac

SEQ ID NO: 233256 - DNA, 25 bp, Artificial
  probe
  misc_feature (1)..(25): SEQ ID NO: 3870; WAN024G6N_at; Start 1587; Stop 1611
gctggtacaggatgcctttgcaaaa

SEQ ID NO: 233257 - DNA, 25 bp, Artificial
  probe
  misc_feature (1)..(25): SEQ ID NO: 3870; WAN024G6N_at; Start 1026; Stop 1050
taaggaagtcttgacgaccagtgac

SEQ ID NO: 233258 - DNA, 25 bp, Artificial
  probe
  misc_feature (1)..(25): SEQ ID NO: 3870; WAN024G6N_at; Start 1750; Stop 1774
tattaccaaatgcaaaaagctgcgg

SEQ ID NO: 233259 - DNA, 25 bp, Artificial
  probe
  misc_feature (1)..(25): SEQ ID NO: 3870; WAN024G6N_at; Start 708; Stop 732
tatccaaagattgcgtgaggctcat

SEQ ID NO: 233260 - DNA, 25 bp, Artificial
  probe
  misc_feature (1)..(25): SEQ ID NO: 3870; WAN024G6N_at; Start 1542; Stop 1566
tatcttagacgaggcaacttcttcc

SEQ ID NO: 233261 - DNA, 25 bp, Artificial
  probe
  misc_feature (1)..(25): SEQ ID NO: 3870; WAN024G6N_at; Start 1648; Stop 1672
cgtttgtcaaccattcaggatgcgg

SEQ ID NO: 233262 - DNA, 25 bp, Artificial
  probe
  misc_feature (1)..(25): SEQ ID NO: 3870; WAN024G6N_at; Start 1318; Stop 1342
tggctcacacaagggaccattcatg

SEQ ID NO: 233263 - DNA, 25 bp, Artificial
  probe
  misc_feature (1)..(25): SEQ ID NO: 3870; WAN024G6N_at; Start 724; Stop 748
gaggctcatgacaactactcaggct

SEQ ID NO: 233264 - DNA, 25 bp, Artificial
  probe
  misc_feature (1)..(25): SEQ ID NO: 3870; WAN024G6N_at; Start 1154; Stop 1178
tagccatcgttggtccgacaggtgc

SEQ ID NO: 233265 - DNA, 25 bp, Artificial
  probe
  misc_feature (1)..(25): SEQ ID NO: 3870; WAN024G6N_at; Start 1603; Stop 1627
tttgcaaaactcatgaagggccgca

SEQ ID NO: 233266 - DNA, 25 bp, Artificial
  probe
  misc_feature (1)..(25): SEQ ID NO: 3870; WAN024G6N_at; Start 1221; Stop 1245
cattagctcgggagatatcttgctg

SEQ ID NO: 233267 - DNA, 25 bp, Artificial
  probe
  misc_feature (1)..(25): SEQ ID NO: 3870; WAN024G6N_at; Start 427; Stop 451
gaacagttggcagctggcttgacca

SEQ ID NO: 233268 - DNA, 25 bp, Artificial
  probe
  misc_feature (1)..(25): SEQ ID NO: 3870; WAN024G6N_at; Start 1469; Stop 1493
gagaatctctctctgtcggccaagc

SEQ ID NO: 233269 - DNA, 25 bp, Artificial
  probe
  misc_feature (1)..(25): SEQ ID NO: 3870; WAN024G6N_at; Start 260; Stop 284
gaaatactctggtacaatgggccaa

SEQ ID NO: 233270 - DNA, 25 bp, Artificial
  probe
  misc_feature (1)..(25): SEQ ID NO: 3870; WAN024G6N_at; Start 329; Stop 353
tacgggagcgaatcatccataagct

SEQ ID NO: 233271 - DNA, 25 bp, Artificial
  probe
  misc_feature (1)..(25): SEQ ID NO: 3870; WAN024G6N_at; Start 901; Stop 925
tatgttcagcaatacaccaagccct

SEQ ID NO: 233272 - DNA, 25 bp, Artificial
  probe
  misc_feature (1)..(25): SEQ ID NO: 3870; WAN024G6N_at; Start 567; Stop 591
ggtgatttcacgctttattgccaag

SEQ ID NO: 233273 - DNA, 25 bp, Artificial
  probe
  misc_feature (1)..(25): SEQ ID NO: 3870; WAN024G6N_at; Start 1494; Stop 1518
tcagctcttgaccatagcccgagtc

SEQ ID NO: 233274 - DNA, 25 bp, Artificial
  probe
  misc_feature (1)..(25): SEQ ID NO: 3870; WAN024G6N_at; Start 191; Stop 215
aagtcctagtggctggttcatcacc

SEQ ID NO: 233275 - DNA, 25 bp, Artificial
  probe
  misc_feature (1)..(25): SEQ ID NO: 1486; WAN024G6O_at; Start 186; Stop 210
tacaactgatgccaaaccacctact

SEQ ID NO: 233276 - DNA, 25 bp, Artificial
  probe
  misc_feature (1)..(25): SEQ ID NO: 1486; WAN024G6O_at; Start 182; Stop 206
caattacaactgatgccaaaccacc

SEQ ID NO: 233277 - DNA, 25 bp, Artificial
  probe
  misc_feature (1)..(25): SEQ ID NO: 1486; WAN024G6O_at; Start 10; Stop 34
cctgcttctttgagaacagactcag

SEQ ID NO: 233278 - DNA, 25 bp, Artificial
  probe
  misc_feature (1)..(25): SEQ ID NO: 1486; WAN024G6O_at; Start 164; Stop 188
caccaaggtcatgttggtcaattac

SEQ ID NO: 233279 - DNA, 25 bp, Artificial
  probe
  misc_feature (1)..(25): SEQ ID NO: 1486; WAN024G6O_at; Start 108; Stop 132
ggtatcggctggttttgcacctttc

SEQ ID NO: 233280 - DNA, 25 bp, Artificial
  probe
  misc_feature (1)..(25): SEQ ID NO: 1486; WAN024G6O_at; Start 35; Stop 59
gaatagtaatacctagttcttgtgc

SEQ ID NO: 233281 - DNA, 25 bp, Artificial
  probe
  misc_feature (1)..(25): SEQ ID NO: 1486; WAN024G6O_at; Start 147; Stop 171
cattttacctgttgccacaccaagg

SEQ ID NO: 233282 - DNA, 25 bp, Artificial
  probe
  misc_feature (1)..(25): SEQ ID NO: 1486; WAN024G6O_at; Start 23; Stop 47
gaacagactcaggaatagtaatacc

SEQ ID NO: 233283 - DNA, 25 bp, Artificial
  probe
  misc_feature (1)..(25): SEQ ID NO: 1486; WAN024G6O_at; Start 26; Stop 50
cagactcaggaatagtaatacctag

SEQ ID NO: 233284 - DNA, 25 bp, Artificial
  probe
  misc_feature (1)..(25): SEQ ID NO: 1486; WAN024G6O_at; Start 199; Stop 223
aaaccacctacttctaccatagctg

SEQ ID NO: 233285 - DNA, 25 bp, Artificial
  probe
  misc_feature (1)..(25): SEQ ID NO: 1486; WAN024G6O_at; Start 13; Stop 37
gcttctttgagaacagactcaggaa

SEQ ID NO: 233286 - DNA, 25 bp, Artificial
  probe
  misc_feature (1)..(25): SEQ ID NO: 1486; WAN024G6O_at; Start 92; Stop 116
aaaagacattgactggggtatcggc

SEQ ID NO: 233287 - DNA, 25 bp, Artificial
  probe
  misc_feature (1)..(25): SEQ ID NO: 1486; WAN024G6O_at; Start 112; Stop 136
tcggctggttttgcacctttcaaga

SEQ ID NO: 233288 - DNA, 25 bp, Artificial
  probe
  misc_feature (1)..(25): SEQ ID NO: 1486; WAN024G6O_at; Start 114; Stop 138
ggctggttttgcacctttcaagact

SEQ ID NO: 233289 - DNA, 25 bp, Artificial
  probe
  misc_feature (1)..(25): SEQ ID NO: 1486; WAN024G6O_at; Start 140; Stop 164
gcacaatcattttacctgttgccac

SEQ ID NO: 233290 - DNA, 25 bp, Artificial
  probe
  misc_feature (1)..(25): SEQ ID NO: 1486; WAN024G6O_at; Start 156; Stop 180
tgttgccacaccaaggtcatgttgg

SEQ ID NO: 233291 - DNA, 25 bp, Artificial
  probe
  misc_feature (1)..(25): SEQ ID NO: 1486; WAN024G6O_at; Start 118; Stop 142
ggttttgcacctttcaagacttgca

SEQ ID NO: 233292 - DNA, 25 bp, Artificial
  probe
  misc_feature (1)..(25): SEQ ID NO: 1486; WAN024G6O_at; Start 167; Stop 191
caaggtcatgttggtcaattacaac

SEQ ID NO: 233293 - DNA, 25 bp, Artificial
  probe
  misc_feature (1)..(25): SEQ ID NO: 1486; WAN024G6O_at; Start 3; Stop 27
gacttgtcctgcttctttgagaaca

SEQ ID NO: 233294 - DNA, 25 bp, Artificial
  probe
  misc_feature (1)..(25): SEQ ID NO: 1486; WAN024G6O_at; Start 16; Stop 40
tctttgagaacagactcaggaatag

SEQ ID NO: 233295 - DNA, 25 bp, Artificial
  probe
  misc_feature (1)..(25): SEQ ID NO: 1486; WAN024G6O_at; Start 154; Stop 178
cctgttgccacaccaaggtcatgtt

SEQ ID NO: 233296 - DNA, 25 bp, Artificial
  probe
  misc_feature (1)..(25): SEQ ID NO: 1486; WAN024G6O_at; Start 152; Stop 176
tacctgttgccacaccaaggtcatg

SEQ ID NO: 233297 - DNA, 25 bp, Artificial
  probe
  misc_feature (1)..(25): SEQ ID NO: 1486; WAN024G6O_at; Start 124; Stop 148
gcacctttcaagacttgcacaatca

SEQ ID NO: 233298 - DNA, 25 bp, Artificial
  probe
  misc_feature (1)..(25): SEQ ID NO: 1486; WAN024G6O_at; Start 190; Stop 214
actgatgccaaaccacctacttcta

SEQ ID NO: 233299 - DNA, 25 bp, Artificial
  probe
  misc_feature (1)..(25): SEQ ID NO: 1486; WAN024G6O_at; Start 1; Stop 25
atgacttgtcctgcttctttgagaa

SEQ ID NO: 233300 - DNA, 25 bp, Artificial
  probe
  misc_feature (1)..(25): SEQ ID NO: 1486; WAN024G6O_at; Start 175; Stop 199
tgttggtcaattacaactgatgcca

SEQ ID NO: 233301 - DNA, 25 bp, Artificial
  probe
  misc_feature (1)..(25): SEQ ID NO: 1486; WAN024G6O_at; Start 144; Stop 168
aatcattttacctgttgccacacca

SEQ ID NO: 233302 - DNA, 25 bp, Artificial
  probe
  misc_feature (1)..(25): SEQ ID NO: 1486; WAN024G6O_at; Start 210; Stop 234
ttctaccatagctgtcgcactggga

SEQ ID NO: 233303 - DNA, 25 bp, Artificial
  probe
  misc_feature (1)..(25): SEQ ID NO: 1486; WAN024G6O_at; Start 38; Stop 62
tagtaatacctagttcttgtgctat

SEQ ID NO: 233304 - DNA, 25 bp, Artificial
  probe
  misc_feature (1)..(25): SEQ ID NO: 1486; WAN024G6O_at; Start 207; Stop 231
tacttctaccatagctgtcgcactg

SEQ ID NO: 233305 - DNA, 25 bp, Artificial
  probe
  misc_feature (1)..(25): SEQ ID NO: 1486; WAN024G6O_at; Start 133; Stop 157
aagacttgcacaatcattttacctg

SEQ ID NO: 233306 - DNA, 25 bp, Artificial
  probe
  misc_feature (1)..(25): SEQ ID NO: 1486; WAN024G6O_at; Start 160; Stop 184
gccacaccaaggtcatgttggtcaa

SEQ ID NO: 233307 - DNA, 25 bp, Artificial
  probe
  misc_feature (1)..(25): SEQ ID NO: 1486; WAN024G6O_at; Start 213; Stop 237
taccatagctgtcgcactgggataa

SEQ ID NO: 233308 - DNA, 25 bp, Artificial
  probe
  misc_feature (1)..(25): SEQ ID NO: 1486; WAN024G6O_at; Start 178; Stop 202
tggtcaattacaactgatgccaaac

SEQ ID NO: 233309 - DNA, 25 bp, Artificial
  probe
  misc_feature (1)..(25): SEQ ID NO: 5768; WAN024G6P_at; Start 108; Stop 132
tgttgcactagccaacccttgggct

SEQ ID NO: 233310 - DNA, 25 bp, Artificial
  probe
  misc_feature (1)..(25): SEQ ID NO: 5768; WAN024G6P_at; Start 11; Stop 35
atacccctgtaacgttgccacctgg

SEQ ID NO: 233311 - DNA, 25 bp, Artificial
  probe
  misc_feature (1)..(25): SEQ ID NO: 5768; WAN024G6P_at; Start 99; Stop 123
taggtcttttgttgcactagccaac

SEQ ID NO: 233312 - DNA, 25 bp, Artificial
  probe
  misc_feature (1)..(25): SEQ ID NO: 5768; WAN024G6P_at; Start 75; Stop 99
tgtaatagcggccatgataaccggt

SEQ ID NO: 233313 - DNA, 25 bp, Artificial
  probe
  misc_feature (1)..(25): SEQ ID NO: 5768; WAN024G6P_at; Start 140; Stop 164
ttgcgataccaaccacaaggtcatt

SEQ ID NO: 233314 - DNA, 25 bp, Artificial
  probe
  misc_feature (1)..(25): SEQ ID NO: 5768; WAN024G6P_at; Start 2; Stop 26
tgtggtcagatacccctgtaacgtt

SEQ ID NO: 233315 - DNA, 25 bp, Artificial
  probe
  misc_feature (1)..(25): SEQ ID NO: 5768; WAN024G6P_at; Start 83; Stop 107
cggccatgataaccggtaggtcttt

SEQ ID NO: 233316 - DNA, 25 bp, Artificial
  probe
  misc_feature (1)..(25): SEQ ID NO: 5768; WAN024G6P_at; Start 130; Stop 154
gctgctggtgttgcgataccaacca

SEQ ID NO: 233317 - DNA, 25 bp, Artificial
  probe
  misc_feature (1)..(25): SEQ ID NO: 5768; WAN024G6P_at; Start 189; Stop 213
cattgtcgcaaccttactttggtca

SEQ ID NO: 233318 - DNA, 25 bp, Artificial
  probe
  misc_feature (1)..(25): SEQ ID NO: 5768; WAN024G6P_at; Start 106; Stop 130
tttgttgcactagccaacccttggg

SEQ ID NO: 233319 - DNA, 25 bp, Artificial
  probe
  misc_feature (1)..(25): SEQ ID NO: 5768; WAN024G6P_at; Start 121; Stop 145
aacccttgggctgctggtgttgcga

SEQ ID NO: 233320 - DNA, 25 bp, Artificial
  probe
  misc_feature (1)..(25): SEQ ID NO: 5768; WAN024G6P_at; Start 6; Stop 30
gtcagatacccctgtaacgttgcca

SEQ ID NO: 233321 - DNA, 25 bp, Artificial
  probe
  misc_feature (1)..(25): SEQ ID NO: 5768; WAN024G6P_at; Start 90; Stop 114
gataaccggtaggtcttttgttgca

SEQ ID NO: 233322 - DNA, 25 bp, Artificial
  probe
  misc_feature (1)..(25): SEQ ID NO: 5768; WAN024G6P_at; Start 77; Stop 101
taatagcggccatgataaccggtag

SEQ ID NO: 233323 - DNA, 25 bp, Artificial
  probe
  misc_feature (1)..(25): SEQ ID NO: 5768; WAN024G6P_at; Start 50; Stop 74
taaccaagttagcaccaattgggtc

SEQ ID NO: 233324 - DNA, 25 bp, Artificial
  probe
  misc_feature (1)..(25): SEQ ID NO: 5768; WAN024G6P_at; Start 54; Stop 78
caagttagcaccaattgggtctgta

SEQ ID NO: 233325 - DNA, 25 bp, Artificial
  probe
  misc_feature (1)..(25): SEQ ID NO: 5768; WAN024G6P_at; Start 70; Stop 94
gggtctgtaatagcggccatgataa

SEQ ID NO: 233326 - DNA, 25 bp, Artificial
  probe
  misc_feature (1)..(25): SEQ ID NO: 5768; WAN024G6P_at; Start 95; Stop 119
ccggtaggtcttttgttgcactagc

SEQ ID NO: 233327 - DNA, 25 bp, Artificial
  probe
  misc_feature (1)..(25): SEQ ID NO: 5768; WAN024G6P_at; Start 124; Stop 148
ccttgggctgctggtgttgcgatac

SEQ ID NO: 233328 - DNA, 25 bp, Artificial
  probe
  misc_feature (1)..(25): SEQ ID NO: 5768; WAN024G6P_at; Start 166; Stop 190
ccatttgcaaccaattgtttactca

SEQ ID NO: 233329 - DNA, 25 bp, Artificial
  probe
  misc_feature (1)..(25): SEQ ID NO: 5768; WAN024G6P_at; Start 64; Stop 88
ccaattgggtctgtaatagcggcca

SEQ ID NO: 233330 - DNA, 25 bp, Artificial
  probe
  misc_feature (1)..(25): SEQ ID NO: 5768; WAN024G6P_at; Start 127; Stop 151
tgggctgctggtgttgcgataccaa

SEQ ID NO: 233331 - DNA, 25 bp, Artificial
  probe
  misc_feature (1)..(25): SEQ ID NO: 5768; WAN024G6P_at; Start 136; Stop 160
ggtgttgcgataccaaccacaaggt

SEQ ID NO: 233332 - DNA, 25 bp, Artificial
  probe
  misc_feature (1)..(25): SEQ ID NO: 5768; WAN024G6P_at; Start 80; Stop 104
tagcggccatgataaccggtaggtc

SEQ ID NO: 233333 - DNA, 25 bp, Artificial
  probe
  misc_feature (1)..(25): SEQ ID NO: 5768; WAN024G6P_at; Start 185; Stop 209
tactcattgtcgcaaccttactttg

SEQ ID NO: 233334 - DNA, 25 bp, Artificial
  probe
  misc_feature (1)..(25): SEQ ID NO: 5768; WAN024G6P_at; Start 111; Stop 135
tgcactagccaacccttgggctgct

SEQ ID NO: 233335 - DNA, 25 bp, Artificial
  probe
  misc_feature (1)..(25): SEQ ID NO: 5768; WAN024G6P_at; Start 177; Stop 201
caattgtttactcattgtcgcaacc

SEQ ID NO: 233336 - DNA, 25 bp, Artificial
  probe
  misc_feature (1)..(25): SEQ ID NO: 5768; WAN024G6P_at; Start 198; Stop 222
aaccttactttggtcaccttctgag

SEQ ID NO: 233337 - DNA, 25 bp, Artificial
  probe
  misc_feature (1)..(25): SEQ ID NO: 5768; WAN024G6P_at; Start 116; Stop 140
tagccaacccttgggctgctggtgt

SEQ ID NO: 233338 - DNA, 25 bp, Artificial
  probe
  misc_feature (1)..(25): SEQ ID NO: 5768; WAN024G6P_at; Start 42; Stop 66
caaatctttaaccaagttagcacca

SEQ ID NO: 233339 - DNA, 25 bp, Artificial
  probe
  misc_feature (1)..(25): SEQ ID NO: 5768; WAN024G6P_at; Start 62; Stop 86
caccaattgggtctgtaatagcggc

SEQ ID NO: 233340 - DNA, 25 bp, Artificial
  probe
  misc_feature (1)..(25): SEQ ID NO: 5768; WAN024G6P_at; Start 204; Stop 228
actttggtcaccttctgagttcata

SEQ ID NO: 233341 - DNA, 25 bp, Artificial
  probe
  misc_feature (1)..(25): SEQ ID NO: 5768; WAN024G6P_at; Start 209; Stop 233
ggtcaccttctgagttcataaaatc

SEQ ID NO: 233342 - DNA, 25 bp, Artificial
  probe
  misc_feature (1)..(25): SEQ ID NO: 5768; WAN024G6P_at; Start 214; Stop 238
ccttctgagttcataaaatcaattt

SEQ ID NO: 233343 - DNA, 25 bp, Artificial
  probe
  misc_feature (1)..(25): SEQ ID NO: 2983; WAN024G6Q_at; Start 738; Stop 762
tgcatcaggatttccaacggttgtc

SEQ ID NO: 233344 - DNA, 25 bp, Artificial
  probe
  misc_feature (1)..(25): SEQ ID NO: 2983; WAN024G6Q_at; Start 283; Stop 307
gaccaaagtaaggttgcgacaatga

SEQ ID NO: 233345 - DNA, 25 bp, Artificial
  probe
  misc_feature (1)..(25): SEQ ID NO: 2983; WAN024G6Q_at; Start 417; Stop 441
tacagacccaattggtgctaacttg

SEQ ID NO: 233346 - DNA, 25 bp, Artificial
  probe
  misc_feature (1)..(25): SEQ ID NO: 2983; WAN024G6Q_at; Start 374; Stop 398
tggctagtgcaacaaaagacctacc

SEQ ID NO: 233347 - DNA, 25 bp, Artificial
  probe
  misc_feature (1)..(25): SEQ ID NO: 2983; WAN024G6Q_at; Start 479; Stop 503
gggtatctgaccacaatccagctca

SEQ ID NO: 233348 - DNA, 25 bp, Artificial
  probe
  misc_feature (1)..(25): SEQ ID NO: 2983; WAN024G6Q_at; Start 850; Stop 874
caacatgaccttggtgtggcaacag

SEQ ID NO: 233349 - DNA, 25 bp, Artificial
  probe
  misc_feature (1)..(25): SEQ ID NO: 2983; WAN024G6Q_at; Start 722; Stop 746
caattgataacaccattgcatcagg

SEQ ID NO: 233350 - DNA, 25 bp, Artificial
  probe
  misc_feature (1)..(25): SEQ ID NO: 2983; WAN024G6Q_at; Start 64; Stop 88
gcattagcagtcttagtagcaggaa

SEQ ID NO: 233351 - DNA, 25 bp, Artificial
  probe
  misc_feature (1)..(25): SEQ ID NO: 2983; WAN024G6Q_at; Start 331; Stop 355
aatgaccttgtggttggtatcgcaa

SEQ ID NO: 233352 - DNA, 25 bp, Artificial
  probe
  misc_feature (1)..(25): SEQ ID NO: 2983; WAN024G6Q_at; Start 815; Stop 839
tagaagtaggtggtttggcatcagt

SEQ ID NO: 233353 - DNA, 25 bp, Artificial
  probe
  misc_feature (1)..(25): SEQ ID NO: 2983; WAN024G6Q_at; Start 341; Stop 365
tggttggtatcgcaacaccagcagc

SEQ ID NO: 233354 - DNA, 25 bp, Artificial
  probe
  misc_feature (1)..(25): SEQ ID NO: 2983; WAN024G6Q_at; Start 262; Stop 286
gattttatgaactcagaaggtgacc

SEQ ID NO: 233355 - DNA, 25 bp, Artificial
  probe
  misc_feature (1)..(25): SEQ ID NO: 2983; WAN024G6Q_at; Start 170; Stop 194
aatttgtgagccatccatcccttga

SEQ ID NO: 233356 - DNA, 25 bp, Artificial
  probe
  misc_feature (1)..(25): SEQ ID NO: 2983; WAN024G6Q_at; Start 1005; Stop 1029
tctcaaagaagcaggacaagtcatc

SEQ ID NO: 233357 - DNA, 25 bp, Artificial
  probe
  misc_feature (1)..(25): SEQ ID NO: 2983; WAN024G6Q_at; Start 913; Stop 937
gccgataccccagtcaatgtctttt

SEQ ID NO: 233358 - DNA, 25 bp, Artificial
  probe
  misc_feature (1)..(25): SEQ ID NO: 2983; WAN024G6Q_at; Start 868; Stop 892
gcaacaggtaaaatgattgtgcaag

SEQ ID NO: 233359 - DNA, 25 bp, Artificial
  probe
  misc_feature (1)..(25): SEQ ID NO: 2983; WAN024G6Q_at; Start 667; Stop 691
gaaattgcctcaactgtcactgtta

SEQ ID NO: 233360 - DNA, 25 bp, Artificial
  probe
  misc_feature (1)..(25): SEQ ID NO: 2983; WAN024G6Q_at; Start 536; Stop 560
cgaatgtgaaaacaatcggagctct

SEQ ID NO: 233361 - DNA, 25 bp, Artificial
  probe
  misc_feature (1)..(25): SEQ ID NO: 2983; WAN024G6Q_at; Start 200; Stop 224
tttataaagggatccaagatggact

SEQ ID NO: 233362 - DNA, 25 bp, Artificial
  probe
  misc_feature (1)..(25): SEQ ID NO: 2983; WAN024G6Q_at; Start 574; Stop 598
gaagacaattcaaaaacacaggtcg

SEQ ID NO: 233363 - DNA, 25 bp, Artificial
  probe
  misc_feature (1)..(25): SEQ ID NO: 2983; WAN024G6Q_at; Start 513; Stop 537
tgaactcatcaaggctctgacaccg

SEQ ID NO: 233364 - DNA, 25 bp, Artificial
  probe
  misc_feature (1)..(25): SEQ ID NO: 2983; WAN024G6Q_at; Start 626; Stop 650
caggtctgacagtggaaacatttgc

SEQ ID NO: 233365 - DNA, 25 bp, Artificial
  probe
  misc_feature (1)..(25): SEQ ID NO: 2983; WAN024G6Q_at; Start 402; Stop 426
tatcatggccgctattacagaccca

SEQ ID NO: 233366 - DNA, 25 bp, Artificial
  probe
  misc_feature (1)..(25): SEQ ID NO: 2983; WAN024G6Q_at; Start 553; Stop 577
ggagctctttactcaagtagcgaag

SEQ ID NO: 233367 - DNA, 25 bp, Artificial
  probe
  misc_feature (1)..(25): SEQ ID NO: 2983; WAN024G6Q_at; Start 798; Stop 822
cagtgcgacagctatggtagaagta

SEQ ID NO: 233368 - DNA, 25 bp, Artificial
  probe
  misc_feature (1)..(25): SEQ ID NO: 2983; WAN024G6Q_at; Start 784; Stop 808
aaaccaatttatcccagtgcgacag

SEQ ID NO: 233369 - DNA, 25 bp, Artificial
  probe
  misc_feature (1)..(25): SEQ ID NO: 2983; WAN024G6Q_at; Start 356; Stop 380
caccagcagcccaagggttggctag

SEQ ID NO: 233370 - DNA, 25 bp, Artificial
  probe
  misc_feature (1)..(25): SEQ ID NO: 2983; WAN024G6Q_at; Start 610; Stop 634
gcttatgctgaaaaagcaggtctga

SEQ ID NO: 233371 - DNA, 25 bp, Artificial
  probe
  misc_feature (1)..(25): SEQ ID NO: 2983; WAN024G6Q_at; Start 830; Stop 854
tggcatcagttgtaattgaccaaca

SEQ ID NO: 233372 - DNA, 25 bp, Artificial
  probe
  misc_feature (1)..(25): SEQ ID NO: 2983; WAN024G6Q_at; Start 214; Stop 238
caagatggacttgcagaagaaggat

SEQ ID NO: 233373 - DNA, 25 bp, Artificial
  probe
  misc_feature (1)..(25): SEQ ID NO: 2983; WAN024G6Q_at; Start 752; Stop 776
caacggttgtctctagcaatcaaag

SEQ ID NO: 233374 - DNA, 25 bp, Artificial
  probe
  misc_feature (1)..(25): SEQ ID NO: 2983; WAN024G6Q_at; Start 699; Stop 723
caaggtagatgctatttgggttcca

SEQ ID NO: 233375 - DNA, 25 bp, Artificial
  probe
  misc_feature (1)..(25): SEQ ID NO: 2983; WAN024G6Q_at; Start 590; Stop 614
cacaggtcgaagaatttaaggctta

SEQ ID NO: 233376 - DNA, 25 bp, Artificial
  probe
  misc_feature (1)..(25): SEQ ID NO: 2983; WAN024G6Q_at; Start 640; Stop 664
gaaacatttgcagttccttcaacaa

SEQ ID NO: 233377 - DNA, 25 bp, Artificial
  probe
  misc_feature (1)..(25): SEQ ID NO: 2459; WAN024G6R_at; Start 317; Stop 341
tagccttgattggacttgactcgaa

SEQ ID NO: 233378 - DNA, 25 bp, Artificial
  probe
  misc_feature (1)..(25): SEQ ID NO: 2459; WAN024G6R_at; Start 161; Stop 185
tgataaattccttgaagcttgaacc

SEQ ID NO: 233379 - DNA, 25 bp, Artificial
  probe
  misc_feature (1)..(25): SEQ ID NO: 2459; WAN024G6R_at; Start 275; Stop 299
tcttacgagcggctggacgagaacc

SEQ ID NO: 233380 - DNA, 25 bp, Artificial
  probe
  misc_feature (1)..(25): SEQ ID NO: 2459; WAN024G6R_at; Start 109; Stop 133
ggccaattttggtacatatctcgta

SEQ ID NO: 233381 - DNA, 25 bp, Artificial
  probe
  misc_feature (1)..(25): SEQ ID NO: 2459; WAN024G6R_at; Start 290; Stop 314
gacgagaaccaatattaaaacttga

SEQ ID NO: 233382 - DNA, 25 bp, Artificial
  probe
  misc_feature (1)..(25): SEQ ID NO: 2459; WAN024G6R_at; Start 265; Stop 289
tcagtaatagtcttacgagcggctg

SEQ ID NO: 233383 - DNA, 25 bp, Artificial
  probe
  misc_feature (1)..(25): SEQ ID NO: 2459; WAN024G6R_at; Start 164; Stop 188
taaattccttgaagcttgaaccaac

SEQ ID NO: 233384 - DNA, 25 bp, Artificial
  probe
  misc_feature (1)..(25): SEQ ID NO: 2459; WAN024G6R_at; Start 173; Stop 197
tgaagcttgaaccaaccccgtacca

SEQ ID NO: 233385 - DNA, 25 bp, Artificial
  probe
  misc_feature (1)..(25): SEQ ID NO: 2459; WAN024G6R_at; Start 221; Stop 245
gtgaccatgagaatacccaagggat

SEQ ID NO: 233386 - DNA, 25 bp, Artificial
  probe
  misc_feature (1)..(25): SEQ ID NO: 2459; WAN024G6R_at; Start 83; Stop 107
catttgaaagaagcgattggaagaa

SEQ ID NO: 233387 - DNA, 25 bp, Artificial
  probe
  misc_feature (1)..(25): SEQ ID NO: 2459; WAN024G6R_at; Start 119; Stop 143
ggtacatatctcgtaagatagcaat

SEQ ID NO: 233388 - DNA, 25 bp, Artificial
  probe
  misc_feature (1)..(25): SEQ ID NO: 2459; WAN024G6R_at; Start 280; Stop 304
cgagcggctggacgagaaccaatat

SEQ ID NO: 233389 - DNA, 25 bp, Artificial
  probe
  misc_feature (1)..(25): SEQ ID NO: 2459; WAN024G6R_at; Start 67; Stop 91
gacaaaaccatatcaacatttgaaa

SEQ ID NO: 233390 - DNA, 25 bp, Artificial
  probe
  misc_feature (1)..(25): SEQ ID NO: 2459; WAN024G6R_at; Start 2; Stop 26
tggccttaacttgctcgtcttcaca

SEQ ID NO: 233391 - DNA, 25 bp, Artificial
  probe
  misc_feature (1)..(25): SEQ ID NO: 2459; WAN024G6R_at; Start 320; Stop 344
ccttgattggacttgactcgaagaa

SEQ ID NO: 233392 - DNA, 25 bp, Artificial
  probe
  misc_feature (1)..(25): SEQ ID NO: 2459; WAN024G6R_at; Start 218; Stop 242
tctgtgaccatgagaatacccaagg

SEQ ID NO: 233393 - DNA, 25 bp, Artificial
  probe
  misc_feature (1)..(25): SEQ ID NO: 2459; WAN024G6R_at; Start 14; Stop 38
gctcgtcttcacaaagtttagcata

SEQ ID NO: 233394 - DNA, 25 bp, Artificial
  probe
  misc_feature (1)..(25): SEQ ID NO: 2459; WAN024G6R_at; Start 200; Stop 224
cagggaacataacacgactctgtga

SEQ ID NO: 233395 - DNA, 25 bp, Artificial
  probe
  misc_feature (1)..(25): SEQ ID NO: 2459; WAN024G6R_at; Start 52; Stop 76
ttcatatttgattttgacaaaacca

SEQ ID NO: 233396 - DNA, 25 bp, Artificial
  probe
  misc_feature (1)..(25): SEQ ID NO: 2459; WAN024G6R_at; Start 209; Stop 233
taacacgactctgtgaccatgagaa

SEQ ID NO: 233397 - DNA, 25 bp, Artificial
  probe
  misc_feature (1)..(25): SEQ ID NO: 2459; WAN024G6R_at; Start 96; Stop 120
cgattggaagaaaggccaattttgg

SEQ ID NO: 233398 - DNA, 25 bp, Artificial
  probe
  misc_feature (1)..(25): SEQ ID NO: 2459; WAN024G6R_at; Start 283; Stop 307
gcggctggacgagaaccaatattaa

SEQ ID NO: 233399 - DNA, 25 bp, Artificial
  probe
  misc_feature (1)..(25): SEQ ID NO: 2459; WAN024G6R_at; Start 312; Stop 336
tgaaatagccttgattggacttgac

SEQ ID NO: 233400 - DNA, 25 bp, Artificial
  probe
  misc_feature (1)..(25): SEQ ID NO: 2459; WAN024G6R_at; Start 196; Stop 220
catccagggaacataacacgactct

SEQ ID NO: 233401 - DNA, 25 bp, Artificial
  probe
  misc_feature (1)..(25): SEQ ID NO: 2459; WAN024G6R_at; Start 189; Stop 213
cccgtaccatccagggaacataaca

SEQ ID NO: 233402 - DNA, 25 bp, Artificial
  probe
  misc_feature (1)..(25): SEQ ID NO: 2459; WAN024G6R_at; Start 135; Stop 159
gatagcaatattctctggattttta

SEQ ID NO: 233403 - DNA, 25 bp, Artificial
  probe
  misc_feature (1)..(25): SEQ ID NO: 2459; WAN024G6R_at; Start 34; Stop 58
gcatattcaaaagcaatattcatat

SEQ ID NO: 233404 - DNA, 25 bp, Artificial
  probe
  misc_feature (1)..(25): SEQ ID NO: 2459; WAN024G6R_at; Start 25; Stop 49
caaagtttagcatattcaaaagcaa

SEQ ID NO: 233405 - DNA, 25 bp, Artificial
  probe
  misc_feature (1)..(25): SEQ ID NO: 2459; WAN024G6R_at; Start 305; Stop 329
taaaacttgaaatagccttgattgg

SEQ ID NO: 233406 - DNA, 25 bp, Artificial
  probe
  misc_feature (1)..(25): SEQ ID NO: 2459; WAN024G6R_at; Start 88; Stop 112
gaaagaagcgattggaagaaaggcc

SEQ ID NO: 233407 - DNA, 25 bp, Artificial
  probe
  misc_feature (1)..(25): SEQ ID NO: 2459; WAN024G6R_at; Start 130; Stop 154
cgtaagatagcaatattctctggat

SEQ ID NO: 233408 - DNA, 25 bp, Artificial
  probe
  misc_feature (1)..(25): SEQ ID NO: 2459; WAN024G6R_at; Start 324; Stop 348
gattggacttgactcgaagaaataa

SEQ ID NO: 233409 - DNA, 25 bp, Artificial
  probe
  misc_feature (1)..(25): SEQ ID NO: 2459; WAN024G6R_at; Start 269; Stop 293
taatagtcttacgagcggctggacg

SEQ ID NO: 233410 - DNA, 25 bp, Artificial
  probe
  misc_feature (1)..(25): SEQ ID NO: 2459; WAN024G6R_at; Start 256; Stop 280
ccaccgatttcagtaatagtcttac

SEQ ID NO: 233411 - DNA, 25 bp, Artificial
  probe
  misc_feature (1)..(25): SEQ ID NO: 2929; WAN024G6S_at; Start 1807; Stop 1831
ggtggtgggccaacctatgaagcca

SEQ ID NO: 233412 - DNA, 25 bp, Artificial
  probe
  misc_feature (1)..(25): SEQ ID NO: 2929; WAN024G6S_at; Start 1703; Stop 1727
catgttggaccctctacaaggctca

SEQ ID NO: 233413 - DNA, 25 bp, Artificial
  probe
  misc_feature (1)..(25): SEQ ID NO: 2929; WAN024G6S_at; Start 1301; Stop 1325
tgaaagaattagaagaagatccccg

SEQ ID NO: 233414 - DNA, 25 bp, Artificial
  probe
  misc_feature (1)..(25): SEQ ID NO: 2929; WAN024G6S_at; Start 1978; Stop 2002
cagaagaagagcgataccaataccc

SEQ ID NO: 233415 - DNA, 25 bp, Artificial
  probe
  misc_feature (1)..(25): SEQ ID NO: 2929; WAN024G6S_at; Start 1336; Stop 1360
gcgactcacgcagaaaaatcagaat

SEQ ID NO: 233416 - DNA, 25 bp, Artificial
  probe
  misc_feature (1)..(25): SEQ ID NO: 2929; WAN024G6S_at; Start 2500; Stop 2524
ggacatgacgaactcttagctgaca

SEQ ID NO: 233417 - DNA, 25 bp, Artificial
  probe
  misc_feature (1)..(25): SEQ ID NO: 2929; WAN024G6S_at; Start 2309; Stop 2333
tacgagatatgtaccaaaattggcc

SEQ ID NO: 233418 - DNA, 25 bp, Artificial
  probe
  misc_feature (1)..(25): SEQ ID NO: 2929; WAN024G6S_at; Start 2654; Stop 2678
tcaccatcaacggaattgcgacagg

SEQ ID NO: 233419 - DNA, 25 bp, Artificial
  probe
  misc_feature (1)..(25): SEQ ID NO: 2929; WAN024G6S_at; Start 2670; Stop 2694
tgcgacaggattgcgtaattcaggt

SEQ ID NO: 233420 - DNA, 25 bp, Artificial
  probe
  misc_feature (1)..(25): SEQ ID NO: 2929; WAN024G6S_at; Start 2597; Stop 2621
tgattaaacgccaacgtcgtggaga

SEQ ID NO: 233421 - DNA, 25 bp, Artificial
  probe
  misc_feature (1)..(25): SEQ ID NO: 2929; WAN024G6S_at; Start 1666; Stop 1690
tactctgacagtaataaagatggcg

SEQ ID NO: 233422 - DNA, 25 bp, Artificial
  probe
  misc_feature (1)..(25): SEQ ID NO: 2929; WAN024G6S_at; Start 1841; Stop 1865
aaccgctcaagtctatcaaggatcg

SEQ ID NO: 233423 - DNA, 25 bp, Artificial
  probe
  misc_feature (1)..(25): SEQ ID NO: 2929; WAN024G6S_at; Start 1651; Stop 1675
gaaatcatgcttggctactctgaca

SEQ ID NO: 233424 - DNA, 25 bp, Artificial
  probe
  misc_feature (1)..(25): SEQ ID NO: 2929; WAN024G6S_at; Start 882; Stop 906
tgtcaacgtcagcaagcaagtcaga

SEQ ID NO: 233425 - DNA, 25 bp, Artificial
  probe
  misc_feature (1)..(25): SEQ ID NO: 2929; WAN024G6S_at; Start 905; Stop 929
gagaaatggctcgtcaatccaagga

SEQ ID NO: 233426 - DNA, 25 bp, Artificial
  probe
  misc_feature (1)..(25): SEQ ID NO: 2929; WAN024G6S_at; Start 1861; Stop 1885
gatcgtatccgcttgacggagcagg

SEQ ID NO: 233427 - DNA, 25 bp, Artificial
  probe
  misc_feature (1)..(25): SEQ ID NO: 2929; WAN024G6S_at; Start 1183; Stop 1207
attgatatgcgacaagactctagcg

SEQ ID NO: 233428 - DNA, 25 bp, Artificial
  probe
  misc_feature (1)..(25): SEQ ID NO: 2929; WAN024G6S_at; Start 1935; Stop 1959
ccttgaaatgctagtatcggcagct

SEQ ID NO: 233429 - DNA, 25 bp, Artificial
  probe
  misc_feature (1)..(25): SEQ ID NO: 2929; WAN024G6S_at; Start 402; Stop 426
tttgacagcccatccaacacaagtg

SEQ ID NO: 233430 - DNA, 25 bp, Artificial
  probe
  misc_feature (1)..(25): SEQ ID NO: 2929; WAN024G6S_at; Start 1918; Stop 1942
gacgccgcttactataaccttgaaa

SEQ ID NO: 233431 - DNA, 25 bp, Artificial
  probe
  misc_feature (1)..(25): SEQ ID NO: 2929; WAN024G6S_at; Start 90; Stop 114
taaaaatatgcttgccccagagacc

SEQ ID NO: 233432 - DNA, 25 bp, Artificial
  probe
  misc_feature (1)..(25): SEQ ID NO: 2929; WAN024G6S_at; Start 1520; Stop 1544
aaagggcgcgtgttcagattgttcc

SEQ ID NO: 233433 - DNA, 25 bp, Artificial
  probe
  misc_feature (1)..(25): SEQ ID NO: 2929; WAN024G6S_at; Start 1203; Stop 1227
tagcgtctatgaagcctgtgtggca

SEQ ID NO: 233434 - DNA, 25 bp, Artificial
  probe
  misc_feature (1)..(25): SEQ ID NO: 2929; WAN024G6S_at; Start 740; Stop 764
taggtggtgaccgtgatggaaatcc

SEQ ID NO: 233435 - DNA, 25 bp, Artificial
  probe
  misc_feature (1)..(25): SEQ ID NO: 2929; WAN024G6S_at; Start 145; Stop 169
tcaacgcaggaagattatcaaggtc

SEQ ID NO: 233436 - DNA, 25 bp, Artificial
  probe
  misc_feature (1)..(25): SEQ ID NO: 2929; WAN024G6S_at; Start 1033; Stop 1057
gggactcgttatgaaaccgccaatg

SEQ ID NO: 233437 - DNA, 25 bp, Artificial
  probe
  misc_feature (1)..(25): SEQ ID NO: 2929; WAN024G6S_at; Start 2019; Stop 2043
cattatggatcaagtagtggaccgt

SEQ ID NO: 233438 - DNA, 25 bp, Artificial
  probe
  misc_feature (1)..(25): SEQ ID NO: 2929; WAN024G6S_at; Start 709; Stop 733
caggctaaaccaatcaccatgggta

SEQ ID NO: 233439 - DNA, 25 bp, Artificial
  probe
  misc_feature (1)..(25): SEQ ID NO: 2929; WAN024G6S_at; Start 659; Stop 683
tgacgacggagtataagcgcttagc

SEQ ID NO: 233440 - DNA, 25 bp, Artificial
  probe
  misc_feature (1)..(25): SEQ ID NO: 2929; WAN024G6S_at; Start 2418; Stop 2442
tgaagacgagcaagttaaggccatc

SEQ ID NO: 233441 - DNA, 25 bp, Artificial
  probe
  misc_feature (1)..(25): SEQ ID NO: 2929; WAN024G6S_at; Start 2199; Stop 2223
cccttgggtattctcatggtcacag

SEQ ID NO: 233442 - DNA, 25 bp, Artificial
  probe
  misc_feature (1)..(25): SEQ ID NO: 2929; WAN024G6S_at; Start 2219; Stop 2243
cacagagtcgtgttatgttccctgg

SEQ ID NO: 233443 - DNA, 25 bp, Artificial
  probe
  misc_feature (1)..(25): SEQ ID NO: 2929; WAN024G6S_at; Start 2135; Stop 2159
ttaatattggttctcgtccagccgc

SEQ ID NO: 233444 - DNA, 25 bp, Artificial
  probe
  misc_feature (1)..(25): SEQ ID NO: 2929; WAN024G6S_at; Start 2101; Stop 2125
ttcgagtcaagtccaatcaaggcta

SEQ ID NO: 233445 - DNA, 25 bp, Artificial
  probe
  misc_feature (1)..(25): SEQ ID NO: 2767; WAN024G6T_at; Start 159; Stop 183
tgtcagtacagactacctattggaa

SEQ ID NO: 233446 - DNA, 25 bp, Artificial
  probe
  misc_feature (1)..(25): SEQ ID NO: 2767; WAN024G6T_at; Start 24; Stop 48
gagggaagatcacgatttgacccaa

SEQ ID NO: 233447 - DNA, 25 bp, Artificial
  probe
  misc_feature (1)..(25): SEQ ID NO: 2767; WAN024G6T_at; Start 157; Stop 181
gatgtcagtacagactacctattgg

SEQ ID NO: 233448 - DNA, 25 bp, Artificial
  probe
  misc_feature (1)..(25): SEQ ID NO: 2767; WAN024G6T_at; Start 127; Stop 151
gatgtattggtaactctctcaaact

SEQ ID NO: 233449 - DNA, 25 bp, Artificial
  probe
  misc_feature (1)..(25): SEQ ID NO: 2767; WAN024G6T_at; Start 147; Stop 171
aaacttttacgatgtcagtacagac

SEQ ID NO: 233450 - DNA, 25 bp, Artificial
  probe
  misc_feature (1)..(25): SEQ ID NO: 2767; WAN024G6T_at; Start 19; Stop 43
gatttgagggaagatcacgatttga

SEQ ID NO: 233451 - DNA, 25 bp, Artificial
  probe
  misc_feature (1)..(25): SEQ ID NO: 2767; WAN024G6T_at; Start 108; Stop 132
tgagcatacgttaacagcagatgta

SEQ ID NO: 233452 - DNA, 25 bp, Artificial
  probe
  misc_feature (1)..(25): SEQ ID NO: 2767; WAN024G6T_at; Start 23; Stop 47
tgagggaagatcacgatttgaccca

SEQ ID NO: 233453 - DNA, 25 bp, Artificial
  probe
  misc_feature (1)..(25): SEQ ID NO: 2767; WAN024G6T_at; Start 119; Stop 143
taacagcagatgtattggtaactct

SEQ ID NO: 233454 - DNA, 25 bp, Artificial
  probe
  misc_feature (1)..(25): SEQ ID NO: 2767; WAN024G6T_at; Start 125; Stop 149
cagatgtattggtaactctctcaaa

SEQ ID NO: 233455 - DNA, 25 bp, Artificial
  probe
  misc_feature (1)..(25): SEQ ID NO: 2767; WAN024G6T_at; Start 21; Stop 45
tttgagggaagatcacgatttgacc

SEQ ID NO: 233456 - DNA, 25 bp, Artificial
  probe
  misc_feature (1)..(25): SEQ ID NO: 2767; WAN024G6T_at; Start 143; Stop 167
tctcaaacttttacgatgtcagtac

SEQ ID NO: 233457 - DNA, 25 bp, Artificial
  probe
  misc_feature (1)..(25): SEQ ID NO: 2767; WAN024G6T_at; Start 122; Stop 146
cagcagatgtattggtaactctctc

SEQ ID NO: 233458 - DNA, 25 bp, Artificial
  probe
  misc_feature (1)..(25): SEQ ID NO: 2767; WAN024G6T_at; Start 172; Stop 196
tacctattggaattgacagattttc

SEQ ID NO: 233459 - DNA, 25 bp, Artificial
  probe
  misc_feature (1)..(25): SEQ ID NO: 2767; WAN024G6T_at; Start 106; Stop 130
ggtgagcatacgttaacagcagatg

SEQ ID NO: 233460 - DNA, 25 bp, Artificial
  probe
  misc_feature (1)..(25): SEQ ID NO: 2767; WAN024G6T_at; Start 136; Stop 160
gtaactctctcaaacttttacgatg

SEQ ID NO: 233461 - DNA, 25 bp, Artificial
  probe
  misc_feature (1)..(25): SEQ ID NO: 2767; WAN024G6T_at; Start 167; Stop 191
cagactacctattggaattgacaga

SEQ ID NO: 233462 - DNA, 25 bp, Artificial
  probe
  misc_feature (1)..(25): SEQ ID NO: 2767; WAN024G6T_at; Start 154; Stop 178
tacgatgtcagtacagactacctat

SEQ ID NO: 233463 - DNA, 25 bp, Artificial
  probe
  misc_feature (1)..(25): SEQ ID NO: 2767; WAN024G6T_at; Start 17; Stop 41
gagatttgagggaagatcacgattt

SEQ ID NO: 233464 - DNA, 25 bp, Artificial
  probe
  misc_feature (1)..(25): SEQ ID NO: 2767; WAN024G6T_at; Start 162; Stop 186
cagtacagactacctattggaattg

SEQ ID NO: 233465 - DNA, 25 bp, Artificial
  probe
  misc_feature (1)..(25): SEQ ID NO: 2767; WAN024G6T_at; Start 145; Stop 169
tcaaacttttacgatgtcagtacag

SEQ ID NO: 233466 - DNA, 25 bp, Artificial
  probe
  misc_feature (1)..(25): SEQ ID NO: 2767; WAN024G6T_at; Start 26; Stop 50
gggaagatcacgatttgacccaaaa

SEQ ID NO: 233467 - DNA, 25 bp, Artificial
  probe
  misc_feature (1)..(25): SEQ ID NO: 2767; WAN024G6T_at; Start 28; Stop 52
gaagatcacgatttgacccaaaaac

SEQ ID NO: 233468 - DNA, 25 bp, Artificial
  probe
  misc_feature (1)..(25): SEQ ID NO: 2767; WAN024G6T_at; Start 169; Stop 193
gactacctattggaattgacagatt

SEQ ID NO: 233469 - DNA, 25 bp, Artificial
  probe
  misc_feature (1)..(25): SEQ ID NO: 2767; WAN024G6T_at; Start 152; Stop 176
tttacgatgtcagtacagactacct

SEQ ID NO: 233470 - DNA, 25 bp, Artificial
  probe
  misc_feature (1)..(25): SEQ ID NO: 2767; WAN024G6T_at; Start 150; Stop 174
cttttacgatgtcagtacagactac

SEQ ID NO: 233471 - DNA, 25 bp, Artificial
  probe
  misc_feature (1)..(25): SEQ ID NO: 2767; WAN024G6T_at; Start 112; Stop 136
catacgttaacagcagatgtattgg

SEQ ID NO: 233472 - DNA, 25 bp, Artificial
  probe
  misc_feature (1)..(25): SEQ ID NO: 2767; WAN024G6T_at; Start 114; Stop 138
tacgttaacagcagatgtattggta

SEQ ID NO: 233473 - DNA, 25 bp, Artificial
  probe
  misc_feature (1)..(25): SEQ ID NO: 2767; WAN024G6T_at; Start 31; Stop 55
gatcacgatttgacccaaaaacaaa

SEQ ID NO: 233474 - DNA, 25 bp, Artificial
  probe
  misc_feature (1)..(25): SEQ ID NO: 2767; WAN024G6T_at; Start 37; Stop 61
gatttgacccaaaaacaaatagcta

SEQ ID NO: 233475 - DNA, 25 bp, Artificial
  probe
  misc_feature (1)..(25): SEQ ID NO: 2767; WAN024G6T_at; Start 176; Stop 200
tattggaattgacagattttcctga

SEQ ID NO: 233476 - DNA, 25 bp, Artificial
  probe
  misc_feature (1)..(25): SEQ ID NO: 2767; WAN024G6T_at; Start 165; Stop 189
tacagactacctattggaattgaca

SEQ ID NO: 233477 - DNA, 25 bp, Artificial
  probe
  misc_feature (1)..(25): SEQ ID NO: 2767; WAN024G6T_at; Start 134; Stop 158
tggtaactctctcaaacttttacga

SEQ ID NO: 233478 - DNA, 25 bp, Artificial
  probe
  misc_feature (1)..(25): SEQ ID NO: 2767; WAN024G6T_at; Start 180; Stop 204
ggaattgacagattttcctgataaa

SEQ ID NO: 233479 - DNA, 25 bp, Artificial
  probe
  misc_feature (1)..(25): SEQ ID NO: 2049; WAN024G6U_at; Start 94; Stop 118
gaagtcatcataagaatttcacttg

SEQ ID NO: 233480 - DNA, 25 bp, Artificial
  probe
  misc_feature (1)..(25): SEQ ID NO: 2049; WAN024G6U_at; Start 172; Stop 196
tgtatcatggcatataaagtatcgc

SEQ ID NO: 233481 - DNA, 25 bp, Artificial
  probe
  misc_feature (1)..(25): SEQ ID NO: 2049; WAN024G6U_at; Start 75; Stop 99
tcaacgtggcatgactgatgaagtc

SEQ ID NO: 233482 - DNA, 25 bp, Artificial
  probe
  misc_feature (1)..(25): SEQ ID NO: 2049; WAN024G6U_at; Start 158; Stop 182
cattgtatatcatttgtatcatggc

SEQ ID NO: 233483 - DNA, 25 bp, Artificial
  probe
  misc_feature (1)..(25): SEQ ID NO: 2049; WAN024G6U_at; Start 180; Stop 204
ggcatataaagtatcgctctatttt

SEQ ID NO: 233484 - DNA, 25 bp, Artificial
  probe
  misc_feature (1)..(25): SEQ ID NO: 2049; WAN024G6U_at; Start 255; Stop 279
ccacaaatgaggaaagtaccatttt

SEQ ID NO: 233485 - DNA, 25 bp, Artificial
  probe
  misc_feature (1)..(25): SEQ ID NO: 2049; WAN024G6U_at; Start 303; Stop 327
caaataaaataatctcctcattttc

SEQ ID NO: 233486 - DNA, 25 bp, Artificial
  probe
  misc_feature (1)..(25): SEQ ID NO: 2049; WAN024G6U_at; Start 76; Stop 100
caacgtggcatgactgatgaagtca

SEQ ID NO: 233487 - DNA, 25 bp, Artificial
  probe
  misc_feature (1)..(25): SEQ ID NO: 2049; WAN024G6U_at; Start 251; Stop 275
tgctccacaaatgaggaaagtacca

SEQ ID NO: 233488 - DNA, 25 bp, Artificial
  probe
  misc_feature (1)..(25): SEQ ID NO: 2049; WAN024G6U_at; Start 142; Stop 166
gaacggtcagaagtatcattgtata

SEQ ID NO: 233489 - DNA, 25 bp, Artificial
  probe
  misc_feature (1)..(25): SEQ ID NO: 2049; WAN024G6U_at; Start 70; Stop 94
cacattcaacgtggcatgactgatg

SEQ ID NO: 233490 - DNA, 25 bp, Artificial
  probe
  misc_feature (1)..(25): SEQ ID NO: 2049; WAN024G6U_at; Start 101; Stop 125
tcataagaatttcacttgctgctct

SEQ ID NO: 233491 - DNA, 25 bp, Artificial
  probe
  misc_feature (1)..(25): SEQ ID NO: 2049; WAN024G6U_at; Start 369; Stop 393
ttatcaggaaaatctgtcaattcca

SEQ ID NO: 233492 - DNA, 25 bp, Artificial
  probe
  misc_feature (1)..(25): SEQ ID NO: 2049; WAN024G6U_at; Start 83; Stop 107
gcatgactgatgaagtcatcataag

SEQ ID NO: 233493 - DNA, 25 bp, Artificial
  probe
  misc_feature (1)..(25): SEQ ID NO: 2049; WAN024G6U_at; Start 67; Stop 91
tcacacattcaacgtggcatgactg

SEQ ID NO: 233494 - DNA, 25 bp, Artificial
  probe
  misc_feature (1)..(25): SEQ ID NO: 2049; WAN024G6U_at; Start 57; Stop 81
tctaacaaactcacacattcaacgt

SEQ ID NO: 233495 - DNA, 25 bp, Artificial
  probe
  misc_feature (1)..(25): SEQ ID NO: 2049; WAN024G6U_at; Start 91; Stop 115
gatgaagtcatcataagaatttcac

SEQ ID NO: 233496 - DNA, 25 bp, Artificial
  probe
  misc_feature (1)..(25): SEQ ID NO: 2049; WAN024G6U_at; Start 107; Stop 131
gaatttcacttgctgctcttttacg

SEQ ID NO: 233497 - DNA, 25 bp, Artificial
  probe
  misc_feature (1)..(25): SEQ ID NO: 2049; WAN024G6U_at; Start 177; Stop 201
catggcatataaagtatcgctctat

SEQ ID NO: 233498 - DNA, 25 bp, Artificial
  probe
  misc_feature (1)..(25): SEQ ID NO: 2049; WAN024G6U_at; Start 373; Stop 397
caggaaaatctgtcaattccaatag

SEQ ID NO: 233499 - DNA, 25 bp, Artificial
  probe
  misc_feature (1)..(25): SEQ ID NO: 2049; WAN024G6U_at; Start 140; Stop 164
ctgaacggtcagaagtatcattgta

SEQ ID NO: 233500 - DNA, 25 bp, Artificial
  probe
  misc_feature (1)..(25): SEQ ID NO: 2049; WAN024G6U_at; Start 2; Stop 26
tgcgtctgtggaactcaaaaggttc

SEQ ID NO: 233501 - DNA, 25 bp, Artificial
  probe
  misc_feature (1)..(25): SEQ ID NO: 2049; WAN024G6U_at; Start 79; Stop 103
cgtggcatgactgatgaagtcatca

SEQ ID NO: 233502 - DNA, 25 bp, Artificial
  probe
  misc_feature (1)..(25): SEQ ID NO: 2049; WAN024G6U_at; Start 145; Stop 169
cggtcagaagtatcattgtatatca

SEQ ID NO: 233503 - DNA, 25 bp, Artificial
  probe
  misc_feature (1)..(25): SEQ ID NO: 2049; WAN024G6U_at; Start 4; Stop 28
cgtctgtggaactcaaaaggttcgg

SEQ ID NO: 233504 - DNA, 25 bp, Artificial
  probe
  misc_feature (1)..(25): SEQ ID NO: 2049; WAN024G6U_at; Start 72; Stop 96
cattcaacgtggcatgactgatgaa

SEQ ID NO: 233505 - DNA, 25 bp, Artificial
  probe
  misc_feature (1)..(25): SEQ ID NO: 2049; WAN024G6U_at; Start 187; Stop 211
aaagtatcgctctattttattgatg

SEQ ID NO: 233506 - DNA, 25 bp, Artificial
  probe
  misc_feature (1)..(25): SEQ ID NO: 2049; WAN024G6U_at; Start 62; Stop 86
caaactcacacattcaacgtggcat

SEQ ID NO: 233507 - DNA, 25 bp, Artificial
  probe
  misc_feature (1)..(25): SEQ ID NO: 2049; WAN024G6U_at; Start 59; Stop 83
taacaaactcacacattcaacgtgg

SEQ ID NO: 233508 - DNA, 25 bp, Artificial
  probe
  misc_feature (1)..(25): SEQ ID NO: 2049; WAN024G6U_at; Start 253; Stop 277
ctccacaaatgaggaaagtaccatt

SEQ ID NO: 233509 - DNA, 25 bp, Artificial
  probe
  misc_feature (1)..(25): SEQ ID NO: 2049; WAN024G6U_at; Start 98; Stop 122
tcatcataagaatttcacttgctgc

SEQ ID NO: 233510 - DNA, 25 bp, Artificial
  probe
  misc_feature (1)..(25): SEQ ID NO: 2049; WAN024G6U_at; Start 174; Stop 198
tatcatggcatataaagtatcgctc

SEQ ID NO: 233511 - DNA, 25 bp, Artificial
  probe
  misc_feature (1)..(25): SEQ ID NO: 2049; WAN024G6U_at; Start 68; Stop 92
cacacattcaacgtggcatgactga

SEQ ID NO: 233512 - DNA, 25 bp, Artificial
  probe
  misc_feature (1)..(25): SEQ ID NO: 2049; WAN024G6U_at; Start 64; Stop 88
aactcacacattcaacgtggcatga

SEQ ID NO: 233513 - DNA, 25 bp, Artificial
  probe
  misc_feature (1)..(25): SEQ ID NO: 6920; WAN024G6V_at; Start 819; Stop 843
cgaaattgcttctagagtaggagga

SEQ ID NO: 233514 - DNA, 25 bp, Artificial
  probe
  misc_feature (1)..(25): SEQ ID NO: 6920; WAN024G6V_at; Start 34; Stop 58
cctagagtttgtgattataaagcga

SEQ ID NO: 233515 - DNA, 25 bp, Artificial
  probe
  misc_feature (1)..(25): SEQ ID NO: 6920; WAN024G6V_at; Start 1041; Stop 1065
tgatgagacctctattgggagaaga

SEQ ID NO: 233516 - DNA, 25 bp, Artificial
  probe
  misc_feature (1)..(25): SEQ ID NO: 6920; WAN024G6V_at; Start 1026; Stop 1050
tgagaaagtgaattttgatgagacc

SEQ ID NO: 233517 - DNA, 25 bp, Artificial
  probe
  misc_feature (1)..(25): SEQ ID NO: 6920; WAN024G6V_at; Start 796; Stop 820
gatggtgagaaggttactttttgcg

SEQ ID NO: 233518 - DNA, 25 bp, Artificial
  probe
  misc_feature (1)..(25): SEQ ID NO: 6920; WAN024G6V_at; Start 953; Stop 977
gaacagcttggataacaattcctcc

SEQ ID NO: 233519 - DNA, 25 bp, Artificial
  probe
  misc_feature (1)..(25): SEQ ID NO: 6920; WAN024G6V_at; Start 762; Stop 786
tcatacaattccttttcatgctgaa

SEQ ID NO: 233520 - DNA, 25 bp, Artificial
  probe
  misc_feature (1)..(25): SEQ ID NO: 6920; WAN024G6V_at; Start 283; Stop 307
ttgggaatatctggacaaaacattg

SEQ ID NO: 233521 - DNA, 25 bp, Artificial
  probe
  misc_feature (1)..(25): SEQ ID NO: 6920; WAN024G6V_at; Start 1113; Stop 1137
tagtggaactgatgaagacgatttg

SEQ ID NO: 233522 - DNA, 25 bp, Artificial
  probe
  misc_feature (1)..(25): SEQ ID NO: 6920; WAN024G6V_at; Start 257; Stop 281
ttttggctgcaaagataagaaagtt

SEQ ID NO: 233523 - DNA, 25 bp, Artificial
  probe
  misc_feature (1)..(25): SEQ ID NO: 6920; WAN024G6V_at; Start 653; Stop 677
ttaaaactaatacaccgctaggctc

SEQ ID NO: 233524 - DNA, 25 bp, Artificial
  probe
  misc_feature (1)..(25): SEQ ID NO: 6920; WAN024G6V_at; Start 3; Stop 27
ggtcaaaatagcaatcatcaatcaa

SEQ ID NO: 233525 - DNA, 25 bp, Artificial
  probe
  misc_feature (1)..(25): SEQ ID NO: 6920; WAN024G6V_at; Start 447; Stop 471
gaaacctagacttggtgcaggatca

SEQ ID NO: 233526 - DNA, 25 bp, Artificial
  probe
  misc_feature (1)..(25): SEQ ID NO: 6920; WAN024G6V_at; Start 1064; Stop 1088
gatatagtggcggtgattatagcgc

SEQ ID NO: 233527 - DNA, 25 bp, Artificial
  probe
  misc_feature (1)..(25): SEQ ID NO: 6920; WAN024G6V_at; Start 1098; Stop 1122
tatagcatatttgattagtggaact

SEQ ID NO: 233528 - DNA, 25 bp, Artificial
  probe
  misc_feature (1)..(25): SEQ ID NO: 6920; WAN024G6V_at; Start 18; Stop 42
catcaatcaattttcacctagagtt

SEQ ID NO: 233529 - DNA, 25 bp, Artificial
  probe
  misc_feature (1)..(25): SEQ ID NO: 6920; WAN024G6V_at; Start 543; Stop 567
aatggttgaaactttcacaaatggg

SEQ ID NO: 233530 - DNA, 25 bp, Artificial
  probe
  misc_feature (1)..(25): SEQ ID NO: 6920; WAN024G6V_at; Start 688; Stop 712
gatgatagcaatcccctttcgagaa

SEQ ID NO: 233531 - DNA, 25 bp, Artificial
  probe
  misc_feature (1)..(25): SEQ ID NO: 6920; WAN024G6V_at; Start 1078; Stop 1102
gattatagcgcttctgctcttatag

SEQ ID NO: 233532 - DNA, 25 bp, Artificial
  probe
  misc_feature (1)..(25): SEQ ID NO: 6920; WAN024G6V_at; Start 433; Stop 457
tatccatttgtagtgaaacctagac

SEQ ID NO: 233533 - DNA, 25 bp, Artificial
  probe
  misc_feature (1)..(25): SEQ ID NO: 6920; WAN024G6V_at; Start 1009; Stop 1033
tataaagattcatgggttgagaaag

SEQ ID NO: 233534 - DNA, 25 bp, Artificial
  probe
  misc_feature (1)..(25): SEQ ID NO: 6920; WAN024G6V_at; Start 460; Stop 484
ggtgcaggatcaattggtgtaacaa

SEQ ID NO: 233535 - DNA, 25 bp, Artificial
  probe
  misc_feature (1)..(25): SEQ ID NO: 6920; WAN024G6V_at; Start 218; Stop 242
catttacctacatagttgcaactca

SEQ ID NO: 233536 - DNA, 25 bp, Artificial
  probe
  misc_feature (1)..(25): SEQ ID NO: 6920; WAN024G6V_at; Start 298; Stop 322
caaaacattgatagtgctaatggct

SEQ ID NO: 233537 - DNA, 25 bp, Artificial
  probe
  misc_feature (1)..(25): SEQ ID NO: 6920; WAN024G6V_at; Start 975; Stop 999
tcctaaagaaggagaattactatct

SEQ ID NO: 233538 - DNA, 25 bp, Artificial
  probe
  misc_feature (1)..(25): SEQ ID NO: 6920; WAN024G6V_at; Start 744; Stop 768
taaaataccgactcctaatcataca

SEQ ID NO: 233539 - DNA, 25 bp, Artificial
  probe
  misc_feature (1)..(25): SEQ ID NO: 6920; WAN024G6V_at; Start 349; Stop 373
tatttagaaaaagcagtatcgttac

SEQ ID NO: 233540 - DNA, 25 bp, Artificial
  probe
  misc_feature (1)..(25): SEQ ID NO: 6920; WAN024G6V_at; Start 836; Stop 860
taggaggagggctgataaatgattc

SEQ ID NO: 233541 - DNA, 25 bp, Artificial
  probe
  misc_feature (1)..(25): SEQ ID NO: 6920; WAN024G6V_at; Start 522; Stop 546
tagtcctctaagtcaaaatttaatg

SEQ ID NO: 233542 - DNA, 25 bp, Artificial
  probe
  misc_feature (1)..(25): SEQ ID NO: 6920; WAN024G6V_at; Start 664; Stop 688
acaccgctaggctcatatatgattg

SEQ ID NO: 233543 - DNA, 25 bp, Artificial
  probe
  misc_feature (1)..(25): SEQ ID NO: 6920; WAN024G6V_at; Start 938; Stop 962
taaaatctgataagagaacagcttg

SEQ ID NO: 233544 - DNA, 25 bp, Artificial
  probe
  misc_feature (1)..(25): SEQ ID NO: 6920; WAN024G6V_at; Start 244; Stop 268
gaatttgatatagttttggctgcaa

SEQ ID NO: 233545 - DNA, 25 bp, Artificial
  probe
  misc_feature (1)..(25): SEQ ID NO: 6920; WAN024G6V_at; Start 361; Stop 385
gcagtatcgttaccaaaatatgctg

SEQ ID NO: 233546 - DNA, 25 bp, Artificial
  probe
  misc_feature (1)..(25): SEQ ID NO: 6920; WAN024G6V_at; Start 701; Stop 725
ccctttcgagaaaattatatgatgc

SEQ ID NO: 233547 - DNA, 25 bp, Artificial
  probe
  misc_feature (1)..(25): SEQ ID NO: 7521; WAN024G6W_at; Start 186; Stop 210
tattaatgctccaatccaaccgtat

SEQ ID NO: 233548 - DNA, 25 bp, Artificial
  probe
  misc_feature (1)..(25): SEQ ID NO: 7521; WAN024G6W_at; Start 14; Stop 38
gctattttgaccataacgcacctcc

SEQ ID NO: 233549 - DNA, 25 bp, Artificial
  probe
  misc_feature (1)..(25): SEQ ID NO: 7521; WAN024G6W_at; Start 7; Stop 31
gatgattgctattttgaccataacg

SEQ ID NO: 233550 - DNA, 25 bp, Artificial
  probe
  misc_feature (1)..(25): SEQ ID NO: 7521; WAN024G6W_at; Start 176; Stop 200
gaagacaagctattaatgctccaat

SEQ ID NO: 233551 - DNA, 25 bp, Artificial
  probe
  misc_feature (1)..(25): SEQ ID NO: 7521; WAN024G6W_at; Start 184; Stop 208
gctattaatgctccaatccaaccgt

SEQ ID NO: 233552 - DNA, 25 bp, Artificial
  probe
  misc_feature (1)..(25): SEQ ID NO: 7521; WAN024G6W_at; Start 27; Stop 51
taacgcacctccatattatttaaaa

SEQ ID NO: 233553 - DNA, 25 bp, Artificial
  probe
  misc_feature (1)..(25): SEQ ID NO: 7521; WAN024G6W_at; Start 114; Stop 138
tctaaaactagcaagatatgtccat

SEQ ID NO: 233554 - DNA, 25 bp, Artificial
  probe
  misc_feature (1)..(25): SEQ ID NO: 7521; WAN024G6W_at; Start 58; Stop 82
aattctcttatcttctcgtatccca

SEQ ID NO: 233555 - DNA, 25 bp, Artificial
  probe
  misc_feature (1)..(25): SEQ ID NO: 7521; WAN024G6W_at; Start 167; Stop 191
gaggccaaagaagacaagctattaa

SEQ ID NO: 233556 - DNA, 25 bp, Artificial
  probe
  misc_feature (1)..(25): SEQ ID NO: 7521; WAN024G6W_at; Start 53; Stop 77
taactaattctcttatcttctcgta

SEQ ID NO: 233557 - DNA, 25 bp, Artificial
  probe
  misc_feature (1)..(25): SEQ ID NO: 7521; WAN024G6W_at; Start 96; Stop 120
taatgccactacaattgctctaaaa

SEQ ID NO: 233558 - DNA, 25 bp, Artificial
  probe
  misc_feature (1)..(25): SEQ ID NO: 7521; WAN024G6W_at; Start 100; Stop 124
gccactacaattgctctaaaactag

SEQ ID NO: 233559 - DNA, 25 bp, Artificial
  probe
  misc_feature (1)..(25): SEQ ID NO: 7521; WAN024G6W_at; Start 66; Stop 90
tatcttctcgtatcccatatacata

SEQ ID NO: 233560 - DNA, 25 bp, Artificial
  probe
  misc_feature (1)..(25): SEQ ID NO: 7521; WAN024G6W_at; Start 170; Stop 194
gccaaagaagacaagctattaatgc

SEQ ID NO: 233561 - DNA, 25 bp, Artificial
  probe
  misc_feature (1)..(25): SEQ ID NO: 7521; WAN024G6W_at; Start 128; Stop 152
gatatgtccataacgtaagtattcc

SEQ ID NO: 233562 - DNA, 25 bp, Artificial
  probe
  misc_feature (1)..(25): SEQ ID NO: 7521; WAN024G6W_at; Start 78; Stop 102
tcccatatacataaatactaatgcc

SEQ ID NO: 233563 - DNA, 25 bp, Artificial
  probe
  misc_feature (1)..(25): SEQ ID NO: 7521; WAN024G6W_at; Start 136; Stop 160
cataacgtaagtattccaaatctac

SEQ ID NO: 233564 - DNA, 25 bp, Artificial
  probe
  misc_feature (1)..(25): SEQ ID NO: 7521; WAN024G6W_at; Start 20; Stop 44
ttgaccataacgcacctccatatta

SEQ ID NO: 233565 - DNA, 25 bp, Artificial
  probe
  misc_feature (1)..(25): SEQ ID NO: 7521; WAN024G6W_at; Start 162; Stop 186
taatagaggccaaagaagacaagct

SEQ ID NO: 233566 - DNA, 25 bp, Artificial
  probe
  misc_feature (1)..(25): SEQ ID NO: 7521; WAN024G6W_at; Start 132; Stop 156
tgtccataacgtaagtattccaaat

SEQ ID NO: 233567 - DNA, 25 bp, Artificial
  probe
  misc_feature (1)..(25): SEQ ID NO: 7521; WAN024G6W_at; Start 152; Stop 176
caaatctacttaatagaggccaaag

SEQ ID NO: 233568 - DNA, 25 bp, Artificial
  probe
  misc_feature (1)..(25): SEQ ID NO: 7521; WAN024G6W_at; Start 147; Stop 171
tattccaaatctacttaatagaggc

SEQ ID NO: 233569 - DNA, 25 bp, Artificial
  probe
  misc_feature (1)..(25): SEQ ID NO: 7521; WAN024G6W_at; Start 112; Stop 136
gctctaaaactagcaagatatgtcc

SEQ ID NO: 233570 - DNA, 25 bp, Artificial
  probe
  misc_feature (1)..(25): SEQ ID NO: 7521; WAN024G6W_at; Start 157; Stop 181
ctacttaatagaggccaaagaagac

SEQ ID NO: 233571 - DNA, 25 bp, Artificial
  probe
  misc_feature (1)..(25): SEQ ID NO: 7521; WAN024G6W_at; Start 10; Stop 34
gattgctattttgaccataacgcac

SEQ ID NO: 233572 - DNA, 25 bp, Artificial
  probe
  misc_feature (1)..(25): SEQ ID NO: 7521; WAN024G6W_at; Start 118; Stop 142
aaactagcaagatatgtccataacg

SEQ ID NO: 233573 - DNA, 25 bp, Artificial
  probe
  misc_feature (1)..(25): SEQ ID NO: 7521; WAN024G6W_at; Start 16; Stop 40
tattttgaccataacgcacctccat

SEQ ID NO: 233574 - DNA, 25 bp, Artificial
  probe
  misc_feature (1)..(25): SEQ ID NO: 7521; WAN024G6W_at; Start 179; Stop 203
gacaagctattaatgctccaatcca

SEQ ID NO: 233575 - DNA, 25 bp, Artificial
  probe
  misc_feature (1)..(25): SEQ ID NO: 7521; WAN024G6W_at; Start 2; Stop 26
tgattgatgattgctattttgacca

SEQ ID NO: 233576 - DNA, 25 bp, Artificial
  probe
  misc_feature (1)..(25): SEQ ID NO: 7521; WAN024G6W_at; Start 189; Stop 213
taatgctccaatccaaccgtattta

SEQ ID NO: 233577 - DNA, 25 bp, Artificial
  probe
  misc_feature (1)..(25): SEQ ID NO: 7521; WAN024G6W_at; Start 192; Stop 216
tgctccaatccaaccgtatttaaaa

SEQ ID NO: 233578 - DNA, 25 bp, Artificial
  probe
  misc_feature (1)..(25): SEQ ID NO: 7521; WAN024G6W_at; Start 165; Stop 189
tagaggccaaagaagacaagctatt

SEQ ID NO: 233579 - DNA, 25 bp, Artificial
  probe
  misc_feature (1)..(25): SEQ ID NO: 7521; WAN024G6W_at; Start 91; Stop 115
aatactaatgccactacaattgctc

SEQ ID NO: 233580 - DNA, 25 bp, Artificial
  probe
  misc_feature (1)..(25): SEQ ID NO: 7521; WAN024G6W_at; Start 122; Stop 146
tagcaagatatgtccataacgtaag

SEQ ID NO: 233581 - DNA, 25 bp, Artificial
  probe
  misc_feature (1)..(25): SEQ ID NO: 6995; WAN024G6X_at; Start 91; Stop 115
tgctcatcagctacagaacatagac

SEQ ID NO: 233582 - DNA, 25 bp, Artificial
  probe
  misc_feature (1)..(25): SEQ ID NO: 6995; WAN024G6X_at; Start 111; Stop 135
tagactaatttgtttgcccttacga

SEQ ID NO: 233583 - DNA, 25 bp, Artificial
  probe
  misc_feature (1)..(25): SEQ ID NO: 6995; WAN024G6X_at; Start 56; Stop 80
cacgttcaaaacgagagatttgcga

SEQ ID NO: 233584 - DNA, 25 bp, Artificial
  probe
  misc_feature (1)..(25): SEQ ID NO: 6995; WAN024G6X_at; Start 9; Stop 33
tttgtctaaaatattgatcagtcga

SEQ ID NO: 233585 - DNA, 25 bp, Artificial
  probe
  misc_feature (1)..(25): SEQ ID NO: 6995; WAN024G6X_at; Start 134; Stop 158
gaatttttctaagtgtgacaccaag

SEQ ID NO: 233586 - DNA, 25 bp, Artificial
  probe
  misc_feature (1)..(25): SEQ ID NO: 6995; WAN024G6X_at; Start 94; Stop 118
tcatcagctacagaacatagactaa

SEQ ID NO: 233587 - DNA, 25 bp, Artificial
  probe
  misc_feature (1)..(25): SEQ ID NO: 6995; WAN024G6X_at; Start 150; Stop 174
gacaccaagttttgatttcatagtt

SEQ ID NO: 233588 - DNA, 25 bp, Artificial
  probe
  misc_feature (1)..(25): SEQ ID NO: 6995; WAN024G6X_at; Start 85; Stop 109
gaaagatgctcatcagctacagaac

SEQ ID NO: 233589 - DNA, 25 bp, Artificial
  probe
  misc_feature (1)..(25): SEQ ID NO: 6995; WAN024G6X_at; Start 77; Stop 101
gcgattttgaaagatgctcatcagc

SEQ ID NO: 233590 - DNA, 25 bp, Artificial
  probe
  misc_feature (1)..(25): SEQ ID NO: 6995; WAN024G6X_at; Start 48; Stop 72
tgattccccacgttcaaaacgagag

SEQ ID NO: 233591 - DNA, 25 bp, Artificial
  probe
  misc_feature (1)..(25): SEQ ID NO: 6995; WAN024G6X_at; Start 139; Stop 163
tttctaagtgtgacaccaagttttg

SEQ ID NO: 233592 - DNA, 25 bp, Artificial
  probe
  misc_feature (1)..(25): SEQ ID NO: 6995; WAN024G6X_at; Start 49; Stop 73
gattccccacgttcaaaacgagaga

SEQ ID NO: 233593 - DNA, 25 bp, Artificial
  probe
  misc_feature (1)..(25): SEQ ID NO: 6995; WAN024G6X_at; Start 89; Stop 113
gatgctcatcagctacagaacatag

SEQ ID NO: 233594 - DNA, 25 bp, Artificial
  probe
  misc_feature (1)..(25): SEQ ID NO: 6995; WAN024G6X_at; Start 58; Stop 82
cgttcaaaacgagagatttgcgatt

SEQ ID NO: 233595 - DNA, 25 bp, Artificial
  probe
  misc_feature (1)..(25): SEQ ID NO: 6995; WAN024G6X_at; Start 79; Stop 103
gattttgaaagatgctcatcagcta

SEQ ID NO: 233596 - DNA, 25 bp, Artificial
  probe
  misc_feature (1)..(25): SEQ ID NO: 6995; WAN024G6X_at; Start 46; Stop 70
tctgattccccacgttcaaaacgag

SEQ ID NO: 233597 - DNA, 25 bp, Artificial
  probe
  misc_feature (1)..(25): SEQ ID NO: 6995; WAN024G6X_at; Start 106; Stop 130
gaacatagactaatttgtttgccct

SEQ ID NO: 233598 - DNA, 25 bp, Artificial
  probe
  misc_feature (1)..(25): SEQ ID NO: 6995; WAN024G6X_at; Start 167; Stop 191
tcatagttttcccattttcccaaca

SEQ ID NO: 233599 - DNA, 25 bp, Artificial
  probe
  misc_feature (1)..(25): SEQ ID NO: 6995; WAN024G6X_at; Start 23; Stop 47
tgatcagtcgaatacaagatatttc

SEQ ID NO: 233600 - DNA, 25 bp, Artificial
  probe
  misc_feature (1)..(25): SEQ ID NO: 6995; WAN024G6X_at; Start 131; Stop 155
tacgaatttttctaagtgtgacacc

SEQ ID NO: 233601 - DNA, 25 bp, Artificial
  probe
  misc_feature (1)..(25): SEQ ID NO: 6995; WAN024G6X_at; Start 40; Stop 64
gatatttctgattccccacgttcaa

SEQ ID NO: 233602 - DNA, 25 bp, Artificial
  probe
  misc_feature (1)..(25): SEQ ID NO: 6995; WAN024G6X_at; Start 98; Stop 122
cagctacagaacatagactaatttg

SEQ ID NO: 233603 - DNA, 25 bp, Artificial
  probe
  misc_feature (1)..(25): SEQ ID NO: 6995; WAN024G6X_at; Start 65; Stop 89
aacgagagatttgcgattttgaaag

SEQ ID NO: 233604 - DNA, 25 bp, Artificial
  probe
  misc_feature (1)..(25): SEQ ID NO: 6995; WAN024G6X_at; Start 67; Stop 91
cgagagatttgcgattttgaaagat

SEQ ID NO: 233605 - DNA, 25 bp, Artificial
  probe
  misc_feature (1)..(25): SEQ ID NO: 6995; WAN024G6X_at; Start 16; Stop 40
aaaatattgatcagtcgaatacaag

SEQ ID NO: 233606 - DNA, 25 bp, Artificial
  probe
  misc_feature (1)..(25): SEQ ID NO: 6995; WAN024G6X_at; Start 13; Stop 37
tctaaaatattgatcagtcgaatac

SEQ ID NO: 233607 - DNA, 25 bp, Artificial
  probe
  misc_feature (1)..(25): SEQ ID NO: 6995; WAN024G6X_at; Start 145; Stop 169
agtgtgacaccaagttttgatttca

SEQ ID NO: 233608 - DNA, 25 bp, Artificial
  probe
  misc_feature (1)..(25): SEQ ID NO: 6995; WAN024G6X_at; Start 37; Stop 61
caagatatttctgattccccacgtt

SEQ ID NO: 233609 - DNA, 25 bp, Artificial
  probe
  misc_feature (1)..(25): SEQ ID NO: 6995; WAN024G6X_at; Start 53; Stop 77
ccccacgttcaaaacgagagatttg

SEQ ID NO: 233610 - DNA, 25 bp, Artificial
  probe
  misc_feature (1)..(25): SEQ ID NO: 6995; WAN024G6X_at; Start 142; Stop 166
ctaagtgtgacaccaagttttgatt

SEQ ID NO: 233611 - DNA, 25 bp, Artificial
  probe
  misc_feature (1)..(25): SEQ ID NO: 6995; WAN024G6X_at; Start 82; Stop 106
tttgaaagatgctcatcagctacag

SEQ ID NO: 233612 - DNA, 25 bp, Artificial
  probe
  misc_feature (1)..(25): SEQ ID NO: 6995; WAN024G6X_at; Start 72; Stop 96
gatttgcgattttgaaagatgctca

SEQ ID NO: 233613 - DNA, 25 bp, Artificial
  probe
  misc_feature (1)..(25): SEQ ID NO: 6995; WAN024G6X_at; Start 162; Stop 186
tgatttcatagttttcccattttcc

SEQ ID NO: 233614 - DNA, 25 bp, Artificial
  probe
  misc_feature (1)..(25): SEQ ID NO: 6995; WAN024G6X_at; Start 35; Stop 59
tacaagatatttctgattccccacg

SEQ ID NO: 233615 - DNA, 25 bp, Artificial
  probe
  misc_feature (1)..(25): SEQ ID NO: 7413; WAN024G6Y_s_at; Start 3; Stop 27
gaaattttcttcatacttggacttc

SEQ ID NO: 233616 - DNA, 25 bp, Artificial
  probe
  misc_feature (1)..(25): SEQ ID NO: 7413; WAN024G6Y_s_at; Start 1; Stop 25
ttgaaattttcttcatacttggact

SEQ ID NO: 233617 - DNA, 25 bp, Artificial
  probe
  misc_feature (1)..(25): SEQ ID NO: 7413; WAN024G6Y_s_at; Start 9; Stop 33
ttcttcatacttggacttcctttcc

SEQ ID NO: 233618 - DNA, 25 bp, Artificial
  probe
  misc_feature (1)..(25): SEQ ID NO: 7413; WAN024G6Y_s_at; Start 8; Stop 32
tttcttcatacttggacttcctttc

SEQ ID NO: 233619 - DNA, 25 bp, Artificial
  probe
  misc_feature (1)..(25): SEQ ID NO: 7413; WAN024G6Y_s_at; Start 11; Stop 35
cttcatacttggacttcctttccgt

SEQ ID NO: 233620 - DNA, 25 bp, Artificial
  probe
  misc_feature (1)..(25): SEQ ID NO: 7413; WAN024G6Y_s_at; Start 5; Stop 29
aattttcttcatacttggacttcct

SEQ ID NO: 233621 - DNA, 25 bp, Artificial
  probe
  misc_feature (1)..(25): SEQ ID NO: 7413; WAN024G6Y_s_at; Start 10; Stop 34
tcttcatacttggacttcctttccg

SEQ ID NO: 233622 - DNA, 25 bp, Artificial
  probe
  misc_feature (1)..(25): SEQ ID NO: 7413; WAN024G6Y_s_at; Start 6; Stop 30
attttcttcatacttggacttcctt

SEQ ID NO: 233623 - DNA, 25 bp, Artificial
  probe
  misc_feature (1)..(25): SEQ ID NO: 7413; WAN024G6Y_s_at; Start 2; Stop 26
tgaaattttcttcatacttggactt

SEQ ID NO: 233624 - DNA, 25 bp, Artificial
  probe
  misc_feature (1)..(25): SEQ ID NO: 6890; WAN024G6Z_at; Start 654; Stop 678
taatgagataaagggattgttagag

SEQ ID NO: 233625 - DNA, 25 bp, Artificial
  probe
  misc_feature (1)..(25): SEQ ID NO: 6890; WAN024G6Z_at; Start 818; Stop 842
aattacactatactagccattttga

SEQ ID NO: 233626 - DNA, 25 bp, Artificial
  probe
  misc_feature (1)..(25): SEQ ID NO: 6890; WAN024G6Z_at; Start 47; Stop 71
ttcgtaaaggcaaacaaatcagtct

SEQ ID NO: 233627 - DNA, 25 bp, Artificial
  probe
  misc_feature (1)..(25): SEQ ID NO: 6890; WAN024G6Z_at; Start 739; Stop 763
aaacgtcaattaagtagtggtattg

SEQ ID NO: 233628 - DNA, 25 bp, Artificial
  probe
  misc_feature (1)..(25): SEQ ID NO: 6890; WAN024G6Z_at; Start 583; Stop 607
actcagctagctataaattgtttca

SEQ ID NO: 233629 - DNA, 25 bp, Artificial
  probe
  misc_feature (1)..(25): SEQ ID NO: 6890; WAN024G6Z_at; Start 596; Stop 620
taaattgtttcattctcagcataga

SEQ ID NO: 233630 - DNA, 25 bp, Artificial
  probe
  misc_feature (1)..(25): SEQ ID NO: 6890; WAN024G6Z_at; Start 253; Stop 277
cagtatatccgtaaacaatattcat

SEQ ID NO: 233631 - DNA, 25 bp, Artificial
  probe
  misc_feature (1)..(25): SEQ ID NO: 6890; WAN024G6Z_at; Start 573; Stop 597
gcggattgtcactcagctagctata

SEQ ID NO: 233632 - DNA, 25 bp, Artificial
  probe
  misc_feature (1)..(25): SEQ ID NO: 6890; WAN024G6Z_at; Start 756; Stop 780
tggtattgaaacaatgaaacaagct

SEQ ID NO: 233633 - DNA, 25 bp, Artificial
  probe
  misc_feature (1)..(25): SEQ ID NO: 6890; WAN024G6Z_at; Start 193; Stop 217
gagtttcttattttacacgatgaag

SEQ ID NO: 233634 - DNA, 25 bp, Artificial
  probe
  misc_feature (1)..(25): SEQ ID NO: 6890; WAN024G6Z_at; Start 176; Stop 200
tacacattactttggatgagtttct

SEQ ID NO: 233635 - DNA, 25 bp, Artificial
  probe
  misc_feature (1)..(25): SEQ ID NO: 6890; WAN024G6Z_at; Start 231; Stop 255
tgagtcatttgccaacttaatacag

SEQ ID NO: 233636 - DNA, 25 bp, Artificial
  probe
  misc_feature (1)..(25): SEQ ID NO: 6890; WAN024G6Z_at; Start 311; Stop 335
cggattcctcaaattacactttaga

SEQ ID NO: 233637 - DNA, 25 bp, Artificial
  probe
  misc_feature (1)..(25): SEQ ID NO: 6890; WAN024G6Z_at; Start 76; Stop 100
tctgttgctgatgagcatctttcaa

SEQ ID NO: 233638 - DNA, 25 bp, Artificial
  probe
  misc_feature (1)..(25): SEQ ID NO: 6890; WAN024G6Z_at; Start 127; Stop 151
ggagagtcagagatatcatgtatcc

SEQ ID NO: 233639 - DNA, 25 bp, Artificial
  probe
  misc_feature (1)..(25): SEQ ID NO: 6890; WAN024G6Z_at; Start 421; Stop 445
gcagattatctctttaaagttgaaa

SEQ ID NO: 233640 - DNA, 25 bp, Artificial
  probe
  misc_feature (1)..(25): SEQ ID NO: 6890; WAN024G6Z_at; Start 298; Stop 322
caatctctactttcggattcctcaa

SEQ ID NO: 233641 - DNA, 25 bp, Artificial
  probe
  misc_feature (1)..(25): SEQ ID NO: 6890; WAN024G6Z_at; Start 113; Stop 137
cccgatttgaacgtggagagtcaga

SEQ ID NO: 233642 - DNA, 25 bp, Artificial
  probe
  misc_feature (1)..(25): SEQ ID NO: 6890; WAN024G6Z_at; Start 289; Stop 313
aataatatacaatctctactttcgg

SEQ ID NO: 233643 - DNA, 25 bp, Artificial
  probe
  misc_feature (1)..(25): SEQ ID NO: 6890; WAN024G6Z_at; Start 210; Stop 234
cgatgaagactatacaaaaactgag

SEQ ID NO: 233644 - DNA, 25 bp, Artificial
  probe
  misc_feature (1)..(25): SEQ ID NO: 6890; WAN024G6Z_at; Start 394; Stop 418
ccatcagatgatgaattacttcaac

SEQ ID NO: 233645 - DNA, 25 bp, Artificial
  probe
  misc_feature (1)..(25): SEQ ID NO: 6890; WAN024G6Z_at; Start 566; Stop 590
caaataagcggattgtcactcagct

SEQ ID NO: 233646 - DNA, 25 bp, Artificial
  probe
  misc_feature (1)..(25): SEQ ID NO: 6890; WAN024G6Z_at; Start 667; Stop 691
ggattgttagagaatgaattaaact

SEQ ID NO: 233647 - DNA, 25 bp, Artificial
  probe
  misc_feature (1)..(25): SEQ ID NO: 6890; WAN024G6Z_at; Start 105; Stop 129
gcaaatatcccgatttgaacgtgga

SEQ ID NO: 233648 - DNA, 25 bp, Artificial
  probe
  misc_feature (1)..(25): SEQ ID NO: 6890; WAN024G6Z_at; Start 771; Stop 795
gaaacaagctatacaagttctcgat

SEQ ID NO: 233649 - DNA, 25 bp, Artificial
  probe
  misc_feature (1)..(25): SEQ ID NO: 6890; WAN024G6Z_at; Start 241; Stop 265
gccaacttaatacagtatatccgta

SEQ ID NO: 233650 - DNA, 25 bp, Artificial
  probe
  misc_feature (1)..(25): SEQ ID NO: 6890; WAN024G6Z_at; Start 611; Stop 635
tcagcatagataaagaagaattttc

SEQ ID NO: 233651 - DNA, 25 bp, Artificial
  probe
  misc_feature (1)..(25): SEQ ID NO: 6890; WAN024G6Z_at; Start 26; Stop 50
ttggcatcacacttagaaaagttcg

SEQ ID NO: 233652 - DNA, 25 bp, Artificial
  probe
  misc_feature (1)..(25): SEQ ID NO: 6890; WAN024G6Z_at; Start 377; Stop 401
tggattcaagaatcattccatcaga

SEQ ID NO: 233653 - DNA, 25 bp, Artificial
  probe
  misc_feature (1)..(25): SEQ ID NO: 6890; WAN024G6Z_at; Start 61; Stop 85
caaatcagtctatgctctgttgctg

SEQ ID NO: 233654 - DNA, 25 bp, Artificial
  probe
  misc_feature (1)..(25): SEQ ID NO: 6890; WAN024G6Z_at; Start 553; Stop 577
tctctaaataaaacaaataagcgga

SEQ ID NO: 233655 - DNA, 25 bp, Artificial
  probe
  misc_feature (1)..(25): SEQ ID NO: 6890; WAN024G6Z_at; Start 831; Stop 855
tagccattttgataaacttgtaaac

SEQ ID NO: 233656 - DNA, 25 bp, Artificial
  probe
  misc_feature (1)..(25): SEQ ID NO: 6890; WAN024G6Z_at; Start 222; Stop 246
tacaaaaactgagtcatttgccaac

SEQ ID NO: 233657 - DNA, 25 bp, Artificial
  probe
  misc_feature (1)..(25): SEQ ID NO: 6890; WAN024G6Z_at; Start 406; Stop 430
gaattacttcaactagcagattatc

SEQ ID NO: 233658 - DNA, 25 bp, Artificial
  probe
  misc_feature (1)..(25): SEQ ID NO: 6649; WAN024G72_at; Start 13; Stop 37
tccatcaccaaaaccaaaatcggta

SEQ ID NO: 233659 - DNA, 25 bp, Artificial
  probe
  misc_feature (1)..(25): SEQ ID NO: 6649; WAN024G72_at; Start 5; Stop 29
tgataatatccatcaccaaaaccaa

SEQ ID NO: 233660 - DNA, 25 bp, Artificial
  probe
  misc_feature (1)..(25): SEQ ID NO: 6649; WAN024G72_at; Start 7; Stop 31
ataatatccatcaccaaaaccaaaa

SEQ ID NO: 233661 - DNA, 25 bp, Artificial
  probe
  misc_feature (1)..(25): SEQ ID NO: 6649; WAN024G72_at; Start 1; Stop 25
atgatgataatatccatcaccaaaa

SEQ ID NO: 233662 - DNA, 25 bp, Artificial
  probe
  misc_feature (1)..(25): SEQ ID NO: 6649; WAN024G72_at; Start 2; Stop 26
tgatgataatatccatcaccaaaac

SEQ ID NO: 233663 - DNA, 25 bp, Artificial
  probe
  misc_feature (1)..(25): SEQ ID NO: 6649; WAN024G72_at; Start 12; Stop 36
atccatcaccaaaaccaaaatcggt

SEQ ID NO: 233664 - DNA, 25 bp, Artificial
  probe
  misc_feature (1)..(25): SEQ ID NO: 6649; WAN024G72_at; Start 3; Stop 27
gatgataatatccatcaccaaaacc

SEQ ID NO: 233665 - DNA, 25 bp, Artificial
  probe
  misc_feature (1)..(25): SEQ ID NO: 6649; WAN024G72_at; Start 10; Stop 34
atatccatcaccaaaaccaaaatcg

SEQ ID NO: 233666 - DNA, 25 bp, Artificial
  probe
  misc_feature (1)..(25): SEQ ID NO: 6649; WAN024G72_at; Start 11; Stop 35
tatccatcaccaaaaccaaaatcgg

SEQ ID NO: 233667 - DNA, 25 bp, Artificial
  probe
  misc_feature (1)..(25): SEQ ID NO: 6649; WAN024G72_at; Start 4; Stop 28
atgataatatccatcaccaaaacca

SEQ ID NO: 233668 - DNA, 25 bp, Artificial
  probe
  misc_feature (1)..(25): SEQ ID NO: 6649; WAN024G72_at; Start 8; Stop 32
taatatccatcaccaaaaccaaaat

SEQ ID NO: 233669 - DNA, 25 bp, Artificial
  probe
  misc_feature (1)..(25): SEQ ID NO: 6649; WAN024G72_at; Start 6; Stop 30
gataatatccatcaccaaaaccaaa

SEQ ID NO: 233670 - DNA, 25 bp, Artificial
  probe
  misc_feature (1)..(25): SEQ ID NO: 6649; WAN024G72_at; Start 9; Stop 33
aatatccatcaccaaaaccaaaatc

SEQ ID NO: 233671 - DNA, 25 bp, Artificial
  probe
  misc_feature (1)..(25): SEQ ID NO: 945; WAN024G73_at; Start 567; Stop 591
tgtctctcagcttgctattaattgc

SEQ ID NO: 233672 - DNA, 25 bp, Artificial
  probe
  misc_feature (1)..(25): SEQ ID NO: 945; WAN024G73_at; Start 599; Stop 623
taagcattgataaggaagaattttc

SEQ ID NO: 233673 - DNA, 25 bp, Artificial
  probe
  misc_feature (1)..(25): SEQ ID NO: 945; WAN024G73_at; Start 539; Stop 563
catctctgaataaaactaataagca

SEQ ID NO: 233674 - DNA, 25 bp, Artificial
  probe
  misc_feature (1)..(25): SEQ ID NO: 945; WAN024G73_at; Start 319; Stop 343
ctaaattcttttgagaaaacaatgg

SEQ ID NO: 233675 - DNA, 25 bp, Artificial
  probe
  misc_feature (1)..(25): SEQ ID NO: 945; WAN024G73_at; Start 641; Stop 665
ttagtaagataaagacattgttgga

SEQ ID NO: 233676 - DNA, 25 bp, Artificial
  probe
  misc_feature (1)..(25): SEQ ID NO: 945; WAN024G73_at; Start 553; Stop 577
actaataagcagattgtctctcagc

SEQ ID NO: 233677 - DNA, 25 bp, Artificial
  probe
  misc_feature (1)..(25): SEQ ID NO: 945; WAN024G73_at; Start 590; Stop 614
gcttcattctaagcattgataagga

SEQ ID NO: 233678 - DNA, 25 bp, Artificial
  probe
  misc_feature (1)..(25): SEQ ID NO: 945; WAN024G73_at; Start 309; Stop 333
tgattacactctaaattcttttgag

SEQ ID NO: 233679 - DNA, 25 bp, Artificial
  probe
  misc_feature (1)..(25): SEQ ID NO: 945; WAN024G73_at; Start 408; Stop 432
gacagactatcttttcaaaattgaa

SEQ ID NO: 233680 - DNA, 25 bp, Artificial
  probe
  misc_feature (1)..(25): SEQ ID NO: 945; WAN024G73_at; Start 562; Stop 586
cagattgtctctcagcttgctatta

SEQ ID NO: 233681 - DNA, 25 bp, Artificial
  probe
  misc_feature (1)..(25): SEQ ID NO: 945; WAN024G73_at; Start 379; Stop 403
attccatcagatgaagagcttcttc

SEQ ID NO: 233682 - DNA, 25 bp, Artificial
  probe
  misc_feature (1)..(25): SEQ ID NO: 945; WAN024G73_at; Start 403; Stop 427
catctgacagactatcttttcaaaa

SEQ ID NO: 233683 - DNA, 25 bp, Artificial
  probe
  misc_feature (1)..(25): SEQ ID NO: 945; WAN024G73_at; Start 358; Stop 382
cacacaatggattcgaacatcattc

SEQ ID NO: 233684 - DNA, 25 bp, Artificial
  probe
  misc_feature (1)..(25): SEQ ID NO: 945; WAN024G73_at; Start 287; Stop 311
catgtctactttctgatacttctga

SEQ ID NO: 233685 - DNA, 25 bp, Artificial
  probe
  misc_feature (1)..(25): SEQ ID NO: 945; WAN024G73_at; Start 571; Stop 595
tctcagcttgctattaattgcttca

SEQ ID NO: 233686 - DNA, 25 bp, Artificial
  probe
  misc_feature (1)..(25): SEQ ID NO: 945; WAN024G73_at; Start 315; Stop 339
cactctaaattcttttgagaaaaca

SEQ ID NO: 233687 - DNA, 25 bp, Artificial
  probe
  misc_feature (1)..(25): SEQ ID NO: 945; WAN024G73_at; Start 293; Stop 317
tactttctgatacttctgattacac

SEQ ID NO: 233688 - DNA, 25 bp, Artificial
  probe
  misc_feature (1)..(25): SEQ ID NO: 945; WAN024G73_at; Start 558; Stop 582
taagcagattgtctctcagcttgct

SEQ ID NO: 233689 - DNA, 25 bp, Artificial
  probe
  misc_feature (1)..(25): SEQ ID NO: 945; WAN024G73_at; Start 624; Stop 648
taattgctcctatttaattagtaag

SEQ ID NO: 233690 - DNA, 25 bp, Artificial
  probe
  misc_feature (1)..(25): SEQ ID NO: 945; WAN024G73_at; Start 275; Stop 299
tcaataatatagcatgtctactttc

SEQ ID NO: 233691 - DNA, 25 bp, Artificial
  probe
  misc_feature (1)..(25): SEQ ID NO: 945; WAN024G73_at; Start 594; Stop 618
cattctaagcattgataaggaagaa

SEQ ID NO: 233692 - DNA, 25 bp, Artificial
  probe
  misc_feature (1)..(25): SEQ ID NO: 945; WAN024G73_at; Start 654; Stop 678
gacattgttggataatgaactaaac

SEQ ID NO: 233693 - DNA, 25 bp, Artificial
  probe
  misc_feature (1)..(25): SEQ ID NO: 945; WAN024G73_at; Start 663; Stop 687
ggataatgaactaaacttttatgaa

SEQ ID NO: 233694 - DNA, 25 bp, Artificial
  probe
  misc_feature (1)..(25): SEQ ID NO: 945; WAN024G73_at; Start 256; Stop 280
caatattcatcacaaagtatcaata

SEQ ID NO: 233695 - DNA, 25 bp, Artificial
  probe
  misc_feature (1)..(25): SEQ ID NO: 945; WAN024G73_at; Start 440; Stop 464
gctattatgaaatcattttattagg

SEQ ID NO: 233696 - DNA, 25 bp, Artificial
  probe
  misc_feature (1)..(25): SEQ ID NO: 945; WAN024G73_at; Start 299; Stop 323
ctgatacttctgattacactctaaa

SEQ ID NO: 233697 - DNA, 25 bp, Artificial
  probe
  misc_feature (1)..(25): SEQ ID NO: 945; WAN024G73_at; Start 366; Stop 390
ggattcgaacatcattccatcagat

SEQ ID NO: 233698 - DNA, 25 bp, Artificial
  probe
  misc_feature (1)..(25): SEQ ID NO: 945; WAN024G73_at; Start 284; Stop 308
tagcatgtctactttctgatacttc

SEQ ID NO: 233699 - DNA, 25 bp, Artificial
  probe
  misc_feature (1)..(25): SEQ ID NO: 945; WAN024G73_at; Start 650; Stop 674
taaagacattgttggataatgaact

SEQ ID NO: 233700 - DNA, 25 bp, Artificial
  probe
  misc_feature (1)..(25): SEQ ID NO: 945; WAN024G73_at; Start 546; Stop 570
gaataaaactaataagcagattgtc

SEQ ID NO: 233701 - DNA, 25 bp, Artificial
  probe
  misc_feature (1)..(25): SEQ ID NO: 945; WAN024G73_at; Start 576; Stop 600
gcttgctattaattgcttcattcta

SEQ ID NO: 233702 - DNA, 25 bp, Artificial
  probe
  misc_feature (1)..(25): SEQ ID NO: 945; WAN024G73_at; Start 391; Stop 415
gaagagcttcttcatctgacagact

SEQ ID NO: 233703 - DNA, 25 bp, Artificial
  probe
  misc_feature (1)..(25): SEQ ID NO: 945; WAN024G73_at; Start 394; Stop 418
gagcttcttcatctgacagactatc

SEQ ID NO: 233704 - DNA, 25 bp, Artificial
  probe
  misc_feature (1)..(25): SEQ ID NO: 945; WAN024G73_at; Start 268; Stop 292
caaagtatcaataatatagcatgtc

SEQ ID NO: 233705 - DNA, 25 bp, Artificial
  probe
  misc_feature (1)..(25): SEQ ID NO: 5174; WAN024G74_at; Start 145; Stop 169
gaatcctatatcgaagagttgacac

SEQ ID NO: 233706 - DNA, 25 bp, Artificial
  probe
  misc_feature (1)..(25): SEQ ID NO: 5174; WAN024G74_at; Start 531; Stop 555
gaaagagcgtatcctatttttagga

SEQ ID NO: 233707 - DNA, 25 bp, Artificial
  probe
  misc_feature (1)..(25): SEQ ID NO: 5174; WAN024G74_at; Start 817; Stop 841
tcaatcacacaaatctatactcacg

SEQ ID NO: 233708 - DNA, 25 bp, Artificial
  probe
  misc_feature (1)..(25): SEQ ID NO: 5174; WAN024G74_at; Start 434; Stop 458
tactttcaacaggtatcagaatttc

SEQ ID NO: 233709 - DNA, 25 bp, Artificial
  probe
  misc_feature (1)..(25): SEQ ID NO: 5174; WAN024G74_at; Start 317; Stop 341
cgattccgtatgatattctgaaaaa

SEQ ID NO: 233710 - DNA, 25 bp, Artificial
  probe
  misc_feature (1)..(25): SEQ ID NO: 5174; WAN024G74_at; Start 686; Stop 710
gaatcgttgaacaaaatggcttatc

SEQ ID NO: 233711 - DNA, 25 bp, Artificial
  probe
  misc_feature (1)..(25): SEQ ID NO: 5174; WAN024G74_at; Start 498; Stop 522
caataagacactccatattatagga

SEQ ID NO: 233712 - DNA, 25 bp, Artificial
  probe
  misc_feature (1)..(25): SEQ ID NO: 5174; WAN024G74_at; Start 650; Stop 674
cattgtcagagcaaagtgtacgttt

SEQ ID NO: 233713 - DNA, 25 bp, Artificial
  probe
  misc_feature (1)..(25): SEQ ID NO: 5174; WAN024G74_at; Start 346; Stop 370
ttttcatatttagagcagagagtag

SEQ ID NO: 233714 - DNA, 25 bp, Artificial
  probe
  misc_feature (1)..(25): SEQ ID NO: 5174; WAN024G74_at; Start 703; Stop 727
ggcttatctaaaactattacaccac

SEQ ID NO: 233715 - DNA, 25 bp, Artificial
  probe
  misc_feature (1)..(25): SEQ ID NO: 5174; WAN024G74_at; Start 623; Stop 647
tattcccaggaaaacattcgcctaa

SEQ ID NO: 233716 - DNA, 25 bp, Artificial
  probe
  misc_feature (1)..(25): SEQ ID NO: 5174; WAN024G74_at; Start 637; Stop 661
cattcgcctaaaccattgtcagagc

SEQ ID NO: 233717 - DNA, 25 bp, Artificial
  probe
  misc_feature (1)..(25): SEQ ID NO: 5174; WAN024G74_at; Start 226; Stop 250
tataactatctaaaataccagcaca

SEQ ID NO: 233718 - DNA, 25 bp, Artificial
  probe
  misc_feature (1)..(25): SEQ ID NO: 5174; WAN024G74_at; Start 547; Stop 571
tttttaggagatcaaacaaccttca

SEQ ID NO: 233719 - DNA, 25 bp, Artificial
  probe
  misc_feature (1)..(25): SEQ ID NO: 5174; WAN024G74_at; Start 243; Stop 267
ccagcacataattgaagagaatccc

SEQ ID NO: 233720 - DNA, 25 bp, Artificial
  probe
  misc_feature (1)..(25): SEQ ID NO: 5174; WAN024G74_at; Start 128; Stop 152
caaactatgataatgtcgaatccta

SEQ ID NO: 233721 - DNA, 25 bp, Artificial
  probe
  misc_feature (1)..(25): SEQ ID NO: 5174; WAN024G74_at; Start 274; Stop 298
caattacgctttcaatttagaactg

SEQ ID NO: 233722 - DNA, 25 bp, Artificial
  probe
  misc_feature (1)..(25): SEQ ID NO: 5174; WAN024G74_at; Start 888; Stop 912
gtcagtgattcattctgaaatcgag

SEQ ID NO: 233723 - DNA, 25 bp, Artificial
  probe
  misc_feature (1)..(25): SEQ ID NO: 5174; WAN024G74_at; Start 383; Stop 407
ctgactatcaaaaacaaaaagctga

SEQ ID NO: 233724 - DNA, 25 bp, Artificial
  probe
  misc_feature (1)..(25): SEQ ID NO: 5174; WAN024G74_at; Start 720; Stop 744
tacaccacatatgtttagacatagc

SEQ ID NO: 233725 - DNA, 25 bp, Artificial
  probe
  misc_feature (1)..(25): SEQ ID NO: 5174; WAN024G74_at; Start 63; Stop 87
tcataagcgtttgagttcacacacg

SEQ ID NO: 233726 - DNA, 25 bp, Artificial
  probe
  misc_feature (1)..(25): SEQ ID NO: 5174; WAN024G74_at; Start 303; Stop 327
aatattgcctaaaacgattccgtat

SEQ ID NO: 233727 - DNA, 25 bp, Artificial
  probe
  misc_feature (1)..(25): SEQ ID NO: 5174; WAN024G74_at; Start 608; Stop 632
aatctaatgatttcctattcccagg

SEQ ID NO: 233728 - DNA, 25 bp, Artificial
  probe
  misc_feature (1)..(25): SEQ ID NO: 5174; WAN024G74_at; Start 47; Stop 71
tagattattgcaaaactcataagcg

SEQ ID NO: 233729 - DNA, 25 bp, Artificial
  probe
  misc_feature (1)..(25): SEQ ID NO: 5174; WAN024G74_at; Start 733; Stop 757
tttagacatagctttgcaacaatgc

SEQ ID NO: 233730 - DNA, 25 bp, Artificial
  probe
  misc_feature (1)..(25): SEQ ID NO: 5174; WAN024G74_at; Start 259; Stop 283
gagaatcccttcaatcaattacgct

SEQ ID NO: 233731 - DNA, 25 bp, Artificial
  probe
  misc_feature (1)..(25): SEQ ID NO: 5174; WAN024G74_at; Start 162; Stop 186
gttgacacaatctaacataaaaacg

SEQ ID NO: 233732 - DNA, 25 bp, Artificial
  probe
  misc_feature (1)..(25): SEQ ID NO: 5174; WAN024G74_at; Start 71; Stop 95
gtttgagttcacacacgattcgagc

SEQ ID NO: 233733 - DNA, 25 bp, Artificial
  probe
  misc_feature (1)..(25): SEQ ID NO: 5174; WAN024G74_at; Start 802; Stop 826
ggacacagttctatatcaatcacac

SEQ ID NO: 233734 - DNA, 25 bp, Artificial
  probe
  misc_feature (1)..(25): SEQ ID NO: 5174; WAN024G74_at; Start 870; Stop 894
tagttctttcaatcctatgtcagtg

SEQ ID NO: 233735 - DNA, 25 bp, Artificial
  probe
  misc_feature (1)..(25): SEQ ID NO: 5174; WAN024G74_at; Start 748; Stop 772
gcaacaatgcttctagataatgatg

SEQ ID NO: 233736 - DNA, 25 bp, Artificial
  probe
  misc_feature (1)..(25): SEQ ID NO: 5174; WAN024G74_at; Start 82; Stop 106
cacacgattcgagcttataagaatg

SEQ ID NO: 233737 - DNA, 25 bp, Artificial
  probe
  misc_feature (1)..(25): SEQ ID NO: 5174; WAN024G74_at; Start 786; Stop 810
tattcaacaaattcttggacacagt

SEQ ID NO: 233738 - DNA, 25 bp, Artificial
  probe
  misc_feature (1)..(25): SEQ ID NO: 5174; WAN024G74_at; Start 838; Stop 862
cacgtatctcattcaaaacaaaaag

SEQ ID NO: 233739 - DNA, 25 bp, Artificial
  probe
  misc_feature (1)..(25): SEQ ID NO: 7015; WAN024G75_at; Start 10; Stop 34
tggtcaaaatcatacttagctaatt

SEQ ID NO: 233740 - DNA, 25 bp, Artificial
  probe
  misc_feature (1)..(25): SEQ ID NO: 7015; WAN024G75_at; Start 150; Stop 174
tacaagctcatctttgatttcttgg

SEQ ID NO: 233741 - DNA, 25 bp, Artificial
  probe
  misc_feature (1)..(25): SEQ ID NO: 7015; WAN024G75_at; Start 181; Stop 205
ttgttcgtgttagatagttcaatca

SEQ ID NO: 233742 - DNA, 25 bp, Artificial
  probe
  misc_feature (1)..(25): SEQ ID NO: 7015; WAN024G75_at; Start 31; Stop 55
aattttctaccgatctcatcttcac

SEQ ID NO: 233743 - DNA, 25 bp, Artificial
  probe
  misc_feature (1)..(25): SEQ ID NO: 7015; WAN024G75_at; Start 110; Stop 134
gggtttcttctagcttcatatcaat

SEQ ID NO: 233744 - DNA, 25 bp, Artificial
  probe
  misc_feature (1)..(25): SEQ ID NO: 7015; WAN024G75_at; Start 58; Stop 82
ttcaaattgataaggacttccgcca

SEQ ID NO: 233745 - DNA, 25 bp, Artificial
  probe
  misc_feature (1)..(25): SEQ ID NO: 7015; WAN024G75_at; Start 38; Stop 62
taccgatctcatcttcactcttcaa

SEQ ID NO: 233746 - DNA, 25 bp, Artificial
  probe
  misc_feature (1)..(25): SEQ ID NO: 7015; WAN024G75_at; Start 122; Stop 146
gcttcatatcaatctctgcaatttc

SEQ ID NO: 233747 - DNA, 25 bp, Artificial
  probe
  misc_feature (1)..(25): SEQ ID NO: 7015; WAN024G75_at; Start 60; Stop 84
caaattgataaggacttccgccatc

SEQ ID NO: 233748 - DNA, 25 bp, Artificial
  probe
  misc_feature (1)..(25): SEQ ID NO: 7015; WAN024G75_at; Start 56; Stop 80
tcttcaaattgataaggacttccgc

SEQ ID NO: 233749 - DNA, 25 bp, Artificial
  probe
  misc_feature (1)..(25): SEQ ID NO: 7015; WAN024G75_at; Start 155; Stop 179
gctcatctttgatttcttggtattg

SEQ ID NO: 233750 - DNA, 25 bp, Artificial
  probe
  misc_feature (1)..(25): SEQ ID NO: 7015; WAN024G75_at; Start 72; Stop 96
gacttccgccatcttgtttaaggtg

SEQ ID NO: 233751 - DNA, 25 bp, Artificial
  probe
  misc_feature (1)..(25): SEQ ID NO: 7015; WAN024G75_at; Start 63; Stop 87
attgataaggacttccgccatcttg

SEQ ID NO: 233752 - DNA, 25 bp, Artificial
  probe
  misc_feature (1)..(25): SEQ ID NO: 7015; WAN024G75_at; Start 209; Stop 233
gattaatttcagaaatcttctcttg

SEQ ID NO: 233753 - DNA, 25 bp, Artificial
  probe
  misc_feature (1)..(25): SEQ ID NO: 7015; WAN024G75_at; Start 170; Stop 194
cttggtattgtttgttcgtgttaga

SEQ ID NO: 233754 - DNA, 25 bp, Artificial
  probe
  misc_feature (1)..(25): SEQ ID NO: 7015; WAN024G75_at; Start 5; Stop 29
tcatttggtcaaaatcatacttagc

SEQ ID NO: 233755 - DNA, 25 bp, Artificial
  probe
  misc_feature (1)..(25): SEQ ID NO: 7015; WAN024G75_at; Start 118; Stop 142
tctagcttcatatcaatctctgcaa

SEQ ID NO: 233756 - DNA, 25 bp, Artificial
  probe
  misc_feature (1)..(25): SEQ ID NO: 7015; WAN024G75_at; Start 26; Stop 50
tagctaattttctaccgatctcatc

SEQ ID NO: 233757 - DNA, 25 bp, Artificial
  probe
  misc_feature (1)..(25): SEQ ID NO: 7015; WAN024G75_at; Start 197; Stop 221
gttcaatcataagattaatttcaga

SEQ ID NO: 233758 - DNA, 25 bp, Artificial
  probe
  misc_feature (1)..(25): SEQ ID NO: 7015; WAN024G75_at; Start 134; Stop 158
tctctgcaatttctaatacaagctc

SEQ ID NO: 233759 - DNA, 25 bp, Artificial
  probe
  misc_feature (1)..(25): SEQ ID NO: 7015; WAN024G75_at; Start 73; Stop 97
acttccgccatcttgtttaaggtgg

SEQ ID NO: 233760 - DNA, 25 bp, Artificial
  probe
  misc_feature (1)..(25): SEQ ID NO: 7015; WAN024G75_at; Start 76; Stop 100
tccgccatcttgtttaaggtggcga

SEQ ID NO: 233761 - DNA, 25 bp, Artificial
  probe
  misc_feature (1)..(25): SEQ ID NO: 7015; WAN024G75_at; Start 65; Stop 89
tgataaggacttccgccatcttgtt

SEQ ID NO: 233762 - DNA, 25 bp, Artificial
  probe
  misc_feature (1)..(25): SEQ ID NO: 7015; WAN024G75_at; Start 115; Stop 139
tcttctagcttcatatcaatctctg

SEQ ID NO: 233763 - DNA, 25 bp, Artificial
  probe
  misc_feature (1)..(25): SEQ ID NO: 7015; WAN024G75_at; Start 136; Stop 160
tctgcaatttctaatacaagctcat

SEQ ID NO: 233764 - DNA, 25 bp, Artificial
  probe
  misc_feature (1)..(25): SEQ ID NO: 7015; WAN024G75_at; Start 139; Stop 163
gcaatttctaatacaagctcatctt

SEQ ID NO: 233765 - DNA, 25 bp, Artificial
  probe
  misc_feature (1)..(25): SEQ ID NO: 7015; WAN024G75_at; Start 165; Stop 189
gatttcttggtattgtttgttcgtg

SEQ ID NO: 233766 - DNA, 25 bp, Artificial
  probe
  misc_feature (1)..(25): SEQ ID NO: 7015; WAN024G75_at; Start 42; Stop 66
gatctcatcttcactcttcaaattg

SEQ ID NO: 233767 - DNA, 25 bp, Artificial
  probe
  misc_feature (1)..(25): SEQ ID NO: 7015; WAN024G75_at; Start 186; Stop 210
cgtgttagatagttcaatcataaga

SEQ ID NO: 233768 - DNA, 25 bp, Artificial
  probe
  misc_feature (1)..(25): SEQ ID NO: 7015; WAN024G75_at; Start 69; Stop 93
aaggacttccgccatcttgtttaag

SEQ ID NO: 233769 - DNA, 25 bp, Artificial
  probe
  misc_feature (1)..(25): SEQ ID NO: 7015; WAN024G75_at; Start 70; Stop 94
aggacttccgccatcttgtttaagg

SEQ ID NO: 233770 - DNA, 25 bp, Artificial
  probe
  misc_feature (1)..(25): SEQ ID NO: 7015; WAN024G75_at; Start 19; Stop 43
tcatacttagctaattttctaccga

SEQ ID NO: 233771 - DNA, 25 bp, Artificial
  probe
  misc_feature (1)..(25): SEQ ID NO: 7015; WAN024G75_at; Start 80; Stop 104
ccatcttgtttaaggtggcgatttt

SEQ ID NO: 233772 - DNA, 25 bp, Artificial
  probe
  misc_feature (1)..(25): SEQ ID NO: 7015; WAN024G75_at; Start 103; Stop 127
ttttcttgggtttcttctagcttca

SEQ ID NO: 233773 - DNA, 25 bp, Artificial
  probe
  misc_feature (1)..(25): SEQ ID NO: 1875; WAN024G76_at; Start 78; Stop 102
ccttgatatagacgcccttatcaac

SEQ ID NO: 233774 - DNA, 25 bp, Artificial
  probe
  misc_feature (1)..(25): SEQ ID NO: 1875; WAN024G76_at; Start 47; Stop 71
ataagaccgctctatttgacaccga

SEQ ID NO: 233775 - DNA, 25 bp, Artificial
  probe
  misc_feature (1)..(25): SEQ ID NO: 1875; WAN024G76_at; Start 49; Stop 73
aagaccgctctatttgacaccgaaa

SEQ ID NO: 233776 - DNA, 25 bp, Artificial
  probe
  misc_feature (1)..(25): SEQ ID NO: 1875; WAN024G76_at; Start 69; Stop 93
cgaaagacaccttgatatagacgcc

SEQ ID NO: 233777 - DNA, 25 bp, Artificial
  probe
  misc_feature (1)..(25): SEQ ID NO: 1875; WAN024G76_at; Start 34; Stop 58
gttgggaatgaaaataagaccgctc

SEQ ID NO: 233778 - DNA, 25 bp, Artificial
  probe
  misc_feature (1)..(25): SEQ ID NO: 1875; WAN024G76_at; Start 53; Stop 77
ccgctctatttgacaccgaaagaca

SEQ ID NO: 233779 - DNA, 25 bp, Artificial
  probe
  misc_feature (1)..(25): SEQ ID NO: 1875; WAN024G76_at; Start 68; Stop 92
ccgaaagacaccttgatatagacgc

SEQ ID NO: 233780 - DNA, 25 bp, Artificial
  probe
  misc_feature (1)..(25): SEQ ID NO: 1875; WAN024G76_at; Start 66; Stop 90
caccgaaagacaccttgatatagac

SEQ ID NO: 233781 - DNA, 25 bp, Artificial
  probe
  misc_feature (1)..(25): SEQ ID NO: 1875; WAN024G76_at; Start 37; Stop 61
gggaatgaaaataagaccgctctat

SEQ ID NO: 233782 - DNA, 25 bp, Artificial
  probe
  misc_feature (1)..(25): SEQ ID NO: 1875; WAN024G76_at; Start 58; Stop 82
ctatttgacaccgaaagacaccttg

SEQ ID NO: 233783 - DNA, 25 bp, Artificial
  probe
  misc_feature (1)..(25): SEQ ID NO: 1875; WAN024G76_at; Start 16; Stop 40
cataatatccaattgatagttggga

SEQ ID NO: 233784 - DNA, 25 bp, Artificial
  probe
  misc_feature (1)..(25): SEQ ID NO: 1875; WAN024G76_at; Start 56; Stop 80
ctctatttgacaccgaaagacacct

SEQ ID NO: 233785 - DNA, 25 bp, Artificial
  probe
  misc_feature (1)..(25): SEQ ID NO: 1875; WAN024G76_at; Start 32; Stop 56
tagttgggaatgaaaataagaccgc

SEQ ID NO: 233786 - DNA, 25 bp, Artificial
  probe
  misc_feature (1)..(25): SEQ ID NO: 1875; WAN024G76_at; Start 62; Stop 86
ttgacaccgaaagacaccttgatat

SEQ ID NO: 233787 - DNA, 25 bp, Artificial
  probe
  misc_feature (1)..(25): SEQ ID NO: 1875; WAN024G76_at; Start 46; Stop 70
aataagaccgctctatttgacaccg

SEQ ID NO: 233788 - DNA, 25 bp, Artificial
  probe
  misc_feature (1)..(25): SEQ ID NO: 1875; WAN024G76_at; Start 3; Stop 27
gattttcttcttccataatatccaa

SEQ ID NO: 233789 - DNA, 25 bp, Artificial
  probe
  misc_feature (1)..(25): SEQ ID NO: 1875; WAN024G76_at; Start 23; Stop 47
tccaattgatagttgggaatgaaaa

SEQ ID NO: 233790 - DNA, 25 bp, Artificial
  probe
  misc_feature (1)..(25): SEQ ID NO: 1875; WAN024G76_at; Start 50; Stop 74
agaccgctctatttgacaccgaaag

SEQ ID NO: 233791 - DNA, 25 bp, Artificial
  probe
  misc_feature (1)..(25): SEQ ID NO: 1875; WAN024G76_at; Start 38; Stop 62
ggaatgaaaataagaccgctctatt

SEQ ID NO: 233792 - DNA, 25 bp, Artificial
  probe
  misc_feature (1)..(25): SEQ ID NO: 1875; WAN024G76_at; Start 59; Stop 83
tatttgacaccgaaagacaccttga

SEQ ID NO: 233793 - DNA, 25 bp, Artificial
  probe
  misc_feature (1)..(25): SEQ ID NO: 1875; WAN024G76_at; Start 70; Stop 94
gaaagacaccttgatatagacgccc

SEQ ID NO: 233794 - DNA, 25 bp, Artificial
  probe
  misc_feature (1)..(25): SEQ ID NO: 1875; WAN024G76_at; Start 35; Stop 59
ttgggaatgaaaataagaccgctct

SEQ ID NO: 233795 - DNA, 25 bp, Artificial
  probe
  misc_feature (1)..(25): SEQ ID NO: 1875; WAN024G76_at; Start 72; Stop 96
aagacaccttgatatagacgccctt

SEQ ID NO: 233796 - DNA, 25 bp, Artificial
  probe
  misc_feature (1)..(25): SEQ ID NO: 1875; WAN024G76_at; Start 61; Stop 85
tttgacaccgaaagacaccttgata

SEQ ID NO: 233797 - DNA, 25 bp, Artificial
  probe
  misc_feature (1)..(25): SEQ ID NO: 1875; WAN024G76_at; Start 76; Stop 100
caccttgatatagacgcccttatca

SEQ ID NO: 233798 - DNA, 25 bp, Artificial
  probe
  misc_feature (1)..(25): SEQ ID NO: 1875; WAN024G76_at; Start 60; Stop 84
atttgacaccgaaagacaccttgat

SEQ ID NO: 233799 - DNA, 25 bp, Artificial
  probe
  misc_feature (1)..(25): SEQ ID NO: 1875; WAN024G76_at; Start 51; Stop 75
gaccgctctatttgacaccgaaaga

SEQ ID NO: 233800 - DNA, 25 bp, Artificial
  probe
  misc_feature (1)..(25): SEQ ID NO: 1875; WAN024G76_at; Start 73; Stop 97
agacaccttgatatagacgccctta

SEQ ID NO: 233801 - DNA, 25 bp, Artificial
  probe
  misc_feature (1)..(25): SEQ ID NO: 1875; WAN024G76_at; Start 74; Stop 98
gacaccttgatatagacgcccttat

SEQ ID NO: 233802 - DNA, 25 bp, Artificial
  probe
  misc_feature (1)..(25): SEQ ID NO: 1875; WAN024G76_at; Start 55; Stop 79
gctctatttgacaccgaaagacacc

SEQ ID NO: 233803 - DNA, 25 bp, Artificial
  probe
  misc_feature (1)..(25): SEQ ID NO: 1875; WAN024G76_at; Start 8; Stop 32
tcttcttccataatatccaattgat

SEQ ID NO: 233804 - DNA, 25 bp, Artificial
  probe
  misc_feature (1)..(25): SEQ ID NO: 1875; WAN024G76_at; Start 48; Stop 72
taagaccgctctatttgacaccgaa

SEQ ID NO: 233805 - DNA, 25 bp, Artificial
  probe
  misc_feature (1)..(25): SEQ ID NO: 1875; WAN024G76_at; Start 64; Stop 88
gacaccgaaagacaccttgatatag

SEQ ID NO: 233806 - DNA, 25 bp, Artificial
  probe
  misc_feature (1)..(25): SEQ ID NO: 1875; WAN024G76_at; Start 71; Stop 95
aaagacaccttgatatagacgccct

SEQ ID NO: 233807 - DNA, 25 bp, Artificial
  probe
  misc_feature (1)..(25): SEQ ID NO: 5492; WAN024G77_at; Start 573; Stop 597
tcacgagaatgccttactagaataa

SEQ ID NO: 233808 - DNA, 25 bp, Artificial
  probe
  misc_feature (1)..(25): SEQ ID NO: 5492; WAN024G77_at; Start 499; Stop 523
tatgaggagatagctagaagattgg

SEQ ID NO: 233809 - DNA, 25 bp, Artificial
  probe
  misc_feature (1)..(25): SEQ ID NO: 5492; WAN024G77_at; Start 419; Stop 443
tgacggaatcaataatgttagatcg

SEQ ID NO: 233810 - DNA, 25 bp, Artificial
  probe
  misc_feature (1)..(25): SEQ ID NO: 5492; WAN024G77_at; Start 39; Stop 63
agtctacattcgagaaacgtcttct

SEQ ID NO: 233811 - DNA, 25 bp, Artificial
  probe
  misc_feature (1)..(25): SEQ ID NO: 5492; WAN024G77_at; Start 492; Stop 516
taataaatatgaggagatagctaga

SEQ ID NO: 233812 - DNA, 25 bp, Artificial
  probe
  misc_feature (1)..(25): SEQ ID NO: 5492; WAN024G77_at; Start 568; Stop 592
aaatttcacgagaatgccttactag

SEQ ID NO: 233813 - DNA, 25 bp, Artificial
  probe
  misc_feature (1)..(25): SEQ ID NO: 5492; WAN024G77_at; Start 134; Stop 158
tgagcaacgatagccaaaaactccc

SEQ ID NO: 233814 - DNA, 25 bp, Artificial
  probe
  misc_feature (1)..(25): SEQ ID NO: 5492; WAN024G77_at; Start 107; Stop 131
tcaagggtaggaccttaatcagaca

SEQ ID NO: 233815 - DNA, 25 bp, Artificial
  probe
  misc_feature (1)..(25): SEQ ID NO: 5492; WAN024G77_at; Start 267; Stop 291
tgtattagaaattgcagagattgat

SEQ ID NO: 233816 - DNA, 25 bp, Artificial
  probe
  misc_feature (1)..(25): SEQ ID NO: 5492; WAN024G77_at; Start 114; Stop 138
taggaccttaatcagacaattgagc

SEQ ID NO: 233817 - DNA, 25 bp, Artificial
  probe
  misc_feature (1)..(25): SEQ ID NO: 5492; WAN024G77_at; Start 289; Stop 313
gatatgaagctagaagaaacccaag

SEQ ID NO: 233818 - DNA, 25 bp, Artificial
  probe
  misc_feature (1)..(25): SEQ ID NO: 5492; WAN024G77_at; Start 226; Stop 250
tctaacacgaacaaacaataccaag

SEQ ID NO: 233819 - DNA, 25 bp, Artificial
  probe
  misc_feature (1)..(25): SEQ ID NO: 5492; WAN024G77_at; Start 386; Stop 410
aattagctaagtatgattttgacca

SEQ ID NO: 233820 - DNA, 25 bp, Artificial
  probe
  misc_feature (1)..(25): SEQ ID NO: 5492; WAN024G77_at; Start 406; Stop 430
gaccaaatgaacatgacggaatcaa

SEQ ID NO: 233821 - DNA, 25 bp, Artificial
  probe
  misc_feature (1)..(25): SEQ ID NO: 5492; WAN024G77_at; Start 543; Stop 567
taataccaataaatttacagttcta

SEQ ID NO: 233822 - DNA, 25 bp, Artificial
  probe
  misc_feature (1)..(25): SEQ ID NO: 5492; WAN024G77_at; Start 69; Stop 93
tgtctataataaagaaaacatggat

SEQ ID NO: 233823 - DNA, 25 bp, Artificial
  probe
  misc_feature (1)..(25): SEQ ID NO: 5492; WAN024G77_at; Start 199; Stop 223
tctgaaattaatcttatgattgaac

SEQ ID NO: 233824 - DNA, 25 bp, Artificial
  probe
  misc_feature (1)..(25): SEQ ID NO: 5492; WAN024G77_at; Start 556; Stop 580
tttacagttctaaaatttcacgaga

SEQ ID NO: 233825 - DNA, 25 bp, Artificial
  probe
  misc_feature (1)..(25): SEQ ID NO: 5492; WAN024G77_at; Start 125; Stop 149
tcagacaattgagcaacgatagcca

SEQ ID NO: 233826 - DNA, 25 bp, Artificial
  probe
  misc_feature (1)..(25): SEQ ID NO: 5492; WAN024G77_at; Start 511; Stop 535
gctagaagattggatttgtttgtga

SEQ ID NO: 233827 - DNA, 25 bp, Artificial
  probe
  misc_feature (1)..(25): SEQ ID NO: 5492; WAN024G77_at; Start 280; Stop 304
gcagagattgatatgaagctagaag

SEQ ID NO: 233828 - DNA, 25 bp, Artificial
  probe
  misc_feature (1)..(25): SEQ ID NO: 5492; WAN024G77_at; Start 144; Stop 168
tagccaaaaactcccctatagacga

SEQ ID NO: 233829 - DNA, 25 bp, Artificial
  probe
  misc_feature (1)..(25): SEQ ID NO: 5492; WAN024G77_at; Start 437; Stop 461
tagatcgactcaatacagatatttt

SEQ ID NO: 233830 - DNA, 25 bp, Artificial
  probe
  misc_feature (1)..(25): SEQ ID NO: 5492; WAN024G77_at; Start 293; Stop 317
tgaagctagaagaaacccaagaaaa

SEQ ID NO: 233831 - DNA, 25 bp, Artificial
  probe
  misc_feature (1)..(25): SEQ ID NO: 5492; WAN024G77_at; Start 96; Stop 120
taattgtttcatcaagggtaggacc

SEQ ID NO: 233832 - DNA, 25 bp, Artificial
  probe
  misc_feature (1)..(25): SEQ ID NO: 5492; WAN024G77_at; Start 179; Stop 203
aaagtcttcaagagaagatttctga

SEQ ID NO: 233833 - DNA, 25 bp, Artificial
  probe
  misc_feature (1)..(25): SEQ ID NO: 5492; WAN024G77_at; Start 241; Stop 265
caataccaagaaatcaaagatgagc

SEQ ID NO: 233834 - DNA, 25 bp, Artificial
  probe
  misc_feature (1)..(25): SEQ ID NO: 5492; WAN024G77_at; Start 1; Stop 25
ttggatattatggaagaagaaaatc

SEQ ID NO: 233835 - DNA, 25 bp, Artificial
  probe
  misc_feature (1)..(25): SEQ ID NO: 5492; WAN024G77_at; Start 400; Stop 424
gattttgaccaaatgaacatgacgg

SEQ ID NO: 233836 - DNA, 25 bp, Artificial
  probe
  misc_feature (1)..(25): SEQ ID NO: 5492; WAN024G77_at; Start 452; Stop 476
cagatattttaaaattacaacagga

SEQ ID NO: 233837 - DNA, 25 bp, Artificial
  probe
  misc_feature (1)..(25): SEQ ID NO: 5492; WAN024G77_at; Start 431; Stop 455
taatgttagatcgactcaatacaga

SEQ ID NO: 233838 - DNA, 25 bp, Artificial
  probe
  misc_feature (1)..(25): SEQ ID NO: 5492; WAN024G77_at; Start 34; Stop 58
tataaagtctacattcgagaaacgt

SEQ ID NO: 233839 - DNA, 25 bp, Artificial
  probe
  misc_feature (1)..(25): SEQ ID NO: 5492; WAN024G77_at; Start 52; Stop 76
gaaacgtcttcttactttgtctata

SEQ ID NO: 233840 - DNA, 25 bp, Artificial
  probe
  misc_feature (1)..(25): SEQ ID NO: 5492; WAN024G77_at; Start 213; Stop 237
tatgattgaactatctaacacgaac

SEQ ID NO: 233841 - DNA, 25 bp, Artificial
  probe
  misc_feature (1)..(25): SEQ ID NO: 5726; WAN024G78_at; Start 200; Stop 224
ctgcagttctaaatagtgtggatgc

SEQ ID NO: 233842 - DNA, 25 bp, Artificial
  probe
  misc_feature (1)..(25): SEQ ID NO: 5726; WAN024G78_at; Start 215; Stop 239
gtgtggatgctgagaacgaaaacta

SEQ ID NO: 233843 - DNA, 25 bp, Artificial
  probe
  misc_feature (1)..(25): SEQ ID NO: 5726; WAN024G78_at; Start 7; Stop 31
caattaaggccaattgtacttcata

SEQ ID NO: 233844 - DNA, 25 bp, Artificial
  probe
  misc_feature (1)..(25): SEQ ID NO: 5726; WAN024G78_at; Start 202; Stop 226
gcagttctaaatagtgtggatgctg

SEQ ID NO: 233845 - DNA, 25 bp, Artificial
  probe
  misc_feature (1)..(25): SEQ ID NO: 5726; WAN024G78_at; Start 216; Stop 240
tgtggatgctgagaacgaaaactat

SEQ ID NO: 233846 - DNA, 25 bp, Artificial
  probe
  misc_feature (1)..(25): SEQ ID NO: 5726; WAN024G78_at; Start 204; Stop 228
agttctaaatagtgtggatgctgag

SEQ ID NO: 233847 - DNA, 25 bp, Artificial
  probe
  misc_feature (1)..(25): SEQ ID NO: 5726; WAN024G78_at; Start 209; Stop 233
taaatagtgtggatgctgagaacga

SEQ ID NO: 233848 - DNA, 25 bp, Artificial
  probe
  misc_feature (1)..(25): SEQ ID NO: 5726; WAN024G78_at; Start 118; Stop 142
tactcaattttgttactaaagactc

SEQ ID NO: 233849 - DNA, 25 bp, Artificial
  probe
  misc_feature (1)..(25): SEQ ID NO: 5726; WAN024G78_at; Start 2; Stop 26
tgtcgcaattaaggccaattgtact

SEQ ID NO: 233850 - DNA, 25 bp, Artificial
  probe
  misc_feature (1)..(25): SEQ ID NO: 5726; WAN024G78_at; Start 31; Stop 55
atcccttatttttcaagagttgtgc

SEQ ID NO: 233851 - DNA, 25 bp, Artificial
  probe
  misc_feature (1)..(25): SEQ ID NO: 5726; WAN024G78_at; Start 15; Stop 39
gccaattgtacttcatatcccttat

SEQ ID NO: 233852 - DNA, 25 bp, Artificial
  probe
  misc_feature (1)..(25): SEQ ID NO: 5726; WAN024G78_at; Start 136; Stop 160
aagactctaccatttttcctgcaaa

SEQ ID NO: 233853 - DNA, 25 bp, Artificial
  probe
  misc_feature (1)..(25): SEQ ID NO: 5726; WAN024G78_at; Start 210; Stop 234
aaatagtgtggatgctgagaacgaa

SEQ ID NO: 233854 - DNA, 25 bp, Artificial
  probe
  misc_feature (1)..(25): SEQ ID NO: 5726; WAN024G78_at; Start 138; Stop 162
gactctaccatttttcctgcaaaat

SEQ ID NO: 233855 - DNA, 25 bp, Artificial
  probe
  misc_feature (1)..(25): SEQ ID NO: 5726; WAN024G78_at; Start 208; Stop 232
ctaaatagtgtggatgctgagaacg

SEQ ID NO: 233856 - DNA, 25 bp, Artificial
  probe
  misc_feature (1)..(25): SEQ ID NO: 5726; WAN024G78_at; Start 185; Stop 209
tttgccatattcttgctgcagttct

SEQ ID NO: 233857 - DNA, 25 bp, Artificial
  probe
  misc_feature (1)..(25): SEQ ID NO: 5726; WAN024G78_at; Start 11; Stop 35
taaggccaattgtacttcatatccc

SEQ ID NO: 233858 - DNA, 25 bp, Artificial
  probe
  misc_feature (1)..(25): SEQ ID NO: 5726; WAN024G78_at; Start 195; Stop 219
tcttgctgcagttctaaatagtgtg

SEQ ID NO: 233859 - DNA, 25 bp, Artificial
  probe
  misc_feature (1)..(25): SEQ ID NO: 5726; WAN024G78_at; Start 121; Stop 145
tcaattttgttactaaagactctac

SEQ ID NO: 233860 - DNA, 25 bp, Artificial
  probe
  misc_feature (1)..(25): SEQ ID NO: 5726; WAN024G78_at; Start 134; Stop 158
taaagactctaccatttttcctgca

SEQ ID NO: 233861 - DNA, 25 bp, Artificial
  probe
  misc_feature (1)..(25): SEQ ID NO: 5726; WAN024G78_at; Start 196; Stop 220
cttgctgcagttctaaatagtgtgg

SEQ ID NO: 233862 - DNA, 25 bp, Artificial
  probe
  misc_feature (1)..(25): SEQ ID NO: 5726; WAN024G78_at; Start 14; Stop 38
ggccaattgtacttcatatccctta

SEQ ID NO: 233863 - DNA, 25 bp, Artificial
  probe
  misc_feature (1)..(25): SEQ ID NO: 5726; WAN024G78_at; Start 198; Stop 222
tgctgcagttctaaatagtgtggat

SEQ ID NO: 233864 - DNA, 25 bp, Artificial
  probe
  misc_feature (1)..(25): SEQ ID NO: 5726; WAN024G78_at; Start 25; Stop 49
cttcatatcccttatttttcaagag

SEQ ID NO: 233865 - DNA, 25 bp, Artificial
  probe
  misc_feature (1)..(25): SEQ ID NO: 5726; WAN024G78_at; Start 5; Stop 29
cgcaattaaggccaattgtacttca

SEQ ID NO: 233866 - DNA, 25 bp, Artificial
  probe
  misc_feature (1)..(25): SEQ ID NO: 5726; WAN024G78_at; Start 213; Stop 237
tagtgtggatgctgagaacgaaaac

SEQ ID NO: 233867 - DNA, 25 bp, Artificial
  probe
  misc_feature (1)..(25): SEQ ID NO: 5726; WAN024G78_at; Start 124; Stop 148
attttgttactaaagactctaccat

SEQ ID NO: 233868 - DNA, 25 bp, Artificial
  probe
  misc_feature (1)..(25): SEQ ID NO: 5726; WAN024G78_at; Start 145; Stop 169
ccatttttcctgcaaaatctttggt

SEQ ID NO: 233869 - DNA, 25 bp, Artificial
  probe
  misc_feature (1)..(25): SEQ ID NO: 5726; WAN024G78_at; Start 183; Stop 207
tctttgccatattcttgctgcagtt

SEQ ID NO: 233870 - DNA, 25 bp, Artificial
  probe
  misc_feature (1)..(25): SEQ ID NO: 5726; WAN024G78_at; Start 188; Stop 212
gccatattcttgctgcagttctaaa

SEQ ID NO: 233871 - DNA, 25 bp, Artificial
  probe
  misc_feature (1)..(25): SEQ ID NO: 5726; WAN024G78_at; Start 28; Stop 52
catatcccttatttttcaagagttg

SEQ ID NO: 233872 - DNA, 25 bp, Artificial
  probe
  misc_feature (1)..(25): SEQ ID NO: 5726; WAN024G78_at; Start 1; Stop 25
ttgtcgcaattaaggccaattgtac

SEQ ID NO: 233873 - DNA, 25 bp, Artificial
  probe
  misc_feature (1)..(25): SEQ ID NO: 5726; WAN024G78_at; Start 207; Stop 231
tctaaatagtgtggatgctgagaac

SEQ ID NO: 233874 - DNA, 25 bp, Artificial
  probe
  misc_feature (1)..(25): SEQ ID NO: 5726; WAN024G78_at; Start 217; Stop 241
gtggatgctgagaacgaaaactatc

SEQ ID NO: 233875 - DNA, 25 bp, Artificial
  probe
  misc_feature (1)..(25): SEQ ID NO: 4877; WAN024G79_at; Start 61; Stop 85
tatctgagcacccttatccgttatg

SEQ ID NO: 233876 - DNA, 25 bp, Artificial
  probe
  misc_feature (1)..(25): SEQ ID NO: 4877; WAN024G79_at; Start 354; Stop 378
agatttaactaatcgaaatggttgt

SEQ ID NO: 233877 - DNA, 25 bp, Artificial
  probe
  misc_feature (1)..(25): SEQ ID NO: 4877; WAN024G79_at; Start 48; Stop 72
gcctaagctgtcctatctgagcacc

SEQ ID NO: 233878 - DNA, 25 bp, Artificial
  probe
  misc_feature (1)..(25): SEQ ID NO: 4877; WAN024G79_at; Start 319; Stop 343
aaagagatgcttaaatcaggagaag

SEQ ID NO: 233879 - DNA, 25 bp, Artificial
  probe
  misc_feature (1)..(25): SEQ ID NO: 4877; WAN024G79_at; Start 297; Stop 321
tggcgaatggaatcaagttgagaaa

SEQ ID NO: 233880 - DNA, 25 bp, Artificial
  probe
  misc_feature (1)..(25): SEQ ID NO: 4877; WAN024G79_at; Start 171; Stop 195
tacaagacaattggaaaaactagct

SEQ ID NO: 233881 - DNA, 25 bp, Artificial
  probe
  misc_feature (1)..(25): SEQ ID NO: 4877; WAN024G79_at; Start 66; Stop 90
gagcacccttatccgttatgaaaaa

SEQ ID NO: 233882 - DNA, 25 bp, Artificial
  probe
  misc_feature (1)..(25): SEQ ID NO: 4877; WAN024G79_at; Start 283; Stop 307
catgatttactatttggcgaatgga

SEQ ID NO: 233883 - DNA, 25 bp, Artificial
  probe
  misc_feature (1)..(25): SEQ ID NO: 4877; WAN024G79_at; Start 290; Stop 314
tactatttggcgaatggaatcaagt

SEQ ID NO: 233884 - DNA, 25 bp, Artificial
  probe
  misc_feature (1)..(25): SEQ ID NO: 4877; WAN024G79_at; Start 293; Stop 317
tatttggcgaatggaatcaagttga

SEQ ID NO: 233885 - DNA, 25 bp, Artificial
  probe
  misc_feature (1)..(25): SEQ ID NO: 4877; WAN024G79_at; Start 19; Stop 43
gaagtacaattagctttgattgcga

SEQ ID NO: 233886 - DNA, 25 bp, Artificial
  probe
  misc_feature (1)..(25): SEQ ID NO: 4877; WAN024G79_at; Start 44; Stop 68
caaagcctaagctgtcctatctgag

SEQ ID NO: 233887 - DNA, 25 bp, Artificial
  probe
  misc_feature (1)..(25): SEQ ID NO: 4877; WAN024G79_at; Start 51; Stop 75
taagctgtcctatctgagcaccctt

SEQ ID NO: 233888 - DNA, 25 bp, Artificial
  probe
  misc_feature (1)..(25): SEQ ID NO: 4877; WAN024G79_at; Start 316; Stop 340
gagaaagagatgcttaaatcaggag

SEQ ID NO: 233889 - DNA, 25 bp, Artificial
  probe
  misc_feature (1)..(25): SEQ ID NO: 4877; WAN024G79_at; Start 176; Stop 200
gacaattggaaaaactagctatctt

SEQ ID NO: 233890 - DNA, 25 bp, Artificial
  probe
  misc_feature (1)..(25): SEQ ID NO: 4877; WAN024G79_at; Start 99; Stop 123
tatcaatccagatcaagcacgcgca

SEQ ID NO: 233891 - DNA, 25 bp, Artificial
  probe
  misc_feature (1)..(25): SEQ ID NO: 4877; WAN024G79_at; Start 183; Stop 207
ggaaaaactagctatctttgaaaga

SEQ ID NO: 233892 - DNA, 25 bp, Artificial
  probe
  misc_feature (1)..(25): SEQ ID NO: 4877; WAN024G79_at; Start 256; Stop 280
gataaaacttcagtagcaaccgttc

SEQ ID NO: 233893 - DNA, 25 bp, Artificial
  probe
  misc_feature (1)..(25): SEQ ID NO: 4877; WAN024G79_at; Start 156; Stop 180
tcatctagttgataatacaagacaa

SEQ ID NO: 233894 - DNA, 25 bp, Artificial
  probe
  misc_feature (1)..(25): SEQ ID NO: 4877; WAN024G79_at; Start 9; Stop 33
tatgggatatgaagtacaattagct

SEQ ID NO: 233895 - DNA, 25 bp, Artificial
  probe
  misc_feature (1)..(25): SEQ ID NO: 4877; WAN024G79_at; Start 306; Stop 330
gaatcaagttgagaaagagatgctt

SEQ ID NO: 233896 - DNA, 25 bp, Artificial
  probe
  misc_feature (1)..(25): SEQ ID NO: 4877; WAN024G79_at; Start 223; Stop 247
cgagatagaagttgtgtatacgatt

SEQ ID NO: 233897 - DNA, 25 bp, Artificial
  probe
  misc_feature (1)..(25): SEQ ID NO: 4877; WAN024G79_at; Start 100; Stop 124
atcaatccagatcaagcacgcgcaa

SEQ ID NO: 233898 - DNA, 25 bp, Artificial
  probe
  misc_feature (1)..(25): SEQ ID NO: 4877; WAN024G79_at; Start 2; Stop 26
tgaaaagtatgggatatgaagtaca

SEQ ID NO: 233899 - DNA, 25 bp, Artificial
  probe
  misc_feature (1)..(25): SEQ ID NO: 4877; WAN024G79_at; Start 36; Stop 60
gattgcgacaaagcctaagctgtcc

SEQ ID NO: 233900 - DNA, 25 bp, Artificial
  probe
  misc_feature (1)..(25): SEQ ID NO: 4877; WAN024G79_at; Start 263; Stop 287
cttcagtagcaaccgttcttcatga

SEQ ID NO: 233901 - DNA, 25 bp, Artificial
  probe
  misc_feature (1)..(25): SEQ ID NO: 4877; WAN024G79_at; Start 23; Stop 47
tacaattagctttgattgcgacaaa

SEQ ID NO: 233902 - DNA, 25 bp, Artificial
  probe
  misc_feature (1)..(25): SEQ ID NO: 4877; WAN024G79_at; Start 260; Stop 284
aaacttcagtagcaaccgttcttca

SEQ ID NO: 233903 - DNA, 25 bp, Artificial
  probe
  misc_feature (1)..(25): SEQ ID NO: 4877; WAN024G79_at; Start 253; Stop 277
gaagataaaacttcagtagcaaccg

SEQ ID NO: 233904 - DNA, 25 bp, Artificial
  probe
  misc_feature (1)..(25): SEQ ID NO: 4877; WAN024G79_at; Start 269; Stop 293
tagcaaccgttcttcatgatttact

SEQ ID NO: 233905 - DNA, 25 bp, Artificial
  probe
  misc_feature (1)..(25): SEQ ID NO: 4877; WAN024G79_at; Start 57; Stop 81
gtcctatctgagcacccttatccgt

SEQ ID NO: 233906 - DNA, 25 bp, Artificial
  probe
  misc_feature (1)..(25): SEQ ID NO: 4877; WAN024G79_at; Start 69; Stop 93
cacccttatccgttatgaaaaactg

SEQ ID NO: 233907 - DNA, 25 bp, Artificial
  probe
  misc_feature (1)..(25): SEQ ID NO: 4877; WAN024G79_at; Start 33; Stop 57
tttgattgcgacaaagcctaagctg

SEQ ID NO: 233908 - DNA, 25 bp, Artificial
  probe
  misc_feature (1)..(25): SEQ ID NO: 4877; WAN024G79_at; Start 97; Stop 121
gctatcaatccagatcaagcacgcg

SEQ ID NO: 233909 - DNA, 25 bp, Artificial
  probe
  misc_feature (1)..(25): SEQ ID NO: 2613; WAN024G7A_at; Start 119; Stop 143
aaagtggtgccggtaagactacaat

SEQ ID NO: 233910 - DNA, 25 bp, Artificial
  probe
  misc_feature (1)..(25): SEQ ID NO: 2613; WAN024G7A_at; Start 130; Stop 154
ggtaagactacaattcatcgtatta

SEQ ID NO: 233911 - DNA, 25 bp, Artificial
  probe
  misc_feature (1)..(25): SEQ ID NO: 2613; WAN024G7A_at; Start 163; Stop 187
gaatttcaaggaaatattgttatca

SEQ ID NO: 233912 - DNA, 25 bp, Artificial
  probe
  misc_feature (1)..(25): SEQ ID NO: 2613; WAN024G7A_at; Start 124; Stop 148
ggtgccggtaagactacaattcatc

SEQ ID NO: 233913 - DNA, 25 bp, Artificial
  probe
  misc_feature (1)..(25): SEQ ID NO: 2613; WAN024G7A_at; Start 65; Stop 89
tgacaagaggaaaaaagtccagtaa

SEQ ID NO: 233914 - DNA, 25 bp, Artificial
  probe
  misc_feature (1)..(25): SEQ ID NO: 2613; WAN024G7A_at; Start 128; Stop 152
ccggtaagactacaattcatcgtat

SEQ ID NO: 233915 - DNA, 25 bp, Artificial
  probe
  misc_feature (1)..(25): SEQ ID NO: 2613; WAN024G7A_at; Start 121; Stop 145
agtggtgccggtaagactacaattc

SEQ ID NO: 233916 - DNA, 25 bp, Artificial
  probe
  misc_feature (1)..(25): SEQ ID NO: 2613; WAN024G7A_at; Start 120; Stop 144
aagtggtgccggtaagactacaatt

SEQ ID NO: 233917 - DNA, 25 bp, Artificial
  probe
  misc_feature (1)..(25): SEQ ID NO: 2613; WAN024G7A_at; Start 196; Stop 220
gatagttttcgttctcagcatccac

SEQ ID NO: 233918 - DNA, 25 bp, Artificial
  probe
  misc_feature (1)..(25): SEQ ID NO: 2613; WAN024G7A_at; Start 169; Stop 193
caaggaaatattgttatcatagatg

SEQ ID NO: 233919 - DNA, 25 bp, Artificial
  probe
  misc_feature (1)..(25): SEQ ID NO: 2613; WAN024G7A_at; Start 206; Stop 230
gttctcagcatccacactatttaga

SEQ ID NO: 233920 - DNA, 25 bp, Artificial
  probe
  misc_feature (1)..(25): SEQ ID NO: 2613; WAN024G7A_at; Start 157; Stop 181
cagaaagaatttcaaggaaatattg

SEQ ID NO: 233921 - DNA, 25 bp, Artificial
  probe
  misc_feature (1)..(25): SEQ ID NO: 2613; WAN024G7A_at; Start 204; Stop 228
tcgttctcagcatccacactattta

SEQ ID NO: 233922 - DNA, 25 bp, Artificial
  probe
  misc_feature (1)..(25): SEQ ID NO: 2613; WAN024G7A_at; Start 145; Stop 169
catcgtattaaacagaaagaatttc

SEQ ID NO: 233923 - DNA, 25 bp, Artificial
  probe
  misc_feature (1)..(25): SEQ ID NO: 2613; WAN024G7A_at; Start 209; Stop 233
ctcagcatccacactatttagaact

SEQ ID NO: 233924 - DNA, 25 bp, Artificial
  probe
  misc_feature (1)..(25): SEQ ID NO: 2613; WAN024G7A_at; Start 64; Stop 88
ctgacaagaggaaaaaagtccagta

SEQ ID NO: 233925 - DNA, 25 bp, Artificial
  probe
  misc_feature (1)..(25): SEQ ID NO: 2613; WAN024G7A_at; Start 123; Stop 147
tggtgccggtaagactacaattcat

SEQ ID NO: 233926 - DNA, 25 bp, Artificial
  probe
  misc_feature (1)..(25): SEQ ID NO: 2613; WAN024G7A_at; Start 62; Stop 86
cactgacaagaggaaaaaagtccag

SEQ ID NO: 233927 - DNA, 25 bp, Artificial
  probe
  misc_feature (1)..(25): SEQ ID NO: 2613; WAN024G7A_at; Start 137; Stop 161
ctacaattcatcgtattaaacagaa

SEQ ID NO: 233928 - DNA, 25 bp, Artificial
  probe
  misc_feature (1)..(25): SEQ ID NO: 2613; WAN024G7A_at; Start 61; Stop 85
tcactgacaagaggaaaaaagtcca

SEQ ID NO: 233929 - DNA, 25 bp, Artificial
  probe
  misc_feature (1)..(25): SEQ ID NO: 2613; WAN024G7A_at; Start 122; Stop 146
gtggtgccggtaagactacaattca

SEQ ID NO: 233930 - DNA, 25 bp, Artificial
  probe
  misc_feature (1)..(25): SEQ ID NO: 2613; WAN024G7A_at; Start 200; Stop 224
gttttcgttctcagcatccacacta

SEQ ID NO: 233931 - DNA, 25 bp, Artificial
  probe
  misc_feature (1)..(25): SEQ ID NO: 2613; WAN024G7A_at; Start 205; Stop 229
cgttctcagcatccacactatttag

SEQ ID NO: 233932 - DNA, 25 bp, Artificial
  probe
  misc_feature (1)..(25): SEQ ID NO: 2613; WAN024G7A_at; Start 147; Stop 171
tcgtattaaacagaaagaatttcaa

SEQ ID NO: 233933 - DNA, 25 bp, Artificial
  probe
  misc_feature (1)..(25): SEQ ID NO: 2613; WAN024G7A_at; Start 140; Stop 164
caattcatcgtattaaacagaaaga

SEQ ID NO: 233934 - DNA, 25 bp, Artificial
  probe
  misc_feature (1)..(25): SEQ ID NO: 2613; WAN024G7A_at; Start 150; Stop 174
tattaaacagaaagaatttcaagga

SEQ ID NO: 233935 - DNA, 25 bp, Artificial
  probe
  misc_feature (1)..(25): SEQ ID NO: 2613; WAN024G7A_at; Start 126; Stop 150
tgccggtaagactacaattcatcgt

SEQ ID NO: 233936 - DNA, 25 bp, Artificial
  probe
  misc_feature (1)..(25): SEQ ID NO: 2613; WAN024G7A_at; Start 198; Stop 222
tagttttcgttctcagcatccacac

SEQ ID NO: 233937 - DNA, 25 bp, Artificial
  probe
  misc_feature (1)..(25): SEQ ID NO: 2613; WAN024G7A_at; Start 125; Stop 149
gtgccggtaagactacaattcatcg

SEQ ID NO: 233938 - DNA, 25 bp, Artificial
  probe
  misc_feature (1)..(25): SEQ ID NO: 2613; WAN024G7A_at; Start 170; Stop 194
aaggaaatattgttatcatagatgg

SEQ ID NO: 233939 - DNA, 25 bp, Artificial
  probe
  misc_feature (1)..(25): SEQ ID NO: 2613; WAN024G7A_at; Start 201; Stop 225
ttttcgttctcagcatccacactat

SEQ ID NO: 233940 - DNA, 25 bp, Artificial
  probe
  misc_feature (1)..(25): SEQ ID NO: 2613; WAN024G7A_at; Start 135; Stop 159
gactacaattcatcgtattaaacag

SEQ ID NO: 233941 - DNA, 25 bp, Artificial
  probe
  misc_feature (1)..(25): SEQ ID NO: 2613; WAN024G7A_at; Start 129; Stop 153
cggtaagactacaattcatcgtatt

SEQ ID NO: 233942 - DNA, 25 bp, Artificial
  probe
  misc_feature (1)..(25): SEQ ID NO: 2613; WAN024G7A_at; Start 127; Stop 151
gccggtaagactacaattcatcgta

SEQ ID NO: 233943 - DNA, 25 bp, Artificial
  probe
  misc_feature (1)..(25): SEQ ID NO: 2189; WAN024G7B_at; Start 11; Stop 35
tccttataagcagactgttcaccat

SEQ ID NO: 233944 - DNA, 25 bp, Artificial
  probe
  misc_feature (1)..(25): SEQ ID NO: 2189; WAN024G7B_at; Start 168; Stop 192
ggtcaatttcaaagtaatctgtcgt

SEQ ID NO: 233945 - DNA, 25 bp, Artificial
  probe
  misc_feature (1)..(25): SEQ ID NO: 2189; WAN024G7B_at; Start 99; Stop 123
tgactttcatgccacgatgatgcgc

SEQ ID NO: 233946 - DNA, 25 bp, Artificial
  probe
  misc_feature (1)..(25): SEQ ID NO: 2189; WAN024G7B_at; Start 122; Stop 146
gcttgatccaccagttcccgaaagg

SEQ ID NO: 233947 - DNA, 25 bp, Artificial
  probe
  misc_feature (1)..(25): SEQ ID NO: 2189; WAN024G7B_at; Start 154; Stop 178
gtctccaaaatgacggtcaatttca

SEQ ID NO: 233948 - DNA, 25 bp, Artificial
  probe
  misc_feature (1)..(25): SEQ ID NO: 2189; WAN024G7B_at; Start 81; Stop 105
taaataccgcatccagcatgacttt

SEQ ID NO: 233949 - DNA, 25 bp, Artificial
  probe
  misc_feature (1)..(25): SEQ ID NO: 2189; WAN024G7B_at; Start 196; Stop 220
gtacttgtgattgcttgtagattca

SEQ ID NO: 233950 - DNA, 25 bp, Artificial
  probe
  misc_feature (1)..(25): SEQ ID NO: 2189; WAN024G7B_at; Start 149; Stop 173
tccttgtctccaaaatgacggtcaa

SEQ ID NO: 233951 - DNA, 25 bp, Artificial
  probe
  misc_feature (1)..(25): SEQ ID NO: 2189; WAN024G7B_at; Start 164; Stop 188
tgacggtcaatttcaaagtaatctg

SEQ ID NO: 233952 - DNA, 25 bp, Artificial
  probe
  misc_feature (1)..(25): SEQ ID NO: 2189; WAN024G7B_at; Start 133; Stop 157
cagttcccgaaaggtctccttgtct

SEQ ID NO: 233953 - DNA, 25 bp, Artificial
  probe
  misc_feature (1)..(25): SEQ ID NO: 2189; WAN024G7B_at; Start 116; Stop 140
tgatgcgcttgatccaccagttccc

SEQ ID NO: 233954 - DNA, 25 bp, Artificial
  probe
  misc_feature (1)..(25): SEQ ID NO: 2189; WAN024G7B_at; Start 141; Stop 165
gaaaggtctccttgtctccaaaatg

SEQ ID NO: 233955 - DNA, 25 bp, Artificial
  probe
  misc_feature (1)..(25): SEQ ID NO: 2189; WAN024G7B_at; Start 111; Stop 135
cacgatgatgcgcttgatccaccag

SEQ ID NO: 233956 - DNA, 25 bp, Artificial
  probe
  misc_feature (1)..(25): SEQ ID NO: 2189; WAN024G7B_at; Start 20; Stop 44
gcagactgttcaccatttttgacga

SEQ ID NO: 233957 - DNA, 25 bp, Artificial
  probe
  misc_feature (1)..(25): SEQ ID NO: 2189; WAN024G7B_at; Start 185; Stop 209
tctgtcgtattgtacttgtgattgc

SEQ ID NO: 233958 - DNA, 25 bp, Artificial
  probe
  misc_feature (1)..(25): SEQ ID NO: 2189; WAN024G7B_at; Start 72; Stop 96
caatatgattaaataccgcatccag

SEQ ID NO: 233959 - DNA, 25 bp, Artificial
  probe
  misc_feature (1)..(25): SEQ ID NO: 2189; WAN024G7B_at; Start 125; Stop 149
tgatccaccagttcccgaaaggtct

SEQ ID NO: 233960 - DNA, 25 bp, Artificial
  probe
  misc_feature (1)..(25): SEQ ID NO: 2189; WAN024G7B_at; Start 216; Stop 240
attcaaagatgggacaaagatatag

SEQ ID NO: 233961 - DNA, 25 bp, Artificial
  probe
  misc_feature (1)..(25): SEQ ID NO: 2189; WAN024G7B_at; Start 145; Stop 169
ggtctccttgtctccaaaatgacgg

SEQ ID NO: 233962 - DNA, 25 bp, Artificial
  probe
  misc_feature (1)..(25): SEQ ID NO: 2189; WAN024G7B_at; Start 114; Stop 138
gatgatgcgcttgatccaccagttc

SEQ ID NO: 233963 - DNA, 25 bp, Artificial
  probe
  misc_feature (1)..(25): SEQ ID NO: 2189; WAN024G7B_at; Start 2; Stop 26
tggaaccaatccttataagcagact

SEQ ID NO: 233964 - DNA, 25 bp, Artificial
  probe
  misc_feature (1)..(25): SEQ ID NO: 2189; WAN024G7B_at; Start 106; Stop 130
catgccacgatgatgcgcttgatcc

SEQ ID NO: 233965 - DNA, 25 bp, Artificial
  probe
  misc_feature (1)..(25): SEQ ID NO: 2189; WAN024G7B_at; Start 207; Stop 231
tgcttgtagattcaaagatgggaca

SEQ ID NO: 233966 - DNA, 25 bp, Artificial
  probe
  misc_feature (1)..(25): SEQ ID NO: 2189; WAN024G7B_at; Start 175; Stop 199
ttcaaagtaatctgtcgtattgtac

SEQ ID NO: 233967 - DNA, 25 bp, Artificial
  probe
  misc_feature (1)..(25): SEQ ID NO: 2189; WAN024G7B_at; Start 78; Stop 102
gattaaataccgcatccagcatgac

SEQ ID NO: 233968 - DNA, 25 bp, Artificial
  probe
  misc_feature (1)..(25): SEQ ID NO: 2189; WAN024G7B_at; Start 130; Stop 154
caccagttcccgaaaggtctccttg

SEQ ID NO: 233969 - DNA, 25 bp, Artificial
  probe
  misc_feature (1)..(25): SEQ ID NO: 2189; WAN024G7B_at; Start 8; Stop 32
caatccttataagcagactgttcac

SEQ ID NO: 233970 - DNA, 25 bp, Artificial
  probe
  misc_feature (1)..(25): SEQ ID NO: 2189; WAN024G7B_at; Start 85; Stop 109
taccgcatccagcatgactttcatg

SEQ ID NO: 233971 - DNA, 25 bp, Artificial
  probe
  misc_feature (1)..(25): SEQ ID NO: 2189; WAN024G7B_at; Start 30; Stop 54
caccatttttgacgacatttttcca

SEQ ID NO: 233972 - DNA, 25 bp, Artificial
  probe
  misc_feature (1)..(25): SEQ ID NO: 2189; WAN024G7B_at; Start 102; Stop 126
ctttcatgccacgatgatgcgcttg

SEQ ID NO: 233973 - DNA, 25 bp, Artificial
  probe
  misc_feature (1)..(25): SEQ ID NO: 2189; WAN024G7B_at; Start 23; Stop 47
gactgttcaccatttttgacgacat

SEQ ID NO: 233974 - DNA, 25 bp, Artificial
  probe
  misc_feature (1)..(25): SEQ ID NO: 2189; WAN024G7B_at; Start 45; Stop 69
catttttccattgaagagattgcga

SEQ ID NO: 233975 - DNA, 25 bp, Artificial
  probe
  misc_feature (1)..(25): SEQ ID NO: 2189; WAN024G7B_at; Start 39; Stop 63
tgacgacatttttccattgaagaga

SEQ ID NO: 233976 - DNA, 25 bp, Artificial
  probe
  misc_feature (1)..(25): SEQ ID NO: 2189; WAN024G7B_at; Start 212; Stop 236
gtagattcaaagatgggacaaagat

SEQ ID NO: 233977 - DNA, 25 bp, Artificial
  probe
  misc_feature (1)..(25): SEQ ID NO: 1203; WAN024G7C_at; Start 706; Stop 730
tttcgggaactggtggatcaagcgc

SEQ ID NO: 233978 - DNA, 25 bp, Artificial
  probe
  misc_feature (1)..(25): SEQ ID NO: 1203; WAN024G7C_at; Start 491; Stop 515
cagaagggactttagactgggattc

SEQ ID NO: 233979 - DNA, 25 bp, Artificial
  probe
  misc_feature (1)..(25): SEQ ID NO: 1203; WAN024G7C_at; Start 1687; Stop 1711
gcagtagcactagcaagcaattgcc

SEQ ID NO: 233980 - DNA, 25 bp, Artificial
  probe
  misc_feature (1)..(25): SEQ ID NO: 1203; WAN024G7C_at; Start 1270; Stop 1294
tacaagcagcagatttcagaggtca

SEQ ID NO: 233981 - DNA, 25 bp, Artificial
  probe
  misc_feature (1)..(25): SEQ ID NO: 1203; WAN024G7C_at; Start 1431; Stop 1455
agccttgactggaggaccagatcca

SEQ ID NO: 233982 - DNA, 25 bp, Artificial
  probe
  misc_feature (1)..(25): SEQ ID NO: 1203; WAN024G7C_at; Start 126; Stop 150
tgaaagcatcaacttgcactatggg

SEQ ID NO: 233983 - DNA, 25 bp, Artificial
  probe
  misc_feature (1)..(25): SEQ ID NO: 1203; WAN024G7C_at; Start 721; Stop 745
gatcaagcgcatcatcgtggcatga

SEQ ID NO: 233984 - DNA, 25 bp, Artificial
  probe
  misc_feature (1)..(25): SEQ ID NO: 1203; WAN024G7C_at; Start 1109; Stop 1133
tcctaggagaagtctggcatacatc

SEQ ID NO: 233985 - DNA, 25 bp, Artificial
  probe
  misc_feature (1)..(25): SEQ ID NO: 1203; WAN024G7C_at; Start 1334; Stop 1358
tgtggacggccaatgaagatgttca

SEQ ID NO: 233986 - DNA, 25 bp, Artificial
  probe
  misc_feature (1)..(25): SEQ ID NO: 1203; WAN024G7C_at; Start 248; Stop 272
cagttgactttgcacgtatccagta

SEQ ID NO: 233987 - DNA, 25 bp, Artificial
  probe
  misc_feature (1)..(25): SEQ ID NO: 1203; WAN024G7C_at; Start 1210; Stop 1234
ttacgaggaattaagaagacagacc

SEQ ID NO: 233988 - DNA, 25 bp, Artificial
  probe
  misc_feature (1)..(25): SEQ ID NO: 1203; WAN024G7C_at; Start 1627; Stop 1651
ggacggatcctcaaagcaatattca

SEQ ID NO: 233989 - DNA, 25 bp, Artificial
  probe
  misc_feature (1)..(25): SEQ ID NO: 1203; WAN024G7C_at; Start 1549; Stop 1573
tcagtaatcatttcgcatggcaagt

SEQ ID NO: 233990 - DNA, 25 bp, Artificial
  probe
  misc_feature (1)..(25): SEQ ID NO: 1203; WAN024G7C_at; Start 1608; Stop 1632
tctggaatggaaatacgaaggacgg

SEQ ID NO: 233991 - DNA, 25 bp, Artificial
  probe
  misc_feature (1)..(25): SEQ ID NO: 1203; WAN024G7C_at; Start 282; Stop 306
gctcagagatacagaaggtcaaaat

SEQ ID NO: 233992 - DNA, 25 bp, Artificial
  probe
  misc_feature (1)..(25): SEQ ID NO: 1203; WAN024G7C_at; Start 741; Stop 765
catgaaagtcatgctggatgcggta

SEQ ID NO: 233993 - DNA, 25 bp, Artificial
  probe
  misc_feature (1)..(25): SEQ ID NO: 1203; WAN024G7C_at; Start 1320; Stop 1344
tacagagcgaatcctgtggacggcc

SEQ ID NO: 233994 - DNA, 25 bp, Artificial
  probe
  misc_feature (1)..(25): SEQ ID NO: 1203; WAN024G7C_at; Start 474; Stop 498
caatgctctattaaacccagaaggg

SEQ ID NO: 233995 - DNA, 25 bp, Artificial
  probe
  misc_feature (1)..(25): SEQ ID NO: 1203; WAN024G7C_at; Start 396; Stop 420
gattgatgcctgcaaggttcctgac

SEQ ID NO: 233996 - DNA, 25 bp, Artificial
  probe
  misc_feature (1)..(25): SEQ ID NO: 1203; WAN024G7C_at; Start 214; Stop 238
ggtaccttatttgaccattggcagg

SEQ ID NO: 233997 - DNA, 25 bp, Artificial
  probe
  misc_feature (1)..(25): SEQ ID NO: 1203; WAN024G7C_at; Start 1224; Stop 1248
gaagacagaccagttcatcgatgaa

SEQ ID NO: 233998 - DNA, 25 bp, Artificial
  probe
  misc_feature (1)..(25): SEQ ID NO: 1203; WAN024G7C_at; Start 806; Stop 830
tcgtcaaaaatggtgaacagtctgc

SEQ ID NO: 233999 - DNA, 25 bp, Artificial
  probe
  misc_feature (1)..(25): SEQ ID NO: 1203; WAN024G7C_at; Start 939; Stop 963
gctaaatacagccaatccagaggtc

SEQ ID NO: 234000 - DNA, 25 bp, Artificial
  probe
  misc_feature (1)..(25): SEQ ID NO: 1203; WAN024G7C_at; Start 511; Stop 535
gattcatctgtcacacctaagagcg

SEQ ID NO: 234001 - DNA, 25 bp, Artificial
  probe
  misc_feature (1)..(25): SEQ ID NO: 1203; WAN024G7C_at; Start 1456; Stop 1480
gattgtcgtcgttgtatgccttggg

SEQ ID NO: 234002 - DNA, 25 bp, Artificial
  probe
  misc_feature (1)..(25): SEQ ID NO: 1203; WAN024G7C_at; Start 414; Stop 438
tcctgactgggtttcaaatacggta

SEQ ID NO: 234003 - DNA, 25 bp, Artificial
  probe
  misc_feature (1)..(25): SEQ ID NO: 1203; WAN024G7C_at; Start 1042; Stop 1066
gagattgaccatcagttctggaagg

SEQ ID NO: 234004 - DNA, 25 bp, Artificial
  probe
  misc_feature (1)..(25): SEQ ID NO: 1203; WAN024G7C_at; Start 588; Stop 612
gcaagacttgggtattactggacta

SEQ ID NO: 234005 - DNA, 25 bp, Artificial
  probe
  misc_feature (1)..(25): SEQ ID NO: 1203; WAN024G7C_at; Start 1304; Stop 1328
tcttggattcacatgatacagagcg

SEQ ID NO: 234006 - DNA, 25 bp, Artificial
  probe
  misc_feature (1)..(25): SEQ ID NO: 1203; WAN024G7C_at; Start 1135; Stop 1159
cagccttggctaaatggagatgagt

SEQ ID NO: 234007 - DNA, 25 bp, Artificial
  probe
  misc_feature (1)..(25): SEQ ID NO: 1203; WAN024G7C_at; Start 860; Stop 884
tcccagtgacaactgaaaagctagt

SEQ ID NO: 234008 - DNA, 25 bp, Artificial
  probe
  misc_feature (1)..(25): SEQ ID NO: 1203; WAN024G7C_at; Start 1150; Stop 1174
ggagatgagttccatgccgtcatga

SEQ ID NO: 234009 - DNA, 25 bp, Artificial
  probe
  misc_feature (1)..(25): SEQ ID NO: 1203; WAN024G7C_at; Start 685; Stop 709
cattttggagacaaggagacctttc

SEQ ID NO: 234010 - DNA, 25 bp, Artificial
  probe
  misc_feature (1)..(25): SEQ ID NO: 1203; WAN024G7C_at; Start 1672; Stop 1696
cttttagagaaagaagcagtagcac

SEQ ID NO: 234011 - DNA, 25 bp, Artificial
  probe
  misc_feature (1)..(25): SEQ ID NO: 5338; WAN024G7D_at; Start 22; Stop 46
tcatctcttgattttttgctggcgt

SEQ ID NO: 234012 - DNA, 25 bp, Artificial
  probe
  misc_feature (1)..(25): SEQ ID NO: 5338; WAN024G7D_at; Start 43; Stop 67
gcgttggatcgggtagattatctaa

SEQ ID NO: 234013 - DNA, 25 bp, Artificial
  probe
  misc_feature (1)..(25): SEQ ID NO: 5338; WAN024G7D_at; Start 73; Stop 97
aagcaccagcatattttgcaatcag

SEQ ID NO: 234014 - DNA, 25 bp, Artificial
  probe
  misc_feature (1)..(25): SEQ ID NO: 5338; WAN024G7D_at; Start 25; Stop 49
tctcttgattttttgctggcgttgg

SEQ ID NO: 234015 - DNA, 25 bp, Artificial
  probe
  misc_feature (1)..(25): SEQ ID NO: 5338; WAN024G7D_at; Start 114; Stop 138
gccaatccattccagtcattgtcca

SEQ ID NO: 234016 - DNA, 25 bp, Artificial
  probe
  misc_feature (1)..(25): SEQ ID NO: 5338; WAN024G7D_at; Start 94; Stop 118
tcagatttgctattaaatcagccaa

SEQ ID NO: 234017 - DNA, 25 bp, Artificial
  probe
  misc_feature (1)..(25): SEQ ID NO: 5338; WAN024G7D_at; Start 104; Stop 128
tattaaatcagccaatccattccag

SEQ ID NO: 234018 - DNA, 25 bp, Artificial
  probe
  misc_feature (1)..(25): SEQ ID NO: 5338; WAN024G7D_at; Start 63; Stop 87
tctaaatctaaagcaccagcatatt

SEQ ID NO: 234019 - DNA, 25 bp, Artificial
  probe
  misc_feature (1)..(25): SEQ ID NO: 5338; WAN024G7D_at; Start 101; Stop 125
tgctattaaatcagccaatccattc

SEQ ID NO: 234020 - DNA, 25 bp, Artificial
  probe
  misc_feature (1)..(25): SEQ ID NO: 5338; WAN024G7D_at; Start 201; Stop 225
tgacaagtgctttggattagcaaca

SEQ ID NO: 234021 - DNA, 25 bp, Artificial
  probe
  misc_feature (1)..(25): SEQ ID NO: 5338; WAN024G7D_at; Start 198; Stop 222
cattgacaagtgctttggattagca

SEQ ID NO: 234022 - DNA, 25 bp, Artificial
  probe
  misc_feature (1)..(25): SEQ ID NO: 5338; WAN024G7D_at; Start 186; Stop 210
taagttttttgacattgacaagtgc

SEQ ID NO: 234023 - DNA, 25 bp, Artificial
  probe
  misc_feature (1)..(25): SEQ ID NO: 5338; WAN024G7D_at; Start 69; Stop 93
tctaaagcaccagcatattttgcaa

SEQ ID NO: 234024 - DNA, 25 bp, Artificial
  probe
  misc_feature (1)..(25): SEQ ID NO: 5338; WAN024G7D_at; Start 128; Stop 152
gtcattgtccaatatatacctcctc

SEQ ID NO: 234025 - DNA, 25 bp, Artificial
  probe
  misc_feature (1)..(25): SEQ ID NO: 5338; WAN024G7D_at; Start 136; Stop 160
ccaatatatacctcctctaaagttt

SEQ ID NO: 234026 - DNA, 25 bp, Artificial
  probe
  misc_feature (1)..(25): SEQ ID NO: 5338; WAN024G7D_at; Start 2; Stop 26
tgccatgtcaaaactatttttcatc

SEQ ID NO: 234027 - DNA, 25 bp, Artificial
  probe
  misc_feature (1)..(25): SEQ ID NO: 5338; WAN024G7D_at; Start 111; Stop 135
tcagccaatccattccagtcattgt

SEQ ID NO: 234028 - DNA, 25 bp, Artificial
  probe
  misc_feature (1)..(25): SEQ ID NO: 5338; WAN024G7D_at; Start 204; Stop 228
caagtgctttggattagcaacatag

SEQ ID NO: 234029 - DNA, 25 bp, Artificial
  probe
  misc_feature (1)..(25): SEQ ID NO: 5338; WAN024G7D_at; Start 75; Stop 99
gcaccagcatattttgcaatcagat

SEQ ID NO: 234030 - DNA, 25 bp, Artificial
  probe
  misc_feature (1)..(25): SEQ ID NO: 5338; WAN024G7D_at; Start 71; Stop 95
taaagcaccagcatattttgcaatc

SEQ ID NO: 234031 - DNA, 25 bp, Artificial
  probe
  misc_feature (1)..(25): SEQ ID NO: 5338; WAN024G7D_at; Start 33; Stop 57
ttttttgctggcgttggatcgggta

SEQ ID NO: 234032 - DNA, 25 bp, Artificial
  probe
  misc_feature (1)..(25): SEQ ID NO: 5338; WAN024G7D_at; Start 60; Stop 84
ttatctaaatctaaagcaccagcat

SEQ ID NO: 234033 - DNA, 25 bp, Artificial
  probe
  misc_feature (1)..(25): SEQ ID NO: 5338; WAN024G7D_at; Start 146; Stop 170
cctcctctaaagttttatatctaat

SEQ ID NO: 234034 - DNA, 25 bp, Artificial
  probe
  misc_feature (1)..(25): SEQ ID NO: 5338; WAN024G7D_at; Start 30; Stop 54
tgattttttgctggcgttggatcgg

SEQ ID NO: 234035 - DNA, 25 bp, Artificial
  probe
  misc_feature (1)..(25): SEQ ID NO: 5338; WAN024G7D_at; Start 107; Stop 131
taaatcagccaatccattccagtca

SEQ ID NO: 234036 - DNA, 25 bp, Artificial
  probe
  misc_feature (1)..(25): SEQ ID NO: 5338; WAN024G7D_at; Start 191; Stop 215
tttttgacattgacaagtgctttgg

SEQ ID NO: 234037 - DNA, 25 bp, Artificial
  probe
  misc_feature (1)..(25): SEQ ID NO: 5338; WAN024G7D_at; Start 119; Stop 143
tccattccagtcattgtccaatata

SEQ ID NO: 234038 - DNA, 25 bp, Artificial
  probe
  misc_feature (1)..(25): SEQ ID NO: 5338; WAN024G7D_at; Start 196; Stop 220
gacattgacaagtgctttggattag

SEQ ID NO: 234039 - DNA, 25 bp, Artificial
  probe
  misc_feature (1)..(25): SEQ ID NO: 5338; WAN024G7D_at; Start 58; Stop 82
gattatctaaatctaaagcaccagc

SEQ ID NO: 234040 - DNA, 25 bp, Artificial
  probe
  misc_feature (1)..(25): SEQ ID NO: 5338; WAN024G7D_at; Start 79; Stop 103
cagcatattttgcaatcagatttgc

SEQ ID NO: 234041 - DNA, 25 bp, Artificial
  probe
  misc_feature (1)..(25): SEQ ID NO: 5338; WAN024G7D_at; Start 44; Stop 68
cgttggatcgggtagattatctaaa

SEQ ID NO: 234042 - DNA, 25 bp, Artificial
  probe
  misc_feature (1)..(25): SEQ ID NO: 5338; WAN024G7D_at; Start 133; Stop 157
tgtccaatatatacctcctctaaag

SEQ ID NO: 234043 - DNA, 25 bp, Artificial
  probe
  misc_feature (1)..(25): SEQ ID NO: 5338; WAN024G7D_at; Start 90; Stop 114
gcaatcagatttgctattaaatcag

SEQ ID NO: 234044 - DNA, 25 bp, Artificial
  probe
  misc_feature (1)..(25): SEQ ID NO: 5338; WAN024G7D_at; Start 7; Stop 31
tgtcaaaactatttttcatctcttg

SEQ ID NO: 234045 - DNA, 25 bp, Artificial
  probe
  misc_feature (1)..(25): SEQ ID NO: 5665; WAN024G7E_at; Start 53; Stop 77
aatatgctggtgctttagatttaga

SEQ ID NO: 234046 - DNA, 25 bp, Artificial
  probe
  misc_feature (1)..(25): SEQ ID NO: 5665; WAN024G7E_at; Start 42; Stop 66
tctgattgcaaaatatgctggtgct

SEQ ID NO: 234047 - DNA, 25 bp, Artificial
  probe
  misc_feature (1)..(25): SEQ ID NO: 5665; WAN024G7E_at; Start 26; Stop 50
ctgatttaatagcaaatctgattgc

SEQ ID NO: 234048 - DNA, 25 bp, Artificial
  probe
  misc_feature (1)..(25): SEQ ID NO: 5665; WAN024G7E_at; Start 6; Stop 30
caatgactggaatggattggctgat

SEQ ID NO: 234049 - DNA, 25 bp, Artificial
  probe
  misc_feature (1)..(25): SEQ ID NO: 5665; WAN024G7E_at; Start 95; Stop 119
cgccagcaaaaaatcaagagatgaa

SEQ ID NO: 234050 - DNA, 25 bp, Artificial
  probe
  misc_feature (1)..(25): SEQ ID NO: 5665; WAN024G7E_at; Start 135; Stop 159
ggcaaaaacacaaattgagacggac

SEQ ID NO: 234051 - DNA, 25 bp, Artificial
  probe
  misc_feature (1)..(25): SEQ ID NO: 5665; WAN024G7E_at; Start 137; Stop 161
caaaaacacaaattgagacggacta

SEQ ID NO: 234052 - DNA, 25 bp, Artificial
  probe
  misc_feature (1)..(25): SEQ ID NO: 5665; WAN024G7E_at; Start 93; Stop 117
aacgccagcaaaaaatcaagagatg

SEQ ID NO: 234053 - DNA, 25 bp, Artificial
  probe
  misc_feature (1)..(25): SEQ ID NO: 5665; WAN024G7E_at; Start 140; Stop 164
aaacacaaattgagacggactaact

SEQ ID NO: 234054 - DNA, 25 bp, Artificial
  probe
  misc_feature (1)..(25): SEQ ID NO: 5665; WAN024G7E_at; Start 114; Stop 138
gatgaaaaatagttttgacatggca

SEQ ID NO: 234055 - DNA, 25 bp, Artificial
  probe
  misc_feature (1)..(25): SEQ ID NO: 5665; WAN024G7E_at; Start 5; Stop 29
acaatgactggaatggattggctga

SEQ ID NO: 234056 - DNA, 25 bp, Artificial
  probe
  misc_feature (1)..(25): SEQ ID NO: 5665; WAN024G7E_at; Start 58; Stop 82
gctggtgctttagatttagataatc

SEQ ID NO: 234057 - DNA, 25 bp, Artificial
  probe
  misc_feature (1)..(25): SEQ ID NO: 5665; WAN024G7E_at; Start 72; Stop 96
tttagataatctacccgatccaacg

SEQ ID NO: 234058 - DNA, 25 bp, Artificial
  probe
  misc_feature (1)..(25): SEQ ID NO: 5665; WAN024G7E_at; Start 117; Stop 141
gaaaaatagttttgacatggcaaaa

SEQ ID NO: 234059 - DNA, 25 bp, Artificial
  probe
  misc_feature (1)..(25): SEQ ID NO: 5665; WAN024G7E_at; Start 47; Stop 71
ttgcaaaatatgctggtgctttaga

SEQ ID NO: 234060 - DNA, 25 bp, Artificial
  probe
  misc_feature (1)..(25): SEQ ID NO: 5665; WAN024G7E_at; Start 127; Stop 151
tttgacatggcaaaaacacaaattg

SEQ ID NO: 234061 - DNA, 25 bp, Artificial
  probe
  misc_feature (1)..(25): SEQ ID NO: 5665; WAN024G7E_at; Start 49; Stop 73
gcaaaatatgctggtgctttagatt

SEQ ID NO: 234062 - DNA, 25 bp, Artificial
  probe
  misc_feature (1)..(25): SEQ ID NO: 5665; WAN024G7E_at; Start 132; Stop 156
catggcaaaaacacaaattgagacg

SEQ ID NO: 234063 - DNA, 25 bp, Artificial
  probe
  misc_feature (1)..(25): SEQ ID NO: 5665; WAN024G7E_at; Start 143; Stop 167
cacaaattgagacggactaactaat

SEQ ID NO: 234064 - DNA, 25 bp, Artificial
  probe
  misc_feature (1)..(25): SEQ ID NO: 5665; WAN024G7E_at; Start 92; Stop 116
caacgccagcaaaaaatcaagagat

SEQ ID NO: 234065 - DNA, 25 bp, Artificial
  probe
  misc_feature (1)..(25): SEQ ID NO: 5665; WAN024G7E_at; Start 129; Stop 153
tgacatggcaaaaacacaaattgag

SEQ ID NO: 234066 - DNA, 25 bp, Artificial
  probe
  misc_feature (1)..(25): SEQ ID NO: 5665; WAN024G7E_at; Start 64; Stop 88
gctttagatttagataatctacccg

SEQ ID NO: 234067 - DNA, 25 bp, Artificial
  probe
  misc_feature (1)..(25): SEQ ID NO: 5665; WAN024G7E_at; Start 109; Stop 133
caagagatgaaaaatagttttgaca

SEQ ID NO: 234068 - DNA, 25 bp, Artificial
  probe
  misc_feature (1)..(25): SEQ ID NO: 5665; WAN024G7E_at; Start 15; Stop 39
gaatggattggctgatttaatagca

SEQ ID NO: 234069 - DNA, 25 bp, Artificial
  probe
  misc_feature (1)..(25): SEQ ID NO: 5665; WAN024G7E_at; Start 73; Stop 97
ttagataatctacccgatccaacgc

SEQ ID NO: 234070 - DNA, 25 bp, Artificial
  probe
  misc_feature (1)..(25): SEQ ID NO: 5665; WAN024G7E_at; Start 90; Stop 114
tccaacgccagcaaaaaatcaagag

SEQ ID NO: 234071 - DNA, 25 bp, Artificial
  probe
  misc_feature (1)..(25): SEQ ID NO: 5665; WAN024G7E_at; Start 10; Stop 34
gactggaatggattggctgatttaa

SEQ ID NO: 234072 - DNA, 25 bp, Artificial
  probe
  misc_feature (1)..(25): SEQ ID NO: 5665; WAN024G7E_at; Start 22; Stop 46
ttggctgatttaatagcaaatctga

SEQ ID NO: 234073 - DNA, 25 bp, Artificial
  probe
  misc_feature (1)..(25): SEQ ID NO: 5665; WAN024G7E_at; Start 123; Stop 147
tagttttgacatggcaaaaacacaa

SEQ ID NO: 234074 - DNA, 25 bp, Artificial
  probe
  misc_feature (1)..(25): SEQ ID NO: 5665; WAN024G7E_at; Start 45; Stop 69
gattgcaaaatatgctggtgcttta

SEQ ID NO: 234075 - DNA, 25 bp, Artificial
  probe
  misc_feature (1)..(25): SEQ ID NO: 5665; WAN024G7E_at; Start 88; Stop 112
gatccaacgccagcaaaaaatcaag

SEQ ID NO: 234076 - DNA, 25 bp, Artificial
  probe
  misc_feature (1)..(25): SEQ ID NO: 5665; WAN024G7E_at; Start 38; Stop 62
caaatctgattgcaaaatatgctgg

SEQ ID NO: 234077 - DNA, 25 bp, Artificial
  probe
  misc_feature (1)..(25): SEQ ID NO: 5665; WAN024G7E_at; Start 83; Stop 107
tacccgatccaacgccagcaaaaaa

SEQ ID NO: 234078 - DNA, 25 bp, Artificial
  probe
  misc_feature (1)..(25): SEQ ID NO: 5665; WAN024G7E_at; Start 97; Stop 121
ccagcaaaaaatcaagagatgaaaa

SEQ ID NO: 234079 - DNA, 25 bp, Artificial
  probe
  misc_feature (1)..(25): SEQ ID NO: 4074; WAN024G7F_at; Start 107; Stop 131
taagattgtcacatagtggttttga

SEQ ID NO: 234080 - DNA, 25 bp, Artificial
  probe
  misc_feature (1)..(25): SEQ ID NO: 4074; WAN024G7F_at; Start 138; Stop 162
ttaccactgctttccatgtatctgg

SEQ ID NO: 234081 - DNA, 25 bp, Artificial
  probe
  misc_feature (1)..(25): SEQ ID NO: 4074; WAN024G7F_at; Start 124; Stop 148
ggttttgataggtcttaccactgct

SEQ ID NO: 234082 - DNA, 25 bp, Artificial
  probe
  misc_feature (1)..(25): SEQ ID NO: 4074; WAN024G7F_at; Start 123; Stop 147
tggttttgataggtcttaccactgc

SEQ ID NO: 234083 - DNA, 25 bp, Artificial
  probe
  misc_feature (1)..(25): SEQ ID NO: 4074; WAN024G7F_at; Start 125; Stop 149
gttttgataggtcttaccactgctt

SEQ ID NO: 234084 - DNA, 25 bp, Artificial
  probe
  misc_feature (1)..(25): SEQ ID NO: 4074; WAN024G7F_at; Start 142; Stop 166
cactgctttccatgtatctggatag

SEQ ID NO: 234085 - DNA, 25 bp, Artificial
  probe
  misc_feature (1)..(25): SEQ ID NO: 4074; WAN024G7F_at; Start 175; Stop 199
tcattatatctgtgtgtgagtttaa

SEQ ID NO: 234086 - DNA, 25 bp, Artificial
  probe
  misc_feature (1)..(25): SEQ ID NO: 4074; WAN024G7F_at; Start 97; Stop 121
cataccattttaagattgtcacata

SEQ ID NO: 234087 - DNA, 25 bp, Artificial
  probe
  misc_feature (1)..(25): SEQ ID NO: 4074; WAN024G7F_at; Start 128; Stop 152
ttgataggtcttaccactgctttcc

SEQ ID NO: 234088 - DNA, 25 bp, Artificial
  probe
  misc_feature (1)..(25): SEQ ID NO: 4074; WAN024G7F_at; Start 94; Stop 118
cttcataccattttaagattgtcac

SEQ ID NO: 234089 - DNA, 25 bp, Artificial
  probe
  misc_feature (1)..(25): SEQ ID NO: 4074; WAN024G7F_at; Start 152; Stop 176
catgtatctggatagtttatttatc

SEQ ID NO: 234090 - DNA, 25 bp, Artificial
  probe
  misc_feature (1)..(25): SEQ ID NO: 4074; WAN024G7F_at; Start 118; Stop 142
catagtggttttgataggtcttacc

SEQ ID NO: 234091 - DNA, 25 bp, Artificial
  probe
  misc_feature (1)..(25): SEQ ID NO: 4074; WAN024G7F_at; Start 130; Stop 154
gataggtcttaccactgctttccat

SEQ ID NO: 234092 - DNA, 25 bp, Artificial
  probe
  misc_feature (1)..(25): SEQ ID NO: 4074; WAN024G7F_at; Start 181; Stop 205
tatctgtgtgtgagtttaatttttc

SEQ ID NO: 234093 - DNA, 25 bp, Artificial
  probe
  misc_feature (1)..(25): SEQ ID NO: 4074; WAN024G7F_at; Start 169; Stop 193
tatttatcattatatctgtgtgtga

SEQ ID NO: 234094 - DNA, 25 bp, Artificial
  probe
  misc_feature (1)..(25): SEQ ID NO: 4074; WAN024G7F_at; Start 225; Stop 249
tctttgcttaaccttacatttttga

SEQ ID NO: 234095 - DNA, 25 bp, Artificial
  probe
  misc_feature (1)..(25): SEQ ID NO: 4074; WAN024G7F_at; Start 146; Stop 170
gctttccatgtatctggatagttta

SEQ ID NO: 234096 - DNA, 25 bp, Artificial
  probe
  misc_feature (1)..(25): SEQ ID NO: 4074; WAN024G7F_at; Start 79; Stop 103
gtttgtctttatcttcttcatacca

SEQ ID NO: 234097 - DNA, 25 bp, Artificial
  probe
  misc_feature (1)..(25): SEQ ID NO: 4074; WAN024G7F_at; Start 132; Stop 156
taggtcttaccactgctttccatgt

SEQ ID NO: 234098 - DNA, 25 bp, Artificial
  probe
  misc_feature (1)..(25): SEQ ID NO: 4074; WAN024G7F_at; Start 30; Stop 54
gattctcctacatcataattcattt

SEQ ID NO: 234099 - DNA, 25 bp, Artificial
  probe
  misc_feature (1)..(25): SEQ ID NO: 4074; WAN024G7F_at; Start 100; Stop 124
accattttaagattgtcacatagtg

SEQ ID NO: 234100 - DNA, 25 bp, Artificial
  probe
  misc_feature (1)..(25): SEQ ID NO: 4074; WAN024G7F_at; Start 141; Stop 165
ccactgctttccatgtatctggata

SEQ ID NO: 234101 - DNA, 25 bp, Artificial
  probe
  misc_feature (1)..(25): SEQ ID NO: 4074; WAN024G7F_at; Start 8; Stop 32
tccacctctttttatctataaagat

SEQ ID NO: 234102 - DNA, 25 bp, Artificial
  probe
  misc_feature (1)..(25): SEQ ID NO: 4074; WAN024G7F_at; Start 113; Stop 137
tgtcacatagtggttttgataggtc

SEQ ID NO: 234103 - DNA, 25 bp, Artificial
  probe
  misc_feature (1)..(25): SEQ ID NO: 4074; WAN024G7F_at; Start 102; Stop 126
cattttaagattgtcacatagtggt

SEQ ID NO: 234104 - DNA, 25 bp, Artificial
  probe
  misc_feature (1)..(25): SEQ ID NO: 4074; WAN024G7F_at; Start 134; Stop 158
ggtcttaccactgctttccatgtat

SEQ ID NO: 234105 - DNA, 25 bp, Artificial
  probe
  misc_feature (1)..(25): SEQ ID NO: 4074; WAN024G7F_at; Start 219; Stop 243
tattcttctttgcttaaccttacat

SEQ ID NO: 234106 - DNA, 25 bp, Artificial
  probe
  misc_feature (1)..(25): SEQ ID NO: 4074; WAN024G7F_at; Start 217; Stop 241
tatattcttctttgcttaaccttac

SEQ ID NO: 234107 - DNA, 25 bp, Artificial
  probe
  misc_feature (1)..(25): SEQ ID NO: 4074; WAN024G7F_at; Start 110; Stop 134
gattgtcacatagtggttttgatag

SEQ ID NO: 234108 - DNA, 25 bp, Artificial
  probe
  misc_feature (1)..(25): SEQ ID NO: 4074; WAN024G7F_at; Start 20; Stop 44
tatctataaagattctcctacatca

SEQ ID NO: 234109 - DNA, 25 bp, Artificial
  probe
  misc_feature (1)..(25): SEQ ID NO: 4074; WAN024G7F_at; Start 66; Stop 90
cctttctgtcttagtttgtctttat

SEQ ID NO: 234110 - DNA, 25 bp, Artificial
  probe
  misc_feature (1)..(25): SEQ ID NO: 4074; WAN024G7F_at; Start 116; Stop 140
cacatagtggttttgataggtctta

SEQ ID NO: 234111 - DNA, 25 bp, Artificial
  probe
  misc_feature (1)..(25): SEQ ID NO: 4074; WAN024G7F_at; Start 139; Stop 163
taccactgctttccatgtatctgga

SEQ ID NO: 234112 - DNA, 25 bp, Artificial
  probe
  misc_feature (1)..(25): SEQ ID NO: 4074; WAN024G7F_at; Start 26; Stop 50
taaagattctcctacatcataattc

SEQ ID NO: 234113 - DNA, 25 bp, Artificial
  probe
  misc_feature (1)..(25): SEQ ID NO: 1675; WAN024G7G_at; Start 5; Stop 29
taaataaactatccagatacatgga

SEQ ID NO: 234114 - DNA, 25 bp, Artificial
  probe
  misc_feature (1)..(25): SEQ ID NO: 1675; WAN024G7G_at; Start 11; Stop 35
aactatccagatacatggaaagcag

SEQ ID NO: 234115 - DNA, 25 bp, Artificial
  probe
  misc_feature (1)..(25): SEQ ID NO: 1675; WAN024G7G_at; Start 14; Stop 38
tatccagatacatggaaagcagtgg

SEQ ID NO: 234116 - DNA, 25 bp, Artificial
  probe
  misc_feature (1)..(25): SEQ ID NO: 1675; WAN024G7G_at; Start 18; Stop 42
cagatacatggaaagcagtggtaag

SEQ ID NO: 234117 - DNA, 25 bp, Artificial
  probe
  misc_feature (1)..(25): SEQ ID NO: 1675; WAN024G7G_at; Start 61; Stop 85
gtgacaatcttaaaatggtatgaag

SEQ ID NO: 234118 - DNA, 25 bp, Artificial
  probe
  misc_feature (1)..(25): SEQ ID NO: 1675; WAN024G7G_at; Start 42; Stop 66
gacctatcaaaaccactatgtgaca

SEQ ID NO: 234119 - DNA, 25 bp, Artificial
  probe
  misc_feature (1)..(25): SEQ ID NO: 1675; WAN024G7G_at; Start 129; Stop 153
gaattatgatgtaggagaatcttta

SEQ ID NO: 234120 - DNA, 25 bp, Artificial
  probe
  misc_feature (1)..(25): SEQ ID NO: 1675; WAN024G7G_at; Start 46; Stop 70
tatcaaaaccactatgtgacaatct

SEQ ID NO: 234121 - DNA, 25 bp, Artificial
  probe
  misc_feature (1)..(25): SEQ ID NO: 1675; WAN024G7G_at; Start 82; Stop 106
gaagaagataaagacaaactaagac

SEQ ID NO: 234122 - DNA, 25 bp, Artificial
  probe
  misc_feature (1)..(25): SEQ ID NO: 1675; WAN024G7G_at; Start 20; Stop 44
gatacatggaaagcagtggtaagac

SEQ ID NO: 234123 - DNA, 25 bp, Artificial
  probe
  misc_feature (1)..(25): SEQ ID NO: 1675; WAN024G7G_at; Start 9; Stop 33
taaactatccagatacatggaaagc

SEQ ID NO: 234124 - DNA, 25 bp, Artificial
  probe
  misc_feature (1)..(25): SEQ ID NO: 1675; WAN024G7G_at; Start 27; Stop 51
ggaaagcagtggtaagacctatcaa

SEQ ID NO: 234125 - DNA, 25 bp, Artificial
  probe
  misc_feature (1)..(25): SEQ ID NO: 1675; WAN024G7G_at; Start 65; Stop 89
caatcttaaaatggtatgaagaaga

SEQ ID NO: 234126 - DNA, 25 bp, Artificial
  probe
  misc_feature (1)..(25): SEQ ID NO: 1675; WAN024G7G_at; Start 24; Stop 48
catggaaagcagtggtaagacctat

SEQ ID NO: 234127 - DNA, 25 bp, Artificial
  probe
  misc_feature (1)..(25): SEQ ID NO: 1675; WAN024G7G_at; Start 88; Stop 112
gataaagacaaactaagacagaaag

SEQ ID NO: 234128 - DNA, 25 bp, Artificial
  probe
  misc_feature (1)..(25): SEQ ID NO: 1675; WAN024G7G_at; Start 58; Stop 82
tatgtgacaatcttaaaatggtatg

SEQ ID NO: 234129 - DNA, 25 bp, Artificial
  probe
  misc_feature (1)..(25): SEQ ID NO: 1675; WAN024G7G_at; Start 22; Stop 46
tacatggaaagcagtggtaagacct

SEQ ID NO: 234130 - DNA, 25 bp, Artificial
  probe
  misc_feature (1)..(25): SEQ ID NO: 1675; WAN024G7G_at; Start 17; Stop 41
ccagatacatggaaagcagtggtaa

SEQ ID NO: 234131 - DNA, 25 bp, Artificial
  probe
  misc_feature (1)..(25): SEQ ID NO: 1675; WAN024G7G_at; Start 122; Stop 146
aaaaaatgaattatgatgtaggaga

SEQ ID NO: 234132 - DNA, 25 bp, Artificial
  probe
  misc_feature (1)..(25): SEQ ID NO: 1675; WAN024G7G_at; Start 32; Stop 56
gcagtggtaagacctatcaaaacca

SEQ ID NO: 234133 - DNA, 25 bp, Artificial
  probe
  misc_feature (1)..(25): SEQ ID NO: 1675; WAN024G7G_at; Start 3; Stop 27
gataaataaactatccagatacatg

SEQ ID NO: 234134 - DNA, 25 bp, Artificial
  probe
  misc_feature (1)..(25): SEQ ID NO: 1675; WAN024G7G_at; Start 49; Stop 73
caaaaccactatgtgacaatcttaa

SEQ ID NO: 234135 - DNA, 25 bp, Artificial
  probe
  misc_feature (1)..(25): SEQ ID NO: 1675; WAN024G7G_at; Start 26; Stop 50
tggaaagcagtggtaagacctatca

SEQ ID NO: 234136 - DNA, 25 bp, Artificial
  probe
  misc_feature (1)..(25): SEQ ID NO: 1675; WAN024G7G_at; Start 30; Stop 54
aagcagtggtaagacctatcaaaac

SEQ ID NO: 234137 - DNA, 25 bp, Artificial
  probe
  misc_feature (1)..(25): SEQ ID NO: 1675; WAN024G7G_at; Start 37; Stop 61
ggtaagacctatcaaaaccactatg

SEQ ID NO: 234138 - DNA, 25 bp, Artificial
  probe
  misc_feature (1)..(25): SEQ ID NO: 1675; WAN024G7G_at; Start 72; Stop 96
aaaatggtatgaagaagataaagac

SEQ ID NO: 234139 - DNA, 25 bp, Artificial
  probe
  misc_feature (1)..(25): SEQ ID NO: 1675; WAN024G7G_at; Start 40; Stop 64
aagacctatcaaaaccactatgtga

SEQ ID NO: 234140 - DNA, 25 bp, Artificial
  probe
  misc_feature (1)..(25): SEQ ID NO: 1675; WAN024G7G_at; Start 16; Stop 40
tccagatacatggaaagcagtggta

SEQ ID NO: 234141 - DNA, 25 bp, Artificial
  probe
  misc_feature (1)..(25): SEQ ID NO: 1675; WAN024G7G_at; Start 39; Stop 63
taagacctatcaaaaccactatgtg

SEQ ID NO: 234142 - DNA, 25 bp, Artificial
  probe
  misc_feature (1)..(25): SEQ ID NO: 1675; WAN024G7G_at; Start 85; Stop 109
gaagataaagacaaactaagacaga

SEQ ID NO: 234143 - DNA, 25 bp, Artificial
  probe
  misc_feature (1)..(25): SEQ ID NO: 1675; WAN024G7G_at; Start 55; Stop 79
cactatgtgacaatcttaaaatggt

SEQ ID NO: 234144 - DNA, 25 bp, Artificial
  probe
  misc_feature (1)..(25): SEQ ID NO: 1675; WAN024G7G_at; Start 89; Stop 113
ataaagacaaactaagacagaaagg

SEQ ID NO: 234145 - DNA, 25 bp, Artificial
  probe
  misc_feature (1)..(25): SEQ ID NO: 1675; WAN024G7G_at; Start 77; Stop 101
ggtatgaagaagataaagacaaact

SEQ ID NO: 234146 - DNA, 25 bp, Artificial
  probe
  misc_feature (1)..(25): SEQ ID NO: 1675; WAN024G7G_at; Start 28; Stop 52
gaaagcagtggtaagacctatcaaa

SEQ ID NO: 234147 - DNA, 25 bp, Artificial
  probe
  misc_feature (1)..(25): SEQ ID NO: 5733; WAN024G7H_at; Start 289; Stop 313
gattgcatcaatacaccgcttatgg

SEQ ID NO: 234148 - DNA, 25 bp, Artificial
  probe
  misc_feature (1)..(25): SEQ ID NO: 5733; WAN024G7H_at; Start 531; Stop 555
tcgcatttttgcatgcatttcctaa

SEQ ID NO: 234149 - DNA, 25 bp, Artificial
  probe
  misc_feature (1)..(25): SEQ ID NO: 5733; WAN024G7H_at; Start 429; Stop 453
gatattaatttcttttgttccaagc

SEQ ID NO: 234150 - DNA, 25 bp, Artificial
  probe
  misc_feature (1)..(25): SEQ ID NO: 5733; WAN024G7H_at; Start 274; Stop 298
gggtttctagtaactgattgcatca

SEQ ID NO: 234151 - DNA, 25 bp, Artificial
  probe
  misc_feature (1)..(25): SEQ ID NO: 5733; WAN024G7H_at; Start 208; Stop 232
gaaagaccaattactacactaagac

SEQ ID NO: 234152 - DNA, 25 bp, Artificial
  probe
  misc_feature (1)..(25): SEQ ID NO: 5733; WAN024G7H_at; Start 445; Stop 469
gttccaagctttaatgacaaaaata

SEQ ID NO: 234153 - DNA, 25 bp, Artificial
  probe
  misc_feature (1)..(25): SEQ ID NO: 5733; WAN024G7H_at; Start 132; Stop 156
tacaaaaattgcacttactaagcca

SEQ ID NO: 234154 - DNA, 25 bp, Artificial
  probe
  misc_feature (1)..(25): SEQ ID NO: 5733; WAN024G7H_at; Start 407; Stop 431
caaaagctgctaaaaaatctctgat

SEQ ID NO: 234155 - DNA, 25 bp, Artificial
  probe
  misc_feature (1)..(25): SEQ ID NO: 5733; WAN024G7H_at; Start 306; Stop 330
gcttatggcaagactagaacctgct

SEQ ID NO: 234156 - DNA, 25 bp, Artificial
  probe
  misc_feature (1)..(25): SEQ ID NO: 5733; WAN024G7H_at; Start 176; Stop 200
tatggcttatgcttgatgaaattcc

SEQ ID NO: 234157 - DNA, 25 bp, Artificial
  probe
  misc_feature (1)..(25): SEQ ID NO: 5733; WAN024G7H_at; Start 113; Stop 137
cgcttacagcaatcgcgtatacaaa

SEQ ID NO: 234158 - DNA, 25 bp, Artificial
  probe
  misc_feature (1)..(25): SEQ ID NO: 5733; WAN024G7H_at; Start 72; Stop 96
tcctgataaggcaagttttataggg

SEQ ID NO: 234159 - DNA, 25 bp, Artificial
  probe
  misc_feature (1)..(25): SEQ ID NO: 5733; WAN024G7H_at; Start 317; Stop 341
gactagaacctgctaaaattgcaaa

SEQ ID NO: 234160 - DNA, 25 bp, Artificial
  probe
  misc_feature (1)..(25): SEQ ID NO: 5733; WAN024G7H_at; Start 471; Stop 495
tgtaataagaagacctaggcagatt

SEQ ID NO: 234161 - DNA, 25 bp, Artificial
  probe
  misc_feature (1)..(25): SEQ ID NO: 5733; WAN024G7H_at; Start 393; Stop 417
tgtattacccattccaaaagctgct

SEQ ID NO: 234162 - DNA, 25 bp, Artificial
  probe
  misc_feature (1)..(25): SEQ ID NO: 5733; WAN024G7H_at; Start 380; Stop 404
taaaatcatcatttgtattacccat

SEQ ID NO: 234163 - DNA, 25 bp, Artificial
  probe
  misc_feature (1)..(25): SEQ ID NO: 5733; WAN024G7H_at; Start 62; Stop 86
taacacaagttcctgataaggcaag

SEQ ID NO: 234164 - DNA, 25 bp, Artificial
  probe
  misc_feature (1)..(25): SEQ ID NO: 5733; WAN024G7H_at; Start 246; Stop 270
tataccgagtatacctggatcagct

SEQ ID NO: 234165 - DNA, 25 bp, Artificial
  probe
  misc_feature (1)..(25): SEQ ID NO: 5733; WAN024G7H_at; Start 158; Stop 182
caatgattgcaaaacttatatggct

SEQ ID NO: 234166 - DNA, 25 bp, Artificial
  probe
  misc_feature (1)..(25): SEQ ID NO: 5733; WAN024G7H_at; Start 35; Stop 59
aacttacaaaactgcttaaagccat

SEQ ID NO: 234167 - DNA, 25 bp, Artificial
  probe
  misc_feature (1)..(25): SEQ ID NO: 5733; WAN024G7H_at; Start 230; Stop 254
gacttgctcctgtgtttataccgag

SEQ ID NO: 234168 - DNA, 25 bp, Artificial
  probe
  misc_feature (1)..(25): SEQ ID NO: 5733; WAN024G7H_at; Start 266; Stop 290
cagctattgggtttctagtaactga

SEQ ID NO: 234169 - DNA, 25 bp, Artificial
  probe
  misc_feature (1)..(25): SEQ ID NO: 5733; WAN024G7H_at; Start 219; Stop 243
tactacactaagacttgctcctgtg

SEQ ID NO: 234170 - DNA, 25 bp, Artificial
  probe
  misc_feature (1)..(25): SEQ ID NO: 5733; WAN024G7H_at; Start 98; Stop 122
taaggcctgcttttccgcttacagc

SEQ ID NO: 234171 - DNA, 25 bp, Artificial
  probe
  misc_feature (1)..(25): SEQ ID NO: 5733; WAN024G7H_at; Start 185; Stop 209
tgcttgatgaaattcctaaaaaaga

SEQ ID NO: 234172 - DNA, 25 bp, Artificial
  probe
  misc_feature (1)..(25): SEQ ID NO: 5733; WAN024G7H_at; Start 2; Stop 26
tgtctaagacgttattattcggtaa

SEQ ID NO: 234173 - DNA, 25 bp, Artificial
  probe
  misc_feature (1)..(25): SEQ ID NO: 5733; WAN024G7H_at; Start 122; Stop 146
caatcgcgtatacaaaaattgcact

SEQ ID NO: 234174 - DNA, 25 bp, Artificial
  probe
  misc_feature (1)..(25): SEQ ID NO: 5733; WAN024G7H_at; Start 335; Stop 359
ttgcaaaaatagttctaggtattct

SEQ ID NO: 234175 - DNA, 25 bp, Artificial
  probe
  misc_feature (1)..(25): SEQ ID NO: 5733; WAN024G7H_at; Start 257; Stop 281
tacctggatcagctattgggtttct

SEQ ID NO: 234176 - DNA, 25 bp, Artificial
  probe
  misc_feature (1)..(25): SEQ ID NO: 5733; WAN024G7H_at; Start 106; Stop 130
gcttttccgcttacagcaatcgcgt

SEQ ID NO: 234177 - DNA, 25 bp, Artificial
  probe
  misc_feature (1)..(25): SEQ ID NO: 5733; WAN024G7H_at; Start 297; Stop 321
caatacaccgcttatggcaagacta

SEQ ID NO: 234178 - DNA, 25 bp, Artificial
  probe
  misc_feature (1)..(25): SEQ ID NO: 5733; WAN024G7H_at; Start 468; Stop 492
tattgtaataagaagacctaggcag

SEQ ID NO: 234179 - DNA, 25 bp, Artificial
  probe
  misc_feature (1)..(25): SEQ ID NO: 5733; WAN024G7H_at; Start 48; Stop 72
gcttaaagccatactaacacaagtt

SEQ ID NO: 234180 - DNA, 25 bp, Artificial
  probe
  misc_feature (1)..(25): SEQ ID NO: 5733; WAN024G7H_at; Start 144; Stop 168
acttactaagccaccaatgattgca

SEQ ID NO: 234181 - DNA, 25 bp, Artificial
  probe
  misc_feature (1)..(25): SEQ ID NO: 1967; WAN024G7I_at; Start 382; Stop 406
gcaatcattggtggcttagtaagtg

SEQ ID NO: 234182 - DNA, 25 bp, Artificial
  probe
  misc_feature (1)..(25): SEQ ID NO: 1967; WAN024G7I_at; Start 761; Stop 785
caagtattactgcaattggtggacc

SEQ ID NO: 234183 - DNA, 25 bp, Artificial
  probe
  misc_feature (1)..(25): SEQ ID NO: 1967; WAN024G7I_at; Start 524; Stop 548
taccgaataataacgtcttagacaa

SEQ ID NO: 234184 - DNA, 25 bp, Artificial
  probe
  misc_feature (1)..(25): SEQ ID NO: 1967; WAN024G7I_at; Start 550; Stop 574
tttagattttggcaaataggtagcc

SEQ ID NO: 234185 - DNA, 25 bp, Artificial
  probe
  misc_feature (1)..(25): SEQ ID NO: 1967; WAN024G7I_at; Start 314; Stop 338
caagtcttagtgtagtaattggtct

SEQ ID NO: 234186 - DNA, 25 bp, Artificial
  probe
  misc_feature (1)..(25): SEQ ID NO: 1967; WAN024G7I_at; Start 416; Stop 440
tatacgcgattgctgtaagcggaaa

SEQ ID NO: 234187 - DNA, 25 bp, Artificial
  probe
  misc_feature (1)..(25): SEQ ID NO: 1967; WAN024G7I_at; Start 880; Stop 904
gcagagctcttgcttatatgtgata

SEQ ID NO: 234188 - DNA, 25 bp, Artificial
  probe
  misc_feature (1)..(25): SEQ ID NO: 1967; WAN024G7I_at; Start 577; Stop 601
ggagcagctacattatcttctatat

SEQ ID NO: 234189 - DNA, 25 bp, Artificial
  probe
  misc_feature (1)..(25): SEQ ID NO: 1967; WAN024G7I_at; Start 280; Stop 304
gctgatccaggtatactcggtataa

SEQ ID NO: 234190 - DNA, 25 bp, Artificial
  probe
  misc_feature (1)..(25): SEQ ID NO: 1967; WAN024G7I_at; Start 791; Stop 815
gcttcgtaggtcttatagttcctca

SEQ ID NO: 234191 - DNA, 25 bp, Artificial
  probe
  misc_feature (1)..(25): SEQ ID NO: 1967; WAN024G7I_at; Start 618; Stop 642
tataattttaggtcacttgatagct

SEQ ID NO: 234192 - DNA, 25 bp, Artificial
  probe
  misc_feature (1)..(25): SEQ ID NO: 1967; WAN024G7I_at; Start 347; Stop 371
taggaatttcatcaagcataagcca

SEQ ID NO: 234193 - DNA, 25 bp, Artificial
  probe
  misc_feature (1)..(25): SEQ ID NO: 1967; WAN024G7I_at; Start 685; Stop 709
gaaatggctgttggtcttggagtta

SEQ ID NO: 234194 - DNA, 25 bp, Artificial
  probe
  misc_feature (1)..(25): SEQ ID NO: 1967; WAN024G7I_at; Start 80; Stop 104
tatttttgtcattaaagcttggaac

SEQ ID NO: 234195 - DNA, 25 bp, Artificial
  probe
  misc_feature (1)..(25): SEQ ID NO: 1967; WAN024G7I_at; Start 54; Stop 78
aatctgcctaggtcttcttattaca

SEQ ID NO: 234196 - DNA, 25 bp, Artificial
  probe
  misc_feature (1)..(25): SEQ ID NO: 1967; WAN024G7I_at; Start 363; Stop 387
cataagccatataagttttgcaatc

SEQ ID NO: 234197 - DNA, 25 bp, Artificial
  probe
  misc_feature (1)..(25): SEQ ID NO: 1967; WAN024G7I_at; Start 470; Stop 494
tatcaggaacttgtgttagtatggc

SEQ ID NO: 234198 - DNA, 25 bp, Artificial
  probe
  misc_feature (1)..(25): SEQ ID NO: 1967; WAN024G7I_at; Start 719; Stop 743
ggataagatcacttgcaataattgc

SEQ ID NO: 234199 - DNA, 25 bp, Artificial
  probe
  misc_feature (1)..(25): SEQ ID NO: 1967; WAN024G7I_at; Start 663; Stop 687
aaacgctttagctatgggtgatgaa

SEQ ID NO: 234200 - DNA, 25 bp, Artificial
  probe
  misc_feature (1)..(25): SEQ ID NO: 1967; WAN024G7I_at; Start 650; Stop 674
tttcatcagatttaaacgctttagc

SEQ ID NO: 234201 - DNA, 25 bp, Artificial
  probe
  misc_feature (1)..(25): SEQ ID NO: 1967; WAN024G7I_at; Start 774; Stop 798
aattggtggacctattggcttcgta

SEQ ID NO: 234202 - DNA, 25 bp, Artificial
  probe
  misc_feature (1)..(25): SEQ ID NO: 1967; WAN024G7I_at; Start 894; Stop 918
tatatgtgatataatcggccgtatg

SEQ ID NO: 234203 - DNA, 25 bp, Artificial
  probe
  misc_feature (1)..(25): SEQ ID NO: 1967; WAN024G7I_at; Start 200; Stop 224
gaactatttttgcaattttagcagg

SEQ ID NO: 234204 - DNA, 25 bp, Artificial
  probe
  misc_feature (1)..(25): SEQ ID NO: 1967; WAN024G7I_at; Start 742; Stop 766
gcaagtgtgcttttatgttcaagta

SEQ ID NO: 234205 - DNA, 25 bp, Artificial
  probe
  misc_feature (1)..(25): SEQ ID NO: 1967; WAN024G7I_at; Start 221; Stop 245
caggttctagtcttgccataagcgg

SEQ ID NO: 234206 - DNA, 25 bp, Artificial
  probe
  misc_feature (1)..(25): SEQ ID NO: 1967; WAN024G7I_at; Start 267; Stop 291
tagaaacccaatagctgatccaggt

SEQ ID NO: 234207 - DNA, 25 bp, Artificial
  probe
  misc_feature (1)..(25): SEQ ID NO: 1967; WAN024G7I_at; Start 429; Stop 453
tgtaagcggaaaagcaggccttacc

SEQ ID NO: 234208 - DNA, 25 bp, Artificial
  probe
  misc_feature (1)..(25): SEQ ID NO: 1967; WAN024G7I_at; Start 119; Stop 143
tcagagattttttagcagcttttgg

SEQ ID NO: 234209 - DNA, 25 bp, Artificial
  probe
  misc_feature (1)..(25): SEQ ID NO: 1967; WAN024G7I_at; Start 296; Stop 320
tcggtataaacacaggagcaagtct

SEQ ID NO: 234210 - DNA, 25 bp, Artificial
  probe
  misc_feature (1)..(25): SEQ ID NO: 1967; WAN024G7I_at; Start 911; Stop 935
gccgtatgttaggtaaaccaggtga

SEQ ID NO: 234211 - DNA, 25 bp, Artificial
  probe
  misc_feature (1)..(25): SEQ ID NO: 1967; WAN024G7I_at; Start 833; Stop 857
taagcaaagatatacgcacaatgac

SEQ ID NO: 234212 - DNA, 25 bp, Artificial
  probe
  misc_feature (1)..(25): SEQ ID NO: 1967; WAN024G7I_at; Start 252; Stop 276
gatgcaatcagttactagaaaccca

SEQ ID NO: 234213 - DNA, 25 bp, Artificial
  probe
  misc_feature (1)..(25): SEQ ID NO: 1967; WAN024G7I_at; Start 562; Stop 586
caaataggtagccttggagcagcta

SEQ ID NO: 234214 - DNA, 25 bp, Artificial
  probe
  misc_feature (1)..(25): SEQ ID NO: 1967; WAN024G7I_at; Start 236; Stop 260
ccataagcggtgtattgatgcaatc

SEQ ID NO: 234215 - DNA, 25 bp, Artificial
  probe
  misc_feature (1)..(25): SEQ ID NO: 665; WAN024G7J_at; Start 898; Stop 922
ggtgccgttgctgtaattccagata

SEQ ID NO: 234216 - DNA, 25 bp, Artificial
  probe
  misc_feature (1)..(25): SEQ ID NO: 665; WAN024G7J_at; Start 645; Stop 669
tgctgcagatacatcaaaattctgg

SEQ ID NO: 234217 - DNA, 25 bp, Artificial
  probe
  misc_feature (1)..(25): SEQ ID NO: 665; WAN024G7J_at; Start 203; Stop 227
tagcattagctttaggaatagttcc

SEQ ID NO: 234218 - DNA, 25 bp, Artificial
  probe
  misc_feature (1)..(25): SEQ ID NO: 665; WAN024G7J_at; Start 505; Stop 529
gattcaaaagccttaggtatggaaa

SEQ ID NO: 234219 - DNA, 25 bp, Artificial
  probe
  misc_feature (1)..(25): SEQ ID NO: 665; WAN024G7J_at; Start 571; Stop 595
tccaaagaattagaaaaacatccag

SEQ ID NO: 234220 - DNA, 25 bp, Artificial
  probe
  misc_feature (1)..(25): SEQ ID NO: 665; WAN024G7J_at; Start 915; Stop 939
tccagataatacaccgttagcagcc

SEQ ID NO: 234221 - DNA, 25 bp, Artificial
  probe
  misc_feature (1)..(25): SEQ ID NO: 665; WAN024G7J_at; Start 189; Stop 213
gggaaatcatgatgtagcattagct

SEQ ID NO: 234222 - DNA, 25 bp, Artificial
  probe
  misc_feature (1)..(25): SEQ ID NO: 665; WAN024G7J_at; Start 53; Stop 77
gcgcttgttcttctaattctgttaa

SEQ ID NO: 234223 - DNA, 25 bp, Artificial
  probe
  misc_feature (1)..(25): SEQ ID NO: 665; WAN024G7J_at; Start 767; Stop 791
caaaggaaatttctgcagaagaagc

SEQ ID NO: 234224 - DNA, 25 bp, Artificial
  probe
  misc_feature (1)..(25): SEQ ID NO: 665; WAN024G7J_at; Start 119; Stop 143
tagttttagatcatgctttcggtca

SEQ ID NO: 234225 - DNA, 25 bp, Artificial
  probe
  misc_feature (1)..(25): SEQ ID NO: 665; WAN024G7J_at; Start 239; Stop 263
caaaagcaaattacggtgtaagtgc

SEQ ID NO: 234226 - DNA, 25 bp, Artificial
  probe
  misc_feature (1)..(25): SEQ ID NO: 665; WAN024G7J_at; Start 152; Stop 176
tagataaaaaacctgaaagagttgc

SEQ ID NO: 234227 - DNA, 25 bp, Artificial
  probe
  misc_feature (1)..(25): SEQ ID NO: 665; WAN024G7J_at; Start 322; Stop 346
aacctatttgacgatttggatggac

SEQ ID NO: 234228 - DNA, 25 bp, Artificial
  probe
  misc_feature (1)..(25): SEQ ID NO: 665; WAN024G7J_at; Start 930; Stop 954
gttagcagcctcatgcactccaaca

SEQ ID NO: 234229 - DNA, 25 bp, Artificial
  probe
  misc_feature (1)..(25): SEQ ID NO: 665; WAN024G7J_at; Start 267; Stop 291
taaaggagttttaccatggacagaa

SEQ ID NO: 234230 - DNA, 25 bp, Artificial
  probe
  misc_feature (1)..(25): SEQ ID NO: 665; WAN024G7J_at; Start 336; Stop 360
tttggatggacttaactttgaagca

SEQ ID NO: 234231 - DNA, 25 bp, Artificial
  probe
  misc_feature (1)..(25): SEQ ID NO: 665; WAN024G7J_at; Start 887; Stop 911
caattaaaaatggtgccgttgctgt

SEQ ID NO: 234232 - DNA, 25 bp, Artificial
  probe
  misc_feature (1)..(25): SEQ ID NO: 665; WAN024G7J_at; Start 629; Stop 653
tatttactatgattaatgctgcaga

SEQ ID NO: 234233 - DNA, 25 bp, Artificial
  probe
  misc_feature (1)..(25): SEQ ID NO: 665; WAN024G7J_at; Start 466; Stop 490
aaaccttggcaaactttatggagag

SEQ ID NO: 234234 - DNA, 25 bp, Artificial
  probe
  misc_feature (1)..(25): SEQ ID NO: 665; WAN024G7J_at; Start 310; Stop 334
aatggtaaagctaacctatttgacg

SEQ ID NO: 234235 - DNA, 25 bp, Artificial
  probe
  misc_feature (1)..(25): SEQ ID NO: 665; WAN024G7J_at; Start 673; Stop 697
tatactagcaaagatccaagagcaa

SEQ ID NO: 234236 - DNA, 25 bp, Artificial
  probe
  misc_feature (1)..(25): SEQ ID NO: 665; WAN024G7J_at; Start 424; Stop 448
gacactctatcaaaaattgctcctg

SEQ ID NO: 234237 - DNA, 25 bp, Artificial
  probe
  misc_feature (1)..(25): SEQ ID NO: 665; WAN024G7J_at; Start 843; Stop 867
tcttgaagctttacaaaaagatcct

SEQ ID NO: 234238 - DNA, 25 bp, Artificial
  probe
  misc_feature (1)..(25): SEQ ID NO: 665; WAN024G7J_at; Start 252; Stop 276
cggtgtaagtgctgataaaggagtt

SEQ ID NO: 234239 - DNA, 25 bp, Artificial
  probe
  misc_feature (1)..(25): SEQ ID NO: 665; WAN024G7J_at; Start 372; Stop 396
taaaccagatgttatcttagcaggt

SEQ ID NO: 234240 - DNA, 25 bp, Artificial
  probe
  misc_feature (1)..(25): SEQ ID NO: 665; WAN024G7J_at; Start 355; Stop 379
gaagcaatatcaaattctaaaccag

SEQ ID NO: 234241 - DNA, 25 bp, Artificial
  probe
  misc_feature (1)..(25): SEQ ID NO: 665; WAN024G7J_at; Start 707; Stop 731
cagatttaggtctagttttccctga

SEQ ID NO: 234242 - DNA, 25 bp, Artificial
  probe
  misc_feature (1)..(25): SEQ ID NO: 665; WAN024G7J_at; Start 748; Stop 772
gagagtgaagatagttttgcaaagg

SEQ ID NO: 234243 - DNA, 25 bp, Artificial
  probe
  misc_feature (1)..(25): SEQ ID NO: 665; WAN024G7J_at; Start 166; Stop 190
gaaagagttgcaactattgcttggg

SEQ ID NO: 234244 - DNA, 25 bp, Artificial
  probe
  misc_feature (1)..(25): SEQ ID NO: 665; WAN024G7J_at; Start 828; Stop 852
tggtgatgataaaactcttgaagct

SEQ ID NO: 234245 - DNA, 25 bp, Artificial
  probe
  misc_feature (1)..(25): SEQ ID NO: 665; WAN024G7J_at; Start 133; Stop 157
gctttcggtcaaactatattagata

SEQ ID NO: 234246 - DNA, 25 bp, Artificial
  probe
  misc_feature (1)..(25): SEQ ID NO: 665; WAN024G7J_at; Start 555; Stop 579
tactgaagctcgtatatccaaagaa

SEQ ID NO: 234247 - DNA, 25 bp, Artificial
  probe
  misc_feature (1)..(25): SEQ ID NO: 665; WAN024G7J_at; Start 407; Stop 431
taactaaagaagattatgacactct

SEQ ID NO: 234248 - DNA, 25 bp, Artificial
  probe
  misc_feature (1)..(25): SEQ ID NO: 665; WAN024G7J_at; Start 451; Stop 475
gcagcatacaaatctaaaccttggc

SEQ ID NO: 234249 - DNA, 25 bp, Artificial
  probe
  misc_feature (1)..(25): SEQ ID NO: 5685; WAN024G7K_at; Start 270; Stop 294
ttctttaaagagtcttattttgtga

SEQ ID NO: 234250 - DNA, 25 bp, Artificial
  probe
  misc_feature (1)..(25): SEQ ID NO: 5685; WAN024G7K_at; Start 111; Stop 135
tcgtgtcataacagttatagaggca

SEQ ID NO: 234251 - DNA, 25 bp, Artificial
  probe
  misc_feature (1)..(25): SEQ ID NO: 5685; WAN024G7K_at; Start 203; Stop 227
ggtgtgctgcttacaatatccattt

SEQ ID NO: 234252 - DNA, 25 bp, Artificial
  probe
  misc_feature (1)..(25): SEQ ID NO: 5685; WAN024G7K_at; Start 200; Stop 224
gttggtgtgctgcttacaatatcca

SEQ ID NO: 234253 - DNA, 25 bp, Artificial
  probe
  misc_feature (1)..(25): SEQ ID NO: 5685; WAN024G7K_at; Start 106; Stop 130
tggtttcgtgtcataacagttatag

SEQ ID NO: 234254 - DNA, 25 bp, Artificial
  probe
  misc_feature (1)..(25): SEQ ID NO: 5685; WAN024G7K_at; Start 150; Stop 174
tataaggagttcaagacttctacca

SEQ ID NO: 234255 - DNA, 25 bp, Artificial
  probe
  misc_feature (1)..(25): SEQ ID NO: 5685; WAN024G7K_at; Start 60; Stop 84
tagtcctcatttgaataaagatatg

SEQ ID NO: 234256 - DNA, 25 bp, Artificial
  probe
  misc_feature (1)..(25): SEQ ID NO: 5685; WAN024G7K_at; Start 81; Stop 105
tatggaggtgcttgaacttgcttgt

SEQ ID NO: 234257 - DNA, 25 bp, Artificial
  probe
  misc_feature (1)..(25): SEQ ID NO: 5685; WAN024G7K_at; Start 211; Stop 235
gcttacaatatccattttaataatg

SEQ ID NO: 234258 - DNA, 25 bp, Artificial
  probe
  misc_feature (1)..(25): SEQ ID NO: 5685; WAN024G7K_at; Start 146; Stop 170
taaatataaggagttcaagacttct

SEQ ID NO: 234259 - DNA, 25 bp, Artificial
  probe
  misc_feature (1)..(25): SEQ ID NO: 5685; WAN024G7K_at; Start 152; Stop 176
taaggagttcaagacttctaccaaa

SEQ ID NO: 234260 - DNA, 25 bp, Artificial
  probe
  misc_feature (1)..(25): SEQ ID NO: 5685; WAN024G7K_at; Start 44; Stop 68
aagtttgtgaatatcttagtcctca

SEQ ID NO: 234261 - DNA, 25 bp, Artificial
  probe
  misc_feature (1)..(25): SEQ ID NO: 5685; WAN024G7K_at; Start 198; Stop 222
tagttggtgtgctgcttacaatatc

SEQ ID NO: 234262 - DNA, 25 bp, Artificial
  probe
  misc_feature (1)..(25): SEQ ID NO: 5685; WAN024G7K_at; Start 142; Stop 166
tatgtaaatataaggagttcaagac

SEQ ID NO: 234263 - DNA, 25 bp, Artificial
  probe
  misc_feature (1)..(25): SEQ ID NO: 5685; WAN024G7K_at; Start 154; Stop 178
aggagttcaagacttctaccaaagt

SEQ ID NO: 234264 - DNA, 25 bp, Artificial
  probe
  misc_feature (1)..(25): SEQ ID NO: 5685; WAN024G7K_at; Start 194; Stop 218
taaatagttggtgtgctgcttacaa

SEQ ID NO: 234265 - DNA, 25 bp, Artificial
  probe
  misc_feature (1)..(25): SEQ ID NO: 5685; WAN024G7K_at; Start 185; Stop 209
ctcaaaaaataaatagttggtgtgc

SEQ ID NO: 234266 - DNA, 25 bp, Artificial
  probe
  misc_feature (1)..(25): SEQ ID NO: 5685; WAN024G7K_at; Start 94; Stop 118
gaacttgcttgttggtttcgtgtca

SEQ ID NO: 234267 - DNA, 25 bp, Artificial
  probe
  misc_feature (1)..(25): SEQ ID NO: 5685; WAN024G7K_at; Start 49; Stop 73
tgtgaatatcttagtcctcatttga

SEQ ID NO: 234268 - DNA, 25 bp, Artificial
  probe
  misc_feature (1)..(25): SEQ ID NO: 5685; WAN024G7K_at; Start 189; Stop 213
aaaaataaatagttggtgtgctgct

SEQ ID NO: 234269 - DNA, 25 bp, Artificial
  probe
  misc_feature (1)..(25): SEQ ID NO: 5685; WAN024G7K_at; Start 97; Stop 121
cttgcttgttggtttcgtgtcataa

SEQ ID NO: 234270 - DNA, 25 bp, Artificial
  probe
  misc_feature (1)..(25): SEQ ID NO: 5685; WAN024G7K_at; Start 67; Stop 91
catttgaataaagatatggaggtgc

SEQ ID NO: 234271 - DNA, 25 bp, Artificial
  probe
  misc_feature (1)..(25): SEQ ID NO: 5685; WAN024G7K_at; Start 2; Stop 26
tgtatgccccttttatgaaaaaaga

SEQ ID NO: 234272 - DNA, 25 bp, Artificial
  probe
  misc_feature (1)..(25): SEQ ID NO: 5685; WAN024G7K_at; Start 100; Stop 124
gcttgttggtttcgtgtcataacag

SEQ ID NO: 234273 - DNA, 25 bp, Artificial
  probe
  misc_feature (1)..(25): SEQ ID NO: 5685; WAN024G7K_at; Start 116; Stop 140
tcataacagttatagaggcaaatag

SEQ ID NO: 234274 - DNA, 25 bp, Artificial
  probe
  misc_feature (1)..(25): SEQ ID NO: 5685; WAN024G7K_at; Start 227; Stop 251
ttaataatggatattgtaagcagca

SEQ ID NO: 234275 - DNA, 25 bp, Artificial
  probe
  misc_feature (1)..(25): SEQ ID NO: 5685; WAN024G7K_at; Start 206; Stop 230
gtgctgcttacaatatccattttaa

SEQ ID NO: 234276 - DNA, 25 bp, Artificial
  probe
  misc_feature (1)..(25): SEQ ID NO: 5685; WAN024G7K_at; Start 52; Stop 76
gaatatcttagtcctcatttgaata

SEQ ID NO: 234277 - DNA, 25 bp, Artificial
  probe
  misc_feature (1)..(25): SEQ ID NO: 5685; WAN024G7K_at; Start 122; Stop 146
cagttatagaggcaaatagttatgt

SEQ ID NO: 234278 - DNA, 25 bp, Artificial
  probe
  misc_feature (1)..(25): SEQ ID NO: 5685; WAN024G7K_at; Start 77; Stop 101
aagatatggaggtgcttgaacttgc

SEQ ID NO: 234279 - DNA, 25 bp, Artificial
  probe
  misc_feature (1)..(25): SEQ ID NO: 5685; WAN024G7K_at; Start 126; Stop 150
tatagaggcaaatagttatgtaaat

SEQ ID NO: 234280 - DNA, 25 bp, Artificial
  probe
  misc_feature (1)..(25): SEQ ID NO: 5685; WAN024G7K_at; Start 17; Stop 41
tgaaaaaagataaagaggtttatga

SEQ ID NO: 234281 - DNA, 25 bp, Artificial
  probe
  misc_feature (1)..(25): SEQ ID NO: 5685; WAN024G7K_at; Start 192; Stop 216
aataaatagttggtgtgctgcttac

SEQ ID NO: 234282 - DNA, 25 bp, Artificial
  probe
  misc_feature (1)..(25): SEQ ID NO: 5685; WAN024G7K_at; Start 73; Stop 97
aataaagatatggaggtgcttgaac

SEQ ID NO: 234283 - DNA, 25 bp, Artificial
  probe
  misc_feature (1)..(25): SEQ ID NO: 7641; WAN024G7L_at; Start 101; Stop 125
gcattttcagccgtgtcacagacat

SEQ ID NO: 234284 - DNA, 25 bp, Artificial
  probe
  misc_feature (1)..(25): SEQ ID NO: 7641; WAN024G7L_at; Start 164; Stop 188
tggctattctctactgcttctggaa

SEQ ID NO: 234285 - DNA, 25 bp, Artificial
  probe
  misc_feature (1)..(25): SEQ ID NO: 7641; WAN024G7L_at; Start 80; Stop 104
tccttgagccatttcttcatggcat

SEQ ID NO: 234286 - DNA, 25 bp, Artificial
  probe
  misc_feature (1)..(25): SEQ ID NO: 7641; WAN024G7L_at; Start 16; Stop 40
gataaagctttctgtcaagcccttg

SEQ ID NO: 234287 - DNA, 25 bp, Artificial
  probe
  misc_feature (1)..(25): SEQ ID NO: 7641; WAN024G7L_at; Start 72; Stop 96
gaataccttccttgagccatttctt

SEQ ID NO: 234288 - DNA, 25 bp, Artificial
  probe
  misc_feature (1)..(25): SEQ ID NO: 7641; WAN024G7L_at; Start 168; Stop 192
tattctctactgcttctggaatcag

SEQ ID NO: 234289 - DNA, 25 bp, Artificial
  probe
  misc_feature (1)..(25): SEQ ID NO: 7641; WAN024G7L_at; Start 112; Stop 136
cgtgtcacagacatagtgggcatta

SEQ ID NO: 234290 - DNA, 25 bp, Artificial
  probe
  misc_feature (1)..(25): SEQ ID NO: 7641; WAN024G7L_at; Start 55; Stop 79
caagataacggttggttgaatacct

SEQ ID NO: 234291 - DNA, 25 bp, Artificial
  probe
  misc_feature (1)..(25): SEQ ID NO: 7641; WAN024G7L_at; Start 152; Stop 176
gaagcattcttctggctattctcta

SEQ ID NO: 234292 - DNA, 25 bp, Artificial
  probe
  misc_feature (1)..(25): SEQ ID NO: 7641; WAN024G7L_at; Start 201; Stop 225
cgtagacttctttgacatgcttggc

SEQ ID NO: 234293 - DNA, 25 bp, Artificial
  probe
  misc_feature (1)..(25): SEQ ID NO: 7641; WAN024G7L_at; Start 205; Stop 229
gacttctttgacatgcttggcgact

SEQ ID NO: 234294 - DNA, 25 bp, Artificial
  probe
  misc_feature (1)..(25): SEQ ID NO: 7641; WAN024G7L_at; Start 207; Stop 231
cttctttgacatgcttggcgactga

SEQ ID NO: 234295 - DNA, 25 bp, Artificial
  probe
  misc_feature (1)..(25): SEQ ID NO: 7641; WAN024G7L_at; Start 178; Stop 202
tgcttctggaatcagttcaacaccg

SEQ ID NO: 234296 - DNA, 25 bp, Artificial
  probe
  misc_feature (1)..(25): SEQ ID NO: 7641; WAN024G7L_at; Start 22; Stop 46
gctttctgtcaagcccttgcgtgga

SEQ ID NO: 234297 - DNA, 25 bp, Artificial
  probe
  misc_feature (1)..(25): SEQ ID NO: 7641; WAN024G7L_at; Start 1; Stop 25
ttgggcgcttgctttgataaagctt

SEQ ID NO: 234298 - DNA, 25 bp, Artificial
  probe
  misc_feature (1)..(25): SEQ ID NO: 7641; WAN024G7L_at; Start 125; Stop 149
tagtgggcattagtaatcttgttca

SEQ ID NO: 234299 - DNA, 25 bp, Artificial
  probe
  misc_feature (1)..(25): SEQ ID NO: 7641; WAN024G7L_at; Start 43; Stop 67
tggaggatcaaccaagataacggtt

SEQ ID NO: 234300 - DNA, 25 bp, Artificial
  probe
  misc_feature (1)..(25): SEQ ID NO: 7641; WAN024G7L_at; Start 116; Stop 140
tcacagacatagtgggcattagtaa

SEQ ID NO: 234301 - DNA, 25 bp, Artificial
  probe
  misc_feature (1)..(25): SEQ ID NO: 7641; WAN024G7L_at; Start 68; Stop 92
ggttgaataccttccttgagccatt

SEQ ID NO: 234302 - DNA, 25 bp, Artificial
  probe
  misc_feature (1)..(25): SEQ ID NO: 7641; WAN024G7L_at; Start 107; Stop 131
tcagccgtgtcacagacatagtggg

SEQ ID NO: 234303 - DNA, 25 bp, Artificial
  probe
  misc_feature (1)..(25): SEQ ID NO: 7641; WAN024G7L_at; Start 97; Stop 121
catggcattttcagccgtgtcacag

SEQ ID NO: 234304 - DNA, 25 bp, Artificial
  probe
  misc_feature (1)..(25): SEQ ID NO: 7641; WAN024G7L_at; Start 184; Stop 208
tggaatcagttcaacaccgtagact

SEQ ID NO: 234305 - DNA, 25 bp, Artificial
  probe
  misc_feature (1)..(25): SEQ ID NO: 7641; WAN024G7L_at; Start 31; Stop 55
caagcccttgcgtggaggatcaacc

SEQ ID NO: 234306 - DNA, 25 bp, Artificial
  probe
  misc_feature (1)..(25): SEQ ID NO: 7641; WAN024G7L_at; Start 121; Stop 145
gacatagtgggcattagtaatcttg

SEQ ID NO: 234307 - DNA, 25 bp, Artificial
  probe
  misc_feature (1)..(25): SEQ ID NO: 7641; WAN024G7L_at; Start 93; Stop 117
tcttcatggcattttcagccgtgtc

SEQ ID NO: 234308 - DNA, 25 bp, Artificial
  probe
  misc_feature (1)..(25): SEQ ID NO: 7641; WAN024G7L_at; Start 18; Stop 42
taaagctttctgtcaagcccttgcg

SEQ ID NO: 234309 - DNA, 25 bp, Artificial
  probe
  misc_feature (1)..(25): SEQ ID NO: 7641; WAN024G7L_at; Start 195; Stop 219
caacaccgtagacttctttgacatg

SEQ ID NO: 234310 - DNA, 25 bp, Artificial
  probe
  misc_feature (1)..(25): SEQ ID NO: 7641; WAN024G7L_at; Start 35; Stop 59
cccttgcgtggaggatcaaccaaga

SEQ ID NO: 234311 - DNA, 25 bp, Artificial
  probe
  misc_feature (1)..(25): SEQ ID NO: 7641; WAN024G7L_at; Start 144; Stop 168
tgttcaaagaagcattcttctggct

SEQ ID NO: 234312 - DNA, 25 bp, Artificial
  probe
  misc_feature (1)..(25): SEQ ID NO: 7641; WAN024G7L_at; Start 28; Stop 52
tgtcaagcccttgcgtggaggatca

SEQ ID NO: 234313 - DNA, 25 bp, Artificial
  probe
  misc_feature (1)..(25): SEQ ID NO: 7641; WAN024G7L_at; Start 132; Stop 156
cattagtaatcttgttcaaagaagc

SEQ ID NO: 234314 - DNA, 25 bp, Artificial
  probe
  misc_feature (1)..(25): SEQ ID NO: 7641; WAN024G7L_at; Start 39; Stop 63
tgcgtggaggatcaaccaagataac

SEQ ID NO: 234315 - DNA, 25 bp, Artificial
  probe
  misc_feature (1)..(25): SEQ ID NO: 7641; WAN024G7L_at; Start 190; Stop 214
cagttcaacaccgtagacttctttg

SEQ ID NO: 234316 - DNA, 25 bp, Artificial
  probe
  misc_feature (1)..(25): SEQ ID NO: 7641; WAN024G7L_at; Start 64; Stop 88
ggttggttgaataccttccttgagc

SEQ ID NO: 234317 - DNA, 25 bp, Artificial
  probe
  misc_feature (1)..(25): SEQ ID NO: 7488; WAN024G7M_at; Start 30; Stop 54
tgacttggtaaaaggctgggccagc

SEQ ID NO: 234318 - DNA, 25 bp, Artificial
  probe
  misc_feature (1)..(25): SEQ ID NO: 7488; WAN024G7M_at; Start 50; Stop 74
ccagcgatttggaagtcatttccca

SEQ ID NO: 234319 - DNA, 25 bp, Artificial
  probe
  misc_feature (1)..(25): SEQ ID NO: 7488; WAN024G7M_at; Start 7; Stop 31
gagtttctccgccatttcagtattg

SEQ ID NO: 234320 - DNA, 25 bp, Artificial
  probe
  misc_feature (1)..(25): SEQ ID NO: 7488; WAN024G7M_at; Start 150; Stop 174
cgttgatattttgcatgacagacac

SEQ ID NO: 234321 - DNA, 25 bp, Artificial
  probe
  misc_feature (1)..(25): SEQ ID NO: 7488; WAN024G7M_at; Start 116; Stop 140
cactccttaccaaaaatcgcattgg

SEQ ID NO: 234322 - DNA, 25 bp, Artificial
  probe
  misc_feature (1)..(25): SEQ ID NO: 7488; WAN024G7M_at; Start 126; Stop 150
caaaaatcgcattggtattctggtc

SEQ ID NO: 234323 - DNA, 25 bp, Artificial
  probe
  misc_feature (1)..(25): SEQ ID NO: 7488; WAN024G7M_at; Start 177; Stop 201
tctctgggaactgcttgataacttg

SEQ ID NO: 234324 - DNA, 25 bp, Artificial
  probe
  misc_feature (1)..(25): SEQ ID NO: 7488; WAN024G7M_at; Start 2; Stop 26
tgatagagtttctccgccatttcag

SEQ ID NO: 234325 - DNA, 25 bp, Artificial
  probe
  misc_feature (1)..(25): SEQ ID NO: 7488; WAN024G7M_at; Start 98; Stop 122
tgaccataaagagtgcgccactcct

SEQ ID NO: 234326 - DNA, 25 bp, Artificial
  probe
  misc_feature (1)..(25): SEQ ID NO: 7488; WAN024G7M_at; Start 159; Stop 183
tttgcatgacagacacaatctctgg

SEQ ID NO: 234327 - DNA, 25 bp, Artificial
  probe
  misc_feature (1)..(25): SEQ ID NO: 7488; WAN024G7M_at; Start 44; Stop 68
gctgggccagcgatttggaagtcat

SEQ ID NO: 234328 - DNA, 25 bp, Artificial
  probe
  misc_feature (1)..(25): SEQ ID NO: 7488; WAN024G7M_at; Start 195; Stop 219
taacttgttcaatcaattggtcaac

SEQ ID NO: 234329 - DNA, 25 bp, Artificial
  probe
  misc_feature (1)..(25): SEQ ID NO: 7488; WAN024G7M_at; Start 174; Stop 198
caatctctgggaactgcttgataac

SEQ ID NO: 234330 - DNA, 25 bp, Artificial
  probe
  misc_feature (1)..(25): SEQ ID NO: 7488; WAN024G7M_at; Start 58; Stop 82
ttggaagtcatttcccaacatctgg

SEQ ID NO: 234331 - DNA, 25 bp, Artificial
  probe
  misc_feature (1)..(25): SEQ ID NO: 7488; WAN024G7M_at; Start 246; Stop 270
ccaaaacgaccatgatttgtcctga

SEQ ID NO: 234332 - DNA, 25 bp, Artificial
  probe
  misc_feature (1)..(25): SEQ ID NO: 7488; WAN024G7M_at; Start 95; Stop 119
tcttgaccataaagagtgcgccact

SEQ ID NO: 234333 - DNA, 25 bp, Artificial
  probe
  misc_feature (1)..(25): SEQ ID NO: 7488; WAN024G7M_at; Start 12; Stop 36
tctccgccatttcagtattgacttg

SEQ ID NO: 234334 - DNA, 25 bp, Artificial
  probe
  misc_feature (1)..(25): SEQ ID NO: 7488; WAN024G7M_at; Start 201; Stop 225
gttcaatcaattggtcaacacgaaa

SEQ ID NO: 234335 - DNA, 25 bp, Artificial
  probe
  misc_feature (1)..(25): SEQ ID NO: 7488; WAN024G7M_at; Start 133; Stop 157
cgcattggtattctggtcgttgata

SEQ ID NO: 234336 - DNA, 25 bp, Artificial
  probe
  misc_feature (1)..(25): SEQ ID NO: 7488; WAN024G7M_at; Start 139; Stop 163
ggtattctggtcgttgatattttgc

SEQ ID NO: 234337 - DNA, 25 bp, Artificial
  probe
  misc_feature (1)..(25): SEQ ID NO: 7488; WAN024G7M_at; Start 236; Stop 260
cgagttgtcaccaaaacgaccatga

SEQ ID NO: 234338 - DNA, 25 bp, Artificial
  probe
  misc_feature (1)..(25): SEQ ID NO: 7488; WAN024G7M_at; Start 76; Stop 100
catctggtccgtaatatagtcttga

SEQ ID NO: 234339 - DNA, 25 bp, Artificial
  probe
  misc_feature (1)..(25): SEQ ID NO: 7488; WAN024G7M_at; Start 92; Stop 116
tagtcttgaccataaagagtgcgcc

SEQ ID NO: 234340 - DNA, 25 bp, Artificial
  probe
  misc_feature (1)..(25): SEQ ID NO: 7488; WAN024G7M_at; Start 182; Stop 206
gggaactgcttgataacttgttcaa

SEQ ID NO: 234341 - DNA, 25 bp, Artificial
  probe
  misc_feature (1)..(25): SEQ ID NO: 7488; WAN024G7M_at; Start 90; Stop 114
tatagtcttgaccataaagagtgcg

SEQ ID NO: 234342 - DNA, 25 bp, Artificial
  probe
  misc_feature (1)..(25): SEQ ID NO: 7488; WAN024G7M_at; Start 170; Stop 194
gacacaatctctgggaactgcttga

SEQ ID NO: 234343 - DNA, 25 bp, Artificial
  probe
  misc_feature (1)..(25): SEQ ID NO: 7488; WAN024G7M_at; Start 163; Stop 187
catgacagacacaatctctgggaac

SEQ ID NO: 234344 - DNA, 25 bp, Artificial
  probe
  misc_feature (1)..(25): SEQ ID NO: 7488; WAN024G7M_at; Start 27; Stop 51
tattgacttggtaaaaggctgggcc

SEQ ID NO: 234345 - DNA, 25 bp, Artificial
  probe
  misc_feature (1)..(25): SEQ ID NO: 7488; WAN024G7M_at; Start 62; Stop 86
aagtcatttcccaacatctggtccg

SEQ ID NO: 234346 - DNA, 25 bp, Artificial
  probe
  misc_feature (1)..(25): SEQ ID NO: 7488; WAN024G7M_at; Start 231; Stop 255
ttggacgagttgtcaccaaaacgac

SEQ ID NO: 234347 - DNA, 25 bp, Artificial
  probe
  misc_feature (1)..(25): SEQ ID NO: 7488; WAN024G7M_at; Start 206; Stop 230
atcaattggtcaacacgaaaaactt

SEQ ID NO: 234348 - DNA, 25 bp, Artificial
  probe
  misc_feature (1)..(25): SEQ ID NO: 7488; WAN024G7M_at; Start 239; Stop 263
gttgtcaccaaaacgaccatgattt

SEQ ID NO: 234349 - DNA, 25 bp, Artificial
  probe
  misc_feature (1)..(25): SEQ ID NO: 7488; WAN024G7M_at; Start 70; Stop 94
tcccaacatctggtccgtaatatag

SEQ ID NO: 234350 - DNA, 25 bp, Artificial
  probe
  misc_feature (1)..(25): SEQ ID NO: 7488; WAN024G7M_at; Start 108; Stop 132
gagtgcgccactccttaccaaaaat

SEQ ID NO: 234351 - DNA, 25 bp, Artificial
  probe
  misc_feature (1)..(25): SEQ ID NO: 5615; WAN024G7N_at; Start 186; Stop 210
caatcttgtagagactgtccttgac

SEQ ID NO: 234352 - DNA, 25 bp, Artificial
  probe
  misc_feature (1)..(25): SEQ ID NO: 5615; WAN024G7N_at; Start 176; Stop 200
gcaattccagcaatcttgtagagac

SEQ ID NO: 234353 - DNA, 25 bp, Artificial
  probe
  misc_feature (1)..(25): SEQ ID NO: 5615; WAN024G7N_at; Start 117; Stop 141
ccttattgcgatacttgactggatg

SEQ ID NO: 234354 - DNA, 25 bp, Artificial
  probe
  misc_feature (1)..(25): SEQ ID NO: 5615; WAN024G7N_at; Start 234; Stop 258
gttctggataagaaaggtgtcctaa

SEQ ID NO: 234355 - DNA, 25 bp, Artificial
  probe
  misc_feature (1)..(25): SEQ ID NO: 5615; WAN024G7N_at; Start 114; Stop 138
gcgccttattgcgatacttgactgg

SEQ ID NO: 234356 - DNA, 25 bp, Artificial
  probe
  misc_feature (1)..(25): SEQ ID NO: 5615; WAN024G7N_at; Start 1; Stop 25
ttggtcaatgacaggatcctggata

SEQ ID NO: 234357 - DNA, 25 bp, Artificial
  probe
  misc_feature (1)..(25): SEQ ID NO: 5615; WAN024G7N_at; Start 231; Stop 255
gctgttctggataagaaaggtgtcc

SEQ ID NO: 234358 - DNA, 25 bp, Artificial
  probe
  misc_feature (1)..(25): SEQ ID NO: 5615; WAN024G7N_at; Start 67; Stop 91
gaaaaatcctgtttccaagacacca

SEQ ID NO: 234359 - DNA, 25 bp, Artificial
  probe
  misc_feature (1)..(25): SEQ ID NO: 5615; WAN024G7N_at; Start 6; Stop 30
caatgacaggatcctggataaagaa

SEQ ID NO: 234360 - DNA, 25 bp, Artificial
  probe
  misc_feature (1)..(25): SEQ ID NO: 5615; WAN024G7N_at; Start 91; Stop 115
attcactcgacgaacgggcacctgc

SEQ ID NO: 234361 - DNA, 25 bp, Artificial
  probe
  misc_feature (1)..(25): SEQ ID NO: 5615; WAN024G7N_at; Start 120; Stop 144
tattgcgatacttgactggatgttc

SEQ ID NO: 234362 - DNA, 25 bp, Artificial
  probe
  misc_feature (1)..(25): SEQ ID NO: 5615; WAN024G7N_at; Start 124; Stop 148
gcgatacttgactggatgttccata

SEQ ID NO: 234363 - DNA, 25 bp, Artificial
  probe
  misc_feature (1)..(25): SEQ ID NO: 5615; WAN024G7N_at; Start 181; Stop 205
tccagcaatcttgtagagactgtcc

SEQ ID NO: 234364 - DNA, 25 bp, Artificial
  probe
  misc_feature (1)..(25): SEQ ID NO: 5615; WAN024G7N_at; Start 131; Stop 155
ttgactggatgttccataccaagcg

SEQ ID NO: 234365 - DNA, 25 bp, Artificial
  probe
  misc_feature (1)..(25): SEQ ID NO: 5615; WAN024G7N_at; Start 100; Stop 124
acgaacgggcacctgcgccttattg

SEQ ID NO: 234366 - DNA, 25 bp, Artificial
  probe
  misc_feature (1)..(25): SEQ ID NO: 5615; WAN024G7N_at; Start 12; Stop 36
caggatcctggataaagaaatcttc

SEQ ID NO: 234367 - DNA, 25 bp, Artificial
  probe
  misc_feature (1)..(25): SEQ ID NO: 5615; WAN024G7N_at; Start 137; Stop 161
ggatgttccataccaagcgtttcag

SEQ ID NO: 234368 - DNA, 25 bp, Artificial
  probe
  misc_feature (1)..(25): SEQ ID NO: 5615; WAN024G7N_at; Start 198; Stop 222
gactgtccttgacttgcttggtttt

SEQ ID NO: 234369 - DNA, 25 bp, Artificial
  probe
  misc_feature (1)..(25): SEQ ID NO: 5615; WAN024G7N_at; Start 150; Stop 174
caagcgtttcagcaacttctacatc

SEQ ID NO: 234370 - DNA, 25 bp, Artificial
  probe
  misc_feature (1)..(25): SEQ ID NO: 5615; WAN024G7N_at; Start 140; Stop 164
tgttccataccaagcgtttcagcaa

SEQ ID NO: 234371 - DNA, 25 bp, Artificial
  probe
  misc_feature (1)..(25): SEQ ID NO: 5615; WAN024G7N_at; Start 83; Stop 107
aagacaccattcactcgacgaacgg

SEQ ID NO: 234372 - DNA, 25 bp, Artificial
  probe
  misc_feature (1)..(25): SEQ ID NO: 5615; WAN024G7N_at; Start 53; Stop 77
tgcgaattcttacggaaaaatcctg

SEQ ID NO: 234373 - DNA, 25 bp, Artificial
  probe
  misc_feature (1)..(25): SEQ ID NO: 5615; WAN024G7N_at; Start 76; Stop 100
tgtttccaagacaccattcactcga

SEQ ID NO: 234374 - DNA, 25 bp, Artificial
  probe
  misc_feature (1)..(25): SEQ ID NO: 5615; WAN024G7N_at; Start 106; Stop 130
gggcacctgcgccttattgcgatac

SEQ ID NO: 234375 - DNA, 25 bp, Artificial
  probe
  misc_feature (1)..(25): SEQ ID NO: 5615; WAN024G7N_at; Start 17; Stop 41
tcctggataaagaaatcttcaaggg

SEQ ID NO: 234376 - DNA, 25 bp, Artificial
  probe
  misc_feature (1)..(25): SEQ ID NO: 5615; WAN024G7N_at; Start 169; Stop 193
tacatctgcaattccagcaatcttg

SEQ ID NO: 234377 - DNA, 25 bp, Artificial
  probe
  misc_feature (1)..(25): SEQ ID NO: 5615; WAN024G7N_at; Start 217; Stop 241
ggttttaaacttgagctgttctgga

SEQ ID NO: 234378 - DNA, 25 bp, Artificial
  probe
  misc_feature (1)..(25): SEQ ID NO: 5615; WAN024G7N_at; Start 86; Stop 110
acaccattcactcgacgaacgggca

SEQ ID NO: 234379 - DNA, 25 bp, Artificial
  probe
  misc_feature (1)..(25): SEQ ID NO: 5615; WAN024G7N_at; Start 155; Stop 179
gtttcagcaacttctacatctgcaa

SEQ ID NO: 234380 - DNA, 25 bp, Artificial
  probe
  misc_feature (1)..(25): SEQ ID NO: 5615; WAN024G7N_at; Start 205; Stop 229
cttgacttgcttggttttaaacttg

SEQ ID NO: 234381 - DNA, 25 bp, Artificial
  probe
  misc_feature (1)..(25): SEQ ID NO: 5615; WAN024G7N_at; Start 25; Stop 49
aaagaaatcttcaaggggcatgagg

SEQ ID NO: 234382 - DNA, 25 bp, Artificial
  probe
  misc_feature (1)..(25): SEQ ID NO: 5615; WAN024G7N_at; Start 222; Stop 246
taaacttgagctgttctggataaga

SEQ ID NO: 234383 - DNA, 25 bp, Artificial
  probe
  misc_feature (1)..(25): SEQ ID NO: 5615; WAN024G7N_at; Start 161; Stop 185
gcaacttctacatctgcaattccag

SEQ ID NO: 234384 - DNA, 25 bp, Artificial
  probe
  misc_feature (1)..(25): SEQ ID NO: 5615; WAN024G7N_at; Start 145; Stop 169
cataccaagcgtttcagcaacttct

SEQ ID NO: 234385 - DNA, 25 bp, Artificial
  probe
  misc_feature (1)..(25): SEQ ID NO: 2982; WAN024G7O_at; Start 282; Stop 306
taaaaccaagcaagtcaaggacagt

SEQ ID NO: 234386 - DNA, 25 bp, Artificial
  probe
  misc_feature (1)..(25): SEQ ID NO: 2982; WAN024G7O_at; Start 397; Stop 421
cccgttcgtcgagtgaatggtgtct

SEQ ID NO: 234387 - DNA, 25 bp, Artificial
  probe
  misc_feature (1)..(25): SEQ ID NO: 2982; WAN024G7O_at; Start 1311; Stop 1335
tcaaacgcatcacgtcgagacggta

SEQ ID NO: 234388 - DNA, 25 bp, Artificial
  probe
  misc_feature (1)..(25): SEQ ID NO: 2982; WAN024G7O_at; Start 946; Stop 970
ggaaccattggtttatcagtcgcca

SEQ ID NO: 234389 - DNA, 25 bp, Artificial
  probe
  misc_feature (1)..(25): SEQ ID NO: 2982; WAN024G7O_at; Start 623; Stop 647
tcatggtcgttttggtgacaactcg

SEQ ID NO: 234390 - DNA, 25 bp, Artificial
  probe
  misc_feature (1)..(25): SEQ ID NO: 2982; WAN024G7O_at; Start 1222; Stop 1246
tgcaatgtcgcaaccatggcgcgtg

SEQ ID NO: 234391 - DNA, 25 bp, Artificial
  probe
  misc_feature (1)..(25): SEQ ID NO: 2982; WAN024G7O_at; Start 1273; Stop 1297
tatgaattgaagaaagtccagccgg

SEQ ID NO: 234392 - DNA, 25 bp, Artificial
  probe
  misc_feature (1)..(25): SEQ ID NO: 2982; WAN024G7O_at; Start 847; Stop 871
caagtcaatactgaaatggcggaga

SEQ ID NO: 234393 - DNA, 25 bp, Artificial
  probe
  misc_feature (1)..(25): SEQ ID NO: 2982; WAN024G7O_at; Start 117; Stop 141
aaaaattctcatgcgtgtcctcaag

SEQ ID NO: 234394 - DNA, 25 bp, Artificial
  probe
  misc_feature (1)..(25): SEQ ID NO: 2982; WAN024G7O_at; Start 172; Stop 196
gaaaaataccttgtccagtcaccac

SEQ ID NO: 234395 - DNA, 25 bp, Artificial
  probe
  misc_feature (1)..(25): SEQ ID NO: 2982; WAN024G7O_at; Start 1594; Stop 1618
gccatcatggatgctttgagacact

SEQ ID NO: 234396 - DNA, 25 bp, Artificial
  probe
  misc_feature (1)..(25): SEQ ID NO: 2982; WAN024G7O_at; Start 1172; Stop 1196
ttatcaaagcaagcgcccaaacagg

SEQ ID NO: 234397 - DNA, 25 bp, Artificial
  probe
  misc_feature (1)..(25): SEQ ID NO: 2982; WAN024G7O_at; Start 811; Stop 835
ggaaatgacttccaaatcgctggcc

SEQ ID NO: 234398 - DNA, 25 bp, Artificial
  probe
  misc_feature (1)..(25): SEQ ID NO: 2982; WAN024G7O_at; Start 1575; Stop 1599
tacacctgaaaaagaagaagccatc

SEQ ID NO: 234399 - DNA, 25 bp, Artificial
  probe
  misc_feature (1)..(25): SEQ ID NO: 2982; WAN024G7O_at; Start 33; Stop 57
aattgttgatttgacccatgaaggg

SEQ ID NO: 234400 - DNA, 25 bp, Artificial
  probe
  misc_feature (1)..(25): SEQ ID NO: 2982; WAN024G7O_at; Start 1404; Stop 1428
gacaagtgcggagagcaaagcaaca

SEQ ID NO: 234401 - DNA, 25 bp, Artificial
  probe
  misc_feature (1)..(25): SEQ ID NO: 2982; WAN024G7O_at; Start 212; Stop 236
tagatttggcttacctgcgttcagg

SEQ ID NO: 234402 - DNA, 25 bp, Artificial
  probe
  misc_feature (1)..(25): SEQ ID NO: 2982; WAN024G7O_at; Start 585; Stop 609
gaatcttgtggtgcgtcgtggtcac

SEQ ID NO: 234403 - DNA, 25 bp, Artificial
  probe
  misc_feature (1)..(25): SEQ ID NO: 2982; WAN024G7O_at; Start 381; Stop 405
caataaggcgcaggtgcccgttcgt

SEQ ID NO: 234404 - DNA, 25 bp, Artificial
  probe
  misc_feature (1)..(25): SEQ ID NO: 2982; WAN024G7O_at; Start 1327; Stop 1351
gagacggtagcacttttgtccaaac

SEQ ID NO: 234405 - DNA, 25 bp, Artificial
  probe
  misc_feature (1)..(25): SEQ ID NO: 2982; WAN024G7O_at; Start 232; Stop 256
tcaggaatcgcggatttaggacacc

SEQ ID NO: 234406 - DNA, 25 bp, Artificial
  probe
  misc_feature (1)..(25): SEQ ID NO: 2982; WAN024G7O_at; Start 494; Stop 518
tcattgaccaagtcgtagtagctct

SEQ ID NO: 234407 - DNA, 25 bp, Artificial
  probe
  misc_feature (1)..(25): SEQ ID NO: 2982; WAN024G7O_at; Start 961; Stop 985
tcagtcgccaagcatgtcaaagaag

SEQ ID NO: 234408 - DNA, 25 bp, Artificial
  probe
  misc_feature (1)..(25): SEQ ID NO: 2982; WAN024G7O_at; Start 867; Stop 891
ggagaaactctatcaaacagccatt

SEQ ID NO: 234409 - DNA, 25 bp, Artificial
  probe
  misc_feature (1)..(25): SEQ ID NO: 2982; WAN024G7O_at; Start 509; Stop 533
tagtagctcttcgagacctgctccg

SEQ ID NO: 234410 - DNA, 25 bp, Artificial
  probe
  misc_feature (1)..(25): SEQ ID NO: 2982; WAN024G7O_at; Start 749; Stop 773
cgatttttggtaaggagtggcgcac

SEQ ID NO: 234411 - DNA, 25 bp, Artificial
  probe
  misc_feature (1)..(25): SEQ ID NO: 2982; WAN024G7O_at; Start 1291; Stop 1315
cagccggtggatctatttcctcaaa

SEQ ID NO: 234412 - DNA, 25 bp, Artificial
  probe
  misc_feature (1)..(25): SEQ ID NO: 2982; WAN024G7O_at; Start 1137; Stop 1161
ggttgatcctccacgcaagggcttg

SEQ ID NO: 234413 - DNA, 25 bp, Artificial
  probe
  misc_feature (1)..(25): SEQ ID NO: 2982; WAN024G7O_at; Start 726; Stop 750
tatcaacgaccagaataccaatgcg

SEQ ID NO: 234414 - DNA, 25 bp, Artificial
  probe
  misc_feature (1)..(25): SEQ ID NO: 2982; WAN024G7O_at; Start 783; Stop 807
tcaagactatattacggaccagatg

SEQ ID NO: 234415 - DNA, 25 bp, Artificial
  probe
  misc_feature (1)..(25): SEQ ID NO: 2982; WAN024G7O_at; Start 366; Stop 390
tccagtcaagtatcgcaataaggcg

SEQ ID NO: 234416 - DNA, 25 bp, Artificial
  probe
  misc_feature (1)..(25): SEQ ID NO: 2982; WAN024G7O_at; Start 763; Stop 787
gagtggcgcactctttatggtcaag

SEQ ID NO: 234417 - DNA, 25 bp, Artificial
  probe
  misc_feature (1)..(25): SEQ ID NO: 2982; WAN024G7O_at; Start 301; Stop 325
gacagtctctacaagattgctggaa

SEQ ID NO: 234418 - DNA, 25 bp, Artificial
  probe
  misc_feature (1)..(25): SEQ ID NO: 2982; WAN024G7O_at; Start 682; Stop 706
caagttatcaagcagttcccagaga

SEQ ID NO: 234419 - DNA, 25 bp, Artificial
  probe
  misc_feature (1)..(25): SEQ ID NO: 4942; WAN024G7P_at; Start 101; Stop 125
tgtcgccagcttgtgatacgatgct

SEQ ID NO: 234420 - DNA, 25 bp, Artificial
  probe
  misc_feature (1)..(25): SEQ ID NO: 4942; WAN024G7P_at; Start 165; Stop 189
gctgaggatatcactctttgagaga

SEQ ID NO: 234421 - DNA, 25 bp, Artificial
  probe
  misc_feature (1)..(25): SEQ ID NO: 4942; WAN024G7P_at; Start 115; Stop 139
gatacgatgctttgtttaaggtcat

SEQ ID NO: 234422 - DNA, 25 bp, Artificial
  probe
  misc_feature (1)..(25): SEQ ID NO: 4942; WAN024G7P_at; Start 216; Stop 240
gatctggtttcctgttatgacctga

SEQ ID NO: 234423 - DNA, 25 bp, Artificial
  probe
  misc_feature (1)..(25): SEQ ID NO: 4942; WAN024G7P_at; Start 176; Stop 200
cactctttgagagattcaaggcaaa

SEQ ID NO: 234424 - DNA, 25 bp, Artificial
  probe
  misc_feature (1)..(25): SEQ ID NO: 4942; WAN024G7P_at; Start 144; Stop 168
ggttttagtgaaatctgcattgctg

SEQ ID NO: 234425 - DNA, 25 bp, Artificial
  probe
  misc_feature (1)..(25): SEQ ID NO: 4942; WAN024G7P_at; Start 192; Stop 216
caaggcaaaattgatgatgatattg

SEQ ID NO: 234426 - DNA, 25 bp, Artificial
  probe
  misc_feature (1)..(25): SEQ ID NO: 4942; WAN024G7P_at; Start 203; Stop 227
tgatgatgatattgatctggtttcc

SEQ ID NO: 234427 - DNA, 25 bp, Artificial
  probe
  misc_feature (1)..(25): SEQ ID NO: 4942; WAN024G7P_at; Start 109; Stop 133
gcttgtgatacgatgctttgtttaa

SEQ ID NO: 234428 - DNA, 25 bp, Artificial
  probe
  misc_feature (1)..(25): SEQ ID NO: 4942; WAN024G7P_at; Start 25; Stop 49
cagagggagcttaagaagttaccac

SEQ ID NO: 234429 - DNA, 25 bp, Artificial
  probe
  misc_feature (1)..(25): SEQ ID NO: 4942; WAN024G7P_at; Start 99; Stop 123
actgtcgccagcttgtgatacgatg

SEQ ID NO: 234430 - DNA, 25 bp, Artificial
  probe
  misc_feature (1)..(25): SEQ ID NO: 4942; WAN024G7P_at; Start 153; Stop 177
gaaatctgcattgctgaggatatca

SEQ ID NO: 234431 - DNA, 25 bp, Artificial
  probe
  misc_feature (1)..(25): SEQ ID NO: 4942; WAN024G7P_at; Start 173; Stop 197
tatcactctttgagagattcaaggc

SEQ ID NO: 234432 - DNA, 25 bp, Artificial
  probe
  misc_feature (1)..(25): SEQ ID NO: 4942; WAN024G7P_at; Start 186; Stop 210
gagattcaaggcaaaattgatgatg

SEQ ID NO: 234433 - DNA, 25 bp, Artificial
  probe
  misc_feature (1)..(25): SEQ ID NO: 4942; WAN024G7P_at; Start 183; Stop 207
tgagagattcaaggcaaaattgatg

SEQ ID NO: 234434 - DNA, 25 bp, Artificial
  probe
  misc_feature (1)..(25): SEQ ID NO: 4942; WAN024G7P_at; Start 87; Stop 111
gatatttttaaaactgtcgccagct

SEQ ID NO: 234435 - DNA, 25 bp, Artificial
  probe
  misc_feature (1)..(25): SEQ ID NO: 4942; WAN024G7P_at; Start 37; Stop 61
aagaagttaccaccgtcctctagcg

SEQ ID NO: 234436 - DNA, 25 bp, Artificial
  probe
  misc_feature (1)..(25): SEQ ID NO: 4942; WAN024G7P_at; Start 5; Stop 29
agaagttgacaagggcttgccagag

SEQ ID NO: 234437 - DNA, 25 bp, Artificial
  probe
  misc_feature (1)..(25): SEQ ID NO: 4942; WAN024G7P_at; Start 157; Stop 181
tctgcattgctgaggatatcactct

SEQ ID NO: 234438 - DNA, 25 bp, Artificial
  probe
  misc_feature (1)..(25): SEQ ID NO: 4942; WAN024G7P_at; Start 103; Stop 127
tcgccagcttgtgatacgatgcttt

SEQ ID NO: 234439 - DNA, 25 bp, Artificial
  probe
  misc_feature (1)..(25): SEQ ID NO: 4942; WAN024G7P_at; Start 43; Stop 67
ttaccaccgtcctctagcgccttat

SEQ ID NO: 234440 - DNA, 25 bp, Artificial
  probe
  misc_feature (1)..(25): SEQ ID NO: 4942; WAN024G7P_at; Start 89; Stop 113
tatttttaaaactgtcgccagcttg

SEQ ID NO: 234441 - DNA, 25 bp, Artificial
  probe
  misc_feature (1)..(25): SEQ ID NO: 4942; WAN024G7P_at; Start 19; Stop 43
gcttgccagagggagcttaagaagt

SEQ ID NO: 234442 - DNA, 25 bp, Artificial
  probe
  misc_feature (1)..(25): SEQ ID NO: 4942; WAN024G7P_at; Start 95; Stop 119
taaaactgtcgccagcttgtgatac

SEQ ID NO: 234443 - DNA, 25 bp, Artificial
  probe
  misc_feature (1)..(25): SEQ ID NO: 4942; WAN024G7P_at; Start 147; Stop 171
tttagtgaaatctgcattgctgagg

SEQ ID NO: 234444 - DNA, 25 bp, Artificial
  probe
  misc_feature (1)..(25): SEQ ID NO: 4942; WAN024G7P_at; Start 14; Stop 38
caagggcttgccagagggagcttaa

SEQ ID NO: 234445 - DNA, 25 bp, Artificial
  probe
  misc_feature (1)..(25): SEQ ID NO: 4942; WAN024G7P_at; Start 97; Stop 121
aaactgtcgccagcttgtgatacga

SEQ ID NO: 234446 - DNA, 25 bp, Artificial
  probe
  misc_feature (1)..(25): SEQ ID NO: 4942; WAN024G7P_at; Start 105; Stop 129
gccagcttgtgatacgatgctttgt

SEQ ID NO: 234447 - DNA, 25 bp, Artificial
  probe
  misc_feature (1)..(25): SEQ ID NO: 4942; WAN024G7P_at; Start 161; Stop 185
cattgctgaggatatcactctttga

SEQ ID NO: 234448 - DNA, 25 bp, Artificial
  probe
  misc_feature (1)..(25): SEQ ID NO: 4942; WAN024G7P_at; Start 1; Stop 25
ttgaagaagttgacaagggcttgcc

SEQ ID NO: 234449 - DNA, 25 bp, Artificial
  probe
  misc_feature (1)..(25): SEQ ID NO: 4942; WAN024G7P_at; Start 92; Stop 116
ttttaaaactgtcgccagcttgtga

SEQ ID NO: 234450 - DNA, 25 bp, Artificial
  probe
  misc_feature (1)..(25): SEQ ID NO: 4942; WAN024G7P_at; Start 22; Stop 46
tgccagagggagcttaagaagttac

SEQ ID NO: 234451 - DNA, 25 bp, Artificial
  probe
  misc_feature (1)..(25): SEQ ID NO: 4942; WAN024G7P_at; Start 118; Stop 142
acgatgctttgtttaaggtcattta

SEQ ID NO: 234452 - DNA, 25 bp, Artificial
  probe
  misc_feature (1)..(25): SEQ ID NO: 4942; WAN024G7P_at; Start 149; Stop 173
tagtgaaatctgcattgctgaggat

SEQ ID NO: 234453 - DNA, 25 bp, Artificial
  probe
  misc_feature (1)..(25): SEQ ID NO: 5696; WAN024G7Q_at; Start 30; Stop 54
taagaaatttcatggtataatggat

SEQ ID NO: 234454 - DNA, 25 bp, Artificial
  probe
  misc_feature (1)..(25): SEQ ID NO: 5696; WAN024G7Q_at; Start 26; Stop 50
ttcttaagaaatttcatggtataat

SEQ ID NO: 234455 - DNA, 25 bp, Artificial
  probe
  misc_feature (1)..(25): SEQ ID NO: 5696; WAN024G7Q_at; Start 23; Stop 47
tggttcttaagaaatttcatggtat

SEQ ID NO: 234456 - DNA, 25 bp, Artificial
  probe
  misc_feature (1)..(25): SEQ ID NO: 5696; WAN024G7Q_at; Start 46; Stop 70
ataatggatggtaaccgtaacgttg

SEQ ID NO: 234457 - DNA, 25 bp, Artificial
  probe
  misc_feature (1)..(25): SEQ ID NO: 5696; WAN024G7Q_at; Start 42; Stop 66
tggtataatggatggtaaccgtaac

SEQ ID NO: 234458 - DNA, 25 bp, Artificial
  probe
  misc_feature (1)..(25): SEQ ID NO: 5696; WAN024G7Q_at; Start 40; Stop 64
catggtataatggatggtaaccgta

SEQ ID NO: 234459 - DNA, 25 bp, Artificial
  probe
  misc_feature (1)..(25): SEQ ID NO: 5696; WAN024G7Q_at; Start 34; Stop 58
aaatttcatggtataatggatggta

SEQ ID NO: 234460 - DNA, 25 bp, Artificial
  probe
  misc_feature (1)..(25): SEQ ID NO: 5696; WAN024G7Q_at; Start 37; Stop 61
tttcatggtataatggatggtaacc

SEQ ID NO: 234461 - DNA, 25 bp, Artificial
  probe
  misc_feature (1)..(25): SEQ ID NO: 5696; WAN024G7Q_at; Start 49; Stop 73
atggatggtaaccgtaacgttgccg

SEQ ID NO: 234462 - DNA, 25 bp, Artificial
  probe
  misc_feature (1)..(25): SEQ ID NO: 5696; WAN024G7Q_at; Start 38; Stop 62
ttcatggtataatggatggtaaccg

SEQ ID NO: 234463 - DNA, 25 bp, Artificial
  probe
  misc_feature (1)..(25): SEQ ID NO: 5696; WAN024G7Q_at; Start 22; Stop 46
ttggttcttaagaaatttcatggta

SEQ ID NO: 234464 - DNA, 25 bp, Artificial
  probe
  misc_feature (1)..(25): SEQ ID NO: 5696; WAN024G7Q_at; Start 39; Stop 63
tcatggtataatggatggtaaccgt

SEQ ID NO: 234465 - DNA, 25 bp, Artificial
  probe
  misc_feature (1)..(25): SEQ ID NO: 5696; WAN024G7Q_at; Start 25; Stop 49
gttcttaagaaatttcatggtataa

SEQ ID NO: 234466 - DNA, 25 bp, Artificial
  probe
  misc_feature (1)..(25): SEQ ID NO: 5696; WAN024G7Q_at; Start 35; Stop 59
aatttcatggtataatggatggtaa

SEQ ID NO: 234467 - DNA, 25 bp, Artificial
  probe
  misc_feature (1)..(25): SEQ ID NO: 5696; WAN024G7Q_at; Start 36; Stop 60
atttcatggtataatggatggtaac

SEQ ID NO: 234468 - DNA, 25 bp, Artificial
  probe
  misc_feature (1)..(25): SEQ ID NO: 5696; WAN024G7Q_at; Start 29; Stop 53
ttaagaaatttcatggtataatgga

SEQ ID NO: 234469 - DNA, 25 bp, Artificial
  probe
  misc_feature (1)..(25): SEQ ID NO: 5696; WAN024G7Q_at; Start 31; Stop 55
aagaaatttcatggtataatggatg

SEQ ID NO: 234470 - DNA, 25 bp, Artificial
  probe
  misc_feature (1)..(25): SEQ ID NO: 5696; WAN024G7Q_at; Start 27; Stop 51
tcttaagaaatttcatggtataatg

SEQ ID NO: 234471 - DNA, 25 bp, Artificial
  probe
  misc_feature (1)..(25): SEQ ID NO: 5696; WAN024G7Q_at; Start 28; Stop 52
cttaagaaatttcatggtataatgg

SEQ ID NO: 234472 - DNA, 25 bp, Artificial
  probe
  misc_feature (1)..(25): SEQ ID NO: 5696; WAN024G7Q_at; Start 24; Stop 48
ggttcttaagaaatttcatggtata

SEQ ID NO: 234473 - DNA, 25 bp, Artificial
  probe
  misc_feature (1)..(25): SEQ ID NO: 5696; WAN024G7Q_at; Start 41; Stop 65
atggtataatggatggtaaccgtaa

SEQ ID NO: 234474 - DNA, 25 bp, Artificial
  probe
  misc_feature (1)..(25): SEQ ID NO: 5696; WAN024G7Q_at; Start 33; Stop 57
gaaatttcatggtataatggatggt

SEQ ID NO: 234475 - DNA, 25 bp, Artificial
  probe
  misc_feature (1)..(25): SEQ ID NO: 5696; WAN024G7Q_at; Start 47; Stop 71
taatggatggtaaccgtaacgttgc

SEQ ID NO: 234476 - DNA, 25 bp, Artificial
  probe
  misc_feature (1)..(25): SEQ ID NO: 5696; WAN024G7Q_at; Start 69; Stop 93
tgccgtcttttttgtcggccaacta

SEQ ID NO: 234477 - DNA, 25 bp, Artificial
  probe
  misc_feature (1)..(25): SEQ ID NO: 5696; WAN024G7Q_at; Start 32; Stop 56
agaaatttcatggtataatggatgg

SEQ ID NO: 234478 - DNA, 25 bp, Artificial
  probe
  misc_feature (1)..(25): SEQ ID NO: 1504; WAN024G7R_at; Start 266; Stop 290
gcttacagttgtattcatcagccaa

SEQ ID NO: 234479 - DNA, 25 bp, Artificial
  probe
  misc_feature (1)..(25): SEQ ID NO: 1504; WAN024G7R_at; Start 721; Stop 745
caggtcataacaggaaaccagatca

SEQ ID NO: 234480 - DNA, 25 bp, Artificial
  probe
  misc_feature (1)..(25): SEQ ID NO: 1504; WAN024G7R_at; Start 847; Stop 871
caagctggcgacagttttaaaaata

SEQ ID NO: 234481 - DNA, 25 bp, Artificial
  probe
  misc_feature (1)..(25): SEQ ID NO: 1504; WAN024G7R_at; Start 106; Stop 130
tatgtccaacctgaatatgtcctag

SEQ ID NO: 234482 - DNA, 25 bp, Artificial
  probe
  misc_feature (1)..(25): SEQ ID NO: 1504; WAN024G7R_at; Start 832; Stop 856
caaagcatcgtatcacaagctggcg

SEQ ID NO: 234483 - DNA, 25 bp, Artificial
  probe
  misc_feature (1)..(25): SEQ ID NO: 1504; WAN024G7R_at; Start 550; Stop 574
gatatcaatgctgaaaacaaggaca

SEQ ID NO: 234484 - DNA, 25 bp, Artificial
  probe
  misc_feature (1)..(25): SEQ ID NO: 1504; WAN024G7R_at; Start 567; Stop 591
caaggacaaatcaggctatgatgct

SEQ ID NO: 234485 - DNA, 25 bp, Artificial
  probe
  misc_feature (1)..(25): SEQ ID NO: 1504; WAN024G7R_at; Start 181; Stop 205
tacaatgcctcaacagataccaaag

SEQ ID NO: 234486 - DNA, 25 bp, Artificial
  probe
  misc_feature (1)..(25): SEQ ID NO: 1504; WAN024G7R_at; Start 210; Stop 234
caagaccatgacacctgatgtttat

SEQ ID NO: 234487 - DNA, 25 bp, Artificial
  probe
  misc_feature (1)..(25): SEQ ID NO: 1504; WAN024G7R_at; Start 760; Stop 784
tttgccttgaatctctcaaagagtg

SEQ ID NO: 234488 - DNA, 25 bp, Artificial
  probe
  misc_feature (1)..(25): SEQ ID NO: 1504; WAN024G7R_at; Start 317; Stop 341
cacttgaggtcaagattgaaacacc

SEQ ID NO: 234489 - DNA, 25 bp, Artificial
  probe
  misc_feature (1)..(25): SEQ ID NO: 1504; WAN024G7R_at; Start 599; Stop 623
taaacgttgccctagctgatatcaa

SEQ ID NO: 234490 - DNA, 25 bp, Artificial
  probe
  misc_feature (1)..(25): SEQ ID NO: 1504; WAN024G7R_at; Start 235; Stop 259
tctaaaatcatgaatgtggccaatg

SEQ ID NO: 234491 - DNA, 25 bp, Artificial
  probe
  misc_feature (1)..(25): SEQ ID NO: 1504; WAN024G7R_at; Start 92; Stop 116
ttatcgatgaaacctatgtccaacc

SEQ ID NO: 234492 - DNA, 25 bp, Artificial
  probe
  misc_feature (1)..(25): SEQ ID NO: 1504; WAN024G7R_at; Start 792; Stop 816
cagcaatgcagatttcactaaaacc

SEQ ID NO: 234493 - DNA, 25 bp, Artificial
  probe
  misc_feature (1)..(25): SEQ ID NO: 1504; WAN024G7R_at; Start 679; Stop 703
cgcaagattgttgaagataccttaa

SEQ ID NO: 234494 - DNA, 25 bp, Artificial
  probe
  misc_feature (1)..(25): SEQ ID NO: 1504; WAN024G7R_at; Start 899; Stop 923
cgctagaggacggtggtaacttctt

SEQ ID NO: 234495 - DNA, 25 bp, Artificial
  probe
  misc_feature (1)..(25): SEQ ID NO: 1504; WAN024G7R_at; Start 195; Stop 219
agataccaaagaactcaagaccatg

SEQ ID NO: 234496 - DNA, 25 bp, Artificial
  probe
  misc_feature (1)..(25): SEQ ID NO: 1504; WAN024G7R_at; Start 56; Stop 80
tgaatagcgtccatgcagcaacaga

SEQ ID NO: 234497 - DNA, 25 bp, Artificial
  probe
  misc_feature (1)..(25): SEQ ID NO: 1504; WAN024G7R_at; Start 165; Stop 189
tcttaaaaaactgggctacaatgcc

SEQ ID NO: 234498 - DNA, 25 bp, Artificial
  probe
  misc_feature (1)..(25): SEQ ID NO: 1504; WAN024G7R_at; Start 281; Stop 305
catcagccaagattcaaaagctagg

SEQ ID NO: 234499 - DNA, 25 bp, Artificial
  probe
  misc_feature (1)..(25): SEQ ID NO: 1504; WAN024G7R_at; Start 626; Stop 650
caggactcgccaaagctaaagaaag

SEQ ID NO: 234500 - DNA, 25 bp, Artificial
  probe
  misc_feature (1)..(25): SEQ ID NO: 1504; WAN024G7R_at; Start 293; Stop 317
ttcaaaagctaggtgacaaatcgcc

SEQ ID NO: 234501 - DNA, 25 bp, Artificial
  probe
  misc_feature (1)..(25): SEQ ID NO: 1504; WAN024G7R_at; Start 35; Stop 59
tcttgtgggcagtaacagctatgaa

SEQ ID NO: 234502 - DNA, 25 bp, Artificial
  probe
  misc_feature (1)..(25): SEQ ID NO: 1504; WAN024G7R_at; Start 818; Stop 842
taaatgaccttaaacaaagcatcgt

SEQ ID NO: 234503 - DNA, 25 bp, Artificial
  probe
  misc_feature (1)..(25): SEQ ID NO: 1504; WAN024G7R_at; Start 616; Stop 640
gatatcaagtcaggactcgccaaag

SEQ ID NO: 234504 - DNA, 25 bp, Artificial
  probe
  misc_feature (1)..(25): SEQ ID NO: 1504; WAN024G7R_at; Start 776; Stop 800
caaagagtgatatcctcagcaatgc

SEQ ID NO: 234505 - DNA, 25 bp, Artificial
  probe
  misc_feature (1)..(25): SEQ ID NO: 1504; WAN024G7R_at; Start 733; Stop 757
ggaaaccagatcaatatcatcatca

SEQ ID NO: 234506 - DNA, 25 bp, Artificial
  probe
  misc_feature (1)..(25): SEQ ID NO: 1504; WAN024G7R_at; Start 934; Stop 958
tggcaagcccttgtcaacttcttca

SEQ ID NO: 234507 - DNA, 25 bp, Artificial
  probe
  misc_feature (1)..(25): SEQ ID NO: 1504; WAN024G7R_at; Start 915; Stop 939
taacttcttaagctccctctggcaa

SEQ ID NO: 234508 - DNA, 25 bp, Artificial
  probe
  misc_feature (1)..(25): SEQ ID NO: 1504; WAN024G7R_at; Start 249; Stop 273
tgtggccaatgactctagcttacag

SEQ ID NO: 234509 - DNA, 25 bp, Artificial
  probe
  misc_feature (1)..(25): SEQ ID NO: 1504; WAN024G7R_at; Start 73; Stop 97
gcaacagatgttcaaaaagttatcg

SEQ ID NO: 234510 - DNA, 25 bp, Artificial
  probe
  misc_feature (1)..(25): SEQ ID NO: 1504; WAN024G7R_at; Start 307; Stop 331
gacaaatcgccacttgaggtcaaga

SEQ ID NO: 234511 - DNA, 25 bp, Artificial
  probe
  misc_feature (1)..(25): SEQ ID NO: 1504; WAN024G7R_at; Start 709; Stop 733
tacaaacttgatcaggtcataacag

SEQ ID NO: 234512 - DNA, 25 bp, Artificial
  probe
  misc_feature (1)..(25): SEQ ID NO: 5567; WAN024G7S_at; Start 306; Stop 330
tgacatcttgatgaacgcggtaagc

SEQ ID NO: 234513 - DNA, 25 bp, Artificial
  probe
  misc_feature (1)..(25): SEQ ID NO: 5567; WAN024G7S_at; Start 104; Stop 128
gtttgaatgccttgccgaatgctag

SEQ ID NO: 234514 - DNA, 25 bp, Artificial
  probe
  misc_feature (1)..(25): SEQ ID NO: 5567; WAN024G7S_at; Start 315; Stop 339
gatgaacgcggtaagctttatagcc

SEQ ID NO: 234515 - DNA, 25 bp, Artificial
  probe
  misc_feature (1)..(25): SEQ ID NO: 5567; WAN024G7S_at; Start 155; Stop 179
gaaccacttgcagactcactagact

SEQ ID NO: 234516 - DNA, 25 bp, Artificial
  probe
  misc_feature (1)..(25): SEQ ID NO: 5567; WAN024G7S_at; Start 277; Stop 301
caccatgggttgataggtcatgact

SEQ ID NO: 234517 - DNA, 25 bp, Artificial
  probe
  misc_feature (1)..(25): SEQ ID NO: 5567; WAN024G7S_at; Start 142; Stop 166
gatggtgttggtggaaccacttgca

SEQ ID NO: 234518 - DNA, 25 bp, Artificial
  probe
  misc_feature (1)..(25): SEQ ID NO: 5567; WAN024G7S_at; Start 36; Stop 60
tataggcttgaacagctgtccagat

SEQ ID NO: 234519 - DNA, 25 bp, Artificial
  probe
  misc_feature (1)..(25): SEQ ID NO: 5567; WAN024G7S_at; Start 176; Stop 200
gactgcataacatcgccttcttttc

SEQ ID NO: 234520 - DNA, 25 bp, Artificial
  probe
  misc_feature (1)..(25): SEQ ID NO: 5567; WAN024G7S_at; Start 321; Stop 345
cgcggtaagctttatagccagcaaa

SEQ ID NO: 234521 - DNA, 25 bp, Artificial
  probe
  misc_feature (1)..(25): SEQ ID NO: 5567; WAN024G7S_at; Start 297; Stop 321
tgacttgtttgacatcttgatgaac

SEQ ID NO: 234522 - DNA, 25 bp, Artificial
  probe
  misc_feature (1)..(25): SEQ ID NO: 5567; WAN024G7S_at; Start 28; Stop 52
tccaaaattataggcttgaacagct

SEQ ID NO: 234523 - DNA, 25 bp, Artificial
  probe
  misc_feature (1)..(25): SEQ ID NO: 5567; WAN024G7S_at; Start 309; Stop 333
catcttgatgaacgcggtaagcttt

SEQ ID NO: 234524 - DNA, 25 bp, Artificial
  probe
  misc_feature (1)..(25): SEQ ID NO: 5567; WAN024G7S_at; Start 9; Stop 33
taaaatcgatataggcaggtccaaa

SEQ ID NO: 234525 - DNA, 25 bp, Artificial
  probe
  misc_feature (1)..(25): SEQ ID NO: 5567; WAN024G7S_at; Start 108; Stop 132
gaatgccttgccgaatgctagaggc

SEQ ID NO: 234526 - DNA, 25 bp, Artificial
  probe
  misc_feature (1)..(25): SEQ ID NO: 5567; WAN024G7S_at; Start 98; Stop 122
gtcagagtttgaatgccttgccgaa

SEQ ID NO: 234527 - DNA, 25 bp, Artificial
  probe
  misc_feature (1)..(25): SEQ ID NO: 5567; WAN024G7S_at; Start 72; Stop 96
tcttctgcgccagatagagattgcc

SEQ ID NO: 234528 - DNA, 25 bp, Artificial
  probe
  misc_feature (1)..(25): SEQ ID NO: 5567; WAN024G7S_at; Start 124; Stop 148
gctagaggcattatcattgatggtg

SEQ ID NO: 234529 - DNA, 25 bp, Artificial
  probe
  misc_feature (1)..(25): SEQ ID NO: 5567; WAN024G7S_at; Start 79; Stop 103
cgccagatagagattgcctgtcaga

SEQ ID NO: 234530 - DNA, 25 bp, Artificial
  probe
  misc_feature (1)..(25): SEQ ID NO: 5567; WAN024G7S_at; Start 6; Stop 30
cgataaaatcgatataggcaggtcc

SEQ ID NO: 234531 - DNA, 25 bp, Artificial
  probe
  misc_feature (1)..(25): SEQ ID NO: 5567; WAN024G7S_at; Start 42; Stop 66
cttgaacagctgtccagatatctac

SEQ ID NO: 234532 - DNA, 25 bp, Artificial
  probe
  misc_feature (1)..(25): SEQ ID NO: 5567; WAN024G7S_at; Start 150; Stop 174
tggtggaaccacttgcagactcact

SEQ ID NO: 234533 - DNA, 25 bp, Artificial
  probe
  misc_feature (1)..(25): SEQ ID NO: 5567; WAN024G7S_at; Start 269; Stop 293
atttctcgcaccatgggttgatagg

SEQ ID NO: 234534 - DNA, 25 bp, Artificial
  probe
  misc_feature (1)..(25): SEQ ID NO: 5567; WAN024G7S_at; Start 205; Stop 229
tgtttcagtataaatcatagcaagc

SEQ ID NO: 234535 - DNA, 25 bp, Artificial
  probe
  misc_feature (1)..(25): SEQ ID NO: 5567; WAN024G7S_at; Start 217; Stop 241
aatcatagcaagcacaagctcttcg

SEQ ID NO: 234536 - DNA, 25 bp, Artificial
  probe
  misc_feature (1)..(25): SEQ ID NO: 5567; WAN024G7S_at; Start 333; Stop 357
tatagccagcaaaaaggaagactgc

SEQ ID NO: 234537 - DNA, 25 bp, Artificial
  probe
  misc_feature (1)..(25): SEQ ID NO: 5567; WAN024G7S_at; Start 167; Stop 191
gactcactagactgcataacatcgc

SEQ ID NO: 234538 - DNA, 25 bp, Artificial
  probe
  misc_feature (1)..(25): SEQ ID NO: 5567; WAN024G7S_at; Start 210; Stop 234
cagtataaatcatagcaagcacaag

SEQ ID NO: 234539 - DNA, 25 bp, Artificial
  probe
  misc_feature (1)..(25): SEQ ID NO: 5567; WAN024G7S_at; Start 90; Stop 114
gattgcctgtcagagtttgaatgcc

SEQ ID NO: 234540 - DNA, 25 bp, Artificial
  probe
  misc_feature (1)..(25): SEQ ID NO: 5567; WAN024G7S_at; Start 135; Stop 159
tatcattgatggtgttggtggaacc

SEQ ID NO: 234541 - DNA, 25 bp, Artificial
  probe
  misc_feature (1)..(25): SEQ ID NO: 5567; WAN024G7S_at; Start 113; Stop 137
ccttgccgaatgctagaggcattat

SEQ ID NO: 234542 - DNA, 25 bp, Artificial
  probe
  misc_feature (1)..(25): SEQ ID NO: 5567; WAN024G7S_at; Start 288; Stop 312
gataggtcatgacttgtttgacatc

SEQ ID NO: 234543 - DNA, 25 bp, Artificial
  probe
  misc_feature (1)..(25): SEQ ID NO: 5567; WAN024G7S_at; Start 18; Stop 42
tataggcaggtccaaaattataggc

SEQ ID NO: 234544 - DNA, 25 bp, Artificial
  probe
  misc_feature (1)..(25): SEQ ID NO: 5567; WAN024G7S_at; Start 226; Stop 250
aagcacaagctcttcgtttgctggg

SEQ ID NO: 234545 - DNA, 25 bp, Artificial
  probe
  misc_feature (1)..(25): SEQ ID NO: 5567; WAN024G7S_at; Start 336; Stop 360
agccagcaaaaaggaagactgctag

SEQ ID NO: 234546 - DNA, 25 bp, Artificial
  probe
  misc_feature (1)..(25): SEQ ID NO: 3070; WAN024G7T_at; Start 425; Stop 449
agtactctcgtgagactgttgcccc

SEQ ID NO: 234547 - DNA, 25 bp, Artificial
  probe
  misc_feature (1)..(25): SEQ ID NO: 3070; WAN024G7T_at; Start 34; Stop 58
gcagtcttcctttttgctggctata

SEQ ID NO: 234548 - DNA, 25 bp, Artificial
  probe
  misc_feature (1)..(25): SEQ ID NO: 3070; WAN024G7T_at; Start 214; Stop 238
tctagtgagtctgcaagtggttcca

SEQ ID NO: 234549 - DNA, 25 bp, Artificial
  probe
  misc_feature (1)..(25): SEQ ID NO: 3070; WAN024G7T_at; Start 61; Stop 85
gcttaccgcgttcatcaagatgtca

SEQ ID NO: 234550 - DNA, 25 bp, Artificial
  probe
  misc_feature (1)..(25): SEQ ID NO: 3070; WAN024G7T_at; Start 438; Stop 462
gactgttgcccccttgcttggtaat

SEQ ID NO: 234551 - DNA, 25 bp, Artificial
  probe
  misc_feature (1)..(25): SEQ ID NO: 3070; WAN024G7T_at; Start 98; Stop 122
cctatcaacccatggtgcgagaaat

SEQ ID NO: 234552 - DNA, 25 bp, Artificial
  probe
  misc_feature (1)..(25): SEQ ID NO: 3070; WAN024G7T_at; Start 200; Stop 224
gcgatgttatgcagtctagtgagtc

SEQ ID NO: 234553 - DNA, 25 bp, Artificial
  probe
  misc_feature (1)..(25): SEQ ID NO: 3070; WAN024G7T_at; Start 20; Stop 44
gagtgcttgtactagcagtcttcct

SEQ ID NO: 234554 - DNA, 25 bp, Artificial
  probe
  misc_feature (1)..(25): SEQ ID NO: 3070; WAN024G7T_at; Start 15; Stop 39
tcgaagagtgcttgtactagcagtc

SEQ ID NO: 234555 - DNA, 25 bp, Artificial
  probe
  misc_feature (1)..(25): SEQ ID NO: 3070; WAN024G7T_at; Start 587; Stop 611
gtttcactctcttttcaacatctgg

SEQ ID NO: 234556 - DNA, 25 bp, Artificial
  probe
  misc_feature (1)..(25): SEQ ID NO: 3070; WAN024G7T_at; Start 410; Stop 434
tggctctagccaaacagtactctcg

SEQ ID NO: 234557 - DNA, 25 bp, Artificial
  probe
  misc_feature (1)..(25): SEQ ID NO: 3070; WAN024G7T_at; Start 294; Stop 318
aggcaatctctatctggcgcagaag

SEQ ID NO: 234558 - DNA, 25 bp, Artificial
  probe
  misc_feature (1)..(25): SEQ ID NO: 3070; WAN024G7T_at; Start 243; Stop 267
caccatcaatgataatgcctctagc

SEQ ID NO: 234559 - DNA, 25 bp, Artificial
  probe
  misc_feature (1)..(25): SEQ ID NO: 3070; WAN024G7T_at; Start 46; Stop 70
tttgctggctataaagcttaccgcg

SEQ ID NO: 234560 - DNA, 25 bp, Artificial
  probe
  misc_feature (1)..(25): SEQ ID NO: 3070; WAN024G7T_at; Start 136; Stop 160
gacaccccagcaaacgaagagcttg

SEQ ID NO: 234561 - DNA, 25 bp, Artificial
  probe
  misc_feature (1)..(25): SEQ ID NO: 3070; WAN024G7T_at; Start 297; Stop 321
caatctctatctggcgcagaagaag

SEQ ID NO: 234562 - DNA, 25 bp, Artificial
  probe
  misc_feature (1)..(25): SEQ ID NO: 3070; WAN024G7T_at; Start 220; Stop 244
gagtctgcaagtggttccaccaaca

SEQ ID NO: 234563 - DNA, 25 bp, Artificial
  probe
  misc_feature (1)..(25): SEQ ID NO: 3070; WAN024G7T_at; Start 288; Stop 312
tctgacaggcaatctctatctggcg

SEQ ID NO: 234564 - DNA, 25 bp, Artificial
  probe
  misc_feature (1)..(25): SEQ ID NO: 3070; WAN024G7T_at; Start 416; Stop 440
tagccaaacagtactctcgtgagac

SEQ ID NO: 234565 - DNA, 25 bp, Artificial
  probe
  misc_feature (1)..(25): SEQ ID NO: 3070; WAN024G7T_at; Start 2; Stop 26
tgtttaaacgaattcgaagagtgct

SEQ ID NO: 234566 - DNA, 25 bp, Artificial
  probe
  misc_feature (1)..(25): SEQ ID NO: 3070; WAN024G7T_at; Start 75; Stop 99
tcaagatgtcaaacaagtcatgacc

SEQ ID NO: 234567 - DNA, 25 bp, Artificial
  probe
  misc_feature (1)..(25): SEQ ID NO: 3070; WAN024G7T_at; Start 170; Stop 194
tgatttatactgaaacaaaaggaaa

SEQ ID NO: 234568 - DNA, 25 bp, Artificial
  probe
  misc_feature (1)..(25): SEQ ID NO: 3070; WAN024G7T_at; Start 88; Stop 112
caagtcatgacctatcaacccatgg

SEQ ID NO: 234569 - DNA, 25 bp, Artificial
  probe
  misc_feature (1)..(25): SEQ ID NO: 3070; WAN024G7T_at; Start 262; Stop 286
tctagcattcggcaaggcattcaaa

SEQ ID NO: 234570 - DNA, 25 bp, Artificial
  probe
  misc_feature (1)..(25): SEQ ID NO: 3070; WAN024G7T_at; Start 232; Stop 256
ggttccaccaacaccatcaatgata

SEQ ID NO: 234571 - DNA, 25 bp, Artificial
  probe
  misc_feature (1)..(25): SEQ ID NO: 3070; WAN024G7T_at; Start 274; Stop 298
caaggcattcaaactctgacaggca

SEQ ID NO: 234572 - DNA, 25 bp, Artificial
  probe
  misc_feature (1)..(25): SEQ ID NO: 3070; WAN024G7T_at; Start 253; Stop 277
gataatgcctctagcattcggcaag

SEQ ID NO: 234573 - DNA, 25 bp, Artificial
  probe
  misc_feature (1)..(25): SEQ ID NO: 3070; WAN024G7T_at; Start 269; Stop 293
ttcggcaaggcattcaaactctgac

SEQ ID NO: 234574 - DNA, 25 bp, Artificial
  probe
  misc_feature (1)..(25): SEQ ID NO: 3070; WAN024G7T_at; Start 185; Stop 209
caaaaggaaaagaaggcgatgttat

SEQ ID NO: 234575 - DNA, 25 bp, Artificial
  probe
  misc_feature (1)..(25): SEQ ID NO: 3070; WAN024G7T_at; Start 383; Stop 407
tcgcccaaaatggcaaggaaaatac

SEQ ID NO: 234576 - DNA, 25 bp, Artificial
  probe
  misc_feature (1)..(25): SEQ ID NO: 3070; WAN024G7T_at; Start 162; Stop 186
gcttgctatgatttatactgaaaca

SEQ ID NO: 234577 - DNA, 25 bp, Artificial
  probe
  misc_feature (1)..(25): SEQ ID NO: 3070; WAN024G7T_at; Start 146; Stop 170
caaacgaagagcttgtgcttgctat

SEQ ID NO: 234578 - DNA, 25 bp, Artificial
  probe
  misc_feature (1)..(25): SEQ ID NO: 3070; WAN024G7T_at; Start 465; Stop 489
gactggaaagacttatagttatatt

SEQ ID NO: 234579 - DNA, 25 bp, Artificial
  probe
  misc_feature (1)..(25): SEQ ID NO: 3070; WAN024G7T_at; Start 570; Stop 594
cctttacatcatcaaatgtttcact

SEQ ID NO: 234580 - DNA, 25 bp, Artificial
  probe
  misc_feature (1)..(25): SEQ ID NO: 7251; WAN024G7U_at; Start 101; Stop 125
tctcctccgaggtgggtcaaggtct

SEQ ID NO: 234581 - DNA, 25 bp, Artificial
  probe
  misc_feature (1)..(25): SEQ ID NO: 7251; WAN024G7U_at; Start 85; Stop 109
gattggattatcaacttctcctccg

SEQ ID NO: 234582 - DNA, 25 bp, Artificial
  probe
  misc_feature (1)..(25): SEQ ID NO: 7251; WAN024G7U_at; Start 95; Stop 119
tcaacttctcctccgaggtgggtca

SEQ ID NO: 234583 - DNA, 25 bp, Artificial
  probe
  misc_feature (1)..(25): SEQ ID NO: 7251; WAN024G7U_at; Start 54; Stop 78
caaatccaggcaggttattctgagt

SEQ ID NO: 234584 - DNA, 25 bp, Artificial
  probe
  misc_feature (1)..(25): SEQ ID NO: 7251; WAN024G7U_at; Start 160; Stop 184
tacaccttctttagaaaattgaaca

SEQ ID NO: 234585 - DNA, 25 bp, Artificial
  probe
  misc_feature (1)..(25): SEQ ID NO: 7251; WAN024G7U_at; Start 198; Stop 222
tggtcttgagattttcagaaatgct

SEQ ID NO: 234586 - DNA, 25 bp, Artificial
  probe
  misc_feature (1)..(25): SEQ ID NO: 7251; WAN024G7U_at; Start 135; Stop 159
caattcgcaagaaagcgaaatgttc

SEQ ID NO: 234587 - DNA, 25 bp, Artificial
  probe
  misc_feature (1)..(25): SEQ ID NO: 7251; WAN024G7U_at; Start 1; Stop 25
gtgatacttgcgactctgaagattg

SEQ ID NO: 234588 - DNA, 25 bp, Artificial
  probe
  misc_feature (1)..(25): SEQ ID NO: 7251; WAN024G7U_at; Start 90; Stop 114
gattatcaacttctcctccgaggtg

SEQ ID NO: 234589 - DNA, 25 bp, Artificial
  probe
  misc_feature (1)..(25): SEQ ID NO: 7251; WAN024G7U_at; Start 125; Stop 149
tcccgcagggcaattcgcaagaaag

SEQ ID NO: 234590 - DNA, 25 bp, Artificial
  probe
  misc_feature (1)..(25): SEQ ID NO: 7251; WAN024G7U_at; Start 128; Stop 152
cgcagggcaattcgcaagaaagcga

SEQ ID NO: 234591 - DNA, 25 bp, Artificial
  probe
  misc_feature (1)..(25): SEQ ID NO: 7251; WAN024G7U_at; Start 141; Stop 165
gcaagaaagcgaaatgttctacacc

SEQ ID NO: 234592 - DNA, 25 bp, Artificial
  probe
  misc_feature (1)..(25): SEQ ID NO: 7251; WAN024G7U_at; Start 190; Stop 214
caagtcattggtcttgagattttca

SEQ ID NO: 234593 - DNA, 25 bp, Artificial
  probe
  misc_feature (1)..(25): SEQ ID NO: 7251; WAN024G7U_at; Start 92; Stop 116
ttatcaacttctcctccgaggtggg

SEQ ID NO: 234594 - DNA, 25 bp, Artificial
  probe
  misc_feature (1)..(25): SEQ ID NO: 7251; WAN024G7U_at; Start 233; Stop 257
ttccagagattagccagcgttactg

SEQ ID NO: 234595 - DNA, 25 bp, Artificial
  probe
  misc_feature (1)..(25): SEQ ID NO: 7251; WAN024G7U_at; Start 72; Stop 96
tctgagtcagcttgattggattatc

SEQ ID NO: 234596 - DNA, 25 bp, Artificial
  probe
  misc_feature (1)..(25): SEQ ID NO: 7251; WAN024G7U_at; Start 48; Stop 72
ccgttccaaatccaggcaggttatt

SEQ ID NO: 234597 - DNA, 25 bp, Artificial
  probe
  misc_feature (1)..(25): SEQ ID NO: 7251; WAN024G7U_at; Start 179; Stop 203
tgaacaaaaatcaagtcattggtct

SEQ ID NO: 234598 - DNA, 25 bp, Artificial
  probe
  misc_feature (1)..(25): SEQ ID NO: 7251; WAN024G7U_at; Start 12; Stop 36
gactctgaagattgaccaccaaggc

SEQ ID NO: 234599 - DNA, 25 bp, Artificial
  probe
  misc_feature (1)..(25): SEQ ID NO: 7251; WAN024G7U_at; Start 145; Stop 169
gaaagcgaaatgttctacaccttct

SEQ ID NO: 234600 - DNA, 25 bp, Artificial
  probe
  misc_feature (1)..(25): SEQ ID NO: 7251; WAN024G7U_at; Start 120; Stop 144
aggtctcccgcagggcaattcgcaa

SEQ ID NO: 234601 - DNA, 25 bp, Artificial
  probe
  misc_feature (1)..(25): SEQ ID NO: 7251; WAN024G7U_at; Start 230; Stop 254
tctttccagagattagccagcgtta

SEQ ID NO: 234602 - DNA, 25 bp, Artificial
  probe
  misc_feature (1)..(25): SEQ ID NO: 7251; WAN024G7U_at; Start 149; Stop 173
gcgaaatgttctacaccttctttag

SEQ ID NO: 234603 - DNA, 25 bp, Artificial
  probe
  misc_feature (1)..(25): SEQ ID NO: 7251; WAN024G7U_at; Start 21; Stop 45
gattgaccaccaaggcctcgtcagc

SEQ ID NO: 234604 - DNA, 25 bp, Artificial
  probe
  misc_feature (1)..(25): SEQ ID NO: 7251; WAN024G7U_at; Start 105; Stop 129
ctccgaggtgggtcaaggtctcccg

SEQ ID NO: 234605 - DNA, 25 bp, Artificial
  probe
  misc_feature (1)..(25): SEQ ID NO: 7251; WAN024G7U_at; Start 207; Stop 231
gattttcagaaatgctaaactcctc

SEQ ID NO: 234606 - DNA, 25 bp, Artificial
  probe
  misc_feature (1)..(25): SEQ ID NO: 7251; WAN024G7U_at; Start 44; Stop 68
gcacccgttccaaatccaggcaggt

SEQ ID NO: 234607 - DNA, 25 bp, Artificial
  probe
  misc_feature (1)..(25): SEQ ID NO: 7251; WAN024G7U_at; Start 62; Stop 86
ggcaggttattctgagtcagcttga

SEQ ID NO: 234608 - DNA, 25 bp, Artificial
  probe
  misc_feature (1)..(25): SEQ ID NO: 7251; WAN024G7U_at; Start 17; Stop 41
tgaagattgaccaccaaggcctcgt

SEQ ID NO: 234609 - DNA, 25 bp, Artificial
  probe
  misc_feature (1)..(25): SEQ ID NO: 7251; WAN024G7U_at; Start 217; Stop 241
aatgctaaactcctctttccagaga

SEQ ID NO: 234610 - DNA, 25 bp, Artificial
  probe
  misc_feature (1)..(25): SEQ ID NO: 7251; WAN024G7U_at; Start 5; Stop 29
tacttgcgactctgaagattgacca

SEQ ID NO: 234611 - DNA, 25 bp, Artificial
  probe
  misc_feature (1)..(25): SEQ ID NO: 7251; WAN024G7U_at; Start 113; Stop 137
tgggtcaaggtctcccgcagggcaa

SEQ ID NO: 234612 - DNA, 25 bp, Artificial
  probe
  misc_feature (1)..(25): SEQ ID NO: 7251; WAN024G7U_at; Start 9; Stop 33
tgcgactctgaagattgaccaccaa

SEQ ID NO: 234613 - DNA, 25 bp, Artificial
  probe
  misc_feature (1)..(25): SEQ ID NO: 7251; WAN024G7U_at; Start 58; Stop 82
tccaggcaggttattctgagtcagc

SEQ ID NO: 234614 - DNA, 25 bp, Artificial
  probe
  misc_feature (1)..(25): SEQ ID NO: 2021; WAN024G7V_at; Start 368; Stop 392
ttgccctgcgggagaccttgaccca

SEQ ID NO: 234615 - DNA, 25 bp, Artificial
  probe
  misc_feature (1)..(25): SEQ ID NO: 2021; WAN024G7V_at; Start 494; Stop 518
gcaagtatcacctgattgaaaaacg

SEQ ID NO: 234616 - DNA, 25 bp, Artificial
  probe
  misc_feature (1)..(25): SEQ ID NO: 2021; WAN024G7V_at; Start 986; Stop 1010
tcgaggatatccaaagtaaataact

SEQ ID NO: 234617 - DNA, 25 bp, Artificial
  probe
  misc_feature (1)..(25): SEQ ID NO: 2021; WAN024G7V_at; Start 906; Stop 930
caataacgtctatcaagacgccgag

SEQ ID NO: 234618 - DNA, 25 bp, Artificial
  probe
  misc_feature (1)..(25): SEQ ID NO: 2021; WAN024G7V_at; Start 568; Stop 592
gctgtcgctcctaagatttctccta

SEQ ID NO: 234619 - DNA, 25 bp, Artificial
  probe
  misc_feature (1)..(25): SEQ ID NO: 2021; WAN024G7V_at; Start 220; Stop 244
catattacagacgatttgttggaga

SEQ ID NO: 234620 - DNA, 25 bp, Artificial
  probe
  misc_feature (1)..(25): SEQ ID NO: 2021; WAN024G7V_at; Start 952; Stop 976
gaaaatggaacctactctatcttaa

SEQ ID NO: 234621 - DNA, 25 bp, Artificial
  probe
  misc_feature (1)..(25): SEQ ID NO: 2021; WAN024G7V_at; Start 355; Stop 379
gctttcttgcgaattgccctgcggg

SEQ ID NO: 234622 - DNA, 25 bp, Artificial
  probe
  misc_feature (1)..(25): SEQ ID NO: 2021; WAN024G7V_at; Start 747; Stop 771
ttttgacaacaatctgacggctcgt

SEQ ID NO: 234623 - DNA, 25 bp, Artificial
  probe
  misc_feature (1)..(25): SEQ ID NO: 2021; WAN024G7V_at; Start 51; Stop 75
gaaagccattattcaccagttcagt

SEQ ID NO: 234624 - DNA, 25 bp, Artificial
  probe
  misc_feature (1)..(25): SEQ ID NO: 2021; WAN024G7V_at; Start 431; Stop 455
agaataacctgcctggatttggaac

SEQ ID NO: 234625 - DNA, 25 bp, Artificial
  probe
  misc_feature (1)..(25): SEQ ID NO: 2021; WAN024G7V_at; Start 166; Stop 190
tattcagatgaagccaagactggga

SEQ ID NO: 234626 - DNA, 25 bp, Artificial
  probe
  misc_feature (1)..(25): SEQ ID NO: 2021; WAN024G7V_at; Start 236; Stop 260
tgttggagacatcagtaacgctggc

SEQ ID NO: 234627 - DNA, 25 bp, Artificial
  probe
  misc_feature (1)..(25): SEQ ID NO: 2021; WAN024G7V_at; Start 874; Stop 898
tccttatcaaatggaattgagctca

SEQ ID NO: 234628 - DNA, 25 bp, Artificial
  probe
  misc_feature (1)..(25): SEQ ID NO: 2021; WAN024G7V_at; Start 691; Stop 715
ttcaacaacctagaagaaagcaatg

SEQ ID NO: 234629 - DNA, 25 bp, Artificial
  probe
  misc_feature (1)..(25): SEQ ID NO: 2021; WAN024G7V_at; Start 556; Stop 580
gataatcttcttgctgtcgctccta

SEQ ID NO: 234630 - DNA, 25 bp, Artificial
  probe
  misc_feature (1)..(25): SEQ ID NO: 2021; WAN024G7V_at; Start 891; Stop 915
tgagctcatcgttcccaataacgtc

SEQ ID NO: 234631 - DNA, 25 bp, Artificial
  probe
  misc_feature (1)..(25): SEQ ID NO: 2021; WAN024G7V_at; Start 64; Stop 88
caccagttcagtccggatgataccg

SEQ ID NO: 234632 - DNA, 25 bp, Artificial
  probe
  misc_feature (1)..(25): SEQ ID NO: 2021; WAN024G7V_at; Start 389; Stop 413
cccacctcggaggagaagttgataa

SEQ ID NO: 234633 - DNA, 25 bp, Artificial
  probe
  misc_feature (1)..(25): SEQ ID NO: 2021; WAN024G7V_at; Start 922; Stop 946
gacgccgagtctgttgagtttatcc

SEQ ID NO: 234634 - DNA, 25 bp, Artificial
  probe
  misc_feature (1)..(25): SEQ ID NO: 2021; WAN024G7V_at; Start 291; Stop 315
tgaaaatctcaagaccaatgacttg

SEQ ID NO: 234635 - DNA, 25 bp, Artificial
  probe
  misc_feature (1)..(25): SEQ ID NO: 2021; WAN024G7V_at; Start 721; Stop 745
tcacctgagaaattggctaatgacc

SEQ ID NO: 234636 - DNA, 25 bp, Artificial
  probe
  misc_feature (1)..(25): SEQ ID NO: 2021; WAN024G7V_at; Start 735; Stop 759
ggctaatgacctttttgacaacaat

SEQ ID NO: 234637 - DNA, 25 bp, Artificial
  probe
  misc_feature (1)..(25): SEQ ID NO: 2021; WAN024G7V_at; Start 333; Stop 357
taaagaaggtgtagaacatttcgct

SEQ ID NO: 234638 - DNA, 25 bp, Artificial
  probe
  misc_feature (1)..(25): SEQ ID NO: 2021; WAN024G7V_at; Start 180; Stop 204
caagactgggattttcgaagaagaa

SEQ ID NO: 234639 - DNA, 25 bp, Artificial
  probe
  misc_feature (1)..(25): SEQ ID NO: 2021; WAN024G7V_at; Start 251; Stop 275
taacgctggctaatctctggaaaga

SEQ ID NO: 234640 - DNA, 25 bp, Artificial
  probe
  misc_feature (1)..(25): SEQ ID NO: 2021; WAN024G7V_at; Start 606; Stop 630
ggaactggaaaaaacagcccagaga

SEQ ID NO: 234641 - DNA, 25 bp, Artificial
  probe
  misc_feature (1)..(25): SEQ ID NO: 2021; WAN024G7V_at; Start 466; Stop 490
gaggccttggtggtcaatcttcaga

SEQ ID NO: 234642 - DNA, 25 bp, Artificial
  probe
  misc_feature (1)..(25): SEQ ID NO: 2021; WAN024G7V_at; Start 590; Stop 614
ctaaaaaatctatcaaggaactgga

SEQ ID NO: 234643 - DNA, 25 bp, Artificial
  probe
  misc_feature (1)..(25): SEQ ID NO: 2021; WAN024G7V_at; Start 706; Stop 730
gaaagcaatgaattgtcacctgaga

SEQ ID NO: 234644 - DNA, 25 bp, Artificial
  probe
  misc_feature (1)..(25): SEQ ID NO: 2021; WAN024G7V_at; Start 265; Stop 289
ctctggaaagaggagtttagcattt

SEQ ID NO: 234645 - DNA, 25 bp, Artificial
  probe
  misc_feature (1)..(25): SEQ ID NO: 2021; WAN024G7V_at; Start 765; Stop 789
ggctcgtttgagctttattgaccaa

SEQ ID NO: 234646 - DNA, 25 bp, Artificial
  probe
  misc_feature (1)..(25): SEQ ID NO: 2021; WAN024G7V_at; Start 662; Stop 686
aatttcaatccaaggtcaaatcagc

SEQ ID NO: 234647 - DNA, 25 bp, Artificial
  probe
  misc_feature (1)..(25): SEQ ID NO: 2021; WAN024G7V_at; Start 796; Stop 820
gaagccgtaccagaacctgttcaat

SEQ ID NO: 234648 - DNA, 25 bp, Artificial
  probe
  misc_feature (1)..(25): SEQ ID NO: 1879; WAN024G7W_at; Start 209; Stop 233
tagtagacgttgtagagactcttgc

SEQ ID NO: 234649 - DNA, 25 bp, Artificial
  probe
  misc_feature (1)..(25): SEQ ID NO: 1879; WAN024G7W_at; Start 342; Stop 366
tacggttatgggaatggatttggca

SEQ ID NO: 234650 - DNA, 25 bp, Artificial
  probe
  misc_feature (1)..(25): SEQ ID NO: 1879; WAN024G7W_at; Start 808; Stop 832
gctaaggcagtttccttcaaagaag

SEQ ID NO: 234651 - DNA, 25 bp, Artificial
  probe
  misc_feature (1)..(25): SEQ ID NO: 1879; WAN024G7W_at; Start 399; Stop 423
tagcttctctggtcaaacctacaac

SEQ ID NO: 234652 - DNA, 25 bp, Artificial
  probe
  misc_feature (1)..(25): SEQ ID NO: 1879; WAN024G7W_at; Start 1167; Stop 1191
ccttaagaattcagaaaatgaggct

SEQ ID NO: 234653 - DNA, 25 bp, Artificial
  probe
  misc_feature (1)..(25): SEQ ID NO: 1879; WAN024G7W_at; Start 879; Stop 903
cagcaaggctatggcagatgtcttc

SEQ ID NO: 234654 - DNA, 25 bp, Artificial
  probe
  misc_feature (1)..(25): SEQ ID NO: 1879; WAN024G7W_at; Start 304; Stop 328
aactgtgcggcttacatgtccttga

SEQ ID NO: 234655 - DNA, 25 bp, Artificial
  probe
  misc_feature (1)..(25): SEQ ID NO: 1879; WAN024G7W_at; Start 320; Stop 344
tgtccttgattgagccaggtgatac

SEQ ID NO: 234656 - DNA, 25 bp, Artificial
  probe
  misc_feature (1)..(25): SEQ ID NO: 1879; WAN024G7W_at; Start 1190; Stop 1214
ctgtattagaagaagtgagaagtgc

SEQ ID NO: 234657 - DNA, 25 bp, Artificial
  probe
  misc_feature (1)..(25): SEQ ID NO: 1879; WAN024G7W_at; Start 241; Stop 265
cgcgcaaaagaaattttcggtgcta

SEQ ID NO: 234658 - DNA, 25 bp, Artificial
  probe
  misc_feature (1)..(25): SEQ ID NO: 1879; WAN024G7W_at; Start 179; Stop 203
caggacgccgttattatggtggaac

SEQ ID NO: 234659 - DNA, 25 bp, Artificial
  probe
  misc_feature (1)..(25): SEQ ID NO: 1879; WAN024G7W_at; Start 1205; Stop 1229
tgagaagtgcagtcaaagaattgac

SEQ ID NO: 234660 - DNA, 25 bp, Artificial
  probe
  misc_feature (1)..(25): SEQ ID NO: 1879; WAN024G7W_at; Start 193; Stop 217
tatggtggaactgatgtagtagacg

SEQ ID NO: 234661 - DNA, 25 bp, Artificial
  probe
  misc_feature (1)..(25): SEQ ID NO: 1879; WAN024G7W_at; Start 288; Stop 312
ttcaggaagccaagctaactgtgcg

SEQ ID NO: 234662 - DNA, 25 bp, Artificial
  probe
  misc_feature (1)..(25): SEQ ID NO: 1879; WAN024G7W_at; Start 864; Stop 888
caatgtaattaagaacagcaaggct

SEQ ID NO: 234663 - DNA, 25 bp, Artificial
  probe
  misc_feature (1)..(25): SEQ ID NO: 1879; WAN024G7W_at; Start 223; Stop 247
gagactcttgctattgaacgcgcaa

SEQ ID NO: 234664 - DNA, 25 bp, Artificial
  probe
  misc_feature (1)..(25): SEQ ID NO: 1879; WAN024G7W_at; Start 821; Stop 845
ccttcaaagaagttttggatccagc

SEQ ID NO: 234665 - DNA, 25 bp, Artificial
  probe
  misc_feature (1)..(25): SEQ ID NO: 1879; WAN024G7W_at; Start 931; Stop 955
tcaggtggaactgaaaaccatctct

SEQ ID NO: 234666 - DNA, 25 bp, Artificial
  probe
  misc_feature (1)..(25): SEQ ID NO: 1879; WAN024G7W_at; Start 70; Stop 94
gaacgccaacaaaataatatcgagt

SEQ ID NO: 234667 - DNA, 25 bp, Artificial
  probe
  misc_feature (1)..(25): SEQ ID NO: 1879; WAN024G7W_at; Start 469; Stop 493
gatgctatcttgaaacaagcccaag

SEQ ID NO: 234668 - DNA, 25 bp, Artificial
  probe
  misc_feature (1)..(25): SEQ ID NO: 1879; WAN024G7W_at; Start 1076; Stop 1100
caagtgggattcgtatcggagcagc

SEQ ID NO: 234669 - DNA, 25 bp, Artificial
  probe
  misc_feature (1)..(25): SEQ ID NO: 1879; WAN024G7W_at; Start 503; Stop 527
caaaactgattgtagctggtgcttc

SEQ ID NO: 234670 - DNA, 25 bp, Artificial
  probe
  misc_feature (1)..(25): SEQ ID NO: 1879; WAN024G7W_at; Start 111; Stop 135
cgtagtttccaaggctgttatggca

SEQ ID NO: 234671 - DNA, 25 bp, Artificial
  probe
  misc_feature (1)..(25): SEQ ID NO: 1879; WAN024G7W_at; Start 1107; Stop 1131
tactgcacgtggatttggtgaagaa

SEQ ID NO: 234672 - DNA, 25 bp, Artificial
  probe
  misc_feature (1)..(25): SEQ ID NO: 1879; WAN024G7W_at; Start 87; Stop 111
tatcgagttaattgcttcggaaaac

SEQ ID NO: 234673 - DNA, 25 bp, Artificial
  probe
  misc_feature (1)..(25): SEQ ID NO: 1879; WAN024G7W_at; Start 899; Stop 923
tcttcttgcaagaccctgatttccg

SEQ ID NO: 234674 - DNA, 25 bp, Artificial
  probe
  misc_feature (1)..(25): SEQ ID NO: 1879; WAN024G7W_at; Start 29; Stop 53
catatgatgctgatctctggaatgc

SEQ ID NO: 234675 - DNA, 25 bp, Artificial
  probe
  misc_feature (1)..(25): SEQ ID NO: 1879; WAN024G7W_at; Start 54; Stop 78
tattgccaaagaagaagaacgccaa

SEQ ID NO: 234676 - DNA, 25 bp, Artificial
  probe
  misc_feature (1)..(25): SEQ ID NO: 1879; WAN024G7W_at; Start 126; Stop 150
tgttatggcagctcaagggtctatc

SEQ ID NO: 234677 - DNA, 25 bp, Artificial
  probe
  misc_feature (1)..(25): SEQ ID NO: 1879; WAN024G7W_at; Start 159; Stop 183
taaatatgccgagggttacccagga

SEQ ID NO: 234678 - DNA, 25 bp, Artificial
  probe
  misc_feature (1)..(25): SEQ ID NO: 1879; WAN024G7W_at; Start 1125; Stop 1149
tgaagaagaaagtcgcaaagtggct

SEQ ID NO: 234679 - DNA, 25 bp, Artificial
  probe
  misc_feature (1)..(25): SEQ ID NO: 1879; WAN024G7W_at; Start 703; Stop 727
cctcgtggtggtttgattttgacca

SEQ ID NO: 234680 - DNA, 25 bp, Artificial
  probe
  misc_feature (1)..(25): SEQ ID NO: 1879; WAN024G7W_at; Start 1139; Stop 1163
gcaaagtggctgaactcatcattaa

SEQ ID NO: 234681 - DNA, 25 bp, Artificial
  probe
  misc_feature (1)..(25): SEQ ID NO: 1879; WAN024G7W_at; Start 848; Stop 872
tcaaggaatatgctgccaatgtaat

SEQ ID NO: 234682 - DNA, 25 bp, Artificial
  probe
  misc_feature (1)..(25): SEQ ID NO: 5096; WAN024G7X_at; Start 95; Stop 119
caatagccccttcacctagtggagt

SEQ ID NO: 234683 - DNA, 25 bp, Artificial
  probe
  misc_feature (1)..(25): SEQ ID NO: 5096; WAN024G7X_at; Start 127; Stop 151
gcagcgatggtatcaaattcacgtg

SEQ ID NO: 234684 - DNA, 25 bp, Artificial
  probe
  misc_feature (1)..(25): SEQ ID NO: 5096; WAN024G7X_at; Start 8; Stop 32
tgtggctggcaaccttgttcaagtc

SEQ ID NO: 234685 - DNA, 25 bp, Artificial
  probe
  misc_feature (1)..(25): SEQ ID NO: 5096; WAN024G7X_at; Start 60; Stop 84
agcaaaactgtctgttccgctcagg

SEQ ID NO: 234686 - DNA, 25 bp, Artificial
  probe
  misc_feature (1)..(25): SEQ ID NO: 5096; WAN024G7X_at; Start 84; Stop 108
gcggacaataccaatagccccttca

SEQ ID NO: 234687 - DNA, 25 bp, Artificial
  probe
  misc_feature (1)..(25): SEQ ID NO: 5096; WAN024G7X_at; Start 107; Stop 131
cacctagtggagtagagatagcagc

SEQ ID NO: 234688 - DNA, 25 bp, Artificial
  probe
  misc_feature (1)..(25): SEQ ID NO: 5096; WAN024G7X_at; Start 68; Stop 92
tgtctgttccgctcaggcggacaat

SEQ ID NO: 234689 - DNA, 25 bp, Artificial
  probe
  misc_feature (1)..(25): SEQ ID NO: 5096; WAN024G7X_at; Start 110; Stop 134
ctagtggagtagagatagcagcgat

SEQ ID NO: 234690 - DNA, 25 bp, Artificial
  probe
  misc_feature (1)..(25): SEQ ID NO: 5096; WAN024G7X_at; Start 104; Stop 128
cttcacctagtggagtagagatagc

SEQ ID NO: 234691 - DNA, 25 bp, Artificial
  probe
  misc_feature (1)..(25): SEQ ID NO: 5096; WAN024G7X_at; Start 2; Stop 26
tgagagtgtggctggcaaccttgtt

SEQ ID NO: 234692 - DNA, 25 bp, Artificial
  probe
  misc_feature (1)..(25): SEQ ID NO: 5096; WAN024G7X_at; Start 148; Stop 172
cgtgtaatcataatgtttcctttaa

SEQ ID NO: 234693 - DNA, 25 bp, Artificial
  probe
  misc_feature (1)..(25): SEQ ID NO: 5096; WAN024G7X_at; Start 37; Stop 61
cctttaaaaatcttttgcgcaatag

SEQ ID NO: 234694 - DNA, 25 bp, Artificial
  probe
  misc_feature (1)..(25): SEQ ID NO: 5096; WAN024G7X_at; Start 64; Stop 88
aaactgtctgttccgctcaggcgga

SEQ ID NO: 234695 - DNA, 25 bp, Artificial
  probe
  misc_feature (1)..(25): SEQ ID NO: 5096; WAN024G7X_at; Start 80; Stop 104
tcaggcggacaataccaatagcccc

SEQ ID NO: 234696 - DNA, 25 bp, Artificial
  probe
  misc_feature (1)..(25): SEQ ID NO: 5096; WAN024G7X_at; Start 50; Stop 74
tttgcgcaatagcaaaactgtctgt

SEQ ID NO: 234697 - DNA, 25 bp, Artificial
  probe
  misc_feature (1)..(25): SEQ ID NO: 5096; WAN024G7X_at; Start 5; Stop 29
gagtgtggctggcaaccttgttcaa

SEQ ID NO: 234698 - DNA, 25 bp, Artificial
  probe
  misc_feature (1)..(25): SEQ ID NO: 5096; WAN024G7X_at; Start 76; Stop 100
ccgctcaggcggacaataccaatag

SEQ ID NO: 234699 - DNA, 25 bp, Artificial
  probe
  misc_feature (1)..(25): SEQ ID NO: 5096; WAN024G7X_at; Start 100; Stop 124
gccccttcacctagtggagtagaga

SEQ ID NO: 234700 - DNA, 25 bp, Artificial
  probe
  misc_feature (1)..(25): SEQ ID NO: 5096; WAN024G7X_at; Start 143; Stop 167
attcacgtgtaatcataatgtttcc

SEQ ID NO: 234701 - DNA, 25 bp, Artificial
  probe
  misc_feature (1)..(25): SEQ ID NO: 5096; WAN024G7X_at; Start 14; Stop 38
tggcaaccttgttcaagtcttttcc

SEQ ID NO: 234702 - DNA, 25 bp, Artificial
  probe
  misc_feature (1)..(25): SEQ ID NO: 5096; WAN024G7X_at; Start 62; Stop 86
caaaactgtctgttccgctcaggcg

SEQ ID NO: 234703 - DNA, 25 bp, Artificial
  probe
  misc_feature (1)..(25): SEQ ID NO: 5096; WAN024G7X_at; Start 55; Stop 79
gcaatagcaaaactgtctgttccgc

SEQ ID NO: 234704 - DNA, 25 bp, Artificial
  probe
  misc_feature (1)..(25): SEQ ID NO: 5096; WAN024G7X_at; Start 52; Stop 76
tgcgcaatagcaaaactgtctgttc

SEQ ID NO: 234705 - DNA, 25 bp, Artificial
  probe
  misc_feature (1)..(25): SEQ ID NO: 5096; WAN024G7X_at; Start 125; Stop 149
tagcagcgatggtatcaaattcacg

SEQ ID NO: 234706 - DNA, 25 bp, Artificial
  probe
  misc_feature (1)..(25): SEQ ID NO: 5096; WAN024G7X_at; Start 117; Stop 141
agtagagatagcagcgatggtatca

SEQ ID NO: 234707 - DNA, 25 bp, Artificial
  probe
  misc_feature (1)..(25): SEQ ID NO: 5096; WAN024G7X_at; Start 98; Stop 122
tagccccttcacctagtggagtaga

SEQ ID NO: 234708 - DNA, 25 bp, Artificial
  probe
  misc_feature (1)..(25): SEQ ID NO: 5096; WAN024G7X_at; Start 139; Stop 163
tcaaattcacgtgtaatcataatgt

SEQ ID NO: 234709 - DNA, 25 bp, Artificial
  probe
  misc_feature (1)..(25): SEQ ID NO: 5096; WAN024G7X_at; Start 78; Stop 102
gctcaggcggacaataccaatagcc

SEQ ID NO: 234710 - DNA, 25 bp, Artificial
  probe
  misc_feature (1)..(25): SEQ ID NO: 5096; WAN024G7X_at; Start 102; Stop 126
cccttcacctagtggagtagagata

SEQ ID NO: 234711 - DNA, 25 bp, Artificial
  probe
  misc_feature (1)..(25): SEQ ID NO: 5096; WAN024G7X_at; Start 123; Stop 147
gatagcagcgatggtatcaaattca

SEQ ID NO: 234712 - DNA, 25 bp, Artificial
  probe
  misc_feature (1)..(25): SEQ ID NO: 5096; WAN024G7X_at; Start 134; Stop 158
tggtatcaaattcacgtgtaatcat

SEQ ID NO: 234713 - DNA, 25 bp, Artificial
  probe
  misc_feature (1)..(25): SEQ ID NO: 5096; WAN024G7X_at; Start 130; Stop 154
gcgatggtatcaaattcacgtgtaa

SEQ ID NO: 234714 - DNA, 25 bp, Artificial
  probe
  misc_feature (1)..(25): SEQ ID NO: 5096; WAN024G7X_at; Start 92; Stop 116
taccaatagccccttcacctagtgg

SEQ ID NO: 234715 - DNA, 25 bp, Artificial
  probe
  misc_feature (1)..(25): SEQ ID NO: 5096; WAN024G7X_at; Start 11; Stop 35
ggctggcaaccttgttcaagtcttt

SEQ ID NO: 234716 - DNA, 25 bp, Artificial
  probe
  misc_feature (1)..(25): SEQ ID NO: 5786; WAN024G7Y_at; Start 138; Stop 162
ggtaaattcaccaggttctgccaac

SEQ ID NO: 234717 - DNA, 25 bp, Artificial
  probe
  misc_feature (1)..(25): SEQ ID NO: 5786; WAN024G7Y_at; Start 55; Stop 79
gccttgtcagtcttggcacggatga

SEQ ID NO: 234718 - DNA, 25 bp, Artificial
  probe
  misc_feature (1)..(25): SEQ ID NO: 5786; WAN024G7Y_at; Start 232; Stop 256
tcgataatatcctcacgagtgaagg

SEQ ID NO: 234719 - DNA, 25 bp, Artificial
  probe
  misc_feature (1)..(25): SEQ ID NO: 5786; WAN024G7Y_at; Start 222; Stop 246
ggtgttaatctcgataatatcctca

SEQ ID NO: 234720 - DNA, 25 bp, Artificial
  probe
  misc_feature (1)..(25): SEQ ID NO: 5786; WAN024G7Y_at; Start 302; Stop 326
taccagtcagaggatcaataatgtg

SEQ ID NO: 234721 - DNA, 25 bp, Artificial
  probe
  misc_feature (1)..(25): SEQ ID NO: 5786; WAN024G7Y_at; Start 239; Stop 263
tatcctcacgagtgaaggtctttgg

SEQ ID NO: 234722 - DNA, 25 bp, Artificial
  probe
  misc_feature (1)..(25): SEQ ID NO: 5786; WAN024G7Y_at; Start 40; Stop 64
accgcaatgttcatggccttgtcag

SEQ ID NO: 234723 - DNA, 25 bp, Artificial
  probe
  misc_feature (1)..(25): SEQ ID NO: 5786; WAN024G7Y_at; Start 22; Stop 46
gagccgtctaattgtttgaccgcaa

SEQ ID NO: 234724 - DNA, 25 bp, Artificial
  probe
  misc_feature (1)..(25): SEQ ID NO: 5786; WAN024G7Y_at; Start 255; Stop 279
ggtctttggagacttcatagcccca

SEQ ID NO: 234725 - DNA, 25 bp, Artificial
  probe
  misc_feature (1)..(25): SEQ ID NO: 5786; WAN024G7Y_at; Start 284; Stop 308
taacctcgtccatgactttaccagt

SEQ ID NO: 234726 - DNA, 25 bp, Artificial
  probe
  misc_feature (1)..(25): SEQ ID NO: 5786; WAN024G7Y_at; Start 34; Stop 58
tgtttgaccgcaatgttcatggcct

SEQ ID NO: 234727 - DNA, 25 bp, Artificial
  probe
  misc_feature (1)..(25): SEQ ID NO: 5786; WAN024G7Y_at; Start 214; Stop 238
ccaccgtgggtgttaatctcgataa

SEQ ID NO: 234728 - DNA, 25 bp, Artificial
  probe
  misc_feature (1)..(25): SEQ ID NO: 5786; WAN024G7Y_at; Start 68; Stop 92
tggcacggatgatatccatcacagc

SEQ ID NO: 234729 - DNA, 25 bp, Artificial
  probe
  misc_feature (1)..(25): SEQ ID NO: 5786; WAN024G7Y_at; Start 166; Stop 190
gccccttcacgaatagctagctgga

SEQ ID NO: 234730 - DNA, 25 bp, Artificial
  probe
  misc_feature (1)..(25): SEQ ID NO: 5786; WAN024G7Y_at; Start 50; Stop 74
tcatggccttgtcagtcttggcacg

SEQ ID NO: 234731 - DNA, 25 bp, Artificial
  probe
  misc_feature (1)..(25): SEQ ID NO: 5786; WAN024G7Y_at; Start 8; Stop 32
tgaggtcagaaagggagccgtctaa

SEQ ID NO: 234732 - DNA, 25 bp, Artificial
  probe
  misc_feature (1)..(25): SEQ ID NO: 5786; WAN024G7Y_at; Start 278; Stop 302
caaccataacctcgtccatgacttt

SEQ ID NO: 234733 - DNA, 25 bp, Artificial
  probe
  misc_feature (1)..(25): SEQ ID NO: 5786; WAN024G7Y_at; Start 201; Stop 225
ggtcaccgcaatcccaccgtgggtg

SEQ ID NO: 234734 - DNA, 25 bp, Artificial
  probe
  misc_feature (1)..(25): SEQ ID NO: 5786; WAN024G7Y_at; Start 294; Stop 318
catgactttaccagtcagaggatca

SEQ ID NO: 234735 - DNA, 25 bp, Artificial
  probe
  misc_feature (1)..(25): SEQ ID NO: 5786; WAN024G7Y_at; Start 96; Stop 120
tgcctgtgtcaagtctacgcgaccg

SEQ ID NO: 234736 - DNA, 25 bp, Artificial
  probe
  misc_feature (1)..(25): SEQ ID NO: 5786; WAN024G7Y_at; Start 173; Stop 197
cacgaatagctagctggagaatttc

SEQ ID NO: 234737 - DNA, 25 bp, Artificial
  probe
  misc_feature (1)..(25): SEQ ID NO: 5786; WAN024G7Y_at; Start 77; Stop 101
tgatatccatcacagcctctgcctg

SEQ ID NO: 234738 - DNA, 25 bp, Artificial
  probe
  misc_feature (1)..(25): SEQ ID NO: 5786; WAN024G7Y_at; Start 261; Stop 285
tggagacttcatagccccaaccata

SEQ ID NO: 234739 - DNA, 25 bp, Artificial
  probe
  misc_feature (1)..(25): SEQ ID NO: 5786; WAN024G7Y_at; Start 101; Stop 125
gtgtcaagtctacgcgaccgtttaa

SEQ ID NO: 234740 - DNA, 25 bp, Artificial
  probe
  misc_feature (1)..(25): SEQ ID NO: 5786; WAN024G7Y_at; Start 160; Stop 184
aaccgagccccttcacgaatagcta

SEQ ID NO: 234741 - DNA, 25 bp, Artificial
  probe
  misc_feature (1)..(25): SEQ ID NO: 5786; WAN024G7Y_at; Start 127; Stop 151
aaagcacgtttggtaaattcaccag

SEQ ID NO: 234742 - DNA, 25 bp, Artificial
  probe
  misc_feature (1)..(25): SEQ ID NO: 5786; WAN024G7Y_at; Start 191; Stop 215
gaatttcattggtcaccgcaatccc

SEQ ID NO: 234743 - DNA, 25 bp, Artificial
  probe
  misc_feature (1)..(25): SEQ ID NO: 5786; WAN024G7Y_at; Start 16; Stop 40
gaaagggagccgtctaattgtttga

SEQ ID NO: 234744 - DNA, 25 bp, Artificial
  probe
  misc_feature (1)..(25): SEQ ID NO: 5786; WAN024G7Y_at; Start 142; Stop 166
aattcaccaggttctgccaaccgag

SEQ ID NO: 234745 - DNA, 25 bp, Artificial
  probe
  misc_feature (1)..(25): SEQ ID NO: 5786; WAN024G7Y_at; Start 5; Stop 29
taatgaggtcagaaagggagccgtc

SEQ ID NO: 234746 - DNA, 25 bp, Artificial
  probe
  misc_feature (1)..(25): SEQ ID NO: 5786; WAN024G7Y_at; Start 61; Stop 85
tcagtcttggcacggatgatatcca

SEQ ID NO: 234747 - DNA, 25 bp, Artificial
  probe
  misc_feature (1)..(25): SEQ ID NO: 5786; WAN024G7Y_at; Start 186; Stop 210
ctggagaatttcattggtcaccgca

SEQ ID NO: 234748 - DNA, 25 bp, Artificial
  probe
  misc_feature (1)..(25): SEQ ID NO: 5786; WAN024G7Y_at; Start 244; Stop 268
tcacgagtgaaggtctttggagact

SEQ ID NO: 234749 - DNA, 25 bp, Artificial
  probe
  misc_feature (1)..(25): SEQ ID NO: 5786; WAN024G7Y_at; Start 90; Stop 114
agcctctgcctgtgtcaagtctacg

SEQ ID NO: 234750 - DNA, 25 bp, Artificial
  probe
  misc_feature (1)..(25): SEQ ID NO: 5829; WAN024G7Z_at; Start 427; Stop 451
ggacgtccaatgatagccgttgaaa

SEQ ID NO: 234751 - DNA, 25 bp, Artificial
  probe
  misc_feature (1)..(25): SEQ ID NO: 5829; WAN024G7Z_at; Start 281; Stop 305
taccggctgtatcaatcaatttgag

SEQ ID NO: 234752 - DNA, 25 bp, Artificial
  probe
  misc_feature (1)..(25): SEQ ID NO: 5829; WAN024G7Z_at; Start 245; Stop 269
caccgatttgttccactatgtcatc

SEQ ID NO: 234753 - DNA, 25 bp, Artificial
  probe
  misc_feature (1)..(25): SEQ ID NO: 5829; WAN024G7Z_at; Start 541; Stop 565
gcagtagtggcttcctcaacatcgt

SEQ ID NO: 234754 - DNA, 25 bp, Artificial
  probe
  misc_feature (1)..(25): SEQ ID NO: 5829; WAN024G7Z_at; Start 41; Stop 65
taaggactgaaatacggataacgtc

SEQ ID NO: 234755 - DNA, 25 bp, Artificial
  probe
  misc_feature (1)..(25): SEQ ID NO: 5829; WAN024G7Z_at; Start 497; Stop 521
tggttagtaattgctcaaactccat

SEQ ID NO: 234756 - DNA, 25 bp, Artificial
  probe
  misc_feature (1)..(25): SEQ ID NO: 5829; WAN024G7Z_at; Start 191; Stop 215
ttagcactagtagaaccaagtcggc

SEQ ID NO: 234757 - DNA, 25 bp, Artificial
  probe
  misc_feature (1)..(25): SEQ ID NO: 5829; WAN024G7Z_at; Start 231; Stop 255
tttcgaacgctcaacaccgatttgt

SEQ ID NO: 234758 - DNA, 25 bp, Artificial
  probe
  misc_feature (1)..(25): SEQ ID NO: 5829; WAN024G7Z_at; Start 417; Stop 441
cccaacgttgggacgtccaatgata

SEQ ID NO: 234759 - DNA, 25 bp, Artificial
  probe
  misc_feature (1)..(25): SEQ ID NO: 5829; WAN024G7Z_at; Start 460; Stop 484
cgaaggattttaccacgacgtgctg

SEQ ID NO: 234760 - DNA, 25 bp, Artificial
  probe
  misc_feature (1)..(25): SEQ ID NO: 5829; WAN024G7Z_at; Start 265; Stop 289
tcatctgtttcacgaataccggctg

SEQ ID NO: 234761 - DNA, 25 bp, Artificial
  probe
  misc_feature (1)..(25): SEQ ID NO: 5829; WAN024G7Z_at; Start 80; Stop 104
aagtttcaatcgtttctggcaggtc

SEQ ID NO: 234762 - DNA, 25 bp, Artificial
  probe
  misc_feature (1)..(25): SEQ ID NO: 5829; WAN024G7Z_at; Start 324; Stop 348
gacgtactcttcgatgacatctcgt

SEQ ID NO: 234763 - DNA, 25 bp, Artificial
  probe
  misc_feature (1)..(25): SEQ ID NO: 5829; WAN024G7Z_at; Start 149; Stop 173
caagaagttgtctgtcttgcgcagt

SEQ ID NO: 234764 - DNA, 25 bp, Artificial
  probe
  misc_feature (1)..(25): SEQ ID NO: 5829; WAN024G7Z_at; Start 94; Stop 118
tctggcaggtcggttttattaagta

SEQ ID NO: 234765 - DNA, 25 bp, Artificial
  probe
  misc_feature (1)..(25): SEQ ID NO: 5829; WAN024G7Z_at; Start 372; Stop 396
gatagccttgtcctcacgcaagagg

SEQ ID NO: 234766 - DNA, 25 bp, Artificial
  probe
  misc_feature (1)..(25): SEQ ID NO: 5829; WAN024G7Z_at; Start 402; Stop 426
gagaaggcttgatttcccaacgttg

SEQ ID NO: 234767 - DNA, 25 bp, Artificial
  probe
  misc_feature (1)..(25): SEQ ID NO: 5829; WAN024G7Z_at; Start 512; Stop 536
caaactccattgtcttctctcggac

SEQ ID NO: 234768 - DNA, 25 bp, Artificial
  probe
  misc_feature (1)..(25): SEQ ID NO: 5829; WAN024G7Z_at; Start 176; Stop 200
gtggttcactggcatttagcactag

SEQ ID NO: 234769 - DNA, 25 bp, Artificial
  probe
  misc_feature (1)..(25): SEQ ID NO: 5829; WAN024G7Z_at; Start 386; Stop 410
cacgcaagaggttgttgagaaggct

SEQ ID NO: 234770 - DNA, 25 bp, Artificial
  probe
  misc_feature (1)..(25): SEQ ID NO: 5829; WAN024G7Z_at; Start 339; Stop 363
gacatctcgtgttgtcccagcgata

SEQ ID NO: 234771 - DNA, 25 bp, Artificial
  probe
  misc_feature (1)..(25): SEQ ID NO: 5829; WAN024G7Z_at; Start 119; Stop 143
gaataatgcgattggtatcttggct

SEQ ID NO: 234772 - DNA, 25 bp, Artificial
  probe
  misc_feature (1)..(25): SEQ ID NO: 5829; WAN024G7Z_at; Start 203; Stop 227
gaaccaagtcggcttccttgagggc

SEQ ID NO: 234773 - DNA, 25 bp, Artificial
  probe
  misc_feature (1)..(25): SEQ ID NO: 5829; WAN024G7Z_at; Start 473; Stop 497
cacgacgtgctgtcctaaggagttt

SEQ ID NO: 234774 - DNA, 25 bp, Artificial
  probe
  misc_feature (1)..(25): SEQ ID NO: 5829; WAN024G7Z_at; Start 57; Stop 81
gataacgtcttcaggtagtttcgaa

SEQ ID NO: 234775 - DNA, 25 bp, Artificial
  probe
  misc_feature (1)..(25): SEQ ID NO: 5829; WAN024G7Z_at; Start 222; Stop 246
gagggcttttttcgaacgctcaaca

SEQ ID NO: 234776 - DNA, 25 bp, Artificial
  probe
  misc_feature (1)..(25): SEQ ID NO: 5829; WAN024G7Z_at; Start 527; Stop 551
tctctcggacaacagcagtagtggc

SEQ ID NO: 234777 - DNA, 25 bp, Artificial
  probe
  misc_feature (1)..(25): SEQ ID NO: 5829; WAN024G7Z_at; Start 555; Stop 579
ctcaacatcgtcatactcaggatag

SEQ ID NO: 234778 - DNA, 25 bp, Artificial
  probe
  misc_feature (1)..(25): SEQ ID NO: 5829; WAN024G7Z_at; Start 6; Stop 30
gattcgctcttcaatcttgtcgatg

SEQ ID NO: 234779 - DNA, 25 bp, Artificial
  probe
  misc_feature (1)..(25): SEQ ID NO: 5829; WAN024G7Z_at; Start 442; Stop 466
gccgttgaaattccttcacgaagga

SEQ ID NO: 234780 - DNA, 25 bp, Artificial
  probe
  misc_feature (1)..(25): SEQ ID NO: 5829; WAN024G7Z_at; Start 161; Stop 185
tgtcttgcgcagtcagtggttcact

SEQ ID NO: 234781 - DNA, 25 bp, Artificial
  probe
  misc_feature (1)..(25): SEQ ID NO: 5829; WAN024G7Z_at; Start 353; Stop 377
tcccagcgatatctgttacgatagc

SEQ ID NO: 234782 - DNA, 25 bp, Artificial
  probe
  misc_feature (1)..(25): SEQ ID NO: 5829; WAN024G7Z_at; Start 293; Stop 317
caatcaatttgagaggtacaccatt

SEQ ID NO: 234783 - DNA, 25 bp, Artificial
  probe
  misc_feature (1)..(25): SEQ ID NO: 5829; WAN024G7Z_at; Start 309; Stop 333
tacaccattgatgttgacgtactct

SEQ ID NO: 234784 - DNA, 25 bp, Artificial
  probe
  misc_feature (1)..(25): SEQ ID NO: 7462; WAN024G82_at; Start 28; Stop 52
aatagcaagcccagctgcgaaacca

SEQ ID NO: 234785 - DNA, 25 bp, Artificial
  probe
  misc_feature (1)..(25): SEQ ID NO: 7462; WAN024G82_at; Start 95; Stop 119
gtatcattagtacctacacccgcaa

SEQ ID NO: 234786 - DNA, 25 bp, Artificial
  probe
  misc_feature (1)..(25): SEQ ID NO: 7462; WAN024G82_at; Start 41; Stop 65
gctgcgaaaccaccaaattccgcta

SEQ ID NO: 234787 - DNA, 25 bp, Artificial
  probe
  misc_feature (1)..(25): SEQ ID NO: 7462; WAN024G82_at; Start 80; Stop 104
tcaatagagtcacgcgtatcattag

SEQ ID NO: 234788 - DNA, 25 bp, Artificial
  probe
  misc_feature (1)..(25): SEQ ID NO: 7462; WAN024G82_at; Start 205; Stop 229
agtcgttcctgcgagaagaattcca

SEQ ID NO: 234789 - DNA, 25 bp, Artificial
  probe
  misc_feature (1)..(25): SEQ ID NO: 7462; WAN024G82_at; Start 121; Stop 145
caaaggaacgcgtccattgacaacc

SEQ ID NO: 234790 - DNA, 25 bp, Artificial
  probe
  misc_feature (1)..(25): SEQ ID NO: 7462; WAN024G82_at; Start 71; Stop 95
ttgacaaactcaatagagtcacgcg

SEQ ID NO: 234791 - DNA, 25 bp, Artificial
  probe
  misc_feature (1)..(25): SEQ ID NO: 7462; WAN024G82_at; Start 225; Stop 249
ttccatccgtatgatgggccaataa

SEQ ID NO: 234792 - DNA, 25 bp, Artificial
  probe
  misc_feature (1)..(25): SEQ ID NO: 7462; WAN024G82_at; Start 209; Stop 233
gttcctgcgagaagaattccatccg

SEQ ID NO: 234793 - DNA, 25 bp, Artificial
  probe
  misc_feature (1)..(25): SEQ ID NO: 7462; WAN024G82_at; Start 173; Stop 197
tcctcatcgtgggtcaaagttggac

SEQ ID NO: 234794 - DNA, 25 bp, Artificial
  probe
  misc_feature (1)..(25): SEQ ID NO: 7462; WAN024G82_at; Start 75; Stop 99
caaactcaatagagtcacgcgtatc

SEQ ID NO: 234795 - DNA, 25 bp, Artificial
  probe
  misc_feature (1)..(25): SEQ ID NO: 7462; WAN024G82_at; Start 126; Stop 150
gaacgcgtccattgacaaccttttg

SEQ ID NO: 234796 - DNA, 25 bp, Artificial
  probe
  misc_feature (1)..(25): SEQ ID NO: 7462; WAN024G82_at; Start 160; Stop 184
aaacaactccaactcctcatcgtgg

SEQ ID NO: 234797 - DNA, 25 bp, Artificial
  probe
  misc_feature (1)..(25): SEQ ID NO: 7462; WAN024G82_at; Start 149; Stop 173
tgtacagccgcaaacaactccaact

SEQ ID NO: 234798 - DNA, 25 bp, Artificial
  probe
  misc_feature (1)..(25): SEQ ID NO: 7462; WAN024G82_at; Start 194; Stop 218
ggactctcagcagtcgttcctgcga

SEQ ID NO: 234799 - DNA, 25 bp, Artificial
  probe
  misc_feature (1)..(25): SEQ ID NO: 7462; WAN024G82_at; Start 20; Stop 44
taaggaacaatagcaagcccagctg

SEQ ID NO: 234800 - DNA, 25 bp, Artificial
  probe
  misc_feature (1)..(25): SEQ ID NO: 7462; WAN024G82_at; Start 2; Stop 26
tgagaaggtttgttgtagtaaggaa

SEQ ID NO: 234801 - DNA, 25 bp, Artificial
  probe
  misc_feature (1)..(25): SEQ ID NO: 7462; WAN024G82_at; Start 135; Stop 159
cattgacaaccttttgtacagccgc

SEQ ID NO: 234802 - DNA, 25 bp, Artificial
  probe
  misc_feature (1)..(25): SEQ ID NO: 7462; WAN024G82_at; Start 222; Stop 246
gaattccatccgtatgatgggccaa

SEQ ID NO: 234803 - DNA, 25 bp, Artificial
  probe
  misc_feature (1)..(25): SEQ ID NO: 7462; WAN024G82_at; Start 186; Stop 210
tcaaagttggactctcagcagtcgt

SEQ ID NO: 234804 - DNA, 25 bp, Artificial
  probe
  misc_feature (1)..(25): SEQ ID NO: 7462; WAN024G82_at; Start 189; Stop 213
aagttggactctcagcagtcgttcc

SEQ ID NO: 234805 - DNA, 25 bp, Artificial
  probe
  misc_feature (1)..(25): SEQ ID NO: 7462; WAN024G82_at; Start 183; Stop 207
gggtcaaagttggactctcagcagt

SEQ ID NO: 234806 - DNA, 25 bp, Artificial
  probe
  misc_feature (1)..(25): SEQ ID NO: 7462; WAN024G82_at; Start 139; Stop 163
gacaaccttttgtacagccgcaaac

SEQ ID NO: 234807 - DNA, 25 bp, Artificial
  probe
  misc_feature (1)..(25): SEQ ID NO: 7462; WAN024G82_at; Start 109; Stop 133
tacacccgcaatcaaaggaacgcgt

SEQ ID NO: 234808 - DNA, 25 bp, Artificial
  probe
  misc_feature (1)..(25): SEQ ID NO: 7462; WAN024G82_at; Start 200; Stop 224
tcagcagtcgttcctgcgagaagaa

SEQ ID NO: 234809 - DNA, 25 bp, Artificial
  probe
  misc_feature (1)..(25): SEQ ID NO: 7462; WAN024G82_at; Start 24; Stop 48
gaacaatagcaagcccagctgcgaa

SEQ ID NO: 234810 - DNA, 25 bp, Artificial
  probe
  misc_feature (1)..(25): SEQ ID NO: 7462; WAN024G82_at; Start 15; Stop 39
tgtagtaaggaacaatagcaagccc

SEQ ID NO: 234811 - DNA, 25 bp, Artificial
  probe
  misc_feature (1)..(25): SEQ ID NO: 7462; WAN024G82_at; Start 101; Stop 125
ttagtacctacacccgcaatcaaag

SEQ ID NO: 234812 - DNA, 25 bp, Artificial
  probe
  misc_feature (1)..(25): SEQ ID NO: 7462; WAN024G82_at; Start 56; Stop 80
aattccgctacttctttgacaaact

SEQ ID NO: 234813 - DNA, 25 bp, Artificial
  probe
  misc_feature (1)..(25): SEQ ID NO: 7462; WAN024G82_at; Start 114; Stop 138
ccgcaatcaaaggaacgcgtccatt

SEQ ID NO: 234814 - DNA, 25 bp, Artificial
  probe
  misc_feature (1)..(25): SEQ ID NO: 7462; WAN024G82_at; Start 86; Stop 110
gagtcacgcgtatcattagtaccta

SEQ ID NO: 234815 - DNA, 25 bp, Artificial
  probe
  misc_feature (1)..(25): SEQ ID NO: 7462; WAN024G82_at; Start 167; Stop 191
tccaactcctcatcgtgggtcaaag

SEQ ID NO: 234816 - DNA, 25 bp, Artificial
  probe
  misc_feature (1)..(25): SEQ ID NO: 7462; WAN024G82_at; Start 177; Stop 201
catcgtgggtcaaagttggactctc

SEQ ID NO: 234817 - DNA, 25 bp, Artificial
  probe
  misc_feature (1)..(25): SEQ ID NO: 7462; WAN024G82_at; Start 215; Stop 239
gcgagaagaattccatccgtatgat

SEQ ID NO: 234818 - DNA, 25 bp, Artificial
  probe
  misc_feature (1)..(25): SEQ ID NO: 4983; WAN024G83_at; Start 103; Stop 127
cgccccaaggttcatggcatggaaa

SEQ ID NO: 234819 - DNA, 25 bp, Artificial
  probe
  misc_feature (1)..(25): SEQ ID NO: 4983; WAN024G83_at; Start 80; Stop 104
gaggcaacagaaataaccccatccg

SEQ ID NO: 234820 - DNA, 25 bp, Artificial
  probe
  misc_feature (1)..(25): SEQ ID NO: 4983; WAN024G83_at; Start 272; Stop 296
tcgacaactacacgccctggaatgt

SEQ ID NO: 234821 - DNA, 25 bp, Artificial
  probe
  misc_feature (1)..(25): SEQ ID NO: 4983; WAN024G83_at; Start 114; Stop 138
tcatggcatggaaagcatctccatc

SEQ ID NO: 234822 - DNA, 25 bp, Artificial
  probe
  misc_feature (1)..(25): SEQ ID NO: 4983; WAN024G83_at; Start 40; Stop 64
ggcaataaacatctcgtgcatttca

SEQ ID NO: 234823 - DNA, 25 bp, Artificial
  probe
  misc_feature (1)..(25): SEQ ID NO: 4983; WAN024G83_at; Start 185; Stop 209
taagccatattagccaagctagtac

SEQ ID NO: 234824 - DNA, 25 bp, Artificial
  probe
  misc_feature (1)..(25): SEQ ID NO: 4983; WAN024G83_at; Start 282; Stop 306
cacgccctggaatgttatagataat

SEQ ID NO: 234825 - DNA, 25 bp, Artificial
  probe
  misc_feature (1)..(25): SEQ ID NO: 4983; WAN024G83_at; Start 180; Stop 204
tcaagtaagccatattagccaagct

SEQ ID NO: 234826 - DNA, 25 bp, Artificial
  probe
  misc_feature (1)..(25): SEQ ID NO: 4983; WAN024G83_at; Start 67; Stop 91
cccatttgtatgagaggcaacagaa

SEQ ID NO: 234827 - DNA, 25 bp, Artificial
  probe
  misc_feature (1)..(25): SEQ ID NO: 4983; WAN024G83_at; Start 32; Stop 56
tctgcaatggcaataaacatctcgt

SEQ ID NO: 234828 - DNA, 25 bp, Artificial
  probe
  misc_feature (1)..(25): SEQ ID NO: 4983; WAN024G83_at; Start 213; Stop 237
ctttgacaccgataatatttggatg

SEQ ID NO: 234829 - DNA, 25 bp, Artificial
  probe
  misc_feature (1)..(25): SEQ ID NO: 4983; WAN024G83_at; Start 111; Stop 135
ggttcatggcatggaaagcatctcc

SEQ ID NO: 234830 - DNA, 25 bp, Artificial
  probe
  misc_feature (1)..(25): SEQ ID NO: 4983; WAN024G83_at; Start 239; Stop 263
tcagccaagcgaagcatggtttctg

SEQ ID NO: 234831 - DNA, 25 bp, Artificial
  probe
  misc_feature (1)..(25): SEQ ID NO: 4983; WAN024G83_at; Start 54; Stop 78
cgtgcatttcatccccatttgtatg

SEQ ID NO: 234832 - DNA, 25 bp, Artificial
  probe
  misc_feature (1)..(25): SEQ ID NO: 4983; WAN024G83_at; Start 202; Stop 226
gctagtacattctttgacaccgata

SEQ ID NO: 234833 - DNA, 25 bp, Artificial
  probe
  misc_feature (1)..(25): SEQ ID NO: 4983; WAN024G83_at; Start 61; Stop 85
ttcatccccatttgtatgagaggca

SEQ ID NO: 234834 - DNA, 25 bp, Artificial
  probe
  misc_feature (1)..(25): SEQ ID NO: 4983; WAN024G83_at; Start 119; Stop 143
gcatggaaagcatctccatcctcac

SEQ ID NO: 234835 - DNA, 25 bp, Artificial
  probe
  misc_feature (1)..(25): SEQ ID NO: 4983; WAN024G83_at; Start 195; Stop 219
tagccaagctagtacattctttgac

SEQ ID NO: 234836 - DNA, 25 bp, Artificial
  probe
  misc_feature (1)..(25): SEQ ID NO: 4983; WAN024G83_at; Start 6; Stop 30
tagctgcggctttcttcacatcact

SEQ ID NO: 234837 - DNA, 25 bp, Artificial
  probe
  misc_feature (1)..(25): SEQ ID NO: 4983; WAN024G83_at; Start 243; Stop 267
ccaagcgaagcatggtttctggagt

SEQ ID NO: 234838 - DNA, 25 bp, Artificial
  probe
  misc_feature (1)..(25): SEQ ID NO: 4983; WAN024G83_at; Start 46; Stop 70
aaacatctcgtgcatttcatcccca

SEQ ID NO: 234839 - DNA, 25 bp, Artificial
  probe
  misc_feature (1)..(25): SEQ ID NO: 4983; WAN024G83_at; Start 269; Stop 293
aattcgacaactacacgccctggaa

SEQ ID NO: 234840 - DNA, 25 bp, Artificial
  probe
  misc_feature (1)..(25): SEQ ID NO: 4983; WAN024G83_at; Start 65; Stop 89
tccccatttgtatgagaggcaacag

SEQ ID NO: 234841 - DNA, 25 bp, Artificial
  probe
  misc_feature (1)..(25): SEQ ID NO: 4983; WAN024G83_at; Start 277; Stop 301
aactacacgccctggaatgttatag

SEQ ID NO: 234842 - DNA, 25 bp, Artificial
  probe
  misc_feature (1)..(25): SEQ ID NO: 4983; WAN024G83_at; Start 13; Stop 37
ggctttcttcacatcactttctgca

SEQ ID NO: 234843 - DNA, 25 bp, Artificial
  probe
  misc_feature (1)..(25): SEQ ID NO: 4983; WAN024G83_at; Start 284; Stop 308
cgccctggaatgttatagataataa

SEQ ID NO: 234844 - DNA, 25 bp, Artificial
  probe
  misc_feature (1)..(25): SEQ ID NO: 4983; WAN024G83_at; Start 75; Stop 99
tatgagaggcaacagaaataacccc

SEQ ID NO: 234845 - DNA, 25 bp, Artificial
  probe
  misc_feature (1)..(25): SEQ ID NO: 4983; WAN024G83_at; Start 101; Stop 125
tccgccccaaggttcatggcatgga

SEQ ID NO: 234846 - DNA, 25 bp, Artificial
  probe
  misc_feature (1)..(25): SEQ ID NO: 4983; WAN024G83_at; Start 106; Stop 130
cccaaggttcatggcatggaaagca

SEQ ID NO: 234847 - DNA, 25 bp, Artificial
  probe
  misc_feature (1)..(25): SEQ ID NO: 4983; WAN024G83_at; Start 171; Stop 195
tgtgctcaatcaagtaagccatatt

SEQ ID NO: 234848 - DNA, 25 bp, Artificial
  probe
  misc_feature (1)..(25): SEQ ID NO: 4983; WAN024G83_at; Start 3; Stop 27
gaatagctgcggctttcttcacatc

SEQ ID NO: 234849 - DNA, 25 bp, Artificial
  probe
  misc_feature (1)..(25): SEQ ID NO: 4983; WAN024G83_at; Start 35; Stop 59
gcaatggcaataaacatctcgtgca

SEQ ID NO: 234850 - DNA, 25 bp, Artificial
  probe
  misc_feature (1)..(25): SEQ ID NO: 4983; WAN024G83_at; Start 199; Stop 223
caagctagtacattctttgacaccg

SEQ ID NO: 234851 - DNA, 25 bp, Artificial
  probe
  misc_feature (1)..(25): SEQ ID NO: 4983; WAN024G83_at; Start 21; Stop 45
tcacatcactttctgcaatggcaat

SEQ ID NO: 234852 - DNA, 25 bp, Artificial
  probe
  misc_feature (1)..(25): SEQ ID NO: 4391; WAN024G84_at; Start 322; Stop 346
cttgctattgttccttactacaaca

SEQ ID NO: 234853 - DNA, 25 bp, Artificial
  probe
  misc_feature (1)..(25): SEQ ID NO: 4391; WAN024G84_at; Start 159; Stop 183
gagtccaactttgacccacgatgag

SEQ ID NO: 234854 - DNA, 25 bp, Artificial
  probe
  misc_feature (1)..(25): SEQ ID NO: 4391; WAN024G84_at; Start 756; Stop 780
tccaagtcctgctccagttaaggca

SEQ ID NO: 234855 - DNA, 25 bp, Artificial
  probe
  misc_feature (1)..(25): SEQ ID NO: 4391; WAN024G84_at; Start 151; Stop 175
actgctgagagtccaactttgaccc

SEQ ID NO: 234856 - DNA, 25 bp, Artificial
  probe
  misc_feature (1)..(25): SEQ ID NO: 4391; WAN024G84_at; Start 498; Stop 522
tgtcaaagaatgtactagcttggct

SEQ ID NO: 234857 - DNA, 25 bp, Artificial
  probe
  misc_feature (1)..(25): SEQ ID NO: 4391; WAN024G84_at; Start 455; Stop 479
cagaaaccatgcttcgcttggctga

SEQ ID NO: 234858 - DNA, 25 bp, Artificial
  probe
  misc_feature (1)..(25): SEQ ID NO: 4391; WAN024G84_at; Start 76; Stop 100
aactttgatgctattccagccttga

SEQ ID NO: 234859 - DNA, 25 bp, Artificial
  probe
  misc_feature (1)..(25): SEQ ID NO: 4391; WAN024G84_at; Start 510; Stop 534
tactagcttggctaatatggcttac

SEQ ID NO: 234860 - DNA, 25 bp, Artificial
  probe
  misc_feature (1)..(25): SEQ ID NO: 4391; WAN024G84_at; Start 411; Stop 435
tattatctataacattccagggcgt

SEQ ID NO: 234861 - DNA, 25 bp, Artificial
  probe
  misc_feature (1)..(25): SEQ ID NO: 4391; WAN024G84_at; Start 391; Stop 415
gatgcttctgacctaccaattatta

SEQ ID NO: 234862 - DNA, 25 bp, Artificial
  probe
  misc_feature (1)..(25): SEQ ID NO: 4391; WAN024G84_at; Start 233; Stop 257
ctttgattgcgggtgtaggtactaa

SEQ ID NO: 234863 - DNA, 25 bp, Artificial
  probe
  misc_feature (1)..(25): SEQ ID NO: 4391; WAN024G84_at; Start 277; Stop 301
gagtttgtcaaagaagtagcggaat

SEQ ID NO: 234864 - DNA, 25 bp, Artificial
  probe
  misc_feature (1)..(25): SEQ ID NO: 4391; WAN024G84_at; Start 170; Stop 194
tgacccacgatgaggagttggagtt

SEQ ID NO: 234865 - DNA, 25 bp, Artificial
  probe
  misc_feature (1)..(25): SEQ ID NO: 4391; WAN024G84_at; Start 718; Stop 742
cgtaaattcattcctaaggttaatg

SEQ ID NO: 234866 - DNA, 25 bp, Artificial
  probe
  misc_feature (1)..(25): SEQ ID NO: 4391; WAN024G84_at; Start 248; Stop 272
taggtactaatgatacgcgtgactc

SEQ ID NO: 234867 - DNA, 25 bp, Artificial
  probe
  misc_feature (1)..(25): SEQ ID NO: 4391; WAN024G84_at; Start 853; Stop 877
aaacgcattatcaaggttgtcgtag

SEQ ID NO: 234868 - DNA, 25 bp, Artificial
  probe
  misc_feature (1)..(25): SEQ ID NO: 4391; WAN024G84_at; Start 728; Stop 752
ttcctaaggttaatgctctcttctc

SEQ ID NO: 234869 - DNA, 25 bp, Artificial
  probe
  misc_feature (1)..(25): SEQ ID NO: 4391; WAN024G84_at; Start 620; Stop 644
gggttatttctgttgcctctcatac

SEQ ID NO: 234870 - DNA, 25 bp, Artificial
  probe
  misc_feature (1)..(25): SEQ ID NO: 4391; WAN024G84_at; Start 864; Stop 888
caaggttgtcgtagatggcgactac

SEQ ID NO: 234871 - DNA, 25 bp, Artificial
  probe
  misc_feature (1)..(25): SEQ ID NO: 4391; WAN024G84_at; Start 118; Stop 142
catcatacggatggaattcttctcg

SEQ ID NO: 234872 - DNA, 25 bp, Artificial
  probe
  misc_feature (1)..(25): SEQ ID NO: 4391; WAN024G84_at; Start 492; Stop 516
tatcggtgtcaaagaatgtactagc

SEQ ID NO: 234873 - DNA, 25 bp, Artificial
  probe
  misc_feature (1)..(25): SEQ ID NO: 4391; WAN024G84_at; Start 122; Stop 146
atacggatggaattcttctcgcagg

SEQ ID NO: 234874 - DNA, 25 bp, Artificial
  probe
  misc_feature (1)..(25): SEQ ID NO: 4391; WAN024G84_at; Start 481; Stop 505
catccaaatattatcggtgtcaaag

SEQ ID NO: 234875 - DNA, 25 bp, Artificial
  probe
  misc_feature (1)..(25): SEQ ID NO: 4391; WAN024G84_at; Start 337; Stop 361
tactacaacaaaccttctcaagaag

SEQ ID NO: 234876 - DNA, 25 bp, Artificial
  probe
  misc_feature (1)..(25): SEQ ID NO: 4391; WAN024G84_at; Start 827; Stop 851
ttgttccagcaccagaagaagatgc

SEQ ID NO: 234877 - DNA, 25 bp, Artificial
  probe
  misc_feature (1)..(25): SEQ ID NO: 4391; WAN024G84_at; Start 818; Stop 842
gtctacctcttgttccagcaccaga

SEQ ID NO: 234878 - DNA, 25 bp, Artificial
  probe
  misc_feature (1)..(25): SEQ ID NO: 4391; WAN024G84_at; Start 916; Stop 940
gtcttaagaccagattactaactaa

SEQ ID NO: 234879 - DNA, 25 bp, Artificial
  probe
  misc_feature (1)..(25): SEQ ID NO: 4391; WAN024G84_at; Start 523; Stop 547
aatatggcttacttgattgagcaca

SEQ ID NO: 234880 - DNA, 25 bp, Artificial
  probe
  misc_feature (1)..(25): SEQ ID NO: 4391; WAN024G84_at; Start 742; Stop 766
gctctcttctcttatccaagtcctg

SEQ ID NO: 234881 - DNA, 25 bp, Artificial
  probe
  misc_feature (1)..(25): SEQ ID NO: 4391; WAN024G84_at; Start 576; Stop 600
tgaggatggagatgctttccatgcc

SEQ ID NO: 234882 - DNA, 25 bp, Artificial
  probe
  misc_feature (1)..(25): SEQ ID NO: 4391; WAN024G84_at; Start 385; Stop 409
attgcagatgcttctgacctaccaa

SEQ ID NO: 234883 - DNA, 25 bp, Artificial
  probe
  misc_feature (1)..(25): SEQ ID NO: 4391; WAN024G84_at; Start 627; Stop 651
ttctgttgcctctcatacaaatggg

SEQ ID NO: 234884 - DNA, 25 bp, Artificial
  probe
  misc_feature (1)..(25): SEQ ID NO: 4391; WAN024G84_at; Start 588; Stop 612
tgctttccatgccatgaaccttggg

SEQ ID NO: 234885 - DNA, 25 bp, Artificial
  probe
  misc_feature (1)..(25): SEQ ID NO: 4391; WAN024G84_at; Start 90; Stop 114
tccagccttgattgagcatttattg

SEQ ID NO: 234886 - DNA, 25 bp, Artificial
  probe
  misc_feature (1)..(25): SEQ ID NO: 2593; WAN024G85_at; Start 63; Stop 87
catctggaataaagggactggaaaa

SEQ ID NO: 234887 - DNA, 25 bp, Artificial
  probe
  misc_feature (1)..(25): SEQ ID NO: 2593; WAN024G85_at; Start 4; Stop 28
gggctccaaaatcaagcaaatacac

SEQ ID NO: 234888 - DNA, 25 bp, Artificial
  probe
  misc_feature (1)..(25): SEQ ID NO: 2593; WAN024G85_at; Start 229; Stop 253
tctcaccccacgacgaatatttgtg

SEQ ID NO: 234889 - DNA, 25 bp, Artificial
  probe
  misc_feature (1)..(25): SEQ ID NO: 2593; WAN024G85_at; Start 211; Stop 235
aatctcgtggtcttggggtctcacc

SEQ ID NO: 234890 - DNA, 25 bp, Artificial
  probe
  misc_feature (1)..(25): SEQ ID NO: 2593; WAN024G85_at; Start 44; Stop 68
gcttccatttgaccgatcacatctg

SEQ ID NO: 234891 - DNA, 25 bp, Artificial
  probe
  misc_feature (1)..(25): SEQ ID NO: 2593; WAN024G85_at; Start 152; Stop 176
cgggtaattttttgcagaggcgtgc

SEQ ID NO: 234892 - DNA, 25 bp, Artificial
  probe
  misc_feature (1)..(25): SEQ ID NO: 2593; WAN024G85_at; Start 53; Stop 77
tgaccgatcacatctggaataaagg

SEQ ID NO: 234893 - DNA, 25 bp, Artificial
  probe
  misc_feature (1)..(25): SEQ ID NO: 2593; WAN024G85_at; Start 156; Stop 180
taattttttgcagaggcgtgcctcc

SEQ ID NO: 234894 - DNA, 25 bp, Artificial
  probe
  misc_feature (1)..(25): SEQ ID NO: 2593; WAN024G85_at; Start 175; Stop 199
gcctccaattcgtacataattatca

SEQ ID NO: 234895 - DNA, 25 bp, Artificial
  probe
  misc_feature (1)..(25): SEQ ID NO: 2593; WAN024G85_at; Start 90; Stop 114
tattagcaaagtagacactgtattc

SEQ ID NO: 234896 - DNA, 25 bp, Artificial
  probe
  misc_feature (1)..(25): SEQ ID NO: 2593; WAN024G85_at; Start 237; Stop 261
cacgacgaatatttgtgaaaaaatc

SEQ ID NO: 234897 - DNA, 25 bp, Artificial
  probe
  misc_feature (1)..(25): SEQ ID NO: 2593; WAN024G85_at; Start 170; Stop 194
ggcgtgcctccaattcgtacataat

SEQ ID NO: 234898 - DNA, 25 bp, Artificial
  probe
  misc_feature (1)..(25): SEQ ID NO: 2593; WAN024G85_at; Start 49; Stop 73
catttgaccgatcacatctggaata

SEQ ID NO: 234899 - DNA, 25 bp, Artificial
  probe
  misc_feature (1)..(25): SEQ ID NO: 2593; WAN024G85_at; Start 26; Stop 50
cactgttcaattccgtctgcttcca

SEQ ID NO: 234900 - DNA, 25 bp, Artificial
  probe
  misc_feature (1)..(25): SEQ ID NO: 2593; WAN024G85_at; Start 149; Stop 173
tgacgggtaattttttgcagaggcg

SEQ ID NO: 234901 - DNA, 25 bp, Artificial
  probe
  misc_feature (1)..(25): SEQ ID NO: 2593; WAN024G85_at; Start 34; Stop 58
aattccgtctgcttccatttgaccg

SEQ ID NO: 234902 - DNA, 25 bp, Artificial
  probe
  misc_feature (1)..(25): SEQ ID NO: 2593; WAN024G85_at; Start 40; Stop 64
gtctgcttccatttgaccgatcaca

SEQ ID NO: 234903 - DNA, 25 bp, Artificial
  probe
  misc_feature (1)..(25): SEQ ID NO: 2593; WAN024G85_at; Start 250; Stop 274
tgtgaaaaaatcagctacaccttca

SEQ ID NO: 234904 - DNA, 25 bp, Artificial
  probe
  misc_feature (1)..(25): SEQ ID NO: 2593; WAN024G85_at; Start 162; Stop 186
tttgcagaggcgtgcctccaattcg

SEQ ID NO: 234905 - DNA, 25 bp, Artificial
  probe
  misc_feature (1)..(25): SEQ ID NO: 2593; WAN024G85_at; Start 227; Stop 251
ggtctcaccccacgacgaatatttg

SEQ ID NO: 234906 - DNA, 25 bp, Artificial
  probe
  misc_feature (1)..(25): SEQ ID NO: 2593; WAN024G85_at; Start 246; Stop 270
tatttgtgaaaaaatcagctacacc

SEQ ID NO: 234907 - DNA, 25 bp, Artificial
  probe
  misc_feature (1)..(25): SEQ ID NO: 2593; WAN024G85_at; Start 232; Stop 256
caccccacgacgaatatttgtgaaa

SEQ ID NO: 234908 - DNA, 25 bp, Artificial
  probe
  misc_feature (1)..(25): SEQ ID NO: 2593; WAN024G85_at; Start 168; Stop 192
gaggcgtgcctccaattcgtacata

SEQ ID NO: 234909 - DNA, 25 bp, Artificial
  probe
  misc_feature (1)..(25): SEQ ID NO: 2593; WAN024G85_at; Start 21; Stop 45
aaatacactgttcaattccgtctgc

SEQ ID NO: 234910 - DNA, 25 bp, Artificial
  probe
  misc_feature (1)..(25): SEQ ID NO: 2593; WAN024G85_at; Start 203; Stop 227
agagtctgaatctcgtggtcttggg

SEQ ID NO: 234911 - DNA, 25 bp, Artificial
  probe
  misc_feature (1)..(25): SEQ ID NO: 2593; WAN024G85_at; Start 16; Stop 40
caagcaaatacactgttcaattccg

SEQ ID NO: 234912 - DNA, 25 bp, Artificial
  probe
  misc_feature (1)..(25): SEQ ID NO: 2593; WAN024G85_at; Start 78; Stop 102
gactggaaaacttattagcaaagta

SEQ ID NO: 234913 - DNA, 25 bp, Artificial
  probe
  misc_feature (1)..(25): SEQ ID NO: 2593; WAN024G85_at; Start 58; Stop 82
gatcacatctggaataaagggactg

SEQ ID NO: 234914 - DNA, 25 bp, Artificial
  probe
  misc_feature (1)..(25): SEQ ID NO: 2593; WAN024G85_at; Start 144; Stop 168
cctcttgacgggtaattttttgcag

SEQ ID NO: 234915 - DNA, 25 bp, Artificial
  probe
  misc_feature (1)..(25): SEQ ID NO: 2593; WAN024G85_at; Start 83; Stop 107
gaaaacttattagcaaagtagacac

SEQ ID NO: 234916 - DNA, 25 bp, Artificial
  probe
  misc_feature (1)..(25): SEQ ID NO: 2593; WAN024G85_at; Start 10; Stop 34
caaaatcaagcaaatacactgttca

SEQ ID NO: 234917 - DNA, 25 bp, Artificial
  probe
  misc_feature (1)..(25): SEQ ID NO: 2593; WAN024G85_at; Start 61; Stop 85
cacatctggaataaagggactggaa

SEQ ID NO: 234918 - DNA, 25 bp, Artificial
  probe
  misc_feature (1)..(25): SEQ ID NO: 2593; WAN024G85_at; Start 253; Stop 277
gaaaaaatcagctacaccttcaaag

SEQ ID NO: 234919 - DNA, 25 bp, Artificial
  probe
  misc_feature (1)..(25): SEQ ID NO: 2593; WAN024G85_at; Start 56; Stop 80
ccgatcacatctggaataaagggac

SEQ ID NO: 234920 - DNA, 25 bp, Artificial
  probe
  misc_feature (1)..(25): SEQ ID NO: 645; WAN024G86_at; Start 264; Stop 288
tgtgatcggtcaaatggaagcagac

SEQ ID NO: 234921 - DNA, 25 bp, Artificial
  probe
  misc_feature (1)..(25): SEQ ID NO: 645; WAN024G86_at; Start 555; Stop 579
aattttcgaaaatagcaagctagtc

SEQ ID NO: 234922 - DNA, 25 bp, Artificial
  probe
  misc_feature (1)..(25): SEQ ID NO: 645; WAN024G86_at; Start 818; Stop 842
caccaatgccaaatacagattctcg

SEQ ID NO: 234923 - DNA, 25 bp, Artificial
  probe
  misc_feature (1)..(25): SEQ ID NO: 645; WAN024G86_at; Start 676; Stop 700
tatctcagagaacagacagaacatc

SEQ ID NO: 234924 - DNA, 25 bp, Artificial
  probe
  misc_feature (1)..(25): SEQ ID NO: 645; WAN024G86_at; Start 1068; Stop 1092
aaaagcaggcaagttacccaaagag

SEQ ID NO: 234925 - DNA, 25 bp, Artificial
  probe
  misc_feature (1)..(25): SEQ ID NO: 645; WAN024G86_at; Start 928; Stop 952
gagttagttccttcagacgagacga

SEQ ID NO: 234926 - DNA, 25 bp, Artificial
  probe
  misc_feature (1)..(25): SEQ ID NO: 645; WAN024G86_at; Start 717; Stop 741
tgtacctattagtttcatcagtgag

SEQ ID NO: 234927 - DNA, 25 bp, Artificial
  probe
  misc_feature (1)..(25): SEQ ID NO: 645; WAN024G86_at; Start 331; Stop 355
tctttctactctgtcatgggctatg

SEQ ID NO: 234928 - DNA, 25 bp, Artificial
  probe
  misc_feature (1)..(25): SEQ ID NO: 645; WAN024G86_at; Start 413; Stop 437
aagaagcgctcttaaactattgggc

SEQ ID NO: 234929 - DNA, 25 bp, Artificial
  probe
  misc_feature (1)..(25): SEQ ID NO: 645; WAN024G86_at; Start 886; Stop 910
caagagtttaaggaatttctcccag

SEQ ID NO: 234930 - DNA, 25 bp, Artificial
  probe
  misc_feature (1)..(25): SEQ ID NO: 645; WAN024G86_at; Start 643; Stop 667
ggtattccatggattaaaccagatg

SEQ ID NO: 234931 - DNA, 25 bp, Artificial
  probe
  misc_feature (1)..(25): SEQ ID NO: 645; WAN024G86_at; Start 248; Stop 272
gtccctttattccagatgtgatcgg

SEQ ID NO: 234932 - DNA, 25 bp, Artificial
  probe
  misc_feature (1)..(25): SEQ ID NO: 645; WAN024G86_at; Start 601; Stop 625
tcagaacaatataccaacacttggc

SEQ ID NO: 234933 - DNA, 25 bp, Artificial
  probe
  misc_feature (1)..(25): SEQ ID NO: 645; WAN024G86_at; Start 55; Stop 79
gaaggtgtagctgattttttcacaa

SEQ ID NO: 234934 - DNA, 25 bp, Artificial
  probe
  misc_feature (1)..(25): SEQ ID NO: 645; WAN024G86_at; Start 460; Stop 484
aaagaagaagtaaagcaagacagct

SEQ ID NO: 234935 - DNA, 25 bp, Artificial
  probe
  misc_feature (1)..(25): SEQ ID NO: 645; WAN024G86_at; Start 93; Stop 117
ggtgagaccccaagaccacgagatt

SEQ ID NO: 234936 - DNA, 25 bp, Artificial
  probe
  misc_feature (1)..(25): SEQ ID NO: 645; WAN024G86_at; Start 901; Stop 925
tttctcccagaagaagagacctttg

SEQ ID NO: 234937 - DNA, 25 bp, Artificial
  probe
  misc_feature (1)..(25): SEQ ID NO: 645; WAN024G86_at; Start 538; Stop 562
gatccttatatagaccaaattttcg

SEQ ID NO: 234938 - DNA, 25 bp, Artificial
  probe
  misc_feature (1)..(25): SEQ ID NO: 645; WAN024G86_at; Start 152; Stop 176
gcacgcctctgcaaaaaattacccg

SEQ ID NO: 234939 - DNA, 25 bp, Artificial
  probe
  misc_feature (1)..(25): SEQ ID NO: 645; WAN024G86_at; Start 17; Stop 41
taatgatgaccttcggttcaccaga

SEQ ID NO: 234940 - DNA, 25 bp, Artificial
  probe
  misc_feature (1)..(25): SEQ ID NO: 645; WAN024G86_at; Start 400; Stop 424
gactggtatcaggaagaagcgctct

SEQ ID NO: 234941 - DNA, 25 bp, Artificial
  probe
  misc_feature (1)..(25): SEQ ID NO: 645; WAN024G86_at; Start 278; Stop 302
tggaagcagacggaattgaacagtg

SEQ ID NO: 234942 - DNA, 25 bp, Artificial
  probe
  misc_feature (1)..(25): SEQ ID NO: 645; WAN024G86_at; Start 585; Stop 609
aaaactgggcttgagttcagaacaa

SEQ ID NO: 234943 - DNA, 25 bp, Artificial
  probe
  misc_feature (1)..(25): SEQ ID NO: 645; WAN024G86_at; Start 801; Stop 825
ggtaaactaccatcgtccaccaatg

SEQ ID NO: 234944 - DNA, 25 bp, Artificial
  probe
  misc_feature (1)..(25): SEQ ID NO: 645; WAN024G86_at; Start 659; Stop 683
aaccagatgttttggagtatctcag

SEQ ID NO: 234945 - DNA, 25 bp, Artificial
  probe
  misc_feature (1)..(25): SEQ ID NO: 645; WAN024G86_at; Start 914; Stop 938
aagagacctttgatgagttagttcc

SEQ ID NO: 234946 - DNA, 25 bp, Artificial
  probe
  misc_feature (1)..(25): SEQ ID NO: 645; WAN024G86_at; Start 570; Stop 594
caagctagtcgctgaaaaactgggc

SEQ ID NO: 234947 - DNA, 25 bp, Artificial
  probe
  misc_feature (1)..(25): SEQ ID NO: 645; WAN024G86_at; Start 690; Stop 714
gacagaacatccagaccattatatt

SEQ ID NO: 234948 - DNA, 25 bp, Artificial
  probe
  misc_feature (1)..(25): SEQ ID NO: 645; WAN024G86_at; Start 831; Stop 855
tacagattctcgtttgattgatgct

SEQ ID NO: 234949 - DNA, 25 bp, Artificial
  probe
  misc_feature (1)..(25): SEQ ID NO: 645; WAN024G86_at; Start 732; Stop 756
catcagtgagcatattgaggtcttg

SEQ ID NO: 234950 - DNA, 25 bp, Artificial
  probe
  misc_feature (1)..(25): SEQ ID NO: 645; WAN024G86_at; Start 305; Stop 329
tttgcttgattttggagccccatta

SEQ ID NO: 234951 - DNA, 25 bp, Artificial
  probe
  misc_feature (1)..(25): SEQ ID NO: 645; WAN024G86_at; Start 136; Stop 160
tatgtacgaattggaggcacgcctc

SEQ ID NO: 234952 - DNA, 25 bp, Artificial
  probe
  misc_feature (1)..(25): SEQ ID NO: 645; WAN024G86_at; Start 518; Stop 542
tttttgccttggactttggtgatcc

SEQ ID NO: 234953 - DNA, 25 bp, Artificial
  probe
  misc_feature (1)..(25): SEQ ID NO: 645; WAN024G86_at; Start 853; Stop 877
gctttggtcaatacagttagagtca

SEQ ID NO: 234954 - DNA, 25 bp, Artificial
  probe
  misc_feature (1)..(25): SEQ ID NO: 4071; WAN024G87_at; Start 476; Stop 500
tcgtcattccagagtttatccaagc

SEQ ID NO: 234955 - DNA, 25 bp, Artificial
  probe
  misc_feature (1)..(25): SEQ ID NO: 4071; WAN024G87_at; Start 1034; Stop 1058
gggtttccaatgcaaatgggattca

SEQ ID NO: 234956 - DNA, 25 bp, Artificial
  probe
  misc_feature (1)..(25): SEQ ID NO: 4071; WAN024G87_at; Start 320; Stop 344
agcgaaggctaattgagtatatccg

SEQ ID NO: 234957 - DNA, 25 bp, Artificial
  probe
  misc_feature (1)..(25): SEQ ID NO: 4071; WAN024G87_at; Start 576; Stop 600
cagattgatgtttgcccttccgaag

SEQ ID NO: 234958 - DNA, 25 bp, Artificial
  probe
  misc_feature (1)..(25): SEQ ID NO: 4071; WAN024G87_at; Start 1417; Stop 1441
cagtctttagactaccatgttgtcg

SEQ ID NO: 234959 - DNA, 25 bp, Artificial
  probe
  misc_feature (1)..(25): SEQ ID NO: 4071; WAN024G87_at; Start 1684; Stop 1708
gttcagcgggaaatagaagtagccc

SEQ ID NO: 234960 - DNA, 25 bp, Artificial
  probe
  misc_feature (1)..(25): SEQ ID NO: 4071; WAN024G87_at; Start 275; Stop 299
taggactcctctttattggtgctcg

SEQ ID NO: 234961 - DNA, 25 bp, Artificial
  probe
  misc_feature (1)..(25): SEQ ID NO: 4071; WAN024G87_at; Start 888; Stop 912
ggagctggatatgcttcctaggaga

SEQ ID NO: 234962 - DNA, 25 bp, Artificial
  probe
  misc_feature (1)..(25): SEQ ID NO: 4071; WAN024G87_at; Start 872; Stop 896
catttttgacaggaaaggagctgga

SEQ ID NO: 234963 - DNA, 25 bp, Artificial
  probe
  misc_feature (1)..(25): SEQ ID NO: 4071; WAN024G87_at; Start 375; Stop 399
gaaaaagctaacttgcgctaaagcc

SEQ ID NO: 234964 - DNA, 25 bp, Artificial
  probe
  misc_feature (1)..(25): SEQ ID NO: 4071; WAN024G87_at; Start 1117; Stop 1141
gacgtgcaggaaacaaaagatgggc

SEQ ID NO: 234965 - DNA, 25 bp, Artificial
  probe
  misc_feature (1)..(25): SEQ ID NO: 4071; WAN024G87_at; Start 1533; Stop 1557
tatggagtactcaaccttggatgaa

SEQ ID NO: 234966 - DNA, 25 bp, Artificial
  probe
  misc_feature (1)..(25): SEQ ID NO: 4071; WAN024G87_at; Start 1568; Stop 1592
gcaaactatggacaacggatcagaa

SEQ ID NO: 234967 - DNA, 25 bp, Artificial
  probe
  misc_feature (1)..(25): SEQ ID NO: 4071; WAN024G87_at; Start 989; Stop 1013
tggaggctcccatggttcatctacc

SEQ ID NO: 234968 - DNA, 25 bp, Artificial
  probe
  misc_feature (1)..(25): SEQ ID NO: 4071; WAN024G87_at; Start 913; Stop 937
gaaaaagatcacatcgtgcgatggg

SEQ ID NO: 234969 - DNA, 25 bp, Artificial
  probe
  misc_feature (1)..(25): SEQ ID NO: 4071; WAN024G87_at; Start 292; Stop 316
ggtgctcgtcatctcctctataatg

SEQ ID NO: 234970 - DNA, 25 bp, Artificial
  probe
  misc_feature (1)..(25): SEQ ID NO: 4071; WAN024G87_at; Start 1276; Stop 1300
gaagattatctcagtcgagccaacg

SEQ ID NO: 234971 - DNA, 25 bp, Artificial
  probe
  misc_feature (1)..(25): SEQ ID NO: 4071; WAN024G87_at; Start 594; Stop 618
tccgaagattgtatatgatcagctg

SEQ ID NO: 234972 - DNA, 25 bp, Artificial
  probe
  misc_feature (1)..(25): SEQ ID NO: 4071; WAN024G87_at; Start 1375; Stop 1399
gcccgttatgctgcaaagctcaaga

SEQ ID NO: 234973 - DNA, 25 bp, Artificial
  probe
  misc_feature (1)..(25): SEQ ID NO: 4071; WAN024G87_at; Start 1502; Stop 1526
tctttcctaaaacaagagcgacagg

SEQ ID NO: 234974 - DNA, 25 bp, Artificial
  probe
  misc_feature (1)..(25): SEQ ID NO: 4071; WAN024G87_at; Start 1176; Stop 1200
tctagcaggtatcaataaaagtcct

SEQ ID NO: 234975 - DNA, 25 bp, Artificial
  probe
  misc_feature (1)..(25): SEQ ID NO: 4071; WAN024G87_at; Start 1097; Stop 1121
aaccagacttggtggagacggacgt

SEQ ID NO: 234976 - DNA, 25 bp, Artificial
  probe
  misc_feature (1)..(25): SEQ ID NO: 4071; WAN024G87_at; Start 1; Stop 25
gtgcctatgaaacctgaaaaaccta

SEQ ID NO: 234977 - DNA, 25 bp, Artificial
  probe
  misc_feature (1)..(25): SEQ ID NO: 4071; WAN024G87_at; Start 610; Stop 634
gatcagctgactgttcgagaagcag

SEQ ID NO: 234978 - DNA, 25 bp, Artificial
  probe
  misc_feature (1)..(25): SEQ ID NO: 4071; WAN024G87_at; Start 1083; Stop 1107
tacagcacaactcaaaccagacttg

SEQ ID NO: 234979 - DNA, 25 bp, Artificial
  probe
  misc_feature (1)..(25): SEQ ID NO: 4071; WAN024G87_at; Start 762; Stop 786
ggtagatgatatcactcagagagag

SEQ ID NO: 234980 - DNA, 25 bp, Artificial
  probe
  misc_feature (1)..(25): SEQ ID NO: 4071; WAN024G87_at; Start 1517; Stop 1541
gagcgacaggatatactatggagta

SEQ ID NO: 234981 - DNA, 25 bp, Artificial
  probe
  misc_feature (1)..(25): SEQ ID NO: 4071; WAN024G87_at; Start 1067; Stop 1091
tagagtccttggaaactacagcaca

SEQ ID NO: 234982 - DNA, 25 bp, Artificial
  probe
  misc_feature (1)..(25): SEQ ID NO: 4071; WAN024G87_at; Start 527; Stop 551
ggtggctgagcatcctacttctatc

SEQ ID NO: 234983 - DNA, 25 bp, Artificial
  probe
  misc_feature (1)..(25): SEQ ID NO: 4071; WAN024G87_at; Start 123; Stop 147
caattcatggttggctagcttctta

SEQ ID NO: 234984 - DNA, 25 bp, Artificial
  probe
  misc_feature (1)..(25): SEQ ID NO: 4071; WAN024G87_at; Start 976; Stop 1000
ggttatatttatctggaggctccca

SEQ ID NO: 234985 - DNA, 25 bp, Artificial
  probe
  misc_feature (1)..(25): SEQ ID NO: 4071; WAN024G87_at; Start 1358; Stop 1382
tgatgaaccgctttttagcccgtta

SEQ ID NO: 234986 - DNA, 25 bp, Artificial
  probe
  misc_feature (1)..(25): SEQ ID NO: 4071; WAN024G87_at; Start 1626; Stop 1650
tatcagcaaatctcttcacttagga

SEQ ID NO: 234987 - DNA, 25 bp, Artificial
  probe
  misc_feature (1)..(25): SEQ ID NO: 4071; WAN024G87_at; Start 1699; Stop 1723
gaagtagcccaagaagatccagaat

SEQ ID NO: 234988 - DNA, 25 bp, Artificial
  probe
  misc_feature (1)..(25): SEQ ID NO: 4096; WAN024G88_at; Start 228; Stop 252
tcttatagggaagacgcaatatttc

SEQ ID NO: 234989 - DNA, 25 bp, Artificial
  probe
  misc_feature (1)..(25): SEQ ID NO: 4096; WAN024G88_at; Start 102; Stop 126
tttctcccttttgataggcttctgc

SEQ ID NO: 234990 - DNA, 25 bp, Artificial
  probe
  misc_feature (1)..(25): SEQ ID NO: 4096; WAN024G88_at; Start 139; Stop 163
ccaaaagagattttgataataaagt

SEQ ID NO: 234991 - DNA, 25 bp, Artificial
  probe
  misc_feature (1)..(25): SEQ ID NO: 4096; WAN024G88_at; Start 155; Stop 179
taataaagttgttgccggatatagc

SEQ ID NO: 234992 - DNA, 25 bp, Artificial
  probe
  misc_feature (1)..(25): SEQ ID NO: 4096; WAN024G88_at; Start 195; Stop 219
cctcagaaactgtaaaatgagatat

SEQ ID NO: 234993 - DNA, 25 bp, Artificial
  probe
  misc_feature (1)..(25): SEQ ID NO: 4096; WAN024G88_at; Start 125; Stop 149
gcttgttctttcatccaaaagagat

SEQ ID NO: 234994 - DNA, 25 bp, Artificial
  probe
  misc_feature (1)..(25): SEQ ID NO: 4096; WAN024G88_at; Start 18; Stop 42
tcaagtcttgttcaatctggaaaaa

SEQ ID NO: 234995 - DNA, 25 bp, Artificial
  probe
  misc_feature (1)..(25): SEQ ID NO: 4096; WAN024G88_at; Start 233; Stop 257
tagggaagacgcaatatttccaata

SEQ ID NO: 234996 - DNA, 25 bp, Artificial
  probe
  misc_feature (1)..(25): SEQ ID NO: 4096; WAN024G88_at; Start 56; Stop 80
ggtcgaatttgtggataccattctt

SEQ ID NO: 234997 - DNA, 25 bp, Artificial
  probe
  misc_feature (1)..(25): SEQ ID NO: 4096; WAN024G88_at; Start 77; Stop 101
tctttcagtccataagtcaggatat

SEQ ID NO: 234998 - DNA, 25 bp, Artificial
  probe
  misc_feature (1)..(25): SEQ ID NO: 4096; WAN024G88_at; Start 33; Stop 57
tctggaaaaatttgcccactattgg

SEQ ID NO: 234999 - DNA, 25 bp, Artificial
  probe
  misc_feature (1)..(25): SEQ ID NO: 4096; WAN024G88_at; Start 164; Stop 188
tgttgccggatatagcgacagatgt

SEQ ID NO: 235000 - DNA, 25 bp, Artificial
  probe
  misc_feature (1)..(25): SEQ ID NO: 4096; WAN024G88_at; Start 187; Stop 211
gtccttgtcctcagaaactgtaaaa

SEQ ID NO: 235001 - DNA, 25 bp, Artificial
  probe
  misc_feature (1)..(25): SEQ ID NO: 4096; WAN024G88_at; Start 6; Stop 30
gataatagctagtcaagtcttgttc

SEQ ID NO: 235002 - DNA, 25 bp, Artificial
  probe
  misc_feature (1)..(25): SEQ ID NO: 4096; WAN024G88_at; Start 172; Stop 196
gatatagcgacagatgtccttgtcc

SEQ ID NO: 235003 - DNA, 25 bp, Artificial
  probe
  misc_feature (1)..(25): SEQ ID NO: 4096; WAN024G88_at; Start 44; Stop 68
ttgcccactattggtcgaatttgtg

SEQ ID NO: 235004 - DNA, 25 bp, Artificial
  probe
  misc_feature (1)..(25): SEQ ID NO: 4096; WAN024G88_at; Start 180; Stop 204
gacagatgtccttgtcctcagaaac

SEQ ID NO: 235005 - DNA, 25 bp, Artificial
  probe
  misc_feature (1)..(25): SEQ ID NO: 4096; WAN024G88_at; Start 60; Stop 84
gaatttgtggataccattctttcag

SEQ ID NO: 235006 - DNA, 25 bp, Artificial
  probe
  misc_feature (1)..(25): SEQ ID NO: 4096; WAN024G88_at; Start 168; Stop 192
gccggatatagcgacagatgtcctt

SEQ ID NO: 235007 - DNA, 25 bp, Artificial
  probe
  misc_feature (1)..(25): SEQ ID NO: 4096; WAN024G88_at; Start 184; Stop 208
gatgtccttgtcctcagaaactgta

SEQ ID NO: 235008 - DNA, 25 bp, Artificial
  probe
  misc_feature (1)..(25): SEQ ID NO: 4096; WAN024G88_at; Start 85; Stop 109
tccataagtcaggatattttctccc

SEQ ID NO: 235009 - DNA, 25 bp, Artificial
  probe
  misc_feature (1)..(25): SEQ ID NO: 4096; WAN024G88_at; Start 49; Stop 73
cactattggtcgaatttgtggatac

SEQ ID NO: 235010 - DNA, 25 bp, Artificial
  probe
  misc_feature (1)..(25): SEQ ID NO: 4096; WAN024G88_at; Start 37; Stop 61
gaaaaatttgcccactattggtcga

SEQ ID NO: 235011 - DNA, 25 bp, Artificial
  probe
  misc_feature (1)..(25): SEQ ID NO: 4096; WAN024G88_at; Start 192; Stop 216
tgtcctcagaaactgtaaaatgaga

SEQ ID NO: 235012 - DNA, 25 bp, Artificial
  probe
  misc_feature (1)..(25): SEQ ID NO: 4096; WAN024G88_at; Start 160; Stop 184
aagttgttgccggatatagcgacag

SEQ ID NO: 235013 - DNA, 25 bp, Artificial
  probe
  misc_feature (1)..(25): SEQ ID NO: 4096; WAN024G88_at; Start 74; Stop 98
cattctttcagtccataagtcagga

SEQ ID NO: 235014 - DNA, 25 bp, Artificial
  probe
  misc_feature (1)..(25): SEQ ID NO: 4096; WAN024G88_at; Start 176; Stop 200
tagcgacagatgtccttgtcctcag

SEQ ID NO: 235015 - DNA, 25 bp, Artificial
  probe
  misc_feature (1)..(25): SEQ ID NO: 4096; WAN024G88_at; Start 118; Stop 142
ggcttctgcttgttctttcatccaa

SEQ ID NO: 235016 - DNA, 25 bp, Artificial
  probe
  misc_feature (1)..(25): SEQ ID NO: 4096; WAN024G88_at; Start 15; Stop 39
tagtcaagtcttgttcaatctggaa

SEQ ID NO: 235017 - DNA, 25 bp, Artificial
  probe
  misc_feature (1)..(25): SEQ ID NO: 4096; WAN024G88_at; Start 108; Stop 132
ccttttgataggcttctgcttgttc

SEQ ID NO: 235018 - DNA, 25 bp, Artificial
  probe
  misc_feature (1)..(25): SEQ ID NO: 4096; WAN024G88_at; Start 95; Stop 119
aggatattttctcccttttgatagg

SEQ ID NO: 235019 - DNA, 25 bp, Artificial
  probe
  misc_feature (1)..(25): SEQ ID NO: 4096; WAN024G88_at; Start 25; Stop 49
ttgttcaatctggaaaaatttgccc

SEQ ID NO: 235020 - DNA, 25 bp, Artificial
  probe
  misc_feature (1)..(25): SEQ ID NO: 4096; WAN024G88_at; Start 68; Stop 92
ggataccattctttcagtccataag

SEQ ID NO: 235021 - DNA, 25 bp, Artificial
  probe
  misc_feature (1)..(25): SEQ ID NO: 4096; WAN024G88_at; Start 131; Stop 155
tctttcatccaaaagagattttgat

SEQ ID NO: 235022 - DNA, 25 bp, Artificial
  probe
  misc_feature (1)..(25): SEQ ID NO: 3128; WAN024G89_at; Start 648; Stop 672
tacagtttctgaggacaaggacatc

SEQ ID NO: 235023 - DNA, 25 bp, Artificial
  probe
  misc_feature (1)..(25): SEQ ID NO: 3128; WAN024G89_at; Start 291; Stop 315
tgtaaatggcaatctagctctagaa

SEQ ID NO: 235024 - DNA, 25 bp, Artificial
  probe
  misc_feature (1)..(25): SEQ ID NO: 3128; WAN024G89_at; Start 526; Stop 550
tacctgatttaccaggatctccgcg

SEQ ID NO: 235025 - DNA, 25 bp, Artificial
  probe
  misc_feature (1)..(25): SEQ ID NO: 3128; WAN024G89_at; Start 550; Stop 574
ggtaaactccattatcaaatcaagg

SEQ ID NO: 235026 - DNA, 25 bp, Artificial
  probe
  misc_feature (1)..(25): SEQ ID NO: 3128; WAN024G89_at; Start 385; Stop 409
caagtactgtggttgctgggtcaaa

SEQ ID NO: 235027 - DNA, 25 bp, Artificial
  probe
  misc_feature (1)..(25): SEQ ID NO: 3128; WAN024G89_at; Start 799; Stop 823
ccaatagtgggcaaatttttccaga

SEQ ID NO: 235028 - DNA, 25 bp, Artificial
  probe
  misc_feature (1)..(25): SEQ ID NO: 3128; WAN024G89_at; Start 236; Stop 260
caaaggttcaattagagtacccgct

SEQ ID NO: 235029 - DNA, 25 bp, Artificial
  probe
  misc_feature (1)..(25): SEQ ID NO: 3128; WAN024G89_at; Start 68; Stop 92
catacacctgcccagcttgtggagg

SEQ ID NO: 235030 - DNA, 25 bp, Artificial
  probe
  misc_feature (1)..(25): SEQ ID NO: 3128; WAN024G89_at; Start 893; Stop 917
ggcaaaagctttatccaccagcctt

SEQ ID NO: 235031 - DNA, 25 bp, Artificial
  probe
  misc_feature (1)..(25): SEQ ID NO: 3128; WAN024G89_at; Start 715; Stop 739
tggatgaaagaacaagcagaagcct

SEQ ID NO: 235032 - DNA, 25 bp, Artificial
  probe
  misc_feature (1)..(25): SEQ ID NO: 3128; WAN024G89_at; Start 782; Stop 806
ggtatccacaaattcgaccaatagt

SEQ ID NO: 235033 - DNA, 25 bp, Artificial
  probe
  misc_feature (1)..(25): SEQ ID NO: 3128; WAN024G89_at; Start 318; Stop 342
tcagtgtagtcccttgcctcagaaa

SEQ ID NO: 235034 - DNA, 25 bp, Artificial
  probe
  misc_feature (1)..(25): SEQ ID NO: 3128; WAN024G89_at; Start 248; Stop 272
tagagtacccgctttcagaacttaa

SEQ ID NO: 235035 - DNA, 25 bp, Artificial
  probe
  misc_feature (1)..(25): SEQ ID NO: 3128; WAN024G89_at; Start 100; Stop 124
catttgcgtcaaggaccaagtgtac

SEQ ID NO: 235036 - DNA, 25 bp, Artificial
  probe
  misc_feature (1)..(25): SEQ ID NO: 3128; WAN024G89_at; Start 55; Stop 79
cttgagaagcaagcatacacctgcc

SEQ ID NO: 235037 - DNA, 25 bp, Artificial
  probe
  misc_feature (1)..(25): SEQ ID NO: 3128; WAN024G89_at; Start 305; Stop 329
tagctctagaagttcagtgtagtcc

SEQ ID NO: 235038 - DNA, 25 bp, Artificial
  probe
  misc_feature (1)..(25): SEQ ID NO: 3128; WAN024G89_at; Start 345; Stop 369
ccttaaagagcgaagtgagggctat

SEQ ID NO: 235039 - DNA, 25 bp, Artificial
  probe
  misc_feature (1)..(25): SEQ ID NO: 3128; WAN024G89_at; Start 540; Stop 564
ggatctccgcggtaaactccattat

SEQ ID NO: 235040 - DNA, 25 bp, Artificial
  probe
  misc_feature (1)..(25): SEQ ID NO: 3128; WAN024G89_at; Start 372; Stop 396
tagtcagggttaccaagtactgtgg

SEQ ID NO: 235041 - DNA, 25 bp, Artificial
  probe
  misc_feature (1)..(25): SEQ ID NO: 3128; WAN024G89_at; Start 212; Stop 236
tctatcactggttgaaaaaagagac

SEQ ID NO: 235042 - DNA, 25 bp, Artificial
  probe
  misc_feature (1)..(25): SEQ ID NO: 3128; WAN024G89_at; Start 360; Stop 384
tgagggctatcgtagtcagggttac

SEQ ID NO: 235043 - DNA, 25 bp, Artificial
  probe
  misc_feature (1)..(25): SEQ ID NO: 3128; WAN024G89_at; Start 751; Stop 775
gaaaatatcctgacttatggactga

SEQ ID NO: 235044 - DNA, 25 bp, Artificial
  probe
  misc_feature (1)..(25): SEQ ID NO: 3128; WAN024G89_at; Start 262; Stop 286
tcagaacttaaacagattgcggatg

SEQ ID NO: 235045 - DNA, 25 bp, Artificial
  probe
  misc_feature (1)..(25): SEQ ID NO: 3128; WAN024G89_at; Start 457; Stop 481
tatttcagtcaaaacatgggctttt

SEQ ID NO: 235046 - DNA, 25 bp, Artificial
  probe
  misc_feature (1)..(25): SEQ ID NO: 3128; WAN024G89_at; Start 332; Stop 356
tgcctcagaaagtccttaaagagcg

SEQ ID NO: 235047 - DNA, 25 bp, Artificial
  probe
  misc_feature (1)..(25): SEQ ID NO: 3128; WAN024G89_at; Start 766; Stop 790
tatggactgaaagaatggtatccac

SEQ ID NO: 235048 - DNA, 25 bp, Artificial
  probe
  misc_feature (1)..(25): SEQ ID NO: 3128; WAN024G89_at; Start 730; Stop 754
gcagaagcctatcaaaagggagaaa

SEQ ID NO: 235049 - DNA, 25 bp, Artificial
  probe
  misc_feature (1)..(25): SEQ ID NO: 3128; WAN024G89_at; Start 431; Stop 455
tgactcgtctacagcaaggttttct

SEQ ID NO: 235050 - DNA, 25 bp, Artificial
  probe
  misc_feature (1)..(25): SEQ ID NO: 3128; WAN024G89_at; Start 879; Stop 903
tcctcaaaatgattggcaaaagctt

SEQ ID NO: 235051 - DNA, 25 bp, Artificial
  probe
  misc_feature (1)..(25): SEQ ID NO: 3128; WAN024G89_at; Start 116; Stop 140
caagtgtacggacgcattttgccca

SEQ ID NO: 235052 - DNA, 25 bp, Artificial
  probe
  misc_feature (1)..(25): SEQ ID NO: 3128; WAN024G89_at; Start 815; Stop 839
ttttccagattgaacaagacttgac

SEQ ID NO: 235053 - DNA, 25 bp, Artificial
  probe
  misc_feature (1)..(25): SEQ ID NO: 3128; WAN024G89_at; Start 401; Stop 425
tgggtcaaaaactgtggctcaagga

SEQ ID NO: 235054 - DNA, 25 bp, Artificial
  probe
  misc_feature (1)..(25): SEQ ID NO: 3128; WAN024G89_at; Start 416; Stop 440
ggctcaaggagcgtttgactcgtct

SEQ ID NO: 235055 - DNA, 25 bp, Artificial
  probe
  misc_feature (1)..(25): SEQ ID NO: 3128; WAN024G89_at; Start 604; Stop 628
gaaatattgcgtcttccctataaga

SEQ ID NO: 235056 - DNA, 25 bp, Artificial
  probe
  misc_feature (1)..(25): SEQ ID NO: 4981; WAN024G8A_at; Start 163; Stop 187
gataaggttgtaaccaccaacactg

SEQ ID NO: 235057 - DNA, 25 bp, Artificial
  probe
  misc_feature (1)..(25): SEQ ID NO: 4981; WAN024G8A_at; Start 95; Stop 119
tctccttctttaaaggtgaatggga

SEQ ID NO: 235058 - DNA, 25 bp, Artificial
  probe
  misc_feature (1)..(25): SEQ ID NO: 4981; WAN024G8A_at; Start 145; Stop 169
cgtgtccatggcacaaacgataagg

SEQ ID NO: 235059 - DNA, 25 bp, Artificial
  probe
  misc_feature (1)..(25): SEQ ID NO: 4981; WAN024G8A_at; Start 50; Stop 74
tcattgtacttaaccaattcccaat

SEQ ID NO: 235060 - DNA, 25 bp, Artificial
  probe
  misc_feature (1)..(25): SEQ ID NO: 4981; WAN024G8A_at; Start 118; Stop 142
gaagttaaccgagcaaggataatcc

SEQ ID NO: 235061 - DNA, 25 bp, Artificial
  probe
  misc_feature (1)..(25): SEQ ID NO: 4981; WAN024G8A_at; Start 17; Stop 41
ttctcatcgcgacggtgcaaatggc

SEQ ID NO: 235062 - DNA, 25 bp, Artificial
  probe
  misc_feature (1)..(25): SEQ ID NO: 4981; WAN024G8A_at; Start 112; Stop 136
gaatgggaagttaaccgagcaagga

SEQ ID NO: 235063 - DNA, 25 bp, Artificial
  probe
  misc_feature (1)..(25): SEQ ID NO: 4981; WAN024G8A_at; Start 131; Stop 155
caaggataatcctccgtgtccatgg

SEQ ID NO: 235064 - DNA, 25 bp, Artificial
  probe
  misc_feature (1)..(25): SEQ ID NO: 4981; WAN024G8A_at; Start 140; Stop 164
tcctccgtgtccatggcacaaacga

SEQ ID NO: 235065 - DNA, 25 bp, Artificial
  probe
  misc_feature (1)..(25): SEQ ID NO: 4981; WAN024G8A_at; Start 34; Stop 58
caaatggcctggattttcattgtac

SEQ ID NO: 235066 - DNA, 25 bp, Artificial
  probe
  misc_feature (1)..(25): SEQ ID NO: 4981; WAN024G8A_at; Start 149; Stop 173
tccatggcacaaacgataaggttgt

SEQ ID NO: 235067 - DNA, 25 bp, Artificial
  probe
  misc_feature (1)..(25): SEQ ID NO: 4981; WAN024G8A_at; Start 6; Stop 30
tacgattgccattctcatcgcgacg

SEQ ID NO: 235068 - DNA, 25 bp, Artificial
  probe
  misc_feature (1)..(25): SEQ ID NO: 4981; WAN024G8A_at; Start 210; Stop 234
taatagctggaatgcggtccgcttg

SEQ ID NO: 235069 - DNA, 25 bp, Artificial
  probe
  misc_feature (1)..(25): SEQ ID NO: 4981; WAN024G8A_at; Start 69; Stop 93
cccaatccttgtaatagtctgccag

SEQ ID NO: 235070 - DNA, 25 bp, Artificial
  probe
  misc_feature (1)..(25): SEQ ID NO: 4981; WAN024G8A_at; Start 20; Stop 44
tcatcgcgacggtgcaaatggcctg

SEQ ID NO: 235071 - DNA, 25 bp, Artificial
  probe
  misc_feature (1)..(25): SEQ ID NO: 4981; WAN024G8A_at; Start 12; Stop 36
tgccattctcatcgcgacggtgcaa

SEQ ID NO: 235072 - DNA, 25 bp, Artificial
  probe
  misc_feature (1)..(25): SEQ ID NO: 4981; WAN024G8A_at; Start 207; Stop 231
gaataatagctggaatgcggtccgc

SEQ ID NO: 235073 - DNA, 25 bp, Artificial
  probe
  misc_feature (1)..(25): SEQ ID NO: 4981; WAN024G8A_at; Start 74; Stop 98
tccttgtaatagtctgccagttctc

SEQ ID NO: 235074 - DNA, 25 bp, Artificial
  probe
  misc_feature (1)..(25): SEQ ID NO: 4981; WAN024G8A_at; Start 39; Stop 63
ggcctggattttcattgtacttaac

SEQ ID NO: 235075 - DNA, 25 bp, Artificial
  probe
  misc_feature (1)..(25): SEQ ID NO: 4981; WAN024G8A_at; Start 27; Stop 51
gacggtgcaaatggcctggattttc

SEQ ID NO: 235076 - DNA, 25 bp, Artificial
  probe
  misc_feature (1)..(25): SEQ ID NO: 4981; WAN024G8A_at; Start 155; Stop 179
gcacaaacgataaggttgtaaccac

SEQ ID NO: 235077 - DNA, 25 bp, Artificial
  probe
  misc_feature (1)..(25): SEQ ID NO: 4981; WAN024G8A_at; Start 135; Stop 159
gataatcctccgtgtccatggcaca

SEQ ID NO: 235078 - DNA, 25 bp, Artificial
  probe
  misc_feature (1)..(25): SEQ ID NO: 4981; WAN024G8A_at; Start 184; Stop 208
actggttttctcctgcatattttga

SEQ ID NO: 235079 - DNA, 25 bp, Artificial
  probe
  misc_feature (1)..(25): SEQ ID NO: 4981; WAN024G8A_at; Start 23; Stop 47
tcgcgacggtgcaaatggcctggat

SEQ ID NO: 235080 - DNA, 25 bp, Artificial
  probe
  misc_feature (1)..(25): SEQ ID NO: 4981; WAN024G8A_at; Start 137; Stop 161
taatcctccgtgtccatggcacaaa

SEQ ID NO: 235081 - DNA, 25 bp, Artificial
  probe
  misc_feature (1)..(25): SEQ ID NO: 4981; WAN024G8A_at; Start 177; Stop 201
caccaacactggttttctcctgcat

SEQ ID NO: 235082 - DNA, 25 bp, Artificial
  probe
  misc_feature (1)..(25): SEQ ID NO: 4981; WAN024G8A_at; Start 89; Stop 113
gccagttctccttctttaaaggtga

SEQ ID NO: 235083 - DNA, 25 bp, Artificial
  probe
  misc_feature (1)..(25): SEQ ID NO: 4981; WAN024G8A_at; Start 109; Stop 133
ggtgaatgggaagttaaccgagcaa

SEQ ID NO: 235084 - DNA, 25 bp, Artificial
  probe
  misc_feature (1)..(25): SEQ ID NO: 4981; WAN024G8A_at; Start 122; Stop 146
ttaaccgagcaaggataatcctccg

SEQ ID NO: 235085 - DNA, 25 bp, Artificial
  probe
  misc_feature (1)..(25): SEQ ID NO: 4981; WAN024G8A_at; Start 9; Stop 33
gattgccattctcatcgcgacggtg

SEQ ID NO: 235086 - DNA, 25 bp, Artificial
  probe
  misc_feature (1)..(25): SEQ ID NO: 4981; WAN024G8A_at; Start 3; Stop 27
gaatacgattgccattctcatcgcg

SEQ ID NO: 235087 - DNA, 25 bp, Artificial
  probe
  misc_feature (1)..(25): SEQ ID NO: 4981; WAN024G8A_at; Start 85; Stop 109
gtctgccagttctccttctttaaag

SEQ ID NO: 235088 - DNA, 25 bp, Artificial
  probe
  misc_feature (1)..(25): SEQ ID NO: 4981; WAN024G8A_at; Start 61; Stop 85
aaccaattcccaatccttgtaatag

SEQ ID NO: 235089 - DNA, 25 bp, Artificial
  probe
  misc_feature (1)..(25): SEQ ID NO: 4981; WAN024G8A_at; Start 192; Stop 216
tctcctgcatattttgaataatagc

SEQ ID NO: 235090 - DNA, 25 bp, Artificial
  probe
  misc_feature (1)..(25): SEQ ID NO: 4885; WAN024G8B_at; Start 64; Stop 88
gaagctgttcagcaaaagcacaata

SEQ ID NO: 235091 - DNA, 25 bp, Artificial
  probe
  misc_feature (1)..(25): SEQ ID NO: 4885; WAN024G8B_at; Start 107; Stop 131
ggaaaattactgtcttgaagggagc

SEQ ID NO: 235092 - DNA, 25 bp, Artificial
  probe
  misc_feature (1)..(25): SEQ ID NO: 4885; WAN024G8B_at; Start 779; Stop 803
aaaatccaggccatttgcaccgtcg

SEQ ID NO: 235093 - DNA, 25 bp, Artificial
  probe
  misc_feature (1)..(25): SEQ ID NO: 4885; WAN024G8B_at; Start 313; Stop 337
aataccaatcctgttcattcagagg

SEQ ID NO: 235094 - DNA, 25 bp, Artificial
  probe
  misc_feature (1)..(25): SEQ ID NO: 4885; WAN024G8B_at; Start 170; Stop 194
tagctgaacacctctttgaagcagg

SEQ ID NO: 235095 - DNA, 25 bp, Artificial
  probe
  misc_feature (1)..(25): SEQ ID NO: 4885; WAN024G8B_at; Start 41; Stop 65
tgtggaataaacaaacaatgcctga

SEQ ID NO: 235096 - DNA, 25 bp, Artificial
  probe
  misc_feature (1)..(25): SEQ ID NO: 4885; WAN024G8B_at; Start 621; Stop 645
tcaaaatatgcaggagaaaaccagt

SEQ ID NO: 235097 - DNA, 25 bp, Artificial
  probe
  misc_feature (1)..(25): SEQ ID NO: 4885; WAN024G8B_at; Start 237; Stop 261
ggaagctgccacagatgatgtggaa

SEQ ID NO: 235098 - DNA, 25 bp, Artificial
  probe
  misc_feature (1)..(25): SEQ ID NO: 4885; WAN024G8B_at; Start 354; Stop 378
gacagtgaaacaagggaaagctttg

SEQ ID NO: 235099 - DNA, 25 bp, Artificial
  probe
  misc_feature (1)..(25): SEQ ID NO: 4885; WAN024G8B_at; Start 399; Stop 423
gcgtaattctctttttctagcccag

SEQ ID NO: 235100 - DNA, 25 bp, Artificial
  probe
  misc_feature (1)..(25): SEQ ID NO: 4885; WAN024G8B_at; Start 736; Stop 760
ctggcagactattacaaggattggg

SEQ ID NO: 235101 - DNA, 25 bp, Artificial
  probe
  misc_feature (1)..(25): SEQ ID NO: 4885; WAN024G8B_at; Start 371; Stop 395
aagctttggatttgggttgtggtca

SEQ ID NO: 235102 - DNA, 25 bp, Artificial
  probe
  misc_feature (1)..(25): SEQ ID NO: 4885; WAN024G8B_at; Start 720; Stop 744
ctttaaagaaggagaactggcagac

SEQ ID NO: 235103 - DNA, 25 bp, Artificial
  probe
  misc_feature (1)..(25): SEQ ID NO: 4885; WAN024G8B_at; Start 458; Stop 482
gactagctcttgaaatcttgcaaag

SEQ ID NO: 235104 - DNA, 25 bp, Artificial
  probe
  misc_feature (1)..(25): SEQ ID NO: 4885; WAN024G8B_at; Start 600; Stop 624
ggaccgcattccagctattattcaa

SEQ ID NO: 235105 - DNA, 25 bp, Artificial
  probe
  misc_feature (1)..(25): SEQ ID NO: 4885; WAN024G8B_at; Start 684; Stop 708
ggaggattatccttgctcggttaac

SEQ ID NO: 235106 - DNA, 25 bp, Artificial
  probe
  misc_feature (1)..(25): SEQ ID NO: 4885; WAN024G8B_at; Start 438; Stop 462
gacggctgtagatcaaaatggacta

SEQ ID NO: 235107 - DNA, 25 bp, Artificial
  probe
  misc_feature (1)..(25): SEQ ID NO: 4885; WAN024G8B_at; Start 14; Stop 38
aattagttgcctataaacgcatgcc

SEQ ID NO: 235108 - DNA, 25 bp, Artificial
  probe
  misc_feature (1)..(25): SEQ ID NO: 4885; WAN024G8B_at; Start 520; Stop 544
ctttacgatatcaattcagctagca

SEQ ID NO: 235109 - DNA, 25 bp, Artificial
  probe
  misc_feature (1)..(25): SEQ ID NO: 4885; WAN024G8B_at; Start 195; Stop 219
ggcagacaatccaatggcccaacct

SEQ ID NO: 235110 - DNA, 25 bp, Artificial
  probe
  misc_feature (1)..(25): SEQ ID NO: 4885; WAN024G8B_at; Start 423; Stop 447
gcaagattttgatgtgacggctgta

SEQ ID NO: 235111 - DNA, 25 bp, Artificial
  probe
  misc_feature (1)..(25): SEQ ID NO: 4885; WAN024G8B_at; Start 670; Stop 694
tgtgccatggacacggaggattatc

SEQ ID NO: 235112 - DNA, 25 bp, Artificial
  probe
  misc_feature (1)..(25): SEQ ID NO: 4885; WAN024G8B_at; Start 796; Stop 820
caccgtcgcgatgagaatggcaatc

SEQ ID NO: 235113 - DNA, 25 bp, Artificial
  probe
  misc_feature (1)..(25): SEQ ID NO: 4885; WAN024G8B_at; Start 535; Stop 559
tcagctagcattgaacaagaatatg

SEQ ID NO: 235114 - DNA, 25 bp, Artificial
  probe
  misc_feature (1)..(25): SEQ ID NO: 4885; WAN024G8B_at; Start 833; Stop 857
gctttgcgaccttactagctaagaa

SEQ ID NO: 235115 - DNA, 25 bp, Artificial
  probe
  misc_feature (1)..(25): SEQ ID NO: 4885; WAN024G8B_at; Start 819; Stop 843
tcgtattcaactacgctttgcgacc

SEQ ID NO: 235116 - DNA, 25 bp, Artificial
  probe
  misc_feature (1)..(25): SEQ ID NO: 4885; WAN024G8B_at; Start 82; Stop 106
cacaatacaaaagttgggacttggg

SEQ ID NO: 235117 - DNA, 25 bp, Artificial
  probe
  misc_feature (1)..(25): SEQ ID NO: 4885; WAN024G8B_at; Start 123; Stop 147
gaagggagctctcaagtttattgaa

SEQ ID NO: 235118 - DNA, 25 bp, Artificial
  probe
  misc_feature (1)..(25): SEQ ID NO: 4885; WAN024G8B_at; Start 585; Stop 609
catgtttctacaagcggaccgcatt

SEQ ID NO: 235119 - DNA, 25 bp, Artificial
  probe
  misc_feature (1)..(25): SEQ ID NO: 4885; WAN024G8B_at; Start 473; Stop 497
tcttgcaaagcattgtggagcagga

SEQ ID NO: 235120 - DNA, 25 bp, Artificial
  probe
  misc_feature (1)..(25): SEQ ID NO: 4885; WAN024G8B_at; Start 221; Stop 245
aagcctggcaccgagtggaagctgc

SEQ ID NO: 235121 - DNA, 25 bp, Artificial
  probe
  misc_feature (1)..(25): SEQ ID NO: 4885; WAN024G8B_at; Start 327; Stop 351
tcattcagaggtcctagaggccatg

SEQ ID NO: 235122 - DNA, 25 bp, Artificial
  probe
  misc_feature (1)..(25): SEQ ID NO: 4885; WAN024G8B_at; Start 766; Stop 790
gttaagtacaatgaaaatccaggcc

SEQ ID NO: 235123 - DNA, 25 bp, Artificial
  probe
  misc_feature (1)..(25): SEQ ID NO: 4885; WAN024G8B_at; Start 655; Stop 679
tacaaccttatcgtttgtgccatgg

SEQ ID NO: 235124 - DNA, 25 bp, Artificial
  probe
  misc_feature (1)..(25): SEQ ID NO: 4973; WAN024G8C_at; Start 43; Stop 67
gcgcaagccaaaactcgaagcataa

SEQ ID NO: 235125 - DNA, 25 bp, Artificial
  probe
  misc_feature (1)..(25): SEQ ID NO: 4973; WAN024G8C_at; Start 96; Stop 120
taggctcctcgtgaattcgatagat

SEQ ID NO: 235126 - DNA, 25 bp, Artificial
  probe
  misc_feature (1)..(25): SEQ ID NO: 4973; WAN024G8C_at; Start 210; Stop 234
gctgccgaagaacgatatcaacagg

SEQ ID NO: 235127 - DNA, 25 bp, Artificial
  probe
  misc_feature (1)..(25): SEQ ID NO: 4973; WAN024G8C_at; Start 90; Stop 114
cagccttaggctcctcgtgaattcg

SEQ ID NO: 235128 - DNA, 25 bp, Artificial
  probe
  misc_feature (1)..(25): SEQ ID NO: 4973; WAN024G8C_at; Start 1; Stop 25
ttgaagtgcctcctgactaatctca

SEQ ID NO: 235129 - DNA, 25 bp, Artificial
  probe
  misc_feature (1)..(25): SEQ ID NO: 4973; WAN024G8C_at; Start 207; Stop 231
cacgctgccgaagaacgatatcaac

SEQ ID NO: 235130 - DNA, 25 bp, Artificial
  probe
  misc_feature (1)..(25): SEQ ID NO: 4973; WAN024G8C_at; Start 99; Stop 123
gctcctcgtgaattcgatagataaa

SEQ ID NO: 235131 - DNA, 25 bp, Artificial
  probe
  misc_feature (1)..(25): SEQ ID NO: 4973; WAN024G8C_at; Start 216; Stop 240
gaagaacgatatcaacaggcttacc

SEQ ID NO: 235132 - DNA, 25 bp, Artificial
  probe
  misc_feature (1)..(25): SEQ ID NO: 4973; WAN024G8C_at; Start 138; Stop 162
tgctgaaatgttcggcaactgtttc

SEQ ID NO: 235133 - DNA, 25 bp, Artificial
  probe
  misc_feature (1)..(25): SEQ ID NO: 4973; WAN024G8C_at; Start 204; Stop 228
taccacgctgccgaagaacgatatc

SEQ ID NO: 235134 - DNA, 25 bp, Artificial
  probe
  misc_feature (1)..(25): SEQ ID NO: 4973; WAN024G8C_at; Start 9; Stop 33
cctcctgactaatctcactggcagt

SEQ ID NO: 235135 - DNA, 25 bp, Artificial
  probe
  misc_feature (1)..(25): SEQ ID NO: 4973; WAN024G8C_at; Start 200; Stop 224
gcaataccacgctgccgaagaacga

SEQ ID NO: 235136 - DNA, 25 bp, Artificial
  probe
  misc_feature (1)..(25): SEQ ID NO: 4973; WAN024G8C_at; Start 35; Stop 59
ccataaatgcgcaagccaaaactcg

SEQ ID NO: 235137 - DNA, 25 bp, Artificial
  probe
  misc_feature (1)..(25): SEQ ID NO: 4973; WAN024G8C_at; Start 80; Stop 104
tgaaccttttcagccttaggctcct

SEQ ID NO: 235138 - DNA, 25 bp, Artificial
  probe
  misc_feature (1)..(25): SEQ ID NO: 4973; WAN024G8C_at; Start 219; Stop 243
gaacgatatcaacaggcttaccttg

SEQ ID NO: 235139 - DNA, 25 bp, Artificial
  probe
  misc_feature (1)..(25): SEQ ID NO: 4973; WAN024G8C_at; Start 5; Stop 29
agtgcctcctgactaatctcactgg

SEQ ID NO: 235140 - DNA, 25 bp, Artificial
  probe
  misc_feature (1)..(25): SEQ ID NO: 4973; WAN024G8C_at; Start 213; Stop 237
gccgaagaacgatatcaacaggctt

SEQ ID NO: 235141 - DNA, 25 bp, Artificial
  probe
  misc_feature (1)..(25): SEQ ID NO: 4973; WAN024G8C_at; Start 179; Stop 203
aaagactcaatcatccgctcggcaa

SEQ ID NO: 235142 - DNA, 25 bp, Artificial
  probe
  misc_feature (1)..(25): SEQ ID NO: 4973; WAN024G8C_at; Start 112; Stop 136
tcgatagataaaaggcaaatccaac

SEQ ID NO: 235143 - DNA, 25 bp, Artificial
  probe
  misc_feature (1)..(25): SEQ ID NO: 4973; WAN024G8C_at; Start 62; Stop 86
gcataatcaataaacttctgaacct

SEQ ID NO: 235144 - DNA, 25 bp, Artificial
  probe
  misc_feature (1)..(25): SEQ ID NO: 4973; WAN024G8C_at; Start 93; Stop 117
ccttaggctcctcgtgaattcgata

SEQ ID NO: 235145 - DNA, 25 bp, Artificial
  probe
  misc_feature (1)..(25): SEQ ID NO: 4973; WAN024G8C_at; Start 231; Stop 255
caggcttaccttgtttatccactaa

SEQ ID NO: 235146 - DNA, 25 bp, Artificial
  probe
  misc_feature (1)..(25): SEQ ID NO: 4973; WAN024G8C_at; Start 105; Stop 129
cgtgaattcgatagataaaaggcaa

SEQ ID NO: 235147 - DNA, 25 bp, Artificial
  probe
  misc_feature (1)..(25): SEQ ID NO: 4973; WAN024G8C_at; Start 146; Stop 170
tgttcggcaactgtttcattagcca

SEQ ID NO: 235148 - DNA, 25 bp, Artificial
  probe
  misc_feature (1)..(25): SEQ ID NO: 4973; WAN024G8C_at; Start 151; Stop 175
ggcaactgtttcattagccatcaac

SEQ ID NO: 235149 - DNA, 25 bp, Artificial
  probe
  misc_feature (1)..(25): SEQ ID NO: 4973; WAN024G8C_at; Start 75; Stop 99
acttctgaaccttttcagccttagg

SEQ ID NO: 235150 - DNA, 25 bp, Artificial
  probe
  misc_feature (1)..(25): SEQ ID NO: 4973; WAN024G8C_at; Start 39; Stop 63
aaatgcgcaagccaaaactcgaagc

SEQ ID NO: 235151 - DNA, 25 bp, Artificial
  probe
  misc_feature (1)..(25): SEQ ID NO: 4973; WAN024G8C_at; Start 177; Stop 201
taaaagactcaatcatccgctcggc

SEQ ID NO: 235152 - DNA, 25 bp, Artificial
  probe
  misc_feature (1)..(25): SEQ ID NO: 4973; WAN024G8C_at; Start 49; Stop 73
gccaaaactcgaagcataatcaata

SEQ ID NO: 235153 - DNA, 25 bp, Artificial
  probe
  misc_feature (1)..(25): SEQ ID NO: 4973; WAN024G8C_at; Start 125; Stop 149
ggcaaatccaacttgctgaaatgtt

SEQ ID NO: 235154 - DNA, 25 bp, Artificial
  probe
  misc_feature (1)..(25): SEQ ID NO: 4973; WAN024G8C_at; Start 162; Stop 186
cattagccatcaacataaaagactc

SEQ ID NO: 235155 - DNA, 25 bp, Artificial
  probe
  misc_feature (1)..(25): SEQ ID NO: 4973; WAN024G8C_at; Start 118; Stop 142
gataaaaggcaaatccaacttgctg

SEQ ID NO: 235156 - DNA, 25 bp, Artificial
  probe
  misc_feature (1)..(25): SEQ ID NO: 4973; WAN024G8C_at; Start 181; Stop 205
agactcaatcatccgctcggcaata

SEQ ID NO: 235157 - DNA, 25 bp, Artificial
  probe
  misc_feature (1)..(25): SEQ ID NO: 4973; WAN024G8C_at; Start 195; Stop 219
gctcggcaataccacgctgccgaag

SEQ ID NO: 235158 - DNA, 25 bp, Artificial
  probe
  misc_feature (1)..(25): SEQ ID NO: 2392; WAN024G8D_at; Start 430; Stop 454
gatatcgcgcgtgtgatgaaagctg

SEQ ID NO: 235159 - DNA, 25 bp, Artificial
  probe
  misc_feature (1)..(25): SEQ ID NO: 2392; WAN024G8D_at; Start 220; Stop 244
tggaaccaggaaccagaacgtcgtc

SEQ ID NO: 235160 - DNA, 25 bp, Artificial
  probe
  misc_feature (1)..(25): SEQ ID NO: 2392; WAN024G8D_at; Start 447; Stop 471
gaaagctgttaatcagcgataacta

SEQ ID NO: 235161 - DNA, 25 bp, Artificial
  probe
  misc_feature (1)..(25): SEQ ID NO: 2392; WAN024G8D_at; Start 340; Stop 364
gatggctacgctaagcttcttttag

SEQ ID NO: 235162 - DNA, 25 bp, Artificial
  probe
  misc_feature (1)..(25): SEQ ID NO: 2392; WAN024G8D_at; Start 294; Stop 318
caaagggacaggaatgaccttagtt

SEQ ID NO: 235163 - DNA, 25 bp, Artificial
  probe
  misc_feature (1)..(25): SEQ ID NO: 2392; WAN024G8D_at; Start 390; Stop 414
tgacaaacgggagtctatcaaacgt

SEQ ID NO: 235164 - DNA, 25 bp, Artificial
  probe
  misc_feature (1)..(25): SEQ ID NO: 2392; WAN024G8D_at; Start 398; Stop 422
gggagtctatcaaacgtcgtgagca

SEQ ID NO: 235165 - DNA, 25 bp, Artificial
  probe
  misc_feature (1)..(25): SEQ ID NO: 2392; WAN024G8D_at; Start 205; Stop 229
gaagagggcaatatctggaaccagg

SEQ ID NO: 235166 - DNA, 25 bp, Artificial
  probe
  misc_feature (1)..(25): SEQ ID NO: 2392; WAN024G8D_at; Start 158; Stop 182
tgaaaaatggagaagtttggctgag

SEQ ID NO: 235167 - DNA, 25 bp, Artificial
  probe
  misc_feature (1)..(25): SEQ ID NO: 2392; WAN024G8D_at; Start 102; Stop 126
tgaaatcaagagtgtacgagctgct

SEQ ID NO: 235168 - DNA, 25 bp, Artificial
  probe
  misc_feature (1)..(25): SEQ ID NO: 2392; WAN024G8D_at; Start 87; Stop 111
ggtcctgactggaactgaaatcaag

SEQ ID NO: 235169 - DNA, 25 bp, Artificial
  probe
  misc_feature (1)..(25): SEQ ID NO: 2392; WAN024G8D_at; Start 235; Stop 259
gaacgtcgtcgtaaactcctgctcc

SEQ ID NO: 235170 - DNA, 25 bp, Artificial
  probe
  misc_feature (1)..(25): SEQ ID NO: 2392; WAN024G8D_at; Start 55; Stop 79
tatacaatcgtagatacgctagagg

SEQ ID NO: 235171 - DNA, 25 bp, Artificial
  probe
  misc_feature (1)..(25): SEQ ID NO: 2392; WAN024G8D_at; Start 138; Stop 162
caaggatggctttgctcaagtgaaa

SEQ ID NO: 235172 - DNA, 25 bp, Artificial
  probe
  misc_feature (1)..(25): SEQ ID NO: 2392; WAN024G8D_at; Start 407; Stop 431
tcaaacgtcgtgagcaaaatcgaga

SEQ ID NO: 235173 - DNA, 25 bp, Artificial
  probe
  misc_feature (1)..(25): SEQ ID NO: 2392; WAN024G8D_at; Start 25; Stop 49
gtcgcacaaaataaaaaggcacgcc

SEQ ID NO: 235174 - DNA, 25 bp, Artificial
  probe
  misc_feature (1)..(25): SEQ ID NO: 2392; WAN024G8D_at; Start 146; Stop 170
gctttgctcaagtgaaaaatggaga

SEQ ID NO: 235175 - DNA, 25 bp, Artificial
  probe
  misc_feature (1)..(25): SEQ ID NO: 2392; WAN024G8D_at; Start 421; Stop 445
caaaatcgagatatcgcgcgtgtga

SEQ ID NO: 235176 - DNA, 25 bp, Artificial
  probe
  misc_feature (1)..(25): SEQ ID NO: 2392; WAN024G8D_at; Start 251; Stop 275
tcctgctccataaaaagcaaattca

SEQ ID NO: 235177 - DNA, 25 bp, Artificial
  probe
  misc_feature (1)..(25): SEQ ID NO: 2392; WAN024G8D_at; Start 351; Stop 375
taagcttcttttaggacttgccaaa

SEQ ID NO: 235178 - DNA, 25 bp, Artificial
  probe
  misc_feature (1)..(25): SEQ ID NO: 2392; WAN024G8D_at; Start 360; Stop 384
tttaggacttgccaaagggaagcat

SEQ ID NO: 235179 - DNA, 25 bp, Artificial
  probe
  misc_feature (1)..(25): SEQ ID NO: 2392; WAN024G8D_at; Start 123; Stop 147
tgctcgaattaatctcaaggatggc

SEQ ID NO: 235180 - DNA, 25 bp, Artificial
  probe
  misc_feature (1)..(25): SEQ ID NO: 2392; WAN024G8D_at; Start 195; Stop 219
cgcgccttacgaagagggcaatatc

SEQ ID NO: 235181 - DNA, 25 bp, Artificial
  probe
  misc_feature (1)..(25): SEQ ID NO: 2392; WAN024G8D_at; Start 80; Stop 104
cagggatggtcctgactggaactga

SEQ ID NO: 235182 - DNA, 25 bp, Artificial
  probe
  misc_feature (1)..(25): SEQ ID NO: 2392; WAN024G8D_at; Start 435; Stop 459
cgcgcgtgtgatgaaagctgttaat

SEQ ID NO: 235183 - DNA, 25 bp, Artificial
  probe
  misc_feature (1)..(25): SEQ ID NO: 2392; WAN024G8D_at; Start 369; Stop 393
tgccaaagggaagcatgactatgac

SEQ ID NO: 235184 - DNA, 25 bp, Artificial
  probe
  misc_feature (1)..(25): SEQ ID NO: 2392; WAN024G8D_at; Start 331; Stop 355
tatataaaagatggctacgctaagc

SEQ ID NO: 235185 - DNA, 25 bp, Artificial
  probe
  misc_feature (1)..(25): SEQ ID NO: 2392; WAN024G8D_at; Start 40; Stop 64
aaggcacgccacgactatacaatcg

SEQ ID NO: 235186 - DNA, 25 bp, Artificial
  probe
  misc_feature (1)..(25): SEQ ID NO: 2392; WAN024G8D_at; Start 62; Stop 86
tcgtagatacgctagaggcagggat

SEQ ID NO: 235187 - DNA, 25 bp, Artificial
  probe
  misc_feature (1)..(25): SEQ ID NO: 2392; WAN024G8D_at; Start 116; Stop 140
tacgagctgctcgaattaatctcaa

SEQ ID NO: 235188 - DNA, 25 bp, Artificial
  probe
  misc_feature (1)..(25): SEQ ID NO: 2392; WAN024G8D_at; Start 243; Stop 267
tcgtaaactcctgctccataaaaag

SEQ ID NO: 235189 - DNA, 25 bp, Artificial
  probe
  misc_feature (1)..(25): SEQ ID NO: 2392; WAN024G8D_at; Start 188; Stop 212
ttcatatcgcgccttacgaagaggg

SEQ ID NO: 235190 - DNA, 25 bp, Artificial
  probe
  misc_feature (1)..(25): SEQ ID NO: 2392; WAN024G8D_at; Start 378; Stop 402
gaagcatgactatgacaaacgggag

SEQ ID NO: 235191 - DNA, 25 bp, Artificial
  probe
  misc_feature (1)..(25): SEQ ID NO: 2392; WAN024G8D_at; Start 266; Stop 290
agcaaattcaaaaattggaacaaga

SEQ ID NO: 235192 - DNA, 25 bp, Artificial
  probe
  misc_feature (1)..(25): SEQ ID NO: 886; WAN024G8E_at; Start 1801; Stop 1825
gaacgtcgtgccatagaagctgagc

SEQ ID NO: 235193 - DNA, 25 bp, Artificial
  probe
  misc_feature (1)..(25): SEQ ID NO: 886; WAN024G8E_at; Start 1184; Stop 1208
caagtatcgaactcatggccaagct

SEQ ID NO: 235194 - DNA, 25 bp, Artificial
  probe
  misc_feature (1)..(25): SEQ ID NO: 886; WAN024G8E_at; Start 351; Stop 375
caataagggaacagcagcagaagcc

SEQ ID NO: 235195 - DNA, 25 bp, Artificial
  probe
  misc_feature (1)..(25): SEQ ID NO: 886; WAN024G8E_at; Start 2052; Stop 2076
gatccgtatccgtgttgaaagagcg

SEQ ID NO: 235196 - DNA, 25 bp, Artificial
  probe
  misc_feature (1)..(25): SEQ ID NO: 886; WAN024G8E_at; Start 666; Stop 690
cattgtatccgagtttccagaagct

SEQ ID NO: 235197 - DNA, 25 bp, Artificial
  probe
  misc_feature (1)..(25): SEQ ID NO: 886; WAN024G8E_at; Start 973; Stop 997
gaacgactatcaaatggcatctgct

SEQ ID NO: 235198 - DNA, 25 bp, Artificial
  probe
  misc_feature (1)..(25): SEQ ID NO: 886; WAN024G8E_at; Start 797; Stop 821
ccaaggacttggacgatgcagtgca

SEQ ID NO: 235199 - DNA, 25 bp, Artificial
  probe
  misc_feature (1)..(25): SEQ ID NO: 886; WAN024G8E_at; Start 614; Stop 638
gacactcaacggatgtcggaattga

SEQ ID NO: 235200 - DNA, 25 bp, Artificial
  probe
  misc_feature (1)..(25): SEQ ID NO: 886; WAN024G8E_at; Start 953; Stop 977
gagtggtgccaatgcttccagaacg

SEQ ID NO: 235201 - DNA, 25 bp, Artificial
  probe
  misc_feature (1)..(25): SEQ ID NO: 886; WAN024G8E_at; Start 1123; Stop 1147
gatgtcaatgatatcctagctggcg

SEQ ID NO: 235202 - DNA, 25 bp, Artificial
  probe
  misc_feature (1)..(25): SEQ ID NO: 886; WAN024G8E_at; Start 1098; Stop 1122
gaccagttttcgtatgacctatagc

SEQ ID NO: 235203 - DNA, 25 bp, Artificial
  probe
  misc_feature (1)..(25): SEQ ID NO: 886; WAN024G8E_at; Start 1613; Stop 1637
gttattcggagcacaatcacggcca

SEQ ID NO: 235204 - DNA, 25 bp, Artificial
  probe
  misc_feature (1)..(25): SEQ ID NO: 886; WAN024G8E_at; Start 1504; Stop 1528
gccagtgagattagtcaggaggcac

SEQ ID NO: 235205 - DNA, 25 bp, Artificial
  probe
  misc_feature (1)..(25): SEQ ID NO: 886; WAN024G8E_at; Start 718; Stop 742
gatgctccgtctcaaaaggatatgg

SEQ ID NO: 235206 - DNA, 25 bp, Artificial
  probe
  misc_feature (1)..(25): SEQ ID NO: 886; WAN024G8E_at; Start 1538; Stop 1562
tcatgcgtgctgttgagggagaacc

SEQ ID NO: 235207 - DNA, 25 bp, Artificial
  probe
  misc_feature (1)..(25): SEQ ID NO: 886; WAN024G8E_at; Start 2004; Stop 2028
gactcttcgtggagaaaaatcaggt

SEQ ID NO: 235208 - DNA, 25 bp, Artificial
  probe
  misc_feature (1)..(25): SEQ ID NO: 886; WAN024G8E_at; Start 1629; Stop 1653
tcacggccactatggactagctgct

SEQ ID NO: 235209 - DNA, 25 bp, Artificial
  probe
  misc_feature (1)..(25): SEQ ID NO: 886; WAN024G8E_at; Start 1726; Stop 1750
tacggccgttctaaggaaatagcag

SEQ ID NO: 235210 - DNA, 25 bp, Artificial
  probe
  misc_feature (1)..(25): SEQ ID NO: 886; WAN024G8E_at; Start 1590; Stop 1614
tcttcgctctatgcagcaggctcgt

SEQ ID NO: 235211 - DNA, 25 bp, Artificial
  probe
  misc_feature (1)..(25): SEQ ID NO: 886; WAN024G8E_at; Start 1227; Stop 1251
catgcgtgtgaaacgtggagctctc

SEQ ID NO: 235212 - DNA, 25 bp, Artificial
  probe
  misc_feature (1)..(25): SEQ ID NO: 886; WAN024G8E_at; Start 1052; Stop 1076
aacatggtcgtgtggtcaactatac

SEQ ID NO: 235213 - DNA, 25 bp, Artificial
  probe
  misc_feature (1)..(25): SEQ ID NO: 886; WAN024G8E_at; Start 2034; Stop 2058
tttccgagtgggtcagcagatccgt

SEQ ID NO: 235214 - DNA, 25 bp, Artificial
  probe
  misc_feature (1)..(25): SEQ ID NO: 886; WAN024G8E_at; Start 417; Stop 441
cgggcaaatcgttctggatcaggaa

SEQ ID NO: 235215 - DNA, 25 bp, Artificial
  probe
  misc_feature (1)..(25): SEQ ID NO: 886; WAN024G8E_at; Start 777; Stop 801
taccattgacggtgcggatgccaag

SEQ ID NO: 235216 - DNA, 25 bp, Artificial
  probe
  misc_feature (1)..(25): SEQ ID NO: 886; WAN024G8E_at; Start 824; Stop 848
tcaaggctctgaaaaatggcaatct

SEQ ID NO: 235217 - DNA, 25 bp, Artificial
  probe
  misc_feature (1)..(25): SEQ ID NO: 886; WAN024G8E_at; Start 63; Stop 87
tcaggctttgggaaaagacagttcc

SEQ ID NO: 235218 - DNA, 25 bp, Artificial
  probe
  misc_feature (1)..(25): SEQ ID NO: 886; WAN024G8E_at; Start 1304; Stop 1328
ttgatatcgttcttcggcagcgtgg

SEQ ID NO: 235219 - DNA, 25 bp, Artificial
  probe
  misc_feature (1)..(25): SEQ ID NO: 886; WAN024G8E_at; Start 938; Stop 962
tttacgtgacagaccgagtggtgcc

SEQ ID NO: 235220 - DNA, 25 bp, Artificial
  probe
  misc_feature (1)..(25): SEQ ID NO: 886; WAN024G8E_at; Start 907; Stop 931
gacaaggaagcccttaaccgtgcga

SEQ ID NO: 235221 - DNA, 25 bp, Artificial
  probe
  misc_feature (1)..(25): SEQ ID NO: 886; WAN024G8E_at; Start 1522; Stop 1546
gaggcacttcaagacatcatgcgtg

SEQ ID NO: 235222 - DNA, 25 bp, Artificial
  probe
  misc_feature (1)..(25): SEQ ID NO: 886; WAN024G8E_at; Start 1764; Stop 1788
agtgattccagagattgcgacccag

SEQ ID NO: 235223 - DNA, 25 bp, Artificial
  probe
  misc_feature (1)..(25): SEQ ID NO: 886; WAN024G8E_at; Start 2299; Stop 2323
gctaagaaaggagccaagcatggca

SEQ ID NO: 235224 - DNA, 25 bp, Artificial
  probe
  misc_feature (1)..(25): SEQ ID NO: 886; WAN024G8E_at; Start 336; Stop 360
gaaagtcgctgaccgcaataaggga

SEQ ID NO: 235225 - DNA, 25 bp, Artificial
  probe
  misc_feature (1)..(25): SEQ ID NO: 886; WAN024G8E_at; Start 704; Stop 728
cagaaagtgtgcctgatgctccgtc

SEQ ID NO: 235226 - DNA, 25 bp, Artificial
  probe
  misc_feature (1)..(25): SEQ ID NO: 6866; WAN024G8F_at; Start 34; Stop 58
gcaataacacggtcttctcccaaga

SEQ ID NO: 235227 - DNA, 25 bp, Artificial
  probe
  misc_feature (1)..(25): SEQ ID NO: 6866; WAN024G8F_at; Start 72; Stop 96
gcttgattttccaacgttaggacga

SEQ ID NO: 235228 - DNA, 25 bp, Artificial
  probe
  misc_feature (1)..(25): SEQ ID NO: 6866; WAN024G8F_at; Start 38; Stop 62
taacacggtcttctcccaagatagc

SEQ ID NO: 235229 - DNA, 25 bp, Artificial
  probe
  misc_feature (1)..(25): SEQ ID NO: 6866; WAN024G8F_at; Start 175; Stop 199
acatcccctgtaccgattccatgga

SEQ ID NO: 235230 - DNA, 25 bp, Artificial
  probe
  misc_feature (1)..(25): SEQ ID NO: 6866; WAN024G8F_at; Start 5; Stop 29
catcacgagttgttccagcaacagg

SEQ ID NO: 235231 - DNA, 25 bp, Artificial
  probe
  misc_feature (1)..(25): SEQ ID NO: 6866; WAN024G8F_at; Start 15; Stop 39
tgttccagcaacaggactagcaata

SEQ ID NO: 235232 - DNA, 25 bp, Artificial
  probe
  misc_feature (1)..(25): SEQ ID NO: 6866; WAN024G8F_at; Start 75; Stop 99
tgattttccaacgttaggacgacca

SEQ ID NO: 235233 - DNA, 25 bp, Artificial
  probe
  misc_feature (1)..(25): SEQ ID NO: 6866; WAN024G8F_at; Start 207; Stop 231
gataggcaatggttcacccaaaccg

SEQ ID NO: 235234 - DNA, 25 bp, Artificial
  probe
  misc_feature (1)..(25): SEQ ID NO: 6866; WAN024G8F_at; Start 49; Stop 73
tctcccaagatagcattgatcaagc

SEQ ID NO: 235235 - DNA, 25 bp, Artificial
  probe
  misc_feature (1)..(25): SEQ ID NO: 6866; WAN024G8F_at; Start 134; Stop 158
cctcatattcatttggaagattttc

SEQ ID NO: 235236 - DNA, 25 bp, Artificial
  probe
  misc_feature (1)..(25): SEQ ID NO: 6866; WAN024G8F_at; Start 183; Stop 207
tgtaccgattccatggacagatgag

SEQ ID NO: 235237 - DNA, 25 bp, Artificial
  probe
  misc_feature (1)..(25): SEQ ID NO: 6866; WAN024G8F_at; Start 84; Stop 108
aacgttaggacgaccaatcaagcta

SEQ ID NO: 235238 - DNA, 25 bp, Artificial
  probe
  misc_feature (1)..(25): SEQ ID NO: 6866; WAN024G8F_at; Start 125; Stop 149
gattttcttcctcatattcatttgg

SEQ ID NO: 235239 - DNA, 25 bp, Artificial
  probe
  misc_feature (1)..(25): SEQ ID NO: 6866; WAN024G8F_at; Start 44; Stop 68
ggtcttctcccaagatagcattgat

SEQ ID NO: 235240 - DNA, 25 bp, Artificial
  probe
  misc_feature (1)..(25): SEQ ID NO: 6866; WAN024G8F_at; Start 26; Stop 50
caggactagcaataacacggtcttc

SEQ ID NO: 235241 - DNA, 25 bp, Artificial
  probe
  misc_feature (1)..(25): SEQ ID NO: 6866; WAN024G8F_at; Start 143; Stop 167
catttggaagattttctacgatcgc

SEQ ID NO: 235242 - DNA, 25 bp, Artificial
  probe
  misc_feature (1)..(25): SEQ ID NO: 6866; WAN024G8F_at; Start 114; Stop 138
aatgacatctggattttcttcctca

SEQ ID NO: 235243 - DNA, 25 bp, Artificial
  probe
  misc_feature (1)..(25): SEQ ID NO: 6866; WAN024G8F_at; Start 89; Stop 113
taggacgaccaatcaagctaaactt

SEQ ID NO: 235244 - DNA, 25 bp, Artificial
  probe
  misc_feature (1)..(25): SEQ ID NO: 6866; WAN024G8F_at; Start 102; Stop 126
caagctaaacttaatgacatctgga

SEQ ID NO: 235245 - DNA, 25 bp, Artificial
  probe
  misc_feature (1)..(25): SEQ ID NO: 6866; WAN024G8F_at; Start 152; Stop 176
gattttctacgatcgcatctagcac

SEQ ID NO: 235246 - DNA, 25 bp, Artificial
  probe
  misc_feature (1)..(25): SEQ ID NO: 6866; WAN024G8F_at; Start 22; Stop 46
gcaacaggactagcaataacacggt

SEQ ID NO: 235247 - DNA, 25 bp, Artificial
  probe
  misc_feature (1)..(25): SEQ ID NO: 6866; WAN024G8F_at; Start 202; Stop 226
gatgagataggcaatggttcaccca

SEQ ID NO: 235248 - DNA, 25 bp, Artificial
  probe
  misc_feature (1)..(25): SEQ ID NO: 6866; WAN024G8F_at; Start 211; Stop 235
ggcaatggttcacccaaaccgagag

SEQ ID NO: 235249 - DNA, 25 bp, Artificial
  probe
  misc_feature (1)..(25): SEQ ID NO: 6866; WAN024G8F_at; Start 1; Stop 25
atggcatcacgagttgttccagcaa

SEQ ID NO: 235250 - DNA, 25 bp, Artificial
  probe
  misc_feature (1)..(25): SEQ ID NO: 6866; WAN024G8F_at; Start 216; Stop 240
tggttcacccaaaccgagagcatag

SEQ ID NO: 235251 - DNA, 25 bp, Artificial
  probe
  misc_feature (1)..(25): SEQ ID NO: 6866; WAN024G8F_at; Start 81; Stop 105
tccaacgttaggacgaccaatcaag

SEQ ID NO: 235252 - DNA, 25 bp, Artificial
  probe
  misc_feature (1)..(25): SEQ ID NO: 6866; WAN024G8F_at; Start 92; Stop 116
gacgaccaatcaagctaaacttaat

SEQ ID NO: 235253 - DNA, 25 bp, Artificial
  probe
  misc_feature (1)..(25): SEQ ID NO: 6866; WAN024G8F_at; Start 189; Stop 213
gattccatggacagatgagataggc

SEQ ID NO: 235254 - DNA, 25 bp, Artificial
  probe
  misc_feature (1)..(25): SEQ ID NO: 6866; WAN024G8F_at; Start 149; Stop 173
gaagattttctacgatcgcatctag

SEQ ID NO: 235255 - DNA, 25 bp, Artificial
  probe
  misc_feature (1)..(25): SEQ ID NO: 6866; WAN024G8F_at; Start 68; Stop 92
tcaagcttgattttccaacgttagg

SEQ ID NO: 235256 - DNA, 25 bp, Artificial
  probe
  misc_feature (1)..(25): SEQ ID NO: 6866; WAN024G8F_at; Start 53; Stop 77
ccaagatagcattgatcaagcttga

SEQ ID NO: 235257 - DNA, 25 bp, Artificial
  probe
  misc_feature (1)..(25): SEQ ID NO: 6866; WAN024G8F_at; Start 162; Stop 186
gatcgcatctagcacatcccctgta

SEQ ID NO: 235258 - DNA, 25 bp, Artificial
  probe
  misc_feature (1)..(25): SEQ ID NO: 6866; WAN024G8F_at; Start 193; Stop 217
ccatggacagatgagataggcaatg

SEQ ID NO: 235259 - DNA, 25 bp, Artificial
  probe
  misc_feature (1)..(25): SEQ ID NO: 6866; WAN024G8F_at; Start 11; Stop 35
gagttgttccagcaacaggactagc

SEQ ID NO: 235260 - DNA, 25 bp, Artificial
  probe
  misc_feature (1)..(25): SEQ ID NO: 4192; WAN024G8G_at; Start 246; Stop 270
tggagattcgctcaccagcgatccg

SEQ ID NO: 235261 - DNA, 25 bp, Artificial
  probe
  misc_feature (1)..(25): SEQ ID NO: 4192; WAN024G8G_at; Start 127; Stop 151
catgaaaggagcatcgacatcatca

SEQ ID NO: 235262 - DNA, 25 bp, Artificial
  probe
  misc_feature (1)..(25): SEQ ID NO: 4192; WAN024G8G_at; Start 120; Stop 144
tttgttccatgaaaggagcatcgac

SEQ ID NO: 235263 - DNA, 25 bp, Artificial
  probe
  misc_feature (1)..(25): SEQ ID NO: 4192; WAN024G8G_at; Start 76; Stop 100
gataacatctgcttcttccatggca

SEQ ID NO: 235264 - DNA, 25 bp, Artificial
  probe
  misc_feature (1)..(25): SEQ ID NO: 4192; WAN024G8G_at; Start 158; Stop 182
cctgtatcaatcatgctaaaagaac

SEQ ID NO: 235265 - DNA, 25 bp, Artificial
  probe
  misc_feature (1)..(25): SEQ ID NO: 4192; WAN024G8G_at; Start 130; Stop 154
gaaaggagcatcgacatcatcaatt

SEQ ID NO: 235266 - DNA, 25 bp, Artificial
  probe
  misc_feature (1)..(25): SEQ ID NO: 4192; WAN024G8G_at; Start 250; Stop 274
gattcgctcaccagcgatccgatta

SEQ ID NO: 235267 - DNA, 25 bp, Artificial
  probe
  misc_feature (1)..(25): SEQ ID NO: 4192; WAN024G8G_at; Start 97; Stop 121
ggcaatttctgcctggtgcttgatt

SEQ ID NO: 235268 - DNA, 25 bp, Artificial
  probe
  misc_feature (1)..(25): SEQ ID NO: 4192; WAN024G8G_at; Start 210; Stop 234
tacggtcacgtgtcactccttcgac

SEQ ID NO: 235269 - DNA, 25 bp, Artificial
  probe
  misc_feature (1)..(25): SEQ ID NO: 4192; WAN024G8G_at; Start 236; Stop 260
tcttctacaatggagattcgctcac

SEQ ID NO: 235270 - DNA, 25 bp, Artificial
  probe
  misc_feature (1)..(25): SEQ ID NO: 4192; WAN024G8G_at; Start 142; Stop 166
gacatcatcaattcctcctgtatca

SEQ ID NO: 235271 - DNA, 25 bp, Artificial
  probe
  misc_feature (1)..(25): SEQ ID NO: 4192; WAN024G8G_at; Start 202; Stop 226
tgcataaatacggtcacgtgtcact

SEQ ID NO: 235272 - DNA, 25 bp, Artificial
  probe
  misc_feature (1)..(25): SEQ ID NO: 4192; WAN024G8G_at; Start 104; Stop 128
tctgcctggtgcttgatttgttcca

SEQ ID NO: 235273 - DNA, 25 bp, Artificial
  probe
  misc_feature (1)..(25): SEQ ID NO: 4192; WAN024G8G_at; Start 94; Stop 118
catggcaatttctgcctggtgcttg

SEQ ID NO: 235274 - DNA, 25 bp, Artificial
  probe
  misc_feature (1)..(25): SEQ ID NO: 4192; WAN024G8G_at; Start 232; Stop 256
gacatcttctacaatggagattcgc

SEQ ID NO: 235275 - DNA, 25 bp, Artificial
  probe
  misc_feature (1)..(25): SEQ ID NO: 4192; WAN024G8G_at; Start 174; Stop 198
taaaagaacgattgagccactcacc

SEQ ID NO: 235276 - DNA, 25 bp, Artificial
  probe
  misc_feature (1)..(25): SEQ ID NO: 4192; WAN024G8G_at; Start 108; Stop 132
cctggtgcttgatttgttccatgaa

SEQ ID NO: 235277 - DNA, 25 bp, Artificial
  probe
  misc_feature (1)..(25): SEQ ID NO: 4192; WAN024G8G_at; Start 151; Stop 175
aattcctcctgtatcaatcatgcta

SEQ ID NO: 235278 - DNA, 25 bp, Artificial
  probe
  misc_feature (1)..(25): SEQ ID NO: 4192; WAN024G8G_at; Start 137; Stop 161
gcatcgacatcatcaattcctcctg

SEQ ID NO: 235279 - DNA, 25 bp, Artificial
  probe
  misc_feature (1)..(25): SEQ ID NO: 4192; WAN024G8G_at; Start 168; Stop 192
tcatgctaaaagaacgattgagcca

SEQ ID NO: 235280 - DNA, 25 bp, Artificial
  probe
  misc_feature (1)..(25): SEQ ID NO: 4192; WAN024G8G_at; Start 191; Stop 215
cactcacccgttgcataaatacggt

SEQ ID NO: 235281 - DNA, 25 bp, Artificial
  probe
  misc_feature (1)..(25): SEQ ID NO: 4192; WAN024G8G_at; Start 199; Stop 223
cgttgcataaatacggtcacgtgtc

SEQ ID NO: 235282 - DNA, 25 bp, Artificial
  probe
  misc_feature (1)..(25): SEQ ID NO: 4192; WAN024G8G_at; Start 124; Stop 148
ttccatgaaaggagcatcgacatca

SEQ ID NO: 235283 - DNA, 25 bp, Artificial
  probe
  misc_feature (1)..(25): SEQ ID NO: 4192; WAN024G8G_at; Start 195; Stop 219
cacccgttgcataaatacggtcacg

SEQ ID NO: 235284 - DNA, 25 bp, Artificial
  probe
  misc_feature (1)..(25): SEQ ID NO: 4192; WAN024G8G_at; Start 255; Stop 279
gctcaccagcgatccgattaaatag

SEQ ID NO: 235285 - DNA, 25 bp, Artificial
  probe
  misc_feature (1)..(25): SEQ ID NO: 4192; WAN024G8G_at; Start 227; Stop 251
ccttcgacatcttctacaatggaga

SEQ ID NO: 235286 - DNA, 25 bp, Artificial
  probe
  misc_feature (1)..(25): SEQ ID NO: 4192; WAN024G8G_at; Start 185; Stop 209
ttgagccactcacccgttgcataaa

SEQ ID NO: 235287 - DNA, 25 bp, Artificial
  probe
  misc_feature (1)..(25): SEQ ID NO: 4192; WAN024G8G_at; Start 183; Stop 207
gattgagccactcacccgttgcata

SEQ ID NO: 235288 - DNA, 25 bp, Artificial
  probe
  misc_feature (1)..(25): SEQ ID NO: 4192; WAN024G8G_at; Start 213; Stop 237
ggtcacgtgtcactccttcgacatc

SEQ ID NO: 235289 - DNA, 25 bp, Artificial
  probe
  misc_feature (1)..(25): SEQ ID NO: 4192; WAN024G8G_at; Start 85; Stop 109
tgcttcttccatggcaatttctgcc

SEQ ID NO: 235290 - DNA, 25 bp, Artificial
  probe
  misc_feature (1)..(25): SEQ ID NO: 4192; WAN024G8G_at; Start 241; Stop 265
tacaatggagattcgctcaccagcg

SEQ ID NO: 235291 - DNA, 25 bp, Artificial
  probe
  misc_feature (1)..(25): SEQ ID NO: 4192; WAN024G8G_at; Start 206; Stop 230
taaatacggtcacgtgtcactcctt

SEQ ID NO: 235292 - DNA, 25 bp, Artificial
  probe
  misc_feature (1)..(25): SEQ ID NO: 4192; WAN024G8G_at; Start 115; Stop 139
cttgatttgttccatgaaaggagca

SEQ ID NO: 235293 - DNA, 25 bp, Artificial
  probe
  misc_feature (1)..(25): SEQ ID NO: 4192; WAN024G8G_at; Start 179; Stop 203
gaacgattgagccactcacccgttg

SEQ ID NO: 235294 - DNA, 25 bp, Artificial
  probe
  misc_feature (1)..(25): SEQ ID NO: 2255; WAN024G8H_at; Start 126; Stop 150
ccacttcgcgaagggtactgtaggc

SEQ ID NO: 235295 - DNA, 25 bp, Artificial
  probe
  misc_feature (1)..(25): SEQ ID NO: 2255; WAN024G8H_at; Start 42; Stop 66
ccttggcagccttgagacgctcgat

SEQ ID NO: 235296 - DNA, 25 bp, Artificial
  probe
  misc_feature (1)..(25): SEQ ID NO: 2255; WAN024G8H_at; Start 47; Stop 71
gcagccttgagacgctcgataatca

SEQ ID NO: 235297 - DNA, 25 bp, Artificial
  probe
  misc_feature (1)..(25): SEQ ID NO: 2255; WAN024G8H_at; Start 255; Stop 279
tattgcgcgttgtctgcgccttgtc

SEQ ID NO: 235298 - DNA, 25 bp, Artificial
  probe
  misc_feature (1)..(25): SEQ ID NO: 2255; WAN024G8H_at; Start 16; Stop 40
tttattcaccaccaaaatcacagga

SEQ ID NO: 235299 - DNA, 25 bp, Artificial
  probe
  misc_feature (1)..(25): SEQ ID NO: 2255; WAN024G8H_at; Start 263; Stop 287
gttgtctgcgccttgtcactcatga

SEQ ID NO: 235300 - DNA, 25 bp, Artificial
  probe
  misc_feature (1)..(25): SEQ ID NO: 2255; WAN024G8H_at; Start 146; Stop 170
taggcagactcaaccatgaaatctc

SEQ ID NO: 235301 - DNA, 25 bp, Artificial
  probe
  misc_feature (1)..(25): SEQ ID NO: 2255; WAN024G8H_at; Start 105; Stop 129
gcaccatgaaaagaacagtgtccac

SEQ ID NO: 235302 - DNA, 25 bp, Artificial
  probe
  misc_feature (1)..(25): SEQ ID NO: 2255; WAN024G8H_at; Start 226; Stop 250
cttatcagtcgtgtaaattcccatg

SEQ ID NO: 235303 - DNA, 25 bp, Artificial
  probe
  misc_feature (1)..(25): SEQ ID NO: 2255; WAN024G8H_at; Start 239; Stop 263
taaattcccatgattttattgcgcg

SEQ ID NO: 235304 - DNA, 25 bp, Artificial
  probe
  misc_feature (1)..(25): SEQ ID NO: 2255; WAN024G8H_at; Start 247; Stop 271
catgattttattgcgcgttgtctgc

SEQ ID NO: 235305 - DNA, 25 bp, Artificial
  probe
  misc_feature (1)..(25): SEQ ID NO: 2255; WAN024G8H_at; Start 286; Stop 310
gatggcaatcttttgccccataacg

SEQ ID NO: 235306 - DNA, 25 bp, Artificial
  probe
  misc_feature (1)..(25): SEQ ID NO: 2255; WAN024G8H_at; Start 135; Stop 159
gaagggtactgtaggcagactcaac

SEQ ID NO: 235307 - DNA, 25 bp, Artificial
  probe
  misc_feature (1)..(25): SEQ ID NO: 2255; WAN024G8H_at; Start 195; Stop 219
tccctggtgtgtcgataaagacaat

SEQ ID NO: 235308 - DNA, 25 bp, Artificial
  probe
  misc_feature (1)..(25): SEQ ID NO: 2255; WAN024G8H_at; Start 269; Stop 293
tgcgccttgtcactcatgatggcaa

SEQ ID NO: 235309 - DNA, 25 bp, Artificial
  probe
  misc_feature (1)..(25): SEQ ID NO: 2255; WAN024G8H_at; Start 202; Stop 226
tgtgtcgataaagacaatttgctcc

SEQ ID NO: 235310 - DNA, 25 bp, Artificial
  probe
  misc_feature (1)..(25): SEQ ID NO: 2255; WAN024G8H_at; Start 130; Stop 154
ttcgcgaagggtactgtaggcagac

SEQ ID NO: 235311 - DNA, 25 bp, Artificial
  probe
  misc_feature (1)..(25): SEQ ID NO: 2255; WAN024G8H_at; Start 99; Stop 123
cagcaggcaccatgaaaagaacagt

SEQ ID NO: 235312 - DNA, 25 bp, Artificial
  probe
  misc_feature (1)..(25): SEQ ID NO: 2255; WAN024G8H_at; Start 90; Stop 114
gcgcttcatcagcaggcaccatgaa

SEQ ID NO: 235313 - DNA, 25 bp, Artificial
  probe
  misc_feature (1)..(25): SEQ ID NO: 2255; WAN024G8H_at; Start 214; Stop 238
gacaatttgctccttatcagtcgtg

SEQ ID NO: 235314 - DNA, 25 bp, Artificial
  probe
  misc_feature (1)..(25): SEQ ID NO: 2255; WAN024G8H_at; Start 3; Stop 27
ggaccttatcgattttattcaccac

SEQ ID NO: 235315 - DNA, 25 bp, Artificial
  probe
  misc_feature (1)..(25): SEQ ID NO: 2255; WAN024G8H_at; Start 276; Stop 300
tgtcactcatgatggcaatcttttg

SEQ ID NO: 235316 - DNA, 25 bp, Artificial
  probe
  misc_feature (1)..(25): SEQ ID NO: 2255; WAN024G8H_at; Start 111; Stop 135
tgaaaagaacagtgtccacttcgcg

SEQ ID NO: 235317 - DNA, 25 bp, Artificial
  probe
  misc_feature (1)..(25): SEQ ID NO: 2255; WAN024G8H_at; Start 117; Stop 141
gaacagtgtccacttcgcgaagggt

SEQ ID NO: 235318 - DNA, 25 bp, Artificial
  probe
  misc_feature (1)..(25): SEQ ID NO: 2255; WAN024G8H_at; Start 162; Stop 186
tgaaatctccgagagctgttttagg

SEQ ID NO: 235319 - DNA, 25 bp, Artificial
  probe
  misc_feature (1)..(25): SEQ ID NO: 2255; WAN024G8H_at; Start 155; Stop 179
tcaaccatgaaatctccgagagctg

SEQ ID NO: 235320 - DNA, 25 bp, Artificial
  probe
  misc_feature (1)..(25): SEQ ID NO: 2255; WAN024G8H_at; Start 189; Stop 213
tgtgaatccctggtgtgtcgataaa

SEQ ID NO: 235321 - DNA, 25 bp, Artificial
  probe
  misc_feature (1)..(25): SEQ ID NO: 2255; WAN024G8H_at; Start 83; Stop 107
ttaccacgcgcttcatcagcaggca

SEQ ID NO: 235322 - DNA, 25 bp, Artificial
  probe
  misc_feature (1)..(25): SEQ ID NO: 2255; WAN024G8H_at; Start 28; Stop 52
caaaatcacaggaaccttggcagcc

SEQ ID NO: 235323 - DNA, 25 bp, Artificial
  probe
  misc_feature (1)..(25): SEQ ID NO: 2255; WAN024G8H_at; Start 57; Stop 81
gacgctcgataatcatatcgtcccc

SEQ ID NO: 235324 - DNA, 25 bp, Artificial
  probe
  misc_feature (1)..(25): SEQ ID NO: 2255; WAN024G8H_at; Start 38; Stop 62
ggaaccttggcagccttgagacgct

SEQ ID NO: 235325 - DNA, 25 bp, Artificial
  probe
  misc_feature (1)..(25): SEQ ID NO: 2255; WAN024G8H_at; Start 141; Stop 165
tactgtaggcagactcaaccatgaa

SEQ ID NO: 235326 - DNA, 25 bp, Artificial
  probe
  misc_feature (1)..(25): SEQ ID NO: 2255; WAN024G8H_at; Start 33; Stop 57
tcacaggaaccttggcagccttgag

SEQ ID NO: 235327 - DNA, 25 bp, Artificial
  probe
  misc_feature (1)..(25): SEQ ID NO: 2255; WAN024G8H_at; Start 294; Stop 318
tcttttgccccataacgtgatttaa

SEQ ID NO: 235328 - DNA, 25 bp, Artificial
  probe
  misc_feature (1)..(25): SEQ ID NO: 1489; WAN024G8I_at; Start 406; Stop 430
gatgacttccgtaatcaaatggact

SEQ ID NO: 235329 - DNA, 25 bp, Artificial
  probe
  misc_feature (1)..(25): SEQ ID NO: 1489; WAN024G8I_at; Start 828; Stop 852
caaggtcaagaaaaactggcgcgat

SEQ ID NO: 235330 - DNA, 25 bp, Artificial
  probe
  misc_feature (1)..(25): SEQ ID NO: 1489; WAN024G8I_at; Start 142; Stop 166
tacacgactgataaggagcaaattg

SEQ ID NO: 235331 - DNA, 25 bp, Artificial
  probe
  misc_feature (1)..(25): SEQ ID NO: 1489; WAN024G8I_at; Start 785; Stop 809
tcgaactcatgctaggagacaaggt

SEQ ID NO: 235332 - DNA, 25 bp, Artificial
  probe
  misc_feature (1)..(25): SEQ ID NO: 1489; WAN024G8I_at; Start 312; Stop 336
gattatcgagcgtctcaaggctgcc

SEQ ID NO: 235333 - DNA, 25 bp, Artificial
  probe
  misc_feature (1)..(25): SEQ ID NO: 1489; WAN024G8I_at; Start 198; Stop 222
taaaacagctctcggagatttcatg

SEQ ID NO: 235334 - DNA, 25 bp, Artificial
  probe
  misc_feature (1)..(25): SEQ ID NO: 1489; WAN024G8I_at; Start 742; Stop 766
ggcgctatgcttaagaaaatcggta

SEQ ID NO: 235335 - DNA, 25 bp, Artificial
  probe
  misc_feature (1)..(25): SEQ ID NO: 1489; WAN024G8I_at; Start 613; Stop 637
gagattccgcattctgtagcagtag

SEQ ID NO: 235336 - DNA, 25 bp, Artificial
  probe
  misc_feature (1)..(25): SEQ ID NO: 1489; WAN024G8I_at; Start 21; Stop 45
tgtagccattttaggacgtcccaat

SEQ ID NO: 235337 - DNA, 25 bp, Artificial
  probe
  misc_feature (1)..(25): SEQ ID NO: 1489; WAN024G8I_at; Start 632; Stop 656
cagtagttgttgactctatgaaacg

SEQ ID NO: 235338 - DNA, 25 bp, Artificial
  probe
  misc_feature (1)..(25): SEQ ID NO: 1489; WAN024G8I_at; Start 355; Stop 379
gtggtgaataaaatcgataaggtcc

SEQ ID NO: 235339 - DNA, 25 bp, Artificial
  probe
  misc_feature (1)..(25): SEQ ID NO: 1489; WAN024G8I_at; Start 232; Stop 256
gcctacagtacccttcgcgaagtgg

SEQ ID NO: 235340 - DNA, 25 bp, Artificial
  probe
  misc_feature (1)..(25): SEQ ID NO: 1489; WAN024G8I_at; Start 167; Stop 191
tctttatcgacacaccagggattca

SEQ ID NO: 235341 - DNA, 25 bp, Artificial
  probe
  misc_feature (1)..(25): SEQ ID NO: 1489; WAN024G8I_at; Start 678; Stop 702
tcacatccgtgcaaccatcatggtc

SEQ ID NO: 235342 - DNA, 25 bp, Artificial
  probe
  misc_feature (1)..(25): SEQ ID NO: 1489; WAN024G8I_at; Start 464; Stop 488
gaaataacgtgtctcgtctagtgga

SEQ ID NO: 235343 - DNA, 25 bp, Artificial
  probe
  misc_feature (1)..(25): SEQ ID NO: 1489; WAN024G8I_at; Start 270; Stop 294
catggtgcctgctgatgaagcgcgt

SEQ ID NO: 235344 - DNA, 25 bp, Artificial
  probe
  misc_feature (1)..(25): SEQ ID NO: 1489; WAN024G8I_at; Start 116; Stop 140
caacgcgcaataaaatcatgggaat

SEQ ID NO: 235345 - DNA, 25 bp, Artificial
  probe
  misc_feature (1)..(25): SEQ ID NO: 1489; WAN024G8I_at; Start 800; Stop 824
gagacaaggtcttcctagaaacctg

SEQ ID NO: 235346 - DNA, 25 bp, Artificial
  probe
  misc_feature (1)..(25): SEQ ID NO: 1489; WAN024G8I_at; Start 575; Stop 599
aaatggttcgcgagaaagtcttgca

SEQ ID NO: 235347 - DNA, 25 bp, Artificial
  probe
  misc_feature (1)..(25): SEQ ID NO: 1489; WAN024G8I_at; Start 514; Stop 538
ggtttccaatatttcccgtctgatc

SEQ ID NO: 235348 - DNA, 25 bp, Artificial
  probe
  misc_feature (1)..(25): SEQ ID NO: 1489; WAN024G8I_at; Start 385; Stop 409
gaccagctcttgtctcagattgatg

SEQ ID NO: 235349 - DNA, 25 bp, Artificial
  probe
  misc_feature (1)..(25): SEQ ID NO: 1489; WAN024G8I_at; Start 728; Stop 752
tcatcggtaaaggtggcgctatgct

SEQ ID NO: 235350 - DNA, 25 bp, Artificial
  probe
  misc_feature (1)..(25): SEQ ID NO: 1489; WAN024G8I_at; Start 845; Stop 869
ggcgcgataaaaagctagatttggc

SEQ ID NO: 235351 - DNA, 25 bp, Artificial
  probe
  misc_feature (1)..(25): SEQ ID NO: 1489; WAN024G8I_at; Start 713; Stop 737
gccaaaaagggattatcatcggtaa

SEQ ID NO: 235352 - DNA, 25 bp, Artificial
  probe
  misc_feature (1)..(25): SEQ ID NO: 1489; WAN024G8I_at; Start 664; Stop 688
gagacagacaaggttcacatccgtg

SEQ ID NO: 235353 - DNA, 25 bp, Artificial
  probe
  misc_feature (1)..(25): SEQ ID NO: 1489; WAN024G8I_at; Start 693; Stop 717
catcatggtcgagcgcgatagccaa

SEQ ID NO: 235354 - DNA, 25 bp, Artificial
  probe
  misc_feature (1)..(25): SEQ ID NO: 1489; WAN024G8I_at; Start 648; Stop 672
tatgaaacgagacgaagagacagac

SEQ ID NO: 235355 - DNA, 25 bp, Artificial
  probe
  misc_feature (1)..(25): SEQ ID NO: 1489; WAN024G8I_at; Start 452; Stop 476
cagcccttcagggaaataacgtgtc

SEQ ID NO: 235356 - DNA, 25 bp, Artificial
  probe
  misc_feature (1)..(25): SEQ ID NO: 1489; WAN024G8I_at; Start 3; Stop 27
gacttttaaatcaggctttgtagcc

SEQ ID NO: 235357 - DNA, 25 bp, Artificial
  probe
  misc_feature (1)..(25): SEQ ID NO: 1489; WAN024G8I_at; Start 771; Stop 795
ggcccgtcgtgatatcgaactcatg

SEQ ID NO: 235358 - DNA, 25 bp, Artificial
  probe
  misc_feature (1)..(25): SEQ ID NO: 1489; WAN024G8I_at; Start 214; Stop 238
gatttcatggttgagtctgcctaca

SEQ ID NO: 235359 - DNA, 25 bp, Artificial
  probe
  misc_feature (1)..(25): SEQ ID NO: 1489; WAN024G8I_at; Start 815; Stop 839
tagaaacctgggtcaaggtcaagaa

SEQ ID NO: 235360 - DNA, 25 bp, Artificial
  probe
  misc_feature (1)..(25): SEQ ID NO: 1489; WAN024G8I_at; Start 327; Stop 351
caaggctgccaaggttcctgtgatt

SEQ ID NO: 235361 - DNA, 25 bp, Artificial
  probe
  misc_feature (1)..(25): SEQ ID NO: 1489; WAN024G8I_at; Start 370; Stop 394
gataaggtccatccagaccagctct

SEQ ID NO: 235362 - DNA, 25 bp, Artificial
  probe
  misc_feature (1)..(25): SEQ ID NO: 2457; WAN024G8J_at; Start 638; Stop 662
ttgatacccactttacagatacaga

SEQ ID NO: 235363 - DNA, 25 bp, Artificial
  probe
  misc_feature (1)..(25): SEQ ID NO: 2457; WAN024G8J_at; Start 1112; Stop 1136
caacaccgacagacaaaggaaaacg

SEQ ID NO: 235364 - DNA, 25 bp, Artificial
  probe
  misc_feature (1)..(25): SEQ ID NO: 2457; WAN024G8J_at; Start 1274; Stop 1298
gaacaccgattcatctcatcgcaag

SEQ ID NO: 235365 - DNA, 25 bp, Artificial
  probe
  misc_feature (1)..(25): SEQ ID NO: 2457; WAN024G8J_at; Start 1139; Stop 1163
tcaagattttctatgcgacccaagt

SEQ ID NO: 235366 - DNA, 25 bp, Artificial
  probe
  misc_feature (1)..(25): SEQ ID NO: 2457; WAN024G8J_at; Start 83; Stop 107
tctccattgtagaagatgtcgaagg

SEQ ID NO: 235367 - DNA, 25 bp, Artificial
  probe
  misc_feature (1)..(25): SEQ ID NO: 2457; WAN024G8J_at; Start 1317; Stop 1341
tagaatctggaatgacagttccgga

SEQ ID NO: 235368 - DNA, 25 bp, Artificial
  probe
  misc_feature (1)..(25): SEQ ID NO: 2457; WAN024G8J_at; Start 653; Stop 677
cagatacagatggtcaagagtttac

SEQ ID NO: 235369 - DNA, 25 bp, Artificial
  probe
  misc_feature (1)..(25): SEQ ID NO: 2457; WAN024G8J_at; Start 33; Stop 57
tcccaatgttgggaaatcaacccta

SEQ ID NO: 235370 - DNA, 25 bp, Artificial
  probe
  misc_feature (1)..(25): SEQ ID NO: 2457; WAN024G8J_at; Start 997; Stop 1021
aagcaacgtctccacaaacttcctg

SEQ ID NO: 235371 - DNA, 25 bp, Artificial
  probe
  misc_feature (1)..(25): SEQ ID NO: 2457; WAN024G8J_at; Start 1150; Stop 1174
tatgcgacccaagtggcaaccaaac

SEQ ID NO: 235372 - DNA, 25 bp, Artificial
  probe
  misc_feature (1)..(25): SEQ ID NO: 2457; WAN024G8J_at; Start 193; Stop 217
gatgctcctttcatggaacaaatca

SEQ ID NO: 235373 - DNA, 25 bp, Artificial
  probe
  misc_feature (1)..(25): SEQ ID NO: 2457; WAN024G8J_at; Start 608; Stop 632
gtcctgttgctggaacaactcgtga

SEQ ID NO: 235374 - DNA, 25 bp, Artificial
  probe
  misc_feature (1)..(25): SEQ ID NO: 2457; WAN024G8J_at; Start 670; Stop 694
gagtttaccatgattgatacggctg

SEQ ID NO: 235375 - DNA, 25 bp, Artificial
  probe
  misc_feature (1)..(25): SEQ ID NO: 2457; WAN024G8J_at; Start 227; Stop 251
cagaaattgccatggaagaagcaga

SEQ ID NO: 235376 - DNA, 25 bp, Artificial
  probe
  misc_feature (1)..(25): SEQ ID NO: 2457; WAN024G8J_at; Start 752; Stop 776
ccatgcgtgctattgaccgttcaga

SEQ ID NO: 235377 - DNA, 25 bp, Artificial
  probe
  misc_feature (1)..(25): SEQ ID NO: 2457; WAN024G8J_at; Start 889; Stop 913
gatacgcttgaaaaagataaccaca

SEQ ID NO: 235378 - DNA, 25 bp, Artificial
  probe
  misc_feature (1)..(25): SEQ ID NO: 2457; WAN024G8J_at; Start 207; Stop 231
ggaacaaatcaagcaccaggcagaa

SEQ ID NO: 235379 - DNA, 25 bp, Artificial
  probe
  misc_feature (1)..(25): SEQ ID NO: 2457; WAN024G8J_at; Start 936; Stop 960
tatccgtgagcagttccaatacctg

SEQ ID NO: 235380 - DNA, 25 bp, Artificial
  probe
  misc_feature (1)..(25): SEQ ID NO: 2457; WAN024G8J_at; Start 1238; Stop 1262
tggaaaatcaaatccgcaaggcctt

SEQ ID NO: 235381 - DNA, 25 bp, Artificial
  probe
  misc_feature (1)..(25): SEQ ID NO: 2457; WAN024G8J_at; Start 689; Stop 713
cggctggtatgcgtaagtctggtaa

SEQ ID NO: 235382 - DNA, 25 bp, Artificial
  probe
  misc_feature (1)..(25): SEQ ID NO: 2457; WAN024G8J_at; Start 56; Stop 80
tatttaatcggatcgctggtgagcg

SEQ ID NO: 235383 - DNA, 25 bp, Artificial
  probe
  misc_feature (1)..(25): SEQ ID NO: 2457; WAN024G8J_at; Start 69; Stop 93
cgctggtgagcgaatctccattgta

SEQ ID NO: 235384 - DNA, 25 bp, Artificial
  probe
  misc_feature (1)..(25): SEQ ID NO: 2457; WAN024G8J_at; Start 872; Stop 896
tcgtggtcaacaagtgggatacgct

SEQ ID NO: 235385 - DNA, 25 bp, Artificial
  probe
  misc_feature (1)..(25): SEQ ID NO: 2457; WAN024G8J_at; Start 1050; Stop 1074
aaatacacgtattccatcagctgtc

SEQ ID NO: 235386 - DNA, 25 bp, Artificial
  probe
  misc_feature (1)..(25): SEQ ID NO: 2457; WAN024G8J_at; Start 11; Stop 35
caactattgccattgtaggacgtcc

SEQ ID NO: 235387 - DNA, 25 bp, Artificial
  probe
  misc_feature (1)..(25): SEQ ID NO: 2457; WAN024G8J_at; Start 964; Stop 988
tacgcaccgattatctttgtatcag

SEQ ID NO: 235388 - DNA, 25 bp, Artificial
  probe
  misc_feature (1)..(25): SEQ ID NO: 2457; WAN024G8J_at; Start 904; Stop 928
gataaccacactatgaaaaactggg

SEQ ID NO: 235389 - DNA, 25 bp, Artificial
  probe
  misc_feature (1)..(25): SEQ ID NO: 2457; WAN024G8J_at; Start 1081; Stop 1105
gatgtcatcatggatgccattgcca

SEQ ID NO: 235390 - DNA, 25 bp, Artificial
  probe
  misc_feature (1)..(25): SEQ ID NO: 2457; WAN024G8J_at; Start 322; Stop 346
tataagacccacaaaccagttatcc

SEQ ID NO: 235391 - DNA, 25 bp, Artificial
  probe
  misc_feature (1)..(25): SEQ ID NO: 2457; WAN024G8J_at; Start 922; Stop 946
aactgggaagaagatatccgtgagc

SEQ ID NO: 235392 - DNA, 25 bp, Artificial
  probe
  misc_feature (1)..(25): SEQ ID NO: 2457; WAN024G8J_at; Start 1033; Stop 1057
caaatcagcgaaagtcaaaatacac

SEQ ID NO: 235393 - DNA, 25 bp, Artificial
  probe
  misc_feature (1)..(25): SEQ ID NO: 2457; WAN024G8J_at; Start 981; Stop 1005
tgtatcagctttaaccaagcaacgt

SEQ ID NO: 235394 - DNA, 25 bp, Artificial
  probe
  misc_feature (1)..(25): SEQ ID NO: 2457; WAN024G8J_at; Start 1066; Stop 1090
tcagctgtcttgaacgatgtcatca

SEQ ID NO: 235395 - DNA, 25 bp, Artificial
  probe
  misc_feature (1)..(25): SEQ ID NO: 2457; WAN024G8J_at; Start 858; Stop 882
taaagggatgattatcgtggtcaac

SEQ ID NO: 235396 - DNA, 25 bp, Artificial
  probe
  misc_feature (1)..(25): SEQ ID NO: 4323; WAN024G8K_at; Start 282; Stop 306
gttcaaaaggctgattgattttctg

SEQ ID NO: 235397 - DNA, 25 bp, Artificial
  probe
  misc_feature (1)..(25): SEQ ID NO: 4323; WAN024G8K_at; Start 74; Stop 98
atttccacaatacggtcattttcca

SEQ ID NO: 235398 - DNA, 25 bp, Artificial
  probe
  misc_feature (1)..(25): SEQ ID NO: 4323; WAN024G8K_at; Start 98; Stop 122
acttgctcaatcgactcaatcaggg

SEQ ID NO: 235399 - DNA, 25 bp, Artificial
  probe
  misc_feature (1)..(25): SEQ ID NO: 4323; WAN024G8K_at; Start 82; Stop 106
aatacggtcattttccacttgctca

SEQ ID NO: 235400 - DNA, 25 bp, Artificial
  probe
  misc_feature (1)..(25): SEQ ID NO: 4323; WAN024G8K_at; Start 300; Stop 324
ttttctggatgcgaccattcactaa

SEQ ID NO: 235401 - DNA, 25 bp, Artificial
  probe
  misc_feature (1)..(25): SEQ ID NO: 4323; WAN024G8K_at; Start 119; Stop 143
agggccccctgcaaatactttctca

SEQ ID NO: 235402 - DNA, 25 bp, Artificial
  probe
  misc_feature (1)..(25): SEQ ID NO: 4323; WAN024G8K_at; Start 134; Stop 158
tactttctcaaaaccatgataaagg

SEQ ID NO: 235403 - DNA, 25 bp, Artificial
  probe
  misc_feature (1)..(25): SEQ ID NO: 4323; WAN024G8K_at; Start 208; Stop 232
tccaaaaactggatgggcagaaagg

SEQ ID NO: 235404 - DNA, 25 bp, Artificial
  probe
  misc_feature (1)..(25): SEQ ID NO: 4323; WAN024G8K_at; Start 196; Stop 220
cagctgaatgcgtccaaaaactgga

SEQ ID NO: 235405 - DNA, 25 bp, Artificial
  probe
  misc_feature (1)..(25): SEQ ID NO: 4323; WAN024G8K_at; Start 224; Stop 248
gcagaaaggagcaggcgatggcttt

SEQ ID NO: 235406 - DNA, 25 bp, Artificial
  probe
  misc_feature (1)..(25): SEQ ID NO: 4323; WAN024G8K_at; Start 37; Stop 61
gatatggtctccaatctcgttttta

SEQ ID NO: 235407 - DNA, 25 bp, Artificial
  probe
  misc_feature (1)..(25): SEQ ID NO: 4323; WAN024G8K_at; Start 201; Stop 225
gaatgcgtccaaaaactggatgggc

SEQ ID NO: 235408 - DNA, 25 bp, Artificial
  probe
  misc_feature (1)..(25): SEQ ID NO: 4323; WAN024G8K_at; Start 164; Stop 188
ggttgagctggattttcaaaagtcg

SEQ ID NO: 235409 - DNA, 25 bp, Artificial
  probe
  misc_feature (1)..(25): SEQ ID NO: 4323; WAN024G8K_at; Start 28; Stop 52
ggtagcctggatatggtctccaatc

SEQ ID NO: 235410 - DNA, 25 bp, Artificial
  probe
  misc_feature (1)..(25): SEQ ID NO: 4323; WAN024G8K_at; Start 297; Stop 321
tgattttctggatgcgaccattcac

SEQ ID NO: 235411 - DNA, 25 bp, Artificial
  probe
  misc_feature (1)..(25): SEQ ID NO: 4323; WAN024G8K_at; Start 24; Stop 48
tcaaggtagcctggatatggtctcc

SEQ ID NO: 235412 - DNA, 25 bp, Artificial
  probe
  misc_feature (1)..(25): SEQ ID NO: 4323; WAN024G8K_at; Start 157; Stop 181
ggtagaaggttgagctggattttca

SEQ ID NO: 235413 - DNA, 25 bp, Artificial
  probe
  misc_feature (1)..(25): SEQ ID NO: 4323; WAN024G8K_at; Start 193; Stop 217
ggtcagctgaatgcgtccaaaaact

SEQ ID NO: 235414 - DNA, 25 bp, Artificial
  probe
  misc_feature (1)..(25): SEQ ID NO: 4323; WAN024G8K_at; Start 14; Stop 38
atttcgataatcaaggtagcctgga

SEQ ID NO: 235415 - DNA, 25 bp, Artificial
  probe
  misc_feature (1)..(25): SEQ ID NO: 4323; WAN024G8K_at; Start 251; Stop 275
cgattgctgcggatttgcaagacca

SEQ ID NO: 235416 - DNA, 25 bp, Artificial
  probe
  misc_feature (1)..(25): SEQ ID NO: 4323; WAN024G8K_at; Start 101; Stop 125
tgctcaatcgactcaatcagggccc

SEQ ID NO: 235417 - DNA, 25 bp, Artificial
  probe
  misc_feature (1)..(25): SEQ ID NO: 4323; WAN024G8K_at; Start 271; Stop 295
gaccaactcttgttcaaaaggctga

SEQ ID NO: 235418 - DNA, 25 bp, Artificial
  probe
  misc_feature (1)..(25): SEQ ID NO: 4323; WAN024G8K_at; Start 180; Stop 204
caaaagtcgtttgggtcagctgaat

SEQ ID NO: 235419 - DNA, 25 bp, Artificial
  probe
  misc_feature (1)..(25): SEQ ID NO: 4323; WAN024G8K_at; Start 1; Stop 25
gtgtttccccataatttcgataatc

SEQ ID NO: 235420 - DNA, 25 bp, Artificial
  probe
  misc_feature (1)..(25): SEQ ID NO: 4323; WAN024G8K_at; Start 241; Stop 265
atggctttggcgattgctgcggatt

SEQ ID NO: 235421 - DNA, 25 bp, Artificial
  probe
  misc_feature (1)..(25): SEQ ID NO: 4323; WAN024G8K_at; Start 48; Stop 72
caatctcgtttttattggaaactgt

SEQ ID NO: 235422 - DNA, 25 bp, Artificial
  probe
  misc_feature (1)..(25): SEQ ID NO: 4323; WAN024G8K_at; Start 147; Stop 171
ccatgataaaggtagaaggttgagc

SEQ ID NO: 235423 - DNA, 25 bp, Artificial
  probe
  misc_feature (1)..(25): SEQ ID NO: 4323; WAN024G8K_at; Start 274; Stop 298
caactcttgttcaaaaggctgattg

SEQ ID NO: 235424 - DNA, 25 bp, Artificial
  probe
  misc_feature (1)..(25): SEQ ID NO: 4323; WAN024G8K_at; Start 87; Stop 111
ggtcattttccacttgctcaatcga

SEQ ID NO: 235425 - DNA, 25 bp, Artificial
  probe
  misc_feature (1)..(25): SEQ ID NO: 4323; WAN024G8K_at; Start 186; Stop 210
tcgtttgggtcagctgaatgcgtcc

SEQ ID NO: 235426 - DNA, 25 bp, Artificial
  probe
  misc_feature (1)..(25): SEQ ID NO: 4323; WAN024G8K_at; Start 259; Stop 283
gcggatttgcaagaccaactcttgt

SEQ ID NO: 235427 - DNA, 25 bp, Artificial
  probe
  misc_feature (1)..(25): SEQ ID NO: 4323; WAN024G8K_at; Start 255; Stop 279
tgctgcggatttgcaagaccaactc

SEQ ID NO: 235428 - DNA, 25 bp, Artificial
  probe
  misc_feature (1)..(25): SEQ ID NO: 4323; WAN024G8K_at; Start 32; Stop 56
gcctggatatggtctccaatctcgt

SEQ ID NO: 235429 - DNA, 25 bp, Artificial
  probe
  misc_feature (1)..(25): SEQ ID NO: 4323; WAN024G8K_at; Start 210; Stop 234
caaaaactggatgggcagaaaggag

SEQ ID NO: 235430 - DNA, 25 bp, Artificial
  probe
  misc_feature (1)..(25): SEQ ID NO: 5750; WAN024G8L_at; Start 108; Stop 132
tagtggctttggtttcttcaatcaa

SEQ ID NO: 235431 - DNA, 25 bp, Artificial
  probe
  misc_feature (1)..(25): SEQ ID NO: 5750; WAN024G8L_at; Start 76; Stop 100
gaggacggtttctacactttccaga

SEQ ID NO: 235432 - DNA, 25 bp, Artificial
  probe
  misc_feature (1)..(25): SEQ ID NO: 5750; WAN024G8L_at; Start 97; Stop 121
cagatagagaatagtggctttggtt

SEQ ID NO: 235433 - DNA, 25 bp, Artificial
  probe
  misc_feature (1)..(25): SEQ ID NO: 5750; WAN024G8L_at; Start 234; Stop 258
taggttggttggtatagtagttgtc

SEQ ID NO: 235434 - DNA, 25 bp, Artificial
  probe
  misc_feature (1)..(25): SEQ ID NO: 5750; WAN024G8L_at; Start 118; Stop 142
ggtttcttcaatcaaatcagtcaag

SEQ ID NO: 235435 - DNA, 25 bp, Artificial
  probe
  misc_feature (1)..(25): SEQ ID NO: 5750; WAN024G8L_at; Start 43; Stop 67
gatttcagcgatttcttccagtcca

SEQ ID NO: 235436 - DNA, 25 bp, Artificial
  probe
  misc_feature (1)..(25): SEQ ID NO: 5750; WAN024G8L_at; Start 7; Stop 31
tctgcggataaaacctgtttgaatc

SEQ ID NO: 235437 - DNA, 25 bp, Artificial
  probe
  misc_feature (1)..(25): SEQ ID NO: 5750; WAN024G8L_at; Start 177; Stop 201
taaaatagcgttgggcattctggtt

SEQ ID NO: 235438 - DNA, 25 bp, Artificial
  probe
  misc_feature (1)..(25): SEQ ID NO: 5750; WAN024G8L_at; Start 31; Stop 55
caattcttcacggatttcagcgatt

SEQ ID NO: 235439 - DNA, 25 bp, Artificial
  probe
  misc_feature (1)..(25): SEQ ID NO: 5750; WAN024G8L_at; Start 82; Stop 106
ggtttctacactttccagatagaga

SEQ ID NO: 235440 - DNA, 25 bp, Artificial
  probe
  misc_feature (1)..(25): SEQ ID NO: 5750; WAN024G8L_at; Start 20; Stop 44
cctgtttgaatcaattcttcacgga

SEQ ID NO: 235441 - DNA, 25 bp, Artificial
  probe
  misc_feature (1)..(25): SEQ ID NO: 5750; WAN024G8L_at; Start 150; Stop 174
cagcttctttgagtttctgataccg

SEQ ID NO: 235442 - DNA, 25 bp, Artificial
  probe
  misc_feature (1)..(25): SEQ ID NO: 5750; WAN024G8L_at; Start 223; Stop 247
cgcaatcatgataggttggttggta

SEQ ID NO: 235443 - DNA, 25 bp, Artificial
  probe
  misc_feature (1)..(25): SEQ ID NO: 5750; WAN024G8L_at; Start 38; Stop 62
tcacggatttcagcgatttcttcca

SEQ ID NO: 235444 - DNA, 25 bp, Artificial
  probe
  misc_feature (1)..(25): SEQ ID NO: 5750; WAN024G8L_at; Start 50; Stop 74
gcgatttcttccagtccagcttggt

SEQ ID NO: 235445 - DNA, 25 bp, Artificial
  probe
  misc_feature (1)..(25): SEQ ID NO: 5750; WAN024G8L_at; Start 65; Stop 89
ccagcttggttgaggacggtttcta

SEQ ID NO: 235446 - DNA, 25 bp, Artificial
  probe
  misc_feature (1)..(25): SEQ ID NO: 5750; WAN024G8L_at; Start 165; Stop 189
tctgataccgtttaaaatagcgttg

SEQ ID NO: 235447 - DNA, 25 bp, Artificial
  probe
  misc_feature (1)..(25): SEQ ID NO: 5750; WAN024G8L_at; Start 210; Stop 234
gagccttatcaagcgcaatcatgat

SEQ ID NO: 235448 - DNA, 25 bp, Artificial
  probe
  misc_feature (1)..(25): SEQ ID NO: 5750; WAN024G8L_at; Start 69; Stop 93
cttggttgaggacggtttctacact

SEQ ID NO: 235449 - DNA, 25 bp, Artificial
  probe
  misc_feature (1)..(25): SEQ ID NO: 5750; WAN024G8L_at; Start 28; Stop 52
aatcaattcttcacggatttcagcg

SEQ ID NO: 235450 - DNA, 25 bp, Artificial
  probe
  misc_feature (1)..(25): SEQ ID NO: 5750; WAN024G8L_at; Start 79; Stop 103
gacggtttctacactttccagatag

SEQ ID NO: 235451 - DNA, 25 bp, Artificial
  probe
  misc_feature (1)..(25): SEQ ID NO: 5750; WAN024G8L_at; Start 56; Stop 80
tcttccagtccagcttggttgagga

SEQ ID NO: 235452 - DNA, 25 bp, Artificial
  probe
  misc_feature (1)..(25): SEQ ID NO: 5750; WAN024G8L_at; Start 218; Stop 242
tcaagcgcaatcatgataggttggt

SEQ ID NO: 235453 - DNA, 25 bp, Artificial
  probe
  misc_feature (1)..(25): SEQ ID NO: 5750; WAN024G8L_at; Start 192; Stop 216
cattctggttgggagtcagagcctt

SEQ ID NO: 235454 - DNA, 25 bp, Artificial
  probe
  misc_feature (1)..(25): SEQ ID NO: 5750; WAN024G8L_at; Start 4; Stop 28
tcttctgcggataaaacctgtttga

SEQ ID NO: 235455 - DNA, 25 bp, Artificial
  probe
  misc_feature (1)..(25): SEQ ID NO: 5750; WAN024G8L_at; Start 139; Stop 163
caagtatttgacagcttctttgagt

SEQ ID NO: 235456 - DNA, 25 bp, Artificial
  probe
  misc_feature (1)..(25): SEQ ID NO: 5750; WAN024G8L_at; Start 206; Stop 230
gtcagagccttatcaagcgcaatca

SEQ ID NO: 235457 - DNA, 25 bp, Artificial
  probe
  misc_feature (1)..(25): SEQ ID NO: 5750; WAN024G8L_at; Start 92; Stop 116
ctttccagatagagaatagtggctt

SEQ ID NO: 235458 - DNA, 25 bp, Artificial
  probe
  misc_feature (1)..(25): SEQ ID NO: 5750; WAN024G8L_at; Start 59; Stop 83
tccagtccagcttggttgaggacgg

SEQ ID NO: 235459 - DNA, 25 bp, Artificial
  probe
  misc_feature (1)..(25): SEQ ID NO: 5750; WAN024G8L_at; Start 175; Stop 199
tttaaaatagcgttgggcattctgg

SEQ ID NO: 235460 - DNA, 25 bp, Artificial
  probe
  misc_feature (1)..(25): SEQ ID NO: 5750; WAN024G8L_at; Start 1; Stop 25
ttgtcttctgcggataaaacctgtt

SEQ ID NO: 235461 - DNA, 25 bp, Artificial
  probe
  misc_feature (1)..(25): SEQ ID NO: 5750; WAN024G8L_at; Start 203; Stop 227
ggagtcagagccttatcaagcgcaa

SEQ ID NO: 235462 - DNA, 25 bp, Artificial
  probe
  misc_feature (1)..(25): SEQ ID NO: 5750; WAN024G8L_at; Start 130; Stop 154
caaatcagtcaagtatttgacagct

SEQ ID NO: 235463 - DNA, 25 bp, Artificial
  probe
  misc_feature (1)..(25): SEQ ID NO: 5750; WAN024G8L_at; Start 197; Stop 221
tggttgggagtcagagccttatcaa

SEQ ID NO: 235464 - DNA, 25 bp, Artificial
  probe
  misc_feature (1)..(25): SEQ ID NO: 4264; WAN024G8M_at; Start 135; Stop 159
cctgatttgcaaaaggaactggact

SEQ ID NO: 235465 - DNA, 25 bp, Artificial
  probe
  misc_feature (1)..(25): SEQ ID NO: 4264; WAN024G8M_at; Start 268; Stop 292
tcccagaccttgaaagaggctttga

SEQ ID NO: 235466 - DNA, 25 bp, Artificial
  probe
  misc_feature (1)..(25): SEQ ID NO: 4264; WAN024G8M_at; Start 168; Stop 192
tctcagtcaagcatggcttggtttc

SEQ ID NO: 235467 - DNA, 25 bp, Artificial
  probe
  misc_feature (1)..(25): SEQ ID NO: 4264; WAN024G8M_at; Start 271; Stop 295
cagaccttgaaagaggctttgaaga

SEQ ID NO: 235468 - DNA, 25 bp, Artificial
  probe
  misc_feature (1)..(25): SEQ ID NO: 4264; WAN024G8M_at; Start 160; Stop 184
gaaggaagtctcagtcaagcatggc

SEQ ID NO: 235469 - DNA, 25 bp, Artificial
  probe
  misc_feature (1)..(25): SEQ ID NO: 4264; WAN024G8M_at; Start 15; Stop 39
gaagttcattttcaacacgacgaat

SEQ ID NO: 235470 - DNA, 25 bp, Artificial
  probe
  misc_feature (1)..(25): SEQ ID NO: 4264; WAN024G8M_at; Start 263; Stop 287
tcgcgtcccagaccttgaaagaggc

SEQ ID NO: 235471 - DNA, 25 bp, Artificial
  probe
  misc_feature (1)..(25): SEQ ID NO: 4264; WAN024G8M_at; Start 12; Stop 36
tctgaagttcattttcaacacgacg

SEQ ID NO: 235472 - DNA, 25 bp, Artificial
  probe
  misc_feature (1)..(25): SEQ ID NO: 4264; WAN024G8M_at; Start 144; Stop 168
caaaaggaactggactgaaggaagt

SEQ ID NO: 235473 - DNA, 25 bp, Artificial
  probe
  misc_feature (1)..(25): SEQ ID NO: 4264; WAN024G8M_at; Start 92; Stop 116
taggtgtccaacaaatcagaaagat

SEQ ID NO: 235474 - DNA, 25 bp, Artificial
  probe
  misc_feature (1)..(25): SEQ ID NO: 4264; WAN024G8M_at; Start 248; Stop 272
aattcatttgccgtatcgcgtccca

SEQ ID NO: 235475 - DNA, 25 bp, Artificial
  probe
  misc_feature (1)..(25): SEQ ID NO: 4264; WAN024G8M_at; Start 21; Stop 45
cattttcaacacgacgaatcagttc

SEQ ID NO: 235476 - DNA, 25 bp, Artificial
  probe
  misc_feature (1)..(25): SEQ ID NO: 4264; WAN024G8M_at; Start 179; Stop 203
catggcttggtttcttgattgaaaa

SEQ ID NO: 235477 - DNA, 25 bp, Artificial
  probe
  misc_feature (1)..(25): SEQ ID NO: 4264; WAN024G8M_at; Start 26; Stop 50
tcaacacgacgaatcagttcactgg

SEQ ID NO: 235478 - DNA, 25 bp, Artificial
  probe
  misc_feature (1)..(25): SEQ ID NO: 4264; WAN024G8M_at; Start 89; Stop 113
tagtaggtgtccaacaaatcagaaa

SEQ ID NO: 235479 - DNA, 25 bp, Artificial
  probe
  misc_feature (1)..(25): SEQ ID NO: 4264; WAN024G8M_at; Start 224; Stop 248
ttttcactaaccagtatcctttcca

SEQ ID NO: 235480 - DNA, 25 bp, Artificial
  probe
  misc_feature (1)..(25): SEQ ID NO: 4264; WAN024G8M_at; Start 30; Stop 54
cacgacgaatcagttcactggcctg

SEQ ID NO: 235481 - DNA, 25 bp, Artificial
  probe
  misc_feature (1)..(25): SEQ ID NO: 4264; WAN024G8M_at; Start 177; Stop 201
agcatggcttggtttcttgattgaa

SEQ ID NO: 235482 - DNA, 25 bp, Artificial
  probe
  misc_feature (1)..(25): SEQ ID NO: 4264; WAN024G8M_at; Start 266; Stop 290
cgtcccagaccttgaaagaggcttt

SEQ ID NO: 235483 - DNA, 25 bp, Artificial
  probe
  misc_feature (1)..(25): SEQ ID NO: 4264; WAN024G8M_at; Start 279; Stop 303
gaaagaggctttgaagattttttgc

SEQ ID NO: 235484 - DNA, 25 bp, Artificial
  probe
  misc_feature (1)..(25): SEQ ID NO: 4264; WAN024G8M_at; Start 236; Stop 260
agtatcctttccaattcatttgccg

SEQ ID NO: 235485 - DNA, 25 bp, Artificial
  probe
  misc_feature (1)..(25): SEQ ID NO: 4264; WAN024G8M_at; Start 56; Stop 80
tgtttgacgcggtcgcgctcagcct

SEQ ID NO: 235486 - DNA, 25 bp, Artificial
  probe
  misc_feature (1)..(25): SEQ ID NO: 4264; WAN024G8M_at; Start 243; Stop 267
tttccaattcatttgccgtatcgcg

SEQ ID NO: 235487 - DNA, 25 bp, Artificial
  probe
  misc_feature (1)..(25): SEQ ID NO: 4264; WAN024G8M_at; Start 250; Stop 274
ttcatttgccgtatcgcgtcccaga

SEQ ID NO: 235488 - DNA, 25 bp, Artificial
  probe
  misc_feature (1)..(25): SEQ ID NO: 4264; WAN024G8M_at; Start 285; Stop 309
ggctttgaagattttttgctgttag

SEQ ID NO: 235489 - DNA, 25 bp, Artificial
  probe
  misc_feature (1)..(25): SEQ ID NO: 4264; WAN024G8M_at; Start 261; Stop 285
tatcgcgtcccagaccttgaaagag

SEQ ID NO: 235490 - DNA, 25 bp, Artificial
  probe
  misc_feature (1)..(25): SEQ ID NO: 4264; WAN024G8M_at; Start 140; Stop 164
tttgcaaaaggaactggactgaagg

SEQ ID NO: 235491 - DNA, 25 bp, Artificial
  probe
  misc_feature (1)..(25): SEQ ID NO: 4264; WAN024G8M_at; Start 149; Stop 173
ggaactggactgaaggaagtctcag

SEQ ID NO: 235492 - DNA, 25 bp, Artificial
  probe
  misc_feature (1)..(25): SEQ ID NO: 4264; WAN024G8M_at; Start 137; Stop 161
tgatttgcaaaaggaactggactga

SEQ ID NO: 235493 - DNA, 25 bp, Artificial
  probe
  misc_feature (1)..(25): SEQ ID NO: 4264; WAN024G8M_at; Start 164; Stop 188
gaagtctcagtcaagcatggcttgg

SEQ ID NO: 235494 - DNA, 25 bp, Artificial
  probe
  misc_feature (1)..(25): SEQ ID NO: 4264; WAN024G8M_at; Start 4; Stop 28
tcggtttttctgaagttcattttca

SEQ ID NO: 235495 - DNA, 25 bp, Artificial
  probe
  misc_feature (1)..(25): SEQ ID NO: 4264; WAN024G8M_at; Start 107; Stop 131
tcagaaagatttgcaaaaggctctc

SEQ ID NO: 235496 - DNA, 25 bp, Artificial
  probe
  misc_feature (1)..(25): SEQ ID NO: 4264; WAN024G8M_at; Start 109; Stop 133
agaaagatttgcaaaaggctctccc

SEQ ID NO: 235497 - DNA, 25 bp, Artificial
  probe
  misc_feature (1)..(25): SEQ ID NO: 4264; WAN024G8M_at; Start 85; Stop 109
cttatagtaggtgtccaacaaatca

SEQ ID NO: 235498 - DNA, 25 bp, Artificial
  probe
  misc_feature (1)..(25): SEQ ID NO: 2224; WAN024G8N_at; Start 354; Stop 378
gattggagaccatatccaggctacc

SEQ ID NO: 235499 - DNA, 25 bp, Artificial
  probe
  misc_feature (1)..(25): SEQ ID NO: 2224; WAN024G8N_at; Start 1185; Stop 1209
tctggaaagtgtagaaaccgtcctc

SEQ ID NO: 235500 - DNA, 25 bp, Artificial
  probe
  misc_feature (1)..(25): SEQ ID NO: 2224; WAN024G8N_at; Start 1282; Stop 1306
caacgggagaaaatccagaaacgca

SEQ ID NO: 235501 - DNA, 25 bp, Artificial
  probe
  misc_feature (1)..(25): SEQ ID NO: 2224; WAN024G8N_at; Start 1395; Stop 1419
aatggcccgcaaggaggaactttgg

SEQ ID NO: 235502 - DNA, 25 bp, Artificial
  probe
  misc_feature (1)..(25): SEQ ID NO: 2224; WAN024G8N_at; Start 507; Stop 531
gacctatatcgctccgccaagtaca

SEQ ID NO: 235503 - DNA, 25 bp, Artificial
  probe
  misc_feature (1)..(25): SEQ ID NO: 2224; WAN024G8N_at; Start 297; Stop 321
gattgagcaagtggaaaatgaccgt

SEQ ID NO: 235504 - DNA, 25 bp, Artificial
  probe
  misc_feature (1)..(25): SEQ ID NO: 2224; WAN024G8N_at; Start 480; Stop 504
tagctaccgcaccttacttccagga

SEQ ID NO: 235505 - DNA, 25 bp, Artificial
  probe
  misc_feature (1)..(25): SEQ ID NO: 2224; WAN024G8N_at; Start 1418; Stop 1442
ggttccatgctaaggacattcctgg

SEQ ID NO: 235506 - DNA, 25 bp, Artificial
  probe
  misc_feature (1)..(25): SEQ ID NO: 2224; WAN024G8N_at; Start 614; Stop 638
aaagcctctttcaaggtctgggacg

SEQ ID NO: 235507 - DNA, 25 bp, Artificial
  probe
  misc_feature (1)..(25): SEQ ID NO: 2224; WAN024G8N_at; Start 1205; Stop 1229
tcctcaaccaagctggactggaaga

SEQ ID NO: 235508 - DNA, 25 bp, Artificial
  probe
  misc_feature (1)..(25): SEQ ID NO: 2224; WAN024G8N_at; Start 1065; Stop 1089
tgataaggctctgactcccaaccag

SEQ ID NO: 235509 - DNA, 25 bp, Artificial
  probe
  misc_feature (1)..(25): SEQ ID NO: 2224; WAN024G8N_at; Start 720; Stop 744
gccatgcttgactgagacttccttc

SEQ ID NO: 235510 - DNA, 25 bp, Artificial
  probe
  misc_feature (1)..(25): SEQ ID NO: 2224; WAN024G8N_at; Start 1442; Stop 1466
gaagccatgttgtcatctcaggaaa

SEQ ID NO: 235511 - DNA, 25 bp, Artificial
  probe
  misc_feature (1)..(25): SEQ ID NO: 2224; WAN024G8N_at; Start 90; Stop 114
tggtcgcatccagaaaatcaatcag

SEQ ID NO: 235512 - DNA, 25 bp, Artificial
  probe
  misc_feature (1)..(25): SEQ ID NO: 2224; WAN024G8N_at; Start 1321; Stop 1345
tatctagcaagcgatggcaaaacca

SEQ ID NO: 235513 - DNA, 25 bp, Artificial
  probe
  misc_feature (1)..(25): SEQ ID NO: 2224; WAN024G8N_at; Start 938; Stop 962
cagacaacgctgaagaatttcgtca

SEQ ID NO: 235514 - DNA, 25 bp, Artificial
  probe
  misc_feature (1)..(25): SEQ ID NO: 2224; WAN024G8N_at; Start 137; Stop 161
tgcaaatccgcagcaatcgccaaag

SEQ ID NO: 235515 - DNA, 25 bp, Artificial
  probe
  misc_feature (1)..(25): SEQ ID NO: 2224; WAN024G8N_at; Start 1508; Stop 1532
tagctgcctacttctctcaagggcg

SEQ ID NO: 235516 - DNA, 25 bp, Artificial
  probe
  misc_feature (1)..(25): SEQ ID NO: 2224; WAN024G8N_at; Start 1381; Stop 1405
gaattgacctttaaaatggcccgca

SEQ ID NO: 235517 - DNA, 25 bp, Artificial
  probe
  misc_feature (1)..(25): SEQ ID NO: 2224; WAN024G8N_at; Start 443; Stop 467
tcctcgaagttatcaaacacgtcgg

SEQ ID NO: 235518 - DNA, 25 bp, Artificial
  probe
  misc_feature (1)..(25): SEQ ID NO: 2224; WAN024G8N_at; Start 1524; Stop 1548
tcaagggcgcctgtcgaatctggtg

SEQ ID NO: 235519 - DNA, 25 bp, Artificial
  probe
  misc_feature (1)..(25): SEQ ID NO: 2224; WAN024G8N_at; Start 995; Stop 1019
aagtgcctaacgaccaagaccaggt

SEQ ID NO: 235520 - DNA, 25 bp, Artificial
  probe
  misc_feature (1)..(25): SEQ ID NO: 2224; WAN024G8N_at; Start 1337; Stop 1361
gcaaaaccatcatctatgtcggacg

SEQ ID NO: 235521 - DNA, 25 bp, Artificial
  probe
  misc_feature (1)..(25): SEQ ID NO: 2224; WAN024G8N_at; Start 189; Stop 213
agtttttggacgcattcagctgacc

SEQ ID NO: 235522 - DNA, 25 bp, Artificial
  probe
  misc_feature (1)..(25): SEQ ID NO: 2224; WAN024G8N_at; Start 1460; Stop 1484
caggaaatcttgacccatctgatgc

SEQ ID NO: 235523 - DNA, 25 bp, Artificial
  probe
  misc_feature (1)..(25): SEQ ID NO: 2224; WAN024G8N_at; Start 1225; Stop 1249
gaagaaatcgctgaaatccgtgaag

SEQ ID NO: 235524 - DNA, 25 bp, Artificial
  probe
  misc_feature (1)..(25): SEQ ID NO: 2224; WAN024G8N_at; Start 1266; Stop 1290
ttttatccgcagaagacaacgggag

SEQ ID NO: 235525 - DNA, 25 bp, Artificial
  probe
  misc_feature (1)..(25): SEQ ID NO: 2224; WAN024G8N_at; Start 50; Stop 74
tacaccacatagttgaggaattgcg

SEQ ID NO: 235526 - DNA, 25 bp, Artificial
  probe
  misc_feature (1)..(25): SEQ ID NO: 2224; WAN024G8N_at; Start 1598; Stop 1622
aacccggctttgtcacttacacagg

SEQ ID NO: 235527 - DNA, 25 bp, Artificial
  probe
  misc_feature (1)..(25): SEQ ID NO: 2224; WAN024G8N_at; Start 703; Stop 727
ttcaatcaagaaaccaagccatgct

SEQ ID NO: 235528 - DNA, 25 bp, Artificial
  probe
  misc_feature (1)..(25): SEQ ID NO: 2224; WAN024G8N_at; Start 9; Stop 33
caatcacaaggagagaacgatgtca

SEQ ID NO: 235529 - DNA, 25 bp, Artificial
  probe
  misc_feature (1)..(25): SEQ ID NO: 2224; WAN024G8N_at; Start 1614; Stop 1638
ttacacaggacaaaagaccctccgc

SEQ ID NO: 235530 - DNA, 25 bp, Artificial
  probe
  misc_feature (1)..(25): SEQ ID NO: 2224; WAN024G8N_at; Start 1487; Stop 1511
tcaagacagacgcagcagagttagc

SEQ ID NO: 235531 - DNA, 25 bp, Artificial
  probe
  misc_feature (1)..(25): SEQ ID NO: 2224; WAN024G8N_at; Start 281; Stop 305
gggccctgattgagtcgattgagca

SEQ ID NO: 235532 - DNA, 25 bp, Artificial
  probe
  misc_feature (1)..(25): SEQ ID NO: 4282; WAN024G8O_at; Start 2; Stop 26
tgtgtagcatttttgaagccatatc

SEQ ID NO: 235533 - DNA, 25 bp, Artificial
  probe
  misc_feature (1)..(25): SEQ ID NO: 4282; WAN024G8O_at; Start 90; Stop 114
aagttttgctttagctgcatctgca

SEQ ID NO: 235534 - DNA, 25 bp, Artificial
  probe
  misc_feature (1)..(25): SEQ ID NO: 4282; WAN024G8O_at; Start 53; Stop 77
gacaatcctgttccagtctcatcag

SEQ ID NO: 235535 - DNA, 25 bp, Artificial
  probe
  misc_feature (1)..(25): SEQ ID NO: 4282; WAN024G8O_at; Start 222; Stop 246
tccgttcatacgagctgccgcattg

SEQ ID NO: 235536 - DNA, 25 bp, Artificial
  probe
  misc_feature (1)..(25): SEQ ID NO: 4282; WAN024G8O_at; Start 145; Stop 169
gccaagtcagcaagcattttacggt

SEQ ID NO: 235537 - DNA, 25 bp, Artificial
  probe
  misc_feature (1)..(25): SEQ ID NO: 4282; WAN024G8O_at; Start 133; Stop 157
gcatcgttaacagccaagtcagcaa

SEQ ID NO: 235538 - DNA, 25 bp, Artificial
  probe
  misc_feature (1)..(25): SEQ ID NO: 4282; WAN024G8O_at; Start 113; Stop 137
caagagctgtgaaagctactgcatc

SEQ ID NO: 235539 - DNA, 25 bp, Artificial
  probe
  misc_feature (1)..(25): SEQ ID NO: 4282; WAN024G8O_at; Start 16; Stop 40
gaagccatatctttctcctttattt

SEQ ID NO: 235540 - DNA, 25 bp, Artificial
  probe
  misc_feature (1)..(25): SEQ ID NO: 4282; WAN024G8O_at; Start 201; Stop 225
catcaattgtgagtatgaaagtccg

SEQ ID NO: 235541 - DNA, 25 bp, Artificial
  probe
  misc_feature (1)..(25): SEQ ID NO: 4282; WAN024G8O_at; Start 258; Stop 282
ccacaatttgcggaagtcacgtttt

SEQ ID NO: 235542 - DNA, 25 bp, Artificial
  probe
  misc_feature (1)..(25): SEQ ID NO: 4282; WAN024G8O_at; Start 59; Stop 83
cctgttccagtctcatcagttgtta

SEQ ID NO: 235543 - DNA, 25 bp, Artificial
  probe
  misc_feature (1)..(25): SEQ ID NO: 4282; WAN024G8O_at; Start 86; Stop 110
taccaagttttgctttagctgcatc

SEQ ID NO: 235544 - DNA, 25 bp, Artificial
  probe
  misc_feature (1)..(25): SEQ ID NO: 4282; WAN024G8O_at; Start 264; Stop 288
tttgcggaagtcacgttttttctga

SEQ ID NO: 235545 - DNA, 25 bp, Artificial
  probe
  misc_feature (1)..(25): SEQ ID NO: 4282; WAN024G8O_at; Start 217; Stop 241
gaaagtccgttcatacgagctgccg

SEQ ID NO: 235546 - DNA, 25 bp, Artificial
  probe
  misc_feature (1)..(25): SEQ ID NO: 4282; WAN024G8O_at; Start 246; Stop 270
gatacgagtaatccacaatttgcgg

SEQ ID NO: 235547 - DNA, 25 bp, Artificial
  probe
  misc_feature (1)..(25): SEQ ID NO: 4282; WAN024G8O_at; Start 137; Stop 161
cgttaacagccaagtcagcaagcat

SEQ ID NO: 235548 - DNA, 25 bp, Artificial
  probe
  misc_feature (1)..(25): SEQ ID NO: 4282; WAN024G8O_at; Start 179; Stop 203
tctcagccaatttcaaaccatgcat

SEQ ID NO: 235549 - DNA, 25 bp, Artificial
  probe
  misc_feature (1)..(25): SEQ ID NO: 4282; WAN024G8O_at; Start 254; Stop 278
taatccacaatttgcggaagtcacg

SEQ ID NO: 235550 - DNA, 25 bp, Artificial
  probe
  misc_feature (1)..(25): SEQ ID NO: 4282; WAN024G8O_at; Start 152; Stop 176
cagcaagcattttacggttaacttc

SEQ ID NO: 235551 - DNA, 25 bp, Artificial
  probe
  misc_feature (1)..(25): SEQ ID NO: 4282; WAN024G8O_at; Start 9; Stop 33
catttttgaagccatatctttctcc

SEQ ID NO: 235552 - DNA, 25 bp, Artificial
  probe
  misc_feature (1)..(25): SEQ ID NO: 4282; WAN024G8O_at; Start 238; Stop 262
gccgcattgatacgagtaatccaca

SEQ ID NO: 235553 - DNA, 25 bp, Artificial
  probe
  misc_feature (1)..(25): SEQ ID NO: 4282; WAN024G8O_at; Start 66; Stop 90
cagtctcatcagttgttatttacca

SEQ ID NO: 235554 - DNA, 25 bp, Artificial
  probe
  misc_feature (1)..(25): SEQ ID NO: 4282; WAN024G8O_at; Start 118; Stop 142
gctgtgaaagctactgcatcgttaa

SEQ ID NO: 235555 - DNA, 25 bp, Artificial
  probe
  misc_feature (1)..(25): SEQ ID NO: 4282; WAN024G8O_at; Start 190; Stop 214
ttcaaaccatgcatcaattgtgagt

SEQ ID NO: 235556 - DNA, 25 bp, Artificial
  probe
  misc_feature (1)..(25): SEQ ID NO: 4282; WAN024G8O_at; Start 149; Stop 173
agtcagcaagcattttacggttaac

SEQ ID NO: 235557 - DNA, 25 bp, Artificial
  probe
  misc_feature (1)..(25): SEQ ID NO: 4282; WAN024G8O_at; Start 123; Stop 147
gaaagctactgcatcgttaacagcc

SEQ ID NO: 235558 - DNA, 25 bp, Artificial
  probe
  misc_feature (1)..(25): SEQ ID NO: 4282; WAN024G8O_at; Start 127; Stop 151
gctactgcatcgttaacagccaagt

SEQ ID NO: 235559 - DNA, 25 bp, Artificial
  probe
  misc_feature (1)..(25): SEQ ID NO: 4282; WAN024G8O_at; Start 233; Stop 257
gagctgccgcattgatacgagtaat

SEQ ID NO: 235560 - DNA, 25 bp, Artificial
  probe
  misc_feature (1)..(25): SEQ ID NO: 4282; WAN024G8O_at; Start 204; Stop 228
caattgtgagtatgaaagtccgttc

SEQ ID NO: 235561 - DNA, 25 bp, Artificial
  probe
  misc_feature (1)..(25): SEQ ID NO: 4282; WAN024G8O_at; Start 74; Stop 98
tcagttgttatttaccaagttttgc

SEQ ID NO: 235562 - DNA, 25 bp, Artificial
  probe
  misc_feature (1)..(25): SEQ ID NO: 4282; WAN024G8O_at; Start 43; Stop 67
aaaaagactggacaatcctgttcca

SEQ ID NO: 235563 - DNA, 25 bp, Artificial
  probe
  misc_feature (1)..(25): SEQ ID NO: 4282; WAN024G8O_at; Start 96; Stop 120
tgctttagctgcatctgcaagagct

SEQ ID NO: 235564 - DNA, 25 bp, Artificial
  probe
  misc_feature (1)..(25): SEQ ID NO: 4282; WAN024G8O_at; Start 230; Stop 254
tacgagctgccgcattgatacgagt

SEQ ID NO: 235565 - DNA, 25 bp, Artificial
  probe
  misc_feature (1)..(25): SEQ ID NO: 4282; WAN024G8O_at; Start 107; Stop 131
catctgcaagagctgtgaaagctac

SEQ ID NO: 235566 - DNA, 25 bp, Artificial
  probe
  misc_feature (1)..(25): SEQ ID NO: 2420; WAN024G8P_at; Start 274; Stop 298
cgtaaaatgcttgctgacttggctg

SEQ ID NO: 235567 - DNA, 25 bp, Artificial
  probe
  misc_feature (1)..(25): SEQ ID NO: 2420; WAN024G8P_at; Start 104; Stop 128
caaaagaacaagtaatgaactctta

SEQ ID NO: 235568 - DNA, 25 bp, Artificial
  probe
  misc_feature (1)..(25): SEQ ID NO: 2420; WAN024G8P_at; Start 76; Stop 100
ggagctaaacacatcttgttccgta

SEQ ID NO: 235569 - DNA, 25 bp, Artificial
  probe
  misc_feature (1)..(25): SEQ ID NO: 2420; WAN024G8P_at; Start 282; Stop 306
gcttgctgacttggctgttaacgat

SEQ ID NO: 235570 - DNA, 25 bp, Artificial
  probe
  misc_feature (1)..(25): SEQ ID NO: 2420; WAN024G8P_at; Start 237; Stop 261
gatgcatggtttgaaattggctgag

SEQ ID NO: 235571 - DNA, 25 bp, Artificial
  probe
  misc_feature (1)..(25): SEQ ID NO: 2420; WAN024G8P_at; Start 226; Stop 250
tactcacaattgatgcatggtttga

SEQ ID NO: 235572 - DNA, 25 bp, Artificial
  probe
  misc_feature (1)..(25): SEQ ID NO: 2420; WAN024G8P_at; Start 5; Stop 29
cacgtgttaaaggtggcgttgtatc

SEQ ID NO: 235573 - DNA, 25 bp, Artificial
  probe
  misc_feature (1)..(25): SEQ ID NO: 2420; WAN024G8P_at; Start 300; Stop 324
taacgatgcagtagctttcacagct

SEQ ID NO: 235574 - DNA, 25 bp, Artificial
  probe
  misc_feature (1)..(25): SEQ ID NO: 2420; WAN024G8P_at; Start 334; Stop 358
gcagctaaagcaaaacttggtaaat

SEQ ID NO: 235575 - DNA, 25 bp, Artificial
  probe
  misc_feature (1)..(25): SEQ ID NO: 2420; WAN024G8P_at; Start 202; Stop 226
gcagctcgtatgaacggactttcat

SEQ ID NO: 235576 - DNA, 25 bp, Artificial
  probe
  misc_feature (1)..(25): SEQ ID NO: 2420; WAN024G8P_at; Start 186; Stop 210
tactcgtatcaatgcggcagctcgt

SEQ ID NO: 235577 - DNA, 25 bp, Artificial
  probe
  misc_feature (1)..(25): SEQ ID NO: 2420; WAN024G8P_at; Start 182; Stop 206
ggattactcgtatcaatgcggcagc

SEQ ID NO: 235578 - DNA, 25 bp, Artificial
  probe
  misc_feature (1)..(25): SEQ ID NO: 2420; WAN024G8P_at; Start 24; Stop 48
tgtatcacgcaaacgtcgtaaacgt

SEQ ID NO: 235579 - DNA, 25 bp, Artificial
  probe
  misc_feature (1)..(25): SEQ ID NO: 2420; WAN024G8P_at; Start 329; Stop 353
cagatgcagctaaagcaaaacttgg

SEQ ID NO: 235580 - DNA, 25 bp, Artificial
  probe
  misc_feature (1)..(25): SEQ ID NO: 2420; WAN024G8P_at; Start 56; Stop 80
aattagcaaaaggttactatggagc

SEQ ID NO: 235581 - DNA, 25 bp, Artificial
  probe
  misc_feature (1)..(25): SEQ ID NO: 2420; WAN024G8P_at; Start 19; Stop 43
ggcgttgtatcacgcaaacgtcgta

SEQ ID NO: 235582 - DNA, 25 bp, Artificial
  probe
  misc_feature (1)..(25): SEQ ID NO: 2420; WAN024G8P_at; Start 119; Stop 143
tgaactcttactactatgcataccg

SEQ ID NO: 235583 - DNA, 25 bp, Artificial
  probe
  misc_feature (1)..(25): SEQ ID NO: 2420; WAN024G8P_at; Start 191; Stop 215
gtatcaatgcggcagctcgtatgaa

SEQ ID NO: 235584 - DNA, 25 bp, Artificial
  probe
  misc_feature (1)..(25): SEQ ID NO: 2420; WAN024G8P_at; Start 310; Stop 334
gtagctttcacagctcttgcagatg

SEQ ID NO: 235585 - DNA, 25 bp, Artificial
  probe
  misc_feature (1)..(25): SEQ ID NO: 2420; WAN024G8P_at; Start 127; Stop 151
tactactatgcataccgtgaccgtc

SEQ ID NO: 235586 - DNA, 25 bp, Artificial
  probe
  misc_feature (1)..(25): SEQ ID NO: 2420; WAN024G8P_at; Start 159; Stop 183
aaaacgtgacttccgcaaattgtgg

SEQ ID NO: 235587 - DNA, 25 bp, Artificial
  probe
  misc_feature (1)..(25): SEQ ID NO: 2420; WAN024G8P_at; Start 12; Stop 36
taaaggtggcgttgtatcacgcaaa

SEQ ID NO: 235588 - DNA, 25 bp, Artificial
  probe
  misc_feature (1)..(25): SEQ ID NO: 2420; WAN024G8P_at; Start 265; Stop 289
gaagttaaccgtaaaatgcttgctg

SEQ ID NO: 235589 - DNA, 25 bp, Artificial
  probe
  misc_feature (1)..(25): SEQ ID NO: 2420; WAN024G8P_at; Start 213; Stop 237
gaacggactttcatactcacaattg

SEQ ID NO: 235590 - DNA, 25 bp, Artificial
  probe
  misc_feature (1)..(25): SEQ ID NO: 2420; WAN024G8P_at; Start 93; Stop 117
gttccgtactgcaaaagaacaagta

SEQ ID NO: 235591 - DNA, 25 bp, Artificial
  probe
  misc_feature (1)..(25): SEQ ID NO: 2420; WAN024G8P_at; Start 67; Stop 91
ggttactatggagctaaacacatct

SEQ ID NO: 235592 - DNA, 25 bp, Artificial
  probe
  misc_feature (1)..(25): SEQ ID NO: 2420; WAN024G8P_at; Start 61; Stop 85
gcaaaaggttactatggagctaaac

SEQ ID NO: 235593 - DNA, 25 bp, Artificial
  probe
  misc_feature (1)..(25): SEQ ID NO: 2420; WAN024G8P_at; Start 290; Stop 314
acttggctgttaacgatgcagtagc

SEQ ID NO: 235594 - DNA, 25 bp, Artificial
  probe
  misc_feature (1)..(25): SEQ ID NO: 2420; WAN024G8P_at; Start 83; Stop 107
aacacatcttgttccgtactgcaaa

SEQ ID NO: 235595 - DNA, 25 bp, Artificial
  probe
  misc_feature (1)..(25): SEQ ID NO: 2420; WAN024G8P_at; Start 144; Stop 168
tgaccgtcgtcagaaaaaacgtgac

SEQ ID NO: 235596 - DNA, 25 bp, Artificial
  probe
  misc_feature (1)..(25): SEQ ID NO: 2420; WAN024G8P_at; Start 133; Stop 157
tatgcataccgtgaccgtcgtcaga

SEQ ID NO: 235597 - DNA, 25 bp, Artificial
  probe
  misc_feature (1)..(25): SEQ ID NO: 2420; WAN024G8P_at; Start 39; Stop 63
tcgtaaacgtattcttaaattagca

SEQ ID NO: 235598 - DNA, 25 bp, Artificial
  probe
  misc_feature (1)..(25): SEQ ID NO: 2420; WAN024G8P_at; Start 170; Stop 194
tccgcaaattgtggattactcgtat

SEQ ID NO: 235599 - DNA, 25 bp, Artificial
  probe
  misc_feature (1)..(25): SEQ ID NO: 2420; WAN024G8P_at; Start 322; Stop 346
gctcttgcagatgcagctaaagcaa

SEQ ID NO: 235600 - DNA, 25 bp, Artificial
  probe
  misc_feature (1)..(25): SEQ ID NO: 1534; WAN024G8Q_at; Start 401; Stop 425
gatataaggtcgaagtcattcgtga

SEQ ID NO: 235601 - DNA, 25 bp, Artificial
  probe
  misc_feature (1)..(25): SEQ ID NO: 1534; WAN024G8Q_at; Start 130; Stop 154
ggttttaaagaattgcgtcgcagag

SEQ ID NO: 235602 - DNA, 25 bp, Artificial
  probe
  misc_feature (1)..(25): SEQ ID NO: 1534; WAN024G8Q_at; Start 166; Stop 190
catgccttcacgattgtctatctag

SEQ ID NO: 235603 - DNA, 25 bp, Artificial
  probe
  misc_feature (1)..(25): SEQ ID NO: 1534; WAN024G8Q_at; Start 146; Stop 170
gtcgcagagattttccagaccatgc

SEQ ID NO: 235604 - DNA, 25 bp, Artificial
  probe
  misc_feature (1)..(25): SEQ ID NO: 1534; WAN024G8Q_at; Start 393; Stop 417
ccctgatggatataaggtcgaagtc

SEQ ID NO: 235605 - DNA, 25 bp, Artificial
  probe
  misc_feature (1)..(25): SEQ ID NO: 1534; WAN024G8Q_at; Start 281; Stop 305
tcagtacacctgatcttgaggcact

SEQ ID NO: 235606 - DNA, 25 bp, Artificial
  probe
  misc_feature (1)..(25): SEQ ID NO: 1534; WAN024G8Q_at; Start 313; Stop 337
gaacacagtgcaaaaggctatgaag

SEQ ID NO: 235607 - DNA, 25 bp, Artificial
  probe
  misc_feature (1)..(25): SEQ ID NO: 1534; WAN024G8Q_at; Start 297; Stop 321
tgaggcacttcatcaagaacacagt

SEQ ID NO: 235608 - DNA, 25 bp, Artificial
  probe
  misc_feature (1)..(25): SEQ ID NO: 1534; WAN024G8Q_at; Start 68; Stop 92
tacacacttgcttacgagtagaaaa

SEQ ID NO: 235609 - DNA, 25 bp, Artificial
  probe
  misc_feature (1)..(25): SEQ ID NO: 1534; WAN024G8Q_at; Start 388; Stop 412
aaagaccctgatggatataaggtcg

SEQ ID NO: 235610 - DNA, 25 bp, Artificial
  probe
  misc_feature (1)..(25): SEQ ID NO: 1534; WAN024G8Q_at; Start 254; Stop 278
ttggtgatgggtttgcccatatcgc

SEQ ID NO: 235611 - DNA, 25 bp, Artificial
  probe
  misc_feature (1)..(25): SEQ ID NO: 1534; WAN024G8Q_at; Start 411; Stop 435
cgaagtcattcgtgaaaaataacta

SEQ ID NO: 235612 - DNA, 25 bp, Artificial
  probe
  misc_feature (1)..(25): SEQ ID NO: 1534; WAN024G8Q_at; Start 339; Stop 363
gactgagccaaatggtctaccagga

SEQ ID NO: 235613 - DNA, 25 bp, Artificial
  probe
  misc_feature (1)..(25): SEQ ID NO: 1534; WAN024G8Q_at; Start 49; Stop 73
gatatggcttcaaaaatgctacaca

SEQ ID NO: 235614 - DNA, 25 bp, Artificial
  probe
  misc_feature (1)..(25): SEQ ID NO: 1534; WAN024G8Q_at; Start 10; Stop 34
gaacaggattgtccagtctttttaa

SEQ ID NO: 235615 - DNA, 25 bp, Artificial
  probe
  misc_feature (1)..(25): SEQ ID NO: 1534; WAN024G8Q_at; Start 306; Stop 330
tcatcaagaacacagtgcaaaaggc

SEQ ID NO: 235616 - DNA, 25 bp, Artificial
  probe
  misc_feature (1)..(25): SEQ ID NO: 1534; WAN024G8Q_at; Start 222; Stop 246
gacttataactacgatcacggtccg

SEQ ID NO: 235617 - DNA, 25 bp, Artificial
  probe
  misc_feature (1)..(25): SEQ ID NO: 1534; WAN024G8Q_at; Start 176; Stop 200
cgattgtctatctaggtcttgaggg

SEQ ID NO: 235618 - DNA, 25 bp, Artificial
  probe
  misc_feature (1)..(25): SEQ ID NO: 1534; WAN024G8Q_at; Start 211; Stop 235
gagttggagttgacttataactacg

SEQ ID NO: 235619 - DNA, 25 bp, Artificial
  probe
  misc_feature (1)..(25): SEQ ID NO: 1534; WAN024G8Q_at; Start 359; Stop 383
caggaactacaccaaactattactt

SEQ ID NO: 235620 - DNA, 25 bp, Artificial
  probe
  misc_feature (1)..(25): SEQ ID NO: 1534; WAN024G8Q_at; Start 347; Stop 371
caaatggtctaccaggaactacacc

SEQ ID NO: 235621 - DNA, 25 bp, Artificial
  probe
  misc_feature (1)..(25): SEQ ID NO: 1534; WAN024G8Q_at; Start 61; Stop 85
aaaatgctacacacttgcttacgag

SEQ ID NO: 235622 - DNA, 25 bp, Artificial
  probe
  misc_feature (1)..(25): SEQ ID NO: 1534; WAN024G8Q_at; Start 154; Stop 178
gattttccagaccatgccttcacga

SEQ ID NO: 235623 - DNA, 25 bp, Artificial
  probe
  misc_feature (1)..(25): SEQ ID NO: 1534; WAN024G8Q_at; Start 139; Stop 163
gaattgcgtcgcagagattttccag

SEQ ID NO: 235624 - DNA, 25 bp, Artificial
  probe
  misc_feature (1)..(25): SEQ ID NO: 1534; WAN024G8Q_at; Start 86; Stop 110
tagaaaatcttgaaaaatcaatcgc

SEQ ID NO: 235625 - DNA, 25 bp, Artificial
  probe
  misc_feature (1)..(25): SEQ ID NO: 1534; WAN024G8Q_at; Start 2; Stop 26
tgagactggaacaggattgtccagt

SEQ ID NO: 235626 - DNA, 25 bp, Artificial
  probe
  misc_feature (1)..(25): SEQ ID NO: 1534; WAN024G8Q_at; Start 329; Stop 353
gctatgaagtgactgagccaaatgg

SEQ ID NO: 235627 - DNA, 25 bp, Artificial
  probe
  misc_feature (1)..(25): SEQ ID NO: 1534; WAN024G8Q_at; Start 35; Stop 59
aaataaaggagaaagatatggcttc

SEQ ID NO: 235628 - DNA, 25 bp, Artificial
  probe
  misc_feature (1)..(25): SEQ ID NO: 1534; WAN024G8Q_at; Start 285; Stop 309
tacacctgatcttgaggcacttcat

SEQ ID NO: 235629 - DNA, 25 bp, Artificial
  probe
  misc_feature (1)..(25): SEQ ID NO: 1534; WAN024G8Q_at; Start 228; Stop 252
taactacgatcacggtccgtatgtg

SEQ ID NO: 235630 - DNA, 25 bp, Artificial
  probe
  misc_feature (1)..(25): SEQ ID NO: 1534; WAN024G8Q_at; Start 74; Stop 98
cttgcttacgagtagaaaatcttga

SEQ ID NO: 235631 - DNA, 25 bp, Artificial
  probe
  misc_feature (1)..(25): SEQ ID NO: 1534; WAN024G8Q_at; Start 101; Stop 125
aatcaatcgcattttatcaagatgc

SEQ ID NO: 235632 - DNA, 25 bp, Artificial
  probe
  misc_feature (1)..(25): SEQ ID NO: 1534; WAN024G8Q_at; Start 237; Stop 261
tcacggtccgtatgtggttggtgat

SEQ ID NO: 235633 - DNA, 25 bp, Artificial
  probe
  misc_feature (1)..(25): SEQ ID NO: 1534; WAN024G8Q_at; Start 115; Stop 139
tatcaagatgcttttggttttaaag

SEQ ID NO: 235634 - DNA, 25 bp, Artificial
  probe
  misc_feature (1)..(25): SEQ ID NO: 4124; WAN024G8R_at; Start 103; Stop 127
gagcctggacgcatttgtttgacca

SEQ ID NO: 235635 - DNA, 25 bp, Artificial
  probe
  misc_feature (1)..(25): SEQ ID NO: 4124; WAN024G8R_at; Start 46; Stop 70
cacacggtcagctgtttcgataacg

SEQ ID NO: 235636 - DNA, 25 bp, Artificial
  probe
  misc_feature (1)..(25): SEQ ID NO: 4124; WAN024G8R_at; Start 160; Stop 184
ccagggatgagaatggctccaatca

SEQ ID NO: 235637 - DNA, 25 bp, Artificial
  probe
  misc_feature (1)..(25): SEQ ID NO: 4124; WAN024G8R_at; Start 187; Stop 211
acatcagcatctctcacacttgctt

SEQ ID NO: 235638 - DNA, 25 bp, Artificial
  probe
  misc_feature (1)..(25): SEQ ID NO: 4124; WAN024G8R_at; Start 38; Stop 62
tgcgttgtcacacggtcagctgttt

SEQ ID NO: 235639 - DNA, 25 bp, Artificial
  probe
  misc_feature (1)..(25): SEQ ID NO: 4124; WAN024G8R_at; Start 219; Stop 243
gaatgaattagacataagagtttga

SEQ ID NO: 235640 - DNA, 25 bp, Artificial
  probe
  misc_feature (1)..(25): SEQ ID NO: 4124; WAN024G8R_at; Start 78; Stop 102
ggtcaacagcaacgtcaacgataca

SEQ ID NO: 235641 - DNA, 25 bp, Artificial
  probe
  misc_feature (1)..(25): SEQ ID NO: 4124; WAN024G8R_at; Start 141; Stop 165
caattccggtgcttttgcaccaggg

SEQ ID NO: 235642 - DNA, 25 bp, Artificial
  probe
  misc_feature (1)..(25): SEQ ID NO: 4124; WAN024G8R_at; Start 165; Stop 189
gatgagaatggctccaatcaccaca

SEQ ID NO: 235643 - DNA, 25 bp, Artificial
  probe
  misc_feature (1)..(25): SEQ ID NO: 4124; WAN024G8R_at; Start 157; Stop 181
gcaccagggatgagaatggctccaa

SEQ ID NO: 235644 - DNA, 25 bp, Artificial
  probe
  misc_feature (1)..(25): SEQ ID NO: 4124; WAN024G8R_at; Start 201; Stop 225
cacacttgcttcaatgttgaatgaa

SEQ ID NO: 235645 - DNA, 25 bp, Artificial
  probe
  misc_feature (1)..(25): SEQ ID NO: 4124; WAN024G8R_at; Start 4; Stop 28
gagaacaccgtgtttttcatagacg

SEQ ID NO: 235646 - DNA, 25 bp, Artificial
  probe
  misc_feature (1)..(25): SEQ ID NO: 4124; WAN024G8R_at; Start 13; Stop 37
gtgtttttcatagacgggttcatcg

SEQ ID NO: 235647 - DNA, 25 bp, Artificial
  probe
  misc_feature (1)..(25): SEQ ID NO: 4124; WAN024G8R_at; Start 49; Stop 73
acggtcagctgtttcgataacgcca

SEQ ID NO: 235648 - DNA, 25 bp, Artificial
  probe
  misc_feature (1)..(25): SEQ ID NO: 4124; WAN024G8R_at; Start 86; Stop 110
gcaacgtcaacgatacagagcctgg

SEQ ID NO: 235649 - DNA, 25 bp, Artificial
  probe
  misc_feature (1)..(25): SEQ ID NO: 4124; WAN024G8R_at; Start 92; Stop 116
tcaacgatacagagcctggacgcat

SEQ ID NO: 235650 - DNA, 25 bp, Artificial
  probe
  misc_feature (1)..(25): SEQ ID NO: 4124; WAN024G8R_at; Start 41; Stop 65
gttgtcacacggtcagctgtttcga

SEQ ID NO: 235651 - DNA, 25 bp, Artificial
  probe
  misc_feature (1)..(25): SEQ ID NO: 4124; WAN024G8R_at; Start 149; Stop 173
gtgcttttgcaccagggatgagaat

SEQ ID NO: 235652 - DNA, 25 bp, Artificial
  probe
  misc_feature (1)..(25): SEQ ID NO: 4124; WAN024G8R_at; Start 32; Stop 56
tcatcgtgcgttgtcacacggtcag

SEQ ID NO: 235653 - DNA, 25 bp, Artificial
  probe
  misc_feature (1)..(25): SEQ ID NO: 4124; WAN024G8R_at; Start 126; Stop 150
catctcatctgtcaccaattccggt

SEQ ID NO: 235654 - DNA, 25 bp, Artificial
  probe
  misc_feature (1)..(25): SEQ ID NO: 4124; WAN024G8R_at; Start 25; Stop 49
gacgggttcatcgtgcgttgtcaca

SEQ ID NO: 235655 - DNA, 25 bp, Artificial
  probe
  misc_feature (1)..(25): SEQ ID NO: 4124; WAN024G8R_at; Start 18; Stop 42
tttcatagacgggttcatcgtgcgt

SEQ ID NO: 235656 - DNA, 25 bp, Artificial
  probe
  misc_feature (1)..(25): SEQ ID NO: 4124; WAN024G8R_at; Start 193; Stop 217
gcatctctcacacttgcttcaatgt

SEQ ID NO: 235657 - DNA, 25 bp, Artificial
  probe
  misc_feature (1)..(25): SEQ ID NO: 4124; WAN024G8R_at; Start 64; Stop 88
gataacgccaccttggtcaacagca

SEQ ID NO: 235658 - DNA, 25 bp, Artificial
  probe
  misc_feature (1)..(25): SEQ ID NO: 4124; WAN024G8R_at; Start 113; Stop 137
gcatttgtttgaccatctcatctgt

SEQ ID NO: 235659 - DNA, 25 bp, Artificial
  probe
  misc_feature (1)..(25): SEQ ID NO: 4124; WAN024G8R_at; Start 109; Stop 133
ggacgcatttgtttgaccatctcat

SEQ ID NO: 235660 - DNA, 25 bp, Artificial
  probe
  misc_feature (1)..(25): SEQ ID NO: 4124; WAN024G8R_at; Start 208; Stop 232
gcttcaatgttgaatgaattagaca

SEQ ID NO: 235661 - DNA, 25 bp, Artificial
  probe
  misc_feature (1)..(25): SEQ ID NO: 4124; WAN024G8R_at; Start 96; Stop 120
cgatacagagcctggacgcatttgt

SEQ ID NO: 235662 - DNA, 25 bp, Artificial
  probe
  misc_feature (1)..(25): SEQ ID NO: 4124; WAN024G8R_at; Start 172; Stop 196
atggctccaatcaccacatcagcat

SEQ ID NO: 235663 - DNA, 25 bp, Artificial
  probe
  misc_feature (1)..(25): SEQ ID NO: 4124; WAN024G8R_at; Start 56; Stop 80
gctgtttcgataacgccaccttggt

SEQ ID NO: 235664 - DNA, 25 bp, Artificial
  probe
  misc_feature (1)..(25): SEQ ID NO: 4124; WAN024G8R_at; Start 130; Stop 154
tcatctgtcaccaattccggtgctt

SEQ ID NO: 235665 - DNA, 25 bp, Artificial
  probe
  misc_feature (1)..(25): SEQ ID NO: 4124; WAN024G8R_at; Start 155; Stop 179
ttgcaccagggatgagaatggctcc

SEQ ID NO: 235666 - DNA, 25 bp, Artificial
  probe
  misc_feature (1)..(25): SEQ ID NO: 4124; WAN024G8R_at; Start 99; Stop 123
tacagagcctggacgcatttgtttg

SEQ ID NO: 235667 - DNA, 25 bp, Artificial
  probe
  misc_feature (1)..(25): SEQ ID NO: 4124; WAN024G8R_at; Start 170; Stop 194
gaatggctccaatcaccacatcagc

SEQ ID NO: 235668 - DNA, 25 bp, Artificial
  probe
  misc_feature (1)..(25): SEQ ID NO: 3923; WAN024G8S_at; Start 132; Stop 156
tttggctggcaaaggattcgcacaa

SEQ ID NO: 235669 - DNA, 25 bp, Artificial
  probe
  misc_feature (1)..(25): SEQ ID NO: 3923; WAN024G8S_at; Start 229; Stop 253
gctcaaggacttaatcgtgactaca

SEQ ID NO: 235670 - DNA, 25 bp, Artificial
  probe
  misc_feature (1)..(25): SEQ ID NO: 3923; WAN024G8S_at; Start 241; Stop 265
aatcgtgactacactgatatcaatg

SEQ ID NO: 235671 - DNA, 25 bp, Artificial
  probe
  misc_feature (1)..(25): SEQ ID NO: 3923; WAN024G8S_at; Start 13; Stop 37
gatgaacccgtctatgaaaaacacg

SEQ ID NO: 235672 - DNA, 25 bp, Artificial
  probe
  misc_feature (1)..(25): SEQ ID NO: 3923; WAN024G8S_at; Start 54; Stop 78
cgttgccaatatccctggtgcggtt

SEQ ID NO: 235673 - DNA, 25 bp, Artificial
  probe
  misc_feature (1)..(25): SEQ ID NO: 3923; WAN024G8S_at; Start 141; Stop 165
caaaggattcgcacaagcaatctct

SEQ ID NO: 235674 - DNA, 25 bp, Artificial
  probe
  misc_feature (1)..(25): SEQ ID NO: 3923; WAN024G8S_at; Start 117; Stop 141
tccttatatcgaagctttggctggc

SEQ ID NO: 235675 - DNA, 25 bp, Artificial
  probe
  misc_feature (1)..(25): SEQ ID NO: 3923; WAN024G8S_at; Start 119; Stop 143
cttatatcgaagctttggctggcaa

SEQ ID NO: 235676 - DNA, 25 bp, Artificial
  probe
  misc_feature (1)..(25): SEQ ID NO: 3923; WAN024G8S_at; Start 232; Stop 256
caaggacttaatcgtgactacactg

SEQ ID NO: 235677 - DNA, 25 bp, Artificial
  probe
  misc_feature (1)..(25): SEQ ID NO: 3923; WAN024G8S_at; Start 221; Stop 245
taccagttgctcaaggacttaatcg

SEQ ID NO: 235678 - DNA, 25 bp, Artificial
  probe
  misc_feature (1)..(25): SEQ ID NO: 3923; WAN024G8S_at; Start 21; Stop 45
cgtctatgaaaaacacggtgttctc

SEQ ID NO: 235679 - DNA, 25 bp, Artificial
  probe
  misc_feature (1)..(25): SEQ ID NO: 3923; WAN024G8S_at; Start 56; Stop 80
ttgccaatatccctggtgcggttgc

SEQ ID NO: 235680 - DNA, 25 bp, Artificial
  probe
  misc_feature (1)..(25): SEQ ID NO: 3923; WAN024G8S_at; Start 27; Stop 51
tgaaaaacacggtgttctccactat

SEQ ID NO: 235681 - DNA, 25 bp, Artificial
  probe
  misc_feature (1)..(25): SEQ ID NO: 3923; WAN024G8S_at; Start 170; Stop 194
atgaaggcttgcgtcaaggtgtgac

SEQ ID NO: 235682 - DNA, 25 bp, Artificial
  probe
  misc_feature (1)..(25): SEQ ID NO: 3923; WAN024G8S_at; Start 88; Stop 112
tcaaccatcgccctaaccaatgtca

SEQ ID NO: 235683 - DNA, 25 bp, Artificial
  probe
  misc_feature (1)..(25): SEQ ID NO: 3923; WAN024G8S_at; Start 224; Stop 248
cagttgctcaaggacttaatcgtga

SEQ ID NO: 235684 - DNA, 25 bp, Artificial
  probe
  misc_feature (1)..(25): SEQ ID NO: 3923; WAN024G8S_at; Start 145; Stop 169
ggattcgcacaagcaatctctgaag

SEQ ID NO: 235685 - DNA, 25 bp, Artificial
  probe
  misc_feature (1)..(25): SEQ ID NO: 3923; WAN024G8S_at; Start 148; Stop 172
ttcgcacaagcaatctctgaagatg

SEQ ID NO: 235686 - DNA, 25 bp, Artificial
  probe
  misc_feature (1)..(25): SEQ ID NO: 3923; WAN024G8S_at; Start 1; Stop 25
gtgacaacgcacgatgaacccgtct

SEQ ID NO: 235687 - DNA, 25 bp, Artificial
  probe
  misc_feature (1)..(25): SEQ ID NO: 3923; WAN024G8S_at; Start 158; Stop 182
caatctctgaagatgaaggcttgcg

SEQ ID NO: 235688 - DNA, 25 bp, Artificial
  probe
  misc_feature (1)..(25): SEQ ID NO: 3923; WAN024G8S_at; Start 3; Stop 27
gacaacgcacgatgaacccgtctat

SEQ ID NO: 235689 - DNA, 25 bp, Artificial
  probe
  misc_feature (1)..(25): SEQ ID NO: 3923; WAN024G8S_at; Start 138; Stop 162
tggcaaaggattcgcacaagcaatc

SEQ ID NO: 235690 - DNA, 25 bp, Artificial
  probe
  misc_feature (1)..(25): SEQ ID NO: 3923; WAN024G8S_at; Start 123; Stop 147
tatcgaagctttggctggcaaagga

SEQ ID NO: 235691 - DNA, 25 bp, Artificial
  probe
  misc_feature (1)..(25): SEQ ID NO: 3923; WAN024G8S_at; Start 6; Stop 30
aacgcacgatgaacccgtctatgaa

SEQ ID NO: 235692 - DNA, 25 bp, Artificial
  probe
  misc_feature (1)..(25): SEQ ID NO: 3923; WAN024G8S_at; Start 219; Stop 243
cctaccagttgctcaaggacttaat

SEQ ID NO: 235693 - DNA, 25 bp, Artificial
  probe
  misc_feature (1)..(25): SEQ ID NO: 3923; WAN024G8S_at; Start 129; Stop 153
agctttggctggcaaaggattcgca

SEQ ID NO: 235694 - DNA, 25 bp, Artificial
  probe
  misc_feature (1)..(25): SEQ ID NO: 3923; WAN024G8S_at; Start 104; Stop 128
ccaatgtcactcttccttatatcga

SEQ ID NO: 235695 - DNA, 25 bp, Artificial
  probe
  misc_feature (1)..(25): SEQ ID NO: 3923; WAN024G8S_at; Start 256; Stop 280
gatatcaatgatttagtactaacta

SEQ ID NO: 235696 - DNA, 25 bp, Artificial
  probe
  misc_feature (1)..(25): SEQ ID NO: 3923; WAN024G8S_at; Start 247; Stop 271
gactacactgatatcaatgatttag

SEQ ID NO: 235697 - DNA, 25 bp, Artificial
  probe
  misc_feature (1)..(25): SEQ ID NO: 3923; WAN024G8S_at; Start 235; Stop 259
ggacttaatcgtgactacactgata

SEQ ID NO: 235698 - DNA, 25 bp, Artificial
  probe
  misc_feature (1)..(25): SEQ ID NO: 3923; WAN024G8S_at; Start 161; Stop 185
tctctgaagatgaaggcttgcgtca

SEQ ID NO: 235699 - DNA, 25 bp, Artificial
  probe
  misc_feature (1)..(25): SEQ ID NO: 3923; WAN024G8S_at; Start 135; Stop 159
ggctggcaaaggattcgcacaagca

SEQ ID NO: 235700 - DNA, 25 bp, Artificial
  probe
  misc_feature (1)..(25): SEQ ID NO: 3923; WAN024G8S_at; Start 163; Stop 187
tctgaagatgaaggcttgcgtcaag

SEQ ID NO: 235701 - DNA, 25 bp, Artificial
  probe
  misc_feature (1)..(25): SEQ ID NO: 3923; WAN024G8S_at; Start 154; Stop 178
caagcaatctctgaagatgaaggct

SEQ ID NO: 235702 - DNA, 25 bp, Artificial
  probe
  misc_feature (1)..(25): SEQ ID NO: 2997; WAN024G8T_at; Start 77; Stop 101
tagttagtcgtggtcatcgtgtcct

SEQ ID NO: 235703 - DNA, 25 bp, Artificial
  probe
  misc_feature (1)..(25): SEQ ID NO: 2997; WAN024G8T_at; Start 62; Stop 86
caggtgttcatagcttagttagtcg

SEQ ID NO: 235704 - DNA, 25 bp, Artificial
  probe
  misc_feature (1)..(25): SEQ ID NO: 2997; WAN024G8T_at; Start 600; Stop 624
caagcgtctctcagttctagaagaa

SEQ ID NO: 235705 - DNA, 25 bp, Artificial
  probe
  misc_feature (1)..(25): SEQ ID NO: 2997; WAN024G8T_at; Start 770; Stop 794
tgcgtccaggctctgtatcgttgac

SEQ ID NO: 235706 - DNA, 25 bp, Artificial
  probe
  misc_feature (1)..(25): SEQ ID NO: 2997; WAN024G8T_at; Start 349; Stop 373
gaaactgttcgtgacaatcaaggac

SEQ ID NO: 235707 - DNA, 25 bp, Artificial
  probe
  misc_feature (1)..(25): SEQ ID NO: 2997; WAN024G8T_at; Start 691; Stop 715
gctgatgtggtgattggagccattc

SEQ ID NO: 235708 - DNA, 25 bp, Artificial
  probe
  misc_feature (1)..(25): SEQ ID NO: 2997; WAN024G8T_at; Start 756; Stop 780
gatggtcaaacaaatgcgtccaggc

SEQ ID NO: 235709 - DNA, 25 bp, Artificial
  probe
  misc_feature (1)..(25): SEQ ID NO: 2997; WAN024G8T_at; Start 165; Stop 189
tgagattgtcgctactgctggtgaa

SEQ ID NO: 235710 - DNA, 25 bp, Artificial
  probe
  misc_feature (1)..(25): SEQ ID NO: 2997; WAN024G8T_at; Start 285; Stop 309
catggccgctgctccagaattagca

SEQ ID NO: 235711 - DNA, 25 bp, Artificial
  probe
  misc_feature (1)..(25): SEQ ID NO: 2997; WAN024G8T_at; Start 151; Stop 175
caaaagcaaggagctgagattgtcg

SEQ ID NO: 235712 - DNA, 25 bp, Artificial
  probe
  misc_feature (1)..(25): SEQ ID NO: 2997; WAN024G8T_at; Start 440; Stop 464
tccttactaagcaagctggtggctc

SEQ ID NO: 235713 - DNA, 25 bp, Artificial
  probe
  misc_feature (1)..(25): SEQ ID NO: 2997; WAN024G8T_at; Start 615; Stop 639
tctagaagaagtctttggaagtcaa

SEQ ID NO: 235714 - DNA, 25 bp, Artificial
  probe
  misc_feature (1)..(25): SEQ ID NO: 2997; WAN024G8T_at; Start 359; Stop 383
gtgacaatcaaggacaactaccgct

SEQ ID NO: 235715 - DNA, 25 bp, Artificial
  probe
  misc_feature (1)..(25): SEQ ID NO: 2997; WAN024G8T_at; Start 108; Stop 132
aacaaatgctggtctcggttctggc

SEQ ID NO: 235716 - DNA, 25 bp, Artificial
  probe
  misc_feature (1)..(25): SEQ ID NO: 2997; WAN024G8T_at; Start 451; Stop 475
caagctggtggctctggtgttctac

SEQ ID NO: 235717 - DNA, 25 bp, Artificial
  probe
  misc_feature (1)..(25): SEQ ID NO: 2997; WAN024G8T_at; Start 384; Stop 408
cctcgttcctatgagtgaggttgca

SEQ ID NO: 235718 - DNA, 25 bp, Artificial
  probe
  misc_feature (1)..(25): SEQ ID NO: 2997; WAN024G8T_at; Start 271; Stop 295
ttcacctacttgcacatggccgctg

SEQ ID NO: 235719 - DNA, 25 bp, Artificial
  probe
  misc_feature (1)..(25): SEQ ID NO: 2997; WAN024G8T_at; Start 93; Stop 117
tcgtgtccttatcgaaacaaatgct

SEQ ID NO: 235720 - DNA, 25 bp, Artificial
  probe
  misc_feature (1)..(25): SEQ ID NO: 2997; WAN024G8T_at; Start 44; Stop 68
gtgtcgccctcacacctgcaggtgt

SEQ ID NO: 235721 - DNA, 25 bp, Artificial
  probe
  misc_feature (1)..(25): SEQ ID NO: 2997; WAN024G8T_at; Start 196; Stop 220
gcagcagagttggttgtgaaagtaa

SEQ ID NO: 235722 - DNA, 25 bp, Artificial
  probe
  misc_feature (1)..(25): SEQ ID NO: 2997; WAN024G8T_at; Start 706; Stop 730
ggagccattctcatccctggtgcaa

SEQ ID NO: 235723 - DNA, 25 bp, Artificial
  probe
  misc_feature (1)..(25): SEQ ID NO: 2997; WAN024G8T_at; Start 138; Stop 162
tgatgctgactatcaaaagcaagga

SEQ ID NO: 235724 - DNA, 25 bp, Artificial
  probe
  misc_feature (1)..(25): SEQ ID NO: 2997; WAN024G8T_at; Start 428; Stop 452
tcggagctcacttccttactaagca

SEQ ID NO: 235725 - DNA, 25 bp, Artificial
  probe
  misc_feature (1)..(25): SEQ ID NO: 2997; WAN024G8T_at; Start 374; Stop 398
aactaccgctcctcgttcctatgag

SEQ ID NO: 235726 - DNA, 25 bp, Artificial
  probe
  misc_feature (1)..(25): SEQ ID NO: 2997; WAN024G8T_at; Start 552; Stop 576
catcgcccttggtcttggtgctcaa

SEQ ID NO: 235727 - DNA, 25 bp, Artificial
  probe
  misc_feature (1)..(25): SEQ ID NO: 2997; WAN024G8T_at; Start 503; Stop 527
gaaaagtaactatcatcggtggtgg

SEQ ID NO: 235728 - DNA, 25 bp, Artificial
  probe
  misc_feature (1)..(25): SEQ ID NO: 2997; WAN024G8T_at; Start 177; Stop 201
tactgctggtgaagcttgggcagca

SEQ ID NO: 235729 - DNA, 25 bp, Artificial
  probe
  misc_feature (1)..(25): SEQ ID NO: 2997; WAN024G8T_at; Start 728; Stop 752
caaaagcaccggaattggtgacaga

SEQ ID NO: 235730 - DNA, 25 bp, Artificial
  probe
  misc_feature (1)..(25): SEQ ID NO: 2997; WAN024G8T_at; Start 254; Stop 278
gcgacgatcttcttctcttcaccta

SEQ ID NO: 235731 - DNA, 25 bp, Artificial
  probe
  misc_feature (1)..(25): SEQ ID NO: 2997; WAN024G8T_at; Start 123; Stop 147
cggttctggctttactgatgctgac

SEQ ID NO: 235732 - DNA, 25 bp, Artificial
  probe
  misc_feature (1)..(25): SEQ ID NO: 2997; WAN024G8T_at; Start 527; Stop 551
gtgtcgtcggtacacatgctgcccg

SEQ ID NO: 235733 - DNA, 25 bp, Artificial
  probe
  misc_feature (1)..(25): SEQ ID NO: 2997; WAN024G8T_at; Start 480; Stop 504
tggtgtaccaggtgttccaaaagga

SEQ ID NO: 235734 - DNA, 25 bp, Artificial
  probe
  misc_feature (1)..(25): SEQ ID NO: 2997; WAN024G8T_at; Start 335; Stop 359
caggaattgcctatgaaactgttcg

SEQ ID NO: 235735 - DNA, 25 bp, Artificial
  probe
  misc_feature (1)..(25): SEQ ID NO: 2997; WAN024G8T_at; Start 666; Stop 690
caacattgaagcaagtgtgagagat

SEQ ID NO: 235736 - DNA, 25 bp, Artificial
  probe
  misc_feature (1)..(25): SEQ ID NO: 4045; WAN024G8U_at; Start 153; Stop 177
tttggcacctttgtatggaaactca

SEQ ID NO: 235737 - DNA, 25 bp, Artificial
  probe
  misc_feature (1)..(25): SEQ ID NO: 4045; WAN024G8U_at; Start 202; Stop 226
aagactgcttgcacgggtttaacta

SEQ ID NO: 235738 - DNA, 25 bp, Artificial
  probe
  misc_feature (1)..(25): SEQ ID NO: 4045; WAN024G8U_at; Start 77; Stop 101
gcagttggttatacatagctaaaat

SEQ ID NO: 235739 - DNA, 25 bp, Artificial
  probe
  misc_feature (1)..(25): SEQ ID NO: 4045; WAN024G8U_at; Start 168; Stop 192
tggaaactcaaaagaagattggtca

SEQ ID NO: 235740 - DNA, 25 bp, Artificial
  probe
  misc_feature (1)..(25): SEQ ID NO: 4045; WAN024G8U_at; Start 125; Stop 149
tatcaagttcttccactcaaatcat

SEQ ID NO: 235741 - DNA, 25 bp, Artificial
  probe
  misc_feature (1)..(25): SEQ ID NO: 4045; WAN024G8U_at; Start 188; Stop 212
ggtcaatcttatctaagactgcttg

SEQ ID NO: 235742 - DNA, 25 bp, Artificial
  probe
  misc_feature (1)..(25): SEQ ID NO: 4045; WAN024G8U_at; Start 195; Stop 219
cttatctaagactgcttgcacgggt

SEQ ID NO: 235743 - DNA, 25 bp, Artificial
  probe
  misc_feature (1)..(25): SEQ ID NO: 4045; WAN024G8U_at; Start 160; Stop 184
cctttgtatggaaactcaaaagaag

SEQ ID NO: 235744 - DNA, 25 bp, Artificial
  probe
  misc_feature (1)..(25): SEQ ID NO: 4045; WAN024G8U_at; Start 172; Stop 196
aactcaaaagaagattggtcaatct

SEQ ID NO: 235745 - DNA, 25 bp, Artificial
  probe
  misc_feature (1)..(25): SEQ ID NO: 4045; WAN024G8U_at; Start 218; Stop 242
gtttaactaaaaagcgatcgtcata

SEQ ID NO: 235746 - DNA, 25 bp, Artificial
  probe
  misc_feature (1)..(25): SEQ ID NO: 4045; WAN024G8U_at; Start 8; Stop 32
gacagggccttagcagacttctttt

SEQ ID NO: 235747 - DNA, 25 bp, Artificial
  probe
  misc_feature (1)..(25): SEQ ID NO: 4045; WAN024G8U_at; Start 151; Stop 175
tctttggcacctttgtatggaaact

SEQ ID NO: 235748 - DNA, 25 bp, Artificial
  probe
  misc_feature (1)..(25): SEQ ID NO: 4045; WAN024G8U_at; Start 157; Stop 181
gcacctttgtatggaaactcaaaag

SEQ ID NO: 235749 - DNA, 25 bp, Artificial
  probe
  misc_feature (1)..(25): SEQ ID NO: 4045; WAN024G8U_at; Start 155; Stop 179
tggcacctttgtatggaaactcaaa

SEQ ID NO: 235750 - DNA, 25 bp, Artificial
  probe
  misc_feature (1)..(25): SEQ ID NO: 4045; WAN024G8U_at; Start 75; Stop 99
tggcagttggttatacatagctaaa

SEQ ID NO: 235751 - DNA, 25 bp, Artificial
  probe
  misc_feature (1)..(25): SEQ ID NO: 4045; WAN024G8U_at; Start 69; Stop 93
gggcgttggcagttggttatacata

SEQ ID NO: 235752 - DNA, 25 bp, Artificial
  probe
  misc_feature (1)..(25): SEQ ID NO: 4045; WAN024G8U_at; Start 10; Stop 34
cagggccttagcagacttctttttt

SEQ ID NO: 235753 - DNA, 25 bp, Artificial
  probe
  misc_feature (1)..(25): SEQ ID NO: 4045; WAN024G8U_at; Start 200; Stop 224
ctaagactgcttgcacgggtttaac

SEQ ID NO: 235754 - DNA, 25 bp, Artificial
  probe
  misc_feature (1)..(25): SEQ ID NO: 4045; WAN024G8U_at; Start 138; Stop 162
cactcaaatcatttctttggcacct

SEQ ID NO: 235755 - DNA, 25 bp, Artificial
  probe
  misc_feature (1)..(25): SEQ ID NO: 4045; WAN024G8U_at; Start 5; Stop 29
aaagacagggccttagcagacttct

SEQ ID NO: 235756 - DNA, 25 bp, Artificial
  probe
  misc_feature (1)..(25): SEQ ID NO: 4045; WAN024G8U_at; Start 67; Stop 91
ttgggcgttggcagttggttataca

SEQ ID NO: 235757 - DNA, 25 bp, Artificial
  probe
  misc_feature (1)..(25): SEQ ID NO: 4045; WAN024G8U_at; Start 104; Stop 128
ggtcttatagaaacatcttattatc

SEQ ID NO: 235758 - DNA, 25 bp, Artificial
  probe
  misc_feature (1)..(25): SEQ ID NO: 4045; WAN024G8U_at; Start 119; Stop 143
tcttattatcaagttcttccactca

SEQ ID NO: 235759 - DNA, 25 bp, Artificial
  probe
  misc_feature (1)..(25): SEQ ID NO: 4045; WAN024G8U_at; Start 143; Stop 167
aaatcatttctttggcacctttgta

SEQ ID NO: 235760 - DNA, 25 bp, Artificial
  probe
  misc_feature (1)..(25): SEQ ID NO: 4045; WAN024G8U_at; Start 128; Stop 152
caagttcttccactcaaatcatttc

SEQ ID NO: 235761 - DNA, 25 bp, Artificial
  probe
  misc_feature (1)..(25): SEQ ID NO: 4045; WAN024G8U_at; Start 20; Stop 44
gcagacttcttttttacttcgttca

SEQ ID NO: 235762 - DNA, 25 bp, Artificial
  probe
  misc_feature (1)..(25): SEQ ID NO: 4045; WAN024G8U_at; Start 184; Stop 208
gattggtcaatcttatctaagactg

SEQ ID NO: 235763 - DNA, 25 bp, Artificial
  probe
  misc_feature (1)..(25): SEQ ID NO: 4045; WAN024G8U_at; Start 219; Stop 243
tttaactaaaaagcgatcgtcataa

SEQ ID NO: 235764 - DNA, 25 bp, Artificial
  probe
  misc_feature (1)..(25): SEQ ID NO: 4045; WAN024G8U_at; Start 164; Stop 188
tgtatggaaactcaaaagaagattg

SEQ ID NO: 235765 - DNA, 25 bp, Artificial
  probe
  misc_feature (1)..(25): SEQ ID NO: 4045; WAN024G8U_at; Start 197; Stop 221
tatctaagactgcttgcacgggttt

SEQ ID NO: 235766 - DNA, 25 bp, Artificial
  probe
  misc_feature (1)..(25): SEQ ID NO: 4045; WAN024G8U_at; Start 72; Stop 96
cgttggcagttggttatacatagct

SEQ ID NO: 235767 - DNA, 25 bp, Artificial
  probe
  misc_feature (1)..(25): SEQ ID NO: 4045; WAN024G8U_at; Start 194; Stop 218
tcttatctaagactgcttgcacggg

SEQ ID NO: 235768 - DNA, 25 bp, Artificial
  probe
  misc_feature (1)..(25): SEQ ID NO: 4045; WAN024G8U_at; Start 4; Stop 28
caaagacagggccttagcagacttc

SEQ ID NO: 235769 - DNA, 25 bp, Artificial
  probe
  misc_feature (1)..(25): SEQ ID NO: 4045; WAN024G8U_at; Start 147; Stop 171
catttctttggcacctttgtatgga

SEQ ID NO: 235770 - DNA, 25 bp, Artificial
  probe
  misc_feature (1)..(25): SEQ ID NO: 2441; WAN024G8V_at; Start 157; Stop 181
caagcagtcttagataagattgacc

SEQ ID NO: 235771 - DNA, 25 bp, Artificial
  probe
  misc_feature (1)..(25): SEQ ID NO: 2441; WAN024G8V_at; Start 25; Stop 49
gaatttgttttggaacaattatcag

SEQ ID NO: 235772 - DNA, 25 bp, Artificial
  probe
  misc_feature (1)..(25): SEQ ID NO: 2441; WAN024G8V_at; Start 84; Stop 108
ggagtatattctttacttccgcggc

SEQ ID NO: 235773 - DNA, 25 bp, Artificial
  probe
  misc_feature (1)..(25): SEQ ID NO: 2441; WAN024G8V_at; Start 161; Stop 185
cagtcttagataagattgaccaatc

SEQ ID NO: 235774 - DNA, 25 bp, Artificial
  probe
  misc_feature (1)..(25): SEQ ID NO: 2441; WAN024G8V_at; Start 31; Stop 55
gttttggaacaattatcaggattag

SEQ ID NO: 235775 - DNA, 25 bp, Artificial
  probe
  misc_feature (1)..(25): SEQ ID NO: 2441; WAN024G8V_at; Start 57; Stop 81
tgatgtgacttaccgttccatgatg

SEQ ID NO: 235776 - DNA, 25 bp, Artificial
  probe
  misc_feature (1)..(25): SEQ ID NO: 2441; WAN024G8V_at; Start 151; Stop 175
cccgtgcaagcagtcttagataaga

SEQ ID NO: 235777 - DNA, 25 bp, Artificial
  probe
  misc_feature (1)..(25): SEQ ID NO: 2441; WAN024G8V_at; Start 50; Stop 74
gattagatgatgtgacttaccgttc

SEQ ID NO: 235778 - DNA, 25 bp, Artificial
  probe
  misc_feature (1)..(25): SEQ ID NO: 2441; WAN024G8V_at; Start 87; Stop 111
gtatattctttacttccgcggcaag

SEQ ID NO: 235779 - DNA, 25 bp, Artificial
  probe
  misc_feature (1)..(25): SEQ ID NO: 2441; WAN024G8V_at; Start 142; Stop 166
ttagttaaacccgtgcaagcagtct

SEQ ID NO: 235780 - DNA, 25 bp, Artificial
  probe
  misc_feature (1)..(25): SEQ ID NO: 2441; WAN024G8V_at; Start 3; Stop 27
ggcatcaagtaagaactatttggaa

SEQ ID NO: 235781 - DNA, 25 bp, Artificial
  probe
  misc_feature (1)..(25): SEQ ID NO: 2441; WAN024G8V_at; Start 59; Stop 83
atgtgacttaccgttccatgatggg

SEQ ID NO: 235782 - DNA, 25 bp, Artificial
  probe
  misc_feature (1)..(25): SEQ ID NO: 2441; WAN024G8V_at; Start 201; Stop 225
atacaaaggtgccaaagaaatgatt

SEQ ID NO: 235783 - DNA, 25 bp, Artificial
  probe
  misc_feature (1)..(25): SEQ ID NO: 2441; WAN024G8V_at; Start 1; Stop 25
atggcatcaagtaagaactatttgg

SEQ ID NO: 235784 - DNA, 25 bp, Artificial
  probe
  misc_feature (1)..(25): SEQ ID NO: 2441; WAN024G8V_at; Start 189; Stop 213
ttttgagtttccatacaaaggtgcc

SEQ ID NO: 235785 - DNA, 25 bp, Artificial
  probe
  misc_feature (1)..(25): SEQ ID NO: 2441; WAN024G8V_at; Start 174; Stop 198
gattgaccaatcttcttttgagttt

SEQ ID NO: 235786 - DNA, 25 bp, Artificial
  probe
  misc_feature (1)..(25): SEQ ID NO: 2441; WAN024G8V_at; Start 181; Stop 205
caatcttcttttgagtttccataca

SEQ ID NO: 235787 - DNA, 25 bp, Artificial
  probe
  misc_feature (1)..(25): SEQ ID NO: 2441; WAN024G8V_at; Start 69; Stop 93
ccgttccatgatgggggagtatatt

SEQ ID NO: 235788 - DNA, 25 bp, Artificial
  probe
  misc_feature (1)..(25): SEQ ID NO: 2441; WAN024G8V_at; Start 147; Stop 171
taaacccgtgcaagcagtcttagat

SEQ ID NO: 235789 - DNA, 25 bp, Artificial
  probe
  misc_feature (1)..(25): SEQ ID NO: 2441; WAN024G8V_at; Start 90; Stop 114
tattctttacttccgcggcaagatt

SEQ ID NO: 235790 - DNA, 25 bp, Artificial
  probe
  misc_feature (1)..(25): SEQ ID NO: 2441; WAN024G8V_at; Start 34; Stop 58
ttggaacaattatcaggattagatg

SEQ ID NO: 235791 - DNA, 25 bp, Artificial
  probe
  misc_feature (1)..(25): SEQ ID NO: 2441; WAN024G8V_at; Start 193; Stop 217
gagtttccatacaaaggtgccaaag

SEQ ID NO: 235792 - DNA, 25 bp, Artificial
  probe
  misc_feature (1)..(25): SEQ ID NO: 2441; WAN024G8V_at; Start 47; Stop 71
caggattagatgatgtgacttaccg

SEQ ID NO: 235793 - DNA, 25 bp, Artificial
  probe
  misc_feature (1)..(25): SEQ ID NO: 2441; WAN024G8V_at; Start 153; Stop 177
cgtgcaagcagtcttagataagatt

SEQ ID NO: 235794 - DNA, 25 bp, Artificial
  probe
  misc_feature (1)..(25): SEQ ID NO: 2441; WAN024G8V_at; Start 88; Stop 112
tatattctttacttccgcggcaaga

SEQ ID NO: 235795 - DNA, 25 bp, Artificial
  probe
  misc_feature (1)..(25): SEQ ID NO: 2441; WAN024G8V_at; Start 198; Stop 222
tccatacaaaggtgccaaagaaatg

SEQ ID NO: 235796 - DNA, 25 bp, Artificial
  probe
  misc_feature (1)..(25): SEQ ID NO: 2441; WAN024G8V_at; Start 192; Stop 216
tgagtttccatacaaaggtgccaaa

SEQ ID NO: 235797 - DNA, 25 bp, Artificial
  probe
  misc_feature (1)..(25): SEQ ID NO: 2441; WAN024G8V_at; Start 96; Stop 120
ttacttccgcggcaagattattggc

SEQ ID NO: 235798 - DNA, 25 bp, Artificial
  probe
  misc_feature (1)..(25): SEQ ID NO: 2441; WAN024G8V_at; Start 145; Stop 169
gttaaacccgtgcaagcagtcttag

SEQ ID NO: 235799 - DNA, 25 bp, Artificial
  probe
  misc_feature (1)..(25): SEQ ID NO: 2441; WAN024G8V_at; Start 52; Stop 76
ttagatgatgtgacttaccgttcca

SEQ ID NO: 235800 - DNA, 25 bp, Artificial
  probe
  misc_feature (1)..(25): SEQ ID NO: 2441; WAN024G8V_at; Start 195; Stop 219
gtttccatacaaaggtgccaaagaa

SEQ ID NO: 235801 - DNA, 25 bp, Artificial
  probe
  misc_feature (1)..(25): SEQ ID NO: 2441; WAN024G8V_at; Start 55; Stop 79
gatgatgtgacttaccgttccatga

SEQ ID NO: 235802 - DNA, 25 bp, Artificial
  probe
  misc_feature (1)..(25): SEQ ID NO: 2441; WAN024G8V_at; Start 8; Stop 32
caagtaagaactatttggaatttgt

SEQ ID NO: 235803 - DNA, 25 bp, Artificial
  probe
  misc_feature (1)..(25): SEQ ID NO: 2441; WAN024G8V_at; Start 98; Stop 122
acttccgcggcaagattattggcgg

SEQ ID NO: 235804 - DNA, 25 bp, Artificial
  probe
  misc_feature (1)..(25): SEQ ID NO: 5630; WAN024G8W_at; Start 12; Stop 36
gggtcattctctctttagctttttc

SEQ ID NO: 235805 - DNA, 25 bp, Artificial
  probe
  misc_feature (1)..(25): SEQ ID NO: 5630; WAN024G8W_at; Start 102; Stop 126
gatattttcaccaaatacgacacgt

SEQ ID NO: 235806 - DNA, 25 bp, Artificial
  probe
  misc_feature (1)..(25): SEQ ID NO: 5630; WAN024G8W_at; Start 78; Stop 102
gatattatttgaaactgttgttccg

SEQ ID NO: 235807 - DNA, 25 bp, Artificial
  probe
  misc_feature (1)..(25): SEQ ID NO: 5630; WAN024G8W_at; Start 403; Stop 427
gcaccaaagataacgatacggcctt

SEQ ID NO: 235808 - DNA, 25 bp, Artificial
  probe
  misc_feature (1)..(25): SEQ ID NO: 5630; WAN024G8W_at; Start 410; Stop 434
agataacgatacggcctttttcaag

SEQ ID NO: 235809 - DNA, 25 bp, Artificial
  probe
  misc_feature (1)..(25): SEQ ID NO: 5630; WAN024G8W_at; Start 327; Stop 351
gatggcatctgcttcgatttcagct

SEQ ID NO: 235810 - DNA, 25 bp, Artificial
  probe
  misc_feature (1)..(25): SEQ ID NO: 5630; WAN024G8W_at; Start 353; Stop 377
cacgaagggccgctgttgtatctgt

SEQ ID NO: 235811 - DNA, 25 bp, Artificial
  probe
  misc_feature (1)..(25): SEQ ID NO: 5630; WAN024G8W_at; Start 362; Stop 386
ccgctgttgtatctgtcgagaagta

SEQ ID NO: 235812 - DNA, 25 bp, Artificial
  probe
  misc_feature (1)..(25): SEQ ID NO: 5630; WAN024G8W_at; Start 356; Stop 380
gaagggccgctgttgtatctgtcga

SEQ ID NO: 235813 - DNA, 25 bp, Artificial
  probe
  misc_feature (1)..(25): SEQ ID NO: 5630; WAN024G8W_at; Start 381; Stop 405
gaagtatggtgaaccaattccagca

SEQ ID NO: 235814 - DNA, 25 bp, Artificial
  probe
  misc_feature (1)..(25): SEQ ID NO: 5630; WAN024G8W_at; Start 158; Stop 182
caaccaagtcaatgtcgttgtccat

SEQ ID NO: 235815 - DNA, 25 bp, Artificial
  probe
  misc_feature (1)..(25): SEQ ID NO: 5630; WAN024G8W_at; Start 374; Stop 398
ctgtcgagaagtatggtgaaccaat

SEQ ID NO: 235816 - DNA, 25 bp, Artificial
  probe
  misc_feature (1)..(25): SEQ ID NO: 5630; WAN024G8W_at; Start 306; Stop 330
gacgccatttttagccatgaggatg

SEQ ID NO: 235817 - DNA, 25 bp, Artificial
  probe
  misc_feature (1)..(25): SEQ ID NO: 5630; WAN024G8W_at; Start 314; Stop 338
ttttagccatgaggatggcatctgc

SEQ ID NO: 235818 - DNA, 25 bp, Artificial
  probe
  misc_feature (1)..(25): SEQ ID NO: 5630; WAN024G8W_at; Start 398; Stop 422
ttccagcaccaaagataacgatacg

SEQ ID NO: 235819 - DNA, 25 bp, Artificial
  probe
  misc_feature (1)..(25): SEQ ID NO: 5630; WAN024G8W_at; Start 45; Stop 69
cgttagccatattctttcttattcc

SEQ ID NO: 235820 - DNA, 25 bp, Artificial
  probe
  misc_feature (1)..(25): SEQ ID NO: 5630; WAN024G8W_at; Start 332; Stop 356
catctgcttcgatttcagctgcacg

SEQ ID NO: 235821 - DNA, 25 bp, Artificial
  probe
  misc_feature (1)..(25): SEQ ID NO: 5630; WAN024G8W_at; Start 115; Stop 139
aatacgacacgtttgatgttgcctg

SEQ ID NO: 235822 - DNA, 25 bp, Artificial
  probe
  misc_feature (1)..(25): SEQ ID NO: 5630; WAN024G8W_at; Start 340; Stop 364
tcgatttcagctgcacgaagggccg

SEQ ID NO: 235823 - DNA, 25 bp, Artificial
  probe
  misc_feature (1)..(25): SEQ ID NO: 5630; WAN024G8W_at; Start 167; Stop 191
caatgtcgttgtccattgagagggt

SEQ ID NO: 235824 - DNA, 25 bp, Artificial
  probe
  misc_feature (1)..(25): SEQ ID NO: 5630; WAN024G8W_at; Start 320; Stop 344
ccatgaggatggcatctgcttcgat

SEQ ID NO: 235825 - DNA, 25 bp, Artificial
  probe
  misc_feature (1)..(25): SEQ ID NO: 5630; WAN024G8W_at; Start 196; Stop 220
gctgttgagtccatgatacgaagac

SEQ ID NO: 235826 - DNA, 25 bp, Artificial
  probe
  misc_feature (1)..(25): SEQ ID NO: 5630; WAN024G8W_at; Start 388; Stop 412
ggtgaaccaattccagcaccaaaga

SEQ ID NO: 235827 - DNA, 25 bp, Artificial
  probe
  misc_feature (1)..(25): SEQ ID NO: 5630; WAN024G8W_at; Start 371; Stop 395
tatctgtcgagaagtatggtgaacc

SEQ ID NO: 235828 - DNA, 25 bp, Artificial
  probe
  misc_feature (1)..(25): SEQ ID NO: 5630; WAN024G8W_at; Start 235; Stop 259
tcacggtgggtcaattcttcaaact

SEQ ID NO: 235829 - DNA, 25 bp, Artificial
  probe
  misc_feature (1)..(25): SEQ ID NO: 5630; WAN024G8W_at; Start 170; Stop 194
tgtcgttgtccattgagagggttga

SEQ ID NO: 235830 - DNA, 25 bp, Artificial
  probe
  misc_feature (1)..(25): SEQ ID NO: 5630; WAN024G8W_at; Start 299; Stop 323
caccatcgacgccatttttagccat

SEQ ID NO: 235831 - DNA, 25 bp, Artificial
  probe
  misc_feature (1)..(25): SEQ ID NO: 5630; WAN024G8W_at; Start 347; Stop 371
cagctgcacgaagggccgctgttgt

SEQ ID NO: 235832 - DNA, 25 bp, Artificial
  probe
  misc_feature (1)..(25): SEQ ID NO: 5630; WAN024G8W_at; Start 394; Stop 418
ccaattccagcaccaaagataacga

SEQ ID NO: 235833 - DNA, 25 bp, Artificial
  probe
  misc_feature (1)..(25): SEQ ID NO: 5630; WAN024G8W_at; Start 200; Stop 224
ttgagtccatgatacgaagaccttt

SEQ ID NO: 235834 - DNA, 25 bp, Artificial
  probe
  misc_feature (1)..(25): SEQ ID NO: 5630; WAN024G8W_at; Start 359; Stop 383
gggccgctgttgtatctgtcgagaa

SEQ ID NO: 235835 - DNA, 25 bp, Artificial
  probe
  misc_feature (1)..(25): SEQ ID NO: 5630; WAN024G8W_at; Start 344; Stop 368
tttcagctgcacgaagggccgctgt

SEQ ID NO: 235836 - DNA, 25 bp, Artificial
  probe
  misc_feature (1)..(25): SEQ ID NO: 5630; WAN024G8W_at; Start 90; Stop 114
aactgttgttccgatattttcacca

SEQ ID NO: 235837 - DNA, 25 bp, Artificial
  probe
  misc_feature (1)..(25): SEQ ID NO: 5630; WAN024G8W_at; Start 304; Stop 328
tcgacgccatttttagccatgagga

SEQ ID NO: 235838 - DNA, 25 bp, Artificial
  probe
  misc_feature (1)..(25): SEQ ID NO: 5415; WAN024G8X_at; Start 30; Stop 54
tgaccgtatcccctactgtatgttg

SEQ ID NO: 235839 - DNA, 25 bp, Artificial
  probe
  misc_feature (1)..(25): SEQ ID NO: 5415; WAN024G8X_at; Start 182; Stop 206
taaaactcagccagcaatgccaact

SEQ ID NO: 235840 - DNA, 25 bp, Artificial
  probe
  misc_feature (1)..(25): SEQ ID NO: 5415; WAN024G8X_at; Start 446; Stop 470
ggtcacgacgagtttcttctgtaag

SEQ ID NO: 235841 - DNA, 25 bp, Artificial
  probe
  misc_feature (1)..(25): SEQ ID NO: 5415; WAN024G8X_at; Start 483; Stop 507
caagcgaatcacagaaccgtcatta

SEQ ID NO: 235842 - DNA, 25 bp, Artificial
  probe
  misc_feature (1)..(25): SEQ ID NO: 5415; WAN024G8X_at; Start 172; Stop 196
ttctttcgaataaaactcagccagc

SEQ ID NO: 235843 - DNA, 25 bp, Artificial
  probe
  misc_feature (1)..(25): SEQ ID NO: 5415; WAN024G8X_at; Start 576; Stop 600
tggtgttaccaacaaaacacgcgct

SEQ ID NO: 235844 - DNA, 25 bp, Artificial
  probe
  misc_feature (1)..(25): SEQ ID NO: 5415; WAN024G8X_at; Start 432; Stop 456
cacttctttagcaaggtcacgacga

SEQ ID NO: 235845 - DNA, 25 bp, Artificial
  probe
  misc_feature (1)..(25): SEQ ID NO: 5415; WAN024G8X_at; Start 460; Stop 484
tcttctgtaagagctgggataacca

SEQ ID NO: 235846 - DNA, 25 bp, Artificial
  probe
  misc_feature (1)..(25): SEQ ID NO: 5415; WAN024G8X_at; Start 281; Stop 305
cagcatcgtctgttactttttgaat

SEQ ID NO: 235847 - DNA, 25 bp, Artificial
  probe
  misc_feature (1)..(25): SEQ ID NO: 5415; WAN024G8X_at; Start 609; Stop 633
cgtaattgaagcgatttggttaaga

SEQ ID NO: 235848 - DNA, 25 bp, Artificial
  probe
  misc_feature (1)..(25): SEQ ID NO: 5415; WAN024G8X_at; Start 418; Stop 442
tcgccgaccttcttcacttctttag

SEQ ID NO: 235849 - DNA, 25 bp, Artificial
  probe
  misc_feature (1)..(25): SEQ ID NO: 5415; WAN024G8X_at; Start 390; Stop 414
gatattgcggacagccactttagca

SEQ ID NO: 235850 - DNA, 25 bp, Artificial
  probe
  misc_feature (1)..(25): SEQ ID NO: 5415; WAN024G8X_at; Start 56; Stop 80
ccttcttccttagcaagagcatagg

SEQ ID NO: 235851 - DNA, 25 bp, Artificial
  probe
  misc_feature (1)..(25): SEQ ID NO: 5415; WAN024G8X_at; Start 79; Stop 103
ggtttgaccatccttttgcacaaag

SEQ ID NO: 235852 - DNA, 25 bp, Artificial
  probe
  misc_feature (1)..(25): SEQ ID NO: 5415; WAN024G8X_at; Start 66; Stop 90
tagcaagagcataggtttgaccatc

SEQ ID NO: 235853 - DNA, 25 bp, Artificial
  probe
  misc_feature (1)..(25): SEQ ID NO: 5415; WAN024G8X_at; Start 261; Stop 285
catgtcgtcgatgtgtttaacagca

SEQ ID NO: 235854 - DNA, 25 bp, Artificial
  probe
  misc_feature (1)..(25): SEQ ID NO: 5415; WAN024G8X_at; Start 316; Stop 340
agagtcttcaattcgtcttcagtga

SEQ ID NO: 235855 - DNA, 25 bp, Artificial
  probe
  misc_feature (1)..(25): SEQ ID NO: 5415; WAN024G8X_at; Start 588; Stop 612
caaaacacgcgcttctggaatcgta

SEQ ID NO: 235856 - DNA, 25 bp, Artificial
  probe
  misc_feature (1)..(25): SEQ ID NO: 5415; WAN024G8X_at; Start 116; Stop 140
ttttcatcgatgatcagtccaacga

SEQ ID NO: 235857 - DNA, 25 bp, Artificial
  probe
  misc_feature (1)..(25): SEQ ID NO: 5415; WAN024G8X_at; Start 594; Stop 618
acgcgcttctggaatcgtaattgaa

SEQ ID NO: 235858 - DNA, 25 bp, Artificial
  probe
  misc_feature (1)..(25): SEQ ID NO: 5415; WAN024G8X_at; Start 234; Stop 258
caaaagttctttctctttgttagca

SEQ ID NO: 235859 - DNA, 25 bp, Artificial
  probe
  misc_feature (1)..(25): SEQ ID NO: 5415; WAN024G8X_at; Start 247; Stop 271
tctttgttagcagtcatgtcgtcga

SEQ ID NO: 235860 - DNA, 25 bp, Artificial
  probe
  misc_feature (1)..(25): SEQ ID NO: 5415; WAN024G8X_at; Start 496; Stop 520
gaaccgtcattagccggtgtgatac

SEQ ID NO: 235861 - DNA, 25 bp, Artificial
  probe
  misc_feature (1)..(25): SEQ ID NO: 5415; WAN024G8X_at; Start 17; Stop 41
tatgcaaaacctttgaccgtatccc

SEQ ID NO: 235862 - DNA, 25 bp, Artificial
  probe
  misc_feature (1)..(25): SEQ ID NO: 5415; WAN024G8X_at; Start 562; Stop 586
gaagacttgtcaaatggtgttacca

SEQ ID NO: 235863 - DNA, 25 bp, Artificial
  probe
  misc_feature (1)..(25): SEQ ID NO: 5415; WAN024G8X_at; Start 3; Stop 27
gcttcatatccgtgtatgcaaaacc

SEQ ID NO: 235864 - DNA, 25 bp, Artificial
  probe
  misc_feature (1)..(25): SEQ ID NO: 5415; WAN024G8X_at; Start 403; Stop 427
gccactttagcattttcgccgacct

SEQ ID NO: 235865 - DNA, 25 bp, Artificial
  probe
  misc_feature (1)..(25): SEQ ID NO: 5415; WAN024G8X_at; Start 626; Stop 650
ggttaagaggagtttcgactccata

SEQ ID NO: 235866 - DNA, 25 bp, Artificial
  probe
  misc_feature (1)..(25): SEQ ID NO: 5415; WAN024G8X_at; Start 375; Stop 399
catagcatcgcgacggatattgcgg

SEQ ID NO: 235867 - DNA, 25 bp, Artificial
  probe
  misc_feature (1)..(25): SEQ ID NO: 5415; WAN024G8X_at; Start 362; Stop 386
tcttagcttcgtccatagcatcgcg

SEQ ID NO: 235868 - DNA, 25 bp, Artificial
  probe
  misc_feature (1)..(25): SEQ ID NO: 5415; WAN024G8X_at; Start 129; Stop 153
tcagtccaacgataaaacttgcaag

SEQ ID NO: 235869 - DNA, 25 bp, Artificial
  probe
  misc_feature (1)..(25): SEQ ID NO: 5415; WAN024G8X_at; Start 548; Stop 572
cgatgtctttcaatgaagacttgtc

SEQ ID NO: 235870 - DNA, 25 bp, Artificial
  probe
  misc_feature (1)..(25): SEQ ID NO: 5415; WAN024G8X_at; Start 472; Stop 496
gctgggataaccaagcgaatcacag

SEQ ID NO: 235871 - DNA, 25 bp, Artificial
  probe
  misc_feature (1)..(25): SEQ ID NO: 5415; WAN024G8X_at; Start 191; Stop 215
gccagcaatgccaactgagtttttc

SEQ ID NO: 235872 - DNA, 25 bp, Artificial
  probe
  misc_feature (1)..(25): SEQ ID NO: 5518; WAN024G8Y_at; Start 193; Stop 217
gatatgaagcaaaaactccgcctga

SEQ ID NO: 235873 - DNA, 25 bp, Artificial
  probe
  misc_feature (1)..(25): SEQ ID NO: 5518; WAN024G8Y_at; Start 5; Stop 29
cattgctggctgagttttattcgaa

SEQ ID NO: 235874 - DNA, 25 bp, Artificial
  probe
  misc_feature (1)..(25): SEQ ID NO: 5518; WAN024G8Y_at; Start 372; Stop 396
taagaagggcgaccaactctacatc

SEQ ID NO: 235875 - DNA, 25 bp, Artificial
  probe
  misc_feature (1)..(25): SEQ ID NO: 5518; WAN024G8Y_at; Start 742; Stop 766
aatggcggtttcatgaccttaaatg

SEQ ID NO: 235876 - DNA, 25 bp, Artificial
  probe
  misc_feature (1)..(25): SEQ ID NO: 5518; WAN024G8Y_at; Start 400; Stop 424
cttgaagtggataagaaagaccgta

SEQ ID NO: 235877 - DNA, 25 bp, Artificial
  probe
  misc_feature (1)..(25): SEQ ID NO: 5518; WAN024G8Y_at; Start 205; Stop 229
aaactccgcctgacaaccttagaag

SEQ ID NO: 235878 - DNA, 25 bp, Artificial
  probe
  misc_feature (1)..(25): SEQ ID NO: 5518; WAN024G8Y_at; Start 286; Stop 310
ttgggtgtctttgtggatacaggcc

SEQ ID NO: 235879 - DNA, 25 bp, Artificial
  probe
  misc_feature (1)..(25): SEQ ID NO: 5518; WAN024G8Y_at; Start 260; Stop 284
gacgtgtcacagaggttcgtaagga

SEQ ID NO: 235880 - DNA, 25 bp, Artificial
  probe
  misc_feature (1)..(25): SEQ ID NO: 5518; WAN024G8Y_at; Start 789; Stop 813
caaggcaacctttggcatttctaaa

SEQ ID NO: 235881 - DNA, 25 bp, Artificial
  probe
  misc_feature (1)..(25): SEQ ID NO: 5518; WAN024G8Y_at; Start 488; Stop 512
tgcagaaccaaaactggccagccat

SEQ ID NO: 235882 - DNA, 25 bp, Artificial
  probe
  misc_feature (1)..(25): SEQ ID NO: 5518; WAN024G8Y_at; Start 547; Stop 571
tacctaccagaaaataatatgcttg

SEQ ID NO: 235883 - DNA, 25 bp, Artificial
  probe
  misc_feature (1)..(25): SEQ ID NO: 5518; WAN024G8Y_at; Start 328; Stop 352
gttgtgtcactcgatattctccctg

SEQ ID NO: 235884 - DNA, 25 bp, Artificial
  probe
  misc_feature (1)..(25): SEQ ID NO: 5518; WAN024G8Y_at; Start 570; Stop 594
tggttttattcatcctagcgagcgt

SEQ ID NO: 235885 - DNA, 25 bp, Artificial
  probe
  misc_feature (1)..(25): SEQ ID NO: 5518; WAN024G8Y_at; Start 623; Stop 647
tagatgcgcgcgttattggtttccg

SEQ ID NO: 235886 - DNA, 25 bp, Artificial
  probe
  misc_feature (1)..(25): SEQ ID NO: 5518; WAN024G8Y_at; Start 118; Stop 142
ggtcaaacctatgctcttgctaagg

SEQ ID NO: 235887 - DNA, 25 bp, Artificial
  probe
  misc_feature (1)..(25): SEQ ID NO: 5518; WAN024G8Y_at; Start 216; Stop 240
gacaaccttagaagtgactgccact

SEQ ID NO: 235888 - DNA, 25 bp, Artificial
  probe
  misc_feature (1)..(25): SEQ ID NO: 5518; WAN024G8Y_at; Start 55; Stop 79
gcaagttttatcgttggactgatca

SEQ ID NO: 235889 - DNA, 25 bp, Artificial
  probe
  misc_feature (1)..(25): SEQ ID NO: 5518; WAN024G8Y_at; Start 301; Stop 325
gatacaggccttcctgacaaggaaa

SEQ ID NO: 235890 - DNA, 25 bp, Artificial
  probe
  misc_feature (1)..(25): SEQ ID NO: 5518; WAN024G8Y_at; Start 817; Stop 841
cagttcaagaaagctttaggtggtc

SEQ ID NO: 235891 - DNA, 25 bp, Artificial
  probe
  misc_feature (1)..(25): SEQ ID NO: 5518; WAN024G8Y_at; Start 683; Stop 707
cacgctcctttgaaatgttggaaaa

SEQ ID NO: 235892 - DNA, 25 bp, Artificial
  probe
  misc_feature (1)..(25): SEQ ID NO: 5518; WAN024G8Y_at; Start 386; Stop 410
aactctacatccgtcttgaagtgga

SEQ ID NO: 235893 - DNA, 25 bp, Artificial
  probe
  misc_feature (1)..(25): SEQ ID NO: 5518; WAN024G8Y_at; Start 356; Stop 380
tcaaggaactctggcctaagaaggg

SEQ ID NO: 235894 - DNA, 25 bp, Artificial
  probe
  misc_feature (1)..(25): SEQ ID NO: 5518; WAN024G8Y_at; Start 316; Stop 340
gacaaggaaatcgttgtgtcactcg

SEQ ID NO: 235895 - DNA, 25 bp, Artificial
  probe
  misc_feature (1)..(25): SEQ ID NO: 5518; WAN024G8Y_at; Start 102; Stop 126
ctttgtgcaaaaggatggtcaaacc

SEQ ID NO: 235896 - DNA, 25 bp, Artificial
  probe
  misc_feature (1)..(25): SEQ ID NO: 5518; WAN024G8Y_at; Start 173; Stop 197
tcaaaggttttgcatacacggatat

SEQ ID NO: 235897 - DNA, 25 bp, Artificial
  probe
  misc_feature (1)..(25): SEQ ID NO: 5518; WAN024G8Y_at; Start 503; Stop 527
ggccagccattgtttaccgtctcaa

SEQ ID NO: 235898 - DNA, 25 bp, Artificial
  probe
  misc_feature (1)..(25): SEQ ID NO: 5518; WAN024G8Y_at; Start 842; Stop 866
ttatgaaggctggtaaaatcaagca

SEQ ID NO: 235899 - DNA, 25 bp, Artificial
  probe
  misc_feature (1)..(25): SEQ ID NO: 5518; WAN024G8Y_at; Start 437; Stop 461
tggcttatcaagaagacttccaacg

SEQ ID NO: 235900 - DNA, 25 bp, Artificial
  probe
  misc_feature (1)..(25): SEQ ID NO: 5518; WAN024G8Y_at; Start 230; Stop 254
tgactgccactcaggaccaatttgg

SEQ ID NO: 235901 - DNA, 25 bp, Artificial
  probe
  misc_feature (1)..(25): SEQ ID NO: 5518; WAN024G8Y_at; Start 698; Stop 722
tgttggaaaacgatgctcagatgat

SEQ ID NO: 235902 - DNA, 25 bp, Artificial
  probe
  misc_feature (1)..(25): SEQ ID NO: 5518; WAN024G8Y_at; Start 639; Stop 663
tggtttccgtgaagtggaccgcact

SEQ ID NO: 235903 - DNA, 25 bp, Artificial
  probe
  misc_feature (1)..(25): SEQ ID NO: 5518; WAN024G8Y_at; Start 589; Stop 613
gagcgttacgcagagccacgtttgg

SEQ ID NO: 235904 - DNA, 25 bp, Artificial
  probe
  misc_feature (1)..(25): SEQ ID NO: 5518; WAN024G8Y_at; Start 772; Stop 796
tcatctccagacgacatcaaggcaa

SEQ ID NO: 235905 - DNA, 25 bp, Artificial
  probe
  misc_feature (1)..(25): SEQ ID NO: 5518; WAN024G8Y_at; Start 802; Stop 826
ggcatttctaaaggtcagttcaaga

SEQ ID NO: 235906 - DNA, 25 bp, Artificial
  probe
  misc_feature (1)..(25): SEQ ID NO: 3847; WAN024G8Z_at; Start 424; Stop 448
ttctcgacagatacaacagcggccc

SEQ ID NO: 235907 - DNA, 25 bp, Artificial
  probe
  misc_feature (1)..(25): SEQ ID NO: 3847; WAN024G8Z_at; Start 298; Stop 322
gatacgcgtgtacaaacagctattg

SEQ ID NO: 235908 - DNA, 25 bp, Artificial
  probe
  misc_feature (1)..(25): SEQ ID NO: 3847; WAN024G8Z_at; Start 395; Stop 419
tctttggtgctggaattggttcacc

SEQ ID NO: 235909 - DNA, 25 bp, Artificial
  probe
  misc_feature (1)..(25): SEQ ID NO: 3847; WAN024G8Z_at; Start 469; Stop 493
gcagatgccatcctcatggctaaaa

SEQ ID NO: 235910 - DNA, 25 bp, Artificial
  probe
  misc_feature (1)..(25): SEQ ID NO: 3847; WAN024G8Z_at; Start 107; Stop 131
tcgcaaaagagattcaagaagttca

SEQ ID NO: 235911 - DNA, 25 bp, Artificial
  probe
  misc_feature (1)..(25): SEQ ID NO: 3847; WAN024G8Z_at; Start 8; Stop 32
tggcgaatcccaagtataaacgtat

SEQ ID NO: 235912 - DNA, 25 bp, Artificial
  probe
  misc_feature (1)..(25): SEQ ID NO: 3847; WAN024G8Z_at; Start 270; Stop 294
ggcagattcattgcaacaagttggg

SEQ ID NO: 235913 - DNA, 25 bp, Artificial
  probe
  misc_feature (1)..(25): SEQ ID NO: 3847; WAN024G8Z_at; Start 79; Stop 103
gggattgatatccaaacagttcaaa

SEQ ID NO: 235914 - DNA, 25 bp, Artificial
  probe
  misc_feature (1)..(25): SEQ ID NO: 3847; WAN024G8Z_at; Start 453; Stop 477
tgcagctgaaatcgaagcagatgcc

SEQ ID NO: 235915 - DNA, 25 bp, Artificial
  probe
  misc_feature (1)..(25): SEQ ID NO: 3847; WAN024G8Z_at; Start 335; Stop 359
tggcagagccttatgtccgtggacg

SEQ ID NO: 235916 - DNA, 25 bp, Artificial
  probe
  misc_feature (1)..(25): SEQ ID NO: 3847; WAN024G8Z_at; Start 67; Stop 91
gaacgtggcgtagggattgatatcc

SEQ ID NO: 235917 - DNA, 25 bp, Artificial
  probe
  misc_feature (1)..(25): SEQ ID NO: 3847; WAN024G8Z_at; Start 723; Stop 747
taatatcgaagaaaaggaataacta

SEQ ID NO: 235918 - DNA, 25 bp, Artificial
  probe
  misc_feature (1)..(25): SEQ ID NO: 3847; WAN024G8Z_at; Start 293; Stop 317
gggttgatacgcgtgtacaaacagc

SEQ ID NO: 235919 - DNA, 25 bp, Artificial
  probe
  misc_feature (1)..(25): SEQ ID NO: 3847; WAN024G8Z_at; Start 693; Stop 717
tggtgaaaatatcggaacaacagtt

SEQ ID NO: 235920 - DNA, 25 bp, Artificial
  probe
  misc_feature (1)..(25): SEQ ID NO: 3847; WAN024G8Z_at; Start 548; Stop 572
agtttgaagaattgacccaccgtga

SEQ ID NO: 235921 - DNA, 25 bp, Artificial
  probe
  misc_feature (1)..(25): SEQ ID NO: 3847; WAN024G8Z_at; Start 93; Stop 117
aacagttcaaacaatcgcaaaagag

SEQ ID NO: 235922 - DNA, 25 bp, Artificial
  probe
  misc_feature (1)..(25): SEQ ID NO: 3847; WAN024G8Z_at; Start 586; Stop 610
ggtcttcgtatcatggactcaacag

SEQ ID NO: 235923 - DNA, 25 bp, Artificial
  probe
  misc_feature (1)..(25): SEQ ID NO: 3847; WAN024G8Z_at; Start 326; Stop 350
tgcaacaagtggcagagccttatgt

SEQ ID NO: 235924 - DNA, 25 bp, Artificial
  probe
  misc_feature (1)..(25): SEQ ID NO: 3847; WAN024G8Z_at; Start 358; Stop 382
cgtgcccttcgtcaccttgaaaaag

SEQ ID NO: 235925 - DNA, 25 bp, Artificial
  probe
  misc_feature (1)..(25): SEQ ID NO: 3847; WAN024G8Z_at; Start 121; Stop 145
caagaagttcatagcttaggtatcg

SEQ ID NO: 235926 - DNA, 25 bp, Artificial
  probe
  misc_feature (1)..(25): SEQ ID NO: 3847; WAN024G8Z_at; Start 706; Stop 730
ggaacaacagtttcaaataatatcg

SEQ ID NO: 235927 - DNA, 25 bp, Artificial
  probe
  misc_feature (1)..(25): SEQ ID NO: 3847; WAN024G8Z_at; Start 128; Stop 152
ttcatagcttaggtatcgaaattgc

SEQ ID NO: 235928 - DNA, 25 bp, Artificial
  probe
  misc_feature (1)..(25): SEQ ID NO: 3847; WAN024G8Z_at; Start 623; Stop 647
caatggacaacgacattgacttggt

SEQ ID NO: 235929 - DNA, 25 bp, Artificial
  probe
  misc_feature (1)..(25): SEQ ID NO: 3847; WAN024G8Z_at; Start 53; Stop 77
aagcccttgccggtgaacgtggcgt

SEQ ID NO: 235930 - DNA, 25 bp, Artificial
  probe
  misc_feature (1)..(25): SEQ ID NO: 3847; WAN024G8Z_at; Start 255; Stop 279
gaatgctcttgtgatggcagattca

SEQ ID NO: 235931 - DNA, 25 bp, Artificial
  probe
  misc_feature (1)..(25): SEQ ID NO: 3847; WAN024G8Z_at; Start 239; Stop 263
tgcttgggactgttatgaatgctct

SEQ ID NO: 235932 - DNA, 25 bp, Artificial
  probe
  misc_feature (1)..(25): SEQ ID NO: 3847; WAN024G8Z_at; Start 192; Stop 216
tgcagcagaagcaggtatggaccgt

SEQ ID NO: 235933 - DNA, 25 bp, Artificial
  probe
  misc_feature (1)..(25): SEQ ID NO: 3847; WAN024G8Z_at; Start 613; Stop 637
tcaaccctctcaatggacaacgaca

SEQ ID NO: 235934 - DNA, 25 bp, Artificial
  probe
  misc_feature (1)..(25): SEQ ID NO: 3847; WAN024G8Z_at; Start 346; Stop 370
tatgtccgtggacgtgcccttcgtc

SEQ ID NO: 235935 - DNA, 25 bp, Artificial
  probe
  misc_feature (1)..(25): SEQ ID NO: 3847; WAN024G8Z_at; Start 43; Stop 67
ttatcaggtgaagcccttgccggtg

SEQ ID NO: 235936 - DNA, 25 bp, Artificial
  probe
  misc_feature (1)..(25): SEQ ID NO: 3847; WAN024G8Z_at; Start 207; Stop 231
tatggaccgtgttcaggcagattac

SEQ ID NO: 235937 - DNA, 25 bp, Artificial
  probe
  misc_feature (1)..(25): SEQ ID NO: 3847; WAN024G8Z_at; Start 438; Stop 462
aacagcggcccttcgtgcagctgaa

SEQ ID NO: 235938 - DNA, 25 bp, Artificial
  probe
  misc_feature (1)..(25): SEQ ID NO: 3847; WAN024G8Z_at; Start 380; Stop 404
aaggccgtatcgttatctttggtgc

SEQ ID NO: 235939 - DNA, 25 bp, Artificial
  probe
  misc_feature (1)..(25): SEQ ID NO: 3847; WAN024G8Z_at; Start 35; Stop 59
taatcaagttatcaggtgaagccct

SEQ ID NO: 235940 - DNA, 25 bp, Artificial
  probe
  misc_feature (1)..(25): SEQ ID NO: 2484; WAN024G92_at; Start 288; Stop 312
tgtgattcgcttggttatcccagct

SEQ ID NO: 235941 - DNA, 25 bp, Artificial
  probe
  misc_feature (1)..(25): SEQ ID NO: 2484; WAN024G92_at; Start 179; Stop 203
cagaagcgcgtgttttgttggtaac

SEQ ID NO: 235942 - DNA, 25 bp, Artificial
  probe
  misc_feature (1)..(25): SEQ ID NO: 2484; WAN024G92_at; Start 299; Stop 323
tggttatcccagctcttacagaaga

SEQ ID NO: 235943 - DNA, 25 bp, Artificial
  probe
  misc_feature (1)..(25): SEQ ID NO: 2484; WAN024G92_at; Start 478; Stop 502
attcaaaaagtaacagacgatgctg

SEQ ID NO: 235944 - DNA, 25 bp, Artificial
  probe
  misc_feature (1)..(25): SEQ ID NO: 2484; WAN024G92_at; Start 364; Stop 388
gaaaatgctaaagtggctgtccgca

SEQ ID NO: 235945 - DNA, 25 bp, Artificial
  probe
  misc_feature (1)..(25): SEQ ID NO: 2484; WAN024G92_at; Start 312; Stop 336
tcttacagaagaaactcgtcgtgac

SEQ ID NO: 235946 - DNA, 25 bp, Artificial
  probe
  misc_feature (1)..(25): SEQ ID NO: 2484; WAN024G92_at; Start 451; Stop 475
gacgaattgaagactcttgaaaaag

SEQ ID NO: 235947 - DNA, 25 bp, Artificial
  probe
  misc_feature (1)..(25): SEQ ID NO: 2484; WAN024G92_at; Start 150; Stop 174
tcttaaccaaatcgcttcaattacg

SEQ ID NO: 235948 - DNA, 25 bp, Artificial
  probe
  misc_feature (1)..(25): SEQ ID NO: 2484; WAN024G92_at; Start 112; Stop 136
gaccgtgtacatgtagaatactatg

SEQ ID NO: 235949 - DNA, 25 bp, Artificial
  probe
  misc_feature (1)..(25): SEQ ID NO: 2484; WAN024G92_at; Start 171; Stop 195
tacgattccagaagcgcgtgttttg

SEQ ID NO: 235950 - DNA, 25 bp, Artificial
  probe
  misc_feature (1)..(25): SEQ ID NO: 2484; WAN024G92_at; Start 327; Stop 351
tcgtcgtgaccttgctaaagaagtg

SEQ ID NO: 235951 - DNA, 25 bp, Artificial
  probe
  misc_feature (1)..(25): SEQ ID NO: 2484; WAN024G92_at; Start 394; Stop 418
cgtcgcgatgctatggacgaagcta

SEQ ID NO: 235952 - DNA, 25 bp, Artificial
  probe
  misc_feature (1)..(25): SEQ ID NO: 2484; WAN024G92_at; Start 125; Stop 149
tagaatactatggagtcgaaactcc

SEQ ID NO: 235953 - DNA, 25 bp, Artificial
  probe
  misc_feature (1)..(25): SEQ ID NO: 2484; WAN024G92_at; Start 78; Stop 102
tatccgtgctggtcgtgccaatgca

SEQ ID NO: 235954 - DNA, 25 bp, Artificial
  probe
  misc_feature (1)..(25): SEQ ID NO: 2484; WAN024G92_at; Start 101; Stop 125
caagcttgcttgaccgtgtacatgt

SEQ ID NO: 235955 - DNA, 25 bp, Artificial
  probe
  misc_feature (1)..(25): SEQ ID NO: 2484; WAN024G92_at; Start 88; Stop 112
ggtcgtgccaatgcaagcttgcttg

SEQ ID NO: 235956 - DNA, 25 bp, Artificial
  probe
  misc_feature (1)..(25): SEQ ID NO: 2484; WAN024G92_at; Start 166; Stop 190
tcaattacgattccagaagcgcgtg

SEQ ID NO: 235957 - DNA, 25 bp, Artificial
  probe
  misc_feature (1)..(25): SEQ ID NO: 2484; WAN024G92_at; Start 46; Stop 70
tctcaccaatcacttgctcgtgaat

SEQ ID NO: 235958 - DNA, 25 bp, Artificial
  probe
  misc_feature (1)..(25): SEQ ID NO: 2484; WAN024G92_at; Start 183; Stop 207
agcgcgtgttttgttggtaacacca

SEQ ID NO: 235959 - DNA, 25 bp, Artificial
  probe
  misc_feature (1)..(25): SEQ ID NO: 2484; WAN024G92_at; Start 341; Stop 365
ctaaagaagtgaagaaggtcggcga

SEQ ID NO: 235960 - DNA, 25 bp, Artificial
  probe
  misc_feature (1)..(25): SEQ ID NO: 2484; WAN024G92_at; Start 493; Stop 517
gacgatgctgttaaacacatcgacg

SEQ ID NO: 235961 - DNA, 25 bp, Artificial
  probe
  misc_feature (1)..(25): SEQ ID NO: 2484; WAN024G92_at; Start 354; Stop 378
gaaggtcggcgaaaatgctaaagtg

SEQ ID NO: 235962 - DNA, 25 bp, Artificial
  probe
  misc_feature (1)..(25): SEQ ID NO: 2484; WAN024G92_at; Start 211; Stop 235
gacaagtcttcattgaaagacatcg

SEQ ID NO: 235963 - DNA, 25 bp, Artificial
  probe
  misc_feature (1)..(25): SEQ ID NO: 2484; WAN024G92_at; Start 58; Stop 82
cttgctcgtgaatttggtggtatcc

SEQ ID NO: 235964 - DNA, 25 bp, Artificial
  probe
  misc_feature (1)..(25): SEQ ID NO: 2484; WAN024G92_at; Start 263; Stop 287
gtatcacaccggctaatgacggttc

SEQ ID NO: 235965 - DNA, 25 bp, Artificial
  probe
  misc_feature (1)..(25): SEQ ID NO: 2484; WAN024G92_at; Start 388; Stop 412
aatatccgtcgcgatgctatggacg

SEQ ID NO: 235966 - DNA, 25 bp, Artificial
  probe
  misc_feature (1)..(25): SEQ ID NO: 2484; WAN024G92_at; Start 378; Stop 402
ggctgtccgcaatatccgtcgcgat

SEQ ID NO: 235967 - DNA, 25 bp, Artificial
  probe
  misc_feature (1)..(25): SEQ ID NO: 2484; WAN024G92_at; Start 68; Stop 92
aatttggtggtatccgtgctggtcg

SEQ ID NO: 235968 - DNA, 25 bp, Artificial
  probe
  misc_feature (1)..(25): SEQ ID NO: 2484; WAN024G92_at; Start 276; Stop 300
taatgacggttctgtgattcgcttg

SEQ ID NO: 235969 - DNA, 25 bp, Artificial
  probe
  misc_feature (1)..(25): SEQ ID NO: 2484; WAN024G92_at; Start 19; Stop 43
gaaaaagctaaagagagaatgaccc

SEQ ID NO: 235970 - DNA, 25 bp, Artificial
  probe
  misc_feature (1)..(25): SEQ ID NO: 2484; WAN024G92_at; Start 372; Stop 396
taaagtggctgtccgcaatatccgt

SEQ ID NO: 235971 - DNA, 25 bp, Artificial
  probe
  misc_feature (1)..(25): SEQ ID NO: 2484; WAN024G92_at; Start 198; Stop 222
ggtaacaccatttgacaagtcttca

SEQ ID NO: 235972 - DNA, 25 bp, Artificial
  probe
  misc_feature (1)..(25): SEQ ID NO: 2484; WAN024G92_at; Start 322; Stop 346
gaaactcgtcgtgaccttgctaaag

SEQ ID NO: 235973 - DNA, 25 bp, Artificial
  probe
  misc_feature (1)..(25): SEQ ID NO: 2484; WAN024G92_at; Start 135; Stop 159
tggagtcgaaactcctcttaaccaa

SEQ ID NO: 235974 - DNA, 25 bp, Artificial
  probe
  misc_feature (1)..(25): SEQ ID NO: 6711; WAN024G93_at; Start 2; Stop 26
tgcatcacaccataacggacaaact

SEQ ID NO: 235975 - DNA, 25 bp, Artificial
  probe
  misc_feature (1)..(25): SEQ ID NO: 6711; WAN024G93_at; Start 303; Stop 327
tttcaaaagaactaagcggtgcttc

SEQ ID NO: 235976 - DNA, 25 bp, Artificial
  probe
  misc_feature (1)..(25): SEQ ID NO: 6711; WAN024G93_at; Start 197; Stop 221
tctgggtactcaagaccgactggct

SEQ ID NO: 235977 - DNA, 25 bp, Artificial
  probe
  misc_feature (1)..(25): SEQ ID NO: 6711; WAN024G93_at; Start 238; Stop 262
catagttttaatgccacgtttggcc

SEQ ID NO: 235978 - DNA, 25 bp, Artificial
  probe
  misc_feature (1)..(25): SEQ ID NO: 6711; WAN024G93_at; Start 28; Stop 52
cgcattttcaagacccggaatcatt

SEQ ID NO: 235979 - DNA, 25 bp, Artificial
  probe
  misc_feature (1)..(25): SEQ ID NO: 6711; WAN024G93_at; Start 54; Stop 78
ggaagacacgcttttgttctcccca

SEQ ID NO: 235980 - DNA, 25 bp, Artificial
  probe
  misc_feature (1)..(25): SEQ ID NO: 6711; WAN024G93_at; Start 350; Stop 374
tggaaatccataaattcttgcttgg

SEQ ID NO: 235981 - DNA, 25 bp, Artificial
  probe
  misc_feature (1)..(25): SEQ ID NO: 6711; WAN024G93_at; Start 180; Stop 204
gaggtcctgtatagtcgtctgggta

SEQ ID NO: 235982 - DNA, 25 bp, Artificial
  probe
  misc_feature (1)..(25): SEQ ID NO: 6711; WAN024G93_at; Start 18; Stop 42
ggacaaactccgcattttcaagacc

SEQ ID NO: 235983 - DNA, 25 bp, Artificial
  probe
  misc_feature (1)..(25): SEQ ID NO: 6711; WAN024G93_at; Start 151; Stop 175
cgcataaggtgttttaaattctcca

SEQ ID NO: 235984 - DNA, 25 bp, Artificial
  probe
  misc_feature (1)..(25): SEQ ID NO: 6711; WAN024G93_at; Start 275; Stop 299
ggcatacatccttcaaagtactttt

SEQ ID NO: 235985 - DNA, 25 bp, Artificial
  probe
  misc_feature (1)..(25): SEQ ID NO: 6711; WAN024G93_at; Start 222; Stop 246
tcatagggccataaagcatagtttt

SEQ ID NO: 235986 - DNA, 25 bp, Artificial
  probe
  misc_feature (1)..(25): SEQ ID NO: 6711; WAN024G93_at; Start 87; Stop 111
gggtctggaaaccaacaatattgta

SEQ ID NO: 235987 - DNA, 25 bp, Artificial
  probe
  misc_feature (1)..(25): SEQ ID NO: 6711; WAN024G93_at; Start 210; Stop 234
gaccgactggcttcatagggccata

SEQ ID NO: 235988 - DNA, 25 bp, Artificial
  probe
  misc_feature (1)..(25): SEQ ID NO: 6711; WAN024G93_at; Start 112; Stop 136
gaggctaccagctgcattatcctga

SEQ ID NO: 235989 - DNA, 25 bp, Artificial
  probe
  misc_feature (1)..(25): SEQ ID NO: 6711; WAN024G93_at; Start 41; Stop 65
cccggaatcatttggaagacacgct

SEQ ID NO: 235990 - DNA, 25 bp, Artificial
  probe
  misc_feature (1)..(25): SEQ ID NO: 6711; WAN024G93_at; Start 191; Stop 215
tagtcgtctgggtactcaagaccga

SEQ ID NO: 235991 - DNA, 25 bp, Artificial
  probe
  misc_feature (1)..(25): SEQ ID NO: 6711; WAN024G93_at; Start 318; Stop 342
gcggtgcttcttctgcattgaccaa

SEQ ID NO: 235992 - DNA, 25 bp, Artificial
  probe
  misc_feature (1)..(25): SEQ ID NO: 6711; WAN024G93_at; Start 382; Stop 406
ggcattgaggtaggccgcttctccc

SEQ ID NO: 235993 - DNA, 25 bp, Artificial
  probe
  misc_feature (1)..(25): SEQ ID NO: 6711; WAN024G93_at; Start 129; Stop 153
tatcctgacgaagttgcacaaccgc

SEQ ID NO: 235994 - DNA, 25 bp, Artificial
  probe
  misc_feature (1)..(25): SEQ ID NO: 6711; WAN024G93_at; Start 77; Stop 101
catttgaggtgggtctggaaaccaa

SEQ ID NO: 235995 - DNA, 25 bp, Artificial
  probe
  misc_feature (1)..(25): SEQ ID NO: 6711; WAN024G93_at; Start 337; Stop 361
gaccaaagcttcatggaaatccata

SEQ ID NO: 235996 - DNA, 25 bp, Artificial
  probe
  misc_feature (1)..(25): SEQ ID NO: 6711; WAN024G93_at; Start 138; Stop 162
gaagttgcacaaccgcataaggtgt

SEQ ID NO: 235997 - DNA, 25 bp, Artificial
  probe
  misc_feature (1)..(25): SEQ ID NO: 6711; WAN024G93_at; Start 258; Stop 282
tggccatgacttcgataggcataca

SEQ ID NO: 235998 - DNA, 25 bp, Artificial
  probe
  misc_feature (1)..(25): SEQ ID NO: 6711; WAN024G93_at; Start 329; Stop 353
tctgcattgaccaaagcttcatgga

SEQ ID NO: 235999 - DNA, 25 bp, Artificial
  probe
  misc_feature (1)..(25): SEQ ID NO: 6711; WAN024G93_at; Start 394; Stop 418
ggccgcttctcccttatcataacgt

SEQ ID NO: 236000 - DNA, 25 bp, Artificial
  probe
  misc_feature (1)..(25): SEQ ID NO: 6711; WAN024G93_at; Start 358; Stop 382
cataaattcttgcttggtcataggg

SEQ ID NO: 236001 - DNA, 25 bp, Artificial
  probe
  misc_feature (1)..(25): SEQ ID NO: 6711; WAN024G93_at; Start 206; Stop 230
tcaagaccgactggcttcatagggc

SEQ ID NO: 236002 - DNA, 25 bp, Artificial
  probe
  misc_feature (1)..(25): SEQ ID NO: 6711; WAN024G93_at; Start 102; Stop 126
caatattgtagaggctaccagctgc

SEQ ID NO: 236003 - DNA, 25 bp, Artificial
  probe
  misc_feature (1)..(25): SEQ ID NO: 6711; WAN024G93_at; Start 62; Stop 86
cgcttttgttctccccatttgaggt

SEQ ID NO: 236004 - DNA, 25 bp, Artificial
  probe
  misc_feature (1)..(25): SEQ ID NO: 6711; WAN024G93_at; Start 265; Stop 289
gacttcgataggcatacatccttca

SEQ ID NO: 236005 - DNA, 25 bp, Artificial
  probe
  misc_feature (1)..(25): SEQ ID NO: 6711; WAN024G93_at; Start 117; Stop 141
taccagctgcattatcctgacgaag

SEQ ID NO: 236006 - DNA, 25 bp, Artificial
  probe
  misc_feature (1)..(25): SEQ ID NO: 6711; WAN024G93_at; Start 165; Stop 189
taaattctccatcacgaggtcctgt

SEQ ID NO: 236007 - DNA, 25 bp, Artificial
  probe
  misc_feature (1)..(25): SEQ ID NO: 6711; WAN024G93_at; Start 250; Stop 274
gccacgtttggccatgacttcgata

SEQ ID NO: 236008 - DNA, 25 bp, Artificial
  probe
  misc_feature (1)..(25): SEQ ID NO: 1242; WAN024G94_at; Start 94; Stop 118
cacttcaatcaaggggtggttggca

SEQ ID NO: 236009 - DNA, 25 bp, Artificial
  probe
  misc_feature (1)..(25): SEQ ID NO: 1242; WAN024G94_at; Start 84; Stop 108
catcacgaaccacttcaatcaaggg

SEQ ID NO: 236010 - DNA, 25 bp, Artificial
  probe
  misc_feature (1)..(25): SEQ ID NO: 1242; WAN024G94_at; Start 116; Stop 140
gcaactttttcggtcaccatttgag

SEQ ID NO: 236011 - DNA, 25 bp, Artificial
  probe
  misc_feature (1)..(25): SEQ ID NO: 1242; WAN024G94_at; Start 6; Stop 30
tcttttcagccaaggcatcacttgt

SEQ ID NO: 236012 - DNA, 25 bp, Artificial
  probe
  misc_feature (1)..(25): SEQ ID NO: 1242; WAN024G94_at; Start 158; Stop 182
actgcaagggcaccacctgcaggaa

SEQ ID NO: 236013 - DNA, 25 bp, Artificial
  probe
  misc_feature (1)..(25): SEQ ID NO: 1242; WAN024G94_at; Start 183; Stop 207
cacgtgtagcctcagcagattccaa

SEQ ID NO: 236014 - DNA, 25 bp, Artificial
  probe
  misc_feature (1)..(25): SEQ ID NO: 1242; WAN024G94_at; Start 60; Stop 84
catctgtcggcaattctgtaatttc

SEQ ID NO: 236015 - DNA, 25 bp, Artificial
  probe
  misc_feature (1)..(25): SEQ ID NO: 1242; WAN024G94_at; Start 46; Stop 70
gataaccgtaataacatctgtcggc

SEQ ID NO: 236016 - DNA, 25 bp, Artificial
  probe
  misc_feature (1)..(25): SEQ ID NO: 1242; WAN024G94_at; Start 179; Stop 203
ggaacacgtgtagcctcagcagatt

SEQ ID NO: 236017 - DNA, 25 bp, Artificial
  probe
  misc_feature (1)..(25): SEQ ID NO: 1242; WAN024G94_at; Start 74; Stop 98
tctgtaatttcatcacgaaccactt

SEQ ID NO: 236018 - DNA, 25 bp, Artificial
  probe
  misc_feature (1)..(25): SEQ ID NO: 1242; WAN024G94_at; Start 171; Stop 195
cacctgcaggaacacgtgtagcctc

SEQ ID NO: 236019 - DNA, 25 bp, Artificial
  probe
  misc_feature (1)..(25): SEQ ID NO: 1242; WAN024G94_at; Start 53; Stop 77
gtaataacatctgtcggcaattctg

SEQ ID NO: 236020 - DNA, 25 bp, Artificial
  probe
  misc_feature (1)..(25): SEQ ID NO: 1242; WAN024G94_at; Start 17; Stop 41
aaggcatcacttgtcaaaggaccag

SEQ ID NO: 236021 - DNA, 25 bp, Artificial
  probe
  misc_feature (1)..(25): SEQ ID NO: 1242; WAN024G94_at; Start 215; Stop 239
gaacccaagcgacgcatttcttcct

SEQ ID NO: 236022 - DNA, 25 bp, Artificial
  probe
  misc_feature (1)..(25): SEQ ID NO: 1242; WAN024G94_at; Start 11; Stop 35
tcagccaaggcatcacttgtcaaag

SEQ ID NO: 236023 - DNA, 25 bp, Artificial
  probe
  misc_feature (1)..(25): SEQ ID NO: 1242; WAN024G94_at; Start 135; Stop 159
tttgagagaaaccatcacggtccac

SEQ ID NO: 236024 - DNA, 25 bp, Artificial
  probe
  misc_feature (1)..(25): SEQ ID NO: 1242; WAN024G94_at; Start 124; Stop 148
ttcggtcaccatttgagagaaacca

SEQ ID NO: 236025 - DNA, 25 bp, Artificial
  probe
  misc_feature (1)..(25): SEQ ID NO: 1242; WAN024G94_at; Start 175; Stop 199
tgcaggaacacgtgtagcctcagca

SEQ ID NO: 236026 - DNA, 25 bp, Artificial
  probe
  misc_feature (1)..(25): SEQ ID NO: 1242; WAN024G94_at; Start 294; Stop 318
ccaactcagcaaaattgtctgtttt

SEQ ID NO: 236027 - DNA, 25 bp, Artificial
  probe
  misc_feature (1)..(25): SEQ ID NO: 1242; WAN024G94_at; Start 137; Stop 161
tgagagaaaccatcacggtccactg

SEQ ID NO: 236028 - DNA, 25 bp, Artificial
  probe
  misc_feature (1)..(25): SEQ ID NO: 1242; WAN024G94_at; Start 31; Stop 55
caaaggaccagtagcgataaccgta

SEQ ID NO: 236029 - DNA, 25 bp, Artificial
  probe
  misc_feature (1)..(25): SEQ ID NO: 1242; WAN024G94_at; Start 66; Stop 90
tcggcaattctgtaatttcatcacg

SEQ ID NO: 236030 - DNA, 25 bp, Artificial
  probe
  misc_feature (1)..(25): SEQ ID NO: 1242; WAN024G94_at; Start 35; Stop 59
ggaccagtagcgataaccgtaataa

SEQ ID NO: 236031 - DNA, 25 bp, Artificial
  probe
  misc_feature (1)..(25): SEQ ID NO: 1242; WAN024G94_at; Start 23; Stop 47
tcacttgtcaaaggaccagtagcga

SEQ ID NO: 236032 - DNA, 25 bp, Artificial
  probe
  misc_feature (1)..(25): SEQ ID NO: 1242; WAN024G94_at; Start 28; Stop 52
tgtcaaaggaccagtagcgataacc

SEQ ID NO: 236033 - DNA, 25 bp, Artificial
  probe
  misc_feature (1)..(25): SEQ ID NO: 1242; WAN024G94_at; Start 148; Stop 172
atcacggtccactgcaagggcacca

SEQ ID NO: 236034 - DNA, 25 bp, Artificial
  probe
  misc_feature (1)..(25): SEQ ID NO: 1242; WAN024G94_at; Start 281; Stop 305
gaattggaacaaaccaactcagcaa

SEQ ID NO: 236035 - DNA, 25 bp, Artificial
  probe
  misc_feature (1)..(25): SEQ ID NO: 1242; WAN024G94_at; Start 286; Stop 310
ggaacaaaccaactcagcaaaattg

SEQ ID NO: 236036 - DNA, 25 bp, Artificial
  probe
  misc_feature (1)..(25): SEQ ID NO: 1242; WAN024G94_at; Start 110; Stop 134
tggttggcaactttttcggtcacca

SEQ ID NO: 236037 - DNA, 25 bp, Artificial
  probe
  misc_feature (1)..(25): SEQ ID NO: 1242; WAN024G94_at; Start 166; Stop 190
ggcaccacctgcaggaacacgtgta

SEQ ID NO: 236038 - DNA, 25 bp, Artificial
  probe
  misc_feature (1)..(25): SEQ ID NO: 1242; WAN024G94_at; Start 41; Stop 65
gtagcgataaccgtaataacatctg

SEQ ID NO: 236039 - DNA, 25 bp, Artificial
  probe
  misc_feature (1)..(25): SEQ ID NO: 1242; WAN024G94_at; Start 1; Stop 25
atgaatcttttcagccaaggcatca

SEQ ID NO: 236040 - DNA, 25 bp, Artificial
  probe
  misc_feature (1)..(25): SEQ ID NO: 1242; WAN024G94_at; Start 143; Stop 167
aaaccatcacggtccactgcaaggg

SEQ ID NO: 236041 - DNA, 25 bp, Artificial
  probe
  misc_feature (1)..(25): SEQ ID NO: 1242; WAN024G94_at; Start 332; Stop 356
gacttgacaccacgcatttcatata

SEQ ID NO: 236042 - DNA, 25 bp, Artificial
  probe
  misc_feature (1)..(25): SEQ ID NO: 2268; WAN024G95_at; Start 1342; Stop 1366
gccgacttagaggaatttttgactg

SEQ ID NO: 236043 - DNA, 25 bp, Artificial
  probe
  misc_feature (1)..(25): SEQ ID NO: 2268; WAN024G95_at; Start 1187; Stop 1211
cgacagcgattggaagcttagctca

SEQ ID NO: 236044 - DNA, 25 bp, Artificial
  probe
  misc_feature (1)..(25): SEQ ID NO: 2268; WAN024G95_at; Start 822; Stop 846
tggagaatttaaaacaccttatgcg

SEQ ID NO: 236045 - DNA, 25 bp, Artificial
  probe
  misc_feature (1)..(25): SEQ ID NO: 2268; WAN024G95_at; Start 1094; Stop 1118
aaggctatgttgagtcggcggcttc

SEQ ID NO: 236046 - DNA, 25 bp, Artificial
  probe
  misc_feature (1)..(25): SEQ ID NO: 2268; WAN024G95_at; Start 1267; Stop 1291
atcatcaaggagttggaaggcgagc

SEQ ID NO: 236047 - DNA, 25 bp, Artificial
  probe
  misc_feature (1)..(25): SEQ ID NO: 2268; WAN024G95_at; Start 997; Stop 1021
cgcaattcttacatggattcaccaa

SEQ ID NO: 236048 - DNA, 25 bp, Artificial
  probe
  misc_feature (1)..(25): SEQ ID NO: 2268; WAN024G95_at; Start 921; Stop 945
gggagaacaaaagcgtgtcttccaa

SEQ ID NO: 236049 - DNA, 25 bp, Artificial
  probe
  misc_feature (1)..(25): SEQ ID NO: 2268; WAN024G95_at; Start 1138; Stop 1162
aacgcagctcgtctcttcaaggaag

SEQ ID NO: 236050 - DNA, 25 bp, Artificial
  probe
  misc_feature (1)..(25): SEQ ID NO: 2268; WAN024G95_at; Start 896; Stop 920
ttggtttccagacccacctcaaatg

SEQ ID NO: 236051 - DNA, 25 bp, Artificial
  probe
  misc_feature (1)..(25): SEQ ID NO: 2268; WAN024G95_at; Start 809; Stop 833
caggacctcgtgatggagaatttaa

SEQ ID NO: 236052 - DNA, 25 bp, Artificial
  probe
  misc_feature (1)..(25): SEQ ID NO: 2268; WAN024G95_at; Start 175; Stop 199
aattttgctgagttggtttgttcca

SEQ ID NO: 236053 - DNA, 25 bp, Artificial
  probe
  misc_feature (1)..(25): SEQ ID NO: 2268; WAN024G95_at; Start 336; Stop 360
tggtttctctcaaatggtgaccgaa

SEQ ID NO: 236054 - DNA, 25 bp, Artificial
  probe
  misc_feature (1)..(25): SEQ ID NO: 2268; WAN024G95_at; Start 1254; Stop 1278
tgtcaattttgggatcatcaaggag

SEQ ID NO: 236055 - DNA, 25 bp, Artificial
  probe
  misc_feature (1)..(25): SEQ ID NO: 2268; WAN024G95_at; Start 698; Stop 722
aaaagtactttgaaggatgtatgcc

SEQ ID NO: 236056 - DNA, 25 bp, Artificial
  probe
  misc_feature (1)..(25): SEQ ID NO: 2268; WAN024G95_at; Start 54; Stop 78
caatgttatcggtgctggtttggca

SEQ ID NO: 236057 - DNA, 25 bp, Artificial
  probe
  misc_feature (1)..(25): SEQ ID NO: 2268; WAN024G95_at; Start 1315; Stop 1339
tatgaaaaaattgcagagcgtgccc

SEQ ID NO: 236058 - DNA, 25 bp, Artificial
  probe
  misc_feature (1)..(25): SEQ ID NO: 2268; WAN024G95_at; Start 1012; Stop 1036
gattcaccaaatcttcttgagcaga

SEQ ID NO: 236059 - DNA, 25 bp, Artificial
  probe
  misc_feature (1)..(25): SEQ ID NO: 2268; WAN024G95_at; Start 277; Stop 301
ttggaatctgctgaggctacacgtg

SEQ ID NO: 236060 - DNA, 25 bp, Artificial
  probe
  misc_feature (1)..(25): SEQ ID NO: 2268; WAN024G95_at; Start 1330; Stop 1354
gagcgtgcccttgccgacttagagg

SEQ ID NO: 236061 - DNA, 25 bp, Artificial
  probe
  misc_feature (1)..(25): SEQ ID NO: 2268; WAN024G95_at; Start 1124; Stop 1148
tagttgcgggaattaacgcagctcg

SEQ ID NO: 236062 - DNA, 25 bp, Artificial
  probe
  misc_feature (1)..(25): SEQ ID NO: 2268; WAN024G95_at; Start 1173; Stop 1197
tattttccccgagacgacagcgatt

SEQ ID NO: 236063 - DNA, 25 bp, Artificial
  probe
  misc_feature (1)..(25): SEQ ID NO: 2268; WAN024G95_at; Start 948; Stop 972
gattccgggtcttgaaaatgcggag

SEQ ID NO: 236064 - DNA, 25 bp, Artificial
  probe
  misc_feature (1)..(25): SEQ ID NO: 2268; WAN024G95_at; Start 246; Stop 270
ggaagaaatgcgtcgcttgggttct

SEQ ID NO: 236065 - DNA, 25 bp, Artificial
  probe
  misc_feature (1)..(25): SEQ ID NO: 2268; WAN024G95_at; Start 1; Stop 25
atggacttaggtcccacccaaagag

SEQ ID NO: 236066 - DNA, 25 bp, Artificial
  probe
  misc_feature (1)..(25): SEQ ID NO: 2268; WAN024G95_at; Start 1293; Stop 1317
tatccgtgataagaaggctcgttat

SEQ ID NO: 236067 - DNA, 25 bp, Artificial
  probe
  misc_feature (1)..(25): SEQ ID NO: 2268; WAN024G95_at; Start 1282; Stop 1306
gaaggcgagcgtatccgtgataaga

SEQ ID NO: 236068 - DNA, 25 bp, Artificial
  probe
  misc_feature (1)..(25): SEQ ID NO: 2268; WAN024G95_at; Start 23; Stop 47
gaggtattagtgtcgtgtctcaatc

SEQ ID NO: 236069 - DNA, 25 bp, Artificial
  probe
  misc_feature (1)..(25): SEQ ID NO: 2268; WAN024G95_at; Start 859; Stop 883
cgtcaggataatgcagctggtagcc

SEQ ID NO: 236070 - DNA, 25 bp, Artificial
  probe
  misc_feature (1)..(25): SEQ ID NO: 2268; WAN024G95_at; Start 524; Stop 548
cagcgcctattatcgatgtcaacac

SEQ ID NO: 236071 - DNA, 25 bp, Artificial
  probe
  misc_feature (1)..(25): SEQ ID NO: 2268; WAN024G95_at; Start 68; Stop 92
ctggtttggcaggttctgaagcagc

SEQ ID NO: 236072 - DNA, 25 bp, Artificial
  probe
  misc_feature (1)..(25): SEQ ID NO: 2268; WAN024G95_at; Start 1210; Stop 1234
cattacattacccatgccgacagca

SEQ ID NO: 236073 - DNA, 25 bp, Artificial
  probe
  misc_feature (1)..(25): SEQ ID NO: 2268; WAN024G95_at; Start 933; Stop 957
gcgtgtcttccaaatgattccgggt

SEQ ID NO: 236074 - DNA, 25 bp, Artificial
  probe
  misc_feature (1)..(25): SEQ ID NO: 2268; WAN024G95_at; Start 96; Stop 120
ccaaatcgcagagcgtggtattcca

SEQ ID NO: 236075 - DNA, 25 bp, Artificial
  probe
  misc_feature (1)..(25): SEQ ID NO: 2268; WAN024G95_at; Start 1224; Stop 1248
tgccgacagcaaacatttccaacca

SEQ ID NO: 236076 - DNA, 25 bp, Artificial
  probe
  misc_feature (1)..(25): SEQ ID NO: 2031; WAN024G96_at; Start 176; Stop 200
gggaaaaatcatccagcgcgtcaaa

SEQ ID NO: 236077 - DNA, 25 bp, Artificial
  probe
  misc_feature (1)..(25): SEQ ID NO: 2031; WAN024G96_at; Start 16; Stop 40
tcacgaacatgcttggccttgacag

SEQ ID NO: 236078 - DNA, 25 bp, Artificial
  probe
  misc_feature (1)..(25): SEQ ID NO: 2031; WAN024G96_at; Start 112; Stop 136
tctaccaggctcttgagatttttct

SEQ ID NO: 236079 - DNA, 25 bp, Artificial
  probe
  misc_feature (1)..(25): SEQ ID NO: 2031; WAN024G96_at; Start 26; Stop 50
gcttggccttgacaggagcatctgc

SEQ ID NO: 236080 - DNA, 25 bp, Artificial
  probe
  misc_feature (1)..(25): SEQ ID NO: 2031; WAN024G96_at; Start 172; Stop 196
tgttgggaaaaatcatccagcgcgt

SEQ ID NO: 236081 - DNA, 25 bp, Artificial
  probe
  misc_feature (1)..(25): SEQ ID NO: 2031; WAN024G96_at; Start 57; Stop 81
ctcacccaagcgttctcgcaactta

SEQ ID NO: 236082 - DNA, 25 bp, Artificial
  probe
  misc_feature (1)..(25): SEQ ID NO: 2031; WAN024G96_at; Start 2; Stop 26
tgcgacggacactttcacgaacatg

SEQ ID NO: 236083 - DNA, 25 bp, Artificial
  probe
  misc_feature (1)..(25): SEQ ID NO: 2031; WAN024G96_at; Start 107; Stop 131
tttcctctaccaggctcttgagatt

SEQ ID NO: 236084 - DNA, 25 bp, Artificial
  probe
  misc_feature (1)..(25): SEQ ID NO: 2031; WAN024G96_at; Start 178; Stop 202
gaaaaatcatccagcgcgtcaaata

SEQ ID NO: 236085 - DNA, 25 bp, Artificial
  probe
  misc_feature (1)..(25): SEQ ID NO: 2031; WAN024G96_at; Start 184; Stop 208
tcatccagcgcgtcaaataattctt

SEQ ID NO: 236086 - DNA, 25 bp, Artificial
  probe
  misc_feature (1)..(25): SEQ ID NO: 2031; WAN024G96_at; Start 36; Stop 60
gacaggagcatctgcttccacctca

SEQ ID NO: 236087 - DNA, 25 bp, Artificial
  probe
  misc_feature (1)..(25): SEQ ID NO: 2031; WAN024G96_at; Start 7; Stop 31
cggacactttcacgaacatgcttgg

SEQ ID NO: 236088 - DNA, 25 bp, Artificial
  probe
  misc_feature (1)..(25): SEQ ID NO: 2031; WAN024G96_at; Start 193; Stop 217
gcgtcaaataattcttttttgtcca

SEQ ID NO: 236089 - DNA, 25 bp, Artificial
  probe
  misc_feature (1)..(25): SEQ ID NO: 2031; WAN024G96_at; Start 188; Stop 212
ccagcgcgtcaaataattctttttt

SEQ ID NO: 236090 - DNA, 25 bp, Artificial
  probe
  misc_feature (1)..(25): SEQ ID NO: 2031; WAN024G96_at; Start 131; Stop 155
ttttcttgatggcttccacatcggc

SEQ ID NO: 236091 - DNA, 25 bp, Artificial
  probe
  misc_feature (1)..(25): SEQ ID NO: 2031; WAN024G96_at; Start 174; Stop 198
ttgggaaaaatcatccagcgcgtca

SEQ ID NO: 236092 - DNA, 25 bp, Artificial
  probe
  misc_feature (1)..(25): SEQ ID NO: 2031; WAN024G96_at; Start 48; Stop 72
tgcttccacctcacccaagcgttct

SEQ ID NO: 236093 - DNA, 25 bp, Artificial
  probe
  misc_feature (1)..(25): SEQ ID NO: 2031; WAN024G96_at; Start 12; Stop 36
actttcacgaacatgcttggccttg

SEQ ID NO: 236094 - DNA, 25 bp, Artificial
  probe
  misc_feature (1)..(25): SEQ ID NO: 2031; WAN024G96_at; Start 95; Stop 119
gaagagctgtattttcctctaccag

SEQ ID NO: 236095 - DNA, 25 bp, Artificial
  probe
  misc_feature (1)..(25): SEQ ID NO: 2031; WAN024G96_at; Start 98; Stop 122
gagctgtattttcctctaccaggct

SEQ ID NO: 236096 - DNA, 25 bp, Artificial
  probe
  misc_feature (1)..(25): SEQ ID NO: 2031; WAN024G96_at; Start 5; Stop 29
gacggacactttcacgaacatgctt

SEQ ID NO: 236097 - DNA, 25 bp, Artificial
  probe
  misc_feature (1)..(25): SEQ ID NO: 2031; WAN024G96_at; Start 9; Stop 33
gacactttcacgaacatgcttggcc

SEQ ID NO: 236098 - DNA, 25 bp, Artificial
  probe
  misc_feature (1)..(25): SEQ ID NO: 2031; WAN024G96_at; Start 23; Stop 47
catgcttggccttgacaggagcatc

SEQ ID NO: 236099 - DNA, 25 bp, Artificial
  probe
  misc_feature (1)..(25): SEQ ID NO: 2031; WAN024G96_at; Start 115; Stop 139
accaggctcttgagatttttcttga

SEQ ID NO: 236100 - DNA, 25 bp, Artificial
  probe
  misc_feature (1)..(25): SEQ ID NO: 2031; WAN024G96_at; Start 31; Stop 55
gccttgacaggagcatctgcttcca

SEQ ID NO: 236101 - DNA, 25 bp, Artificial
  probe
  misc_feature (1)..(25): SEQ ID NO: 2031; WAN024G96_at; Start 104; Stop 128
tattttcctctaccaggctcttgag

SEQ ID NO: 236102 - DNA, 25 bp, Artificial
  probe
  misc_feature (1)..(25): SEQ ID NO: 2031; WAN024G96_at; Start 221; Stop 245
aacagccctttcctttctttatcat

SEQ ID NO: 236103 - DNA, 25 bp, Artificial
  probe
  misc_feature (1)..(25): SEQ ID NO: 2031; WAN024G96_at; Start 126; Stop 150
gagatttttcttgatggcttccaca

SEQ ID NO: 236104 - DNA, 25 bp, Artificial
  probe
  misc_feature (1)..(25): SEQ ID NO: 2031; WAN024G96_at; Start 29; Stop 53
tggccttgacaggagcatctgcttc

SEQ ID NO: 236105 - DNA, 25 bp, Artificial
  probe
  misc_feature (1)..(25): SEQ ID NO: 2031; WAN024G96_at; Start 225; Stop 249
gccctttcctttctttatcattcat

SEQ ID NO: 236106 - DNA, 25 bp, Artificial
  probe
  misc_feature (1)..(25): SEQ ID NO: 2031; WAN024G96_at; Start 34; Stop 58
ttgacaggagcatctgcttccacct

SEQ ID NO: 236107 - DNA, 25 bp, Artificial
  probe
  misc_feature (1)..(25): SEQ ID NO: 2031; WAN024G96_at; Start 21; Stop 45
aacatgcttggccttgacaggagca

SEQ ID NO: 236108 - DNA, 25 bp, Artificial
  probe
  misc_feature (1)..(25): SEQ ID NO: 2031; WAN024G96_at; Start 18; Stop 42
acgaacatgcttggccttgacagga

SEQ ID NO: 236109 - DNA, 25 bp, Artificial
  probe
  misc_feature (1)..(25): SEQ ID NO: 2031; WAN024G96_at; Start 102; Stop 126
tgtattttcctctaccaggctcttg

SEQ ID NO: 236110 - DNA, 25 bp, Artificial
  probe
  misc_feature (1)..(25): SEQ ID NO: 1673; WAN024G97_at; Start 275; Stop 299
atttttatggacaacgtcgagagca

SEQ ID NO: 236111 - DNA, 25 bp, Artificial
  probe
  misc_feature (1)..(25): SEQ ID NO: 1673; WAN024G97_at; Start 97; Stop 121
gtggaagccatcaagaaaaatctca

SEQ ID NO: 236112 - DNA, 25 bp, Artificial
  probe
  misc_feature (1)..(25): SEQ ID NO: 1673; WAN024G97_at; Start 249; Stop 273
ccgtgatggatttcacgtatgtaat

SEQ ID NO: 236113 - DNA, 25 bp, Artificial
  probe
  misc_feature (1)..(25): SEQ ID NO: 1673; WAN024G97_at; Start 245; Stop 269
tttaccgtgatggatttcacgtatg

SEQ ID NO: 236114 - DNA, 25 bp, Artificial
  probe
  misc_feature (1)..(25): SEQ ID NO: 1673; WAN024G97_at; Start 176; Stop 200
aacgcttgggtgaggtggaagcaga

SEQ ID NO: 236115 - DNA, 25 bp, Artificial
  probe
  misc_feature (1)..(25): SEQ ID NO: 1673; WAN024G97_at; Start 279; Stop 303
ttatggacaacgtcgagagcaggac

SEQ ID NO: 236116 - DNA, 25 bp, Artificial
  probe
  misc_feature (1)..(25): SEQ ID NO: 1673; WAN024G97_at; Start 276; Stop 300
tttttatggacaacgtcgagagcag

SEQ ID NO: 236117 - DNA, 25 bp, Artificial
  probe
  misc_feature (1)..(25): SEQ ID NO: 1673; WAN024G97_at; Start 35; Stop 59
aaaaagaattatttgacgcgctgga

SEQ ID NO: 236118 - DNA, 25 bp, Artificial
  probe
  misc_feature (1)..(25): SEQ ID NO: 1673; WAN024G97_at; Start 256; Stop 280
ggatttcacgtatgtaatgattttt

SEQ ID NO: 236119 - DNA, 25 bp, Artificial
  probe
  misc_feature (1)..(25): SEQ ID NO: 1673; WAN024G97_at; Start 33; Stop 57
caaaaaagaattatttgacgcgctg

SEQ ID NO: 236120 - DNA, 25 bp, Artificial
  probe
  misc_feature (1)..(25): SEQ ID NO: 1673; WAN024G97_at; Start 273; Stop 297
tgatttttatggacaacgtcgagag

SEQ ID NO: 236121 - DNA, 25 bp, Artificial
  probe
  misc_feature (1)..(25): SEQ ID NO: 1673; WAN024G97_at; Start 271; Stop 295
aatgatttttatggacaacgtcgag

SEQ ID NO: 236122 - DNA, 25 bp, Artificial
  probe
  misc_feature (1)..(25): SEQ ID NO: 1673; WAN024G97_at; Start 34; Stop 58
aaaaaagaattatttgacgcgctgg

SEQ ID NO: 236123 - DNA, 25 bp, Artificial
  probe
  misc_feature (1)..(25): SEQ ID NO: 1673; WAN024G97_at; Start 31; Stop 55
gacaaaaaagaattatttgacgcgc

SEQ ID NO: 236124 - DNA, 25 bp, Artificial
  probe
  misc_feature (1)..(25): SEQ ID NO: 1673; WAN024G97_at; Start 270; Stop 294
taatgatttttatggacaacgtcga

SEQ ID NO: 236125 - DNA, 25 bp, Artificial
  probe
  misc_feature (1)..(25): SEQ ID NO: 1673; WAN024G97_at; Start 281; Stop 305
atggacaacgtcgagagcaggacga

SEQ ID NO: 236126 - DNA, 25 bp, Artificial
  probe
  misc_feature (1)..(25): SEQ ID NO: 1673; WAN024G97_at; Start 47; Stop 71
ttgacgcgctggatgatttttccca

SEQ ID NO: 236127 - DNA, 25 bp, Artificial
  probe
  misc_feature (1)..(25): SEQ ID NO: 1673; WAN024G97_at; Start 93; Stop 117
cgatgtggaagccatcaagaaaaat

SEQ ID NO: 236128 - DNA, 25 bp, Artificial
  probe
  misc_feature (1)..(25): SEQ ID NO: 1673; WAN024G97_at; Start 91; Stop 115
gccgatgtggaagccatcaagaaaa

SEQ ID NO: 236129 - DNA, 25 bp, Artificial
  probe
  misc_feature (1)..(25): SEQ ID NO: 1673; WAN024G97_at; Start 46; Stop 70
tttgacgcgctggatgatttttccc

SEQ ID NO: 236130 - DNA, 25 bp, Artificial
  probe
  misc_feature (1)..(25): SEQ ID NO: 1673; WAN024G97_at; Start 44; Stop 68
tatttgacgcgctggatgatttttc

SEQ ID NO: 236131 - DNA, 25 bp, Artificial
  probe
  misc_feature (1)..(25): SEQ ID NO: 1673; WAN024G97_at; Start 39; Stop 63
agaattatttgacgcgctggatgat

SEQ ID NO: 236132 - DNA, 25 bp, Artificial
  probe
  misc_feature (1)..(25): SEQ ID NO: 1673; WAN024G97_at; Start 171; Stop 195
gcgagaacgcttgggtgaggtggaa

SEQ ID NO: 236133 - DNA, 25 bp, Artificial
  probe
  misc_feature (1)..(25): SEQ ID NO: 1673; WAN024G97_at; Start 253; Stop 277
gatggatttcacgtatgtaatgatt

SEQ ID NO: 236134 - DNA, 25 bp, Artificial
  probe
  misc_feature (1)..(25): SEQ ID NO: 1673; WAN024G97_at; Start 278; Stop 302
tttatggacaacgtcgagagcagga

SEQ ID NO: 236135 - DNA, 25 bp, Artificial
  probe
  misc_feature (1)..(25): SEQ ID NO: 1673; WAN024G97_at; Start 247; Stop 271
taccgtgatggatttcacgtatgta

SEQ ID NO: 236136 - DNA, 25 bp, Artificial
  probe
  misc_feature (1)..(25): SEQ ID NO: 1673; WAN024G97_at; Start 277; Stop 301
ttttatggacaacgtcgagagcagg

SEQ ID NO: 236137 - DNA, 25 bp, Artificial
  probe
  misc_feature (1)..(25): SEQ ID NO: 1673; WAN024G97_at; Start 36; Stop 60
aaaagaattatttgacgcgctggat

SEQ ID NO: 236138 - DNA, 25 bp, Artificial
  probe
  misc_feature (1)..(25): SEQ ID NO: 1673; WAN024G97_at; Start 274; Stop 298
gatttttatggacaacgtcgagagc

SEQ ID NO: 236139 - DNA, 25 bp, Artificial
  probe
  misc_feature (1)..(25): SEQ ID NO: 1673; WAN024G97_at; Start 165; Stop 189
taagttgcgagaacgcttgggtgag

SEQ ID NO: 236140 - DNA, 25 bp, Artificial
  probe
  misc_feature (1)..(25): SEQ ID NO: 1673; WAN024G97_at; Start 96; Stop 120
tgtggaagccatcaagaaaaatctc

SEQ ID NO: 236141 - DNA, 25 bp, Artificial
  probe
  misc_feature (1)..(25): SEQ ID NO: 1673; WAN024G97_at; Start 98; Stop 122
tggaagccatcaagaaaaatctcaa

SEQ ID NO: 236142 - DNA, 25 bp, Artificial
  probe
  misc_feature (1)..(25): SEQ ID NO: 1673; WAN024G97_at; Start 37; Stop 61
aaagaattatttgacgcgctggatg

SEQ ID NO: 236143 - DNA, 25 bp, Artificial
  probe
  misc_feature (1)..(25): SEQ ID NO: 1673; WAN024G97_at; Start 38; Stop 62
aagaattatttgacgcgctggatga

SEQ ID NO: 236144 - DNA, 25 bp, Artificial
  probe
  misc_feature (1)..(25): SEQ ID NO: 1208; WAN024G98_at; Start 78; Stop 102
tacgaagaacaaccgcatttccact

SEQ ID NO: 236145 - DNA, 25 bp, Artificial
  probe
  misc_feature (1)..(25): SEQ ID NO: 1208; WAN024G98_at; Start 6; Stop 30
tagtagtcgtctccaagcccttctt

SEQ ID NO: 236146 - DNA, 25 bp, Artificial
  probe
  misc_feature (1)..(25): SEQ ID NO: 1208; WAN024G98_at; Start 131; Stop 155
gtcacatttggacggctttcataga

SEQ ID NO: 236147 - DNA, 25 bp, Artificial
  probe
  misc_feature (1)..(25): SEQ ID NO: 1208; WAN024G98_at; Start 31; Stop 55
caaggctgtgacaatggcatgggtt

SEQ ID NO: 236148 - DNA, 25 bp, Artificial
  probe
  misc_feature (1)..(25): SEQ ID NO: 1208; WAN024G98_at; Start 107; Stop 131
agagtcaaagcagccgcatcagacg

SEQ ID NO: 236149 - DNA, 25 bp, Artificial
  probe
  misc_feature (1)..(25): SEQ ID NO: 1208; WAN024G98_at; Start 27; Stop 51
tcttcaaggctgtgacaatggcatg

SEQ ID NO: 236150 - DNA, 25 bp, Artificial
  probe
  misc_feature (1)..(25): SEQ ID NO: 1208; WAN024G98_at; Start 2; Stop 26
tgaatagtagtcgtctccaagccct

SEQ ID NO: 236151 - DNA, 25 bp, Artificial
  probe
  misc_feature (1)..(25): SEQ ID NO: 1208; WAN024G98_at; Start 122; Stop 146
gcatcagacgtcacatttggacggc

SEQ ID NO: 236152 - DNA, 25 bp, Artificial
  probe
  misc_feature (1)..(25): SEQ ID NO: 1208; WAN024G98_at; Start 99; Stop 123
cactcttaagagtcaaagcagccgc

SEQ ID NO: 236153 - DNA, 25 bp, Artificial
  probe
  misc_feature (1)..(25): SEQ ID NO: 1208; WAN024G98_at; Start 42; Stop 66
caatggcatgggttgtttgataggc

SEQ ID NO: 236154 - DNA, 25 bp, Artificial
  probe
  misc_feature (1)..(25): SEQ ID NO: 1208; WAN024G98_at; Start 102; Stop 126
tcttaagagtcaaagcagccgcatc

SEQ ID NO: 236155 - DNA, 25 bp, Artificial
  probe
  misc_feature (1)..(25): SEQ ID NO: 1208; WAN024G98_at; Start 71; Stop 95
ttaccactacgaagaacaaccgcat

SEQ ID NO: 236156 - DNA, 25 bp, Artificial
  probe
  misc_feature (1)..(25): SEQ ID NO: 1208; WAN024G98_at; Start 152; Stop 176
tagataataccgatgacacccatag

SEQ ID NO: 236157 - DNA, 25 bp, Artificial
  probe
  misc_feature (1)..(25): SEQ ID NO: 1208; WAN024G98_at; Start 198; Stop 222
ccaaaccattttcaagctgacttgt

SEQ ID NO: 236158 - DNA, 25 bp, Artificial
  probe
  misc_feature (1)..(25): SEQ ID NO: 1208; WAN024G98_at; Start 60; Stop 84
gataggcatccttaccactacgaag

SEQ ID NO: 236159 - DNA, 25 bp, Artificial
  probe
  misc_feature (1)..(25): SEQ ID NO: 1208; WAN024G98_at; Start 105; Stop 129
taagagtcaaagcagccgcatcaga

SEQ ID NO: 236160 - DNA, 25 bp, Artificial
  probe
  misc_feature (1)..(25): SEQ ID NO: 1208; WAN024G98_at; Start 19; Stop 43
caagcccttcttcaaggctgtgaca

SEQ ID NO: 236161 - DNA, 25 bp, Artificial
  probe
  misc_feature (1)..(25): SEQ ID NO: 1208; WAN024G98_at; Start 84; Stop 108
gaacaaccgcatttccactcttaag

SEQ ID NO: 236162 - DNA, 25 bp, Artificial
  probe
  misc_feature (1)..(25): SEQ ID NO: 1208; WAN024G98_at; Start 165; Stop 189
tgacacccatagctacacgtttttt

SEQ ID NO: 236163 - DNA, 25 bp, Artificial
  probe
  misc_feature (1)..(25): SEQ ID NO: 1208; WAN024G98_at; Start 9; Stop 33
tagtcgtctccaagcccttcttcaa

SEQ ID NO: 236164 - DNA, 25 bp, Artificial
  probe
  misc_feature (1)..(25): SEQ ID NO: 1208; WAN024G98_at; Start 138; Stop 162
ttggacggctttcatagataatacc

SEQ ID NO: 236165 - DNA, 25 bp, Artificial
  probe
  misc_feature (1)..(25): SEQ ID NO: 1208; WAN024G98_at; Start 52; Stop 76
ggttgtttgataggcatccttacca

SEQ ID NO: 236166 - DNA, 25 bp, Artificial
  probe
  misc_feature (1)..(25): SEQ ID NO: 1208; WAN024G98_at; Start 204; Stop 228
cattttcaagctgacttgtttctaa

SEQ ID NO: 236167 - DNA, 25 bp, Artificial
  probe
  misc_feature (1)..(25): SEQ ID NO: 1208; WAN024G98_at; Start 163; Stop 187
gatgacacccatagctacacgtttt

SEQ ID NO: 236168 - DNA, 25 bp, Artificial
  probe
  misc_feature (1)..(25): SEQ ID NO: 1208; WAN024G98_at; Start 126; Stop 150
cagacgtcacatttggacggctttc

SEQ ID NO: 236169 - DNA, 25 bp, Artificial
  probe
  misc_feature (1)..(25): SEQ ID NO: 1208; WAN024G98_at; Start 156; Stop 180
taataccgatgacacccatagctac

SEQ ID NO: 236170 - DNA, 25 bp, Artificial
  probe
  misc_feature (1)..(25): SEQ ID NO: 1208; WAN024G98_at; Start 87; Stop 111
caaccgcatttccactcttaagagt

SEQ ID NO: 236171 - DNA, 25 bp, Artificial
  probe
  misc_feature (1)..(25): SEQ ID NO: 1208; WAN024G98_at; Start 144; Stop 168
ggctttcatagataataccgatgac

SEQ ID NO: 236172 - DNA, 25 bp, Artificial
  probe
  misc_feature (1)..(25): SEQ ID NO: 1208; WAN024G98_at; Start 176; Stop 200
gctacacgtttttttgtgataacca

SEQ ID NO: 236173 - DNA, 25 bp, Artificial
  probe
  misc_feature (1)..(25): SEQ ID NO: 1208; WAN024G98_at; Start 64; Stop 88
ggcatccttaccactacgaagaaca

SEQ ID NO: 236174 - DNA, 25 bp, Artificial
  probe
  misc_feature (1)..(25): SEQ ID NO: 1208; WAN024G98_at; Start 117; Stop 141
cagccgcatcagacgtcacatttgg

SEQ ID NO: 236175 - DNA, 25 bp, Artificial
  probe
  misc_feature (1)..(25): SEQ ID NO: 1208; WAN024G98_at; Start 190; Stop 214
tgtgataaccaaaccattttcaagc

SEQ ID NO: 236176 - DNA, 25 bp, Artificial
  probe
  misc_feature (1)..(25): SEQ ID NO: 1208; WAN024G98_at; Start 193; Stop 217
gataaccaaaccattttcaagctga

SEQ ID NO: 236177 - DNA, 25 bp, Artificial
  probe
  misc_feature (1)..(25): SEQ ID NO: 1208; WAN024G98_at; Start 47; Stop 71
gcatgggttgtttgataggcatcct

SEQ ID NO: 236178 - DNA, 25 bp, Artificial
  probe
  misc_feature (1)..(25): SEQ ID NO: 5398; WAN024G99_at; Start 88; Stop 112
ggatcgtcccacatctgcgagatca

SEQ ID NO: 236179 - DNA, 25 bp, Artificial
  probe
  misc_feature (1)..(25): SEQ ID NO: 5398; WAN024G99_at; Start 32; Stop 56
tagcggcagagctggtccagaagaa

SEQ ID NO: 236180 - DNA, 25 bp, Artificial
  probe
  misc_feature (1)..(25): SEQ ID NO: 5398; WAN024G99_at; Start 44; Stop 68
tggtccagaagaagctccttactct

SEQ ID NO: 236181 - DNA, 25 bp, Artificial
  probe
  misc_feature (1)..(25): SEQ ID NO: 5398; WAN024G99_at; Start 92; Stop 116
cgtcccacatctgcgagatcaatga

SEQ ID NO: 236182 - DNA, 25 bp, Artificial
  probe
  misc_feature (1)..(25): SEQ ID NO: 5398; WAN024G99_at; Start 190; Stop 214
ggttttgctgatacggcggtcaatg

SEQ ID NO: 236183 - DNA, 25 bp, Artificial
  probe
  misc_feature (1)..(25): SEQ ID NO: 5398; WAN024G99_at; Start 119; Stop 143
tcctgaacagtagtggcctcgtagc

SEQ ID NO: 236184 - DNA, 25 bp, Artificial
  probe
  misc_feature (1)..(25): SEQ ID NO: 5398; WAN024G99_at; Start 112; Stop 136
aatgatatcctgaacagtagtggcc

SEQ ID NO: 236185 - DNA, 25 bp, Artificial
  probe
  misc_feature (1)..(25): SEQ ID NO: 5398; WAN024G99_at; Start 11; Stop 35
tcaaaaagatgatggaagaggtagc

SEQ ID NO: 236186 - DNA, 25 bp, Artificial
  probe
  misc_feature (1)..(25): SEQ ID NO: 5398; WAN024G99_at; Start 199; Stop 223
gatacggcggtcaatgttagtcata

SEQ ID NO: 236187 - DNA, 25 bp, Artificial
  probe
  misc_feature (1)..(25): SEQ ID NO: 5398; WAN024G99_at; Start 42; Stop 66
gctggtccagaagaagctccttact

SEQ ID NO: 236188 - DNA, 25 bp, Artificial
  probe
  misc_feature (1)..(25): SEQ ID NO: 5398; WAN024G99_at; Start 138; Stop 162
cgtagcccttagcattcaaaagttg

SEQ ID NO: 236189 - DNA, 25 bp, Artificial
  probe
  misc_feature (1)..(25): SEQ ID NO: 5398; WAN024G99_at; Start 124; Stop 148
aacagtagtggcctcgtagccctta

SEQ ID NO: 236190 - DNA, 25 bp, Artificial
  probe
  misc_feature (1)..(25): SEQ ID NO: 5398; WAN024G99_at; Start 65; Stop 89
ctctcatagtgacagtaaaaggtgg

SEQ ID NO: 236191 - DNA, 25 bp, Artificial
  probe
  misc_feature (1)..(25): SEQ ID NO: 5398; WAN024G99_at; Start 196; Stop 220
gctgatacggcggtcaatgttagtc

SEQ ID NO: 236192 - DNA, 25 bp, Artificial
  probe
  misc_feature (1)..(25): SEQ ID NO: 5398; WAN024G99_at; Start 97; Stop 121
cacatctgcgagatcaatgatatcc

SEQ ID NO: 236193 - DNA, 25 bp, Artificial
  probe
  misc_feature (1)..(25): SEQ ID NO: 5398; WAN024G99_at; Start 35; Stop 59
cggcagagctggtccagaagaagct

SEQ ID NO: 236194 - DNA, 25 bp, Artificial
  probe
  misc_feature (1)..(25): SEQ ID NO: 5398; WAN024G99_at; Start 51; Stop 75
gaagaagctccttactctcatagtg

SEQ ID NO: 236195 - DNA, 25 bp, Artificial
  probe
  misc_feature (1)..(25): SEQ ID NO: 5398; WAN024G99_at; Start 150; Stop 174
cattcaaaagttgtataaaagcttg

SEQ ID NO: 236196 - DNA, 25 bp, Artificial
  probe
  misc_feature (1)..(25): SEQ ID NO: 5398; WAN024G99_at; Start 133; Stop 157
ggcctcgtagcccttagcattcaaa

SEQ ID NO: 236197 - DNA, 25 bp, Artificial
  probe
  misc_feature (1)..(25): SEQ ID NO: 5398; WAN024G99_at; Start 20; Stop 44
tgatggaagaggtagcggcagagct

SEQ ID NO: 236198 - DNA, 25 bp, Artificial
  probe
  misc_feature (1)..(25): SEQ ID NO: 5398; WAN024G99_at; Start 203; Stop 227
cggcggtcaatgttagtcatatgga

SEQ ID NO: 236199 - DNA, 25 bp, Artificial
  probe
  misc_feature (1)..(25): SEQ ID NO: 5398; WAN024G99_at; Start 174; Stop 198
gatagatggcttttttggttttgct

SEQ ID NO: 236200 - DNA, 25 bp, Artificial
  probe
  misc_feature (1)..(25): SEQ ID NO: 5398; WAN024G99_at; Start 80; Stop 104
taaaaggtggatcgtcccacatctg

SEQ ID NO: 236201 - DNA, 25 bp, Artificial
  probe
  misc_feature (1)..(25): SEQ ID NO: 5398; WAN024G99_at; Start 54; Stop 78
gaagctccttactctcatagtgaca

SEQ ID NO: 236202 - DNA, 25 bp, Artificial
  probe
  misc_feature (1)..(25): SEQ ID NO: 5398; WAN024G99_at; Start 210; Stop 234
caatgttagtcatatggacacttaa

SEQ ID NO: 236203 - DNA, 25 bp, Artificial
  probe
  misc_feature (1)..(25): SEQ ID NO: 5398; WAN024G99_at; Start 115; Stop 139
gatatcctgaacagtagtggcctcg

SEQ ID NO: 236204 - DNA, 25 bp, Artificial
  probe
  misc_feature (1)..(25): SEQ ID NO: 5398; WAN024G99_at; Start 85; Stop 109
ggtggatcgtcccacatctgcgaga

SEQ ID NO: 236205 - DNA, 25 bp, Artificial
  probe
  misc_feature (1)..(25): SEQ ID NO: 5398; WAN024G99_at; Start 159; Stop 183
gttgtataaaagcttgatagatggc

SEQ ID NO: 236206 - DNA, 25 bp, Artificial
  probe
  misc_feature (1)..(25): SEQ ID NO: 5398; WAN024G99_at; Start 75; Stop 99
gacagtaaaaggtggatcgtcccac

SEQ ID NO: 236207 - DNA, 25 bp, Artificial
  probe
  misc_feature (1)..(25): SEQ ID NO: 5398; WAN024G99_at; Start 69; Stop 93
catagtgacagtaaaaggtggatcg

SEQ ID NO: 236208 - DNA, 25 bp, Artificial
  probe
  misc_feature (1)..(25): SEQ ID NO: 5398; WAN024G99_at; Start 129; Stop 153
tagtggcctcgtagcccttagcatt

SEQ ID NO: 236209 - DNA, 25 bp, Artificial
  probe
  misc_feature (1)..(25): SEQ ID NO: 5398; WAN024G99_at; Start 142; Stop 166
gcccttagcattcaaaagttgtata

SEQ ID NO: 236210 - DNA, 25 bp, Artificial
  probe
  misc_feature (1)..(25): SEQ ID NO: 5398; WAN024G99_at; Start 104; Stop 128
gcgagatcaatgatatcctgaacag

SEQ ID NO: 236211 - DNA, 25 bp, Artificial
  probe
  misc_feature (1)..(25): SEQ ID NO: 5398; WAN024G99_at; Start 186; Stop 210
ttttggttttgctgatacggcggtc

SEQ ID NO: 236212 - DNA, 25 bp, Artificial
  probe
  misc_feature (1)..(25): SEQ ID NO: 5006; WAN024G9A_at; Start 125; Stop 149
cgactggttttagcattgttgatga

SEQ ID NO: 236213 - DNA, 25 bp, Artificial
  probe
  misc_feature (1)..(25): SEQ ID NO: 5006; WAN024G9A_at; Start 138; Stop 162
cattgttgatgatagacagcgcctt

SEQ ID NO: 236214 - DNA, 25 bp, Artificial
  probe
  misc_feature (1)..(25): SEQ ID NO: 5006; WAN024G9A_at; Start 250; Stop 274
attgatcaagccagctcctccacga

SEQ ID NO: 236215 - DNA, 25 bp, Artificial
  probe
  misc_feature (1)..(25): SEQ ID NO: 5006; WAN024G9A_at; Start 78; Stop 102
tgttttcatgaaccagcagaacctc

SEQ ID NO: 236216 - DNA, 25 bp, Artificial
  probe
  misc_feature (1)..(25): SEQ ID NO: 5006; WAN024G9A_at; Start 163; Stop 187
gtcttcgtctgcatccttatccaca

SEQ ID NO: 236217 - DNA, 25 bp, Artificial
  probe
  misc_feature (1)..(25): SEQ ID NO: 5006; WAN024G9A_at; Start 172; Stop 196
tgcatccttatccacatagacatgg

SEQ ID NO: 236218 - DNA, 25 bp, Artificial
  probe
  misc_feature (1)..(25): SEQ ID NO: 5006; WAN024G9A_at; Start 135; Stop 159
tagcattgttgatgatagacagcgc

SEQ ID NO: 236219 - DNA, 25 bp, Artificial
  probe
  misc_feature (1)..(25): SEQ ID NO: 5006; WAN024G9A_at; Start 14; Stop 38
agtccagcttccttacgctctgcaa

SEQ ID NO: 236220 - DNA, 25 bp, Artificial
  probe
  misc_feature (1)..(25): SEQ ID NO: 5006; WAN024G9A_at; Start 86; Stop 110
tgaaccagcagaacctccatggcat

SEQ ID NO: 236221 - DNA, 25 bp, Artificial
  probe
  misc_feature (1)..(25): SEQ ID NO: 5006; WAN024G9A_at; Start 7; Stop 31
tggttccagtccagcttccttacgc

SEQ ID NO: 236222 - DNA, 25 bp, Artificial
  probe
  misc_feature (1)..(25): SEQ ID NO: 5006; WAN024G9A_at; Start 152; Stop 176
gacagcgccttgtcttcgtctgcat

SEQ ID NO: 236223 - DNA, 25 bp, Artificial
  probe
  misc_feature (1)..(25): SEQ ID NO: 5006; WAN024G9A_at; Start 83; Stop 107
tcatgaaccagcagaacctccatgg

SEQ ID NO: 236224 - DNA, 25 bp, Artificial
  probe
  misc_feature (1)..(25): SEQ ID NO: 5006; WAN024G9A_at; Start 1; Stop 25
ttgaattggttccagtccagcttcc

SEQ ID NO: 236225 - DNA, 25 bp, Artificial
  probe
  misc_feature (1)..(25): SEQ ID NO: 5006; WAN024G9A_at; Start 141; Stop 165
tgttgatgatagacagcgccttgtc

SEQ ID NO: 236226 - DNA, 25 bp, Artificial
  probe
  misc_feature (1)..(25): SEQ ID NO: 5006; WAN024G9A_at; Start 182; Stop 206
tccacatagacatggacaatcccag

SEQ ID NO: 236227 - DNA, 25 bp, Artificial
  probe
  misc_feature (1)..(25): SEQ ID NO: 5006; WAN024G9A_at; Start 96; Stop 120
gaacctccatggcattacaaacaga

SEQ ID NO: 236228 - DNA, 25 bp, Artificial
  probe
  misc_feature (1)..(25): SEQ ID NO: 5006; WAN024G9A_at; Start 67; Stop 91
gcttgctgccttgttttcatgaacc

SEQ ID NO: 236229 - DNA, 25 bp, Artificial
  probe
  misc_feature (1)..(25): SEQ ID NO: 5006; WAN024G9A_at; Start 255; Stop 279
tcaagccagctcctccacgaggaat

SEQ ID NO: 236230 - DNA, 25 bp, Artificial
  probe
  misc_feature (1)..(25): SEQ ID NO: 5006; WAN024G9A_at; Start 115; Stop 139
aacagaaggacgactggttttagca

SEQ ID NO: 236231 - DNA, 25 bp, Artificial
  probe
  misc_feature (1)..(25): SEQ ID NO: 5006; WAN024G9A_at; Start 158; Stop 182
gccttgtcttcgtctgcatccttat

SEQ ID NO: 236232 - DNA, 25 bp, Artificial
  probe
  misc_feature (1)..(25): SEQ ID NO: 5006; WAN024G9A_at; Start 188; Stop 212
tagacatggacaatcccagtccctg

SEQ ID NO: 236233 - DNA, 25 bp, Artificial
  probe
  misc_feature (1)..(25): SEQ ID NO: 5006; WAN024G9A_at; Start 267; Stop 291
ctccacgaggaatgagaaggtctag

SEQ ID NO: 236234 - DNA, 25 bp, Artificial
  probe
  misc_feature (1)..(25): SEQ ID NO: 5006; WAN024G9A_at; Start 105; Stop 129
tggcattacaaacagaaggacgact

SEQ ID NO: 236235 - DNA, 25 bp, Artificial
  probe
  misc_feature (1)..(25): SEQ ID NO: 5006; WAN024G9A_at; Start 207; Stop 231
tccctgtctcgataacaggtacaat

SEQ ID NO: 236236 - DNA, 25 bp, Artificial
  probe
  misc_feature (1)..(25): SEQ ID NO: 5006; WAN024G9A_at; Start 195; Stop 219
ggacaatcccagtccctgtctcgat

SEQ ID NO: 236237 - DNA, 25 bp, Artificial
  probe
  misc_feature (1)..(25): SEQ ID NO: 5006; WAN024G9A_at; Start 108; Stop 132
cattacaaacagaaggacgactggt

SEQ ID NO: 236238 - DNA, 25 bp, Artificial
  probe
  misc_feature (1)..(25): SEQ ID NO: 5006; WAN024G9A_at; Start 91; Stop 115
cagcagaacctccatggcattacaa

SEQ ID NO: 236239 - DNA, 25 bp, Artificial
  probe
  misc_feature (1)..(25): SEQ ID NO: 5006; WAN024G9A_at; Start 102; Stop 126
ccatggcattacaaacagaaggacg

SEQ ID NO: 236240 - DNA, 25 bp, Artificial
  probe
  misc_feature (1)..(25): SEQ ID NO: 5006; WAN024G9A_at; Start 74; Stop 98
gccttgttttcatgaaccagcagaa

SEQ ID NO: 236241 - DNA, 25 bp, Artificial
  probe
  misc_feature (1)..(25): SEQ ID NO: 5006; WAN024G9A_at; Start 245; Stop 269
actgcattgatcaagccagctcctc

SEQ ID NO: 236242 - DNA, 25 bp, Artificial
  probe
  misc_feature (1)..(25): SEQ ID NO: 5006; WAN024G9A_at; Start 265; Stop 289
tcctccacgaggaatgagaaggtct

SEQ ID NO: 236243 - DNA, 25 bp, Artificial
  probe
  misc_feature (1)..(25): SEQ ID NO: 5006; WAN024G9A_at; Start 203; Stop 227
ccagtccctgtctcgataacaggta

SEQ ID NO: 236244 - DNA, 25 bp, Artificial
  probe
  misc_feature (1)..(25): SEQ ID NO: 5006; WAN024G9A_at; Start 119; Stop 143
gaaggacgactggttttagcattgt

SEQ ID NO: 236245 - DNA, 25 bp, Artificial
  probe
  misc_feature (1)..(25): SEQ ID NO: 5006; WAN024G9A_at; Start 148; Stop 172
gatagacagcgccttgtcttcgtct

SEQ ID NO: 236246 - DNA, 25 bp, Artificial
  probe
  misc_feature (1)..(25): SEQ ID NO: 2674; WAN024G9B_at; Start 1094; Stop 1118
cagcggtgtatgttaatgcctcaac

SEQ ID NO: 236247 - DNA, 25 bp, Artificial
  probe
  misc_feature (1)..(25): SEQ ID NO: 2674; WAN024G9B_at; Start 556; Stop 580
tatgctatgatgaaggccaagggct

SEQ ID NO: 236248 - DNA, 25 bp, Artificial
  probe
  misc_feature (1)..(25): SEQ ID NO: 2674; WAN024G9B_at; Start 106; Stop 130
cacttagtggctgctactgaggaaa

SEQ ID NO: 236249 - DNA, 25 bp, Artificial
  probe
  misc_feature (1)..(25): SEQ ID NO: 2674; WAN024G9B_at; Start 204; Stop 228
tttggatgcagatcgtatagaagcg

SEQ ID NO: 236250 - DNA, 25 bp, Artificial
  probe
  misc_feature (1)..(25): SEQ ID NO: 2674; WAN024G9B_at; Start 460; Stop 484
catgccattgtcacagccttgaaga

SEQ ID NO: 236251 - DNA, 25 bp, Artificial
  probe
  misc_feature (1)..(25): SEQ ID NO: 2674; WAN024G9B_at; Start 176; Stop 200
tctcagatgtgatgttggatcgtct

SEQ ID NO: 236252 - DNA, 25 bp, Artificial
  probe
  misc_feature (1)..(25): SEQ ID NO: 2674; WAN024G9B_at; Start 442; Stop 466
gatgcctatcaaacaacccatgcca

SEQ ID NO: 236253 - DNA, 25 bp, Artificial
  probe
  misc_feature (1)..(25): SEQ ID NO: 2674; WAN024G9B_at; Start 371; Stop 395
caaatgtgacgtctgatgcggctgc

SEQ ID NO: 236254 - DNA, 25 bp, Artificial
  probe
  misc_feature (1)..(25): SEQ ID NO: 2674; WAN024G9B_at; Start 1168; Stop 1192
tctactcagaaattgcacgcgcgtg

SEQ ID NO: 236255 - DNA, 25 bp, Artificial
  probe
  misc_feature (1)..(25): SEQ ID NO: 2674; WAN024G9B_at; Start 1110; Stop 1134
tgcctcaactcgtttcacagatgga

SEQ ID NO: 236256 - DNA, 25 bp, Artificial
  probe
  misc_feature (1)..(25): SEQ ID NO: 2674; WAN024G9B_at; Start 767; Stop 791
ccatggaggttctgctggttcatga

SEQ ID NO: 236257 - DNA, 25 bp, Artificial
  probe
  misc_feature (1)..(25): SEQ ID NO: 2674; WAN024G9B_at; Start 400; Stop 424
actcttaagagtggaaatgcggttg

SEQ ID NO: 236258 - DNA, 25 bp, Artificial
  probe
  misc_feature (1)..(25): SEQ ID NO: 2674; WAN024G9B_at; Start 267; Stop 291
tccaatcggtgaagttttagaaaca

SEQ ID NO: 236259 - DNA, 25 bp, Artificial
  probe
  misc_feature (1)..(25): SEQ ID NO: 2674; WAN024G9B_at; Start 1078; Stop 1102
gatcaagtggactctgcagcggtgt

SEQ ID NO: 236260 - DNA, 25 bp, Artificial
  probe
  misc_feature (1)..(25): SEQ ID NO: 2674; WAN024G9B_at; Start 1123; Stop 1147
ttcacagatggaggacaatttggtc

SEQ ID NO: 236261 - DNA, 25 bp, Artificial
  probe
  misc_feature (1)..(25): SEQ ID NO: 2674; WAN024G9B_at; Start 413; Stop 437
gaaatgcggttgttcttcgtagtgg

SEQ ID NO: 236262 - DNA, 25 bp, Artificial
  probe
  misc_feature (1)..(25): SEQ ID NO: 2674; WAN024G9B_at; Start 427; Stop 451
cttcgtagtggtaaggatgcctatc

SEQ ID NO: 236263 - DNA, 25 bp, Artificial
  probe
  misc_feature (1)..(25): SEQ ID NO: 2674; WAN024G9B_at; Start 1024; Stop 1048
catcattcggatgctattgtgacgg

SEQ ID NO: 236264 - DNA, 25 bp, Artificial
  probe
  misc_feature (1)..(25): SEQ ID NO: 2674; WAN024G9B_at; Start 16; Stop 40
gaacaatttgaacaggtacaggctg

SEQ ID NO: 236265 - DNA, 25 bp, Artificial
  probe
  misc_feature (1)..(25): SEQ ID NO: 2674; WAN024G9B_at; Start 90; Stop 114
gctagccatggctgatcacttagtg

SEQ ID NO: 236266 - DNA, 25 bp, Artificial
  probe
  misc_feature (1)..(25): SEQ ID NO: 2674; WAN024G9B_at; Start 128; Stop 152
aaattttagcggctaatgccctcga

SEQ ID NO: 236267 - DNA, 25 bp, Artificial
  probe
  misc_feature (1)..(25): SEQ ID NO: 2674; WAN024G9B_at; Start 1060; Stop 1084
gctgcagcatactttacagatcaag

SEQ ID NO: 236268 - DNA, 25 bp, Artificial
  probe
  misc_feature (1)..(25): SEQ ID NO: 2674; WAN024G9B_at; Start 1046; Stop 1070
cggaaaatgctgaagctgcagcata

SEQ ID NO: 236269 - DNA, 25 bp, Artificial
  probe
  misc_feature (1)..(25): SEQ ID NO: 2674; WAN024G9B_at; Start 234; Stop 258
aagaggaattcgtgaagtggttgcc

SEQ ID NO: 236270 - DNA, 25 bp, Artificial
  probe
  misc_feature (1)..(25): SEQ ID NO: 2674; WAN024G9B_at; Start 385; Stop 409
gatgcggctgctttgactcttaaga

SEQ ID NO: 236271 - DNA, 25 bp, Artificial
  probe
  misc_feature (1)..(25): SEQ ID NO: 2674; WAN024G9B_at; Start 59; Stop 83
cagctagtgaagaagtgaaaaacca

SEQ ID NO: 236272 - DNA, 25 bp, Artificial
  probe
  misc_feature (1)..(25): SEQ ID NO: 2674; WAN024G9B_at; Start 44; Stop 68
aaaaatcgattaacacagctagtga

SEQ ID NO: 236273 - DNA, 25 bp, Artificial
  probe
  misc_feature (1)..(25): SEQ ID NO: 2674; WAN024G9B_at; Start 893; Stop 917
caagccagtttgtttcaggtcaagc

SEQ ID NO: 236274 - DNA, 25 bp, Artificial
  probe
  misc_feature (1)..(25): SEQ ID NO: 2674; WAN024G9B_at; Start 290; Stop 314
caagtcagcttgaaaatggtttggt

SEQ ID NO: 236275 - DNA, 25 bp, Artificial
  probe
  misc_feature (1)..(25): SEQ ID NO: 2674; WAN024G9B_at; Start 980; Stop 1004
gcagtttagaagaagcggttgcgca

SEQ ID NO: 236276 - DNA, 25 bp, Artificial
  probe
  misc_feature (1)..(25): SEQ ID NO: 2674; WAN024G9B_at; Start 480; Stop 504
gaagaagggcttggagacgactact

SEQ ID NO: 236277 - DNA, 25 bp, Artificial
  probe
  misc_feature (1)..(25): SEQ ID NO: 2674; WAN024G9B_at; Start 349; Stop 373
ggtattatctatgaaagccgtccaa

SEQ ID NO: 236278 - DNA, 25 bp, Artificial
  probe
  misc_feature (1)..(25): SEQ ID NO: 2674; WAN024G9B_at; Start 219; Stop 243
tatagaagcgatggcaagaggaatt

SEQ ID NO: 236279 - DNA, 25 bp, Artificial
  probe
  misc_feature (1)..(25): SEQ ID NO: 2674; WAN024G9B_at; Start 141; Stop 165
taatgccctcgatatggcagcggct

SEQ ID NO: 236280 - DNA, 25 bp, Artificial
  probe
  misc_feature (1)..(25): SEQ ID NO: 1437; WAN024G9C_at; Start 97; Stop 121
gttcaggatatcattgatctcgcag

SEQ ID NO: 236281 - DNA, 25 bp, Artificial
  probe
  misc_feature (1)..(25): SEQ ID NO: 1437; WAN024G9C_at; Start 167; Stop 191
ttcttctggaccagctctgccgcta

SEQ ID NO: 236282 - DNA, 25 bp, Artificial
  probe
  misc_feature (1)..(25): SEQ ID NO: 1437; WAN024G9C_at; Start 361; Stop 385
tccgtgctagctgataatttaaaag

SEQ ID NO: 236283 - DNA, 25 bp, Artificial
  probe
  misc_feature (1)..(25): SEQ ID NO: 1437; WAN024G9C_at; Start 221; Stop 245
aagccatttcaaccgaggactacct

SEQ ID NO: 236284 - DNA, 25 bp, Artificial
  probe
  misc_feature (1)..(25): SEQ ID NO: 1437; WAN024G9C_at; Start 13; Stop 37
gaccgccgtatcagcaaaaccaaaa

SEQ ID NO: 236285 - DNA, 25 bp, Artificial
  probe
  misc_feature (1)..(25): SEQ ID NO: 1437; WAN024G9C_at; Start 352; Stop 376
catgtctattccgtgctagctgata

SEQ ID NO: 236286 - DNA, 25 bp, Artificial
  probe
  misc_feature (1)..(25): SEQ ID NO: 1437; WAN024G9C_at; Start 80; Stop 104
gctacgaggccactactgttcagga

SEQ ID NO: 236287 - DNA, 25 bp, Artificial
  probe
  misc_feature (1)..(25): SEQ ID NO: 1437; WAN024G9C_at; Start 334; Stop 358
cataaagagctagaacaccatgtct

SEQ ID NO: 236288 - DNA, 25 bp, Artificial
  probe
  misc_feature (1)..(25): SEQ ID NO: 1437; WAN024G9C_at; Start 304; Stop 328
tccaaaaatgactacttcctccgtc

SEQ ID NO: 236289 - DNA, 25 bp, Artificial
  probe
  misc_feature (1)..(25): SEQ ID NO: 1437; WAN024G9C_at; Start 346; Stop 370
gaacaccatgtctattccgtgctag

SEQ ID NO: 236290 - DNA, 25 bp, Artificial
  probe
  misc_feature (1)..(25): SEQ ID NO: 1437; WAN024G9C_at; Start 435; Stop 459
caactttatcgagacattgacctgg

SEQ ID NO: 236291 - DNA, 25 bp, Artificial
  probe
  misc_feature (1)..(25): SEQ ID NO: 1437; WAN024G9C_at; Start 105; Stop 129
tatcattgatctcgcagatgtggga

SEQ ID NO: 236292 - DNA, 25 bp, Artificial
  probe
  misc_feature (1)..(25): SEQ ID NO: 1437; WAN024G9C_at; Start 85; Stop 109
gaggccactactgttcaggatatca

SEQ ID NO: 236293 - DNA, 25 bp, Artificial
  probe
  misc_feature (1)..(25): SEQ ID NO: 1437; WAN024G9C_at; Start 469; Stop 493
aaaggtcaagatttcacagaccagg

SEQ ID NO: 236294 - DNA, 25 bp, Artificial
  probe
  misc_feature (1)..(25): SEQ ID NO: 1437; WAN024G9C_at; Start 440; Stop 464
ttatcgagacattgacctggtggct

SEQ ID NO: 236295 - DNA, 25 bp, Artificial
  probe
  misc_feature (1)..(25): SEQ ID NO: 1437; WAN024G9C_at; Start 72; Stop 96
tgctaagggctacgaggccactact

SEQ ID NO: 236296 - DNA, 25 bp, Artificial
  probe
  misc_feature (1)..(25): SEQ ID NO: 1437; WAN024G9C_at; Start 270; Stop 294
taaaaaccaagaccatatcaccagt

SEQ ID NO: 236297 - DNA, 25 bp, Artificial
  probe
  misc_feature (1)..(25): SEQ ID NO: 1437; WAN024G9C_at; Start 370; Stop 394
gctgataatttaaaagaagcccacc

SEQ ID NO: 236298 - DNA, 25 bp, Artificial
  probe
  misc_feature (1)..(25): SEQ ID NO: 1437; WAN024G9C_at; Start 455; Stop 479
cctggtggctcaaaaaaggtcaaga

SEQ ID NO: 236299 - DNA, 25 bp, Artificial
  probe
  misc_feature (1)..(25): SEQ ID NO: 1437; WAN024G9C_at; Start 215; Stop 239
gagagcaagccatttcaaccgagga

SEQ ID NO: 236300 - DNA, 25 bp, Artificial
  probe
  misc_feature (1)..(25): SEQ ID NO: 1437; WAN024G9C_at; Start 320; Stop 344
tcctccgtcaactccataaagagct

SEQ ID NO: 236301 - DNA, 25 bp, Artificial
  probe
  misc_feature (1)..(25): SEQ ID NO: 1437; WAN024G9C_at; Start 157; Stop 181
agtaaggagcttcttctggaccagc

SEQ ID NO: 236302 - DNA, 25 bp, Artificial
  probe
  misc_feature (1)..(25): SEQ ID NO: 1437; WAN024G9C_at; Start 66; Stop 90
tttgaatgctaagggctacgaggcc

SEQ ID NO: 236303 - DNA, 25 bp, Artificial
  probe
  misc_feature (1)..(25): SEQ ID NO: 1437; WAN024G9C_at; Start 24; Stop 48
cagcaaaaccaaaaaagccatctat

SEQ ID NO: 236304 - DNA, 25 bp, Artificial
  probe
  misc_feature (1)..(25): SEQ ID NO: 1437; WAN024G9C_at; Start 2; Stop 26
tgactaacattgaccgccgtatcag

SEQ ID NO: 236305 - DNA, 25 bp, Artificial
  probe
  misc_feature (1)..(25): SEQ ID NO: 1437; WAN024G9C_at; Start 188; Stop 212
gctacctcttccatcatctttttga

SEQ ID NO: 236306 - DNA, 25 bp, Artificial
  probe
  misc_feature (1)..(25): SEQ ID NO: 1437; WAN024G9C_at; Start 493; Stop 517
gaagttgtccaattttatctagacc

SEQ ID NO: 236307 - DNA, 25 bp, Artificial
  probe
  misc_feature (1)..(25): SEQ ID NO: 1437; WAN024G9C_at; Start 478; Stop 502
gatttcacagaccaggaagttgtcc

SEQ ID NO: 236308 - DNA, 25 bp, Artificial
  probe
  misc_feature (1)..(25): SEQ ID NO: 1437; WAN024G9C_at; Start 40; Stop 64
gccatctatcaagcttttatacaac

SEQ ID NO: 236309 - DNA, 25 bp, Artificial
  probe
  misc_feature (1)..(25): SEQ ID NO: 1437; WAN024G9C_at; Start 131; Stop 155
gatccaccttttactgtcactatga

SEQ ID NO: 236310 - DNA, 25 bp, Artificial
  probe
  misc_feature (1)..(25): SEQ ID NO: 1437; WAN024G9C_at; Start 204; Stop 228
tctttttgaaagagagcaagccatt

SEQ ID NO: 236311 - DNA, 25 bp, Artificial
  probe
  misc_feature (1)..(25): SEQ ID NO: 1437; WAN024G9C_at; Start 508; Stop 532
tatctagaccttctcattcctaaaa

SEQ ID NO: 236312 - DNA, 25 bp, Artificial
  probe
  misc_feature (1)..(25): SEQ ID NO: 1437; WAN024G9C_at; Start 57; Stop 81
tatacaacttttgaatgctaagggc

SEQ ID NO: 236313 - DNA, 25 bp, Artificial
  probe
  misc_feature (1)..(25): SEQ ID NO: 1437; WAN024G9C_at; Start 447; Stop 471
gacattgacctggtggctcaaaaaa

SEQ ID NO: 236314 - DNA, 25 bp, Artificial
  probe
  misc_feature (1)..(25): SEQ ID NO: 675; WAN024G9D_at; Start 66; Stop 90
tgttcaggctcaagaaagttcagga

SEQ ID NO: 236315 - DNA, 25 bp, Artificial
  probe
  misc_feature (1)..(25): SEQ ID NO: 675; WAN024G9D_at; Start 1840; Stop 1864
caaagctctgaaacgagtgtaaaca

SEQ ID NO: 236316 - DNA, 25 bp, Artificial
  probe
  misc_feature (1)..(25): SEQ ID NO: 675; WAN024G9D_at; Start 145; Stop 169
gaaagcaatggacattttgccatgg

SEQ ID NO: 236317 - DNA, 25 bp, Artificial
  probe
  misc_feature (1)..(25): SEQ ID NO: 675; WAN024G9D_at; Start 711; Stop 735
caagtatggtcctctcattggaaaa

SEQ ID NO: 236318 - DNA, 25 bp, Artificial
  probe
  misc_feature (1)..(25): SEQ ID NO: 675; WAN024G9D_at; Start 458; Stop 482
gctatgataaggttttacagactgc

SEQ ID NO: 236319 - DNA, 25 bp, Artificial
  probe
  misc_feature (1)..(25): SEQ ID NO: 675; WAN024G9D_at; Start 913; Stop 937
gcagccagcaaagactatgatgcaa

SEQ ID NO: 236320 - DNA, 25 bp, Artificial
  probe
  misc_feature (1)..(25): SEQ ID NO: 675; WAN024G9D_at; Start 430; Stop 454
tctgaacgtctatgggataatctgt

SEQ ID NO: 236321 - DNA, 25 bp, Artificial
  probe
  misc_feature (1)..(25): SEQ ID NO: 675; WAN024G9D_at; Start 320; Stop 344
tggtgacccatacccacagtgatca

SEQ ID NO: 236322 - DNA, 25 bp, Artificial
  probe
  misc_feature (1)..(25): SEQ ID NO: 675; WAN024G9D_at; Start 696; Stop 720
tcatggagcagaagacaagtatggt

SEQ ID NO: 236323 - DNA, 25 bp, Artificial
  probe
  misc_feature (1)..(25): SEQ ID NO: 675; WAN024G9D_at; Start 126; Stop 150
cagtgatgcgattattcttgaaagc

SEQ ID NO: 236324 - DNA, 25 bp, Artificial
  probe
  misc_feature (1)..(25): SEQ ID NO: 675; WAN024G9D_at; Start 1045; Stop 1069
tatcaagcgcctgattctacaggag

SEQ ID NO: 236325 - DNA, 25 bp, Artificial
  probe
  misc_feature (1)..(25): SEQ ID NO: 675; WAN024G9D_at; Start 681; Stop 705
cgatttagataatgttcatggagca

SEQ ID NO: 236326 - DNA, 25 bp, Artificial
  probe
  misc_feature (1)..(25): SEQ ID NO: 675; WAN024G9D_at; Start 372; Stop 396
tacctatccagttgaccgagtctat

SEQ ID NO: 236327 - DNA, 25 bp, Artificial
  probe
  misc_feature (1)..(25): SEQ ID NO: 675; WAN024G9D_at; Start 1168; Stop 1192
tggttctatttgacagactctggtg

SEQ ID NO: 236328 - DNA, 25 bp, Artificial
  probe
  misc_feature (1)..(25): SEQ ID NO: 675; WAN024G9D_at; Start 1406; Stop 1430
cctggtactatatggattctactgg

SEQ ID NO: 236329 - DNA, 25 bp, Artificial
  probe
  misc_feature (1)..(25): SEQ ID NO: 675; WAN024G9D_at; Start 358; Stop 382
gatgaattactgtctacctatccag

SEQ ID NO: 236330 - DNA, 25 bp, Artificial
  probe
  misc_feature (1)..(25): SEQ ID NO: 675; WAN024G9D_at; Start 766; Stop 790
gataccaacaaatcaaataccaagg

SEQ ID NO: 236331 - DNA, 25 bp, Artificial
  probe
  misc_feature (1)..(25): SEQ ID NO: 675; WAN024G9D_at; Start 14; Stop 38
taactagtttagcacttgtaggcgc

SEQ ID NO: 236332 - DNA, 25 bp, Artificial
  probe
  misc_feature (1)..(25): SEQ ID NO: 675; WAN024G9D_at; Start 1739; Stop 1763
ccaaagaagtagtgaaaaaggatct

SEQ ID NO: 236333 - DNA, 25 bp, Artificial
  probe
  misc_feature (1)..(25): SEQ ID NO: 675; WAN024G9D_at; Start 641; Stop 665
gcgtggtgaaagtcaatggcaagaa

SEQ ID NO: 236334 - DNA, 25 bp, Artificial
  probe
  misc_feature (1)..(25): SEQ ID NO: 675; WAN024G9D_at; Start 873; Stop 897
tgttaattggctcaaagaacgagga

SEQ ID NO: 236335 - DNA, 25 bp, Artificial
  probe
  misc_feature (1)..(25): SEQ ID NO: 675; WAN024G9D_at; Start 164; Stop 188
ccatggtggatacaggagaagatta

SEQ ID NO: 236336 - DNA, 25 bp, Artificial
  probe
  misc_feature (1)..(25): SEQ ID NO: 675; WAN024G9D_at; Start 247; Stop 271
tataagcatgttctaacagaccgtg

SEQ ID NO: 236337 - DNA, 25 bp, Artificial
  probe
  misc_feature (1)..(25): SEQ ID NO: 675; WAN024G9D_at; Start 1486; Stop 1510
tcaggagctatgaagcaaggctggc

SEQ ID NO: 236338 - DNA, 25 bp, Artificial
  probe
  misc_feature (1)..(25): SEQ ID NO: 675; WAN024G9D_at; Start 52; Stop 76
tcatggtatgggaatgttcaggctc

SEQ ID NO: 236339 - DNA, 25 bp, Artificial
  probe
  misc_feature (1)..(25): SEQ ID NO: 675; WAN024G9D_at; Start 1436; Stop 1460
tgaagacaggtgagatagaagttgc

SEQ ID NO: 236340 - DNA, 25 bp, Artificial
  probe
  misc_feature (1)..(25): SEQ ID NO: 675; WAN024G9D_at; Start 1647; Stop 1671
tactgtggattcaagtggtgcctgg

SEQ ID NO: 236341 - DNA, 25 bp, Artificial
  probe
  misc_feature (1)..(25): SEQ ID NO: 675; WAN024G9D_at; Start 1858; Stop 1882
gtaaacaaatcggaatcagaacagt

SEQ ID NO: 236342 - DNA, 25 bp, Artificial
  probe
  misc_feature (1)..(25): SEQ ID NO: 675; WAN024G9D_at; Start 826; Stop 850
caaacttcggatagtctaccttgga

SEQ ID NO: 236343 - DNA, 25 bp, Artificial
  probe
  misc_feature (1)..(25): SEQ ID NO: 675; WAN024G9D_at; Start 104; Stop 128
ttatcaatgttcaagaaggtggcag

SEQ ID NO: 236344 - DNA, 25 bp, Artificial
  probe
  misc_feature (1)..(25): SEQ ID NO: 675; WAN024G9D_at; Start 220; Stop 244
ccatggagagaaggaattgaaacgt

SEQ ID NO: 236345 - DNA, 25 bp, Artificial
  probe
  misc_feature (1)..(25): SEQ ID NO: 675; WAN024G9D_at; Start 626; Stop 650
ccaattccttgattagcgtggtgaa

SEQ ID NO: 236346 - DNA, 25 bp, Artificial
  probe
  misc_feature (1)..(25): SEQ ID NO: 675; WAN024G9D_at; Start 263; Stop 287
cagaccgtgtctttcgtcgtttgaa

SEQ ID NO: 236347 - DNA, 25 bp, Artificial
  probe
  misc_feature (1)..(25): SEQ ID NO: 675; WAN024G9D_at; Start 545; Stop 569
gggacatggatattcagctctataa

SEQ ID NO: 236348 - DNA, 25 bp, Artificial
  probe
  misc_feature (1)..(25): SEQ ID NO: 2442; WAN024G9E_at; Start 29; Stop 53
ttcgctattcttgtctattgattag

SEQ ID NO: 236349 - DNA, 25 bp, Artificial
  probe
  misc_feature (1)..(25): SEQ ID NO: 2442; WAN024G9E_at; Start 37; Stop 61
tcttgtctattgattagtccgtatt

SEQ ID NO: 236350 - DNA, 25 bp, Artificial
  probe
  misc_feature (1)..(25): SEQ ID NO: 2442; WAN024G9E_at; Start 14; Stop 38
aatcgatttttatgattcgctattc

SEQ ID NO: 236351 - DNA, 25 bp, Artificial
  probe
  misc_feature (1)..(25): SEQ ID NO: 2442; WAN024G9E_at; Start 33; Stop 57
ctattcttgtctattgattagtccg

SEQ ID NO: 236352 - DNA, 25 bp, Artificial
  probe
  misc_feature (1)..(25): SEQ ID NO: 2442; WAN024G9E_at; Start 76; Stop 100
aaaaagcaaatagcagtaacttctg

SEQ ID NO: 236353 - DNA, 25 bp, Artificial
  probe
  misc_feature (1)..(25): SEQ ID NO: 2442; WAN024G9E_at; Start 1; Stop 25
atggcatctagtaaatcgattttta

SEQ ID NO: 236354 - DNA, 25 bp, Artificial
  probe
  misc_feature (1)..(25): SEQ ID NO: 2442; WAN024G9E_at; Start 32; Stop 56
gctattcttgtctattgattagtcc

SEQ ID NO: 236355 - DNA, 25 bp, Artificial
  probe
  misc_feature (1)..(25): SEQ ID NO: 2442; WAN024G9E_at; Start 73; Stop 97
gcaaaaaagcaaatagcagtaactt

SEQ ID NO: 236356 - DNA, 25 bp, Artificial
  probe
  misc_feature (1)..(25): SEQ ID NO: 2442; WAN024G9E_at; Start 3; Stop 27
ggcatctagtaaatcgatttttatg

SEQ ID NO: 236357 - DNA, 25 bp, Artificial
  probe
  misc_feature (1)..(25): SEQ ID NO: 2442; WAN024G9E_at; Start 9; Stop 33
tagtaaatcgatttttatgattcgc

SEQ ID NO: 236358 - DNA, 25 bp, Artificial
  probe
  misc_feature (1)..(25): SEQ ID NO: 2442; WAN024G9E_at; Start 42; Stop 66
tctattgattagtccgtattttaaa

SEQ ID NO: 236359 - DNA, 25 bp, Artificial
  probe
  misc_feature (1)..(25): SEQ ID NO: 2442; WAN024G9E_at; Start 24; Stop 48
tatgattcgctattcttgtctattg

SEQ ID NO: 236360 - DNA, 25 bp, Artificial
  probe
  misc_feature (1)..(25): SEQ ID NO: 2442; WAN024G9E_at; Start 77; Stop 101
aaaagcaaatagcagtaacttctgt

SEQ ID NO: 236361 - DNA, 25 bp, Artificial
  probe
  misc_feature (1)..(25): SEQ ID NO: 2442; WAN024G9E_at; Start 80; Stop 104
agcaaatagcagtaacttctgtcta

SEQ ID NO: 236362 - DNA, 25 bp, Artificial
  probe
  misc_feature (1)..(25): SEQ ID NO: 2442; WAN024G9E_at; Start 27; Stop 51
gattcgctattcttgtctattgatt

SEQ ID NO: 236363 - DNA, 25 bp, Artificial
  probe
  misc_feature (1)..(25): SEQ ID NO: 2442; WAN024G9E_at; Start 68; Stop 92
tattagcaaaaaagcaaatagcagt

SEQ ID NO: 236364 - DNA, 25 bp, Artificial
  probe
  misc_feature (1)..(25): SEQ ID NO: 2442; WAN024G9E_at; Start 26; Stop 50
tgattcgctattcttgtctattgat

SEQ ID NO: 236365 - DNA, 25 bp, Artificial
  probe
  misc_feature (1)..(25): SEQ ID NO: 2442; WAN024G9E_at; Start 88; Stop 112
gcagtaacttctgtctatttgcttt

SEQ ID NO: 236366 - DNA, 25 bp, Artificial
  probe
  misc_feature (1)..(25): SEQ ID NO: 2442; WAN024G9E_at; Start 4; Stop 28
gcatctagtaaatcgatttttatga

SEQ ID NO: 236367 - DNA, 25 bp, Artificial
  probe
  misc_feature (1)..(25): SEQ ID NO: 2442; WAN024G9E_at; Start 11; Stop 35
gtaaatcgatttttatgattcgcta

SEQ ID NO: 236368 - DNA, 25 bp, Artificial
  probe
  misc_feature (1)..(25): SEQ ID NO: 2442; WAN024G9E_at; Start 82; Stop 106
caaatagcagtaacttctgtctatt

SEQ ID NO: 236369 - DNA, 25 bp, Artificial
  probe
  misc_feature (1)..(25): SEQ ID NO: 2442; WAN024G9E_at; Start 90; Stop 114
agtaacttctgtctatttgcttttc

SEQ ID NO: 236370 - DNA, 25 bp, Artificial
  probe
  misc_feature (1)..(25): SEQ ID NO: 2442; WAN024G9E_at; Start 40; Stop 64
tgtctattgattagtccgtatttta

SEQ ID NO: 236371 - DNA, 25 bp, Artificial
  probe
  misc_feature (1)..(25): SEQ ID NO: 2442; WAN024G9E_at; Start 35; Stop 59
attcttgtctattgattagtccgta

SEQ ID NO: 236372 - DNA, 25 bp, Artificial
  probe
  misc_feature (1)..(25): SEQ ID NO: 2442; WAN024G9E_at; Start 86; Stop 110
tagcagtaacttctgtctatttgct

SEQ ID NO: 236373 - DNA, 25 bp, Artificial
  probe
  misc_feature (1)..(25): SEQ ID NO: 2442; WAN024G9E_at; Start 92; Stop 116
taacttctgtctatttgcttttctt

SEQ ID NO: 236374 - DNA, 25 bp, Artificial
  probe
  misc_feature (1)..(25): SEQ ID NO: 2442; WAN024G9E_at; Start 71; Stop 95
tagcaaaaaagcaaatagcagtaac

SEQ ID NO: 236375 - DNA, 25 bp, Artificial
  probe
  misc_feature (1)..(25): SEQ ID NO: 2442; WAN024G9E_at; Start 18; Stop 42
gatttttatgattcgctattcttgt

SEQ ID NO: 236376 - DNA, 25 bp, Artificial
  probe
  misc_feature (1)..(25): SEQ ID NO: 2442; WAN024G9E_at; Start 78; Stop 102
aaagcaaatagcagtaacttctgtc

SEQ ID NO: 236377 - DNA, 25 bp, Artificial
  probe
  misc_feature (1)..(25): SEQ ID NO: 2442; WAN024G9E_at; Start 79; Stop 103
aagcaaatagcagtaacttctgtct

SEQ ID NO: 236378 - DNA, 25 bp, Artificial
  probe
  misc_feature (1)..(25): SEQ ID NO: 2442; WAN024G9E_at; Start 51; Stop 75
tagtccgtattttaaaatattagca

SEQ ID NO: 236379 - DNA, 25 bp, Artificial
  probe
  misc_feature (1)..(25): SEQ ID NO: 2442; WAN024G9E_at; Start 34; Stop 58
tattcttgtctattgattagtccgt

SEQ ID NO: 236380 - DNA, 25 bp, Artificial
  probe
  misc_feature (1)..(25): SEQ ID NO: 2442; WAN024G9E_at; Start 81; Stop 105
gcaaatagcagtaacttctgtctat

SEQ ID NO: 236381 - DNA, 25 bp, Artificial
  probe
  misc_feature (1)..(25): SEQ ID NO: 2442; WAN024G9E_at; Start 74; Stop 98
caaaaaagcaaatagcagtaacttc

SEQ ID NO: 236382 - DNA, 25 bp, Artificial
  probe
  misc_feature (1)..(25): SEQ ID NO: 1777; WAN024G9F_at; Start 277; Stop 301
gaatacctctatgaccttgctgaaa

SEQ ID NO: 236383 - DNA, 25 bp, Artificial
  probe
  misc_feature (1)..(25): SEQ ID NO: 1777; WAN024G9F_at; Start 401; Stop 425
cagacctgactgaaatttctcttga

SEQ ID NO: 236384 - DNA, 25 bp, Artificial
  probe
  misc_feature (1)..(25): SEQ ID NO: 1777; WAN024G9F_at; Start 663; Stop 687
taataacgatatcgaaatgctccag

SEQ ID NO: 236385 - DNA, 25 bp, Artificial
  probe
  misc_feature (1)..(25): SEQ ID NO: 1777; WAN024G9F_at; Start 733; Stop 757
aaatctcttgcggatgccgttacct

SEQ ID NO: 236386 - DNA, 25 bp, Artificial
  probe
  misc_feature (1)..(25): SEQ ID NO: 1777; WAN024G9F_at; Start 41; Stop 65
tcaatgaagccaaggaaatcccaca

SEQ ID NO: 236387 - DNA, 25 bp, Artificial
  probe
  misc_feature (1)..(25): SEQ ID NO: 1777; WAN024G9F_at; Start 311; Stop 335
ttcagttgacactttttgacgagtc

SEQ ID NO: 236388 - DNA, 25 bp, Artificial
  probe
  misc_feature (1)..(25): SEQ ID NO: 1777; WAN024G9F_at; Start 634; Stop 658
tcctcagagattatggccatgggcg

SEQ ID NO: 236389 - DNA, 25 bp, Artificial
  probe
  misc_feature (1)..(25): SEQ ID NO: 1777; WAN024G9F_at; Start 200; Stop 224
ttaacaacggttgttcaactcacca

SEQ ID NO: 236390 - DNA, 25 bp, Artificial
  probe
  misc_feature (1)..(25): SEQ ID NO: 1777; WAN024G9F_at; Start 91; Stop 115
gccattgaaaaaggtgtcaaactgg

SEQ ID NO: 236391 - DNA, 25 bp, Artificial
  probe
  misc_feature (1)..(25): SEQ ID NO: 1777; WAN024G9F_at; Start 298; Stop 322
gaaaagagtgatgttcagttgacac

SEQ ID NO: 236392 - DNA, 25 bp, Artificial
  probe
  misc_feature (1)..(25): SEQ ID NO: 1777; WAN024G9F_at; Start 3; Stop 27
gattaaactactagccttggatatg

SEQ ID NO: 236393 - DNA, 25 bp, Artificial
  probe
  misc_feature (1)..(25): SEQ ID NO: 1777; WAN024G9F_at; Start 263; Stop 287
gtccagctgacatcgaatacctcta

SEQ ID NO: 236394 - DNA, 25 bp, Artificial
  probe
  misc_feature (1)..(25): SEQ ID NO: 1777; WAN024G9F_at; Start 649; Stop 673
gccatgggcgatgctaataacgata

SEQ ID NO: 236395 - DNA, 25 bp, Artificial
  probe
  misc_feature (1)..(25): SEQ ID NO: 1777; WAN024G9F_at; Start 594; Stop 618
tactgctctttcacgactagctgag

SEQ ID NO: 236396 - DNA, 25 bp, Artificial
  probe
  misc_feature (1)..(25): SEQ ID NO: 1777; WAN024G9F_at; Start 605; Stop 629
cacgactagctgagattttgaagat

SEQ ID NO: 236397 - DNA, 25 bp, Artificial
  probe
  misc_feature (1)..(25): SEQ ID NO: 1777; WAN024G9F_at; Start 530; Stop 554
gattcagtggagttcgttcgcagcc

SEQ ID NO: 236398 - DNA, 25 bp, Artificial
  probe
  misc_feature (1)..(25): SEQ ID NO: 1777; WAN024G9F_at; Start 755; Stop 779
cctcaagcaacgaagaagacggcgt

SEQ ID NO: 236399 - DNA, 25 bp, Artificial
  probe
  misc_feature (1)..(25): SEQ ID NO: 1777; WAN024G9F_at; Start 470; Stop 494
taggaacaaaagaacaaacagacga

SEQ ID NO: 236400 - DNA, 25 bp, Artificial
  probe
  misc_feature (1)..(25): SEQ ID NO: 1777; WAN024G9F_at; Start 578; Stop 602
ttggaacgacaaaggctactgctct

SEQ ID NO: 236401 - DNA, 25 bp, Artificial
  probe
  misc_feature (1)..(25): SEQ ID NO: 1777; WAN024G9F_at; Start 514; Stop 538
gaagagctttgccaacgattcagtg

SEQ ID NO: 236402 - DNA, 25 bp, Artificial
  probe
  misc_feature (1)..(25): SEQ ID NO: 1777; WAN024G9F_at; Start 502; Stop 526
cagcgttttgctgaagagctttgcc

SEQ ID NO: 236403 - DNA, 25 bp, Artificial
  probe
  misc_feature (1)..(25): SEQ ID NO: 1777; WAN024G9F_at; Start 108; Stop 132
caaactggttctctgtacgggtcgc

SEQ ID NO: 236404 - DNA, 25 bp, Artificial
  probe
  misc_feature (1)..(25): SEQ ID NO: 1777; WAN024G9F_at; Start 678; Stop 702
aatgctccagtttgcagggcttggg

SEQ ID NO: 236405 - DNA, 25 bp, Artificial
  probe
  misc_feature (1)..(25): SEQ ID NO: 1777; WAN024G9F_at; Start 367; Stop 391
caagttattgaaaatgatgctaaac

SEQ ID NO: 236406 - DNA, 25 bp, Artificial
  probe
  misc_feature (1)..(25): SEQ ID NO: 1777; WAN024G9F_at; Start 817; Stop 841
aaagcaaatagacagaagttactgc

SEQ ID NO: 236407 - DNA, 25 bp, Artificial
  probe
  misc_feature (1)..(25): SEQ ID NO: 1777; WAN024G9F_at; Start 705; Stop 729
tgcaatgggaaatgccagcgattat

SEQ ID NO: 236408 - DNA, 25 bp, Artificial
  probe
  misc_feature (1)..(25): SEQ ID NO: 1777; WAN024G9F_at; Start 696; Stop 720
gcttgggattgcaatgggaaatgcc

SEQ ID NO: 236409 - DNA, 25 bp, Artificial
  probe
  misc_feature (1)..(25): SEQ ID NO: 1777; WAN024G9F_at; Start 386; Stop 410
ctaaactagtattttcagacctgac

SEQ ID NO: 236410 - DNA, 25 bp, Artificial
  probe
  misc_feature (1)..(25): SEQ ID NO: 1777; WAN024G9F_at; Start 289; Stop 313
gaccttgctgaaaagagtgatgttc

SEQ ID NO: 236411 - DNA, 25 bp, Artificial
  probe
  misc_feature (1)..(25): SEQ ID NO: 1777; WAN024G9F_at; Start 484; Stop 508
caaacagacgattttgagcagcgtt

SEQ ID NO: 236412 - DNA, 25 bp, Artificial
  probe
  misc_feature (1)..(25): SEQ ID NO: 1777; WAN024G9F_at; Start 774; Stop 798
cggcgttgcgcgtgctattgagaaa

SEQ ID NO: 236413 - DNA, 25 bp, Artificial
  probe
  misc_feature (1)..(25): SEQ ID NO: 1777; WAN024G9F_at; Start 545; Stop 569
gttcgcagcctgtcatttatgaagc

SEQ ID NO: 236414 - DNA, 25 bp, Artificial
  probe
  misc_feature (1)..(25): SEQ ID NO: 1777; WAN024G9F_at; Start 618; Stop 642
gattttgaagattgattcctcagag

SEQ ID NO: 236415 - DNA, 25 bp, Artificial
  probe
  misc_feature (1)..(25): SEQ ID NO: 1777; WAN024G9F_at; Start 745; Stop 769
gatgccgttacctcaagcaacgaag

SEQ ID NO: 236416 - DNA, 25 bp, Artificial
  probe
  misc_feature (1)..(25): SEQ ID NO: 431; WAN024G9G_at; Start 381; Stop 405
gaaaaattctatttcacgcctggta

SEQ ID NO: 236417 - DNA, 25 bp, Artificial
  probe
  misc_feature (1)..(25): SEQ ID NO: 431; WAN024G9G_at; Start 222; Stop 246
tttaaggtgattgctaaggaactac

SEQ ID NO: 236418 - DNA, 25 bp, Artificial
  probe
  misc_feature (1)..(25): SEQ ID NO: 431; WAN024G9G_at; Start 177; Stop 201
taccagtatgcccaatctgtagcgg

SEQ ID NO: 236419 - DNA, 25 bp, Artificial
  probe
  misc_feature (1)..(25): SEQ ID NO: 431; WAN024G9G_at; Start 395; Stop 419
cacgcctggtaacactggtttcaag

SEQ ID NO: 236420 - DNA, 25 bp, Artificial
  probe
  misc_feature (1)..(25): SEQ ID NO: 431; WAN024G9G_at; Start 661; Stop 685
ctcctagtgaggaaaatggcggaca

SEQ ID NO: 236421 - DNA, 25 bp, Artificial
  probe
  misc_feature (1)..(25): SEQ ID NO: 431; WAN024G9G_at; Start 753; Stop 777
gctgaaagacaagaagaagctgttc

SEQ ID NO: 236422 - DNA, 25 bp, Artificial
  probe
  misc_feature (1)..(25): SEQ ID NO: 431; WAN024G9G_at; Start 192; Stop 216
tctgtagcggaaaatactgccattc

SEQ ID NO: 236423 - DNA, 25 bp, Artificial
  probe
  misc_feature (1)..(25): SEQ ID NO: 431; WAN024G9G_at; Start 89; Stop 113
tcaggctgctgagcaaggagcccaa

SEQ ID NO: 236424 - DNA, 25 bp, Artificial
  probe
  misc_feature (1)..(25): SEQ ID NO: 431; WAN024G9G_at; Start 430; Stop 454
ctcgctatgctaagattggtatcgg

SEQ ID NO: 236425 - DNA, 25 bp, Artificial
  probe
  misc_feature (1)..(25): SEQ ID NO: 431; WAN024G9G_at; Start 302; Stop 326
tattgccgtcattgatgcagatggg

SEQ ID NO: 236426 - DNA, 25 bp, Artificial
  probe
  misc_feature (1)..(25): SEQ ID NO: 431; WAN024G9G_at; Start 73; Stop 97
cagagcgtttagtacgtcaggctgc

SEQ ID NO: 236427 - DNA, 25 bp, Artificial
  probe
  misc_feature (1)..(25): SEQ ID NO: 431; WAN024G9G_at; Start 158; Stop 182
ggaacgtcagtatgactactaccag

SEQ ID NO: 236428 - DNA, 25 bp, Artificial
  probe
  misc_feature (1)..(25): SEQ ID NO: 431; WAN024G9G_at; Start 36; Stop 60
caatgcgctaaggatgtggcaacaa

SEQ ID NO: 236429 - DNA, 25 bp, Artificial
  probe
  misc_feature (1)..(25): SEQ ID NO: 431; WAN024G9G_at; Start 106; Stop 130
gagcccaaattattctcttgcccga

SEQ ID NO: 236430 - DNA, 25 bp, Artificial
  probe
  misc_feature (1)..(25): SEQ ID NO: 431; WAN024G9G_at; Start 206; Stop 230
tactgccattcagcattttaaggtg

SEQ ID NO: 236431 - DNA, 25 bp, Artificial
  probe
  misc_feature (1)..(25): SEQ ID NO: 431; WAN024G9G_at; Start 121; Stop 145
tcttgcccgagttgtttgaacatcc

SEQ ID NO: 236432 - DNA, 25 bp, Artificial
  probe
  misc_feature (1)..(25): SEQ ID NO: 431; WAN024G9G_at; Start 705; Stop 729
tacggttcctcctttatgacggatg

SEQ ID NO: 236433 - DNA, 25 bp, Artificial
  probe
  misc_feature (1)..(25): SEQ ID NO: 431; WAN024G9G_at; Start 137; Stop 161
tgaacatccctatttctgtcaggaa

SEQ ID NO: 236434 - DNA, 25 bp, Artificial
  probe
  misc_feature (1)..(25): SEQ ID NO: 431; WAN024G9G_at; Start 560; Stop 584
tacagatagttgtggtcactggcaa

SEQ ID NO: 236435 - DNA, 25 bp, Artificial
  probe
  misc_feature (1)..(25): SEQ ID NO: 431; WAN024G9G_at; Start 2; Stop 26
gatgagaaatgtaagagttgcaacc

SEQ ID NO: 236436 - DNA, 25 bp, Artificial
  probe
  misc_feature (1)..(25): SEQ ID NO: 431; WAN024G9G_at; Start 449; Stop 473
tatcggtatctgttgggatcaatgg

SEQ ID NO: 236437 - DNA, 25 bp, Artificial
  probe
  misc_feature (1)..(25): SEQ ID NO: 431; WAN024G9G_at; Start 719; Stop 743
tatgacggatgaaacaggagctatt

SEQ ID NO: 236438 - DNA, 25 bp, Artificial
  probe
  misc_feature (1)..(25): SEQ ID NO: 431; WAN024G9G_at; Start 21; Stop 45
gcaaccattcagatgcaatgcgcta

SEQ ID NO: 236439 - DNA, 25 bp, Artificial
  probe
  misc_feature (1)..(25): SEQ ID NO: 431; WAN024G9G_at; Start 690; Stop 714
tccagtcttgacttctacggttcct

SEQ ID NO: 236440 - DNA, 25 bp, Artificial
  probe
  misc_feature (1)..(25): SEQ ID NO: 431; WAN024G9G_at; Start 592; Stop 616
tgcaagggcacgcagcagcgaatat

SEQ ID NO: 236441 - DNA, 25 bp, Artificial
  probe
  misc_feature (1)..(25): SEQ ID NO: 431; WAN024G9G_at; Start 577; Stop 601
actggcaacgtactatgcaagggca

SEQ ID NO: 236442 - DNA, 25 bp, Artificial
  probe
  misc_feature (1)..(25): SEQ ID NO: 431; WAN024G9G_at; Start 793; Stop 817
acctagacaagggagcaagtgaacg

SEQ ID NO: 236443 - DNA, 25 bp, Artificial
  probe
  misc_feature (1)..(25): SEQ ID NO: 431; WAN024G9G_at; Start 285; Stop 309
aatgtcttgtataactctattgccg

SEQ ID NO: 236444 - DNA, 25 bp, Artificial
  probe
  misc_feature (1)..(25): SEQ ID NO: 431; WAN024G9G_at; Start 733; Stop 757
caggagctattctagaacgagctga

SEQ ID NO: 236445 - DNA, 25 bp, Artificial
  probe
  misc_feature (1)..(25): SEQ ID NO: 431; WAN024G9G_at; Start 53; Stop 77
ggcaacaaatatccaaaccgcagag

SEQ ID NO: 236446 - DNA, 25 bp, Artificial
  probe
  misc_feature (1)..(25): SEQ ID NO: 431; WAN024G9G_at; Start 626; Stop 650
catcgcagccaatcgttatggttta

SEQ ID NO: 236447 - DNA, 25 bp, Artificial
  probe
  misc_feature (1)..(25): SEQ ID NO: 431; WAN024G9G_at; Start 415; Stop 439
tcaaggtctggaatactcgctatgc

SEQ ID NO: 236448 - DNA, 25 bp, Artificial
  probe
  misc_feature (1)..(25): SEQ ID NO: 431; WAN024G9G_at; Start 829; Stop 853
gcttgtttcgagatagaagaccaga

SEQ ID NO: 236449 - DNA, 25 bp, Artificial
  probe
  misc_feature (1)..(25): SEQ ID NO: 431; WAN024G9G_at; Start 611; Stop 635
gaatattgttccagtcatcgcagcc

SEQ ID NO: 236450 - DNA, 25 bp, Artificial
  probe
  misc_feature (1)..(25): SEQ ID NO: 2664; WAN024G9H_at; Start 168; Stop 192
taatggtatccgtacgaaggagtcc

SEQ ID NO: 236451 - DNA, 25 bp, Artificial
  probe
  misc_feature (1)..(25): SEQ ID NO: 2664; WAN024G9H_at; Start 180; Stop 204
tacgaaggagtccaacattttcaag

SEQ ID NO: 236452 - DNA, 25 bp, Artificial
  probe
  misc_feature (1)..(25): SEQ ID NO: 2664; WAN024G9H_at; Start 217; Stop 241
cgtcaagtaagattgaccaaaagtc

SEQ ID NO: 236453 - DNA, 25 bp, Artificial
  probe
  misc_feature (1)..(25): SEQ ID NO: 2664; WAN024G9H_at; Start 116; Stop 140
ggaagcaaggctttcaaaaattgaa

SEQ ID NO: 236454 - DNA, 25 bp, Artificial
  probe
  misc_feature (1)..(25): SEQ ID NO: 2664; WAN024G9H_at; Start 249; Stop 273
aacgaatgcgtttgacacctggaat

SEQ ID NO: 236455 - DNA, 25 bp, Artificial
  probe
  misc_feature (1)..(25): SEQ ID NO: 2664; WAN024G9H_at; Start 210; Stop 234
tcatgtgcgtcaagtaagattgacc

SEQ ID NO: 236456 - DNA, 25 bp, Artificial
  probe
  misc_feature (1)..(25): SEQ ID NO: 2664; WAN024G9H_at; Start 200; Stop 224
tcaagacatttcatgtgcgtcaagt

SEQ ID NO: 236457 - DNA, 25 bp, Artificial
  probe
  misc_feature (1)..(25): SEQ ID NO: 2664; WAN024G9H_at; Start 233; Stop 257
ccaaaagtcataaagaaacgaatgc

SEQ ID NO: 236458 - DNA, 25 bp, Artificial
  probe
  misc_feature (1)..(25): SEQ ID NO: 2664; WAN024G9H_at; Start 174; Stop 198
tatccgtacgaaggagtccaacatt

SEQ ID NO: 236459 - DNA, 25 bp, Artificial
  probe
  misc_feature (1)..(25): SEQ ID NO: 2664; WAN024G9H_at; Start 251; Stop 275
cgaatgcgtttgacacctggaatgt

SEQ ID NO: 236460 - DNA, 25 bp, Artificial
  probe
  misc_feature (1)..(25): SEQ ID NO: 2664; WAN024G9H_at; Start 49; Stop 73
gacacctgtaaagatacatccaata

SEQ ID NO: 236461 - DNA, 25 bp, Artificial
  probe
  misc_feature (1)..(25): SEQ ID NO: 2664; WAN024G9H_at; Start 227; Stop 251
gattgaccaaaagtcataaagaaac

SEQ ID NO: 236462 - DNA, 25 bp, Artificial
  probe
  misc_feature (1)..(25): SEQ ID NO: 2664; WAN024G9H_at; Start 54; Stop 78
ctgtaaagatacatccaatattggt

SEQ ID NO: 236463 - DNA, 25 bp, Artificial
  probe
  misc_feature (1)..(25): SEQ ID NO: 2664; WAN024G9H_at; Start 247; Stop 271
gaaacgaatgcgtttgacacctgga

SEQ ID NO: 236464 - DNA, 25 bp, Artificial
  probe
  misc_feature (1)..(25): SEQ ID NO: 2664; WAN024G9H_at; Start 137; Stop 161
tgaattggaacaatttcttggccgt

SEQ ID NO: 236465 - DNA, 25 bp, Artificial
  probe
  misc_feature (1)..(25): SEQ ID NO: 2664; WAN024G9H_at; Start 259; Stop 283
tttgacacctggaatgttcttggcc

SEQ ID NO: 236466 - DNA, 25 bp, Artificial
  probe
  misc_feature (1)..(25): SEQ ID NO: 2664; WAN024G9H_at; Start 183; Stop 207
gaaggagtccaacattttcaagaca

SEQ ID NO: 236467 - DNA, 25 bp, Artificial
  probe
  misc_feature (1)..(25): SEQ ID NO: 2664; WAN024G9H_at; Start 204; Stop 228
gacatttcatgtgcgtcaagtaaga

SEQ ID NO: 236468 - DNA, 25 bp, Artificial
  probe
  misc_feature (1)..(25): SEQ ID NO: 2664; WAN024G9H_at; Start 171; Stop 195
tggtatccgtacgaaggagtccaac

SEQ ID NO: 236469 - DNA, 25 bp, Artificial
  probe
  misc_feature (1)..(25): SEQ ID NO: 2664; WAN024G9H_at; Start 194; Stop 218
acattttcaagacatttcatgtgcg

SEQ ID NO: 236470 - DNA, 25 bp, Artificial
  probe
  misc_feature (1)..(25): SEQ ID NO: 2664; WAN024G9H_at; Start 45; Stop 69
ctttgacacctgtaaagatacatcc

SEQ ID NO: 236471 - DNA, 25 bp, Artificial
  probe
  misc_feature (1)..(25): SEQ ID NO: 2664; WAN024G9H_at; Start 256; Stop 280
gcgtttgacacctggaatgttcttg

SEQ ID NO: 236472 - DNA, 25 bp, Artificial
  probe
  misc_feature (1)..(25): SEQ ID NO: 2664; WAN024G9H_at; Start 264; Stop 288
cacctggaatgttcttggccaatga

SEQ ID NO: 236473 - DNA, 25 bp, Artificial
  probe
  misc_feature (1)..(25): SEQ ID NO: 2664; WAN024G9H_at; Start 124; Stop 148
ggctttcaaaaattgaattggaaca

SEQ ID NO: 236474 - DNA, 25 bp, Artificial
  probe
  misc_feature (1)..(25): SEQ ID NO: 2664; WAN024G9H_at; Start 186; Stop 210
ggagtccaacattttcaagacattt

SEQ ID NO: 236475 - DNA, 25 bp, Artificial
  probe
  misc_feature (1)..(25): SEQ ID NO: 2664; WAN024G9H_at; Start 71; Stop 95
atattggtttttccgactgtacgtg

SEQ ID NO: 236476 - DNA, 25 bp, Artificial
  probe
  misc_feature (1)..(25): SEQ ID NO: 2664; WAN024G9H_at; Start 69; Stop 93
caatattggtttttccgactgtacg

SEQ ID NO: 236477 - DNA, 25 bp, Artificial
  probe
  misc_feature (1)..(25): SEQ ID NO: 2664; WAN024G9H_at; Start 107; Stop 131
gcaggatctggaagcaaggctttca

SEQ ID NO: 236478 - DNA, 25 bp, Artificial
  probe
  misc_feature (1)..(25): SEQ ID NO: 2664; WAN024G9H_at; Start 261; Stop 285
tgacacctggaatgttcttggccaa

SEQ ID NO: 236479 - DNA, 25 bp, Artificial
  probe
  misc_feature (1)..(25): SEQ ID NO: 2664; WAN024G9H_at; Start 110; Stop 134
ggatctggaagcaaggctttcaaaa

SEQ ID NO: 236480 - DNA, 25 bp, Artificial
  probe
  misc_feature (1)..(25): SEQ ID NO: 2664; WAN024G9H_at; Start 253; Stop 277
aatgcgtttgacacctggaatgttc

SEQ ID NO: 236481 - DNA, 25 bp, Artificial
  probe
  misc_feature (1)..(25): SEQ ID NO: 2664; WAN024G9H_at; Start 165; Stop 189
agttaatggtatccgtacgaaggag

SEQ ID NO: 236482 - DNA, 25 bp, Artificial
  probe
  misc_feature (1)..(25): SEQ ID NO: 2664; WAN024G9H_at; Start 220; Stop 244
caagtaagattgaccaaaagtcata

SEQ ID NO: 236483 - DNA, 25 bp, Artificial
  probe
  misc_feature (1)..(25): SEQ ID NO: 2664; WAN024G9H_at; Start 178; Stop 202
cgtacgaaggagtccaacattttca

SEQ ID NO: 236484 - DNA, 25 bp, Artificial
  probe
  misc_feature (1)..(25): SEQ ID NO: 1631; WAN024G9I_at; Start 693; Stop 717
caagcgtgagtatgatttccctcaa

SEQ ID NO: 236485 - DNA, 25 bp, Artificial
  probe
  misc_feature (1)..(25): SEQ ID NO: 1631; WAN024G9I_at; Start 574; Stop 598
ggtgaccacggttatccatttgcaa

SEQ ID NO: 236486 - DNA, 25 bp, Artificial
  probe
  misc_feature (1)..(25): SEQ ID NO: 1631; WAN024G9I_at; Start 669; Stop 693
ggtcgaagtcgaagctatgtctatc

SEQ ID NO: 236487 - DNA, 25 bp, Artificial
  probe
  misc_feature (1)..(25): SEQ ID NO: 1631; WAN024G9I_at; Start 356; Stop 380
ggcgtgctatctacgaaaaacgttg

SEQ ID NO: 236488 - DNA, 25 bp, Artificial
  probe
  misc_feature (1)..(25): SEQ ID NO: 1631; WAN024G9I_at; Start 242; Stop 266
tgaatgtagctctgccttatcaaga

SEQ ID NO: 236489 - DNA, 25 bp, Artificial
  probe
  misc_feature (1)..(25): SEQ ID NO: 1631; WAN024G9I_at; Start 30; Stop 54
gggcgttgcccaagttgctatttca

SEQ ID NO: 236490 - DNA, 25 bp, Artificial
  probe
  misc_feature (1)..(25): SEQ ID NO: 1631; WAN024G9I_at; Start 1130; Stop 1154
tcatgaacggaacttggaaacaagc

SEQ ID NO: 236491 - DNA, 25 bp, Artificial
  probe
  misc_feature (1)..(25): SEQ ID NO: 1631; WAN024G9I_at; Start 1150; Stop 1174
caagctggagtgtataaccttgagg

SEQ ID NO: 236492 - DNA, 25 bp, Artificial
  probe
  misc_feature (1)..(25): SEQ ID NO: 1631; WAN024G9I_at; Start 855; Stop 879
tgttggactccttcgtacggatacc

SEQ ID NO: 236493 - DNA, 25 bp, Artificial
  probe
  misc_feature (1)..(25): SEQ ID NO: 1631; WAN024G9I_at; Start 777; Stop 801
cattccaggtgtcaaacgcattcgt

SEQ ID NO: 236494 - DNA, 25 bp, Artificial
  probe
  misc_feature (1)..(25): SEQ ID NO: 1631; WAN024G9I_at; Start 761; Stop 785
aatcattggccaagaacattccagg

SEQ ID NO: 236495 - DNA, 25 bp, Artificial
  probe
  misc_feature (1)..(25): SEQ ID NO: 1631; WAN024G9I_at; Start 559; Stop 583
ttagactgtaatggcggtgaccacg

SEQ ID NO: 236496 - DNA, 25 bp, Artificial
  probe
  misc_feature (1)..(25): SEQ ID NO: 1631; WAN024G9I_at; Start 618; Stop 642
taatctccgtgaggtttctgcgcca

SEQ ID NO: 236497 - DNA, 25 bp, Artificial
  probe
  misc_feature (1)..(25): SEQ ID NO: 1631; WAN024G9I_at; Start 1167; Stop 1191
ccttgaggagttagatccagatcca

SEQ ID NO: 236498 - DNA, 25 bp, Artificial
  probe
  misc_feature (1)..(25): SEQ ID NO: 1631; WAN024G9I_at; Start 1220; Stop 1244
tgccatgggttgtggttgaaaatcc

SEQ ID NO: 236499 - DNA, 25 bp, Artificial
  probe
  misc_feature (1)..(25): SEQ ID NO: 1631; WAN024G9I_at; Start 480; Stop 504
ttttgacccaggtgtaactagtgtc

SEQ ID NO: 236500 - DNA, 25 bp, Artificial
  probe
  misc_feature (1)..(25): SEQ ID NO: 1631; WAN024G9I_at; Start 83; Stop 107
cagagattatgattgctagccgtac

SEQ ID NO: 236501 - DNA, 25 bp, Artificial
  probe
  misc_feature (1)..(25): SEQ ID NO: 1631; WAN024G9I_at; Start 826; Stop 850
tacttgacgcacatgaaatgtcttg

SEQ ID NO: 236502 - DNA, 25 bp, Artificial
  probe
  misc_feature (1)..(25): SEQ ID NO: 1631; WAN024G9I_at; Start 634; Stop 658
tctgcgccaggttcttactgggaag

SEQ ID NO: 236503 - DNA, 25 bp, Artificial
  probe
  misc_feature (1)..(25): SEQ ID NO: 1631; WAN024G9I_at; Start 63; Stop 87
tcaagatagcgaaacatttacagag

SEQ ID NO: 236504 - DNA, 25 bp, Artificial
  probe
  misc_feature (1)..(25): SEQ ID NO: 1631; WAN024G9I_at; Start 273; Stop 297
cattatggatgcttgtttggcaaca

SEQ ID NO: 236505 - DNA, 25 bp, Artificial
  probe
  misc_feature (1)..(25): SEQ ID NO: 1631; WAN024G9I_at; Start 495; Stop 519
aactagtgtcttttcagcttatgcc

SEQ ID NO: 236506 - DNA, 25 bp, Artificial
  probe
  misc_feature (1)..(25): SEQ ID NO: 1631; WAN024G9I_at; Start 309; Stop 333
tatcgatacagccaactacgaagca

SEQ ID NO: 236507 - DNA, 25 bp, Artificial
  probe
  misc_feature (1)..(25): SEQ ID NO: 1631; WAN024G9I_at; Start 412; Stop 436
tactcatggcagtgggcttatcaag

SEQ ID NO: 236508 - DNA, 25 bp, Artificial
  probe
  misc_feature (1)..(25): SEQ ID NO: 1631; WAN024G9I_at; Start 396; Stop 420
tacagcctactttgactactcatgg

SEQ ID NO: 236509 - DNA, 25 bp, Artificial
  probe
  misc_feature (1)..(25): SEQ ID NO: 1631; WAN024G9I_at; Start 432; Stop 456
tcaagagaaattcaaagaagcaggc

SEQ ID NO: 236510 - DNA, 25 bp, Artificial
  probe
  misc_feature (1)..(25): SEQ ID NO: 1631; WAN024G9I_at; Start 455; Stop 479
gcttgactgctcttcttggttctgg

SEQ ID NO: 236511 - DNA, 25 bp, Artificial
  probe
  misc_feature (1)..(25): SEQ ID NO: 1631; WAN024G9I_at; Start 99; Stop 123
tagccgtaccaagtcaaaatgcgat

SEQ ID NO: 236512 - DNA, 25 bp, Artificial
  probe
  misc_feature (1)..(25): SEQ ID NO: 1631; WAN024G9I_at; Start 711; Stop 735
ccctcaagttggacaaaaagatatg

SEQ ID NO: 236513 - DNA, 25 bp, Artificial
  probe
  misc_feature (1)..(25): SEQ ID NO: 1631; WAN024G9I_at; Start 341; Stop 365
cagaagaccctgagtggcgtgctat

SEQ ID NO: 236514 - DNA, 25 bp, Artificial
  probe
  misc_feature (1)..(25): SEQ ID NO: 1631; WAN024G9I_at; Start 325; Stop 349
tacgaagcagaagacacagaagacc

SEQ ID NO: 236515 - DNA, 25 bp, Artificial
  probe
  misc_feature (1)..(25): SEQ ID NO: 1631; WAN024G9I_at; Start 291; Stop 315
ggcaacaggtgttcactatatcgat

SEQ ID NO: 236516 - DNA, 25 bp, Artificial
  probe
  misc_feature (1)..(25): SEQ ID NO: 1631; WAN024G9I_at; Start 730; Stop 754
gatatgtatctccttcaccatgaag

SEQ ID NO: 236517 - DNA, 25 bp, Artificial
  probe
  misc_feature (1)..(25): SEQ ID NO: 1631; WAN024G9I_at; Start 920; Stop 944
tgaaagccttgcttccagatcctgc

SEQ ID NO: 236518 - DNA, 25 bp, Artificial
  probe
  misc_feature (1)..(25): SEQ ID NO: 2572; WAN024G9J_at; Start 39; Stop 63
tgaccttgcggtgcatgcttcggca

SEQ ID NO: 236519 - DNA, 25 bp, Artificial
  probe
  misc_feature (1)..(25): SEQ ID NO: 2572; WAN024G9J_at; Start 99; Stop 123
gctggtaaatcatgatgccgtcttc

SEQ ID NO: 236520 - DNA, 25 bp, Artificial
  probe
  misc_feature (1)..(25): SEQ ID NO: 2572; WAN024G9J_at; Start 188; Stop 212
ggatctgtcgcatcgttgatgataa

SEQ ID NO: 236521 - DNA, 25 bp, Artificial
  probe
  misc_feature (1)..(25): SEQ ID NO: 2572; WAN024G9J_at; Start 64; Stop 88
ggccgactcatcctcgtcaaagaag

SEQ ID NO: 236522 - DNA, 25 bp, Artificial
  probe
  misc_feature (1)..(25): SEQ ID NO: 2572; WAN024G9J_at; Start 15; Stop 39
cccgactgattggaaaggcttgatt

SEQ ID NO: 236523 - DNA, 25 bp, Artificial
  probe
  misc_feature (1)..(25): SEQ ID NO: 2572; WAN024G9J_at; Start 137; Stop 161
taactattgccgtagaattccttgg

SEQ ID NO: 236524 - DNA, 25 bp, Artificial
  probe
  misc_feature (1)..(25): SEQ ID NO: 2572; WAN024G9J_at; Start 89; Stop 113
ggactcccatgctggtaaatcatga

SEQ ID NO: 236525 - DNA, 25 bp, Artificial
  probe
  misc_feature (1)..(25): SEQ ID NO: 2572; WAN024G9J_at; Start 122; Stop 146
tccttcagagctcgataactattgc

SEQ ID NO: 236526 - DNA, 25 bp, Artificial
  probe
  misc_feature (1)..(25): SEQ ID NO: 2572; WAN024G9J_at; Start 68; Stop 92
gactcatcctcgtcaaagaagggac

SEQ ID NO: 236527 - DNA, 25 bp, Artificial
  probe
  misc_feature (1)..(25): SEQ ID NO: 2572; WAN024G9J_at; Start 109; Stop 133
catgatgccgtcttccttcagagct

SEQ ID NO: 236528 - DNA, 25 bp, Artificial
  probe
  misc_feature (1)..(25): SEQ ID NO: 2572; WAN024G9J_at; Start 156; Stop 180
ccttggtaaagagtccttccgtatg

SEQ ID NO: 236529 - DNA, 25 bp, Artificial
  probe
  misc_feature (1)..(25): SEQ ID NO: 2572; WAN024G9J_at; Start 183; Stop 207
caaatggatctgtcgcatcgttgat

SEQ ID NO: 236530 - DNA, 25 bp, Artificial
  probe
  misc_feature (1)..(25): SEQ ID NO: 2572; WAN024G9J_at; Start 29; Stop 53
aaggcttgattgaccttgcggtgca

SEQ ID NO: 236531 - DNA, 25 bp, Artificial
  probe
  misc_feature (1)..(25): SEQ ID NO: 2572; WAN024G9J_at; Start 85; Stop 109
gaagggactcccatgctggtaaatc

SEQ ID NO: 236532 - DNA, 25 bp, Artificial
  probe
  misc_feature (1)..(25): SEQ ID NO: 2572; WAN024G9J_at; Start 175; Stop 199
cgtatggccaaatggatctgtcgca

SEQ ID NO: 236533 - DNA, 25 bp, Artificial
  probe
  misc_feature (1)..(25): SEQ ID NO: 2572; WAN024G9J_at; Start 43; Stop 67
cttgcggtgcatgcttcggcaggcc

SEQ ID NO: 236534 - DNA, 25 bp, Artificial
  probe
  misc_feature (1)..(25): SEQ ID NO: 2572; WAN024G9J_at; Start 162; Stop 186
taaagagtccttccgtatggccaaa

SEQ ID NO: 236535 - DNA, 25 bp, Artificial
  probe
  misc_feature (1)..(25): SEQ ID NO: 2572; WAN024G9J_at; Start 179; Stop 203
tggccaaatggatctgtcgcatcgt

SEQ ID NO: 236536 - DNA, 25 bp, Artificial
  probe
  misc_feature (1)..(25): SEQ ID NO: 2572; WAN024G9J_at; Start 9; Stop 33
gataaacccgactgattggaaaggc

SEQ ID NO: 236537 - DNA, 25 bp, Artificial
  probe
  misc_feature (1)..(25): SEQ ID NO: 2572; WAN024G9J_at; Start 112; Stop 136
gatgccgtcttccttcagagctcga

SEQ ID NO: 236538 - DNA, 25 bp, Artificial
  probe
  misc_feature (1)..(25): SEQ ID NO: 2572; WAN024G9J_at; Start 166; Stop 190
gagtccttccgtatggccaaatgga

SEQ ID NO: 236539 - DNA, 25 bp, Artificial
  probe
  misc_feature (1)..(25): SEQ ID NO: 2572; WAN024G9J_at; Start 50; Stop 74
tgcatgcttcggcaggccgactcat

SEQ ID NO: 236540 - DNA, 25 bp, Artificial
  probe
  misc_feature (1)..(25): SEQ ID NO: 2572; WAN024G9J_at; Start 216; Stop 240
cgtaatcatcttcgcagtttcgcaa

SEQ ID NO: 236541 - DNA, 25 bp, Artificial
  probe
  misc_feature (1)..(25): SEQ ID NO: 2572; WAN024G9J_at; Start 19; Stop 43
actgattggaaaggcttgattgacc

SEQ ID NO: 236542 - DNA, 25 bp, Artificial
  probe
  misc_feature (1)..(25): SEQ ID NO: 2572; WAN024G9J_at; Start 115; Stop 139
gccgtcttccttcagagctcgataa

SEQ ID NO: 236543 - DNA, 25 bp, Artificial
  probe
  misc_feature (1)..(25): SEQ ID NO: 2572; WAN024G9J_at; Start 2; Stop 26
tgggcctgataaacccgactgattg

SEQ ID NO: 236544 - DNA, 25 bp, Artificial
  probe
  misc_feature (1)..(25): SEQ ID NO: 2572; WAN024G9J_at; Start 208; Stop 232
gataatatcgtaatcatcttcgcag

SEQ ID NO: 236545 - DNA, 25 bp, Artificial
  probe
  misc_feature (1)..(25): SEQ ID NO: 2572; WAN024G9J_at; Start 224; Stop 248
tcttcgcagtttcgcaaaaagcgta

SEQ ID NO: 236546 - DNA, 25 bp, Artificial
  probe
  misc_feature (1)..(25): SEQ ID NO: 2572; WAN024G9J_at; Start 144; Stop 168
tgccgtagaattccttggtaaagag

SEQ ID NO: 236547 - DNA, 25 bp, Artificial
  probe
  misc_feature (1)..(25): SEQ ID NO: 2572; WAN024G9J_at; Start 96; Stop 120
catgctggtaaatcatgatgccgtc

SEQ ID NO: 236548 - DNA, 25 bp, Artificial
  probe
  misc_feature (1)..(25): SEQ ID NO: 2572; WAN024G9J_at; Start 80; Stop 104
tcaaagaagggactcccatgctggt

SEQ ID NO: 236549 - DNA, 25 bp, Artificial
  probe
  misc_feature (1)..(25): SEQ ID NO: 2572; WAN024G9J_at; Start 196; Stop 220
cgcatcgttgatgataatatcgtaa

SEQ ID NO: 236550 - DNA, 25 bp, Artificial
  probe
  misc_feature (1)..(25): SEQ ID NO: 2572; WAN024G9J_at; Start 127; Stop 151
cagagctcgataactattgccgtag

SEQ ID NO: 236551 - DNA, 25 bp, Artificial
  probe
  misc_feature (1)..(25): SEQ ID NO: 2572; WAN024G9J_at; Start 74; Stop 98
tcctcgtcaaagaagggactcccat

SEQ ID NO: 236552 - DNA, 25 bp, Artificial
  probe
  misc_feature (1)..(25): SEQ ID NO: 2365; WAN024G9K_at; Start 700; Stop 724
tttgcatcgaaaaaataccaccctg

SEQ ID NO: 236553 - DNA, 25 bp, Artificial
  probe
  misc_feature (1)..(25): SEQ ID NO: 2365; WAN024G9K_at; Start 111; Stop 135
tacgccagcttttgggaaaatactg

SEQ ID NO: 236554 - DNA, 25 bp, Artificial
  probe
  misc_feature (1)..(25): SEQ ID NO: 2365; WAN024G9K_at; Start 807; Stop 831
tatgttgcccaagtatgttgaggac

SEQ ID NO: 236555 - DNA, 25 bp, Artificial
  probe
  misc_feature (1)..(25): SEQ ID NO: 2365; WAN024G9K_at; Start 762; Stop 786
gcttttcacagaatactacactgca

SEQ ID NO: 236556 - DNA, 25 bp, Artificial
  probe
  misc_feature (1)..(25): SEQ ID NO: 2365; WAN024G9K_at; Start 514; Stop 538
tacggcaatagttatcgagctctga

SEQ ID NO: 236557 - DNA, 25 bp, Artificial
  probe
  misc_feature (1)..(25): SEQ ID NO: 2365; WAN024G9K_at; Start 625; Stop 649
aatcaagcctttccaatcagtcggg

SEQ ID NO: 236558 - DNA, 25 bp, Artificial
  probe
  misc_feature (1)..(25): SEQ ID NO: 2365; WAN024G9K_at; Start 603; Stop 627
ccgaagcatgcaccgcaaggtcaat

SEQ ID NO: 236559 - DNA, 25 bp, Artificial
  probe
  misc_feature (1)..(25): SEQ ID NO: 2365; WAN024G9K_at; Start 675; Stop 699
cccagctggctattggttgtttgga

SEQ ID NO: 236560 - DNA, 25 bp, Artificial
  probe
  misc_feature (1)..(25): SEQ ID NO: 2365; WAN024G9K_at; Start 50; Stop 74
tgagaacagccaagcaactttacgc

SEQ ID NO: 236561 - DNA, 25 bp, Artificial
  probe
  misc_feature (1)..(25): SEQ ID NO: 2365; WAN024G9K_at; Start 484; Stop 508
catacggaaggactctttaccaagg

SEQ ID NO: 236562 - DNA, 25 bp, Artificial
  probe
  misc_feature (1)..(25): SEQ ID NO: 2365; WAN024G9K_at; Start 661; Stop 685
catattccaactagcccagctggct

SEQ ID NO: 236563 - DNA, 25 bp, Artificial
  probe
  misc_feature (1)..(25): SEQ ID NO: 2365; WAN024G9K_at; Start 777; Stop 801
ctacactgcaaacttacacgtggga

SEQ ID NO: 236564 - DNA, 25 bp, Artificial
  probe
  misc_feature (1)..(25): SEQ ID NO: 2365; WAN024G9K_at; Start 34; Stop 58
gatgtcaaattgtctctgagaacag

SEQ ID NO: 236565 - DNA, 25 bp, Artificial
  probe
  misc_feature (1)..(25): SEQ ID NO: 2365; WAN024G9K_at; Start 396; Stop 420
catttactaccaaaatgggctacgc

SEQ ID NO: 236566 - DNA, 25 bp, Artificial
  probe
  misc_feature (1)..(25): SEQ ID NO: 2365; WAN024G9K_at; Start 414; Stop 438
gctacgctttttgcgaaactgcgaa

SEQ ID NO: 236567 - DNA, 25 bp, Artificial
  probe
  misc_feature (1)..(25): SEQ ID NO: 2365; WAN024G9K_at; Start 468; Stop 492
gacagatccatttggccatacggaa

SEQ ID NO: 236568 - DNA, 25 bp, Artificial
  probe
  misc_feature (1)..(25): SEQ ID NO: 2365; WAN024G9K_at; Start 256; Stop 280
gacggcggtgttgcccaagtattaa

SEQ ID NO: 236569 - DNA, 25 bp, Artificial
  probe
  misc_feature (1)..(25): SEQ ID NO: 2365; WAN024G9K_at; Start 81; Stop 105
aagtgaatggcaggatatcgaagtc

SEQ ID NO: 236570 - DNA, 25 bp, Artificial
  probe
  misc_feature (1)..(25): SEQ ID NO: 2365; WAN024G9K_at; Start 349; Stop 373
gagtatttcccagactttgctgcag

SEQ ID NO: 236571 - DNA, 25 bp, Artificial
  probe
  misc_feature (1)..(25): SEQ ID NO: 2365; WAN024G9K_at; Start 146; Stop 170
gccatgtcttgttctcagatgcgga

SEQ ID NO: 236572 - DNA, 25 bp, Artificial
  probe
  misc_feature (1)..(25): SEQ ID NO: 2365; WAN024G9K_at; Start 580; Stop 604
tttgacgaggatgagtcggcctgcc

SEQ ID NO: 236573 - DNA, 25 bp, Artificial
  probe
  misc_feature (1)..(25): SEQ ID NO: 2365; WAN024G9K_at; Start 161; Stop 185
cagatgcggatgatttcgtctacaa

SEQ ID NO: 236574 - DNA, 25 bp, Artificial
  probe
  misc_feature (1)..(25): SEQ ID NO: 2365; WAN024G9K_at; Start 379; Stop 403
gatgatcctcgtgttaccatttact

SEQ ID NO: 236575 - DNA, 25 bp, Artificial
  probe
  misc_feature (1)..(25): SEQ ID NO: 2365; WAN024G9K_at; Start 526; Stop 550
tatcgagctctgaaggaagacggca

SEQ ID NO: 236576 - DNA, 25 bp, Artificial
  probe
  misc_feature (1)..(25): SEQ ID NO: 2365; WAN024G9K_at; Start 448; Stop 472
gatattatcatcaacgatgcgacag

SEQ ID NO: 236577 - DNA, 25 bp, Artificial
  probe
  misc_feature (1)..(25): SEQ ID NO: 2365; WAN024G9K_at; Start 829; Stop 853
gacattttagaagaagaggaaggaa

SEQ ID NO: 236578 - DNA, 25 bp, Artificial
  probe
  misc_feature (1)..(25): SEQ ID NO: 2365; WAN024G9K_at; Start 210; Stop 234
ggctgtccacccaaatccaaagaaa

SEQ ID NO: 236579 - DNA, 25 bp, Artificial
  probe
  misc_feature (1)..(25): SEQ ID NO: 2365; WAN024G9K_at; Start 638; Stop 662
caatcagtcgggtttatcaggccca

SEQ ID NO: 236580 - DNA, 25 bp, Artificial
  probe
  misc_feature (1)..(25): SEQ ID NO: 2365; WAN024G9K_at; Start 551; Stop 575
tcatgatttaccagcatgggagtcc

SEQ ID NO: 236581 - DNA, 25 bp, Artificial
  probe
  misc_feature (1)..(25): SEQ ID NO: 2365; WAN024G9K_at; Start 96; Stop 120
tatcgaagtcttggatacgccagct

SEQ ID NO: 236582 - DNA, 25 bp, Artificial
  probe
  misc_feature (1)..(25): SEQ ID NO: 2365; WAN024G9K_at; Start 713; Stop 737
aataccaccctgtcaaagattttga

SEQ ID NO: 236583 - DNA, 25 bp, Artificial
  probe
  misc_feature (1)..(25): SEQ ID NO: 2365; WAN024G9K_at; Start 749; Stop 773
ggaaaaaacgccagcttttcacaga

SEQ ID NO: 236584 - DNA, 25 bp, Artificial
  probe
  misc_feature (1)..(25): SEQ ID NO: 2365; WAN024G9K_at; Start 541; Stop 565
gaagacggcatcatgatttaccagc

SEQ ID NO: 236585 - DNA, 25 bp, Artificial
  probe
  misc_feature (1)..(25): SEQ ID NO: 2365; WAN024G9K_at; Start 18; Stop 42
tgaagttcatactccagatgtcaaa

SEQ ID NO: 236586 - DNA, 25 bp, Artificial
  probe
  misc_feature (1)..(25): SEQ ID NO: 1716; WAN024G9L_at; Start 200; Stop 224
ctattgggcaaggatggtacaaacc

SEQ ID NO: 236587 - DNA, 25 bp, Artificial
  probe
  misc_feature (1)..(25): SEQ ID NO: 1716; WAN024G9L_at; Start 48; Stop 72
ggctcggctttcatcagtcctcagg

SEQ ID NO: 236588 - DNA, 25 bp, Artificial
  probe
  misc_feature (1)..(25): SEQ ID NO: 1716; WAN024G9L_at; Start 68; Stop 92
tcaggctgatttatcagaagcaatt

SEQ ID NO: 236589 - DNA, 25 bp, Artificial
  probe
  misc_feature (1)..(25): SEQ ID NO: 1716; WAN024G9L_at; Start 198; Stop 222
tactattgggcaaggatggtacaaa

SEQ ID NO: 236590 - DNA, 25 bp, Artificial
  probe
  misc_feature (1)..(25): SEQ ID NO: 1716; WAN024G9L_at; Start 144; Stop 168
gctgatacctttgctggcaggattg

SEQ ID NO: 236591 - DNA, 25 bp, Artificial
  probe
  misc_feature (1)..(25): SEQ ID NO: 1716; WAN024G9L_at; Start 53; Stop 77
ggctttcatcagtcctcaggctgat

SEQ ID NO: 236592 - DNA, 25 bp, Artificial
  probe
  misc_feature (1)..(25): SEQ ID NO: 1716; WAN024G9L_at; Start 46; Stop 70
gaggctcggctttcatcagtcctca

SEQ ID NO: 236593 - DNA, 25 bp, Artificial
  probe
  misc_feature (1)..(25): SEQ ID NO: 1716; WAN024G9L_at; Start 72; Stop 96
gctgatttatcagaagcaatttacc

SEQ ID NO: 236594 - DNA, 25 bp, Artificial
  probe
  misc_feature (1)..(25): SEQ ID NO: 1716; WAN024G9L_at; Start 62; Stop 86
cagtcctcaggctgatttatcagaa

SEQ ID NO: 236595 - DNA, 25 bp, Artificial
  probe
  misc_feature (1)..(25): SEQ ID NO: 1716; WAN024G9L_at; Start 54; Stop 78
gctttcatcagtcctcaggctgatt

SEQ ID NO: 236596 - DNA, 25 bp, Artificial
  probe
  misc_feature (1)..(25): SEQ ID NO: 1716; WAN024G9L_at; Start 143; Stop 167
cgctgatacctttgctggcaggatt

SEQ ID NO: 236597 - DNA, 25 bp, Artificial
  probe
  misc_feature (1)..(25): SEQ ID NO: 1716; WAN024G9L_at; Start 82; Stop 106
cagaagcaatttacctcgacaaagt

SEQ ID NO: 236598 - DNA, 25 bp, Artificial
  probe
  misc_feature (1)..(25): SEQ ID NO: 1716; WAN024G9L_at; Start 77; Stop 101
tttatcagaagcaatttacctcgac

SEQ ID NO: 236599 - DNA, 25 bp, Artificial
  probe
  misc_feature (1)..(25): SEQ ID NO: 1716; WAN024G9L_at; Start 64; Stop 88
gtcctcaggctgatttatcagaagc

SEQ ID NO: 236600 - DNA, 25 bp, Artificial
  probe
  misc_feature (1)..(25): SEQ ID NO: 1716; WAN024G9L_at; Start 51; Stop 75
tcggctttcatcagtcctcaggctg

SEQ ID NO: 236601 - DNA, 25 bp, Artificial
  probe
  misc_feature (1)..(25): SEQ ID NO: 1716; WAN024G9L_at; Start 84; Stop 108
gaagcaatttacctcgacaaagtcc

SEQ ID NO: 236602 - DNA, 25 bp, Artificial
  probe
  misc_feature (1)..(25): SEQ ID NO: 1716; WAN024G9L_at; Start 29; Stop 53
acatagtatatcacggggaggctcg

SEQ ID NO: 236603 - DNA, 25 bp, Artificial
  probe
  misc_feature (1)..(25): SEQ ID NO: 1716; WAN024G9L_at; Start 49; Stop 73
gctcggctttcatcagtcctcaggc

SEQ ID NO: 236604 - DNA, 25 bp, Artificial
  probe
  misc_feature (1)..(25): SEQ ID NO: 1716; WAN024G9L_at; Start 81; Stop 105
tcagaagcaatttacctcgacaaag

SEQ ID NO: 236605 - DNA, 25 bp, Artificial
  probe
  misc_feature (1)..(25): SEQ ID NO: 1716; WAN024G9L_at; Start 98; Stop 122
cgacaaagtccacagcgatagcgtt

SEQ ID NO: 236606 - DNA, 25 bp, Artificial
  probe
  misc_feature (1)..(25): SEQ ID NO: 1716; WAN024G9L_at; Start 79; Stop 103
tatcagaagcaatttacctcgacaa

SEQ ID NO: 236607 - DNA, 25 bp, Artificial
  probe
  misc_feature (1)..(25): SEQ ID NO: 1716; WAN024G9L_at; Start 94; Stop 118
acctcgacaaagtccacagcgatag

SEQ ID NO: 236608 - DNA, 25 bp, Artificial
  probe
  misc_feature (1)..(25): SEQ ID NO: 1716; WAN024G9L_at; Start 87; Stop 111
gcaatttacctcgacaaagtccaca

SEQ ID NO: 236609 - DNA, 25 bp, Artificial
  probe
  misc_feature (1)..(25): SEQ ID NO: 1716; WAN024G9L_at; Start 89; Stop 113
aatttacctcgacaaagtccacagc

SEQ ID NO: 236610 - DNA, 25 bp, Artificial
  probe
  misc_feature (1)..(25): SEQ ID NO: 1716; WAN024G9L_at; Start 75; Stop 99
gatttatcagaagcaatttacctcg

SEQ ID NO: 236611 - DNA, 25 bp, Artificial
  probe
  misc_feature (1)..(25): SEQ ID NO: 1716; WAN024G9L_at; Start 59; Stop 83
catcagtcctcaggctgatttatca

SEQ ID NO: 236612 - DNA, 25 bp, Artificial
  probe
  misc_feature (1)..(25): SEQ ID NO: 1716; WAN024G9L_at; Start 26; Stop 50
tagacatagtatatcacggggaggc

SEQ ID NO: 236613 - DNA, 25 bp, Artificial
  probe
  misc_feature (1)..(25): SEQ ID NO: 1716; WAN024G9L_at; Start 91; Stop 115
tttacctcgacaaagtccacagcga

SEQ ID NO: 236614 - DNA, 25 bp, Artificial
  probe
  misc_feature (1)..(25): SEQ ID NO: 1716; WAN024G9L_at; Start 44; Stop 68
gggaggctcggctttcatcagtcct

SEQ ID NO: 236615 - DNA, 25 bp, Artificial
  probe
  misc_feature (1)..(25): SEQ ID NO: 1716; WAN024G9L_at; Start 85; Stop 109
aagcaatttacctcgacaaagtcca

SEQ ID NO: 236616 - DNA, 25 bp, Artificial
  probe
  misc_feature (1)..(25): SEQ ID NO: 1716; WAN024G9L_at; Start 96; Stop 120
ctcgacaaagtccacagcgatagcg

SEQ ID NO: 236617 - DNA, 25 bp, Artificial
  probe
  misc_feature (1)..(25): SEQ ID NO: 1716; WAN024G9L_at; Start 66; Stop 90
cctcaggctgatttatcagaagcaa

SEQ ID NO: 236618 - DNA, 25 bp, Artificial
  probe
  misc_feature (1)..(25): SEQ ID NO: 1716; WAN024G9L_at; Start 97; Stop 121
tcgacaaagtccacagcgatagcgt

SEQ ID NO: 236619 - DNA, 25 bp, Artificial
  probe
  misc_feature (1)..(25): SEQ ID NO: 1716; WAN024G9L_at; Start 92; Stop 116
ttacctcgacaaagtccacagcgat

SEQ ID NO: 236620 - DNA, 25 bp, Artificial
  probe
  misc_feature (1)..(25): SEQ ID NO: 2908; WAN024G9M_at; Start 177; Stop 201
tatctatatcatcctagcttctatc

SEQ ID NO: 236621 - DNA, 25 bp, Artificial
  probe
  misc_feature (1)..(25): SEQ ID NO: 2908; WAN024G9M_at; Start 174; Stop 198
gattatctatatcatcctagcttct

SEQ ID NO: 236622 - DNA, 25 bp, Artificial
  probe
  misc_feature (1)..(25): SEQ ID NO: 2908; WAN024G9M_at; Start 173; Stop 197
tgattatctatatcatcctagcttc

SEQ ID NO: 236623 - DNA, 25 bp, Artificial
  probe
  misc_feature (1)..(25): SEQ ID NO: 2908; WAN024G9M_at; Start 181; Stop 205
tatatcatcctagcttctatcatgc

SEQ ID NO: 236624 - DNA, 25 bp, Artificial
  probe
  misc_feature (1)..(25): SEQ ID NO: 2908; WAN024G9M_at; Start 224; Stop 248
aagcagaaatgtacggaacaggccc

SEQ ID NO: 236625 - DNA, 25 bp, Artificial
  probe
  misc_feature (1)..(25): SEQ ID NO: 2908; WAN024G9M_at; Start 218; Stop 242
aaatcgaagcagaaatgtacggaac

SEQ ID NO: 236626 - DNA, 25 bp, Artificial
  probe
  misc_feature (1)..(25): SEQ ID NO: 2908; WAN024G9M_at; Start 175; Stop 199
attatctatatcatcctagcttcta

SEQ ID NO: 236627 - DNA, 25 bp, Artificial
  probe
  misc_feature (1)..(25): SEQ ID NO: 2908; WAN024G9M_at; Start 216; Stop 240
agaaatcgaagcagaaatgtacgga

SEQ ID NO: 236628 - DNA, 25 bp, Artificial
  probe
  misc_feature (1)..(25): SEQ ID NO: 2908; WAN024G9M_at; Start 178; Stop 202
atctatatcatcctagcttctatca

SEQ ID NO: 236629 - DNA, 25 bp, Artificial
  probe
  misc_feature (1)..(25): SEQ ID NO: 2908; WAN024G9M_at; Start 214; Stop 238
gaagaaatcgaagcagaaatgtacg

SEQ ID NO: 236630 - DNA, 25 bp, Artificial
  probe
  misc_feature (1)..(25): SEQ ID NO: 2908; WAN024G9M_at; Start 219; Stop 243
aatcgaagcagaaatgtacggaaca

SEQ ID NO: 236631 - DNA, 25 bp, Artificial
  probe
  misc_feature (1)..(25): SEQ ID NO: 2908; WAN024G9M_at; Start 172; Stop 196
gtgattatctatatcatcctagctt

SEQ ID NO: 236632 - DNA, 25 bp, Artificial
  probe
  misc_feature (1)..(25): SEQ ID NO: 2908; WAN024G9M_at; Start 223; Stop 247
gaagcagaaatgtacggaacaggcc

SEQ ID NO: 236633 - DNA, 25 bp, Artificial
  probe
  misc_feature (1)..(25): SEQ ID NO: 2908; WAN024G9M_at; Start 17; Stop 41
aaagaggaaatatcatgaacagtaa

SEQ ID NO: 236634 - DNA, 25 bp, Artificial
  probe
  misc_feature (1)..(25): SEQ ID NO: 2908; WAN024G9M_at; Start 213; Stop 237
ggaagaaatcgaagcagaaatgtac

SEQ ID NO: 236635 - DNA, 25 bp, Artificial
  probe
  misc_feature (1)..(25): SEQ ID NO: 2908; WAN024G9M_at; Start 179; Stop 203
tctatatcatcctagcttctatcat

SEQ ID NO: 236636 - DNA, 25 bp, Artificial
  probe
  misc_feature (1)..(25): SEQ ID NO: 2908; WAN024G9M_at; Start 217; Stop 241
gaaatcgaagcagaaatgtacggaa

SEQ ID NO: 236637 - DNA, 25 bp, Artificial
  probe
  misc_feature (1)..(25): SEQ ID NO: 2908; WAN024G9M_at; Start 176; Stop 200
ttatctatatcatcctagcttctat

SEQ ID NO: 236638 - DNA, 25 bp, Artificial
  probe
  misc_feature (1)..(25): SEQ ID NO: 2908; WAN024G9M_at; Start 226; Stop 250
gcagaaatgtacggaacaggcccac

SEQ ID NO: 236639 - DNA, 25 bp, Artificial
  probe
  misc_feature (1)..(25): SEQ ID NO: 2908; WAN024G9M_at; Start 227; Stop 251
cagaaatgtacggaacaggcccacg

SEQ ID NO: 236640 - DNA, 25 bp, Artificial
  probe
  misc_feature (1)..(25): SEQ ID NO: 2908; WAN024G9M_at; Start 215; Stop 239
aagaaatcgaagcagaaatgtacgg

SEQ ID NO: 236641 - DNA, 25 bp, Artificial
  probe
  misc_feature (1)..(25): SEQ ID NO: 2908; WAN024G9M_at; Start 211; Stop 235
aaggaagaaatcgaagcagaaatgt

SEQ ID NO: 236642 - DNA, 25 bp, Artificial
  probe
  misc_feature (1)..(25): SEQ ID NO: 2908; WAN024G9M_at; Start 16; Stop 40
gaaagaggaaatatcatgaacagta

SEQ ID NO: 236643 - DNA, 25 bp, Artificial
  probe
  misc_feature (1)..(25): SEQ ID NO: 2908; WAN024G9M_at; Start 212; Stop 236
aggaagaaatcgaagcagaaatgta

SEQ ID NO: 236644 - DNA, 25 bp, Artificial
  probe
  misc_feature (1)..(25): SEQ ID NO: 2908; WAN024G9M_at; Start 180; Stop 204
ctatatcatcctagcttctatcatg

SEQ ID NO: 236645 - DNA, 25 bp, Artificial
  probe
  misc_feature (1)..(25): SEQ ID NO: 2908; WAN024G9M_at; Start 222; Stop 246
cgaagcagaaatgtacggaacaggc

SEQ ID NO: 236646 - DNA, 25 bp, Artificial
  probe
  misc_feature (1)..(25): SEQ ID NO: 2908; WAN024G9M_at; Start 221; Stop 245
tcgaagcagaaatgtacggaacagg

SEQ ID NO: 236647 - DNA, 25 bp, Artificial
  probe
  misc_feature (1)..(25): SEQ ID NO: 2908; WAN024G9M_at; Start 220; Stop 244
atcgaagcagaaatgtacggaacag

SEQ ID NO: 236648 - DNA, 25 bp, Artificial
  probe
  misc_feature (1)..(25): SEQ ID NO: 2908; WAN024G9M_at; Start 225; Stop 249
agcagaaatgtacggaacaggccca

SEQ ID NO: 236649 - DNA, 25 bp, Artificial
  probe
  misc_feature (1)..(25): SEQ ID NO: 864; WAN024G9N_at; Start 21; Stop 45
caagcaggtttcactagaagacttc

SEQ ID NO: 236650 - DNA, 25 bp, Artificial
  probe
  misc_feature (1)..(25): SEQ ID NO: 864; WAN024G9N_at; Start 174; Stop 198
taggaaaattgtccgacatgaactc

SEQ ID NO: 236651 - DNA, 25 bp, Artificial
  probe
  misc_feature (1)..(25): SEQ ID NO: 864; WAN024G9N_at; Start 231; Stop 255
ctatcaacacaaggatcgggatttt

SEQ ID NO: 236652 - DNA, 25 bp, Artificial
  probe
  misc_feature (1)..(25): SEQ ID NO: 864; WAN024G9N_at; Start 66; Stop 90
tgtccagtggaataggcgtctacgt

SEQ ID NO: 236653 - DNA, 25 bp, Artificial
  probe
  misc_feature (1)..(25): SEQ ID NO: 864; WAN024G9N_at; Start 240; Stop 264
caaggatcgggattttaaggaactg

SEQ ID NO: 236654 - DNA, 25 bp, Artificial
  probe
  misc_feature (1)..(25): SEQ ID NO: 864; WAN024G9N_at; Start 183; Stop 207
tgtccgacatgaactctgtcattat

SEQ ID NO: 236655 - DNA, 25 bp, Artificial
  probe
  misc_feature (1)..(25): SEQ ID NO: 864; WAN024G9N_at; Start 188; Stop 212
gacatgaactctgtcattatcacct

SEQ ID NO: 236656 - DNA, 25 bp, Artificial
  probe
  misc_feature (1)..(25): SEQ ID NO: 864; WAN024G9N_at; Start 68; Stop 92
tccagtggaataggcgtctacgttc

SEQ ID NO: 236657 - DNA, 25 bp, Artificial
  probe
  misc_feature (1)..(25): SEQ ID NO: 864; WAN024G9N_at; Start 128; Stop 152
tggattttaatcccaaggtttatca

SEQ ID NO: 236658 - DNA, 25 bp, Artificial
  probe
  misc_feature (1)..(25): SEQ ID NO: 864; WAN024G9N_at; Start 73; Stop 97
tggaataggcgtctacgttcgacag

SEQ ID NO: 236659 - DNA, 25 bp, Artificial
  probe
  misc_feature (1)..(25): SEQ ID NO: 864; WAN024G9N_at; Start 57; Stop 81
tatccatcatgtccagtggaatagg

SEQ ID NO: 236660 - DNA, 25 bp, Artificial
  probe
  misc_feature (1)..(25): SEQ ID NO: 864; WAN024G9N_at; Start 244; Stop 268
gatcgggattttaaggaactgttga

SEQ ID NO: 236661 - DNA, 25 bp, Artificial
  probe
  misc_feature (1)..(25): SEQ ID NO: 864; WAN024G9N_at; Start 179; Stop 203
aaattgtccgacatgaactctgtca

SEQ ID NO: 236662 - DNA, 25 bp, Artificial
  probe
  misc_feature (1)..(25): SEQ ID NO: 864; WAN024G9N_at; Start 392; Stop 416
gctatcgctgtggactttgtcgagg

SEQ ID NO: 236663 - DNA, 25 bp, Artificial
  probe
  misc_feature (1)..(25): SEQ ID NO: 864; WAN024G9N_at; Start 229; Stop 253
ggctatcaacacaaggatcgggatt

SEQ ID NO: 236664 - DNA, 25 bp, Artificial
  probe
  misc_feature (1)..(25): SEQ ID NO: 864; WAN024G9N_at; Start 102; Stop 126
gcgatttttccccaaagatgggcat

SEQ ID NO: 236665 - DNA, 25 bp, Artificial
  probe
  misc_feature (1)..(25): SEQ ID NO: 864; WAN024G9N_at; Start 71; Stop 95
agtggaataggcgtctacgttcgac

SEQ ID NO: 236666 - DNA, 25 bp, Artificial
  probe
  misc_feature (1)..(25): SEQ ID NO: 864; WAN024G9N_at; Start 250; Stop 274
gattttaaggaactgttgaaagcag

SEQ ID NO: 236667 - DNA, 25 bp, Artificial
  probe
  misc_feature (1)..(25): SEQ ID NO: 864; WAN024G9N_at; Start 234; Stop 258
tcaacacaaggatcgggattttaag

SEQ ID NO: 236668 - DNA, 25 bp, Artificial
  probe
  misc_feature (1)..(25): SEQ ID NO: 864; WAN024G9N_at; Start 19; Stop 43
gtcaagcaggtttcactagaagact

SEQ ID NO: 236669 - DNA, 25 bp, Artificial
  probe
  misc_feature (1)..(25): SEQ ID NO: 864; WAN024G9N_at; Start 85; Stop 109
ctacgttcgacaggtgggcgatttt

SEQ ID NO: 236670 - DNA, 25 bp, Artificial
  probe
  misc_feature (1)..(25): SEQ ID NO: 864; WAN024G9N_at; Start 61; Stop 85
catcatgtccagtggaataggcgtc

SEQ ID NO: 236671 - DNA, 25 bp, Artificial
  probe
  misc_feature (1)..(25): SEQ ID NO: 864; WAN024G9N_at; Start 255; Stop 279
taaggaactgttgaaagcagtggat

SEQ ID NO: 236672 - DNA, 25 bp, Artificial
  probe
  misc_feature (1)..(25): SEQ ID NO: 864; WAN024G9N_at; Start 77; Stop 101
ataggcgtctacgttcgacaggtgg

SEQ ID NO: 236673 - DNA, 25 bp, Artificial
  probe
  misc_feature (1)..(25): SEQ ID NO: 864; WAN024G9N_at; Start 75; Stop 99
gaataggcgtctacgttcgacaggt

SEQ ID NO: 236674 - DNA, 25 bp, Artificial
  probe
  misc_feature (1)..(25): SEQ ID NO: 864; WAN024G9N_at; Start 389; Stop 413
aacgctatcgctgtggactttgtcg

SEQ ID NO: 236675 - DNA, 25 bp, Artificial
  probe
  misc_feature (1)..(25): SEQ ID NO: 864; WAN024G9N_at; Start 176; Stop 200
ggaaaattgtccgacatgaactctg

SEQ ID NO: 236676 - DNA, 25 bp, Artificial
  probe
  misc_feature (1)..(25): SEQ ID NO: 864; WAN024G9N_at; Start 84; Stop 108
tctacgttcgacaggtgggcgattt

SEQ ID NO: 236677 - DNA, 25 bp, Artificial
  probe
  misc_feature (1)..(25): SEQ ID NO: 864; WAN024G9N_at; Start 53; Stop 77
cttttatccatcatgtccagtggaa

SEQ ID NO: 236678 - DNA, 25 bp, Artificial
  probe
  misc_feature (1)..(25): SEQ ID NO: 864; WAN024G9N_at; Start 261; Stop 285
actgttgaaagcagtggatggatta

SEQ ID NO: 236679 - DNA, 25 bp, Artificial
  probe
  misc_feature (1)..(25): SEQ ID NO: 864; WAN024G9N_at; Start 64; Stop 88
catgtccagtggaataggcgtctac

SEQ ID NO: 236680 - DNA, 25 bp, Artificial
  probe
  misc_feature (1)..(25): SEQ ID NO: 864; WAN024G9N_at; Start 23; Stop 47
agcaggtttcactagaagacttcgg

SEQ ID NO: 236681 - DNA, 25 bp, Artificial
  probe
  misc_feature (1)..(25): SEQ ID NO: 864; WAN024G9N_at; Start 82; Stop 106
cgtctacgttcgacaggtgggcgat

SEQ ID NO: 236682 - DNA, 25 bp, Artificial
  probe
  misc_feature (1)..(25): SEQ ID NO: 864; WAN024G9N_at; Start 170; Stop 194
tttttaggaaaattgtccgacatga

SEQ ID NO: 236683 - DNA, 25 bp, Artificial
  probe
  misc_feature (1)..(25): SEQ ID NO: 2218; WAN024G9O_at; Start 234; Stop 258
tgatataaacttcaatcagccctga

SEQ ID NO: 236684 - DNA, 25 bp, Artificial
  probe
  misc_feature (1)..(25): SEQ ID NO: 2218; WAN024G9O_at; Start 45; Stop 69
tgggattgataacaggtgctgtcac

SEQ ID NO: 236685 - DNA, 25 bp, Artificial
  probe
  misc_feature (1)..(25): SEQ ID NO: 2218; WAN024G9O_at; Start 230; Stop 254
ggtgtgatataaacttcaatcagcc

SEQ ID NO: 236686 - DNA, 25 bp, Artificial
  probe
  misc_feature (1)..(25): SEQ ID NO: 2218; WAN024G9O_at; Start 105; Stop 129
tttccagaaaacgattgatgatggg

SEQ ID NO: 236687 - DNA, 25 bp, Artificial
  probe
  misc_feature (1)..(25): SEQ ID NO: 2218; WAN024G9O_at; Start 207; Stop 231
ggagaaaatgataaaccttgtcagg

SEQ ID NO: 236688 - DNA, 25 bp, Artificial
  probe
  misc_feature (1)..(25): SEQ ID NO: 2218; WAN024G9O_at; Start 4; Stop 28
gaaggagttgccaaaggcagaatag

SEQ ID NO: 236689 - DNA, 25 bp, Artificial
  probe
  misc_feature (1)..(25): SEQ ID NO: 2218; WAN024G9O_at; Start 28; Stop 52
ggtcgcaaaaagaacaatgggattg

SEQ ID NO: 236690 - DNA, 25 bp, Artificial
  probe
  misc_feature (1)..(25): SEQ ID NO: 2218; WAN024G9O_at; Start 212; Stop 236
aaatgataaaccttgtcaggtgtga

SEQ ID NO: 236691 - DNA, 25 bp, Artificial
  probe
  misc_feature (1)..(25): SEQ ID NO: 2218; WAN024G9O_at; Start 26; Stop 50
taggtcgcaaaaagaacaatgggat

SEQ ID NO: 236692 - DNA, 25 bp, Artificial
  probe
  misc_feature (1)..(25): SEQ ID NO: 2218; WAN024G9O_at; Start 114; Stop 138
aacgattgatgatggggacgattcc

SEQ ID NO: 236693 - DNA, 25 bp, Artificial
  probe
  misc_feature (1)..(25): SEQ ID NO: 2218; WAN024G9O_at; Start 222; Stop 246
ccttgtcaggtgtgatataaacttc

SEQ ID NO: 236694 - DNA, 25 bp, Artificial
  probe
  misc_feature (1)..(25): SEQ ID NO: 2218; WAN024G9O_at; Start 140; Stop 164
cattcacaagaagggaaaagtatac

SEQ ID NO: 236695 - DNA, 25 bp, Artificial
  probe
  misc_feature (1)..(25): SEQ ID NO: 2218; WAN024G9O_at; Start 202; Stop 226
tcgagggagaaaatgataaaccttg

SEQ ID NO: 236696 - DNA, 25 bp, Artificial
  probe
  misc_feature (1)..(25): SEQ ID NO: 2218; WAN024G9O_at; Start 15; Stop 39
caaaggcagaataggtcgcaaaaag

SEQ ID NO: 236697 - DNA, 25 bp, Artificial
  probe
  misc_feature (1)..(25): SEQ ID NO: 2218; WAN024G9O_at; Start 19; Stop 43
ggcagaataggtcgcaaaaagaaca

SEQ ID NO: 236698 - DNA, 25 bp, Artificial
  probe
  misc_feature (1)..(25): SEQ ID NO: 2218; WAN024G9O_at; Start 39; Stop 63
gaacaatgggattgataacaggtgc

SEQ ID NO: 236699 - DNA, 25 bp, Artificial
  probe
  misc_feature (1)..(25): SEQ ID NO: 2218; WAN024G9O_at; Start 30; Stop 54
tcgcaaaaagaacaatgggattgat

SEQ ID NO: 236700 - DNA, 25 bp, Artificial
  probe
  misc_feature (1)..(25): SEQ ID NO: 2218; WAN024G9O_at; Start 192; Stop 216
cccaacgatttcgagggagaaaatg

SEQ ID NO: 236701 - DNA, 25 bp, Artificial
  probe
  misc_feature (1)..(25): SEQ ID NO: 2218; WAN024G9O_at; Start 52; Stop 76
gataacaggtgctgtcacaagaaaa

SEQ ID NO: 236702 - DNA, 25 bp, Artificial
  probe
  misc_feature (1)..(25): SEQ ID NO: 2218; WAN024G9O_at; Start 128; Stop 152
gggacgattccacattcacaagaag

SEQ ID NO: 236703 - DNA, 25 bp, Artificial
  probe
  misc_feature (1)..(25): SEQ ID NO: 2218; WAN024G9O_at; Start 143; Stop 167
tcacaagaagggaaaagtataccga

SEQ ID NO: 236704 - DNA, 25 bp, Artificial
  probe
  misc_feature (1)..(25): SEQ ID NO: 2218; WAN024G9O_at; Start 103; Stop 127
tttttccagaaaacgattgatgatg

SEQ ID NO: 236705 - DNA, 25 bp, Artificial
  probe
  misc_feature (1)..(25): SEQ ID NO: 2218; WAN024G9O_at; Start 42; Stop 66
caatgggattgataacaggtgctgt

SEQ ID NO: 236706 - DNA, 25 bp, Artificial
  probe
  misc_feature (1)..(25): SEQ ID NO: 2218; WAN024G9O_at; Start 23; Stop 47
gaataggtcgcaaaaagaacaatgg

SEQ ID NO: 236707 - DNA, 25 bp, Artificial
  probe
  misc_feature (1)..(25): SEQ ID NO: 2218; WAN024G9O_at; Start 1; Stop 25
atggaaggagttgccaaaggcagaa

SEQ ID NO: 236708 - DNA, 25 bp, Artificial
  probe
  misc_feature (1)..(25): SEQ ID NO: 2218; WAN024G9O_at; Start 13; Stop 37
gccaaaggcagaataggtcgcaaaa

SEQ ID NO: 236709 - DNA, 25 bp, Artificial
  probe
  misc_feature (1)..(25): SEQ ID NO: 2218; WAN024G9O_at; Start 219; Stop 243
aaaccttgtcaggtgtgatataaac

SEQ ID NO: 236710 - DNA, 25 bp, Artificial
  probe
  misc_feature (1)..(25): SEQ ID NO: 2218; WAN024G9O_at; Start 226; Stop 250
gtcaggtgtgatataaacttcaatc

SEQ ID NO: 236711 - DNA, 25 bp, Artificial
  probe
  misc_feature (1)..(25): SEQ ID NO: 2218; WAN024G9O_at; Start 63; Stop 87
ctgtcacaagaaaaggaacggccgt

SEQ ID NO: 236712 - DNA, 25 bp, Artificial
  probe
  misc_feature (1)..(25): SEQ ID NO: 2218; WAN024G9O_at; Start 48; Stop 72
gattgataacaggtgctgtcacaag

SEQ ID NO: 236713 - DNA, 25 bp, Artificial
  probe
  misc_feature (1)..(25): SEQ ID NO: 2218; WAN024G9O_at; Start 194; Stop 218
caacgatttcgagggagaaaatgat

SEQ ID NO: 236714 - DNA, 25 bp, Artificial
  probe
  misc_feature (1)..(25): SEQ ID NO: 2218; WAN024G9O_at; Start 182; Stop 206
aagattctcccccaacgatttcgag

SEQ ID NO: 236715 - DNA, 25 bp, Artificial
  probe
  misc_feature (1)..(25): SEQ ID NO: 2218; WAN024G9O_at; Start 66; Stop 90
tcacaagaaaaggaacggccgtgta

SEQ ID NO: 236716 - DNA, 25 bp, Artificial
  probe
  misc_feature (1)..(25): SEQ ID NO: 2218; WAN024G9O_at; Start 10; Stop 34
gttgccaaaggcagaataggtcgca

SEQ ID NO: 236717 - DNA, 25 bp, Artificial
  probe
  misc_feature (1)..(25): SEQ ID NO: 1469; WAN024G9P_at; Start 607; Stop 631
gttccgactcggattctgacctcta

SEQ ID NO: 236718 - DNA, 25 bp, Artificial
  probe
  misc_feature (1)..(25): SEQ ID NO: 1469; WAN024G9P_at; Start 133; Stop 157
cctgacaaggtttatcattttctcc

SEQ ID NO: 236719 - DNA, 25 bp, Artificial
  probe
  misc_feature (1)..(25): SEQ ID NO: 1469; WAN024G9P_at; Start 343; Stop 367
gcctttggcaactccttccatgtcg

SEQ ID NO: 236720 - DNA, 25 bp, Artificial
  probe
  misc_feature (1)..(25): SEQ ID NO: 1469; WAN024G9P_at; Start 413; Stop 437
gaatttttctaggatttttctggca

SEQ ID NO: 236721 - DNA, 25 bp, Artificial
  probe
  misc_feature (1)..(25): SEQ ID NO: 1469; WAN024G9P_at; Start 676; Stop 700
gcctttcttctttcgctctgtagtg

SEQ ID NO: 236722 - DNA, 25 bp, Artificial
  probe
  misc_feature (1)..(25): SEQ ID NO: 1469; WAN024G9P_at; Start 56; Stop 80
tctccattatcattgaagcccttcc

SEQ ID NO: 236723 - DNA, 25 bp, Artificial
  probe
  misc_feature (1)..(25): SEQ ID NO: 1469; WAN024G9P_at; Start 7; Stop 31
gcttttcaacaactcccatctagtg

SEQ ID NO: 236724 - DNA, 25 bp, Artificial
  probe
  misc_feature (1)..(25): SEQ ID NO: 1469; WAN024G9P_at; Start 330; Stop 354
tgcgacctattctgcctttggcaac

SEQ ID NO: 236725 - DNA, 25 bp, Artificial
  probe
  misc_feature (1)..(25): SEQ ID NO: 1469; WAN024G9P_at; Start 43; Stop 67
ggagccatttttctctccattatca

SEQ ID NO: 236726 - DNA, 25 bp, Artificial
  probe
  misc_feature (1)..(25): SEQ ID NO: 1469; WAN024G9P_at; Start 217; Stop 241
tgtgaatgtggaatcgtccccatca

SEQ ID NO: 236727 - DNA, 25 bp, Artificial
  probe
  misc_feature (1)..(25): SEQ ID NO: 1469; WAN024G9P_at; Start 806; Stop 830
tgatgaaaaattacttgaaagcacg

SEQ ID NO: 236728 - DNA, 25 bp, Artificial
  probe
  misc_feature (1)..(25): SEQ ID NO: 1469; WAN024G9P_at; Start 237; Stop 261
catcatcaatcgttttctggaaaaa

SEQ ID NO: 236729 - DNA, 25 bp, Artificial
  probe
  misc_feature (1)..(25): SEQ ID NO: 1469; WAN024G9P_at; Start 297; Stop 321
gacagcacctgttatcaatcccatt

SEQ ID NO: 236730 - DNA, 25 bp, Artificial
  probe
  misc_feature (1)..(25): SEQ ID NO: 1469; WAN024G9P_at; Start 225; Stop 249
tggaatcgtccccatcatcaatcgt

SEQ ID NO: 236731 - DNA, 25 bp, Artificial
  probe
  misc_feature (1)..(25): SEQ ID NO: 1469; WAN024G9P_at; Start 118; Stop 142
gaagtttatatcacacctgacaagg

SEQ ID NO: 236732 - DNA, 25 bp, Artificial
  probe
  misc_feature (1)..(25): SEQ ID NO: 1469; WAN024G9P_at; Start 37; Stop 61
caaactggagccatttttctctcca

SEQ ID NO: 236733 - DNA, 25 bp, Artificial
  probe
  misc_feature (1)..(25): SEQ ID NO: 1469; WAN024G9P_at; Start 22; Stop 46
ccatctagtgtacttcaaactggag

SEQ ID NO: 236734 - DNA, 25 bp, Artificial
  probe
  misc_feature (1)..(25): SEQ ID NO: 1469; WAN024G9P_at; Start 361; Stop 385
catgtcgccctattacgagctctgg

SEQ ID NO: 236735 - DNA, 25 bp, Artificial
  probe
  misc_feature (1)..(25): SEQ ID NO: 1469; WAN024G9P_at; Start 27; Stop 51
tagtgtacttcaaactggagccatt

SEQ ID NO: 236736 - DNA, 25 bp, Artificial
  probe
  misc_feature (1)..(25): SEQ ID NO: 1469; WAN024G9P_at; Start 398; Stop 422
tggctgtaatactaggaatttttct

SEQ ID NO: 236737 - DNA, 25 bp, Artificial
  probe
  misc_feature (1)..(25): SEQ ID NO: 1469; WAN024G9P_at; Start 70; Stop 94
gaagcccttcccttcgttctgatag

SEQ ID NO: 236738 - DNA, 25 bp, Artificial
  probe
  misc_feature (1)..(25): SEQ ID NO: 1469; WAN024G9P_at; Start 283; Stop 307
gttccttttcttgtgacagcacctg

SEQ ID NO: 236739 - DNA, 25 bp, Artificial
  probe
  misc_feature (1)..(25): SEQ ID NO: 1469; WAN024G9P_at; Start 617; Stop 641
ggattctgacctctatcagtgcgac

SEQ ID NO: 236740 - DNA, 25 bp, Artificial
  probe
  misc_feature (1)..(25): SEQ ID NO: 1469; WAN024G9P_at; Start 368; Stop 392
ccctattacgagctctgggttccat

SEQ ID NO: 236741 - DNA, 25 bp, Artificial
  probe
  misc_feature (1)..(25): SEQ ID NO: 1469; WAN024G9P_at; Start 312; Stop 336
caatcccattgttctttttgcgacc

SEQ ID NO: 236742 - DNA, 25 bp, Artificial
  probe
  misc_feature (1)..(25): SEQ ID NO: 1469; WAN024G9P_at; Start 778; Stop 802
ccaatgctggatatcaaaaatattc

SEQ ID NO: 236743 - DNA, 25 bp, Artificial
  probe
  misc_feature (1)..(25): SEQ ID NO: 1469; WAN024G9P_at; Start 420; Stop 444
tctaggatttttctggcaagaaccg

SEQ ID NO: 236744 - DNA, 25 bp, Artificial
  probe
  misc_feature (1)..(25): SEQ ID NO: 1469; WAN024G9P_at; Start 103; Stop 127
gtctcagggctgattgaagtttata

SEQ ID NO: 236745 - DNA, 25 bp, Artificial
  probe
  misc_feature (1)..(25): SEQ ID NO: 1469; WAN024G9P_at; Start 690; Stop 714
gctctgtagtgaggcggatgccttt

SEQ ID NO: 236746 - DNA, 25 bp, Artificial
  probe
  misc_feature (1)..(25): SEQ ID NO: 1469; WAN024G9P_at; Start 73; Stop 97
gcccttcccttcgttctgataggaa

SEQ ID NO: 236747 - DNA, 25 bp, Artificial
  probe
  misc_feature (1)..(25): SEQ ID NO: 1469; WAN024G9P_at; Start 425; Stop 449
gatttttctggcaagaaccgattca

SEQ ID NO: 236748 - DNA, 25 bp, Artificial
  probe
  misc_feature (1)..(25): SEQ ID NO: 1469; WAN024G9P_at; Start 148; Stop 172
cattttctccctcgaaatcgttggg

SEQ ID NO: 236749 - DNA, 25 bp, Artificial
  probe
  misc_feature (1)..(25): SEQ ID NO: 1469; WAN024G9P_at; Start 687; Stop 711
ttcgctctgtagtgaggcggatgcc

SEQ ID NO: 236750 - DNA, 25 bp, Artificial
  probe
  misc_feature (1)..(25): SEQ ID NO: 1469; WAN024G9P_at; Start 321; Stop 345
tgttctttttgcgacctattctgcc

SEQ ID NO: 236751 - DNA, 25 bp, Artificial
  probe
  misc_feature (1)..(25): SEQ ID NO: 5816; WAN024G9Q_at; Start 222; Stop 246
tacagtggataatgccgaatcggaa

SEQ ID NO: 236752 - DNA, 25 bp, Artificial
  probe
  misc_feature (1)..(25): SEQ ID NO: 5816; WAN024G9Q_at; Start 326; Stop 350
ggatagtcgtagatagcctccatga

SEQ ID NO: 236753 - DNA, 25 bp, Artificial
  probe
  misc_feature (1)..(25): SEQ ID NO: 5816; WAN024G9Q_at; Start 23; Stop 47
tcttaaaaagctctatatacatagg

SEQ ID NO: 236754 - DNA, 25 bp, Artificial
  probe
  misc_feature (1)..(25): SEQ ID NO: 5816; WAN024G9Q_at; Start 190; Stop 214
ggtcagcaatccatagacaccagaa

SEQ ID NO: 236755 - DNA, 25 bp, Artificial
  probe
  misc_feature (1)..(25): SEQ ID NO: 5816; WAN024G9Q_at; Start 354; Stop 378
ccatatagttttcattagtgatctg

SEQ ID NO: 236756 - DNA, 25 bp, Artificial
  probe
  misc_feature (1)..(25): SEQ ID NO: 5816; WAN024G9Q_at; Start 206; Stop 230
acaccagaatctgcgatacagtgga

SEQ ID NO: 236757 - DNA, 25 bp, Artificial
  probe
  misc_feature (1)..(25): SEQ ID NO: 5816; WAN024G9Q_at; Start 183; Stop 207
tgcccttggtcagcaatccatagac

SEQ ID NO: 236758 - DNA, 25 bp, Artificial
  probe
  misc_feature (1)..(25): SEQ ID NO: 5816; WAN024G9Q_at; Start 117; Stop 141
tatggtagtgattgaccagttttcc

SEQ ID NO: 236759 - DNA, 25 bp, Artificial
  probe
  misc_feature (1)..(25): SEQ ID NO: 5816; WAN024G9Q_at; Start 170; Stop 194
tactgccgggtattgcccttggtca

SEQ ID NO: 236760 - DNA, 25 bp, Artificial
  probe
  misc_feature (1)..(25): SEQ ID NO: 5816; WAN024G9Q_at; Start 337; Stop 361
gatagcctccatgacttccatatag

SEQ ID NO: 236761 - DNA, 25 bp, Artificial
  probe
  misc_feature (1)..(25): SEQ ID NO: 5816; WAN024G9Q_at; Start 241; Stop 265
tcggaacagaaattgactattggca

SEQ ID NO: 236762 - DNA, 25 bp, Artificial
  probe
  misc_feature (1)..(25): SEQ ID NO: 5816; WAN024G9Q_at; Start 289; Stop 313
gcctgtaaactggattgtcttgccc

SEQ ID NO: 236763 - DNA, 25 bp, Artificial
  probe
  misc_feature (1)..(25): SEQ ID NO: 5816; WAN024G9Q_at; Start 64; Stop 88
gactttggtaaagctgtcgatttcc

SEQ ID NO: 236764 - DNA, 25 bp, Artificial
  probe
  misc_feature (1)..(25): SEQ ID NO: 5816; WAN024G9Q_at; Start 42; Stop 66
catagggattttctggtttatcgac

SEQ ID NO: 236765 - DNA, 25 bp, Artificial
  probe
  misc_feature (1)..(25): SEQ ID NO: 5816; WAN024G9Q_at; Start 158; Stop 182
gtgttgttttcatactgccgggtat

SEQ ID NO: 236766 - DNA, 25 bp, Artificial
  probe
  misc_feature (1)..(25): SEQ ID NO: 5816; WAN024G9Q_at; Start 72; Stop 96
taaagctgtcgatttccaaggttgg

SEQ ID NO: 236767 - DNA, 25 bp, Artificial
  probe
  misc_feature (1)..(25): SEQ ID NO: 5816; WAN024G9Q_at; Start 53; Stop 77
tctggtttatcgactttggtaaagc

SEQ ID NO: 236768 - DNA, 25 bp, Artificial
  probe
  misc_feature (1)..(25): SEQ ID NO: 5816; WAN024G9Q_at; Start 272; Stop 296
gggtcgttatagacaaagcctgtaa

SEQ ID NO: 236769 - DNA, 25 bp, Artificial
  probe
  misc_feature (1)..(25): SEQ ID NO: 5816; WAN024G9Q_at; Start 332; Stop 356
tcgtagatagcctccatgacttcca

SEQ ID NO: 236770 - DNA, 25 bp, Artificial
  probe
  misc_feature (1)..(25): SEQ ID NO: 5816; WAN024G9Q_at; Start 215; Stop 239
tctgcgatacagtggataatgccga

SEQ ID NO: 236771 - DNA, 25 bp, Artificial
  probe
  misc_feature (1)..(25): SEQ ID NO: 5816; WAN024G9Q_at; Start 32; Stop 56
gctctatatacatagggattttctg

SEQ ID NO: 236772 - DNA, 25 bp, Artificial
  probe
  misc_feature (1)..(25): SEQ ID NO: 5816; WAN024G9Q_at; Start 108; Stop 132
tgagttctttatggtagtgattgac

SEQ ID NO: 236773 - DNA, 25 bp, Artificial
  probe
  misc_feature (1)..(25): SEQ ID NO: 5816; WAN024G9Q_at; Start 77; Stop 101
ctgtcgatttccaaggttggaaggt

SEQ ID NO: 236774 - DNA, 25 bp, Artificial
  probe
  misc_feature (1)..(25): SEQ ID NO: 5816; WAN024G9Q_at; Start 369; Stop 393
tagtgatctgaatactatcttggga

SEQ ID NO: 236775 - DNA, 25 bp, Artificial
  probe
  misc_feature (1)..(25): SEQ ID NO: 5816; WAN024G9Q_at; Start 234; Stop 258
tgccgaatcggaacagaaattgact

SEQ ID NO: 236776 - DNA, 25 bp, Artificial
  probe
  misc_feature (1)..(25): SEQ ID NO: 5816; WAN024G9Q_at; Start 196; Stop 220
caatccatagacaccagaatctgcg

SEQ ID NO: 236777 - DNA, 25 bp, Artificial
  probe
  misc_feature (1)..(25): SEQ ID NO: 5816; WAN024G9Q_at; Start 320; Stop 344
tcatctggatagtcgtagatagcct

SEQ ID NO: 236778 - DNA, 25 bp, Artificial
  probe
  misc_feature (1)..(25): SEQ ID NO: 5816; WAN024G9Q_at; Start 175; Stop 199
ccgggtattgcccttggtcagcaat

SEQ ID NO: 236779 - DNA, 25 bp, Artificial
  probe
  misc_feature (1)..(25): SEQ ID NO: 5816; WAN024G9Q_at; Start 341; Stop 365
gcctccatgacttccatatagtttt

SEQ ID NO: 236780 - DNA, 25 bp, Artificial
  probe
  misc_feature (1)..(25): SEQ ID NO: 5816; WAN024G9Q_at; Start 281; Stop 305
tagacaaagcctgtaaactggattg

SEQ ID NO: 236781 - DNA, 25 bp, Artificial
  probe
  misc_feature (1)..(25): SEQ ID NO: 5816; WAN024G9Q_at; Start 167; Stop 191
tcatactgccgggtattgcccttgg

SEQ ID NO: 236782 - DNA, 25 bp, Artificial
  probe
  misc_feature (1)..(25): SEQ ID NO: 5816; WAN024G9Q_at; Start 249; Stop 273
gaaattgactattggcatgactggg

SEQ ID NO: 236783 - DNA, 25 bp, Artificial
  probe
  misc_feature (1)..(25): SEQ ID NO: 5816; WAN024G9Q_at; Start 294; Stop 318
taaactggattgtcttgccctcaaa

SEQ ID NO: 236784 - DNA, 25 bp, Artificial
  probe
  misc_feature (1)..(25): SEQ ID NO: 5816; WAN024G9Q_at; Start 126; Stop 150
gattgaccagttttcctttggctgt

SEQ ID NO: 236785 - DNA, 25 bp, Artificial
  probe
  misc_feature (1)..(25): SEQ ID NO: 1825; WAN024G9R_at; Start 149; Stop 173
tgtatatctggatgaagcaagtcaa

SEQ ID NO: 236786 - DNA, 25 bp, Artificial
  probe
  misc_feature (1)..(25): SEQ ID NO: 1825; WAN024G9R_at; Start 3; Stop 27
gattcgatttttagttttagctggc

SEQ ID NO: 236787 - DNA, 25 bp, Artificial
  probe
  misc_feature (1)..(25): SEQ ID NO: 1825; WAN024G9R_at; Start 760; Stop 784
gacagctttaccaaagtcgataaac

SEQ ID NO: 236788 - DNA, 25 bp, Artificial
  probe
  misc_feature (1)..(25): SEQ ID NO: 1825; WAN024G9R_at; Start 96; Stop 120
ctatctggcctatatctccatggtg

SEQ ID NO: 236789 - DNA, 25 bp, Artificial
  probe
  misc_feature (1)..(25): SEQ ID NO: 1825; WAN024G9R_at; Start 68; Stop 92
taaaccagtacatcaacatgcacta

SEQ ID NO: 236790 - DNA, 25 bp, Artificial
  probe
  misc_feature (1)..(25): SEQ ID NO: 1825; WAN024G9R_at; Start 658; Stop 682
aatacccggcagtatgaaaacaaca

SEQ ID NO: 236791 - DNA, 25 bp, Artificial
  probe
  misc_feature (1)..(25): SEQ ID NO: 1825; WAN024G9R_at; Start 409; Stop 433
tatgaaaaggaaatgcgaacggcgg

SEQ ID NO: 236792 - DNA, 25 bp, Artificial
  probe
  misc_feature (1)..(25): SEQ ID NO: 1825; WAN024G9R_at; Start 526; Stop 550
gagggcaagacaatccagtttacag

SEQ ID NO: 236793 - DNA, 25 bp, Artificial
  probe
  misc_feature (1)..(25): SEQ ID NO: 1825; WAN024G9R_at; Start 81; Stop 105
caacatgcactattcctatctggcc

SEQ ID NO: 236794 - DNA, 25 bp, Artificial
  probe
  misc_feature (1)..(25): SEQ ID NO: 1825; WAN024G9R_at; Start 39; Stop 63
gactatttacctccatctgtcgggc

SEQ ID NO: 236795 - DNA, 25 bp, Artificial
  probe
  misc_feature (1)..(25): SEQ ID NO: 1825; WAN024G9R_at; Start 709; Stop 733
gtcaatcactaccataaagaactca

SEQ ID NO: 236796 - DNA, 25 bp, Artificial
  probe
  misc_feature (1)..(25): SEQ ID NO: 1825; WAN024G9R_at; Start 424; Stop 448
cgaacggcggcggataaatacttat

SEQ ID NO: 236797 - DNA, 25 bp, Artificial
  probe
  misc_feature (1)..(25): SEQ ID NO: 1825; WAN024G9R_at; Start 225; Stop 249
tctggctattccacttgtcatcggc

SEQ ID NO: 236798 - DNA, 25 bp, Artificial
  probe
  misc_feature (1)..(25): SEQ ID NO: 1825; WAN024G9R_at; Start 744; Stop 768
tccaaccttggaaatcgacagcttt

SEQ ID NO: 236799 - DNA, 25 bp, Artificial
  probe
  misc_feature (1)..(25): SEQ ID NO: 1825; WAN024G9R_at; Start 633; Stop 657
tgtctatggattgctgaccaagggc

SEQ ID NO: 236800 - DNA, 25 bp, Artificial
  probe
  misc_feature (1)..(25): SEQ ID NO: 1825; WAN024G9R_at; Start 54; Stop 78
tctgtcgggcaaactaaaccagtac

SEQ ID NO: 236801 - DNA, 25 bp, Artificial
  probe
  misc_feature (1)..(25): SEQ ID NO: 1825; WAN024G9R_at; Start 176; Stop 200
cccacagtcatctgaacagccgatt

SEQ ID NO: 236802 - DNA, 25 bp, Artificial
  probe
  misc_feature (1)..(25): SEQ ID NO: 1825; WAN024G9R_at; Start 546; Stop 570
tacaggctttgtctataacgacccc

SEQ ID NO: 236803 - DNA, 25 bp, Artificial
  probe
  misc_feature (1)..(25): SEQ ID NO: 1825; WAN024G9R_at; Start 213; Stop 237
gagtatttctcttctggctattcca

SEQ ID NO: 236804 - DNA, 25 bp, Artificial
  probe
  misc_feature (1)..(25): SEQ ID NO: 1825; WAN024G9R_at; Start 18; Stop 42
tttagctggctattttgaactgact

SEQ ID NO: 236805 - DNA, 25 bp, Artificial
  probe
  misc_feature (1)..(25): SEQ ID NO: 1825; WAN024G9R_at; Start 491; Stop 515
tcatggaggctatctacgactatcc

SEQ ID NO: 236806 - DNA, 25 bp, Artificial
  probe
  misc_feature (1)..(25): SEQ ID NO: 1825; WAN024G9R_at; Start 476; Stop 500
aaaactatatggaagtcatggaggc

SEQ ID NO: 236807 - DNA, 25 bp, Artificial
  probe
  misc_feature (1)..(25): SEQ ID NO: 1825; WAN024G9R_at; Start 618; Stop 642
tatcgcagattctggtgtctatgga

SEQ ID NO: 236808 - DNA, 25 bp, Artificial
  probe
  misc_feature (1)..(25): SEQ ID NO: 1825; WAN024G9R_at; Start 561; Stop 585
taacgaccccagtcatgccaatagt

SEQ ID NO: 236809 - DNA, 25 bp, Artificial
  probe
  misc_feature (1)..(25): SEQ ID NO: 1825; WAN024G9R_at; Start 648; Stop 672
gaccaagggcaatacccggcagtat

SEQ ID NO: 236810 - DNA, 25 bp, Artificial
  probe
  misc_feature (1)..(25): SEQ ID NO: 1825; WAN024G9R_at; Start 785; Stop 809
cagaaaatccctatgtatatagagc

SEQ ID NO: 236811 - DNA, 25 bp, Artificial
  probe
  misc_feature (1)..(25): SEQ ID NO: 1825; WAN024G9R_at; Start 775; Stop 799
gtcgataaaccagaaaatccctatg

SEQ ID NO: 236812 - DNA, 25 bp, Artificial
  probe
  misc_feature (1)..(25): SEQ ID NO: 1825; WAN024G9R_at; Start 694; Stop 718
gccaaaggaaaactggtcaatcact

SEQ ID NO: 236813 - DNA, 25 bp, Artificial
  probe
  misc_feature (1)..(25): SEQ ID NO: 1825; WAN024G9R_at; Start 237; Stop 261
acttgtcatcggcttaactttccca

SEQ ID NO: 236814 - DNA, 25 bp, Artificial
  probe
  misc_feature (1)..(25): SEQ ID NO: 1825; WAN024G9R_at; Start 582; Stop 606
tagtcaatttctgttccgattcggc

SEQ ID NO: 236815 - DNA, 25 bp, Artificial
  probe
  misc_feature (1)..(25): SEQ ID NO: 1825; WAN024G9R_at; Start 162; Stop 186
gaagcaagtcaaaacccacagtcat

SEQ ID NO: 236816 - DNA, 25 bp, Artificial
  probe
  misc_feature (1)..(25): SEQ ID NO: 1825; WAN024G9R_at; Start 359; Stop 383
caagccaatatttgaaaccagatac

SEQ ID NO: 236817 - DNA, 25 bp, Artificial
  probe
  misc_feature (1)..(25): SEQ ID NO: 1825; WAN024G9R_at; Start 251; Stop 275
taactttcccaactgttagcttgga

SEQ ID NO: 236818 - DNA, 25 bp, Artificial
  probe
  misc_feature (1)..(25): SEQ ID NO: 1825; WAN024G9R_at; Start 602; Stop 626
tcggcattatccactgtatcgcaga

SEQ ID NO: 236819 - DNA, 25 bp, Artificial
  probe
  misc_feature (1)..(25): SEQ ID NO: 1468; WAN024G9S_at; Start 106; Stop 130
ttcccttatcagaaggaacggctca

SEQ ID NO: 236820 - DNA, 25 bp, Artificial
  probe
  misc_feature (1)..(25): SEQ ID NO: 1468; WAN024G9S_at; Start 83; Stop 107
ccgtttcagctaaagaatatctttt

SEQ ID NO: 236821 - DNA, 25 bp, Artificial
  probe
  misc_feature (1)..(25): SEQ ID NO: 1468; WAN024G9S_at; Start 52; Stop 76
ttctctccatctgttagcttggatt

SEQ ID NO: 236822 - DNA, 25 bp, Artificial
  probe
  misc_feature (1)..(25): SEQ ID NO: 1468; WAN024G9S_at; Start 30; Stop 54
tgtgcttcagactgggctatttttc

SEQ ID NO: 236823 - DNA, 25 bp, Artificial
  probe
  misc_feature (1)..(25): SEQ ID NO: 1468; WAN024G9S_at; Start 107; Stop 131
tcccttatcagaaggaacggctcaa

SEQ ID NO: 236824 - DNA, 25 bp, Artificial
  probe
  misc_feature (1)..(25): SEQ ID NO: 1468; WAN024G9S_at; Start 40; Stop 64
actgggctatttttctctccatctg

SEQ ID NO: 236825 - DNA, 25 bp, Artificial
  probe
  misc_feature (1)..(25): SEQ ID NO: 1468; WAN024G9S_at; Start 51; Stop 75
tttctctccatctgttagcttggat

SEQ ID NO: 236826 - DNA, 25 bp, Artificial
  probe
  misc_feature (1)..(25): SEQ ID NO: 1468; WAN024G9S_at; Start 100; Stop 124
tatcttttcccttatcagaaggaac

SEQ ID NO: 236827 - DNA, 25 bp, Artificial
  probe
  misc_feature (1)..(25): SEQ ID NO: 1468; WAN024G9S_at; Start 77; Stop 101
ctcagaccgtttcagctaaagaata

SEQ ID NO: 236828 - DNA, 25 bp, Artificial
  probe
  misc_feature (1)..(25): SEQ ID NO: 1468; WAN024G9S_at; Start 89; Stop 113
cagctaaagaatatcttttccctta

SEQ ID NO: 236829 - DNA, 25 bp, Artificial
  probe
  misc_feature (1)..(25): SEQ ID NO: 1468; WAN024G9S_at; Start 75; Stop 99
ttctcagaccgtttcagctaaagaa

SEQ ID NO: 236830 - DNA, 25 bp, Artificial
  probe
  misc_feature (1)..(25): SEQ ID NO: 1468; WAN024G9S_at; Start 48; Stop 72
atttttctctccatctgttagcttg

SEQ ID NO: 236831 - DNA, 25 bp, Artificial
  probe
  misc_feature (1)..(25): SEQ ID NO: 1468; WAN024G9S_at; Start 31; Stop 55
gtgcttcagactgggctatttttct

SEQ ID NO: 236832 - DNA, 25 bp, Artificial
  probe
  misc_feature (1)..(25): SEQ ID NO: 1468; WAN024G9S_at; Start 43; Stop 67
gggctatttttctctccatctgtta

SEQ ID NO: 236833 - DNA, 25 bp, Artificial
  probe
  misc_feature (1)..(25): SEQ ID NO: 1468; WAN024G9S_at; Start 74; Stop 98
attctcagaccgtttcagctaaaga

SEQ ID NO: 236834 - DNA, 25 bp, Artificial
  probe
  misc_feature (1)..(25): SEQ ID NO: 1468; WAN024G9S_at; Start 79; Stop 103
cagaccgtttcagctaaagaatatc

SEQ ID NO: 236835 - DNA, 25 bp, Artificial
  probe
  misc_feature (1)..(25): SEQ ID NO: 1468; WAN024G9S_at; Start 81; Stop 105
gaccgtttcagctaaagaatatctt

SEQ ID NO: 236836 - DNA, 25 bp, Artificial
  probe
  misc_feature (1)..(25): SEQ ID NO: 1468; WAN024G9S_at; Start 35; Stop 59
ttcagactgggctatttttctctcc

SEQ ID NO: 236837 - DNA, 25 bp, Artificial
  probe
  misc_feature (1)..(25): SEQ ID NO: 1468; WAN024G9S_at; Start 27; Stop 51
tagtgtgcttcagactgggctattt

SEQ ID NO: 236838 - DNA, 25 bp, Artificial
  probe
  misc_feature (1)..(25): SEQ ID NO: 1468; WAN024G9S_at; Start 86; Stop 110
tttcagctaaagaatatcttttccc

SEQ ID NO: 236839 - DNA, 25 bp, Artificial
  probe
  misc_feature (1)..(25): SEQ ID NO: 1468; WAN024G9S_at; Start 44; Stop 68
ggctatttttctctccatctgttag

SEQ ID NO: 236840 - DNA, 25 bp, Artificial
  probe
  misc_feature (1)..(25): SEQ ID NO: 1468; WAN024G9S_at; Start 78; Stop 102
tcagaccgtttcagctaaagaatat

SEQ ID NO: 236841 - DNA, 25 bp, Artificial
  probe
  misc_feature (1)..(25): SEQ ID NO: 1468; WAN024G9S_at; Start 101; Stop 125
atcttttcccttatcagaaggaacg

SEQ ID NO: 236842 - DNA, 25 bp, Artificial
  probe
  misc_feature (1)..(25): SEQ ID NO: 1468; WAN024G9S_at; Start 76; Stop 100
tctcagaccgtttcagctaaagaat

SEQ ID NO: 236843 - DNA, 25 bp, Artificial
  probe
  misc_feature (1)..(25): SEQ ID NO: 1468; WAN024G9S_at; Start 38; Stop 62
agactgggctatttttctctccatc

SEQ ID NO: 236844 - DNA, 25 bp, Artificial
  probe
  misc_feature (1)..(25): SEQ ID NO: 1468; WAN024G9S_at; Start 105; Stop 129
tttcccttatcagaaggaacggctc

SEQ ID NO: 236845 - DNA, 25 bp, Artificial
  probe
  misc_feature (1)..(25): SEQ ID NO: 1468; WAN024G9S_at; Start 80; Stop 104
agaccgtttcagctaaagaatatct

SEQ ID NO: 236846 - DNA, 25 bp, Artificial
  probe
  misc_feature (1)..(25): SEQ ID NO: 1468; WAN024G9S_at; Start 45; Stop 69
gctatttttctctccatctgttagc

SEQ ID NO: 236847 - DNA, 25 bp, Artificial
  probe
  misc_feature (1)..(25): SEQ ID NO: 1468; WAN024G9S_at; Start 98; Stop 122
aatatcttttcccttatcagaagga

SEQ ID NO: 236848 - DNA, 25 bp, Artificial
  probe
  misc_feature (1)..(25): SEQ ID NO: 1468; WAN024G9S_at; Start 37; Stop 61
cagactgggctatttttctctccat

SEQ ID NO: 236849 - DNA, 25 bp, Artificial
  probe
  misc_feature (1)..(25): SEQ ID NO: 1468; WAN024G9S_at; Start 28; Stop 52
agtgtgcttcagactgggctatttt

SEQ ID NO: 236850 - DNA, 25 bp, Artificial
  probe
  misc_feature (1)..(25): SEQ ID NO: 1468; WAN024G9S_at; Start 96; Stop 120
agaatatcttttcccttatcagaag

SEQ ID NO: 236851 - DNA, 25 bp, Artificial
  probe
  misc_feature (1)..(25): SEQ ID NO: 1468; WAN024G9S_at; Start 50; Stop 74
ttttctctccatctgttagcttgga

SEQ ID NO: 236852 - DNA, 25 bp, Artificial
  probe
  misc_feature (1)..(25): SEQ ID NO: 1468; WAN024G9S_at; Start 39; Stop 63
gactgggctatttttctctccatct

SEQ ID NO: 236853 - DNA, 25 bp, Artificial
  probe
  misc_feature (1)..(25): SEQ ID NO: 2944; WAN024G9T_at; Start 122; Stop 146
ttatagtaggcgtttcgtgctctgt

SEQ ID NO: 236854 - DNA, 25 bp, Artificial
  probe
  misc_feature (1)..(25): SEQ ID NO: 2944; WAN024G9T_at; Start 52; Stop 76
ttctcatttaatgtgttcatcgtct

SEQ ID NO: 236855 - DNA, 25 bp, Artificial
  probe
  misc_feature (1)..(25): SEQ ID NO: 2944; WAN024G9T_at; Start 63; Stop 87
tgtgttcatcgtctttccctccgat

SEQ ID NO: 236856 - DNA, 25 bp, Artificial
  probe
  misc_feature (1)..(25): SEQ ID NO: 2944; WAN024G9T_at; Start 64; Stop 88
gtgttcatcgtctttccctccgatt

SEQ ID NO: 236857 - DNA, 25 bp, Artificial
  probe
  misc_feature (1)..(25): SEQ ID NO: 2944; WAN024G9T_at; Start 133; Stop 157
gtttcgtgctctgtcaacaaatttt

SEQ ID NO: 236858 - DNA, 25 bp, Artificial
  probe
  misc_feature (1)..(25): SEQ ID NO: 2944; WAN024G9T_at; Start 60; Stop 84
taatgtgttcatcgtctttccctcc

SEQ ID NO: 236859 - DNA, 25 bp, Artificial
  probe
  misc_feature (1)..(25): SEQ ID NO: 2944; WAN024G9T_at; Start 56; Stop 80
catttaatgtgttcatcgtctttcc

SEQ ID NO: 236860 - DNA, 25 bp, Artificial
  probe
  misc_feature (1)..(25): SEQ ID NO: 2944; WAN024G9T_at; Start 136; Stop 160
tcgtgctctgtcaacaaatttttta

SEQ ID NO: 236861 - DNA, 25 bp, Artificial
  probe
  misc_feature (1)..(25): SEQ ID NO: 2944; WAN024G9T_at; Start 121; Stop 145
attatagtaggcgtttcgtgctctg

SEQ ID NO: 236862 - DNA, 25 bp, Artificial
  probe
  misc_feature (1)..(25): SEQ ID NO: 2944; WAN024G9T_at; Start 118; Stop 142
ttaattatagtaggcgtttcgtgct

SEQ ID NO: 236863 - DNA, 25 bp, Artificial
  probe
  misc_feature (1)..(25): SEQ ID NO: 2944; WAN024G9T_at; Start 137; Stop 161
cgtgctctgtcaacaaattttttac

SEQ ID NO: 236864 - DNA, 25 bp, Artificial
  probe
  misc_feature (1)..(25): SEQ ID NO: 2944; WAN024G9T_at; Start 30; Stop 54
tgctttacagatattgattactttc

SEQ ID NO: 236865 - DNA, 25 bp, Artificial
  probe
  misc_feature (1)..(25): SEQ ID NO: 2944; WAN024G9T_at; Start 126; Stop 150
agtaggcgtttcgtgctctgtcaac

SEQ ID NO: 236866 - DNA, 25 bp, Artificial
  probe
  misc_feature (1)..(25): SEQ ID NO: 2944; WAN024G9T_at; Start 61; Stop 85
aatgtgttcatcgtctttccctccg

SEQ ID NO: 236867 - DNA, 25 bp, Artificial
  probe
  misc_feature (1)..(25): SEQ ID NO: 2944; WAN024G9T_at; Start 32; Stop 56
ctttacagatattgattactttctc

SEQ ID NO: 236868 - DNA, 25 bp, Artificial
  probe
  misc_feature (1)..(25): SEQ ID NO: 2944; WAN024G9T_at; Start 132; Stop 156
cgtttcgtgctctgtcaacaaattt

SEQ ID NO: 236869 - DNA, 25 bp, Artificial
  probe
  misc_feature (1)..(25): SEQ ID NO: 2944; WAN024G9T_at; Start 127; Stop 151
gtaggcgtttcgtgctctgtcaaca

SEQ ID NO: 236870 - DNA, 25 bp, Artificial
  probe
  misc_feature (1)..(25): SEQ ID NO: 2944; WAN024G9T_at; Start 140; Stop 164
gctctgtcaacaaattttttacgaa

SEQ ID NO: 236871 - DNA, 25 bp, Artificial
  probe
  misc_feature (1)..(25): SEQ ID NO: 2944; WAN024G9T_at; Start 129; Stop 153
aggcgtttcgtgctctgtcaacaaa

SEQ ID NO: 236872 - DNA, 25 bp, Artificial
  probe
  misc_feature (1)..(25): SEQ ID NO: 2944; WAN024G9T_at; Start 123; Stop 147
tatagtaggcgtttcgtgctctgtc

SEQ ID NO: 236873 - DNA, 25 bp, Artificial
  probe
  misc_feature (1)..(25): SEQ ID NO: 2944; WAN024G9T_at; Start 35; Stop 59
tacagatattgattactttctcatt

SEQ ID NO: 236874 - DNA, 25 bp, Artificial
  probe
  misc_feature (1)..(25): SEQ ID NO: 2944; WAN024G9T_at; Start 69; Stop 93
catcgtctttccctccgatttgttt

SEQ ID NO: 236875 - DNA, 25 bp, Artificial
  probe
  misc_feature (1)..(25): SEQ ID NO: 2944; WAN024G9T_at; Start 130; Stop 154
ggcgtttcgtgctctgtcaacaaat

SEQ ID NO: 236876 - DNA, 25 bp, Artificial
  probe
  misc_feature (1)..(25): SEQ ID NO: 2944; WAN024G9T_at; Start 128; Stop 152
taggcgtttcgtgctctgtcaacaa

SEQ ID NO: 236877 - DNA, 25 bp, Artificial
  probe
  misc_feature (1)..(25): SEQ ID NO: 2944; WAN024G9T_at; Start 66; Stop 90
gttcatcgtctttccctccgatttg

SEQ ID NO: 236878 - DNA, 25 bp, Artificial
  probe
  misc_feature (1)..(25): SEQ ID NO: 2944; WAN024G9T_at; Start 62; Stop 86
atgtgttcatcgtctttccctccga

SEQ ID NO: 236879 - DNA, 25 bp, Artificial
  probe
  misc_feature (1)..(25): SEQ ID NO: 2944; WAN024G9T_at; Start 131; Stop 155
gcgtttcgtgctctgtcaacaaatt

SEQ ID NO: 236880 - DNA, 25 bp, Artificial
  probe
  misc_feature (1)..(25): SEQ ID NO: 2944; WAN024G9T_at; Start 167; Stop 191
cacaacaaaggttttcattttcgtg

SEQ ID NO: 236881 - DNA, 25 bp, Artificial
  probe
  misc_feature (1)..(25): SEQ ID NO: 2944; WAN024G9T_at; Start 125; Stop 149
tagtaggcgtttcgtgctctgtcaa

SEQ ID NO: 236882 - DNA, 25 bp, Artificial
  probe
  misc_feature (1)..(25): SEQ ID NO: 2944; WAN024G9T_at; Start 138; Stop 162
gtgctctgtcaacaaattttttacg

SEQ ID NO: 236883 - DNA, 25 bp, Artificial
  probe
  misc_feature (1)..(25): SEQ ID NO: 2944; WAN024G9T_at; Start 37; Stop 61
cagatattgattactttctcattta

SEQ ID NO: 236884 - DNA, 25 bp, Artificial
  probe
  misc_feature (1)..(25): SEQ ID NO: 2944; WAN024G9T_at; Start 114; Stop 138
tgatttaattatagtaggcgtttcg

SEQ ID NO: 236885 - DNA, 25 bp, Artificial
  probe
  misc_feature (1)..(25): SEQ ID NO: 2944; WAN024G9T_at; Start 124; Stop 148
atagtaggcgtttcgtgctctgtca

SEQ ID NO: 236886 - DNA, 25 bp, Artificial
  probe
  misc_feature (1)..(25): SEQ ID NO: 2944; WAN024G9T_at; Start 117; Stop 141
tttaattatagtaggcgtttcgtgc

SEQ ID NO: 236887 - DNA, 25 bp, Artificial
  probe
  misc_feature (1)..(25): SEQ ID NO: 5246; WAN024G9U_at; Start 263; Stop 287
caacatcaagtttttcaccccagta

SEQ ID NO: 236888 - DNA, 25 bp, Artificial
  probe
  misc_feature (1)..(25): SEQ ID NO: 5246; WAN024G9U_at; Start 372; Stop 396
ttttgtgactcctttatatatatga

SEQ ID NO: 236889 - DNA, 25 bp, Artificial
  probe
  misc_feature (1)..(25): SEQ ID NO: 5246; WAN024G9U_at; Start 64; Stop 88
tcaccttcgaacaattctgtacgga

SEQ ID NO: 236890 - DNA, 25 bp, Artificial
  probe
  misc_feature (1)..(25): SEQ ID NO: 5246; WAN024G9U_at; Start 240; Stop 264
agcaatgtttttagctgaagcttca

SEQ ID NO: 236891 - DNA, 25 bp, Artificial
  probe
  misc_feature (1)..(25): SEQ ID NO: 5246; WAN024G9U_at; Start 162; Stop 186
catacgctcaccttgttcttggtgg

SEQ ID NO: 236892 - DNA, 25 bp, Artificial
  probe
  misc_feature (1)..(25): SEQ ID NO: 5246; WAN024G9U_at; Start 203; Stop 227
tgaatcggaatgtgttagcaccagc

SEQ ID NO: 236893 - DNA, 25 bp, Artificial
  probe
  misc_feature (1)..(25): SEQ ID NO: 5246; WAN024G9U_at; Start 283; Stop 307
cagtatccgtcctcaccgaattttt

SEQ ID NO: 236894 - DNA, 25 bp, Artificial
  probe
  misc_feature (1)..(25): SEQ ID NO: 5246; WAN024G9U_at; Start 49; Stop 73
gaatattctttagcttcaccttcga

SEQ ID NO: 236895 - DNA, 25 bp, Artificial
  probe
  misc_feature (1)..(25): SEQ ID NO: 5246; WAN024G9U_at; Start 26; Stop 50
gaattttttcaccagttttgtatga

SEQ ID NO: 236896 - DNA, 25 bp, Artificial
  probe
  misc_feature (1)..(25): SEQ ID NO: 5246; WAN024G9U_at; Start 356; Stop 380
cacgtttgttcatgatttttgtgac

SEQ ID NO: 236897 - DNA, 25 bp, Artificial
  probe
  misc_feature (1)..(25): SEQ ID NO: 5246; WAN024G9U_at; Start 335; Stop 359
ccaaagttgcaacgatttttacacg

SEQ ID NO: 236898 - DNA, 25 bp, Artificial
  probe
  misc_feature (1)..(25): SEQ ID NO: 5246; WAN024G9U_at; Start 188; Stop 212
cgccgtgtgagaagttgaatcggaa

SEQ ID NO: 236899 - DNA, 25 bp, Artificial
  probe
  misc_feature (1)..(25): SEQ ID NO: 5246; WAN024G9U_at; Start 308; Stop 332
taccaccacggatttctaccgcagg

SEQ ID NO: 236900 - DNA, 25 bp, Artificial
  probe
  misc_feature (1)..(25): SEQ ID NO: 5246; WAN024G9U_at; Start 208; Stop 232
cggaatgtgttagcaccagcttcaa

SEQ ID NO: 236901 - DNA, 25 bp, Artificial
  probe
  misc_feature (1)..(25): SEQ ID NO: 5246; WAN024G9U_at; Start 96; Stop 120
tccttttgtatcaagaaggaaacca

SEQ ID NO: 236902 - DNA, 25 bp, Artificial
  probe
  misc_feature (1)..(25): SEQ ID NO: 5246; WAN024G9U_at; Start 75; Stop 99
caattctgtacggatttcaggtcct

SEQ ID NO: 236903 - DNA, 25 bp, Artificial
  probe
  misc_feature (1)..(25): SEQ ID NO: 5246; WAN024G9U_at; Start 320; Stop 344
tttctaccgcaggacccaaagttgc

SEQ ID NO: 236904 - DNA, 25 bp, Artificial
  probe
  misc_feature (1)..(25): SEQ ID NO: 5246; WAN024G9U_at; Start 328; Stop 352
gcaggacccaaagttgcaacgattt

SEQ ID NO: 236905 - DNA, 25 bp, Artificial
  probe
  misc_feature (1)..(25): SEQ ID NO: 5246; WAN024G9U_at; Start 18; Stop 42
tgcaacacgaattttttcaccagtt

SEQ ID NO: 236906 - DNA, 25 bp, Artificial
  probe
  misc_feature (1)..(25): SEQ ID NO: 5246; WAN024G9U_at; Start 324; Stop 348
taccgcaggacccaaagttgcaacg

SEQ ID NO: 236907 - DNA, 25 bp, Artificial
  probe
  misc_feature (1)..(25): SEQ ID NO: 5246; WAN024G9U_at; Start 139; Stop 163
ttttccgcaagtttaacagttgcca

SEQ ID NO: 236908 - DNA, 25 bp, Artificial
  probe
  misc_feature (1)..(25): SEQ ID NO: 5246; WAN024G9U_at; Start 184; Stop 208
tggtcgccgtgtgagaagttgaatc

SEQ ID NO: 236909 - DNA, 25 bp, Artificial
  probe
  misc_feature (1)..(25): SEQ ID NO: 5246; WAN024G9U_at; Start 35; Stop 59
caccagttttgtatgaatattcttt

SEQ ID NO: 236910 - DNA, 25 bp, Artificial
  probe
  misc_feature (1)..(25): SEQ ID NO: 5246; WAN024G9U_at; Start 146; Stop 170
caagtttaacagttgccatacgctc

SEQ ID NO: 236911 - DNA, 25 bp, Artificial
  probe
  misc_feature (1)..(25): SEQ ID NO: 5246; WAN024G9U_at; Start 249; Stop 273
tttagctgaagcttcaacatcaagt

SEQ ID NO: 236912 - DNA, 25 bp, Artificial
  probe
  misc_feature (1)..(25): SEQ ID NO: 5246; WAN024G9U_at; Start 173; Stop 197
cttgttcttggtggtcgccgtgtga

SEQ ID NO: 236913 - DNA, 25 bp, Artificial
  probe
  misc_feature (1)..(25): SEQ ID NO: 5246; WAN024G9U_at; Start 59; Stop 83
tagcttcaccttcgaacaattctgt

SEQ ID NO: 236914 - DNA, 25 bp, Artificial
  probe
  misc_feature (1)..(25): SEQ ID NO: 5246; WAN024G9U_at; Start 217; Stop 241
ttagcaccagcttcaatcaatttag

SEQ ID NO: 236915 - DNA, 25 bp, Artificial
  probe
  misc_feature (1)..(25): SEQ ID NO: 5246; WAN024G9U_at; Start 3; Stop 27
gattccttgtttagttgcaacacga

SEQ ID NO: 236916 - DNA, 25 bp, Artificial
  probe
  misc_feature (1)..(25): SEQ ID NO: 5246; WAN024G9U_at; Start 343; Stop 367
gcaacgatttttacacgtttgttca

SEQ ID NO: 236917 - DNA, 25 bp, Artificial
  probe
  misc_feature (1)..(25): SEQ ID NO: 5246; WAN024G9U_at; Start 152; Stop 176
taacagttgccatacgctcaccttg

SEQ ID NO: 236918 - DNA, 25 bp, Artificial
  probe
  misc_feature (1)..(25): SEQ ID NO: 5246; WAN024G9U_at; Start 89; Stop 113
tttcaggtccttttgtatcaagaag

SEQ ID NO: 236919 - DNA, 25 bp, Artificial
  probe
  misc_feature (1)..(25): SEQ ID NO: 5246; WAN024G9U_at; Start 223; Stop 247
ccagcttcaatcaatttagcaatgt

SEQ ID NO: 236920 - DNA, 25 bp, Artificial
  probe
  misc_feature (1)..(25): SEQ ID NO: 5246; WAN024G9U_at; Start 267; Stop 291
atcaagtttttcaccccagtatccg

SEQ ID NO: 236921 - DNA, 25 bp, Artificial
  probe
  misc_feature (1)..(25): SEQ ID NO: 5804; WAN024G9V_at; Start 140; Stop 164
gcatcatctttagcaaccacacgaa

SEQ ID NO: 236922 - DNA, 25 bp, Artificial
  probe
  misc_feature (1)..(25): SEQ ID NO: 5804; WAN024G9V_at; Start 174; Stop 198
taccatcgtcaaccaaaacttgacg

SEQ ID NO: 236923 - DNA, 25 bp, Artificial
  probe
  misc_feature (1)..(25): SEQ ID NO: 5804; WAN024G9V_at; Start 12; Stop 36
cgaaacggatatcgtcgttatcgcg

SEQ ID NO: 236924 - DNA, 25 bp, Artificial
  probe
  misc_feature (1)..(25): SEQ ID NO: 5804; WAN024G9V_at; Start 63; Stop 87
tagtgttagggatgttcacaccttt

SEQ ID NO: 236925 - DNA, 25 bp, Artificial
  probe
  misc_feature (1)..(25): SEQ ID NO: 5804; WAN024G9V_at; Start 73; Stop 97
gatgttcacacctttttgtttagcg

SEQ ID NO: 236926 - DNA, 25 bp, Artificial
  probe
  misc_feature (1)..(25): SEQ ID NO: 5804; WAN024G9V_at; Start 157; Stop 181
cacacgaagaccaagtttaccatcg

SEQ ID NO: 236927 - DNA, 25 bp, Artificial
  probe
  misc_feature (1)..(25): SEQ ID NO: 5804; WAN024G9V_at; Start 216; Stop 240
catagatatcaagagcaccagcaac

SEQ ID NO: 236928 - DNA, 25 bp, Artificial
  probe
  misc_feature (1)..(25): SEQ ID NO: 5804; WAN024G9V_at; Start 5; Stop 29
tcaagaccgaaacggatatcgtcgt

SEQ ID NO: 236929 - DNA, 25 bp, Artificial
  probe
  misc_feature (1)..(25): SEQ ID NO: 5804; WAN024G9V_at; Start 26; Stop 50
tcgttatcgcgttcagcaagagctg

SEQ ID NO: 236930 - DNA, 25 bp, Artificial
  probe
  misc_feature (1)..(25): SEQ ID NO: 5804; WAN024G9V_at; Start 213; Stop 237
catcatagatatcaagagcaccagc

SEQ ID NO: 236931 - DNA, 25 bp, Artificial
  probe
  misc_feature (1)..(25): SEQ ID NO: 5804; WAN024G9V_at; Start 128; Stop 152
aattcacgagttgcatcatctttag

SEQ ID NO: 236932 - DNA, 25 bp, Artificial
  probe
  misc_feature (1)..(25): SEQ ID NO: 5804; WAN024G9V_at; Start 121; Stop 145
aacttcaaattcacgagttgcatca

SEQ ID NO: 236933 - DNA, 25 bp, Artificial
  probe
  misc_feature (1)..(25): SEQ ID NO: 5804; WAN024G9V_at; Start 81; Stop 105
cacctttttgtttagcgatgatacc

SEQ ID NO: 236934 - DNA, 25 bp, Artificial
  probe
  misc_feature (1)..(25): SEQ ID NO: 5804; WAN024G9V_at; Start 57; Stop 81
gaattttagtgttagggatgttcac

SEQ ID NO: 236935 - DNA, 25 bp, Artificial
  probe
  misc_feature (1)..(25): SEQ ID NO: 5804; WAN024G9V_at; Start 148; Stop 172
tttagcaaccacacgaagaccaagt

SEQ ID NO: 236936 - DNA, 25 bp, Artificial
  probe
  misc_feature (1)..(25): SEQ ID NO: 5804; WAN024G9V_at; Start 21; Stop 45
tatcgtcgttatcgcgttcagcaag

SEQ ID NO: 236937 - DNA, 25 bp, Artificial
  probe
  misc_feature (1)..(25): SEQ ID NO: 5804; WAN024G9V_at; Start 240; Stop 264
cgttcaacgcaatcacttcacgagt

SEQ ID NO: 236938 - DNA, 25 bp, Artificial
  probe
  misc_feature (1)..(25): SEQ ID NO: 5804; WAN024G9V_at; Start 85; Stop 109
tttttgtttagcgatgataccatcg

SEQ ID NO: 236939 - DNA, 25 bp, Artificial
  probe
  misc_feature (1)..(25): SEQ ID NO: 5804; WAN024G9V_at; Start 187; Stop 211
caaaacttgacgaccaacttcaaca

SEQ ID NO: 236940 - DNA, 25 bp, Artificial
  probe
  misc_feature (1)..(25): SEQ ID NO: 5804; WAN024G9V_at; Start 198; Stop 222
gaccaacttcaacatcatcatagat

SEQ ID NO: 236941 - DNA, 25 bp, Artificial
  probe
  misc_feature (1)..(25): SEQ ID NO: 5804; WAN024G9V_at; Start 2; Stop 26
tgttcaagaccgaaacggatatcgt

SEQ ID NO: 236942 - DNA, 25 bp, Artificial
  probe
  misc_feature (1)..(25): SEQ ID NO: 5804; WAN024G9V_at; Start 162; Stop 186
gaagaccaagtttaccatcgtcaac

SEQ ID NO: 236943 - DNA, 25 bp, Artificial
  probe
  misc_feature (1)..(25): SEQ ID NO: 5804; WAN024G9V_at; Start 165; Stop 189
gaccaagtttaccatcgtcaaccaa

SEQ ID NO: 236944 - DNA, 25 bp, Artificial
  probe
  misc_feature (1)..(25): SEQ ID NO: 5804; WAN024G9V_at; Start 243; Stop 267
tcaacgcaatcacttcacgagttga

SEQ ID NO: 236945 - DNA, 25 bp, Artificial
  probe
  misc_feature (1)..(25): SEQ ID NO: 5804; WAN024G9V_at; Start 97; Stop 121
gatgataccatcgttttcaacttca

SEQ ID NO: 236946 - DNA, 25 bp, Artificial
  probe
  misc_feature (1)..(25): SEQ ID NO: 5804; WAN024G9V_at; Start 113; Stop 137
tcaacttcaacttcaaattcacgag

SEQ ID NO: 236947 - DNA, 25 bp, Artificial
  probe
  misc_feature (1)..(25): SEQ ID NO: 5804; WAN024G9V_at; Start 150; Stop 174
tagcaaccacacgaagaccaagttt

SEQ ID NO: 236948 - DNA, 25 bp, Artificial
  probe
  misc_feature (1)..(25): SEQ ID NO: 5804; WAN024G9V_at; Start 32; Stop 56
tcgcgttcagcaagagctgggaaag

SEQ ID NO: 236949 - DNA, 25 bp, Artificial
  probe
  misc_feature (1)..(25): SEQ ID NO: 5804; WAN024G9V_at; Start 42; Stop 66
caagagctgggaaaggaattttagt

SEQ ID NO: 236950 - DNA, 25 bp, Artificial
  probe
  misc_feature (1)..(25): SEQ ID NO: 5804; WAN024G9V_at; Start 224; Stop 248
tcaagagcaccagcaacgttcaacg

SEQ ID NO: 236951 - DNA, 25 bp, Artificial
  probe
  misc_feature (1)..(25): SEQ ID NO: 5804; WAN024G9V_at; Start 29; Stop 53
ttatcgcgttcagcaagagctggga

SEQ ID NO: 236952 - DNA, 25 bp, Artificial
  probe
  misc_feature (1)..(25): SEQ ID NO: 5804; WAN024G9V_at; Start 228; Stop 252
gagcaccagcaacgttcaacgcaat

SEQ ID NO: 236953 - DNA, 25 bp, Artificial
  probe
  misc_feature (1)..(25): SEQ ID NO: 5804; WAN024G9V_at; Start 38; Stop 62
tcagcaagagctgggaaaggaattt

SEQ ID NO: 236954 - DNA, 25 bp, Artificial
  probe
  misc_feature (1)..(25): SEQ ID NO: 5804; WAN024G9V_at; Start 220; Stop 244
gatatcaagagcaccagcaacgttc

SEQ ID NO: 236955 - DNA, 25 bp, Artificial
  probe
  misc_feature (1)..(25): SEQ ID NO: 4079; WAN024G9W_at; Start 127; Stop 151
tcgtcagttgaagatggagcatctg

SEQ ID NO: 236956 - DNA, 25 bp, Artificial
  probe
  misc_feature (1)..(25): SEQ ID NO: 4079; WAN024G9W_at; Start 173; Stop 197
agttcaacatcaagccacgttctgt

SEQ ID NO: 236957 - DNA, 25 bp, Artificial
  probe
  misc_feature (1)..(25): SEQ ID NO: 4079; WAN024G9W_at; Start 180; Stop 204
catcaagccacgttctgtcaattcg

SEQ ID NO: 236958 - DNA, 25 bp, Artificial
  probe
  misc_feature (1)..(25): SEQ ID NO: 4079; WAN024G9W_at; Start 190; Stop 214
cgttctgtcaattcgtcaaatgtca

SEQ ID NO: 236959 - DNA, 25 bp, Artificial
  probe
  misc_feature (1)..(25): SEQ ID NO: 4079; WAN024G9W_at; Start 239; Stop 263
ggtatttagaaatcaaacgtgcagt

SEQ ID NO: 236960 - DNA, 25 bp, Artificial
  probe
  misc_feature (1)..(25): SEQ ID NO: 4079; WAN024G9W_at; Start 243; Stop 267
tttagaaatcaaacgtgcagtatga

SEQ ID NO: 236961 - DNA, 25 bp, Artificial
  probe
  misc_feature (1)..(25): SEQ ID NO: 4079; WAN024G9W_at; Start 24; Stop 48
gcgaacagcttctcctactggcaca

SEQ ID NO: 236962 - DNA, 25 bp, Artificial
  probe
  misc_feature (1)..(25): SEQ ID NO: 4079; WAN024G9W_at; Start 150; Stop 174
tgtcaacattgggataacaccccag

SEQ ID NO: 236963 - DNA, 25 bp, Artificial
  probe
  misc_feature (1)..(25): SEQ ID NO: 4079; WAN024G9W_at; Start 203; Stop 227
cgtcaaatgtcaatgctaagatgtc

SEQ ID NO: 236964 - DNA, 25 bp, Artificial
  probe
  misc_feature (1)..(25): SEQ ID NO: 4079; WAN024G9W_at; Start 76; Stop 100
gactcaacgagacctgcttctaccg

SEQ ID NO: 236965 - DNA, 25 bp, Artificial
  probe
  misc_feature (1)..(25): SEQ ID NO: 4079; WAN024G9W_at; Start 1; Stop 25
gtgcggatacgcattgtgtttgtgc

SEQ ID NO: 236966 - DNA, 25 bp, Artificial
  probe
  misc_feature (1)..(25): SEQ ID NO: 4079; WAN024G9W_at; Start 156; Stop 180
cattgggataacaccccagttcaac

SEQ ID NO: 236967 - DNA, 25 bp, Artificial
  probe
  misc_feature (1)..(25): SEQ ID NO: 4079; WAN024G9W_at; Start 15; Stop 39
tgtgtttgtgcgaacagcttctcct

SEQ ID NO: 236968 - DNA, 25 bp, Artificial
  probe
  misc_feature (1)..(25): SEQ ID NO: 4079; WAN024G9W_at; Start 94; Stop 118
tctaccgctttacgttcagcgattt

SEQ ID NO: 236969 - DNA, 25 bp, Artificial
  probe
  misc_feature (1)..(25): SEQ ID NO: 4079; WAN024G9W_at; Start 206; Stop 230
caaatgtcaatgctaagatgtcagc

SEQ ID NO: 236970 - DNA, 25 bp, Artificial
  probe
  misc_feature (1)..(25): SEQ ID NO: 4079; WAN024G9W_at; Start 8; Stop 32
tacgcattgtgtttgtgcgaacagc

SEQ ID NO: 236971 - DNA, 25 bp, Artificial
  probe
  misc_feature (1)..(25): SEQ ID NO: 4079; WAN024G9W_at; Start 21; Stop 45
tgtgcgaacagcttctcctactggc

SEQ ID NO: 236972 - DNA, 25 bp, Artificial
  probe
  misc_feature (1)..(25): SEQ ID NO: 4079; WAN024G9W_at; Start 84; Stop 108
gagacctgcttctaccgctttacgt

SEQ ID NO: 236973 - DNA, 25 bp, Artificial
  probe
  misc_feature (1)..(25): SEQ ID NO: 4079; WAN024G9W_at; Start 52; Stop 76
gcaacgataacgatatcatcgcctg

SEQ ID NO: 236974 - DNA, 25 bp, Artificial
  probe
  misc_feature (1)..(25): SEQ ID NO: 4079; WAN024G9W_at; Start 91; Stop 115
gcttctaccgctttacgttcagcga

SEQ ID NO: 236975 - DNA, 25 bp, Artificial
  probe
  misc_feature (1)..(25): SEQ ID NO: 4079; WAN024G9W_at; Start 112; Stop 136
gcgatttcgaacatatcgtcagttg

SEQ ID NO: 236976 - DNA, 25 bp, Artificial
  probe
  misc_feature (1)..(25): SEQ ID NO: 4079; WAN024G9W_at; Start 70; Stop 94
tcgcctgactcaacgagacctgctt

SEQ ID NO: 236977 - DNA, 25 bp, Artificial
  probe
  misc_feature (1)..(25): SEQ ID NO: 4079; WAN024G9W_at; Start 162; Stop 186
gataacaccccagttcaacatcaag

SEQ ID NO: 236978 - DNA, 25 bp, Artificial
  probe
  misc_feature (1)..(25): SEQ ID NO: 4079; WAN024G9W_at; Start 139; Stop 163
gatggagcatctgtcaacattggga

SEQ ID NO: 236979 - DNA, 25 bp, Artificial
  probe
  misc_feature (1)..(25): SEQ ID NO: 4079; WAN024G9W_at; Start 43; Stop 67
ggcacaccagcaacgataacgatat

SEQ ID NO: 236980 - DNA, 25 bp, Artificial
  probe
  misc_feature (1)..(25): SEQ ID NO: 4079; WAN024G9W_at; Start 123; Stop 147
catatcgtcagttgaagatggagca

SEQ ID NO: 236981 - DNA, 25 bp, Artificial
  probe
  misc_feature (1)..(25): SEQ ID NO: 4079; WAN024G9W_at; Start 217; Stop 241
gctaagatgtcagcatttggacggt

SEQ ID NO: 236982 - DNA, 25 bp, Artificial
  probe
  misc_feature (1)..(25): SEQ ID NO: 4079; WAN024G9W_at; Start 143; Stop 167
gagcatctgtcaacattgggataac

SEQ ID NO: 236983 - DNA, 25 bp, Artificial
  probe
  misc_feature (1)..(25): SEQ ID NO: 4079; WAN024G9W_at; Start 183; Stop 207
caagccacgttctgtcaattcgtca

SEQ ID NO: 236984 - DNA, 25 bp, Artificial
  probe
  misc_feature (1)..(25): SEQ ID NO: 4079; WAN024G9W_at; Start 118; Stop 142
tcgaacatatcgtcagttgaagatg

SEQ ID NO: 236985 - DNA, 25 bp, Artificial
  probe
  misc_feature (1)..(25): SEQ ID NO: 4079; WAN024G9W_at; Start 39; Stop 63
tactggcacaccagcaacgataacg

SEQ ID NO: 236986 - DNA, 25 bp, Artificial
  probe
  misc_feature (1)..(25): SEQ ID NO: 4079; WAN024G9W_at; Start 63; Stop 87
gatatcatcgcctgactcaacgaga

SEQ ID NO: 236987 - DNA, 25 bp, Artificial
  probe
  misc_feature (1)..(25): SEQ ID NO: 4079; WAN024G9W_at; Start 198; Stop 222
caattcgtcaaatgtcaatgctaag

SEQ ID NO: 236988 - DNA, 25 bp, Artificial
  probe
  misc_feature (1)..(25): SEQ ID NO: 4079; WAN024G9W_at; Start 226; Stop 250
tcagcatttggacggtatttagaaa

SEQ ID NO: 236989 - DNA, 25 bp, Artificial
  probe
  misc_feature (1)..(25): SEQ ID NO: 1007; WAN024G9X_at; Start 990; Stop 1014
tatcgacggaactgacgctacaatg

SEQ ID NO: 236990 - DNA, 25 bp, Artificial
  probe
  misc_feature (1)..(25): SEQ ID NO: 1007; WAN024G9X_at; Start 63; Stop 87
aaaattcggtgaggacggatactgg

SEQ ID NO: 236991 - DNA, 25 bp, Artificial
  probe
  misc_feature (1)..(25): SEQ ID NO: 1007; WAN024G9X_at; Start 1332; Stop 1356
tatcccaatgttgacagatgctcca

SEQ ID NO: 236992 - DNA, 25 bp, Artificial
  probe
  misc_feature (1)..(25): SEQ ID NO: 1007; WAN024G9X_at; Start 872; Stop 896
ttatcaagaaagtcaatgctgcagg

SEQ ID NO: 236993 - DNA, 25 bp, Artificial
  probe
  misc_feature (1)..(25): SEQ ID NO: 1007; WAN024G9X_at; Start 589; Stop 613
gctcttgctgaacgcgataacgacg

SEQ ID NO: 236994 - DNA, 25 bp, Artificial
  probe
  misc_feature (1)..(25): SEQ ID NO: 1007; WAN024G9X_at; Start 935; Stop 959
tgactgaaaaaccacgtgcaactcg

SEQ ID NO: 236995 - DNA, 25 bp, Artificial
  probe
  misc_feature (1)..(25): SEQ ID NO: 1007; WAN024G9X_at; Start 1270; Stop 1294
gacatcttagcattgacatttgacg

SEQ ID NO: 236996 - DNA, 25 bp, Artificial
  probe
  misc_feature (1)..(25): SEQ ID NO: 1007; WAN024G9X_at; Start 1218; Stop 1242
tactaagacaggtcatactgcacgt

SEQ ID NO: 236997 - DNA, 25 bp, Artificial
  probe
  misc_feature (1)..(25): SEQ ID NO: 1007; WAN024G9X_at; Start 1157; Stop 1181
taatggcttctgctgttaaagatgc

SEQ ID NO: 236998 - DNA, 25 bp, Artificial
  probe
  misc_feature (1)..(25): SEQ ID NO: 1007; WAN024G9X_at; Start 1431; Stop 1455
tatcgttatcgttgctggtgtgcca

SEQ ID NO: 236999 - DNA, 25 bp, Artificial
  probe
  misc_feature (1)..(25): SEQ ID NO: 1007; WAN024G9X_at; Start 1403; Stop 1427
aagcaggtctcgttgagtcaggcga

SEQ ID NO: 237000 - DNA, 25 bp, Artificial
  probe
  misc_feature (1)..(25): SEQ ID NO: 1007; WAN024G9X_at; Start 1449; Stop 1473
tgtgccagtaggagaagctgttcgc

SEQ ID NO: 237001 - DNA, 25 bp, Artificial
  probe
  misc_feature (1)..(25): SEQ ID NO: 1007; WAN024G9X_at; Start 663; Stop 687
cgtacgtactgcaaaagatgtgaac

SEQ ID NO: 237002 - DNA, 25 bp, Artificial
  probe
  misc_feature (1)..(25): SEQ ID NO: 1007; WAN024G9X_at; Start 631; Stop 655
gaacaaggtatcaacttcatcgcaa

SEQ ID NO: 237003 - DNA, 25 bp, Artificial
  probe
  misc_feature (1)..(25): SEQ ID NO: 1007; WAN024G9X_at; Start 389; Stop 413
cgttgaacgttgctggtgctcttga

SEQ ID NO: 237004 - DNA, 25 bp, Artificial
  probe
  misc_feature (1)..(25): SEQ ID NO: 1007; WAN024G9X_at; Start 541; Stop 565
gctaaacaaaaaggtgtgaacatcc

SEQ ID NO: 237005 - DNA, 25 bp, Artificial
  probe
  misc_feature (1)..(25): SEQ ID NO: 1007; WAN024G9X_at; Start 610; Stop 634
gacgatatccgtttcggtcttgaac

SEQ ID NO: 237006 - DNA, 25 bp, Artificial
  probe
  misc_feature (1)..(25): SEQ ID NO: 1007; WAN024G9X_at; Start 1034; Stop 1058
acggtaaatacccactcgagtcagt

SEQ ID NO: 237007 - DNA, 25 bp, Artificial
  probe
  misc_feature (1)..(25): SEQ ID NO: 1007; WAN024G9X_at; Start 1479; Stop 1503
cacaatgcgtatccgcacagtacgt

SEQ ID NO: 237008 - DNA, 25 bp, Artificial
  probe
  misc_feature (1)..(25): SEQ ID NO: 1007; WAN024G9X_at; Start 139; Stop 163
gaagctggtgctaacacattccgat

SEQ ID NO: 237009 - DNA, 25 bp, Artificial
  probe
  misc_feature (1)..(25): SEQ ID NO: 1007; WAN024G9X_at; Start 1049; Stop 1073
tcgagtcagtaactacaatggctac

SEQ ID NO: 237010 - DNA, 25 bp, Artificial
  probe
  misc_feature (1)..(25): SEQ ID NO: 1007; WAN024G9X_at; Start 684; Stop 708
gaacgaagttcgtgcaatctgtgaa

SEQ ID NO: 237011 - DNA, 25 bp, Artificial
  probe
  misc_feature (1)..(25): SEQ ID NO: 1007; WAN024G9X_at; Start 1293; Stop 1317
cgaattgacagaacgtggcttgatg

SEQ ID NO: 237012 - DNA, 25 bp, Artificial
  probe
  misc_feature (1)..(25): SEQ ID NO: 1007; WAN024G9X_at; Start 465; Stop 489
acttggtcttcgtgtggttgctaaa

SEQ ID NO: 237013 - DNA, 25 bp, Artificial
  probe
  misc_feature (1)..(25): SEQ ID NO: 1007; WAN024G9X_at; Start 1019; Stop 1043
caggcgagtctgcaaacggtaaata

SEQ ID NO: 237014 - DNA, 25 bp, Artificial
  probe
  misc_feature (1)..(25): SEQ ID NO: 1007; WAN024G9X_at; Start 266; Stop 290
caaaaggacctgaaatccgtacaga

SEQ ID NO: 237015 - DNA, 25 bp, Artificial
  probe
  misc_feature (1)..(25): SEQ ID NO: 1007; WAN024G9X_at; Start 1064; Stop 1088
caatggctacaatcgacaagaacgc

SEQ ID NO: 237016 - DNA, 25 bp, Artificial
  probe
  misc_feature (1)..(25): SEQ ID NO: 1007; WAN024G9X_at; Start 1348; Stop 1372
gatgctccatcttcaactgacgata

SEQ ID NO: 237017 - DNA, 25 bp, Artificial
  probe
  misc_feature (1)..(25): SEQ ID NO: 1007; WAN024G9X_at; Start 977; Stop 1001
tattcaacgctgttatcgacggaac

SEQ ID NO: 237018 - DNA, 25 bp, Artificial
  probe
  misc_feature (1)..(25): SEQ ID NO: 1007; WAN024G9X_at; Start 701; Stop 725
tctgtgaagaaactggaaacggaca

SEQ ID NO: 237019 - DNA, 25 bp, Artificial
  probe
  misc_feature (1)..(25): SEQ ID NO: 1007; WAN024G9X_at; Start 187; Stop 211
caagaacaaggtgagcgtatggcaa

SEQ ID NO: 237020 - DNA, 25 bp, Artificial
  probe
  misc_feature (1)..(25): SEQ ID NO: 1007; WAN024G9X_at; Start 1090; Stop 1114
caagctcttcttaatgaatacggac

SEQ ID NO: 237021 - DNA, 25 bp, Artificial
  probe
  misc_feature (1)..(25): SEQ ID NO: 1007; WAN024G9X_at; Start 716; Stop 740
gaaacggacatgttcaattgttcgc

SEQ ID NO: 237022 - DNA, 25 bp, Artificial
  probe
  misc_feature (1)..(25): SEQ ID NO: 1007; WAN024G9X_at; Start 25; Stop 49
gcaactttgggtcctgcggtagaaa

SEQ ID NO: 237023 - DNA, 25 bp, Artificial
  probe
  misc_feature (1)..(25): SEQ ID NO: 849; WAN024G9Y_at; Start 389; Stop 413
tcgttggtactgactttacaatcgg

SEQ ID NO: 237024 - DNA, 25 bp, Artificial
  probe
  misc_feature (1)..(25): SEQ ID NO: 849; WAN024G9Y_at; Start 615; Stop 639
caaagctggttatgaatgtggtaaa

SEQ ID NO: 237025 - DNA, 25 bp, Artificial
  probe
  misc_feature (1)..(25): SEQ ID NO: 849; WAN024G9Y_at; Start 722; Stop 746
gcgaccttcgtgtaacagaacttgg

SEQ ID NO: 237026 - DNA, 25 bp, Artificial
  probe
  misc_feature (1)..(25): SEQ ID NO: 849; WAN024G9Y_at; Start 114; Stop 138
tgacggatatgctggtatggttgcc

SEQ ID NO: 237027 - DNA, 25 bp, Artificial
  probe
  misc_feature (1)..(25): SEQ ID NO: 849; WAN024G9Y_at; Start 494; Stop 518
taatcgaagttatgggacgtaacgc

SEQ ID NO: 237028 - DNA, 25 bp, Artificial
  probe
  misc_feature (1)..(25): SEQ ID NO: 849; WAN024G9Y_at; Start 463; Stop 487
gatacatcatcaagtcaccgtcgta

SEQ ID NO: 237029 - DNA, 25 bp, Artificial
  probe
  misc_feature (1)..(25): SEQ ID NO: 849; WAN024G9Y_at; Start 142; Stop 166
gaaattcatcccctagatgcagctt

SEQ ID NO: 237030 - DNA, 25 bp, Artificial
  probe
  misc_feature (1)..(25): SEQ ID NO: 849; WAN024G9Y_at; Start 654; Stop 678
cgtcttagctgaaggtgtgatgtca

SEQ ID NO: 237031 - DNA, 25 bp, Artificial
  probe
  misc_feature (1)..(25): SEQ ID NO: 849; WAN024G9Y_at; Start 221; Stop 245
cagagttcgctcaacttgaagggca

SEQ ID NO: 237032 - DNA, 25 bp, Artificial
  probe
  misc_feature (1)..(25): SEQ ID NO: 849; WAN024G9Y_at; Start 676; Stop 700
tcagcggctgaatttggtcaaaaac

SEQ ID NO: 237033 - DNA, 25 bp, Artificial
  probe
  misc_feature (1)..(25): SEQ ID NO: 849; WAN024G9Y_at; Start 513; Stop 537
taacgctggtgatatcgctctttgg

SEQ ID NO: 237034 - DNA, 25 bp, Artificial
  probe
  misc_feature (1)..(25): SEQ ID NO: 849; WAN024G9Y_at; Start 129; Stop 153
tatggttgccggtgaaattcatccc

SEQ ID NO: 237035 - DNA, 25 bp, Artificial
  probe
  misc_feature (1)..(25): SEQ ID NO: 849; WAN024G9Y_at; Start 913; Stop 937
gcattgtttagccttactgcagaag

SEQ ID NO: 237036 - DNA, 25 bp, Artificial
  probe
  misc_feature (1)..(25): SEQ ID NO: 849; WAN024G9Y_at; Start 546; Stop 570
tgcaactggtgctgatgaaatcatc

SEQ ID NO: 237037 - DNA, 25 bp, Artificial
  probe
  misc_feature (1)..(25): SEQ ID NO: 849; WAN024G9Y_at; Start 528; Stop 552
cgctctttgggctggtattgcaact

SEQ ID NO: 237038 - DNA, 25 bp, Artificial
  probe
  misc_feature (1)..(25): SEQ ID NO: 849; WAN024G9Y_at; Start 559; Stop 583
gatgaaatcatcatccctgaagcag

SEQ ID NO: 237039 - DNA, 25 bp, Artificial
  probe
  misc_feature (1)..(25): SEQ ID NO: 849; WAN024G9Y_at; Start 255; Stop 279
gattgagcaattgaaaaaacacgga

SEQ ID NO: 237040 - DNA, 25 bp, Artificial
  probe
  misc_feature (1)..(25): SEQ ID NO: 849; WAN024G9Y_at; Start 73; Stop 97
cgtcaagcaatttcagaaggaatgg

SEQ ID NO: 237041 - DNA, 25 bp, Artificial
  probe
  misc_feature (1)..(25): SEQ ID NO: 849; WAN024G9Y_at; Start 331; Stop 355
cgtttgactgaacatggcttcccag

SEQ ID NO: 237042 - DNA, 25 bp, Artificial
  probe
  misc_feature (1)..(25): SEQ ID NO: 849; WAN024G9Y_at; Start 59; Stop 83
tccgtgcagttgttcgtcaagcaat

SEQ ID NO: 237043 - DNA, 25 bp, Artificial
  probe
  misc_feature (1)..(25): SEQ ID NO: 849; WAN024G9Y_at; Start 421; Stop 445
acagcggttactactgccatggacg

SEQ ID NO: 237044 - DNA, 25 bp, Artificial
  probe
  misc_feature (1)..(25): SEQ ID NO: 849; WAN024G9Y_at; Start 361; Stop 385
ggtcttccaggtacaatcgataacg

SEQ ID NO: 237045 - DNA, 25 bp, Artificial
  probe
  misc_feature (1)..(25): SEQ ID NO: 849; WAN024G9Y_at; Start 407; Stop 431
caatcggttttgacacagcggttac

SEQ ID NO: 237046 - DNA, 25 bp, Artificial
  probe
  misc_feature (1)..(25): SEQ ID NO: 849; WAN024G9Y_at; Start 600; Stop 624
tatcgtagcaagcatcaaagctggt

SEQ ID NO: 237047 - DNA, 25 bp, Artificial
  probe
  misc_feature (1)..(25): SEQ ID NO: 849; WAN024G9Y_at; Start 803; Stop 827
tgggtgcacatgctgttaaacttct

SEQ ID NO: 237048 - DNA, 25 bp, Artificial
  probe
  misc_feature (1)..(25): SEQ ID NO: 849; WAN024G9Y_at; Start 316; Stop 340
taccacggcgctatgcgtttgactg

SEQ ID NO: 237049 - DNA, 25 bp, Artificial
  probe
  misc_feature (1)..(25): SEQ ID NO: 849; WAN024G9Y_at; Start 827; Stop 851
ttaaagaaggtatcggtggtgttgc

SEQ ID NO: 237050 - DNA, 25 bp, Artificial
  probe
  misc_feature (1)..(25): SEQ ID NO: 849; WAN024G9Y_at; Start 788; Stop 812
ttttggcgtcacgtatgggtgcaca

SEQ ID NO: 237051 - DNA, 25 bp, Artificial
  probe
  misc_feature (1)..(25): SEQ ID NO: 849; WAN024G9Y_at; Start 478; Stop 502
caccgtcgtacttttgtaatcgaag

SEQ ID NO: 237052 - DNA, 25 bp, Artificial
  probe
  misc_feature (1)..(25): SEQ ID NO: 849; WAN024G9Y_at; Start 346; Stop 370
ggcttcccagctattggtcttccag

SEQ ID NO: 237053 - DNA, 25 bp, Artificial
  probe
  misc_feature (1)..(25): SEQ ID NO: 849; WAN024G9Y_at; Start 880; Stop 904
gaaaatccaattcttggtactgcag

SEQ ID NO: 237054 - DNA, 25 bp, Artificial
  probe
  misc_feature (1)..(25): SEQ ID NO: 849; WAN024G9Y_at; Start 238; Stop 262
gaagggcaacttaaagggattgagc

SEQ ID NO: 237055 - DNA, 25 bp, Artificial
  probe
  misc_feature (1)..(25): SEQ ID NO: 849; WAN024G9Y_at; Start 748; Stop 772
catattcaacgtggtggttctccaa

SEQ ID NO: 237056 - DNA, 25 bp, Artificial
  probe
  misc_feature (1)..(25): SEQ ID NO: 849; WAN024G9Y_at; Start 588; Stop 612
caagatggaagatatcgtagcaagc

SEQ ID NO: 237057 - DNA, 25 bp, Artificial
  probe
  misc_feature (1)..(25): SEQ ID NO: 7120; WAN024G9Z_at; Start 28; Stop 52
gttggacgagatttagttgaggttc

SEQ ID NO: 237058 - DNA, 25 bp, Artificial
  probe
  misc_feature (1)..(25): SEQ ID NO: 7120; WAN024G9Z_at; Start 52; Stop 76
cctctagctcaatcttgtgaggaag

SEQ ID NO: 237059 - DNA, 25 bp, Artificial
  probe
  misc_feature (1)..(25): SEQ ID NO: 7120; WAN024G9Z_at; Start 46; Stop 70
gaggttcctctagctcaatcttgtg

SEQ ID NO: 237060 - DNA, 25 bp, Artificial
  probe
  misc_feature (1)..(25): SEQ ID NO: 7120; WAN024G9Z_at; Start 42; Stop 66
agttgaggttcctctagctcaatct

SEQ ID NO: 237061 - DNA, 25 bp, Artificial
  probe
  misc_feature (1)..(25): SEQ ID NO: 7120; WAN024G9Z_at; Start 8; Stop 32
aagctcagcttgaccttggggttgg

SEQ ID NO: 237062 - DNA, 25 bp, Artificial
  probe
  misc_feature (1)..(25): SEQ ID NO: 7120; WAN024G9Z_at; Start 40; Stop 64
ttagttgaggttcctctagctcaat

SEQ ID NO: 237063 - DNA, 25 bp, Artificial
  probe
  misc_feature (1)..(25): SEQ ID NO: 7120; WAN024G9Z_at; Start 47; Stop 71
aggttcctctagctcaatcttgtga

SEQ ID NO: 237064 - DNA, 25 bp, Artificial
  probe
  misc_feature (1)..(25): SEQ ID NO: 7120; WAN024G9Z_at; Start 5; Stop 29
tacaagctcagcttgaccttggggt

SEQ ID NO: 237065 - DNA, 25 bp, Artificial
  probe
  misc_feature (1)..(25): SEQ ID NO: 7120; WAN024G9Z_at; Start 36; Stop 60
agatttagttgaggttcctctagct

SEQ ID NO: 237066 - DNA, 25 bp, Artificial
  probe
  misc_feature (1)..(25): SEQ ID NO: 7120; WAN024G9Z_at; Start 51; Stop 75
tcctctagctcaatcttgtgaggaa

SEQ ID NO: 237067 - DNA, 25 bp, Artificial
  probe
  misc_feature (1)..(25): SEQ ID NO: 7120; WAN024G9Z_at; Start 31; Stop 55
ggacgagatttagttgaggttcctc

SEQ ID NO: 237068 - DNA, 25 bp, Artificial
  probe
  misc_feature (1)..(25): SEQ ID NO: 7120; WAN024G9Z_at; Start 29; Stop 53
ttggacgagatttagttgaggttcc

SEQ ID NO: 237069 - DNA, 25 bp, Artificial
  probe
  misc_feature (1)..(25): SEQ ID NO: 7120; WAN024G9Z_at; Start 18; Stop 42
tgaccttggggttggacgagattta

SEQ ID NO: 237070 - DNA, 25 bp, Artificial
  probe
  misc_feature (1)..(25): SEQ ID NO: 7120; WAN024G9Z_at; Start 35; Stop 59
gagatttagttgaggttcctctagc

SEQ ID NO: 237071 - DNA, 25 bp, Artificial
  probe
  misc_feature (1)..(25): SEQ ID NO: 7120; WAN024G9Z_at; Start 3; Stop 27
gctacaagctcagcttgaccttggg

SEQ ID NO: 237072 - DNA, 25 bp, Artificial
  probe
  misc_feature (1)..(25): SEQ ID NO: 7120; WAN024G9Z_at; Start 38; Stop 62
atttagttgaggttcctctagctca

SEQ ID NO: 237073 - DNA, 25 bp, Artificial
  probe
  misc_feature (1)..(25): SEQ ID NO: 7120; WAN024G9Z_at; Start 12; Stop 36
tcagcttgaccttggggttggacga

SEQ ID NO: 237074 - DNA, 25 bp, Artificial
  probe
  misc_feature (1)..(25): SEQ ID NO: 7120; WAN024G9Z_at; Start 44; Stop 68
ttgaggttcctctagctcaatcttg

SEQ ID NO: 237075 - DNA, 25 bp, Artificial
  probe
  misc_feature (1)..(25): SEQ ID NO: 7120; WAN024G9Z_at; Start 2; Stop 26
tgctacaagctcagcttgaccttgg

SEQ ID NO: 237076 - DNA, 25 bp, Artificial
  probe
  misc_feature (1)..(25): SEQ ID NO: 7120; WAN024G9Z_at; Start 33; Stop 57
acgagatttagttgaggttcctcta

SEQ ID NO: 237077 - DNA, 25 bp, Artificial
  probe
  misc_feature (1)..(25): SEQ ID NO: 7120; WAN024G9Z_at; Start 43; Stop 67
gttgaggttcctctagctcaatctt

SEQ ID NO: 237078 - DNA, 25 bp, Artificial
  probe
  misc_feature (1)..(25): SEQ ID NO: 7120; WAN024G9Z_at; Start 48; Stop 72
ggttcctctagctcaatcttgtgag

SEQ ID NO: 237079 - DNA, 25 bp, Artificial
  probe
  misc_feature (1)..(25): SEQ ID NO: 7120; WAN024G9Z_at; Start 34; Stop 58
cgagatttagttgaggttcctctag

SEQ ID NO: 237080 - DNA, 25 bp, Artificial
  probe
  misc_feature (1)..(25): SEQ ID NO: 7120; WAN024G9Z_at; Start 54; Stop 78
tctagctcaatcttgtgaggaagct

SEQ ID NO: 237081 - DNA, 25 bp, Artificial
  probe
  misc_feature (1)..(25): SEQ ID NO: 7120; WAN024G9Z_at; Start 53; Stop 77
ctctagctcaatcttgtgaggaagc

SEQ ID NO: 237082 - DNA, 25 bp, Artificial
  probe
  misc_feature (1)..(25): SEQ ID NO: 7120; WAN024G9Z_at; Start 30; Stop 54
tggacgagatttagttgaggttcct

SEQ ID NO: 237083 - DNA, 25 bp, Artificial
  probe
  misc_feature (1)..(25): SEQ ID NO: 7120; WAN024G9Z_at; Start 45; Stop 69
tgaggttcctctagctcaatcttgt

SEQ ID NO: 237084 - DNA, 25 bp, Artificial
  probe
  misc_feature (1)..(25): SEQ ID NO: 7120; WAN024G9Z_at; Start 50; Stop 74
ttcctctagctcaatcttgtgagga

SEQ ID NO: 237085 - DNA, 25 bp, Artificial
  probe
  misc_feature (1)..(25): SEQ ID NO: 7120; WAN024G9Z_at; Start 39; Stop 63
tttagttgaggttcctctagctcaa

SEQ ID NO: 237086 - DNA, 25 bp, Artificial
  probe
  misc_feature (1)..(25): SEQ ID NO: 7120; WAN024G9Z_at; Start 37; Stop 61
gatttagttgaggttcctctagctc

SEQ ID NO: 237087 - DNA, 25 bp, Artificial
  probe
  misc_feature (1)..(25): SEQ ID NO: 7120; WAN024G9Z_at; Start 16; Stop 40
cttgaccttggggttggacgagatt

SEQ ID NO: 237088 - DNA, 25 bp, Artificial
  probe
  misc_feature (1)..(25): SEQ ID NO: 7120; WAN024G9Z_at; Start 49; Stop 73
gttcctctagctcaatcttgtgagg

SEQ ID NO: 237089 - DNA, 25 bp, Artificial
  probe
  misc_feature (1)..(25): SEQ ID NO: 7120; WAN024G9Z_at; Start 32; Stop 56
gacgagatttagttgaggttcctct

SEQ ID NO: 237090 - DNA, 25 bp, Artificial
  probe
  misc_feature (1)..(25): SEQ ID NO: 7120; WAN024G9Z_at; Start 41; Stop 65
tagttgaggttcctctagctcaatc

SEQ ID NO: 237091 - DNA, 25 bp, Artificial
  probe
  misc_feature (1)..(25): SEQ ID NO: 3449; WAN024GA2_at; Start 384; Stop 408
cattgatactttgagcttccctgac

SEQ ID NO: 237092 - DNA, 25 bp, Artificial
  probe
  misc_feature (1)..(25): SEQ ID NO: 3449; WAN024GA2_at; Start 109; Stop 133
aacaagattcatacacaggctgagt

SEQ ID NO: 237093 - DNA, 25 bp, Artificial
  probe
  misc_feature (1)..(25): SEQ ID NO: 3449; WAN024GA2_at; Start 469; Stop 493
gctcaaaagtgctttgaagaactga

SEQ ID NO: 237094 - DNA, 25 bp, Artificial
  probe
  misc_feature (1)..(25): SEQ ID NO: 3449; WAN024GA2_at; Start 314; Stop 338
ggatgcgcccagttcaacaccaagt

SEQ ID NO: 237095 - DNA, 25 bp, Artificial
  probe
  misc_feature (1)..(25): SEQ ID NO: 3449; WAN024GA2_at; Start 63; Stop 87
taaatcagaacaccgccaccaactt

SEQ ID NO: 237096 - DNA, 25 bp, Artificial
  probe
  misc_feature (1)..(25): SEQ ID NO: 3449; WAN024GA2_at; Start 433; Stop 457
gatgtctgtcttatcatctgtgaag

SEQ ID NO: 237097 - DNA, 25 bp, Artificial
  probe
  misc_feature (1)..(25): SEQ ID NO: 3449; WAN024GA2_at; Start 419; Stop 443
ccctttgtggtaatgatgtctgtct

SEQ ID NO: 237098 - DNA, 25 bp, Artificial
  probe
  misc_feature (1)..(25): SEQ ID NO: 3449; WAN024GA2_at; Start 212; Stop 236
caaaagtccgcgaagaagatagcgc

SEQ ID NO: 237099 - DNA, 25 bp, Artificial
  probe
  misc_feature (1)..(25): SEQ ID NO: 3449; WAN024GA2_at; Start 296; Stop 320
tggaagacgcccttgtctggatgcg

SEQ ID NO: 237100 - DNA, 25 bp, Artificial
  probe
  misc_feature (1)..(25): SEQ ID NO: 3449; WAN024GA2_at; Start 160; Stop 184
attcaagtaacccaggcaaccctct

SEQ ID NO: 237101 - DNA, 25 bp, Artificial
  probe
  misc_feature (1)..(25): SEQ ID NO: 3449; WAN024GA2_at; Start 252; Stop 276
caatggttccatctcaaaatgggaa

SEQ ID NO: 237102 - DNA, 25 bp, Artificial
  probe
  misc_feature (1)..(25): SEQ ID NO: 3449; WAN024GA2_at; Start 368; Stop 392
aatcctttggttctatcattgatac

SEQ ID NO: 237103 - DNA, 25 bp, Artificial
  probe
  misc_feature (1)..(25): SEQ ID NO: 3449; WAN024GA2_at; Start 393; Stop 417
tttgagcttccctgacgctatcgct

SEQ ID NO: 237104 - DNA, 25 bp, Artificial
  probe
  misc_feature (1)..(25): SEQ ID NO: 3449; WAN024GA2_at; Start 179; Stop 203
ccctctcacgcgacatcaaaaatat

SEQ ID NO: 237105 - DNA, 25 bp, Artificial
  probe
  misc_feature (1)..(25): SEQ ID NO: 3449; WAN024GA2_at; Start 358; Stop 382
ggactggctcaatcctttggttcta

SEQ ID NO: 237106 - DNA, 25 bp, Artificial
  probe
  misc_feature (1)..(25): SEQ ID NO: 3449; WAN024GA2_at; Start 229; Stop 253
gatagcgcttattatgttcttaaca

SEQ ID NO: 237107 - DNA, 25 bp, Artificial
  probe
  misc_feature (1)..(25): SEQ ID NO: 3449; WAN024GA2_at; Start 500; Stop 524
tcgccccaccatttttctttgaaga

SEQ ID NO: 237108 - DNA, 25 bp, Artificial
  probe
  misc_feature (1)..(25): SEQ ID NO: 3449; WAN024GA2_at; Start 263; Stop 287
tctcaaaatgggaaaaacgtctcga

SEQ ID NO: 237109 - DNA, 25 bp, Artificial
  probe
  misc_feature (1)..(25): SEQ ID NO: 3449; WAN024GA2_at; Start 405; Stop 429
tgacgctatcgctaccctttgtggt

SEQ ID NO: 237110 - DNA, 25 bp, Artificial
  probe
  misc_feature (1)..(25): SEQ ID NO: 3449; WAN024GA2_at; Start 204; Stop 228
gaacctatcaaaagtccgcgaagaa

SEQ ID NO: 237111 - DNA, 25 bp, Artificial
  probe
  misc_feature (1)..(25): SEQ ID NO: 3449; WAN024GA2_at; Start 199; Stop 223
aatatgaacctatcaaaagtccgcg

SEQ ID NO: 237112 - DNA, 25 bp, Artificial
  probe
  misc_feature (1)..(25): SEQ ID NO: 3449; WAN024GA2_at; Start 33; Stop 57
ccttgctaaaaggagttacattatt

SEQ ID NO: 237113 - DNA, 25 bp, Artificial
  probe
  misc_feature (1)..(25): SEQ ID NO: 3449; WAN024GA2_at; Start 126; Stop 150
ggctgagttgcaagcccttcttgct

SEQ ID NO: 237114 - DNA, 25 bp, Artificial
  probe
  misc_feature (1)..(25): SEQ ID NO: 3449; WAN024GA2_at; Start 323; Stop 347
cagttcaacaccaagtcctactaaa

SEQ ID NO: 237115 - DNA, 25 bp, Artificial
  probe
  misc_feature (1)..(25): SEQ ID NO: 3449; WAN024GA2_at; Start 306; Stop 330
ccttgtctggatgcgcccagttcaa

SEQ ID NO: 237116 - DNA, 25 bp, Artificial
  probe
  misc_feature (1)..(25): SEQ ID NO: 3449; WAN024GA2_at; Start 184; Stop 208
tcacgcgacatcaaaaatatgaacc

SEQ ID NO: 237117 - DNA, 25 bp, Artificial
  probe
  misc_feature (1)..(25): SEQ ID NO: 3449; WAN024GA2_at; Start 241; Stop 265
tatgttcttaacaatggttccatct

SEQ ID NO: 237118 - DNA, 25 bp, Artificial
  probe
  misc_feature (1)..(25): SEQ ID NO: 3449; WAN024GA2_at; Start 89; Stop 113
tacgcgctcttatcacaaaaaacaa

SEQ ID NO: 237119 - DNA, 25 bp, Artificial
  probe
  misc_feature (1)..(25): SEQ ID NO: 3449; WAN024GA2_at; Start 77; Stop 101
gccaccaacttatacgcgctcttat

SEQ ID NO: 237120 - DNA, 25 bp, Artificial
  probe
  misc_feature (1)..(25): SEQ ID NO: 3449; WAN024GA2_at; Start 118; Stop 142
catacacaggctgagttgcaagccc

SEQ ID NO: 237121 - DNA, 25 bp, Artificial
  probe
  misc_feature (1)..(25): SEQ ID NO: 3449; WAN024GA2_at; Start 57; Stop 81
tatgaataaatcagaacaccgccac

SEQ ID NO: 237122 - DNA, 25 bp, Artificial
  probe
  misc_feature (1)..(25): SEQ ID NO: 3449; WAN024GA2_at; Start 153; Stop 177
gaacgacattcaagtaacccaggca

SEQ ID NO: 237123 - DNA, 25 bp, Artificial
  probe
  misc_feature (1)..(25): SEQ ID NO: 3449; WAN024GA2_at; Start 218; Stop 242
tccgcgaagaagatagcgcttatta

SEQ ID NO: 237124 - DNA, 25 bp, Artificial
  probe
  misc_feature (1)..(25): SEQ ID NO: 3449; WAN024GA2_at; Start 344; Stop 368
taaaaacccttcctggactggctca

SEQ ID NO: 237125 - DNA, 25 bp, Artificial
  probe
  misc_feature (1)..(25): SEQ ID NO: 5007; WAN024GA3_at; Start 1361; Stop 1385
tccgtggcaatgaagctcaccaagc

SEQ ID NO: 237126 - DNA, 25 bp, Artificial
  probe
  misc_feature (1)..(25): SEQ ID NO: 5007; WAN024GA3_at; Start 1260; Stop 1284
tgaaaacggtctggtgactagccca

SEQ ID NO: 237127 - DNA, 25 bp, Artificial
  probe
  misc_feature (1)..(25): SEQ ID NO: 5007; WAN024GA3_at; Start 1108; Stop 1132
caagtcaaggctgattggtcaaacg

SEQ ID NO: 237128 - DNA, 25 bp, Artificial
  probe
  misc_feature (1)..(25): SEQ ID NO: 5007; WAN024GA3_at; Start 1330; Stop 1354
tattctcgtaatctcttagctggcg

SEQ ID NO: 237129 - DNA, 25 bp, Artificial
  probe
  misc_feature (1)..(25): SEQ ID NO: 5007; WAN024GA3_at; Start 1017; Stop 1041
tggagactaccagcaaatcgaggct

SEQ ID NO: 237130 - DNA, 25 bp, Artificial
  probe
  misc_feature (1)..(25): SEQ ID NO: 5007; WAN024GA3_at; Start 559; Stop 583
gactaccactactttaacggcaaga

SEQ ID NO: 237131 - DNA, 25 bp, Artificial
  probe
  misc_feature (1)..(25): SEQ ID NO: 5007; WAN024GA3_at; Start 1675; Stop 1699
ttactaggacaggaaacagactttc

SEQ ID NO: 237132 - DNA, 25 bp, Artificial
  probe
  misc_feature (1)..(25): SEQ ID NO: 5007; WAN024GA3_at; Start 1275; Stop 1299
gactagcccaggtggttatccaggt

SEQ ID NO: 237133 - DNA, 25 bp, Artificial
  probe
  misc_feature (1)..(25): SEQ ID NO: 5007; WAN024GA3_at; Start 2063; Stop 2087
taagtgctagaaccattgacaacgg

SEQ ID NO: 237134 - DNA, 25 bp, Artificial
  probe
  misc_feature (1)..(25): SEQ ID NO: 5007; WAN024GA3_at; Start 1763; Stop 1787
tcggtgggcaagaaaactgtgaaac

SEQ ID NO: 237135 - DNA, 25 bp, Artificial
  probe
  misc_feature (1)..(25): SEQ ID NO: 5007; WAN024GA3_at; Start 709; Stop 733
ggaaaaatccctgccatcatgacag

SEQ ID NO: 237136 - DNA, 25 bp, Artificial
  probe
  misc_feature (1)..(25): SEQ ID NO: 5007; WAN024GA3_at; Start 2257; Stop 2281
tacaagctaaaagaaggagacactc

SEQ ID NO: 237137 - DNA, 25 bp, Artificial
  probe
  misc_feature (1)..(25): SEQ ID NO: 5007; WAN024GA3_at; Start 543; Stop 567
tattccggaggataatgactaccac

SEQ ID NO: 237138 - DNA, 25 bp, Artificial
  probe
  misc_feature (1)..(25): SEQ ID NO: 5007; WAN024GA3_at; Start 940; Stop 964
tacttccttccgagaggctttgcca

SEQ ID NO: 237139 - DNA, 25 bp, Artificial
  probe
  misc_feature (1)..(25): SEQ ID NO: 5007; WAN024GA3_at; Start 1928; Stop 1952
tgactaaagatctccacctaaacgg

SEQ ID NO: 237140 - DNA, 25 bp, Artificial
  probe
  misc_feature (1)..(25): SEQ ID NO: 5007; WAN024GA3_at; Start 2127; Stop 2151
tagaccagaggcacaacgagtcgtg

SEQ ID NO: 237141 - DNA, 25 bp, Artificial
  probe
  misc_feature (1)..(25): SEQ ID NO: 5007; WAN024GA3_at; Start 1346; Stop 1370
tagctggcgactatatccgtggcaa

SEQ ID NO: 237142 - DNA, 25 bp, Artificial
  probe
  misc_feature (1)..(25): SEQ ID NO: 5007; WAN024GA3_at; Start 2083; Stop 2107
aacggtcgctatcacatgttggaaa

SEQ ID NO: 237143 - DNA, 25 bp, Artificial
  probe
  misc_feature (1)..(25): SEQ ID NO: 5007; WAN024GA3_at; Start 1828; Stop 1852
tacccagataaggattttgagcgct

SEQ ID NO: 237144 - DNA, 25 bp, Artificial
  probe
  misc_feature (1)..(25): SEQ ID NO: 5007; WAN024GA3_at; Start 1208; Stop 1232
tagaagttatcattgccgaggcagg

SEQ ID NO: 237145 - DNA, 25 bp, Artificial
  probe
  misc_feature (1)..(25): SEQ ID NO: 5007; WAN024GA3_at; Start 1473; Stop 1497
ccataaagtaaaggcagaggttgtc

SEQ ID NO: 237146 - DNA, 25 bp, Artificial
  probe
  misc_feature (1)..(25): SEQ ID NO: 5007; WAN024GA3_at; Start 744; Stop 768
tcatcagggaaccaatgacaaggct

SEQ ID NO: 237147 - DNA, 25 bp, Artificial
  probe
  misc_feature (1)..(25): SEQ ID NO: 5007; WAN024GA3_at; Start 1401; Stop 1425
gaaagctcagctagaccgaaaaact

SEQ ID NO: 237148 - DNA, 25 bp, Artificial
  probe
  misc_feature (1)..(25): SEQ ID NO: 5007; WAN024GA3_at; Start 1713; Stop 1737
tatctggcaggacaatacagctcca

SEQ ID NO: 237149 - DNA, 25 bp, Artificial
  probe
  misc_feature (1)..(25): SEQ ID NO: 5007; WAN024GA3_at; Start 985; Stop 1009
ggtaccaaagactcgacaggtttca

SEQ ID NO: 237150 - DNA, 25 bp, Artificial
  probe
  misc_feature (1)..(25): SEQ ID NO: 5007; WAN024GA3_at; Start 1946; Stop 1970
taaacggtcgcgctcagctcaatct

SEQ ID NO: 237151 - DNA, 25 bp, Artificial
  probe
  misc_feature (1)..(25): SEQ ID NO: 5007; WAN024GA3_at; Start 760; Stop 784
gacaaggctagtgacaaggctctct

SEQ ID NO: 237152 - DNA, 25 bp, Artificial
  probe
  misc_feature (1)..(25): SEQ ID NO: 5007; WAN024GA3_at; Start 1176; Stop 1200
caatggtcttgcgactacaggagtc

SEQ ID NO: 237153 - DNA, 25 bp, Artificial
  probe
  misc_feature (1)..(25): SEQ ID NO: 5007; WAN024GA3_at; Start 1291; Stop 1315
tatccaggtgaggactttgactccc

SEQ ID NO: 237154 - DNA, 25 bp, Artificial
  probe
  misc_feature (1)..(25): SEQ ID NO: 5007; WAN024GA3_at; Start 1083; Stop 1107
ctttactgatcacacgcgccagcgt

SEQ ID NO: 237155 - DNA, 25 bp, Artificial
  probe
  misc_feature (1)..(25): SEQ ID NO: 5007; WAN024GA3_at; Start 674; Stop 698
tagtaaaggttagcattattcgccc

SEQ ID NO: 237156 - DNA, 25 bp, Artificial
  probe
  misc_feature (1)..(25): SEQ ID NO: 5007; WAN024GA3_at; Start 729; Stop 753
gacagccagcccttatcatcaggga

SEQ ID NO: 237157 - DNA, 25 bp, Artificial
  probe
  misc_feature (1)..(25): SEQ ID NO: 5007; WAN024GA3_at; Start 1748; Stop 1772
tatcacttgataacttcggtgggca

SEQ ID NO: 237158 - DNA, 25 bp, Artificial
  probe
  misc_feature (1)..(25): SEQ ID NO: 5007; WAN024GA3_at; Start 642; Stop 666
tgtcgatactgaccaaaaagggcta

SEQ ID NO: 237159 - DNA, 25 bp, Artificial
  probe
  misc_feature (1)..(25): SEQ ID NO: 209; WAN024GA4-3_at; Start 1383; Stop 1407
gcaattccgagattggttcgtgaga

SEQ ID NO: 237160 - DNA, 25 bp, Artificial
  probe
  misc_feature (1)..(25): SEQ ID NO: 209; WAN024GA4-3_at; Start 670; Stop 694
gtcagcagcttgtctcggaacttca

SEQ ID NO: 237161 - DNA, 25 bp, Artificial
  probe
  misc_feature (1)..(25): SEQ ID NO: 209; WAN024GA4-3_at; Start 1297; Stop 1321
catctgatgatatgcttgcacttga

SEQ ID NO: 237162 - DNA, 25 bp, Artificial
  probe
  misc_feature (1)..(25): SEQ ID NO: 209; WAN024GA4-3_at; Start 1460; Stop 1484
ggatgagaatcttaatgccaggcag

SEQ ID NO: 237163 - DNA, 25 bp, Artificial
  probe
  misc_feature (1)..(25): SEQ ID NO: 209; WAN024GA4-3_at; Start 122; Stop 146
catgacaagaggaattcagacagcc

SEQ ID NO: 237164 - DNA, 25 bp, Artificial
  probe
  misc_feature (1)..(25): SEQ ID NO: 209; WAN024GA4-3_at; Start 140; Stop 164
gacagcctcgggtgatgaaattggt

SEQ ID NO: 237165 - DNA, 25 bp, Artificial
  probe
  misc_feature (1)..(25): SEQ ID NO: 209; WAN024GA4-3_at; Start 712; Stop 736
taaatgagttggacttcagggttcg

SEQ ID NO: 237166 - DNA, 25 bp, Artificial
  probe
  misc_feature (1)..(25): SEQ ID NO: 209; WAN024GA4-3_at; Start 975; Stop 999
gctattggcaatatcccgcaggttt

SEQ ID NO: 237167 - DNA, 25 bp, Artificial
  probe
  misc_feature (1)..(25): SEQ ID NO: 209; WAN024GA4-3_at; Start 233; Stop 257
tcctgaaaaagggagcgactatgct

SEQ ID NO: 237168 - DNA, 25 bp, Artificial
  probe
  misc_feature (1)..(25): SEQ ID NO: 209; WAN024GA4-3_at; Start 215; Stop 239
tatttttaacaaccgctatcctgaa

SEQ ID NO: 237169 - DNA, 25 bp, Artificial
  probe
  misc_feature (1)..(25): SEQ ID NO: 209; WAN024GA4-3_at; Start 528; Stop 552
gattattttcgtgcagatccaagag

SEQ ID NO: 237170 - DNA, 25 bp, Artificial
  probe
  misc_feature (1)..(25): SEQ ID NO: 209; WAN024GA4-3_at; Start 443; Stop 467
tcgaggaacccgtctatgtaaagat

SEQ ID NO: 237171 - DNA, 25 bp, Artificial
  probe
  misc_feature (1)..(25): SEQ ID NO: 209; WAN024GA4-3_at; Start 789; Stop 813
ctaactgctgttacaagtgaaacca

SEQ ID NO: 237172 - DNA, 25 bp, Artificial
  probe
  misc_feature (1)..(25): SEQ ID NO: 209; WAN024GA4-3_at; Start 1257; Stop 1281
gaggagtccatttctaagctatacc

SEQ ID NO: 237173 - DNA, 25 bp, Artificial
  probe
  misc_feature (1)..(25): SEQ ID NO: 209; WAN024GA4-3_at; Start 477; Stop 501
cctgagcaggataaggaaaacttct

SEQ ID NO: 237174 - DNA, 25 bp, Artificial
  probe
  misc_feature (1)..(25): SEQ ID NO: 209; WAN024GA4-3_at; Start 953; Stop 977
gaagacggctagagctctttctgct

SEQ ID NO: 237175 - DNA, 25 bp, Artificial
  probe
  misc_feature (1)..(25): SEQ ID NO: 209; WAN024GA4-3_at; Start 429; Stop 453
tggcagatgattggtcgaggaaccc

SEQ ID NO: 237176 - DNA, 25 bp, Artificial
  probe
  misc_feature (1)..(25): SEQ ID NO: 209; WAN024GA4-3_at; Start 1189; Stop 1213
ttttgcaggtcaacgatcttcggtc

SEQ ID NO: 237177 - DNA, 25 bp, Artificial
  probe
  misc_feature (1)..(25): SEQ ID NO: 209; WAN024GA4-3_at; Start 1414; Stop 1438
gcttagatagagagtctgccaatcg

SEQ ID NO: 237178 - DNA, 25 bp, Artificial
  probe
  misc_feature (1)..(25): SEQ ID NO: 209; WAN024GA4-3_at; Start 1152; Stop 1176
gatcgtatactctccactgttcacg

SEQ ID NO: 237179 - DNA, 25 bp, Artificial
  probe
  misc_feature (1)..(25): SEQ ID NO: 209; WAN024GA4-3_at; Start 546; Stop 570
ccaagagatggagagggtcgtcaca

SEQ ID NO: 237180 - DNA, 25 bp, Artificial
  probe
  misc_feature (1)..(25): SEQ ID NO: 209; WAN024GA4-3_at; Start 938; Stop 962
tatttcccaagtgatgaagacggct

SEQ ID NO: 237181 - DNA, 25 bp, Artificial
  probe
  misc_feature (1)..(25): SEQ ID NO: 209; WAN024GA4-3_at; Start 907; Stop 931
ggcaactgacagctaaatcttccac

SEQ ID NO: 237182 - DNA, 25 bp, Artificial
  probe
  misc_feature (1)..(25): SEQ ID NO: 209; WAN024GA4-3_at; Start 1027; Stop 1051
tacaggagcctgaattttggaaaga

SEQ ID NO: 237183 - DNA, 25 bp, Artificial
  probe
  misc_feature (1)..(25): SEQ ID NO: 209; WAN024GA4-3_at; Start 687; Stop 711
gaacttcaaggtcgtatagagagct

SEQ ID NO: 237184 - DNA, 25 bp, Artificial
  probe
  misc_feature (1)..(25): SEQ ID NO: 209; WAN024GA4-3_at; Start 1012; Stop 1036
aaattatcaggaaagtacaggagcc

SEQ ID NO: 237185 - DNA, 25 bp, Artificial
  probe
  misc_feature (1)..(25): SEQ ID NO: 209; WAN024GA4-3_at; Start 1172; Stop 1196
tcacgagaccacagcatttttgcag

SEQ ID NO: 237186 - DNA, 25 bp, Artificial
  probe
  misc_feature (1)..(25): SEQ ID NO: 209; WAN024GA4-3_at; Start 609; Stop 633
gacttgattcgagaacttcagggac

SEQ ID NO: 237187 - DNA, 25 bp, Artificial
  probe
  misc_feature (1)..(25): SEQ ID NO: 209; WAN024GA4-3_at; Start 625; Stop 649
ttcagggactccaataccaagaaga

SEQ ID NO: 237188 - DNA, 25 bp, Artificial
  probe
  misc_feature (1)..(25): SEQ ID NO: 209; WAN024GA4-3_at; Start 1538; Stop 1562
gacgaaagtgttaacgcaagagccg

SEQ ID NO: 237189 - DNA, 25 bp, Artificial
  probe
  misc_feature (1)..(25): SEQ ID NO: 209; WAN024GA4-3_at; Start 1646; Stop 1670
caataatcgagctggagaagcggct

SEQ ID NO: 237190 - DNA, 25 bp, Artificial
  probe
  misc_feature (1)..(25): SEQ ID NO: 209; WAN024GA4-3_at; Start 651; Stop 675
cagtttgcgagagcataccgtcagc

SEQ ID NO: 237191 - DNA, 25 bp, Artificial
  probe
  misc_feature (1)..(25): SEQ ID NO: 209; WAN024GA4-3_at; Start 990; Stop 1014
ccgcaggtttttgagcaggctgaaa

SEQ ID NO: 237192 - DNA, 25 bp, Artificial
  probe
  misc_feature (1)..(25): SEQ ID NO: 209; WAN024GA4-3_at; Start 462; Stop 486
aaagatttatttggacctgagcagg

SEQ ID NO: 237193 - DNA, 25 bp, Artificial
  probe
  misc_feature (1)..(25): SEQ ID NO: 2530; WAN024GA4-5_at; Start 1020; Stop 1044
tagggacgatatttccgggcgtcac

SEQ ID NO: 237194 - DNA, 25 bp, Artificial
  probe
  misc_feature (1)..(25): SEQ ID NO: 2530; WAN024GA4-5_at; Start 901; Stop 925
tatatacttgatggtccgaaccgcc

SEQ ID NO: 237195 - DNA, 25 bp, Artificial
  probe
  misc_feature (1)..(25): SEQ ID NO: 2530; WAN024GA4-5_at; Start 697; Stop 721
gatggtctcaagcacggttcaggaa

SEQ ID NO: 237196 - DNA, 25 bp, Artificial
  probe
  misc_feature (1)..(25): SEQ ID NO: 2530; WAN024GA4-5_at; Start 1054; Stop 1078
catgccattgcaagcgtttgtgaag

SEQ ID NO: 237197 - DNA, 25 bp, Artificial
  probe
  misc_feature (1)..(25): SEQ ID NO: 2530; WAN024GA4-5_at; Start 818; Stop 842
tacaggtcaaagaatatgctgaagc

SEQ ID NO: 237198 - DNA, 25 bp, Artificial
  probe
  misc_feature (1)..(25): SEQ ID NO: 2530; WAN024GA4-5_at; Start 670; Stop 694
gaaaactgtcgtgttgagatagccg

SEQ ID NO: 237199 - DNA, 25 bp, Artificial
  probe
  misc_feature (1)..(25): SEQ ID NO: 2530; WAN024GA4-5_at; Start 1484; Stop 1508
taggcttaacagctactccgcgtca

SEQ ID NO: 237200 - DNA, 25 bp, Artificial
  probe
  misc_feature (1)..(25): SEQ ID NO: 2530; WAN024GA4-5_at; Start 1629; Stop 1653
caaactgaaactacctacggatggt

SEQ ID NO: 237201 - DNA, 25 bp, Artificial
  probe
  misc_feature (1)..(25): SEQ ID NO: 2530; WAN024GA4-5_at; Start 933; Stop 957
tgcaggcttttactctcaagaagaa

SEQ ID NO: 237202 - DNA, 25 bp, Artificial
  probe
  misc_feature (1)..(25): SEQ ID NO: 2530; WAN024GA4-5_at; Start 81; Stop 105
tgctacatcaactgtggctactgcc

SEQ ID NO: 237203 - DNA, 25 bp, Artificial
  probe
  misc_feature (1)..(25): SEQ ID NO: 2530; WAN024GA4-5_at; Start 133; Stop 157
gctgtccattggatatatagtcacg

SEQ ID NO: 237204 - DNA, 25 bp, Artificial
  probe
  misc_feature (1)..(25): SEQ ID NO: 2530; WAN024GA4-5_at; Start 99; Stop 123
tactgcctttatggcgcgtcgtgct

SEQ ID NO: 237205 - DNA, 25 bp, Artificial
  probe
  misc_feature (1)..(25): SEQ ID NO: 2530; WAN024GA4-5_at; Start 1033; Stop 1057
tccgggcgtcactaccaaaaacatg

SEQ ID NO: 237206 - DNA, 25 bp, Artificial
  probe
  misc_feature (1)..(25): SEQ ID NO: 2530; WAN024GA4-5_at; Start 1359; Stop 1383
tcaagaagaagtaaatcaacgccct

SEQ ID NO: 237207 - DNA, 25 bp, Artificial
  probe
  misc_feature (1)..(25): SEQ ID NO: 2530; WAN024GA4-5_at; Start 482; Stop 506
cagaactgcctgattttcatgaaca

SEQ ID NO: 237208 - DNA, 25 bp, Artificial
  probe
  misc_feature (1)..(25): SEQ ID NO: 2530; WAN024GA4-5_at; Start 636; Stop 660
tatcgatctccgtttagcaggatgg

SEQ ID NO: 237209 - DNA, 25 bp, Artificial
  probe
  misc_feature (1)..(25): SEQ ID NO: 2530; WAN024GA4-5_at; Start 543; Stop 567
tactgaaaaacgtgagactgcagcg

SEQ ID NO: 237210 - DNA, 25 bp, Artificial
  probe
  misc_feature (1)..(25): SEQ ID NO: 2530; WAN024GA4-5_at; Start 1159; Stop 1183
gatatcttatcacgtcataactggg

SEQ ID NO: 237211 - DNA, 25 bp, Artificial
  probe
  misc_feature (1)..(25): SEQ ID NO: 2530; WAN024GA4-5_at; Start 280; Stop 304
catgctgctcatggtggtgaaatta

SEQ ID NO: 237212 - DNA, 25 bp, Artificial
  probe
  misc_feature (1)..(25): SEQ ID NO: 2530; WAN024GA4-5_at; Start 498; Stop 522
tcatgaacagatggctgctcagtcc

SEQ ID NO: 237213 - DNA, 25 bp, Artificial
  probe
  misc_feature (1)..(25): SEQ ID NO: 2530; WAN024GA4-5_at; Start 918; Stop 942
gaaccgccgccagattgcaggcttt

SEQ ID NO: 237214 - DNA, 25 bp, Artificial
  probe
  misc_feature (1)..(25): SEQ ID NO: 2530; WAN024GA4-5_at; Start 232; Stop 256
gattctgaactccacaagcagatag

SEQ ID NO: 237215 - DNA, 25 bp, Artificial
  probe
  misc_feature (1)..(25): SEQ ID NO: 2530; WAN024GA4-5_at; Start 1205; Stop 1229
ccgatagaacttccttggttaagca

SEQ ID NO: 237216 - DNA, 25 bp, Artificial
  probe
  misc_feature (1)..(25): SEQ ID NO: 2530; WAN024GA4-5_at; Start 958; Stop 982
ttgcaattagtgatggatagacgtc

SEQ ID NO: 237217 - DNA, 25 bp, Artificial
  probe
  misc_feature (1)..(25): SEQ ID NO: 2530; WAN024GA4-5_at; Start 1289; Stop 1313
ataaagaaggagctcaatcaagtcg

SEQ ID NO: 237218 - DNA, 25 bp, Artificial
  probe
  misc_feature (1)..(25): SEQ ID NO: 2530; WAN024GA4-5_at; Start 513; Stop 537
tgctcagtccgtagaagttcaagag

SEQ ID NO: 237219 - DNA, 25 bp, Artificial
  probe
  misc_feature (1)..(25): SEQ ID NO: 2530; WAN024GA4-5_at; Start 1187; Stop 1211
aaaacgttctcttcttagccgatag

SEQ ID NO: 237220 - DNA, 25 bp, Artificial
  probe
  misc_feature (1)..(25): SEQ ID NO: 2530; WAN024GA4-5_at; Start 558; Stop 582
gactgcagcgcaacggcaagatgtg

SEQ ID NO: 237221 - DNA, 25 bp, Artificial
  probe
  misc_feature (1)..(25): SEQ ID NO: 2530; WAN024GA4-5_at; Start 845; Stop 869
tggagaaacatatcggctatcagcc

SEQ ID NO: 237222 - DNA, 25 bp, Artificial
  probe
  misc_feature (1)..(25): SEQ ID NO: 2530; WAN024GA4-5_at; Start 1562; Stop 1586
catatgcatatgatttggaagaggc

SEQ ID NO: 237223 - DNA, 25 bp, Artificial
  probe
  misc_feature (1)..(25): SEQ ID NO: 2530; WAN024GA4-5_at; Start 1325; Stop 1349
caacttatccgaccatgattggagc

SEQ ID NO: 237224 - DNA, 25 bp, Artificial
  probe
  misc_feature (1)..(25): SEQ ID NO: 2530; WAN024GA4-5_at; Start 1097; Stop 1121
gacaggcacttttggttatggcaac

SEQ ID NO: 237225 - DNA, 25 bp, Artificial
  probe
  misc_feature (1)..(25): SEQ ID NO: 2530; WAN024GA4-5_at; Start 781; Stop 805
gctaaaaaagcctctgtcaatccag

SEQ ID NO: 237226 - DNA, 25 bp, Artificial
  probe
  misc_feature (1)..(25): SEQ ID NO: 2530; WAN024GA4-5_at; Start 604; Stop 628
tctgaggcagagacaagaaagctct

SEQ ID NO: 237227 - DNA, 25 bp, Artificial
  probe
  misc_feature (1)..(25): SEQ ID NO: 2661; WAN024GA5_at; Start 140; Stop 164
gtcttgataacagctccaggtacca

SEQ ID NO: 237228 - DNA, 25 bp, Artificial
  probe
  misc_feature (1)..(25): SEQ ID NO: 2661; WAN024GA5_at; Start 255; Stop 279
attgttctctgagtgttgcgtctag

SEQ ID NO: 237229 - DNA, 25 bp, Artificial
  probe
  misc_feature (1)..(25): SEQ ID NO: 2661; WAN024GA5_at; Start 12; Stop 36
cttgcttgaagtgattgatatcgtc

SEQ ID NO: 237230 - DNA, 25 bp, Artificial
  probe
  misc_feature (1)..(25): SEQ ID NO: 2661; WAN024GA5_at; Start 193; Stop 217
cttcatttcagacttatatttcgtc

SEQ ID NO: 237231 - DNA, 25 bp, Artificial
  probe
  misc_feature (1)..(25): SEQ ID NO: 2661; WAN024GA5_at; Start 47; Stop 71
agtttaaaggttgcggctgctccca

SEQ ID NO: 237232 - DNA, 25 bp, Artificial
  probe
  misc_feature (1)..(25): SEQ ID NO: 2661; WAN024GA5_at; Start 106; Stop 130
gatttctttcactgcttgatcaaca

SEQ ID NO: 237233 - DNA, 25 bp, Artificial
  probe
  misc_feature (1)..(25): SEQ ID NO: 2661; WAN024GA5_at; Start 152; Stop 176
gctccaggtaccacaggaacacctg

SEQ ID NO: 237234 - DNA, 25 bp, Artificial
  probe
  misc_feature (1)..(25): SEQ ID NO: 2661; WAN024GA5_at; Start 219; Stop 243
ttttgagatcctctggtttggcacc

SEQ ID NO: 237235 - DNA, 25 bp, Artificial
  probe
  misc_feature (1)..(25): SEQ ID NO: 2661; WAN024GA5_at; Start 144; Stop 168
tgataacagctccaggtaccacagg

SEQ ID NO: 237236 - DNA, 25 bp, Artificial
  probe
  misc_feature (1)..(25): SEQ ID NO: 2661; WAN024GA5_at; Start 32; Stop 56
tcgtcttctgtctcaagtttaaagg

SEQ ID NO: 237237 - DNA, 25 bp, Artificial
  probe
  misc_feature (1)..(25): SEQ ID NO: 2661; WAN024GA5_at; Start 147; Stop 171
taacagctccaggtaccacaggaac

SEQ ID NO: 237238 - DNA, 25 bp, Artificial
  probe
  misc_feature (1)..(25): SEQ ID NO: 2661; WAN024GA5_at; Start 209; Stop 233
tatttcgtctttttgagatcctctg

SEQ ID NO: 237239 - DNA, 25 bp, Artificial
  probe
  misc_feature (1)..(25): SEQ ID NO: 2661; WAN024GA5_at; Start 45; Stop 69
caagtttaaaggttgcggctgctcc

SEQ ID NO: 237240 - DNA, 25 bp, Artificial
  probe
  misc_feature (1)..(25): SEQ ID NO: 2661; WAN024GA5_at; Start 88; Stop 112
ggcaatcattggaagaccgatttct

SEQ ID NO: 237241 - DNA, 25 bp, Artificial
  probe
  misc_feature (1)..(25): SEQ ID NO: 2661; WAN024GA5_at; Start 24; Stop 48
gattgatatcgtcttctgtctcaag

SEQ ID NO: 237242 - DNA, 25 bp, Artificial
  probe
  misc_feature (1)..(25): SEQ ID NO: 2661; WAN024GA5_at; Start 165; Stop 189
caggaacacctgcttttttgaaaag

SEQ ID NO: 237243 - DNA, 25 bp, Artificial
  probe
  misc_feature (1)..(25): SEQ ID NO: 2661; WAN024GA5_at; Start 65; Stop 89
gctcccactccattatcaggtttgg

SEQ ID NO: 237244 - DNA, 25 bp, Artificial
  probe
  misc_feature (1)..(25): SEQ ID NO: 2661; WAN024GA5_at; Start 234; Stop 258
gtttggcaccaaaaacattgaattg

SEQ ID NO: 237245 - DNA, 25 bp, Artificial
  probe
  misc_feature (1)..(25): SEQ ID NO: 2661; WAN024GA5_at; Start 1; Stop 25
atggtcccattcttgcttgaagtga

SEQ ID NO: 237246 - DNA, 25 bp, Artificial
  probe
  misc_feature (1)..(25): SEQ ID NO: 2661; WAN024GA5_at; Start 129; Stop 153
catctgcttccgtcttgataacagc

SEQ ID NO: 237247 - DNA, 25 bp, Artificial
  probe
  misc_feature (1)..(25): SEQ ID NO: 2661; WAN024GA5_at; Start 6; Stop 30
cccattcttgcttgaagtgattgat

SEQ ID NO: 237248 - DNA, 25 bp, Artificial
  probe
  misc_feature (1)..(25): SEQ ID NO: 2661; WAN024GA5_at; Start 56; Stop 80
gttgcggctgctcccactccattat

SEQ ID NO: 237249 - DNA, 25 bp, Artificial
  probe
  misc_feature (1)..(25): SEQ ID NO: 2661; WAN024GA5_at; Start 75; Stop 99
cattatcaggtttggcaatcattgg

SEQ ID NO: 237250 - DNA, 25 bp, Artificial
  probe
  misc_feature (1)..(25): SEQ ID NO: 2661; WAN024GA5_at; Start 184; Stop 208
gaaaagtttcttcatttcagactta

SEQ ID NO: 237251 - DNA, 25 bp, Artificial
  probe
  misc_feature (1)..(25): SEQ ID NO: 2661; WAN024GA5_at; Start 223; Stop 247
gagatcctctggtttggcaccaaaa

SEQ ID NO: 237252 - DNA, 25 bp, Artificial
  probe
  misc_feature (1)..(25): SEQ ID NO: 2661; WAN024GA5_at; Start 42; Stop 66
tctcaagtttaaaggttgcggctgc

SEQ ID NO: 237253 - DNA, 25 bp, Artificial
  probe
  misc_feature (1)..(25): SEQ ID NO: 2661; WAN024GA5_at; Start 122; Stop 146
tgatcaacatctgcttccgtcttga

SEQ ID NO: 237254 - DNA, 25 bp, Artificial
  probe
  misc_feature (1)..(25): SEQ ID NO: 2661; WAN024GA5_at; Start 156; Stop 180
caggtaccacaggaacacctgcttt

SEQ ID NO: 237255 - DNA, 25 bp, Artificial
  probe
  misc_feature (1)..(25): SEQ ID NO: 2661; WAN024GA5_at; Start 99; Stop 123
gaagaccgatttctttcactgcttg

SEQ ID NO: 237256 - DNA, 25 bp, Artificial
  probe
  misc_feature (1)..(25): SEQ ID NO: 2661; WAN024GA5_at; Start 116; Stop 140
actgcttgatcaacatctgcttccg

SEQ ID NO: 237257 - DNA, 25 bp, Artificial
  probe
  misc_feature (1)..(25): SEQ ID NO: 2661; WAN024GA5_at; Start 61; Stop 85
ggctgctcccactccattatcaggt

SEQ ID NO: 237258 - DNA, 25 bp, Artificial
  probe
  misc_feature (1)..(25): SEQ ID NO: 2661; WAN024GA5_at; Start 249; Stop 273
cattgaattgttctctgagtgttgc

SEQ ID NO: 237259 - DNA, 25 bp, Artificial
  probe
  misc_feature (1)..(25): SEQ ID NO: 2661; WAN024GA5_at; Start 70; Stop 94
cactccattatcaggtttggcaatc

SEQ ID NO: 237260 - DNA, 25 bp, Artificial
  probe
  misc_feature (1)..(25): SEQ ID NO: 2661; WAN024GA5_at; Start 81; Stop 105
caggtttggcaatcattggaagacc

SEQ ID NO: 237261 - DNA, 25 bp, Artificial
  probe
  misc_feature (1)..(25): SEQ ID NO: 1554; WAN024GA6_at; Start 175; Stop 199
gagcacataataagaattgtccatc

SEQ ID NO: 237262 - DNA, 25 bp, Artificial
  probe
  misc_feature (1)..(25): SEQ ID NO: 1554; WAN024GA6_at; Start 120; Stop 144
caaattctttgacaattgcttcccc

SEQ ID NO: 237263 - DNA, 25 bp, Artificial
  probe
  misc_feature (1)..(25): SEQ ID NO: 1554; WAN024GA6_at; Start 62; Stop 86
gtaatataatcgtccccctcacgga

SEQ ID NO: 237264 - DNA, 25 bp, Artificial
  probe
  misc_feature (1)..(25): SEQ ID NO: 1554; WAN024GA6_at; Start 223; Stop 247
tgtataggcgtagtcaaaggttgtt

SEQ ID NO: 237265 - DNA, 25 bp, Artificial
  probe
  misc_feature (1)..(25): SEQ ID NO: 1554; WAN024GA6_at; Start 216; Stop 240
caagcggtgtataggcgtagtcaaa

SEQ ID NO: 237266 - DNA, 25 bp, Artificial
  probe
  misc_feature (1)..(25): SEQ ID NO: 1554; WAN024GA6_at; Start 214; Stop 238
gtcaagcggtgtataggcgtagtca

SEQ ID NO: 237267 - DNA, 25 bp, Artificial
  probe
  misc_feature (1)..(25): SEQ ID NO: 1554; WAN024GA6_at; Start 203; Stop 227
taaatcatgaggtcaagcggtgtat

SEQ ID NO: 237268 - DNA, 25 bp, Artificial
  probe
  misc_feature (1)..(25): SEQ ID NO: 1554; WAN024GA6_at; Start 14; Stop 38
taaacatcaatggtaaaaccacctg

SEQ ID NO: 237269 - DNA, 25 bp, Artificial
  probe
  misc_feature (1)..(25): SEQ ID NO: 1554; WAN024GA6_at; Start 42; Stop 66
ggcggttattgtactcgatggtaat

SEQ ID NO: 237270 - DNA, 25 bp, Artificial
  probe
  misc_feature (1)..(25): SEQ ID NO: 1554; WAN024GA6_at; Start 165; Stop 189
ccatatccttgagcacataataaga

SEQ ID NO: 237271 - DNA, 25 bp, Artificial
  probe
  misc_feature (1)..(25): SEQ ID NO: 1554; WAN024GA6_at; Start 171; Stop 195
ccttgagcacataataagaattgtc

SEQ ID NO: 237272 - DNA, 25 bp, Artificial
  probe
  misc_feature (1)..(25): SEQ ID NO: 1554; WAN024GA6_at; Start 2; Stop 26
tgagcaaagttataaacatcaatgg

SEQ ID NO: 237273 - DNA, 25 bp, Artificial
  probe
  misc_feature (1)..(25): SEQ ID NO: 1554; WAN024GA6_at; Start 148; Stop 172
cttgcgcagtttaggatccatatcc

SEQ ID NO: 237274 - DNA, 25 bp, Artificial
  probe
  misc_feature (1)..(25): SEQ ID NO: 1554; WAN024GA6_at; Start 132; Stop 156
caattgcttccccatacttgcgcag

SEQ ID NO: 237275 - DNA, 25 bp, Artificial
  probe
  misc_feature (1)..(25): SEQ ID NO: 1554; WAN024GA6_at; Start 225; Stop 249
tataggcgtagtcaaaggttgttga

SEQ ID NO: 237276 - DNA, 25 bp, Artificial
  probe
  misc_feature (1)..(25): SEQ ID NO: 1554; WAN024GA6_at; Start 81; Stop 105
cacggaagaactcaatatggaaaaa

SEQ ID NO: 237277 - DNA, 25 bp, Artificial
  probe
  misc_feature (1)..(25): SEQ ID NO: 1554; WAN024GA6_at; Start 198; Stop 222
tcttataaatcatgaggtcaagcgg

SEQ ID NO: 237278 - DNA, 25 bp, Artificial
  probe
  misc_feature (1)..(25): SEQ ID NO: 1554; WAN024GA6_at; Start 39; Stop 63
cagggcggttattgtactcgatggt

SEQ ID NO: 237279 - DNA, 25 bp, Artificial
  probe
  misc_feature (1)..(25): SEQ ID NO: 1554; WAN024GA6_at; Start 78; Stop 102
cctcacggaagaactcaatatggaa

SEQ ID NO: 237280 - DNA, 25 bp, Artificial
  probe
  misc_feature (1)..(25): SEQ ID NO: 1554; WAN024GA6_at; Start 220; Stop 244
cggtgtataggcgtagtcaaaggtt

SEQ ID NO: 237281 - DNA, 25 bp, Artificial
  probe
  misc_feature (1)..(25): SEQ ID NO: 1554; WAN024GA6_at; Start 53; Stop 77
tactcgatggtaatataatcgtccc

SEQ ID NO: 237282 - DNA, 25 bp, Artificial
  probe
  misc_feature (1)..(25): SEQ ID NO: 1554; WAN024GA6_at; Start 107; Stop 131
cgttctttcataccaaattctttga

SEQ ID NO: 237283 - DNA, 25 bp, Artificial
  probe
  misc_feature (1)..(25): SEQ ID NO: 1554; WAN024GA6_at; Start 28; Stop 52
aaaaccacctgcagggcggttattg

SEQ ID NO: 237284 - DNA, 25 bp, Artificial
  probe
  misc_feature (1)..(25): SEQ ID NO: 1554; WAN024GA6_at; Start 35; Stop 59
cctgcagggcggttattgtactcga

SEQ ID NO: 237285 - DNA, 25 bp, Artificial
  probe
  misc_feature (1)..(25): SEQ ID NO: 1554; WAN024GA6_at; Start 137; Stop 161
gcttccccatacttgcgcagtttag

SEQ ID NO: 237286 - DNA, 25 bp, Artificial
  probe
  misc_feature (1)..(25): SEQ ID NO: 1554; WAN024GA6_at; Start 201; Stop 225
tataaatcatgaggtcaagcggtgt

SEQ ID NO: 237287 - DNA, 25 bp, Artificial
  probe
  misc_feature (1)..(25): SEQ ID NO: 1554; WAN024GA6_at; Start 76; Stop 100
cccctcacggaagaactcaatatgg

SEQ ID NO: 237288 - DNA, 25 bp, Artificial
  probe
  misc_feature (1)..(25): SEQ ID NO: 1554; WAN024GA6_at; Start 188; Stop 212
gaattgtccatcttataaatcatga

SEQ ID NO: 237289 - DNA, 25 bp, Artificial
  probe
  misc_feature (1)..(25): SEQ ID NO: 1554; WAN024GA6_at; Start 129; Stop 153
tgacaattgcttccccatacttgcg

SEQ ID NO: 237290 - DNA, 25 bp, Artificial
  probe
  misc_feature (1)..(25): SEQ ID NO: 1554; WAN024GA6_at; Start 143; Stop 167
ccatacttgcgcagtttaggatcca

SEQ ID NO: 237291 - DNA, 25 bp, Artificial
  probe
  misc_feature (1)..(25): SEQ ID NO: 1554; WAN024GA6_at; Start 161; Stop 185
ggatccatatccttgagcacataat

SEQ ID NO: 237292 - DNA, 25 bp, Artificial
  probe
  misc_feature (1)..(25): SEQ ID NO: 1554; WAN024GA6_at; Start 154; Stop 178
cagtttaggatccatatccttgagc

SEQ ID NO: 237293 - DNA, 25 bp, Artificial
  probe
  misc_feature (1)..(25): SEQ ID NO: 1554; WAN024GA6_at; Start 92; Stop 116
tcaatatggaaaaaccgttctttca

SEQ ID NO: 237294 - DNA, 25 bp, Artificial
  probe
  misc_feature (1)..(25): SEQ ID NO: 1554; WAN024GA6_at; Start 207; Stop 231
tcatgaggtcaagcggtgtataggc

SEQ ID NO: 237295 - DNA, 25 bp, Artificial
  probe
  misc_feature (1)..(25): SEQ ID NO: 5425; WAN024GA7_at; Start 26; Stop 50
ataagaactatcggattaaggaaat

SEQ ID NO: 237296 - DNA, 25 bp, Artificial
  probe
  misc_feature (1)..(25): SEQ ID NO: 5425; WAN024GA7_at; Start 16; Stop 40
aacgtcaagaataagaactatcgga

SEQ ID NO: 237297 - DNA, 25 bp, Artificial
  probe
  misc_feature (1)..(25): SEQ ID NO: 5425; WAN024GA7_at; Start 19; Stop 43
gtcaagaataagaactatcggatta

SEQ ID NO: 237298 - DNA, 25 bp, Artificial
  probe
  misc_feature (1)..(25): SEQ ID NO: 5425; WAN024GA7_at; Start 23; Stop 47
agaataagaactatcggattaagga

SEQ ID NO: 237299 - DNA, 25 bp, Artificial
  probe
  misc_feature (1)..(25): SEQ ID NO: 5425; WAN024GA7_at; Start 22; Stop 46
aagaataagaactatcggattaagg

SEQ ID NO: 237300 - DNA, 25 bp, Artificial
  probe
  misc_feature (1)..(25): SEQ ID NO: 5425; WAN024GA7_at; Start 15; Stop 39
caacgtcaagaataagaactatcgg

SEQ ID NO: 237301 - DNA, 25 bp, Artificial
  probe
  misc_feature (1)..(25): SEQ ID NO: 5425; WAN024GA7_at; Start 17; Stop 41
acgtcaagaataagaactatcggat

SEQ ID NO: 237302 - DNA, 25 bp, Artificial
  probe
  misc_feature (1)..(25): SEQ ID NO: 5425; WAN024GA7_at; Start 24; Stop 48
gaataagaactatcggattaaggaa

SEQ ID NO: 237303 - DNA, 25 bp, Artificial
  probe
  misc_feature (1)..(25): SEQ ID NO: 5425; WAN024GA7_at; Start 20; Stop 44
tcaagaataagaactatcggattaa

SEQ ID NO: 237304 - DNA, 25 bp, Artificial
  probe
  misc_feature (1)..(25): SEQ ID NO: 5425; WAN024GA7_at; Start 21; Stop 45
caagaataagaactatcggattaag

SEQ ID NO: 237305 - DNA, 25 bp, Artificial
  probe
  misc_feature (1)..(25): SEQ ID NO: 5425; WAN024GA7_at; Start 18; Stop 42
cgtcaagaataagaactatcggatt

SEQ ID NO: 237306 - DNA, 25 bp, Artificial
  probe
  misc_feature (1)..(25): SEQ ID NO: 1263; WAN024GA8_at; Start 418; Stop 442
gatcaagcagtgaaagaaatcggtc

SEQ ID NO: 237307 - DNA, 25 bp, Artificial
  probe
  misc_feature (1)..(25): SEQ ID NO: 1263; WAN024GA8_at; Start 1044; Stop 1068
ggttaaaaaagtcatgccagctgcc

SEQ ID NO: 237308 - DNA, 25 bp, Artificial
  probe
  misc_feature (1)..(25): SEQ ID NO: 1263; WAN024GA8_at; Start 433; Stop 457
gaaatcggtcttccaatgattgcca

SEQ ID NO: 237309 - DNA, 25 bp, Artificial
  probe
  misc_feature (1)..(25): SEQ ID NO: 1263; WAN024GA8_at; Start 973; Stop 997
tctcgccgtgcaaatgctcactatg

SEQ ID NO: 237310 - DNA, 25 bp, Artificial
  probe
  misc_feature (1)..(25): SEQ ID NO: 1263; WAN024GA8_at; Start 234; Stop 258
catcgagtctcacaatgaatactgg

SEQ ID NO: 237311 - DNA, 25 bp, Artificial
  probe
  misc_feature (1)..(25): SEQ ID NO: 1263; WAN024GA8_at; Start 562; Stop 586
gaaaaatttgtcacttccagcgaaa

SEQ ID NO: 237312 - DNA, 25 bp, Artificial
  probe
  misc_feature (1)..(25): SEQ ID NO: 1263; WAN024GA8_at; Start 711; Stop 735
ggatatggatcctaaactgcgcaag

SEQ ID NO: 237313 - DNA, 25 bp, Artificial
  probe
  misc_feature (1)..(25): SEQ ID NO: 1263; WAN024GA8_at; Start 868; Stop 892
tataactttgctcattccttggacc

SEQ ID NO: 237314 - DNA, 25 bp, Artificial
  probe
  misc_feature (1)..(25): SEQ ID NO: 1263; WAN024GA8_at; Start 476; Stop 500
gagcagccgcaacctttaaacttga

SEQ ID NO: 237315 - DNA, 25 bp, Artificial
  probe
  misc_feature (1)..(25): SEQ ID NO: 1263; WAN024GA8_at; Start 297; Stop 321
ttttggtgccaaaccagaggatctc

SEQ ID NO: 237316 - DNA, 25 bp, Artificial
  probe
  misc_feature (1)..(25): SEQ ID NO: 1263; WAN024GA8_at; Start 912; Stop 936
tattgtcgcaggagaggagttcccg

SEQ ID NO: 237317 - DNA, 25 bp, Artificial
  probe
  misc_feature (1)..(25): SEQ ID NO: 1263; WAN024GA8_at; Start 402; Stop 426
gacggaagcagatgttgatcaagca

SEQ ID NO: 237318 - DNA, 25 bp, Artificial
  probe
  misc_feature (1)..(25): SEQ ID NO: 1263; WAN024GA8_at; Start 123; Stop 147
gcccttgcgcaatagcttgaccgag

SEQ ID NO: 237319 - DNA, 25 bp, Artificial
  probe
  misc_feature (1)..(25): SEQ ID NO: 1263; WAN024GA8_at; Start 519; Stop 543
tcacttcaagcaagaatgggaccat

SEQ ID NO: 237320 - DNA, 25 bp, Artificial
  probe
  misc_feature (1)..(25): SEQ ID NO: 1263; WAN024GA8_at; Start 355; Stop 379
cttttcaaaaaagcaggtgttcctg

SEQ ID NO: 237321 - DNA, 25 bp, Artificial
  probe
  misc_feature (1)..(25): SEQ ID NO: 1263; WAN024GA8_at; Start 1027; Stop 1051
tatagccagcagttcaaggttaaaa

SEQ ID NO: 237322 - DNA, 25 bp, Artificial
  probe
  misc_feature (1)..(25): SEQ ID NO: 1263; WAN024GA8_at; Start 644; Stop 668
ttgactacgcctatacaccgcttga

SEQ ID NO: 237323 - DNA, 25 bp, Artificial
  probe
  misc_feature (1)..(25): SEQ ID NO: 1263; WAN024GA8_at; Start 837; Stop 861
ccgccctgcaggtggttttaccatt

SEQ ID NO: 237324 - DNA, 25 bp, Artificial
  probe
  misc_feature (1)..(25): SEQ ID NO: 1263; WAN024GA8_at; Start 249; Stop 273
tgaatactggcttgagctagacgca

SEQ ID NO: 237325 - DNA, 25 bp, Artificial
  probe
  misc_feature (1)..(25): SEQ ID NO: 1263; WAN024GA8_at; Start 583; Stop 607
gaaatctgtacctttgacgggctcg

SEQ ID NO: 237326 - DNA, 25 bp, Artificial
  probe
  misc_feature (1)..(25): SEQ ID NO: 1263; WAN024GA8_at; Start 176; Stop 200
tagatgaagtcaaacgtgcagttgc

SEQ ID NO: 237327 - DNA, 25 bp, Artificial
  probe
  misc_feature (1)..(25): SEQ ID NO: 1263; WAN024GA8_at; Start 51; Stop 75
taccatcgaactagctaataaaggc

SEQ ID NO: 237328 - DNA, 25 bp, Artificial
  probe
  misc_feature (1)..(25): SEQ ID NO: 1263; WAN024GA8_at; Start 823; Stop 847
atcgagtacaataaccgccctgcag

SEQ ID NO: 237329 - DNA, 25 bp, Artificial
  probe
  misc_feature (1)..(25): SEQ ID NO: 1263; WAN024GA8_at; Start 1012; Stop 1036
gatttgcttgccaaatatagccagc

SEQ ID NO: 237330 - DNA, 25 bp, Artificial
  probe
  misc_feature (1)..(25): SEQ ID NO: 1263; WAN024GA8_at; Start 264; Stop 288
gctagacgcaacactcagagaacaa

SEQ ID NO: 237331 - DNA, 25 bp, Artificial
  probe
  misc_feature (1)..(25): SEQ ID NO: 1263; WAN024GA8_at; Start 887; Stop 911
tggacctttatcgtggctatgcagc

SEQ ID NO: 237332 - DNA, 25 bp, Artificial
  probe
  misc_feature (1)..(25): SEQ ID NO: 1263; WAN024GA8_at; Start 450; Stop 474
gattgccaaacctgataatggagtg

SEQ ID NO: 237333 - DNA, 25 bp, Artificial
  probe
  misc_feature (1)..(25): SEQ ID NO: 1263; WAN024GA8_at; Start 928; Stop 952
gagttcccggcgtcagactttgaaa

SEQ ID NO: 237334 - DNA, 25 bp, Artificial
  probe
  misc_feature (1)..(25): SEQ ID NO: 1263; WAN024GA8_at; Start 603; Stop 627
gctcgtggacaaggatggaaagatt

SEQ ID NO: 237335 - DNA, 25 bp, Artificial
  probe
  misc_feature (1)..(25): SEQ ID NO: 1263; WAN024GA8_at; Start 782; Stop 806
tccatattgagttcttccgtgaggg

SEQ ID NO: 237336 - DNA, 25 bp, Artificial
  probe
  misc_feature (1)..(25): SEQ ID NO: 1263; WAN024GA8_at; Start 103; Stop 127
tcttacgagcaattggatgagccct

SEQ ID NO: 237337 - DNA, 25 bp, Artificial
  probe
  misc_feature (1)..(25): SEQ ID NO: 1263; WAN024GA8_at; Start 492; Stop 516
taaacttgagacagaagacgatatc

SEQ ID NO: 237338 - DNA, 25 bp, Artificial
  probe
  misc_feature (1)..(25): SEQ ID NO: 1263; WAN024GA8_at; Start 380; Stop 404
tggtacctggagctgttatcaagac

SEQ ID NO: 237339 - DNA, 25 bp, Artificial
  probe
  misc_feature (1)..(25): SEQ ID NO: 1263; WAN024GA8_at; Start 958; Stop 982
tattgtttggctacttctcgccgtg

SEQ ID NO: 237340 - DNA, 25 bp, Artificial
  probe
  misc_feature (1)..(25): SEQ ID NO: 5842; WAN024GA9_at; Start 233; Stop 257
gcatcatcgttgtagtaatcaccga

SEQ ID NO: 237341 - DNA, 25 bp, Artificial
  probe
  misc_feature (1)..(25): SEQ ID NO: 5842; WAN024GA9_at; Start 111; Stop 135
aaccatcttgttcccaggctccaag

SEQ ID NO: 237342 - DNA, 25 bp, Artificial
  probe
  misc_feature (1)..(25): SEQ ID NO: 5842; WAN024GA9_at; Start 91; Stop 115
gagcttgtaaaaggatggcaaacca

SEQ ID NO: 237343 - DNA, 25 bp, Artificial
  probe
  misc_feature (1)..(25): SEQ ID NO: 5842; WAN024GA9_at; Start 1; Stop 25
ttgtttacgccaccattcccagtca

SEQ ID NO: 237344 - DNA, 25 bp, Artificial
  probe
  misc_feature (1)..(25): SEQ ID NO: 5842; WAN024GA9_at; Start 354; Stop 378
tagagcaacctgtcgtcatcatgcc

SEQ ID NO: 237345 - DNA, 25 bp, Artificial
  probe
  misc_feature (1)..(25): SEQ ID NO: 5842; WAN024GA9_at; Start 78; Stop 102
caaaggcttctttgagcttgtaaaa

SEQ ID NO: 237346 - DNA, 25 bp, Artificial
  probe
  misc_feature (1)..(25): SEQ ID NO: 5842; WAN024GA9_at; Start 385; Stop 409
ccaacctgtcttgtgcttgataaaa

SEQ ID NO: 237347 - DNA, 25 bp, Artificial
  probe
  misc_feature (1)..(25): SEQ ID NO: 5842; WAN024GA9_at; Start 270; Stop 294
cgtcgtaaacaccactgagagcaat

SEQ ID NO: 237348 - DNA, 25 bp, Artificial
  probe
  misc_feature (1)..(25): SEQ ID NO: 5842; WAN024GA9_at; Start 182; Stop 206
cagccgtcgttttggttccaaatat

SEQ ID NO: 237349 - DNA, 25 bp, Artificial
  probe
  misc_feature (1)..(25): SEQ ID NO: 5842; WAN024GA9_at; Start 344; Stop 368
taggctcccatagagcaacctgtcg

SEQ ID NO: 237350 - DNA, 25 bp, Artificial
  probe
  misc_feature (1)..(25): SEQ ID NO: 5842; WAN024GA9_at; Start 161; Stop 185
tgacggtaacggtcaataaaccagc

SEQ ID NO: 237351 - DNA, 25 bp, Artificial
  probe
  misc_feature (1)..(25): SEQ ID NO: 5842; WAN024GA9_at; Start 139; Stop 163
cgtacacagcacaatctctgcctga

SEQ ID NO: 237352 - DNA, 25 bp, Artificial
  probe
  misc_feature (1)..(25): SEQ ID NO: 5842; WAN024GA9_at; Start 210; Stop 234
ctactggcgagttttggtaaatagc

SEQ ID NO: 237353 - DNA, 25 bp, Artificial
  probe
  misc_feature (1)..(25): SEQ ID NO: 5842; WAN024GA9_at; Start 5; Stop 29
ttacgccaccattcccagtcatggg

SEQ ID NO: 237354 - DNA, 25 bp, Artificial
  probe
  misc_feature (1)..(25): SEQ ID NO: 5842; WAN024GA9_at; Start 282; Stop 306
cactgagagcaatcactttggtaaa

SEQ ID NO: 237355 - DNA, 25 bp, Artificial
  probe
  misc_feature (1)..(25): SEQ ID NO: 5842; WAN024GA9_at; Start 408; Stop 432
aagaatggcctcctcaatcacataa

SEQ ID NO: 237356 - DNA, 25 bp, Artificial
  probe
  misc_feature (1)..(25): SEQ ID NO: 5842; WAN024GA9_at; Start 220; Stop 244
gttttggtaaatagcatcatcgttg

SEQ ID NO: 237357 - DNA, 25 bp, Artificial
  probe
  misc_feature (1)..(25): SEQ ID NO: 5842; WAN024GA9_at; Start 195; Stop 219
ggttccaaatataatctactggcga

SEQ ID NO: 237358 - DNA, 25 bp, Artificial
  probe
  misc_feature (1)..(25): SEQ ID NO: 5842; WAN024GA9_at; Start 104; Stop 128
gatggcaaaccatcttgttcccagg

SEQ ID NO: 237359 - DNA, 25 bp, Artificial
  probe
  misc_feature (1)..(25): SEQ ID NO: 5842; WAN024GA9_at; Start 398; Stop 422
tgcttgataaaagaatggcctcctc

SEQ ID NO: 237360 - DNA, 25 bp, Artificial
  probe
  misc_feature (1)..(25): SEQ ID NO: 5842; WAN024GA9_at; Start 20; Stop 44
cagtcatgggcgacatcatgtcccc

SEQ ID NO: 237361 - DNA, 25 bp, Artificial
  probe
  misc_feature (1)..(25): SEQ ID NO: 5842; WAN024GA9_at; Start 55; Stop 79
ccaggctggaatttgtttcttgtca

SEQ ID NO: 237362 - DNA, 25 bp, Artificial
  probe
  misc_feature (1)..(25): SEQ ID NO: 5842; WAN024GA9_at; Start 295; Stop 319
cactttggtaaagacatctggatgc

SEQ ID NO: 237363 - DNA, 25 bp, Artificial
  probe
  misc_feature (1)..(25): SEQ ID NO: 5842; WAN024GA9_at; Start 262; Stop 286
gaaacgtgcgtcgtaaacaccactg

SEQ ID NO: 237364 - DNA, 25 bp, Artificial
  probe
  misc_feature (1)..(25): SEQ ID NO: 5842; WAN024GA9_at; Start 306; Stop 330
agacatctggatgctggaggaagaa

SEQ ID NO: 237365 - DNA, 25 bp, Artificial
  probe
  misc_feature (1)..(25): SEQ ID NO: 5842; WAN024GA9_at; Start 248; Stop 272
taatcaccgacaaagaaacgtgcgt

SEQ ID NO: 237366 - DNA, 25 bp, Artificial
  probe
  misc_feature (1)..(25): SEQ ID NO: 5842; WAN024GA9_at; Start 334; Stop 358
gagtgcatgataggctcccatagag

SEQ ID NO: 237367 - DNA, 25 bp, Artificial
  probe
  misc_feature (1)..(25): SEQ ID NO: 5842; WAN024GA9_at; Start 148; Stop 172
cacaatctctgcctgacggtaacgg

SEQ ID NO: 237368 - DNA, 25 bp, Artificial
  probe
  misc_feature (1)..(25): SEQ ID NO: 5842; WAN024GA9_at; Start 44; Stop 68
cattcagcaaaccaggctggaattt

SEQ ID NO: 237369 - DNA, 25 bp, Artificial
  probe
  misc_feature (1)..(25): SEQ ID NO: 5842; WAN024GA9_at; Start 35; Stop 59
tcatgtccccattcagcaaaccagg

SEQ ID NO: 237370 - DNA, 25 bp, Artificial
  probe
  misc_feature (1)..(25): SEQ ID NO: 5842; WAN024GA9_at; Start 369; Stop 393
tcatcatgccatcaaaccaacctgt

SEQ ID NO: 237371 - DNA, 25 bp, Artificial
  probe
  misc_feature (1)..(25): SEQ ID NO: 5842; WAN024GA9_at; Start 63; Stop 87
gaatttgtttcttgtcaaaggcttc

SEQ ID NO: 237372 - DNA, 25 bp, Artificial
  probe
  misc_feature (1)..(25): SEQ ID NO: 5842; WAN024GA9_at; Start 328; Stop 352
gaaattgagtgcatgataggctccc

SEQ ID NO: 237373 - DNA, 25 bp, Artificial
  probe
  misc_feature (1)..(25): SEQ ID NO: 5842; WAN024GA9_at; Start 319; Stop 343
ctggaggaagaaattgagtgcatga

SEQ ID NO: 237374 - DNA, 25 bp, Artificial
  probe
  misc_feature (1)..(25): SEQ ID NO: 1966; WAN024GAA_at; Start 117; Stop 141
caacgaatactatgattttggcatg

SEQ ID NO: 237375 - DNA, 25 bp, Artificial
  probe
  misc_feature (1)..(25): SEQ ID NO: 1966; WAN024GAA_at; Start 218; Stop 242
ggttggctacttggaaaaatgctca

SEQ ID NO: 237376 - DNA, 25 bp, Artificial
  probe
  misc_feature (1)..(25): SEQ ID NO: 1966; WAN024GAA_at; Start 103; Stop 127
tcaggtggtagtcacaacgaatact

SEQ ID NO: 237377 - DNA, 25 bp, Artificial
  probe
  misc_feature (1)..(25): SEQ ID NO: 1966; WAN024GAA_at; Start 54; Stop 78
ccttaaccgttatggacatggtggg

SEQ ID NO: 237378 - DNA, 25 bp, Artificial
  probe
  misc_feature (1)..(25): SEQ ID NO: 1966; WAN024GAA_at; Start 205; Stop 229
gatagtgagagctggttggctactt

SEQ ID NO: 237379 - DNA, 25 bp, Artificial
  probe
  misc_feature (1)..(25): SEQ ID NO: 1966; WAN024GAA_at; Start 230; Stop 254
ggaaaaatgctcatgaccaagcgga

SEQ ID NO: 237380 - DNA, 25 bp, Artificial
  probe
  misc_feature (1)..(25): SEQ ID NO: 1966; WAN024GAA_at; Start 247; Stop 271
caagcggaaatgcaccgtgcctacg

SEQ ID NO: 237381 - DNA, 25 bp, Artificial
  probe
  misc_feature (1)..(25): SEQ ID NO: 1966; WAN024GAA_at; Start 210; Stop 234
tgagagctggttggctacttggaaa

SEQ ID NO: 237382 - DNA, 25 bp, Artificial
  probe
  misc_feature (1)..(25): SEQ ID NO: 1966; WAN024GAA_at; Start 237; Stop 261
tgctcatgaccaagcggaaatgcac

SEQ ID NO: 237383 - DNA, 25 bp, Artificial
  probe
  misc_feature (1)..(25): SEQ ID NO: 1966; WAN024GAA_at; Start 83; Stop 107
cagttgtggtctttgcttcatcagg

SEQ ID NO: 237384 - DNA, 25 bp, Artificial
  probe
  misc_feature (1)..(25): SEQ ID NO: 1966; WAN024GAA_at; Start 286; Stop 310
gaggaggccattcttttatcaagca

SEQ ID NO: 237385 - DNA, 25 bp, Artificial
  probe
  misc_feature (1)..(25): SEQ ID NO: 1966; WAN024GAA_at; Start 223; Stop 247
gctacttggaaaaatgctcatgacc

SEQ ID NO: 237386 - DNA, 25 bp, Artificial
  probe
  misc_feature (1)..(25): SEQ ID NO: 1966; WAN024GAA_at; Start 274; Stop 298
cgttatgtgattgaggaggccattc

SEQ ID NO: 237387 - DNA, 25 bp, Artificial
  probe
  misc_feature (1)..(25): SEQ ID NO: 1966; WAN024GAA_at; Start 8; Stop 32
ttgaacatcttagccactggagtgg

SEQ ID NO: 237388 - DNA, 25 bp, Artificial
  probe
  misc_feature (1)..(25): SEQ ID NO: 1966; WAN024GAA_at; Start 145; Stop 169
gatgcctgtgcttcctttatcgagg

SEQ ID NO: 237389 - DNA, 25 bp, Artificial
  probe
  misc_feature (1)..(25): SEQ ID NO: 1966; WAN024GAA_at; Start 43; Stop 67
cgtgaaatgtaccttaaccgttatg

SEQ ID NO: 237390 - DNA, 25 bp, Artificial
  probe
  misc_feature (1)..(25): SEQ ID NO: 1966; WAN024GAA_at; Start 259; Stop 283
caccgtgcctacgaacgttatgtga

SEQ ID NO: 237391 - DNA, 25 bp, Artificial
  probe
  misc_feature (1)..(25): SEQ ID NO: 1966; WAN024GAA_at; Start 97; Stop 121
gcttcatcaggtggtagtcacaacg

SEQ ID NO: 237392 - DNA, 25 bp, Artificial
  probe
  misc_feature (1)..(25): SEQ ID NO: 1966; WAN024GAA_at; Start 135; Stop 159
tggcatgattgatgcctgtgcttcc

SEQ ID NO: 237393 - DNA, 25 bp, Artificial
  probe
  misc_feature (1)..(25): SEQ ID NO: 1966; WAN024GAA_at; Start 151; Stop 175
tgtgcttcctttatcgaggaaggcc

SEQ ID NO: 237394 - DNA, 25 bp, Artificial
  probe
  misc_feature (1)..(25): SEQ ID NO: 1966; WAN024GAA_at; Start 106; Stop 130
ggtggtagtcacaacgaatactatg

SEQ ID NO: 237395 - DNA, 25 bp, Artificial
  probe
  misc_feature (1)..(25): SEQ ID NO: 1966; WAN024GAA_at; Start 78; Stop 102
gattccagttgtggtctttgcttca

SEQ ID NO: 237396 - DNA, 25 bp, Artificial
  probe
  misc_feature (1)..(25): SEQ ID NO: 1966; WAN024GAA_at; Start 243; Stop 267
tgaccaagcggaaatgcaccgtgcc

SEQ ID NO: 237397 - DNA, 25 bp, Artificial
  probe
  misc_feature (1)..(25): SEQ ID NO: 1966; WAN024GAA_at; Start 289; Stop 313
gaggccattcttttatcaagcacaa

SEQ ID NO: 237398 - DNA, 25 bp, Artificial
  probe
  misc_feature (1)..(25): SEQ ID NO: 1966; WAN024GAA_at; Start 270; Stop 294
cgaacgttatgtgattgaggaggcc

SEQ ID NO: 237399 - DNA, 25 bp, Artificial
  probe
  misc_feature (1)..(25): SEQ ID NO: 1966; WAN024GAA_at; Start 13; Stop 37
catcttagccactggagtggtcatc

SEQ ID NO: 237400 - DNA, 25 bp, Artificial
  probe
  misc_feature (1)..(25): SEQ ID NO: 1966; WAN024GAA_at; Start 126; Stop 150
ctatgattttggcatgattgatgcc

SEQ ID NO: 237401 - DNA, 25 bp, Artificial
  probe
  misc_feature (1)..(25): SEQ ID NO: 1966; WAN024GAA_at; Start 60; Stop 84
ccgttatggacatggtgggattcca

SEQ ID NO: 237402 - DNA, 25 bp, Artificial
  probe
  misc_feature (1)..(25): SEQ ID NO: 1966; WAN024GAA_at; Start 253; Stop 277
gaaatgcaccgtgcctacgaacgtt

SEQ ID NO: 237403 - DNA, 25 bp, Artificial
  probe
  misc_feature (1)..(25): SEQ ID NO: 1966; WAN024GAA_at; Start 297; Stop 321
tcttttatcaagcacaagacaggtt

SEQ ID NO: 237404 - DNA, 25 bp, Artificial
  probe
  misc_feature (1)..(25): SEQ ID NO: 1966; WAN024GAA_at; Start 69; Stop 93
acatggtgggattccagttgtggtc

SEQ ID NO: 237405 - DNA, 25 bp, Artificial
  probe
  misc_feature (1)..(25): SEQ ID NO: 1966; WAN024GAA_at; Start 3; Stop 27
gcatattgaacatcttagccactgg

SEQ ID NO: 237406 - DNA, 25 bp, Artificial
  probe
  misc_feature (1)..(25): SEQ ID NO: 1966; WAN024GAA_at; Start 89; Stop 113
tggtctttgcttcatcaggtggtag

SEQ ID NO: 237407 - DNA, 25 bp, Artificial
  probe
  misc_feature (1)..(25): SEQ ID NO: 1966; WAN024GAA_at; Start 177; Stop 201
tgtccagttctttaccctatctagt

SEQ ID NO: 237408 - DNA, 25 bp, Artificial
  probe
  misc_feature (1)..(25): SEQ ID NO: 1741; WAN024GAB_at; Start 85; Stop 109
gctctcagtggtgtttacgacgcac

SEQ ID NO: 237409 - DNA, 25 bp, Artificial
  probe
  misc_feature (1)..(25): SEQ ID NO: 1741; WAN024GAB_at; Start 191; Stop 215
gctggtttattgaccgttaccgtca

SEQ ID NO: 237410 - DNA, 25 bp, Artificial
  probe
  misc_feature (1)..(25): SEQ ID NO: 1741; WAN024GAB_at; Start 213; Stop 237
tcaggcagagattgtgctgtgtacg

SEQ ID NO: 237411 - DNA, 25 bp, Artificial
  probe
  misc_feature (1)..(25): SEQ ID NO: 1741; WAN024GAB_at; Start 96; Stop 120
tgtttacgacgcacgtttctttgtc

SEQ ID NO: 237412 - DNA, 25 bp, Artificial
  probe
  misc_feature (1)..(25): SEQ ID NO: 1741; WAN024GAB_at; Start 71; Stop 95
ttaccaaagtgattgctctcagtgg

SEQ ID NO: 237413 - DNA, 25 bp, Artificial
  probe
  misc_feature (1)..(25): SEQ ID NO: 1741; WAN024GAB_at; Start 139; Stop 163
gatgctatttaccaaaactcgccag

SEQ ID NO: 237414 - DNA, 25 bp, Artificial
  probe
  misc_feature (1)..(25): SEQ ID NO: 1741; WAN024GAB_at; Start 208; Stop 232
taccgtcaggcagagattgtgctgt

SEQ ID NO: 237415 - DNA, 25 bp, Artificial
  probe
  misc_feature (1)..(25): SEQ ID NO: 1741; WAN024GAB_at; Start 144; Stop 168
tatttaccaaaactcgccagtagat

SEQ ID NO: 237416 - DNA, 25 bp, Artificial
  probe
  misc_feature (1)..(25): SEQ ID NO: 1741; WAN024GAB_at; Start 386; Stop 410
tcctcggtaatctctatttataaaa

SEQ ID NO: 237417 - DNA, 25 bp, Artificial
  probe
  misc_feature (1)..(25): SEQ ID NO: 1741; WAN024GAB_at; Start 24; Stop 48
gggagcctatcatgcactcaatttc

SEQ ID NO: 237418 - DNA, 25 bp, Artificial
  probe
  misc_feature (1)..(25): SEQ ID NO: 1741; WAN024GAB_at; Start 43; Stop 67
aatttcttcctccagcatccagatg

SEQ ID NO: 237419 - DNA, 25 bp, Artificial
  probe
  misc_feature (1)..(25): SEQ ID NO: 1741; WAN024GAB_at; Start 2; Stop 26
tgatgacgacaggttgctctatggg

SEQ ID NO: 237420 - DNA, 25 bp, Artificial
  probe
  misc_feature (1)..(25): SEQ ID NO: 1741; WAN024GAB_at; Start 90; Stop 114
cagtggtgtttacgacgcacgtttc

SEQ ID NO: 237421 - DNA, 25 bp, Artificial
  probe
  misc_feature (1)..(25): SEQ ID NO: 1741; WAN024GAB_at; Start 324; Stop 348
tgctgaatggggacatgatgtcgcc

SEQ ID NO: 237422 - DNA, 25 bp, Artificial
  probe
  misc_feature (1)..(25): SEQ ID NO: 1741; WAN024GAB_at; Start 357; Stop 381
ggaatggtggcgtaaacaaatgcct

SEQ ID NO: 237423 - DNA, 25 bp, Artificial
  probe
  misc_feature (1)..(25): SEQ ID NO: 1741; WAN024GAB_at; Start 55; Stop 79
cagcatccagatgtctttaccaaag

SEQ ID NO: 237424 - DNA, 25 bp, Artificial
  probe
  misc_feature (1)..(25): SEQ ID NO: 1741; WAN024GAB_at; Start 309; Stop 333
aattccagcctggtttgctgaatgg

SEQ ID NO: 237425 - DNA, 25 bp, Artificial
  probe
  misc_feature (1)..(25): SEQ ID NO: 1741; WAN024GAB_at; Start 11; Stop 35
caggttgctctatgggagcctatca

SEQ ID NO: 237426 - DNA, 25 bp, Artificial
  probe
  misc_feature (1)..(25): SEQ ID NO: 1741; WAN024GAB_at; Start 19; Stop 43
tctatgggagcctatcatgcactca

SEQ ID NO: 237427 - DNA, 25 bp, Artificial
  probe
  misc_feature (1)..(25): SEQ ID NO: 1741; WAN024GAB_at; Start 62; Stop 86
cagatgtctttaccaaagtgattgc

SEQ ID NO: 237428 - DNA, 25 bp, Artificial
  probe
  misc_feature (1)..(25): SEQ ID NO: 1741; WAN024GAB_at; Start 204; Stop 228
ccgttaccgtcaggcagagattgtg

SEQ ID NO: 237429 - DNA, 25 bp, Artificial
  probe
  misc_feature (1)..(25): SEQ ID NO: 1741; WAN024GAB_at; Start 198; Stop 222
tattgaccgttaccgtcaggcagag

SEQ ID NO: 237430 - DNA, 25 bp, Artificial
  probe
  misc_feature (1)..(25): SEQ ID NO: 1741; WAN024GAB_at; Start 373; Stop 397
caaatgccttatttcctcggtaatc

SEQ ID NO: 237431 - DNA, 25 bp, Artificial
  probe
  misc_feature (1)..(25): SEQ ID NO: 1741; WAN024GAB_at; Start 33; Stop 57
tcatgcactcaatttcttcctccag

SEQ ID NO: 237432 - DNA, 25 bp, Artificial
  probe
  misc_feature (1)..(25): SEQ ID NO: 1741; WAN024GAB_at; Start 158; Stop 182
cgccagtagattatatttggaacca

SEQ ID NO: 237433 - DNA, 25 bp, Artificial
  probe
  misc_feature (1)..(25): SEQ ID NO: 1741; WAN024GAB_at; Start 242; Stop 266
ttggagcctgggaacaagatggttt

SEQ ID NO: 237434 - DNA, 25 bp, Artificial
  probe
  misc_feature (1)..(25): SEQ ID NO: 1741; WAN024GAB_at; Start 164; Stop 188
tagattatatttggaaccaaaacga

SEQ ID NO: 237435 - DNA, 25 bp, Artificial
  probe
  misc_feature (1)..(25): SEQ ID NO: 1741; WAN024GAB_at; Start 268; Stop 292
ccatccttttacaagctcaaagaag

SEQ ID NO: 237436 - DNA, 25 bp, Artificial
  probe
  misc_feature (1)..(25): SEQ ID NO: 1741; WAN024GAB_at; Start 274; Stop 298
ttttacaagctcaaagaagcctttg

SEQ ID NO: 237437 - DNA, 25 bp, Artificial
  probe
  misc_feature (1)..(25): SEQ ID NO: 1741; WAN024GAB_at; Start 363; Stop 387
gtggcgtaaacaaatgccttatttc

SEQ ID NO: 237438 - DNA, 25 bp, Artificial
  probe
  misc_feature (1)..(25): SEQ ID NO: 1741; WAN024GAB_at; Start 81; Stop 105
gattgctctcagtggtgtttacgac

SEQ ID NO: 237439 - DNA, 25 bp, Artificial
  probe
  misc_feature (1)..(25): SEQ ID NO: 1741; WAN024GAB_at; Start 124; Stop 148
gattactacaacgatgatgctattt

SEQ ID NO: 237440 - DNA, 25 bp, Artificial
  probe
  misc_feature (1)..(25): SEQ ID NO: 1741; WAN024GAB_at; Start 5; Stop 29
tgacgacaggttgctctatgggagc

SEQ ID NO: 237441 - DNA, 25 bp, Artificial
  probe
  misc_feature (1)..(25): SEQ ID NO: 1741; WAN024GAB_at; Start 303; Stop 327
gaaacaaattccagcctggtttgct

SEQ ID NO: 237442 - DNA, 25 bp, Artificial
  probe
  misc_feature (1)..(25): SEQ ID NO: 2099; WAN024GAC_at; Start 126; Stop 150
acttccaagccgcatactcattcat

SEQ ID NO: 237443 - DNA, 25 bp, Artificial
  probe
  misc_feature (1)..(25): SEQ ID NO: 2099; WAN024GAC_at; Start 159; Stop 183
taccatcattgtcaatagcaacgac

SEQ ID NO: 237444 - DNA, 25 bp, Artificial
  probe
  misc_feature (1)..(25): SEQ ID NO: 2099; WAN024GAC_at; Start 23; Stop 47
cgataggtctcatcgataaaaggct

SEQ ID NO: 237445 - DNA, 25 bp, Artificial
  probe
  misc_feature (1)..(25): SEQ ID NO: 2099; WAN024GAC_at; Start 41; Stop 65
aaaggcttgaccacctccatgacaa

SEQ ID NO: 237446 - DNA, 25 bp, Artificial
  probe
  misc_feature (1)..(25): SEQ ID NO: 2099; WAN024GAC_at; Start 29; Stop 53
gtctcatcgataaaaggcttgacca

SEQ ID NO: 237447 - DNA, 25 bp, Artificial
  probe
  misc_feature (1)..(25): SEQ ID NO: 2099; WAN024GAC_at; Start 214; Stop 238
gatagctgggataatcttccatgaa

SEQ ID NO: 237448 - DNA, 25 bp, Artificial
  probe
  misc_feature (1)..(25): SEQ ID NO: 2099; WAN024GAC_at; Start 103; Stop 127
ccctgggataggagattcttggaac

SEQ ID NO: 237449 - DNA, 25 bp, Artificial
  probe
  misc_feature (1)..(25): SEQ ID NO: 2099; WAN024GAC_at; Start 259; Stop 283
gctattaaaaacattttgcccgtca

SEQ ID NO: 237450 - DNA, 25 bp, Artificial
  probe
  misc_feature (1)..(25): SEQ ID NO: 2099; WAN024GAC_at; Start 58; Stop 82
catgacaaactcagcatactccaca

SEQ ID NO: 237451 - DNA, 25 bp, Artificial
  probe
  misc_feature (1)..(25): SEQ ID NO: 2099; WAN024GAC_at; Start 209; Stop 233
cgtttgatagctgggataatcttcc

SEQ ID NO: 237452 - DNA, 25 bp, Artificial
  probe
  misc_feature (1)..(25): SEQ ID NO: 2099; WAN024GAC_at; Start 181; Stop 205
gacaatcatgcgactgatatccgga

SEQ ID NO: 237453 - DNA, 25 bp, Artificial
  probe
  misc_feature (1)..(25): SEQ ID NO: 2099; WAN024GAC_at; Start 10; Stop 34
gtctgcttttgtacgataggtctca

SEQ ID NO: 237454 - DNA, 25 bp, Artificial
  probe
  misc_feature (1)..(25): SEQ ID NO: 2099; WAN024GAC_at; Start 93; Stop 117
caaactgctgccctgggataggaga

SEQ ID NO: 237455 - DNA, 25 bp, Artificial
  probe
  misc_feature (1)..(25): SEQ ID NO: 2099; WAN024GAC_at; Start 3; Stop 27
gctggcagtctgcttttgtacgata

SEQ ID NO: 237456 - DNA, 25 bp, Artificial
  probe
  misc_feature (1)..(25): SEQ ID NO: 2099; WAN024GAC_at; Start 247; Stop 271
gaaagactctttgctattaaaaaca

SEQ ID NO: 237457 - DNA, 25 bp, Artificial
  probe
  misc_feature (1)..(25): SEQ ID NO: 2099; WAN024GAC_at; Start 152; Stop 176
cgccccataccatcattgtcaatag

SEQ ID NO: 237458 - DNA, 25 bp, Artificial
  probe
  misc_feature (1)..(25): SEQ ID NO: 2099; WAN024GAC_at; Start 109; Stop 133
gataggagattcttggaacttccaa

SEQ ID NO: 237459 - DNA, 25 bp, Artificial
  probe
  misc_feature (1)..(25): SEQ ID NO: 2099; WAN024GAC_at; Start 231; Stop 255
tccatgaatgtccaatgaaagactc

SEQ ID NO: 237460 - DNA, 25 bp, Artificial
  probe
  misc_feature (1)..(25): SEQ ID NO: 2099; WAN024GAC_at; Start 37; Stop 61
gataaaaggcttgaccacctccatg

SEQ ID NO: 237461 - DNA, 25 bp, Artificial
  probe
  misc_feature (1)..(25): SEQ ID NO: 2099; WAN024GAC_at; Start 47; Stop 71
ttgaccacctccatgacaaactcag

SEQ ID NO: 237462 - DNA, 25 bp, Artificial
  probe
  misc_feature (1)..(25): SEQ ID NO: 2099; WAN024GAC_at; Start 121; Stop 145
ttggaacttccaagccgcatactca

SEQ ID NO: 237463 - DNA, 25 bp, Artificial
  probe
  misc_feature (1)..(25): SEQ ID NO: 2099; WAN024GAC_at; Start 192; Stop 216
gactgatatccggatttcgtttgat

SEQ ID NO: 237464 - DNA, 25 bp, Artificial
  probe
  misc_feature (1)..(25): SEQ ID NO: 2099; WAN024GAC_at; Start 186; Stop 210
tcatgcgactgatatccggatttcg

SEQ ID NO: 237465 - DNA, 25 bp, Artificial
  probe
  misc_feature (1)..(25): SEQ ID NO: 2099; WAN024GAC_at; Start 236; Stop 260
gaatgtccaatgaaagactctttgc

SEQ ID NO: 237466 - DNA, 25 bp, Artificial
  probe
  misc_feature (1)..(25): SEQ ID NO: 2099; WAN024GAC_at; Start 90; Stop 114
caccaaactgctgccctgggatagg

SEQ ID NO: 237467 - DNA, 25 bp, Artificial
  probe
  misc_feature (1)..(25): SEQ ID NO: 2099; WAN024GAC_at; Start 262; Stop 286
attaaaaacattttgcccgtcatga

SEQ ID NO: 237468 - DNA, 25 bp, Artificial
  probe
  misc_feature (1)..(25): SEQ ID NO: 2099; WAN024GAC_at; Start 174; Stop 198
tagcaacgacaatcatgcgactgat

SEQ ID NO: 237469 - DNA, 25 bp, Artificial
  probe
  misc_feature (1)..(25): SEQ ID NO: 2099; WAN024GAC_at; Start 201; Stop 225
ccggatttcgtttgatagctgggat

SEQ ID NO: 237470 - DNA, 25 bp, Artificial
  probe
  misc_feature (1)..(25): SEQ ID NO: 2099; WAN024GAC_at; Start 86; Stop 110
ttaccaccaaactgctgccctggga

SEQ ID NO: 237471 - DNA, 25 bp, Artificial
  probe
  misc_feature (1)..(25): SEQ ID NO: 2099; WAN024GAC_at; Start 98; Stop 122
tgctgccctgggataggagattctt

SEQ ID NO: 237472 - DNA, 25 bp, Artificial
  probe
  misc_feature (1)..(25): SEQ ID NO: 2099; WAN024GAC_at; Start 223; Stop 247
gataatcttccatgaatgtccaatg

SEQ ID NO: 237473 - DNA, 25 bp, Artificial
  probe
  misc_feature (1)..(25): SEQ ID NO: 2099; WAN024GAC_at; Start 14; Stop 38
gcttttgtacgataggtctcatcga

SEQ ID NO: 237474 - DNA, 25 bp, Artificial
  probe
  misc_feature (1)..(25): SEQ ID NO: 2099; WAN024GAC_at; Start 218; Stop 242
gctgggataatcttccatgaatgtc

SEQ ID NO: 237475 - DNA, 25 bp, Artificial
  probe
  misc_feature (1)..(25): SEQ ID NO: 2099; WAN024GAC_at; Start 168; Stop 192
tgtcaatagcaacgacaatcatgcg

SEQ ID NO: 237476 - DNA, 25 bp, Artificial
  probe
  misc_feature (1)..(25): SEQ ID NO: 4987; WAN024GAD_at; Start 79; Stop 103
tatacaggtaaggagcgccgtgtac

SEQ ID NO: 237477 - DNA, 25 bp, Artificial
  probe
  misc_feature (1)..(25): SEQ ID NO: 4987; WAN024GAD_at; Start 681; Stop 705
caaacaagcctatatcgactcgtcg

SEQ ID NO: 237478 - DNA, 25 bp, Artificial
  probe
  misc_feature (1)..(25): SEQ ID NO: 4987; WAN024GAD_at; Start 306; Stop 330
tgagtatgcggcttggaagttccaa

SEQ ID NO: 237479 - DNA, 25 bp, Artificial
  probe
  misc_feature (1)..(25): SEQ ID NO: 4987; WAN024GAD_at; Start 635; Stop 659
cagaagaagcagatgatacagacaa

SEQ ID NO: 237480 - DNA, 25 bp, Artificial
  probe
  misc_feature (1)..(25): SEQ ID NO: 4987; WAN024GAD_at; Start 651; Stop 675
tacagacaagaccttgatggatggc

SEQ ID NO: 237481 - DNA, 25 bp, Artificial
  probe
  misc_feature (1)..(25): SEQ ID NO: 4987; WAN024GAD_at; Start 544; Stop 568
tctgcaaactggctccaccaagaag

SEQ ID NO: 237482 - DNA, 25 bp, Artificial
  probe
  misc_feature (1)..(25): SEQ ID NO: 4987; WAN024GAD_at; Start 737; Stop 761
gagtacatctggataatcttgtgct

SEQ ID NO: 237483 - DNA, 25 bp, Artificial
  probe
  misc_feature (1)..(25): SEQ ID NO: 4987; WAN024GAD_at; Start 390; Stop 414
catggaggtggtcaagccttttatc

SEQ ID NO: 237484 - DNA, 25 bp, Artificial
  probe
  misc_feature (1)..(25): SEQ ID NO: 4987; WAN024GAD_at; Start 259; Stop 283
cgcatgattgtcgttgctattgaca

SEQ ID NO: 237485 - DNA, 25 bp, Artificial
  probe
  misc_feature (1)..(25): SEQ ID NO: 4987; WAN024GAD_at; Start 711; Stop 735
ctattaccatgatttgatagcaggg

SEQ ID NO: 237486 - DNA, 25 bp, Artificial
  probe
  misc_feature (1)..(25): SEQ ID NO: 4987; WAN024GAD_at; Start 666; Stop 690
gatggatggcaatatcaaacaagcc

SEQ ID NO: 237487 - DNA, 25 bp, Artificial
  probe
  misc_feature (1)..(25): SEQ ID NO: 4987; WAN024GAD_at; Start 153; Stop 177
tgttgtatactttcatgacgggcaa

SEQ ID NO: 237488 - DNA, 25 bp, Artificial
  probe
  misc_feature (1)..(25): SEQ ID NO: 4987; WAN024GAD_at; Start 697; Stop 721
gactcgtcgctttgctattaccatg

SEQ ID NO: 237489 - DNA, 25 bp, Artificial
  probe
  misc_feature (1)..(25): SEQ ID NO: 4987; WAN024GAD_at; Start 169; Stop 193
gacgggcaaaatgtttttaatagca

SEQ ID NO: 237490 - DNA, 25 bp, Artificial
  probe
  misc_feature (1)..(25): SEQ ID NO: 4987; WAN024GAD_at; Start 424; Stop 448
tatcgtacaaaagcagactgccagc

SEQ ID NO: 237491 - DNA, 25 bp, Artificial
  probe
  misc_feature (1)..(25): SEQ ID NO: 4987; WAN024GAD_at; Start 456; Stop 480
tatgattggttcctcactaggaggc

SEQ ID NO: 237492 - DNA, 25 bp, Artificial
  probe
  misc_feature (1)..(25): SEQ ID NO: 4987; WAN024GAD_at; Start 586; Stop 610
gagtgccagaaactatcgcctgacc

SEQ ID NO: 237493 - DNA, 25 bp, Artificial
  probe
  misc_feature (1)..(25): SEQ ID NO: 4987; WAN024GAD_at; Start 192; Stop 216
caaagagtctttcattggacattca

SEQ ID NO: 237494 - DNA, 25 bp, Artificial
  probe
  misc_feature (1)..(25): SEQ ID NO: 4987; WAN024GAD_at; Start 790; Stop 814
gaaatcccttggtcagaaaatctac

SEQ ID NO: 237495 - DNA, 25 bp, Artificial
  probe
  misc_feature (1)..(25): SEQ ID NO: 4987; WAN024GAD_at; Start 761; Stop 785
taaaagttcagtctggtgccatcca

SEQ ID NO: 237496 - DNA, 25 bp, Artificial
  probe
  misc_feature (1)..(25): SEQ ID NO: 4987; WAN024GAD_at; Start 607; Stop 631
gaccagcgcatcttcatctatgtag

SEQ ID NO: 237497 - DNA, 25 bp, Artificial
  probe
  misc_feature (1)..(25): SEQ ID NO: 4987; WAN024GAD_at; Start 121; Stop 145
gattatgagaaagatacagaccgtt

SEQ ID NO: 237498 - DNA, 25 bp, Artificial
  probe
  misc_feature (1)..(25): SEQ ID NO: 4987; WAN024GAD_at; Start 476; Stop 500
gaggcaatattacccagtttatcgg

SEQ ID NO: 237499 - DNA, 25 bp, Artificial
  probe
  misc_feature (1)..(25): SEQ ID NO: 4987; WAN024GAD_at; Start 321; Stop 345
gaagttccaagaatctcctatccca

SEQ ID NO: 237500 - DNA, 25 bp, Artificial
  probe
  misc_feature (1)..(25): SEQ ID NO: 4987; WAN024GAD_at; Start 95; Stop 119
gccgtgtacgtattcttcttcctaa

SEQ ID NO: 237501 - DNA, 25 bp, Artificial
  probe
  misc_feature (1)..(25): SEQ ID NO: 4987; WAN024GAD_at; Start 138; Stop 162
agaccgttcctatcctgttgtatac

SEQ ID NO: 237502 - DNA, 25 bp, Artificial
  probe
  misc_feature (1)..(25): SEQ ID NO: 4987; WAN024GAD_at; Start 620; Stop 644
tcatctatgtaggaacagaagaagc

SEQ ID NO: 237503 - DNA, 25 bp, Artificial
  probe
  misc_feature (1)..(25): SEQ ID NO: 4987; WAN024GAD_at; Start 439; Stop 463
gactgccagcatacggctatgattg

SEQ ID NO: 237504 - DNA, 25 bp, Artificial
  probe
  misc_feature (1)..(25): SEQ ID NO: 4987; WAN024GAD_at; Start 225; Stop 249
tatcccagctatcaaacgaaatccg

SEQ ID NO: 237505 - DNA, 25 bp, Artificial
  probe
  misc_feature (1)..(25): SEQ ID NO: 4987; WAN024GAD_at; Start 241; Stop 265
cgaaatccggatatcagtcgcatga

SEQ ID NO: 237506 - DNA, 25 bp, Artificial
  probe
  misc_feature (1)..(25): SEQ ID NO: 4987; WAN024GAD_at; Start 776; Stop 800
gtgccatccatagtgaaatcccttg

SEQ ID NO: 237507 - DNA, 25 bp, Artificial
  probe
  misc_feature (1)..(25): SEQ ID NO: 4987; WAN024GAD_at; Start 527; Stop 551
gcttgggcgttttttcatctgcaaa

SEQ ID NO: 237508 - DNA, 25 bp, Artificial
  probe
  misc_feature (1)..(25): SEQ ID NO: 4987; WAN024GAD_at; Start 209; Stop 233
gacattcatggaagattatcccagc

SEQ ID NO: 237509 - DNA, 25 bp, Artificial
  probe
  misc_feature (1)..(25): SEQ ID NO: 4987; WAN024GAD_at; Start 490; Stop 514
cagtttatcggtttggaataccaag

SEQ ID NO: 237510 - DNA, 25 bp, Artificial
  probe
  misc_feature (1)..(25): SEQ ID NO: 5012; WAN024GAE_at; Start 168; Stop 192
catagaatcaccagctccaactgaa

SEQ ID NO: 237511 - DNA, 25 bp, Artificial
  probe
  misc_feature (1)..(25): SEQ ID NO: 5012; WAN024GAE_at; Start 201; Stop 225
tgttcctttgattggtttagcgaag

SEQ ID NO: 237512 - DNA, 25 bp, Artificial
  probe
  misc_feature (1)..(25): SEQ ID NO: 5012; WAN024GAE_at; Start 100; Stop 124
gccactccccatttgaaggcttcta

SEQ ID NO: 237513 - DNA, 25 bp, Artificial
  probe
  misc_feature (1)..(25): SEQ ID NO: 5012; WAN024GAE_at; Start 70; Stop 94
tcatctgagaaggtagttgccgttc

SEQ ID NO: 237514 - DNA, 25 bp, Artificial
  probe
  misc_feature (1)..(25): SEQ ID NO: 5012; WAN024GAE_at; Start 97; Stop 121
caagccactccccatttgaaggctt

SEQ ID NO: 237515 - DNA, 25 bp, Artificial
  probe
  misc_feature (1)..(25): SEQ ID NO: 5012; WAN024GAE_at; Start 141; Stop 165
gacaaattcacctgtgaatccagca

SEQ ID NO: 237516 - DNA, 25 bp, Artificial
  probe
  misc_feature (1)..(25): SEQ ID NO: 5012; WAN024GAE_at; Start 22; Stop 46
acctcaacttttccatatgtttctt

SEQ ID NO: 237517 - DNA, 25 bp, Artificial
  probe
  misc_feature (1)..(25): SEQ ID NO: 5012; WAN024GAE_at; Start 128; Stop 152
cgtcttttgatttgacaaattcacc

SEQ ID NO: 237518 - DNA, 25 bp, Artificial
  probe
  misc_feature (1)..(25): SEQ ID NO: 5012; WAN024GAE_at; Start 82; Stop 106
gtagttgccgttccgcaagccactc

SEQ ID NO: 237519 - DNA, 25 bp, Artificial
  probe
  misc_feature (1)..(25): SEQ ID NO: 5012; WAN024GAE_at; Start 54; Stop 78
ttccgccgttgccaagtcatctgag

SEQ ID NO: 237520 - DNA, 25 bp, Artificial
  probe
  misc_feature (1)..(25): SEQ ID NO: 5012; WAN024GAE_at; Start 176; Stop 200
caccagctccaactgaatttttgac

SEQ ID NO: 237521 - DNA, 25 bp, Artificial
  probe
  misc_feature (1)..(25): SEQ ID NO: 5012; WAN024GAE_at; Start 134; Stop 158
ttgatttgacaaattcacctgtgaa

SEQ ID NO: 237522 - DNA, 25 bp, Artificial
  probe
  misc_feature (1)..(25): SEQ ID NO: 5012; WAN024GAE_at; Start 35; Stop 59
catatgtttctttaataaattccgc

SEQ ID NO: 237523 - DNA, 25 bp, Artificial
  probe
  misc_feature (1)..(25): SEQ ID NO: 5012; WAN024GAE_at; Start 159; Stop 183
tccagcaaccatagaatcaccagct

SEQ ID NO: 237524 - DNA, 25 bp, Artificial
  probe
  misc_feature (1)..(25): SEQ ID NO: 5012; WAN024GAE_at; Start 183; Stop 207
tccaactgaatttttgactgttcct

SEQ ID NO: 237525 - DNA, 25 bp, Artificial
  probe
  misc_feature (1)..(25): SEQ ID NO: 5012; WAN024GAE_at; Start 57; Stop 81
cgccgttgccaagtcatctgagaag

SEQ ID NO: 237526 - DNA, 25 bp, Artificial
  probe
  misc_feature (1)..(25): SEQ ID NO: 5012; WAN024GAE_at; Start 73; Stop 97
tctgagaaggtagttgccgttccgc

SEQ ID NO: 237527 - DNA, 25 bp, Artificial
  probe
  misc_feature (1)..(25): SEQ ID NO: 5012; WAN024GAE_at; Start 204; Stop 228
tcctttgattggtttagcgaagtaa

SEQ ID NO: 237528 - DNA, 25 bp, Artificial
  probe
  misc_feature (1)..(25): SEQ ID NO: 5012; WAN024GAE_at; Start 198; Stop 222
gactgttcctttgattggtttagcg

SEQ ID NO: 237529 - DNA, 25 bp, Artificial
  probe
  misc_feature (1)..(25): SEQ ID NO: 5012; WAN024GAE_at; Start 153; Stop 177
tgtgaatccagcaaccatagaatca

SEQ ID NO: 237530 - DNA, 25 bp, Artificial
  probe
  misc_feature (1)..(25): SEQ ID NO: 5012; WAN024GAE_at; Start 172; Stop 196
gaatcaccagctccaactgaatttt

SEQ ID NO: 237531 - DNA, 25 bp, Artificial
  probe
  misc_feature (1)..(25): SEQ ID NO: 5012; WAN024GAE_at; Start 81; Stop 105
ggtagttgccgttccgcaagccact

SEQ ID NO: 237532 - DNA, 25 bp, Artificial
  probe
  misc_feature (1)..(25): SEQ ID NO: 5012; WAN024GAE_at; Start 148; Stop 172
tcacctgtgaatccagcaaccatag

SEQ ID NO: 237533 - DNA, 25 bp, Artificial
  probe
  misc_feature (1)..(25): SEQ ID NO: 5012; WAN024GAE_at; Start 63; Stop 87
tgccaagtcatctgagaaggtagtt

SEQ ID NO: 237534 - DNA, 25 bp, Artificial
  probe
  misc_feature (1)..(25): SEQ ID NO: 5012; WAN024GAE_at; Start 60; Stop 84
cgttgccaagtcatctgagaaggta

SEQ ID NO: 237535 - DNA, 25 bp, Artificial
  probe
  misc_feature (1)..(25): SEQ ID NO: 5012; WAN024GAE_at; Start 50; Stop 74
taaattccgccgttgccaagtcatc

SEQ ID NO: 237536 - DNA, 25 bp, Artificial
  probe
  misc_feature (1)..(25): SEQ ID NO: 5012; WAN024GAE_at; Start 163; Stop 187
gcaaccatagaatcaccagctccaa

SEQ ID NO: 237537 - DNA, 25 bp, Artificial
  probe
  misc_feature (1)..(25): SEQ ID NO: 5012; WAN024GAE_at; Start 156; Stop 180
gaatccagcaaccatagaatcacca

SEQ ID NO: 237538 - DNA, 25 bp, Artificial
  probe
  misc_feature (1)..(25): SEQ ID NO: 5012; WAN024GAE_at; Start 151; Stop 175
cctgtgaatccagcaaccatagaat

SEQ ID NO: 237539 - DNA, 25 bp, Artificial
  probe
  misc_feature (1)..(25): SEQ ID NO: 5012; WAN024GAE_at; Start 52; Stop 76
aattccgccgttgccaagtcatctg

SEQ ID NO: 237540 - DNA, 25 bp, Artificial
  probe
  misc_feature (1)..(25): SEQ ID NO: 5012; WAN024GAE_at; Start 66; Stop 90
caagtcatctgagaaggtagttgcc

SEQ ID NO: 237541 - DNA, 25 bp, Artificial
  probe
  misc_feature (1)..(25): SEQ ID NO: 5012; WAN024GAE_at; Start 43; Stop 67
tctttaataaattccgccgttgcca

SEQ ID NO: 237542 - DNA, 25 bp, Artificial
  probe
  misc_feature (1)..(25): SEQ ID NO: 5012; WAN024GAE_at; Start 76; Stop 100
gagaaggtagttgccgttccgcaag

SEQ ID NO: 237543 - DNA, 25 bp, Artificial
  probe
  misc_feature (1)..(25): SEQ ID NO: 5012; WAN024GAE_at; Start 79; Stop 103
aaggtagttgccgttccgcaagcca

SEQ ID NO: 237544 - DNA, 25 bp, Artificial
  probe
  misc_feature (1)..(25): SEQ ID NO: 5264; WAN024GAF_at; Start 204; Stop 228
aaacttatcatcactgtccatacga

SEQ ID NO: 237545 - DNA, 25 bp, Artificial
  probe
  misc_feature (1)..(25): SEQ ID NO: 5264; WAN024GAF_at; Start 86; Stop 110
cctctgctaaagtatctgtgataaa

SEQ ID NO: 237546 - DNA, 25 bp, Artificial
  probe
  misc_feature (1)..(25): SEQ ID NO: 5264; WAN024GAF_at; Start 132; Stop 156
aaatcccgtcgctgtatttggtata

SEQ ID NO: 237547 - DNA, 25 bp, Artificial
  probe
  misc_feature (1)..(25): SEQ ID NO: 5264; WAN024GAF_at; Start 155; Stop 179
tattcaaacgtttcaagacacggct

SEQ ID NO: 237548 - DNA, 25 bp, Artificial
  probe
  misc_feature (1)..(25): SEQ ID NO: 5264; WAN024GAF_at; Start 3; Stop 27
gatttctgtttcttggtctgctttg

SEQ ID NO: 237549 - DNA, 25 bp, Artificial
  probe
  misc_feature (1)..(25): SEQ ID NO: 5264; WAN024GAF_at; Start 43; Stop 67
cgagtatcttctgccacctggacaa

SEQ ID NO: 237550 - DNA, 25 bp, Artificial
  probe
  misc_feature (1)..(25): SEQ ID NO: 5264; WAN024GAF_at; Start 119; Stop 143
taaagccaccgataaatcccgtcgc

SEQ ID NO: 237551 - DNA, 25 bp, Artificial
  probe
  misc_feature (1)..(25): SEQ ID NO: 5264; WAN024GAF_at; Start 128; Stop 152
cgataaatcccgtcgctgtatttgg

SEQ ID NO: 237552 - DNA, 25 bp, Artificial
  probe
  misc_feature (1)..(25): SEQ ID NO: 5264; WAN024GAF_at; Start 59; Stop 83
cctggacaaaacgtgtctcgatttc

SEQ ID NO: 237553 - DNA, 25 bp, Artificial
  probe
  misc_feature (1)..(25): SEQ ID NO: 5264; WAN024GAF_at; Start 13; Stop 37
tcttggtctgctttgattttaacat

SEQ ID NO: 237554 - DNA, 25 bp, Artificial
  probe
  misc_feature (1)..(25): SEQ ID NO: 5264; WAN024GAF_at; Start 55; Stop 79
gccacctggacaaaacgtgtctcga

SEQ ID NO: 237555 - DNA, 25 bp, Artificial
  probe
  misc_feature (1)..(25): SEQ ID NO: 5264; WAN024GAF_at; Start 104; Stop 128
tgataaatttaccagtaaagccacc

SEQ ID NO: 237556 - DNA, 25 bp, Artificial
  probe
  misc_feature (1)..(25): SEQ ID NO: 5264; WAN024GAF_at; Start 162; Stop 186
acgtttcaagacacggctgacattg

SEQ ID NO: 237557 - DNA, 25 bp, Artificial
  probe
  misc_feature (1)..(25): SEQ ID NO: 5264; WAN024GAF_at; Start 140; Stop 164
tcgctgtatttggtatattcaaacg

SEQ ID NO: 237558 - DNA, 25 bp, Artificial
  probe
  misc_feature (1)..(25): SEQ ID NO: 5264; WAN024GAF_at; Start 246; Stop 270
gacttggtccaaacgaacgatatag

SEQ ID NO: 237559 - DNA, 25 bp, Artificial
  probe
  misc_feature (1)..(25): SEQ ID NO: 5264; WAN024GAF_at; Start 41; Stop 65
tacgagtatcttctgccacctggac

SEQ ID NO: 237560 - DNA, 25 bp, Artificial
  probe
  misc_feature (1)..(25): SEQ ID NO: 5264; WAN024GAF_at; Start 82; Stop 106
tcttcctctgctaaagtatctgtga

SEQ ID NO: 237561 - DNA, 25 bp, Artificial
  probe
  misc_feature (1)..(25): SEQ ID NO: 5264; WAN024GAF_at; Start 39; Stop 63
gatacgagtatcttctgccacctgg

SEQ ID NO: 237562 - DNA, 25 bp, Artificial
  probe
  misc_feature (1)..(25): SEQ ID NO: 5264; WAN024GAF_at; Start 186; Stop 210
gattcctttcccaccagcaaactta

SEQ ID NO: 237563 - DNA, 25 bp, Artificial
  probe
  misc_feature (1)..(25): SEQ ID NO: 5264; WAN024GAF_at; Start 136; Stop 160
cccgtcgctgtatttggtatattca

SEQ ID NO: 237564 - DNA, 25 bp, Artificial
  probe
  misc_feature (1)..(25): SEQ ID NO: 5264; WAN024GAF_at; Start 52; Stop 76
tctgccacctggacaaaacgtgtct

SEQ ID NO: 237565 - DNA, 25 bp, Artificial
  probe
  misc_feature (1)..(25): SEQ ID NO: 5264; WAN024GAF_at; Start 22; Stop 46
gctttgattttaacattgatacgag

SEQ ID NO: 237566 - DNA, 25 bp, Artificial
  probe
  misc_feature (1)..(25): SEQ ID NO: 5264; WAN024GAF_at; Start 159; Stop 183
caaacgtttcaagacacggctgaca

SEQ ID NO: 237567 - DNA, 25 bp, Artificial
  probe
  misc_feature (1)..(25): SEQ ID NO: 5264; WAN024GAF_at; Start 113; Stop 137
taccagtaaagccaccgataaatcc

SEQ ID NO: 237568 - DNA, 25 bp, Artificial
  probe
  misc_feature (1)..(25): SEQ ID NO: 5264; WAN024GAF_at; Start 47; Stop 71
tatcttctgccacctggacaaaacg

SEQ ID NO: 237569 - DNA, 25 bp, Artificial
  probe
  misc_feature (1)..(25): SEQ ID NO: 5264; WAN024GAF_at; Start 180; Stop 204
gacattgattcctttcccaccagca

SEQ ID NO: 237570 - DNA, 25 bp, Artificial
  probe
  misc_feature (1)..(25): SEQ ID NO: 5264; WAN024GAF_at; Start 168; Stop 192
caagacacggctgacattgattcct

SEQ ID NO: 237571 - DNA, 25 bp, Artificial
  probe
  misc_feature (1)..(25): SEQ ID NO: 5264; WAN024GAF_at; Start 233; Stop 257
cactaccaactttgacttggtccaa

SEQ ID NO: 237572 - DNA, 25 bp, Artificial
  probe
  misc_feature (1)..(25): SEQ ID NO: 5264; WAN024GAF_at; Start 199; Stop 223
ccagcaaacttatcatcactgtcca

SEQ ID NO: 237573 - DNA, 25 bp, Artificial
  probe
  misc_feature (1)..(25): SEQ ID NO: 5264; WAN024GAF_at; Start 173; Stop 197
cacggctgacattgattcctttccc

SEQ ID NO: 237574 - DNA, 25 bp, Artificial
  probe
  misc_feature (1)..(25): SEQ ID NO: 5264; WAN024GAF_at; Start 94; Stop 118
aaagtatctgtgataaatttaccag

SEQ ID NO: 237575 - DNA, 25 bp, Artificial
  probe
  misc_feature (1)..(25): SEQ ID NO: 5264; WAN024GAF_at; Start 67; Stop 91
aaacgtgtctcgatttcttcctctg

SEQ ID NO: 237576 - DNA, 25 bp, Artificial
  probe
  misc_feature (1)..(25): SEQ ID NO: 5264; WAN024GAF_at; Start 73; Stop 97
gtctcgatttcttcctctgctaaag

SEQ ID NO: 237577 - DNA, 25 bp, Artificial
  probe
  misc_feature (1)..(25): SEQ ID NO: 5264; WAN024GAF_at; Start 123; Stop 147
gccaccgataaatcccgtcgctgta

SEQ ID NO: 237578 - DNA, 25 bp, Artificial
  probe
  misc_feature (1)..(25): SEQ ID NO: 1860; WAN024GAG_at; Start 842; Stop 866
tctcagatgacttggcaacggcgga

SEQ ID NO: 237579 - DNA, 25 bp, Artificial
  probe
  misc_feature (1)..(25): SEQ ID NO: 1860; WAN024GAG_at; Start 379; Stop 403
gatacagttgtctttgcaggttcaa

SEQ ID NO: 237580 - DNA, 25 bp, Artificial
  probe
  misc_feature (1)..(25): SEQ ID NO: 1860; WAN024GAG_at; Start 397; Stop 421
ggttcaagtgctaaaaatctaggca

SEQ ID NO: 237581 - DNA, 25 bp, Artificial
  probe
  misc_feature (1)..(25): SEQ ID NO: 1860; WAN024GAG_at; Start 197; Stop 221
ttatcacagatactttagcagagga

SEQ ID NO: 237582 - DNA, 25 bp, Artificial
  probe
  misc_feature (1)..(25): SEQ ID NO: 1860; WAN024GAG_at; Start 126; Stop 150
cagccgtgtcttgaaacgtttgaat

SEQ ID NO: 237583 - DNA, 25 bp, Artificial
  probe
  misc_feature (1)..(25): SEQ ID NO: 1860; WAN024GAG_at; Start 700; Stop 724
gctaaaccaatcaaaggaacagtca

SEQ ID NO: 237584 - DNA, 25 bp, Artificial
  probe
  misc_feature (1)..(25): SEQ ID NO: 1860; WAN024GAG_at; Start 96; Stop 120
taagtttgctggtgggaaaggaatc

SEQ ID NO: 237585 - DNA, 25 bp, Artificial
  probe
  misc_feature (1)..(25): SEQ ID NO: 1860; WAN024GAG_at; Start 268; Stop 292
aatgttaaaatcaaagcagaccaag

SEQ ID NO: 237586 - DNA, 25 bp, Artificial
  probe
  misc_feature (1)..(25): SEQ ID NO: 1860; WAN024GAG_at; Start 243; Stop 267
ccaggtggcagaagatactcgtatc

SEQ ID NO: 237587 - DNA, 25 bp, Artificial
  probe
  misc_feature (1)..(25): SEQ ID NO: 1860; WAN024GAG_at; Start 745; Stop 769
gattctatggttgctggattcacag

SEQ ID NO: 237588 - DNA, 25 bp, Artificial
  probe
  misc_feature (1)..(25): SEQ ID NO: 1860; WAN024GAG_at; Start 723; Stop 747
caaaaattcagttggagctggtgat

SEQ ID NO: 237589 - DNA, 25 bp, Artificial
  probe
  misc_feature (1)..(25): SEQ ID NO: 1860; WAN024GAG_at; Start 289; Stop 313
caagaaacagaaatcaacggaacgg

SEQ ID NO: 237590 - DNA, 25 bp, Artificial
  probe
  misc_feature (1)..(25): SEQ ID NO: 1860; WAN024GAG_at; Start 302; Stop 326
tcaacggaacgggtccaactgttga

SEQ ID NO: 237591 - DNA, 25 bp, Artificial
  probe
  misc_feature (1)..(25): SEQ ID NO: 1860; WAN024GAG_at; Start 685; Stop 709
gagggagcttacttcgctaaaccaa

SEQ ID NO: 237592 - DNA, 25 bp, Artificial
  probe
  misc_feature (1)..(25): SEQ ID NO: 1860; WAN024GAG_at; Start 500; Stop 524
taattgatagtttggactaccagcc

SEQ ID NO: 237593 - DNA, 25 bp, Artificial
  probe
  misc_feature (1)..(25): SEQ ID NO: 1860; WAN024GAG_at; Start 827; Stop 851
gaacggcaactaccttctcagatga

SEQ ID NO: 237594 - DNA, 25 bp, Artificial
  probe
  misc_feature (1)..(25): SEQ ID NO: 1860; WAN024GAG_at; Start 619; Stop 643
ctggctaagggtgctcaaaatgtta

SEQ ID NO: 237595 - DNA, 25 bp, Artificial
  probe
  misc_feature (1)..(25): SEQ ID NO: 1860; WAN024GAG_at; Start 34; Stop 58
gactatatcgttcgtttggaccaag

SEQ ID NO: 237596 - DNA, 25 bp, Artificial
  probe
  misc_feature (1)..(25): SEQ ID NO: 1860; WAN024GAG_at; Start 539; Stop 563
caaacaatcatgaacttggagcgat

SEQ ID NO: 237597 - DNA, 25 bp, Artificial
  probe
  misc_feature (1)..(25): SEQ ID NO: 1860; WAN024GAG_at; Start 212; Stop 236
tagcagaggaagaaatcgagacacg

SEQ ID NO: 237598 - DNA, 25 bp, Artificial
  probe
  misc_feature (1)..(25): SEQ ID NO: 1860; WAN024GAG_at; Start 815; Stop 839
gagtggcttgcggaacggcaactac

SEQ ID NO: 237599 - DNA, 25 bp, Artificial
  probe
  misc_feature (1)..(25): SEQ ID NO: 1860; WAN024GAG_at; Start 589; Stop 613
gatgaaattgagaaatacgctcgtg

SEQ ID NO: 237600 - DNA, 25 bp, Artificial
  probe
  misc_feature (1)..(25): SEQ ID NO: 1860; WAN024GAG_at; Start 159; Stop 183
tacagcgacgggatttatcggtggc

SEQ ID NO: 237601 - DNA, 25 bp, Artificial
  probe
  misc_feature (1)..(25): SEQ ID NO: 1860; WAN024GAG_at; Start 454; Stop 478
cgccagactggtgcgcaagtggtct

SEQ ID NO: 237602 - DNA, 25 bp, Artificial
  probe
  misc_feature (1)..(25): SEQ ID NO: 1860; WAN024GAG_at; Start 669; Stop 693
ccttcttgtcacatctgagggagct

SEQ ID NO: 237603 - DNA, 25 bp, Artificial
  probe
  misc_feature (1)..(25): SEQ ID NO: 1860; WAN024GAG_at; Start 604; Stop 628
tacgctcgtgagttactggctaagg

SEQ ID NO: 237604 - DNA, 25 bp, Artificial
  probe
  misc_feature (1)..(25): SEQ ID NO: 1860; WAN024GAG_at; Start 111; Stop 135
gaaaggaatcaatgtcagccgtgtc

SEQ ID NO: 237605 - DNA, 25 bp, Artificial
  probe
  misc_feature (1)..(25): SEQ ID NO: 1860; WAN024GAG_at; Start 513; Stop 537
ggactaccagcctcttcttgtaaaa

SEQ ID NO: 237606 - DNA, 25 bp, Artificial
  probe
  misc_feature (1)..(25): SEQ ID NO: 1860; WAN024GAG_at; Start 436; Stop 460
gatttgatttccttgacgcgccaga

SEQ ID NO: 237607 - DNA, 25 bp, Artificial
  probe
  misc_feature (1)..(25): SEQ ID NO: 1860; WAN024GAG_at; Start 146; Stop 170
tgaatataccaaatacagcgacggg

SEQ ID NO: 237608 - DNA, 25 bp, Artificial
  probe
  misc_feature (1)..(25): SEQ ID NO: 1860; WAN024GAG_at; Start 637; Stop 661
aatgttattatctctatggctggtg

SEQ ID NO: 237609 - DNA, 25 bp, Artificial
  probe
  misc_feature (1)..(25): SEQ ID NO: 1860; WAN024GAG_at; Start 228; Stop 252
cgagacacgttttgtccaggtggca

SEQ ID NO: 237610 - DNA, 25 bp, Artificial
  probe
  misc_feature (1)..(25): SEQ ID NO: 1860; WAN024GAG_at; Start 469; Stop 493
caagtggtctgtgactttgaaggac

SEQ ID NO: 237611 - DNA, 25 bp, Artificial
  probe
  misc_feature (1)..(25): SEQ ID NO: 1860; WAN024GAG_at; Start 361; Stop 385
tctagtctgacagcagaagatacag

SEQ ID NO: 237612 - DNA, 25 bp, Artificial
  probe
  misc_feature (1)..(25): SEQ ID NO: 5636; WAN024GAH_at; Start 92; Stop 116
tcaaccaactgagcggcatggtgaa

SEQ ID NO: 237613 - DNA, 25 bp, Artificial
  probe
  misc_feature (1)..(25): SEQ ID NO: 5636; WAN024GAH_at; Start 129; Stop 153
caactgtaacattcttattgaccaa

SEQ ID NO: 237614 - DNA, 25 bp, Artificial
  probe
  misc_feature (1)..(25): SEQ ID NO: 5636; WAN024GAH_at; Start 213; Stop 237
taatgagagaggctgctttctgagc

SEQ ID NO: 237615 - DNA, 25 bp, Artificial
  probe
  misc_feature (1)..(25): SEQ ID NO: 5636; WAN024GAH_at; Start 208; Stop 232
ttctttaatgagagaggctgctttc

SEQ ID NO: 237616 - DNA, 25 bp, Artificial
  probe
  misc_feature (1)..(25): SEQ ID NO: 5636; WAN024GAH_at; Start 276; Stop 300
cttgaatggtttcttcttcctgtaa

SEQ ID NO: 237617 - DNA, 25 bp, Artificial
  probe
  misc_feature (1)..(25): SEQ ID NO: 5636; WAN024GAH_at; Start 182; Stop 206
ccagcatcgataaagatgacatctt

SEQ ID NO: 237618 - DNA, 25 bp, Artificial
  probe
  misc_feature (1)..(25): SEQ ID NO: 5636; WAN024GAH_at; Start 2; Stop 26
tggttaatctggttaagagcaacgc

SEQ ID NO: 237619 - DNA, 25 bp, Artificial
  probe
  misc_feature (1)..(25): SEQ ID NO: 5636; WAN024GAH_at; Start 121; Stop 145
gttggtcacaactgtaacattctta

SEQ ID NO: 237620 - DNA, 25 bp, Artificial
  probe
  misc_feature (1)..(25): SEQ ID NO: 5636; WAN024GAH_at; Start 155; Stop 179
tcatgaatcaaaaaagcagttgttg

SEQ ID NO: 237621 - DNA, 25 bp, Artificial
  probe
  misc_feature (1)..(25): SEQ ID NO: 5636; WAN024GAH_at; Start 84; Stop 108
tctgcttttcaaccaactgagcggc

SEQ ID NO: 237622 - DNA, 25 bp, Artificial
  probe
  misc_feature (1)..(25): SEQ ID NO: 5636; WAN024GAH_at; Start 34; Stop 58
actagcatctgtcgccgtcttgacg

SEQ ID NO: 237623 - DNA, 25 bp, Artificial
  probe
  misc_feature (1)..(25): SEQ ID NO: 5636; WAN024GAH_at; Start 173; Stop 197
gttgttgttccagcatcgataaaga

SEQ ID NO: 237624 - DNA, 25 bp, Artificial
  probe
  misc_feature (1)..(25): SEQ ID NO: 5636; WAN024GAH_at; Start 39; Stop 63
catctgtcgccgtcttgacgtttcc

SEQ ID NO: 237625 - DNA, 25 bp, Artificial
  probe
  misc_feature (1)..(25): SEQ ID NO: 5636; WAN024GAH_at; Start 150; Stop 174
ccaattcatgaatcaaaaaagcagt

SEQ ID NO: 237626 - DNA, 25 bp, Artificial
  probe
  misc_feature (1)..(25): SEQ ID NO: 5636; WAN024GAH_at; Start 5; Stop 29
ttaatctggttaagagcaacgcccc

SEQ ID NO: 237627 - DNA, 25 bp, Artificial
  probe
  misc_feature (1)..(25): SEQ ID NO: 5636; WAN024GAH_at; Start 57; Stop 81
cgtttcctccaaccatgacagttgg

SEQ ID NO: 237628 - DNA, 25 bp, Artificial
  probe
  misc_feature (1)..(25): SEQ ID NO: 5636; WAN024GAH_at; Start 31; Stop 55
gatactagcatctgtcgccgtcttg

SEQ ID NO: 237629 - DNA, 25 bp, Artificial
  probe
  misc_feature (1)..(25): SEQ ID NO: 5636; WAN024GAH_at; Start 80; Stop 104
ggaatctgcttttcaaccaactgag

SEQ ID NO: 237630 - DNA, 25 bp, Artificial
  probe
  misc_feature (1)..(25): SEQ ID NO: 5636; WAN024GAH_at; Start 114; Stop 138
gaatggagttggtcacaactgtaac

SEQ ID NO: 237631 - DNA, 25 bp, Artificial
  probe
  misc_feature (1)..(25): SEQ ID NO: 5636; WAN024GAH_at; Start 196; Stop 220
gatgacatctttttctttaatgaga

SEQ ID NO: 237632 - DNA, 25 bp, Artificial
  probe
  misc_feature (1)..(25): SEQ ID NO: 5636; WAN024GAH_at; Start 87; Stop 111
gcttttcaaccaactgagcggcatg

SEQ ID NO: 237633 - DNA, 25 bp, Artificial
  probe
  misc_feature (1)..(25): SEQ ID NO: 5636; WAN024GAH_at; Start 204; Stop 228
ctttttctttaatgagagaggctgc

SEQ ID NO: 237634 - DNA, 25 bp, Artificial
  probe
  misc_feature (1)..(25): SEQ ID NO: 5636; WAN024GAH_at; Start 170; Stop 194
gcagttgttgttccagcatcgataa

SEQ ID NO: 237635 - DNA, 25 bp, Artificial
  probe
  misc_feature (1)..(25): SEQ ID NO: 5636; WAN024GAH_at; Start 66; Stop 90
caaccatgacagttggaatctgctt

SEQ ID NO: 237636 - DNA, 25 bp, Artificial
  probe
  misc_feature (1)..(25): SEQ ID NO: 5636; WAN024GAH_at; Start 178; Stop 202
tgttccagcatcgataaagatgaca

SEQ ID NO: 237637 - DNA, 25 bp, Artificial
  probe
  misc_feature (1)..(25): SEQ ID NO: 5636; WAN024GAH_at; Start 53; Stop 77
ttgacgtttcctccaaccatgacag

SEQ ID NO: 237638 - DNA, 25 bp, Artificial
  probe
  misc_feature (1)..(25): SEQ ID NO: 5636; WAN024GAH_at; Start 167; Stop 191
aaagcagttgttgttccagcatcga

SEQ ID NO: 237639 - DNA, 25 bp, Artificial
  probe
  misc_feature (1)..(25): SEQ ID NO: 5636; WAN024GAH_at; Start 11; Stop 35
tggttaagagcaacgcccccgatac

SEQ ID NO: 237640 - DNA, 25 bp, Artificial
  probe
  misc_feature (1)..(25): SEQ ID NO: 5636; WAN024GAH_at; Start 219; Stop 243
gagaggctgctttctgagccagcaa

SEQ ID NO: 237641 - DNA, 25 bp, Artificial
  probe
  misc_feature (1)..(25): SEQ ID NO: 5636; WAN024GAH_at; Start 108; Stop 132
catggtgaatggagttggtcacaac

SEQ ID NO: 237642 - DNA, 25 bp, Artificial
  probe
  misc_feature (1)..(25): SEQ ID NO: 5636; WAN024GAH_at; Start 89; Stop 113
ttttcaaccaactgagcggcatggt

SEQ ID NO: 237643 - DNA, 25 bp, Artificial
  probe
  misc_feature (1)..(25): SEQ ID NO: 5636; WAN024GAH_at; Start 44; Stop 68
gtcgccgtcttgacgtttcctccaa

SEQ ID NO: 237644 - DNA, 25 bp, Artificial
  probe
  misc_feature (1)..(25): SEQ ID NO: 5636; WAN024GAH_at; Start 135; Stop 159
taacattcttattgaccaattcatg

SEQ ID NO: 237645 - DNA, 25 bp, Artificial
  probe
  misc_feature (1)..(25): SEQ ID NO: 5636; WAN024GAH_at; Start 50; Stop 74
gtcttgacgtttcctccaaccatga

SEQ ID NO: 237646 - DNA, 25 bp, Artificial
  probe
  misc_feature (1)..(25): SEQ ID NO: 4285; WAN024GAI_at; Start 101; Stop 125
caacggttcgaagagacttggatga

SEQ ID NO: 237647 - DNA, 25 bp, Artificial
  probe
  misc_feature (1)..(25): SEQ ID NO: 4285; WAN024GAI_at; Start 181; Stop 205
tccttacaggaagaagaaaccattc

SEQ ID NO: 237648 - DNA, 25 bp, Artificial
  probe
  misc_feature (1)..(25): SEQ ID NO: 4285; WAN024GAI_at; Start 153; Stop 177
tgtgcatggtggagcagaactcccc

SEQ ID NO: 237649 - DNA, 25 bp, Artificial
  probe
  misc_feature (1)..(25): SEQ ID NO: 4285; WAN024GAI_at; Start 567; Stop 591
gaaaagagctattttggagaatgcc

SEQ ID NO: 237650 - DNA, 25 bp, Artificial
  probe
  misc_feature (1)..(25): SEQ ID NO: 4285; WAN024GAI_at; Start 629; Stop 653
gacaaacttgctttgccaaggtagc

SEQ ID NO: 237651 - DNA, 25 bp, Artificial
  probe
  misc_feature (1)..(25): SEQ ID NO: 4285; WAN024GAI_at; Start 293; Stop 317
tcgatgctggaacaacaactgcttt

SEQ ID NO: 237652 - DNA, 25 bp, Artificial
  probe
  misc_feature (1)..(25): SEQ ID NO: 4285; WAN024GAI_at; Start 46; Stop 70
caacatcatgtagtttctctagaaa

SEQ ID NO: 237653 - DNA, 25 bp, Artificial
  probe
  misc_feature (1)..(25): SEQ ID NO: 4285; WAN024GAI_at; Start 117; Stop 141
cttggatgagttggaagcggaaaac

SEQ ID NO: 237654 - DNA, 25 bp, Artificial
  probe
  misc_feature (1)..(25): SEQ ID NO: 4285; WAN024GAI_at; Start 256; Stop 280
gcagcctctctcattaaagaaaaag

SEQ ID NO: 237655 - DNA, 25 bp, Artificial
  probe
  misc_feature (1)..(25): SEQ ID NO: 4285; WAN024GAI_at; Start 487; Stop 511
cactttgaccgtgcctttatcggaa

SEQ ID NO: 237656 - DNA, 25 bp, Artificial
  probe
  misc_feature (1)..(25): SEQ ID NO: 4285; WAN024GAI_at; Start 339; Stop 363
taagaatgttacagttgtgaccaac

SEQ ID NO: 237657 - DNA, 25 bp, Artificial
  probe
  misc_feature (1)..(25): SEQ ID NO: 4285; WAN024GAI_at; Start 416; Stop 440
ttggaggaaacgtcaagacggcgac

SEQ ID NO: 237658 - DNA, 25 bp, Artificial
  probe
  misc_feature (1)..(25): SEQ ID NO: 4285; WAN024GAI_at; Start 532; Stop 556
tattatacgactcctgatatggagg

SEQ ID NO: 237659 - DNA, 25 bp, Artificial
  probe
  misc_feature (1)..(25): SEQ ID NO: 4285; WAN024GAI_at; Start 659; Stop 683
tcaaacgcgctatcgttatcactag

SEQ ID NO: 237660 - DNA, 25 bp, Artificial
  probe
  misc_feature (1)..(25): SEQ ID NO: 4285; WAN024GAI_at; Start 128; Stop 152
tggaagcggaaaacaagcttcgtcg

SEQ ID NO: 237661 - DNA, 25 bp, Artificial
  probe
  misc_feature (1)..(25): SEQ ID NO: 4285; WAN024GAI_at; Start 305; Stop 329
caacaactgcttttttgattcatga

SEQ ID NO: 237662 - DNA, 25 bp, Artificial
  probe
  misc_feature (1)..(25): SEQ ID NO: 4285; WAN024GAI_at; Start 242; Stop 266
tgctggctcagaaagcagcctctct

SEQ ID NO: 237663 - DNA, 25 bp, Artificial
  probe
  misc_feature (1)..(25): SEQ ID NO: 4285; WAN024GAI_at; Start 137; Stop 161
aaaacaagcttcgtcgtgtgcatgg

SEQ ID NO: 237664 - DNA, 25 bp, Artificial
  probe
  misc_feature (1)..(25): SEQ ID NO: 4285; WAN024GAI_at; Start 287; Stop 311
tctttatcgatgctggaacaacaac

SEQ ID NO: 237665 - DNA, 25 bp, Artificial
  probe
  misc_feature (1)..(25): SEQ ID NO: 4285; WAN024GAI_at; Start 34; Stop 58
gaggagttaaatcaacatcatgtag

SEQ ID NO: 237666 - DNA, 25 bp, Artificial
  probe
  misc_feature (1)..(25): SEQ ID NO: 4285; WAN024GAI_at; Start 74; Stop 98
tagttagtttgctagaaacgtcaga

SEQ ID NO: 237667 - DNA, 25 bp, Artificial
  probe
  misc_feature (1)..(25): SEQ ID NO: 4285; WAN024GAI_at; Start 699; Stop 723
cttgcaggttattaaggagaaaacg

SEQ ID NO: 237668 - DNA, 25 bp, Artificial
  probe
  misc_feature (1)..(25): SEQ ID NO: 4285; WAN024GAI_at; Start 595; Stop 619
cagacctacgtcttggtggattcgt

SEQ ID NO: 237669 - DNA, 25 bp, Artificial
  probe
  misc_feature (1)..(25): SEQ ID NO: 4285; WAN024GAI_at; Start 86; Stop 110
tagaaacgtcagaatcaacggttcg

SEQ ID NO: 237670 - DNA, 25 bp, Artificial
  probe
  misc_feature (1)..(25): SEQ ID NO: 4285; WAN024GAI_at; Start 456; Stop 480
gggcgttgctcttaaccagattaac

SEQ ID NO: 237671 - DNA, 25 bp, Artificial
  probe
  misc_feature (1)..(25): SEQ ID NO: 4285; WAN024GAI_at; Start 328; Stop 352
gaattggtcaataagaatgttacag

SEQ ID NO: 237672 - DNA, 25 bp, Artificial
  probe
  misc_feature (1)..(25): SEQ ID NO: 4285; WAN024GAI_at; Start 581; Stop 605
tggagaatgccaagcagacctacgt

SEQ ID NO: 237673 - DNA, 25 bp, Artificial
  probe
  misc_feature (1)..(25): SEQ ID NO: 4285; WAN024GAI_at; Start 675; Stop 699
tatcactagtcaagggcatgagctc

SEQ ID NO: 237674 - DNA, 25 bp, Artificial
  probe
  misc_feature (1)..(25): SEQ ID NO: 4285; WAN024GAI_at; Start 403; Stop 427
ccaactgtcatggttggaggaaacg

SEQ ID NO: 237675 - DNA, 25 bp, Artificial
  probe
  misc_feature (1)..(25): SEQ ID NO: 4285; WAN024GAI_at; Start 523; Stop 547
gacgatggctattatacgactcctg

SEQ ID NO: 237676 - DNA, 25 bp, Artificial
  probe
  misc_feature (1)..(25): SEQ ID NO: 4285; WAN024GAI_at; Start 685; Stop 709
caagggcatgagctcttgcaggtta

SEQ ID NO: 237677 - DNA, 25 bp, Artificial
  probe
  misc_feature (1)..(25): SEQ ID NO: 4285; WAN024GAI_at; Start 352; Stop 376
gttgtgaccaactccattcaccatg

SEQ ID NO: 237678 - DNA, 25 bp, Artificial
  probe
  misc_feature (1)..(25): SEQ ID NO: 4285; WAN024GAI_at; Start 474; Stop 498
gattaaccaattgcactttgaccgt

SEQ ID NO: 237679 - DNA, 25 bp, Artificial
  probe
  misc_feature (1)..(25): SEQ ID NO: 4285; WAN024GAI_at; Start 429; Stop 453
caagacggcgacagatgctagtatc

SEQ ID NO: 237680 - DNA, 25 bp, Artificial
  probe
  misc_feature (1)..(25): SEQ ID NO: 3721; WAN024GAJ_at; Start 29; Stop 53
cgtgttggaaacgcggtaggcgtgt

SEQ ID NO: 237681 - DNA, 25 bp, Artificial
  probe
  misc_feature (1)..(25): SEQ ID NO: 3721; WAN024GAJ_at; Start 5; Stop 29
gattactcaagaggcttaagaggcc

SEQ ID NO: 237682 - DNA, 25 bp, Artificial
  probe
  misc_feature (1)..(25): SEQ ID NO: 3721; WAN024GAJ_at; Start 31; Stop 55
tgttggaaacgcggtaggcgtgtaa

SEQ ID NO: 237683 - DNA, 25 bp, Artificial
  probe
  misc_feature (1)..(25): SEQ ID NO: 3721; WAN024GAJ_at; Start 9; Stop 33
actcaagaggcttaagaggccgtgt

SEQ ID NO: 237684 - DNA, 25 bp, Artificial
  probe
  misc_feature (1)..(25): SEQ ID NO: 3721; WAN024GAJ_at; Start 13; Stop 37
aagaggcttaagaggccgtgttgga

SEQ ID NO: 237685 - DNA, 25 bp, Artificial
  probe
  misc_feature (1)..(25): SEQ ID NO: 3721; WAN024GAJ_at; Start 14; Stop 38
agaggcttaagaggccgtgttggaa

SEQ ID NO: 237686 - DNA, 25 bp, Artificial
  probe
  misc_feature (1)..(25): SEQ ID NO: 3721; WAN024GAJ_at; Start 34; Stop 58
tggaaacgcggtaggcgtgtaatag

SEQ ID NO: 237687 - DNA, 25 bp, Artificial
  probe
  misc_feature (1)..(25): SEQ ID NO: 3721; WAN024GAJ_at; Start 38; Stop 62
aacgcggtaggcgtgtaatagcgtg

SEQ ID NO: 237688 - DNA, 25 bp, Artificial
  probe
  misc_feature (1)..(25): SEQ ID NO: 3721; WAN024GAJ_at; Start 11; Stop 35
tcaagaggcttaagaggccgtgttg

SEQ ID NO: 237689 - DNA, 25 bp, Artificial
  probe
  misc_feature (1)..(25): SEQ ID NO: 3721; WAN024GAJ_at; Start 39; Stop 63
acgcggtaggcgtgtaatagcgtgc

SEQ ID NO: 237690 - DNA, 25 bp, Artificial
  probe
  misc_feature (1)..(25): SEQ ID NO: 3721; WAN024GAJ_at; Start 2; Stop 26
gaagattactcaagaggcttaagag

SEQ ID NO: 237691 - DNA, 25 bp, Artificial
  probe
  misc_feature (1)..(25): SEQ ID NO: 3721; WAN024GAJ_at; Start 10; Stop 34
ctcaagaggcttaagaggccgtgtt

SEQ ID NO: 237692 - DNA, 25 bp, Artificial
  probe
  misc_feature (1)..(25): SEQ ID NO: 3721; WAN024GAJ_at; Start 42; Stop 66
cggtaggcgtgtaatagcgtgcgtg

SEQ ID NO: 237693 - DNA, 25 bp, Artificial
  probe
  misc_feature (1)..(25): SEQ ID NO: 3721; WAN024GAJ_at; Start 23; Stop 47
agaggccgtgttggaaacgcggtag

SEQ ID NO: 237694 - DNA, 25 bp, Artificial
  probe
  misc_feature (1)..(25): SEQ ID NO: 3721; WAN024GAJ_at; Start 28; Stop 52
ccgtgttggaaacgcggtaggcgtg

SEQ ID NO: 237695 - DNA, 25 bp, Artificial
  probe
  misc_feature (1)..(25): SEQ ID NO: 3721; WAN024GAJ_at; Start 3; Stop 27
aagattactcaagaggcttaagagg

SEQ ID NO: 237696 - DNA, 25 bp, Artificial
  probe
  misc_feature (1)..(25): SEQ ID NO: 3721; WAN024GAJ_at; Start 19; Stop 43
cttaagaggccgtgttggaaacgcg

SEQ ID NO: 237697 - DNA, 25 bp, Artificial
  probe
  misc_feature (1)..(25): SEQ ID NO: 3721; WAN024GAJ_at; Start 12; Stop 36
caagaggcttaagaggccgtgttgg

SEQ ID NO: 237698 - DNA, 25 bp, Artificial
  probe
  misc_feature (1)..(25): SEQ ID NO: 3721; WAN024GAJ_at; Start 30; Stop 54
gtgttggaaacgcggtaggcgtgta

SEQ ID NO: 237699 - DNA, 25 bp, Artificial
  probe
  misc_feature (1)..(25): SEQ ID NO: 3721; WAN024GAJ_at; Start 35; Stop 59
ggaaacgcggtaggcgtgtaatagc

SEQ ID NO: 237700 - DNA, 25 bp, Artificial
  probe
  misc_feature (1)..(25): SEQ ID NO: 3721; WAN024GAJ_at; Start 15; Stop 39
gaggcttaagaggccgtgttggaaa

SEQ ID NO: 237701 - DNA, 25 bp, Artificial
  probe
  misc_feature (1)..(25): SEQ ID NO: 3721; WAN024GAJ_at; Start 7; Stop 31
ttactcaagaggcttaagaggccgt

SEQ ID NO: 237702 - DNA, 25 bp, Artificial
  probe
  misc_feature (1)..(25): SEQ ID NO: 3721; WAN024GAJ_at; Start 33; Stop 57
ttggaaacgcggtaggcgtgtaata

SEQ ID NO: 237703 - DNA, 25 bp, Artificial
  probe
  misc_feature (1)..(25): SEQ ID NO: 3721; WAN024GAJ_at; Start 43; Stop 67
ggtaggcgtgtaatagcgtgcgtgg

SEQ ID NO: 237704 - DNA, 25 bp, Artificial
  probe
  misc_feature (1)..(25): SEQ ID NO: 3721; WAN024GAJ_at; Start 18; Stop 42
gcttaagaggccgtgttggaaacgc

SEQ ID NO: 237705 - DNA, 25 bp, Artificial
  probe
  misc_feature (1)..(25): SEQ ID NO: 3721; WAN024GAJ_at; Start 8; Stop 32
tactcaagaggcttaagaggccgtg

SEQ ID NO: 237706 - DNA, 25 bp, Artificial
  probe
  misc_feature (1)..(25): SEQ ID NO: 3721; WAN024GAJ_at; Start 4; Stop 28
agattactcaagaggcttaagaggc

SEQ ID NO: 237707 - DNA, 25 bp, Artificial
  probe
  misc_feature (1)..(25): SEQ ID NO: 3721; WAN024GAJ_at; Start 41; Stop 65
gcggtaggcgtgtaatagcgtgcgt

SEQ ID NO: 237708 - DNA, 25 bp, Artificial
  probe
  misc_feature (1)..(25): SEQ ID NO: 3721; WAN024GAJ_at; Start 37; Stop 61
aaacgcggtaggcgtgtaatagcgt

SEQ ID NO: 237709 - DNA, 25 bp, Artificial
  probe
  misc_feature (1)..(25): SEQ ID NO: 3721; WAN024GAJ_at; Start 36; Stop 60
gaaacgcggtaggcgtgtaatagcg

SEQ ID NO: 237710 - DNA, 25 bp, Artificial
  probe
  misc_feature (1)..(25): SEQ ID NO: 3721; WAN024GAJ_at; Start 1; Stop 25
ggaagattactcaagaggcttaaga

SEQ ID NO: 237711 - DNA, 25 bp, Artificial
  probe
  misc_feature (1)..(25): SEQ ID NO: 3721; WAN024GAJ_at; Start 40; Stop 64
cgcggtaggcgtgtaatagcgtgcg

SEQ ID NO: 237712 - DNA, 25 bp, Artificial
  probe
  misc_feature (1)..(25): SEQ ID NO: 3757; WAN024GAK_at; Start 576; Stop 600
cgcgtttccaacacggcctcttaag

SEQ ID NO: 237713 - DNA, 25 bp, Artificial
  probe
  misc_feature (1)..(25): SEQ ID NO: 3757; WAN024GAK_at; Start 223; Stop 247
tagactcgcagtttctagacttgag

SEQ ID NO: 237714 - DNA, 25 bp, Artificial
  probe
  misc_feature (1)..(25): SEQ ID NO: 3757; WAN024GAK_at; Start 335; Stop 359
caccggctccattattcctttgcat

SEQ ID NO: 237715 - DNA, 25 bp, Artificial
  probe
  misc_feature (1)..(25): SEQ ID NO: 3757; WAN024GAK_at; Start 528; Stop 552
cgacggaagacatgggattcgaacc

SEQ ID NO: 237716 - DNA, 25 bp, Artificial
  probe
  misc_feature (1)..(25): SEQ ID NO: 3757; WAN024GAK_at; Start 197; Stop 221
tgtctagcggcttgataagagattg

SEQ ID NO: 237717 - DNA, 25 bp, Artificial
  probe
  misc_feature (1)..(25): SEQ ID NO: 3757; WAN024GAK_at; Start 562; Stop 586
tattacacgcctaccgcgtttccaa

SEQ ID NO: 237718 - DNA, 25 bp, Artificial
  probe
  misc_feature (1)..(25): SEQ ID NO: 3757; WAN024GAK_at; Start 47; Stop 71
tcgtgtggcgacgtaaacgctcagt

SEQ ID NO: 237719 - DNA, 25 bp, Artificial
  probe
  misc_feature (1)..(25): SEQ ID NO: 3757; WAN024GAK_at; Start 157; Stop 181
caatgacaggtcttattattagcga

SEQ ID NO: 237720 - DNA, 25 bp, Artificial
  probe
  misc_feature (1)..(25): SEQ ID NO: 3757; WAN024GAK_at; Start 275; Stop 299
tacataacctatggttgtagacaaa

SEQ ID NO: 237721 - DNA, 25 bp, Artificial
  probe
  misc_feature (1)..(25): SEQ ID NO: 3757; WAN024GAK_at; Start 428; Stop 452
cattcttttgctaaaaagggagtca

SEQ ID NO: 237722 - DNA, 25 bp, Artificial
  probe
  misc_feature (1)..(25): SEQ ID NO: 3757; WAN024GAK_at; Start 101; Stop 125
tacgctctagctgcctaaaaaccag

SEQ ID NO: 237723 - DNA, 25 bp, Artificial
  probe
  misc_feature (1)..(25): SEQ ID NO: 3757; WAN024GAK_at; Start 497; Stop 521
catttgtcgcatcctaaaaataatc

SEQ ID NO: 237724 - DNA, 25 bp, Artificial
  probe
  misc_feature (1)..(25): SEQ ID NO: 3757; WAN024GAK_at; Start 541; Stop 565
gggattcgaacccacgcacgctatt

SEQ ID NO: 237725 - DNA, 25 bp, Artificial
  probe
  misc_feature (1)..(25): SEQ ID NO: 3757; WAN024GAK_at; Start 112; Stop 136
tgcctaaaaaccagcaggcgtgacc

SEQ ID NO: 237726 - DNA, 25 bp, Artificial
  probe
  misc_feature (1)..(25): SEQ ID NO: 3757; WAN024GAK_at; Start 2; Stop 26
gggtcgttacggattcgacaggcat

SEQ ID NO: 237727 - DNA, 25 bp, Artificial
  probe
  misc_feature (1)..(25): SEQ ID NO: 3757; WAN024GAK_at; Start 298; Stop 322
aatatgttggcaggtgtttggacgt

SEQ ID NO: 237728 - DNA, 25 bp, Artificial
  probe
  misc_feature (1)..(25): SEQ ID NO: 3757; WAN024GAK_at; Start 640; Stop 664
ccataaaggctcttatcttgcaata

SEQ ID NO: 237729 - DNA, 25 bp, Artificial
  probe
  misc_feature (1)..(25): SEQ ID NO: 3757; WAN024GAK_at; Start 13; Stop 37
gattcgacaggcattatgaggcata

SEQ ID NO: 237730 - DNA, 25 bp, Artificial
  probe
  misc_feature (1)..(25): SEQ ID NO: 3757; WAN024GAK_at; Start 365; Stop 389
tgcattccttggtaaaacgttgtta

SEQ ID NO: 237731 - DNA, 25 bp, Artificial
  probe
  misc_feature (1)..(25): SEQ ID NO: 3757; WAN024GAK_at; Start 89; Stop 113
aataacacttcttacgctctagctg

SEQ ID NO: 237732 - DNA, 25 bp, Artificial
  probe
  misc_feature (1)..(25): SEQ ID NO: 3757; WAN024GAK_at; Start 236; Stop 260
tctagacttgagttatgtgtcgagg

SEQ ID NO: 237733 - DNA, 25 bp, Artificial
  probe
  misc_feature (1)..(25): SEQ ID NO: 3757; WAN024GAK_at; Start 587; Stop 611
cacggcctcttaagcctcttgagta

SEQ ID NO: 237734 - DNA, 25 bp, Artificial
  probe
  misc_feature (1)..(25): SEQ ID NO: 3757; WAN024GAK_at; Start 34; Stop 58
catattttgcgactcgtgtggcgac

SEQ ID NO: 237735 - DNA, 25 bp, Artificial
  probe
  misc_feature (1)..(25): SEQ ID NO: 3757; WAN024GAK_at; Start 482; Stop 506
gaaaaaaggatacaacatttgtcgc

SEQ ID NO: 237736 - DNA, 25 bp, Artificial
  probe
  misc_feature (1)..(25): SEQ ID NO: 3757; WAN024GAK_at; Start 209; Stop 233
tgataagagattgatagactcgcag

SEQ ID NO: 237737 - DNA, 25 bp, Artificial
  probe
  misc_feature (1)..(25): SEQ ID NO: 3757; WAN024GAK_at; Start 142; Stop 166
tggattgctcgtgttcaatgacagg

SEQ ID NO: 237738 - DNA, 25 bp, Artificial
  probe
  misc_feature (1)..(25): SEQ ID NO: 3757; WAN024GAK_at; Start 517; Stop 541
taatcttttttcgacggaagacatg

SEQ ID NO: 237739 - DNA, 25 bp, Artificial
  probe
  misc_feature (1)..(25): SEQ ID NO: 3757; WAN024GAK_at; Start 444; Stop 468
agggagtcacaaacagaccctattt

SEQ ID NO: 237740 - DNA, 25 bp, Artificial
  probe
  misc_feature (1)..(25): SEQ ID NO: 3757; WAN024GAK_at; Start 625; Stop 649
tactcaaatagtctaccataaaggc

SEQ ID NO: 237741 - DNA, 25 bp, Artificial
  probe
  misc_feature (1)..(25): SEQ ID NO: 3757; WAN024GAK_at; Start 184; Stop 208
tacgattaagccttgtctagcggct

SEQ ID NO: 237742 - DNA, 25 bp, Artificial
  probe
  misc_feature (1)..(25): SEQ ID NO: 3757; WAN024GAK_at; Start 597; Stop 621
taagcctcttgagtaatcttccaat

SEQ ID NO: 237743 - DNA, 25 bp, Artificial
  probe
  misc_feature (1)..(25): SEQ ID NO: 3757; WAN024GAK_at; Start 356; Stop 380
gcattcttttgcattccttggtaaa

SEQ ID NO: 237744 - DNA, 25 bp, Artificial
  probe
  misc_feature (1)..(25): SEQ ID NO: 3757; WAN024GAK_at; Start 176; Stop 200
tagcgagatacgattaagccttgtc

SEQ ID NO: 237745 - DNA, 25 bp, Artificial
  probe
  misc_feature (1)..(25): SEQ ID NO: 3757; WAN024GAK_at; Start 126; Stop 150
caggcgtgacccgatttggattgct

SEQ ID NO: 237746 - DNA, 25 bp, Artificial
  probe
  misc_feature (1)..(25): SEQ ID NO: 3732; WAN024GAL_at; Start 45; Stop 69
gtcaggcgtgtaaaagcgtgcgtgg

SEQ ID NO: 237747 - DNA, 25 bp, Artificial
  probe
  misc_feature (1)..(25): SEQ ID NO: 3732; WAN024GAL_at; Start 43; Stop 67
ccgtcaggcgtgtaaaagcgtgcgt

SEQ ID NO: 237748 - DNA, 25 bp, Artificial
  probe
  misc_feature (1)..(25): SEQ ID NO: 3732; WAN024GAL_at; Start 33; Stop 57
gtcttgaaaaccgtcaggcgtgtaa

SEQ ID NO: 237749 - DNA, 25 bp, Artificial
  probe
  misc_feature (1)..(25): SEQ ID NO: 3732; WAN024GAL_at; Start 41; Stop 65
aaccgtcaggcgtgtaaaagcgtgc

SEQ ID NO: 237750 - DNA, 25 bp, Artificial
  probe
  misc_feature (1)..(25): SEQ ID NO: 3732; WAN024GAL_at; Start 16; Stop 40
tccggctgaagggaacggtcttgaa

SEQ ID NO: 237751 - DNA, 25 bp, Artificial
  probe
  misc_feature (1)..(25): SEQ ID NO: 3732; WAN024GAL_at; Start 5; Stop 29
gattacccaagtccggctgaaggga

SEQ ID NO: 237752 - DNA, 25 bp, Artificial
  probe
  misc_feature (1)..(25): SEQ ID NO: 3732; WAN024GAL_at; Start 12; Stop 36
caagtccggctgaagggaacggtct

SEQ ID NO: 237753 - DNA, 25 bp, Artificial
  probe
  misc_feature (1)..(25): SEQ ID NO: 3732; WAN024GAL_at; Start 40; Stop 64
aaaccgtcaggcgtgtaaaagcgtg

SEQ ID NO: 237754 - DNA, 25 bp, Artificial
  probe
  misc_feature (1)..(25): SEQ ID NO: 3732; WAN024GAL_at; Start 31; Stop 55
cggtcttgaaaaccgtcaggcgtgt

SEQ ID NO: 237755 - DNA, 25 bp, Artificial
  probe
  misc_feature (1)..(25): SEQ ID NO: 3732; WAN024GAL_at; Start 2; Stop 26
gaggattacccaagtccggctgaag

SEQ ID NO: 237756 - DNA, 25 bp, Artificial
  probe
  misc_feature (1)..(25): SEQ ID NO: 3732; WAN024GAL_at; Start 14; Stop 38
agtccggctgaagggaacggtcttg

SEQ ID NO: 237757 - DNA, 25 bp, Artificial
  probe
  misc_feature (1)..(25): SEQ ID NO: 3732; WAN024GAL_at; Start 15; Stop 39
gtccggctgaagggaacggtcttga

SEQ ID NO: 237758 - DNA, 25 bp, Artificial
  probe
  misc_feature (1)..(25): SEQ ID NO: 3732; WAN024GAL_at; Start 30; Stop 54
acggtcttgaaaaccgtcaggcgtg

SEQ ID NO: 237759 - DNA, 25 bp, Artificial
  probe
  misc_feature (1)..(25): SEQ ID NO: 3732; WAN024GAL_at; Start 3; Stop 27
aggattacccaagtccggctgaagg

SEQ ID NO: 237760 - DNA, 25 bp, Artificial
  probe
  misc_feature (1)..(25): SEQ ID NO: 3732; WAN024GAL_at; Start 37; Stop 61
tgaaaaccgtcaggcgtgtaaaagc

SEQ ID NO: 237761 - DNA, 25 bp, Artificial
  probe
  misc_feature (1)..(25): SEQ ID NO: 3732; WAN024GAL_at; Start 34; Stop 58
tcttgaaaaccgtcaggcgtgtaaa

SEQ ID NO: 237762 - DNA, 25 bp, Artificial
  probe
  misc_feature (1)..(25): SEQ ID NO: 3732; WAN024GAL_at; Start 1; Stop 25
ggaggattacccaagtccggctgaa

SEQ ID NO: 237763 - DNA, 25 bp, Artificial
  probe
  misc_feature (1)..(25): SEQ ID NO: 3732; WAN024GAL_at; Start 32; Stop 56
ggtcttgaaaaccgtcaggcgtgta

SEQ ID NO: 237764 - DNA, 25 bp, Artificial
  probe
  misc_feature (1)..(25): SEQ ID NO: 3732; WAN024GAL_at; Start 44; Stop 68
cgtcaggcgtgtaaaagcgtgcgtg

SEQ ID NO: 237765 - DNA, 25 bp, Artificial
  probe
  misc_feature (1)..(25): SEQ ID NO: 3732; WAN024GAL_at; Start 42; Stop 66
accgtcaggcgtgtaaaagcgtgcg

SEQ ID NO: 237766 - DNA, 25 bp, Artificial
  probe
  misc_feature (1)..(25): SEQ ID NO: 3471; WAN024GAM_at; Start 5; Stop 29
ttgtgactccctttttagcaaaaga

SEQ ID NO: 237767 - DNA, 25 bp, Artificial
  probe
  misc_feature (1)..(25): SEQ ID NO: 3471; WAN024GAM_at; Start 16; Stop 40
tttttagcaaaagaatgcaaaggaa

SEQ ID NO: 237768 - DNA, 25 bp, Artificial
  probe
  misc_feature (1)..(25): SEQ ID NO: 3471; WAN024GAM_at; Start 19; Stop 43
ttagcaaaagaatgcaaaggaatac

SEQ ID NO: 237769 - DNA, 25 bp, Artificial
  probe
  misc_feature (1)..(25): SEQ ID NO: 3471; WAN024GAM_at; Start 81; Stop 105
ttaccaaggaatgcaaaagaatgca

SEQ ID NO: 237770 - DNA, 25 bp, Artificial
  probe
  misc_feature (1)..(25): SEQ ID NO: 3471; WAN024GAM_at; Start 85; Stop 109
caaggaatgcaaaagaatgcaaagg

SEQ ID NO: 237771 - DNA, 25 bp, Artificial
  probe
  misc_feature (1)..(25): SEQ ID NO: 3471; WAN024GAM_at; Start 2; Stop 26
tgtttgtgactccctttttagcaaa

SEQ ID NO: 237772 - DNA, 25 bp, Artificial
  probe
  misc_feature (1)..(25): SEQ ID NO: 3471; WAN024GAM_at; Start 9; Stop 33
gactccctttttagcaaaagaatgc

SEQ ID NO: 237773 - DNA, 25 bp, Artificial
  probe
  misc_feature (1)..(25): SEQ ID NO: 3471; WAN024GAM_at; Start 71; Stop 95
taacaacgttttaccaaggaatgca

SEQ ID NO: 237774 - DNA, 25 bp, Artificial
  probe
  misc_feature (1)..(25): SEQ ID NO: 3471; WAN024GAM_at; Start 12; Stop 36
tccctttttagcaaaagaatgcaaa

SEQ ID NO: 237775 - DNA, 25 bp, Artificial
  probe
  misc_feature (1)..(25): SEQ ID NO: 3471; WAN024GAM_at; Start 21; Stop 45
agcaaaagaatgcaaaggaatacca

SEQ ID NO: 237776 - DNA, 25 bp, Artificial
  probe
  misc_feature (1)..(25): SEQ ID NO: 3471; WAN024GAM_at; Start 1; Stop 25
ctgtttgtgactccctttttagcaa

SEQ ID NO: 237777 - DNA, 25 bp, Artificial
  probe
  misc_feature (1)..(25): SEQ ID NO: 3471; WAN024GAM_at; Start 83; Stop 107
accaaggaatgcaaaagaatgcaaa

SEQ ID NO: 237778 - DNA, 25 bp, Artificial
  probe
  misc_feature (1)..(25): SEQ ID NO: 3471; WAN024GAM_at; Start 8; Stop 32
tgactccctttttagcaaaagaatg

SEQ ID NO: 237779 - DNA, 25 bp, Artificial
  probe
  misc_feature (1)..(25): SEQ ID NO: 3471; WAN024GAM_at; Start 87; Stop 111
aggaatgcaaaagaatgcaaaggaa

SEQ ID NO: 237780 - DNA, 25 bp, Artificial
  probe
  misc_feature (1)..(25): SEQ ID NO: 3471; WAN024GAM_at; Start 80; Stop 104
tttaccaaggaatgcaaaagaatgc

SEQ ID NO: 237781 - DNA, 25 bp, Artificial
  probe
  misc_feature (1)..(25): SEQ ID NO: 3471; WAN024GAM_at; Start 18; Stop 42
tttagcaaaagaatgcaaaggaata

SEQ ID NO: 237782 - DNA, 25 bp, Artificial
  probe
  misc_feature (1)..(25): SEQ ID NO: 3471; WAN024GAM_at; Start 90; Stop 114
aatgcaaaagaatgcaaaggaacta

SEQ ID NO: 237783 - DNA, 25 bp, Artificial
  probe
  misc_feature (1)..(25): SEQ ID NO: 3471; WAN024GAM_at; Start 15; Stop 39
ctttttagcaaaagaatgcaaagga

SEQ ID NO: 237784 - DNA, 25 bp, Artificial
  probe
  misc_feature (1)..(25): SEQ ID NO: 3471; WAN024GAM_at; Start 92; Stop 116
tgcaaaagaatgcaaaggaactaac

SEQ ID NO: 237785 - DNA, 25 bp, Artificial
  probe
  misc_feature (1)..(25): SEQ ID NO: 3471; WAN024GAM_at; Start 6; Stop 30
tgtgactccctttttagcaaaagaa

SEQ ID NO: 237786 - DNA, 25 bp, Artificial
  probe
  misc_feature (1)..(25): SEQ ID NO: 3471; WAN024GAM_at; Start 89; Stop 113
gaatgcaaaagaatgcaaaggaact

SEQ ID NO: 237787 - DNA, 25 bp, Artificial
  probe
  misc_feature (1)..(25): SEQ ID NO: 3471; WAN024GAM_at; Start 86; Stop 110
aaggaatgcaaaagaatgcaaagga

SEQ ID NO: 237788 - DNA, 25 bp, Artificial
  probe
  misc_feature (1)..(25): SEQ ID NO: 3471; WAN024GAM_at; Start 11; Stop 35
ctccctttttagcaaaagaatgcaa

SEQ ID NO: 237789 - DNA, 25 bp, Artificial
  probe
  misc_feature (1)..(25): SEQ ID NO: 3471; WAN024GAM_at; Start 14; Stop 38
cctttttagcaaaagaatgcaaagg

SEQ ID NO: 237790 - DNA, 25 bp, Artificial
  probe
  misc_feature (1)..(25): SEQ ID NO: 3471; WAN024GAM_at; Start 91; Stop 115
atgcaaaagaatgcaaaggaactaa

SEQ ID NO: 237791 - DNA, 25 bp, Artificial
  probe
  misc_feature (1)..(25): SEQ ID NO: 3471; WAN024GAM_at; Start 10; Stop 34
actccctttttagcaaaagaatgca

SEQ ID NO: 237792 - DNA, 25 bp, Artificial
  probe
  misc_feature (1)..(25): SEQ ID NO: 3471; WAN024GAM_at; Start 13; Stop 37
ccctttttagcaaaagaatgcaaag

SEQ ID NO: 237793 - DNA, 25 bp, Artificial
  probe
  misc_feature (1)..(25): SEQ ID NO: 3471; WAN024GAM_at; Start 20; Stop 44
tagcaaaagaatgcaaaggaatacc

SEQ ID NO: 237794 - DNA, 25 bp, Artificial
  probe
  misc_feature (1)..(25): SEQ ID NO: 3471; WAN024GAM_at; Start 79; Stop 103
ttttaccaaggaatgcaaaagaatg

SEQ ID NO: 237795 - DNA, 25 bp, Artificial
  probe
  misc_feature (1)..(25): SEQ ID NO: 3471; WAN024GAM_at; Start 17; Stop 41
ttttagcaaaagaatgcaaaggaat

SEQ ID NO: 237796 - DNA, 25 bp, Artificial
  probe
  misc_feature (1)..(25): SEQ ID NO: 3471; WAN024GAM_at; Start 84; Stop 108
ccaaggaatgcaaaagaatgcaaag

SEQ ID NO: 237797 - DNA, 25 bp, Artificial
  probe
  misc_feature (1)..(25): SEQ ID NO: 3471; WAN024GAM_at; Start 88; Stop 112
ggaatgcaaaagaatgcaaaggaac

SEQ ID NO: 237798 - DNA, 25 bp, Artificial
  probe
  misc_feature (1)..(25): SEQ ID NO: 3471; WAN024GAM_at; Start 82; Stop 106
taccaaggaatgcaaaagaatgcaa

SEQ ID NO: 237799 - DNA, 25 bp, Artificial
  probe
  misc_feature (1)..(25): SEQ ID NO: 4169; WAN024GAN_at; Start 146; Stop 170
tgttgccctgcattagcaaaggcga

SEQ ID NO: 237800 - DNA, 25 bp, Artificial
  probe
  misc_feature (1)..(25): SEQ ID NO: 4169; WAN024GAN_at; Start 209; Stop 233
taaacagatggatatttcatagtcg

SEQ ID NO: 237801 - DNA, 25 bp, Artificial
  probe
  misc_feature (1)..(25): SEQ ID NO: 4169; WAN024GAN_at; Start 356; Stop 380
gctccgtccaaagcaaaaatttcta

SEQ ID NO: 237802 - DNA, 25 bp, Artificial
  probe
  misc_feature (1)..(25): SEQ ID NO: 4169; WAN024GAN_at; Start 41; Stop 65
tgtccacggtagtcaacctttcctc

SEQ ID NO: 237803 - DNA, 25 bp, Artificial
  probe
  misc_feature (1)..(25): SEQ ID NO: 4169; WAN024GAN_at; Start 133; Stop 157
acccgtgtcttggtgttgccctgca

SEQ ID NO: 237804 - DNA, 25 bp, Artificial
  probe
  misc_feature (1)..(25): SEQ ID NO: 4169; WAN024GAN_at; Start 263; Stop 287
tcaacagtggcatccttttgagcct

SEQ ID NO: 237805 - DNA, 25 bp, Artificial
  probe
  misc_feature (1)..(25): SEQ ID NO: 4169; WAN024GAN_at; Start 325; Stop 349
ccagttttggatagttgtataacgc

SEQ ID NO: 237806 - DNA, 25 bp, Artificial
  probe
  misc_feature (1)..(25): SEQ ID NO: 4169; WAN024GAN_at; Start 195; Stop 219
cttctccatcaaggtaaacagatgg

SEQ ID NO: 237807 - DNA, 25 bp, Artificial
  probe
  misc_feature (1)..(25): SEQ ID NO: 4169; WAN024GAN_at; Start 369; Stop 393
caaaaatttctacaatggcagcgtg

SEQ ID NO: 237808 - DNA, 25 bp, Artificial
  probe
  misc_feature (1)..(25): SEQ ID NO: 4169; WAN024GAN_at; Start 162; Stop 186
caaaggcgatagagagcatggtacc

SEQ ID NO: 237809 - DNA, 25 bp, Artificial
  probe
  misc_feature (1)..(25): SEQ ID NO: 4169; WAN024GAN_at; Start 311; Stop 335
tagacgttatcagaccagttttgga

SEQ ID NO: 237810 - DNA, 25 bp, Artificial
  probe
  misc_feature (1)..(25): SEQ ID NO: 4169; WAN024GAN_at; Start 223; Stop 247
tttcatagtcgttttggcacccaag

SEQ ID NO: 237811 - DNA, 25 bp, Artificial
  probe
  misc_feature (1)..(25): SEQ ID NO: 4169; WAN024GAN_at; Start 188; Stop 212
cgcgctccttctccatcaaggtaaa

SEQ ID NO: 237812 - DNA, 25 bp, Artificial
  probe
  misc_feature (1)..(25): SEQ ID NO: 4169; WAN024GAN_at; Start 55; Stop 79
aacctttcctccacctttagcgatg

SEQ ID NO: 237813 - DNA, 25 bp, Artificial
  probe
  misc_feature (1)..(25): SEQ ID NO: 4169; WAN024GAN_at; Start 80; Stop 104
gatttagacacaatagacgagctgg

SEQ ID NO: 237814 - DNA, 25 bp, Artificial
  probe
  misc_feature (1)..(25): SEQ ID NO: 4169; WAN024GAN_at; Start 66; Stop 90
cacctttagcgatggatttagacac

SEQ ID NO: 237815 - DNA, 25 bp, Artificial
  probe
  misc_feature (1)..(25): SEQ ID NO: 4169; WAN024GAN_at; Start 90; Stop 114
caatagacgagctggtatgtggagc

SEQ ID NO: 237816 - DNA, 25 bp, Artificial
  probe
  misc_feature (1)..(25): SEQ ID NO: 4169; WAN024GAN_at; Start 15; Stop 39
tcttagagttcttgttaaaggtgac

SEQ ID NO: 237817 - DNA, 25 bp, Artificial
  probe
  misc_feature (1)..(25): SEQ ID NO: 4169; WAN024GAN_at; Start 247; Stop 271
gtttccatcaatccactcaacagtg

SEQ ID NO: 237818 - DNA, 25 bp, Artificial
  probe
  misc_feature (1)..(25): SEQ ID NO: 4169; WAN024GAN_at; Start 340; Stop 364
tgtataacgcatataagctccgtcc

SEQ ID NO: 237819 - DNA, 25 bp, Artificial
  probe
  misc_feature (1)..(25): SEQ ID NO: 4169; WAN024GAN_at; Start 113; Stop 137
gcattgtgaatcatcttagcacccg

SEQ ID NO: 237820 - DNA, 25 bp, Artificial
  probe
  misc_feature (1)..(25): SEQ ID NO: 4169; WAN024GAN_at; Start 232; Stop 256
cgttttggcacccaagtttccatca

SEQ ID NO: 237821 - DNA, 25 bp, Artificial
  probe
  misc_feature (1)..(25): SEQ ID NO: 4169; WAN024GAN_at; Start 100; Stop 124
gctggtatgtggagcattgtgaatc

SEQ ID NO: 237822 - DNA, 25 bp, Artificial
  probe
  misc_feature (1)..(25): SEQ ID NO: 4169; WAN024GAN_at; Start 291; Stop 315
cacgctttgttaccaagttatagac

SEQ ID NO: 237823 - DNA, 25 bp, Artificial
  probe
  misc_feature (1)..(25): SEQ ID NO: 4169; WAN024GAN_at; Start 281; Stop 305
tgagccttagcacgctttgttacca

SEQ ID NO: 237824 - DNA, 25 bp, Artificial
  probe
  misc_feature (1)..(25): SEQ ID NO: 4169; WAN024GAN_at; Start 169; Stop 193
gatagagagcatggtaccacgcgct

SEQ ID NO: 237825 - DNA, 25 bp, Artificial
  probe
  misc_feature (1)..(25): SEQ ID NO: 4169; WAN024GAN_at; Start 304; Stop 328
caagttatagacgttatcagaccag

SEQ ID NO: 237826 - DNA, 25 bp, Artificial
  probe
  misc_feature (1)..(25): SEQ ID NO: 4169; WAN024GAN_at; Start 120; Stop 144
gaatcatcttagcacccgtgtcttg

SEQ ID NO: 237827 - DNA, 25 bp, Artificial
  probe
  misc_feature (1)..(25): SEQ ID NO: 4169; WAN024GAN_at; Start 1; Stop 25
gtgggaaacagatttcttagagttc

SEQ ID NO: 237828 - DNA, 25 bp, Artificial
  probe
  misc_feature (1)..(25): SEQ ID NO: 4169; WAN024GAN_at; Start 270; Stop 294
tggcatccttttgagccttagcacg

SEQ ID NO: 237829 - DNA, 25 bp, Artificial
  probe
  misc_feature (1)..(25): SEQ ID NO: 4169; WAN024GAN_at; Start 30; Stop 54
taaaggtgacttgtccacggtagtc

SEQ ID NO: 237830 - DNA, 25 bp, Artificial
  probe
  misc_feature (1)..(25): SEQ ID NO: 4169; WAN024GAN_at; Start 173; Stop 197
gagagcatggtaccacgcgctcctt

SEQ ID NO: 237831 - DNA, 25 bp, Artificial
  probe
  misc_feature (1)..(25): SEQ ID NO: 4169; WAN024GAN_at; Start 372; Stop 396
aaatttctacaatggcagcgtgtaa

SEQ ID NO: 237832 - DNA, 25 bp, Artificial
  probe
  misc_feature (1)..(25): SEQ ID NO: 4169; WAN024GAN_at; Start 347; Stop 371
cgcatataagctccgtccaaagcaa

SEQ ID NO: 237833 - DNA, 25 bp, Artificial
  probe
  misc_feature (1)..(25): SEQ ID NO: 2507; WAN024GAO_at; Start 1191; Stop 1215
tgaaattcacaactcgcaagtggct

SEQ ID NO: 237834 - DNA, 25 bp, Artificial
  probe
  misc_feature (1)..(25): SEQ ID NO: 2507; WAN024GAO_at; Start 920; Stop 944
tttaccttgatggagaaggagcgcg

SEQ ID NO: 237835 - DNA, 25 bp, Artificial
  probe
  misc_feature (1)..(25): SEQ ID NO: 2507; WAN024GAO_at; Start 1043; Stop 1067
tgtctaaatccatcgctaaaggtgg

SEQ ID NO: 237836 - DNA, 25 bp, Artificial
  probe
  misc_feature (1)..(25): SEQ ID NO: 2507; WAN024GAO_at; Start 1218; Stop 1242
ggaacacgaagccaaagtatctaag

SEQ ID NO: 237837 - DNA, 25 bp, Artificial
  probe
  misc_feature (1)..(25): SEQ ID NO: 2507; WAN024GAO_at; Start 1354; Stop 1378
gaatacgcagttgagctgaaccgct

SEQ ID NO: 237838 - DNA, 25 bp, Artificial
  probe
  misc_feature (1)..(25): SEQ ID NO: 2507; WAN024GAO_at; Start 1268; Stop 1292
tcatgagccgtggattgtcagaatc

SEQ ID NO: 237839 - DNA, 25 bp, Artificial
  probe
  misc_feature (1)..(25): SEQ ID NO: 2507; WAN024GAO_at; Start 332; Stop 356
tcgggattccagaagctgaacgtgc

SEQ ID NO: 237840 - DNA, 25 bp, Artificial
  probe
  misc_feature (1)..(25): SEQ ID NO: 2507; WAN024GAO_at; Start 818; Stop 842
tctataacttggtaacaaagcgtgc

SEQ ID NO: 237841 - DNA, 25 bp, Artificial
  probe
  misc_feature (1)..(25): SEQ ID NO: 2507; WAN024GAO_at; Start 540; Stop 564
caactcagcagtatggtcgggtgga

SEQ ID NO: 237842 - DNA, 25 bp, Artificial
  probe
  misc_feature (1)..(25): SEQ ID NO: 2507; WAN024GAO_at; Start 572; Stop 596
tctacgtgccaaaaggtgtcaaggt

SEQ ID NO: 237843 - DNA, 25 bp, Artificial
  probe
  misc_feature (1)..(25): SEQ ID NO: 2507; WAN024GAO_at; Start 268; Stop 292
tctgacaaaccagcccgttcttggg

SEQ ID NO: 237844 - DNA, 25 bp, Artificial
  probe
  misc_feature (1)..(25): SEQ ID NO: 2507; WAN024GAO_at; Start 797; Stop 821
tccaaaactggtctgataacgtcta

SEQ ID NO: 237845 - DNA, 25 bp, Artificial
  probe
  misc_feature (1)..(25): SEQ ID NO: 2507; WAN024GAO_at; Start 659; Stop 683
ccttgattatcgttgatgagggagc

SEQ ID NO: 237846 - DNA, 25 bp, Artificial
  probe
  misc_feature (1)..(25): SEQ ID NO: 2507; WAN024GAO_at; Start 281; Stop 305
cccgttcttgggatgatgtacctga

SEQ ID NO: 237847 - DNA, 25 bp, Artificial
  probe
  misc_feature (1)..(25): SEQ ID NO: 2507; WAN024GAO_at; Start 82; Stop 106
ttatcgacaggaaaaggactcaacg

SEQ ID NO: 237848 - DNA, 25 bp, Artificial
  probe
  misc_feature (1)..(25): SEQ ID NO: 2507; WAN024GAO_at; Start 693; Stop 717
ctacgtagaaggatgtacagcacca

SEQ ID NO: 237849 - DNA, 25 bp, Artificial
  probe
  misc_feature (1)..(25): SEQ ID NO: 2507; WAN024GAO_at; Start 368; Stop 392
gggcttctgcccagtacgagtcaga

SEQ ID NO: 237850 - DNA, 25 bp, Artificial
  probe
  misc_feature (1)..(25): SEQ ID NO: 2507; WAN024GAO_at; Start 507; Stop 531
ggtaccgccgacagataacaagttg

SEQ ID NO: 237851 - DNA, 25 bp, Artificial
  probe
  misc_feature (1)..(25): SEQ ID NO: 2507; WAN024GAO_at; Start 444; Stop 468
tacagatacagattccgcactcaag

SEQ ID NO: 237852 - DNA, 25 bp, Artificial
  probe
  misc_feature (1)..(25): SEQ ID NO: 2507; WAN024GAO_at; Start 57; Stop 81
tttccatgacgatgtagagcctgtc

SEQ ID NO: 237853 - DNA, 25 bp, Artificial
  probe
  misc_feature (1)..(25): SEQ ID NO: 2507; WAN024GAO_at; Start 1067; Stop 1091
gaggaaaggttgactaccgtggaca

SEQ ID NO: 237854 - DNA, 25 bp, Artificial
  probe
  misc_feature (1)..(25): SEQ ID NO: 2507; WAN024GAO_at; Start 885; Stop 909
cttgggtgccaaaacgactatgaaa

SEQ ID NO: 237855 - DNA, 25 bp, Artificial
  probe
  misc_feature (1)..(25): SEQ ID NO: 2507; WAN024GAO_at; Start 382; Stop 406
tacgagtcagaagtggtttaccaca

SEQ ID NO: 237856 - DNA, 25 bp, Artificial
  probe
  misc_feature (1)..(25): SEQ ID NO: 2507; WAN024GAO_at; Start 946; Stop 970
ggtaccatgctctctatcgcctttg

SEQ ID NO: 237857 - DNA, 25 bp, Artificial
  probe
  misc_feature (1)..(25): SEQ ID NO: 2507; WAN024GAO_at; Start 556; Stop 580
tcgggtggaacttttatctacgtgc

SEQ ID NO: 237858 - DNA, 25 bp, Artificial
  probe
  misc_feature (1)..(25): SEQ ID NO: 2507; WAN024GAO_at; Start 838; Stop 862
cgtgctaaggctcaaaaggatgcca

SEQ ID NO: 237859 - DNA, 25 bp, Artificial
  probe
  misc_feature (1)..(25): SEQ ID NO: 2507; WAN024GAO_at; Start 962; Stop 986
tcgcctttgctaatgcagggcaaca

SEQ ID NO: 237860 - DNA, 25 bp, Artificial
  probe
  misc_feature (1)..(25): SEQ ID NO: 2507; WAN024GAO_at; Start 752; Stop 776
tagaaatttttgctttggacggagc

SEQ ID NO: 237861 - DNA, 25 bp, Artificial
  probe
  misc_feature (1)..(25): SEQ ID NO: 2507; WAN024GAO_at; Start 1286; Stop 1310
cagaatctgaggcaactgaaatgat

SEQ ID NO: 237862 - DNA, 25 bp, Artificial
  probe
  misc_feature (1)..(25): SEQ ID NO: 2507; WAN024GAO_at; Start 725; Stop 749
caagcaatagcttacacgctgccat

SEQ ID NO: 237863 - DNA, 25 bp, Artificial
  probe
  misc_feature (1)..(25): SEQ ID NO: 2507; WAN024GAO_at; Start 493; Stop 517
tactttgcgaagttggtaccgccga

SEQ ID NO: 237864 - DNA, 25 bp, Artificial
  probe
  misc_feature (1)..(25): SEQ ID NO: 2507; WAN024GAO_at; Start 125; Stop 149
tatctgctgctaagggtgagcctga

SEQ ID NO: 237865 - DNA, 25 bp, Artificial
  probe
  misc_feature (1)..(25): SEQ ID NO: 2507; WAN024GAO_at; Start 400; Stop 424
taccacaacatgaaggaagagttcc

SEQ ID NO: 237866 - DNA, 25 bp, Artificial
  probe
  misc_feature (1)..(25): SEQ ID NO: 2507; WAN024GAO_at; Start 991; Stop 1015
gacacgggtgctaagatgattcaca

SEQ ID NO: 237867 - DNA, 25 bp, Artificial
  probe
  misc_feature (1)..(25): SEQ ID NO: 3068; WAN024GAP_at; Start 80; Stop 104
cattcatagcggcacgaagaaactc

SEQ ID NO: 237868 - DNA, 25 bp, Artificial
  probe
  misc_feature (1)..(25): SEQ ID NO: 3068; WAN024GAP_at; Start 89; Stop 113
cggcacgaagaaactcagcattggt

SEQ ID NO: 237869 - DNA, 25 bp, Artificial
  probe
  misc_feature (1)..(25): SEQ ID NO: 3068; WAN024GAP_at; Start 191; Stop 215
ggatgtttacgccatcaaacaaaac

SEQ ID NO: 237870 - DNA, 25 bp, Artificial
  probe
  misc_feature (1)..(25): SEQ ID NO: 3068; WAN024GAP_at; Start 148; Stop 172
aggaaaagtcccatacgcgcacgct

SEQ ID NO: 237871 - DNA, 25 bp, Artificial
  probe
  misc_feature (1)..(25): SEQ ID NO: 3068; WAN024GAP_at; Start 136; Stop 160
tattgcatagcaaggaaaagtccca

SEQ ID NO: 237872 - DNA, 25 bp, Artificial
  probe
  misc_feature (1)..(25): SEQ ID NO: 3068; WAN024GAP_at; Start 29; Stop 53
gcttagtaataaactcacgaactga

SEQ ID NO: 237873 - DNA, 25 bp, Artificial
  probe
  misc_feature (1)..(25): SEQ ID NO: 3068; WAN024GAP_at; Start 180; Stop 204
ttccaactcaaggatgtttacgcca

SEQ ID NO: 237874 - DNA, 25 bp, Artificial
  probe
  misc_feature (1)..(25): SEQ ID NO: 3068; WAN024GAP_at; Start 8; Stop 32
gcaattccattttttcatctagctt

SEQ ID NO: 237875 - DNA, 25 bp, Artificial
  probe
  misc_feature (1)..(25): SEQ ID NO: 3068; WAN024GAP_at; Start 92; Stop 116
cacgaagaaactcagcattggtaat

SEQ ID NO: 237876 - DNA, 25 bp, Artificial
  probe
  misc_feature (1)..(25): SEQ ID NO: 3068; WAN024GAP_at; Start 151; Stop 175
aaaagtcccatacgcgcacgctcat

SEQ ID NO: 237877 - DNA, 25 bp, Artificial
  probe
  misc_feature (1)..(25): SEQ ID NO: 3068; WAN024GAP_at; Start 183; Stop 207
caactcaaggatgtttacgccatca

SEQ ID NO: 237878 - DNA, 25 bp, Artificial
  probe
  misc_feature (1)..(25): SEQ ID NO: 3068; WAN024GAP_at; Start 47; Stop 71
gaactgaaatcttctcatcatcttc

SEQ ID NO: 237879 - DNA, 25 bp, Artificial
  probe
  misc_feature (1)..(25): SEQ ID NO: 3068; WAN024GAP_at; Start 127; Stop 151
tctgatgggtattgcatagcaagga

SEQ ID NO: 237880 - DNA, 25 bp, Artificial
  probe
  misc_feature (1)..(25): SEQ ID NO: 3068; WAN024GAP_at; Start 213; Stop 237
aacttcacctttagttacttcatag

SEQ ID NO: 237881 - DNA, 25 bp, Artificial
  probe
  misc_feature (1)..(25): SEQ ID NO: 3068; WAN024GAP_at; Start 139; Stop 163
tgcatagcaaggaaaagtcccatac

SEQ ID NO: 237882 - DNA, 25 bp, Artificial
  probe
  misc_feature (1)..(25): SEQ ID NO: 3068; WAN024GAP_at; Start 143; Stop 167
tagcaaggaaaagtcccatacgcgc

SEQ ID NO: 237883 - DNA, 25 bp, Artificial
  probe
  misc_feature (1)..(25): SEQ ID NO: 3068; WAN024GAP_at; Start 98; Stop 122
gaaactcagcattggtaattccagg

SEQ ID NO: 237884 - DNA, 25 bp, Artificial
  probe
  misc_feature (1)..(25): SEQ ID NO: 3068; WAN024GAP_at; Start 38; Stop 62
taaactcacgaactgaaatcttctc

SEQ ID NO: 237885 - DNA, 25 bp, Artificial
  probe
  misc_feature (1)..(25): SEQ ID NO: 3068; WAN024GAP_at; Start 177; Stop 201
cacttccaactcaaggatgtttacg

SEQ ID NO: 237886 - DNA, 25 bp, Artificial
  probe
  misc_feature (1)..(25): SEQ ID NO: 3068; WAN024GAP_at; Start 123; Stop 147
gatttctgatgggtattgcatagca

SEQ ID NO: 237887 - DNA, 25 bp, Artificial
  probe
  misc_feature (1)..(25): SEQ ID NO: 3068; WAN024GAP_at; Start 198; Stop 222
tacgccatcaaacaaaacttcacct

SEQ ID NO: 237888 - DNA, 25 bp, Artificial
  probe
  misc_feature (1)..(25): SEQ ID NO: 3068; WAN024GAP_at; Start 23; Stop 47
catctagcttagtaataaactcacg

SEQ ID NO: 237889 - DNA, 25 bp, Artificial
  probe
  misc_feature (1)..(25): SEQ ID NO: 3068; WAN024GAP_at; Start 187; Stop 211
tcaaggatgtttacgccatcaaaca

SEQ ID NO: 237890 - DNA, 25 bp, Artificial
  probe
  misc_feature (1)..(25): SEQ ID NO: 3068; WAN024GAP_at; Start 61; Stop 85
tcatcatcttctttacccgcattca

SEQ ID NO: 237891 - DNA, 25 bp, Artificial
  probe
  misc_feature (1)..(25): SEQ ID NO: 3068; WAN024GAP_at; Start 170; Stop 194
gctcatccacttccaactcaaggat

SEQ ID NO: 237892 - DNA, 25 bp, Artificial
  probe
  misc_feature (1)..(25): SEQ ID NO: 3068; WAN024GAP_at; Start 100; Stop 124
aactcagcattggtaattccaggga

SEQ ID NO: 237893 - DNA, 25 bp, Artificial
  probe
  misc_feature (1)..(25): SEQ ID NO: 3068; WAN024GAP_at; Start 145; Stop 169
gcaaggaaaagtcccatacgcgcac

SEQ ID NO: 237894 - DNA, 25 bp, Artificial
  probe
  misc_feature (1)..(25): SEQ ID NO: 3068; WAN024GAP_at; Start 69; Stop 93
ttctttacccgcattcatagcggca

SEQ ID NO: 237895 - DNA, 25 bp, Artificial
  probe
  misc_feature (1)..(25): SEQ ID NO: 3068; WAN024GAP_at; Start 111; Stop 135
ggtaattccagggatttctgatggg

SEQ ID NO: 237896 - DNA, 25 bp, Artificial
  probe
  misc_feature (1)..(25): SEQ ID NO: 3068; WAN024GAP_at; Start 86; Stop 110
tagcggcacgaagaaactcagcatt

SEQ ID NO: 237897 - DNA, 25 bp, Artificial
  probe
  misc_feature (1)..(25): SEQ ID NO: 3068; WAN024GAP_at; Start 83; Stop 107
tcatagcggcacgaagaaactcagc

SEQ ID NO: 237898 - DNA, 25 bp, Artificial
  probe
  misc_feature (1)..(25): SEQ ID NO: 3068; WAN024GAP_at; Start 104; Stop 128
cagcattggtaattccagggatttc

SEQ ID NO: 237899 - DNA, 25 bp, Artificial
  probe
  misc_feature (1)..(25): SEQ ID NO: 3068; WAN024GAP_at; Start 118; Stop 142
ccagggatttctgatgggtattgca

SEQ ID NO: 237900 - DNA, 25 bp, Artificial
  probe
  misc_feature (1)..(25): SEQ ID NO: 3068; WAN024GAP_at; Start 74; Stop 98
tacccgcattcatagcggcacgaag

SEQ ID NO: 237901 - DNA, 25 bp, Artificial
  probe
  misc_feature (1)..(25): SEQ ID NO: 3426; WAN024GAQ_at; Start 766; Stop 790
cgtttggaacgtgaaggatacgcaa

SEQ ID NO: 237902 - DNA, 25 bp, Artificial
  probe
  misc_feature (1)..(25): SEQ ID NO: 3426; WAN024GAQ_at; Start 598; Stop 622
gacgctcttaaagttgtgtctaaag

SEQ ID NO: 237903 - DNA, 25 bp, Artificial
  probe
  misc_feature (1)..(25): SEQ ID NO: 3426; WAN024GAQ_at; Start 643; Stop 667
gaaggttttggtgctatgatcatca

SEQ ID NO: 237904 - DNA, 25 bp, Artificial
  probe
  misc_feature (1)..(25): SEQ ID NO: 3426; WAN024GAQ_at; Start 796; Stop 820
gctgaagaacttggctacgactaca

SEQ ID NO: 237905 - DNA, 25 bp, Artificial
  probe
  misc_feature (1)..(25): SEQ ID NO: 3426; WAN024GAQ_at; Start 502; Stop 526
tctggtggtgagaaaaaacgcaatg

SEQ ID NO: 237906 - DNA, 25 bp, Artificial
  probe
  misc_feature (1)..(25): SEQ ID NO: 3426; WAN024GAQ_at; Start 366; Stop 390
tcgtgccgctatgaatgcgggtaaa

SEQ ID NO: 237907 - DNA, 25 bp, Artificial
  probe
  misc_feature (1)..(25): SEQ ID NO: 3426; WAN024GAQ_at; Start 488; Stop 512
tcaacgaaggcttctctggtggtga

SEQ ID NO: 237908 - DNA, 25 bp, Artificial
  probe
  misc_feature (1)..(25): SEQ ID NO: 3426; WAN024GAQ_at; Start 565; Stop 589
cttttggacgagattgactcaggtc

SEQ ID NO: 237909 - DNA, 25 bp, Artificial
  probe
  misc_feature (1)..(25): SEQ ID NO: 3426; WAN024GAQ_at; Start 550; Stop 574
gagccaacatttgctcttttggacg

SEQ ID NO: 237910 - DNA, 25 bp, Artificial
  probe
  misc_feature (1)..(25): SEQ ID NO: 3426; WAN024GAQ_at; Start 627; Stop 651
caatgccatgcgtggtgaaggtttt

SEQ ID NO: 237911 - DNA, 25 bp, Artificial
  probe
  misc_feature (1)..(25): SEQ ID NO: 3426; WAN024GAQ_at; Start 580; Stop 604
gactcaggtcttgatattgacgctc

SEQ ID NO: 237912 - DNA, 25 bp, Artificial
  probe
  misc_feature (1)..(25): SEQ ID NO: 3426; WAN024GAQ_at; Start 184; Stop 208
ggtaaatcgactctttctgccgcta

SEQ ID NO: 237913 - DNA, 25 bp, Artificial
  probe
  misc_feature (1)..(25): SEQ ID NO: 3426; WAN024GAQ_at; Start 660; Stop 684
gatcatcactcactaccaacgtctt

SEQ ID NO: 237914 - DNA, 25 bp, Artificial
  probe
  misc_feature (1)..(25): SEQ ID NO: 3426; WAN024GAQ_at; Start 473; Stop 497
tggcagagcgttacctcaacgaagg

SEQ ID NO: 237915 - DNA, 25 bp, Artificial
  probe
  misc_feature (1)..(25): SEQ ID NO: 3426; WAN024GAQ_at; Start 614; Stop 638
tgtctaaaggtgtcaatgccatgcg

SEQ ID NO: 237916 - DNA, 25 bp, Artificial
  probe
  misc_feature (1)..(25): SEQ ID NO: 3426; WAN024GAQ_at; Start 693; Stop 717
tatcacacctgatgtggtacacgtg

SEQ ID NO: 237917 - DNA, 25 bp, Artificial
  probe
  misc_feature (1)..(25): SEQ ID NO: 3426; WAN024GAQ_at; Start 781; Stop 805
ggatacgcaaaattagctgaagaac

SEQ ID NO: 237918 - DNA, 25 bp, Artificial
  probe
  misc_feature (1)..(25): SEQ ID NO: 3426; WAN024GAQ_at; Start 199; Stop 223
tctgccgctatcatgggaaatccaa

SEQ ID NO: 237919 - DNA, 25 bp, Artificial
  probe
  misc_feature (1)..(25): SEQ ID NO: 3426; WAN024GAQ_at; Start 535; Stop 559
caacttttgatgttggagccaacat

SEQ ID NO: 237920 - DNA, 25 bp, Artificial
  probe
  misc_feature (1)..(25): SEQ ID NO: 3426; WAN024GAQ_at; Start 320; Stop 344
tgcaatacccatcagaaatccctgg

SEQ ID NO: 237921 - DNA, 25 bp, Artificial
  probe
  misc_feature (1)..(25): SEQ ID NO: 3426; WAN024GAQ_at; Start 151; Stop 175
gaaattgccgctatcatgggaccaa

SEQ ID NO: 237922 - DNA, 25 bp, Artificial
  probe
  misc_feature (1)..(25): SEQ ID NO: 3426; WAN024GAQ_at; Start 303; Stop 327
gggacttttccttgctatgcaatac

SEQ ID NO: 237923 - DNA, 25 bp, Artificial
  probe
  misc_feature (1)..(25): SEQ ID NO: 3426; WAN024GAQ_at; Start 751; Stop 775
ccagaattggctgcgcgtttggaac

SEQ ID NO: 237924 - DNA, 25 bp, Artificial
  probe
  misc_feature (1)..(25): SEQ ID NO: 3426; WAN024GAQ_at; Start 807; Stop 831
tggctacgactacaaggaagaattg

SEQ ID NO: 237925 - DNA, 25 bp, Artificial
  probe
  misc_feature (1)..(25): SEQ ID NO: 3426; WAN024GAQ_at; Start 172; Stop 196
ccaaatggtacaggtaaatcgactc

SEQ ID NO: 237926 - DNA, 25 bp, Artificial
  probe
  misc_feature (1)..(25): SEQ ID NO: 3426; WAN024GAQ_at; Start 263; Stop 287
taaacatccttgagttggaagtgga

SEQ ID NO: 237927 - DNA, 25 bp, Artificial
  probe
  misc_feature (1)..(25): SEQ ID NO: 3426; WAN024GAQ_at; Start 351; Stop 375
caatgctgagtttcttcgtgccgct

SEQ ID NO: 237928 - DNA, 25 bp, Artificial
  probe
  misc_feature (1)..(25): SEQ ID NO: 3426; WAN024GAQ_at; Start 91; Stop 115
cacgttgagattgaaggaaaagaaa

SEQ ID NO: 237929 - DNA, 25 bp, Artificial
  probe
  misc_feature (1)..(25): SEQ ID NO: 3426; WAN024GAQ_at; Start 289; Stop 313
gagcgtgcgcgtatgggacttttcc

SEQ ID NO: 237930 - DNA, 25 bp, Artificial
  probe
  misc_feature (1)..(25): SEQ ID NO: 3426; WAN024GAQ_at; Start 730; Stop 754
cgtgttgtcctttctggtggtccag

SEQ ID NO: 237931 - DNA, 25 bp, Artificial
  probe
  misc_feature (1)..(25): SEQ ID NO: 3426; WAN024GAQ_at; Start 334; Stop 358
gaaatccctggaattaccaatgctg

SEQ ID NO: 237932 - DNA, 25 bp, Artificial
  probe
  misc_feature (1)..(25): SEQ ID NO: 3426; WAN024GAQ_at; Start 716; Stop 740
tgatgatggaaggtcgtgttgtcct

SEQ ID NO: 237933 - DNA, 25 bp, Artificial
  probe
  misc_feature (1)..(25): SEQ ID NO: 3426; WAN024GAQ_at; Start 137; Stop 161
ccctgaaaacaggagaaattgccgc

SEQ ID NO: 237934 - DNA, 25 bp, Artificial
  probe
  misc_feature (1)..(25): SEQ ID NO: 3426; WAN024GAQ_at; Start 458; Stop 482
acatgaaagaagaaatggcagagcg

SEQ ID NO: 237935 - DNA, 25 bp, Artificial
  probe
  misc_feature (1)..(25): SEQ ID NO: 5593; WAN024GAR_at; Start 52; Stop 76
gaaatcttgctaaattctggaatca

SEQ ID NO: 237936 - DNA, 25 bp, Artificial
  probe
  misc_feature (1)..(25): SEQ ID NO: 5593; WAN024GAR_at; Start 178; Stop 202
gatggcaaggttccgatacggactt

SEQ ID NO: 237937 - DNA, 25 bp, Artificial
  probe
  misc_feature (1)..(25): SEQ ID NO: 5593; WAN024GAR_at; Start 81; Stop 105
cgctaagaccaacgcaagtattgcc

SEQ ID NO: 237938 - DNA, 25 bp, Artificial
  probe
  misc_feature (1)..(25): SEQ ID NO: 5593; WAN024GAR_at; Start 169; Stop 193
tcatctaaggatggcaaggttccga

SEQ ID NO: 237939 - DNA, 25 bp, Artificial
  probe
  misc_feature (1)..(25): SEQ ID NO: 5593; WAN024GAR_at; Start 17; Stop 41
cagaaattgtagcaaacaaggcggc

SEQ ID NO: 237940 - DNA, 25 bp, Artificial
  probe
  misc_feature (1)..(25): SEQ ID NO: 5593; WAN024GAR_at; Start 160; Stop 184
gctttcatttcatctaaggatggca

SEQ ID NO: 237941 - DNA, 25 bp, Artificial
  probe
  misc_feature (1)..(25): SEQ ID NO: 5593; WAN024GAR_at; Start 29; Stop 53
caaacaaggcggcaaggctaatcga

SEQ ID NO: 237942 - DNA, 25 bp, Artificial
  probe
  misc_feature (1)..(25): SEQ ID NO: 5593; WAN024GAR_at; Start 1; Stop 25
ttggtaatcacaagaacagaaattg

SEQ ID NO: 237943 - DNA, 25 bp, Artificial
  probe
  misc_feature (1)..(25): SEQ ID NO: 5593; WAN024GAR_at; Start 174; Stop 198
taaggatggcaaggttccgatacgg

SEQ ID NO: 237944 - DNA, 25 bp, Artificial
  probe
  misc_feature (1)..(25): SEQ ID NO: 5593; WAN024GAR_at; Start 206; Stop 230
taaacaatgttaacagcgataatag

SEQ ID NO: 237945 - DNA, 25 bp, Artificial
  probe
  misc_feature (1)..(25): SEQ ID NO: 5593; WAN024GAR_at; Start 36; Stop 60
ggcggcaaggctaatcgaaatcttg

SEQ ID NO: 237946 - DNA, 25 bp, Artificial
  probe
  misc_feature (1)..(25): SEQ ID NO: 5593; WAN024GAR_at; Start 74; Stop 98
tcatttgcgctaagaccaacgcaag

SEQ ID NO: 237947 - DNA, 25 bp, Artificial
  probe
  misc_feature (1)..(25): SEQ ID NO: 5593; WAN024GAR_at; Start 183; Stop 207
caaggttccgatacggacttgctta

SEQ ID NO: 237948 - DNA, 25 bp, Artificial
  probe
  misc_feature (1)..(25): SEQ ID NO: 5593; WAN024GAR_at; Start 230; Stop 254
ggattacaataataccaatactcat

SEQ ID NO: 237949 - DNA, 25 bp, Artificial
  probe
  misc_feature (1)..(25): SEQ ID NO: 5593; WAN024GAR_at; Start 71; Stop 95
gaatcatttgcgctaagaccaacgc

SEQ ID NO: 237950 - DNA, 25 bp, Artificial
  probe
  misc_feature (1)..(25): SEQ ID NO: 5593; WAN024GAR_at; Start 243; Stop 267
accaatactcatatttggcatatag

SEQ ID NO: 237951 - DNA, 25 bp, Artificial
  probe
  misc_feature (1)..(25): SEQ ID NO: 5593; WAN024GAR_at; Start 5; Stop 29
taatcacaagaacagaaattgtagc

SEQ ID NO: 237952 - DNA, 25 bp, Artificial
  probe
  misc_feature (1)..(25): SEQ ID NO: 5593; WAN024GAR_at; Start 59; Stop 83
tgctaaattctggaatcatttgcgc

SEQ ID NO: 237953 - DNA, 25 bp, Artificial
  probe
  misc_feature (1)..(25): SEQ ID NO: 5593; WAN024GAR_at; Start 32; Stop 56
acaaggcggcaaggctaatcgaaat

SEQ ID NO: 237954 - DNA, 25 bp, Artificial
  probe
  misc_feature (1)..(25): SEQ ID NO: 5593; WAN024GAR_at; Start 141; Stop 165
cctgttagattcaatattggctttc

SEQ ID NO: 237955 - DNA, 25 bp, Artificial
  probe
  misc_feature (1)..(25): SEQ ID NO: 5593; WAN024GAR_at; Start 67; Stop 91
tctggaatcatttgcgctaagacca

SEQ ID NO: 237956 - DNA, 25 bp, Artificial
  probe
  misc_feature (1)..(25): SEQ ID NO: 5593; WAN024GAR_at; Start 47; Stop 71
taatcgaaatcttgctaaattctgg

SEQ ID NO: 237957 - DNA, 25 bp, Artificial
  probe
  misc_feature (1)..(25): SEQ ID NO: 5593; WAN024GAR_at; Start 95; Stop 119
caagtattgccatcagcataactgg

SEQ ID NO: 237958 - DNA, 25 bp, Artificial
  probe
  misc_feature (1)..(25): SEQ ID NO: 5593; WAN024GAR_at; Start 23; Stop 47
ttgtagcaaacaaggcggcaaggct

SEQ ID NO: 237959 - DNA, 25 bp, Artificial
  probe
  misc_feature (1)..(25): SEQ ID NO: 5593; WAN024GAR_at; Start 41; Stop 65
caaggctaatcgaaatcttgctaaa

SEQ ID NO: 237960 - DNA, 25 bp, Artificial
  probe
  misc_feature (1)..(25): SEQ ID NO: 5593; WAN024GAR_at; Start 190; Stop 214
ccgatacggacttgcttaaacaatg

SEQ ID NO: 237961 - DNA, 25 bp, Artificial
  probe
  misc_feature (1)..(25): SEQ ID NO: 5593; WAN024GAR_at; Start 137; Stop 161
tcaacctgttagattcaatattggc

SEQ ID NO: 237962 - DNA, 25 bp, Artificial
  probe
  misc_feature (1)..(25): SEQ ID NO: 5593; WAN024GAR_at; Start 87; Stop 111
gaccaacgcaagtattgccatcagc

SEQ ID NO: 237963 - DNA, 25 bp, Artificial
  probe
  misc_feature (1)..(25): SEQ ID NO: 5593; WAN024GAR_at; Start 102; Stop 126
tgccatcagcataactggaataaaa

SEQ ID NO: 237964 - DNA, 25 bp, Artificial
  probe
  misc_feature (1)..(25): SEQ ID NO: 5593; WAN024GAR_at; Start 213; Stop 237
tgttaacagcgataataggattaca

SEQ ID NO: 237965 - DNA, 25 bp, Artificial
  probe
  misc_feature (1)..(25): SEQ ID NO: 5593; WAN024GAR_at; Start 196; Stop 220
cggacttgcttaaacaatgttaaca

SEQ ID NO: 237966 - DNA, 25 bp, Artificial
  probe
  misc_feature (1)..(25): SEQ ID NO: 5593; WAN024GAR_at; Start 107; Stop 131
tcagcataactggaataaaaatttt

SEQ ID NO: 237967 - DNA, 25 bp, Artificial
  probe
  misc_feature (1)..(25): SEQ ID NO: 5593; WAN024GAR_at; Start 221; Stop 245
gcgataataggattacaataatacc

SEQ ID NO: 237968 - DNA, 25 bp, Artificial
  probe
  misc_feature (1)..(25): SEQ ID NO: 5593; WAN024GAR_at; Start 155; Stop 179
tattggctttcatttcatctaagga

SEQ ID NO: 237969 - DNA, 25 bp, Artificial
  probe
  misc_feature (1)..(25): SEQ ID NO: 1363; WAN024GAS_at; Start 735; Stop 759
ggctggtgctcttgccatgacagca

SEQ ID NO: 237970 - DNA, 25 bp, Artificial
  probe
  misc_feature (1)..(25): SEQ ID NO: 1363; WAN024GAS_at; Start 664; Stop 688
gcagcattcaccgttattacagcag

SEQ ID NO: 237971 - DNA, 25 bp, Artificial
  probe
  misc_feature (1)..(25): SEQ ID NO: 1363; WAN024GAS_at; Start 766; Stop 790
tgtgggaccttattgaccccaatgg

SEQ ID NO: 237972 - DNA, 25 bp, Artificial
  probe
  misc_feature (1)..(25): SEQ ID NO: 1363; WAN024GAS_at; Start 840; Stop 864
gaatggcgttataaaggctcaagca

SEQ ID NO: 237973 - DNA, 25 bp, Artificial
  probe
  misc_feature (1)..(25): SEQ ID NO: 1363; WAN024GAS_at; Start 354; Stop 378
gattccagaatttagcaagatttcg

SEQ ID NO: 237974 - DNA, 25 bp, Artificial
  probe
  misc_feature (1)..(25): SEQ ID NO: 1363; WAN024GAS_at; Start 326; Stop 350
caatacttgcgttggtcttagcgca

SEQ ID NO: 237975 - DNA, 25 bp, Artificial
  probe
  misc_feature (1)..(25): SEQ ID NO: 1363; WAN024GAS_at; Start 824; Stop 848
tggatatgaaagatcagaatggcgt

SEQ ID NO: 237976 - DNA, 25 bp, Artificial
  probe
  misc_feature (1)..(25): SEQ ID NO: 1363; WAN024GAS_at; Start 95; Stop 119
caaacccagttcgacttgggacatc

SEQ ID NO: 237977 - DNA, 25 bp, Artificial
  probe
  misc_feature (1)..(25): SEQ ID NO: 1363; WAN024GAS_at; Start 154; Stop 178
ggtggttcctatatgccaaatatga

SEQ ID NO: 237978 - DNA, 25 bp, Artificial
  probe
  misc_feature (1)..(25): SEQ ID NO: 1363; WAN024GAS_at; Start 574; Stop 598
ggtattgttccttcagatagtcgct

SEQ ID NO: 237979 - DNA, 25 bp, Artificial
  probe
  misc_feature (1)..(25): SEQ ID NO: 1363; WAN024GAS_at; Start 604; Stop 628
ggagttttggcctatgttcttggaa

SEQ ID NO: 237980 - DNA, 25 bp, Artificial
  probe
  misc_feature (1)..(25): SEQ ID NO: 1363; WAN024GAS_at; Start 714; Stop 738
tctgggagctaatccaattgtggct

SEQ ID NO: 237981 - DNA, 25 bp, Artificial
  probe
  misc_feature (1)..(25): SEQ ID NO: 1363; WAN024GAS_at; Start 215; Stop 239
cattgtttaagcaagtccgtatcgg

SEQ ID NO: 237982 - DNA, 25 bp, Artificial
  probe
  misc_feature (1)..(25): SEQ ID NO: 1363; WAN024GAS_at; Start 782; Stop 806
ccccaatggctgctaattttaacgc

SEQ ID NO: 237983 - DNA, 25 bp, Artificial
  probe
  misc_feature (1)..(25): SEQ ID NO: 1363; WAN024GAS_at; Start 467; Stop 491
tgactcagcaagtttcaacaagtgg

SEQ ID NO: 237984 - DNA, 25 bp, Artificial
  probe
  misc_feature (1)..(25): SEQ ID NO: 1363; WAN024GAS_at; Start 630; Stop 654
ggttctattcacaatgattatggga

SEQ ID NO: 237985 - DNA, 25 bp, Artificial
  probe
  misc_feature (1)..(25): SEQ ID NO: 1363; WAN024GAS_at; Start 48; Stop 72
tggttgtcaatttctccatacagcc

SEQ ID NO: 237986 - DNA, 25 bp, Artificial
  probe
  misc_feature (1)..(25): SEQ ID NO: 1363; WAN024GAS_at; Start 750; Stop 774
catgacagcaggttattgtgggacc

SEQ ID NO: 237987 - DNA, 25 bp, Artificial
  probe
  misc_feature (1)..(25): SEQ ID NO: 1363; WAN024GAS_at; Start 233; Stop 257
gtatcggaaccttgccatccttaga

SEQ ID NO: 237988 - DNA, 25 bp, Artificial
  probe
  misc_feature (1)..(25): SEQ ID NO: 1363; WAN024GAS_at; Start 559; Stop 583
tctcatctgattagcggtattgttc

SEQ ID NO: 237989 - DNA, 25 bp, Artificial
  probe
  misc_feature (1)..(25): SEQ ID NO: 1363; WAN024GAS_at; Start 419; Stop 443
tgattaccaatagtcaccctaagag

SEQ ID NO: 237990 - DNA, 25 bp, Artificial
  probe
  misc_feature (1)..(25): SEQ ID NO: 1363; WAN024GAS_at; Start 112; Stop 136
gggacatctgcattttggactctat

SEQ ID NO: 237991 - DNA, 25 bp, Artificial
  probe
  misc_feature (1)..(25): SEQ ID NO: 1363; WAN024GAS_at; Start 855; Stop 879
ggctcaagcaggtgttgctctagta

SEQ ID NO: 237992 - DNA, 25 bp, Artificial
  probe
  misc_feature (1)..(25): SEQ ID NO: 1363; WAN024GAS_at; Start 591; Stop 615
tagtcgctttataggagttttggcc

SEQ ID NO: 237993 - DNA, 25 bp, Artificial
  probe
  misc_feature (1)..(25): SEQ ID NO: 1363; WAN024GAS_at; Start 452; Stop 476
cagaaaataatcgaatgactcagca

SEQ ID NO: 237994 - DNA, 25 bp, Artificial
  probe
  misc_feature (1)..(25): SEQ ID NO: 1363; WAN024GAS_at; Start 264; Stop 288
gaaagccaatattgaatctaacagg

SEQ ID NO: 237995 - DNA, 25 bp, Artificial
  probe
  misc_feature (1)..(25): SEQ ID NO: 1363; WAN024GAS_at; Start 248; Stop 272
catccttagatgaaatgaaagccaa

SEQ ID NO: 237996 - DNA, 25 bp, Artificial
  probe
  misc_feature (1)..(25): SEQ ID NO: 1363; WAN024GAS_at; Start 382; Stop 406
agccttgccgccttgtttgctacaa

SEQ ID NO: 237997 - DNA, 25 bp, Artificial
  probe
  misc_feature (1)..(25): SEQ ID NO: 1363; WAN024GAS_at; Start 369; Stop 393
caagatttcgattagccttgccgcc

SEQ ID NO: 237998 - DNA, 25 bp, Artificial
  probe
  misc_feature (1)..(25): SEQ ID NO: 1363; WAN024GAS_at; Start 339; Stop 363
ggtcttagcgcaaatgattccagaa

SEQ ID NO: 237999 - DNA, 25 bp, Artificial
  probe
  misc_feature (1)..(25): SEQ ID NO: 1363; WAN024GAS_at; Start 678; Stop 702
tattacagcaggtgttggagttccc

SEQ ID NO: 238000 - DNA, 25 bp, Artificial
  probe
  misc_feature (1)..(25): SEQ ID NO: 1363; WAN024GAS_at; Start 311; Stop 335
cagttatgctgatggcaatacttgc

SEQ ID NO: 238001 - DNA, 25 bp, Artificial
  probe
  misc_feature (1)..(25): SEQ ID NO: 1363; WAN024GAS_at; Start 809; Stop 833
taccagcagcattgatggatatgaa

SEQ ID NO: 238002 - DNA, 25 bp, Artificial
  probe
  misc_feature (1)..(25): SEQ ID NO: 1363; WAN024GAS_at; Start 432; Stop 456
tcaccctaagagtctgttatcagaa

SEQ ID NO: 238003 - DNA, 25 bp, Artificial
  probe
  misc_feature (1)..(25): SEQ ID NO: 2973; WAN024GAT_at; Start 95; Stop 119
caatatctttttgcaatttcattcc

SEQ ID NO: 238004 - DNA, 25 bp, Artificial
  probe
  misc_feature (1)..(25): SEQ ID NO: 2973; WAN024GAT_at; Start 162; Stop 186
tggttttgagaatggtactacgtta

SEQ ID NO: 238005 - DNA, 25 bp, Artificial
  probe
  misc_feature (1)..(25): SEQ ID NO: 2973; WAN024GAT_at; Start 214; Stop 238
gctgttggcatcaataatgaactat

SEQ ID NO: 238006 - DNA, 25 bp, Artificial
  probe
  misc_feature (1)..(25): SEQ ID NO: 2973; WAN024GAT_at; Start 220; Stop 244
ggcatcaataatgaactatctgtcg

SEQ ID NO: 238007 - DNA, 25 bp, Artificial
  probe
  misc_feature (1)..(25): SEQ ID NO: 2973; WAN024GAT_at; Start 18; Stop 42
tttttggtatttgctattggattcc

SEQ ID NO: 238008 - DNA, 25 bp, Artificial
  probe
  misc_feature (1)..(25): SEQ ID NO: 2973; WAN024GAT_at; Start 22; Stop 46
tggtatttgctattggattccaatt

SEQ ID NO: 238009 - DNA, 25 bp, Artificial
  probe
  misc_feature (1)..(25): SEQ ID NO: 2973; WAN024GAT_at; Start 195; Stop 219
tggagaaccaccagatgaagctgtt

SEQ ID NO: 238010 - DNA, 25 bp, Artificial
  probe
  misc_feature (1)..(25): SEQ ID NO: 2973; WAN024GAT_at; Start 222; Stop 246
catcaataatgaactatctgtcgac

SEQ ID NO: 238011 - DNA, 25 bp, Artificial
  probe
  misc_feature (1)..(25): SEQ ID NO: 2973; WAN024GAT_at; Start 199; Stop 223
gaaccaccagatgaagctgttggca

SEQ ID NO: 238012 - DNA, 25 bp, Artificial
  probe
  misc_feature (1)..(25): SEQ ID NO: 2973; WAN024GAT_at; Start 72; Stop 96
ctcgttatattcttttgttgtaaca

SEQ ID NO: 238013 - DNA, 25 bp, Artificial
  probe
  misc_feature (1)..(25): SEQ ID NO: 2973; WAN024GAT_at; Start 148; Stop 172
ccaacttgtgagtatggttttgaga

SEQ ID NO: 238014 - DNA, 25 bp, Artificial
  probe
  misc_feature (1)..(25): SEQ ID NO: 2973; WAN024GAT_at; Start 138; Stop 162
ccccttaataccaacttgtgagtat

SEQ ID NO: 238015 - DNA, 25 bp, Artificial
  probe
  misc_feature (1)..(25): SEQ ID NO: 2973; WAN024GAT_at; Start 226; Stop 250
aataatgaactatctgtcgaccaag

SEQ ID NO: 238016 - DNA, 25 bp, Artificial
  probe
  misc_feature (1)..(25): SEQ ID NO: 2973; WAN024GAT_at; Start 110; Stop 134
atttcattcctttaaagatatatgg

SEQ ID NO: 238017 - DNA, 25 bp, Artificial
  probe
  misc_feature (1)..(25): SEQ ID NO: 2973; WAN024GAT_at; Start 13; Stop 37
agttctttttggtatttgctattgg

SEQ ID NO: 238018 - DNA, 25 bp, Artificial
  probe
  misc_feature (1)..(25): SEQ ID NO: 2973; WAN024GAT_at; Start 197; Stop 221
gagaaccaccagatgaagctgttgg

SEQ ID NO: 238019 - DNA, 25 bp, Artificial
  probe
  misc_feature (1)..(25): SEQ ID NO: 2973; WAN024GAT_at; Start 205; Stop 229
ccagatgaagctgttggcatcaata

SEQ ID NO: 238020 - DNA, 25 bp, Artificial
  probe
  misc_feature (1)..(25): SEQ ID NO: 2973; WAN024GAT_at; Start 167; Stop 191
ttgagaatggtactacgttacttac

SEQ ID NO: 238021 - DNA, 25 bp, Artificial
  probe
  misc_feature (1)..(25): SEQ ID NO: 2973; WAN024GAT_at; Start 106; Stop 130
tgcaatttcattcctttaaagatat

SEQ ID NO: 238022 - DNA, 25 bp, Artificial
  probe
  misc_feature (1)..(25): SEQ ID NO: 2973; WAN024GAT_at; Start 203; Stop 227
caccagatgaagctgttggcatcaa

SEQ ID NO: 238023 - DNA, 25 bp, Artificial
  probe
  misc_feature (1)..(25): SEQ ID NO: 2973; WAN024GAT_at; Start 85; Stop 109
tttgttgtaacaatatctttttgca

SEQ ID NO: 238024 - DNA, 25 bp, Artificial
  probe
  misc_feature (1)..(25): SEQ ID NO: 2973; WAN024GAT_at; Start 228; Stop 252
taatgaactatctgtcgaccaagct

SEQ ID NO: 238025 - DNA, 25 bp, Artificial
  probe
  misc_feature (1)..(25): SEQ ID NO: 2973; WAN024GAT_at; Start 200; Stop 224
aaccaccagatgaagctgttggcat

SEQ ID NO: 238026 - DNA, 25 bp, Artificial
  probe
  misc_feature (1)..(25): SEQ ID NO: 2973; WAN024GAT_at; Start 152; Stop 176
cttgtgagtatggttttgagaatgg

SEQ ID NO: 238027 - DNA, 25 bp, Artificial
  probe
  misc_feature (1)..(25): SEQ ID NO: 2973; WAN024GAT_at; Start 160; Stop 184
tatggttttgagaatggtactacgt

SEQ ID NO: 238028 - DNA, 25 bp, Artificial
  probe
  misc_feature (1)..(25): SEQ ID NO: 2973; WAN024GAT_at; Start 224; Stop 248
tcaataatgaactatctgtcgacca

SEQ ID NO: 238029 - DNA, 25 bp, Artificial
  probe
  misc_feature (1)..(25): SEQ ID NO: 2973; WAN024GAT_at; Start 35; Stop 59
tggattccaatttttctttttgcca

SEQ ID NO: 238030 - DNA, 25 bp, Artificial
  probe
  misc_feature (1)..(25): SEQ ID NO: 2973; WAN024GAT_at; Start 140; Stop 164
ccttaataccaacttgtgagtatgg

SEQ ID NO: 238031 - DNA, 25 bp, Artificial
  probe
  misc_feature (1)..(25): SEQ ID NO: 2973; WAN024GAT_at; Start 217; Stop 241
gttggcatcaataatgaactatctg

SEQ ID NO: 238032 - DNA, 25 bp, Artificial
  probe
  misc_feature (1)..(25): SEQ ID NO: 2973; WAN024GAT_at; Start 169; Stop 193
gagaatggtactacgttacttacaa

SEQ ID NO: 238033 - DNA, 25 bp, Artificial
  probe
  misc_feature (1)..(25): SEQ ID NO: 2973; WAN024GAT_at; Start 211; Stop 235
gaagctgttggcatcaataatgaac

SEQ ID NO: 238034 - DNA, 25 bp, Artificial
  probe
  misc_feature (1)..(25): SEQ ID NO: 2973; WAN024GAT_at; Start 202; Stop 226
ccaccagatgaagctgttggcatca

SEQ ID NO: 238035 - DNA, 25 bp, Artificial
  probe
  misc_feature (1)..(25): SEQ ID NO: 2973; WAN024GAT_at; Start 208; Stop 232
gatgaagctgttggcatcaataatg

SEQ ID NO: 238036 - DNA, 25 bp, Artificial
  probe
  misc_feature (1)..(25): SEQ ID NO: 2973; WAN024GAT_at; Start 231; Stop 255
tgaactatctgtcgaccaagcttga

SEQ ID NO: 238037 - DNA, 25 bp, Artificial
  probe
  misc_feature (1)..(25): SEQ ID NO: 4214; WAN024GAU_at; Start 190; Stop 214
ggcaatgttgctccttctcaaaaag

SEQ ID NO: 238038 - DNA, 25 bp, Artificial
  probe
  misc_feature (1)..(25): SEQ ID NO: 4214; WAN024GAU_at; Start 180; Stop 204
tgataaatacggcaatgttgctcct

SEQ ID NO: 238039 - DNA, 25 bp, Artificial
  probe
  misc_feature (1)..(25): SEQ ID NO: 4214; WAN024GAU_at; Start 243; Stop 267
tccaagctatcaagatccagcgtct

SEQ ID NO: 238040 - DNA, 25 bp, Artificial
  probe
  misc_feature (1)..(25): SEQ ID NO: 4214; WAN024GAU_at; Start 340; Stop 364
gatgttgtagctaaacctggtttgg

SEQ ID NO: 238041 - DNA, 25 bp, Artificial
  probe
  misc_feature (1)..(25): SEQ ID NO: 4214; WAN024GAU_at; Start 168; Stop 192
tttgatggaaaatgataaatacggc

SEQ ID NO: 238042 - DNA, 25 bp, Artificial
  probe
  misc_feature (1)..(25): SEQ ID NO: 4214; WAN024GAU_at; Start 507; Stop 531
tgtaagtaacgtagtaccattctca

SEQ ID NO: 238043 - DNA, 25 bp, Artificial
  probe
  misc_feature (1)..(25): SEQ ID NO: 4214; WAN024GAU_at; Start 428; Stop 452
aaaaatatgccaaagctcaagcttg

SEQ ID NO: 238044 - DNA, 25 bp, Artificial
  probe
  misc_feature (1)..(25): SEQ ID NO: 4214; WAN024GAU_at; Start 140; Stop 164
cagacgttattggaaatgttattga

SEQ ID NO: 238045 - DNA, 25 bp, Artificial
  probe
  misc_feature (1)..(25): SEQ ID NO: 4214; WAN024GAU_at; Start 18; Stop 42
agctattttagtggcttgtggaaaa

SEQ ID NO: 238046 - DNA, 25 bp, Artificial
  probe
  misc_feature (1)..(25): SEQ ID NO: 4214; WAN024GAU_at; Start 283; Stop 307
gatccaaaatctggttctgccatga

SEQ ID NO: 238047 - DNA, 25 bp, Artificial
  probe
  misc_feature (1)..(25): SEQ ID NO: 4214; WAN024GAU_at; Start 323; Stop 347
cgaaaggaaaagataaggatgttgt

SEQ ID NO: 238048 - DNA, 25 bp, Artificial
  probe
  misc_feature (1)..(25): SEQ ID NO: 4214; WAN024GAU_at; Start 370; Stop 394
tataagaaattgttagaagatgctg

SEQ ID NO: 238049 - DNA, 25 bp, Artificial
  probe
  misc_feature (1)..(25): SEQ ID NO: 4214; WAN024GAU_at; Start 640; Stop 664
tggcaaaaagaaaaattggaatcca

SEQ ID NO: 238050 - DNA, 25 bp, Artificial
  probe
  misc_feature (1)..(25): SEQ ID NO: 4214; WAN024GAU_at; Start 355; Stop 379
cctggtttggataaatataagaaat

SEQ ID NO: 238051 - DNA, 25 bp, Artificial
  probe
  misc_feature (1)..(25): SEQ ID NO: 4214; WAN024GAU_at; Start 96; Stop 120
tccagcatcattgggctacagtata

SEQ ID NO: 238052 - DNA, 25 bp, Artificial
  probe
  misc_feature (1)..(25): SEQ ID NO: 4214; WAN024GAU_at; Start 438; Stop 462
caaagctcaagcttggtcgacagat

SEQ ID NO: 238053 - DNA, 25 bp, Artificial
  probe
  misc_feature (1)..(25): SEQ ID NO: 4214; WAN024GAU_at; Start 473; Stop 497
tgatgccaacagcttcatctggtgg

SEQ ID NO: 238054 - DNA, 25 bp, Artificial
  probe
  misc_feature (1)..(25): SEQ ID NO: 4214; WAN024GAU_at; Start 199; Stop 223
gctccttctcaaaaagactatgatt

SEQ ID NO: 238055 - DNA, 25 bp, Artificial
  probe
  misc_feature (1)..(25): SEQ ID NO: 4214; WAN024GAU_at; Start 603; Stop 627
tgttacaacaaaagaatataacgag

SEQ ID NO: 238056 - DNA, 25 bp, Artificial
  probe
  misc_feature (1)..(25): SEQ ID NO: 4214; WAN024GAU_at; Start 570; Stop 594
tatctttaaaggaatgaaattgcaa

SEQ ID NO: 238057 - DNA, 25 bp, Artificial
  probe
  misc_feature (1)..(25): SEQ ID NO: 4214; WAN024GAU_at; Start 33; Stop 57
ttgtggaaaaactgataaagaagca

SEQ ID NO: 238058 - DNA, 25 bp, Artificial
  probe
  misc_feature (1)..(25): SEQ ID NO: 4214; WAN024GAU_at; Start 536; Stop 560
catactcacaagttggtattaaggg

SEQ ID NO: 238059 - DNA, 25 bp, Artificial
  probe
  misc_feature (1)..(25): SEQ ID NO: 4214; WAN024GAU_at; Start 658; Stop 682
gaatccaatagcaaataccaaaaag

SEQ ID NO: 238060 - DNA, 25 bp, Artificial
  probe
  misc_feature (1)..(25): SEQ ID NO: 4214; WAN024GAU_at; Start 527; Stop 551
tctcaaaaccatactcacaagttgg

SEQ ID NO: 238061 - DNA, 25 bp, Artificial
  probe
  misc_feature (1)..(25): SEQ ID NO: 4214; WAN024GAU_at; Start 513; Stop 537
taacgtagtaccattctcaaaacca

SEQ ID NO: 238062 - DNA, 25 bp, Artificial
  probe
  misc_feature (1)..(25): SEQ ID NO: 4214; WAN024GAU_at; Start 58; Stop 82
gatgcaccgacaacattttcttatg

SEQ ID NO: 238063 - DNA, 25 bp, Artificial
  probe
  misc_feature (1)..(25): SEQ ID NO: 4214; WAN024GAU_at; Start 76; Stop 100
tcttatgtctatgcagtagatccag

SEQ ID NO: 238064 - DNA, 25 bp, Artificial
  probe
  misc_feature (1)..(25): SEQ ID NO: 4214; WAN024GAU_at; Start 445; Stop 469
caagcttggtcgacagatagttcat

SEQ ID NO: 238065 - DNA, 25 bp, Artificial
  probe
  misc_feature (1)..(25): SEQ ID NO: 4214; WAN024GAU_at; Start 458; Stop 482
cagatagttcattattgatgccaac

SEQ ID NO: 238066 - DNA, 25 bp, Artificial
  probe
  misc_feature (1)..(25): SEQ ID NO: 4214; WAN024GAU_at; Start 231; Stop 255
tacaggatgggctccaagctatcaa

SEQ ID NO: 238067 - DNA, 25 bp, Artificial
  probe
  misc_feature (1)..(25): SEQ ID NO: 4214; WAN024GAU_at; Start 293; Stop 317
ctggttctgccatgaaacaccttgg

SEQ ID NO: 238068 - DNA, 25 bp, Artificial
  probe
  misc_feature (1)..(25): SEQ ID NO: 4214; WAN024GAU_at; Start 48; Stop 72
taaagaagcagatgcaccgacaaca

SEQ ID NO: 238069 - DNA, 25 bp, Artificial
  probe
  misc_feature (1)..(25): SEQ ID NO: 4214; WAN024GAU_at; Start 585; Stop 609
gaaattgcaaaaagatattgttaca

SEQ ID NO: 238070 - DNA, 25 bp, Artificial
  probe
  misc_feature (1)..(25): SEQ ID NO: 4214; WAN024GAU_at; Start 87; Stop 111
tgcagtagatccagcatcattgggc

SEQ ID NO: 238071 - DNA, 25 bp, Artificial
  probe
  misc_feature (1)..(25): SEQ ID NO: 2669; WAN024GAV_at; Start 150; Stop 174
catgtctgtcggaacttgtggcatc

SEQ ID NO: 238072 - DNA, 25 bp, Artificial
  probe
  misc_feature (1)..(25): SEQ ID NO: 2669; WAN024GAV_at; Start 60; Stop 84
aagagggcgaagatataaggttcca

SEQ ID NO: 238073 - DNA, 25 bp, Artificial
  probe
  misc_feature (1)..(25): SEQ ID NO: 2669; WAN024GAV_at; Start 147; Stop 171
aaacatgtctgtcggaacttgtggc

SEQ ID NO: 238074 - DNA, 25 bp, Artificial
  probe
  misc_feature (1)..(25): SEQ ID NO: 2669; WAN024GAV_at; Start 174; Stop 198
caagagacggtcacatgtacgttgc

SEQ ID NO: 238075 - DNA, 25 bp, Artificial
  probe
  misc_feature (1)..(25): SEQ ID NO: 2669; WAN024GAV_at; Start 112; Stop 136
tcattcgcacggacaactgctttac

SEQ ID NO: 238076 - DNA, 25 bp, Artificial
  probe
  misc_feature (1)..(25): SEQ ID NO: 2669; WAN024GAV_at; Start 63; Stop 87
agggcgaagatataaggttccacct

SEQ ID NO: 238077 - DNA, 25 bp, Artificial
  probe
  misc_feature (1)..(25): SEQ ID NO: 2669; WAN024GAV_at; Start 161; Stop 185
gaacttgtggcatcaagagacggtc

SEQ ID NO: 238078 - DNA, 25 bp, Artificial
  probe
  misc_feature (1)..(25): SEQ ID NO: 2669; WAN024GAV_at; Start 152; Stop 176
tgtctgtcggaacttgtggcatcaa

SEQ ID NO: 238079 - DNA, 25 bp, Artificial
  probe
  misc_feature (1)..(25): SEQ ID NO: 2669; WAN024GAV_at; Start 129; Stop 153
tgctttacaagcttctacaaacatg

SEQ ID NO: 238080 - DNA, 25 bp, Artificial
  probe
  misc_feature (1)..(25): SEQ ID NO: 2669; WAN024GAV_at; Start 167; Stop 191
gtggcatcaagagacggtcacatgt

SEQ ID NO: 238081 - DNA, 25 bp, Artificial
  probe
  misc_feature (1)..(25): SEQ ID NO: 2669; WAN024GAV_at; Start 139; Stop 163
gcttctacaaacatgtctgtcggaa

SEQ ID NO: 238082 - DNA, 25 bp, Artificial
  probe
  misc_feature (1)..(25): SEQ ID NO: 2669; WAN024GAV_at; Start 105; Stop 129
gtattcttcattcgcacggacaact

SEQ ID NO: 238083 - DNA, 25 bp, Artificial
  probe
  misc_feature (1)..(25): SEQ ID NO: 2669; WAN024GAV_at; Start 206; Stop 230
tagcattttcatcaggacggaacag

SEQ ID NO: 238084 - DNA, 25 bp, Artificial
  probe
  misc_feature (1)..(25): SEQ ID NO: 2669; WAN024GAV_at; Start 100; Stop 124
ggtacgtattcttcattcgcacgga

SEQ ID NO: 238085 - DNA, 25 bp, Artificial
  probe
  misc_feature (1)..(25): SEQ ID NO: 2669; WAN024GAV_at; Start 41; Stop 65
tatctccgacaccaatcaaaagagg

SEQ ID NO: 238086 - DNA, 25 bp, Artificial
  probe
  misc_feature (1)..(25): SEQ ID NO: 2669; WAN024GAV_at; Start 156; Stop 180
tgtcggaacttgtggcatcaagaga

SEQ ID NO: 238087 - DNA, 25 bp, Artificial
  probe
  misc_feature (1)..(25): SEQ ID NO: 2669; WAN024GAV_at; Start 109; Stop 133
tcttcattcgcacggacaactgctt

SEQ ID NO: 238088 - DNA, 25 bp, Artificial
  probe
  misc_feature (1)..(25): SEQ ID NO: 2669; WAN024GAV_at; Start 122; Stop 146
ggacaactgctttacaagcttctac

SEQ ID NO: 238089 - DNA, 25 bp, Artificial
  probe
  misc_feature (1)..(25): SEQ ID NO: 2669; WAN024GAV_at; Start 164; Stop 188
cttgtggcatcaagagacggtcaca

SEQ ID NO: 238090 - DNA, 25 bp, Artificial
  probe
  misc_feature (1)..(25): SEQ ID NO: 2669; WAN024GAV_at; Start 27; Stop 51
ttttaccccgataatatctccgaca

SEQ ID NO: 238091 - DNA, 25 bp, Artificial
  probe
  misc_feature (1)..(25): SEQ ID NO: 2669; WAN024GAV_at; Start 176; Stop 200
agagacggtcacatgtacgttgcag

SEQ ID NO: 238092 - DNA, 25 bp, Artificial
  probe
  misc_feature (1)..(25): SEQ ID NO: 2669; WAN024GAV_at; Start 50; Stop 74
caccaatcaaaagagggcgaagata

SEQ ID NO: 238093 - DNA, 25 bp, Artificial
  probe
  misc_feature (1)..(25): SEQ ID NO: 2669; WAN024GAV_at; Start 143; Stop 167
ctacaaacatgtctgtcggaacttg

SEQ ID NO: 238094 - DNA, 25 bp, Artificial
  probe
  misc_feature (1)..(25): SEQ ID NO: 2669; WAN024GAV_at; Start 210; Stop 234
attttcatcaggacggaacagttga

SEQ ID NO: 238095 - DNA, 25 bp, Artificial
  probe
  misc_feature (1)..(25): SEQ ID NO: 2669; WAN024GAV_at; Start 45; Stop 69
tccgacaccaatcaaaagagggcga

SEQ ID NO: 238096 - DNA, 25 bp, Artificial
  probe
  misc_feature (1)..(25): SEQ ID NO: 2669; WAN024GAV_at; Start 102; Stop 126
tacgtattcttcattcgcacggaca

SEQ ID NO: 238097 - DNA, 25 bp, Artificial
  probe
  misc_feature (1)..(25): SEQ ID NO: 2669; WAN024GAV_at; Start 5; Stop 29
tgaaaatgtactcttctgccggttt

SEQ ID NO: 238098 - DNA, 25 bp, Artificial
  probe
  misc_feature (1)..(25): SEQ ID NO: 2669; WAN024GAV_at; Start 56; Stop 80
tcaaaagagggcgaagatataaggt

SEQ ID NO: 238099 - DNA, 25 bp, Artificial
  probe
  misc_feature (1)..(25): SEQ ID NO: 2669; WAN024GAV_at; Start 115; Stop 139
ttcgcacggacaactgctttacaag

SEQ ID NO: 238100 - DNA, 25 bp, Artificial
  probe
  misc_feature (1)..(25): SEQ ID NO: 2669; WAN024GAV_at; Start 171; Stop 195
catcaagagacggtcacatgtacgt

SEQ ID NO: 238101 - DNA, 25 bp, Artificial
  probe
  misc_feature (1)..(25): SEQ ID NO: 2669; WAN024GAV_at; Start 118; Stop 142
gcacggacaactgctttacaagctt

SEQ ID NO: 238102 - DNA, 25 bp, Artificial
  probe
  misc_feature (1)..(25): SEQ ID NO: 2669; WAN024GAV_at; Start 202; Stop 226
cgtttagcattttcatcaggacgga

SEQ ID NO: 238103 - DNA, 25 bp, Artificial
  probe
  misc_feature (1)..(25): SEQ ID NO: 2669; WAN024GAV_at; Start 137; Stop 161
aagcttctacaaacatgtctgtcgg

SEQ ID NO: 238104 - DNA, 25 bp, Artificial
  probe
  misc_feature (1)..(25): SEQ ID NO: 2669; WAN024GAV_at; Start 2; Stop 26
tggtgaaaatgtactcttctgccgg

SEQ ID NO: 238105 - DNA, 25 bp, Artificial
  probe
  misc_feature (1)..(25): SEQ ID NO: 1376; WAN024GAW_at; Start 218; Stop 242
tccgtcctgatgaaaatgctaaacg

SEQ ID NO: 238106 - DNA, 25 bp, Artificial
  probe
  misc_feature (1)..(25): SEQ ID NO: 1376; WAN024GAW_at; Start 911; Stop 935
tctatagtgaaacagaagtaggtcc

SEQ ID NO: 238107 - DNA, 25 bp, Artificial
  probe
  misc_feature (1)..(25): SEQ ID NO: 1376; WAN024GAW_at; Start 627; Stop 651
tctggacccatcaactcatacaaag

SEQ ID NO: 238108 - DNA, 25 bp, Artificial
  probe
  misc_feature (1)..(25): SEQ ID NO: 1376; WAN024GAW_at; Start 549; Stop 573
taaggttggtggaaactatgctgca

SEQ ID NO: 238109 - DNA, 25 bp, Artificial
  probe
  misc_feature (1)..(25): SEQ ID NO: 1376; WAN024GAW_at; Start 786; Stop 810
aactcctattgagggtgatgttcca

SEQ ID NO: 238110 - DNA, 25 bp, Artificial
  probe
  misc_feature (1)..(25): SEQ ID NO: 1376; WAN024GAW_at; Start 187; Stop 211
tatcgtactaaggatggcagtgttc

SEQ ID NO: 238111 - DNA, 25 bp, Artificial
  probe
  misc_feature (1)..(25): SEQ ID NO: 1376; WAN024GAW_at; Start 647; Stop 671
caaagattgaagaagtcggatcagc

SEQ ID NO: 238112 - DNA, 25 bp, Artificial
  probe
  misc_feature (1)..(25): SEQ ID NO: 1376; WAN024GAW_at; Start 700; Stop 724
gaatttgtaacaccattgagtccat

SEQ ID NO: 238113 - DNA, 25 bp, Artificial
  probe
  misc_feature (1)..(25): SEQ ID NO: 1376; WAN024GAW_at; Start 252; Stop 276
tacatgtgaccgtctcttgatgcca

SEQ ID NO: 238114 - DNA, 25 bp, Artificial
  probe
  misc_feature (1)..(25): SEQ ID NO: 1376; WAN024GAW_at; Start 268; Stop 292
ttgatgccacaagttccgacagaca

SEQ ID NO: 238115 - DNA, 25 bp, Artificial
  probe
  misc_feature (1)..(25): SEQ ID NO: 1376; WAN024GAW_at; Start 565; Stop 589
tatgctgcaagtctcttaccaggaa

SEQ ID NO: 238116 - DNA, 25 bp, Artificial
  probe
  misc_feature (1)..(25): SEQ ID NO: 1376; WAN024GAW_at; Start 358; Stop 382
ggtggaaccttatatcttcgccctc

SEQ ID NO: 238117 - DNA, 25 bp, Artificial
  probe
  misc_feature (1)..(25): SEQ ID NO: 1376; WAN024GAW_at; Start 79; Stop 103
aatggacaatgggatcaaggagagc

SEQ ID NO: 238118 - DNA, 25 bp, Artificial
  probe
  misc_feature (1)..(25): SEQ ID NO: 1376; WAN024GAW_at; Start 923; Stop 947
cagaagtaggtcctgtgacgcgtaa

SEQ ID NO: 238119 - DNA, 25 bp, Artificial
  probe
  misc_feature (1)..(25): SEQ ID NO: 1376; WAN024GAW_at; Start 143; Stop 167
caagtcttcactatggacaacaagc

SEQ ID NO: 238120 - DNA, 25 bp, Artificial
  probe
  misc_feature (1)..(25): SEQ ID NO: 1376; WAN024GAW_at; Start 850; Stop 874
ggtacagcagcggttatttctccaa

SEQ ID NO: 238121 - DNA, 25 bp, Artificial
  probe
  misc_feature (1)..(25): SEQ ID NO: 1376; WAN024GAW_at; Start 320; Stop 344
tccgtgcgaatgaagaatacgtacc

SEQ ID NO: 238122 - DNA, 25 bp, Artificial
  probe
  misc_feature (1)..(25): SEQ ID NO: 1376; WAN024GAW_at; Start 959; Stop 983
aattgacgggtattcagtttggcga

SEQ ID NO: 238123 - DNA, 25 bp, Artificial
  probe
  misc_feature (1)..(25): SEQ ID NO: 1376; WAN024GAW_at; Start 5; Stop 29
cagtaacgattgattgggaaaacct

SEQ ID NO: 238124 - DNA, 25 bp, Artificial
  probe
  misc_feature (1)..(25): SEQ ID NO: 1376; WAN024GAW_at; Start 282; Stop 306
tccgacagacatgtttgtagaagct

SEQ ID NO: 238125 - DNA, 25 bp, Artificial
  probe
  misc_feature (1)..(25): SEQ ID NO: 1376; WAN024GAW_at; Start 511; Stop 535
gagtacgaccgtgcagcaccaaatg

SEQ ID NO: 238126 - DNA, 25 bp, Artificial
  probe
  misc_feature (1)..(25): SEQ ID NO: 1376; WAN024GAW_at; Start 304; Stop 328
gcttgtaaagcagttgtccgtgcga

SEQ ID NO: 238127 - DNA, 25 bp, Artificial
  probe
  misc_feature (1)..(25): SEQ ID NO: 1376; WAN024GAW_at; Start 440; Stop 464
ccatctttgctatgccagttggaaa

SEQ ID NO: 238128 - DNA, 25 bp, Artificial
  probe
  misc_feature (1)..(25): SEQ ID NO: 1376; WAN024GAW_at; Start 581; Stop 605
taccaggaaaaatggccaagtcacg

SEQ ID NO: 238129 - DNA, 25 bp, Artificial
  probe
  misc_feature (1)..(25): SEQ ID NO: 1376; WAN024GAW_at; Start 760; Stop 784
tatttggcagaacatcgcttgggat

SEQ ID NO: 238130 - DNA, 25 bp, Artificial
  probe
  misc_feature (1)..(25): SEQ ID NO: 1376; WAN024GAW_at; Start 984; Stop 1008
tattgaagcgccagaaggttggatt

SEQ ID NO: 238131 - DNA, 25 bp, Artificial
  probe
  misc_feature (1)..(25): SEQ ID NO: 1376; WAN024GAW_at; Start 203; Stop 227
gcagtgttcaactgttccgtcctga

SEQ ID NO: 238132 - DNA, 25 bp, Artificial
  probe
  misc_feature (1)..(25): SEQ ID NO: 1376; WAN024GAW_at; Start 418; Stop 442
ccggcagaagagtacattttcacca

SEQ ID NO: 238133 - DNA, 25 bp, Artificial
  probe
  misc_feature (1)..(25): SEQ ID NO: 1376; WAN024GAW_at; Start 377; Stop 401
gccctcttttgattggtgtcggaga

SEQ ID NO: 238134 - DNA, 25 bp, Artificial
  probe
  misc_feature (1)..(25): SEQ ID NO: 1376; WAN024GAW_at; Start 497; Stop 521
tcttgattcaggatgagtacgaccg

SEQ ID NO: 238135 - DNA, 25 bp, Artificial
  probe
  misc_feature (1)..(25): SEQ ID NO: 1376; WAN024GAW_at; Start 868; Stop 892
tctccaattggaggtattcaacatg

SEQ ID NO: 238136 - DNA, 25 bp, Artificial
  probe
  misc_feature (1)..(25): SEQ ID NO: 1376; WAN024GAW_at; Start 530; Stop 554
caaatggtacaggtgcggctaaggt

SEQ ID NO: 238137 - DNA, 25 bp, Artificial
  probe
  misc_feature (1)..(25): SEQ ID NO: 1376; WAN024GAW_at; Start 822; Stop 846
tgaccgttttgtagaggcaggtgcc

SEQ ID NO: 238138 - DNA, 25 bp, Artificial
  probe
  misc_feature (1)..(25): SEQ ID NO: 1376; WAN024GAW_at; Start 94; Stop 118
caaggagagcttacagaggatgcaa

SEQ ID NO: 238139 - DNA, 25 bp, Artificial
  probe
  misc_feature (1)..(25): SEQ ID NO: 768; WAN024GAX_at; Start 18; Stop 42
caaaattagtcttagtttgtgtctt

SEQ ID NO: 238140 - DNA, 25 bp, Artificial
  probe
  misc_feature (1)..(25): SEQ ID NO: 768; WAN024GAX_at; Start 116; Stop 140
caaaccaagattttcaaactgcttt

SEQ ID NO: 238141 - DNA, 25 bp, Artificial
  probe
  misc_feature (1)..(25): SEQ ID NO: 768; WAN024GAX_at; Start 138; Stop 162
tttttcacatagtcattcacatccg

SEQ ID NO: 238142 - DNA, 25 bp, Artificial
  probe
  misc_feature (1)..(25): SEQ ID NO: 768; WAN024GAX_at; Start 154; Stop 178
tcacatccgactctaatttccagtt

SEQ ID NO: 238143 - DNA, 25 bp, Artificial
  probe
  misc_feature (1)..(25): SEQ ID NO: 768; WAN024GAX_at; Start 139; Stop 163
ttttcacatagtcattcacatccga

SEQ ID NO: 238144 - DNA, 25 bp, Artificial
  probe
  misc_feature (1)..(25): SEQ ID NO: 768; WAN024GAX_at; Start 157; Stop 181
catccgactctaatttccagtttac

SEQ ID NO: 238145 - DNA, 25 bp, Artificial
  probe
  misc_feature (1)..(25): SEQ ID NO: 768; WAN024GAX_at; Start 103; Stop 127
cctgcaattttttcaaaccaagatt

SEQ ID NO: 238146 - DNA, 25 bp, Artificial
  probe
  misc_feature (1)..(25): SEQ ID NO: 768; WAN024GAX_at; Start 162; Stop 186
gactctaatttccagtttactaaca

SEQ ID NO: 238147 - DNA, 25 bp, Artificial
  probe
  misc_feature (1)..(25): SEQ ID NO: 768; WAN024GAX_at; Start 83; Stop 107
gcagattcttcattaataatcctgc

SEQ ID NO: 238148 - DNA, 25 bp, Artificial
  probe
  misc_feature (1)..(25): SEQ ID NO: 768; WAN024GAX_at; Start 16; Stop 40
tccaaaattagtcttagtttgtgtc

SEQ ID NO: 238149 - DNA, 25 bp, Artificial
  probe
  misc_feature (1)..(25): SEQ ID NO: 768; WAN024GAX_at; Start 134; Stop 158
ctgctttttcacatagtcattcaca

SEQ ID NO: 238150 - DNA, 25 bp, Artificial
  probe
  misc_feature (1)..(25): SEQ ID NO: 768; WAN024GAX_at; Start 79; Stop 103
catagcagattcttcattaataatc

SEQ ID NO: 238151 - DNA, 25 bp, Artificial
  probe
  misc_feature (1)..(25): SEQ ID NO: 768; WAN024GAX_at; Start 159; Stop 183
tccgactctaatttccagtttacta

SEQ ID NO: 238152 - DNA, 25 bp, Artificial
  probe
  misc_feature (1)..(25): SEQ ID NO: 768; WAN024GAX_at; Start 69; Stop 93
gataagcactcatagcagattcttc

SEQ ID NO: 238153 - DNA, 25 bp, Artificial
  probe
  misc_feature (1)..(25): SEQ ID NO: 768; WAN024GAX_at; Start 140; Stop 164
tttcacatagtcattcacatccgac

SEQ ID NO: 238154 - DNA, 25 bp, Artificial
  probe
  misc_feature (1)..(25): SEQ ID NO: 768; WAN024GAX_at; Start 71; Stop 95
taagcactcatagcagattcttcat

SEQ ID NO: 238155 - DNA, 25 bp, Artificial
  probe
  misc_feature (1)..(25): SEQ ID NO: 768; WAN024GAX_at; Start 86; Stop 110
gattcttcattaataatcctgcaat

SEQ ID NO: 238156 - DNA, 25 bp, Artificial
  probe
  misc_feature (1)..(25): SEQ ID NO: 768; WAN024GAX_at; Start 124; Stop 148
gattttcaaactgctttttcacata

SEQ ID NO: 238157 - DNA, 25 bp, Artificial
  probe
  misc_feature (1)..(25): SEQ ID NO: 768; WAN024GAX_at; Start 147; Stop 171
tagtcattcacatccgactctaatt

SEQ ID NO: 238158 - DNA, 25 bp, Artificial
  probe
  misc_feature (1)..(25): SEQ ID NO: 768; WAN024GAX_at; Start 145; Stop 169
catagtcattcacatccgactctaa

SEQ ID NO: 238159 - DNA, 25 bp, Artificial
  probe
  misc_feature (1)..(25): SEQ ID NO: 768; WAN024GAX_at; Start 136; Stop 160
gctttttcacatagtcattcacatc

SEQ ID NO: 238160 - DNA, 25 bp, Artificial
  probe
  misc_feature (1)..(25): SEQ ID NO: 768; WAN024GAX_at; Start 114; Stop 138
ttcaaaccaagattttcaaactgct

SEQ ID NO: 238161 - DNA, 25 bp, Artificial
  probe
  misc_feature (1)..(25): SEQ ID NO: 768; WAN024GAX_at; Start 102; Stop 126
tcctgcaattttttcaaaccaagat

SEQ ID NO: 238162 - DNA, 25 bp, Artificial
  probe
  misc_feature (1)..(25): SEQ ID NO: 768; WAN024GAX_at; Start 172; Stop 196
tccagtttactaacatattattttc

SEQ ID NO: 238163 - DNA, 25 bp, Artificial
  probe
  misc_feature (1)..(25): SEQ ID NO: 768; WAN024GAX_at; Start 130; Stop 154
caaactgctttttcacatagtcatt

SEQ ID NO: 238164 - DNA, 25 bp, Artificial
  probe
  misc_feature (1)..(25): SEQ ID NO: 768; WAN024GAX_at; Start 152; Stop 176
attcacatccgactctaatttccag

SEQ ID NO: 238165 - DNA, 25 bp, Artificial
  probe
  misc_feature (1)..(25): SEQ ID NO: 768; WAN024GAX_at; Start 121; Stop 145
caagattttcaaactgctttttcac

SEQ ID NO: 238166 - DNA, 25 bp, Artificial
  probe
  misc_feature (1)..(25): SEQ ID NO: 768; WAN024GAX_at; Start 72; Stop 96
aagcactcatagcagattcttcatt

SEQ ID NO: 238167 - DNA, 25 bp, Artificial
  probe
  misc_feature (1)..(25): SEQ ID NO: 768; WAN024GAX_at; Start 142; Stop 166
tcacatagtcattcacatccgactc

SEQ ID NO: 238168 - DNA, 25 bp, Artificial
  probe
  misc_feature (1)..(25): SEQ ID NO: 768; WAN024GAX_at; Start 113; Stop 137
tttcaaaccaagattttcaaactgc

SEQ ID NO: 238169 - DNA, 25 bp, Artificial
  probe
  misc_feature (1)..(25): SEQ ID NO: 768; WAN024GAX_at; Start 191; Stop 215
attttctttcattaaaacactgtcg

SEQ ID NO: 238170 - DNA, 25 bp, Artificial
  probe
  misc_feature (1)..(25): SEQ ID NO: 768; WAN024GAX_at; Start 74; Stop 98
gcactcatagcagattcttcattaa

SEQ ID NO: 238171 - DNA, 25 bp, Artificial
  probe
  misc_feature (1)..(25): SEQ ID NO: 768; WAN024GAX_at; Start 100; Stop 124
aatcctgcaattttttcaaaccaag

SEQ ID NO: 238172 - DNA, 25 bp, Artificial
  probe
  misc_feature (1)..(25): SEQ ID NO: 768; WAN024GAX_at; Start 128; Stop 152
ttcaaactgctttttcacatagtca

SEQ ID NO: 238173 - DNA, 25 bp, Artificial
  probe
  misc_feature (1)..(25): SEQ ID NO: 1638; WAN024GAY_at; Start 30; Stop 54
gggagcggctaagacacaaactaag

SEQ ID NO: 238174 - DNA, 25 bp, Artificial
  probe
  misc_feature (1)..(25): SEQ ID NO: 1638; WAN024GAY_at; Start 84; Stop 108
tgaaaaatacaaacaggatagtttg

SEQ ID NO: 238175 - DNA, 25 bp, Artificial
  probe
  misc_feature (1)..(25): SEQ ID NO: 1638; WAN024GAY_at; Start 33; Stop 57
agcggctaagacacaaactaagact

SEQ ID NO: 238176 - DNA, 25 bp, Artificial
  probe
  misc_feature (1)..(25): SEQ ID NO: 1638; WAN024GAY_at; Start 3; Stop 27
gagtgcttatctcaaagaggcgctt

SEQ ID NO: 238177 - DNA, 25 bp, Artificial
  probe
  misc_feature (1)..(25): SEQ ID NO: 1638; WAN024GAY_at; Start 27; Stop 51
taagggagcggctaagacacaaact

SEQ ID NO: 238178 - DNA, 25 bp, Artificial
  probe
  misc_feature (1)..(25): SEQ ID NO: 1638; WAN024GAY_at; Start 1; Stop 25
atgagtgcttatctcaaagaggcgc

SEQ ID NO: 238179 - DNA, 25 bp, Artificial
  probe
  misc_feature (1)..(25): SEQ ID NO: 1638; WAN024GAY_at; Start 12; Stop 36
tctcaaagaggcgcttaagggagcg

SEQ ID NO: 238180 - DNA, 25 bp, Artificial
  probe
  misc_feature (1)..(25): SEQ ID NO: 1638; WAN024GAY_at; Start 28; Stop 52
aagggagcggctaagacacaaacta

SEQ ID NO: 238181 - DNA, 25 bp, Artificial
  probe
  misc_feature (1)..(25): SEQ ID NO: 1638; WAN024GAY_at; Start 22; Stop 46
gcgcttaagggagcggctaagacac

SEQ ID NO: 238182 - DNA, 25 bp, Artificial
  probe
  misc_feature (1)..(25): SEQ ID NO: 1638; WAN024GAY_at; Start 82; Stop 106
attgaaaaatacaaacaggatagtt

SEQ ID NO: 238183 - DNA, 25 bp, Artificial
  probe
  misc_feature (1)..(25): SEQ ID NO: 1638; WAN024GAY_at; Start 63; Stop 87
tggaaaaccagattttcatattgaa

SEQ ID NO: 238184 - DNA, 25 bp, Artificial
  probe
  misc_feature (1)..(25): SEQ ID NO: 1638; WAN024GAY_at; Start 36; Stop 60
ggctaagacacaaactaagactaat

SEQ ID NO: 238185 - DNA, 25 bp, Artificial
  probe
  misc_feature (1)..(25): SEQ ID NO: 1638; WAN024GAY_at; Start 4; Stop 28
agtgcttatctcaaagaggcgctta

SEQ ID NO: 238186 - DNA, 25 bp, Artificial
  probe
  misc_feature (1)..(25): SEQ ID NO: 1638; WAN024GAY_at; Start 29; Stop 53
agggagcggctaagacacaaactaa

SEQ ID NO: 238187 - DNA, 25 bp, Artificial
  probe
  misc_feature (1)..(25): SEQ ID NO: 1638; WAN024GAY_at; Start 31; Stop 55
ggagcggctaagacacaaactaaga

SEQ ID NO: 238188 - DNA, 25 bp, Artificial
  probe
  misc_feature (1)..(25): SEQ ID NO: 1638; WAN024GAY_at; Start 6; Stop 30
tgcttatctcaaagaggcgcttaag

SEQ ID NO: 238189 - DNA, 25 bp, Artificial
  probe
  misc_feature (1)..(25): SEQ ID NO: 1638; WAN024GAY_at; Start 97; Stop 121
caggatagtttggttacttatcgta

SEQ ID NO: 238190 - DNA, 25 bp, Artificial
  probe
  misc_feature (1)..(25): SEQ ID NO: 1638; WAN024GAY_at; Start 5; Stop 29
gtgcttatctcaaagaggcgcttaa

SEQ ID NO: 238191 - DNA, 25 bp, Artificial
  probe
  misc_feature (1)..(25): SEQ ID NO: 1638; WAN024GAY_at; Start 70; Stop 94
ccagattttcatattgaaaaataca

SEQ ID NO: 238192 - DNA, 25 bp, Artificial
  probe
  misc_feature (1)..(25): SEQ ID NO: 1638; WAN024GAY_at; Start 7; Stop 31
gcttatctcaaagaggcgcttaagg

SEQ ID NO: 238193 - DNA, 25 bp, Artificial
  probe
  misc_feature (1)..(25): SEQ ID NO: 1638; WAN024GAY_at; Start 95; Stop 119
aacaggatagtttggttacttatcg

SEQ ID NO: 238194 - DNA, 25 bp, Artificial
  probe
  misc_feature (1)..(25): SEQ ID NO: 1638; WAN024GAY_at; Start 26; Stop 50
ttaagggagcggctaagacacaaac

SEQ ID NO: 238195 - DNA, 25 bp, Artificial
  probe
  misc_feature (1)..(25): SEQ ID NO: 1638; WAN024GAY_at; Start 93; Stop 117
caaacaggatagtttggttacttat

SEQ ID NO: 238196 - DNA, 25 bp, Artificial
  probe
  misc_feature (1)..(25): SEQ ID NO: 1638; WAN024GAY_at; Start 38; Stop 62
ctaagacacaaactaagactaattt

SEQ ID NO: 238197 - DNA, 25 bp, Artificial
  probe
  misc_feature (1)..(25): SEQ ID NO: 1638; WAN024GAY_at; Start 35; Stop 59
cggctaagacacaaactaagactaa

SEQ ID NO: 238198 - DNA, 25 bp, Artificial
  probe
  misc_feature (1)..(25): SEQ ID NO: 1638; WAN024GAY_at; Start 8; Stop 32
cttatctcaaagaggcgcttaaggg

SEQ ID NO: 238199 - DNA, 25 bp, Artificial
  probe
  misc_feature (1)..(25): SEQ ID NO: 1638; WAN024GAY_at; Start 32; Stop 56
gagcggctaagacacaaactaagac

SEQ ID NO: 238200 - DNA, 25 bp, Artificial
  probe
  misc_feature (1)..(25): SEQ ID NO: 1638; WAN024GAY_at; Start 65; Stop 89
gaaaaccagattttcatattgaaaa

SEQ ID NO: 238201 - DNA, 25 bp, Artificial
  probe
  misc_feature (1)..(25): SEQ ID NO: 1638; WAN024GAY_at; Start 42; Stop 66
gacacaaactaagactaattttgga

SEQ ID NO: 238202 - DNA, 25 bp, Artificial
  probe
  misc_feature (1)..(25): SEQ ID NO: 1638; WAN024GAY_at; Start 2; Stop 26
tgagtgcttatctcaaagaggcgct

SEQ ID NO: 238203 - DNA, 25 bp, Artificial
  probe
  misc_feature (1)..(25): SEQ ID NO: 1638; WAN024GAY_at; Start 9; Stop 33
ttatctcaaagaggcgcttaaggga

SEQ ID NO: 238204 - DNA, 25 bp, Artificial
  probe
  misc_feature (1)..(25): SEQ ID NO: 1638; WAN024GAY_at; Start 34; Stop 58
gcggctaagacacaaactaagacta

SEQ ID NO: 238205 - DNA, 25 bp, Artificial
  probe
  misc_feature (1)..(25): SEQ ID NO: 1638; WAN024GAY_at; Start 37; Stop 61
gctaagacacaaactaagactaatt

SEQ ID NO: 238206 - DNA, 25 bp, Artificial
  probe
  misc_feature (1)..(25): SEQ ID NO: 1638; WAN024GAY_at; Start 14; Stop 38
tcaaagaggcgcttaagggagcggc

SEQ ID NO: 238207 - DNA, 25 bp, Artificial
  probe
  misc_feature (1)..(25): SEQ ID NO: 872; WAN024GAZ_at; Start 40; Stop 64
tcggatgtgaatgactatgtgaaaa

SEQ ID NO: 238208 - DNA, 25 bp, Artificial
  probe
  misc_feature (1)..(25): SEQ ID NO: 872; WAN024GAZ_at; Start 90; Stop 114
aaaattgcaggattatctaactaat

SEQ ID NO: 238209 - DNA, 25 bp, Artificial
  probe
  misc_feature (1)..(25): SEQ ID NO: 872; WAN024GAZ_at; Start 23; Stop 47
taaactggaaattagagtcggatgt

SEQ ID NO: 238210 - DNA, 25 bp, Artificial
  probe
  misc_feature (1)..(25): SEQ ID NO: 872; WAN024GAZ_at; Start 46; Stop 70
gtgaatgactatgtgaaaaagcagt

SEQ ID NO: 238211 - DNA, 25 bp, Artificial
  probe
  misc_feature (1)..(25): SEQ ID NO: 872; WAN024GAZ_at; Start 48; Stop 72
gaatgactatgtgaaaaagcagttt

SEQ ID NO: 238212 - DNA, 25 bp, Artificial
  probe
  misc_feature (1)..(25): SEQ ID NO: 872; WAN024GAZ_at; Start 76; Stop 100
aatcttggtttgaaaaaattgcagg

SEQ ID NO: 238213 - DNA, 25 bp, Artificial
  probe
  misc_feature (1)..(25): SEQ ID NO: 872; WAN024GAZ_at; Start 86; Stop 110
tgaaaaaattgcaggattatctaac

SEQ ID NO: 238214 - DNA, 25 bp, Artificial
  probe
  misc_feature (1)..(25): SEQ ID NO: 872; WAN024GAZ_at; Start 41; Stop 65
cggatgtgaatgactatgtgaaaaa

SEQ ID NO: 238215 - DNA, 25 bp, Artificial
  probe
  misc_feature (1)..(25): SEQ ID NO: 872; WAN024GAZ_at; Start 81; Stop 105
tggtttgaaaaaattgcaggattat

SEQ ID NO: 238216 - DNA, 25 bp, Artificial
  probe
  misc_feature (1)..(25): SEQ ID NO: 872; WAN024GAZ_at; Start 7; Stop 31
gaaaataatatgttagtaaactgga

SEQ ID NO: 238217 - DNA, 25 bp, Artificial
  probe
  misc_feature (1)..(25): SEQ ID NO: 872; WAN024GAZ_at; Start 22; Stop 46
gtaaactggaaattagagtcggatg

SEQ ID NO: 238218 - DNA, 25 bp, Artificial
  probe
  misc_feature (1)..(25): SEQ ID NO: 872; WAN024GAZ_at; Start 35; Stop 59
tagagtcggatgtgaatgactatgt

SEQ ID NO: 238219 - DNA, 25 bp, Artificial
  probe
  misc_feature (1)..(25): SEQ ID NO: 872; WAN024GAZ_at; Start 43; Stop 67
gatgtgaatgactatgtgaaaaagc

SEQ ID NO: 238220 - DNA, 25 bp, Artificial
  probe
  misc_feature (1)..(25): SEQ ID NO: 872; WAN024GAZ_at; Start 31; Stop 55
aaattagagtcggatgtgaatgact

SEQ ID NO: 238221 - DNA, 25 bp, Artificial
  probe
  misc_feature (1)..(25): SEQ ID NO: 872; WAN024GAZ_at; Start 59; Stop 83
tgaaaaagcagtttgaaaatcttgg

SEQ ID NO: 238222 - DNA, 25 bp, Artificial
  probe
  misc_feature (1)..(25): SEQ ID NO: 872; WAN024GAZ_at; Start 45; Stop 69
tgtgaatgactatgtgaaaaagcag

SEQ ID NO: 238223 - DNA, 25 bp, Artificial
  probe
  misc_feature (1)..(25): SEQ ID NO: 872; WAN024GAZ_at; Start 51; Stop 75
tgactatgtgaaaaagcagtttgaa

SEQ ID NO: 238224 - DNA, 25 bp, Artificial
  probe
  misc_feature (1)..(25): SEQ ID NO: 872; WAN024GAZ_at; Start 55; Stop 79
tatgtgaaaaagcagtttgaaaatc

SEQ ID NO: 238225 - DNA, 25 bp, Artificial
  probe
  misc_feature (1)..(25): SEQ ID NO: 872; WAN024GAZ_at; Start 20; Stop 44
tagtaaactggaaattagagtcgga

SEQ ID NO: 238226 - DNA, 25 bp, Artificial
  probe
  misc_feature (1)..(25): SEQ ID NO: 872; WAN024GAZ_at; Start 26; Stop 50
actggaaattagagtcggatgtgaa

SEQ ID NO: 238227 - DNA, 25 bp, Artificial
  probe
  misc_feature (1)..(25): SEQ ID NO: 872; WAN024GAZ_at; Start 78; Stop 102
tcttggtttgaaaaaattgcaggat

SEQ ID NO: 238228 - DNA, 25 bp, Artificial
  probe
  misc_feature (1)..(25): SEQ ID NO: 872; WAN024GAZ_at; Start 52; Stop 76
gactatgtgaaaaagcagtttgaaa

SEQ ID NO: 238229 - DNA, 25 bp, Artificial
  probe
  misc_feature (1)..(25): SEQ ID NO: 872; WAN024GAZ_at; Start 79; Stop 103
cttggtttgaaaaaattgcaggatt

SEQ ID NO: 238230 - DNA, 25 bp, Artificial
  probe
  misc_feature (1)..(25): SEQ ID NO: 872; WAN024GAZ_at; Start 83; Stop 107
gtttgaaaaaattgcaggattatct

SEQ ID NO: 238231 - DNA, 25 bp, Artificial
  probe
  misc_feature (1)..(25): SEQ ID NO: 872; WAN024GAZ_at; Start 25; Stop 49
aactggaaattagagtcggatgtga

SEQ ID NO: 238232 - DNA, 25 bp, Artificial
  probe
  misc_feature (1)..(25): SEQ ID NO: 872; WAN024GAZ_at; Start 32; Stop 56
aattagagtcggatgtgaatgacta

SEQ ID NO: 238233 - DNA, 25 bp, Artificial
  probe
  misc_feature (1)..(25): SEQ ID NO: 872; WAN024GAZ_at; Start 17; Stop 41
tgttagtaaactggaaattagagtc

SEQ ID NO: 238234 - DNA, 25 bp, Artificial
  probe
  misc_feature (1)..(25): SEQ ID NO: 872; WAN024GAZ_at; Start 27; Stop 51
ctggaaattagagtcggatgtgaat

SEQ ID NO: 238235 - DNA, 25 bp, Artificial
  probe
  misc_feature (1)..(25): SEQ ID NO: 872; WAN024GAZ_at; Start 57; Stop 81
tgtgaaaaagcagtttgaaaatctt

SEQ ID NO: 238236 - DNA, 25 bp, Artificial
  probe
  misc_feature (1)..(25): SEQ ID NO: 872; WAN024GAZ_at; Start 37; Stop 61
gagtcggatgtgaatgactatgtga

SEQ ID NO: 238237 - DNA, 25 bp, Artificial
  probe
  misc_feature (1)..(25): SEQ ID NO: 872; WAN024GAZ_at; Start 63; Stop 87
aaagcagtttgaaaatcttggtttg

SEQ ID NO: 238238 - DNA, 25 bp, Artificial
  probe
  misc_feature (1)..(25): SEQ ID NO: 872; WAN024GAZ_at; Start 87; Stop 111
gaaaaaattgcaggattatctaact

SEQ ID NO: 238239 - DNA, 25 bp, Artificial
  probe
  misc_feature (1)..(25): SEQ ID NO: 872; WAN024GAZ_at; Start 28; Stop 52
tggaaattagagtcggatgtgaatg

SEQ ID NO: 238240 - DNA, 25 bp, Artificial
  probe
  misc_feature (1)..(25): SEQ ID NO: 872; WAN024GAZ_at; Start 66; Stop 90
gcagtttgaaaatcttggtttgaaa

SEQ ID NO: 238241 - DNA, 25 bp, Artificial
  probe
  misc_feature (1)..(25): SEQ ID NO: 5400; WAN024GB2_at; Start 31; Stop 55
cgtccgctagtcgaggcaggtcatg

SEQ ID NO: 238242 - DNA, 25 bp, Artificial
  probe
  misc_feature (1)..(25): SEQ ID NO: 5400; WAN024GB2_at; Start 26; Stop 50
acatgcgtccgctagtcgaggcagg

SEQ ID NO: 238243 - DNA, 25 bp, Artificial
  probe
  misc_feature (1)..(25): SEQ ID NO: 5400; WAN024GB2_at; Start 41; Stop 65
tcgaggcaggtcatgtctatattgc

SEQ ID NO: 238244 - DNA, 25 bp, Artificial
  probe
  misc_feature (1)..(25): SEQ ID NO: 5400; WAN024GB2_at; Start 29; Stop 53
tgcgtccgctagtcgaggcaggtca

SEQ ID NO: 238245 - DNA, 25 bp, Artificial
  probe
  misc_feature (1)..(25): SEQ ID NO: 5400; WAN024GB2_at; Start 27; Stop 51
catgcgtccgctagtcgaggcaggt

SEQ ID NO: 238246 - DNA, 25 bp, Artificial
  probe
  misc_feature (1)..(25): SEQ ID NO: 5400; WAN024GB2_at; Start 35; Stop 59
cgctagtcgaggcaggtcatgtcta

SEQ ID NO: 238247 - DNA, 25 bp, Artificial
  probe
  misc_feature (1)..(25): SEQ ID NO: 5400; WAN024GB2_at; Start 24; Stop 48
ttacatgcgtccgctagtcgaggca

SEQ ID NO: 238248 - DNA, 25 bp, Artificial
  probe
  misc_feature (1)..(25): SEQ ID NO: 5400; WAN024GB2_at; Start 42; Stop 66
cgaggcaggtcatgtctatattgcc

SEQ ID NO: 238249 - DNA, 25 bp, Artificial
  probe
  misc_feature (1)..(25): SEQ ID NO: 5400; WAN024GB2_at; Start 37; Stop 61
ctagtcgaggcaggtcatgtctata

SEQ ID NO: 238250 - DNA, 25 bp, Artificial
  probe
  misc_feature (1)..(25): SEQ ID NO: 5400; WAN024GB2_at; Start 34; Stop 58
ccgctagtcgaggcaggtcatgtct

SEQ ID NO: 238251 - DNA, 25 bp, Artificial
  probe
  misc_feature (1)..(25): SEQ ID NO: 5400; WAN024GB2_at; Start 23; Stop 47
gttacatgcgtccgctagtcgaggc

SEQ ID NO: 238252 - DNA, 25 bp, Artificial
  probe
  misc_feature (1)..(25): SEQ ID NO: 5400; WAN024GB2_at; Start 38; Stop 62
tagtcgaggcaggtcatgtctatat

SEQ ID NO: 238253 - DNA, 25 bp, Artificial
  probe
  misc_feature (1)..(25): SEQ ID NO: 5400; WAN024GB2_at; Start 40; Stop 64
gtcgaggcaggtcatgtctatattg

SEQ ID NO: 238254 - DNA, 25 bp, Artificial
  probe
  misc_feature (1)..(25): SEQ ID NO: 5400; WAN024GB2_at; Start 28; Stop 52
atgcgtccgctagtcgaggcaggtc

SEQ ID NO: 238255 - DNA, 25 bp, Artificial
  probe
  misc_feature (1)..(25): SEQ ID NO: 5400; WAN024GB2_at; Start 36; Stop 60
gctagtcgaggcaggtcatgtctat

SEQ ID NO: 238256 - DNA, 25 bp, Artificial
  probe
  misc_feature (1)..(25): SEQ ID NO: 5400; WAN024GB2_at; Start 33; Stop 57
tccgctagtcgaggcaggtcatgtc

SEQ ID NO: 238257 - DNA, 25 bp, Artificial
  probe
  misc_feature (1)..(25): SEQ ID NO: 5400; WAN024GB2_at; Start 39; Stop 63
agtcgaggcaggtcatgtctatatt

SEQ ID NO: 238258 - DNA, 25 bp, Artificial
  probe
  misc_feature (1)..(25): SEQ ID NO: 5400; WAN024GB2_at; Start 25; Stop 49
tacatgcgtccgctagtcgaggcag

SEQ ID NO: 238259 - DNA, 25 bp, Artificial
  probe
  misc_feature (1)..(25): SEQ ID NO: 5400; WAN024GB2_at; Start 30; Stop 54
gcgtccgctagtcgaggcaggtcat

SEQ ID NO: 238260 - DNA, 25 bp, Artificial
  probe
  misc_feature (1)..(25): SEQ ID NO: 5400; WAN024GB2_at; Start 32; Stop 56
gtccgctagtcgaggcaggtcatgt

SEQ ID NO: 238261 - DNA, 25 bp, Artificial
  probe
  misc_feature (1)..(25): SEQ ID NO: 5883; WAN024GB3_at; Start 65; Stop 89
ccttgatagccttgcggatgaggtt

SEQ ID NO: 238262 - DNA, 25 bp, Artificial
  probe
  misc_feature (1)..(25): SEQ ID NO: 5883; WAN024GB3_at; Start 225; Stop 249
taagatagaaagaacggccgctagt

SEQ ID NO: 238263 - DNA, 25 bp, Artificial
  probe
  misc_feature (1)..(25): SEQ ID NO: 5883; WAN024GB3_at; Start 191; Stop 215
tctgtccttcaaactgcaagtgttc

SEQ ID NO: 238264 - DNA, 25 bp, Artificial
  probe
  misc_feature (1)..(25): SEQ ID NO: 5883; WAN024GB3_at; Start 237; Stop 261
aacggccgctagtccctcacgatag

SEQ ID NO: 238265 - DNA, 25 bp, Artificial
  probe
  misc_feature (1)..(25): SEQ ID NO: 5883; WAN024GB3_at; Start 170; Stop 194
ggcttcctagtttatccttggtctg

SEQ ID NO: 238266 - DNA, 25 bp, Artificial
  probe
  misc_feature (1)..(25): SEQ ID NO: 5883; WAN024GB3_at; Start 177; Stop 201
tagtttatccttggtctgtccttca

SEQ ID NO: 238267 - DNA, 25 bp, Artificial
  probe
  misc_feature (1)..(25): SEQ ID NO: 5883; WAN024GB3_at; Start 80; Stop 104
ggatgaggttagaagctaattcccc

SEQ ID NO: 238268 - DNA, 25 bp, Artificial
  probe
  misc_feature (1)..(25): SEQ ID NO: 5883; WAN024GB3_at; Start 42; Stop 66
tgctgcttcacgagcatcacgggcc

SEQ ID NO: 238269 - DNA, 25 bp, Artificial
  probe
  misc_feature (1)..(25): SEQ ID NO: 5883; WAN024GB3_at; Start 30; Stop 54
acgcgccttacgtgctgcttcacga

SEQ ID NO: 238270 - DNA, 25 bp, Artificial
  probe
  misc_feature (1)..(25): SEQ ID NO: 5883; WAN024GB3_at; Start 141; Stop 165
tattccatccacaactgggcgagct

SEQ ID NO: 238271 - DNA, 25 bp, Artificial
  probe
  misc_feature (1)..(25): SEQ ID NO: 5883; WAN024GB3_at; Start 207; Stop 231
caagtgttcttcaggaactaagata

SEQ ID NO: 238272 - DNA, 25 bp, Artificial
  probe
  misc_feature (1)..(25): SEQ ID NO: 5883; WAN024GB3_at; Start 94; Stop 118
gctaattccccattttccataagga

SEQ ID NO: 238273 - DNA, 25 bp, Artificial
  probe
  misc_feature (1)..(25): SEQ ID NO: 5883; WAN024GB3_at; Start 221; Stop 245
gaactaagatagaaagaacggccgc

SEQ ID NO: 238274 - DNA, 25 bp, Artificial
  probe
  misc_feature (1)..(25): SEQ ID NO: 5883; WAN024GB3_at; Start 188; Stop 212
tggtctgtccttcaaactgcaagtg

SEQ ID NO: 238275 - DNA, 25 bp, Artificial
  probe
  misc_feature (1)..(25): SEQ ID NO: 5883; WAN024GB3_at; Start 45; Stop 69
tgcttcacgagcatcacgggccttg

SEQ ID NO: 238276 - DNA, 25 bp, Artificial
  probe
  misc_feature (1)..(25): SEQ ID NO: 5883; WAN024GB3_at; Start 56; Stop 80
catcacgggccttgatagccttgcg

SEQ ID NO: 238277 - DNA, 25 bp, Artificial
  probe
  misc_feature (1)..(25): SEQ ID NO: 5883; WAN024GB3_at; Start 182; Stop 206
tatccttggtctgtccttcaaactg

SEQ ID NO: 238278 - DNA, 25 bp, Artificial
  probe
  misc_feature (1)..(25): SEQ ID NO: 5883; WAN024GB3_at; Start 123; Stop 147
ggtcaacttatcagccactattcca

SEQ ID NO: 238279 - DNA, 25 bp, Artificial
  probe
  misc_feature (1)..(25): SEQ ID NO: 5883; WAN024GB3_at; Start 38; Stop 62
tacgtgctgcttcacgagcatcacg

SEQ ID NO: 238280 - DNA, 25 bp, Artificial
  probe
  misc_feature (1)..(25): SEQ ID NO: 5883; WAN024GB3_at; Start 61; Stop 85
cgggccttgatagccttgcggatga

SEQ ID NO: 238281 - DNA, 25 bp, Artificial
  probe
  misc_feature (1)..(25): SEQ ID NO: 5883; WAN024GB3_at; Start 3; Stop 27
gtttttcttcccatttcggctctca

SEQ ID NO: 238282 - DNA, 25 bp, Artificial
  probe
  misc_feature (1)..(25): SEQ ID NO: 5883; WAN024GB3_at; Start 145; Stop 169
ccatccacaactgggcgagctaggg

SEQ ID NO: 238283 - DNA, 25 bp, Artificial
  probe
  misc_feature (1)..(25): SEQ ID NO: 5883; WAN024GB3_at; Start 48; Stop 72
ttcacgagcatcacgggccttgata

SEQ ID NO: 238284 - DNA, 25 bp, Artificial
  probe
  misc_feature (1)..(25): SEQ ID NO: 5883; WAN024GB3_at; Start 113; Stop 137
taaggaaaaaggtcaacttatcagc

SEQ ID NO: 238285 - DNA, 25 bp, Artificial
  probe
  misc_feature (1)..(25): SEQ ID NO: 5883; WAN024GB3_at; Start 15; Stop 39
atttcggctctcatcacgcgcctta

SEQ ID NO: 238286 - DNA, 25 bp, Artificial
  probe
  misc_feature (1)..(25): SEQ ID NO: 5883; WAN024GB3_at; Start 138; Stop 162
cactattccatccacaactgggcga

SEQ ID NO: 238287 - DNA, 25 bp, Artificial
  probe
  misc_feature (1)..(25): SEQ ID NO: 5883; WAN024GB3_at; Start 34; Stop 58
gccttacgtgctgcttcacgagcat

SEQ ID NO: 238288 - DNA, 25 bp, Artificial
  probe
  misc_feature (1)..(25): SEQ ID NO: 5883; WAN024GB3_at; Start 203; Stop 227
actgcaagtgttcttcaggaactaa

SEQ ID NO: 238289 - DNA, 25 bp, Artificial
  probe
  misc_feature (1)..(25): SEQ ID NO: 5883; WAN024GB3_at; Start 227; Stop 251
agatagaaagaacggccgctagtcc

SEQ ID NO: 238290 - DNA, 25 bp, Artificial
  probe
  misc_feature (1)..(25): SEQ ID NO: 5883; WAN024GB3_at; Start 71; Stop 95
tagccttgcggatgaggttagaagc

SEQ ID NO: 238291 - DNA, 25 bp, Artificial
  probe
  misc_feature (1)..(25): SEQ ID NO: 5883; WAN024GB3_at; Start 83; Stop 107
tgaggttagaagctaattccccatt

SEQ ID NO: 238292 - DNA, 25 bp, Artificial
  probe
  misc_feature (1)..(25): SEQ ID NO: 5883; WAN024GB3_at; Start 25; Stop 49
tcatcacgcgccttacgtgctgctt

SEQ ID NO: 238293 - DNA, 25 bp, Artificial
  probe
  misc_feature (1)..(25): SEQ ID NO: 5883; WAN024GB3_at; Start 117; Stop 141
gaaaaaggtcaacttatcagccact

SEQ ID NO: 238294 - DNA, 25 bp, Artificial
  probe
  misc_feature (1)..(25): SEQ ID NO: 5883; WAN024GB3_at; Start 74; Stop 98
ccttgcggatgaggttagaagctaa

SEQ ID NO: 238295 - DNA, 25 bp, Artificial
  probe
  misc_feature (1)..(25): SEQ ID NO: 5027; WAN024GB4_at; Start 41; Stop 65
tatctcccatgagaacattgacgcg

SEQ ID NO: 238296 - DNA, 25 bp, Artificial
  probe
  misc_feature (1)..(25): SEQ ID NO: 5027; WAN024GB4_at; Start 204; Stop 228
ctgtttacggagttcttctagttct

SEQ ID NO: 238297 - DNA, 25 bp, Artificial
  probe
  misc_feature (1)..(25): SEQ ID NO: 5027; WAN024GB4_at; Start 213; Stop 237
gagttcttctagttctccgtccgtc

SEQ ID NO: 238298 - DNA, 25 bp, Artificial
  probe
  misc_feature (1)..(25): SEQ ID NO: 5027; WAN024GB4_at; Start 45; Stop 69
tcccatgagaacattgacgcggcgt

SEQ ID NO: 238299 - DNA, 25 bp, Artificial
  probe
  misc_feature (1)..(25): SEQ ID NO: 5027; WAN024GB4_at; Start 133; Stop 157
gtttcccagagctggtccgcattca

SEQ ID NO: 238300 - DNA, 25 bp, Artificial
  probe
  misc_feature (1)..(25): SEQ ID NO: 5027; WAN024GB4_at; Start 164; Stop 188
caagtcctttgtatcgttggagggt

SEQ ID NO: 238301 - DNA, 25 bp, Artificial
  probe
  misc_feature (1)..(25): SEQ ID NO: 5027; WAN024GB4_at; Start 95; Stop 119
tgacacggatgagggtacgtgtttc

SEQ ID NO: 238302 - DNA, 25 bp, Artificial
  probe
  misc_feature (1)..(25): SEQ ID NO: 5027; WAN024GB4_at; Start 8; Stop 32
tatcttcaatccatttacggcgtgg

SEQ ID NO: 238303 - DNA, 25 bp, Artificial
  probe
  misc_feature (1)..(25): SEQ ID NO: 5027; WAN024GB4_at; Start 175; Stop 199
tatcgttggagggtagcgcctttac

SEQ ID NO: 238304 - DNA, 25 bp, Artificial
  probe
  misc_feature (1)..(25): SEQ ID NO: 5027; WAN024GB4_at; Start 217; Stop 241
tcttctagttctccgtccgtccaag

SEQ ID NO: 238305 - DNA, 25 bp, Artificial
  probe
  misc_feature (1)..(25): SEQ ID NO: 5027; WAN024GB4_at; Start 104; Stop 128
tgagggtacgtgtttctgggttcat

SEQ ID NO: 238306 - DNA, 25 bp, Artificial
  probe
  misc_feature (1)..(25): SEQ ID NO: 5027; WAN024GB4_at; Start 136; Stop 160
tcccagagctggtccgcattcatct

SEQ ID NO: 238307 - DNA, 25 bp, Artificial
  probe
  misc_feature (1)..(25): SEQ ID NO: 5027; WAN024GB4_at; Start 48; Stop 72
catgagaacattgacgcggcgttcg

SEQ ID NO: 238308 - DNA, 25 bp, Artificial
  probe
  misc_feature (1)..(25): SEQ ID NO: 5027; WAN024GB4_at; Start 54; Stop 78
aacattgacgcggcgttcggcgcgc

SEQ ID NO: 238309 - DNA, 25 bp, Artificial
  probe
  misc_feature (1)..(25): SEQ ID NO: 5027; WAN024GB4_at; Start 151; Stop 175
gcattcatctcaccaagtcctttgt

SEQ ID NO: 238310 - DNA, 25 bp, Artificial
  probe
  misc_feature (1)..(25): SEQ ID NO: 5027; WAN024GB4_at; Start 70; Stop 94
tcggcgcgcgctaaatcttcaattg

SEQ ID NO: 238311 - DNA, 25 bp, Artificial
  probe
  misc_feature (1)..(25): SEQ ID NO: 5027; WAN024GB4_at; Start 114; Stop 138
tgtttctgggttcatggttgtttcc

SEQ ID NO: 238312 - DNA, 25 bp, Artificial
  probe
  misc_feature (1)..(25): SEQ ID NO: 5027; WAN024GB4_at; Start 170; Stop 194
ctttgtatcgttggagggtagcgcc

SEQ ID NO: 238313 - DNA, 25 bp, Artificial
  probe
  misc_feature (1)..(25): SEQ ID NO: 5027; WAN024GB4_at; Start 30; Stop 54
tggttctaccttatctcccatgaga

SEQ ID NO: 238314 - DNA, 25 bp, Artificial
  probe
  misc_feature (1)..(25): SEQ ID NO: 5027; WAN024GB4_at; Start 161; Stop 185
caccaagtcctttgtatcgttggag

SEQ ID NO: 238315 - DNA, 25 bp, Artificial
  probe
  misc_feature (1)..(25): SEQ ID NO: 5027; WAN024GB4_at; Start 129; Stop 153
ggttgtttcccagagctggtccgca

SEQ ID NO: 238316 - DNA, 25 bp, Artificial
  probe
  misc_feature (1)..(25): SEQ ID NO: 5027; WAN024GB4_at; Start 221; Stop 245
ctagttctccgtccgtccaagcgta

SEQ ID NO: 238317 - DNA, 25 bp, Artificial
  probe
  misc_feature (1)..(25): SEQ ID NO: 5027; WAN024GB4_at; Start 23; Stop 47
tacggcgtggttctaccttatctcc

SEQ ID NO: 238318 - DNA, 25 bp, Artificial
  probe
  misc_feature (1)..(25): SEQ ID NO: 5027; WAN024GB4_at; Start 85; Stop 109
tcttcaattgtgacacggatgaggg

SEQ ID NO: 238319 - DNA, 25 bp, Artificial
  probe
  misc_feature (1)..(25): SEQ ID NO: 5027; WAN024GB4_at; Start 72; Stop 96
ggcgcgcgctaaatcttcaattgtg

SEQ ID NO: 238320 - DNA, 25 bp, Artificial
  probe
  misc_feature (1)..(25): SEQ ID NO: 5027; WAN024GB4_at; Start 19; Stop 43
catttacggcgtggttctaccttat

SEQ ID NO: 238321 - DNA, 25 bp, Artificial
  probe
  misc_feature (1)..(25): SEQ ID NO: 5027; WAN024GB4_at; Start 3; Stop 27
gacattatcttcaatccatttacgg

SEQ ID NO: 238322 - DNA, 25 bp, Artificial
  probe
  misc_feature (1)..(25): SEQ ID NO: 5027; WAN024GB4_at; Start 79; Stop 103
gctaaatcttcaattgtgacacgga

SEQ ID NO: 238323 - DNA, 25 bp, Artificial
  probe
  misc_feature (1)..(25): SEQ ID NO: 5027; WAN024GB4_at; Start 88; Stop 112
tcaattgtgacacggatgagggtac

SEQ ID NO: 238324 - DNA, 25 bp, Artificial
  probe
  misc_feature (1)..(25): SEQ ID NO: 5027; WAN024GB4_at; Start 109; Stop 133
gtacgtgtttctgggttcatggttg

SEQ ID NO: 238325 - DNA, 25 bp, Artificial
  probe
  misc_feature (1)..(25): SEQ ID NO: 5027; WAN024GB4_at; Start 13; Stop 37
tcaatccatttacggcgtggttcta

SEQ ID NO: 238326 - DNA, 25 bp, Artificial
  probe
  misc_feature (1)..(25): SEQ ID NO: 5027; WAN024GB4_at; Start 143; Stop 167
gctggtccgcattcatctcaccaag

SEQ ID NO: 238327 - DNA, 25 bp, Artificial
  probe
  misc_feature (1)..(25): SEQ ID NO: 5027; WAN024GB4_at; Start 125; Stop 149
tcatggttgtttcccagagctggtc

SEQ ID NO: 238328 - DNA, 25 bp, Artificial
  probe
  misc_feature (1)..(25): SEQ ID NO: 5027; WAN024GB4_at; Start 75; Stop 99
gcgcgctaaatcttcaattgtgaca

SEQ ID NO: 238329 - DNA, 25 bp, Artificial
  probe
  misc_feature (1)..(25): SEQ ID NO: 2084; WAN024GB5_at; Start 402; Stop 426
tgtcgttggaaccttaagcgccagc

SEQ ID NO: 238330 - DNA, 25 bp, Artificial
  probe
  misc_feature (1)..(25): SEQ ID NO: 2084; WAN024GB5_at; Start 27; Stop 51
taaagggattgtaattgctcttgga

SEQ ID NO: 238331 - DNA, 25 bp, Artificial
  probe
  misc_feature (1)..(25): SEQ ID NO: 2084; WAN024GB5_at; Start 88; Stop 112
gcaatcttaggaatctatgaacgaa

SEQ ID NO: 238332 - DNA, 25 bp, Artificial
  probe
  misc_feature (1)..(25): SEQ ID NO: 2084; WAN024GB5_at; Start 253; Stop 277
gtattatggagctttgcgggagcta

SEQ ID NO: 238333 - DNA, 25 bp, Artificial
  probe
  misc_feature (1)..(25): SEQ ID NO: 2084; WAN024GB5_at; Start 105; Stop 129
tgaacgaatgattggctttctggcc

SEQ ID NO: 238334 - DNA, 25 bp, Artificial
  probe
  misc_feature (1)..(25): SEQ ID NO: 2084; WAN024GB5_at; Start 307; Stop 331
gaatcaactcgagaatctgaccgag

SEQ ID NO: 238335 - DNA, 25 bp, Artificial
  probe
  misc_feature (1)..(25): SEQ ID NO: 2084; WAN024GB5_at; Start 215; Stop 239
acccgattgaatacctgcttgaaaa

SEQ ID NO: 238336 - DNA, 25 bp, Artificial
  probe
  misc_feature (1)..(25): SEQ ID NO: 2084; WAN024GB5_at; Start 523; Stop 547
gctcctatgttgactggttttaaaa

SEQ ID NO: 238337 - DNA, 25 bp, Artificial
  probe
  misc_feature (1)..(25): SEQ ID NO: 2084; WAN024GB5_at; Start 586; Stop 610
ggtgcaggtgcaactctcatcgttt

SEQ ID NO: 238338 - DNA, 25 bp, Artificial
  probe
  misc_feature (1)..(25): SEQ ID NO: 2084; WAN024GB5_at; Start 200; Stop 224
tcggcttattttcctacccgattga

SEQ ID NO: 238339 - DNA, 25 bp, Artificial
  probe
  misc_feature (1)..(25): SEQ ID NO: 2084; WAN024GB5_at; Start 443; Stop 467
tagcaggcgcactattggcccttgg

SEQ ID NO: 238340 - DNA, 25 bp, Artificial
  probe
  misc_feature (1)..(25): SEQ ID NO: 2084; WAN024GB5_at; Start 387; Stop 411
ctatgccttaaattttgtcgttgga

SEQ ID NO: 238341 - DNA, 25 bp, Artificial
  probe
  misc_feature (1)..(25): SEQ ID NO: 2084; WAN024GB5_at; Start 183; Stop 207
cggtatgcttctgggaatcggctta

SEQ ID NO: 238342 - DNA, 25 bp, Artificial
  probe
  misc_feature (1)..(25): SEQ ID NO: 2084; WAN024GB5_at; Start 77; Stop 101
gggttctagcagcaatcttaggaat

SEQ ID NO: 238343 - DNA, 25 bp, Artificial
  probe
  misc_feature (1)..(25): SEQ ID NO: 2084; WAN024GB5_at; Start 429; Stop 453
tcttaacttcgtcctagcaggcgca

SEQ ID NO: 238344 - DNA, 25 bp, Artificial
  probe
  misc_feature (1)..(25): SEQ ID NO: 2084; WAN024GB5_at; Start 43; Stop 67
gctcttggatttatcctaccgggaa

SEQ ID NO: 238345 - DNA, 25 bp, Artificial
  probe
  misc_feature (1)..(25): SEQ ID NO: 2084; WAN024GB5_at; Start 283; Stop 307
ggtacagttcctagcctcctcaaag

SEQ ID NO: 238346 - DNA, 25 bp, Artificial
  probe
  misc_feature (1)..(25): SEQ ID NO: 2084; WAN024GB5_at; Start 451; Stop 475
gcactattggcccttggcgtcttgg

SEQ ID NO: 238347 - DNA, 25 bp, Artificial
  probe
  misc_feature (1)..(25): SEQ ID NO: 2084; WAN024GB5_at; Start 161; Stop 185
tgtactttattccagttgccatcgg

SEQ ID NO: 238348 - DNA, 25 bp, Artificial
  probe
  misc_feature (1)..(25): SEQ ID NO: 2084; WAN024GB5_at; Start 3; Stop 27
gctctcatggttagcacgcgttatt

SEQ ID NO: 238349 - DNA, 25 bp, Artificial
  probe
  misc_feature (1)..(25): SEQ ID NO: 2084; WAN024GB5_at; Start 324; Stop 348
tgaccgagacaagattgatttagct

SEQ ID NO: 238350 - DNA, 25 bp, Artificial
  probe
  misc_feature (1)..(25): SEQ ID NO: 2084; WAN024GB5_at; Start 339; Stop 363
tgatttagcttggttatggacaacc

SEQ ID NO: 238351 - DNA, 25 bp, Artificial
  probe
  misc_feature (1)..(25): SEQ ID NO: 2084; WAN024GB5_at; Start 353; Stop 377
tatggacaacctttatcatttctgg

SEQ ID NO: 238352 - DNA, 25 bp, Artificial
  probe
  misc_feature (1)..(25): SEQ ID NO: 2084; WAN024GB5_at; Start 294; Stop 318
tagcctcctcaaagaatcaactcga

SEQ ID NO: 238353 - DNA, 25 bp, Artificial
  probe
  misc_feature (1)..(25): SEQ ID NO: 2084; WAN024GB5_at; Start 223; Stop 247
gaatacctgcttgaaaattatcagg

SEQ ID NO: 238354 - DNA, 25 bp, Artificial
  probe
  misc_feature (1)..(25): SEQ ID NO: 2084; WAN024GB5_at; Start 625; Stop 649
gattatgccttaaacaactaccact

SEQ ID NO: 238355 - DNA, 25 bp, Artificial
  probe
  misc_feature (1)..(25): SEQ ID NO: 2084; WAN024GB5_at; Start 369; Stop 393
catttctggattaggactctatgcc

SEQ ID NO: 238356 - DNA, 25 bp, Artificial
  probe
  misc_feature (1)..(25): SEQ ID NO: 2084; WAN024GB5_at; Start 573; Stop 597
tccgattggaattggtgcaggtgca

SEQ ID NO: 238357 - DNA, 25 bp, Artificial
  probe
  misc_feature (1)..(25): SEQ ID NO: 2084; WAN024GB5_at; Start 173; Stop 197
cagttgccatcggtatgcttctggg

SEQ ID NO: 238358 - DNA, 25 bp, Artificial
  probe
  misc_feature (1)..(25): SEQ ID NO: 2084; WAN024GB5_at; Start 416; Stop 440
taagcgccagctttcttaacttcgt

SEQ ID NO: 238359 - DNA, 25 bp, Artificial
  probe
  misc_feature (1)..(25): SEQ ID NO: 2084; WAN024GB5_at; Start 119; Stop 143
gctttctggcccatccctttaaaga

SEQ ID NO: 238360 - DNA, 25 bp, Artificial
  probe
  misc_feature (1)..(25): SEQ ID NO: 2084; WAN024GB5_at; Start 13; Stop 37
ttagcacgcgttattaaagggattg

SEQ ID NO: 238361 - DNA, 25 bp, Artificial
  probe
  misc_feature (1)..(25): SEQ ID NO: 2084; WAN024GB5_at; Start 268; Stop 292
gcgggagctattatcggtacagttc

SEQ ID NO: 238362 - DNA, 25 bp, Artificial
  probe
  misc_feature (1)..(25): SEQ ID NO: 2084; WAN024GB5_at; Start 464; Stop 488
ttggcgtcttggttcctggcctcag

SEQ ID NO: 238363 - DNA, 25 bp, Artificial
  probe
  misc_feature (1)..(25): SEQ ID NO: 4253; WAN024GB6_at; Start 1669; Stop 1693
tacgcttggacggacggagaactag

SEQ ID NO: 238364 - DNA, 25 bp, Artificial
  probe
  misc_feature (1)..(25): SEQ ID NO: 4253; WAN024GB6_at; Start 1498; Stop 1522
aagatcattatcatgaccgatgcgg

SEQ ID NO: 238365 - DNA, 25 bp, Artificial
  probe
  misc_feature (1)..(25): SEQ ID NO: 4253; WAN024GB6_at; Start 1145; Stop 1169
ctatcaaggcccgtgatgctcgtga

SEQ ID NO: 238366 - DNA, 25 bp, Artificial
  probe
  misc_feature (1)..(25): SEQ ID NO: 4253; WAN024GB6_at; Start 1351; Stop 1375
gctattctacctcttcgtggtaagg

SEQ ID NO: 238367 - DNA, 25 bp, Artificial
  probe
  misc_feature (1)..(25): SEQ ID NO: 4253; WAN024GB6_at; Start 1136; Stop 1160
tccgcaaggctatcaaggcccgtga

SEQ ID NO: 238368 - DNA, 25 bp, Artificial
  probe
  misc_feature (1)..(25): SEQ ID NO: 4253; WAN024GB6_at; Start 1149; Stop 1173
caaggcccgtgatgctcgtgaagca

SEQ ID NO: 238369 - DNA, 25 bp, Artificial
  probe
  misc_feature (1)..(25): SEQ ID NO: 4253; WAN024GB6_at; Start 599; Stop 623
cagcctttctcttgaaaaatgtgac

SEQ ID NO: 238370 - DNA, 25 bp, Artificial
  probe
  misc_feature (1)..(25): SEQ ID NO: 4253; WAN024GB6_at; Start 1754; Stop 1778
agatgaatgcggaccagctctggga

SEQ ID NO: 238371 - DNA, 25 bp, Artificial
  probe
  misc_feature (1)..(25): SEQ ID NO: 4253; WAN024GB6_at; Start 1677; Stop 1701
gacggacggagaactagaagaactc

SEQ ID NO: 238372 - DNA, 25 bp, Artificial
  probe
  misc_feature (1)..(25): SEQ ID NO: 4253; WAN024GB6_at; Start 1277; Stop 1301
agaatgaactctatctagttgaggg

SEQ ID NO: 238373 - DNA, 25 bp, Artificial
  probe
  misc_feature (1)..(25): SEQ ID NO: 4253; WAN024GB6_at; Start 1666; Stop 1690
gcctacgcttggacggacggagaac

SEQ ID NO: 238374 - DNA, 25 bp, Artificial
  probe
  misc_feature (1)..(25): SEQ ID NO: 4253; WAN024GB6_at; Start 605; Stop 629
ttctcttgaaaaatgtgaccttgtc

SEQ ID NO: 238375 - DNA, 25 bp, Artificial
  probe
  misc_feature (1)..(25): SEQ ID NO: 4253; WAN024GB6_at; Start 1179; Stop 1203
taaggcgcgtgatgagagccgaaat

SEQ ID NO: 238376 - DNA, 25 bp, Artificial
  probe
  misc_feature (1)..(25): SEQ ID NO: 4253; WAN024GB6_at; Start 547; Stop 571
ttttctacgacagatttcaagtaca

SEQ ID NO: 238377 - DNA, 25 bp, Artificial
  probe
  misc_feature (1)..(25): SEQ ID NO: 4253; WAN024GB6_at; Start 1164; Stop 1188
tcgtgaagcagcacgtaaggcgcgt

SEQ ID NO: 238378 - DNA, 25 bp, Artificial
  probe
  misc_feature (1)..(25): SEQ ID NO: 4253; WAN024GB6_at; Start 1159; Stop 1183
gatgctcgtgaagcagcacgtaagg

SEQ ID NO: 238379 - DNA, 25 bp, Artificial
  probe
  misc_feature (1)..(25): SEQ ID NO: 4253; WAN024GB6_at; Start 552; Stop 576
tacgacagatttcaagtacaatacc

SEQ ID NO: 238380 - DNA, 25 bp, Artificial
  probe
  misc_feature (1)..(25): SEQ ID NO: 4253; WAN024GB6_at; Start 1152; Stop 1176
ggcccgtgatgctcgtgaagcagca

SEQ ID NO: 238381 - DNA, 25 bp, Artificial
  probe
  misc_feature (1)..(25): SEQ ID NO: 4253; WAN024GB6_at; Start 1747; Stop 1771
cttggtgagatgaatgcggaccagc

SEQ ID NO: 238382 - DNA, 25 bp, Artificial
  probe
  misc_feature (1)..(25): SEQ ID NO: 4253; WAN024GB6_at; Start 1189; Stop 1213
gatgagagccgaaatgggaagaaaa

SEQ ID NO: 238383 - DNA, 25 bp, Artificial
  probe
  misc_feature (1)..(25): SEQ ID NO: 4253; WAN024GB6_at; Start 1340; Stop 1364
gcaagttccaggctattctacctct

SEQ ID NO: 238384 - DNA, 25 bp, Artificial
  probe
  misc_feature (1)..(25): SEQ ID NO: 4253; WAN024GB6_at; Start 978; Stop 1002
cgttctttctatcttagttcctgaa

SEQ ID NO: 238385 - DNA, 25 bp, Artificial
  probe
  misc_feature (1)..(25): SEQ ID NO: 4253; WAN024GB6_at; Start 982; Stop 1006
ctttctatcttagttcctgaagaac

SEQ ID NO: 238386 - DNA, 25 bp, Artificial
  probe
  misc_feature (1)..(25): SEQ ID NO: 4253; WAN024GB6_at; Start 1502; Stop 1526
tcattatcatgaccgatgcggatac

SEQ ID NO: 238387 - DNA, 25 bp, Artificial
  probe
  misc_feature (1)..(25): SEQ ID NO: 4253; WAN024GB6_at; Start 914; Stop 938
caggtcttctcaaggaaaaagataa

SEQ ID NO: 238388 - DNA, 25 bp, Artificial
  probe
  misc_feature (1)..(25): SEQ ID NO: 4253; WAN024GB6_at; Start 1765; Stop 1789
gaccagctctgggaaacaaccatga

SEQ ID NO: 238389 - DNA, 25 bp, Artificial
  probe
  misc_feature (1)..(25): SEQ ID NO: 4253; WAN024GB6_at; Start 1; Stop 25
gtgtcaaaaaaggaaatcaatatta

SEQ ID NO: 238390 - DNA, 25 bp, Artificial
  probe
  misc_feature (1)..(25): SEQ ID NO: 4253; WAN024GB6_at; Start 48; Stop 72
tcaggtgctagaagggttggatgcg

SEQ ID NO: 238391 - DNA, 25 bp, Artificial
  probe
  misc_feature (1)..(25): SEQ ID NO: 4253; WAN024GB6_at; Start 1167; Stop 1191
tgaagcagcacgtaaggcgcgtgat

SEQ ID NO: 238392 - DNA, 25 bp, Artificial
  probe
  misc_feature (1)..(25): SEQ ID NO: 4253; WAN024GB6_at; Start 1774; Stop 1798
tgggaaacaaccatgaacccagaaa

SEQ ID NO: 238393 - DNA, 25 bp, Artificial
  probe
  misc_feature (1)..(25): SEQ ID NO: 4253; WAN024GB6_at; Start 1235; Stop 1259
tgtctgggaaattgaccccagccca

SEQ ID NO: 238394 - DNA, 25 bp, Artificial
  probe
  misc_feature (1)..(25): SEQ ID NO: 4253; WAN024GB6_at; Start 1346; Stop 1370
tccaggctattctacctcttcgtgg

SEQ ID NO: 238395 - DNA, 25 bp, Artificial
  probe
  misc_feature (1)..(25): SEQ ID NO: 4253; WAN024GB6_at; Start 559; Stop 583
gatttcaagtacaataccatttcag

SEQ ID NO: 238396 - DNA, 25 bp, Artificial
  probe
  misc_feature (1)..(25): SEQ ID NO: 4253; WAN024GB6_at; Start 1758; Stop 1782
gaatgcggaccagctctgggaaaca

SEQ ID NO: 238397 - DNA, 25 bp, Artificial
  probe
  misc_feature (1)..(25): SEQ ID NO: 1792; WAN024GB7_at; Start 146; Stop 170
gtaagaaagctggtatggcaacctt

SEQ ID NO: 238398 - DNA, 25 bp, Artificial
  probe
  misc_feature (1)..(25): SEQ ID NO: 1792; WAN024GB7_at; Start 296; Stop 320
gatttaaaggtggtaaggctgtcgc

SEQ ID NO: 238399 - DNA, 25 bp, Artificial
  probe
  misc_feature (1)..(25): SEQ ID NO: 1792; WAN024GB7_at; Start 36; Stop 60
gctgggttcgattccatctggtctc

SEQ ID NO: 238400 - DNA, 25 bp, Artificial
  probe
  misc_feature (1)..(25): SEQ ID NO: 1792; WAN024GB7_at; Start 26; Stop 50
tagcctatctgctgggttcgattcc

SEQ ID NO: 238401 - DNA, 25 bp, Artificial
  probe
  misc_feature (1)..(25): SEQ ID NO: 1792; WAN024GB7_at; Start 416; Stop 440
cactgtctagtgtcacagcatcgat

SEQ ID NO: 238402 - DNA, 25 bp, Artificial
  probe
  misc_feature (1)..(25): SEQ ID NO: 1792; WAN024GB7_at; Start 157; Stop 181
ggtatggcaacctttgtgattgact

SEQ ID NO: 238403 - DNA, 25 bp, Artificial
  probe
  misc_feature (1)..(25): SEQ ID NO: 1792; WAN024GB7_at; Start 104; Stop 128
gttctggtaacactggaacgaccaa

SEQ ID NO: 238404 - DNA, 25 bp, Artificial
  probe
  misc_feature (1)..(25): SEQ ID NO: 1792; WAN024GB7_at; Start 403; Stop 427
ggcagtatgatttcactgtctagtg

SEQ ID NO: 238405 - DNA, 25 bp, Artificial
  probe
  misc_feature (1)..(25): SEQ ID NO: 1792; WAN024GB7_at; Start 199; Stop 223
gcaacgctgcttccgattatttttc

SEQ ID NO: 238406 - DNA, 25 bp, Artificial
  probe
  misc_feature (1)..(25): SEQ ID NO: 1792; WAN024GB7_at; Start 185; Stop 209
tcaaaggaaccctagcaacgctgct

SEQ ID NO: 238407 - DNA, 25 bp, Artificial
  probe
  misc_feature (1)..(25): SEQ ID NO: 1792; WAN024GB7_at; Start 49; Stop 73
ccatctggtctctggattggacaag

SEQ ID NO: 238408 - DNA, 25 bp, Artificial
  probe
  misc_feature (1)..(25): SEQ ID NO: 1792; WAN024GB7_at; Start 620; Stop 644
cccatcaagatcctaaaaaataact

SEQ ID NO: 238409 - DNA, 25 bp, Artificial
  probe
  misc_feature (1)..(25): SEQ ID NO: 1792; WAN024GB7_at; Start 92; Stop 116
tacgcgagcatggttctggtaacac

SEQ ID NO: 238410 - DNA, 25 bp, Artificial
  probe
  misc_feature (1)..(25): SEQ ID NO: 1792; WAN024GB7_at; Start 527; Stop 551
cacttgctagtttgattatcattcg

SEQ ID NO: 238411 - DNA, 25 bp, Artificial
  probe
  misc_feature (1)..(25): SEQ ID NO: 1792; WAN024GB7_at; Start 262; Stop 286
gctgttatcggccataccttcccta

SEQ ID NO: 238412 - DNA, 25 bp, Artificial
  probe
  misc_feature (1)..(25): SEQ ID NO: 1792; WAN024GB7_at; Start 388; Stop 412
ggagctctctatcttggcagtatga

SEQ ID NO: 238413 - DNA, 25 bp, Artificial
  probe
  misc_feature (1)..(25): SEQ ID NO: 1792; WAN024GB7_at; Start 231; Stop 255
aggcgtttctcctctcatctttgga

SEQ ID NO: 238414 - DNA, 25 bp, Artificial
  probe
  misc_feature (1)..(25): SEQ ID NO: 1792; WAN024GB7_at; Start 549; Stop 573
tcgtcataaggacaatatagctcgt

SEQ ID NO: 238415 - DNA, 25 bp, Artificial
  probe
  misc_feature (1)..(25): SEQ ID NO: 1792; WAN024GB7_at; Start 321; Stop 345
aaccagtgctggagtgattttcgga

SEQ ID NO: 238416 - DNA, 25 bp, Artificial
  probe
  misc_feature (1)..(25): SEQ ID NO: 1792; WAN024GB7_at; Start 246; Stop 270
catctttggacttttggctgttatc

SEQ ID NO: 238417 - DNA, 25 bp, Artificial
  probe
  misc_feature (1)..(25): SEQ ID NO: 1792; WAN024GB7_at; Start 77; Stop 101
tctttcaaatcaatctacgcgagca

SEQ ID NO: 238418 - DNA, 25 bp, Artificial
  probe
  misc_feature (1)..(25): SEQ ID NO: 1792; WAN024GB7_at; Start 606; Stop 630
gggattgaacctaacccatcaagat

SEQ ID NO: 238419 - DNA, 25 bp, Artificial
  probe
  misc_feature (1)..(25): SEQ ID NO: 1792; WAN024GB7_at; Start 132; Stop 156
cttccgcattttaggtaagaaagct

SEQ ID NO: 238420 - DNA, 25 bp, Artificial
  probe
  misc_feature (1)..(25): SEQ ID NO: 1792; WAN024GB7_at; Start 216; Stop 240
tatttttcatctacaaggcgtttct

SEQ ID NO: 238421 - DNA, 25 bp, Artificial
  probe
  misc_feature (1)..(25): SEQ ID NO: 1792; WAN024GB7_at; Start 171; Stop 195
tgtgattgactttttcaaaggaacc

SEQ ID NO: 238422 - DNA, 25 bp, Artificial
  probe
  misc_feature (1)..(25): SEQ ID NO: 1792; WAN024GB7_at; Start 351; Stop 375
gcctatcttctgtctctaccttgcg

SEQ ID NO: 238423 - DNA, 25 bp, Artificial
  probe
  misc_feature (1)..(25): SEQ ID NO: 1792; WAN024GB7_at; Start 309; Stop 333
taaggctgtcgcaaccagtgctgga

SEQ ID NO: 238424 - DNA, 25 bp, Artificial
  probe
  misc_feature (1)..(25): SEQ ID NO: 1792; WAN024GB7_at; Start 13; Stop 37
gttttattaatcctagcctatctgc

SEQ ID NO: 238425 - DNA, 25 bp, Artificial
  probe
  misc_feature (1)..(25): SEQ ID NO: 1792; WAN024GB7_at; Start 336; Stop 360
gattttcggatttgcgcctatcttc

SEQ ID NO: 238426 - DNA, 25 bp, Artificial
  probe
  misc_feature (1)..(25): SEQ ID NO: 1792; WAN024GB7_at; Start 59; Stop 83
tctggattggacaagtattctttca

SEQ ID NO: 238427 - DNA, 25 bp, Artificial
  probe
  misc_feature (1)..(25): SEQ ID NO: 1792; WAN024GB7_at; Start 512; Stop 536
tcgctattatcttagcacttgctag

SEQ ID NO: 238428 - DNA, 25 bp, Artificial
  probe
  misc_feature (1)..(25): SEQ ID NO: 1792; WAN024GB7_at; Start 372; Stop 396
tgcgattatcttctttggagctctc

SEQ ID NO: 238429 - DNA, 25 bp, Artificial
  probe
  misc_feature (1)..(25): SEQ ID NO: 1792; WAN024GB7_at; Start 478; Stop 502
ggttttatcctgagtaactatgact

SEQ ID NO: 238430 - DNA, 25 bp, Artificial
  probe
  misc_feature (1)..(25): SEQ ID NO: 1792; WAN024GB7_at; Start 566; Stop 590
tagctcgtatcaaaaataaaactga

SEQ ID NO: 238431 - DNA, 25 bp, Artificial
  probe
  misc_feature (1)..(25): SEQ ID NO: 2030; WAN024GB8_at; Start 145; Stop 169
aatcccacgcagactgccaaaggct

SEQ ID NO: 238432 - DNA, 25 bp, Artificial
  probe
  misc_feature (1)..(25): SEQ ID NO: 2030; WAN024GB8_at; Start 136; Stop 160
gatttctccaatcccacgcagactg

SEQ ID NO: 238433 - DNA, 25 bp, Artificial
  probe
  misc_feature (1)..(25): SEQ ID NO: 2030; WAN024GB8_at; Start 66; Stop 90
taaagaaaccagctcgactggcaac

SEQ ID NO: 238434 - DNA, 25 bp, Artificial
  probe
  misc_feature (1)..(25): SEQ ID NO: 2030; WAN024GB8_at; Start 37; Stop 61
tgccaaagcctgaccaggaagtccg

SEQ ID NO: 238435 - DNA, 25 bp, Artificial
  probe
  misc_feature (1)..(25): SEQ ID NO: 2030; WAN024GB8_at; Start 194; Stop 218
caaatagcatcataaccgaagatcc

SEQ ID NO: 238436 - DNA, 25 bp, Artificial
  probe
  misc_feature (1)..(25): SEQ ID NO: 2030; WAN024GB8_at; Start 175; Stop 199
gaacaattcttcgtagccccaaata

SEQ ID NO: 238437 - DNA, 25 bp, Artificial
  probe
  misc_feature (1)..(25): SEQ ID NO: 2030; WAN024GB8_at; Start 25; Stop 49
gagaatccaacctgccaaagcctga

SEQ ID NO: 238438 - DNA, 25 bp, Artificial
  probe
  misc_feature (1)..(25): SEQ ID NO: 2030; WAN024GB8_at; Start 119; Stop 143
ggacccatagcacggaagatttctc

SEQ ID NO: 238439 - DNA, 25 bp, Artificial
  probe
  misc_feature (1)..(25): SEQ ID NO: 2030; WAN024GB8_at; Start 190; Stop 214
gccccaaatagcatcataaccgaag

SEQ ID NO: 238440 - DNA, 25 bp, Artificial
  probe
  misc_feature (1)..(25): SEQ ID NO: 2030; WAN024GB8_at; Start 40; Stop 64
caaagcctgaccaggaagtccgacg

SEQ ID NO: 238441 - DNA, 25 bp, Artificial
  probe
  misc_feature (1)..(25): SEQ ID NO: 2030; WAN024GB8_at; Start 162; Stop 186
caaaggctgtatagaacaattcttc

SEQ ID NO: 238442 - DNA, 25 bp, Artificial
  probe
  misc_feature (1)..(25): SEQ ID NO: 2030; WAN024GB8_at; Start 216; Stop 240
tccacatgacaatggctccgagtaa

SEQ ID NO: 238443 - DNA, 25 bp, Artificial
  probe
  misc_feature (1)..(25): SEQ ID NO: 2030; WAN024GB8_at; Start 92; Stop 116
gcaaaaccaagaccaatcaagacca

SEQ ID NO: 238444 - DNA, 25 bp, Artificial
  probe
  misc_feature (1)..(25): SEQ ID NO: 2030; WAN024GB8_at; Start 114; Stop 138
ccagaggacccatagcacggaagat

SEQ ID NO: 238445 - DNA, 25 bp, Artificial
  probe
  misc_feature (1)..(25): SEQ ID NO: 2030; WAN024GB8_at; Start 44; Stop 68
gcctgaccaggaagtccgacgttaa

SEQ ID NO: 238446 - DNA, 25 bp, Artificial
  probe
  misc_feature (1)..(25): SEQ ID NO: 2030; WAN024GB8_at; Start 206; Stop 230
taaccgaagatccacatgacaatgg

SEQ ID NO: 238447 - DNA, 25 bp, Artificial
  probe
  misc_feature (1)..(25): SEQ ID NO: 2030; WAN024GB8_at; Start 132; Stop 156
ggaagatttctccaatcccacgcag

SEQ ID NO: 238448 - DNA, 25 bp, Artificial
  probe
  misc_feature (1)..(25): SEQ ID NO: 2030; WAN024GB8_at; Start 47; Stop 71
tgaccaggaagtccgacgttaaaga

SEQ ID NO: 238449 - DNA, 25 bp, Artificial
  probe
  misc_feature (1)..(25): SEQ ID NO: 2030; WAN024GB8_at; Start 9; Stop 33
gggcaaaccaaccactgagaatcca

SEQ ID NO: 238450 - DNA, 25 bp, Artificial
  probe
  misc_feature (1)..(25): SEQ ID NO: 2030; WAN024GB8_at; Start 96; Stop 120
aaccaagaccaatcaagaccagagg

SEQ ID NO: 238451 - DNA, 25 bp, Artificial
  probe
  misc_feature (1)..(25): SEQ ID NO: 2030; WAN024GB8_at; Start 182; Stop 206
tcttcgtagccccaaatagcatcat

SEQ ID NO: 238452 - DNA, 25 bp, Artificial
  probe
  misc_feature (1)..(25): SEQ ID NO: 2030; WAN024GB8_at; Start 169; Stop 193
tgtatagaacaattcttcgtagccc

SEQ ID NO: 238453 - DNA, 25 bp, Artificial
  probe
  misc_feature (1)..(25): SEQ ID NO: 2030; WAN024GB8_at; Start 14; Stop 38
aaccaaccactgagaatccaacctg

SEQ ID NO: 238454 - DNA, 25 bp, Artificial
  probe
  misc_feature (1)..(25): SEQ ID NO: 2030; WAN024GB8_at; Start 154; Stop 178
cagactgccaaaggctgtatagaac

SEQ ID NO: 238455 - DNA, 25 bp, Artificial
  probe
  misc_feature (1)..(25): SEQ ID NO: 2030; WAN024GB8_at; Start 159; Stop 183
tgccaaaggctgtatagaacaattc

SEQ ID NO: 238456 - DNA, 25 bp, Artificial
  probe
  misc_feature (1)..(25): SEQ ID NO: 2030; WAN024GB8_at; Start 102; Stop 126
gaccaatcaagaccagaggacccat

SEQ ID NO: 238457 - DNA, 25 bp, Artificial
  probe
  misc_feature (1)..(25): SEQ ID NO: 2030; WAN024GB8_at; Start 1; Stop 25
atgcgacagggcaaaccaaccactg

SEQ ID NO: 238458 - DNA, 25 bp, Artificial
  probe
  misc_feature (1)..(25): SEQ ID NO: 2030; WAN024GB8_at; Start 211; Stop 235
gaagatccacatgacaatggctccg

SEQ ID NO: 238459 - DNA, 25 bp, Artificial
  probe
  misc_feature (1)..(25): SEQ ID NO: 2030; WAN024GB8_at; Start 105; Stop 129
caatcaagaccagaggacccatagc

SEQ ID NO: 238460 - DNA, 25 bp, Artificial
  probe
  misc_feature (1)..(25): SEQ ID NO: 2030; WAN024GB8_at; Start 5; Stop 29
gacagggcaaaccaaccactgagaa

SEQ ID NO: 238461 - DNA, 25 bp, Artificial
  probe
  misc_feature (1)..(25): SEQ ID NO: 2030; WAN024GB8_at; Start 124; Stop 148
catagcacggaagatttctccaatc

SEQ ID NO: 238462 - DNA, 25 bp, Artificial
  probe
  misc_feature (1)..(25): SEQ ID NO: 2030; WAN024GB8_at; Start 61; Stop 85
gacgttaaagaaaccagctcgactg

SEQ ID NO: 238463 - DNA, 25 bp, Artificial
  probe
  misc_feature (1)..(25): SEQ ID NO: 2030; WAN024GB8_at; Start 150; Stop 174
cacgcagactgccaaaggctgtata

SEQ ID NO: 238464 - DNA, 25 bp, Artificial
  probe
  misc_feature (1)..(25): SEQ ID NO: 2030; WAN024GB8_at; Start 200; Stop 224
gcatcataaccgaagatccacatga

SEQ ID NO: 238465 - DNA, 25 bp, Artificial
  probe
  misc_feature (1)..(25): SEQ ID NO: 4992; WAN024GB9_at; Start 126; Stop 150
tgatagacaaaaccacttcttttgg

SEQ ID NO: 238466 - DNA, 25 bp, Artificial
  probe
  misc_feature (1)..(25): SEQ ID NO: 4992; WAN024GB9_at; Start 382; Stop 406
tgatggagtcaaaacagccgttggt

SEQ ID NO: 238467 - DNA, 25 bp, Artificial
  probe
  misc_feature (1)..(25): SEQ ID NO: 4992; WAN024GB9_at; Start 218; Stop 242
ttggtagcccctgcaatttcaacgg

SEQ ID NO: 238468 - DNA, 25 bp, Artificial
  probe
  misc_feature (1)..(25): SEQ ID NO: 4992; WAN024GB9_at; Start 375; Stop 399
caatttctgatggagtcaaaacagc

SEQ ID NO: 238469 - DNA, 25 bp, Artificial
  probe
  misc_feature (1)..(25): SEQ ID NO: 4992; WAN024GB9_at; Start 78; Stop 102
gatttttaacagctggaacaccacg

SEQ ID NO: 238470 - DNA, 25 bp, Artificial
  probe
  misc_feature (1)..(25): SEQ ID NO: 4992; WAN024GB9_at; Start 155; Stop 179
gaggcttgcttctctgttttaaagg

SEQ ID NO: 238471 - DNA, 25 bp, Artificial
  probe
  misc_feature (1)..(25): SEQ ID NO: 4992; WAN024GB9_at; Start 359; Stop 383
atagccatcaactcatcaatttctg

SEQ ID NO: 238472 - DNA, 25 bp, Artificial
  probe
  misc_feature (1)..(25): SEQ ID NO: 4992; WAN024GB9_at; Start 40; Stop 64
aataccaacaatctctccagcacga

SEQ ID NO: 238473 - DNA, 25 bp, Artificial
  probe
  misc_feature (1)..(25): SEQ ID NO: 4992; WAN024GB9_at; Start 92; Stop 116
ggaacaccacggttttcattgacca

SEQ ID NO: 238474 - DNA, 25 bp, Artificial
  probe
  misc_feature (1)..(25): SEQ ID NO: 4992; WAN024GB9_at; Start 396; Stop 420
cagccgttggttcgtcaaagataag

SEQ ID NO: 238475 - DNA, 25 bp, Artificial
  probe
  misc_feature (1)..(25): SEQ ID NO: 4992; WAN024GB9_at; Start 49; Stop 73
aatctctccagcacgaacatccaag

SEQ ID NO: 238476 - DNA, 25 bp, Artificial
  probe
  misc_feature (1)..(25): SEQ ID NO: 4992; WAN024GB9_at; Start 139; Stop 163
cacttcttttggtttagaggcttgc

SEQ ID NO: 238477 - DNA, 25 bp, Artificial
  probe
  misc_feature (1)..(25): SEQ ID NO: 4992; WAN024GB9_at; Start 7; Stop 31
cagttcagactgaccatttccatca

SEQ ID NO: 238478 - DNA, 25 bp, Artificial
  probe
  misc_feature (1)..(25): SEQ ID NO: 4992; WAN024GB9_at; Start 162; Stop 186
gcttctctgttttaaaggaaacaga

SEQ ID NO: 238479 - DNA, 25 bp, Artificial
  probe
  misc_feature (1)..(25): SEQ ID NO: 4992; WAN024GB9_at; Start 265; Stop 289
gataactgtaacacggtcagaaact

SEQ ID NO: 238480 - DNA, 25 bp, Artificial
  probe
  misc_feature (1)..(25): SEQ ID NO: 4992; WAN024GB9_at; Start 182; Stop 206
acagaacgtcctaccatcatttccg

SEQ ID NO: 238481 - DNA, 25 bp, Artificial
  probe
  misc_feature (1)..(25): SEQ ID NO: 4992; WAN024GB9_at; Start 391; Stop 415
caaaacagccgttggttcgtcaaag

SEQ ID NO: 238482 - DNA, 25 bp, Artificial
  probe
  misc_feature (1)..(25): SEQ ID NO: 4992; WAN024GB9_at; Start 178; Stop 202
ggaaacagaacgtcctaccatcatt

SEQ ID NO: 238483 - DNA, 25 bp, Artificial
  probe
  misc_feature (1)..(25): SEQ ID NO: 4992; WAN024GB9_at; Start 112; Stop 136
gaccaccaaatctttgatagacaaa

SEQ ID NO: 238484 - DNA, 25 bp, Artificial
  probe
  misc_feature (1)..(25): SEQ ID NO: 4992; WAN024GB9_at; Start 198; Stop 222
tcatttccgccaaatcagcattggt

SEQ ID NO: 238485 - DNA, 25 bp, Artificial
  probe
  misc_feature (1)..(25): SEQ ID NO: 4992; WAN024GB9_at; Start 325; Stop 349
aattgattttccttctttgacaaga

SEQ ID NO: 238486 - DNA, 25 bp, Artificial
  probe
  misc_feature (1)..(25): SEQ ID NO: 4992; WAN024GB9_at; Start 255; Stop 279
tcccacgacggataactgtaacacg

SEQ ID NO: 238487 - DNA, 25 bp, Artificial
  probe
  misc_feature (1)..(25): SEQ ID NO: 4992; WAN024GB9_at; Start 84; Stop 108
taacagctggaacaccacggttttc

SEQ ID NO: 238488 - DNA, 25 bp, Artificial
  probe
  misc_feature (1)..(25): SEQ ID NO: 4992; WAN024GB9_at; Start 343; Stop 367
gacaagatttttcataatagccatc

SEQ ID NO: 238489 - DNA, 25 bp, Artificial
  probe
  misc_feature (1)..(25): SEQ ID NO: 4992; WAN024GB9_at; Start 408; Stop 432
cgtcaaagataaggatatcagcccc

SEQ ID NO: 238490 - DNA, 25 bp, Artificial
  probe
  misc_feature (1)..(25): SEQ ID NO: 4992; WAN024GB9_at; Start 66; Stop 90
catccaaggacagatttttaacagc

SEQ ID NO: 238491 - DNA, 25 bp, Artificial
  probe
  misc_feature (1)..(25): SEQ ID NO: 4992; WAN024GB9_at; Start 56; Stop 80
ccagcacgaacatccaaggacagat

SEQ ID NO: 238492 - DNA, 25 bp, Artificial
  probe
  misc_feature (1)..(25): SEQ ID NO: 4992; WAN024GB9_at; Start 302; Stop 326
tccaatttgtgggtaatcaagataa

SEQ ID NO: 238493 - DNA, 25 bp, Artificial
  probe
  misc_feature (1)..(25): SEQ ID NO: 4992; WAN024GB9_at; Start 208; Stop 232
caaatcagcattggtagcccctgca

SEQ ID NO: 238494 - DNA, 25 bp, Artificial
  probe
  misc_feature (1)..(25): SEQ ID NO: 4992; WAN024GB9_at; Start 242; Stop 266
gtttcaattgatttcccacgacgga

SEQ ID NO: 238495 - DNA, 25 bp, Artificial
  probe
  misc_feature (1)..(25): SEQ ID NO: 4992; WAN024GB9_at; Start 293; Stop 317
cgaatttcatccaatttgtgggtaa

SEQ ID NO: 238496 - DNA, 25 bp, Artificial
  probe
  misc_feature (1)..(25): SEQ ID NO: 4992; WAN024GB9_at; Start 237; Stop 261
caacggtttcaattgatttcccacg

SEQ ID NO: 238497 - DNA, 25 bp, Artificial
  probe
  misc_feature (1)..(25): SEQ ID NO: 4992; WAN024GB9_at; Start 99; Stop 123
cacggttttcattgaccaccaaatc

SEQ ID NO: 238498 - DNA, 25 bp, Artificial
  probe
  misc_feature (1)..(25): SEQ ID NO: 4992; WAN024GB9_at; Start 224; Stop 248
gcccctgcaatttcaacggtttcaa

SEQ ID NO: 238499 - DNA, 25 bp, Artificial
  probe
  misc_feature (1)..(25): SEQ ID NO: 2415; WAN024GBA_at; Start 1185; Stop 1209
cagtgaattagttcctgcagctgca

SEQ ID NO: 238500 - DNA, 25 bp, Artificial
  probe
  misc_feature (1)..(25): SEQ ID NO: 2415; WAN024GBA_at; Start 491; Stop 515
ttatctttgacgaaccaacggctgt

SEQ ID NO: 238501 - DNA, 25 bp, Artificial
  probe
  misc_feature (1)..(25): SEQ ID NO: 2415; WAN024GBA_at; Start 1030; Stop 1054
caccgtgatggcttgattttggaaa

SEQ ID NO: 238502 - DNA, 25 bp, Artificial
  probe
  misc_feature (1)..(25): SEQ ID NO: 2415; WAN024GBA_at; Start 1318; Stop 1342
gagtatatccacaaacgcttgattg

SEQ ID NO: 238503 - DNA, 25 bp, Artificial
  probe
  misc_feature (1)..(25): SEQ ID NO: 2415; WAN024GBA_at; Start 1408; Stop 1432
tcagaccgtattgccgttatccacg

SEQ ID NO: 238504 - DNA, 25 bp, Artificial
  probe
  misc_feature (1)..(25): SEQ ID NO: 2415; WAN024GBA_at; Start 1393; Stop 1417
gagattttaaacgtctcagaccgta

SEQ ID NO: 238505 - DNA, 25 bp, Artificial
  probe
  misc_feature (1)..(25): SEQ ID NO: 2415; WAN024GBA_at; Start 130; Stop 154
ggtaagtccacgctaatgaacatgt

SEQ ID NO: 238506 - DNA, 25 bp, Artificial
  probe
  misc_feature (1)..(25): SEQ ID NO: 2415; WAN024GBA_at; Start 183; Stop 207
tgaaatcgcggtcaacggtcaagtt

SEQ ID NO: 238507 - DNA, 25 bp, Artificial
  probe
  misc_feature (1)..(25): SEQ ID NO: 2415; WAN024GBA_at; Start 836; Stop 860
ccttggatgttcgtgctggagagat

SEQ ID NO: 238508 - DNA, 25 bp, Artificial
  probe
  misc_feature (1)..(25): SEQ ID NO: 2415; WAN024GBA_at; Start 748; Stop 772
caagcctctaaaccaaaagaagtgg

SEQ ID NO: 238509 - DNA, 25 bp, Artificial
  probe
  misc_feature (1)..(25): SEQ ID NO: 2415; WAN024GBA_at; Start 730; Stop 754
tcctttaaaacagagaagcaagcct

SEQ ID NO: 238510 - DNA, 25 bp, Artificial
  probe
  misc_feature (1)..(25): SEQ ID NO: 2415; WAN024GBA_at; Start 1005; Stop 1029
tgttgggcacgttccagaagaccgt

SEQ ID NO: 238511 - DNA, 25 bp, Artificial
  probe
  misc_feature (1)..(25): SEQ ID NO: 2415; WAN024GBA_at; Start 959; Stop 983
gagattcaattgtaggcttgcaccc

SEQ ID NO: 238512 - DNA, 25 bp, Artificial
  probe
  misc_feature (1)..(25): SEQ ID NO: 2415; WAN024GBA_at; Start 21; Stop 45
tgagatgcgtgatattaccaaggtg

SEQ ID NO: 238513 - DNA, 25 bp, Artificial
  probe
  misc_feature (1)..(25): SEQ ID NO: 2415; WAN024GBA_at; Start 230; Stop 254
aagcagctagcttgggaatcgggat

SEQ ID NO: 238514 - DNA, 25 bp, Artificial
  probe
  misc_feature (1)..(25): SEQ ID NO: 2415; WAN024GBA_at; Start 252; Stop 276
gatggttcaccagcactttatgttg

SEQ ID NO: 238515 - DNA, 25 bp, Artificial
  probe
  misc_feature (1)..(25): SEQ ID NO: 2415; WAN024GBA_at; Start 435; Stop 459
tggagcccaacaacgtgtagaaatt

SEQ ID NO: 238516 - DNA, 25 bp, Artificial
  probe
  misc_feature (1)..(25): SEQ ID NO: 2415; WAN024GBA_at; Start 1200; Stop 1224
tgcagctgcactctcaggaggaaat

SEQ ID NO: 238517 - DNA, 25 bp, Artificial
  probe
  misc_feature (1)..(25): SEQ ID NO: 2415; WAN024GBA_at; Start 419; Stop 443
tagcagatatctcagttggagccca

SEQ ID NO: 238518 - DNA, 25 bp, Artificial
  probe
  misc_feature (1)..(25): SEQ ID NO: 2415; WAN024GBA_at; Start 284; Stop 308
ccttcacagtggctgaaaacatcat

SEQ ID NO: 238519 - DNA, 25 bp, Artificial
  probe
  misc_feature (1)..(25): SEQ ID NO: 2415; WAN024GBA_at; Start 506; Stop 530
caacggctgttttgactccatcaga

SEQ ID NO: 238520 - DNA, 25 bp, Artificial
  probe
  misc_feature (1)..(25): SEQ ID NO: 2415; WAN024GBA_at; Start 1425; Stop 1449
tatccacgatggtaagattcaaggt

SEQ ID NO: 238521 - DNA, 25 bp, Artificial
  probe
  misc_feature (1)..(25): SEQ ID NO: 2415; WAN024GBA_at; Start 345; Stop 369
tatcgctggagctagcaaagaaatc

SEQ ID NO: 238522 - DNA, 25 bp, Artificial
  probe
  misc_feature (1)..(25): SEQ ID NO: 2415; WAN024GBA_at; Start 330; Stop 354
aaatggtgtgctagatatcgctgga

SEQ ID NO: 238523 - DNA, 25 bp, Artificial
  probe
  misc_feature (1)..(25): SEQ ID NO: 2415; WAN024GBA_at; Start 1347; Stop 1371
gcgtgataatggcaaggctgtcctt

SEQ ID NO: 238524 - DNA, 25 bp, Artificial
  probe
  misc_feature (1)..(25): SEQ ID NO: 2415; WAN024GBA_at; Start 369; Stop 393
caaggctctttctgaacgttatggc

SEQ ID NO: 238525 - DNA, 25 bp, Artificial
  probe
  misc_feature (1)..(25): SEQ ID NO: 2415; WAN024GBA_at; Start 392; Stop 416
gcttagctgttgacccttctgccaa

SEQ ID NO: 238526 - DNA, 25 bp, Artificial
  probe
  misc_feature (1)..(25): SEQ ID NO: 2415; WAN024GBA_at; Start 988; Stop 1012
cagattacagaactaagtgttgggc

SEQ ID NO: 238527 - DNA, 25 bp, Artificial
  probe
  misc_feature (1)..(25): SEQ ID NO: 2415; WAN024GBA_at; Start 147; Stop 171
gaacatgttagcaggccttcttgaa

SEQ ID NO: 238528 - DNA, 25 bp, Artificial
  probe
  misc_feature (1)..(25): SEQ ID NO: 2415; WAN024GBA_at; Start 973; Stop 997
ggcttgcacccacgtcagattacag

SEQ ID NO: 238529 - DNA, 25 bp, Artificial
  probe
  misc_feature (1)..(25): SEQ ID NO: 2415; WAN024GBA_at; Start 215; Stop 239
tcgactccccatctaaagcagctag

SEQ ID NO: 238530 - DNA, 25 bp, Artificial
  probe
  misc_feature (1)..(25): SEQ ID NO: 2415; WAN024GBA_at; Start 684; Stop 708
ggctaccaatgctgatttggcggaa

SEQ ID NO: 238531 - DNA, 25 bp, Artificial
  probe
  misc_feature (1)..(25): SEQ ID NO: 2415; WAN024GBA_at; Start 802; Stop 826
gaaaaccgtggtgttccagctgtta

SEQ ID NO: 238532 - DNA, 25 bp, Artificial
  probe
  misc_feature (1)..(25): SEQ ID NO: 2415; WAN024GBA_at; Start 1163; Stop 1187
aagagtttgatgttcgcgctgccag

SEQ ID NO: 238533 - DNA, 25 bp, Artificial
  probe
  misc_feature (1)..(25): SEQ ID NO: 3434; WAN024GBB_at; Start 838; Stop 862
caaggttcgtcattagctatcggat

SEQ ID NO: 238534 - DNA, 25 bp, Artificial
  probe
  misc_feature (1)..(25): SEQ ID NO: 3434; WAN024GBB_at; Start 586; Stop 610
gagttgactggtaactcacggatga

SEQ ID NO: 238535 - DNA, 25 bp, Artificial
  probe
  misc_feature (1)..(25): SEQ ID NO: 3434; WAN024GBB_at; Start 78; Stop 102
cctaggaattttactcggagccatt

SEQ ID NO: 238536 - DNA, 25 bp, Artificial
  probe
  misc_feature (1)..(25): SEQ ID NO: 3434; WAN024GBB_at; Start 616; Stop 640
ggtattttctttgccatcattgccg

SEQ ID NO: 238537 - DNA, 25 bp, Artificial
  probe
  misc_feature (1)..(25): SEQ ID NO: 3434; WAN024GBB_at; Start 351; Stop 375
gattctagcaaccatcgtgattgcc

SEQ ID NO: 238538 - DNA, 25 bp, Artificial
  probe
  misc_feature (1)..(25): SEQ ID NO: 3434; WAN024GBB_at; Start 372; Stop 396
tgccttgattgctggtgggattgtc

SEQ ID NO: 238539 - DNA, 25 bp, Artificial
  probe
  misc_feature (1)..(25): SEQ ID NO: 3434; WAN024GBB_at; Start 984; Stop 1008
tgagcttgtcagcattgtaacagcg

SEQ ID NO: 238540 - DNA, 25 bp, Artificial
  probe
  misc_feature (1)..(25): SEQ ID NO: 3434; WAN024GBB_at; Start 888; Stop 912
tgcggccaactcaccaattggtata

SEQ ID NO: 238541 - DNA, 25 bp, Artificial
  probe
  misc_feature (1)..(25): SEQ ID NO: 3434; WAN024GBB_at; Start 154; Stop 178
tatacagcctttggcagtctgcgtg

SEQ ID NO: 238542 - DNA, 25 bp, Artificial
  probe
  misc_feature (1)..(25): SEQ ID NO: 3434; WAN024GBB_at; Start 514; Stop 538
gacttcatgcaaagtacagattcga

SEQ ID NO: 238543 - DNA, 25 bp, Artificial
  probe
  misc_feature (1)..(25): SEQ ID NO: 3434; WAN024GBB_at; Start 187; Stop 211
gaaatcttccgtgctatgggtcctc

SEQ ID NO: 238544 - DNA, 25 bp, Artificial
  probe
  misc_feature (1)..(25): SEQ ID NO: 3434; WAN024GBB_at; Start 414; Stop 438
tcttagggcctatctagggacgtca

SEQ ID NO: 238545 - DNA, 25 bp, Artificial
  probe
  misc_feature (1)..(25): SEQ ID NO: 3434; WAN024GBB_at; Start 1033; Stop 1057
cattaccttatcgaacgctttgtca

SEQ ID NO: 238546 - DNA, 25 bp, Artificial
  probe
  misc_feature (1)..(25): SEQ ID NO: 3434; WAN024GBB_at; Start 331; Stop 355
gatatgccccgtcccttgatgattc

SEQ ID NO: 238547 - DNA, 25 bp, Artificial
  probe
  misc_feature (1)..(25): SEQ ID NO: 3434; WAN024GBB_at; Start 171; Stop 195
tctgcgtgggattggagaaatcttc

SEQ ID NO: 238548 - DNA, 25 bp, Artificial
  probe
  misc_feature (1)..(25): SEQ ID NO: 3434; WAN024GBB_at; Start 297; Stop 321
gattctcagtggttggtttgccctg

SEQ ID NO: 238549 - DNA, 25 bp, Artificial
  probe
  misc_feature (1)..(25): SEQ ID NO: 3434; WAN024GBB_at; Start 555; Stop 579
taatgcaacctatcagacaccttgg

SEQ ID NO: 238550 - DNA, 25 bp, Artificial
  probe
  misc_feature (1)..(25): SEQ ID NO: 3434; WAN024GBB_at; Start 398; Stop 422
gagcgattccaggtattcttagggc

SEQ ID NO: 238551 - DNA, 25 bp, Artificial
  probe
  misc_feature (1)..(25): SEQ ID NO: 3434; WAN024GBB_at; Start 672; Stop 696
aactcttggttttgaaatccgtgca

SEQ ID NO: 238552 - DNA, 25 bp, Artificial
  probe
  misc_feature (1)..(25): SEQ ID NO: 3434; WAN024GBB_at; Start 811; Stop 835
ttgggaaccttccagaacgtctatg

SEQ ID NO: 238553 - DNA, 25 bp, Artificial
  probe
  misc_feature (1)..(25): SEQ ID NO: 3434; WAN024GBB_at; Start 261; Stop 285
taacgtcggacttcctggtcaggct

SEQ ID NO: 238554 - DNA, 25 bp, Artificial
  probe
  misc_feature (1)..(25): SEQ ID NO: 3434; WAN024GBB_at; Start 873; Stop 897
ggcggttagtttgcttgcggccaac

SEQ ID NO: 238555 - DNA, 25 bp, Artificial
  probe
  misc_feature (1)..(25): SEQ ID NO: 3434; WAN024GBB_at; Start 727; Stop 751
gctggtatttctgccaagcggacta

SEQ ID NO: 238556 - DNA, 25 bp, Artificial
  probe
  misc_feature (1)..(25): SEQ ID NO: 3434; WAN024GBB_at; Start 480; Stop 504
tgtagggaatgcctttatccatgct

SEQ ID NO: 238557 - DNA, 25 bp, Artificial
  probe
  misc_feature (1)..(25): SEQ ID NO: 3434; WAN024GBB_at; Start 280; Stop 304
caggctttggcaggttggattctca

SEQ ID NO: 238558 - DNA, 25 bp, Artificial
  probe
  misc_feature (1)..(25): SEQ ID NO: 3434; WAN024GBB_at; Start 243; Stop 267
cagtcgagctggtttctttaacgtc

SEQ ID NO: 238559 - DNA, 25 bp, Artificial
  probe
  misc_feature (1)..(25): SEQ ID NO: 3434; WAN024GBB_at; Start 528; Stop 552
tacagattcgaccattcgtgttggg

SEQ ID NO: 238560 - DNA, 25 bp, Artificial
  probe
  misc_feature (1)..(25): SEQ ID NO: 3434; WAN024GBB_at; Start 311; Stop 335
ggtttgccctgtcgcatccagatat

SEQ ID NO: 238561 - DNA, 25 bp, Artificial
  probe
  misc_feature (1)..(25): SEQ ID NO: 3434; WAN024GBB_at; Start 428; Stop 452
tagggacgtcagaggttattgtaac

SEQ ID NO: 238562 - DNA, 25 bp, Artificial
  probe
  misc_feature (1)..(25): SEQ ID NO: 3434; WAN024GBB_at; Start 95; Stop 119
gagccattgtcatgtggatcttcgg

SEQ ID NO: 238563 - DNA, 25 bp, Artificial
  probe
  misc_feature (1)..(25): SEQ ID NO: 3434; WAN024GBB_at; Start 686; Stop 710
aaatccgtgcagttggtcttaatcc

SEQ ID NO: 238564 - DNA, 25 bp, Artificial
  probe
  misc_feature (1)..(25): SEQ ID NO: 3434; WAN024GBB_at; Start 854; Stop 878
ctatcggatttaacggaatggcggt

SEQ ID NO: 238565 - DNA, 25 bp, Artificial
  probe
  misc_feature (1)..(25): SEQ ID NO: 3434; WAN024GBB_at; Start 962; Stop 986
tgaatgcggcgcaggtaccatctga

SEQ ID NO: 238566 - DNA, 25 bp, Artificial
  probe
  misc_feature (1)..(25): SEQ ID NO: 3434; WAN024GBB_at; Start 653; Stop 677
ggttcatgctcaagaaaacaactct

SEQ ID NO: 238567 - DNA, 25 bp, Artificial
  probe
  misc_feature (1)..(25): SEQ ID NO: 5776; WAN024GBC_at; Start 122; Stop 146
cgttacgagaagagcggttaccaca

SEQ ID NO: 238568 - DNA, 25 bp, Artificial
  probe
  misc_feature (1)..(25): SEQ ID NO: 5776; WAN024GBC_at; Start 56; Stop 80
tgtcatcaacaccaccagtatcagt

SEQ ID NO: 238569 - DNA, 25 bp, Artificial
  probe
  misc_feature (1)..(25): SEQ ID NO: 5776; WAN024GBC_at; Start 162; Stop 186
tgctgccactgcaactaggccaaga

SEQ ID NO: 238570 - DNA, 25 bp, Artificial
  probe
  misc_feature (1)..(25): SEQ ID NO: 5776; WAN024GBC_at; Start 159; Stop 183
aactgctgccactgcaactaggcca

SEQ ID NO: 238571 - DNA, 25 bp, Artificial
  probe
  misc_feature (1)..(25): SEQ ID NO: 5776; WAN024GBC_at; Start 133; Stop 157
gagcggttaccacatgcagcaagtc

SEQ ID NO: 238572 - DNA, 25 bp, Artificial
  probe
  misc_feature (1)..(25): SEQ ID NO: 5776; WAN024GBC_at; Start 48; Stop 72
gaatgatttgtcatcaacaccacca

SEQ ID NO: 238573 - DNA, 25 bp, Artificial
  probe
  misc_feature (1)..(25): SEQ ID NO: 5776; WAN024GBC_at; Start 70; Stop 94
ccagtatcagtgacgattgctgctt

SEQ ID NO: 238574 - DNA, 25 bp, Artificial
  probe
  misc_feature (1)..(25): SEQ ID NO: 5776; WAN024GBC_at; Start 150; Stop 174
agcaagtccaactgctgccactgca

SEQ ID NO: 238575 - DNA, 25 bp, Artificial
  probe
  misc_feature (1)..(25): SEQ ID NO: 5776; WAN024GBC_at; Start 73; Stop 97
gtatcagtgacgattgctgcttttg

SEQ ID NO: 238576 - DNA, 25 bp, Artificial
  probe
  misc_feature (1)..(25): SEQ ID NO: 5776; WAN024GBC_at; Start 171; Stop 195
tgcaactaggccaagacctagccat

SEQ ID NO: 238577 - DNA, 25 bp, Artificial
  probe
  misc_feature (1)..(25): SEQ ID NO: 5776; WAN024GBC_at; Start 165; Stop 189
tgccactgcaactaggccaagacct

SEQ ID NO: 238578 - DNA, 25 bp, Artificial
  probe
  misc_feature (1)..(25): SEQ ID NO: 5776; WAN024GBC_at; Start 185; Stop 209
gacctagccattgtttcttgttcat

SEQ ID NO: 238579 - DNA, 25 bp, Artificial
  probe
  misc_feature (1)..(25): SEQ ID NO: 5776; WAN024GBC_at; Start 17; Stop 41
aagcctgcaaaccttcccaagctga

SEQ ID NO: 238580 - DNA, 25 bp, Artificial
  probe
  misc_feature (1)..(25): SEQ ID NO: 5776; WAN024GBC_at; Start 140; Stop 164
taccacatgcagcaagtccaactgc

SEQ ID NO: 238581 - DNA, 25 bp, Artificial
  probe
  misc_feature (1)..(25): SEQ ID NO: 5776; WAN024GBC_at; Start 130; Stop 154
gaagagcggttaccacatgcagcaa

SEQ ID NO: 238582 - DNA, 25 bp, Artificial
  probe
  misc_feature (1)..(25): SEQ ID NO: 5776; WAN024GBC_at; Start 109; Stop 133
gaagatgaagctgcgttacgagaag

SEQ ID NO: 238583 - DNA, 25 bp, Artificial
  probe
  misc_feature (1)..(25): SEQ ID NO: 5776; WAN024GBC_at; Start 65; Stop 89
caccaccagtatcagtgacgattgc

SEQ ID NO: 238584 - DNA, 25 bp, Artificial
  probe
  misc_feature (1)..(25): SEQ ID NO: 5776; WAN024GBC_at; Start 119; Stop 143
ctgcgttacgagaagagcggttacc

SEQ ID NO: 238585 - DNA, 25 bp, Artificial
  probe
  misc_feature (1)..(25): SEQ ID NO: 5776; WAN024GBC_at; Start 112; Stop 136
gatgaagctgcgttacgagaagagc

SEQ ID NO: 238586 - DNA, 25 bp, Artificial
  probe
  misc_feature (1)..(25): SEQ ID NO: 5776; WAN024GBC_at; Start 4; Stop 28
tgttctttaccccaagcctgcaaac

SEQ ID NO: 238587 - DNA, 25 bp, Artificial
  probe
  misc_feature (1)..(25): SEQ ID NO: 5776; WAN024GBC_at; Start 1; Stop 25
ttgtgttctttaccccaagcctgca

SEQ ID NO: 238588 - DNA, 25 bp, Artificial
  probe
  misc_feature (1)..(25): SEQ ID NO: 5776; WAN024GBC_at; Start 126; Stop 150
acgagaagagcggttaccacatgca

SEQ ID NO: 238589 - DNA, 25 bp, Artificial
  probe
  misc_feature (1)..(25): SEQ ID NO: 5776; WAN024GBC_at; Start 203; Stop 227
tgttcattactgaacctcctaaata

SEQ ID NO: 238590 - DNA, 25 bp, Artificial
  probe
  misc_feature (1)..(25): SEQ ID NO: 5776; WAN024GBC_at; Start 81; Stop 105
gacgattgctgcttttgtcttcaca

SEQ ID NO: 238591 - DNA, 25 bp, Artificial
  probe
  misc_feature (1)..(25): SEQ ID NO: 5776; WAN024GBC_at; Start 61; Stop 85
tcaacaccaccagtatcagtgacga

SEQ ID NO: 238592 - DNA, 25 bp, Artificial
  probe
  misc_feature (1)..(25): SEQ ID NO: 5776; WAN024GBC_at; Start 52; Stop 76
gatttgtcatcaacaccaccagtat

SEQ ID NO: 238593 - DNA, 25 bp, Artificial
  probe
  misc_feature (1)..(25): SEQ ID NO: 5776; WAN024GBC_at; Start 88; Stop 112
gctgcttttgtcttcacatcagaag

SEQ ID NO: 238594 - DNA, 25 bp, Artificial
  probe
  misc_feature (1)..(25): SEQ ID NO: 5776; WAN024GBC_at; Start 104; Stop 128
catcagaagatgaagctgcgttacg

SEQ ID NO: 238595 - DNA, 25 bp, Artificial
  probe
  misc_feature (1)..(25): SEQ ID NO: 5776; WAN024GBC_at; Start 191; Stop 215
gccattgtttcttgttcattactga

SEQ ID NO: 238596 - DNA, 25 bp, Artificial
  probe
  misc_feature (1)..(25): SEQ ID NO: 5776; WAN024GBC_at; Start 22; Stop 46
tgcaaaccttcccaagctgattggt

SEQ ID NO: 238597 - DNA, 25 bp, Artificial
  probe
  misc_feature (1)..(25): SEQ ID NO: 5776; WAN024GBC_at; Start 100; Stop 124
ttcacatcagaagatgaagctgcgt

SEQ ID NO: 238598 - DNA, 25 bp, Artificial
  probe
  misc_feature (1)..(25): SEQ ID NO: 5776; WAN024GBC_at; Start 156; Stop 180
tccaactgctgccactgcaactagg

SEQ ID NO: 238599 - DNA, 25 bp, Artificial
  probe
  misc_feature (1)..(25): SEQ ID NO: 5776; WAN024GBC_at; Start 136; Stop 160
cggttaccacatgcagcaagtccaa

SEQ ID NO: 238600 - DNA, 25 bp, Artificial
  probe
  misc_feature (1)..(25): SEQ ID NO: 5776; WAN024GBC_at; Start 177; Stop 201
taggccaagacctagccattgtttc

SEQ ID NO: 238601 - DNA, 25 bp, Artificial
  probe
  misc_feature (1)..(25): SEQ ID NO: 4157; WAN024GBD_at; Start 1027; Stop 1051
gacttggcagtaacaaacctttcag

SEQ ID NO: 238602 - DNA, 25 bp, Artificial
  probe
  misc_feature (1)..(25): SEQ ID NO: 4157; WAN024GBD_at; Start 668; Stop 692
actacgctggttcatttggtgatgc

SEQ ID NO: 238603 - DNA, 25 bp, Artificial
  probe
  misc_feature (1)..(25): SEQ ID NO: 4157; WAN024GBD_at; Start 700; Stop 724
ggtaaaacaattgcagccgcacaat

SEQ ID NO: 238604 - DNA, 25 bp, Artificial
  probe
  misc_feature (1)..(25): SEQ ID NO: 4157; WAN024GBD_at; Start 771; Stop 795
tgcaggtgtctttgcagaggcaaaa

SEQ ID NO: 238605 - DNA, 25 bp, Artificial
  probe
  misc_feature (1)..(25): SEQ ID NO: 4157; WAN024GBD_at; Start 868; Stop 892
ggtaaatacacttctaaagatggca

SEQ ID NO: 238606 - DNA, 25 bp, Artificial
  probe
  misc_feature (1)..(25): SEQ ID NO: 4157; WAN024GBD_at; Start 991; Stop 1015
caagtgatcgtttactcattgaagg

SEQ ID NO: 238607 - DNA, 25 bp, Artificial
  probe
  misc_feature (1)..(25): SEQ ID NO: 4157; WAN024GBD_at; Start 324; Stop 348
tgaagctgactacgctaacaacttg

SEQ ID NO: 238608 - DNA, 25 bp, Artificial
  probe
  misc_feature (1)..(25): SEQ ID NO: 4157; WAN024GBD_at; Start 1084; Stop 1108
gctaaaatccttgatggaagcgtaa

SEQ ID NO: 238609 - DNA, 25 bp, Artificial
  probe
  misc_feature (1)..(25): SEQ ID NO: 4157; WAN024GBD_at; Start 40; Stop 64
catcgttgcacatcttatttaggag

SEQ ID NO: 238610 - DNA, 25 bp, Artificial
  probe
  misc_feature (1)..(25): SEQ ID NO: 4157; WAN024GBD_at; Start 973; Stop 997
ggagaattccctggcggtcaagtga

SEQ ID NO: 238611 - DNA, 25 bp, Artificial
  probe
  misc_feature (1)..(25): SEQ ID NO: 4157; WAN024GBD_at; Start 726; Stop 750
cgcagccggtgcagatattgtttac

SEQ ID NO: 238612 - DNA, 25 bp, Artificial
  probe
  misc_feature (1)..(25): SEQ ID NO: 4157; WAN024GBD_at; Start 154; Stop 178
cgtaacgcagcttcatcttctgatg

SEQ ID NO: 238613 - DNA, 25 bp, Artificial
  probe
  misc_feature (1)..(25): SEQ ID NO: 4157; WAN024GBD_at; Start 352; Stop 376
caagcggctggaagttacaacctaa

SEQ ID NO: 238614 - DNA, 25 bp, Artificial
  probe
  misc_feature (1)..(25): SEQ ID NO: 4157; WAN024GBD_at; Start 236; Stop 260
accaatcagcttgggaaggtttgca

SEQ ID NO: 238615 - DNA, 25 bp, Artificial
  probe
  misc_feature (1)..(25): SEQ ID NO: 4157; WAN024GBD_at; Start 14; Stop 38
tgtggccaaccaatccatacttgca

SEQ ID NO: 238616 - DNA, 25 bp, Artificial
  probe
  misc_feature (1)..(25): SEQ ID NO: 4157; WAN024GBD_at; Start 533; Stop 557
tggctgcagcaaaaacaactaagac

SEQ ID NO: 238617 - DNA, 25 bp, Artificial
  probe
  misc_feature (1)..(25): SEQ ID NO: 4157; WAN024GBD_at; Start 520; Stop 544
taccttgcaggtgtggctgcagcaa

SEQ ID NO: 238618 - DNA, 25 bp, Artificial
  probe
  misc_feature (1)..(25): SEQ ID NO: 4157; WAN024GBD_at; Start 1057; Stop 1081
ggtaaaaaagctgtcgaagatgcaa

SEQ ID NO: 238619 - DNA, 25 bp, Artificial
  probe
  misc_feature (1)..(25): SEQ ID NO: 4157; WAN024GBD_at; Start 505; Stop 529
gataatgagtcaggttaccttgcag

SEQ ID NO: 238620 - DNA, 25 bp, Artificial
  probe
  misc_feature (1)..(25): SEQ ID NO: 4157; WAN024GBD_at; Start 96; Stop 120
tcttggcctagttgcagtggcagca

SEQ ID NO: 238621 - DNA, 25 bp, Artificial
  probe
  misc_feature (1)..(25): SEQ ID NO: 4157; WAN024GBD_at; Start 177; Stop 201
tgtgaagacaaaagcagcaatcgtc

SEQ ID NO: 238622 - DNA, 25 bp, Artificial
  probe
  misc_feature (1)..(25): SEQ ID NO: 4157; WAN024GBD_at; Start 481; Stop 505
aatgttgcgagcgtaactttcgctg

SEQ ID NO: 238623 - DNA, 25 bp, Artificial
  probe
  misc_feature (1)..(25): SEQ ID NO: 4157; WAN024GBD_at; Start 139; Stop 163
ggtaaccgctcttctcgtaacgcag

SEQ ID NO: 238624 - DNA, 25 bp, Artificial
  probe
  misc_feature (1)..(25): SEQ ID NO: 4157; WAN024GBD_at; Start 790; Stop 814
gcaaaatctctcaacgaaagccgtc

SEQ ID NO: 238625 - DNA, 25 bp, Artificial
  probe
  misc_feature (1)..(25): SEQ ID NO: 4157; WAN024GBD_at; Start 194; Stop 218
caatcgtcactgatactggtggtgt

SEQ ID NO: 238626 - DNA, 25 bp, Artificial
  probe
  misc_feature (1)..(25): SEQ ID NO: 4157; WAN024GBD_at; Start 2; Stop 26
tggcacggtccttgtggccaaccaa

SEQ ID NO: 238627 - DNA, 25 bp, Artificial
  probe
  misc_feature (1)..(25): SEQ ID NO: 4157; WAN024GBD_at; Start 850; Stop 874
cgtgaccaagaagcagaaggtaaat

SEQ ID NO: 238628 - DNA, 25 bp, Artificial
  probe
  misc_feature (1)..(25): SEQ ID NO: 4157; WAN024GBD_at; Start 67; Stop 91
tcagtaatgaacaagaaacaatggc

SEQ ID NO: 238629 - DNA, 25 bp, Artificial
  probe
  misc_feature (1)..(25): SEQ ID NO: 4157; WAN024GBD_at; Start 307; Stop 331
tacttccaatcaacaagtgaagctg

SEQ ID NO: 238630 - DNA, 25 bp, Artificial
  probe
  misc_feature (1)..(25): SEQ ID NO: 4157; WAN024GBD_at; Start 741; Stop 765
tattgtttaccaagtagctggtggt

SEQ ID NO: 238631 - DNA, 25 bp, Artificial
  probe
  misc_feature (1)..(25): SEQ ID NO: 4157; WAN024GBD_at; Start 339; Stop 363
taacaacttgcaacaagcggctgga

SEQ ID NO: 238632 - DNA, 25 bp, Artificial
  probe
  misc_feature (1)..(25): SEQ ID NO: 4157; WAN024GBD_at; Start 124; Stop 148
ggacttgctgcatgtggtaaccgct

SEQ ID NO: 238633 - DNA, 25 bp, Artificial
  probe
  misc_feature (1)..(25): SEQ ID NO: 4157; WAN024GBD_at; Start 621; Stop 645
caaggctggtgttgcgtcagtagac

SEQ ID NO: 238634 - DNA, 25 bp, Artificial
  probe
  misc_feature (1)..(25): SEQ ID NO: 4157; WAN024GBD_at; Start 81; Stop 105
gaaacaatggctaggtcttggccta

SEQ ID NO: 238635 - DNA, 25 bp, Artificial
  probe
  misc_feature (1)..(25): SEQ ID NO: 5063; WAN024GBE_at; Start 212; Stop 236
gaatatctgactcaaccaaggctaa

SEQ ID NO: 238636 - DNA, 25 bp, Artificial
  probe
  misc_feature (1)..(25): SEQ ID NO: 5063; WAN024GBE_at; Start 448; Stop 472
tactctctagcctcagacaacaaac

SEQ ID NO: 238637 - DNA, 25 bp, Artificial
  probe
  misc_feature (1)..(25): SEQ ID NO: 5063; WAN024GBE_at; Start 142; Stop 166
tggtctgtcagaaggcaagcttcaa

SEQ ID NO: 238638 - DNA, 25 bp, Artificial
  probe
  misc_feature (1)..(25): SEQ ID NO: 5063; WAN024GBE_at; Start 492; Stop 516
tgcatcttgttttaaaagcgtatga

SEQ ID NO: 238639 - DNA, 25 bp, Artificial
  probe
  misc_feature (1)..(25): SEQ ID NO: 5063; WAN024GBE_at; Start 360; Stop 384
tactgtgcaaaccttaacatctgtg

SEQ ID NO: 238640 - DNA, 25 bp, Artificial
  probe
  misc_feature (1)..(25): SEQ ID NO: 5063; WAN024GBE_at; Start 16; Stop 40
gatccaactgtttcacgcattaatg

SEQ ID NO: 238641 - DNA, 25 bp, Artificial
  probe
  misc_feature (1)..(25): SEQ ID NO: 5063; WAN024GBE_at; Start 345; Stop 369
caaagggaaacctactactgtgcaa

SEQ ID NO: 238642 - DNA, 25 bp, Artificial
  probe
  misc_feature (1)..(25): SEQ ID NO: 5063; WAN024GBE_at; Start 82; Stop 106
gatgttttaacaaagtcagccccag

SEQ ID NO: 238643 - DNA, 25 bp, Artificial
  probe
  misc_feature (1)..(25): SEQ ID NO: 5063; WAN024GBE_at; Start 176; Stop 200
tcactaacttatcaccacttgcttc

SEQ ID NO: 238644 - DNA, 25 bp, Artificial
  probe
  misc_feature (1)..(25): SEQ ID NO: 5063; WAN024GBE_at; Start 309; Stop 333
tgtctcaaatgctttcacggctgaa

SEQ ID NO: 238645 - DNA, 25 bp, Artificial
  probe
  misc_feature (1)..(25): SEQ ID NO: 5063; WAN024GBE_at; Start 408; Stop 432
ttcaacccaggtcggattaacgcaa

SEQ ID NO: 238646 - DNA, 25 bp, Artificial
  probe
  misc_feature (1)..(25): SEQ ID NO: 5063; WAN024GBE_at; Start 374; Stop 398
taacatctgtgccttcaagtccttt

SEQ ID NO: 238647 - DNA, 25 bp, Artificial
  probe
  misc_feature (1)..(25): SEQ ID NO: 5063; WAN024GBE_at; Start 389; Stop 413
caagtccttttttagcatgttcaac

SEQ ID NO: 238648 - DNA, 25 bp, Artificial
  probe
  misc_feature (1)..(25): SEQ ID NO: 5063; WAN024GBE_at; Start 399; Stop 423
tttagcatgttcaacccaggtcgga

SEQ ID NO: 238649 - DNA, 25 bp, Artificial
  probe
  misc_feature (1)..(25): SEQ ID NO: 5063; WAN024GBE_at; Start 35; Stop 59
ttaatgtaacatctgctatcgtagc

SEQ ID NO: 238650 - DNA, 25 bp, Artificial
  probe
  misc_feature (1)..(25): SEQ ID NO: 5063; WAN024GBE_at; Start 128; Stop 152
caacaattttttcttggtctgtcag

SEQ ID NO: 238651 - DNA, 25 bp, Artificial
  probe
  misc_feature (1)..(25): SEQ ID NO: 5063; WAN024GBE_at; Start 281; Stop 305
catctgcaccattttggatagcttc

SEQ ID NO: 238652 - DNA, 25 bp, Artificial
  probe
  misc_feature (1)..(25): SEQ ID NO: 5063; WAN024GBE_at; Start 241; Stop 265
cctgatttgagagctccaacattga

SEQ ID NO: 238653 - DNA, 25 bp, Artificial
  probe
  misc_feature (1)..(25): SEQ ID NO: 5063; WAN024GBE_at; Start 296; Stop 320
ggatagcttcttttgtctcaaatgc

SEQ ID NO: 238654 - DNA, 25 bp, Artificial
  probe
  misc_feature (1)..(25): SEQ ID NO: 5063; WAN024GBE_at; Start 420; Stop 444
cggattaacgcaaacactggcaaag

SEQ ID NO: 238655 - DNA, 25 bp, Artificial
  probe
  misc_feature (1)..(25): SEQ ID NO: 5063; WAN024GBE_at; Start 330; Stop 354
tgaagttgttgctcccaaagggaaa

SEQ ID NO: 238656 - DNA, 25 bp, Artificial
  probe
  misc_feature (1)..(25): SEQ ID NO: 5063; WAN024GBE_at; Start 95; Stop 119
agtcagccccagctttttgggccaa

SEQ ID NO: 238657 - DNA, 25 bp, Artificial
  probe
  misc_feature (1)..(25): SEQ ID NO: 5063; WAN024GBE_at; Start 1; Stop 25
ttgactcccatatcagatccaactg

SEQ ID NO: 238658 - DNA, 25 bp, Artificial
  probe
  misc_feature (1)..(25): SEQ ID NO: 5063; WAN024GBE_at; Start 155; Stop 179
ggcaagcttcaataatgactttcac

SEQ ID NO: 238659 - DNA, 25 bp, Artificial
  probe
  misc_feature (1)..(25): SEQ ID NO: 5063; WAN024GBE_at; Start 62; Stop 86
caccagttgaaaaaccagtagatgt

SEQ ID NO: 238660 - DNA, 25 bp, Artificial
  probe
  misc_feature (1)..(25): SEQ ID NO: 5063; WAN024GBE_at; Start 457; Stop 481
gcctcagacaacaaactatcaattt

SEQ ID NO: 238661 - DNA, 25 bp, Artificial
  probe
  misc_feature (1)..(25): SEQ ID NO: 5063; WAN024GBE_at; Start 249; Stop 273
gagagctccaacattgatcaccata

SEQ ID NO: 238662 - DNA, 25 bp, Artificial
  probe
  misc_feature (1)..(25): SEQ ID NO: 5063; WAN024GBE_at; Start 191; Stop 215
cacttgcttccactactgcgcgaat

SEQ ID NO: 238663 - DNA, 25 bp, Artificial
  probe
  misc_feature (1)..(25): SEQ ID NO: 5063; WAN024GBE_at; Start 264; Stop 288
gatcaccatatcaatctcatctgca

SEQ ID NO: 238664 - DNA, 25 bp, Artificial
  probe
  misc_feature (1)..(25): SEQ ID NO: 5063; WAN024GBE_at; Start 201; Stop 225
cactactgcgcgaatatctgactca

SEQ ID NO: 238665 - DNA, 25 bp, Artificial
  probe
  misc_feature (1)..(25): SEQ ID NO: 5063; WAN024GBE_at; Start 227; Stop 251
ccaaggctaaattacctgatttgag

SEQ ID NO: 238666 - DNA, 25 bp, Artificial
  probe
  misc_feature (1)..(25): SEQ ID NO: 5063; WAN024GBE_at; Start 112; Stop 136
tgggccaattggcaaacaacaattt

SEQ ID NO: 238667 - DNA, 25 bp, Artificial
  probe
  misc_feature (1)..(25): SEQ ID NO: 5063; WAN024GBE_at; Start 324; Stop 348
cacggctgaagttgttgctcccaaa

SEQ ID NO: 238668 - DNA, 25 bp, Artificial
  probe
  misc_feature (1)..(25): SEQ ID NO: 5063; WAN024GBE_at; Start 49; Stop 73
gctatcgtagcaccaccagttgaaa

SEQ ID NO: 238669 - DNA, 25 bp, Artificial
  probe
  misc_feature (1)..(25): SEQ ID NO: 964; WAN024GBF_at; Start 118; Stop 142
ccgacctgggttgaacatgctaaaa

SEQ ID NO: 238670 - DNA, 25 bp, Artificial
  probe
  misc_feature (1)..(25): SEQ ID NO: 964; WAN024GBF_at; Start 138; Stop 162
taaaaaaggacttgaaggcacagat

SEQ ID NO: 238671 - DNA, 25 bp, Artificial
  probe
  misc_feature (1)..(25): SEQ ID NO: 964; WAN024GBF_at; Start 109; Stop 133
tgcgttaatccgacctgggttgaac

SEQ ID NO: 238672 - DNA, 25 bp, Artificial
  probe
  misc_feature (1)..(25): SEQ ID NO: 964; WAN024GBF_at; Start 467; Stop 491
tttcaactggtggtgctacgatagc

SEQ ID NO: 238673 - DNA, 25 bp, Artificial
  probe
  misc_feature (1)..(25): SEQ ID NO: 964; WAN024GBF_at; Start 376; Stop 400
gaagcttgccttctgacagaccaag

SEQ ID NO: 238674 - DNA, 25 bp, Artificial
  probe
  misc_feature (1)..(25): SEQ ID NO: 964; WAN024GBF_at; Start 130; Stop 154
gaacatgctaaaaaaggacttgaag

SEQ ID NO: 238675 - DNA, 25 bp, Artificial
  probe
  misc_feature (1)..(25): SEQ ID NO: 964; WAN024GBF_at; Start 623; Stop 647
tagctattttaaaaggagaattggc

SEQ ID NO: 238676 - DNA, 25 bp, Artificial
  probe
  misc_feature (1)..(25): SEQ ID NO: 964; WAN024GBF_at; Start 552; Stop 576
agctcgttcttatgcagatgctctt

SEQ ID NO: 238677 - DNA, 25 bp, Artificial
  probe
  misc_feature (1)..(25): SEQ ID NO: 964; WAN024GBF_at; Start 165; Stop 189
taaggtttgcacagtagtaggtttc

SEQ ID NO: 238678 - DNA, 25 bp, Artificial
  probe
  misc_feature (1)..(25): SEQ ID NO: 964; WAN024GBF_at; Start 582; Stop 606
tgtcgaagcaggtgcgacccgtatc

SEQ ID NO: 238679 - DNA, 25 bp, Artificial
  probe
  misc_feature (1)..(25): SEQ ID NO: 964; WAN024GBF_at; Start 8; Stop 32
taaataaatatatagatcatacgct

SEQ ID NO: 238680 - DNA, 25 bp, Artificial
  probe
  misc_feature (1)..(25): SEQ ID NO: 964; WAN024GBF_at; Start 547; Stop 571
ggtggagctcgttcttatgcagatg

SEQ ID NO: 238681 - DNA, 25 bp, Artificial
  probe
  misc_feature (1)..(25): SEQ ID NO: 964; WAN024GBF_at; Start 371; Stop 395
ttattgaagcttgccttctgacaga

SEQ ID NO: 238682 - DNA, 25 bp, Artificial
  probe
  misc_feature (1)..(25): SEQ ID NO: 964; WAN024GBF_at; Start 597; Stop 621
gacccgtatcggaacgtcagctggg

SEQ ID NO: 238683 - DNA, 25 bp, Artificial
  probe
  misc_feature (1)..(25): SEQ ID NO: 964; WAN024GBF_at; Start 113; Stop 137
ttaatccgacctgggttgaacatgc

SEQ ID NO: 238684 - DNA, 25 bp, Artificial
  probe
  misc_feature (1)..(25): SEQ ID NO: 964; WAN024GBF_at; Start 381; Stop 405
ttgccttctgacagaccaagaaaaa

SEQ ID NO: 238685 - DNA, 25 bp, Artificial
  probe
  misc_feature (1)..(25): SEQ ID NO: 964; WAN024GBF_at; Start 35; Stop 59
taaaacaagatgcaaagaaaaaaca

SEQ ID NO: 238686 - DNA, 25 bp, Artificial
  probe
  misc_feature (1)..(25): SEQ ID NO: 964; WAN024GBF_at; Start 22; Stop 46
gatcatacgcttttaaaacaagatg

SEQ ID NO: 238687 - DNA, 25 bp, Artificial
  probe
  misc_feature (1)..(25): SEQ ID NO: 964; WAN024GBF_at; Start 124; Stop 148
tgggttgaacatgctaaaaaaggac

SEQ ID NO: 238688 - DNA, 25 bp, Artificial
  probe
  misc_feature (1)..(25): SEQ ID NO: 964; WAN024GBF_at; Start 69; Stop 93
tttgttgtctgaggctagagagtat

SEQ ID NO: 238689 - DNA, 25 bp, Artificial
  probe
  misc_feature (1)..(25): SEQ ID NO: 964; WAN024GBF_at; Start 103; Stop 127
agtgtttgcgttaatccgacctggg

SEQ ID NO: 238690 - DNA, 25 bp, Artificial
  probe
  misc_feature (1)..(25): SEQ ID NO: 964; WAN024GBF_at; Start 27; Stop 51
tacgcttttaaaacaagatgcaaag

SEQ ID NO: 238691 - DNA, 25 bp, Artificial
  probe
  misc_feature (1)..(25): SEQ ID NO: 964; WAN024GBF_at; Start 475; Stop 499
ggtggtgctacgatagcagatgtta

SEQ ID NO: 238692 - DNA, 25 bp, Artificial
  probe
  misc_feature (1)..(25): SEQ ID NO: 964; WAN024GBF_at; Start 64; Stop 88
gatagtttgttgtctgaggctagag

SEQ ID NO: 238693 - DNA, 25 bp, Artificial
  probe
  misc_feature (1)..(25): SEQ ID NO: 964; WAN024GBF_at; Start 59; Stop 83
aaattgatagtttgttgtctgaggc

SEQ ID NO: 238694 - DNA, 25 bp, Artificial
  probe
  misc_feature (1)..(25): SEQ ID NO: 964; WAN024GBF_at; Start 45; Stop 69
tgcaaagaaaaaacaaattgatagt

SEQ ID NO: 238695 - DNA, 25 bp, Artificial
  probe
  misc_feature (1)..(25): SEQ ID NO: 964; WAN024GBF_at; Start 636; Stop 660
aggagaattggcagatggcgactac

SEQ ID NO: 238696 - DNA, 25 bp, Artificial
  probe
  misc_feature (1)..(25): SEQ ID NO: 964; WAN024GBF_at; Start 470; Stop 494
caactggtggtgctacgatagcaga

SEQ ID NO: 238697 - DNA, 25 bp, Artificial
  probe
  misc_feature (1)..(25): SEQ ID NO: 964; WAN024GBF_at; Start 630; Stop 654
tttaaaaggagaattggcagatggc

SEQ ID NO: 238698 - DNA, 25 bp, Artificial
  probe
  misc_feature (1)..(25): SEQ ID NO: 964; WAN024GBF_at; Start 578; Stop 602
cctttgtcgaagcaggtgcgacccg

SEQ ID NO: 238699 - DNA, 25 bp, Artificial
  probe
  misc_feature (1)..(25): SEQ ID NO: 964; WAN024GBF_at; Start 151; Stop 175
gaaggcacagatgttaaggtttgca

SEQ ID NO: 238700 - DNA, 25 bp, Artificial
  probe
  misc_feature (1)..(25): SEQ ID NO: 964; WAN024GBF_at; Start 156; Stop 180
cacagatgttaaggtttgcacagta

SEQ ID NO: 238701 - DNA, 25 bp, Artificial
  probe
  misc_feature (1)..(25): SEQ ID NO: 964; WAN024GBF_at; Start 96; Stop 120
ctttgccagtgtttgcgttaatccg

SEQ ID NO: 238702 - DNA, 25 bp, Artificial
  probe
  misc_feature (1)..(25): SEQ ID NO: 964; WAN024GBF_at; Start 590; Stop 614
caggtgcgacccgtatcggaacgtc

SEQ ID NO: 238703 - DNA, 25 bp, Artificial
  probe
  misc_feature (1)..(25): SEQ ID NO: 1572; WAN024GBG_at; Start 293; Stop 317
cgtccaacaaccttaccaagatcta

SEQ ID NO: 238704 - DNA, 25 bp, Artificial
  probe
  misc_feature (1)..(25): SEQ ID NO: 1572; WAN024GBG_at; Start 133; Stop 157
tgccaaaccaagcataatttgagcc

SEQ ID NO: 238705 - DNA, 25 bp, Artificial
  probe
  misc_feature (1)..(25): SEQ ID NO: 1572; WAN024GBG_at; Start 173; Stop 197
tgggtaatatcctgacgtccttgac

SEQ ID NO: 238706 - DNA, 25 bp, Artificial
  probe
  misc_feature (1)..(25): SEQ ID NO: 1572; WAN024GBG_at; Start 309; Stop 333
caagatctaccatagtttgagccaa

SEQ ID NO: 238707 - DNA, 25 bp, Artificial
  probe
  misc_feature (1)..(25): SEQ ID NO: 1572; WAN024GBG_at; Start 180; Stop 204
tatcctgacgtccttgaccttgcaa

SEQ ID NO: 238708 - DNA, 25 bp, Artificial
  probe
  misc_feature (1)..(25): SEQ ID NO: 1572; WAN024GBG_at; Start 347; Stop 371
tcaaccgtcttcatgaaggcaccct

SEQ ID NO: 238709 - DNA, 25 bp, Artificial
  probe
  misc_feature (1)..(25): SEQ ID NO: 1572; WAN024GBG_at; Start 7; Stop 31
tacatttacaggacgatagaggtct

SEQ ID NO: 238710 - DNA, 25 bp, Artificial
  probe
  misc_feature (1)..(25): SEQ ID NO: 1572; WAN024GBG_at; Start 241; Stop 265
aatcgctcgtcccaaaggctggctc

SEQ ID NO: 238711 - DNA, 25 bp, Artificial
  probe
  misc_feature (1)..(25): SEQ ID NO: 1572; WAN024GBG_at; Start 273; Stop 297
taatcactgctactgtcttccgtcc

SEQ ID NO: 238712 - DNA, 25 bp, Artificial
  probe
  misc_feature (1)..(25): SEQ ID NO: 1572; WAN024GBG_at; Start 323; Stop 347
gtttgagccaactcacgcgcctcat

SEQ ID NO: 238713 - DNA, 25 bp, Artificial
  probe
  misc_feature (1)..(25): SEQ ID NO: 1572; WAN024GBG_at; Start 283; Stop 307
tactgtcttccgtccaacaacctta

SEQ ID NO: 238714 - DNA, 25 bp, Artificial
  probe
  misc_feature (1)..(25): SEQ ID NO: 1572; WAN024GBG_at; Start 245; Stop 269
gctcgtcccaaaggctggctcatat

SEQ ID NO: 238715 - DNA, 25 bp, Artificial
  probe
  misc_feature (1)..(25): SEQ ID NO: 1572; WAN024GBG_at; Start 234; Stop 258
gatttccaatcgctcgtcccaaagg

SEQ ID NO: 238716 - DNA, 25 bp, Artificial
  probe
  misc_feature (1)..(25): SEQ ID NO: 1572; WAN024GBG_at; Start 319; Stop 343
catagtttgagccaactcacgcgcc

SEQ ID NO: 238717 - DNA, 25 bp, Artificial
  probe
  misc_feature (1)..(25): SEQ ID NO: 1572; WAN024GBG_at; Start 189; Stop 213
gtccttgaccttgcaaaatctccaa

SEQ ID NO: 238718 - DNA, 25 bp, Artificial
  probe
  misc_feature (1)..(25): SEQ ID NO: 1572; WAN024GBG_at; Start 359; Stop 383
atgaaggcaccctcaccgacagtca

SEQ ID NO: 238719 - DNA, 25 bp, Artificial
  probe
  misc_feature (1)..(25): SEQ ID NO: 1572; WAN024GBG_at; Start 79; Stop 103
tgcttgaccattctcaagatgttgg

SEQ ID NO: 238720 - DNA, 25 bp, Artificial
  probe
  misc_feature (1)..(25): SEQ ID NO: 1572; WAN024GBG_at; Start 219; Stop 243
caaggatttccagacgatttccaat

SEQ ID NO: 238721 - DNA, 25 bp, Artificial
  probe
  misc_feature (1)..(25): SEQ ID NO: 1572; WAN024GBG_at; Start 60; Stop 84
tttcctcaaacttagccagtgcttg

SEQ ID NO: 238722 - DNA, 25 bp, Artificial
  probe
  misc_feature (1)..(25): SEQ ID NO: 1572; WAN024GBG_at; Start 13; Stop 37
tacaggacgatagaggtcttccaag

SEQ ID NO: 238723 - DNA, 25 bp, Artificial
  probe
  misc_feature (1)..(25): SEQ ID NO: 1572; WAN024GBG_at; Start 253; Stop 277
caaaggctggctcatatccgtaatc

SEQ ID NO: 238724 - DNA, 25 bp, Artificial
  probe
  misc_feature (1)..(25): SEQ ID NO: 1572; WAN024GBG_at; Start 168; Stop 192
taaagtgggtaatatcctgacgtcc

SEQ ID NO: 238725 - DNA, 25 bp, Artificial
  probe
  misc_feature (1)..(25): SEQ ID NO: 1572; WAN024GBG_at; Start 21; Stop 45
gatagaggtcttccaagtctccacc

SEQ ID NO: 238726 - DNA, 25 bp, Artificial
  probe
  misc_feature (1)..(25): SEQ ID NO: 1572; WAN024GBG_at; Start 141; Stop 165
caagcataatttgagccaattcaca

SEQ ID NO: 238727 - DNA, 25 bp, Artificial
  probe
  misc_feature (1)..(25): SEQ ID NO: 1572; WAN024GBG_at; Start 152; Stop 176
tgagccaattcacaaataaagtggg

SEQ ID NO: 238728 - DNA, 25 bp, Artificial
  probe
  misc_feature (1)..(25): SEQ ID NO: 1572; WAN024GBG_at; Start 47; Stop 71
tgggcttgcaccatttcctcaaact

SEQ ID NO: 238729 - DNA, 25 bp, Artificial
  probe
  misc_feature (1)..(25): SEQ ID NO: 1572; WAN024GBG_at; Start 121; Stop 145
tttgttaacatttgccaaaccaagc

SEQ ID NO: 238730 - DNA, 25 bp, Artificial
  probe
  misc_feature (1)..(25): SEQ ID NO: 1572; WAN024GBG_at; Start 72; Stop 96
tagccagtgcttgaccattctcaag

SEQ ID NO: 238731 - DNA, 25 bp, Artificial
  probe
  misc_feature (1)..(25): SEQ ID NO: 1572; WAN024GBG_at; Start 260; Stop 284
tggctcatatccgtaatcactgcta

SEQ ID NO: 238732 - DNA, 25 bp, Artificial
  probe
  misc_feature (1)..(25): SEQ ID NO: 1572; WAN024GBG_at; Start 339; Stop 363
gcgcctcatcaaccgtcttcatgaa

SEQ ID NO: 238733 - DNA, 25 bp, Artificial
  probe
  misc_feature (1)..(25): SEQ ID NO: 1572; WAN024GBG_at; Start 201; Stop 225
gcaaaatctccaatgcttcaaggat

SEQ ID NO: 238734 - DNA, 25 bp, Artificial
  probe
  misc_feature (1)..(25): SEQ ID NO: 1572; WAN024GBG_at; Start 35; Stop 59
aagtctccaccttgggcttgcacca

SEQ ID NO: 238735 - DNA, 25 bp, Artificial
  probe
  misc_feature (1)..(25): SEQ ID NO: 1572; WAN024GBG_at; Start 211; Stop 235
caatgcttcaaggatttccagacga

SEQ ID NO: 238736 - DNA, 25 bp, Artificial
  probe
  misc_feature (1)..(25): SEQ ID NO: 1572; WAN024GBG_at; Start 114; Stop 138
caacagttttgttaacatttgccaa

SEQ ID NO: 238737 - DNA, 25 bp, Artificial
  probe
  misc_feature (1)..(25): SEQ ID NO: 2265; WAN024GBH_at; Start 99; Stop 123
aatcaaggttaccttatcgccgaca

SEQ ID NO: 238738 - DNA, 25 bp, Artificial
  probe
  misc_feature (1)..(25): SEQ ID NO: 2265; WAN024GBH_at; Start 168; Stop 192
caggtcaaactcttgcccagtctta

SEQ ID NO: 238739 - DNA, 25 bp, Artificial
  probe
  misc_feature (1)..(25): SEQ ID NO: 2265; WAN024GBH_at; Start 54; Stop 78
catttttgctacaggcacaccgaag

SEQ ID NO: 238740 - DNA, 25 bp, Artificial
  probe
  misc_feature (1)..(25): SEQ ID NO: 2265; WAN024GBH_at; Start 152; Stop 176
caccatcaatggctgacaggtcaaa

SEQ ID NO: 238741 - DNA, 25 bp, Artificial
  probe
  misc_feature (1)..(25): SEQ ID NO: 2265; WAN024GBH_at; Start 144; Stop 168
aactttcacaccatcaatggctgac

SEQ ID NO: 238742 - DNA, 25 bp, Artificial
  probe
  misc_feature (1)..(25): SEQ ID NO: 2265; WAN024GBH_at; Start 163; Stop 187
gctgacaggtcaaactcttgcccag

SEQ ID NO: 238743 - DNA, 25 bp, Artificial
  probe
  misc_feature (1)..(25): SEQ ID NO: 2265; WAN024GBH_at; Start 21; Stop 45
tgttccgcctgtatggccaagacca

SEQ ID NO: 238744 - DNA, 25 bp, Artificial
  probe
  misc_feature (1)..(25): SEQ ID NO: 2265; WAN024GBH_at; Start 102; Stop 126
caaggttaccttatcgccgacacca

SEQ ID NO: 238745 - DNA, 25 bp, Artificial
  probe
  misc_feature (1)..(25): SEQ ID NO: 2265; WAN024GBH_at; Start 216; Stop 240
gatttctcgagtcgtcattccttta

SEQ ID NO: 238746 - DNA, 25 bp, Artificial
  probe
  misc_feature (1)..(25): SEQ ID NO: 2265; WAN024GBH_at; Start 149; Stop 173
tcacaccatcaatggctgacaggtc

SEQ ID NO: 238747 - DNA, 25 bp, Artificial
  probe
  misc_feature (1)..(25): SEQ ID NO: 2265; WAN024GBH_at; Start 118; Stop 142
ccgacaccaccagtagaatgcttgt

SEQ ID NO: 238748 - DNA, 25 bp, Artificial
  probe
  misc_feature (1)..(25): SEQ ID NO: 2265; WAN024GBH_at; Start 207; Stop 231
taaatcagagatttctcgagtcgtc

SEQ ID NO: 238749 - DNA, 25 bp, Artificial
  probe
  misc_feature (1)..(25): SEQ ID NO: 2265; WAN024GBH_at; Start 174; Stop 198
aaactcttgcccagtcttaaccata

SEQ ID NO: 238750 - DNA, 25 bp, Artificial
  probe
  misc_feature (1)..(25): SEQ ID NO: 2265; WAN024GBH_at; Start 112; Stop 136
ttatcgccgacaccaccagtagaat

SEQ ID NO: 238751 - DNA, 25 bp, Artificial
  probe
  misc_feature (1)..(25): SEQ ID NO: 2265; WAN024GBH_at; Start 44; Stop 68
cacgaccactcatttttgctacagg

SEQ ID NO: 238752 - DNA, 25 bp, Artificial
  probe
  misc_feature (1)..(25): SEQ ID NO: 2265; WAN024GBH_at; Start 27; Stop 51
gcctgtatggccaagaccacgacca

SEQ ID NO: 238753 - DNA, 25 bp, Artificial
  probe
  misc_feature (1)..(25): SEQ ID NO: 2265; WAN024GBH_at; Start 34; Stop 58
tggccaagaccacgaccactcattt

SEQ ID NO: 238754 - DNA, 25 bp, Artificial
  probe
  misc_feature (1)..(25): SEQ ID NO: 2265; WAN024GBH_at; Start 13; Stop 37
ttatcaattgttccgcctgtatggc

SEQ ID NO: 238755 - DNA, 25 bp, Artificial
  probe
  misc_feature (1)..(25): SEQ ID NO: 2265; WAN024GBH_at; Start 115; Stop 139
tcgccgacaccaccagtagaatgct

SEQ ID NO: 238756 - DNA, 25 bp, Artificial
  probe
  misc_feature (1)..(25): SEQ ID NO: 2265; WAN024GBH_at; Start 67; Stop 91
ggcacaccgaagctagcaacaagag

SEQ ID NO: 238757 - DNA, 25 bp, Artificial
  probe
  misc_feature (1)..(25): SEQ ID NO: 2265; WAN024GBH_at; Start 47; Stop 71
gaccactcatttttgctacaggcac

SEQ ID NO: 238758 - DNA, 25 bp, Artificial
  probe
  misc_feature (1)..(25): SEQ ID NO: 2265; WAN024GBH_at; Start 181; Stop 205
tgcccagtcttaaccatattcatcg

SEQ ID NO: 238759 - DNA, 25 bp, Artificial
  probe
  misc_feature (1)..(25): SEQ ID NO: 2265; WAN024GBH_at; Start 58; Stop 82
tttgctacaggcacaccgaagctag

SEQ ID NO: 238760 - DNA, 25 bp, Artificial
  probe
  misc_feature (1)..(25): SEQ ID NO: 2265; WAN024GBH_at; Start 159; Stop 183
aatggctgacaggtcaaactcttgc

SEQ ID NO: 238761 - DNA, 25 bp, Artificial
  probe
  misc_feature (1)..(25): SEQ ID NO: 2265; WAN024GBH_at; Start 18; Stop 42
aattgttccgcctgtatggccaaga

SEQ ID NO: 238762 - DNA, 25 bp, Artificial
  probe
  misc_feature (1)..(25): SEQ ID NO: 2265; WAN024GBH_at; Start 192; Stop 216
aaccatattcatcgttaaatcagag

SEQ ID NO: 238763 - DNA, 25 bp, Artificial
  probe
  misc_feature (1)..(25): SEQ ID NO: 2265; WAN024GBH_at; Start 69; Stop 93
cacaccgaagctagcaacaagagga

SEQ ID NO: 238764 - DNA, 25 bp, Artificial
  probe
  misc_feature (1)..(25): SEQ ID NO: 2265; WAN024GBH_at; Start 61; Stop 85
gctacaggcacaccgaagctagcaa

SEQ ID NO: 238765 - DNA, 25 bp, Artificial
  probe
  misc_feature (1)..(25): SEQ ID NO: 2265; WAN024GBH_at; Start 212; Stop 236
cagagatttctcgagtcgtcattcc

SEQ ID NO: 238766 - DNA, 25 bp, Artificial
  probe
  misc_feature (1)..(25): SEQ ID NO: 2265; WAN024GBH_at; Start 51; Stop 75
actcatttttgctacaggcacaccg

SEQ ID NO: 238767 - DNA, 25 bp, Artificial
  probe
  misc_feature (1)..(25): SEQ ID NO: 2265; WAN024GBH_at; Start 39; Stop 63
aagaccacgaccactcatttttgct

SEQ ID NO: 238768 - DNA, 25 bp, Artificial
  probe
  misc_feature (1)..(25): SEQ ID NO: 2265; WAN024GBH_at; Start 222; Stop 246
tcgagtcgtcattcctttaaaataa

SEQ ID NO: 238769 - DNA, 25 bp, Artificial
  probe
  misc_feature (1)..(25): SEQ ID NO: 2265; WAN024GBH_at; Start 3; Stop 27
ggactccaatttatcaattgttccg

SEQ ID NO: 238770 - DNA, 25 bp, Artificial
  probe
  misc_feature (1)..(25): SEQ ID NO: 2265; WAN024GBH_at; Start 155; Stop 179
catcaatggctgacaggtcaaactc

SEQ ID NO: 238771 - DNA, 25 bp, Artificial
  probe
  misc_feature (1)..(25): SEQ ID NO: 4971; WAN024GBI_at; Start 3; Stop 27
gaagtcagttcttgaccgtctcgtt

SEQ ID NO: 238772 - DNA, 25 bp, Artificial
  probe
  misc_feature (1)..(25): SEQ ID NO: 4971; WAN024GBI_at; Start 48; Stop 72
gctctcattctttcacacttctaag

SEQ ID NO: 238773 - DNA, 25 bp, Artificial
  probe
  misc_feature (1)..(25): SEQ ID NO: 4971; WAN024GBI_at; Start 40; Stop 64
aatcaactgctctcattctttcaca

SEQ ID NO: 238774 - DNA, 25 bp, Artificial
  probe
  misc_feature (1)..(25): SEQ ID NO: 4971; WAN024GBI_at; Start 52; Stop 76
tcattctttcacacttctaaggata

SEQ ID NO: 238775 - DNA, 25 bp, Artificial
  probe
  misc_feature (1)..(25): SEQ ID NO: 4971; WAN024GBI_at; Start 328; Stop 352
tgcattatttttttcagcatttctc

SEQ ID NO: 238776 - DNA, 25 bp, Artificial
  probe
  misc_feature (1)..(25): SEQ ID NO: 4971; WAN024GBI_at; Start 223; Stop 247
ttcatgaacgacttgcttgcccgca

SEQ ID NO: 238777 - DNA, 25 bp, Artificial
  probe
  misc_feature (1)..(25): SEQ ID NO: 4971; WAN024GBI_at; Start 5; Stop 29
agtcagttcttgaccgtctcgtttt

SEQ ID NO: 238778 - DNA, 25 bp, Artificial
  probe
  misc_feature (1)..(25): SEQ ID NO: 4971; WAN024GBI_at; Start 69; Stop 93
taaggatatagtatcccttgtcttt

SEQ ID NO: 238779 - DNA, 25 bp, Artificial
  probe
  misc_feature (1)..(25): SEQ ID NO: 4971; WAN024GBI_at; Start 242; Stop 266
cccgcacggataggaggattggaaa

SEQ ID NO: 238780 - DNA, 25 bp, Artificial
  probe
  misc_feature (1)..(25): SEQ ID NO: 4971; WAN024GBI_at; Start 248; Stop 272
cggataggaggattggaaatgacat

SEQ ID NO: 238781 - DNA, 25 bp, Artificial
  probe
  misc_feature (1)..(25): SEQ ID NO: 4971; WAN024GBI_at; Start 61; Stop 85
cacacttctaaggatatagtatccc

SEQ ID NO: 238782 - DNA, 25 bp, Artificial
  probe
  misc_feature (1)..(25): SEQ ID NO: 4971; WAN024GBI_at; Start 238; Stop 262
cttgcccgcacggataggaggattg

SEQ ID NO: 238783 - DNA, 25 bp, Artificial
  probe
  misc_feature (1)..(25): SEQ ID NO: 4971; WAN024GBI_at; Start 243; Stop 267
ccgcacggataggaggattggaaat

SEQ ID NO: 238784 - DNA, 25 bp, Artificial
  probe
  misc_feature (1)..(25): SEQ ID NO: 4971; WAN024GBI_at; Start 246; Stop 270
cacggataggaggattggaaatgac

SEQ ID NO: 238785 - DNA, 25 bp, Artificial
  probe
  misc_feature (1)..(25): SEQ ID NO: 4971; WAN024GBI_at; Start 50; Stop 74
tctcattctttcacacttctaagga

SEQ ID NO: 238786 - DNA, 25 bp, Artificial
  probe
  misc_feature (1)..(25): SEQ ID NO: 4971; WAN024GBI_at; Start 235; Stop 259
ttgcttgcccgcacggataggagga

SEQ ID NO: 238787 - DNA, 25 bp, Artificial
  probe
  misc_feature (1)..(25): SEQ ID NO: 4971; WAN024GBI_at; Start 226; Stop 250
atgaacgacttgcttgcccgcacgg

SEQ ID NO: 238788 - DNA, 25 bp, Artificial
  probe
  misc_feature (1)..(25): SEQ ID NO: 4971; WAN024GBI_at; Start 222; Stop 246
tttcatgaacgacttgcttgcccgc

SEQ ID NO: 238789 - DNA, 25 bp, Artificial
  probe
  misc_feature (1)..(25): SEQ ID NO: 4971; WAN024GBI_at; Start 219; Stop 243
tgatttcatgaacgacttgcttgcc

SEQ ID NO: 238790 - DNA, 25 bp, Artificial
  probe
  misc_feature (1)..(25): SEQ ID NO: 4971; WAN024GBI_at; Start 2; Stop 26
tgaagtcagttcttgaccgtctcgt

SEQ ID NO: 238791 - DNA, 25 bp, Artificial
  probe
  misc_feature (1)..(25): SEQ ID NO: 4971; WAN024GBI_at; Start 221; Stop 245
atttcatgaacgacttgcttgcccg

SEQ ID NO: 238792 - DNA, 25 bp, Artificial
  probe
  misc_feature (1)..(25): SEQ ID NO: 4971; WAN024GBI_at; Start 56; Stop 80
tctttcacacttctaaggatatagt

SEQ ID NO: 238793 - DNA, 25 bp, Artificial
  probe
  misc_feature (1)..(25): SEQ ID NO: 4971; WAN024GBI_at; Start 319; Stop 343
cgtcgcttttgcattatttttttca

SEQ ID NO: 238794 - DNA, 25 bp, Artificial
  probe
  misc_feature (1)..(25): SEQ ID NO: 4971; WAN024GBI_at; Start 1; Stop 25
ttgaagtcagttcttgaccgtctcg

SEQ ID NO: 238795 - DNA, 25 bp, Artificial
  probe
  misc_feature (1)..(25): SEQ ID NO: 4971; WAN024GBI_at; Start 224; Stop 248
tcatgaacgacttgcttgcccgcac

SEQ ID NO: 238796 - DNA, 25 bp, Artificial
  probe
  misc_feature (1)..(25): SEQ ID NO: 4971; WAN024GBI_at; Start 67; Stop 91
tctaaggatatagtatcccttgtct

SEQ ID NO: 238797 - DNA, 25 bp, Artificial
  probe
  misc_feature (1)..(25): SEQ ID NO: 4971; WAN024GBI_at; Start 229; Stop 253
aacgacttgcttgcccgcacggata

SEQ ID NO: 238798 - DNA, 25 bp, Artificial
  probe
  misc_feature (1)..(25): SEQ ID NO: 4971; WAN024GBI_at; Start 73; Stop 97
gatatagtatcccttgtctttttta

SEQ ID NO: 238799 - DNA, 25 bp, Artificial
  probe
  misc_feature (1)..(25): SEQ ID NO: 4971; WAN024GBI_at; Start 227; Stop 251
tgaacgacttgcttgcccgcacgga

SEQ ID NO: 238800 - DNA, 25 bp, Artificial
  probe
  misc_feature (1)..(25): SEQ ID NO: 4971; WAN024GBI_at; Start 38; Stop 62
taaatcaactgctctcattctttca

SEQ ID NO: 238801 - DNA, 25 bp, Artificial
  probe
  misc_feature (1)..(25): SEQ ID NO: 4971; WAN024GBI_at; Start 228; Stop 252
gaacgacttgcttgcccgcacggat

SEQ ID NO: 238802 - DNA, 25 bp, Artificial
  probe
  misc_feature (1)..(25): SEQ ID NO: 4971; WAN024GBI_at; Start 220; Stop 244
gatttcatgaacgacttgcttgccc

SEQ ID NO: 238803 - DNA, 25 bp, Artificial
  probe
  misc_feature (1)..(25): SEQ ID NO: 4971; WAN024GBI_at; Start 63; Stop 87
cacttctaaggatatagtatccctt

SEQ ID NO: 238804 - DNA, 25 bp, Artificial
  probe
  misc_feature (1)..(25): SEQ ID NO: 4971; WAN024GBI_at; Start 42; Stop 66
tcaactgctctcattctttcacact

SEQ ID NO: 238805 - DNA, 25 bp, Artificial
  probe
  misc_feature (1)..(25): SEQ ID NO: 1540; WAN024GBJ_at; Start 701; Stop 725
cagtgattacggatatgagccagcc

SEQ ID NO: 238806 - DNA, 25 bp, Artificial
  probe
  misc_feature (1)..(25): SEQ ID NO: 1540; WAN024GBJ_at; Start 599; Stop 623
tgactgtcggtgagggtgccttcat

SEQ ID NO: 238807 - DNA, 25 bp, Artificial
  probe
  misc_feature (1)..(25): SEQ ID NO: 1540; WAN024GBJ_at; Start 311; Stop 335
tgcctgtagcaaaaatgagtggtcg

SEQ ID NO: 238808 - DNA, 25 bp, Artificial
  probe
  misc_feature (1)..(25): SEQ ID NO: 1540; WAN024GBJ_at; Start 1131; Stop 1155
tggagactccgttcaaaagggtgaa

SEQ ID NO: 238809 - DNA, 25 bp, Artificial
  probe
  misc_feature (1)..(25): SEQ ID NO: 1540; WAN024GBJ_at; Start 578; Stop 602
cggatgctattttgctagacgtgac

SEQ ID NO: 238810 - DNA, 25 bp, Artificial
  probe
  misc_feature (1)..(25): SEQ ID NO: 1540; WAN024GBJ_at; Start 417; Stop 441
tattcgtcaggttcaggatattgga

SEQ ID NO: 238811 - DNA, 25 bp, Artificial
  probe
  misc_feature (1)..(25): SEQ ID NO: 1540; WAN024GBJ_at; Start 923; Stop 947
tggtgcaagcccaaggtggagactt

SEQ ID NO: 238812 - DNA, 25 bp, Artificial
  probe
  misc_feature (1)..(25): SEQ ID NO: 1540; WAN024GBJ_at; Start 189; Stop 213
taagactgggcaagagtttgacctg

SEQ ID NO: 238813 - DNA, 25 bp, Artificial
  probe
  misc_feature (1)..(25): SEQ ID NO: 1540; WAN024GBJ_at; Start 449; Stop 473
tcattgggcaatcagaccagctggt

SEQ ID NO: 238814 - DNA, 25 bp, Artificial
  probe
  misc_feature (1)..(25): SEQ ID NO: 1540; WAN024GBJ_at; Start 244; Stop 268
cattctactggtggtgtcggcgata

SEQ ID NO: 238815 - DNA, 25 bp, Artificial
  probe
  misc_feature (1)..(25): SEQ ID NO: 1540; WAN024GBJ_at; Start 548; Stop 572
cggtgatgagcaagaaaattgcggc

SEQ ID NO: 238816 - DNA, 25 bp, Artificial
  probe
  misc_feature (1)..(25): SEQ ID NO: 1540; WAN024GBJ_at; Start 384; Stop 408
gggctatcaagtagaacgtagtcaa

SEQ ID NO: 238817 - DNA, 25 bp, Artificial
  probe
  misc_feature (1)..(25): SEQ ID NO: 1540; WAN024GBJ_at; Start 772; Stop 796
gagattttgcaaggtcaaggacgtc

SEQ ID NO: 238818 - DNA, 25 bp, Artificial
  probe
  misc_feature (1)..(25): SEQ ID NO: 1540; WAN024GBJ_at; Start 684; Stop 708
tggacggaagacagtagcagtgatt

SEQ ID NO: 238819 - DNA, 25 bp, Artificial
  probe
  misc_feature (1)..(25): SEQ ID NO: 1540; WAN024GBJ_at; Start 491; Stop 515
tctatgcccttcgtgatgtgaccgc

SEQ ID NO: 238820 - DNA, 25 bp, Artificial
  probe
  misc_feature (1)..(25): SEQ ID NO: 1540; WAN024GBJ_at; Start 787; Stop 811
caaggacgtcaggatattacccact

SEQ ID NO: 238821 - DNA, 25 bp, Artificial
  probe
  misc_feature (1)..(25): SEQ ID NO: 1540; WAN024GBJ_at; Start 208; Stop 232
gacctgtcagccattgatggtgtga

SEQ ID NO: 238822 - DNA, 25 bp, Artificial
  probe
  misc_feature (1)..(25): SEQ ID NO: 1540; WAN024GBJ_at; Start 522; Stop 546
cgacacgattcctttgattgcgagt

SEQ ID NO: 238823 - DNA, 25 bp, Artificial
  probe
  misc_feature (1)..(25): SEQ ID NO: 1540; WAN024GBJ_at; Start 27; Stop 51
aaaacgagacggtcaagaactgact

SEQ ID NO: 238824 - DNA, 25 bp, Artificial
  probe
  misc_feature (1)..(25): SEQ ID NO: 1540; WAN024GBJ_at; Start 146; Stop 170
gaatgacgactcgagaaatctctga

SEQ ID NO: 238825 - DNA, 25 bp, Artificial
  probe
  misc_feature (1)..(25): SEQ ID NO: 1540; WAN024GBJ_at; Start 344; Stop 368
gccatacaggcggaacaattgataa

SEQ ID NO: 238826 - DNA, 25 bp, Artificial
  probe
  misc_feature (1)..(25): SEQ ID NO: 1540; WAN024GBJ_at; Start 463; Stop 487
gaccagctggtcaaagcagataagc

SEQ ID NO: 238827 - DNA, 25 bp, Artificial
  probe
  misc_feature (1)..(25): SEQ ID NO: 1540; WAN024GBJ_at; Start 742; Stop 766
ggaaatcgtctggaaatccttgaag

SEQ ID NO: 238828 - DNA, 25 bp, Artificial
  probe
  misc_feature (1)..(25): SEQ ID NO: 1540; WAN024GBJ_at; Start 1116; Stop 1140
ttttgaaaagaagattggagactcc

SEQ ID NO: 238829 - DNA, 25 bp, Artificial
  probe
  misc_feature (1)..(25): SEQ ID NO: 1540; WAN024GBJ_at; Start 714; Stop 738
tatgagccagcctttgggacgagcg

SEQ ID NO: 238830 - DNA, 25 bp, Artificial
  probe
  misc_feature (1)..(25): SEQ ID NO: 1540; WAN024GBJ_at; Start 1005; Stop 1029
aacgggtgtcatttcagctcttcca

SEQ ID NO: 238831 - DNA, 25 bp, Artificial
  probe
  misc_feature (1)..(25): SEQ ID NO: 1540; WAN024GBJ_at; Start 974; Stop 998
tagctcatgtggtggaaatccctgc

SEQ ID NO: 238832 - DNA, 25 bp, Artificial
  probe
  misc_feature (1)..(25): SEQ ID NO: 1540; WAN024GBJ_at; Start 619; Stop 643
ttcatgaagacggttgatgaggcgc

SEQ ID NO: 238833 - DNA, 25 bp, Artificial
  probe
  misc_feature (1)..(25): SEQ ID NO: 1540; WAN024GBJ_at; Start 291; Stop 315
tcttgttgctagcttcggtgtgcct

SEQ ID NO: 238834 - DNA, 25 bp, Artificial
  probe
  misc_feature (1)..(25): SEQ ID NO: 1540; WAN024GBJ_at; Start 637; Stop 661
gaggcgcgtgagttggctcaaacta

SEQ ID NO: 238835 - DNA, 25 bp, Artificial
  probe
  misc_feature (1)..(25): SEQ ID NO: 1540; WAN024GBJ_at; Start 176; Stop 200
cgatgaatatggttaagactgggca

SEQ ID NO: 238836 - DNA, 25 bp, Artificial
  probe
  misc_feature (1)..(25): SEQ ID NO: 1540; WAN024GBJ_at; Start 939; Stop 963
tggagacttggaagacctctatcgt

SEQ ID NO: 238837 - DNA, 25 bp, Artificial
  probe
  misc_feature (1)..(25): SEQ ID NO: 1540; WAN024GBJ_at; Start 1044; Stop 1068
tctttatgccatgaggctgggtgct

SEQ ID NO: 238838 - DNA, 25 bp, Artificial
  probe
  misc_feature (1)..(25): SEQ ID NO: 1540; WAN024GBJ_at; Start 505; Stop 529
gatgtgaccgcaactgtcgacacga

SEQ ID NO: 238839 - DNA, 25 bp, Artificial
  probe
  misc_feature (1)..(25): SEQ ID NO: 5504; WAN024GBK_at; Start 236; Stop 260
taattaccatcgatgacccaagctt

SEQ ID NO: 238840 - DNA, 25 bp, Artificial
  probe
  misc_feature (1)..(25): SEQ ID NO: 5504; WAN024GBK_at; Start 240; Stop 264
taccatcgatgacccaagctttatg

SEQ ID NO: 238841 - DNA, 25 bp, Artificial
  probe
  misc_feature (1)..(25): SEQ ID NO: 5504; WAN024GBK_at; Start 229; Stop 253
ccaagaataattaccatcgatgacc

SEQ ID NO: 238842 - DNA, 25 bp, Artificial
  probe
  misc_feature (1)..(25): SEQ ID NO: 5504; WAN024GBK_at; Start 223; Stop 247
gtagcaccaagaataattaccatcg

SEQ ID NO: 238843 - DNA, 25 bp, Artificial
  probe
  misc_feature (1)..(25): SEQ ID NO: 5504; WAN024GBK_at; Start 44; Stop 68
ccatcccaaagaatccatctgataa

SEQ ID NO: 238844 - DNA, 25 bp, Artificial
  probe
  misc_feature (1)..(25): SEQ ID NO: 5504; WAN024GBK_at; Start 54; Stop 78
gaatccatctgataaactcccactc

SEQ ID NO: 238845 - DNA, 25 bp, Artificial
  probe
  misc_feature (1)..(25): SEQ ID NO: 5504; WAN024GBK_at; Start 50; Stop 74
caaagaatccatctgataaactccc

SEQ ID NO: 238846 - DNA, 25 bp, Artificial
  probe
  misc_feature (1)..(25): SEQ ID NO: 5504; WAN024GBK_at; Start 141; Stop 165
gcttaaaggctctaaagagacaggt

SEQ ID NO: 238847 - DNA, 25 bp, Artificial
  probe
  misc_feature (1)..(25): SEQ ID NO: 5504; WAN024GBK_at; Start 22; Stop 46
ttctttttgagttttgctacgccca

SEQ ID NO: 238848 - DNA, 25 bp, Artificial
  probe
  misc_feature (1)..(25): SEQ ID NO: 5504; WAN024GBK_at; Start 233; Stop 257
gaataattaccatcgatgacccaag

SEQ ID NO: 238849 - DNA, 25 bp, Artificial
  probe
  misc_feature (1)..(25): SEQ ID NO: 5504; WAN024GBK_at; Start 180; Stop 204
tgagaaagatgatttggtcagcttc

SEQ ID NO: 238850 - DNA, 25 bp, Artificial
  probe
  misc_feature (1)..(25): SEQ ID NO: 5504; WAN024GBK_at; Start 73; Stop 97
ccactcaaagcgttcagggcaatct

SEQ ID NO: 238851 - DNA, 25 bp, Artificial
  probe
  misc_feature (1)..(25): SEQ ID NO: 5504; WAN024GBK_at; Start 207; Stop 231
gcattcgttcttggtagtagcacca

SEQ ID NO: 238852 - DNA, 25 bp, Artificial
  probe
  misc_feature (1)..(25): SEQ ID NO: 5504; WAN024GBK_at; Start 34; Stop 58
tttgctacgcccatcccaaagaatc

SEQ ID NO: 238853 - DNA, 25 bp, Artificial
  probe
  misc_feature (1)..(25): SEQ ID NO: 5504; WAN024GBK_at; Start 218; Stop 242
tggtagtagcaccaagaataattac

SEQ ID NO: 238854 - DNA, 25 bp, Artificial
  probe
  misc_feature (1)..(25): SEQ ID NO: 5504; WAN024GBK_at; Start 26; Stop 50
ttttgagttttgctacgcccatccc

SEQ ID NO: 238855 - DNA, 25 bp, Artificial
  probe
  misc_feature (1)..(25): SEQ ID NO: 5504; WAN024GBK_at; Start 121; Stop 145
tccacggtatttaagataacgctta

SEQ ID NO: 238856 - DNA, 25 bp, Artificial
  probe
  misc_feature (1)..(25): SEQ ID NO: 5504; WAN024GBK_at; Start 190; Stop 214
gatttggtcagcttcttgcattcgt

SEQ ID NO: 238857 - DNA, 25 bp, Artificial
  probe
  misc_feature (1)..(25): SEQ ID NO: 5504; WAN024GBK_at; Start 203; Stop 227
tcttgcattcgttcttggtagtagc

SEQ ID NO: 238858 - DNA, 25 bp, Artificial
  probe
  misc_feature (1)..(25): SEQ ID NO: 5504; WAN024GBK_at; Start 29; Stop 53
tgagttttgctacgcccatcccaaa

SEQ ID NO: 238859 - DNA, 25 bp, Artificial
  probe
  misc_feature (1)..(25): SEQ ID NO: 5504; WAN024GBK_at; Start 68; Stop 92
aactcccactcaaagcgttcagggc

SEQ ID NO: 238860 - DNA, 25 bp, Artificial
  probe
  misc_feature (1)..(25): SEQ ID NO: 5504; WAN024GBK_at; Start 144; Stop 168
taaaggctctaaagagacaggtcaa

SEQ ID NO: 238861 - DNA, 25 bp, Artificial
  probe
  misc_feature (1)..(25): SEQ ID NO: 5504; WAN024GBK_at; Start 254; Stop 278
caagctttatgcttggtgagaaagt

SEQ ID NO: 238862 - DNA, 25 bp, Artificial
  probe
  misc_feature (1)..(25): SEQ ID NO: 5504; WAN024GBK_at; Start 103; Stop 127
catactttctctgacttttccacgg

SEQ ID NO: 238863 - DNA, 25 bp, Artificial
  probe
  misc_feature (1)..(25): SEQ ID NO: 5504; WAN024GBK_at; Start 243; Stop 267
catcgatgacccaagctttatgctt

SEQ ID NO: 238864 - DNA, 25 bp, Artificial
  probe
  misc_feature (1)..(25): SEQ ID NO: 5504; WAN024GBK_at; Start 250; Stop 274
gacccaagctttatgcttggtgaga

SEQ ID NO: 238865 - DNA, 25 bp, Artificial
  probe
  misc_feature (1)..(25): SEQ ID NO: 5504; WAN024GBK_at; Start 198; Stop 222
cagcttcttgcattcgttcttggta

SEQ ID NO: 238866 - DNA, 25 bp, Artificial
  probe
  misc_feature (1)..(25): SEQ ID NO: 5504; WAN024GBK_at; Start 264; Stop 288
gcttggtgagaaagttttttatctc

SEQ ID NO: 238867 - DNA, 25 bp, Artificial
  probe
  misc_feature (1)..(25): SEQ ID NO: 5504; WAN024GBK_at; Start 63; Stop 87
tgataaactcccactcaaagcgttc

SEQ ID NO: 238868 - DNA, 25 bp, Artificial
  probe
  misc_feature (1)..(25): SEQ ID NO: 5504; WAN024GBK_at; Start 135; Stop 159
gataacgcttaaaggctctaaagag

SEQ ID NO: 238869 - DNA, 25 bp, Artificial
  probe
  misc_feature (1)..(25): SEQ ID NO: 5504; WAN024GBK_at; Start 185; Stop 209
aagatgatttggtcagcttcttgca

SEQ ID NO: 238870 - DNA, 25 bp, Artificial
  probe
  misc_feature (1)..(25): SEQ ID NO: 5504; WAN024GBK_at; Start 112; Stop 136
tctgacttttccacggtatttaaga

SEQ ID NO: 238871 - DNA, 25 bp, Artificial
  probe
  misc_feature (1)..(25): SEQ ID NO: 5504; WAN024GBK_at; Start 148; Stop 172
ggctctaaagagacaggtcaatggc

SEQ ID NO: 238872 - DNA, 25 bp, Artificial
  probe
  misc_feature (1)..(25): SEQ ID NO: 5504; WAN024GBK_at; Start 66; Stop 90
taaactcccactcaaagcgttcagg

SEQ ID NO: 238873 - DNA, 25 bp, Artificial
  probe
  misc_feature (1)..(25): SEQ ID NO: 766; WAN024GBL_at; Start 478; Stop 502
gagctagatcaatttctggataaga

SEQ ID NO: 238874 - DNA, 25 bp, Artificial
  probe
  misc_feature (1)..(25): SEQ ID NO: 766; WAN024GBL_at; Start 267; Stop 291
gccattgacctgtctctttagagcc

SEQ ID NO: 238875 - DNA, 25 bp, Artificial
  probe
  misc_feature (1)..(25): SEQ ID NO: 766; WAN024GBL_at; Start 153; Stop 177
gataaaaaactttctcaccaagcat

SEQ ID NO: 238876 - DNA, 25 bp, Artificial
  probe
  misc_feature (1)..(25): SEQ ID NO: 766; WAN024GBL_at; Start 107; Stop 131
ttcaacctggttggcaagacagtga

SEQ ID NO: 238877 - DNA, 25 bp, Artificial
  probe
  misc_feature (1)..(25): SEQ ID NO: 766; WAN024GBL_at; Start 220; Stop 244
caagaacgaatgcaagaagctgacc

SEQ ID NO: 238878 - DNA, 25 bp, Artificial
  probe
  misc_feature (1)..(25): SEQ ID NO: 766; WAN024GBL_at; Start 49; Stop 73
gcagaaaagttatctaactactact

SEQ ID NO: 238879 - DNA, 25 bp, Artificial
  probe
  misc_feature (1)..(25): SEQ ID NO: 766; WAN024GBL_at; Start 175; Stop 199
cataaagcttgggtcatcgatggta

SEQ ID NO: 238880 - DNA, 25 bp, Artificial
  probe
  misc_feature (1)..(25): SEQ ID NO: 766; WAN024GBL_at; Start 186; Stop 210
ggtcatcgatggtaattattcttgg

SEQ ID NO: 238881 - DNA, 25 bp, Artificial
  probe
  misc_feature (1)..(25): SEQ ID NO: 766; WAN024GBL_at; Start 273; Stop 297
gacctgtctctttagagcctttaag

SEQ ID NO: 238882 - DNA, 25 bp, Artificial
  probe
  misc_feature (1)..(25): SEQ ID NO: 766; WAN024GBL_at; Start 92; Stop 116
tggacacactccaatttcaacctgg

SEQ ID NO: 238883 - DNA, 25 bp, Artificial
  probe
  misc_feature (1)..(25): SEQ ID NO: 766; WAN024GBL_at; Start 226; Stop 250
cgaatgcaagaagctgaccaaatca

SEQ ID NO: 238884 - DNA, 25 bp, Artificial
  probe
  misc_feature (1)..(25): SEQ ID NO: 766; WAN024GBL_at; Start 371; Stop 395
ttatcagatggattctttgggatgg

SEQ ID NO: 238885 - DNA, 25 bp, Artificial
  probe
  misc_feature (1)..(25): SEQ ID NO: 766; WAN024GBL_at; Start 70; Stop 94
tactccattccaaaactgcacatgg

SEQ ID NO: 238886 - DNA, 25 bp, Artificial
  probe
  misc_feature (1)..(25): SEQ ID NO: 766; WAN024GBL_at; Start 492; Stop 516
tctggataagaaaaggaagtcctac

SEQ ID NO: 238887 - DNA, 25 bp, Artificial
  probe
  misc_feature (1)..(25): SEQ ID NO: 766; WAN024GBL_at; Start 434; Stop 458
gccaagaatattcacataaagtcac

SEQ ID NO: 238888 - DNA, 25 bp, Artificial
  probe
  misc_feature (1)..(25): SEQ ID NO: 766; WAN024GBL_at; Start 18; Stop 42
cggatattctggttctggtaagtca

SEQ ID NO: 238889 - DNA, 25 bp, Artificial
  probe
  misc_feature (1)..(25): SEQ ID NO: 766; WAN024GBL_at; Start 11; Stop 35
caattatcggatattctggttctgg

SEQ ID NO: 238890 - DNA, 25 bp, Artificial
  probe
  misc_feature (1)..(25): SEQ ID NO: 766; WAN024GBL_at; Start 303; Stop 327
tcttaaataccgtggaaaagtcaga

SEQ ID NO: 238891 - DNA, 25 bp, Artificial
  probe
  misc_feature (1)..(25): SEQ ID NO: 766; WAN024GBL_at; Start 294; Stop 318
taagcgttatcttaaataccgtgga

SEQ ID NO: 238892 - DNA, 25 bp, Artificial
  probe
  misc_feature (1)..(25): SEQ ID NO: 766; WAN024GBL_at; Start 235; Stop 259
gaagctgaccaaatcatctttctca

SEQ ID NO: 238893 - DNA, 25 bp, Artificial
  probe
  misc_feature (1)..(25): SEQ ID NO: 766; WAN024GBL_at; Start 364; Stop 388
tgggagtttatcagatggattcttt

SEQ ID NO: 238894 - DNA, 25 bp, Artificial
  probe
  misc_feature (1)..(25): SEQ ID NO: 766; WAN024GBL_at; Start 196; Stop 220
ggtaattattcttggtgctactacc

SEQ ID NO: 238895 - DNA, 25 bp, Artificial
  probe
  misc_feature (1)..(25): SEQ ID NO: 766; WAN024GBL_at; Start 315; Stop 339
tggaaaagtcagagaaagtatggcg

SEQ ID NO: 238896 - DNA, 25 bp, Artificial
  probe
  misc_feature (1)..(25): SEQ ID NO: 766; WAN024GBL_at; Start 63; Stop 87
taactactactccattccaaaactg

SEQ ID NO: 238897 - DNA, 25 bp, Artificial
  probe
  misc_feature (1)..(25): SEQ ID NO: 766; WAN024GBL_at; Start 98; Stop 122
cactccaatttcaacctggttggca

SEQ ID NO: 238898 - DNA, 25 bp, Artificial
  probe
  misc_feature (1)..(25): SEQ ID NO: 766; WAN024GBL_at; Start 424; Stop 448
caaaaactttgccaagaatattcac

SEQ ID NO: 238899 - DNA, 25 bp, Artificial
  probe
  misc_feature (1)..(25): SEQ ID NO: 766; WAN024GBL_at; Start 80; Stop 104
caaaactgcacatggacacactcca

SEQ ID NO: 238900 - DNA, 25 bp, Artificial
  probe
  misc_feature (1)..(25): SEQ ID NO: 766; WAN024GBL_at; Start 162; Stop 186
ctttctcaccaagcataaagcttgg

SEQ ID NO: 238901 - DNA, 25 bp, Artificial
  probe
  misc_feature (1)..(25): SEQ ID NO: 766; WAN024GBL_at; Start 281; Stop 305
tctttagagcctttaagcgttatct

SEQ ID NO: 238902 - DNA, 25 bp, Artificial
  probe
  misc_feature (1)..(25): SEQ ID NO: 766; WAN024GBL_at; Start 212; Stop 236
gctactaccaagaacgaatgcaaga

SEQ ID NO: 238903 - DNA, 25 bp, Artificial
  probe
  misc_feature (1)..(25): SEQ ID NO: 766; WAN024GBL_at; Start 506; Stop 530
ggaagtcctacaattcataactaat

SEQ ID NO: 238904 - DNA, 25 bp, Artificial
  probe
  misc_feature (1)..(25): SEQ ID NO: 766; WAN024GBL_at; Start 472; Stop 496
cagagagagctagatcaatttctgg

SEQ ID NO: 238905 - DNA, 25 bp, Artificial
  probe
  misc_feature (1)..(25): SEQ ID NO: 766; WAN024GBL_at; Start 463; Stop 487
cttcgaaatcagagagagctagatc

SEQ ID NO: 238906 - DNA, 25 bp, Artificial
  probe
  misc_feature (1)..(25): SEQ ID NO: 766; WAN024GBL_at; Start 208; Stop 232
tggtgctactaccaagaacgaatgc

SEQ ID NO: 238907 - DNA, 25 bp, Artificial
  probe
  misc_feature (1)..(25): SEQ ID NO: 5681; WAN024GBM_at; Start 16; Stop 40
tgtctatccatattgctgctcagca

SEQ ID NO: 238908 - DNA, 25 bp, Artificial
  probe
  misc_feature (1)..(25): SEQ ID NO: 5681; WAN024GBM_at; Start 617; Stop 641
catctctgatagcttggtcaatcca

SEQ ID NO: 238909 - DNA, 25 bp, Artificial
  probe
  misc_feature (1)..(25): SEQ ID NO: 5681; WAN024GBM_at; Start 214; Stop 238
catctatttcgatttatgcgcgtga

SEQ ID NO: 238910 - DNA, 25 bp, Artificial
  probe
  misc_feature (1)..(25): SEQ ID NO: 5681; WAN024GBM_at; Start 230; Stop 254
tgcgcgtgagttaatcgtagactac

SEQ ID NO: 238911 - DNA, 25 bp, Artificial
  probe
  misc_feature (1)..(25): SEQ ID NO: 5681; WAN024GBM_at; Start 384; Stop 408
gattttccacaaattgctagctttg

SEQ ID NO: 238912 - DNA, 25 bp, Artificial
  probe
  misc_feature (1)..(25): SEQ ID NO: 5681; WAN024GBM_at; Start 286; Stop 310
caggttctttgaatgaagaggttca

SEQ ID NO: 238913 - DNA, 25 bp, Artificial
  probe
  misc_feature (1)..(25): SEQ ID NO: 5681; WAN024GBM_at; Start 600; Stop 624
gcgctagctatcatgaccatctctg

SEQ ID NO: 238914 - DNA, 25 bp, Artificial
  probe
  misc_feature (1)..(25): SEQ ID NO: 5681; WAN024GBM_at; Start 416; Stop 440
tgataaagcctaccatatcgccaaa

SEQ ID NO: 238915 - DNA, 25 bp, Artificial
  probe
  misc_feature (1)..(25): SEQ ID NO: 5681; WAN024GBM_at; Start 446; Stop 470
tggtatgactactcacgttgggaac

SEQ ID NO: 238916 - DNA, 25 bp, Artificial
  probe
  misc_feature (1)..(25): SEQ ID NO: 5681; WAN024GBM_at; Start 555; Stop 579
gaagcagcagctctttactatcttg

SEQ ID NO: 238917 - DNA, 25 bp, Artificial
  probe
  misc_feature (1)..(25): SEQ ID NO: 5681; WAN024GBM_at; Start 660; Stop 684
gaagaacgtcaaaataccttcactg

SEQ ID NO: 238918 - DNA, 25 bp, Artificial
  probe
  misc_feature (1)..(25): SEQ ID NO: 5681; WAN024GBM_at; Start 703; Stop 727
tggaaaccttgattgcagaataact

SEQ ID NO: 238919 - DNA, 25 bp, Artificial
  probe
  misc_feature (1)..(25): SEQ ID NO: 5681; WAN024GBM_at; Start 196; Stop 220
gaactgggatgggaatgccatctat

SEQ ID NO: 238920 - DNA, 25 bp, Artificial
  probe
  misc_feature (1)..(25): SEQ ID NO: 5681; WAN024GBM_at; Start 686; Stop 710
tatgatgaaggttggtttggaaacc

SEQ ID NO: 238921 - DNA, 25 bp, Artificial
  probe
  misc_feature (1)..(25): SEQ ID NO: 5681; WAN024GBM_at; Start 538; Stop 562
tcaaggctgtggaaatggaagcagc

SEQ ID NO: 238922 - DNA, 25 bp, Artificial
  probe
  misc_feature (1)..(25): SEQ ID NO: 5681; WAN024GBM_at; Start 585; Stop 609
caataccatgttgatgcgctagcta

SEQ ID NO: 238923 - DNA, 25 bp, Artificial
  probe
  misc_feature (1)..(25): SEQ ID NO: 5681; WAN024GBM_at; Start 154; Stop 178
gttacactggtacttacaagggtca

SEQ ID NO: 238924 - DNA, 25 bp, Artificial
  probe
  misc_feature (1)..(25): SEQ ID NO: 5681; WAN024GBM_at; Start 263; Stop 287
gaaattgattcgtgtgggaactgca

SEQ ID NO: 238925 - DNA, 25 bp, Artificial
  probe
  misc_feature (1)..(25): SEQ ID NO: 5681; WAN024GBM_at; Start 29; Stop 53
tgctgctcagcagggtgaaattgct

SEQ ID NO: 238926 - DNA, 25 bp, Artificial
  probe
  misc_feature (1)..(25): SEQ ID NO: 5681; WAN024GBM_at; Start 50; Stop 74
tgctgataaaattcttcttcctggg

SEQ ID NO: 238927 - DNA, 25 bp, Artificial
  probe
  misc_feature (1)..(25): SEQ ID NO: 5681; WAN024GBM_at; Start 245; Stop 269
cgtagactacggtgtgaagaaattg

SEQ ID NO: 238928 - DNA, 25 bp, Artificial
  probe
  misc_feature (1)..(25): SEQ ID NO: 5681; WAN024GBM_at; Start 352; Stop 376
caaacatcgttcgtaatgactggcc

SEQ ID NO: 238929 - DNA, 25 bp, Artificial
  probe
  misc_feature (1)..(25): SEQ ID NO: 5681; WAN024GBM_at; Start 131; Stop 155
taacgaagtgcgtaacatgtttggt

SEQ ID NO: 238930 - DNA, 25 bp, Artificial
  probe
  misc_feature (1)..(25): SEQ ID NO: 5681; WAN024GBM_at; Start 503; Stop 527
ctttgaaaagaatatcgagcttggt

SEQ ID NO: 238931 - DNA, 25 bp, Artificial
  probe
  misc_feature (1)..(25): SEQ ID NO: 5681; WAN024GBM_at; Start 73; Stop 97
gggatcctcttcgtgctaagtttat

SEQ ID NO: 238932 - DNA, 25 bp, Artificial
  probe
  misc_feature (1)..(25): SEQ ID NO: 5681; WAN024GBM_at; Start 570; Stop 594
tactatcttgctgcccaataccatg

SEQ ID NO: 238933 - DNA, 25 bp, Artificial
  probe
  misc_feature (1)..(25): SEQ ID NO: 5681; WAN024GBM_at; Start 461; Stop 485
cgttgggaacgttttgtcatctgat

SEQ ID NO: 238934 - DNA, 25 bp, Artificial
  probe
  misc_feature (1)..(25): SEQ ID NO: 5681; WAN024GBM_at; Start 628; Stop 652
gcttggtcaatccagacgaagacac

SEQ ID NO: 238935 - DNA, 25 bp, Artificial
  probe
  misc_feature (1)..(25): SEQ ID NO: 5681; WAN024GBM_at; Start 336; Stop 360
gcggctgcaaccaactcaaacatcg

SEQ ID NO: 238936 - DNA, 25 bp, Artificial
  probe
  misc_feature (1)..(25): SEQ ID NO: 5681; WAN024GBM_at; Start 644; Stop 668
cgaagacacaactgcagaagaacgt

SEQ ID NO: 238937 - DNA, 25 bp, Artificial
  probe
  misc_feature (1)..(25): SEQ ID NO: 5681; WAN024GBM_at; Start 317; Stop 341
tgaattagttttggcgcaggcggct

SEQ ID NO: 238938 - DNA, 25 bp, Artificial
  probe
  misc_feature (1)..(25): SEQ ID NO: 5681; WAN024GBM_at; Start 87; Stop 111
gctaagtttattgcggagaatttcc

SEQ ID NO: 238939 - DNA, 25 bp, Artificial
  probe
  misc_feature (1)..(25): SEQ ID NO: 5681; WAN024GBM_at; Start 369; Stop 393
gactggccacagtacgattttccac

SEQ ID NO: 238940 - DNA, 25 bp, Artificial
  probe
  misc_feature (1)..(25): SEQ ID NO: 5681; WAN024GBM_at; Start 182; Stop 206
tgtatctgtcatgggaactgggatg

SEQ ID NO: 238941 - DNA, 25 bp, Artificial
  probe
  misc_feature (1)..(25): SEQ ID NO: 5541; WAN024GBN_at; Start 75; Stop 99
tgccaaagcgcataattcgttgacc

SEQ ID NO: 238942 - DNA, 25 bp, Artificial
  probe
  misc_feature (1)..(25): SEQ ID NO: 5541; WAN024GBN_at; Start 136; Stop 160
tacaagcagactcaagcgaaatctc

SEQ ID NO: 238943 - DNA, 25 bp, Artificial
  probe
  misc_feature (1)..(25): SEQ ID NO: 5541; WAN024GBN_at; Start 16; Stop 40
gctggagctagaaatcaaagccgac

SEQ ID NO: 238944 - DNA, 25 bp, Artificial
  probe
  misc_feature (1)..(25): SEQ ID NO: 5541; WAN024GBN_at; Start 22; Stop 46
gctagaaatcaaagccgactacaac

SEQ ID NO: 238945 - DNA, 25 bp, Artificial
  probe
  misc_feature (1)..(25): SEQ ID NO: 5541; WAN024GBN_at; Start 163; Stop 187
tgtgctatatatgataagactgaga

SEQ ID NO: 238946 - DNA, 25 bp, Artificial
  probe
  misc_feature (1)..(25): SEQ ID NO: 5541; WAN024GBN_at; Start 198; Stop 222
gtcaattcattctcatctctcctta

SEQ ID NO: 238947 - DNA, 25 bp, Artificial
  probe
  misc_feature (1)..(25): SEQ ID NO: 5541; WAN024GBN_at; Start 194; Stop 218
gaaagtcaattcattctcatctctc

SEQ ID NO: 238948 - DNA, 25 bp, Artificial
  probe
  misc_feature (1)..(25): SEQ ID NO: 5541; WAN024GBN_at; Start 1; Stop 25
ttggctgaaattccagctggagcta

SEQ ID NO: 238949 - DNA, 25 bp, Artificial
  probe
  misc_feature (1)..(25): SEQ ID NO: 5541; WAN024GBN_at; Start 144; Stop 168
gactcaagcgaaatctcattgtgct

SEQ ID NO: 238950 - DNA, 25 bp, Artificial
  probe
  misc_feature (1)..(25): SEQ ID NO: 5541; WAN024GBN_at; Start 78; Stop 102
caaagcgcataattcgttgaccaat

SEQ ID NO: 238951 - DNA, 25 bp, Artificial
  probe
  misc_feature (1)..(25): SEQ ID NO: 5541; WAN024GBN_at; Start 132; Stop 156
tatttacaagcagactcaagcgaaa

SEQ ID NO: 238952 - DNA, 25 bp, Artificial
  probe
  misc_feature (1)..(25): SEQ ID NO: 5541; WAN024GBN_at; Start 7; Stop 31
gaaattccagctggagctagaaatc

SEQ ID NO: 238953 - DNA, 25 bp, Artificial
  probe
  misc_feature (1)..(25): SEQ ID NO: 5541; WAN024GBN_at; Start 19; Stop 43
ggagctagaaatcaaagccgactac

SEQ ID NO: 238954 - DNA, 25 bp, Artificial
  probe
  misc_feature (1)..(25): SEQ ID NO: 5541; WAN024GBN_at; Start 177; Stop 201
taagactgagaaattcagaaagtca

SEQ ID NO: 238955 - DNA, 25 bp, Artificial
  probe
  misc_feature (1)..(25): SEQ ID NO: 5541; WAN024GBN_at; Start 41; Stop 65
tacaacagatacaactccgatactt

SEQ ID NO: 238956 - DNA, 25 bp, Artificial
  probe
  misc_feature (1)..(25): SEQ ID NO: 5541; WAN024GBN_at; Start 61; Stop 85
tacttaattttttatgccaaagcgc

SEQ ID NO: 238957 - DNA, 25 bp, Artificial
  probe
  misc_feature (1)..(25): SEQ ID NO: 5541; WAN024GBN_at; Start 141; Stop 165
gcagactcaagcgaaatctcattgt

SEQ ID NO: 238958 - DNA, 25 bp, Artificial
  probe
  misc_feature (1)..(25): SEQ ID NO: 5541; WAN024GBN_at; Start 207; Stop 231
ttctcatctctccttatcatactag

SEQ ID NO: 238959 - DNA, 25 bp, Artificial
  probe
  misc_feature (1)..(25): SEQ ID NO: 5541; WAN024GBN_at; Start 26; Stop 50
gaaatcaaagccgactacaacagat

SEQ ID NO: 238960 - DNA, 25 bp, Artificial
  probe
  misc_feature (1)..(25): SEQ ID NO: 5541; WAN024GBN_at; Start 151; Stop 175
gcgaaatctcattgtgctatatatg

SEQ ID NO: 238961 - DNA, 25 bp, Artificial
  probe
  misc_feature (1)..(25): SEQ ID NO: 5541; WAN024GBN_at; Start 170; Stop 194
tatatgataagactgagaaattcag

SEQ ID NO: 238962 - DNA, 25 bp, Artificial
  probe
  misc_feature (1)..(25): SEQ ID NO: 5541; WAN024GBN_at; Start 45; Stop 69
acagatacaactccgatacttaatt

SEQ ID NO: 238963 - DNA, 25 bp, Artificial
  probe
  misc_feature (1)..(25): SEQ ID NO: 5541; WAN024GBN_at; Start 4; Stop 28
gctgaaattccagctggagctagaa

SEQ ID NO: 238964 - DNA, 25 bp, Artificial
  probe
  misc_feature (1)..(25): SEQ ID NO: 5541; WAN024GBN_at; Start 91; Stop 115
tcgttgaccaattttcattatttct

SEQ ID NO: 238965 - DNA, 25 bp, Artificial
  probe
  misc_feature (1)..(25): SEQ ID NO: 5541; WAN024GBN_at; Start 12; Stop 36
tccagctggagctagaaatcaaagc

SEQ ID NO: 238966 - DNA, 25 bp, Artificial
  probe
  misc_feature (1)..(25): SEQ ID NO: 5541; WAN024GBN_at; Start 35; Stop 59
gccgactacaacagatacaactccg

SEQ ID NO: 238967 - DNA, 25 bp, Artificial
  probe
  misc_feature (1)..(25): SEQ ID NO: 5541; WAN024GBN_at; Start 127; Stop 151
tcgtttatttacaagcagactcaag

SEQ ID NO: 238968 - DNA, 25 bp, Artificial
  probe
  misc_feature (1)..(25): SEQ ID NO: 5541; WAN024GBN_at; Start 14; Stop 38
cagctggagctagaaatcaaagccg

SEQ ID NO: 238969 - DNA, 25 bp, Artificial
  probe
  misc_feature (1)..(25): SEQ ID NO: 5541; WAN024GBN_at; Start 30; Stop 54
tcaaagccgactacaacagatacaa

SEQ ID NO: 238970 - DNA, 25 bp, Artificial
  probe
  misc_feature (1)..(25): SEQ ID NO: 5541; WAN024GBN_at; Start 129; Stop 153
gtttatttacaagcagactcaagcg

SEQ ID NO: 238971 - DNA, 25 bp, Artificial
  probe
  misc_feature (1)..(25): SEQ ID NO: 5541; WAN024GBN_at; Start 83; Stop 107
cgcataattcgttgaccaattttca

SEQ ID NO: 238972 - DNA, 25 bp, Artificial
  probe
  misc_feature (1)..(25): SEQ ID NO: 5541; WAN024GBN_at; Start 122; Stop 146
tcttttcgtttatttacaagcagac

SEQ ID NO: 238973 - DNA, 25 bp, Artificial
  probe
  misc_feature (1)..(25): SEQ ID NO: 5541; WAN024GBN_at; Start 182; Stop 206
ctgagaaattcagaaagtcaattca

SEQ ID NO: 238974 - DNA, 25 bp, Artificial
  probe
  misc_feature (1)..(25): SEQ ID NO: 5541; WAN024GBN_at; Start 38; Stop 62
gactacaacagatacaactccgata

SEQ ID NO: 238975 - DNA, 25 bp, Artificial
  probe
  misc_feature (1)..(25): SEQ ID NO: 4181; WAN024GBO_at; Start 132; Stop 156
gcttgatattaagttttttagccac

SEQ ID NO: 238976 - DNA, 25 bp, Artificial
  probe
  misc_feature (1)..(25): SEQ ID NO: 4181; WAN024GBO_at; Start 225; Stop 249
catccaagttttcacccatcaatgg

SEQ ID NO: 238977 - DNA, 25 bp, Artificial
  probe
  misc_feature (1)..(25): SEQ ID NO: 4181; WAN024GBO_at; Start 103; Stop 127
agtaactccgatatagacaccttca

SEQ ID NO: 238978 - DNA, 25 bp, Artificial
  probe
  misc_feature (1)..(25): SEQ ID NO: 4181; WAN024GBO_at; Start 23; Stop 47
ggaaccgtagacataccaactgcat

SEQ ID NO: 238979 - DNA, 25 bp, Artificial
  probe
  misc_feature (1)..(25): SEQ ID NO: 4181; WAN024GBO_at; Start 30; Stop 54
tagacataccaactgcatctgctcc

SEQ ID NO: 238980 - DNA, 25 bp, Artificial
  probe
  misc_feature (1)..(25): SEQ ID NO: 4181; WAN024GBO_at; Start 249; Stop 273
gattttgccccgtcatgttgatatg

SEQ ID NO: 238981 - DNA, 25 bp, Artificial
  probe
  misc_feature (1)..(25): SEQ ID NO: 4181; WAN024GBO_at; Start 197; Stop 221
gacatatctgggaaacgtgggccaa

SEQ ID NO: 238982 - DNA, 25 bp, Artificial
  probe
  misc_feature (1)..(25): SEQ ID NO: 4181; WAN024GBO_at; Start 142; Stop 166
aagttttttagccacttcatgggca

SEQ ID NO: 238983 - DNA, 25 bp, Artificial
  probe
  misc_feature (1)..(25): SEQ ID NO: 4181; WAN024GBO_at; Start 112; Stop 136
gatatagacaccttcatcaagcttg

SEQ ID NO: 238984 - DNA, 25 bp, Artificial
  probe
  misc_feature (1)..(25): SEQ ID NO: 4181; WAN024GBO_at; Start 194; Stop 218
ctagacatatctgggaaacgtgggc

SEQ ID NO: 238985 - DNA, 25 bp, Artificial
  probe
  misc_feature (1)..(25): SEQ ID NO: 4181; WAN024GBO_at; Start 95; Stop 119
gtcggaccagtaactccgatataga

SEQ ID NO: 238986 - DNA, 25 bp, Artificial
  probe
  misc_feature (1)..(25): SEQ ID NO: 4181; WAN024GBO_at; Start 184; Stop 208
tgtgtaggccctagacatatctggg

SEQ ID NO: 238987 - DNA, 25 bp, Artificial
  probe
  misc_feature (1)..(25): SEQ ID NO: 4181; WAN024GBO_at; Start 241; Stop 265
catcaatggattttgccccgtcatg

SEQ ID NO: 238988 - DNA, 25 bp, Artificial
  probe
  misc_feature (1)..(25): SEQ ID NO: 4181; WAN024GBO_at; Start 154; Stop 178
cacttcatgggcagtggcacggtat

SEQ ID NO: 238989 - DNA, 25 bp, Artificial
  probe
  misc_feature (1)..(25): SEQ ID NO: 4181; WAN024GBO_at; Start 88; Stop 112
ttcataagtcggaccagtaactccg

SEQ ID NO: 238990 - DNA, 25 bp, Artificial
  probe
  misc_feature (1)..(25): SEQ ID NO: 4181; WAN024GBO_at; Start 50; Stop 74
gctcccagtgtcttataggaacgaa

SEQ ID NO: 238991 - DNA, 25 bp, Artificial
  probe
  misc_feature (1)..(25): SEQ ID NO: 4181; WAN024GBO_at; Start 77; Stop 101
tctgctggtgtttcataagtcggac

SEQ ID NO: 238992 - DNA, 25 bp, Artificial
  probe
  misc_feature (1)..(25): SEQ ID NO: 4181; WAN024GBO_at; Start 171; Stop 195
cacggtattctggtgtgtaggccct

SEQ ID NO: 238993 - DNA, 25 bp, Artificial
  probe
  misc_feature (1)..(25): SEQ ID NO: 4181; WAN024GBO_at; Start 8; Stop 32
gccacgataacttcaggaaccgtag

SEQ ID NO: 238994 - DNA, 25 bp, Artificial
  probe
  misc_feature (1)..(25): SEQ ID NO: 4181; WAN024GBO_at; Start 255; Stop 279
gccccgtcatgttgatatggtctga

SEQ ID NO: 238995 - DNA, 25 bp, Artificial
  probe
  misc_feature (1)..(25): SEQ ID NO: 4181; WAN024GBO_at; Start 1; Stop 25
gtgggctgccacgataacttcagga

SEQ ID NO: 238996 - DNA, 25 bp, Artificial
  probe
  misc_feature (1)..(25): SEQ ID NO: 4181; WAN024GBO_at; Start 54; Stop 78
ccagtgtcttataggaacgaatttc

SEQ ID NO: 238997 - DNA, 25 bp, Artificial
  probe
  misc_feature (1)..(25): SEQ ID NO: 4181; WAN024GBO_at; Start 214; Stop 238
tgggccaaagtcatccaagttttca

SEQ ID NO: 238998 - DNA, 25 bp, Artificial
  probe
  misc_feature (1)..(25): SEQ ID NO: 4181; WAN024GBO_at; Start 60; Stop 84
tcttataggaacgaatttctgctgg

SEQ ID NO: 238999 - DNA, 25 bp, Artificial
  probe
  misc_feature (1)..(25): SEQ ID NO: 4181; WAN024GBO_at; Start 188; Stop 212
taggccctagacatatctgggaaac

SEQ ID NO: 239000 - DNA, 25 bp, Artificial
  probe
  misc_feature (1)..(25): SEQ ID NO: 4181; WAN024GBO_at; Start 201; Stop 225
tatctgggaaacgtgggccaaagtc

SEQ ID NO: 239001 - DNA, 25 bp, Artificial
  probe
  misc_feature (1)..(25): SEQ ID NO: 4181; WAN024GBO_at; Start 208; Stop 232
gaaacgtgggccaaagtcatccaag

SEQ ID NO: 239002 - DNA, 25 bp, Artificial
  probe
  misc_feature (1)..(25): SEQ ID NO: 4181; WAN024GBO_at; Start 67; Stop 91
ggaacgaatttctgctggtgtttca

SEQ ID NO: 239003 - DNA, 25 bp, Artificial
  probe
  misc_feature (1)..(25): SEQ ID NO: 4181; WAN024GBO_at; Start 176; Stop 200
tattctggtgtgtaggccctagaca

SEQ ID NO: 239004 - DNA, 25 bp, Artificial
  probe
  misc_feature (1)..(25): SEQ ID NO: 4181; WAN024GBO_at; Start 44; Stop 68
gcatctgctcccagtgtcttatagg

SEQ ID NO: 239005 - DNA, 25 bp, Artificial
  probe
  misc_feature (1)..(25): SEQ ID NO: 4181; WAN024GBO_at; Start 15; Stop 39
taacttcaggaaccgtagacatacc

SEQ ID NO: 239006 - DNA, 25 bp, Artificial
  probe
  misc_feature (1)..(25): SEQ ID NO: 4181; WAN024GBO_at; Start 83; Stop 107
ggtgtttcataagtcggaccagtaa

SEQ ID NO: 239007 - DNA, 25 bp, Artificial
  probe
  misc_feature (1)..(25): SEQ ID NO: 4181; WAN024GBO_at; Start 116; Stop 140
tagacaccttcatcaagcttgatat

SEQ ID NO: 239008 - DNA, 25 bp, Artificial
  probe
  misc_feature (1)..(25): SEQ ID NO: 4181; WAN024GBO_at; Start 157; Stop 181
ttcatgggcagtggcacggtattct

SEQ ID NO: 239009 - DNA, 25 bp, Artificial
  probe
  misc_feature (1)..(25): SEQ ID NO: 1391; WAN024GBP_at; Start 88; Stop 112
tcaggacttggagaattggcagaag

SEQ ID NO: 239010 - DNA, 25 bp, Artificial
  probe
  misc_feature (1)..(25): SEQ ID NO: 1391; WAN024GBP_at; Start 53; Stop 77
gaattgcagcccctgagttcggtct

SEQ ID NO: 239011 - DNA, 25 bp, Artificial
  probe
  misc_feature (1)..(25): SEQ ID NO: 1391; WAN024GBP_at; Start 173; Stop 197
tagtcggtcatgctggtaaattggt

SEQ ID NO: 239012 - DNA, 25 bp, Artificial
  probe
  misc_feature (1)..(25): SEQ ID NO: 1391; WAN024GBP_at; Start 323; Stop 347
ttattgtaaccaatgcagctggcgg

SEQ ID NO: 239013 - DNA, 25 bp, Artificial
  probe
  misc_feature (1)..(25): SEQ ID NO: 1391; WAN024GBP_at; Start 119; Stop 143
aaaatccagttgtagtagactatgc

SEQ ID NO: 239014 - DNA, 25 bp, Artificial
  probe
  misc_feature (1)..(25): SEQ ID NO: 1391; WAN024GBP_at; Start 380; Stop 404
tctcagaccatatcaacatgacggg

SEQ ID NO: 239015 - DNA, 25 bp, Artificial
  probe
  misc_feature (1)..(25): SEQ ID NO: 1391; WAN024GBP_at; Start 24; Stop 48
tgaaactgctactttcctgaaagaa

SEQ ID NO: 239016 - DNA, 25 bp, Artificial
  probe
  misc_feature (1)..(25): SEQ ID NO: 1391; WAN024GBP_at; Start 353; Stop 377
gatttggtcctggtaccttgatggc

SEQ ID NO: 239017 - DNA, 25 bp, Artificial
  probe
  misc_feature (1)..(25): SEQ ID NO: 1391; WAN024GBP_at; Start 204; Stop 228
tgaactggcaggtcgcaaggtcttg

SEQ ID NO: 239018 - DNA, 25 bp, Artificial
  probe
  misc_feature (1)..(25): SEQ ID NO: 1391; WAN024GBP_at; Start 542; Stop 566
tctatatcggagttactggtccgac

SEQ ID NO: 239019 - DNA, 25 bp, Artificial
  probe
  misc_feature (1)..(25): SEQ ID NO: 1391; WAN024GBP_at; Start 762; Stop 786
taaaggtgatttcaaaggcttgctt

SEQ ID NO: 239020 - DNA, 25 bp, Artificial
  probe
  misc_feature (1)..(25): SEQ ID NO: 1391; WAN024GBP_at; Start 630; Stop 654
tacggttcctgaagttatcgtggca

SEQ ID NO: 239021 - DNA, 25 bp, Artificial
  probe
  misc_feature (1)..(25): SEQ ID NO: 1391; WAN024GBP_at; Start 105; Stop 129
ggcagaagaaatcgaaaatccagtt

SEQ ID NO: 239022 - DNA, 25 bp, Artificial
  probe
  misc_feature (1)..(25): SEQ ID NO: 1391; WAN024GBP_at; Start 443; Stop 467
gcccacgtttcccagatatgtctag

SEQ ID NO: 239023 - DNA, 25 bp, Artificial
  probe
  misc_feature (1)..(25): SEQ ID NO: 1391; WAN024GBP_at; Start 709; Stop 733
ggtttccaagaagaactcaatcacg

SEQ ID NO: 239024 - DNA, 25 bp, Artificial
  probe
  misc_feature (1)..(25): SEQ ID NO: 1391; WAN024GBP_at; Start 730; Stop 754
cacgaagaagttgtagaagtgactg

SEQ ID NO: 239025 - DNA, 25 bp, Artificial
  probe
  misc_feature (1)..(25): SEQ ID NO: 1391; WAN024GBP_at; Start 159; Stop 183
gggccgttcaacagtagtcggtcat

SEQ ID NO: 239026 - DNA, 25 bp, Artificial
  probe
  misc_feature (1)..(25): SEQ ID NO: 1391; WAN024GBP_at; Start 39; Stop 63
cctgaaagaaaagggaattgcagcc

SEQ ID NO: 239027 - DNA, 25 bp, Artificial
  probe
  misc_feature (1)..(25): SEQ ID NO: 1391; WAN024GBP_at; Start 264; Stop 288
tcctctggaagtggtgactttccca

SEQ ID NO: 239028 - DNA, 25 bp, Artificial
  probe
  misc_feature (1)..(25): SEQ ID NO: 1391; WAN024GBP_at; Start 424; Stop 448
gaaaacttggatgactttggcccac

SEQ ID NO: 239029 - DNA, 25 bp, Artificial
  probe
  misc_feature (1)..(25): SEQ ID NO: 1391; WAN024GBP_at; Start 593; Stop 617
cctataagacactgggagcagatgc

SEQ ID NO: 239030 - DNA, 25 bp, Artificial
  probe
  misc_feature (1)..(25): SEQ ID NO: 1391; WAN024GBP_at; Start 495; Stop 519
tgcccatgaagtggctaaaaaactt

SEQ ID NO: 239031 - DNA, 25 bp, Artificial
  probe
  misc_feature (1)..(25): SEQ ID NO: 1391; WAN024GBP_at; Start 247; Stop 271
catttctatgaagggaatcctctgg

SEQ ID NO: 239032 - DNA, 25 bp, Artificial
  probe
  misc_feature (1)..(25): SEQ ID NO: 1391; WAN024GBP_at; Start 778; Stop 802
ggcttgcttaaagcgattcttgctg

SEQ ID NO: 239033 - DNA, 25 bp, Artificial
  probe
  misc_feature (1)..(25): SEQ ID NO: 1391; WAN024GBP_at; Start 189; Stop 213
taaattggtatatggtgaactggca

SEQ ID NO: 239034 - DNA, 25 bp, Artificial
  probe
  misc_feature (1)..(25): SEQ ID NO: 1391; WAN024GBP_at; Start 459; Stop 483
tatgtctagggcctacacaccagaa

SEQ ID NO: 239035 - DNA, 25 bp, Artificial
  probe
  misc_feature (1)..(25): SEQ ID NO: 1391; WAN024GBP_at; Start 559; Stop 583
ggtccgacttatgaaacaccagcag

SEQ ID NO: 239036 - DNA, 25 bp, Artificial
  probe
  misc_feature (1)..(25): SEQ ID NO: 1391; WAN024GBP_at; Start 136; Stop 160
gactatgctgagattccaaactggg

SEQ ID NO: 239037 - DNA, 25 bp, Artificial
  probe
  misc_feature (1)..(25): SEQ ID NO: 1391; WAN024GBP_at; Start 658; Stop 682
cactctggcttgaaagttctgggaa

SEQ ID NO: 239038 - DNA, 25 bp, Artificial
  probe
  misc_feature (1)..(25): SEQ ID NO: 1391; WAN024GBP_at; Start 215; Stop 239
gtcgcaaggtcttggctcttcaagg

SEQ ID NO: 239039 - DNA, 25 bp, Artificial
  probe
  misc_feature (1)..(25): SEQ ID NO: 1391; WAN024GBP_at; Start 611; Stop 635
cagatgcagttggtatgtctacggt

SEQ ID NO: 239040 - DNA, 25 bp, Artificial
  probe
  misc_feature (1)..(25): SEQ ID NO: 1391; WAN024GBP_at; Start 683; Stop 707
tttcatgtatcactaactttgcggc

SEQ ID NO: 239041 - DNA, 25 bp, Artificial
  probe
  misc_feature (1)..(25): SEQ ID NO: 1391; WAN024GBP_at; Start 284; Stop 308
tcccagttcgtgtgatgaaagttct

SEQ ID NO: 239042 - DNA, 25 bp, Artificial
  probe
  misc_feature (1)..(25): SEQ ID NO: 1391; WAN024GBP_at; Start 643; Stop 667
gttatcgtggcagcccactctggct

SEQ ID NO: 239043 - DNA, 25 bp, Artificial
  probe
  misc_feature (1)..(25): SEQ ID NO: 3055; WAN024GBQ_at; Start 89; Stop 113
tgctttcagctgctacagtcttaag

SEQ ID NO: 239044 - DNA, 25 bp, Artificial
  probe
  misc_feature (1)..(25): SEQ ID NO: 3055; WAN024GBQ_at; Start 151; Stop 175
gccatgtttgggacattcaaaccaa

SEQ ID NO: 239045 - DNA, 25 bp, Artificial
  probe
  misc_feature (1)..(25): SEQ ID NO: 3055; WAN024GBQ_at; Start 155; Stop 179
tgtttgggacattcaaaccaactgt

SEQ ID NO: 239046 - DNA, 25 bp, Artificial
  probe
  misc_feature (1)..(25): SEQ ID NO: 3055; WAN024GBQ_at; Start 104; Stop 128
cagtcttaagaggagtttcacgagg

SEQ ID NO: 239047 - DNA, 25 bp, Artificial
  probe
  misc_feature (1)..(25): SEQ ID NO: 3055; WAN024GBQ_at; Start 95; Stop 119
cagctgctacagtcttaagaggagt

SEQ ID NO: 239048 - DNA, 25 bp, Artificial
  probe
  misc_feature (1)..(25): SEQ ID NO: 3055; WAN024GBQ_at; Start 161; Stop 185
ggacattcaaaccaactgtttttga

SEQ ID NO: 239049 - DNA, 25 bp, Artificial
  probe
  misc_feature (1)..(25): SEQ ID NO: 3055; WAN024GBQ_at; Start 2; Stop 26
tgttgagtcccatgatttcccagtg

SEQ ID NO: 239050 - DNA, 25 bp, Artificial
  probe
  misc_feature (1)..(25): SEQ ID NO: 3055; WAN024GBQ_at; Start 82; Stop 106
gttggattgctttcagctgctacag

SEQ ID NO: 239051 - DNA, 25 bp, Artificial
  probe
  misc_feature (1)..(25): SEQ ID NO: 3055; WAN024GBQ_at; Start 255; Stop 279
tgcaccgattcctacagaatccagt

SEQ ID NO: 239052 - DNA, 25 bp, Artificial
  probe
  misc_feature (1)..(25): SEQ ID NO: 3055; WAN024GBQ_at; Start 120; Stop 144
ttcacgaggaatatttccaagacct

SEQ ID NO: 239053 - DNA, 25 bp, Artificial
  probe
  misc_feature (1)..(25): SEQ ID NO: 3055; WAN024GBQ_at; Start 7; Stop 31
agtcccatgatttcccagtgtccag

SEQ ID NO: 239054 - DNA, 25 bp, Artificial
  probe
  misc_feature (1)..(25): SEQ ID NO: 3055; WAN024GBQ_at; Start 200; Stop 224
tgtcagaagctccatctggaacccc

SEQ ID NO: 239055 - DNA, 25 bp, Artificial
  probe
  misc_feature (1)..(25): SEQ ID NO: 3055; WAN024GBQ_at; Start 38; Stop 62
tatccttaccaagagatacttcctc

SEQ ID NO: 239056 - DNA, 25 bp, Artificial
  probe
  misc_feature (1)..(25): SEQ ID NO: 3055; WAN024GBQ_at; Start 50; Stop 74
gagatacttcctctaattttgttgc

SEQ ID NO: 239057 - DNA, 25 bp, Artificial
  probe
  misc_feature (1)..(25): SEQ ID NO: 3055; WAN024GBQ_at; Start 214; Stop 238
tctggaacccctgcattgacaaagt

SEQ ID NO: 239058 - DNA, 25 bp, Artificial
  probe
  misc_feature (1)..(25): SEQ ID NO: 3055; WAN024GBQ_at; Start 141; Stop 165
acctattttagccatgtttgggaca

SEQ ID NO: 239059 - DNA, 25 bp, Artificial
  probe
  misc_feature (1)..(25): SEQ ID NO: 3055; WAN024GBQ_at; Start 29; Stop 53
cagtcatagtatccttaccaagaga

SEQ ID NO: 239060 - DNA, 25 bp, Artificial
  probe
  misc_feature (1)..(25): SEQ ID NO: 3055; WAN024GBQ_at; Start 113; Stop 137
gaggagtttcacgaggaatatttcc

SEQ ID NO: 239061 - DNA, 25 bp, Artificial
  probe
  misc_feature (1)..(25): SEQ ID NO: 3055; WAN024GBQ_at; Start 15; Stop 39
gatttcccagtgtccagtcatagta

SEQ ID NO: 239062 - DNA, 25 bp, Artificial
  probe
  misc_feature (1)..(25): SEQ ID NO: 3055; WAN024GBQ_at; Start 63; Stop 87
taattttgttgcatatccagttgga

SEQ ID NO: 239063 - DNA, 25 bp, Artificial
  probe
  misc_feature (1)..(25): SEQ ID NO: 3055; WAN024GBQ_at; Start 130; Stop 154
atatttccaagacctattttagcca

SEQ ID NO: 239064 - DNA, 25 bp, Artificial
  probe
  misc_feature (1)..(25): SEQ ID NO: 3055; WAN024GBQ_at; Start 184; Stop 208
gaaatgtgtcccagtgtgtcagaag

SEQ ID NO: 239065 - DNA, 25 bp, Artificial
  probe
  misc_feature (1)..(25): SEQ ID NO: 3055; WAN024GBQ_at; Start 221; Stop 245
cccctgcattgacaaagttattagc

SEQ ID NO: 239066 - DNA, 25 bp, Artificial
  probe
  misc_feature (1)..(25): SEQ ID NO: 3055; WAN024GBQ_at; Start 249; Stop 273
tggtgctgcaccgattcctacagaa

SEQ ID NO: 239067 - DNA, 25 bp, Artificial
  probe
  misc_feature (1)..(25): SEQ ID NO: 3055; WAN024GBQ_at; Start 195; Stop 219
cagtgtgtcagaagctccatctgga

SEQ ID NO: 239068 - DNA, 25 bp, Artificial
  probe
  misc_feature (1)..(25): SEQ ID NO: 3055; WAN024GBQ_at; Start 238; Stop 262
ttattagcatctggtgctgcaccga

SEQ ID NO: 239069 - DNA, 25 bp, Artificial
  probe
  misc_feature (1)..(25): SEQ ID NO: 3055; WAN024GBQ_at; Start 76; Stop 100
tatccagttggattgctttcagctg

SEQ ID NO: 239070 - DNA, 25 bp, Artificial
  probe
  misc_feature (1)..(25): SEQ ID NO: 3055; WAN024GBQ_at; Start 267; Stop 291
tacagaatccagtaccaccaaatga

SEQ ID NO: 239071 - DNA, 25 bp, Artificial
  probe
  misc_feature (1)..(25): SEQ ID NO: 3055; WAN024GBQ_at; Start 190; Stop 214
tgtcccagtgtgtcagaagctccat

SEQ ID NO: 239072 - DNA, 25 bp, Artificial
  probe
  misc_feature (1)..(25): SEQ ID NO: 3055; WAN024GBQ_at; Start 172; Stop 196
ccaactgtttttgaaatgtgtccca

SEQ ID NO: 239073 - DNA, 25 bp, Artificial
  probe
  misc_feature (1)..(25): SEQ ID NO: 3055; WAN024GBQ_at; Start 208; Stop 232
gctccatctggaacccctgcattga

SEQ ID NO: 239074 - DNA, 25 bp, Artificial
  probe
  misc_feature (1)..(25): SEQ ID NO: 3055; WAN024GBQ_at; Start 230; Stop 254
tgacaaagttattagcatctggtgc

SEQ ID NO: 239075 - DNA, 25 bp, Artificial
  probe
  misc_feature (1)..(25): SEQ ID NO: 3055; WAN024GBQ_at; Start 107; Stop 131
tcttaagaggagtttcacgaggaat

SEQ ID NO: 239076 - DNA, 25 bp, Artificial
  probe
  misc_feature (1)..(25): SEQ ID NO: 3055; WAN024GBQ_at; Start 22; Stop 46
cagtgtccagtcatagtatccttac

SEQ ID NO: 239077 - DNA, 25 bp, Artificial
  probe
  misc_feature (1)..(25): SEQ ID NO: 2713; WAN024GBR_at; Start 255; Stop 279
taatgtcttcgtgggcagcaatctg

SEQ ID NO: 239078 - DNA, 25 bp, Artificial
  probe
  misc_feature (1)..(25): SEQ ID NO: 2713; WAN024GBR_at; Start 25; Stop 49
gatatcgttgattttacccacagca

SEQ ID NO: 239079 - DNA, 25 bp, Artificial
  probe
  misc_feature (1)..(25): SEQ ID NO: 2713; WAN024GBR_at; Start 210; Stop 234
tcgaacgagcgtattcacagatacg

SEQ ID NO: 239080 - DNA, 25 bp, Artificial
  probe
  misc_feature (1)..(25): SEQ ID NO: 2713; WAN024GBR_at; Start 260; Stop 284
tcttcgtgggcagcaatctgcaaaa

SEQ ID NO: 239081 - DNA, 25 bp, Artificial
  probe
  misc_feature (1)..(25): SEQ ID NO: 2713; WAN024GBR_at; Start 144; Stop 168
tacctggttcacctacataagggcg

SEQ ID NO: 239082 - DNA, 25 bp, Artificial
  probe
  misc_feature (1)..(25): SEQ ID NO: 2713; WAN024GBR_at; Start 199; Stop 223
ctcaagggtaatcgaacgagcgtat

SEQ ID NO: 239083 - DNA, 25 bp, Artificial
  probe
  misc_feature (1)..(25): SEQ ID NO: 2713; WAN024GBR_at; Start 2; Stop 26
tggttgataccagcaccgttaaaga

SEQ ID NO: 239084 - DNA, 25 bp, Artificial
  probe
  misc_feature (1)..(25): SEQ ID NO: 2713; WAN024GBR_at; Start 194; Stop 218
ggacgctcaagggtaatcgaacgag

SEQ ID NO: 239085 - DNA, 25 bp, Artificial
  probe
  misc_feature (1)..(25): SEQ ID NO: 2713; WAN024GBR_at; Start 190; Stop 214
ggcaggacgctcaagggtaatcgaa

SEQ ID NO: 239086 - DNA, 25 bp, Artificial
  probe
  misc_feature (1)..(25): SEQ ID NO: 2713; WAN024GBR_at; Start 113; Stop 137
aagtcacgacggtttgccgtacgag

SEQ ID NO: 239087 - DNA, 25 bp, Artificial
  probe
  misc_feature (1)..(25): SEQ ID NO: 2713; WAN024GBR_at; Start 172; Stop 196
aatgatgcgaccaagaagggcagga

SEQ ID NO: 239088 - DNA, 25 bp, Artificial
  probe
  misc_feature (1)..(25): SEQ ID NO: 2713; WAN024GBR_at; Start 34; Stop 58
gattttacccacagcataagtatcg

SEQ ID NO: 239089 - DNA, 25 bp, Artificial
  probe
  misc_feature (1)..(25): SEQ ID NO: 2713; WAN024GBR_at; Start 229; Stop 253
gatacggtacaattcatccaaagga

SEQ ID NO: 239090 - DNA, 25 bp, Artificial
  probe
  misc_feature (1)..(25): SEQ ID NO: 2713; WAN024GBR_at; Start 268; Stop 292
ggcagcaatctgcaaaacagggtca

SEQ ID NO: 239091 - DNA, 25 bp, Artificial
  probe
  misc_feature (1)..(25): SEQ ID NO: 2713; WAN024GBR_at; Start 125; Stop 149
tttgccgtacgagtgaagttacctg

SEQ ID NO: 239092 - DNA, 25 bp, Artificial
  probe
  misc_feature (1)..(25): SEQ ID NO: 2713; WAN024GBR_at; Start 65; Stop 89
gcctcattcaatttatccaaaacag

SEQ ID NO: 239093 - DNA, 25 bp, Artificial
  probe
  misc_feature (1)..(25): SEQ ID NO: 2713; WAN024GBR_at; Start 177; Stop 201
tgcgaccaagaagggcaggacgctc

SEQ ID NO: 239094 - DNA, 25 bp, Artificial
  probe
  misc_feature (1)..(25): SEQ ID NO: 2713; WAN024GBR_at; Start 152; Stop 176
tcacctacataagggcgagcaatga

SEQ ID NO: 239095 - DNA, 25 bp, Artificial
  probe
  misc_feature (1)..(25): SEQ ID NO: 2713; WAN024GBR_at; Start 70; Stop 94
attcaatttatccaaaacagttggg

SEQ ID NO: 239096 - DNA, 25 bp, Artificial
  probe
  misc_feature (1)..(25): SEQ ID NO: 2713; WAN024GBR_at; Start 132; Stop 156
tacgagtgaagttacctggttcacc

SEQ ID NO: 239097 - DNA, 25 bp, Artificial
  probe
  misc_feature (1)..(25): SEQ ID NO: 2713; WAN024GBR_at; Start 106; Stop 130
tacagccaagtcacgacggtttgcc

SEQ ID NO: 239098 - DNA, 25 bp, Artificial
  probe
  misc_feature (1)..(25): SEQ ID NO: 2713; WAN024GBR_at; Start 251; Stop 275
ggaataatgtcttcgtgggcagcaa

SEQ ID NO: 239099 - DNA, 25 bp, Artificial
  probe
  misc_feature (1)..(25): SEQ ID NO: 2713; WAN024GBR_at; Start 215; Stop 239
cgagcgtattcacagatacggtaca

SEQ ID NO: 239100 - DNA, 25 bp, Artificial
  probe
  misc_feature (1)..(25): SEQ ID NO: 2713; WAN024GBR_at; Start 159; Stop 183
cataagggcgagcaatgatgcgacc

SEQ ID NO: 239101 - DNA, 25 bp, Artificial
  probe
  misc_feature (1)..(25): SEQ ID NO: 2713; WAN024GBR_at; Start 168; Stop 192
gagcaatgatgcgaccaagaagggc

SEQ ID NO: 239102 - DNA, 25 bp, Artificial
  probe
  misc_feature (1)..(25): SEQ ID NO: 2713; WAN024GBR_at; Start 43; Stop 67
cacagcataagtatcgataccagcc

SEQ ID NO: 239103 - DNA, 25 bp, Artificial
  probe
  misc_feature (1)..(25): SEQ ID NO: 2713; WAN024GBR_at; Start 205; Stop 229
ggtaatcgaacgagcgtattcacag

SEQ ID NO: 239104 - DNA, 25 bp, Artificial
  probe
  misc_feature (1)..(25): SEQ ID NO: 2713; WAN024GBR_at; Start 243; Stop 267
catccaaaggaataatgtcttcgtg

SEQ ID NO: 239105 - DNA, 25 bp, Artificial
  probe
  misc_feature (1)..(25): SEQ ID NO: 2713; WAN024GBR_at; Start 96; Stop 120
aaaatggagatacagccaagtcacg

SEQ ID NO: 239106 - DNA, 25 bp, Artificial
  probe
  misc_feature (1)..(25): SEQ ID NO: 2713; WAN024GBR_at; Start 273; Stop 297
caatctgcaaaacagggtcagctga

SEQ ID NO: 239107 - DNA, 25 bp, Artificial
  probe
  misc_feature (1)..(25): SEQ ID NO: 2713; WAN024GBR_at; Start 101; Stop 125
ggagatacagccaagtcacgacggt

SEQ ID NO: 239108 - DNA, 25 bp, Artificial
  probe
  misc_feature (1)..(25): SEQ ID NO: 2713; WAN024GBR_at; Start 148; Stop 172
tggttcacctacataagggcgagca

SEQ ID NO: 239109 - DNA, 25 bp, Artificial
  probe
  misc_feature (1)..(25): SEQ ID NO: 2713; WAN024GBR_at; Start 11; Stop 35
ccagcaccgttaaagatatcgttga

SEQ ID NO: 239110 - DNA, 25 bp, Artificial
  probe
  misc_feature (1)..(25): SEQ ID NO: 2713; WAN024GBR_at; Start 50; Stop 74
taagtatcgataccagcctcattca

SEQ ID NO: 239111 - DNA, 25 bp, Artificial
  probe
  misc_feature (1)..(25): SEQ ID NO: 5614; WAN024GBS_at; Start 225; Stop 249
tacctccatcattctcagttcttat

SEQ ID NO: 239112 - DNA, 25 bp, Artificial
  probe
  misc_feature (1)..(25): SEQ ID NO: 5614; WAN024GBS_at; Start 81; Stop 105
gcaatccttcttccttgatacgacg

SEQ ID NO: 239113 - DNA, 25 bp, Artificial
  probe
  misc_feature (1)..(25): SEQ ID NO: 5614; WAN024GBS_at; Start 302; Stop 326
catcaatctttctttaaaaatatgc

SEQ ID NO: 239114 - DNA, 25 bp, Artificial
  probe
  misc_feature (1)..(25): SEQ ID NO: 5614; WAN024GBS_at; Start 139; Stop 163
gcctgttccaagtccaacgaccatt

SEQ ID NO: 239115 - DNA, 25 bp, Artificial
  probe
  misc_feature (1)..(25): SEQ ID NO: 5614; WAN024GBS_at; Start 322; Stop 346
tatgcattttatttttaccaaacga

SEQ ID NO: 239116 - DNA, 25 bp, Artificial
  probe
  misc_feature (1)..(25): SEQ ID NO: 5614; WAN024GBS_at; Start 207; Stop 231
tcagattttccaccgatttacctcc

SEQ ID NO: 239117 - DNA, 25 bp, Artificial
  probe
  misc_feature (1)..(25): SEQ ID NO: 5614; WAN024GBS_at; Start 45; Stop 69
tagtggtcacactagaagttgttac

SEQ ID NO: 239118 - DNA, 25 bp, Artificial
  probe
  misc_feature (1)..(25): SEQ ID NO: 5614; WAN024GBS_at; Start 52; Stop 76
cacactagaagttgttacagctgta

SEQ ID NO: 239119 - DNA, 25 bp, Artificial
  probe
  misc_feature (1)..(25): SEQ ID NO: 5614; WAN024GBS_at; Start 240; Stop 264
cagttcttattttactatgaaaccg

SEQ ID NO: 239120 - DNA, 25 bp, Artificial
  probe
  misc_feature (1)..(25): SEQ ID NO: 5614; WAN024GBS_at; Start 16; Stop 40
gagcgggatattaaggccttctgcc

SEQ ID NO: 239121 - DNA, 25 bp, Artificial
  probe
  misc_feature (1)..(25): SEQ ID NO: 5614; WAN024GBS_at; Start 111; Stop 135
tttcttcgacaaaataataggcagt

SEQ ID NO: 239122 - DNA, 25 bp, Artificial
  probe
  misc_feature (1)..(25): SEQ ID NO: 5614; WAN024GBS_at; Start 218; Stop 242
accgatttacctccatcattctcag

SEQ ID NO: 239123 - DNA, 25 bp, Artificial
  probe
  misc_feature (1)..(25): SEQ ID NO: 5614; WAN024GBS_at; Start 102; Stop 126
gacgaccgatttcttcgacaaaata

SEQ ID NO: 239124 - DNA, 25 bp, Artificial
  probe
  misc_feature (1)..(25): SEQ ID NO: 5614; WAN024GBS_at; Start 2; Stop 26
tggtcaatagacttgagcgggatat

SEQ ID NO: 239125 - DNA, 25 bp, Artificial
  probe
  misc_feature (1)..(25): SEQ ID NO: 5614; WAN024GBS_at; Start 35; Stop 59
tctgcctgtttagtggtcacactag

SEQ ID NO: 239126 - DNA, 25 bp, Artificial
  probe
  misc_feature (1)..(25): SEQ ID NO: 5614; WAN024GBS_at; Start 97; Stop 121
gatacgacgaccgatttcttcgaca

SEQ ID NO: 239127 - DNA, 25 bp, Artificial
  probe
  misc_feature (1)..(25): SEQ ID NO: 5614; WAN024GBS_at; Start 31; Stop 55
gccttctgcctgtttagtggtcaca

SEQ ID NO: 239128 - DNA, 25 bp, Artificial
  probe
  misc_feature (1)..(25): SEQ ID NO: 5614; WAN024GBS_at; Start 161; Stop 185
attccatcgctcacgaactcagcag

SEQ ID NO: 239129 - DNA, 25 bp, Artificial
  probe
  misc_feature (1)..(25): SEQ ID NO: 5614; WAN024GBS_at; Start 11; Stop 35
gacttgagcgggatattaaggcctt

SEQ ID NO: 239130 - DNA, 25 bp, Artificial
  probe
  misc_feature (1)..(25): SEQ ID NO: 5614; WAN024GBS_at; Start 134; Stop 158
gtcgagcctgttccaagtccaacga

SEQ ID NO: 239131 - DNA, 25 bp, Artificial
  probe
  misc_feature (1)..(25): SEQ ID NO: 5614; WAN024GBS_at; Start 143; Stop 167
gttccaagtccaacgaccattccat

SEQ ID NO: 239132 - DNA, 25 bp, Artificial
  probe
  misc_feature (1)..(25): SEQ ID NO: 5614; WAN024GBS_at; Start 64; Stop 88
tgttacagctgtaatctgcaatcct

SEQ ID NO: 239133 - DNA, 25 bp, Artificial
  probe
  misc_feature (1)..(25): SEQ ID NO: 5614; WAN024GBS_at; Start 197; Stop 221
gccattttcttcagattttccaccg

SEQ ID NO: 239134 - DNA, 25 bp, Artificial
  probe
  misc_feature (1)..(25): SEQ ID NO: 5614; WAN024GBS_at; Start 70; Stop 94
agctgtaatctgcaatccttcttcc

SEQ ID NO: 239135 - DNA, 25 bp, Artificial
  probe
  misc_feature (1)..(25): SEQ ID NO: 5614; WAN024GBS_at; Start 120; Stop 144
caaaataataggcagtcgagcctgt

SEQ ID NO: 239136 - DNA, 25 bp, Artificial
  probe
  misc_feature (1)..(25): SEQ ID NO: 5614; WAN024GBS_at; Start 272; Stop 296
ttcaagtaaaaacatcaaatctaca

SEQ ID NO: 239137 - DNA, 25 bp, Artificial
  probe
  misc_feature (1)..(25): SEQ ID NO: 5614; WAN024GBS_at; Start 89; Stop 113
tcttccttgatacgacgaccgattt

SEQ ID NO: 239138 - DNA, 25 bp, Artificial
  probe
  misc_feature (1)..(25): SEQ ID NO: 5614; WAN024GBS_at; Start 182; Stop 206
gcagccttgatacctgccattttct

SEQ ID NO: 239139 - DNA, 25 bp, Artificial
  probe
  misc_feature (1)..(25): SEQ ID NO: 5614; WAN024GBS_at; Start 125; Stop 149
taataggcagtcgagcctgttccaa

SEQ ID NO: 239140 - DNA, 25 bp, Artificial
  probe
  misc_feature (1)..(25): SEQ ID NO: 5614; WAN024GBS_at; Start 175; Stop 199
gaactcagcagccttgatacctgcc

SEQ ID NO: 239141 - DNA, 25 bp, Artificial
  probe
  misc_feature (1)..(25): SEQ ID NO: 5614; WAN024GBS_at; Start 255; Stop 279
tatgaaaccgctttttattcaagta

SEQ ID NO: 239142 - DNA, 25 bp, Artificial
  probe
  misc_feature (1)..(25): SEQ ID NO: 5614; WAN024GBS_at; Start 167; Stop 191
tcgctcacgaactcagcagccttga

SEQ ID NO: 239143 - DNA, 25 bp, Artificial
  probe
  misc_feature (1)..(25): SEQ ID NO: 5614; WAN024GBS_at; Start 131; Stop 155
gcagtcgagcctgttccaagtccaa

SEQ ID NO: 239144 - DNA, 25 bp, Artificial
  probe
  misc_feature (1)..(25): SEQ ID NO: 5614; WAN024GBS_at; Start 286; Stop 310
tcaaatctacatttttcatcaatct

SEQ ID NO: 239145 - DNA, 25 bp, Artificial
  probe
  misc_feature (1)..(25): SEQ ID NO: 4979; WAN024GBT_at; Start 265; Stop 289
tctattgaccaagtagactttgtcg

SEQ ID NO: 239146 - DNA, 25 bp, Artificial
  probe
  misc_feature (1)..(25): SEQ ID NO: 4979; WAN024GBT_at; Start 458; Stop 482
tagaagtggttcagtatggtgcaga

SEQ ID NO: 239147 - DNA, 25 bp, Artificial
  probe
  misc_feature (1)..(25): SEQ ID NO: 4979; WAN024GBT_at; Start 498; Stop 522
ttttgaacgagctggctacaaacca

SEQ ID NO: 239148 - DNA, 25 bp, Artificial
  probe
  misc_feature (1)..(25): SEQ ID NO: 4979; WAN024GBT_at; Start 439; Stop 463
ggtgcttttaaattgccagtagaag

SEQ ID NO: 239149 - DNA, 25 bp, Artificial
  probe
  misc_feature (1)..(25): SEQ ID NO: 4979; WAN024GBT_at; Start 662; Stop 686
tattcaaccaaatggtggataaggt

SEQ ID NO: 239150 - DNA, 25 bp, Artificial
  probe
  misc_feature (1)..(25): SEQ ID NO: 4979; WAN024GBT_at; Start 49; Stop 73
ggtaaatcggtggaaaatctgaaga

SEQ ID NO: 239151 - DNA, 25 bp, Artificial
  probe
  misc_feature (1)..(25): SEQ ID NO: 4979; WAN024GBT_at; Start 397; Stop 421
tacatttgggtggtggatgaaagca

SEQ ID NO: 239152 - DNA, 25 bp, Artificial
  probe
  misc_feature (1)..(25): SEQ ID NO: 4979; WAN024GBT_at; Start 64; Stop 88
aatctgaagaaaatggcaggtatca

SEQ ID NO: 239153 - DNA, 25 bp, Artificial
  probe
  misc_feature (1)..(25): SEQ ID NO: 4979; WAN024GBT_at; Start 510; Stop 534
tggctacaaaccaagtttccgtgaa

SEQ ID NO: 239154 - DNA, 25 bp, Artificial
  probe
  misc_feature (1)..(25): SEQ ID NO: 4979; WAN024GBT_at; Start 655; Stop 679
catggtttattcaaccaaatggtgg

SEQ ID NO: 239155 - DNA, 25 bp, Artificial
  probe
  misc_feature (1)..(25): SEQ ID NO: 4979; WAN024GBT_at; Start 610; Stop 634
attgcttttggacaagaattggacc

SEQ ID NO: 239156 - DNA, 25 bp, Artificial
  probe
  misc_feature (1)..(25): SEQ ID NO: 4979; WAN024GBT_at; Start 506; Stop 530
gagctggctacaaaccaagtttccg

SEQ ID NO: 239157 - DNA, 25 bp, Artificial
  probe
  misc_feature (1)..(25): SEQ ID NO: 4979; WAN024GBT_at; Start 567; Stop 591
gaattttatcattgacctcgccttg

SEQ ID NO: 239158 - DNA, 25 bp, Artificial
  probe
  misc_feature (1)..(25): SEQ ID NO: 4979; WAN024GBT_at; Start 313; Stop 337
gaagtggatagtcagtttaatggaa

SEQ ID NO: 239159 - DNA, 25 bp, Artificial
  probe
  misc_feature (1)..(25): SEQ ID NO: 4979; WAN024GBT_at; Start 572; Stop 596
ttatcattgacctcgccttggatgt

SEQ ID NO: 239160 - DNA, 25 bp, Artificial
  probe
  misc_feature (1)..(25): SEQ ID NO: 4979; WAN024GBT_at; Start 641; Stop 665
ttggtgttgtggagcatggtttatt

SEQ ID NO: 239161 - DNA, 25 bp, Artificial
  probe
  misc_feature (1)..(25): SEQ ID NO: 4979; WAN024GBT_at; Start 501; Stop 525
tgaacgagctggctacaaaccaagt

SEQ ID NO: 239162 - DNA, 25 bp, Artificial
  probe
  misc_feature (1)..(25): SEQ ID NO: 4979; WAN024GBT_at; Start 616; Stop 640
tttggacaagaattggaccatgtcg

SEQ ID NO: 239163 - DNA, 25 bp, Artificial
  probe
  misc_feature (1)..(25): SEQ ID NO: 4979; WAN024GBT_at; Start 433; Stop 457
aaactaggtgcttttaaattgccag

SEQ ID NO: 239164 - DNA, 25 bp, Artificial
  probe
  misc_feature (1)..(25): SEQ ID NO: 4979; WAN024GBT_at; Start 56; Stop 80
cggtggaaaatctgaagaaaatggc

SEQ ID NO: 239165 - DNA, 25 bp, Artificial
  probe
  misc_feature (1)..(25): SEQ ID NO: 4979; WAN024GBT_at; Start 272; Stop 296
accaagtagactttgtcgatgtgac

SEQ ID NO: 239166 - DNA, 25 bp, Artificial
  probe
  misc_feature (1)..(25): SEQ ID NO: 4979; WAN024GBT_at; Start 142; Stop 166
actgcctattattttgtcgaagaaa

SEQ ID NO: 239167 - DNA, 25 bp, Artificial
  probe
  misc_feature (1)..(25): SEQ ID NO: 4979; WAN024GBT_at; Start 420; Stop 444
caagctggtcgaaaaactaggtgct

SEQ ID NO: 239168 - DNA, 25 bp, Artificial
  probe
  misc_feature (1)..(25): SEQ ID NO: 4979; WAN024GBT_at; Start 622; Stop 646
caagaattggaccatgtcgttggtg

SEQ ID NO: 239169 - DNA, 25 bp, Artificial
  probe
  misc_feature (1)..(25): SEQ ID NO: 4979; WAN024GBT_at; Start 601; Stop 625
gaaaatccaattgcttttggacaag

SEQ ID NO: 239170 - DNA, 25 bp, Artificial
  probe
  misc_feature (1)..(25): SEQ ID NO: 4979; WAN024GBT_at; Start 410; Stop 434
tggatgaaagcaagctggtcgaaaa

SEQ ID NO: 239171 - DNA, 25 bp, Artificial
  probe
  misc_feature (1)..(25): SEQ ID NO: 4979; WAN024GBT_at; Start 320; Stop 344
atagtcagtttaatggaatcaaagg

SEQ ID NO: 239172 - DNA, 25 bp, Artificial
  probe
  misc_feature (1)..(25): SEQ ID NO: 4979; WAN024GBT_at; Start 151; Stop 175
tattttgtcgaagaaatcggtcgtc

SEQ ID NO: 239173 - DNA, 25 bp, Artificial
  probe
  misc_feature (1)..(25): SEQ ID NO: 4979; WAN024GBT_at; Start 415; Stop 439
gaaagcaagctggtcgaaaaactag

SEQ ID NO: 239174 - DNA, 25 bp, Artificial
  probe
  misc_feature (1)..(25): SEQ ID NO: 4979; WAN024GBT_at; Start 447; Stop 471
taaattgccagtagaagtggttcag

SEQ ID NO: 239175 - DNA, 25 bp, Artificial
  probe
  misc_feature (1)..(25): SEQ ID NO: 4979; WAN024GBT_at; Start 633; Stop 657
ccatgtcgttggtgttgtggagcat

SEQ ID NO: 239176 - DNA, 25 bp, Artificial
  probe
  misc_feature (1)..(25): SEQ ID NO: 4979; WAN024GBT_at; Start 382; Stop 406
acaccatcaaaagaatacatttggg

SEQ ID NO: 239177 - DNA, 25 bp, Artificial
  probe
  misc_feature (1)..(25): SEQ ID NO: 4979; WAN024GBT_at; Start 40; Stop 64
aatgatggaggtaaatcggtggaaa

SEQ ID NO: 239178 - DNA, 25 bp, Artificial
  probe
  misc_feature (1)..(25): SEQ ID NO: 4979; WAN024GBT_at; Start 559; Stop 583
gatatgcagaattttatcattgacc

SEQ ID NO: 239179 - DNA, 25 bp, Artificial
  probe
  misc_feature (1)..(25): SEQ ID NO: 5407; WAN024GBU_at; Start 1214; Stop 1238
ccgataactttggtgtggaaactgc

SEQ ID NO: 239180 - DNA, 25 bp, Artificial
  probe
  misc_feature (1)..(25): SEQ ID NO: 5407; WAN024GBU_at; Start 672; Stop 696
cattgctcgcccttatgtaggtgaa

SEQ ID NO: 239181 - DNA, 25 bp, Artificial
  probe
  misc_feature (1)..(25): SEQ ID NO: 5407; WAN024GBU_at; Start 968; Stop 992
gccatcgtcgtaatgctcacggtta

SEQ ID NO: 239182 - DNA, 25 bp, Artificial
  probe
  misc_feature (1)..(25): SEQ ID NO: 5407; WAN024GBU_at; Start 714; Stop 738
tacggcaaaccgtcgtgacttggct

SEQ ID NO: 239183 - DNA, 25 bp, Artificial
  probe
  misc_feature (1)..(25): SEQ ID NO: 5407; WAN024GBU_at; Start 1054; Stop 1078
aatgaccttctcttgattactgcgg

SEQ ID NO: 239184 - DNA, 25 bp, Artificial
  probe
  misc_feature (1)..(25): SEQ ID NO: 5407; WAN024GBU_at; Start 334; Stop 358
gatactatgactggacactgggaaa

SEQ ID NO: 239185 - DNA, 25 bp, Artificial
  probe
  misc_feature (1)..(25): SEQ ID NO: 5407; WAN024GBU_at; Start 925; Stop 949
ggattctcattcacaaacctagttg

SEQ ID NO: 239186 - DNA, 25 bp, Artificial
  probe
  misc_feature (1)..(25): SEQ ID NO: 5407; WAN024GBU_at; Start 102; Stop 126
ttctgtaggaatcggtgcagcacca

SEQ ID NO: 239187 - DNA, 25 bp, Artificial
  probe
  misc_feature (1)..(25): SEQ ID NO: 5407; WAN024GBU_at; Start 1084; Stop 1108
ggaaatgacccaacgtatgcaggaa

SEQ ID NO: 239188 - DNA, 25 bp, Artificial
  probe
  misc_feature (1)..(25): SEQ ID NO: 5407; WAN024GBU_at; Start 631; Stop 655
cgttcgattacccttgagcgtcctg

SEQ ID NO: 239189 - DNA, 25 bp, Artificial
  probe
  misc_feature (1)..(25): SEQ ID NO: 5407; WAN024GBU_at; Start 646; Stop 670
gagcgtcctgcccttcttggtcgca

SEQ ID NO: 239190 - DNA, 25 bp, Artificial
  probe
  misc_feature (1)..(25): SEQ ID NO: 5407; WAN024GBU_at; Start 1163; Stop 1187
gaaatggtctcattccagtaggaca

SEQ ID NO: 239191 - DNA, 25 bp, Artificial
  probe
  misc_feature (1)..(25): SEQ ID NO: 5407; WAN024GBU_at; Start 792; Stop 816
tacttatgctgtgggtaaaatcaac

SEQ ID NO: 239192 - DNA, 25 bp, Artificial
  probe
  misc_feature (1)..(25): SEQ ID NO: 5407; WAN024GBU_at; Start 506; Stop 530
ttggaccacgtcagatggaaactgg

SEQ ID NO: 239193 - DNA, 25 bp, Artificial
  probe
  misc_feature (1)..(25): SEQ ID NO: 5407; WAN024GBU_at; Start 468; Stop 492
caacaaaccttattcaggaacggct

SEQ ID NO: 239194 - DNA, 25 bp, Artificial
  probe
  misc_feature (1)..(25): SEQ ID NO: 5407; WAN024GBU_at; Start 1140; Stop 1164
ggcctatagccctgcctttaaagga

SEQ ID NO: 239195 - DNA, 25 bp, Artificial
  probe
  misc_feature (1)..(25): SEQ ID NO: 5407; WAN024GBU_at; Start 1017; Stop 1041
tgaacgcttacctgaaattatcgca

SEQ ID NO: 239196 - DNA, 25 bp, Artificial
  probe
  misc_feature (1)..(25): SEQ ID NO: 5407; WAN024GBU_at; Start 568; Stop 592
cagattgctgcccacgaagacatta

SEQ ID NO: 239197 - DNA, 25 bp, Artificial
  probe
  misc_feature (1)..(25): SEQ ID NO: 5407; WAN024GBU_at; Start 887; Stop 911
cactattgaagactatgggacttgc

SEQ ID NO: 239198 - DNA, 25 bp, Artificial
  probe
  misc_feature (1)..(25): SEQ ID NO: 5407; WAN024GBU_at; Start 986; Stop 1010
acggttaccgtgattgcttgcatga

SEQ ID NO: 239199 - DNA, 25 bp, Artificial
  probe
  misc_feature (1)..(25): SEQ ID NO: 5407; WAN024GBU_at; Start 945; Stop 969
agttgactttgatgccctttacggc

SEQ ID NO: 239200 - DNA, 25 bp, Artificial
  probe
  misc_feature (1)..(25): SEQ ID NO: 5407; WAN024GBU_at; Start 349; Stop 373
cactgggaaatcatgggactcaaca

SEQ ID NO: 239201 - DNA, 25 bp, Artificial
  probe
  misc_feature (1)..(25): SEQ ID NO: 5407; WAN024GBU_at; Start 160; Stop 184
gatggagcttctgacacactgggac

SEQ ID NO: 239202 - DNA, 25 bp, Artificial
  probe
  misc_feature (1)..(25): SEQ ID NO: 5407; WAN024GBU_at; Start 433; Stop 457
gaagaattctcaggacgcaaggtta

SEQ ID NO: 239203 - DNA, 25 bp, Artificial
  probe
  misc_feature (1)..(25): SEQ ID NO: 5407; WAN024GBU_at; Start 253; Stop 277
gaaactcctcttaagactgtagcag

SEQ ID NO: 239204 - DNA, 25 bp, Artificial
  probe
  misc_feature (1)..(25): SEQ ID NO: 5407; WAN024GBU_at; Start 1102; Stop 1126
gcaggaacggatcacactcgggaat

SEQ ID NO: 239205 - DNA, 25 bp, Artificial
  probe
  misc_feature (1)..(25): SEQ ID NO: 5407; WAN024GBU_at; Start 388; Stop 412
gatactttctggaacggattcccag

SEQ ID NO: 239206 - DNA, 25 bp, Artificial
  probe
  misc_feature (1)..(25): SEQ ID NO: 5407; WAN024GBU_at; Start 546; Stop 570
tacttcagctgaccctgttttgcag

SEQ ID NO: 239207 - DNA, 25 bp, Artificial
  probe
  misc_feature (1)..(25): SEQ ID NO: 5407; WAN024GBU_at; Start 210; Stop 234
tgtcccaaacatggctaaaataggt

SEQ ID NO: 239208 - DNA, 25 bp, Artificial
  probe
  misc_feature (1)..(25): SEQ ID NO: 5407; WAN024GBU_at; Start 832; Stop 856
gctggtatcaaccatgacatgggtc

SEQ ID NO: 239209 - DNA, 25 bp, Artificial
  probe
  misc_feature (1)..(25): SEQ ID NO: 5407; WAN024GBU_at; Start 849; Stop 873
catgggtcacaacaagtcaaatagt

SEQ ID NO: 239210 - DNA, 25 bp, Artificial
  probe
  misc_feature (1)..(25): SEQ ID NO: 5407; WAN024GBU_at; Start 812; Stop 836
tcaacgatatctttaacggtgctgg

SEQ ID NO: 239211 - DNA, 25 bp, Artificial
  probe
  misc_feature (1)..(25): SEQ ID NO: 5407; WAN024GBU_at; Start 698; Stop 722
caggtaacttcactcgtacggcaaa

SEQ ID NO: 239212 - DNA, 25 bp, Artificial
  probe
  misc_feature (1)..(25): SEQ ID NO: 5407; WAN024GBU_at; Start 1037; Stop 1061
tcgcagctatgagagagaatgacct

SEQ ID NO: 239213 - DNA, 25 bp, Artificial
  probe
  misc_feature (1)..(25): SEQ ID NO: 2115; WAN024GBV_at; Start 20; Stop 44
tccaatgtccgaagtgctgcttgat

SEQ ID NO: 239214 - DNA, 25 bp, Artificial
  probe
  misc_feature (1)..(25): SEQ ID NO: 2115; WAN024GBV_at; Start 39; Stop 63
cttgataagtttgctccatcagcat

SEQ ID NO: 239215 - DNA, 25 bp, Artificial
  probe
  misc_feature (1)..(25): SEQ ID NO: 2115; WAN024GBV_at; Start 19; Stop 43
atccaatgtccgaagtgctgcttga

SEQ ID NO: 239216 - DNA, 25 bp, Artificial
  probe
  misc_feature (1)..(25): SEQ ID NO: 2115; WAN024GBV_at; Start 6; Stop 30
tctcttattttctatccaatgtccg

SEQ ID NO: 239217 - DNA, 25 bp, Artificial
  probe
  misc_feature (1)..(25): SEQ ID NO: 2115; WAN024GBV_at; Start 71; Stop 95
gtcataggaccgacacctccaggga

SEQ ID NO: 239218 - DNA, 25 bp, Artificial
  probe
  misc_feature (1)..(25): SEQ ID NO: 2115; WAN024GBV_at; Start 16; Stop 40
tctatccaatgtccgaagtgctgct

SEQ ID NO: 239219 - DNA, 25 bp, Artificial
  probe
  misc_feature (1)..(25): SEQ ID NO: 2115; WAN024GBV_at; Start 210; Stop 234
caaagtcagcagtcacaaacttggc

SEQ ID NO: 239220 - DNA, 25 bp, Artificial
  probe
  misc_feature (1)..(25): SEQ ID NO: 2115; WAN024GBV_at; Start 15; Stop 39
ttctatccaatgtccgaagtgctgc

SEQ ID NO: 239221 - DNA, 25 bp, Artificial
  probe
  misc_feature (1)..(25): SEQ ID NO: 2115; WAN024GBV_at; Start 8; Stop 32
tcttattttctatccaatgtccgaa

SEQ ID NO: 239222 - DNA, 25 bp, Artificial
  probe
  misc_feature (1)..(25): SEQ ID NO: 2115; WAN024GBV_at; Start 207; Stop 231
tgacaaagtcagcagtcacaaactt

SEQ ID NO: 239223 - DNA, 25 bp, Artificial
  probe
  misc_feature (1)..(25): SEQ ID NO: 2115; WAN024GBV_at; Start 208; Stop 232
gacaaagtcagcagtcacaaacttg

SEQ ID NO: 239224 - DNA, 25 bp, Artificial
  probe
  misc_feature (1)..(25): SEQ ID NO: 2115; WAN024GBV_at; Start 66; Stop 90
taatggtcataggaccgacacctcc

SEQ ID NO: 239225 - DNA, 25 bp, Artificial
  probe
  misc_feature (1)..(25): SEQ ID NO: 2115; WAN024GBV_at; Start 28; Stop 52
ccgaagtgctgcttgataagtttgc

SEQ ID NO: 239226 - DNA, 25 bp, Artificial
  probe
  misc_feature (1)..(25): SEQ ID NO: 2115; WAN024GBV_at; Start 67; Stop 91
aatggtcataggaccgacacctcca

SEQ ID NO: 239227 - DNA, 25 bp, Artificial
  probe
  misc_feature (1)..(25): SEQ ID NO: 2115; WAN024GBV_at; Start 21; Stop 45
ccaatgtccgaagtgctgcttgata

SEQ ID NO: 239228 - DNA, 25 bp, Artificial
  probe
  misc_feature (1)..(25): SEQ ID NO: 2115; WAN024GBV_at; Start 31; Stop 55
aagtgctgcttgataagtttgctcc

SEQ ID NO: 239229 - DNA, 25 bp, Artificial
  probe
  misc_feature (1)..(25): SEQ ID NO: 2115; WAN024GBV_at; Start 78; Stop 102
gaccgacacctccagggactggcgt

SEQ ID NO: 239230 - DNA, 25 bp, Artificial
  probe
  misc_feature (1)..(25): SEQ ID NO: 2115; WAN024GBV_at; Start 70; Stop 94
ggtcataggaccgacacctccaggg

SEQ ID NO: 239231 - DNA, 25 bp, Artificial
  probe
  misc_feature (1)..(25): SEQ ID NO: 2115; WAN024GBV_at; Start 27; Stop 51
tccgaagtgctgcttgataagtttg

SEQ ID NO: 239232 - DNA, 25 bp, Artificial
  probe
  misc_feature (1)..(25): SEQ ID NO: 2115; WAN024GBV_at; Start 65; Stop 89
gtaatggtcataggaccgacacctc

SEQ ID NO: 239233 - DNA, 25 bp, Artificial
  probe
  misc_feature (1)..(25): SEQ ID NO: 2115; WAN024GBV_at; Start 194; Stop 218
accgcacctggtttgacaaagtcag

SEQ ID NO: 239234 - DNA, 25 bp, Artificial
  probe
  misc_feature (1)..(25): SEQ ID NO: 2115; WAN024GBV_at; Start 74; Stop 98
ataggaccgacacctccagggactg

SEQ ID NO: 239235 - DNA, 25 bp, Artificial
  probe
  misc_feature (1)..(25): SEQ ID NO: 2115; WAN024GBV_at; Start 11; Stop 35
tattttctatccaatgtccgaagtg

SEQ ID NO: 239236 - DNA, 25 bp, Artificial
  probe
  misc_feature (1)..(25): SEQ ID NO: 2115; WAN024GBV_at; Start 14; Stop 38
tttctatccaatgtccgaagtgctg

SEQ ID NO: 239237 - DNA, 25 bp, Artificial
  probe
  misc_feature (1)..(25): SEQ ID NO: 2115; WAN024GBV_at; Start 75; Stop 99
taggaccgacacctccagggactgg

SEQ ID NO: 239238 - DNA, 25 bp, Artificial
  probe
  misc_feature (1)..(25): SEQ ID NO: 2115; WAN024GBV_at; Start 205; Stop 229
tttgacaaagtcagcagtcacaaac

SEQ ID NO: 239239 - DNA, 25 bp, Artificial
  probe
  misc_feature (1)..(25): SEQ ID NO: 2115; WAN024GBV_at; Start 68; Stop 92
atggtcataggaccgacacctccag

SEQ ID NO: 239240 - DNA, 25 bp, Artificial
  probe
  misc_feature (1)..(25): SEQ ID NO: 2115; WAN024GBV_at; Start 30; Stop 54
gaagtgctgcttgataagtttgctc

SEQ ID NO: 239241 - DNA, 25 bp, Artificial
  probe
  misc_feature (1)..(25): SEQ ID NO: 2115; WAN024GBV_at; Start 18; Stop 42
tatccaatgtccgaagtgctgcttg

SEQ ID NO: 239242 - DNA, 25 bp, Artificial
  probe
  misc_feature (1)..(25): SEQ ID NO: 2115; WAN024GBV_at; Start 25; Stop 49
tgtccgaagtgctgcttgataagtt

SEQ ID NO: 239243 - DNA, 25 bp, Artificial
  probe
  misc_feature (1)..(25): SEQ ID NO: 2115; WAN024GBV_at; Start 2; Stop 26
tgcttctcttattttctatccaatg

SEQ ID NO: 239244 - DNA, 25 bp, Artificial
  probe
  misc_feature (1)..(25): SEQ ID NO: 2115; WAN024GBV_at; Start 13; Stop 37
ttttctatccaatgtccgaagtgct

SEQ ID NO: 239245 - DNA, 25 bp, Artificial
  probe
  misc_feature (1)..(25): SEQ ID NO: 2115; WAN024GBV_at; Start 22; Stop 46
caatgtccgaagtgctgcttgataa

SEQ ID NO: 239246 - DNA, 25 bp, Artificial
  probe
  misc_feature (1)..(25): SEQ ID NO: 2115; WAN024GBV_at; Start 23; Stop 47
aatgtccgaagtgctgcttgataag

SEQ ID NO: 239247 - DNA, 25 bp, Artificial
  probe
  misc_feature (1)..(25): SEQ ID NO: 4293; WAN024GBW_at; Start 322; Stop 346
caggatccagcttggcatgggattt

SEQ ID NO: 239248 - DNA, 25 bp, Artificial
  probe
  misc_feature (1)..(25): SEQ ID NO: 4293; WAN024GBW_at; Start 118; Stop 142
gctgaaaagactgcaaaattaaagg

SEQ ID NO: 239249 - DNA, 25 bp, Artificial
  probe
  misc_feature (1)..(25): SEQ ID NO: 4293; WAN024GBW_at; Start 697; Stop 721
gccaagtttgtgactgctgactttg

SEQ ID NO: 239250 - DNA, 25 bp, Artificial
  probe
  misc_feature (1)..(25): SEQ ID NO: 4293; WAN024GBW_at; Start 82; Stop 106
gggaaagctttagcggccaaattgc

SEQ ID NO: 239251 - DNA, 25 bp, Artificial
  probe
  misc_feature (1)..(25): SEQ ID NO: 4293; WAN024GBW_at; Start 319; Stop 343
aatcaggatccagcttggcatggga

SEQ ID NO: 239252 - DNA, 25 bp, Artificial
  probe
  misc_feature (1)..(25): SEQ ID NO: 4293; WAN024GBW_at; Start 713; Stop 737
ctgactttgtcaaaccaggtgcggt

SEQ ID NO: 239253 - DNA, 25 bp, Artificial
  probe
  misc_feature (1)..(25): SEQ ID NO: 4293; WAN024GBW_at; Start 26; Stop 50
ggtataatggaagatatttgaaaga

SEQ ID NO: 239254 - DNA, 25 bp, Artificial
  probe
  misc_feature (1)..(25): SEQ ID NO: 4293; WAN024GBW_at; Start 191; Stop 215
atccagccagccaagtctacgttcg

SEQ ID NO: 239255 - DNA, 25 bp, Artificial
  probe
  misc_feature (1)..(25): SEQ ID NO: 4293; WAN024GBW_at; Start 78; Stop 102
tgatgggaaagctttagcggccaaa

SEQ ID NO: 239256 - DNA, 25 bp, Artificial
  probe
  misc_feature (1)..(25): SEQ ID NO: 4293; WAN024GBW_at; Start 200; Stop 224
gccaagtctacgttcgcaacaagga

SEQ ID NO: 239257 - DNA, 25 bp, Artificial
  probe
  misc_feature (1)..(25): SEQ ID NO: 4293; WAN024GBW_at; Start 284; Stop 308
ctcaagaggaattgttagacctgat

SEQ ID NO: 239258 - DNA, 25 bp, Artificial
  probe
  misc_feature (1)..(25): SEQ ID NO: 4293; WAN024GBW_at; Start 902; Stop 926
ggacattggatagaaaataactaat

SEQ ID NO: 239259 - DNA, 25 bp, Artificial
  probe
  misc_feature (1)..(25): SEQ ID NO: 4293; WAN024GBW_at; Start 194; Stop 218
cagccagccaagtctacgttcgcaa

SEQ ID NO: 239260 - DNA, 25 bp, Artificial
  probe
  misc_feature (1)..(25): SEQ ID NO: 4293; WAN024GBW_at; Start 202; Stop 226
caagtctacgttcgcaacaaggaga

SEQ ID NO: 239261 - DNA, 25 bp, Artificial
  probe
  misc_feature (1)..(25): SEQ ID NO: 4293; WAN024GBW_at; Start 56; Stop 80
gaagtgatatgacacagattattga

SEQ ID NO: 239262 - DNA, 25 bp, Artificial
  probe
  misc_feature (1)..(25): SEQ ID NO: 4293; WAN024GBW_at; Start 326; Stop 350
atccagcttggcatgggattttggt

SEQ ID NO: 239263 - DNA, 25 bp, Artificial
  probe
  misc_feature (1)..(25): SEQ ID NO: 4293; WAN024GBW_at; Start 49; Stop 73
gaaaagagaagtgatatgacacaga

SEQ ID NO: 239264 - DNA, 25 bp, Artificial
  probe
  misc_feature (1)..(25): SEQ ID NO: 4293; WAN024GBW_at; Start 160; Stop 184
cctggtttggtagtgattttggttg

SEQ ID NO: 239265 - DNA, 25 bp, Artificial
  probe
  misc_feature (1)..(25): SEQ ID NO: 4293; WAN024GBW_at; Start 75; Stop 99
tattgatgggaaagctttagcggcc

SEQ ID NO: 239266 - DNA, 25 bp, Artificial
  probe
  misc_feature (1)..(25): SEQ ID NO: 4293; WAN024GBW_at; Start 17; Stop 41
gcagtttttggtataatggaagata

SEQ ID NO: 239267 - DNA, 25 bp, Artificial
  probe
  misc_feature (1)..(25): SEQ ID NO: 4293; WAN024GBW_at; Start 153; Stop 177
tctagtgcctggtttggtagtgatt

SEQ ID NO: 239268 - DNA, 25 bp, Artificial
  probe
  misc_feature (1)..(25): SEQ ID NO: 4293; WAN024GBW_at; Start 61; Stop 85
gatatgacacagattattgatggga

SEQ ID NO: 239269 - DNA, 25 bp, Artificial
  probe
  misc_feature (1)..(25): SEQ ID NO: 4293; WAN024GBW_at; Start 289; Stop 313
gaggaattgttagacctgattgcta

SEQ ID NO: 239270 - DNA, 25 bp, Artificial
  probe
  misc_feature (1)..(25): SEQ ID NO: 4293; WAN024GBW_at; Start 66; Stop 90
gacacagattattgatgggaaagct

SEQ ID NO: 239271 - DNA, 25 bp, Artificial
  probe
  misc_feature (1)..(25): SEQ ID NO: 4293; WAN024GBW_at; Start 109; Stop 133
gggcagttggctgaaaagactgcaa

SEQ ID NO: 239272 - DNA, 25 bp, Artificial
  probe
  misc_feature (1)..(25): SEQ ID NO: 4293; WAN024GBW_at; Start 209; Stop 233
acgttcgcaacaaggagaggtcagc

SEQ ID NO: 239273 - DNA, 25 bp, Artificial
  probe
  misc_feature (1)..(25): SEQ ID NO: 4293; WAN024GBW_at; Start 410; Stop 434
aaaaggatgtggatggtttccatcc

SEQ ID NO: 239274 - DNA, 25 bp, Artificial
  probe
  misc_feature (1)..(25): SEQ ID NO: 4293; WAN024GBW_at; Start 208; Stop 232
tacgttcgcaacaaggagaggtcag

SEQ ID NO: 239275 - DNA, 25 bp, Artificial
  probe
  misc_feature (1)..(25): SEQ ID NO: 4293; WAN024GBW_at; Start 292; Stop 316
gaattgttagacctgattgctaaat

SEQ ID NO: 239276 - DNA, 25 bp, Artificial
  probe
  misc_feature (1)..(25): SEQ ID NO: 4293; WAN024GBW_at; Start 92; Stop 116
tagcggccaaattgcaggggcagtt

SEQ ID NO: 239277 - DNA, 25 bp, Artificial
  probe
  misc_feature (1)..(25): SEQ ID NO: 4293; WAN024GBW_at; Start 112; Stop 136
cagttggctgaaaagactgcaaaat

SEQ ID NO: 239278 - DNA, 25 bp, Artificial
  probe
  misc_feature (1)..(25): SEQ ID NO: 4293; WAN024GBW_at; Start 196; Stop 220
gccagccaagtctacgttcgcaaca

SEQ ID NO: 239279 - DNA, 25 bp, Artificial
  probe
  misc_feature (1)..(25): SEQ ID NO: 4293; WAN024GBW_at; Start 282; Stop 306
tactcaagaggaattgttagacctg

SEQ ID NO: 239280 - DNA, 25 bp, Artificial
  probe
  misc_feature (1)..(25): SEQ ID NO: 4293; WAN024GBW_at; Start 206; Stop 230
tctacgttcgcaacaaggagaggtc

SEQ ID NO: 239281 - DNA, 25 bp, Artificial
  probe
  misc_feature (1)..(25): SEQ ID NO: 2071; WAN024GBX_at; Start 144; Stop 168
tgccattgcttcaaggcggttgatg

SEQ ID NO: 239282 - DNA, 25 bp, Artificial
  probe
  misc_feature (1)..(25): SEQ ID NO: 2071; WAN024GBX_at; Start 195; Stop 219
gattctccttcatttcttatcgtta

SEQ ID NO: 239283 - DNA, 25 bp, Artificial
  probe
  misc_feature (1)..(25): SEQ ID NO: 2071; WAN024GBX_at; Start 168; Stop 192
gattctaaccaaatgtgattccatt

SEQ ID NO: 239284 - DNA, 25 bp, Artificial
  probe
  misc_feature (1)..(25): SEQ ID NO: 2071; WAN024GBX_at; Start 67; Stop 91
tcgtcgtggctgtacgcaacttctg

SEQ ID NO: 239285 - DNA, 25 bp, Artificial
  probe
  misc_feature (1)..(25): SEQ ID NO: 2071; WAN024GBX_at; Start 77; Stop 101
tgtacgcaacttctgcaacaacaac

SEQ ID NO: 239286 - DNA, 25 bp, Artificial
  probe
  misc_feature (1)..(25): SEQ ID NO: 2071; WAN024GBX_at; Start 2; Stop 26
tgctatcaaacgtatacgtttcgcg

SEQ ID NO: 239287 - DNA, 25 bp, Artificial
  probe
  misc_feature (1)..(25): SEQ ID NO: 2071; WAN024GBX_at; Start 69; Stop 93
gtcgtggctgtacgcaacttctgca

SEQ ID NO: 239288 - DNA, 25 bp, Artificial
  probe
  misc_feature (1)..(25): SEQ ID NO: 2071; WAN024GBX_at; Start 128; Stop 152
aatttccgccatcgtttgccattgc

SEQ ID NO: 239289 - DNA, 25 bp, Artificial
  probe
  misc_feature (1)..(25): SEQ ID NO: 2071; WAN024GBX_at; Start 25; Stop 49
cgatcttctacgtcacgaagggtaa

SEQ ID NO: 239290 - DNA, 25 bp, Artificial
  probe
  misc_feature (1)..(25): SEQ ID NO: 2071; WAN024GBX_at; Start 28; Stop 52
tcttctacgtcacgaagggtaaaga

SEQ ID NO: 239291 - DNA, 25 bp, Artificial
  probe
  misc_feature (1)..(25): SEQ ID NO: 2071; WAN024GBX_at; Start 91; Stop 115
gcaacaacaactccttcgcgttcaa

SEQ ID NO: 239292 - DNA, 25 bp, Artificial
  probe
  misc_feature (1)..(25): SEQ ID NO: 2071; WAN024GBX_at; Start 50; Stop 74
agattgggccgttttcttcgtcgtg

SEQ ID NO: 239293 - DNA, 25 bp, Artificial
  probe
  misc_feature (1)..(25): SEQ ID NO: 2071; WAN024GBX_at; Start 22; Stop 46
tcgcgatcttctacgtcacgaaggg

SEQ ID NO: 239294 - DNA, 25 bp, Artificial
  probe
  misc_feature (1)..(25): SEQ ID NO: 2071; WAN024GBX_at; Start 125; Stop 149
ttaaatttccgccatcgtttgccat

SEQ ID NO: 239295 - DNA, 25 bp, Artificial
  probe
  misc_feature (1)..(25): SEQ ID NO: 2071; WAN024GBX_at; Start 18; Stop 42
cgtttcgcgatcttctacgtcacga

SEQ ID NO: 239296 - DNA, 25 bp, Artificial
  probe
  misc_feature (1)..(25): SEQ ID NO: 2071; WAN024GBX_at; Start 135; Stop 159
gccatcgtttgccattgcttcaagg

SEQ ID NO: 239297 - DNA, 25 bp, Artificial
  probe
  misc_feature (1)..(25): SEQ ID NO: 2071; WAN024GBX_at; Start 73; Stop 97
tggctgtacgcaacttctgcaacaa

SEQ ID NO: 239298 - DNA, 25 bp, Artificial
  probe
  misc_feature (1)..(25): SEQ ID NO: 2071; WAN024GBX_at; Start 226; Stop 250
taccataaaggaggccaacttgact

SEQ ID NO: 239299 - DNA, 25 bp, Artificial
  probe
  misc_feature (1)..(25): SEQ ID NO: 2071; WAN024GBX_at; Start 10; Stop 34
aacgtatacgtttcgcgatcttcta

SEQ ID NO: 239300 - DNA, 25 bp, Artificial
  probe
  misc_feature (1)..(25): SEQ ID NO: 2071; WAN024GBX_at; Start 182; Stop 206
gtgattccattttgattctccttca

SEQ ID NO: 239301 - DNA, 25 bp, Artificial
  probe
  misc_feature (1)..(25): SEQ ID NO: 2071; WAN024GBX_at; Start 165; Stop 189
gatgattctaaccaaatgtgattcc

SEQ ID NO: 239302 - DNA, 25 bp, Artificial
  probe
  misc_feature (1)..(25): SEQ ID NO: 2071; WAN024GBX_at; Start 56; Stop 80
ggccgttttcttcgtcgtggctgta

SEQ ID NO: 239303 - DNA, 25 bp, Artificial
  probe
  misc_feature (1)..(25): SEQ ID NO: 2071; WAN024GBX_at; Start 158; Stop 182
ggcggttgatgattctaaccaaatg

SEQ ID NO: 239304 - DNA, 25 bp, Artificial
  probe
  misc_feature (1)..(25): SEQ ID NO: 2071; WAN024GBX_at; Start 60; Stop 84
gttttcttcgtcgtggctgtacgca

SEQ ID NO: 239305 - DNA, 25 bp, Artificial
  probe
  misc_feature (1)..(25): SEQ ID NO: 2071; WAN024GBX_at; Start 132; Stop 156
tccgccatcgtttgccattgcttca

SEQ ID NO: 239306 - DNA, 25 bp, Artificial
  probe
  misc_feature (1)..(25): SEQ ID NO: 2071; WAN024GBX_at; Start 14; Stop 38
tatacgtttcgcgatcttctacgtc

SEQ ID NO: 239307 - DNA, 25 bp, Artificial
  probe
  misc_feature (1)..(25): SEQ ID NO: 2071; WAN024GBX_at; Start 137; Stop 161
catcgtttgccattgcttcaaggcg

SEQ ID NO: 239308 - DNA, 25 bp, Artificial
  probe
  misc_feature (1)..(25): SEQ ID NO: 2071; WAN024GBX_at; Start 82; Stop 106
gcaacttctgcaacaacaactcctt

SEQ ID NO: 239309 - DNA, 25 bp, Artificial
  probe
  misc_feature (1)..(25): SEQ ID NO: 2071; WAN024GBX_at; Start 64; Stop 88
tcttcgtcgtggctgtacgcaactt

SEQ ID NO: 239310 - DNA, 25 bp, Artificial
  probe
  misc_feature (1)..(25): SEQ ID NO: 2071; WAN024GBX_at; Start 224; Stop 248
tttaccataaaggaggccaacttga

SEQ ID NO: 239311 - DNA, 25 bp, Artificial
  probe
  misc_feature (1)..(25): SEQ ID NO: 2071; WAN024GBX_at; Start 98; Stop 122
caactccttcgcgttcaaaattacg

SEQ ID NO: 239312 - DNA, 25 bp, Artificial
  probe
  misc_feature (1)..(25): SEQ ID NO: 2071; WAN024GBX_at; Start 140; Stop 164
cgtttgccattgcttcaaggcggtt

SEQ ID NO: 239313 - DNA, 25 bp, Artificial
  probe
  misc_feature (1)..(25): SEQ ID NO: 2071; WAN024GBX_at; Start 32; Stop 56
ctacgtcacgaagggtaaagattgg

SEQ ID NO: 239314 - DNA, 25 bp, Artificial
  probe
  misc_feature (1)..(25): SEQ ID NO: 2071; WAN024GBX_at; Start 87; Stop 111
ttctgcaacaacaactccttcgcgt

SEQ ID NO: 239315 - DNA, 25 bp, Artificial
  probe
  misc_feature (1)..(25): SEQ ID NO: 2227; WAN024GBY_at; Start 147; Stop 171
ccttcgtgacgtagaagatcgcgaa

SEQ ID NO: 239316 - DNA, 25 bp, Artificial
  probe
  misc_feature (1)..(25): SEQ ID NO: 2227; WAN024GBY_at; Start 154; Stop 178
gacgtagaagatcgcgaaacgtata

SEQ ID NO: 239317 - DNA, 25 bp, Artificial
  probe
  misc_feature (1)..(25): SEQ ID NO: 2227; WAN024GBY_at; Start 108; Stop 132
tgcgtacagccacgacgaagaaaac

SEQ ID NO: 239318 - DNA, 25 bp, Artificial
  probe
  misc_feature (1)..(25): SEQ ID NO: 2227; WAN024GBY_at; Start 112; Stop 136
tacagccacgacgaagaaaacggcc

SEQ ID NO: 239319 - DNA, 25 bp, Artificial
  probe
  misc_feature (1)..(25): SEQ ID NO: 2227; WAN024GBY_at; Start 193; Stop 217
gacttaatcgcaatggaaatttacg

SEQ ID NO: 239320 - DNA, 25 bp, Artificial
  probe
  misc_feature (1)..(25): SEQ ID NO: 2227; WAN024GBY_at; Start 96; Stop 120
tgttgcagaagttgcgtacagccac

SEQ ID NO: 239321 - DNA, 25 bp, Artificial
  probe
  misc_feature (1)..(25): SEQ ID NO: 2227; WAN024GBY_at; Start 99; Stop 123
tgcagaagttgcgtacagccacgac

SEQ ID NO: 239322 - DNA, 25 bp, Artificial
  probe
  misc_feature (1)..(25): SEQ ID NO: 2227; WAN024GBY_at; Start 33; Stop 57
ccttgaagcaatggcaaacgatggc

SEQ ID NO: 239323 - DNA, 25 bp, Artificial
  probe
  misc_feature (1)..(25): SEQ ID NO: 2227; WAN024GBY_at; Start 102; Stop 126
agaagttgcgtacagccacgacgaa

SEQ ID NO: 239324 - DNA, 25 bp, Artificial
  probe
  misc_feature (1)..(25): SEQ ID NO: 2227; WAN024GBY_at; Start 10; Stop 34
catttggttagaatcatcaaccgcc

SEQ ID NO: 239325 - DNA, 25 bp, Artificial
  probe
  misc_feature (1)..(25): SEQ ID NO: 2227; WAN024GBY_at; Start 70; Stop 94
cgtaattttgaacgcgaaggagttg

SEQ ID NO: 239326 - DNA, 25 bp, Artificial
  probe
  misc_feature (1)..(25): SEQ ID NO: 2227; WAN024GBY_at; Start 41; Stop 65
caatggcaaacgatggcggaaattt

SEQ ID NO: 239327 - DNA, 25 bp, Artificial
  probe
  misc_feature (1)..(25): SEQ ID NO: 2227; WAN024GBY_at; Start 3; Stop 27
ggaatcacatttggttagaatcatc

SEQ ID NO: 239328 - DNA, 25 bp, Artificial
  probe
  misc_feature (1)..(25): SEQ ID NO: 2227; WAN024GBY_at; Start 80; Stop 104
aacgcgaaggagttgttgttgcaga

SEQ ID NO: 239329 - DNA, 25 bp, Artificial
  probe
  misc_feature (1)..(25): SEQ ID NO: 2227; WAN024GBY_at; Start 150; Stop 174
tcgtgacgtagaagatcgcgaaacg

SEQ ID NO: 239330 - DNA, 25 bp, Artificial
  probe
  misc_feature (1)..(25): SEQ ID NO: 2227; WAN024GBY_at; Start 136; Stop 160
ccaatctttacccttcgtgacgtag

SEQ ID NO: 239331 - DNA, 25 bp, Artificial
  probe
  misc_feature (1)..(25): SEQ ID NO: 2227; WAN024GBY_at; Start 73; Stop 97
aattttgaacgcgaaggagttgttg

SEQ ID NO: 239332 - DNA, 25 bp, Artificial
  probe
  misc_feature (1)..(25): SEQ ID NO: 2227; WAN024GBY_at; Start 26; Stop 50
tcaaccgccttgaagcaatggcaaa

SEQ ID NO: 239333 - DNA, 25 bp, Artificial
  probe
  misc_feature (1)..(25): SEQ ID NO: 2227; WAN024GBY_at; Start 201; Stop 225
cgcaatggaaatttacgaacttctc

SEQ ID NO: 239334 - DNA, 25 bp, Artificial
  probe
  misc_feature (1)..(25): SEQ ID NO: 2227; WAN024GBY_at; Start 30; Stop 54
ccgccttgaagcaatggcaaacgat

SEQ ID NO: 239335 - DNA, 25 bp, Artificial
  probe
  misc_feature (1)..(25): SEQ ID NO: 2227; WAN024GBY_at; Start 206; Stop 230
tggaaatttacgaacttctctacta

SEQ ID NO: 239336 - DNA, 25 bp, Artificial
  probe
  misc_feature (1)..(25): SEQ ID NO: 2227; WAN024GBY_at; Start 16; Stop 40
gttagaatcatcaaccgccttgaag

SEQ ID NO: 239337 - DNA, 25 bp, Artificial
  probe
  misc_feature (1)..(25): SEQ ID NO: 2227; WAN024GBY_at; Start 180; Stop 204
gtttgatagcattgacttaatcgca

SEQ ID NO: 239338 - DNA, 25 bp, Artificial
  probe
  misc_feature (1)..(25): SEQ ID NO: 2227; WAN024GBY_at; Start 86; Stop 110
aaggagttgttgttgcagaagttgc

SEQ ID NO: 239339 - DNA, 25 bp, Artificial
  probe
  misc_feature (1)..(25): SEQ ID NO: 2227; WAN024GBY_at; Start 104; Stop 128
aagttgcgtacagccacgacgaaga

SEQ ID NO: 239340 - DNA, 25 bp, Artificial
  probe
  misc_feature (1)..(25): SEQ ID NO: 2227; WAN024GBY_at; Start 37; Stop 61
gaagcaatggcaaacgatggcggaa

SEQ ID NO: 239341 - DNA, 25 bp, Artificial
  probe
  misc_feature (1)..(25): SEQ ID NO: 2227; WAN024GBY_at; Start 23; Stop 47
tcatcaaccgccttgaagcaatggc

SEQ ID NO: 239342 - DNA, 25 bp, Artificial
  probe
  misc_feature (1)..(25): SEQ ID NO: 2227; WAN024GBY_at; Start 144; Stop 168
tacccttcgtgacgtagaagatcgc

SEQ ID NO: 239343 - DNA, 25 bp, Artificial
  probe
  misc_feature (1)..(25): SEQ ID NO: 2227; WAN024GBY_at; Start 184; Stop 208
gatagcattgacttaatcgcaatgg

SEQ ID NO: 239344 - DNA, 25 bp, Artificial
  probe
  misc_feature (1)..(25): SEQ ID NO: 2227; WAN024GBY_at; Start 43; Stop 67
atggcaaacgatggcggaaatttaa

SEQ ID NO: 239345 - DNA, 25 bp, Artificial
  probe
  misc_feature (1)..(25): SEQ ID NO: 2227; WAN024GBY_at; Start 171; Stop 195
aacgtatacgtttgatagcattgac

SEQ ID NO: 239346 - DNA, 25 bp, Artificial
  probe
  misc_feature (1)..(25): SEQ ID NO: 2227; WAN024GBY_at; Start 118; Stop 142
cacgacgaagaaaacggcccaatct

SEQ ID NO: 239347 - DNA, 25 bp, Artificial
  probe
  misc_feature (1)..(25): SEQ ID NO: 2227; WAN024GBY_at; Start 160; Stop 184
gaagatcgcgaaacgtatacgtttg

SEQ ID NO: 239348 - DNA, 25 bp, Artificial
  probe
  misc_feature (1)..(25): SEQ ID NO: 2227; WAN024GBY_at; Start 158; Stop 182
tagaagatcgcgaaacgtatacgtt

SEQ ID NO: 239349 - DNA, 25 bp, Artificial
  probe
  misc_feature (1)..(25): SEQ ID NO: 5404; WAN024GBZ_at; Start 37; Stop 61
cggttcataaactctgggctaaaga

SEQ ID NO: 239350 - DNA, 25 bp, Artificial
  probe
  misc_feature (1)..(25): SEQ ID NO: 5404; WAN024GBZ_at; Start 119; Stop 143
caacgctagcttcggtctttcctgt

SEQ ID NO: 239351 - DNA, 25 bp, Artificial
  probe
  misc_feature (1)..(25): SEQ ID NO: 5404; WAN024GBZ_at; Start 91; Stop 115
gtacgtccttctctagcagcaccaa

SEQ ID NO: 239352 - DNA, 25 bp, Artificial
  probe
  misc_feature (1)..(25): SEQ ID NO: 5404; WAN024GBZ_at; Start 47; Stop 71
actctgggctaaagaagttaccgag

SEQ ID NO: 239353 - DNA, 25 bp, Artificial
  probe
  misc_feature (1)..(25): SEQ ID NO: 5404; WAN024GBZ_at; Start 1; Stop 25
ttgctgagagccttaaattcgataa

SEQ ID NO: 239354 - DNA, 25 bp, Artificial
  probe
  misc_feature (1)..(25): SEQ ID NO: 5404; WAN024GBZ_at; Start 99; Stop 123
ttctctagcagcaccaaatccaacg

SEQ ID NO: 239355 - DNA, 25 bp, Artificial
  probe
  misc_feature (1)..(25): SEQ ID NO: 5404; WAN024GBZ_at; Start 68; Stop 92
cgagttcaccgaggacagaattggt

SEQ ID NO: 239356 - DNA, 25 bp, Artificial
  probe
  misc_feature (1)..(25): SEQ ID NO: 5404; WAN024GBZ_at; Start 88; Stop 112
ttggtacgtccttctctagcagcac

SEQ ID NO: 239357 - DNA, 25 bp, Artificial
  probe
  misc_feature (1)..(25): SEQ ID NO: 5404; WAN024GBZ_at; Start 104; Stop 128
tagcagcaccaaatccaacgctagc

SEQ ID NO: 239358 - DNA, 25 bp, Artificial
  probe
  misc_feature (1)..(25): SEQ ID NO: 5404; WAN024GBZ_at; Start 164; Stop 188
taatgatggcatccttgaagctaac

SEQ ID NO: 239359 - DNA, 25 bp, Artificial
  probe
  misc_feature (1)..(25): SEQ ID NO: 5404; WAN024GBZ_at; Start 85; Stop 109
gaattggtacgtccttctctagcag

SEQ ID NO: 239360 - DNA, 25 bp, Artificial
  probe
  misc_feature (1)..(25): SEQ ID NO: 5404; WAN024GBZ_at; Start 179; Stop 203
tgaagctaacggtgcgtccttgccc

SEQ ID NO: 239361 - DNA, 25 bp, Artificial
  probe
  misc_feature (1)..(25): SEQ ID NO: 5404; WAN024GBZ_at; Start 63; Stop 87
gttaccgagttcaccgaggacagaa

SEQ ID NO: 239362 - DNA, 25 bp, Artificial
  probe
  misc_feature (1)..(25): SEQ ID NO: 5404; WAN024GBZ_at; Start 125; Stop 149
tagcttcggtctttcctgtacctgc

SEQ ID NO: 239363 - DNA, 25 bp, Artificial
  probe
  misc_feature (1)..(25): SEQ ID NO: 5404; WAN024GBZ_at; Start 204; Stop 228
gtctgtcaaacgaccatcgtccaag

SEQ ID NO: 239364 - DNA, 25 bp, Artificial
  probe
  misc_feature (1)..(25): SEQ ID NO: 5404; WAN024GBZ_at; Start 73; Stop 97
tcaccgaggacagaattggtacgtc

SEQ ID NO: 239365 - DNA, 25 bp, Artificial
  probe
  misc_feature (1)..(25): SEQ ID NO: 5404; WAN024GBZ_at; Start 18; Stop 42
ttcgataatgccatcaaaacggttc

SEQ ID NO: 239366 - DNA, 25 bp, Artificial
  probe
  misc_feature (1)..(25): SEQ ID NO: 5404; WAN024GBZ_at; Start 176; Stop 200
ccttgaagctaacggtgcgtccttg

SEQ ID NO: 239367 - DNA, 25 bp, Artificial
  probe
  misc_feature (1)..(25): SEQ ID NO: 5404; WAN024GBZ_at; Start 145; Stop 169
cctgcatttgaggtcatgataatga

SEQ ID NO: 239368 - DNA, 25 bp, Artificial
  probe
  misc_feature (1)..(25): SEQ ID NO: 5404; WAN024GBZ_at; Start 51; Stop 75
tgggctaaagaagttaccgagttca

SEQ ID NO: 239369 - DNA, 25 bp, Artificial
  probe
  misc_feature (1)..(25): SEQ ID NO: 5404; WAN024GBZ_at; Start 168; Stop 192
gatggcatccttgaagctaacggtg

SEQ ID NO: 239370 - DNA, 25 bp, Artificial
  probe
  misc_feature (1)..(25): SEQ ID NO: 5404; WAN024GBZ_at; Start 113; Stop 137
caaatccaacgctagcttcggtctt

SEQ ID NO: 239371 - DNA, 25 bp, Artificial
  probe
  misc_feature (1)..(25): SEQ ID NO: 5404; WAN024GBZ_at; Start 132; Stop 156
ggtctttcctgtacctgcatttgag

SEQ ID NO: 239372 - DNA, 25 bp, Artificial
  probe
  misc_feature (1)..(25): SEQ ID NO: 5404; WAN024GBZ_at; Start 139; Stop 163
cctgtacctgcatttgaggtcatga

SEQ ID NO: 239373 - DNA, 25 bp, Artificial
  probe
  misc_feature (1)..(25): SEQ ID NO: 5404; WAN024GBZ_at; Start 153; Stop 177
tgaggtcatgataatgatggcatcc

SEQ ID NO: 239374 - DNA, 25 bp, Artificial
  probe
  misc_feature (1)..(25): SEQ ID NO: 5404; WAN024GBZ_at; Start 185; Stop 209
taacggtgcgtccttgcccgtctgt

SEQ ID NO: 239375 - DNA, 25 bp, Artificial
  probe
  misc_feature (1)..(25): SEQ ID NO: 5404; WAN024GBZ_at; Start 60; Stop 84
gaagttaccgagttcaccgaggaca

SEQ ID NO: 239376 - DNA, 25 bp, Artificial
  probe
  misc_feature (1)..(25): SEQ ID NO: 5404; WAN024GBZ_at; Start 198; Stop 222
ttgcccgtctgtcaaacgaccatcg

SEQ ID NO: 239377 - DNA, 25 bp, Artificial
  probe
  misc_feature (1)..(25): SEQ ID NO: 5404; WAN024GBZ_at; Start 31; Stop 55
tcaaaacggttcataaactctgggc

SEQ ID NO: 239378 - DNA, 25 bp, Artificial
  probe
  misc_feature (1)..(25): SEQ ID NO: 5404; WAN024GBZ_at; Start 210; Stop 234
caaacgaccatcgtccaagacttga

SEQ ID NO: 239379 - DNA, 25 bp, Artificial
  probe
  misc_feature (1)..(25): SEQ ID NO: 5404; WAN024GBZ_at; Start 6; Stop 30
gagagccttaaattcgataatgcca

SEQ ID NO: 239380 - DNA, 25 bp, Artificial
  probe
  misc_feature (1)..(25): SEQ ID NO: 5404; WAN024GBZ_at; Start 21; Stop 45
gataatgccatcaaaacggttcata

SEQ ID NO: 239381 - DNA, 25 bp, Artificial
  probe
  misc_feature (1)..(25): SEQ ID NO: 5404; WAN024GBZ_at; Start 173; Stop 197
catccttgaagctaacggtgcgtcc

SEQ ID NO: 239382 - DNA, 25 bp, Artificial
  probe
  misc_feature (1)..(25): SEQ ID NO: 5404; WAN024GBZ_at; Start 109; Stop 133
gcaccaaatccaacgctagcttcgg

SEQ ID NO: 239383 - DNA, 25 bp, Artificial
  probe
  misc_feature (1)..(25): SEQ ID NO: 5037; WAN024GC2_at; Start 101; Stop 125
ctatcagcagaaccaaaaagttcga

SEQ ID NO: 239384 - DNA, 25 bp, Artificial
  probe
  misc_feature (1)..(25): SEQ ID NO: 5037; WAN024GC2_at; Start 77; Stop 101
tcactcatatcaaagcgaatcatac

SEQ ID NO: 239385 - DNA, 25 bp, Artificial
  probe
  misc_feature (1)..(25): SEQ ID NO: 5037; WAN024GC2_at; Start 108; Stop 132
cagaaccaaaaagttcgatagccag

SEQ ID NO: 239386 - DNA, 25 bp, Artificial
  probe
  misc_feature (1)..(25): SEQ ID NO: 5037; WAN024GC2_at; Start 55; Stop 79
cacactatgtttttccatgtattca

SEQ ID NO: 239387 - DNA, 25 bp, Artificial
  probe
  misc_feature (1)..(25): SEQ ID NO: 5037; WAN024GC2_at; Start 276; Stop 300
catgagacttgagatcttcggctag

SEQ ID NO: 239388 - DNA, 25 bp, Artificial
  probe
  misc_feature (1)..(25): SEQ ID NO: 5037; WAN024GC2_at; Start 86; Stop 110
tcaaagcgaatcatactatcagcag

SEQ ID NO: 239389 - DNA, 25 bp, Artificial
  probe
  misc_feature (1)..(25): SEQ ID NO: 5037; WAN024GC2_at; Start 178; Stop 202
gaggaagcttccgattgggcggtta

SEQ ID NO: 239390 - DNA, 25 bp, Artificial
  probe
  misc_feature (1)..(25): SEQ ID NO: 5037; WAN024GC2_at; Start 269; Stop 293
ccaataacatgagacttgagatctt

SEQ ID NO: 239391 - DNA, 25 bp, Artificial
  probe
  misc_feature (1)..(25): SEQ ID NO: 5037; WAN024GC2_at; Start 273; Stop 297
taacatgagacttgagatcttcggc

SEQ ID NO: 239392 - DNA, 25 bp, Artificial
  probe
  misc_feature (1)..(25): SEQ ID NO: 5037; WAN024GC2_at; Start 238; Stop 262
cttggcaatcttatcgactgcatca

SEQ ID NO: 239393 - DNA, 25 bp, Artificial
  probe
  misc_feature (1)..(25): SEQ ID NO: 5037; WAN024GC2_at; Start 134; Stop 158
tgtttggaaagttctgtcttaccga

SEQ ID NO: 239394 - DNA, 25 bp, Artificial
  probe
  misc_feature (1)..(25): SEQ ID NO: 5037; WAN024GC2_at; Start 243; Stop 267
caatcttatcgactgcatcatcttg

SEQ ID NO: 239395 - DNA, 25 bp, Artificial
  probe
  misc_feature (1)..(25): SEQ ID NO: 5037; WAN024GC2_at; Start 51; Stop 75
tagccacactatgtttttccatgta

SEQ ID NO: 239396 - DNA, 25 bp, Artificial
  probe
  misc_feature (1)..(25): SEQ ID NO: 5037; WAN024GC2_at; Start 23; Stop 47
acataacctggaggggcgccgacca

SEQ ID NO: 239397 - DNA, 25 bp, Artificial
  probe
  misc_feature (1)..(25): SEQ ID NO: 5037; WAN024GC2_at; Start 40; Stop 64
gccgaccaacttagccacactatgt

SEQ ID NO: 239398 - DNA, 25 bp, Artificial
  probe
  misc_feature (1)..(25): SEQ ID NO: 5037; WAN024GC2_at; Start 162; Stop 186
cagttggcccaacgaagaggaagct

SEQ ID NO: 239399 - DNA, 25 bp, Artificial
  probe
  misc_feature (1)..(25): SEQ ID NO: 5037; WAN024GC2_at; Start 207; Stop 231
taccaagtccgacacgattacggcg

SEQ ID NO: 239400 - DNA, 25 bp, Artificial
  probe
  misc_feature (1)..(25): SEQ ID NO: 5037; WAN024GC2_at; Start 70; Stop 94
catgtattcactcatatcaaagcga

SEQ ID NO: 239401 - DNA, 25 bp, Artificial
  probe
  misc_feature (1)..(25): SEQ ID NO: 5037; WAN024GC2_at; Start 96; Stop 120
tcatactatcagcagaaccaaaaag

SEQ ID NO: 239402 - DNA, 25 bp, Artificial
  probe
  misc_feature (1)..(25): SEQ ID NO: 5037; WAN024GC2_at; Start 221; Stop 245
cgattacggcgaatagccttggcaa

SEQ ID NO: 239403 - DNA, 25 bp, Artificial
  probe
  misc_feature (1)..(25): SEQ ID NO: 5037; WAN024GC2_at; Start 13; Stop 37
atcatagccaacataacctggaggg

SEQ ID NO: 239404 - DNA, 25 bp, Artificial
  probe
  misc_feature (1)..(25): SEQ ID NO: 5037; WAN024GC2_at; Start 91; Stop 115
gcgaatcatactatcagcagaacca

SEQ ID NO: 239405 - DNA, 25 bp, Artificial
  probe
  misc_feature (1)..(25): SEQ ID NO: 5037; WAN024GC2_at; Start 227; Stop 251
cggcgaatagccttggcaatcttat

SEQ ID NO: 239406 - DNA, 25 bp, Artificial
  probe
  misc_feature (1)..(25): SEQ ID NO: 5037; WAN024GC2_at; Start 214; Stop 238
tccgacacgattacggcgaatagcc

SEQ ID NO: 239407 - DNA, 25 bp, Artificial
  probe
  misc_feature (1)..(25): SEQ ID NO: 5037; WAN024GC2_at; Start 210; Stop 234
caagtccgacacgattacggcgaat

SEQ ID NO: 239408 - DNA, 25 bp, Artificial
  probe
  misc_feature (1)..(25): SEQ ID NO: 5037; WAN024GC2_at; Start 3; Stop 27
gaccagcctcatcatagccaacata

SEQ ID NO: 239409 - DNA, 25 bp, Artificial
  probe
  misc_feature (1)..(25): SEQ ID NO: 5037; WAN024GC2_at; Start 168; Stop 192
gcccaacgaagaggaagcttccgat

SEQ ID NO: 239410 - DNA, 25 bp, Artificial
  probe
  misc_feature (1)..(25): SEQ ID NO: 5037; WAN024GC2_at; Start 172; Stop 196
aacgaagaggaagcttccgattggg

SEQ ID NO: 239411 - DNA, 25 bp, Artificial
  probe
  misc_feature (1)..(25): SEQ ID NO: 5037; WAN024GC2_at; Start 113; Stop 137
ccaaaaagttcgatagccagttgtt

SEQ ID NO: 239412 - DNA, 25 bp, Artificial
  probe
  misc_feature (1)..(25): SEQ ID NO: 5037; WAN024GC2_at; Start 165; Stop 189
ttggcccaacgaagaggaagcttcc

SEQ ID NO: 239413 - DNA, 25 bp, Artificial
  probe
  misc_feature (1)..(25): SEQ ID NO: 5037; WAN024GC2_at; Start 148; Stop 172
tgtcttaccgacaccagttggccca

SEQ ID NO: 239414 - DNA, 25 bp, Artificial
  probe
  misc_feature (1)..(25): SEQ ID NO: 5037; WAN024GC2_at; Start 140; Stop 164
gaaagttctgtcttaccgacaccag

SEQ ID NO: 239415 - DNA, 25 bp, Artificial
  probe
  misc_feature (1)..(25): SEQ ID NO: 5037; WAN024GC2_at; Start 116; Stop 140
aaaagttcgatagccagttgtttgg

SEQ ID NO: 239416 - DNA, 25 bp, Artificial
  probe
  misc_feature (1)..(25): SEQ ID NO: 5037; WAN024GC2_at; Start 123; Stop 147
cgatagccagttgtttggaaagttc

SEQ ID NO: 239417 - DNA, 25 bp, Artificial
  probe
  misc_feature (1)..(25): SEQ ID NO: 2353; WAN024GC3_at; Start 226; Stop 250
caagcgctgatcaattactttagga

SEQ ID NO: 239418 - DNA, 25 bp, Artificial
  probe
  misc_feature (1)..(25): SEQ ID NO: 2353; WAN024GC3_at; Start 57; Stop 81
tctgctcgataatgtgctcaatagt

SEQ ID NO: 239419 - DNA, 25 bp, Artificial
  probe
  misc_feature (1)..(25): SEQ ID NO: 2353; WAN024GC3_at; Start 162; Stop 186
agtaggccgccttctcaaaatcttc

SEQ ID NO: 239420 - DNA, 25 bp, Artificial
  probe
  misc_feature (1)..(25): SEQ ID NO: 2353; WAN024GC3_at; Start 273; Stop 297
tcatcttagaaccagcttcatctag

SEQ ID NO: 239421 - DNA, 25 bp, Artificial
  probe
  misc_feature (1)..(25): SEQ ID NO: 2353; WAN024GC3_at; Start 178; Stop 202
aaaatcttcttctcgtgtagcttga

SEQ ID NO: 239422 - DNA, 25 bp, Artificial
  probe
  misc_feature (1)..(25): SEQ ID NO: 2353; WAN024GC3_at; Start 265; Stop 289
ggtcaagttcatcttagaaccagct

SEQ ID NO: 239423 - DNA, 25 bp, Artificial
  probe
  misc_feature (1)..(25): SEQ ID NO: 2353; WAN024GC3_at; Start 135; Stop 159
ccttatacttggcaatctggtcgcg

SEQ ID NO: 239424 - DNA, 25 bp, Artificial
  probe
  misc_feature (1)..(25): SEQ ID NO: 2353; WAN024GC3_at; Start 210; Stop 234
gattttcagcctcaatcaagcgctg

SEQ ID NO: 239425 - DNA, 25 bp, Artificial
  probe
  misc_feature (1)..(25): SEQ ID NO: 2353; WAN024GC3_at; Start 148; Stop 172
aatctggtcgcggaagtaggccgcc

SEQ ID NO: 239426 - DNA, 25 bp, Artificial
  probe
  misc_feature (1)..(25): SEQ ID NO: 2353; WAN024GC3_at; Start 29; Stop 53
ttcaaatcaccaacagggatattgg

SEQ ID NO: 239427 - DNA, 25 bp, Artificial
  probe
  misc_feature (1)..(25): SEQ ID NO: 2353; WAN024GC3_at; Start 1; Stop 25
atggatgagttgagattgttctttc

SEQ ID NO: 239428 - DNA, 25 bp, Artificial
  probe
  misc_feature (1)..(25): SEQ ID NO: 2353; WAN024GC3_at; Start 170; Stop 194
gccttctcaaaatcttcttctcgtg

SEQ ID NO: 239429 - DNA, 25 bp, Artificial
  probe
  misc_feature (1)..(25): SEQ ID NO: 2353; WAN024GC3_at; Start 190; Stop 214
tcgtgtagcttgagacttgagattt

SEQ ID NO: 239430 - DNA, 25 bp, Artificial
  probe
  misc_feature (1)..(25): SEQ ID NO: 2353; WAN024GC3_at; Start 142; Stop 166
cttggcaatctggtcgcggaagtag

SEQ ID NO: 239431 - DNA, 25 bp, Artificial
  probe
  misc_feature (1)..(25): SEQ ID NO: 2353; WAN024GC3_at; Start 253; Stop 277
cacaaaattcaaggtcaagttcatc

SEQ ID NO: 239432 - DNA, 25 bp, Artificial
  probe
  misc_feature (1)..(25): SEQ ID NO: 2353; WAN024GC3_at; Start 123; Stop 147
tcttttgcatttccttatacttggc

SEQ ID NO: 239433 - DNA, 25 bp, Artificial
  probe
  misc_feature (1)..(25): SEQ ID NO: 2353; WAN024GC3_at; Start 23; Stop 47
ttctctttcaaatcaccaacaggga

SEQ ID NO: 239434 - DNA, 25 bp, Artificial
  probe
  misc_feature (1)..(25): SEQ ID NO: 2353; WAN024GC3_at; Start 185; Stop 209
tcttctcgtgtagcttgagacttga

SEQ ID NO: 239435 - DNA, 25 bp, Artificial
  probe
  misc_feature (1)..(25): SEQ ID NO: 2353; WAN024GC3_at; Start 208; Stop 232
gagattttcagcctcaatcaagcgc

SEQ ID NO: 239436 - DNA, 25 bp, Artificial
  probe
  misc_feature (1)..(25): SEQ ID NO: 2353; WAN024GC3_at; Start 197; Stop 221
gcttgagacttgagattttcagcct

SEQ ID NO: 239437 - DNA, 25 bp, Artificial
  probe
  misc_feature (1)..(25): SEQ ID NO: 2353; WAN024GC3_at; Start 52; Stop 76
ggttttctgctcgataatgtgctca

SEQ ID NO: 239438 - DNA, 25 bp, Artificial
  probe
  misc_feature (1)..(25): SEQ ID NO: 2353; WAN024GC3_at; Start 244; Stop 268
tttaggatccacaaaattcaaggtc

SEQ ID NO: 239439 - DNA, 25 bp, Artificial
  probe
  misc_feature (1)..(25): SEQ ID NO: 2353; WAN024GC3_at; Start 96; Stop 120
taggagtatcctggtctgtgatctt

SEQ ID NO: 239440 - DNA, 25 bp, Artificial
  probe
  misc_feature (1)..(25): SEQ ID NO: 2353; WAN024GC3_at; Start 234; Stop 258
gatcaattactttaggatccacaaa

SEQ ID NO: 239441 - DNA, 25 bp, Artificial
  probe
  misc_feature (1)..(25): SEQ ID NO: 2353; WAN024GC3_at; Start 67; Stop 91
aatgtgctcaatagttttctcgctg

SEQ ID NO: 239442 - DNA, 25 bp, Artificial
  probe
  misc_feature (1)..(25): SEQ ID NO: 2353; WAN024GC3_at; Start 39; Stop 63
caacagggatattggttttctgctc

SEQ ID NO: 239443 - DNA, 25 bp, Artificial
  probe
  misc_feature (1)..(25): SEQ ID NO: 2353; WAN024GC3_at; Start 12; Stop 36
gagattgttctttctctttcaaatc

SEQ ID NO: 239444 - DNA, 25 bp, Artificial
  probe
  misc_feature (1)..(25): SEQ ID NO: 2353; WAN024GC3_at; Start 70; Stop 94
gtgctcaatagttttctcgctgatg

SEQ ID NO: 239445 - DNA, 25 bp, Artificial
  probe
  misc_feature (1)..(25): SEQ ID NO: 2353; WAN024GC3_at; Start 248; Stop 272
ggatccacaaaattcaaggtcaagt

SEQ ID NO: 239446 - DNA, 25 bp, Artificial
  probe
  misc_feature (1)..(25): SEQ ID NO: 2353; WAN024GC3_at; Start 108; Stop 132
ggtctgtgatctttttcttttgcat

SEQ ID NO: 239447 - DNA, 25 bp, Artificial
  probe
  misc_feature (1)..(25): SEQ ID NO: 2353; WAN024GC3_at; Start 152; Stop 176
tggtcgcggaagtaggccgccttct

SEQ ID NO: 239448 - DNA, 25 bp, Artificial
  probe
  misc_feature (1)..(25): SEQ ID NO: 2353; WAN024GC3_at; Start 138; Stop 162
tatacttggcaatctggtcgcggaa

SEQ ID NO: 239449 - DNA, 25 bp, Artificial
  probe
  misc_feature (1)..(25): SEQ ID NO: 2353; WAN024GC3_at; Start 44; Stop 68
gggatattggttttctgctcgataa

SEQ ID NO: 239450 - DNA, 25 bp, Artificial
  probe
  misc_feature (1)..(25): SEQ ID NO: 2353; WAN024GC3_at; Start 216; Stop 240
cagcctcaatcaagcgctgatcaat

SEQ ID NO: 239451 - DNA, 25 bp, Artificial
  probe
  misc_feature (1)..(25): SEQ ID NO: 5088; WAN024GC4_at; Start 42; Stop 66
tttaacaggctgcatacgacgctcg

SEQ ID NO: 239452 - DNA, 25 bp, Artificial
  probe
  misc_feature (1)..(25): SEQ ID NO: 5088; WAN024GC4_at; Start 98; Stop 122
cattgagggtagtagcaccgactag

SEQ ID NO: 239453 - DNA, 25 bp, Artificial
  probe
  misc_feature (1)..(25): SEQ ID NO: 5088; WAN024GC4_at; Start 206; Stop 230
tttcatggatttcatcgataaagag

SEQ ID NO: 239454 - DNA, 25 bp, Artificial
  probe
  misc_feature (1)..(25): SEQ ID NO: 5088; WAN024GC4_at; Start 124; Stop 148
tgcagttctccacgagcaagggctg

SEQ ID NO: 239455 - DNA, 25 bp, Artificial
  probe
  misc_feature (1)..(25): SEQ ID NO: 5088; WAN024GC4_at; Start 221; Stop 245
cgataaagaggatgatgtcttcacg

SEQ ID NO: 239456 - DNA, 25 bp, Artificial
  probe
  misc_feature (1)..(25): SEQ ID NO: 5088; WAN024GC4_at; Start 199; Stop 223
ccaacaatttcatggatttcatcga

SEQ ID NO: 239457 - DNA, 25 bp, Artificial
  probe
  misc_feature (1)..(25): SEQ ID NO: 5088; WAN024GC4_at; Start 156; Stop 180
gatatttcctgcgtccatattacca

SEQ ID NO: 239458 - DNA, 25 bp, Artificial
  probe
  misc_feature (1)..(25): SEQ ID NO: 5088; WAN024GC4_at; Start 242; Stop 266
cacgtttgcgaatttcttccatgag

SEQ ID NO: 239459 - DNA, 25 bp, Artificial
  probe
  misc_feature (1)..(25): SEQ ID NO: 5088; WAN024GC4_at; Start 31; Stop 55
ggttcatcgactttaacaggctgca

SEQ ID NO: 239460 - DNA, 25 bp, Artificial
  probe
  misc_feature (1)..(25): SEQ ID NO: 5088; WAN024GC4_at; Start 3; Stop 27
gagaatagtgattgtttcgtccacc

SEQ ID NO: 239461 - DNA, 25 bp, Artificial
  probe
  misc_feature (1)..(25): SEQ ID NO: 5088; WAN024GC4_at; Start 272; Stop 296
gcatgcgttcttcaaattgtcctcg

SEQ ID NO: 239462 - DNA, 25 bp, Artificial
  probe
  misc_feature (1)..(25): SEQ ID NO: 5088; WAN024GC4_at; Start 66; Stop 90
gagggcagcatccttttcaatgata

SEQ ID NO: 239463 - DNA, 25 bp, Artificial
  probe
  misc_feature (1)..(25): SEQ ID NO: 5088; WAN024GC4_at; Start 190; Stop 214
gaaccagcaccaacaatttcatgga

SEQ ID NO: 239464 - DNA, 25 bp, Artificial
  probe
  misc_feature (1)..(25): SEQ ID NO: 5088; WAN024GC4_at; Start 288; Stop 312
ttgtcctcgaatccccgttccttga

SEQ ID NO: 239465 - DNA, 25 bp, Artificial
  probe
  misc_feature (1)..(25): SEQ ID NO: 5088; WAN024GC4_at; Start 12; Stop 36
gattgtttcgtccaccgttggttca

SEQ ID NO: 239466 - DNA, 25 bp, Artificial
  probe
  misc_feature (1)..(25): SEQ ID NO: 5088; WAN024GC4_at; Start 103; Stop 127
agggtagtagcaccgactagttgca

SEQ ID NO: 239467 - DNA, 25 bp, Artificial
  probe
  misc_feature (1)..(25): SEQ ID NO: 5088; WAN024GC4_at; Start 140; Stop 164
caagggctggcttgaggatatttcc

SEQ ID NO: 239468 - DNA, 25 bp, Artificial
  probe
  misc_feature (1)..(25): SEQ ID NO: 5088; WAN024GC4_at; Start 185; Stop 209
tcgcagaaccagcaccaacaatttc

SEQ ID NO: 239469 - DNA, 25 bp, Artificial
  probe
  misc_feature (1)..(25): SEQ ID NO: 5088; WAN024GC4_at; Start 173; Stop 197
tattaccatcactcgcagaaccagc

SEQ ID NO: 239470 - DNA, 25 bp, Artificial
  probe
  misc_feature (1)..(25): SEQ ID NO: 5088; WAN024GC4_at; Start 22; Stop 46
tccaccgttggttcatcgactttaa

SEQ ID NO: 239471 - DNA, 25 bp, Artificial
  probe
  misc_feature (1)..(25): SEQ ID NO: 5088; WAN024GC4_at; Start 261; Stop 285
catgagtttttgcatgcgttcttca

SEQ ID NO: 239472 - DNA, 25 bp, Artificial
  probe
  misc_feature (1)..(25): SEQ ID NO: 5088; WAN024GC4_at; Start 167; Stop 191
cgtccatattaccatcactcgcaga

SEQ ID NO: 239473 - DNA, 25 bp, Artificial
  probe
  misc_feature (1)..(25): SEQ ID NO: 5088; WAN024GC4_at; Start 61; Stop 85
cgctcgagggcagcatccttttcaa

SEQ ID NO: 239474 - DNA, 25 bp, Artificial
  probe
  misc_feature (1)..(25): SEQ ID NO: 5088; WAN024GC4_at; Start 250; Stop 274
cgaatttcttccatgagtttttgca

SEQ ID NO: 239475 - DNA, 25 bp, Artificial
  probe
  misc_feature (1)..(25): SEQ ID NO: 5088; WAN024GC4_at; Start 283; Stop 307
tcaaattgtcctcgaatccccgttc

SEQ ID NO: 239476 - DNA, 25 bp, Artificial
  probe
  misc_feature (1)..(25): SEQ ID NO: 5088; WAN024GC4_at; Start 86; Stop 110
tgatacggtattcattgagggtagt

SEQ ID NO: 239477 - DNA, 25 bp, Artificial
  probe
  misc_feature (1)..(25): SEQ ID NO: 5088; WAN024GC4_at; Start 117; Stop 141
gactagttgcagttctccacgagca

SEQ ID NO: 239478 - DNA, 25 bp, Artificial
  probe
  misc_feature (1)..(25): SEQ ID NO: 5088; WAN024GC4_at; Start 71; Stop 95
cagcatccttttcaatgatacggta

SEQ ID NO: 239479 - DNA, 25 bp, Artificial
  probe
  misc_feature (1)..(25): SEQ ID NO: 5088; WAN024GC4_at; Start 110; Stop 134
tagcaccgactagttgcagttctcc

SEQ ID NO: 239480 - DNA, 25 bp, Artificial
  probe
  misc_feature (1)..(25): SEQ ID NO: 5088; WAN024GC4_at; Start 130; Stop 154
tctccacgagcaagggctggcttga

SEQ ID NO: 239481 - DNA, 25 bp, Artificial
  probe
  misc_feature (1)..(25): SEQ ID NO: 5088; WAN024GC4_at; Start 229; Stop 253
aggatgatgtcttcacgtttgcgaa

SEQ ID NO: 239482 - DNA, 25 bp, Artificial
  probe
  misc_feature (1)..(25): SEQ ID NO: 5088; WAN024GC4_at; Start 94; Stop 118
tattcattgagggtagtagcaccga

SEQ ID NO: 239483 - DNA, 25 bp, Artificial
  probe
  misc_feature (1)..(25): SEQ ID NO: 5088; WAN024GC4_at; Start 148; Stop 172
ggcttgaggatatttcctgcgtcca

SEQ ID NO: 239484 - DNA, 25 bp, Artificial
  probe
  misc_feature (1)..(25): SEQ ID NO: 5088; WAN024GC4_at; Start 52; Stop 76
tgcatacgacgctcgagggcagcat

SEQ ID NO: 239485 - DNA, 25 bp, Artificial
  probe
  misc_feature (1)..(25): SEQ ID NO: 4375; WAN024GC5_at; Start 465; Stop 489
ccttatcggtgaacctggtgtcgga

SEQ ID NO: 239486 - DNA, 25 bp, Artificial
  probe
  misc_feature (1)..(25): SEQ ID NO: 4375; WAN024GC5_at; Start 535; Stop 559
gatgtgccacataaactccaaggta

SEQ ID NO: 239487 - DNA, 25 bp, Artificial
  probe
  misc_feature (1)..(25): SEQ ID NO: 4375; WAN024GC5_at; Start 840; Stop 864
cgagcgtcgtatgcagcctgttaaa

SEQ ID NO: 239488 - DNA, 25 bp, Artificial
  probe
  misc_feature (1)..(25): SEQ ID NO: 4375; WAN024GC5_at; Start 2071; Stop 2095
tatgatccaaaaatgggagcacgcc

SEQ ID NO: 239489 - DNA, 25 bp, Artificial
  probe
  misc_feature (1)..(25): SEQ ID NO: 4375; WAN024GC5_at; Start 288; Stop 312
aaatcgtggatctgctcaaactccg

SEQ ID NO: 239490 - DNA, 25 bp, Artificial
  probe
  misc_feature (1)..(25): SEQ ID NO: 4375; WAN024GC5_at; Start 1863; Stop 1887
caattctgtcctcggtgaactcggt

SEQ ID NO: 239491 - DNA, 25 bp, Artificial
  probe
  misc_feature (1)..(25): SEQ ID NO: 4375; WAN024GC5_at; Start 496; Stop 520
gccgttgtcgaaggtctagctcaga

SEQ ID NO: 239492 - DNA, 25 bp, Artificial
  probe
  misc_feature (1)..(25): SEQ ID NO: 4375; WAN024GC5_at; Start 742; Stop 766
ggaaatatcctcaagccagcccttg

SEQ ID NO: 239493 - DNA, 25 bp, Artificial
  probe
  misc_feature (1)..(25): SEQ ID NO: 4375; WAN024GC5_at; Start 1673; Stop 1697
tcgatgaagtggaaaaagctcaccc

SEQ ID NO: 239494 - DNA, 25 bp, Artificial
  probe
  misc_feature (1)..(25): SEQ ID NO: 4375; WAN024GC5_at; Start 1254; Stop 1278
tgagcacattatcgagcagaaaacc

SEQ ID NO: 239495 - DNA, 25 bp, Artificial
  probe
  misc_feature (1)..(25): SEQ ID NO: 4375; WAN024GC5_at; Start 553; Stop 577
caaggtaaacaagtcatccgtctgg

SEQ ID NO: 239496 - DNA, 25 bp, Artificial
  probe
  misc_feature (1)..(25): SEQ ID NO: 4375; WAN024GC5_at; Start 1753; Stop 1777
caaggacgcaccgttagcttcaagg

SEQ ID NO: 239497 - DNA, 25 bp, Artificial
  probe
  misc_feature (1)..(25): SEQ ID NO: 4375; WAN024GC5_at; Start 1961; Stop 1985
tccttcagattgtcgagctcatgct

SEQ ID NO: 239498 - DNA, 25 bp, Artificial
  probe
  misc_feature (1)..(25): SEQ ID NO: 4375; WAN024GC5_at; Start 1811; Stop 1835
caggaaagaccgaagctagcgttgg

SEQ ID NO: 239499 - DNA, 25 bp, Artificial
  probe
  misc_feature (1)..(25): SEQ ID NO: 4375; WAN024GC5_at; Start 1169; Stop 1193
tccgcgaccagattgccaagtataa

SEQ ID NO: 239500 - DNA, 25 bp, Artificial
  probe
  misc_feature (1)..(25): SEQ ID NO: 4375; WAN024GC5_at; Start 357; Stop 381
tgtaactgaaattgcccgtcgtgga

SEQ ID NO: 239501 - DNA, 25 bp, Artificial
  probe
  misc_feature (1)..(25): SEQ ID NO: 4375; WAN024GC5_at; Start 816; Stop 840
tatcattgaaaaggatgctgccctc

SEQ ID NO: 239502 - DNA, 25 bp, Artificial
  probe
  misc_feature (1)..(25): SEQ ID NO: 4375; WAN024GC5_at; Start 1380; Stop 1404
taagattgccaaggctattcgccgt

SEQ ID NO: 239503 - DNA, 25 bp, Artificial
  probe
  misc_feature (1)..(25): SEQ ID NO: 4375; WAN024GC5_at; Start 2184; Stop 2208
tatgactagcaagggaaacattcag

SEQ ID NO: 239504 - DNA, 25 bp, Artificial
  probe
  misc_feature (1)..(25): SEQ ID NO: 4375; WAN024GC5_at; Start 1144; Stop 1168
gaagattttgagaaggcggcctact

SEQ ID NO: 239505 - DNA, 25 bp, Artificial
  probe
  misc_feature (1)..(25): SEQ ID NO: 4375; WAN024GC5_at; Start 997; Stop 1021
caagatcgcttcttgcctgacaagg

SEQ ID NO: 239506 - DNA, 25 bp, Artificial
  probe
  misc_feature (1)..(25): SEQ ID NO: 4375; WAN024GC5_at; Start 1023; Stop 1047
cattgacctcctagatgaagctggt

SEQ ID NO: 239507 - DNA, 25 bp, Artificial
  probe
  misc_feature (1)..(25): SEQ ID NO: 4375; WAN024GC5_at; Start 1798; Stop 1822
tcaaatgcaggtacaggaaagaccg

SEQ ID NO: 239508 - DNA, 25 bp, Artificial
  probe
  misc_feature (1)..(25): SEQ ID NO: 4375; WAN024GC5_at; Start 860; Stop 884
ttaaagtcgatgaaccaacggtgga

SEQ ID NO: 239509 - DNA, 25 bp, Artificial
  probe
  misc_feature (1)..(25): SEQ ID NO: 4375; WAN024GC5_at; Start 611; Stop 635
gaggacaatttgaagaacgcatgca

SEQ ID NO: 239510 - DNA, 25 bp, Artificial
  probe
  misc_feature (1)..(25): SEQ ID NO: 4375; WAN024GC5_at; Start 126; Stop 150
tagcctcttcaaaggtatgacggat

SEQ ID NO: 239511 - DNA, 25 bp, Artificial
  probe
  misc_feature (1)..(25): SEQ ID NO: 4375; WAN024GC5_at; Start 78; Stop 102
tgacctctgtcaaaactgctataag

SEQ ID NO: 239512 - DNA, 25 bp, Artificial
  probe
  misc_feature (1)..(25): SEQ ID NO: 4375; WAN024GC5_at; Start 1716; Stop 1740
tcttcaagtcttggacgatggtcgt

SEQ ID NO: 239513 - DNA, 25 bp, Artificial
  probe
  misc_feature (1)..(25): SEQ ID NO: 4375; WAN024GC5_at; Start 519; Stop 543
gaaaattgtcgatggcgatgtgcca

SEQ ID NO: 239514 - DNA, 25 bp, Artificial
  probe
  misc_feature (1)..(25): SEQ ID NO: 4375; WAN024GC5_at; Start 768; Stop 792
tcgtggagaactgcaactagtcggt

SEQ ID NO: 239515 - DNA, 25 bp, Artificial
  probe
  misc_feature (1)..(25): SEQ ID NO: 4375; WAN024GC5_at; Start 399; Stop 423
tgggcgcgacgatgagattatccgt

SEQ ID NO: 239516 - DNA, 25 bp, Artificial
  probe
  misc_feature (1)..(25): SEQ ID NO: 4375; WAN024GC5_at; Start 1938; Stop 1962
taaggctctcagcaaggataacctc

SEQ ID NO: 239517 - DNA, 25 bp, Artificial
  probe
  misc_feature (1)..(25): SEQ ID NO: 4375; WAN024GC5_at; Start 384; Stop 408
cattgaccccgttattgggcgcgac

SEQ ID NO: 239518 - DNA, 25 bp, Artificial
  probe
  misc_feature (1)..(25): SEQ ID NO: 4375; WAN024GC5_at; Start 1985; Stop 2009
tagcagatgttaacaagcgcctctc

SEQ ID NO: 239519 - DNA, 25 bp, Artificial
  probe
  misc_feature (1)..(25): SEQ ID NO: 3901; WAN024GC6_at; Start 156; Stop 180
tgagttgattgaagagcttggtttc

SEQ ID NO: 239520 - DNA, 25 bp, Artificial
  probe
  misc_feature (1)..(25): SEQ ID NO: 3901; WAN024GC6_at; Start 72; Stop 96
tcttgttcaagaaccaaatggtgct

SEQ ID NO: 239521 - DNA, 25 bp, Artificial
  probe
  misc_feature (1)..(25): SEQ ID NO: 3901; WAN024GC6_at; Start 310; Stop 334
gaaaactttaatcatattgcctggt

SEQ ID NO: 239522 - DNA, 25 bp, Artificial
  probe
  misc_feature (1)..(25): SEQ ID NO: 3901; WAN024GC6_at; Start 46; Stop 70
cctaatcctgaacaaaaacaaattg

SEQ ID NO: 239523 - DNA, 25 bp, Artificial
  probe
  misc_feature (1)..(25): SEQ ID NO: 3901; WAN024GC6_at; Start 37; Stop 61
gcagttatccctaatcctgaacaaa

SEQ ID NO: 239524 - DNA, 25 bp, Artificial
  probe
  misc_feature (1)..(25): SEQ ID NO: 3901; WAN024GC6_at; Start 90; Stop 114
tggtgcttggttcctaccatgtgga

SEQ ID NO: 239525 - DNA, 25 bp, Artificial
  probe
  misc_feature (1)..(25): SEQ ID NO: 3901; WAN024GC6_at; Start 28; Stop 52
ggcgtatatgcagttatccctaatc

SEQ ID NO: 239526 - DNA, 25 bp, Artificial
  probe
  misc_feature (1)..(25): SEQ ID NO: 3901; WAN024GC6_at; Start 185; Stop 209
cagaaattggtacctattacggaca

SEQ ID NO: 239527 - DNA, 25 bp, Artificial
  probe
  misc_feature (1)..(25): SEQ ID NO: 3901; WAN024GC6_at; Start 15; Stop 39
tattgctcgctatggcgtatatgca

SEQ ID NO: 239528 - DNA, 25 bp, Artificial
  probe
  misc_feature (1)..(25): SEQ ID NO: 3901; WAN024GC6_at; Start 180; Stop 204
cacagcagaaattggtacctattac

SEQ ID NO: 239529 - DNA, 25 bp, Artificial
  probe
  misc_feature (1)..(25): SEQ ID NO: 3901; WAN024GC6_at; Start 166; Stop 190
gaagagcttggtttcacagcagaaa

SEQ ID NO: 239530 - DNA, 25 bp, Artificial
  probe
  misc_feature (1)..(25): SEQ ID NO: 3901; WAN024GC6_at; Start 330; Stop 354
ctggttccctattgacgaggctatc

SEQ ID NO: 239531 - DNA, 25 bp, Artificial
  probe
  misc_feature (1)..(25): SEQ ID NO: 3901; WAN024GC6_at; Start 201; Stop 225
ttacggacaagctgacgaatatttc

SEQ ID NO: 239532 - DNA, 25 bp, Artificial
  probe
  misc_feature (1)..(25): SEQ ID NO: 3901; WAN024GC6_at; Start 386; Stop 410
ccattgaatcttggaaaaaacagca

SEQ ID NO: 239533 - DNA, 25 bp, Artificial
  probe
  misc_feature (1)..(25): SEQ ID NO: 3901; WAN024GC6_at; Start 378; Stop 402
taaatgggccattgaatcttggaaa

SEQ ID NO: 239534 - DNA, 25 bp, Artificial
  probe
  misc_feature (1)..(25): SEQ ID NO: 3901; WAN024GC6_at; Start 362; Stop 386
ttaaacgtggtagccataaatgggc

SEQ ID NO: 239535 - DNA, 25 bp, Artificial
  probe
  misc_feature (1)..(25): SEQ ID NO: 3901; WAN024GC6_at; Start 204; Stop 228
cggacaagctgacgaatatttctat

SEQ ID NO: 239536 - DNA, 25 bp, Artificial
  probe
  misc_feature (1)..(25): SEQ ID NO: 3901; WAN024GC6_at; Start 195; Stop 219
tacctattacggacaagctgacgaa

SEQ ID NO: 239537 - DNA, 25 bp, Artificial
  probe
  misc_feature (1)..(25): SEQ ID NO: 3901; WAN024GC6_at; Start 120; Stop 144
tgaagcaggtgaaaatcatcaggaa

SEQ ID NO: 239538 - DNA, 25 bp, Artificial
  probe
  misc_feature (1)..(25): SEQ ID NO: 3901; WAN024GC6_at; Start 324; Stop 348
tattgcctggttccctattgacgag

SEQ ID NO: 239539 - DNA, 25 bp, Artificial
  probe
  misc_feature (1)..(25): SEQ ID NO: 3901; WAN024GC6_at; Start 1; Stop 25
gtgaatacagactatattgctcgct

SEQ ID NO: 239540 - DNA, 25 bp, Artificial
  probe
  misc_feature (1)..(25): SEQ ID NO: 3901; WAN024GC6_at; Start 124; Stop 148
gcaggtgaaaatcatcaggaagccc

SEQ ID NO: 239541 - DNA, 25 bp, Artificial
  probe
  misc_feature (1)..(25): SEQ ID NO: 3901; WAN024GC6_at; Start 258; Stop 282
tcctgcctacctctatgaagcaact

SEQ ID NO: 239542 - DNA, 25 bp, Artificial
  probe
  misc_feature (1)..(25): SEQ ID NO: 3901; WAN024GC6_at; Start 84; Stop 108
accaaatggtgcttggttcctacca

SEQ ID NO: 239543 - DNA, 25 bp, Artificial
  probe
  misc_feature (1)..(25): SEQ ID NO: 3901; WAN024GC6_at; Start 394; Stop 418
tcttggaaaaaacagcataagattg

SEQ ID NO: 239544 - DNA, 25 bp, Artificial
  probe
  misc_feature (1)..(25): SEQ ID NO: 3901; WAN024GC6_at; Start 301; Stop 325
aagccactagaaaactttaatcata

SEQ ID NO: 239545 - DNA, 25 bp, Artificial
  probe
  misc_feature (1)..(25): SEQ ID NO: 3901; WAN024GC6_at; Start 23; Stop 47
gctatggcgtatatgcagttatccc

SEQ ID NO: 239546 - DNA, 25 bp, Artificial
  probe
  misc_feature (1)..(25): SEQ ID NO: 3901; WAN024GC6_at; Start 286; Stop 310
ttcaaagaagtacaaaagccactag

SEQ ID NO: 239547 - DNA, 25 bp, Artificial
  probe
  misc_feature (1)..(25): SEQ ID NO: 3901; WAN024GC6_at; Start 367; Stop 391
cgtggtagccataaatgggccattg

SEQ ID NO: 239548 - DNA, 25 bp, Artificial
  probe
  misc_feature (1)..(25): SEQ ID NO: 3901; WAN024GC6_at; Start 171; Stop 195
gcttggtttcacagcagaaattggt

SEQ ID NO: 239549 - DNA, 25 bp, Artificial
  probe
  misc_feature (1)..(25): SEQ ID NO: 3901; WAN024GC6_at; Start 253; Stop 277
tacaatcctgcctacctctatgaag

SEQ ID NO: 239550 - DNA, 25 bp, Artificial
  probe
  misc_feature (1)..(25): SEQ ID NO: 3901; WAN024GC6_at; Start 130; Stop 154
gaaaatcatcaggaagccctaaagc

SEQ ID NO: 239551 - DNA, 25 bp, Artificial
  probe
  misc_feature (1)..(25): SEQ ID NO: 3901; WAN024GC6_at; Start 6; Stop 30
tacagactatattgctcgctatggc

SEQ ID NO: 239552 - DNA, 25 bp, Artificial
  probe
  misc_feature (1)..(25): SEQ ID NO: 3901; WAN024GC6_at; Start 218; Stop 242
aatatttctattctcgtcatcgtga

SEQ ID NO: 239553 - DNA, 25 bp, Artificial
  probe
  misc_feature (1)..(25): SEQ ID NO: 5632; WAN024GC7_at; Start 79; Stop 103
cacgtaaatgtgcagaaccaggcat

SEQ ID NO: 239554 - DNA, 25 bp, Artificial
  probe
  misc_feature (1)..(25): SEQ ID NO: 5632; WAN024GC7_at; Start 87; Stop 111
tgtgcagaaccaggcatacctccag

SEQ ID NO: 239555 - DNA, 25 bp, Artificial
  probe
  misc_feature (1)..(25): SEQ ID NO: 5632; WAN024GC7_at; Start 61; Stop 85
gaatcaaggtctgattatcacgtaa

SEQ ID NO: 239556 - DNA, 25 bp, Artificial
  probe
  misc_feature (1)..(25): SEQ ID NO: 5632; WAN024GC7_at; Start 23; Stop 47
tagtttcttcccttcttgctcgaag

SEQ ID NO: 239557 - DNA, 25 bp, Artificial
  probe
  misc_feature (1)..(25): SEQ ID NO: 5632; WAN024GC7_at; Start 173; Stop 197
gattgcatgcgaacccgttacttgc

SEQ ID NO: 239558 - DNA, 25 bp, Artificial
  probe
  misc_feature (1)..(25): SEQ ID NO: 5632; WAN024GC7_at; Start 162; Stop 186
gctcttacttggattgcatgcgaac

SEQ ID NO: 239559 - DNA, 25 bp, Artificial
  probe
  misc_feature (1)..(25): SEQ ID NO: 5632; WAN024GC7_at; Start 10; Stop 34
cacaaatggctgctagtttcttccc

SEQ ID NO: 239560 - DNA, 25 bp, Artificial
  probe
  misc_feature (1)..(25): SEQ ID NO: 5632; WAN024GC7_at; Start 93; Stop 117
gaaccaggcatacctccaggaagaa

SEQ ID NO: 239561 - DNA, 25 bp, Artificial
  probe
  misc_feature (1)..(25): SEQ ID NO: 5632; WAN024GC7_at; Start 181; Stop 205
gcgaacccgttacttgctcttcaaa

SEQ ID NO: 239562 - DNA, 25 bp, Artificial
  probe
  misc_feature (1)..(25): SEQ ID NO: 5632; WAN024GC7_at; Start 83; Stop 107
taaatgtgcagaaccaggcatacct

SEQ ID NO: 239563 - DNA, 25 bp, Artificial
  probe
  misc_feature (1)..(25): SEQ ID NO: 5632; WAN024GC7_at; Start 134; Stop 158
tgataaatctccatcaaagacatga

SEQ ID NO: 239564 - DNA, 25 bp, Artificial
  probe
  misc_feature (1)..(25): SEQ ID NO: 5632; WAN024GC7_at; Start 149; Stop 173
aaagacatgatctgctcttacttgg

SEQ ID NO: 239565 - DNA, 25 bp, Artificial
  probe
  misc_feature (1)..(25): SEQ ID NO: 5632; WAN024GC7_at; Start 126; Stop 150
tcatagtctgataaatctccatcaa

SEQ ID NO: 239566 - DNA, 25 bp, Artificial
  probe
  misc_feature (1)..(25): SEQ ID NO: 5632; WAN024GC7_at; Start 5; Stop 29
tgccgcacaaatggctgctagtttc

SEQ ID NO: 239567 - DNA, 25 bp, Artificial
  probe
  misc_feature (1)..(25): SEQ ID NO: 5632; WAN024GC7_at; Start 47; Stop 71
gctttgcaattcttgaatcaaggtc

SEQ ID NO: 239568 - DNA, 25 bp, Artificial
  probe
  misc_feature (1)..(25): SEQ ID NO: 5632; WAN024GC7_at; Start 99; Stop 123
ggcatacctccaggaagaacaatca

SEQ ID NO: 239569 - DNA, 25 bp, Artificial
  probe
  misc_feature (1)..(25): SEQ ID NO: 5632; WAN024GC7_at; Start 91; Stop 115
cagaaccaggcatacctccaggaag

SEQ ID NO: 239570 - DNA, 25 bp, Artificial
  probe
  misc_feature (1)..(25): SEQ ID NO: 5632; WAN024GC7_at; Start 201; Stop 225
tcaaaaccaaccatatcacatgtga

SEQ ID NO: 239571 - DNA, 25 bp, Artificial
  probe
  misc_feature (1)..(25): SEQ ID NO: 5632; WAN024GC7_at; Start 141; Stop 165
tctccatcaaagacatgatctgctc

SEQ ID NO: 239572 - DNA, 25 bp, Artificial
  probe
  misc_feature (1)..(25): SEQ ID NO: 5632; WAN024GC7_at; Start 165; Stop 189
cttacttggattgcatgcgaacccg

SEQ ID NO: 239573 - DNA, 25 bp, Artificial
  probe
  misc_feature (1)..(25): SEQ ID NO: 5632; WAN024GC7_at; Start 68; Stop 92
ggtctgattatcacgtaaatgtgca

SEQ ID NO: 239574 - DNA, 25 bp, Artificial
  probe
  misc_feature (1)..(25): SEQ ID NO: 5632; WAN024GC7_at; Start 96; Stop 120
ccaggcatacctccaggaagaacaa

SEQ ID NO: 239575 - DNA, 25 bp, Artificial
  probe
  misc_feature (1)..(25): SEQ ID NO: 5632; WAN024GC7_at; Start 169; Stop 193
cttggattgcatgcgaacccgttac

SEQ ID NO: 239576 - DNA, 25 bp, Artificial
  probe
  misc_feature (1)..(25): SEQ ID NO: 5632; WAN024GC7_at; Start 17; Stop 41
ggctgctagtttcttcccttcttgc

SEQ ID NO: 239577 - DNA, 25 bp, Artificial
  probe
  misc_feature (1)..(25): SEQ ID NO: 5632; WAN024GC7_at; Start 43; Stop 67
cgaagctttgcaattcttgaatcaa

SEQ ID NO: 239578 - DNA, 25 bp, Artificial
  probe
  misc_feature (1)..(25): SEQ ID NO: 5632; WAN024GC7_at; Start 39; Stop 63
tgctcgaagctttgcaattcttgaa

SEQ ID NO: 239579 - DNA, 25 bp, Artificial
  probe
  misc_feature (1)..(25): SEQ ID NO: 5632; WAN024GC7_at; Start 103; Stop 127
tacctccaggaagaacaatcatatc

SEQ ID NO: 239580 - DNA, 25 bp, Artificial
  probe
  misc_feature (1)..(25): SEQ ID NO: 5632; WAN024GC7_at; Start 189; Stop 213
gttacttgctcttcaaaaccaacca

SEQ ID NO: 239581 - DNA, 25 bp, Artificial
  probe
  misc_feature (1)..(25): SEQ ID NO: 5632; WAN024GC7_at; Start 76; Stop 100
tatcacgtaaatgtgcagaaccagg

SEQ ID NO: 239582 - DNA, 25 bp, Artificial
  probe
  misc_feature (1)..(25): SEQ ID NO: 5632; WAN024GC7_at; Start 154; Stop 178
catgatctgctcttacttggattgc

SEQ ID NO: 239583 - DNA, 25 bp, Artificial
  probe
  misc_feature (1)..(25): SEQ ID NO: 5632; WAN024GC7_at; Start 1; Stop 25
ttggtgccgcacaaatggctgctag

SEQ ID NO: 239584 - DNA, 25 bp, Artificial
  probe
  misc_feature (1)..(25): SEQ ID NO: 5632; WAN024GC7_at; Start 196; Stop 220
gctcttcaaaaccaaccatatcaca

SEQ ID NO: 239585 - DNA, 25 bp, Artificial
  probe
  misc_feature (1)..(25): SEQ ID NO: 5632; WAN024GC7_at; Start 31; Stop 55
tcccttcttgctcgaagctttgcaa

SEQ ID NO: 239586 - DNA, 25 bp, Artificial
  probe
  misc_feature (1)..(25): SEQ ID NO: 5632; WAN024GC7_at; Start 115; Stop 139
gaacaatcatatcatagtctgataa

SEQ ID NO: 239587 - DNA, 25 bp, Artificial
  probe
  misc_feature (1)..(25): SEQ ID NO: 2618; WAN024GC8_at; Start 312; Stop 336
tgccctcaatcaagcagagatattg

SEQ ID NO: 239588 - DNA, 25 bp, Artificial
  probe
  misc_feature (1)..(25): SEQ ID NO: 2618; WAN024GC8_at; Start 394; Stop 418
tacgtcaaggaaacagtagtggtag

SEQ ID NO: 239589 - DNA, 25 bp, Artificial
  probe
  misc_feature (1)..(25): SEQ ID NO: 2618; WAN024GC8_at; Start 124; Stop 148
ggttcgcatgcaatccaagtaagag

SEQ ID NO: 239590 - DNA, 25 bp, Artificial
  probe
  misc_feature (1)..(25): SEQ ID NO: 2618; WAN024GC8_at; Start 198; Stop 222
tcctggaggtatgcctggttctgca

SEQ ID NO: 239591 - DNA, 25 bp, Artificial
  probe
  misc_feature (1)..(25): SEQ ID NO: 2618; WAN024GC8_at; Start 407; Stop 431
cagtagtggtagatggtcagttgac

SEQ ID NO: 239592 - DNA, 25 bp, Artificial
  probe
  misc_feature (1)..(25): SEQ ID NO: 2618; WAN024GC8_at; Start 532; Stop 556
gatgtctttggtaaaaatcagtaac

SEQ ID NO: 239593 - DNA, 25 bp, Artificial
  probe
  misc_feature (1)..(25): SEQ ID NO: 2618; WAN024GC8_at; Start 106; Stop 130
tttgaagagcaagtaacgggttcgc

SEQ ID NO: 239594 - DNA, 25 bp, Artificial
  probe
  misc_feature (1)..(25): SEQ ID NO: 2618; WAN024GC8_at; Start 296; Stop 320
tttgtgcggcaccaattgccctcaa

SEQ ID NO: 239595 - DNA, 25 bp, Artificial
  probe
  misc_feature (1)..(25): SEQ ID NO: 2618; WAN024GC8_at; Start 468; Stop 492
ctacgagttggtggagcaactagga

SEQ ID NO: 239596 - DNA, 25 bp, Artificial
  probe
  misc_feature (1)..(25): SEQ ID NO: 2618; WAN024GC8_at; Start 91; Stop 115
tgtgatatggttggttttgaagagc

SEQ ID NO: 239597 - DNA, 25 bp, Artificial
  probe
  misc_feature (1)..(25): SEQ ID NO: 2618; WAN024GC8_at; Start 246; Stop 270
gattcaagaattgcaaagcttcgag

SEQ ID NO: 239598 - DNA, 25 bp, Artificial
  probe
  misc_feature (1)..(25): SEQ ID NO: 2618; WAN024GC8_at; Start 495; Stop 519
ggacgcagagagtttacgaacagga

SEQ ID NO: 239599 - DNA, 25 bp, Artificial
  probe
  misc_feature (1)..(25): SEQ ID NO: 2618; WAN024GC8_at; Start 332; Stop 356
tattgaaaaataagcgatacacttg

SEQ ID NO: 239600 - DNA, 25 bp, Artificial
  probe
  misc_feature (1)..(25): SEQ ID NO: 2618; WAN024GC8_at; Start 347; Stop 371
gatacacttgttatgacggcgttca

SEQ ID NO: 239601 - DNA, 25 bp, Artificial
  probe
  misc_feature (1)..(25): SEQ ID NO: 2618; WAN024GC8_at; Start 505; Stop 529
agtttacgaacaggaatgctctatc

SEQ ID NO: 239602 - DNA, 25 bp, Artificial
  probe
  misc_feature (1)..(25): SEQ ID NO: 2618; WAN024GC8_at; Start 418; Stop 442
gatggtcagttgacaaccagtcggg

SEQ ID NO: 239603 - DNA, 25 bp, Artificial
  probe
  misc_feature (1)..(25): SEQ ID NO: 2618; WAN024GC8_at; Start 368; Stop 392
ttcaagagcaaatccttgatggtca

SEQ ID NO: 239604 - DNA, 25 bp, Artificial
  probe
  misc_feature (1)..(25): SEQ ID NO: 2618; WAN024GC8_at; Start 285; Stop 309
actagcagccatttgtgcggcacca

SEQ ID NO: 239605 - DNA, 25 bp, Artificial
  probe
  misc_feature (1)..(25): SEQ ID NO: 2618; WAN024GC8_at; Start 450; Stop 474
aacagcccttgcctttgcctacgag

SEQ ID NO: 239606 - DNA, 25 bp, Artificial
  probe
  misc_feature (1)..(25): SEQ ID NO: 2618; WAN024GC8_at; Start 360; Stop 384
tgacggcgttcaagagcaaatcctt

SEQ ID NO: 239607 - DNA, 25 bp, Artificial
  probe
  misc_feature (1)..(25): SEQ ID NO: 2618; WAN024GC8_at; Start 146; Stop 170
gagcagatcatgtctttgatggaga

SEQ ID NO: 239608 - DNA, 25 bp, Artificial
  probe
  misc_feature (1)..(25): SEQ ID NO: 2618; WAN024GC8_at; Start 23; Stop 47
tagctcagggctttgaagaaattga

SEQ ID NO: 239609 - DNA, 25 bp, Artificial
  probe
  misc_feature (1)..(25): SEQ ID NO: 2618; WAN024GC8_at; Start 56; Stop 80
cagttgtagatgtcttgcgtcgagc

SEQ ID NO: 239610 - DNA, 25 bp, Artificial
  probe
  misc_feature (1)..(25): SEQ ID NO: 2618; WAN024GC8_at; Start 255; Stop 279
attgcaaagcttcgagcaagaaggg

SEQ ID NO: 239611 - DNA, 25 bp, Artificial
  probe
  misc_feature (1)..(25): SEQ ID NO: 2618; WAN024GC8_at; Start 461; Stop 485
cctttgcctacgagttggtggagca

SEQ ID NO: 239612 - DNA, 25 bp, Artificial
  probe
  misc_feature (1)..(25): SEQ ID NO: 2618; WAN024GC8_at; Start 162; Stop 186
tgatggagatttatcagactatgat

SEQ ID NO: 239613 - DNA, 25 bp, Artificial
  probe
  misc_feature (1)..(25): SEQ ID NO: 2618; WAN024GC8_at; Start 133; Stop 157
gcaatccaagtaagagcagatcatg

SEQ ID NO: 239614 - DNA, 25 bp, Artificial
  probe
  misc_feature (1)..(25): SEQ ID NO: 2618; WAN024GC8_at; Start 115; Stop 139
caagtaacgggttcgcatgcaatcc

SEQ ID NO: 239615 - DNA, 25 bp, Artificial
  probe
  misc_feature (1)..(25): SEQ ID NO: 2618; WAN024GC8_at; Start 40; Stop 64
gaaattgaagccttgacagttgtag

SEQ ID NO: 239616 - DNA, 25 bp, Artificial
  probe
  misc_feature (1)..(25): SEQ ID NO: 2618; WAN024GC8_at; Start 231; Stop 255
tgataatcagaccttgattcaagaa

SEQ ID NO: 239617 - DNA, 25 bp, Artificial
  probe
  misc_feature (1)..(25): SEQ ID NO: 2618; WAN024GC8_at; Start 71; Stop 95
tgcgtcgagccaatatcacatgtga

SEQ ID NO: 239618 - DNA, 25 bp, Artificial
  probe
  misc_feature (1)..(25): SEQ ID NO: 2618; WAN024GC8_at; Start 184; Stop 208
gatatgattgttcttcctggaggta

SEQ ID NO: 239619 - DNA, 25 bp, Artificial
  probe
  misc_feature (1)..(25): SEQ ID NO: 2618; WAN024GC8_at; Start 219; Stop 243
tgcacatttacgtgataatcagacc

SEQ ID NO: 239620 - DNA, 25 bp, Artificial
  probe
  misc_feature (1)..(25): SEQ ID NO: 2618; WAN024GC8_at; Start 210; Stop 234
gcctggttctgcacatttacgtgat

SEQ ID NO: 239621 - DNA, 25 bp, Artificial
  probe
  misc_feature (1)..(25): SEQ ID NO: 2575; WAN024GC9_at; Start 129; Stop 153
catgtggattgacatccgtcgtata

SEQ ID NO: 239622 - DNA, 25 bp, Artificial
  probe
  misc_feature (1)..(25): SEQ ID NO: 2575; WAN024GC9_at; Start 72; Stop 96
gcgccagacgttggtctgtcaatcc

SEQ ID NO: 239623 - DNA, 25 bp, Artificial
  probe
  misc_feature (1)..(25): SEQ ID NO: 2575; WAN024GC9_at; Start 52; Stop 76
ttgcgaaaaatcaggtgcttgcgcc

SEQ ID NO: 239624 - DNA, 25 bp, Artificial
  probe
  misc_feature (1)..(25): SEQ ID NO: 2575; WAN024GC9_at; Start 108; Stop 132
tgatatgagcatccaagggttcatg

SEQ ID NO: 239625 - DNA, 25 bp, Artificial
  probe
  misc_feature (1)..(25): SEQ ID NO: 2575; WAN024GC9_at; Start 190; Stop 214
tcccacttggataattttagcctta

SEQ ID NO: 239626 - DNA, 25 bp, Artificial
  probe
  misc_feature (1)..(25): SEQ ID NO: 2575; WAN024GC9_at; Start 147; Stop 171
tcgtatagtgatcgacgatttctcc

SEQ ID NO: 239627 - DNA, 25 bp, Artificial
  probe
  misc_feature (1)..(25): SEQ ID NO: 2575; WAN024GC9_at; Start 42; Stop 66
ttctggcaacttgcgaaaaatcagg

SEQ ID NO: 239628 - DNA, 25 bp, Artificial
  probe
  misc_feature (1)..(25): SEQ ID NO: 2575; WAN024GC9_at; Start 186; Stop 210
caattcccacttggataattttagc

SEQ ID NO: 239629 - DNA, 25 bp, Artificial
  probe
  misc_feature (1)..(25): SEQ ID NO: 2575; WAN024GC9_at; Start 81; Stop 105
gttggtctgtcaatcctgtcagttc

SEQ ID NO: 239630 - DNA, 25 bp, Artificial
  probe
  misc_feature (1)..(25): SEQ ID NO: 2575; WAN024GC9_at; Start 201; Stop 225
taattttagccttactacctgtgct

SEQ ID NO: 239631 - DNA, 25 bp, Artificial
  probe
  misc_feature (1)..(25): SEQ ID NO: 2575; WAN024GC9_at; Start 207; Stop 231
tagccttactacctgtgctagttgc

SEQ ID NO: 239632 - DNA, 25 bp, Artificial
  probe
  misc_feature (1)..(25): SEQ ID NO: 2575; WAN024GC9_at; Start 91; Stop 115
caatcctgtcagttctttgatatga

SEQ ID NO: 239633 - DNA, 25 bp, Artificial
  probe
  misc_feature (1)..(25): SEQ ID NO: 2575; WAN024GC9_at; Start 181; Stop 205
cacgacaattcccacttggataatt

SEQ ID NO: 239634 - DNA, 25 bp, Artificial
  probe
  misc_feature (1)..(25): SEQ ID NO: 2575; WAN024GC9_at; Start 139; Stop 163
gacatccgtcgtatagtgatcgacg

SEQ ID NO: 239635 - DNA, 25 bp, Artificial
  probe
  misc_feature (1)..(25): SEQ ID NO: 2575; WAN024GC9_at; Start 117; Stop 141
catccaagggttcatgtggattgac

SEQ ID NO: 239636 - DNA, 25 bp, Artificial
  probe
  misc_feature (1)..(25): SEQ ID NO: 2575; WAN024GC9_at; Start 213; Stop 237
tactacctgtgctagttgcctctaa

SEQ ID NO: 239637 - DNA, 25 bp, Artificial
  probe
  misc_feature (1)..(25): SEQ ID NO: 2575; WAN024GC9_at; Start 121; Stop 145
caagggttcatgtggattgacatcc

SEQ ID NO: 239638 - DNA, 25 bp, Artificial
  probe
  misc_feature (1)..(25): SEQ ID NO: 2575; WAN024GC9_at; Start 12; Stop 36
aaatcccatcctccaccaagtcaaa

SEQ ID NO: 239639 - DNA, 25 bp, Artificial
  probe
  misc_feature (1)..(25): SEQ ID NO: 2575; WAN024GC9_at; Start 84; Stop 108
ggtctgtcaatcctgtcagttcttt

SEQ ID NO: 239640 - DNA, 25 bp, Artificial
  probe
  misc_feature (1)..(25): SEQ ID NO: 2575; WAN024GC9_at; Start 49; Stop 73
aacttgcgaaaaatcaggtgcttgc

SEQ ID NO: 239641 - DNA, 25 bp, Artificial
  probe
  misc_feature (1)..(25): SEQ ID NO: 2575; WAN024GC9_at; Start 57; Stop 81
aaaaatcaggtgcttgcgccagacg

SEQ ID NO: 239642 - DNA, 25 bp, Artificial
  probe
  misc_feature (1)..(25): SEQ ID NO: 2575; WAN024GC9_at; Start 199; Stop 223
gataattttagccttactacctgtg

SEQ ID NO: 239643 - DNA, 25 bp, Artificial
  probe
  misc_feature (1)..(25): SEQ ID NO: 2575; WAN024GC9_at; Start 125; Stop 149
ggttcatgtggattgacatccgtcg

SEQ ID NO: 239644 - DNA, 25 bp, Artificial
  probe
  misc_feature (1)..(25): SEQ ID NO: 2575; WAN024GC9_at; Start 135; Stop 159
gattgacatccgtcgtatagtgatc

SEQ ID NO: 239645 - DNA, 25 bp, Artificial
  probe
  misc_feature (1)..(25): SEQ ID NO: 2575; WAN024GC9_at; Start 55; Stop 79
cgaaaaatcaggtgcttgcgccaga

SEQ ID NO: 239646 - DNA, 25 bp, Artificial
  probe
  misc_feature (1)..(25): SEQ ID NO: 2575; WAN024GC9_at; Start 45; Stop 69
tggcaacttgcgaaaaatcaggtgc

SEQ ID NO: 239647 - DNA, 25 bp, Artificial
  probe
  misc_feature (1)..(25): SEQ ID NO: 2575; WAN024GC9_at; Start 94; Stop 118
tcctgtcagttctttgatatgagca

SEQ ID NO: 239648 - DNA, 25 bp, Artificial
  probe
  misc_feature (1)..(25): SEQ ID NO: 2575; WAN024GC9_at; Start 60; Stop 84
aatcaggtgcttgcgccagacgttg

SEQ ID NO: 239649 - DNA, 25 bp, Artificial
  probe
  misc_feature (1)..(25): SEQ ID NO: 2575; WAN024GC9_at; Start 2; Stop 26
tgggctacaaaaatcccatcctcca

SEQ ID NO: 239650 - DNA, 25 bp, Artificial
  probe
  misc_feature (1)..(25): SEQ ID NO: 2575; WAN024GC9_at; Start 111; Stop 135
tatgagcatccaagggttcatgtgg

SEQ ID NO: 239651 - DNA, 25 bp, Artificial
  probe
  misc_feature (1)..(25): SEQ ID NO: 2575; WAN024GC9_at; Start 176; Stop 200
tcaatcacgacaattcccacttgga

SEQ ID NO: 239652 - DNA, 25 bp, Artificial
  probe
  misc_feature (1)..(25): SEQ ID NO: 2575; WAN024GC9_at; Start 106; Stop 130
tttgatatgagcatccaagggttca

SEQ ID NO: 239653 - DNA, 25 bp, Artificial
  probe
  misc_feature (1)..(25): SEQ ID NO: 2575; WAN024GC9_at; Start 78; Stop 102
gacgttggtctgtcaatcctgtcag

SEQ ID NO: 239654 - DNA, 25 bp, Artificial
  probe
  misc_feature (1)..(25): SEQ ID NO: 2575; WAN024GC9_at; Start 67; Stop 91
tgcttgcgccagacgttggtctgtc

SEQ ID NO: 239655 - DNA, 25 bp, Artificial
  probe
  misc_feature (1)..(25): SEQ ID NO: 708; WAN024GCA_at; Start 422; Stop 446
taggaattcctcttaaacacgcaca

SEQ ID NO: 239656 - DNA, 25 bp, Artificial
  probe
  misc_feature (1)..(25): SEQ ID NO: 708; WAN024GCA_at; Start 1747; Stop 1771
agtcagagggtttctttggcagacc

SEQ ID NO: 239657 - DNA, 25 bp, Artificial
  probe
  misc_feature (1)..(25): SEQ ID NO: 708; WAN024GCA_at; Start 2363; Stop 2387
tagcatctctagcagaagaagcgac

SEQ ID NO: 239658 - DNA, 25 bp, Artificial
  probe
  misc_feature (1)..(25): SEQ ID NO: 708; WAN024GCA_at; Start 522; Stop 546
aggtctcttggaacgcttgctggaa

SEQ ID NO: 239659 - DNA, 25 bp, Artificial
  probe
  misc_feature (1)..(25): SEQ ID NO: 708; WAN024GCA_at; Start 1883; Stop 1907
tctatgccagagaggtagctgcttt

SEQ ID NO: 239660 - DNA, 25 bp, Artificial
  probe
  misc_feature (1)..(25): SEQ ID NO: 708; WAN024GCA_at; Start 113; Stop 137
tcgatcactatacgacggatgtcaa

SEQ ID NO: 239661 - DNA, 25 bp, Artificial
  probe
  misc_feature (1)..(25): SEQ ID NO: 708; WAN024GCA_at; Start 1915; Stop 1939
gaaattcaagctttccagcaaccga

SEQ ID NO: 239662 - DNA, 25 bp, Artificial
  probe
  misc_feature (1)..(25): SEQ ID NO: 708; WAN024GCA_at; Start 1209; Stop 1233
gaaacgtagtcaagaaagggcagag

SEQ ID NO: 239663 - DNA, 25 bp, Artificial
  probe
  misc_feature (1)..(25): SEQ ID NO: 708; WAN024GCA_at; Start 195; Stop 219
tctggcgcaagcacctgatttttcg

SEQ ID NO: 239664 - DNA, 25 bp, Artificial
  probe
  misc_feature (1)..(25): SEQ ID NO: 708; WAN024GCA_at; Start 614; Stop 638
tgagttctccagacttggtccaagt

SEQ ID NO: 239665 - DNA, 25 bp, Artificial
  probe
  misc_feature (1)..(25): SEQ ID NO: 708; WAN024GCA_at; Start 130; Stop 154
gatgtcaatccacatgaacccttgg

SEQ ID NO: 239666 - DNA, 25 bp, Artificial
  probe
  misc_feature (1)..(25): SEQ ID NO: 708; WAN024GCA_at; Start 1066; Stop 1090
caagtcttggtctggcttactgaga

SEQ ID NO: 239667 - DNA, 25 bp, Artificial
  probe
  misc_feature (1)..(25): SEQ ID NO: 708; WAN024GCA_at; Start 34; Stop 58
gatttagaggcaactagcacaggta

SEQ ID NO: 239668 - DNA, 25 bp, Artificial
  probe
  misc_feature (1)..(25): SEQ ID NO: 708; WAN024GCA_at; Start 280; Stop 304
cagtttgatgctaatctcttggcgg

SEQ ID NO: 239669 - DNA, 25 bp, Artificial
  probe
  misc_feature (1)..(25): SEQ ID NO: 708; WAN024GCA_at; Start 1354; Stop 1378
gaaaatctgcttcaagagacctacg

SEQ ID NO: 239670 - DNA, 25 bp, Artificial
  probe
  misc_feature (1)..(25): SEQ ID NO: 708; WAN024GCA_at; Start 796; Stop 820
tctctgattcaagcgccgacaggga

SEQ ID NO: 239671 - DNA, 25 bp, Artificial
  probe
  misc_feature (1)..(25): SEQ ID NO: 708; WAN024GCA_at; Start 815; Stop 839
cagggattgggaaaacctatggcta

SEQ ID NO: 239672 - DNA, 25 bp, Artificial
  probe
  misc_feature (1)..(25): SEQ ID NO: 708; WAN024GCA_at; Start 1083; Stop 1107
tactgagacagagacaggagatttg

SEQ ID NO: 239673 - DNA, 25 bp, Artificial
  probe
  misc_feature (1)..(25): SEQ ID NO: 708; WAN024GCA_at; Start 1845; Stop 1869
caaagatttccctctggtaacagaa

SEQ ID NO: 239674 - DNA, 25 bp, Artificial
  probe
  misc_feature (1)..(25): SEQ ID NO: 708; WAN024GCA_at; Start 349; Stop 373
gatacggtcgaattggcccaggtct

SEQ ID NO: 239675 - DNA, 25 bp, Artificial
  probe
  misc_feature (1)..(25): SEQ ID NO: 708; WAN024GCA_at; Start 1764; Stop 1788
ggcagaccttttaggctatcctgaa

SEQ ID NO: 239676 - DNA, 25 bp, Artificial
  probe
  misc_feature (1)..(25): SEQ ID NO: 708; WAN024GCA_at; Start 335; Stop 359
gaaaccctcgtgttgatacggtcga

SEQ ID NO: 239677 - DNA, 25 bp, Artificial
  probe
  misc_feature (1)..(25): SEQ ID NO: 708; WAN024GCA_at; Start 585; Stop 609
tgaggaaacttatcgcaaccaatct

SEQ ID NO: 239678 - DNA, 25 bp, Artificial
  probe
  misc_feature (1)..(25): SEQ ID NO: 708; WAN024GCA_at; Start 959; Stop 983
cagatattcatagcttaaagggacc

SEQ ID NO: 239679 - DNA, 25 bp, Artificial
  probe
  misc_feature (1)..(25): SEQ ID NO: 708; WAN024GCA_at; Start 173; Stop 197
tgacaggattgacagaccaacgtct

SEQ ID NO: 239680 - DNA, 25 bp, Artificial
  probe
  misc_feature (1)..(25): SEQ ID NO: 708; WAN024GCA_at; Start 536; Stop 560
gcttgctggaaatggctgacgctct

SEQ ID NO: 239681 - DNA, 25 bp, Artificial
  probe
  misc_feature (1)..(25): SEQ ID NO: 708; WAN024GCA_at; Start 2000; Stop 2024
gccacttggcccagtataaaaatgg

SEQ ID NO: 239682 - DNA, 25 bp, Artificial
  probe
  misc_feature (1)..(25): SEQ ID NO: 708; WAN024GCA_at; Start 2026; Stop 2050
gatgttcatcagctaaagaaacgct

SEQ ID NO: 239683 - DNA, 25 bp, Artificial
  probe
  misc_feature (1)..(25): SEQ ID NO: 708; WAN024GCA_at; Start 457; Stop 481
tcagatgcccaagctacagcagaat

SEQ ID NO: 239684 - DNA, 25 bp, Artificial
  probe
  misc_feature (1)..(25): SEQ ID NO: 708; WAN024GCA_at; Start 2130; Stop 2154
gattcaagttgtaccgaggcttcct

SEQ ID NO: 239685 - DNA, 25 bp, Artificial
  probe
  misc_feature (1)..(25): SEQ ID NO: 708; WAN024GCA_at; Start 145; Stop 169
gaacccttggatgctcatatcaaag

SEQ ID NO: 239686 - DNA, 25 bp, Artificial
  probe
  misc_feature (1)..(25): SEQ ID NO: 708; WAN024GCA_at; Start 2405; Stop 2429
gatccgaagttgacgaggctattga

SEQ ID NO: 239687 - DNA, 25 bp, Artificial
  probe
  misc_feature (1)..(25): SEQ ID NO: 708; WAN024GCA_at; Start 2389; Stop 2413
gttaaaaccatctctcgatccgaag

SEQ ID NO: 239688 - DNA, 25 bp, Artificial
  probe
  misc_feature (1)..(25): SEQ ID NO: 708; WAN024GCA_at; Start 1660; Stop 1684
tcttctacaaaatcaggccgtactc

SEQ ID NO: 239689 - DNA, 25 bp, Artificial
  probe
  misc_feature (1)..(25): SEQ ID NO: 7555; WAN024GCB_at; Start 18; Stop 42
caacgaatcatgtattttatctaac

SEQ ID NO: 239690 - DNA, 25 bp, Artificial
  probe
  misc_feature (1)..(25): SEQ ID NO: 7555; WAN024GCB_at; Start 93; Stop 117
ggtgaagtttacgaacttcttcatc

SEQ ID NO: 239691 - DNA, 25 bp, Artificial
  probe
  misc_feature (1)..(25): SEQ ID NO: 7555; WAN024GCB_at; Start 194; Stop 218
tcaacaaagttctgaccaggagtgt

SEQ ID NO: 239692 - DNA, 25 bp, Artificial
  probe
  misc_feature (1)..(25): SEQ ID NO: 7555; WAN024GCB_at; Start 10; Stop 34
ccttctctcaacgaatcatgtattt

SEQ ID NO: 239693 - DNA, 25 bp, Artificial
  probe
  misc_feature (1)..(25): SEQ ID NO: 7555; WAN024GCB_at; Start 61; Stop 85
ataaaatcctgtatcaaggaaacgg

SEQ ID NO: 239694 - DNA, 25 bp, Artificial
  probe
  misc_feature (1)..(25): SEQ ID NO: 7555; WAN024GCB_at; Start 51; Stop 75
gatcgtagtcataaaatcctgtatc

SEQ ID NO: 239695 - DNA, 25 bp, Artificial
  probe
  misc_feature (1)..(25): SEQ ID NO: 7555; WAN024GCB_at; Start 207; Stop 231
gaccaggagtgtagagcccttctag

SEQ ID NO: 239696 - DNA, 25 bp, Artificial
  probe
  misc_feature (1)..(25): SEQ ID NO: 7555; WAN024GCB_at; Start 132; Stop 156
gagcatgactaaagttgccctcttg

SEQ ID NO: 239697 - DNA, 25 bp, Artificial
  probe
  misc_feature (1)..(25): SEQ ID NO: 7555; WAN024GCB_at; Start 152; Stop 176
tcttgaatcaagctacgcgcttgga

SEQ ID NO: 239698 - DNA, 25 bp, Artificial
  probe
  misc_feature (1)..(25): SEQ ID NO: 7555; WAN024GCB_at; Start 189; Stop 213
caatctcaacaaagttctgaccagg

SEQ ID NO: 239699 - DNA, 25 bp, Artificial
  probe
  misc_feature (1)..(25): SEQ ID NO: 7555; WAN024GCB_at; Start 175; Stop 199
gataaagagttttgcaatctcaaca

SEQ ID NO: 239700 - DNA, 25 bp, Artificial
  probe
  misc_feature (1)..(25): SEQ ID NO: 7555; WAN024GCB_at; Start 201; Stop 225
agttctgaccaggagtgtagagccc

SEQ ID NO: 239701 - DNA, 25 bp, Artificial
  probe
  misc_feature (1)..(25): SEQ ID NO: 7555; WAN024GCB_at; Start 110; Stop 134
tcttcatccagcaagaaggcttgag

SEQ ID NO: 239702 - DNA, 25 bp, Artificial
  probe
  misc_feature (1)..(25): SEQ ID NO: 7555; WAN024GCB_at; Start 39; Stop 63
taaccatgtcaggatcgtagtcata

SEQ ID NO: 239703 - DNA, 25 bp, Artificial
  probe
  misc_feature (1)..(25): SEQ ID NO: 7555; WAN024GCB_at; Start 181; Stop 205
gagttttgcaatctcaacaaagttc

SEQ ID NO: 239704 - DNA, 25 bp, Artificial
  probe
  misc_feature (1)..(25): SEQ ID NO: 7555; WAN024GCB_at; Start 42; Stop 66
ccatgtcaggatcgtagtcataaaa

SEQ ID NO: 239705 - DNA, 25 bp, Artificial
  probe
  misc_feature (1)..(25): SEQ ID NO: 7555; WAN024GCB_at; Start 163; Stop 187
gctacgcgcttggataaagagtttt

SEQ ID NO: 239706 - DNA, 25 bp, Artificial
  probe
  misc_feature (1)..(25): SEQ ID NO: 7555; WAN024GCB_at; Start 141; Stop 165
taaagttgccctcttgaatcaagct

SEQ ID NO: 239707 - DNA, 25 bp, Artificial
  probe
  misc_feature (1)..(25): SEQ ID NO: 7555; WAN024GCB_at; Start 167; Stop 191
cgcgcttggataaagagttttgcaa

SEQ ID NO: 239708 - DNA, 25 bp, Artificial
  probe
  misc_feature (1)..(25): SEQ ID NO: 7555; WAN024GCB_at; Start 159; Stop 183
tcaagctacgcgcttggataaagag

SEQ ID NO: 239709 - DNA, 25 bp, Artificial
  probe
  misc_feature (1)..(25): SEQ ID NO: 7555; WAN024GCB_at; Start 198; Stop 222
caaagttctgaccaggagtgtagag

SEQ ID NO: 239710 - DNA, 25 bp, Artificial
  probe
  misc_feature (1)..(25): SEQ ID NO: 7555; WAN024GCB_at; Start 127; Stop 151
ggcttgagcatgactaaagttgccc

SEQ ID NO: 239711 - DNA, 25 bp, Artificial
  probe
  misc_feature (1)..(25): SEQ ID NO: 7555; WAN024GCB_at; Start 55; Stop 79
gtagtcataaaatcctgtatcaagg

SEQ ID NO: 239712 - DNA, 25 bp, Artificial
  probe
  misc_feature (1)..(25): SEQ ID NO: 7555; WAN024GCB_at; Start 117; Stop 141
ccagcaagaaggcttgagcatgact

SEQ ID NO: 239713 - DNA, 25 bp, Artificial
  probe
  misc_feature (1)..(25): SEQ ID NO: 7555; WAN024GCB_at; Start 113; Stop 137
tcatccagcaagaaggcttgagcat

SEQ ID NO: 239714 - DNA, 25 bp, Artificial
  probe
  misc_feature (1)..(25): SEQ ID NO: 7555; WAN024GCB_at; Start 120; Stop 144
gcaagaaggcttgagcatgactaaa

SEQ ID NO: 239715 - DNA, 25 bp, Artificial
  probe
  misc_feature (1)..(25): SEQ ID NO: 7555; WAN024GCB_at; Start 100; Stop 124
tttacgaacttcttcatccagcaag

SEQ ID NO: 239716 - DNA, 25 bp, Artificial
  probe
  misc_feature (1)..(25): SEQ ID NO: 7555; WAN024GCB_at; Start 1; Stop 25
ttgcatcttccttctctcaacgaat

SEQ ID NO: 239717 - DNA, 25 bp, Artificial
  probe
  misc_feature (1)..(25): SEQ ID NO: 7555; WAN024GCB_at; Start 146; Stop 170
ttgccctcttgaatcaagctacgcg

SEQ ID NO: 239718 - DNA, 25 bp, Artificial
  probe
  misc_feature (1)..(25): SEQ ID NO: 7555; WAN024GCB_at; Start 45; Stop 69
tgtcaggatcgtagtcataaaatcc

SEQ ID NO: 239719 - DNA, 25 bp, Artificial
  probe
  misc_feature (1)..(25): SEQ ID NO: 7555; WAN024GCB_at; Start 204; Stop 228
tctgaccaggagtgtagagcccttc

SEQ ID NO: 239720 - DNA, 25 bp, Artificial
  probe
  misc_feature (1)..(25): SEQ ID NO: 7555; WAN024GCB_at; Start 34; Stop 58
ttatctaaccatgtcaggatcgtag

SEQ ID NO: 239721 - DNA, 25 bp, Artificial
  probe
  misc_feature (1)..(25): SEQ ID NO: 7555; WAN024GCB_at; Start 134; Stop 158
gcatgactaaagttgccctcttgaa

SEQ ID NO: 239722 - DNA, 25 bp, Artificial
  probe
  misc_feature (1)..(25): SEQ ID NO: 7555; WAN024GCB_at; Start 28; Stop 52
tgtattttatctaaccatgtcagga

SEQ ID NO: 239723 - DNA, 25 bp, Artificial
  probe
  misc_feature (1)..(25): SEQ ID NO: 1827; WAN024GCC_at; Start 773; Stop 797
tttttgaagataatcatgggaccca

SEQ ID NO: 239724 - DNA, 25 bp, Artificial
  probe
  misc_feature (1)..(25): SEQ ID NO: 1827; WAN024GCC_at; Start 561; Stop 585
ggcgcgtgaaattccatcagctgaa

SEQ ID NO: 239725 - DNA, 25 bp, Artificial
  probe
  misc_feature (1)..(25): SEQ ID NO: 1827; WAN024GCC_at; Start 490; Stop 514
tcaaccatggtaactagcagtcgtc

SEQ ID NO: 239726 - DNA, 25 bp, Artificial
  probe
  misc_feature (1)..(25): SEQ ID NO: 1827; WAN024GCC_at; Start 360; Stop 384
gatggaccgtatcaagcctttctta

SEQ ID NO: 239727 - DNA, 25 bp, Artificial
  probe
  misc_feature (1)..(25): SEQ ID NO: 1827; WAN024GCC_at; Start 849; Stop 873
ggagcatggctttactcgctggaaa

SEQ ID NO: 239728 - DNA, 25 bp, Artificial
  probe
  misc_feature (1)..(25): SEQ ID NO: 1827; WAN024GCC_at; Start 757; Stop 781
gagagccactattccatttttgaag

SEQ ID NO: 239729 - DNA, 25 bp, Artificial
  probe
  misc_feature (1)..(25): SEQ ID NO: 1827; WAN024GCC_at; Start 895; Stop 919
ggtcagaactttgttgagattgcaa

SEQ ID NO: 239730 - DNA, 25 bp, Artificial
  probe
  misc_feature (1)..(25): SEQ ID NO: 1827; WAN024GCC_at; Start 345; Stop 369
catgcaccaagatatgatggaccgt

SEQ ID NO: 239731 - DNA, 25 bp, Artificial
  probe
  misc_feature (1)..(25): SEQ ID NO: 1827; WAN024GCC_at; Start 145; Stop 169
gaaaagattgtcattacagcaactg

SEQ ID NO: 239732 - DNA, 25 bp, Artificial
  probe
  misc_feature (1)..(25): SEQ ID NO: 1827; WAN024GCC_at; Start 202; Stop 226
gaagctggcgtagaccgtatctatg

SEQ ID NO: 239733 - DNA, 25 bp, Artificial
  probe
  misc_feature (1)..(25): SEQ ID NO: 1827; WAN024GCC_at; Start 877; Stop 901
gaagggctctacactcctggtcaga

SEQ ID NO: 239734 - DNA, 25 bp, Artificial
  probe
  misc_feature (1)..(25): SEQ ID NO: 1827; WAN024GCC_at; Start 161; Stop 185
cagcaactgctgaaagtattgaaca

SEQ ID NO: 239735 - DNA, 25 bp, Artificial
  probe
  misc_feature (1)..(25): SEQ ID NO: 1827; WAN024GCC_at; Start 709; Stop 733
gaaaagacgcataaacgtgacctct

SEQ ID NO: 239736 - DNA, 25 bp, Artificial
  probe
  misc_feature (1)..(25): SEQ ID NO: 1827; WAN024GCC_at; Start 741; Stop 765
tgagccaagtgatccagagagccac

SEQ ID NO: 239737 - DNA, 25 bp, Artificial
  probe
  misc_feature (1)..(25): SEQ ID NO: 1827; WAN024GCC_at; Start 504; Stop 528
tagcagtcgtcagattaacttctgg

SEQ ID NO: 239738 - DNA, 25 bp, Artificial
  probe
  misc_feature (1)..(25): SEQ ID NO: 1827; WAN024GCC_at; Start 452; Stop 476
accgcgatggttattcatttaagac

SEQ ID NO: 239739 - DNA, 25 bp, Artificial
  probe
  misc_feature (1)..(25): SEQ ID NO: 1827; WAN024GCC_at; Start 790; Stop 814
gggacccatatctttgccaacaatg

SEQ ID NO: 239740 - DNA, 25 bp, Artificial
  probe
  misc_feature (1)..(25): SEQ ID NO: 1827; WAN024GCC_at; Start 922; Stop 946
ctctttatccaagcgcgtagcttga

SEQ ID NO: 239741 - DNA, 25 bp, Artificial
  probe
  misc_feature (1)..(25): SEQ ID NO: 1827; WAN024GCC_at; Start 330; Stop 354
tgcggtcaatgctctcatgcaccaa

SEQ ID NO: 239742 - DNA, 25 bp, Artificial
  probe
  misc_feature (1)..(25): SEQ ID NO: 1827; WAN024GCC_at; Start 724; Stop 748
cgtgacctcttcttggctgagccaa

SEQ ID NO: 239743 - DNA, 25 bp, Artificial
  probe
  misc_feature (1)..(25): SEQ ID NO: 1827; WAN024GCC_at; Start 861; Stop 885
tactcgctggaaactagaagggctc

SEQ ID NO: 239744 - DNA, 25 bp, Artificial
  probe
  misc_feature (1)..(25): SEQ ID NO: 1827; WAN024GCC_at; Start 273; Stop 297
tgaccaattacgtgaaatcgctaag

SEQ ID NO: 239745 - DNA, 25 bp, Artificial
  probe
  misc_feature (1)..(25): SEQ ID NO: 1827; WAN024GCC_at; Start 941; Stop 965
gcttgattcaagagggcaactttag

SEQ ID NO: 239746 - DNA, 25 bp, Artificial
  probe
  misc_feature (1)..(25): SEQ ID NO: 1827; WAN024GCC_at; Start 402; Stop 426
caagacagactatattacgattggg

SEQ ID NO: 239747 - DNA, 25 bp, Artificial
  probe
  misc_feature (1)..(25): SEQ ID NO: 1827; WAN024GCC_at; Start 619; Stop 643
gctgaagttttggtttacggtgcta

SEQ ID NO: 239748 - DNA, 25 bp, Artificial
  probe
  misc_feature (1)..(25): SEQ ID NO: 1827; WAN024GCC_at; Start 1039; Stop 1063
ttttatgactacgatcctgacatgg

SEQ ID NO: 239749 - DNA, 25 bp, Artificial
  probe
  misc_feature (1)..(25): SEQ ID NO: 1827; WAN024GCC_at; Start 580; Stop 604
gctgaacttttcaaaatgccagaga

SEQ ID NO: 239750 - DNA, 25 bp, Artificial
  probe
  misc_feature (1)..(25): SEQ ID NO: 1827; WAN024GCC_at; Start 835; Stop 859
ttaacagaattggtggagcatggct

SEQ ID NO: 239751 - DNA, 25 bp, Artificial
  probe
  misc_feature (1)..(25): SEQ ID NO: 1827; WAN024GCC_at; Start 474; Stop 498
gaccatctacgatgcttcaaccatg

SEQ ID NO: 239752 - DNA, 25 bp, Artificial
  probe
  misc_feature (1)..(25): SEQ ID NO: 1827; WAN024GCC_at; Start 425; Stop 449
gggatgcaggcgtcttttacgtagt

SEQ ID NO: 239753 - DNA, 25 bp, Artificial
  probe
  misc_feature (1)..(25): SEQ ID NO: 1827; WAN024GCC_at; Start 695; Stop 719
cacatatcgatgatgaaaagacgca

SEQ ID NO: 239754 - DNA, 25 bp, Artificial
  probe
  misc_feature (1)..(25): SEQ ID NO: 1827; WAN024GCC_at; Start 187; Stop 211
gttgaacaactactcgaagctggcg

SEQ ID NO: 239755 - DNA, 25 bp, Artificial
  probe
  misc_feature (1)..(25): SEQ ID NO: 1827; WAN024GCC_at; Start 545; Stop 569
catctgaggctgttttggcgcgtga

SEQ ID NO: 239756 - DNA, 25 bp, Artificial
  probe
  misc_feature (1)..(25): SEQ ID NO: 1827; WAN024GCC_at; Start 290; Stop 314
tcgctaagttggttcatgatgctgg

SEQ ID NO: 239757 - DNA, 25 bp, Artificial
  probe
  misc_feature (1)..(25): SEQ ID NO: 3867; WAN024GCD_at; Start 135; Stop 159
gctttcgctcacatccataatggta

SEQ ID NO: 239758 - DNA, 25 bp, Artificial
  probe
  misc_feature (1)..(25): SEQ ID NO: 3867; WAN024GCD_at; Start 28; Stop 52
ggaacttctgcaagctccggcttaa

SEQ ID NO: 239759 - DNA, 25 bp, Artificial
  probe
  misc_feature (1)..(25): SEQ ID NO: 3867; WAN024GCD_at; Start 111; Stop 135
gacttcttccaaactcgatgcaatg

SEQ ID NO: 239760 - DNA, 25 bp, Artificial
  probe
  misc_feature (1)..(25): SEQ ID NO: 3867; WAN024GCD_at; Start 190; Stop 214
cgattttgcaaaactgcgagtggag

SEQ ID NO: 239761 - DNA, 25 bp, Artificial
  probe
  misc_feature (1)..(25): SEQ ID NO: 3867; WAN024GCD_at; Start 186; Stop 210
taagcgattttgcaaaactgcgagt

SEQ ID NO: 239762 - DNA, 25 bp, Artificial
  probe
  misc_feature (1)..(25): SEQ ID NO: 3867; WAN024GCD_at; Start 36; Stop 60
tgcaagctccggcttaatcccatca

SEQ ID NO: 239763 - DNA, 25 bp, Artificial
  probe
  misc_feature (1)..(25): SEQ ID NO: 3867; WAN024GCD_at; Start 114; Stop 138
ttcttccaaactcgatgcaatgctt

SEQ ID NO: 239764 - DNA, 25 bp, Artificial
  probe
  misc_feature (1)..(25): SEQ ID NO: 3867; WAN024GCD_at; Start 204; Stop 228
tgcgagtggagttcgtaactcatga

SEQ ID NO: 239765 - DNA, 25 bp, Artificial
  probe
  misc_feature (1)..(25): SEQ ID NO: 3867; WAN024GCD_at; Start 61; Stop 85
tctctccgagctaagttcagcaagc

SEQ ID NO: 239766 - DNA, 25 bp, Artificial
  probe
  misc_feature (1)..(25): SEQ ID NO: 3867; WAN024GCD_at; Start 14; Stop 38
taaaaaagctagttggaacttctgc

SEQ ID NO: 239767 - DNA, 25 bp, Artificial
  probe
  misc_feature (1)..(25): SEQ ID NO: 3867; WAN024GCD_at; Start 176; Stop 200
aaagggtctctaagcgattttgcaa

SEQ ID NO: 239768 - DNA, 25 bp, Artificial
  probe
  misc_feature (1)..(25): SEQ ID NO: 3867; WAN024GCD_at; Start 179; Stop 203
gggtctctaagcgattttgcaaaac

SEQ ID NO: 239769 - DNA, 25 bp, Artificial
  probe
  misc_feature (1)..(25): SEQ ID NO: 3867; WAN024GCD_at; Start 58; Stop 82
tcatctctccgagctaagttcagca

SEQ ID NO: 239770 - DNA, 25 bp, Artificial
  probe
  misc_feature (1)..(25): SEQ ID NO: 3867; WAN024GCD_at; Start 118; Stop 142
tccaaactcgatgcaatgctttcgc

SEQ ID NO: 239771 - DNA, 25 bp, Artificial
  probe
  misc_feature (1)..(25): SEQ ID NO: 3867; WAN024GCD_at; Start 144; Stop 168
cacatccataatggtagcttctggc

SEQ ID NO: 239772 - DNA, 25 bp, Artificial
  probe
  misc_feature (1)..(25): SEQ ID NO: 3867; WAN024GCD_at; Start 18; Stop 42
aaagctagttggaacttctgcaagc

SEQ ID NO: 239773 - DNA, 25 bp, Artificial
  probe
  misc_feature (1)..(25): SEQ ID NO: 3867; WAN024GCD_at; Start 77; Stop 101
tcagcaagcttgtcgttaaaaaacg

SEQ ID NO: 239774 - DNA, 25 bp, Artificial
  probe
  misc_feature (1)..(25): SEQ ID NO: 3867; WAN024GCD_at; Start 97; Stop 121
aaacgcatatttcggacttcttcca

SEQ ID NO: 239775 - DNA, 25 bp, Artificial
  probe
  misc_feature (1)..(25): SEQ ID NO: 3867; WAN024GCD_at; Start 130; Stop 154
gcaatgctttcgctcacatccataa

SEQ ID NO: 239776 - DNA, 25 bp, Artificial
  probe
  misc_feature (1)..(25): SEQ ID NO: 3867; WAN024GCD_at; Start 109; Stop 133
cggacttcttccaaactcgatgcaa

SEQ ID NO: 239777 - DNA, 25 bp, Artificial
  probe
  misc_feature (1)..(25): SEQ ID NO: 3867; WAN024GCD_at; Start 70; Stop 94
gctaagttcagcaagcttgtcgtta

SEQ ID NO: 239778 - DNA, 25 bp, Artificial
  probe
  misc_feature (1)..(25): SEQ ID NO: 3867; WAN024GCD_at; Start 149; Stop 173
ccataatggtagcttctggcttacg

SEQ ID NO: 239779 - DNA, 25 bp, Artificial
  probe
  misc_feature (1)..(25): SEQ ID NO: 3867; WAN024GCD_at; Start 80; Stop 104
gcaagcttgtcgttaaaaaacgcat

SEQ ID NO: 239780 - DNA, 25 bp, Artificial
  probe
  misc_feature (1)..(25): SEQ ID NO: 3867; WAN024GCD_at; Start 122; Stop 146
aactcgatgcaatgctttcgctcac

SEQ ID NO: 239781 - DNA, 25 bp, Artificial
  probe
  misc_feature (1)..(25): SEQ ID NO: 3867; WAN024GCD_at; Start 163; Stop 187
tctggcttacgaaaaagggtctcta

SEQ ID NO: 239782 - DNA, 25 bp, Artificial
  probe
  misc_feature (1)..(25): SEQ ID NO: 3867; WAN024GCD_at; Start 153; Stop 177
aatggtagcttctggcttacgaaaa

SEQ ID NO: 239783 - DNA, 25 bp, Artificial
  probe
  misc_feature (1)..(25): SEQ ID NO: 3867; WAN024GCD_at; Start 198; Stop 222
caaaactgcgagtggagttcgtaac

SEQ ID NO: 239784 - DNA, 25 bp, Artificial
  probe
  misc_feature (1)..(25): SEQ ID NO: 3867; WAN024GCD_at; Start 51; Stop 75
aatcccatcatctctccgagctaag

SEQ ID NO: 239785 - DNA, 25 bp, Artificial
  probe
  misc_feature (1)..(25): SEQ ID NO: 3867; WAN024GCD_at; Start 65; Stop 89
tccgagctaagttcagcaagcttgt

SEQ ID NO: 239786 - DNA, 25 bp, Artificial
  probe
  misc_feature (1)..(25): SEQ ID NO: 3867; WAN024GCD_at; Start 201; Stop 225
aactgcgagtggagttcgtaactca

SEQ ID NO: 239787 - DNA, 25 bp, Artificial
  probe
  misc_feature (1)..(25): SEQ ID NO: 3867; WAN024GCD_at; Start 46; Stop 70
ggcttaatcccatcatctctccgag

SEQ ID NO: 239788 - DNA, 25 bp, Artificial
  probe
  misc_feature (1)..(25): SEQ ID NO: 3867; WAN024GCD_at; Start 193; Stop 217
ttttgcaaaactgcgagtggagttc

SEQ ID NO: 239789 - DNA, 25 bp, Artificial
  probe
  misc_feature (1)..(25): SEQ ID NO: 3867; WAN024GCD_at; Start 23; Stop 47
tagttggaacttctgcaagctccgg

SEQ ID NO: 239790 - DNA, 25 bp, Artificial
  probe
  misc_feature (1)..(25): SEQ ID NO: 3867; WAN024GCD_at; Start 127; Stop 151
gatgcaatgctttcgctcacatcca

SEQ ID NO: 239791 - DNA, 25 bp, Artificial
  probe
  misc_feature (1)..(25): SEQ ID NO: 3030; WAN024GCE_at; Start 802; Stop 826
cgttttttaacgacaagcttgctga

SEQ ID NO: 239792 - DNA, 25 bp, Artificial
  probe
  misc_feature (1)..(25): SEQ ID NO: 3030; WAN024GCE_at; Start 380; Stop 404
taggacatatctaccagattcaggt

SEQ ID NO: 239793 - DNA, 25 bp, Artificial
  probe
  misc_feature (1)..(25): SEQ ID NO: 3030; WAN024GCE_at; Start 225; Stop 249
tttagaaaatgctagggcggacgct

SEQ ID NO: 239794 - DNA, 25 bp, Artificial
  probe
  misc_feature (1)..(25): SEQ ID NO: 3030; WAN024GCE_at; Start 852; Stop 876
taagccggagcttgcagaagttcca

SEQ ID NO: 239795 - DNA, 25 bp, Artificial
  probe
  misc_feature (1)..(25): SEQ ID NO: 3030; WAN024GCE_at; Start 603; Stop 627
tctagctagggtcagtgttaggccc

SEQ ID NO: 239796 - DNA, 25 bp, Artificial
  probe
  misc_feature (1)..(25): SEQ ID NO: 3030; WAN024GCE_at; Start 770; Stop 794
ttgcatcgagtttggaagaagtccg

SEQ ID NO: 239797 - DNA, 25 bp, Artificial
  probe
  misc_feature (1)..(25): SEQ ID NO: 3030; WAN024GCE_at; Start 544; Stop 568
caattgattgtggtcgtgatggcta

SEQ ID NO: 239798 - DNA, 25 bp, Artificial
  probe
  misc_feature (1)..(25): SEQ ID NO: 3030; WAN024GCE_at; Start 171; Stop 195
tcctcaagcagttattcagctggct

SEQ ID NO: 239799 - DNA, 25 bp, Artificial
  probe
  misc_feature (1)..(25): SEQ ID NO: 3030; WAN024GCE_at; Start 588; Stop 612
acttgccagtctctatctagctagg

SEQ ID NO: 239800 - DNA, 25 bp, Artificial
  probe
  misc_feature (1)..(25): SEQ ID NO: 3030; WAN024GCE_at; Start 833; Stop 857
ctcggagagatgatgggattaagcc

SEQ ID NO: 239801 - DNA, 25 bp, Artificial
  probe
  misc_feature (1)..(25): SEQ ID NO: 3030; WAN024GCE_at; Start 1055; Stop 1079
ttgattttcttatctcggcgaccga

SEQ ID NO: 239802 - DNA, 25 bp, Artificial
  probe
  misc_feature (1)..(25): SEQ ID NO: 3030; WAN024GCE_at; Start 525; Stop 549
ggctagtcaaaagcatgagcaattg

SEQ ID NO: 239803 - DNA, 25 bp, Artificial
  probe
  misc_feature (1)..(25): SEQ ID NO: 3030; WAN024GCE_at; Start 122; Stop 146
cgagtctttatacttcggtggacga

SEQ ID NO: 239804 - DNA, 25 bp, Artificial
  probe
  misc_feature (1)..(25): SEQ ID NO: 3030; WAN024GCE_at; Start 700; Stop 724
gttttgcaaaatcgcttagagaccc

SEQ ID NO: 239805 - DNA, 25 bp, Artificial
  probe
  misc_feature (1)..(25): SEQ ID NO: 3030; WAN024GCE_at; Start 186; Stop 210
tcagctggctataaatagggcaaca

SEQ ID NO: 239806 - DNA, 25 bp, Artificial
  probe
  misc_feature (1)..(25): SEQ ID NO: 3030; WAN024GCE_at; Start 744; Stop 768
taccattatggatgtgagcgaaagc

SEQ ID NO: 239807 - DNA, 25 bp, Artificial
  probe
  misc_feature (1)..(25): SEQ ID NO: 3030; WAN024GCE_at; Start 433; Stop 457
tatcgtgtgattttgatggagacca

SEQ ID NO: 239808 - DNA, 25 bp, Artificial
  probe
  misc_feature (1)..(25): SEQ ID NO: 3030; WAN024GCE_at; Start 1207; Stop 1231
ggattatccctagccaagcaaattg

SEQ ID NO: 239809 - DNA, 25 bp, Artificial
  probe
  misc_feature (1)..(25): SEQ ID NO: 3030; WAN024GCE_at; Start 1018; Stop 1042
gataatgccgtcaagtatactgagg

SEQ ID NO: 239810 - DNA, 25 bp, Artificial
  probe
  misc_feature (1)..(25): SEQ ID NO: 3030; WAN024GCE_at; Start 663; Stop 687
ggaaaatgccagtcatgagttacga

SEQ ID NO: 239811 - DNA, 25 bp, Artificial
  probe
  misc_feature (1)..(25): SEQ ID NO: 3030; WAN024GCE_at; Start 151; Stop 175
cttcatggactgagtgaaaatcctc

SEQ ID NO: 239812 - DNA, 25 bp, Artificial
  probe
  misc_feature (1)..(25): SEQ ID NO: 3030; WAN024GCE_at; Start 618; Stop 642
tgttaggcccctgcttgagagtatg

SEQ ID NO: 239813 - DNA, 25 bp, Artificial
  probe
  misc_feature (1)..(25): SEQ ID NO: 3030; WAN024GCE_at; Start 716; Stop 740
tagagaccctttttcgtaagccaga

SEQ ID NO: 239814 - DNA, 25 bp, Artificial
  probe
  misc_feature (1)..(25): SEQ ID NO: 3030; WAN024GCE_at; Start 1234; Stop 1258
gatgctctaaaaggaactgttactg

SEQ ID NO: 239815 - DNA, 25 bp, Artificial
  probe
  misc_feature (1)..(25): SEQ ID NO: 3030; WAN024GCE_at; Start 413; Stop 437
gctatgggcaggaagaaatctatcg

SEQ ID NO: 239816 - DNA, 25 bp, Artificial
  probe
  misc_feature (1)..(25): SEQ ID NO: 3030; WAN024GCE_at; Start 136; Stop 160
tcggtggacgataagcttcatggac

SEQ ID NO: 239817 - DNA, 25 bp, Artificial
  probe
  misc_feature (1)..(25): SEQ ID NO: 3030; WAN024GCE_at; Start 467; Stop 491
cggtttcaaccaatatcaagtatgc

SEQ ID NO: 239818 - DNA, 25 bp, Artificial
  probe
  misc_feature (1)..(25): SEQ ID NO: 3030; WAN024GCE_at; Start 1295; Stop 1319
tgaagattgccattcagacaccatc

SEQ ID NO: 239819 - DNA, 25 bp, Artificial
  probe
  misc_feature (1)..(25): SEQ ID NO: 3030; WAN024GCE_at; Start 815; Stop 839
caagcttgctgaacttagctcggag

SEQ ID NO: 239820 - DNA, 25 bp, Artificial
  probe
  misc_feature (1)..(25): SEQ ID NO: 3030; WAN024GCE_at; Start 649; Stop 673
caacagtcttttgtggaaaatgcca

SEQ ID NO: 239821 - DNA, 25 bp, Artificial
  probe
  misc_feature (1)..(25): SEQ ID NO: 3030; WAN024GCE_at; Start 400; Stop 424
caggtttttaatagctatgggcagg

SEQ ID NO: 239822 - DNA, 25 bp, Artificial
  probe
  misc_feature (1)..(25): SEQ ID NO: 3030; WAN024GCE_at; Start 1257; Stop 1281
tgtcaaagataataaacccaaggga

SEQ ID NO: 239823 - DNA, 25 bp, Artificial
  probe
  misc_feature (1)..(25): SEQ ID NO: 3030; WAN024GCE_at; Start 984; Stop 1008
gcttcttctgaaacaactgatgacc

SEQ ID NO: 239824 - DNA, 25 bp, Artificial
  probe
  misc_feature (1)..(25): SEQ ID NO: 3030; WAN024GCE_at; Start 678; Stop 702
tgagttacgaactccactcgcagtt

SEQ ID NO: 239825 - DNA, 25 bp, Artificial
  probe
  misc_feature (1)..(25): SEQ ID NO: 4862; WAN024GCF_at; Start 102; Stop 126
gcaaaactttgcaatcggcttgatt

SEQ ID NO: 239826 - DNA, 25 bp, Artificial
  probe
  misc_feature (1)..(25): SEQ ID NO: 4862; WAN024GCF_at; Start 149; Stop 173
aggctgtactttctgctggactcta

SEQ ID NO: 239827 - DNA, 25 bp, Artificial
  probe
  misc_feature (1)..(25): SEQ ID NO: 4862; WAN024GCF_at; Start 388; Stop 412
catttcctagctggaatggcatttg

SEQ ID NO: 239828 - DNA, 25 bp, Artificial
  probe
  misc_feature (1)..(25): SEQ ID NO: 4862; WAN024GCF_at; Start 240; Stop 264
tggccctactgcaggctatctttgg

SEQ ID NO: 239829 - DNA, 25 bp, Artificial
  probe
  misc_feature (1)..(25): SEQ ID NO: 4862; WAN024GCF_at; Start 262; Stop 286
tggttttatctcgtttactctggac

SEQ ID NO: 239830 - DNA, 25 bp, Artificial
  probe
  misc_feature (1)..(25): SEQ ID NO: 4862; WAN024GCF_at; Start 129; Stop 153
tactgtctttagaccgagagaggct

SEQ ID NO: 239831 - DNA, 25 bp, Artificial
  probe
  misc_feature (1)..(25): SEQ ID NO: 4862; WAN024GCF_at; Start 5; Stop 29
aaaaagctcacgtttatgctatccc

SEQ ID NO: 239832 - DNA, 25 bp, Artificial
  probe
  misc_feature (1)..(25): SEQ ID NO: 4862; WAN024GCF_at; Start 134; Stop 158
tctttagaccgagagaggctgtact

SEQ ID NO: 239833 - DNA, 25 bp, Artificial
  probe
  misc_feature (1)..(25): SEQ ID NO: 4862; WAN024GCF_at; Start 270; Stop 294
tctcgtttactctggacttacttcc

SEQ ID NO: 239834 - DNA, 25 bp, Artificial
  probe
  misc_feature (1)..(25): SEQ ID NO: 4862; WAN024GCF_at; Start 172; Stop 196
tatcttcttctaggtgctatcggtc

SEQ ID NO: 239835 - DNA, 25 bp, Artificial
  probe
  misc_feature (1)..(25): SEQ ID NO: 4862; WAN024GCF_at; Start 215; Stop 239
gtggagctggttttcaggctttagt

SEQ ID NO: 239836 - DNA, 25 bp, Artificial
  probe
  misc_feature (1)..(25): SEQ ID NO: 4862; WAN024GCF_at; Start 352; Stop 376
gatgcccttgtctttgtcggcggga

SEQ ID NO: 239837 - DNA, 25 bp, Artificial
  probe
  misc_feature (1)..(25): SEQ ID NO: 4862; WAN024GCF_at; Start 68; Stop 92
tcagtcttccaattggacctgttcc

SEQ ID NO: 239838 - DNA, 25 bp, Artificial
  probe
  misc_feature (1)..(25): SEQ ID NO: 4862; WAN024GCF_at; Start 198; Stop 222
tcctgtctttgcaggaggtggagct

SEQ ID NO: 239839 - DNA, 25 bp, Artificial
  probe
  misc_feature (1)..(25): SEQ ID NO: 4862; WAN024GCF_at; Start 88; Stop 112
gttcccttcactctgcaaaactttg

SEQ ID NO: 239840 - DNA, 25 bp, Artificial
  probe
  misc_feature (1)..(25): SEQ ID NO: 4862; WAN024GCF_at; Start 117; Stop 141
cggcttgattgctactgtctttaga

SEQ ID NO: 239841 - DNA, 25 bp, Artificial
  probe
  misc_feature (1)..(25): SEQ ID NO: 4862; WAN024GCF_at; Start 338; Stop 362
caaacctcttgggtgatgcccttgt

SEQ ID NO: 239842 - DNA, 25 bp, Artificial
  probe
  misc_feature (1)..(25): SEQ ID NO: 4862; WAN024GCF_at; Start 283; Stop 307
ggacttacttcctctctaaccaaca

SEQ ID NO: 239843 - DNA, 25 bp, Artificial
  probe
  misc_feature (1)..(25): SEQ ID NO: 4862; WAN024GCF_at; Start 326; Stop 350
agatttttcttgcaaacctcttggg

SEQ ID NO: 239844 - DNA, 25 bp, Artificial
  probe
  misc_feature (1)..(25): SEQ ID NO: 4862; WAN024GCF_at; Start 163; Stop 187
gctggactctatcttcttctaggtg

SEQ ID NO: 239845 - DNA, 25 bp, Artificial
  probe
  misc_feature (1)..(25): SEQ ID NO: 4862; WAN024GCF_at; Start 81; Stop 105
tggacctgttcccttcactctgcaa

SEQ ID NO: 239846 - DNA, 25 bp, Artificial
  probe
  misc_feature (1)..(25): SEQ ID NO: 4862; WAN024GCF_at; Start 400; Stop 424
ggaatggcatttgaaaaagctcttg

SEQ ID NO: 239847 - DNA, 25 bp, Artificial
  probe
  misc_feature (1)..(25): SEQ ID NO: 4862; WAN024GCF_at; Start 306; Stop 330
cagcaagagtggtgttgttaagatt

SEQ ID NO: 239848 - DNA, 25 bp, Artificial
  probe
  misc_feature (1)..(25): SEQ ID NO: 4862; WAN024GCF_at; Start 446; Stop 470
tcattccagaccttggcaaacttct

SEQ ID NO: 239849 - DNA, 25 bp, Artificial
  probe
  misc_feature (1)..(25): SEQ ID NO: 4862; WAN024GCF_at; Start 365; Stop 389
ttgtcggcgggattctcagcttgca

SEQ ID NO: 239850 - DNA, 25 bp, Artificial
  probe
  misc_feature (1)..(25): SEQ ID NO: 4862; WAN024GCF_at; Start 374; Stop 398
ggattctcagcttgcatttcctagc

SEQ ID NO: 239851 - DNA, 25 bp, Artificial
  probe
  misc_feature (1)..(25): SEQ ID NO: 4862; WAN024GCF_at; Start 229; Stop 253
caggctttagttggccctactgcag

SEQ ID NO: 239852 - DNA, 25 bp, Artificial
  probe
  misc_feature (1)..(25): SEQ ID NO: 4862; WAN024GCF_at; Start 187; Stop 211
gctatcggtcttcctgtctttgcag

SEQ ID NO: 239853 - DNA, 25 bp, Artificial
  probe
  misc_feature (1)..(25): SEQ ID NO: 4862; WAN024GCF_at; Start 295; Stop 319
tctctaaccaacagcaagagtggtg

SEQ ID NO: 239854 - DNA, 25 bp, Artificial
  probe
  misc_feature (1)..(25): SEQ ID NO: 4862; WAN024GCF_at; Start 431; Stop 455
gggttcttccctttatcattccaga

SEQ ID NO: 239855 - DNA, 25 bp, Artificial
  probe
  misc_feature (1)..(25): SEQ ID NO: 4862; WAN024GCF_at; Start 60; Stop 84
ggcacaaatcagtcttccaattgga

SEQ ID NO: 239856 - DNA, 25 bp, Artificial
  probe
  misc_feature (1)..(25): SEQ ID NO: 4862; WAN024GCF_at; Start 247; Stop 271
actgcaggctatctttggttttatc

SEQ ID NO: 239857 - DNA, 25 bp, Artificial
  probe
  misc_feature (1)..(25): SEQ ID NO: 4862; WAN024GCF_at; Start 15; Stop 39
cgtttatgctatccctgctattggg

SEQ ID NO: 239858 - DNA, 25 bp, Artificial
  probe
  misc_feature (1)..(25): SEQ ID NO: 4862; WAN024GCF_at; Start 140; Stop 164
gaccgagagaggctgtactttctgc

SEQ ID NO: 239859 - DNA, 25 bp, Artificial
  probe
  misc_feature (1)..(25): SEQ ID NO: 1926; WAN024GCG_at; Start 13; Stop 37
aaacgtaatggcgaaattgctgaat

SEQ ID NO: 239860 - DNA, 25 bp, Artificial
  probe
  misc_feature (1)..(25): SEQ ID NO: 1926; WAN024GCG_at; Start 88; Stop 112
tatgttttgacagatgatttgcgtc

SEQ ID NO: 239861 - DNA, 25 bp, Artificial
  probe
  misc_feature (1)..(25): SEQ ID NO: 1926; WAN024GCG_at; Start 2; Stop 26
tgcaagtaatcaaacgtaatggcga

SEQ ID NO: 239862 - DNA, 25 bp, Artificial
  probe
  misc_feature (1)..(25): SEQ ID NO: 1926; WAN024GCG_at; Start 147; Stop 171
ggatttacaagaagccaaggtggaa

SEQ ID NO: 239863 - DNA, 25 bp, Artificial
  probe
  misc_feature (1)..(25): SEQ ID NO: 1926; WAN024GCG_at; Start 189; Stop 213
gattcaatctatggttgaacatcgt

SEQ ID NO: 239864 - DNA, 25 bp, Artificial
  probe
  misc_feature (1)..(25): SEQ ID NO: 1926; WAN024GCG_at; Start 307; Stop 331
gcagttcatttacattttgaacaaa

SEQ ID NO: 239865 - DNA, 25 bp, Artificial
  probe
  misc_feature (1)..(25): SEQ ID NO: 1926; WAN024GCG_at; Start 8; Stop 32
taatcaaacgtaatggcgaaattgc

SEQ ID NO: 239866 - DNA, 25 bp, Artificial
  probe
  misc_feature (1)..(25): SEQ ID NO: 1926; WAN024GCG_at; Start 108; Stop 132
gcgtcaaaatcttgctcaagtcact

SEQ ID NO: 239867 - DNA, 25 bp, Artificial
  probe
  misc_feature (1)..(25): SEQ ID NO: 1926; WAN024GCG_at; Start 175; Stop 199
gcgactatcagtatgattcaatcta

SEQ ID NO: 239868 - DNA, 25 bp, Artificial
  probe
  misc_feature (1)..(25): SEQ ID NO: 1926; WAN024GCG_at; Start 256; Stop 280
tcctatcgtttacaacgtgacttgg

SEQ ID NO: 239869 - DNA, 25 bp, Artificial
  probe
  misc_feature (1)..(25): SEQ ID NO: 1926; WAN024GCG_at; Start 162; Stop 186
caaggtggaacgtgcgactatcagt

SEQ ID NO: 239870 - DNA, 25 bp, Artificial
  probe
  misc_feature (1)..(25): SEQ ID NO: 1926; WAN024GCG_at; Start 213; Stop 237
tttattgggcgcaggttacattacc

SEQ ID NO: 239871 - DNA, 25 bp, Artificial
  probe
  misc_feature (1)..(25): SEQ ID NO: 1926; WAN024GCG_at; Start 319; Stop 343
cattttgaacaaattcgctaactaa

SEQ ID NO: 239872 - DNA, 25 bp, Artificial
  probe
  misc_feature (1)..(25): SEQ ID NO: 1926; WAN024GCG_at; Start 227; Stop 251
gttacattaccattgcagaacacta

SEQ ID NO: 239873 - DNA, 25 bp, Artificial
  probe
  misc_feature (1)..(25): SEQ ID NO: 1926; WAN024GCG_at; Start 218; Stop 242
tgggcgcaggttacattaccattgc

SEQ ID NO: 239874 - DNA, 25 bp, Artificial
  probe
  misc_feature (1)..(25): SEQ ID NO: 1926; WAN024GCG_at; Start 118; Stop 142
cttgctcaagtcactaagaaggtag

SEQ ID NO: 239875 - DNA, 25 bp, Artificial
  probe
  misc_feature (1)..(25): SEQ ID NO: 1926; WAN024GCG_at; Start 157; Stop 181
gaagccaaggtggaacgtgcgacta

SEQ ID NO: 239876 - DNA, 25 bp, Artificial
  probe
  misc_feature (1)..(25): SEQ ID NO: 1926; WAN024GCG_at; Start 55; Stop 79
taccaagccatcttgaaggcagccc

SEQ ID NO: 239877 - DNA, 25 bp, Artificial
  probe
  misc_feature (1)..(25): SEQ ID NO: 1926; WAN024GCG_at; Start 152; Stop 176
tacaagaagccaaggtggaacgtgc

SEQ ID NO: 239878 - DNA, 25 bp, Artificial
  probe
  misc_feature (1)..(25): SEQ ID NO: 1926; WAN024GCG_at; Start 68; Stop 92
tgaaggcagcccaaactgtttatgt

SEQ ID NO: 239879 - DNA, 25 bp, Artificial
  probe
  misc_feature (1)..(25): SEQ ID NO: 1926; WAN024GCG_at; Start 207; Stop 231
acatcgtttattgggcgcaggttac

SEQ ID NO: 239880 - DNA, 25 bp, Artificial
  probe
  misc_feature (1)..(25): SEQ ID NO: 1926; WAN024GCG_at; Start 280; Stop 304
gaaagaagtggttatggagatcata

SEQ ID NO: 239881 - DNA, 25 bp, Artificial
  probe
  misc_feature (1)..(25): SEQ ID NO: 1926; WAN024GCG_at; Start 223; Stop 247
gcaggttacattaccattgcagaac

SEQ ID NO: 239882 - DNA, 25 bp, Artificial
  probe
  misc_feature (1)..(25): SEQ ID NO: 1926; WAN024GCG_at; Start 139; Stop 163
gtagttttggatttacaagaagcca

SEQ ID NO: 239883 - DNA, 25 bp, Artificial
  probe
  misc_feature (1)..(25): SEQ ID NO: 1926; WAN024GCG_at; Start 266; Stop 290
tacaacgtgacttggaaagaagtgg

SEQ ID NO: 239884 - DNA, 25 bp, Artificial
  probe
  misc_feature (1)..(25): SEQ ID NO: 1926; WAN024GCG_at; Start 23; Stop 47
gcgaaattgctgaatttaatccaga

SEQ ID NO: 239885 - DNA, 25 bp, Artificial
  probe
  misc_feature (1)..(25): SEQ ID NO: 1926; WAN024GCG_at; Start 58; Stop 82
caagccatcttgaaggcagcccaaa

SEQ ID NO: 239886 - DNA, 25 bp, Artificial
  probe
  misc_feature (1)..(25): SEQ ID NO: 1926; WAN024GCG_at; Start 124; Stop 148
caagtcactaagaaggtagttttgg

SEQ ID NO: 239887 - DNA, 25 bp, Artificial
  probe
  misc_feature (1)..(25): SEQ ID NO: 1926; WAN024GCG_at; Start 39; Stop 63
taatccagataagatttaccaagcc

SEQ ID NO: 239888 - DNA, 25 bp, Artificial
  probe
  misc_feature (1)..(25): SEQ ID NO: 1926; WAN024GCG_at; Start 100; Stop 124
gatgatttgcgtcaaaatcttgctc

SEQ ID NO: 239889 - DNA, 25 bp, Artificial
  probe
  misc_feature (1)..(25): SEQ ID NO: 1926; WAN024GCG_at; Start 76; Stop 100
gcccaaactgtttatgttttgacag

SEQ ID NO: 239890 - DNA, 25 bp, Artificial
  probe
  misc_feature (1)..(25): SEQ ID NO: 1926; WAN024GCG_at; Start 203; Stop 227
ttgaacatcgtttattgggcgcagg

SEQ ID NO: 239891 - DNA, 25 bp, Artificial
  probe
  misc_feature (1)..(25): SEQ ID NO: 1926; WAN024GCG_at; Start 51; Stop 75
gatttaccaagccatcttgaaggca

SEQ ID NO: 239892 - DNA, 25 bp, Artificial
  probe
  misc_feature (1)..(25): SEQ ID NO: 1926; WAN024GCG_at; Start 167; Stop 191
tggaacgtgcgactatcagtatgat

SEQ ID NO: 239893 - DNA, 25 bp, Artificial
  probe
  misc_feature (1)..(25): SEQ ID NO: 5650; WAN024GCH_at; Start 200; Stop 224
ccatcgatgacacggtggaaggtaa

SEQ ID NO: 239894 - DNA, 25 bp, Artificial
  probe
  misc_feature (1)..(25): SEQ ID NO: 5650; WAN024GCH_at; Start 175; Stop 199
tggatctccagtttggaccataaag

SEQ ID NO: 239895 - DNA, 25 bp, Artificial
  probe
  misc_feature (1)..(25): SEQ ID NO: 5650; WAN024GCH_at; Start 19; Stop 43
gctgccattggtgtttggttgacca

SEQ ID NO: 239896 - DNA, 25 bp, Artificial
  probe
  misc_feature (1)..(25): SEQ ID NO: 5650; WAN024GCH_at; Start 170; Stop 194
ccttttggatctccagtttggacca

SEQ ID NO: 239897 - DNA, 25 bp, Artificial
  probe
  misc_feature (1)..(25): SEQ ID NO: 5650; WAN024GCH_at; Start 160; Stop 184
tgtaccgtccccttttggatctcca

SEQ ID NO: 239898 - DNA, 25 bp, Artificial
  probe
  misc_feature (1)..(25): SEQ ID NO: 5650; WAN024GCH_at; Start 252; Stop 276
gagtgaggaaattttcaaccgctag

SEQ ID NO: 239899 - DNA, 25 bp, Artificial
  probe
  misc_feature (1)..(25): SEQ ID NO: 5650; WAN024GCH_at; Start 121; Stop 145
tttagtcttatccttgtcatgccag

SEQ ID NO: 239900 - DNA, 25 bp, Artificial
  probe
  misc_feature (1)..(25): SEQ ID NO: 5650; WAN024GCH_at; Start 38; Stop 62
tgaccagtattagccatagcaagag

SEQ ID NO: 239901 - DNA, 25 bp, Artificial
  probe
  misc_feature (1)..(25): SEQ ID NO: 5650; WAN024GCH_at; Start 125; Stop 149
gtcttatccttgtcatgccagatgg

SEQ ID NO: 239902 - DNA, 25 bp, Artificial
  probe
  misc_feature (1)..(25): SEQ ID NO: 5650; WAN024GCH_at; Start 68; Stop 92
cggatgttatacaaataaggagtaa

SEQ ID NO: 239903 - DNA, 25 bp, Artificial
  probe
  misc_feature (1)..(25): SEQ ID NO: 5650; WAN024GCH_at; Start 137; Stop 161
tcatgccagatggactgaccacctg

SEQ ID NO: 239904 - DNA, 25 bp, Artificial
  probe
  misc_feature (1)..(25): SEQ ID NO: 5650; WAN024GCH_at; Start 94; Stop 118
ctcgttcttgaaaccagttcctttg

SEQ ID NO: 239905 - DNA, 25 bp, Artificial
  probe
  misc_feature (1)..(25): SEQ ID NO: 5650; WAN024GCH_at; Start 22; Stop 46
gccattggtgtttggttgaccagta

SEQ ID NO: 239906 - DNA, 25 bp, Artificial
  probe
  misc_feature (1)..(25): SEQ ID NO: 5650; WAN024GCH_at; Start 86; Stop 110
ggagtaatctcgttcttgaaaccag

SEQ ID NO: 239907 - DNA, 25 bp, Artificial
  probe
  misc_feature (1)..(25): SEQ ID NO: 5650; WAN024GCH_at; Start 225; Stop 249
taccgttatagtagccttctttggc

SEQ ID NO: 239908 - DNA, 25 bp, Artificial
  probe
  misc_feature (1)..(25): SEQ ID NO: 5650; WAN024GCH_at; Start 132; Stop 156
ccttgtcatgccagatggactgacc

SEQ ID NO: 239909 - DNA, 25 bp, Artificial
  probe
  misc_feature (1)..(25): SEQ ID NO: 5650; WAN024GCH_at; Start 215; Stop 239
tggaaggtaataccgttatagtagc

SEQ ID NO: 239910 - DNA, 25 bp, Artificial
  probe
  misc_feature (1)..(25): SEQ ID NO: 5650; WAN024GCH_at; Start 13; Stop 37
gaactggctgccattggtgtttggt

SEQ ID NO: 239911 - DNA, 25 bp, Artificial
  probe
  misc_feature (1)..(25): SEQ ID NO: 5650; WAN024GCH_at; Start 5; Stop 29
ttgatgaagaactggctgccattgg

SEQ ID NO: 239912 - DNA, 25 bp, Artificial
  probe
  misc_feature (1)..(25): SEQ ID NO: 5650; WAN024GCH_at; Start 190; Stop 214
gaccataaagccatcgatgacacgg

SEQ ID NO: 239913 - DNA, 25 bp, Artificial
  probe
  misc_feature (1)..(25): SEQ ID NO: 5650; WAN024GCH_at; Start 143; Stop 167
cagatggactgaccacctgtaccgt

SEQ ID NO: 239914 - DNA, 25 bp, Artificial
  probe
  misc_feature (1)..(25): SEQ ID NO: 5650; WAN024GCH_at; Start 1; Stop 25
ttggttgatgaagaactggctgcca

SEQ ID NO: 239915 - DNA, 25 bp, Artificial
  probe
  misc_feature (1)..(25): SEQ ID NO: 5650; WAN024GCH_at; Start 90; Stop 114
taatctcgttcttgaaaccagttcc

SEQ ID NO: 239916 - DNA, 25 bp, Artificial
  probe
  misc_feature (1)..(25): SEQ ID NO: 5650; WAN024GCH_at; Start 42; Stop 66
cagtattagccatagcaagagcacc

SEQ ID NO: 239917 - DNA, 25 bp, Artificial
  probe
  misc_feature (1)..(25): SEQ ID NO: 5650; WAN024GCH_at; Start 129; Stop 153
tatccttgtcatgccagatggactg

SEQ ID NO: 239918 - DNA, 25 bp, Artificial
  probe
  misc_feature (1)..(25): SEQ ID NO: 5650; WAN024GCH_at; Start 107; Stop 131
ccagttcctttgtctttagtcttat

SEQ ID NO: 239919 - DNA, 25 bp, Artificial
  probe
  misc_feature (1)..(25): SEQ ID NO: 5650; WAN024GCH_at; Start 181; Stop 205
tccagtttggaccataaagccatcg

SEQ ID NO: 239920 - DNA, 25 bp, Artificial
  probe
  misc_feature (1)..(25): SEQ ID NO: 5650; WAN024GCH_at; Start 193; Stop 217
cataaagccatcgatgacacggtgg

SEQ ID NO: 239921 - DNA, 25 bp, Artificial
  probe
  misc_feature (1)..(25): SEQ ID NO: 5650; WAN024GCH_at; Start 204; Stop 228
cgatgacacggtggaaggtaatacc

SEQ ID NO: 239922 - DNA, 25 bp, Artificial
  probe
  misc_feature (1)..(25): SEQ ID NO: 5650; WAN024GCH_at; Start 195; Stop 219
taaagccatcgatgacacggtggaa

SEQ ID NO: 239923 - DNA, 25 bp, Artificial
  probe
  misc_feature (1)..(25): SEQ ID NO: 5650; WAN024GCH_at; Start 145; Stop 169
gatggactgaccacctgtaccgtcc

SEQ ID NO: 239924 - DNA, 25 bp, Artificial
  probe
  misc_feature (1)..(25): SEQ ID NO: 5650; WAN024GCH_at; Start 186; Stop 210
tttggaccataaagccatcgatgac

SEQ ID NO: 239925 - DNA, 25 bp, Artificial
  probe
  misc_feature (1)..(25): SEQ ID NO: 5650; WAN024GCH_at; Start 34; Stop 58
tggttgaccagtattagccatagca

SEQ ID NO: 239926 - DNA, 25 bp, Artificial
  probe
  misc_feature (1)..(25): SEQ ID NO: 5650; WAN024GCH_at; Start 77; Stop 101
tacaaataaggagtaatctcgttct

SEQ ID NO: 239927 - DNA, 25 bp, Artificial
  probe
  misc_feature (1)..(25): SEQ ID NO: 638; WAN024GCI_at; Start 42; Stop 66
cctagctgggtgtagcagcgtccaa

SEQ ID NO: 239928 - DNA, 25 bp, Artificial
  probe
  misc_feature (1)..(25): SEQ ID NO: 638; WAN024GCI_at; Start 453; Stop 477
tggtttcaagaacgagattactcct

SEQ ID NO: 239929 - DNA, 25 bp, Artificial
  probe
  misc_feature (1)..(25): SEQ ID NO: 638; WAN024GCI_at; Start 235; Stop 259
cacacaagccaaggtgatattcgca

SEQ ID NO: 239930 - DNA, 25 bp, Artificial
  probe
  misc_feature (1)..(25): SEQ ID NO: 638; WAN024GCI_at; Start 571; Stop 595
gatacctcttctaaactccctacaa

SEQ ID NO: 239931 - DNA, 25 bp, Artificial
  probe
  misc_feature (1)..(25): SEQ ID NO: 638; WAN024GCI_at; Start 496; Stop 520
ggtgctcttgctatggctaatactg

SEQ ID NO: 239932 - DNA, 25 bp, Artificial
  probe
  misc_feature (1)..(25): SEQ ID NO: 638; WAN024GCI_at; Start 67; Stop 91
cgcagtctgcgtggtgatgattatg

SEQ ID NO: 239933 - DNA, 25 bp, Artificial
  probe
  misc_feature (1)..(25): SEQ ID NO: 638; WAN024GCI_at; Start 54; Stop 78
tagcagcgtccaacgcagtctgcgt

SEQ ID NO: 239934 - DNA, 25 bp, Artificial
  probe
  misc_feature (1)..(25): SEQ ID NO: 638; WAN024GCI_at; Start 28; Stop 52
ctgtctactgtagccctagctgggt

SEQ ID NO: 239935 - DNA, 25 bp, Artificial
  probe
  misc_feature (1)..(25): SEQ ID NO: 638; WAN024GCI_at; Start 353; Stop 377
tcatcgatggctttatggtccaaac

SEQ ID NO: 239936 - DNA, 25 bp, Artificial
  probe
  misc_feature (1)..(25): SEQ ID NO: 638; WAN024GCI_at; Start 99; Stop 123
cagtcttgctgctgaagaaagttcc

SEQ ID NO: 239937 - DNA, 25 bp, Artificial
  probe
  misc_feature (1)..(25): SEQ ID NO: 638; WAN024GCI_at; Start 368; Stop 392
tggtccaaactggagatccaaaagg

SEQ ID NO: 239938 - DNA, 25 bp, Artificial
  probe
  misc_feature (1)..(25): SEQ ID NO: 638; WAN024GCI_at; Start 207; Stop 231
tgctgaagatgaagccgaagtgatt

SEQ ID NO: 239939 - DNA, 25 bp, Artificial
  probe
  misc_feature (1)..(25): SEQ ID NO: 638; WAN024GCI_at; Start 13; Stop 37
gcaacccttcttttactgtctactg

SEQ ID NO: 239940 - DNA, 25 bp, Artificial
  probe
  misc_feature (1)..(25): SEQ ID NO: 638; WAN024GCI_at; Start 718; Stop 742
gccgaaaaagatgaaaaagacaagc

SEQ ID NO: 239941 - DNA, 25 bp, Artificial
  probe
  misc_feature (1)..(25): SEQ ID NO: 638; WAN024GCI_at; Start 273; Stop 297
taaactcgctcctctagcggttgaa

SEQ ID NO: 239942 - DNA, 25 bp, Artificial
  probe
  misc_feature (1)..(25): SEQ ID NO: 638; WAN024GCI_at; Start 283; Stop 307
cctctagcggttgaaaatttcctca

SEQ ID NO: 239943 - DNA, 25 bp, Artificial
  probe
  misc_feature (1)..(25): SEQ ID NO: 638; WAN024GCI_at; Start 762; Stop 786
cgacagcatcgaagtggtgaaagac

SEQ ID NO: 239944 - DNA, 25 bp, Artificial
  probe
  misc_feature (1)..(25): SEQ ID NO: 638; WAN024GCI_at; Start 313; Stop 337
gccaaagaaggctactataacggta

SEQ ID NO: 239945 - DNA, 25 bp, Artificial
  probe
  misc_feature (1)..(25): SEQ ID NO: 638; WAN024GCI_at; Start 178; Stop 202
gccaatttcccacaactatctaagg

SEQ ID NO: 239946 - DNA, 25 bp, Artificial
  probe
  misc_feature (1)..(25): SEQ ID NO: 638; WAN024GCI_at; Start 734; Stop 758
aagacaagccaactactgctatcac

SEQ ID NO: 239947 - DNA, 25 bp, Artificial
  probe
  misc_feature (1)..(25): SEQ ID NO: 638; WAN024GCI_at; Start 519; Stop 543
tggtcaaccaaacaccaatggcagc

SEQ ID NO: 239948 - DNA, 25 bp, Artificial
  probe
  misc_feature (1)..(25): SEQ ID NO: 638; WAN024GCI_at; Start 137; Stop 161
aatctgccaaggagttaaacgatgc

SEQ ID NO: 239949 - DNA, 25 bp, Artificial
  probe
  misc_feature (1)..(25): SEQ ID NO: 638; WAN024GCI_at; Start 587; Stop 611
tccctacaagcaagtatccacagaa

SEQ ID NO: 239950 - DNA, 25 bp, Artificial
  probe
  misc_feature (1)..(25): SEQ ID NO: 638; WAN024GCI_at; Start 250; Stop 274
gatattcgcattaaactcttcccta

SEQ ID NO: 239951 - DNA, 25 bp, Artificial
  probe
  misc_feature (1)..(25): SEQ ID NO: 638; WAN024GCI_at; Start 85; Stop 109
gattatgttgattccagtcttgctg

SEQ ID NO: 239952 - DNA, 25 bp, Artificial
  probe
  misc_feature (1)..(25): SEQ ID NO: 638; WAN024GCI_at; Start 430; Stop 454
gataagactaaagacaaaggaactg

SEQ ID NO: 239953 - DNA, 25 bp, Artificial
  probe
  misc_feature (1)..(25): SEQ ID NO: 638; WAN024GCI_at; Start 112; Stop 136
gaagaaagttccaaagtagctgccc

SEQ ID NO: 239954 - DNA, 25 bp, Artificial
  probe
  misc_feature (1)..(25): SEQ ID NO: 638; WAN024GCI_at; Start 124; Stop 148
aaagtagctgcccaatctgccaagg

SEQ ID NO: 239955 - DNA, 25 bp, Artificial
  probe
  misc_feature (1)..(25): SEQ ID NO: 638; WAN024GCI_at; Start 547; Stop 571
ttcttcatcaaccaaaactctacag

SEQ ID NO: 239956 - DNA, 25 bp, Artificial
  probe
  misc_feature (1)..(25): SEQ ID NO: 638; WAN024GCI_at; Start 334; Stop 358
ggtattaccttccaccgtgtcatcg

SEQ ID NO: 239957 - DNA, 25 bp, Artificial
  probe
  misc_feature (1)..(25): SEQ ID NO: 638; WAN024GCI_at; Start 418; Stop 442
tggcatgacaaggataagactaaag

SEQ ID NO: 239958 - DNA, 25 bp, Artificial
  probe
  misc_feature (1)..(25): SEQ ID NO: 638; WAN024GCI_at; Start 632; Stop 656
aaggtggaaaccctagtctagatgg

SEQ ID NO: 239959 - DNA, 25 bp, Artificial
  probe
  misc_feature (1)..(25): SEQ ID NO: 638; WAN024GCI_at; Start 534; Stop 558
caatggcagccagttcttcatcaac

SEQ ID NO: 239960 - DNA, 25 bp, Artificial
  probe
  misc_feature (1)..(25): SEQ ID NO: 638; WAN024GCI_at; Start 444; Stop 468
caaaggaactggtttcaagaacgag

SEQ ID NO: 239961 - DNA, 25 bp, Artificial
  probe
  misc_feature (1)..(25): SEQ ID NO: 4996; WAN024GCJ_at; Start 51; Stop 75
tggtcaaaatcctctagaatttgat

SEQ ID NO: 239962 - DNA, 25 bp, Artificial
  probe
  misc_feature (1)..(25): SEQ ID NO: 4996; WAN024GCJ_at; Start 11; Stop 35
tccagttagaaaagcatcgtcttcc

SEQ ID NO: 239963 - DNA, 25 bp, Artificial
  probe
  misc_feature (1)..(25): SEQ ID NO: 4996; WAN024GCJ_at; Start 2; Stop 26
tgaatcctgtccagttagaaaagca

SEQ ID NO: 239964 - DNA, 25 bp, Artificial
  probe
  misc_feature (1)..(25): SEQ ID NO: 4996; WAN024GCJ_at; Start 7; Stop 31
cctgtccagttagaaaagcatcgtc

SEQ ID NO: 239965 - DNA, 25 bp, Artificial
  probe
  misc_feature (1)..(25): SEQ ID NO: 4996; WAN024GCJ_at; Start 6; Stop 30
tcctgtccagttagaaaagcatcgt

SEQ ID NO: 239966 - DNA, 25 bp, Artificial
  probe
  misc_feature (1)..(25): SEQ ID NO: 4996; WAN024GCJ_at; Start 10; Stop 34
gtccagttagaaaagcatcgtcttc

SEQ ID NO: 239967 - DNA, 25 bp, Artificial
  probe
  misc_feature (1)..(25): SEQ ID NO: 4996; WAN024GCJ_at; Start 9; Stop 33
tgtccagttagaaaagcatcgtctt

SEQ ID NO: 239968 - DNA, 25 bp, Artificial
  probe
  misc_feature (1)..(25): SEQ ID NO: 4996; WAN024GCJ_at; Start 29; Stop 53
gtcttccagacccagaacctcttgg

SEQ ID NO: 239969 - DNA, 25 bp, Artificial
  probe
  misc_feature (1)..(25): SEQ ID NO: 4996; WAN024GCJ_at; Start 4; Stop 28
aatcctgtccagttagaaaagcatc

SEQ ID NO: 239970 - DNA, 25 bp, Artificial
  probe
  misc_feature (1)..(25): SEQ ID NO: 4996; WAN024GCJ_at; Start 47; Stop 71
ctcttggtcaaaatcctctagaatt

SEQ ID NO: 239971 - DNA, 25 bp, Artificial
  probe
  misc_feature (1)..(25): SEQ ID NO: 4996; WAN024GCJ_at; Start 8; Stop 32
ctgtccagttagaaaagcatcgtct

SEQ ID NO: 239972 - DNA, 25 bp, Artificial
  probe
  misc_feature (1)..(25): SEQ ID NO: 4996; WAN024GCJ_at; Start 20; Stop 44
aaaagcatcgtcttccagacccaga

SEQ ID NO: 239973 - DNA, 25 bp, Artificial
  probe
  misc_feature (1)..(25): SEQ ID NO: 4996; WAN024GCJ_at; Start 35; Stop 59
cagacccagaacctcttggtcaaaa

SEQ ID NO: 239974 - DNA, 25 bp, Artificial
  probe
  misc_feature (1)..(25): SEQ ID NO: 4996; WAN024GCJ_at; Start 37; Stop 61
gacccagaacctcttggtcaaaatc

SEQ ID NO: 239975 - DNA, 25 bp, Artificial
  probe
  misc_feature (1)..(25): SEQ ID NO: 4996; WAN024GCJ_at; Start 45; Stop 69
acctcttggtcaaaatcctctagaa

SEQ ID NO: 239976 - DNA, 25 bp, Artificial
  probe
  misc_feature (1)..(25): SEQ ID NO: 4996; WAN024GCJ_at; Start 39; Stop 63
cccagaacctcttggtcaaaatcct

SEQ ID NO: 239977 - DNA, 25 bp, Artificial
  probe
  misc_feature (1)..(25): SEQ ID NO: 4996; WAN024GCJ_at; Start 12; Stop 36
ccagttagaaaagcatcgtcttcca

SEQ ID NO: 239978 - DNA, 25 bp, Artificial
  probe
  misc_feature (1)..(25): SEQ ID NO: 4996; WAN024GCJ_at; Start 49; Stop 73
cttggtcaaaatcctctagaatttg

SEQ ID NO: 239979 - DNA, 25 bp, Artificial
  probe
  misc_feature (1)..(25): SEQ ID NO: 4996; WAN024GCJ_at; Start 17; Stop 41
tagaaaagcatcgtcttccagaccc

SEQ ID NO: 239980 - DNA, 25 bp, Artificial
  probe
  misc_feature (1)..(25): SEQ ID NO: 4996; WAN024GCJ_at; Start 3; Stop 27
gaatcctgtccagttagaaaagcat

SEQ ID NO: 239981 - DNA, 25 bp, Artificial
  probe
  misc_feature (1)..(25): SEQ ID NO: 4996; WAN024GCJ_at; Start 30; Stop 54
tcttccagacccagaacctcttggt

SEQ ID NO: 239982 - DNA, 25 bp, Artificial
  probe
  misc_feature (1)..(25): SEQ ID NO: 4996; WAN024GCJ_at; Start 33; Stop 57
tccagacccagaacctcttggtcaa

SEQ ID NO: 239983 - DNA, 25 bp, Artificial
  probe
  misc_feature (1)..(25): SEQ ID NO: 4996; WAN024GCJ_at; Start 19; Stop 43
gaaaagcatcgtcttccagacccag

SEQ ID NO: 239984 - DNA, 25 bp, Artificial
  probe
  misc_feature (1)..(25): SEQ ID NO: 4996; WAN024GCJ_at; Start 21; Stop 45
aaagcatcgtcttccagacccagaa

SEQ ID NO: 239985 - DNA, 25 bp, Artificial
  probe
  misc_feature (1)..(25): SEQ ID NO: 4996; WAN024GCJ_at; Start 13; Stop 37
cagttagaaaagcatcgtcttccag

SEQ ID NO: 239986 - DNA, 25 bp, Artificial
  probe
  misc_feature (1)..(25): SEQ ID NO: 4996; WAN024GCJ_at; Start 43; Stop 67
gaacctcttggtcaaaatcctctag

SEQ ID NO: 239987 - DNA, 25 bp, Artificial
  probe
  misc_feature (1)..(25): SEQ ID NO: 4996; WAN024GCJ_at; Start 1; Stop 25
ttgaatcctgtccagttagaaaagc

SEQ ID NO: 239988 - DNA, 25 bp, Artificial
  probe
  misc_feature (1)..(25): SEQ ID NO: 4996; WAN024GCJ_at; Start 22; Stop 46
aagcatcgtcttccagacccagaac

SEQ ID NO: 239989 - DNA, 25 bp, Artificial
  probe
  misc_feature (1)..(25): SEQ ID NO: 4996; WAN024GCJ_at; Start 16; Stop 40
ttagaaaagcatcgtcttccagacc

SEQ ID NO: 239990 - DNA, 25 bp, Artificial
  probe
  misc_feature (1)..(25): SEQ ID NO: 4996; WAN024GCJ_at; Start 41; Stop 65
cagaacctcttggtcaaaatcctct

SEQ ID NO: 239991 - DNA, 25 bp, Artificial
  probe
  misc_feature (1)..(25): SEQ ID NO: 4996; WAN024GCJ_at; Start 44; Stop 68
aacctcttggtcaaaatcctctaga

SEQ ID NO: 239992 - DNA, 25 bp, Artificial
  probe
  misc_feature (1)..(25): SEQ ID NO: 4996; WAN024GCJ_at; Start 14; Stop 38
agttagaaaagcatcgtcttccaga

SEQ ID NO: 239993 - DNA, 25 bp, Artificial
  probe
  misc_feature (1)..(25): SEQ ID NO: 4996; WAN024GCJ_at; Start 15; Stop 39
gttagaaaagcatcgtcttccagac

SEQ ID NO: 239994 - DNA, 25 bp, Artificial
  probe
  misc_feature (1)..(25): SEQ ID NO: 4996; WAN024GCJ_at; Start 46; Stop 70
cctcttggtcaaaatcctctagaat

SEQ ID NO: 239995 - DNA, 25 bp, Artificial
  probe
  misc_feature (1)..(25): SEQ ID NO: 5440; WAN024GCK_at; Start 142; Stop 166
gagccaatcaatatgctcagcatcc

SEQ ID NO: 239996 - DNA, 25 bp, Artificial
  probe
  misc_feature (1)..(25): SEQ ID NO: 5440; WAN024GCK_at; Start 26; Stop 50
taacgcgtcagctgttgattttcca

SEQ ID NO: 239997 - DNA, 25 bp, Artificial
  probe
  misc_feature (1)..(25): SEQ ID NO: 5440; WAN024GCK_at; Start 36; Stop 60
gctgttgattttccacatgatagac

SEQ ID NO: 239998 - DNA, 25 bp, Artificial
  probe
  misc_feature (1)..(25): SEQ ID NO: 5440; WAN024GCK_at; Start 108; Stop 132
caaaggcattctcatagttttggag

SEQ ID NO: 239999 - DNA, 25 bp, Artificial
  probe
  misc_feature (1)..(25): SEQ ID NO: 5440; WAN024GCK_at; Start 153; Stop 177
tatgctcagcatccaagtagttggt

SEQ ID NO: 240000 - DNA, 25 bp, Artificial
  probe
  misc_feature (1)..(25): SEQ ID NO: 5440; WAN024GCK_at; Start 187; Stop 211
caacagcaagatatcaggcttttca

SEQ ID NO: 240001 - DNA, 25 bp, Artificial
  probe
  misc_feature (1)..(25): SEQ ID NO: 5440; WAN024GCK_at; Start 158; Stop 182
tcagcatccaagtagttggtcggct

SEQ ID NO: 240002 - DNA, 25 bp, Artificial
  probe
  misc_feature (1)..(25): SEQ ID NO: 5440; WAN024GCK_at; Start 226; Stop 250
caaaagcaccttggttctttgccca

SEQ ID NO: 240003 - DNA, 25 bp, Artificial
  probe
  misc_feature (1)..(25): SEQ ID NO: 5440; WAN024GCK_at; Start 14; Stop 38
tagtcaccagagtaacgcgtcagct

SEQ ID NO: 240004 - DNA, 25 bp, Artificial
  probe
  misc_feature (1)..(25): SEQ ID NO: 5440; WAN024GCK_at; Start 95; Stop 119
tgcgaaatgagaacaaaggcattct

SEQ ID NO: 240005 - DNA, 25 bp, Artificial
  probe
  misc_feature (1)..(25): SEQ ID NO: 5440; WAN024GCK_at; Start 203; Stop 227
ggcttttcaaggagaagttttgcca

SEQ ID NO: 240006 - DNA, 25 bp, Artificial
  probe
  misc_feature (1)..(25): SEQ ID NO: 5440; WAN024GCK_at; Start 90; Stop 114
tatcgtgcgaaatgagaacaaaggc

SEQ ID NO: 240007 - DNA, 25 bp, Artificial
  probe
  misc_feature (1)..(25): SEQ ID NO: 5440; WAN024GCK_at; Start 193; Stop 217
caagatatcaggcttttcaaggaga

SEQ ID NO: 240008 - DNA, 25 bp, Artificial
  probe
  misc_feature (1)..(25): SEQ ID NO: 5440; WAN024GCK_at; Start 122; Stop 146
tagttttggagatagcgcttgagcc

SEQ ID NO: 240009 - DNA, 25 bp, Artificial
  probe
  misc_feature (1)..(25): SEQ ID NO: 5440; WAN024GCK_at; Start 182; Stop 206
tcgtccaacagcaagatatcaggct

SEQ ID NO: 240010 - DNA, 25 bp, Artificial
  probe
  misc_feature (1)..(25): SEQ ID NO: 5440; WAN024GCK_at; Start 63; Stop 87
tattaataacgtcattgaggaatgg

SEQ ID NO: 240011 - DNA, 25 bp, Artificial
  probe
  misc_feature (1)..(25): SEQ ID NO: 5440; WAN024GCK_at; Start 128; Stop 152
tggagatagcgcttgagccaatcaa

SEQ ID NO: 240012 - DNA, 25 bp, Artificial
  probe
  misc_feature (1)..(25): SEQ ID NO: 5440; WAN024GCK_at; Start 79; Stop 103
gaggaatggaatatcgtgcgaaatg

SEQ ID NO: 240013 - DNA, 25 bp, Artificial
  probe
  misc_feature (1)..(25): SEQ ID NO: 5440; WAN024GCK_at; Start 170; Stop 194
tagttggtcggctcgtccaacagca

SEQ ID NO: 240014 - DNA, 25 bp, Artificial
  probe
  misc_feature (1)..(25): SEQ ID NO: 5440; WAN024GCK_at; Start 196; Stop 220
gatatcaggcttttcaaggagaagt

SEQ ID NO: 240015 - DNA, 25 bp, Artificial
  probe
  misc_feature (1)..(25): SEQ ID NO: 5440; WAN024GCK_at; Start 1; Stop 25
ttggaactggtagtagtcaccagag

SEQ ID NO: 240016 - DNA, 25 bp, Artificial
  probe
  misc_feature (1)..(25): SEQ ID NO: 5440; WAN024GCK_at; Start 231; Stop 255
gcaccttggttctttgcccacctga

SEQ ID NO: 240017 - DNA, 25 bp, Artificial
  probe
  misc_feature (1)..(25): SEQ ID NO: 5440; WAN024GCK_at; Start 214; Stop 238
gagaagttttgccaaaagcaccttg

SEQ ID NO: 240018 - DNA, 25 bp, Artificial
  probe
  misc_feature (1)..(25): SEQ ID NO: 5440; WAN024GCK_at; Start 49; Stop 73
cacatgatagacaatattaataacg

SEQ ID NO: 240019 - DNA, 25 bp, Artificial
  probe
  misc_feature (1)..(25): SEQ ID NO: 5440; WAN024GCK_at; Start 174; Stop 198
tggtcggctcgtccaacagcaagat

SEQ ID NO: 240020 - DNA, 25 bp, Artificial
  probe
  misc_feature (1)..(25): SEQ ID NO: 5440; WAN024GCK_at; Start 209; Stop 233
tcaaggagaagttttgccaaaagca

SEQ ID NO: 240021 - DNA, 25 bp, Artificial
  probe
  misc_feature (1)..(25): SEQ ID NO: 5440; WAN024GCK_at; Start 74; Stop 98
tcattgaggaatggaatatcgtgcg

SEQ ID NO: 240022 - DNA, 25 bp, Artificial
  probe
  misc_feature (1)..(25): SEQ ID NO: 5440; WAN024GCK_at; Start 30; Stop 54
gcgtcagctgttgattttccacatg

SEQ ID NO: 240023 - DNA, 25 bp, Artificial
  probe
  misc_feature (1)..(25): SEQ ID NO: 5440; WAN024GCK_at; Start 134; Stop 158
tagcgcttgagccaatcaatatgct

SEQ ID NO: 240024 - DNA, 25 bp, Artificial
  probe
  misc_feature (1)..(25): SEQ ID NO: 5440; WAN024GCK_at; Start 20; Stop 44
ccagagtaacgcgtcagctgttgat

SEQ ID NO: 240025 - DNA, 25 bp, Artificial
  probe
  misc_feature (1)..(25): SEQ ID NO: 5440; WAN024GCK_at; Start 164; Stop 188
tccaagtagttggtcggctcgtcca

SEQ ID NO: 240026 - DNA, 25 bp, Artificial
  probe
  misc_feature (1)..(25): SEQ ID NO: 5440; WAN024GCK_at; Start 17; Stop 41
tcaccagagtaacgcgtcagctgtt

SEQ ID NO: 240027 - DNA, 25 bp, Artificial
  probe
  misc_feature (1)..(25): SEQ ID NO: 5440; WAN024GCK_at; Start 11; Stop 35
tagtagtcaccagagtaacgcgtca

SEQ ID NO: 240028 - DNA, 25 bp, Artificial
  probe
  misc_feature (1)..(25): SEQ ID NO: 5440; WAN024GCK_at; Start 179; Stop 203
ggctcgtccaacagcaagatatcag

SEQ ID NO: 240029 - DNA, 25 bp, Artificial
  probe
  misc_feature (1)..(25): SEQ ID NO: 5302; WAN024GCL_at; Start 201; Stop 225
gctggcgttcgtaggctgcctctag

SEQ ID NO: 240030 - DNA, 25 bp, Artificial
  probe
  misc_feature (1)..(25): SEQ ID NO: 5302; WAN024GCL_at; Start 21; Stop 45
agataaagcgccctggtgtacgagc

SEQ ID NO: 240031 - DNA, 25 bp, Artificial
  probe
  misc_feature (1)..(25): SEQ ID NO: 5302; WAN024GCL_at; Start 100; Stop 124
catcttatccaatttcttttgacga

SEQ ID NO: 240032 - DNA, 25 bp, Artificial
  probe
  misc_feature (1)..(25): SEQ ID NO: 5302; WAN024GCL_at; Start 9; Stop 33
tcttggcttggaagataaagcgccc

SEQ ID NO: 240033 - DNA, 25 bp, Artificial
  probe
  misc_feature (1)..(25): SEQ ID NO: 5302; WAN024GCL_at; Start 195; Stop 219
ctttctgctggcgttcgtaggctgc

SEQ ID NO: 240034 - DNA, 25 bp, Artificial
  probe
  misc_feature (1)..(25): SEQ ID NO: 5302; WAN024GCL_at; Start 31; Stop 55
ccctggtgtacgagctggtttgaaa

SEQ ID NO: 240035 - DNA, 25 bp, Artificial
  probe
  misc_feature (1)..(25): SEQ ID NO: 5302; WAN024GCL_at; Start 77; Stop 101
tcactttggagttcgataatatcca

SEQ ID NO: 240036 - DNA, 25 bp, Artificial
  probe
  misc_feature (1)..(25): SEQ ID NO: 5302; WAN024GCL_at; Start 57; Stop 81
caaaggatggttttggtttctcact

SEQ ID NO: 240037 - DNA, 25 bp, Artificial
  probe
  misc_feature (1)..(25): SEQ ID NO: 5302; WAN024GCL_at; Start 159; Stop 183
tattacgagccacaaagtccttgag

SEQ ID NO: 240038 - DNA, 25 bp, Artificial
  probe
  misc_feature (1)..(25): SEQ ID NO: 5302; WAN024GCL_at; Start 85; Stop 109
gagttcgataatatccatcttatcc

SEQ ID NO: 240039 - DNA, 25 bp, Artificial
  probe
  misc_feature (1)..(25): SEQ ID NO: 5302; WAN024GCL_at; Start 70; Stop 94
tggtttctcactttggagttcgata

SEQ ID NO: 240040 - DNA, 25 bp, Artificial
  probe
  misc_feature (1)..(25): SEQ ID NO: 5302; WAN024GCL_at; Start 162; Stop 186
tacgagccacaaagtccttgaggtc

SEQ ID NO: 240041 - DNA, 25 bp, Artificial
  probe
  misc_feature (1)..(25): SEQ ID NO: 5302; WAN024GCL_at; Start 167; Stop 191
gccacaaagtccttgaggtctgcaa

SEQ ID NO: 240042 - DNA, 25 bp, Artificial
  probe
  misc_feature (1)..(25): SEQ ID NO: 5302; WAN024GCL_at; Start 189; Stop 213
caatctctttctgctggcgttcgta

SEQ ID NO: 240043 - DNA, 25 bp, Artificial
  probe
  misc_feature (1)..(25): SEQ ID NO: 5302; WAN024GCL_at; Start 133; Stop 157
catattacgagttgcaacacgggct

SEQ ID NO: 240044 - DNA, 25 bp, Artificial
  probe
  misc_feature (1)..(25): SEQ ID NO: 5302; WAN024GCL_at; Start 114; Stop 138
tcttttgacgagacatagccatatt

SEQ ID NO: 240045 - DNA, 25 bp, Artificial
  probe
  misc_feature (1)..(25): SEQ ID NO: 5302; WAN024GCL_at; Start 153; Stop 177
gggctttattacgagccacaaagtc

SEQ ID NO: 240046 - DNA, 25 bp, Artificial
  probe
  misc_feature (1)..(25): SEQ ID NO: 5302; WAN024GCL_at; Start 109; Stop 133
caatttcttttgacgagacatagcc

SEQ ID NO: 240047 - DNA, 25 bp, Artificial
  probe
  misc_feature (1)..(25): SEQ ID NO: 5302; WAN024GCL_at; Start 123; Stop 147
gagacatagccatattacgagttgc

SEQ ID NO: 240048 - DNA, 25 bp, Artificial
  probe
  misc_feature (1)..(25): SEQ ID NO: 5302; WAN024GCL_at; Start 129; Stop 153
tagccatattacgagttgcaacacg

SEQ ID NO: 240049 - DNA, 25 bp, Artificial
  probe
  misc_feature (1)..(25): SEQ ID NO: 5302; WAN024GCL_at; Start 37; Stop 61
tgtacgagctggtttgaaatcaaag

SEQ ID NO: 240050 - DNA, 25 bp, Artificial
  probe
  misc_feature (1)..(25): SEQ ID NO: 5302; WAN024GCL_at; Start 42; Stop 66
gagctggtttgaaatcaaaggatgg

SEQ ID NO: 240051 - DNA, 25 bp, Artificial
  probe
  misc_feature (1)..(25): SEQ ID NO: 5302; WAN024GCL_at; Start 24; Stop 48
taaagcgccctggtgtacgagctgg

SEQ ID NO: 240052 - DNA, 25 bp, Artificial
  probe
  misc_feature (1)..(25): SEQ ID NO: 5302; WAN024GCL_at; Start 146; Stop 170
gcaacacgggctttattacgagcca

SEQ ID NO: 240053 - DNA, 25 bp, Artificial
  probe
  misc_feature (1)..(25): SEQ ID NO: 5302; WAN024GCL_at; Start 198; Stop 222
tctgctggcgttcgtaggctgcctc

SEQ ID NO: 240054 - DNA, 25 bp, Artificial
  probe
  misc_feature (1)..(25): SEQ ID NO: 5302; WAN024GCL_at; Start 119; Stop 143
tgacgagacatagccatattacgag

SEQ ID NO: 240055 - DNA, 25 bp, Artificial
  probe
  misc_feature (1)..(25): SEQ ID NO: 5302; WAN024GCL_at; Start 62; Stop 86
gatggttttggtttctcactttgga

SEQ ID NO: 240056 - DNA, 25 bp, Artificial
  probe
  misc_feature (1)..(25): SEQ ID NO: 5302; WAN024GCL_at; Start 15; Stop 39
cttggaagataaagcgccctggtgt

SEQ ID NO: 240057 - DNA, 25 bp, Artificial
  probe
  misc_feature (1)..(25): SEQ ID NO: 5302; WAN024GCL_at; Start 12; Stop 36
tggcttggaagataaagcgccctgg

SEQ ID NO: 240058 - DNA, 25 bp, Artificial
  probe
  misc_feature (1)..(25): SEQ ID NO: 5302; WAN024GCL_at; Start 181; Stop 205
gaggtctgcaatctctttctgctgg

SEQ ID NO: 240059 - DNA, 25 bp, Artificial
  probe
  misc_feature (1)..(25): SEQ ID NO: 5302; WAN024GCL_at; Start 135; Stop 159
tattacgagttgcaacacgggcttt

SEQ ID NO: 240060 - DNA, 25 bp, Artificial
  probe
  misc_feature (1)..(25): SEQ ID NO: 5302; WAN024GCL_at; Start 171; Stop 195
caaagtccttgaggtctgcaatctc

SEQ ID NO: 240061 - DNA, 25 bp, Artificial
  probe
  misc_feature (1)..(25): SEQ ID NO: 5302; WAN024GCL_at; Start 138; Stop 162
tacgagttgcaacacgggctttatt

SEQ ID NO: 240062 - DNA, 25 bp, Artificial
  probe
  misc_feature (1)..(25): SEQ ID NO: 5302; WAN024GCL_at; Start 1; Stop 25
ttgcaagttcttggcttggaagata

SEQ ID NO: 240063 - DNA, 25 bp, Artificial
  probe
  misc_feature (1)..(25): SEQ ID NO: 4975; WAN024GCM_at; Start 19; Stop 43
ttccatgagagcatcaacatccgcg

SEQ ID NO: 240064 - DNA, 25 bp, Artificial
  probe
  misc_feature (1)..(25): SEQ ID NO: 4975; WAN024GCM_at; Start 155; Stop 179
gagtgctgatccaagtaaccagccg

SEQ ID NO: 240065 - DNA, 25 bp, Artificial
  probe
  misc_feature (1)..(25): SEQ ID NO: 4975; WAN024GCM_at; Start 26; Stop 50
agagcatcaacatccgcgccgtctt

SEQ ID NO: 240066 - DNA, 25 bp, Artificial
  probe
  misc_feature (1)..(25): SEQ ID NO: 4975; WAN024GCM_at; Start 158; Stop 182
tgctgatccaagtaaccagccgtca

SEQ ID NO: 240067 - DNA, 25 bp, Artificial
  probe
  misc_feature (1)..(25): SEQ ID NO: 4975; WAN024GCM_at; Start 197; Stop 221
tcaacctttccttcatctggcagca

SEQ ID NO: 240068 - DNA, 25 bp, Artificial
  probe
  misc_feature (1)..(25): SEQ ID NO: 4975; WAN024GCM_at; Start 23; Stop 47
atgagagcatcaacatccgcgccgt

SEQ ID NO: 240069 - DNA, 25 bp, Artificial
  probe
  misc_feature (1)..(25): SEQ ID NO: 4975; WAN024GCM_at; Start 146; Stop 170
gcaaggacagagtgctgatccaagt

SEQ ID NO: 240070 - DNA, 25 bp, Artificial
  probe
  misc_feature (1)..(25): SEQ ID NO: 4975; WAN024GCM_at; Start 162; Stop 186
gatccaagtaaccagccgtcacata

SEQ ID NO: 240071 - DNA, 25 bp, Artificial
  probe
  misc_feature (1)..(25): SEQ ID NO: 4975; WAN024GCM_at; Start 183; Stop 207
catatttggaccactcaacctttcc

SEQ ID NO: 240072 - DNA, 25 bp, Artificial
  probe
  misc_feature (1)..(25): SEQ ID NO: 4975; WAN024GCM_at; Start 170; Stop 194
taaccagccgtcacatatttggacc

SEQ ID NO: 240073 - DNA, 25 bp, Artificial
  probe
  misc_feature (1)..(25): SEQ ID NO: 4975; WAN024GCM_at; Start 94; Stop 118
gaaaagctcatcaaaagccgtacgg

SEQ ID NO: 240074 - DNA, 25 bp, Artificial
  probe
  misc_feature (1)..(25): SEQ ID NO: 4975; WAN024GCM_at; Start 97; Stop 121
aagctcatcaaaagccgtacggaga

SEQ ID NO: 240075 - DNA, 25 bp, Artificial
  probe
  misc_feature (1)..(25): SEQ ID NO: 4975; WAN024GCM_at; Start 76; Stop 100
gatacgagcttcagctttgaaaagc

SEQ ID NO: 240076 - DNA, 25 bp, Artificial
  probe
  misc_feature (1)..(25): SEQ ID NO: 4975; WAN024GCM_at; Start 13; Stop 37
tacttcttccatgagagcatcaaca

SEQ ID NO: 240077 - DNA, 25 bp, Artificial
  probe
  misc_feature (1)..(25): SEQ ID NO: 4975; WAN024GCM_at; Start 107; Stop 131
aaagccgtacggagaacatcacgca

SEQ ID NO: 240078 - DNA, 25 bp, Artificial
  probe
  misc_feature (1)..(25): SEQ ID NO: 4975; WAN024GCM_at; Start 224; Stop 248
ttaccagtcacgatactcataaagg

SEQ ID NO: 240079 - DNA, 25 bp, Artificial
  probe
  misc_feature (1)..(25): SEQ ID NO: 4975; WAN024GCM_at; Start 114; Stop 138
tacggagaacatcacgcaccgactg

SEQ ID NO: 240080 - DNA, 25 bp, Artificial
  probe
  misc_feature (1)..(25): SEQ ID NO: 4975; WAN024GCM_at; Start 40; Stop 64
cgcgccgtcttcagccattttcata

SEQ ID NO: 240081 - DNA, 25 bp, Artificial
  probe
  misc_feature (1)..(25): SEQ ID NO: 4975; WAN024GCM_at; Start 129; Stop 153
gcaccgactgtctttcagcaaggac

SEQ ID NO: 240082 - DNA, 25 bp, Artificial
  probe
  misc_feature (1)..(25): SEQ ID NO: 4975; WAN024GCM_at; Start 104; Stop 128
tcaaaagccgtacggagaacatcac

SEQ ID NO: 240083 - DNA, 25 bp, Artificial
  probe
  misc_feature (1)..(25): SEQ ID NO: 4975; WAN024GCM_at; Start 53; Stop 77
gccattttcatatagaggtcattga

SEQ ID NO: 240084 - DNA, 25 bp, Artificial
  probe
  misc_feature (1)..(25): SEQ ID NO: 4975; WAN024GCM_at; Start 101; Stop 125
tcatcaaaagccgtacggagaacat

SEQ ID NO: 240085 - DNA, 25 bp, Artificial
  probe
  misc_feature (1)..(25): SEQ ID NO: 4975; WAN024GCM_at; Start 151; Stop 175
gacagagtgctgatccaagtaacca

SEQ ID NO: 240086 - DNA, 25 bp, Artificial
  probe
  misc_feature (1)..(25): SEQ ID NO: 4975; WAN024GCM_at; Start 215; Stop 239
ggcagcattttaccagtcacgatac

SEQ ID NO: 240087 - DNA, 25 bp, Artificial
  probe
  misc_feature (1)..(25): SEQ ID NO: 4975; WAN024GCM_at; Start 61; Stop 85
catatagaggtcattgatacgagct

SEQ ID NO: 240088 - DNA, 25 bp, Artificial
  probe
  misc_feature (1)..(25): SEQ ID NO: 4975; WAN024GCM_at; Start 67; Stop 91
gaggtcattgatacgagcttcagct

SEQ ID NO: 240089 - DNA, 25 bp, Artificial
  probe
  misc_feature (1)..(25): SEQ ID NO: 4975; WAN024GCM_at; Start 228; Stop 252
cagtcacgatactcataaaggttga

SEQ ID NO: 240090 - DNA, 25 bp, Artificial
  probe
  misc_feature (1)..(25): SEQ ID NO: 4975; WAN024GCM_at; Start 80; Stop 104
cgagcttcagctttgaaaagctcat

SEQ ID NO: 240091 - DNA, 25 bp, Artificial
  probe
  misc_feature (1)..(25): SEQ ID NO: 4975; WAN024GCM_at; Start 176; Stop 200
gccgtcacatatttggaccactcaa

SEQ ID NO: 240092 - DNA, 25 bp, Artificial
  probe
  misc_feature (1)..(25): SEQ ID NO: 4975; WAN024GCM_at; Start 118; Stop 142
gagaacatcacgcaccgactgtctt

SEQ ID NO: 240093 - DNA, 25 bp, Artificial
  probe
  misc_feature (1)..(25): SEQ ID NO: 4975; WAN024GCM_at; Start 137; Stop 161
tgtctttcagcaaggacagagtgct

SEQ ID NO: 240094 - DNA, 25 bp, Artificial
  probe
  misc_feature (1)..(25): SEQ ID NO: 4975; WAN024GCM_at; Start 46; Stop 70
gtcttcagccattttcatatagagg

SEQ ID NO: 240095 - DNA, 25 bp, Artificial
  probe
  misc_feature (1)..(25): SEQ ID NO: 4975; WAN024GCM_at; Start 3; Stop 27
gaagttctcctacttcttccatgag

SEQ ID NO: 240096 - DNA, 25 bp, Artificial
  probe
  misc_feature (1)..(25): SEQ ID NO: 4975; WAN024GCM_at; Start 205; Stop 229
tccttcatctggcagcattttacca

SEQ ID NO: 240097 - DNA, 25 bp, Artificial
  probe
  misc_feature (1)..(25): SEQ ID NO: 1623; WAN024GCN_at; Start 1332; Stop 1356
gcaagccaaggttcgtttctgtctc

SEQ ID NO: 240098 - DNA, 25 bp, Artificial
  probe
  misc_feature (1)..(25): SEQ ID NO: 1623; WAN024GCN_at; Start 1192; Stop 1216
ggtaatcgccaaactcctcttgaag

SEQ ID NO: 240099 - DNA, 25 bp, Artificial
  probe
  misc_feature (1)..(25): SEQ ID NO: 1623; WAN024GCN_at; Start 158; Stop 182
tgctgccagatgaaggaaaggttga

SEQ ID NO: 240100 - DNA, 25 bp, Artificial
  probe
  misc_feature (1)..(25): SEQ ID NO: 1623; WAN024GCN_at; Start 596; Stop 620
ggctcaagcgctatctccaaaacta

SEQ ID NO: 240101 - DNA, 25 bp, Artificial
  probe
  misc_feature (1)..(25): SEQ ID NO: 1623; WAN024GCN_at; Start 204; Stop 228
tggttacttggatcagcactctgtc

SEQ ID NO: 240102 - DNA, 25 bp, Artificial
  probe
  misc_feature (1)..(25): SEQ ID NO: 1623; WAN024GCN_at; Start 140; Stop 164
gtatcgtgactggtaaaatgctgcc

SEQ ID NO: 240103 - DNA, 25 bp, Artificial
  probe
  misc_feature (1)..(25): SEQ ID NO: 1623; WAN024GCN_at; Start 810; Stop 834
cctcaaggactttgtggctcgtaat

SEQ ID NO: 240104 - DNA, 25 bp, Artificial
  probe
  misc_feature (1)..(25): SEQ ID NO: 1623; WAN024GCN_at; Start 187; Stop 211
tccaaatatgtgacggctggttact

SEQ ID NO: 240105 - DNA, 25 bp, Artificial
  probe
  misc_feature (1)..(25): SEQ ID NO: 1623; WAN024GCN_at; Start 365; Stop 389
taggagaacttcaagaccgtctgga

SEQ ID NO: 240106 - DNA, 25 bp, Artificial
  probe
  misc_feature (1)..(25): SEQ ID NO: 1623; WAN024GCN_at; Start 1262; Stop 1286
cagcccttgcccgttgtggtttgac

SEQ ID NO: 240107 - DNA, 25 bp, Artificial
  probe
  misc_feature (1)..(25): SEQ ID NO: 1623; WAN024GCN_at; Start 1207; Stop 1231
cctcttgaagctgtctggaatgcct

SEQ ID NO: 240108 - DNA, 25 bp, Artificial
  probe
  misc_feature (1)..(25): SEQ ID NO: 1623; WAN024GCN_at; Start 795; Stop 819
gaaagagattgcagacctcaaggac

SEQ ID NO: 240109 - DNA, 25 bp, Artificial
  probe
  misc_feature (1)..(25): SEQ ID NO: 1623; WAN024GCN_at; Start 553; Stop 577
ttggacgagccgaccaactacttgg

SEQ ID NO: 240110 - DNA, 25 bp, Artificial
  probe
  misc_feature (1)..(25): SEQ ID NO: 1623; WAN024GCN_at; Start 759; Stop 783
gaaatctcagctagaggcagcctac

SEQ ID NO: 240111 - DNA, 25 bp, Artificial
  probe
  misc_feature (1)..(25): SEQ ID NO: 1623; WAN024GCN_at; Start 705; Stop 729
gctgacgcgttactctggtgactac

SEQ ID NO: 240112 - DNA, 25 bp, Artificial
  probe
  misc_feature (1)..(25): SEQ ID NO: 1623; WAN024GCN_at; Start 60; Stop 84
agatgtgtccttccgtctcctcaag

SEQ ID NO: 240113 - DNA, 25 bp, Artificial
  probe
  misc_feature (1)..(25): SEQ ID NO: 1623; WAN024GCN_at; Start 1374; Stop 1398
caacgttttagtgctggacgagccg

SEQ ID NO: 240114 - DNA, 25 bp, Artificial
  probe
  misc_feature (1)..(25): SEQ ID NO: 1623; WAN024GCN_at; Start 331; Stop 355
gacggcgcggatgttgatgctctca

SEQ ID NO: 240115 - DNA, 25 bp, Artificial
  probe
  misc_feature (1)..(25): SEQ ID NO: 1623; WAN024GCN_at; Start 315; Stop 339
tatgaaaatggctgaagacggcgcg

SEQ ID NO: 240116 - DNA, 25 bp, Artificial
  probe
  misc_feature (1)..(25): SEQ ID NO: 1623; WAN024GCN_at; Start 831; Stop 855
taataaagcccgtgttgcaactcgt

SEQ ID NO: 240117 - DNA, 25 bp, Artificial
  probe
  misc_feature (1)..(25): SEQ ID NO: 1623; WAN024GCN_at; Start 721; Stop 745
ggtgactactaccagttccaagaag

SEQ ID NO: 240118 - DNA, 25 bp, Artificial
  probe
  misc_feature (1)..(25): SEQ ID NO: 1623; WAN024GCN_at; Start 781; Stop 805
tacgaacgccagcagaaagagattg

SEQ ID NO: 240119 - DNA, 25 bp, Artificial
  probe
  misc_feature (1)..(25): SEQ ID NO: 1623; WAN024GCN_at; Start 227; Stop 251
tccttgctgaaagacagtcggtgcg

SEQ ID NO: 240120 - DNA, 25 bp, Artificial
  probe
  misc_feature (1)..(25): SEQ ID NO: 1623; WAN024GCN_at; Start 690; Stop 714
tgtggaaaatcaacagctgacgcgt

SEQ ID NO: 240121 - DNA, 25 bp, Artificial
  probe
  misc_feature (1)..(25): SEQ ID NO: 1623; WAN024GCN_at; Start 954; Stop 978
tacaccagggcgctttatcttccaa

SEQ ID NO: 240122 - DNA, 25 bp, Artificial
  probe
  misc_feature (1)..(25): SEQ ID NO: 1623; WAN024GCN_at; Start 939; Stop 963
tttcaaaccagctcgtacaccaggg

SEQ ID NO: 240123 - DNA, 25 bp, Artificial
  probe
  misc_feature (1)..(25): SEQ ID NO: 1623; WAN024GCN_at; Start 289; Stop 313
gctgaagctcgtatcaatgacctct

SEQ ID NO: 240124 - DNA, 25 bp, Artificial
  probe
  misc_feature (1)..(25): SEQ ID NO: 1623; WAN024GCN_at; Start 472; Stop 496
gatgtaacttctttgtcaggtgggc

SEQ ID NO: 240125 - DNA, 25 bp, Artificial
  probe
  misc_feature (1)..(25): SEQ ID NO: 1623; WAN024GCN_at; Start 88; Stop 112
gaacatatcggcctggtcggtgcca

SEQ ID NO: 240126 - DNA, 25 bp, Artificial
  probe
  misc_feature (1)..(25): SEQ ID NO: 1623; WAN024GCN_at; Start 1459; Stop 1483
ggatctatccttatggtctgccacg

SEQ ID NO: 240127 - DNA, 25 bp, Artificial
  probe
  misc_feature (1)..(25): SEQ ID NO: 1623; WAN024GCN_at; Start 417; Stop 441
taagattgacgaagtagcgcgtgct

SEQ ID NO: 240128 - DNA, 25 bp, Artificial
  probe
  misc_feature (1)..(25): SEQ ID NO: 1623; WAN024GCN_at; Start 1417; Stop 1441
gatgcaaaggatgagctcaaacgcg

SEQ ID NO: 240129 - DNA, 25 bp, Artificial
  probe
  misc_feature (1)..(25): SEQ ID NO: 1623; WAN024GCN_at; Start 1242; Stop 1266
taatcaagcagaagtccgtgcagcc

SEQ ID NO: 240130 - DNA, 25 bp, Artificial
  probe
  misc_feature (1)..(25): SEQ ID NO: 1623; WAN024GCN_at; Start 487; Stop 511
tcaggtgggcaaagaaccaaggtgc

SEQ ID NO: 240131 - DNA, 25 bp, Artificial
  probe
  misc_feature (1)..(25): SEQ ID NO: 3936; WAN024GCO_at; Start 160; Stop 184
gatttgcgctacgatttcaccgtta

SEQ ID NO: 240132 - DNA, 25 bp, Artificial
  probe
  misc_feature (1)..(25): SEQ ID NO: 3936; WAN024GCO_at; Start 88; Stop 112
gattcccatgacaacgatatggctg

SEQ ID NO: 240133 - DNA, 25 bp, Artificial
  probe
  misc_feature (1)..(25): SEQ ID NO: 3936; WAN024GCO_at; Start 150; Stop 174
gaaccagcatgatttgcgctacgat

SEQ ID NO: 240134 - DNA, 25 bp, Artificial
  probe
  misc_feature (1)..(25): SEQ ID NO: 3936; WAN024GCO_at; Start 249; Stop 273
cctgagtggtcacacagacagataa

SEQ ID NO: 240135 - DNA, 25 bp, Artificial
  probe
  misc_feature (1)..(25): SEQ ID NO: 3936; WAN024GCO_at; Start 153; Stop 177
ccagcatgatttgcgctacgatttc

SEQ ID NO: 240136 - DNA, 25 bp, Artificial
  probe
  misc_feature (1)..(25): SEQ ID NO: 3936; WAN024GCO_at; Start 60; Stop 84
cattgttgtaattatcaaagggctc

SEQ ID NO: 240137 - DNA, 25 bp, Artificial
  probe
  misc_feature (1)..(25): SEQ ID NO: 3936; WAN024GCO_at; Start 77; Stop 101
aagggctcaccgattcccatgacaa

SEQ ID NO: 240138 - DNA, 25 bp, Artificial
  probe
  misc_feature (1)..(25): SEQ ID NO: 3936; WAN024GCO_at; Start 80; Stop 104
ggctcaccgattcccatgacaacga

SEQ ID NO: 240139 - DNA, 25 bp, Artificial
  probe
  misc_feature (1)..(25): SEQ ID NO: 3936; WAN024GCO_at; Start 5; Stop 29
cgagcaccgatagccattcctttat

SEQ ID NO: 240140 - DNA, 25 bp, Artificial
  probe
  misc_feature (1)..(25): SEQ ID NO: 3936; WAN024GCO_at; Start 187; Stop 211
gaggtcacgttgcttcttaatcaaa

SEQ ID NO: 240141 - DNA, 25 bp, Artificial
  probe
  misc_feature (1)..(25): SEQ ID NO: 3936; WAN024GCO_at; Start 176; Stop 200
tcaccgttattgaggtcacgttgct

SEQ ID NO: 240142 - DNA, 25 bp, Artificial
  probe
  misc_feature (1)..(25): SEQ ID NO: 3936; WAN024GCO_at; Start 3; Stop 27
gacgagcaccgatagccattccttt

SEQ ID NO: 240143 - DNA, 25 bp, Artificial
  probe
  misc_feature (1)..(25): SEQ ID NO: 3936; WAN024GCO_at; Start 246; Stop 270
cgacctgagtggtcacacagacaga

SEQ ID NO: 240144 - DNA, 25 bp, Artificial
  probe
  misc_feature (1)..(25): SEQ ID NO: 3936; WAN024GCO_at; Start 66; Stop 90
tgtaattatcaaagggctcaccgat

SEQ ID NO: 240145 - DNA, 25 bp, Artificial
  probe
  misc_feature (1)..(25): SEQ ID NO: 3936; WAN024GCO_at; Start 157; Stop 181
catgatttgcgctacgatttcaccg

SEQ ID NO: 240146 - DNA, 25 bp, Artificial
  probe
  misc_feature (1)..(25): SEQ ID NO: 3936; WAN024GCO_at; Start 179; Stop 203
ccgttattgaggtcacgttgcttct

SEQ ID NO: 240147 - DNA, 25 bp, Artificial
  probe
  misc_feature (1)..(25): SEQ ID NO: 3936; WAN024GCO_at; Start 215; Stop 239
gaggcacagaaggtacaaccgatat

SEQ ID NO: 240148 - DNA, 25 bp, Artificial
  probe
  misc_feature (1)..(25): SEQ ID NO: 3936; WAN024GCO_at; Start 147; Stop 171
tctgaaccagcatgatttgcgctac

SEQ ID NO: 240149 - DNA, 25 bp, Artificial
  probe
  misc_feature (1)..(25): SEQ ID NO: 3936; WAN024GCO_at; Start 213; Stop 237
cagaggcacagaaggtacaaccgat

SEQ ID NO: 240150 - DNA, 25 bp, Artificial
  probe
  misc_feature (1)..(25): SEQ ID NO: 3936; WAN024GCO_at; Start 13; Stop 37
gatagccattcctttatcatcattg

SEQ ID NO: 240151 - DNA, 25 bp, Artificial
  probe
  misc_feature (1)..(25): SEQ ID NO: 3936; WAN024GCO_at; Start 143; Stop 167
tatttctgaaccagcatgatttgcg

SEQ ID NO: 240152 - DNA, 25 bp, Artificial
  probe
  misc_feature (1)..(25): SEQ ID NO: 3936; WAN024GCO_at; Start 1; Stop 25
gtgacgagcaccgatagccattcct

SEQ ID NO: 240153 - DNA, 25 bp, Artificial
  probe
  misc_feature (1)..(25): SEQ ID NO: 3936; WAN024GCO_at; Start 220; Stop 244
acagaaggtacaaccgatattacag

SEQ ID NO: 240154 - DNA, 25 bp, Artificial
  probe
  misc_feature (1)..(25): SEQ ID NO: 3936; WAN024GCO_at; Start 217; Stop 241
ggcacagaaggtacaaccgatatta

SEQ ID NO: 240155 - DNA, 25 bp, Artificial
  probe
  misc_feature (1)..(25): SEQ ID NO: 3936; WAN024GCO_at; Start 55; Stop 79
caagacattgttgtaattatcaaag

SEQ ID NO: 240156 - DNA, 25 bp, Artificial
  probe
  misc_feature (1)..(25): SEQ ID NO: 3936; WAN024GCO_at; Start 74; Stop 98
tcaaagggctcaccgattcccatga

SEQ ID NO: 240157 - DNA, 25 bp, Artificial
  probe
  misc_feature (1)..(25): SEQ ID NO: 3936; WAN024GCO_at; Start 15; Stop 39
tagccattcctttatcatcattgat

SEQ ID NO: 240158 - DNA, 25 bp, Artificial
  probe
  misc_feature (1)..(25): SEQ ID NO: 3936; WAN024GCO_at; Start 63; Stop 87
tgttgtaattatcaaagggctcacc

SEQ ID NO: 240159 - DNA, 25 bp, Artificial
  probe
  misc_feature (1)..(25): SEQ ID NO: 3936; WAN024GCO_at; Start 165; Stop 189
gcgctacgatttcaccgttattgag

SEQ ID NO: 240160 - DNA, 25 bp, Artificial
  probe
  misc_feature (1)..(25): SEQ ID NO: 3936; WAN024GCO_at; Start 169; Stop 193
tacgatttcaccgttattgaggtca

SEQ ID NO: 240161 - DNA, 25 bp, Artificial
  probe
  misc_feature (1)..(25): SEQ ID NO: 3936; WAN024GCO_at; Start 138; Stop 162
caaagtatttctgaaccagcatgat

SEQ ID NO: 240162 - DNA, 25 bp, Artificial
  probe
  misc_feature (1)..(25): SEQ ID NO: 3936; WAN024GCO_at; Start 84; Stop 108
caccgattcccatgacaacgatatg

SEQ ID NO: 240163 - DNA, 25 bp, Artificial
  probe
  misc_feature (1)..(25): SEQ ID NO: 3936; WAN024GCO_at; Start 172; Stop 196
gatttcaccgttattgaggtcacgt

SEQ ID NO: 240164 - DNA, 25 bp, Artificial
  probe
  misc_feature (1)..(25): SEQ ID NO: 3936; WAN024GCO_at; Start 71; Stop 95
ttatcaaagggctcaccgattccca

SEQ ID NO: 240165 - DNA, 25 bp, Artificial
  probe
  misc_feature (1)..(25): SEQ ID NO: 1466; WAN024GCP_at; Start 33; Stop 57
cagatttgatctgcacggaatttct

SEQ ID NO: 240166 - DNA, 25 bp, Artificial
  probe
  misc_feature (1)..(25): SEQ ID NO: 1466; WAN024GCP_at; Start 142; Stop 166
tactcacttctgacgaatgacaaaa

SEQ ID NO: 240167 - DNA, 25 bp, Artificial
  probe
  misc_feature (1)..(25): SEQ ID NO: 1466; WAN024GCP_at; Start 49; Stop 73
ggaatttcttttctccctgctccaa

SEQ ID NO: 240168 - DNA, 25 bp, Artificial
  probe
  misc_feature (1)..(25): SEQ ID NO: 1466; WAN024GCP_at; Start 6; Stop 30
tgcacacgtttacggtagagccatt

SEQ ID NO: 240169 - DNA, 25 bp, Artificial
  probe
  misc_feature (1)..(25): SEQ ID NO: 1466; WAN024GCP_at; Start 293; Stop 317
tccgtcttacgcattttcttgtcaa

SEQ ID NO: 240170 - DNA, 25 bp, Artificial
  probe
  misc_feature (1)..(25): SEQ ID NO: 1466; WAN024GCP_at; Start 27; Stop 51
cattcccagatttgatctgcacgga

SEQ ID NO: 240171 - DNA, 25 bp, Artificial
  probe
  misc_feature (1)..(25): SEQ ID NO: 1466; WAN024GCP_at; Start 155; Stop 179
cgaatgacaaaatgacgttgttcct

SEQ ID NO: 240172 - DNA, 25 bp, Artificial
  probe
  misc_feature (1)..(25): SEQ ID NO: 1466; WAN024GCP_at; Start 21; Stop 45
tagagccattcccagatttgatctg

SEQ ID NO: 240173 - DNA, 25 bp, Artificial
  probe
  misc_feature (1)..(25): SEQ ID NO: 1466; WAN024GCP_at; Start 162; Stop 186
caaaatgacgttgttccttgtcctc

SEQ ID NO: 240174 - DNA, 25 bp, Artificial
  probe
  misc_feature (1)..(25): SEQ ID NO: 1466; WAN024GCP_at; Start 178; Stop 202
cttgtcctctttctgagaatgctgg

SEQ ID NO: 240175 - DNA, 25 bp, Artificial
  probe
  misc_feature (1)..(25): SEQ ID NO: 1466; WAN024GCP_at; Start 40; Stop 64
gatctgcacggaatttcttttctcc

SEQ ID NO: 240176 - DNA, 25 bp, Artificial
  probe
  misc_feature (1)..(25): SEQ ID NO: 1466; WAN024GCP_at; Start 150; Stop 174
tctgacgaatgacaaaatgacgttg

SEQ ID NO: 240177 - DNA, 25 bp, Artificial
  probe
  misc_feature (1)..(25): SEQ ID NO: 1466; WAN024GCP_at; Start 132; Stop 156
ccttattctctactcacttctgacg

SEQ ID NO: 240178 - DNA, 25 bp, Artificial
  probe
  misc_feature (1)..(25): SEQ ID NO: 1466; WAN024GCP_at; Start 16; Stop 40
tacggtagagccattcccagatttg

SEQ ID NO: 240179 - DNA, 25 bp, Artificial
  probe
  misc_feature (1)..(25): SEQ ID NO: 1466; WAN024GCP_at; Start 210; Stop 234
gacgacgtctatttttcttatctgc

SEQ ID NO: 240180 - DNA, 25 bp, Artificial
  probe
  misc_feature (1)..(25): SEQ ID NO: 1466; WAN024GCP_at; Start 184; Stop 208
ctctttctgagaatgctggtctttc

SEQ ID NO: 240181 - DNA, 25 bp, Artificial
  probe
  misc_feature (1)..(25): SEQ ID NO: 1466; WAN024GCP_at; Start 18; Stop 42
cggtagagccattcccagatttgat

SEQ ID NO: 240182 - DNA, 25 bp, Artificial
  probe
  misc_feature (1)..(25): SEQ ID NO: 1466; WAN024GCP_at; Start 281; Stop 305
ggtgtttcttcttccgtcttacgca

SEQ ID NO: 240183 - DNA, 25 bp, Artificial
  probe
  misc_feature (1)..(25): SEQ ID NO: 1466; WAN024GCP_at; Start 171; Stop 195
gttgttccttgtcctctttctgaga

SEQ ID NO: 240184 - DNA, 25 bp, Artificial
  probe
  misc_feature (1)..(25): SEQ ID NO: 1466; WAN024GCP_at; Start 106; Stop 130
tatgaattgagggtttcatttcttc

SEQ ID NO: 240185 - DNA, 25 bp, Artificial
  probe
  misc_feature (1)..(25): SEQ ID NO: 1466; WAN024GCP_at; Start 233; Stop 257
gcattcgactttcgtttagtttgag

SEQ ID NO: 240186 - DNA, 25 bp, Artificial
  probe
  misc_feature (1)..(25): SEQ ID NO: 1466; WAN024GCP_at; Start 12; Stop 36
cgtttacggtagagccattcccaga

SEQ ID NO: 240187 - DNA, 25 bp, Artificial
  probe
  misc_feature (1)..(25): SEQ ID NO: 1466; WAN024GCP_at; Start 66; Stop 90
tgctccaatacccattcctgcatgg

SEQ ID NO: 240188 - DNA, 25 bp, Artificial
  probe
  misc_feature (1)..(25): SEQ ID NO: 1466; WAN024GCP_at; Start 2; Stop 26
tgactgcacacgtttacggtagagc

SEQ ID NO: 240189 - DNA, 25 bp, Artificial
  probe
  misc_feature (1)..(25): SEQ ID NO: 1466; WAN024GCP_at; Start 122; Stop 146
catttcttctccttattctctactc

SEQ ID NO: 240190 - DNA, 25 bp, Artificial
  probe
  misc_feature (1)..(25): SEQ ID NO: 1466; WAN024GCP_at; Start 297; Stop 321
tcttacgcattttcttgtcaaatga

SEQ ID NO: 240191 - DNA, 25 bp, Artificial
  probe
  misc_feature (1)..(25): SEQ ID NO: 1466; WAN024GCP_at; Start 10; Stop 34
cacgtttacggtagagccattccca

SEQ ID NO: 240192 - DNA, 25 bp, Artificial
  probe
  misc_feature (1)..(25): SEQ ID NO: 1466; WAN024GCP_at; Start 147; Stop 171
acttctgacgaatgacaaaatgacg

SEQ ID NO: 240193 - DNA, 25 bp, Artificial
  probe
  misc_feature (1)..(25): SEQ ID NO: 1466; WAN024GCP_at; Start 222; Stop 246
ttttcttatctgcattcgactttcg

SEQ ID NO: 240194 - DNA, 25 bp, Artificial
  probe
  misc_feature (1)..(25): SEQ ID NO: 1466; WAN024GCP_at; Start 138; Stop 162
tctctactcacttctgacgaatgac

SEQ ID NO: 240195 - DNA, 25 bp, Artificial
  probe
  misc_feature (1)..(25): SEQ ID NO: 1466; WAN024GCP_at; Start 74; Stop 98
tacccattcctgcatggtttgatgt

SEQ ID NO: 240196 - DNA, 25 bp, Artificial
  probe
  misc_feature (1)..(25): SEQ ID NO: 1466; WAN024GCP_at; Start 100; Stop 124
ccaaactatgaattgagggtttcat

SEQ ID NO: 240197 - DNA, 25 bp, Artificial
  probe
  misc_feature (1)..(25): SEQ ID NO: 1466; WAN024GCP_at; Start 197; Stop 221
tgctggtctttctgacgacgtctat

SEQ ID NO: 240198 - DNA, 25 bp, Artificial
  probe
  misc_feature (1)..(25): SEQ ID NO: 1466; WAN024GCP_at; Start 274; Stop 298
tctagaaggtgtttcttcttccgtc

SEQ ID NO: 240199 - DNA, 25 bp, Artificial
  probe
  misc_feature (1)..(25): SEQ ID NO: 833; WAN024GCQ_s_at; Start 562; Stop 586
tacattgagacaacaaaccgtcgtg

SEQ ID NO: 240200 - DNA, 25 bp, Artificial
  probe
  misc_feature (1)..(25): SEQ ID NO: 833; WAN024GCQ_s_at; Start 404; Stop 428
tagcgcaaatcatgctggttcagaa

SEQ ID NO: 240201 - DNA, 25 bp, Artificial
  probe
  misc_feature (1)..(25): SEQ ID NO: 833; WAN024GCQ_s_at; Start 52; Stop 76
ttggagcagggagaaaagaaattcc

SEQ ID NO: 240202 - DNA, 25 bp, Artificial
  probe
  misc_feature (1)..(25): SEQ ID NO: 833; WAN024GCQ_s_at; Start 387; Stop 411
caataacggtgaaatcgtagcgcaa

SEQ ID NO: 240203 - DNA, 25 bp, Artificial
  probe
  misc_feature (1)..(25): SEQ ID NO: 833; WAN024GCQ_s_at; Start 711; Stop 735
tagtgagcatgaccaatatagccgt

SEQ ID NO: 240204 - DNA, 25 bp, Artificial
  probe
  misc_feature (1)..(25): SEQ ID NO: 833; WAN024GCQ_s_at; Start 750; Stop 774
cgtgttggctttctatgatacgctt

SEQ ID NO: 240205 - DNA, 25 bp, Artificial
  probe
  misc_feature (1)..(25): SEQ ID NO: 833; WAN024GCQ_s_at; Start 862; Stop 886
aaacgtgaccgccagaaggcagtcg

SEQ ID NO: 240206 - DNA, 25 bp, Artificial
  probe
  misc_feature (1)..(25): SEQ ID NO: 833; WAN024GCQ_s_at; Start 723; Stop 747
ccaatatagccgtagtcccaaagag

SEQ ID NO: 240207 - DNA, 25 bp, Artificial
  probe
  misc_feature (1)..(25): SEQ ID NO: 833; WAN024GCQ_s_at; Start 513; Stop 537
gattaaccgtgcctttccgattgaa

SEQ ID NO: 240208 - DNA, 25 bp, Artificial
  probe
  misc_feature (1)..(25): SEQ ID NO: 833; WAN024GCQ_s_at; Start 82; Stop 106
gatcaaatctgggaatggctctacc

SEQ ID NO: 240209 - DNA, 25 bp, Artificial
  probe
  misc_feature (1)..(25): SEQ ID NO: 833; WAN024GCQ_s_at; Start 145; Stop 169
tccaaggatttgattgctaagctca

SEQ ID NO: 240210 - DNA, 25 bp, Artificial
  probe
  misc_feature (1)..(25): SEQ ID NO: 833; WAN024GCQ_s_at; Start 528; Stop 552
tccgattgaaaaactctttgctgct

SEQ ID NO: 240211 - DNA, 25 bp, Artificial
  probe
  misc_feature (1)..(25): SEQ ID NO: 833; WAN024GCQ_s_at; Start 762; Stop 786
ctatgatacgcttaagaaaaaaggg

SEQ ID NO: 240212 - DNA, 25 bp, Artificial
  probe
  misc_feature (1)..(25): SEQ ID NO: 833; WAN024GCQ_s_at; Start 600; Stop 624
tatcatgcttaatgaagtcaacgac

SEQ ID NO: 240213 - DNA, 25 bp, Artificial
  probe
  misc_feature (1)..(25): SEQ ID NO: 833; WAN024GCQ_s_at; Start 108; Stop 132
taaacgtgtgcagtcatttgaagaa

SEQ ID NO: 240214 - DNA, 25 bp, Artificial
  probe
  misc_feature (1)..(25): SEQ ID NO: 833; WAN024GCQ_s_at; Start 69; Stop 93
gaaattccgtgcagatcaaatctgg

SEQ ID NO: 240215 - DNA, 25 bp, Artificial
  probe
  misc_feature (1)..(25): SEQ ID NO: 833; WAN024GCQ_s_at; Start 302; Stop 326
tatctgtctgtgtgaccactcaggt

SEQ ID NO: 240216 - DNA, 25 bp, Artificial
  probe
  misc_feature (1)..(25): SEQ ID NO: 833; WAN024GCQ_s_at; Start 287; Stop 311
gtcaacactatggtttatctgtctg

SEQ ID NO: 240217 - DNA, 25 bp, Artificial
  probe
  misc_feature (1)..(25): SEQ ID NO: 833; WAN024GCQ_s_at; Start 700; Stop 724
tataacccagttagtgagcatgacc

SEQ ID NO: 240218 - DNA, 25 bp, Artificial
  probe
  misc_feature (1)..(25): SEQ ID NO: 833; WAN024GCQ_s_at; Start 656; Stop 680
tgctcaagaacatcaagaaattgtc

SEQ ID NO: 240219 - DNA, 25 bp, Artificial
  probe
  misc_feature (1)..(25): SEQ ID NO: 833; WAN024GCQ_s_at; Start 35; Stop 59
ccatgcaggaatgggtattggagca

SEQ ID NO: 240220 - DNA, 25 bp, Artificial
  probe
  misc_feature (1)..(25): SEQ ID NO: 833; WAN024GCQ_s_at; Start 93; Stop 117
ggaatggctctaccgtaaacgtgtg

SEQ ID NO: 240221 - DNA, 25 bp, Artificial
  probe
  misc_feature (1)..(25): SEQ ID NO: 833; WAN024GCQ_s_at; Start 848; Stop 872
gctctaacacaatgaaacgtgaccg

SEQ ID NO: 240222 - DNA, 25 bp, Artificial
  probe
  misc_feature (1)..(25): SEQ ID NO: 833; WAN024GCQ_s_at; Start 180; Stop 204
tgtggtcaatcccttgaaacaacgt

SEQ ID NO: 240223 - DNA, 25 bp, Artificial
  probe
  misc_feature (1)..(25): SEQ ID NO: 833; WAN024GCQ_s_at; Start 223; Stop 247
gatggtacagtcaaatatctctttg

SEQ ID NO: 240224 - DNA, 25 bp, Artificial
  probe
  misc_feature (1)..(25): SEQ ID NO: 833; WAN024GCQ_s_at; Start 547; Stop 571
gctgctattgaatactacattgaga

SEQ ID NO: 240225 - DNA, 25 bp, Artificial
  probe
  misc_feature (1)..(25): SEQ ID NO: 833; WAN024GCQ_s_at; Start 211; Stop 235
caagagtctgctgatggtacagtca

SEQ ID NO: 240226 - DNA, 25 bp, Artificial
  probe
  misc_feature (1)..(25): SEQ ID NO: 833; WAN024GCQ_s_at; Start 832; Stop 856
gcttgtggacaattgcgctctaaca

SEQ ID NO: 240227 - DNA, 25 bp, Artificial
  probe
  misc_feature (1)..(25): SEQ ID NO: 833; WAN024GCQ_s_at; Start 446; Stop 470
gggttcaggtcaatcttgccgtgtc

SEQ ID NO: 240228 - DNA, 25 bp, Artificial
  probe
  misc_feature (1)..(25): SEQ ID NO: 833; WAN024GCQ_s_at; Start 197; Stop 221
aacaacgtattgtgcaagagtctgc

SEQ ID NO: 240229 - DNA, 25 bp, Artificial
  probe
  misc_feature (1)..(25): SEQ ID NO: 833; WAN024GCQ_s_at; Start 457; Stop 481
aatcttgccgtgtctcttcacgcac

SEQ ID NO: 240230 - DNA, 25 bp, Artificial
  probe
  misc_feature (1)..(25): SEQ ID NO: 833; WAN024GCQ_s_at; Start 160; Stop 184
gctaagctcaatgaccagtttgtgg

SEQ ID NO: 240231 - DNA, 25 bp, Artificial
  probe
  misc_feature (1)..(25): SEQ ID NO: 833; WAN024GCQ_s_at; Start 129; Stop 153
agaaatgaccaacctttccaaggat

SEQ ID NO: 240232 - DNA, 25 bp, Artificial
  probe
  misc_feature (1)..(25): SEQ ID NO: 833; WAN024GCQ_s_at; Start 818; Stop 842
cagatattgacgcagcttgtggaca

SEQ ID NO: 240233 - DNA, 25 bp, Artificial
  probe
  misc_feature (1)..(25): SEQ ID NO: 5712; WAN024GCR_at; Start 143; Stop 167
taaggaatcaagtttacataagaca

SEQ ID NO: 240234 - DNA, 25 bp, Artificial
  probe
  misc_feature (1)..(25): SEQ ID NO: 5712; WAN024GCR_at; Start 123; Stop 147
catgctcactaactgggttataagg

SEQ ID NO: 240235 - DNA, 25 bp, Artificial
  probe
  misc_feature (1)..(25): SEQ ID NO: 5712; WAN024GCR_at; Start 129; Stop 153
cactaactgggttataaggaatcaa

SEQ ID NO: 240236 - DNA, 25 bp, Artificial
  probe
  misc_feature (1)..(25): SEQ ID NO: 5712; WAN024GCR_at; Start 309; Stop 333
caatcggaaaggcacggttaatctt

SEQ ID NO: 240237 - DNA, 25 bp, Artificial
  probe
  misc_feature (1)..(25): SEQ ID NO: 5712; WAN024GCR_at; Start 170; Stop 194
ttcttgatgttcttgagcaattcag

SEQ ID NO: 240238 - DNA, 25 bp, Artificial
  probe
  misc_feature (1)..(25): SEQ ID NO: 5712; WAN024GCR_at; Start 58; Stop 82
cccttttttcttaagcgtatcatag

SEQ ID NO: 240239 - DNA, 25 bp, Artificial
  probe
  misc_feature (1)..(25): SEQ ID NO: 5712; WAN024GCR_at; Start 97; Stop 121
ctctttgggactacggctatattgg

SEQ ID NO: 240240 - DNA, 25 bp, Artificial
  probe
  misc_feature (1)..(25): SEQ ID NO: 5712; WAN024GCR_at; Start 286; Stop 310
ttcaatagcagcaaagagtttttca

SEQ ID NO: 240241 - DNA, 25 bp, Artificial
  probe
  misc_feature (1)..(25): SEQ ID NO: 5712; WAN024GCR_at; Start 71; Stop 95
agcgtatcatagaaagccaacacgc

SEQ ID NO: 240242 - DNA, 25 bp, Artificial
  probe
  misc_feature (1)..(25): SEQ ID NO: 5712; WAN024GCR_at; Start 6; Stop 30
cacaagctgcgtcaatatctgtacc

SEQ ID NO: 240243 - DNA, 25 bp, Artificial
  probe
  misc_feature (1)..(25): SEQ ID NO: 5712; WAN024GCR_at; Start 110; Stop 134
cggctatattggtcatgctcactaa

SEQ ID NO: 240244 - DNA, 25 bp, Artificial
  probe
  misc_feature (1)..(25): SEQ ID NO: 5712; WAN024GCR_at; Start 2; Stop 26
tgtccacaagctgcgtcaatatctg

SEQ ID NO: 240245 - DNA, 25 bp, Artificial
  probe
  misc_feature (1)..(25): SEQ ID NO: 5712; WAN024GCR_at; Start 230; Stop 254
tcattaagcatgatatattcaaagg

SEQ ID NO: 240246 - DNA, 25 bp, Artificial
  probe
  misc_feature (1)..(25): SEQ ID NO: 5712; WAN024GCR_at; Start 294; Stop 318
cagcaaagagtttttcaatcggaaa

SEQ ID NO: 240247 - DNA, 25 bp, Artificial
  probe
  misc_feature (1)..(25): SEQ ID NO: 5712; WAN024GCR_at; Start 164; Stop 188
gacaatttcttgatgttcttgagca

SEQ ID NO: 240248 - DNA, 25 bp, Artificial
  probe
  misc_feature (1)..(25): SEQ ID NO: 5712; WAN024GCR_at; Start 273; Stop 297
tctcaatgtagtattcaatagcagc

SEQ ID NO: 240249 - DNA, 25 bp, Artificial
  probe
  misc_feature (1)..(25): SEQ ID NO: 5712; WAN024GCR_at; Start 108; Stop 132
tacggctatattggtcatgctcact

SEQ ID NO: 240250 - DNA, 25 bp, Artificial
  probe
  misc_feature (1)..(25): SEQ ID NO: 5712; WAN024GCR_at; Start 220; Stop 244
gtcgttgacttcattaagcatgata

SEQ ID NO: 240251 - DNA, 25 bp, Artificial
  probe
  misc_feature (1)..(25): SEQ ID NO: 5712; WAN024GCR_at; Start 241; Stop 265
gatatattcaaaggttacacgacgg

SEQ ID NO: 240252 - DNA, 25 bp, Artificial
  probe
  misc_feature (1)..(25): SEQ ID NO: 5712; WAN024GCR_at; Start 261; Stop 285
gacggtttgttgtctcaatgtagta

SEQ ID NO: 240253 - DNA, 25 bp, Artificial
  probe
  misc_feature (1)..(25): SEQ ID NO: 5712; WAN024GCR_at; Start 314; Stop 338
ggaaaggcacggttaatcttcatga

SEQ ID NO: 240254 - DNA, 25 bp, Artificial
  probe
  misc_feature (1)..(25): SEQ ID NO: 5712; WAN024GCR_at; Start 291; Stop 315
tagcagcaaagagtttttcaatcgg

SEQ ID NO: 240255 - DNA, 25 bp, Artificial
  probe
  misc_feature (1)..(25): SEQ ID NO: 5712; WAN024GCR_at; Start 256; Stop 280
tacacgacggtttgttgtctcaatg

SEQ ID NO: 240256 - DNA, 25 bp, Artificial
  probe
  misc_feature (1)..(25): SEQ ID NO: 5712; WAN024GCR_at; Start 119; Stop 143
tggtcatgctcactaactgggttat

SEQ ID NO: 240257 - DNA, 25 bp, Artificial
  probe
  misc_feature (1)..(25): SEQ ID NO: 5712; WAN024GCR_at; Start 103; Stop 127
gggactacggctatattggtcatgc

SEQ ID NO: 240258 - DNA, 25 bp, Artificial
  probe
  misc_feature (1)..(25): SEQ ID NO: 5712; WAN024GCR_at; Start 116; Stop 140
tattggtcatgctcactaactgggt

SEQ ID NO: 240259 - DNA, 25 bp, Artificial
  probe
  misc_feature (1)..(25): SEQ ID NO: 5712; WAN024GCR_at; Start 151; Stop 175
caagtttacataagacaatttcttg

SEQ ID NO: 240260 - DNA, 25 bp, Artificial
  probe
  misc_feature (1)..(25): SEQ ID NO: 5712; WAN024GCR_at; Start 321; Stop 345
cacggttaatcttcatgatacttga

SEQ ID NO: 240261 - DNA, 25 bp, Artificial
  probe
  misc_feature (1)..(25): SEQ ID NO: 5712; WAN024GCR_at; Start 300; Stop 324
agagtttttcaatcggaaaggcacg

SEQ ID NO: 240262 - DNA, 25 bp, Artificial
  probe
  misc_feature (1)..(25): SEQ ID NO: 5712; WAN024GCR_at; Start 8; Stop 32
caagctgcgtcaatatctgtaccat

SEQ ID NO: 240263 - DNA, 25 bp, Artificial
  probe
  misc_feature (1)..(25): SEQ ID NO: 5712; WAN024GCR_at; Start 280; Stop 304
gtagtattcaatagcagcaaagagt

SEQ ID NO: 240264 - DNA, 25 bp, Artificial
  probe
  misc_feature (1)..(25): SEQ ID NO: 5712; WAN024GCR_at; Start 307; Stop 331
ttcaatcggaaaggcacggttaatc

SEQ ID NO: 240265 - DNA, 25 bp, Artificial
  probe
  misc_feature (1)..(25): SEQ ID NO: 5712; WAN024GCR_at; Start 69; Stop 93
taagcgtatcatagaaagccaacac

SEQ ID NO: 240266 - DNA, 25 bp, Artificial
  probe
  misc_feature (1)..(25): SEQ ID NO: 5712; WAN024GCR_at; Start 317; Stop 341
aaggcacggttaatcttcatgatac

SEQ ID NO: 240267 - DNA, 25 bp, Artificial
  probe
  misc_feature (1)..(25): SEQ ID NO: 834; WAN024GCS_at; Start 483; Stop 507
aatcggtgagccctttgataattac

SEQ ID NO: 240268 - DNA, 25 bp, Artificial
  probe
  misc_feature (1)..(25): SEQ ID NO: 834; WAN024GCS_at; Start 558; Stop 582
tatcggtgctcgtcacatcacggtt

SEQ ID NO: 240269 - DNA, 25 bp, Artificial
  probe
  misc_feature (1)..(25): SEQ ID NO: 834; WAN024GCS_at; Start 477; Stop 501
catgggaatcggtgagccctttgat

SEQ ID NO: 240270 - DNA, 25 bp, Artificial
  probe
  misc_feature (1)..(25): SEQ ID NO: 834; WAN024GCS_at; Start 569; Stop 593
gtcacatcacggtttcaacctcagg

SEQ ID NO: 240271 - DNA, 25 bp, Artificial
  probe
  misc_feature (1)..(25): SEQ ID NO: 834; WAN024GCS_at; Start 543; Stop 567
tgataaaggaatggctatcggtgct

SEQ ID NO: 240272 - DNA, 25 bp, Artificial
  probe
  misc_feature (1)..(25): SEQ ID NO: 834; WAN024GCS_at; Start 462; Stop 486
cagccatatcgttgtcatgggaatc

SEQ ID NO: 240273 - DNA, 25 bp, Artificial
  probe
  misc_feature (1)..(25): SEQ ID NO: 834; WAN024GCS_at; Start 472; Stop 496
gttgtcatgggaatcggtgagccct

SEQ ID NO: 240274 - DNA, 25 bp, Artificial
  probe
  misc_feature (1)..(25): SEQ ID NO: 834; WAN024GCS_at; Start 551; Stop 575
gaatggctatcggtgctcgtcacat

SEQ ID NO: 240275 - DNA, 25 bp, Artificial
  probe
  misc_feature (1)..(25): SEQ ID NO: 834; WAN024GCS_at; Start 562; Stop 586
ggtgctcgtcacatcacggtttcaa

SEQ ID NO: 240276 - DNA, 25 bp, Artificial
  probe
  misc_feature (1)..(25): SEQ ID NO: 834; WAN024GCS_at; Start 537; Stop 561
caatgatgataaaggaatggctatc

SEQ ID NO: 240277 - DNA, 25 bp, Artificial
  probe
  misc_feature (1)..(25): SEQ ID NO: 834; WAN024GCS_at; Start 571; Stop 595
cacatcacggtttcaacctcaggtt

SEQ ID NO: 240278 - DNA, 25 bp, Artificial
  probe
  misc_feature (1)..(25): SEQ ID NO: 834; WAN024GCS_at; Start 578; Stop 602
cggtttcaacctcaggtttggctca

SEQ ID NO: 240279 - DNA, 25 bp, Artificial
  probe
  misc_feature (1)..(25): SEQ ID NO: 834; WAN024GCS_at; Start 466; Stop 490
catatcgttgtcatgggaatcggtg

SEQ ID NO: 240280 - DNA, 25 bp, Artificial
  probe
  misc_feature (1)..(25): SEQ ID NO: 834; WAN024GCS_at; Start 490; Stop 514
gagccctttgataattacaacaatg

SEQ ID NO: 240281 - DNA, 25 bp, Artificial
  probe
  misc_feature (1)..(25): SEQ ID NO: 834; WAN024GCS_at; Start 565; Stop 589
gctcgtcacatcacggtttcaacct

SEQ ID NO: 240282 - DNA, 25 bp, Artificial
  probe
  misc_feature (1)..(25): SEQ ID NO: 834; WAN024GCS_at; Start 470; Stop 494
tcgttgtcatgggaatcggtgagcc

SEQ ID NO: 240283 - DNA, 25 bp, Artificial
  probe
  misc_feature (1)..(25): SEQ ID NO: 834; WAN024GCS_at; Start 554; Stop 578
tggctatcggtgctcgtcacatcac

SEQ ID NO: 240284 - DNA, 25 bp, Artificial
  probe
  misc_feature (1)..(25): SEQ ID NO: 834; WAN024GCS_at; Start 485; Stop 509
tcggtgagccctttgataattacaa

SEQ ID NO: 240285 - DNA, 25 bp, Artificial
  probe
  misc_feature (1)..(25): SEQ ID NO: 834; WAN024GCS_at; Start 587; Stop 611
cctcaggtttggctcataaaattcg

SEQ ID NO: 240286 - DNA, 25 bp, Artificial
  probe
  misc_feature (1)..(25): SEQ ID NO: 834; WAN024GCS_at; Start 588; Stop 612
ctcaggtttggctcataaaattcgt

SEQ ID NO: 240287 - DNA, 25 bp, Artificial
  probe
  misc_feature (1)..(25): SEQ ID NO: 834; WAN024GCS_at; Start 556; Stop 580
gctatcggtgctcgtcacatcacgg

SEQ ID NO: 240288 - DNA, 25 bp, Artificial
  probe
  misc_feature (1)..(25): SEQ ID NO: 834; WAN024GCS_at; Start 492; Stop 516
gccctttgataattacaacaatgtc

SEQ ID NO: 240289 - DNA, 25 bp, Artificial
  probe
  misc_feature (1)..(25): SEQ ID NO: 834; WAN024GCS_at; Start 548; Stop 572
aaggaatggctatcggtgctcgtca

SEQ ID NO: 240290 - DNA, 25 bp, Artificial
  probe
  misc_feature (1)..(25): SEQ ID NO: 834; WAN024GCS_at; Start 479; Stop 503
tgggaatcggtgagccctttgataa

SEQ ID NO: 240291 - DNA, 25 bp, Artificial
  probe
  misc_feature (1)..(25): SEQ ID NO: 834; WAN024GCS_at; Start 534; Stop 558
tatcaatgatgataaaggaatggct

SEQ ID NO: 240292 - DNA, 25 bp, Artificial
  probe
  misc_feature (1)..(25): SEQ ID NO: 834; WAN024GCS_at; Start 474; Stop 498
tgtcatgggaatcggtgagcccttt

SEQ ID NO: 240293 - DNA, 25 bp, Artificial
  probe
  misc_feature (1)..(25): SEQ ID NO: 834; WAN024GCS_at; Start 468; Stop 492
tatcgttgtcatgggaatcggtgag

SEQ ID NO: 240294 - DNA, 25 bp, Artificial
  probe
  misc_feature (1)..(25): SEQ ID NO: 834; WAN024GCS_at; Start 583; Stop 607
tcaacctcaggtttggctcataaaa

SEQ ID NO: 240295 - DNA, 25 bp, Artificial
  probe
  misc_feature (1)..(25): SEQ ID NO: 834; WAN024GCS_at; Start 501; Stop 525
taattacaacaatgtcttgaatttc

SEQ ID NO: 240296 - DNA, 25 bp, Artificial
  probe
  misc_feature (1)..(25): SEQ ID NO: 834; WAN024GCS_at; Start 496; Stop 520
tttgataattacaacaatgtcttga

SEQ ID NO: 240297 - DNA, 25 bp, Artificial
  probe
  misc_feature (1)..(25): SEQ ID NO: 834; WAN024GCS_at; Start 487; Stop 511
ggtgagccctttgataattacaaca

SEQ ID NO: 240298 - DNA, 25 bp, Artificial
  probe
  misc_feature (1)..(25): SEQ ID NO: 834; WAN024GCS_at; Start 560; Stop 584
tcggtgctcgtcacatcacggtttc

SEQ ID NO: 240299 - DNA, 25 bp, Artificial
  probe
  misc_feature (1)..(25): SEQ ID NO: 834; WAN024GCS_at; Start 575; Stop 599
tcacggtttcaacctcaggtttggc

SEQ ID NO: 240300 - DNA, 25 bp, Artificial
  probe
  misc_feature (1)..(25): SEQ ID NO: 834; WAN024GCS_at; Start 546; Stop 570
taaaggaatggctatcggtgctcgt

SEQ ID NO: 240301 - DNA, 25 bp, Artificial
  probe
  misc_feature (1)..(25): SEQ ID NO: 2028; WAN024GCT_at; Start 378; Stop 402
gacggaagaagaaacaccttctaga

SEQ ID NO: 240302 - DNA, 25 bp, Artificial
  probe
  misc_feature (1)..(25): SEQ ID NO: 2028; WAN024GCT_at; Start 170; Stop 194
taaccaagtttgattatatcgtggg

SEQ ID NO: 240303 - DNA, 25 bp, Artificial
  probe
  misc_feature (1)..(25): SEQ ID NO: 2028; WAN024GCT_at; Start 371; Stop 395
tgcgtaagacggaagaagaaacacc

SEQ ID NO: 240304 - DNA, 25 bp, Artificial
  probe
  misc_feature (1)..(25): SEQ ID NO: 2028; WAN024GCT_at; Start 359; Stop 383
ttgacaagaaaatgcgtaagacgga

SEQ ID NO: 240305 - DNA, 25 bp, Artificial
  probe
  misc_feature (1)..(25): SEQ ID NO: 2028; WAN024GCT_at; Start 427; Stop 451
aaacgaaagtcgaatgcagataaga

SEQ ID NO: 240306 - DNA, 25 bp, Artificial
  probe
  misc_feature (1)..(25): SEQ ID NO: 2028; WAN024GCT_at; Start 502; Stop 526
caacgtcattttgtcattcgtcaga

SEQ ID NO: 240307 - DNA, 25 bp, Artificial
  probe
  misc_feature (1)..(25): SEQ ID NO: 2028; WAN024GCT_at; Start 266; Stop 290
aaatcagtcgtttacaagactacct

SEQ ID NO: 240308 - DNA, 25 bp, Artificial
  probe
  misc_feature (1)..(25): SEQ ID NO: 2028; WAN024GCT_at; Start 340; Stop 364
gcccctaagcgagcatcatttgaca

SEQ ID NO: 240309 - DNA, 25 bp, Artificial
  probe
  misc_feature (1)..(25): SEQ ID NO: 2028; WAN024GCT_at; Start 322; Stop 346
tttgtcttagaaaatgaagccccta

SEQ ID NO: 240310 - DNA, 25 bp, Artificial
  probe
  misc_feature (1)..(25): SEQ ID NO: 2028; WAN024GCT_at; Start 227; Stop 251
gtttttacaaggatgaccgaacaga

SEQ ID NO: 240311 - DNA, 25 bp, Artificial
  probe
  misc_feature (1)..(25): SEQ ID NO: 2028; WAN024GCT_at; Start 26; Stop 50
tatacaactataacaagtttcctgg

SEQ ID NO: 240312 - DNA, 25 bp, Artificial
  probe
  misc_feature (1)..(25): SEQ ID NO: 2028; WAN024GCT_at; Start 75; Stop 99
caaggtcgaaacggaagggatagct

SEQ ID NO: 240313 - DNA, 25 bp, Artificial
  probe
  misc_feature (1)..(25): SEQ ID NO: 2028; WAN024GCT_at; Start 442; Stop 466
gcagataagaaaaatagacgtcgtc

SEQ ID NO: 240314 - DNA, 25 bp, Artificial
  probe
  misc_feature (1)..(25): SEQ ID NO: 2028; WAN024GCT_at; Start 456; Stop 480
tagacgtcgtcagaaagaccagcat

SEQ ID NO: 240315 - DNA, 25 bp, Artificial
  probe
  misc_feature (1)..(25): SEQ ID NO: 2028; WAN024GCT_at; Start 47; Stop 71
ctggtccggagttccatttacacgg

SEQ ID NO: 240316 - DNA, 25 bp, Artificial
  probe
  misc_feature (1)..(25): SEQ ID NO: 2028; WAN024GCT_at; Start 132; Stop 156
tgatgtgacgacttttaatcagcgt

SEQ ID NO: 240317 - DNA, 25 bp, Artificial
  probe
  misc_feature (1)..(25): SEQ ID NO: 2028; WAN024GCT_at; Start 280; Stop 304
caagactaccttttagagtattgta

SEQ ID NO: 240318 - DNA, 25 bp, Artificial
  probe
  misc_feature (1)..(25): SEQ ID NO: 2028; WAN024GCT_at; Start 294; Stop 318
agagtattgtagttatggttgtgcc

SEQ ID NO: 240319 - DNA, 25 bp, Artificial
  probe
  misc_feature (1)..(25): SEQ ID NO: 2028; WAN024GCT_at; Start 10; Stop 34
gaaattgcacctgaattatacaact

SEQ ID NO: 240320 - DNA, 25 bp, Artificial
  probe
  misc_feature (1)..(25): SEQ ID NO: 2028; WAN024GCT_at; Start 261; Stop 285
tgaaaaaatcagtcgtttacaagac

SEQ ID NO: 240321 - DNA, 25 bp, Artificial
  probe
  misc_feature (1)..(25): SEQ ID NO: 2028; WAN024GCT_at; Start 345; Stop 369
taagcgagcatcatttgacaagaaa

SEQ ID NO: 240322 - DNA, 25 bp, Artificial
  probe
  misc_feature (1)..(25): SEQ ID NO: 2028; WAN024GCT_at; Start 238; Stop 262
gatgaccgaacagaagaaaaacttg

SEQ ID NO: 240323 - DNA, 25 bp, Artificial
  probe
  misc_feature (1)..(25): SEQ ID NO: 2028; WAN024GCT_at; Start 2; Stop 26
tgcgaaaagaaattgcacctgaatt

SEQ ID NO: 240324 - DNA, 25 bp, Artificial
  probe
  misc_feature (1)..(25): SEQ ID NO: 2028; WAN024GCT_at; Start 120; Stop 144
caaggatgcctttgatgtgacgact

SEQ ID NO: 240325 - DNA, 25 bp, Artificial
  probe
  misc_feature (1)..(25): SEQ ID NO: 2028; WAN024GCT_at; Start 124; Stop 148
gatgcctttgatgtgacgactttta

SEQ ID NO: 240326 - DNA, 25 bp, Artificial
  probe
  misc_feature (1)..(25): SEQ ID NO: 2028; WAN024GCT_at; Start 105; Stop 129
cttggttgaaaatatcaaggatgcc

SEQ ID NO: 240327 - DNA, 25 bp, Artificial
  probe
  misc_feature (1)..(25): SEQ ID NO: 2028; WAN024GCT_at; Start 307; Stop 331
tatggttgtgcctattttgtcttag

SEQ ID NO: 240328 - DNA, 25 bp, Artificial
  probe
  misc_feature (1)..(25): SEQ ID NO: 2028; WAN024GCT_at; Start 39; Stop 63
caagtttcctggtccggagttccat

SEQ ID NO: 240329 - DNA, 25 bp, Artificial
  probe
  misc_feature (1)..(25): SEQ ID NO: 2028; WAN024GCT_at; Start 332; Stop 356
aaaatgaagcccctaagcgagcatc

SEQ ID NO: 240330 - DNA, 25 bp, Artificial
  probe
  misc_feature (1)..(25): SEQ ID NO: 2028; WAN024GCT_at; Start 141; Stop 165
gacttttaatcagcgtttttcagaa

SEQ ID NO: 240331 - DNA, 25 bp, Artificial
  probe
  misc_feature (1)..(25): SEQ ID NO: 2028; WAN024GCT_at; Start 468; Stop 492
gaaagaccagcattctcagaaagag

SEQ ID NO: 240332 - DNA, 25 bp, Artificial
  probe
  misc_feature (1)..(25): SEQ ID NO: 2028; WAN024GCT_at; Start 194; Stop 218
gggactggagcaacgaacagcttcg

SEQ ID NO: 240333 - DNA, 25 bp, Artificial
  probe
  misc_feature (1)..(25): SEQ ID NO: 2028; WAN024GCT_at; Start 33; Stop 57
ctataacaagtttcctggtccggag

SEQ ID NO: 240334 - DNA, 25 bp, Artificial
  probe
  misc_feature (1)..(25): SEQ ID NO: 2028; WAN024GCT_at; Start 475; Stop 499
cagcattctcagaaagaggacaagg

SEQ ID NO: 240335 - DNA, 25 bp, Artificial
  probe
  misc_feature (1)..(25): SEQ ID NO: 4271; WAN024GCU_at; Start 132; Stop 156
tgttgcatcgattgctgctgccagt

SEQ ID NO: 240336 - DNA, 25 bp, Artificial
  probe
  misc_feature (1)..(25): SEQ ID NO: 4271; WAN024GCU_at; Start 185; Stop 209
tcatcaattcccagaaaagagcgtg

SEQ ID NO: 240337 - DNA, 25 bp, Artificial
  probe
  misc_feature (1)..(25): SEQ ID NO: 4271; WAN024GCU_at; Start 84; Stop 108
tgttgctgctgcagtgaaggctgct

SEQ ID NO: 240338 - DNA, 25 bp, Artificial
  probe
  misc_feature (1)..(25): SEQ ID NO: 4271; WAN024GCU_at; Start 28; Stop 52
tcaagtttcccttctttgttgacaa

SEQ ID NO: 240339 - DNA, 25 bp, Artificial
  probe
  misc_feature (1)..(25): SEQ ID NO: 4271; WAN024GCU_at; Start 222; Stop 246
gccaccattgttgataagtgcttga

SEQ ID NO: 240340 - DNA, 25 bp, Artificial
  probe
  misc_feature (1)..(25): SEQ ID NO: 4271; WAN024GCU_at; Start 105; Stop 129
tgcttggaattcttcaaatgaacca

SEQ ID NO: 240341 - DNA, 25 bp, Artificial
  probe
  misc_feature (1)..(25): SEQ ID NO: 4271; WAN024GCU_at; Start 198; Stop 222
gaaaagagcgtggttcaagtgtccg

SEQ ID NO: 240342 - DNA, 25 bp, Artificial
  probe
  misc_feature (1)..(25): SEQ ID NO: 4271; WAN024GCU_at; Start 59; Stop 83
atgcccaacctgaaccaaaacgagt

SEQ ID NO: 240343 - DNA, 25 bp, Artificial
  probe
  misc_feature (1)..(25): SEQ ID NO: 4271; WAN024GCU_at; Start 189; Stop 213
caattcccagaaaagagcgtggttc

SEQ ID NO: 240344 - DNA, 25 bp, Artificial
  probe
  misc_feature (1)..(25): SEQ ID NO: 4271; WAN024GCU_at; Start 95; Stop 119
cagtgaaggctgcttggaattcttc

SEQ ID NO: 240345 - DNA, 25 bp, Artificial
  probe
  misc_feature (1)..(25): SEQ ID NO: 4271; WAN024GCU_at; Start 8; Stop 32
ggtttgctgttgaagtcacttcaag

SEQ ID NO: 240346 - DNA, 25 bp, Artificial
  probe
  misc_feature (1)..(25): SEQ ID NO: 4271; WAN024GCU_at; Start 124; Stop 148
gaaccaaatgttgcatcgattgctg

SEQ ID NO: 240347 - DNA, 25 bp, Artificial
  probe
  misc_feature (1)..(25): SEQ ID NO: 4271; WAN024GCU_at; Start 21; Stop 45
agtcacttcaagtttcccttctttg

SEQ ID NO: 240348 - DNA, 25 bp, Artificial
  probe
  misc_feature (1)..(25): SEQ ID NO: 4271; WAN024GCU_at; Start 193; Stop 217
tcccagaaaagagcgtggttcaagt

SEQ ID NO: 240349 - DNA, 25 bp, Artificial
  probe
  misc_feature (1)..(25): SEQ ID NO: 4271; WAN024GCU_at; Start 171; Stop 195
tgttttctcgggagtcatcaattcc

SEQ ID NO: 240350 - DNA, 25 bp, Artificial
  probe
  misc_feature (1)..(25): SEQ ID NO: 4271; WAN024GCU_at; Start 67; Stop 91
cctgaaccaaaacgagttgttgctg

SEQ ID NO: 240351 - DNA, 25 bp, Artificial
  probe
  misc_feature (1)..(25): SEQ ID NO: 4271; WAN024GCU_at; Start 73; Stop 97
ccaaaacgagttgttgctgctgcag

SEQ ID NO: 240352 - DNA, 25 bp, Artificial
  probe
  misc_feature (1)..(25): SEQ ID NO: 4271; WAN024GCU_at; Start 207; Stop 231
gtggttcaagtgtccgccaccattg

SEQ ID NO: 240353 - DNA, 25 bp, Artificial
  probe
  misc_feature (1)..(25): SEQ ID NO: 4271; WAN024GCU_at; Start 43; Stop 67
ttgttgacaaccaaccatgcccaac

SEQ ID NO: 240354 - DNA, 25 bp, Artificial
  probe
  misc_feature (1)..(25): SEQ ID NO: 4271; WAN024GCU_at; Start 213; Stop 237
caagtgtccgccaccattgttgata

SEQ ID NO: 240355 - DNA, 25 bp, Artificial
  probe
  misc_feature (1)..(25): SEQ ID NO: 4271; WAN024GCU_at; Start 166; Stop 190
ggagctgttttctcgggagtcatca

SEQ ID NO: 240356 - DNA, 25 bp, Artificial
  probe
  misc_feature (1)..(25): SEQ ID NO: 4271; WAN024GCU_at; Start 115; Stop 139
tcttcaaatgaaccaaatgttgcat

SEQ ID NO: 240357 - DNA, 25 bp, Artificial
  probe
  misc_feature (1)..(25): SEQ ID NO: 4271; WAN024GCU_at; Start 2; Stop 26
tgtcttggtttgctgttgaagtcac

SEQ ID NO: 240358 - DNA, 25 bp, Artificial
  probe
  misc_feature (1)..(25): SEQ ID NO: 4271; WAN024GCU_at; Start 102; Stop 126
ggctgcttggaattcttcaaatgaa

SEQ ID NO: 240359 - DNA, 25 bp, Artificial
  probe
  misc_feature (1)..(25): SEQ ID NO: 4271; WAN024GCU_at; Start 77; Stop 101
aacgagttgttgctgctgcagtgaa

SEQ ID NO: 240360 - DNA, 25 bp, Artificial
  probe
  misc_feature (1)..(25): SEQ ID NO: 4271; WAN024GCU_at; Start 201; Stop 225
aagagcgtggttcaagtgtccgcca

SEQ ID NO: 240361 - DNA, 25 bp, Artificial
  probe
  misc_feature (1)..(25): SEQ ID NO: 4271; WAN024GCU_at; Start 136; Stop 160
gcatcgattgctgctgccagttctg

SEQ ID NO: 240362 - DNA, 25 bp, Artificial
  probe
  misc_feature (1)..(25): SEQ ID NO: 4271; WAN024GCU_at; Start 147; Stop 171
tgctgccagttctgctgaaggagct

SEQ ID NO: 240363 - DNA, 25 bp, Artificial
  probe
  misc_feature (1)..(25): SEQ ID NO: 4271; WAN024GCU_at; Start 181; Stop 205
ggagtcatcaattcccagaaaagag

SEQ ID NO: 240364 - DNA, 25 bp, Artificial
  probe
  misc_feature (1)..(25): SEQ ID NO: 4271; WAN024GCU_at; Start 217; Stop 241
tgtccgccaccattgttgataagtg

SEQ ID NO: 240365 - DNA, 25 bp, Artificial
  probe
  misc_feature (1)..(25): SEQ ID NO: 4271; WAN024GCU_at; Start 89; Stop 113
ctgctgcagtgaaggctgcttggaa

SEQ ID NO: 240366 - DNA, 25 bp, Artificial
  probe
  misc_feature (1)..(25): SEQ ID NO: 4271; WAN024GCU_at; Start 128; Stop 152
caaatgttgcatcgattgctgctgc

SEQ ID NO: 240367 - DNA, 25 bp, Artificial
  probe
  misc_feature (1)..(25): SEQ ID NO: 4271; WAN024GCU_at; Start 151; Stop 175
gccagttctgctgaaggagctgttt

SEQ ID NO: 240368 - DNA, 25 bp, Artificial
  probe
  misc_feature (1)..(25): SEQ ID NO: 4271; WAN024GCU_at; Start 141; Stop 165
gattgctgctgccagttctgctgaa

SEQ ID NO: 240369 - DNA, 25 bp, Artificial
  probe
  misc_feature (1)..(25): SEQ ID NO: 5824; WAN024GCV_at; Start 659; Stop 683
gtttgggaacatgcttactacgtga

SEQ ID NO: 240370 - DNA, 25 bp, Artificial
  probe
  misc_feature (1)..(25): SEQ ID NO: 5824; WAN024GCV_at; Start 756; Stop 780
tgtacgcagctgctaaataactaat

SEQ ID NO: 240371 - DNA, 25 bp, Artificial
  probe
  misc_feature (1)..(25): SEQ ID NO: 5824; WAN024GCV_at; Start 684; Stop 708
aataccgcaacgtgcgtcctgacta

SEQ ID NO: 240372 - DNA, 25 bp, Artificial
  probe
  misc_feature (1)..(25): SEQ ID NO: 5824; WAN024GCV_at; Start 218; Stop 242
ccatacatcgatgcggaaacaatgc

SEQ ID NO: 240373 - DNA, 25 bp, Artificial
  probe
  misc_feature (1)..(25): SEQ ID NO: 5824; WAN024GCV_at; Start 19; Stop 43
gcgtcaggactatcttgtcgtgggt

SEQ ID NO: 240374 - DNA, 25 bp, Artificial
  probe
  misc_feature (1)..(25): SEQ ID NO: 5824; WAN024GCV_at; Start 674; Stop 698
tactacgtgaaataccgcaacgtgc

SEQ ID NO: 240375 - DNA, 25 bp, Artificial
  probe
  misc_feature (1)..(25): SEQ ID NO: 5824; WAN024GCV_at; Start 225; Stop 249
tcgatgcggaaacaatgcatttgca

SEQ ID NO: 240376 - DNA, 25 bp, Artificial
  probe
  misc_feature (1)..(25): SEQ ID NO: 5824; WAN024GCV_at; Start 712; Stop 736
caaagctttcttttcagtaatcaac

SEQ ID NO: 240377 - DNA, 25 bp, Artificial
  probe
  misc_feature (1)..(25): SEQ ID NO: 5824; WAN024GCV_at; Start 726; Stop 750
cagtaatcaactggaataaagtaga

SEQ ID NO: 240378 - DNA, 25 bp, Artificial
  probe
  misc_feature (1)..(25): SEQ ID NO: 5824; WAN024GCV_at; Start 152; Stop 176
gaaaaagaggtattacagatggcta

SEQ ID NO: 240379 - DNA, 25 bp, Artificial
  probe
  misc_feature (1)..(25): SEQ ID NO: 5824; WAN024GCV_at; Start 641; Stop 665
ccaatcttgggcttggacgtttggg

SEQ ID NO: 240380 - DNA, 25 bp, Artificial
  probe
  misc_feature (1)..(25): SEQ ID NO: 5824; WAN024GCV_at; Start 251; Stop 275
catgacaaacaccatcaaacttatg

SEQ ID NO: 240381 - DNA, 25 bp, Artificial
  probe
  misc_feature (1)..(25): SEQ ID NO: 5824; WAN024GCV_at; Start 11; Stop 35
tacaacccgcgtcaggactatcttg

SEQ ID NO: 240382 - DNA, 25 bp, Artificial
  probe
  misc_feature (1)..(25): SEQ ID NO: 5824; WAN024GCV_at; Start 213; Stop 237
tggaaccatacatcgatgcggaaac

SEQ ID NO: 240383 - DNA, 25 bp, Artificial
  probe
  misc_feature (1)..(25): SEQ ID NO: 5824; WAN024GCV_at; Start 747; Stop 771
tagatgaattgtacgcagctgctaa

SEQ ID NO: 240384 - DNA, 25 bp, Artificial
  probe
  misc_feature (1)..(25): SEQ ID NO: 5824; WAN024GCV_at; Start 165; Stop 189
tacagatggctattatcttaccaga

SEQ ID NO: 240385 - DNA, 25 bp, Artificial
  probe
  misc_feature (1)..(25): SEQ ID NO: 5824; WAN024GCV_at; Start 60; Stop 84
tattttattagaaagtatgtcagtg

SEQ ID NO: 240386 - DNA, 25 bp, Artificial
  probe
  misc_feature (1)..(25): SEQ ID NO: 5824; WAN024GCV_at; Start 2; Stop 26
tgttgaaactacaacccgcgtcagg

SEQ ID NO: 240387 - DNA, 25 bp, Artificial
  probe
  misc_feature (1)..(25): SEQ ID NO: 5824; WAN024GCV_at; Start 121; Stop 145
gaatgtttgcgttatcattttcata

SEQ ID NO: 240388 - DNA, 25 bp, Artificial
  probe
  misc_feature (1)..(25): SEQ ID NO: 5824; WAN024GCV_at; Start 681; Stop 705
tgaaataccgcaacgtgcgtcctga

SEQ ID NO: 240389 - DNA, 25 bp, Artificial
  probe
  misc_feature (1)..(25): SEQ ID NO: 5824; WAN024GCV_at; Start 141; Stop 165
tcatatagaaagaaaaagaggtatt

SEQ ID NO: 240390 - DNA, 25 bp, Artificial
  probe
  misc_feature (1)..(25): SEQ ID NO: 5824; WAN024GCV_at; Start 413; Stop 437
gctcttttctgggaattgatgactc

SEQ ID NO: 240391 - DNA, 25 bp, Artificial
  probe
  misc_feature (1)..(25): SEQ ID NO: 5824; WAN024GCV_at; Start 37; Stop 61
cgtgggtttcttgctgatttgctta

SEQ ID NO: 240392 - DNA, 25 bp, Artificial
  probe
  misc_feature (1)..(25): SEQ ID NO: 5824; WAN024GCV_at; Start 742; Stop 766
taaagtagatgaattgtacgcagct

SEQ ID NO: 240393 - DNA, 25 bp, Artificial
  probe
  misc_feature (1)..(25): SEQ ID NO: 5824; WAN024GCV_at; Start 78; Stop 102
gtcagtgatttccttatctataagc

SEQ ID NO: 240394 - DNA, 25 bp, Artificial
  probe
  misc_feature (1)..(25): SEQ ID NO: 5824; WAN024GCV_at; Start 651; Stop 675
gcttggacgtttgggaacatgctta

SEQ ID NO: 240395 - DNA, 25 bp, Artificial
  probe
  misc_feature (1)..(25): SEQ ID NO: 5824; WAN024GCV_at; Start 233; Stop 257
gaaacaatgcatttgcaccatgaca

SEQ ID NO: 240396 - DNA, 25 bp, Artificial
  probe
  misc_feature (1)..(25): SEQ ID NO: 5824; WAN024GCV_at; Start 241; Stop 265
gcatttgcaccatgacaaacaccat

SEQ ID NO: 240397 - DNA, 25 bp, Artificial
  probe
  misc_feature (1)..(25): SEQ ID NO: 5824; WAN024GCV_at; Start 26; Stop 50
gactatcttgtcgtgggtttcttgc

SEQ ID NO: 240398 - DNA, 25 bp, Artificial
  probe
  misc_feature (1)..(25): SEQ ID NO: 5824; WAN024GCV_at; Start 107; Stop 131
aacttgaaaaaagtgaatgtttgcg

SEQ ID NO: 240399 - DNA, 25 bp, Artificial
  probe
  misc_feature (1)..(25): SEQ ID NO: 5824; WAN024GCV_at; Start 269; Stop 293
acttatgtcaacaatgccaatgcag

SEQ ID NO: 240400 - DNA, 25 bp, Artificial
  probe
  misc_feature (1)..(25): SEQ ID NO: 5824; WAN024GCV_at; Start 171; Stop 195
tggctattatcttaccagaacttcc

SEQ ID NO: 240401 - DNA, 25 bp, Artificial
  probe
  misc_feature (1)..(25): SEQ ID NO: 5824; WAN024GCV_at; Start 668; Stop 692
catgcttactacgtgaaataccgca

SEQ ID NO: 240402 - DNA, 25 bp, Artificial
  probe
  misc_feature (1)..(25): SEQ ID NO: 5824; WAN024GCV_at; Start 89; Stop 113
ccttatctataagcaaaaaacttga

SEQ ID NO: 240403 - DNA, 25 bp, Artificial
  probe
  misc_feature (1)..(25): SEQ ID NO: 5053; WAN024GCW_at; Start 138; Stop 162
caggttgcgcaacaccgatagcata

SEQ ID NO: 240404 - DNA, 25 bp, Artificial
  probe
  misc_feature (1)..(25): SEQ ID NO: 5053; WAN024GCW_at; Start 45; Stop 69
ctgcagggcgaaggtcaaagatttg

SEQ ID NO: 240405 - DNA, 25 bp, Artificial
  probe
  misc_feature (1)..(25): SEQ ID NO: 5053; WAN024GCW_at; Start 129; Stop 153
gaacagaaacaggttgcgcaacacc

SEQ ID NO: 240406 - DNA, 25 bp, Artificial
  probe
  misc_feature (1)..(25): SEQ ID NO: 5053; WAN024GCW_at; Start 1; Stop 25
ttgacggtaaattggacgcttgagg

SEQ ID NO: 240407 - DNA, 25 bp, Artificial
  probe
  misc_feature (1)..(25): SEQ ID NO: 5053; WAN024GCW_at; Start 210; Stop 234
tcttggcaatatagcgagccgcata

SEQ ID NO: 240408 - DNA, 25 bp, Artificial
  probe
  misc_feature (1)..(25): SEQ ID NO: 5053; WAN024GCW_at; Start 146; Stop 170
gcaacaccgatagcataggccaact

SEQ ID NO: 240409 - DNA, 25 bp, Artificial
  probe
  misc_feature (1)..(25): SEQ ID NO: 5053; WAN024GCW_at; Start 31; Stop 55
catttggataatccctgcagggcga

SEQ ID NO: 240410 - DNA, 25 bp, Artificial
  probe
  misc_feature (1)..(25): SEQ ID NO: 5053; WAN024GCW_at; Start 37; Stop 61
gataatccctgcagggcgaaggtca

SEQ ID NO: 240411 - DNA, 25 bp, Artificial
  probe
  misc_feature (1)..(25): SEQ ID NO: 5053; WAN024GCW_at; Start 107; Stop 131
cctgtaccgaaagtatcgatacgaa

SEQ ID NO: 240412 - DNA, 25 bp, Artificial
  probe
  misc_feature (1)..(25): SEQ ID NO: 5053; WAN024GCW_at; Start 84; Stop 108
caagttgactttcagctactgttcc

SEQ ID NO: 240413 - DNA, 25 bp, Artificial
  probe
  misc_feature (1)..(25): SEQ ID NO: 5053; WAN024GCW_at; Start 22; Stop 46
gaggtccagcatttggataatccct

SEQ ID NO: 240414 - DNA, 25 bp, Artificial
  probe
  misc_feature (1)..(25): SEQ ID NO: 5053; WAN024GCW_at; Start 169; Stop 193
ctgcacttctgccttcttagcaagg

SEQ ID NO: 240415 - DNA, 25 bp, Artificial
  probe
  misc_feature (1)..(25): SEQ ID NO: 5053; WAN024GCW_at; Start 120; Stop 144
tatcgatacgaacagaaacaggttg

SEQ ID NO: 240416 - DNA, 25 bp, Artificial
  probe
  misc_feature (1)..(25): SEQ ID NO: 5053; WAN024GCW_at; Start 207; Stop 231
tattcttggcaatatagcgagccgc

SEQ ID NO: 240417 - DNA, 25 bp, Artificial
  probe
  misc_feature (1)..(25): SEQ ID NO: 5053; WAN024GCW_at; Start 74; Stop 98
gccgctttttcaagttgactttcag

SEQ ID NO: 240418 - DNA, 25 bp, Artificial
  probe
  misc_feature (1)..(25): SEQ ID NO: 5053; WAN024GCW_at; Start 54; Stop 78
gaaggtcaaagatttgacgagccgc

SEQ ID NO: 240419 - DNA, 25 bp, Artificial
  probe
  misc_feature (1)..(25): SEQ ID NO: 5053; WAN024GCW_at; Start 95; Stop 119
tcagctactgttcctgtaccgaaag

SEQ ID NO: 240420 - DNA, 25 bp, Artificial
  probe
  misc_feature (1)..(25): SEQ ID NO: 5053; WAN024GCW_at; Start 69; Stop 93
gacgagccgctttttcaagttgact

SEQ ID NO: 240421 - DNA, 25 bp, Artificial
  probe
  misc_feature (1)..(25): SEQ ID NO: 5053; WAN024GCW_at; Start 140; Stop 164
ggttgcgcaacaccgatagcatagg

SEQ ID NO: 240422 - DNA, 25 bp, Artificial
  probe
  misc_feature (1)..(25): SEQ ID NO: 5053; WAN024GCW_at; Start 156; Stop 180
tagcataggccaactgcacttctgc

SEQ ID NO: 240423 - DNA, 25 bp, Artificial
  probe
  misc_feature (1)..(25): SEQ ID NO: 5053; WAN024GCW_at; Start 17; Stop 41
cgcttgaggtccagcatttggataa

SEQ ID NO: 240424 - DNA, 25 bp, Artificial
  probe
  misc_feature (1)..(25): SEQ ID NO: 5053; WAN024GCW_at; Start 111; Stop 135
taccgaaagtatcgatacgaacaga

SEQ ID NO: 240425 - DNA, 25 bp, Artificial
  probe
  misc_feature (1)..(25): SEQ ID NO: 5053; WAN024GCW_at; Start 219; Stop 243
tatagcgagccgcataagaggctga

SEQ ID NO: 240426 - DNA, 25 bp, Artificial
  probe
  misc_feature (1)..(25): SEQ ID NO: 5053; WAN024GCW_at; Start 132; Stop 156
cagaaacaggttgcgcaacaccgat

SEQ ID NO: 240427 - DNA, 25 bp, Artificial
  probe
  misc_feature (1)..(25): SEQ ID NO: 5053; WAN024GCW_at; Start 124; Stop 148
gatacgaacagaaacaggttgcgca

SEQ ID NO: 240428 - DNA, 25 bp, Artificial
  probe
  misc_feature (1)..(25): SEQ ID NO: 5053; WAN024GCW_at; Start 8; Stop 32
taaattggacgcttgaggtccagca

SEQ ID NO: 240429 - DNA, 25 bp, Artificial
  probe
  misc_feature (1)..(25): SEQ ID NO: 5053; WAN024GCW_at; Start 42; Stop 66
tccctgcagggcgaaggtcaaagat

SEQ ID NO: 240430 - DNA, 25 bp, Artificial
  probe
  misc_feature (1)..(25): SEQ ID NO: 5053; WAN024GCW_at; Start 215; Stop 239
gcaatatagcgagccgcataagagg

SEQ ID NO: 240431 - DNA, 25 bp, Artificial
  probe
  misc_feature (1)..(25): SEQ ID NO: 5053; WAN024GCW_at; Start 60; Stop 84
caaagatttgacgagccgctttttc

SEQ ID NO: 240432 - DNA, 25 bp, Artificial
  probe
  misc_feature (1)..(25): SEQ ID NO: 5053; WAN024GCW_at; Start 150; Stop 174
caccgatagcataggccaactgcac

SEQ ID NO: 240433 - DNA, 25 bp, Artificial
  probe
  misc_feature (1)..(25): SEQ ID NO: 5053; WAN024GCW_at; Start 164; Stop 188
gccaactgcacttctgccttcttag

SEQ ID NO: 240434 - DNA, 25 bp, Artificial
  probe
  misc_feature (1)..(25): SEQ ID NO: 5053; WAN024GCW_at; Start 195; Stop 219
ctgctgcaacgatattcttggcaat

SEQ ID NO: 240435 - DNA, 25 bp, Artificial
  probe
  misc_feature (1)..(25): SEQ ID NO: 5053; WAN024GCW_at; Start 14; Stop 38
ggacgcttgaggtccagcatttgga

SEQ ID NO: 240436 - DNA, 25 bp, Artificial
  probe
  misc_feature (1)..(25): SEQ ID NO: 5053; WAN024GCW_at; Start 101; Stop 125
actgttcctgtaccgaaagtatcga

SEQ ID NO: 240437 - DNA, 25 bp, Artificial
  probe
  misc_feature (1)..(25): SEQ ID NO: 1461; WAN024GCX_at; Start 79; Stop 103
tgctccaatcaagtccagtggatct

SEQ ID NO: 240438 - DNA, 25 bp, Artificial
  probe
  misc_feature (1)..(25): SEQ ID NO: 1461; WAN024GCX_at; Start 149; Stop 173
gcgatgtcaggagattgttccacca

SEQ ID NO: 240439 - DNA, 25 bp, Artificial
  probe
  misc_feature (1)..(25): SEQ ID NO: 1461; WAN024GCX_at; Start 141; Stop 165
caccttgagcgatgtcaggagattg

SEQ ID NO: 240440 - DNA, 25 bp, Artificial
  probe
  misc_feature (1)..(25): SEQ ID NO: 1461; WAN024GCX_at; Start 88; Stop 112
caagtccagtggatcttgatcagca

SEQ ID NO: 240441 - DNA, 25 bp, Artificial
  probe
  misc_feature (1)..(25): SEQ ID NO: 1461; WAN024GCX_at; Start 243; Stop 267
tggtatcacgaaccacacggttaat

SEQ ID NO: 240442 - DNA, 25 bp, Artificial
  probe
  misc_feature (1)..(25): SEQ ID NO: 1461; WAN024GCX_at; Start 29; Stop 53
agctcttctgtttcatctactgcaa

SEQ ID NO: 240443 - DNA, 25 bp, Artificial
  probe
  misc_feature (1)..(25): SEQ ID NO: 1461; WAN024GCX_at; Start 305; Stop 329
tggacagaaccagtatatacagctg

SEQ ID NO: 240444 - DNA, 25 bp, Artificial
  probe
  misc_feature (1)..(25): SEQ ID NO: 1461; WAN024GCX_at; Start 239; Stop 263
gcaatggtatcacgaaccacacggt

SEQ ID NO: 240445 - DNA, 25 bp, Artificial
  probe
  misc_feature (1)..(25): SEQ ID NO: 1461; WAN024GCX_at; Start 180; Stop 204
ggtgtactcccaccgtctcagcaga

SEQ ID NO: 240446 - DNA, 25 bp, Artificial
  probe
  misc_feature (1)..(25): SEQ ID NO: 1461; WAN024GCX_at; Start 49; Stop 73
tgcaaatccaaacatgagcccttgg

SEQ ID NO: 240447 - DNA, 25 bp, Artificial
  probe
  misc_feature (1)..(25): SEQ ID NO: 1461; WAN024GCX_at; Start 128; Stop 152
aaggcttcgttaacaccttgagcga

SEQ ID NO: 240448 - DNA, 25 bp, Artificial
  probe
  misc_feature (1)..(25): SEQ ID NO: 1461; WAN024GCX_at; Start 161; Stop 185
gattgttccaccaaagatgggtgta

SEQ ID NO: 240449 - DNA, 25 bp, Artificial
  probe
  misc_feature (1)..(25): SEQ ID NO: 1461; WAN024GCX_at; Start 342; Stop 366
cgtgcgcctctggatcctttgctaa

SEQ ID NO: 240450 - DNA, 25 bp, Artificial
  probe
  misc_feature (1)..(25): SEQ ID NO: 1461; WAN024GCX_at; Start 273; Stop 297
cataggcatttgtagaaatttcacc

SEQ ID NO: 240451 - DNA, 25 bp, Artificial
  probe
  misc_feature (1)..(25): SEQ ID NO: 1461; WAN024GCX_at; Start 221; Stop 245
ttggtataaccaatctctgcaatgg

SEQ ID NO: 240452 - DNA, 25 bp, Artificial
  probe
  misc_feature (1)..(25): SEQ ID NO: 1461; WAN024GCX_at; Start 172; Stop 196
caaagatgggtgtactcccaccgtc

SEQ ID NO: 240453 - DNA, 25 bp, Artificial
  probe
  misc_feature (1)..(25): SEQ ID NO: 1461; WAN024GCX_at; Start 156; Stop 180
caggagattgttccaccaaagatgg

SEQ ID NO: 240454 - DNA, 25 bp, Artificial
  probe
  misc_feature (1)..(25): SEQ ID NO: 1461; WAN024GCX_at; Start 57; Stop 81
caaacatgagcccttggtcacctgc

SEQ ID NO: 240455 - DNA, 25 bp, Artificial
  probe
  misc_feature (1)..(25): SEQ ID NO: 1461; WAN024GCX_at; Start 72; Stop 96
ggtcacctgctccaatcaagtccag

SEQ ID NO: 240456 - DNA, 25 bp, Artificial
  probe
  misc_feature (1)..(25): SEQ ID NO: 1461; WAN024GCX_at; Start 135; Stop 159
cgttaacaccttgagcgatgtcagg

SEQ ID NO: 240457 - DNA, 25 bp, Artificial
  probe
  misc_feature (1)..(25): SEQ ID NO: 1461; WAN024GCX_at; Start 209; Stop 233
ccatattctgtattggtataaccaa

SEQ ID NO: 240458 - DNA, 25 bp, Artificial
  probe
  misc_feature (1)..(25): SEQ ID NO: 1461; WAN024GCX_at; Start 320; Stop 344
tatacagctgtttcagcagcaacgt

SEQ ID NO: 240459 - DNA, 25 bp, Artificial
  probe
  misc_feature (1)..(25): SEQ ID NO: 1461; WAN024GCX_at; Start 44; Stop 68
tctactgcaaatccaaacatgagcc

SEQ ID NO: 240460 - DNA, 25 bp, Artificial
  probe
  misc_feature (1)..(25): SEQ ID NO: 1461; WAN024GCX_at; Start 200; Stop 224
gcagaaaatccatattctgtattgg

SEQ ID NO: 240461 - DNA, 25 bp, Artificial
  probe
  misc_feature (1)..(25): SEQ ID NO: 1461; WAN024GCX_at; Start 293; Stop 317
tcaccaaaaacgtggacagaaccag

SEQ ID NO: 240462 - DNA, 25 bp, Artificial
  probe
  misc_feature (1)..(25): SEQ ID NO: 1461; WAN024GCX_at; Start 190; Stop 214
caccgtctcagcagaaaatccatat

SEQ ID NO: 240463 - DNA, 25 bp, Artificial
  probe
  misc_feature (1)..(25): SEQ ID NO: 1461; WAN024GCX_at; Start 258; Stop 282
cacggttaatatccacataggcatt

SEQ ID NO: 240464 - DNA, 25 bp, Artificial
  probe
  misc_feature (1)..(25): SEQ ID NO: 1461; WAN024GCX_at; Start 338; Stop 362
gcaacgtgcgcctctggatcctttg

SEQ ID NO: 240465 - DNA, 25 bp, Artificial
  probe
  misc_feature (1)..(25): SEQ ID NO: 1461; WAN024GCX_at; Start 231; Stop 255
caatctctgcaatggtatcacgaac

SEQ ID NO: 240466 - DNA, 25 bp, Artificial
  probe
  misc_feature (1)..(25): SEQ ID NO: 1461; WAN024GCX_at; Start 19; Stop 43
caatggcataagctcttctgtttca

SEQ ID NO: 240467 - DNA, 25 bp, Artificial
  probe
  misc_feature (1)..(25): SEQ ID NO: 1461; WAN024GCX_at; Start 93; Stop 117
ccagtggatcttgatcagcatttcc

SEQ ID NO: 240468 - DNA, 25 bp, Artificial
  probe
  misc_feature (1)..(25): SEQ ID NO: 1461; WAN024GCX_at; Start 2; Stop 26
tgactgagtgcaattggcaatggca

SEQ ID NO: 240469 - DNA, 25 bp, Artificial
  probe
  misc_feature (1)..(25): SEQ ID NO: 1461; WAN024GCX_at; Start 10; Stop 34
tgcaattggcaatggcataagctct

SEQ ID NO: 240470 - DNA, 25 bp, Artificial
  probe
  misc_feature (1)..(25): SEQ ID NO: 1461; WAN024GCX_at; Start 328; Stop 352
tgtttcagcagcaacgtgcgcctct

SEQ ID NO: 240471 - DNA, 25 bp, Artificial
  probe
  misc_feature (1)..(25): SEQ ID NO: 2861; WAN024GCY_at; Start 1114; Stop 1138
cacatgggacgtacagatattgatc

SEQ ID NO: 240472 - DNA, 25 bp, Artificial
  probe
  misc_feature (1)..(25): SEQ ID NO: 2861; WAN024GCY_at; Start 1031; Stop 1055
aaatctttgaccttcgccctgcagg

SEQ ID NO: 240473 - DNA, 25 bp, Artificial
  probe
  misc_feature (1)..(25): SEQ ID NO: 2861; WAN024GCY_at; Start 937; Stop 961
tatgctatcggtgttgcgcaacctg

SEQ ID NO: 240474 - DNA, 25 bp, Artificial
  probe
  misc_feature (1)..(25): SEQ ID NO: 2861; WAN024GCY_at; Start 1007; Stop 1031
gtcaacttgaaaaagcggctcgtca

SEQ ID NO: 240475 - DNA, 25 bp, Artificial
  probe
  misc_feature (1)..(25): SEQ ID NO: 2861; WAN024GCY_at; Start 546; Stop 570
tgagtacgatgaaaatgaccgtccg

SEQ ID NO: 240476 - DNA, 25 bp, Artificial
  probe
  misc_feature (1)..(25): SEQ ID NO: 2861; WAN024GCY_at; Start 597; Stop 621
tactcagcatgatccagaggccact

SEQ ID NO: 240477 - DNA, 25 bp, Artificial
  probe
  misc_feature (1)..(25): SEQ ID NO: 2861; WAN024GCY_at; Start 912; Stop 936
taagaaggcagaagtgcagttggcc

SEQ ID NO: 240478 - DNA, 25 bp, Artificial
  probe
  misc_feature (1)..(25): SEQ ID NO: 2861; WAN024GCY_at; Start 865; Stop 889
tatgcggctcgctatattgccaaga

SEQ ID NO: 240479 - DNA, 25 bp, Artificial
  probe
  misc_feature (1)..(25): SEQ ID NO: 2861; WAN024GCY_at; Start 284; Stop 308
catctttggtggaacaatctcctga

SEQ ID NO: 240480 - DNA, 25 bp, Artificial
  probe
  misc_feature (1)..(25): SEQ ID NO: 2861; WAN024GCY_at; Start 361; Stop 385
gatccactggacttgattggagcag

SEQ ID NO: 240481 - DNA, 25 bp, Artificial
  probe
  misc_feature (1)..(25): SEQ ID NO: 2861; WAN024GCY_at; Start 701; Stop 725
aattctttatcaatccgacaggtcg

SEQ ID NO: 240482 - DNA, 25 bp, Artificial
  probe
  misc_feature (1)..(25): SEQ ID NO: 2861; WAN024GCY_at; Start 382; Stop 406
gcaggtgaccaagggctcatgtttg

SEQ ID NO: 240483 - DNA, 25 bp, Artificial
  probe
  misc_feature (1)..(25): SEQ ID NO: 2861; WAN024GCY_at; Start 93; Stop 117
tattttagcaaaggatccagaggcg

SEQ ID NO: 240484 - DNA, 25 bp, Artificial
  probe
  misc_feature (1)..(25): SEQ ID NO: 2861; WAN024GCY_at; Start 651; Stop 675
caaggtcatcaaagaagttattcca

SEQ ID NO: 240485 - DNA, 25 bp, Artificial
  probe
  misc_feature (1)..(25): SEQ ID NO: 2861; WAN024GCY_at; Start 346; Stop 370
ggaaatgctgatcaagatccactgg

SEQ ID NO: 240486 - DNA, 25 bp, Artificial
  probe
  misc_feature (1)..(25): SEQ ID NO: 2861; WAN024GCY_at; Start 460; Stop 484
cataaattggttcgtcgtctggcag

SEQ ID NO: 240487 - DNA, 25 bp, Artificial
  probe
  misc_feature (1)..(25): SEQ ID NO: 2861; WAN024GCY_at; Start 799; Stop 823
tactctcgtcatggtggtggtgcct

SEQ ID NO: 240488 - DNA, 25 bp, Artificial
  probe
  misc_feature (1)..(25): SEQ ID NO: 2861; WAN024GCY_at; Start 1127; Stop 1151
cagatattgatcttccatgggaacg

SEQ ID NO: 240489 - DNA, 25 bp, Artificial
  probe
  misc_feature (1)..(25): SEQ ID NO: 2861; WAN024GCY_at; Start 722; Stop 746
gtcgttttgtaatcggtggtcctca

SEQ ID NO: 240490 - DNA, 25 bp, Artificial
  probe
  misc_feature (1)..(25): SEQ ID NO: 2861; WAN024GCY_at; Start 1097; Stop 1121
aaacatcggcttacggtcacatggg

SEQ ID NO: 240491 - DNA, 25 bp, Artificial
  probe
  misc_feature (1)..(25): SEQ ID NO: 2861; WAN024GCY_at; Start 972; Stop 996
tatcgatactttcggtacaggaaca

SEQ ID NO: 240492 - DNA, 25 bp, Artificial
  probe
  misc_feature (1)..(25): SEQ ID NO: 2861; WAN024GCY_at; Start 309; Stop 333
catcgctcaaggtgttaacgaagcc

SEQ ID NO: 240493 - DNA, 25 bp, Artificial
  probe
  misc_feature (1)..(25): SEQ ID NO: 2861; WAN024GCY_at; Start 45; Stop 69
gcatccggataagattgcagaccaa

SEQ ID NO: 240494 - DNA, 25 bp, Artificial
  probe
  misc_feature (1)..(25): SEQ ID NO: 2861; WAN024GCY_at; Start 181; Stop 205
aatgcctatgtggatattaaccgtg

SEQ ID NO: 240495 - DNA, 25 bp, Artificial
  probe
  misc_feature (1)..(25): SEQ ID NO: 2861; WAN024GCY_at; Start 751; Stop 775
gactcaggtttgactggtcgtaaga

SEQ ID NO: 240496 - DNA, 25 bp, Artificial
  probe
  misc_feature (1)..(25): SEQ ID NO: 2861; WAN024GCY_at; Start 502; Stop 526
gaaattagctatctccgtccagatg

SEQ ID NO: 240497 - DNA, 25 bp, Artificial
  probe
  misc_feature (1)..(25): SEQ ID NO: 2861; WAN024GCY_at; Start 474; Stop 498
tcgtctggcagaacttcgtaagtct

SEQ ID NO: 240498 - DNA, 25 bp, Artificial
  probe
  misc_feature (1)..(25): SEQ ID NO: 2861; WAN024GCY_at; Start 218; Stop 242
ccattgcagagattggttataccaa

SEQ ID NO: 240499 - DNA, 25 bp, Artificial
  probe
  misc_feature (1)..(25): SEQ ID NO: 2861; WAN024GCY_at; Start 109; Stop 133
ccagaggcgcacgttgctgctgaaa

SEQ ID NO: 240500 - DNA, 25 bp, Artificial
  probe
  misc_feature (1)..(25): SEQ ID NO: 2861; WAN024GCY_at; Start 20; Stop 44
tcacgtctgaatctgtatctgaggg

SEQ ID NO: 240501 - DNA, 25 bp, Artificial
  probe
  misc_feature (1)..(25): SEQ ID NO: 2861; WAN024GCY_at; Start 259; Stop 283
tctgctgagacggtgggagtacacc

SEQ ID NO: 240502 - DNA, 25 bp, Artificial
  probe
  misc_feature (1)..(25): SEQ ID NO: 2861; WAN024GCY_at; Start 846; Stop 870
ggtggatcgttcagcctcttatgcg

SEQ ID NO: 240503 - DNA, 25 bp, Artificial
  probe
  misc_feature (1)..(25): SEQ ID NO: 2861; WAN024GCY_at; Start 820; Stop 844
gccttctctggtaaagatgcgacta

SEQ ID NO: 240504 - DNA, 25 bp, Artificial
  probe
  misc_feature (1)..(25): SEQ ID NO: 2861; WAN024GCY_at; Start 562; Stop 586
gaccgtccggtacgtgtagatacag

SEQ ID NO: 240505 - DNA, 25 bp, Artificial
  probe
  misc_feature (1)..(25): SEQ ID NO: 5622; WAN024GCZ_at; Start 186; Stop 210
gaatcccatatccaaggtcatatct

SEQ ID NO: 240506 - DNA, 25 bp, Artificial
  probe
  misc_feature (1)..(25): SEQ ID NO: 5622; WAN024GCZ_at; Start 113; Stop 137
ggatagtcgctgagaagaccatgaa

SEQ ID NO: 240507 - DNA, 25 bp, Artificial
  probe
  misc_feature (1)..(25): SEQ ID NO: 5622; WAN024GCZ_at; Start 162; Stop 186
agcaatcttatcaacagtttccaag

SEQ ID NO: 240508 - DNA, 25 bp, Artificial
  probe
  misc_feature (1)..(25): SEQ ID NO: 5622; WAN024GCZ_at; Start 111; Stop 135
tgggatagtcgctgagaagaccatg

SEQ ID NO: 240509 - DNA, 25 bp, Artificial
  probe
  misc_feature (1)..(25): SEQ ID NO: 5622; WAN024GCZ_at; Start 211; Stop 235
gcttcatcaacaacaaatgtcttgg

SEQ ID NO: 240510 - DNA, 25 bp, Artificial
  probe
  misc_feature (1)..(25): SEQ ID NO: 5622; WAN024GCZ_at; Start 59; Stop 83
tctccataacaggatttgataagta

SEQ ID NO: 240511 - DNA, 25 bp, Artificial
  probe
  misc_feature (1)..(25): SEQ ID NO: 5622; WAN024GCZ_at; Start 62; Stop 86
ccataacaggatttgataagtattt

SEQ ID NO: 240512 - DNA, 25 bp, Artificial
  probe
  misc_feature (1)..(25): SEQ ID NO: 5622; WAN024GCZ_at; Start 107; Stop 131
tttgtgggatagtcgctgagaagac

SEQ ID NO: 240513 - DNA, 25 bp, Artificial
  probe
  misc_feature (1)..(25): SEQ ID NO: 5622; WAN024GCZ_at; Start 129; Stop 153
gaccatgaattgcaagtcttttgga

SEQ ID NO: 240514 - DNA, 25 bp, Artificial
  probe
  misc_feature (1)..(25): SEQ ID NO: 5622; WAN024GCZ_at; Start 3; Stop 27
ggtcgaaatcaaccaattatcaatg

SEQ ID NO: 240515 - DNA, 25 bp, Artificial
  probe
  misc_feature (1)..(25): SEQ ID NO: 5622; WAN024GCZ_at; Start 178; Stop 202
gtttccaagaatcccatatccaagg

SEQ ID NO: 240516 - DNA, 25 bp, Artificial
  probe
  misc_feature (1)..(25): SEQ ID NO: 5622; WAN024GCZ_at; Start 183; Stop 207
caagaatcccatatccaaggtcata

SEQ ID NO: 240517 - DNA, 25 bp, Artificial
  probe
  misc_feature (1)..(25): SEQ ID NO: 5622; WAN024GCZ_at; Start 20; Stop 44
tatcaatggtgtcagaaataaccgt

SEQ ID NO: 240518 - DNA, 25 bp, Artificial
  probe
  misc_feature (1)..(25): SEQ ID NO: 5622; WAN024GCZ_at; Start 12; Stop 36
caaccaattatcaatggtgtcagaa

SEQ ID NO: 240519 - DNA, 25 bp, Artificial
  probe
  misc_feature (1)..(25): SEQ ID NO: 5622; WAN024GCZ_at; Start 145; Stop 169
tcttttggaagactgccagcaatct

SEQ ID NO: 240520 - DNA, 25 bp, Artificial
  probe
  misc_feature (1)..(25): SEQ ID NO: 5622; WAN024GCZ_at; Start 159; Stop 183
gccagcaatcttatcaacagtttcc

SEQ ID NO: 240521 - DNA, 25 bp, Artificial
  probe
  misc_feature (1)..(25): SEQ ID NO: 5622; WAN024GCZ_at; Start 93; Stop 117
gaatggttgcagtttttgtgggata

SEQ ID NO: 240522 - DNA, 25 bp, Artificial
  probe
  misc_feature (1)..(25): SEQ ID NO: 5622; WAN024GCZ_at; Start 155; Stop 179
gactgccagcaatcttatcaacagt

SEQ ID NO: 240523 - DNA, 25 bp, Artificial
  probe
  misc_feature (1)..(25): SEQ ID NO: 5622; WAN024GCZ_at; Start 141; Stop 165
caagtcttttggaagactgccagca

SEQ ID NO: 240524 - DNA, 25 bp, Artificial
  probe
  misc_feature (1)..(25): SEQ ID NO: 5622; WAN024GCZ_at; Start 117; Stop 141
agtcgctgagaagaccatgaattgc

SEQ ID NO: 240525 - DNA, 25 bp, Artificial
  probe
  misc_feature (1)..(25): SEQ ID NO: 5622; WAN024GCZ_at; Start 219; Stop 243
aacaacaaatgtcttggctttatga

SEQ ID NO: 240526 - DNA, 25 bp, Artificial
  probe
  misc_feature (1)..(25): SEQ ID NO: 5622; WAN024GCZ_at; Start 80; Stop 104
agtattttttcaagaatggttgcag

SEQ ID NO: 240527 - DNA, 25 bp, Artificial
  probe
  misc_feature (1)..(25): SEQ ID NO: 5622; WAN024GCZ_at; Start 6; Stop 30
cgaaatcaaccaattatcaatggtg

SEQ ID NO: 240528 - DNA, 25 bp, Artificial
  probe
  misc_feature (1)..(25): SEQ ID NO: 5622; WAN024GCZ_at; Start 132; Stop 156
catgaattgcaagtcttttggaaga

SEQ ID NO: 240529 - DNA, 25 bp, Artificial
  probe
  misc_feature (1)..(25): SEQ ID NO: 5622; WAN024GCZ_at; Start 201; Stop 225
ggtcatatctgcttcatcaacaaca

SEQ ID NO: 240530 - DNA, 25 bp, Artificial
  probe
  misc_feature (1)..(25): SEQ ID NO: 5622; WAN024GCZ_at; Start 98; Stop 122
gttgcagtttttgtgggatagtcgc

SEQ ID NO: 240531 - DNA, 25 bp, Artificial
  probe
  misc_feature (1)..(25): SEQ ID NO: 5622; WAN024GCZ_at; Start 198; Stop 222
caaggtcatatctgcttcatcaaca

SEQ ID NO: 240532 - DNA, 25 bp, Artificial
  probe
  misc_feature (1)..(25): SEQ ID NO: 5622; WAN024GCZ_at; Start 170; Stop 194
tatcaacagtttccaagaatcccat

SEQ ID NO: 240533 - DNA, 25 bp, Artificial
  probe
  misc_feature (1)..(25): SEQ ID NO: 5622; WAN024GCZ_at; Start 102; Stop 126
cagtttttgtgggatagtcgctgag

SEQ ID NO: 240534 - DNA, 25 bp, Artificial
  probe
  misc_feature (1)..(25): SEQ ID NO: 5622; WAN024GCZ_at; Start 23; Stop 47
caatggtgtcagaaataaccgtttt

SEQ ID NO: 240535 - DNA, 25 bp, Artificial
  probe
  misc_feature (1)..(25): SEQ ID NO: 5622; WAN024GCZ_at; Start 151; Stop 175
ggaagactgccagcaatcttatcaa

SEQ ID NO: 240536 - DNA, 25 bp, Artificial
  probe
  misc_feature (1)..(25): SEQ ID NO: 5622; WAN024GCZ_at; Start 214; Stop 238
tcatcaacaacaaatgtcttggctt

SEQ ID NO: 240537 - DNA, 25 bp, Artificial
  probe
  misc_feature (1)..(25): SEQ ID NO: 5622; WAN024GCZ_at; Start 49; Stop 73
gtcttaattttctccataacaggat

SEQ ID NO: 240538 - DNA, 25 bp, Artificial
  probe
  misc_feature (1)..(25): SEQ ID NO: 5622; WAN024GCZ_at; Start 192; Stop 216
catatccaaggtcatatctgcttca

SEQ ID NO: 240539 - DNA, 25 bp, Artificial
  probe
  misc_feature (1)..(25): SEQ ID NO: 5532; WAN024GD2_at; Start 172; Stop 196
tttctcacggttggcacgacgatca

SEQ ID NO: 240540 - DNA, 25 bp, Artificial
  probe
  misc_feature (1)..(25): SEQ ID NO: 5532; WAN024GD2_at; Start 274; Stop 298
gatatccgagtcatcacttggctga

SEQ ID NO: 240541 - DNA, 25 bp, Artificial
  probe
  misc_feature (1)..(25): SEQ ID NO: 5532; WAN024GD2_at; Start 22; Stop 46
tgcacgaccgcgagcgcgattttca

SEQ ID NO: 240542 - DNA, 25 bp, Artificial
  probe
  misc_feature (1)..(25): SEQ ID NO: 5532; WAN024GD2_at; Start 234; Stop 258
tcttaggactaaacttgattcccaa

SEQ ID NO: 240543 - DNA, 25 bp, Artificial
  probe
  misc_feature (1)..(25): SEQ ID NO: 5532; WAN024GD2_at; Start 7; Stop 31
tttagctttacgctctgcacgaccg

SEQ ID NO: 240544 - DNA, 25 bp, Artificial
  probe
  misc_feature (1)..(25): SEQ ID NO: 5532; WAN024GD2_at; Start 13; Stop 37
tttacgctctgcacgaccgcgagcg

SEQ ID NO: 240545 - DNA, 25 bp, Artificial
  probe
  misc_feature (1)..(25): SEQ ID NO: 5532; WAN024GD2_at; Start 294; Stop 318
gctgataaagggtaatagctgtacc

SEQ ID NO: 240546 - DNA, 25 bp, Artificial
  probe
  misc_feature (1)..(25): SEQ ID NO: 5532; WAN024GD2_at; Start 300; Stop 324
aaagggtaatagctgtacctggtag

SEQ ID NO: 240547 - DNA, 25 bp, Artificial
  probe
  misc_feature (1)..(25): SEQ ID NO: 5532; WAN024GD2_at; Start 189; Stop 213
gacgatcacggtcataggtatcttg

SEQ ID NO: 240548 - DNA, 25 bp, Artificial
  probe
  misc_feature (1)..(25): SEQ ID NO: 5532; WAN024GD2_at; Start 198; Stop 222
ggtcataggtatcttgaaattcccc

SEQ ID NO: 240549 - DNA, 25 bp, Artificial
  probe
  misc_feature (1)..(25): SEQ ID NO: 5532; WAN024GD2_at; Start 179; Stop 203
cggttggcacgacgatcacggtcat

SEQ ID NO: 240550 - DNA, 25 bp, Artificial
  probe
  misc_feature (1)..(25): SEQ ID NO: 5532; WAN024GD2_at; Start 27; Stop 51
gaccgcgagcgcgattttcagcacg

SEQ ID NO: 240551 - DNA, 25 bp, Artificial
  probe
  misc_feature (1)..(25): SEQ ID NO: 5532; WAN024GD2_at; Start 30; Stop 54
cgcgagcgcgattttcagcacgctt

SEQ ID NO: 240552 - DNA, 25 bp, Artificial
  probe
  misc_feature (1)..(25): SEQ ID NO: 5532; WAN024GD2_at; Start 64; Stop 88
gcgcttttcatcaaccgcccattga

SEQ ID NO: 240553 - DNA, 25 bp, Artificial
  probe
  misc_feature (1)..(25): SEQ ID NO: 5532; WAN024GD2_at; Start 284; Stop 308
tcatcacttggctgataaagggtaa

SEQ ID NO: 240554 - DNA, 25 bp, Artificial
  probe
  misc_feature (1)..(25): SEQ ID NO: 5532; WAN024GD2_at; Start 263; Stop 287
tccaactcacggatatccgagtcat

SEQ ID NO: 240555 - DNA, 25 bp, Artificial
  probe
  misc_feature (1)..(25): SEQ ID NO: 5532; WAN024GD2_at; Start 184; Stop 208
ggcacgacgatcacggtcataggta

SEQ ID NO: 240556 - DNA, 25 bp, Artificial
  probe
  misc_feature (1)..(25): SEQ ID NO: 5532; WAN024GD2_at; Start 71; Stop 95
tcatcaaccgcccattgaattttct

SEQ ID NO: 240557 - DNA, 25 bp, Artificial
  probe
  misc_feature (1)..(25): SEQ ID NO: 5532; WAN024GD2_at; Start 83; Stop 107
cattgaattttcttcttataacccg

SEQ ID NO: 240558 - DNA, 25 bp, Artificial
  probe
  misc_feature (1)..(25): SEQ ID NO: 5532; WAN024GD2_at; Start 192; Stop 216
gatcacggtcataggtatcttgaaa

SEQ ID NO: 240559 - DNA, 25 bp, Artificial
  probe
  misc_feature (1)..(25): SEQ ID NO: 5532; WAN024GD2_at; Start 156; Stop 180
caagtttatcttgttttttctcacg

SEQ ID NO: 240560 - DNA, 25 bp, Artificial
  probe
  misc_feature (1)..(25): SEQ ID NO: 5532; WAN024GD2_at; Start 130; Stop 154
tttaaccaaaccaatcatttcgata

SEQ ID NO: 240561 - DNA, 25 bp, Artificial
  probe
  misc_feature (1)..(25): SEQ ID NO: 5532; WAN024GD2_at; Start 224; Stop 248
tctttgaccatcttaggactaaact

SEQ ID NO: 240562 - DNA, 25 bp, Artificial
  probe
  misc_feature (1)..(25): SEQ ID NO: 5532; WAN024GD2_at; Start 57; Stop 81
ttttacggcgcttttcatcaaccgc

SEQ ID NO: 240563 - DNA, 25 bp, Artificial
  probe
  misc_feature (1)..(25): SEQ ID NO: 5532; WAN024GD2_at; Start 1; Stop 25
ttggcgtttagctttacgctctgca

SEQ ID NO: 240564 - DNA, 25 bp, Artificial
  probe
  misc_feature (1)..(25): SEQ ID NO: 5532; WAN024GD2_at; Start 259; Stop 283
tttctccaactcacggatatccgag

SEQ ID NO: 240565 - DNA, 25 bp, Artificial
  probe
  misc_feature (1)..(25): SEQ ID NO: 5532; WAN024GD2_at; Start 281; Stop 305
gagtcatcacttggctgataaaggg

SEQ ID NO: 240566 - DNA, 25 bp, Artificial
  probe
  misc_feature (1)..(25): SEQ ID NO: 5532; WAN024GD2_at; Start 169; Stop 193
ttttttctcacggttggcacgacga

SEQ ID NO: 240567 - DNA, 25 bp, Artificial
  probe
  misc_feature (1)..(25): SEQ ID NO: 5532; WAN024GD2_at; Start 164; Stop 188
tcttgttttttctcacggttggcac

SEQ ID NO: 240568 - DNA, 25 bp, Artificial
  probe
  misc_feature (1)..(25): SEQ ID NO: 5532; WAN024GD2_at; Start 136; Stop 160
caaaccaatcatttcgatatcaagt

SEQ ID NO: 240569 - DNA, 25 bp, Artificial
  probe
  misc_feature (1)..(25): SEQ ID NO: 5532; WAN024GD2_at; Start 288; Stop 312
cacttggctgataaagggtaatagc

SEQ ID NO: 240570 - DNA, 25 bp, Artificial
  probe
  misc_feature (1)..(25): SEQ ID NO: 5532; WAN024GD2_at; Start 250; Stop 274
gattcccaatttctccaactcacgg

SEQ ID NO: 240571 - DNA, 25 bp, Artificial
  probe
  misc_feature (1)..(25): SEQ ID NO: 5532; WAN024GD2_at; Start 141; Stop 165
caatcatttcgatatcaagtttatc

SEQ ID NO: 240572 - DNA, 25 bp, Artificial
  probe
  misc_feature (1)..(25): SEQ ID NO: 5532; WAN024GD2_at; Start 270; Stop 294
cacggatatccgagtcatcacttgg

SEQ ID NO: 240573 - DNA, 25 bp, Artificial
  probe
  misc_feature (1)..(25): SEQ ID NO: 2880; WAN024GD3_at; Start 215; Stop 239
cagtgattactgcaccgagtcgtga

SEQ ID NO: 240574 - DNA, 25 bp, Artificial
  probe
  misc_feature (1)..(25): SEQ ID NO: 2880; WAN024GD3_at; Start 502; Stop 526
gataagattgctggcagtcttccaa

SEQ ID NO: 240575 - DNA, 25 bp, Artificial
  probe
  misc_feature (1)..(25): SEQ ID NO: 2880; WAN024GD3_at; Start 249; Stop 273
tcaaatttaccaagtagcgcgtcag

SEQ ID NO: 240576 - DNA, 25 bp, Artificial
  probe
  misc_feature (1)..(25): SEQ ID NO: 2880; WAN024GD3_at; Start 823; Stop 847
gatattgcccctcgtgaacgcaagc

SEQ ID NO: 240577 - DNA, 25 bp, Artificial
  probe
  misc_feature (1)..(25): SEQ ID NO: 2880; WAN024GD3_at; Start 471; Stop 495
gaccttggatatgggattcttggaa

SEQ ID NO: 240578 - DNA, 25 bp, Artificial
  probe
  misc_feature (1)..(25): SEQ ID NO: 2880; WAN024GD3_at; Start 925; Stop 949
gaaggtgtcagccatgtcatcaatg

SEQ ID NO: 240579 - DNA, 25 bp, Artificial
  probe
  misc_feature (1)..(25): SEQ ID NO: 2880; WAN024GD3_at; Start 280; Stop 304
gctcactcagatgtcgaagttcgtg

SEQ ID NO: 240580 - DNA, 25 bp, Artificial
  probe
  misc_feature (1)..(25): SEQ ID NO: 2880; WAN024GD3_at; Start 450; Stop 474
tgttgttgatgaagcagatatgacc

SEQ ID NO: 240581 - DNA, 25 bp, Artificial
  probe
  misc_feature (1)..(25): SEQ ID NO: 2880; WAN024GD3_at; Start 265; Stop 289
gcgcgtcagatttcagctcactcag

SEQ ID NO: 240582 - DNA, 25 bp, Artificial
  probe
  misc_feature (1)..(25): SEQ ID NO: 2880; WAN024GD3_at; Start 1038; Stop 1062
tcagccaagtgatgactcggatatc

SEQ ID NO: 240583 - DNA, 25 bp, Artificial
  probe
  misc_feature (1)..(25): SEQ ID NO: 2880; WAN024GD3_at; Start 1062; Stop 1086
ccgtgagttggagaaattgggaatc

SEQ ID NO: 240584 - DNA, 25 bp, Artificial
  probe
  misc_feature (1)..(25): SEQ ID NO: 2880; WAN024GD3_at; Start 1001; Stop 1025
gacgaaatggcctaccaggtacagc

SEQ ID NO: 240585 - DNA, 25 bp, Artificial
  probe
  misc_feature (1)..(25): SEQ ID NO: 2880; WAN024GD3_at; Start 98; Stop 122
ctattgttttggcaggtcgtgacct

SEQ ID NO: 240586 - DNA, 25 bp, Artificial
  probe
  misc_feature (1)..(25): SEQ ID NO: 2880; WAN024GD3_at; Start 178; Stop 202
ttccagcaattagatgaagctagcg

SEQ ID NO: 240587 - DNA, 25 bp, Artificial
  probe
  misc_feature (1)..(25): SEQ ID NO: 2880; WAN024GD3_at; Start 372; Stop 396
tattgttattggaacaccaggccgt

SEQ ID NO: 240588 - DNA, 25 bp, Artificial
  probe
  misc_feature (1)..(25): SEQ ID NO: 2880; WAN024GD3_at; Start 1285; Stop 1309
cgtgctgaaaatcgcgctcgcggtc

SEQ ID NO: 240589 - DNA, 25 bp, Artificial
  probe
  misc_feature (1)..(25): SEQ ID NO: 2880; WAN024GD3_at; Start 940; Stop 964
gtcatcaatgatgccattccgcaag

SEQ ID NO: 240590 - DNA, 25 bp, Artificial
  probe
  misc_feature (1)..(25): SEQ ID NO: 2880; WAN024GD3_at; Start 708; Stop 732
gactcagttgatgcagccgtatttg

SEQ ID NO: 240591 - DNA, 25 bp, Artificial
  probe
  misc_feature (1)..(25): SEQ ID NO: 2880; WAN024GD3_at; Start 534; Stop 558
gcaattcatggtcttctcagcgact

SEQ ID NO: 240592 - DNA, 25 bp, Artificial
  probe
  misc_feature (1)..(25): SEQ ID NO: 2880; WAN024GD3_at; Start 1132; Stop 1156
tatgaccgtgatcgtcgtgccaacc

SEQ ID NO: 240593 - DNA, 25 bp, Artificial
  probe
  misc_feature (1)..(25): SEQ ID NO: 2880; WAN024GD3_at; Start 1248; Stop 1272
tcaatgggcggttgatgaaaagcgc

SEQ ID NO: 240594 - DNA, 25 bp, Artificial
  probe
  misc_feature (1)..(25): SEQ ID NO: 2880; WAN024GD3_at; Start 838; Stop 862
gaacgcaagcgaatcatgaatcagg

SEQ ID NO: 240595 - DNA, 25 bp, Artificial
  probe
  misc_feature (1)..(25): SEQ ID NO: 2880; WAN024GD3_at; Start 781; Stop 805
tatctgactgctcaaggcttgaagg

SEQ ID NO: 240596 - DNA, 25 bp, Artificial
  probe
  misc_feature (1)..(25): SEQ ID NO: 2880; WAN024GD3_at; Start 1305; Stop 1329
cggtcgtgcagagcgtaaagctaaa

SEQ ID NO: 240597 - DNA, 25 bp, Artificial
  probe
  misc_feature (1)..(25): SEQ ID NO: 2880; WAN024GD3_at; Start 227; Stop 251
caccgagtcgtgagttggctactca

SEQ ID NO: 240598 - DNA, 25 bp, Artificial
  probe
  misc_feature (1)..(25): SEQ ID NO: 2880; WAN024GD3_at; Start 1149; Stop 1173
tgccaaccgtgagaaaaaacaagat

SEQ ID NO: 240599 - DNA, 25 bp, Artificial
  probe
  misc_feature (1)..(25): SEQ ID NO: 2880; WAN024GD3_at; Start 742; Stop 766
tttgttaacactaaaacgcgtgctg

SEQ ID NO: 240600 - DNA, 25 bp, Artificial
  probe
  misc_feature (1)..(25): SEQ ID NO: 2880; WAN024GD3_at; Start 61; Stop 85
tttacaactccaacagaggtgcaag

SEQ ID NO: 240601 - DNA, 25 bp, Artificial
  probe
  misc_feature (1)..(25): SEQ ID NO: 2880; WAN024GD3_at; Start 797; Stop 821
gcttgaaggttgcaaaaatccatgg

SEQ ID NO: 240602 - DNA, 25 bp, Artificial
  probe
  misc_feature (1)..(25): SEQ ID NO: 2880; WAN024GD3_at; Start 659; Stop 683
ggttgatttcgaccaagggacatga

SEQ ID NO: 240603 - DNA, 25 bp, Artificial
  probe
  misc_feature (1)..(25): SEQ ID NO: 2880; WAN024GD3_at; Start 134; Stop 158
caaaaacaggttcaggtaagactca

SEQ ID NO: 240604 - DNA, 25 bp, Artificial
  probe
  misc_feature (1)..(25): SEQ ID NO: 2880; WAN024GD3_at; Start 1117; Stop 1141
gaatttcaagatacctatgaccgtg

SEQ ID NO: 240605 - DNA, 25 bp, Artificial
  probe
  misc_feature (1)..(25): SEQ ID NO: 2880; WAN024GD3_at; Start 756; Stop 780
aacgcgtgctgatgaattgcattca

SEQ ID NO: 240606 - DNA, 25 bp, Artificial
  probe
  misc_feature (1)..(25): SEQ ID NO: 2880; WAN024GD3_at; Start 389; Stop 413
caggccgtatctacgacttggttaa

SEQ ID NO: 240607 - DNA, 25 bp, Artificial
  probe
  misc_feature (1)..(25): SEQ ID NO: 2720; WAN024GD4_at; Start 152; Stop 176
tactgcaaatccatcacccatcatt

SEQ ID NO: 240608 - DNA, 25 bp, Artificial
  probe
  misc_feature (1)..(25): SEQ ID NO: 2720; WAN024GD4_at; Start 134; Stop 158
gtttccatttgcaggttctactgca

SEQ ID NO: 240609 - DNA, 25 bp, Artificial
  probe
  misc_feature (1)..(25): SEQ ID NO: 2720; WAN024GD4_at; Start 108; Stop 132
acagtacctgaaactggagatacaa

SEQ ID NO: 240610 - DNA, 25 bp, Artificial
  probe
  misc_feature (1)..(25): SEQ ID NO: 2720; WAN024GD4_at; Start 112; Stop 136
tacctgaaactggagatacaatgtt

SEQ ID NO: 240611 - DNA, 25 bp, Artificial
  probe
  misc_feature (1)..(25): SEQ ID NO: 2720; WAN024GD4_at; Start 2; Stop 26
tggtttaccttcaagacttactgtg

SEQ ID NO: 240612 - DNA, 25 bp, Artificial
  probe
  misc_feature (1)..(25): SEQ ID NO: 2720; WAN024GD4_at; Start 163; Stop 187
catcacccatcattttttgagcaaa

SEQ ID NO: 240613 - DNA, 25 bp, Artificial
  probe
  misc_feature (1)..(25): SEQ ID NO: 2720; WAN024GD4_at; Start 147; Stop 171
ggttctactgcaaatccatcaccca

SEQ ID NO: 240614 - DNA, 25 bp, Artificial
  probe
  misc_feature (1)..(25): SEQ ID NO: 2720; WAN024GD4_at; Start 217; Stop 241
caacttgaccgtctgctactgagta

SEQ ID NO: 240615 - DNA, 25 bp, Artificial
  probe
  misc_feature (1)..(25): SEQ ID NO: 2720; WAN024GD4_at; Start 204; Stop 228
tgttccaaagcaacaacttgaccgt

SEQ ID NO: 240616 - DNA, 25 bp, Artificial
  probe
  misc_feature (1)..(25): SEQ ID NO: 2720; WAN024GD4_at; Start 44; Stop 68
caatacttcaagacctgcttccgtc

SEQ ID NO: 240617 - DNA, 25 bp, Artificial
  probe
  misc_feature (1)..(25): SEQ ID NO: 2720; WAN024GD4_at; Start 173; Stop 197
cattttttgagcaaatactggatcc

SEQ ID NO: 240618 - DNA, 25 bp, Artificial
  probe
  misc_feature (1)..(25): SEQ ID NO: 2720; WAN024GD4_at; Start 65; Stop 89
cgtcacaataccaaaagcatgtttt

SEQ ID NO: 240619 - DNA, 25 bp, Artificial
  probe
  misc_feature (1)..(25): SEQ ID NO: 2720; WAN024GD4_at; Start 207; Stop 231
tccaaagcaacaacttgaccgtctg

SEQ ID NO: 240620 - DNA, 25 bp, Artificial
  probe
  misc_feature (1)..(25): SEQ ID NO: 2720; WAN024GD4_at; Start 130; Stop 154
caatgtttccatttgcaggttctac

SEQ ID NO: 240621 - DNA, 25 bp, Artificial
  probe
  misc_feature (1)..(25): SEQ ID NO: 2720; WAN024GD4_at; Start 27; Stop 51
tccaaaccaatgtgaaccaatactt

SEQ ID NO: 240622 - DNA, 25 bp, Artificial
  probe
  misc_feature (1)..(25): SEQ ID NO: 2720; WAN024GD4_at; Start 16; Stop 40
gacttactgtgtccaaaccaatgtg

SEQ ID NO: 240623 - DNA, 25 bp, Artificial
  probe
  misc_feature (1)..(25): SEQ ID NO: 2720; WAN024GD4_at; Start 12; Stop 36
tcaagacttactgtgtccaaaccaa

SEQ ID NO: 240624 - DNA, 25 bp, Artificial
  probe
  misc_feature (1)..(25): SEQ ID NO: 2720; WAN024GD4_at; Start 81; Stop 105
gcatgttttgttgggaagatgcttg

SEQ ID NO: 240625 - DNA, 25 bp, Artificial
  probe
  misc_feature (1)..(25): SEQ ID NO: 2720; WAN024GD4_at; Start 55; Stop 79
gacctgcttccgtcacaataccaaa

SEQ ID NO: 240626 - DNA, 25 bp, Artificial
  probe
  misc_feature (1)..(25): SEQ ID NO: 2720; WAN024GD4_at; Start 75; Stop 99
ccaaaagcatgttttgttgggaaga

SEQ ID NO: 240627 - DNA, 25 bp, Artificial
  probe
  misc_feature (1)..(25): SEQ ID NO: 2720; WAN024GD4_at; Start 47; Stop 71
tacttcaagacctgcttccgtcaca

SEQ ID NO: 240628 - DNA, 25 bp, Artificial
  probe
  misc_feature (1)..(25): SEQ ID NO: 2720; WAN024GD4_at; Start 51; Stop 75
tcaagacctgcttccgtcacaatac

SEQ ID NO: 240629 - DNA, 25 bp, Artificial
  probe
  misc_feature (1)..(25): SEQ ID NO: 2720; WAN024GD4_at; Start 192; Stop 216
ggatcctttacttgttccaaagcaa

SEQ ID NO: 240630 - DNA, 25 bp, Artificial
  probe
  misc_feature (1)..(25): SEQ ID NO: 2720; WAN024GD4_at; Start 62; Stop 86
ttccgtcacaataccaaaagcatgt

SEQ ID NO: 240631 - DNA, 25 bp, Artificial
  probe
  misc_feature (1)..(25): SEQ ID NO: 2720; WAN024GD4_at; Start 37; Stop 61
tgtgaaccaatacttcaagacctgc

SEQ ID NO: 240632 - DNA, 25 bp, Artificial
  probe
  misc_feature (1)..(25): SEQ ID NO: 2720; WAN024GD4_at; Start 124; Stop 148
gagatacaatgtttccatttgcagg

SEQ ID NO: 240633 - DNA, 25 bp, Artificial
  probe
  misc_feature (1)..(25): SEQ ID NO: 2720; WAN024GD4_at; Start 213; Stop 237
gcaacaacttgaccgtctgctactg

SEQ ID NO: 240634 - DNA, 25 bp, Artificial
  probe
  misc_feature (1)..(25): SEQ ID NO: 2720; WAN024GD4_at; Start 220; Stop 244
cttgaccgtctgctactgagtaaac

SEQ ID NO: 240635 - DNA, 25 bp, Artificial
  probe
  misc_feature (1)..(25): SEQ ID NO: 2720; WAN024GD4_at; Start 231; Stop 255
gctactgagtaaacttcctcagtaa

SEQ ID NO: 240636 - DNA, 25 bp, Artificial
  probe
  misc_feature (1)..(25): SEQ ID NO: 2720; WAN024GD4_at; Start 23; Stop 47
tgtgtccaaaccaatgtgaaccaat

SEQ ID NO: 240637 - DNA, 25 bp, Artificial
  probe
  misc_feature (1)..(25): SEQ ID NO: 2720; WAN024GD4_at; Start 7; Stop 31
taccttcaagacttactgtgtccaa

SEQ ID NO: 240638 - DNA, 25 bp, Artificial
  probe
  misc_feature (1)..(25): SEQ ID NO: 2720; WAN024GD4_at; Start 227; Stop 251
gtctgctactgagtaaacttcctca

SEQ ID NO: 240639 - DNA, 25 bp, Artificial
  probe
  misc_feature (1)..(25): SEQ ID NO: 2720; WAN024GD4_at; Start 20; Stop 44
tactgtgtccaaaccaatgtgaacc

SEQ ID NO: 240640 - DNA, 25 bp, Artificial
  probe
  misc_feature (1)..(25): SEQ ID NO: 2720; WAN024GD4_at; Start 181; Stop 205
gagcaaatactggatcctttacttg

SEQ ID NO: 240641 - DNA, 25 bp, Artificial
  probe
  misc_feature (1)..(25): SEQ ID NO: 5488; WAN024GD5_at; Start 3; Stop 27
ggatatcagatttcaaaatgtcagc

SEQ ID NO: 240642 - DNA, 25 bp, Artificial
  probe
  misc_feature (1)..(25): SEQ ID NO: 5488; WAN024GD5_at; Start 141; Stop 165
gaagacgagtcatacatgcatcaac

SEQ ID NO: 240643 - DNA, 25 bp, Artificial
  probe
  misc_feature (1)..(25): SEQ ID NO: 5488; WAN024GD5_at; Start 27; Stop 51
cttttggaccgtagatagcttgaac

SEQ ID NO: 240644 - DNA, 25 bp, Artificial
  probe
  misc_feature (1)..(25): SEQ ID NO: 5488; WAN024GD5_at; Start 198; Stop 222
tgataatgtttacagcttgagagcc

SEQ ID NO: 240645 - DNA, 25 bp, Artificial
  probe
  misc_feature (1)..(25): SEQ ID NO: 5488; WAN024GD5_at; Start 172; Stop 196
gatgtttacacgtccaccaagaagg

SEQ ID NO: 240646 - DNA, 25 bp, Artificial
  probe
  misc_feature (1)..(25): SEQ ID NO: 5488; WAN024GD5_at; Start 21; Stop 45
tgtcagcttttggaccgtagatagc

SEQ ID NO: 240647 - DNA, 25 bp, Artificial
  probe
  misc_feature (1)..(25): SEQ ID NO: 5488; WAN024GD5_at; Start 42; Stop 66
tagcttgaaccccttgtcctttcat

SEQ ID NO: 240648 - DNA, 25 bp, Artificial
  probe
  misc_feature (1)..(25): SEQ ID NO: 5488; WAN024GD5_at; Start 189; Stop 213
caagaaggttgataatgtttacagc

SEQ ID NO: 240649 - DNA, 25 bp, Artificial
  probe
  misc_feature (1)..(25): SEQ ID NO: 5488; WAN024GD5_at; Start 234; Stop 258
tcacttcgctgctggtttcttctga

SEQ ID NO: 240650 - DNA, 25 bp, Artificial
  probe
  misc_feature (1)..(25): SEQ ID NO: 5488; WAN024GD5_at; Start 218; Stop 242
gagcctgctgcaactttcacttcgc

SEQ ID NO: 240651 - DNA, 25 bp, Artificial
  probe
  misc_feature (1)..(25): SEQ ID NO: 5488; WAN024GD5_at; Start 69; Stop 93
caagacccatagctccttctgcttt

SEQ ID NO: 240652 - DNA, 25 bp, Artificial
  probe
  misc_feature (1)..(25): SEQ ID NO: 5488; WAN024GD5_at; Start 17; Stop 41
aaaatgtcagcttttggaccgtaga

SEQ ID NO: 240653 - DNA, 25 bp, Artificial
  probe
  misc_feature (1)..(25): SEQ ID NO: 5488; WAN024GD5_at; Start 168; Stop 192
caacgatgtttacacgtccaccaag

SEQ ID NO: 240654 - DNA, 25 bp, Artificial
  probe
  misc_feature (1)..(25): SEQ ID NO: 5488; WAN024GD5_at; Start 201; Stop 225
taatgtttacagcttgagagcctgc

SEQ ID NO: 240655 - DNA, 25 bp, Artificial
  probe
  misc_feature (1)..(25): SEQ ID NO: 5488; WAN024GD5_at; Start 224; Stop 248
gctgcaactttcacttcgctgctgg

SEQ ID NO: 240656 - DNA, 25 bp, Artificial
  probe
  misc_feature (1)..(25): SEQ ID NO: 5488; WAN024GD5_at; Start 104; Stop 128
gcatttcctactttatctgcatctt

SEQ ID NO: 240657 - DNA, 25 bp, Artificial
  probe
  misc_feature (1)..(25): SEQ ID NO: 5488; WAN024GD5_at; Start 30; Stop 54
ttggaccgtagatagcttgaacccc

SEQ ID NO: 240658 - DNA, 25 bp, Artificial
  probe
  misc_feature (1)..(25): SEQ ID NO: 5488; WAN024GD5_at; Start 178; Stop 202
tacacgtccaccaagaaggttgata

SEQ ID NO: 240659 - DNA, 25 bp, Artificial
  probe
  misc_feature (1)..(25): SEQ ID NO: 5488; WAN024GD5_at; Start 33; Stop 57
gaccgtagatagcttgaaccccttg

SEQ ID NO: 240660 - DNA, 25 bp, Artificial
  probe
  misc_feature (1)..(25): SEQ ID NO: 5488; WAN024GD5_at; Start 80; Stop 104
gctccttctgctttccattgctctg

SEQ ID NO: 240661 - DNA, 25 bp, Artificial
  probe
  misc_feature (1)..(25): SEQ ID NO: 5488; WAN024GD5_at; Start 98; Stop 122
tgctctgcatttcctactttatctg

SEQ ID NO: 240662 - DNA, 25 bp, Artificial
  probe
  misc_feature (1)..(25): SEQ ID NO: 5488; WAN024GD5_at; Start 132; Stop 156
cagttacacgaagacgagtcataca

SEQ ID NO: 240663 - DNA, 25 bp, Artificial
  probe
  misc_feature (1)..(25): SEQ ID NO: 5488; WAN024GD5_at; Start 153; Stop 177
tacatgcatcaacatcaacgatgtt

SEQ ID NO: 240664 - DNA, 25 bp, Artificial
  probe
  misc_feature (1)..(25): SEQ ID NO: 5488; WAN024GD5_at; Start 89; Stop 113
gctttccattgctctgcatttccta

SEQ ID NO: 240665 - DNA, 25 bp, Artificial
  probe
  misc_feature (1)..(25): SEQ ID NO: 5488; WAN024GD5_at; Start 182; Stop 206
cgtccaccaagaaggttgataatgt

SEQ ID NO: 240666 - DNA, 25 bp, Artificial
  probe
  misc_feature (1)..(25): SEQ ID NO: 5488; WAN024GD5_at; Start 127; Stop 151
tttaacagttacacgaagacgagtc

SEQ ID NO: 240667 - DNA, 25 bp, Artificial
  probe
  misc_feature (1)..(25): SEQ ID NO: 5488; WAN024GD5_at; Start 136; Stop 160
tacacgaagacgagtcatacatgca

SEQ ID NO: 240668 - DNA, 25 bp, Artificial
  probe
  misc_feature (1)..(25): SEQ ID NO: 5488; WAN024GD5_at; Start 176; Stop 200
tttacacgtccaccaagaaggttga

SEQ ID NO: 240669 - DNA, 25 bp, Artificial
  probe
  misc_feature (1)..(25): SEQ ID NO: 5488; WAN024GD5_at; Start 147; Stop 171
gagtcatacatgcatcaacatcaac

SEQ ID NO: 240670 - DNA, 25 bp, Artificial
  probe
  misc_feature (1)..(25): SEQ ID NO: 5488; WAN024GD5_at; Start 37; Stop 61
gtagatagcttgaaccccttgtcct

SEQ ID NO: 240671 - DNA, 25 bp, Artificial
  probe
  misc_feature (1)..(25): SEQ ID NO: 5488; WAN024GD5_at; Start 205; Stop 229
gtttacagcttgagagcctgctgca

SEQ ID NO: 240672 - DNA, 25 bp, Artificial
  probe
  misc_feature (1)..(25): SEQ ID NO: 5488; WAN024GD5_at; Start 227; Stop 251
gcaactttcacttcgctgctggttt

SEQ ID NO: 240673 - DNA, 25 bp, Artificial
  probe
  misc_feature (1)..(25): SEQ ID NO: 5488; WAN024GD5_at; Start 117; Stop 141
tatctgcatctttaacagttacacg

SEQ ID NO: 240674 - DNA, 25 bp, Artificial
  probe
  misc_feature (1)..(25): SEQ ID NO: 5488; WAN024GD5_at; Start 212; Stop 236
gcttgagagcctgctgcaactttca

SEQ ID NO: 240675 - DNA, 25 bp, Artificial
  probe
  misc_feature (1)..(25): SEQ ID NO: 5159; WAN024GD6_at; Start 140; Stop 164
taattgcatcaccatttgtgaagac

SEQ ID NO: 240676 - DNA, 25 bp, Artificial
  probe
  misc_feature (1)..(25): SEQ ID NO: 5159; WAN024GD6_at; Start 131; Stop 155
taactgatttaattgcatcaccatt

SEQ ID NO: 240677 - DNA, 25 bp, Artificial
  probe
  misc_feature (1)..(25): SEQ ID NO: 5159; WAN024GD6_at; Start 53; Stop 77
gcttccaacctcaagtatattacaa

SEQ ID NO: 240678 - DNA, 25 bp, Artificial
  probe
  misc_feature (1)..(25): SEQ ID NO: 5159; WAN024GD6_at; Start 49; Stop 73
tacagcttccaacctcaagtatatt

SEQ ID NO: 240679 - DNA, 25 bp, Artificial
  probe
  misc_feature (1)..(25): SEQ ID NO: 5159; WAN024GD6_at; Start 136; Stop 160
gatttaattgcatcaccatttgtga

SEQ ID NO: 240680 - DNA, 25 bp, Artificial
  probe
  misc_feature (1)..(25): SEQ ID NO: 5159; WAN024GD6_at; Start 89; Stop 113
caactgctgttttagctgcaagaga

SEQ ID NO: 240681 - DNA, 25 bp, Artificial
  probe
  misc_feature (1)..(25): SEQ ID NO: 5159; WAN024GD6_at; Start 148; Stop 172
tcaccatttgtgaagacaactactg

SEQ ID NO: 240682 - DNA, 25 bp, Artificial
  probe
  misc_feature (1)..(25): SEQ ID NO: 5159; WAN024GD6_at; Start 58; Stop 82
caacctcaagtatattacaattcta

SEQ ID NO: 240683 - DNA, 25 bp, Artificial
  probe
  misc_feature (1)..(25): SEQ ID NO: 5159; WAN024GD6_at; Start 178; Stop 202
gtttcacgtcctgctgcacggatag

SEQ ID NO: 240684 - DNA, 25 bp, Artificial
  probe
  misc_feature (1)..(25): SEQ ID NO: 5159; WAN024GD6_at; Start 240; Stop 264
aactttttgtccttcagcaacatga

SEQ ID NO: 240685 - DNA, 25 bp, Artificial
  probe
  misc_feature (1)..(25): SEQ ID NO: 5159; WAN024GD6_at; Start 36; Stop 60
taagaggttggaatacagcttccaa

SEQ ID NO: 240686 - DNA, 25 bp, Artificial
  probe
  misc_feature (1)..(25): SEQ ID NO: 5159; WAN024GD6_at; Start 104; Stop 128
ctgcaagagaacctgttttttctaa

SEQ ID NO: 240687 - DNA, 25 bp, Artificial
  probe
  misc_feature (1)..(25): SEQ ID NO: 5159; WAN024GD6_at; Start 175; Stop 199
gaagtttcacgtcctgctgcacgga

SEQ ID NO: 240688 - DNA, 25 bp, Artificial
  probe
  misc_feature (1)..(25): SEQ ID NO: 5159; WAN024GD6_at; Start 86; Stop 110
tagcaactgctgttttagctgcaag

SEQ ID NO: 240689 - DNA, 25 bp, Artificial
  probe
  misc_feature (1)..(25): SEQ ID NO: 5159; WAN024GD6_at; Start 17; Stop 41
tcattcttttctcccaaaataagag

SEQ ID NO: 240690 - DNA, 25 bp, Artificial
  probe
  misc_feature (1)..(25): SEQ ID NO: 5159; WAN024GD6_at; Start 31; Stop 55
caaaataagaggttggaatacagct

SEQ ID NO: 240691 - DNA, 25 bp, Artificial
  probe
  misc_feature (1)..(25): SEQ ID NO: 5159; WAN024GD6_at; Start 227; Stop 251
gatctcctgctgcaactttttgtcc

SEQ ID NO: 240692 - DNA, 25 bp, Artificial
  probe
  misc_feature (1)..(25): SEQ ID NO: 5159; WAN024GD6_at; Start 101; Stop 125
tagctgcaagagaacctgttttttc

SEQ ID NO: 240693 - DNA, 25 bp, Artificial
  probe
  misc_feature (1)..(25): SEQ ID NO: 5159; WAN024GD6_at; Start 164; Stop 188
caactactgttgaagtttcacgtcc

SEQ ID NO: 240694 - DNA, 25 bp, Artificial
  probe
  misc_feature (1)..(25): SEQ ID NO: 5159; WAN024GD6_at; Start 237; Stop 261
tgcaactttttgtccttcagcaaca

SEQ ID NO: 240695 - DNA, 25 bp, Artificial
  probe
  misc_feature (1)..(25): SEQ ID NO: 5159; WAN024GD6_at; Start 73; Stop 97
tacaattctactttagcaactgctg

SEQ ID NO: 240696 - DNA, 25 bp, Artificial
  probe
  misc_feature (1)..(25): SEQ ID NO: 5159; WAN024GD6_at; Start 94; Stop 118
gctgttttagctgcaagagaacctg

SEQ ID NO: 240697 - DNA, 25 bp, Artificial
  probe
  misc_feature (1)..(25): SEQ ID NO: 5159; WAN024GD6_at; Start 219; Stop 243
gacaaggagatctcctgctgcaact

SEQ ID NO: 240698 - DNA, 25 bp, Artificial
  probe
  misc_feature (1)..(25): SEQ ID NO: 5159; WAN024GD6_at; Start 171; Stop 195
tgttgaagtttcacgtcctgctgca

SEQ ID NO: 240699 - DNA, 25 bp, Artificial
  probe
  misc_feature (1)..(25): SEQ ID NO: 5159; WAN024GD6_at; Start 145; Stop 169
gcatcaccatttgtgaagacaacta

SEQ ID NO: 240700 - DNA, 25 bp, Artificial
  probe
  misc_feature (1)..(25): SEQ ID NO: 5159; WAN024GD6_at; Start 44; Stop 68
tggaatacagcttccaacctcaagt

SEQ ID NO: 240701 - DNA, 25 bp, Artificial
  probe
  misc_feature (1)..(25): SEQ ID NO: 5159; WAN024GD6_at; Start 152; Stop 176
catttgtgaagacaactactgttga

SEQ ID NO: 240702 - DNA, 25 bp, Artificial
  probe
  misc_feature (1)..(25): SEQ ID NO: 5159; WAN024GD6_at; Start 224; Stop 248
ggagatctcctgctgcaactttttg

SEQ ID NO: 240703 - DNA, 25 bp, Artificial
  probe
  misc_feature (1)..(25): SEQ ID NO: 5159; WAN024GD6_at; Start 181; Stop 205
tcacgtcctgctgcacggatagcat

SEQ ID NO: 240704 - DNA, 25 bp, Artificial
  probe
  misc_feature (1)..(25): SEQ ID NO: 5159; WAN024GD6_at; Start 207; Stop 231
caagtcagctgtgacaaggagatct

SEQ ID NO: 240705 - DNA, 25 bp, Artificial
  probe
  misc_feature (1)..(25): SEQ ID NO: 5159; WAN024GD6_at; Start 211; Stop 235
tcagctgtgacaaggagatctcctg

SEQ ID NO: 240706 - DNA, 25 bp, Artificial
  probe
  misc_feature (1)..(25): SEQ ID NO: 5159; WAN024GD6_at; Start 26; Stop 50
tctcccaaaataagaggttggaata

SEQ ID NO: 240707 - DNA, 25 bp, Artificial
  probe
  misc_feature (1)..(25): SEQ ID NO: 5159; WAN024GD6_at; Start 98; Stop 122
ttttagctgcaagagaacctgtttt

SEQ ID NO: 240708 - DNA, 25 bp, Artificial
  probe
  misc_feature (1)..(25): SEQ ID NO: 5159; WAN024GD6_at; Start 216; Stop 240
tgtgacaaggagatctcctgctgca

SEQ ID NO: 240709 - DNA, 25 bp, Artificial
  probe
  misc_feature (1)..(25): SEQ ID NO: 1138; WAN024GD7_at; Start 767; Stop 791
gaacgtttgctcttgccatttggtc

SEQ ID NO: 240710 - DNA, 25 bp, Artificial
  probe
  misc_feature (1)..(25): SEQ ID NO: 1138; WAN024GD7_at; Start 2077; Stop 2101
aggagatctccttgtcacagctgac

SEQ ID NO: 240711 - DNA, 25 bp, Artificial
  probe
  misc_feature (1)..(25): SEQ ID NO: 1138; WAN024GD7_at; Start 2063; Stop 2087
caaaaagttgcagcaggagatctcc

SEQ ID NO: 240712 - DNA, 25 bp, Artificial
  probe
  misc_feature (1)..(25): SEQ ID NO: 1138; WAN024GD7_at; Start 2014; Stop 2038
cacagtaagtcttgaaggtaaacca

SEQ ID NO: 240713 - DNA, 25 bp, Artificial
  probe
  misc_feature (1)..(25): SEQ ID NO: 1138; WAN024GD7_at; Start 1644; Stop 1668
gggttcaagctatctacggtccaaa

SEQ ID NO: 240714 - DNA, 25 bp, Artificial
  probe
  misc_feature (1)..(25): SEQ ID NO: 1138; WAN024GD7_at; Start 1129; Stop 1153
ggttactgaaccaatcgaatacatg

SEQ ID NO: 240715 - DNA, 25 bp, Artificial
  probe
  misc_feature (1)..(25): SEQ ID NO: 1138; WAN024GD7_at; Start 1191; Stop 1215
cacttgttcaaggtgctgccttcgc

SEQ ID NO: 240716 - DNA, 25 bp, Artificial
  probe
  misc_feature (1)..(25): SEQ ID NO: 1138; WAN024GD7_at; Start 1049; Stop 1073
taccgtaatgttgatgctgacaaga

SEQ ID NO: 240717 - DNA, 25 bp, Artificial
  probe
  misc_feature (1)..(25): SEQ ID NO: 1138; WAN024GD7_at; Start 1999; Stop 2023
tcacattggtttggacacagtaagt

SEQ ID NO: 240718 - DNA, 25 bp, Artificial
  probe
  misc_feature (1)..(25): SEQ ID NO: 1138; WAN024GD7_at; Start 2200; Stop 2224
tcttgcagctaaaacagcagttgct

SEQ ID NO: 240719 - DNA, 25 bp, Artificial
  probe
  misc_feature (1)..(25): SEQ ID NO: 1138; WAN024GD7_at; Start 897; Stop 921
tatggcttgcatgggtaacagacct

SEQ ID NO: 240720 - DNA, 25 bp, Artificial
  probe
  misc_feature (1)..(25): SEQ ID NO: 1138; WAN024GD7_at; Start 578; Stop 602
gatgcactttcattcttcaacggga

SEQ ID NO: 240721 - DNA, 25 bp, Artificial
  probe
  misc_feature (1)..(25): SEQ ID NO: 1138; WAN024GD7_at; Start 813; Stop 837
caatgaactacacagctcttggtgg

SEQ ID NO: 240722 - DNA, 25 bp, Artificial
  probe
  misc_feature (1)..(25): SEQ ID NO: 1138; WAN024GD7_at; Start 1230; Stop 1254
taaacctacgtatgcactcattcgg

SEQ ID NO: 240723 - DNA, 25 bp, Artificial
  probe
  misc_feature (1)..(25): SEQ ID NO: 1138; WAN024GD7_at; Start 466; Stop 490
tatcagtgttcttgaagctccagcc

SEQ ID NO: 240724 - DNA, 25 bp, Artificial
  probe
  misc_feature (1)..(25): SEQ ID NO: 1138; WAN024GD7_at; Start 1546; Stop 1570
gactcgtcttcgtgtaactgttaaa

SEQ ID NO: 240725 - DNA, 25 bp, Artificial
  probe
  misc_feature (1)..(25): SEQ ID NO: 1138; WAN024GD7_at; Start 1414; Stop 1438
cggaaactacgaaactgctgaaggt

SEQ ID NO: 240726 - DNA, 25 bp, Artificial
  probe
  misc_feature (1)..(25): SEQ ID NO: 1138; WAN024GD7_at; Start 220; Stop 244
cacaggtggaattcttgagcaaatc

SEQ ID NO: 240727 - DNA, 25 bp, Artificial
  probe
  misc_feature (1)..(25): SEQ ID NO: 1138; WAN024GD7_at; Start 1209; Stop 1233
ccttcgctatggctgacgtcgtaaa

SEQ ID NO: 240728 - DNA, 25 bp, Artificial
  probe
  misc_feature (1)..(25): SEQ ID NO: 1138; WAN024GD7_at; Start 871; Stop 895
tactcaagtattcggtcaagaccca

SEQ ID NO: 240729 - DNA, 25 bp, Artificial
  probe
  misc_feature (1)..(25): SEQ ID NO: 1138; WAN024GD7_at; Start 312; Stop 336
aacgtgctggtggtgctttcgccgc

SEQ ID NO: 240730 - DNA, 25 bp, Artificial
  probe
  misc_feature (1)..(25): SEQ ID NO: 1138; WAN024GD7_at; Start 991; Stop 1015
caaagttggacaaatgatcggttca

SEQ ID NO: 240731 - DNA, 25 bp, Artificial
  probe
  misc_feature (1)..(25): SEQ ID NO: 1138; WAN024GD7_at; Start 1501; Stop 1525
ccttcttggtggacgtgtaaacatc

SEQ ID NO: 240732 - DNA, 25 bp, Artificial
  probe
  misc_feature (1)..(25): SEQ ID NO: 1138; WAN024GD7_at; Start 649; Stop 673
aattctacttgctgctttctggcca

SEQ ID NO: 240733 - DNA, 25 bp, Artificial
  probe
  misc_feature (1)..(25): SEQ ID NO: 1138; WAN024GD7_at; Start 1835; Stop 1859
caagtaaaggatccagtatttgctc

SEQ ID NO: 240734 - DNA, 25 bp, Artificial
  probe
  misc_feature (1)..(25): SEQ ID NO: 1138; WAN024GD7_at; Start 2110; Stop 2134
tatccgtgcagcaggacgtgaaact

SEQ ID NO: 240735 - DNA, 25 bp, Artificial
  probe
  misc_feature (1)..(25): SEQ ID NO: 1138; WAN024GD7_at; Start 1384; Stop 1408
aaaattcaactacgcaactccaggg

SEQ ID NO: 240736 - DNA, 25 bp, Artificial
  probe
  misc_feature (1)..(25): SEQ ID NO: 1138; WAN024GD7_at; Start 707; Stop 731
tggattgccaactcacaagaaactg

SEQ ID NO: 240737 - DNA, 25 bp, Artificial
  probe
  misc_feature (1)..(25): SEQ ID NO: 1138; WAN024GD7_at; Start 1593; Stop 1617
cagagcaatggaaagcagaaggagc

SEQ ID NO: 240738 - DNA, 25 bp, Artificial
  probe
  misc_feature (1)..(25): SEQ ID NO: 1138; WAN024GD7_at; Start 666; Stop 690
tctggccagtagttcaaacaggtat

SEQ ID NO: 240739 - DNA, 25 bp, Artificial
  probe
  misc_feature (1)..(25): SEQ ID NO: 1138; WAN024GD7_at; Start 852; Stop 876
taactggtgcagctaaaggtactca

SEQ ID NO: 240740 - DNA, 25 bp, Artificial
  probe
  misc_feature (1)..(25): SEQ ID NO: 1138; WAN024GD7_at; Start 1796; Stop 1820
gtttactcagtagcagacggtcaag

SEQ ID NO: 240741 - DNA, 25 bp, Artificial
  probe
  misc_feature (1)..(25): SEQ ID NO: 1138; WAN024GD7_at; Start 963; Stop 987
tgttagatacagtacatccagctcg

SEQ ID NO: 240742 - DNA, 25 bp, Artificial
  probe
  misc_feature (1)..(25): SEQ ID NO: 1138; WAN024GD7_at; Start 1088; Stop 1112
ggtatgatgattgcaacagctcttg

SEQ ID NO: 240743 - DNA, 25 bp, Artificial
  probe
  misc_feature (1)..(25): SEQ ID NO: 5140; WAN024GD8_at; Start 417; Stop 441
cagactatcatactcgccgtgttgc

SEQ ID NO: 240744 - DNA, 25 bp, Artificial
  probe
  misc_feature (1)..(25): SEQ ID NO: 5140; WAN024GD8_at; Start 559; Stop 583
gaacaagccacttttactagctgga

SEQ ID NO: 240745 - DNA, 25 bp, Artificial
  probe
  misc_feature (1)..(25): SEQ ID NO: 5140; WAN024GD8_at; Start 167; Stop 191
aatcaggagatgacctcgtcagagg

SEQ ID NO: 240746 - DNA, 25 bp, Artificial
  probe
  misc_feature (1)..(25): SEQ ID NO: 5140; WAN024GD8_at; Start 449; Stop 473
gaaactgtagtcgatggcaaggagc

SEQ ID NO: 240747 - DNA, 25 bp, Artificial
  probe
  misc_feature (1)..(25): SEQ ID NO: 5140; WAN024GD8_at; Start 360; Stop 384
tgtctaaaacacctattgaagccag

SEQ ID NO: 240748 - DNA, 25 bp, Artificial
  probe
  misc_feature (1)..(25): SEQ ID NO: 5140; WAN024GD8_at; Start 203; Stop 227
gacctttatcaagctttgccagcag

SEQ ID NO: 240749 - DNA, 25 bp, Artificial
  probe
  misc_feature (1)..(25): SEQ ID NO: 5140; WAN024GD8_at; Start 605; Stop 629
caggaaggttaccaagctattttag

SEQ ID NO: 240750 - DNA, 25 bp, Artificial
  probe
  misc_feature (1)..(25): SEQ ID NO: 5140; WAN024GD8_at; Start 222; Stop 246
cagcagctgagcctattcaccaaga

SEQ ID NO: 240751 - DNA, 25 bp, Artificial
  probe
  misc_feature (1)..(25): SEQ ID NO: 5140; WAN024GD8_at; Start 631; Stop 655
tagtccattaggcttacaagacgca

SEQ ID NO: 240752 - DNA, 25 bp, Artificial
  probe
  misc_feature (1)..(25): SEQ ID NO: 5140; WAN024GD8_at; Start 251; Stop 275
tatgttagactcttggttgaaaagt

SEQ ID NO: 240753 - DNA, 25 bp, Artificial
  probe
  misc_feature (1)..(25): SEQ ID NO: 5140; WAN024GD8_at; Start 820; Stop 844
gagtgatcactatggcttgaatgct

SEQ ID NO: 240754 - DNA, 25 bp, Artificial
  probe
  misc_feature (1)..(25): SEQ ID NO: 5140; WAN024GD8_at; Start 1; Stop 25
ttgaggttggaagctgtattccaac

SEQ ID NO: 240755 - DNA, 25 bp, Artificial
  probe
  misc_feature (1)..(25): SEQ ID NO: 5140; WAN024GD8_at; Start 805; Stop 829
caagagtccacaagtgagtgatcac

SEQ ID NO: 240756 - DNA, 25 bp, Artificial
  probe
  misc_feature (1)..(25): SEQ ID NO: 5140; WAN024GD8_at; Start 434; Stop 458
cgtgttgccctagctgaaactgtag

SEQ ID NO: 240757 - DNA, 25 bp, Artificial
  probe
  misc_feature (1)..(25): SEQ ID NO: 5140; WAN024GD8_at; Start 371; Stop 395
cctattgaagccagagaaattttgg

SEQ ID NO: 240758 - DNA, 25 bp, Artificial
  probe
  misc_feature (1)..(25): SEQ ID NO: 5140; WAN024GD8_at; Start 85; Stop 109
gaaagaagcagaggaaaaattccag

SEQ ID NO: 240759 - DNA, 25 bp, Artificial
  probe
  misc_feature (1)..(25): SEQ ID NO: 5140; WAN024GD8_at; Start 768; Stop 792
tagcggtggaaaatttacatgtcgt

SEQ ID NO: 240760 - DNA, 25 bp, Artificial
  probe
  misc_feature (1)..(25): SEQ ID NO: 5140; WAN024GD8_at; Start 754; Stop 778
tactaccaaagagttagcggtggaa

SEQ ID NO: 240761 - DNA, 25 bp, Artificial
  probe
  misc_feature (1)..(25): SEQ ID NO: 5140; WAN024GD8_at; Start 459; Stop 483
tcgatggcaaggagctagcagttgc

SEQ ID NO: 240762 - DNA, 25 bp, Artificial
  probe
  misc_feature (1)..(25): SEQ ID NO: 5140; WAN024GD8_at; Start 688; Stop 712
tactgttccgcctgaaattgatggc

SEQ ID NO: 240763 - DNA, 25 bp, Artificial
  probe
  misc_feature (1)..(25): SEQ ID NO: 5140; WAN024GD8_at; Start 647; Stop 671
caagacgcatttgaagttgctcaag

SEQ ID NO: 240764 - DNA, 25 bp, Artificial
  probe
  misc_feature (1)..(25): SEQ ID NO: 5140; WAN024GD8_at; Start 474; Stop 498
tagcagttgccagtgttcatctctc

SEQ ID NO: 240765 - DNA, 25 bp, Artificial
  probe
  misc_feature (1)..(25): SEQ ID NO: 5140; WAN024GD8_at; Start 662; Stop 686
gttgctcaagagaaaagtggtagct

SEQ ID NO: 240766 - DNA, 25 bp, Artificial
  probe
  misc_feature (1)..(25): SEQ ID NO: 5140; WAN024GD8_at; Start 490; Stop 514
tcatctctcttggtgggataaaggt

SEQ ID NO: 240767 - DNA, 25 bp, Artificial
  probe
  misc_feature (1)..(25): SEQ ID NO: 5140; WAN024GD8_at; Start 17; Stop 41
tattccaacctcttattttgggaga

SEQ ID NO: 240768 - DNA, 25 bp, Artificial
  probe
  misc_feature (1)..(25): SEQ ID NO: 5140; WAN024GD8_at; Start 675; Stop 699
aaagtggtagctatactgttccgcc

SEQ ID NO: 240769 - DNA, 25 bp, Artificial
  probe
  misc_feature (1)..(25): SEQ ID NO: 5140; WAN024GD8_at; Start 344; Stop 368
gaaggtgtggctatcttgtctaaaa

SEQ ID NO: 240770 - DNA, 25 bp, Artificial
  probe
  misc_feature (1)..(25): SEQ ID NO: 5140; WAN024GD8_at; Start 619; Stop 643
agctattttagctagtccattaggc

SEQ ID NO: 240771 - DNA, 25 bp, Artificial
  probe
  misc_feature (1)..(25): SEQ ID NO: 5140; WAN024GD8_at; Start 738; Stop 762
gaatcgattatgtctttactaccaa

SEQ ID NO: 240772 - DNA, 25 bp, Artificial
  probe
  misc_feature (1)..(25): SEQ ID NO: 5140; WAN024GD8_at; Start 182; Stop 206
tcgtcagaggtggaggttaatgacc

SEQ ID NO: 240773 - DNA, 25 bp, Artificial
  probe
  misc_feature (1)..(25): SEQ ID NO: 5140; WAN024GD8_at; Start 723; Stop 747
acactgaaccccttcgaatcgatta

SEQ ID NO: 240774 - DNA, 25 bp, Artificial
  probe
  misc_feature (1)..(25): SEQ ID NO: 5140; WAN024GD8_at; Start 403; Stop 427
tgtggatgatccaacagactatcat

SEQ ID NO: 240775 - DNA, 25 bp, Artificial
  probe
  misc_feature (1)..(25): SEQ ID NO: 5140; WAN024GD8_at; Start 281; Stop 305
gagcaagggaaaaattactactgga

SEQ ID NO: 240776 - DNA, 25 bp, Artificial
  probe
  misc_feature (1)..(25): SEQ ID NO: 5140; WAN024GD8_at; Start 789; Stop 813
tcgtatttgatggtaacaagagtcc

SEQ ID NO: 240777 - DNA, 25 bp, Artificial
  probe
  misc_feature (1)..(25): SEQ ID NO: 7693; WAN024GD9_at; Start 163; Stop 187
gagacttctccttttctattcttat

SEQ ID NO: 240778 - DNA, 25 bp, Artificial
  probe
  misc_feature (1)..(25): SEQ ID NO: 7693; WAN024GD9_at; Start 17; Stop 41
tcagtcaccaaaccaaccaattgat

SEQ ID NO: 240779 - DNA, 25 bp, Artificial
  probe
  misc_feature (1)..(25): SEQ ID NO: 7693; WAN024GD9_at; Start 130; Stop 154
taccttgcgggtcataaaatcttta

SEQ ID NO: 240780 - DNA, 25 bp, Artificial
  probe
  misc_feature (1)..(25): SEQ ID NO: 7693; WAN024GD9_at; Start 150; Stop 174
ctttaactgccatgagacttctcct

SEQ ID NO: 240781 - DNA, 25 bp, Artificial
  probe
  misc_feature (1)..(25): SEQ ID NO: 7693; WAN024GD9_at; Start 120; Stop 144
taatataaactaccttgcgggtcat

SEQ ID NO: 240782 - DNA, 25 bp, Artificial
  probe
  misc_feature (1)..(25): SEQ ID NO: 7693; WAN024GD9_at; Start 58; Stop 82
caagcgatgcaattcttgctctctc

SEQ ID NO: 240783 - DNA, 25 bp, Artificial
  probe
  misc_feature (1)..(25): SEQ ID NO: 7693; WAN024GD9_at; Start 20; Stop 44
gtcaccaaaccaaccaattgatcat

SEQ ID NO: 240784 - DNA, 25 bp, Artificial
  probe
  misc_feature (1)..(25): SEQ ID NO: 7693; WAN024GD9_at; Start 103; Stop 127
tactgttgtatctggactaatataa

SEQ ID NO: 240785 - DNA, 25 bp, Artificial
  probe
  misc_feature (1)..(25): SEQ ID NO: 7693; WAN024GD9_at; Start 63; Stop 87
gatgcaattcttgctctctcatcaa

SEQ ID NO: 240786 - DNA, 25 bp, Artificial
  probe
  misc_feature (1)..(25): SEQ ID NO: 7693; WAN024GD9_at; Start 123; Stop 147
tataaactaccttgcgggtcataaa

SEQ ID NO: 240787 - DNA, 25 bp, Artificial
  probe
  misc_feature (1)..(25): SEQ ID NO: 7693; WAN024GD9_at; Start 34; Stop 58
caattgatcattttcgataacaggc

SEQ ID NO: 240788 - DNA, 25 bp, Artificial
  probe
  misc_feature (1)..(25): SEQ ID NO: 7693; WAN024GD9_at; Start 217; Stop 241
tcaaacgcttacatttctttttcga

SEQ ID NO: 240789 - DNA, 25 bp, Artificial
  probe
  misc_feature (1)..(25): SEQ ID NO: 7693; WAN024GD9_at; Start 48; Stop 72
cgataacaggcaagcgatgcaattc

SEQ ID NO: 240790 - DNA, 25 bp, Artificial
  probe
  misc_feature (1)..(25): SEQ ID NO: 7693; WAN024GD9_at; Start 85; Stop 109
caaatctgctgcatgagatactgtt

SEQ ID NO: 240791 - DNA, 25 bp, Artificial
  probe
  misc_feature (1)..(25): SEQ ID NO: 7693; WAN024GD9_at; Start 7; Stop 31
aatggttccctcagtcaccaaacca

SEQ ID NO: 240792 - DNA, 25 bp, Artificial
  probe
  misc_feature (1)..(25): SEQ ID NO: 7693; WAN024GD9_at; Start 179; Stop 203
tattcttatccccattatacaatct

SEQ ID NO: 240793 - DNA, 25 bp, Artificial
  probe
  misc_feature (1)..(25): SEQ ID NO: 7693; WAN024GD9_at; Start 184; Stop 208
ttatccccattatacaatctttttg

SEQ ID NO: 240794 - DNA, 25 bp, Artificial
  probe
  misc_feature (1)..(25): SEQ ID NO: 7693; WAN024GD9_at; Start 71; Stop 95
tcttgctctctcatcaaatctgctg

SEQ ID NO: 240795 - DNA, 25 bp, Artificial
  probe
  misc_feature (1)..(25): SEQ ID NO: 7693; WAN024GD9_at; Start 54; Stop 78
caggcaagcgatgcaattcttgctc

SEQ ID NO: 240796 - DNA, 25 bp, Artificial
  probe
  misc_feature (1)..(25): SEQ ID NO: 7693; WAN024GD9_at; Start 115; Stop 139
tggactaatataaactaccttgcgg

SEQ ID NO: 240797 - DNA, 25 bp, Artificial
  probe
  misc_feature (1)..(25): SEQ ID NO: 7693; WAN024GD9_at; Start 82; Stop 106
catcaaatctgctgcatgagatact

SEQ ID NO: 240798 - DNA, 25 bp, Artificial
  probe
  misc_feature (1)..(25): SEQ ID NO: 7693; WAN024GD9_at; Start 144; Stop 168
taaaatctttaactgccatgagact

SEQ ID NO: 240799 - DNA, 25 bp, Artificial
  probe
  misc_feature (1)..(25): SEQ ID NO: 7693; WAN024GD9_at; Start 39; Stop 63
gatcattttcgataacaggcaagcg

SEQ ID NO: 240800 - DNA, 25 bp, Artificial
  probe
  misc_feature (1)..(25): SEQ ID NO: 7693; WAN024GD9_at; Start 208; Stop 232
gtaaatctatcaaacgcttacattt

SEQ ID NO: 240801 - DNA, 25 bp, Artificial
  probe
  misc_feature (1)..(25): SEQ ID NO: 7693; WAN024GD9_at; Start 153; Stop 177
taactgccatgagacttctcctttt

SEQ ID NO: 240802 - DNA, 25 bp, Artificial
  probe
  misc_feature (1)..(25): SEQ ID NO: 7693; WAN024GD9_at; Start 41; Stop 65
tcattttcgataacaggcaagcgat

SEQ ID NO: 240803 - DNA, 25 bp, Artificial
  probe
  misc_feature (1)..(25): SEQ ID NO: 7693; WAN024GD9_at; Start 25; Stop 49
caaaccaaccaattgatcattttcg

SEQ ID NO: 240804 - DNA, 25 bp, Artificial
  probe
  misc_feature (1)..(25): SEQ ID NO: 7693; WAN024GD9_at; Start 75; Stop 99
gctctctcatcaaatctgctgcatg

SEQ ID NO: 240805 - DNA, 25 bp, Artificial
  probe
  misc_feature (1)..(25): SEQ ID NO: 7693; WAN024GD9_at; Start 89; Stop 113
tctgctgcatgagatactgttgtat

SEQ ID NO: 240806 - DNA, 25 bp, Artificial
  probe
  misc_feature (1)..(25): SEQ ID NO: 7693; WAN024GD9_at; Start 95; Stop 119
gcatgagatactgttgtatctggac

SEQ ID NO: 240807 - DNA, 25 bp, Artificial
  probe
  misc_feature (1)..(25): SEQ ID NO: 7693; WAN024GD9_at; Start 44; Stop 68
ttttcgataacaggcaagcgatgca

SEQ ID NO: 240808 - DNA, 25 bp, Artificial
  probe
  misc_feature (1)..(25): SEQ ID NO: 7693; WAN024GD9_at; Start 1; Stop 25
ttgtgcaatggttccctcagtcacc

SEQ ID NO: 240809 - DNA, 25 bp, Artificial
  probe
  misc_feature (1)..(25): SEQ ID NO: 7693; WAN024GD9_at; Start 136; Stop 160
gcgggtcataaaatctttaactgcc

SEQ ID NO: 240810 - DNA, 25 bp, Artificial
  probe
  misc_feature (1)..(25): SEQ ID NO: 7693; WAN024GD9_at; Start 51; Stop 75
taacaggcaagcgatgcaattcttg

SEQ ID NO: 240811 - DNA, 25 bp, Artificial
  probe
  misc_feature (1)..(25): SEQ ID NO: 2553; WAN024GDA_at; Start 107; Stop 131
cctgcaatttcaagaaaggcttgga

SEQ ID NO: 240812 - DNA, 25 bp, Artificial
  probe
  misc_feature (1)..(25): SEQ ID NO: 2553; WAN024GDA_at; Start 97; Stop 121
ttcgccataacctgcaatttcaaga

SEQ ID NO: 240813 - DNA, 25 bp, Artificial
  probe
  misc_feature (1)..(25): SEQ ID NO: 2553; WAN024GDA_at; Start 63; Stop 87
catcttctgtaacaaagcgtacacg

SEQ ID NO: 240814 - DNA, 25 bp, Artificial
  probe
  misc_feature (1)..(25): SEQ ID NO: 2553; WAN024GDA_at; Start 13; Stop 37
caaattttcttctacaatcaaagaa

SEQ ID NO: 240815 - DNA, 25 bp, Artificial
  probe
  misc_feature (1)..(25): SEQ ID NO: 2553; WAN024GDA_at; Start 141; Stop 165
ggtcagtaataactccgtatacttg

SEQ ID NO: 240816 - DNA, 25 bp, Artificial
  probe
  misc_feature (1)..(25): SEQ ID NO: 2553; WAN024GDA_at; Start 122; Stop 146
aaggcttggaaaacgtcacggtcag

SEQ ID NO: 240817 - DNA, 25 bp, Artificial
  probe
  misc_feature (1)..(25): SEQ ID NO: 2553; WAN024GDA_at; Start 204; Stop 228
tcaacatcagataagttgcatcttc

SEQ ID NO: 240818 - DNA, 25 bp, Artificial
  probe
  misc_feature (1)..(25): SEQ ID NO: 2553; WAN024GDA_at; Start 57; Stop 81
caacttcatcttctgtaacaaagcg

SEQ ID NO: 240819 - DNA, 25 bp, Artificial
  probe
  misc_feature (1)..(25): SEQ ID NO: 2553; WAN024GDA_at; Start 198; Stop 222
tatttttcaacatcagataagttgc

SEQ ID NO: 240820 - DNA, 25 bp, Artificial
  probe
  misc_feature (1)..(25): SEQ ID NO: 2553; WAN024GDA_at; Start 135; Stop 159
cgtcacggtcagtaataactccgta

SEQ ID NO: 240821 - DNA, 25 bp, Artificial
  probe
  misc_feature (1)..(25): SEQ ID NO: 2553; WAN024GDA_at; Start 125; Stop 149
gcttggaaaacgtcacggtcagtaa

SEQ ID NO: 240822 - DNA, 25 bp, Artificial
  probe
  misc_feature (1)..(25): SEQ ID NO: 2553; WAN024GDA_at; Start 158; Stop 182
tatacttgatggttatctacgacag

SEQ ID NO: 240823 - DNA, 25 bp, Artificial
  probe
  misc_feature (1)..(25): SEQ ID NO: 2553; WAN024GDA_at; Start 147; Stop 171
taataactccgtatacttgatggtt

SEQ ID NO: 240824 - DNA, 25 bp, Artificial
  probe
  misc_feature (1)..(25): SEQ ID NO: 2553; WAN024GDA_at; Start 128; Stop 152
tggaaaacgtcacggtcagtaataa

SEQ ID NO: 240825 - DNA, 25 bp, Artificial
  probe
  misc_feature (1)..(25): SEQ ID NO: 2553; WAN024GDA_at; Start 117; Stop 141
caagaaaggcttggaaaacgtcacg

SEQ ID NO: 240826 - DNA, 25 bp, Artificial
  probe
  misc_feature (1)..(25): SEQ ID NO: 2553; WAN024GDA_at; Start 82; Stop 106
tacacgaatcccttcttcgccataa

SEQ ID NO: 240827 - DNA, 25 bp, Artificial
  probe
  misc_feature (1)..(25): SEQ ID NO: 2553; WAN024GDA_at; Start 164; Stop 188
tgatggttatctacgacagggagaa

SEQ ID NO: 240828 - DNA, 25 bp, Artificial
  probe
  misc_feature (1)..(25): SEQ ID NO: 2553; WAN024GDA_at; Start 27; Stop 51
caatcaaagaaacaatttttccaag

SEQ ID NO: 240829 - DNA, 25 bp, Artificial
  probe
  misc_feature (1)..(25): SEQ ID NO: 2553; WAN024GDA_at; Start 100; Stop 124
gccataacctgcaatttcaagaaag

SEQ ID NO: 240830 - DNA, 25 bp, Artificial
  probe
  misc_feature (1)..(25): SEQ ID NO: 2553; WAN024GDA_at; Start 72; Stop 96
taacaaagcgtacacgaatcccttc

SEQ ID NO: 240831 - DNA, 25 bp, Artificial
  probe
  misc_feature (1)..(25): SEQ ID NO: 2553; WAN024GDA_at; Start 167; Stop 191
tggttatctacgacagggagaatac

SEQ ID NO: 240832 - DNA, 25 bp, Artificial
  probe
  misc_feature (1)..(25): SEQ ID NO: 2553; WAN024GDA_at; Start 42; Stop 66
tttttccaagaacaccaacttcatc

SEQ ID NO: 240833 - DNA, 25 bp, Artificial
  probe
  misc_feature (1)..(25): SEQ ID NO: 2553; WAN024GDA_at; Start 3; Stop 27
gggagatattcaaattttcttctac

SEQ ID NO: 240834 - DNA, 25 bp, Artificial
  probe
  misc_feature (1)..(25): SEQ ID NO: 2553; WAN024GDA_at; Start 76; Stop 100
aaagcgtacacgaatcccttcttcg

SEQ ID NO: 240835 - DNA, 25 bp, Artificial
  probe
  misc_feature (1)..(25): SEQ ID NO: 2553; WAN024GDA_at; Start 102; Stop 126
cataacctgcaatttcaagaaaggc

SEQ ID NO: 240836 - DNA, 25 bp, Artificial
  probe
  misc_feature (1)..(25): SEQ ID NO: 2553; WAN024GDA_at; Start 152; Stop 176
actccgtatacttgatggttatcta

SEQ ID NO: 240837 - DNA, 25 bp, Artificial
  probe
  misc_feature (1)..(25): SEQ ID NO: 2553; WAN024GDA_at; Start 70; Stop 94
tgtaacaaagcgtacacgaatccct

SEQ ID NO: 240838 - DNA, 25 bp, Artificial
  probe
  misc_feature (1)..(25): SEQ ID NO: 2553; WAN024GDA_at; Start 133; Stop 157
aacgtcacggtcagtaataactccg

SEQ ID NO: 240839 - DNA, 25 bp, Artificial
  probe
  misc_feature (1)..(25): SEQ ID NO: 2553; WAN024GDA_at; Start 92; Stop 116
ccttcttcgccataacctgcaattt

SEQ ID NO: 240840 - DNA, 25 bp, Artificial
  probe
  misc_feature (1)..(25): SEQ ID NO: 2553; WAN024GDA_at; Start 65; Stop 89
tcttctgtaacaaagcgtacacgaa

SEQ ID NO: 240841 - DNA, 25 bp, Artificial
  probe
  misc_feature (1)..(25): SEQ ID NO: 2553; WAN024GDA_at; Start 160; Stop 184
tacttgatggttatctacgacaggg

SEQ ID NO: 240842 - DNA, 25 bp, Artificial
  probe
  misc_feature (1)..(25): SEQ ID NO: 2553; WAN024GDA_at; Start 207; Stop 231
acatcagataagttgcatcttctag

SEQ ID NO: 240843 - DNA, 25 bp, Artificial
  probe
  misc_feature (1)..(25): SEQ ID NO: 2553; WAN024GDA_at; Start 138; Stop 162
cacggtcagtaataactccgtatac

SEQ ID NO: 240844 - DNA, 25 bp, Artificial
  probe
  misc_feature (1)..(25): SEQ ID NO: 2553; WAN024GDA_at; Start 51; Stop 75
gaacaccaacttcatcttctgtaac

SEQ ID NO: 240845 - DNA, 25 bp, Artificial
  probe
  misc_feature (1)..(25): SEQ ID NO: 2439; WAN024GDB_at; Start 155; Stop 179
ttgcacaagcaagtccatctaaagc

SEQ ID NO: 240846 - DNA, 25 bp, Artificial
  probe
  misc_feature (1)..(25): SEQ ID NO: 2439; WAN024GDB_at; Start 199; Stop 223
gagatgaattatcttctgaataaga

SEQ ID NO: 240847 - DNA, 25 bp, Artificial
  probe
  misc_feature (1)..(25): SEQ ID NO: 2439; WAN024GDB_at; Start 442; Stop 466
gaagatgaagttggtgttcttggaa

SEQ ID NO: 240848 - DNA, 25 bp, Artificial
  probe
  misc_feature (1)..(25): SEQ ID NO: 2439; WAN024GDB_at; Start 428; Stop 452
tacgctttgttacagaagatgaagt

SEQ ID NO: 240849 - DNA, 25 bp, Artificial
  probe
  misc_feature (1)..(25): SEQ ID NO: 2439; WAN024GDB_at; Start 10; Stop 34
aaagattttatgacccgcaaggtag

SEQ ID NO: 240850 - DNA, 25 bp, Artificial
  probe
  misc_feature (1)..(25): SEQ ID NO: 2439; WAN024GDB_at; Start 490; Stop 514
gaaaatttgaatatctcccatacag

SEQ ID NO: 240851 - DNA, 25 bp, Artificial
  probe
  misc_feature (1)..(25): SEQ ID NO: 2439; WAN024GDB_at; Start 271; Stop 295
tatgctagtctagaagatgcaactt

SEQ ID NO: 240852 - DNA, 25 bp, Artificial
  probe
  misc_feature (1)..(25): SEQ ID NO: 2439; WAN024GDB_at; Start 235; Stop 259
gatgtcatgattcgcgatgttgtca

SEQ ID NO: 240853 - DNA, 25 bp, Artificial
  probe
  misc_feature (1)..(25): SEQ ID NO: 2439; WAN024GDB_at; Start 226; Stop 250
aaagtaaaagatgtcatgattcgcg

SEQ ID NO: 240854 - DNA, 25 bp, Artificial
  probe
  misc_feature (1)..(25): SEQ ID NO: 2439; WAN024GDB_at; Start 394; Stop 418
gaaattgcaggttatggcgaagaag

SEQ ID NO: 240855 - DNA, 25 bp, Artificial
  probe
  misc_feature (1)..(25): SEQ ID NO: 2439; WAN024GDB_at; Start 211; Stop 235
cttctgaataagacaaaagtaaaag

SEQ ID NO: 240856 - DNA, 25 bp, Artificial
  probe
  misc_feature (1)..(25): SEQ ID NO: 2439; WAN024GDB_at; Start 607; Stop 631
aatggtattcaagtggaagaaatcg

SEQ ID NO: 240857 - DNA, 25 bp, Artificial
  probe
  misc_feature (1)..(25): SEQ ID NO: 2439; WAN024GDB_at; Start 503; Stop 527
tctcccatacagtcaatattccgcg

SEQ ID NO: 240858 - DNA, 25 bp, Artificial
  probe
  misc_feature (1)..(25): SEQ ID NO: 2439; WAN024GDB_at; Start 320; Stop 344
gtattctccctgtcgtagataacca

SEQ ID NO: 240859 - DNA, 25 bp, Artificial
  probe
  misc_feature (1)..(25): SEQ ID NO: 2439; WAN024GDB_at; Start 164; Stop 188
caagtccatctaaagcaacaagtct

SEQ ID NO: 240860 - DNA, 25 bp, Artificial
  probe
  misc_feature (1)..(25): SEQ ID NO: 2439; WAN024GDB_at; Start 516; Stop 540
caatattccgcgtaaggatggtaag

SEQ ID NO: 240861 - DNA, 25 bp, Artificial
  probe
  misc_feature (1)..(25): SEQ ID NO: 2439; WAN024GDB_at; Start 335; Stop 359
tagataaccatcaagtatacggagt

SEQ ID NO: 240862 - DNA, 25 bp, Artificial
  probe
  misc_feature (1)..(25): SEQ ID NO: 2439; WAN024GDB_at; Start 537; Stop 561
taaggtgattatcgaagtgcaaatc

SEQ ID NO: 240863 - DNA, 25 bp, Artificial
  probe
  misc_feature (1)..(25): SEQ ID NO: 2439; WAN024GDB_at; Start 3; Stop 27
ggcagttaaagattttatgacccgc

SEQ ID NO: 240864 - DNA, 25 bp, Artificial
  probe
  misc_feature (1)..(25): SEQ ID NO: 2439; WAN024GDB_at; Start 258; Stop 282
cactgtctcaggctatgctagtcta

SEQ ID NO: 240865 - DNA, 25 bp, Artificial
  probe
  misc_feature (1)..(25): SEQ ID NO: 2439; WAN024GDB_at; Start 406; Stop 430
tatggcgaagaagggattcgtgtac

SEQ ID NO: 240866 - DNA, 25 bp, Artificial
  probe
  misc_feature (1)..(25): SEQ ID NO: 2439; WAN024GDB_at; Start 26; Stop 50
gcaaggtagtttatattagtccaga

SEQ ID NO: 240867 - DNA, 25 bp, Artificial
  probe
  misc_feature (1)..(25): SEQ ID NO: 2439; WAN024GDB_at; Start 140; Stop 164
tgactgagggaaccattgcacaagc

SEQ ID NO: 240868 - DNA, 25 bp, Artificial
  probe
  misc_feature (1)..(25): SEQ ID NO: 2439; WAN024GDB_at; Start 350; Stop 374
tatacggagttattactgaccgtga

SEQ ID NO: 240869 - DNA, 25 bp, Artificial
  probe
  misc_feature (1)..(25): SEQ ID NO: 2439; WAN024GDB_at; Start 104; Stop 128
tgcctgttatcgaaaatgatcaatt

SEQ ID NO: 240870 - DNA, 25 bp, Artificial
  probe
  misc_feature (1)..(25): SEQ ID NO: 2439; WAN024GDB_at; Start 64; Stop 88
catgcagcagatttgatgagagagc

SEQ ID NO: 240871 - DNA, 25 bp, Artificial
  probe
  misc_feature (1)..(25): SEQ ID NO: 2439; WAN024GDB_at; Start 522; Stop 546
tccgcgtaaggatggtaaggtgatt

SEQ ID NO: 240872 - DNA, 25 bp, Artificial
  probe
  misc_feature (1)..(25): SEQ ID NO: 2439; WAN024GDB_at; Start 569; Stop 593
caattgatttaccagccttgaaaga

SEQ ID NO: 240873 - DNA, 25 bp, Artificial
  probe
  misc_feature (1)..(25): SEQ ID NO: 2439; WAN024GDB_at; Start 633; Stop 657
tcgcacttcagcaaaagtcttgtaa

SEQ ID NO: 240874 - DNA, 25 bp, Artificial
  probe
  misc_feature (1)..(25): SEQ ID NO: 2439; WAN024GDB_at; Start 246; Stop 270
tcgcgatgttgtcactgtctcaggc

SEQ ID NO: 240875 - DNA, 25 bp, Artificial
  probe
  misc_feature (1)..(25): SEQ ID NO: 2439; WAN024GDB_at; Start 283; Stop 307
gaagatgcaacttatctgatgttga

SEQ ID NO: 240876 - DNA, 25 bp, Artificial
  probe
  misc_feature (1)..(25): SEQ ID NO: 2439; WAN024GDB_at; Start 601; Stop 625
gaagcaaatggtattcaagtggaag

SEQ ID NO: 240877 - DNA, 25 bp, Artificial
  probe
  misc_feature (1)..(25): SEQ ID NO: 2439; WAN024GDB_at; Start 417; Stop 441
agggattcgtgtacgctttgttaca

SEQ ID NO: 240878 - DNA, 25 bp, Artificial
  probe
  misc_feature (1)..(25): SEQ ID NO: 2439; WAN024GDB_at; Start 380; Stop 404
tccaagcctttcttgaaattgcagg

SEQ ID NO: 240879 - DNA, 25 bp, Artificial
  probe
  misc_feature (1)..(25): SEQ ID NO: 4310; WAN024GDC_at; Start 304; Stop 328
cttgagttggaacatagagttgtaa

SEQ ID NO: 240880 - DNA, 25 bp, Artificial
  probe
  misc_feature (1)..(25): SEQ ID NO: 4310; WAN024GDC_at; Start 259; Stop 283
taataaatttttccttgctcaagcg

SEQ ID NO: 240881 - DNA, 25 bp, Artificial
  probe
  misc_feature (1)..(25): SEQ ID NO: 4310; WAN024GDC_at; Start 212; Stop 236
cacaaagggtgtttccaactcttgg

SEQ ID NO: 240882 - DNA, 25 bp, Artificial
  probe
  misc_feature (1)..(25): SEQ ID NO: 4310; WAN024GDC_at; Start 232; Stop 256
cttggatatgacaaaccctaacttt

SEQ ID NO: 240883 - DNA, 25 bp, Artificial
  probe
  misc_feature (1)..(25): SEQ ID NO: 4310; WAN024GDC_at; Start 60; Stop 84
cgccacaaacgatagggcaaatttt

SEQ ID NO: 240884 - DNA, 25 bp, Artificial
  probe
  misc_feature (1)..(25): SEQ ID NO: 4310; WAN024GDC_at; Start 1; Stop 25
gtgttgactgctccagacttcactt

SEQ ID NO: 240885 - DNA, 25 bp, Artificial
  probe
  misc_feature (1)..(25): SEQ ID NO: 4310; WAN024GDC_at; Start 121; Stop 145
tctgttaagaatataccgaattatc

SEQ ID NO: 240886 - DNA, 25 bp, Artificial
  probe
  misc_feature (1)..(25): SEQ ID NO: 4310; WAN024GDC_at; Start 55; Stop 79
gcaagcgccacaaacgatagggcaa

SEQ ID NO: 240887 - DNA, 25 bp, Artificial
  probe
  misc_feature (1)..(25): SEQ ID NO: 4310; WAN024GDC_at; Start 38; Stop 62
caagaagtgctacacttgcaagcgc

SEQ ID NO: 240888 - DNA, 25 bp, Artificial
  probe
  misc_feature (1)..(25): SEQ ID NO: 4310; WAN024GDC_at; Start 16; Stop 40
gacttcacttctccacaggctgcaa

SEQ ID NO: 240889 - DNA, 25 bp, Artificial
  probe
  misc_feature (1)..(25): SEQ ID NO: 4310; WAN024GDC_at; Start 114; Stop 138
taaatagtctgttaagaatataccg

SEQ ID NO: 240890 - DNA, 25 bp, Artificial
  probe
  misc_feature (1)..(25): SEQ ID NO: 4310; WAN024GDC_at; Start 227; Stop 251
caactcttggatatgacaaacccta

SEQ ID NO: 240891 - DNA, 25 bp, Artificial
  probe
  misc_feature (1)..(25): SEQ ID NO: 4310; WAN024GDC_at; Start 187; Stop 211
cgttttcctatcgataaagattgcc

SEQ ID NO: 240892 - DNA, 25 bp, Artificial
  probe
  misc_feature (1)..(25): SEQ ID NO: 4310; WAN024GDC_at; Start 147; Stop 171
gaaaattgtcaatgttttccttgaa

SEQ ID NO: 240893 - DNA, 25 bp, Artificial
  probe
  misc_feature (1)..(25): SEQ ID NO: 4310; WAN024GDC_at; Start 214; Stop 238
caaagggtgtttccaactcttggat

SEQ ID NO: 240894 - DNA, 25 bp, Artificial
  probe
  misc_feature (1)..(25): SEQ ID NO: 4310; WAN024GDC_at; Start 290; Stop 314
caattgctccacttcttgagttgga

SEQ ID NO: 240895 - DNA, 25 bp, Artificial
  probe
  misc_feature (1)..(25): SEQ ID NO: 4310; WAN024GDC_at; Start 29; Stop 53
cacaggctgcaagaagtgctacact

SEQ ID NO: 240896 - DNA, 25 bp, Artificial
  probe
  misc_feature (1)..(25): SEQ ID NO: 4310; WAN024GDC_at; Start 264; Stop 288
aatttttccttgctcaagcgtccga

SEQ ID NO: 240897 - DNA, 25 bp, Artificial
  probe
  misc_feature (1)..(25): SEQ ID NO: 4310; WAN024GDC_at; Start 192; Stop 216
tcctatcgataaagattgcccacaa

SEQ ID NO: 240898 - DNA, 25 bp, Artificial
  probe
  misc_feature (1)..(25): SEQ ID NO: 4310; WAN024GDC_at; Start 41; Stop 65
gaagtgctacacttgcaagcgccac

SEQ ID NO: 240899 - DNA, 25 bp, Artificial
  probe
  misc_feature (1)..(25): SEQ ID NO: 4310; WAN024GDC_at; Start 159; Stop 183
tgttttccttgaactttttcgatga

SEQ ID NO: 240900 - DNA, 25 bp, Artificial
  probe
  misc_feature (1)..(25): SEQ ID NO: 4310; WAN024GDC_at; Start 52; Stop 76
cttgcaagcgccacaaacgataggg

SEQ ID NO: 240901 - DNA, 25 bp, Artificial
  probe
  misc_feature (1)..(25): SEQ ID NO: 4310; WAN024GDC_at; Start 267; Stop 291
ttttccttgctcaagcgtccgacca

SEQ ID NO: 240902 - DNA, 25 bp, Artificial
  probe
  misc_feature (1)..(25): SEQ ID NO: 4310; WAN024GDC_at; Start 204; Stop 228
agattgcccacaaagggtgtttcca

SEQ ID NO: 240903 - DNA, 25 bp, Artificial
  probe
  misc_feature (1)..(25): SEQ ID NO: 4310; WAN024GDC_at; Start 208; Stop 232
tgcccacaaagggtgtttccaactc

SEQ ID NO: 240904 - DNA, 25 bp, Artificial
  probe
  misc_feature (1)..(25): SEQ ID NO: 4310; WAN024GDC_at; Start 100; Stop 124
gtctccttatttcttaaatagtctg

SEQ ID NO: 240905 - DNA, 25 bp, Artificial
  probe
  misc_feature (1)..(25): SEQ ID NO: 4310; WAN024GDC_at; Start 136; Stop 160
ccgaattatcagaaaattgtcaatg

SEQ ID NO: 240906 - DNA, 25 bp, Artificial
  probe
  misc_feature (1)..(25): SEQ ID NO: 4310; WAN024GDC_at; Start 69; Stop 93
cgatagggcaaattttttcttcatc

SEQ ID NO: 240907 - DNA, 25 bp, Artificial
  probe
  misc_feature (1)..(25): SEQ ID NO: 4310; WAN024GDC_at; Start 44; Stop 68
gtgctacacttgcaagcgccacaaa

SEQ ID NO: 240908 - DNA, 25 bp, Artificial
  probe
  misc_feature (1)..(25): SEQ ID NO: 4310; WAN024GDC_at; Start 25; Stop 49
tctccacaggctgcaagaagtgcta

SEQ ID NO: 240909 - DNA, 25 bp, Artificial
  probe
  misc_feature (1)..(25): SEQ ID NO: 4310; WAN024GDC_at; Start 298; Stop 322
ccacttcttgagttggaacatagag

SEQ ID NO: 240910 - DNA, 25 bp, Artificial
  probe
  misc_feature (1)..(25): SEQ ID NO: 4310; WAN024GDC_at; Start 273; Stop 297
ttgctcaagcgtccgaccaattgct

SEQ ID NO: 240911 - DNA, 25 bp, Artificial
  probe
  misc_feature (1)..(25): SEQ ID NO: 4310; WAN024GDC_at; Start 197; Stop 221
tcgataaagattgcccacaaagggt

SEQ ID NO: 240912 - DNA, 25 bp, Artificial
  probe
  misc_feature (1)..(25): SEQ ID NO: 4310; WAN024GDC_at; Start 279; Stop 303
aagcgtccgaccaattgctccactt

SEQ ID NO: 240913 - DNA, 25 bp, Artificial
  probe
  misc_feature (1)..(25): SEQ ID NO: 3085; WAN024GDD_at; Start 7; Stop 31
gaaaaagtcaatcgctctggcttga

SEQ ID NO: 240914 - DNA, 25 bp, Artificial
  probe
  misc_feature (1)..(25): SEQ ID NO: 3085; WAN024GDD_at; Start 118; Stop 142
caactctatgttccaactcaagaag

SEQ ID NO: 240915 - DNA, 25 bp, Artificial
  probe
  misc_feature (1)..(25): SEQ ID NO: 3085; WAN024GDD_at; Start 215; Stop 239
tggaaacaccctttgtgggcaatct

SEQ ID NO: 240916 - DNA, 25 bp, Artificial
  probe
  misc_feature (1)..(25): SEQ ID NO: 3085; WAN024GDD_at; Start 201; Stop 225
tcatatccaagagttggaaacaccc

SEQ ID NO: 240917 - DNA, 25 bp, Artificial
  probe
  misc_feature (1)..(25): SEQ ID NO: 3085; WAN024GDD_at; Start 87; Stop 111
tacctatcattccaagaaacatcgt

SEQ ID NO: 240918 - DNA, 25 bp, Artificial
  probe
  misc_feature (1)..(25): SEQ ID NO: 3085; WAN024GDD_at; Start 194; Stop 218
gggtttgtcatatccaagagttgga

SEQ ID NO: 240919 - DNA, 25 bp, Artificial
  probe
  misc_feature (1)..(25): SEQ ID NO: 3085; WAN024GDD_at; Start 66; Stop 90
actgcaggattatggagatattacc

SEQ ID NO: 240920 - DNA, 25 bp, Artificial
  probe
  misc_feature (1)..(25): SEQ ID NO: 3085; WAN024GDD_at; Start 37; Stop 61
tatctttactataatcgtgatgcca

SEQ ID NO: 240921 - DNA, 25 bp, Artificial
  probe
  misc_feature (1)..(25): SEQ ID NO: 3085; WAN024GDD_at; Start 187; Stop 211
aaagttagggtttgtcatatccaag

SEQ ID NO: 240922 - DNA, 25 bp, Artificial
  probe
  misc_feature (1)..(25): SEQ ID NO: 3085; WAN024GDD_at; Start 109; Stop 133
cgttacttacaactctatgttccaa

SEQ ID NO: 240923 - DNA, 25 bp, Artificial
  probe
  misc_feature (1)..(25): SEQ ID NO: 3085; WAN024GDD_at; Start 131; Stop 155
caactcaagaagtggagcaattggt

SEQ ID NO: 240924 - DNA, 25 bp, Artificial
  probe
  misc_feature (1)..(25): SEQ ID NO: 3085; WAN024GDD_at; Start 219; Stop 243
aacaccctttgtgggcaatctttat

SEQ ID NO: 240925 - DNA, 25 bp, Artificial
  probe
  misc_feature (1)..(25): SEQ ID NO: 3085; WAN024GDD_at; Start 160; Stop 184
cgcttgagcaaggaaaaatttatta

SEQ ID NO: 240926 - DNA, 25 bp, Artificial
  probe
  misc_feature (1)..(25): SEQ ID NO: 3085; WAN024GDD_at; Start 46; Stop 70
tataatcgtgatgccaaaaaactgc

SEQ ID NO: 240927 - DNA, 25 bp, Artificial
  probe
  misc_feature (1)..(25): SEQ ID NO: 3085; WAN024GDD_at; Start 48; Stop 72
taatcgtgatgccaaaaaactgcag

SEQ ID NO: 240928 - DNA, 25 bp, Artificial
  probe
  misc_feature (1)..(25): SEQ ID NO: 3085; WAN024GDD_at; Start 91; Stop 115
tatcattccaagaaacatcgttact

SEQ ID NO: 240929 - DNA, 25 bp, Artificial
  probe
  misc_feature (1)..(25): SEQ ID NO: 3085; WAN024GDD_at; Start 2; Stop 26
tgtttgaaaaagtcaatcgctctgg

SEQ ID NO: 240930 - DNA, 25 bp, Artificial
  probe
  misc_feature (1)..(25): SEQ ID NO: 3085; WAN024GDD_at; Start 135; Stop 159
tcaagaagtggagcaattggtcgga

SEQ ID NO: 240931 - DNA, 25 bp, Artificial
  probe
  misc_feature (1)..(25): SEQ ID NO: 3085; WAN024GDD_at; Start 99; Stop 123
caagaaacatcgttacttacaactc

SEQ ID NO: 240932 - DNA, 25 bp, Artificial
  probe
  misc_feature (1)..(25): SEQ ID NO: 3085; WAN024GDD_at; Start 20; Stop 44
gctctggcttgattatctatcttta

SEQ ID NO: 240933 - DNA, 25 bp, Artificial
  probe
  misc_feature (1)..(25): SEQ ID NO: 3085; WAN024GDD_at; Start 55; Stop 79
gatgccaaaaaactgcaggattatg

SEQ ID NO: 240934 - DNA, 25 bp, Artificial
  probe
  misc_feature (1)..(25): SEQ ID NO: 3085; WAN024GDD_at; Start 140; Stop 164
aagtggagcaattggtcggacgctt

SEQ ID NO: 240935 - DNA, 25 bp, Artificial
  probe
  misc_feature (1)..(25): SEQ ID NO: 3085; WAN024GDD_at; Start 208; Stop 232
caagagttggaaacaccctttgtgg

SEQ ID NO: 240936 - DNA, 25 bp, Artificial
  probe
  misc_feature (1)..(25): SEQ ID NO: 3085; WAN024GDD_at; Start 15; Stop 39
caatcgctctggcttgattatctat

SEQ ID NO: 240937 - DNA, 25 bp, Artificial
  probe
  misc_feature (1)..(25): SEQ ID NO: 3085; WAN024GDD_at; Start 147; Stop 171
gcaattggtcggacgcttgagcaag

SEQ ID NO: 240938 - DNA, 25 bp, Artificial
  probe
  misc_feature (1)..(25): SEQ ID NO: 3085; WAN024GDD_at; Start 152; Stop 176
tggtcggacgcttgagcaaggaaaa

SEQ ID NO: 240939 - DNA, 25 bp, Artificial
  probe
  misc_feature (1)..(25): SEQ ID NO: 3085; WAN024GDD_at; Start 60; Stop 84
caaaaaactgcaggattatggagat

SEQ ID NO: 240940 - DNA, 25 bp, Artificial
  probe
  misc_feature (1)..(25): SEQ ID NO: 3085; WAN024GDD_at; Start 124; Stop 148
tatgttccaactcaagaagtggagc

SEQ ID NO: 240941 - DNA, 25 bp, Artificial
  probe
  misc_feature (1)..(25): SEQ ID NO: 3085; WAN024GDD_at; Start 192; Stop 216
tagggtttgtcatatccaagagttg

SEQ ID NO: 240942 - DNA, 25 bp, Artificial
  probe
  misc_feature (1)..(25): SEQ ID NO: 3085; WAN024GDD_at; Start 79; Stop 103
ggagatattacctatcattccaaga

SEQ ID NO: 240943 - DNA, 25 bp, Artificial
  probe
  misc_feature (1)..(25): SEQ ID NO: 3085; WAN024GDD_at; Start 51; Stop 75
tcgtgatgccaaaaaactgcaggat

SEQ ID NO: 240944 - DNA, 25 bp, Artificial
  probe
  misc_feature (1)..(25): SEQ ID NO: 3085; WAN024GDD_at; Start 211; Stop 235
gagttggaaacaccctttgtgggca

SEQ ID NO: 240945 - DNA, 25 bp, Artificial
  probe
  misc_feature (1)..(25): SEQ ID NO: 3085; WAN024GDD_at; Start 155; Stop 179
tcggacgcttgagcaaggaaaaatt

SEQ ID NO: 240946 - DNA, 25 bp, Artificial
  probe
  misc_feature (1)..(25): SEQ ID NO: 3085; WAN024GDD_at; Start 70; Stop 94
caggattatggagatattacctatc

SEQ ID NO: 240947 - DNA, 25 bp, Artificial
  probe
  misc_feature (1)..(25): SEQ ID NO: 1058; WAN024GDE_at; Start 10; Stop 34
aaatttgccctatcgtttgtggcgc

SEQ ID NO: 240948 - DNA, 25 bp, Artificial
  probe
  misc_feature (1)..(25): SEQ ID NO: 1058; WAN024GDE_at; Start 409; Stop 433
tcaccaagtgcgactcaagatggat

SEQ ID NO: 240949 - DNA, 25 bp, Artificial
  probe
  misc_feature (1)..(25): SEQ ID NO: 1058; WAN024GDE_at; Start 1047; Stop 1071
tgaaggtgtaactggtcaaacaagc

SEQ ID NO: 240950 - DNA, 25 bp, Artificial
  probe
  misc_feature (1)..(25): SEQ ID NO: 1058; WAN024GDE_at; Start 25; Stop 49
tttgtggcgcttgcaagtgtagcac

SEQ ID NO: 240951 - DNA, 25 bp, Artificial
  probe
  misc_feature (1)..(25): SEQ ID NO: 1058; WAN024GDE_at; Start 1133; Stop 1157
ttgaagcagcagaagttgtaaaacc

SEQ ID NO: 240952 - DNA, 25 bp, Artificial
  probe
  misc_feature (1)..(25): SEQ ID NO: 1058; WAN024GDE_at; Start 282; Stop 306
tgaggctgcttcagttacaactaac

SEQ ID NO: 240953 - DNA, 25 bp, Artificial
  probe
  misc_feature (1)..(25): SEQ ID NO: 1058; WAN024GDE_at; Start 966; Stop 990
agttcaccttgtagcaaacgcagca

SEQ ID NO: 240954 - DNA, 25 bp, Artificial
  probe
  misc_feature (1)..(25): SEQ ID NO: 1058; WAN024GDE_at; Start 361; Stop 385
actgcagctgcggtagcgaacgcta

SEQ ID NO: 240955 - DNA, 25 bp, Artificial
  probe
  misc_feature (1)..(25): SEQ ID NO: 1058; WAN024GDE_at; Start 557; Stop 581
ccagtgactatgctaaagggattgc

SEQ ID NO: 240956 - DNA, 25 bp, Artificial
  probe
  misc_feature (1)..(25): SEQ ID NO: 1058; WAN024GDE_at; Start 904; Stop 928
gacgcttaccgtgctaagtacaatg

SEQ ID NO: 240957 - DNA, 25 bp, Artificial
  probe
  misc_feature (1)..(25): SEQ ID NO: 1058; WAN024GDE_at; Start 625; Stop 649
gaaactttcgtagcaggtgacacag

SEQ ID NO: 240958 - DNA, 25 bp, Artificial
  probe
  misc_feature (1)..(25): SEQ ID NO: 1058; WAN024GDE_at; Start 170; Stop 194
gaacagctgaacaaaaaggtgccca

SEQ ID NO: 240959 - DNA, 25 bp, Artificial
  probe
  misc_feature (1)..(25): SEQ ID NO: 1058; WAN024GDE_at; Start 267; Stop 291
taagtctgaaacagctgaggctgct

SEQ ID NO: 240960 - DNA, 25 bp, Artificial
  probe
  misc_feature (1)..(25): SEQ ID NO: 1058; WAN024GDE_at; Start 706; Stop 730
cctggttactataatgaggctggta

SEQ ID NO: 240961 - DNA, 25 bp, Artificial
  probe
  misc_feature (1)..(25): SEQ ID NO: 1058; WAN024GDE_at; Start 203; Stop 227
ttgatgaaatcaatgccgcaggtgg

SEQ ID NO: 240962 - DNA, 25 bp, Artificial
  probe
  misc_feature (1)..(25): SEQ ID NO: 1058; WAN024GDE_at; Start 87; Stop 111
caacactgctggtaactcagtagag

SEQ ID NO: 240963 - DNA, 25 bp, Artificial
  probe
  misc_feature (1)..(25): SEQ ID NO: 1058; WAN024GDE_at; Start 1063; Stop 1087
caaacaagcttcgatgcagaccaca

SEQ ID NO: 240964 - DNA, 25 bp, Artificial
  probe
  misc_feature (1)..(25): SEQ ID NO: 1058; WAN024GDE_at; Start 379; Stop 403
aacgctacaaaagcaggtgttccat

SEQ ID NO: 240965 - DNA, 25 bp, Artificial
  probe
  misc_feature (1)..(25): SEQ ID NO: 1058; WAN024GDE_at; Start 770; Stop 794
caatcgttggtggtgatggattcaa

SEQ ID NO: 240966 - DNA, 25 bp, Artificial
  probe
  misc_feature (1)..(25): SEQ ID NO: 1058; WAN024GDE_at; Start 599; Stop 623
catacaagggtgaaatcgttgcaga

SEQ ID NO: 240967 - DNA, 25 bp, Artificial
  probe
  misc_feature (1)..(25): SEQ ID NO: 1058; WAN024GDE_at; Start 464; Stop 488
gaactttccaagatagcttccaagg

SEQ ID NO: 240968 - DNA, 25 bp, Artificial
  probe
  misc_feature (1)..(25): SEQ ID NO: 1058; WAN024GDE_at; Start 148; Stop 172
tcaggttctttagctgcatacggaa

SEQ ID NO: 240969 - DNA, 25 bp, Artificial
  probe
  misc_feature (1)..(25): SEQ ID NO: 1058; WAN024GDE_at; Start 67; Stop 91
gaagtgaagtctggagcagtcaaca

SEQ ID NO: 240970 - DNA, 25 bp, Artificial
  probe
  misc_feature (1)..(25): SEQ ID NO: 1058; WAN024GDE_at; Start 44; Stop 68
tagcacttcttgcagcctgtggaga

SEQ ID NO: 240971 - DNA, 25 bp, Artificial
  probe
  misc_feature (1)..(25): SEQ ID NO: 1058; WAN024GDE_at; Start 931; Stop 955
gagccttcaacatttgcagccttgg

SEQ ID NO: 240972 - DNA, 25 bp, Artificial
  probe
  misc_feature (1)..(25): SEQ ID NO: 1058; WAN024GDE_at; Start 947; Stop 971
cagccttggcttatgattcagttca

SEQ ID NO: 240973 - DNA, 25 bp, Artificial
  probe
  misc_feature (1)..(25): SEQ ID NO: 1058; WAN024GDE_at; Start 338; Stop 362
taggacctgcgacatctggtgcgac

SEQ ID NO: 240974 - DNA, 25 bp, Artificial
  probe
  misc_feature (1)..(25): SEQ ID NO: 1058; WAN024GDE_at; Start 755; Stop 779
tgggaattgacaaaccaatcgttgg

SEQ ID NO: 240975 - DNA, 25 bp, Artificial
  probe
  misc_feature (1)..(25): SEQ ID NO: 1058; WAN024GDE_at; Start 189; Stop 213
tgcccaattggctgttgatgaaatc

SEQ ID NO: 240976 - DNA, 25 bp, Artificial
  probe
  misc_feature (1)..(25): SEQ ID NO: 1058; WAN024GDE_at; Start 321; Stop 345
taaagtatcagcagtcgtaggacct

SEQ ID NO: 240977 - DNA, 25 bp, Artificial
  probe
  misc_feature (1)..(25): SEQ ID NO: 1058; WAN024GDE_at; Start 584; Stop 608
aatctttccgcgagtcatacaaggg

SEQ ID NO: 240978 - DNA, 25 bp, Artificial
  probe
  misc_feature (1)..(25): SEQ ID NO: 1058; WAN024GDE_at; Start 792; Stop 816
caacggtgaggagtttgtacaacaa

SEQ ID NO: 240979 - DNA, 25 bp, Artificial
  probe
  misc_feature (1)..(25): SEQ ID NO: 1058; WAN024GDE_at; Start 218; Stop 242
ccgcaggtggtatcgatggaaaaca

SEQ ID NO: 240980 - DNA, 25 bp, Artificial
  probe
  misc_feature (1)..(25): SEQ ID NO: 1058; WAN024GDE_at; Start 883; Stop 907
gctaaagctaaagccttccttgacg

SEQ ID NO: 240981 - DNA, 25 bp, Artificial
  probe
  misc_feature (1)..(25): SEQ ID NO: 5056; WAN024GDF_at; Start 62; Stop 86
tcatcacggtacataccgatgtggc

SEQ ID NO: 240982 - DNA, 25 bp, Artificial
  probe
  misc_feature (1)..(25): SEQ ID NO: 5056; WAN024GDF_at; Start 75; Stop 99
taccgatgtggccaactttagcagc

SEQ ID NO: 240983 - DNA, 25 bp, Artificial
  probe
  misc_feature (1)..(25): SEQ ID NO: 5056; WAN024GDF_at; Start 5; Stop 29
cgttggtcaatgtcctcaggcaatt

SEQ ID NO: 240984 - DNA, 25 bp, Artificial
  probe
  misc_feature (1)..(25): SEQ ID NO: 5056; WAN024GDF_at; Start 160; Stop 184
ggccaatttcttacctgccaattgt

SEQ ID NO: 240985 - DNA, 25 bp, Artificial
  probe
  misc_feature (1)..(25): SEQ ID NO: 5056; WAN024GDF_at; Start 207; Stop 231
gtgtttcgatttccacatcttctag

SEQ ID NO: 240986 - DNA, 25 bp, Artificial
  probe
  misc_feature (1)..(25): SEQ ID NO: 5056; WAN024GDF_at; Start 142; Stop 166
acgcaagattgggacgatggccaat

SEQ ID NO: 240987 - DNA, 25 bp, Artificial
  probe
  misc_feature (1)..(25): SEQ ID NO: 5056; WAN024GDF_at; Start 71; Stop 95
tacataccgatgtggccaactttag

SEQ ID NO: 240988 - DNA, 25 bp, Artificial
  probe
  misc_feature (1)..(25): SEQ ID NO: 5056; WAN024GDF_at; Start 199; Stop 223
tgtaattggtgtttcgatttccaca

SEQ ID NO: 240989 - DNA, 25 bp, Artificial
  probe
  misc_feature (1)..(25): SEQ ID NO: 5056; WAN024GDF_at; Start 42; Stop 66
caactggttgaagtgtttcttcatc

SEQ ID NO: 240990 - DNA, 25 bp, Artificial
  probe
  misc_feature (1)..(25): SEQ ID NO: 5056; WAN024GDF_at; Start 30; Stop 54
tcaccaagtattcaactggttgaag

SEQ ID NO: 240991 - DNA, 25 bp, Artificial
  probe
  misc_feature (1)..(25): SEQ ID NO: 5056; WAN024GDF_at; Start 111; Stop 135
tcaagagaccatcaaccatcccgat

SEQ ID NO: 240992 - DNA, 25 bp, Artificial
  probe
  misc_feature (1)..(25): SEQ ID NO: 5056; WAN024GDF_at; Start 68; Stop 92
cggtacataccgatgtggccaactt

SEQ ID NO: 240993 - DNA, 25 bp, Artificial
  probe
  misc_feature (1)..(25): SEQ ID NO: 5056; WAN024GDF_at; Start 173; Stop 197
cctgccaattgtttttgaactgttt

SEQ ID NO: 240994 - DNA, 25 bp, Artificial
  probe
  misc_feature (1)..(25): SEQ ID NO: 5056; WAN024GDF_at; Start 51; Stop 75
gaagtgtttcttcatcacggtacat

SEQ ID NO: 240995 - DNA, 25 bp, Artificial
  probe
  misc_feature (1)..(25): SEQ ID NO: 5056; WAN024GDF_at; Start 55; Stop 79
tgtttcttcatcacggtacataccg

SEQ ID NO: 240996 - DNA, 25 bp, Artificial
  probe
  misc_feature (1)..(25): SEQ ID NO: 5056; WAN024GDF_at; Start 24; Stop 48
gcaatttcaccaagtattcaactgg

SEQ ID NO: 240997 - DNA, 25 bp, Artificial
  probe
  misc_feature (1)..(25): SEQ ID NO: 5056; WAN024GDF_at; Start 135; Stop 159
tacctgcacgcaagattgggacgat

SEQ ID NO: 240998 - DNA, 25 bp, Artificial
  probe
  misc_feature (1)..(25): SEQ ID NO: 5056; WAN024GDF_at; Start 13; Stop 37
aatgtcctcaggcaatttcaccaag

SEQ ID NO: 240999 - DNA, 25 bp, Artificial
  probe
  misc_feature (1)..(25): SEQ ID NO: 5056; WAN024GDF_at; Start 129; Stop 153
tcccgatacctgcacgcaagattgg

SEQ ID NO: 241000 - DNA, 25 bp, Artificial
  probe
  misc_feature (1)..(25): SEQ ID NO: 5056; WAN024GDF_at; Start 156; Stop 180
cgatggccaatttcttacctgccaa

SEQ ID NO: 241001 - DNA, 25 bp, Artificial
  probe
  misc_feature (1)..(25): SEQ ID NO: 5056; WAN024GDF_at; Start 133; Stop 157
gatacctgcacgcaagattgggacg

SEQ ID NO: 241002 - DNA, 25 bp, Artificial
  probe
  misc_feature (1)..(25): SEQ ID NO: 5056; WAN024GDF_at; Start 79; Stop 103
gatgtggccaactttagcagctgga

SEQ ID NO: 241003 - DNA, 25 bp, Artificial
  probe
  misc_feature (1)..(25): SEQ ID NO: 5056; WAN024GDF_at; Start 145; Stop 169
caagattgggacgatggccaatttc

SEQ ID NO: 241004 - DNA, 25 bp, Artificial
  probe
  misc_feature (1)..(25): SEQ ID NO: 5056; WAN024GDF_at; Start 3; Stop 27
gacgttggtcaatgtcctcaggcaa

SEQ ID NO: 241005 - DNA, 25 bp, Artificial
  probe
  misc_feature (1)..(25): SEQ ID NO: 5056; WAN024GDF_at; Start 15; Stop 39
tgtcctcaggcaatttcaccaagta

SEQ ID NO: 241006 - DNA, 25 bp, Artificial
  probe
  misc_feature (1)..(25): SEQ ID NO: 5056; WAN024GDF_at; Start 170; Stop 194
ttacctgccaattgtttttgaactg

SEQ ID NO: 241007 - DNA, 25 bp, Artificial
  probe
  misc_feature (1)..(25): SEQ ID NO: 5056; WAN024GDF_at; Start 85; Stop 109
gccaactttagcagctggaaccaag

SEQ ID NO: 241008 - DNA, 25 bp, Artificial
  probe
  misc_feature (1)..(25): SEQ ID NO: 5056; WAN024GDF_at; Start 20; Stop 44
tcaggcaatttcaccaagtattcaa

SEQ ID NO: 241009 - DNA, 25 bp, Artificial
  probe
  misc_feature (1)..(25): SEQ ID NO: 5056; WAN024GDF_at; Start 113; Stop 137
aagagaccatcaaccatcccgatac

SEQ ID NO: 241010 - DNA, 25 bp, Artificial
  probe
  misc_feature (1)..(25): SEQ ID NO: 5056; WAN024GDF_at; Start 1; Stop 25
ttgacgttggtcaatgtcctcaggc

SEQ ID NO: 241011 - DNA, 25 bp, Artificial
  probe
  misc_feature (1)..(25): SEQ ID NO: 5056; WAN024GDF_at; Start 65; Stop 89
tcacggtacataccgatgtggccaa

SEQ ID NO: 241012 - DNA, 25 bp, Artificial
  probe
  misc_feature (1)..(25): SEQ ID NO: 5056; WAN024GDF_at; Start 152; Stop 176
gggacgatggccaatttcttacctg

SEQ ID NO: 241013 - DNA, 25 bp, Artificial
  probe
  misc_feature (1)..(25): SEQ ID NO: 5056; WAN024GDF_at; Start 81; Stop 105
tgtggccaactttagcagctggaac

SEQ ID NO: 241014 - DNA, 25 bp, Artificial
  probe
  misc_feature (1)..(25): SEQ ID NO: 5056; WAN024GDF_at; Start 139; Stop 163
tgcacgcaagattgggacgatggcc

SEQ ID NO: 241015 - DNA, 25 bp, Artificial
  probe
  misc_feature (1)..(25): SEQ ID NO: 5611; WAN024GDG_at; Start 243; Stop 267
cctctggagcagatacaaggcagac

SEQ ID NO: 241016 - DNA, 25 bp, Artificial
  probe
  misc_feature (1)..(25): SEQ ID NO: 5611; WAN024GDG_at; Start 210; Stop 234
catctggatgagcttcttgaagggc

SEQ ID NO: 241017 - DNA, 25 bp, Artificial
  probe
  misc_feature (1)..(25): SEQ ID NO: 5611; WAN024GDG_at; Start 258; Stop 282
caaggcagacaaatttgatatttga

SEQ ID NO: 241018 - DNA, 25 bp, Artificial
  probe
  misc_feature (1)..(25): SEQ ID NO: 5611; WAN024GDG_at; Start 232; Stop 256
ggcttttacaccctctggagcagat

SEQ ID NO: 241019 - DNA, 25 bp, Artificial
  probe
  misc_feature (1)..(25): SEQ ID NO: 5611; WAN024GDG_at; Start 169; Stop 193
ttcgttcaaacgttcatccaaggct

SEQ ID NO: 241020 - DNA, 25 bp, Artificial
  probe
  misc_feature (1)..(25): SEQ ID NO: 5611; WAN024GDG_at; Start 87; Stop 111
caagtcattcttcttttcgatctta

SEQ ID NO: 241021 - DNA, 25 bp, Artificial
  probe
  misc_feature (1)..(25): SEQ ID NO: 5611; WAN024GDG_at; Start 6; Stop 30
caaaaaaggtcaaatttttgctctg

SEQ ID NO: 241022 - DNA, 25 bp, Artificial
  probe
  misc_feature (1)..(25): SEQ ID NO: 5611; WAN024GDG_at; Start 227; Stop 251
tgaagggcttttacaccctctggag

SEQ ID NO: 241023 - DNA, 25 bp, Artificial
  probe
  misc_feature (1)..(25): SEQ ID NO: 5611; WAN024GDG_at; Start 142; Stop 166
tccaagacctggaacgatataaccg

SEQ ID NO: 241024 - DNA, 25 bp, Artificial
  probe
  misc_feature (1)..(25): SEQ ID NO: 5611; WAN024GDG_at; Start 180; Stop 204
gttcatccaaggctgctgtaaagat

SEQ ID NO: 241025 - DNA, 25 bp, Artificial
  probe
  misc_feature (1)..(25): SEQ ID NO: 5611; WAN024GDG_at; Start 115; Stop 139
tgtaccgaacaagcggtctccagca

SEQ ID NO: 241026 - DNA, 25 bp, Artificial
  probe
  misc_feature (1)..(25): SEQ ID NO: 5611; WAN024GDG_at; Start 238; Stop 262
tacaccctctggagcagatacaagg

SEQ ID NO: 241027 - DNA, 25 bp, Artificial
  probe
  misc_feature (1)..(25): SEQ ID NO: 5611; WAN024GDG_at; Start 110; Stop 134
tattttgtaccgaacaagcggtctc

SEQ ID NO: 241028 - DNA, 25 bp, Artificial
  probe
  misc_feature (1)..(25): SEQ ID NO: 5611; WAN024GDG_at; Start 175; Stop 199
caaacgttcatccaaggctgctgta

SEQ ID NO: 241029 - DNA, 25 bp, Artificial
  probe
  misc_feature (1)..(25): SEQ ID NO: 5611; WAN024GDG_at; Start 135; Stop 159
cagcatctccaagacctggaacgat

SEQ ID NO: 241030 - DNA, 25 bp, Artificial
  probe
  misc_feature (1)..(25): SEQ ID NO: 5611; WAN024GDG_at; Start 172; Stop 196
gttcaaacgttcatccaaggctgct

SEQ ID NO: 241031 - DNA, 25 bp, Artificial
  probe
  misc_feature (1)..(25): SEQ ID NO: 5611; WAN024GDG_at; Start 122; Stop 146
aacaagcggtctccagcatctccaa

SEQ ID NO: 241032 - DNA, 25 bp, Artificial
  probe
  misc_feature (1)..(25): SEQ ID NO: 5611; WAN024GDG_at; Start 156; Stop 180
cgatataaccgtgttcgttcaaacg

SEQ ID NO: 241033 - DNA, 25 bp, Artificial
  probe
  misc_feature (1)..(25): SEQ ID NO: 5611; WAN024GDG_at; Start 251; Stop 275
gcagatacaaggcagacaaatttga

SEQ ID NO: 241034 - DNA, 25 bp, Artificial
  probe
  misc_feature (1)..(25): SEQ ID NO: 5611; WAN024GDG_at; Start 34; Stop 58
tcattagacagaaacaaaaacccaa

SEQ ID NO: 241035 - DNA, 25 bp, Artificial
  probe
  misc_feature (1)..(25): SEQ ID NO: 5611; WAN024GDG_at; Start 208; Stop 232
tacatctggatgagcttcttgaagg

SEQ ID NO: 241036 - DNA, 25 bp, Artificial
  probe
  misc_feature (1)..(25): SEQ ID NO: 5611; WAN024GDG_at; Start 198; Stop 222
taaagatttctacatctggatgagc

SEQ ID NO: 241037 - DNA, 25 bp, Artificial
  probe
  misc_feature (1)..(25): SEQ ID NO: 5611; WAN024GDG_at; Start 56; Stop 80
caacctcctttcgtgactggaaata

SEQ ID NO: 241038 - DNA, 25 bp, Artificial
  probe
  misc_feature (1)..(25): SEQ ID NO: 5611; WAN024GDG_at; Start 247; Stop 271
tggagcagatacaaggcagacaaat

SEQ ID NO: 241039 - DNA, 25 bp, Artificial
  probe
  misc_feature (1)..(25): SEQ ID NO: 5611; WAN024GDG_at; Start 186; Stop 210
ccaaggctgctgtaaagatttctac

SEQ ID NO: 241040 - DNA, 25 bp, Artificial
  probe
  misc_feature (1)..(25): SEQ ID NO: 5611; WAN024GDG_at; Start 66; Stop 90
tcgtgactggaaatacttttccaag

SEQ ID NO: 241041 - DNA, 25 bp, Artificial
  probe
  misc_feature (1)..(25): SEQ ID NO: 5611; WAN024GDG_at; Start 75; Stop 99
gaaatacttttccaagtcattcttc

SEQ ID NO: 241042 - DNA, 25 bp, Artificial
  probe
  misc_feature (1)..(25): SEQ ID NO: 5611; WAN024GDG_at; Start 25; Stop 49
gctctgctttcattagacagaaaca

SEQ ID NO: 241043 - DNA, 25 bp, Artificial
  probe
  misc_feature (1)..(25): SEQ ID NO: 5611; WAN024GDG_at; Start 144; Stop 168
caagacctggaacgatataaccgtg

SEQ ID NO: 241044 - DNA, 25 bp, Artificial
  probe
  misc_feature (1)..(25): SEQ ID NO: 5611; WAN024GDG_at; Start 129; Stop 153
ggtctccagcatctccaagacctgg

SEQ ID NO: 241045 - DNA, 25 bp, Artificial
  probe
  misc_feature (1)..(25): SEQ ID NO: 5611; WAN024GDG_at; Start 149; Stop 173
cctggaacgatataaccgtgttcgt

SEQ ID NO: 241046 - DNA, 25 bp, Artificial
  probe
  misc_feature (1)..(25): SEQ ID NO: 5611; WAN024GDG_at; Start 219; Stop 243
gagcttcttgaagggcttttacacc

SEQ ID NO: 241047 - DNA, 25 bp, Artificial
  probe
  misc_feature (1)..(25): SEQ ID NO: 5611; WAN024GDG_at; Start 13; Stop 37
ggtcaaatttttgctctgctttcat

SEQ ID NO: 241048 - DNA, 25 bp, Artificial
  probe
  misc_feature (1)..(25): SEQ ID NO: 5611; WAN024GDG_at; Start 103; Stop 127
tcgatcttattttgtaccgaacaag

SEQ ID NO: 241049 - DNA, 25 bp, Artificial
  probe
  misc_feature (1)..(25): SEQ ID NO: 4897; WAN024GDH_at; Start 74; Stop 98
tcttgcgtcgtacagatacttctac

SEQ ID NO: 241050 - DNA, 25 bp, Artificial
  probe
  misc_feature (1)..(25): SEQ ID NO: 4897; WAN024GDH_at; Start 485; Stop 509
tcaaatttgtctgccttgtatctgc

SEQ ID NO: 241051 - DNA, 25 bp, Artificial
  probe
  misc_feature (1)..(25): SEQ ID NO: 4897; WAN024GDH_at; Start 63; Stop 87
caaattgtcaatcttgcgtcgtaca

SEQ ID NO: 241052 - DNA, 25 bp, Artificial
  probe
  misc_feature (1)..(25): SEQ ID NO: 4897; WAN024GDH_at; Start 108; Stop 132
tcgtgagctagtagatgagattgca

SEQ ID NO: 241053 - DNA, 25 bp, Artificial
  probe
  misc_feature (1)..(25): SEQ ID NO: 4897; WAN024GDH_at; Start 148; Stop 172
gaagtacttcgtgatcttccactag

SEQ ID NO: 241054 - DNA, 25 bp, Artificial
  probe
  misc_feature (1)..(25): SEQ ID NO: 4897; WAN024GDH_at; Start 346; Stop 370
cttcaaccagttgaatacttggtga

SEQ ID NO: 241055 - DNA, 25 bp, Artificial
  probe
  misc_feature (1)..(25): SEQ ID NO: 4897; WAN024GDH_at; Start 580; Stop 604
cgtttgaacgaacacggttatatcg

SEQ ID NO: 241056 - DNA, 25 bp, Artificial
  probe
  misc_feature (1)..(25): SEQ ID NO: 4897; WAN024GDH_at; Start 32; Stop 56
ttgaagttattaatcacccactgat

SEQ ID NO: 241057 - DNA, 25 bp, Artificial
  probe
  misc_feature (1)..(25): SEQ ID NO: 4897; WAN024GDH_at; Start 624; Stop 648
tggagaccgcttgttcggtacaaaa

SEQ ID NO: 241058 - DNA, 25 bp, Artificial
  probe
  misc_feature (1)..(25): SEQ ID NO: 4897; WAN024GDH_at; Start 457; Stop 481
tctcttaaaaaacgtggcgcatcaa

SEQ ID NO: 241059 - DNA, 25 bp, Artificial
  probe
  misc_feature (1)..(25): SEQ ID NO: 4897; WAN024GDH_at; Start 528; Stop 552
ccttcaagaagctcatccagatgta

SEQ ID NO: 241060 - DNA, 25 bp, Artificial
  probe
  misc_feature (1)..(25): SEQ ID NO: 4897; WAN024GDH_at; Start 237; Stop 261
ggccatcgtcccaatcttgcgtgca

SEQ ID NO: 241061 - DNA, 25 bp, Artificial
  probe
  misc_feature (1)..(25): SEQ ID NO: 4897; WAN024GDH_at; Start 375; Stop 399
gcctgaggacattgaccaacgtcaa

SEQ ID NO: 241062 - DNA, 25 bp, Artificial
  probe
  misc_feature (1)..(25): SEQ ID NO: 4897; WAN024GDH_at; Start 308; Stop 332
aagttggccacatcggtatgtaccg

SEQ ID NO: 241063 - DNA, 25 bp, Artificial
  probe
  misc_feature (1)..(25): SEQ ID NO: 4897; WAN024GDH_at; Start 264; Stop 288
tatcgggatggttgatggtctcttg

SEQ ID NO: 241064 - DNA, 25 bp, Artificial
  probe
  misc_feature (1)..(25): SEQ ID NO: 4897; WAN024GDH_at; Start 440; Stop 464
caatcttggctgttgattctcttaa

SEQ ID NO: 241065 - DNA, 25 bp, Artificial
  probe
  misc_feature (1)..(25): SEQ ID NO: 4897; WAN024GDH_at; Start 594; Stop 618
cggttatatcgttccaggtcttgga

SEQ ID NO: 241066 - DNA, 25 bp, Artificial
  probe
  misc_feature (1)..(25): SEQ ID NO: 4897; WAN024GDH_at; Start 566; Stop 590
cagccttggatgaacgtttgaacga

SEQ ID NO: 241067 - DNA, 25 bp, Artificial
  probe
  misc_feature (1)..(25): SEQ ID NO: 4897; WAN024GDH_at; Start 334; Stop 358
gatgaagaaacacttcaaccagttg

SEQ ID NO: 241068 - DNA, 25 bp, Artificial
  probe
  misc_feature (1)..(25): SEQ ID NO: 4897; WAN024GDH_at; Start 206; Stop 230
cagttcaaaaacaattggcaggtaa

SEQ ID NO: 241069 - DNA, 25 bp, Artificial
  probe
  misc_feature (1)..(25): SEQ ID NO: 4897; WAN024GDH_at; Start 48; Stop 72
cccactgattcaacacaaattgtca

SEQ ID NO: 241070 - DNA, 25 bp, Artificial
  probe
  misc_feature (1)..(25): SEQ ID NO: 4897; WAN024GDH_at; Start 88; Stop 112
gatacttctacaaaagcttttcgtg

SEQ ID NO: 241071 - DNA, 25 bp, Artificial
  probe
  misc_feature (1)..(25): SEQ ID NO: 4897; WAN024GDH_at; Start 612; Stop 636
tcttggagatgctggagaccgcttg

SEQ ID NO: 241072 - DNA, 25 bp, Artificial
  probe
  misc_feature (1)..(25): SEQ ID NO: 4897; WAN024GDH_at; Start 361; Stop 385
tacttggtgaaattgcctgaggaca

SEQ ID NO: 241073 - DNA, 25 bp, Artificial
  probe
  misc_feature (1)..(25): SEQ ID NO: 4897; WAN024GDH_at; Start 321; Stop 345
cggtatgtaccgtgatgaagaaaca

SEQ ID NO: 241074 - DNA, 25 bp, Artificial
  probe
  misc_feature (1)..(25): SEQ ID NO: 4897; WAN024GDH_at; Start 416; Stop 440
caatgttggcaacaggtggctcagc

SEQ ID NO: 241075 - DNA, 25 bp, Artificial
  probe
  misc_feature (1)..(25): SEQ ID NO: 4897; WAN024GDH_at; Start 294; Stop 318
ggttccagctgctaaagttggccac

SEQ ID NO: 241076 - DNA, 25 bp, Artificial
  probe
  misc_feature (1)..(25): SEQ ID NO: 4897; WAN024GDH_at; Start 167; Stop 191
cactagaagatgtggaaatcgaaac

SEQ ID NO: 241077 - DNA, 25 bp, Artificial
  probe
  misc_feature (1)..(25): SEQ ID NO: 4897; WAN024GDH_at; Start 501; Stop 525
tgtatctgctccagagggtgtaaaa

SEQ ID NO: 241078 - DNA, 25 bp, Artificial
  probe
  misc_feature (1)..(25): SEQ ID NO: 4897; WAN024GDH_at; Start 551; Stop 575
tagaaatctttacagcagccttgga

SEQ ID NO: 241079 - DNA, 25 bp, Artificial
  probe
  misc_feature (1)..(25): SEQ ID NO: 4897; WAN024GDH_at; Start 223; Stop 247
gcaggtaagaaattggccatcgtcc

SEQ ID NO: 241080 - DNA, 25 bp, Artificial
  probe
  misc_feature (1)..(25): SEQ ID NO: 4897; WAN024GDH_at; Start 177; Stop 201
tgtggaaatcgaaacaccaattaca

SEQ ID NO: 241081 - DNA, 25 bp, Artificial
  probe
  misc_feature (1)..(25): SEQ ID NO: 4897; WAN024GDH_at; Start 248; Stop 272
caatcttgcgtgcaggtatcgggat

SEQ ID NO: 241082 - DNA, 25 bp, Artificial
  probe
  misc_feature (1)..(25): SEQ ID NO: 4897; WAN024GDH_at; Start 425; Stop 449
caacaggtggctcagcaatcttggc

SEQ ID NO: 241083 - DNA, 25 bp, Artificial
  probe
  misc_feature (1)..(25): SEQ ID NO: 4112; WAN024GDI_at; Start 69; Stop 93
cgcaattagtagagcttgggctgca

SEQ ID NO: 241084 - DNA, 25 bp, Artificial
  probe
  misc_feature (1)..(25): SEQ ID NO: 4112; WAN024GDI_at; Start 92; Stop 116
caaaatactcatcccaggccagtct

SEQ ID NO: 241085 - DNA, 25 bp, Artificial
  probe
  misc_feature (1)..(25): SEQ ID NO: 4112; WAN024GDI_at; Start 159; Stop 183
aaatggtaaacctaaatctgcaatc

SEQ ID NO: 241086 - DNA, 25 bp, Artificial
  probe
  misc_feature (1)..(25): SEQ ID NO: 4112; WAN024GDI_at; Start 178; Stop 202
gcaatcttttcagctggtaccttca

SEQ ID NO: 241087 - DNA, 25 bp, Artificial
  probe
  misc_feature (1)..(25): SEQ ID NO: 4112; WAN024GDI_at; Start 81; Stop 105
agcttgggctgcaaaatactcatcc

SEQ ID NO: 241088 - DNA, 25 bp, Artificial
  probe
  misc_feature (1)..(25): SEQ ID NO: 4112; WAN024GDI_at; Start 182; Stop 206
tcttttcagctggtaccttcatgcc

SEQ ID NO: 241089 - DNA, 25 bp, Artificial
  probe
  misc_feature (1)..(25): SEQ ID NO: 4112; WAN024GDI_at; Start 90; Stop 114
tgcaaaatactcatcccaggccagt

SEQ ID NO: 241090 - DNA, 25 bp, Artificial
  probe
  misc_feature (1)..(25): SEQ ID NO: 4112; WAN024GDI_at; Start 53; Stop 77
tacaagtggaacgattcgcaattag

SEQ ID NO: 241091 - DNA, 25 bp, Artificial
  probe
  misc_feature (1)..(25): SEQ ID NO: 4112; WAN024GDI_at; Start 47; Stop 71
cacgtttacaagtggaacgattcgc

SEQ ID NO: 241092 - DNA, 25 bp, Artificial
  probe
  misc_feature (1)..(25): SEQ ID NO: 4112; WAN024GDI_at; Start 227; Stop 251
ggacagagacgatggctgagctcca

SEQ ID NO: 241093 - DNA, 25 bp, Artificial
  probe
  misc_feature (1)..(25): SEQ ID NO: 4112; WAN024GDI_at; Start 203; Stop 227
tgccatccttgatccattttagaag

SEQ ID NO: 241094 - DNA, 25 bp, Artificial
  probe
  misc_feature (1)..(25): SEQ ID NO: 4112; WAN024GDI_at; Start 19; Stop 43
tcttttaccagaatcgcgcccactt

SEQ ID NO: 241095 - DNA, 25 bp, Artificial
  probe
  misc_feature (1)..(25): SEQ ID NO: 4112; WAN024GDI_at; Start 86; Stop 110
gggctgcaaaatactcatcccaggc

SEQ ID NO: 241096 - DNA, 25 bp, Artificial
  probe
  misc_feature (1)..(25): SEQ ID NO: 4112; WAN024GDI_at; Start 27; Stop 51
cagaatcgcgcccactttagcacgt

SEQ ID NO: 241097 - DNA, 25 bp, Artificial
  probe
  misc_feature (1)..(25): SEQ ID NO: 4112; WAN024GDI_at; Start 194; Stop 218
gtaccttcatgccatccttgatcca

SEQ ID NO: 241098 - DNA, 25 bp, Artificial
  probe
  misc_feature (1)..(25): SEQ ID NO: 4112; WAN024GDI_at; Start 65; Stop 89
gattcgcaattagtagagcttgggc

SEQ ID NO: 241099 - DNA, 25 bp, Artificial
  probe
  misc_feature (1)..(25): SEQ ID NO: 4112; WAN024GDI_at; Start 171; Stop 195
taaatctgcaatcttttcagctggt

SEQ ID NO: 241100 - DNA, 25 bp, Artificial
  probe
  misc_feature (1)..(25): SEQ ID NO: 4112; WAN024GDI_at; Start 100; Stop 124
tcatcccaggccagtcttttttcag

SEQ ID NO: 241101 - DNA, 25 bp, Artificial
  probe
  misc_feature (1)..(25): SEQ ID NO: 4112; WAN024GDI_at; Start 71; Stop 95
caattagtagagcttgggctgcaaa

SEQ ID NO: 241102 - DNA, 25 bp, Artificial
  probe
  misc_feature (1)..(25): SEQ ID NO: 4112; WAN024GDI_at; Start 213; Stop 237
gatccattttagaaggacagagacg

SEQ ID NO: 241103 - DNA, 25 bp, Artificial
  probe
  misc_feature (1)..(25): SEQ ID NO: 4112; WAN024GDI_at; Start 34; Stop 58
gcgcccactttagcacgtttacaag

SEQ ID NO: 241104 - DNA, 25 bp, Artificial
  probe
  misc_feature (1)..(25): SEQ ID NO: 4112; WAN024GDI_at; Start 78; Stop 102
tagagcttgggctgcaaaatactca

SEQ ID NO: 241105 - DNA, 25 bp, Artificial
  probe
  misc_feature (1)..(25): SEQ ID NO: 4112; WAN024GDI_at; Start 41; Stop 65
ctttagcacgtttacaagtggaacg

SEQ ID NO: 241106 - DNA, 25 bp, Artificial
  probe
  misc_feature (1)..(25): SEQ ID NO: 4112; WAN024GDI_at; Start 29; Stop 53
gaatcgcgcccactttagcacgttt

SEQ ID NO: 241107 - DNA, 25 bp, Artificial
  probe
  misc_feature (1)..(25): SEQ ID NO: 4112; WAN024GDI_at; Start 125; Stop 149
tcatctcttttctcctttttctcta

SEQ ID NO: 241108 - DNA, 25 bp, Artificial
  probe
  misc_feature (1)..(25): SEQ ID NO: 4112; WAN024GDI_at; Start 108; Stop 132
ggccagtcttttttcagtcatctct

SEQ ID NO: 241109 - DNA, 25 bp, Artificial
  probe
  misc_feature (1)..(25): SEQ ID NO: 4112; WAN024GDI_at; Start 230; Stop 254
cagagacgatggctgagctccagaa

SEQ ID NO: 241110 - DNA, 25 bp, Artificial
  probe
  misc_feature (1)..(25): SEQ ID NO: 4112; WAN024GDI_at; Start 234; Stop 258
gacgatggctgagctccagaaggaa

SEQ ID NO: 241111 - DNA, 25 bp, Artificial
  probe
  misc_feature (1)..(25): SEQ ID NO: 4112; WAN024GDI_at; Start 236; Stop 260
cgatggctgagctccagaaggaatg

SEQ ID NO: 241112 - DNA, 25 bp, Artificial
  probe
  misc_feature (1)..(25): SEQ ID NO: 4112; WAN024GDI_at; Start 59; Stop 83
tggaacgattcgcaattagtagagc

SEQ ID NO: 241113 - DNA, 25 bp, Artificial
  probe
  misc_feature (1)..(25): SEQ ID NO: 4112; WAN024GDI_at; Start 14; Stop 38
tattatcttttaccagaatcgcgcc

SEQ ID NO: 241114 - DNA, 25 bp, Artificial
  probe
  misc_feature (1)..(25): SEQ ID NO: 4112; WAN024GDI_at; Start 190; Stop 214
gctggtaccttcatgccatccttga

SEQ ID NO: 241115 - DNA, 25 bp, Artificial
  probe
  misc_feature (1)..(25): SEQ ID NO: 4112; WAN024GDI_at; Start 219; Stop 243
ttttagaaggacagagacgatggct

SEQ ID NO: 241116 - DNA, 25 bp, Artificial
  probe
  misc_feature (1)..(25): SEQ ID NO: 4112; WAN024GDI_at; Start 105; Stop 129
ccaggccagtcttttttcagtcatc

SEQ ID NO: 241117 - DNA, 25 bp, Artificial
  probe
  misc_feature (1)..(25): SEQ ID NO: 2515; WAN024GDJ_at; Start 101; Stop 125
acttgtcacaacagacggatgatgc

SEQ ID NO: 241118 - DNA, 25 bp, Artificial
  probe
  misc_feature (1)..(25): SEQ ID NO: 2515; WAN024GDJ_at; Start 65; Stop 89
cagagattctacgttcagacataac

SEQ ID NO: 241119 - DNA, 25 bp, Artificial
  probe
  misc_feature (1)..(25): SEQ ID NO: 2515; WAN024GDJ_at; Start 47; Stop 71
gattttcaagagacttttcagagat

SEQ ID NO: 241120 - DNA, 25 bp, Artificial
  probe
  misc_feature (1)..(25): SEQ ID NO: 2515; WAN024GDJ_at; Start 102; Stop 126
cttgtcacaacagacggatgatgct

SEQ ID NO: 241121 - DNA, 25 bp, Artificial
  probe
  misc_feature (1)..(25): SEQ ID NO: 2515; WAN024GDJ_at; Start 42; Stop 66
tctgagattttcaagagacttttca

SEQ ID NO: 241122 - DNA, 25 bp, Artificial
  probe
  misc_feature (1)..(25): SEQ ID NO: 2515; WAN024GDJ_at; Start 63; Stop 87
ttcagagattctacgttcagacata

SEQ ID NO: 241123 - DNA, 25 bp, Artificial
  probe
  misc_feature (1)..(25): SEQ ID NO: 2515; WAN024GDJ_at; Start 72; Stop 96
tctacgttcagacataacattttct

SEQ ID NO: 241124 - DNA, 25 bp, Artificial
  probe
  misc_feature (1)..(25): SEQ ID NO: 2515; WAN024GDJ_at; Start 37; Stop 61
gattttctgagattttcaagagact

SEQ ID NO: 241125 - DNA, 25 bp, Artificial
  probe
  misc_feature (1)..(25): SEQ ID NO: 2515; WAN024GDJ_at; Start 3; Stop 27
ggcttctctggttaataaattggat

SEQ ID NO: 241126 - DNA, 25 bp, Artificial
  probe
  misc_feature (1)..(25): SEQ ID NO: 2515; WAN024GDJ_at; Start 1; Stop 25
atggcttctctggttaataaattgg

SEQ ID NO: 241127 - DNA, 25 bp, Artificial
  probe
  misc_feature (1)..(25): SEQ ID NO: 2515; WAN024GDJ_at; Start 103; Stop 127
ttgtcacaacagacggatgatgctt

SEQ ID NO: 241128 - DNA, 25 bp, Artificial
  probe
  misc_feature (1)..(25): SEQ ID NO: 2515; WAN024GDJ_at; Start 49; Stop 73
ttttcaagagacttttcagagattc

SEQ ID NO: 241129 - DNA, 25 bp, Artificial
  probe
  misc_feature (1)..(25): SEQ ID NO: 2515; WAN024GDJ_at; Start 56; Stop 80
gagacttttcagagattctacgttc

SEQ ID NO: 241130 - DNA, 25 bp, Artificial
  probe
  misc_feature (1)..(25): SEQ ID NO: 2515; WAN024GDJ_at; Start 61; Stop 85
ttttcagagattctacgttcagaca

SEQ ID NO: 241131 - DNA, 25 bp, Artificial
  probe
  misc_feature (1)..(25): SEQ ID NO: 2515; WAN024GDJ_at; Start 106; Stop 130
tcacaacagacggatgatgcttttg

SEQ ID NO: 241132 - DNA, 25 bp, Artificial
  probe
  misc_feature (1)..(25): SEQ ID NO: 2515; WAN024GDJ_at; Start 69; Stop 93
gattctacgttcagacataacattt

SEQ ID NO: 241133 - DNA, 25 bp, Artificial
  probe
  misc_feature (1)..(25): SEQ ID NO: 2515; WAN024GDJ_at; Start 58; Stop 82
gacttttcagagattctacgttcag

SEQ ID NO: 241134 - DNA, 25 bp, Artificial
  probe
  misc_feature (1)..(25): SEQ ID NO: 2515; WAN024GDJ_at; Start 86; Stop 110
taacattttctttctacttgtcaca

SEQ ID NO: 241135 - DNA, 25 bp, Artificial
  probe
  misc_feature (1)..(25): SEQ ID NO: 2515; WAN024GDJ_at; Start 95; Stop 119
ctttctacttgtcacaacagacgga

SEQ ID NO: 241136 - DNA, 25 bp, Artificial
  probe
  misc_feature (1)..(25): SEQ ID NO: 2515; WAN024GDJ_at; Start 107; Stop 131
cacaacagacggatgatgcttttgt

SEQ ID NO: 241137 - DNA, 25 bp, Artificial
  probe
  misc_feature (1)..(25): SEQ ID NO: 2515; WAN024GDJ_at; Start 100; Stop 124
tacttgtcacaacagacggatgatg

SEQ ID NO: 241138 - DNA, 25 bp, Artificial
  probe
  misc_feature (1)..(25): SEQ ID NO: 2515; WAN024GDJ_at; Start 5; Stop 29
cttctctggttaataaattggattc

SEQ ID NO: 241139 - DNA, 25 bp, Artificial
  probe
  misc_feature (1)..(25): SEQ ID NO: 2515; WAN024GDJ_at; Start 76; Stop 100
cgttcagacataacattttctttct

SEQ ID NO: 241140 - DNA, 25 bp, Artificial
  probe
  misc_feature (1)..(25): SEQ ID NO: 2515; WAN024GDJ_at; Start 53; Stop 77
caagagacttttcagagattctacg

SEQ ID NO: 241141 - DNA, 25 bp, Artificial
  probe
  misc_feature (1)..(25): SEQ ID NO: 2515; WAN024GDJ_at; Start 97; Stop 121
ttctacttgtcacaacagacggatg

SEQ ID NO: 241142 - DNA, 25 bp, Artificial
  probe
  misc_feature (1)..(25): SEQ ID NO: 2515; WAN024GDJ_at; Start 24; Stop 48
ggattcttggtttgattttctgaga

SEQ ID NO: 241143 - DNA, 25 bp, Artificial
  probe
  misc_feature (1)..(25): SEQ ID NO: 2515; WAN024GDJ_at; Start 110; Stop 134
aacagacggatgatgcttttgtttc

SEQ ID NO: 241144 - DNA, 25 bp, Artificial
  probe
  misc_feature (1)..(25): SEQ ID NO: 2515; WAN024GDJ_at; Start 45; Stop 69
gagattttcaagagacttttcagag

SEQ ID NO: 241145 - DNA, 25 bp, Artificial
  probe
  misc_feature (1)..(25): SEQ ID NO: 2515; WAN024GDJ_at; Start 60; Stop 84
cttttcagagattctacgttcagac

SEQ ID NO: 241146 - DNA, 25 bp, Artificial
  probe
  misc_feature (1)..(25): SEQ ID NO: 2515; WAN024GDJ_at; Start 104; Stop 128
tgtcacaacagacggatgatgcttt

SEQ ID NO: 241147 - DNA, 25 bp, Artificial
  probe
  misc_feature (1)..(25): SEQ ID NO: 2515; WAN024GDJ_at; Start 67; Stop 91
gagattctacgttcagacataacat

SEQ ID NO: 241148 - DNA, 25 bp, Artificial
  probe
  misc_feature (1)..(25): SEQ ID NO: 2515; WAN024GDJ_at; Start 9; Stop 33
tctggttaataaattggattcttgg

SEQ ID NO: 241149 - DNA, 25 bp, Artificial
  probe
  misc_feature (1)..(25): SEQ ID NO: 2515; WAN024GDJ_at; Start 94; Stop 118
tctttctacttgtcacaacagacgg

SEQ ID NO: 241150 - DNA, 25 bp, Artificial
  probe
  misc_feature (1)..(25): SEQ ID NO: 2515; WAN024GDJ_at; Start 98; Stop 122
tctacttgtcacaacagacggatga

SEQ ID NO: 241151 - DNA, 25 bp, Artificial
  probe
  misc_feature (1)..(25): SEQ ID NO: 2604; WAN024GDK_at; Start 22; Stop 46
ttcttgataaaggtattgggcgtag

SEQ ID NO: 241152 - DNA, 25 bp, Artificial
  probe
  misc_feature (1)..(25): SEQ ID NO: 2604; WAN024GDK_at; Start 160; Stop 184
aacaccacgctcagcaccttgaagg

SEQ ID NO: 241153 - DNA, 25 bp, Artificial
  probe
  misc_feature (1)..(25): SEQ ID NO: 2604; WAN024GDK_at; Start 165; Stop 189
cacgctcagcaccttgaaggatagc

SEQ ID NO: 241154 - DNA, 25 bp, Artificial
  probe
  misc_feature (1)..(25): SEQ ID NO: 2604; WAN024GDK_at; Start 239; Stop 263
cattcgtgatcaatacaatgctcag

SEQ ID NO: 241155 - DNA, 25 bp, Artificial
  probe
  misc_feature (1)..(25): SEQ ID NO: 2604; WAN024GDK_at; Start 138; Stop 162
cataggctgtaaagcctttgggaac

SEQ ID NO: 241156 - DNA, 25 bp, Artificial
  probe
  misc_feature (1)..(25): SEQ ID NO: 2604; WAN024GDK_at; Start 113; Stop 137
cagttgagacaaggaaaatgggtta

SEQ ID NO: 241157 - DNA, 25 bp, Artificial
  probe
  misc_feature (1)..(25): SEQ ID NO: 2604; WAN024GDK_at; Start 149; Stop 173
aagcctttgggaacaccacgctcag

SEQ ID NO: 241158 - DNA, 25 bp, Artificial
  probe
  misc_feature (1)..(25): SEQ ID NO: 2604; WAN024GDK_at; Start 122; Stop 146
caaggaaaatgggttacataggctg

SEQ ID NO: 241159 - DNA, 25 bp, Artificial
  probe
  misc_feature (1)..(25): SEQ ID NO: 2604; WAN024GDK_at; Start 66; Stop 90
tgatataaaccacgcgcttgcagcc

SEQ ID NO: 241160 - DNA, 25 bp, Artificial
  probe
  misc_feature (1)..(25): SEQ ID NO: 2604; WAN024GDK_at; Start 38; Stop 62
tgggcgtagtcgtccattcggtact

SEQ ID NO: 241161 - DNA, 25 bp, Artificial
  probe
  misc_feature (1)..(25): SEQ ID NO: 2604; WAN024GDK_at; Start 99; Stop 123
gcaattgttttgtacagttgagaca

SEQ ID NO: 241162 - DNA, 25 bp, Artificial
  probe
  misc_feature (1)..(25): SEQ ID NO: 2604; WAN024GDK_at; Start 207; Stop 231
gggtgcgaacgcagtggccttcaat

SEQ ID NO: 241163 - DNA, 25 bp, Artificial
  probe
  misc_feature (1)..(25): SEQ ID NO: 2604; WAN024GDK_at; Start 91; Stop 115
gacctgaagcaattgttttgtacag

SEQ ID NO: 241164 - DNA, 25 bp, Artificial
  probe
  misc_feature (1)..(25): SEQ ID NO: 2604; WAN024GDK_at; Start 7; Stop 31
caattctgtccctttttcttgataa

SEQ ID NO: 241165 - DNA, 25 bp, Artificial
  probe
  misc_feature (1)..(25): SEQ ID NO: 2604; WAN024GDK_at; Start 86; Stop 110
cagccgacctgaagcaattgttttg

SEQ ID NO: 241166 - DNA, 25 bp, Artificial
  probe
  misc_feature (1)..(25): SEQ ID NO: 2604; WAN024GDK_at; Start 52; Stop 76
cattcggtactggttgatataaacc

SEQ ID NO: 241167 - DNA, 25 bp, Artificial
  probe
  misc_feature (1)..(25): SEQ ID NO: 2604; WAN024GDK_at; Start 173; Stop 197
gcaccttgaaggatagcattgacct

SEQ ID NO: 241168 - DNA, 25 bp, Artificial
  probe
  misc_feature (1)..(25): SEQ ID NO: 2604; WAN024GDK_at; Start 35; Stop 59
tattgggcgtagtcgtccattcggt

SEQ ID NO: 241169 - DNA, 25 bp, Artificial
  probe
  misc_feature (1)..(25): SEQ ID NO: 2604; WAN024GDK_at; Start 222; Stop 246
ggccttcaatgaccaaacattcgtg

SEQ ID NO: 241170 - DNA, 25 bp, Artificial
  probe
  misc_feature (1)..(25): SEQ ID NO: 2604; WAN024GDK_at; Start 195; Stop 219
cctcagcgtgaagggtgcgaacgca

SEQ ID NO: 241171 - DNA, 25 bp, Artificial
  probe
  misc_feature (1)..(25): SEQ ID NO: 2604; WAN024GDK_at; Start 64; Stop 88
gttgatataaaccacgcgcttgcag

SEQ ID NO: 241172 - DNA, 25 bp, Artificial
  probe
  misc_feature (1)..(25): SEQ ID NO: 2604; WAN024GDK_at; Start 4; Stop 28
ggtcaattctgtccctttttcttga

SEQ ID NO: 241173 - DNA, 25 bp, Artificial
  probe
  misc_feature (1)..(25): SEQ ID NO: 2604; WAN024GDK_at; Start 216; Stop 240
cgcagtggccttcaatgaccaaaca

SEQ ID NO: 241174 - DNA, 25 bp, Artificial
  probe
  misc_feature (1)..(25): SEQ ID NO: 2604; WAN024GDK_at; Start 180; Stop 204
gaaggatagcattgacctcagcgtg

SEQ ID NO: 241175 - DNA, 25 bp, Artificial
  probe
  misc_feature (1)..(25): SEQ ID NO: 2604; WAN024GDK_at; Start 129; Stop 153
aatgggttacataggctgtaaagcc

SEQ ID NO: 241176 - DNA, 25 bp, Artificial
  probe
  misc_feature (1)..(25): SEQ ID NO: 2604; WAN024GDK_at; Start 27; Stop 51
gataaaggtattgggcgtagtcgtc

SEQ ID NO: 241177 - DNA, 25 bp, Artificial
  probe
  misc_feature (1)..(25): SEQ ID NO: 2604; WAN024GDK_at; Start 246; Stop 270
gatcaatacaatgctcagtccctga

SEQ ID NO: 241178 - DNA, 25 bp, Artificial
  probe
  misc_feature (1)..(25): SEQ ID NO: 2604; WAN024GDK_at; Start 79; Stop 103
gcgcttgcagccgacctgaagcaat

SEQ ID NO: 241179 - DNA, 25 bp, Artificial
  probe
  misc_feature (1)..(25): SEQ ID NO: 2604; WAN024GDK_at; Start 184; Stop 208
gatagcattgacctcagcgtgaagg

SEQ ID NO: 241180 - DNA, 25 bp, Artificial
  probe
  misc_feature (1)..(25): SEQ ID NO: 2604; WAN024GDK_at; Start 232; Stop 256
gaccaaacattcgtgatcaatacaa

SEQ ID NO: 241181 - DNA, 25 bp, Artificial
  probe
  misc_feature (1)..(25): SEQ ID NO: 2604; WAN024GDK_at; Start 145; Stop 169
tgtaaagcctttgggaacaccacgc

SEQ ID NO: 241182 - DNA, 25 bp, Artificial
  probe
  misc_feature (1)..(25): SEQ ID NO: 2604; WAN024GDK_at; Start 44; Stop 68
tagtcgtccattcggtactggttga

SEQ ID NO: 241183 - DNA, 25 bp, Artificial
  probe
  misc_feature (1)..(25): SEQ ID NO: 2604; WAN024GDK_at; Start 213; Stop 237
gaacgcagtggccttcaatgaccaa

SEQ ID NO: 241184 - DNA, 25 bp, Artificial
  probe
  misc_feature (1)..(25): SEQ ID NO: 2604; WAN024GDK_at; Start 192; Stop 216
tgacctcagcgtgaagggtgcgaac

SEQ ID NO: 241185 - DNA, 25 bp, Artificial
  probe
  misc_feature (1)..(25): SEQ ID NO: 1453; WAN024GDL_at; Start 390; Stop 414
tcaagaaaaagggacagaattgacc

SEQ ID NO: 241186 - DNA, 25 bp, Artificial
  probe
  misc_feature (1)..(25): SEQ ID NO: 1453; WAN024GDL_at; Start 429; Stop 453
gacagtacagacagctcttaaagag

SEQ ID NO: 241187 - DNA, 25 bp, Artificial
  probe
  misc_feature (1)..(25): SEQ ID NO: 1453; WAN024GDL_at; Start 107; Stop 131
aagataataaggttatttccactgg

SEQ ID NO: 241188 - DNA, 25 bp, Artificial
  probe
  misc_feature (1)..(25): SEQ ID NO: 1453; WAN024GDL_at; Start 295; Stop 319
tgtctcaactgtacaaaacaattgc

SEQ ID NO: 241189 - DNA, 25 bp, Artificial
  probe
  misc_feature (1)..(25): SEQ ID NO: 1453; WAN024GDL_at; Start 153; Stop 177
gactgagcattgtattgatcacgaa

SEQ ID NO: 241190 - DNA, 25 bp, Artificial
  probe
  misc_feature (1)..(25): SEQ ID NO: 1453; WAN024GDL_at; Start 73; Stop 97
tgtaaacgtgctaaagtgggcgcga

SEQ ID NO: 241191 - DNA, 25 bp, Artificial
  probe
  misc_feature (1)..(25): SEQ ID NO: 1453; WAN024GDL_at; Start 212; Stop 236
ttcacgctgaggtcaatgctatcct

SEQ ID NO: 241192 - DNA, 25 bp, Artificial
  probe
  misc_feature (1)..(25): SEQ ID NO: 1453; WAN024GDL_at; Start 448; Stop 472
aaagaggctgatctaatgtaactaa

SEQ ID NO: 241193 - DNA, 25 bp, Artificial
  probe
  misc_feature (1)..(25): SEQ ID NO: 1453; WAN024GDL_at; Start 133; Stop 157
tacaatggttcggtgtcagggactg

SEQ ID NO: 241194 - DNA, 25 bp, Artificial
  probe
  misc_feature (1)..(25): SEQ ID NO: 1453; WAN024GDL_at; Start 176; Stop 200
aatgtttggtcattgaaggccactg

SEQ ID NO: 241195 - DNA, 25 bp, Artificial
  probe
  misc_feature (1)..(25): SEQ ID NO: 1453; WAN024GDL_at; Start 314; Stop 338
aattgcttcaggtcggctgcaagcg

SEQ ID NO: 241196 - DNA, 25 bp, Artificial
  probe
  misc_feature (1)..(25): SEQ ID NO: 1453; WAN024GDL_at; Start 2; Stop 26
tgactgaaaaaagactggcctggga

SEQ ID NO: 241197 - DNA, 25 bp, Artificial
  probe
  misc_feature (1)..(25): SEQ ID NO: 1453; WAN024GDL_at; Start 239; Stop 263
aaggtgctgagcgtggtgttcccaa

SEQ ID NO: 241198 - DNA, 25 bp, Artificial
  probe
  misc_feature (1)..(25): SEQ ID NO: 1453; WAN024GDL_at; Start 14; Stop 38
gactggcctgggatgagtattttgc

SEQ ID NO: 241199 - DNA, 25 bp, Artificial
  probe
  misc_feature (1)..(25): SEQ ID NO: 1453; WAN024GDL_at; Start 270; Stop 294
tacagcctatgtaacccattttcct

SEQ ID NO: 241200 - DNA, 25 bp, Artificial
  probe
  misc_feature (1)..(25): SEQ ID NO: 1453; WAN024GDL_at; Start 231; Stop 255
tatccttcaaggtgctgagcgtggt

SEQ ID NO: 241201 - DNA, 25 bp, Artificial
  probe
  misc_feature (1)..(25): SEQ ID NO: 1453; WAN024GDL_at; Start 281; Stop 305
taacccattttccttgtctcaactg

SEQ ID NO: 241202 - DNA, 25 bp, Artificial
  probe
  misc_feature (1)..(25): SEQ ID NO: 1453; WAN024GDL_at; Start 172; Stop 196
cacgaatgtttggtcattgaaggcc

SEQ ID NO: 241203 - DNA, 25 bp, Artificial
  probe
  misc_feature (1)..(25): SEQ ID NO: 1453; WAN024GDL_at; Start 220; Stop 244
gaggtcaatgctatccttcaaggtg

SEQ ID NO: 241204 - DNA, 25 bp, Artificial
  probe
  misc_feature (1)..(25): SEQ ID NO: 1453; WAN024GDL_at; Start 60; Stop 84
gaatcgttccacttgtaaacgtgct

SEQ ID NO: 241205 - DNA, 25 bp, Artificial
  probe
  misc_feature (1)..(25): SEQ ID NO: 1453; WAN024GDL_at; Start 23; Stop 47
gggatgagtattttgcagcccaagc

SEQ ID NO: 241206 - DNA, 25 bp, Artificial
  probe
  misc_feature (1)..(25): SEQ ID NO: 1453; WAN024GDL_at; Start 356; Stop 380
agtaccgaatggacgactacgccca

SEQ ID NO: 241207 - DNA, 25 bp, Artificial
  probe
  misc_feature (1)..(25): SEQ ID NO: 1453; WAN024GDL_at; Start 308; Stop 332
caaaacaattgcttcaggtcggctg

SEQ ID NO: 241208 - DNA, 25 bp, Artificial
  probe
  misc_feature (1)..(25): SEQ ID NO: 1453; WAN024GDL_at; Start 142; Stop 166
tcggtgtcagggactgagcattgta

SEQ ID NO: 241209 - DNA, 25 bp, Artificial
  probe
  misc_feature (1)..(25): SEQ ID NO: 1453; WAN024GDL_at; Start 343; Stop 367
gtttatatcaaccagtaccgaatgg

SEQ ID NO: 241210 - DNA, 25 bp, Artificial
  probe
  misc_feature (1)..(25): SEQ ID NO: 1453; WAN024GDL_at; Start 441; Stop 465
agctcttaaagaggctgatctaatg

SEQ ID NO: 241211 - DNA, 25 bp, Artificial
  probe
  misc_feature (1)..(25): SEQ ID NO: 1453; WAN024GDL_at; Start 91; Stop 115
ggcgcgattctggtaaaagataata

SEQ ID NO: 241212 - DNA, 25 bp, Artificial
  probe
  misc_feature (1)..(25): SEQ ID NO: 1453; WAN024GDL_at; Start 406; Stop 430
gaattgacccatttaccacttgaga

SEQ ID NO: 241213 - DNA, 25 bp, Artificial
  probe
  misc_feature (1)..(25): SEQ ID NO: 1453; WAN024GDL_at; Start 367; Stop 391
gacgactacgcccaatacctttatc

SEQ ID NO: 241214 - DNA, 25 bp, Artificial
  probe
  misc_feature (1)..(25): SEQ ID NO: 1453; WAN024GDL_at; Start 419; Stop 443
taccacttgagacagtacagacagc

SEQ ID NO: 241215 - DNA, 25 bp, Artificial
  probe
  misc_feature (1)..(25): SEQ ID NO: 1453; WAN024GDL_at; Start 202; Stop 226
gttcgcacccttcacgctgaggtca

SEQ ID NO: 241216 - DNA, 25 bp, Artificial
  probe
  misc_feature (1)..(25): SEQ ID NO: 1453; WAN024GDL_at; Start 84; Stop 108
taaagtgggcgcgattctggtaaaa

SEQ ID NO: 241217 - DNA, 25 bp, Artificial
  probe
  misc_feature (1)..(25): SEQ ID NO: 1453; WAN024GDL_at; Start 120; Stop 144
tatttccactggttacaatggttcg

SEQ ID NO: 241218 - DNA, 25 bp, Artificial
  probe
  misc_feature (1)..(25): SEQ ID NO: 1453; WAN024GDL_at; Start 50; Stop 74
tactaattgcgaatcgttccacttg

SEQ ID NO: 241219 - DNA, 25 bp, Artificial
  probe
  misc_feature (1)..(25): SEQ ID NO: 2932; WAN024GDM_at; Start 439; Stop 463
tatcttcattccttctggagctcag

SEQ ID NO: 241220 - DNA, 25 bp, Artificial
  probe
  misc_feature (1)..(25): SEQ ID NO: 2932; WAN024GDM_at; Start 62; Stop 86
ccaatttattaaccagagaagccat

SEQ ID NO: 241221 - DNA, 25 bp, Artificial
  probe
  misc_feature (1)..(25): SEQ ID NO: 2932; WAN024GDM_at; Start 184; Stop 208
tatcgcaattatgactccaaagagg

SEQ ID NO: 241222 - DNA, 25 bp, Artificial
  probe
  misc_feature (1)..(25): SEQ ID NO: 2932; WAN024GDM_at; Start 478; Stop 502
cttctaaaatggatcaaggatggca

SEQ ID NO: 241223 - DNA, 25 bp, Artificial
  probe
  misc_feature (1)..(25): SEQ ID NO: 2932; WAN024GDM_at; Start 343; Stop 367
caattggccttggattaccatctgg

SEQ ID NO: 241224 - DNA, 25 bp, Artificial
  probe
  misc_feature (1)..(25): SEQ ID NO: 2932; WAN024GDM_at; Start 422; Stop 446
caaaaggtgtcagctcttatcttca

SEQ ID NO: 241225 - DNA, 25 bp, Artificial
  probe
  misc_feature (1)..(25): SEQ ID NO: 2932; WAN024GDM_at; Start 411; Stop 435
ccatgggaaatcaaaaggtgtcagc

SEQ ID NO: 241226 - DNA, 25 bp, Artificial
  probe
  misc_feature (1)..(25): SEQ ID NO: 2932; WAN024GDM_at; Start 228; Stop 252
taaacgaactgtccacaatattatg

SEQ ID NO: 241227 - DNA, 25 bp, Artificial
  probe
  misc_feature (1)..(25): SEQ ID NO: 2932; WAN024GDM_at; Start 451; Stop 475
ttctggagctcagccatcgtctctg

SEQ ID NO: 241228 - DNA, 25 bp, Artificial
  probe
  misc_feature (1)..(25): SEQ ID NO: 2932; WAN024GDM_at; Start 137; Stop 161
gtatttctgaattggtcaaacgtgc

SEQ ID NO: 241229 - DNA, 25 bp, Artificial
  probe
  misc_feature (1)..(25): SEQ ID NO: 2932; WAN024GDM_at; Start 264; Stop 288
tcattacgatttaaagacagacctt

SEQ ID NO: 241230 - DNA, 25 bp, Artificial
  probe
  misc_feature (1)..(25): SEQ ID NO: 2932; WAN024GDM_at; Start 88; Stop 112
gaaacagccctcttgcaactcttgg

SEQ ID NO: 241231 - DNA, 25 bp, Artificial
  probe
  misc_feature (1)..(25): SEQ ID NO: 2932; WAN024GDM_at; Start 370; Stop 394
aaaatctttgtccaagccatgcagg

SEQ ID NO: 241232 - DNA, 25 bp, Artificial
  probe
  misc_feature (1)..(25): SEQ ID NO: 2932; WAN024GDM_at; Start 491; Stop 515
tcaaggatggcatgaaggtaccagc

SEQ ID NO: 241233 - DNA, 25 bp, Artificial
  probe
  misc_feature (1)..(25): SEQ ID NO: 2932; WAN024GDM_at; Start 504; Stop 528
gaaggtaccagctgaaaagattgca

SEQ ID NO: 241234 - DNA, 25 bp, Artificial
  probe
  misc_feature (1)..(25): SEQ ID NO: 2932; WAN024GDM_at; Start 519; Stop 543
aaagattgcagatttaggtttacca

SEQ ID NO: 241235 - DNA, 25 bp, Artificial
  probe
  misc_feature (1)..(25): SEQ ID NO: 2932; WAN024GDM_at; Start 170; Stop 194
cgcgtgcggccttttatcgcaatta

SEQ ID NO: 241236 - DNA, 25 bp, Artificial
  probe
  misc_feature (1)..(25): SEQ ID NO: 2932; WAN024GDM_at; Start 381; Stop 405
ccaagccatgcaggaatttctagaa

SEQ ID NO: 241237 - DNA, 25 bp, Artificial
  probe
  misc_feature (1)..(25): SEQ ID NO: 2932; WAN024GDM_at; Start 94; Stop 118
gccctcttgcaactcttggaaaaaa

SEQ ID NO: 241238 - DNA, 25 bp, Artificial
  probe
  misc_feature (1)..(25): SEQ ID NO: 2932; WAN024GDM_at; Start 249; Stop 273
tatggaacagctgcatcattacgat

SEQ ID NO: 241239 - DNA, 25 bp, Artificial
  probe
  misc_feature (1)..(25): SEQ ID NO: 2932; WAN024GDM_at; Start 22; Stop 46
gaaaagtctcttgaaaatctcagaa

SEQ ID NO: 241240 - DNA, 25 bp, Artificial
  probe
  misc_feature (1)..(25): SEQ ID NO: 2932; WAN024GDM_at; Start 39; Stop 63
tctcagaaaatcaaaccaagaatcc

SEQ ID NO: 241241 - DNA, 25 bp, Artificial
  probe
  misc_feature (1)..(25): SEQ ID NO: 2932; WAN024GDM_at; Start 394; Stop 418
gaatttctagaaaaataccatggga

SEQ ID NO: 241242 - DNA, 25 bp, Artificial
  probe
  misc_feature (1)..(25): SEQ ID NO: 2932; WAN024GDM_at; Start 241; Stop 265
cacaatattatggaacagctgcatc

SEQ ID NO: 241243 - DNA, 25 bp, Artificial
  probe
  misc_feature (1)..(25): SEQ ID NO: 2932; WAN024GDM_at; Start 10; Stop 34
cgtagaatctctgaaaagtctcttg

SEQ ID NO: 241244 - DNA, 25 bp, Artificial
  probe
  misc_feature (1)..(25): SEQ ID NO: 2932; WAN024GDM_at; Start 358; Stop 382
taccatctggaaaaaatctttgtcc

SEQ ID NO: 241245 - DNA, 25 bp, Artificial
  probe
  misc_feature (1)..(25): SEQ ID NO: 2932; WAN024GDM_at; Start 465; Stop 489
catcgtctctgtccttctaaaatgg

SEQ ID NO: 241246 - DNA, 25 bp, Artificial
  probe
  misc_feature (1)..(25): SEQ ID NO: 2932; WAN024GDM_at; Start 163; Stop 187
ggtgtttcgcgtgcggccttttatc

SEQ ID NO: 241247 - DNA, 25 bp, Artificial
  probe
  misc_feature (1)..(25): SEQ ID NO: 2932; WAN024GDM_at; Start 201; Stop 225
caaagaggaaattttagagagcgtc

SEQ ID NO: 241248 - DNA, 25 bp, Artificial
  probe
  misc_feature (1)..(25): SEQ ID NO: 2932; WAN024GDM_at; Start 217; Stop 241
gagagcgtctttaaacgaactgtcc

SEQ ID NO: 241249 - DNA, 25 bp, Artificial
  probe
  misc_feature (1)..(25): SEQ ID NO: 2932; WAN024GDM_at; Start 2; Stop 26
tgtctgaacgtagaatctctgaaaa

SEQ ID NO: 241250 - DNA, 25 bp, Artificial
  probe
  misc_feature (1)..(25): SEQ ID NO: 2932; WAN024GDM_at; Start 124; Stop 148
ctgaccaagattagtatttctgaat

SEQ ID NO: 241251 - DNA, 25 bp, Artificial
  probe
  misc_feature (1)..(25): SEQ ID NO: 2932; WAN024GDM_at; Start 77; Stop 101
gagaagccattgaaacagccctctt

SEQ ID NO: 241252 - DNA, 25 bp, Artificial
  probe
  misc_feature (1)..(25): SEQ ID NO: 2932; WAN024GDM_at; Start 55; Stop 79
caagaatccaatttattaaccagag

SEQ ID NO: 241253 - DNA, 25 bp, Artificial
  probe
  misc_feature (1)..(25): SEQ ID NO: 4952; WAN024GDN_at; Start 220; Stop 244
caaggtggaaatcaaggtatccaga

SEQ ID NO: 241254 - DNA, 25 bp, Artificial
  probe
  misc_feature (1)..(25): SEQ ID NO: 4952; WAN024GDN_at; Start 159; Stop 183
ccgtgaatttttcctcaatggtcat

SEQ ID NO: 241255 - DNA, 25 bp, Artificial
  probe
  misc_feature (1)..(25): SEQ ID NO: 4952; WAN024GDN_at; Start 41; Stop 65
gcggccgtagcctcgtcttcgtgac

SEQ ID NO: 241256 - DNA, 25 bp, Artificial
  probe
  misc_feature (1)..(25): SEQ ID NO: 4952; WAN024GDN_at; Start 151; Stop 175
gctaaatcccgtgaatttttcctca

SEQ ID NO: 241257 - DNA, 25 bp, Artificial
  probe
  misc_feature (1)..(25): SEQ ID NO: 4952; WAN024GDN_at; Start 63; Stop 87
gacctttttggcgttcgagcgcttg

SEQ ID NO: 241258 - DNA, 25 bp, Artificial
  probe
  misc_feature (1)..(25): SEQ ID NO: 4952; WAN024GDN_at; Start 140; Stop 164
ttgtcttgatagctaaatcccgtga

SEQ ID NO: 241259 - DNA, 25 bp, Artificial
  probe
  misc_feature (1)..(25): SEQ ID NO: 4952; WAN024GDN_at; Start 217; Stop 241
ttgcaaggtggaaatcaaggtatcc

SEQ ID NO: 241260 - DNA, 25 bp, Artificial
  probe
  misc_feature (1)..(25): SEQ ID NO: 4952; WAN024GDN_at; Start 68; Stop 92
ttttggcgttcgagcgcttgtccca

SEQ ID NO: 241261 - DNA, 25 bp, Artificial
  probe
  misc_feature (1)..(25): SEQ ID NO: 4952; WAN024GDN_at; Start 74; Stop 98
cgttcgagcgcttgtcccatgactt

SEQ ID NO: 241262 - DNA, 25 bp, Artificial
  probe
  misc_feature (1)..(25): SEQ ID NO: 4952; WAN024GDN_at; Start 137; Stop 161
tgattgtcttgatagctaaatcccg

SEQ ID NO: 241263 - DNA, 25 bp, Artificial
  probe
  misc_feature (1)..(25): SEQ ID NO: 4952; WAN024GDN_at; Start 51; Stop 75
cctcgtcttcgtgacctttttggcg

SEQ ID NO: 241264 - DNA, 25 bp, Artificial
  probe
  misc_feature (1)..(25): SEQ ID NO: 4952; WAN024GDN_at; Start 171; Stop 195
cctcaatggtcatttttctttctcc

SEQ ID NO: 241265 - DNA, 25 bp, Artificial
  probe
  misc_feature (1)..(25): SEQ ID NO: 4952; WAN024GDN_at; Start 117; Stop 141
ccgcttcttggtggtatttttgatt

SEQ ID NO: 241266 - DNA, 25 bp, Artificial
  probe
  misc_feature (1)..(25): SEQ ID NO: 4952; WAN024GDN_at; Start 36; Stop 60
taaaggcggccgtagcctcgtcttc

SEQ ID NO: 241267 - DNA, 25 bp, Artificial
  probe
  misc_feature (1)..(25): SEQ ID NO: 4952; WAN024GDN_at; Start 2; Stop 26
tgaagattttgtgccaaagtttgaa

SEQ ID NO: 241268 - DNA, 25 bp, Artificial
  probe
  misc_feature (1)..(25): SEQ ID NO: 4952; WAN024GDN_at; Start 13; Stop 37
tgccaaagtttgaaagacttggtta

SEQ ID NO: 241269 - DNA, 25 bp, Artificial
  probe
  misc_feature (1)..(25): SEQ ID NO: 4952; WAN024GDN_at; Start 102; Stop 126
gaccatatttctctaccgcttcttg

SEQ ID NO: 241270 - DNA, 25 bp, Artificial
  probe
  misc_feature (1)..(25): SEQ ID NO: 4952; WAN024GDN_at; Start 227; Stop 251
gaaatcaaggtatccagatgttgcc

SEQ ID NO: 241271 - DNA, 25 bp, Artificial
  probe
  misc_feature (1)..(25): SEQ ID NO: 4952; WAN024GDN_at; Start 206; Stop 230
tgaatagttttttgcaaggtggaaa

SEQ ID NO: 241272 - DNA, 25 bp, Artificial
  probe
  misc_feature (1)..(25): SEQ ID NO: 4952; WAN024GDN_at; Start 11; Stop 35
tgtgccaaagtttgaaagacttggt

SEQ ID NO: 241273 - DNA, 25 bp, Artificial
  probe
  misc_feature (1)..(25): SEQ ID NO: 4952; WAN024GDN_at; Start 60; Stop 84
cgtgacctttttggcgttcgagcgc

SEQ ID NO: 241274 - DNA, 25 bp, Artificial
  probe
  misc_feature (1)..(25): SEQ ID NO: 4952; WAN024GDN_at; Start 123; Stop 147
cttggtggtatttttgattgtcttg

SEQ ID NO: 241275 - DNA, 25 bp, Artificial
  probe
  misc_feature (1)..(25): SEQ ID NO: 4952; WAN024GDN_at; Start 155; Stop 179
aatcccgtgaatttttcctcaatgg

SEQ ID NO: 241276 - DNA, 25 bp, Artificial
  probe
  misc_feature (1)..(25): SEQ ID NO: 4952; WAN024GDN_at; Start 83; Stop 107
gcttgtcccatgacttcttgaccat

SEQ ID NO: 241277 - DNA, 25 bp, Artificial
  probe
  misc_feature (1)..(25): SEQ ID NO: 4952; WAN024GDN_at; Start 240; Stop 264
ccagatgttgcctttcgcgagttag

SEQ ID NO: 241278 - DNA, 25 bp, Artificial
  probe
  misc_feature (1)..(25): SEQ ID NO: 4952; WAN024GDN_at; Start 79; Stop 103
gagcgcttgtcccatgacttcttga

SEQ ID NO: 241279 - DNA, 25 bp, Artificial
  probe
  misc_feature (1)..(25): SEQ ID NO: 4952; WAN024GDN_at; Start 237; Stop 261
tatccagatgttgcctttcgcgagt

SEQ ID NO: 241280 - DNA, 25 bp, Artificial
  probe
  misc_feature (1)..(25): SEQ ID NO: 4952; WAN024GDN_at; Start 235; Stop 259
ggtatccagatgttgcctttcgcga

SEQ ID NO: 241281 - DNA, 25 bp, Artificial
  probe
  misc_feature (1)..(25): SEQ ID NO: 4952; WAN024GDN_at; Start 105; Stop 129
catatttctctaccgcttcttggtg

SEQ ID NO: 241282 - DNA, 25 bp, Artificial
  probe
  misc_feature (1)..(25): SEQ ID NO: 4952; WAN024GDN_at; Start 94; Stop 118
gacttcttgaccatatttctctacc

SEQ ID NO: 241283 - DNA, 25 bp, Artificial
  probe
  misc_feature (1)..(25): SEQ ID NO: 4952; WAN024GDN_at; Start 56; Stop 80
tcttcgtgacctttttggcgttcga

SEQ ID NO: 241284 - DNA, 25 bp, Artificial
  probe
  misc_feature (1)..(25): SEQ ID NO: 4952; WAN024GDN_at; Start 188; Stop 212
ctttctcctttttgttcttgaatag

SEQ ID NO: 241285 - DNA, 25 bp, Artificial
  probe
  misc_feature (1)..(25): SEQ ID NO: 4952; WAN024GDN_at; Start 143; Stop 167
tcttgatagctaaatcccgtgaatt

SEQ ID NO: 241286 - DNA, 25 bp, Artificial
  probe
  misc_feature (1)..(25): SEQ ID NO: 4952; WAN024GDN_at; Start 46; Stop 70
cgtagcctcgtcttcgtgacctttt

SEQ ID NO: 241287 - DNA, 25 bp, Artificial
  probe
  misc_feature (1)..(25): SEQ ID NO: 2769; WAN024GDO_at; Start 578; Stop 602
ttcgcacttatggatttgactgctc

SEQ ID NO: 241288 - DNA, 25 bp, Artificial
  probe
  misc_feature (1)..(25): SEQ ID NO: 2769; WAN024GDO_at; Start 137; Stop 161
gccttcaggtcattctttactacaa

SEQ ID NO: 241289 - DNA, 25 bp, Artificial
  probe
  misc_feature (1)..(25): SEQ ID NO: 2769; WAN024GDO_at; Start 305; Stop 329
ctattcaagaacaaaaaggagaaag

SEQ ID NO: 241290 - DNA, 25 bp, Artificial
  probe
  misc_feature (1)..(25): SEQ ID NO: 2769; WAN024GDO_at; Start 585; Stop 609
ttatggatttgactgctctattgag

SEQ ID NO: 241291 - DNA, 25 bp, Artificial
  probe
  misc_feature (1)..(25): SEQ ID NO: 2769; WAN024GDO_at; Start 205; Stop 229
gaagaaaggacagatttattgcccc

SEQ ID NO: 241292 - DNA, 25 bp, Artificial
  probe
  misc_feature (1)..(25): SEQ ID NO: 2769; WAN024GDO_at; Start 342; Stop 366
tgaggaaaaattcacgggatttagc

SEQ ID NO: 241293 - DNA, 25 bp, Artificial
  probe
  misc_feature (1)..(25): SEQ ID NO: 2769; WAN024GDO_at; Start 124; Stop 148
gaggatttggaacgccttcaggtca

SEQ ID NO: 241294 - DNA, 25 bp, Artificial
  probe
  misc_feature (1)..(25): SEQ ID NO: 2769; WAN024GDO_at; Start 405; Stop 429
gaaatatggtcaagaagtcatggga

SEQ ID NO: 241295 - DNA, 25 bp, Artificial
  probe
  misc_feature (1)..(25): SEQ ID NO: 2769; WAN024GDO_at; Start 147; Stop 171
cattctttactacaaatatctaggc

SEQ ID NO: 241296 - DNA, 25 bp, Artificial
  probe
  misc_feature (1)..(25): SEQ ID NO: 2769; WAN024GDO_at; Start 320; Stop 344
aaggagaaagaaaaatgaccattga

SEQ ID NO: 241297 - DNA, 25 bp, Artificial
  probe
  misc_feature (1)..(25): SEQ ID NO: 2769; WAN024GDO_at; Start 257; Stop 281
ctcgcgaaaggcaacatctggatac

SEQ ID NO: 241298 - DNA, 25 bp, Artificial
  probe
  misc_feature (1)..(25): SEQ ID NO: 2769; WAN024GDO_at; Start 497; Stop 521
ctttggcacaaaatcttcaagttgg

SEQ ID NO: 241299 - DNA, 25 bp, Artificial
  probe
  misc_feature (1)..(25): SEQ ID NO: 2769; WAN024GDO_at; Start 428; Stop 452
gacaagcgctcgaacgccaaaaagg

SEQ ID NO: 241300 - DNA, 25 bp, Artificial
  probe
  misc_feature (1)..(25): SEQ ID NO: 2769; WAN024GDO_at; Start 391; Stop 415
caagaagcggtagagaaatatggtc

SEQ ID NO: 241301 - DNA, 25 bp, Artificial
  probe
  misc_feature (1)..(25): SEQ ID NO: 2769; WAN024GDO_at; Start 277; Stop 301
gataccttgatttccaccttgcaaa

SEQ ID NO: 241302 - DNA, 25 bp, Artificial
  probe
  misc_feature (1)..(25): SEQ ID NO: 2769; WAN024GDO_at; Start 175; Stop 199
tctttagagaaaatagcagagctgt

SEQ ID NO: 241303 - DNA, 25 bp, Artificial
  probe
  misc_feature (1)..(25): SEQ ID NO: 2769; WAN024GDO_at; Start 550; Stop 574
gagcaagcagccaagctcttgcaag

SEQ ID NO: 241304 - DNA, 25 bp, Artificial
  probe
  misc_feature (1)..(25): SEQ ID NO: 2769; WAN024GDO_at; Start 435; Stop 459
gctcgaacgccaaaaaggtcacgaa

SEQ ID NO: 241305 - DNA, 25 bp, Artificial
  probe
  misc_feature (1)..(25): SEQ ID NO: 2769; WAN024GDO_at; Start 365; Stop 389
gctatcaagacaatcaaaaatacca

SEQ ID NO: 241306 - DNA, 25 bp, Artificial
  probe
  misc_feature (1)..(25): SEQ ID NO: 2769; WAN024GDO_at; Start 480; Stop 504
taaccaagtctttcaaactttggca

SEQ ID NO: 241307 - DNA, 25 bp, Artificial
  probe
  misc_feature (1)..(25): SEQ ID NO: 2769; WAN024GDO_at; Start 118; Stop 142
agtcaagaggatttggaacgccttc

SEQ ID NO: 241308 - DNA, 25 bp, Artificial
  probe
  misc_feature (1)..(25): SEQ ID NO: 2769; WAN024GDO_at; Start 414; Stop 438
tcaagaagtcatgggacaagcgctc

SEQ ID NO: 241309 - DNA, 25 bp, Artificial
  probe
  misc_feature (1)..(25): SEQ ID NO: 2769; WAN024GDO_at; Start 64; Stop 88
gacaagataggactcttggtcccct

SEQ ID NO: 241310 - DNA, 25 bp, Artificial
  probe
  misc_feature (1)..(25): SEQ ID NO: 2769; WAN024GDO_at; Start 447; Stop 471
aaaaggtcacgaagacgaggctacg

SEQ ID NO: 241311 - DNA, 25 bp, Artificial
  probe
  misc_feature (1)..(25): SEQ ID NO: 2769; WAN024GDO_at; Start 262; Stop 286
gaaaggcaacatctggataccttga

SEQ ID NO: 241312 - DNA, 25 bp, Artificial
  probe
  misc_feature (1)..(25): SEQ ID NO: 2769; WAN024GDO_at; Start 524; Stop 548
tacctgcaacagcaaccgaaaacca

SEQ ID NO: 241313 - DNA, 25 bp, Artificial
  probe
  misc_feature (1)..(25): SEQ ID NO: 2769; WAN024GDO_at; Start 354; Stop 378
cacgggatttagctatcaagacaat

SEQ ID NO: 241314 - DNA, 25 bp, Artificial
  probe
  misc_feature (1)..(25): SEQ ID NO: 2769; WAN024GDO_at; Start 376; Stop 400
aatcaaaaataccaccaagaagcgg

SEQ ID NO: 241315 - DNA, 25 bp, Artificial
  probe
  misc_feature (1)..(25): SEQ ID NO: 2769; WAN024GDO_at; Start 688; Stop 712
gcccagtacacgtcagatgccattg

SEQ ID NO: 241316 - DNA, 25 bp, Artificial
  probe
  misc_feature (1)..(25): SEQ ID NO: 2769; WAN024GDO_at; Start 159; Stop 183
caaatatctaggcttttctttagag

SEQ ID NO: 241317 - DNA, 25 bp, Artificial
  probe
  misc_feature (1)..(25): SEQ ID NO: 2769; WAN024GDO_at; Start 335; Stop 359
tgaccattgaggaaaaattcacggg

SEQ ID NO: 241318 - DNA, 25 bp, Artificial
  probe
  misc_feature (1)..(25): SEQ ID NO: 2769; WAN024GDO_at; Start 457; Stop 481
gaagacgaggctacggccgccttta

SEQ ID NO: 241319 - DNA, 25 bp, Artificial
  probe
  misc_feature (1)..(25): SEQ ID NO: 2769; WAN024GDO_at; Start 513; Stop 537
tcaagttggtttacctgcaacagca

SEQ ID NO: 241320 - DNA, 25 bp, Artificial
  probe
  misc_feature (1)..(25): SEQ ID NO: 2769; WAN024GDO_at; Start 191; Stop 215
cagagctgttaaaggaagaaaggac

SEQ ID NO: 241321 - DNA, 25 bp, Artificial
  probe
  misc_feature (1)..(25): SEQ ID NO: 5799; WAN024GDP_at; Start 149; Stop 173
ttgtttccatgctctttcatcgaga

SEQ ID NO: 241322 - DNA, 25 bp, Artificial
  probe
  misc_feature (1)..(25): SEQ ID NO: 5799; WAN024GDP_at; Start 125; Stop 149
gaagagccagacttggaacagtcct

SEQ ID NO: 241323 - DNA, 25 bp, Artificial
  probe
  misc_feature (1)..(25): SEQ ID NO: 5799; WAN024GDP_at; Start 5; Stop 29
tagccatccataaaaagaaagggcc

SEQ ID NO: 241324 - DNA, 25 bp, Artificial
  probe
  misc_feature (1)..(25): SEQ ID NO: 5799; WAN024GDP_at; Start 139; Stop 163
ggaacagtccttgtttccatgctct

SEQ ID NO: 241325 - DNA, 25 bp, Artificial
  probe
  misc_feature (1)..(25): SEQ ID NO: 5799; WAN024GDP_at; Start 2; Stop 26
tgttagccatccataaaaagaaagg

SEQ ID NO: 241326 - DNA, 25 bp, Artificial
  probe
  misc_feature (1)..(25): SEQ ID NO: 5799; WAN024GDP_at; Start 121; Stop 145
gaaggaagagccagacttggaacag

SEQ ID NO: 241327 - DNA, 25 bp, Artificial
  probe
  misc_feature (1)..(25): SEQ ID NO: 5799; WAN024GDP_at; Start 22; Stop 46
aaagggcctgagttcactactcaag

SEQ ID NO: 241328 - DNA, 25 bp, Artificial
  probe
  misc_feature (1)..(25): SEQ ID NO: 5799; WAN024GDP_at; Start 176; Stop 200
gagttcctccattgcaagagccttt

SEQ ID NO: 241329 - DNA, 25 bp, Artificial
  probe
  misc_feature (1)..(25): SEQ ID NO: 5799; WAN024GDP_at; Start 66; Stop 90
ttgggcaatgaagaccacaatgatg

SEQ ID NO: 241330 - DNA, 25 bp, Artificial
  probe
  misc_feature (1)..(25): SEQ ID NO: 5799; WAN024GDP_at; Start 166; Stop 190
catcgagatggagttcctccattgc

SEQ ID NO: 241331 - DNA, 25 bp, Artificial
  probe
  misc_feature (1)..(25): SEQ ID NO: 5799; WAN024GDP_at; Start 109; Stop 133
cgaagaaacgaagaaggaagagcca

SEQ ID NO: 241332 - DNA, 25 bp, Artificial
  probe
  misc_feature (1)..(25): SEQ ID NO: 5799; WAN024GDP_at; Start 71; Stop 95
caatgaagaccacaatgatgatgat

SEQ ID NO: 241333 - DNA, 25 bp, Artificial
  probe
  misc_feature (1)..(25): SEQ ID NO: 5799; WAN024GDP_at; Start 128; Stop 152
gagccagacttggaacagtccttgt

SEQ ID NO: 241334 - DNA, 25 bp, Artificial
  probe
  misc_feature (1)..(25): SEQ ID NO: 5799; WAN024GDP_at; Start 180; Stop 204
tcctccattgcaagagccttttcta

SEQ ID NO: 241335 - DNA, 25 bp, Artificial
  probe
  misc_feature (1)..(25): SEQ ID NO: 5799; WAN024GDP_at; Start 48; Stop 72
cctttttgattacataaattgggca

SEQ ID NO: 241336 - DNA, 25 bp, Artificial
  probe
  misc_feature (1)..(25): SEQ ID NO: 5799; WAN024GDP_at; Start 113; Stop 137
gaaacgaagaaggaagagccagact

SEQ ID NO: 241337 - DNA, 25 bp, Artificial
  probe
  misc_feature (1)..(25): SEQ ID NO: 5799; WAN024GDP_at; Start 155; Stop 179
ccatgctctttcatcgagatggagt

SEQ ID NO: 241338 - DNA, 25 bp, Artificial
  probe
  misc_feature (1)..(25): SEQ ID NO: 5799; WAN024GDP_at; Start 158; Stop 182
tgctctttcatcgagatggagttcc

SEQ ID NO: 241339 - DNA, 25 bp, Artificial
  probe
  misc_feature (1)..(25): SEQ ID NO: 5799; WAN024GDP_at; Start 100; Stop 124
atgacgaaacgaagaaacgaagaag

SEQ ID NO: 241340 - DNA, 25 bp, Artificial
  probe
  misc_feature (1)..(25): SEQ ID NO: 5799; WAN024GDP_at; Start 25; Stop 49
gggcctgagttcactactcaagtcc

SEQ ID NO: 241341 - DNA, 25 bp, Artificial
  probe
  misc_feature (1)..(25): SEQ ID NO: 5799; WAN024GDP_at; Start 132; Stop 156
cagacttggaacagtccttgtttcc

SEQ ID NO: 241342 - DNA, 25 bp, Artificial
  probe
  misc_feature (1)..(25): SEQ ID NO: 5799; WAN024GDP_at; Start 143; Stop 167
cagtccttgtttccatgctctttca

SEQ ID NO: 241343 - DNA, 25 bp, Artificial
  probe
  misc_feature (1)..(25): SEQ ID NO: 5799; WAN024GDP_at; Start 13; Stop 37
cataaaaagaaagggcctgagttca

SEQ ID NO: 241344 - DNA, 25 bp, Artificial
  probe
  misc_feature (1)..(25): SEQ ID NO: 5799; WAN024GDP_at; Start 117; Stop 141
cgaagaaggaagagccagacttgga

SEQ ID NO: 241345 - DNA, 25 bp, Artificial
  probe
  misc_feature (1)..(25): SEQ ID NO: 5799; WAN024GDP_at; Start 36; Stop 60
cactactcaagtcctttttgattac

SEQ ID NO: 241346 - DNA, 25 bp, Artificial
  probe
  misc_feature (1)..(25): SEQ ID NO: 5799; WAN024GDP_at; Start 60; Stop 84
cataaattgggcaatgaagaccaca

SEQ ID NO: 241347 - DNA, 25 bp, Artificial
  probe
  misc_feature (1)..(25): SEQ ID NO: 5799; WAN024GDP_at; Start 69; Stop 93
ggcaatgaagaccacaatgatgatg

SEQ ID NO: 241348 - DNA, 25 bp, Artificial
  probe
  misc_feature (1)..(25): SEQ ID NO: 5799; WAN024GDP_at; Start 74; Stop 98
tgaagaccacaatgatgatgattgg

SEQ ID NO: 241349 - DNA, 25 bp, Artificial
  probe
  misc_feature (1)..(25): SEQ ID NO: 5799; WAN024GDP_at; Start 19; Stop 43
aagaaagggcctgagttcactactc

SEQ ID NO: 241350 - DNA, 25 bp, Artificial
  probe
  misc_feature (1)..(25): SEQ ID NO: 5799; WAN024GDP_at; Start 174; Stop 198
tggagttcctccattgcaagagcct

SEQ ID NO: 241351 - DNA, 25 bp, Artificial
  probe
  misc_feature (1)..(25): SEQ ID NO: 5799; WAN024GDP_at; Start 185; Stop 209
cattgcaagagccttttctaactaa

SEQ ID NO: 241352 - DNA, 25 bp, Artificial
  probe
  misc_feature (1)..(25): SEQ ID NO: 5799; WAN024GDP_at; Start 9; Stop 33
catccataaaaagaaagggcctgag

SEQ ID NO: 241353 - DNA, 25 bp, Artificial
  probe
  misc_feature (1)..(25): SEQ ID NO: 5799; WAN024GDP_at; Start 162; Stop 186
ctttcatcgagatggagttcctcca

SEQ ID NO: 241354 - DNA, 25 bp, Artificial
  probe
  misc_feature (1)..(25): SEQ ID NO: 5799; WAN024GDP_at; Start 31; Stop 55
gagttcactactcaagtcctttttg

SEQ ID NO: 241355 - DNA, 25 bp, Artificial
  probe
  misc_feature (1)..(25): SEQ ID NO: 4886; WAN024GDQ_at; Start 1339; Stop 1363
tggaggaactccatctcgatgaaag

SEQ ID NO: 241356 - DNA, 25 bp, Artificial
  probe
  misc_feature (1)..(25): SEQ ID NO: 4886; WAN024GDQ_at; Start 619; Stop 643
caaaaagggattgaaagagcttcga

SEQ ID NO: 241357 - DNA, 25 bp, Artificial
  probe
  misc_feature (1)..(25): SEQ ID NO: 4886; WAN024GDQ_at; Start 342; Stop 366
cgctatcaaaacctttggaaaactg

SEQ ID NO: 241358 - DNA, 25 bp, Artificial
  probe
  misc_feature (1)..(25): SEQ ID NO: 4886; WAN024GDQ_at; Start 1189; Stop 1213
ccctatcttacggtgtcatggcgga

SEQ ID NO: 241359 - DNA, 25 bp, Artificial
  probe
  misc_feature (1)..(25): SEQ ID NO: 4886; WAN024GDQ_at; Start 1322; Stop 1346
taaaaaggctcttgcaatggaggaa

SEQ ID NO: 241360 - DNA, 25 bp, Artificial
  probe
  misc_feature (1)..(25): SEQ ID NO: 4886; WAN024GDQ_at; Start 293; Stop 317
tccctctcctgctggctgagtttgc

SEQ ID NO: 241361 - DNA, 25 bp, Artificial
  probe
  misc_feature (1)..(25): SEQ ID NO: 4886; WAN024GDQ_at; Start 112; Stop 136
ggagatcagagtttaactatgtcag

SEQ ID NO: 241362 - DNA, 25 bp, Artificial
  probe
  misc_feature (1)..(25): SEQ ID NO: 4886; WAN024GDQ_at; Start 127; Stop 151
actatgtcagaaaaatcacaatggg

SEQ ID NO: 241363 - DNA, 25 bp, Artificial
  probe
  misc_feature (1)..(25): SEQ ID NO: 4886; WAN024GDQ_at; Start 990; Stop 1014
tatcgtcttgcctcaactctttgac

SEQ ID NO: 241364 - DNA, 25 bp, Artificial
  probe
  misc_feature (1)..(25): SEQ ID NO: 4886; WAN024GDQ_at; Start 465; Stop 489
ctatctaggtattgagtttgggaaa

SEQ ID NO: 241365 - DNA, 25 bp, Artificial
  probe
  misc_feature (1)..(25): SEQ ID NO: 4886; WAN024GDQ_at; Start 495; Stop 519
ccaacttggtggaacgggtgattat

SEQ ID NO: 241366 - DNA, 25 bp, Artificial
  probe
  misc_feature (1)..(25): SEQ ID NO: 4886; WAN024GDQ_at; Start 432; Stop 456
tttttacagtgttatcggaggatgg

SEQ ID NO: 241367 - DNA, 25 bp, Artificial
  probe
  misc_feature (1)..(25): SEQ ID NO: 4886; WAN024GDQ_at; Start 1012; Stop 1036
gacaagatgccttttggaaccattt

SEQ ID NO: 241368 - DNA, 25 bp, Artificial
  probe
  misc_feature (1)..(25): SEQ ID NO: 4886; WAN024GDQ_at; Start 66; Stop 90
agaaggctatttgacaactcaagta

SEQ ID NO: 241369 - DNA, 25 bp, Artificial
  probe
  misc_feature (1)..(25): SEQ ID NO: 4886; WAN024GDQ_at; Start 310; Stop 334
gagtttgcccttggccgtagtgctg

SEQ ID NO: 241370 - DNA, 25 bp, Artificial
  probe
  misc_feature (1)..(25): SEQ ID NO: 4886; WAN024GDQ_at; Start 211; Stop 235
tggaagtttccctacatgactgctg

SEQ ID NO: 241371 - DNA, 25 bp, Artificial
  probe
  misc_feature (1)..(25): SEQ ID NO: 4886; WAN024GDQ_at; Start 1265; Stop 1289
caatctcctcatgccatttggagct

SEQ ID NO: 241372 - DNA, 25 bp, Artificial
  probe
  misc_feature (1)..(25): SEQ ID NO: 4886; WAN024GDQ_at; Start 699; Stop 723
cagtttgccaaatgccatggaaggg

SEQ ID NO: 241373 - DNA, 25 bp, Artificial
  probe
  misc_feature (1)..(25): SEQ ID NO: 4886; WAN024GDQ_at; Start 1369; Stop 1393
ggaaacaaggactgttccaagtctg

SEQ ID NO: 241374 - DNA, 25 bp, Artificial
  probe
  misc_feature (1)..(25): SEQ ID NO: 4886; WAN024GDQ_at; Start 1163; Stop 1187
gacctttgtctttggcattccttca

SEQ ID NO: 241375 - DNA, 25 bp, Artificial
  probe
  misc_feature (1)..(25): SEQ ID NO: 4886; WAN024GDQ_at; Start 1204; Stop 1228
tcatggcggatgttcacatttttgg

SEQ ID NO: 241376 - DNA, 25 bp, Artificial
  probe
  misc_feature (1)..(25): SEQ ID NO: 4886; WAN024GDQ_at; Start 918; Stop 942
ggcaggtctagccattttccaagct

SEQ ID NO: 241377 - DNA, 25 bp, Artificial
  probe
  misc_feature (1)..(25): SEQ ID NO: 4886; WAN024GDQ_at; Start 1236; Stop 1260
ttctttgacgctatggacttcttgg

SEQ ID NO: 241378 - DNA, 25 bp, Artificial
  probe
  misc_feature (1)..(25): SEQ ID NO: 4886; WAN024GDQ_at; Start 447; Stop 471
cggaggatggattctagtctatcta

SEQ ID NO: 241379 - DNA, 25 bp, Artificial
  probe
  misc_feature (1)..(25): SEQ ID NO: 4886; WAN024GDQ_at; Start 1354; Stop 1378
tcgatgaaagagcatggaaacaagg

SEQ ID NO: 241380 - DNA, 25 bp, Artificial
  probe
  misc_feature (1)..(25): SEQ ID NO: 4886; WAN024GDQ_at; Start 878; Stop 902
gaatctccatcgtagccatgaatat

SEQ ID NO: 241381 - DNA, 25 bp, Artificial
  probe
  misc_feature (1)..(25): SEQ ID NO: 4886; WAN024GDQ_at; Start 364; Stop 388
ctgggcaagaataacaagtacaact

SEQ ID NO: 241382 - DNA, 25 bp, Artificial
  probe
  misc_feature (1)..(25): SEQ ID NO: 4886; WAN024GDQ_at; Start 1306; Stop 1330
ttacaggctatatctttaaaaaggc

SEQ ID NO: 241383 - DNA, 25 bp, Artificial
  probe
  misc_feature (1)..(25): SEQ ID NO: 4886; WAN024GDQ_at; Start 240; Stop 264
tggcggtggaggctttttactaatc

SEQ ID NO: 241384 - DNA, 25 bp, Artificial
  probe
  misc_feature (1)..(25): SEQ ID NO: 4886; WAN024GDQ_at; Start 225; Stop 249
catgactgctgctaatggcggtgga

SEQ ID NO: 241385 - DNA, 25 bp, Artificial
  probe
  misc_feature (1)..(25): SEQ ID NO: 4886; WAN024GDQ_at; Start 385; Stop 409
aactttatcggttggattggcgcct

SEQ ID NO: 241386 - DNA, 25 bp, Artificial
  probe
  misc_feature (1)..(25): SEQ ID NO: 4886; WAN024GDQ_at; Start 635; Stop 659
gagcttcgaaagtcatgatgcccct

SEQ ID NO: 241387 - DNA, 25 bp, Artificial
  probe
  misc_feature (1)..(25): SEQ ID NO: 4886; WAN024GDQ_at; Start 166; Stop 190
tttattctagcatctgctggctcgg

SEQ ID NO: 241388 - DNA, 25 bp, Artificial
  probe
  misc_feature (1)..(25): SEQ ID NO: 4886; WAN024GDQ_at; Start 398; Stop 422
ggattggcgcctttgccctctttat

SEQ ID NO: 241389 - DNA, 25 bp, Artificial
  probe
  misc_feature (1)..(25): SEQ ID NO: 3898; WAN024GDR_at; Start 135; Stop 159
tacggtcaactgtgaatccaacagc

SEQ ID NO: 241390 - DNA, 25 bp, Artificial
  probe
  misc_feature (1)..(25): SEQ ID NO: 3898; WAN024GDR_at; Start 3; Stop 27
gaagttttggatccaattcaagtac

SEQ ID NO: 241391 - DNA, 25 bp, Artificial
  probe
  misc_feature (1)..(25): SEQ ID NO: 3898; WAN024GDR_at; Start 57; Stop 81
tgcgagcatcgatgacaacagtttt

SEQ ID NO: 241392 - DNA, 25 bp, Artificial
  probe
  misc_feature (1)..(25): SEQ ID NO: 3898; WAN024GDR_at; Start 240; Stop 264
tgttcttgatgaagccgtactcagc

SEQ ID NO: 241393 - DNA, 25 bp, Artificial
  probe
  misc_feature (1)..(25): SEQ ID NO: 3898; WAN024GDR_at; Start 12; Stop 36
gatccaattcaagtacttctactgg

SEQ ID NO: 241394 - DNA, 25 bp, Artificial
  probe
  misc_feature (1)..(25): SEQ ID NO: 3898; WAN024GDR_at; Start 131; Stop 155
tcgatacggtcaactgtgaatccaa

SEQ ID NO: 241395 - DNA, 25 bp, Artificial
  probe
  misc_feature (1)..(25): SEQ ID NO: 3898; WAN024GDR_at; Start 104; Stop 128
gcttctgcaacaactgcatcgatgt

SEQ ID NO: 241396 - DNA, 25 bp, Artificial
  probe
  misc_feature (1)..(25): SEQ ID NO: 3898; WAN024GDR_at; Start 163; Stop 187
ttgagcttccgcaattttagcgtag

SEQ ID NO: 241397 - DNA, 25 bp, Artificial
  probe
  misc_feature (1)..(25): SEQ ID NO: 3898; WAN024GDR_at; Start 20; Stop 44
tcaagtacttctactggaagtggac

SEQ ID NO: 241398 - DNA, 25 bp, Artificial
  probe
  misc_feature (1)..(25): SEQ ID NO: 3898; WAN024GDR_at; Start 90; Stop 114
tgttcaatttaacagcttctgcaac

SEQ ID NO: 241399 - DNA, 25 bp, Artificial
  probe
  misc_feature (1)..(25): SEQ ID NO: 3898; WAN024GDR_at; Start 124; Stop 148
gatgtcttcgatacggtcaactgtg

SEQ ID NO: 241400 - DNA, 25 bp, Artificial
  probe
  misc_feature (1)..(25): SEQ ID NO: 3898; WAN024GDR_at; Start 170; Stop 194
tccgcaattttagcgtagtcagcgt

SEQ ID NO: 241401 - DNA, 25 bp, Artificial
  probe
  misc_feature (1)..(25): SEQ ID NO: 3898; WAN024GDR_at; Start 182; Stop 206
gcgtagtcagcgtttgtgaagtcta

SEQ ID NO: 241402 - DNA, 25 bp, Artificial
  probe
  misc_feature (1)..(25): SEQ ID NO: 3898; WAN024GDR_at; Start 214; Stop 238
caagtgtttgtttgtatcttcgtat

SEQ ID NO: 241403 - DNA, 25 bp, Artificial
  probe
  misc_feature (1)..(25): SEQ ID NO: 3898; WAN024GDR_at; Start 109; Stop 133
tgcaacaactgcatcgatgtcttcg

SEQ ID NO: 241404 - DNA, 25 bp, Artificial
  probe
  misc_feature (1)..(25): SEQ ID NO: 3898; WAN024GDR_at; Start 67; Stop 91
gatgacaacagttttaccttctttg

SEQ ID NO: 241405 - DNA, 25 bp, Artificial
  probe
  misc_feature (1)..(25): SEQ ID NO: 3898; WAN024GDR_at; Start 120; Stop 144
catcgatgtcttcgatacggtcaac

SEQ ID NO: 241406 - DNA, 25 bp, Artificial
  probe
  misc_feature (1)..(25): SEQ ID NO: 3898; WAN024GDR_at; Start 149; Stop 173
aatccaacagctccttgagcttccg

SEQ ID NO: 241407 - DNA, 25 bp, Artificial
  probe
  misc_feature (1)..(25): SEQ ID NO: 3898; WAN024GDR_at; Start 158; Stop 182
gctccttgagcttccgcaattttag

SEQ ID NO: 241408 - DNA, 25 bp, Artificial
  probe
  misc_feature (1)..(25): SEQ ID NO: 3898; WAN024GDR_at; Start 40; Stop 64
tggacggtgttgagtgatgcgagca

SEQ ID NO: 241409 - DNA, 25 bp, Artificial
  probe
  misc_feature (1)..(25): SEQ ID NO: 3898; WAN024GDR_at; Start 175; Stop 199
aattttagcgtagtcagcgtttgtg

SEQ ID NO: 241410 - DNA, 25 bp, Artificial
  probe
  misc_feature (1)..(25): SEQ ID NO: 3898; WAN024GDR_at; Start 199; Stop 223
gaagtctacaccaaacaagtgtttg

SEQ ID NO: 241411 - DNA, 25 bp, Artificial
  probe
  misc_feature (1)..(25): SEQ ID NO: 3898; WAN024GDR_at; Start 97; Stop 121
tttaacagcttctgcaacaactgca

SEQ ID NO: 241412 - DNA, 25 bp, Artificial
  probe
  misc_feature (1)..(25): SEQ ID NO: 3898; WAN024GDR_at; Start 115; Stop 139
aactgcatcgatgtcttcgatacgg

SEQ ID NO: 241413 - DNA, 25 bp, Artificial
  probe
  misc_feature (1)..(25): SEQ ID NO: 3898; WAN024GDR_at; Start 188; Stop 212
tcagcgtttgtgaagtctacaccaa

SEQ ID NO: 241414 - DNA, 25 bp, Artificial
  probe
  misc_feature (1)..(25): SEQ ID NO: 3898; WAN024GDR_at; Start 196; Stop 220
tgtgaagtctacaccaaacaagtgt

SEQ ID NO: 241415 - DNA, 25 bp, Artificial
  probe
  misc_feature (1)..(25): SEQ ID NO: 3898; WAN024GDR_at; Start 128; Stop 152
tcttcgatacggtcaactgtgaatc

SEQ ID NO: 241416 - DNA, 25 bp, Artificial
  probe
  misc_feature (1)..(25): SEQ ID NO: 3898; WAN024GDR_at; Start 145; Stop 169
tgtgaatccaacagctccttgagct

SEQ ID NO: 241417 - DNA, 25 bp, Artificial
  probe
  misc_feature (1)..(25): SEQ ID NO: 3898; WAN024GDR_at; Start 81; Stop 105
taccttctttgttcaatttaacagc

SEQ ID NO: 241418 - DNA, 25 bp, Artificial
  probe
  misc_feature (1)..(25): SEQ ID NO: 3898; WAN024GDR_at; Start 60; Stop 84
gagcatcgatgacaacagttttacc

SEQ ID NO: 241419 - DNA, 25 bp, Artificial
  probe
  misc_feature (1)..(25): SEQ ID NO: 3898; WAN024GDR_at; Start 246; Stop 270
tgatgaagccgtactcagcatttga

SEQ ID NO: 241420 - DNA, 25 bp, Artificial
  probe
  misc_feature (1)..(25): SEQ ID NO: 3898; WAN024GDR_at; Start 25; Stop 49
tacttctactggaagtggacggtgt

SEQ ID NO: 241421 - DNA, 25 bp, Artificial
  probe
  misc_feature (1)..(25): SEQ ID NO: 3898; WAN024GDR_at; Start 54; Stop 78
tgatgcgagcatcgatgacaacagt

SEQ ID NO: 241422 - DNA, 25 bp, Artificial
  probe
  misc_feature (1)..(25): SEQ ID NO: 3898; WAN024GDR_at; Start 232; Stop 256
ttcgtatttgttcttgatgaagccg

SEQ ID NO: 241423 - DNA, 25 bp, Artificial
  probe
  misc_feature (1)..(25): SEQ ID NO: 1449; WAN024GDS_at; Start 225; Stop 249
ttcaggtggtccaggtgcgactcac

SEQ ID NO: 241424 - DNA, 25 bp, Artificial
  probe
  misc_feature (1)..(25): SEQ ID NO: 1449; WAN024GDS_at; Start 898; Stop 922
gatatcgacccttacaaacttggta

SEQ ID NO: 241425 - DNA, 25 bp, Artificial
  probe
  misc_feature (1)..(25): SEQ ID NO: 1449; WAN024GDS_at; Start 1235; Stop 1259
tctttgcgacaatgggtattgccct

SEQ ID NO: 241426 - DNA, 25 bp, Artificial
  probe
  misc_feature (1)..(25): SEQ ID NO: 1449; WAN024GDS_at; Start 605; Stop 629
tcttgaacaatgctgaacgcccagt

SEQ ID NO: 241427 - DNA, 25 bp, Artificial
  probe
  misc_feature (1)..(25): SEQ ID NO: 1449; WAN024GDS_at; Start 329; Stop 353
tgaacatggatgctttccaagagct

SEQ ID NO: 241428 - DNA, 25 bp, Artificial
  probe
  misc_feature (1)..(25): SEQ ID NO: 1449; WAN024GDS_at; Start 257; Stop 281
acggtgtttacgatgcagctatgga

SEQ ID NO: 241429 - DNA, 25 bp, Artificial
  probe
  misc_feature (1)..(25): SEQ ID NO: 1449; WAN024GDS_at; Start 1744; Stop 1768
gaagaaggattgcaatcacgcgcaa

SEQ ID NO: 241430 - DNA, 25 bp, Artificial
  probe
  misc_feature (1)..(25): SEQ ID NO: 1449; WAN024GDS_at; Start 1042; Stop 1066
caaaactggcgtgattacatgaaca

SEQ ID NO: 241431 - DNA, 25 bp, Artificial
  probe
  misc_feature (1)..(25): SEQ ID NO: 1449; WAN024GDS_at; Start 967; Stop 991
gcagctaaagctatccttgacaaag

SEQ ID NO: 241432 - DNA, 25 bp, Artificial
  probe
  misc_feature (1)..(25): SEQ ID NO: 1449; WAN024GDS_at; Start 1587; Stop 1611
taaaactgttgtcatcgatgctcgc

SEQ ID NO: 241433 - DNA, 25 bp, Artificial
  probe
  misc_feature (1)..(25): SEQ ID NO: 1449; WAN024GDS_at; Start 1488; Stop 1512
taaaattgcggaagctcaaggagct

SEQ ID NO: 241434 - DNA, 25 bp, Artificial
  probe
  misc_feature (1)..(25): SEQ ID NO: 1449; WAN024GDS_at; Start 66; Stop 90
tacaatctacggtatcccatcagga

SEQ ID NO: 241435 - DNA, 25 bp, Artificial
  probe
  misc_feature (1)..(25): SEQ ID NO: 1449; WAN024GDS_at; Start 306; Stop 330
tggatcacgtccagttaacgaattg

SEQ ID NO: 241436 - DNA, 25 bp, Artificial
  probe
  misc_feature (1)..(25): SEQ ID NO: 1449; WAN024GDS_at; Start 7; Stop 31
caagggaaaattactgcatctgcag

SEQ ID NO: 241437 - DNA, 25 bp, Artificial
  probe
  misc_feature (1)..(25): SEQ ID NO: 1449; WAN024GDS_at; Start 162; Stop 186
gacaggtgctcttgcagcggttatg

SEQ ID NO: 241438 - DNA, 25 bp, Artificial
  probe
  misc_feature (1)..(25): SEQ ID NO: 1449; WAN024GDS_at; Start 524; Stop 548
catactacggttcaggttcatacga

SEQ ID NO: 241439 - DNA, 25 bp, Artificial
  probe
  misc_feature (1)..(25): SEQ ID NO: 1449; WAN024GDS_at; Start 561; Stop 585
cgctcctgctttgaacgaagttgaa

SEQ ID NO: 241440 - DNA, 25 bp, Artificial
  probe
  misc_feature (1)..(25): SEQ ID NO: 1449; WAN024GDS_at; Start 791; Stop 815
ccaacgaagtggtctttgaagcaga

SEQ ID NO: 241441 - DNA, 25 bp, Artificial
  probe
  misc_feature (1)..(25): SEQ ID NO: 1449; WAN024GDS_at; Start 1122; Stop 1146
caacaaacatgctgatcaagacgct

SEQ ID NO: 241442 - DNA, 25 bp, Artificial
  probe
  misc_feature (1)..(25): SEQ ID NO: 1449; WAN024GDS_at; Start 1328; Stop 1352
cattcaacatgtgctacccagacgt

SEQ ID NO: 241443 - DNA, 25 bp, Artificial
  probe
  misc_feature (1)..(25): SEQ ID NO: 1449; WAN024GDS_at; Start 143; Stop 167
tacaagttcgccacgaagagacagg

SEQ ID NO: 241444 - DNA, 25 bp, Artificial
  probe
  misc_feature (1)..(25): SEQ ID NO: 1449; WAN024GDS_at; Start 1517; Stop 1541
gattcacagttgaccgtatcgaaga

SEQ ID NO: 241445 - DNA, 25 bp, Artificial
  probe
  misc_feature (1)..(25): SEQ ID NO: 1449; WAN024GDS_at; Start 1260; Stop 1284
tcctggtggtatcgctgctaagaaa

SEQ ID NO: 241446 - DNA, 25 bp, Artificial
  probe
  misc_feature (1)..(25): SEQ ID NO: 1449; WAN024GDS_at; Start 1535; Stop 1559
tcgaagacatcgatgcagttgttgc

SEQ ID NO: 241447 - DNA, 25 bp, Artificial
  probe
  misc_feature (1)..(25): SEQ ID NO: 1449; WAN024GDS_at; Start 1459; Stop 1483
ggtgtagacttcacaaacgctgact

SEQ ID NO: 241448 - DNA, 25 bp, Artificial
  probe
  misc_feature (1)..(25): SEQ ID NO: 1449; WAN024GDS_at; Start 180; Stop 204
ggttatgcaagctaaattcggcggc

SEQ ID NO: 241449 - DNA, 25 bp, Artificial
  probe
  misc_feature (1)..(25): SEQ ID NO: 1449; WAN024GDS_at; Start 85; Stop 109
tcaggaacactcagctcattgatgg

SEQ ID NO: 241450 - DNA, 25 bp, Artificial
  probe
  misc_feature (1)..(25): SEQ ID NO: 1449; WAN024GDS_at; Start 1400; Stop 1424
caaatgctgagtacggcttcatcaa

SEQ ID NO: 241451 - DNA, 25 bp, Artificial
  probe
  misc_feature (1)..(25): SEQ ID NO: 1449; WAN024GDS_at; Start 1012; Stop 1036
ccatggtggcgtgcaaacgttaaga

SEQ ID NO: 241452 - DNA, 25 bp, Artificial
  probe
  misc_feature (1)..(25): SEQ ID NO: 1449; WAN024GDS_at; Start 1648; Stop 1672
gaattggatccaaaacttcactcag

SEQ ID NO: 241453 - DNA, 25 bp, Artificial
  probe
  misc_feature (1)..(25): SEQ ID NO: 1449; WAN024GDS_at; Start 391; Stop 415
aacaaacgtgtagcttacgctgagc

SEQ ID NO: 241454 - DNA, 25 bp, Artificial
  probe
  misc_feature (1)..(25): SEQ ID NO: 1449; WAN024GDS_at; Start 998; Stop 1022
cagttgaatcaactccatggtggcg

SEQ ID NO: 241455 - DNA, 25 bp, Artificial
  probe
  misc_feature (1)..(25): SEQ ID NO: 1449; WAN024GDS_at; Start 944; Stop 968
caatccttggtgatgctggtcaagc

SEQ ID NO: 241456 - DNA, 25 bp, Artificial
  probe
  misc_feature (1)..(25): SEQ ID NO: 1449; WAN024GDS_at; Start 422; Stop 446
caaaagtaattgacgaagcctgccg

SEQ ID NO: 241457 - DNA, 25 bp, Artificial
  probe
  misc_feature (1)..(25): SEQ ID NO: 5375; WAN024GDT_at; Start 108; Stop 132
caatagcaactactggaatggcaac

SEQ ID NO: 241458 - DNA, 25 bp, Artificial
  probe
  misc_feature (1)..(25): SEQ ID NO: 5375; WAN024GDT_at; Start 35; Stop 59
aaatcacgtacaacagctacaccag

SEQ ID NO: 241459 - DNA, 25 bp, Artificial
  probe
  misc_feature (1)..(25): SEQ ID NO: 5375; WAN024GDT_at; Start 29; Stop 53
tgcatcaaatcacgtacaacagcta

SEQ ID NO: 241460 - DNA, 25 bp, Artificial
  probe
  misc_feature (1)..(25): SEQ ID NO: 5375; WAN024GDT_at; Start 81; Stop 105
gatcaatattctccgaagtcaagcc

SEQ ID NO: 241461 - DNA, 25 bp, Artificial
  probe
  misc_feature (1)..(25): SEQ ID NO: 5375; WAN024GDT_at; Start 210; Stop 234
ctgtacccaagtaatctgcacctga

SEQ ID NO: 241462 - DNA, 25 bp, Artificial
  probe
  misc_feature (1)..(25): SEQ ID NO: 5375; WAN024GDT_at; Start 205; Stop 229
ggctcctgtacccaagtaatctgca

SEQ ID NO: 241463 - DNA, 25 bp, Artificial
  probe
  misc_feature (1)..(25): SEQ ID NO: 5375; WAN024GDT_at; Start 68; Stop 92
gtgcccataagctgatcaatattct

SEQ ID NO: 241464 - DNA, 25 bp, Artificial
  probe
  misc_feature (1)..(25): SEQ ID NO: 5375; WAN024GDT_at; Start 99; Stop 123
tcaagcctccaatagcaactactgg

SEQ ID NO: 241465 - DNA, 25 bp, Artificial
  probe
  misc_feature (1)..(25): SEQ ID NO: 5375; WAN024GDT_at; Start 61; Stop 85
tatgccagtgcccataagctgatca

SEQ ID NO: 241466 - DNA, 25 bp, Artificial
  probe
  misc_feature (1)..(25): SEQ ID NO: 5375; WAN024GDT_at; Start 198; Stop 222
ggaaaatggctcctgtacccaagta

SEQ ID NO: 241467 - DNA, 25 bp, Artificial
  probe
  misc_feature (1)..(25): SEQ ID NO: 5375; WAN024GDT_at; Start 90; Stop 114
tctccgaagtcaagcctccaatagc

SEQ ID NO: 241468 - DNA, 25 bp, Artificial
  probe
  misc_feature (1)..(25): SEQ ID NO: 5375; WAN024GDT_at; Start 26; Stop 50
gcttgcatcaaatcacgtacaacag

SEQ ID NO: 241469 - DNA, 25 bp, Artificial
  probe
  misc_feature (1)..(25): SEQ ID NO: 5375; WAN024GDT_at; Start 75; Stop 99
taagctgatcaatattctccgaagt

SEQ ID NO: 241470 - DNA, 25 bp, Artificial
  probe
  misc_feature (1)..(25): SEQ ID NO: 5375; WAN024GDT_at; Start 40; Stop 64
acgtacaacagctacaccagctatg

SEQ ID NO: 241471 - DNA, 25 bp, Artificial
  probe
  misc_feature (1)..(25): SEQ ID NO: 5375; WAN024GDT_at; Start 128; Stop 152
gcaaccgtttggcaaattgttttca

SEQ ID NO: 241472 - DNA, 25 bp, Artificial
  probe
  misc_feature (1)..(25): SEQ ID NO: 5375; WAN024GDT_at; Start 176; Stop 200
gcattttccttggtggtggttggga

SEQ ID NO: 241473 - DNA, 25 bp, Artificial
  probe
  misc_feature (1)..(25): SEQ ID NO: 5375; WAN024GDT_at; Start 46; Stop 70
aacagctacaccagctatgccagtg

SEQ ID NO: 241474 - DNA, 25 bp, Artificial
  probe
  misc_feature (1)..(25): SEQ ID NO: 5375; WAN024GDT_at; Start 54; Stop 78
caccagctatgccagtgcccataag

SEQ ID NO: 241475 - DNA, 25 bp, Artificial
  probe
  misc_feature (1)..(25): SEQ ID NO: 5375; WAN024GDT_at; Start 160; Stop 184
tatcagagtaatgggcgcattttcc

SEQ ID NO: 241476 - DNA, 25 bp, Artificial
  probe
  misc_feature (1)..(25): SEQ ID NO: 5375; WAN024GDT_at; Start 111; Stop 135
tagcaactactggaatggcaaccgt

SEQ ID NO: 241477 - DNA, 25 bp, Artificial
  probe
  misc_feature (1)..(25): SEQ ID NO: 5375; WAN024GDT_at; Start 151; Stop 175
caaggtcgatatcagagtaatgggc

SEQ ID NO: 241478 - DNA, 25 bp, Artificial
  probe
  misc_feature (1)..(25): SEQ ID NO: 5375; WAN024GDT_at; Start 87; Stop 111
tattctccgaagtcaagcctccaat

SEQ ID NO: 241479 - DNA, 25 bp, Artificial
  probe
  misc_feature (1)..(25): SEQ ID NO: 5375; WAN024GDT_at; Start 145; Stop 169
tgttttcaaggtcgatatcagagta

SEQ ID NO: 241480 - DNA, 25 bp, Artificial
  probe
  misc_feature (1)..(25): SEQ ID NO: 5375; WAN024GDT_at; Start 95; Stop 119
gaagtcaagcctccaatagcaacta

SEQ ID NO: 241481 - DNA, 25 bp, Artificial
  probe
  misc_feature (1)..(25): SEQ ID NO: 5375; WAN024GDT_at; Start 168; Stop 192
taatgggcgcattttccttggtggt

SEQ ID NO: 241482 - DNA, 25 bp, Artificial
  probe
  misc_feature (1)..(25): SEQ ID NO: 5375; WAN024GDT_at; Start 137; Stop 161
tggcaaattgttttcaaggtcgata

SEQ ID NO: 241483 - DNA, 25 bp, Artificial
  probe
  misc_feature (1)..(25): SEQ ID NO: 5375; WAN024GDT_at; Start 192; Stop 216
tggttgggaaaatggctcctgtacc

SEQ ID NO: 241484 - DNA, 25 bp, Artificial
  probe
  misc_feature (1)..(25): SEQ ID NO: 5375; WAN024GDT_at; Start 11; Stop 35
gcctcaatatcttctgcttgcatca

SEQ ID NO: 241485 - DNA, 25 bp, Artificial
  probe
  misc_feature (1)..(25): SEQ ID NO: 5375; WAN024GDT_at; Start 64; Stop 88
gccagtgcccataagctgatcaata

SEQ ID NO: 241486 - DNA, 25 bp, Artificial
  probe
  misc_feature (1)..(25): SEQ ID NO: 5375; WAN024GDT_at; Start 18; Stop 42
tatcttctgcttgcatcaaatcacg

SEQ ID NO: 241487 - DNA, 25 bp, Artificial
  probe
  misc_feature (1)..(25): SEQ ID NO: 5375; WAN024GDT_at; Start 123; Stop 147
gaatggcaaccgtttggcaaattgt

SEQ ID NO: 241488 - DNA, 25 bp, Artificial
  probe
  misc_feature (1)..(25): SEQ ID NO: 5375; WAN024GDT_at; Start 2; Stop 26
tgcgtttttgcctcaatatcttctg

SEQ ID NO: 241489 - DNA, 25 bp, Artificial
  probe
  misc_feature (1)..(25): SEQ ID NO: 5375; WAN024GDT_at; Start 118; Stop 142
tactggaatggcaaccgtttggcaa

SEQ ID NO: 241490 - DNA, 25 bp, Artificial
  probe
  misc_feature (1)..(25): SEQ ID NO: 5375; WAN024GDT_at; Start 156; Stop 180
tcgatatcagagtaatgggcgcatt

SEQ ID NO: 241491 - DNA, 25 bp, Artificial
  probe
  misc_feature (1)..(25): SEQ ID NO: 1205; WAN024GDU_at; Start 25; Stop 49
tatctggtaaccaatcgctatcaag

SEQ ID NO: 241492 - DNA, 25 bp, Artificial
  probe
  misc_feature (1)..(25): SEQ ID NO: 1205; WAN024GDU_at; Start 210; Stop 234
tgatcggttggatgtttgtcttgcg

SEQ ID NO: 241493 - DNA, 25 bp, Artificial
  probe
  misc_feature (1)..(25): SEQ ID NO: 1205; WAN024GDU_at; Start 218; Stop 242
tggatgtttgtcttgcggttgatgc

SEQ ID NO: 241494 - DNA, 25 bp, Artificial
  probe
  misc_feature (1)..(25): SEQ ID NO: 1205; WAN024GDU_at; Start 36; Stop 60
caatcgctatcaagattccgtggaa

SEQ ID NO: 241495 - DNA, 25 bp, Artificial
  probe
  misc_feature (1)..(25): SEQ ID NO: 1205; WAN024GDU_at; Start 192; Stop 216
ggtacccttgataatcgatgatcgg

SEQ ID NO: 241496 - DNA, 25 bp, Artificial
  probe
  misc_feature (1)..(25): SEQ ID NO: 1205; WAN024GDU_at; Start 572; Stop 596
cagaagatattgaggcaaaaacgca

SEQ ID NO: 241497 - DNA, 25 bp, Artificial
  probe
  misc_feature (1)..(25): SEQ ID NO: 1205; WAN024GDU_at; Start 339; Stop 363
taaaagagctctggaagcggagaaa

SEQ ID NO: 241498 - DNA, 25 bp, Artificial
  probe
  misc_feature (1)..(25): SEQ ID NO: 1205; WAN024GDU_at; Start 301; Stop 325
ggtcctgaaaaaatcctcggtgtca

SEQ ID NO: 241499 - DNA, 25 bp, Artificial
  probe
  misc_feature (1)..(25): SEQ ID NO: 1205; WAN024GDU_at; Start 13; Stop 37
gcacttagactatatctggtaacca

SEQ ID NO: 241500 - DNA, 25 bp, Artificial
  probe
  misc_feature (1)..(25): SEQ ID NO: 1205; WAN024GDU_at; Start 348; Stop 372
tctggaagcggagaaatcaggtgca

SEQ ID NO: 241501 - DNA, 25 bp, Artificial
  probe
  misc_feature (1)..(25): SEQ ID NO: 1205; WAN024GDU_at; Start 327; Stop 351
cgctaaaacggttaaaagagctctg

SEQ ID NO: 241502 - DNA, 25 bp, Artificial
  probe
  misc_feature (1)..(25): SEQ ID NO: 1205; WAN024GDU_at; Start 6; Stop 30
tagagaagcacttagactatatctg

SEQ ID NO: 241503 - DNA, 25 bp, Artificial
  probe
  misc_feature (1)..(25): SEQ ID NO: 1205; WAN024GDU_at; Start 71; Stop 95
caaaagttgagacggcctgccgttc

SEQ ID NO: 241504 - DNA, 25 bp, Artificial
  probe
  misc_feature (1)..(25): SEQ ID NO: 1205; WAN024GDU_at; Start 306; Stop 330
tgaaaaaatcctcggtgtcaccgct

SEQ ID NO: 241505 - DNA, 25 bp, Artificial
  probe
  misc_feature (1)..(25): SEQ ID NO: 1205; WAN024GDU_at; Start 446; Stop 470
tgaaaacaatttgccaaacggttgc

SEQ ID NO: 241506 - DNA, 25 bp, Artificial
  probe
  misc_feature (1)..(25): SEQ ID NO: 1205; WAN024GDU_at; Start 312; Stop 336
aatcctcggtgtcaccgctaaaacg

SEQ ID NO: 241507 - DNA, 25 bp, Artificial
  probe
  misc_feature (1)..(25): SEQ ID NO: 1205; WAN024GDU_at; Start 197; Stop 221
ccttgataatcgatgatcggttgga

SEQ ID NO: 241508 - DNA, 25 bp, Artificial
  probe
  misc_feature (1)..(25): SEQ ID NO: 1205; WAN024GDU_at; Start 545; Stop 569
tagctgttgtacgtgatttgatgca

SEQ ID NO: 241509 - DNA, 25 bp, Artificial
  probe
  misc_feature (1)..(25): SEQ ID NO: 1205; WAN024GDU_at; Start 528; Stop 552
cactggcatagctggtgtagctgtt

SEQ ID NO: 241510 - DNA, 25 bp, Artificial
  probe
  misc_feature (1)..(25): SEQ ID NO: 1205; WAN024GDU_at; Start 48; Stop 72
agattccgtggaaagctttcttgca

SEQ ID NO: 241511 - DNA, 25 bp, Artificial
  probe
  misc_feature (1)..(25): SEQ ID NO: 1205; WAN024GDU_at; Start 52; Stop 76
tccgtggaaagctttcttgcaaaag

SEQ ID NO: 241512 - DNA, 25 bp, Artificial
  probe
  misc_feature (1)..(25): SEQ ID NO: 1205; WAN024GDU_at; Start 452; Stop 476
caatttgccaaacggttgccattcc

SEQ ID NO: 241513 - DNA, 25 bp, Artificial
  probe
  misc_feature (1)..(25): SEQ ID NO: 1205; WAN024GDU_at; Start 66; Stop 90
tcttgcaaaagttgagacggcctgc

SEQ ID NO: 241514 - DNA, 25 bp, Artificial
  probe
  misc_feature (1)..(25): SEQ ID NO: 1205; WAN024GDU_at; Start 177; Stop 201
aacagatgcttatcaggtacccttg

SEQ ID NO: 241515 - DNA, 25 bp, Artificial
  probe
  misc_feature (1)..(25): SEQ ID NO: 1205; WAN024GDU_at; Start 134; Stop 158
caaccaatcaatattatcaactggc

SEQ ID NO: 241516 - DNA, 25 bp, Artificial
  probe
  misc_feature (1)..(25): SEQ ID NO: 1205; WAN024GDU_at; Start 103; Stop 127
accatagtccaattgcgagaaaaaa

SEQ ID NO: 241517 - DNA, 25 bp, Artificial
  probe
  misc_feature (1)..(25): SEQ ID NO: 1205; WAN024GDU_at; Start 563; Stop 587
tgatgcaagcagaagatattgaggc

SEQ ID NO: 241518 - DNA, 25 bp, Artificial
  probe
  misc_feature (1)..(25): SEQ ID NO: 1205; WAN024GDU_at; Start 534; Stop 558
catagctggtgtagctgttgtacgt

SEQ ID NO: 241519 - DNA, 25 bp, Artificial
  probe
  misc_feature (1)..(25): SEQ ID NO: 1205; WAN024GDU_at; Start 359; Stop 383
agaaatcaggtgcagattacttggg

SEQ ID NO: 241520 - DNA, 25 bp, Artificial
  probe
  misc_feature (1)..(25): SEQ ID NO: 1205; WAN024GDU_at; Start 554; Stop 578
tacgtgatttgatgcaagcagaaga

SEQ ID NO: 241521 - DNA, 25 bp, Artificial
  probe
  misc_feature (1)..(25): SEQ ID NO: 1205; WAN024GDU_at; Start 579; Stop 603
tattgaggcaaaaacgcaagccttt

SEQ ID NO: 241522 - DNA, 25 bp, Artificial
  probe
  misc_feature (1)..(25): SEQ ID NO: 1205; WAN024GDU_at; Start 163; Stop 187
caagtcaaggaaataacagatgctt

SEQ ID NO: 241523 - DNA, 25 bp, Artificial
  probe
  misc_feature (1)..(25): SEQ ID NO: 1205; WAN024GDU_at; Start 98; Stop 122
gggttaccatagtccaattgcgaga

SEQ ID NO: 241524 - DNA, 25 bp, Artificial
  probe
  misc_feature (1)..(25): SEQ ID NO: 1205; WAN024GDU_at; Start 148; Stop 172
tatcaactggcaaaacaagtcaagg

SEQ ID NO: 241525 - DNA, 25 bp, Artificial
  probe
  misc_feature (1)..(25): SEQ ID NO: 2651; WAN024GDV_at; Start 270; Stop 294
tatcggccttgtctttgtttcctct

SEQ ID NO: 241526 - DNA, 25 bp, Artificial
  probe
  misc_feature (1)..(25): SEQ ID NO: 2651; WAN024GDV_at; Start 482; Stop 506
tgatgacagtctttaggtggcgcca

SEQ ID NO: 241527 - DNA, 25 bp, Artificial
  probe
  misc_feature (1)..(25): SEQ ID NO: 2651; WAN024GDV_at; Start 353; Stop 377
cctatgccttgattgtggtattcaa

SEQ ID NO: 241528 - DNA, 25 bp, Artificial
  probe
  misc_feature (1)..(25): SEQ ID NO: 2651; WAN024GDV_at; Start 61; Stop 85
gaaacatctttcattccttcgattg

SEQ ID NO: 241529 - DNA, 25 bp, Artificial
  probe
  misc_feature (1)..(25): SEQ ID NO: 2651; WAN024GDV_at; Start 453; Stop 477
ttggtcgcccttgatttacagtaag

SEQ ID NO: 241530 - DNA, 25 bp, Artificial
  probe
  misc_feature (1)..(25): SEQ ID NO: 2651; WAN024GDV_at; Start 384; Stop 408
tcctctcattcagcaagaaatcaag

SEQ ID NO: 241531 - DNA, 25 bp, Artificial
  probe
  misc_feature (1)..(25): SEQ ID NO: 2651; WAN024GDV_at; Start 227; Stop 251
cacaggcagtcatgcttggaacgag

SEQ ID NO: 241532 - DNA, 25 bp, Artificial
  probe
  misc_feature (1)..(25): SEQ ID NO: 2651; WAN024GDV_at; Start 566; Stop 590
gctatcggactttttatattcctaa

SEQ ID NO: 241533 - DNA, 25 bp, Artificial
  probe
  misc_feature (1)..(25): SEQ ID NO: 2651; WAN024GDV_at; Start 413; Stop 437
tcaaagaagcttgcctattacgtgg

SEQ ID NO: 241534 - DNA, 25 bp, Artificial
  probe
  misc_feature (1)..(25): SEQ ID NO: 2651; WAN024GDV_at; Start 469; Stop 493
tacagtaaggttctgatgacagtct

SEQ ID NO: 241535 - DNA, 25 bp, Artificial
  probe
  misc_feature (1)..(25): SEQ ID NO: 2651; WAN024GDV_at; Start 135; Stop 159
ccgtcgatttaaaatgttagcttgg

SEQ ID NO: 241536 - DNA, 25 bp, Artificial
  probe
  misc_feature (1)..(25): SEQ ID NO: 2651; WAN024GDV_at; Start 421; Stop 445
gcttgcctattacgtggtcaagaac

SEQ ID NO: 241537 - DNA, 25 bp, Artificial
  probe
  misc_feature (1)..(25): SEQ ID NO: 2651; WAN024GDV_at; Start 97; Stop 121
tcggtagtcgcattttgtattctct

SEQ ID NO: 241538 - DNA, 25 bp, Artificial
  probe
  misc_feature (1)..(25): SEQ ID NO: 2651; WAN024GDV_at; Start 500; Stop 524
ggcgccatctttacctgagagctct

SEQ ID NO: 241539 - DNA, 25 bp, Artificial
  probe
  misc_feature (1)..(25): SEQ ID NO: 2651; WAN024GDV_at; Start 400; Stop 424
gaaatcaagtccctcaaagaagctt

SEQ ID NO: 241540 - DNA, 25 bp, Artificial
  probe
  misc_feature (1)..(25): SEQ ID NO: 2651; WAN024GDV_at; Start 551; Stop 575
cacagttgaagaatagctatcggac

SEQ ID NO: 241541 - DNA, 25 bp, Artificial
  probe
  misc_feature (1)..(25): SEQ ID NO: 2651; WAN024GDV_at; Start 214; Stop 238
cacggagatgcttcacaggcagtca

SEQ ID NO: 241542 - DNA, 25 bp, Artificial
  probe
  misc_feature (1)..(25): SEQ ID NO: 2651; WAN024GDV_at; Start 196; Stop 220
tactgggcagttcagttacacggag

SEQ ID NO: 241543 - DNA, 25 bp, Artificial
  probe
  misc_feature (1)..(25): SEQ ID NO: 2651; WAN024GDV_at; Start 334; Stop 358
gggctatcacgctcttggtcctatg

SEQ ID NO: 241544 - DNA, 25 bp, Artificial
  probe
  misc_feature (1)..(25): SEQ ID NO: 2651; WAN024GDV_at; Start 11; Stop 35
tagcaacccagacaccgattatcag

SEQ ID NO: 241545 - DNA, 25 bp, Artificial
  probe
  misc_feature (1)..(25): SEQ ID NO: 2651; WAN024GDV_at; Start 167; Stop 191
tacttgccattttaccatcttttgc

SEQ ID NO: 241546 - DNA, 25 bp, Artificial
  probe
  misc_feature (1)..(25): SEQ ID NO: 2651; WAN024GDV_at; Start 42; Stop 66
cttgctgattttatccttggaaaca

SEQ ID NO: 241547 - DNA, 25 bp, Artificial
  probe
  misc_feature (1)..(25): SEQ ID NO: 2651; WAN024GDV_at; Start 25; Stop 49
ccgattatcagtctcttcttgctga

SEQ ID NO: 241548 - DNA, 25 bp, Artificial
  probe
  misc_feature (1)..(25): SEQ ID NO: 2651; WAN024GDV_at; Start 150; Stop 174
gttagcttggatgatcatacttgcc

SEQ ID NO: 241549 - DNA, 25 bp, Artificial
  probe
  misc_feature (1)..(25): SEQ ID NO: 2651; WAN024GDV_at; Start 311; Stop 335
ttctcttgtacttggctcaaaaggg

SEQ ID NO: 241550 - DNA, 25 bp, Artificial
  probe
  misc_feature (1)..(25): SEQ ID NO: 2651; WAN024GDV_at; Start 2; Stop 26
tggtcaaagtagcaacccagacacc

SEQ ID NO: 241551 - DNA, 25 bp, Artificial
  probe
  misc_feature (1)..(25): SEQ ID NO: 2651; WAN024GDV_at; Start 256; Stop 280
tttgtgacagtttgtatcggccttg

SEQ ID NO: 241552 - DNA, 25 bp, Artificial
  probe
  misc_feature (1)..(25): SEQ ID NO: 2651; WAN024GDV_at; Start 618; Stop 642
ctttttattgcttcaaaccagtcta

SEQ ID NO: 241553 - DNA, 25 bp, Artificial
  probe
  misc_feature (1)..(25): SEQ ID NO: 2651; WAN024GDV_at; Start 495; Stop 519
taggtggcgccatctttacctgaga

SEQ ID NO: 241554 - DNA, 25 bp, Artificial
  probe
  misc_feature (1)..(25): SEQ ID NO: 2651; WAN024GDV_at; Start 207; Stop 231
tcagttacacggagatgcttcacag

SEQ ID NO: 241555 - DNA, 25 bp, Artificial
  probe
  misc_feature (1)..(25): SEQ ID NO: 2651; WAN024GDV_at; Start 181; Stop 205
ccatcttttgccaactactgggcag

SEQ ID NO: 241556 - DNA, 25 bp, Artificial
  probe
  misc_feature (1)..(25): SEQ ID NO: 2651; WAN024GDV_at; Start 535; Stop 559
ggatatgacgaacatgcacagttga

SEQ ID NO: 241557 - DNA, 25 bp, Artificial
  probe
  misc_feature (1)..(25): SEQ ID NO: 2651; WAN024GDV_at; Start 346; Stop 370
tcttggtcctatgccttgattgtgg

SEQ ID NO: 241558 - DNA, 25 bp, Artificial
  probe
  misc_feature (1)..(25): SEQ ID NO: 2651; WAN024GDV_at; Start 302; Stop 326
taaaagagcttctcttgtacttggc

SEQ ID NO: 241559 - DNA, 25 bp, Artificial
  probe
  misc_feature (1)..(25): SEQ ID NO: 2352; WAN024GDW_at; Start 25; Stop 49
cttgcaacgacattgctggacaacc

SEQ ID NO: 241560 - DNA, 25 bp, Artificial
  probe
  misc_feature (1)..(25): SEQ ID NO: 2352; WAN024GDW_at; Start 27; Stop 51
tgcaacgacattgctggacaacctc

SEQ ID NO: 241561 - DNA, 25 bp, Artificial
  probe
  misc_feature (1)..(25): SEQ ID NO: 2352; WAN024GDW_at; Start 5; Stop 29
atgagacggtgcaagatgtccttgc

SEQ ID NO: 241562 - DNA, 25 bp, Artificial
  probe
  misc_feature (1)..(25): SEQ ID NO: 2352; WAN024GDW_at; Start 66; Stop 90
caatttcctgaaggtgatagccgat

SEQ ID NO: 241563 - DNA, 25 bp, Artificial
  probe
  misc_feature (1)..(25): SEQ ID NO: 2352; WAN024GDW_at; Start 209; Stop 233
tcgctcccatctatcaggacttgac

SEQ ID NO: 241564 - DNA, 25 bp, Artificial
  probe
  misc_feature (1)..(25): SEQ ID NO: 2352; WAN024GDW_at; Start 1; Stop 25
atggatgagacggtgcaagatgtcc

SEQ ID NO: 241565 - DNA, 25 bp, Artificial
  probe
  misc_feature (1)..(25): SEQ ID NO: 2352; WAN024GDW_at; Start 38; Stop 62
tgctggacaacctctgctattttag

SEQ ID NO: 241566 - DNA, 25 bp, Artificial
  probe
  misc_feature (1)..(25): SEQ ID NO: 2352; WAN024GDW_at; Start 3; Stop 27
ggatgagacggtgcaagatgtcctt

SEQ ID NO: 241567 - DNA, 25 bp, Artificial
  probe
  misc_feature (1)..(25): SEQ ID NO: 2352; WAN024GDW_at; Start 19; Stop 43
gatgtccttgcaacgacattgctgg

SEQ ID NO: 241568 - DNA, 25 bp, Artificial
  probe
  misc_feature (1)..(25): SEQ ID NO: 2352; WAN024GDW_at; Start 21; Stop 45
tgtccttgcaacgacattgctggac

SEQ ID NO: 241569 - DNA, 25 bp, Artificial
  probe
  misc_feature (1)..(25): SEQ ID NO: 2352; WAN024GDW_at; Start 41; Stop 65
tggacaacctctgctattttagaat

SEQ ID NO: 241570 - DNA, 25 bp, Artificial
  probe
  misc_feature (1)..(25): SEQ ID NO: 2352; WAN024GDW_at; Start 55; Stop 79
tattttagaatcaatttcctgaagg

SEQ ID NO: 241571 - DNA, 25 bp, Artificial
  probe
  misc_feature (1)..(25): SEQ ID NO: 2352; WAN024GDW_at; Start 190; Stop 214
gatagaaagctgactgacctcgctc

SEQ ID NO: 241572 - DNA, 25 bp, Artificial
  probe
  misc_feature (1)..(25): SEQ ID NO: 2352; WAN024GDW_at; Start 67; Stop 91
aatttcctgaaggtgatagccgata

SEQ ID NO: 241573 - DNA, 25 bp, Artificial
  probe
  misc_feature (1)..(25): SEQ ID NO: 2352; WAN024GDW_at; Start 62; Stop 86
gaatcaatttcctgaaggtgatagc

SEQ ID NO: 241574 - DNA, 25 bp, Artificial
  probe
  misc_feature (1)..(25): SEQ ID NO: 2352; WAN024GDW_at; Start 65; Stop 89
tcaatttcctgaaggtgatagccga

SEQ ID NO: 241575 - DNA, 25 bp, Artificial
  probe
  misc_feature (1)..(25): SEQ ID NO: 2352; WAN024GDW_at; Start 194; Stop 218
gaaagctgactgacctcgctcccat

SEQ ID NO: 241576 - DNA, 25 bp, Artificial
  probe
  misc_feature (1)..(25): SEQ ID NO: 2352; WAN024GDW_at; Start 7; Stop 31
gagacggtgcaagatgtccttgcaa

SEQ ID NO: 241577 - DNA, 25 bp, Artificial
  probe
  misc_feature (1)..(25): SEQ ID NO: 2352; WAN024GDW_at; Start 16; Stop 40
caagatgtccttgcaacgacattgc

SEQ ID NO: 241578 - DNA, 25 bp, Artificial
  probe
  misc_feature (1)..(25): SEQ ID NO: 2352; WAN024GDW_at; Start 43; Stop 67
gacaacctctgctattttagaatca

SEQ ID NO: 241579 - DNA, 25 bp, Artificial
  probe
  misc_feature (1)..(25): SEQ ID NO: 2352; WAN024GDW_at; Start 23; Stop 47
tccttgcaacgacattgctggacaa

SEQ ID NO: 241580 - DNA, 25 bp, Artificial
  probe
  misc_feature (1)..(25): SEQ ID NO: 2352; WAN024GDW_at; Start 69; Stop 93
tttcctgaaggtgatagccgatatt

SEQ ID NO: 241581 - DNA, 25 bp, Artificial
  probe
  misc_feature (1)..(25): SEQ ID NO: 2352; WAN024GDW_at; Start 45; Stop 69
caacctctgctattttagaatcaat

SEQ ID NO: 241582 - DNA, 25 bp, Artificial
  probe
  misc_feature (1)..(25): SEQ ID NO: 2352; WAN024GDW_at; Start 39; Stop 63
gctggacaacctctgctattttaga

SEQ ID NO: 241583 - DNA, 25 bp, Artificial
  probe
  misc_feature (1)..(25): SEQ ID NO: 2352; WAN024GDW_at; Start 33; Stop 57
gacattgctggacaacctctgctat

SEQ ID NO: 241584 - DNA, 25 bp, Artificial
  probe
  misc_feature (1)..(25): SEQ ID NO: 2352; WAN024GDW_at; Start 30; Stop 54
aacgacattgctggacaacctctgc

SEQ ID NO: 241585 - DNA, 25 bp, Artificial
  probe
  misc_feature (1)..(25): SEQ ID NO: 2352; WAN024GDW_at; Start 35; Stop 59
cattgctggacaacctctgctattt

SEQ ID NO: 241586 - DNA, 25 bp, Artificial
  probe
  misc_feature (1)..(25): SEQ ID NO: 2352; WAN024GDW_at; Start 191; Stop 215
atagaaagctgactgacctcgctcc

SEQ ID NO: 241587 - DNA, 25 bp, Artificial
  probe
  misc_feature (1)..(25): SEQ ID NO: 2352; WAN024GDW_at; Start 58; Stop 82
tttagaatcaatttcctgaaggtga

SEQ ID NO: 241588 - DNA, 25 bp, Artificial
  probe
  misc_feature (1)..(25): SEQ ID NO: 2352; WAN024GDW_at; Start 12; Stop 36
ggtgcaagatgtccttgcaacgaca

SEQ ID NO: 241589 - DNA, 25 bp, Artificial
  probe
  misc_feature (1)..(25): SEQ ID NO: 2352; WAN024GDW_at; Start 28; Stop 52
gcaacgacattgctggacaacctct

SEQ ID NO: 241590 - DNA, 25 bp, Artificial
  probe
  misc_feature (1)..(25): SEQ ID NO: 2352; WAN024GDW_at; Start 192; Stop 216
tagaaagctgactgacctcgctccc

SEQ ID NO: 241591 - DNA, 25 bp, Artificial
  probe
  misc_feature (1)..(25): SEQ ID NO: 2352; WAN024GDW_at; Start 9; Stop 33
gacggtgcaagatgtccttgcaacg

SEQ ID NO: 241592 - DNA, 25 bp, Artificial
  probe
  misc_feature (1)..(25): SEQ ID NO: 2352; WAN024GDW_at; Start 32; Stop 56
cgacattgctggacaacctctgcta

SEQ ID NO: 241593 - DNA, 25 bp, Artificial
  probe
  misc_feature (1)..(25): SEQ ID NO: 2607; WAN024GDX_at; Start 943; Stop 967
gagaagcagtttatccgagtcagtc

SEQ ID NO: 241594 - DNA, 25 bp, Artificial
  probe
  misc_feature (1)..(25): SEQ ID NO: 2607; WAN024GDX_at; Start 1084; Stop 1108
ggtggtcagcaaaaaattcttcagc

SEQ ID NO: 241595 - DNA, 25 bp, Artificial
  probe
  misc_feature (1)..(25): SEQ ID NO: 2607; WAN024GDX_at; Start 1308; Stop 1332
tcttcggcatgtgaaagaagtgacc

SEQ ID NO: 241596 - DNA, 25 bp, Artificial
  probe
  misc_feature (1)..(25): SEQ ID NO: 2607; WAN024GDX_at; Start 1349; Stop 1373
catctcagagtagcaatacccaagg

SEQ ID NO: 241597 - DNA, 25 bp, Artificial
  probe
  misc_feature (1)..(25): SEQ ID NO: 2607; WAN024GDX_at; Start 1051; Stop 1075
caggcagtcgataagagtccctatc

SEQ ID NO: 241598 - DNA, 25 bp, Artificial
  probe
  misc_feature (1)..(25): SEQ ID NO: 2607; WAN024GDX_at; Start 1293; Stop 1317
gatgactagtcagggtcttcggcat

SEQ ID NO: 241599 - DNA, 25 bp, Artificial
  probe
  misc_feature (1)..(25): SEQ ID NO: 2607; WAN024GDX_at; Start 1176; Stop 1200
tagagcctgccattatttttgcaag

SEQ ID NO: 241600 - DNA, 25 bp, Artificial
  probe
  misc_feature (1)..(25): SEQ ID NO: 2607; WAN024GDX_at; Start 971; Stop 995
gagaggagcttcaattagatggacc

SEQ ID NO: 241601 - DNA, 25 bp, Artificial
  probe
  misc_feature (1)..(25): SEQ ID NO: 2607; WAN024GDX_at; Start 1320; Stop 1344
gaaagaagtgaccattaccaaacca

SEQ ID NO: 241602 - DNA, 25 bp, Artificial
  probe
  misc_feature (1)..(25): SEQ ID NO: 2607; WAN024GDX_at; Start 986; Stop 1010
tagatggacctgattctgaaagaaa

SEQ ID NO: 241603 - DNA, 25 bp, Artificial
  probe
  misc_feature (1)..(25): SEQ ID NO: 2607; WAN024GDX_at; Start 434; Stop 458
tcctctttgccatgaatcctagggt

SEQ ID NO: 241604 - DNA, 25 bp, Artificial
  probe
  misc_feature (1)..(25): SEQ ID NO: 2607; WAN024GDX_at; Start 180; Stop 204
gagcgaggtcagtcagctttctatc

SEQ ID NO: 241605 - DNA, 25 bp, Artificial
  probe
  misc_feature (1)..(25): SEQ ID NO: 2607; WAN024GDX_at; Start 1011; Stop 1035
tcagcggatttttcaagctttacga

SEQ ID NO: 241606 - DNA, 25 bp, Artificial
  probe
  misc_feature (1)..(25): SEQ ID NO: 2607; WAN024GDX_at; Start 1252; Stop 1276
cgtttagaccctttgatttctgtgg

SEQ ID NO: 241607 - DNA, 25 bp, Artificial
  probe
  misc_feature (1)..(25): SEQ ID NO: 2607; WAN024GDX_at; Start 460; Stop 484
tatctcttggatgagcccttcgctt

SEQ ID NO: 241608 - DNA, 25 bp, Artificial
  probe
  misc_feature (1)..(25): SEQ ID NO: 2607; WAN024GDX_at; Start 338; Stop 362
tagcagaggttgtccagcaatgtcg

SEQ ID NO: 241609 - DNA, 25 bp, Artificial
  probe
  misc_feature (1)..(25): SEQ ID NO: 2607; WAN024GDX_at; Start 645; Stop 669
aatcccttcctatgagatgacacag

SEQ ID NO: 241610 - DNA, 25 bp, Artificial
  probe
  misc_feature (1)..(25): SEQ ID NO: 2607; WAN024GDX_at; Start 162; Stop 186
tcaagtcctgatagatgggagcgag

SEQ ID NO: 241611 - DNA, 25 bp, Artificial
  probe
  misc_feature (1)..(25): SEQ ID NO: 2607; WAN024GDX_at; Start 512; Stop 536
tattggagattctaaaagagttggc

SEQ ID NO: 241612 - DNA, 25 bp, Artificial
  probe
  misc_feature (1)..(25): SEQ ID NO: 2607; WAN024GDX_at; Start 788; Stop 812
cctgtatcctgggtgacaatggtgt

SEQ ID NO: 241613 - DNA, 25 bp, Artificial
  probe
  misc_feature (1)..(25): SEQ ID NO: 2607; WAN024GDX_at; Start 527; Stop 551
aagagttggctcttgatgggaagac

SEQ ID NO: 241614 - DNA, 25 bp, Artificial
  probe
  misc_feature (1)..(25): SEQ ID NO: 2607; WAN024GDX_at; Start 660; Stop 684
gatgacacaggttgcttcaaaggaa

SEQ ID NO: 241615 - DNA, 25 bp, Artificial
  probe
  misc_feature (1)..(25): SEQ ID NO: 2607; WAN024GDX_at; Start 1229; Stop 1253
gaagttttctgctcattagtcatcg

SEQ ID NO: 241616 - DNA, 25 bp, Artificial
  probe
  misc_feature (1)..(25): SEQ ID NO: 2607; WAN024GDX_at; Start 558; Stop 582
tttgtgcgaccatgatttatctgac

SEQ ID NO: 241617 - DNA, 25 bp, Artificial
  probe
  misc_feature (1)..(25): SEQ ID NO: 2607; WAN024GDX_at; Start 476; Stop 500
ccttcgcttccattgaccgcaagag

SEQ ID NO: 241618 - DNA, 25 bp, Artificial
  probe
  misc_feature (1)..(25): SEQ ID NO: 2607; WAN024GDX_at; Start 956; Stop 980
tccgagtcagtctgcgagaggagct

SEQ ID NO: 241619 - DNA, 25 bp, Artificial
  probe
  misc_feature (1)..(25): SEQ ID NO: 2607; WAN024GDX_at; Start 10; Stop 34
gaactacgagcgattcagtccccaa

SEQ ID NO: 241620 - DNA, 25 bp, Artificial
  probe
  misc_feature (1)..(25): SEQ ID NO: 2607; WAN024GDX_at; Start 51; Stop 75
tgattttacttttcatgcgcaagcc

SEQ ID NO: 241621 - DNA, 25 bp, Artificial
  probe
  misc_feature (1)..(25): SEQ ID NO: 2607; WAN024GDX_at; Start 1118; Stop 1142
tcttgaccagtaaggcttccgtgat

SEQ ID NO: 241622 - DNA, 25 bp, Artificial
  probe
  misc_feature (1)..(25): SEQ ID NO: 2607; WAN024GDX_at; Start 1140; Stop 1164
gatcttgctagatgaaccttttgca

SEQ ID NO: 241623 - DNA, 25 bp, Artificial
  probe
  misc_feature (1)..(25): SEQ ID NO: 2607; WAN024GDX_at; Start 1069; Stop 1093
ccctatcaattaagtggtggtcagc

SEQ ID NO: 241624 - DNA, 25 bp, Artificial
  probe
  misc_feature (1)..(25): SEQ ID NO: 2607; WAN024GDX_at; Start 1158; Stop 1182
ttttgcaggtttggatgatagagcc

SEQ ID NO: 241625 - DNA, 25 bp, Artificial
  probe
  misc_feature (1)..(25): SEQ ID NO: 2607; WAN024GDX_at; Start 1036; Stop 1060
tattttgatttggagcaggcagtcg

SEQ ID NO: 241626 - DNA, 25 bp, Artificial
  probe
  misc_feature (1)..(25): SEQ ID NO: 2607; WAN024GDX_at; Start 301; Stop 325
aatatcggctatcaccttcaggaaa

SEQ ID NO: 241627 - DNA, 25 bp, Artificial
  probe
  misc_feature (1)..(25): SEQ ID NO: 6863; WAN024GDY_at; Start 135; Stop 159
aaagatagacaagaaagcaagcaag

SEQ ID NO: 241628 - DNA, 25 bp, Artificial
  probe
  misc_feature (1)..(25): SEQ ID NO: 6863; WAN024GDY_at; Start 231; Stop 255
agaccgacctaaatactttgtatag

SEQ ID NO: 241629 - DNA, 25 bp, Artificial
  probe
  misc_feature (1)..(25): SEQ ID NO: 6863; WAN024GDY_at; Start 53; Stop 77
caaaggcctgcaaaccaagaggtgt

SEQ ID NO: 241630 - DNA, 25 bp, Artificial
  probe
  misc_feature (1)..(25): SEQ ID NO: 6863; WAN024GDY_at; Start 102; Stop 126
cacatatcctgaaccaacgaaaacc

SEQ ID NO: 241631 - DNA, 25 bp, Artificial
  probe
  misc_feature (1)..(25): SEQ ID NO: 6863; WAN024GDY_at; Start 67; Stop 91
ccaagaggtgttaagagtagactga

SEQ ID NO: 241632 - DNA, 25 bp, Artificial
  probe
  misc_feature (1)..(25): SEQ ID NO: 6863; WAN024GDY_at; Start 50; Stop 74
tggcaaaggcctgcaaaccaagagg

SEQ ID NO: 241633 - DNA, 25 bp, Artificial
  probe
  misc_feature (1)..(25): SEQ ID NO: 6863; WAN024GDY_at; Start 45; Stop 69
ttcattggcaaaggcctgcaaacca

SEQ ID NO: 241634 - DNA, 25 bp, Artificial
  probe
  misc_feature (1)..(25): SEQ ID NO: 6863; WAN024GDY_at; Start 10; Stop 34
atgggcgcagccatacaccagagac

SEQ ID NO: 241635 - DNA, 25 bp, Artificial
  probe
  misc_feature (1)..(25): SEQ ID NO: 6863; WAN024GDY_at; Start 41; Stop 65
ggatttcattggcaaaggcctgcaa

SEQ ID NO: 241636 - DNA, 25 bp, Artificial
  probe
  misc_feature (1)..(25): SEQ ID NO: 6863; WAN024GDY_at; Start 73; Stop 97
ggtgttaagagtagactgaaaatat

SEQ ID NO: 241637 - DNA, 25 bp, Artificial
  probe
  misc_feature (1)..(25): SEQ ID NO: 6863; WAN024GDY_at; Start 25; Stop 49
caccagagaccgaagaggatttcat

SEQ ID NO: 241638 - DNA, 25 bp, Artificial
  probe
  misc_feature (1)..(25): SEQ ID NO: 6863; WAN024GDY_at; Start 206; Stop 230
ttaaagaaaagtgggacactcaaga

SEQ ID NO: 241639 - DNA, 25 bp, Artificial
  probe
  misc_feature (1)..(25): SEQ ID NO: 6863; WAN024GDY_at; Start 55; Stop 79
aaggcctgcaaaccaagaggtgtta

SEQ ID NO: 241640 - DNA, 25 bp, Artificial
  probe
  misc_feature (1)..(25): SEQ ID NO: 6863; WAN024GDY_at; Start 213; Stop 237
aaagtgggacactcaagaagaccga

SEQ ID NO: 241641 - DNA, 25 bp, Artificial
  probe
  misc_feature (1)..(25): SEQ ID NO: 6863; WAN024GDY_at; Start 156; Stop 180
caagataacatcttttaactgccat

SEQ ID NO: 241642 - DNA, 25 bp, Artificial
  probe
  misc_feature (1)..(25): SEQ ID NO: 6863; WAN024GDY_at; Start 226; Stop 250
caagaagaccgacctaaatactttg

SEQ ID NO: 241643 - DNA, 25 bp, Artificial
  probe
  misc_feature (1)..(25): SEQ ID NO: 6863; WAN024GDY_at; Start 220; Stop 244
gacactcaagaagaccgacctaaat

SEQ ID NO: 241644 - DNA, 25 bp, Artificial
  probe
  misc_feature (1)..(25): SEQ ID NO: 6863; WAN024GDY_at; Start 30; Stop 54
gagaccgaagaggatttcattggca

SEQ ID NO: 241645 - DNA, 25 bp, Artificial
  probe
  misc_feature (1)..(25): SEQ ID NO: 6863; WAN024GDY_at; Start 127; Stop 151
ccaccaaaaaagatagacaagaaag

SEQ ID NO: 241646 - DNA, 25 bp, Artificial
  probe
  misc_feature (1)..(25): SEQ ID NO: 6863; WAN024GDY_at; Start 27; Stop 51
ccagagaccgaagaggatttcattg

SEQ ID NO: 241647 - DNA, 25 bp, Artificial
  probe
  misc_feature (1)..(25): SEQ ID NO: 6863; WAN024GDY_at; Start 58; Stop 82
gcctgcaaaccaagaggtgttaaga

SEQ ID NO: 241648 - DNA, 25 bp, Artificial
  probe
  misc_feature (1)..(25): SEQ ID NO: 6863; WAN024GDY_at; Start 218; Stop 242
gggacactcaagaagaccgacctaa

SEQ ID NO: 241649 - DNA, 25 bp, Artificial
  probe
  misc_feature (1)..(25): SEQ ID NO: 6863; WAN024GDY_at; Start 36; Stop 60
gaagaggatttcattggcaaaggcc

SEQ ID NO: 241650 - DNA, 25 bp, Artificial
  probe
  misc_feature (1)..(25): SEQ ID NO: 6863; WAN024GDY_at; Start 211; Stop 235
gaaaagtgggacactcaagaagacc

SEQ ID NO: 241651 - DNA, 25 bp, Artificial
  probe
  misc_feature (1)..(25): SEQ ID NO: 6863; WAN024GDY_at; Start 6; Stop 30
agcaatgggcgcagccatacaccag

SEQ ID NO: 241652 - DNA, 25 bp, Artificial
  probe
  misc_feature (1)..(25): SEQ ID NO: 6863; WAN024GDY_at; Start 19; Stop 43
gccatacaccagagaccgaagagga

SEQ ID NO: 241653 - DNA, 25 bp, Artificial
  probe
  misc_feature (1)..(25): SEQ ID NO: 6863; WAN024GDY_at; Start 171; Stop 195
taactgccattttttcaacataaaa

SEQ ID NO: 241654 - DNA, 25 bp, Artificial
  probe
  misc_feature (1)..(25): SEQ ID NO: 6863; WAN024GDY_at; Start 216; Stop 240
gtgggacactcaagaagaccgacct

SEQ ID NO: 241655 - DNA, 25 bp, Artificial
  probe
  misc_feature (1)..(25): SEQ ID NO: 6863; WAN024GDY_at; Start 144; Stop 168
caagaaagcaagcaagataacatct

SEQ ID NO: 241656 - DNA, 25 bp, Artificial
  probe
  misc_feature (1)..(25): SEQ ID NO: 6863; WAN024GDY_at; Start 98; Stop 122
tatacacatatcctgaaccaacgaa

SEQ ID NO: 241657 - DNA, 25 bp, Artificial
  probe
  misc_feature (1)..(25): SEQ ID NO: 6863; WAN024GDY_at; Start 140; Stop 164
tagacaagaaagcaagcaagataac

SEQ ID NO: 241658 - DNA, 25 bp, Artificial
  probe
  misc_feature (1)..(25): SEQ ID NO: 6863; WAN024GDY_at; Start 86; Stop 110
gactgaaaatattatacacatatcc

SEQ ID NO: 241659 - DNA, 25 bp, Artificial
  probe
  misc_feature (1)..(25): SEQ ID NO: 6863; WAN024GDY_at; Start 61; Stop 85
tgcaaaccaagaggtgttaagagta

SEQ ID NO: 241660 - DNA, 25 bp, Artificial
  probe
  misc_feature (1)..(25): SEQ ID NO: 6863; WAN024GDY_at; Start 21; Stop 45
catacaccagagaccgaagaggatt

SEQ ID NO: 241661 - DNA, 25 bp, Artificial
  probe
  misc_feature (1)..(25): SEQ ID NO: 4261; WAN024GDZ_at; Start 73; Stop 97
gctttcttgtctatcttttttggtg

SEQ ID NO: 241662 - DNA, 25 bp, Artificial
  probe
  misc_feature (1)..(25): SEQ ID NO: 4261; WAN024GDZ_at; Start 104; Stop 128
tcgttggttcaggatatgtgtataa

SEQ ID NO: 241663 - DNA, 25 bp, Artificial
  probe
  misc_feature (1)..(25): SEQ ID NO: 4261; WAN024GDZ_at; Start 231; Stop 255
tccgagagtcggaagtgcaacgatt

SEQ ID NO: 241664 - DNA, 25 bp, Artificial
  probe
  misc_feature (1)..(25): SEQ ID NO: 4261; WAN024GDZ_at; Start 31; Stop 55
tttatgttgaaaaaatggcagttaa

SEQ ID NO: 241665 - DNA, 25 bp, Artificial
  probe
  misc_feature (1)..(25): SEQ ID NO: 4261; WAN024GDZ_at; Start 146; Stop 170
taacacctcttggtttgcaggcctt

SEQ ID NO: 241666 - DNA, 25 bp, Artificial
  probe
  misc_feature (1)..(25): SEQ ID NO: 4261; WAN024GDZ_at; Start 219; Stop 243
tgccatctttgttccgagagtcgga

SEQ ID NO: 241667 - DNA, 25 bp, Artificial
  probe
  misc_feature (1)..(25): SEQ ID NO: 4261; WAN024GDZ_at; Start 277; Stop 301
gctgaagtcctttatggtagccaat

SEQ ID NO: 241668 - DNA, 25 bp, Artificial
  probe
  misc_feature (1)..(25): SEQ ID NO: 4261; WAN024GDZ_at; Start 58; Stop 82
gatgttatcttgcttgctttcttgt

SEQ ID NO: 241669 - DNA, 25 bp, Artificial
  probe
  misc_feature (1)..(25): SEQ ID NO: 4261; WAN024GDZ_at; Start 303; Stop 327
tggtctaggagctcttttgtctggc

SEQ ID NO: 241670 - DNA, 25 bp, Artificial
  probe
  misc_feature (1)..(25): SEQ ID NO: 4261; WAN024GDZ_at; Start 174; Stop 198
caatgaaatcctcttcggtctctgg

SEQ ID NO: 241671 - DNA, 25 bp, Artificial
  probe
  misc_feature (1)..(25): SEQ ID NO: 4261; WAN024GDZ_at; Start 386; Stop 410
gttggctctctctaactgctaatag

SEQ ID NO: 241672 - DNA, 25 bp, Artificial
  probe
  misc_feature (1)..(25): SEQ ID NO: 4261; WAN024GDZ_at; Start 568; Stop 592
cagtttgcaactggaggaaaagcat

SEQ ID NO: 241673 - DNA, 25 bp, Artificial
  probe
  misc_feature (1)..(25): SEQ ID NO: 4261; WAN024GDZ_at; Start 185; Stop 209
tcttcggtctctggtgtatggctgc

SEQ ID NO: 241674 - DNA, 25 bp, Artificial
  probe
  misc_feature (1)..(25): SEQ ID NO: 4261; WAN024GDZ_at; Start 248; Stop 272
caacgattggagaagtgctagctgc

SEQ ID NO: 241675 - DNA, 25 bp, Artificial
  probe
  misc_feature (1)..(25): SEQ ID NO: 4261; WAN024GDZ_at; Start 420; Stop 444
tacgcttgttagctttgtctatgaa

SEQ ID NO: 241676 - DNA, 25 bp, Artificial
  probe
  misc_feature (1)..(25): SEQ ID NO: 4261; WAN024GDZ_at; Start 517; Stop 541
gtttatttcttctgtaccatcttgg

SEQ ID NO: 241677 - DNA, 25 bp, Artificial
  probe
  misc_feature (1)..(25): SEQ ID NO: 4261; WAN024GDZ_at; Start 408; Stop 432
tagtattgggattacgcttgttagc

SEQ ID NO: 241678 - DNA, 25 bp, Artificial
  probe
  misc_feature (1)..(25): SEQ ID NO: 4261; WAN024GDZ_at; Start 560; Stop 584
tctatcatcagtttgcaactggagg

SEQ ID NO: 241679 - DNA, 25 bp, Artificial
  probe
  misc_feature (1)..(25): SEQ ID NO: 4261; WAN024GDZ_at; Start 400; Stop 424
actgctaatagtattgggattacgc

SEQ ID NO: 241680 - DNA, 25 bp, Artificial
  probe
  misc_feature (1)..(25): SEQ ID NO: 4261; WAN024GDZ_at; Start 190; Stop 214
ggtctctggtgtatggctgcgccca

SEQ ID NO: 241681 - DNA, 25 bp, Artificial
  probe
  misc_feature (1)..(25): SEQ ID NO: 4261; WAN024GDZ_at; Start 533; Stop 557
ccatcttggttcgtgccattgtcaa

SEQ ID NO: 241682 - DNA, 25 bp, Artificial
  probe
  misc_feature (1)..(25): SEQ ID NO: 4261; WAN024GDZ_at; Start 375; Stop 399
tcgctatgaaagttggctctctcta

SEQ ID NO: 241683 - DNA, 25 bp, Artificial
  probe
  misc_feature (1)..(25): SEQ ID NO: 4261; WAN024GDZ_at; Start 212; Stop 236
ccattgctgccatctttgttccgag

SEQ ID NO: 241684 - DNA, 25 bp, Artificial
  probe
  misc_feature (1)..(25): SEQ ID NO: 4261; WAN024GDZ_at; Start 259; Stop 283
gaagtgctagctgcgcttgctgaag

SEQ ID NO: 241685 - DNA, 25 bp, Artificial
  probe
  misc_feature (1)..(25): SEQ ID NO: 4261; WAN024GDZ_at; Start 294; Stop 318
tagccaatttggtctaggagctctt

SEQ ID NO: 241686 - DNA, 25 bp, Artificial
  probe
  misc_feature (1)..(25): SEQ ID NO: 4261; WAN024GDZ_at; Start 441; Stop 465
tgaatacattaagttaggttactac

SEQ ID NO: 241687 - DNA, 25 bp, Artificial
  probe
  misc_feature (1)..(25): SEQ ID NO: 4261; WAN024GDZ_at; Start 160; Stop 184
ttgcaggcctttgccaatgaaatcc

SEQ ID NO: 241688 - DNA, 25 bp, Artificial
  probe
  misc_feature (1)..(25): SEQ ID NO: 4261; WAN024GDZ_at; Start 134; Stop 158
tcagtctactcttaacacctcttgg

SEQ ID NO: 241689 - DNA, 25 bp, Artificial
  probe
  misc_feature (1)..(25): SEQ ID NO: 4261; WAN024GDZ_at; Start 43; Stop 67
aaatggcagttaaaagatgttatct

SEQ ID NO: 241690 - DNA, 25 bp, Artificial
  probe
  misc_feature (1)..(25): SEQ ID NO: 4261; WAN024GDZ_at; Start 354; Stop 378
tggttttatcgtaactaagaatcgc

SEQ ID NO: 241691 - DNA, 25 bp, Artificial
  probe
  misc_feature (1)..(25): SEQ ID NO: 4261; WAN024GDZ_at; Start 546; Stop 570
tgccattgtcaaactctatcatcag

SEQ ID NO: 241692 - DNA, 25 bp, Artificial
  probe
  misc_feature (1)..(25): SEQ ID NO: 4261; WAN024GDZ_at; Start 196; Stop 220
tggtgtatggctgcgcccattgctg

SEQ ID NO: 241693 - DNA, 25 bp, Artificial
  probe
  misc_feature (1)..(25): SEQ ID NO: 4261; WAN024GDZ_at; Start 369; Stop 393
taagaatcgctatgaaagttggctc

SEQ ID NO: 241694 - DNA, 25 bp, Artificial
  probe
  misc_feature (1)..(25): SEQ ID NO: 4261; WAN024GDZ_at; Start 264; Stop 288
gctagctgcgcttgctgaagtcctt

SEQ ID NO: 241695 - DNA, 25 bp, Artificial
  probe
  misc_feature (1)..(25): SEQ ID NO: 5034; WAN024GE2_at; Start 231; Stop 255
catcgcgtggagacaagcgttgttt

SEQ ID NO: 241696 - DNA, 25 bp, Artificial
  probe
  misc_feature (1)..(25): SEQ ID NO: 5034; WAN024GE2_at; Start 130; Stop 154
gataccagaagctcctgcagcaagc

SEQ ID NO: 241697 - DNA, 25 bp, Artificial
  probe
  misc_feature (1)..(25): SEQ ID NO: 5034; WAN024GE2_at; Start 227; Stop 251
tctacatcgcgtggagacaagcgtt

SEQ ID NO: 241698 - DNA, 25 bp, Artificial
  probe
  misc_feature (1)..(25): SEQ ID NO: 5034; WAN024GE2_at; Start 145; Stop 169
tgcagcaagcgaacgttcaacgtcc

SEQ ID NO: 241699 - DNA, 25 bp, Artificial
  probe
  misc_feature (1)..(25): SEQ ID NO: 5034; WAN024GE2_at; Start 5; Stop 29
ccacgacgaacaccagagtcaaaga

SEQ ID NO: 241700 - DNA, 25 bp, Artificial
  probe
  misc_feature (1)..(25): SEQ ID NO: 5034; WAN024GE2_at; Start 45; Stop 69
tatcaactgcttctgccacttcttg

SEQ ID NO: 241701 - DNA, 25 bp, Artificial
  probe
  misc_feature (1)..(25): SEQ ID NO: 5034; WAN024GE2_at; Start 82; Stop 106
ggcagctggtccaccgtcgatttga

SEQ ID NO: 241702 - DNA, 25 bp, Artificial
  probe
  misc_feature (1)..(25): SEQ ID NO: 5034; WAN024GE2_at; Start 188; Stop 212
ttgacatacacaggaagaccagagt

SEQ ID NO: 241703 - DNA, 25 bp, Artificial
  probe
  misc_feature (1)..(25): SEQ ID NO: 5034; WAN024GE2_at; Start 1; Stop 25
ttgaccacgacgaacaccagagtca

SEQ ID NO: 241704 - DNA, 25 bp, Artificial
  probe
  misc_feature (1)..(25): SEQ ID NO: 5034; WAN024GE2_at; Start 12; Stop 36
gaacaccagagtcaaagacaatcgg

SEQ ID NO: 241705 - DNA, 25 bp, Artificial
  probe
  misc_feature (1)..(25): SEQ ID NO: 5034; WAN024GE2_at; Start 181; Stop 205
tggtcccttgacatacacaggaaga

SEQ ID NO: 241706 - DNA, 25 bp, Artificial
  probe
  misc_feature (1)..(25): SEQ ID NO: 5034; WAN024GE2_at; Start 194; Stop 218
tacacaggaagaccagagtattcag

SEQ ID NO: 241707 - DNA, 25 bp, Artificial
  probe
  misc_feature (1)..(25): SEQ ID NO: 5034; WAN024GE2_at; Start 35; Stop 59
ggcacacgtctatcaactgcttctg

SEQ ID NO: 241708 - DNA, 25 bp, Artificial
  probe
  misc_feature (1)..(25): SEQ ID NO: 5034; WAN024GE2_at; Start 201; Stop 225
gaagaccagagtattcagcgataaa

SEQ ID NO: 241709 - DNA, 25 bp, Artificial
  probe
  misc_feature (1)..(25): SEQ ID NO: 5034; WAN024GE2_at; Start 28; Stop 52
gacaatcggcacacgtctatcaact

SEQ ID NO: 241710 - DNA, 25 bp, Artificial
  probe
  misc_feature (1)..(25): SEQ ID NO: 5034; WAN024GE2_at; Start 58; Stop 82
tgccacttcttgaagcgagtcaaag

SEQ ID NO: 241711 - DNA, 25 bp, Artificial
  probe
  misc_feature (1)..(25): SEQ ID NO: 5034; WAN024GE2_at; Start 86; Stop 110
gctggtccaccgtcgatttgacgac

SEQ ID NO: 241712 - DNA, 25 bp, Artificial
  probe
  misc_feature (1)..(25): SEQ ID NO: 5034; WAN024GE2_at; Start 20; Stop 44
gagtcaaagacaatcggcacacgtc

SEQ ID NO: 241713 - DNA, 25 bp, Artificial
  probe
  misc_feature (1)..(25): SEQ ID NO: 5034; WAN024GE2_at; Start 220; Stop 244
gataaattctacatcgcgtggagac

SEQ ID NO: 241714 - DNA, 25 bp, Artificial
  probe
  misc_feature (1)..(25): SEQ ID NO: 5034; WAN024GE2_at; Start 74; Stop 98
gagtcaaaggcagctggtccaccgt

SEQ ID NO: 241715 - DNA, 25 bp, Artificial
  probe
  misc_feature (1)..(25): SEQ ID NO: 5034; WAN024GE2_at; Start 206; Stop 230
ccagagtattcagcgataaattcta

SEQ ID NO: 241716 - DNA, 25 bp, Artificial
  probe
  misc_feature (1)..(25): SEQ ID NO: 5034; WAN024GE2_at; Start 113; Stop 137
ccgtggttggttacccagataccag

SEQ ID NO: 241717 - DNA, 25 bp, Artificial
  probe
  misc_feature (1)..(25): SEQ ID NO: 5034; WAN024GE2_at; Start 121; Stop 145
ggttacccagataccagaagctcct

SEQ ID NO: 241718 - DNA, 25 bp, Artificial
  probe
  misc_feature (1)..(25): SEQ ID NO: 5034; WAN024GE2_at; Start 140; Stop 164
gctcctgcagcaagcgaacgttcaa

SEQ ID NO: 241719 - DNA, 25 bp, Artificial
  probe
  misc_feature (1)..(25): SEQ ID NO: 5034; WAN024GE2_at; Start 65; Stop 89
tcttgaagcgagtcaaaggcagctg

SEQ ID NO: 241720 - DNA, 25 bp, Artificial
  probe
  misc_feature (1)..(25): SEQ ID NO: 5034; WAN024GE2_at; Start 137; Stop 161
gaagctcctgcagcaagcgaacgtt

SEQ ID NO: 241721 - DNA, 25 bp, Artificial
  probe
  misc_feature (1)..(25): SEQ ID NO: 5034; WAN024GE2_at; Start 167; Stop 191
tcctcacggcattgtggtcccttga

SEQ ID NO: 241722 - DNA, 25 bp, Artificial
  probe
  misc_feature (1)..(25): SEQ ID NO: 5034; WAN024GE2_at; Start 69; Stop 93
gaagcgagtcaaaggcagctggtcc

SEQ ID NO: 241723 - DNA, 25 bp, Artificial
  probe
  misc_feature (1)..(25): SEQ ID NO: 5034; WAN024GE2_at; Start 171; Stop 195
cacggcattgtggtcccttgacata

SEQ ID NO: 241724 - DNA, 25 bp, Artificial
  probe
  misc_feature (1)..(25): SEQ ID NO: 5034; WAN024GE2_at; Start 98; Stop 122
tcgatttgacgaccaccgtggttgg

SEQ ID NO: 241725 - DNA, 25 bp, Artificial
  probe
  misc_feature (1)..(25): SEQ ID NO: 5034; WAN024GE2_at; Start 155; Stop 179
gaacgttcaacgtcctcacggcatt

SEQ ID NO: 241726 - DNA, 25 bp, Artificial
  probe
  misc_feature (1)..(25): SEQ ID NO: 5034; WAN024GE2_at; Start 237; Stop 261
gtggagacaagcgttgtttagctga

SEQ ID NO: 241727 - DNA, 25 bp, Artificial
  probe
  misc_feature (1)..(25): SEQ ID NO: 5034; WAN024GE2_at; Start 175; Stop 199
gcattgtggtcccttgacatacaca

SEQ ID NO: 241728 - DNA, 25 bp, Artificial
  probe
  misc_feature (1)..(25): SEQ ID NO: 5034; WAN024GE2_at; Start 161; Stop 185
tcaacgtcctcacggcattgtggtc

SEQ ID NO: 241729 - DNA, 25 bp, Artificial
  probe
  misc_feature (1)..(25): SEQ ID NO: 2875; WAN024GE3_at; Start 770; Stop 794
ccaaccacggtggtcgtcaaatcga

SEQ ID NO: 241730 - DNA, 25 bp, Artificial
  probe
  misc_feature (1)..(25): SEQ ID NO: 2875; WAN024GE3_at; Start 783; Stop 807
tcgtcaaatcgacggtggaccagct

SEQ ID NO: 241731 - DNA, 25 bp, Artificial
  probe
  misc_feature (1)..(25): SEQ ID NO: 2875; WAN024GE3_at; Start 435; Stop 459
tgacggtatcaaccgccacatcatg

SEQ ID NO: 241732 - DNA, 25 bp, Artificial
  probe
  misc_feature (1)..(25): SEQ ID NO: 2875; WAN024GE3_at; Start 521; Stop 545
ggaatcgtgaagtggataagcgtaa

SEQ ID NO: 241733 - DNA, 25 bp, Artificial
  probe
  misc_feature (1)..(25): SEQ ID NO: 2875; WAN024GE3_at; Start 823; Stop 847
caagaagtggcagaagcagttgata

SEQ ID NO: 241734 - DNA, 25 bp, Artificial
  probe
  misc_feature (1)..(25): SEQ ID NO: 2875; WAN024GE3_at; Start 631; Stop 655
tcagctaaacaacgcttgtctccac

SEQ ID NO: 241735 - DNA, 25 bp, Artificial
  probe
  misc_feature (1)..(25): SEQ ID NO: 2875; WAN024GE3_at; Start 796; Stop 820
ggtggaccagctgcctttgactcgc

SEQ ID NO: 241736 - DNA, 25 bp, Artificial
  probe
  misc_feature (1)..(25): SEQ ID NO: 2875; WAN024GE3_at; Start 550; Stop 574
tttgtcttcccagttggcatgccga

SEQ ID NO: 241737 - DNA, 25 bp, Artificial
  probe
  misc_feature (1)..(25): SEQ ID NO: 2875; WAN024GE3_at; Start 595; Stop 619
gaaggtgctggtaaatcaatggact

SEQ ID NO: 241738 - DNA, 25 bp, Artificial
  probe
  misc_feature (1)..(25): SEQ ID NO: 2875; WAN024GE3_at; Start 355; Stop 379
tactctactgttgaccttccagaga

SEQ ID NO: 241739 - DNA, 25 bp, Artificial
  probe
  misc_feature (1)..(25): SEQ ID NO: 2875; WAN024GE3_at; Start 1103; Stop 1127
tcccagttgaccctcgtgacttaaa

SEQ ID NO: 241740 - DNA, 25 bp, Artificial
  probe
  misc_feature (1)..(25): SEQ ID NO: 2875; WAN024GE3_at; Start 739; Stop 763
cttgctgcaggagcttctggtatct

SEQ ID NO: 241741 - DNA, 25 bp, Artificial
  probe
  misc_feature (1)..(25): SEQ ID NO: 2875; WAN024GE3_at; Start 421; Stop 445
tactttagtaaggatgacggtatca

SEQ ID NO: 241742 - DNA, 25 bp, Artificial
  probe
  misc_feature (1)..(25): SEQ ID NO: 2875; WAN024GE3_at; Start 579; Stop 603
tgaagaatacctgccagaaggtgct

SEQ ID NO: 241743 - DNA, 25 bp, Artificial
  probe
  misc_feature (1)..(25): SEQ ID NO: 2875; WAN024GE3_at; Start 93; Stop 117
agcatttggctatatcgctagtggg

SEQ ID NO: 241744 - DNA, 25 bp, Artificial
  probe
  misc_feature (1)..(25): SEQ ID NO: 2875; WAN024GE3_at; Start 724; Stop 748
gacgttgaacgttcgcttgctgcag

SEQ ID NO: 241745 - DNA, 25 bp, Artificial
  probe
  misc_feature (1)..(25): SEQ ID NO: 2875; WAN024GE3_at; Start 46; Stop 70
aatacctatgatttggagccaatgg

SEQ ID NO: 241746 - DNA, 25 bp, Artificial
  probe
  misc_feature (1)..(25): SEQ ID NO: 2875; WAN024GE3_at; Start 367; Stop 391
gaccttccagagatttctgaagccc

SEQ ID NO: 241747 - DNA, 25 bp, Artificial
  probe
  misc_feature (1)..(25): SEQ ID NO: 2875; WAN024GE3_at; Start 61; Stop 85
gagccaatggcgcaacaagttattc

SEQ ID NO: 241748 - DNA, 25 bp, Artificial
  probe
  misc_feature (1)..(25): SEQ ID NO: 2875; WAN024GE3_at; Start 709; Stop 733
ccacaatgccgtgaggacgttgaac

SEQ ID NO: 241749 - DNA, 25 bp, Artificial
  probe
  misc_feature (1)..(25): SEQ ID NO: 2875; WAN024GE3_at; Start 1006; Stop 1030
aatgcggaattgaagacagttatgc

SEQ ID NO: 241750 - DNA, 25 bp, Artificial
  probe
  misc_feature (1)..(25): SEQ ID NO: 2875; WAN024GE3_at; Start 78; Stop 102
agttattcctaaagcagcatttggc

SEQ ID NO: 241751 - DNA, 25 bp, Artificial
  probe
  misc_feature (1)..(25): SEQ ID NO: 2875; WAN024GE3_at; Start 811; Stop 835
tttgactcgcttcaagaagtggcag

SEQ ID NO: 241752 - DNA, 25 bp, Artificial
  probe
  misc_feature (1)..(25): SEQ ID NO: 2875; WAN024GE3_at; Start 754; Stop 778
tctggtatctgggtaaccaaccacg

SEQ ID NO: 241753 - DNA, 25 bp, Artificial
  probe
  misc_feature (1)..(25): SEQ ID NO: 2875; WAN024GE3_at; Start 537; Stop 561
taagcgtaatggttttgtcttccca

SEQ ID NO: 241754 - DNA, 25 bp, Artificial
  probe
  misc_feature (1)..(25): SEQ ID NO: 2875; WAN024GE3_at; Start 695; Stop 719
tgtatgtcaagggaccacaatgccg

SEQ ID NO: 241755 - DNA, 25 bp, Artificial
  probe
  misc_feature (1)..(25): SEQ ID NO: 2875; WAN024GE3_at; Start 989; Stop 1013
aagtctttgaacacttgaatgcgga

SEQ ID NO: 241756 - DNA, 25 bp, Artificial
  probe
  misc_feature (1)..(25): SEQ ID NO: 2875; WAN024GE3_at; Start 205; Stop 229
ccaagtacagagattgaatttgcag

SEQ ID NO: 241757 - DNA, 25 bp, Artificial
  probe
  misc_feature (1)..(25): SEQ ID NO: 2875; WAN024GE3_at; Start 564; Stop 588
tggcatgccgattgttgaagaatac

SEQ ID NO: 241758 - DNA, 25 bp, Artificial
  probe
  misc_feature (1)..(25): SEQ ID NO: 2875; WAN024GE3_at; Start 494; Stop 518
tcttgacggcagatgctactgtagg

SEQ ID NO: 241759 - DNA, 25 bp, Artificial
  probe
  misc_feature (1)..(25): SEQ ID NO: 2875; WAN024GE3_at; Start 313; Stop 337
cgtggtgtgcatgagtttggttctc

SEQ ID NO: 241760 - DNA, 25 bp, Artificial
  probe
  misc_feature (1)..(25): SEQ ID NO: 2875; WAN024GE3_at; Start 868; Stop 892
gactctggtgttcgtcgtggtcaac

SEQ ID NO: 241761 - DNA, 25 bp, Artificial
  probe
  misc_feature (1)..(25): SEQ ID NO: 2875; WAN024GE3_at; Start 2; Stop 26
tgtcatacaaaacaagcaatgcaga

SEQ ID NO: 241762 - DNA, 25 bp, Artificial
  probe
  misc_feature (1)..(25): SEQ ID NO: 2875; WAN024GE3_at; Start 481; Stop 505
tataaagcgattgtcttgacggcag

SEQ ID NO: 241763 - DNA, 25 bp, Artificial
  probe
  misc_feature (1)..(25): SEQ ID NO: 5644; WAN024GE4_at; Start 126; Stop 150
aggatcgattccttgttcgcggagc

SEQ ID NO: 241764 - DNA, 25 bp, Artificial
  probe
  misc_feature (1)..(25): SEQ ID NO: 5644; WAN024GE4_at; Start 56; Stop 80
ctttatcgaggttggcatatttatc

SEQ ID NO: 241765 - DNA, 25 bp, Artificial
  probe
  misc_feature (1)..(25): SEQ ID NO: 5644; WAN024GE4_at; Start 204; Stop 228
ttctgtagacatgggatcctcctag

SEQ ID NO: 241766 - DNA, 25 bp, Artificial
  probe
  misc_feature (1)..(25): SEQ ID NO: 5644; WAN024GE4_at; Start 144; Stop 168
gcggagcgcagccattttttcacgg

SEQ ID NO: 241767 - DNA, 25 bp, Artificial
  probe
  misc_feature (1)..(25): SEQ ID NO: 5644; WAN024GE4_at; Start 48; Stop 72
taattgttctttatcgaggttggca

SEQ ID NO: 241768 - DNA, 25 bp, Artificial
  probe
  misc_feature (1)..(25): SEQ ID NO: 5644; WAN024GE4_at; Start 128; Stop 152
gatcgattccttgttcgcggagcgc

SEQ ID NO: 241769 - DNA, 25 bp, Artificial
  probe
  misc_feature (1)..(25): SEQ ID NO: 5644; WAN024GE4_at; Start 52; Stop 76
tgttctttatcgaggttggcatatt

SEQ ID NO: 241770 - DNA, 25 bp, Artificial
  probe
  misc_feature (1)..(25): SEQ ID NO: 5644; WAN024GE4_at; Start 136; Stop 160
ccttgttcgcggagcgcagccattt

SEQ ID NO: 241771 - DNA, 25 bp, Artificial
  probe
  misc_feature (1)..(25): SEQ ID NO: 5644; WAN024GE4_at; Start 62; Stop 86
cgaggttggcatatttatcttttaa

SEQ ID NO: 241772 - DNA, 25 bp, Artificial
  probe
  misc_feature (1)..(25): SEQ ID NO: 5644; WAN024GE4_at; Start 200; Stop 224
tatgttctgtagacatgggatcctc

SEQ ID NO: 241773 - DNA, 25 bp, Artificial
  probe
  misc_feature (1)..(25): SEQ ID NO: 5644; WAN024GE4_at; Start 202; Stop 226
tgttctgtagacatgggatcctcct

SEQ ID NO: 241774 - DNA, 25 bp, Artificial
  probe
  misc_feature (1)..(25): SEQ ID NO: 5644; WAN024GE4_at; Start 179; Stop 203
gctggtcatttagttcttccatatg

SEQ ID NO: 241775 - DNA, 25 bp, Artificial
  probe
  misc_feature (1)..(25): SEQ ID NO: 5644; WAN024GE4_at; Start 148; Stop 172
agcgcagccattttttcacggcgaa

SEQ ID NO: 241776 - DNA, 25 bp, Artificial
  probe
  misc_feature (1)..(25): SEQ ID NO: 5644; WAN024GE4_at; Start 141; Stop 165
ttcgcggagcgcagccattttttca

SEQ ID NO: 241777 - DNA, 25 bp, Artificial
  probe
  misc_feature (1)..(25): SEQ ID NO: 5644; WAN024GE4_at; Start 151; Stop 175
gcagccattttttcacggcgaacga

SEQ ID NO: 241778 - DNA, 25 bp, Artificial
  probe
  misc_feature (1)..(25): SEQ ID NO: 5644; WAN024GE4_at; Start 84; Stop 108
taattcttgtgaatttgcagtacgt

SEQ ID NO: 241779 - DNA, 25 bp, Artificial
  probe
  misc_feature (1)..(25): SEQ ID NO: 5644; WAN024GE4_at; Start 189; Stop 213
tagttcttccatatgttctgtagac

SEQ ID NO: 241780 - DNA, 25 bp, Artificial
  probe
  misc_feature (1)..(25): SEQ ID NO: 5644; WAN024GE4_at; Start 166; Stop 190
cggcgaacgatctgctggtcattta

SEQ ID NO: 241781 - DNA, 25 bp, Artificial
  probe
  misc_feature (1)..(25): SEQ ID NO: 5644; WAN024GE4_at; Start 93; Stop 117
tgaatttgcagtacgttcaaaacgt

SEQ ID NO: 241782 - DNA, 25 bp, Artificial
  probe
  misc_feature (1)..(25): SEQ ID NO: 5644; WAN024GE4_at; Start 146; Stop 170
ggagcgcagccattttttcacggcg

SEQ ID NO: 241783 - DNA, 25 bp, Artificial
  probe
  misc_feature (1)..(25): SEQ ID NO: 5644; WAN024GE4_at; Start 162; Stop 186
ttcacggcgaacgatctgctggtca

SEQ ID NO: 241784 - DNA, 25 bp, Artificial
  probe
  misc_feature (1)..(25): SEQ ID NO: 5644; WAN024GE4_at; Start 168; Stop 192
gcgaacgatctgctggtcatttagt

SEQ ID NO: 241785 - DNA, 25 bp, Artificial
  probe
  misc_feature (1)..(25): SEQ ID NO: 5644; WAN024GE4_at; Start 158; Stop 182
ttttttcacggcgaacgatctgctg

SEQ ID NO: 241786 - DNA, 25 bp, Artificial
  probe
  misc_feature (1)..(25): SEQ ID NO: 5644; WAN024GE4_at; Start 174; Stop 198
gatctgctggtcatttagttcttcc

SEQ ID NO: 241787 - DNA, 25 bp, Artificial
  probe
  misc_feature (1)..(25): SEQ ID NO: 5644; WAN024GE4_at; Start 131; Stop 155
cgattccttgttcgcggagcgcagc

SEQ ID NO: 241788 - DNA, 25 bp, Artificial
  probe
  misc_feature (1)..(25): SEQ ID NO: 5644; WAN024GE4_at; Start 154; Stop 178
gccattttttcacggcgaacgatct

SEQ ID NO: 241789 - DNA, 25 bp, Artificial
  probe
  misc_feature (1)..(25): SEQ ID NO: 5644; WAN024GE4_at; Start 88; Stop 112
tcttgtgaatttgcagtacgttcaa

SEQ ID NO: 241790 - DNA, 25 bp, Artificial
  probe
  misc_feature (1)..(25): SEQ ID NO: 5644; WAN024GE4_at; Start 198; Stop 222
catatgttctgtagacatgggatcc

SEQ ID NO: 241791 - DNA, 25 bp, Artificial
  probe
  misc_feature (1)..(25): SEQ ID NO: 5644; WAN024GE4_at; Start 130; Stop 154
tcgattccttgttcgcggagcgcag

SEQ ID NO: 241792 - DNA, 25 bp, Artificial
  probe
  misc_feature (1)..(25): SEQ ID NO: 5644; WAN024GE4_at; Start 120; Stop 144
tccgaaaggatcgattccttgttcg

SEQ ID NO: 241793 - DNA, 25 bp, Artificial
  probe
  misc_feature (1)..(25): SEQ ID NO: 5644; WAN024GE4_at; Start 124; Stop 148
aaaggatcgattccttgttcgcgga

SEQ ID NO: 241794 - DNA, 25 bp, Artificial
  probe
  misc_feature (1)..(25): SEQ ID NO: 5644; WAN024GE4_at; Start 164; Stop 188
cacggcgaacgatctgctggtcatt

SEQ ID NO: 241795 - DNA, 25 bp, Artificial
  probe
  misc_feature (1)..(25): SEQ ID NO: 5644; WAN024GE4_at; Start 160; Stop 184
ttttcacggcgaacgatctgctggt

SEQ ID NO: 241796 - DNA, 25 bp, Artificial
  probe
  misc_feature (1)..(25): SEQ ID NO: 5644; WAN024GE4_at; Start 41; Stop 65
tatcgtgtaattgttctttatcgag

SEQ ID NO: 241797 - DNA, 25 bp, Artificial
  probe
  misc_feature (1)..(25): SEQ ID NO: 2242; WAN024GE5_at; Start 186; Stop 210
gaatctggccttcgcggtcttgaag

SEQ ID NO: 241798 - DNA, 25 bp, Artificial
  probe
  misc_feature (1)..(25): SEQ ID NO: 2242; WAN024GE5_at; Start 16; Stop 40
aagaggacgaagagccttagacaag

SEQ ID NO: 241799 - DNA, 25 bp, Artificial
  probe
  misc_feature (1)..(25): SEQ ID NO: 2242; WAN024GE5_at; Start 179; Stop 203
tagatctgaatctggccttcgcggt

SEQ ID NO: 241800 - DNA, 25 bp, Artificial
  probe
  misc_feature (1)..(25): SEQ ID NO: 2242; WAN024GE5_at; Start 7; Stop 31
tttctcaggaagaggacgaagagcc

SEQ ID NO: 241801 - DNA, 25 bp, Artificial
  probe
  misc_feature (1)..(25): SEQ ID NO: 2242; WAN024GE5_at; Start 48; Stop 72
tgtgggttgccttgatagagagttc

SEQ ID NO: 241802 - DNA, 25 bp, Artificial
  probe
  misc_feature (1)..(25): SEQ ID NO: 2242; WAN024GE5_at; Start 101; Stop 125
tcgacaccaaggaagtcaccaaggt

SEQ ID NO: 241803 - DNA, 25 bp, Artificial
  probe
  misc_feature (1)..(25): SEQ ID NO: 2242; WAN024GE5_at; Start 148; Stop 172
gttttcttcaccgacagcatcctta

SEQ ID NO: 241804 - DNA, 25 bp, Artificial
  probe
  misc_feature (1)..(25): SEQ ID NO: 2242; WAN024GE5_at; Start 36; Stop 60
acaagtgtgtgatgtgggttgcctt

SEQ ID NO: 241805 - DNA, 25 bp, Artificial
  probe
  misc_feature (1)..(25): SEQ ID NO: 2242; WAN024GE5_at; Start 124; Stop 148
gtctgcttttttgaagatttcgtag

SEQ ID NO: 241806 - DNA, 25 bp, Artificial
  probe
  misc_feature (1)..(25): SEQ ID NO: 2242; WAN024GE5_at; Start 199; Stop 223
gcggtcttgaaggtgggcaaaacca

SEQ ID NO: 241807 - DNA, 25 bp, Artificial
  probe
  misc_feature (1)..(25): SEQ ID NO: 2242; WAN024GE5_at; Start 105; Stop 129
caccaaggaagtcaccaaggtctgc

SEQ ID NO: 241808 - DNA, 25 bp, Artificial
  probe
  misc_feature (1)..(25): SEQ ID NO: 2242; WAN024GE5_at; Start 12; Stop 36
caggaagaggacgaagagccttaga

SEQ ID NO: 241809 - DNA, 25 bp, Artificial
  probe
  misc_feature (1)..(25): SEQ ID NO: 2242; WAN024GE5_at; Start 65; Stop 89
gagagttctcccatatccgtacgca

SEQ ID NO: 241810 - DNA, 25 bp, Artificial
  probe
  misc_feature (1)..(25): SEQ ID NO: 2242; WAN024GE5_at; Start 120; Stop 144
caaggtctgcttttttgaagatttc

SEQ ID NO: 241811 - DNA, 25 bp, Artificial
  probe
  misc_feature (1)..(25): SEQ ID NO: 2242; WAN024GE5_at; Start 2; Stop 26
tggaatttctcaggaagaggacgaa

SEQ ID NO: 241812 - DNA, 25 bp, Artificial
  probe
  misc_feature (1)..(25): SEQ ID NO: 2242; WAN024GE5_at; Start 68; Stop 92
agttctcccatatccgtacgcatca

SEQ ID NO: 241813 - DNA, 25 bp, Artificial
  probe
  misc_feature (1)..(25): SEQ ID NO: 2242; WAN024GE5_at; Start 23; Stop 47
cgaagagccttagacaagtgtgtga

SEQ ID NO: 241814 - DNA, 25 bp, Artificial
  probe
  misc_feature (1)..(25): SEQ ID NO: 2242; WAN024GE5_at; Start 116; Stop 140
tcaccaaggtctgcttttttgaaga

SEQ ID NO: 241815 - DNA, 25 bp, Artificial
  probe
  misc_feature (1)..(25): SEQ ID NO: 2242; WAN024GE5_at; Start 20; Stop 44
ggacgaagagccttagacaagtgtg

SEQ ID NO: 241816 - DNA, 25 bp, Artificial
  probe
  misc_feature (1)..(25): SEQ ID NO: 2242; WAN024GE5_at; Start 30; Stop 54
ccttagacaagtgtgtgatgtgggt

SEQ ID NO: 241817 - DNA, 25 bp, Artificial
  probe
  misc_feature (1)..(25): SEQ ID NO: 2242; WAN024GE5_at; Start 77; Stop 101
atatccgtacgcatcacttcacctt

SEQ ID NO: 241818 - DNA, 25 bp, Artificial
  probe
  misc_feature (1)..(25): SEQ ID NO: 2242; WAN024GE5_at; Start 144; Stop 168
cgtagttttcttcaccgacagcatc

SEQ ID NO: 241819 - DNA, 25 bp, Artificial
  probe
  misc_feature (1)..(25): SEQ ID NO: 2242; WAN024GE5_at; Start 197; Stop 221
tcgcggtcttgaaggtgggcaaaac

SEQ ID NO: 241820 - DNA, 25 bp, Artificial
  probe
  misc_feature (1)..(25): SEQ ID NO: 2242; WAN024GE5_at; Start 108; Stop 132
caaggaagtcaccaaggtctgcttt

SEQ ID NO: 241821 - DNA, 25 bp, Artificial
  probe
  misc_feature (1)..(25): SEQ ID NO: 2242; WAN024GE5_at; Start 183; Stop 207
tctgaatctggccttcgcggtcttg

SEQ ID NO: 241822 - DNA, 25 bp, Artificial
  probe
  misc_feature (1)..(25): SEQ ID NO: 2242; WAN024GE5_at; Start 139; Stop 163
gatttcgtagttttcttcaccgaca

SEQ ID NO: 241823 - DNA, 25 bp, Artificial
  probe
  misc_feature (1)..(25): SEQ ID NO: 2242; WAN024GE5_at; Start 151; Stop 175
ttcttcaccgacagcatccttacga

SEQ ID NO: 241824 - DNA, 25 bp, Artificial
  probe
  misc_feature (1)..(25): SEQ ID NO: 2242; WAN024GE5_at; Start 94; Stop 118
ttcaccttcgacaccaaggaagtca

SEQ ID NO: 241825 - DNA, 25 bp, Artificial
  probe
  misc_feature (1)..(25): SEQ ID NO: 2242; WAN024GE5_at; Start 90; Stop 114
tcacttcaccttcgacaccaaggaa

SEQ ID NO: 241826 - DNA, 25 bp, Artificial
  probe
  misc_feature (1)..(25): SEQ ID NO: 2242; WAN024GE5_at; Start 194; Stop 218
ccttcgcggtcttgaaggtgggcaa

SEQ ID NO: 241827 - DNA, 25 bp, Artificial
  probe
  misc_feature (1)..(25): SEQ ID NO: 2242; WAN024GE5_at; Start 27; Stop 51
gagccttagacaagtgtgtgatgtg

SEQ ID NO: 241828 - DNA, 25 bp, Artificial
  probe
  misc_feature (1)..(25): SEQ ID NO: 2242; WAN024GE5_at; Start 112; Stop 136
gaagtcaccaaggtctgcttttttg

SEQ ID NO: 241829 - DNA, 25 bp, Artificial
  probe
  misc_feature (1)..(25): SEQ ID NO: 2242; WAN024GE5_at; Start 61; Stop 85
gatagagagttctcccatatccgta

SEQ ID NO: 241830 - DNA, 25 bp, Artificial
  probe
  misc_feature (1)..(25): SEQ ID NO: 2242; WAN024GE5_at; Start 9; Stop 33
tctcaggaagaggacgaagagcctt

SEQ ID NO: 241831 - DNA, 25 bp, Artificial
  probe
  misc_feature (1)..(25): SEQ ID NO: 2915; WAN024GE6_at; Start 368; Stop 392
tgcgtacggatatgggagaactctc

SEQ ID NO: 241832 - DNA, 25 bp, Artificial
  probe
  misc_feature (1)..(25): SEQ ID NO: 2915; WAN024GE6_at; Start 1153; Stop 1177
tatggacatccagtagctgtatctc

SEQ ID NO: 241833 - DNA, 25 bp, Artificial
  probe
  misc_feature (1)..(25): SEQ ID NO: 2915; WAN024GE6_at; Start 332; Stop 356
accttggtgacttccttggtgtcga

SEQ ID NO: 241834 - DNA, 25 bp, Artificial
  probe
  misc_feature (1)..(25): SEQ ID NO: 2915; WAN024GE6_at; Start 558; Stop 582
tgaaatccgtcgttaccttgaccaa

SEQ ID NO: 241835 - DNA, 25 bp, Artificial
  probe
  misc_feature (1)..(25): SEQ ID NO: 2915; WAN024GE6_at; Start 1288; Stop 1312
caacttagccgttttgaagcccaag

SEQ ID NO: 241836 - DNA, 25 bp, Artificial
  probe
  misc_feature (1)..(25): SEQ ID NO: 2915; WAN024GE6_at; Start 51; Stop 75
tgaaaaaatggctgcgctccgcgaa

SEQ ID NO: 241837 - DNA, 25 bp, Artificial
  probe
  misc_feature (1)..(25): SEQ ID NO: 2915; WAN024GE6_at; Start 695; Stop 719
tcgcgactgagcttcacttaaaacg

SEQ ID NO: 241838 - DNA, 25 bp, Artificial
  probe
  misc_feature (1)..(25): SEQ ID NO: 2915; WAN024GE6_at; Start 289; Stop 313
gatgctgtcggtgaagaaaactacg

SEQ ID NO: 241839 - DNA, 25 bp, Artificial
  probe
  misc_feature (1)..(25): SEQ ID NO: 2915; WAN024GE6_at; Start 675; Stop 699
cattgacatggtgcttcgtatcgcg

SEQ ID NO: 241840 - DNA, 25 bp, Artificial
  probe
  misc_feature (1)..(25): SEQ ID NO: 2915; WAN024GE6_at; Start 1197; Stop 1221
tgaagaccaacgctttactgaccgt

SEQ ID NO: 241841 - DNA, 25 bp, Artificial
  probe
  misc_feature (1)..(25): SEQ ID NO: 2915; WAN024GE6_at; Start 1343; Stop 1367
cgacaggaatcgactatgactacat

SEQ ID NO: 241842 - DNA, 25 bp, Artificial
  probe
  misc_feature (1)..(25): SEQ ID NO: 2915; WAN024GE6_at; Start 181; Stop 205
gaaacagctactatcgcaggacgct

SEQ ID NO: 241843 - DNA, 25 bp, Artificial
  probe
  misc_feature (1)..(25): SEQ ID NO: 2915; WAN024GE6_at; Start 987; Stop 1011
aattactggtgtcgatttctggcaa

SEQ ID NO: 241844 - DNA, 25 bp, Artificial
  probe
  misc_feature (1)..(25): SEQ ID NO: 2915; WAN024GE6_at; Start 1302; Stop 1326
tgaagcccaagctaaagccaaagaa

SEQ ID NO: 241845 - DNA, 25 bp, Artificial
  probe
  misc_feature (1)..(25): SEQ ID NO: 2915; WAN024GE6_at; Start 1216; Stop 1240
gaccgtttcgagctctttatcatga

SEQ ID NO: 241846 - DNA, 25 bp, Artificial
  probe
  misc_feature (1)..(25): SEQ ID NO: 2915; WAN024GE6_at; Start 1027; Stop 1051
gaagctaaagctatcgctgctgaga

SEQ ID NO: 241847 - DNA, 25 bp, Artificial
  probe
  misc_feature (1)..(25): SEQ ID NO: 2915; WAN024GE6_at; Start 424; Stop 448
aaggctcttcgtcctcttcctgaga

SEQ ID NO: 241848 - DNA, 25 bp, Artificial
  probe
  misc_feature (1)..(25): SEQ ID NO: 2915; WAN024GE6_at; Start 317; Stop 341
tcttcaaaaaagcagaccttggtga

SEQ ID NO: 241849 - DNA, 25 bp, Artificial
  probe
  misc_feature (1)..(25): SEQ ID NO: 2915; WAN024GE6_at; Start 1320; Stop 1344
caaagaacttggtgatgatgaagcg

SEQ ID NO: 241850 - DNA, 25 bp, Artificial
  probe
  misc_feature (1)..(25): SEQ ID NO: 2915; WAN024GE6_at; Start 383; Stop 407
gagaactctctatcaaggcaaccca

SEQ ID NO: 241851 - DNA, 25 bp, Artificial
  probe
  misc_feature (1)..(25): SEQ ID NO: 2915; WAN024GE6_at; Start 964; Stop 988
catatggtggatgctatcagagaaa

SEQ ID NO: 241852 - DNA, 25 bp, Artificial
  probe
  misc_feature (1)..(25): SEQ ID NO: 2915; WAN024GE6_at; Start 1377; Stop 1401
tgaatacggtatgccaccaacaggt

SEQ ID NO: 241853 - DNA, 25 bp, Artificial
  probe
  misc_feature (1)..(25): SEQ ID NO: 2915; WAN024GE6_at; Start 587; Stop 611
gattccttgaagtggaaacacctgt

SEQ ID NO: 241854 - DNA, 25 bp, Artificial
  probe
  misc_feature (1)..(25): SEQ ID NO: 2915; WAN024GE6_at; Start 1174; Stop 1198
tctccactcgctaagaaaaatcctg

SEQ ID NO: 241855 - DNA, 25 bp, Artificial
  probe
  misc_feature (1)..(25): SEQ ID NO: 2915; WAN024GE6_at; Start 1236; Stop 1260
catgactaaggagtacggtaatgcc

SEQ ID NO: 241856 - DNA, 25 bp, Artificial
  probe
  misc_feature (1)..(25): SEQ ID NO: 2915; WAN024GE6_at; Start 66; Stop 90
gctccgcgaacaaggaatcgatcct

SEQ ID NO: 241857 - DNA, 25 bp, Artificial
  probe
  misc_feature (1)..(25): SEQ ID NO: 2915; WAN024GE6_at; Start 1080; Stop 1104
tgaggttggtcacatcatcaatgcc

SEQ ID NO: 241858 - DNA, 25 bp, Artificial
  probe
  misc_feature (1)..(25): SEQ ID NO: 2915; WAN024GE6_at; Start 1040; Stop 1064
tcgctgctgagaagaaagttccagt

SEQ ID NO: 241859 - DNA, 25 bp, Artificial
  probe
  misc_feature (1)..(25): SEQ ID NO: 2915; WAN024GE6_at; Start 1455; Stop 1479
tatccgtgatgtattgctcttccca

SEQ ID NO: 241860 - DNA, 25 bp, Artificial
  probe
  misc_feature (1)..(25): SEQ ID NO: 2915; WAN024GE6_at; Start 717; Stop 741
acgccttatcgtgggtggtatggaa

SEQ ID NO: 241861 - DNA, 25 bp, Artificial
  probe
  misc_feature (1)..(25): SEQ ID NO: 2915; WAN024GE6_at; Start 1063; Stop 1087
gttgagaaacactacactgaggttg

SEQ ID NO: 241862 - DNA, 25 bp, Artificial
  probe
  misc_feature (1)..(25): SEQ ID NO: 2915; WAN024GE6_at; Start 15; Stop 39
tatggaagaactaaatgaccagcag

SEQ ID NO: 241863 - DNA, 25 bp, Artificial
  probe
  misc_feature (1)..(25): SEQ ID NO: 2915; WAN024GE6_at; Start 1406; Stop 1430
tgggaatcggtatcgaccgtctctg

SEQ ID NO: 241864 - DNA, 25 bp, Artificial
  probe
  misc_feature (1)..(25): SEQ ID NO: 2915; WAN024GE6_at; Start 248; Stop 272
ttcaagaccgcgaaggccagattca

SEQ ID NO: 241865 - DNA, 25 bp, Artificial
  probe
  misc_feature (1)..(25): SEQ ID NO: 1954; WAN024GE7_at; Start 308; Stop 332
gaacagctgaaatgggagacttggt

SEQ ID NO: 241866 - DNA, 25 bp, Artificial
  probe
  misc_feature (1)..(25): SEQ ID NO: 1954; WAN024GE7_at; Start 393; Stop 417
gactaatgttcaactttactaccac

SEQ ID NO: 241867 - DNA, 25 bp, Artificial
  probe
  misc_feature (1)..(25): SEQ ID NO: 1954; WAN024GE7_at; Start 267; Stop 291
ctcaggtgagacttcagctattatc

SEQ ID NO: 241868 - DNA, 25 bp, Artificial
  probe
  misc_feature (1)..(25): SEQ ID NO: 1954; WAN024GE7_at; Start 238; Stop 262
ggcttggctcgaaactttaatatca

SEQ ID NO: 241869 - DNA, 25 bp, Artificial
  probe
  misc_feature (1)..(25): SEQ ID NO: 1954; WAN024GE7_at; Start 531; Stop 555
agttggacaacaaatcatcgatagc

SEQ ID NO: 241870 - DNA, 25 bp, Artificial
  probe
  misc_feature (1)..(25): SEQ ID NO: 1954; WAN024GE7_at; Start 545; Stop 569
tcatcgatagcaatcgcctgaccat

SEQ ID NO: 241871 - DNA, 25 bp, Artificial
  probe
  misc_feature (1)..(25): SEQ ID NO: 1954; WAN024GE7_at; Start 367; Stop 391
tttgaaagtggacaggcactcggct

SEQ ID NO: 241872 - DNA, 25 bp, Artificial
  probe
  misc_feature (1)..(25): SEQ ID NO: 1954; WAN024GE7_at; Start 67; Stop 91
ggcgttacgattgggatatccatcc

SEQ ID NO: 241873 - DNA, 25 bp, Artificial
  probe
  misc_feature (1)..(25): SEQ ID NO: 1954; WAN024GE7_at; Start 454; Stop 478
caggctatcaatcttgtcactcgga

SEQ ID NO: 241874 - DNA, 25 bp, Artificial
  probe
  misc_feature (1)..(25): SEQ ID NO: 1954; WAN024GE7_at; Start 173; Stop 197
cacgattgtatctggaatttatccg

SEQ ID NO: 241875 - DNA, 25 bp, Artificial
  probe
  misc_feature (1)..(25): SEQ ID NO: 1954; WAN024GE7_at; Start 81; Stop 105
gatatccatcctgtctgtcctctta

SEQ ID NO: 241876 - DNA, 25 bp, Artificial
  probe
  misc_feature (1)..(25): SEQ ID NO: 1954; WAN024GE7_at; Start 187; Stop 211
gaatttatccgtatcatgccccagc

SEQ ID NO: 241877 - DNA, 25 bp, Artificial
  probe
  misc_feature (1)..(25): SEQ ID NO: 1954; WAN024GE7_at; Start 617; Stop 641
tcgcagtttgctaccctatttccaa

SEQ ID NO: 241878 - DNA, 25 bp, Artificial
  probe
  misc_feature (1)..(25): SEQ ID NO: 1954; WAN024GE7_at; Start 254; Stop 278
ttaatatcaatatctcaggtgagac

SEQ ID NO: 241879 - DNA, 25 bp, Artificial
  probe
  misc_feature (1)..(25): SEQ ID NO: 1954; WAN024GE7_at; Start 379; Stop 403
caggcactcggcttgactaatgttc

SEQ ID NO: 241880 - DNA, 25 bp, Artificial
  probe
  misc_feature (1)..(25): SEQ ID NO: 1954; WAN024GE7_at; Start 224; Stop 248
tcatcgtttactttggcttggctcg

SEQ ID NO: 241881 - DNA, 25 bp, Artificial
  probe
  misc_feature (1)..(25): SEQ ID NO: 1954; WAN024GE7_at; Start 140; Stop 164
tgacctcccattctagaatcatacg

SEQ ID NO: 241882 - DNA, 25 bp, Artificial
  probe
  misc_feature (1)..(25): SEQ ID NO: 1954; WAN024GE7_at; Start 515; Stop 539
ttgtggaagtgaccaaagttggaca

SEQ ID NO: 241883 - DNA, 25 bp, Artificial
  probe
  misc_feature (1)..(25): SEQ ID NO: 1954; WAN024GE7_at; Start 323; Stop 347
gagacttggtacgtggagctatcac

SEQ ID NO: 241884 - DNA, 25 bp, Artificial
  probe
  misc_feature (1)..(25): SEQ ID NO: 1954; WAN024GE7_at; Start 125; Stop 149
tcatgggaatcatcatgacctccca

SEQ ID NO: 241885 - DNA, 25 bp, Artificial
  probe
  misc_feature (1)..(25): SEQ ID NO: 1954; WAN024GE7_at; Start 644; Stop 668
tatccactcacttagaaaaacattg

SEQ ID NO: 241886 - DNA, 25 bp, Artificial
  probe
  misc_feature (1)..(25): SEQ ID NO: 1954; WAN024GE7_at; Start 577; Stop 601
gcttcattttggatttatggaacca

SEQ ID NO: 241887 - DNA, 25 bp, Artificial
  probe
  misc_feature (1)..(25): SEQ ID NO: 1954; WAN024GE7_at; Start 439; Stop 463
agaagactgctaccgcaggctatca

SEQ ID NO: 241888 - DNA, 25 bp, Artificial
  probe
  misc_feature (1)..(25): SEQ ID NO: 1954; WAN024GE7_at; Start 210; Stop 234
gctggtgctactcttcatcgtttac

SEQ ID NO: 241889 - DNA, 25 bp, Artificial
  probe
  misc_feature (1)..(25): SEQ ID NO: 1954; WAN024GE7_at; Start 652; Stop 676
cacttagaaaaacattggagaaact

SEQ ID NO: 241890 - DNA, 25 bp, Artificial
  probe
  misc_feature (1)..(25): SEQ ID NO: 1954; WAN024GE7_at; Start 153; Stop 177
tagaatcatacgatttttaacacga

SEQ ID NO: 241891 - DNA, 25 bp, Artificial
  probe
  misc_feature (1)..(25): SEQ ID NO: 1954; WAN024GE7_at; Start 353; Stop 377
tccctaaacatcagtttgaaagtgg

SEQ ID NO: 241892 - DNA, 25 bp, Artificial
  probe
  misc_feature (1)..(25): SEQ ID NO: 1954; WAN024GE7_at; Start 563; Stop 587
tgaccatcccaactgcttcattttg

SEQ ID NO: 241893 - DNA, 25 bp, Artificial
  probe
  misc_feature (1)..(25): SEQ ID NO: 1954; WAN024GE7_at; Start 92; Stop 116
tgtctgtcctcttatccatgatgtt

SEQ ID NO: 241894 - DNA, 25 bp, Artificial
  probe
  misc_feature (1)..(25): SEQ ID NO: 1954; WAN024GE7_at; Start 197; Stop 221
gtatcatgccccagctggtgctact

SEQ ID NO: 241895 - DNA, 25 bp, Artificial
  probe
  misc_feature (1)..(25): SEQ ID NO: 1954; WAN024GE7_at; Start 608; Stop 632
tcttatatttcgcagtttgctaccc

SEQ ID NO: 241896 - DNA, 25 bp, Artificial
  probe
  misc_feature (1)..(25): SEQ ID NO: 1954; WAN024GE7_at; Start 468; Stop 492
tgtcactcggatgattaaaaccact

SEQ ID NO: 241897 - DNA, 25 bp, Artificial
  probe
  misc_feature (1)..(25): SEQ ID NO: 1954; WAN024GE7_at; Start 338; Stop 362
gagctatcacttctctccctaaaca

SEQ ID NO: 241898 - DNA, 25 bp, Artificial
  probe
  misc_feature (1)..(25): SEQ ID NO: 1954; WAN024GE7_at; Start 489; Stop 513
cacttcattagttgttttgattggg

SEQ ID NO: 241899 - DNA, 25 bp, Artificial
  probe
  misc_feature (1)..(25): SEQ ID NO: 5500; WAN024GE8_at; Start 507; Stop 531
catgtacgtcgccaaggatttgatt

SEQ ID NO: 241900 - DNA, 25 bp, Artificial
  probe
  misc_feature (1)..(25): SEQ ID NO: 5500; WAN024GE8_at; Start 491; Stop 515
tggctttggccgacctcatgtacgt

SEQ ID NO: 241901 - DNA, 25 bp, Artificial
  probe
  misc_feature (1)..(25): SEQ ID NO: 5500; WAN024GE8_at; Start 27; Stop 51
tctaccactatatcaaaaggcattc

SEQ ID NO: 241902 - DNA, 25 bp, Artificial
  probe
  misc_feature (1)..(25): SEQ ID NO: 5500; WAN024GE8_at; Start 586; Stop 610
atcatgctgctacccatctcactgg

SEQ ID NO: 241903 - DNA, 25 bp, Artificial
  probe
  misc_feature (1)..(25): SEQ ID NO: 5500; WAN024GE8_at; Start 41; Stop 65
aaaaggcattctttctgaccttgca

SEQ ID NO: 241904 - DNA, 25 bp, Artificial
  probe
  misc_feature (1)..(25): SEQ ID NO: 5500; WAN024GE8_at; Start 405; Stop 429
tcttccgcaagcaacagcggtggca

SEQ ID NO: 241905 - DNA, 25 bp, Artificial
  probe
  misc_feature (1)..(25): SEQ ID NO: 5500; WAN024GE8_at; Start 183; Stop 207
taatacgccccttttgattcaactc

SEQ ID NO: 241906 - DNA, 25 bp, Artificial
  probe
  misc_feature (1)..(25): SEQ ID NO: 5500; WAN024GE8_at; Start 479; Stop 503
ttttctcagcagtggctttggccga

SEQ ID NO: 241907 - DNA, 25 bp, Artificial
  probe
  misc_feature (1)..(25): SEQ ID NO: 5500; WAN024GE8_at; Start 466; Stop 490
aaggaaacctctgttttctcagcag

SEQ ID NO: 241908 - DNA, 25 bp, Artificial
  probe
  misc_feature (1)..(25): SEQ ID NO: 5500; WAN024GE8_at; Start 354; Stop 378
gattggcctcgctattggtctgaca

SEQ ID NO: 241909 - DNA, 25 bp, Artificial
  probe
  misc_feature (1)..(25): SEQ ID NO: 5500; WAN024GE8_at; Start 202; Stop 226
caactcttctttctctacttcggtc

SEQ ID NO: 241910 - DNA, 25 bp, Artificial
  probe
  misc_feature (1)..(25): SEQ ID NO: 5500; WAN024GE8_at; Start 237; Stop 261
cgggattgtcctatcttcagaagtc

SEQ ID NO: 241911 - DNA, 25 bp, Artificial
  probe
  misc_feature (1)..(25): SEQ ID NO: 5500; WAN024GE8_at; Start 80; Stop 104
gaattttgggatcctttctgctcgg

SEQ ID NO: 241912 - DNA, 25 bp, Artificial
  probe
  misc_feature (1)..(25): SEQ ID NO: 5500; WAN024GE8_at; Start 251; Stop 275
cttcagaagtctgtgcaacgcttgg

SEQ ID NO: 241913 - DNA, 25 bp, Artificial
  probe
  misc_feature (1)..(25): SEQ ID NO: 5500; WAN024GE8_at; Start 150; Stop 174
gcaagtagcgacagcctacattgaa

SEQ ID NO: 241914 - DNA, 25 bp, Artificial
  probe
  misc_feature (1)..(25): SEQ ID NO: 5500; WAN024GE8_at; Start 339; Stop 363
tcaaacccagcaggagattggcctc

SEQ ID NO: 241915 - DNA, 25 bp, Artificial
  probe
  misc_feature (1)..(25): SEQ ID NO: 5500; WAN024GE8_at; Start 12; Stop 36
cattgttgaacaatatctaccacta

SEQ ID NO: 241916 - DNA, 25 bp, Artificial
  probe
  misc_feature (1)..(25): SEQ ID NO: 5500; WAN024GE8_at; Start 228; Stop 252
tccccgaatcgggattgtcctatct

SEQ ID NO: 241917 - DNA, 25 bp, Artificial
  probe
  misc_feature (1)..(25): SEQ ID NO: 5500; WAN024GE8_at; Start 103; Stop 127
ggtttaatcgttagtatcatccgac

SEQ ID NO: 241918 - DNA, 25 bp, Artificial
  probe
  misc_feature (1)..(25): SEQ ID NO: 5500; WAN024GE8_at; Start 88; Stop 112
ggatcctttctgctcggtttaatcg

SEQ ID NO: 241919 - DNA, 25 bp, Artificial
  probe
  misc_feature (1)..(25): SEQ ID NO: 5500; WAN024GE8_at; Start 420; Stop 444
agcggtggcactcccctcctttagt

SEQ ID NO: 241920 - DNA, 25 bp, Artificial
  probe
  misc_feature (1)..(25): SEQ ID NO: 5500; WAN024GE8_at; Start 604; Stop 628
tcactggtctttagctggatagaaa

SEQ ID NO: 241921 - DNA, 25 bp, Artificial
  probe
  misc_feature (1)..(25): SEQ ID NO: 5500; WAN024GE8_at; Start 55; Stop 79
ctgaccttgcatattgcagtttggg

SEQ ID NO: 241922 - DNA, 25 bp, Artificial
  probe
  misc_feature (1)..(25): SEQ ID NO: 5500; WAN024GE8_at; Start 397; Stop 421
tatgtggttcttccgcaagcaacag

SEQ ID NO: 241923 - DNA, 25 bp, Artificial
  probe
  misc_feature (1)..(25): SEQ ID NO: 5500; WAN024GE8_at; Start 326; Stop 350
tggaagccatcagtcaaacccagca

SEQ ID NO: 241924 - DNA, 25 bp, Artificial
  probe
  misc_feature (1)..(25): SEQ ID NO: 5500; WAN024GE8_at; Start 445; Stop 469
gccaatgtcattttccttatcaagg

SEQ ID NO: 241925 - DNA, 25 bp, Artificial
  probe
  misc_feature (1)..(25): SEQ ID NO: 5500; WAN024GE8_at; Start 295; Stop 319
tcctatatggcagaatctttccgaa

SEQ ID NO: 241926 - DNA, 25 bp, Artificial
  probe
  misc_feature (1)..(25): SEQ ID NO: 5500; WAN024GE8_at; Start 432; Stop 456
cccctcctttagtgccaatgtcatt

SEQ ID NO: 241927 - DNA, 25 bp, Artificial
  probe
  misc_feature (1)..(25): SEQ ID NO: 5500; WAN024GE8_at; Start 536; Stop 560
tctactatgagacagacattgcgct

SEQ ID NO: 241928 - DNA, 25 bp, Artificial
  probe
  misc_feature (1)..(25): SEQ ID NO: 5500; WAN024GE8_at; Start 366; Stop 390
tattggtctgacacctctacaggtc

SEQ ID NO: 241929 - DNA, 25 bp, Artificial
  probe
  misc_feature (1)..(25): SEQ ID NO: 5500; WAN024GE8_at; Start 522; Stop 546
ggatttgattggtctctactatgag

SEQ ID NO: 241930 - DNA, 25 bp, Artificial
  probe
  misc_feature (1)..(25): SEQ ID NO: 5500; WAN024GE8_at; Start 168; Stop 192
cattgaattgtcacgtaatacgccc

SEQ ID NO: 241931 - DNA, 25 bp, Artificial
  probe
  misc_feature (1)..(25): SEQ ID NO: 5500; WAN024GE8_at; Start 310; Stop 334
tctttccgaagtgggctggaagcca

SEQ ID NO: 241932 - DNA, 25 bp, Artificial
  probe
  misc_feature (1)..(25): SEQ ID NO: 5500; WAN024GE8_at; Start 114; Stop 138
tagtatcatccgacattatcgaatc

SEQ ID NO: 241933 - DNA, 25 bp, Artificial
  probe
  misc_feature (1)..(25): SEQ ID NO: 3924; WAN024GE9_at; Start 50; Stop 74
cagtcttaggtgatacgacacccag

SEQ ID NO: 241934 - DNA, 25 bp, Artificial
  probe
  misc_feature (1)..(25): SEQ ID NO: 3924; WAN024GE9_at; Start 148; Stop 172
gtaatatctaccttgtttgaaatca

SEQ ID NO: 241935 - DNA, 25 bp, Artificial
  probe
  misc_feature (1)..(25): SEQ ID NO: 3924; WAN024GE9_at; Start 76; Stop 100
gaaactttcatatatggaagggcaa

SEQ ID NO: 241936 - DNA, 25 bp, Artificial
  probe
  misc_feature (1)..(25): SEQ ID NO: 3924; WAN024GE9_at; Start 83; Stop 107
tcatatatggaagggcaaaatcaac

SEQ ID NO: 241937 - DNA, 25 bp, Artificial
  probe
  misc_feature (1)..(25): SEQ ID NO: 3924; WAN024GE9_at; Start 72; Stop 96
cagagaaactttcatatatggaagg

SEQ ID NO: 241938 - DNA, 25 bp, Artificial
  probe
  misc_feature (1)..(25): SEQ ID NO: 3924; WAN024GE9_at; Start 56; Stop 80
taggtgatacgacacccagagaaac

SEQ ID NO: 241939 - DNA, 25 bp, Artificial
  probe
  misc_feature (1)..(25): SEQ ID NO: 3924; WAN024GE9_at; Start 122; Stop 146
cgtcagttactgtaaagttagcaag

SEQ ID NO: 241940 - DNA, 25 bp, Artificial
  probe
  misc_feature (1)..(25): SEQ ID NO: 3924; WAN024GE9_at; Start 63; Stop 87
tacgacacccagagaaactttcata

SEQ ID NO: 241941 - DNA, 25 bp, Artificial
  probe
  misc_feature (1)..(25): SEQ ID NO: 3924; WAN024GE9_at; Start 45; Stop 69
gagaccagtcttaggtgatacgaca

SEQ ID NO: 241942 - DNA, 25 bp, Artificial
  probe
  misc_feature (1)..(25): SEQ ID NO: 3924; WAN024GE9_at; Start 16; Stop 40
ttaccttcaagttgtttgacgtctg

SEQ ID NO: 241943 - DNA, 25 bp, Artificial
  probe
  misc_feature (1)..(25): SEQ ID NO: 3924; WAN024GE9_at; Start 210; Stop 234
tttaaccttgacaccaaggtcttga

SEQ ID NO: 241944 - DNA, 25 bp, Artificial
  probe
  misc_feature (1)..(25): SEQ ID NO: 3924; WAN024GE9_at; Start 58; Stop 82
ggtgatacgacacccagagaaactt

SEQ ID NO: 241945 - DNA, 25 bp, Artificial
  probe
  misc_feature (1)..(25): SEQ ID NO: 3924; WAN024GE9_at; Start 61; Stop 85
gatacgacacccagagaaactttca

SEQ ID NO: 241946 - DNA, 25 bp, Artificial
  probe
  misc_feature (1)..(25): SEQ ID NO: 3924; WAN024GE9_at; Start 88; Stop 112
tatggaagggcaaaatcaacttgtt

SEQ ID NO: 241947 - DNA, 25 bp, Artificial
  probe
  misc_feature (1)..(25): SEQ ID NO: 3924; WAN024GE9_at; Start 28; Stop 52
tgtttgacgtctgtaatgagaccag

SEQ ID NO: 241948 - DNA, 25 bp, Artificial
  probe
  misc_feature (1)..(25): SEQ ID NO: 3924; WAN024GE9_at; Start 41; Stop 65
taatgagaccagtcttaggtgatac

SEQ ID NO: 241949 - DNA, 25 bp, Artificial
  probe
  misc_feature (1)..(25): SEQ ID NO: 3924; WAN024GE9_at; Start 204; Stop 228
aatgtatttaaccttgacaccaagg

SEQ ID NO: 241950 - DNA, 25 bp, Artificial
  probe
  misc_feature (1)..(25): SEQ ID NO: 3924; WAN024GE9_at; Start 80; Stop 104
ctttcatatatggaagggcaaaatc

SEQ ID NO: 241951 - DNA, 25 bp, Artificial
  probe
  misc_feature (1)..(25): SEQ ID NO: 3924; WAN024GE9_at; Start 104; Stop 128
caacttgtttcttacgttcgtcagt

SEQ ID NO: 241952 - DNA, 25 bp, Artificial
  probe
  misc_feature (1)..(25): SEQ ID NO: 3924; WAN024GE9_at; Start 165; Stop 189
tgaaatcaagtattccgcacggttg

SEQ ID NO: 241953 - DNA, 25 bp, Artificial
  probe
  misc_feature (1)..(25): SEQ ID NO: 3924; WAN024GE9_at; Start 161; Stop 185
tgtttgaaatcaagtattccgcacg

SEQ ID NO: 241954 - DNA, 25 bp, Artificial
  probe
  misc_feature (1)..(25): SEQ ID NO: 3924; WAN024GE9_at; Start 125; Stop 149
cagttactgtaaagttagcaagagt

SEQ ID NO: 241955 - DNA, 25 bp, Artificial
  probe
  misc_feature (1)..(25): SEQ ID NO: 3924; WAN024GE9_at; Start 114; Stop 138
cttacgttcgtcagttactgtaaag

SEQ ID NO: 241956 - DNA, 25 bp, Artificial
  probe
  misc_feature (1)..(25): SEQ ID NO: 3924; WAN024GE9_at; Start 191; Stop 215
cagcatcgactgaaatgtatttaac

SEQ ID NO: 241957 - DNA, 25 bp, Artificial
  probe
  misc_feature (1)..(25): SEQ ID NO: 3924; WAN024GE9_at; Start 197; Stop 221
cgactgaaatgtatttaaccttgac

SEQ ID NO: 241958 - DNA, 25 bp, Artificial
  probe
  misc_feature (1)..(25): SEQ ID NO: 3924; WAN024GE9_at; Start 109; Stop 133
tgtttcttacgttcgtcagttactg

SEQ ID NO: 241959 - DNA, 25 bp, Artificial
  probe
  misc_feature (1)..(25): SEQ ID NO: 3924; WAN024GE9_at; Start 33; Stop 57
gacgtctgtaatgagaccagtctta

SEQ ID NO: 241960 - DNA, 25 bp, Artificial
  probe
  misc_feature (1)..(25): SEQ ID NO: 3924; WAN024GE9_at; Start 135; Stop 159
aaagttagcaagagtaatatctacc

SEQ ID NO: 241961 - DNA, 25 bp, Artificial
  probe
  misc_feature (1)..(25): SEQ ID NO: 3924; WAN024GE9_at; Start 90; Stop 114
tggaagggcaaaatcaacttgtttc

SEQ ID NO: 241962 - DNA, 25 bp, Artificial
  probe
  misc_feature (1)..(25): SEQ ID NO: 3924; WAN024GE9_at; Start 47; Stop 71
gaccagtcttaggtgatacgacacc

SEQ ID NO: 241963 - DNA, 25 bp, Artificial
  probe
  misc_feature (1)..(25): SEQ ID NO: 3924; WAN024GE9_at; Start 37; Stop 61
tctgtaatgagaccagtcttaggtg

SEQ ID NO: 241964 - DNA, 25 bp, Artificial
  probe
  misc_feature (1)..(25): SEQ ID NO: 3924; WAN024GE9_at; Start 53; Stop 77
tcttaggtgatacgacacccagaga

SEQ ID NO: 241965 - DNA, 25 bp, Artificial
  probe
  misc_feature (1)..(25): SEQ ID NO: 3924; WAN024GE9_at; Start 23; Stop 47
caagttgtttgacgtctgtaatgag

SEQ ID NO: 241966 - DNA, 25 bp, Artificial
  probe
  misc_feature (1)..(25): SEQ ID NO: 3924; WAN024GE9_at; Start 142; Stop 166
gcaagagtaatatctaccttgtttg

SEQ ID NO: 241967 - DNA, 25 bp, Artificial
  probe
  misc_feature (1)..(25): SEQ ID NO: 860; WAN024GEA_at; Start 46; Stop 70
gcccttatctttatcactgcttgta

SEQ ID NO: 241968 - DNA, 25 bp, Artificial
  probe
  misc_feature (1)..(25): SEQ ID NO: 860; WAN024GEA_at; Start 809; Stop 833
ccaacctacggtgacgctgctaaag

SEQ ID NO: 241969 - DNA, 25 bp, Artificial
  probe
  misc_feature (1)..(25): SEQ ID NO: 860; WAN024GEA_at; Start 80; Stop 104
gaaacgctggttcatcctctggaaa

SEQ ID NO: 241970 - DNA, 25 bp, Artificial
  probe
  misc_feature (1)..(25): SEQ ID NO: 860; WAN024GEA_at; Start 277; Stop 301
taaatacatttcagtcgatgctgcc

SEQ ID NO: 241971 - DNA, 25 bp, Artificial
  probe
  misc_feature (1)..(25): SEQ ID NO: 860; WAN024GEA_at; Start 480; Stop 504
taattgtcacaaaaggaacgactgc

SEQ ID NO: 241972 - DNA, 25 bp, Artificial
  probe
  misc_feature (1)..(25): SEQ ID NO: 860; WAN024GEA_at; Start 436; Stop 460
gactggtctcattacagacgtcaaa

SEQ ID NO: 241973 - DNA, 25 bp, Artificial
  probe
  misc_feature (1)..(25): SEQ ID NO: 860; WAN024GEA_at; Start 421; Stop 445
tgtcgtatcacctaagactggtctc

SEQ ID NO: 241974 - DNA, 25 bp, Artificial
  probe
  misc_feature (1)..(25): SEQ ID NO: 860; WAN024GEA_at; Start 824; Stop 848
gctgctaaagcagatgacctggttg

SEQ ID NO: 241975 - DNA, 25 bp, Artificial
  probe
  misc_feature (1)..(25): SEQ ID NO: 860; WAN024GEA_at; Start 697; Stop 721
tgcggcagcagttcaaaaaggcaac

SEQ ID NO: 241976 - DNA, 25 bp, Artificial
  probe
  misc_feature (1)..(25): SEQ ID NO: 860; WAN024GEA_at; Start 99; Stop 123
tggaaaaacaactgccaaagctcgc

SEQ ID NO: 241977 - DNA, 25 bp, Artificial
  probe
  misc_feature (1)..(25): SEQ ID NO: 860; WAN024GEA_at; Start 202; Stop 226
aatgatggttcttaccaaggtacgc

SEQ ID NO: 241978 - DNA, 25 bp, Artificial
  probe
  misc_feature (1)..(25): SEQ ID NO: 860; WAN024GEA_at; Start 680; Stop 704
ggtgatcccgataccattgcggcag

SEQ ID NO: 241979 - DNA, 25 bp, Artificial
  probe
  misc_feature (1)..(25): SEQ ID NO: 860; WAN024GEA_at; Start 602; Stop 626
gccttttcaactgacaatacggaag

SEQ ID NO: 241980 - DNA, 25 bp, Artificial
  probe
  misc_feature (1)..(25): SEQ ID NO: 860; WAN024GEA_at; Start 615; Stop 639
acaatacggaagttctagcttgggc

SEQ ID NO: 241981 - DNA, 25 bp, Artificial
  probe
  misc_feature (1)..(25): SEQ ID NO: 860; WAN024GEA_at; Start 572; Stop 596
taccaagctcttcttgacggacgtg

SEQ ID NO: 241982 - DNA, 25 bp, Artificial
  probe
  misc_feature (1)..(25): SEQ ID NO: 860; WAN024GEA_at; Start 666; Stop 690
gaattacttccctcggtgatcccga

SEQ ID NO: 241983 - DNA, 25 bp, Artificial
  probe
  misc_feature (1)..(25): SEQ ID NO: 860; WAN024GEA_at; Start 156; Stop 180
gcgaatcgccgtgtttggagataaa

SEQ ID NO: 241984 - DNA, 25 bp, Artificial
  probe
  misc_feature (1)..(25): SEQ ID NO: 860; WAN024GEA_at; Start 450; Stop 474
cagacgtcaaacaacttgaaggtaa

SEQ ID NO: 241985 - DNA, 25 bp, Artificial
  probe
  misc_feature (1)..(25): SEQ ID NO: 860; WAN024GEA_at; Start 291; Stop 315
tcgatgctgccaaccgtgcggaata

SEQ ID NO: 241986 - DNA, 25 bp, Artificial
  probe
  misc_feature (1)..(25): SEQ ID NO: 860; WAN024GEA_at; Start 542; Stop 566
ctccaaaaatacgaccaatacagtg

SEQ ID NO: 241987 - DNA, 25 bp, Artificial
  probe
  misc_feature (1)..(25): SEQ ID NO: 860; WAN024GEA_at; Start 495; Stop 519
gaacgactgctgagacttattttga

SEQ ID NO: 241988 - DNA, 25 bp, Artificial
  probe
  misc_feature (1)..(25): SEQ ID NO: 860; WAN024GEA_at; Start 376; Stop 400
gaaacaagttgattttgcccttcca

SEQ ID NO: 241989 - DNA, 25 bp, Artificial
  probe
  misc_feature (1)..(25): SEQ ID NO: 860; WAN024GEA_at; Start 217; Stop 241
caaggtacgctacgatattgaacta

SEQ ID NO: 241990 - DNA, 25 bp, Artificial
  probe
  misc_feature (1)..(25): SEQ ID NO: 860; WAN024GEA_at; Start 182; Stop 206
aaccgtttggctacgttgacaatga

SEQ ID NO: 241991 - DNA, 25 bp, Artificial
  probe
  misc_feature (1)..(25): SEQ ID NO: 860; WAN024GEA_at; Start 557; Stop 581
caatacagtgactcttaccaagctc

SEQ ID NO: 241992 - DNA, 25 bp, Artificial
  probe
  misc_feature (1)..(25): SEQ ID NO: 860; WAN024GEA_at; Start 770; Stop 794
gaaaacttcttccacaaggcctatg

SEQ ID NO: 241993 - DNA, 25 bp, Artificial
  probe
  misc_feature (1)..(25): SEQ ID NO: 860; WAN024GEA_at; Start 347; Stop 371
gctaactttacagtaactgacgaac

SEQ ID NO: 241994 - DNA, 25 bp, Artificial
  probe
  misc_feature (1)..(25): SEQ ID NO: 860; WAN024GEA_at; Start 718; Stop 742
caaccaagaattgctagacttcatc

SEQ ID NO: 241995 - DNA, 25 bp, Artificial
  probe
  misc_feature (1)..(25): SEQ ID NO: 860; WAN024GEA_at; Start 406; Stop 430
gaaagtttctctgggtgtcgtatca

SEQ ID NO: 241996 - DNA, 25 bp, Artificial
  probe
  misc_feature (1)..(25): SEQ ID NO: 860; WAN024GEA_at; Start 60; Stop 84
cactgcttgtagctcaggtggaaac

SEQ ID NO: 241997 - DNA, 25 bp, Artificial
  probe
  misc_feature (1)..(25): SEQ ID NO: 860; WAN024GEA_at; Start 114; Stop 138
caaagctcgcactatcgatgaaatc

SEQ ID NO: 241998 - DNA, 25 bp, Artificial
  probe
  misc_feature (1)..(25): SEQ ID NO: 860; WAN024GEA_at; Start 587; Stop 611
gacggacgtggagatgccttttcaa

SEQ ID NO: 241999 - DNA, 25 bp, Artificial
  probe
  misc_feature (1)..(25): SEQ ID NO: 860; WAN024GEA_at; Start 362; Stop 386
actgacgaacgtaagaaacaagttg

SEQ ID NO: 242000 - DNA, 25 bp, Artificial
  probe
  misc_feature (1)..(25): SEQ ID NO: 860; WAN024GEA_at; Start 301; Stop 325
caaccgtgcggaatacttgatttca

SEQ ID NO: 242001 - DNA, 25 bp, Artificial
  probe
  misc_feature (1)..(25): SEQ ID NO: 1678; WAN024GEB_at; Start 105; Stop 129
gatctccaactgcaacaccagctgg

SEQ ID NO: 242002 - DNA, 25 bp, Artificial
  probe
  misc_feature (1)..(25): SEQ ID NO: 1678; WAN024GEB_at; Start 227; Stop 251
tcagctgtcttcttggcatagtgaa

SEQ ID NO: 242003 - DNA, 25 bp, Artificial
  probe
  misc_feature (1)..(25): SEQ ID NO: 1678; WAN024GEB_at; Start 255; Stop 279
cagactcttgcagactggtttggat

SEQ ID NO: 242004 - DNA, 25 bp, Artificial
  probe
  misc_feature (1)..(25): SEQ ID NO: 1678; WAN024GEB_at; Start 84; Stop 108
caggtgtcatgactcgtttttgatc

SEQ ID NO: 242005 - DNA, 25 bp, Artificial
  probe
  misc_feature (1)..(25): SEQ ID NO: 1678; WAN024GEB_at; Start 243; Stop 267
catagtgaatcacagactcttgcag

SEQ ID NO: 242006 - DNA, 25 bp, Artificial
  probe
  misc_feature (1)..(25): SEQ ID NO: 1678; WAN024GEB_at; Start 64; Stop 88
gccgatttgataggcatcagcaggt

SEQ ID NO: 242007 - DNA, 25 bp, Artificial
  probe
  misc_feature (1)..(25): SEQ ID NO: 1678; WAN024GEB_at; Start 248; Stop 272
tgaatcacagactcttgcagactgg

SEQ ID NO: 242008 - DNA, 25 bp, Artificial
  probe
  misc_feature (1)..(25): SEQ ID NO: 1678; WAN024GEB_at; Start 234; Stop 258
tcttcttggcatagtgaatcacaga

SEQ ID NO: 242009 - DNA, 25 bp, Artificial
  probe
  misc_feature (1)..(25): SEQ ID NO: 1678; WAN024GEB_at; Start 222; Stop 246
cagcttcagctgtcttcttggcata

SEQ ID NO: 242010 - DNA, 25 bp, Artificial
  probe
  misc_feature (1)..(25): SEQ ID NO: 1678; WAN024GEB_at; Start 178; Stop 202
gatgacttgtacttcctgagccgag

SEQ ID NO: 242011 - DNA, 25 bp, Artificial
  probe
  misc_feature (1)..(25): SEQ ID NO: 1678; WAN024GEB_at; Start 185; Stop 209
tgtacttcctgagccgagcaaacaa

SEQ ID NO: 242012 - DNA, 25 bp, Artificial
  probe
  misc_feature (1)..(25): SEQ ID NO: 1678; WAN024GEB_at; Start 111; Stop 135
caactgcaacaccagctggacgaat

SEQ ID NO: 242013 - DNA, 25 bp, Artificial
  probe
  misc_feature (1)..(25): SEQ ID NO: 1678; WAN024GEB_at; Start 277; Stop 301
gatattttgaaactcctgcatctga

SEQ ID NO: 242014 - DNA, 25 bp, Artificial
  probe
  misc_feature (1)..(25): SEQ ID NO: 1678; WAN024GEB_at; Start 77; Stop 101
gcatcagcaggtgtcatgactcgtt

SEQ ID NO: 242015 - DNA, 25 bp, Artificial
  probe
  misc_feature (1)..(25): SEQ ID NO: 1678; WAN024GEB_at; Start 138; Stop 162
ctggtgtcagacagataaaatctgg

SEQ ID NO: 242016 - DNA, 25 bp, Artificial
  probe
  misc_feature (1)..(25): SEQ ID NO: 1678; WAN024GEB_at; Start 49; Stop 73
tacgatatagtcactgccgatttga

SEQ ID NO: 242017 - DNA, 25 bp, Artificial
  probe
  misc_feature (1)..(25): SEQ ID NO: 1678; WAN024GEB_at; Start 191; Stop 215
tcctgagccgagcaaacaacaccat

SEQ ID NO: 242018 - DNA, 25 bp, Artificial
  probe
  misc_feature (1)..(25): SEQ ID NO: 1678; WAN024GEB_at; Start 94; Stop 118
gactcgtttttgatctccaactgca

SEQ ID NO: 242019 - DNA, 25 bp, Artificial
  probe
  misc_feature (1)..(25): SEQ ID NO: 1678; WAN024GEB_at; Start 37; Stop 61
gggacgtcccactacgatatagtca

SEQ ID NO: 242020 - DNA, 25 bp, Artificial
  probe
  misc_feature (1)..(25): SEQ ID NO: 1678; WAN024GEB_at; Start 213; Stop 237
catccaagccagcttcagctgtctt

SEQ ID NO: 242021 - DNA, 25 bp, Artificial
  probe
  misc_feature (1)..(25): SEQ ID NO: 1678; WAN024GEB_at; Start 168; Stop 192
tagcctgcttgatgacttgtacttc

SEQ ID NO: 242022 - DNA, 25 bp, Artificial
  probe
  misc_feature (1)..(25): SEQ ID NO: 1678; WAN024GEB_at; Start 264; Stop 288
gcagactggtttggatattttgaaa

SEQ ID NO: 242023 - DNA, 25 bp, Artificial
  probe
  misc_feature (1)..(25): SEQ ID NO: 1678; WAN024GEB_at; Start 31; Stop 55
ggtaatgggacgtcccactacgata

SEQ ID NO: 242024 - DNA, 25 bp, Artificial
  probe
  misc_feature (1)..(25): SEQ ID NO: 1678; WAN024GEB_at; Start 123; Stop 147
cagctggacgaatccctggtgtcag

SEQ ID NO: 242025 - DNA, 25 bp, Artificial
  probe
  misc_feature (1)..(25): SEQ ID NO: 1678; WAN024GEB_at; Start 56; Stop 80
tagtcactgccgatttgataggcat

SEQ ID NO: 242026 - DNA, 25 bp, Artificial
  probe
  misc_feature (1)..(25): SEQ ID NO: 1678; WAN024GEB_at; Start 21; Stop 45
cctcagcttgggtaatgggacgtcc

SEQ ID NO: 242027 - DNA, 25 bp, Artificial
  probe
  misc_feature (1)..(25): SEQ ID NO: 1678; WAN024GEB_at; Start 129; Stop 153
gacgaatccctggtgtcagacagat

SEQ ID NO: 242028 - DNA, 25 bp, Artificial
  probe
  misc_feature (1)..(25): SEQ ID NO: 1678; WAN024GEB_at; Start 200; Stop 224
gagcaaacaacaccatccaagccag

SEQ ID NO: 242029 - DNA, 25 bp, Artificial
  probe
  misc_feature (1)..(25): SEQ ID NO: 1678; WAN024GEB_at; Start 162; Stop 186
gattggtagcctgcttgatgacttg

SEQ ID NO: 242030 - DNA, 25 bp, Artificial
  probe
  misc_feature (1)..(25): SEQ ID NO: 1678; WAN024GEB_at; Start 285; Stop 309
gaaactcctgcatctgagcttctga

SEQ ID NO: 242031 - DNA, 25 bp, Artificial
  probe
  misc_feature (1)..(25): SEQ ID NO: 1678; WAN024GEB_at; Start 181; Stop 205
gacttgtacttcctgagccgagcaa

SEQ ID NO: 242032 - DNA, 25 bp, Artificial
  probe
  misc_feature (1)..(25): SEQ ID NO: 1678; WAN024GEB_at; Start 72; Stop 96
gataggcatcagcaggtgtcatgac

SEQ ID NO: 242033 - DNA, 25 bp, Artificial
  probe
  misc_feature (1)..(25): SEQ ID NO: 1678; WAN024GEB_at; Start 24; Stop 48
cagcttgggtaatgggacgtcccac

SEQ ID NO: 242034 - DNA, 25 bp, Artificial
  probe
  misc_feature (1)..(25): SEQ ID NO: 1678; WAN024GEB_at; Start 153; Stop 177
taaaatctggattggtagcctgctt

SEQ ID NO: 242035 - DNA, 25 bp, Artificial
  probe
  misc_feature (1)..(25): SEQ ID NO: 2032; WAN024GEC_at; Start 367; Stop 391
cagatgcaggagtttcaaaatatcc

SEQ ID NO: 242036 - DNA, 25 bp, Artificial
  probe
  misc_feature (1)..(25): SEQ ID NO: 2032; WAN024GEC_at; Start 94; Stop 118
tatctcaaggtagggatggagcttt

SEQ ID NO: 242037 - DNA, 25 bp, Artificial
  probe
  misc_feature (1)..(25): SEQ ID NO: 2032; WAN024GEC_at; Start 181; Stop 205
gatctcaaacttcatgacattccta

SEQ ID NO: 242038 - DNA, 25 bp, Artificial
  probe
  misc_feature (1)..(25): SEQ ID NO: 2032; WAN024GEC_at; Start 85; Stop 109
gaaagcctttatctcaaggtaggga

SEQ ID NO: 242039 - DNA, 25 bp, Artificial
  probe
  misc_feature (1)..(25): SEQ ID NO: 2032; WAN024GEC_at; Start 130; Stop 154
gggcctgagattgtgtcctacttaa

SEQ ID NO: 242040 - DNA, 25 bp, Artificial
  probe
  misc_feature (1)..(25): SEQ ID NO: 2032; WAN024GEC_at; Start 459; Stop 483
tgtttgctcggctcaggaagtacaa

SEQ ID NO: 242041 - DNA, 25 bp, Artificial
  probe
  misc_feature (1)..(25): SEQ ID NO: 2032; WAN024GEC_at; Start 489; Stop 513
caagcaggctaccaatccagatttt

SEQ ID NO: 242042 - DNA, 25 bp, Artificial
  probe
  misc_feature (1)..(25): SEQ ID NO: 2032; WAN024GEC_at; Start 466; Stop 490
tcggctcaggaagtacaagtcatca

SEQ ID NO: 242043 - DNA, 25 bp, Artificial
  probe
  misc_feature (1)..(25): SEQ ID NO: 2032; WAN024GEC_at; Start 683; Stop 707
ggacacaggactggaattaactaat

SEQ ID NO: 242044 - DNA, 25 bp, Artificial
  probe
  misc_feature (1)..(25): SEQ ID NO: 2032; WAN024GEC_at; Start 379; Stop 403
tttcaaaatatccaaaccagtctgc

SEQ ID NO: 242045 - DNA, 25 bp, Artificial
  probe
  misc_feature (1)..(25): SEQ ID NO: 2032; WAN024GEC_at; Start 669; Stop 693
catcaaggatgaatggacacaggac

SEQ ID NO: 242046 - DNA, 25 bp, Artificial
  probe
  misc_feature (1)..(25): SEQ ID NO: 2032; WAN024GEC_at; Start 582; Stop 606
tgctgatgcctatcaaatcggcagt

SEQ ID NO: 242047 - DNA, 25 bp, Artificial
  probe
  misc_feature (1)..(25): SEQ ID NO: 2032; WAN024GEC_at; Start 429; Stop 453
gaagacagctgaagctggcttggat

SEQ ID NO: 242048 - DNA, 25 bp, Artificial
  probe
  misc_feature (1)..(25): SEQ ID NO: 2032; WAN024GEC_at; Start 475; Stop 499
gaagtacaagtcatcaagcaggcta

SEQ ID NO: 242049 - DNA, 25 bp, Artificial
  probe
  misc_feature (1)..(25): SEQ ID NO: 2032; WAN024GEC_at; Start 561; Stop 585
tcaaaaacgagtcatgacacctgct

SEQ ID NO: 242050 - DNA, 25 bp, Artificial
  probe
  misc_feature (1)..(25): SEQ ID NO: 2032; WAN024GEC_at; Start 592; Stop 616
tatcaaatcggcagtgactatatcg

SEQ ID NO: 242051 - DNA, 25 bp, Artificial
  probe
  misc_feature (1)..(25): SEQ ID NO: 2032; WAN024GEC_at; Start 104; Stop 128
tagggatggagctttattacgcagc

SEQ ID NO: 242052 - DNA, 25 bp, Artificial
  probe
  misc_feature (1)..(25): SEQ ID NO: 2032; WAN024GEC_at; Start 166; Stop 190
catagtgtctttttggatctcaaac

SEQ ID NO: 242053 - DNA, 25 bp, Artificial
  probe
  misc_feature (1)..(25): SEQ ID NO: 2032; WAN024GEC_at; Start 76; Stop 100
ccagcagaagaaagcctttatctca

SEQ ID NO: 242054 - DNA, 25 bp, Artificial
  probe
  misc_feature (1)..(25): SEQ ID NO: 2032; WAN024GEC_at; Start 623; Stop 647
gacgtcccattacccaagctgagga

SEQ ID NO: 242055 - DNA, 25 bp, Artificial
  probe
  misc_feature (1)..(25): SEQ ID NO: 2032; WAN024GEC_at; Start 447; Stop 471
cttggatggtgttgtttgctcggct

SEQ ID NO: 242056 - DNA, 25 bp, Artificial
  probe
  misc_feature (1)..(25): SEQ ID NO: 2032; WAN024GEC_at; Start 135; Stop 159
tgagattgtgtcctacttaaaaggt

SEQ ID NO: 242057 - DNA, 25 bp, Artificial
  probe
  misc_feature (1)..(25): SEQ ID NO: 2032; WAN024GEC_at; Start 549; Stop 573
tgcagttggagatcaaaaacgagtc

SEQ ID NO: 242058 - DNA, 25 bp, Artificial
  probe
  misc_feature (1)..(25): SEQ ID NO: 2032; WAN024GEC_at; Start 508; Stop 532
gattttatctgtctgacaccaggga

SEQ ID NO: 242059 - DNA, 25 bp, Artificial
  probe
  misc_feature (1)..(25): SEQ ID NO: 2032; WAN024GEC_at; Start 569; Stop 593
gagtcatgacacctgctgatgccta

SEQ ID NO: 242060 - DNA, 25 bp, Artificial
  probe
  misc_feature (1)..(25): SEQ ID NO: 2032; WAN024GEC_at; Start 31; Stop 55
gattttcctagttttgaggcggtca

SEQ ID NO: 242061 - DNA, 25 bp, Artificial
  probe
  misc_feature (1)..(25): SEQ ID NO: 2032; WAN024GEC_at; Start 391; Stop 415
caaaccagtctgcaagagtctgtga

SEQ ID NO: 242062 - DNA, 25 bp, Artificial
  probe
  misc_feature (1)..(25): SEQ ID NO: 2032; WAN024GEC_at; Start 607; Stop 631
gactatatcgtagtgggacgtccca

SEQ ID NO: 242063 - DNA, 25 bp, Artificial
  probe
  misc_feature (1)..(25): SEQ ID NO: 2032; WAN024GEC_at; Start 421; Stop 445
tatgccaagaagacagctgaagctg

SEQ ID NO: 242064 - DNA, 25 bp, Artificial
  probe
  misc_feature (1)..(25): SEQ ID NO: 2032; WAN024GEC_at; Start 196; Stop 220
gacattcctaatacagtcaagtcag

SEQ ID NO: 242065 - DNA, 25 bp, Artificial
  probe
  misc_feature (1)..(25): SEQ ID NO: 2032; WAN024GEC_at; Start 44; Stop 68
ttgaggcggtcaaggaatttttagc

SEQ ID NO: 242066 - DNA, 25 bp, Artificial
  probe
  misc_feature (1)..(25): SEQ ID NO: 2032; WAN024GEC_at; Start 204; Stop 228
taatacagtcaagtcagccatgaag

SEQ ID NO: 242067 - DNA, 25 bp, Artificial
  probe
  misc_feature (1)..(25): SEQ ID NO: 2032; WAN024GEC_at; Start 521; Stop 545
tgacaccagggattcgtccagctgg

SEQ ID NO: 242068 - DNA, 25 bp, Artificial
  probe
  misc_feature (1)..(25): SEQ ID NO: 2032; WAN024GEC_at; Start 265; Stop 289
catgcggctggtggtgtagagatga

SEQ ID NO: 242069 - DNA, 25 bp, Artificial
  probe
  misc_feature (1)..(25): SEQ ID NO: 4967; WAN024GED_at; Start 108; Stop 132
tcgccaagagctcaaaaatcgtatt

SEQ ID NO: 242070 - DNA, 25 bp, Artificial
  probe
  misc_feature (1)..(25): SEQ ID NO: 4967; WAN024GED_at; Start 66; Stop 90
tagcttcacgaccaagcggcacaat

SEQ ID NO: 242071 - DNA, 25 bp, Artificial
  probe
  misc_feature (1)..(25): SEQ ID NO: 4967; WAN024GED_at; Start 35; Stop 59
taagctgcattttcaatctggtcac

SEQ ID NO: 242072 - DNA, 25 bp, Artificial
  probe
  misc_feature (1)..(25): SEQ ID NO: 4967; WAN024GED_at; Start 133; Stop 157
ggcaccacctcgtgtcacaacaata

SEQ ID NO: 242073 - DNA, 25 bp, Artificial
  probe
  misc_feature (1)..(25): SEQ ID NO: 4967; WAN024GED_at; Start 123; Stop 147
aaatcgtattggcaccacctcgtgt

SEQ ID NO: 242074 - DNA, 25 bp, Artificial
  probe
  misc_feature (1)..(25): SEQ ID NO: 4967; WAN024GED_at; Start 93; Stop 117
catgcaattttgctatcgccaagag

SEQ ID NO: 242075 - DNA, 25 bp, Artificial
  probe
  misc_feature (1)..(25): SEQ ID NO: 4967; WAN024GED_at; Start 62; Stop 86
cgactagcttcacgaccaagcggca

SEQ ID NO: 242076 - DNA, 25 bp, Artificial
  probe
  misc_feature (1)..(25): SEQ ID NO: 4967; WAN024GED_at; Start 30; Stop 54
caaagtaagctgcattttcaatctg

SEQ ID NO: 242077 - DNA, 25 bp, Artificial
  probe
  misc_feature (1)..(25): SEQ ID NO: 4967; WAN024GED_at; Start 189; Stop 213
cggtcacatagtcaacacgaaaaag

SEQ ID NO: 242078 - DNA, 25 bp, Artificial
  probe
  misc_feature (1)..(25): SEQ ID NO: 4967; WAN024GED_at; Start 44; Stop 68
ttttcaatctggtcaccacgactag

SEQ ID NO: 242079 - DNA, 25 bp, Artificial
  probe
  misc_feature (1)..(25): SEQ ID NO: 4967; WAN024GED_at; Start 83; Stop 107
ggcacaatgacatgcaattttgcta

SEQ ID NO: 242080 - DNA, 25 bp, Artificial
  probe
  misc_feature (1)..(25): SEQ ID NO: 4967; WAN024GED_at; Start 74; Stop 98
cgaccaagcggcacaatgacatgca

SEQ ID NO: 242081 - DNA, 25 bp, Artificial
  probe
  misc_feature (1)..(25): SEQ ID NO: 4967; WAN024GED_at; Start 49; Stop 73
aatctggtcaccacgactagcttca

SEQ ID NO: 242082 - DNA, 25 bp, Artificial
  probe
  misc_feature (1)..(25): SEQ ID NO: 4967; WAN024GED_at; Start 97; Stop 121
caattttgctatcgccaagagctca

SEQ ID NO: 242083 - DNA, 25 bp, Artificial
  probe
  misc_feature (1)..(25): SEQ ID NO: 4967; WAN024GED_at; Start 140; Stop 164
cctcgtgtcacaacaatatcagcca

SEQ ID NO: 242084 - DNA, 25 bp, Artificial
  probe
  misc_feature (1)..(25): SEQ ID NO: 4967; WAN024GED_at; Start 153; Stop 177
caatatcagccaattccatcaaggg

SEQ ID NO: 242085 - DNA, 25 bp, Artificial
  probe
  misc_feature (1)..(25): SEQ ID NO: 4967; WAN024GED_at; Start 127; Stop 151
cgtattggcaccacctcgtgtcaca

SEQ ID NO: 242086 - DNA, 25 bp, Artificial
  probe
  misc_feature (1)..(25): SEQ ID NO: 4967; WAN024GED_at; Start 117; Stop 141
gctcaaaaatcgtattggcaccacc

SEQ ID NO: 242087 - DNA, 25 bp, Artificial
  probe
  misc_feature (1)..(25): SEQ ID NO: 4967; WAN024GED_at; Start 78; Stop 102
caagcggcacaatgacatgcaattt

SEQ ID NO: 242088 - DNA, 25 bp, Artificial
  probe
  misc_feature (1)..(25): SEQ ID NO: 4967; WAN024GED_at; Start 183; Stop 207
agagatcggtcacatagtcaacacg

SEQ ID NO: 242089 - DNA, 25 bp, Artificial
  probe
  misc_feature (1)..(25): SEQ ID NO: 4967; WAN024GED_at; Start 172; Stop 196
caagggttgatagagatcggtcaca

SEQ ID NO: 242090 - DNA, 25 bp, Artificial
  probe
  misc_feature (1)..(25): SEQ ID NO: 4967; WAN024GED_at; Start 112; Stop 136
caagagctcaaaaatcgtattggca

SEQ ID NO: 242091 - DNA, 25 bp, Artificial
  probe
  misc_feature (1)..(25): SEQ ID NO: 4967; WAN024GED_at; Start 40; Stop 64
tgcattttcaatctggtcaccacga

SEQ ID NO: 242092 - DNA, 25 bp, Artificial
  probe
  misc_feature (1)..(25): SEQ ID NO: 4967; WAN024GED_at; Start 68; Stop 92
gcttcacgaccaagcggcacaatga

SEQ ID NO: 242093 - DNA, 25 bp, Artificial
  probe
  misc_feature (1)..(25): SEQ ID NO: 4967; WAN024GED_at; Start 159; Stop 183
cagccaattccatcaagggttgata

SEQ ID NO: 242094 - DNA, 25 bp, Artificial
  probe
  misc_feature (1)..(25): SEQ ID NO: 4967; WAN024GED_at; Start 180; Stop 204
gatagagatcggtcacatagtcaac

SEQ ID NO: 242095 - DNA, 25 bp, Artificial
  probe
  misc_feature (1)..(25): SEQ ID NO: 4967; WAN024GED_at; Start 104; Stop 128
gctatcgccaagagctcaaaaatcg

SEQ ID NO: 242096 - DNA, 25 bp, Artificial
  probe
  misc_feature (1)..(25): SEQ ID NO: 4967; WAN024GED_at; Start 143; Stop 167
cgtgtcacaacaatatcagccaatt

SEQ ID NO: 242097 - DNA, 25 bp, Artificial
  probe
  misc_feature (1)..(25): SEQ ID NO: 4967; WAN024GED_at; Start 156; Stop 180
tatcagccaattccatcaagggttg

SEQ ID NO: 242098 - DNA, 25 bp, Artificial
  probe
  misc_feature (1)..(25): SEQ ID NO: 4967; WAN024GED_at; Start 195; Stop 219
catagtcaacacgaaaaagattttg

SEQ ID NO: 242099 - DNA, 25 bp, Artificial
  probe
  misc_feature (1)..(25): SEQ ID NO: 4967; WAN024GED_at; Start 186; Stop 210
gatcggtcacatagtcaacacgaaa

SEQ ID NO: 242100 - DNA, 25 bp, Artificial
  probe
  misc_feature (1)..(25): SEQ ID NO: 4967; WAN024GED_at; Start 53; Stop 77
tggtcaccacgactagcttcacgac

SEQ ID NO: 242101 - DNA, 25 bp, Artificial
  probe
  misc_feature (1)..(25): SEQ ID NO: 4967; WAN024GED_at; Start 169; Stop 193
catcaagggttgatagagatcggtc

SEQ ID NO: 242102 - DNA, 25 bp, Artificial
  probe
  misc_feature (1)..(25): SEQ ID NO: 4967; WAN024GED_at; Start 120; Stop 144
caaaaatcgtattggcaccacctcg

SEQ ID NO: 242103 - DNA, 25 bp, Artificial
  probe
  misc_feature (1)..(25): SEQ ID NO: 5545; WAN024GEE_at; Start 258; Stop 282
ctcttcttcagccttcttttttaga

SEQ ID NO: 242104 - DNA, 25 bp, Artificial
  probe
  misc_feature (1)..(25): SEQ ID NO: 5545; WAN024GEE_at; Start 62; Stop 86
tagactctggttcttctttctcttc

SEQ ID NO: 242105 - DNA, 25 bp, Artificial
  probe
  misc_feature (1)..(25): SEQ ID NO: 5545; WAN024GEE_at; Start 27; Stop 51
tttagcaagctttttatcctgttcc

SEQ ID NO: 242106 - DNA, 25 bp, Artificial
  probe
  misc_feature (1)..(25): SEQ ID NO: 5545; WAN024GEE_at; Start 161; Stop 185
ctgtttcactctcctggtcctgttt

SEQ ID NO: 242107 - DNA, 25 bp, Artificial
  probe
  misc_feature (1)..(25): SEQ ID NO: 5545; WAN024GEE_at; Start 31; Stop 55
gcaagctttttatcctgttcctcct

SEQ ID NO: 242108 - DNA, 25 bp, Artificial
  probe
  misc_feature (1)..(25): SEQ ID NO: 5545; WAN024GEE_at; Start 229; Stop 253
tccttttccttctcctcagctagag

SEQ ID NO: 242109 - DNA, 25 bp, Artificial
  probe
  misc_feature (1)..(25): SEQ ID NO: 5545; WAN024GEE_at; Start 320; Stop 344
tcaattcttcgagggtttctttgtc

SEQ ID NO: 242110 - DNA, 25 bp, Artificial
  probe
  misc_feature (1)..(25): SEQ ID NO: 5545; WAN024GEE_at; Start 127; Stop 151
gactcttccttagctgattctgaat

SEQ ID NO: 242111 - DNA, 25 bp, Artificial
  probe
  misc_feature (1)..(25): SEQ ID NO: 5545; WAN024GEE_at; Start 41; Stop 65
tatcctgttcctccttctctttaga

SEQ ID NO: 242112 - DNA, 25 bp, Artificial
  probe
  misc_feature (1)..(25): SEQ ID NO: 5545; WAN024GEE_at; Start 108; Stop 132
ggatgctactttttcttcagactct

SEQ ID NO: 242113 - DNA, 25 bp, Artificial
  probe
  misc_feature (1)..(25): SEQ ID NO: 5545; WAN024GEE_at; Start 353; Stop 377
tcttatcttttgacatttactttcc

SEQ ID NO: 242114 - DNA, 25 bp, Artificial
  probe
  misc_feature (1)..(25): SEQ ID NO: 5545; WAN024GEE_at; Start 91; Stop 115
tctttgtcagcctctgaggatgcta

SEQ ID NO: 242115 - DNA, 25 bp, Artificial
  probe
  misc_feature (1)..(25): SEQ ID NO: 5545; WAN024GEE_at; Start 12; Stop 36
ttcctttgtagcctttttagcaagc

SEQ ID NO: 242116 - DNA, 25 bp, Artificial
  probe
  misc_feature (1)..(25): SEQ ID NO: 5545; WAN024GEE_at; Start 290; Stop 314
ggtttcgtttctgccattctgataa

SEQ ID NO: 242117 - DNA, 25 bp, Artificial
  probe
  misc_feature (1)..(25): SEQ ID NO: 5545; WAN024GEE_at; Start 187; Stop 211
tcctctgacttctcagattcttctc

SEQ ID NO: 242118 - DNA, 25 bp, Artificial
  probe
  misc_feature (1)..(25): SEQ ID NO: 5545; WAN024GEE_at; Start 310; Stop 334
gataactctttcaattcttcgaggg

SEQ ID NO: 242119 - DNA, 25 bp, Artificial
  probe
  misc_feature (1)..(25): SEQ ID NO: 5545; WAN024GEE_at; Start 299; Stop 323
tctgccattctgataactctttcaa

SEQ ID NO: 242120 - DNA, 25 bp, Artificial
  probe
  misc_feature (1)..(25): SEQ ID NO: 5545; WAN024GEE_at; Start 53; Stop 77
ccttctctttagactctggttcttc

SEQ ID NO: 242121 - DNA, 25 bp, Artificial
  probe
  misc_feature (1)..(25): SEQ ID NO: 5545; WAN024GEE_at; Start 381; Stop 405
tgataaatcttttttcaacaattga

SEQ ID NO: 242122 - DNA, 25 bp, Artificial
  probe
  misc_feature (1)..(25): SEQ ID NO: 5545; WAN024GEE_at; Start 202; Stop 226
gattcttctcccattcgagcttgtc

SEQ ID NO: 242123 - DNA, 25 bp, Artificial
  probe
  misc_feature (1)..(25): SEQ ID NO: 5545; WAN024GEE_at; Start 158; Stop 182
ggtctgtttcactctcctggtcctg

SEQ ID NO: 242124 - DNA, 25 bp, Artificial
  probe
  misc_feature (1)..(25): SEQ ID NO: 5545; WAN024GEE_at; Start 341; Stop 365
tgtcctcatttttcttatcttttga

SEQ ID NO: 242125 - DNA, 25 bp, Artificial
  probe
  misc_feature (1)..(25): SEQ ID NO: 5545; WAN024GEE_at; Start 325; Stop 349
tcttcgagggtttctttgtcctcat

SEQ ID NO: 242126 - DNA, 25 bp, Artificial
  probe
  misc_feature (1)..(25): SEQ ID NO: 5545; WAN024GEE_at; Start 118; Stop 142
ttttcttcagactcttccttagctg

SEQ ID NO: 242127 - DNA, 25 bp, Artificial
  probe
  misc_feature (1)..(25): SEQ ID NO: 5545; WAN024GEE_at; Start 148; Stop 172
gaatcttcctggtctgtttcactct

SEQ ID NO: 242128 - DNA, 25 bp, Artificial
  probe
  misc_feature (1)..(25): SEQ ID NO: 5545; WAN024GEE_at; Start 105; Stop 129
tgaggatgctactttttcttcagac

SEQ ID NO: 242129 - DNA, 25 bp, Artificial
  probe
  misc_feature (1)..(25): SEQ ID NO: 5545; WAN024GEE_at; Start 197; Stop 221
tctcagattcttctcccattcgagc

SEQ ID NO: 242130 - DNA, 25 bp, Artificial
  probe
  misc_feature (1)..(25): SEQ ID NO: 5545; WAN024GEE_at; Start 98; Stop 122
cagcctctgaggatgctactttttc

SEQ ID NO: 242131 - DNA, 25 bp, Artificial
  probe
  misc_feature (1)..(25): SEQ ID NO: 5545; WAN024GEE_at; Start 85; Stop 109
tctttctctttgtcagcctctgagg

SEQ ID NO: 242132 - DNA, 25 bp, Artificial
  probe
  misc_feature (1)..(25): SEQ ID NO: 5545; WAN024GEE_at; Start 213; Stop 237
cattcgagcttgtctttccttttcc

SEQ ID NO: 242133 - DNA, 25 bp, Artificial
  probe
  misc_feature (1)..(25): SEQ ID NO: 5545; WAN024GEE_at; Start 281; Stop 305
gatattcttggtttcgtttctgcca

SEQ ID NO: 242134 - DNA, 25 bp, Artificial
  probe
  misc_feature (1)..(25): SEQ ID NO: 5545; WAN024GEE_at; Start 139; Stop 163
gctgattctgaatcttcctggtctg

SEQ ID NO: 242135 - DNA, 25 bp, Artificial
  probe
  misc_feature (1)..(25): SEQ ID NO: 5545; WAN024GEE_at; Start 47; Stop 71
gttcctccttctctttagactctgg

SEQ ID NO: 242136 - DNA, 25 bp, Artificial
  probe
  misc_feature (1)..(25): SEQ ID NO: 5545; WAN024GEE_at; Start 267; Stop 291
agccttcttttttagatattcttgg

SEQ ID NO: 242137 - DNA, 25 bp, Artificial
  probe
  misc_feature (1)..(25): SEQ ID NO: 2968; WAN024GEF_at; Start 33; Stop 57
taatcgattacattgcagatgtaac

SEQ ID NO: 242138 - DNA, 25 bp, Artificial
  probe
  misc_feature (1)..(25): SEQ ID NO: 2968; WAN024GEF_at; Start 26; Stop 50
tattttgtaatcgattacattgcag

SEQ ID NO: 242139 - DNA, 25 bp, Artificial
  probe
  misc_feature (1)..(25): SEQ ID NO: 2968; WAN024GEF_at; Start 201; Stop 225
tcttgttttttctcagcttccttgg

SEQ ID NO: 242140 - DNA, 25 bp, Artificial
  probe
  misc_feature (1)..(25): SEQ ID NO: 2968; WAN024GEF_at; Start 165; Stop 189
cgattgctctcttcctcttgttttt

SEQ ID NO: 242141 - DNA, 25 bp, Artificial
  probe
  misc_feature (1)..(25): SEQ ID NO: 2968; WAN024GEF_at; Start 2; Stop 26
tgtgttaccttcttcatcaaaaatt

SEQ ID NO: 242142 - DNA, 25 bp, Artificial
  probe
  misc_feature (1)..(25): SEQ ID NO: 2968; WAN024GEF_at; Start 91; Stop 115
aaaacatggtcactaaagaactata

SEQ ID NO: 242143 - DNA, 25 bp, Artificial
  probe
  misc_feature (1)..(25): SEQ ID NO: 2968; WAN024GEF_at; Start 95; Stop 119
catggtcactaaagaactataagag

SEQ ID NO: 242144 - DNA, 25 bp, Artificial
  probe
  misc_feature (1)..(25): SEQ ID NO: 2968; WAN024GEF_at; Start 212; Stop 236
ctcagcttccttggcctcttgtttg

SEQ ID NO: 242145 - DNA, 25 bp, Artificial
  probe
  misc_feature (1)..(25): SEQ ID NO: 2968; WAN024GEF_at; Start 89; Stop 113
taaaaacatggtcactaaagaacta

SEQ ID NO: 242146 - DNA, 25 bp, Artificial
  probe
  misc_feature (1)..(25): SEQ ID NO: 2968; WAN024GEF_at; Start 162; Stop 186
tttcgattgctctcttcctcttgtt

SEQ ID NO: 242147 - DNA, 25 bp, Artificial
  probe
  misc_feature (1)..(25): SEQ ID NO: 2968; WAN024GEF_at; Start 46; Stop 70
tgcagatgtaacataaagaaaaaca

SEQ ID NO: 242148 - DNA, 25 bp, Artificial
  probe
  misc_feature (1)..(25): SEQ ID NO: 2968; WAN024GEF_at; Start 210; Stop 234
ttctcagcttccttggcctcttgtt

SEQ ID NO: 242149 - DNA, 25 bp, Artificial
  probe
  misc_feature (1)..(25): SEQ ID NO: 2968; WAN024GEF_at; Start 125; Stop 149
gtaaacctagcgacgcgatgaacgc

SEQ ID NO: 242150 - DNA, 25 bp, Artificial
  probe
  misc_feature (1)..(25): SEQ ID NO: 2968; WAN024GEF_at; Start 205; Stop 229
gttttttctcagcttccttggcctc

SEQ ID NO: 242151 - DNA, 25 bp, Artificial
  probe
  misc_feature (1)..(25): SEQ ID NO: 2968; WAN024GEF_at; Start 122; Stop 146
aaggtaaacctagcgacgcgatgaa

SEQ ID NO: 242152 - DNA, 25 bp, Artificial
  probe
  misc_feature (1)..(25): SEQ ID NO: 2968; WAN024GEF_at; Start 37; Stop 61
cgattacattgcagatgtaacataa

SEQ ID NO: 242153 - DNA, 25 bp, Artificial
  probe
  misc_feature (1)..(25): SEQ ID NO: 2968; WAN024GEF_at; Start 124; Stop 148
ggtaaacctagcgacgcgatgaacg

SEQ ID NO: 242154 - DNA, 25 bp, Artificial
  probe
  misc_feature (1)..(25): SEQ ID NO: 2968; WAN024GEF_at; Start 126; Stop 150
taaacctagcgacgcgatgaacgct

SEQ ID NO: 242155 - DNA, 25 bp, Artificial
  probe
  misc_feature (1)..(25): SEQ ID NO: 2968; WAN024GEF_at; Start 224; Stop 248
ggcctcttgtttggctttttcctca

SEQ ID NO: 242156 - DNA, 25 bp, Artificial
  probe
  misc_feature (1)..(25): SEQ ID NO: 2968; WAN024GEF_at; Start 31; Stop 55
tgtaatcgattacattgcagatgta

SEQ ID NO: 242157 - DNA, 25 bp, Artificial
  probe
  misc_feature (1)..(25): SEQ ID NO: 2968; WAN024GEF_at; Start 193; Stop 217
gttcttcttcttgttttttctcagc

SEQ ID NO: 242158 - DNA, 25 bp, Artificial
  probe
  misc_feature (1)..(25): SEQ ID NO: 2968; WAN024GEF_at; Start 101; Stop 125
cactaaagaactataagagaaaagg

SEQ ID NO: 242159 - DNA, 25 bp, Artificial
  probe
  misc_feature (1)..(25): SEQ ID NO: 2968; WAN024GEF_at; Start 4; Stop 28
tgttaccttcttcatcaaaaattat

SEQ ID NO: 242160 - DNA, 25 bp, Artificial
  probe
  misc_feature (1)..(25): SEQ ID NO: 2968; WAN024GEF_at; Start 120; Stop 144
aaaaggtaaacctagcgacgcgatg

SEQ ID NO: 242161 - DNA, 25 bp, Artificial
  probe
  misc_feature (1)..(25): SEQ ID NO: 2968; WAN024GEF_at; Start 170; Stop 194
gctctcttcctcttgttttttctgt

SEQ ID NO: 242162 - DNA, 25 bp, Artificial
  probe
  misc_feature (1)..(25): SEQ ID NO: 2968; WAN024GEF_at; Start 203; Stop 227
ttgttttttctcagcttccttggcc

SEQ ID NO: 242163 - DNA, 25 bp, Artificial
  probe
  misc_feature (1)..(25): SEQ ID NO: 2968; WAN024GEF_at; Start 97; Stop 121
tggtcactaaagaactataagagaa

SEQ ID NO: 242164 - DNA, 25 bp, Artificial
  probe
  misc_feature (1)..(25): SEQ ID NO: 2968; WAN024GEF_at; Start 93; Stop 117
aacatggtcactaaagaactataag

SEQ ID NO: 242165 - DNA, 25 bp, Artificial
  probe
  misc_feature (1)..(25): SEQ ID NO: 2968; WAN024GEF_at; Start 216; Stop 240
gcttccttggcctcttgtttggctt

SEQ ID NO: 242166 - DNA, 25 bp, Artificial
  probe
  misc_feature (1)..(25): SEQ ID NO: 2968; WAN024GEF_at; Start 226; Stop 250
cctcttgtttggctttttcctcagc

SEQ ID NO: 242167 - DNA, 25 bp, Artificial
  probe
  misc_feature (1)..(25): SEQ ID NO: 2968; WAN024GEF_at; Start 43; Stop 67
cattgcagatgtaacataaagaaaa

SEQ ID NO: 242168 - DNA, 25 bp, Artificial
  probe
  misc_feature (1)..(25): SEQ ID NO: 2968; WAN024GEF_at; Start 8; Stop 32
accttcttcatcaaaaattattttg

SEQ ID NO: 242169 - DNA, 25 bp, Artificial
  probe
  misc_feature (1)..(25): SEQ ID NO: 2968; WAN024GEF_at; Start 121; Stop 145
aaaggtaaacctagcgacgcgatga

SEQ ID NO: 242170 - DNA, 25 bp, Artificial
  probe
  misc_feature (1)..(25): SEQ ID NO: 2968; WAN024GEF_at; Start 208; Stop 232
ttttctcagcttccttggcctcttg

SEQ ID NO: 242171 - DNA, 25 bp, Artificial
  probe
  misc_feature (1)..(25): SEQ ID NO: 5208; WAN024GEG_at; Start 67; Stop 91
gcccctacagatggtgaatttttgg

SEQ ID NO: 242172 - DNA, 25 bp, Artificial
  probe
  misc_feature (1)..(25): SEQ ID NO: 5208; WAN024GEG_at; Start 52; Stop 76
attgaagaaatcgtagcccctacag

SEQ ID NO: 242173 - DNA, 25 bp, Artificial
  probe
  misc_feature (1)..(25): SEQ ID NO: 5208; WAN024GEG_at; Start 59; Stop 83
aaatcgtagcccctacagatggtga

SEQ ID NO: 242174 - DNA, 25 bp, Artificial
  probe
  misc_feature (1)..(25): SEQ ID NO: 5208; WAN024GEG_at; Start 126; Stop 150
aattggagtagcctgttgtctaact

SEQ ID NO: 242175 - DNA, 25 bp, Artificial
  probe
  misc_feature (1)..(25): SEQ ID NO: 5208; WAN024GEG_at; Start 12; Stop 36
ggtaacacatatgtcagatgaagta

SEQ ID NO: 242176 - DNA, 25 bp, Artificial
  probe
  misc_feature (1)..(25): SEQ ID NO: 5208; WAN024GEG_at; Start 68; Stop 92
cccctacagatggtgaatttttggg

SEQ ID NO: 242177 - DNA, 25 bp, Artificial
  probe
  misc_feature (1)..(25): SEQ ID NO: 5208; WAN024GEG_at; Start 51; Stop 75
aattgaagaaatcgtagcccctaca

SEQ ID NO: 242178 - DNA, 25 bp, Artificial
  probe
  misc_feature (1)..(25): SEQ ID NO: 5208; WAN024GEG_at; Start 116; Stop 140
tagttctcttaattggagtagcctg

SEQ ID NO: 242179 - DNA, 25 bp, Artificial
  probe
  misc_feature (1)..(25): SEQ ID NO: 5208; WAN024GEG_at; Start 5; Stop 29
tgaagaaggtaacacatatgtcaga

SEQ ID NO: 242180 - DNA, 25 bp, Artificial
  probe
  misc_feature (1)..(25): SEQ ID NO: 5208; WAN024GEG_at; Start 49; Stop 73
gaaattgaagaaatcgtagccccta

SEQ ID NO: 242181 - DNA, 25 bp, Artificial
  probe
  misc_feature (1)..(25): SEQ ID NO: 5208; WAN024GEG_at; Start 2; Stop 26
tgatgaagaaggtaacacatatgtc

SEQ ID NO: 242182 - DNA, 25 bp, Artificial
  probe
  misc_feature (1)..(25): SEQ ID NO: 5208; WAN024GEG_at; Start 65; Stop 89
tagcccctacagatggtgaattttt

SEQ ID NO: 242183 - DNA, 25 bp, Artificial
  probe
  misc_feature (1)..(25): SEQ ID NO: 5208; WAN024GEG_at; Start 113; Stop 137
gggtagttctcttaattggagtagc

SEQ ID NO: 242184 - DNA, 25 bp, Artificial
  probe
  misc_feature (1)..(25): SEQ ID NO: 5208; WAN024GEG_at; Start 62; Stop 86
tcgtagcccctacagatggtgaatt

SEQ ID NO: 242185 - DNA, 25 bp, Artificial
  probe
  misc_feature (1)..(25): SEQ ID NO: 5208; WAN024GEG_at; Start 19; Stop 43
catatgtcagatgaagtattcttat

SEQ ID NO: 242186 - DNA, 25 bp, Artificial
  probe
  misc_feature (1)..(25): SEQ ID NO: 5208; WAN024GEG_at; Start 9; Stop 33
gaaggtaacacatatgtcagatgaa

SEQ ID NO: 242187 - DNA, 25 bp, Artificial
  probe
  misc_feature (1)..(25): SEQ ID NO: 5208; WAN024GEG_at; Start 114; Stop 138
ggtagttctcttaattggagtagcc

SEQ ID NO: 242188 - DNA, 25 bp, Artificial
  probe
  misc_feature (1)..(25): SEQ ID NO: 5208; WAN024GEG_at; Start 60; Stop 84
aatcgtagcccctacagatggtgaa

SEQ ID NO: 242189 - DNA, 25 bp, Artificial
  probe
  misc_feature (1)..(25): SEQ ID NO: 5208; WAN024GEG_at; Start 64; Stop 88
gtagcccctacagatggtgaatttt

SEQ ID NO: 242190 - DNA, 25 bp, Artificial
  probe
  misc_feature (1)..(25): SEQ ID NO: 5208; WAN024GEG_at; Start 48; Stop 72
agaaattgaagaaatcgtagcccct

SEQ ID NO: 242191 - DNA, 25 bp, Artificial
  probe
  misc_feature (1)..(25): SEQ ID NO: 5208; WAN024GEG_at; Start 17; Stop 41
cacatatgtcagatgaagtattctt

SEQ ID NO: 242192 - DNA, 25 bp, Artificial
  probe
  misc_feature (1)..(25): SEQ ID NO: 5208; WAN024GEG_at; Start 66; Stop 90
agcccctacagatggtgaatttttg

SEQ ID NO: 242193 - DNA, 25 bp, Artificial
  probe
  misc_feature (1)..(25): SEQ ID NO: 5208; WAN024GEG_at; Start 63; Stop 87
cgtagcccctacagatggtgaattt

SEQ ID NO: 242194 - DNA, 25 bp, Artificial
  probe
  misc_feature (1)..(25): SEQ ID NO: 5208; WAN024GEG_at; Start 117; Stop 141
agttctcttaattggagtagcctgt

SEQ ID NO: 242195 - DNA, 25 bp, Artificial
  probe
  misc_feature (1)..(25): SEQ ID NO: 5208; WAN024GEG_at; Start 123; Stop 147
cttaattggagtagcctgttgtcta

SEQ ID NO: 242196 - DNA, 25 bp, Artificial
  probe
  misc_feature (1)..(25): SEQ ID NO: 5208; WAN024GEG_at; Start 10; Stop 34
aaggtaacacatatgtcagatgaag

SEQ ID NO: 242197 - DNA, 25 bp, Artificial
  probe
  misc_feature (1)..(25): SEQ ID NO: 5208; WAN024GEG_at; Start 7; Stop 31
aagaaggtaacacatatgtcagatg

SEQ ID NO: 242198 - DNA, 25 bp, Artificial
  probe
  misc_feature (1)..(25): SEQ ID NO: 5208; WAN024GEG_at; Start 121; Stop 145
ctcttaattggagtagcctgttgtc

SEQ ID NO: 242199 - DNA, 25 bp, Artificial
  probe
  misc_feature (1)..(25): SEQ ID NO: 5208; WAN024GEG_at; Start 26; Stop 50
cagatgaagtattcttatttgaaga

SEQ ID NO: 242200 - DNA, 25 bp, Artificial
  probe
  misc_feature (1)..(25): SEQ ID NO: 5208; WAN024GEG_at; Start 119; Stop 143
ttctcttaattggagtagcctgttg

SEQ ID NO: 242201 - DNA, 25 bp, Artificial
  probe
  misc_feature (1)..(25): SEQ ID NO: 5208; WAN024GEG_at; Start 54; Stop 78
tgaagaaatcgtagcccctacagat

SEQ ID NO: 242202 - DNA, 25 bp, Artificial
  probe
  misc_feature (1)..(25): SEQ ID NO: 5208; WAN024GEG_at; Start 129; Stop 153
tggagtagcctgttgtctaactaat

SEQ ID NO: 242203 - DNA, 25 bp, Artificial
  probe
  misc_feature (1)..(25): SEQ ID NO: 5208; WAN024GEG_at; Start 15; Stop 39
aacacatatgtcagatgaagtattc

SEQ ID NO: 242204 - DNA, 25 bp, Artificial
  probe
  misc_feature (1)..(25): SEQ ID NO: 5208; WAN024GEG_at; Start 53; Stop 77
ttgaagaaatcgtagcccctacaga

SEQ ID NO: 242205 - DNA, 25 bp, Artificial
  probe
  misc_feature (1)..(25): SEQ ID NO: 3992; WAN024GEH_at; Start 70; Stop 94
tcagctggacttgcaacaggtatcg

SEQ ID NO: 242206 - DNA, 25 bp, Artificial
  probe
  misc_feature (1)..(25): SEQ ID NO: 3992; WAN024GEH_at; Start 65; Stop 89
atttttcagctggacttgcaacagg

SEQ ID NO: 242207 - DNA, 25 bp, Artificial
  probe
  misc_feature (1)..(25): SEQ ID NO: 3992; WAN024GEH_at; Start 59; Stop 83
ttaatgatttttcagctggacttgc

SEQ ID NO: 242208 - DNA, 25 bp, Artificial
  probe
  misc_feature (1)..(25): SEQ ID NO: 3992; WAN024GEH_at; Start 66; Stop 90
tttttcagctggacttgcaacaggt

SEQ ID NO: 242209 - DNA, 25 bp, Artificial
  probe
  misc_feature (1)..(25): SEQ ID NO: 3992; WAN024GEH_at; Start 95; Stop 119
gatttggtttagcaatccttgctct

SEQ ID NO: 242210 - DNA, 25 bp, Artificial
  probe
  misc_feature (1)..(25): SEQ ID NO: 3992; WAN024GEH_at; Start 34; Stop 58
gaaattgaagaaatttcagtaccag

SEQ ID NO: 242211 - DNA, 25 bp, Artificial
  probe
  misc_feature (1)..(25): SEQ ID NO: 3992; WAN024GEH_at; Start 86; Stop 110
caggtatcggatttggtttagcaat

SEQ ID NO: 242212 - DNA, 25 bp, Artificial
  probe
  misc_feature (1)..(25): SEQ ID NO: 3992; WAN024GEH_at; Start 67; Stop 91
ttttcagctggacttgcaacaggta

SEQ ID NO: 242213 - DNA, 25 bp, Artificial
  probe
  misc_feature (1)..(25): SEQ ID NO: 3992; WAN024GEH_at; Start 104; Stop 128
tagcaatccttgctcttgctggttg

SEQ ID NO: 242214 - DNA, 25 bp, Artificial
  probe
  misc_feature (1)..(25): SEQ ID NO: 3992; WAN024GEH_at; Start 63; Stop 87
tgatttttcagctggacttgcaaca

SEQ ID NO: 242215 - DNA, 25 bp, Artificial
  probe
  misc_feature (1)..(25): SEQ ID NO: 3992; WAN024GEH_at; Start 69; Stop 93
ttcagctggacttgcaacaggtatc

SEQ ID NO: 242216 - DNA, 25 bp, Artificial
  probe
  misc_feature (1)..(25): SEQ ID NO: 3992; WAN024GEH_at; Start 92; Stop 116
tcggatttggtttagcaatccttgc

SEQ ID NO: 242217 - DNA, 25 bp, Artificial
  probe
  misc_feature (1)..(25): SEQ ID NO: 3992; WAN024GEH_at; Start 98; Stop 122
ttggtttagcaatccttgctcttgc

SEQ ID NO: 242218 - DNA, 25 bp, Artificial
  probe
  misc_feature (1)..(25): SEQ ID NO: 3992; WAN024GEH_at; Start 105; Stop 129
agcaatccttgctcttgctggttgt

SEQ ID NO: 242219 - DNA, 25 bp, Artificial
  probe
  misc_feature (1)..(25): SEQ ID NO: 3992; WAN024GEH_at; Start 64; Stop 88
gatttttcagctggacttgcaacag

SEQ ID NO: 242220 - DNA, 25 bp, Artificial
  probe
  misc_feature (1)..(25): SEQ ID NO: 3992; WAN024GEH_at; Start 3; Stop 27
gataatcatgcaagataacttttta

SEQ ID NO: 242221 - DNA, 25 bp, Artificial
  probe
  misc_feature (1)..(25): SEQ ID NO: 3992; WAN024GEH_at; Start 102; Stop 126
tttagcaatccttgctcttgctggt

SEQ ID NO: 242222 - DNA, 25 bp, Artificial
  probe
  misc_feature (1)..(25): SEQ ID NO: 3992; WAN024GEH_at; Start 43; Stop 67
gaaatttcagtaccagttaatgatt

SEQ ID NO: 242223 - DNA, 25 bp, Artificial
  probe
  misc_feature (1)..(25): SEQ ID NO: 3992; WAN024GEH_at; Start 60; Stop 84
taatgatttttcagctggacttgca

SEQ ID NO: 242224 - DNA, 25 bp, Artificial
  probe
  misc_feature (1)..(25): SEQ ID NO: 3992; WAN024GEH_at; Start 88; Stop 112
ggtatcggatttggtttagcaatcc

SEQ ID NO: 242225 - DNA, 25 bp, Artificial
  probe
  misc_feature (1)..(25): SEQ ID NO: 3992; WAN024GEH_at; Start 68; Stop 92
tttcagctggacttgcaacaggtat

SEQ ID NO: 242226 - DNA, 25 bp, Artificial
  probe
  misc_feature (1)..(25): SEQ ID NO: 3992; WAN024GEH_at; Start 52; Stop 76
gtaccagttaatgatttttcagctg

SEQ ID NO: 242227 - DNA, 25 bp, Artificial
  probe
  misc_feature (1)..(25): SEQ ID NO: 3992; WAN024GEH_at; Start 50; Stop 74
cagtaccagttaatgatttttcagc

SEQ ID NO: 242228 - DNA, 25 bp, Artificial
  probe
  misc_feature (1)..(25): SEQ ID NO: 3992; WAN024GEH_at; Start 26; Stop 50
tatttgaggaaattgaagaaatttc

SEQ ID NO: 242229 - DNA, 25 bp, Artificial
  probe
  misc_feature (1)..(25): SEQ ID NO: 3992; WAN024GEH_at; Start 40; Stop 64
gaagaaatttcagtaccagttaatg

SEQ ID NO: 242230 - DNA, 25 bp, Artificial
  probe
  misc_feature (1)..(25): SEQ ID NO: 3992; WAN024GEH_at; Start 101; Stop 125
gtttagcaatccttgctcttgctgg

SEQ ID NO: 242231 - DNA, 25 bp, Artificial
  probe
  misc_feature (1)..(25): SEQ ID NO: 3992; WAN024GEH_at; Start 12; Stop 36
gcaagataactttttatttgaggaa

SEQ ID NO: 242232 - DNA, 25 bp, Artificial
  probe
  misc_feature (1)..(25): SEQ ID NO: 3992; WAN024GEH_at; Start 61; Stop 85
aatgatttttcagctggacttgcaa

SEQ ID NO: 242233 - DNA, 25 bp, Artificial
  probe
  misc_feature (1)..(25): SEQ ID NO: 3992; WAN024GEH_at; Start 56; Stop 80
cagttaatgatttttcagctggact

SEQ ID NO: 242234 - DNA, 25 bp, Artificial
  probe
  misc_feature (1)..(25): SEQ ID NO: 3992; WAN024GEH_at; Start 94; Stop 118
ggatttggtttagcaatccttgctc

SEQ ID NO: 242235 - DNA, 25 bp, Artificial
  probe
  misc_feature (1)..(25): SEQ ID NO: 3992; WAN024GEH_at; Start 81; Stop 105
tgcaacaggtatcggatttggttta

SEQ ID NO: 242236 - DNA, 25 bp, Artificial
  probe
  misc_feature (1)..(25): SEQ ID NO: 3992; WAN024GEH_at; Start 1; Stop 25
gtgataatcatgcaagataactttt

SEQ ID NO: 242237 - DNA, 25 bp, Artificial
  probe
  misc_feature (1)..(25): SEQ ID NO: 3992; WAN024GEH_at; Start 83; Stop 107
caacaggtatcggatttggtttagc

SEQ ID NO: 242238 - DNA, 25 bp, Artificial
  probe
  misc_feature (1)..(25): SEQ ID NO: 3992; WAN024GEH_at; Start 85; Stop 109
acaggtatcggatttggtttagcaa

SEQ ID NO: 242239 - DNA, 25 bp, Artificial
  probe
  misc_feature (1)..(25): SEQ ID NO: 1009; WAN024GEI_at; Start 94; Stop 118
gaaatttcttcaatttcctcaaata

SEQ ID NO: 242240 - DNA, 25 bp, Artificial
  probe
  misc_feature (1)..(25): SEQ ID NO: 1009; WAN024GEI_at; Start 33; Stop 57
gattgctaaaccaaatccgatacct

SEQ ID NO: 242241 - DNA, 25 bp, Artificial
  probe
  misc_feature (1)..(25): SEQ ID NO: 1009; WAN024GEI_at; Start 109; Stop 133
tcctcaaataaaaagttatcttgca

SEQ ID NO: 242242 - DNA, 25 bp, Artificial
  probe
  misc_feature (1)..(25): SEQ ID NO: 1009; WAN024GEI_at; Start 169; Stop 193
ctccaattaagagaactaccccagt

SEQ ID NO: 242243 - DNA, 25 bp, Artificial
  probe
  misc_feature (1)..(25): SEQ ID NO: 1009; WAN024GEI_at; Start 165; Stop 189
gctactccaattaagagaactaccc

SEQ ID NO: 242244 - DNA, 25 bp, Artificial
  probe
  misc_feature (1)..(25): SEQ ID NO: 1009; WAN024GEI_at; Start 162; Stop 186
caggctactccaattaagagaacta

SEQ ID NO: 242245 - DNA, 25 bp, Artificial
  probe
  misc_feature (1)..(25): SEQ ID NO: 1009; WAN024GEI_at; Start 148; Stop 172
tatctttttaacaacaggctactcc

SEQ ID NO: 242246 - DNA, 25 bp, Artificial
  probe
  misc_feature (1)..(25): SEQ ID NO: 1009; WAN024GEI_at; Start 159; Stop 183
caacaggctactccaattaagagaa

SEQ ID NO: 242247 - DNA, 25 bp, Artificial
  probe
  misc_feature (1)..(25): SEQ ID NO: 1009; WAN024GEI_at; Start 39; Stop 63
taaaccaaatccgatacctgttgca

SEQ ID NO: 242248 - DNA, 25 bp, Artificial
  probe
  misc_feature (1)..(25): SEQ ID NO: 1009; WAN024GEI_at; Start 141; Stop 165
cactccctatctttttaacaacagg

SEQ ID NO: 242249 - DNA, 25 bp, Artificial
  probe
  misc_feature (1)..(25): SEQ ID NO: 1009; WAN024GEI_at; Start 16; Stop 40
caaccagcaagagcaaggattgcta

SEQ ID NO: 242250 - DNA, 25 bp, Artificial
  probe
  misc_feature (1)..(25): SEQ ID NO: 1009; WAN024GEI_at; Start 207; Stop 231
tcccccaaaaattcaccatctgtag

SEQ ID NO: 242251 - DNA, 25 bp, Artificial
  probe
  misc_feature (1)..(25): SEQ ID NO: 1009; WAN024GEI_at; Start 9; Stop 33
acttcaacaaccagcaagagcaagg

SEQ ID NO: 242252 - DNA, 25 bp, Artificial
  probe
  misc_feature (1)..(25): SEQ ID NO: 1009; WAN024GEI_at; Start 123; Stop 147
gttatcttgcatgattatcactccc

SEQ ID NO: 242253 - DNA, 25 bp, Artificial
  probe
  misc_feature (1)..(25): SEQ ID NO: 1009; WAN024GEI_at; Start 50; Stop 74
cgatacctgttgcaagtccagctga

SEQ ID NO: 242254 - DNA, 25 bp, Artificial
  probe
  misc_feature (1)..(25): SEQ ID NO: 1009; WAN024GEI_at; Start 13; Stop 37
caacaaccagcaagagcaaggattg

SEQ ID NO: 242255 - DNA, 25 bp, Artificial
  probe
  misc_feature (1)..(25): SEQ ID NO: 1009; WAN024GEI_at; Start 22; Stop 46
gcaagagcaaggattgctaaaccaa

SEQ ID NO: 242256 - DNA, 25 bp, Artificial
  probe
  misc_feature (1)..(25): SEQ ID NO: 1009; WAN024GEI_at; Start 130; Stop 154
tgcatgattatcactccctatcttt

SEQ ID NO: 242257 - DNA, 25 bp, Artificial
  probe
  misc_feature (1)..(25): SEQ ID NO: 1009; WAN024GEI_at; Start 6; Stop 30
caaacttcaacaaccagcaagagca

SEQ ID NO: 242258 - DNA, 25 bp, Artificial
  probe
  misc_feature (1)..(25): SEQ ID NO: 1009; WAN024GEI_at; Start 51; Stop 75
gatacctgttgcaagtccagctgaa

SEQ ID NO: 242259 - DNA, 25 bp, Artificial
  probe
  misc_feature (1)..(25): SEQ ID NO: 1009; WAN024GEI_at; Start 119; Stop 143
aaaagttatcttgcatgattatcac

SEQ ID NO: 242260 - DNA, 25 bp, Artificial
  probe
  misc_feature (1)..(25): SEQ ID NO: 1009; WAN024GEI_at; Start 11; Stop 35
ttcaacaaccagcaagagcaaggat

SEQ ID NO: 242261 - DNA, 25 bp, Artificial
  probe
  misc_feature (1)..(25): SEQ ID NO: 1009; WAN024GEI_at; Start 2; Stop 26
tgaacaaacttcaacaaccagcaag

SEQ ID NO: 242262 - DNA, 25 bp, Artificial
  probe
  misc_feature (1)..(25): SEQ ID NO: 1009; WAN024GEI_at; Start 156; Stop 180
taacaacaggctactccaattaaga

SEQ ID NO: 242263 - DNA, 25 bp, Artificial
  probe
  misc_feature (1)..(25): SEQ ID NO: 1009; WAN024GEI_at; Start 37; Stop 61
gctaaaccaaatccgatacctgttg

SEQ ID NO: 242264 - DNA, 25 bp, Artificial
  probe
  misc_feature (1)..(25): SEQ ID NO: 1009; WAN024GEI_at; Start 53; Stop 77
tacctgttgcaagtccagctgaaaa

SEQ ID NO: 242265 - DNA, 25 bp, Artificial
  probe
  misc_feature (1)..(25): SEQ ID NO: 1009; WAN024GEI_at; Start 35; Stop 59
ttgctaaaccaaatccgatacctgt

SEQ ID NO: 242266 - DNA, 25 bp, Artificial
  probe
  misc_feature (1)..(25): SEQ ID NO: 1009; WAN024GEI_at; Start 57; Stop 81
tgttgcaagtccagctgaaaaatca

SEQ ID NO: 242267 - DNA, 25 bp, Artificial
  probe
  misc_feature (1)..(25): SEQ ID NO: 1009; WAN024GEI_at; Start 150; Stop 174
tctttttaacaacaggctactccaa

SEQ ID NO: 242268 - DNA, 25 bp, Artificial
  probe
  misc_feature (1)..(25): SEQ ID NO: 1009; WAN024GEI_at; Start 28; Stop 52
gcaaggattgctaaaccaaatccga

SEQ ID NO: 242269 - DNA, 25 bp, Artificial
  probe
  misc_feature (1)..(25): SEQ ID NO: 1009; WAN024GEI_at; Start 83; Stop 107
taactggtactgaaatttcttcaat

SEQ ID NO: 242270 - DNA, 25 bp, Artificial
  probe
  misc_feature (1)..(25): SEQ ID NO: 1009; WAN024GEI_at; Start 19; Stop 43
ccagcaagagcaaggattgctaaac

SEQ ID NO: 242271 - DNA, 25 bp, Artificial
  probe
  misc_feature (1)..(25): SEQ ID NO: 1009; WAN024GEI_at; Start 55; Stop 79
cctgttgcaagtccagctgaaaaat

SEQ ID NO: 242272 - DNA, 25 bp, Artificial
  probe
  misc_feature (1)..(25): SEQ ID NO: 1009; WAN024GEI_at; Start 26; Stop 50
gagcaaggattgctaaaccaaatcc

SEQ ID NO: 242273 - DNA, 25 bp, Artificial
  probe
  misc_feature (1)..(25): SEQ ID NO: 2817; WAN024GEJ_at; Start 1138; Stop 1162
cagaaaaaacaagaggaagagagca

SEQ ID NO: 242274 - DNA, 25 bp, Artificial
  probe
  misc_feature (1)..(25): SEQ ID NO: 2817; WAN024GEJ_at; Start 650; Stop 674
ctaagttcactattaaggtcaagga

SEQ ID NO: 242275 - DNA, 25 bp, Artificial
  probe
  misc_feature (1)..(25): SEQ ID NO: 2817; WAN024GEJ_at; Start 348; Stop 372
tacaaaggaaaaaccagccaaagca

SEQ ID NO: 242276 - DNA, 25 bp, Artificial
  probe
  misc_feature (1)..(25): SEQ ID NO: 2817; WAN024GEJ_at; Start 494; Stop 518
gaacggtgcaaactacagctgatga

SEQ ID NO: 242277 - DNA, 25 bp, Artificial
  probe
  misc_feature (1)..(25): SEQ ID NO: 2817; WAN024GEJ_at; Start 558; Stop 582
gattaaccttctgctagacaaggca

SEQ ID NO: 242278 - DNA, 25 bp, Artificial
  probe
  misc_feature (1)..(25): SEQ ID NO: 2817; WAN024GEJ_at; Start 669; Stop 693
caaggaatatgatattgtggcctac

SEQ ID NO: 242279 - DNA, 25 bp, Artificial
  probe
  misc_feature (1)..(25): SEQ ID NO: 2817; WAN024GEJ_at; Start 604; Stop 628
tctaactattgggttgaatcagctc

SEQ ID NO: 242280 - DNA, 25 bp, Artificial
  probe
  misc_feature (1)..(25): SEQ ID NO: 2817; WAN024GEJ_at; Start 1051; Stop 1075
tacactgtggcggataaattaatta

SEQ ID NO: 242281 - DNA, 25 bp, Artificial
  probe
  misc_feature (1)..(25): SEQ ID NO: 2817; WAN024GEJ_at; Start 187; Stop 211
caggaccaggagagtgaaacagacc

SEQ ID NO: 242282 - DNA, 25 bp, Artificial
  probe
  misc_feature (1)..(25): SEQ ID NO: 2817; WAN024GEJ_at; Start 574; Stop 598
gacaaggcaaaatatgaaaagcaga

SEQ ID NO: 242283 - DNA, 25 bp, Artificial
  probe
  misc_feature (1)..(25): SEQ ID NO: 2817; WAN024GEJ_at; Start 729; Stop 753
cagtggtcagcttgagactagttct

SEQ ID NO: 242284 - DNA, 25 bp, Artificial
  probe
  misc_feature (1)..(25): SEQ ID NO: 2817; WAN024GEJ_at; Start 116; Stop 140
ctctagctgaggagaaggaaaagga

SEQ ID NO: 242285 - DNA, 25 bp, Artificial
  probe
  misc_feature (1)..(25): SEQ ID NO: 2817; WAN024GEJ_at; Start 219; Stop 243
ttcagaatcagctaaggaagagtct

SEQ ID NO: 242286 - DNA, 25 bp, Artificial
  probe
  misc_feature (1)..(25): SEQ ID NO: 2817; WAN024GEJ_at; Start 541; Stop 565
caggattcggattatacgattaacc

SEQ ID NO: 242287 - DNA, 25 bp, Artificial
  probe
  misc_feature (1)..(25): SEQ ID NO: 2817; WAN024GEJ_at; Start 244; Stop 268
gaagaaaaagtagcatcctcagagg

SEQ ID NO: 242288 - DNA, 25 bp, Artificial
  probe
  misc_feature (1)..(25): SEQ ID NO: 2817; WAN024GEJ_at; Start 375; Stop 399
gattcctggtatccatatcttgcga

SEQ ID NO: 242289 - DNA, 25 bp, Artificial
  probe
  misc_feature (1)..(25): SEQ ID NO: 2817; WAN024GEJ_at; Start 685; Stop 709
gtggcctactatatttctggtgaaa

SEQ ID NO: 242290 - DNA, 25 bp, Artificial
  probe
  misc_feature (1)..(25): SEQ ID NO: 2817; WAN024GEJ_at; Start 202; Stop 226
gaaacagaccaggaagattcagaat

SEQ ID NO: 242291 - DNA, 25 bp, Artificial
  probe
  misc_feature (1)..(25): SEQ ID NO: 2817; WAN024GEJ_at; Start 480; Stop 504
tattcgtgttgagggaacggtgcaa

SEQ ID NO: 242292 - DNA, 25 bp, Artificial
  probe
  misc_feature (1)..(25): SEQ ID NO: 2817; WAN024GEJ_at; Start 128; Stop 152
agaaggaaaaggaaagacaagctcg

SEQ ID NO: 242293 - DNA, 25 bp, Artificial
  probe
  misc_feature (1)..(25): SEQ ID NO: 2817; WAN024GEJ_at; Start 889; Stop 913
ccaagcaaggtgacatccgatttaa

SEQ ID NO: 242294 - DNA, 25 bp, Artificial
  probe
  misc_feature (1)..(25): SEQ ID NO: 2817; WAN024GEJ_at; Start 619; Stop 643
gaatcagctcaacttgtctatcaat

SEQ ID NO: 242295 - DNA, 25 bp, Artificial
  probe
  misc_feature (1)..(25): SEQ ID NO: 2817; WAN024GEJ_at; Start 463; Stop 487
tatgcgaccatgaaagatattcgtg

SEQ ID NO: 242296 - DNA, 25 bp, Artificial
  probe
  misc_feature (1)..(25): SEQ ID NO: 2817; WAN024GEJ_at; Start 840; Stop 864
tcaaattagcccagaactcaaggcg

SEQ ID NO: 242297 - DNA, 25 bp, Artificial
  probe
  misc_feature (1)..(25): SEQ ID NO: 2817; WAN024GEJ_at; Start 526; Stop 550
caggcttcaggcattcaggattcgg

SEQ ID NO: 242298 - DNA, 25 bp, Artificial
  probe
  misc_feature (1)..(25): SEQ ID NO: 2817; WAN024GEJ_at; Start 404; Stop 428
tcacgattttatttccaagtctgct

SEQ ID NO: 242299 - DNA, 25 bp, Artificial
  probe
  misc_feature (1)..(25): SEQ ID NO: 2817; WAN024GEJ_at; Start 56; Stop 80
tatcagaatggcagaaacgaaacca

SEQ ID NO: 242300 - DNA, 25 bp, Artificial
  probe
  misc_feature (1)..(25): SEQ ID NO: 2817; WAN024GEJ_at; Start 36; Stop 60
cctcgaagaattgaaagagttatca

SEQ ID NO: 242301 - DNA, 25 bp, Artificial
  probe
  misc_feature (1)..(25): SEQ ID NO: 2817; WAN024GEJ_at; Start 362; Stop 386
cagccaaagcaaagattcctggtat

SEQ ID NO: 242302 - DNA, 25 bp, Artificial
  probe
  misc_feature (1)..(25): SEQ ID NO: 2817; WAN024GEJ_at; Start 304; Stop 328
tctaaagagaaggaggaacaggata

SEQ ID NO: 242303 - DNA, 25 bp, Artificial
  probe
  misc_feature (1)..(25): SEQ ID NO: 2817; WAN024GEJ_at; Start 513; Stop 537
tgatgatattcgacaggcttcaggc

SEQ ID NO: 242304 - DNA, 25 bp, Artificial
  probe
  misc_feature (1)..(25): SEQ ID NO: 2817; WAN024GEJ_at; Start 448; Stop 472
tacttgctcagtccttatgcgacca

SEQ ID NO: 242305 - DNA, 25 bp, Artificial
  probe
  misc_feature (1)..(25): SEQ ID NO: 2817; WAN024GEJ_at; Start 715; Stop 739
tatcctattctttccagtggtcagc

SEQ ID NO: 242306 - DNA, 25 bp, Artificial
  probe
  misc_feature (1)..(25): SEQ ID NO: 2817; WAN024GEJ_at; Start 825; Stop 849
tgtctcagaacttgctcaaattagc

SEQ ID NO: 242307 - DNA, 25 bp, Artificial
  probe
  misc_feature (1)..(25): SEQ ID NO: 628; WAN024GEK_at; Start 137; Stop 161
tccttaagtcaggtttggatgtcac

SEQ ID NO: 242308 - DNA, 25 bp, Artificial
  probe
  misc_feature (1)..(25): SEQ ID NO: 628; WAN024GEK_at; Start 895; Stop 919
tatgcagaagaccttcaagaaagcg

SEQ ID NO: 242309 - DNA, 25 bp, Artificial
  probe
  misc_feature (1)..(25): SEQ ID NO: 628; WAN024GEK_at; Start 969; Stop 993
caaggaagattaccaagctaagatg

SEQ ID NO: 242310 - DNA, 25 bp, Artificial
  probe
  misc_feature (1)..(25): SEQ ID NO: 628; WAN024GEK_at; Start 746; Stop 770
aattggctgatattgttgtgacacg

SEQ ID NO: 242311 - DNA, 25 bp, Artificial
  probe
  misc_feature (1)..(25): SEQ ID NO: 628; WAN024GEK_at; Start 793; Stop 817
gagctcttggcgatagcaaaattgc

SEQ ID NO: 242312 - DNA, 25 bp, Artificial
  probe
  misc_feature (1)..(25): SEQ ID NO: 628; WAN024GEK_at; Start 806; Stop 830
tagcaaaattgcatgtcattgtgcc

SEQ ID NO: 242313 - DNA, 25 bp, Artificial
  probe
  misc_feature (1)..(25): SEQ ID NO: 628; WAN024GEK_at; Start 637; Stop 661
acagagcgctacaatattatcaatc

SEQ ID NO: 242314 - DNA, 25 bp, Artificial
  probe
  misc_feature (1)..(25): SEQ ID NO: 628; WAN024GEK_at; Start 304; Stop 328
ggctttgtctcagtaccgcctgtta

SEQ ID NO: 242315 - DNA, 25 bp, Artificial
  probe
  misc_feature (1)..(25): SEQ ID NO: 628; WAN024GEK_at; Start 607; Stop 631
caattggtgacagaccataagaaag

SEQ ID NO: 242316 - DNA, 25 bp, Artificial
  probe
  misc_feature (1)..(25): SEQ ID NO: 628; WAN024GEK_at; Start 347; Stop 371
gagtgcctgtctttattcacgaatc

SEQ ID NO: 242317 - DNA, 25 bp, Artificial
  probe
  misc_feature (1)..(25): SEQ ID NO: 628; WAN024GEK_at; Start 32; Stop 56
cggttggacacgttaccctcaatct

SEQ ID NO: 242318 - DNA, 25 bp, Artificial
  probe
  misc_feature (1)..(25): SEQ ID NO: 628; WAN024GEK_at; Start 706; Stop 730
cgtgttgactatgtgaccgatctct

SEQ ID NO: 242319 - DNA, 25 bp, Artificial
  probe
  misc_feature (1)..(25): SEQ ID NO: 628; WAN024GEK_at; Start 363; Stop 387
tcacgaatctgacctgtctatgggc

SEQ ID NO: 242320 - DNA, 25 bp, Artificial
  probe
  misc_feature (1)..(25): SEQ ID NO: 628; WAN024GEK_at; Start 188; Stop 212
tgcgtcgctatttctcttggcaaaa

SEQ ID NO: 242321 - DNA, 25 bp, Artificial
  probe
  misc_feature (1)..(25): SEQ ID NO: 628; WAN024GEK_at; Start 563; Stop 587
ctgtattgtttgttggcggttctgc

SEQ ID NO: 242322 - DNA, 25 bp, Artificial
  probe
  misc_feature (1)..(25): SEQ ID NO: 628; WAN024GEK_at; Start 959; Stop 983
tactaagtcacaaggaagattacca

SEQ ID NO: 242323 - DNA, 25 bp, Artificial
  probe
  misc_feature (1)..(25): SEQ ID NO: 628; WAN024GEK_at; Start 116; Stop 140
gtggtatcgaacaccaagaaatcct

SEQ ID NO: 242324 - DNA, 25 bp, Artificial
  probe
  misc_feature (1)..(25): SEQ ID NO: 628; WAN024GEK_at; Start 415; Stop 439
gcgactaagatgtattcaacctttg

SEQ ID NO: 242325 - DNA, 25 bp, Artificial
  probe
  misc_feature (1)..(25): SEQ ID NO: 628; WAN024GEK_at; Start 335; Stop 359
cgcgtgtgtcaggagtgcctgtctt

SEQ ID NO: 242326 - DNA, 25 bp, Artificial
  probe
  misc_feature (1)..(25): SEQ ID NO: 628; WAN024GEK_at; Start 837; Stop 861
tcgtgaagctagtcgtggtgaccag

SEQ ID NO: 242327 - DNA, 25 bp, Artificial
  probe
  misc_feature (1)..(25): SEQ ID NO: 628; WAN024GEK_at; Start 403; Stop 427
gcctataaatttgcgactaagatgt

SEQ ID NO: 242328 - DNA, 25 bp, Artificial
  probe
  misc_feature (1)..(25): SEQ ID NO: 628; WAN024GEK_at; Start 1002; Stop 1026
taaggaattgaaatctctagcagat

SEQ ID NO: 242329 - DNA, 25 bp, Artificial
  probe
  misc_feature (1)..(25): SEQ ID NO: 628; WAN024GEK_at; Start 911; Stop 935
aagaaagcgatttgaccttggatag

SEQ ID NO: 242330 - DNA, 25 bp, Artificial
  probe
  misc_feature (1)..(25): SEQ ID NO: 628; WAN024GEK_at; Start 717; Stop 741
tgtgaccgatctctatcaacccttg

SEQ ID NO: 242331 - DNA, 25 bp, Artificial
  probe
  misc_feature (1)..(25): SEQ ID NO: 628; WAN024GEK_at; Start 250; Stop 274
caatcgctctttatcatgttgcgac

SEQ ID NO: 242332 - DNA, 25 bp, Artificial
  probe
  misc_feature (1)..(25): SEQ ID NO: 628; WAN024GEK_at; Start 507; Stop 531
tccagaaccagatgaattggtggat

SEQ ID NO: 242333 - DNA, 25 bp, Artificial
  probe
  misc_feature (1)..(25): SEQ ID NO: 628; WAN024GEK_at; Start 622; Stop 646
cataagaaagaactaacagagcgct

SEQ ID NO: 242334 - DNA, 25 bp, Artificial
  probe
  misc_feature (1)..(25): SEQ ID NO: 628; WAN024GEK_at; Start 75; Stop 99
catcgaagatggttgggaagtccac

SEQ ID NO: 242335 - DNA, 25 bp, Artificial
  probe
  misc_feature (1)..(25): SEQ ID NO: 628; WAN024GEK_at; Start 926; Stop 950
ccttggatagtttggaagagaagct

SEQ ID NO: 242336 - DNA, 25 bp, Artificial
  probe
  misc_feature (1)..(25): SEQ ID NO: 628; WAN024GEK_at; Start 592; Stop 616
gctcgtgtctttaaccaattggtga

SEQ ID NO: 242337 - DNA, 25 bp, Artificial
  probe
  misc_feature (1)..(25): SEQ ID NO: 628; WAN024GEK_at; Start 206; Stop 230
ggcaaaatatgctggacgtcttcaa

SEQ ID NO: 242338 - DNA, 25 bp, Artificial
  probe
  misc_feature (1)..(25): SEQ ID NO: 628; WAN024GEK_at; Start 780; Stop 804
caatacgatttttgagctcttggcg

SEQ ID NO: 242339 - DNA, 25 bp, Artificial
  probe
  misc_feature (1)..(25): SEQ ID NO: 628; WAN024GEK_at; Start 943; Stop 967
gagaagctttctcacttactaagtc

SEQ ID NO: 242340 - DNA, 25 bp, Artificial
  probe
  misc_feature (1)..(25): SEQ ID NO: 628; WAN024GEK_at; Start 381; Stop 405
tatgggcttggccaataaaatcgcc

SEQ ID NO: 242341 - DNA, 25 bp, Artificial
  probe
  misc_feature (1)..(25): SEQ ID NO: 918; WAN024GEL_at; Start 420; Stop 444
tggtcttttatcagggaatatcggc

SEQ ID NO: 242342 - DNA, 25 bp, Artificial
  probe
  misc_feature (1)..(25): SEQ ID NO: 918; WAN024GEL_at; Start 609; Stop 633
tgtagcagccaagtggaatatccag

SEQ ID NO: 242343 - DNA, 25 bp, Artificial
  probe
  misc_feature (1)..(25): SEQ ID NO: 918; WAN024GEL_at; Start 1249; Stop 1273
gatgtggttcttcttagtcctgcca

SEQ ID NO: 242344 - DNA, 25 bp, Artificial
  probe
  misc_feature (1)..(25): SEQ ID NO: 918; WAN024GEL_at; Start 855; Stop 879
gactattgctgtagccaagcttcgt

SEQ ID NO: 242345 - DNA, 25 bp, Artificial
  probe
  misc_feature (1)..(25): SEQ ID NO: 918; WAN024GEL_at; Start 364; Stop 388
ggtaagacaaccacaacgactatga

SEQ ID NO: 242346 - DNA, 25 bp, Artificial
  probe
  misc_feature (1)..(25): SEQ ID NO: 918; WAN024GEL_at; Start 811; Stop 835
gaaatcggtgttccaggtagccaca

SEQ ID NO: 242347 - DNA, 25 bp, Artificial
  probe
  misc_feature (1)..(25): SEQ ID NO: 918; WAN024GEL_at; Start 627; Stop 651
tatccagaacaagatgacagcagct

SEQ ID NO: 242348 - DNA, 25 bp, Artificial
  probe
  misc_feature (1)..(25): SEQ ID NO: 918; WAN024GEL_at; Start 1197; Stop 1221
gacagatattgcagatgcgacccgc

SEQ ID NO: 242349 - DNA, 25 bp, Artificial
  probe
  misc_feature (1)..(25): SEQ ID NO: 918; WAN024GEL_at; Start 44; Stop 68
taggtttggccaagtctggtgaatc

SEQ ID NO: 242350 - DNA, 25 bp, Artificial
  probe
  misc_feature (1)..(25): SEQ ID NO: 918; WAN024GEL_at; Start 258; Stop 282
tcccatgattgaaaaggctttggcc

SEQ ID NO: 242351 - DNA, 25 bp, Artificial
  probe
  misc_feature (1)..(25): SEQ ID NO: 918; WAN024GEL_at; Start 882; Stop 906
tgtggacaatcaaaccatcaaggaa

SEQ ID NO: 242352 - DNA, 25 bp, Artificial
  probe
  misc_feature (1)..(25): SEQ ID NO: 918; WAN024GEL_at; Start 170; Stop 194
tcaaggtcattacaggtggccatcc

SEQ ID NO: 242353 - DNA, 25 bp, Artificial
  probe
  misc_feature (1)..(25): SEQ ID NO: 918; WAN024GEL_at; Start 1024; Stop 1048
tcaggatttgacaacagcaaggtcg

SEQ ID NO: 242354 - DNA, 25 bp, Artificial
  probe
  misc_feature (1)..(25): SEQ ID NO: 918; WAN024GEL_at; Start 904; Stop 928
gaaactctttcagccttcggtggtg

SEQ ID NO: 242355 - DNA, 25 bp, Artificial
  probe
  misc_feature (1)..(25): SEQ ID NO: 918; WAN024GEL_at; Start 939; Stop 963
tctccagtttgtggatgacatcaag

SEQ ID NO: 242356 - DNA, 25 bp, Artificial
  probe
  misc_feature (1)..(25): SEQ ID NO: 918; WAN024GEL_at; Start 323; Stop 347
tgatttcagaagcaccgattattgg

SEQ ID NO: 242357 - DNA, 25 bp, Artificial
  probe
  misc_feature (1)..(25): SEQ ID NO: 918; WAN024GEL_at; Start 834; Stop 858
caatgtggaaaatgcccttgcgact

SEQ ID NO: 242358 - DNA, 25 bp, Artificial
  probe
  misc_feature (1)..(25): SEQ ID NO: 918; WAN024GEL_at; Start 1122; Stop 1146
gatggtcatcctgggtcaatctgca

SEQ ID NO: 242359 - DNA, 25 bp, Artificial
  probe
  misc_feature (1)..(25): SEQ ID NO: 918; WAN024GEL_at; Start 153; Stop 177
tttgctggaagaagggatcaaggtc

SEQ ID NO: 242360 - DNA, 25 bp, Artificial
  probe
  misc_feature (1)..(25): SEQ ID NO: 918; WAN024GEL_at; Start 766; Stop 790
gatggtcaactctacttccgtggtg

SEQ ID NO: 242361 - DNA, 25 bp, Artificial
  probe
  misc_feature (1)..(25): SEQ ID NO: 918; WAN024GEL_at; Start 184; Stop 208
ggtggccatcctttggaactcttgg

SEQ ID NO: 242362 - DNA, 25 bp, Artificial
  probe
  misc_feature (1)..(25): SEQ ID NO: 918; WAN024GEL_at; Start 797; Stop 821
tcatggcagcgaatgaaatcggtgt

SEQ ID NO: 242363 - DNA, 25 bp, Artificial
  probe
  misc_feature (1)..(25): SEQ ID NO: 918; WAN024GEL_at; Start 514; Stop 538
caactcatgggtgttcaagaattcc

SEQ ID NO: 242364 - DNA, 25 bp, Artificial
  probe
  misc_feature (1)..(25): SEQ ID NO: 918; WAN024GEL_at; Start 1065; Stop 1089
tttggaccgtggcaatgagtttgac

SEQ ID NO: 242365 - DNA, 25 bp, Artificial
  probe
  misc_feature (1)..(25): SEQ ID NO: 918; WAN024GEL_at; Start 1182; Stop 1206
cgcttatgtggaggcgacagatatt

SEQ ID NO: 242366 - DNA, 25 bp, Artificial
  probe
  misc_feature (1)..(25): SEQ ID NO: 918; WAN024GEL_at; Start 1137; Stop 1161
tcaatctgcagaacgtgtcaaacgg

SEQ ID NO: 242367 - DNA, 25 bp, Artificial
  probe
  misc_feature (1)..(25): SEQ ID NO: 918; WAN024GEL_at; Start 1049; Stop 1073
tcttgattgcaggtggtttggaccg

SEQ ID NO: 242368 - DNA, 25 bp, Artificial
  probe
  misc_feature (1)..(25): SEQ ID NO: 918; WAN024GEL_at; Start 348; Stop 372
tatcacaggatcgaacggtaagaca

SEQ ID NO: 242369 - DNA, 25 bp, Artificial
  probe
  misc_feature (1)..(25): SEQ ID NO: 918; WAN024GEL_at; Start 782; Stop 806
tccgtggtgaagtagtcatggcagc

SEQ ID NO: 242370 - DNA, 25 bp, Artificial
  probe
  misc_feature (1)..(25): SEQ ID NO: 918; WAN024GEL_at; Start 1291; Stop 1315
tatgctaactttgaagtacgtggcg

SEQ ID NO: 242371 - DNA, 25 bp, Artificial
  probe
  misc_feature (1)..(25): SEQ ID NO: 918; WAN024GEL_at; Start 293; Stop 317
cagtcttgactgaggtggaattggc

SEQ ID NO: 242372 - DNA, 25 bp, Artificial
  probe
  misc_feature (1)..(25): SEQ ID NO: 918; WAN024GEL_at; Start 922; Stop 946
ggtggtgtcaaacaccgtctccagt

SEQ ID NO: 242373 - DNA, 25 bp, Artificial
  probe
  misc_feature (1)..(25): SEQ ID NO: 918; WAN024GEL_at; Start 1315; Stop 1339
gacctctttatcgacacagtagcgg

SEQ ID NO: 242374 - DNA, 25 bp, Artificial
  probe
  misc_feature (1)..(25): SEQ ID NO: 918; WAN024GEL_at; Start 1152; Stop 1176
tgtcaaacgggcagcagacaaggct

SEQ ID NO: 242375 - DNA, 25 bp, Artificial
  probe
  misc_feature (1)..(25): SEQ ID NO: 4266; WAN024GEM_at; Start 55; Stop 79
cctttacataaagagcttgttcttc

SEQ ID NO: 242376 - DNA, 25 bp, Artificial
  probe
  misc_feature (1)..(25): SEQ ID NO: 4266; WAN024GEM_at; Start 16; Stop 40
cattttttccttgtggattggcaaa

SEQ ID NO: 242377 - DNA, 25 bp, Artificial
  probe
  misc_feature (1)..(25): SEQ ID NO: 4266; WAN024GEM_at; Start 83; Stop 107
gattgcttccttggcaaaggcatac

SEQ ID NO: 242378 - DNA, 25 bp, Artificial
  probe
  misc_feature (1)..(25): SEQ ID NO: 4266; WAN024GEM_at; Start 49; Stop 73
gattatcctttacataaagagcttg

SEQ ID NO: 242379 - DNA, 25 bp, Artificial
  probe
  misc_feature (1)..(25): SEQ ID NO: 4266; WAN024GEM_at; Start 222; Stop 246
tggtaagacgtcaaacctgtcttaa

SEQ ID NO: 242380 - DNA, 25 bp, Artificial
  probe
  misc_feature (1)..(25): SEQ ID NO: 4266; WAN024GEM_at; Start 106; Stop 130
accacttgctctgattttctgtatc

SEQ ID NO: 242381 - DNA, 25 bp, Artificial
  probe
  misc_feature (1)..(25): SEQ ID NO: 4266; WAN024GEM_at; Start 216; Stop 240
aatcgttggtaagacgtcaaacctg

SEQ ID NO: 242382 - DNA, 25 bp, Artificial
  probe
  misc_feature (1)..(25): SEQ ID NO: 4266; WAN024GEM_at; Start 91; Stop 115
ccttggcaaaggcataccacttgct

SEQ ID NO: 242383 - DNA, 25 bp, Artificial
  probe
  misc_feature (1)..(25): SEQ ID NO: 4266; WAN024GEM_at; Start 86; Stop 110
tgcttccttggcaaaggcataccac

SEQ ID NO: 242384 - DNA, 25 bp, Artificial
  probe
  misc_feature (1)..(25): SEQ ID NO: 4266; WAN024GEM_at; Start 95; Stop 119
ggcaaaggcataccacttgctctga

SEQ ID NO: 242385 - DNA, 25 bp, Artificial
  probe
  misc_feature (1)..(25): SEQ ID NO: 4266; WAN024GEM_at; Start 37; Stop 61
caaaatggagcagattatcctttac

SEQ ID NO: 242386 - DNA, 25 bp, Artificial
  probe
  misc_feature (1)..(25): SEQ ID NO: 4266; WAN024GEM_at; Start 72; Stop 96
tgttcttcttcgattgcttccttgg

SEQ ID NO: 242387 - DNA, 25 bp, Artificial
  probe
  misc_feature (1)..(25): SEQ ID NO: 4266; WAN024GEM_at; Start 64; Stop 88
aaagagcttgttcttcttcgattgc

SEQ ID NO: 242388 - DNA, 25 bp, Artificial
  probe
  misc_feature (1)..(25): SEQ ID NO: 4266; WAN024GEM_at; Start 181; Stop 205
cctgccatgcttgttttgaaatttc

SEQ ID NO: 242389 - DNA, 25 bp, Artificial
  probe
  misc_feature (1)..(25): SEQ ID NO: 4266; WAN024GEM_at; Start 9; Stop 33
ccctgttcattttttccttgtggat

SEQ ID NO: 242390 - DNA, 25 bp, Artificial
  probe
  misc_feature (1)..(25): SEQ ID NO: 4266; WAN024GEM_at; Start 125; Stop 149
tgtatcttttcctctatcacctaag

SEQ ID NO: 242391 - DNA, 25 bp, Artificial
  probe
  misc_feature (1)..(25): SEQ ID NO: 4266; WAN024GEM_at; Start 27; Stop 51
tgtggattggcaaaatggagcagat

SEQ ID NO: 242392 - DNA, 25 bp, Artificial
  probe
  misc_feature (1)..(25): SEQ ID NO: 4266; WAN024GEM_at; Start 219; Stop 243
cgttggtaagacgtcaaacctgtct

SEQ ID NO: 242393 - DNA, 25 bp, Artificial
  probe
  misc_feature (1)..(25): SEQ ID NO: 4266; WAN024GEM_at; Start 200; Stop 224
aatttcaagttctttcaatcgttgg

SEQ ID NO: 242394 - DNA, 25 bp, Artificial
  probe
  misc_feature (1)..(25): SEQ ID NO: 4266; WAN024GEM_at; Start 184; Stop 208
gccatgcttgttttgaaatttcaag

SEQ ID NO: 242395 - DNA, 25 bp, Artificial
  probe
  misc_feature (1)..(25): SEQ ID NO: 4266; WAN024GEM_at; Start 1; Stop 25
gtgtctctccctgttcattttttcc

SEQ ID NO: 242396 - DNA, 25 bp, Artificial
  probe
  misc_feature (1)..(25): SEQ ID NO: 4266; WAN024GEM_at; Start 33; Stop 57
ttggcaaaatggagcagattatcct

SEQ ID NO: 242397 - DNA, 25 bp, Artificial
  probe
  misc_feature (1)..(25): SEQ ID NO: 4266; WAN024GEM_at; Start 211; Stop 235
ctttcaatcgttggtaagacgtcaa

SEQ ID NO: 242398 - DNA, 25 bp, Artificial
  probe
  misc_feature (1)..(25): SEQ ID NO: 4266; WAN024GEM_at; Start 112; Stop 136
tgctctgattttctgtatcttttcc

SEQ ID NO: 242399 - DNA, 25 bp, Artificial
  probe
  misc_feature (1)..(25): SEQ ID NO: 4266; WAN024GEM_at; Start 102; Stop 126
gcataccacttgctctgattttctg

SEQ ID NO: 242400 - DNA, 25 bp, Artificial
  probe
  misc_feature (1)..(25): SEQ ID NO: 4266; WAN024GEM_at; Start 130; Stop 154
cttttcctctatcacctaagccaaa

SEQ ID NO: 242401 - DNA, 25 bp, Artificial
  probe
  misc_feature (1)..(25): SEQ ID NO: 4266; WAN024GEM_at; Start 204; Stop 228
tcaagttctttcaatcgttggtaag

SEQ ID NO: 242402 - DNA, 25 bp, Artificial
  probe
  misc_feature (1)..(25): SEQ ID NO: 4266; WAN024GEM_at; Start 97; Stop 121
caaaggcataccacttgctctgatt

SEQ ID NO: 242403 - DNA, 25 bp, Artificial
  probe
  misc_feature (1)..(25): SEQ ID NO: 4266; WAN024GEM_at; Start 23; Stop 47
tccttgtggattggcaaaatggagc

SEQ ID NO: 242404 - DNA, 25 bp, Artificial
  probe
  misc_feature (1)..(25): SEQ ID NO: 4266; WAN024GEM_at; Start 214; Stop 238
tcaatcgttggtaagacgtcaaacc

SEQ ID NO: 242405 - DNA, 25 bp, Artificial
  probe
  misc_feature (1)..(25): SEQ ID NO: 4266; WAN024GEM_at; Start 78; Stop 102
tcttcgattgcttccttggcaaagg

SEQ ID NO: 242406 - DNA, 25 bp, Artificial
  probe
  misc_feature (1)..(25): SEQ ID NO: 4266; WAN024GEM_at; Start 80; Stop 104
ttcgattgcttccttggcaaaggca

SEQ ID NO: 242407 - DNA, 25 bp, Artificial
  probe
  misc_feature (1)..(25): SEQ ID NO: 4266; WAN024GEM_at; Start 31; Stop 55
gattggcaaaatggagcagattatc

SEQ ID NO: 242408 - DNA, 25 bp, Artificial
  probe
  misc_feature (1)..(25): SEQ ID NO: 4266; WAN024GEM_at; Start 89; Stop 113
ttccttggcaaaggcataccacttg

SEQ ID NO: 242409 - DNA, 25 bp, Artificial
  probe
  misc_feature (1)..(25): SEQ ID NO: 1070; WAN024GEN_at; Start 1691; Stop 1715
aaacagcaactttaatcttaggagc

SEQ ID NO: 242410 - DNA, 25 bp, Artificial
  probe
  misc_feature (1)..(25): SEQ ID NO: 1070; WAN024GEN_at; Start 1646; Stop 1670
aaggaagaagtgtttatctaactcg

SEQ ID NO: 242411 - DNA, 25 bp, Artificial
  probe
  misc_feature (1)..(25): SEQ ID NO: 1070; WAN024GEN_at; Start 1766; Stop 1790
tatatttcgagcaattccgccgaga

SEQ ID NO: 242412 - DNA, 25 bp, Artificial
  probe
  misc_feature (1)..(25): SEQ ID NO: 1070; WAN024GEN_at; Start 290; Stop 314
tccaagaagctagccaagaaagtcg

SEQ ID NO: 242413 - DNA, 25 bp, Artificial
  probe
  misc_feature (1)..(25): SEQ ID NO: 1070; WAN024GEN_at; Start 919; Stop 943
tcttaccaacgattgaaagaacttg

SEQ ID NO: 242414 - DNA, 25 bp, Artificial
  probe
  misc_feature (1)..(25): SEQ ID NO: 1070; WAN024GEN_at; Start 185; Stop 209
actcagaacagagtttaatagctag

SEQ ID NO: 242415 - DNA, 25 bp, Artificial
  probe
  misc_feature (1)..(25): SEQ ID NO: 1070; WAN024GEN_at; Start 148; Stop 172
cgtgaggtatttgaacaggaattgg

SEQ ID NO: 242416 - DNA, 25 bp, Artificial
  probe
  misc_feature (1)..(25): SEQ ID NO: 1070; WAN024GEN_at; Start 515; Stop 539
tagtgattatcactcggattaagga

SEQ ID NO: 242417 - DNA, 25 bp, Artificial
  probe
  misc_feature (1)..(25): SEQ ID NO: 1070; WAN024GEN_at; Start 251; Stop 275
cttatgcaacttatggtcagggaac

SEQ ID NO: 242418 - DNA, 25 bp, Artificial
  probe
  misc_feature (1)..(25): SEQ ID NO: 1070; WAN024GEN_at; Start 1543; Stop 1567
tggtctatcaatgctggaaaacaac

SEQ ID NO: 242419 - DNA, 25 bp, Artificial
  probe
  misc_feature (1)..(25): SEQ ID NO: 1070; WAN024GEN_at; Start 82; Stop 106
tatttatatgcaagctatgattccg

SEQ ID NO: 242420 - DNA, 25 bp, Artificial
  probe
  misc_feature (1)..(25): SEQ ID NO: 1070; WAN024GEN_at; Start 557; Stop 581
taaaactcttttctggtcagactct

SEQ ID NO: 242421 - DNA, 25 bp, Artificial
  probe
  misc_feature (1)..(25): SEQ ID NO: 1070; WAN024GEN_at; Start 444; Stop 468
tgcttttcgaatattactaaatccc

SEQ ID NO: 242422 - DNA, 25 bp, Artificial
  probe
  misc_feature (1)..(25): SEQ ID NO: 1070; WAN024GEN_at; Start 691; Stop 715
tatcctatcttgttagccacctatg

SEQ ID NO: 242423 - DNA, 25 bp, Artificial
  probe
  misc_feature (1)..(25): SEQ ID NO: 1070; WAN024GEN_at; Start 1980; Stop 2004
gaaagaatctcgtgtttctatgaca

SEQ ID NO: 242424 - DNA, 25 bp, Artificial
  probe
  misc_feature (1)..(25): SEQ ID NO: 1070; WAN024GEN_at; Start 1555; Stop 1579
gctggaaaacaactctttatcaaag

SEQ ID NO: 242425 - DNA, 25 bp, Artificial
  probe
  misc_feature (1)..(25): SEQ ID NO: 1070; WAN024GEN_at; Start 307; Stop 331
gaaagtcgtgaacgtagtgatccgc

SEQ ID NO: 242426 - DNA, 25 bp, Artificial
  probe
  misc_feature (1)..(25): SEQ ID NO: 1070; WAN024GEN_at; Start 56; Stop 80
ggattattgtcttacgtgcgccaca

SEQ ID NO: 242427 - DNA, 25 bp, Artificial
  probe
  misc_feature (1)..(25): SEQ ID NO: 1070; WAN024GEN_at; Start 1677; Stop 1701
tgaagttcaaactgaaacagcaact

SEQ ID NO: 242428 - DNA, 25 bp, Artificial
  probe
  misc_feature (1)..(25): SEQ ID NO: 1070; WAN024GEN_at; Start 704; Stop 728
tagccacctatggttttgggattag

SEQ ID NO: 242429 - DNA, 25 bp, Artificial
  probe
  misc_feature (1)..(25): SEQ ID NO: 1070; WAN024GEN_at; Start 941; Stop 965
ttgaaatttcaaaacaagcatggca

SEQ ID NO: 242430 - DNA, 25 bp, Artificial
  probe
  misc_feature (1)..(25): SEQ ID NO: 1070; WAN024GEN_at; Start 235; Stop 259
gggacgactcactttacttatgcaa

SEQ ID NO: 242431 - DNA, 25 bp, Artificial
  probe
  misc_feature (1)..(25): SEQ ID NO: 1070; WAN024GEN_at; Start 798; Stop 822
caaagcattagttcccgttattaag

SEQ ID NO: 242432 - DNA, 25 bp, Artificial
  probe
  misc_feature (1)..(25): SEQ ID NO: 1070; WAN024GEN_at; Start 528; Stop 552
tcggattaaggaaatgagagcagca

SEQ ID NO: 242433 - DNA, 25 bp, Artificial
  probe
  misc_feature (1)..(25): SEQ ID NO: 1070; WAN024GEN_at; Start 1903; Stop 1927
cgagacttggtgattggcttgctca

SEQ ID NO: 242434 - DNA, 25 bp, Artificial
  probe
  misc_feature (1)..(25): SEQ ID NO: 1070; WAN024GEN_at; Start 542; Stop 566
tgagagcagcaggtataaaactctt

SEQ ID NO: 242435 - DNA, 25 bp, Artificial
  probe
  misc_feature (1)..(25): SEQ ID NO: 1070; WAN024GEN_at; Start 1820; Stop 1844
gattttttgaaacacatgctcagta

SEQ ID NO: 242436 - DNA, 25 bp, Artificial
  probe
  misc_feature (1)..(25): SEQ ID NO: 1070; WAN024GEN_at; Start 68; Stop 92
tacgtgcgccacaatatttatatgc

SEQ ID NO: 242437 - DNA, 25 bp, Artificial
  probe
  misc_feature (1)..(25): SEQ ID NO: 1070; WAN024GEN_at; Start 223; Stop 247
ccgagtaaggatgggacgactcact

SEQ ID NO: 242438 - DNA, 25 bp, Artificial
  probe
  misc_feature (1)..(25): SEQ ID NO: 1070; WAN024GEN_at; Start 1608; Stop 1632
gaaagctggaatttatgagcaagta

SEQ ID NO: 242439 - DNA, 25 bp, Artificial
  probe
  misc_feature (1)..(25): SEQ ID NO: 1070; WAN024GEN_at; Start 1624; Stop 1648
gagcaagtatcctatcttaaagaag

SEQ ID NO: 242440 - DNA, 25 bp, Artificial
  probe
  misc_feature (1)..(25): SEQ ID NO: 1070; WAN024GEN_at; Start 322; Stop 346
agtgatccgctaaatagttatctcc

SEQ ID NO: 242441 - DNA, 25 bp, Artificial
  probe
  misc_feature (1)..(25): SEQ ID NO: 1070; WAN024GEN_at; Start 1888; Stop 1912
tttattttaagcagtcgagacttgg

SEQ ID NO: 242442 - DNA, 25 bp, Artificial
  probe
  misc_feature (1)..(25): SEQ ID NO: 1070; WAN024GEN_at; Start 1781; Stop 1805
tccgccgagatatcttgattaaacg

SEQ ID NO: 242443 - DNA, 25 bp, Artificial
  probe
  misc_feature (1)..(25): SEQ ID NO: 7109; WAN024GEO_at; Start 21; Stop 45
tagaatctctagttttgcgggttta

SEQ ID NO: 242444 - DNA, 25 bp, Artificial
  probe
  misc_feature (1)..(25): SEQ ID NO: 7109; WAN024GEO_at; Start 15; Stop 39
tgcagatagaatctctagttttgcg

SEQ ID NO: 242445 - DNA, 25 bp, Artificial
  probe
  misc_feature (1)..(25): SEQ ID NO: 7109; WAN024GEO_at; Start 19; Stop 43
gatagaatctctagttttgcgggtt

SEQ ID NO: 242446 - DNA, 25 bp, Artificial
  probe
  misc_feature (1)..(25): SEQ ID NO: 7109; WAN024GEO_at; Start 30; Stop 54
tagttttgcgggtttacagacagta

SEQ ID NO: 242447 - DNA, 25 bp, Artificial
  probe
  misc_feature (1)..(25): SEQ ID NO: 7109; WAN024GEO_at; Start 24; Stop 48
aatctctagttttgcgggtttacag

SEQ ID NO: 242448 - DNA, 25 bp, Artificial
  probe
  misc_feature (1)..(25): SEQ ID NO: 7109; WAN024GEO_at; Start 48; Stop 72
gacagtaccatctaaaaagacaatt

SEQ ID NO: 242449 - DNA, 25 bp, Artificial
  probe
  misc_feature (1)..(25): SEQ ID NO: 7109; WAN024GEO_at; Start 34; Stop 58
tttgcgggtttacagacagtaccat

SEQ ID NO: 242450 - DNA, 25 bp, Artificial
  probe
  misc_feature (1)..(25): SEQ ID NO: 7109; WAN024GEO_at; Start 38; Stop 62
cgggtttacagacagtaccatctaa

SEQ ID NO: 242451 - DNA, 25 bp, Artificial
  probe
  misc_feature (1)..(25): SEQ ID NO: 7109; WAN024GEO_at; Start 46; Stop 70
cagacagtaccatctaaaaagacaa

SEQ ID NO: 242452 - DNA, 25 bp, Artificial
  probe
  misc_feature (1)..(25): SEQ ID NO: 7109; WAN024GEO_at; Start 35; Stop 59
ttgcgggtttacagacagtaccatc

SEQ ID NO: 242453 - DNA, 25 bp, Artificial
  probe
  misc_feature (1)..(25): SEQ ID NO: 7109; WAN024GEO_at; Start 8; Stop 32
agggacttgcagatagaatctctag

SEQ ID NO: 242454 - DNA, 25 bp, Artificial
  probe
  misc_feature (1)..(25): SEQ ID NO: 7109; WAN024GEO_at; Start 3; Stop 27
gatggagggacttgcagatagaatc

SEQ ID NO: 242455 - DNA, 25 bp, Artificial
  probe
  misc_feature (1)..(25): SEQ ID NO: 7109; WAN024GEO_at; Start 4; Stop 28
atggagggacttgcagatagaatct

SEQ ID NO: 242456 - DNA, 25 bp, Artificial
  probe
  misc_feature (1)..(25): SEQ ID NO: 7109; WAN024GEO_at; Start 43; Stop 67
ttacagacagtaccatctaaaaaga

SEQ ID NO: 242457 - DNA, 25 bp, Artificial
  probe
  misc_feature (1)..(25): SEQ ID NO: 7109; WAN024GEO_at; Start 9; Stop 33
gggacttgcagatagaatctctagt

SEQ ID NO: 242458 - DNA, 25 bp, Artificial
  probe
  misc_feature (1)..(25): SEQ ID NO: 7109; WAN024GEO_at; Start 44; Stop 68
tacagacagtaccatctaaaaagac

SEQ ID NO: 242459 - DNA, 25 bp, Artificial
  probe
  misc_feature (1)..(25): SEQ ID NO: 7109; WAN024GEO_at; Start 33; Stop 57
ttttgcgggtttacagacagtacca

SEQ ID NO: 242460 - DNA, 25 bp, Artificial
  probe
  misc_feature (1)..(25): SEQ ID NO: 7109; WAN024GEO_at; Start 13; Stop 37
cttgcagatagaatctctagttttg

SEQ ID NO: 242461 - DNA, 25 bp, Artificial
  probe
  misc_feature (1)..(25): SEQ ID NO: 7109; WAN024GEO_at; Start 6; Stop 30
ggagggacttgcagatagaatctct

SEQ ID NO: 242462 - DNA, 25 bp, Artificial
  probe
  misc_feature (1)..(25): SEQ ID NO: 7109; WAN024GEO_at; Start 23; Stop 47
gaatctctagttttgcgggtttaca

SEQ ID NO: 242463 - DNA, 25 bp, Artificial
  probe
  misc_feature (1)..(25): SEQ ID NO: 7109; WAN024GEO_at; Start 29; Stop 53
ctagttttgcgggtttacagacagt

SEQ ID NO: 242464 - DNA, 25 bp, Artificial
  probe
  misc_feature (1)..(25): SEQ ID NO: 7109; WAN024GEO_at; Start 40; Stop 64
ggtttacagacagtaccatctaaaa

SEQ ID NO: 242465 - DNA, 25 bp, Artificial
  probe
  misc_feature (1)..(25): SEQ ID NO: 7109; WAN024GEO_at; Start 2; Stop 26
tgatggagggacttgcagatagaat

SEQ ID NO: 242466 - DNA, 25 bp, Artificial
  probe
  misc_feature (1)..(25): SEQ ID NO: 7109; WAN024GEO_at; Start 5; Stop 29
tggagggacttgcagatagaatctc

SEQ ID NO: 242467 - DNA, 25 bp, Artificial
  probe
  misc_feature (1)..(25): SEQ ID NO: 7109; WAN024GEO_at; Start 50; Stop 74
cagtaccatctaaaaagacaattcc

SEQ ID NO: 242468 - DNA, 25 bp, Artificial
  probe
  misc_feature (1)..(25): SEQ ID NO: 7109; WAN024GEO_at; Start 36; Stop 60
tgcgggtttacagacagtaccatct

SEQ ID NO: 242469 - DNA, 25 bp, Artificial
  probe
  misc_feature (1)..(25): SEQ ID NO: 7109; WAN024GEO_at; Start 25; Stop 49
atctctagttttgcgggtttacaga

SEQ ID NO: 242470 - DNA, 25 bp, Artificial
  probe
  misc_feature (1)..(25): SEQ ID NO: 7109; WAN024GEO_at; Start 7; Stop 31
gagggacttgcagatagaatctcta

SEQ ID NO: 242471 - DNA, 25 bp, Artificial
  probe
  misc_feature (1)..(25): SEQ ID NO: 7109; WAN024GEO_at; Start 37; Stop 61
gcgggtttacagacagtaccatcta

SEQ ID NO: 242472 - DNA, 25 bp, Artificial
  probe
  misc_feature (1)..(25): SEQ ID NO: 7109; WAN024GEO_at; Start 17; Stop 41
cagatagaatctctagttttgcggg

SEQ ID NO: 242473 - DNA, 25 bp, Artificial
  probe
  misc_feature (1)..(25): SEQ ID NO: 7109; WAN024GEO_at; Start 39; Stop 63
gggtttacagacagtaccatctaaa

SEQ ID NO: 242474 - DNA, 25 bp, Artificial
  probe
  misc_feature (1)..(25): SEQ ID NO: 7109; WAN024GEO_at; Start 10; Stop 34
ggacttgcagatagaatctctagtt

SEQ ID NO: 242475 - DNA, 25 bp, Artificial
  probe
  misc_feature (1)..(25): SEQ ID NO: 7109; WAN024GEO_at; Start 16; Stop 40
gcagatagaatctctagttttgcgg

SEQ ID NO: 242476 - DNA, 25 bp, Artificial
  probe
  misc_feature (1)..(25): SEQ ID NO: 7109; WAN024GEO_at; Start 11; Stop 35
gacttgcagatagaatctctagttt

SEQ ID NO: 242477 - DNA, 25 bp, Artificial
  probe
  misc_feature (1)..(25): SEQ ID NO: 5592; WAN024GEP_at; Start 151; Stop 175
catgacggtcggaagttccttgtct

SEQ ID NO: 242478 - DNA, 25 bp, Artificial
  probe
  misc_feature (1)..(25): SEQ ID NO: 5592; WAN024GEP_at; Start 40; Stop 64
ctgaaagcccaagggaccgttatcg

SEQ ID NO: 242479 - DNA, 25 bp, Artificial
  probe
  misc_feature (1)..(25): SEQ ID NO: 5592; WAN024GEP_at; Start 213; Stop 237
taagataggtgtgttcatagccttg

SEQ ID NO: 242480 - DNA, 25 bp, Artificial
  probe
  misc_feature (1)..(25): SEQ ID NO: 5592; WAN024GEP_at; Start 82; Stop 106
cgttgtatctcggtccagtcggcca

SEQ ID NO: 242481 - DNA, 25 bp, Artificial
  probe
  misc_feature (1)..(25): SEQ ID NO: 5592; WAN024GEP_at; Start 148; Stop 172
gtccatgacggtcggaagttccttg

SEQ ID NO: 242482 - DNA, 25 bp, Artificial
  probe
  misc_feature (1)..(25): SEQ ID NO: 5592; WAN024GEP_at; Start 76; Stop 100
gagtcccgttgtatctcggtccagt

SEQ ID NO: 242483 - DNA, 25 bp, Artificial
  probe
  misc_feature (1)..(25): SEQ ID NO: 5592; WAN024GEP_at; Start 60; Stop 84
tatcggtcaagaggaggagtcccgt

SEQ ID NO: 242484 - DNA, 25 bp, Artificial
  probe
  misc_feature (1)..(25): SEQ ID NO: 5592; WAN024GEP_at; Start 228; Stop 252
catagccttgaatgattcgatcctg

SEQ ID NO: 242485 - DNA, 25 bp, Artificial
  probe
  misc_feature (1)..(25): SEQ ID NO: 5592; WAN024GEP_at; Start 58; Stop 82
gttatcggtcaagaggaggagtccc

SEQ ID NO: 242486 - DNA, 25 bp, Artificial
  probe
  misc_feature (1)..(25): SEQ ID NO: 5592; WAN024GEP_at; Start 73; Stop 97
gaggagtcccgttgtatctcggtcc

SEQ ID NO: 242487 - DNA, 25 bp, Artificial
  probe
  misc_feature (1)..(25): SEQ ID NO: 5592; WAN024GEP_at; Start 106; Stop 130
aacggcatagagcttgtcagactgg

SEQ ID NO: 242488 - DNA, 25 bp, Artificial
  probe
  misc_feature (1)..(25): SEQ ID NO: 5592; WAN024GEP_at; Start 142; Stop 166
aagcaggtccatgacggtcggaagt

SEQ ID NO: 242489 - DNA, 25 bp, Artificial
  probe
  misc_feature (1)..(25): SEQ ID NO: 5592; WAN024GEP_at; Start 5; Stop 29
taagtcttatcgacatgatattggg

SEQ ID NO: 242490 - DNA, 25 bp, Artificial
  probe
  misc_feature (1)..(25): SEQ ID NO: 5592; WAN024GEP_at; Start 237; Stop 261
gaatgattcgatcctgaaaaaggag

SEQ ID NO: 242491 - DNA, 25 bp, Artificial
  probe
  misc_feature (1)..(25): SEQ ID NO: 5592; WAN024GEP_at; Start 232; Stop 256
gccttgaatgattcgatcctgaaaa

SEQ ID NO: 242492 - DNA, 25 bp, Artificial
  probe
  misc_feature (1)..(25): SEQ ID NO: 5592; WAN024GEP_at; Start 67; Stop 91
caagaggaggagtcccgttgtatct

SEQ ID NO: 242493 - DNA, 25 bp, Artificial
  probe
  misc_feature (1)..(25): SEQ ID NO: 5592; WAN024GEP_at; Start 49; Stop 73
caagggaccgttatcggtcaagagg

SEQ ID NO: 242494 - DNA, 25 bp, Artificial
  probe
  misc_feature (1)..(25): SEQ ID NO: 5592; WAN024GEP_at; Start 210; Stop 234
gcataagataggtgtgttcatagcc

SEQ ID NO: 242495 - DNA, 25 bp, Artificial
  probe
  misc_feature (1)..(25): SEQ ID NO: 5592; WAN024GEP_at; Start 136; Stop 160
agatggaagcaggtccatgacggtc

SEQ ID NO: 242496 - DNA, 25 bp, Artificial
  probe
  misc_feature (1)..(25): SEQ ID NO: 5592; WAN024GEP_at; Start 246; Stop 270
gatcctgaaaaaggagttcttgtag

SEQ ID NO: 242497 - DNA, 25 bp, Artificial
  probe
  misc_feature (1)..(25): SEQ ID NO: 5592; WAN024GEP_at; Start 37; Stop 61
gagctgaaagcccaagggaccgtta

SEQ ID NO: 242498 - DNA, 25 bp, Artificial
  probe
  misc_feature (1)..(25): SEQ ID NO: 5592; WAN024GEP_at; Start 159; Stop 183
tcggaagttccttgtctttgttggc

SEQ ID NO: 242499 - DNA, 25 bp, Artificial
  probe
  misc_feature (1)..(25): SEQ ID NO: 5592; WAN024GEP_at; Start 99; Stop 123
gtcggccaacggcatagagcttgtc

SEQ ID NO: 242500 - DNA, 25 bp, Artificial
  probe
  misc_feature (1)..(25): SEQ ID NO: 5592; WAN024GEP_at; Start 204; Stop 228
tatgaagcataagataggtgtgttc

SEQ ID NO: 242501 - DNA, 25 bp, Artificial
  probe
  misc_feature (1)..(25): SEQ ID NO: 5592; WAN024GEP_at; Start 166; Stop 190
ttccttgtctttgttggctgtaacg

SEQ ID NO: 242502 - DNA, 25 bp, Artificial
  probe
  misc_feature (1)..(25): SEQ ID NO: 5592; WAN024GEP_at; Start 108; Stop 132
cggcatagagcttgtcagactggat

SEQ ID NO: 242503 - DNA, 25 bp, Artificial
  probe
  misc_feature (1)..(25): SEQ ID NO: 5592; WAN024GEP_at; Start 95; Stop 119
tccagtcggccaacggcatagagct

SEQ ID NO: 242504 - DNA, 25 bp, Artificial
  probe
  misc_feature (1)..(25): SEQ ID NO: 5592; WAN024GEP_at; Start 110; Stop 134
gcatagagcttgtcagactggatgt

SEQ ID NO: 242505 - DNA, 25 bp, Artificial
  probe
  misc_feature (1)..(25): SEQ ID NO: 5592; WAN024GEP_at; Start 192; Stop 216
caccagcaggtttatgaagcataag

SEQ ID NO: 242506 - DNA, 25 bp, Artificial
  probe
  misc_feature (1)..(25): SEQ ID NO: 5592; WAN024GEP_at; Start 56; Stop 80
ccgttatcggtcaagaggaggagtc

SEQ ID NO: 242507 - DNA, 25 bp, Artificial
  probe
  misc_feature (1)..(25): SEQ ID NO: 5592; WAN024GEP_at; Start 218; Stop 242
taggtgtgttcatagccttgaatga

SEQ ID NO: 242508 - DNA, 25 bp, Artificial
  probe
  misc_feature (1)..(25): SEQ ID NO: 5592; WAN024GEP_at; Start 241; Stop 265
gattcgatcctgaaaaaggagttct

SEQ ID NO: 242509 - DNA, 25 bp, Artificial
  probe
  misc_feature (1)..(25): SEQ ID NO: 5592; WAN024GEP_at; Start 84; Stop 108
ttgtatctcggtccagtcggccaac

SEQ ID NO: 242510 - DNA, 25 bp, Artificial
  probe
  misc_feature (1)..(25): SEQ ID NO: 5592; WAN024GEP_at; Start 102; Stop 126
ggccaacggcatagagcttgtcaga

SEQ ID NO: 242511 - DNA, 25 bp, Artificial
  probe
  misc_feature (1)..(25): SEQ ID NO: 2052; WAN024GEQ_at; Start 217; Stop 241
gccaacaaagacaaggaacttccga

SEQ ID NO: 242512 - DNA, 25 bp, Artificial
  probe
  misc_feature (1)..(25): SEQ ID NO: 2052; WAN024GEQ_at; Start 626; Stop 650
gggacttcacattgaacccagattt

SEQ ID NO: 242513 - DNA, 25 bp, Artificial
  probe
  misc_feature (1)..(25): SEQ ID NO: 2052; WAN024GEQ_at; Start 184; Stop 208
cttatgcttcataaacctgctggtg

SEQ ID NO: 242514 - DNA, 25 bp, Artificial
  probe
  misc_feature (1)..(25): SEQ ID NO: 2052; WAN024GEQ_at; Start 567; Stop 591
caagaaaatgttcctctcggttggt

SEQ ID NO: 242515 - DNA, 25 bp, Artificial
  probe
  misc_feature (1)..(25): SEQ ID NO: 2052; WAN024GEQ_at; Start 539; Stop 563
ccatttcagaaggaaaatttcatca

SEQ ID NO: 242516 - DNA, 25 bp, Artificial
  probe
  misc_feature (1)..(25): SEQ ID NO: 2052; WAN024GEQ_at; Start 74; Stop 98
aaattctagtcgatggttgcccagc

SEQ ID NO: 242517 - DNA, 25 bp, Artificial
  probe
  misc_feature (1)..(25): SEQ ID NO: 2052; WAN024GEQ_at; Start 77; Stop 101
ttctagtcgatggttgcccagcccg

SEQ ID NO: 242518 - DNA, 25 bp, Artificial
  probe
  misc_feature (1)..(25): SEQ ID NO: 2052; WAN024GEQ_at; Start 405; Stop 429
ggttaatggacttctaacacctgac

SEQ ID NO: 242519 - DNA, 25 bp, Artificial
  probe
  misc_feature (1)..(25): SEQ ID NO: 2052; WAN024GEQ_at; Start 151; Stop 175
gatcgaatcattcaaggctatgaac

SEQ ID NO: 242520 - DNA, 25 bp, Artificial
  probe
  misc_feature (1)..(25): SEQ ID NO: 2052; WAN024GEQ_at; Start 144; Stop 168
ttttcaggatcgaatcattcaaggc

SEQ ID NO: 242521 - DNA, 25 bp, Artificial
  probe
  misc_feature (1)..(25): SEQ ID NO: 2052; WAN024GEQ_at; Start 166; Stop 190
ggctatgaacacacctatcttatgc

SEQ ID NO: 242522 - DNA, 25 bp, Artificial
  probe
  misc_feature (1)..(25): SEQ ID NO: 2052; WAN024GEQ_at; Start 25; Stop 49
caagaaaaaatcagccgaaaggcca

SEQ ID NO: 242523 - DNA, 25 bp, Artificial
  probe
  misc_feature (1)..(25): SEQ ID NO: 2052; WAN024GEQ_at; Start 328; Stop 352
ctcttgaccgataacggtcccttgg

SEQ ID NO: 242524 - DNA, 25 bp, Artificial
  probe
  misc_feature (1)..(25): SEQ ID NO: 2052; WAN024GEQ_at; Start 99; Stop 123
ccgctccctagctcaaaatatcgat

SEQ ID NO: 242525 - DNA, 25 bp, Artificial
  probe
  misc_feature (1)..(25): SEQ ID NO: 2052; WAN024GEQ_at; Start 29; Stop 53
aaaaaatcagccgaaaggccatgaa

SEQ ID NO: 242526 - DNA, 25 bp, Artificial
  probe
  misc_feature (1)..(25): SEQ ID NO: 2052; WAN024GEQ_at; Start 109; Stop 133
gctcaaaatatcgatacaggactac

SEQ ID NO: 242527 - DNA, 25 bp, Artificial
  probe
  misc_feature (1)..(25): SEQ ID NO: 2052; WAN024GEQ_at; Start 699; Stop 723
taaaaactatttagagatgagtcga

SEQ ID NO: 242528 - DNA, 25 bp, Artificial
  probe
  misc_feature (1)..(25): SEQ ID NO: 2052; WAN024GEQ_at; Start 547; Stop 571
gaaggaaaatttcatcaaatcaaga

SEQ ID NO: 242529 - DNA, 25 bp, Artificial
  probe
  misc_feature (1)..(25): SEQ ID NO: 2052; WAN024GEQ_at; Start 240; Stop 264
gaccgtcatggacctgcttccatct

SEQ ID NO: 242530 - DNA, 25 bp, Artificial
  probe
  misc_feature (1)..(25): SEQ ID NO: 2052; WAN024GEQ_at; Start 704; Stop 728
actatttagagatgagtcgataact

SEQ ID NO: 242531 - DNA, 25 bp, Artificial
  probe
  misc_feature (1)..(25): SEQ ID NO: 2052; WAN024GEQ_at; Start 633; Stop 657
cacattgaacccagatttagcagaa

SEQ ID NO: 242532 - DNA, 25 bp, Artificial
  probe
  misc_feature (1)..(25): SEQ ID NO: 2052; WAN024GEQ_at; Start 210; Stop 234
cgttacagccaacaaagacaaggaa

SEQ ID NO: 242533 - DNA, 25 bp, Artificial
  probe
  misc_feature (1)..(25): SEQ ID NO: 2052; WAN024GEQ_at; Start 119; Stop 143
tcgatacaggactacaagaactcct

SEQ ID NO: 242534 - DNA, 25 bp, Artificial
  probe
  misc_feature (1)..(25): SEQ ID NO: 2052; WAN024GEQ_at; Start 371; Stop 395
cccaatatcatgtcgataagactta

SEQ ID NO: 242535 - DNA, 25 bp, Artificial
  probe
  misc_feature (1)..(25): SEQ ID NO: 2052; WAN024GEQ_at; Start 366; Stop 390
ccatccccaatatcatgtcgataag

SEQ ID NO: 242536 - DNA, 25 bp, Artificial
  probe
  misc_feature (1)..(25): SEQ ID NO: 2052; WAN024GEQ_at; Start 133; Stop 157
caagaactcctttttcaggatcgaa

SEQ ID NO: 242537 - DNA, 25 bp, Artificial
  probe
  misc_feature (1)..(25): SEQ ID NO: 2052; WAN024GEQ_at; Start 674; Stop 698
tgaaccaaaaagagttacaaatcat

SEQ ID NO: 242538 - DNA, 25 bp, Artificial
  probe
  misc_feature (1)..(25): SEQ ID NO: 2052; WAN024GEQ_at; Start 562; Stop 586
caaatcaagaaaatgttcctctcgg

SEQ ID NO: 242539 - DNA, 25 bp, Artificial
  probe
  misc_feature (1)..(25): SEQ ID NO: 2052; WAN024GEQ_at; Start 529; Stop 553
gcctctatcaccatttcagaaggaa

SEQ ID NO: 242540 - DNA, 25 bp, Artificial
  probe
  misc_feature (1)..(25): SEQ ID NO: 2052; WAN024GEQ_at; Start 226; Stop 250
gacaaggaacttccgaccgtcatgg

SEQ ID NO: 242541 - DNA, 25 bp, Artificial
  probe
  misc_feature (1)..(25): SEQ ID NO: 2052; WAN024GEQ_at; Start 413; Stop 437
gacttctaacacctgaccatatcca

SEQ ID NO: 242542 - DNA, 25 bp, Artificial
  probe
  misc_feature (1)..(25): SEQ ID NO: 2052; WAN024GEQ_at; Start 523; Stop 547
agtcaagcctctatcaccatttcag

SEQ ID NO: 242543 - DNA, 25 bp, Artificial
  probe
  misc_feature (1)..(25): SEQ ID NO: 2052; WAN024GEQ_at; Start 233; Stop 257
aacttccgaccgtcatggacctgct

SEQ ID NO: 242544 - DNA, 25 bp, Artificial
  probe
  misc_feature (1)..(25): SEQ ID NO: 2052; WAN024GEQ_at; Start 269; Stop 293
tccagtctgacaagctctatgccgt

SEQ ID NO: 242545 - DNA, 25 bp, Artificial
  probe
  misc_feature (1)..(25): SEQ ID NO: 4311; WAN024GER_at; Start 64; Stop 88
aagctgggtctgctcgacaacctga

SEQ ID NO: 242546 - DNA, 25 bp, Artificial
  probe
  misc_feature (1)..(25): SEQ ID NO: 4311; WAN024GER_at; Start 113; Stop 137
ccatcacgggtcaaggtgattccct

SEQ ID NO: 242547 - DNA, 25 bp, Artificial
  probe
  misc_feature (1)..(25): SEQ ID NO: 4311; WAN024GER_at; Start 233; Stop 257
gcctcattcatggagccagtttcga

SEQ ID NO: 242548 - DNA, 25 bp, Artificial
  probe
  misc_feature (1)..(25): SEQ ID NO: 4311; WAN024GER_at; Start 224; Stop 248
tgcttggctgcctcattcatggagc

SEQ ID NO: 242549 - DNA, 25 bp, Artificial
  probe
  misc_feature (1)..(25): SEQ ID NO: 4311; WAN024GER_at; Start 87; Stop 111
gacgggcataagagagaaactccat

SEQ ID NO: 242550 - DNA, 25 bp, Artificial
  probe
  misc_feature (1)..(25): SEQ ID NO: 4311; WAN024GER_at; Start 75; Stop 99
gctcgacaacctgacgggcataaga

SEQ ID NO: 242551 - DNA, 25 bp, Artificial
  probe
  misc_feature (1)..(25): SEQ ID NO: 4311; WAN024GER_at; Start 2; Stop 26
tgttgagacgaaacgctaaagagtt

SEQ ID NO: 242552 - DNA, 25 bp, Artificial
  probe
  misc_feature (1)..(25): SEQ ID NO: 4311; WAN024GER_at; Start 184; Stop 208
tcgcactgcattggagagacttggc

SEQ ID NO: 242553 - DNA, 25 bp, Artificial
  probe
  misc_feature (1)..(25): SEQ ID NO: 4311; WAN024GER_at; Start 116; Stop 140
tcacgggtcaaggtgattcccttgg

SEQ ID NO: 242554 - DNA, 25 bp, Artificial
  probe
  misc_feature (1)..(25): SEQ ID NO: 4311; WAN024GER_at; Start 187; Stop 211
cactgcattggagagacttggctga

SEQ ID NO: 242555 - DNA, 25 bp, Artificial
  probe
  misc_feature (1)..(25): SEQ ID NO: 4311; WAN024GER_at; Start 192; Stop 216
cattggagagacttggctgagtgat

SEQ ID NO: 242556 - DNA, 25 bp, Artificial
  probe
  misc_feature (1)..(25): SEQ ID NO: 4311; WAN024GER_at; Start 148; Stop 172
gataaagatctcaatgcccatttca

SEQ ID NO: 242557 - DNA, 25 bp, Artificial
  probe
  misc_feature (1)..(25): SEQ ID NO: 4311; WAN024GER_at; Start 245; Stop 269
gagccagtttcgacgattttgataa

SEQ ID NO: 242558 - DNA, 25 bp, Artificial
  probe
  misc_feature (1)..(25): SEQ ID NO: 4311; WAN024GER_at; Start 59; Stop 83
tccagaagctgggtctgctcgacaa

SEQ ID NO: 242559 - DNA, 25 bp, Artificial
  probe
  misc_feature (1)..(25): SEQ ID NO: 4311; WAN024GER_at; Start 144; Stop 168
tgcggataaagatctcaatgcccat

SEQ ID NO: 242560 - DNA, 25 bp, Artificial
  probe
  misc_feature (1)..(25): SEQ ID NO: 4311; WAN024GER_at; Start 179; Stop 203
aaatctcgcactgcattggagagac

SEQ ID NO: 242561 - DNA, 25 bp, Artificial
  probe
  misc_feature (1)..(25): SEQ ID NO: 4311; WAN024GER_at; Start 71; Stop 95
gtctgctcgacaacctgacgggcat

SEQ ID NO: 242562 - DNA, 25 bp, Artificial
  probe
  misc_feature (1)..(25): SEQ ID NO: 4311; WAN024GER_at; Start 203; Stop 227
cttggctgagtgataaagagttgct

SEQ ID NO: 242563 - DNA, 25 bp, Artificial
  probe
  misc_feature (1)..(25): SEQ ID NO: 4311; WAN024GER_at; Start 84; Stop 108
cctgacgggcataagagagaaactc

SEQ ID NO: 242564 - DNA, 25 bp, Artificial
  probe
  misc_feature (1)..(25): SEQ ID NO: 4311; WAN024GER_at; Start 214; Stop 238
gataaagagttgcttggctgcctca

SEQ ID NO: 242565 - DNA, 25 bp, Artificial
  probe
  misc_feature (1)..(25): SEQ ID NO: 4311; WAN024GER_at; Start 26; Stop 50
tcgcggtgggcgacaggatttttat

SEQ ID NO: 242566 - DNA, 25 bp, Artificial
  probe
  misc_feature (1)..(25): SEQ ID NO: 4311; WAN024GER_at; Start 241; Stop 265
catggagccagtttcgacgattttg

SEQ ID NO: 242567 - DNA, 25 bp, Artificial
  probe
  misc_feature (1)..(25): SEQ ID NO: 4311; WAN024GER_at; Start 237; Stop 261
cattcatggagccagtttcgacgat

SEQ ID NO: 242568 - DNA, 25 bp, Artificial
  probe
  misc_feature (1)..(25): SEQ ID NO: 4311; WAN024GER_at; Start 130; Stop 154
gattcccttgggattgcggataaag

SEQ ID NO: 242569 - DNA, 25 bp, Artificial
  probe
  misc_feature (1)..(25): SEQ ID NO: 4311; WAN024GER_at; Start 158; Stop 182
tcaatgcccatttcattttccaaat

SEQ ID NO: 242570 - DNA, 25 bp, Artificial
  probe
  misc_feature (1)..(25): SEQ ID NO: 4311; WAN024GER_at; Start 56; Stop 80
tcctccagaagctgggtctgctcga

SEQ ID NO: 242571 - DNA, 25 bp, Artificial
  probe
  misc_feature (1)..(25): SEQ ID NO: 4311; WAN024GER_at; Start 249; Stop 273
cagtttcgacgattttgataatata

SEQ ID NO: 242572 - DNA, 25 bp, Artificial
  probe
  misc_feature (1)..(25): SEQ ID NO: 4311; WAN024GER_at; Start 48; Stop 72
tatagcgttcctccagaagctgggt

SEQ ID NO: 242573 - DNA, 25 bp, Artificial
  probe
  misc_feature (1)..(25): SEQ ID NO: 4311; WAN024GER_at; Start 136; Stop 160
cttgggattgcggataaagatctca

SEQ ID NO: 242574 - DNA, 25 bp, Artificial
  probe
  misc_feature (1)..(25): SEQ ID NO: 4311; WAN024GER_at; Start 42; Stop 66
gatttttatagcgttcctccagaag

SEQ ID NO: 242575 - DNA, 25 bp, Artificial
  probe
  misc_feature (1)..(25): SEQ ID NO: 4311; WAN024GER_at; Start 33; Stop 57
gggcgacaggatttttatagcgttc

SEQ ID NO: 242576 - DNA, 25 bp, Artificial
  probe
  misc_feature (1)..(25): SEQ ID NO: 4311; WAN024GER_at; Start 173; Stop 197
ttttccaaatctcgcactgcattgg

SEQ ID NO: 242577 - DNA, 25 bp, Artificial
  probe
  misc_feature (1)..(25): SEQ ID NO: 4311; WAN024GER_at; Start 197; Stop 221
gagagacttggctgagtgataaaga

SEQ ID NO: 242578 - DNA, 25 bp, Artificial
  probe
  misc_feature (1)..(25): SEQ ID NO: 4311; WAN024GER_at; Start 10; Stop 34
cgaaacgctaaagagttcgcggtgg

SEQ ID NO: 242579 - DNA, 25 bp, Artificial
  probe
  misc_feature (1)..(25): SEQ ID NO: 5082; WAN024GES_s_at; Start 26; Stop 50
atggttacttggattttgtgggcac

SEQ ID NO: 242580 - DNA, 25 bp, Artificial
  probe
  misc_feature (1)..(25): SEQ ID NO: 5082; WAN024GES_s_at; Start 30; Stop 54
ttacttggattttgtgggcacttat

SEQ ID NO: 242581 - DNA, 25 bp, Artificial
  probe
  misc_feature (1)..(25): SEQ ID NO: 5082; WAN024GES_s_at; Start 56; Stop 80
ctagcaatgttggcgtggatgggct

SEQ ID NO: 242582 - DNA, 25 bp, Artificial
  probe
  misc_feature (1)..(25): SEQ ID NO: 5082; WAN024GES_s_at; Start 49; Stop 73
acttatactagcaatgttggcgtgg

SEQ ID NO: 242583 - DNA, 25 bp, Artificial
  probe
  misc_feature (1)..(25): SEQ ID NO: 5082; WAN024GES_s_at; Start 53; Stop 77
atactagcaatgttggcgtggatgg

SEQ ID NO: 242584 - DNA, 25 bp, Artificial
  probe
  misc_feature (1)..(25): SEQ ID NO: 5082; WAN024GES_s_at; Start 51; Stop 75
ttatactagcaatgttggcgtggat

SEQ ID NO: 242585 - DNA, 25 bp, Artificial
  probe
  misc_feature (1)..(25): SEQ ID NO: 5082; WAN024GES_s_at; Start 34; Stop 58
ttggattttgtgggcacttatacta

SEQ ID NO: 242586 - DNA, 25 bp, Artificial
  probe
  misc_feature (1)..(25): SEQ ID NO: 5082; WAN024GES_s_at; Start 50; Stop 74
cttatactagcaatgttggcgtgga

SEQ ID NO: 242587 - DNA, 25 bp, Artificial
  probe
  misc_feature (1)..(25): SEQ ID NO: 5082; WAN024GES_s_at; Start 35; Stop 59
tggattttgtgggcacttatactag

SEQ ID NO: 242588 - DNA, 25 bp, Artificial
  probe
  misc_feature (1)..(25): SEQ ID NO: 5082; WAN024GES_s_at; Start 38; Stop 62
attttgtgggcacttatactagcaa

SEQ ID NO: 242589 - DNA, 25 bp, Artificial
  probe
  misc_feature (1)..(25): SEQ ID NO: 5082; WAN024GES_s_at; Start 52; Stop 76
tatactagcaatgttggcgtggatg

SEQ ID NO: 242590 - DNA, 25 bp, Artificial
  probe
  misc_feature (1)..(25): SEQ ID NO: 5082; WAN024GES_s_at; Start 44; Stop 68
tgggcacttatactagcaatgttgg

SEQ ID NO: 242591 - DNA, 25 bp, Artificial
  probe
  misc_feature (1)..(25): SEQ ID NO: 5082; WAN024GES_s_at; Start 42; Stop 66
tgtgggcacttatactagcaatgtt

SEQ ID NO: 242592 - DNA, 25 bp, Artificial
  probe
  misc_feature (1)..(25): SEQ ID NO: 5082; WAN024GES_s_at; Start 57; Stop 81
tagcaatgttggcgtggatgggctt

SEQ ID NO: 242593 - DNA, 25 bp, Artificial
  probe
  misc_feature (1)..(25): SEQ ID NO: 5082; WAN024GES_s_at; Start 55; Stop 79
actagcaatgttggcgtggatgggc

SEQ ID NO: 242594 - DNA, 25 bp, Artificial
  probe
  misc_feature (1)..(25): SEQ ID NO: 5082; WAN024GES_s_at; Start 40; Stop 64
tttgtgggcacttatactagcaatg

SEQ ID NO: 242595 - DNA, 25 bp, Artificial
  probe
  misc_feature (1)..(25): SEQ ID NO: 5082; WAN024GES_s_at; Start 37; Stop 61
gattttgtgggcacttatactagca

SEQ ID NO: 242596 - DNA, 25 bp, Artificial
  probe
  misc_feature (1)..(25): SEQ ID NO: 5082; WAN024GES_s_at; Start 54; Stop 78
tactagcaatgttggcgtggatggg

SEQ ID NO: 242597 - DNA, 25 bp, Artificial
  probe
  misc_feature (1)..(25): SEQ ID NO: 5082; WAN024GES_s_at; Start 45; Stop 69
gggcacttatactagcaatgttggc

SEQ ID NO: 242598 - DNA, 25 bp, Artificial
  probe
  misc_feature (1)..(25): SEQ ID NO: 5082; WAN024GES_s_at; Start 29; Stop 53
gttacttggattttgtgggcactta

SEQ ID NO: 242599 - DNA, 25 bp, Artificial
  probe
  misc_feature (1)..(25): SEQ ID NO: 5082; WAN024GES_s_at; Start 48; Stop 72
cacttatactagcaatgttggcgtg

SEQ ID NO: 242600 - DNA, 25 bp, Artificial
  probe
  misc_feature (1)..(25): SEQ ID NO: 5082; WAN024GES_s_at; Start 33; Stop 57
cttggattttgtgggcacttatact

SEQ ID NO: 242601 - DNA, 25 bp, Artificial
  probe
  misc_feature (1)..(25): SEQ ID NO: 5082; WAN024GES_s_at; Start 32; Stop 56
acttggattttgtgggcacttatac

SEQ ID NO: 242602 - DNA, 25 bp, Artificial
  probe
  misc_feature (1)..(25): SEQ ID NO: 5082; WAN024GES_s_at; Start 41; Stop 65
ttgtgggcacttatactagcaatgt

SEQ ID NO: 242603 - DNA, 25 bp, Artificial
  probe
  misc_feature (1)..(25): SEQ ID NO: 5082; WAN024GES_s_at; Start 43; Stop 67
gtgggcacttatactagcaatgttg

SEQ ID NO: 242604 - DNA, 25 bp, Artificial
  probe
  misc_feature (1)..(25): SEQ ID NO: 5082; WAN024GES_s_at; Start 31; Stop 55
tacttggattttgtgggcacttata

SEQ ID NO: 242605 - DNA, 25 bp, Artificial
  probe
  misc_feature (1)..(25): SEQ ID NO: 5082; WAN024GES_s_at; Start 36; Stop 60
ggattttgtgggcacttatactagc

SEQ ID NO: 242606 - DNA, 25 bp, Artificial
  probe
  misc_feature (1)..(25): SEQ ID NO: 5082; WAN024GES_s_at; Start 46; Stop 70
ggcacttatactagcaatgttggcg

SEQ ID NO: 242607 - DNA, 25 bp, Artificial
  probe
  misc_feature (1)..(25): SEQ ID NO: 5082; WAN024GES_s_at; Start 47; Stop 71
gcacttatactagcaatgttggcgt

SEQ ID NO: 242608 - DNA, 25 bp, Artificial
  probe
  misc_feature (1)..(25): SEQ ID NO: 5082; WAN024GES_s_at; Start 27; Stop 51
tggttacttggattttgtgggcact

SEQ ID NO: 242609 - DNA, 25 bp, Artificial
  probe
  misc_feature (1)..(25): SEQ ID NO: 5082; WAN024GES_s_at; Start 39; Stop 63
ttttgtgggcacttatactagcaat

SEQ ID NO: 242610 - DNA, 25 bp, Artificial
  probe
  misc_feature (1)..(25): SEQ ID NO: 2697; WAN024GET_at; Start 361; Stop 385
gggaaagtgaagactagctaactaa

SEQ ID NO: 242611 - DNA, 25 bp, Artificial
  probe
  misc_feature (1)..(25): SEQ ID NO: 2697; WAN024GET_at; Start 146; Stop 170
gcgacccagcagaattccacagaaa

SEQ ID NO: 242612 - DNA, 25 bp, Artificial
  probe
  misc_feature (1)..(25): SEQ ID NO: 2697; WAN024GET_at; Start 231; Stop 255
tcgtaaagataaacctgtccttctc

SEQ ID NO: 242613 - DNA, 25 bp, Artificial
  probe
  misc_feature (1)..(25): SEQ ID NO: 2697; WAN024GET_at; Start 196; Stop 220
ccttcaagtcagttgaaaactagtc

SEQ ID NO: 242614 - DNA, 25 bp, Artificial
  probe
  misc_feature (1)..(25): SEQ ID NO: 2697; WAN024GET_at; Start 174; Stop 198
tatccttggtgcacgcaatattcct

SEQ ID NO: 242615 - DNA, 25 bp, Artificial
  probe
  misc_feature (1)..(25): SEQ ID NO: 2697; WAN024GET_at; Start 273; Stop 297
gcaacgagttacaaatgcagctctt

SEQ ID NO: 242616 - DNA, 25 bp, Artificial
  probe
  misc_feature (1)..(25): SEQ ID NO: 2697; WAN024GET_at; Start 138; Stop 162
tgatttgcgcgacccagcagaattc

SEQ ID NO: 242617 - DNA, 25 bp, Artificial
  probe
  misc_feature (1)..(25): SEQ ID NO: 2697; WAN024GET_at; Start 262; Stop 286
aaccaacgtgcgcaacgagttacaa

SEQ ID NO: 242618 - DNA, 25 bp, Artificial
  probe
  misc_feature (1)..(25): SEQ ID NO: 2697; WAN024GET_at; Start 57; Stop 81
taactatcttcgtattcgccgtgcg

SEQ ID NO: 242619 - DNA, 25 bp, Artificial
  probe
  misc_feature (1)..(25): SEQ ID NO: 2697; WAN024GET_at; Start 43; Stop 67
gcgtggatgggctttaactatcttc

SEQ ID NO: 242620 - DNA, 25 bp, Artificial
  probe
  misc_feature (1)..(25): SEQ ID NO: 2697; WAN024GET_at; Start 106; Stop 130
tttgaagccttgattcgtacgggtc

SEQ ID NO: 242621 - DNA, 25 bp, Artificial
  probe
  misc_feature (1)..(25): SEQ ID NO: 2697; WAN024GET_at; Start 121; Stop 145
cgtacgggtcaattgattgatttgc

SEQ ID NO: 242622 - DNA, 25 bp, Artificial
  probe
  misc_feature (1)..(25): SEQ ID NO: 2697; WAN024GET_at; Start 61; Stop 85
tatcttcgtattcgccgtgcggcta

SEQ ID NO: 242623 - DNA, 25 bp, Artificial
  probe
  misc_feature (1)..(25): SEQ ID NO: 2697; WAN024GET_at; Start 310; Stop 334
caaggtttttctgagatttatatcc

SEQ ID NO: 242624 - DNA, 25 bp, Artificial
  probe
  misc_feature (1)..(25): SEQ ID NO: 2697; WAN024GET_at; Start 282; Stop 306
tacaaatgcagctctttacttgaaa

SEQ ID NO: 242625 - DNA, 25 bp, Artificial
  probe
  misc_feature (1)..(25): SEQ ID NO: 2697; WAN024GET_at; Start 75; Stop 99
ccgtgcggctaaaattgtggacaat

SEQ ID NO: 242626 - DNA, 25 bp, Artificial
  probe
  misc_feature (1)..(25): SEQ ID NO: 2697; WAN024GET_at; Start 187; Stop 211
cgcaatattccttcaagtcagttga

SEQ ID NO: 242627 - DNA, 25 bp, Artificial
  probe
  misc_feature (1)..(25): SEQ ID NO: 2697; WAN024GET_at; Start 205; Stop 229
cagttgaaaactagtcttgcagccc

SEQ ID NO: 242628 - DNA, 25 bp, Artificial
  probe
  misc_feature (1)..(25): SEQ ID NO: 2697; WAN024GET_at; Start 236; Stop 260
aagataaacctgtccttctctacga

SEQ ID NO: 242629 - DNA, 25 bp, Artificial
  probe
  misc_feature (1)..(25): SEQ ID NO: 2697; WAN024GET_at; Start 222; Stop 246
tgcagcccttcgtaaagataaacct

SEQ ID NO: 242630 - DNA, 25 bp, Artificial
  probe
  misc_feature (1)..(25): SEQ ID NO: 2697; WAN024GET_at; Start 354; Stop 378
ttggaaagggaaagtgaagactagc

SEQ ID NO: 242631 - DNA, 25 bp, Artificial
  probe
  misc_feature (1)..(25): SEQ ID NO: 2697; WAN024GET_at; Start 270; Stop 294
tgcgcaacgagttacaaatgcagct

SEQ ID NO: 242632 - DNA, 25 bp, Artificial
  probe
  misc_feature (1)..(25): SEQ ID NO: 2697; WAN024GET_at; Start 131; Stop 155
aattgattgatttgcgcgacccagc

SEQ ID NO: 242633 - DNA, 25 bp, Artificial
  probe
  misc_feature (1)..(25): SEQ ID NO: 2697; WAN024GET_at; Start 340; Stop 364
tatggcttggattcttggaaaggga

SEQ ID NO: 242634 - DNA, 25 bp, Artificial
  probe
  misc_feature (1)..(25): SEQ ID NO: 2697; WAN024GET_at; Start 72; Stop 96
tcgccgtgcggctaaaattgtggac

SEQ ID NO: 242635 - DNA, 25 bp, Artificial
  probe
  misc_feature (1)..(25): SEQ ID NO: 2697; WAN024GET_at; Start 167; Stop 191
gaaaacatatccttggtgcacgcaa

SEQ ID NO: 242636 - DNA, 25 bp, Artificial
  probe
  misc_feature (1)..(25): SEQ ID NO: 2697; WAN024GET_at; Start 324; Stop 348
gatttatatcctttcttatggcttg

SEQ ID NO: 242637 - DNA, 25 bp, Artificial
  probe
  misc_feature (1)..(25): SEQ ID NO: 2697; WAN024GET_at; Start 209; Stop 233
tgaaaactagtcttgcagcccttcg

SEQ ID NO: 242638 - DNA, 25 bp, Artificial
  probe
  misc_feature (1)..(25): SEQ ID NO: 2697; WAN024GET_at; Start 157; Stop 181
gaattccacagaaaacatatccttg

SEQ ID NO: 242639 - DNA, 25 bp, Artificial
  probe
  misc_feature (1)..(25): SEQ ID NO: 2697; WAN024GET_at; Start 90; Stop 114
tgtggacaatgaggagtttgaagcc

SEQ ID NO: 242640 - DNA, 25 bp, Artificial
  probe
  misc_feature (1)..(25): SEQ ID NO: 2697; WAN024GET_at; Start 334; Stop 358
ctttcttatggcttggattcttgga

SEQ ID NO: 242641 - DNA, 25 bp, Artificial
  probe
  misc_feature (1)..(25): SEQ ID NO: 2697; WAN024GET_at; Start 181; Stop 205
ggtgcacgcaatattccttcaagtc

SEQ ID NO: 242642 - DNA, 25 bp, Artificial
  probe
  misc_feature (1)..(25): SEQ ID NO: 2697; WAN024GET_at; Start 94; Stop 118
gacaatgaggagtttgaagccttga

SEQ ID NO: 242643 - DNA, 25 bp, Artificial
  probe
  misc_feature (1)..(25): SEQ ID NO: 2697; WAN024GET_at; Start 213; Stop 237
aactagtcttgcagcccttcgtaaa

SEQ ID NO: 242644 - DNA, 25 bp, Artificial
  probe
  misc_feature (1)..(25): SEQ ID NO: 3984; WAN024GEU_at; Start 190; Stop 214
tatctagaggcagaagcagttcttc

SEQ ID NO: 242645 - DNA, 25 bp, Artificial
  probe
  misc_feature (1)..(25): SEQ ID NO: 3984; WAN024GEU_at; Start 208; Stop 232
gttcttcgcagagagcacaaggtag

SEQ ID NO: 242646 - DNA, 25 bp, Artificial
  probe
  misc_feature (1)..(25): SEQ ID NO: 3984; WAN024GEU_at; Start 178; Stop 202
gataaattagactatctagaggcag

SEQ ID NO: 242647 - DNA, 25 bp, Artificial
  probe
  misc_feature (1)..(25): SEQ ID NO: 3984; WAN024GEU_at; Start 210; Stop 234
tcttcgcagagagcacaaggtagaa

SEQ ID NO: 242648 - DNA, 25 bp, Artificial
  probe
  misc_feature (1)..(25): SEQ ID NO: 3984; WAN024GEU_at; Start 153; Stop 177
tcggatttacgatgcagggttgatg

SEQ ID NO: 242649 - DNA, 25 bp, Artificial
  probe
  misc_feature (1)..(25): SEQ ID NO: 3984; WAN024GEU_at; Start 100; Stop 124
gtttacatgggaaaacgcttatatg

SEQ ID NO: 242650 - DNA, 25 bp, Artificial
  probe
  misc_feature (1)..(25): SEQ ID NO: 3984; WAN024GEU_at; Start 41; Stop 65
tgagtcttatgaaaacattctatga

SEQ ID NO: 242651 - DNA, 25 bp, Artificial
  probe
  misc_feature (1)..(25): SEQ ID NO: 3984; WAN024GEU_at; Start 56; Stop 80
cattctatgatgtgcagcaattcct

SEQ ID NO: 242652 - DNA, 25 bp, Artificial
  probe
  misc_feature (1)..(25): SEQ ID NO: 3984; WAN024GEU_at; Start 220; Stop 244
gagcacaaggtagaattggattata

SEQ ID NO: 242653 - DNA, 25 bp, Artificial
  probe
  misc_feature (1)..(25): SEQ ID NO: 3984; WAN024GEU_at; Start 185; Stop 209
tagactatctagaggcagaagcagt

SEQ ID NO: 242654 - DNA, 25 bp, Artificial
  probe
  misc_feature (1)..(25): SEQ ID NO: 3984; WAN024GEU_at; Start 124; Stop 148
gatattgaactgatgaagttggaac

SEQ ID NO: 242655 - DNA, 25 bp, Artificial
  probe
  misc_feature (1)..(25): SEQ ID NO: 3984; WAN024GEU_at; Start 34; Stop 58
gctagaatgagtcttatgaaaacat

SEQ ID NO: 242656 - DNA, 25 bp, Artificial
  probe
  misc_feature (1)..(25): SEQ ID NO: 3984; WAN024GEU_at; Start 235; Stop 259
ttggattatattgagaaaaatggag

SEQ ID NO: 242657 - DNA, 25 bp, Artificial
  probe
  misc_feature (1)..(25): SEQ ID NO: 3984; WAN024GEU_at; Start 3; Stop 27
gagtctcttcttgaaaaaaacacaa

SEQ ID NO: 242658 - DNA, 25 bp, Artificial
  probe
  misc_feature (1)..(25): SEQ ID NO: 3984; WAN024GEU_at; Start 216; Stop 240
cagagagcacaaggtagaattggat

SEQ ID NO: 242659 - DNA, 25 bp, Artificial
  probe
  misc_feature (1)..(25): SEQ ID NO: 3984; WAN024GEU_at; Start 108; Stop 132
gggaaaacgcttatatgatattgaa

SEQ ID NO: 242660 - DNA, 25 bp, Artificial
  probe
  misc_feature (1)..(25): SEQ ID NO: 3984; WAN024GEU_at; Start 202; Stop 226
gaagcagttcttcgcagagagcaca

SEQ ID NO: 242661 - DNA, 25 bp, Artificial
  probe
  misc_feature (1)..(25): SEQ ID NO: 3984; WAN024GEU_at; Start 77; Stop 101
tcctcaaacgatttggtattattgt

SEQ ID NO: 242662 - DNA, 25 bp, Artificial
  probe
  misc_feature (1)..(25): SEQ ID NO: 3984; WAN024GEU_at; Start 160; Stop 184
tacgatgcagggttgatggataaat

SEQ ID NO: 242663 - DNA, 25 bp, Artificial
  probe
  misc_feature (1)..(25): SEQ ID NO: 3984; WAN024GEU_at; Start 133; Stop 157
ctgatgaagttggaactatctcgga

SEQ ID NO: 242664 - DNA, 25 bp, Artificial
  probe
  misc_feature (1)..(25): SEQ ID NO: 3984; WAN024GEU_at; Start 51; Stop 75
gaaaacattctatgatgtgcagcaa

SEQ ID NO: 242665 - DNA, 25 bp, Artificial
  probe
  misc_feature (1)..(25): SEQ ID NO: 3984; WAN024GEU_at; Start 194; Stop 218
tagaggcagaagcagttcttcgcag

SEQ ID NO: 242666 - DNA, 25 bp, Artificial
  probe
  misc_feature (1)..(25): SEQ ID NO: 3984; WAN024GEU_at; Start 145; Stop 169
gaactatctcggatttacgatgcag

SEQ ID NO: 242667 - DNA, 25 bp, Artificial
  probe
  misc_feature (1)..(25): SEQ ID NO: 3984; WAN024GEU_at; Start 166; Stop 190
gcagggttgatggataaattagact

SEQ ID NO: 242668 - DNA, 25 bp, Artificial
  probe
  misc_feature (1)..(25): SEQ ID NO: 3984; WAN024GEU_at; Start 23; Stop 47
cacaaaattttgctagaatgagtct

SEQ ID NO: 242669 - DNA, 25 bp, Artificial
  probe
  misc_feature (1)..(25): SEQ ID NO: 3984; WAN024GEU_at; Start 93; Stop 117
tattattgtttacatgggaaaacgc

SEQ ID NO: 242670 - DNA, 25 bp, Artificial
  probe
  misc_feature (1)..(25): SEQ ID NO: 3984; WAN024GEU_at; Start 139; Stop 163
aagttggaactatctcggatttacg

SEQ ID NO: 242671 - DNA, 25 bp, Artificial
  probe
  misc_feature (1)..(25): SEQ ID NO: 3984; WAN024GEU_at; Start 200; Stop 224
cagaagcagttcttcgcagagagca

SEQ ID NO: 242672 - DNA, 25 bp, Artificial
  probe
  misc_feature (1)..(25): SEQ ID NO: 3984; WAN024GEU_at; Start 205; Stop 229
gcagttcttcgcagagagcacaagg

SEQ ID NO: 242673 - DNA, 25 bp, Artificial
  probe
  misc_feature (1)..(25): SEQ ID NO: 3984; WAN024GEU_at; Start 115; Stop 139
cgcttatatgatattgaactgatga

SEQ ID NO: 242674 - DNA, 25 bp, Artificial
  probe
  misc_feature (1)..(25): SEQ ID NO: 3984; WAN024GEU_at; Start 64; Stop 88
gatgtgcagcaattcctcaaacgat

SEQ ID NO: 242675 - DNA, 25 bp, Artificial
  probe
  misc_feature (1)..(25): SEQ ID NO: 3984; WAN024GEU_at; Start 69; Stop 93
gcagcaattcctcaaacgatttggt

SEQ ID NO: 242676 - DNA, 25 bp, Artificial
  probe
  misc_feature (1)..(25): SEQ ID NO: 3984; WAN024GEU_at; Start 148; Stop 172
ctatctcggatttacgatgcagggt

SEQ ID NO: 242677 - DNA, 25 bp, Artificial
  probe
  misc_feature (1)..(25): SEQ ID NO: 3984; WAN024GEU_at; Start 213; Stop 237
tcgcagagagcacaaggtagaattg

SEQ ID NO: 242678 - DNA, 25 bp, Artificial
  probe
  misc_feature (1)..(25): SEQ ID NO: 5406; WAN024GEV_at; Start 222; Stop 246
tcagccaagtctctccaatgcagtg

SEQ ID NO: 242679 - DNA, 25 bp, Artificial
  probe
  misc_feature (1)..(25): SEQ ID NO: 5406; WAN024GEV_at; Start 664; Stop 688
tttgtcagcaagaccaaccctctgg

SEQ ID NO: 242680 - DNA, 25 bp, Artificial
  probe
  misc_feature (1)..(25): SEQ ID NO: 5406; WAN024GEV_at; Start 60; Stop 84
tcaagaagagactcacacaatgctc

SEQ ID NO: 242681 - DNA, 25 bp, Artificial
  probe
  misc_feature (1)..(25): SEQ ID NO: 5406; WAN024GEV_at; Start 721; Stop 745
gagaatttcccttacctcagctatg

SEQ ID NO: 242682 - DNA, 25 bp, Artificial
  probe
  misc_feature (1)..(25): SEQ ID NO: 5406; WAN024GEV_at; Start 501; Stop 525
ccttcgtgaaactcggacttgggag

SEQ ID NO: 242683 - DNA, 25 bp, Artificial
  probe
  misc_feature (1)..(25): SEQ ID NO: 5406; WAN024GEV_at; Start 535; Stop 559
gacgtcaagaacttccgcagtgagg

SEQ ID NO: 242684 - DNA, 25 bp, Artificial
  probe
  misc_feature (1)..(25): SEQ ID NO: 5406; WAN024GEV_at; Start 961; Stop 985
tatatccagcatgagaaaaccagcc

SEQ ID NO: 242685 - DNA, 25 bp, Artificial
  probe
  misc_feature (1)..(25): SEQ ID NO: 5406; WAN024GEV_at; Start 345; Stop 369
tcaggttgtcgagcagacccagctt

SEQ ID NO: 242686 - DNA, 25 bp, Artificial
  probe
  misc_feature (1)..(25): SEQ ID NO: 5406; WAN024GEV_at; Start 296; Stop 320
agggaatcaccttgacccgtgatgg

SEQ ID NO: 242687 - DNA, 25 bp, Artificial
  probe
  misc_feature (1)..(25): SEQ ID NO: 5406; WAN024GEV_at; Start 462; Stop 486
tttgctcaagaaaagcgatatggag

SEQ ID NO: 242688 - DNA, 25 bp, Artificial
  probe
  misc_feature (1)..(25): SEQ ID NO: 5406; WAN024GEV_at; Start 380; Stop 404
gctataaaaatcctgtcgcccaccg

SEQ ID NO: 242689 - DNA, 25 bp, Artificial
  probe
  misc_feature (1)..(25): SEQ ID NO: 5406; WAN024GEV_at; Start 739; Stop 763
agctatgaccaagggacgcacaact

SEQ ID NO: 242690 - DNA, 25 bp, Artificial
  probe
  misc_feature (1)..(25): SEQ ID NO: 5406; WAN024GEV_at; Start 517; Stop 541
acttgggagattatcgacgacgtca

SEQ ID NO: 242691 - DNA, 25 bp, Artificial
  probe
  misc_feature (1)..(25): SEQ ID NO: 5406; WAN024GEV_at; Start 414; Stop 438
tagcgtttcgtctcaacactatgcc

SEQ ID NO: 242692 - DNA, 25 bp, Artificial
  probe
  misc_feature (1)..(25): SEQ ID NO: 5406; WAN024GEV_at; Start 185; Stop 209
gctccatgaatgaggcagccaagca

SEQ ID NO: 242693 - DNA, 25 bp, Artificial
  probe
  misc_feature (1)..(25): SEQ ID NO: 5406; WAN024GEV_at; Start 362; Stop 386
cccagcttctggaggaacgctataa

SEQ ID NO: 242694 - DNA, 25 bp, Artificial
  probe
  misc_feature (1)..(25): SEQ ID NO: 5406; WAN024GEV_at; Start 168; Stop 192
caaaatcgtcgaaactggctccatg

SEQ ID NO: 242695 - DNA, 25 bp, Artificial
  probe
  misc_feature (1)..(25): SEQ ID NO: 5406; WAN024GEV_at; Start 430; Stop 454
cactatgcctttgtggtcaatgcct

SEQ ID NO: 242696 - DNA, 25 bp, Artificial
  probe
  misc_feature (1)..(25): SEQ ID NO: 5406; WAN024GEV_at; Start 600; Stop 624
aaccaagatgctggatgacaatcac

SEQ ID NO: 242697 - DNA, 25 bp, Artificial
  probe
  misc_feature (1)..(25): SEQ ID NO: 5406; WAN024GEV_at; Start 877; Stop 901
gcgacagggattttgaacagcaacc

SEQ ID NO: 242698 - DNA, 25 bp, Artificial
  probe
  misc_feature (1)..(25): SEQ ID NO: 5406; WAN024GEV_at; Start 447; Stop 471
caatgcctttgtctctttgctcaag

SEQ ID NO: 242699 - DNA, 25 bp, Artificial
  probe
  misc_feature (1)..(25): SEQ ID NO: 5406; WAN024GEV_at; Start 263; Stop 287
aaatgggcattgagatctttatccg

SEQ ID NO: 242700 - DNA, 25 bp, Artificial
  probe
  misc_feature (1)..(25): SEQ ID NO: 5406; WAN024GEV_at; Start 682; Stop 706
cctctggcaaagaaagacaaggtga

SEQ ID NO: 242701 - DNA, 25 bp, Artificial
  probe
  misc_feature (1)..(25): SEQ ID NO: 5406; WAN024GEV_at; Start 583; Stop 607
tacaaccgtgatgttttaaccaaga

SEQ ID NO: 242702 - DNA, 25 bp, Artificial
  probe
  misc_feature (1)..(25): SEQ ID NO: 5406; WAN024GEV_at; Start 924; Stop 948
tatcccactggatattgatgacccg

SEQ ID NO: 242703 - DNA, 25 bp, Artificial
  probe
  misc_feature (1)..(25): SEQ ID NO: 5406; WAN024GEV_at; Start 699; Stop 723
caaggtgaaactgtctgatttggag

SEQ ID NO: 242704 - DNA, 25 bp, Artificial
  probe
  misc_feature (1)..(25): SEQ ID NO: 5406; WAN024GEV_at; Start 278; Stop 302
tctttatccgcaatcccaagggaat

SEQ ID NO: 242705 - DNA, 25 bp, Artificial
  probe
  misc_feature (1)..(25): SEQ ID NO: 5406; WAN024GEV_at; Start 106; Stop 130
gcgattctaaggcaagtatggtaca

SEQ ID NO: 242706 - DNA, 25 bp, Artificial
  probe
  misc_feature (1)..(25): SEQ ID NO: 5406; WAN024GEV_at; Start 237; Stop 261
caatgcagtgcgagatttggaaaat

SEQ ID NO: 242707 - DNA, 25 bp, Artificial
  probe
  misc_feature (1)..(25): SEQ ID NO: 5406; WAN024GEV_at; Start 325; Stop 349
gagtttctctcttatgcccgtcagg

SEQ ID NO: 242708 - DNA, 25 bp, Artificial
  probe
  misc_feature (1)..(25): SEQ ID NO: 5406; WAN024GEV_at; Start 888; Stop 912
tttgaacagcaacctaaacggagac

SEQ ID NO: 242709 - DNA, 25 bp, Artificial
  probe
  misc_feature (1)..(25): SEQ ID NO: 5406; WAN024GEV_at; Start 862; Stop 886
gatggttataccattgcgacaggga

SEQ ID NO: 242710 - DNA, 25 bp, Artificial
  probe
  misc_feature (1)..(25): SEQ ID NO: 5406; WAN024GEV_at; Start 808; Stop 832
aaatccattgtggtcagtgaccgtg

SEQ ID NO: 242711 - DNA, 25 bp, Artificial
  probe
  misc_feature (1)..(25): SEQ ID NO: 5406; WAN024GEV_at; Start 204; Stop 228
caagcaactctttatcactcagcca

SEQ ID NO: 242712 - DNA, 25 bp, Artificial
  probe
  misc_feature (1)..(25): SEQ ID NO: 5134; WAN024GEW_at; Start 86; Stop 110
tggtctccatgcagatgggtaataa

SEQ ID NO: 242713 - DNA, 25 bp, Artificial
  probe
  misc_feature (1)..(25): SEQ ID NO: 5134; WAN024GEW_at; Start 141; Stop 165
tggtttccagaatgcgattttgcgt

SEQ ID NO: 242714 - DNA, 25 bp, Artificial
  probe
  misc_feature (1)..(25): SEQ ID NO: 5134; WAN024GEW_at; Start 118; Stop 142
gctgaccttacgtggtcgaattgtg

SEQ ID NO: 242715 - DNA, 25 bp, Artificial
  probe
  misc_feature (1)..(25): SEQ ID NO: 5134; WAN024GEW_at; Start 172; Stop 196
tccacagtcaaagagccaaacttcg

SEQ ID NO: 242716 - DNA, 25 bp, Artificial
  probe
  misc_feature (1)..(25): SEQ ID NO: 5134; WAN024GEW_at; Start 134; Stop 158
cgaattgtggtttccagaatgcgat

SEQ ID NO: 242717 - DNA, 25 bp, Artificial
  probe
  misc_feature (1)..(25): SEQ ID NO: 5134; WAN024GEW_at; Start 184; Stop 208
gagccaaacttcgttaatctcatcc

SEQ ID NO: 242718 - DNA, 25 bp, Artificial
  probe
  misc_feature (1)..(25): SEQ ID NO: 5134; WAN024GEW_at; Start 77; Stop 101
ccaaaaatgtggtctccatgcagat

SEQ ID NO: 242719 - DNA, 25 bp, Artificial
  probe
  misc_feature (1)..(25): SEQ ID NO: 5134; WAN024GEW_at; Start 68; Stop 92
cctggcaaaccaaaaatgtggtctc

SEQ ID NO: 242720 - DNA, 25 bp, Artificial
  probe
  misc_feature (1)..(25): SEQ ID NO: 5134; WAN024GEW_at; Start 108; Stop 132
taaagattttgctgaccttacgtgg

SEQ ID NO: 242721 - DNA, 25 bp, Artificial
  probe
  misc_feature (1)..(25): SEQ ID NO: 5134; WAN024GEW_at; Start 154; Stop 178
gcgattttgcgtaccttctccacag

SEQ ID NO: 242722 - DNA, 25 bp, Artificial
  probe
  misc_feature (1)..(25): SEQ ID NO: 5134; WAN024GEW_at; Start 25; Stop 49
tgtctgctcttcattggcctgaaag

SEQ ID NO: 242723 - DNA, 25 bp, Artificial
  probe
  misc_feature (1)..(25): SEQ ID NO: 5134; WAN024GEW_at; Start 2; Stop 26
tgaggtccgtagatttccaaatctg

SEQ ID NO: 242724 - DNA, 25 bp, Artificial
  probe
  misc_feature (1)..(25): SEQ ID NO: 5134; WAN024GEW_at; Start 36; Stop 60
cattggcctgaaaggcacggctaga

SEQ ID NO: 242725 - DNA, 25 bp, Artificial
  probe
  misc_feature (1)..(25): SEQ ID NO: 5134; WAN024GEW_at; Start 198; Stop 222
taatctcatccaaaagtttcagggc

SEQ ID NO: 242726 - DNA, 25 bp, Artificial
  probe
  misc_feature (1)..(25): SEQ ID NO: 5134; WAN024GEW_at; Start 207; Stop 231
ccaaaagtttcagggcgagacttga

SEQ ID NO: 242727 - DNA, 25 bp, Artificial
  probe
  misc_feature (1)..(25): SEQ ID NO: 5134; WAN024GEW_at; Start 112; Stop 136
gattttgctgaccttacgtggtcga

SEQ ID NO: 242728 - DNA, 25 bp, Artificial
  probe
  misc_feature (1)..(25): SEQ ID NO: 5134; WAN024GEW_at; Start 55; Stop 79
gctagaaaggaaacctggcaaacca

SEQ ID NO: 242729 - DNA, 25 bp, Artificial
  probe
  misc_feature (1)..(25): SEQ ID NO: 5134; WAN024GEW_at; Start 32; Stop 56
tcttcattggcctgaaaggcacggc

SEQ ID NO: 242730 - DNA, 25 bp, Artificial
  probe
  misc_feature (1)..(25): SEQ ID NO: 5134; WAN024GEW_at; Start 44; Stop 68
tgaaaggcacggctagaaaggaaac

SEQ ID NO: 242731 - DNA, 25 bp, Artificial
  probe
  misc_feature (1)..(25): SEQ ID NO: 5134; WAN024GEW_at; Start 201; Stop 225
tctcatccaaaagtttcagggcgag

SEQ ID NO: 242732 - DNA, 25 bp, Artificial
  probe
  misc_feature (1)..(25): SEQ ID NO: 5134; WAN024GEW_at; Start 176; Stop 200
cagtcaaagagccaaacttcgttaa

SEQ ID NO: 242733 - DNA, 25 bp, Artificial
  probe
  misc_feature (1)..(25): SEQ ID NO: 5134; WAN024GEW_at; Start 49; Stop 73
ggcacggctagaaaggaaacctggc

SEQ ID NO: 242734 - DNA, 25 bp, Artificial
  probe
  misc_feature (1)..(25): SEQ ID NO: 5134; WAN024GEW_at; Start 13; Stop 37
gatttccaaatctgtctgctcttca

SEQ ID NO: 242735 - DNA, 25 bp, Artificial
  probe
  misc_feature (1)..(25): SEQ ID NO: 5134; WAN024GEW_at; Start 80; Stop 104
aaaatgtggtctccatgcagatggg

SEQ ID NO: 242736 - DNA, 25 bp, Artificial
  probe
  misc_feature (1)..(25): SEQ ID NO: 5134; WAN024GEW_at; Start 165; Stop 189
taccttctccacagtcaaagagcca

SEQ ID NO: 242737 - DNA, 25 bp, Artificial
  probe
  misc_feature (1)..(25): SEQ ID NO: 5134; WAN024GEW_at; Start 150; Stop 174
gaatgcgattttgcgtaccttctcc

SEQ ID NO: 242738 - DNA, 25 bp, Artificial
  probe
  misc_feature (1)..(25): SEQ ID NO: 5134; WAN024GEW_at; Start 126; Stop 150
tacgtggtcgaattgtggtttccag

SEQ ID NO: 242739 - DNA, 25 bp, Artificial
  probe
  misc_feature (1)..(25): SEQ ID NO: 5134; WAN024GEW_at; Start 146; Stop 170
tccagaatgcgattttgcgtacctt

SEQ ID NO: 242740 - DNA, 25 bp, Artificial
  probe
  misc_feature (1)..(25): SEQ ID NO: 5134; WAN024GEW_at; Start 161; Stop 185
tgcgtaccttctccacagtcaaaga

SEQ ID NO: 242741 - DNA, 25 bp, Artificial
  probe
  misc_feature (1)..(25): SEQ ID NO: 5134; WAN024GEW_at; Start 92; Stop 116
ccatgcagatgggtaataaagattt

SEQ ID NO: 242742 - DNA, 25 bp, Artificial
  probe
  misc_feature (1)..(25): SEQ ID NO: 5134; WAN024GEW_at; Start 99; Stop 123
gatgggtaataaagattttgctgac

SEQ ID NO: 242743 - DNA, 25 bp, Artificial
  probe
  misc_feature (1)..(25): SEQ ID NO: 5134; WAN024GEW_at; Start 204; Stop 228
catccaaaagtttcagggcgagact

SEQ ID NO: 242744 - DNA, 25 bp, Artificial
  probe
  misc_feature (1)..(25): SEQ ID NO: 5134; WAN024GEW_at; Start 19; Stop 43
caaatctgtctgctcttcattggcc

SEQ ID NO: 242745 - DNA, 25 bp, Artificial
  probe
  misc_feature (1)..(25): SEQ ID NO: 5134; WAN024GEW_at; Start 51; Stop 75
cacggctagaaaggaaacctggcaa

SEQ ID NO: 242746 - DNA, 25 bp, Artificial
  probe
  misc_feature (1)..(25): SEQ ID NO: 2345; WAN024GEX_at; Start 408; Stop 432
cactgtgtatgcagaggagctggac

SEQ ID NO: 242747 - DNA, 25 bp, Artificial
  probe
  misc_feature (1)..(25): SEQ ID NO: 2345; WAN024GEX_at; Start 423; Stop 447
ggagctggaccacactattttctgt

SEQ ID NO: 242748 - DNA, 25 bp, Artificial
  probe
  misc_feature (1)..(25): SEQ ID NO: 2345; WAN024GEX_at; Start 104; Stop 128
tctttgactgtggagaaggtacgca

SEQ ID NO: 242749 - DNA, 25 bp, Artificial
  probe
  misc_feature (1)..(25): SEQ ID NO: 2345; WAN024GEX_at; Start 231; Stop 255
tagccgtgcctttcaggccaatgaa

SEQ ID NO: 242750 - DNA, 25 bp, Artificial
  probe
  misc_feature (1)..(25): SEQ ID NO: 2345; WAN024GEX_at; Start 607; Stop 631
tcagcgccacgtccaggtaagatta

SEQ ID NO: 242751 - DNA, 25 bp, Artificial
  probe
  misc_feature (1)..(25): SEQ ID NO: 2345; WAN024GEX_at; Start 157; Stop 181
ccacgtaaggtcagcaaaatcttta

SEQ ID NO: 242752 - DNA, 25 bp, Artificial
  probe
  misc_feature (1)..(25): SEQ ID NO: 2345; WAN024GEX_at; Start 886; Stop 910
gaaaatgtccatgtggtcaaagact

SEQ ID NO: 242753 - DNA, 25 bp, Artificial
  probe
  misc_feature (1)..(25): SEQ ID NO: 2345; WAN024GEX_at; Start 555; Stop 579
ccaggatcttgttttggaagacgga

SEQ ID NO: 242754 - DNA, 25 bp, Artificial
  probe
  misc_feature (1)..(25): SEQ ID NO: 2345; WAN024GEX_at; Start 666; Stop 690
cagtgtgcgtctggctgtcaatgca

SEQ ID NO: 242755 - DNA, 25 bp, Artificial
  probe
  misc_feature (1)..(25): SEQ ID NO: 2345; WAN024GEX_at; Start 703; Stop 727
catgagtccacttatggcaagggtg

SEQ ID NO: 242756 - DNA, 25 bp, Artificial
  probe
  misc_feature (1)..(25): SEQ ID NO: 2345; WAN024GEX_at; Start 321; Stop 345
tgtgtcaggttctcgtctgccctac

SEQ ID NO: 242757 - DNA, 25 bp, Artificial
  probe
  misc_feature (1)..(25): SEQ ID NO: 2345; WAN024GEX_at; Start 630; Stop 654
tatcactattttaggagacactcga

SEQ ID NO: 242758 - DNA, 25 bp, Artificial
  probe
  misc_feature (1)..(25): SEQ ID NO: 2345; WAN024GEX_at; Start 732; Stop 756
aaaaattgctcgtaaccatggtcac

SEQ ID NO: 242759 - DNA, 25 bp, Artificial
  probe
  misc_feature (1)..(25): SEQ ID NO: 2345; WAN024GEX_at; Start 464; Stop 488
tgcaaaaggatctagaagggacgct

SEQ ID NO: 242760 - DNA, 25 bp, Artificial
  probe
  misc_feature (1)..(25): SEQ ID NO: 2345; WAN024GEX_at; Start 688; Stop 712
gcagatgtcctagttcatgagtcca

SEQ ID NO: 242761 - DNA, 25 bp, Artificial
  probe
  misc_feature (1)..(25): SEQ ID NO: 2345; WAN024GEX_at; Start 180; Stop 204
tattacccatctgcatggagaccac

SEQ ID NO: 242762 - DNA, 25 bp, Artificial
  probe
  misc_feature (1)..(25): SEQ ID NO: 2345; WAN024GEX_at; Start 118; Stop 142
gaaggtacgcaaaatcgcattctgg

SEQ ID NO: 242763 - DNA, 25 bp, Artificial
  probe
  misc_feature (1)..(25): SEQ ID NO: 2345; WAN024GEX_at; Start 87; Stop 111
gattaacgaagtttggctctttgac

SEQ ID NO: 242764 - DNA, 25 bp, Artificial
  probe
  misc_feature (1)..(25): SEQ ID NO: 2345; WAN024GEX_at; Start 42; Stop 66
taaagcccgcaacgtttcaagtctc

SEQ ID NO: 242765 - DNA, 25 bp, Artificial
  probe
  misc_feature (1)..(25): SEQ ID NO: 2345; WAN024GEX_at; Start 824; Stop 848
tcagtgcccgtttcctctcaaaaga

SEQ ID NO: 242766 - DNA, 25 bp, Artificial
  probe
  misc_feature (1)..(25): SEQ ID NO: 2345; WAN024GEX_at; Start 505; Stop 529
aaggctgctggtgttccgttcggcc

SEQ ID NO: 242767 - DNA, 25 bp, Artificial
  probe
  misc_feature (1)..(25): SEQ ID NO: 2345; WAN024GEX_at; Start 265; Stop 289
gatttggaaatctacggacctcaag

SEQ ID NO: 242768 - DNA, 25 bp, Artificial
  probe
  misc_feature (1)..(25): SEQ ID NO: 2345; WAN024GEX_at; Start 298; Stop 322
tcatttgtcttaaccagccttcgtg

SEQ ID NO: 242769 - DNA, 25 bp, Artificial
  probe
  misc_feature (1)..(25): SEQ ID NO: 2345; WAN024GEX_at; Start 449; Stop 473
ttggctatcgtgtcatgcaaaagga

SEQ ID NO: 242770 - DNA, 25 bp, Artificial
  probe
  misc_feature (1)..(25): SEQ ID NO: 2345; WAN024GEX_at; Start 140; Stop 164
tggaaaccacaattcgaccacgtaa

SEQ ID NO: 242771 - DNA, 25 bp, Artificial
  probe
  misc_feature (1)..(25): SEQ ID NO: 2345; WAN024GEX_at; Start 216; Stop 240
gccaggtttcctttctagccgtgcc

SEQ ID NO: 242772 - DNA, 25 bp, Artificial
  probe
  misc_feature (1)..(25): SEQ ID NO: 2345; WAN024GEX_at; Start 587; Stop 611
tcaaggcagcagactatatctcagc

SEQ ID NO: 242773 - DNA, 25 bp, Artificial
  probe
  misc_feature (1)..(25): SEQ ID NO: 2345; WAN024GEX_at; Start 750; Stop 774
tggtcactcaactaatatgcaagct

SEQ ID NO: 242774 - DNA, 25 bp, Artificial
  probe
  misc_feature (1)..(25): SEQ ID NO: 2345; WAN024GEX_at; Start 280; Stop 304
ggacctcaaggaatcaagtcatttg

SEQ ID NO: 242775 - DNA, 25 bp, Artificial
  probe
  misc_feature (1)..(25): SEQ ID NO: 2345; WAN024GEX_at; Start 246; Stop 270
ggccaatgaagagcagacagatttg

SEQ ID NO: 242776 - DNA, 25 bp, Artificial
  probe
  misc_feature (1)..(25): SEQ ID NO: 2345; WAN024GEX_at; Start 339; Stop 363
gccctaccgcattcatttccatgag

SEQ ID NO: 242777 - DNA, 25 bp, Artificial
  probe
  misc_feature (1)..(25): SEQ ID NO: 2345; WAN024GEX_at; Start 569; Stop 593
tggaagacggaactgaaatcaaggc

SEQ ID NO: 242778 - DNA, 25 bp, Artificial
  probe
  misc_feature (1)..(25): SEQ ID NO: 2345; WAN024GEX_at; Start 763; Stop 787
aatatgcaagctgcacaagtagcgg

SEQ ID NO: 242779 - DNA, 25 bp, Artificial
  probe
  misc_feature (1)..(25): SEQ ID NO: 2345; WAN024GEX_at; Start 855; Stop 879
caaactcaagaaagacgctgccaca

SEQ ID NO: 242780 - DNA, 25 bp, Artificial
  probe
  misc_feature (1)..(25): SEQ ID NO: 5670; WAN024GEY_at; Start 339; Stop 363
cctgaccaaaatgggcaatttctaa

SEQ ID NO: 242781 - DNA, 25 bp, Artificial
  probe
  misc_feature (1)..(25): SEQ ID NO: 5670; WAN024GEY_at; Start 45; Stop 69
gattacggaaccaggtcagctgacg

SEQ ID NO: 242782 - DNA, 25 bp, Artificial
  probe
  misc_feature (1)..(25): SEQ ID NO: 5670; WAN024GEY_at; Start 254; Stop 278
tggttgatacgctcataaagttgac

SEQ ID NO: 242783 - DNA, 25 bp, Artificial
  probe
  misc_feature (1)..(25): SEQ ID NO: 5670; WAN024GEY_at; Start 16; Stop 40
tccaatctgataaaaggtgacctgc

SEQ ID NO: 242784 - DNA, 25 bp, Artificial
  probe
  misc_feature (1)..(25): SEQ ID NO: 5670; WAN024GEY_at; Start 275; Stop 299
tgactacgttcatcatccaagcaga

SEQ ID NO: 242785 - DNA, 25 bp, Artificial
  probe
  misc_feature (1)..(25): SEQ ID NO: 5670; WAN024GEY_at; Start 206; Stop 230
cacttggcctcatccaaaagcccag

SEQ ID NO: 242786 - DNA, 25 bp, Artificial
  probe
  misc_feature (1)..(25): SEQ ID NO: 5670; WAN024GEY_at; Start 269; Stop 293
taaagttgactacgttcatcatcca

SEQ ID NO: 242787 - DNA, 25 bp, Artificial
  probe
  misc_feature (1)..(25): SEQ ID NO: 5670; WAN024GEY_at; Start 127; Stop 151
ctctccacggaaataaggaaagagt

SEQ ID NO: 242788 - DNA, 25 bp, Artificial
  probe
  misc_feature (1)..(25): SEQ ID NO: 5670; WAN024GEY_at; Start 330; Stop 354
tttccaaatcctgaccaaaatgggc

SEQ ID NO: 242789 - DNA, 25 bp, Artificial
  probe
  misc_feature (1)..(25): SEQ ID NO: 5670; WAN024GEY_at; Start 119; Stop 143
aaggtctgctctccacggaaataag

SEQ ID NO: 242790 - DNA, 25 bp, Artificial
  probe
  misc_feature (1)..(25): SEQ ID NO: 5670; WAN024GEY_at; Start 294; Stop 318
agcagataatcagcggttcatacaa

SEQ ID NO: 242791 - DNA, 25 bp, Artificial
  probe
  misc_feature (1)..(25): SEQ ID NO: 5670; WAN024GEY_at; Start 33; Stop 57
tgacctgcatgcgattacggaacca

SEQ ID NO: 242792 - DNA, 25 bp, Artificial
  probe
  misc_feature (1)..(25): SEQ ID NO: 5670; WAN024GEY_at; Start 220; Stop 244
caaaagcccagcctcaaacatcaaa

SEQ ID NO: 242793 - DNA, 25 bp, Artificial
  probe
  misc_feature (1)..(25): SEQ ID NO: 5670; WAN024GEY_at; Start 143; Stop 167
ggaaagagttccttatagccaattc

SEQ ID NO: 242794 - DNA, 25 bp, Artificial
  probe
  misc_feature (1)..(25): SEQ ID NO: 5670; WAN024GEY_at; Start 241; Stop 265
caaatccactcggtggttgatacgc

SEQ ID NO: 242795 - DNA, 25 bp, Artificial
  probe
  misc_feature (1)..(25): SEQ ID NO: 5670; WAN024GEY_at; Start 166; Stop 190
tcctttagcagcctgtacattaggg

SEQ ID NO: 242796 - DNA, 25 bp, Artificial
  probe
  misc_feature (1)..(25): SEQ ID NO: 5670; WAN024GEY_at; Start 290; Stop 314
tccaagcagataatcagcggttcat

SEQ ID NO: 242797 - DNA, 25 bp, Artificial
  probe
  misc_feature (1)..(25): SEQ ID NO: 5670; WAN024GEY_at; Start 189; Stop 213
gggaatggtcaaacagccacttggc

SEQ ID NO: 242798 - DNA, 25 bp, Artificial
  probe
  misc_feature (1)..(25): SEQ ID NO: 5670; WAN024GEY_at; Start 321; Stop 345
tctcttgattttccaaatcctgacc

SEQ ID NO: 242799 - DNA, 25 bp, Artificial
  probe
  misc_feature (1)..(25): SEQ ID NO: 5670; WAN024GEY_at; Start 21; Stop 45
tctgataaaaggtgacctgcatgcg

SEQ ID NO: 242800 - DNA, 25 bp, Artificial
  probe
  misc_feature (1)..(25): SEQ ID NO: 5670; WAN024GEY_at; Start 48; Stop 72
tacggaaccaggtcagctgacgctt

SEQ ID NO: 242801 - DNA, 25 bp, Artificial
  probe
  misc_feature (1)..(25): SEQ ID NO: 5670; WAN024GEY_at; Start 233; Stop 257
tcaaacatcaaatccactcggtggt

SEQ ID NO: 242802 - DNA, 25 bp, Artificial
  probe
  misc_feature (1)..(25): SEQ ID NO: 5670; WAN024GEY_at; Start 122; Stop 146
gtctgctctccacggaaataaggaa

SEQ ID NO: 242803 - DNA, 25 bp, Artificial
  probe
  misc_feature (1)..(25): SEQ ID NO: 5670; WAN024GEY_at; Start 160; Stop 184
gccaattcctttagcagcctgtaca

SEQ ID NO: 242804 - DNA, 25 bp, Artificial
  probe
  misc_feature (1)..(25): SEQ ID NO: 5670; WAN024GEY_at; Start 156; Stop 180
tatagccaattcctttagcagcctg

SEQ ID NO: 242805 - DNA, 25 bp, Artificial
  probe
  misc_feature (1)..(25): SEQ ID NO: 5670; WAN024GEY_at; Start 1; Stop 25
ttgtacaccagattctccaatctga

SEQ ID NO: 242806 - DNA, 25 bp, Artificial
  probe
  misc_feature (1)..(25): SEQ ID NO: 5670; WAN024GEY_at; Start 40; Stop 64
catgcgattacggaaccaggtcagc

SEQ ID NO: 242807 - DNA, 25 bp, Artificial
  probe
  misc_feature (1)..(25): SEQ ID NO: 5670; WAN024GEY_at; Start 285; Stop 309
catcatccaagcagataatcagcgg

SEQ ID NO: 242808 - DNA, 25 bp, Artificial
  probe
  misc_feature (1)..(25): SEQ ID NO: 5670; WAN024GEY_at; Start 194; Stop 218
tggtcaaacagccacttggcctcat

SEQ ID NO: 242809 - DNA, 25 bp, Artificial
  probe
  misc_feature (1)..(25): SEQ ID NO: 5670; WAN024GEY_at; Start 27; Stop 51
aaaaggtgacctgcatgcgattacg

SEQ ID NO: 242810 - DNA, 25 bp, Artificial
  probe
  misc_feature (1)..(25): SEQ ID NO: 5670; WAN024GEY_at; Start 56; Stop 80
caggtcagctgacgcttggcaaaac

SEQ ID NO: 242811 - DNA, 25 bp, Artificial
  probe
  misc_feature (1)..(25): SEQ ID NO: 5670; WAN024GEY_at; Start 247; Stop 271
cactcggtggttgatacgctcataa

SEQ ID NO: 242812 - DNA, 25 bp, Artificial
  probe
  misc_feature (1)..(25): SEQ ID NO: 5670; WAN024GEY_at; Start 60; Stop 84
tcagctgacgcttggcaaaacgacg

SEQ ID NO: 242813 - DNA, 25 bp, Artificial
  probe
  misc_feature (1)..(25): SEQ ID NO: 5670; WAN024GEY_at; Start 259; Stop 283
gatacgctcataaagttgactacgt

SEQ ID NO: 242814 - DNA, 25 bp, Artificial
  probe
  misc_feature (1)..(25): SEQ ID NO: 3340; WAN024GEZ_at; Start 351; Stop 375
cgccggtgggactggactttatatc

SEQ ID NO: 242815 - DNA, 25 bp, Artificial
  probe
  misc_feature (1)..(25): SEQ ID NO: 3340; WAN024GEZ_at; Start 516; Stop 540
taatcgtcgtcgtgctatgcgtgcc

SEQ ID NO: 242816 - DNA, 25 bp, Artificial
  probe
  misc_feature (1)..(25): SEQ ID NO: 3340; WAN024GEZ_at; Start 226; Stop 250
gcagctgttcctcatcatttaatcg

SEQ ID NO: 242817 - DNA, 25 bp, Artificial
  probe
  misc_feature (1)..(25): SEQ ID NO: 3340; WAN024GEZ_at; Start 720; Stop 744
tgtacaggctgctaaaggaattggc

SEQ ID NO: 242818 - DNA, 25 bp, Artificial
  probe
  misc_feature (1)..(25): SEQ ID NO: 3340; WAN024GEZ_at; Start 415; Stop 439
cctcatgaggagattttagcttatc

SEQ ID NO: 242819 - DNA, 25 bp, Artificial
  probe
  misc_feature (1)..(25): SEQ ID NO: 3340; WAN024GEZ_at; Start 619; Stop 643
gaacgtagtcaactttatgagcgta

SEQ ID NO: 242820 - DNA, 25 bp, Artificial
  probe
  misc_feature (1)..(25): SEQ ID NO: 3340; WAN024GEZ_at; Start 589; Stop 613
tatgaaccgctgattatctgcttgg

SEQ ID NO: 242821 - DNA, 25 bp, Artificial
  probe
  misc_feature (1)..(25): SEQ ID NO: 3340; WAN024GEZ_at; Start 248; Stop 272
tcgatgttagagagataaccgagtc

SEQ ID NO: 242822 - DNA, 25 bp, Artificial
  probe
  misc_feature (1)..(25): SEQ ID NO: 3340; WAN024GEZ_at; Start 864; Stop 888
gcaggtcaccttttatcagattgga

SEQ ID NO: 242823 - DNA, 25 bp, Artificial
  probe
  misc_feature (1)..(25): SEQ ID NO: 3340; WAN024GEZ_at; Start 192; Stop 216
tattgggacggccaaggctagtcca

SEQ ID NO: 242824 - DNA, 25 bp, Artificial
  probe
  misc_feature (1)..(25): SEQ ID NO: 3340; WAN024GEZ_at; Start 634; Stop 658
tatgagcgtatcaaccaccgagtgg

SEQ ID NO: 242825 - DNA, 25 bp, Artificial
  probe
  misc_feature (1)..(25): SEQ ID NO: 3340; WAN024GEZ_at; Start 336; Stop 360
caagctagccattatcgccggtggg

SEQ ID NO: 242826 - DNA, 25 bp, Artificial
  probe
  misc_feature (1)..(25): SEQ ID NO: 3340; WAN024GEZ_at; Start 691; Stop 715
gccaagtggctgtttgaccattccc

SEQ ID NO: 242827 - DNA, 25 bp, Artificial
  probe
  misc_feature (1)..(25): SEQ ID NO: 3340; WAN024GEZ_at; Start 706; Stop 730
gaccattcccctaatgtacaggctg

SEQ ID NO: 242828 - DNA, 25 bp, Artificial
  probe
  misc_feature (1)..(25): SEQ ID NO: 3340; WAN024GEZ_at; Start 648; Stop 672
ccaccgagtggatttgatgtttgag

SEQ ID NO: 242829 - DNA, 25 bp, Artificial
  probe
  misc_feature (1)..(25): SEQ ID NO: 3340; WAN024GEZ_at; Start 365; Stop 389
gactttatatccagagcttgctaga

SEQ ID NO: 242830 - DNA, 25 bp, Artificial
  probe
  misc_feature (1)..(25): SEQ ID NO: 3340; WAN024GEZ_at; Start 887; Stop 911
gagaatctggtgtacaagaccgcat

SEQ ID NO: 242831 - DNA, 25 bp, Artificial
  probe
  misc_feature (1)..(25): SEQ ID NO: 3340; WAN024GEZ_at; Start 737; Stop 761
gaattggctataaggaactctttcc

SEQ ID NO: 242832 - DNA, 25 bp, Artificial
  probe
  misc_feature (1)..(25): SEQ ID NO: 3340; WAN024GEZ_at; Start 108; Stop 132
gacggctctagctattgaagttgca

SEQ ID NO: 242833 - DNA, 25 bp, Artificial
  probe
  misc_feature (1)..(25): SEQ ID NO: 3340; WAN024GEZ_at; Start 760; Stop 784
ccttatttccgtggagagcagacct

SEQ ID NO: 242834 - DNA, 25 bp, Artificial
  probe
  misc_feature (1)..(25): SEQ ID NO: 3340; WAN024GEZ_at; Start 917; Stop 941
gccagatagaggagtttttagatga

SEQ ID NO: 242835 - DNA, 25 bp, Artificial
  probe
  misc_feature (1)..(25): SEQ ID NO: 3340; WAN024GEZ_at; Start 295; Stop 319
tcagaagctaagatgactattgagg

SEQ ID NO: 242836 - DNA, 25 bp, Artificial
  probe
  misc_feature (1)..(25): SEQ ID NO: 3340; WAN024GEZ_at; Start 550; Stop 574
gcccattttggtcaggatttggaaa

SEQ ID NO: 242837 - DNA, 25 bp, Artificial
  probe
  misc_feature (1)..(25): SEQ ID NO: 3340; WAN024GEZ_at; Start 93; Stop 117
gactgctgttggaaagacggctcta

SEQ ID NO: 242838 - DNA, 25 bp, Artificial
  probe
  misc_feature (1)..(25): SEQ ID NO: 3340; WAN024GEZ_at; Start 531; Stop 555
tatgcgtgccttagaaattgcccat

SEQ ID NO: 242839 - DNA, 25 bp, Artificial
  probe
  misc_feature (1)..(25): SEQ ID NO: 3340; WAN024GEZ_at; Start 605; Stop 629
tctgcttggatgatgaacgtagtca

SEQ ID NO: 242840 - DNA, 25 bp, Artificial
  probe
  misc_feature (1)..(25): SEQ ID NO: 3340; WAN024GEZ_at; Start 383; Stop 407
tgctagaaggttaccacctaggtgg

SEQ ID NO: 242841 - DNA, 25 bp, Artificial
  probe
  misc_feature (1)..(25): SEQ ID NO: 3340; WAN024GEZ_at; Start 495; Stop 519
aggccttgagattccccagtttaat

SEQ ID NO: 242842 - DNA, 25 bp, Artificial
  probe
  misc_feature (1)..(25): SEQ ID NO: 3340; WAN024GEZ_at; Start 847; Stop 871
tggttccgtaatcgcatgcaggtca

SEQ ID NO: 242843 - DNA, 25 bp, Artificial
  probe
  misc_feature (1)..(25): SEQ ID NO: 3340; WAN024GEZ_at; Start 904; Stop 928
gaccgcattttaagccagatagagg

SEQ ID NO: 242844 - DNA, 25 bp, Artificial
  probe
  misc_feature (1)..(25): SEQ ID NO: 3340; WAN024GEZ_at; Start 81; Stop 105
gattgttggaccgactgctgttgga

SEQ ID NO: 242845 - DNA, 25 bp, Artificial
  probe
  misc_feature (1)..(25): SEQ ID NO: 3340; WAN024GEZ_at; Start 210; Stop 234
tagtccagaagagcaggcagctgtt

SEQ ID NO: 242846 - DNA, 25 bp, Artificial
  probe
  misc_feature (1)..(25): SEQ ID NO: 3340; WAN024GEZ_at; Start 180; Stop 204
tcgaggacttgatattgggacggcc

SEQ ID NO: 242847 - DNA, 25 bp, Artificial
  probe
  misc_feature (1)..(25): SEQ ID NO: 3340; WAN024GEZ_at; Start 432; Stop 456
agcttatcgagctagtttggagcca

SEQ ID NO: 242848 - DNA, 25 bp, Artificial
  probe
  misc_feature (1)..(25): SEQ ID NO: 2472; WAN024GF2_at; Start 170; Stop 194
tattctctttaaaaatcgtatctgc

SEQ ID NO: 242849 - DNA, 25 bp, Artificial
  probe
  misc_feature (1)..(25): SEQ ID NO: 2472; WAN024GF2_at; Start 70; Stop 94
gaaaaggcaccagttacatacttgg

SEQ ID NO: 242850 - DNA, 25 bp, Artificial
  probe
  misc_feature (1)..(25): SEQ ID NO: 2472; WAN024GF2_at; Start 53; Stop 77
tagataagtcgtactcggaaaaggc

SEQ ID NO: 242851 - DNA, 25 bp, Artificial
  probe
  misc_feature (1)..(25): SEQ ID NO: 2472; WAN024GF2_at; Start 144; Stop 168
aacaccttcctttagaatgcgttca

SEQ ID NO: 242852 - DNA, 25 bp, Artificial
  probe
  misc_feature (1)..(25): SEQ ID NO: 2472; WAN024GF2_at; Start 183; Stop 207
aatcgtatctgcttttgtcatttcg

SEQ ID NO: 242853 - DNA, 25 bp, Artificial
  probe
  misc_feature (1)..(25): SEQ ID NO: 2472; WAN024GF2_at; Start 134; Stop 158
gctctgagaaaacaccttcctttag

SEQ ID NO: 242854 - DNA, 25 bp, Artificial
  probe
  misc_feature (1)..(25): SEQ ID NO: 2472; WAN024GF2_at; Start 112; Stop 136
tccttgtacttaggacgagcctgct

SEQ ID NO: 242855 - DNA, 25 bp, Artificial
  probe
  misc_feature (1)..(25): SEQ ID NO: 2472; WAN024GF2_at; Start 128; Stop 152
gagcctgctctgagaaaacaccttc

SEQ ID NO: 242856 - DNA, 25 bp, Artificial
  probe
  misc_feature (1)..(25): SEQ ID NO: 2472; WAN024GF2_at; Start 100; Stop 124
gcaacagtcccatccttgtacttag

SEQ ID NO: 242857 - DNA, 25 bp, Artificial
  probe
  misc_feature (1)..(25): SEQ ID NO: 2472; WAN024GF2_at; Start 139; Stop 163
gagaaaacaccttcctttagaatgc

SEQ ID NO: 242858 - DNA, 25 bp, Artificial
  probe
  misc_feature (1)..(25): SEQ ID NO: 2472; WAN024GF2_at; Start 41; Stop 65
gaaattctcctttagataagtcgta

SEQ ID NO: 242859 - DNA, 25 bp, Artificial
  probe
  misc_feature (1)..(25): SEQ ID NO: 2472; WAN024GF2_at; Start 1; Stop 25
atggcggatttgattgcaatgggac

SEQ ID NO: 242860 - DNA, 25 bp, Artificial
  probe
  misc_feature (1)..(25): SEQ ID NO: 2472; WAN024GF2_at; Start 88; Stop 112
tacttggaattagcaacagtcccat

SEQ ID NO: 242861 - DNA, 25 bp, Artificial
  probe
  misc_feature (1)..(25): SEQ ID NO: 2472; WAN024GF2_at; Start 125; Stop 149
gacgagcctgctctgagaaaacacc

SEQ ID NO: 242862 - DNA, 25 bp, Artificial
  probe
  misc_feature (1)..(25): SEQ ID NO: 2472; WAN024GF2_at; Start 31; Stop 55
gttgtgataggaaattctcctttag

SEQ ID NO: 242863 - DNA, 25 bp, Artificial
  probe
  misc_feature (1)..(25): SEQ ID NO: 2472; WAN024GF2_at; Start 210; Stop 234
tcacctcattcattgtcctaactag

SEQ ID NO: 242864 - DNA, 25 bp, Artificial
  probe
  misc_feature (1)..(25): SEQ ID NO: 2472; WAN024GF2_at; Start 86; Stop 110
catacttggaattagcaacagtccc

SEQ ID NO: 242865 - DNA, 25 bp, Artificial
  probe
  misc_feature (1)..(25): SEQ ID NO: 2472; WAN024GF2_at; Start 5; Stop 29
cggatttgattgcaatgggacgcaa

SEQ ID NO: 242866 - DNA, 25 bp, Artificial
  probe
  misc_feature (1)..(25): SEQ ID NO: 2472; WAN024GF2_at; Start 107; Stop 131
tcccatccttgtacttaggacgagc

SEQ ID NO: 242867 - DNA, 25 bp, Artificial
  probe
  misc_feature (1)..(25): SEQ ID NO: 2472; WAN024GF2_at; Start 61; Stop 85
tcgtactcggaaaaggcaccagtta

SEQ ID NO: 242868 - DNA, 25 bp, Artificial
  probe
  misc_feature (1)..(25): SEQ ID NO: 2472; WAN024GF2_at; Start 193; Stop 217
gcttttgtcatttcgtttcacctca

SEQ ID NO: 242869 - DNA, 25 bp, Artificial
  probe
  misc_feature (1)..(25): SEQ ID NO: 2472; WAN024GF2_at; Start 116; Stop 140
tgtacttaggacgagcctgctctga

SEQ ID NO: 242870 - DNA, 25 bp, Artificial
  probe
  misc_feature (1)..(25): SEQ ID NO: 2472; WAN024GF2_at; Start 206; Stop 230
cgtttcacctcattcattgtcctaa

SEQ ID NO: 242871 - DNA, 25 bp, Artificial
  probe
  misc_feature (1)..(25): SEQ ID NO: 2472; WAN024GF2_at; Start 67; Stop 91
tcggaaaaggcaccagttacatact

SEQ ID NO: 242872 - DNA, 25 bp, Artificial
  probe
  misc_feature (1)..(25): SEQ ID NO: 2472; WAN024GF2_at; Start 75; Stop 99
ggcaccagttacatacttggaatta

SEQ ID NO: 242873 - DNA, 25 bp, Artificial
  probe
  misc_feature (1)..(25): SEQ ID NO: 2472; WAN024GF2_at; Start 131; Stop 155
cctgctctgagaaaacaccttcctt

SEQ ID NO: 242874 - DNA, 25 bp, Artificial
  probe
  misc_feature (1)..(25): SEQ ID NO: 2472; WAN024GF2_at; Start 118; Stop 142
tacttaggacgagcctgctctgaga

SEQ ID NO: 242875 - DNA, 25 bp, Artificial
  probe
  misc_feature (1)..(25): SEQ ID NO: 2472; WAN024GF2_at; Start 58; Stop 82
aagtcgtactcggaaaaggcaccag

SEQ ID NO: 242876 - DNA, 25 bp, Artificial
  probe
  misc_feature (1)..(25): SEQ ID NO: 2472; WAN024GF2_at; Start 55; Stop 79
gataagtcgtactcggaaaaggcac

SEQ ID NO: 242877 - DNA, 25 bp, Artificial
  probe
  misc_feature (1)..(25): SEQ ID NO: 2472; WAN024GF2_at; Start 158; Stop 182
gaatgcgttcaatattctctttaaa

SEQ ID NO: 242878 - DNA, 25 bp, Artificial
  probe
  misc_feature (1)..(25): SEQ ID NO: 2472; WAN024GF2_at; Start 93; Stop 117
ggaattagcaacagtcccatccttg

SEQ ID NO: 242879 - DNA, 25 bp, Artificial
  probe
  misc_feature (1)..(25): SEQ ID NO: 2472; WAN024GF2_at; Start 46; Stop 70
tctcctttagataagtcgtactcgg

SEQ ID NO: 242880 - DNA, 25 bp, Artificial
  probe
  misc_feature (1)..(25): SEQ ID NO: 2472; WAN024GF2_at; Start 122; Stop 146
taggacgagcctgctctgagaaaac

SEQ ID NO: 242881 - DNA, 25 bp, Artificial
  probe
  misc_feature (1)..(25): SEQ ID NO: 2472; WAN024GF2_at; Start 148; Stop 172
ccttcctttagaatgcgttcaatat

SEQ ID NO: 242882 - DNA, 25 bp, Artificial
  probe
  misc_feature (1)..(25): SEQ ID NO: 2297; WAN024GF3_at; Start 390; Stop 414
tgtacttgtcattaagcacttctaa

SEQ ID NO: 242883 - DNA, 25 bp, Artificial
  probe
  misc_feature (1)..(25): SEQ ID NO: 2297; WAN024GF3_at; Start 266; Stop 290
caaggattggtttccaactgtttga

SEQ ID NO: 242884 - DNA, 25 bp, Artificial
  probe
  misc_feature (1)..(25): SEQ ID NO: 2297; WAN024GF3_at; Start 129; Stop 153
gggtcaaggtcgcatccagatagat

SEQ ID NO: 242885 - DNA, 25 bp, Artificial
  probe
  misc_feature (1)..(25): SEQ ID NO: 2297; WAN024GF3_at; Start 85; Stop 109
catagcgttgatgtggtgggccacc

SEQ ID NO: 242886 - DNA, 25 bp, Artificial
  probe
  misc_feature (1)..(25): SEQ ID NO: 2297; WAN024GF3_at; Start 147; Stop 171
gatagatttccccatcaacacgccg

SEQ ID NO: 242887 - DNA, 25 bp, Artificial
  probe
  misc_feature (1)..(25): SEQ ID NO: 2297; WAN024GF3_at; Start 124; Stop 148
gcgctgggtcaaggtcgcatccaga

SEQ ID NO: 242888 - DNA, 25 bp, Artificial
  probe
  misc_feature (1)..(25): SEQ ID NO: 2297; WAN024GF3_at; Start 217; Stop 241
ttcttcgaaagcttggtaatcccag

SEQ ID NO: 242889 - DNA, 25 bp, Artificial
  probe
  misc_feature (1)..(25): SEQ ID NO: 2297; WAN024GF3_at; Start 361; Stop 385
aacttcccagtcattccagtagtga

SEQ ID NO: 242890 - DNA, 25 bp, Artificial
  probe
  misc_feature (1)..(25): SEQ ID NO: 2297; WAN024GF3_at; Start 371; Stop 395
tcattccagtagtgaacattgtact

SEQ ID NO: 242891 - DNA, 25 bp, Artificial
  probe
  misc_feature (1)..(25): SEQ ID NO: 2297; WAN024GF3_at; Start 111; Stop 135
gcatatcattggagcgctgggtcaa

SEQ ID NO: 242892 - DNA, 25 bp, Artificial
  probe
  misc_feature (1)..(25): SEQ ID NO: 2297; WAN024GF3_at; Start 161; Stop 185
tcaacacgccgaacatcaaacatgg

SEQ ID NO: 242893 - DNA, 25 bp, Artificial
  probe
  misc_feature (1)..(25): SEQ ID NO: 2297; WAN024GF3_at; Start 303; Stop 327
taatgtcgtgtttcttaacaacggc

SEQ ID NO: 242894 - DNA, 25 bp, Artificial
  probe
  misc_feature (1)..(25): SEQ ID NO: 2297; WAN024GF3_at; Start 204; Stop 228
gcagcccatctgtttcttcgaaagc

SEQ ID NO: 242895 - DNA, 25 bp, Artificial
  probe
  misc_feature (1)..(25): SEQ ID NO: 2297; WAN024GF3_at; Start 33; Stop 57
caaccttccagccaaaatgtttggc

SEQ ID NO: 242896 - DNA, 25 bp, Artificial
  probe
  misc_feature (1)..(25): SEQ ID NO: 2297; WAN024GF3_at; Start 176; Stop 200
tcaaacatggtctgaaaggcgcacg

SEQ ID NO: 242897 - DNA, 25 bp, Artificial
  probe
  misc_feature (1)..(25): SEQ ID NO: 2297; WAN024GF3_at; Start 342; Stop 366
caatggttcccgtgtctccaacttc

SEQ ID NO: 242898 - DNA, 25 bp, Artificial
  probe
  misc_feature (1)..(25): SEQ ID NO: 2297; WAN024GF3_at; Start 48; Stop 72
aatgtttggcaatcatcatctgcaa

SEQ ID NO: 242899 - DNA, 25 bp, Artificial
  probe
  misc_feature (1)..(25): SEQ ID NO: 2297; WAN024GF3_at; Start 233; Stop 257
taatcccagagcgaaataatattgc

SEQ ID NO: 242900 - DNA, 25 bp, Artificial
  probe
  misc_feature (1)..(25): SEQ ID NO: 2297; WAN024GF3_at; Start 9; Stop 33
tgttgatgaagtagaagaacttccc

SEQ ID NO: 242901 - DNA, 25 bp, Artificial
  probe
  misc_feature (1)..(25): SEQ ID NO: 2297; WAN024GF3_at; Start 71; Stop 95
aaagccacatactgcatagcgttga

SEQ ID NO: 242902 - DNA, 25 bp, Artificial
  probe
  misc_feature (1)..(25): SEQ ID NO: 2297; WAN024GF3_at; Start 244; Stop 268
cgaaataatattgcggcggttccaa

SEQ ID NO: 242903 - DNA, 25 bp, Artificial
  probe
  misc_feature (1)..(25): SEQ ID NO: 2297; WAN024GF3_at; Start 384; Stop 408
gaacattgtacttgtcattaagcac

SEQ ID NO: 242904 - DNA, 25 bp, Artificial
  probe
  misc_feature (1)..(25): SEQ ID NO: 2297; WAN024GF3_at; Start 98; Stop 122
tggtgggccaccagcatatcattgg

SEQ ID NO: 242905 - DNA, 25 bp, Artificial
  probe
  misc_feature (1)..(25): SEQ ID NO: 2297; WAN024GF3_at; Start 179; Stop 203
aacatggtctgaaaggcgcacggga

SEQ ID NO: 242906 - DNA, 25 bp, Artificial
  probe
  misc_feature (1)..(25): SEQ ID NO: 2297; WAN024GF3_at; Start 13; Stop 37
gatgaagtagaagaacttcccaacc

SEQ ID NO: 242907 - DNA, 25 bp, Artificial
  probe
  misc_feature (1)..(25): SEQ ID NO: 2297; WAN024GF3_at; Start 274; Stop 298
ggtttccaactgtttgagaagctta

SEQ ID NO: 242908 - DNA, 25 bp, Artificial
  probe
  misc_feature (1)..(25): SEQ ID NO: 2297; WAN024GF3_at; Start 136; Stop 160
ggtcgcatccagatagatttcccca

SEQ ID NO: 242909 - DNA, 25 bp, Artificial
  probe
  misc_feature (1)..(25): SEQ ID NO: 2297; WAN024GF3_at; Start 223; Stop 247
gaaagcttggtaatcccagagcgaa

SEQ ID NO: 242910 - DNA, 25 bp, Artificial
  probe
  misc_feature (1)..(25): SEQ ID NO: 2297; WAN024GF3_at; Start 194; Stop 218
gcgcacgggagcagcccatctgttt

SEQ ID NO: 242911 - DNA, 25 bp, Artificial
  probe
  misc_feature (1)..(25): SEQ ID NO: 2297; WAN024GF3_at; Start 252; Stop 276
tattgcggcggttccaaggattggt

SEQ ID NO: 242912 - DNA, 25 bp, Artificial
  probe
  misc_feature (1)..(25): SEQ ID NO: 2297; WAN024GF3_at; Start 330; Stop 354
catagcgctcaccaatggttcccgt

SEQ ID NO: 242913 - DNA, 25 bp, Artificial
  probe
  misc_feature (1)..(25): SEQ ID NO: 2297; WAN024GF3_at; Start 56; Stop 80
gcaatcatcatctgcaaagccacat

SEQ ID NO: 242914 - DNA, 25 bp, Artificial
  probe
  misc_feature (1)..(25): SEQ ID NO: 2297; WAN024GF3_at; Start 288; Stop 312
tgagaagcttattgataatgtcgtg

SEQ ID NO: 242915 - DNA, 25 bp, Artificial
  probe
  misc_feature (1)..(25): SEQ ID NO: 2297; WAN024GF3_at; Start 315; Stop 339
tcttaacaacggcaccatagcgctc

SEQ ID NO: 242916 - DNA, 25 bp, Artificial
  probe
  misc_feature (1)..(25): SEQ ID NO: 1310; WAN024GF4_at; Start 760; Stop 784
tttgatatcaaagcagaagattttg

SEQ ID NO: 242917 - DNA, 25 bp, Artificial
  probe
  misc_feature (1)..(25): SEQ ID NO: 1310; WAN024GF4_at; Start 119; Stop 143
taactggtgccttttccgagtacga

SEQ ID NO: 242918 - DNA, 25 bp, Artificial
  probe
  misc_feature (1)..(25): SEQ ID NO: 1310; WAN024GF4_at; Start 568; Stop 592
gctatgcagtatgtggctttgcaga

SEQ ID NO: 242919 - DNA, 25 bp, Artificial
  probe
  misc_feature (1)..(25): SEQ ID NO: 1310; WAN024GF4_at; Start 814; Stop 838
cagttgaagtttgacctagctattt

SEQ ID NO: 242920 - DNA, 25 bp, Artificial
  probe
  misc_feature (1)..(25): SEQ ID NO: 1310; WAN024GF4_at; Start 409; Stop 433
atttcgctctgggattaccaagctt

SEQ ID NO: 242921 - DNA, 25 bp, Artificial
  probe
  misc_feature (1)..(25): SEQ ID NO: 1310; WAN024GF4_at; Start 628; Stop 652
aagttcttctacttcatcaacaacc

SEQ ID NO: 242922 - DNA, 25 bp, Artificial
  probe
  misc_feature (1)..(25): SEQ ID NO: 1310; WAN024GF4_at; Start 788; Stop 812
tggtggattatgaccctgttaagcc

SEQ ID NO: 242923 - DNA, 25 bp, Artificial
  probe
  misc_feature (1)..(25): SEQ ID NO: 1310; WAN024GF4_at; Start 134; Stop 158
ccgagtacgacttatctaaaggaga

SEQ ID NO: 242924 - DNA, 25 bp, Artificial
  probe
  misc_feature (1)..(25): SEQ ID NO: 1310; WAN024GF4_at; Start 555; Stop 579
ccaccacatcaacgctatgcagtat

SEQ ID NO: 242925 - DNA, 25 bp, Artificial
  probe
  misc_feature (1)..(25): SEQ ID NO: 1310; WAN024GF4_at; Start 427; Stop 451
caagctttcgaagaaacagatgggc

SEQ ID NO: 242926 - DNA, 25 bp, Artificial
  probe
  misc_feature (1)..(25): SEQ ID NO: 1310; WAN024GF4_at; Start 502; Stop 526
gaaatctatctggatgcgaccttga

SEQ ID NO: 242927 - DNA, 25 bp, Artificial
  probe
  misc_feature (1)..(25): SEQ ID NO: 1310; WAN024GF4_at; Start 47; Stop 71
taaaggaaggtgttttctcagagca

SEQ ID NO: 242928 - DNA, 25 bp, Artificial
  probe
  misc_feature (1)..(25): SEQ ID NO: 1310; WAN024GF4_at; Start 94; Stop 118
gggactgttgctaattccaagtatg

SEQ ID NO: 242929 - DNA, 25 bp, Artificial
  probe
  misc_feature (1)..(25): SEQ ID NO: 1310; WAN024GF4_at; Start 819; Stop 843
gaagtttgacctagctatttaacta

SEQ ID NO: 242930 - DNA, 25 bp, Artificial
  probe
  misc_feature (1)..(25): SEQ ID NO: 1310; WAN024GF4_at; Start 667; Stop 691
aatcaatttgaacaagctcaggaat

SEQ ID NO: 242931 - DNA, 25 bp, Artificial
  probe
  misc_feature (1)..(25): SEQ ID NO: 1310; WAN024GF4_at; Start 149; Stop 173
ctaaaggagaatttcctatcacaac

SEQ ID NO: 242932 - DNA, 25 bp, Artificial
  probe
  misc_feature (1)..(25): SEQ ID NO: 1310; WAN024GF4_at; Start 79; Stop 103
cctaagtacaaggatgggactgttg

SEQ ID NO: 242933 - DNA, 25 bp, Artificial
  probe
  misc_feature (1)..(25): SEQ ID NO: 1310; WAN024GF4_at; Start 114; Stop 138
gtatgtaactggtgccttttccgag

SEQ ID NO: 242934 - DNA, 25 bp, Artificial
  probe
  misc_feature (1)..(25): SEQ ID NO: 1310; WAN024GF4_at; Start 101; Stop 125
ttgctaattccaagtatgtaactgg

SEQ ID NO: 242935 - DNA, 25 bp, Artificial
  probe
  misc_feature (1)..(25): SEQ ID NO: 1310; WAN024GF4_at; Start 223; Stop 247
taccaagaccagtcaaatagcttag

SEQ ID NO: 242936 - DNA, 25 bp, Artificial
  probe
  misc_feature (1)..(25): SEQ ID NO: 1310; WAN024GF4_at; Start 42; Stop 66
cattctaaaggaaggtgttttctca

SEQ ID NO: 242937 - DNA, 25 bp, Artificial
  probe
  misc_feature (1)..(25): SEQ ID NO: 1310; WAN024GF4_at; Start 175; Stop 199
ttgcgtcccattgcaatcaaatccg

SEQ ID NO: 242938 - DNA, 25 bp, Artificial
  probe
  misc_feature (1)..(25): SEQ ID NO: 1310; WAN024GF4_at; Start 272; Stop 296
ttcactactggaatgactgggaagt

SEQ ID NO: 242939 - DNA, 25 bp, Artificial
  probe
  misc_feature (1)..(25): SEQ ID NO: 1310; WAN024GF4_at; Start 213; Stop 237
tctctggatttaccaagaccagtca

SEQ ID NO: 242940 - DNA, 25 bp, Artificial
  probe
  misc_feature (1)..(25): SEQ ID NO: 1310; WAN024GF4_at; Start 640; Stop 664
ttcatcaacaacctccatatctatg

SEQ ID NO: 242941 - DNA, 25 bp, Artificial
  probe
  misc_feature (1)..(25): SEQ ID NO: 1310; WAN024GF4_at; Start 10; Stop 34
gcagatacgatttttaaagagaata

SEQ ID NO: 242942 - DNA, 25 bp, Artificial
  probe
  misc_feature (1)..(25): SEQ ID NO: 1310; WAN024GF4_at; Start 417; Stop 441
ctgggattaccaagctttcgaagaa

SEQ ID NO: 242943 - DNA, 25 bp, Artificial
  probe
  misc_feature (1)..(25): SEQ ID NO: 1310; WAN024GF4_at; Start 561; Stop 585
catcaacgctatgcagtatgtggct

SEQ ID NO: 242944 - DNA, 25 bp, Artificial
  probe
  misc_feature (1)..(25): SEQ ID NO: 1310; WAN024GF4_at; Start 87; Stop 111
caaggatgggactgttgctaattcc

SEQ ID NO: 242945 - DNA, 25 bp, Artificial
  probe
  misc_feature (1)..(25): SEQ ID NO: 1310; WAN024GF4_at; Start 185; Stop 209
ttgcaatcaaatccgccatcaaaga

SEQ ID NO: 242946 - DNA, 25 bp, Artificial
  probe
  misc_feature (1)..(25): SEQ ID NO: 1310; WAN024GF4_at; Start 73; Stop 97
gctcgtcctaagtacaaggatggga

SEQ ID NO: 242947 - DNA, 25 bp, Artificial
  probe
  misc_feature (1)..(25): SEQ ID NO: 1310; WAN024GF4_at; Start 262; Stop 286
aagtacaatgttcactactggaatg

SEQ ID NO: 242948 - DNA, 25 bp, Artificial
  probe
  misc_feature (1)..(25): SEQ ID NO: 1310; WAN024GF4_at; Start 2; Stop 26
tgacaaaagcagatacgatttttaa

SEQ ID NO: 242949 - DNA, 25 bp, Artificial
  probe
  misc_feature (1)..(25): SEQ ID NO: 1310; WAN024GF4_at; Start 581; Stop 605
tggctttgcagatgatgattgccaa

SEQ ID NO: 242950 - DNA, 25 bp, Artificial
  probe
  misc_feature (1)..(25): SEQ ID NO: 6276; WAN024GF5_at; Start 121; Stop 145
gatgttgtctttatgacactcggca

SEQ ID NO: 242951 - DNA, 25 bp, Artificial
  probe
  misc_feature (1)..(25): SEQ ID NO: 6276; WAN024GF5_at; Start 210; Stop 234
tgaacttggccatatcactgtggac

SEQ ID NO: 242952 - DNA, 25 bp, Artificial
  probe
  misc_feature (1)..(25): SEQ ID NO: 6276; WAN024GF5_at; Start 459; Stop 483
acgttacttgggtattgcatgtgcc

SEQ ID NO: 242953 - DNA, 25 bp, Artificial
  probe
  misc_feature (1)..(25): SEQ ID NO: 6276; WAN024GF5_at; Start 74; Stop 98
tagctgctcttggtgaacgttggat

SEQ ID NO: 242954 - DNA, 25 bp, Artificial
  probe
  misc_feature (1)..(25): SEQ ID NO: 6276; WAN024GF5_at; Start 353; Stop 377
aattgaaacgtttgatcgacgacgg

SEQ ID NO: 242955 - DNA, 25 bp, Artificial
  probe
  misc_feature (1)..(25): SEQ ID NO: 6276; WAN024GF5_at; Start 58; Stop 82
gataatgatgccaacgtagctgctc

SEQ ID NO: 242956 - DNA, 25 bp, Artificial
  probe
  misc_feature (1)..(25): SEQ ID NO: 6276; WAN024GF5_at; Start 391; Stop 415
gctaaaactgtctttgacttggcaa

SEQ ID NO: 242957 - DNA, 25 bp, Artificial
  probe
  misc_feature (1)..(25): SEQ ID NO: 6276; WAN024GF5_at; Start 261; Stop 285
tgggaaaaaaggctgtcttgagaca

SEQ ID NO: 242958 - DNA, 25 bp, Artificial
  probe
  misc_feature (1)..(25): SEQ ID NO: 6276; WAN024GF5_at; Start 25; Stop 49
attgaaaaagccgtgggtattccat

SEQ ID NO: 242959 - DNA, 25 bp, Artificial
  probe
  misc_feature (1)..(25): SEQ ID NO: 6276; WAN024GF5_at; Start 159; Stop 183
cggtatcgtcgcagaaggaaaattg

SEQ ID NO: 242960 - DNA, 25 bp, Artificial
  probe
  misc_feature (1)..(25): SEQ ID NO: 6276; WAN024GF5_at; Start 96; Stop 120
gatgggtgctggtgataaccaacca

SEQ ID NO: 242961 - DNA, 25 bp, Artificial
  probe
  misc_feature (1)..(25): SEQ ID NO: 6276; WAN024GF5_at; Start 222; Stop 246
tatcactgtggactttgaccaacca

SEQ ID NO: 242962 - DNA, 25 bp, Artificial
  probe
  misc_feature (1)..(25): SEQ ID NO: 6276; WAN024GF5_at; Start 293; Stop 317
cagcaacaggtattgtcaacttgac

SEQ ID NO: 242963 - DNA, 25 bp, Artificial
  probe
  misc_feature (1)..(25): SEQ ID NO: 6276; WAN024GF5_at; Start 427; Stop 451
gaccttgccttgatcgtctaccgta

SEQ ID NO: 242964 - DNA, 25 bp, Artificial
  probe
  misc_feature (1)..(25): SEQ ID NO: 6276; WAN024GF5_at; Start 253; Stop 277
tgtacttgtgggaaaaaaggctgtc

SEQ ID NO: 242965 - DNA, 25 bp, Artificial
  probe
  misc_feature (1)..(25): SEQ ID NO: 6276; WAN024GF5_at; Start 321; Stop 345
tcgttacgcagatgaatacgaaggc

SEQ ID NO: 242966 - DNA, 25 bp, Artificial
  probe
  misc_feature (1)..(25): SEQ ID NO: 6276; WAN024GF5_at; Start 418; Stop 442
gaaggagacgaccttgccttgatcg

SEQ ID NO: 242967 - DNA, 25 bp, Artificial
  probe
  misc_feature (1)..(25): SEQ ID NO: 6276; WAN024GF5_at; Start 197; Stop 221
ccggtgctgctggtgaacttggcca

SEQ ID NO: 242968 - DNA, 25 bp, Artificial
  probe
  misc_feature (1)..(25): SEQ ID NO: 6276; WAN024GF5_at; Start 406; Stop 430
gacttggcaaaagaaggagacgacc

SEQ ID NO: 242969 - DNA, 25 bp, Artificial
  probe
  misc_feature (1)..(25): SEQ ID NO: 6276; WAN024GF5_at; Start 438; Stop 462
gatcgtctaccgtaatttctcacgt

SEQ ID NO: 242970 - DNA, 25 bp, Artificial
  probe
  misc_feature (1)..(25): SEQ ID NO: 6276; WAN024GF5_at; Start 176; Stop 200
gaaaattgcttcacggtgttgccgg

SEQ ID NO: 242971 - DNA, 25 bp, Artificial
  probe
  misc_feature (1)..(25): SEQ ID NO: 6276; WAN024GF5_at; Start 232; Stop 256
gactttgaccaaccaatcgcatgta

SEQ ID NO: 242972 - DNA, 25 bp, Artificial
  probe
  misc_feature (1)..(25): SEQ ID NO: 6276; WAN024GF5_at; Start 183; Stop 207
gcttcacggtgttgccggtgctgct

SEQ ID NO: 242973 - DNA, 25 bp, Artificial
  probe
  misc_feature (1)..(25): SEQ ID NO: 6276; WAN024GF5_at; Start 308; Stop 332
tcaacttgactcgtcgttacgcaga

SEQ ID NO: 242974 - DNA, 25 bp, Artificial
  probe
  misc_feature (1)..(25): SEQ ID NO: 6276; WAN024GF5_at; Start 276; Stop 300
tcttgagacagtggcttcagcaaca

SEQ ID NO: 242975 - DNA, 25 bp, Artificial
  probe
  misc_feature (1)..(25): SEQ ID NO: 6276; WAN024GF5_at; Start 376; Stop 400
ggtgaagaagtaacagctaaaactg

SEQ ID NO: 242976 - DNA, 25 bp, Artificial
  probe
  misc_feature (1)..(25): SEQ ID NO: 6276; WAN024GF5_at; Start 106; Stop 130
ggtgataaccaaccagatgttgtct

SEQ ID NO: 242977 - DNA, 25 bp, Artificial
  probe
  misc_feature (1)..(25): SEQ ID NO: 6276; WAN024GF5_at; Start 2; Stop 26
cccttcaaccaatcaaagaaaagat

SEQ ID NO: 242978 - DNA, 25 bp, Artificial
  probe
  misc_feature (1)..(25): SEQ ID NO: 6276; WAN024GF5_at; Start 368; Stop 392
tcgacgacggtgaagaagtaacagc

SEQ ID NO: 242979 - DNA, 25 bp, Artificial
  probe
  misc_feature (1)..(25): SEQ ID NO: 6276; WAN024GF5_at; Start 285; Stop 309
agtggcttcagcaacaggtattgtc

SEQ ID NO: 242980 - DNA, 25 bp, Artificial
  probe
  misc_feature (1)..(25): SEQ ID NO: 6276; WAN024GF5_at; Start 132; Stop 156
tatgacactcggcacaggtgttggt

SEQ ID NO: 242981 - DNA, 25 bp, Artificial
  probe
  misc_feature (1)..(25): SEQ ID NO: 6276; WAN024GF5_at; Start 46; Stop 70
ccattttttatcgataatgatgcca

SEQ ID NO: 242982 - DNA, 25 bp, Artificial
  probe
  misc_feature (1)..(25): SEQ ID NO: 6276; WAN024GF5_at; Start 241; Stop 265
caaccaatcgcatgtacttgtggga

SEQ ID NO: 242983 - DNA, 25 bp, Artificial
  probe
  misc_feature (1)..(25): SEQ ID NO: 6276; WAN024GF5_at; Start 337; Stop 361
tacgaaggcgatgcagaattgaaac

SEQ ID NO: 242984 - DNA, 25 bp, Artificial
  probe
  misc_feature (1)..(25): SEQ ID NO: 4383; WAN024GF6_at; Start 261; Stop 285
tgtcacggtcaaccacacctggtga

SEQ ID NO: 242985 - DNA, 25 bp, Artificial
  probe
  misc_feature (1)..(25): SEQ ID NO: 4383; WAN024GF6_at; Start 176; Stop 200
ggaatgcccaaagctttttcaatct

SEQ ID NO: 242986 - DNA, 25 bp, Artificial
  probe
  misc_feature (1)..(25): SEQ ID NO: 4383; WAN024GF6_at; Start 153; Stop 177
tggcatcattatcgatgaaaaatgg

SEQ ID NO: 242987 - DNA, 25 bp, Artificial
  probe
  misc_feature (1)..(25): SEQ ID NO: 4383; WAN024GF6_at; Start 249; Stop 273
taacagtccctttgtcacggtcaac

SEQ ID NO: 242988 - DNA, 25 bp, Artificial
  probe
  misc_feature (1)..(25): SEQ ID NO: 4383; WAN024GF6_at; Start 101; Stop 125
tctggttggttatctccagcaccca

SEQ ID NO: 242989 - DNA, 25 bp, Artificial
  probe
  misc_feature (1)..(25): SEQ ID NO: 4383; WAN024GF6_at; Start 259; Stop 283
tttgtcacggtcaaccacacctggt

SEQ ID NO: 242990 - DNA, 25 bp, Artificial
  probe
  misc_feature (1)..(25): SEQ ID NO: 4383; WAN024GF6_at; Start 227; Stop 251
cagttcaagttgtaggcaccgataa

SEQ ID NO: 242991 - DNA, 25 bp, Artificial
  probe
  misc_feature (1)..(25): SEQ ID NO: 4383; WAN024GF6_at; Start 241; Stop 265
ggcaccgataacagtccctttgtca

SEQ ID NO: 242992 - DNA, 25 bp, Artificial
  probe
  misc_feature (1)..(25): SEQ ID NO: 4383; WAN024GF6_at; Start 125; Stop 149
atccagcgctcaccaagagctgcta

SEQ ID NO: 242993 - DNA, 25 bp, Artificial
  probe
  misc_feature (1)..(25): SEQ ID NO: 4383; WAN024GF6_at; Start 97; Stop 121
aacgtctggttggttatctccagca

SEQ ID NO: 242994 - DNA, 25 bp, Artificial
  probe
  misc_feature (1)..(25): SEQ ID NO: 4383; WAN024GF6_at; Start 239; Stop 263
taggcaccgataacagtccctttgt

SEQ ID NO: 242995 - DNA, 25 bp, Artificial
  probe
  misc_feature (1)..(25): SEQ ID NO: 4383; WAN024GF6_at; Start 233; Stop 257
aagttgtaggcaccgataacagtcc

SEQ ID NO: 242996 - DNA, 25 bp, Artificial
  probe
  misc_feature (1)..(25): SEQ ID NO: 4383; WAN024GF6_at; Start 130; Stop 154
gcgctcaccaagagctgctacgttg

SEQ ID NO: 242997 - DNA, 25 bp, Artificial
  probe
  misc_feature (1)..(25): SEQ ID NO: 4383; WAN024GF6_at; Start 253; Stop 277
agtccctttgtcacggtcaaccaca

SEQ ID NO: 242998 - DNA, 25 bp, Artificial
  probe
  misc_feature (1)..(25): SEQ ID NO: 4383; WAN024GF6_at; Start 220; Stop 244
ggttttccagttcaagttgtaggca

SEQ ID NO: 242999 - DNA, 25 bp, Artificial
  probe
  misc_feature (1)..(25): SEQ ID NO: 4383; WAN024GF6_at; Start 168; Stop 192
tgaaaaatggaatgcccaaagcttt

SEQ ID NO: 243000 - DNA, 25 bp, Artificial
  probe
  misc_feature (1)..(25): SEQ ID NO: 4383; WAN024GF6_at; Start 237; Stop 261
tgtaggcaccgataacagtcccttt

SEQ ID NO: 243001 - DNA, 25 bp, Artificial
  probe
  misc_feature (1)..(25): SEQ ID NO: 4383; WAN024GF6_at; Start 161; Stop 185
ttatcgatgaaaaatggaatgccca

SEQ ID NO: 243002 - DNA, 25 bp, Artificial
  probe
  misc_feature (1)..(25): SEQ ID NO: 4383; WAN024GF6_at; Start 138; Stop 162
caagagctgctacgttggcatcatt

SEQ ID NO: 243003 - DNA, 25 bp, Artificial
  probe
  misc_feature (1)..(25): SEQ ID NO: 4383; WAN024GF6_at; Start 146; Stop 170
gctacgttggcatcattatcgatga

SEQ ID NO: 243004 - DNA, 25 bp, Artificial
  probe
  misc_feature (1)..(25): SEQ ID NO: 4383; WAN024GF6_at; Start 141; Stop 165
gagctgctacgttggcatcattatc

SEQ ID NO: 243005 - DNA, 25 bp, Artificial
  probe
  misc_feature (1)..(25): SEQ ID NO: 4383; WAN024GF6_at; Start 103; Stop 127
tggttggttatctccagcacccatc

SEQ ID NO: 243006 - DNA, 25 bp, Artificial
  probe
  misc_feature (1)..(25): SEQ ID NO: 4383; WAN024GF6_at; Start 195; Stop 219
caatcttttgtttgattggttgaag

SEQ ID NO: 243007 - DNA, 25 bp, Artificial
  probe
  misc_feature (1)..(25): SEQ ID NO: 4383; WAN024GF6_at; Start 134; Stop 158
tcaccaagagctgctacgttggcat

SEQ ID NO: 243008 - DNA, 25 bp, Artificial
  probe
  misc_feature (1)..(25): SEQ ID NO: 4383; WAN024GF6_at; Start 165; Stop 189
cgatgaaaaatggaatgcccaaagc

SEQ ID NO: 243009 - DNA, 25 bp, Artificial
  probe
  misc_feature (1)..(25): SEQ ID NO: 4383; WAN024GF6_at; Start 247; Stop 271
gataacagtccctttgtcacggtca

SEQ ID NO: 243010 - DNA, 25 bp, Artificial
  probe
  misc_feature (1)..(25): SEQ ID NO: 4383; WAN024GF6_at; Start 231; Stop 255
tcaagttgtaggcaccgataacagt

SEQ ID NO: 243011 - DNA, 25 bp, Artificial
  probe
  misc_feature (1)..(25): SEQ ID NO: 4383; WAN024GF6_at; Start 90; Stop 114
taaagacaacgtctggttggttatc

SEQ ID NO: 243012 - DNA, 25 bp, Artificial
  probe
  misc_feature (1)..(25): SEQ ID NO: 4383; WAN024GF6_at; Start 94; Stop 118
gacaacgtctggttggttatctcca

SEQ ID NO: 243013 - DNA, 25 bp, Artificial
  probe
  misc_feature (1)..(25): SEQ ID NO: 4383; WAN024GF6_at; Start 172; Stop 196
aaatggaatgcccaaagctttttca

SEQ ID NO: 243014 - DNA, 25 bp, Artificial
  probe
  misc_feature (1)..(25): SEQ ID NO: 4383; WAN024GF6_at; Start 223; Stop 247
tttccagttcaagttgtaggcaccg

SEQ ID NO: 243015 - DNA, 25 bp, Artificial
  probe
  misc_feature (1)..(25): SEQ ID NO: 4383; WAN024GF6_at; Start 235; Stop 259
gttgtaggcaccgataacagtccct

SEQ ID NO: 243016 - DNA, 25 bp, Artificial
  probe
  misc_feature (1)..(25): SEQ ID NO: 4383; WAN024GF6_at; Start 180; Stop 204
tgcccaaagctttttcaatcttttg

SEQ ID NO: 243017 - DNA, 25 bp, Artificial
  probe
  misc_feature (1)..(25): SEQ ID NO: 4383; WAN024GF6_at; Start 106; Stop 130
ttggttatctccagcacccatccag

SEQ ID NO: 243018 - DNA, 25 bp, Artificial
  probe
  misc_feature (1)..(25): SEQ ID NO: 681; WAN024GF7_at; Start 189; Stop 213
gcttggattggcagcagcggacttc

SEQ ID NO: 243019 - DNA, 25 bp, Artificial
  probe
  misc_feature (1)..(25): SEQ ID NO: 681; WAN024GF7_at; Start 909; Stop 933
taaattagctcttgcaactctagga

SEQ ID NO: 243020 - DNA, 25 bp, Artificial
  probe
  misc_feature (1)..(25): SEQ ID NO: 681; WAN024GF7_at; Start 213; Stop 237
ccaaggcattggaatgggatcacca

SEQ ID NO: 243021 - DNA, 25 bp, Artificial
  probe
  misc_feature (1)..(25): SEQ ID NO: 681; WAN024GF7_at; Start 233; Stop 257
caccaggtgtggttgaccgtgacaa

SEQ ID NO: 243022 - DNA, 25 bp, Artificial
  probe
  misc_feature (1)..(25): SEQ ID NO: 681; WAN024GF7_at; Start 39; Stop 63
gattgaccttggtggaacttctatc

SEQ ID NO: 243023 - DNA, 25 bp, Artificial
  probe
  misc_feature (1)..(25): SEQ ID NO: 681; WAN024GF7_at; Start 827; Stop 851
tgtcagctgcgggagaattccttct

SEQ ID NO: 243024 - DNA, 25 bp, Artificial
  probe
  misc_feature (1)..(25): SEQ ID NO: 681; WAN024GF7_at; Start 944; Stop 968
gagttatcggagcagcatcacttgt

SEQ ID NO: 243025 - DNA, 25 bp, Artificial
  probe
  misc_feature (1)..(25): SEQ ID NO: 681; WAN024GF7_at; Start 932; Stop 956
gaaatgacgctggagttatcggagc

SEQ ID NO: 243026 - DNA, 25 bp, Artificial
  probe
  misc_feature (1)..(25): SEQ ID NO: 681; WAN024GF7_at; Start 200; Stop 224
cagcagcggacttccaaggcattgg

SEQ ID NO: 243027 - DNA, 25 bp, Artificial
  probe
  misc_feature (1)..(25): SEQ ID NO: 681; WAN024GF7_at; Start 49; Stop 73
ggtggaacttctatcaaatttgcaa

SEQ ID NO: 243028 - DNA, 25 bp, Artificial
  probe
  misc_feature (1)..(25): SEQ ID NO: 681; WAN024GF7_at; Start 882; Stop 906
tagtttcccacaagtacgcacatct

SEQ ID NO: 243029 - DNA, 25 bp, Artificial
  probe
  misc_feature (1)..(25): SEQ ID NO: 681; WAN024GF7_at; Start 958; Stop 982
gcatcacttgtattgcaataactaa

SEQ ID NO: 243030 - DNA, 25 bp, Artificial
  probe
  misc_feature (1)..(25): SEQ ID NO: 681; WAN024GF7_at; Start 920; Stop 944
ttgcaactctaggaaatgacgctgg

SEQ ID NO: 243031 - DNA, 25 bp, Artificial
  probe
  misc_feature (1)..(25): SEQ ID NO: 681; WAN024GF7_at; Start 896; Stop 920
tacgcacatctactaaattagctct

SEQ ID NO: 243032 - DNA, 25 bp, Artificial
  probe
  misc_feature (1)..(25): SEQ ID NO: 681; WAN024GF7_at; Start 15; Stop 39
tatgatgagtcaaaagattattggg

SEQ ID NO: 243033 - DNA, 25 bp, Artificial
  probe
  misc_feature (1)..(25): SEQ ID NO: 681; WAN024GF7_at; Start 3; Stop 27
gaaaaaggagaatatgatgagtcaa

SEQ ID NO: 243034 - DNA, 25 bp, Artificial
  probe
  misc_feature (1)..(25): SEQ ID NO: 681; WAN024GF7_at; Start 780; Stop 804
cattggttcaatcctaaacccatca

SEQ ID NO: 243035 - DNA, 25 bp, Artificial
  probe
  misc_feature (1)..(25): SEQ ID NO: 681; WAN024GF7_at; Start 839; Stop 863
gagaattccttctacaaggtgttca

SEQ ID NO: 243036 - DNA, 25 bp, Artificial
  probe
  misc_feature (1)..(25): SEQ ID NO: 681; WAN024GF7_at; Start 91; Stop 115
gaaatccaaggaaaatggtcaatca

SEQ ID NO: 243037 - DNA, 25 bp, Artificial
  probe
  misc_feature (1)..(25): SEQ ID NO: 681; WAN024GF7_at; Start 794; Stop 818
taaacccatcaacaatcgtcatcgg

SEQ ID NO: 243038 - DNA, 25 bp, Artificial
  probe
  misc_feature (1)..(25): SEQ ID NO: 681; WAN024GF7_at; Start 242; Stop 266
tggttgaccgtgacaaagggactgt

SEQ ID NO: 243039 - DNA, 25 bp, Artificial
  probe
  misc_feature (1)..(25): SEQ ID NO: 681; WAN024GF7_at; Start 253; Stop 277
gacaaagggactgttatcggtgcct

SEQ ID NO: 243040 - DNA, 25 bp, Artificial
  probe
  misc_feature (1)..(25): SEQ ID NO: 681; WAN024GF7_at; Start 853; Stop 877
caaggtgttcaaaaagtttacgatg

SEQ ID NO: 243041 - DNA, 25 bp, Artificial
  probe
  misc_feature (1)..(25): SEQ ID NO: 681; WAN024GF7_at; Start 30; Stop 54
gattattgggattgaccttggtgga

SEQ ID NO: 243042 - DNA, 25 bp, Artificial
  probe
  misc_feature (1)..(25): SEQ ID NO: 681; WAN024GF7_at; Start 871; Stop 895
tacgatgaaaatagtttcccacaag

SEQ ID NO: 243043 - DNA, 25 bp, Artificial
  probe
  misc_feature (1)..(25): SEQ ID NO: 681; WAN024GF7_at; Start 219; Stop 243
cattggaatgggatcaccaggtgtg

SEQ ID NO: 243044 - DNA, 25 bp, Artificial
  probe
  misc_feature (1)..(25): SEQ ID NO: 681; WAN024GF7_at; Start 119; Stop 143
ccaacattttggatgagggaagtca

SEQ ID NO: 243045 - DNA, 25 bp, Artificial
  probe
  misc_feature (1)..(25): SEQ ID NO: 681; WAN024GF7_at; Start 802; Stop 826
tcaacaatcgtcatcggtggtggtg

SEQ ID NO: 243046 - DNA, 25 bp, Artificial
  probe
  misc_feature (1)..(25): SEQ ID NO: 681; WAN024GF7_at; Start 106; Stop 130
tggtcaatcaagaccaacattttgg

SEQ ID NO: 243047 - DNA, 25 bp, Artificial
  probe
  misc_feature (1)..(25): SEQ ID NO: 681; WAN024GF7_at; Start 177; Stop 201
tcgtttggacttgcttggattggca

SEQ ID NO: 243048 - DNA, 25 bp, Artificial
  probe
  misc_feature (1)..(25): SEQ ID NO: 681; WAN024GF7_at; Start 77; Stop 101
taacaacagcaggagaaatccaagg

SEQ ID NO: 243049 - DNA, 25 bp, Artificial
  probe
  misc_feature (1)..(25): SEQ ID NO: 681; WAN024GF7_at; Start 133; Stop 157
gagggaagtcatatcgttgatgata

SEQ ID NO: 243050 - DNA, 25 bp, Artificial
  probe
  misc_feature (1)..(25): SEQ ID NO: 681; WAN024GF7_at; Start 162; Stop 186
tgagtctattcaacatcgtttggac

SEQ ID NO: 243051 - DNA, 25 bp, Artificial
  probe
  misc_feature (1)..(25): SEQ ID NO: 681; WAN024GF7_at; Start 65; Stop 89
aatttgcaatcttaacaacagcagg

SEQ ID NO: 243052 - DNA, 25 bp, Artificial
  probe
  misc_feature (1)..(25): SEQ ID NO: 3067; WAN024GF8_at; Start 79; Stop 103
gagaacagctgccttttgatgaacc

SEQ ID NO: 243053 - DNA, 25 bp, Artificial
  probe
  misc_feature (1)..(25): SEQ ID NO: 3067; WAN024GF8_at; Start 60; Stop 84
aacgagcttgtttacgatagagaac

SEQ ID NO: 243054 - DNA, 25 bp, Artificial
  probe
  misc_feature (1)..(25): SEQ ID NO: 3067; WAN024GF8_at; Start 237; Stop 261
caatcgttccacagtagactccacg

SEQ ID NO: 243055 - DNA, 25 bp, Artificial
  probe
  misc_feature (1)..(25): SEQ ID NO: 3067; WAN024GF8_at; Start 34; Stop 58
gatttttccagtagtaatcagctgg

SEQ ID NO: 243056 - DNA, 25 bp, Artificial
  probe
  misc_feature (1)..(25): SEQ ID NO: 3067; WAN024GF8_at; Start 54; Stop 78
gctggaaacgagcttgtttacgata

SEQ ID NO: 243057 - DNA, 25 bp, Artificial
  probe
  misc_feature (1)..(25): SEQ ID NO: 3067; WAN024GF8_at; Start 228; Stop 252
gcaagagaccaatcgttccacagta

SEQ ID NO: 243058 - DNA, 25 bp, Artificial
  probe
  misc_feature (1)..(25): SEQ ID NO: 3067; WAN024GF8_at; Start 45; Stop 69
tagtaatcagctggaaacgagcttg

SEQ ID NO: 243059 - DNA, 25 bp, Artificial
  probe
  misc_feature (1)..(25): SEQ ID NO: 3067; WAN024GF8_at; Start 28; Stop 52
ctggctgatttttccagtagtaatc

SEQ ID NO: 243060 - DNA, 25 bp, Artificial
  probe
  misc_feature (1)..(25): SEQ ID NO: 3067; WAN024GF8_at; Start 270; Stop 294
gctccaagtccttgataatctccat

SEQ ID NO: 243061 - DNA, 25 bp, Artificial
  probe
  misc_feature (1)..(25): SEQ ID NO: 3067; WAN024GF8_at; Start 2; Stop 26
tgttgttcttcaaacagcaagttct

SEQ ID NO: 243062 - DNA, 25 bp, Artificial
  probe
  misc_feature (1)..(25): SEQ ID NO: 3067; WAN024GF8_at; Start 81; Stop 105
gaacagctgccttttgatgaacctc

SEQ ID NO: 243063 - DNA, 25 bp, Artificial
  probe
  misc_feature (1)..(25): SEQ ID NO: 3067; WAN024GF8_at; Start 70; Stop 94
tttacgatagagaacagctgccttt

SEQ ID NO: 243064 - DNA, 25 bp, Artificial
  probe
  misc_feature (1)..(25): SEQ ID NO: 3067; WAN024GF8_at; Start 12; Stop 36
caaacagcaagttcttctggctgat

SEQ ID NO: 243065 - DNA, 25 bp, Artificial
  probe
  misc_feature (1)..(25): SEQ ID NO: 3067; WAN024GF8_at; Start 201; Stop 225
cattaaaaatccgtcgtccatttgg

SEQ ID NO: 243066 - DNA, 25 bp, Artificial
  probe
  misc_feature (1)..(25): SEQ ID NO: 3067; WAN024GF8_at; Start 58; Stop 82
gaaacgagcttgtttacgatagaga

SEQ ID NO: 243067 - DNA, 25 bp, Artificial
  probe
  misc_feature (1)..(25): SEQ ID NO: 3067; WAN024GF8_at; Start 68; Stop 92
tgtttacgatagagaacagctgcct

SEQ ID NO: 243068 - DNA, 25 bp, Artificial
  probe
  misc_feature (1)..(25): SEQ ID NO: 3067; WAN024GF8_at; Start 242; Stop 266
gttccacagtagactccacgcggtt

SEQ ID NO: 243069 - DNA, 25 bp, Artificial
  probe
  misc_feature (1)..(25): SEQ ID NO: 3067; WAN024GF8_at; Start 18; Stop 42
gcaagttcttctggctgatttttcc

SEQ ID NO: 243070 - DNA, 25 bp, Artificial
  probe
  misc_feature (1)..(25): SEQ ID NO: 3067; WAN024GF8_at; Start 42; Stop 66
cagtagtaatcagctggaaacgagc

SEQ ID NO: 243071 - DNA, 25 bp, Artificial
  probe
  misc_feature (1)..(25): SEQ ID NO: 3067; WAN024GF8_at; Start 8; Stop 32
tcttcaaacagcaagttcttctggc

SEQ ID NO: 243072 - DNA, 25 bp, Artificial
  probe
  misc_feature (1)..(25): SEQ ID NO: 3067; WAN024GF8_at; Start 269; Stop 293
ggctccaagtccttgataatctcca

SEQ ID NO: 243073 - DNA, 25 bp, Artificial
  probe
  misc_feature (1)..(25): SEQ ID NO: 3067; WAN024GF8_at; Start 48; Stop 72
taatcagctggaaacgagcttgttt

SEQ ID NO: 243074 - DNA, 25 bp, Artificial
  probe
  misc_feature (1)..(25): SEQ ID NO: 3067; WAN024GF8_at; Start 75; Stop 99
gatagagaacagctgccttttgatg

SEQ ID NO: 243075 - DNA, 25 bp, Artificial
  probe
  misc_feature (1)..(25): SEQ ID NO: 3067; WAN024GF8_at; Start 51; Stop 75
tcagctggaaacgagcttgtttacg

SEQ ID NO: 243076 - DNA, 25 bp, Artificial
  probe
  misc_feature (1)..(25): SEQ ID NO: 3067; WAN024GF8_at; Start 230; Stop 254
aagagaccaatcgttccacagtaga

SEQ ID NO: 243077 - DNA, 25 bp, Artificial
  probe
  misc_feature (1)..(25): SEQ ID NO: 3067; WAN024GF8_at; Start 62; Stop 86
cgagcttgtttacgatagagaacag

SEQ ID NO: 243078 - DNA, 25 bp, Artificial
  probe
  misc_feature (1)..(25): SEQ ID NO: 3067; WAN024GF8_at; Start 240; Stop 264
tcgttccacagtagactccacgcgg

SEQ ID NO: 243079 - DNA, 25 bp, Artificial
  probe
  misc_feature (1)..(25): SEQ ID NO: 3067; WAN024GF8_at; Start 243; Stop 267
ttccacagtagactccacgcggttg

SEQ ID NO: 243080 - DNA, 25 bp, Artificial
  probe
  misc_feature (1)..(25): SEQ ID NO: 3067; WAN024GF8_at; Start 232; Stop 256
gagaccaatcgttccacagtagact

SEQ ID NO: 243081 - DNA, 25 bp, Artificial
  probe
  misc_feature (1)..(25): SEQ ID NO: 3067; WAN024GF8_at; Start 5; Stop 29
tgttcttcaaacagcaagttcttct

SEQ ID NO: 243082 - DNA, 25 bp, Artificial
  probe
  misc_feature (1)..(25): SEQ ID NO: 3067; WAN024GF8_at; Start 234; Stop 258
gaccaatcgttccacagtagactcc

SEQ ID NO: 243083 - DNA, 25 bp, Artificial
  probe
  misc_feature (1)..(25): SEQ ID NO: 3067; WAN024GF8_at; Start 20; Stop 44
aagttcttctggctgatttttccag

SEQ ID NO: 243084 - DNA, 25 bp, Artificial
  probe
  misc_feature (1)..(25): SEQ ID NO: 3067; WAN024GF8_at; Start 72; Stop 96
tacgatagagaacagctgccttttg

SEQ ID NO: 243085 - DNA, 25 bp, Artificial
  probe
  misc_feature (1)..(25): SEQ ID NO: 3067; WAN024GF8_at; Start 66; Stop 90
cttgtttacgatagagaacagctgc

SEQ ID NO: 243086 - DNA, 25 bp, Artificial
  probe
  misc_feature (1)..(25): SEQ ID NO: 1963; WAN024GF9_at; Start 1278; Stop 1302
cattgatcaagactatcgcttgcga

SEQ ID NO: 243087 - DNA, 25 bp, Artificial
  probe
  misc_feature (1)..(25): SEQ ID NO: 1963; WAN024GF9_at; Start 1241; Stop 1265
taagacaaaagatagaggcggagtg

SEQ ID NO: 243088 - DNA, 25 bp, Artificial
  probe
  misc_feature (1)..(25): SEQ ID NO: 1963; WAN024GF9_at; Start 510; Stop 534
tatggcagtaatttccatgagccca

SEQ ID NO: 243089 - DNA, 25 bp, Artificial
  probe
  misc_feature (1)..(25): SEQ ID NO: 1963; WAN024GF9_at; Start 1177; Stop 1201
caacatttggaaagactgagaacag

SEQ ID NO: 243090 - DNA, 25 bp, Artificial
  probe
  misc_feature (1)..(25): SEQ ID NO: 1963; WAN024GF9_at; Start 794; Stop 818
tcaagagtcagttacgagcagatgt

SEQ ID NO: 243091 - DNA, 25 bp, Artificial
  probe
  misc_feature (1)..(25): SEQ ID NO: 1963; WAN024GF9_at; Start 1575; Stop 1599
cttgccaggaatttatcgccagtat

SEQ ID NO: 243092 - DNA, 25 bp, Artificial
  probe
  misc_feature (1)..(25): SEQ ID NO: 1963; WAN024GF9_at; Start 1392; Stop 1416
tcaggaagccaatttgcaacaagcc

SEQ ID NO: 243093 - DNA, 25 bp, Artificial
  probe
  misc_feature (1)..(25): SEQ ID NO: 1963; WAN024GF9_at; Start 205; Stop 229
cataaggctcctctactgggcgagt

SEQ ID NO: 243094 - DNA, 25 bp, Artificial
  probe
  misc_feature (1)..(25): SEQ ID NO: 1963; WAN024GF9_at; Start 551; Stop 575
aaaatgaccgcgaattgacaacgcg

SEQ ID NO: 243095 - DNA, 25 bp, Artificial
  probe
  misc_feature (1)..(25): SEQ ID NO: 1963; WAN024GF9_at; Start 360; Stop 384
gatacatcatcatctacggcagggt

SEQ ID NO: 243096 - DNA, 25 bp, Artificial
  probe
  misc_feature (1)..(25): SEQ ID NO: 1963; WAN024GF9_at; Start 1477; Stop 1501
taccacaataagtcaggagaactgc

SEQ ID NO: 243097 - DNA, 25 bp, Artificial
  probe
  misc_feature (1)..(25): SEQ ID NO: 1963; WAN024GF9_at; Start 1318; Stop 1342
tctggagagatagaacttagtcgac

SEQ ID NO: 243098 - DNA, 25 bp, Artificial
  probe
  misc_feature (1)..(25): SEQ ID NO: 1963; WAN024GF9_at; Start 94; Stop 118
gaagtggcagatttgctggcacaag

SEQ ID NO: 243099 - DNA, 25 bp, Artificial
  probe
  misc_feature (1)..(25): SEQ ID NO: 1963; WAN024GF9_at; Start 612; Stop 636
ccaagaagacttggagcaggccagt

SEQ ID NO: 243100 - DNA, 25 bp, Artificial
  probe
  misc_feature (1)..(25): SEQ ID NO: 1963; WAN024GF9_at; Start 1194; Stop 1218
gagaacagctagtcgatattttgcc

SEQ ID NO: 243101 - DNA, 25 bp, Artificial
  probe
  misc_feature (1)..(25): SEQ ID NO: 1963; WAN024GF9_at; Start 595; Stop 619
cagcgtgccataactgaccaagaag

SEQ ID NO: 243102 - DNA, 25 bp, Artificial
  probe
  misc_feature (1)..(25): SEQ ID NO: 1963; WAN024GF9_at; Start 1639; Stop 1663
ttgacagattttgcccaagcagaag

SEQ ID NO: 243103 - DNA, 25 bp, Artificial
  probe
  misc_feature (1)..(25): SEQ ID NO: 1963; WAN024GF9_at; Start 495; Stop 519
tgtggaacatgacgatatggcagta

SEQ ID NO: 243104 - DNA, 25 bp, Artificial
  probe
  misc_feature (1)..(25): SEQ ID NO: 1963; WAN024GF9_at; Start 343; Stop 367
gaaaaggctattgcacagatacatc

SEQ ID NO: 243105 - DNA, 25 bp, Artificial
  probe
  misc_feature (1)..(25): SEQ ID NO: 1963; WAN024GF9_at; Start 737; Stop 761
tggagcgtctctgccaagtggagca

SEQ ID NO: 243106 - DNA, 25 bp, Artificial
  probe
  misc_feature (1)..(25): SEQ ID NO: 1963; WAN024GF9_at; Start 1141; Stop 1165
ggaaaaatcagccagaagaacttgc

SEQ ID NO: 243107 - DNA, 25 bp, Artificial
  probe
  misc_feature (1)..(25): SEQ ID NO: 1963; WAN024GF9_at; Start 850; Stop 874
ccttgtggatctataacgggagctc

SEQ ID NO: 243108 - DNA, 25 bp, Artificial
  probe
  misc_feature (1)..(25): SEQ ID NO: 1963; WAN024GF9_at; Start 40; Stop 64
gagagatacatctttaccaagccga

SEQ ID NO: 243109 - DNA, 25 bp, Artificial
  probe
  misc_feature (1)..(25): SEQ ID NO: 1963; WAN024GF9_at; Start 581; Stop 605
tgaagggaacgactcagcgtgccat

SEQ ID NO: 243110 - DNA, 25 bp, Artificial
  probe
  misc_feature (1)..(25): SEQ ID NO: 1963; WAN024GF9_at; Start 1056; Stop 1080
cacctggcaatctgaataccgcgag

SEQ ID NO: 243111 - DNA, 25 bp, Artificial
  probe
  misc_feature (1)..(25): SEQ ID NO: 1963; WAN024GF9_at; Start 1378; Stop 1402
gccaaactttgtcttcaggaagcca

SEQ ID NO: 243112 - DNA, 25 bp, Artificial
  probe
  misc_feature (1)..(25): SEQ ID NO: 1963; WAN024GF9_at; Start 866; Stop 890
cgggagctccgaaaattgcgactat

SEQ ID NO: 243113 - DNA, 25 bp, Artificial
  probe
  misc_feature (1)..(25): SEQ ID NO: 1963; WAN024GF9_at; Start 990; Stop 1014
ccgaactattcaactgcatcaaggg

SEQ ID NO: 243114 - DNA, 25 bp, Artificial
  probe
  misc_feature (1)..(25): SEQ ID NO: 1963; WAN024GF9_at; Start 248; Stop 272
ttcatgatagggtagaaacatcccc

SEQ ID NO: 243115 - DNA, 25 bp, Artificial
  probe
  misc_feature (1)..(25): SEQ ID NO: 1963; WAN024GF9_at; Start 1215; Stop 1239
tgcctttccttatgatgcagaagac

SEQ ID NO: 243116 - DNA, 25 bp, Artificial
  probe
  misc_feature (1)..(25): SEQ ID NO: 1963; WAN024GF9_at; Start 1041; Stop 1065
tattacatgggatagcacctggcaa

SEQ ID NO: 243117 - DNA, 25 bp, Artificial
  probe
  misc_feature (1)..(25): SEQ ID NO: 1963; WAN024GF9_at; Start 1298; Stop 1322
tgcgaatttctctcagtaagtctgg

SEQ ID NO: 243118 - DNA, 25 bp, Artificial
  probe
  misc_feature (1)..(25): SEQ ID NO: 1963; WAN024GF9_at; Start 1436; Stop 1460
cttacagaccgcatttaaacctagg

SEQ ID NO: 243119 - DNA, 25 bp, Artificial
  probe
  misc_feature (1)..(25): SEQ ID NO: 1963; WAN024GF9_at; Start 1533; Stop 1557
aattgctgggaaactctacacaccg

SEQ ID NO: 243120 - DNA, 25 bp, Artificial
  probe
  misc_feature (1)..(25): SEQ ID NO: 4982; WAN024GFA_at; Start 283; Stop 307
ttgtagcccgcctcctgctctacca

SEQ ID NO: 243121 - DNA, 25 bp, Artificial
  probe
  misc_feature (1)..(25): SEQ ID NO: 4982; WAN024GFA_at; Start 267; Stop 291
atgttccacataggcattgtagccc

SEQ ID NO: 243122 - DNA, 25 bp, Artificial
  probe
  misc_feature (1)..(25): SEQ ID NO: 4982; WAN024GFA_at; Start 226; Stop 250
aaaaagagctctgggctcatggaaa

SEQ ID NO: 243123 - DNA, 25 bp, Artificial
  probe
  misc_feature (1)..(25): SEQ ID NO: 4982; WAN024GFA_at; Start 214; Stop 238
tcattttgctcaaaaaagagctctg

SEQ ID NO: 243124 - DNA, 25 bp, Artificial
  probe
  misc_feature (1)..(25): SEQ ID NO: 4982; WAN024GFA_at; Start 73; Stop 97
tgcgcaagaggtccacaatcatcat

SEQ ID NO: 243125 - DNA, 25 bp, Artificial
  probe
  misc_feature (1)..(25): SEQ ID NO: 4982; WAN024GFA_at; Start 82; Stop 106
ggtccacaatcatcatattttcaga

SEQ ID NO: 243126 - DNA, 25 bp, Artificial
  probe
  misc_feature (1)..(25): SEQ ID NO: 4982; WAN024GFA_at; Start 80; Stop 104
gaggtccacaatcatcatattttca

SEQ ID NO: 243127 - DNA, 25 bp, Artificial
  probe
  misc_feature (1)..(25): SEQ ID NO: 4982; WAN024GFA_at; Start 65; Stop 89
catatcattgcgcaagaggtccaca

SEQ ID NO: 243128 - DNA, 25 bp, Artificial
  probe
  misc_feature (1)..(25): SEQ ID NO: 4982; WAN024GFA_at; Start 77; Stop 101
caagaggtccacaatcatcatattt

SEQ ID NO: 243129 - DNA, 25 bp, Artificial
  probe
  misc_feature (1)..(25): SEQ ID NO: 4982; WAN024GFA_at; Start 221; Stop 245
gctcaaaaaagagctctgggctcat

SEQ ID NO: 243130 - DNA, 25 bp, Artificial
  probe
  misc_feature (1)..(25): SEQ ID NO: 4982; WAN024GFA_at; Start 275; Stop 299
cataggcattgtagcccgcctcctg

SEQ ID NO: 243131 - DNA, 25 bp, Artificial
  probe
  misc_feature (1)..(25): SEQ ID NO: 4982; WAN024GFA_at; Start 262; Stop 286
tcgtcatgttccacataggcattgt

SEQ ID NO: 243132 - DNA, 25 bp, Artificial
  probe
  misc_feature (1)..(25): SEQ ID NO: 4982; WAN024GFA_at; Start 215; Stop 239
cattttgctcaaaaaagagctctgg

SEQ ID NO: 243133 - DNA, 25 bp, Artificial
  probe
  misc_feature (1)..(25): SEQ ID NO: 4982; WAN024GFA_at; Start 74; Stop 98
gcgcaagaggtccacaatcatcata

SEQ ID NO: 243134 - DNA, 25 bp, Artificial
  probe
  misc_feature (1)..(25): SEQ ID NO: 4982; WAN024GFA_at; Start 88; Stop 112
caatcatcatattttcagagcgatt

SEQ ID NO: 243135 - DNA, 25 bp, Artificial
  probe
  misc_feature (1)..(25): SEQ ID NO: 4982; WAN024GFA_at; Start 265; Stop 289
tcatgttccacataggcattgtagc

SEQ ID NO: 243136 - DNA, 25 bp, Artificial
  probe
  misc_feature (1)..(25): SEQ ID NO: 4982; WAN024GFA_at; Start 266; Stop 290
catgttccacataggcattgtagcc

SEQ ID NO: 243137 - DNA, 25 bp, Artificial
  probe
  misc_feature (1)..(25): SEQ ID NO: 4982; WAN024GFA_at; Start 70; Stop 94
cattgcgcaagaggtccacaatcat

SEQ ID NO: 243138 - DNA, 25 bp, Artificial
  probe
  misc_feature (1)..(25): SEQ ID NO: 4982; WAN024GFA_at; Start 69; Stop 93
tcattgcgcaagaggtccacaatca

SEQ ID NO: 243139 - DNA, 25 bp, Artificial
  probe
  misc_feature (1)..(25): SEQ ID NO: 4982; WAN024GFA_at; Start 274; Stop 298
acataggcattgtagcccgcctcct

SEQ ID NO: 243140 - DNA, 25 bp, Artificial
  probe
  misc_feature (1)..(25): SEQ ID NO: 4982; WAN024GFA_at; Start 120; Stop 144
tcctgttccaaccaactggcctgct

SEQ ID NO: 243141 - DNA, 25 bp, Artificial
  probe
  misc_feature (1)..(25): SEQ ID NO: 4982; WAN024GFA_at; Start 271; Stop 295
tccacataggcattgtagcccgcct

SEQ ID NO: 243142 - DNA, 25 bp, Artificial
  probe
  misc_feature (1)..(25): SEQ ID NO: 4982; WAN024GFA_at; Start 66; Stop 90
atatcattgcgcaagaggtccacaa

SEQ ID NO: 243143 - DNA, 25 bp, Artificial
  probe
  misc_feature (1)..(25): SEQ ID NO: 4982; WAN024GFA_at; Start 76; Stop 100
gcaagaggtccacaatcatcatatt

SEQ ID NO: 243144 - DNA, 25 bp, Artificial
  probe
  misc_feature (1)..(25): SEQ ID NO: 4982; WAN024GFA_at; Start 67; Stop 91
tatcattgcgcaagaggtccacaat

SEQ ID NO: 243145 - DNA, 25 bp, Artificial
  probe
  misc_feature (1)..(25): SEQ ID NO: 4982; WAN024GFA_at; Start 217; Stop 241
ttttgctcaaaaaagagctctgggc

SEQ ID NO: 243146 - DNA, 25 bp, Artificial
  probe
  misc_feature (1)..(25): SEQ ID NO: 4982; WAN024GFA_at; Start 269; Stop 293
gttccacataggcattgtagcccgc

SEQ ID NO: 243147 - DNA, 25 bp, Artificial
  probe
  misc_feature (1)..(25): SEQ ID NO: 4982; WAN024GFA_at; Start 86; Stop 110
cacaatcatcatattttcagagcga

SEQ ID NO: 243148 - DNA, 25 bp, Artificial
  probe
  misc_feature (1)..(25): SEQ ID NO: 4982; WAN024GFA_at; Start 220; Stop 244
tgctcaaaaaagagctctgggctca

SEQ ID NO: 243149 - DNA, 25 bp, Artificial
  probe
  misc_feature (1)..(25): SEQ ID NO: 4982; WAN024GFA_at; Start 218; Stop 242
tttgctcaaaaaagagctctgggct

SEQ ID NO: 243150 - DNA, 25 bp, Artificial
  probe
  misc_feature (1)..(25): SEQ ID NO: 4982; WAN024GFA_at; Start 223; Stop 247
tcaaaaaagagctctgggctcatgg

SEQ ID NO: 243151 - DNA, 25 bp, Artificial
  probe
  misc_feature (1)..(25): SEQ ID NO: 4982; WAN024GFA_at; Start 72; Stop 96
ttgcgcaagaggtccacaatcatca

SEQ ID NO: 243152 - DNA, 25 bp, Artificial
  probe
  misc_feature (1)..(25): SEQ ID NO: 4982; WAN024GFA_at; Start 93; Stop 117
atcatattttcagagcgatttttgg

SEQ ID NO: 243153 - DNA, 25 bp, Artificial
  probe
  misc_feature (1)..(25): SEQ ID NO: 4982; WAN024GFA_at; Start 224; Stop 248
caaaaaagagctctgggctcatgga

SEQ ID NO: 243154 - DNA, 25 bp, Artificial
  probe
  misc_feature (1)..(25): SEQ ID NO: 1964; WAN024GFB_at; Start 788; Stop 812
cgaccatcaagagtcagttgcgaga

SEQ ID NO: 243155 - DNA, 25 bp, Artificial
  probe
  misc_feature (1)..(25): SEQ ID NO: 1964; WAN024GFB_at; Start 996; Stop 1020
cattcaacttcacaaaggtcaagcc

SEQ ID NO: 243156 - DNA, 25 bp, Artificial
  probe
  misc_feature (1)..(25): SEQ ID NO: 1964; WAN024GFB_at; Start 343; Stop 367
gaaaaggccattgcccaaattcacc

SEQ ID NO: 243157 - DNA, 25 bp, Artificial
  probe
  misc_feature (1)..(25): SEQ ID NO: 1964; WAN024GFB_at; Start 193; Stop 217
aaattagcagttcacaaggatcccc

SEQ ID NO: 243158 - DNA, 25 bp, Artificial
  probe
  misc_feature (1)..(25): SEQ ID NO: 1964; WAN024GFB_at; Start 870; Stop 894
tgcaccgaaaattgcgacaatggag

SEQ ID NO: 243159 - DNA, 25 bp, Artificial
  probe
  misc_feature (1)..(25): SEQ ID NO: 1964; WAN024GFB_at; Start 1014; Stop 1038
tcaagccatttatggagttggcgga

SEQ ID NO: 243160 - DNA, 25 bp, Artificial
  probe
  misc_feature (1)..(25): SEQ ID NO: 1964; WAN024GFB_at; Start 1006; Stop 1030
cacaaaggtcaagccatttatggag

SEQ ID NO: 243161 - DNA, 25 bp, Artificial
  probe
  misc_feature (1)..(25): SEQ ID NO: 1964; WAN024GFB_at; Start 853; Stop 877
tgtggttccataacgggtgcaccga

SEQ ID NO: 243162 - DNA, 25 bp, Artificial
  probe
  misc_feature (1)..(25): SEQ ID NO: 1964; WAN024GFB_at; Start 595; Stop 619
cagcgtggggtaactgaccaagaag

SEQ ID NO: 243163 - DNA, 25 bp, Artificial
  probe
  misc_feature (1)..(25): SEQ ID NO: 1964; WAN024GFB_at; Start 364; Stop 388
caccatcatttacggcagggagata

SEQ ID NO: 243164 - DNA, 25 bp, Artificial
  probe
  misc_feature (1)..(25): SEQ ID NO: 1964; WAN024GFB_at; Start 201; Stop 225
agttcacaaggatcccctactggga

SEQ ID NO: 243165 - DNA, 25 bp, Artificial
  probe
  misc_feature (1)..(25): SEQ ID NO: 1964; WAN024GFB_at; Start 417; Stop 441
taagcaaaagttaaatgccaatcct

SEQ ID NO: 243166 - DNA, 25 bp, Artificial
  probe
  misc_feature (1)..(25): SEQ ID NO: 1964; WAN024GFB_at; Start 282; Stop 306
gacttatgaggatattgatttgccc

SEQ ID NO: 243167 - DNA, 25 bp, Artificial
  probe
  misc_feature (1)..(25): SEQ ID NO: 1964; WAN024GFB_at; Start 618; Stop 642
agatcttgaacaggccagttggttg

SEQ ID NO: 243168 - DNA, 25 bp, Artificial
  probe
  misc_feature (1)..(25): SEQ ID NO: 1964; WAN024GFB_at; Start 972; Stop 996
gatttttaatgtggccattcgtacc

SEQ ID NO: 243169 - DNA, 25 bp, Artificial
  probe
  misc_feature (1)..(25): SEQ ID NO: 1964; WAN024GFB_at; Start 814; Stop 838
gatgtggaccttgttgaaatcttcc

SEQ ID NO: 243170 - DNA, 25 bp, Artificial
  probe
  misc_feature (1)..(25): SEQ ID NO: 1964; WAN024GFB_at; Start 609; Stop 633
tgaccaagaagatcttgaacaggcc

SEQ ID NO: 243171 - DNA, 25 bp, Artificial
  probe
  misc_feature (1)..(25): SEQ ID NO: 1964; WAN024GFB_at; Start 358; Stop 382
caaattcaccatcatttacggcagg

SEQ ID NO: 243172 - DNA, 25 bp, Artificial
  probe
  misc_feature (1)..(25): SEQ ID NO: 1964; WAN024GFB_at; Start 558; Stop 582
tcgcgagttgacaacacgaccaatg

SEQ ID NO: 243173 - DNA, 25 bp, Artificial
  probe
  misc_feature (1)..(25): SEQ ID NO: 1964; WAN024GFB_at; Start 711; Stop 735
tatttctgaagttgggagcgagcac

SEQ ID NO: 243174 - DNA, 25 bp, Artificial
  probe
  misc_feature (1)..(25): SEQ ID NO: 1964; WAN024GFB_at; Start 430; Stop 454
aatgccaatccttttgccatctaca

SEQ ID NO: 243175 - DNA, 25 bp, Artificial
  probe
  misc_feature (1)..(25): SEQ ID NO: 1964; WAN024GFB_at; Start 981; Stop 1005
tgtggccattcgtaccattcaactt

SEQ ID NO: 243176 - DNA, 25 bp, Artificial
  probe
  misc_feature (1)..(25): SEQ ID NO: 1964; WAN024GFB_at; Start 864; Stop 888
aacgggtgcaccgaaaattgcgaca

SEQ ID NO: 243177 - DNA, 25 bp, Artificial
  probe
  misc_feature (1)..(25): SEQ ID NO: 1964; WAN024GFB_at; Start 746; Stop 770
tgtgtcaggtagagcagtattcaac

SEQ ID NO: 243178 - DNA, 25 bp, Artificial
  probe
  misc_feature (1)..(25): SEQ ID NO: 1964; WAN024GFB_at; Start 740; Stop 764
agcgtctgtgtcaggtagagcagta

SEQ ID NO: 243179 - DNA, 25 bp, Artificial
  probe
  misc_feature (1)..(25): SEQ ID NO: 1964; WAN024GFB_at; Start 215; Stop 239
ccctactgggagagtacctgcttta

SEQ ID NO: 243180 - DNA, 25 bp, Artificial
  probe
  misc_feature (1)..(25): SEQ ID NO: 1964; WAN024GFB_at; Start 336; Stop 360
agactatgaaaaggccattgcccaa

SEQ ID NO: 243181 - DNA, 25 bp, Artificial
  probe
  misc_feature (1)..(25): SEQ ID NO: 1964; WAN024GFB_at; Start 291; Stop 315
ggatattgatttgccctcaaattgg

SEQ ID NO: 243182 - DNA, 25 bp, Artificial
  probe
  misc_feature (1)..(25): SEQ ID NO: 1964; WAN024GFB_at; Start 842; Stop 866
cactctttccttgtggttccataac

SEQ ID NO: 243183 - DNA, 25 bp, Artificial
  probe
  misc_feature (1)..(25): SEQ ID NO: 1964; WAN024GFB_at; Start 792; Stop 816
catcaagagtcagttgcgagaggat

SEQ ID NO: 243184 - DNA, 25 bp, Artificial
  probe
  misc_feature (1)..(25): SEQ ID NO: 1964; WAN024GFB_at; Start 702; Stop 726
tatgaaccgtatttctgaagttggg

SEQ ID NO: 243185 - DNA, 25 bp, Artificial
  probe
  misc_feature (1)..(25): SEQ ID NO: 1964; WAN024GFB_at; Start 402; Stop 426
ctacaccgtccaacttaagcaaaag

SEQ ID NO: 243186 - DNA, 25 bp, Artificial
  probe
  misc_feature (1)..(25): SEQ ID NO: 1964; WAN024GFB_at; Start 801; Stop 825
tcagttgcgagaggatgtggacctt

SEQ ID NO: 243187 - DNA, 25 bp, Artificial
  probe
  misc_feature (1)..(25): SEQ ID NO: 1964; WAN024GFB_at; Start 550; Stop 574
caaaatgatcgcgagttgacaacac

SEQ ID NO: 243188 - DNA, 25 bp, Artificial
  probe
  misc_feature (1)..(25): SEQ ID NO: 2571; WAN024GFC_at; Start 155; Stop 179
tgccccgaacctcctgcatgaagag

SEQ ID NO: 243189 - DNA, 25 bp, Artificial
  probe
  misc_feature (1)..(25): SEQ ID NO: 2571; WAN024GFC_at; Start 135; Stop 159
taaacttaaaggctgccaactgccc

SEQ ID NO: 243190 - DNA, 25 bp, Artificial
  probe
  misc_feature (1)..(25): SEQ ID NO: 2571; WAN024GFC_at; Start 60; Stop 84
gcatgccaattgcagtgtctccgat

SEQ ID NO: 243191 - DNA, 25 bp, Artificial
  probe
  misc_feature (1)..(25): SEQ ID NO: 2571; WAN024GFC_at; Start 171; Stop 195
catgaagagtaggatggacactgac

SEQ ID NO: 243192 - DNA, 25 bp, Artificial
  probe
  misc_feature (1)..(25): SEQ ID NO: 2571; WAN024GFC_at; Start 230; Stop 254
tcaacaacgagagcccgattgacat

SEQ ID NO: 243193 - DNA, 25 bp, Artificial
  probe
  misc_feature (1)..(25): SEQ ID NO: 2571; WAN024GFC_at; Start 21; Stop 45
tcaaaatagggcgaatcggaacctg

SEQ ID NO: 243194 - DNA, 25 bp, Artificial
  probe
  misc_feature (1)..(25): SEQ ID NO: 2571; WAN024GFC_at; Start 167; Stop 191
cctgcatgaagagtaggatggacac

SEQ ID NO: 243195 - DNA, 25 bp, Artificial
  probe
  misc_feature (1)..(25): SEQ ID NO: 2571; WAN024GFC_at; Start 108; Stop 132
taaattcaacctcaactggatcctg

SEQ ID NO: 243196 - DNA, 25 bp, Artificial
  probe
  misc_feature (1)..(25): SEQ ID NO: 2571; WAN024GFC_at; Start 33; Stop 57
gaatcggaacctgaacatgcttgac

SEQ ID NO: 243197 - DNA, 25 bp, Artificial
  probe
  misc_feature (1)..(25): SEQ ID NO: 2571; WAN024GFC_at; Start 235; Stop 259
aacgagagcccgattgacatgctca

SEQ ID NO: 243198 - DNA, 25 bp, Artificial
  probe
  misc_feature (1)..(25): SEQ ID NO: 2571; WAN024GFC_at; Start 252; Stop 276
catgctcacaaccttgaactgctaa

SEQ ID NO: 243199 - DNA, 25 bp, Artificial
  probe
  misc_feature (1)..(25): SEQ ID NO: 2571; WAN024GFC_at; Start 38; Stop 62
ggaacctgaacatgcttgacatgca

SEQ ID NO: 243200 - DNA, 25 bp, Artificial
  probe
  misc_feature (1)..(25): SEQ ID NO: 2571; WAN024GFC_at; Start 44; Stop 68
tgaacatgcttgacatgcatgccaa

SEQ ID NO: 243201 - DNA, 25 bp, Artificial
  probe
  misc_feature (1)..(25): SEQ ID NO: 2571; WAN024GFC_at; Start 15; Stop 39
tctctctcaaaatagggcgaatcgg

SEQ ID NO: 243202 - DNA, 25 bp, Artificial
  probe
  misc_feature (1)..(25): SEQ ID NO: 2571; WAN024GFC_at; Start 120; Stop 144
caactggatcctgcataaacttaaa

SEQ ID NO: 243203 - DNA, 25 bp, Artificial
  probe
  misc_feature (1)..(25): SEQ ID NO: 2571; WAN024GFC_at; Start 186; Stop 210
ggacactgacaatttccagaccaaa

SEQ ID NO: 243204 - DNA, 25 bp, Artificial
  probe
  misc_feature (1)..(25): SEQ ID NO: 2571; WAN024GFC_at; Start 160; Stop 184
cgaacctcctgcatgaagagtagga

SEQ ID NO: 243205 - DNA, 25 bp, Artificial
  probe
  misc_feature (1)..(25): SEQ ID NO: 2571; WAN024GFC_at; Start 245; Stop 269
cgattgacatgctcacaaccttgaa

SEQ ID NO: 243206 - DNA, 25 bp, Artificial
  probe
  misc_feature (1)..(25): SEQ ID NO: 2571; WAN024GFC_at; Start 180; Stop 204
taggatggacactgacaatttccag

SEQ ID NO: 243207 - DNA, 25 bp, Artificial
  probe
  misc_feature (1)..(25): SEQ ID NO: 2571; WAN024GFC_at; Start 196; Stop 220
aatttccagaccaaactgctctgcc

SEQ ID NO: 243208 - DNA, 25 bp, Artificial
  probe
  misc_feature (1)..(25): SEQ ID NO: 2571; WAN024GFC_at; Start 9; Stop 33
gaccaatctctctcaaaatagggcg

SEQ ID NO: 243209 - DNA, 25 bp, Artificial
  probe
  misc_feature (1)..(25): SEQ ID NO: 2571; WAN024GFC_at; Start 65; Stop 89
ccaattgcagtgtctccgatatcca

SEQ ID NO: 243210 - DNA, 25 bp, Artificial
  probe
  misc_feature (1)..(25): SEQ ID NO: 2571; WAN024GFC_at; Start 217; Stop 241
tgccacctgacgttcaacaacgaga

SEQ ID NO: 243211 - DNA, 25 bp, Artificial
  probe
  misc_feature (1)..(25): SEQ ID NO: 2571; WAN024GFC_at; Start 71; Stop 95
gcagtgtctccgatatccaatccag

SEQ ID NO: 243212 - DNA, 25 bp, Artificial
  probe
  misc_feature (1)..(25): SEQ ID NO: 2571; WAN024GFC_at; Start 140; Stop 164
ttaaaggctgccaactgccccgaac

SEQ ID NO: 243213 - DNA, 25 bp, Artificial
  probe
  misc_feature (1)..(25): SEQ ID NO: 2571; WAN024GFC_at; Start 224; Stop 248
tgacgttcaacaacgagagcccgat

SEQ ID NO: 243214 - DNA, 25 bp, Artificial
  probe
  misc_feature (1)..(25): SEQ ID NO: 2571; WAN024GFC_at; Start 208; Stop 232
aaactgctctgccacctgacgttca

SEQ ID NO: 243215 - DNA, 25 bp, Artificial
  probe
  misc_feature (1)..(25): SEQ ID NO: 2571; WAN024GFC_at; Start 51; Stop 75
gcttgacatgcatgccaattgcagt

SEQ ID NO: 243216 - DNA, 25 bp, Artificial
  probe
  misc_feature (1)..(25): SEQ ID NO: 2571; WAN024GFC_at; Start 128; Stop 152
tcctgcataaacttaaaggctgcca

SEQ ID NO: 243217 - DNA, 25 bp, Artificial
  probe
  misc_feature (1)..(25): SEQ ID NO: 2571; WAN024GFC_at; Start 114; Stop 138
caacctcaactggatcctgcataaa

SEQ ID NO: 243218 - DNA, 25 bp, Artificial
  probe
  misc_feature (1)..(25): SEQ ID NO: 2571; WAN024GFC_at; Start 27; Stop 51
tagggcgaatcggaacctgaacatg

SEQ ID NO: 243219 - DNA, 25 bp, Artificial
  probe
  misc_feature (1)..(25): SEQ ID NO: 2571; WAN024GFC_at; Start 2; Stop 26
tgggcatgaccaatctctctcaaaa

SEQ ID NO: 243220 - DNA, 25 bp, Artificial
  probe
  misc_feature (1)..(25): SEQ ID NO: 2571; WAN024GFC_at; Start 82; Stop 106
gatatccaatccagcatgagccttg

SEQ ID NO: 243221 - DNA, 25 bp, Artificial
  probe
  misc_feature (1)..(25): SEQ ID NO: 2571; WAN024GFC_at; Start 92; Stop 116
ccagcatgagccttgataaattcaa

SEQ ID NO: 243222 - DNA, 25 bp, Artificial
  probe
  misc_feature (1)..(25): SEQ ID NO: 3922; WAN024GFD_at; Start 264; Stop 288
tctcgttgttgaacgtcaggtggca

SEQ ID NO: 243223 - DNA, 25 bp, Artificial
  probe
  misc_feature (1)..(25): SEQ ID NO: 3922; WAN024GFD_at; Start 346; Stop 370
gggcagttggcagcctttaagttta

SEQ ID NO: 243224 - DNA, 25 bp, Artificial
  probe
  misc_feature (1)..(25): SEQ ID NO: 3922; WAN024GFD_at; Start 216; Stop 240
tagaggtatccatttagcagttcaa

SEQ ID NO: 243225 - DNA, 25 bp, Artificial
  probe
  misc_feature (1)..(25): SEQ ID NO: 3922; WAN024GFD_at; Start 226; Stop 250
catttagcagttcaaggttgtgagc

SEQ ID NO: 243226 - DNA, 25 bp, Artificial
  probe
  misc_feature (1)..(25): SEQ ID NO: 3922; WAN024GFD_at; Start 518; Stop 542
ctagtcgtccaaaattaatcggagg

SEQ ID NO: 243227 - DNA, 25 bp, Artificial
  probe
  misc_feature (1)..(25): SEQ ID NO: 3922; WAN024GFD_at; Start 112; Stop 136
ttaggtctatcttctagtgaggtgc

SEQ ID NO: 243228 - DNA, 25 bp, Artificial
  probe
  misc_feature (1)..(25): SEQ ID NO: 3922; WAN024GFD_at; Start 529; Stop 553
aaattaatcggaggtgcgcgtgcgc

SEQ ID NO: 243229 - DNA, 25 bp, Artificial
  probe
  misc_feature (1)..(25): SEQ ID NO: 3922; WAN024GFD_at; Start 373; Stop 397
caggatccagttgaggttgaattta

SEQ ID NO: 243230 - DNA, 25 bp, Artificial
  probe
  misc_feature (1)..(25): SEQ ID NO: 3922; WAN024GFD_at; Start 454; Stop 478
catgttcaggttccgattcgcccta

SEQ ID NO: 243231 - DNA, 25 bp, Artificial
  probe
  misc_feature (1)..(25): SEQ ID NO: 3922; WAN024GFD_at; Start 273; Stop 297
tgaacgtcaggtggcagagcagttt

SEQ ID NO: 243232 - DNA, 25 bp, Artificial
  probe
  misc_feature (1)..(25): SEQ ID NO: 3922; WAN024GFD_at; Start 323; Stop 347
ctactcttcatgcaggaggttcggg

SEQ ID NO: 243233 - DNA, 25 bp, Artificial
  probe
  misc_feature (1)..(25): SEQ ID NO: 3922; WAN024GFD_at; Start 237; Stop 261
tcaaggttgtgagcatgtcaatcgg

SEQ ID NO: 243234 - DNA, 25 bp, Artificial
  probe
  misc_feature (1)..(25): SEQ ID NO: 3922; WAN024GFD_at; Start 23; Stop 47
tgaacgagacacagattcaaagaga

SEQ ID NO: 243235 - DNA, 25 bp, Artificial
  probe
  misc_feature (1)..(25): SEQ ID NO: 3922; WAN024GFD_at; Start 492; Stop 516
tggtcatgcccatgtaacggcactg

SEQ ID NO: 243236 - DNA, 25 bp, Artificial
  probe
  misc_feature (1)..(25): SEQ ID NO: 3922; WAN024GFD_at; Start 418; Stop 442
gatatcggagacactgcaattggca

SEQ ID NO: 243237 - DNA, 25 bp, Artificial
  probe
  misc_feature (1)..(25): SEQ ID NO: 3922; WAN024GFD_at; Start 244; Stop 268
tgtgagcatgtcaatcgggctctcg

SEQ ID NO: 243238 - DNA, 25 bp, Artificial
  probe
  misc_feature (1)..(25): SEQ ID NO: 3922; WAN024GFD_at; Start 542; Stop 566
gtgcgcgtgcgcactatccgcaaga

SEQ ID NO: 243239 - DNA, 25 bp, Artificial
  probe
  misc_feature (1)..(25): SEQ ID NO: 3922; WAN024GFD_at; Start 122; Stop 146
cttctagtgaggtgctaggtggtca

SEQ ID NO: 243240 - DNA, 25 bp, Artificial
  probe
  misc_feature (1)..(25): SEQ ID NO: 3922; WAN024GFD_at; Start 38; Stop 62
ttcaaagagaaacacgtcaggtagt

SEQ ID NO: 243241 - DNA, 25 bp, Artificial
  probe
  misc_feature (1)..(25): SEQ ID NO: 3922; WAN024GFD_at; Start 430; Stop 454
actgcaattggcatgcatgtcaagc

SEQ ID NO: 243242 - DNA, 25 bp, Artificial
  probe
  misc_feature (1)..(25): SEQ ID NO: 3922; WAN024GFD_at; Start 466; Stop 490
ccgattcgccctattttgagagaga

SEQ ID NO: 243243 - DNA, 25 bp, Artificial
  probe
  misc_feature (1)..(25): SEQ ID NO: 3922; WAN024GFD_at; Start 157; Stop 181
gaatccagtcaagagattggtgagc

SEQ ID NO: 243244 - DNA, 25 bp, Artificial
  probe
  misc_feature (1)..(25): SEQ ID NO: 3922; WAN024GFD_at; Start 8; Stop 32
cagaggtaacagagatgaacgagac

SEQ ID NO: 243245 - DNA, 25 bp, Artificial
  probe
  misc_feature (1)..(25): SEQ ID NO: 3922; WAN024GFD_at; Start 255; Stop 279
caatcgggctctcgttgttgaacgt

SEQ ID NO: 243246 - DNA, 25 bp, Artificial
  probe
  misc_feature (1)..(25): SEQ ID NO: 3922; WAN024GFD_at; Start 479; Stop 503
ttttgagagagattggtcatgccca

SEQ ID NO: 243247 - DNA, 25 bp, Artificial
  probe
  misc_feature (1)..(25): SEQ ID NO: 3922; WAN024GFD_at; Start 50; Stop 74
cacgtcaggtagtggaagatgtttt

SEQ ID NO: 243248 - DNA, 25 bp, Artificial
  probe
  misc_feature (1)..(25): SEQ ID NO: 3922; WAN024GFD_at; Start 149; Stop 173
ttgggaaagaatccagtcaagagat

SEQ ID NO: 243249 - DNA, 25 bp, Artificial
  probe
  misc_feature (1)..(25): SEQ ID NO: 3922; WAN024GFD_at; Start 390; Stop 414
tgaatttatcaaggctcatgctgga

SEQ ID NO: 243250 - DNA, 25 bp, Artificial
  probe
  misc_feature (1)..(25): SEQ ID NO: 3922; WAN024GFD_at; Start 405; Stop 429
tcatgctggattggatatcggagac

SEQ ID NO: 243251 - DNA, 25 bp, Artificial
  probe
  misc_feature (1)..(25): SEQ ID NO: 3922; WAN024GFD_at; Start 445; Stop 469
catgtcaagcatgttcaggttccga

SEQ ID NO: 243252 - DNA, 25 bp, Artificial
  probe
  misc_feature (1)..(25): SEQ ID NO: 3922; WAN024GFD_at; Start 300; Stop 324
tctggaaattgtcagtgtccatcct

SEQ ID NO: 243253 - DNA, 25 bp, Artificial
  probe
  misc_feature (1)..(25): SEQ ID NO: 3922; WAN024GFD_at; Start 172; Stop 196
attggtgagctgatagtggagacta

SEQ ID NO: 243254 - DNA, 25 bp, Artificial
  probe
  misc_feature (1)..(25): SEQ ID NO: 3922; WAN024GFD_at; Start 358; Stop 382
gcctttaagtttatgcaggatccag

SEQ ID NO: 243255 - DNA, 25 bp, Artificial
  probe
  misc_feature (1)..(25): SEQ ID NO: 3922; WAN024GFD_at; Start 314; Stop 338
gtgtccatcctactcttcatgcagg

SEQ ID NO: 243256 - DNA, 25 bp, Artificial
  probe
  misc_feature (1)..(25): SEQ ID NO: 1505; WAN024GFE_at; Start 15; Stop 39
aaagatggaaataaccattctaact

SEQ ID NO: 243257 - DNA, 25 bp, Artificial
  probe
  misc_feature (1)..(25): SEQ ID NO: 1505; WAN024GFE_at; Start 51; Stop 75
acgcttcatcggtcttctcccttct

SEQ ID NO: 243258 - DNA, 25 bp, Artificial
  probe
  misc_feature (1)..(25): SEQ ID NO: 1505; WAN024GFE_at; Start 43; Stop 67
agagaagaacgcttcatcggtcttc

SEQ ID NO: 243259 - DNA, 25 bp, Artificial
  probe
  misc_feature (1)..(25): SEQ ID NO: 1505; WAN024GFE_at; Start 25; Stop 49
ataaccattctaactaaaagagaag

SEQ ID NO: 243260 - DNA, 25 bp, Artificial
  probe
  misc_feature (1)..(25): SEQ ID NO: 1505; WAN024GFE_at; Start 12; Stop 36
cagaaagatggaaataaccattcta

SEQ ID NO: 243261 - DNA, 25 bp, Artificial
  probe
  misc_feature (1)..(25): SEQ ID NO: 1505; WAN024GFE_at; Start 41; Stop 65
aaagagaagaacgcttcatcggtct

SEQ ID NO: 243262 - DNA, 25 bp, Artificial
  probe
  misc_feature (1)..(25): SEQ ID NO: 1505; WAN024GFE_at; Start 8; Stop 32
agaccagaaagatggaaataaccat

SEQ ID NO: 243263 - DNA, 25 bp, Artificial
  probe
  misc_feature (1)..(25): SEQ ID NO: 1505; WAN024GFE_at; Start 40; Stop 64
aaaagagaagaacgcttcatcggtc

SEQ ID NO: 243264 - DNA, 25 bp, Artificial
  probe
  misc_feature (1)..(25): SEQ ID NO: 1505; WAN024GFE_at; Start 13; Stop 37
agaaagatggaaataaccattctaa

SEQ ID NO: 243265 - DNA, 25 bp, Artificial
  probe
  misc_feature (1)..(25): SEQ ID NO: 1505; WAN024GFE_at; Start 37; Stop 61
actaaaagagaagaacgcttcatcg

SEQ ID NO: 243266 - DNA, 25 bp, Artificial
  probe
  misc_feature (1)..(25): SEQ ID NO: 1505; WAN024GFE_at; Start 16; Stop 40
aagatggaaataaccattctaacta

SEQ ID NO: 243267 - DNA, 25 bp, Artificial
  probe
  misc_feature (1)..(25): SEQ ID NO: 1505; WAN024GFE_at; Start 50; Stop 74
aacgcttcatcggtcttctcccttc

SEQ ID NO: 243268 - DNA, 25 bp, Artificial
  probe
  misc_feature (1)..(25): SEQ ID NO: 1505; WAN024GFE_at; Start 47; Stop 71
aagaacgcttcatcggtcttctccc

SEQ ID NO: 243269 - DNA, 25 bp, Artificial
  probe
  misc_feature (1)..(25): SEQ ID NO: 1505; WAN024GFE_at; Start 18; Stop 42
gatggaaataaccattctaactaaa

SEQ ID NO: 243270 - DNA, 25 bp, Artificial
  probe
  misc_feature (1)..(25): SEQ ID NO: 1505; WAN024GFE_at; Start 2; Stop 26
tgagaaagaccagaaagatggaaat

SEQ ID NO: 243271 - DNA, 25 bp, Artificial
  probe
  misc_feature (1)..(25): SEQ ID NO: 1505; WAN024GFE_at; Start 3; Stop 27
gagaaagaccagaaagatggaaata

SEQ ID NO: 243272 - DNA, 25 bp, Artificial
  probe
  misc_feature (1)..(25): SEQ ID NO: 1505; WAN024GFE_at; Start 48; Stop 72
agaacgcttcatcggtcttctccct

SEQ ID NO: 243273 - DNA, 25 bp, Artificial
  probe
  misc_feature (1)..(25): SEQ ID NO: 1505; WAN024GFE_at; Start 44; Stop 68
gagaagaacgcttcatcggtcttct

SEQ ID NO: 243274 - DNA, 25 bp, Artificial
  probe
  misc_feature (1)..(25): SEQ ID NO: 1505; WAN024GFE_at; Start 39; Stop 63
taaaagagaagaacgcttcatcggt

SEQ ID NO: 243275 - DNA, 25 bp, Artificial
  probe
  misc_feature (1)..(25): SEQ ID NO: 1505; WAN024GFE_at; Start 42; Stop 66
aagagaagaacgcttcatcggtctt

SEQ ID NO: 243276 - DNA, 25 bp, Artificial
  probe
  misc_feature (1)..(25): SEQ ID NO: 1505; WAN024GFE_at; Start 4; Stop 28
agaaagaccagaaagatggaaataa

SEQ ID NO: 243277 - DNA, 25 bp, Artificial
  probe
  misc_feature (1)..(25): SEQ ID NO: 1505; WAN024GFE_at; Start 14; Stop 38
gaaagatggaaataaccattctaac

SEQ ID NO: 243278 - DNA, 25 bp, Artificial
  probe
  misc_feature (1)..(25): SEQ ID NO: 1505; WAN024GFE_at; Start 11; Stop 35
ccagaaagatggaaataaccattct

SEQ ID NO: 243279 - DNA, 25 bp, Artificial
  probe
  misc_feature (1)..(25): SEQ ID NO: 1505; WAN024GFE_at; Start 10; Stop 34
accagaaagatggaaataaccattc

SEQ ID NO: 243280 - DNA, 25 bp, Artificial
  probe
  misc_feature (1)..(25): SEQ ID NO: 1505; WAN024GFE_at; Start 1; Stop 25
atgagaaagaccagaaagatggaaa

SEQ ID NO: 243281 - DNA, 25 bp, Artificial
  probe
  misc_feature (1)..(25): SEQ ID NO: 1505; WAN024GFE_at; Start 46; Stop 70
gaagaacgcttcatcggtcttctcc

SEQ ID NO: 243282 - DNA, 25 bp, Artificial
  probe
  misc_feature (1)..(25): SEQ ID NO: 1505; WAN024GFE_at; Start 5; Stop 29
gaaagaccagaaagatggaaataac

SEQ ID NO: 243283 - DNA, 25 bp, Artificial
  probe
  misc_feature (1)..(25): SEQ ID NO: 1505; WAN024GFE_at; Start 7; Stop 31
aagaccagaaagatggaaataacca

SEQ ID NO: 243284 - DNA, 25 bp, Artificial
  probe
  misc_feature (1)..(25): SEQ ID NO: 1505; WAN024GFE_at; Start 45; Stop 69
agaagaacgcttcatcggtcttctc

SEQ ID NO: 243285 - DNA, 25 bp, Artificial
  probe
  misc_feature (1)..(25): SEQ ID NO: 1505; WAN024GFE_at; Start 49; Stop 73
gaacgcttcatcggtcttctccctt

SEQ ID NO: 243286 - DNA, 25 bp, Artificial
  probe
  misc_feature (1)..(25): SEQ ID NO: 1505; WAN024GFE_at; Start 9; Stop 33
gaccagaaagatggaaataaccatt

SEQ ID NO: 243287 - DNA, 25 bp, Artificial
  probe
  misc_feature (1)..(25): SEQ ID NO: 1505; WAN024GFE_at; Start 17; Stop 41
agatggaaataaccattctaactaa

SEQ ID NO: 243288 - DNA, 25 bp, Artificial
  probe
  misc_feature (1)..(25): SEQ ID NO: 1505; WAN024GFE_at; Start 38; Stop 62
ctaaaagagaagaacgcttcatcgg

SEQ ID NO: 243289 - DNA, 25 bp, Artificial
  probe
  misc_feature (1)..(25): SEQ ID NO: 1505; WAN024GFE_at; Start 26; Stop 50
taaccattctaactaaaagagaaga

SEQ ID NO: 243290 - DNA, 25 bp, Artificial
  probe
  misc_feature (1)..(25): SEQ ID NO: 1845; WAN024GFF_at; Start 107; Stop 131
tgaaattcagccatccagatgatgg

SEQ ID NO: 243291 - DNA, 25 bp, Artificial
  probe
  misc_feature (1)..(25): SEQ ID NO: 1845; WAN024GFF_at; Start 206; Stop 230
tcttcctggctacgaatagctacca

SEQ ID NO: 243292 - DNA, 25 bp, Artificial
  probe
  misc_feature (1)..(25): SEQ ID NO: 1845; WAN024GFF_at; Start 284; Stop 308
agttcataggcaccaacttccttgg

SEQ ID NO: 243293 - DNA, 25 bp, Artificial
  probe
  misc_feature (1)..(25): SEQ ID NO: 1845; WAN024GFF_at; Start 46; Stop 70
gagcgccaagcggaaataggttgcc

SEQ ID NO: 243294 - DNA, 25 bp, Artificial
  probe
  misc_feature (1)..(25): SEQ ID NO: 1845; WAN024GFF_at; Start 378; Stop 402
agcgtttaagactgaaccacactaa

SEQ ID NO: 243295 - DNA, 25 bp, Artificial
  probe
  misc_feature (1)..(25): SEQ ID NO: 1845; WAN024GFF_at; Start 121; Stop 145
ccagatgatggtgtccaaagtgtta

SEQ ID NO: 243296 - DNA, 25 bp, Artificial
  probe
  misc_feature (1)..(25): SEQ ID NO: 1845; WAN024GFF_at; Start 292; Stop 316
ggcaccaacttccttggcacgaaga

SEQ ID NO: 243297 - DNA, 25 bp, Artificial
  probe
  misc_feature (1)..(25): SEQ ID NO: 1845; WAN024GFF_at; Start 170; Stop 194
ctcgaaagggcttgaagttggtact

SEQ ID NO: 243298 - DNA, 25 bp, Artificial
  probe
  misc_feature (1)..(25): SEQ ID NO: 1845; WAN024GFF_at; Start 136; Stop 160
caaagtgttatagaggaaatgtgga

SEQ ID NO: 243299 - DNA, 25 bp, Artificial
  probe
  misc_feature (1)..(25): SEQ ID NO: 1845; WAN024GFF_at; Start 231; Stop 255
tcaactgatcaatctgatccaacat

SEQ ID NO: 243300 - DNA, 25 bp, Artificial
  probe
  misc_feature (1)..(25): SEQ ID NO: 1845; WAN024GFF_at; Start 2; Stop 26
tgattgatttcgtcagagagacaaa

SEQ ID NO: 243301 - DNA, 25 bp, Artificial
  probe
  misc_feature (1)..(25): SEQ ID NO: 1845; WAN024GFF_at; Start 346; Stop 370
ggtttctctcaaatccttcaaagga

SEQ ID NO: 243302 - DNA, 25 bp, Artificial
  probe
  misc_feature (1)..(25): SEQ ID NO: 1845; WAN024GFF_at; Start 14; Stop 38
tcagagagacaaatcaagtccttgc

SEQ ID NO: 243303 - DNA, 25 bp, Artificial
  probe
  misc_feature (1)..(25): SEQ ID NO: 1845; WAN024GFF_at; Start 332; Stop 356
gcaatttccaacatggtttctctca

SEQ ID NO: 243304 - DNA, 25 bp, Artificial
  probe
  misc_feature (1)..(25): SEQ ID NO: 1845; WAN024GFF_at; Start 72; Stop 96
aggacttggtcacctgcaccactcg

SEQ ID NO: 243305 - DNA, 25 bp, Artificial
  probe
  misc_feature (1)..(25): SEQ ID NO: 1845; WAN024GFF_at; Start 194; Stop 218
tgacgggtcgtttcttcctggctac

SEQ ID NO: 243306 - DNA, 25 bp, Artificial
  probe
  misc_feature (1)..(25): SEQ ID NO: 1845; WAN024GFF_at; Start 162; Stop 186
taatctggctcgaaagggcttgaag

SEQ ID NO: 243307 - DNA, 25 bp, Artificial
  probe
  misc_feature (1)..(25): SEQ ID NO: 1845; WAN024GFF_at; Start 317; Stop 341
ttttgagcaccagaagcaatttcca

SEQ ID NO: 243308 - DNA, 25 bp, Artificial
  probe
  misc_feature (1)..(25): SEQ ID NO: 1845; WAN024GFF_at; Start 214; Stop 238
gctacgaatagctaccatcaactga

SEQ ID NO: 243309 - DNA, 25 bp, Artificial
  probe
  misc_feature (1)..(25): SEQ ID NO: 1845; WAN024GFF_at; Start 86; Stop 110
tgcaccactcgctgactatcatgaa

SEQ ID NO: 243310 - DNA, 25 bp, Artificial
  probe
  misc_feature (1)..(25): SEQ ID NO: 1845; WAN024GFF_at; Start 369; Stop 393
gagcaatccagcgtttaagactgaa

SEQ ID NO: 243311 - DNA, 25 bp, Artificial
  probe
  misc_feature (1)..(25): SEQ ID NO: 1845; WAN024GFF_at; Start 222; Stop 246
tagctaccatcaactgatcaatctg

SEQ ID NO: 243312 - DNA, 25 bp, Artificial
  probe
  misc_feature (1)..(25): SEQ ID NO: 1845; WAN024GFF_at; Start 180; Stop 204
cttgaagttggtactgacgggtcgt

SEQ ID NO: 243313 - DNA, 25 bp, Artificial
  probe
  misc_feature (1)..(25): SEQ ID NO: 1845; WAN024GFF_at; Start 65; Stop 89
gttgccaaggacttggtcacctgca

SEQ ID NO: 243314 - DNA, 25 bp, Artificial
  probe
  misc_feature (1)..(25): SEQ ID NO: 1845; WAN024GFF_at; Start 151; Stop 175
gaaatgtggattaatctggctcgaa

SEQ ID NO: 243315 - DNA, 25 bp, Artificial
  probe
  misc_feature (1)..(25): SEQ ID NO: 1845; WAN024GFF_at; Start 36; Stop 60
tgccttgattgagcgccaagcggaa

SEQ ID NO: 243316 - DNA, 25 bp, Artificial
  probe
  misc_feature (1)..(25): SEQ ID NO: 1845; WAN024GFF_at; Start 91; Stop 115
cactcgctgactatcatgaaattca

SEQ ID NO: 243317 - DNA, 25 bp, Artificial
  probe
  misc_feature (1)..(25): SEQ ID NO: 1845; WAN024GFF_at; Start 52; Stop 76
caagcggaaataggttgccaaggac

SEQ ID NO: 243318 - DNA, 25 bp, Artificial
  probe
  misc_feature (1)..(25): SEQ ID NO: 1845; WAN024GFF_at; Start 261; Stop 285
taaattggcgagttacttctctcag

SEQ ID NO: 243319 - DNA, 25 bp, Artificial
  probe
  misc_feature (1)..(25): SEQ ID NO: 1845; WAN024GFF_at; Start 29; Stop 53
aagtccttgccttgattgagcgcca

SEQ ID NO: 243320 - DNA, 25 bp, Artificial
  probe
  misc_feature (1)..(25): SEQ ID NO: 1845; WAN024GFF_at; Start 302; Stop 326
tccttggcacgaagattttgagcac

SEQ ID NO: 243321 - DNA, 25 bp, Artificial
  probe
  misc_feature (1)..(25): SEQ ID NO: 1845; WAN024GFF_at; Start 309; Stop 333
cacgaagattttgagcaccagaagc

SEQ ID NO: 243322 - DNA, 25 bp, Artificial
  probe
  misc_feature (1)..(25): SEQ ID NO: 1845; WAN024GFF_at; Start 270; Stop 294
gagttacttctctcagttcataggc

SEQ ID NO: 243323 - DNA, 25 bp, Artificial
  probe
  misc_feature (1)..(25): SEQ ID NO: 1845; WAN024GFF_at; Start 359; Stop 383
tccttcaaaggagcaatccagcgtt

SEQ ID NO: 243324 - DNA, 25 bp, Artificial
  probe
  misc_feature (1)..(25): SEQ ID NO: 5577; WAN024GFG_at; Start 94; Stop 118
gagttgactttgactactatcacca

SEQ ID NO: 243325 - DNA, 25 bp, Artificial
  probe
  misc_feature (1)..(25): SEQ ID NO: 5577; WAN024GFG_at; Start 133; Stop 157
aacgccatcatcctcaatacggatg

SEQ ID NO: 243326 - DNA, 25 bp, Artificial
  probe
  misc_feature (1)..(25): SEQ ID NO: 5577; WAN024GFG_at; Start 86; Stop 110
ccacgtttgagttgactttgactac

SEQ ID NO: 243327 - DNA, 25 bp, Artificial
  probe
  misc_feature (1)..(25): SEQ ID NO: 5577; WAN024GFG_at; Start 42; Stop 66
aatgaagtttgagccgttgatcgac

SEQ ID NO: 243328 - DNA, 25 bp, Artificial
  probe
  misc_feature (1)..(25): SEQ ID NO: 5577; WAN024GFG_at; Start 116; Stop 140
ccagcatcttggaagccaacgccat

SEQ ID NO: 243329 - DNA, 25 bp, Artificial
  probe
  misc_feature (1)..(25): SEQ ID NO: 5577; WAN024GFG_at; Start 165; Stop 189
ccgaatcctgtttctggacagaaag

SEQ ID NO: 243330 - DNA, 25 bp, Artificial
  probe
  misc_feature (1)..(25): SEQ ID NO: 5577; WAN024GFG_at; Start 45; Stop 69
gaagtttgagccgttgatcgacatt

SEQ ID NO: 243331 - DNA, 25 bp, Artificial
  probe
  misc_feature (1)..(25): SEQ ID NO: 5577; WAN024GFG_at; Start 103; Stop 127
ttgactactatcaccagcatcttgg

SEQ ID NO: 243332 - DNA, 25 bp, Artificial
  probe
  misc_feature (1)..(25): SEQ ID NO: 5577; WAN024GFG_at; Start 84; Stop 108
ccccacgtttgagttgactttgact

SEQ ID NO: 243333 - DNA, 25 bp, Artificial
  probe
  misc_feature (1)..(25): SEQ ID NO: 5577; WAN024GFG_at; Start 222; Stop 246
tgccatggtaaagagcattttctac

SEQ ID NO: 243334 - DNA, 25 bp, Artificial
  probe
  misc_feature (1)..(25): SEQ ID NO: 5577; WAN024GFG_at; Start 184; Stop 208
agaaagtttaatatggccctgacct

SEQ ID NO: 243335 - DNA, 25 bp, Artificial
  probe
  misc_feature (1)..(25): SEQ ID NO: 5577; WAN024GFG_at; Start 122; Stop 146
tcttggaagccaacgccatcatcct

SEQ ID NO: 243336 - DNA, 25 bp, Artificial
  probe
  misc_feature (1)..(25): SEQ ID NO: 5577; WAN024GFG_at; Start 113; Stop 137
tcaccagcatcttggaagccaacgc

SEQ ID NO: 243337 - DNA, 25 bp, Artificial
  probe
  misc_feature (1)..(25): SEQ ID NO: 5577; WAN024GFG_at; Start 71; Stop 95
tgaagaccaactcccccacgtttga

SEQ ID NO: 243338 - DNA, 25 bp, Artificial
  probe
  misc_feature (1)..(25): SEQ ID NO: 5577; WAN024GFG_at; Start 108; Stop 132
tactatcaccagcatcttggaagcc

SEQ ID NO: 243339 - DNA, 25 bp, Artificial
  probe
  misc_feature (1)..(25): SEQ ID NO: 5577; WAN024GFG_at; Start 204; Stop 228
gaccttccttttccttaatgccatg

SEQ ID NO: 243340 - DNA, 25 bp, Artificial
  probe
  misc_feature (1)..(25): SEQ ID NO: 5577; WAN024GFG_at; Start 37; Stop 61
tccaaaatgaagtttgagccgttga

SEQ ID NO: 243341 - DNA, 25 bp, Artificial
  probe
  misc_feature (1)..(25): SEQ ID NO: 5577; WAN024GFG_at; Start 55; Stop 79
ccgttgatcgacattttgaagacca

SEQ ID NO: 243342 - DNA, 25 bp, Artificial
  probe
  misc_feature (1)..(25): SEQ ID NO: 5577; WAN024GFG_at; Start 60; Stop 84
gatcgacattttgaagaccaactcc

SEQ ID NO: 243343 - DNA, 25 bp, Artificial
  probe
  misc_feature (1)..(25): SEQ ID NO: 5577; WAN024GFG_at; Start 111; Stop 135
tatcaccagcatcttggaagccaac

SEQ ID NO: 243344 - DNA, 25 bp, Artificial
  probe
  misc_feature (1)..(25): SEQ ID NO: 5577; WAN024GFG_at; Start 213; Stop 237
tttccttaatgccatggtaaagagc

SEQ ID NO: 243345 - DNA, 25 bp, Artificial
  probe
  misc_feature (1)..(25): SEQ ID NO: 5577; WAN024GFG_at; Start 227; Stop 251
tggtaaagagcattttctacaaggg

SEQ ID NO: 243346 - DNA, 25 bp, Artificial
  probe
  misc_feature (1)..(25): SEQ ID NO: 5577; WAN024GFG_at; Start 62; Stop 86
tcgacattttgaagaccaactcccc

SEQ ID NO: 243347 - DNA, 25 bp, Artificial
  probe
  misc_feature (1)..(25): SEQ ID NO: 5577; WAN024GFG_at; Start 160; Stop 184
caatcccgaatcctgtttctggaca

SEQ ID NO: 243348 - DNA, 25 bp, Artificial
  probe
  misc_feature (1)..(25): SEQ ID NO: 5577; WAN024GFG_at; Start 157; Stop 181
gaccaatcccgaatcctgtttctgg

SEQ ID NO: 243349 - DNA, 25 bp, Artificial
  probe
  misc_feature (1)..(25): SEQ ID NO: 5577; WAN024GFG_at; Start 51; Stop 75
tgagccgttgatcgacattttgaag

SEQ ID NO: 243350 - DNA, 25 bp, Artificial
  probe
  misc_feature (1)..(25): SEQ ID NO: 5577; WAN024GFG_at; Start 127; Stop 151
gaagccaacgccatcatcctcaata

SEQ ID NO: 243351 - DNA, 25 bp, Artificial
  probe
  misc_feature (1)..(25): SEQ ID NO: 5577; WAN024GFG_at; Start 177; Stop 201
tctggacagaaagtttaatatggcc

SEQ ID NO: 243352 - DNA, 25 bp, Artificial
  probe
  misc_feature (1)..(25): SEQ ID NO: 5577; WAN024GFG_at; Start 150; Stop 174
tacggatgaccaatcccgaatcctg

SEQ ID NO: 243353 - DNA, 25 bp, Artificial
  probe
  misc_feature (1)..(25): SEQ ID NO: 5577; WAN024GFG_at; Start 26; Stop 50
tggtaattggctccaaaatgaagtt

SEQ ID NO: 243354 - DNA, 25 bp, Artificial
  probe
  misc_feature (1)..(25): SEQ ID NO: 5577; WAN024GFG_at; Start 30; Stop 54
aattggctccaaaatgaagtttgag

SEQ ID NO: 243355 - DNA, 25 bp, Artificial
  probe
  misc_feature (1)..(25): SEQ ID NO: 5577; WAN024GFG_at; Start 143; Stop 167
tcctcaatacggatgaccaatcccg

SEQ ID NO: 243356 - DNA, 25 bp, Artificial
  probe
  misc_feature (1)..(25): SEQ ID NO: 5577; WAN024GFG_at; Start 192; Stop 216
taatatggccctgaccttccttttc

SEQ ID NO: 243357 - DNA, 25 bp, Artificial
  probe
  misc_feature (1)..(25): SEQ ID NO: 5577; WAN024GFG_at; Start 181; Stop 205
gacagaaagtttaatatggccctga

SEQ ID NO: 243358 - DNA, 25 bp, Artificial
  probe
  misc_feature (1)..(25): SEQ ID NO: 3929; WAN024GFH_at; Start 186; Stop 210
tatccaaacgaagcacaccaagatt

SEQ ID NO: 243359 - DNA, 25 bp, Artificial
  probe
  misc_feature (1)..(25): SEQ ID NO: 3929; WAN024GFH_at; Start 94; Stop 118
gacaaattcatggttttcattgata

SEQ ID NO: 243360 - DNA, 25 bp, Artificial
  probe
  misc_feature (1)..(25): SEQ ID NO: 3929; WAN024GFH_at; Start 215; Stop 239
ccctttgcatcaacaagttcttgag

SEQ ID NO: 243361 - DNA, 25 bp, Artificial
  probe
  misc_feature (1)..(25): SEQ ID NO: 3929; WAN024GFH_at; Start 110; Stop 134
tcattgataatgaaggcaaagccct

SEQ ID NO: 243362 - DNA, 25 bp, Artificial
  probe
  misc_feature (1)..(25): SEQ ID NO: 3929; WAN024GFH_at; Start 141; Stop 165
ccaactggagttgattgagataggc

SEQ ID NO: 243363 - DNA, 25 bp, Artificial
  probe
  misc_feature (1)..(25): SEQ ID NO: 3929; WAN024GFH_at; Start 233; Stop 257
tcttgagtgacagaaatgacccact

SEQ ID NO: 243364 - DNA, 25 bp, Artificial
  probe
  misc_feature (1)..(25): SEQ ID NO: 3929; WAN024GFH_at; Start 222; Stop 246
catcaacaagttcttgagtgacaga

SEQ ID NO: 243365 - DNA, 25 bp, Artificial
  probe
  misc_feature (1)..(25): SEQ ID NO: 3929; WAN024GFH_at; Start 62; Stop 86
gacgaactataaactgtgtgttgag

SEQ ID NO: 243366 - DNA, 25 bp, Artificial
  probe
  misc_feature (1)..(25): SEQ ID NO: 3929; WAN024GFH_at; Start 153; Stop 177
gattgagataggcttccagagtttc

SEQ ID NO: 243367 - DNA, 25 bp, Artificial
  probe
  misc_feature (1)..(25): SEQ ID NO: 3929; WAN024GFH_at; Start 35; Stop 59
tagggtttcatagcctccattttgc

SEQ ID NO: 243368 - DNA, 25 bp, Artificial
  probe
  misc_feature (1)..(25): SEQ ID NO: 3929; WAN024GFH_at; Start 240; Stop 264
tgacagaaatgacccactgactatc

SEQ ID NO: 243369 - DNA, 25 bp, Artificial
  probe
  misc_feature (1)..(25): SEQ ID NO: 3929; WAN024GFH_at; Start 159; Stop 183
gataggcttccagagtttcataaga

SEQ ID NO: 243370 - DNA, 25 bp, Artificial
  probe
  misc_feature (1)..(25): SEQ ID NO: 3929; WAN024GFH_at; Start 135; Stop 159
gctgccccaactggagttgattgag

SEQ ID NO: 243371 - DNA, 25 bp, Artificial
  probe
  misc_feature (1)..(25): SEQ ID NO: 3929; WAN024GFH_at; Start 207; Stop 231
gattggctccctttgcatcaacaag

SEQ ID NO: 243372 - DNA, 25 bp, Artificial
  probe
  misc_feature (1)..(25): SEQ ID NO: 3929; WAN024GFH_at; Start 182; Stop 206
gaaatatccaaacgaagcacaccaa

SEQ ID NO: 243373 - DNA, 25 bp, Artificial
  probe
  misc_feature (1)..(25): SEQ ID NO: 3929; WAN024GFH_at; Start 72; Stop 96
aaactgtgtgttgaggatggtagac

SEQ ID NO: 243374 - DNA, 25 bp, Artificial
  probe
  misc_feature (1)..(25): SEQ ID NO: 3929; WAN024GFH_at; Start 57; Stop 81
tgctagacgaactataaactgtgtg

SEQ ID NO: 243375 - DNA, 25 bp, Artificial
  probe
  misc_feature (1)..(25): SEQ ID NO: 3929; WAN024GFH_at; Start 177; Stop 201
cataagaaatatccaaacgaagcac

SEQ ID NO: 243376 - DNA, 25 bp, Artificial
  probe
  misc_feature (1)..(25): SEQ ID NO: 3929; WAN024GFH_at; Start 243; Stop 267
cagaaatgacccactgactatctga

SEQ ID NO: 243377 - DNA, 25 bp, Artificial
  probe
  misc_feature (1)..(25): SEQ ID NO: 3929; WAN024GFH_at; Start 29; Stop 53
tcgatgtagggtttcatagcctcca

SEQ ID NO: 243378 - DNA, 25 bp, Artificial
  probe
  misc_feature (1)..(25): SEQ ID NO: 3929; WAN024GFH_at; Start 114; Stop 138
tgataatgaaggcaaagccctgctg

SEQ ID NO: 243379 - DNA, 25 bp, Artificial
  probe
  misc_feature (1)..(25): SEQ ID NO: 3929; WAN024GFH_at; Start 78; Stop 102
tgtgttgaggatggtagacaaattc

SEQ ID NO: 243380 - DNA, 25 bp, Artificial
  probe
  misc_feature (1)..(25): SEQ ID NO: 3929; WAN024GFH_at; Start 203; Stop 227
ccaagattggctccctttgcatcaa

SEQ ID NO: 243381 - DNA, 25 bp, Artificial
  probe
  misc_feature (1)..(25): SEQ ID NO: 3929; WAN024GFH_at; Start 2; Stop 26
tgaccaggagtataaccctgacctg

SEQ ID NO: 243382 - DNA, 25 bp, Artificial
  probe
  misc_feature (1)..(25): SEQ ID NO: 3929; WAN024GFH_at; Start 47; Stop 71
gcctccattttgctagacgaactat

SEQ ID NO: 243383 - DNA, 25 bp, Artificial
  probe
  misc_feature (1)..(25): SEQ ID NO: 3929; WAN024GFH_at; Start 163; Stop 187
ggcttccagagtttcataagaaata

SEQ ID NO: 243384 - DNA, 25 bp, Artificial
  probe
  misc_feature (1)..(25): SEQ ID NO: 3929; WAN024GFH_at; Start 87; Stop 111
gatggtagacaaattcatggttttc

SEQ ID NO: 243385 - DNA, 25 bp, Artificial
  probe
  misc_feature (1)..(25): SEQ ID NO: 3929; WAN024GFH_at; Start 236; Stop 260
tgagtgacagaaatgacccactgac

SEQ ID NO: 243386 - DNA, 25 bp, Artificial
  probe
  misc_feature (1)..(25): SEQ ID NO: 3929; WAN024GFH_at; Start 131; Stop 155
ccctgctgccccaactggagttgat

SEQ ID NO: 243387 - DNA, 25 bp, Artificial
  probe
  misc_feature (1)..(25): SEQ ID NO: 3929; WAN024GFH_at; Start 148; Stop 172
gagttgattgagataggcttccaga

SEQ ID NO: 243388 - DNA, 25 bp, Artificial
  probe
  misc_feature (1)..(25): SEQ ID NO: 3929; WAN024GFH_at; Start 190; Stop 214
caaacgaagcacaccaagattggct

SEQ ID NO: 243389 - DNA, 25 bp, Artificial
  probe
  misc_feature (1)..(25): SEQ ID NO: 3929; WAN024GFH_at; Start 195; Stop 219
gaagcacaccaagattggctccctt

SEQ ID NO: 243390 - DNA, 25 bp, Artificial
  probe
  misc_feature (1)..(25): SEQ ID NO: 3929; WAN024GFH_at; Start 117; Stop 141
taatgaaggcaaagccctgctgccc

SEQ ID NO: 243391 - DNA, 25 bp, Artificial
  probe
  misc_feature (1)..(25): SEQ ID NO: 3929; WAN024GFH_at; Start 43; Stop 67
catagcctccattttgctagacgaa

SEQ ID NO: 243392 - DNA, 25 bp, Artificial
  probe
  misc_feature (1)..(25): SEQ ID NO: 4199; WAN024GFI_at; Start 557; Stop 581
aagagttgggcttgccttttcagga

SEQ ID NO: 243393 - DNA, 25 bp, Artificial
  probe
  misc_feature (1)..(25): SEQ ID NO: 4199; WAN024GFI_at; Start 450; Stop 474
catggcccagaaaatccagtctcat

SEQ ID NO: 243394 - DNA, 25 bp, Artificial
  probe
  misc_feature (1)..(25): SEQ ID NO: 4199; WAN024GFI_at; Start 158; Stop 182
agcaggtgccagatatcattttaac

SEQ ID NO: 243395 - DNA, 25 bp, Artificial
  probe
  misc_feature (1)..(25): SEQ ID NO: 4199; WAN024GFI_at; Start 329; Stop 353
tgctcaaacccttttctcgtcagga

SEQ ID NO: 243396 - DNA, 25 bp, Artificial
  probe
  misc_feature (1)..(25): SEQ ID NO: 4199; WAN024GFI_at; Start 280; Stop 304
gattttgattatgccttgtctgctg

SEQ ID NO: 243397 - DNA, 25 bp, Artificial
  probe
  misc_feature (1)..(25): SEQ ID NO: 4199; WAN024GFI_at; Start 598; Stop 622
cgtgttaaacaagccaagctcttgc

SEQ ID NO: 243398 - DNA, 25 bp, Artificial
  probe
  misc_feature (1)..(25): SEQ ID NO: 4199; WAN024GFI_at; Start 673; Stop 697
gaagatatgaactattttacccaac

SEQ ID NO: 243399 - DNA, 25 bp, Artificial
  probe
  misc_feature (1)..(25): SEQ ID NO: 4199; WAN024GFI_at; Start 213; Stop 237
ccagttggccagtctggtacgagaa

SEQ ID NO: 243400 - DNA, 25 bp, Artificial
  probe
  misc_feature (1)..(25): SEQ ID NO: 4199; WAN024GFI_at; Start 508; Stop 532
gccagtgacttaggttttagtccga

SEQ ID NO: 243401 - DNA, 25 bp, Artificial
  probe
  misc_feature (1)..(25): SEQ ID NO: 4199; WAN024GFI_at; Start 5; Stop 29
taaaggagcagagcatgacctacac

SEQ ID NO: 243402 - DNA, 25 bp, Artificial
  probe
  misc_feature (1)..(25): SEQ ID NO: 4199; WAN024GFI_at; Start 50; Stop 74
aatatctggtaagacaaggtttgac

SEQ ID NO: 243403 - DNA, 25 bp, Artificial
  probe
  misc_feature (1)..(25): SEQ ID NO: 4199; WAN024GFI_at; Start 543; Stop 567
ttccttgattaagaaagagttgggc

SEQ ID NO: 243404 - DNA, 25 bp, Artificial
  probe
  misc_feature (1)..(25): SEQ ID NO: 4199; WAN024GFI_at; Start 729; Stop 753
tcagtttaagaagggagaagaccga

SEQ ID NO: 243405 - DNA, 25 bp, Artificial
  probe
  misc_feature (1)..(25): SEQ ID NO: 4199; WAN024GFI_at; Start 311; Stop 335
taggtgtggacgactacctgctcaa

SEQ ID NO: 243406 - DNA, 25 bp, Artificial
  probe
  misc_feature (1)..(25): SEQ ID NO: 4199; WAN024GFI_at; Start 343; Stop 367
tctcgtcaggatattgaggaaatgt

SEQ ID NO: 243407 - DNA, 25 bp, Artificial
  probe
  misc_feature (1)..(25): SEQ ID NO: 4199; WAN024GFI_at; Start 72; Stop 96
gactaaactggtcaatgtagcagcc

SEQ ID NO: 243408 - DNA, 25 bp, Artificial
  probe
  misc_feature (1)..(25): SEQ ID NO: 4199; WAN024GFI_at; Start 525; Stop 549
tagtccgacctatctgagttccttg

SEQ ID NO: 243409 - DNA, 25 bp, Artificial
  probe
  misc_feature (1)..(25): SEQ ID NO: 4199; WAN024GFI_at; Start 198; Stop 222
tcatctaaatggcatccagttggcc

SEQ ID NO: 243410 - DNA, 25 bp, Artificial
  probe
  misc_feature (1)..(25): SEQ ID NO: 4199; WAN024GFI_at; Start 397; Stop 421
gaagagaaagaagagcagttacaag

SEQ ID NO: 243411 - DNA, 25 bp, Artificial
  probe
  misc_feature (1)..(25): SEQ ID NO: 4199; WAN024GFI_at; Start 117; Stop 141
tcaggctgaaaatggaaggcaggct

SEQ ID NO: 243412 - DNA, 25 bp, Artificial
  probe
  misc_feature (1)..(25): SEQ ID NO: 4199; WAN024GFI_at; Start 131; Stop 155
gaaggcaggcttgggaattgatcca

SEQ ID NO: 243413 - DNA, 25 bp, Artificial
  probe
  misc_feature (1)..(25): SEQ ID NO: 4199; WAN024GFI_at; Start 713; Stop 737
caggtgtgacacctcgtcagtttaa

SEQ ID NO: 243414 - DNA, 25 bp, Artificial
  probe
  misc_feature (1)..(25): SEQ ID NO: 4199; WAN024GFI_at; Start 435; Stop 459
taggtttgaaggaaacatggcccag

SEQ ID NO: 243415 - DNA, 25 bp, Artificial
  probe
  misc_feature (1)..(25): SEQ ID NO: 4199; WAN024GFI_at; Start 145; Stop 169
gaattgatccaaaagcaggtgccag

SEQ ID NO: 243416 - DNA, 25 bp, Artificial
  probe
  misc_feature (1)..(25): SEQ ID NO: 4199; WAN024GFI_at; Start 583; Stop 607
tatctggtgagagaacgtgttaaac

SEQ ID NO: 243417 - DNA, 25 bp, Artificial
  probe
  misc_feature (1)..(25): SEQ ID NO: 4199; WAN024GFI_at; Start 17; Stop 41
gcatgacctacacaatcttaatcgt

SEQ ID NO: 243418 - DNA, 25 bp, Artificial
  probe
  misc_feature (1)..(25): SEQ ID NO: 4199; WAN024GFI_at; Start 227; Stop 251
tggtacgagaaacctatcctcaggt

SEQ ID NO: 243419 - DNA, 25 bp, Artificial
  probe
  misc_feature (1)..(25): SEQ ID NO: 4199; WAN024GFI_at; Start 296; Stop 320
tgtctgctgtcaaactaggtgtgga

SEQ ID NO: 243420 - DNA, 25 bp, Artificial
  probe
  misc_feature (1)..(25): SEQ ID NO: 4199; WAN024GFI_at; Start 702; Stop 726
taagcagattgcaggtgtgacacct

SEQ ID NO: 243421 - DNA, 25 bp, Artificial
  probe
  misc_feature (1)..(25): SEQ ID NO: 4199; WAN024GFI_at; Start 87; Stop 111
tgtagcagcctacgatatggaaatc

SEQ ID NO: 243422 - DNA, 25 bp, Artificial
  probe
  misc_feature (1)..(25): SEQ ID NO: 4199; WAN024GFI_at; Start 176; Stop 200
ttttaaccgatatcaacatgcctca

SEQ ID NO: 243423 - DNA, 25 bp, Artificial
  probe
  misc_feature (1)..(25): SEQ ID NO: 4199; WAN024GFI_at; Start 646; Stop 670
tatgagatcgcagagaaggttggtt

SEQ ID NO: 243424 - DNA, 25 bp, Artificial
  probe
  misc_feature (1)..(25): SEQ ID NO: 4199; WAN024GFI_at; Start 690; Stop 714
tacccaacgttttaagcagattgca

SEQ ID NO: 243425 - DNA, 25 bp, Artificial
  probe
  misc_feature (1)..(25): SEQ ID NO: 4199; WAN024GFI_at; Start 465; Stop 489
ccagtctcatctggctgatagccaa

SEQ ID NO: 243426 - DNA, 25 bp, Artificial
  probe
  misc_feature (1)..(25): SEQ ID NO: 1113; WAN024GFJ_at; Start 727; Stop 751
ggtcacaaatcctacgtcagtcaag

SEQ ID NO: 243427 - DNA, 25 bp, Artificial
  probe
  misc_feature (1)..(25): SEQ ID NO: 1113; WAN024GFJ_at; Start 680; Stop 704
tggaggctatgaaaccctacatcga

SEQ ID NO: 243428 - DNA, 25 bp, Artificial
  probe
  misc_feature (1)..(25): SEQ ID NO: 1113; WAN024GFJ_at; Start 1137; Stop 1161
taacactttggacaccatcatctgg

SEQ ID NO: 243429 - DNA, 25 bp, Artificial
  probe
  misc_feature (1)..(25): SEQ ID NO: 1113; WAN024GFJ_at; Start 822; Stop 846
tcagctcttgtggaccttgcttggg

SEQ ID NO: 243430 - DNA, 25 bp, Artificial
  probe
  misc_feature (1)..(25): SEQ ID NO: 1113; WAN024GFJ_at; Start 949; Stop 973
gcttctggtgctcaaaatcttcgtg

SEQ ID NO: 243431 - DNA, 25 bp, Artificial
  probe
  misc_feature (1)..(25): SEQ ID NO: 1113; WAN024GFJ_at; Start 351; Stop 375
catttctacagatgacagtgtgcag

SEQ ID NO: 243432 - DNA, 25 bp, Artificial
  probe
  misc_feature (1)..(25): SEQ ID NO: 1113; WAN024GFJ_at; Start 1067; Stop 1091
gccaggaagaaacgacccgtcagta

SEQ ID NO: 243433 - DNA, 25 bp, Artificial
  probe
  misc_feature (1)..(25): SEQ ID NO: 1113; WAN024GFJ_at; Start 499; Stop 523
gaacttgttgatgcaaagggagcca

SEQ ID NO: 243434 - DNA, 25 bp, Artificial
  probe
  misc_feature (1)..(25): SEQ ID NO: 1113; WAN024GFJ_at; Start 805; Stop 829
ttagaccaggttcggagtcagctct

SEQ ID NO: 243435 - DNA, 25 bp, Artificial
  probe
  misc_feature (1)..(25): SEQ ID NO: 1113; WAN024GFJ_at; Start 314; Stop 338
tgaaaactgttgtgctggtgaccaa

SEQ ID NO: 243436 - DNA, 25 bp, Artificial
  probe
  misc_feature (1)..(25): SEQ ID NO: 1113; WAN024GFJ_at; Start 991; Stop 1015
tatgaactgagagaagtaactcgcc

SEQ ID NO: 243437 - DNA, 25 bp, Artificial
  probe
  misc_feature (1)..(25): SEQ ID NO: 1113; WAN024GFJ_at; Start 1098; Stop 1122
tcaagccctttcgagccagattaat

SEQ ID NO: 243438 - DNA, 25 bp, Artificial
  probe
  misc_feature (1)..(25): SEQ ID NO: 1113; WAN024GFJ_at; Start 1360; Stop 1384
gataatttagtcttacccaagctgg

SEQ ID NO: 243439 - DNA, 25 bp, Artificial
  probe
  misc_feature (1)..(25): SEQ ID NO: 1113; WAN024GFJ_at; Start 460; Stop 484
cgtaaatcagatagtcagtgggtca

SEQ ID NO: 243440 - DNA, 25 bp, Artificial
  probe
  misc_feature (1)..(25): SEQ ID NO: 1113; WAN024GFJ_at; Start 966; Stop 990
tcttcgtgccaaggaagttggtgcc

SEQ ID NO: 243441 - DNA, 25 bp, Artificial
  probe
  misc_feature (1)..(25): SEQ ID NO: 1113; WAN024GFJ_at; Start 1173; Stop 1197
tcatgatagtcagcgagtggtgcag

SEQ ID NO: 243442 - DNA, 25 bp, Artificial
  probe
  misc_feature (1)..(25): SEQ ID NO: 1113; WAN024GFJ_at; Start 707; Stop 731
caggtcagggttatactcctggtca

SEQ ID NO: 243443 - DNA, 25 bp, Artificial
  probe
  misc_feature (1)..(25): SEQ ID NO: 1113; WAN024GFJ_at; Start 1211; Stop 1235
tggcaacctatttccgcttggcgct

SEQ ID NO: 243444 - DNA, 25 bp, Artificial
  probe
  misc_feature (1)..(25): SEQ ID NO: 1113; WAN024GFJ_at; Start 94; Stop 118
tcaagttcttcagccattgaggcca

SEQ ID NO: 243445 - DNA, 25 bp, Artificial
  probe
  misc_feature (1)..(25): SEQ ID NO: 1113; WAN024GFJ_at; Start 1465; Stop 1489
cagaaacaggattcgggattggtca

SEQ ID NO: 243446 - DNA, 25 bp, Artificial
  probe
  misc_feature (1)..(25): SEQ ID NO: 1113; WAN024GFJ_at; Start 441; Stop 465
gcctgttttgactccagctcgtaaa

SEQ ID NO: 243447 - DNA, 25 bp, Artificial
  probe
  misc_feature (1)..(25): SEQ ID NO: 1113; WAN024GFJ_at; Start 1536; Stop 1560
tagtcaaagtcaactcaaacgtggg

SEQ ID NO: 243448 - DNA, 25 bp, Artificial
  probe
  misc_feature (1)..(25): SEQ ID NO: 1113; WAN024GFJ_at; Start 743; Stop 767
tcagtcaagagaagattgcaggaac

SEQ ID NO: 243449 - DNA, 25 bp, Artificial
  probe
  misc_feature (1)..(25): SEQ ID NO: 1113; WAN024GFJ_at; Start 1417; Stop 1441
catggcattaaggaaaaggaaggtc

SEQ ID NO: 243450 - DNA, 25 bp, Artificial
  probe
  misc_feature (1)..(25): SEQ ID NO: 1113; WAN024GFJ_at; Start 1518; Stop 1542
ccaagatgctggtgatagtagtcaa

SEQ ID NO: 243451 - DNA, 25 bp, Artificial
  probe
  misc_feature (1)..(25): SEQ ID NO: 1113; WAN024GFJ_at; Start 663; Stop 687
tagttcgtctagcaaaatggaggct

SEQ ID NO: 243452 - DNA, 25 bp, Artificial
  probe
  misc_feature (1)..(25): SEQ ID NO: 1113; WAN024GFJ_at; Start 1303; Stop 1327
cagaaacaacgctatggagataagc

SEQ ID NO: 243453 - DNA, 25 bp, Artificial
  probe
  misc_feature (1)..(25): SEQ ID NO: 1113; WAN024GFJ_at; Start 1045; Stop 1069
cagttgatggtagctattcgtagcc

SEQ ID NO: 243454 - DNA, 25 bp, Artificial
  probe
  misc_feature (1)..(25): SEQ ID NO: 1113; WAN024GFJ_at; Start 120; Stop 144
cattgagggcaacagccaaacgacc

SEQ ID NO: 243455 - DNA, 25 bp, Artificial
  probe
  misc_feature (1)..(25): SEQ ID NO: 1113; WAN024GFJ_at; Start 899; Stop 923
aacgctggattgctcctttgaagga

SEQ ID NO: 243456 - DNA, 25 bp, Artificial
  probe
  misc_feature (1)..(25): SEQ ID NO: 1113; WAN024GFJ_at; Start 238; Stop 262
gctgagaatcccagtcaagacaagg

SEQ ID NO: 243457 - DNA, 25 bp, Artificial
  probe
  misc_feature (1)..(25): SEQ ID NO: 1113; WAN024GFJ_at; Start 380; Stop 404
aaacttcctctgatatgatggctga

SEQ ID NO: 243458 - DNA, 25 bp, Artificial
  probe
  misc_feature (1)..(25): SEQ ID NO: 1113; WAN024GFJ_at; Start 219; Stop 243
gacggatgttctggcctatgctgag

SEQ ID NO: 243459 - DNA, 25 bp, Artificial
  probe
  misc_feature (1)..(25): SEQ ID NO: 1113; WAN024GFJ_at; Start 252; Stop 276
tcaagacaaggtcgagggaatccga

SEQ ID NO: 243460 - DNA, 25 bp, Artificial
  probe
  misc_feature (1)..(25): SEQ ID NO: 5199; WAN024GFK_at; Start 36; Stop 60
ggttaatcacttccaaatccttgtc

SEQ ID NO: 243461 - DNA, 25 bp, Artificial
  probe
  misc_feature (1)..(25): SEQ ID NO: 5199; WAN024GFK_at; Start 177; Stop 201
gcttggcatcataggtgacatggac

SEQ ID NO: 243462 - DNA, 25 bp, Artificial
  probe
  misc_feature (1)..(25): SEQ ID NO: 5199; WAN024GFK_at; Start 66; Stop 90
tgtaataaacaccagtacggtactg

SEQ ID NO: 243463 - DNA, 25 bp, Artificial
  probe
  misc_feature (1)..(25): SEQ ID NO: 5199; WAN024GFK_at; Start 221; Stop 245
tggttaatcaattcgtacttggttg

SEQ ID NO: 243464 - DNA, 25 bp, Artificial
  probe
  misc_feature (1)..(25): SEQ ID NO: 5199; WAN024GFK_at; Start 183; Stop 207
catcataggtgacatggacggtttc

SEQ ID NO: 243465 - DNA, 25 bp, Artificial
  probe
  misc_feature (1)..(25): SEQ ID NO: 5199; WAN024GFK_at; Start 186; Stop 210
cataggtgacatggacggtttctgc

SEQ ID NO: 243466 - DNA, 25 bp, Artificial
  probe
  misc_feature (1)..(25): SEQ ID NO: 5199; WAN024GFK_at; Start 248; Stop 272
tctcctctaccatttgcatagcctg

SEQ ID NO: 243467 - DNA, 25 bp, Artificial
  probe
  misc_feature (1)..(25): SEQ ID NO: 5199; WAN024GFK_at; Start 107; Stop 131
ccttgtttatttttgctggttggat

SEQ ID NO: 243468 - DNA, 25 bp, Artificial
  probe
  misc_feature (1)..(25): SEQ ID NO: 5199; WAN024GFK_at; Start 172; Stop 196
aatttgcttggcatcataggtgaca

SEQ ID NO: 243469 - DNA, 25 bp, Artificial
  probe
  misc_feature (1)..(25): SEQ ID NO: 5199; WAN024GFK_at; Start 81; Stop 105
tacggtactgggtccccacatcatt

SEQ ID NO: 243470 - DNA, 25 bp, Artificial
  probe
  misc_feature (1)..(25): SEQ ID NO: 5199; WAN024GFK_at; Start 213; Stop 237
gacctgtttggttaatcaattcgta

SEQ ID NO: 243471 - DNA, 25 bp, Artificial
  probe
  misc_feature (1)..(25): SEQ ID NO: 5199; WAN024GFK_at; Start 229; Stop 253
caattcgtacttggttgtttctcct

SEQ ID NO: 243472 - DNA, 25 bp, Artificial
  probe
  misc_feature (1)..(25): SEQ ID NO: 5199; WAN024GFK_at; Start 149; Stop 173
tgaagcaggatttccttgagagaaa

SEQ ID NO: 243473 - DNA, 25 bp, Artificial
  probe
  misc_feature (1)..(25): SEQ ID NO: 5199; WAN024GFK_at; Start 168; Stop 192
gagaaatttgcttggcatcataggt

SEQ ID NO: 243474 - DNA, 25 bp, Artificial
  probe
  misc_feature (1)..(25): SEQ ID NO: 5199; WAN024GFK_at; Start 192; Stop 216
tgacatggacggtttctgcatgacc

SEQ ID NO: 243475 - DNA, 25 bp, Artificial
  probe
  misc_feature (1)..(25): SEQ ID NO: 5199; WAN024GFK_at; Start 199; Stop 223
gacggtttctgcatgacctgtttgg

SEQ ID NO: 243476 - DNA, 25 bp, Artificial
  probe
  misc_feature (1)..(25): SEQ ID NO: 5199; WAN024GFK_at; Start 195; Stop 219
catggacggtttctgcatgacctgt

SEQ ID NO: 243477 - DNA, 25 bp, Artificial
  probe
  misc_feature (1)..(25): SEQ ID NO: 5199; WAN024GFK_at; Start 27; Stop 51
caaagacttggttaatcacttccaa

SEQ ID NO: 243478 - DNA, 25 bp, Artificial
  probe
  misc_feature (1)..(25): SEQ ID NO: 5199; WAN024GFK_at; Start 77; Stop 101
ccagtacggtactgggtccccacat

SEQ ID NO: 243479 - DNA, 25 bp, Artificial
  probe
  misc_feature (1)..(25): SEQ ID NO: 5199; WAN024GFK_at; Start 135; Stop 159
taatgcggaaatagtgaagcaggat

SEQ ID NO: 243480 - DNA, 25 bp, Artificial
  probe
  misc_feature (1)..(25): SEQ ID NO: 5199; WAN024GFK_at; Start 162; Stop 186
ccttgagagaaatttgcttggcatc

SEQ ID NO: 243481 - DNA, 25 bp, Artificial
  probe
  misc_feature (1)..(25): SEQ ID NO: 5199; WAN024GFK_at; Start 1; Stop 25
ttgatcgtatttcttagccacctca

SEQ ID NO: 243482 - DNA, 25 bp, Artificial
  probe
  misc_feature (1)..(25): SEQ ID NO: 5199; WAN024GFK_at; Start 241; Stop 265
ggttgtttctcctctaccatttgca

SEQ ID NO: 243483 - DNA, 25 bp, Artificial
  probe
  misc_feature (1)..(25): SEQ ID NO: 5199; WAN024GFK_at; Start 13; Stop 37
cttagccacctcatcaaagacttgg

SEQ ID NO: 243484 - DNA, 25 bp, Artificial
  probe
  misc_feature (1)..(25): SEQ ID NO: 5199; WAN024GFK_at; Start 206; Stop 230
tctgcatgacctgtttggttaatca

SEQ ID NO: 243485 - DNA, 25 bp, Artificial
  probe
  misc_feature (1)..(25): SEQ ID NO: 5199; WAN024GFK_at; Start 87; Stop 111
actgggtccccacatcatttccttg

SEQ ID NO: 243486 - DNA, 25 bp, Artificial
  probe
  misc_feature (1)..(25): SEQ ID NO: 5199; WAN024GFK_at; Start 143; Stop 167
aaatagtgaagcaggatttccttga

SEQ ID NO: 243487 - DNA, 25 bp, Artificial
  probe
  misc_feature (1)..(25): SEQ ID NO: 5199; WAN024GFK_at; Start 91; Stop 115
ggtccccacatcatttccttgttta

SEQ ID NO: 243488 - DNA, 25 bp, Artificial
  probe
  misc_feature (1)..(25): SEQ ID NO: 5199; WAN024GFK_at; Start 120; Stop 144
tgctggttggattgataatgcggaa

SEQ ID NO: 243489 - DNA, 25 bp, Artificial
  probe
  misc_feature (1)..(25): SEQ ID NO: 5199; WAN024GFK_at; Start 7; Stop 31
gtatttcttagccacctcatcaaag

SEQ ID NO: 243490 - DNA, 25 bp, Artificial
  probe
  misc_feature (1)..(25): SEQ ID NO: 5199; WAN024GFK_at; Start 56; Stop 80
ttgtcatctgtgtaataaacaccag

SEQ ID NO: 243491 - DNA, 25 bp, Artificial
  probe
  misc_feature (1)..(25): SEQ ID NO: 5199; WAN024GFK_at; Start 17; Stop 41
gccacctcatcaaagacttggttaa

SEQ ID NO: 243492 - DNA, 25 bp, Artificial
  probe
  misc_feature (1)..(25): SEQ ID NO: 5199; WAN024GFK_at; Start 24; Stop 48
catcaaagacttggttaatcacttc

SEQ ID NO: 243493 - DNA, 25 bp, Artificial
  probe
  misc_feature (1)..(25): SEQ ID NO: 5199; WAN024GFK_at; Start 48; Stop 72
ccaaatccttgtcatctgtgtaata

SEQ ID NO: 243494 - DNA, 25 bp, Artificial
  probe
  misc_feature (1)..(25): SEQ ID NO: 1250; WAN024GFL_at; Start 249; Stop 273
gacggatgccgtttcaggctatgca

SEQ ID NO: 243495 - DNA, 25 bp, Artificial
  probe
  misc_feature (1)..(25): SEQ ID NO: 1250; WAN024GFL_at; Start 972; Stop 996
tcaccttgggcatgtctttacggat

SEQ ID NO: 243496 - DNA, 25 bp, Artificial
  probe
  misc_feature (1)..(25): SEQ ID NO: 1250; WAN024GFL_at; Start 738; Stop 762
ccaggaaaatcaaacagaacgagct

SEQ ID NO: 243497 - DNA, 25 bp, Artificial
  probe
  misc_feature (1)..(25): SEQ ID NO: 1250; WAN024GFL_at; Start 628; Stop 652
catatcaatgttaatcaggcggcct

SEQ ID NO: 243498 - DNA, 25 bp, Artificial
  probe
  misc_feature (1)..(25): SEQ ID NO: 1250; WAN024GFL_at; Start 606; Stop 630
gaaaaatccaaatggctactgccat

SEQ ID NO: 243499 - DNA, 25 bp, Artificial
  probe
  misc_feature (1)..(25): SEQ ID NO: 1250; WAN024GFL_at; Start 716; Stop 740
cacctgaggagtatgcagttaccca

SEQ ID NO: 243500 - DNA, 25 bp, Artificial
  probe
  misc_feature (1)..(25): SEQ ID NO: 1250; WAN024GFL_at; Start 511; Stop 535
gaggtggctaagaaatacgatcaac

SEQ ID NO: 243501 - DNA, 25 bp, Artificial
  probe
  misc_feature (1)..(25): SEQ ID NO: 1250; WAN024GFL_at; Start 848; Stop 872
aatttgagtctggttgtggctggcc

SEQ ID NO: 243502 - DNA, 25 bp, Artificial
  probe
  misc_feature (1)..(25): SEQ ID NO: 1250; WAN024GFL_at; Start 122; Stop 146
cagttagccaaggaggaaaagcagt

SEQ ID NO: 243503 - DNA, 25 bp, Artificial
  probe
  misc_feature (1)..(25): SEQ ID NO: 1250; WAN024GFL_at; Start 862; Stop 886
tgtggctggcctagttttacccaac

SEQ ID NO: 243504 - DNA, 25 bp, Artificial
  probe
  misc_feature (1)..(25): SEQ ID NO: 1250; WAN024GFL_at; Start 180; Stop 204
gcacgaaatttatctagctggaggt

SEQ ID NO: 243505 - DNA, 25 bp, Artificial
  probe
  misc_feature (1)..(25): SEQ ID NO: 1250; WAN024GFL_at; Start 895; Stop 919
ccagatgttgtcacctacaaggaag

SEQ ID NO: 243506 - DNA, 25 bp, Artificial
  probe
  misc_feature (1)..(25): SEQ ID NO: 1250; WAN024GFL_at; Start 270; Stop 294
tgcaaatggtagaggagaaacaacc

SEQ ID NO: 243507 - DNA, 25 bp, Artificial
  probe
  misc_feature (1)..(25): SEQ ID NO: 1250; WAN024GFL_at; Start 349; Stop 373
gatgccaagcaaatttctctcaagg

SEQ ID NO: 243508 - DNA, 25 bp, Artificial
  probe
  misc_feature (1)..(25): SEQ ID NO: 1250; WAN024GFL_at; Start 573; Stop 597
ggtggctgaggattaccatcaagac

SEQ ID NO: 243509 - DNA, 25 bp, Artificial
  probe
  misc_feature (1)..(25): SEQ ID NO: 1250; WAN024GFL_at; Start 701; Stop 725
tgaaaaagaccctgtcacctgagga

SEQ ID NO: 243510 - DNA, 25 bp, Artificial
  probe
  misc_feature (1)..(25): SEQ ID NO: 1250; WAN024GFL_at; Start 990; Stop 1014
tacggatggtccacaggacaagggc

SEQ ID NO: 243511 - DNA, 25 bp, Artificial
  probe
  misc_feature (1)..(25): SEQ ID NO: 1250; WAN024GFL_at; Start 328; Stop 352
gaaaccgtccatgtcacctatgatg

SEQ ID NO: 243512 - DNA, 25 bp, Artificial
  probe
  misc_feature (1)..(25): SEQ ID NO: 1250; WAN024GFL_at; Start 86; Stop 110
cagggcagacagatgcctcgcaaat

SEQ ID NO: 243513 - DNA, 25 bp, Artificial
  probe
  misc_feature (1)..(25): SEQ ID NO: 1250; WAN024GFL_at; Start 463; Stop 487
tattacacagatgacaaggatttgg

SEQ ID NO: 243514 - DNA, 25 bp, Artificial
  probe
  misc_feature (1)..(25): SEQ ID NO: 1250; WAN024GFL_at; Start 877; Stop 901
tttacccaacccatcagtccagatg

SEQ ID NO: 243515 - DNA, 25 bp, Artificial
  probe
  misc_feature (1)..(25): SEQ ID NO: 1250; WAN024GFL_at; Start 930; Stop 954
caatatgacgcgtatggaagtgcgg

SEQ ID NO: 243516 - DNA, 25 bp, Artificial
  probe
  misc_feature (1)..(25): SEQ ID NO: 1250; WAN024GFL_at; Start 71; Stop 95
tattgatacgaaatgcagggcagac

SEQ ID NO: 243517 - DNA, 25 bp, Artificial
  probe
  misc_feature (1)..(25): SEQ ID NO: 1250; WAN024GFL_at; Start 495; Stop 519
taaccaagtctttgatgaggtggct

SEQ ID NO: 243518 - DNA, 25 bp, Artificial
  probe
  misc_feature (1)..(25): SEQ ID NO: 1250; WAN024GFL_at; Start 643; Stop 667
caggcggcctatcctgtcattgatg

SEQ ID NO: 243519 - DNA, 25 bp, Artificial
  probe
  misc_feature (1)..(25): SEQ ID NO: 1250; WAN024GFL_at; Start 1008; Stop 1032
caagggcggcttacgttactgtatc

SEQ ID NO: 243520 - DNA, 25 bp, Artificial
  probe
  misc_feature (1)..(25): SEQ ID NO: 1250; WAN024GFL_at; Start 798; Stop 822
tatctatgtggatatagcaactggg

SEQ ID NO: 243521 - DNA, 25 bp, Artificial
  probe
  misc_feature (1)..(25): SEQ ID NO: 1250; WAN024GFL_at; Start 535; Stop 559
cctctagcagttgaaaaggaaaact

SEQ ID NO: 243522 - DNA, 25 bp, Artificial
  probe
  misc_feature (1)..(25): SEQ ID NO: 1250; WAN024GFL_at; Start 758; Stop 782
gagctttctcaaaccgttactggga

SEQ ID NO: 243523 - DNA, 25 bp, Artificial
  probe
  misc_feature (1)..(25): SEQ ID NO: 1250; WAN024GFL_at; Start 916; Stop 940
gaagataagtcctacaatatgacgc

SEQ ID NO: 243524 - DNA, 25 bp, Artificial
  probe
  misc_feature (1)..(25): SEQ ID NO: 1250; WAN024GFL_at; Start 950; Stop 974
tgcggagccgagtaggagattctca

SEQ ID NO: 243525 - DNA, 25 bp, Artificial
  probe
  misc_feature (1)..(25): SEQ ID NO: 1250; WAN024GFL_at; Start 667; Stop 691
gccagcaaatatccaaaaccaagtg

SEQ ID NO: 243526 - DNA, 25 bp, Artificial
  probe
  misc_feature (1)..(25): SEQ ID NO: 1250; WAN024GFL_at; Start 101; Stop 125
cctcgcaaattgaaaaggcggcagt

SEQ ID NO: 243527 - DNA, 25 bp, Artificial
  probe
  misc_feature (1)..(25): SEQ ID NO: 1250; WAN024GFL_at; Start 313; Stop 337
caaacaggtcatgcagaaaccgtcc

SEQ ID NO: 243528 - DNA, 25 bp, Artificial
  probe
  misc_feature (1)..(25): SEQ ID NO: 6908; WAN024GFM_at; Start 113; Stop 137
gccacaatggcatctccagaaccag

SEQ ID NO: 243529 - DNA, 25 bp, Artificial
  probe
  misc_feature (1)..(25): SEQ ID NO: 6908; WAN024GFM_at; Start 238; Stop 262
gagttttcgataataatcattcaag

SEQ ID NO: 243530 - DNA, 25 bp, Artificial
  probe
  misc_feature (1)..(25): SEQ ID NO: 6908; WAN024GFM_at; Start 125; Stop 149
tctccagaaccagaaaccgtacaaa

SEQ ID NO: 243531 - DNA, 25 bp, Artificial
  probe
  misc_feature (1)..(25): SEQ ID NO: 6908; WAN024GFM_at; Start 58; Stop 82
gcggtgcataaagtcaatttcctta

SEQ ID NO: 243532 - DNA, 25 bp, Artificial
  probe
  misc_feature (1)..(25): SEQ ID NO: 6908; WAN024GFM_at; Start 272; Stop 296
gatttcatgactttcattataacaa

SEQ ID NO: 243533 - DNA, 25 bp, Artificial
  probe
  misc_feature (1)..(25): SEQ ID NO: 6908; WAN024GFM_at; Start 85; Stop 109
aaattgctcacggataggcgcatcc

SEQ ID NO: 243534 - DNA, 25 bp, Artificial
  probe
  misc_feature (1)..(25): SEQ ID NO: 6908; WAN024GFM_at; Start 50; Stop 74
ggccacttgcggtgcataaagtcaa

SEQ ID NO: 243535 - DNA, 25 bp, Artificial
  probe
  misc_feature (1)..(25): SEQ ID NO: 6908; WAN024GFM_at; Start 192; Stop 216
aatcaaatcccgcatcaatagggac

SEQ ID NO: 243536 - DNA, 25 bp, Artificial
  probe
  misc_feature (1)..(25): SEQ ID NO: 6908; WAN024GFM_at; Start 258; Stop 282
tcaaggtattataagatttcatgac

SEQ ID NO: 243537 - DNA, 25 bp, Artificial
  probe
  misc_feature (1)..(25): SEQ ID NO: 6908; WAN024GFM_at; Start 55; Stop 79
cttgcggtgcataaagtcaatttcc

SEQ ID NO: 243538 - DNA, 25 bp, Artificial
  probe
  misc_feature (1)..(25): SEQ ID NO: 6908; WAN024GFM_at; Start 289; Stop 313
tataacaaaaatcacccacaatctc

SEQ ID NO: 243539 - DNA, 25 bp, Artificial
  probe
  misc_feature (1)..(25): SEQ ID NO: 6908; WAN024GFM_at; Start 319; Stop 343
cctgactttcctataaattcctctg

SEQ ID NO: 243540 - DNA, 25 bp, Artificial
  probe
  misc_feature (1)..(25): SEQ ID NO: 6908; WAN024GFM_at; Start 305; Stop 329
cacaatctcaaaagcctgactttcc

SEQ ID NO: 243541 - DNA, 25 bp, Artificial
  probe
  misc_feature (1)..(25): SEQ ID NO: 6908; WAN024GFM_at; Start 332; Stop 356
taaattcctctgtttctcgtttcca

SEQ ID NO: 243542 - DNA, 25 bp, Artificial
  probe
  misc_feature (1)..(25): SEQ ID NO: 6908; WAN024GFM_at; Start 26; Stop 50
taaaccagatacttccgaacatccg

SEQ ID NO: 243543 - DNA, 25 bp, Artificial
  probe
  misc_feature (1)..(25): SEQ ID NO: 6908; WAN024GFM_at; Start 298; Stop 322
aatcacccacaatctcaaaagcctg

SEQ ID NO: 243544 - DNA, 25 bp, Artificial
  probe
  misc_feature (1)..(25): SEQ ID NO: 6908; WAN024GFM_at; Start 162; Stop 186
catgagccacagtcccatcacgatt

SEQ ID NO: 243545 - DNA, 25 bp, Artificial
  probe
  misc_feature (1)..(25): SEQ ID NO: 6908; WAN024GFM_at; Start 42; Stop 66
gaacatccggccacttgcggtgcat

SEQ ID NO: 243546 - DNA, 25 bp, Artificial
  probe
  misc_feature (1)..(25): SEQ ID NO: 6908; WAN024GFM_at; Start 179; Stop 203
tcacgattgggacaatcaaatcccg

SEQ ID NO: 243547 - DNA, 25 bp, Artificial
  probe
  misc_feature (1)..(25): SEQ ID NO: 6908; WAN024GFM_at; Start 94; Stop 118
acggataggcgcatccggtgccaca

SEQ ID NO: 243548 - DNA, 25 bp, Artificial
  probe
  misc_feature (1)..(25): SEQ ID NO: 6908; WAN024GFM_at; Start 45; Stop 69
catccggccacttgcggtgcataaa

SEQ ID NO: 243549 - DNA, 25 bp, Artificial
  probe
  misc_feature (1)..(25): SEQ ID NO: 6908; WAN024GFM_at; Start 89; Stop 113
tgctcacggataggcgcatccggtg

SEQ ID NO: 243550 - DNA, 25 bp, Artificial
  probe
  misc_feature (1)..(25): SEQ ID NO: 6908; WAN024GFM_at; Start 144; Stop 168
tacaaaaagtacagcccccatgagc

SEQ ID NO: 243551 - DNA, 25 bp, Artificial
  probe
  misc_feature (1)..(25): SEQ ID NO: 6908; WAN024GFM_at; Start 183; Stop 207
gattgggacaatcaaatcccgcatc

SEQ ID NO: 243552 - DNA, 25 bp, Artificial
  probe
  misc_feature (1)..(25): SEQ ID NO: 6908; WAN024GFM_at; Start 101; Stop 125
ggcgcatccggtgccacaatggcat

SEQ ID NO: 243553 - DNA, 25 bp, Artificial
  probe
  misc_feature (1)..(25): SEQ ID NO: 6908; WAN024GFM_at; Start 225; Stop 249
tcttttctccaaagagttttcgata

SEQ ID NO: 243554 - DNA, 25 bp, Artificial
  probe
  misc_feature (1)..(25): SEQ ID NO: 6908; WAN024GFM_at; Start 165; Stop 189
gagccacagtcccatcacgattggg

SEQ ID NO: 243555 - DNA, 25 bp, Artificial
  probe
  misc_feature (1)..(25): SEQ ID NO: 6908; WAN024GFM_at; Start 120; Stop 144
tggcatctccagaaccagaaaccgt

SEQ ID NO: 243556 - DNA, 25 bp, Artificial
  probe
  misc_feature (1)..(25): SEQ ID NO: 6908; WAN024GFM_at; Start 33; Stop 57
gatacttccgaacatccggccactt

SEQ ID NO: 243557 - DNA, 25 bp, Artificial
  probe
  misc_feature (1)..(25): SEQ ID NO: 6908; WAN024GFM_at; Start 203; Stop 227
gcatcaatagggactttaaaagtct

SEQ ID NO: 243558 - DNA, 25 bp, Artificial
  probe
  misc_feature (1)..(25): SEQ ID NO: 6908; WAN024GFM_at; Start 336; Stop 360
ttcctctgtttctcgtttccattag

SEQ ID NO: 243559 - DNA, 25 bp, Artificial
  probe
  misc_feature (1)..(25): SEQ ID NO: 6908; WAN024GFM_at; Start 81; Stop 105
tataaaattgctcacggataggcgc

SEQ ID NO: 243560 - DNA, 25 bp, Artificial
  probe
  misc_feature (1)..(25): SEQ ID NO: 6908; WAN024GFM_at; Start 73; Stop 97
aatttccttataaaattgctcacgg

SEQ ID NO: 243561 - DNA, 25 bp, Artificial
  probe
  misc_feature (1)..(25): SEQ ID NO: 6908; WAN024GFM_at; Start 200; Stop 224
cccgcatcaatagggactttaaaag

SEQ ID NO: 243562 - DNA, 25 bp, Artificial
  probe
  misc_feature (1)..(25): SEQ ID NO: 2626; WAN024GFN_at; Start 49; Stop 73
cagtttaatcccttgaatatcgtta

SEQ ID NO: 243563 - DNA, 25 bp, Artificial
  probe
  misc_feature (1)..(25): SEQ ID NO: 2626; WAN024GFN_at; Start 170; Stop 194
tttctcaaacgcttgaccgtttcca

SEQ ID NO: 243564 - DNA, 25 bp, Artificial
  probe
  misc_feature (1)..(25): SEQ ID NO: 2626; WAN024GFN_at; Start 270; Stop 294
ccgtcacatgcatgcactccgataa

SEQ ID NO: 243565 - DNA, 25 bp, Artificial
  probe
  misc_feature (1)..(25): SEQ ID NO: 2626; WAN024GFN_at; Start 79; Stop 103
gacacaacggcggacattttcaacc

SEQ ID NO: 243566 - DNA, 25 bp, Artificial
  probe
  misc_feature (1)..(25): SEQ ID NO: 2626; WAN024GFN_at; Start 179; Stop 203
cgcttgaccgtttccacctacaatt

SEQ ID NO: 243567 - DNA, 25 bp, Artificial
  probe
  misc_feature (1)..(25): SEQ ID NO: 2626; WAN024GFN_at; Start 39; Stop 63
ggagcaaatgcagtttaatcccttg

SEQ ID NO: 243568 - DNA, 25 bp, Artificial
  probe
  misc_feature (1)..(25): SEQ ID NO: 2626; WAN024GFN_at; Start 108; Stop 132
tctcatgggtttcaccaggcaaacc

SEQ ID NO: 243569 - DNA, 25 bp, Artificial
  probe
  misc_feature (1)..(25): SEQ ID NO: 2626; WAN024GFN_at; Start 42; Stop 66
gcaaatgcagtttaatcccttgaat

SEQ ID NO: 243570 - DNA, 25 bp, Artificial
  probe
  misc_feature (1)..(25): SEQ ID NO: 2626; WAN024GFN_at; Start 27; Stop 51
ttgtcataagatggagcaaatgcag

SEQ ID NO: 243571 - DNA, 25 bp, Artificial
  probe
  misc_feature (1)..(25): SEQ ID NO: 2626; WAN024GFN_at; Start 261; Stop 285
ccaattcaaccgtcacatgcatgca

SEQ ID NO: 243572 - DNA, 25 bp, Artificial
  probe
  misc_feature (1)..(25): SEQ ID NO: 2626; WAN024GFN_at; Start 83; Stop 107
caacggcggacattttcaaccatca

SEQ ID NO: 243573 - DNA, 25 bp, Artificial
  probe
  misc_feature (1)..(25): SEQ ID NO: 2626; WAN024GFN_at; Start 2; Stop 26
tggtaatctcgttgcatacgagtat

SEQ ID NO: 243574 - DNA, 25 bp, Artificial
  probe
  misc_feature (1)..(25): SEQ ID NO: 2626; WAN024GFN_at; Start 81; Stop 105
cacaacggcggacattttcaaccat

SEQ ID NO: 243575 - DNA, 25 bp, Artificial
  probe
  misc_feature (1)..(25): SEQ ID NO: 2626; WAN024GFN_at; Start 106; Stop 130
catctcatgggtttcaccaggcaaa

SEQ ID NO: 243576 - DNA, 25 bp, Artificial
  probe
  misc_feature (1)..(25): SEQ ID NO: 2626; WAN024GFN_at; Start 174; Stop 198
tcaaacgcttgaccgtttccaccta

SEQ ID NO: 243577 - DNA, 25 bp, Artificial
  probe
  misc_feature (1)..(25): SEQ ID NO: 2626; WAN024GFN_at; Start 36; Stop 60
gatggagcaaatgcagtttaatccc

SEQ ID NO: 243578 - DNA, 25 bp, Artificial
  probe
  misc_feature (1)..(25): SEQ ID NO: 2626; WAN024GFN_at; Start 257; Stop 281
aagcccaattcaaccgtcacatgca

SEQ ID NO: 243579 - DNA, 25 bp, Artificial
  probe
  misc_feature (1)..(25): SEQ ID NO: 2626; WAN024GFN_at; Start 30; Stop 54
tcataagatggagcaaatgcagttt

SEQ ID NO: 243580 - DNA, 25 bp, Artificial
  probe
  misc_feature (1)..(25): SEQ ID NO: 2626; WAN024GFN_at; Start 8; Stop 32
tctcgttgcatacgagtatttgtca

SEQ ID NO: 243581 - DNA, 25 bp, Artificial
  probe
  misc_feature (1)..(25): SEQ ID NO: 2626; WAN024GFN_at; Start 184; Stop 208
gaccgtttccacctacaattcataa

SEQ ID NO: 243582 - DNA, 25 bp, Artificial
  probe
  misc_feature (1)..(25): SEQ ID NO: 2626; WAN024GFN_at; Start 188; Stop 212
gtttccacctacaattcataagaat

SEQ ID NO: 243583 - DNA, 25 bp, Artificial
  probe
  misc_feature (1)..(25): SEQ ID NO: 2626; WAN024GFN_at; Start 20; Stop 44
cgagtatttgtcataagatggagca

SEQ ID NO: 243584 - DNA, 25 bp, Artificial
  probe
  misc_feature (1)..(25): SEQ ID NO: 2626; WAN024GFN_at; Start 102; Stop 126
ccatcatctcatgggtttcaccagg

SEQ ID NO: 243585 - DNA, 25 bp, Artificial
  probe
  misc_feature (1)..(25): SEQ ID NO: 2626; WAN024GFN_at; Start 91; Stop 115
gacattttcaaccatcatctcatgg

SEQ ID NO: 243586 - DNA, 25 bp, Artificial
  probe
  misc_feature (1)..(25): SEQ ID NO: 2626; WAN024GFN_at; Start 88; Stop 112
gcggacattttcaaccatcatctca

SEQ ID NO: 243587 - DNA, 25 bp, Artificial
  probe
  misc_feature (1)..(25): SEQ ID NO: 2626; WAN024GFN_at; Start 165; Stop 189
gatactttctcaaacgcttgaccgt

SEQ ID NO: 243588 - DNA, 25 bp, Artificial
  probe
  misc_feature (1)..(25): SEQ ID NO: 2626; WAN024GFN_at; Start 46; Stop 70
atgcagtttaatcccttgaatatcg

SEQ ID NO: 243589 - DNA, 25 bp, Artificial
  probe
  misc_feature (1)..(25): SEQ ID NO: 2626; WAN024GFN_at; Start 268; Stop 292
aaccgtcacatgcatgcactccgat

SEQ ID NO: 243590 - DNA, 25 bp, Artificial
  probe
  misc_feature (1)..(25): SEQ ID NO: 2626; WAN024GFN_at; Start 263; Stop 287
aattcaaccgtcacatgcatgcact

SEQ ID NO: 243591 - DNA, 25 bp, Artificial
  probe
  misc_feature (1)..(25): SEQ ID NO: 2626; WAN024GFN_at; Start 16; Stop 40
catacgagtatttgtcataagatgg

SEQ ID NO: 243592 - DNA, 25 bp, Artificial
  probe
  misc_feature (1)..(25): SEQ ID NO: 2626; WAN024GFN_at; Start 111; Stop 135
catgggtttcaccaggcaaaccatt

SEQ ID NO: 243593 - DNA, 25 bp, Artificial
  probe
  misc_feature (1)..(25): SEQ ID NO: 2626; WAN024GFN_at; Start 93; Stop 117
cattttcaaccatcatctcatgggt

SEQ ID NO: 243594 - DNA, 25 bp, Artificial
  probe
  misc_feature (1)..(25): SEQ ID NO: 2626; WAN024GFN_at; Start 86; Stop 110
cggcggacattttcaaccatcatct

SEQ ID NO: 243595 - DNA, 25 bp, Artificial
  probe
  misc_feature (1)..(25): SEQ ID NO: 2626; WAN024GFN_at; Start 164; Stop 188
ggatactttctcaaacgcttgaccg

SEQ ID NO: 243596 - DNA, 25 bp, Artificial
  probe
  misc_feature (1)..(25): SEQ ID NO: 2603; WAN024GFO_at; Start 284; Stop 308
tcttctggcgtgcaggattcttatt

SEQ ID NO: 243597 - DNA, 25 bp, Artificial
  probe
  misc_feature (1)..(25): SEQ ID NO: 2603; WAN024GFO_at; Start 56; Stop 80
tcgtctgcattatcctaaccaaact

SEQ ID NO: 243598 - DNA, 25 bp, Artificial
  probe
  misc_feature (1)..(25): SEQ ID NO: 2603; WAN024GFO_at; Start 9; Stop 33
gattttaatgaaattagcatctatt

SEQ ID NO: 243599 - DNA, 25 bp, Artificial
  probe
  misc_feature (1)..(25): SEQ ID NO: 2603; WAN024GFO_at; Start 173; Stop 197
cccataatttcctccctagactggg

SEQ ID NO: 243600 - DNA, 25 bp, Artificial
  probe
  misc_feature (1)..(25): SEQ ID NO: 2603; WAN024GFO_at; Start 44; Stop 68
tactgaccttagtcgtctgcattat

SEQ ID NO: 243601 - DNA, 25 bp, Artificial
  probe
  misc_feature (1)..(25): SEQ ID NO: 2603; WAN024GFO_at; Start 38; Stop 62
tattgatactgaccttagtcgtctg

SEQ ID NO: 243602 - DNA, 25 bp, Artificial
  probe
  misc_feature (1)..(25): SEQ ID NO: 2603; WAN024GFO_at; Start 212; Stop 236
tcctagccattattctcgtcttttt

SEQ ID NO: 243603 - DNA, 25 bp, Artificial
  probe
  misc_feature (1)..(25): SEQ ID NO: 2603; WAN024GFO_at; Start 48; Stop 72
gaccttagtcgtctgcattatccta

SEQ ID NO: 243604 - DNA, 25 bp, Artificial
  probe
  misc_feature (1)..(25): SEQ ID NO: 2603; WAN024GFO_at; Start 288; Stop 312
ctggcgtgcaggattcttattaacc

SEQ ID NO: 243605 - DNA, 25 bp, Artificial
  probe
  misc_feature (1)..(25): SEQ ID NO: 2603; WAN024GFO_at; Start 333; Stop 357
gattgttgaattgttcttaatgaaa

SEQ ID NO: 243606 - DNA, 25 bp, Artificial
  probe
  misc_feature (1)..(25): SEQ ID NO: 2603; WAN024GFO_at; Start 96; Stop 120
actaggacgaaactttgcggatttg

SEQ ID NO: 243607 - DNA, 25 bp, Artificial
  probe
  misc_feature (1)..(25): SEQ ID NO: 2603; WAN024GFO_at; Start 35; Stop 59
tattattgatactgaccttagtcgt

SEQ ID NO: 243608 - DNA, 25 bp, Artificial
  probe
  misc_feature (1)..(25): SEQ ID NO: 2603; WAN024GFO_at; Start 299; Stop 323
gattcttattaacccttatcatgta

SEQ ID NO: 243609 - DNA, 25 bp, Artificial
  probe
  misc_feature (1)..(25): SEQ ID NO: 2603; WAN024GFO_at; Start 99; Stop 123
aggacgaaactttgcggatttggct

SEQ ID NO: 243610 - DNA, 25 bp, Artificial
  probe
  misc_feature (1)..(25): SEQ ID NO: 2603; WAN024GFO_at; Start 50; Stop 74
ccttagtcgtctgcattatcctaac

SEQ ID NO: 243611 - DNA, 25 bp, Artificial
  probe
  misc_feature (1)..(25): SEQ ID NO: 2603; WAN024GFO_at; Start 171; Stop 195
tacccataatttcctccctagactg

SEQ ID NO: 243612 - DNA, 25 bp, Artificial
  probe
  misc_feature (1)..(25): SEQ ID NO: 2603; WAN024GFO_at; Start 292; Stop 316
cgtgcaggattcttattaaccctta

SEQ ID NO: 243613 - DNA, 25 bp, Artificial
  probe
  misc_feature (1)..(25): SEQ ID NO: 2603; WAN024GFO_at; Start 54; Stop 78
agtcgtctgcattatcctaaccaaa

SEQ ID NO: 243614 - DNA, 25 bp, Artificial
  probe
  misc_feature (1)..(25): SEQ ID NO: 2603; WAN024GFO_at; Start 290; Stop 314
ggcgtgcaggattcttattaaccct

SEQ ID NO: 243615 - DNA, 25 bp, Artificial
  probe
  misc_feature (1)..(25): SEQ ID NO: 2603; WAN024GFO_at; Start 53; Stop 77
tagtcgtctgcattatcctaaccaa

SEQ ID NO: 243616 - DNA, 25 bp, Artificial
  probe
  misc_feature (1)..(25): SEQ ID NO: 2603; WAN024GFO_at; Start 281; Stop 305
aattcttctggcgtgcaggattctt

SEQ ID NO: 243617 - DNA, 25 bp, Artificial
  probe
  misc_feature (1)..(25): SEQ ID NO: 2603; WAN024GFO_at; Start 289; Stop 313
tggcgtgcaggattcttattaaccc

SEQ ID NO: 243618 - DNA, 25 bp, Artificial
  probe
  misc_feature (1)..(25): SEQ ID NO: 2603; WAN024GFO_at; Start 42; Stop 66
gatactgaccttagtcgtctgcatt

SEQ ID NO: 243619 - DNA, 25 bp, Artificial
  probe
  misc_feature (1)..(25): SEQ ID NO: 2603; WAN024GFO_at; Start 287; Stop 311
tctggcgtgcaggattcttattaac

SEQ ID NO: 243620 - DNA, 25 bp, Artificial
  probe
  misc_feature (1)..(25): SEQ ID NO: 2603; WAN024GFO_at; Start 61; Stop 85
tgcattatcctaaccaaacttttta

SEQ ID NO: 243621 - DNA, 25 bp, Artificial
  probe
  misc_feature (1)..(25): SEQ ID NO: 2603; WAN024GFO_at; Start 277; Stop 301
atcaaattcttctggcgtgcaggat

SEQ ID NO: 243622 - DNA, 25 bp, Artificial
  probe
  misc_feature (1)..(25): SEQ ID NO: 2603; WAN024GFO_at; Start 98; Stop 122
taggacgaaactttgcggatttggc

SEQ ID NO: 243623 - DNA, 25 bp, Artificial
  probe
  misc_feature (1)..(25): SEQ ID NO: 2603; WAN024GFO_at; Start 217; Stop 241
gccattattctcgtctttttcttcc

SEQ ID NO: 243624 - DNA, 25 bp, Artificial
  probe
  misc_feature (1)..(25): SEQ ID NO: 2603; WAN024GFO_at; Start 58; Stop 82
gtctgcattatcctaaccaaacttt

SEQ ID NO: 243625 - DNA, 25 bp, Artificial
  probe
  misc_feature (1)..(25): SEQ ID NO: 2603; WAN024GFO_at; Start 278; Stop 302
tcaaattcttctggcgtgcaggatt

SEQ ID NO: 243626 - DNA, 25 bp, Artificial
  probe
  misc_feature (1)..(25): SEQ ID NO: 2603; WAN024GFO_at; Start 40; Stop 64
ttgatactgaccttagtcgtctgca

SEQ ID NO: 243627 - DNA, 25 bp, Artificial
  probe
  misc_feature (1)..(25): SEQ ID NO: 2603; WAN024GFO_at; Start 25; Stop 49
gcatctattttattattgatactga

SEQ ID NO: 243628 - DNA, 25 bp, Artificial
  probe
  misc_feature (1)..(25): SEQ ID NO: 2603; WAN024GFO_at; Start 295; Stop 319
gcaggattcttattaacccttatca

SEQ ID NO: 243629 - DNA, 25 bp, Artificial
  probe
  misc_feature (1)..(25): SEQ ID NO: 2603; WAN024GFO_at; Start 177; Stop 201
taatttcctccctagactggggcta

SEQ ID NO: 243630 - DNA, 25 bp, Artificial
  probe
  misc_feature (1)..(25): SEQ ID NO: 5640; WAN024GFP_at; Start 642; Stop 666
tgacctgattaaccgtgcgcattct

SEQ ID NO: 243631 - DNA, 25 bp, Artificial
  probe
  misc_feature (1)..(25): SEQ ID NO: 5640; WAN024GFP_at; Start 457; Stop 481
gaaaaggtggaagttattcgagagc

SEQ ID NO: 243632 - DNA, 25 bp, Artificial
  probe
  misc_feature (1)..(25): SEQ ID NO: 5640; WAN024GFP_at; Start 553; Stop 577
gacgaaaccatcgaatatttggctg

SEQ ID NO: 243633 - DNA, 25 bp, Artificial
  probe
  misc_feature (1)..(25): SEQ ID NO: 5640; WAN024GFP_at; Start 574; Stop 598
gctgagttatcggagtgcatgcatg

SEQ ID NO: 243634 - DNA, 25 bp, Artificial
  probe
  misc_feature (1)..(25): SEQ ID NO: 5640; WAN024GFP_at; Start 353; Stop 377
cgcctatccgtgagcaattttataa

SEQ ID NO: 243635 - DNA, 25 bp, Artificial
  probe
  misc_feature (1)..(25): SEQ ID NO: 5640; WAN024GFP_at; Start 1; Stop 25
ttggttaggataatgcagacgacta

SEQ ID NO: 243636 - DNA, 25 bp, Artificial
  probe
  misc_feature (1)..(25): SEQ ID NO: 5640; WAN024GFP_at; Start 144; Stop 168
gagattgtgggtgatttttgttata

SEQ ID NO: 243637 - DNA, 25 bp, Artificial
  probe
  misc_feature (1)..(25): SEQ ID NO: 5640; WAN024GFP_at; Start 544; Stop 568
tgtttaccagacgaaaccatcgaat

SEQ ID NO: 243638 - DNA, 25 bp, Artificial
  probe
  misc_feature (1)..(25): SEQ ID NO: 5640; WAN024GFP_at; Start 52; Stop 76
gctaatttcattaaaatcataccca

SEQ ID NO: 243639 - DNA, 25 bp, Artificial
  probe
  misc_feature (1)..(25): SEQ ID NO: 5640; WAN024GFP_at; Start 116; Stop 140
gaggaatttataggaaagtcaggct

SEQ ID NO: 243640 - DNA, 25 bp, Artificial
  probe
  misc_feature (1)..(25): SEQ ID NO: 5640; WAN024GFP_at; Start 202; Stop 226
gattattatcgaaaactctttggag

SEQ ID NO: 243641 - DNA, 25 bp, Artificial
  probe
  misc_feature (1)..(25): SEQ ID NO: 5640; WAN024GFP_at; Start 636; Stop 660
aacctctgacctgattaaccgtgcg

SEQ ID NO: 243642 - DNA, 25 bp, Artificial
  probe
  misc_feature (1)..(25): SEQ ID NO: 5640; WAN024GFP_at; Start 231; Stop 255
gacttttaaagtccctattgatgcg

SEQ ID NO: 243643 - DNA, 25 bp, Artificial
  probe
  misc_feature (1)..(25): SEQ ID NO: 5640; WAN024GFP_at; Start 624; Stop 648
tacttatgaagcaacctctgacctg

SEQ ID NO: 243644 - DNA, 25 bp, Artificial
  probe
  misc_feature (1)..(25): SEQ ID NO: 5640; WAN024GFP_at; Start 68; Stop 92
tcatacccatattgtatcataaaaa

SEQ ID NO: 243645 - DNA, 25 bp, Artificial
  probe
  misc_feature (1)..(25): SEQ ID NO: 5640; WAN024GFP_at; Start 208; Stop 232
tatcgaaaactctttggagaaaaga

SEQ ID NO: 243646 - DNA, 25 bp, Artificial
  probe
  misc_feature (1)..(25): SEQ ID NO: 5640; WAN024GFP_at; Start 471; Stop 495
tattcgagagcgttatgaacaggct

SEQ ID NO: 243647 - DNA, 25 bp, Artificial
  probe
  misc_feature (1)..(25): SEQ ID NO: 5640; WAN024GFP_at; Start 130; Stop 154
aaagtcaggcttttgagattgtggg

SEQ ID NO: 243648 - DNA, 25 bp, Artificial
  probe
  misc_feature (1)..(25): SEQ ID NO: 5640; WAN024GFP_at; Start 508; Stop 532
ggtgtggtaggaatcaatattggaa

SEQ ID NO: 243649 - DNA, 25 bp, Artificial
  probe
  misc_feature (1)..(25): SEQ ID NO: 5640; WAN024GFP_at; Start 103; Stop 127
gaaacgagaaacagaggaatttata

SEQ ID NO: 243650 - DNA, 25 bp, Artificial
  probe
  misc_feature (1)..(25): SEQ ID NO: 5640; WAN024GFP_at; Start 581; Stop 605
tatcggagtgcatgcatgtgacggt

SEQ ID NO: 243651 - DNA, 25 bp, Artificial
  probe
  misc_feature (1)..(25): SEQ ID NO: 5640; WAN024GFP_at; Start 18; Stop 42
gacgactaaggtcagtatcaataat

SEQ ID NO: 243652 - DNA, 25 bp, Artificial
  probe
  misc_feature (1)..(25): SEQ ID NO: 5640; WAN024GFP_at; Start 484; Stop 508
tatgaacaggctatcaatgagccag

SEQ ID NO: 243653 - DNA, 25 bp, Artificial
  probe
  misc_feature (1)..(25): SEQ ID NO: 5640; WAN024GFP_at; Start 194; Stop 218
ccttgaatgattattatcgaaaact

SEQ ID NO: 243654 - DNA, 25 bp, Artificial
  probe
  misc_feature (1)..(25): SEQ ID NO: 5640; WAN024GFP_at; Start 649; Stop 673
attaaccgtgcgcattcttatgaat

SEQ ID NO: 243655 - DNA, 25 bp, Artificial
  probe
  misc_feature (1)..(25): SEQ ID NO: 5640; WAN024GFP_at; Start 29; Stop 53
tcagtatcaataataaaatagatgc

SEQ ID NO: 243656 - DNA, 25 bp, Artificial
  probe
  misc_feature (1)..(25): SEQ ID NO: 5640; WAN024GFP_at; Start 135; Stop 159
caggcttttgagattgtgggtgatt

SEQ ID NO: 243657 - DNA, 25 bp, Artificial
  probe
  misc_feature (1)..(25): SEQ ID NO: 5640; WAN024GFP_at; Start 96; Stop 120
gctaatggaaacgagaaacagagga

SEQ ID NO: 243658 - DNA, 25 bp, Artificial
  probe
  misc_feature (1)..(25): SEQ ID NO: 5640; WAN024GFP_at; Start 359; Stop 383
tccgtgagcaattttataaggaaat

SEQ ID NO: 243659 - DNA, 25 bp, Artificial
  probe
  misc_feature (1)..(25): SEQ ID NO: 5640; WAN024GFP_at; Start 9; Stop 33
gataatgcagacgactaaggtcagt

SEQ ID NO: 243660 - DNA, 25 bp, Artificial
  probe
  misc_feature (1)..(25): SEQ ID NO: 5640; WAN024GFP_at; Start 568; Stop 592
tatttggctgagttatcggagtgca

SEQ ID NO: 243661 - DNA, 25 bp, Artificial
  probe
  misc_feature (1)..(25): SEQ ID NO: 5640; WAN024GFP_at; Start 534; Stop 558
gcgcccagactgtttaccagacgaa

SEQ ID NO: 243662 - DNA, 25 bp, Artificial
  probe
  misc_feature (1)..(25): SEQ ID NO: 5640; WAN024GFP_at; Start 498; Stop 522
caatgagccaggtgtggtaggaatc

SEQ ID NO: 243663 - DNA, 25 bp, Artificial
  probe
  misc_feature (1)..(25): SEQ ID NO: 5640; WAN024GFP_at; Start 504; Stop 528
gccaggtgtggtaggaatcaatatt

SEQ ID NO: 243664 - DNA, 25 bp, Artificial
  probe
  misc_feature (1)..(25): SEQ ID NO: 3484; WAN024GFQ_at; Start 277; Stop 301
ttcccaaacatatcgtcatccatcg

SEQ ID NO: 243665 - DNA, 25 bp, Artificial
  probe
  misc_feature (1)..(25): SEQ ID NO: 3484; WAN024GFQ_at; Start 280; Stop 304
ccaaacatatcgtcatccatcgaat

SEQ ID NO: 243666 - DNA, 25 bp, Artificial
  probe
  misc_feature (1)..(25): SEQ ID NO: 3484; WAN024GFQ_at; Start 401; Stop 425
tggaagtgttcaaggatgcaaggct

SEQ ID NO: 243667 - DNA, 25 bp, Artificial
  probe
  misc_feature (1)..(25): SEQ ID NO: 3484; WAN024GFQ_at; Start 84; Stop 108
cctggtgaaacccatgagatgatgg

SEQ ID NO: 243668 - DNA, 25 bp, Artificial
  probe
  misc_feature (1)..(25): SEQ ID NO: 3484; WAN024GFQ_at; Start 405; Stop 429
agtgttcaaggatgcaaggctgtaa

SEQ ID NO: 243669 - DNA, 25 bp, Artificial
  probe
  misc_feature (1)..(25): SEQ ID NO: 3484; WAN024GFQ_at; Start 188; Stop 212
tcgtatgcaacgagattaccatgag

SEQ ID NO: 243670 - DNA, 25 bp, Artificial
  probe
  misc_feature (1)..(25): SEQ ID NO: 3484; WAN024GFQ_at; Start 75; Stop 99
aatggtttgcctggtgaaacccatg

SEQ ID NO: 243671 - DNA, 25 bp, Artificial
  probe
  misc_feature (1)..(25): SEQ ID NO: 3484; WAN024GFQ_at; Start 220; Stop 244
tacaattgatgagtcaggacgaata

SEQ ID NO: 243672 - DNA, 25 bp, Artificial
  probe
  misc_feature (1)..(25): SEQ ID NO: 3484; WAN024GFQ_at; Start 157; Stop 181
aactgcatttgctccatcttatgac

SEQ ID NO: 243673 - DNA, 25 bp, Artificial
  probe
  misc_feature (1)..(25): SEQ ID NO: 3484; WAN024GFQ_at; Start 80; Stop 104
tttgcctggtgaaacccatgagatg

SEQ ID NO: 243674 - DNA, 25 bp, Artificial
  probe
  misc_feature (1)..(25): SEQ ID NO: 3484; WAN024GFQ_at; Start 216; Stop 240
cgtttacaattgatgagtcaggacg

SEQ ID NO: 243675 - DNA, 25 bp, Artificial
  probe
  misc_feature (1)..(25): SEQ ID NO: 3484; WAN024GFQ_at; Start 190; Stop 214
gtatgcaacgagattaccatgaggg

SEQ ID NO: 243676 - DNA, 25 bp, Artificial
  probe
  misc_feature (1)..(25): SEQ ID NO: 3484; WAN024GFQ_at; Start 410; Stop 434
tcaaggatgcaaggctgtaaaacag

SEQ ID NO: 243677 - DNA, 25 bp, Artificial
  probe
  misc_feature (1)..(25): SEQ ID NO: 3484; WAN024GFQ_at; Start 250; Stop 274
gggtcatctgtgaccaactggaaat

SEQ ID NO: 243678 - DNA, 25 bp, Artificial
  probe
  misc_feature (1)..(25): SEQ ID NO: 3484; WAN024GFQ_at; Start 99; Stop 123
gagatgatggttgaaaatgtccgcc

SEQ ID NO: 243679 - DNA, 25 bp, Artificial
  probe
  misc_feature (1)..(25): SEQ ID NO: 3484; WAN024GFQ_at; Start 417; Stop 441
tgcaaggctgtaaaacaggagtttg

SEQ ID NO: 243680 - DNA, 25 bp, Artificial
  probe
  misc_feature (1)..(25): SEQ ID NO: 3484; WAN024GFQ_at; Start 147; Stop 171
caagggattaaactgcatttgctcc

SEQ ID NO: 243681 - DNA, 25 bp, Artificial
  probe
  misc_feature (1)..(25): SEQ ID NO: 3484; WAN024GFQ_at; Start 151; Stop 175
ggattaaactgcatttgctccatct

SEQ ID NO: 243682 - DNA, 25 bp, Artificial
  probe
  misc_feature (1)..(25): SEQ ID NO: 3484; WAN024GFQ_at; Start 103; Stop 127
tgatggttgaaaatgtccgccgttg

SEQ ID NO: 243683 - DNA, 25 bp, Artificial
  probe
  misc_feature (1)..(25): SEQ ID NO: 3484; WAN024GFQ_at; Start 240; Stop 264
gaatatgtcagggtcatctgtgacc

SEQ ID NO: 243684 - DNA, 25 bp, Artificial
  probe
  misc_feature (1)..(25): SEQ ID NO: 3484; WAN024GFQ_at; Start 341; Stop 365
tatgtggagcctcaataaatgggaa

SEQ ID NO: 243685 - DNA, 25 bp, Artificial
  probe
  misc_feature (1)..(25): SEQ ID NO: 3484; WAN024GFQ_at; Start 12; Stop 36
taggtggaaacggtcaagcgtttga

SEQ ID NO: 243686 - DNA, 25 bp, Artificial
  probe
  misc_feature (1)..(25): SEQ ID NO: 3484; WAN024GFQ_at; Start 233; Stop 257
tcaggacgaatatgtcagggtcatc

SEQ ID NO: 243687 - DNA, 25 bp, Artificial
  probe
  misc_feature (1)..(25): SEQ ID NO: 3484; WAN024GFQ_at; Start 423; Stop 447
gctgtaaaacaggagtttgaaaatg

SEQ ID NO: 243688 - DNA, 25 bp, Artificial
  probe
  misc_feature (1)..(25): SEQ ID NO: 3484; WAN024GFQ_at; Start 2; Stop 26
ttatgaattgtaggtggaaacggtc

SEQ ID NO: 243689 - DNA, 25 bp, Artificial
  probe
  misc_feature (1)..(25): SEQ ID NO: 3484; WAN024GFQ_at; Start 396; Stop 420
cgtcgtggaagtgttcaaggatgca

SEQ ID NO: 243690 - DNA, 25 bp, Artificial
  probe
  misc_feature (1)..(25): SEQ ID NO: 3484; WAN024GFQ_at; Start 138; Stop 162
aacgatattcaagggattaaactgc

SEQ ID NO: 243691 - DNA, 25 bp, Artificial
  probe
  misc_feature (1)..(25): SEQ ID NO: 3484; WAN024GFQ_at; Start 22; Stop 46
cggtcaagcgtttgagaaagtatcc

SEQ ID NO: 243692 - DNA, 25 bp, Artificial
  probe
  misc_feature (1)..(25): SEQ ID NO: 3484; WAN024GFQ_at; Start 243; Stop 267
tatgtcagggtcatctgtgaccaac

SEQ ID NO: 243693 - DNA, 25 bp, Artificial
  probe
  misc_feature (1)..(25): SEQ ID NO: 3484; WAN024GFQ_at; Start 107; Stop 131
ggttgaaaatgtccgccgttgtgtc

SEQ ID NO: 243694 - DNA, 25 bp, Artificial
  probe
  misc_feature (1)..(25): SEQ ID NO: 3484; WAN024GFQ_at; Start 166; Stop 190
tgctccatcttatgacaaatactcg

SEQ ID NO: 243695 - DNA, 25 bp, Artificial
  probe
  misc_feature (1)..(25): SEQ ID NO: 3484; WAN024GFQ_at; Start 176; Stop 200
tatgacaaatactcgtatgcaacga

SEQ ID NO: 243696 - DNA, 25 bp, Artificial
  probe
  misc_feature (1)..(25): SEQ ID NO: 3484; WAN024GFQ_at; Start 229; Stop 253
tgagtcaggacgaatatgtcagggt

SEQ ID NO: 243697 - DNA, 25 bp, Artificial
  probe
  misc_feature (1)..(25): SEQ ID NO: 3484; WAN024GFQ_at; Start 7; Stop 31
aattgtaggtggaaacggtcaagcg

SEQ ID NO: 243698 - DNA, 25 bp, Artificial
  probe
  misc_feature (1)..(25): SEQ ID NO: 6779; WAN024GFR_at; Start 725; Stop 749
tccctttaattagcatggattactt

SEQ ID NO: 243699 - DNA, 25 bp, Artificial
  probe
  misc_feature (1)..(25): SEQ ID NO: 6779; WAN024GFR_at; Start 176; Stop 200
tctttggacctgcaattggtgtgct

SEQ ID NO: 243700 - DNA, 25 bp, Artificial
  probe
  misc_feature (1)..(25): SEQ ID NO: 6779; WAN024GFR_at; Start 628; Stop 652
gaaggaatggctgtactacggcaaa

SEQ ID NO: 243701 - DNA, 25 bp, Artificial
  probe
  misc_feature (1)..(25): SEQ ID NO: 6779; WAN024GFR_at; Start 863; Stop 887
taacggcatccatttttatgatggg

SEQ ID NO: 243702 - DNA, 25 bp, Artificial
  probe
  misc_feature (1)..(25): SEQ ID NO: 6779; WAN024GFR_at; Start 1147; Stop 1171
ggtactttaattatttgcattgcaa

SEQ ID NO: 243703 - DNA, 25 bp, Artificial
  probe
  misc_feature (1)..(25): SEQ ID NO: 6779; WAN024GFR_at; Start 251; Stop 275
tcgcagcagctggttcggtgcttac

SEQ ID NO: 243704 - DNA, 25 bp, Artificial
  probe
  misc_feature (1)..(25): SEQ ID NO: 6779; WAN024GFR_at; Start 583; Stop 607
gatcgcgtgcaaagtttggacccaa

SEQ ID NO: 243705 - DNA, 25 bp, Artificial
  probe
  misc_feature (1)..(25): SEQ ID NO: 6779; WAN024GFR_at; Start 834; Stop 858
tgggaattaccaaaagcgaatctta

SEQ ID NO: 243706 - DNA, 25 bp, Artificial
  probe
  misc_feature (1)..(25): SEQ ID NO: 6779; WAN024GFR_at; Start 1084; Stop 1108
ggattaattctttctgcactctttg

SEQ ID NO: 243707 - DNA, 25 bp, Artificial
  probe
  misc_feature (1)..(25): SEQ ID NO: 6779; WAN024GFR_at; Start 970; Stop 994
gttccgttttacagcggtgtgcaaa

SEQ ID NO: 243708 - DNA, 25 bp, Artificial
  probe
  misc_feature (1)..(25): SEQ ID NO: 6779; WAN024GFR_at; Start 714; Stop 738
taatgcactattccctttaattagc

SEQ ID NO: 243709 - DNA, 25 bp, Artificial
  probe
  misc_feature (1)..(25): SEQ ID NO: 6779; WAN024GFR_at; Start 673; Stop 697
ttactcgttggaacattatatatgt

SEQ ID NO: 243710 - DNA, 25 bp, Artificial
  probe
  misc_feature (1)..(25): SEQ ID NO: 6779; WAN024GFR_at; Start 1158; Stop 1182
tatttgcattgcaatagtttgccca

SEQ ID NO: 243711 - DNA, 25 bp, Artificial
  probe
  misc_feature (1)..(25): SEQ ID NO: 6779; WAN024GFR_at; Start 904; Stop 928
tcaggattacttccccaaagtggat

SEQ ID NO: 243712 - DNA, 25 bp, Artificial
  probe
  misc_feature (1)..(25): SEQ ID NO: 6779; WAN024GFR_at; Start 1172; Stop 1196
tagtttgcccaatgataaatgagat

SEQ ID NO: 243713 - DNA, 25 bp, Artificial
  probe
  misc_feature (1)..(25): SEQ ID NO: 6779; WAN024GFR_at; Start 363; Stop 387
ggctctcaatgcggttacgccactt

SEQ ID NO: 243714 - DNA, 25 bp, Artificial
  probe
  misc_feature (1)..(25): SEQ ID NO: 6779; WAN024GFR_at; Start 596; Stop 620
gtttggacccaaatttcataagaga

SEQ ID NO: 243715 - DNA, 25 bp, Artificial
  probe
  misc_feature (1)..(25): SEQ ID NO: 6779; WAN024GFR_at; Start 563; Stop 587
tacgtattcctaagctgggtgatcg

SEQ ID NO: 243716 - DNA, 25 bp, Artificial
  probe
  misc_feature (1)..(25): SEQ ID NO: 6779; WAN024GFR_at; Start 788; Stop 812
cctttgcatctggaatgttgatagg

SEQ ID NO: 243717 - DNA, 25 bp, Artificial
  probe
  misc_feature (1)..(25): SEQ ID NO: 6779; WAN024GFR_at; Start 570; Stop 594
tcctaagctgggtgatcgcgtgcaa

SEQ ID NO: 243718 - DNA, 25 bp, Artificial
  probe
  misc_feature (1)..(25): SEQ ID NO: 6779; WAN024GFR_at; Start 849; Stop 873
gcgaatcttattaataacggcatcc

SEQ ID NO: 243719 - DNA, 25 bp, Artificial
  probe
  misc_feature (1)..(25): SEQ ID NO: 6779; WAN024GFR_at; Start 964; Stop 988
ctttctgttccgttttacagcggtg

SEQ ID NO: 243720 - DNA, 25 bp, Artificial
  probe
  misc_feature (1)..(25): SEQ ID NO: 6779; WAN024GFR_at; Start 637; Stop 661
gctgtactacggcaaaataaaggat

SEQ ID NO: 243721 - DNA, 25 bp, Artificial
  probe
  misc_feature (1)..(25): SEQ ID NO: 6779; WAN024GFR_at; Start 267; Stop 291
ggtgcttactattgttgcattctat

SEQ ID NO: 243722 - DNA, 25 bp, Artificial
  probe
  misc_feature (1)..(25): SEQ ID NO: 6779; WAN024GFR_at; Start 1098; Stop 1122
tgcactctttgctgatagaatcggt

SEQ ID NO: 243723 - DNA, 25 bp, Artificial
  probe
  misc_feature (1)..(25): SEQ ID NO: 6779; WAN024GFR_at; Start 933; Stop 957
catttttgtagtctgctgtgcaata

SEQ ID NO: 243724 - DNA, 25 bp, Artificial
  probe
  misc_feature (1)..(25): SEQ ID NO: 6779; WAN024GFR_at; Start 742; Stop 766
gattactttaatggaacacctgtgc

SEQ ID NO: 243725 - DNA, 25 bp, Artificial
  probe
  misc_feature (1)..(25): SEQ ID NO: 6779; WAN024GFR_at; Start 886; Stop 910
gggataagcttaaccatttcaggat

SEQ ID NO: 243726 - DNA, 25 bp, Artificial
  probe
  misc_feature (1)..(25): SEQ ID NO: 6779; WAN024GFR_at; Start 662; Stop 686
tatttgctttattactcgttggaac

SEQ ID NO: 243727 - DNA, 25 bp, Artificial
  probe
  misc_feature (1)..(25): SEQ ID NO: 6779; WAN024GFR_at; Start 164; Stop 188
taccctatgcggtctttggacctgc

SEQ ID NO: 243728 - DNA, 25 bp, Artificial
  probe
  misc_feature (1)..(25): SEQ ID NO: 6779; WAN024GFR_at; Start 342; Stop 366
tggaacagcttttcacaccccggct

SEQ ID NO: 243729 - DNA, 25 bp, Artificial
  probe
  misc_feature (1)..(25): SEQ ID NO: 6779; WAN024GFR_at; Start 1049; Stop 1073
taactggaagtatcatgtctcttgc

SEQ ID NO: 243730 - DNA, 25 bp, Artificial
  probe
  misc_feature (1)..(25): SEQ ID NO: 6779; WAN024GFR_at; Start 27; Stop 51
taagttttatacaatatgggcaggg

SEQ ID NO: 243731 - DNA, 25 bp, Artificial
  probe
  misc_feature (1)..(25): SEQ ID NO: 6779; WAN024GFR_at; Start 614; Stop 638
taagagaaatgcaagaaggaatggc

SEQ ID NO: 243732 - DNA, 25 bp, Artificial
  probe
  misc_feature (1)..(25): SEQ ID NO: 2134; WAN024GFS_at; Start 265; Stop 289
gcagtgcttgctattgttgcattct

SEQ ID NO: 243733 - DNA, 25 bp, Artificial
  probe
  misc_feature (1)..(25): SEQ ID NO: 2134; WAN024GFS_at; Start 971; Stop 995
tgccattttatagcggtgtgcaaac

SEQ ID NO: 243734 - DNA, 25 bp, Artificial
  probe
  misc_feature (1)..(25): SEQ ID NO: 2134; WAN024GFS_at; Start 916; Stop 940
cctccaaatggatttgtaatattcg

SEQ ID NO: 243735 - DNA, 25 bp, Artificial
  probe
  misc_feature (1)..(25): SEQ ID NO: 2134; WAN024GFS_at; Start 787; Stop 811
tcctttgcatttgggatgctagcag

SEQ ID NO: 243736 - DNA, 25 bp, Artificial
  probe
  misc_feature (1)..(25): SEQ ID NO: 2134; WAN024GFS_at; Start 251; Stop 275
tcgcagcagctggtgcagtgcttgc

SEQ ID NO: 243737 - DNA, 25 bp, Artificial
  probe
  misc_feature (1)..(25): SEQ ID NO: 2134; WAN024GFS_at; Start 1079; Stop 1103
caattgggttaattctttctggatt

SEQ ID NO: 243738 - DNA, 25 bp, Artificial
  probe
  misc_feature (1)..(25): SEQ ID NO: 2134; WAN024GFS_at; Start 582; Stop 606
taatcaagtgcaaagtttagaacca

SEQ ID NO: 243739 - DNA, 25 bp, Artificial
  probe
  misc_feature (1)..(25): SEQ ID NO: 2134; WAN024GFS_at; Start 667; Stop 691
gccttattactcttaggaacactat

SEQ ID NO: 243740 - DNA, 25 bp, Artificial
  probe
  misc_feature (1)..(25): SEQ ID NO: 2134; WAN024GFS_at; Start 1050; Stop 1074
gatcggaagtatcatgtcacttgct

SEQ ID NO: 243741 - DNA, 25 bp, Artificial
  probe
  misc_feature (1)..(25): SEQ ID NO: 2134; WAN024GFS_at; Start 1175; Stop 1199
tttgccaaatgataactgaggttag

SEQ ID NO: 243742 - DNA, 25 bp, Artificial
  probe
  misc_feature (1)..(25): SEQ ID NO: 2134; WAN024GFS_at; Start 654; Stop 678
caaaggattgtttgccttattactc

SEQ ID NO: 243743 - DNA, 25 bp, Artificial
  probe
  misc_feature (1)..(25): SEQ ID NO: 2134; WAN024GFS_at; Start 726; Stop 750
tcctttaataagcatggaacacttt

SEQ ID NO: 243744 - DNA, 25 bp, Artificial
  probe
  misc_feature (1)..(25): SEQ ID NO: 2134; WAN024GFS_at; Start 1036; Stop 1060
cgtgtattttctttgatcggaagta

SEQ ID NO: 243745 - DNA, 25 bp, Artificial
  probe
  misc_feature (1)..(25): SEQ ID NO: 2134; WAN024GFS_at; Start 837; Stop 861
gggcttcgaaaagcatgtattacta

SEQ ID NO: 243746 - DNA, 25 bp, Artificial
  probe
  misc_feature (1)..(25): SEQ ID NO: 2134; WAN024GFS_at; Start 571; Stop 595
cctaagctgggtaatcaagtgcaaa

SEQ ID NO: 243747 - DNA, 25 bp, Artificial
  probe
  misc_feature (1)..(25): SEQ ID NO: 2134; WAN024GFS_at; Start 174; Stop 198
gattttgggacctgccattggtgtg

SEQ ID NO: 243748 - DNA, 25 bp, Artificial
  probe
  misc_feature (1)..(25): SEQ ID NO: 2134; WAN024GFS_at; Start 794; Stop 818
catttgggatgctagcaggaggctt

SEQ ID NO: 243749 - DNA, 25 bp, Artificial
  probe
  misc_feature (1)..(25): SEQ ID NO: 2134; WAN024GFS_at; Start 962; Stop 986
ggctttcggtgccattttatagcgg

SEQ ID NO: 243750 - DNA, 25 bp, Artificial
  probe
  misc_feature (1)..(25): SEQ ID NO: 2134; WAN024GFS_at; Start 639; Stop 663
ggttctgagacaaaacaaaggattg

SEQ ID NO: 243751 - DNA, 25 bp, Artificial
  probe
  misc_feature (1)..(25): SEQ ID NO: 2134; WAN024GFS_at; Start 563; Stop 587
tacgtatacctaagctgggtaatca

SEQ ID NO: 243752 - DNA, 25 bp, Artificial
  probe
  misc_feature (1)..(25): SEQ ID NO: 2134; WAN024GFS_at; Start 599; Stop 623
tagaaccaaatttcataagggagat

SEQ ID NO: 243753 - DNA, 25 bp, Artificial
  probe
  misc_feature (1)..(25): SEQ ID NO: 2134; WAN024GFS_at; Start 931; Stop 955
gtaatattcgtagtttgctgtgcaa

SEQ ID NO: 243754 - DNA, 25 bp, Artificial
  probe
  misc_feature (1)..(25): SEQ ID NO: 2134; WAN024GFS_at; Start 714; Stop 738
caatgcactatttcctttaataagc

SEQ ID NO: 243755 - DNA, 25 bp, Artificial
  probe
  misc_feature (1)..(25): SEQ ID NO: 2134; WAN024GFS_at; Start 808; Stop 832
gcaggaggcttattattaggaagat

SEQ ID NO: 243756 - DNA, 25 bp, Artificial
  probe
  misc_feature (1)..(25): SEQ ID NO: 2134; WAN024GFS_at; Start 27; Stop 51
aaaattttatgcaatatgggcaggg

SEQ ID NO: 243757 - DNA, 25 bp, Artificial
  probe
  misc_feature (1)..(25): SEQ ID NO: 2134; WAN024GFS_at; Start 357; Stop 381
taccccagcactcaatgcggttaca

SEQ ID NO: 243758 - DNA, 25 bp, Artificial
  probe
  misc_feature (1)..(25): SEQ ID NO: 2134; WAN024GFS_at; Start 741; Stop 765
ggaacactttaatggaacgcctgtg

SEQ ID NO: 243759 - DNA, 25 bp, Artificial
  probe
  misc_feature (1)..(25): SEQ ID NO: 2134; WAN024GFS_at; Start 164; Stop 188
taccctatgcgattttgggacctgc

SEQ ID NO: 243760 - DNA, 25 bp, Artificial
  probe
  misc_feature (1)..(25): SEQ ID NO: 2134; WAN024GFS_at; Start 1162; Stop 1186
ggcattgctatagtttgccaaatga

SEQ ID NO: 243761 - DNA, 25 bp, Artificial
  probe
  misc_feature (1)..(25): SEQ ID NO: 2134; WAN024GFS_at; Start 626; Stop 650
aagaaggagttgtggttctgagaca

SEQ ID NO: 243762 - DNA, 25 bp, Artificial
  probe
  misc_feature (1)..(25): SEQ ID NO: 2134; WAN024GFS_at; Start 342; Stop 366
tggaacagcttttcataccccagca

SEQ ID NO: 243763 - DNA, 25 bp, Artificial
  probe
  misc_feature (1)..(25): SEQ ID NO: 2134; WAN024GFS_at; Start 903; Stop 927
ttcgggaatacttcctccaaatgga

SEQ ID NO: 243764 - DNA, 25 bp, Artificial
  probe
  misc_feature (1)..(25): SEQ ID NO: 2134; WAN024GFS_at; Start 1098; Stop 1122
tggattctttgctgataaaatcggt

SEQ ID NO: 243765 - DNA, 25 bp, Artificial
  probe
  misc_feature (1)..(25): SEQ ID NO: 2134; WAN024GFS_at; Start 612; Stop 636
cataagggagatgaaagaaggagtt

SEQ ID NO: 243766 - DNA, 25 bp, Artificial
  probe
  misc_feature (1)..(25): SEQ ID NO: 5477; WAN024GFT_at; Start 9; Stop 33
tgctcgtgatgttaaaatgaatcta

SEQ ID NO: 243767 - DNA, 25 bp, Artificial
  probe
  misc_feature (1)..(25): SEQ ID NO: 5477; WAN024GFT_at; Start 28; Stop 52
aatctatcaaacagaatgtgtaaaa

SEQ ID NO: 243768 - DNA, 25 bp, Artificial
  probe
  misc_feature (1)..(25): SEQ ID NO: 5477; WAN024GFT_at; Start 34; Stop 58
tcaaacagaatgtgtaaaaaagtaa

SEQ ID NO: 243769 - DNA, 25 bp, Artificial
  probe
  misc_feature (1)..(25): SEQ ID NO: 5477; WAN024GFT_at; Start 24; Stop 48
aatgaatctatcaaacagaatgtgt

SEQ ID NO: 243770 - DNA, 25 bp, Artificial
  probe
  misc_feature (1)..(25): SEQ ID NO: 5477; WAN024GFT_at; Start 11; Stop 35
ctcgtgatgttaaaatgaatctatc

SEQ ID NO: 243771 - DNA, 25 bp, Artificial
  probe
  misc_feature (1)..(25): SEQ ID NO: 5477; WAN024GFT_at; Start 74; Stop 98
ccttgatatacaggggattgattat

SEQ ID NO: 243772 - DNA, 25 bp, Artificial
  probe
  misc_feature (1)..(25): SEQ ID NO: 5477; WAN024GFT_at; Start 64; Stop 88
gtagccaattccttgatatacaggg

SEQ ID NO: 243773 - DNA, 25 bp, Artificial
  probe
  misc_feature (1)..(25): SEQ ID NO: 5477; WAN024GFT_at; Start 7; Stop 31
tatgctcgtgatgttaaaatgaatc

SEQ ID NO: 243774 - DNA, 25 bp, Artificial
  probe
  misc_feature (1)..(25): SEQ ID NO: 5477; WAN024GFT_at; Start 13; Stop 37
cgtgatgttaaaatgaatctatcaa

SEQ ID NO: 243775 - DNA, 25 bp, Artificial
  probe
  misc_feature (1)..(25): SEQ ID NO: 5477; WAN024GFT_at; Start 62; Stop 86
gggtagccaattccttgatatacag

SEQ ID NO: 243776 - DNA, 25 bp, Artificial
  probe
  misc_feature (1)..(25): SEQ ID NO: 5477; WAN024GFT_at; Start 60; Stop 84
aagggtagccaattccttgatatac

SEQ ID NO: 243777 - DNA, 25 bp, Artificial
  probe
  misc_feature (1)..(25): SEQ ID NO: 5477; WAN024GFT_at; Start 58; Stop 82
aaaagggtagccaattccttgatat

SEQ ID NO: 243778 - DNA, 25 bp, Artificial
  probe
  misc_feature (1)..(25): SEQ ID NO: 5477; WAN024GFT_at; Start 15; Stop 39
tgatgttaaaatgaatctatcaaac

SEQ ID NO: 243779 - DNA, 25 bp, Artificial
  probe
  misc_feature (1)..(25): SEQ ID NO: 5477; WAN024GFT_at; Start 26; Stop 50
tgaatctatcaaacagaatgtgtaa

SEQ ID NO: 243780 - DNA, 25 bp, Artificial
  probe
  misc_feature (1)..(25): SEQ ID NO: 5477; WAN024GFT_at; Start 67; Stop 91
gccaattccttgatatacaggggat

SEQ ID NO: 243781 - DNA, 25 bp, Artificial
  probe
  misc_feature (1)..(25): SEQ ID NO: 5477; WAN024GFT_at; Start 6; Stop 30
gtatgctcgtgatgttaaaatgaat

SEQ ID NO: 243782 - DNA, 25 bp, Artificial
  probe
  misc_feature (1)..(25): SEQ ID NO: 5477; WAN024GFT_at; Start 59; Stop 83
aaagggtagccaattccttgatata

SEQ ID NO: 243783 - DNA, 25 bp, Artificial
  probe
  misc_feature (1)..(25): SEQ ID NO: 5477; WAN024GFT_at; Start 32; Stop 56
tatcaaacagaatgtgtaaaaaagt

SEQ ID NO: 243784 - DNA, 25 bp, Artificial
  probe
  misc_feature (1)..(25): SEQ ID NO: 5477; WAN024GFT_at; Start 5; Stop 29
agtatgctcgtgatgttaaaatgaa

SEQ ID NO: 243785 - DNA, 25 bp, Artificial
  probe
  misc_feature (1)..(25): SEQ ID NO: 5477; WAN024GFT_at; Start 12; Stop 36
tcgtgatgttaaaatgaatctatca

SEQ ID NO: 243786 - DNA, 25 bp, Artificial
  probe
  misc_feature (1)..(25): SEQ ID NO: 5477; WAN024GFT_at; Start 18; Stop 42
tgttaaaatgaatctatcaaacaga

SEQ ID NO: 243787 - DNA, 25 bp, Artificial
  probe
  misc_feature (1)..(25): SEQ ID NO: 5477; WAN024GFT_at; Start 78; Stop 102
gatatacaggggattgattatcctt

SEQ ID NO: 243788 - DNA, 25 bp, Artificial
  probe
  misc_feature (1)..(25): SEQ ID NO: 5477; WAN024GFT_at; Start 2; Stop 26
tggagtatgctcgtgatgttaaaat

SEQ ID NO: 243789 - DNA, 25 bp, Artificial
  probe
  misc_feature (1)..(25): SEQ ID NO: 5477; WAN024GFT_at; Start 63; Stop 87
ggtagccaattccttgatatacagg

SEQ ID NO: 243790 - DNA, 25 bp, Artificial
  probe
  misc_feature (1)..(25): SEQ ID NO: 5477; WAN024GFT_at; Start 4; Stop 28
gagtatgctcgtgatgttaaaatga

SEQ ID NO: 243791 - DNA, 25 bp, Artificial
  probe
  misc_feature (1)..(25): SEQ ID NO: 5477; WAN024GFT_at; Start 10; Stop 34
gctcgtgatgttaaaatgaatctat

SEQ ID NO: 243792 - DNA, 25 bp, Artificial
  probe
  misc_feature (1)..(25): SEQ ID NO: 5477; WAN024GFT_at; Start 21; Stop 45
taaaatgaatctatcaaacagaatg

SEQ ID NO: 243793 - DNA, 25 bp, Artificial
  probe
  misc_feature (1)..(25): SEQ ID NO: 5477; WAN024GFT_at; Start 25; Stop 49
atgaatctatcaaacagaatgtgta

SEQ ID NO: 243794 - DNA, 25 bp, Artificial
  probe
  misc_feature (1)..(25): SEQ ID NO: 5477; WAN024GFT_at; Start 27; Stop 51
gaatctatcaaacagaatgtgtaaa

SEQ ID NO: 243795 - DNA, 25 bp, Artificial
  probe
  misc_feature (1)..(25): SEQ ID NO: 5477; WAN024GFT_at; Start 23; Stop 47
aaatgaatctatcaaacagaatgtg

SEQ ID NO: 243796 - DNA, 25 bp, Artificial
  probe
  misc_feature (1)..(25): SEQ ID NO: 5477; WAN024GFT_at; Start 3; Stop 27
ggagtatgctcgtgatgttaaaatg

SEQ ID NO: 243797 - DNA, 25 bp, Artificial
  probe
  misc_feature (1)..(25): SEQ ID NO: 5477; WAN024GFT_at; Start 30; Stop 54
tctatcaaacagaatgtgtaaaaaa

SEQ ID NO: 243798 - DNA, 25 bp, Artificial
  probe
  misc_feature (1)..(25): SEQ ID NO: 5477; WAN024GFT_at; Start 19; Stop 43
gttaaaatgaatctatcaaacagaa

SEQ ID NO: 243799 - DNA, 25 bp, Artificial
  probe
  misc_feature (1)..(25): SEQ ID NO: 5477; WAN024GFT_at; Start 61; Stop 85
agggtagccaattccttgatataca

SEQ ID NO: 243800 - DNA, 25 bp, Artificial
  probe
  misc_feature (1)..(25): SEQ ID NO: 5269; WAN024GFU_at; Start 193; Stop 217
ttcgattggtccttcaagagtagag

SEQ ID NO: 243801 - DNA, 25 bp, Artificial
  probe
  misc_feature (1)..(25): SEQ ID NO: 5269; WAN024GFU_at; Start 126; Stop 150
ctactgcaccaaggattgctttgat

SEQ ID NO: 243802 - DNA, 25 bp, Artificial
  probe
  misc_feature (1)..(25): SEQ ID NO: 5269; WAN024GFU_at; Start 134; Stop 158
ccaaggattgctttgatatcaccag

SEQ ID NO: 243803 - DNA, 25 bp, Artificial
  probe
  misc_feature (1)..(25): SEQ ID NO: 5269; WAN024GFU_at; Start 222; Stop 246
taatcaattgagtttggctcacacc

SEQ ID NO: 243804 - DNA, 25 bp, Artificial
  probe
  misc_feature (1)..(25): SEQ ID NO: 5269; WAN024GFU_at; Start 88; Stop 112
gtaccaagcaaagataccgatatag

SEQ ID NO: 243805 - DNA, 25 bp, Artificial
  probe
  misc_feature (1)..(25): SEQ ID NO: 5269; WAN024GFU_at; Start 50; Stop 74
gctgcgtactcttcgttacgtttga

SEQ ID NO: 243806 - DNA, 25 bp, Artificial
  probe
  misc_feature (1)..(25): SEQ ID NO: 5269; WAN024GFU_at; Start 20; Stop 44
tattttataggagcgcattattttg

SEQ ID NO: 243807 - DNA, 25 bp, Artificial
  probe
  misc_feature (1)..(25): SEQ ID NO: 5269; WAN024GFU_at; Start 262; Stop 286
tacacctttagcaagttctgttgca

SEQ ID NO: 243808 - DNA, 25 bp, Artificial
  probe
  misc_feature (1)..(25): SEQ ID NO: 5269; WAN024GFU_at; Start 283; Stop 307
tgcaaatggtgcaataagtgtacct

SEQ ID NO: 243809 - DNA, 25 bp, Artificial
  probe
  misc_feature (1)..(25): SEQ ID NO: 5269; WAN024GFU_at; Start 270; Stop 294
tagcaagttctgttgcaaatggtgc

SEQ ID NO: 243810 - DNA, 25 bp, Artificial
  probe
  misc_feature (1)..(25): SEQ ID NO: 5269; WAN024GFU_at; Start 248; Stop 272
tctgggaaggcacctacacctttag

SEQ ID NO: 243811 - DNA, 25 bp, Artificial
  probe
  misc_feature (1)..(25): SEQ ID NO: 5269; WAN024GFU_at; Start 165; Stop 189
tgttaccaattgtccaaccaagaag

SEQ ID NO: 243812 - DNA, 25 bp, Artificial
  probe
  misc_feature (1)..(25): SEQ ID NO: 5269; WAN024GFU_at; Start 155; Stop 179
ccagttgtagtgttaccaattgtcc

SEQ ID NO: 243813 - DNA, 25 bp, Artificial
  probe
  misc_feature (1)..(25): SEQ ID NO: 5269; WAN024GFU_at; Start 285; Stop 309
caaatggtgcaataagtgtacctga

SEQ ID NO: 243814 - DNA, 25 bp, Artificial
  probe
  misc_feature (1)..(25): SEQ ID NO: 5269; WAN024GFU_at; Start 100; Stop 124
gataccgatatagaatacaaggaag

SEQ ID NO: 243815 - DNA, 25 bp, Artificial
  probe
  misc_feature (1)..(25): SEQ ID NO: 5269; WAN024GFU_at; Start 34; Stop 58
gcattattttgcttttgctgcgtac

SEQ ID NO: 243816 - DNA, 25 bp, Artificial
  probe
  misc_feature (1)..(25): SEQ ID NO: 5269; WAN024GFU_at; Start 215; Stop 239
gagtgagtaatcaattgagtttggc

SEQ ID NO: 243817 - DNA, 25 bp, Artificial
  probe
  misc_feature (1)..(25): SEQ ID NO: 5269; WAN024GFU_at; Start 231; Stop 255
gagtttggctcacaccttctgggaa

SEQ ID NO: 243818 - DNA, 25 bp, Artificial
  probe
  misc_feature (1)..(25): SEQ ID NO: 5269; WAN024GFU_at; Start 188; Stop 212
agtttttcgattggtccttcaagag

SEQ ID NO: 243819 - DNA, 25 bp, Artificial
  probe
  misc_feature (1)..(25): SEQ ID NO: 5269; WAN024GFU_at; Start 257; Stop 281
gcacctacacctttagcaagttctg

SEQ ID NO: 243820 - DNA, 25 bp, Artificial
  probe
  misc_feature (1)..(25): SEQ ID NO: 5269; WAN024GFU_at; Start 238; Stop 262
gctcacaccttctgggaaggcacct

SEQ ID NO: 243821 - DNA, 25 bp, Artificial
  probe
  misc_feature (1)..(25): SEQ ID NO: 5269; WAN024GFU_at; Start 43; Stop 67
tgcttttgctgcgtactcttcgtta

SEQ ID NO: 243822 - DNA, 25 bp, Artificial
  probe
  misc_feature (1)..(25): SEQ ID NO: 5269; WAN024GFU_at; Start 73; Stop 97
gatcatttgttttctgtaccaagca

SEQ ID NO: 243823 - DNA, 25 bp, Artificial
  probe
  misc_feature (1)..(25): SEQ ID NO: 5269; WAN024GFU_at; Start 148; Stop 172
gatatcaccagttgtagtgttacca

SEQ ID NO: 243824 - DNA, 25 bp, Artificial
  probe
  misc_feature (1)..(25): SEQ ID NO: 5269; WAN024GFU_at; Start 82; Stop 106
ttttctgtaccaagcaaagataccg

SEQ ID NO: 243825 - DNA, 25 bp, Artificial
  probe
  misc_feature (1)..(25): SEQ ID NO: 5269; WAN024GFU_at; Start 12; Stop 36
tgagtttatattttataggagcgca

SEQ ID NO: 243826 - DNA, 25 bp, Artificial
  probe
  misc_feature (1)..(25): SEQ ID NO: 5269; WAN024GFU_at; Start 203; Stop 227
ccttcaagagtagagtgagtaatca

SEQ ID NO: 243827 - DNA, 25 bp, Artificial
  probe
  misc_feature (1)..(25): SEQ ID NO: 5269; WAN024GFU_at; Start 139; Stop 163
gattgctttgatatcaccagttgta

SEQ ID NO: 243828 - DNA, 25 bp, Artificial
  probe
  misc_feature (1)..(25): SEQ ID NO: 5269; WAN024GFU_at; Start 58; Stop 82
ctcttcgttacgtttgatcatttgt

SEQ ID NO: 243829 - DNA, 25 bp, Artificial
  probe
  misc_feature (1)..(25): SEQ ID NO: 5269; WAN024GFU_at; Start 252; Stop 276
ggaaggcacctacacctttagcaag

SEQ ID NO: 243830 - DNA, 25 bp, Artificial
  probe
  misc_feature (1)..(25): SEQ ID NO: 5269; WAN024GFU_at; Start 196; Stop 220
gattggtccttcaagagtagagtga

SEQ ID NO: 243831 - DNA, 25 bp, Artificial
  probe
  misc_feature (1)..(25): SEQ ID NO: 5269; WAN024GFU_at; Start 234; Stop 258
tttggctcacaccttctgggaaggc

SEQ ID NO: 243832 - DNA, 25 bp, Artificial
  probe
  misc_feature (1)..(25): SEQ ID NO: 5269; WAN024GFU_at; Start 273; Stop 297
caagttctgttgcaaatggtgcaat

SEQ ID NO: 243833 - DNA, 25 bp, Artificial
  probe
  misc_feature (1)..(25): SEQ ID NO: 5269; WAN024GFU_at; Start 160; Stop 184
tgtagtgttaccaattgtccaacca

SEQ ID NO: 243834 - DNA, 25 bp, Artificial
  probe
  misc_feature (1)..(25): SEQ ID NO: 1029; WAN024GFV_at; Start 96; Stop 120
tgcatctgcaacacctgcaattgga

SEQ ID NO: 243835 - DNA, 25 bp, Artificial
  probe
  misc_feature (1)..(25): SEQ ID NO: 1029; WAN024GFV_at; Start 59; Stop 83
gagacaaccatcctttgataacaag

SEQ ID NO: 243836 - DNA, 25 bp, Artificial
  probe
  misc_feature (1)..(25): SEQ ID NO: 1029; WAN024GFV_at; Start 41; Stop 65
caccggcagtcaaaccaagagacaa

SEQ ID NO: 243837 - DNA, 25 bp, Artificial
  probe
  misc_feature (1)..(25): SEQ ID NO: 1029; WAN024GFV_at; Start 218; Stop 242
caaagtcatatttatcaaggcctgg

SEQ ID NO: 243838 - DNA, 25 bp, Artificial
  probe
  misc_feature (1)..(25): SEQ ID NO: 1029; WAN024GFV_at; Start 159; Stop 183
gaaaccgatgaagaatttagatccc

SEQ ID NO: 243839 - DNA, 25 bp, Artificial
  probe
  misc_feature (1)..(25): SEQ ID NO: 1029; WAN024GFV_at; Start 137; Stop 161
taccgataacgataccaaggatgaa

SEQ ID NO: 243840 - DNA, 25 bp, Artificial
  probe
  misc_feature (1)..(25): SEQ ID NO: 1029; WAN024GFV_at; Start 224; Stop 248
catatttatcaaggcctgggaagaa

SEQ ID NO: 243841 - DNA, 25 bp, Artificial
  probe
  misc_feature (1)..(25): SEQ ID NO: 1029; WAN024GFV_at; Start 28; Stop 52
agttccaaagatacaccggcagtca

SEQ ID NO: 243842 - DNA, 25 bp, Artificial
  probe
  misc_feature (1)..(25): SEQ ID NO: 1029; WAN024GFV_at; Start 11; Stop 35
aaccgataagtgagaagagttccaa

SEQ ID NO: 243843 - DNA, 25 bp, Artificial
  probe
  misc_feature (1)..(25): SEQ ID NO: 1029; WAN024GFV_at; Start 204; Stop 228
caatttagcagcatcaaagtcatat

SEQ ID NO: 243844 - DNA, 25 bp, Artificial
  probe
  misc_feature (1)..(25): SEQ ID NO: 1029; WAN024GFV_at; Start 143; Stop 167
taacgataccaaggatgaaaccgat

SEQ ID NO: 243845 - DNA, 25 bp, Artificial
  probe
  misc_feature (1)..(25): SEQ ID NO: 1029; WAN024GFV_at; Start 118; Stop 142
ggatgtggagttcccataataccga

SEQ ID NO: 243846 - DNA, 25 bp, Artificial
  probe
  misc_feature (1)..(25): SEQ ID NO: 1029; WAN024GFV_at; Start 232; Stop 256
tcaaggcctgggaagaatttttcaa

SEQ ID NO: 243847 - DNA, 25 bp, Artificial
  probe
  misc_feature (1)..(25): SEQ ID NO: 1029; WAN024GFV_at; Start 273; Stop 297
catgataactgggttcatcatgtag

SEQ ID NO: 243848 - DNA, 25 bp, Artificial
  probe
  misc_feature (1)..(25): SEQ ID NO: 1029; WAN024GFV_at; Start 83; Stop 107
gacgccatttatctgcatctgcaac

SEQ ID NO: 243849 - DNA, 25 bp, Artificial
  probe
  misc_feature (1)..(25): SEQ ID NO: 1029; WAN024GFV_at; Start 147; Stop 171
gataccaaggatgaaaccgatgaag

SEQ ID NO: 243850 - DNA, 25 bp, Artificial
  probe
  misc_feature (1)..(25): SEQ ID NO: 1029; WAN024GFV_at; Start 24; Stop 48
gaagagttccaaagatacaccggca

SEQ ID NO: 243851 - DNA, 25 bp, Artificial
  probe
  misc_feature (1)..(25): SEQ ID NO: 1029; WAN024GFV_at; Start 191; Stop 215
cgattttcttgttcaatttagcagc

SEQ ID NO: 243852 - DNA, 25 bp, Artificial
  probe
  misc_feature (1)..(25): SEQ ID NO: 1029; WAN024GFV_at; Start 177; Stop 201
agatccccagaaaccgattttcttg

SEQ ID NO: 243853 - DNA, 25 bp, Artificial
  probe
  misc_feature (1)..(25): SEQ ID NO: 1029; WAN024GFV_at; Start 132; Stop 156
cataataccgataacgataccaagg

SEQ ID NO: 243854 - DNA, 25 bp, Artificial
  probe
  misc_feature (1)..(25): SEQ ID NO: 1029; WAN024GFV_at; Start 263; Stop 287
tatccaaaaccatgataactgggtt

SEQ ID NO: 243855 - DNA, 25 bp, Artificial
  probe
  misc_feature (1)..(25): SEQ ID NO: 1029; WAN024GFV_at; Start 252; Stop 276
ttcaaaaatcttatccaaaaccatg

SEQ ID NO: 243856 - DNA, 25 bp, Artificial
  probe
  misc_feature (1)..(25): SEQ ID NO: 1029; WAN024GFV_at; Start 103; Stop 127
gcaacacctgcaattggatgtggag

SEQ ID NO: 243857 - DNA, 25 bp, Artificial
  probe
  misc_feature (1)..(25): SEQ ID NO: 1029; WAN024GFV_at; Start 67; Stop 91
catcctttgataacaagacgccatt

SEQ ID NO: 243858 - DNA, 25 bp, Artificial
  probe
  misc_feature (1)..(25): SEQ ID NO: 1029; WAN024GFV_at; Start 21; Stop 45
tgagaagagttccaaagatacaccg

SEQ ID NO: 243859 - DNA, 25 bp, Artificial
  probe
  misc_feature (1)..(25): SEQ ID NO: 1029; WAN024GFV_at; Start 77; Stop 101
taacaagacgccatttatctgcatc

SEQ ID NO: 243860 - DNA, 25 bp, Artificial
  probe
  misc_feature (1)..(25): SEQ ID NO: 1029; WAN024GFV_at; Start 49; Stop 73
gtcaaaccaagagacaaccatcctt

SEQ ID NO: 243861 - DNA, 25 bp, Artificial
  probe
  misc_feature (1)..(25): SEQ ID NO: 1029; WAN024GFV_at; Start 37; Stop 61
gatacaccggcagtcaaaccaagag

SEQ ID NO: 243862 - DNA, 25 bp, Artificial
  probe
  misc_feature (1)..(25): SEQ ID NO: 1029; WAN024GFV_at; Start 124; Stop 148
ggagttcccataataccgataacga

SEQ ID NO: 243863 - DNA, 25 bp, Artificial
  probe
  misc_feature (1)..(25): SEQ ID NO: 1029; WAN024GFV_at; Start 167; Stop 191
tgaagaatttagatccccagaaacc

SEQ ID NO: 243864 - DNA, 25 bp, Artificial
  probe
  misc_feature (1)..(25): SEQ ID NO: 1029; WAN024GFV_at; Start 200; Stop 224
tgttcaatttagcagcatcaaagtc

SEQ ID NO: 243865 - DNA, 25 bp, Artificial
  probe
  misc_feature (1)..(25): SEQ ID NO: 1029; WAN024GFV_at; Start 151; Stop 175
ccaaggatgaaaccgatgaagaatt

SEQ ID NO: 243866 - DNA, 25 bp, Artificial
  probe
  misc_feature (1)..(25): SEQ ID NO: 1029; WAN024GFV_at; Start 109; Stop 133
cctgcaattggatgtggagttccca

SEQ ID NO: 243867 - DNA, 25 bp, Artificial
  probe
  misc_feature (1)..(25): SEQ ID NO: 1029; WAN024GFV_at; Start 3; Stop 27
gaaccatgaaccgataagtgagaag

SEQ ID NO: 243868 - DNA, 25 bp, Artificial
  probe
  misc_feature (1)..(25): SEQ ID NO: 5062; WAN024GFW_at; Start 394; Stop 418
gacaggtccacccatttctaagatg

SEQ ID NO: 243869 - DNA, 25 bp, Artificial
  probe
  misc_feature (1)..(25): SEQ ID NO: 5062; WAN024GFW_at; Start 414; Stop 438
agatgggattgaaaacctttccgat

SEQ ID NO: 243870 - DNA, 25 bp, Artificial
  probe
  misc_feature (1)..(25): SEQ ID NO: 5062; WAN024GFW_at; Start 329; Stop 353
tcaagcgctttggagaatttcactc

SEQ ID NO: 243871 - DNA, 25 bp, Artificial
  probe
  misc_feature (1)..(25): SEQ ID NO: 5062; WAN024GFW_at; Start 44; Stop 68
cctgtgatagacaagtgccagatat

SEQ ID NO: 243872 - DNA, 25 bp, Artificial
  probe
  misc_feature (1)..(25): SEQ ID NO: 5062; WAN024GFW_at; Start 311; Stop 335
gcaagtttgataccaccttcaagcg

SEQ ID NO: 243873 - DNA, 25 bp, Artificial
  probe
  misc_feature (1)..(25): SEQ ID NO: 5062; WAN024GFW_at; Start 296; Stop 320
cctgtaagagcgatggcaagtttga

SEQ ID NO: 243874 - DNA, 25 bp, Artificial
  probe
  misc_feature (1)..(25): SEQ ID NO: 5062; WAN024GFW_at; Start 126; Stop 150
caatcaacatgatgagcaagaagta

SEQ ID NO: 243875 - DNA, 25 bp, Artificial
  probe
  misc_feature (1)..(25): SEQ ID NO: 5062; WAN024GFW_at; Start 434; Stop 458
ccgattaggtcaaagattgcatcca

SEQ ID NO: 243876 - DNA, 25 bp, Artificial
  probe
  misc_feature (1)..(25): SEQ ID NO: 5062; WAN024GFW_at; Start 319; Stop 343
gataccaccttcaagcgctttggag

SEQ ID NO: 243877 - DNA, 25 bp, Artificial
  probe
  misc_feature (1)..(25): SEQ ID NO: 5062; WAN024GFW_at; Start 276; Stop 300
taccgatgatagcaccgatacctgt

SEQ ID NO: 243878 - DNA, 25 bp, Artificial
  probe
  misc_feature (1)..(25): SEQ ID NO: 5062; WAN024GFW_at; Start 18; Stop 42
tatcagcataccatttaatcaagag

SEQ ID NO: 243879 - DNA, 25 bp, Artificial
  probe
  misc_feature (1)..(25): SEQ ID NO: 5062; WAN024GFW_at; Start 290; Stop 314
ccgatacctgtaagagcgatggcaa

SEQ ID NO: 243880 - DNA, 25 bp, Artificial
  probe
  misc_feature (1)..(25): SEQ ID NO: 5062; WAN024GFW_at; Start 352; Stop 376
tccaaaaagtaaagccaatactgtc

SEQ ID NO: 243881 - DNA, 25 bp, Artificial
  probe
  misc_feature (1)..(25): SEQ ID NO: 5062; WAN024GFW_at; Start 68; Stop 92
tcaaagatatcgacatcaagtgtat

SEQ ID NO: 243882 - DNA, 25 bp, Artificial
  probe
  misc_feature (1)..(25): SEQ ID NO: 5062; WAN024GFW_at; Start 155; Stop 179
gtccaagcagaaccccaagtgattg

SEQ ID NO: 243883 - DNA, 25 bp, Artificial
  probe
  misc_feature (1)..(25): SEQ ID NO: 5062; WAN024GFW_at; Start 269; Stop 293
tttagcataccgatgatagcaccga

SEQ ID NO: 243884 - DNA, 25 bp, Artificial
  probe
  misc_feature (1)..(25): SEQ ID NO: 5062; WAN024GFW_at; Start 153; Stop 177
gtgtccaagcagaaccccaagtgat

SEQ ID NO: 243885 - DNA, 25 bp, Artificial
  probe
  misc_feature (1)..(25): SEQ ID NO: 5062; WAN024GFW_at; Start 3; Stop 27
gactcacaccattgttatcagcata

SEQ ID NO: 243886 - DNA, 25 bp, Artificial
  probe
  misc_feature (1)..(25): SEQ ID NO: 5062; WAN024GFW_at; Start 36; Stop 60
tcaagagacctgtgatagacaagtg

SEQ ID NO: 243887 - DNA, 25 bp, Artificial
  probe
  misc_feature (1)..(25): SEQ ID NO: 5062; WAN024GFW_at; Start 339; Stop 363
tggagaatttcactccaaaaagtaa

SEQ ID NO: 243888 - DNA, 25 bp, Artificial
  probe
  misc_feature (1)..(25): SEQ ID NO: 5062; WAN024GFW_at; Start 406; Stop 430
catttctaagatgggattgaaaacc

SEQ ID NO: 243889 - DNA, 25 bp, Artificial
  probe
  misc_feature (1)..(25): SEQ ID NO: 5062; WAN024GFW_at; Start 214; Stop 238
caattggataccagtgttttcaacg

SEQ ID NO: 243890 - DNA, 25 bp, Artificial
  probe
  misc_feature (1)..(25): SEQ ID NO: 5062; WAN024GFW_at; Start 121; Stop 145
gttgacaatcaacatgatgagcaag

SEQ ID NO: 243891 - DNA, 25 bp, Artificial
  probe
  misc_feature (1)..(25): SEQ ID NO: 5062; WAN024GFW_at; Start 53; Stop 77
gacaagtgccagatatcaaagatat

SEQ ID NO: 243892 - DNA, 25 bp, Artificial
  probe
  misc_feature (1)..(25): SEQ ID NO: 5062; WAN024GFW_at; Start 441; Stop 465
ggtcaaagattgcatccataacagt

SEQ ID NO: 243893 - DNA, 25 bp, Artificial
  probe
  misc_feature (1)..(25): SEQ ID NO: 5062; WAN024GFW_at; Start 283; Stop 307
gatagcaccgatacctgtaagagcg

SEQ ID NO: 243894 - DNA, 25 bp, Artificial
  probe
  misc_feature (1)..(25): SEQ ID NO: 5062; WAN024GFW_at; Start 429; Stop 453
cctttccgattaggtcaaagattgc

SEQ ID NO: 243895 - DNA, 25 bp, Artificial
  probe
  misc_feature (1)..(25): SEQ ID NO: 5062; WAN024GFW_at; Start 206; Stop 230
gtaatactcaattggataccagtgt

SEQ ID NO: 243896 - DNA, 25 bp, Artificial
  probe
  misc_feature (1)..(25): SEQ ID NO: 5062; WAN024GFW_at; Start 360; Stop 384
gtaaagccaatactgtcaaaatgat

SEQ ID NO: 243897 - DNA, 25 bp, Artificial
  probe
  misc_feature (1)..(25): SEQ ID NO: 5062; WAN024GFW_at; Start 386; Stop 410
aacatgatgacaggtccacccattt

SEQ ID NO: 243898 - DNA, 25 bp, Artificial
  probe
  misc_feature (1)..(25): SEQ ID NO: 5062; WAN024GFW_at; Start 303; Stop 327
gagcgatggcaagtttgataccacc

SEQ ID NO: 243899 - DNA, 25 bp, Artificial
  probe
  misc_feature (1)..(25): SEQ ID NO: 5062; WAN024GFW_at; Start 26; Stop 50
taccatttaatcaagagacctgtga

SEQ ID NO: 243900 - DNA, 25 bp, Artificial
  probe
  misc_feature (1)..(25): SEQ ID NO: 5062; WAN024GFW_at; Start 448; Stop 472
gattgcatccataacagttcctccc

SEQ ID NO: 243901 - DNA, 25 bp, Artificial
  probe
  misc_feature (1)..(25): SEQ ID NO: 5062; WAN024GFW_at; Start 222; Stop 246
taccagtgttttcaacgaattttgc

SEQ ID NO: 243902 - DNA, 25 bp, Artificial
  probe
  misc_feature (1)..(25): SEQ ID NO: 2356; WAN024GFX_at; Start 1360; Stop 1384
gatatcaaagcaatccttggtgcag

SEQ ID NO: 243903 - DNA, 25 bp, Artificial
  probe
  misc_feature (1)..(25): SEQ ID NO: 2356; WAN024GFX_at; Start 1076; Stop 1100
gaaatggtatcttgccacttgcagg

SEQ ID NO: 243904 - DNA, 25 bp, Artificial
  probe
  misc_feature (1)..(25): SEQ ID NO: 2356; WAN024GFX_at; Start 126; Stop 150
gcttgaaggtggtatcaaacttgcc

SEQ ID NO: 243905 - DNA, 25 bp, Artificial
  probe
  misc_feature (1)..(25): SEQ ID NO: 2356; WAN024GFX_at; Start 1091; Stop 1115
cacttgcaggtatcatcgctatggg

SEQ ID NO: 243906 - DNA, 25 bp, Artificial
  probe
  misc_feature (1)..(25): SEQ ID NO: 2356; WAN024GFX_at; Start 898; Stop 922
gcagccgtagaaccactatcacaag

SEQ ID NO: 243907 - DNA, 25 bp, Artificial
  probe
  misc_feature (1)..(25): SEQ ID NO: 2356; WAN024GFX_at; Start 1242; Stop 1266
taaaggtgtaggtgccttcccagaa

SEQ ID NO: 243908 - DNA, 25 bp, Artificial
  probe
  misc_feature (1)..(25): SEQ ID NO: 2356; WAN024GFX_at; Start 990; Stop 1014
catcgctggtcgtgctgaaatctgg

SEQ ID NO: 243909 - DNA, 25 bp, Artificial
  probe
  misc_feature (1)..(25): SEQ ID NO: 2356; WAN024GFX_at; Start 1258; Stop 1282
ttcccagaaggtgtgagccaaactc

SEQ ID NO: 243910 - DNA, 25 bp, Artificial
  probe
  misc_feature (1)..(25): SEQ ID NO: 2356; WAN024GFX_at; Start 846; Stop 870
gactgccggtgtatctttggaactc

SEQ ID NO: 243911 - DNA, 25 bp, Artificial
  probe
  misc_feature (1)..(25): SEQ ID NO: 2356; WAN024GFX_at; Start 975; Stop 999
tcttgactggccattcatcgctggt

SEQ ID NO: 243912 - DNA, 25 bp, Artificial
  probe
  misc_feature (1)..(25): SEQ ID NO: 2356; WAN024GFX_at; Start 4; Stop 28
gatgcaatctttgacctaatcggaa

SEQ ID NO: 243913 - DNA, 25 bp, Artificial
  probe
  misc_feature (1)..(25): SEQ ID NO: 2356; WAN024GFX_at; Start 1136; Stop 1160
ttgtaactcgtggtaaattgctccg

SEQ ID NO: 243914 - DNA, 25 bp, Artificial
  probe
  misc_feature (1)..(25): SEQ ID NO: 2356; WAN024GFX_at; Start 42; Stop 66
catcttagaaatgggtggacctgtc

SEQ ID NO: 243915 - DNA, 25 bp, Artificial
  probe
  misc_feature (1)..(25): SEQ ID NO: 2356; WAN024GFX_at; Start 1164; Stop 1188
gattatcttcggaacactcttgttg

SEQ ID NO: 243916 - DNA, 25 bp, Artificial
  probe
  misc_feature (1)..(25): SEQ ID NO: 2356; WAN024GFX_at; Start 110; Stop 134
tgaaattctccaaagcgcttgaagg

SEQ ID NO: 243917 - DNA, 25 bp, Artificial
  probe
  misc_feature (1)..(25): SEQ ID NO: 2356; WAN024GFX_at; Start 914; Stop 938
tatcacaaggtattacaaacgttgc

SEQ ID NO: 243918 - DNA, 25 bp, Artificial
  probe
  misc_feature (1)..(25): SEQ ID NO: 2356; WAN024GFX_at; Start 764; Stop 788
tgggaactccacatccaattgcagg

SEQ ID NO: 243919 - DNA, 25 bp, Artificial
  probe
  misc_feature (1)..(25): SEQ ID NO: 2356; WAN024GFX_at; Start 1446; Stop 1470
taacgaagagtacgcagcaaaagca

SEQ ID NO: 243920 - DNA, 25 bp, Artificial
  probe
  misc_feature (1)..(25): SEQ ID NO: 2356; WAN024GFX_at; Start 879; Stop 903
tatcggttcatggttcatcgcagcc

SEQ ID NO: 243921 - DNA, 25 bp, Artificial
  probe
  misc_feature (1)..(25): SEQ ID NO: 2356; WAN024GFX_at; Start 1334; Stop 1358
ggacaattggtaacactacaactgg

SEQ ID NO: 243922 - DNA, 25 bp, Artificial
  probe
  misc_feature (1)..(25): SEQ ID NO: 2356; WAN024GFX_at; Start 779; Stop 803
caattgcaggtgttgcagatgcaga

SEQ ID NO: 243923 - DNA, 25 bp, Artificial
  probe
  misc_feature (1)..(25): SEQ ID NO: 2356; WAN024GFX_at; Start 519; Stop 543
caactctgacttgatgaaacctaca

SEQ ID NO: 243924 - DNA, 25 bp, Artificial
  probe
  misc_feature (1)..(25): SEQ ID NO: 2356; WAN024GFX_at; Start 1051; Stop 1075
gaagcagtgcttctttcaaaagttg

SEQ ID NO: 243925 - DNA, 25 bp, Artificial
  probe
  misc_feature (1)..(25): SEQ ID NO: 2356; WAN024GFX_at; Start 1108; Stop 1132
gctatgggtgttactccagctctct

SEQ ID NO: 243926 - DNA, 25 bp, Artificial
  probe
  misc_feature (1)..(25): SEQ ID NO: 2356; WAN024GFX_at; Start 159; Stop 183
tacaggtatcggtgctatcatcggt

SEQ ID NO: 243927 - DNA, 25 bp, Artificial
  probe
  misc_feature (1)..(25): SEQ ID NO: 2356; WAN024GFX_at; Start 214; Stop 238
gcaaaattcgttgaaaacactggta

SEQ ID NO: 243928 - DNA, 25 bp, Artificial
  probe
  misc_feature (1)..(25): SEQ ID NO: 2356; WAN024GFX_at; Start 141; Stop 165
caaacttgccatcgctcttacaggt

SEQ ID NO: 243929 - DNA, 25 bp, Artificial
  probe
  misc_feature (1)..(25): SEQ ID NO: 2356; WAN024GFX_at; Start 546; Stop 570
tgatgaccttcttaacgccccaagt

SEQ ID NO: 243930 - DNA, 25 bp, Artificial
  probe
  misc_feature (1)..(25): SEQ ID NO: 2356; WAN024GFX_at; Start 1287; Stop 1311
gattactcactctactcttgaagga

SEQ ID NO: 243931 - DNA, 25 bp, Artificial
  probe
  misc_feature (1)..(25): SEQ ID NO: 2356; WAN024GFX_at; Start 391; Stop 415
gatatctggcacttgtctatcacag

SEQ ID NO: 243932 - DNA, 25 bp, Artificial
  probe
  misc_feature (1)..(25): SEQ ID NO: 2356; WAN024GFX_at; Start 1021; Stop 1045
gccaacgtacttgcaccaatcatgt

SEQ ID NO: 243933 - DNA, 25 bp, Artificial
  probe
  misc_feature (1)..(25): SEQ ID NO: 2356; WAN024GFX_at; Start 1006; Stop 1030
gaaatctgggcttgtgccaacgtac

SEQ ID NO: 243934 - DNA, 25 bp, Artificial
  probe
  misc_feature (1)..(25): SEQ ID NO: 2356; WAN024GFX_at; Start 642; Stop 666
tgaaaaattcttcccaggccttgat

SEQ ID NO: 243935 - DNA, 25 bp, Artificial
  probe
  misc_feature (1)..(25): SEQ ID NO: 2356; WAN024GFX_at; Start 792; Stop 816
tgcagatgcagataaatggcgtctt

SEQ ID NO: 243936 - DNA, 25 bp, Artificial
  probe
  misc_feature (1)..(25): SEQ ID NO: 1941; WAN024GFY_at; Start 307; Stop 331
gatcatcctagagctcctttcggta

SEQ ID NO: 243937 - DNA, 25 bp, Artificial
  probe
  misc_feature (1)..(25): SEQ ID NO: 1941; WAN024GFY_at; Start 248; Stop 272
taagtaatcaactcctgaacccctg

SEQ ID NO: 243938 - DNA, 25 bp, Artificial
  probe
  misc_feature (1)..(25): SEQ ID NO: 1941; WAN024GFY_at; Start 188; Stop 212
taaaaggccacaaaagcccccatga

SEQ ID NO: 243939 - DNA, 25 bp, Artificial
  probe
  misc_feature (1)..(25): SEQ ID NO: 1941; WAN024GFY_at; Start 78; Stop 102
tagtcagaagattggtcacaaaact

SEQ ID NO: 243940 - DNA, 25 bp, Artificial
  probe
  misc_feature (1)..(25): SEQ ID NO: 1941; WAN024GFY_at; Start 27; Stop 51
taatggagccatccttgacctcctc

SEQ ID NO: 243941 - DNA, 25 bp, Artificial
  probe
  misc_feature (1)..(25): SEQ ID NO: 1941; WAN024GFY_at; Start 321; Stop 345
tcctttcggtagaagcgacggataa

SEQ ID NO: 243942 - DNA, 25 bp, Artificial
  probe
  misc_feature (1)..(25): SEQ ID NO: 1941; WAN024GFY_at; Start 141; Stop 165
cctgaatcaaagactcttgcgaaga

SEQ ID NO: 243943 - DNA, 25 bp, Artificial
  probe
  misc_feature (1)..(25): SEQ ID NO: 1941; WAN024GFY_at; Start 16; Stop 40
caaacgcatgataatggagccatcc

SEQ ID NO: 243944 - DNA, 25 bp, Artificial
  probe
  misc_feature (1)..(25): SEQ ID NO: 1941; WAN024GFY_at; Start 315; Stop 339
tagagctcctttcggtagaagcgac

SEQ ID NO: 243945 - DNA, 25 bp, Artificial
  probe
  misc_feature (1)..(25): SEQ ID NO: 1941; WAN024GFY_at; Start 224; Stop 248
cgatagagaataaagttgactcggt

SEQ ID NO: 243946 - DNA, 25 bp, Artificial
  probe
  misc_feature (1)..(25): SEQ ID NO: 1941; WAN024GFY_at; Start 71; Stop 95
tcggatctagtcagaagattggtca

SEQ ID NO: 243947 - DNA, 25 bp, Artificial
  probe
  misc_feature (1)..(25): SEQ ID NO: 1941; WAN024GFY_at; Start 260; Stop 284
tcctgaacccctgcattgataaagg

SEQ ID NO: 243948 - DNA, 25 bp, Artificial
  probe
  misc_feature (1)..(25): SEQ ID NO: 1941; WAN024GFY_at; Start 207; Stop 231
ccatgacatcgccaatccgatagag

SEQ ID NO: 243949 - DNA, 25 bp, Artificial
  probe
  misc_feature (1)..(25): SEQ ID NO: 1941; WAN024GFY_at; Start 51; Stop 75
ccccaatcataaaggacgaatcgga

SEQ ID NO: 243950 - DNA, 25 bp, Artificial
  probe
  misc_feature (1)..(25): SEQ ID NO: 1941; WAN024GFY_at; Start 169; Stop 193
aaagacagccttccagagataaaag

SEQ ID NO: 243951 - DNA, 25 bp, Artificial
  probe
  misc_feature (1)..(25): SEQ ID NO: 1941; WAN024GFY_at; Start 240; Stop 264
tgactcggtaagtaatcaactcctg

SEQ ID NO: 243952 - DNA, 25 bp, Artificial
  probe
  misc_feature (1)..(25): SEQ ID NO: 1941; WAN024GFY_at; Start 216; Stop 240
cgccaatccgatagagaataaagtt

SEQ ID NO: 243953 - DNA, 25 bp, Artificial
  probe
  misc_feature (1)..(25): SEQ ID NO: 1941; WAN024GFY_at; Start 180; Stop 204
tccagagataaaaggccacaaaagc

SEQ ID NO: 243954 - DNA, 25 bp, Artificial
  probe
  misc_feature (1)..(25): SEQ ID NO: 1941; WAN024GFY_at; Start 164; Stop 188
gaatcaaagacagccttccagagat

SEQ ID NO: 243955 - DNA, 25 bp, Artificial
  probe
  misc_feature (1)..(25): SEQ ID NO: 1941; WAN024GFY_at; Start 299; Stop 323
cacaatttgatcatcctagagctcc

SEQ ID NO: 243956 - DNA, 25 bp, Artificial
  probe
  misc_feature (1)..(25): SEQ ID NO: 1941; WAN024GFY_at; Start 42; Stop 66
tgacctcctccccaatcataaagga

SEQ ID NO: 243957 - DNA, 25 bp, Artificial
  probe
  misc_feature (1)..(25): SEQ ID NO: 1941; WAN024GFY_at; Start 155; Stop 179
tcttgcgaagaatcaaagacagcct

SEQ ID NO: 243958 - DNA, 25 bp, Artificial
  probe
  misc_feature (1)..(25): SEQ ID NO: 1941; WAN024GFY_at; Start 123; Stop 147
tatccgccatactgaagccctgaat

SEQ ID NO: 243959 - DNA, 25 bp, Artificial
  probe
  misc_feature (1)..(25): SEQ ID NO: 1941; WAN024GFY_at; Start 96; Stop 120
caaaactcatgatgatgtagagggt

SEQ ID NO: 243960 - DNA, 25 bp, Artificial
  probe
  misc_feature (1)..(25): SEQ ID NO: 1941; WAN024GFY_at; Start 135; Stop 159
tgaagccctgaatcaaagactcttg

SEQ ID NO: 243961 - DNA, 25 bp, Artificial
  probe
  misc_feature (1)..(25): SEQ ID NO: 1941; WAN024GFY_at; Start 60; Stop 84
taaaggacgaatcggatctagtcag

SEQ ID NO: 243962 - DNA, 25 bp, Artificial
  probe
  misc_feature (1)..(25): SEQ ID NO: 1941; WAN024GFY_at; Start 113; Stop 137
tagagggtgatatccgccatactga

SEQ ID NO: 243963 - DNA, 25 bp, Artificial
  probe
  misc_feature (1)..(25): SEQ ID NO: 1941; WAN024GFY_at; Start 7; Stop 31
tggtcgcaacaaacgcatgataatg

SEQ ID NO: 243964 - DNA, 25 bp, Artificial
  probe
  misc_feature (1)..(25): SEQ ID NO: 1941; WAN024GFY_at; Start 276; Stop 300
tgataaagggtttataacgtctcca

SEQ ID NO: 243965 - DNA, 25 bp, Artificial
  probe
  misc_feature (1)..(25): SEQ ID NO: 1941; WAN024GFY_at; Start 284; Stop 308
ggtttataacgtctccacaatttga

SEQ ID NO: 243966 - DNA, 25 bp, Artificial
  probe
  misc_feature (1)..(25): SEQ ID NO: 1941; WAN024GFY_at; Start 108; Stop 132
tgatgtagagggtgatatccgccat

SEQ ID NO: 243967 - DNA, 25 bp, Artificial
  probe
  misc_feature (1)..(25): SEQ ID NO: 1941; WAN024GFY_at; Start 120; Stop 144
tgatatccgccatactgaagccctg

SEQ ID NO: 243968 - DNA, 25 bp, Artificial
  probe
  misc_feature (1)..(25): SEQ ID NO: 1941; WAN024GFY_at; Start 2; Stop 26
tgcactggtcgcaacaaacgcatga

SEQ ID NO: 243969 - DNA, 25 bp, Artificial
  probe
  misc_feature (1)..(25): SEQ ID NO: 1941; WAN024GFY_at; Start 87; Stop 111
gattggtcacaaaactcatgatgat

SEQ ID NO: 243970 - DNA, 25 bp, Artificial
  probe
  misc_feature (1)..(25): SEQ ID NO: 1171; WAN024GFZ_at; Start 31; Stop 55
gcccggttccttaacagtcttcaca

SEQ ID NO: 243971 - DNA, 25 bp, Artificial
  probe
  misc_feature (1)..(25): SEQ ID NO: 1171; WAN024GFZ_at; Start 7; Stop 31
aaaggagcgcaaagcccccttcaag

SEQ ID NO: 243972 - DNA, 25 bp, Artificial
  probe
  misc_feature (1)..(25): SEQ ID NO: 1171; WAN024GFZ_at; Start 68; Stop 92
agatgttccacttctatcattgcca

SEQ ID NO: 243973 - DNA, 25 bp, Artificial
  probe
  misc_feature (1)..(25): SEQ ID NO: 1171; WAN024GFZ_at; Start 107; Stop 131
tcgtaaggaatagcaacattgtgtt

SEQ ID NO: 243974 - DNA, 25 bp, Artificial
  probe
  misc_feature (1)..(25): SEQ ID NO: 1171; WAN024GFZ_at; Start 194; Stop 218
gctttataccaacctattatagtcc

SEQ ID NO: 243975 - DNA, 25 bp, Artificial
  probe
  misc_feature (1)..(25): SEQ ID NO: 1171; WAN024GFZ_at; Start 164; Stop 188
tacaccttctacattttattactac

SEQ ID NO: 243976 - DNA, 25 bp, Artificial
  probe
  misc_feature (1)..(25): SEQ ID NO: 1171; WAN024GFZ_at; Start 99; Stop 123
tctccctatcgtaaggaatagcaac

SEQ ID NO: 243977 - DNA, 25 bp, Artificial
  probe
  misc_feature (1)..(25): SEQ ID NO: 1171; WAN024GFZ_at; Start 103; Stop 127
cctatcgtaaggaatagcaacattg

SEQ ID NO: 243978 - DNA, 25 bp, Artificial
  probe
  misc_feature (1)..(25): SEQ ID NO: 1171; WAN024GFZ_at; Start 101; Stop 125
tccctatcgtaaggaatagcaacat

SEQ ID NO: 243979 - DNA, 25 bp, Artificial
  probe
  misc_feature (1)..(25): SEQ ID NO: 1171; WAN024GFZ_at; Start 74; Stop 98
tccacttctatcattgccatatcta

SEQ ID NO: 243980 - DNA, 25 bp, Artificial
  probe
  misc_feature (1)..(25): SEQ ID NO: 1171; WAN024GFZ_at; Start 93; Stop 117
tatctatctccctatcgtaaggaat

SEQ ID NO: 243981 - DNA, 25 bp, Artificial
  probe
  misc_feature (1)..(25): SEQ ID NO: 1171; WAN024GFZ_at; Start 90; Stop 114
ccatatctatctccctatcgtaagg

SEQ ID NO: 243982 - DNA, 25 bp, Artificial
  probe
  misc_feature (1)..(25): SEQ ID NO: 1171; WAN024GFZ_at; Start 214; Stop 238
agtccaataaaaaacgaaatgcaag

SEQ ID NO: 243983 - DNA, 25 bp, Artificial
  probe
  misc_feature (1)..(25): SEQ ID NO: 1171; WAN024GFZ_at; Start 1; Stop 25
atgaataaaggagcgcaaagccccc

SEQ ID NO: 243984 - DNA, 25 bp, Artificial
  probe
  misc_feature (1)..(25): SEQ ID NO: 1171; WAN024GFZ_at; Start 198; Stop 222
tataccaacctattatagtccaata

SEQ ID NO: 243985 - DNA, 25 bp, Artificial
  probe
  misc_feature (1)..(25): SEQ ID NO: 1171; WAN024GFZ_at; Start 71; Stop 95
tgttccacttctatcattgccatat

SEQ ID NO: 243986 - DNA, 25 bp, Artificial
  probe
  misc_feature (1)..(25): SEQ ID NO: 1171; WAN024GFZ_at; Start 105; Stop 129
tatcgtaaggaatagcaacattgtg

SEQ ID NO: 243987 - DNA, 25 bp, Artificial
  probe
  misc_feature (1)..(25): SEQ ID NO: 1171; WAN024GFZ_at; Start 85; Stop 109
cattgccatatctatctccctatcg

SEQ ID NO: 243988 - DNA, 25 bp, Artificial
  probe
  misc_feature (1)..(25): SEQ ID NO: 1171; WAN024GFZ_at; Start 66; Stop 90
gaagatgttccacttctatcattgc

SEQ ID NO: 243989 - DNA, 25 bp, Artificial
  probe
  misc_feature (1)..(25): SEQ ID NO: 1171; WAN024GFZ_at; Start 95; Stop 119
tctatctccctatcgtaaggaatag

SEQ ID NO: 243990 - DNA, 25 bp, Artificial
  probe
  misc_feature (1)..(25): SEQ ID NO: 1171; WAN024GFZ_at; Start 211; Stop 235
tatagtccaataaaaaacgaaatgc

SEQ ID NO: 243991 - DNA, 25 bp, Artificial
  probe
  misc_feature (1)..(25): SEQ ID NO: 1171; WAN024GFZ_at; Start 45; Stop 69
cagtcttcacaaaatttttctgaag

SEQ ID NO: 243992 - DNA, 25 bp, Artificial
  probe
  misc_feature (1)..(25): SEQ ID NO: 1171; WAN024GFZ_at; Start 42; Stop 66
taacagtcttcacaaaatttttctg

SEQ ID NO: 243993 - DNA, 25 bp, Artificial
  probe
  misc_feature (1)..(25): SEQ ID NO: 1171; WAN024GFZ_at; Start 69; Stop 93
gatgttccacttctatcattgccat

SEQ ID NO: 243994 - DNA, 25 bp, Artificial
  probe
  misc_feature (1)..(25): SEQ ID NO: 1171; WAN024GFZ_at; Start 126; Stop 150
tgtgtttttaactacaaatattcta

SEQ ID NO: 243995 - DNA, 25 bp, Artificial
  probe
  misc_feature (1)..(25): SEQ ID NO: 1171; WAN024GFZ_at; Start 119; Stop 143
gcaacattgtgtttttaactacaaa

SEQ ID NO: 243996 - DNA, 25 bp, Artificial
  probe
  misc_feature (1)..(25): SEQ ID NO: 1171; WAN024GFZ_at; Start 191; Stop 215
aaggctttataccaacctattatag

SEQ ID NO: 243997 - DNA, 25 bp, Artificial
  probe
  misc_feature (1)..(25): SEQ ID NO: 1171; WAN024GFZ_at; Start 108; Stop 132
cgtaaggaatagcaacattgtgttt

SEQ ID NO: 243998 - DNA, 25 bp, Artificial
  probe
  misc_feature (1)..(25): SEQ ID NO: 1171; WAN024GFZ_at; Start 82; Stop 106
tatcattgccatatctatctcccta

SEQ ID NO: 243999 - DNA, 25 bp, Artificial
  probe
  misc_feature (1)..(25): SEQ ID NO: 1171; WAN024GFZ_at; Start 61; Stop 85
tttctgaagatgttccacttctatc

SEQ ID NO: 244000 - DNA, 25 bp, Artificial
  probe
  misc_feature (1)..(25): SEQ ID NO: 1171; WAN024GFZ_at; Start 89; Stop 113
gccatatctatctccctatcgtaag

SEQ ID NO: 244001 - DNA, 25 bp, Artificial
  probe
  misc_feature (1)..(25): SEQ ID NO: 1171; WAN024GFZ_at; Start 80; Stop 104
tctatcattgccatatctatctccc

SEQ ID NO: 244002 - DNA, 25 bp, Artificial
  probe
  misc_feature (1)..(25): SEQ ID NO: 1171; WAN024GFZ_at; Start 113; Stop 137
ggaatagcaacattgtgtttttaac

SEQ ID NO: 244003 - DNA, 25 bp, Artificial
  probe
  misc_feature (1)..(25): SEQ ID NO: 1171; WAN024GFZ_at; Start 97; Stop 121
tatctccctatcgtaaggaatagca

SEQ ID NO: 244004 - DNA, 25 bp, Artificial
  probe
  misc_feature (1)..(25): SEQ ID NO: 2410; WAN024GG2_at; Start 655; Stop 679
gatattgagcaactttgtgatcgga

SEQ ID NO: 244005 - DNA, 25 bp, Artificial
  probe
  misc_feature (1)..(25): SEQ ID NO: 2410; WAN024GG2_at; Start 307; Stop 331
tttggacaacgcacccagctatggt

SEQ ID NO: 244006 - DNA, 25 bp, Artificial
  probe
  misc_feature (1)..(25): SEQ ID NO: 2410; WAN024GG2_at; Start 773; Stop 797
tgctaccaggtcaaagtcatctcgt

SEQ ID NO: 244007 - DNA, 25 bp, Artificial
  probe
  misc_feature (1)..(25): SEQ ID NO: 2410; WAN024GG2_at; Start 585; Stop 609
tcgtcgggcaattactcagatcaat

SEQ ID NO: 244008 - DNA, 25 bp, Artificial
  probe
  misc_feature (1)..(25): SEQ ID NO: 2410; WAN024GG2_at; Start 87; Stop 111
tattcatcctgaaaagcagaccttt

SEQ ID NO: 244009 - DNA, 25 bp, Artificial
  probe
  misc_feature (1)..(25): SEQ ID NO: 2410; WAN024GG2_at; Start 570; Stop 594
ggttaaggataatattcgtcgggca

SEQ ID NO: 244010 - DNA, 25 bp, Artificial
  probe
  misc_feature (1)..(25): SEQ ID NO: 2410; WAN024GG2_at; Start 107; Stop 131
cctttgaagcggtcaaggatttgac

SEQ ID NO: 244011 - DNA, 25 bp, Artificial
  probe
  misc_feature (1)..(25): SEQ ID NO: 2410; WAN024GG2_at; Start 756; Stop 780
gactctctcttttgaactgctacca

SEQ ID NO: 244012 - DNA, 25 bp, Artificial
  probe
  misc_feature (1)..(25): SEQ ID NO: 2410; WAN024GG2_at; Start 673; Stop 697
gatcggattttcatgattgacaagg

SEQ ID NO: 244013 - DNA, 25 bp, Artificial
  probe
  misc_feature (1)..(25): SEQ ID NO: 2410; WAN024GG2_at; Start 461; Stop 485
tgcggactctttcactgggacaacg

SEQ ID NO: 244014 - DNA, 25 bp, Artificial
  probe
  misc_feature (1)..(25): SEQ ID NO: 2410; WAN024GG2_at; Start 643; Stop 667
cacgatttgagtgatattgagcaac

SEQ ID NO: 244015 - DNA, 25 bp, Artificial
  probe
  misc_feature (1)..(25): SEQ ID NO: 2410; WAN024GG2_at; Start 227; Stop 251
caacatctggtttttgtcggattaa

SEQ ID NO: 244016 - DNA, 25 bp, Artificial
  probe
  misc_feature (1)..(25): SEQ ID NO: 2410; WAN024GG2_at; Start 880; Stop 904
cagtcagctgacattatcaagcaaa

SEQ ID NO: 244017 - DNA, 25 bp, Artificial
  probe
  misc_feature (1)..(25): SEQ ID NO: 2410; WAN024GG2_at; Start 292; Stop 316
gatattggcgtagtctttggacaac

SEQ ID NO: 244018 - DNA, 25 bp, Artificial
  probe
  misc_feature (1)..(25): SEQ ID NO: 2410; WAN024GG2_at; Start 324; Stop 348
gctatggtgggatttggctctgcaa

SEQ ID NO: 244019 - DNA, 25 bp, Artificial
  probe
  misc_feature (1)..(25): SEQ ID NO: 2410; WAN024GG2_at; Start 603; Stop 627
gatcaatcaagaggaagaaactacc

SEQ ID NO: 244020 - DNA, 25 bp, Artificial
  probe
  misc_feature (1)..(25): SEQ ID NO: 2410; WAN024GG2_at; Start 538; Stop 562
ttagatgagccgaccattggtttgg

SEQ ID NO: 244021 - DNA, 25 bp, Artificial
  probe
  misc_feature (1)..(25): SEQ ID NO: 2410; WAN024GG2_at; Start 206; Stop 230
tgctgacaggaattttgaaaccaac

SEQ ID NO: 244022 - DNA, 25 bp, Artificial
  probe
  misc_feature (1)..(25): SEQ ID NO: 2410; WAN024GG2_at; Start 924; Stop 948
ccgcgatttgaagatggtggatacg

SEQ ID NO: 244023 - DNA, 25 bp, Artificial
  probe
  misc_feature (1)..(25): SEQ ID NO: 2410; WAN024GG2_at; Start 442; Stop 466
gactttatcaaggatcccgtgcgga

SEQ ID NO: 244024 - DNA, 25 bp, Artificial
  probe
  misc_feature (1)..(25): SEQ ID NO: 2410; WAN024GG2_at; Start 738; Stop 762
gacctttggtaagatgaagactctc

SEQ ID NO: 244025 - DNA, 25 bp, Artificial
  probe
  misc_feature (1)..(25): SEQ ID NO: 2410; WAN024GG2_at; Start 721; Stop 745
gtgagccaactcaaggagacctttg

SEQ ID NO: 244026 - DNA, 25 bp, Artificial
  probe
  misc_feature (1)..(25): SEQ ID NO: 2410; WAN024GG2_at; Start 2; Stop 26
tggcaatgatagaagtggaacatct

SEQ ID NO: 244027 - DNA, 25 bp, Artificial
  probe
  misc_feature (1)..(25): SEQ ID NO: 2410; WAN024GG2_at; Start 704; Stop 728
agatttttgatggaacggtgagcca

SEQ ID NO: 244028 - DNA, 25 bp, Artificial
  probe
  misc_feature (1)..(25): SEQ ID NO: 2410; WAN024GG2_at; Start 172; Stop 196
gcaaatggtgctgggaagtcgacaa

SEQ ID NO: 244029 - DNA, 25 bp, Artificial
  probe
  misc_feature (1)..(25): SEQ ID NO: 2410; WAN024GG2_at; Start 865; Stop 889
gatagttctcgctaccagtcagctg

SEQ ID NO: 244030 - DNA, 25 bp, Artificial
  probe
  misc_feature (1)..(25): SEQ ID NO: 2410; WAN024GG2_at; Start 186; Stop 210
gaagtcgacaaccattaaaatgctg

SEQ ID NO: 244031 - DNA, 25 bp, Artificial
  probe
  misc_feature (1)..(25): SEQ ID NO: 2410; WAN024GG2_at; Start 71; Stop 95
gggctttgcgctcctttattcatcc

SEQ ID NO: 244032 - DNA, 25 bp, Artificial
  probe
  misc_feature (1)..(25): SEQ ID NO: 2410; WAN024GG2_at; Start 495; Stop 519
ggatattgcggcctccttgctccac

SEQ ID NO: 244033 - DNA, 25 bp, Artificial
  probe
  misc_feature (1)..(25): SEQ ID NO: 2410; WAN024GG2_at; Start 629; Stop 653
ttcttttgaccactcacgatttgag

SEQ ID NO: 244034 - DNA, 25 bp, Artificial
  probe
  misc_feature (1)..(25): SEQ ID NO: 2410; WAN024GG2_at; Start 511; Stop 535
ttgctccacaatcccaaggttcttt

SEQ ID NO: 244035 - DNA, 25 bp, Artificial
  probe
  misc_feature (1)..(25): SEQ ID NO: 2410; WAN024GG2_at; Start 828; Stop 852
cattgatagacaaggaaacagcctc

SEQ ID NO: 244036 - DNA, 25 bp, Artificial
  probe
  misc_feature (1)..(25): SEQ ID NO: 2410; WAN024GG2_at; Start 339; Stop 363
ggctctgcaagagacctacactgtc

SEQ ID NO: 244037 - DNA, 25 bp, Artificial
  probe
  misc_feature (1)..(25): SEQ ID NO: 2410; WAN024GG2_at; Start 243; Stop 267
tcggattaacggcaagattccccag

SEQ ID NO: 244038 - DNA, 25 bp, Artificial
  probe
  misc_feature (1)..(25): SEQ ID NO: 5126; WAN024GG3_at; Start 175; Stop 199
aaggctgtctttgattcttcgcaag

SEQ ID NO: 244039 - DNA, 25 bp, Artificial
  probe
  misc_feature (1)..(25): SEQ ID NO: 5126; WAN024GG3_at; Start 151; Stop 175
gcttttgtggccttttatctctgga

SEQ ID NO: 244040 - DNA, 25 bp, Artificial
  probe
  misc_feature (1)..(25): SEQ ID NO: 5126; WAN024GG3_at; Start 709; Stop 733
tatactccagttatgatcattgttg

SEQ ID NO: 244041 - DNA, 25 bp, Artificial
  probe
  misc_feature (1)..(25): SEQ ID NO: 5126; WAN024GG3_at; Start 739; Stop 763
tacgatgccagtcagattcttcagg

SEQ ID NO: 244042 - DNA, 25 bp, Artificial
  probe
  misc_feature (1)..(25): SEQ ID NO: 5126; WAN024GG3_at; Start 260; Stop 284
tgaccaatcttctgactagatccga

SEQ ID NO: 244043 - DNA, 25 bp, Artificial
  probe
  misc_feature (1)..(25): SEQ ID NO: 5126; WAN024GG3_at; Start 26; Stop 50
ccgaaaggagctctaggatgatcaa

SEQ ID NO: 244044 - DNA, 25 bp, Artificial
  probe
  misc_feature (1)..(25): SEQ ID NO: 5126; WAN024GG3_at; Start 775; Stop 799
cagttcttctggctcttagtgatgg

SEQ ID NO: 244045 - DNA, 25 bp, Artificial
  probe
  misc_feature (1)..(25): SEQ ID NO: 5126; WAN024GG3_at; Start 63; Stop 87
ttataaaccctttatcaatgcaggg

SEQ ID NO: 244046 - DNA, 25 bp, Artificial
  probe
  misc_feature (1)..(25): SEQ ID NO: 5126; WAN024GG3_at; Start 725; Stop 749
tcattgttggaaaatacgatgccag

SEQ ID NO: 244047 - DNA, 25 bp, Artificial
  probe
  misc_feature (1)..(25): SEQ ID NO: 5126; WAN024GG3_at; Start 357; Stop 381
tgcggcctcctatcttttcaccgag

SEQ ID NO: 244048 - DNA, 25 bp, Artificial
  probe
  misc_feature (1)..(25): SEQ ID NO: 5126; WAN024GG3_at; Start 753; Stop 777
gattcttcaggcactccttttgcag

SEQ ID NO: 244049 - DNA, 25 bp, Artificial
  probe
  misc_feature (1)..(25): SEQ ID NO: 5126; WAN024GG3_at; Start 193; Stop 217
tcgcaagagtctttgattcagggct

SEQ ID NO: 244050 - DNA, 25 bp, Artificial
  probe
  misc_feature (1)..(25): SEQ ID NO: 5126; WAN024GG3_at; Start 608; Stop 632
cttccatagtggcttttatgtcggg

SEQ ID NO: 244051 - DNA, 25 bp, Artificial
  probe
  misc_feature (1)..(25): SEQ ID NO: 5126; WAN024GG3_at; Start 115; Stop 139
aactttattctctatcggattggcg

SEQ ID NO: 244052 - DNA, 25 bp, Artificial
  probe
  misc_feature (1)..(25): SEQ ID NO: 5126; WAN024GG3_at; Start 407; Stop 431
tcagcgttggccttccatttttaag

SEQ ID NO: 244053 - DNA, 25 bp, Artificial
  probe
  misc_feature (1)..(25): SEQ ID NO: 5126; WAN024GG3_at; Start 543; Stop 567
taatatttgctttggattttcagcc

SEQ ID NO: 244054 - DNA, 25 bp, Artificial
  probe
  misc_feature (1)..(25): SEQ ID NO: 5126; WAN024GG3_at; Start 507; Stop 531
tagcttaacgctcgcctatctgatt

SEQ ID NO: 244055 - DNA, 25 bp, Artificial
  probe
  misc_feature (1)..(25): SEQ ID NO: 5126; WAN024GG3_at; Start 91; Stop 115
caggagttgattacttaccgagtca

SEQ ID NO: 244056 - DNA, 25 bp, Artificial
  probe
  misc_feature (1)..(25): SEQ ID NO: 5126; WAN024GG3_at; Start 820; Stop 844
tggaaacgggtccagtcctttatca

SEQ ID NO: 244057 - DNA, 25 bp, Artificial
  probe
  misc_feature (1)..(25): SEQ ID NO: 5126; WAN024GG3_at; Start 273; Stop 297
gactagatccgattcgtcctttatg

SEQ ID NO: 244058 - DNA, 25 bp, Artificial
  probe
  misc_feature (1)..(25): SEQ ID NO: 5126; WAN024GG3_at; Start 371; Stop 395
ttttcaccgagcttggttccaagtg

SEQ ID NO: 244059 - DNA, 25 bp, Artificial
  probe
  misc_feature (1)..(25): SEQ ID NO: 5126; WAN024GG3_at; Start 787; Stop 811
ctcttagtgatggtgggattgtctc

SEQ ID NO: 244060 - DNA, 25 bp, Artificial
  probe
  misc_feature (1)..(25): SEQ ID NO: 5126; WAN024GG3_at; Start 471; Stop 495
tgtagaggtgctaggattaactgtc

SEQ ID NO: 244061 - DNA, 25 bp, Artificial
  probe
  misc_feature (1)..(25): SEQ ID NO: 5126; WAN024GG3_at; Start 440; Stop 464
tcttgatgaaaatcatatcgggtca

SEQ ID NO: 244062 - DNA, 25 bp, Artificial
  probe
  misc_feature (1)..(25): SEQ ID NO: 5126; WAN024GG3_at; Start 324; Stop 348
cattatcatgcgtttgttgcgacca

SEQ ID NO: 244063 - DNA, 25 bp, Artificial
  probe
  misc_feature (1)..(25): SEQ ID NO: 5126; WAN024GG3_at; Start 47; Stop 71
tcaaattgtggagacgttataaacc

SEQ ID NO: 244064 - DNA, 25 bp, Artificial
  probe
  misc_feature (1)..(25): SEQ ID NO: 5126; WAN024GG3_at; Start 311; Stop 335
tcaaggatggctccattatcatgcg

SEQ ID NO: 244065 - DNA, 25 bp, Artificial
  probe
  misc_feature (1)..(25): SEQ ID NO: 5126; WAN024GG3_at; Start 338; Stop 362
tgttgcgaccagtgcattttgcggc

SEQ ID NO: 244066 - DNA, 25 bp, Artificial
  probe
  misc_feature (1)..(25): SEQ ID NO: 5126; WAN024GG3_at; Start 388; Stop 412
tccaagtggttgatttttatcagcg

SEQ ID NO: 244067 - DNA, 25 bp, Artificial
  probe
  misc_feature (1)..(25): SEQ ID NO: 5126; WAN024GG3_at; Start 220; Stop 244
agtatggcggatatcaccctctaca

SEQ ID NO: 244068 - DNA, 25 bp, Artificial
  probe
  misc_feature (1)..(25): SEQ ID NO: 5126; WAN024GG3_at; Start 453; Stop 477
catatcgggtcaaggtattgtagag

SEQ ID NO: 244069 - DNA, 25 bp, Artificial
  probe
  misc_feature (1)..(25): SEQ ID NO: 5126; WAN024GG3_at; Start 592; Stop 616
tccaacctacttaagacttccatag

SEQ ID NO: 244070 - DNA, 25 bp, Artificial
  probe
  misc_feature (1)..(25): SEQ ID NO: 5126; WAN024GG3_at; Start 836; Stop 860
cctttatcaccattcaaggaggtta

SEQ ID NO: 244071 - DNA, 25 bp, Artificial
  probe
  misc_feature (1)..(25): SEQ ID NO: 5126; WAN024GG3_at; Start 241; Stop 265
tacatcatcatgagttttgtgacca

SEQ ID NO: 244072 - DNA, 25 bp, Artificial
  probe
  misc_feature (1)..(25): SEQ ID NO: 4932; WAN024GG4_at; Start 21; Stop 45
cagcacggtaagtgattttaccacc

SEQ ID NO: 244073 - DNA, 25 bp, Artificial
  probe
  misc_feature (1)..(25): SEQ ID NO: 4932; WAN024GG4_at; Start 76; Stop 100
cattgttacagtaccagttttaggg

SEQ ID NO: 244074 - DNA, 25 bp, Artificial
  probe
  misc_feature (1)..(25): SEQ ID NO: 4932; WAN024GG4_at; Start 105; Stop 129
gcatcaagttacgtggtccaaggac

SEQ ID NO: 244075 - DNA, 25 bp, Artificial
  probe
  misc_feature (1)..(25): SEQ ID NO: 4932; WAN024GG4_at; Start 235; Stop 259
aaagtctgcaccagcagcttttgct

SEQ ID NO: 244076 - DNA, 25 bp, Artificial
  probe
  misc_feature (1)..(25): SEQ ID NO: 4932; WAN024GG4_at; Start 132; Stop 156
gtccaagacgtccaacaagagccat

SEQ ID NO: 244077 - DNA, 25 bp, Artificial
  probe
  misc_feature (1)..(25): SEQ ID NO: 4932; WAN024GG4_at; Start 157; Stop 181
catatcaggtgtagcgataactacg

SEQ ID NO: 244078 - DNA, 25 bp, Artificial
  probe
  misc_feature (1)..(25): SEQ ID NO: 4932; WAN024GG4_at; Start 306; Stop 330
taccagtaccgtttggcaataccat

SEQ ID NO: 244079 - DNA, 25 bp, Artificial
  probe
  misc_feature (1)..(25): SEQ ID NO: 4932; WAN024GG4_at; Start 347; Stop 371
tggtcagcttttttaacgtcgatgt

SEQ ID NO: 244080 - DNA, 25 bp, Artificial
  probe
  misc_feature (1)..(25): SEQ ID NO: 4932; WAN024GG4_at; Start 227; Stop 251
tcaccaacaaagtctgcaccagcag

SEQ ID NO: 244081 - DNA, 25 bp, Artificial
  probe
  misc_feature (1)..(25): SEQ ID NO: 4932; WAN024GG4_at; Start 358; Stop 382
tttaacgtcgatgttcaagttgtaa

SEQ ID NO: 244082 - DNA, 25 bp, Artificial
  probe
  misc_feature (1)..(25): SEQ ID NO: 4932; WAN024GG4_at; Start 335; Stop 359
ccacggatttgttggtcagcttttt

SEQ ID NO: 244083 - DNA, 25 bp, Artificial
  probe
  misc_feature (1)..(25): SEQ ID NO: 4932; WAN024GG4_at; Start 242; Stop 266
gcaccagcagcttttgcttcttcag

SEQ ID NO: 244084 - DNA, 25 bp, Artificial
  probe
  misc_feature (1)..(25): SEQ ID NO: 4932; WAN024GG4_at; Start 166; Stop 190
tgtagcgataactacgtcgaagtcc

SEQ ID NO: 244085 - DNA, 25 bp, Artificial
  probe
  misc_feature (1)..(25): SEQ ID NO: 4932; WAN024GG4_at; Start 257; Stop 281
gcttcttcagcttttgcaccacgtg

SEQ ID NO: 244086 - DNA, 25 bp, Artificial
  probe
  misc_feature (1)..(25): SEQ ID NO: 4932; WAN024GG4_at; Start 172; Stop 196
gataactacgtcgaagtccaaccaa

SEQ ID NO: 244087 - DNA, 25 bp, Artificial
  probe
  misc_feature (1)..(25): SEQ ID NO: 4932; WAN024GG4_at; Start 68; Stop 92
gcaacatccattgttacagtaccag

SEQ ID NO: 244088 - DNA, 25 bp, Artificial
  probe
  misc_feature (1)..(25): SEQ ID NO: 4932; WAN024GG4_at; Start 88; Stop 112
accagttttagggtttggcatcaag

SEQ ID NO: 244089 - DNA, 25 bp, Artificial
  probe
  misc_feature (1)..(25): SEQ ID NO: 4932; WAN024GG4_at; Start 144; Stop 168
caacaagagccatcatatcaggtgt

SEQ ID NO: 244090 - DNA, 25 bp, Artificial
  probe
  misc_feature (1)..(25): SEQ ID NO: 4932; WAN024GG4_at; Start 271; Stop 295
tgcaccacgtgcgaaaacaagaaca

SEQ ID NO: 244091 - DNA, 25 bp, Artificial
  probe
  misc_feature (1)..(25): SEQ ID NO: 4932; WAN024GG4_at; Start 280; Stop 304
tgcgaaaacaagaacacgtgaagtt

SEQ ID NO: 244092 - DNA, 25 bp, Artificial
  probe
  misc_feature (1)..(25): SEQ ID NO: 4932; WAN024GG4_at; Start 1; Stop 25
ttgaacgttacctgcacggtcagca

SEQ ID NO: 244093 - DNA, 25 bp, Artificial
  probe
  misc_feature (1)..(25): SEQ ID NO: 4932; WAN024GG4_at; Start 205; Stop 229
gattttagcaacaaggtcatcttca

SEQ ID NO: 244094 - DNA, 25 bp, Artificial
  probe
  misc_feature (1)..(25): SEQ ID NO: 4932; WAN024GG4_at; Start 118; Stop 142
tggtccaaggacacgtccaagacgt

SEQ ID NO: 244095 - DNA, 25 bp, Artificial
  probe
  misc_feature (1)..(25): SEQ ID NO: 4932; WAN024GG4_at; Start 96; Stop 120
tagggtttggcatcaagttacgtgg

SEQ ID NO: 244096 - DNA, 25 bp, Artificial
  probe
  misc_feature (1)..(25): SEQ ID NO: 4932; WAN024GG4_at; Start 219; Stop 243
ggtcatcttcaccaacaaagtctgc

SEQ ID NO: 244097 - DNA, 25 bp, Artificial
  probe
  misc_feature (1)..(25): SEQ ID NO: 4932; WAN024GG4_at; Start 48; Stop 72
tagactcttcaactgctttagcaac

SEQ ID NO: 244098 - DNA, 25 bp, Artificial
  probe
  misc_feature (1)..(25): SEQ ID NO: 4932; WAN024GG4_at; Start 321; Stop 345
gcaataccattgctccacggatttg

SEQ ID NO: 244099 - DNA, 25 bp, Artificial
  probe
  misc_feature (1)..(25): SEQ ID NO: 4932; WAN024GG4_at; Start 288; Stop 312
caagaacacgtgaagttttaccagt

SEQ ID NO: 244100 - DNA, 25 bp, Artificial
  probe
  misc_feature (1)..(25): SEQ ID NO: 4932; WAN024GG4_at; Start 11; Stop 35
cctgcacggtcagcacggtaagtga

SEQ ID NO: 244101 - DNA, 25 bp, Artificial
  probe
  misc_feature (1)..(25): SEQ ID NO: 4932; WAN024GG4_at; Start 194; Stop 218
caaccgtcgttgattttagcaacaa

SEQ ID NO: 244102 - DNA, 25 bp, Artificial
  probe
  misc_feature (1)..(25): SEQ ID NO: 4932; WAN024GG4_at; Start 34; Stop 58
gattttaccacctttagactcttca

SEQ ID NO: 244103 - DNA, 25 bp, Artificial
  probe
  misc_feature (1)..(25): SEQ ID NO: 4932; WAN024GG4_at; Start 328; Stop 352
cattgctccacggatttgttggtca

SEQ ID NO: 244104 - DNA, 25 bp, Artificial
  probe
  misc_feature (1)..(25): SEQ ID NO: 4932; WAN024GG4_at; Start 182; Stop 206
tcgaagtccaaccaaccgtcgttga

SEQ ID NO: 244105 - DNA, 25 bp, Artificial
  probe
  misc_feature (1)..(25): SEQ ID NO: 4932; WAN024GG4_at; Start 56; Stop 80
tcaactgctttagcaacatccattg

SEQ ID NO: 244106 - DNA, 25 bp, Artificial
  probe
  misc_feature (1)..(25): SEQ ID NO: 2475; WAN024GG5_at; Start 236; Stop 260
cacgtggtgcaaaagctgaagaagc

SEQ ID NO: 244107 - DNA, 25 bp, Artificial
  probe
  misc_feature (1)..(25): SEQ ID NO: 2475; WAN024GG5_at; Start 158; Stop 182
aaaaagctgaccaacaaatccgtgg

SEQ ID NO: 244108 - DNA, 25 bp, Artificial
  probe
  misc_feature (1)..(25): SEQ ID NO: 2475; WAN024GG5_at; Start 327; Stop 351
ggacttcgacgtagttatcgctaca

SEQ ID NO: 244109 - DNA, 25 bp, Artificial
  probe
  misc_feature (1)..(25): SEQ ID NO: 2475; WAN024GG5_at; Start 300; Stop 324
tgttgctaaaatcaacgacggttgg

SEQ ID NO: 244110 - DNA, 25 bp, Artificial
  probe
  misc_feature (1)..(25): SEQ ID NO: 2475; WAN024GG5_at; Start 510; Stop 534
cgttcaagcaatcatcggtaaagta

SEQ ID NO: 244111 - DNA, 25 bp, Artificial
  probe
  misc_feature (1)..(25): SEQ ID NO: 2475; WAN024GG5_at; Start 19; Stop 43
caacttcgtgctgctcttgagaaaa

SEQ ID NO: 244112 - DNA, 25 bp, Artificial
  probe
  misc_feature (1)..(25): SEQ ID NO: 2475; WAN024GG5_at; Start 360; Stop 384
gatggctcttgttggacgtcttgga

SEQ ID NO: 244113 - DNA, 25 bp, Artificial
  probe
  misc_feature (1)..(25): SEQ ID NO: 2475; WAN024GG5_at; Start 82; Stop 106
gcacttgcaaaagaaactaactttg

SEQ ID NO: 244114 - DNA, 25 bp, Artificial
  probe
  misc_feature (1)..(25): SEQ ID NO: 2475; WAN024GG5_at; Start 522; Stop 546
catcggtaaagtatcatttgaagct

SEQ ID NO: 244115 - DNA, 25 bp, Artificial
  probe
  misc_feature (1)..(25): SEQ ID NO: 2475; WAN024GG5_at; Start 635; Stop 659
tgactatcacaactactcaaggtgt

SEQ ID NO: 244116 - DNA, 25 bp, Artificial
  probe
  misc_feature (1)..(25): SEQ ID NO: 2475; WAN024GG5_at; Start 31; Stop 55
gctcttgagaaaatcgacagcacaa

SEQ ID NO: 244117 - DNA, 25 bp, Artificial
  probe
  misc_feature (1)..(25): SEQ ID NO: 2475; WAN024GG5_at; Start 404; Stop 428
acttgatgccaaaccctaaaactgg

SEQ ID NO: 244118 - DNA, 25 bp, Artificial
  probe
  misc_feature (1)..(25): SEQ ID NO: 2475; WAN024GG5_at; Start 419; Stop 443
ctaaaactggtactgtaacaatgga

SEQ ID NO: 244119 - DNA, 25 bp, Artificial
  probe
  misc_feature (1)..(25): SEQ ID NO: 2475; WAN024GG5_at; Start 311; Stop 335
tcaacgacggttggttggacttcga

SEQ ID NO: 244120 - DNA, 25 bp, Artificial
  probe
  misc_feature (1)..(25): SEQ ID NO: 2475; WAN024GG5_at; Start 375; Stop 399
acgtcttggacgtgtccttggacca

SEQ ID NO: 244121 - DNA, 25 bp, Artificial
  probe
  misc_feature (1)..(25): SEQ ID NO: 2475; WAN024GG5_at; Start 41; Stop 65
aaatcgacagcacaaaagcatacag

SEQ ID NO: 244122 - DNA, 25 bp, Artificial
  probe
  misc_feature (1)..(25): SEQ ID NO: 2475; WAN024GG5_at; Start 482; Stop 506
tcacttaccgtgctgaccgtgcagg

SEQ ID NO: 244123 - DNA, 25 bp, Artificial
  probe
  misc_feature (1)..(25): SEQ ID NO: 2475; WAN024GG5_at; Start 344; Stop 368
tcgctacacctgatatgatggctct

SEQ ID NO: 244124 - DNA, 25 bp, Artificial
  probe
  misc_feature (1)..(25): SEQ ID NO: 2475; WAN024GG5_at; Start 256; Stop 280
gaagcaaaagctgctggtgcagact

SEQ ID NO: 244125 - DNA, 25 bp, Artificial
  probe
  misc_feature (1)..(25): SEQ ID NO: 2475; WAN024GG5_at; Start 127; Stop 151
gaagttgcttacaacttgaacatcg

SEQ ID NO: 244126 - DNA, 25 bp, Artificial
  probe
  misc_feature (1)..(25): SEQ ID NO: 2475; WAN024GG5_at; Start 172; Stop 196
caaatccgtggagcaatggtattgc

SEQ ID NO: 244127 - DNA, 25 bp, Artificial
  probe
  misc_feature (1)..(25): SEQ ID NO: 2475; WAN024GG5_at; Start 536; Stop 560
catttgaagctgaaaaattggttga

SEQ ID NO: 244128 - DNA, 25 bp, Artificial
  probe
  misc_feature (1)..(25): SEQ ID NO: 2475; WAN024GG5_at; Start 648; Stop 672
tactcaaggtgttggtatcaaagtt

SEQ ID NO: 244129 - DNA, 25 bp, Artificial
  probe
  misc_feature (1)..(25): SEQ ID NO: 2475; WAN024GG5_at; Start 68; Stop 92
tagaagaagctgtagcacttgcaaa

SEQ ID NO: 244130 - DNA, 25 bp, Artificial
  probe
  misc_feature (1)..(25): SEQ ID NO: 2475; WAN024GG5_at; Start 601; Stop 625
ccagctacagctaaaggaacttacg

SEQ ID NO: 244131 - DNA, 25 bp, Artificial
  probe
  misc_feature (1)..(25): SEQ ID NO: 2475; WAN024GG5_at; Start 274; Stop 298
gcagactttgttggtgaagatgacc

SEQ ID NO: 244132 - DNA, 25 bp, Artificial
  probe
  misc_feature (1)..(25): SEQ ID NO: 2475; WAN024GG5_at; Start 472; Stop 496
ggtggtaaaatcacttaccgtgctg

SEQ ID NO: 244133 - DNA, 25 bp, Artificial
  probe
  misc_feature (1)..(25): SEQ ID NO: 2475; WAN024GG5_at; Start 185; Stop 209
caatggtattgccaaacggtactgg

SEQ ID NO: 244134 - DNA, 25 bp, Artificial
  probe
  misc_feature (1)..(25): SEQ ID NO: 2475; WAN024GG5_at; Start 224; Stop 248
ttcttgttttcgcacgtggtgcaaa

SEQ ID NO: 244135 - DNA, 25 bp, Artificial
  probe
  misc_feature (1)..(25): SEQ ID NO: 2475; WAN024GG5_at; Start 8; Stop 32
aaaaaagcaaacaacttcgtgctgc

SEQ ID NO: 244136 - DNA, 25 bp, Artificial
  probe
  misc_feature (1)..(25): SEQ ID NO: 2475; WAN024GG5_at; Start 620; Stop 644
cttacgtaacaaacttgactatcac

SEQ ID NO: 244137 - DNA, 25 bp, Artificial
  probe
  misc_feature (1)..(25): SEQ ID NO: 2475; WAN024GG5_at; Start 286; Stop 310
ggtgaagatgaccttgttgctaaaa

SEQ ID NO: 244138 - DNA, 25 bp, Artificial
  probe
  misc_feature (1)..(25): SEQ ID NO: 2475; WAN024GG5_at; Start 496; Stop 520
gaccgtgcaggtaacgttcaagcaa

SEQ ID NO: 244139 - DNA, 25 bp, Artificial
  probe
  misc_feature (1)..(25): SEQ ID NO: 2475; WAN024GG5_at; Start 389; Stop 413
tccttggaccacgtaacttgatgcc

SEQ ID NO: 244140 - DNA, 25 bp, Artificial
  probe
  misc_feature (1)..(25): SEQ ID NO: 3911; WAN024GG6_at; Start 185; Stop 209
cagcagctggtggtgttttcgtaac

SEQ ID NO: 244141 - DNA, 25 bp, Artificial
  probe
  misc_feature (1)..(25): SEQ ID NO: 3911; WAN024GG6_at; Start 94; Stop 118
tcttgtacttgtgcacgagtaactg

SEQ ID NO: 244142 - DNA, 25 bp, Artificial
  probe
  misc_feature (1)..(25): SEQ ID NO: 3911; WAN024GG6_at; Start 158; Stop 182
caacacctgcagcttttttcaaaag

SEQ ID NO: 244143 - DNA, 25 bp, Artificial
  probe
  misc_feature (1)..(25): SEQ ID NO: 3911; WAN024GG6_at; Start 58; Stop 82
gctgcgttcaaatctggcatcttag

SEQ ID NO: 244144 - DNA, 25 bp, Artificial
  probe
  misc_feature (1)..(25): SEQ ID NO: 3911; WAN024GG6_at; Start 128; Stop 152
tagttttattaggtgtacctgatcc

SEQ ID NO: 244145 - DNA, 25 bp, Artificial
  probe
  misc_feature (1)..(25): SEQ ID NO: 3911; WAN024GG6_at; Start 170; Stop 194
cttttttcaaaagaacagcagctgg

SEQ ID NO: 244146 - DNA, 25 bp, Artificial
  probe
  misc_feature (1)..(25): SEQ ID NO: 3911; WAN024GG6_at; Start 148; Stop 172
gatcctttttcaacacctgcagctt

SEQ ID NO: 244147 - DNA, 25 bp, Artificial
  probe
  misc_feature (1)..(25): SEQ ID NO: 3911; WAN024GG6_at; Start 30; Stop 54
gatcatacgcattgcagactctacg

SEQ ID NO: 244148 - DNA, 25 bp, Artificial
  probe
  misc_feature (1)..(25): SEQ ID NO: 3911; WAN024GG6_at; Start 25; Stop 49
ccttcgatcatacgcattgcagact

SEQ ID NO: 244149 - DNA, 25 bp, Artificial
  probe
  misc_feature (1)..(25): SEQ ID NO: 3911; WAN024GG6_at; Start 137; Stop 161
taggtgtacctgatcctttttcaac

SEQ ID NO: 244150 - DNA, 25 bp, Artificial
  probe
  misc_feature (1)..(25): SEQ ID NO: 3911; WAN024GG6_at; Start 66; Stop 90
caaatctggcatcttagtttctgca

SEQ ID NO: 244151 - DNA, 25 bp, Artificial
  probe
  misc_feature (1)..(25): SEQ ID NO: 3911; WAN024GG6_at; Start 3; Stop 27
gaatcccatagaacgagcagtacct

SEQ ID NO: 244152 - DNA, 25 bp, Artificial
  probe
  misc_feature (1)..(25): SEQ ID NO: 3911; WAN024GG6_at; Start 99; Stop 123
tacttgtgcacgagtaactgtagca

SEQ ID NO: 244153 - DNA, 25 bp, Artificial
  probe
  misc_feature (1)..(25): SEQ ID NO: 3911; WAN024GG6_at; Start 39; Stop 63
cattgcagactctacgtttgctgcg

SEQ ID NO: 244154 - DNA, 25 bp, Artificial
  probe
  misc_feature (1)..(25): SEQ ID NO: 3911; WAN024GG6_at; Start 88; Stop 112
gcaatttcttgtacttgtgcacgag

SEQ ID NO: 244155 - DNA, 25 bp, Artificial
  probe
  misc_feature (1)..(25): SEQ ID NO: 3911; WAN024GG6_at; Start 6; Stop 30
tcccatagaacgagcagtaccttcg

SEQ ID NO: 244156 - DNA, 25 bp, Artificial
  probe
  misc_feature (1)..(25): SEQ ID NO: 3911; WAN024GG6_at; Start 173; Stop 197
ttttcaaaagaacagcagctggtgg

SEQ ID NO: 244157 - DNA, 25 bp, Artificial
  probe
  misc_feature (1)..(25): SEQ ID NO: 3911; WAN024GG6_at; Start 11; Stop 35
tagaacgagcagtaccttcgatcat

SEQ ID NO: 244158 - DNA, 25 bp, Artificial
  probe
  misc_feature (1)..(25): SEQ ID NO: 3911; WAN024GG6_at; Start 44; Stop 68
cagactctacgtttgctgcgttcaa

SEQ ID NO: 244159 - DNA, 25 bp, Artificial
  probe
  misc_feature (1)..(25): SEQ ID NO: 3911; WAN024GG6_at; Start 51; Stop 75
tacgtttgctgcgttcaaatctggc

SEQ ID NO: 244160 - DNA, 25 bp, Artificial
  probe
  misc_feature (1)..(25): SEQ ID NO: 3911; WAN024GG6_at; Start 73; Stop 97
ggcatcttagtttctgcaatttctt

SEQ ID NO: 244161 - DNA, 25 bp, Artificial
  probe
  misc_feature (1)..(25): SEQ ID NO: 3911; WAN024GG6_at; Start 203; Stop 227
tcgtaacgaaagtaaatgatttatc

SEQ ID NO: 244162 - DNA, 25 bp, Artificial
  probe
  misc_feature (1)..(25): SEQ ID NO: 3911; WAN024GG6_at; Start 109; Stop 133
cgagtaactgtagcaactttagttt

SEQ ID NO: 244163 - DNA, 25 bp, Artificial
  probe
  misc_feature (1)..(25): SEQ ID NO: 3911; WAN024GG6_at; Start 188; Stop 212
cagctggtggtgttttcgtaacgaa

SEQ ID NO: 244164 - DNA, 25 bp, Artificial
  probe
  misc_feature (1)..(25): SEQ ID NO: 3911; WAN024GG6_at; Start 209; Stop 233
cgaaagtaaatgatttatcttcgta

SEQ ID NO: 244165 - DNA, 25 bp, Artificial
  probe
  misc_feature (1)..(25): SEQ ID NO: 3911; WAN024GG6_at; Start 35; Stop 59
tacgcattgcagactctacgtttgc

SEQ ID NO: 244166 - DNA, 25 bp, Artificial
  probe
  misc_feature (1)..(25): SEQ ID NO: 3911; WAN024GG6_at; Start 19; Stop 43
gcagtaccttcgatcatacgcattg

SEQ ID NO: 244167 - DNA, 25 bp, Artificial
  probe
  misc_feature (1)..(25): SEQ ID NO: 3911; WAN024GG6_at; Start 22; Stop 46
gtaccttcgatcatacgcattgcag

SEQ ID NO: 244168 - DNA, 25 bp, Artificial
  probe
  misc_feature (1)..(25): SEQ ID NO: 3911; WAN024GG6_at; Start 1; Stop 25
gtgaatcccatagaacgagcagtac

SEQ ID NO: 244169 - DNA, 25 bp, Artificial
  probe
  misc_feature (1)..(25): SEQ ID NO: 3911; WAN024GG6_at; Start 16; Stop 40
cgagcagtaccttcgatcatacgca

SEQ ID NO: 244170 - DNA, 25 bp, Artificial
  probe
  misc_feature (1)..(25): SEQ ID NO: 3911; WAN024GG6_at; Start 106; Stop 130
gcacgagtaactgtagcaactttag

SEQ ID NO: 244171 - DNA, 25 bp, Artificial
  probe
  misc_feature (1)..(25): SEQ ID NO: 3911; WAN024GG6_at; Start 53; Stop 77
cgtttgctgcgttcaaatctggcat

SEQ ID NO: 244172 - DNA, 25 bp, Artificial
  probe
  misc_feature (1)..(25): SEQ ID NO: 3911; WAN024GG6_at; Start 176; Stop 200
tcaaaagaacagcagctggtggtgt

SEQ ID NO: 244173 - DNA, 25 bp, Artificial
  probe
  misc_feature (1)..(25): SEQ ID NO: 3911; WAN024GG6_at; Start 142; Stop 166
gtacctgatcctttttcaacacctg

SEQ ID NO: 244174 - DNA, 25 bp, Artificial
  probe
  misc_feature (1)..(25): SEQ ID NO: 2476; WAN024GG7_at; Start 110; Stop 134
gattcacaaaagagttcaacgctcg

SEQ ID NO: 244175 - DNA, 25 bp, Artificial
  probe
  misc_feature (1)..(25): SEQ ID NO: 2476; WAN024GG7_at; Start 105; Stop 129
catgggattcacaaaagagttcaac

SEQ ID NO: 244176 - DNA, 25 bp, Artificial
  probe
  misc_feature (1)..(25): SEQ ID NO: 2476; WAN024GG7_at; Start 63; Stop 87
tccaccggttggacctgctcttggt

SEQ ID NO: 244177 - DNA, 25 bp, Artificial
  probe
  misc_feature (1)..(25): SEQ ID NO: 2476; WAN024GG7_at; Start 125; Stop 149
tcaacgctcgtacagctgaccaagc

SEQ ID NO: 244178 - DNA, 25 bp, Artificial
  probe
  misc_feature (1)..(25): SEQ ID NO: 2476; WAN024GG7_at; Start 333; Stop 357
taagatgccagatttgaacgcagca

SEQ ID NO: 244179 - DNA, 25 bp, Artificial
  probe
  misc_feature (1)..(25): SEQ ID NO: 2476; WAN024GG7_at; Start 371; Stop 395
caatgcgtatgatcgaaggtactgc

SEQ ID NO: 244180 - DNA, 25 bp, Artificial
  probe
  misc_feature (1)..(25): SEQ ID NO: 2476; WAN024GG7_at; Start 86; Stop 110
gtcaagctggtatcaacatcatggg

SEQ ID NO: 244181 - DNA, 25 bp, Artificial
  probe
  misc_feature (1)..(25): SEQ ID NO: 2476; WAN024GG7_at; Start 355; Stop 379
gcaaacgtagagtctgcaatgcgta

SEQ ID NO: 244182 - DNA, 25 bp, Artificial
  probe
  misc_feature (1)..(25): SEQ ID NO: 2476; WAN024GG7_at; Start 79; Stop 103
gctcttggtcaagctggtatcaaca

SEQ ID NO: 244183 - DNA, 25 bp, Artificial
  probe
  misc_feature (1)..(25): SEQ ID NO: 2476; WAN024GG7_at; Start 231; Stop 255
tcttttgaaaaaagctgcaggtgtt

SEQ ID NO: 244184 - DNA, 25 bp, Artificial
  probe
  misc_feature (1)..(25): SEQ ID NO: 2476; WAN024GG7_at; Start 130; Stop 154
gctcgtacagctgaccaagctggta

SEQ ID NO: 244185 - DNA, 25 bp, Artificial
  probe
  misc_feature (1)..(25): SEQ ID NO: 2476; WAN024GG7_at; Start 71; Stop 95
ttggacctgctcttggtcaagctgg

SEQ ID NO: 244186 - DNA, 25 bp, Artificial
  probe
  misc_feature (1)..(25): SEQ ID NO: 2476; WAN024GG7_at; Start 248; Stop 272
caggtgttgaaaaaggatcaggtac

SEQ ID NO: 244187 - DNA, 25 bp, Artificial
  probe
  misc_feature (1)..(25): SEQ ID NO: 2476; WAN024GG7_at; Start 50; Stop 74
aagctacaccagctccaccggttgg

SEQ ID NO: 244188 - DNA, 25 bp, Artificial
  probe
  misc_feature (1)..(25): SEQ ID NO: 2476; WAN024GG7_at; Start 33; Stop 57
gcaaatccctgctggtaaagctaca

SEQ ID NO: 244189 - DNA, 25 bp, Artificial
  probe
  misc_feature (1)..(25): SEQ ID NO: 2476; WAN024GG7_at; Start 284; Stop 308
ctaaagttgctacagttactcgtgc

SEQ ID NO: 244190 - DNA, 25 bp, Artificial
  probe
  misc_feature (1)..(25): SEQ ID NO: 2476; WAN024GG7_at; Start 346; Stop 370
ttgaacgcagcaaacgtagagtctg

SEQ ID NO: 244191 - DNA, 25 bp, Artificial
  probe
  misc_feature (1)..(25): SEQ ID NO: 2476; WAN024GG7_at; Start 365; Stop 389
agtctgcaatgcgtatgatcgaagg

SEQ ID NO: 244192 - DNA, 25 bp, Artificial
  probe
  misc_feature (1)..(25): SEQ ID NO: 2476; WAN024GG7_at; Start 156; Stop 180
gatcattccagttgttatctcagtt

SEQ ID NO: 244193 - DNA, 25 bp, Artificial
  probe
  misc_feature (1)..(25): SEQ ID NO: 2476; WAN024GG7_at; Start 338; Stop 362
tgccagatttgaacgcagcaaacgt

SEQ ID NO: 244194 - DNA, 25 bp, Artificial
  probe
  misc_feature (1)..(25): SEQ ID NO: 2476; WAN024GG7_at; Start 384; Stop 408
cgaaggtactgctcgttctatggga

SEQ ID NO: 244195 - DNA, 25 bp, Artificial
  probe
  misc_feature (1)..(25): SEQ ID NO: 2476; WAN024GG7_at; Start 218; Stop 242
caccagctgctgttcttttgaaaaa

SEQ ID NO: 244196 - DNA, 25 bp, Artificial
  probe
  misc_feature (1)..(25): SEQ ID NO: 2476; WAN024GG7_at; Start 23; Stop 47
ttgtaaaattgcaaatccctgctgg

SEQ ID NO: 244197 - DNA, 25 bp, Artificial
  probe
  misc_feature (1)..(25): SEQ ID NO: 2476; WAN024GG7_at; Start 45; Stop 69
tggtaaagctacaccagctccaccg

SEQ ID NO: 244198 - DNA, 25 bp, Artificial
  probe
  misc_feature (1)..(25): SEQ ID NO: 2476; WAN024GG7_at; Start 324; Stop 348
tgcagaaactaagatgccagatttg

SEQ ID NO: 244199 - DNA, 25 bp, Artificial
  probe
  misc_feature (1)..(25): SEQ ID NO: 2476; WAN024GG7_at; Start 319; Stop 343
gaaattgcagaaactaagatgccag

SEQ ID NO: 244200 - DNA, 25 bp, Artificial
  probe
  misc_feature (1)..(25): SEQ ID NO: 2476; WAN024GG7_at; Start 376; Stop 400
cgtatgatcgaaggtactgctcgtt

SEQ ID NO: 244201 - DNA, 25 bp, Artificial
  probe
  misc_feature (1)..(25): SEQ ID NO: 2476; WAN024GG7_at; Start 119; Stop 143
aagagttcaacgctcgtacagctga

SEQ ID NO: 244202 - DNA, 25 bp, Artificial
  probe
  misc_feature (1)..(25): SEQ ID NO: 2476; WAN024GG7_at; Start 176; Stop 200
cagtttacgaagataaatcatttac

SEQ ID NO: 244203 - DNA, 25 bp, Artificial
  probe
  misc_feature (1)..(25): SEQ ID NO: 2476; WAN024GG7_at; Start 142; Stop 166
gaccaagctggtatgatcattccag

SEQ ID NO: 244204 - DNA, 25 bp, Artificial
  probe
  misc_feature (1)..(25): SEQ ID NO: 2476; WAN024GG7_at; Start 242; Stop 266
aagctgcaggtgttgaaaaaggatc

SEQ ID NO: 244205 - DNA, 25 bp, Artificial
  probe
  misc_feature (1)..(25): SEQ ID NO: 2476; WAN024GG7_at; Start 91; Stop 115
gctggtatcaacatcatgggattca

SEQ ID NO: 244206 - DNA, 25 bp, Artificial
  probe
  misc_feature (1)..(25): SEQ ID NO: 2476; WAN024GG7_at; Start 253; Stop 277
gttgaaaaaggatcaggtacaccta

SEQ ID NO: 244207 - DNA, 25 bp, Artificial
  probe
  misc_feature (1)..(25): SEQ ID NO: 2476; WAN024GG7_at; Start 163; Stop 187
ccagttgttatctcagtttacgaag

SEQ ID NO: 244208 - DNA, 25 bp, Artificial
  probe
  misc_feature (1)..(25): SEQ ID NO: 6990; WAN024GG8_at; Start 323; Stop 347
gtcatggattgaatggccgtggtcc

SEQ ID NO: 244209 - DNA, 25 bp, Artificial
  probe
  misc_feature (1)..(25): SEQ ID NO: 6990; WAN024GG8_at; Start 208; Stop 232
caagaagctgttgccaaaacgttta

SEQ ID NO: 244210 - DNA, 25 bp, Artificial
  probe
  misc_feature (1)..(25): SEQ ID NO: 6990; WAN024GG8_at; Start 325; Stop 349
catggattgaatggccgtggtccag

SEQ ID NO: 244211 - DNA, 25 bp, Artificial
  probe
  misc_feature (1)..(25): SEQ ID NO: 6990; WAN024GG8_at; Start 227; Stop 251
cgtttaaagctgaaaagatgaacat

SEQ ID NO: 244212 - DNA, 25 bp, Artificial
  probe
  misc_feature (1)..(25): SEQ ID NO: 6990; WAN024GG8_at; Start 2; Stop 26
tgtgcttgatttgtcaaagaattga

SEQ ID NO: 244213 - DNA, 25 bp, Artificial
  probe
  misc_feature (1)..(25): SEQ ID NO: 6990; WAN024GG8_at; Start 206; Stop 230
tccaagaagctgttgccaaaacgtt

SEQ ID NO: 244214 - DNA, 25 bp, Artificial
  probe
  misc_feature (1)..(25): SEQ ID NO: 6990; WAN024GG8_at; Start 435; Stop 459
cgatgaattagagaagtacacggtc

SEQ ID NO: 244215 - DNA, 25 bp, Artificial
  probe
  misc_feature (1)..(25): SEQ ID NO: 6990; WAN024GG8_at; Start 419; Stop 443
tgattaaagccttatccgatgaatt

SEQ ID NO: 244216 - DNA, 25 bp, Artificial
  probe
  misc_feature (1)..(25): SEQ ID NO: 6990; WAN024GG8_at; Start 297; Stop 321
tccaagacggtcaggtgatatgagg

SEQ ID NO: 244217 - DNA, 25 bp, Artificial
  probe
  misc_feature (1)..(25): SEQ ID NO: 6990; WAN024GG8_at; Start 198; Stop 222
gagtttggtccaagaagctgttgcc

SEQ ID NO: 244218 - DNA, 25 bp, Artificial
  probe
  misc_feature (1)..(25): SEQ ID NO: 6990; WAN024GG8_at; Start 15; Stop 39
tcaaagaattgaatggatcaaggca

SEQ ID NO: 244219 - DNA, 25 bp, Artificial
  probe
  misc_feature (1)..(25): SEQ ID NO: 6990; WAN024GG8_at; Start 18; Stop 42
aagaattgaatggatcaaggcaggg

SEQ ID NO: 244220 - DNA, 25 bp, Artificial
  probe
  misc_feature (1)..(25): SEQ ID NO: 6990; WAN024GG8_at; Start 28; Stop 52
tggatcaaggcaggggaaaatccct

SEQ ID NO: 244221 - DNA, 25 bp, Artificial
  probe
  misc_feature (1)..(25): SEQ ID NO: 6990; WAN024GG8_at; Start 287; Stop 311
ggcatctctttccaagacggtcagg

SEQ ID NO: 244222 - DNA, 25 bp, Artificial
  probe
  misc_feature (1)..(25): SEQ ID NO: 6990; WAN024GG8_at; Start 387; Stop 411
ttgccaagtgaaatcccatgagttg

SEQ ID NO: 244223 - DNA, 25 bp, Artificial
  probe
  misc_feature (1)..(25): SEQ ID NO: 6990; WAN024GG8_at; Start 412; Stop 436
gaacaaatgattaaagccttatccg

SEQ ID NO: 244224 - DNA, 25 bp, Artificial
  probe
  misc_feature (1)..(25): SEQ ID NO: 6990; WAN024GG8_at; Start 222; Stop 246
caaaacgtttaaagctgaaaagatg

SEQ ID NO: 244225 - DNA, 25 bp, Artificial
  probe
  misc_feature (1)..(25): SEQ ID NO: 6990; WAN024GG8_at; Start 382; Stop 406
gaagattgccaagtgaaatcccatg

SEQ ID NO: 244226 - DNA, 25 bp, Artificial
  probe
  misc_feature (1)..(25): SEQ ID NO: 6990; WAN024GG8_at; Start 246; Stop 270
gaacattgaacttctaggaaatgga

SEQ ID NO: 244227 - DNA, 25 bp, Artificial
  probe
  misc_feature (1)..(25): SEQ ID NO: 6990; WAN024GG8_at; Start 283; Stop 307
cactggcatctctttccaagacggt

SEQ ID NO: 244228 - DNA, 25 bp, Artificial
  probe
  misc_feature (1)..(25): SEQ ID NO: 6990; WAN024GG8_at; Start 231; Stop 255
taaagctgaaaagatgaacattgaa

SEQ ID NO: 244229 - DNA, 25 bp, Artificial
  probe
  misc_feature (1)..(25): SEQ ID NO: 6990; WAN024GG8_at; Start 249; Stop 273
cattgaacttctaggaaatggagat

SEQ ID NO: 244230 - DNA, 25 bp, Artificial
  probe
  misc_feature (1)..(25): SEQ ID NO: 6990; WAN024GG8_at; Start 204; Stop 228
ggtccaagaagctgttgccaaaacg

SEQ ID NO: 244231 - DNA, 25 bp, Artificial
  probe
  misc_feature (1)..(25): SEQ ID NO: 6990; WAN024GG8_at; Start 291; Stop 315
tctctttccaagacggtcaggtgat

SEQ ID NO: 244232 - DNA, 25 bp, Artificial
  probe
  misc_feature (1)..(25): SEQ ID NO: 6990; WAN024GG8_at; Start 216; Stop 240
tgttgccaaaacgtttaaagctgaa

SEQ ID NO: 244233 - DNA, 25 bp, Artificial
  probe
  misc_feature (1)..(25): SEQ ID NO: 6990; WAN024GG8_at; Start 431; Stop 455
tatccgatgaattagagaagtacac

SEQ ID NO: 244234 - DNA, 25 bp, Artificial
  probe
  misc_feature (1)..(25): SEQ ID NO: 6990; WAN024GG8_at; Start 401; Stop 425
cccatgagttggaacaaatgattaa

SEQ ID NO: 244235 - DNA, 25 bp, Artificial
  probe
  misc_feature (1)..(25): SEQ ID NO: 6990; WAN024GG8_at; Start 279; Stop 303
cgctcactggcatctctttccaaga

SEQ ID NO: 244236 - DNA, 25 bp, Artificial
  probe
  misc_feature (1)..(25): SEQ ID NO: 6990; WAN024GG8_at; Start 385; Stop 409
gattgccaagtgaaatcccatgagt

SEQ ID NO: 244237 - DNA, 25 bp, Artificial
  probe
  misc_feature (1)..(25): SEQ ID NO: 6990; WAN024GG8_at; Start 427; Stop 451
gccttatccgatgaattagagaagt

SEQ ID NO: 244238 - DNA, 25 bp, Artificial
  probe
  misc_feature (1)..(25): SEQ ID NO: 6990; WAN024GG8_at; Start 424; Stop 448
aaagccttatccgatgaattagaga

SEQ ID NO: 244239 - DNA, 25 bp, Artificial
  probe
  misc_feature (1)..(25): SEQ ID NO: 6990; WAN024GG8_at; Start 396; Stop 420
gaaatcccatgagttggaacaaatg

SEQ ID NO: 244240 - DNA, 25 bp, Artificial
  probe
  misc_feature (1)..(25): SEQ ID NO: 6990; WAN024GG8_at; Start 406; Stop 430
gagttggaacaaatgattaaagcct

SEQ ID NO: 244241 - DNA, 25 bp, Artificial
  probe
  misc_feature (1)..(25): SEQ ID NO: 6990; WAN024GG8_at; Start 391; Stop 415
caagtgaaatcccatgagttggaac

SEQ ID NO: 244242 - DNA, 25 bp, Artificial
  probe
  misc_feature (1)..(25): SEQ ID NO: 6989; WAN024GG9_at; Start 226; Stop 250
gcatttgaggctgaaaagatgaata

SEQ ID NO: 244243 - DNA, 25 bp, Artificial
  probe
  misc_feature (1)..(25): SEQ ID NO: 6989; WAN024GG9_at; Start 2; Stop 26
tgtgcttaatctgtcagagaatcga

SEQ ID NO: 244244 - DNA, 25 bp, Artificial
  probe
  misc_feature (1)..(25): SEQ ID NO: 6989; WAN024GG9_at; Start 220; Stop 244
gccaaagcatttgaggctgaaaaga

SEQ ID NO: 244245 - DNA, 25 bp, Artificial
  probe
  misc_feature (1)..(25): SEQ ID NO: 6989; WAN024GG9_at; Start 315; Stop 339
tatgaagagtcacggtttgaatggc

SEQ ID NO: 244246 - DNA, 25 bp, Artificial
  probe
  misc_feature (1)..(25): SEQ ID NO: 6989; WAN024GG9_at; Start 201; Stop 225
tttagtccaagaagcagtcgccaaa

SEQ ID NO: 244247 - DNA, 25 bp, Artificial
  probe
  misc_feature (1)..(25): SEQ ID NO: 6989; WAN024GG9_at; Start 206; Stop 230
tccaagaagcagtcgccaaagcatt

SEQ ID NO: 244248 - DNA, 25 bp, Artificial
  probe
  misc_feature (1)..(25): SEQ ID NO: 6989; WAN024GG9_at; Start 423; Stop 447
taaaatcttatctcatgaattggag

SEQ ID NO: 244249 - DNA, 25 bp, Artificial
  probe
  misc_feature (1)..(25): SEQ ID NO: 6989; WAN024GG9_at; Start 8; Stop 32
taatctgtcagagaatcgaactcat

SEQ ID NO: 244250 - DNA, 25 bp, Artificial
  probe
  misc_feature (1)..(25): SEQ ID NO: 6989; WAN024GG9_at; Start 283; Stop 307
cattggcatctttttccccgaagag

SEQ ID NO: 244251 - DNA, 25 bp, Artificial
  probe
  misc_feature (1)..(25): SEQ ID NO: 6989; WAN024GG9_at; Start 435; Stop 459
tcatgaattggagaagtatttggcc

SEQ ID NO: 244252 - DNA, 25 bp, Artificial
  probe
  misc_feature (1)..(25): SEQ ID NO: 6989; WAN024GG9_at; Start 211; Stop 235
gaagcagtcgccaaagcatttgagg

SEQ ID NO: 244253 - DNA, 25 bp, Artificial
  probe
  misc_feature (1)..(25): SEQ ID NO: 6989; WAN024GG9_at; Start 294; Stop 318
ttttccccgaagagcaggtgatatg

SEQ ID NO: 244254 - DNA, 25 bp, Artificial
  probe
  misc_feature (1)..(25): SEQ ID NO: 6989; WAN024GG9_at; Start 28; Stop 52
ctcattaaagctgggcaaaatccct

SEQ ID NO: 244255 - DNA, 25 bp, Artificial
  probe
  misc_feature (1)..(25): SEQ ID NO: 6989; WAN024GG9_at; Start 387; Stop 411
ttgccaagtacaatcgccagagctg

SEQ ID NO: 244256 - DNA, 25 bp, Artificial
  probe
  misc_feature (1)..(25): SEQ ID NO: 6989; WAN024GG9_at; Start 215; Stop 239
cagtcgccaaagcatttgaggctga

SEQ ID NO: 244257 - DNA, 25 bp, Artificial
  probe
  misc_feature (1)..(25): SEQ ID NO: 6989; WAN024GG9_at; Start 382; Stop 406
gaagattgccaagtacaatcgccag

SEQ ID NO: 244258 - DNA, 25 bp, Artificial
  probe
  misc_feature (1)..(25): SEQ ID NO: 6989; WAN024GG9_at; Start 318; Stop 342
gaagagtcacggtttgaatggccgt

SEQ ID NO: 244259 - DNA, 25 bp, Artificial
  probe
  misc_feature (1)..(25): SEQ ID NO: 6989; WAN024GG9_at; Start 297; Stop 321
tccccgaagagcaggtgatatgaag

SEQ ID NO: 244260 - DNA, 25 bp, Artificial
  probe
  misc_feature (1)..(25): SEQ ID NO: 6989; WAN024GG9_at; Start 325; Stop 349
cacggtttgaatggccgtggcccag

SEQ ID NO: 244261 - DNA, 25 bp, Artificial
  probe
  misc_feature (1)..(25): SEQ ID NO: 6989; WAN024GG9_at; Start 400; Stop 424
tcgccagagctggaagagatgatta

SEQ ID NO: 244262 - DNA, 25 bp, Artificial
  probe
  misc_feature (1)..(25): SEQ ID NO: 6989; WAN024GG9_at; Start 301; Stop 325
cgaagagcaggtgatatgaagagtc

SEQ ID NO: 244263 - DNA, 25 bp, Artificial
  probe
  misc_feature (1)..(25): SEQ ID NO: 6989; WAN024GG9_at; Start 292; Stop 316
ctttttccccgaagagcaggtgata

SEQ ID NO: 244264 - DNA, 25 bp, Artificial
  probe
  misc_feature (1)..(25): SEQ ID NO: 6989; WAN024GG9_at; Start 389; Stop 413
gccaagtacaatcgccagagctgga

SEQ ID NO: 244265 - DNA, 25 bp, Artificial
  probe
  misc_feature (1)..(25): SEQ ID NO: 6989; WAN024GG9_at; Start 232; Stop 256
gaggctgaaaagatgaatattgaac

SEQ ID NO: 244266 - DNA, 25 bp, Artificial
  probe
  misc_feature (1)..(25): SEQ ID NO: 6989; WAN024GG9_at; Start 23; Stop 47
tcgaactcattaaagctgggcaaaa

SEQ ID NO: 244267 - DNA, 25 bp, Artificial
  probe
  misc_feature (1)..(25): SEQ ID NO: 6989; WAN024GG9_at; Start 395; Stop 419
tacaatcgccagagctggaagagat

SEQ ID NO: 244268 - DNA, 25 bp, Artificial
  probe
  misc_feature (1)..(25): SEQ ID NO: 6989; WAN024GG9_at; Start 20; Stop 44
gaatcgaactcattaaagctgggca

SEQ ID NO: 244269 - DNA, 25 bp, Artificial
  probe
  misc_feature (1)..(25): SEQ ID NO: 6989; WAN024GG9_at; Start 307; Stop 331
gcaggtgatatgaagagtcacggtt

SEQ ID NO: 244270 - DNA, 25 bp, Artificial
  probe
  misc_feature (1)..(25): SEQ ID NO: 6989; WAN024GG9_at; Start 34; Stop 58
aaagctgggcaaaatccctactttg

SEQ ID NO: 244271 - DNA, 25 bp, Artificial
  probe
  misc_feature (1)..(25): SEQ ID NO: 6989; WAN024GG9_at; Start 203; Stop 227
tagtccaagaagcagtcgccaaagc

SEQ ID NO: 244272 - DNA, 25 bp, Artificial
  probe
  misc_feature (1)..(25): SEQ ID NO: 6989; WAN024GG9_at; Start 11; Stop 35
tctgtcagagaatcgaactcattaa

SEQ ID NO: 244273 - DNA, 25 bp, Artificial
  probe
  misc_feature (1)..(25): SEQ ID NO: 6989; WAN024GG9_at; Start 280; Stop 304
gctcattggcatctttttccccgaa

SEQ ID NO: 244274 - DNA, 25 bp, Artificial
  probe
  misc_feature (1)..(25): SEQ ID NO: 6989; WAN024GG9_at; Start 402; Stop 426
gccagagctggaagagatgattaaa

SEQ ID NO: 244275 - DNA, 25 bp, Artificial
  probe
  misc_feature (1)..(25): SEQ ID NO: 6989; WAN024GG9_at; Start 286; Stop 310
tggcatctttttccccgaagagcag

SEQ ID NO: 244276 - DNA, 25 bp, Artificial
  probe
  misc_feature (1)..(25): SEQ ID NO: 1648; WAN024GGA_at; Start 142; Stop 166
gataaaatcaccgacctcaatgcca

SEQ ID NO: 244277 - DNA, 25 bp, Artificial
  probe
  misc_feature (1)..(25): SEQ ID NO: 1648; WAN024GGA_at; Start 13; Stop 37
gggcaattcaatcttctcttcctta

SEQ ID NO: 244278 - DNA, 25 bp, Artificial
  probe
  misc_feature (1)..(25): SEQ ID NO: 1648; WAN024GGA_at; Start 51; Stop 75
gattgagcaaaatcgccgcactgac

SEQ ID NO: 244279 - DNA, 25 bp, Artificial
  probe
  misc_feature (1)..(25): SEQ ID NO: 1648; WAN024GGA_at; Start 206; Stop 230
aaacgcacttccatattgtcttgcg

SEQ ID NO: 244280 - DNA, 25 bp, Artificial
  probe
  misc_feature (1)..(25): SEQ ID NO: 1648; WAN024GGA_at; Start 193; Stop 217
tactttggcgtccaaacgcacttcc

SEQ ID NO: 244281 - DNA, 25 bp, Artificial
  probe
  misc_feature (1)..(25): SEQ ID NO: 1648; WAN024GGA_at; Start 5; Stop 29
gttgttacgggcaattcaatcttct

SEQ ID NO: 244282 - DNA, 25 bp, Artificial
  probe
  misc_feature (1)..(25): SEQ ID NO: 1648; WAN024GGA_at; Start 182; Stop 206
ttttcactagttactttggcgtcca

SEQ ID NO: 244283 - DNA, 25 bp, Artificial
  probe
  misc_feature (1)..(25): SEQ ID NO: 1648; WAN024GGA_at; Start 257; Stop 281
tagacatggcaagaagtttggtgga

SEQ ID NO: 244284 - DNA, 25 bp, Artificial
  probe
  misc_feature (1)..(25): SEQ ID NO: 1648; WAN024GGA_at; Start 121; Stop 145
gacagttcgtgggtcaaaactgata

SEQ ID NO: 244285 - DNA, 25 bp, Artificial
  probe
  misc_feature (1)..(25): SEQ ID NO: 1648; WAN024GGA_at; Start 167; Stop 191
agagcacgagtttctttttcactag

SEQ ID NO: 244286 - DNA, 25 bp, Artificial
  probe
  misc_feature (1)..(25): SEQ ID NO: 1648; WAN024GGA_at; Start 226; Stop 250
ttgcgtgcgttctgcagttcctgca

SEQ ID NO: 244287 - DNA, 25 bp, Artificial
  probe
  misc_feature (1)..(25): SEQ ID NO: 1648; WAN024GGA_at; Start 117; Stop 141
tcacgacagttcgtgggtcaaaact

SEQ ID NO: 244288 - DNA, 25 bp, Artificial
  probe
  misc_feature (1)..(25): SEQ ID NO: 1648; WAN024GGA_at; Start 252; Stop 276
ccttatagacatggcaagaagtttg

SEQ ID NO: 244289 - DNA, 25 bp, Artificial
  probe
  misc_feature (1)..(25): SEQ ID NO: 1648; WAN024GGA_at; Start 245; Stop 269
cctgcatccttatagacatggcaag

SEQ ID NO: 244290 - DNA, 25 bp, Artificial
  probe
  misc_feature (1)..(25): SEQ ID NO: 1648; WAN024GGA_at; Start 186; Stop 210
cactagttactttggcgtccaaacg

SEQ ID NO: 244291 - DNA, 25 bp, Artificial
  probe
  misc_feature (1)..(25): SEQ ID NO: 1648; WAN024GGA_at; Start 78; Stop 102
tgtcatccaaatggcgagacttgat

SEQ ID NO: 244292 - DNA, 25 bp, Artificial
  probe
  misc_feature (1)..(25): SEQ ID NO: 1648; WAN024GGA_at; Start 34; Stop 58
cttataaatgcgaaggagattgagc

SEQ ID NO: 244293 - DNA, 25 bp, Artificial
  probe
  misc_feature (1)..(25): SEQ ID NO: 1648; WAN024GGA_at; Start 130; Stop 154
tgggtcaaaactgataaaatcaccg

SEQ ID NO: 244294 - DNA, 25 bp, Artificial
  probe
  misc_feature (1)..(25): SEQ ID NO: 1648; WAN024GGA_at; Start 95; Stop 119
gacttgataaaacctgtctctgtca

SEQ ID NO: 244295 - DNA, 25 bp, Artificial
  probe
  misc_feature (1)..(25): SEQ ID NO: 1648; WAN024GGA_at; Start 73; Stop 97
gaccttgtcatccaaatggcgagac

SEQ ID NO: 244296 - DNA, 25 bp, Artificial
  probe
  misc_feature (1)..(25): SEQ ID NO: 1648; WAN024GGA_at; Start 58; Stop 82
caaaatcgccgcactgaccttgtca

SEQ ID NO: 244297 - DNA, 25 bp, Artificial
  probe
  misc_feature (1)..(25): SEQ ID NO: 1648; WAN024GGA_at; Start 100; Stop 124
gataaaacctgtctctgtcacgaca

SEQ ID NO: 244298 - DNA, 25 bp, Artificial
  probe
  misc_feature (1)..(25): SEQ ID NO: 1648; WAN024GGA_at; Start 89; Stop 113
tggcgagacttgataaaacctgtct

SEQ ID NO: 244299 - DNA, 25 bp, Artificial
  probe
  misc_feature (1)..(25): SEQ ID NO: 1648; WAN024GGA_at; Start 109; Stop 133
tgtctctgtcacgacagttcgtggg

SEQ ID NO: 244300 - DNA, 25 bp, Artificial
  probe
  misc_feature (1)..(25): SEQ ID NO: 1648; WAN024GGA_at; Start 154; Stop 178
gacctcaatgccaagagcacgagtt

SEQ ID NO: 244301 - DNA, 25 bp, Artificial
  probe
  misc_feature (1)..(25): SEQ ID NO: 1648; WAN024GGA_at; Start 199; Stop 223
ggcgtccaaacgcacttccatattg

SEQ ID NO: 244302 - DNA, 25 bp, Artificial
  probe
  misc_feature (1)..(25): SEQ ID NO: 1648; WAN024GGA_at; Start 45; Stop 69
gaaggagattgagcaaaatcgccgc

SEQ ID NO: 244303 - DNA, 25 bp, Artificial
  probe
  misc_feature (1)..(25): SEQ ID NO: 1648; WAN024GGA_at; Start 21; Stop 45
caatcttctcttccttataaatgcg

SEQ ID NO: 244304 - DNA, 25 bp, Artificial
  probe
  misc_feature (1)..(25): SEQ ID NO: 1648; WAN024GGA_at; Start 270; Stop 294
aagtttggtggatgaggatggttcc

SEQ ID NO: 244305 - DNA, 25 bp, Artificial
  probe
  misc_feature (1)..(25): SEQ ID NO: 1648; WAN024GGA_at; Start 84; Stop 108
ccaaatggcgagacttgataaaacc

SEQ ID NO: 244306 - DNA, 25 bp, Artificial
  probe
  misc_feature (1)..(25): SEQ ID NO: 1648; WAN024GGA_at; Start 239; Stop 263
gcagttcctgcatccttatagacat

SEQ ID NO: 244307 - DNA, 25 bp, Artificial
  probe
  misc_feature (1)..(25): SEQ ID NO: 1648; WAN024GGA_at; Start 158; Stop 182
tcaatgccaagagcacgagtttctt

SEQ ID NO: 244308 - DNA, 25 bp, Artificial
  probe
  misc_feature (1)..(25): SEQ ID NO: 1648; WAN024GGA_at; Start 216; Stop 240
ccatattgtcttgcgtgcgttctgc

SEQ ID NO: 244309 - DNA, 25 bp, Artificial
  probe
  misc_feature (1)..(25): SEQ ID NO: 1648; WAN024GGA_at; Start 146; Stop 170
aaatcaccgacctcaatgccaagag

SEQ ID NO: 244310 - DNA, 25 bp, Artificial
  probe
  misc_feature (1)..(25): SEQ ID NO: 3540; WAN024GGB_at; Start 136; Stop 160
ggtggtgtcaatgtgaccatcaaag

SEQ ID NO: 244311 - DNA, 25 bp, Artificial
  probe
  misc_feature (1)..(25): SEQ ID NO: 3540; WAN024GGB_at; Start 132; Stop 156
taagggtggtgtcaatgtgaccatc

SEQ ID NO: 244312 - DNA, 25 bp, Artificial
  probe
  misc_feature (1)..(25): SEQ ID NO: 3540; WAN024GGB_at; Start 141; Stop 165
tgtcaatgtgaccatcaaaggtcaa

SEQ ID NO: 244313 - DNA, 25 bp, Artificial
  probe
  misc_feature (1)..(25): SEQ ID NO: 3540; WAN024GGB_at; Start 228; Stop 252
tgtcaaaccagatggtcgtcttaaa

SEQ ID NO: 244314 - DNA, 25 bp, Artificial
  probe
  misc_feature (1)..(25): SEQ ID NO: 3540; WAN024GGB_at; Start 417; Stop 441
ggaagtgcgtttggatgtaaaagta

SEQ ID NO: 244315 - DNA, 25 bp, Artificial
  probe
  misc_feature (1)..(25): SEQ ID NO: 3540; WAN024GGB_at; Start 130; Stop 154
gctaagggtggtgtcaatgtgacca

SEQ ID NO: 244316 - DNA, 25 bp, Artificial
  probe
  misc_feature (1)..(25): SEQ ID NO: 3540; WAN024GGB_at; Start 114; Stop 138
ccagccagttcgcacagctaagggt

SEQ ID NO: 244317 - DNA, 25 bp, Artificial
  probe
  misc_feature (1)..(25): SEQ ID NO: 3540; WAN024GGB_at; Start 225; Stop 249
tgctgtcaaaccagatggtcgtctt

SEQ ID NO: 244318 - DNA, 25 bp, Artificial
  probe
  misc_feature (1)..(25): SEQ ID NO: 3540; WAN024GGB_at; Start 109; Stop 133
ggttaccagccagttcgcacagcta

SEQ ID NO: 244319 - DNA, 25 bp, Artificial
  probe
  misc_feature (1)..(25): SEQ ID NO: 3540; WAN024GGB_at; Start 72; Stop 96
aatttcgaattatttagtcaagact

SEQ ID NO: 244320 - DNA, 25 bp, Artificial
  probe
  misc_feature (1)..(25): SEQ ID NO: 3540; WAN024GGB_at; Start 134; Stop 158
agggtggtgtcaatgtgaccatcaa

SEQ ID NO: 244321 - DNA, 25 bp, Artificial
  probe
  misc_feature (1)..(25): SEQ ID NO: 3540; WAN024GGB_at; Start 115; Stop 139
cagccagttcgcacagctaagggtg

SEQ ID NO: 244322 - DNA, 25 bp, Artificial
  probe
  misc_feature (1)..(25): SEQ ID NO: 3540; WAN024GGB_at; Start 236; Stop 260
cagatggtcgtcttaaattggaccg

SEQ ID NO: 244323 - DNA, 25 bp, Artificial
  probe
  misc_feature (1)..(25): SEQ ID NO: 3540; WAN024GGB_at; Start 234; Stop 258
accagatggtcgtcttaaattggac

SEQ ID NO: 244324 - DNA, 25 bp, Artificial
  probe
  misc_feature (1)..(25): SEQ ID NO: 3540; WAN024GGB_at; Start 125; Stop 149
gcacagctaagggtggtgtcaatgt

SEQ ID NO: 244325 - DNA, 25 bp, Artificial
  probe
  misc_feature (1)..(25): SEQ ID NO: 3540; WAN024GGB_at; Start 437; Stop 461
aagtaagcaatgaaaaagaaactcg

SEQ ID NO: 244326 - DNA, 25 bp, Artificial
  probe
  misc_feature (1)..(25): SEQ ID NO: 3540; WAN024GGB_at; Start 200; Stop 224
tggatacgctgggtgctattgttcg

SEQ ID NO: 244327 - DNA, 25 bp, Artificial
  probe
  misc_feature (1)..(25): SEQ ID NO: 3540; WAN024GGB_at; Start 64; Stop 88
actcgtgaaatttcgaattatttag

SEQ ID NO: 244328 - DNA, 25 bp, Artificial
  probe
  misc_feature (1)..(25): SEQ ID NO: 3540; WAN024GGB_at; Start 420; Stop 444
agtgcgtttggatgtaaaagtaagc

SEQ ID NO: 244329 - DNA, 25 bp, Artificial
  probe
  misc_feature (1)..(25): SEQ ID NO: 3540; WAN024GGB_at; Start 424; Stop 448
cgtttggatgtaaaagtaagcaatg

SEQ ID NO: 244330 - DNA, 25 bp, Artificial
  probe
  misc_feature (1)..(25): SEQ ID NO: 3540; WAN024GGB_at; Start 201; Stop 225
ggatacgctgggtgctattgttcgt

SEQ ID NO: 244331 - DNA, 25 bp, Artificial
  probe
  misc_feature (1)..(25): SEQ ID NO: 3540; WAN024GGB_at; Start 128; Stop 152
cagctaagggtggtgtcaatgtgac

SEQ ID NO: 244332 - DNA, 25 bp, Artificial
  probe
  misc_feature (1)..(25): SEQ ID NO: 3540; WAN024GGB_at; Start 198; Stop 222
tgtggatacgctgggtgctattgtt

SEQ ID NO: 244333 - DNA, 25 bp, Artificial
  probe
  misc_feature (1)..(25): SEQ ID NO: 3540; WAN024GGB_at; Start 120; Stop 144
agttcgcacagctaagggtggtgtc

SEQ ID NO: 244334 - DNA, 25 bp, Artificial
  probe
  misc_feature (1)..(25): SEQ ID NO: 3540; WAN024GGB_at; Start 139; Stop 163
ggtgtcaatgtgaccatcaaaggtc

SEQ ID NO: 244335 - DNA, 25 bp, Artificial
  probe
  misc_feature (1)..(25): SEQ ID NO: 3540; WAN024GGB_at; Start 123; Stop 147
tcgcacagctaagggtggtgtcaat

SEQ ID NO: 244336 - DNA, 25 bp, Artificial
  probe
  misc_feature (1)..(25): SEQ ID NO: 3540; WAN024GGB_at; Start 35; Stop 59
tgacagccatcgcatcgccaacggg

SEQ ID NO: 244337 - DNA, 25 bp, Artificial
  probe
  misc_feature (1)..(25): SEQ ID NO: 3540; WAN024GGB_at; Start 117; Stop 141
gccagttcgcacagctaagggtggt

SEQ ID NO: 244338 - DNA, 25 bp, Artificial
  probe
  misc_feature (1)..(25): SEQ ID NO: 3540; WAN024GGB_at; Start 118; Stop 142
ccagttcgcacagctaagggtggtg

SEQ ID NO: 244339 - DNA, 25 bp, Artificial
  probe
  misc_feature (1)..(25): SEQ ID NO: 3540; WAN024GGB_at; Start 240; Stop 264
tggtcgtcttaaattggaccgtatc

SEQ ID NO: 244340 - DNA, 25 bp, Artificial
  probe
  misc_feature (1)..(25): SEQ ID NO: 3540; WAN024GGB_at; Start 147; Stop 171
tgtgaccatcaaaggtcaaaatgat

SEQ ID NO: 244341 - DNA, 25 bp, Artificial
  probe
  misc_feature (1)..(25): SEQ ID NO: 3540; WAN024GGB_at; Start 231; Stop 255
caaaccagatggtcgtcttaaattg

SEQ ID NO: 244342 - DNA, 25 bp, Artificial
  probe
  misc_feature (1)..(25): SEQ ID NO: 3540; WAN024GGB_at; Start 112; Stop 136
taccagccagttcgcacagctaagg

SEQ ID NO: 244343 - DNA, 25 bp, Artificial
  probe
  misc_feature (1)..(25): SEQ ID NO: 3540; WAN024GGB_at; Start 238; Stop 262
gatggtcgtcttaaattggaccgta

SEQ ID NO: 244344 - DNA, 25 bp, Artificial
  probe
  misc_feature (1)..(25): SEQ ID NO: 1222; WAN024GGC_at; Start 559; Stop 583
agtgcggcgattttgctcaatctcc

SEQ ID NO: 244345 - DNA, 25 bp, Artificial
  probe
  misc_feature (1)..(25): SEQ ID NO: 1222; WAN024GGC_at; Start 920; Stop 944
acgcccttctcggtgctggtataga

SEQ ID NO: 244346 - DNA, 25 bp, Artificial
  probe
  misc_feature (1)..(25): SEQ ID NO: 1222; WAN024GGC_at; Start 547; Stop 571
gatgacaaggtcagtgcggcgattt

SEQ ID NO: 244347 - DNA, 25 bp, Artificial
  probe
  misc_feature (1)..(25): SEQ ID NO: 1222; WAN024GGC_at; Start 807; Stop 831
tcaacatttggtggctttggcgaaa

SEQ ID NO: 244348 - DNA, 25 bp, Artificial
  probe
  misc_feature (1)..(25): SEQ ID NO: 1222; WAN024GGC_at; Start 958; Stop 982
tatgagcgtacccatattgactcgg

SEQ ID NO: 244349 - DNA, 25 bp, Artificial
  probe
  misc_feature (1)..(25): SEQ ID NO: 1222; WAN024GGC_at; Start 222; Stop 246
tgctgtcaaaccagacggccgtctc

SEQ ID NO: 244350 - DNA, 25 bp, Artificial
  probe
  misc_feature (1)..(25): SEQ ID NO: 1222; WAN024GGC_at; Start 762; Stop 786
tatctgtgtcaaggatgcttctgga

SEQ ID NO: 244351 - DNA, 25 bp, Artificial
  probe
  misc_feature (1)..(25): SEQ ID NO: 1222; WAN024GGC_at; Start 422; Stop 446
gtttggacgccaaagtaactagtga

SEQ ID NO: 244352 - DNA, 25 bp, Artificial
  probe
  misc_feature (1)..(25): SEQ ID NO: 1222; WAN024GGC_at; Start 821; Stop 845
ctttggcgaaagagcaagatattcc

SEQ ID NO: 244353 - DNA, 25 bp, Artificial
  probe
  misc_feature (1)..(25): SEQ ID NO: 1222; WAN024GGC_at; Start 905; Stop 929
gggcagaagtcaaacacgcccttct

SEQ ID NO: 244354 - DNA, 25 bp, Artificial
  probe
  misc_feature (1)..(25): SEQ ID NO: 1222; WAN024GGC_at; Start 656; Stop 680
tgggacacggtgcaaactctaacat

SEQ ID NO: 244355 - DNA, 25 bp, Artificial
  probe
  misc_feature (1)..(25): SEQ ID NO: 1222; WAN024GGC_at; Start 496; Stop 520
gacccacgaactgtcgtgacagaga

SEQ ID NO: 244356 - DNA, 25 bp, Artificial
  probe
  misc_feature (1)..(25): SEQ ID NO: 1222; WAN024GGC_at; Start 512; Stop 536
tgacagagacaggttttatcaagtc

SEQ ID NO: 244357 - DNA, 25 bp, Artificial
  probe
  misc_feature (1)..(25): SEQ ID NO: 1222; WAN024GGC_at; Start 775; Stop 799
gatgcttctggaccttatcactatg

SEQ ID NO: 244358 - DNA, 25 bp, Artificial
  probe
  misc_feature (1)..(25): SEQ ID NO: 1222; WAN024GGC_at; Start 869; Stop 893
tttatggttcggacgcttcagcggc

SEQ ID NO: 244359 - DNA, 25 bp, Artificial
  probe
  misc_feature (1)..(25): SEQ ID NO: 1222; WAN024GGC_at; Start 38; Stop 62
ccattgcgtcgccaacaggctttac

SEQ ID NO: 244360 - DNA, 25 bp, Artificial
  probe
  misc_feature (1)..(25): SEQ ID NO: 1222; WAN024GGC_at; Start 989; Stop 1013
caacagaacgaatggtcgatgctta

SEQ ID NO: 244361 - DNA, 25 bp, Artificial
  probe
  misc_feature (1)..(25): SEQ ID NO: 1222; WAN024GGC_at; Start 718; Stop 742
ggagccatgggagatgaccagcaaa

SEQ ID NO: 244362 - DNA, 25 bp, Artificial
  probe
  misc_feature (1)..(25): SEQ ID NO: 1222; WAN024GGC_at; Start 733; Stop 757
gaccagcaaacagacgaatatacag

SEQ ID NO: 244363 - DNA, 25 bp, Artificial
  probe
  misc_feature (1)..(25): SEQ ID NO: 1222; WAN024GGC_at; Start 115; Stop 139
ccggttcgcacatccaagggcggtg

SEQ ID NO: 244364 - DNA, 25 bp, Artificial
  probe
  misc_feature (1)..(25): SEQ ID NO: 1222; WAN024GGC_at; Start 974; Stop 998
ttgactcggtgatcgcaacagaacg

SEQ ID NO: 244365 - DNA, 25 bp, Artificial
  probe
  misc_feature (1)..(25): SEQ ID NO: 1222; WAN024GGC_at; Start 843; Stop 867
tccatttaagctggatatctatcca

SEQ ID NO: 244366 - DNA, 25 bp, Artificial
  probe
  misc_feature (1)..(25): SEQ ID NO: 1222; WAN024GGC_at; Start 197; Stop 221
tagatacgcttggtgctattgtccg

SEQ ID NO: 244367 - DNA, 25 bp, Artificial
  probe
  misc_feature (1)..(25): SEQ ID NO: 1222; WAN024GGC_at; Start 238; Stop 262
ggccgtctcaaaatggaccgtatcg

SEQ ID NO: 244368 - DNA, 25 bp, Artificial
  probe
  misc_feature (1)..(25): SEQ ID NO: 1222; WAN024GGC_at; Start 127; Stop 151
tccaagggcggtgtcaatgtaacta

SEQ ID NO: 244369 - DNA, 25 bp, Artificial
  probe
  misc_feature (1)..(25): SEQ ID NO: 1222; WAN024GGC_at; Start 56; Stop 80
gctttactcgtgagattgcggacta

SEQ ID NO: 244370 - DNA, 25 bp, Artificial
  probe
  misc_feature (1)..(25): SEQ ID NO: 1222; WAN024GGC_at; Start 532; Stop 556
aagtctcgccatttggatgacaagg

SEQ ID NO: 244371 - DNA, 25 bp, Artificial
  probe
  misc_feature (1)..(25): SEQ ID NO: 1222; WAN024GGC_at; Start 183; Stop 207
tgtgactgcccatgtagatacgctt

SEQ ID NO: 244372 - DNA, 25 bp, Artificial
  probe
  misc_feature (1)..(25): SEQ ID NO: 1222; WAN024GGC_at; Start 798; Stop 822
tgacttccgtcaacatttggtggct

SEQ ID NO: 244373 - DNA, 25 bp, Artificial
  probe
  misc_feature (1)..(25): SEQ ID NO: 1222; WAN024GGC_at; Start 882; Stop 906
cgcttcagcggctatgtctgcaggg

SEQ ID NO: 244374 - DNA, 25 bp, Artificial
  probe
  misc_feature (1)..(25): SEQ ID NO: 1222; WAN024GGC_at; Start 941; Stop 965
tagagtctagccattcctatgagcg

SEQ ID NO: 244375 - DNA, 25 bp, Artificial
  probe
  misc_feature (1)..(25): SEQ ID NO: 1222; WAN024GGC_at; Start 594; Stop 618
taaggaagagaagattgaattgccc

SEQ ID NO: 244376 - DNA, 25 bp, Artificial
  probe
  misc_feature (1)..(25): SEQ ID NO: 1222; WAN024GGC_at; Start 481; Stop 505
gattttatcagttttgacccacgaa

SEQ ID NO: 244377 - DNA, 25 bp, Artificial
  probe
  misc_feature (1)..(25): SEQ ID NO: 1222; WAN024GGC_at; Start 675; Stop 699
taacattcctgctcaggtagtagaa

SEQ ID NO: 244378 - DNA, 25 bp, Artificial
  probe
  misc_feature (1)..(25): SEQ ID NO: 2110; WAN024GGD_at; Start 39; Stop 63
ccttatttgtcagagaattgacctc

SEQ ID NO: 244379 - DNA, 25 bp, Artificial
  probe
  misc_feature (1)..(25): SEQ ID NO: 2110; WAN024GGD_at; Start 132; Stop 156
ccagtattttgaaggctatagtctc

SEQ ID NO: 244380 - DNA, 25 bp, Artificial
  probe
  misc_feature (1)..(25): SEQ ID NO: 2110; WAN024GGD_at; Start 234; Stop 258
tttagtccaagaggcagttgccaag

SEQ ID NO: 244381 - DNA, 25 bp, Artificial
  probe
  misc_feature (1)..(25): SEQ ID NO: 2110; WAN024GGD_at; Start 239; Stop 263
tccaagaggcagttgccaaggcctt

SEQ ID NO: 244382 - DNA, 25 bp, Artificial
  probe
  misc_feature (1)..(25): SEQ ID NO: 2110; WAN024GGD_at; Start 123; Stop 147
tggagaccaccagtattttgaaggc

SEQ ID NO: 244383 - DNA, 25 bp, Artificial
  probe
  misc_feature (1)..(25): SEQ ID NO: 2110; WAN024GGD_at; Start 464; Stop 488
tatcgtcagaagtagataaactatt

SEQ ID NO: 244384 - DNA, 25 bp, Artificial
  probe
  misc_feature (1)..(25): SEQ ID NO: 2110; WAN024GGD_at; Start 157; Stop 181
tttctagccaaggagcatgtcagcg

SEQ ID NO: 244385 - DNA, 25 bp, Artificial
  probe
  misc_feature (1)..(25): SEQ ID NO: 2110; WAN024GGD_at; Start 50; Stop 74
agagaattgacctcatcaagaagga

SEQ ID NO: 244386 - DNA, 25 bp, Artificial
  probe
  misc_feature (1)..(25): SEQ ID NO: 2110; WAN024GGD_at; Start 209; Stop 233
gactccgttttctagaagaaatgag

SEQ ID NO: 244387 - DNA, 25 bp, Artificial
  probe
  misc_feature (1)..(25): SEQ ID NO: 2110; WAN024GGD_at; Start 189; Stop 213
ccatttgaaaaaggagacaagactc

SEQ ID NO: 244388 - DNA, 25 bp, Artificial
  probe
  misc_feature (1)..(25): SEQ ID NO: 2110; WAN024GGD_at; Start 335; Stop 359
gacggacaggtgatatgaatggtca

SEQ ID NO: 244389 - DNA, 25 bp, Artificial
  probe
  misc_feature (1)..(25): SEQ ID NO: 2110; WAN024GGD_at; Start 330; Stop 354
tccacgacggacaggtgatatgaat

SEQ ID NO: 244390 - DNA, 25 bp, Artificial
  probe
  misc_feature (1)..(25): SEQ ID NO: 2110; WAN024GGD_at; Start 60; Stop 84
cctcatcaagaaggaagaaaatcct

SEQ ID NO: 244391 - DNA, 25 bp, Artificial
  probe
  misc_feature (1)..(25): SEQ ID NO: 2110; WAN024GGD_at; Start 110; Stop 134
gctatcttgtggttggagaccacca

SEQ ID NO: 244392 - DNA, 25 bp, Artificial
  probe
  misc_feature (1)..(25): SEQ ID NO: 2110; WAN024GGD_at; Start 161; Stop 185
tagccaaggagcatgtcagcgaatt

SEQ ID NO: 244393 - DNA, 25 bp, Artificial
  probe
  misc_feature (1)..(25): SEQ ID NO: 2110; WAN024GGD_at; Start 90; Stop 114
tgtcaaagagttggaaacaggctat

SEQ ID NO: 244394 - DNA, 25 bp, Artificial
  probe
  misc_feature (1)..(25): SEQ ID NO: 2110; WAN024GGD_at; Start 300; Stop 324
tggcgatgctcatcttcattggcat

SEQ ID NO: 244395 - DNA, 25 bp, Artificial
  probe
  misc_feature (1)..(25): SEQ ID NO: 2110; WAN024GGD_at; Start 179; Stop 203
gcgaattgcaccatttgaaaaagga

SEQ ID NO: 244396 - DNA, 25 bp, Artificial
  probe
  misc_feature (1)..(25): SEQ ID NO: 2110; WAN024GGD_at; Start 30; Stop 54
taatatgtgccttatttgtcagaga

SEQ ID NO: 244397 - DNA, 25 bp, Artificial
  probe
  misc_feature (1)..(25): SEQ ID NO: 2110; WAN024GGD_at; Start 169; Stop 193
gagcatgtcagcgaattgcaccatt

SEQ ID NO: 244398 - DNA, 25 bp, Artificial
  probe
  misc_feature (1)..(25): SEQ ID NO: 2110; WAN024GGD_at; Start 148; Stop 172
tatagtctctttctagccaaggagc

SEQ ID NO: 244399 - DNA, 25 bp, Artificial
  probe
  misc_feature (1)..(25): SEQ ID NO: 2110; WAN024GGD_at; Start 387; Stop 411
gtgggttccctttgaagaaatgaca

SEQ ID NO: 244400 - DNA, 25 bp, Artificial
  probe
  misc_feature (1)..(25): SEQ ID NO: 2110; WAN024GGD_at; Start 324; Stop 348
tctgtttccacgacggacaggtgat

SEQ ID NO: 244401 - DNA, 25 bp, Artificial
  probe
  misc_feature (1)..(25): SEQ ID NO: 2110; WAN024GGD_at; Start 295; Stop 319
ggaaatggcgatgctcatcttcatt

SEQ ID NO: 244402 - DNA, 25 bp, Artificial
  probe
  misc_feature (1)..(25): SEQ ID NO: 2110; WAN024GGD_at; Start 253; Stop 277
gccaaggcctttgctgctgagaaaa

SEQ ID NO: 244403 - DNA, 25 bp, Artificial
  probe
  misc_feature (1)..(25): SEQ ID NO: 2110; WAN024GGD_at; Start 316; Stop 340
cattggcatctgtttccacgacgga

SEQ ID NO: 244404 - DNA, 25 bp, Artificial
  probe
  misc_feature (1)..(25): SEQ ID NO: 2110; WAN024GGD_at; Start 273; Stop 297
gaaaatgaatatcgaactgctagga

SEQ ID NO: 244405 - DNA, 25 bp, Artificial
  probe
  misc_feature (1)..(25): SEQ ID NO: 2110; WAN024GGD_at; Start 19; Stop 43
cgttggtggactaatatgtgcctta

SEQ ID NO: 244406 - DNA, 25 bp, Artificial
  probe
  misc_feature (1)..(25): SEQ ID NO: 2110; WAN024GGD_at; Start 204; Stop 228
gacaagactccgttttctagaagaa

SEQ ID NO: 244407 - DNA, 25 bp, Artificial
  probe
  misc_feature (1)..(25): SEQ ID NO: 2110; WAN024GGD_at; Start 107; Stop 131
caggctatcttgtggttggagacca

SEQ ID NO: 244408 - DNA, 25 bp, Artificial
  probe
  misc_feature (1)..(25): SEQ ID NO: 2110; WAN024GGD_at; Start 259; Stop 283
gcctttgctgctgagaaaatgaata

SEQ ID NO: 244409 - DNA, 25 bp, Artificial
  probe
  misc_feature (1)..(25): SEQ ID NO: 2110; WAN024GGD_at; Start 351; Stop 375
gaatggtcatggtctcaagggtcgt

SEQ ID NO: 244410 - DNA, 25 bp, Artificial
  probe
  misc_feature (1)..(25): SEQ ID NO: 2110; WAN024GGD_at; Start 97; Stop 121
gagttggaaacaggctatcttgtgg

SEQ ID NO: 244411 - DNA, 25 bp, Artificial
  probe
  misc_feature (1)..(25): SEQ ID NO: 2110; WAN024GGD_at; Start 75; Stop 99
agaaaatccttactttgtcaaagag

SEQ ID NO: 244412 - DNA, 25 bp, Artificial
  probe
  misc_feature (1)..(25): SEQ ID NO: 4325; WAN024GGE_at; Start 276; Stop 300
tgagtttttcatctactgcctttaa

SEQ ID NO: 244413 - DNA, 25 bp, Artificial
  probe
  misc_feature (1)..(25): SEQ ID NO: 4325; WAN024GGE_at; Start 72; Stop 96
cgatctggtcaagagaagtcaaagg

SEQ ID NO: 244414 - DNA, 25 bp, Artificial
  probe
  misc_feature (1)..(25): SEQ ID NO: 4325; WAN024GGE_at; Start 197; Stop 221
gcagcctgatagtgaccagaatcaa

SEQ ID NO: 244415 - DNA, 25 bp, Artificial
  probe
  misc_feature (1)..(25): SEQ ID NO: 4325; WAN024GGE_at; Start 232; Stop 256
gatgctctcccaggcggttctttgg

SEQ ID NO: 244416 - DNA, 25 bp, Artificial
  probe
  misc_feature (1)..(25): SEQ ID NO: 4325; WAN024GGE_at; Start 48; Stop 72
tatcctcttgtgttgttttaccagc

SEQ ID NO: 244417 - DNA, 25 bp, Artificial
  probe
  misc_feature (1)..(25): SEQ ID NO: 4325; WAN024GGE_at; Start 68; Stop 92
ccagcgatctggtcaagagaagtca

SEQ ID NO: 244418 - DNA, 25 bp, Artificial
  probe
  misc_feature (1)..(25): SEQ ID NO: 4325; WAN024GGE_at; Start 55; Stop 79
ttgtgttgttttaccagcgatctgg

SEQ ID NO: 244419 - DNA, 25 bp, Artificial
  probe
  misc_feature (1)..(25): SEQ ID NO: 4325; WAN024GGE_at; Start 126; Stop 150
gattgttggaaattggaagcgagta

SEQ ID NO: 244420 - DNA, 25 bp, Artificial
  probe
  misc_feature (1)..(25): SEQ ID NO: 4325; WAN024GGE_at; Start 177; Stop 201
tgtaactcaagttattggccgcagc

SEQ ID NO: 244421 - DNA, 25 bp, Artificial
  probe
  misc_feature (1)..(25): SEQ ID NO: 4325; WAN024GGE_at; Start 264; Stop 288
tctcgtagtcgctgagtttttcatc

SEQ ID NO: 244422 - DNA, 25 bp, Artificial
  probe
  misc_feature (1)..(25): SEQ ID NO: 4325; WAN024GGE_at; Start 148; Stop 172
gtaaaggtatttttcagcacgctct

SEQ ID NO: 244423 - DNA, 25 bp, Artificial
  probe
  misc_feature (1)..(25): SEQ ID NO: 4325; WAN024GGE_at; Start 206; Stop 230
tagtgaccagaatcaagtcctggga

SEQ ID NO: 244424 - DNA, 25 bp, Artificial
  probe
  misc_feature (1)..(25): SEQ ID NO: 4325; WAN024GGE_at; Start 256; Stop 280
gaattgaatctcgtagtcgctgagt

SEQ ID NO: 244425 - DNA, 25 bp, Artificial
  probe
  misc_feature (1)..(25): SEQ ID NO: 4325; WAN024GGE_at; Start 188; Stop 212
ttattggccgcagcctgatagtgac

SEQ ID NO: 244426 - DNA, 25 bp, Artificial
  probe
  misc_feature (1)..(25): SEQ ID NO: 4325; WAN024GGE_at; Start 132; Stop 156
tggaaattggaagcgagtaaaggta

SEQ ID NO: 244427 - DNA, 25 bp, Artificial
  probe
  misc_feature (1)..(25): SEQ ID NO: 4325; WAN024GGE_at; Start 13; Stop 37
ccagttattgatgaattgagcgtta

SEQ ID NO: 244428 - DNA, 25 bp, Artificial
  probe
  misc_feature (1)..(25): SEQ ID NO: 4325; WAN024GGE_at; Start 25; Stop 49
gaattgagcgttagaagttccggta

SEQ ID NO: 244429 - DNA, 25 bp, Artificial
  probe
  misc_feature (1)..(25): SEQ ID NO: 4325; WAN024GGE_at; Start 193; Stop 217
ggccgcagcctgatagtgaccagaa

SEQ ID NO: 244430 - DNA, 25 bp, Artificial
  probe
  misc_feature (1)..(25): SEQ ID NO: 4325; WAN024GGE_at; Start 91; Stop 115
caaaggatttttcttgttgctgaca

SEQ ID NO: 244431 - DNA, 25 bp, Artificial
  probe
  misc_feature (1)..(25): SEQ ID NO: 4325; WAN024GGE_at; Start 271; Stop 295
gtcgctgagtttttcatctactgcc

SEQ ID NO: 244432 - DNA, 25 bp, Artificial
  probe
  misc_feature (1)..(25): SEQ ID NO: 4325; WAN024GGE_at; Start 251; Stop 275
ctttggaattgaatctcgtagtcgc

SEQ ID NO: 244433 - DNA, 25 bp, Artificial
  probe
  misc_feature (1)..(25): SEQ ID NO: 4325; WAN024GGE_at; Start 1; Stop 25
gtgtttctgattccagttattgatg

SEQ ID NO: 244434 - DNA, 25 bp, Artificial
  probe
  misc_feature (1)..(25): SEQ ID NO: 4325; WAN024GGE_at; Start 163; Stop 187
agcacgctcttttgtgtaactcaag

SEQ ID NO: 244435 - DNA, 25 bp, Artificial
  probe
  misc_feature (1)..(25): SEQ ID NO: 4325; WAN024GGE_at; Start 101; Stop 125
ttcttgttgctgacaaggacgaggg

SEQ ID NO: 244436 - DNA, 25 bp, Artificial
  probe
  misc_feature (1)..(25): SEQ ID NO: 4325; WAN024GGE_at; Start 145; Stop 169
cgagtaaaggtatttttcagcacgc

SEQ ID NO: 244437 - DNA, 25 bp, Artificial
  probe
  misc_feature (1)..(25): SEQ ID NO: 4325; WAN024GGE_at; Start 218; Stop 242
tcaagtcctgggaagatgctctccc

SEQ ID NO: 244438 - DNA, 25 bp, Artificial
  probe
  misc_feature (1)..(25): SEQ ID NO: 4325; WAN024GGE_at; Start 239; Stop 263
tcccaggcggttctttggaattgaa

SEQ ID NO: 244439 - DNA, 25 bp, Artificial
  probe
  misc_feature (1)..(25): SEQ ID NO: 4325; WAN024GGE_at; Start 213; Stop 237
cagaatcaagtcctgggaagatgct

SEQ ID NO: 244440 - DNA, 25 bp, Artificial
  probe
  misc_feature (1)..(25): SEQ ID NO: 4325; WAN024GGE_at; Start 180; Stop 204
aactcaagttattggccgcagcctg

SEQ ID NO: 244441 - DNA, 25 bp, Artificial
  probe
  misc_feature (1)..(25): SEQ ID NO: 4325; WAN024GGE_at; Start 76; Stop 100
ctggtcaagagaagtcaaaggattt

SEQ ID NO: 244442 - DNA, 25 bp, Artificial
  probe
  misc_feature (1)..(25): SEQ ID NO: 4325; WAN024GGE_at; Start 29; Stop 53
tgagcgttagaagttccggtatcct

SEQ ID NO: 244443 - DNA, 25 bp, Artificial
  probe
  misc_feature (1)..(25): SEQ ID NO: 4325; WAN024GGE_at; Start 203; Stop 227
tgatagtgaccagaatcaagtcctg

SEQ ID NO: 244444 - DNA, 25 bp, Artificial
  probe
  misc_feature (1)..(25): SEQ ID NO: 4325; WAN024GGE_at; Start 38; Stop 62
gaagttccggtatcctcttgtgttg

SEQ ID NO: 244445 - DNA, 25 bp, Artificial
  probe
  misc_feature (1)..(25): SEQ ID NO: 4325; WAN024GGE_at; Start 227; Stop 251
gggaagatgctctcccaggcggttc

SEQ ID NO: 244446 - DNA, 25 bp, Artificial
  probe
  misc_feature (1)..(25): SEQ ID NO: 5002; WAN024GGF_at; Start 398; Stop 422
tgacttctcttgaccagatcgctgg

SEQ ID NO: 244447 - DNA, 25 bp, Artificial
  probe
  misc_feature (1)..(25): SEQ ID NO: 5002; WAN024GGF_at; Start 209; Stop 233
aactcagcgactacgagattcaatt

SEQ ID NO: 244448 - DNA, 25 bp, Artificial
  probe
  misc_feature (1)..(25): SEQ ID NO: 5002; WAN024GGF_at; Start 271; Stop 295
gattctggtcactatcaggctgcgg

SEQ ID NO: 244449 - DNA, 25 bp, Artificial
  probe
  misc_feature (1)..(25): SEQ ID NO: 5002; WAN024GGF_at; Start 728; Stop 752
aagaactctatcaagacggaaccct

SEQ ID NO: 244450 - DNA, 25 bp, Artificial
  probe
  misc_feature (1)..(25): SEQ ID NO: 5002; WAN024GGF_at; Start 257; Stop 281
tcttcccaggacttgattctggtca

SEQ ID NO: 244451 - DNA, 25 bp, Artificial
  probe
  misc_feature (1)..(25): SEQ ID NO: 5002; WAN024GGF_at; Start 609; Stop 633
caaggaccgtggtttagacctctca

SEQ ID NO: 244452 - DNA, 25 bp, Artificial
  probe
  misc_feature (1)..(25): SEQ ID NO: 5002; WAN024GGF_at; Start 714; Stop 738
tgataaagcgctcaaagaactctat

SEQ ID NO: 244453 - DNA, 25 bp, Artificial
  probe
  misc_feature (1)..(25): SEQ ID NO: 5002; WAN024GGF_at; Start 623; Stop 647
tagacctctcagtcgttgatttacc

SEQ ID NO: 244454 - DNA, 25 bp, Artificial
  probe
  misc_feature (1)..(25): SEQ ID NO: 5002; WAN024GGF_at; Start 562; Stop 586
gagtttgatttcctagtttttgaca

SEQ ID NO: 244455 - DNA, 25 bp, Artificial
  probe
  misc_feature (1)..(25): SEQ ID NO: 5002; WAN024GGF_at; Start 195; Stop 219
ggcagtagatgaaaaactcagcgac

SEQ ID NO: 244456 - DNA, 25 bp, Artificial
  probe
  misc_feature (1)..(25): SEQ ID NO: 5002; WAN024GGF_at; Start 438; Stop 462
ggataccggaacttctaacgctcaa

SEQ ID NO: 244457 - DNA, 25 bp, Artificial
  probe
  misc_feature (1)..(25): SEQ ID NO: 5002; WAN024GGF_at; Start 670; Stop 694
tatatcattttctcaagcgaccaaa

SEQ ID NO: 244458 - DNA, 25 bp, Artificial
  probe
  misc_feature (1)..(25): SEQ ID NO: 5002; WAN024GGF_at; Start 423; Stop 447
taaaacaacacaagaggataccgga

SEQ ID NO: 244459 - DNA, 25 bp, Artificial
  probe
  misc_feature (1)..(25): SEQ ID NO: 5002; WAN024GGF_at; Start 319; Stop 343
gagcgtgctgaaaaatacctttact

SEQ ID NO: 244460 - DNA, 25 bp, Artificial
  probe
  misc_feature (1)..(25): SEQ ID NO: 5002; WAN024GGF_at; Start 304; Stop 328
ttgagttacacaaaagagcgtgctg

SEQ ID NO: 244461 - DNA, 25 bp, Artificial
  probe
  misc_feature (1)..(25): SEQ ID NO: 5002; WAN024GGF_at; Start 130; Stop 154
gacgtgccaccatttgactacgaag

SEQ ID NO: 244462 - DNA, 25 bp, Artificial
  probe
  misc_feature (1)..(25): SEQ ID NO: 5002; WAN024GGF_at; Start 531; Stop 555
tggtaaacgaatcctagaccttgct

SEQ ID NO: 244463 - DNA, 25 bp, Artificial
  probe
  misc_feature (1)..(25): SEQ ID NO: 5002; WAN024GGF_at; Start 597; Stop 621
tcaaaagattatcaaggaccgtggt

SEQ ID NO: 244464 - DNA, 25 bp, Artificial
  probe
  misc_feature (1)..(25): SEQ ID NO: 5002; WAN024GGF_at; Start 483; Stop 507
gaaacacactgataatcccgctaca

SEQ ID NO: 244465 - DNA, 25 bp, Artificial
  probe
  misc_feature (1)..(25): SEQ ID NO: 5002; WAN024GGF_at; Start 793; Stop 817
ccagatcaatctcagttacaataac

SEQ ID NO: 244466 - DNA, 25 bp, Artificial
  probe
  misc_feature (1)..(25): SEQ ID NO: 5002; WAN024GGF_at; Start 120; Stop 144
tacagctggcgacgtgccaccattt

SEQ ID NO: 244467 - DNA, 25 bp, Artificial
  probe
  misc_feature (1)..(25): SEQ ID NO: 5002; WAN024GGF_at; Start 583; Stop 607
gacaaggtatccgttcaaaagatta

SEQ ID NO: 244468 - DNA, 25 bp, Artificial
  probe
  misc_feature (1)..(25): SEQ ID NO: 5002; WAN024GGF_at; Start 7; Stop 31
ggagacagtatgaaaaaatttagcc

SEQ ID NO: 244469 - DNA, 25 bp, Artificial
  probe
  misc_feature (1)..(25): SEQ ID NO: 5002; WAN024GGF_at; Start 35; Stop 59
tactagctatcctaccatttttggt

SEQ ID NO: 244470 - DNA, 25 bp, Artificial
  probe
  misc_feature (1)..(25): SEQ ID NO: 5002; WAN024GGF_at; Start 412; Stop 436
cagatcgctggtaaaacaacacaag

SEQ ID NO: 244471 - DNA, 25 bp, Artificial
  probe
  misc_feature (1)..(25): SEQ ID NO: 5002; WAN024GGF_at; Start 375; Stop 399
tgtcagcaacaagaaaaatcctttg

SEQ ID NO: 244472 - DNA, 25 bp, Artificial
  probe
  misc_feature (1)..(25): SEQ ID NO: 5002; WAN024GGF_at; Start 390; Stop 414
aaatcctttgacttctcttgaccag

SEQ ID NO: 244473 - DNA, 25 bp, Artificial
  probe
  misc_feature (1)..(25): SEQ ID NO: 5002; WAN024GGF_at; Start 545; Stop 569
tagaccttgctaacggagagtttga

SEQ ID NO: 244474 - DNA, 25 bp, Artificial
  probe
  misc_feature (1)..(25): SEQ ID NO: 5002; WAN024GGF_at; Start 105; Stop 129
gacaatcgtccttgctacagctggc

SEQ ID NO: 244475 - DNA, 25 bp, Artificial
  probe
  misc_feature (1)..(25): SEQ ID NO: 5002; WAN024GGF_at; Start 754; Stop 778
gaaaaactcagcaatacctatctag

SEQ ID NO: 244476 - DNA, 25 bp, Artificial
  probe
  misc_feature (1)..(25): SEQ ID NO: 5002; WAN024GGF_at; Start 778; Stop 802
ggtggttcttacctcccagatcaat

SEQ ID NO: 244477 - DNA, 25 bp, Artificial
  probe
  misc_feature (1)..(25): SEQ ID NO: 5002; WAN024GGF_at; Start 517; Stop 541
tctggtgaggatattggtaaacgaa

SEQ ID NO: 244478 - DNA, 25 bp, Artificial
  probe
  misc_feature (1)..(25): SEQ ID NO: 5002; WAN024GGF_at; Start 278; Stop 302
gtcactatcaggctgcggccaataa

SEQ ID NO: 244479 - DNA, 25 bp, Artificial
  probe
  misc_feature (1)..(25): SEQ ID NO: 5002; WAN024GGF_at; Start 651; Stop 675
tgcagatagccccagcaattatatc

SEQ ID NO: 244480 - DNA, 25 bp, Artificial
  probe
  misc_feature (1)..(25): SEQ ID NO: 4233; WAN024GGG_at; Start 81; Stop 105
gcacagcctctgcaacgactctagg

SEQ ID NO: 244481 - DNA, 25 bp, Artificial
  probe
  misc_feature (1)..(25): SEQ ID NO: 4233; WAN024GGG_at; Start 123; Stop 147
tctcatccacactggcttccttgat

SEQ ID NO: 244482 - DNA, 25 bp, Artificial
  probe
  misc_feature (1)..(25): SEQ ID NO: 4233; WAN024GGG_at; Start 63; Stop 87
gcgggttcaactttctttgcacagc

SEQ ID NO: 244483 - DNA, 25 bp, Artificial
  probe
  misc_feature (1)..(25): SEQ ID NO: 4233; WAN024GGG_at; Start 84; Stop 108
cagcctctgcaacgactctaggtac

SEQ ID NO: 244484 - DNA, 25 bp, Artificial
  probe
  misc_feature (1)..(25): SEQ ID NO: 4233; WAN024GGG_at; Start 74; Stop 98
tttctttgcacagcctctgcaacga

SEQ ID NO: 244485 - DNA, 25 bp, Artificial
  probe
  misc_feature (1)..(25): SEQ ID NO: 4233; WAN024GGG_at; Start 89; Stop 113
tctgcaacgactctaggtaccccaa

SEQ ID NO: 244486 - DNA, 25 bp, Artificial
  probe
  misc_feature (1)..(25): SEQ ID NO: 4233; WAN024GGG_at; Start 78; Stop 102
tttgcacagcctctgcaacgactct

SEQ ID NO: 244487 - DNA, 25 bp, Artificial
  probe
  misc_feature (1)..(25): SEQ ID NO: 4233; WAN024GGG_at; Start 66; Stop 90
ggttcaactttctttgcacagcctc

SEQ ID NO: 244488 - DNA, 25 bp, Artificial
  probe
  misc_feature (1)..(25): SEQ ID NO: 4233; WAN024GGG_at; Start 68; Stop 92
ttcaactttctttgcacagcctctg

SEQ ID NO: 244489 - DNA, 25 bp, Artificial
  probe
  misc_feature (1)..(25): SEQ ID NO: 4233; WAN024GGG_at; Start 13; Stop 37
cgtttggtaatctactctttcttct

SEQ ID NO: 244490 - DNA, 25 bp, Artificial
  probe
  misc_feature (1)..(25): SEQ ID NO: 4233; WAN024GGG_at; Start 20; Stop 44
taatctactctttcttctgctactt

SEQ ID NO: 244491 - DNA, 25 bp, Artificial
  probe
  misc_feature (1)..(25): SEQ ID NO: 4233; WAN024GGG_at; Start 76; Stop 100
tctttgcacagcctctgcaacgact

SEQ ID NO: 244492 - DNA, 25 bp, Artificial
  probe
  misc_feature (1)..(25): SEQ ID NO: 4233; WAN024GGG_at; Start 82; Stop 106
cacagcctctgcaacgactctaggt

SEQ ID NO: 244493 - DNA, 25 bp, Artificial
  probe
  misc_feature (1)..(25): SEQ ID NO: 4233; WAN024GGG_at; Start 71; Stop 95
aactttctttgcacagcctctgcaa

SEQ ID NO: 244494 - DNA, 25 bp, Artificial
  probe
  misc_feature (1)..(25): SEQ ID NO: 4233; WAN024GGG_at; Start 132; Stop 156
cactggcttccttgattttggtcaa

SEQ ID NO: 244495 - DNA, 25 bp, Artificial
  probe
  misc_feature (1)..(25): SEQ ID NO: 4233; WAN024GGG_at; Start 115; Stop 139
ttcgacaatctcatccacactggct

SEQ ID NO: 244496 - DNA, 25 bp, Artificial
  probe
  misc_feature (1)..(25): SEQ ID NO: 4233; WAN024GGG_at; Start 49; Stop 73
caaggcttctccctgcgggttcaac

SEQ ID NO: 244497 - DNA, 25 bp, Artificial
  probe
  misc_feature (1)..(25): SEQ ID NO: 4233; WAN024GGG_at; Start 100; Stop 124
tctaggtaccccaacttcgacaatc

SEQ ID NO: 244498 - DNA, 25 bp, Artificial
  probe
  misc_feature (1)..(25): SEQ ID NO: 4233; WAN024GGG_at; Start 113; Stop 137
acttcgacaatctcatccacactgg

SEQ ID NO: 244499 - DNA, 25 bp, Artificial
  probe
  misc_feature (1)..(25): SEQ ID NO: 4233; WAN024GGG_at; Start 91; Stop 115
tgcaacgactctaggtaccccaact

SEQ ID NO: 244500 - DNA, 25 bp, Artificial
  probe
  misc_feature (1)..(25): SEQ ID NO: 4233; WAN024GGG_at; Start 51; Stop 75
aggcttctccctgcgggttcaactt

SEQ ID NO: 244501 - DNA, 25 bp, Artificial
  probe
  misc_feature (1)..(25): SEQ ID NO: 4233; WAN024GGG_at; Start 128; Stop 152
tccacactggcttccttgattttgg

SEQ ID NO: 244502 - DNA, 25 bp, Artificial
  probe
  misc_feature (1)..(25): SEQ ID NO: 4233; WAN024GGG_at; Start 116; Stop 140
tcgacaatctcatccacactggctt

SEQ ID NO: 244503 - DNA, 25 bp, Artificial
  probe
  misc_feature (1)..(25): SEQ ID NO: 4233; WAN024GGG_at; Start 102; Stop 126
taggtaccccaacttcgacaatctc

SEQ ID NO: 244504 - DNA, 25 bp, Artificial
  probe
  misc_feature (1)..(25): SEQ ID NO: 4233; WAN024GGG_at; Start 65; Stop 89
gggttcaactttctttgcacagcct

SEQ ID NO: 244505 - DNA, 25 bp, Artificial
  probe
  misc_feature (1)..(25): SEQ ID NO: 4233; WAN024GGG_at; Start 136; Stop 160
ggcttccttgattttggtcaaagac

SEQ ID NO: 244506 - DNA, 25 bp, Artificial
  probe
  misc_feature (1)..(25): SEQ ID NO: 4233; WAN024GGG_at; Start 59; Stop 83
ccctgcgggttcaactttctttgca

SEQ ID NO: 244507 - DNA, 25 bp, Artificial
  probe
  misc_feature (1)..(25): SEQ ID NO: 4233; WAN024GGG_at; Start 57; Stop 81
ctccctgcgggttcaactttctttg

SEQ ID NO: 244508 - DNA, 25 bp, Artificial
  probe
  misc_feature (1)..(25): SEQ ID NO: 4233; WAN024GGG_at; Start 62; Stop 86
tgcgggttcaactttctttgcacag

SEQ ID NO: 244509 - DNA, 25 bp, Artificial
  probe
  misc_feature (1)..(25): SEQ ID NO: 4233; WAN024GGG_at; Start 121; Stop 145
aatctcatccacactggcttccttg

SEQ ID NO: 244510 - DNA, 25 bp, Artificial
  probe
  misc_feature (1)..(25): SEQ ID NO: 4233; WAN024GGG_at; Start 104; Stop 128
ggtaccccaacttcgacaatctcat

SEQ ID NO: 244511 - DNA, 25 bp, Artificial
  probe
  misc_feature (1)..(25): SEQ ID NO: 4233; WAN024GGG_at; Start 139; Stop 163
ttccttgattttggtcaaagacttg

SEQ ID NO: 244512 - DNA, 25 bp, Artificial
  probe
  misc_feature (1)..(25): SEQ ID NO: 4233; WAN024GGG_at; Start 130; Stop 154
cacactggcttccttgattttggtc

SEQ ID NO: 244513 - DNA, 25 bp, Artificial
  probe
  misc_feature (1)..(25): SEQ ID NO: 4233; WAN024GGG_at; Start 18; Stop 42
ggtaatctactctttcttctgctac

SEQ ID NO: 244514 - DNA, 25 bp, Artificial
  probe
  misc_feature (1)..(25): SEQ ID NO: 1553; WAN024GGH_at; Start 209; Stop 233
agcgttccaatagcctgaatcaggt

SEQ ID NO: 244515 - DNA, 25 bp, Artificial
  probe
  misc_feature (1)..(25): SEQ ID NO: 1553; WAN024GGH_at; Start 572; Stop 596
ggatagcgctcattggtgattttga

SEQ ID NO: 244516 - DNA, 25 bp, Artificial
  probe
  misc_feature (1)..(25): SEQ ID NO: 1553; WAN024GGH_at; Start 30; Stop 54
cataggtcaaaaaatcctcatctgg

SEQ ID NO: 244517 - DNA, 25 bp, Artificial
  probe
  misc_feature (1)..(25): SEQ ID NO: 1553; WAN024GGH_at; Start 365; Stop 389
taagcctcatccttcttacagatgg

SEQ ID NO: 244518 - DNA, 25 bp, Artificial
  probe
  misc_feature (1)..(25): SEQ ID NO: 1553; WAN024GGH_at; Start 619; Stop 643
cttgagcatgatattgtacttgggc

SEQ ID NO: 244519 - DNA, 25 bp, Artificial
  probe
  misc_feature (1)..(25): SEQ ID NO: 1553; WAN024GGH_at; Start 449; Stop 473
cacttacgaaaagggaatatccgat

SEQ ID NO: 244520 - DNA, 25 bp, Artificial
  probe
  misc_feature (1)..(25): SEQ ID NO: 1553; WAN024GGH_at; Start 374; Stop 398
tccttcttacagatggtgtgggcca

SEQ ID NO: 244521 - DNA, 25 bp, Artificial
  probe
  misc_feature (1)..(25): SEQ ID NO: 1553; WAN024GGH_at; Start 479; Stop 503
aaccgcttgatttcattggctgccc

SEQ ID NO: 244522 - DNA, 25 bp, Artificial
  probe
  misc_feature (1)..(25): SEQ ID NO: 1553; WAN024GGH_at; Start 202; Stop 226
ggttcgaagcgttccaatagcctga

SEQ ID NO: 244523 - DNA, 25 bp, Artificial
  probe
  misc_feature (1)..(25): SEQ ID NO: 1553; WAN024GGH_at; Start 559; Stop 583
gataatcaagcgtggatagcgctca

SEQ ID NO: 244524 - DNA, 25 bp, Artificial
  probe
  misc_feature (1)..(25): SEQ ID NO: 1553; WAN024GGH_at; Start 591; Stop 615
ttttgatgaaaggataggacttgtc

SEQ ID NO: 244525 - DNA, 25 bp, Artificial
  probe
  misc_feature (1)..(25): SEQ ID NO: 1553; WAN024GGH_at; Start 535; Stop 559
tccgtcctttttgacctgacgagtg

SEQ ID NO: 244526 - DNA, 25 bp, Artificial
  probe
  misc_feature (1)..(25): SEQ ID NO: 1553; WAN024GGH_at; Start 237; Stop 261
ggtattccgccgcacgttcaaactc

SEQ ID NO: 244527 - DNA, 25 bp, Artificial
  probe
  misc_feature (1)..(25): SEQ ID NO: 1553; WAN024GGH_at; Start 186; Stop 210
ccatgacccgttgcttggttcgaag

SEQ ID NO: 244528 - DNA, 25 bp, Artificial
  probe
  misc_feature (1)..(25): SEQ ID NO: 1553; WAN024GGH_at; Start 171; Stop 195
tttgcaaatctttcgccatgacccg

SEQ ID NO: 244529 - DNA, 25 bp, Artificial
  probe
  misc_feature (1)..(25): SEQ ID NO: 1553; WAN024GGH_at; Start 130; Stop 154
catccagcccttatccacatagtag

SEQ ID NO: 244530 - DNA, 25 bp, Artificial
  probe
  misc_feature (1)..(25): SEQ ID NO: 1553; WAN024GGH_at; Start 464; Stop 488
aatatccgatccagcaaccgcttga

SEQ ID NO: 244531 - DNA, 25 bp, Artificial
  probe
  misc_feature (1)..(25): SEQ ID NO: 1553; WAN024GGH_at; Start 275; Stop 299
gctactgccattttactcttgagat

SEQ ID NO: 244532 - DNA, 25 bp, Artificial
  probe
  misc_feature (1)..(25): SEQ ID NO: 1553; WAN024GGH_at; Start 69; Stop 93
ggaagagattgacatcgcgctcgat

SEQ ID NO: 244533 - DNA, 25 bp, Artificial
  probe
  misc_feature (1)..(25): SEQ ID NO: 1553; WAN024GGH_at; Start 637; Stop 661
cttgggcttgttttccttgatcagg

SEQ ID NO: 244534 - DNA, 25 bp, Artificial
  probe
  misc_feature (1)..(25): SEQ ID NO: 1553; WAN024GGH_at; Start 605; Stop 629
taggacttgtcatccttgagcatga

SEQ ID NO: 244535 - DNA, 25 bp, Artificial
  probe
  misc_feature (1)..(25): SEQ ID NO: 1553; WAN024GGH_at; Start 145; Stop 169
cacatagtagccaaagacatcgcga

SEQ ID NO: 244536 - DNA, 25 bp, Artificial
  probe
  misc_feature (1)..(25): SEQ ID NO: 1553; WAN024GGH_at; Start 112; Stop 136
aaagaaaacctgcacacacatccag

SEQ ID NO: 244537 - DNA, 25 bp, Artificial
  probe
  misc_feature (1)..(25): SEQ ID NO: 1553; WAN024GGH_at; Start 546; Stop 570
tgacctgacgagtgataatcaagcg

SEQ ID NO: 244538 - DNA, 25 bp, Artificial
  probe
  misc_feature (1)..(25): SEQ ID NO: 1553; WAN024GGH_at; Start 260; Stop 284
tccatactttgtgctgctactgcca

SEQ ID NO: 244539 - DNA, 25 bp, Artificial
  probe
  misc_feature (1)..(25): SEQ ID NO: 1553; WAN024GGH_at; Start 350; Stop 374
gccatagacttgaaataagcctcat

SEQ ID NO: 244540 - DNA, 25 bp, Artificial
  probe
  misc_feature (1)..(25): SEQ ID NO: 1553; WAN024GGH_at; Start 156; Stop 180
caaagacatcgcgattttgcaaatc

SEQ ID NO: 244541 - DNA, 25 bp, Artificial
  probe
  misc_feature (1)..(25): SEQ ID NO: 1553; WAN024GGH_at; Start 504; Stop 528
ccacatcgggatagggtccaaaata

SEQ ID NO: 244542 - DNA, 25 bp, Artificial
  probe
  misc_feature (1)..(25): SEQ ID NO: 1553; WAN024GGH_at; Start 15; Stop 39
gatagaattgtcctacataggtcaa

SEQ ID NO: 244543 - DNA, 25 bp, Artificial
  probe
  misc_feature (1)..(25): SEQ ID NO: 1553; WAN024GGH_at; Start 224; Stop 248
tgaatcaggtcacggtattccgccg

SEQ ID NO: 244544 - DNA, 25 bp, Artificial
  probe
  misc_feature (1)..(25): SEQ ID NO: 1553; WAN024GGH_at; Start 45; Stop 69
cctcatctggatcattgaagtaggg

SEQ ID NO: 244545 - DNA, 25 bp, Artificial
  probe
  misc_feature (1)..(25): SEQ ID NO: 1553; WAN024GGH_at; Start 307; Stop 331
gattttgtcatcctgacctttcaga

SEQ ID NO: 244546 - DNA, 25 bp, Artificial
  probe
  misc_feature (1)..(25): SEQ ID NO: 1553; WAN024GGH_at; Start 323; Stop 347
cctttcagaaaatcagacacctcct

SEQ ID NO: 244547 - DNA, 25 bp, Artificial
  probe
  misc_feature (1)..(25): SEQ ID NO: 1553; WAN024GGH_at; Start 101; Stop 125
ccctgacggacaaagaaaacctgca

SEQ ID NO: 244548 - DNA, 25 bp, Artificial
  probe
  misc_feature (1)..(25): SEQ ID NO: 5531; WAN024GGI_at; Start 372; Stop 396
taccgttgacaaagaccaccatagc

SEQ ID NO: 244549 - DNA, 25 bp, Artificial
  probe
  misc_feature (1)..(25): SEQ ID NO: 5531; WAN024GGI_at; Start 80; Stop 104
gacaaatccaccacctcaagcggat

SEQ ID NO: 244550 - DNA, 25 bp, Artificial
  probe
  misc_feature (1)..(25): SEQ ID NO: 5531; WAN024GGI_at; Start 169; Stop 193
caagcccagttcctcttggataacc

SEQ ID NO: 244551 - DNA, 25 bp, Artificial
  probe
  misc_feature (1)..(25): SEQ ID NO: 5531; WAN024GGI_at; Start 396; Stop 420
ccgaaacagggctagttcccatgat

SEQ ID NO: 244552 - DNA, 25 bp, Artificial
  probe
  misc_feature (1)..(25): SEQ ID NO: 5531; WAN024GGI_at; Start 337; Stop 361
tatcttgtacttacggtaatccttc

SEQ ID NO: 244553 - DNA, 25 bp, Artificial
  probe
  misc_feature (1)..(25): SEQ ID NO: 5531; WAN024GGI_at; Start 456; Stop 480
tcgggatttggagcaaacgccctag

SEQ ID NO: 244554 - DNA, 25 bp, Artificial
  probe
  misc_feature (1)..(25): SEQ ID NO: 5531; WAN024GGI_at; Start 69; Stop 93
gagaattgcgagacaaatccaccac

SEQ ID NO: 244555 - DNA, 25 bp, Artificial
  probe
  misc_feature (1)..(25): SEQ ID NO: 5531; WAN024GGI_at; Start 309; Stop 333
catagtcgtctggtccaacaaccgt

SEQ ID NO: 244556 - DNA, 25 bp, Artificial
  probe
  misc_feature (1)..(25): SEQ ID NO: 5531; WAN024GGI_at; Start 237; Stop 261
tcaaatctggaggagtcaaagcctc

SEQ ID NO: 244557 - DNA, 25 bp, Artificial
  probe
  misc_feature (1)..(25): SEQ ID NO: 5531; WAN024GGI_at; Start 225; Stop 249
catcaatcacaatcaaatctggagg

SEQ ID NO: 244558 - DNA, 25 bp, Artificial
  probe
  misc_feature (1)..(25): SEQ ID NO: 5531; WAN024GGI_at; Start 288; Stop 312
gaatgacctctctcatgctggcata

SEQ ID NO: 244559 - DNA, 25 bp, Artificial
  probe
  misc_feature (1)..(25): SEQ ID NO: 5531; WAN024GGI_at; Start 199; Stop 223
agcgatattgacttgaccttgcccc

SEQ ID NO: 244560 - DNA, 25 bp, Artificial
  probe
  misc_feature (1)..(25): SEQ ID NO: 5531; WAN024GGI_at; Start 404; Stop 428
gggctagttcccatgatattagagt

SEQ ID NO: 244561 - DNA, 25 bp, Artificial
  probe
  misc_feature (1)..(25): SEQ ID NO: 5531; WAN024GGI_at; Start 382; Stop 406
aaagaccaccatagccgaaacaggg

SEQ ID NO: 244562 - DNA, 25 bp, Artificial
  probe
  misc_feature (1)..(25): SEQ ID NO: 5531; WAN024GGI_at; Start 192; Stop 216
cctgcttagcgatattgacttgacc

SEQ ID NO: 244563 - DNA, 25 bp, Artificial
  probe
  misc_feature (1)..(25): SEQ ID NO: 5531; WAN024GGI_at; Start 300; Stop 324
tcatgctggcatagtcgtctggtcc

SEQ ID NO: 244564 - DNA, 25 bp, Artificial
  probe
  misc_feature (1)..(25): SEQ ID NO: 5531; WAN024GGI_at; Start 58; Stop 82
gaaaaattcctgagaattgcgagac

SEQ ID NO: 244565 - DNA, 25 bp, Artificial
  probe
  misc_feature (1)..(25): SEQ ID NO: 5531; WAN024GGI_at; Start 147; Stop 171
gcagcccagcaattggaatatccaa

SEQ ID NO: 244566 - DNA, 25 bp, Artificial
  probe
  misc_feature (1)..(25): SEQ ID NO: 5531; WAN024GGI_at; Start 43; Stop 67
gatgcgttggaggaggaaaaattcc

SEQ ID NO: 244567 - DNA, 25 bp, Artificial
  probe
  misc_feature (1)..(25): SEQ ID NO: 5531; WAN024GGI_at; Start 268; Stop 292
tactcgaccatagcgtctgcgaatg

SEQ ID NO: 244568 - DNA, 25 bp, Artificial
  probe
  misc_feature (1)..(25): SEQ ID NO: 5531; WAN024GGI_at; Start 278; Stop 302
tagcgtctgcgaatgacctctctca

SEQ ID NO: 244569 - DNA, 25 bp, Artificial
  probe
  misc_feature (1)..(25): SEQ ID NO: 5531; WAN024GGI_at; Start 20; Stop 44
gcaaagcggtgcacctcatcttgga

SEQ ID NO: 244570 - DNA, 25 bp, Artificial
  probe
  misc_feature (1)..(25): SEQ ID NO: 5531; WAN024GGI_at; Start 429; Stop 453
tatcgaaggactcgatacgtactgg

SEQ ID NO: 244571 - DNA, 25 bp, Artificial
  probe
  misc_feature (1)..(25): SEQ ID NO: 5531; WAN024GGI_at; Start 93; Stop 117
cctcaagcggatctccaaagagcaa

SEQ ID NO: 244572 - DNA, 25 bp, Artificial
  probe
  misc_feature (1)..(25): SEQ ID NO: 5531; WAN024GGI_at; Start 10; Stop 34
gaaagtgatagcaaagcggtgcacc

SEQ ID NO: 244573 - DNA, 25 bp, Artificial
  probe
  misc_feature (1)..(25): SEQ ID NO: 5531; WAN024GGI_at; Start 30; Stop 54
gcacctcatcttggatgcgttggag

SEQ ID NO: 244574 - DNA, 25 bp, Artificial
  probe
  misc_feature (1)..(25): SEQ ID NO: 5531; WAN024GGI_at; Start 101; Stop 125
ggatctccaaagagcaattcatggg

SEQ ID NO: 244575 - DNA, 25 bp, Artificial
  probe
  misc_feature (1)..(25): SEQ ID NO: 5531; WAN024GGI_at; Start 160; Stop 184
tggaatatccaagcccagttcctct

SEQ ID NO: 244576 - DNA, 25 bp, Artificial
  probe
  misc_feature (1)..(25): SEQ ID NO: 5531; WAN024GGI_at; Start 179; Stop 203
tcctcttggataacctgcttagcga

SEQ ID NO: 244577 - DNA, 25 bp, Artificial
  probe
  misc_feature (1)..(25): SEQ ID NO: 5531; WAN024GGI_at; Start 115; Stop 139
caattcatgggtttggtgcttatca

SEQ ID NO: 244578 - DNA, 25 bp, Artificial
  probe
  misc_feature (1)..(25): SEQ ID NO: 5531; WAN024GGI_at; Start 133; Stop 157
cttatcattcttttgcagcccagca

SEQ ID NO: 244579 - DNA, 25 bp, Artificial
  probe
  misc_feature (1)..(25): SEQ ID NO: 5531; WAN024GGI_at; Start 418; Stop 442
gatattagagttatcgaaggactcg

SEQ ID NO: 244580 - DNA, 25 bp, Artificial
  probe
  misc_feature (1)..(25): SEQ ID NO: 5531; WAN024GGI_at; Start 256; Stop 280
agcctcacgctgtactcgaccatag

SEQ ID NO: 244581 - DNA, 25 bp, Artificial
  probe
  misc_feature (1)..(25): SEQ ID NO: 5531; WAN024GGI_at; Start 244; Stop 268
tggaggagtcaaagcctcacgctgt

SEQ ID NO: 244582 - DNA, 25 bp, Artificial
  probe
  misc_feature (1)..(25): SEQ ID NO: 1012; WAN024GGJ_at; Start 1695; Stop 1719
agccagtgtggatgagattgtcgaa

SEQ ID NO: 244583 - DNA, 25 bp, Artificial
  probe
  misc_feature (1)..(25): SEQ ID NO: 1012; WAN024GGJ_at; Start 60; Stop 84
tcataaggataaaaatggcaccatt

SEQ ID NO: 244584 - DNA, 25 bp, Artificial
  probe
  misc_feature (1)..(25): SEQ ID NO: 1012; WAN024GGJ_at; Start 692; Stop 716
ttcgaaccaagcaacgggtcatggc

SEQ ID NO: 244585 - DNA, 25 bp, Artificial
  probe
  misc_feature (1)..(25): SEQ ID NO: 1012; WAN024GGJ_at; Start 809; Stop 833
tcgagcgcgatgtcaatctcttccc

SEQ ID NO: 244586 - DNA, 25 bp, Artificial
  probe
  misc_feature (1)..(25): SEQ ID NO: 1012; WAN024GGJ_at; Start 1516; Stop 1540
caggaatttttcctcctccaacgca

SEQ ID NO: 244587 - DNA, 25 bp, Artificial
  probe
  misc_feature (1)..(25): SEQ ID NO: 1012; WAN024GGJ_at; Start 1324; Stop 1348
gaggctttgactcctccagatttga

SEQ ID NO: 244588 - DNA, 25 bp, Artificial
  probe
  misc_feature (1)..(25): SEQ ID NO: 1012; WAN024GGJ_at; Start 672; Stop 696
gattcaggctattggaacgcttcga

SEQ ID NO: 244589 - DNA, 25 bp, Artificial
  probe
  misc_feature (1)..(25): SEQ ID NO: 1012; WAN024GGJ_at; Start 15; Stop 39
taaatcaaaactagagctcttgccg

SEQ ID NO: 244590 - DNA, 25 bp, Artificial
  probe
  misc_feature (1)..(25): SEQ ID NO: 1012; WAN024GGJ_at; Start 728; Stop 752
aaaatcgcgatgtctttggctacta

SEQ ID NO: 244591 - DNA, 25 bp, Artificial
  probe
  misc_feature (1)..(25): SEQ ID NO: 1012; WAN024GGJ_at; Start 1406; Stop 1430
aactgggcttggatattccaattgc

SEQ ID NO: 244592 - DNA, 25 bp, Artificial
  probe
  misc_feature (1)..(25): SEQ ID NO: 1012; WAN024GGJ_at; Start 905; Stop 929
ttcccaatgaggtactgattccgca

SEQ ID NO: 244593 - DNA, 25 bp, Artificial
  probe
  misc_feature (1)..(25): SEQ ID NO: 1012; WAN024GGJ_at; Start 162; Stop 186
ggctctggtgtctgaaattgtggat

SEQ ID NO: 244594 - DNA, 25 bp, Artificial
  probe
  misc_feature (1)..(25): SEQ ID NO: 1012; WAN024GGJ_at; Start 75; Stop 99
tggcaccattatctatgtaggaaag

SEQ ID NO: 244595 - DNA, 25 bp, Artificial
  probe
  misc_feature (1)..(25): SEQ ID NO: 1012; WAN024GGJ_at; Start 150; Stop 174
taccaagacagaggctctggtgtct

SEQ ID NO: 244596 - DNA, 25 bp, Artificial
  probe
  misc_feature (1)..(25): SEQ ID NO: 1012; WAN024GGJ_at; Start 746; Stop 770
gctactatgtggataagggctggat

SEQ ID NO: 244597 - DNA, 25 bp, Artificial
  probe
  misc_feature (1)..(25): SEQ ID NO: 1012; WAN024GGJ_at; Start 44; Stop 68
gccctggttgctacattcataagga

SEQ ID NO: 244598 - DNA, 25 bp, Artificial
  probe
  misc_feature (1)..(25): SEQ ID NO: 1012; WAN024GGJ_at; Start 1446; Stop 1470
tgataagcaccaaacccatgaattg

SEQ ID NO: 244599 - DNA, 25 bp, Artificial
  probe
  misc_feature (1)..(25): SEQ ID NO: 1012; WAN024GGJ_at; Start 1580; Stop 1604
gccaactgcgctccaaaaattcttt

SEQ ID NO: 244600 - DNA, 25 bp, Artificial
  probe
  misc_feature (1)..(25): SEQ ID NO: 1012; WAN024GGJ_at; Start 258; Stop 282
gcccaagtacaatatcatgctcaag

SEQ ID NO: 244601 - DNA, 25 bp, Artificial
  probe
  misc_feature (1)..(25): SEQ ID NO: 1012; WAN024GGJ_at; Start 1600; Stop 1624
tctttctcatctcaattggatggga

SEQ ID NO: 244602 - DNA, 25 bp, Artificial
  probe
  misc_feature (1)..(25): SEQ ID NO: 1012; WAN024GGJ_at; Start 959; Stop 983
tggtggattccaagattcttaagcc

SEQ ID NO: 244603 - DNA, 25 bp, Artificial
  probe
  misc_feature (1)..(25): SEQ ID NO: 1012; WAN024GGJ_at; Start 29; Stop 53
agctcttgccgaccagccctggttg

SEQ ID NO: 244604 - DNA, 25 bp, Artificial
  probe
  misc_feature (1)..(25): SEQ ID NO: 1012; WAN024GGJ_at; Start 1462; Stop 1486
catgaattgctctttggagatccgc

SEQ ID NO: 244605 - DNA, 25 bp, Artificial
  probe
  misc_feature (1)..(25): SEQ ID NO: 1012; WAN024GGJ_at; Start 90; Stop 114
tgtaggaaaggctaaaaatctgcgt

SEQ ID NO: 244606 - DNA, 25 bp, Artificial
  probe
  misc_feature (1)..(25): SEQ ID NO: 1012; WAN024GGJ_at; Start 972; Stop 996
gattcttaagcctcaacgtggagag

SEQ ID NO: 244607 - DNA, 25 bp, Artificial
  probe
  misc_feature (1)..(25): SEQ ID NO: 1012; WAN024GGJ_at; Start 1680; Stop 1704
gaccaaaatcaaggaagccagtgtg

SEQ ID NO: 244608 - DNA, 25 bp, Artificial
  probe
  misc_feature (1)..(25): SEQ ID NO: 1012; WAN024GGJ_at; Start 122; Stop 146
tacggtcctattttcgtggaagtca

SEQ ID NO: 244609 - DNA, 25 bp, Artificial
  probe
  misc_feature (1)..(25): SEQ ID NO: 1012; WAN024GGJ_at; Start 833; Stop 857
cctacttcaatgatccagatgagga

SEQ ID NO: 244610 - DNA, 25 bp, Artificial
  probe
  misc_feature (1)..(25): SEQ ID NO: 1012; WAN024GGJ_at; Start 657; Stop 681
ggaataccgtgacctgattcaggct

SEQ ID NO: 244611 - DNA, 25 bp, Artificial
  probe
  misc_feature (1)..(25): SEQ ID NO: 1012; WAN024GGJ_at; Start 504; Stop 528
ggcccacaccatctgtaagaaggat

SEQ ID NO: 244612 - DNA, 25 bp, Artificial
  probe
  misc_feature (1)..(25): SEQ ID NO: 1012; WAN024GGJ_at; Start 1305; Stop 1329
ctatggtcgagtacagcgtgaggct

SEQ ID NO: 244613 - DNA, 25 bp, Artificial
  probe
  misc_feature (1)..(25): SEQ ID NO: 1012; WAN024GGJ_at; Start 640; Stop 664
gagtttgaacgtgcggcggaatacc

SEQ ID NO: 244614 - DNA, 25 bp, Artificial
  probe
  misc_feature (1)..(25): SEQ ID NO: 1012; WAN024GGJ_at; Start 105; Stop 129
aaatctgcgtaatcgagtacggtcc

SEQ ID NO: 244615 - DNA, 25 bp, Artificial
  probe
  misc_feature (1)..(25): SEQ ID NO: 1012; WAN024GGJ_at; Start 308; Stop 332
aaatcaccaatgagcgctatccacg

SEQ ID NO: 244616 - DNA, 25 bp, Artificial
  probe
  misc_feature (1)..(25): SEQ ID NO: 2436; WAN024GGK_at; Start 130; Stop 154
cacgggatgtctggaaatcataata

SEQ ID NO: 244617 - DNA, 25 bp, Artificial
  probe
  misc_feature (1)..(25): SEQ ID NO: 2436; WAN024GGK_at; Start 455; Stop 479
tttctcctgaaagtcaaaatctggg

SEQ ID NO: 244618 - DNA, 25 bp, Artificial
  probe
  misc_feature (1)..(25): SEQ ID NO: 2436; WAN024GGK_at; Start 516; Stop 540
tagagactggacaactagtccctat

SEQ ID NO: 244619 - DNA, 25 bp, Artificial
  probe
  misc_feature (1)..(25): SEQ ID NO: 2436; WAN024GGK_at; Start 689; Stop 713
gaactcacgagtggtactactggga

SEQ ID NO: 244620 - DNA, 25 bp, Artificial
  probe
  misc_feature (1)..(25): SEQ ID NO: 2436; WAN024GGK_at; Start 210; Stop 234
tgttatgcccaataccagcaatggt

SEQ ID NO: 244621 - DNA, 25 bp, Artificial
  probe
  misc_feature (1)..(25): SEQ ID NO: 2436; WAN024GGK_at; Start 18; Stop 42
cgagtattactcacaagtattggat

SEQ ID NO: 244622 - DNA, 25 bp, Artificial
  probe
  misc_feature (1)..(25): SEQ ID NO: 2436; WAN024GGK_at; Start 302; Stop 326
tgaaacgcttcttccctaatatgac

SEQ ID NO: 244623 - DNA, 25 bp, Artificial
  probe
  misc_feature (1)..(25): SEQ ID NO: 2436; WAN024GGK_at; Start 242; Stop 266
ccgatacccagtatggttttgacta

SEQ ID NO: 244624 - DNA, 25 bp, Artificial
  probe
  misc_feature (1)..(25): SEQ ID NO: 2436; WAN024GGK_at; Start 659; Stop 683
gttttgatgtgacctatagccatag

SEQ ID NO: 244625 - DNA, 25 bp, Artificial
  probe
  misc_feature (1)..(25): SEQ ID NO: 2436; WAN024GGK_at; Start 615; Stop 639
gtacgaagccaataatctcgcagtg

SEQ ID NO: 244626 - DNA, 25 bp, Artificial
  probe
  misc_feature (1)..(25): SEQ ID NO: 2436; WAN024GGK_at; Start 196; Stop 220
actaatctcatcgttgttatgccca

SEQ ID NO: 244627 - DNA, 25 bp, Artificial
  probe
  misc_feature (1)..(25): SEQ ID NO: 2436; WAN024GGK_at; Start 503; Stop 527
tttttggagagattagagactggac

SEQ ID NO: 244628 - DNA, 25 bp, Artificial
  probe
  misc_feature (1)..(25): SEQ ID NO: 2436; WAN024GGK_at; Start 430; Stop 454
tcaggtgccctcagctttcaaaact

SEQ ID NO: 244629 - DNA, 25 bp, Artificial
  probe
  misc_feature (1)..(25): SEQ ID NO: 2436; WAN024GGK_at; Start 627; Stop 651
taatctcgcagtgaaaaatctcaaa

SEQ ID NO: 244630 - DNA, 25 bp, Artificial
  probe
  misc_feature (1)..(25): SEQ ID NO: 2436; WAN024GGK_at; Start 148; Stop 172
cataatagttggcttaagcggacca

SEQ ID NO: 244631 - DNA, 25 bp, Artificial
  probe
  misc_feature (1)..(25): SEQ ID NO: 2436; WAN024GGK_at; Start 91; Stop 115
gaaccagagtgtgaagatattcccg

SEQ ID NO: 244632 - DNA, 25 bp, Artificial
  probe
  misc_feature (1)..(25): SEQ ID NO: 2436; WAN024GGK_at; Start 286; Stop 310
gaattgccacaggttctgaaacgct

SEQ ID NO: 244633 - DNA, 25 bp, Artificial
  probe
  misc_feature (1)..(25): SEQ ID NO: 2436; WAN024GGK_at; Start 75; Stop 99
tgccaatcgagtggaagaaccagag

SEQ ID NO: 244634 - DNA, 25 bp, Artificial
  probe
  misc_feature (1)..(25): SEQ ID NO: 2436; WAN024GGK_at; Start 547; Stop 571
gaaagtctggctaaaaaatcggata

SEQ ID NO: 244635 - DNA, 25 bp, Artificial
  probe
  misc_feature (1)..(25): SEQ ID NO: 2436; WAN024GGK_at; Start 601; Stop 625
gaacaggatttcttgtacgaagcca

SEQ ID NO: 244636 - DNA, 25 bp, Artificial
  probe
  misc_feature (1)..(25): SEQ ID NO: 2436; WAN024GGK_at; Start 165; Stop 189
gcggaccaatgtagaacgcttgctt

SEQ ID NO: 244637 - DNA, 25 bp, Artificial
  probe
  misc_feature (1)..(25): SEQ ID NO: 2436; WAN024GGK_at; Start 273; Stop 297
ggctctagcagaggaattgccacag

SEQ ID NO: 244638 - DNA, 25 bp, Artificial
  probe
  misc_feature (1)..(25): SEQ ID NO: 2436; WAN024GGK_at; Start 488; Stop 512
cctactggagaggtgtttttggaga

SEQ ID NO: 244639 - DNA, 25 bp, Artificial
  probe
  misc_feature (1)..(25): SEQ ID NO: 2436; WAN024GGK_at; Start 415; Stop 439
catgcagctagtttttcaggtgccc

SEQ ID NO: 244640 - DNA, 25 bp, Artificial
  probe
  misc_feature (1)..(25): SEQ ID NO: 2436; WAN024GGK_at; Start 574; Stop 598
aagaccaaactttgggcgtggtgtg

SEQ ID NO: 244641 - DNA, 25 bp, Artificial
  probe
  misc_feature (1)..(25): SEQ ID NO: 2436; WAN024GGK_at; Start 532; Stop 556
agtccctattctcttgaaagtctgg

SEQ ID NO: 244642 - DNA, 25 bp, Artificial
  probe
  misc_feature (1)..(25): SEQ ID NO: 2436; WAN024GGK_at; Start 116; Stop 140
tcttgtaccttttgcacgggatgtc

SEQ ID NO: 244643 - DNA, 25 bp, Artificial
  probe
  misc_feature (1)..(25): SEQ ID NO: 2436; WAN024GGK_at; Start 590; Stop 614
cgtggtgtggcgaacaggatttctt

SEQ ID NO: 244644 - DNA, 25 bp, Artificial
  probe
  misc_feature (1)..(25): SEQ ID NO: 2436; WAN024GGK_at; Start 181; Stop 205
cgcttgcttcgaggaactaatctca

SEQ ID NO: 244645 - DNA, 25 bp, Artificial
  probe
  misc_feature (1)..(25): SEQ ID NO: 2436; WAN024GGK_at; Start 471; Stop 495
aaatctgggaagtccagcctactgg

SEQ ID NO: 244646 - DNA, 25 bp, Artificial
  probe
  misc_feature (1)..(25): SEQ ID NO: 2436; WAN024GGK_at; Start 754; Stop 778
ttcaaattagaagagagactgactt

SEQ ID NO: 244647 - DNA, 25 bp, Artificial
  probe
  misc_feature (1)..(25): SEQ ID NO: 2436; WAN024GGK_at; Start 354; Stop 378
tggtctttctatgggaggctacggc

SEQ ID NO: 244648 - DNA, 25 bp, Artificial
  probe
  misc_feature (1)..(25): SEQ ID NO: 2436; WAN024GGK_at; Start 56; Stop 80
tgaatgtcctctaccctgatgccaa

SEQ ID NO: 244649 - DNA, 25 bp, Artificial
  probe
  misc_feature (1)..(25): SEQ ID NO: 2436; WAN024GGK_at; Start 225; Stop 249
cagcaatggttggtacaccgatacc

SEQ ID NO: 244650 - DNA, 25 bp, Artificial
  probe
  misc_feature (1)..(25): SEQ ID NO: 2068; WAN024GGL_at; Start 22; Stop 46
aacttggataggaaaaatagattga

SEQ ID NO: 244651 - DNA, 25 bp, Artificial
  probe
  misc_feature (1)..(25): SEQ ID NO: 2068; WAN024GGL_at; Start 42; Stop 66
attgagaaaggaggttagaagagat

SEQ ID NO: 244652 - DNA, 25 bp, Artificial
  probe
  misc_feature (1)..(25): SEQ ID NO: 2068; WAN024GGL_at; Start 52; Stop 76
gaggttagaagagatgattattaca

SEQ ID NO: 244653 - DNA, 25 bp, Artificial
  probe
  misc_feature (1)..(25): SEQ ID NO: 2068; WAN024GGL_at; Start 53; Stop 77
aggttagaagagatgattattacaa

SEQ ID NO: 244654 - DNA, 25 bp, Artificial
  probe
  misc_feature (1)..(25): SEQ ID NO: 2068; WAN024GGL_at; Start 35; Stop 59
aaaatagattgagaaaggaggttag

SEQ ID NO: 244655 - DNA, 25 bp, Artificial
  probe
  misc_feature (1)..(25): SEQ ID NO: 2068; WAN024GGL_at; Start 49; Stop 73
aaggaggttagaagagatgattatt

SEQ ID NO: 244656 - DNA, 25 bp, Artificial
  probe
  misc_feature (1)..(25): SEQ ID NO: 2068; WAN024GGL_at; Start 44; Stop 68
tgagaaaggaggttagaagagatga

SEQ ID NO: 244657 - DNA, 25 bp, Artificial
  probe
  misc_feature (1)..(25): SEQ ID NO: 2068; WAN024GGL_at; Start 4; Stop 28
ctagacagaagaatggggaacttgg

SEQ ID NO: 244658 - DNA, 25 bp, Artificial
  probe
  misc_feature (1)..(25): SEQ ID NO: 2068; WAN024GGL_at; Start 25; Stop 49
ttggataggaaaaatagattgagaa

SEQ ID NO: 244659 - DNA, 25 bp, Artificial
  probe
  misc_feature (1)..(25): SEQ ID NO: 2068; WAN024GGL_at; Start 51; Stop 75
ggaggttagaagagatgattattac

SEQ ID NO: 244660 - DNA, 25 bp, Artificial
  probe
  misc_feature (1)..(25): SEQ ID NO: 2068; WAN024GGL_at; Start 30; Stop 54
taggaaaaatagattgagaaaggag

SEQ ID NO: 244661 - DNA, 25 bp, Artificial
  probe
  misc_feature (1)..(25): SEQ ID NO: 2068; WAN024GGL_at; Start 29; Stop 53
ataggaaaaatagattgagaaagga

SEQ ID NO: 244662 - DNA, 25 bp, Artificial
  probe
  misc_feature (1)..(25): SEQ ID NO: 2068; WAN024GGL_at; Start 23; Stop 47
acttggataggaaaaatagattgag

SEQ ID NO: 244663 - DNA, 25 bp, Artificial
  probe
  misc_feature (1)..(25): SEQ ID NO: 2068; WAN024GGL_at; Start 54; Stop 78
ggttagaagagatgattattacaaa

SEQ ID NO: 244664 - DNA, 25 bp, Artificial
  probe
  misc_feature (1)..(25): SEQ ID NO: 2068; WAN024GGL_at; Start 21; Stop 45
gaacttggataggaaaaatagattg

SEQ ID NO: 244665 - DNA, 25 bp, Artificial
  probe
  misc_feature (1)..(25): SEQ ID NO: 2068; WAN024GGL_at; Start 5; Stop 29
tagacagaagaatggggaacttgga

SEQ ID NO: 244666 - DNA, 25 bp, Artificial
  probe
  misc_feature (1)..(25): SEQ ID NO: 2068; WAN024GGL_at; Start 46; Stop 70
agaaaggaggttagaagagatgatt

SEQ ID NO: 244667 - DNA, 25 bp, Artificial
  probe
  misc_feature (1)..(25): SEQ ID NO: 2068; WAN024GGL_at; Start 47; Stop 71
gaaaggaggttagaagagatgatta

SEQ ID NO: 244668 - DNA, 25 bp, Artificial
  probe
  misc_feature (1)..(25): SEQ ID NO: 2068; WAN024GGL_at; Start 24; Stop 48
cttggataggaaaaatagattgaga

SEQ ID NO: 244669 - DNA, 25 bp, Artificial
  probe
  misc_feature (1)..(25): SEQ ID NO: 2068; WAN024GGL_at; Start 1; Stop 25
atgctagacagaagaatggggaact

SEQ ID NO: 244670 - DNA, 25 bp, Artificial
  probe
  misc_feature (1)..(25): SEQ ID NO: 2068; WAN024GGL_at; Start 26; Stop 50
tggataggaaaaatagattgagaaa

SEQ ID NO: 244671 - DNA, 25 bp, Artificial
  probe
  misc_feature (1)..(25): SEQ ID NO: 2068; WAN024GGL_at; Start 2; Stop 26
tgctagacagaagaatggggaactt

SEQ ID NO: 244672 - DNA, 25 bp, Artificial
  probe
  misc_feature (1)..(25): SEQ ID NO: 2068; WAN024GGL_at; Start 6; Stop 30
agacagaagaatggggaacttggat

SEQ ID NO: 244673 - DNA, 25 bp, Artificial
  probe
  misc_feature (1)..(25): SEQ ID NO: 2068; WAN024GGL_at; Start 28; Stop 52
gataggaaaaatagattgagaaagg

SEQ ID NO: 244674 - DNA, 25 bp, Artificial
  probe
  misc_feature (1)..(25): SEQ ID NO: 2068; WAN024GGL_at; Start 43; Stop 67
ttgagaaaggaggttagaagagatg

SEQ ID NO: 244675 - DNA, 25 bp, Artificial
  probe
  misc_feature (1)..(25): SEQ ID NO: 2068; WAN024GGL_at; Start 3; Stop 27
gctagacagaagaatggggaacttg

SEQ ID NO: 244676 - DNA, 25 bp, Artificial
  probe
  misc_feature (1)..(25): SEQ ID NO: 2068; WAN024GGL_at; Start 39; Stop 63
tagattgagaaaggaggttagaaga

SEQ ID NO: 244677 - DNA, 25 bp, Artificial
  probe
  misc_feature (1)..(25): SEQ ID NO: 2068; WAN024GGL_at; Start 37; Stop 61
aatagattgagaaaggaggttagaa

SEQ ID NO: 244678 - DNA, 25 bp, Artificial
  probe
  misc_feature (1)..(25): SEQ ID NO: 2068; WAN024GGL_at; Start 50; Stop 74
aggaggttagaagagatgattatta

SEQ ID NO: 244679 - DNA, 25 bp, Artificial
  probe
  misc_feature (1)..(25): SEQ ID NO: 2068; WAN024GGL_at; Start 31; Stop 55
aggaaaaatagattgagaaaggagg

SEQ ID NO: 244680 - DNA, 25 bp, Artificial
  probe
  misc_feature (1)..(25): SEQ ID NO: 2068; WAN024GGL_at; Start 55; Stop 79
gttagaagagatgattattacaaaa

SEQ ID NO: 244681 - DNA, 25 bp, Artificial
  probe
  misc_feature (1)..(25): SEQ ID NO: 2068; WAN024GGL_at; Start 36; Stop 60
aaatagattgagaaaggaggttaga

SEQ ID NO: 244682 - DNA, 25 bp, Artificial
  probe
  misc_feature (1)..(25): SEQ ID NO: 2068; WAN024GGL_at; Start 38; Stop 62
atagattgagaaaggaggttagaag

SEQ ID NO: 244683 - DNA, 25 bp, Artificial
  probe
  misc_feature (1)..(25): SEQ ID NO: 2068; WAN024GGL_at; Start 48; Stop 72
aaaggaggttagaagagatgattat

SEQ ID NO: 244684 - DNA, 25 bp, Artificial
  probe
  misc_feature (1)..(25): SEQ ID NO: 7644; WAN024GGM_at; Start 84; Stop 108
gagccgtagcaatatagaccaggtc

SEQ ID NO: 244685 - DNA, 25 bp, Artificial
  probe
  misc_feature (1)..(25): SEQ ID NO: 7644; WAN024GGM_at; Start 80; Stop 104
gacggagccgtagcaatatagacca

SEQ ID NO: 244686 - DNA, 25 bp, Artificial
  probe
  misc_feature (1)..(25): SEQ ID NO: 7644; WAN024GGM_at; Start 118; Stop 142
gatttctacataacgatggcgacca

SEQ ID NO: 244687 - DNA, 25 bp, Artificial
  probe
  misc_feature (1)..(25): SEQ ID NO: 7644; WAN024GGM_at; Start 132; Stop 156
gatggcgaccaatcgacatcttacg

SEQ ID NO: 244688 - DNA, 25 bp, Artificial
  probe
  misc_feature (1)..(25): SEQ ID NO: 7644; WAN024GGM_at; Start 5; Stop 29
gtaatcaatttgacaaccccacctg

SEQ ID NO: 244689 - DNA, 25 bp, Artificial
  probe
  misc_feature (1)..(25): SEQ ID NO: 7644; WAN024GGM_at; Start 240; Stop 264
taatcaagagaatttcgttggctaa

SEQ ID NO: 244690 - DNA, 25 bp, Artificial
  probe
  misc_feature (1)..(25): SEQ ID NO: 7644; WAN024GGM_at; Start 33; Stop 57
gataaatcatattttccacacgcgc

SEQ ID NO: 244691 - DNA, 25 bp, Artificial
  probe
  misc_feature (1)..(25): SEQ ID NO: 7644; WAN024GGM_at; Start 88; Stop 112
cgtagcaatatagaccaggtcccca

SEQ ID NO: 244692 - DNA, 25 bp, Artificial
  probe
  misc_feature (1)..(25): SEQ ID NO: 7644; WAN024GGM_at; Start 12; Stop 36
atttgacaaccccacctgcctgata

SEQ ID NO: 244693 - DNA, 25 bp, Artificial
  probe
  misc_feature (1)..(25): SEQ ID NO: 7644; WAN024GGM_at; Start 202; Stop 226
caactcatggtcttcaaagcgagac

SEQ ID NO: 244694 - DNA, 25 bp, Artificial
  probe
  misc_feature (1)..(25): SEQ ID NO: 7644; WAN024GGM_at; Start 215; Stop 239
tcaaagcgagacatatctttaggct

SEQ ID NO: 244695 - DNA, 25 bp, Artificial
  probe
  misc_feature (1)..(25): SEQ ID NO: 7644; WAN024GGM_at; Start 170; Stop 194
ggttcacccatacgacctgtctcaa

SEQ ID NO: 244696 - DNA, 25 bp, Artificial
  probe
  misc_feature (1)..(25): SEQ ID NO: 7644; WAN024GGM_at; Start 155; Stop 179
cgaagtccattgataggttcaccca

SEQ ID NO: 244697 - DNA, 25 bp, Artificial
  probe
  misc_feature (1)..(25): SEQ ID NO: 7644; WAN024GGM_at; Start 96; Stop 120
tatagaccaggtccccatccttgat

SEQ ID NO: 244698 - DNA, 25 bp, Artificial
  probe
  misc_feature (1)..(25): SEQ ID NO: 7644; WAN024GGM_at; Start 69; Stop 93
ctttagcaatagacggagccgtagc

SEQ ID NO: 244699 - DNA, 25 bp, Artificial
  probe
  misc_feature (1)..(25): SEQ ID NO: 7644; WAN024GGM_at; Start 45; Stop 69
tttccacacgcgcaacaaaggcttc

SEQ ID NO: 244700 - DNA, 25 bp, Artificial
  probe
  misc_feature (1)..(25): SEQ ID NO: 7644; WAN024GGM_at; Start 60; Stop 84
caaaggcttctttagcaatagacgg

SEQ ID NO: 244701 - DNA, 25 bp, Artificial
  probe
  misc_feature (1)..(25): SEQ ID NO: 7644; WAN024GGM_at; Start 234; Stop 258
taggcttaatcaagagaatttcgtt

SEQ ID NO: 244702 - DNA, 25 bp, Artificial
  probe
  misc_feature (1)..(25): SEQ ID NO: 7644; WAN024GGM_at; Start 114; Stop 138
ccttgatttctacataacgatggcg

SEQ ID NO: 244703 - DNA, 25 bp, Artificial
  probe
  misc_feature (1)..(25): SEQ ID NO: 7644; WAN024GGM_at; Start 187; Stop 211
tgtctcaagaataatcaactcatgg

SEQ ID NO: 244704 - DNA, 25 bp, Artificial
  probe
  misc_feature (1)..(25): SEQ ID NO: 7644; WAN024GGM_at; Start 49; Stop 73
cacacgcgcaacaaaggcttcttta

SEQ ID NO: 244705 - DNA, 25 bp, Artificial
  probe
  misc_feature (1)..(25): SEQ ID NO: 7644; WAN024GGM_at; Start 128; Stop 152
taacgatggcgaccaatcgacatct

SEQ ID NO: 244706 - DNA, 25 bp, Artificial
  probe
  misc_feature (1)..(25): SEQ ID NO: 7644; WAN024GGM_at; Start 207; Stop 231
catggtcttcaaagcgagacatatc

SEQ ID NO: 244707 - DNA, 25 bp, Artificial
  probe
  misc_feature (1)..(25): SEQ ID NO: 7644; WAN024GGM_at; Start 19; Stop 43
aaccccacctgcctgataaatcata

SEQ ID NO: 244708 - DNA, 25 bp, Artificial
  probe
  misc_feature (1)..(25): SEQ ID NO: 7644; WAN024GGM_at; Start 103; Stop 127
caggtccccatccttgatttctaca

SEQ ID NO: 244709 - DNA, 25 bp, Artificial
  probe
  misc_feature (1)..(25): SEQ ID NO: 7644; WAN024GGM_at; Start 198; Stop 222
taatcaactcatggtcttcaaagcg

SEQ ID NO: 244710 - DNA, 25 bp, Artificial
  probe
  misc_feature (1)..(25): SEQ ID NO: 7644; WAN024GGM_at; Start 146; Stop 170
gacatcttacgaagtccattgatag

SEQ ID NO: 244711 - DNA, 25 bp, Artificial
  probe
  misc_feature (1)..(25): SEQ ID NO: 7644; WAN024GGM_at; Start 221; Stop 245
cgagacatatctttaggcttaatca

SEQ ID NO: 244712 - DNA, 25 bp, Artificial
  probe
  misc_feature (1)..(25): SEQ ID NO: 7644; WAN024GGM_at; Start 122; Stop 146
tctacataacgatggcgaccaatcg

SEQ ID NO: 244713 - DNA, 25 bp, Artificial
  probe
  misc_feature (1)..(25): SEQ ID NO: 7644; WAN024GGM_at; Start 180; Stop 204
tacgacctgtctcaagaataatcaa

SEQ ID NO: 244714 - DNA, 25 bp, Artificial
  probe
  misc_feature (1)..(25): SEQ ID NO: 7644; WAN024GGM_at; Start 36; Stop 60
aaatcatattttccacacgcgcaac

SEQ ID NO: 244715 - DNA, 25 bp, Artificial
  probe
  misc_feature (1)..(25): SEQ ID NO: 7644; WAN024GGM_at; Start 136; Stop 160
gcgaccaatcgacatcttacgaagt

SEQ ID NO: 244716 - DNA, 25 bp, Artificial
  probe
  misc_feature (1)..(25): SEQ ID NO: 7644; WAN024GGM_at; Start 65; Stop 89
gcttctttagcaatagacggagccg

SEQ ID NO: 244717 - DNA, 25 bp, Artificial
  probe
  misc_feature (1)..(25): SEQ ID NO: 7644; WAN024GGM_at; Start 162; Stop 186
cattgataggttcacccatacgacc

SEQ ID NO: 244718 - DNA, 25 bp, Artificial
  probe
  misc_feature (1)..(25): SEQ ID NO: 5579; WAN024GGN_at; Start 65; Stop 89
gaatcactgaggagagccaggacgc

SEQ ID NO: 244719 - DNA, 25 bp, Artificial
  probe
  misc_feature (1)..(25): SEQ ID NO: 5579; WAN024GGN_at; Start 171; Stop 195
tataaacgatgcttccttccgatgt

SEQ ID NO: 244720 - DNA, 25 bp, Artificial
  probe
  misc_feature (1)..(25): SEQ ID NO: 5579; WAN024GGN_at; Start 256; Stop 280
tgtcccaccaaaatcaatctccgta

SEQ ID NO: 244721 - DNA, 25 bp, Artificial
  probe
  misc_feature (1)..(25): SEQ ID NO: 5579; WAN024GGN_at; Start 122; Stop 146
tcagttgcataagattcactagccg

SEQ ID NO: 244722 - DNA, 25 bp, Artificial
  probe
  misc_feature (1)..(25): SEQ ID NO: 5579; WAN024GGN_at; Start 158; Stop 182
ttgaagtcacctgtataaacgatgc

SEQ ID NO: 244723 - DNA, 25 bp, Artificial
  probe
  misc_feature (1)..(25): SEQ ID NO: 5579; WAN024GGN_at; Start 18; Stop 42
taacttcactttcactagccacctg

SEQ ID NO: 244724 - DNA, 25 bp, Artificial
  probe
  misc_feature (1)..(25): SEQ ID NO: 5579; WAN024GGN_at; Start 57; Stop 81
cattggccgaatcactgaggagagc

SEQ ID NO: 244725 - DNA, 25 bp, Artificial
  probe
  misc_feature (1)..(25): SEQ ID NO: 5579; WAN024GGN_at; Start 298; Stop 322
gaaatcattaaatttcttaacggca

SEQ ID NO: 244726 - DNA, 25 bp, Artificial
  probe
  misc_feature (1)..(25): SEQ ID NO: 5579; WAN024GGN_at; Start 53; Stop 77
tctgcattggccgaatcactgagga

SEQ ID NO: 244727 - DNA, 25 bp, Artificial
  probe
  misc_feature (1)..(25): SEQ ID NO: 5579; WAN024GGN_at; Start 83; Stop 107
aggacgccgtcacgaccaatctctg

SEQ ID NO: 244728 - DNA, 25 bp, Artificial
  probe
  misc_feature (1)..(25): SEQ ID NO: 5579; WAN024GGN_at; Start 326; Stop 350
tttcctttgacaaagagctttgcca

SEQ ID NO: 244729 - DNA, 25 bp, Artificial
  probe
  misc_feature (1)..(25): SEQ ID NO: 5579; WAN024GGN_at; Start 205; Stop 229
aattcccagactctctggaacggag

SEQ ID NO: 244730 - DNA, 25 bp, Artificial
  probe
  misc_feature (1)..(25): SEQ ID NO: 5579; WAN024GGN_at; Start 282; Stop 306
tctcatcaatgacatggaaatcatt

SEQ ID NO: 244731 - DNA, 25 bp, Artificial
  probe
  misc_feature (1)..(25): SEQ ID NO: 5579; WAN024GGN_at; Start 143; Stop 167
gccgtttggtcaaatttgaagtcac

SEQ ID NO: 244732 - DNA, 25 bp, Artificial
  probe
  misc_feature (1)..(25): SEQ ID NO: 5579; WAN024GGN_at; Start 376; Stop 400
tacaggaactttagcctctgccaag

SEQ ID NO: 244733 - DNA, 25 bp, Artificial
  probe
  misc_feature (1)..(25): SEQ ID NO: 5579; WAN024GGN_at; Start 68; Stop 92
tcactgaggagagccaggacgccgt

SEQ ID NO: 244734 - DNA, 25 bp, Artificial
  probe
  misc_feature (1)..(25): SEQ ID NO: 5579; WAN024GGN_at; Start 381; Stop 405
gaactttagcctctgccaagagata

SEQ ID NO: 244735 - DNA, 25 bp, Artificial
  probe
  misc_feature (1)..(25): SEQ ID NO: 5579; WAN024GGN_at; Start 270; Stop 294
caatctccgtattctcatcaatgac

SEQ ID NO: 244736 - DNA, 25 bp, Artificial
  probe
  misc_feature (1)..(25): SEQ ID NO: 5579; WAN024GGN_at; Start 316; Stop 340
aacggcatcatttcctttgacaaag

SEQ ID NO: 244737 - DNA, 25 bp, Artificial
  probe
  misc_feature (1)..(25): SEQ ID NO: 5579; WAN024GGN_at; Start 215; Stop 239
ctctctggaacggagtaagtcgtag

SEQ ID NO: 244738 - DNA, 25 bp, Artificial
  probe
  misc_feature (1)..(25): SEQ ID NO: 5579; WAN024GGN_at; Start 2; Stop 26
tgggtaatttcatccctaacttcac

SEQ ID NO: 244739 - DNA, 25 bp, Artificial
  probe
  misc_feature (1)..(25): SEQ ID NO: 5579; WAN024GGN_at; Start 92; Stop 116
tcacgaccaatctctgccaaacgag

SEQ ID NO: 244740 - DNA, 25 bp, Artificial
  probe
  misc_feature (1)..(25): SEQ ID NO: 5579; WAN024GGN_at; Start 108; Stop 132
ccaaacgagcaaaatcagttgcata

SEQ ID NO: 244741 - DNA, 25 bp, Artificial
  probe
  misc_feature (1)..(25): SEQ ID NO: 5579; WAN024GGN_at; Start 339; Stop 363
agagctttgccaactcaatggtcaa

SEQ ID NO: 244742 - DNA, 25 bp, Artificial
  probe
  misc_feature (1)..(25): SEQ ID NO: 5579; WAN024GGN_at; Start 42; Stop 66
gaatattgctgtctgcattggccga

SEQ ID NO: 244743 - DNA, 25 bp, Artificial
  probe
  misc_feature (1)..(25): SEQ ID NO: 5579; WAN024GGN_at; Start 241; Stop 265
gaagaaggaaaccactgtcccacca

SEQ ID NO: 244744 - DNA, 25 bp, Artificial
  probe
  misc_feature (1)..(25): SEQ ID NO: 5579; WAN024GGN_at; Start 33; Stop 57
tagccacctgaatattgctgtctgc

SEQ ID NO: 244745 - DNA, 25 bp, Artificial
  probe
  misc_feature (1)..(25): SEQ ID NO: 5579; WAN024GGN_at; Start 131; Stop 155
taagattcactagccgtttggtcaa

SEQ ID NO: 244746 - DNA, 25 bp, Artificial
  probe
  misc_feature (1)..(25): SEQ ID NO: 5579; WAN024GGN_at; Start 104; Stop 128
tctgccaaacgagcaaaatcagttg

SEQ ID NO: 244747 - DNA, 25 bp, Artificial
  probe
  misc_feature (1)..(25): SEQ ID NO: 5579; WAN024GGN_at; Start 357; Stop 381
tggtcaactcagacccaaatacagg

SEQ ID NO: 244748 - DNA, 25 bp, Artificial
  probe
  misc_feature (1)..(25): SEQ ID NO: 5579; WAN024GGN_at; Start 177; Stop 201
cgatgcttccttccgatgtcttcaa

SEQ ID NO: 244749 - DNA, 25 bp, Artificial
  probe
  misc_feature (1)..(25): SEQ ID NO: 5579; WAN024GGN_at; Start 346; Stop 370
tgccaactcaatggtcaactcagac

SEQ ID NO: 244750 - DNA, 25 bp, Artificial
  probe
  misc_feature (1)..(25): SEQ ID NO: 5579; WAN024GGN_at; Start 191; Stop 215
gatgtcttcaagacaattcccagac

SEQ ID NO: 244751 - DNA, 25 bp, Artificial
  probe
  misc_feature (1)..(25): SEQ ID NO: 5579; WAN024GGN_at; Start 365; Stop 389
tcagacccaaatacaggaactttag

SEQ ID NO: 244752 - DNA, 25 bp, Artificial
  probe
  misc_feature (1)..(25): SEQ ID NO: 1604; WAN024GGO_at; Start 1343; Stop 1367
gaaatgttgttcttcgtgaccgtaa

SEQ ID NO: 244753 - DNA, 25 bp, Artificial
  probe
  misc_feature (1)..(25): SEQ ID NO: 1604; WAN024GGO_at; Start 1287; Stop 1311
tggatcggtttcagcaggagatatc

SEQ ID NO: 244754 - DNA, 25 bp, Artificial
  probe
  misc_feature (1)..(25): SEQ ID NO: 1604; WAN024GGO_at; Start 702; Stop 726
tattcagcagatttttgacgctgcg

SEQ ID NO: 244755 - DNA, 25 bp, Artificial
  probe
  misc_feature (1)..(25): SEQ ID NO: 1604; WAN024GGO_at; Start 585; Stop 609
tgcagacagcaatattcaggtggct

SEQ ID NO: 244756 - DNA, 25 bp, Artificial
  probe
  misc_feature (1)..(25): SEQ ID NO: 1604; WAN024GGO_at; Start 240; Stop 264
tctcttggcagaggctaaagttcct

SEQ ID NO: 244757 - DNA, 25 bp, Artificial
  probe
  misc_feature (1)..(25): SEQ ID NO: 1604; WAN024GGO_at; Start 906; Stop 930
tatcaatggacttcgtaagatgtcg

SEQ ID NO: 244758 - DNA, 25 bp, Artificial
  probe
  misc_feature (1)..(25): SEQ ID NO: 1604; WAN024GGO_at; Start 58; Stop 82
tacattgctgaaattggagagtcca

SEQ ID NO: 244759 - DNA, 25 bp, Artificial
  probe
  misc_feature (1)..(25): SEQ ID NO: 1604; WAN024GGO_at; Start 490; Stop 514
gaccaaacggctagtgaatcttatg

SEQ ID NO: 244760 - DNA, 25 bp, Artificial
  probe
  misc_feature (1)..(25): SEQ ID NO: 1604; WAN024GGO_at; Start 831; Stop 855
gattaagcctaaagatatgtctcgc

SEQ ID NO: 244761 - DNA, 25 bp, Artificial
  probe
  misc_feature (1)..(25): SEQ ID NO: 1604; WAN024GGO_at; Start 718; Stop 742
gacgctgcggataaaacaggtcgac

SEQ ID NO: 244762 - DNA, 25 bp, Artificial
  probe
  misc_feature (1)..(25): SEQ ID NO: 1604; WAN024GGO_at; Start 168; Stop 192
tgaaaatagcgaccgtattgctggg

SEQ ID NO: 244763 - DNA, 25 bp, Artificial
  probe
  misc_feature (1)..(25): SEQ ID NO: 1604; WAN024GGO_at; Start 1540; Stop 1564
caaggagatgactttgactgggcag

SEQ ID NO: 244764 - DNA, 25 bp, Artificial
  probe
  misc_feature (1)..(25): SEQ ID NO: 1604; WAN024GGO_at; Start 302; Stop 326
tctttgtcaaaggaaatgatgccgt

SEQ ID NO: 244765 - DNA, 25 bp, Artificial
  probe
  misc_feature (1)..(25): SEQ ID NO: 1604; WAN024GGO_at; Start 515; Stop 539
caactgattttgctcgtttggcaga

SEQ ID NO: 244766 - DNA, 25 bp, Artificial
  probe
  misc_feature (1)..(25): SEQ ID NO: 1604; WAN024GGO_at; Start 640; Stop 664
caaactattgctgactgggaaggtc

SEQ ID NO: 244767 - DNA, 25 bp, Artificial
  probe
  misc_feature (1)..(25): SEQ ID NO: 1604; WAN024GGO_at; Start 20; Stop 44
caacacttggtggtgtgcgtgagaa

SEQ ID NO: 244768 - DNA, 25 bp, Artificial
  probe
  misc_feature (1)..(25): SEQ ID NO: 1604; WAN024GGO_at; Start 194; Stop 218
ttttcttgacccacgggcatgcgga

SEQ ID NO: 244769 - DNA, 25 bp, Artificial
  probe
  misc_feature (1)..(25): SEQ ID NO: 1604; WAN024GGO_at; Start 1075; Stop 1099
agtttacatgtatcagggcacggaa

SEQ ID NO: 244770 - DNA, 25 bp, Artificial
  probe
  misc_feature (1)..(25): SEQ ID NO: 1604; WAN024GGO_at; Start 984; Stop 1008
tacggctccgtctattgctaaagaa

SEQ ID NO: 244771 - DNA, 25 bp, Artificial
  probe
  misc_feature (1)..(25): SEQ ID NO: 1604; WAN024GGO_at; Start 1180; Stop 1204
gatgctcacgctaaggctgccatgg

SEQ ID NO: 244772 - DNA, 25 bp, Artificial
  probe
  misc_feature (1)..(25): SEQ ID NO: 1604; WAN024GGO_at; Start 1413; Stop 1437
ccgtcgtgagaagaaaattgtggct

SEQ ID NO: 244773 - DNA, 25 bp, Artificial
  probe
  misc_feature (1)..(25): SEQ ID NO: 1604; WAN024GGO_at; Start 1248; Stop 1272
gacgaccatggcttacgagaatgga

SEQ ID NO: 244774 - DNA, 25 bp, Artificial
  probe
  misc_feature (1)..(25): SEQ ID NO: 1604; WAN024GGO_at; Start 570; Stop 594
cagtgattcggccaatgcagacagc

SEQ ID NO: 244775 - DNA, 25 bp, Artificial
  probe
  misc_feature (1)..(25): SEQ ID NO: 1604; WAN024GGO_at; Start 1269; Stop 1293
tggagactttgttccagctggatcg

SEQ ID NO: 244776 - DNA, 25 bp, Artificial
  probe
  misc_feature (1)..(25): SEQ ID NO: 1604; WAN024GGO_at; Start 1476; Stop 1500
gaagagtcgcgatattctccgtgaa

SEQ ID NO: 244777 - DNA, 25 bp, Artificial
  probe
  misc_feature (1)..(25): SEQ ID NO: 1604; WAN024GGO_at; Start 658; Stop 682
gaaggtcgtatcatcgttgcagctg

SEQ ID NO: 244778 - DNA, 25 bp, Artificial
  probe
  misc_feature (1)..(25): SEQ ID NO: 1604; WAN024GGO_at; Start 771; Stop 795
aaatatcgtccgcacagcgattcgt

SEQ ID NO: 244779 - DNA, 25 bp, Artificial
  probe
  misc_feature (1)..(25): SEQ ID NO: 1604; WAN024GGO_at; Start 410; Stop 434
cttactccgttccagagagtctggg

SEQ ID NO: 244780 - DNA, 25 bp, Artificial
  probe
  misc_feature (1)..(25): SEQ ID NO: 1604; WAN024GGO_at; Start 1204; Stop 1228
gcagttgggatgttgccagaacgca

SEQ ID NO: 244781 - DNA, 25 bp, Artificial
  probe
  misc_feature (1)..(25): SEQ ID NO: 1604; WAN024GGO_at; Start 846; Stop 870
tatgtctcgctttgaagaccatgag

SEQ ID NO: 244782 - DNA, 25 bp, Artificial
  probe
  misc_feature (1)..(25): SEQ ID NO: 1604; WAN024GGO_at; Start 930; Stop 954
gattggtcgccatcgttatgtagaa

SEQ ID NO: 244783 - DNA, 25 bp, Artificial
  probe
  misc_feature (1)..(25): SEQ ID NO: 1604; WAN024GGO_at; Start 553; Stop 577
ggcgtcctggctctcctcagtgatt

SEQ ID NO: 244784 - DNA, 25 bp, Artificial
  probe
  misc_feature (1)..(25): SEQ ID NO: 1604; WAN024GGO_at; Start 1360; Stop 1384
gaccgtaaggtcttgtcagaggatg

SEQ ID NO: 244785 - DNA, 25 bp, Artificial
  probe
  misc_feature (1)..(25): SEQ ID NO: 1604; WAN024GGO_at; Start 536; Stop 560
cagagattggtcgtgacggcgtcct

SEQ ID NO: 244786 - DNA, 25 bp, Artificial
  probe
  misc_feature (1)..(25): SEQ ID NO: 3029; WAN024GGP_at; Start 269; Stop 293
atagaagccgaagtcatgccatccg

SEQ ID NO: 244787 - DNA, 25 bp, Artificial
  probe
  misc_feature (1)..(25): SEQ ID NO: 3029; WAN024GGP_at; Start 107; Stop 131
tcatgaccagcaaccccattgtcca

SEQ ID NO: 244788 - DNA, 25 bp, Artificial
  probe
  misc_feature (1)..(25): SEQ ID NO: 3029; WAN024GGP_at; Start 42; Stop 66
caggcatggaatgatggtctgtcac

SEQ ID NO: 244789 - DNA, 25 bp, Artificial
  probe
  misc_feature (1)..(25): SEQ ID NO: 3029; WAN024GGP_at; Start 2; Stop 26
tgttcaggatggacaatagcataag

SEQ ID NO: 244790 - DNA, 25 bp, Artificial
  probe
  misc_feature (1)..(25): SEQ ID NO: 3029; WAN024GGP_at; Start 62; Stop 86
gtcacaatgacatctactcccatag

SEQ ID NO: 244791 - DNA, 25 bp, Artificial
  probe
  misc_feature (1)..(25): SEQ ID NO: 3029; WAN024GGP_at; Start 90; Stop 114
gagccaatgcaatagcctcatgacc

SEQ ID NO: 244792 - DNA, 25 bp, Artificial
  probe
  misc_feature (1)..(25): SEQ ID NO: 3029; WAN024GGP_at; Start 76; Stop 100
tactcccatagactgagccaatgca

SEQ ID NO: 244793 - DNA, 25 bp, Artificial
  probe
  misc_feature (1)..(25): SEQ ID NO: 3029; WAN024GGP_at; Start 315; Stop 339
gaatattttccccttcttcaatagc

SEQ ID NO: 244794 - DNA, 25 bp, Artificial
  probe
  misc_feature (1)..(25): SEQ ID NO: 3029; WAN024GGP_at; Start 366; Stop 390
ccatatcatggagcagataagcatc

SEQ ID NO: 244795 - DNA, 25 bp, Artificial
  probe
  misc_feature (1)..(25): SEQ ID NO: 3029; WAN024GGP_at; Start 232; Stop 256
gcactcagcaccaagttgttccaaa

SEQ ID NO: 244796 - DNA, 25 bp, Artificial
  probe
  misc_feature (1)..(25): SEQ ID NO: 3029; WAN024GGP_at; Start 216; Stop 240
ttggcaggtaaactcggcactcagc

SEQ ID NO: 244797 - DNA, 25 bp, Artificial
  probe
  misc_feature (1)..(25): SEQ ID NO: 3029; WAN024GGP_at; Start 355; Stop 379
cactgccttgtccatatcatggagc

SEQ ID NO: 244798 - DNA, 25 bp, Artificial
  probe
  misc_feature (1)..(25): SEQ ID NO: 3029; WAN024GGP_at; Start 248; Stop 272
tgttccaaactttccttcacaatag

SEQ ID NO: 244799 - DNA, 25 bp, Artificial
  probe
  misc_feature (1)..(25): SEQ ID NO: 3029; WAN024GGP_at; Start 29; Stop 53
tctggcagggtttcaggcatggaat

SEQ ID NO: 244800 - DNA, 25 bp, Artificial
  probe
  misc_feature (1)..(25): SEQ ID NO: 3029; WAN024GGP_at; Start 126; Stop 150
tgtccaccgtcacaatcaaggaaat

SEQ ID NO: 244801 - DNA, 25 bp, Artificial
  probe
  misc_feature (1)..(25): SEQ ID NO: 3029; WAN024GGP_at; Start 210; Stop 234
aacgatttggcaggtaaactcggca

SEQ ID NO: 244802 - DNA, 25 bp, Artificial
  probe
  misc_feature (1)..(25): SEQ ID NO: 3029; WAN024GGP_at; Start 263; Stop 287
ttcacaatagaagccgaagtcatgc

SEQ ID NO: 244803 - DNA, 25 bp, Artificial
  probe
  misc_feature (1)..(25): SEQ ID NO: 3029; WAN024GGP_at; Start 23; Stop 47
taagcatctggcagggtttcaggca

SEQ ID NO: 244804 - DNA, 25 bp, Artificial
  probe
  misc_feature (1)..(25): SEQ ID NO: 3029; WAN024GGP_at; Start 372; Stop 396
catggagcagataagcatcatgtaa

SEQ ID NO: 244805 - DNA, 25 bp, Artificial
  probe
  misc_feature (1)..(25): SEQ ID NO: 3029; WAN024GGP_at; Start 49; Stop 73
ggaatgatggtctgtcacaatgaca

SEQ ID NO: 244806 - DNA, 25 bp, Artificial
  probe
  misc_feature (1)..(25): SEQ ID NO: 3029; WAN024GGP_at; Start 223; Stop 247
gtaaactcggcactcagcaccaagt

SEQ ID NO: 244807 - DNA, 25 bp, Artificial
  probe
  misc_feature (1)..(25): SEQ ID NO: 3029; WAN024GGP_at; Start 97; Stop 121
tgcaatagcctcatgaccagcaacc

SEQ ID NO: 244808 - DNA, 25 bp, Artificial
  probe
  misc_feature (1)..(25): SEQ ID NO: 3029; WAN024GGP_at; Start 123; Stop 147
cattgtccaccgtcacaatcaagga

SEQ ID NO: 244809 - DNA, 25 bp, Artificial
  probe
  misc_feature (1)..(25): SEQ ID NO: 3029; WAN024GGP_at; Start 192; Stop 216
ggccatagccatcggtaaaacgatt

SEQ ID NO: 244810 - DNA, 25 bp, Artificial
  probe
  misc_feature (1)..(25): SEQ ID NO: 3029; WAN024GGP_at; Start 183; Stop 207
tagcattagggccatagccatcggt

SEQ ID NO: 244811 - DNA, 25 bp, Artificial
  probe
  misc_feature (1)..(25): SEQ ID NO: 3029; WAN024GGP_at; Start 341; Stop 365
tgacgaatccgctccactgccttgt

SEQ ID NO: 244812 - DNA, 25 bp, Artificial
  probe
  misc_feature (1)..(25): SEQ ID NO: 3029; WAN024GGP_at; Start 82; Stop 106
catagactgagccaatgcaatagcc

SEQ ID NO: 244813 - DNA, 25 bp, Artificial
  probe
  misc_feature (1)..(25): SEQ ID NO: 3029; WAN024GGP_at; Start 15; Stop 39
caatagcataagcatctggcagggt

SEQ ID NO: 244814 - DNA, 25 bp, Artificial
  probe
  misc_feature (1)..(25): SEQ ID NO: 3029; WAN024GGP_at; Start 170; Stop 194
tatttataaacactagcattagggc

SEQ ID NO: 244815 - DNA, 25 bp, Artificial
  probe
  misc_feature (1)..(25): SEQ ID NO: 3029; WAN024GGP_at; Start 286; Stop 310
gccatccgcatcatagtctccataa

SEQ ID NO: 244816 - DNA, 25 bp, Artificial
  probe
  misc_feature (1)..(25): SEQ ID NO: 3029; WAN024GGP_at; Start 152; Stop 176
ccttcttgctcgataaagtatttat

SEQ ID NO: 244817 - DNA, 25 bp, Artificial
  probe
  misc_feature (1)..(25): SEQ ID NO: 3029; WAN024GGP_at; Start 201; Stop 225
catcggtaaaacgatttggcaggta

SEQ ID NO: 244818 - DNA, 25 bp, Artificial
  probe
  misc_feature (1)..(25): SEQ ID NO: 3029; WAN024GGP_at; Start 278; Stop 302
gaagtcatgccatccgcatcatagt

SEQ ID NO: 244819 - DNA, 25 bp, Artificial
  probe
  misc_feature (1)..(25): SEQ ID NO: 3029; WAN024GGP_at; Start 176; Stop 200
taaacactagcattagggccatagc

SEQ ID NO: 244820 - DNA, 25 bp, Artificial
  probe
  misc_feature (1)..(25): SEQ ID NO: 3910; WAN024GGQ_at; Start 43; Stop 67
tccagtcaacaaatcaatggcagga

SEQ ID NO: 244821 - DNA, 25 bp, Artificial
  probe
  misc_feature (1)..(25): SEQ ID NO: 3910; WAN024GGQ_at; Start 160; Stop 184
catgtccagcatttcttgcagacca

SEQ ID NO: 244822 - DNA, 25 bp, Artificial
  probe
  misc_feature (1)..(25): SEQ ID NO: 3910; WAN024GGQ_at; Start 136; Stop 160
tacttcgttggcagcaatcccagcc

SEQ ID NO: 244823 - DNA, 25 bp, Artificial
  probe
  misc_feature (1)..(25): SEQ ID NO: 3910; WAN024GGQ_at; Start 9; Stop 33
taagggcaatctcatgcgcttcctc

SEQ ID NO: 244824 - DNA, 25 bp, Artificial
  probe
  misc_feature (1)..(25): SEQ ID NO: 3910; WAN024GGQ_at; Start 169; Stop 193
catttcttgcagaccaatgcgctgg

SEQ ID NO: 244825 - DNA, 25 bp, Artificial
  probe
  misc_feature (1)..(25): SEQ ID NO: 3910; WAN024GGQ_at; Start 179; Stop 203
agaccaatgcgctgggtatgaccca

SEQ ID NO: 244826 - DNA, 25 bp, Artificial
  probe
  misc_feature (1)..(25): SEQ ID NO: 3910; WAN024GGQ_at; Start 191; Stop 215
tgggtatgacccaacatttccagac

SEQ ID NO: 244827 - DNA, 25 bp, Artificial
  probe
  misc_feature (1)..(25): SEQ ID NO: 3910; WAN024GGQ_at; Start 124; Stop 148
cgtttcttctgttacttcgttggca

SEQ ID NO: 244828 - DNA, 25 bp, Artificial
  probe
  misc_feature (1)..(25): SEQ ID NO: 3910; WAN024GGQ_at; Start 72; Stop 96
gatcatccaagcgacccaaggcatt

SEQ ID NO: 244829 - DNA, 25 bp, Artificial
  probe
  misc_feature (1)..(25): SEQ ID NO: 3910; WAN024GGQ_at; Start 92; Stop 116
gcattcaaacgaggagcaatctgga

SEQ ID NO: 244830 - DNA, 25 bp, Artificial
  probe
  misc_feature (1)..(25): SEQ ID NO: 3910; WAN024GGQ_at; Start 131; Stop 155
tctgttacttcgttggcagcaatcc

SEQ ID NO: 244831 - DNA, 25 bp, Artificial
  probe
  misc_feature (1)..(25): SEQ ID NO: 3910; WAN024GGQ_at; Start 24; Stop 48
gcgcttcctcatcatcaaatccagt

SEQ ID NO: 244832 - DNA, 25 bp, Artificial
  probe
  misc_feature (1)..(25): SEQ ID NO: 3910; WAN024GGQ_at; Start 57; Stop 81
caatggcaggattgggatcatccaa

SEQ ID NO: 244833 - DNA, 25 bp, Artificial
  probe
  misc_feature (1)..(25): SEQ ID NO: 3910; WAN024GGQ_at; Start 18; Stop 42
tctcatgcgcttcctcatcatcaaa

SEQ ID NO: 244834 - DNA, 25 bp, Artificial
  probe
  misc_feature (1)..(25): SEQ ID NO: 3910; WAN024GGQ_at; Start 63; Stop 87
caggattgggatcatccaagcgacc

SEQ ID NO: 244835 - DNA, 25 bp, Artificial
  probe
  misc_feature (1)..(25): SEQ ID NO: 3910; WAN024GGQ_at; Start 105; Stop 129
gagcaatctggaaaccaaccgtttc

SEQ ID NO: 244836 - DNA, 25 bp, Artificial
  probe
  misc_feature (1)..(25): SEQ ID NO: 3910; WAN024GGQ_at; Start 69; Stop 93
tgggatcatccaagcgacccaaggc

SEQ ID NO: 244837 - DNA, 25 bp, Artificial
  probe
  misc_feature (1)..(25): SEQ ID NO: 3910; WAN024GGQ_at; Start 84; Stop 108
gacccaaggcattcaaacgaggagc

SEQ ID NO: 244838 - DNA, 25 bp, Artificial
  probe
  misc_feature (1)..(25): SEQ ID NO: 3910; WAN024GGQ_at; Start 140; Stop 164
tcgttggcagcaatcccagccatgt

SEQ ID NO: 244839 - DNA, 25 bp, Artificial
  probe
  misc_feature (1)..(25): SEQ ID NO: 3910; WAN024GGQ_at; Start 149; Stop 173
gcaatcccagccatgtccagcattt

SEQ ID NO: 244840 - DNA, 25 bp, Artificial
  probe
  misc_feature (1)..(25): SEQ ID NO: 3910; WAN024GGQ_at; Start 173; Stop 197
tcttgcagaccaatgcgctgggtat

SEQ ID NO: 244841 - DNA, 25 bp, Artificial
  probe
  misc_feature (1)..(25): SEQ ID NO: 3910; WAN024GGQ_at; Start 110; Stop 134
atctggaaaccaaccgtttcttctg

SEQ ID NO: 244842 - DNA, 25 bp, Artificial
  probe
  misc_feature (1)..(25): SEQ ID NO: 3910; WAN024GGQ_at; Start 38; Stop 62
tcaaatccagtcaacaaatcaatgg

SEQ ID NO: 244843 - DNA, 25 bp, Artificial
  probe
  misc_feature (1)..(25): SEQ ID NO: 3910; WAN024GGQ_at; Start 102; Stop 126
gaggagcaatctggaaaccaaccgt

SEQ ID NO: 244844 - DNA, 25 bp, Artificial
  probe
  misc_feature (1)..(25): SEQ ID NO: 3910; WAN024GGQ_at; Start 204; Stop 228
acatttccagaccatattgaactaa

SEQ ID NO: 244845 - DNA, 25 bp, Artificial
  probe
  misc_feature (1)..(25): SEQ ID NO: 3910; WAN024GGQ_at; Start 144; Stop 168
tggcagcaatcccagccatgtccag

SEQ ID NO: 244846 - DNA, 25 bp, Artificial
  probe
  misc_feature (1)..(25): SEQ ID NO: 3910; WAN024GGQ_at; Start 52; Stop 76
caaatcaatggcaggattgggatca

SEQ ID NO: 244847 - DNA, 25 bp, Artificial
  probe
  misc_feature (1)..(25): SEQ ID NO: 3910; WAN024GGQ_at; Start 97; Stop 121
caaacgaggagcaatctggaaacca

SEQ ID NO: 244848 - DNA, 25 bp, Artificial
  probe
  misc_feature (1)..(25): SEQ ID NO: 3910; WAN024GGQ_at; Start 88; Stop 112
caaggcattcaaacgaggagcaatc

SEQ ID NO: 244849 - DNA, 25 bp, Artificial
  probe
  misc_feature (1)..(25): SEQ ID NO: 3910; WAN024GGQ_at; Start 4; Stop 28
aatcataagggcaatctcatgcgct

SEQ ID NO: 244850 - DNA, 25 bp, Artificial
  probe
  misc_feature (1)..(25): SEQ ID NO: 3910; WAN024GGQ_at; Start 156; Stop 180
cagccatgtccagcatttcttgcag

SEQ ID NO: 244851 - DNA, 25 bp, Artificial
  probe
  misc_feature (1)..(25): SEQ ID NO: 3910; WAN024GGQ_at; Start 79; Stop 103
caagcgacccaaggcattcaaacga

SEQ ID NO: 244852 - DNA, 25 bp, Artificial
  probe
  misc_feature (1)..(25): SEQ ID NO: 3910; WAN024GGQ_at; Start 198; Stop 222
gacccaacatttccagaccatattg

SEQ ID NO: 244853 - DNA, 25 bp, Artificial
  probe
  misc_feature (1)..(25): SEQ ID NO: 3910; WAN024GGQ_at; Start 183; Stop 207
caatgcgctgggtatgacccaacat

SEQ ID NO: 244854 - DNA, 25 bp, Artificial
  probe
  misc_feature (1)..(25): SEQ ID NO: 2101; WAN024GGR_at; Start 203; Stop 227
gcagtttggccattccattggttga

SEQ ID NO: 244855 - DNA, 25 bp, Artificial
  probe
  misc_feature (1)..(25): SEQ ID NO: 2101; WAN024GGR_at; Start 36; Stop 60
tatcctctggaatgttttttacgac

SEQ ID NO: 244856 - DNA, 25 bp, Artificial
  probe
  misc_feature (1)..(25): SEQ ID NO: 2101; WAN024GGR_at; Start 109; Stop 133
gactggaacaccttctggcaagact

SEQ ID NO: 244857 - DNA, 25 bp, Artificial
  probe
  misc_feature (1)..(25): SEQ ID NO: 2101; WAN024GGR_at; Start 96; Stop 120
caggaaaatccaagactggaacacc

SEQ ID NO: 244858 - DNA, 25 bp, Artificial
  probe
  misc_feature (1)..(25): SEQ ID NO: 2101; WAN024GGR_at; Start 76; Stop 100
cgcaagatttggcagttctccagga

SEQ ID NO: 244859 - DNA, 25 bp, Artificial
  probe
  misc_feature (1)..(25): SEQ ID NO: 2101; WAN024GGR_at; Start 2; Stop 26
tgctgttcctgaaaaatggtcttca

SEQ ID NO: 244860 - DNA, 25 bp, Artificial
  probe
  misc_feature (1)..(25): SEQ ID NO: 2101; WAN024GGR_at; Start 158; Stop 182
agttgaacaccttccactcgcgcat

SEQ ID NO: 244861 - DNA, 25 bp, Artificial
  probe
  misc_feature (1)..(25): SEQ ID NO: 2101; WAN024GGR_at; Start 130; Stop 154
gactgcattttttccacgaatgtta

SEQ ID NO: 244862 - DNA, 25 bp, Artificial
  probe
  misc_feature (1)..(25): SEQ ID NO: 2101; WAN024GGR_at; Start 102; Stop 126
aatccaagactggaacaccttctgg

SEQ ID NO: 244863 - DNA, 25 bp, Artificial
  probe
  misc_feature (1)..(25): SEQ ID NO: 2101; WAN024GGR_at; Start 50; Stop 74
ttttttacgacaacagcttcactag

SEQ ID NO: 244864 - DNA, 25 bp, Artificial
  probe
  misc_feature (1)..(25): SEQ ID NO: 2101; WAN024GGR_at; Start 11; Stop 35
tgaaaaatggtcttcagctgagtaa

SEQ ID NO: 244865 - DNA, 25 bp, Artificial
  probe
  misc_feature (1)..(25): SEQ ID NO: 2101; WAN024GGR_at; Start 82; Stop 106
atttggcagttctccaggaaaatcc

SEQ ID NO: 244866 - DNA, 25 bp, Artificial
  probe
  misc_feature (1)..(25): SEQ ID NO: 2101; WAN024GGR_at; Start 42; Stop 66
ctggaatgttttttacgacaacagc

SEQ ID NO: 244867 - DNA, 25 bp, Artificial
  probe
  misc_feature (1)..(25): SEQ ID NO: 2101; WAN024GGR_at; Start 25; Stop 49
cagctgagtaatatcctctggaatg

SEQ ID NO: 244868 - DNA, 25 bp, Artificial
  probe
  misc_feature (1)..(25): SEQ ID NO: 2101; WAN024GGR_at; Start 177; Stop 201
gcgcatccaccatcatcaactggag

SEQ ID NO: 244869 - DNA, 25 bp, Artificial
  probe
  misc_feature (1)..(25): SEQ ID NO: 2101; WAN024GGR_at; Start 209; Stop 233
tggccattccattggttgacagaca

SEQ ID NO: 244870 - DNA, 25 bp, Artificial
  probe
  misc_feature (1)..(25): SEQ ID NO: 2101; WAN024GGR_at; Start 222; Stop 246
ggttgacagacaatttaaccgctaa

SEQ ID NO: 244871 - DNA, 25 bp, Artificial
  probe
  misc_feature (1)..(25): SEQ ID NO: 2101; WAN024GGR_at; Start 53; Stop 77
tttacgacaacagcttcactagccg

SEQ ID NO: 244872 - DNA, 25 bp, Artificial
  probe
  misc_feature (1)..(25): SEQ ID NO: 2101; WAN024GGR_at; Start 117; Stop 141
caccttctggcaagactgcattttt

SEQ ID NO: 244873 - DNA, 25 bp, Artificial
  probe
  misc_feature (1)..(25): SEQ ID NO: 2101; WAN024GGR_at; Start 90; Stop 114
gttctccaggaaaatccaagactgg

SEQ ID NO: 244874 - DNA, 25 bp, Artificial
  probe
  misc_feature (1)..(25): SEQ ID NO: 2101; WAN024GGR_at; Start 86; Stop 110
ggcagttctccaggaaaatccaaga

SEQ ID NO: 244875 - DNA, 25 bp, Artificial
  probe
  misc_feature (1)..(25): SEQ ID NO: 2101; WAN024GGR_at; Start 155; Stop 179
aaaagttgaacaccttccactcgcg

SEQ ID NO: 244876 - DNA, 25 bp, Artificial
  probe
  misc_feature (1)..(25): SEQ ID NO: 2101; WAN024GGR_at; Start 16; Stop 40
aatggtcttcagctgagtaatatcc

SEQ ID NO: 244877 - DNA, 25 bp, Artificial
  probe
  misc_feature (1)..(25): SEQ ID NO: 2101; WAN024GGR_at; Start 142; Stop 166
tccacgaatgttaaaaagttgaaca

SEQ ID NO: 244878 - DNA, 25 bp, Artificial
  probe
  misc_feature (1)..(25): SEQ ID NO: 2101; WAN024GGR_at; Start 106; Stop 130
caagactggaacaccttctggcaag

SEQ ID NO: 244879 - DNA, 25 bp, Artificial
  probe
  misc_feature (1)..(25): SEQ ID NO: 2101; WAN024GGR_at; Start 67; Stop 91
ttcactagccgcaagatttggcagt

SEQ ID NO: 244880 - DNA, 25 bp, Artificial
  probe
  misc_feature (1)..(25): SEQ ID NO: 2101; WAN024GGR_at; Start 21; Stop 45
tcttcagctgagtaatatcctctgg

SEQ ID NO: 244881 - DNA, 25 bp, Artificial
  probe
  misc_feature (1)..(25): SEQ ID NO: 2101; WAN024GGR_at; Start 125; Stop 149
ggcaagactgcattttttccacgaa

SEQ ID NO: 244882 - DNA, 25 bp, Artificial
  probe
  misc_feature (1)..(25): SEQ ID NO: 2101; WAN024GGR_at; Start 78; Stop 102
caagatttggcagttctccaggaaa

SEQ ID NO: 244883 - DNA, 25 bp, Artificial
  probe
  misc_feature (1)..(25): SEQ ID NO: 2101; WAN024GGR_at; Start 58; Stop 82
gacaacagcttcactagccgcaaga

SEQ ID NO: 244884 - DNA, 25 bp, Artificial
  probe
  misc_feature (1)..(25): SEQ ID NO: 2101; WAN024GGR_at; Start 62; Stop 86
acagcttcactagccgcaagatttg

SEQ ID NO: 244885 - DNA, 25 bp, Artificial
  probe
  misc_feature (1)..(25): SEQ ID NO: 2101; WAN024GGR_at; Start 211; Stop 235
gccattccattggttgacagacaat

SEQ ID NO: 244886 - DNA, 25 bp, Artificial
  probe
  misc_feature (1)..(25): SEQ ID NO: 2101; WAN024GGR_at; Start 72; Stop 96
tagccgcaagatttggcagttctcc

SEQ ID NO: 244887 - DNA, 25 bp, Artificial
  probe
  misc_feature (1)..(25): SEQ ID NO: 2101; WAN024GGR_at; Start 113; Stop 137
ggaacaccttctggcaagactgcat

SEQ ID NO: 244888 - DNA, 25 bp, Artificial
  probe
  misc_feature (1)..(25): SEQ ID NO: 4149; WAN024GGS_at; Start 1634; Stop 1658
tcaaccaatggaatggccaaactgc

SEQ ID NO: 244889 - DNA, 25 bp, Artificial
  probe
  misc_feature (1)..(25): SEQ ID NO: 4149; WAN024GGS_at; Start 2090; Stop 2114
tgatgacagtcaataaagaggcgcc

SEQ ID NO: 244890 - DNA, 25 bp, Artificial
  probe
  misc_feature (1)..(25): SEQ ID NO: 4149; WAN024GGS_at; Start 2166; Stop 2190
taaagaccaagaaatgatggcgctg

SEQ ID NO: 244891 - DNA, 25 bp, Artificial
  probe
  misc_feature (1)..(25): SEQ ID NO: 4149; WAN024GGS_at; Start 2186; Stop 2210
cgctgggtacggtgcaagaaattta

SEQ ID NO: 244892 - DNA, 25 bp, Artificial
  probe
  misc_feature (1)..(25): SEQ ID NO: 4149; WAN024GGS_at; Start 637; Stop 661
gcttgtgccctgttagaagaagtgc

SEQ ID NO: 244893 - DNA, 25 bp, Artificial
  probe
  misc_feature (1)..(25): SEQ ID NO: 4149; WAN024GGS_at; Start 366; Stop 390
tcgttttaccgatggctatggccct

SEQ ID NO: 244894 - DNA, 25 bp, Artificial
  probe
  misc_feature (1)..(25): SEQ ID NO: 4149; WAN024GGS_at; Start 1316; Stop 1340
ttcgtgaaaaaggtgcagatgctgg

SEQ ID NO: 244895 - DNA, 25 bp, Artificial
  probe
  misc_feature (1)..(25): SEQ ID NO: 4149; WAN024GGS_at; Start 342; Stop 366
tgagtgccgagtttacctgccaaat

SEQ ID NO: 244896 - DNA, 25 bp, Artificial
  probe
  misc_feature (1)..(25): SEQ ID NO: 4149; WAN024GGS_at; Start 40; Stop 64
tttgccctgcaggtagaagatgcgg

SEQ ID NO: 244897 - DNA, 25 bp, Artificial
  probe
  misc_feature (1)..(25): SEQ ID NO: 4149; WAN024GGS_at; Start 1003; Stop 1027
tatgaagaagccaagaccatggtgg

SEQ ID NO: 244898 - DNA, 25 bp, Artificial
  probe
  misc_feature (1)..(25): SEQ ID NO: 4149; WAN024GGS_at; Start 80; Stop 104
ccaagaaggctggactgggtcctga

SEQ ID NO: 244899 - DNA, 25 bp, Artificial
  probe
  misc_feature (1)..(25): SEQ ID NO: 4149; WAN024GGS_at; Start 801; Stop 825
catggctgggattgctgccaacgaa

SEQ ID NO: 244900 - DNA, 25 bp, Artificial
  probe
  misc_feature (1)..(25): SEQ ID NO: 4149; WAN024GGS_at; Start 761; Stop 785
tgggtcatacccagcgcattggtct

SEQ ID NO: 244901 - DNA, 25 bp, Artificial
  probe
  misc_feature (1)..(25): SEQ ID NO: 4149; WAN024GGS_at; Start 1381; Stop 1405
gaggcacttagcttggaaacggtca

SEQ ID NO: 244902 - DNA, 25 bp, Artificial
  probe
  misc_feature (1)..(25): SEQ ID NO: 4149; WAN024GGS_at; Start 2114; Stop 2138
caaagcgggagataggagaaagtca

SEQ ID NO: 244903 - DNA, 25 bp, Artificial
  probe
  misc_feature (1)..(25): SEQ ID NO: 4149; WAN024GGS_at; Start 328; Stop 352
gaacaacttggtgctgagtgccgag

SEQ ID NO: 244904 - DNA, 25 bp, Artificial
  probe
  misc_feature (1)..(25): SEQ ID NO: 4149; WAN024GGS_at; Start 1575; Stop 1599
cagatgggcgacagagttttctcaa

SEQ ID NO: 244905 - DNA, 25 bp, Artificial
  probe
  misc_feature (1)..(25): SEQ ID NO: 4149; WAN024GGS_at; Start 205; Stop 229
catgatatggacaaggcagtggagc

SEQ ID NO: 244906 - DNA, 25 bp, Artificial
  probe
  misc_feature (1)..(25): SEQ ID NO: 4149; WAN024GGS_at; Start 1216; Stop 1240
cgagacctcttcatcgcctttggag

SEQ ID NO: 244907 - DNA, 25 bp, Artificial
  probe
  misc_feature (1)..(25): SEQ ID NO: 4149; WAN024GGS_at; Start 1947; Stop 1971
caagactatttaccagttcccagag

SEQ ID NO: 244908 - DNA, 25 bp, Artificial
  probe
  misc_feature (1)..(25): SEQ ID NO: 4149; WAN024GGS_at; Start 1140; Stop 1164
tatagaagacggtcgtgccaagggc

SEQ ID NO: 244909 - DNA, 25 bp, Artificial
  probe
  misc_feature (1)..(25): SEQ ID NO: 4149; WAN024GGS_at; Start 852; Stop 876
gattgctcctcgtttgaatgccttg

SEQ ID NO: 244910 - DNA, 25 bp, Artificial
  probe
  misc_feature (1)..(25): SEQ ID NO: 4149; WAN024GGS_at; Start 1260; Stop 1284
tatgacgctggaagttgagcaactc

SEQ ID NO: 244911 - DNA, 25 bp, Artificial
  probe
  misc_feature (1)..(25): SEQ ID NO: 4149; WAN024GGS_at; Start 173; Stop 197
ccttggaggacttacatgatgctta

SEQ ID NO: 244912 - DNA, 25 bp, Artificial
  probe
  misc_feature (1)..(25): SEQ ID NO: 4149; WAN024GGS_at; Start 1727; Stop 1751
cagtcttgccagaaggtgttccagt

SEQ ID NO: 244913 - DNA, 25 bp, Artificial
  probe
  misc_feature (1)..(25): SEQ ID NO: 4149; WAN024GGS_at; Start 22; Stop 46
cctacttatgaatggcagtttgccc

SEQ ID NO: 244914 - DNA, 25 bp, Artificial
  probe
  misc_feature (1)..(25): SEQ ID NO: 4149; WAN024GGS_at; Start 957; Stop 981
gattcaccagaaaaacgaagagcgc

SEQ ID NO: 244915 - DNA, 25 bp, Artificial
  probe
  misc_feature (1)..(25): SEQ ID NO: 4149; WAN024GGS_at; Start 1712; Stop 1736
ttcgtggaaaaaatgcagtcttgcc

SEQ ID NO: 244916 - DNA, 25 bp, Artificial
  probe
  misc_feature (1)..(25): SEQ ID NO: 4149; WAN024GGS_at; Start 930; Stop 954
tgaggaagcgcatgagattgccctt

SEQ ID NO: 244917 - DNA, 25 bp, Artificial
  probe
  misc_feature (1)..(25): SEQ ID NO: 4149; WAN024GGS_at; Start 777; Stop 801
cattggtctgcaagaaatgctggac

SEQ ID NO: 244918 - DNA, 25 bp, Artificial
  probe
  misc_feature (1)..(25): SEQ ID NO: 4149; WAN024GGS_at; Start 1522; Stop 1546
ctgaaaatttccaagggtgaggcga

SEQ ID NO: 244919 - DNA, 25 bp, Artificial
  probe
  misc_feature (1)..(25): SEQ ID NO: 4149; WAN024GGS_at; Start 1049; Stop 1073
tcttggccaaggaaggctggaatcc

SEQ ID NO: 244920 - DNA, 25 bp, Artificial
  probe
  misc_feature (1)..(25): SEQ ID NO: 4149; WAN024GGS_at; Start 1195; Stop 1219
tttgaagctctggatccccatcgag

SEQ ID NO: 244921 - DNA, 25 bp, Artificial
  probe
  misc_feature (1)..(25): SEQ ID NO: 4149; WAN024GGS_at; Start 1232; Stop 1256
cctttggaggtcatgcaggtgcagc

SEQ ID NO: 244922 - DNA, 25 bp, Artificial
  probe
  misc_feature (1)..(25): SEQ ID NO: 2231; WAN024GGT_at; Start 166; Stop 190
tccagtatttatatcgagtttgtgc

SEQ ID NO: 244923 - DNA, 25 bp, Artificial
  probe
  misc_feature (1)..(25): SEQ ID NO: 2231; WAN024GGT_at; Start 544; Stop 568
ccagagcaggtcttcagtctttaca

SEQ ID NO: 244924 - DNA, 25 bp, Artificial
  probe
  misc_feature (1)..(25): SEQ ID NO: 2231; WAN024GGT_at; Start 90; Stop 114
catcatcctctctactatcatcggt

SEQ ID NO: 244925 - DNA, 25 bp, Artificial
  probe
  misc_feature (1)..(25): SEQ ID NO: 2231; WAN024GGT_at; Start 439; Stop 463
tctcagtttgttaccgtgattaagg

SEQ ID NO: 244926 - DNA, 25 bp, Artificial
  probe
  misc_feature (1)..(25): SEQ ID NO: 2231; WAN024GGT_at; Start 152; Stop 176
tcttacgcattatttccagtattta

SEQ ID NO: 244927 - DNA, 25 bp, Artificial
  probe
  misc_feature (1)..(25): SEQ ID NO: 2231; WAN024GGT_at; Start 582; Stop 606
catctacttcagctttaacctagca

SEQ ID NO: 244928 - DNA, 25 bp, Artificial
  probe
  misc_feature (1)..(25): SEQ ID NO: 2231; WAN024GGT_at; Start 414; Stop 438
ccgcaaaatgctaccagccatcatt

SEQ ID NO: 244929 - DNA, 25 bp, Artificial
  probe
  misc_feature (1)..(25): SEQ ID NO: 2231; WAN024GGT_at; Start 274; Stop 298
actctctttacatcagcagccttgg

SEQ ID NO: 244930 - DNA, 25 bp, Artificial
  probe
  misc_feature (1)..(25): SEQ ID NO: 2231; WAN024GGT_at; Start 532; Stop 556
cgttatttcgaaccagagcaggtct

SEQ ID NO: 244931 - DNA, 25 bp, Artificial
  probe
  misc_feature (1)..(25): SEQ ID NO: 2231; WAN024GGT_at; Start 641; Stop 665
ggcaacaagctgcagaataactaat

SEQ ID NO: 244932 - DNA, 25 bp, Artificial
  probe
  misc_feature (1)..(25): SEQ ID NO: 2231; WAN024GGT_at; Start 268; Stop 292
gcctttactctctttacatcagcag

SEQ ID NO: 244933 - DNA, 25 bp, Artificial
  probe
  misc_feature (1)..(25): SEQ ID NO: 2231; WAN024GGT_at; Start 45; Stop 69
tatctttaaaggatttggcttgacc

SEQ ID NO: 244934 - DNA, 25 bp, Artificial
  probe
  misc_feature (1)..(25): SEQ ID NO: 2231; WAN024GGT_at; Start 450; Stop 474
taccgtgattaaggataccagtctc

SEQ ID NO: 244935 - DNA, 25 bp, Artificial
  probe
  misc_feature (1)..(25): SEQ ID NO: 2231; WAN024GGT_at; Start 522; Stop 546
tctcatgggccgttatttcgaacca

SEQ ID NO: 244936 - DNA, 25 bp, Artificial
  probe
  misc_feature (1)..(25): SEQ ID NO: 2231; WAN024GGT_at; Start 559; Stop 583
agtctttacatcctgattgccctca

SEQ ID NO: 244937 - DNA, 25 bp, Artificial
  probe
  misc_feature (1)..(25): SEQ ID NO: 2231; WAN024GGT_at; Start 192; Stop 216
caacgttcccaaccttctctggatt

SEQ ID NO: 244938 - DNA, 25 bp, Artificial
  probe
  misc_feature (1)..(25): SEQ ID NO: 2231; WAN024GGT_at; Start 251; Stop 275
caccagcaggtattacagcctttac

SEQ ID NO: 244939 - DNA, 25 bp, Artificial
  probe
  misc_feature (1)..(25): SEQ ID NO: 2231; WAN024GGT_at; Start 634; Stop 658
aaacgttggcaacaagctgcagaat

SEQ ID NO: 244940 - DNA, 25 bp, Artificial
  probe
  misc_feature (1)..(25): SEQ ID NO: 2231; WAN024GGT_at; Start 306; Stop 330
tattcgaggcggtctcaatgccgta

SEQ ID NO: 244941 - DNA, 25 bp, Artificial
  probe
  misc_feature (1)..(25): SEQ ID NO: 2231; WAN024GGT_at; Start 463; Stop 487
gataccagtctcctctactctgtta

SEQ ID NO: 244942 - DNA, 25 bp, Artificial
  probe
  misc_feature (1)..(25): SEQ ID NO: 2231; WAN024GGT_at; Start 352; Stop 376
ggaatgtcacaaggcttcacctcag

SEQ ID NO: 244943 - DNA, 25 bp, Artificial
  probe
  misc_feature (1)..(25): SEQ ID NO: 2231; WAN024GGT_at; Start 375; Stop 399
agcccaaatcctctactacatcatt

SEQ ID NO: 244944 - DNA, 25 bp, Artificial
  probe
  misc_feature (1)..(25): SEQ ID NO: 2231; WAN024GGT_at; Start 484; Stop 508
gttatcgccctacaagaactctttg

SEQ ID NO: 244945 - DNA, 25 bp, Artificial
  probe
  misc_feature (1)..(25): SEQ ID NO: 2231; WAN024GGT_at; Start 507; Stop 531
tggagccagccaaattctcatgggc

SEQ ID NO: 244946 - DNA, 25 bp, Artificial
  probe
  misc_feature (1)..(25): SEQ ID NO: 2231; WAN024GGT_at; Start 476; Stop 500
tctactctgttatcgccctacaaga

SEQ ID NO: 244947 - DNA, 25 bp, Artificial
  probe
  misc_feature (1)..(25): SEQ ID NO: 2231; WAN024GGT_at; Start 494; Stop 518
tacaagaactctttggagccagcca

SEQ ID NO: 244948 - DNA, 25 bp, Artificial
  probe
  misc_feature (1)..(25): SEQ ID NO: 2231; WAN024GGT_at; Start 430; Stop 454
gccatcatttctcagtttgttaccg

SEQ ID NO: 244949 - DNA, 25 bp, Artificial
  probe
  misc_feature (1)..(25): SEQ ID NO: 2231; WAN024GGT_at; Start 572; Stop 596
tgattgccctcatctacttcagctt

SEQ ID NO: 244950 - DNA, 25 bp, Artificial
  probe
  misc_feature (1)..(25): SEQ ID NO: 2231; WAN024GGT_at; Start 201; Stop 225
caaccttctctggatttttactatc

SEQ ID NO: 244951 - DNA, 25 bp, Artificial
  probe
  misc_feature (1)..(25): SEQ ID NO: 2231; WAN024GGT_at; Start 289; Stop 313
gcagccttggctgagattattcgag

SEQ ID NO: 244952 - DNA, 25 bp, Artificial
  probe
  misc_feature (1)..(25): SEQ ID NO: 2231; WAN024GGT_at; Start 61; Stop 85
ggcttgaccctctatatttctctga

SEQ ID NO: 244953 - DNA, 25 bp, Artificial
  probe
  misc_feature (1)..(25): SEQ ID NO: 2231; WAN024GGT_at; Start 347; Stop 371
aagcaggaatgtcacaaggcttcac

SEQ ID NO: 244954 - DNA, 25 bp, Artificial
  probe
  misc_feature (1)..(25): SEQ ID NO: 2231; WAN024GGT_at; Start 73; Stop 97
tatatttctctgattgccatcatcc

SEQ ID NO: 244955 - DNA, 25 bp, Artificial
  probe
  misc_feature (1)..(25): SEQ ID NO: 2231; WAN024GGT_at; Start 317; Stop 341
gtctcaatgccgtagacaagggaca

SEQ ID NO: 244956 - DNA, 25 bp, Artificial
  probe
  misc_feature (1)..(25): SEQ ID NO: 1974; WAN024GGU_at; Start 182; Stop 206
tagacggttgcatgttcgggcactt

SEQ ID NO: 244957 - DNA, 25 bp, Artificial
  probe
  misc_feature (1)..(25): SEQ ID NO: 1974; WAN024GGU_at; Start 140; Stop 164
tgtttggcaagtgccttcatcatag

SEQ ID NO: 244958 - DNA, 25 bp, Artificial
  probe
  misc_feature (1)..(25): SEQ ID NO: 1974; WAN024GGU_at; Start 72; Stop 96
gtatgattacttatttgaacttgaa

SEQ ID NO: 244959 - DNA, 25 bp, Artificial
  probe
  misc_feature (1)..(25): SEQ ID NO: 1974; WAN024GGU_at; Start 152; Stop 176
gccttcatcatagaaataggaccac

SEQ ID NO: 244960 - DNA, 25 bp, Artificial
  probe
  misc_feature (1)..(25): SEQ ID NO: 1974; WAN024GGU_at; Start 164; Stop 188
gaaataggaccacacatatagacgg

SEQ ID NO: 244961 - DNA, 25 bp, Artificial
  probe
  misc_feature (1)..(25): SEQ ID NO: 1974; WAN024GGU_at; Start 168; Stop 192
taggaccacacatatagacggttgc

SEQ ID NO: 244962 - DNA, 25 bp, Artificial
  probe
  misc_feature (1)..(25): SEQ ID NO: 1974; WAN024GGU_at; Start 106; Stop 130
aataagctctgtttttggattttgt

SEQ ID NO: 244963 - DNA, 25 bp, Artificial
  probe
  misc_feature (1)..(25): SEQ ID NO: 1974; WAN024GGU_at; Start 184; Stop 208
gacggttgcatgttcgggcacttct

SEQ ID NO: 244964 - DNA, 25 bp, Artificial
  probe
  misc_feature (1)..(25): SEQ ID NO: 1974; WAN024GGU_at; Start 224; Stop 248
agatagccgtctttcgtactgtcga

SEQ ID NO: 244965 - DNA, 25 bp, Artificial
  probe
  misc_feature (1)..(25): SEQ ID NO: 1974; WAN024GGU_at; Start 32; Stop 56
catttggctataaaaaactctcctg

SEQ ID NO: 244966 - DNA, 25 bp, Artificial
  probe
  misc_feature (1)..(25): SEQ ID NO: 1974; WAN024GGU_at; Start 130; Stop 154
tttcttaatctgtttggcaagtgcc

SEQ ID NO: 244967 - DNA, 25 bp, Artificial
  probe
  misc_feature (1)..(25): SEQ ID NO: 1974; WAN024GGU_at; Start 136; Stop 160
aatctgtttggcaagtgccttcatc

SEQ ID NO: 244968 - DNA, 25 bp, Artificial
  probe
  misc_feature (1)..(25): SEQ ID NO: 1974; WAN024GGU_at; Start 144; Stop 168
tggcaagtgccttcatcatagaaat

SEQ ID NO: 244969 - DNA, 25 bp, Artificial
  probe
  misc_feature (1)..(25): SEQ ID NO: 1974; WAN024GGU_at; Start 215; Stop 239
tcaaaattaagatagccgtctttcg

SEQ ID NO: 244970 - DNA, 25 bp, Artificial
  probe
  misc_feature (1)..(25): SEQ ID NO: 1974; WAN024GGU_at; Start 178; Stop 202
catatagacggttgcatgttcgggc

SEQ ID NO: 244971 - DNA, 25 bp, Artificial
  probe
  misc_feature (1)..(25): SEQ ID NO: 1974; WAN024GGU_at; Start 19; Stop 43
tcctgtcttatttcatttggctata

SEQ ID NO: 244972 - DNA, 25 bp, Artificial
  probe
  misc_feature (1)..(25): SEQ ID NO: 1974; WAN024GGU_at; Start 228; Stop 252
agccgtctttcgtactgtcgattag

SEQ ID NO: 244973 - DNA, 25 bp, Artificial
  probe
  misc_feature (1)..(25): SEQ ID NO: 1974; WAN024GGU_at; Start 15; Stop 39
tcgttcctgtcttatttcatttggc

SEQ ID NO: 244974 - DNA, 25 bp, Artificial
  probe
  misc_feature (1)..(25): SEQ ID NO: 1974; WAN024GGU_at; Start 102; Stop 126
cgtaaataagctctgtttttggatt

SEQ ID NO: 244975 - DNA, 25 bp, Artificial
  probe
  misc_feature (1)..(25): SEQ ID NO: 1974; WAN024GGU_at; Start 93; Stop 117
tgaatccttcgtaaataagctctgt

SEQ ID NO: 244976 - DNA, 25 bp, Artificial
  probe
  misc_feature (1)..(25): SEQ ID NO: 1974; WAN024GGU_at; Start 191; Stop 215
gcatgttcgggcacttctttttgtt

SEQ ID NO: 244977 - DNA, 25 bp, Artificial
  probe
  misc_feature (1)..(25): SEQ ID NO: 1974; WAN024GGU_at; Start 194; Stop 218
tgttcgggcacttctttttgttcaa

SEQ ID NO: 244978 - DNA, 25 bp, Artificial
  probe
  misc_feature (1)..(25): SEQ ID NO: 1974; WAN024GGU_at; Start 180; Stop 204
tatagacggttgcatgttcgggcac

SEQ ID NO: 244979 - DNA, 25 bp, Artificial
  probe
  misc_feature (1)..(25): SEQ ID NO: 1974; WAN024GGU_at; Start 210; Stop 234
tttgttcaaaattaagatagccgtc

SEQ ID NO: 244980 - DNA, 25 bp, Artificial
  probe
  misc_feature (1)..(25): SEQ ID NO: 1974; WAN024GGU_at; Start 5; Stop 29
caaaattccatcgttcctgtcttat

SEQ ID NO: 244981 - DNA, 25 bp, Artificial
  probe
  misc_feature (1)..(25): SEQ ID NO: 1974; WAN024GGU_at; Start 133; Stop 157
cttaatctgtttggcaagtgccttc

SEQ ID NO: 244982 - DNA, 25 bp, Artificial
  probe
  misc_feature (1)..(25): SEQ ID NO: 1974; WAN024GGU_at; Start 2; Stop 26
tgccaaaattccatcgttcctgtct

SEQ ID NO: 244983 - DNA, 25 bp, Artificial
  probe
  misc_feature (1)..(25): SEQ ID NO: 1974; WAN024GGU_at; Start 147; Stop 171
caagtgccttcatcatagaaatagg

SEQ ID NO: 244984 - DNA, 25 bp, Artificial
  probe
  misc_feature (1)..(25): SEQ ID NO: 1974; WAN024GGU_at; Start 156; Stop 180
tcatcatagaaataggaccacacat

SEQ ID NO: 244985 - DNA, 25 bp, Artificial
  probe
  misc_feature (1)..(25): SEQ ID NO: 1974; WAN024GGU_at; Start 171; Stop 195
gaccacacatatagacggttgcatg

SEQ ID NO: 244986 - DNA, 25 bp, Artificial
  probe
  misc_feature (1)..(25): SEQ ID NO: 1974; WAN024GGU_at; Start 88; Stop 112
gaacttgaatccttcgtaaataagc

SEQ ID NO: 244987 - DNA, 25 bp, Artificial
  probe
  misc_feature (1)..(25): SEQ ID NO: 1974; WAN024GGU_at; Start 79; Stop 103
tacttatttgaacttgaatccttcg

SEQ ID NO: 244988 - DNA, 25 bp, Artificial
  probe
  misc_feature (1)..(25): SEQ ID NO: 1974; WAN024GGU_at; Start 36; Stop 60
tggctataaaaaactctcctgggaa

SEQ ID NO: 244989 - DNA, 25 bp, Artificial
  probe
  misc_feature (1)..(25): SEQ ID NO: 1974; WAN024GGU_at; Start 98; Stop 122
ccttcgtaaataagctctgtttttg

SEQ ID NO: 244990 - DNA, 25 bp, Artificial
  probe
  misc_feature (1)..(25): SEQ ID NO: 2244; WAN024GGV_at; Start 84; Stop 108
ttctccccaattcatgattccagga

SEQ ID NO: 244991 - DNA, 25 bp, Artificial
  probe
  misc_feature (1)..(25): SEQ ID NO: 2244; WAN024GGV_at; Start 472; Stop 496
agttttcttgttggtagctatgccc

SEQ ID NO: 244992 - DNA, 25 bp, Artificial
  probe
  misc_feature (1)..(25): SEQ ID NO: 2244; WAN024GGV_at; Start 869; Stop 893
ttgctggaggtattgggatcacccc

SEQ ID NO: 244993 - DNA, 25 bp, Artificial
  probe
  misc_feature (1)..(25): SEQ ID NO: 2244; WAN024GGV_at; Start 365; Stop 389
acgaagcttggcgatggattcaccg

SEQ ID NO: 244994 - DNA, 25 bp, Artificial
  probe
  misc_feature (1)..(25): SEQ ID NO: 2244; WAN024GGV_at; Start 347; Stop 371
taggcaaatacatccaatacgaagc

SEQ ID NO: 244995 - DNA, 25 bp, Artificial
  probe
  misc_feature (1)..(25): SEQ ID NO: 2244; WAN024GGV_at; Start 150; Stop 174
tcgtctcccactactagaaagctgg

SEQ ID NO: 244996 - DNA, 25 bp, Artificial
  probe
  misc_feature (1)..(25): SEQ ID NO: 2244; WAN024GGV_at; Start 778; Stop 802
tatgataatcttcaagccggcagca

SEQ ID NO: 244997 - DNA, 25 bp, Artificial
  probe
  misc_feature (1)..(25): SEQ ID NO: 2244; WAN024GGV_at; Start 326; Stop 350
gcatcatccttgtcgcctatttagg

SEQ ID NO: 244998 - DNA, 25 bp, Artificial
  probe
  misc_feature (1)..(25): SEQ ID NO: 2244; WAN024GGV_at; Start 844; Stop 868
gaaggacgagaaaatcaggtttgga

SEQ ID NO: 244999 - DNA, 25 bp, Artificial
  probe
  misc_feature (1)..(25): SEQ ID NO: 2244; WAN024GGV_at; Start 242; Stop 266
tctttcataactttagtatgggcgg

SEQ ID NO: 245000 - DNA, 25 bp, Artificial
  probe
  misc_feature (1)..(25): SEQ ID NO: 2244; WAN024GGV_at; Start 810; Stop 834
cctagacagagcttacggacacatg

SEQ ID NO: 245001 - DNA, 25 bp, Artificial
  probe
  misc_feature (1)..(25): SEQ ID NO: 2244; WAN024GGV_at; Start 60; Stop 84
gactcttttgacttggatgaacact

SEQ ID NO: 245002 - DNA, 25 bp, Artificial
  probe
  misc_feature (1)..(25): SEQ ID NO: 2244; WAN024GGV_at; Start 1021; Stop 1045
tttgaactccatctaatcgacagta

SEQ ID NO: 245003 - DNA, 25 bp, Artificial
  probe
  misc_feature (1)..(25): SEQ ID NO: 2244; WAN024GGV_at; Start 182; Stop 206
gtttggagaaggtctacaccgtcca

SEQ ID NO: 245004 - DNA, 25 bp, Artificial
  probe
  misc_feature (1)..(25): SEQ ID NO: 2244; WAN024GGV_at; Start 413; Stop 437
taggactctttcacatctacatgat

SEQ ID NO: 245005 - DNA, 25 bp, Artificial
  probe
  misc_feature (1)..(25): SEQ ID NO: 2244; WAN024GGV_at; Start 12; Stop 36
tatgaaatcagtcaaaggactactc

SEQ ID NO: 245006 - DNA, 25 bp, Artificial
  probe
  misc_feature (1)..(25): SEQ ID NO: 2244; WAN024GGV_at; Start 899; Stop 923
tctcttacatccgtgaacatcctat

SEQ ID NO: 245007 - DNA, 25 bp, Artificial
  probe
  misc_feature (1)..(25): SEQ ID NO: 2244; WAN024GGV_at; Start 428; Stop 452
tctacatgataatgggcaatcgtct

SEQ ID NO: 245008 - DNA, 25 bp, Artificial
  probe
  misc_feature (1)..(25): SEQ ID NO: 2244; WAN024GGV_at; Start 796; Stop 820
ggcagcaaagtaaccctagacagag

SEQ ID NO: 245009 - DNA, 25 bp, Artificial
  probe
  misc_feature (1)..(25): SEQ ID NO: 2244; WAN024GGV_at; Start 538; Stop 562
caaaagatttccttcccctatctag

SEQ ID NO: 245010 - DNA, 25 bp, Artificial
  probe
  misc_feature (1)..(25): SEQ ID NO: 2244; WAN024GGV_at; Start 1050; Stop 1074
agacggctatcttaattttgaacaa

SEQ ID NO: 245011 - DNA, 25 bp, Artificial
  probe
  misc_feature (1)..(25): SEQ ID NO: 2244; WAN024GGV_at; Start 708; Stop 732
tatctcaggaggtcatggtcaaact

SEQ ID NO: 245012 - DNA, 25 bp, Artificial
  probe
  misc_feature (1)..(25): SEQ ID NO: 2244; WAN024GGV_at; Start 129; Stop 153
tctgacttttatcctagccactcgt

SEQ ID NO: 245013 - DNA, 25 bp, Artificial
  probe
  misc_feature (1)..(25): SEQ ID NO: 2244; WAN024GGV_at; Start 490; Stop 514
tatgcccttttaggcttactagctg

SEQ ID NO: 245014 - DNA, 25 bp, Artificial
  probe
  misc_feature (1)..(25): SEQ ID NO: 2244; WAN024GGV_at; Start 829; Stop 853
cacatgatcatagaagaaggacgag

SEQ ID NO: 245015 - DNA, 25 bp, Artificial
  probe
  misc_feature (1)..(25): SEQ ID NO: 2244; WAN024GGV_at; Start 633; Stop 657
caactatcaatcaggacaatttgcc

SEQ ID NO: 245016 - DNA, 25 bp, Artificial
  probe
  misc_feature (1)..(25): SEQ ID NO: 2244; WAN024GGV_at; Start 273; Stop 297
gggctctcgcttagctgctcagttt

SEQ ID NO: 245017 - DNA, 25 bp, Artificial
  probe
  misc_feature (1)..(25): SEQ ID NO: 2244; WAN024GGV_at; Start 307; Stop 331
gccatctatatctttgccagcatca

SEQ ID NO: 245018 - DNA, 25 bp, Artificial
  probe
  misc_feature (1)..(25): SEQ ID NO: 2244; WAN024GGV_at; Start 441; Stop 465
gggcaatcgtctccttacatttaat

SEQ ID NO: 245019 - DNA, 25 bp, Artificial
  probe
  misc_feature (1)..(25): SEQ ID NO: 2244; WAN024GGV_at; Start 99; Stop 123
gattccaggactagctttaacaagc

SEQ ID NO: 245020 - DNA, 25 bp, Artificial
  probe
  misc_feature (1)..(25): SEQ ID NO: 2244; WAN024GGV_at; Start 940; Stop 964
cacttctactatagcttccgtggag

SEQ ID NO: 245021 - DNA, 25 bp, Artificial
  probe
  misc_feature (1)..(25): SEQ ID NO: 2244; WAN024GGV_at; Start 192; Stop 216
ggtctacaccgtccacaaattcaca

SEQ ID NO: 245022 - DNA, 25 bp, Artificial
  probe
  misc_feature (1)..(25): SEQ ID NO: 2244; WAN024GGV_at; Start 671; Stop 695
tccaagaaggctttgaaagtgctcc

SEQ ID NO: 245023 - DNA, 25 bp, Artificial
  probe
  misc_feature (1)..(25): SEQ ID NO: 2244; WAN024GGV_at; Start 26; Stop 50
aaggactactctttatcatagctag

SEQ ID NO: 245024 - DNA, 25 bp, Artificial
  probe
  misc_feature (1)..(25): SEQ ID NO: 4052; WAN024GGW_at; Start 157; Stop 181
gattggagccaattcacctttaccg

SEQ ID NO: 245025 - DNA, 25 bp, Artificial
  probe
  misc_feature (1)..(25): SEQ ID NO: 4052; WAN024GGW_at; Start 15; Stop 39
ggaatcctggaagagcttctgtcaa

SEQ ID NO: 245026 - DNA, 25 bp, Artificial
  probe
  misc_feature (1)..(25): SEQ ID NO: 4052; WAN024GGW_at; Start 9; Stop 33
cgattgggaatcctggaagagcttc

SEQ ID NO: 245027 - DNA, 25 bp, Artificial
  probe
  misc_feature (1)..(25): SEQ ID NO: 4052; WAN024GGW_at; Start 93; Stop 117
ggatgttaccgataccagctgccaa

SEQ ID NO: 245028 - DNA, 25 bp, Artificial
  probe
  misc_feature (1)..(25): SEQ ID NO: 4052; WAN024GGW_at; Start 115; Stop 139
caagaagtcgataccagtttcaacc

SEQ ID NO: 245029 - DNA, 25 bp, Artificial
  probe
  misc_feature (1)..(25): SEQ ID NO: 4052; WAN024GGW_at; Start 110; Stop 134
gctgccaagaagtcgataccagttt

SEQ ID NO: 245030 - DNA, 25 bp, Artificial
  probe
  misc_feature (1)..(25): SEQ ID NO: 4052; WAN024GGW_at; Start 165; Stop 189
ccaattcacctttaccgatgattcc

SEQ ID NO: 245031 - DNA, 25 bp, Artificial
  probe
  misc_feature (1)..(25): SEQ ID NO: 4052; WAN024GGW_at; Start 2; Stop 26
tgcaatacgattgggaatcctggaa

SEQ ID NO: 245032 - DNA, 25 bp, Artificial
  probe
  misc_feature (1)..(25): SEQ ID NO: 4052; WAN024GGW_at; Start 105; Stop 129
taccagctgccaagaagtcgatacc

SEQ ID NO: 245033 - DNA, 25 bp, Artificial
  probe
  misc_feature (1)..(25): SEQ ID NO: 4052; WAN024GGW_at; Start 161; Stop 185
ggagccaattcacctttaccgatga

SEQ ID NO: 245034 - DNA, 25 bp, Artificial
  probe
  misc_feature (1)..(25): SEQ ID NO: 4052; WAN024GGW_at; Start 121; Stop 145
gtcgataccagtttcaaccattgct

SEQ ID NO: 245035 - DNA, 25 bp, Artificial
  probe
  misc_feature (1)..(25): SEQ ID NO: 4052; WAN024GGW_at; Start 143; Stop 167
gctttagcgtcttcgattggagcca

SEQ ID NO: 245036 - DNA, 25 bp, Artificial
  probe
  misc_feature (1)..(25): SEQ ID NO: 4052; WAN024GGW_at; Start 96; Stop 120
tgttaccgataccagctgccaagaa

SEQ ID NO: 245037 - DNA, 25 bp, Artificial
  probe
  misc_feature (1)..(25): SEQ ID NO: 4052; WAN024GGW_at; Start 293; Stop 317
ggaaggtgtgaaccgtcaaacatga

SEQ ID NO: 245038 - DNA, 25 bp, Artificial
  probe
  misc_feature (1)..(25): SEQ ID NO: 4052; WAN024GGW_at; Start 220; Stop 244
agcttctactgagatacctttagcg

SEQ ID NO: 245039 - DNA, 25 bp, Artificial
  probe
  misc_feature (1)..(25): SEQ ID NO: 4052; WAN024GGW_at; Start 209; Stop 233
gtaccaacttcagcttctactgaga

SEQ ID NO: 245040 - DNA, 25 bp, Artificial
  probe
  misc_feature (1)..(25): SEQ ID NO: 4052; WAN024GGW_at; Start 297; Stop 321
ggtgtgaaccgtcaaacatgattga

SEQ ID NO: 245041 - DNA, 25 bp, Artificial
  probe
  misc_feature (1)..(25): SEQ ID NO: 4052; WAN024GGW_at; Start 36; Stop 60
tcaatttttgcaagtggtcaaggtc

SEQ ID NO: 245042 - DNA, 25 bp, Artificial
  probe
  misc_feature (1)..(25): SEQ ID NO: 4052; WAN024GGW_at; Start 24; Stop 48
gaagagcttctgtcaatttttgcaa

SEQ ID NO: 245043 - DNA, 25 bp, Artificial
  probe
  misc_feature (1)..(25): SEQ ID NO: 4052; WAN024GGW_at; Start 147; Stop 171
tagcgtcttcgattggagccaattc

SEQ ID NO: 245044 - DNA, 25 bp, Artificial
  probe
  misc_feature (1)..(25): SEQ ID NO: 4052; WAN024GGW_at; Start 191; Stop 215
tcttcttcaccaccgatagtaccaa

SEQ ID NO: 245045 - DNA, 25 bp, Artificial
  probe
  misc_feature (1)..(25): SEQ ID NO: 4052; WAN024GGW_at; Start 240; Stop 264
tagcgtgtgctttttcaacaacttc

SEQ ID NO: 245046 - DNA, 25 bp, Artificial
  probe
  misc_feature (1)..(25): SEQ ID NO: 4052; WAN024GGW_at; Start 99; Stop 123
taccgataccagctgccaagaagtc

SEQ ID NO: 245047 - DNA, 25 bp, Artificial
  probe
  misc_feature (1)..(25): SEQ ID NO: 4052; WAN024GGW_at; Start 226; Stop 250
tactgagatacctttagcgtgtgct

SEQ ID NO: 245048 - DNA, 25 bp, Artificial
  probe
  misc_feature (1)..(25): SEQ ID NO: 4052; WAN024GGW_at; Start 89; Stop 113
ccgtggatgttaccgataccagctg

SEQ ID NO: 245049 - DNA, 25 bp, Artificial
  probe
  misc_feature (1)..(25): SEQ ID NO: 4052; WAN024GGW_at; Start 234; Stop 258
tacctttagcgtgtgctttttcaac

SEQ ID NO: 245050 - DNA, 25 bp, Artificial
  probe
  misc_feature (1)..(25): SEQ ID NO: 4052; WAN024GGW_at; Start 56; Stop 80
aggtcaagaccttcccagtttactg

SEQ ID NO: 245051 - DNA, 25 bp, Artificial
  probe
  misc_feature (1)..(25): SEQ ID NO: 4052; WAN024GGW_at; Start 129; Stop 153
cagtttcaaccattgctttagcgtc

SEQ ID NO: 245052 - DNA, 25 bp, Artificial
  probe
  misc_feature (1)..(25): SEQ ID NO: 4052; WAN024GGW_at; Start 201; Stop 225
caccgatagtaccaacttcagcttc

SEQ ID NO: 245053 - DNA, 25 bp, Artificial
  probe
  misc_feature (1)..(25): SEQ ID NO: 4052; WAN024GGW_at; Start 139; Stop 163
cattgctttagcgtcttcgattgga

SEQ ID NO: 245054 - DNA, 25 bp, Artificial
  probe
  misc_feature (1)..(25): SEQ ID NO: 4052; WAN024GGW_at; Start 286; Stop 310
ttcaactggaaggtgtgaaccgtca

SEQ ID NO: 245055 - DNA, 25 bp, Artificial
  probe
  misc_feature (1)..(25): SEQ ID NO: 4052; WAN024GGW_at; Start 255; Stop 279
caacaacttctttagccaatttaag

SEQ ID NO: 245056 - DNA, 25 bp, Artificial
  probe
  misc_feature (1)..(25): SEQ ID NO: 4052; WAN024GGW_at; Start 302; Stop 326
gaaccgtcaaacatgattgaagtat

SEQ ID NO: 245057 - DNA, 25 bp, Artificial
  probe
  misc_feature (1)..(25): SEQ ID NO: 4052; WAN024GGW_at; Start 279; Stop 303
ggttttcttcaactggaaggtgtga

SEQ ID NO: 245058 - DNA, 25 bp, Artificial
  probe
  misc_feature (1)..(25): SEQ ID NO: 2408; WAN024GGX_at; Start 587; Stop 611
tgacagaagctcttccaggattccc

SEQ ID NO: 245059 - DNA, 25 bp, Artificial
  probe
  misc_feature (1)..(25): SEQ ID NO: 2408; WAN024GGX_at; Start 84; Stop 108
tgagtggactcaagctatcttgcgc

SEQ ID NO: 245060 - DNA, 25 bp, Artificial
  probe
  misc_feature (1)..(25): SEQ ID NO: 2408; WAN024GGX_at; Start 398; Stop 422
tagaagctgaagttggtactatcgg

SEQ ID NO: 245061 - DNA, 25 bp, Artificial
  probe
  misc_feature (1)..(25): SEQ ID NO: 2408; WAN024GGX_at; Start 34; Stop 58
gcagcccgtgacaacggttatgcag

SEQ ID NO: 245062 - DNA, 25 bp, Artificial
  probe
  misc_feature (1)..(25): SEQ ID NO: 2408; WAN024GGX_at; Start 315; Stop 339
tgacggttcacaccttccagttgaa

SEQ ID NO: 245063 - DNA, 25 bp, Artificial
  probe
  misc_feature (1)..(25): SEQ ID NO: 2408; WAN024GGX_at; Start 565; Stop 589
gaccttgaccacttgcaaaaattga

SEQ ID NO: 245064 - DNA, 25 bp, Artificial
  probe
  misc_feature (1)..(25): SEQ ID NO: 2408; WAN024GGX_at; Start 798; Stop 822
taaattcttggctgacggtgtaaaa

SEQ ID NO: 245065 - DNA, 25 bp, Artificial
  probe
  misc_feature (1)..(25): SEQ ID NO: 2408; WAN024GGX_at; Start 617; Stop 641
tattgcacggtggatcaggtattcc

SEQ ID NO: 245066 - DNA, 25 bp, Artificial
  probe
  misc_feature (1)..(25): SEQ ID NO: 2408; WAN024GGX_at; Start 361; Stop 385
gaagttgttgaaaaagcacacgcta

SEQ ID NO: 245067 - DNA, 25 bp, Artificial
  probe
  misc_feature (1)..(25): SEQ ID NO: 2408; WAN024GGX_at; Start 19; Stop 43
gaaaaatttgtccaagcagcccgtg

SEQ ID NO: 245068 - DNA, 25 bp, Artificial
  probe
  misc_feature (1)..(25): SEQ ID NO: 2408; WAN024GGX_at; Start 137; Stop 161
tgatccaaacttcaatgggtgctgc

SEQ ID NO: 245069 - DNA, 25 bp, Artificial
  probe
  misc_feature (1)..(25): SEQ ID NO: 2408; WAN024GGX_at; Start 168; Stop 192
catgggtggttacaaagttgctcgc

SEQ ID NO: 245070 - DNA, 25 bp, Artificial
  probe
  misc_feature (1)..(25): SEQ ID NO: 2408; WAN024GGX_at; Start 545; Stop 569
cagtaaactgggaaggtcttgacct

SEQ ID NO: 245071 - DNA, 25 bp, Artificial
  probe
  misc_feature (1)..(25): SEQ ID NO: 2408; WAN024GGX_at; Start 376; Stop 400
gcacacgctaaaggtatctcagtag

SEQ ID NO: 245072 - DNA, 25 bp, Artificial
  probe
  misc_feature (1)..(25): SEQ ID NO: 2408; WAN024GGX_at; Start 214; Stop 238
gaatcaatgggtatcactgtaccag

SEQ ID NO: 245073 - DNA, 25 bp, Artificial
  probe
  misc_feature (1)..(25): SEQ ID NO: 2408; WAN024GGX_at; Start 99; Stop 123
tatcttgcgcgcagcagaagctaaa

SEQ ID NO: 245074 - DNA, 25 bp, Artificial
  probe
  misc_feature (1)..(25): SEQ ID NO: 2408; WAN024GGX_at; Start 474; Stop 498
cgctaaagcaatggttgaaactggt

SEQ ID NO: 245075 - DNA, 25 bp, Artificial
  probe
  misc_feature (1)..(25): SEQ ID NO: 2408; WAN024GGX_at; Start 732; Stop 756
taaatttgctcgtgactacgaagca

SEQ ID NO: 245076 - DNA, 25 bp, Artificial
  probe
  misc_feature (1)..(25): SEQ ID NO: 2408; WAN024GGX_at; Start 829; Stop 853
caagcatcggttgaagaacgtatcg

SEQ ID NO: 245077 - DNA, 25 bp, Artificial
  probe
  misc_feature (1)..(25): SEQ ID NO: 2408; WAN024GGX_at; Start 506; Stop 530
tcttggcagctggtatcggtaacat

SEQ ID NO: 245078 - DNA, 25 bp, Artificial
  probe
  misc_feature (1)..(25): SEQ ID NO: 2408; WAN024GGX_at; Start 440; Stop 464
tcatcggtaaaggtgaattggctcc

SEQ ID NO: 245079 - DNA, 25 bp, Artificial
  probe
  misc_feature (1)..(25): SEQ ID NO: 2408; WAN024GGX_at; Start 860; Stop 884
tcggttcagaaggtaaagcataact

SEQ ID NO: 245080 - DNA, 25 bp, Artificial
  probe
  misc_feature (1)..(25): SEQ ID NO: 2408; WAN024GGX_at; Start 253; Stop 277
gaccacggtcactacgaagatgcac

SEQ ID NO: 245081 - DNA, 25 bp, Artificial
  probe
  misc_feature (1)..(25): SEQ ID NO: 2408; WAN024GGX_at; Start 454; Stop 478
gaattggctccaatcgaagacgcta

SEQ ID NO: 245082 - DNA, 25 bp, Artificial
  probe
  misc_feature (1)..(25): SEQ ID NO: 2408; WAN024GGX_at; Start 236; Stop 260
cagtagctatccaccttgaccacgg

SEQ ID NO: 245083 - DNA, 25 bp, Artificial
  probe
  misc_feature (1)..(25): SEQ ID NO: 2408; WAN024GGX_at; Start 490; Stop 514
gaaactggtatcgacttcttggcag

SEQ ID NO: 245084 - DNA, 25 bp, Artificial
  probe
  misc_feature (1)..(25): SEQ ID NO: 2408; WAN024GGX_at; Start 149; Stop 173
caatgggtgctgctaaatacatggg

SEQ ID NO: 245085 - DNA, 25 bp, Artificial
  probe
  misc_feature (1)..(25): SEQ ID NO: 2408; WAN024GGX_at; Start 65; Stop 89
gatttaacacaaacaaccttgagtg

SEQ ID NO: 245086 - DNA, 25 bp, Artificial
  probe
  misc_feature (1)..(25): SEQ ID NO: 2408; WAN024GGX_at; Start 845; Stop 869
aacgtatcgacgtattcggttcaga

SEQ ID NO: 245087 - DNA, 25 bp, Artificial
  probe
  misc_feature (1)..(25): SEQ ID NO: 2408; WAN024GGX_at; Start 814; Stop 838
ggtgtaaaagctatccaagcatcgg

SEQ ID NO: 245088 - DNA, 25 bp, Artificial
  probe
  misc_feature (1)..(25): SEQ ID NO: 2408; WAN024GGX_at; Start 636; Stop 660
tattcctgatgagcaaatccaagca

SEQ ID NO: 245089 - DNA, 25 bp, Artificial
  probe
  misc_feature (1)..(25): SEQ ID NO: 2408; WAN024GGX_at; Start 187; Stop 211
gctcgcaacttgatcgctaaccttg

SEQ ID NO: 245090 - DNA, 25 bp, Artificial
  probe
  misc_feature (1)..(25): SEQ ID NO: 2408; WAN024GGX_at; Start 748; Stop 772
tacgaagcaaacgaagcagaatacg

SEQ ID NO: 245091 - DNA, 25 bp, Artificial
  probe
  misc_feature (1)..(25): SEQ ID NO: 2408; WAN024GGX_at; Start 602; Stop 626
caggattcccaatcgtattgcacgg

SEQ ID NO: 245092 - DNA, 25 bp, Artificial
  probe
  misc_feature (1)..(25): SEQ ID NO: 2217; WAN024GGY_at; Start 62; Stop 86
caataaagagagaggttgtctggcg

SEQ ID NO: 245093 - DNA, 25 bp, Artificial
  probe
  misc_feature (1)..(25): SEQ ID NO: 2217; WAN024GGY_at; Start 203; Stop 227
tctgcctatctttcccttctaggga

SEQ ID NO: 245094 - DNA, 25 bp, Artificial
  probe
  misc_feature (1)..(25): SEQ ID NO: 2217; WAN024GGY_at; Start 174; Stop 198
ggaatacaagtctaacacttgctcg

SEQ ID NO: 245095 - DNA, 25 bp, Artificial
  probe
  misc_feature (1)..(25): SEQ ID NO: 2217; WAN024GGY_at; Start 2; Stop 26
tggaagctagaaactggagaatcat

SEQ ID NO: 245096 - DNA, 25 bp, Artificial
  probe
  misc_feature (1)..(25): SEQ ID NO: 2217; WAN024GGY_at; Start 139; Stop 163
tcacctttgacggtccccttgatat

SEQ ID NO: 245097 - DNA, 25 bp, Artificial
  probe
  misc_feature (1)..(25): SEQ ID NO: 2217; WAN024GGY_at; Start 11; Stop 35
gaaactggagaatcatagtaccacc

SEQ ID NO: 245098 - DNA, 25 bp, Artificial
  probe
  misc_feature (1)..(25): SEQ ID NO: 2217; WAN024GGY_at; Start 167; Stop 191
tagtctgggaatacaagtctaacac

SEQ ID NO: 245099 - DNA, 25 bp, Artificial
  probe
  misc_feature (1)..(25): SEQ ID NO: 2217; WAN024GGY_at; Start 161; Stop 185
tatcactagtctgggaatacaagtc

SEQ ID NO: 245100 - DNA, 25 bp, Artificial
  probe
  misc_feature (1)..(25): SEQ ID NO: 2217; WAN024GGY_at; Start 17; Stop 41
ggagaatcatagtaccaccgtcttg

SEQ ID NO: 245101 - DNA, 25 bp, Artificial
  probe
  misc_feature (1)..(25): SEQ ID NO: 2217; WAN024GGY_at; Start 215; Stop 239
tcccttctagggactgggcaatggc

SEQ ID NO: 245102 - DNA, 25 bp, Artificial
  probe
  misc_feature (1)..(25): SEQ ID NO: 2217; WAN024GGY_at; Start 186; Stop 210
taacacttgctcgatactctgccta

SEQ ID NO: 245103 - DNA, 25 bp, Artificial
  probe
  misc_feature (1)..(25): SEQ ID NO: 2217; WAN024GGY_at; Start 46; Stop 70
ttcacctcgcgctcctcaataaaga

SEQ ID NO: 245104 - DNA, 25 bp, Artificial
  probe
  misc_feature (1)..(25): SEQ ID NO: 2217; WAN024GGY_at; Start 189; Stop 213
cacttgctcgatactctgcctatct

SEQ ID NO: 245105 - DNA, 25 bp, Artificial
  probe
  misc_feature (1)..(25): SEQ ID NO: 2217; WAN024GGY_at; Start 26; Stop 50
tagtaccaccgtcttgcgttttcac

SEQ ID NO: 245106 - DNA, 25 bp, Artificial
  probe
  misc_feature (1)..(25): SEQ ID NO: 2217; WAN024GGY_at; Start 92; Stop 116
tgtccagaggaagactgtccttgac

SEQ ID NO: 245107 - DNA, 25 bp, Artificial
  probe
  misc_feature (1)..(25): SEQ ID NO: 2217; WAN024GGY_at; Start 20; Stop 44
gaatcatagtaccaccgtcttgcgt

SEQ ID NO: 245108 - DNA, 25 bp, Artificial
  probe
  misc_feature (1)..(25): SEQ ID NO: 2217; WAN024GGY_at; Start 218; Stop 242
cttctagggactgggcaatggctgt

SEQ ID NO: 245109 - DNA, 25 bp, Artificial
  probe
  misc_feature (1)..(25): SEQ ID NO: 2217; WAN024GGY_at; Start 182; Stop 206
agtctaacacttgctcgatactctg

SEQ ID NO: 245110 - DNA, 25 bp, Artificial
  probe
  misc_feature (1)..(25): SEQ ID NO: 2217; WAN024GGY_at; Start 114; Stop 138
gacttctaacttgtcctcggtcatc

SEQ ID NO: 245111 - DNA, 25 bp, Artificial
  probe
  misc_feature (1)..(25): SEQ ID NO: 2217; WAN024GGY_at; Start 150; Stop 174
ggtccccttgatatcactagtctgg

SEQ ID NO: 245112 - DNA, 25 bp, Artificial
  probe
  misc_feature (1)..(25): SEQ ID NO: 2217; WAN024GGY_at; Start 104; Stop 128
gactgtccttgacttctaacttgtc

SEQ ID NO: 245113 - DNA, 25 bp, Artificial
  probe
  misc_feature (1)..(25): SEQ ID NO: 2217; WAN024GGY_at; Start 53; Stop 77
cgcgctcctcaataaagagagaggt

SEQ ID NO: 245114 - DNA, 25 bp, Artificial
  probe
  misc_feature (1)..(25): SEQ ID NO: 2217; WAN024GGY_at; Start 85; Stop 109
cggtctgtgtccagaggaagactgt

SEQ ID NO: 245115 - DNA, 25 bp, Artificial
  probe
  misc_feature (1)..(25): SEQ ID NO: 2217; WAN024GGY_at; Start 228; Stop 252
ctgggcaatggctgttgccttttga

SEQ ID NO: 245116 - DNA, 25 bp, Artificial
  probe
  misc_feature (1)..(25): SEQ ID NO: 2217; WAN024GGY_at; Start 124; Stop 148
ttgtcctcggtcatctcacctttga

SEQ ID NO: 245117 - DNA, 25 bp, Artificial
  probe
  misc_feature (1)..(25): SEQ ID NO: 2217; WAN024GGY_at; Start 155; Stop 179
ccttgatatcactagtctgggaata

SEQ ID NO: 245118 - DNA, 25 bp, Artificial
  probe
  misc_feature (1)..(25): SEQ ID NO: 2217; WAN024GGY_at; Start 225; Stop 249
ggactgggcaatggctgttgccttt

SEQ ID NO: 245119 - DNA, 25 bp, Artificial
  probe
  misc_feature (1)..(25): SEQ ID NO: 2217; WAN024GGY_at; Start 50; Stop 74
cctcgcgctcctcaataaagagaga

SEQ ID NO: 245120 - DNA, 25 bp, Artificial
  probe
  misc_feature (1)..(25): SEQ ID NO: 2217; WAN024GGY_at; Start 146; Stop 170
tgacggtccccttgatatcactagt

SEQ ID NO: 245121 - DNA, 25 bp, Artificial
  probe
  misc_feature (1)..(25): SEQ ID NO: 2217; WAN024GGY_at; Start 118; Stop 142
tctaacttgtcctcggtcatctcac

SEQ ID NO: 245122 - DNA, 25 bp, Artificial
  probe
  misc_feature (1)..(25): SEQ ID NO: 2217; WAN024GGY_at; Start 71; Stop 95
gagaggttgtctggcggtctgtgtc

SEQ ID NO: 245123 - DNA, 25 bp, Artificial
  probe
  misc_feature (1)..(25): SEQ ID NO: 2217; WAN024GGY_at; Start 130; Stop 154
tcggtcatctcacctttgacggtcc

SEQ ID NO: 245124 - DNA, 25 bp, Artificial
  probe
  misc_feature (1)..(25): SEQ ID NO: 2217; WAN024GGY_at; Start 88; Stop 112
tctgtgtccagaggaagactgtcct

SEQ ID NO: 245125 - DNA, 25 bp, Artificial
  probe
  misc_feature (1)..(25): SEQ ID NO: 2217; WAN024GGY_at; Start 209; Stop 233
tatctttcccttctagggactgggc

SEQ ID NO: 245126 - DNA, 25 bp, Artificial
  probe
  misc_feature (1)..(25): SEQ ID NO: 1927; WAN024GGZ_at; Start 214; Stop 238
caaggtatagggaagaaactggaga

SEQ ID NO: 245127 - DNA, 25 bp, Artificial
  probe
  misc_feature (1)..(25): SEQ ID NO: 1927; WAN024GGZ_at; Start 209; Stop 233
gccagcaaggtatagggaagaaact

SEQ ID NO: 245128 - DNA, 25 bp, Artificial
  probe
  misc_feature (1)..(25): SEQ ID NO: 1927; WAN024GGZ_at; Start 8; Stop 32
tccgcaataacagtcaagagatgct

SEQ ID NO: 245129 - DNA, 25 bp, Artificial
  probe
  misc_feature (1)..(25): SEQ ID NO: 1927; WAN024GGZ_at; Start 22; Stop 46
caagagatgctggtagaggctattg

SEQ ID NO: 245130 - DNA, 25 bp, Artificial
  probe
  misc_feature (1)..(25): SEQ ID NO: 1927; WAN024GGZ_at; Start 74; Stop 98
tccttagaatccacgcgcaatcgca

SEQ ID NO: 245131 - DNA, 25 bp, Artificial
  probe
  misc_feature (1)..(25): SEQ ID NO: 1927; WAN024GGZ_at; Start 228; Stop 252
gaaactggagactgatttgctccgc

SEQ ID NO: 245132 - DNA, 25 bp, Artificial
  probe
  misc_feature (1)..(25): SEQ ID NO: 1927; WAN024GGZ_at; Start 192; Stop 216
gggaaatcagaaaggaggccagcaa

SEQ ID NO: 245133 - DNA, 25 bp, Artificial
  probe
  misc_feature (1)..(25): SEQ ID NO: 1927; WAN024GGZ_at; Start 58; Stop 82
gagattacctatctcatccttagaa

SEQ ID NO: 245134 - DNA, 25 bp, Artificial
  probe
  misc_feature (1)..(25): SEQ ID NO: 1927; WAN024GGZ_at; Start 85; Stop 109
cacgcgcaatcgcacttgggaatcc

SEQ ID NO: 245135 - DNA, 25 bp, Artificial
  probe
  misc_feature (1)..(25): SEQ ID NO: 1927; WAN024GGZ_at; Start 240; Stop 264
tgatttgctccgcttccttttgtaa

SEQ ID NO: 245136 - DNA, 25 bp, Artificial
  probe
  misc_feature (1)..(25): SEQ ID NO: 1927; WAN024GGZ_at; Start 117; Stop 141
tcatccgacgggtcacccgcttgat

SEQ ID NO: 245137 - DNA, 25 bp, Artificial
  probe
  misc_feature (1)..(25): SEQ ID NO: 1927; WAN024GGZ_at; Start 12; Stop 36
caataacagtcaagagatgctggta

SEQ ID NO: 245138 - DNA, 25 bp, Artificial
  probe
  misc_feature (1)..(25): SEQ ID NO: 1927; WAN024GGZ_at; Start 46; Stop 70
gatttgttccttgagattacctatc

SEQ ID NO: 245139 - DNA, 25 bp, Artificial
  probe
  misc_feature (1)..(25): SEQ ID NO: 1927; WAN024GGZ_at; Start 219; Stop 243
tatagggaagaaactggagactgat

SEQ ID NO: 245140 - DNA, 25 bp, Artificial
  probe
  misc_feature (1)..(25): SEQ ID NO: 1927; WAN024GGZ_at; Start 143; Stop 167
tccaaaatcggtgcaacaatagtcc

SEQ ID NO: 245141 - DNA, 25 bp, Artificial
  probe
  misc_feature (1)..(25): SEQ ID NO: 1927; WAN024GGZ_at; Start 162; Stop 186
tagtccgagcgtagatgtaggccac

SEQ ID NO: 245142 - DNA, 25 bp, Artificial
  probe
  misc_feature (1)..(25): SEQ ID NO: 1927; WAN024GGZ_at; Start 18; Stop 42
cagtcaagagatgctggtagaggct

SEQ ID NO: 245143 - DNA, 25 bp, Artificial
  probe
  misc_feature (1)..(25): SEQ ID NO: 1927; WAN024GGZ_at; Start 30; Stop 54
gctggtagaggctattgatttgttc

SEQ ID NO: 245144 - DNA, 25 bp, Artificial
  probe
  misc_feature (1)..(25): SEQ ID NO: 1927; WAN024GGZ_at; Start 152; Stop 176
ggtgcaacaatagtccgagcgtaga

SEQ ID NO: 245145 - DNA, 25 bp, Artificial
  probe
  misc_feature (1)..(25): SEQ ID NO: 1927; WAN024GGZ_at; Start 90; Stop 114
gcaatcgcacttgggaatccaggtc

SEQ ID NO: 245146 - DNA, 25 bp, Artificial
  probe
  misc_feature (1)..(25): SEQ ID NO: 1927; WAN024GGZ_at; Start 134; Stop 158
cgcttgatttccaaaatcggtgcaa

SEQ ID NO: 245147 - DNA, 25 bp, Artificial
  probe
  misc_feature (1)..(25): SEQ ID NO: 1927; WAN024GGZ_at; Start 80; Stop 104
gaatccacgcgcaatcgcacttggg

SEQ ID NO: 245148 - DNA, 25 bp, Artificial
  probe
  misc_feature (1)..(25): SEQ ID NO: 1927; WAN024GGZ_at; Start 165; Stop 189
tccgagcgtagatgtaggccaccaa

SEQ ID NO: 245149 - DNA, 25 bp, Artificial
  probe
  misc_feature (1)..(25): SEQ ID NO: 1927; WAN024GGZ_at; Start 148; Stop 172
aatcggtgcaacaatagtccgagcg

SEQ ID NO: 245150 - DNA, 25 bp, Artificial
  probe
  misc_feature (1)..(25): SEQ ID NO: 1927; WAN024GGZ_at; Start 2; Stop 26
tgcaagtccgcaataacagtcaaga

SEQ ID NO: 245151 - DNA, 25 bp, Artificial
  probe
  misc_feature (1)..(25): SEQ ID NO: 1927; WAN024GGZ_at; Start 95; Stop 119
cgcacttgggaatccaggtccatca

SEQ ID NO: 245152 - DNA, 25 bp, Artificial
  probe
  misc_feature (1)..(25): SEQ ID NO: 1927; WAN024GGZ_at; Start 67; Stop 91
tatctcatccttagaatccacgcgc

SEQ ID NO: 245153 - DNA, 25 bp, Artificial
  probe
  misc_feature (1)..(25): SEQ ID NO: 1927; WAN024GGZ_at; Start 235; Stop 259
gagactgatttgctccgcttccttt

SEQ ID NO: 245154 - DNA, 25 bp, Artificial
  probe
  misc_feature (1)..(25): SEQ ID NO: 1927; WAN024GGZ_at; Start 37; Stop 61
gaggctattgatttgttccttgaga

SEQ ID NO: 245155 - DNA, 25 bp, Artificial
  probe
  misc_feature (1)..(25): SEQ ID NO: 1927; WAN024GGZ_at; Start 103; Stop 127
ggaatccaggtccatcatccgacgg

SEQ ID NO: 245156 - DNA, 25 bp, Artificial
  probe
  misc_feature (1)..(25): SEQ ID NO: 1927; WAN024GGZ_at; Start 127; Stop 151
ggtcacccgcttgatttccaaaatc

SEQ ID NO: 245157 - DNA, 25 bp, Artificial
  probe
  misc_feature (1)..(25): SEQ ID NO: 1927; WAN024GGZ_at; Start 196; Stop 220
aatcagaaaggaggccagcaaggta

SEQ ID NO: 245158 - DNA, 25 bp, Artificial
  probe
  misc_feature (1)..(25): SEQ ID NO: 1927; WAN024GGZ_at; Start 107; Stop 131
tccaggtccatcatccgacgggtca

SEQ ID NO: 245159 - DNA, 25 bp, Artificial
  probe
  misc_feature (1)..(25): SEQ ID NO: 1927; WAN024GGZ_at; Start 160; Stop 184
aatagtccgagcgtagatgtaggcc

SEQ ID NO: 245160 - DNA, 25 bp, Artificial
  probe
  misc_feature (1)..(25): SEQ ID NO: 838; WAN024GH2_at; Start 1129; Stop 1153
gaaaatagctgtagctcagaggaac

SEQ ID NO: 245161 - DNA, 25 bp, Artificial
  probe
  misc_feature (1)..(25): SEQ ID NO: 838; WAN024GH2_at; Start 1256; Stop 1280
tagcttatcgtttcgagatggagga

SEQ ID NO: 245162 - DNA, 25 bp, Artificial
  probe
  misc_feature (1)..(25): SEQ ID NO: 838; WAN024GH2_at; Start 527; Stop 551
tgacccgtcggatgatggacctgga

SEQ ID NO: 245163 - DNA, 25 bp, Artificial
  probe
  misc_feature (1)..(25): SEQ ID NO: 838; WAN024GH2_at; Start 507; Stop 531
gattttggaaatcaagcgggtgacc

SEQ ID NO: 245164 - DNA, 25 bp, Artificial
  probe
  misc_feature (1)..(25): SEQ ID NO: 838; WAN024GH2_at; Start 663; Stop 687
gaatgaagccattctccagctggag

SEQ ID NO: 245165 - DNA, 25 bp, Artificial
  probe
  misc_feature (1)..(25): SEQ ID NO: 838; WAN024GH2_at; Start 114; Stop 138
gagtcatcgtcaggaaaccattggt

SEQ ID NO: 245166 - DNA, 25 bp, Artificial
  probe
  misc_feature (1)..(25): SEQ ID NO: 838; WAN024GH2_at; Start 720; Stop 744
tcatgaattgaaaacaccgctggct

SEQ ID NO: 245167 - DNA, 25 bp, Artificial
  probe
  misc_feature (1)..(25): SEQ ID NO: 838; WAN024GH2_at; Start 798; Stop 822
tagagaccagtatctgggagttgcc

SEQ ID NO: 245168 - DNA, 25 bp, Artificial
  probe
  misc_feature (1)..(25): SEQ ID NO: 838; WAN024GH2_at; Start 892; Stop 916
cgagatgatagggaaacaattgacc

SEQ ID NO: 245169 - DNA, 25 bp, Artificial
  probe
  misc_feature (1)..(25): SEQ ID NO: 838; WAN024GH2_at; Start 366; Stop 390
gattctccagtttctagcttccatg

SEQ ID NO: 245170 - DNA, 25 bp, Artificial
  probe
  misc_feature (1)..(25): SEQ ID NO: 838; WAN024GH2_at; Start 277; Stop 301
aaggacagtcttcctctggacacag

SEQ ID NO: 245171 - DNA, 25 bp, Artificial
  probe
  misc_feature (1)..(25): SEQ ID NO: 838; WAN024GH2_at; Start 1082; Stop 1106
caggtggcttagttcgaattggaga

SEQ ID NO: 245172 - DNA, 25 bp, Artificial
  probe
  misc_feature (1)..(25): SEQ ID NO: 838; WAN024GH2_at; Start 320; Stop 344
tctttattgaggagcgcgaggtgaa

SEQ ID NO: 245173 - DNA, 25 bp, Artificial
  probe
  misc_feature (1)..(25): SEQ ID NO: 838; WAN024GH2_at; Start 959; Stop 983
tagccaaggaaagagagctccagat

SEQ ID NO: 245174 - DNA, 25 bp, Artificial
  probe
  misc_feature (1)..(25): SEQ ID NO: 838; WAN024GH2_at; Start 1144; Stop 1168
tcagaggaacaagaaaaactagccc

SEQ ID NO: 245175 - DNA, 25 bp, Artificial
  probe
  misc_feature (1)..(25): SEQ ID NO: 838; WAN024GH2_at; Start 129; Stop 153
aaccattggtcaaaaggcaacagcc

SEQ ID NO: 245176 - DNA, 25 bp, Artificial
  probe
  misc_feature (1)..(25): SEQ ID NO: 838; WAN024GH2_at; Start 985; Stop 1009
gacaatagtttgacccatcagcagg

SEQ ID NO: 245177 - DNA, 25 bp, Artificial
  probe
  misc_feature (1)..(25): SEQ ID NO: 838; WAN024GH2_at; Start 734; Stop 758
caccgctggctagtttgaaaatcct

SEQ ID NO: 245178 - DNA, 25 bp, Artificial
  probe
  misc_feature (1)..(25): SEQ ID NO: 838; WAN024GH2_at; Start 491; Stop 515
ggactattgttgcaccgattttgga

SEQ ID NO: 245179 - DNA, 25 bp, Artificial
  probe
  misc_feature (1)..(25): SEQ ID NO: 838; WAN024GH2_at; Start 151; Stop 175
gccattgcccagtccctagaaggga

SEQ ID NO: 245180 - DNA, 25 bp, Artificial
  probe
  misc_feature (1)..(25): SEQ ID NO: 838; WAN024GH2_at; Start 678; Stop 702
ccagctggagaagatgaaggtcgaa

SEQ ID NO: 245181 - DNA, 25 bp, Artificial
  probe
  misc_feature (1)..(25): SEQ ID NO: 838; WAN024GH2_at; Start 203; Stop 227
tagacttgtattcccagactagtga

SEQ ID NO: 245182 - DNA, 25 bp, Artificial
  probe
  misc_feature (1)..(25): SEQ ID NO: 838; WAN024GH2_at; Start 628; Stop 652
catctcttgactgttattgcggact

SEQ ID NO: 245183 - DNA, 25 bp, Artificial
  probe
  misc_feature (1)..(25): SEQ ID NO: 838; WAN024GH2_at; Start 837; Stop 861
tgaactcaatcaccatgttctgcag

SEQ ID NO: 245184 - DNA, 25 bp, Artificial
  probe
  misc_feature (1)..(25): SEQ ID NO: 838; WAN024GH2_at; Start 874; Stop 898
tcttctgtgcaggaattgcgagatg

SEQ ID NO: 245185 - DNA, 25 bp, Artificial
  probe
  misc_feature (1)..(25): SEQ ID NO: 838; WAN024GH2_at; Start 780; Stop 804
tatcggtcgttataaggatagagac

SEQ ID NO: 245186 - DNA, 25 bp, Artificial
  probe
  misc_feature (1)..(25): SEQ ID NO: 838; WAN024GH2_at; Start 560; Stop 584
tgcgattgcgcgtggattctaagga

SEQ ID NO: 245187 - DNA, 25 bp, Artificial
  probe
  misc_feature (1)..(25): SEQ ID NO: 838; WAN024GH2_at; Start 544; Stop 568
gacctggattcccaagtgcgattgc

SEQ ID NO: 245188 - DNA, 25 bp, Artificial
  probe
  misc_feature (1)..(25): SEQ ID NO: 838; WAN024GH2_at; Start 906; Stop 930
aacaattgacctcctccagatgacg

SEQ ID NO: 245189 - DNA, 25 bp, Artificial
  probe
  misc_feature (1)..(25): SEQ ID NO: 838; WAN024GH2_at; Start 613; Stop 637
aatagcctctaccagcatctcttga

SEQ ID NO: 245190 - DNA, 25 bp, Artificial
  probe
  misc_feature (1)..(25): SEQ ID NO: 838; WAN024GH2_at; Start 1065; Stop 1089
cattaagcactctgttccaggtggc

SEQ ID NO: 245191 - DNA, 25 bp, Artificial
  probe
  misc_feature (1)..(25): SEQ ID NO: 838; WAN024GH2_at; Start 183; Stop 207
gcagagtatcgagcaagtgttagac

SEQ ID NO: 245192 - DNA, 25 bp, Artificial
  probe
  misc_feature (1)..(25): SEQ ID NO: 838; WAN024GH2_at; Start 262; Stop 286
gacaagttagaagtcaaggacagtc

SEQ ID NO: 245193 - DNA, 25 bp, Artificial
  probe
  misc_feature (1)..(25): SEQ ID NO: 838; WAN024GH2_at; Start 1163; Stop 1187
tagcccagtctttttctgacaatgc

SEQ ID NO: 245194 - DNA, 25 bp, Artificial
  probe
  misc_feature (1)..(25): SEQ ID NO: 7599; WAN024GH3_at; Start 13; Stop 37
gttttgttggacttcatcagagtca

SEQ ID NO: 245195 - DNA, 25 bp, Artificial
  probe
  misc_feature (1)..(25): SEQ ID NO: 7599; WAN024GH3_at; Start 40; Stop 64
caggctgaaattccggccaataaga

SEQ ID NO: 245196 - DNA, 25 bp, Artificial
  probe
  misc_feature (1)..(25): SEQ ID NO: 7599; WAN024GH3_at; Start 53; Stop 77
cggccaataagaccaataaaatcag

SEQ ID NO: 245197 - DNA, 25 bp, Artificial
  probe
  misc_feature (1)..(25): SEQ ID NO: 7599; WAN024GH3_at; Start 29; Stop 53
tcagagtcaaacaggctgaaattcc

SEQ ID NO: 245198 - DNA, 25 bp, Artificial
  probe
  misc_feature (1)..(25): SEQ ID NO: 7599; WAN024GH3_at; Start 46; Stop 70
gaaattccggccaataagaccaata

SEQ ID NO: 245199 - DNA, 25 bp, Artificial
  probe
  misc_feature (1)..(25): SEQ ID NO: 7599; WAN024GH3_at; Start 22; Stop 46
gacttcatcagagtcaaacaggctg

SEQ ID NO: 245200 - DNA, 25 bp, Artificial
  probe
  misc_feature (1)..(25): SEQ ID NO: 7599; WAN024GH3_at; Start 55; Stop 79
gccaataagaccaataaaatcagaa

SEQ ID NO: 245201 - DNA, 25 bp, Artificial
  probe
  misc_feature (1)..(25): SEQ ID NO: 7599; WAN024GH3_at; Start 24; Stop 48
cttcatcagagtcaaacaggctgaa

SEQ ID NO: 245202 - DNA, 25 bp, Artificial
  probe
  misc_feature (1)..(25): SEQ ID NO: 7599; WAN024GH3_at; Start 3; Stop 27
gctttctactgttttgttggacttc

SEQ ID NO: 245203 - DNA, 25 bp, Artificial
  probe
  misc_feature (1)..(25): SEQ ID NO: 7599; WAN024GH3_at; Start 96; Stop 120
cagtcgctttctgctgacactaact

SEQ ID NO: 245204 - DNA, 25 bp, Artificial
  probe
  misc_feature (1)..(25): SEQ ID NO: 7599; WAN024GH3_at; Start 34; Stop 58
gtcaaacaggctgaaattccggcca

SEQ ID NO: 245205 - DNA, 25 bp, Artificial
  probe
  misc_feature (1)..(25): SEQ ID NO: 7599; WAN024GH3_at; Start 60; Stop 84
taagaccaataaaatcagaaataaa

SEQ ID NO: 245206 - DNA, 25 bp, Artificial
  probe
  misc_feature (1)..(25): SEQ ID NO: 7599; WAN024GH3_at; Start 33; Stop 57
agtcaaacaggctgaaattccggcc

SEQ ID NO: 245207 - DNA, 25 bp, Artificial
  probe
  misc_feature (1)..(25): SEQ ID NO: 7599; WAN024GH3_at; Start 93; Stop 117
tctcagtcgctttctgctgacacta

SEQ ID NO: 245208 - DNA, 25 bp, Artificial
  probe
  misc_feature (1)..(25): SEQ ID NO: 7599; WAN024GH3_at; Start 36; Stop 60
caaacaggctgaaattccggccaat

SEQ ID NO: 245209 - DNA, 25 bp, Artificial
  probe
  misc_feature (1)..(25): SEQ ID NO: 7599; WAN024GH3_at; Start 16; Stop 40
ttgttggacttcatcagagtcaaac

SEQ ID NO: 245210 - DNA, 25 bp, Artificial
  probe
  misc_feature (1)..(25): SEQ ID NO: 7599; WAN024GH3_at; Start 99; Stop 123
tcgctttctgctgacactaactaat

SEQ ID NO: 245211 - DNA, 25 bp, Artificial
  probe
  misc_feature (1)..(25): SEQ ID NO: 7599; WAN024GH3_at; Start 88; Stop 112
aaacttctcagtcgctttctgctga

SEQ ID NO: 245212 - DNA, 25 bp, Artificial
  probe
  misc_feature (1)..(25): SEQ ID NO: 7599; WAN024GH3_at; Start 21; Stop 45
ggacttcatcagagtcaaacaggct

SEQ ID NO: 245213 - DNA, 25 bp, Artificial
  probe
  misc_feature (1)..(25): SEQ ID NO: 7599; WAN024GH3_at; Start 45; Stop 69
tgaaattccggccaataagaccaat

SEQ ID NO: 245214 - DNA, 25 bp, Artificial
  probe
  misc_feature (1)..(25): SEQ ID NO: 7599; WAN024GH3_at; Start 35; Stop 59
tcaaacaggctgaaattccggccaa

SEQ ID NO: 245215 - DNA, 25 bp, Artificial
  probe
  misc_feature (1)..(25): SEQ ID NO: 7599; WAN024GH3_at; Start 30; Stop 54
cagagtcaaacaggctgaaattccg

SEQ ID NO: 245216 - DNA, 25 bp, Artificial
  probe
  misc_feature (1)..(25): SEQ ID NO: 7599; WAN024GH3_at; Start 32; Stop 56
gagtcaaacaggctgaaattccggc

SEQ ID NO: 245217 - DNA, 25 bp, Artificial
  probe
  misc_feature (1)..(25): SEQ ID NO: 7599; WAN024GH3_at; Start 7; Stop 31
tctactgttttgttggacttcatca

SEQ ID NO: 245218 - DNA, 25 bp, Artificial
  probe
  misc_feature (1)..(25): SEQ ID NO: 7599; WAN024GH3_at; Start 10; Stop 34
actgttttgttggacttcatcagag

SEQ ID NO: 245219 - DNA, 25 bp, Artificial
  probe
  misc_feature (1)..(25): SEQ ID NO: 7599; WAN024GH3_at; Start 79; Stop 103
aataaaataaaacttctcagtcgct

SEQ ID NO: 245220 - DNA, 25 bp, Artificial
  probe
  misc_feature (1)..(25): SEQ ID NO: 7599; WAN024GH3_at; Start 51; Stop 75
tccggccaataagaccaataaaatc

SEQ ID NO: 245221 - DNA, 25 bp, Artificial
  probe
  misc_feature (1)..(25): SEQ ID NO: 7599; WAN024GH3_at; Start 38; Stop 62
aacaggctgaaattccggccaataa

SEQ ID NO: 245222 - DNA, 25 bp, Artificial
  probe
  misc_feature (1)..(25): SEQ ID NO: 7599; WAN024GH3_at; Start 84; Stop 108
aataaaacttctcagtcgctttctg

SEQ ID NO: 245223 - DNA, 25 bp, Artificial
  probe
  misc_feature (1)..(25): SEQ ID NO: 7599; WAN024GH3_at; Start 86; Stop 110
taaaacttctcagtcgctttctgct

SEQ ID NO: 245224 - DNA, 25 bp, Artificial
  probe
  misc_feature (1)..(25): SEQ ID NO: 7599; WAN024GH3_at; Start 98; Stop 122
gtcgctttctgctgacactaactaa

SEQ ID NO: 245225 - DNA, 25 bp, Artificial
  probe
  misc_feature (1)..(25): SEQ ID NO: 7599; WAN024GH3_at; Start 26; Stop 50
tcatcagagtcaaacaggctgaaat

SEQ ID NO: 245226 - DNA, 25 bp, Artificial
  probe
  misc_feature (1)..(25): SEQ ID NO: 7599; WAN024GH3_at; Start 19; Stop 43
ttggacttcatcagagtcaaacagg

SEQ ID NO: 245227 - DNA, 25 bp, Artificial
  probe
  misc_feature (1)..(25): SEQ ID NO: 7599; WAN024GH3_at; Start 90; Stop 114
acttctcagtcgctttctgctgaca

SEQ ID NO: 245228 - DNA, 25 bp, Artificial
  probe
  misc_feature (1)..(25): SEQ ID NO: 5802; WAN024GH4_at; Start 192; Stop 216
tgaagtcagaagacaagcctgtgaa

SEQ ID NO: 245229 - DNA, 25 bp, Artificial
  probe
  misc_feature (1)..(25): SEQ ID NO: 5802; WAN024GH4_at; Start 118; Stop 142
tgcactgacttgagcttcactattg

SEQ ID NO: 245230 - DNA, 25 bp, Artificial
  probe
  misc_feature (1)..(25): SEQ ID NO: 5802; WAN024GH4_at; Start 52; Stop 76
ggccaagttttctacctgcttcatg

SEQ ID NO: 245231 - DNA, 25 bp, Artificial
  probe
  misc_feature (1)..(25): SEQ ID NO: 5802; WAN024GH4_at; Start 128; Stop 152
tgagcttcactattgcccaaaaggg

SEQ ID NO: 245232 - DNA, 25 bp, Artificial
  probe
  misc_feature (1)..(25): SEQ ID NO: 5802; WAN024GH4_at; Start 287; Stop 311
gactgaccagcatccaagccaatct

SEQ ID NO: 245233 - DNA, 25 bp, Artificial
  probe
  misc_feature (1)..(25): SEQ ID NO: 5802; WAN024GH4_at; Start 281; Stop 305
gattcagactgaccagcatccaagc

SEQ ID NO: 245234 - DNA, 25 bp, Artificial
  probe
  misc_feature (1)..(25): SEQ ID NO: 5802; WAN024GH4_at; Start 150; Stop 174
gggtttggctactttcatagtctgt

SEQ ID NO: 245235 - DNA, 25 bp, Artificial
  probe
  misc_feature (1)..(25): SEQ ID NO: 5802; WAN024GH4_at; Start 325; Stop 349
aagaccgttcttcttagccaattct

SEQ ID NO: 245236 - DNA, 25 bp, Artificial
  probe
  misc_feature (1)..(25): SEQ ID NO: 5802; WAN024GH4_at; Start 33; Stop 57
ggtagccttgattttccaaggccaa

SEQ ID NO: 245237 - DNA, 25 bp, Artificial
  probe
  misc_feature (1)..(25): SEQ ID NO: 5802; WAN024GH4_at; Start 75; Stop 99
tgagtccgtccatttccttaggatt

SEQ ID NO: 245238 - DNA, 25 bp, Artificial
  probe
  misc_feature (1)..(25): SEQ ID NO: 5802; WAN024GH4_at; Start 156; Stop 180
ggctactttcatagtctgtaaagac

SEQ ID NO: 245239 - DNA, 25 bp, Artificial
  probe
  misc_feature (1)..(25): SEQ ID NO: 5802; WAN024GH4_at; Start 347; Stop 371
tcttcgtggataaggattttcttgg

SEQ ID NO: 245240 - DNA, 25 bp, Artificial
  probe
  misc_feature (1)..(25): SEQ ID NO: 5802; WAN024GH4_at; Start 249; Stop 273
taatctcaaactctactgtttgtcc

SEQ ID NO: 245241 - DNA, 25 bp, Artificial
  probe
  misc_feature (1)..(25): SEQ ID NO: 5802; WAN024GH4_at; Start 62; Stop 86
tctacctgcttcatgagtccgtcca

SEQ ID NO: 245242 - DNA, 25 bp, Artificial
  probe
  misc_feature (1)..(25): SEQ ID NO: 5802; WAN024GH4_at; Start 188; Stop 212
tcactgaagtcagaagacaagcctg

SEQ ID NO: 245243 - DNA, 25 bp, Artificial
  probe
  misc_feature (1)..(25): SEQ ID NO: 5802; WAN024GH4_at; Start 25; Stop 49
ttcgacttggtagccttgattttcc

SEQ ID NO: 245244 - DNA, 25 bp, Artificial
  probe
  misc_feature (1)..(25): SEQ ID NO: 5802; WAN024GH4_at; Start 19; Stop 43
ttccttttcgacttggtagccttga

SEQ ID NO: 245245 - DNA, 25 bp, Artificial
  probe
  misc_feature (1)..(25): SEQ ID NO: 5802; WAN024GH4_at; Start 269; Stop 293
tgtccttttccagattcagactgac

SEQ ID NO: 245246 - DNA, 25 bp, Artificial
  probe
  misc_feature (1)..(25): SEQ ID NO: 5802; WAN024GH4_at; Start 172; Stop 196
tgtaaagacttgattttcactgaag

SEQ ID NO: 245247 - DNA, 25 bp, Artificial
  probe
  misc_feature (1)..(25): SEQ ID NO: 5802; WAN024GH4_at; Start 257; Stop 281
aactctactgtttgtccttttccag

SEQ ID NO: 245248 - DNA, 25 bp, Artificial
  probe
  misc_feature (1)..(25): SEQ ID NO: 5802; WAN024GH4_at; Start 47; Stop 71
tccaaggccaagttttctacctgct

SEQ ID NO: 245249 - DNA, 25 bp, Artificial
  probe
  misc_feature (1)..(25): SEQ ID NO: 5802; WAN024GH4_at; Start 112; Stop 136
gcgtgctgcactgacttgagcttca

SEQ ID NO: 245250 - DNA, 25 bp, Artificial
  probe
  misc_feature (1)..(25): SEQ ID NO: 5802; WAN024GH4_at; Start 58; Stop 82
gttttctacctgcttcatgagtccg

SEQ ID NO: 245251 - DNA, 25 bp, Artificial
  probe
  misc_feature (1)..(25): SEQ ID NO: 5802; WAN024GH4_at; Start 221; Stop 245
tcttgttttttaccagaaaagatgc

SEQ ID NO: 245252 - DNA, 25 bp, Artificial
  probe
  misc_feature (1)..(25): SEQ ID NO: 5802; WAN024GH4_at; Start 353; Stop 377
tggataaggattttcttggaatccc

SEQ ID NO: 245253 - DNA, 25 bp, Artificial
  probe
  misc_feature (1)..(25): SEQ ID NO: 5802; WAN024GH4_at; Start 213; Stop 237
tgaatttctcttgttttttaccaga

SEQ ID NO: 245254 - DNA, 25 bp, Artificial
  probe
  misc_feature (1)..(25): SEQ ID NO: 5802; WAN024GH4_at; Start 89; Stop 113
tccttaggattttctacatagaagc

SEQ ID NO: 245255 - DNA, 25 bp, Artificial
  probe
  misc_feature (1)..(25): SEQ ID NO: 5802; WAN024GH4_at; Start 200; Stop 224
gaagacaagcctgtgaatttctctt

SEQ ID NO: 245256 - DNA, 25 bp, Artificial
  probe
  misc_feature (1)..(25): SEQ ID NO: 5802; WAN024GH4_at; Start 72; Stop 96
tcatgagtccgtccatttccttagg

SEQ ID NO: 245257 - DNA, 25 bp, Artificial
  probe
  misc_feature (1)..(25): SEQ ID NO: 5802; WAN024GH4_at; Start 98; Stop 122
ttttctacatagaagcgtgctgcac

SEQ ID NO: 245258 - DNA, 25 bp, Artificial
  probe
  misc_feature (1)..(25): SEQ ID NO: 5802; WAN024GH4_at; Start 135; Stop 159
cactattgcccaaaagggtttggct

SEQ ID NO: 245259 - DNA, 25 bp, Artificial
  probe
  misc_feature (1)..(25): SEQ ID NO: 5802; WAN024GH4_at; Start 103; Stop 127
tacatagaagcgtgctgcactgact

SEQ ID NO: 245260 - DNA, 25 bp, Artificial
  probe
  misc_feature (1)..(25): SEQ ID NO: 5802; WAN024GH4_at; Start 297; Stop 321
catccaagccaatcttgtcatgaag

SEQ ID NO: 245261 - DNA, 25 bp, Artificial
  probe
  misc_feature (1)..(25): SEQ ID NO: 5802; WAN024GH4_at; Start 339; Stop 363
tagccaattcttcgtggataaggat

SEQ ID NO: 245262 - DNA, 25 bp, Artificial
  probe
  misc_feature (1)..(25): SEQ ID NO: 5373; WAN024GH5_at; Start 13; Stop 37
caacaaatgctggaagcaaagctcc

SEQ ID NO: 245263 - DNA, 25 bp, Artificial
  probe
  misc_feature (1)..(25): SEQ ID NO: 5373; WAN024GH5_at; Start 8; Stop 32
tcctgcaacaaatgctggaagcaaa

SEQ ID NO: 245264 - DNA, 25 bp, Artificial
  probe
  misc_feature (1)..(25): SEQ ID NO: 5373; WAN024GH5_at; Start 212; Stop 236
ggtttggaaagttgcaactgagtct

SEQ ID NO: 245265 - DNA, 25 bp, Artificial
  probe
  misc_feature (1)..(25): SEQ ID NO: 5373; WAN024GH5_at; Start 157; Stop 181
gaattaaggctccagctcctgctat

SEQ ID NO: 245266 - DNA, 25 bp, Artificial
  probe
  misc_feature (1)..(25): SEQ ID NO: 5373; WAN024GH5_at; Start 28; Stop 52
gcaaagctccaagagataccaaaac

SEQ ID NO: 245267 - DNA, 25 bp, Artificial
  probe
  misc_feature (1)..(25): SEQ ID NO: 5373; WAN024GH5_at; Start 60; Stop 84
aaacagaattgtaggaagatcgagc

SEQ ID NO: 245268 - DNA, 25 bp, Artificial
  probe
  misc_feature (1)..(25): SEQ ID NO: 5373; WAN024GH5_at; Start 67; Stop 91
attgtaggaagatcgagctcttgcc

SEQ ID NO: 245269 - DNA, 25 bp, Artificial
  probe
  misc_feature (1)..(25): SEQ ID NO: 5373; WAN024GH5_at; Start 147; Stop 171
gacaaaaccagaattaaggctccag

SEQ ID NO: 245270 - DNA, 25 bp, Artificial
  probe
  misc_feature (1)..(25): SEQ ID NO: 5373; WAN024GH5_at; Start 53; Stop 77
tacctctaaacagaattgtaggaag

SEQ ID NO: 245271 - DNA, 25 bp, Artificial
  probe
  misc_feature (1)..(25): SEQ ID NO: 5373; WAN024GH5_at; Start 74; Stop 98
gaagatcgagctcttgccttttcca

SEQ ID NO: 245272 - DNA, 25 bp, Artificial
  probe
  misc_feature (1)..(25): SEQ ID NO: 5373; WAN024GH5_at; Start 176; Stop 200
tgctatcaacatcccataaaggaag

SEQ ID NO: 245273 - DNA, 25 bp, Artificial
  probe
  misc_feature (1)..(25): SEQ ID NO: 5373; WAN024GH5_at; Start 151; Stop 175
aaaccagaattaaggctccagctcc

SEQ ID NO: 245274 - DNA, 25 bp, Artificial
  probe
  misc_feature (1)..(25): SEQ ID NO: 5373; WAN024GH5_at; Start 20; Stop 44
tgctggaagcaaagctccaagagat

SEQ ID NO: 245275 - DNA, 25 bp, Artificial
  probe
  misc_feature (1)..(25): SEQ ID NO: 5373; WAN024GH5_at; Start 123; Stop 147
tagacccgttctctcaaccagagag

SEQ ID NO: 245276 - DNA, 25 bp, Artificial
  probe
  misc_feature (1)..(25): SEQ ID NO: 5373; WAN024GH5_at; Start 63; Stop 87
cagaattgtaggaagatcgagctct

SEQ ID NO: 245277 - DNA, 25 bp, Artificial
  probe
  misc_feature (1)..(25): SEQ ID NO: 5373; WAN024GH5_at; Start 136; Stop 160
tcaaccagagagacaaaaccagaat

SEQ ID NO: 245278 - DNA, 25 bp, Artificial
  probe
  misc_feature (1)..(25): SEQ ID NO: 5373; WAN024GH5_at; Start 81; Stop 105
gagctcttgccttttccaagtgcaa

SEQ ID NO: 245279 - DNA, 25 bp, Artificial
  probe
  misc_feature (1)..(25): SEQ ID NO: 5373; WAN024GH5_at; Start 33; Stop 57
gctccaagagataccaaaactacct

SEQ ID NO: 245280 - DNA, 25 bp, Artificial
  probe
  misc_feature (1)..(25): SEQ ID NO: 5373; WAN024GH5_at; Start 155; Stop 179
cagaattaaggctccagctcctgct

SEQ ID NO: 245281 - DNA, 25 bp, Artificial
  probe
  misc_feature (1)..(25): SEQ ID NO: 5373; WAN024GH5_at; Start 173; Stop 197
tcctgctatcaacatcccataaagg

SEQ ID NO: 245282 - DNA, 25 bp, Artificial
  probe
  misc_feature (1)..(25): SEQ ID NO: 5373; WAN024GH5_at; Start 101; Stop 125
tgcaagtaaaatccccacttcatag

SEQ ID NO: 245283 - DNA, 25 bp, Artificial
  probe
  misc_feature (1)..(25): SEQ ID NO: 5373; WAN024GH5_at; Start 93; Stop 117
tttccaagtgcaagtaaaatcccca

SEQ ID NO: 245284 - DNA, 25 bp, Artificial
  probe
  misc_feature (1)..(25): SEQ ID NO: 5373; WAN024GH5_at; Start 42; Stop 66
gataccaaaactacctctaaacaga

SEQ ID NO: 245285 - DNA, 25 bp, Artificial
  probe
  misc_feature (1)..(25): SEQ ID NO: 5373; WAN024GH5_at; Start 185; Stop 209
catcccataaaggaagatggtcagg

SEQ ID NO: 245286 - DNA, 25 bp, Artificial
  probe
  misc_feature (1)..(25): SEQ ID NO: 5373; WAN024GH5_at; Start 140; Stop 164
ccagagagacaaaaccagaattaag

SEQ ID NO: 245287 - DNA, 25 bp, Artificial
  probe
  misc_feature (1)..(25): SEQ ID NO: 5373; WAN024GH5_at; Start 2; Stop 26
tgcgtttcctgcaacaaatgctgga

SEQ ID NO: 245288 - DNA, 25 bp, Artificial
  probe
  misc_feature (1)..(25): SEQ ID NO: 5373; WAN024GH5_at; Start 16; Stop 40
caaatgctggaagcaaagctccaag

SEQ ID NO: 245289 - DNA, 25 bp, Artificial
  probe
  misc_feature (1)..(25): SEQ ID NO: 5373; WAN024GH5_at; Start 162; Stop 186
aaggctccagctcctgctatcaaca

SEQ ID NO: 245290 - DNA, 25 bp, Artificial
  probe
  misc_feature (1)..(25): SEQ ID NO: 5373; WAN024GH5_at; Start 205; Stop 229
tcaggaaggtttggaaagttgcaac

SEQ ID NO: 245291 - DNA, 25 bp, Artificial
  probe
  misc_feature (1)..(25): SEQ ID NO: 5373; WAN024GH5_at; Start 24; Stop 48
ggaagcaaagctccaagagatacca

SEQ ID NO: 245292 - DNA, 25 bp, Artificial
  probe
  misc_feature (1)..(25): SEQ ID NO: 5373; WAN024GH5_at; Start 216; Stop 240
tggaaagttgcaactgagtctttga

SEQ ID NO: 245293 - DNA, 25 bp, Artificial
  probe
  misc_feature (1)..(25): SEQ ID NO: 5373; WAN024GH5_at; Start 190; Stop 214
cataaaggaagatggtcaggaaggt

SEQ ID NO: 245294 - DNA, 25 bp, Artificial
  probe
  misc_feature (1)..(25): SEQ ID NO: 5373; WAN024GH5_at; Start 121; Stop 145
catagacccgttctctcaaccagag

SEQ ID NO: 245295 - DNA, 25 bp, Artificial
  probe
  misc_feature (1)..(25): SEQ ID NO: 5373; WAN024GH5_at; Start 77; Stop 101
gatcgagctcttgccttttccaagt

SEQ ID NO: 245296 - DNA, 25 bp, Artificial
  probe
  misc_feature (1)..(25): SEQ ID NO: 4901; WAN024GH6_at; Start 48; Stop 72
agccgttaagctaaccaagttattg

SEQ ID NO: 245297 - DNA, 25 bp, Artificial
  probe
  misc_feature (1)..(25): SEQ ID NO: 4901; WAN024GH6_at; Start 129; Stop 153
gtcttttagttttgcgaccgtctca

SEQ ID NO: 245298 - DNA, 25 bp, Artificial
  probe
  misc_feature (1)..(25): SEQ ID NO: 4901; WAN024GH6_at; Start 142; Stop 166
gcgaccgtctcaagttcaggagaga

SEQ ID NO: 245299 - DNA, 25 bp, Artificial
  probe
  misc_feature (1)..(25): SEQ ID NO: 4901; WAN024GH6_at; Start 40; Stop 64
tcctcaagagccgttaagctaacca

SEQ ID NO: 245300 - DNA, 25 bp, Artificial
  probe
  misc_feature (1)..(25): SEQ ID NO: 4901; WAN024GH6_at; Start 113; Stop 137
cagtcactgcttccttgtcttttag

SEQ ID NO: 245301 - DNA, 25 bp, Artificial
  probe
  misc_feature (1)..(25): SEQ ID NO: 4901; WAN024GH6_at; Start 82; Stop 106
gataaatcatcacgctccacgctct

SEQ ID NO: 245302 - DNA, 25 bp, Artificial
  probe
  misc_feature (1)..(25): SEQ ID NO: 4901; WAN024GH6_at; Start 75; Stop 99
tgcagctgataaatcatcacgctcc

SEQ ID NO: 245303 - DNA, 25 bp, Artificial
  probe
  misc_feature (1)..(25): SEQ ID NO: 4901; WAN024GH6_at; Start 34; Stop 58
gatgaatcctcaagagccgttaagc

SEQ ID NO: 245304 - DNA, 25 bp, Artificial
  probe
  misc_feature (1)..(25): SEQ ID NO: 4901; WAN024GH6_at; Start 136; Stop 160
agttttgcgaccgtctcaagttcag

SEQ ID NO: 245305 - DNA, 25 bp, Artificial
  probe
  misc_feature (1)..(25): SEQ ID NO: 4901; WAN024GH6_at; Start 201; Stop 225
taggtctgacaacttgaatgtctga

SEQ ID NO: 245306 - DNA, 25 bp, Artificial
  probe
  misc_feature (1)..(25): SEQ ID NO: 4901; WAN024GH6_at; Start 146; Stop 170
ccgtctcaagttcaggagagacatt

SEQ ID NO: 245307 - DNA, 25 bp, Artificial
  probe
  misc_feature (1)..(25): SEQ ID NO: 4901; WAN024GH6_at; Start 106; Stop 130
tgctcgccagtcactgcttccttgt

SEQ ID NO: 245308 - DNA, 25 bp, Artificial
  probe
  misc_feature (1)..(25): SEQ ID NO: 4901; WAN024GH6_at; Start 182; Stop 206
taatcttgcttacagatgctaggtc

SEQ ID NO: 245309 - DNA, 25 bp, Artificial
  probe
  misc_feature (1)..(25): SEQ ID NO: 4901; WAN024GH6_at; Start 28; Stop 52
tccttggatgaatcctcaagagccg

SEQ ID NO: 245310 - DNA, 25 bp, Artificial
  probe
  misc_feature (1)..(25): SEQ ID NO: 4901; WAN024GH6_at; Start 68; Stop 92
tattgtctgcagctgataaatcatc

SEQ ID NO: 245311 - DNA, 25 bp, Artificial
  probe
  misc_feature (1)..(25): SEQ ID NO: 4901; WAN024GH6_at; Start 139; Stop 163
tttgcgaccgtctcaagttcaggag

SEQ ID NO: 245312 - DNA, 25 bp, Artificial
  probe
  misc_feature (1)..(25): SEQ ID NO: 4901; WAN024GH6_at; Start 59; Stop 83
taaccaagttattgtctgcagctga

SEQ ID NO: 245313 - DNA, 25 bp, Artificial
  probe
  misc_feature (1)..(25): SEQ ID NO: 4901; WAN024GH6_at; Start 121; Stop 145
gcttccttgtcttttagttttgcga

SEQ ID NO: 245314 - DNA, 25 bp, Artificial
  probe
  misc_feature (1)..(25): SEQ ID NO: 4901; WAN024GH6_at; Start 12; Stop 36
actggtaaaggttacatccttggat

SEQ ID NO: 245315 - DNA, 25 bp, Artificial
  probe
  misc_feature (1)..(25): SEQ ID NO: 4901; WAN024GH6_at; Start 172; Stop 196
tccagccccttaatcttgcttacag

SEQ ID NO: 245316 - DNA, 25 bp, Artificial
  probe
  misc_feature (1)..(25): SEQ ID NO: 4901; WAN024GH6_at; Start 43; Stop 67
tcaagagccgttaagctaaccaagt

SEQ ID NO: 245317 - DNA, 25 bp, Artificial
  probe
  misc_feature (1)..(25): SEQ ID NO: 4901; WAN024GH6_at; Start 31; Stop 55
ttggatgaatcctcaagagccgtta

SEQ ID NO: 245318 - DNA, 25 bp, Artificial
  probe
  misc_feature (1)..(25): SEQ ID NO: 4901; WAN024GH6_at; Start 71; Stop 95
tgtctgcagctgataaatcatcacg

SEQ ID NO: 245319 - DNA, 25 bp, Artificial
  probe
  misc_feature (1)..(25): SEQ ID NO: 4901; WAN024GH6_at; Start 163; Stop 187
gagacattttccagccccttaatct

SEQ ID NO: 245320 - DNA, 25 bp, Artificial
  probe
  misc_feature (1)..(25): SEQ ID NO: 4901; WAN024GH6_at; Start 161; Stop 185
gagagacattttccagccccttaat

SEQ ID NO: 245321 - DNA, 25 bp, Artificial
  probe
  misc_feature (1)..(25): SEQ ID NO: 4901; WAN024GH6_at; Start 62; Stop 86
ccaagttattgtctgcagctgataa

SEQ ID NO: 245322 - DNA, 25 bp, Artificial
  probe
  misc_feature (1)..(25): SEQ ID NO: 4901; WAN024GH6_at; Start 186; Stop 210
cttgcttacagatgctaggtctgac

SEQ ID NO: 245323 - DNA, 25 bp, Artificial
  probe
  misc_feature (1)..(25): SEQ ID NO: 4901; WAN024GH6_at; Start 37; Stop 61
gaatcctcaagagccgttaagctaa

SEQ ID NO: 245324 - DNA, 25 bp, Artificial
  probe
  misc_feature (1)..(25): SEQ ID NO: 4901; WAN024GH6_at; Start 156; Stop 180
ttcaggagagacattttccagcccc

SEQ ID NO: 245325 - DNA, 25 bp, Artificial
  probe
  misc_feature (1)..(25): SEQ ID NO: 4901; WAN024GH6_at; Start 196; Stop 220
gatgctaggtctgacaacttgaatg

SEQ ID NO: 245326 - DNA, 25 bp, Artificial
  probe
  misc_feature (1)..(25): SEQ ID NO: 4901; WAN024GH6_at; Start 192; Stop 216
tacagatgctaggtctgacaacttg

SEQ ID NO: 245327 - DNA, 25 bp, Artificial
  probe
  misc_feature (1)..(25): SEQ ID NO: 4901; WAN024GH6_at; Start 152; Stop 176
caagttcaggagagacattttccag

SEQ ID NO: 245328 - DNA, 25 bp, Artificial
  probe
  misc_feature (1)..(25): SEQ ID NO: 4901; WAN024GH6_at; Start 15; Stop 39
ggtaaaggttacatccttggatgaa

SEQ ID NO: 245329 - DNA, 25 bp, Artificial
  probe
  misc_feature (1)..(25): SEQ ID NO: 4901; WAN024GH6_at; Start 24; Stop 48
tacatccttggatgaatcctcaaga

SEQ ID NO: 245330 - DNA, 25 bp, Artificial
  probe
  misc_feature (1)..(25): SEQ ID NO: 4927; WAN024GH7_at; Start 1064; Stop 1088
ctctggttgagagaacgggtctatg

SEQ ID NO: 245331 - DNA, 25 bp, Artificial
  probe
  misc_feature (1)..(25): SEQ ID NO: 4927; WAN024GH7_at; Start 340; Stop 364
gacattcaagttgtcagacctagca

SEQ ID NO: 245332 - DNA, 25 bp, Artificial
  probe
  misc_feature (1)..(25): SEQ ID NO: 4927; WAN024GH7_at; Start 558; Stop 582
tcaatctaaaagaagggcgacacct

SEQ ID NO: 245333 - DNA, 25 bp, Artificial
  probe
  misc_feature (1)..(25): SEQ ID NO: 4927; WAN024GH7_at; Start 1247; Stop 1271
gatcaggcaagcttacaagatacac

SEQ ID NO: 245334 - DNA, 25 bp, Artificial
  probe
  misc_feature (1)..(25): SEQ ID NO: 4927; WAN024GH7_at; Start 228; Stop 252
tggccggaatttcagcctgtttgac

SEQ ID NO: 245335 - DNA, 25 bp, Artificial
  probe
  misc_feature (1)..(25): SEQ ID NO: 4927; WAN024GH7_at; Start 871; Stop 895
tcctaaggaaatggacggactcatg

SEQ ID NO: 245336 - DNA, 25 bp, Artificial
  probe
  misc_feature (1)..(25): SEQ ID NO: 4927; WAN024GH7_at; Start 655; Stop 679
caagattggcttggatgctggtcag

SEQ ID NO: 245337 - DNA, 25 bp, Artificial
  probe
  misc_feature (1)..(25): SEQ ID NO: 4927; WAN024GH7_at; Start 125; Stop 149
caaatatggaggtgacaaatgaatc

SEQ ID NO: 245338 - DNA, 25 bp, Artificial
  probe
  misc_feature (1)..(25): SEQ ID NO: 4927; WAN024GH7_at; Start 255; Stop 279
tgatgaagtccaacaaaacagtaga

SEQ ID NO: 245339 - DNA, 25 bp, Artificial
  probe
  misc_feature (1)..(25): SEQ ID NO: 4927; WAN024GH7_at; Start 795; Stop 819
cagactatgaaagtagccaaaccct

SEQ ID NO: 245340 - DNA, 25 bp, Artificial
  probe
  misc_feature (1)..(25): SEQ ID NO: 4927; WAN024GH7_at; Start 1; Stop 25
ttgaaccgccgtatgccgaacggca

SEQ ID NO: 245341 - DNA, 25 bp, Artificial
  probe
  misc_feature (1)..(25): SEQ ID NO: 4927; WAN024GH7_at; Start 167; Stop 191
gcttatgtcagcagaaagcgactga

SEQ ID NO: 245342 - DNA, 25 bp, Artificial
  probe
  misc_feature (1)..(25): SEQ ID NO: 4927; WAN024GH7_at; Start 1272; Stop 1296
tagccaaagcaagcagtttatcaac

SEQ ID NO: 245343 - DNA, 25 bp, Artificial
  probe
  misc_feature (1)..(25): SEQ ID NO: 4927; WAN024GH7_at; Start 816; Stop 840
cccttttgggcaatagtgaagctca

SEQ ID NO: 245344 - DNA, 25 bp, Artificial
  probe
  misc_feature (1)..(25): SEQ ID NO: 4927; WAN024GH7_at; Start 617; Stop 641
gaagaattggctaagaagaacggtc

SEQ ID NO: 245345 - DNA, 25 bp, Artificial
  probe
  misc_feature (1)..(25): SEQ ID NO: 4927; WAN024GH7_at; Start 457; Stop 481
gagcgtggagcgtgatgatttatca

SEQ ID NO: 245346 - DNA, 25 bp, Artificial
  probe
  misc_feature (1)..(25): SEQ ID NO: 4927; WAN024GH7_at; Start 1123; Stop 1147
gagctcgatcttcctacaattctgt

SEQ ID NO: 245347 - DNA, 25 bp, Artificial
  probe
  misc_feature (1)..(25): SEQ ID NO: 4927; WAN024GH7_at; Start 426; Stop 450
taaaagacaaggaagcagtgactgg

SEQ ID NO: 245348 - DNA, 25 bp, Artificial
  probe
  misc_feature (1)..(25): SEQ ID NO: 4927; WAN024GH7_at; Start 1231; Stop 1255
tctactagcaagtggagatcaggca

SEQ ID NO: 245349 - DNA, 25 bp, Artificial
  probe
  misc_feature (1)..(25): SEQ ID NO: 4927; WAN024GH7_at; Start 832; Stop 856
tgaagctcaagtcagtgcagcacgc

SEQ ID NO: 245350 - DNA, 25 bp, Artificial
  probe
  misc_feature (1)..(25): SEQ ID NO: 4927; WAN024GH7_at; Start 44; Stop 68
gggctagagattatcccctactcga

SEQ ID NO: 245351 - DNA, 25 bp, Artificial
  probe
  misc_feature (1)..(25): SEQ ID NO: 4927; WAN024GH7_at; Start 1105; Stop 1129
tgcacttggaaaaggcaagagctcg

SEQ ID NO: 245352 - DNA, 25 bp, Artificial
  probe
  misc_feature (1)..(25): SEQ ID NO: 4927; WAN024GH7_at; Start 477; Stop 501
tatcagctgcagacaataacttggt

SEQ ID NO: 245353 - DNA, 25 bp, Artificial
  probe
  misc_feature (1)..(25): SEQ ID NO: 4927; WAN024GH7_at; Start 211; Stop 235
gattttattggtcttattggccgga

SEQ ID NO: 245354 - DNA, 25 bp, Artificial
  probe
  misc_feature (1)..(25): SEQ ID NO: 4927; WAN024GH7_at; Start 409; Stop 433
tgagacggtcgcaaaactaaaagac

SEQ ID NO: 245355 - DNA, 25 bp, Artificial
  probe
  misc_feature (1)..(25): SEQ ID NO: 4927; WAN024GH7_at; Start 145; Stop 169
gaatccaatccaaagatcttgggct

SEQ ID NO: 245356 - DNA, 25 bp, Artificial
  probe
  misc_feature (1)..(25): SEQ ID NO: 4927; WAN024GH7_at; Start 388; Stop 412
ggaaaatgtctctcctgaacttgag

SEQ ID NO: 245357 - DNA, 25 bp, Artificial
  probe
  misc_feature (1)..(25): SEQ ID NO: 4927; WAN024GH7_at; Start 844; Stop 868
cagtgcagcacgcttctatgtagaa

SEQ ID NO: 245358 - DNA, 25 bp, Artificial
  probe
  misc_feature (1)..(25): SEQ ID NO: 4927; WAN024GH7_at; Start 754; Stop 778
cacaggcttgtcttctgacttcagt

SEQ ID NO: 245359 - DNA, 25 bp, Artificial
  probe
  misc_feature (1)..(25): SEQ ID NO: 4927; WAN024GH7_at; Start 1023; Stop 1047
tgttgatagcaggagctggagcctt

SEQ ID NO: 245360 - DNA, 25 bp, Artificial
  probe
  misc_feature (1)..(25): SEQ ID NO: 4927; WAN024GH7_at; Start 919; Stop 943
ggaaaatcaaggctaccaagtcgaa

SEQ ID NO: 245361 - DNA, 25 bp, Artificial
  probe
  misc_feature (1)..(25): SEQ ID NO: 4927; WAN024GH7_at; Start 892; Stop 916
catgaagcaggtagaaaacttggcc

SEQ ID NO: 245362 - DNA, 25 bp, Artificial
  probe
  misc_feature (1)..(25): SEQ ID NO: 4927; WAN024GH7_at; Start 507; Stop 531
taacggctcttgaggattcatccaa

SEQ ID NO: 245363 - DNA, 25 bp, Artificial
  probe
  misc_feature (1)..(25): SEQ ID NO: 4927; WAN024GH7_at; Start 601; Stop 625
gaaaatccttatccacgaagaattg

SEQ ID NO: 245364 - DNA, 25 bp, Artificial
  probe
  misc_feature (1)..(25): SEQ ID NO: 2086; WAN024GH8_at; Start 184; Stop 208
gaagcacttgtccagtttccagcat

SEQ ID NO: 245365 - DNA, 25 bp, Artificial
  probe
  misc_feature (1)..(25): SEQ ID NO: 2086; WAN024GH8_at; Start 243; Stop 267
actaggaacttcagtagcaggttga

SEQ ID NO: 245366 - DNA, 25 bp, Artificial
  probe
  misc_feature (1)..(25): SEQ ID NO: 2086; WAN024GH8_at; Start 107; Stop 131
caggatttttcactaagattttgtc

SEQ ID NO: 245367 - DNA, 25 bp, Artificial
  probe
  misc_feature (1)..(25): SEQ ID NO: 2086; WAN024GH8_at; Start 215; Stop 239
tagcatttaattttacagtaattcc

SEQ ID NO: 245368 - DNA, 25 bp, Artificial
  probe
  misc_feature (1)..(25): SEQ ID NO: 2086; WAN024GH8_at; Start 131; Stop 155
ctggatatgtcggtttagcagaaac

SEQ ID NO: 245369 - DNA, 25 bp, Artificial
  probe
  misc_feature (1)..(25): SEQ ID NO: 2086; WAN024GH8_at; Start 146; Stop 170
tagcagaaacaatttttactgttac

SEQ ID NO: 245370 - DNA, 25 bp, Artificial
  probe
  misc_feature (1)..(25): SEQ ID NO: 2086; WAN024GH8_at; Start 8; Stop 32
ccttcacctttagcaaaggttggag

SEQ ID NO: 245371 - DNA, 25 bp, Artificial
  probe
  misc_feature (1)..(25): SEQ ID NO: 2086; WAN024GH8_at; Start 201; Stop 225
tccagcattatctttagcatttaat

SEQ ID NO: 245372 - DNA, 25 bp, Artificial
  probe
  misc_feature (1)..(25): SEQ ID NO: 2086; WAN024GH8_at; Start 56; Stop 80
gcctctttcaatttttcaataatgg

SEQ ID NO: 245373 - DNA, 25 bp, Artificial
  probe
  misc_feature (1)..(25): SEQ ID NO: 2086; WAN024GH8_at; Start 172; Stop 196
tcttttttattcgaagcacttgtcc

SEQ ID NO: 245374 - DNA, 25 bp, Artificial
  probe
  misc_feature (1)..(25): SEQ ID NO: 2086; WAN024GH8_at; Start 195; Stop 219
ccagtttccagcattatctttagca

SEQ ID NO: 245375 - DNA, 25 bp, Artificial
  probe
  misc_feature (1)..(25): SEQ ID NO: 2086; WAN024GH8_at; Start 99; Stop 123
tatattatcaggatttttcactaag

SEQ ID NO: 245376 - DNA, 25 bp, Artificial
  probe
  misc_feature (1)..(25): SEQ ID NO: 2086; WAN024GH8_at; Start 225; Stop 249
ttttacagtaattcctgaactagga

SEQ ID NO: 245377 - DNA, 25 bp, Artificial
  probe
  misc_feature (1)..(25): SEQ ID NO: 2086; WAN024GH8_at; Start 175; Stop 199
tttttattcgaagcacttgtccagt

SEQ ID NO: 245378 - DNA, 25 bp, Artificial
  probe
  misc_feature (1)..(25): SEQ ID NO: 2086; WAN024GH8_at; Start 240; Stop 264
tgaactaggaacttcagtagcaggt

SEQ ID NO: 245379 - DNA, 25 bp, Artificial
  probe
  misc_feature (1)..(25): SEQ ID NO: 2086; WAN024GH8_at; Start 188; Stop 212
cacttgtccagtttccagcattatc

SEQ ID NO: 245380 - DNA, 25 bp, Artificial
  probe
  misc_feature (1)..(25): SEQ ID NO: 2086; WAN024GH8_at; Start 14; Stop 38
cctttagcaaaggttggagctcctg

SEQ ID NO: 245381 - DNA, 25 bp, Artificial
  probe
  misc_feature (1)..(25): SEQ ID NO: 2086; WAN024GH8_at; Start 179; Stop 203
tattcgaagcacttgtccagtttcc

SEQ ID NO: 245382 - DNA, 25 bp, Artificial
  probe
  misc_feature (1)..(25): SEQ ID NO: 2086; WAN024GH8_at; Start 88; Stop 112
tctgtatcttttatattatcaggat

SEQ ID NO: 245383 - DNA, 25 bp, Artificial
  probe
  misc_feature (1)..(25): SEQ ID NO: 2086; WAN024GH8_at; Start 236; Stop 260
ttcctgaactaggaacttcagtagc

SEQ ID NO: 245384 - DNA, 25 bp, Artificial
  probe
  misc_feature (1)..(25): SEQ ID NO: 2086; WAN024GH8_at; Start 133; Stop 157
ggatatgtcggtttagcagaaacaa

SEQ ID NO: 245385 - DNA, 25 bp, Artificial
  probe
  misc_feature (1)..(25): SEQ ID NO: 2086; WAN024GH8_at; Start 126; Stop 150
tttgtctggatatgtcggtttagca

SEQ ID NO: 245386 - DNA, 25 bp, Artificial
  probe
  misc_feature (1)..(25): SEQ ID NO: 2086; WAN024GH8_at; Start 42; Stop 66
gatgatttttatttgcctctttcaa

SEQ ID NO: 245387 - DNA, 25 bp, Artificial
  probe
  misc_feature (1)..(25): SEQ ID NO: 2086; WAN024GH8_at; Start 34; Stop 58
tcctgctggatgatttttatttgcc

SEQ ID NO: 245388 - DNA, 25 bp, Artificial
  probe
  misc_feature (1)..(25): SEQ ID NO: 2086; WAN024GH8_at; Start 20; Stop 44
gcaaaggttggagctcctgctggat

SEQ ID NO: 245389 - DNA, 25 bp, Artificial
  probe
  misc_feature (1)..(25): SEQ ID NO: 2086; WAN024GH8_at; Start 25; Stop 49
ggttggagctcctgctggatgattt

SEQ ID NO: 245390 - DNA, 25 bp, Artificial
  probe
  misc_feature (1)..(25): SEQ ID NO: 2086; WAN024GH8_at; Start 228; Stop 252
tacagtaattcctgaactaggaact

SEQ ID NO: 245391 - DNA, 25 bp, Artificial
  probe
  misc_feature (1)..(25): SEQ ID NO: 2086; WAN024GH8_at; Start 72; Stop 96
caataatggcattttttctgtatct

SEQ ID NO: 245392 - DNA, 25 bp, Artificial
  probe
  misc_feature (1)..(25): SEQ ID NO: 2086; WAN024GH8_at; Start 119; Stop 143
ctaagattttgtctggatatgtcgg

SEQ ID NO: 245393 - DNA, 25 bp, Artificial
  probe
  misc_feature (1)..(25): SEQ ID NO: 2086; WAN024GH8_at; Start 29; Stop 53
ggagctcctgctggatgatttttat

SEQ ID NO: 245394 - DNA, 25 bp, Artificial
  probe
  misc_feature (1)..(25): SEQ ID NO: 2086; WAN024GH8_at; Start 2; Stop 26
tgctctccttcacctttagcaaagg

SEQ ID NO: 245395 - DNA, 25 bp, Artificial
  probe
  misc_feature (1)..(25): SEQ ID NO: 2086; WAN024GH8_at; Start 18; Stop 42
tagcaaaggttggagctcctgctgg

SEQ ID NO: 245396 - DNA, 25 bp, Artificial
  probe
  misc_feature (1)..(25): SEQ ID NO: 2086; WAN024GH8_at; Start 22; Stop 46
aaaggttggagctcctgctggatga

SEQ ID NO: 245397 - DNA, 25 bp, Artificial
  probe
  misc_feature (1)..(25): SEQ ID NO: 2086; WAN024GH8_at; Start 136; Stop 160
tatgtcggtttagcagaaacaattt

SEQ ID NO: 245398 - DNA, 25 bp, Artificial
  probe
  misc_feature (1)..(25): SEQ ID NO: 4898; WAN024GH9_at; Start 88; Stop 112
tattcagatggtacaacttattatg

SEQ ID NO: 245399 - DNA, 25 bp, Artificial
  probe
  misc_feature (1)..(25): SEQ ID NO: 4898; WAN024GH9_at; Start 18; Stop 42
aaatcatccagcaggagctccaacc

SEQ ID NO: 245400 - DNA, 25 bp, Artificial
  probe
  misc_feature (1)..(25): SEQ ID NO: 4898; WAN024GH9_at; Start 11; Stop 35
caaataaaaatcatccagcaggagc

SEQ ID NO: 245401 - DNA, 25 bp, Artificial
  probe
  misc_feature (1)..(25): SEQ ID NO: 4898; WAN024GH9_at; Start 91; Stop 115
tcagatggtacaacttattatgtac

SEQ ID NO: 245402 - DNA, 25 bp, Artificial
  probe
  misc_feature (1)..(25): SEQ ID NO: 4898; WAN024GH9_at; Start 80; Stop 104
tagcaacttattcagatggtacaac

SEQ ID NO: 245403 - DNA, 25 bp, Artificial
  probe
  misc_feature (1)..(25): SEQ ID NO: 4898; WAN024GH9_at; Start 123; Stop 147
tgatgtgacaaaatatgcgaggcta

SEQ ID NO: 245404 - DNA, 25 bp, Artificial
  probe
  misc_feature (1)..(25): SEQ ID NO: 4898; WAN024GH9_at; Start 55; Stop 79
gaaggagagcatgcaaatgatattg

SEQ ID NO: 245405 - DNA, 25 bp, Artificial
  probe
  misc_feature (1)..(25): SEQ ID NO: 4898; WAN024GH9_at; Start 107; Stop 131
attatgtaccgttaaatgatgtgac

SEQ ID NO: 245406 - DNA, 25 bp, Artificial
  probe
  misc_feature (1)..(25): SEQ ID NO: 4898; WAN024GH9_at; Start 44; Stop 68
ttgctaaaggtgaaggagagcatgc

SEQ ID NO: 245407 - DNA, 25 bp, Artificial
  probe
  misc_feature (1)..(25): SEQ ID NO: 4898; WAN024GH9_at; Start 46; Stop 70
gctaaaggtgaaggagagcatgcaa

SEQ ID NO: 245408 - DNA, 25 bp, Artificial
  probe
  misc_feature (1)..(25): SEQ ID NO: 4898; WAN024GH9_at; Start 21; Stop 45
tcatccagcaggagctccaaccttt

SEQ ID NO: 245409 - DNA, 25 bp, Artificial
  probe
  misc_feature (1)..(25): SEQ ID NO: 4898; WAN024GH9_at; Start 63; Stop 87
gcatgcaaatgatattgtagcaact

SEQ ID NO: 245410 - DNA, 25 bp, Artificial
  probe
  misc_feature (1)..(25): SEQ ID NO: 4898; WAN024GH9_at; Start 23; Stop 47
atccagcaggagctccaacctttgc

SEQ ID NO: 245411 - DNA, 25 bp, Artificial
  probe
  misc_feature (1)..(25): SEQ ID NO: 4898; WAN024GH9_at; Start 83; Stop 107
caacttattcagatggtacaactta

SEQ ID NO: 245412 - DNA, 25 bp, Artificial
  probe
  misc_feature (1)..(25): SEQ ID NO: 4898; WAN024GH9_at; Start 50; Stop 74
aaggtgaaggagagcatgcaaatga

SEQ ID NO: 245413 - DNA, 25 bp, Artificial
  probe
  misc_feature (1)..(25): SEQ ID NO: 4898; WAN024GH9_at; Start 121; Stop 145
aatgatgtgacaaaatatgcgaggc

SEQ ID NO: 245414 - DNA, 25 bp, Artificial
  probe
  misc_feature (1)..(25): SEQ ID NO: 4898; WAN024GH9_at; Start 38; Stop 62
caacctttgctaaaggtgaaggaga

SEQ ID NO: 245415 - DNA, 25 bp, Artificial
  probe
  misc_feature (1)..(25): SEQ ID NO: 4898; WAN024GH9_at; Start 66; Stop 90
tgcaaatgatattgtagcaacttat

SEQ ID NO: 245416 - DNA, 25 bp, Artificial
  probe
  misc_feature (1)..(25): SEQ ID NO: 4898; WAN024GH9_at; Start 7; Stop 31
gaggcaaataaaaatcatccagcag

SEQ ID NO: 245417 - DNA, 25 bp, Artificial
  probe
  misc_feature (1)..(25): SEQ ID NO: 4898; WAN024GH9_at; Start 26; Stop 50
cagcaggagctccaacctttgctaa

SEQ ID NO: 245418 - DNA, 25 bp, Artificial
  probe
  misc_feature (1)..(25): SEQ ID NO: 4898; WAN024GH9_at; Start 59; Stop 83
gagagcatgcaaatgatattgtagc

SEQ ID NO: 245419 - DNA, 25 bp, Artificial
  probe
  misc_feature (1)..(25): SEQ ID NO: 4898; WAN024GH9_at; Start 48; Stop 72
taaaggtgaaggagagcatgcaaat

SEQ ID NO: 245420 - DNA, 25 bp, Artificial
  probe
  misc_feature (1)..(25): SEQ ID NO: 4898; WAN024GH9_at; Start 15; Stop 39
taaaaatcatccagcaggagctcca

SEQ ID NO: 245421 - DNA, 25 bp, Artificial
  probe
  misc_feature (1)..(25): SEQ ID NO: 4898; WAN024GH9_at; Start 29; Stop 53
caggagctccaacctttgctaaagg

SEQ ID NO: 245422 - DNA, 25 bp, Artificial
  probe
  misc_feature (1)..(25): SEQ ID NO: 4898; WAN024GH9_at; Start 9; Stop 33
ggcaaataaaaatcatccagcagga

SEQ ID NO: 245423 - DNA, 25 bp, Artificial
  probe
  misc_feature (1)..(25): SEQ ID NO: 4898; WAN024GH9_at; Start 101; Stop 125
caacttattatgtaccgttaaatga

SEQ ID NO: 245424 - DNA, 25 bp, Artificial
  probe
  misc_feature (1)..(25): SEQ ID NO: 4898; WAN024GH9_at; Start 75; Stop 99
tattgtagcaacttattcagatggt

SEQ ID NO: 245425 - DNA, 25 bp, Artificial
  probe
  misc_feature (1)..(25): SEQ ID NO: 4898; WAN024GH9_at; Start 112; Stop 136
gtaccgttaaatgatgtgacaaaat

SEQ ID NO: 245426 - DNA, 25 bp, Artificial
  probe
  misc_feature (1)..(25): SEQ ID NO: 4898; WAN024GH9_at; Start 28; Stop 52
gcaggagctccaacctttgctaaag

SEQ ID NO: 245427 - DNA, 25 bp, Artificial
  probe
  misc_feature (1)..(25): SEQ ID NO: 4898; WAN024GH9_at; Start 31; Stop 55
ggagctccaacctttgctaaaggtg

SEQ ID NO: 245428 - DNA, 25 bp, Artificial
  probe
  misc_feature (1)..(25): SEQ ID NO: 4898; WAN024GH9_at; Start 13; Stop 37
aataaaaatcatccagcaggagctc

SEQ ID NO: 245429 - DNA, 25 bp, Artificial
  probe
  misc_feature (1)..(25): SEQ ID NO: 4898; WAN024GH9_at; Start 41; Stop 65
cctttgctaaaggtgaaggagagca

SEQ ID NO: 245430 - DNA, 25 bp, Artificial
  probe
  misc_feature (1)..(25): SEQ ID NO: 4898; WAN024GH9_at; Start 34; Stop 58
gctccaacctttgctaaaggtgaag

SEQ ID NO: 245431 - DNA, 25 bp, Artificial
  probe
  misc_feature (1)..(25): SEQ ID NO: 4898; WAN024GH9_at; Start 2; Stop 26
tgaaagaggcaaataaaaatcatcc

SEQ ID NO: 245432 - DNA, 25 bp, Artificial
  probe
  misc_feature (1)..(25): SEQ ID NO: 1914; WAN024GHA_at; Start 369; Stop 393
tgctaaaccgacatatccagacaaa

SEQ ID NO: 245433 - DNA, 25 bp, Artificial
  probe
  misc_feature (1)..(25): SEQ ID NO: 1914; WAN024GHA_at; Start 120; Stop 144
tgtttcaagtagctcacaaacagct

SEQ ID NO: 245434 - DNA, 25 bp, Artificial
  probe
  misc_feature (1)..(25): SEQ ID NO: 1914; WAN024GHA_at; Start 74; Stop 98
taagcattgaagataatcagggagg

SEQ ID NO: 245435 - DNA, 25 bp, Artificial
  probe
  misc_feature (1)..(25): SEQ ID NO: 1914; WAN024GHA_at; Start 249; Stop 273
taatcaacctgctactgaagttcct

SEQ ID NO: 245436 - DNA, 25 bp, Artificial
  probe
  misc_feature (1)..(25): SEQ ID NO: 1914; WAN024GHA_at; Start 307; Stop 331
gataatgctggaaactggacaagtg

SEQ ID NO: 245437 - DNA, 25 bp, Artificial
  probe
  misc_feature (1)..(25): SEQ ID NO: 1914; WAN024GHA_at; Start 43; Stop 67
ccaaataatagtggggaagttcatt

SEQ ID NO: 245438 - DNA, 25 bp, Artificial
  probe
  misc_feature (1)..(25): SEQ ID NO: 1914; WAN024GHA_at; Start 259; Stop 283
gctactgaagttcctagttcaggaa

SEQ ID NO: 245439 - DNA, 25 bp, Artificial
  probe
  misc_feature (1)..(25): SEQ ID NO: 1914; WAN024GHA_at; Start 252; Stop 276
tcaacctgctactgaagttcctagt

SEQ ID NO: 245440 - DNA, 25 bp, Artificial
  probe
  misc_feature (1)..(25): SEQ ID NO: 1914; WAN024GHA_at; Start 108; Stop 132
taatttcagttctgtttcaagtagc

SEQ ID NO: 245441 - DNA, 25 bp, Artificial
  probe
  misc_feature (1)..(25): SEQ ID NO: 1914; WAN024GHA_at; Start 198; Stop 222
taaaacgtctgatgcaacagctctt

SEQ ID NO: 245442 - DNA, 25 bp, Artificial
  probe
  misc_feature (1)..(25): SEQ ID NO: 1914; WAN024GHA_at; Start 371; Stop 395
ctaaaccgacatatccagacaaaat

SEQ ID NO: 245443 - DNA, 25 bp, Artificial
  probe
  misc_feature (1)..(25): SEQ ID NO: 1914; WAN024GHA_at; Start 423; Stop 447
agatacagaaaaaatgccattattg

SEQ ID NO: 245444 - DNA, 25 bp, Artificial
  probe
  misc_feature (1)..(25): SEQ ID NO: 1914; WAN024GHA_at; Start 195; Stop 219
tgataaaacgtctgatgcaacagct

SEQ ID NO: 245445 - DNA, 25 bp, Artificial
  probe
  misc_feature (1)..(25): SEQ ID NO: 1914; WAN024GHA_at; Start 124; Stop 148
tcaagtagctcacaaacagctaaat

SEQ ID NO: 245446 - DNA, 25 bp, Artificial
  probe
  misc_feature (1)..(25): SEQ ID NO: 1914; WAN024GHA_at; Start 115; Stop 139
agttctgtttcaagtagctcacaaa

SEQ ID NO: 245447 - DNA, 25 bp, Artificial
  probe
  misc_feature (1)..(25): SEQ ID NO: 1914; WAN024GHA_at; Start 313; Stop 337
gctggaaactggacaagtgcttcga

SEQ ID NO: 245448 - DNA, 25 bp, Artificial
  probe
  misc_feature (1)..(25): SEQ ID NO: 1914; WAN024GHA_at; Start 324; Stop 348
gacaagtgcttcgaataaaaaagaa

SEQ ID NO: 245449 - DNA, 25 bp, Artificial
  probe
  misc_feature (1)..(25): SEQ ID NO: 1914; WAN024GHA_at; Start 215; Stop 239
cagctcttttgaaattaaagttgaa

SEQ ID NO: 245450 - DNA, 25 bp, Artificial
  probe
  misc_feature (1)..(25): SEQ ID NO: 1914; WAN024GHA_at; Start 317; Stop 341
gaaactggacaagtgcttcgaataa

SEQ ID NO: 245451 - DNA, 25 bp, Artificial
  probe
  misc_feature (1)..(25): SEQ ID NO: 1914; WAN024GHA_at; Start 364; Stop 388
gtttctgctaaaccgacatatccag

SEQ ID NO: 245452 - DNA, 25 bp, Artificial
  probe
  misc_feature (1)..(25): SEQ ID NO: 1914; WAN024GHA_at; Start 78; Stop 102
cattgaagataatcagggaggtagt

SEQ ID NO: 245453 - DNA, 25 bp, Artificial
  probe
  misc_feature (1)..(25): SEQ ID NO: 1914; WAN024GHA_at; Start 16; Stop 40
tattttactataacagttgttgcta

SEQ ID NO: 245454 - DNA, 25 bp, Artificial
  probe
  misc_feature (1)..(25): SEQ ID NO: 1914; WAN024GHA_at; Start 309; Stop 333
taatgctggaaactggacaagtgct

SEQ ID NO: 245455 - DNA, 25 bp, Artificial
  probe
  misc_feature (1)..(25): SEQ ID NO: 1914; WAN024GHA_at; Start 113; Stop 137
tcagttctgtttcaagtagctcaca

SEQ ID NO: 245456 - DNA, 25 bp, Artificial
  probe
  misc_feature (1)..(25): SEQ ID NO: 1914; WAN024GHA_at; Start 189; Stop 213
aacgattgataaaacgtctgatgca

SEQ ID NO: 245457 - DNA, 25 bp, Artificial
  probe
  misc_feature (1)..(25): SEQ ID NO: 1914; WAN024GHA_at; Start 130; Stop 154
agctcacaaacagctaaatatgaag

SEQ ID NO: 245458 - DNA, 25 bp, Artificial
  probe
  misc_feature (1)..(25): SEQ ID NO: 1914; WAN024GHA_at; Start 271; Stop 295
cctagttcaggaattactgtaaaat

SEQ ID NO: 245459 - DNA, 25 bp, Artificial
  probe
  misc_feature (1)..(25): SEQ ID NO: 1914; WAN024GHA_at; Start 302; Stop 326
ctaaagataatgctggaaactggac

SEQ ID NO: 245460 - DNA, 25 bp, Artificial
  probe
  misc_feature (1)..(25): SEQ ID NO: 1914; WAN024GHA_at; Start 320; Stop 344
actggacaagtgcttcgaataaaaa

SEQ ID NO: 245461 - DNA, 25 bp, Artificial
  probe
  misc_feature (1)..(25): SEQ ID NO: 1914; WAN024GHA_at; Start 210; Stop 234
tgcaacagctcttttgaaattaaag

SEQ ID NO: 245462 - DNA, 25 bp, Artificial
  probe
  misc_feature (1)..(25): SEQ ID NO: 1914; WAN024GHA_at; Start 203; Stop 227
cgtctgatgcaacagctcttttgaa

SEQ ID NO: 245463 - DNA, 25 bp, Artificial
  probe
  misc_feature (1)..(25): SEQ ID NO: 1914; WAN024GHA_at; Start 265; Stop 289
gaagttcctagttcaggaattactg

SEQ ID NO: 245464 - DNA, 25 bp, Artificial
  probe
  misc_feature (1)..(25): SEQ ID NO: 1914; WAN024GHA_at; Start 305; Stop 329
aagataatgctggaaactggacaag

SEQ ID NO: 245465 - DNA, 25 bp, Artificial
  probe
  misc_feature (1)..(25): SEQ ID NO: 1914; WAN024GHA_at; Start 350; Stop 374
taacagtaaaaattgtttctgctaa

SEQ ID NO: 245466 - DNA, 25 bp, Artificial
  probe
  misc_feature (1)..(25): SEQ ID NO: 4177; WAN024GHB_at; Start 240; Stop 264
catctgtaaaattggaaatataggc

SEQ ID NO: 245467 - DNA, 25 bp, Artificial
  probe
  misc_feature (1)..(25): SEQ ID NO: 4177; WAN024GHB_at; Start 303; Stop 327
tatcaaaagctaccgtcgaacgggc

SEQ ID NO: 245468 - DNA, 25 bp, Artificial
  probe
  misc_feature (1)..(25): SEQ ID NO: 4177; WAN024GHB_at; Start 96; Stop 120
taaactccactacacgcggatggcg

SEQ ID NO: 245469 - DNA, 25 bp, Artificial
  probe
  misc_feature (1)..(25): SEQ ID NO: 4177; WAN024GHB_at; Start 322; Stop 346
acgggcgtttcctacgtggatatag

SEQ ID NO: 245470 - DNA, 25 bp, Artificial
  probe
  misc_feature (1)..(25): SEQ ID NO: 4177; WAN024GHB_at; Start 61; Stop 85
gatcaagtcttccacaaaacggatg

SEQ ID NO: 245471 - DNA, 25 bp, Artificial
  probe
  misc_feature (1)..(25): SEQ ID NO: 4177; WAN024GHB_at; Start 104; Stop 128
actacacgcggatggcgagtcgcag

SEQ ID NO: 245472 - DNA, 25 bp, Artificial
  probe
  misc_feature (1)..(25): SEQ ID NO: 4177; WAN024GHB_at; Start 182; Stop 206
gcaacctcctgaggcgtgatacctt

SEQ ID NO: 245473 - DNA, 25 bp, Artificial
  probe
  misc_feature (1)..(25): SEQ ID NO: 4177; WAN024GHB_at; Start 71; Stop 95
tccacaaaacggatgatgtctgcca

SEQ ID NO: 245474 - DNA, 25 bp, Artificial
  probe
  misc_feature (1)..(25): SEQ ID NO: 4177; WAN024GHB_at; Start 197; Stop 221
gtgataccttcttccctggcacggt

SEQ ID NO: 245475 - DNA, 25 bp, Artificial
  probe
  misc_feature (1)..(25): SEQ ID NO: 4177; WAN024GHB_at; Start 279; Stop 303
ggtactcaaaatagcgacgaatcgt

SEQ ID NO: 245476 - DNA, 25 bp, Artificial
  probe
  misc_feature (1)..(25): SEQ ID NO: 4177; WAN024GHB_at; Start 82; Stop 106
gatgatgtctgccataaactccact

SEQ ID NO: 245477 - DNA, 25 bp, Artificial
  probe
  misc_feature (1)..(25): SEQ ID NO: 4177; WAN024GHB_at; Start 355; Stop 379
cgttggcccacaaacatacatcttg

SEQ ID NO: 245478 - DNA, 25 bp, Artificial
  probe
  misc_feature (1)..(25): SEQ ID NO: 4177; WAN024GHB_at; Start 46; Stop 70
ggcaaagcctttctcgatcaagtct

SEQ ID NO: 245479 - DNA, 25 bp, Artificial
  probe
  misc_feature (1)..(25): SEQ ID NO: 4177; WAN024GHB_at; Start 210; Stop 234
ccctggcacggttgataatcttatc

SEQ ID NO: 245480 - DNA, 25 bp, Artificial
  probe
  misc_feature (1)..(25): SEQ ID NO: 4177; WAN024GHB_at; Start 396; Stop 420
tcgggacaaattctcgcaaatcacg

SEQ ID NO: 245481 - DNA, 25 bp, Artificial
  probe
  misc_feature (1)..(25): SEQ ID NO: 4177; WAN024GHB_at; Start 270; Stop 294
tatacccacggtactcaaaatagcg

SEQ ID NO: 245482 - DNA, 25 bp, Artificial
  probe
  misc_feature (1)..(25): SEQ ID NO: 4177; WAN024GHB_at; Start 377; Stop 401
ttgatcttgccgtcctcaatcggga

SEQ ID NO: 245483 - DNA, 25 bp, Artificial
  probe
  misc_feature (1)..(25): SEQ ID NO: 4177; WAN024GHB_at; Start 140; Stop 164
aatgccgtcacatcctcacgaaagg

SEQ ID NO: 245484 - DNA, 25 bp, Artificial
  probe
  misc_feature (1)..(25): SEQ ID NO: 4177; WAN024GHB_at; Start 171; Stop 195
tgtacttatccgcaacctcctgagg

SEQ ID NO: 245485 - DNA, 25 bp, Artificial
  probe
  misc_feature (1)..(25): SEQ ID NO: 4177; WAN024GHB_at; Start 409; Stop 433
tcgcaaatcacgagacatggtgtca

SEQ ID NO: 245486 - DNA, 25 bp, Artificial
  probe
  misc_feature (1)..(25): SEQ ID NO: 4177; WAN024GHB_at; Start 365; Stop 389
caaacatacatcttgatcttgccgt

SEQ ID NO: 245487 - DNA, 25 bp, Artificial
  probe
  misc_feature (1)..(25): SEQ ID NO: 4177; WAN024GHB_at; Start 153; Stop 177
cctcacgaaaggcagcgatgtactt

SEQ ID NO: 245488 - DNA, 25 bp, Artificial
  probe
  misc_feature (1)..(25): SEQ ID NO: 4177; WAN024GHB_at; Start 256; Stop 280
aatataggcaaccttatacccacgg

SEQ ID NO: 245489 - DNA, 25 bp, Artificial
  probe
  misc_feature (1)..(25): SEQ ID NO: 4177; WAN024GHB_at; Start 293; Stop 317
cgacgaatcgtatcaaaagctaccg

SEQ ID NO: 245490 - DNA, 25 bp, Artificial
  probe
  misc_feature (1)..(25): SEQ ID NO: 4177; WAN024GHB_at; Start 32; Stop 56
ccttgactctcataggcaaagcctt

SEQ ID NO: 245491 - DNA, 25 bp, Artificial
  probe
  misc_feature (1)..(25): SEQ ID NO: 4177; WAN024GHB_at; Start 18; Stop 42
ggaaatagacatccccttgactctc

SEQ ID NO: 245492 - DNA, 25 bp, Artificial
  probe
  misc_feature (1)..(25): SEQ ID NO: 4177; WAN024GHB_at; Start 340; Stop 364
gatatagttgtacaccgttggccca

SEQ ID NO: 245493 - DNA, 25 bp, Artificial
  probe
  misc_feature (1)..(25): SEQ ID NO: 4177; WAN024GHB_at; Start 422; Stop 446
gacatggtgtcatagattttaatca

SEQ ID NO: 245494 - DNA, 25 bp, Artificial
  probe
  misc_feature (1)..(25): SEQ ID NO: 4177; WAN024GHB_at; Start 128; Stop 152
ggtttcacgcccaatgccgtcacat

SEQ ID NO: 245495 - DNA, 25 bp, Artificial
  probe
  misc_feature (1)..(25): SEQ ID NO: 4177; WAN024GHB_at; Start 118; Stop 142
gcgagtcgcaggtttcacgcccaat

SEQ ID NO: 245496 - DNA, 25 bp, Artificial
  probe
  misc_feature (1)..(25): SEQ ID NO: 4177; WAN024GHB_at; Start 389; Stop 413
tcctcaatcgggacaaattctcgca

SEQ ID NO: 245497 - DNA, 25 bp, Artificial
  probe
  misc_feature (1)..(25): SEQ ID NO: 4177; WAN024GHB_at; Start 159; Stop 183
gaaaggcagcgatgtacttatccgc

SEQ ID NO: 245498 - DNA, 25 bp, Artificial
  probe
  misc_feature (1)..(25): SEQ ID NO: 4177; WAN024GHB_at; Start 223; Stop 247
gataatcttatcatccacatctgta

SEQ ID NO: 245499 - DNA, 25 bp, Artificial
  probe
  misc_feature (1)..(25): SEQ ID NO: 4177; WAN024GHB_at; Start 2; Stop 26
tgggatttttctacacggaaataga

SEQ ID NO: 245500 - DNA, 25 bp, Artificial
  probe
  misc_feature (1)..(25): SEQ ID NO: 4280; WAN024GHC_at; Start 204; Stop 228
ggtacgacctgaagcacctagctcc

SEQ ID NO: 245501 - DNA, 25 bp, Artificial
  probe
  misc_feature (1)..(25): SEQ ID NO: 4280; WAN024GHC_at; Start 191; Stop 215
ccgtttcttcatcggtacgacctga

SEQ ID NO: 245502 - DNA, 25 bp, Artificial
  probe
  misc_feature (1)..(25): SEQ ID NO: 4280; WAN024GHC_at; Start 208; Stop 232
cgacctgaagcacctagctccaaat

SEQ ID NO: 245503 - DNA, 25 bp, Artificial
  probe
  misc_feature (1)..(25): SEQ ID NO: 4280; WAN024GHC_at; Start 240; Stop 264
ggttttattagccaatttagcatag

SEQ ID NO: 245504 - DNA, 25 bp, Artificial
  probe
  misc_feature (1)..(25): SEQ ID NO: 4280; WAN024GHC_at; Start 127; Stop 151
caagaaatctcacctggtttggaag

SEQ ID NO: 245505 - DNA, 25 bp, Artificial
  probe
  misc_feature (1)..(25): SEQ ID NO: 4280; WAN024GHC_at; Start 198; Stop 222
ttcatcggtacgacctgaagcacct

SEQ ID NO: 245506 - DNA, 25 bp, Artificial
  probe
  misc_feature (1)..(25): SEQ ID NO: 4280; WAN024GHC_at; Start 142; Stop 166
ggtttggaagatttccatagagcaa

SEQ ID NO: 245507 - DNA, 25 bp, Artificial
  probe
  misc_feature (1)..(25): SEQ ID NO: 4280; WAN024GHC_at; Start 18; Stop 42
taggtcagctccaccaccgtggata

SEQ ID NO: 245508 - DNA, 25 bp, Artificial
  probe
  misc_feature (1)..(25): SEQ ID NO: 4280; WAN024GHC_at; Start 119; Stop 143
gactatcccaagaaatctcacctgg

SEQ ID NO: 245509 - DNA, 25 bp, Artificial
  probe
  misc_feature (1)..(25): SEQ ID NO: 4280; WAN024GHC_at; Start 32; Stop 56
caccgtggatatcaatggtatcacc

SEQ ID NO: 245510 - DNA, 25 bp, Artificial
  probe
  misc_feature (1)..(25): SEQ ID NO: 4280; WAN024GHC_at; Start 35; Stop 59
cgtggatatcaatggtatcacctaa

SEQ ID NO: 245511 - DNA, 25 bp, Artificial
  probe
  misc_feature (1)..(25): SEQ ID NO: 4280; WAN024GHC_at; Start 214; Stop 238
gaagcacctagctccaaatcttcca

SEQ ID NO: 245512 - DNA, 25 bp, Artificial
  probe
  misc_feature (1)..(25): SEQ ID NO: 4280; WAN024GHC_at; Start 185; Stop 209
tacgagccgtttcttcatcggtacg

SEQ ID NO: 245513 - DNA, 25 bp, Artificial
  probe
  misc_feature (1)..(25): SEQ ID NO: 4280; WAN024GHC_at; Start 62; Stop 86
tctctgtcgacatgactgaacactc

SEQ ID NO: 245514 - DNA, 25 bp, Artificial
  probe
  misc_feature (1)..(25): SEQ ID NO: 4280; WAN024GHC_at; Start 78; Stop 102
tgaacactcaatatgccaacccgga

SEQ ID NO: 245515 - DNA, 25 bp, Artificial
  probe
  misc_feature (1)..(25): SEQ ID NO: 4280; WAN024GHC_at; Start 101; Stop 125
gacgtccaggtccccaaggactatc

SEQ ID NO: 245516 - DNA, 25 bp, Artificial
  probe
  misc_feature (1)..(25): SEQ ID NO: 4280; WAN024GHC_at; Start 6; Stop 30
gtgtggaaactctaggtcagctcca

SEQ ID NO: 245517 - DNA, 25 bp, Artificial
  probe
  misc_feature (1)..(25): SEQ ID NO: 4280; WAN024GHC_at; Start 47; Stop 71
tggtatcacctaaaatctctgtcga

SEQ ID NO: 245518 - DNA, 25 bp, Artificial
  probe
  misc_feature (1)..(25): SEQ ID NO: 4280; WAN024GHC_at; Start 188; Stop 212
gagccgtttcttcatcggtacgacc

SEQ ID NO: 245519 - DNA, 25 bp, Artificial
  probe
  misc_feature (1)..(25): SEQ ID NO: 4280; WAN024GHC_at; Start 27; Stop 51
tccaccaccgtggatatcaatggta

SEQ ID NO: 245520 - DNA, 25 bp, Artificial
  probe
  misc_feature (1)..(25): SEQ ID NO: 4280; WAN024GHC_at; Start 9; Stop 33
tggaaactctaggtcagctccacca

SEQ ID NO: 245521 - DNA, 25 bp, Artificial
  probe
  misc_feature (1)..(25): SEQ ID NO: 4280; WAN024GHC_at; Start 181; Stop 205
tccttacgagccgtttcttcatcgg

SEQ ID NO: 245522 - DNA, 25 bp, Artificial
  probe
  misc_feature (1)..(25): SEQ ID NO: 4280; WAN024GHC_at; Start 57; Stop 81
taaaatctctgtcgacatgactgaa

SEQ ID NO: 245523 - DNA, 25 bp, Artificial
  probe
  misc_feature (1)..(25): SEQ ID NO: 4280; WAN024GHC_at; Start 66; Stop 90
tgtcgacatgactgaacactcaata

SEQ ID NO: 245524 - DNA, 25 bp, Artificial
  probe
  misc_feature (1)..(25): SEQ ID NO: 4280; WAN024GHC_at; Start 134; Stop 158
tctcacctggtttggaagatttcca

SEQ ID NO: 245525 - DNA, 25 bp, Artificial
  probe
  misc_feature (1)..(25): SEQ ID NO: 4280; WAN024GHC_at; Start 237; Stop 261
caaggttttattagccaatttagca

SEQ ID NO: 245526 - DNA, 25 bp, Artificial
  probe
  misc_feature (1)..(25): SEQ ID NO: 4280; WAN024GHC_at; Start 169; Stop 193
tctacaggattttccttacgagccg

SEQ ID NO: 245527 - DNA, 25 bp, Artificial
  probe
  misc_feature (1)..(25): SEQ ID NO: 4280; WAN024GHC_at; Start 115; Stop 139
caaggactatcccaagaaatctcac

SEQ ID NO: 245528 - DNA, 25 bp, Artificial
  probe
  misc_feature (1)..(25): SEQ ID NO: 4280; WAN024GHC_at; Start 53; Stop 77
cacctaaaatctctgtcgacatgac

SEQ ID NO: 245529 - DNA, 25 bp, Artificial
  probe
  misc_feature (1)..(25): SEQ ID NO: 4280; WAN024GHC_at; Start 85; Stop 109
tcaatatgccaacccggacgtccag

SEQ ID NO: 245530 - DNA, 25 bp, Artificial
  probe
  misc_feature (1)..(25): SEQ ID NO: 4280; WAN024GHC_at; Start 70; Stop 94
gacatgactgaacactcaatatgcc

SEQ ID NO: 245531 - DNA, 25 bp, Artificial
  probe
  misc_feature (1)..(25): SEQ ID NO: 4280; WAN024GHC_at; Start 231; Stop 255
atcttccaaggttttattagccaat

SEQ ID NO: 245532 - DNA, 25 bp, Artificial
  probe
  misc_feature (1)..(25): SEQ ID NO: 4280; WAN024GHC_at; Start 111; Stop 135
tccccaaggactatcccaagaaatc

SEQ ID NO: 245533 - DNA, 25 bp, Artificial
  probe
  misc_feature (1)..(25): SEQ ID NO: 4280; WAN024GHC_at; Start 202; Stop 226
tcggtacgacctgaagcacctagct

SEQ ID NO: 245534 - DNA, 25 bp, Artificial
  probe
  misc_feature (1)..(25): SEQ ID NO: 5566; WAN024GHD_at; Start 102; Stop 126
gcttacggtagtgctgggtcgcaaa

SEQ ID NO: 245535 - DNA, 25 bp, Artificial
  probe
  misc_feature (1)..(25): SEQ ID NO: 5566; WAN024GHD_at; Start 82; Stop 106
cttttccgtgaagttgataggctta

SEQ ID NO: 245536 - DNA, 25 bp, Artificial
  probe
  misc_feature (1)..(25): SEQ ID NO: 5566; WAN024GHD_at; Start 255; Stop 279
aagccttgcctgttttagcttcaga

SEQ ID NO: 245537 - DNA, 25 bp, Artificial
  probe
  misc_feature (1)..(25): SEQ ID NO: 5566; WAN024GHD_at; Start 113; Stop 137
tgctgggtcgcaaagaagaaacgaa

SEQ ID NO: 245538 - DNA, 25 bp, Artificial
  probe
  misc_feature (1)..(25): SEQ ID NO: 5566; WAN024GHD_at; Start 127; Stop 151
gaagaaacgaagtacttgcccatca

SEQ ID NO: 245539 - DNA, 25 bp, Artificial
  probe
  misc_feature (1)..(25): SEQ ID NO: 5566; WAN024GHD_at; Start 186; Stop 210
tacccaaggacttagacattttgac

SEQ ID NO: 245540 - DNA, 25 bp, Artificial
  probe
  misc_feature (1)..(25): SEQ ID NO: 5566; WAN024GHD_at; Start 57; Stop 81
gattggtctcggcatcgcgaactgc

SEQ ID NO: 245541 - DNA, 25 bp, Artificial
  probe
  misc_feature (1)..(25): SEQ ID NO: 5566; WAN024GHD_at; Start 215; Stop 239
tcgatattgacaaagccattgtgca

SEQ ID NO: 245542 - DNA, 25 bp, Artificial
  probe
  misc_feature (1)..(25): SEQ ID NO: 5566; WAN024GHD_at; Start 242; Stop 266
cagtagttagcaaaagccttgcctg

SEQ ID NO: 245543 - DNA, 25 bp, Artificial
  probe
  misc_feature (1)..(25): SEQ ID NO: 5566; WAN024GHD_at; Start 237; Stop 261
gcatccagtagttagcaaaagcctt

SEQ ID NO: 245544 - DNA, 25 bp, Artificial
  probe
  misc_feature (1)..(25): SEQ ID NO: 5566; WAN024GHD_at; Start 286; Stop 310
aatttcattggtgtggtgtggaaac

SEQ ID NO: 245545 - DNA, 25 bp, Artificial
  probe
  misc_feature (1)..(25): SEQ ID NO: 5566; WAN024GHD_at; Start 223; Stop 247
gacaaagccattgtgcatccagtag

SEQ ID NO: 245546 - DNA, 25 bp, Artificial
  probe
  misc_feature (1)..(25): SEQ ID NO: 5566; WAN024GHD_at; Start 105; Stop 129
tacggtagtgctgggtcgcaaagaa

SEQ ID NO: 245547 - DNA, 25 bp, Artificial
  probe
  misc_feature (1)..(25): SEQ ID NO: 5566; WAN024GHD_at; Start 249; Stop 273
tagcaaaagccttgcctgttttagc

SEQ ID NO: 245548 - DNA, 25 bp, Artificial
  probe
  misc_feature (1)..(25): SEQ ID NO: 5566; WAN024GHD_at; Start 167; Stop 191
tcgtgtaccgtaatgaagttaccca

SEQ ID NO: 245549 - DNA, 25 bp, Artificial
  probe
  misc_feature (1)..(25): SEQ ID NO: 5566; WAN024GHD_at; Start 74; Stop 98
cgaactgccttttccgtgaagttga

SEQ ID NO: 245550 - DNA, 25 bp, Artificial
  probe
  misc_feature (1)..(25): SEQ ID NO: 5566; WAN024GHD_at; Start 139; Stop 163
tacttgcccatcaagagttttaagg

SEQ ID NO: 245551 - DNA, 25 bp, Artificial
  probe
  misc_feature (1)..(25): SEQ ID NO: 5566; WAN024GHD_at; Start 159; Stop 183
taagggcatcgtgtaccgtaatgaa

SEQ ID NO: 245552 - DNA, 25 bp, Artificial
  probe
  misc_feature (1)..(25): SEQ ID NO: 5566; WAN024GHD_at; Start 130; Stop 154
gaaacgaagtacttgcccatcaaga

SEQ ID NO: 245553 - DNA, 25 bp, Artificial
  probe
  misc_feature (1)..(25): SEQ ID NO: 5566; WAN024GHD_at; Start 50; Stop 74
tacttgagattggtctcggcatcgc

SEQ ID NO: 245554 - DNA, 25 bp, Artificial
  probe
  misc_feature (1)..(25): SEQ ID NO: 5566; WAN024GHD_at; Start 150; Stop 174
caagagttttaagggcatcgtgtac

SEQ ID NO: 245555 - DNA, 25 bp, Artificial
  probe
  misc_feature (1)..(25): SEQ ID NO: 5566; WAN024GHD_at; Start 180; Stop 204
tgaagttacccaaggacttagacat

SEQ ID NO: 245556 - DNA, 25 bp, Artificial
  probe
  misc_feature (1)..(25): SEQ ID NO: 5566; WAN024GHD_at; Start 164; Stop 188
gcatcgtgtaccgtaatgaagttac

SEQ ID NO: 245557 - DNA, 25 bp, Artificial
  probe
  misc_feature (1)..(25): SEQ ID NO: 5566; WAN024GHD_at; Start 146; Stop 170
ccatcaagagttttaagggcatcgt

SEQ ID NO: 245558 - DNA, 25 bp, Artificial
  probe
  misc_feature (1)..(25): SEQ ID NO: 5566; WAN024GHD_at; Start 68; Stop 92
gcatcgcgaactgccttttccgtga

SEQ ID NO: 245559 - DNA, 25 bp, Artificial
  probe
  misc_feature (1)..(25): SEQ ID NO: 5566; WAN024GHD_at; Start 208; Stop 232
gacattgtcgatattgacaaagcca

SEQ ID NO: 245560 - DNA, 25 bp, Artificial
  probe
  misc_feature (1)..(25): SEQ ID NO: 5566; WAN024GHD_at; Start 19; Stop 43
tgtaaatggttgttcgtaagtattc

SEQ ID NO: 245561 - DNA, 25 bp, Artificial
  probe
  misc_feature (1)..(25): SEQ ID NO: 5566; WAN024GHD_at; Start 120; Stop 144
tcgcaaagaagaaacgaagtacttg

SEQ ID NO: 245562 - DNA, 25 bp, Artificial
  probe
  misc_feature (1)..(25): SEQ ID NO: 5566; WAN024GHD_at; Start 229; Stop 253
gccattgtgcatccagtagttagca

SEQ ID NO: 245563 - DNA, 25 bp, Artificial
  probe
  misc_feature (1)..(25): SEQ ID NO: 5566; WAN024GHD_at; Start 284; Stop 308
gcaatttcattggtgtggtgtggaa

SEQ ID NO: 245564 - DNA, 25 bp, Artificial
  probe
  misc_feature (1)..(25): SEQ ID NO: 5566; WAN024GHD_at; Start 92; Stop 116
aagttgataggcttacggtagtgct

SEQ ID NO: 245565 - DNA, 25 bp, Artificial
  probe
  misc_feature (1)..(25): SEQ ID NO: 5566; WAN024GHD_at; Start 54; Stop 78
tgagattggtctcggcatcgcgaac

SEQ ID NO: 245566 - DNA, 25 bp, Artificial
  probe
  misc_feature (1)..(25): SEQ ID NO: 5566; WAN024GHD_at; Start 60; Stop 84
tggtctcggcatcgcgaactgcctt

SEQ ID NO: 245567 - DNA, 25 bp, Artificial
  probe
  misc_feature (1)..(25): SEQ ID NO: 5566; WAN024GHD_at; Start 194; Stop 218
gacttagacattttgacattgtcga

SEQ ID NO: 245568 - DNA, 25 bp, Artificial
  probe
  misc_feature (1)..(25): SEQ ID NO: 1774; WAN024GHE_at; Start 491; Stop 515
taggtgcttcaggtcgtaccgatga

SEQ ID NO: 245569 - DNA, 25 bp, Artificial
  probe
  misc_feature (1)..(25): SEQ ID NO: 1774; WAN024GHE_at; Start 757; Stop 781
gctaactactggatgcacaatggct

SEQ ID NO: 245570 - DNA, 25 bp, Artificial
  probe
  misc_feature (1)..(25): SEQ ID NO: 1774; WAN024GHE_at; Start 28; Stop 52
cgtgatttgcgagaatttgtcccga

SEQ ID NO: 245571 - DNA, 25 bp, Artificial
  probe
  misc_feature (1)..(25): SEQ ID NO: 1774; WAN024GHE_at; Start 827; Stop 851
tcattacggtacacgatgcccttaa

SEQ ID NO: 245572 - DNA, 25 bp, Artificial
  probe
  misc_feature (1)..(25): SEQ ID NO: 1774; WAN024GHE_at; Start 1120; Stop 1144
tatgatgcaagtgtcaagcaagctc

SEQ ID NO: 245573 - DNA, 25 bp, Artificial
  probe
  misc_feature (1)..(25): SEQ ID NO: 1774; WAN024GHE_at; Start 47; Stop 71
tcccgattgaggacggcaagatcaa

SEQ ID NO: 245574 - DNA, 25 bp, Artificial
  probe
  misc_feature (1)..(25): SEQ ID NO: 1774; WAN024GHE_at; Start 346; Stop 370
gagtttatggcagacatcatccgtt

SEQ ID NO: 245575 - DNA, 25 bp, Artificial
  probe
  misc_feature (1)..(25): SEQ ID NO: 1774; WAN024GHE_at; Start 913; Stop 937
aacttcacggaaaaggcagttcgcg

SEQ ID NO: 245576 - DNA, 25 bp, Artificial
  probe
  misc_feature (1)..(25): SEQ ID NO: 1774; WAN024GHE_at; Start 605; Stop 629
ctggacgtccgggttggcatattga

SEQ ID NO: 245577 - DNA, 25 bp, Artificial
  probe
  misc_feature (1)..(25): SEQ ID NO: 1774; WAN024GHE_at; Start 556; Stop 580
tggaaatcttccaaaccaggtgaga

SEQ ID NO: 245578 - DNA, 25 bp, Artificial
  probe
  misc_feature (1)..(25): SEQ ID NO: 1774; WAN024GHE_at; Start 271; Stop 295
aagtacatcgctgcctttcgtgagg

SEQ ID NO: 245579 - DNA, 25 bp, Artificial
  probe
  misc_feature (1)..(25): SEQ ID NO: 1774; WAN024GHE_at; Start 661; Stop 685
gataccattgatatccacggtggtg

SEQ ID NO: 245580 - DNA, 25 bp, Artificial
  probe
  misc_feature (1)..(25): SEQ ID NO: 1774; WAN024GHE_at; Start 504; Stop 528
tcgtaccgatgaagaaacggctcgt

SEQ ID NO: 245581 - DNA, 25 bp, Artificial
  probe
  misc_feature (1)..(25): SEQ ID NO: 1774; WAN024GHE_at; Start 321; Stop 345
tgcgactcgccatccgcgtgtagtg

SEQ ID NO: 245582 - DNA, 25 bp, Artificial
  probe
  misc_feature (1)..(25): SEQ ID NO: 1774; WAN024GHE_at; Start 1259; Stop 1283
cagcagaccaaatccgtgaccaatt

SEQ ID NO: 245583 - DNA, 25 bp, Artificial
  probe
  misc_feature (1)..(25): SEQ ID NO: 1774; WAN024GHE_at; Start 1051; Stop 1075
gaagattttaatgctgccaacggta

SEQ ID NO: 245584 - DNA, 25 bp, Artificial
  probe
  misc_feature (1)..(25): SEQ ID NO: 1774; WAN024GHE_at; Start 883; Stop 907
tttgcgacccagcactaccgtaagc

SEQ ID NO: 245585 - DNA, 25 bp, Artificial
  probe
  misc_feature (1)..(25): SEQ ID NO: 1774; WAN024GHE_at; Start 166; Stop 190
taccgtgggtataaggttgcctata

SEQ ID NO: 245586 - DNA, 25 bp, Artificial
  probe
  misc_feature (1)..(25): SEQ ID NO: 1774; WAN024GHE_at; Start 1213; Stop 1237
ttgattcaaaaacgccaagaggcgc

SEQ ID NO: 245587 - DNA, 25 bp, Artificial
  probe
  misc_feature (1)..(25): SEQ ID NO: 1774; WAN024GHE_at; Start 1094; Stop 1118
tggccaaatggatcaactcagggaa

SEQ ID NO: 245588 - DNA, 25 bp, Artificial
  probe
  misc_feature (1)..(25): SEQ ID NO: 1774; WAN024GHE_at; Start 931; Stop 955
gttcgcgatgccgagaccaatctca

SEQ ID NO: 245589 - DNA, 25 bp, Artificial
  probe
  misc_feature (1)..(25): SEQ ID NO: 1774; WAN024GHE_at; Start 798; Stop 822
tgtcaaaatgtctaagtccttgggt

SEQ ID NO: 245590 - DNA, 25 bp, Artificial
  probe
  misc_feature (1)..(25): SEQ ID NO: 1774; WAN024GHE_at; Start 253; Stop 277
cctcaggaggttgcggataagtaca

SEQ ID NO: 245591 - DNA, 25 bp, Artificial
  probe
  misc_feature (1)..(25): SEQ ID NO: 1774; WAN024GHE_at; Start 643; Stop 667
tcgacagagattttaggtgatacca

SEQ ID NO: 245592 - DNA, 25 bp, Artificial
  probe
  misc_feature (1)..(25): SEQ ID NO: 1774; WAN024GHE_at; Start 1077; Stop 1101
cacagttgtctttgaaatggccaaa

SEQ ID NO: 245593 - DNA, 25 bp, Artificial
  probe
  misc_feature (1)..(25): SEQ ID NO: 1774; WAN024GHE_at; Start 624; Stop 648
tattgagtgttcagtcatgtcgaca

SEQ ID NO: 245594 - DNA, 25 bp, Artificial
  probe
  misc_feature (1)..(25): SEQ ID NO: 1774; WAN024GHE_at; Start 150; Stop 174
tcgtcgctattttgagtaccgtggg

SEQ ID NO: 245595 - DNA, 25 bp, Artificial
  probe
  misc_feature (1)..(25): SEQ ID NO: 1774; WAN024GHE_at; Start 686; Stop 710
gagctgacctagagtttccacacca

SEQ ID NO: 245596 - DNA, 25 bp, Artificial
  probe
  misc_feature (1)..(25): SEQ ID NO: 1774; WAN024GHE_at; Start 572; Stop 596
caggtgagatttcttgggatagtcc

SEQ ID NO: 245597 - DNA, 25 bp, Artificial
  probe
  misc_feature (1)..(25): SEQ ID NO: 1774; WAN024GHE_at; Start 730; Stop 754
tctgaagctaaaacaggcaaggctt

SEQ ID NO: 245598 - DNA, 25 bp, Artificial
  probe
  misc_feature (1)..(25): SEQ ID NO: 1774; WAN024GHE_at; Start 998; Stop 1022
tggatgcccaagagttacaaaactt

SEQ ID NO: 245599 - DNA, 25 bp, Artificial
  probe
  misc_feature (1)..(25): SEQ ID NO: 1774; WAN024GHE_at; Start 214; Stop 238
gataagattatcaaccgtgccaggg

SEQ ID NO: 245600 - DNA, 25 bp, Artificial
  probe
  misc_feature (1)..(25): SEQ ID NO: 1774; WAN024GHE_at; Start 68; Stop 92
tcaagatgtatgtttgtgggccaac

SEQ ID NO: 245601 - DNA, 25 bp, Artificial
  probe
  misc_feature (1)..(25): SEQ ID NO: 1774; WAN024GHE_at; Start 124; Stop 148
cgttcgacggtagcttttgatacga

SEQ ID NO: 245602 - DNA, 25 bp, Artificial
  probe
  misc_feature (1)..(25): SEQ ID NO: 3948; WAN024GHF_at; Start 24; Stop 48
cgagtttattgacataatactctcg

SEQ ID NO: 245603 - DNA, 25 bp, Artificial
  probe
  misc_feature (1)..(25): SEQ ID NO: 3948; WAN024GHF_at; Start 102; Stop 126
caatcttggccggaataccgacaac

SEQ ID NO: 245604 - DNA, 25 bp, Artificial
  probe
  misc_feature (1)..(25): SEQ ID NO: 3948; WAN024GHF_at; Start 44; Stop 68
tctcgtttttcttcgacttcgtgaa

SEQ ID NO: 245605 - DNA, 25 bp, Artificial
  probe
  misc_feature (1)..(25): SEQ ID NO: 3948; WAN024GHF_at; Start 182; Stop 206
ttttcaccaatttccacaggcccga

SEQ ID NO: 245606 - DNA, 25 bp, Artificial
  probe
  misc_feature (1)..(25): SEQ ID NO: 3948; WAN024GHF_at; Start 62; Stop 86
tcgtgaatgacaggctcatctttct

SEQ ID NO: 245607 - DNA, 25 bp, Artificial
  probe
  misc_feature (1)..(25): SEQ ID NO: 3948; WAN024GHF_at; Start 107; Stop 131
ttggccggaataccgacaaccgtca

SEQ ID NO: 245608 - DNA, 25 bp, Artificial
  probe
  misc_feature (1)..(25): SEQ ID NO: 3948; WAN024GHF_at; Start 148; Stop 172
tgctacgacaactgctgcagcaccg

SEQ ID NO: 245609 - DNA, 25 bp, Artificial
  probe
  misc_feature (1)..(25): SEQ ID NO: 3948; WAN024GHF_at; Start 121; Stop 145
gacaaccgtcacgtcactaggtaca

SEQ ID NO: 245610 - DNA, 25 bp, Artificial
  probe
  misc_feature (1)..(25): SEQ ID NO: 3948; WAN024GHF_at; Start 92; Stop 116
tgaagacggacaatcttggccggaa

SEQ ID NO: 245611 - DNA, 25 bp, Artificial
  probe
  misc_feature (1)..(25): SEQ ID NO: 3948; WAN024GHF_at; Start 142; Stop 166
tacatctgctacgacaactgctgca

SEQ ID NO: 245612 - DNA, 25 bp, Artificial
  probe
  misc_feature (1)..(25): SEQ ID NO: 3948; WAN024GHF_at; Start 1; Stop 25
gtgactggcatctttagcctgctcg

SEQ ID NO: 245613 - DNA, 25 bp, Artificial
  probe
  misc_feature (1)..(25): SEQ ID NO: 3948; WAN024GHF_at; Start 70; Stop 94
gacaggctcatctttcttaccatga

SEQ ID NO: 245614 - DNA, 25 bp, Artificial
  probe
  misc_feature (1)..(25): SEQ ID NO: 3948; WAN024GHF_at; Start 127; Stop 151
cgtcacgtcactaggtacatctgct

SEQ ID NO: 245615 - DNA, 25 bp, Artificial
  probe
  misc_feature (1)..(25): SEQ ID NO: 3948; WAN024GHF_at; Start 193; Stop 217
ttccacaggcccgataacttgggca

SEQ ID NO: 245616 - DNA, 25 bp, Artificial
  probe
  misc_feature (1)..(25): SEQ ID NO: 3948; WAN024GHF_at; Start 138; Stop 162
taggtacatctgctacgacaactgc

SEQ ID NO: 245617 - DNA, 25 bp, Artificial
  probe
  misc_feature (1)..(25): SEQ ID NO: 3948; WAN024GHF_at; Start 78; Stop 102
catctttcttaccatgaagacggac

SEQ ID NO: 245618 - DNA, 25 bp, Artificial
  probe
  misc_feature (1)..(25): SEQ ID NO: 3948; WAN024GHF_at; Start 89; Stop 113
ccatgaagacggacaatcttggccg

SEQ ID NO: 245619 - DNA, 25 bp, Artificial
  probe
  misc_feature (1)..(25): SEQ ID NO: 3948; WAN024GHF_at; Start 185; Stop 209
tcaccaatttccacaggcccgataa

SEQ ID NO: 245620 - DNA, 25 bp, Artificial
  probe
  misc_feature (1)..(25): SEQ ID NO: 3948; WAN024GHF_at; Start 196; Stop 220
cacaggcccgataacttgggcatgg

SEQ ID NO: 245621 - DNA, 25 bp, Artificial
  probe
  misc_feature (1)..(25): SEQ ID NO: 3948; WAN024GHF_at; Start 12; Stop 36
ctttagcctgctcgagtttattgac

SEQ ID NO: 245622 - DNA, 25 bp, Artificial
  probe
  misc_feature (1)..(25): SEQ ID NO: 3948; WAN024GHF_at; Start 83; Stop 107
ttcttaccatgaagacggacaatct

SEQ ID NO: 245623 - DNA, 25 bp, Artificial
  probe
  misc_feature (1)..(25): SEQ ID NO: 3948; WAN024GHF_at; Start 133; Stop 157
gtcactaggtacatctgctacgaca

SEQ ID NO: 245624 - DNA, 25 bp, Artificial
  probe
  misc_feature (1)..(25): SEQ ID NO: 3948; WAN024GHF_at; Start 34; Stop 58
gacataatactctcgtttttcttcg

SEQ ID NO: 245625 - DNA, 25 bp, Artificial
  probe
  misc_feature (1)..(25): SEQ ID NO: 3948; WAN024GHF_at; Start 178; Stop 202
ggcattttcaccaatttccacaggc

SEQ ID NO: 245626 - DNA, 25 bp, Artificial
  probe
  misc_feature (1)..(25): SEQ ID NO: 3948; WAN024GHF_at; Start 201; Stop 225
gcccgataacttgggcatgggctga

SEQ ID NO: 245627 - DNA, 25 bp, Artificial
  probe
  misc_feature (1)..(25): SEQ ID NO: 3948; WAN024GHF_at; Start 7; Stop 31
ggcatctttagcctgctcgagttta

SEQ ID NO: 245628 - DNA, 25 bp, Artificial
  probe
  misc_feature (1)..(25): SEQ ID NO: 3948; WAN024GHF_at; Start 17; Stop 41
gcctgctcgagtttattgacataat

SEQ ID NO: 245629 - DNA, 25 bp, Artificial
  probe
  misc_feature (1)..(25): SEQ ID NO: 3948; WAN024GHF_at; Start 53; Stop 77
tcttcgacttcgtgaatgacaggct

SEQ ID NO: 245630 - DNA, 25 bp, Artificial
  probe
  misc_feature (1)..(25): SEQ ID NO: 3948; WAN024GHF_at; Start 164; Stop 188
gcagcaccgaccttggcattttcac

SEQ ID NO: 245631 - DNA, 25 bp, Artificial
  probe
  misc_feature (1)..(25): SEQ ID NO: 3948; WAN024GHF_at; Start 3; Stop 27
gactggcatctttagcctgctcgag

SEQ ID NO: 245632 - DNA, 25 bp, Artificial
  probe
  misc_feature (1)..(25): SEQ ID NO: 3948; WAN024GHF_at; Start 113; Stop 137
ggaataccgacaaccgtcacgtcac

SEQ ID NO: 245633 - DNA, 25 bp, Artificial
  probe
  misc_feature (1)..(25): SEQ ID NO: 3948; WAN024GHF_at; Start 96; Stop 120
gacggacaatcttggccggaatacc

SEQ ID NO: 245634 - DNA, 25 bp, Artificial
  probe
  misc_feature (1)..(25): SEQ ID NO: 3948; WAN024GHF_at; Start 160; Stop 184
tgctgcagcaccgaccttggcattt

SEQ ID NO: 245635 - DNA, 25 bp, Artificial
  probe
  misc_feature (1)..(25): SEQ ID NO: 3948; WAN024GHF_at; Start 58; Stop 82
gacttcgtgaatgacaggctcatct

SEQ ID NO: 245636 - DNA, 25 bp, Artificial
  probe
  misc_feature (1)..(25): SEQ ID NO: 2597; WAN024GHG_at; Start 48; Stop 72
agcggcccgcaccactttggaggtt

SEQ ID NO: 245637 - DNA, 25 bp, Artificial
  probe
  misc_feature (1)..(25): SEQ ID NO: 2597; WAN024GHG_at; Start 492; Stop 516
caagattgtccgtcttcatggtaag

SEQ ID NO: 245638 - DNA, 25 bp, Artificial
  probe
  misc_feature (1)..(25): SEQ ID NO: 2597; WAN024GHG_at; Start 470; Stop 494
tgacggttgtcggtattccggccaa

SEQ ID NO: 245639 - DNA, 25 bp, Artificial
  probe
  misc_feature (1)..(25): SEQ ID NO: 2597; WAN024GHG_at; Start 585; Stop 609
taaagatgccagtcacagatcgtct

SEQ ID NO: 245640 - DNA, 25 bp, Artificial
  probe
  misc_feature (1)..(25): SEQ ID NO: 2597; WAN024GHG_at; Start 414; Stop 438
tgaaaatgccaaggtcggtgctgca

SEQ ID NO: 245641 - DNA, 25 bp, Artificial
  probe
  misc_feature (1)..(25): SEQ ID NO: 2597; WAN024GHG_at; Start 559; Stop 583
tattatgtcaataaactcgagcagg

SEQ ID NO: 245642 - DNA, 25 bp, Artificial
  probe
  misc_feature (1)..(25): SEQ ID NO: 2597; WAN024GHG_at; Start 81; Stop 105
ttatccaggtgtcaaggccttggcg

SEQ ID NO: 245643 - DNA, 25 bp, Artificial
  probe
  misc_feature (1)..(25): SEQ ID NO: 2597; WAN024GHG_at; Start 437; Stop 461
cagcagttgtcgtagcagatgtacc

SEQ ID NO: 245644 - DNA, 25 bp, Artificial
  probe
  misc_feature (1)..(25): SEQ ID NO: 2597; WAN024GHG_at; Start 176; Stop 200
ggcgcttttggactcagattgagat

SEQ ID NO: 245645 - DNA, 25 bp, Artificial
  probe
  misc_feature (1)..(25): SEQ ID NO: 2597; WAN024GHG_at; Start 32; Stop 56
taaaagaaaatgatccagcggcccg

SEQ ID NO: 245646 - DNA, 25 bp, Artificial
  probe
  misc_feature (1)..(25): SEQ ID NO: 2597; WAN024GHG_at; Start 393; Stop 417
tatcgggcctgtggaaattggtgaa

SEQ ID NO: 245647 - DNA, 25 bp, Artificial
  probe
  misc_feature (1)..(25): SEQ ID NO: 2597; WAN024GHG_at; Start 593; Stop 617
ccagtcacagatcgtctggtttgta

SEQ ID NO: 245648 - DNA, 25 bp, Artificial
  probe
  misc_feature (1)..(25): SEQ ID NO: 2597; WAN024GHG_at; Start 570; Stop 594
taaactcgagcaggctaaagatgcc

SEQ ID NO: 245649 - DNA, 25 bp, Artificial
  probe
  misc_feature (1)..(25): SEQ ID NO: 2597; WAN024GHG_at; Start 335; Stop 359
gtggcaaacgccatccgactgtacg

SEQ ID NO: 245650 - DNA, 25 bp, Artificial
  probe
  misc_feature (1)..(25): SEQ ID NO: 2597; WAN024GHG_at; Start 423; Stop 447
caaggtcggtgctgcagcagttgtc

SEQ ID NO: 245651 - DNA, 25 bp, Artificial
  probe
  misc_feature (1)..(25): SEQ ID NO: 2597; WAN024GHG_at; Start 323; Stop 347
cagggaaagactgtggcaaacgcca

SEQ ID NO: 245652 - DNA, 25 bp, Artificial
  probe
  misc_feature (1)..(25): SEQ ID NO: 2597; WAN024GHG_at; Start 283; Stop 307
aaaggcgttcttctctatcacggag

SEQ ID NO: 245653 - DNA, 25 bp, Artificial
  probe
  misc_feature (1)..(25): SEQ ID NO: 2597; WAN024GHG_at; Start 344; Stop 368
gccatccgactgtacgaaagggagc

SEQ ID NO: 245654 - DNA, 25 bp, Artificial
  probe
  misc_feature (1)..(25): SEQ ID NO: 2597; WAN024GHG_at; Start 268; Stop 292
acagcgattgttgaaaaaggcgttc

SEQ ID NO: 245655 - DNA, 25 bp, Artificial
  probe
  misc_feature (1)..(25): SEQ ID NO: 2597; WAN024GHG_at; Start 59; Stop 83
ccactttggaggttttgctgactta

SEQ ID NO: 245656 - DNA, 25 bp, Artificial
  probe
  misc_feature (1)..(25): SEQ ID NO: 2597; WAN024GHG_at; Start 240; Stop 264
ccatggttctggtctggtgattgga

SEQ ID NO: 245657 - DNA, 25 bp, Artificial
  probe
  misc_feature (1)..(25): SEQ ID NO: 2597; WAN024GHG_at; Start 504; Stop 528
tcttcatggtaagaaagatgagcct

SEQ ID NO: 245658 - DNA, 25 bp, Artificial
  probe
  misc_feature (1)..(25): SEQ ID NO: 2597; WAN024GHG_at; Start 252; Stop 276
tctggtgattggagagacagcgatt

SEQ ID NO: 245659 - DNA, 25 bp, Artificial
  probe
  misc_feature (1)..(25): SEQ ID NO: 2597; WAN024GHG_at; Start 204; Stop 228
tccaggagcccagattgattcaggt

SEQ ID NO: 245660 - DNA, 25 bp, Artificial
  probe
  misc_feature (1)..(25): SEQ ID NO: 2597; WAN024GHG_at; Start 109; Stop 133
caccgtctctcgcattttctctgga

SEQ ID NO: 245661 - DNA, 25 bp, Artificial
  probe
  misc_feature (1)..(25): SEQ ID NO: 2597; WAN024GHG_at; Start 382; Stop 406
catgcccaagttatcgggcctgtgg

SEQ ID NO: 245662 - DNA, 25 bp, Artificial
  probe
  misc_feature (1)..(25): SEQ ID NO: 2597; WAN024GHG_at; Start 89; Stop 113
gtgtcaaggccttggcggcccaccg

SEQ ID NO: 245663 - DNA, 25 bp, Artificial
  probe
  misc_feature (1)..(25): SEQ ID NO: 2597; WAN024GHG_at; Start 371; Stop 395
tcatatcagcccatgcccaagttat

SEQ ID NO: 245664 - DNA, 25 bp, Artificial
  probe
  misc_feature (1)..(25): SEQ ID NO: 2597; WAN024GHG_at; Start 67; Stop 91
gaggttttgctgacttatccaggtg

SEQ ID NO: 245665 - DNA, 25 bp, Artificial
  probe
  misc_feature (1)..(25): SEQ ID NO: 2597; WAN024GHG_at; Start 480; Stop 504
cggtattccggccaagattgtccgt

SEQ ID NO: 245666 - DNA, 25 bp, Artificial
  probe
  misc_feature (1)..(25): SEQ ID NO: 2597; WAN024GHG_at; Start 294; Stop 318
tctctatcacggagtgactctcggg

SEQ ID NO: 245667 - DNA, 25 bp, Artificial
  probe
  misc_feature (1)..(25): SEQ ID NO: 2597; WAN024GHG_at; Start 190; Stop 214
cagattgagattcatccaggagccc

SEQ ID NO: 245668 - DNA, 25 bp, Artificial
  probe
  misc_feature (1)..(25): SEQ ID NO: 2597; WAN024GHG_at; Start 443; Stop 467
ttgtcgtagcagatgtacctagtga

SEQ ID NO: 245669 - DNA, 25 bp, Artificial
  probe
  misc_feature (1)..(25): SEQ ID NO: 2597; WAN024GHG_at; Start 399; Stop 423
gcctgtggaaattggtgaaaatgcc

SEQ ID NO: 245670 - DNA, 25 bp, Artificial
  probe
  misc_feature (1)..(25): SEQ ID NO: 5811; WAN024GHH_at; Start 224; Stop 248
ttttctttaccgacagcagcaacga

SEQ ID NO: 245671 - DNA, 25 bp, Artificial
  probe
  misc_feature (1)..(25): SEQ ID NO: 5811; WAN024GHH_at; Start 7; Stop 31
caagatttcagccacatcacgcata

SEQ ID NO: 245672 - DNA, 25 bp, Artificial
  probe
  misc_feature (1)..(25): SEQ ID NO: 5811; WAN024GHH_at; Start 73; Stop 97
aacggcagtcacttggtctttcact

SEQ ID NO: 245673 - DNA, 25 bp, Artificial
  probe
  misc_feature (1)..(25): SEQ ID NO: 5811; WAN024GHH_at; Start 151; Stop 175
gaggtcactgttgtaggctgcaatg

SEQ ID NO: 245674 - DNA, 25 bp, Artificial
  probe
  misc_feature (1)..(25): SEQ ID NO: 5811; WAN024GHH_at; Start 171; Stop 195
caatgatttcagcttgcaattcagc

SEQ ID NO: 245675 - DNA, 25 bp, Artificial
  probe
  misc_feature (1)..(25): SEQ ID NO: 5811; WAN024GHH_at; Start 178; Stop 202
ttcagcttgcaattcagcatccacg

SEQ ID NO: 245676 - DNA, 25 bp, Artificial
  probe
  misc_feature (1)..(25): SEQ ID NO: 5811; WAN024GHH_at; Start 246; Stop 270
cgatttcttcttggaaggcaatcaa

SEQ ID NO: 245677 - DNA, 25 bp, Artificial
  probe
  misc_feature (1)..(25): SEQ ID NO: 5811; WAN024GHH_at; Start 229; Stop 253
tttaccgacagcagcaacgatttct

SEQ ID NO: 245678 - DNA, 25 bp, Artificial
  probe
  misc_feature (1)..(25): SEQ ID NO: 5811; WAN024GHH_at; Start 240; Stop 264
cagcaacgatttcttcttggaaggc

SEQ ID NO: 245679 - DNA, 25 bp, Artificial
  probe
  misc_feature (1)..(25): SEQ ID NO: 5811; WAN024GHH_at; Start 156; Stop 180
cactgttgtaggctgcaatgatttc

SEQ ID NO: 245680 - DNA, 25 bp, Artificial
  probe
  misc_feature (1)..(25): SEQ ID NO: 5811; WAN024GHH_at; Start 300; Stop 324
gcgcttccaacatgatttcttctga

SEQ ID NO: 245681 - DNA, 25 bp, Artificial
  probe
  misc_feature (1)..(25): SEQ ID NO: 5811; WAN024GHH_at; Start 1; Stop 25
ttgttccaagatttcagccacatca

SEQ ID NO: 245682 - DNA, 25 bp, Artificial
  probe
  misc_feature (1)..(25): SEQ ID NO: 5811; WAN024GHH_at; Start 221; Stop 245
gctttttctttaccgacagcagcaa

SEQ ID NO: 245683 - DNA, 25 bp, Artificial
  probe
  misc_feature (1)..(25): SEQ ID NO: 5811; WAN024GHH_at; Start 182; Stop 206
gcttgcaattcagcatccacgtgaa

SEQ ID NO: 245684 - DNA, 25 bp, Artificial
  probe
  misc_feature (1)..(25): SEQ ID NO: 5811; WAN024GHH_at; Start 117; Stop 141
gggccaatttctcttctacttgaac

SEQ ID NO: 245685 - DNA, 25 bp, Artificial
  probe
  misc_feature (1)..(25): SEQ ID NO: 5811; WAN024GHH_at; Start 28; Stop 52
cataatacggtcaaattcttcgtgg

SEQ ID NO: 245686 - DNA, 25 bp, Artificial
  probe
  misc_feature (1)..(25): SEQ ID NO: 5811; WAN024GHH_at; Start 262; Stop 286
ggcaatcaattctttgacagcttcg

SEQ ID NO: 245687 - DNA, 25 bp, Artificial
  probe
  misc_feature (1)..(25): SEQ ID NO: 5811; WAN024GHH_at; Start 130; Stop 154
ttctacttgaactgccttttggagg

SEQ ID NO: 245688 - DNA, 25 bp, Artificial
  probe
  misc_feature (1)..(25): SEQ ID NO: 5811; WAN024GHH_at; Start 199; Stop 223
cacgtgaagcaattccacttctgct

SEQ ID NO: 245689 - DNA, 25 bp, Artificial
  probe
  misc_feature (1)..(25): SEQ ID NO: 5811; WAN024GHH_at; Start 255; Stop 279
cttggaaggcaatcaattctttgac

SEQ ID NO: 245690 - DNA, 25 bp, Artificial
  probe
  misc_feature (1)..(25): SEQ ID NO: 5811; WAN024GHH_at; Start 17; Stop 41
gccacatcacgcataatacggtcaa

SEQ ID NO: 245691 - DNA, 25 bp, Artificial
  probe
  misc_feature (1)..(25): SEQ ID NO: 5811; WAN024GHH_at; Start 66; Stop 90
cttcgtaaacggcagtcacttggtc

SEQ ID NO: 245692 - DNA, 25 bp, Artificial
  probe
  misc_feature (1)..(25): SEQ ID NO: 5811; WAN024GHH_at; Start 145; Stop 169
cttttggaggtcactgttgtaggct

SEQ ID NO: 245693 - DNA, 25 bp, Artificial
  probe
  misc_feature (1)..(25): SEQ ID NO: 5811; WAN024GHH_at; Start 235; Stop 259
gacagcagcaacgatttcttcttgg

SEQ ID NO: 245694 - DNA, 25 bp, Artificial
  probe
  misc_feature (1)..(25): SEQ ID NO: 5811; WAN024GHH_at; Start 186; Stop 210
gcaattcagcatccacgtgaagcaa

SEQ ID NO: 245695 - DNA, 25 bp, Artificial
  probe
  misc_feature (1)..(25): SEQ ID NO: 5811; WAN024GHH_at; Start 191; Stop 215
tcagcatccacgtgaagcaattcca

SEQ ID NO: 245696 - DNA, 25 bp, Artificial
  probe
  misc_feature (1)..(25): SEQ ID NO: 5811; WAN024GHH_at; Start 204; Stop 228
gaagcaattccacttctgctttttc

SEQ ID NO: 245697 - DNA, 25 bp, Artificial
  probe
  misc_feature (1)..(25): SEQ ID NO: 5811; WAN024GHH_at; Start 137; Stop 161
tgaactgccttttggaggtcactgt

SEQ ID NO: 245698 - DNA, 25 bp, Artificial
  probe
  misc_feature (1)..(25): SEQ ID NO: 5811; WAN024GHH_at; Start 13; Stop 37
ttcagccacatcacgcataatacgg

SEQ ID NO: 245699 - DNA, 25 bp, Artificial
  probe
  misc_feature (1)..(25): SEQ ID NO: 5811; WAN024GHH_at; Start 164; Stop 188
taggctgcaatgatttcagcttgca

SEQ ID NO: 245700 - DNA, 25 bp, Artificial
  probe
  misc_feature (1)..(25): SEQ ID NO: 5811; WAN024GHH_at; Start 267; Stop 291
tcaattctttgacagcttcgtgccc

SEQ ID NO: 245701 - DNA, 25 bp, Artificial
  probe
  misc_feature (1)..(25): SEQ ID NO: 5811; WAN024GHH_at; Start 110; Stop 134
gcttcacgggccaatttctcttcta

SEQ ID NO: 245702 - DNA, 25 bp, Artificial
  probe
  misc_feature (1)..(25): SEQ ID NO: 5811; WAN024GHH_at; Start 56; Stop 80
gcatatttttcttcgtaaacggcag

SEQ ID NO: 245703 - DNA, 25 bp, Artificial
  probe
  misc_feature (1)..(25): SEQ ID NO: 5811; WAN024GHH_at; Start 273; Stop 297
ctttgacagcttcgtgccctttaag

SEQ ID NO: 245704 - DNA, 25 bp, Artificial
  probe
  misc_feature (1)..(25): SEQ ID NO: 1013; WAN024GHI_at; Start 53; Stop 77
tcgatacgaacgactttagcacggt

SEQ ID NO: 245705 - DNA, 25 bp, Artificial
  probe
  misc_feature (1)..(25): SEQ ID NO: 1013; WAN024GHI_at; Start 383; Stop 407
agagcctccgtcaagatttctgcag

SEQ ID NO: 245706 - DNA, 25 bp, Artificial
  probe
  misc_feature (1)..(25): SEQ ID NO: 1013; WAN024GHI_at; Start 64; Stop 88
gactttagcacggtaaacttcatcc

SEQ ID NO: 245707 - DNA, 25 bp, Artificial
  probe
  misc_feature (1)..(25): SEQ ID NO: 1013; WAN024GHI_at; Start 516; Stop 540
tcaatactgtgtagttatttccatc

SEQ ID NO: 245708 - DNA, 25 bp, Artificial
  probe
  misc_feature (1)..(25): SEQ ID NO: 1013; WAN024GHI_at; Start 21; Stop 45
tatcaaagaggttaacaaaggcacc

SEQ ID NO: 245709 - DNA, 25 bp, Artificial
  probe
  misc_feature (1)..(25): SEQ ID NO: 1013; WAN024GHI_at; Start 500; Stop 524
aaaccttggatatctgtcaatactg

SEQ ID NO: 245710 - DNA, 25 bp, Artificial
  probe
  misc_feature (1)..(25): SEQ ID NO: 1013; WAN024GHI_at; Start 258; Stop 282
tcttgtccacatcaatcttgatcgt

SEQ ID NO: 245711 - DNA, 25 bp, Artificial
  probe
  misc_feature (1)..(25): SEQ ID NO: 1013; WAN024GHI_at; Start 213; Stop 237
taatcttgtcgatggtttctccacc

SEQ ID NO: 245712 - DNA, 25 bp, Artificial
  probe
  misc_feature (1)..(25): SEQ ID NO: 1013; WAN024GHI_at; Start 273; Stop 297
tcttgatcgtatcaattttcggagc

SEQ ID NO: 245713 - DNA, 25 bp, Artificial
  probe
  misc_feature (1)..(25): SEQ ID NO: 1013; WAN024GHI_at; Start 311; Stop 335
tctggacgaacttctggaatggttg

SEQ ID NO: 245714 - DNA, 25 bp, Artificial
  probe
  misc_feature (1)..(25): SEQ ID NO: 1013; WAN024GHI_at; Start 79; Stop 103
aacttcatccactttggcttcacga

SEQ ID NO: 245715 - DNA, 25 bp, Artificial
  probe
  misc_feature (1)..(25): SEQ ID NO: 1013; WAN024GHI_at; Start 400; Stop 424
ttctgcagtaatcccttgaatcttg

SEQ ID NO: 245716 - DNA, 25 bp, Artificial
  probe
  misc_feature (1)..(25): SEQ ID NO: 1013; WAN024GHI_at; Start 36; Stop 60
caaaggcaccaaatttctcgatacg

SEQ ID NO: 245717 - DNA, 25 bp, Artificial
  probe
  misc_feature (1)..(25): SEQ ID NO: 1013; WAN024GHI_at; Start 297; Stop 321
cagttggagccaattctggacgaac

SEQ ID NO: 245718 - DNA, 25 bp, Artificial
  probe
  misc_feature (1)..(25): SEQ ID NO: 1013; WAN024GHI_at; Start 432; Stop 456
tttgaagggctgtaatcccatcacg

SEQ ID NO: 245719 - DNA, 25 bp, Artificial
  probe
  misc_feature (1)..(25): SEQ ID NO: 1013; WAN024GHI_at; Start 128; Stop 152
gcacggttaatagcatcttggtcac

SEQ ID NO: 245720 - DNA, 25 bp, Artificial
  probe
  misc_feature (1)..(25): SEQ ID NO: 1013; WAN024GHI_at; Start 226; Stop 250
ggtttctccacccttaccgatgaca

SEQ ID NO: 245721 - DNA, 25 bp, Artificial
  probe
  misc_feature (1)..(25): SEQ ID NO: 1013; WAN024GHI_at; Start 179; Stop 203
tcgtctatatcaatcttaacacctg

SEQ ID NO: 245722 - DNA, 25 bp, Artificial
  probe
  misc_feature (1)..(25): SEQ ID NO: 1013; WAN024GHI_at; Start 328; Stop 352
aatggttgcttcaatgacatcaagg

SEQ ID NO: 245723 - DNA, 25 bp, Artificial
  probe
  misc_feature (1)..(25): SEQ ID NO: 1013; WAN024GHI_at; Start 343; Stop 367
gacatcaaggatttcaaaacgcgct

SEQ ID NO: 245724 - DNA, 25 bp, Artificial
  probe
  misc_feature (1)..(25): SEQ ID NO: 1013; WAN024GHI_at; Start 456; Stop 480
gagtacctgcaaccttgaagtccat

SEQ ID NO: 245725 - DNA, 25 bp, Artificial
  probe
  misc_feature (1)..(25): SEQ ID NO: 1013; WAN024GHI_at; Start 442; Stop 466
tgtaatcccatcacgagtacctgca

SEQ ID NO: 245726 - DNA, 25 bp, Artificial
  probe
  misc_feature (1)..(25): SEQ ID NO: 1013; WAN024GHI_at; Start 153; Stop 177
tagagtagatagacacatttccttc

SEQ ID NO: 245727 - DNA, 25 bp, Artificial
  probe
  misc_feature (1)..(25): SEQ ID NO: 1013; WAN024GHI_at; Start 486; Stop 510
caaagtgatcttccaaaccttggat

SEQ ID NO: 245728 - DNA, 25 bp, Artificial
  probe
  misc_feature (1)..(25): SEQ ID NO: 1013; WAN024GHI_at; Start 94; Stop 118
ggcttcacgaaccaaaccagcaata

SEQ ID NO: 245729 - DNA, 25 bp, Artificial
  probe
  misc_feature (1)..(25): SEQ ID NO: 1013; WAN024GHI_at; Start 240; Stop 264
taccgatgacaatcttaatcttgtc

SEQ ID NO: 245730 - DNA, 25 bp, Artificial
  probe
  misc_feature (1)..(25): SEQ ID NO: 1013; WAN024GHI_at; Start 196; Stop 220
aacacctgtttcagcgataatcttg

SEQ ID NO: 245731 - DNA, 25 bp, Artificial
  probe
  misc_feature (1)..(25): SEQ ID NO: 1013; WAN024GHI_at; Start 471; Stop 495
tgaagtccatatctccaaagtgatc

SEQ ID NO: 245732 - DNA, 25 bp, Artificial
  probe
  misc_feature (1)..(25): SEQ ID NO: 1013; WAN024GHI_at; Start 117; Stop 141
taatttctttggcacggttaatagc

SEQ ID NO: 245733 - DNA, 25 bp, Artificial
  probe
  misc_feature (1)..(25): SEQ ID NO: 1013; WAN024GHI_at; Start 285; Stop 309
caattttcggagcagttggagccaa

SEQ ID NO: 245734 - DNA, 25 bp, Artificial
  probe
  misc_feature (1)..(25): SEQ ID NO: 1013; WAN024GHI_at; Start 6; Stop 30
caagggcatctgtcttatcaaagag

SEQ ID NO: 245735 - DNA, 25 bp, Artificial
  probe
  misc_feature (1)..(25): SEQ ID NO: 1013; WAN024GHI_at; Start 417; Stop 441
gaatcttgatatccatttgaagggc

SEQ ID NO: 245736 - DNA, 25 bp, Artificial
  probe
  misc_feature (1)..(25): SEQ ID NO: 1013; WAN024GHI_at; Start 358; Stop 382
aaaacgcgctttcttggcttgagca

SEQ ID NO: 245737 - DNA, 25 bp, Artificial
  probe
  misc_feature (1)..(25): SEQ ID NO: 1013; WAN024GHI_at; Start 143; Stop 167
tcttggtcactagagtagatagaca

SEQ ID NO: 245738 - DNA, 25 bp, Artificial
  probe
  misc_feature (1)..(25): SEQ ID NO: 5748; WAN024GHJ_at; Start 1979; Stop 2003
ccaaagtggatgaagtttaccgtgc

SEQ ID NO: 245739 - DNA, 25 bp, Artificial
  probe
  misc_feature (1)..(25): SEQ ID NO: 5748; WAN024GHJ_at; Start 2206; Stop 2230
cgtccgccaaaacctgagcatgatg

SEQ ID NO: 245740 - DNA, 25 bp, Artificial
  probe
  misc_feature (1)..(25): SEQ ID NO: 5748; WAN024GHJ_at; Start 1762; Stop 1786
gaattggctccaactgctccgaaaa

SEQ ID NO: 245741 - DNA, 25 bp, Artificial
  probe
  misc_feature (1)..(25): SEQ ID NO: 5748; WAN024GHJ_at; Start 1320; Stop 1344
tgaaatcggtcacggtgcccttggt

SEQ ID NO: 245742 - DNA, 25 bp, Artificial
  probe
  misc_feature (1)..(25): SEQ ID NO: 5748; WAN024GHJ_at; Start 436; Stop 460
gaagtccaagtcatcaatacagtgc

SEQ ID NO: 245743 - DNA, 25 bp, Artificial
  probe
  misc_feature (1)..(25): SEQ ID NO: 5748; WAN024GHJ_at; Start 349; Stop 373
gaaggacgtccttcaacagatgcga

SEQ ID NO: 245744 - DNA, 25 bp, Artificial
  probe
  misc_feature (1)..(25): SEQ ID NO: 5748; WAN024GHJ_at; Start 1288; Stop 1312
gaaacaggtcgttacggtgcgccag

SEQ ID NO: 245745 - DNA, 25 bp, Artificial
  probe
  misc_feature (1)..(25): SEQ ID NO: 5748; WAN024GHJ_at; Start 1305; Stop 1329
tgcgccaggtcgtcgtgaaatcggt

SEQ ID NO: 245746 - DNA, 25 bp, Artificial
  probe
  misc_feature (1)..(25): SEQ ID NO: 5748; WAN024GHJ_at; Start 472; Stop 496
gaaaatgcatctgcaccaatggctg

SEQ ID NO: 245747 - DNA, 25 bp, Artificial
  probe
  misc_feature (1)..(25): SEQ ID NO: 5748; WAN024GHJ_at; Start 537; Stop 561
tccatttgacggaccaattgctggg

SEQ ID NO: 245748 - DNA, 25 bp, Artificial
  probe
  misc_feature (1)..(25): SEQ ID NO: 5748; WAN024GHJ_at; Start 1827; Stop 1851
catcggtaagggtggagaaaccatc

SEQ ID NO: 245749 - DNA, 25 bp, Artificial
  probe
  misc_feature (1)..(25): SEQ ID NO: 5748; WAN024GHJ_at; Start 726; Stop 750
taaagggcacgaagctgtcaaagaa

SEQ ID NO: 245750 - DNA, 25 bp, Artificial
  probe
  misc_feature (1)..(25): SEQ ID NO: 5748; WAN024GHJ_at; Start 882; Stop 906
tcaagtagaagagaaattggcccgt

SEQ ID NO: 245751 - DNA, 25 bp, Artificial
  probe
  misc_feature (1)..(25): SEQ ID NO: 5748; WAN024GHJ_at; Start 1075; Stop 1099
ggtcgtaaggtcgatgaaatccgtc

SEQ ID NO: 245752 - DNA, 25 bp, Artificial
  probe
  misc_feature (1)..(25): SEQ ID NO: 5748; WAN024GHJ_at; Start 2187; Stop 2211
tatgaaggctcttctacctcgtccg

SEQ ID NO: 245753 - DNA, 25 bp, Artificial
  probe
  misc_feature (1)..(25): SEQ ID NO: 5748; WAN024GHJ_at; Start 1179; Stop 1203
agtcttgaccttggctccgatggga

SEQ ID NO: 245754 - DNA, 25 bp, Artificial
  probe
  misc_feature (1)..(25): SEQ ID NO: 5748; WAN024GHJ_at; Start 1670; Stop 1694
cagaaatcttgacggaggctcttgc

SEQ ID NO: 245755 - DNA, 25 bp, Artificial
  probe
  misc_feature (1)..(25): SEQ ID NO: 5748; WAN024GHJ_at; Start 931; Stop 955
gaccaagtgactgccgtttacgaag

SEQ ID NO: 245756 - DNA, 25 bp, Artificial
  probe
  misc_feature (1)..(25): SEQ ID NO: 5748; WAN024GHJ_at; Start 1141; Stop 1165
tcaggtctctttactcgtgggcaaa

SEQ ID NO: 245757 - DNA, 25 bp, Artificial
  probe
  misc_feature (1)..(25): SEQ ID NO: 5748; WAN024GHJ_at; Start 1692; Stop 1716
tgctcaagccaagaaagcgcgtttt

SEQ ID NO: 245758 - DNA, 25 bp, Artificial
  probe
  misc_feature (1)..(25): SEQ ID NO: 5748; WAN024GHJ_at; Start 769; Stop 793
gaaatcgttgctgctgtcggtaaag

SEQ ID NO: 245759 - DNA, 25 bp, Artificial
  probe
  misc_feature (1)..(25): SEQ ID NO: 5748; WAN024GHJ_at; Start 841; Stop 865
gaaatcattgcagcctacaacagtg

SEQ ID NO: 245760 - DNA, 25 bp, Artificial
  probe
  misc_feature (1)..(25): SEQ ID NO: 5748; WAN024GHJ_at; Start 1226; Stop 1250
tggatccagagtacaagaaacgctt

SEQ ID NO: 245761 - DNA, 25 bp, Artificial
  probe
  misc_feature (1)..(25): SEQ ID NO: 5748; WAN024GHJ_at; Start 1485; Stop 1509
tgtgccaatcaaggcgccagtagct

SEQ ID NO: 245762 - DNA, 25 bp, Artificial
  probe
  misc_feature (1)..(25): SEQ ID NO: 5748; WAN024GHJ_at; Start 1441; Stop 1465
caagcttctatctgtgcgggaactc

SEQ ID NO: 245763 - DNA, 25 bp, Artificial
  probe
  misc_feature (1)..(25): SEQ ID NO: 5748; WAN024GHJ_at; Start 1621; Stop 1645
gatgggattacagcccttcaaatgg

SEQ ID NO: 245764 - DNA, 25 bp, Artificial
  probe
  misc_feature (1)..(25): SEQ ID NO: 5748; WAN024GHJ_at; Start 630; Stop 654
tcttgaattgacagtagctggaacc

SEQ ID NO: 245765 - DNA, 25 bp, Artificial
  probe
  misc_feature (1)..(25): SEQ ID NO: 5748; WAN024GHJ_at; Start 379; Stop 403
acagcgcgtttgattgaccgtccga

SEQ ID NO: 245766 - DNA, 25 bp, Artificial
  probe
  misc_feature (1)..(25): SEQ ID NO: 5748; WAN024GHJ_at; Start 2234; Stop 2258
aaggtgaaaagtctgagcgccctca

SEQ ID NO: 245767 - DNA, 25 bp, Artificial
  probe
  misc_feature (1)..(25): SEQ ID NO: 5748; WAN024GHJ_at; Start 666; Stop 690
caacatggtagagtctggtgccaaa

SEQ ID NO: 245768 - DNA, 25 bp, Artificial
  probe
  misc_feature (1)..(25): SEQ ID NO: 5748; WAN024GHJ_at; Start 1927; Stop 1951
caagatgctattaaccgtgccaaag

SEQ ID NO: 245769 - DNA, 25 bp, Artificial
  probe
  misc_feature (1)..(25): SEQ ID NO: 5748; WAN024GHJ_at; Start 1597; Stop 1621
gacttcaaggttgcaggtactcgtg

SEQ ID NO: 245770 - DNA, 25 bp, Artificial
  probe
  misc_feature (1)..(25): SEQ ID NO: 5748; WAN024GHJ_at; Start 1010; Stop 1034
tcttggaacaaatggaacacgcaga

SEQ ID NO: 245771 - DNA, 25 bp, Artificial
  probe
  misc_feature (1)..(25): SEQ ID NO: 5748; WAN024GHJ_at; Start 2077; Stop 2101
tctgagatggcttggactcgtacca

SEQ ID NO: 245772 - DNA, 25 bp, Artificial
  probe
  misc_feature (1)..(25): SEQ ID NO: 2665; WAN024GHK_at; Start 187; Stop 211
agtgacggtgtttggcgtgacatat

SEQ ID NO: 245773 - DNA, 25 bp, Artificial
  probe
  misc_feature (1)..(25): SEQ ID NO: 2665; WAN024GHK_at; Start 15; Stop 39
caaatcattttggataaagtcagcc

SEQ ID NO: 245774 - DNA, 25 bp, Artificial
  probe
  misc_feature (1)..(25): SEQ ID NO: 2665; WAN024GHK_at; Start 109; Stop 133
aactcctgcatatcctgcaaggctg

SEQ ID NO: 245775 - DNA, 25 bp, Artificial
  probe
  misc_feature (1)..(25): SEQ ID NO: 2665; WAN024GHK_at; Start 178; Stop 202
tcaaatgagagtgacggtgtttggc

SEQ ID NO: 245776 - DNA, 25 bp, Artificial
  probe
  misc_feature (1)..(25): SEQ ID NO: 2665; WAN024GHK_at; Start 71; Stop 95
tattattgctggcagttacactgat

SEQ ID NO: 245777 - DNA, 25 bp, Artificial
  probe
  misc_feature (1)..(25): SEQ ID NO: 2665; WAN024GHK_at; Start 191; Stop 215
acggtgtttggcgtgacatatgtaa

SEQ ID NO: 245778 - DNA, 25 bp, Artificial
  probe
  misc_feature (1)..(25): SEQ ID NO: 2665; WAN024GHK_at; Start 67; Stop 91
aatttattattgctggcagttacac

SEQ ID NO: 245779 - DNA, 25 bp, Artificial
  probe
  misc_feature (1)..(25): SEQ ID NO: 2665; WAN024GHK_at; Start 74; Stop 98
tattgctggcagttacactgataaa

SEQ ID NO: 245780 - DNA, 25 bp, Artificial
  probe
  misc_feature (1)..(25): SEQ ID NO: 2665; WAN024GHK_at; Start 122; Stop 146
cctgcaaggctgaaataatgttatc

SEQ ID NO: 245781 - DNA, 25 bp, Artificial
  probe
  misc_feature (1)..(25): SEQ ID NO: 2665; WAN024GHK_at; Start 201; Stop 225
gcgtgacatatgtaataaccttttc

SEQ ID NO: 245782 - DNA, 25 bp, Artificial
  probe
  misc_feature (1)..(25): SEQ ID NO: 2665; WAN024GHK_at; Start 79; Stop 103
ctggcagttacactgataaaatggg

SEQ ID NO: 245783 - DNA, 25 bp, Artificial
  probe
  misc_feature (1)..(25): SEQ ID NO: 2665; WAN024GHK_at; Start 196; Stop 220
gtttggcgtgacatatgtaataacc

SEQ ID NO: 245784 - DNA, 25 bp, Artificial
  probe
  misc_feature (1)..(25): SEQ ID NO: 2665; WAN024GHK_at; Start 112; Stop 136
tcctgcatatcctgcaaggctgaaa

SEQ ID NO: 245785 - DNA, 25 bp, Artificial
  probe
  misc_feature (1)..(25): SEQ ID NO: 2665; WAN024GHK_at; Start 27; Stop 51
gataaagtcagccaaacgaaccgtc

SEQ ID NO: 245786 - DNA, 25 bp, Artificial
  probe
  misc_feature (1)..(25): SEQ ID NO: 2665; WAN024GHK_at; Start 77; Stop 101
tgctggcagttacactgataaaatg

SEQ ID NO: 245787 - DNA, 25 bp, Artificial
  probe
  misc_feature (1)..(25): SEQ ID NO: 2665; WAN024GHK_at; Start 171; Stop 195
gaacacttcaaatgagagtgacggt

SEQ ID NO: 245788 - DNA, 25 bp, Artificial
  probe
  misc_feature (1)..(25): SEQ ID NO: 2665; WAN024GHK_at; Start 60; Stop 84
gatattaaatttattattgctggca

SEQ ID NO: 245789 - DNA, 25 bp, Artificial
  probe
  misc_feature (1)..(25): SEQ ID NO: 2665; WAN024GHK_at; Start 137; Stop 161
taatgttatcattacccacggctgg

SEQ ID NO: 245790 - DNA, 25 bp, Artificial
  probe
  misc_feature (1)..(25): SEQ ID NO: 2665; WAN024GHK_at; Start 3; Stop 27
ggtcggaatcgccaaatcattttgg

SEQ ID NO: 245791 - DNA, 25 bp, Artificial
  probe
  misc_feature (1)..(25): SEQ ID NO: 2665; WAN024GHK_at; Start 106; Stop 130
gccaactcctgcatatcctgcaagg

SEQ ID NO: 245792 - DNA, 25 bp, Artificial
  probe
  misc_feature (1)..(25): SEQ ID NO: 2665; WAN024GHK_at; Start 199; Stop 223
tggcgtgacatatgtaataaccttt

SEQ ID NO: 245793 - DNA, 25 bp, Artificial
  probe
  misc_feature (1)..(25): SEQ ID NO: 2665; WAN024GHK_at; Start 115; Stop 139
tgcatatcctgcaaggctgaaataa

SEQ ID NO: 245794 - DNA, 25 bp, Artificial
  probe
  misc_feature (1)..(25): SEQ ID NO: 2665; WAN024GHK_at; Start 119; Stop 143
tatcctgcaaggctgaaataatgtt

SEQ ID NO: 245795 - DNA, 25 bp, Artificial
  probe
  misc_feature (1)..(25): SEQ ID NO: 2665; WAN024GHK_at; Start 174; Stop 198
cacttcaaatgagagtgacggtgtt

SEQ ID NO: 245796 - DNA, 25 bp, Artificial
  probe
  misc_feature (1)..(25): SEQ ID NO: 2665; WAN024GHK_at; Start 167; Stop 191
gagggaacacttcaaatgagagtga

SEQ ID NO: 245797 - DNA, 25 bp, Artificial
  probe
  misc_feature (1)..(25): SEQ ID NO: 2665; WAN024GHK_at; Start 20; Stop 44
cattttggataaagtcagccaaacg

SEQ ID NO: 245798 - DNA, 25 bp, Artificial
  probe
  misc_feature (1)..(25): SEQ ID NO: 2665; WAN024GHK_at; Start 6; Stop 30
cggaatcgccaaatcattttggata

SEQ ID NO: 245799 - DNA, 25 bp, Artificial
  probe
  misc_feature (1)..(25): SEQ ID NO: 2665; WAN024GHK_at; Start 204; Stop 228
tgacatatgtaataaccttttctag

SEQ ID NO: 245800 - DNA, 25 bp, Artificial
  probe
  misc_feature (1)..(25): SEQ ID NO: 2665; WAN024GHK_at; Start 102; Stop 126
gggagccaactcctgcatatcctgc

SEQ ID NO: 245801 - DNA, 25 bp, Artificial
  probe
  misc_feature (1)..(25): SEQ ID NO: 2665; WAN024GHK_at; Start 25; Stop 49
tggataaagtcagccaaacgaaccg

SEQ ID NO: 245802 - DNA, 25 bp, Artificial
  probe
  misc_feature (1)..(25): SEQ ID NO: 2665; WAN024GHK_at; Start 138; Stop 162
aatgttatcattacccacggctggg

SEQ ID NO: 245803 - DNA, 25 bp, Artificial
  probe
  misc_feature (1)..(25): SEQ ID NO: 2665; WAN024GHK_at; Start 164; Stop 188
ttggagggaacacttcaaatgagag

SEQ ID NO: 245804 - DNA, 25 bp, Artificial
  probe
  misc_feature (1)..(25): SEQ ID NO: 2665; WAN024GHK_at; Start 28; Stop 52
ataaagtcagccaaacgaaccgtcg

SEQ ID NO: 245805 - DNA, 25 bp, Artificial
  probe
  misc_feature (1)..(25): SEQ ID NO: 2665; WAN024GHK_at; Start 87; Stop 111
tacactgataaaatggggagccaac

SEQ ID NO: 245806 - DNA, 25 bp, Artificial
  probe
  misc_feature (1)..(25): SEQ ID NO: 2852; WAN024GHL_at; Start 497; Stop 521
gcctcgtaactcagctcttctttga

SEQ ID NO: 245807 - DNA, 25 bp, Artificial
  probe
  misc_feature (1)..(25): SEQ ID NO: 2852; WAN024GHL_at; Start 158; Stop 182
cgacggttcgtttggctgactttat

SEQ ID NO: 245808 - DNA, 25 bp, Artificial
  probe
  misc_feature (1)..(25): SEQ ID NO: 2852; WAN024GHL_at; Start 211; Stop 235
gcccacttgccagctatttatctaa

SEQ ID NO: 245809 - DNA, 25 bp, Artificial
  probe
  misc_feature (1)..(25): SEQ ID NO: 2852; WAN024GHL_at; Start 677; Stop 701
tcttagacaagtatgagcatgaccc

SEQ ID NO: 245810 - DNA, 25 bp, Artificial
  probe
  misc_feature (1)..(25): SEQ ID NO: 2852; WAN024GHL_at; Start 658; Stop 682
ccacgcaaatttaaagccatcttag

SEQ ID NO: 245811 - DNA, 25 bp, Artificial
  probe
  misc_feature (1)..(25): SEQ ID NO: 2852; WAN024GHL_at; Start 109; Stop 133
cattttatcagtgtaactgccagca

SEQ ID NO: 245812 - DNA, 25 bp, Artificial
  probe
  misc_feature (1)..(25): SEQ ID NO: 2852; WAN024GHL_at; Start 229; Stop 253
tatctaactaaggacaaggttgctg

SEQ ID NO: 245813 - DNA, 25 bp, Artificial
  probe
  misc_feature (1)..(25): SEQ ID NO: 2852; WAN024GHL_at; Start 465; Stop 489
tcttaagaagaaagtggatgcaggc

SEQ ID NO: 245814 - DNA, 25 bp, Artificial
  probe
  misc_feature (1)..(25): SEQ ID NO: 2852; WAN024GHL_at; Start 772; Stop 796
gccggtgtgcatctctatacgatga

SEQ ID NO: 245815 - DNA, 25 bp, Artificial
  probe
  misc_feature (1)..(25): SEQ ID NO: 2852; WAN024GHL_at; Start 258; Stop 282
tattgctgacttggacaaagttggg

SEQ ID NO: 245816 - DNA, 25 bp, Artificial
  probe
  misc_feature (1)..(25): SEQ ID NO: 2852; WAN024GHL_at; Start 66; Stop 90
taacattatttcagccttgcaggat

SEQ ID NO: 245817 - DNA, 25 bp, Artificial
  probe
  misc_feature (1)..(25): SEQ ID NO: 2852; WAN024GHL_at; Start 340; Stop 364
gatttccgctatgcaaccgacttga

SEQ ID NO: 245818 - DNA, 25 bp, Artificial
  probe
  misc_feature (1)..(25): SEQ ID NO: 2852; WAN024GHL_at; Start 789; Stop 813
tacgatgaataatgctgatacagca

SEQ ID NO: 245819 - DNA, 25 bp, Artificial
  probe
  misc_feature (1)..(25): SEQ ID NO: 2852; WAN024GHL_at; Start 838; Stop 862
gccttgtttaatcaccagtctctag

SEQ ID NO: 245820 - DNA, 25 bp, Artificial
  probe
  misc_feature (1)..(25): SEQ ID NO: 2852; WAN024GHL_at; Start 706; Stop 730
tcgctcagagcagcaggacttgcct

SEQ ID NO: 245821 - DNA, 25 bp, Artificial
  probe
  misc_feature (1)..(25): SEQ ID NO: 2852; WAN024GHL_at; Start 526; Stop 550
gagcgcttctatgattttcaggaca

SEQ ID NO: 245822 - DNA, 25 bp, Artificial
  probe
  misc_feature (1)..(25): SEQ ID NO: 2852; WAN024GHL_at; Start 643; Stop 667
gagaatatccatcttccacgcaaat

SEQ ID NO: 245823 - DNA, 25 bp, Artificial
  probe
  misc_feature (1)..(25): SEQ ID NO: 2852; WAN024GHL_at; Start 328; Stop 352
gaaccacaaaaggatttccgctatg

SEQ ID NO: 245824 - DNA, 25 bp, Artificial
  probe
  misc_feature (1)..(25): SEQ ID NO: 2852; WAN024GHL_at; Start 21; Stop 45
actctcatttgaagtgttccctcca

SEQ ID NO: 245825 - DNA, 25 bp, Artificial
  probe
  misc_feature (1)..(25): SEQ ID NO: 2852; WAN024GHL_at; Start 814; Stop 838
aaatacatccatcaagcaacccatg

SEQ ID NO: 245826 - DNA, 25 bp, Artificial
  probe
  misc_feature (1)..(25): SEQ ID NO: 2852; WAN024GHL_at; Start 567; Stop 591
gattgatgttcccattcatgcagga

SEQ ID NO: 245827 - DNA, 25 bp, Artificial
  probe
  misc_feature (1)..(25): SEQ ID NO: 2852; WAN024GHL_at; Start 419; Stop 443
cagaagggcatccagattcgccaaa

SEQ ID NO: 245828 - DNA, 25 bp, Artificial
  probe
  misc_feature (1)..(25): SEQ ID NO: 2852; WAN024GHL_at; Start 628; Stop 652
ctcttgaagacttgtgagaatatcc

SEQ ID NO: 245829 - DNA, 25 bp, Artificial
  probe
  misc_feature (1)..(25): SEQ ID NO: 2852; WAN024GHL_at; Start 243; Stop 267
caaggttgctgaaactattgctgac

SEQ ID NO: 245830 - DNA, 25 bp, Artificial
  probe
  misc_feature (1)..(25): SEQ ID NO: 2852; WAN024GHL_at; Start 97; Stop 121
gagttggctccccattttatcagtg

SEQ ID NO: 245831 - DNA, 25 bp, Artificial
  probe
  misc_feature (1)..(25): SEQ ID NO: 2852; WAN024GHL_at; Start 596; Stop 620
tgccaattctgaatcgaaatcaggc

SEQ ID NO: 245832 - DNA, 25 bp, Artificial
  probe
  misc_feature (1)..(25): SEQ ID NO: 2852; WAN024GHL_at; Start 404; Stop 428
ttggagcttgctatccagaagggca

SEQ ID NO: 245833 - DNA, 25 bp, Artificial
  probe
  misc_feature (1)..(25): SEQ ID NO: 2852; WAN024GHL_at; Start 742; Stop 766
caaatcgtggacttggtaactcagg

SEQ ID NO: 245834 - DNA, 25 bp, Artificial
  probe
  misc_feature (1)..(25): SEQ ID NO: 2852; WAN024GHL_at; Start 481; Stop 505
gatgcaggctgttcgagcctcgtaa

SEQ ID NO: 245835 - DNA, 25 bp, Artificial
  probe
  misc_feature (1)..(25): SEQ ID NO: 2852; WAN024GHL_at; Start 195; Stop 219
ggcgattccgaccattgcccacttg

SEQ ID NO: 245836 - DNA, 25 bp, Artificial
  probe
  misc_feature (1)..(25): SEQ ID NO: 2852; WAN024GHL_at; Start 611; Stop 635
gaaatcaggctctccgactcttgaa

SEQ ID NO: 245837 - DNA, 25 bp, Artificial
  probe
  misc_feature (1)..(25): SEQ ID NO: 2852; WAN024GHL_at; Start 285; Stop 309
gcagaaaatcttggctcttcgtggg

SEQ ID NO: 245838 - DNA, 25 bp, Artificial
  probe
  misc_feature (1)..(25): SEQ ID NO: 2852; WAN024GHL_at; Start 721; Stop 745
ggacttgcctatgcagtggaccaaa

SEQ ID NO: 245839 - DNA, 25 bp, Artificial
  probe
  misc_feature (1)..(25): SEQ ID NO: 2852; WAN024GHL_at; Start 83; Stop 107
tgcaggatatgcaggagttggctcc

SEQ ID NO: 245840 - DNA, 25 bp, Artificial
  probe
  misc_feature (1)..(25): SEQ ID NO: 4014; WAN024GHM_at; Start 153; Stop 177
tgtagttgacatgatgtgtcctcca

SEQ ID NO: 245841 - DNA, 25 bp, Artificial
  probe
  misc_feature (1)..(25): SEQ ID NO: 4014; WAN024GHM_at; Start 139; Stop 163
gggaaaccgatgattgtagttgaca

SEQ ID NO: 245842 - DNA, 25 bp, Artificial
  probe
  misc_feature (1)..(25): SEQ ID NO: 4014; WAN024GHM_at; Start 167; Stop 191
tgtgtcctccaaaatttgttgttga

SEQ ID NO: 245843 - DNA, 25 bp, Artificial
  probe
  misc_feature (1)..(25): SEQ ID NO: 4014; WAN024GHM_at; Start 131; Stop 155
ccaaacgagggaaaccgatgattgt

SEQ ID NO: 245844 - DNA, 25 bp, Artificial
  probe
  misc_feature (1)..(25): SEQ ID NO: 4014; WAN024GHM_at; Start 195; Stop 219
tatcttaacagaaaagaaagcgtct

SEQ ID NO: 245845 - DNA, 25 bp, Artificial
  probe
  misc_feature (1)..(25): SEQ ID NO: 4014; WAN024GHM_at; Start 201; Stop 225
aacagaaaagaaagcgtctgtataa

SEQ ID NO: 245846 - DNA, 25 bp, Artificial
  probe
  misc_feature (1)..(25): SEQ ID NO: 4014; WAN024GHM_at; Start 130; Stop 154
cccaaacgagggaaaccgatgattg

SEQ ID NO: 245847 - DNA, 25 bp, Artificial
  probe
  misc_feature (1)..(25): SEQ ID NO: 4014; WAN024GHM_at; Start 164; Stop 188
tgatgtgtcctccaaaatttgttgt

SEQ ID NO: 245848 - DNA, 25 bp, Artificial
  probe
  misc_feature (1)..(25): SEQ ID NO: 4014; WAN024GHM_at; Start 149; Stop 173
tgattgtagttgacatgatgtgtcc

SEQ ID NO: 245849 - DNA, 25 bp, Artificial
  probe
  misc_feature (1)..(25): SEQ ID NO: 4014; WAN024GHM_at; Start 24; Stop 48
gttccagtgtttagcacgcaagtct

SEQ ID NO: 245850 - DNA, 25 bp, Artificial
  probe
  misc_feature (1)..(25): SEQ ID NO: 4014; WAN024GHM_at; Start 127; Stop 151
tcgcccaaacgagggaaaccgatga

SEQ ID NO: 245851 - DNA, 25 bp, Artificial
  probe
  misc_feature (1)..(25): SEQ ID NO: 4014; WAN024GHM_at; Start 23; Stop 47
tgttccagtgtttagcacgcaagtc

SEQ ID NO: 245852 - DNA, 25 bp, Artificial
  probe
  misc_feature (1)..(25): SEQ ID NO: 4014; WAN024GHM_at; Start 199; Stop 223
ttaacagaaaagaaagcgtctgtat

SEQ ID NO: 245853 - DNA, 25 bp, Artificial
  probe
  misc_feature (1)..(25): SEQ ID NO: 4014; WAN024GHM_at; Start 136; Stop 160
cgagggaaaccgatgattgtagttg

SEQ ID NO: 245854 - DNA, 25 bp, Artificial
  probe
  misc_feature (1)..(25): SEQ ID NO: 4014; WAN024GHM_at; Start 115; Stop 139
aattcacggaattcgcccaaacgag

SEQ ID NO: 245855 - DNA, 25 bp, Artificial
  probe
  misc_feature (1)..(25): SEQ ID NO: 4014; WAN024GHM_at; Start 132; Stop 156
caaacgagggaaaccgatgattgta

SEQ ID NO: 245856 - DNA, 25 bp, Artificial
  probe
  misc_feature (1)..(25): SEQ ID NO: 4014; WAN024GHM_at; Start 174; Stop 198
tccaaaatttgttgttgaaactatc

SEQ ID NO: 245857 - DNA, 25 bp, Artificial
  probe
  misc_feature (1)..(25): SEQ ID NO: 4014; WAN024GHM_at; Start 28; Stop 52
cagtgtttagcacgcaagtcttttg

SEQ ID NO: 245858 - DNA, 25 bp, Artificial
  probe
  misc_feature (1)..(25): SEQ ID NO: 4014; WAN024GHM_at; Start 26; Stop 50
tccagtgtttagcacgcaagtcttt

SEQ ID NO: 245859 - DNA, 25 bp, Artificial
  probe
  misc_feature (1)..(25): SEQ ID NO: 4014; WAN024GHM_at; Start 162; Stop 186
catgatgtgtcctccaaaatttgtt

SEQ ID NO: 245860 - DNA, 25 bp, Artificial
  probe
  misc_feature (1)..(25): SEQ ID NO: 4014; WAN024GHM_at; Start 114; Stop 138
taattcacggaattcgcccaaacga

SEQ ID NO: 245861 - DNA, 25 bp, Artificial
  probe
  misc_feature (1)..(25): SEQ ID NO: 4014; WAN024GHM_at; Start 197; Stop 221
tcttaacagaaaagaaagcgtctgt

SEQ ID NO: 245862 - DNA, 25 bp, Artificial
  probe
  misc_feature (1)..(25): SEQ ID NO: 4014; WAN024GHM_at; Start 157; Stop 181
gttgacatgatgtgtcctccaaaat

SEQ ID NO: 245863 - DNA, 25 bp, Artificial
  probe
  misc_feature (1)..(25): SEQ ID NO: 4014; WAN024GHM_at; Start 145; Stop 169
ccgatgattgtagttgacatgatgt

SEQ ID NO: 245864 - DNA, 25 bp, Artificial
  probe
  misc_feature (1)..(25): SEQ ID NO: 4014; WAN024GHM_at; Start 64; Stop 88
agttcttcttctgagatttcttttc

SEQ ID NO: 245865 - DNA, 25 bp, Artificial
  probe
  misc_feature (1)..(25): SEQ ID NO: 4014; WAN024GHM_at; Start 160; Stop 184
gacatgatgtgtcctccaaaatttg

SEQ ID NO: 245866 - DNA, 25 bp, Artificial
  probe
  misc_feature (1)..(25): SEQ ID NO: 4014; WAN024GHM_at; Start 155; Stop 179
tagttgacatgatgtgtcctccaaa

SEQ ID NO: 245867 - DNA, 25 bp, Artificial
  probe
  misc_feature (1)..(25): SEQ ID NO: 4014; WAN024GHM_at; Start 133; Stop 157
aaacgagggaaaccgatgattgtag

SEQ ID NO: 245868 - DNA, 25 bp, Artificial
  probe
  misc_feature (1)..(25): SEQ ID NO: 4014; WAN024GHM_at; Start 186; Stop 210
tgttgaaactatcttaacagaaaag

SEQ ID NO: 245869 - DNA, 25 bp, Artificial
  probe
  misc_feature (1)..(25): SEQ ID NO: 4014; WAN024GHM_at; Start 142; Stop 166
aaaccgatgattgtagttgacatga

SEQ ID NO: 245870 - DNA, 25 bp, Artificial
  probe
  misc_feature (1)..(25): SEQ ID NO: 4014; WAN024GHM_at; Start 116; Stop 140
attcacggaattcgcccaaacgagg

SEQ ID NO: 245871 - DNA, 25 bp, Artificial
  probe
  misc_feature (1)..(25): SEQ ID NO: 4014; WAN024GHM_at; Start 100; Stop 124
tcagttgtaaattttaattcacgga

SEQ ID NO: 245872 - DNA, 25 bp, Artificial
  probe
  misc_feature (1)..(25): SEQ ID NO: 4014; WAN024GHM_at; Start 141; Stop 165
gaaaccgatgattgtagttgacatg

SEQ ID NO: 245873 - DNA, 25 bp, Artificial
  probe
  misc_feature (1)..(25): SEQ ID NO: 4014; WAN024GHM_at; Start 71; Stop 95
cttctgagatttcttttctaaagta

SEQ ID NO: 245874 - DNA, 25 bp, Artificial
  probe
  misc_feature (1)..(25): SEQ ID NO: 4957; WAN024GHN_at; Start 202; Stop 226
accacgtcccaaagcgaagtagcgc

SEQ ID NO: 245875 - DNA, 25 bp, Artificial
  probe
  misc_feature (1)..(25): SEQ ID NO: 4957; WAN024GHN_at; Start 217; Stop 241
gaagtagcgctcaaggtcagacaag

SEQ ID NO: 245876 - DNA, 25 bp, Artificial
  probe
  misc_feature (1)..(25): SEQ ID NO: 4957; WAN024GHN_at; Start 36; Stop 60
gagtgttcaatccaagttctttggc

SEQ ID NO: 245877 - DNA, 25 bp, Artificial
  probe
  misc_feature (1)..(25): SEQ ID NO: 4957; WAN024GHN_at; Start 155; Stop 179
catttcttcattggaagggcgcgaa

SEQ ID NO: 245878 - DNA, 25 bp, Artificial
  probe
  misc_feature (1)..(25): SEQ ID NO: 4957; WAN024GHN_at; Start 207; Stop 231
gtcccaaagcgaagtagcgctcaag

SEQ ID NO: 245879 - DNA, 25 bp, Artificial
  probe
  misc_feature (1)..(25): SEQ ID NO: 4957; WAN024GHN_at; Start 228; Stop 252
caaggtcagacaagtccaagttttg

SEQ ID NO: 245880 - DNA, 25 bp, Artificial
  probe
  misc_feature (1)..(25): SEQ ID NO: 4957; WAN024GHN_at; Start 261; Stop 285
caggcaccacgttgaaaaggaaagc

SEQ ID NO: 245881 - DNA, 25 bp, Artificial
  probe
  misc_feature (1)..(25): SEQ ID NO: 4957; WAN024GHN_at; Start 267; Stop 291
ccacgttgaaaaggaaagccgcatc

SEQ ID NO: 245882 - DNA, 25 bp, Artificial
  probe
  misc_feature (1)..(25): SEQ ID NO: 4957; WAN024GHN_at; Start 151; Stop 175
gaaccatttcttcattggaagggcg

SEQ ID NO: 245883 - DNA, 25 bp, Artificial
  probe
  misc_feature (1)..(25): SEQ ID NO: 4957; WAN024GHN_at; Start 200; Stop 224
taaccacgtcccaaagcgaagtagc

SEQ ID NO: 245884 - DNA, 25 bp, Artificial
  probe
  misc_feature (1)..(25): SEQ ID NO: 4957; WAN024GHN_at; Start 12; Stop 36
tgaagggacctacaagaacaggacg

SEQ ID NO: 245885 - DNA, 25 bp, Artificial
  probe
  misc_feature (1)..(25): SEQ ID NO: 4957; WAN024GHN_at; Start 215; Stop 239
gcgaagtagcgctcaaggtcagaca

SEQ ID NO: 245886 - DNA, 25 bp, Artificial
  probe
  misc_feature (1)..(25): SEQ ID NO: 4957; WAN024GHN_at; Start 231; Stop 255
ggtcagacaagtccaagttttgaac

SEQ ID NO: 245887 - DNA, 25 bp, Artificial
  probe
  misc_feature (1)..(25): SEQ ID NO: 4957; WAN024GHN_at; Start 116; Stop 140
tcaaatttaggaacgatgtagtggt

SEQ ID NO: 245888 - DNA, 25 bp, Artificial
  probe
  misc_feature (1)..(25): SEQ ID NO: 4957; WAN024GHN_at; Start 211; Stop 235
caaagcgaagtagcgctcaaggtca

SEQ ID NO: 245889 - DNA, 25 bp, Artificial
  probe
  misc_feature (1)..(25): SEQ ID NO: 4957; WAN024GHN_at; Start 257; Stop 281
gatgcaggcaccacgttgaaaagga

SEQ ID NO: 245890 - DNA, 25 bp, Artificial
  probe
  misc_feature (1)..(25): SEQ ID NO: 4957; WAN024GHN_at; Start 265; Stop 289
caccacgttgaaaaggaaagccgca

SEQ ID NO: 245891 - DNA, 25 bp, Artificial
  probe
  misc_feature (1)..(25): SEQ ID NO: 4957; WAN024GHN_at; Start 144; Stop 168
tagtgttgaaccatttcttcattgg

SEQ ID NO: 245892 - DNA, 25 bp, Artificial
  probe
  misc_feature (1)..(25): SEQ ID NO: 4957; WAN024GHN_at; Start 30; Stop 54
caggacgagtgttcaatccaagttc

SEQ ID NO: 245893 - DNA, 25 bp, Artificial
  probe
  misc_feature (1)..(25): SEQ ID NO: 4957; WAN024GHN_at; Start 42; Stop 66
tcaatccaagttctttggcttcttg

SEQ ID NO: 245894 - DNA, 25 bp, Artificial
  probe
  misc_feature (1)..(25): SEQ ID NO: 4957; WAN024GHN_at; Start 221; Stop 245
tagcgctcaaggtcagacaagtcca

SEQ ID NO: 245895 - DNA, 25 bp, Artificial
  probe
  misc_feature (1)..(25): SEQ ID NO: 4957; WAN024GHN_at; Start 33; Stop 57
gacgagtgttcaatccaagttcttt

SEQ ID NO: 245896 - DNA, 25 bp, Artificial
  probe
  misc_feature (1)..(25): SEQ ID NO: 4957; WAN024GHN_at; Start 270; Stop 294
cgttgaaaaggaaagccgcatctag

SEQ ID NO: 245897 - DNA, 25 bp, Artificial
  probe
  misc_feature (1)..(25): SEQ ID NO: 4957; WAN024GHN_at; Start 24; Stop 48
caagaacaggacgagtgttcaatcc

SEQ ID NO: 245898 - DNA, 25 bp, Artificial
  probe
  misc_feature (1)..(25): SEQ ID NO: 4957; WAN024GHN_at; Start 259; Stop 283
tgcaggcaccacgttgaaaaggaaa

SEQ ID NO: 245899 - DNA, 25 bp, Artificial
  probe
  misc_feature (1)..(25): SEQ ID NO: 4957; WAN024GHN_at; Start 20; Stop 44
cctacaagaacaggacgagtgttca

SEQ ID NO: 245900 - DNA, 25 bp, Artificial
  probe
  misc_feature (1)..(25): SEQ ID NO: 4957; WAN024GHN_at; Start 17; Stop 41
ggacctacaagaacaggacgagtgt

SEQ ID NO: 245901 - DNA, 25 bp, Artificial
  probe
  misc_feature (1)..(25): SEQ ID NO: 4957; WAN024GHN_at; Start 27; Stop 51
gaacaggacgagtgttcaatccaag

SEQ ID NO: 245902 - DNA, 25 bp, Artificial
  probe
  misc_feature (1)..(25): SEQ ID NO: 4957; WAN024GHN_at; Start 196; Stop 220
ctggtaaccacgtcccaaagcgaag

SEQ ID NO: 245903 - DNA, 25 bp, Artificial
  probe
  misc_feature (1)..(25): SEQ ID NO: 4957; WAN024GHN_at; Start 7; Stop 31
gaaagtgaagggacctacaagaaca

SEQ ID NO: 245904 - DNA, 25 bp, Artificial
  probe
  misc_feature (1)..(25): SEQ ID NO: 4957; WAN024GHN_at; Start 2; Stop 26
tgaaggaaagtgaagggacctacaa

SEQ ID NO: 245905 - DNA, 25 bp, Artificial
  probe
  misc_feature (1)..(25): SEQ ID NO: 4957; WAN024GHN_at; Start 159; Stop 183
tcttcattggaagggcgcgaacgtc

SEQ ID NO: 245906 - DNA, 25 bp, Artificial
  probe
  misc_feature (1)..(25): SEQ ID NO: 4957; WAN024GHN_at; Start 225; Stop 249
gctcaaggtcagacaagtccaagtt

SEQ ID NO: 245907 - DNA, 25 bp, Artificial
  probe
  misc_feature (1)..(25): SEQ ID NO: 4957; WAN024GHN_at; Start 129; Stop 153
cgatgtagtggtagttagtgttgaa

SEQ ID NO: 245908 - DNA, 25 bp, Artificial
  probe
  misc_feature (1)..(25): SEQ ID NO: 5447; WAN024GHO_at; Start 1324; Stop 1348
gaaaatgctgaacttcgtgcgcgta

SEQ ID NO: 245909 - DNA, 25 bp, Artificial
  probe
  misc_feature (1)..(25): SEQ ID NO: 5447; WAN024GHO_at; Start 913; Stop 937
gatgttcgtgacgtatacgctgacc

SEQ ID NO: 245910 - DNA, 25 bp, Artificial
  probe
  misc_feature (1)..(25): SEQ ID NO: 5447; WAN024GHO_at; Start 2124; Stop 2148
tatcgataacatggatgcagacgtt

SEQ ID NO: 245911 - DNA, 25 bp, Artificial
  probe
  misc_feature (1)..(25): SEQ ID NO: 5447; WAN024GHO_at; Start 2407; Stop 2431
aaagctgcgcgtgagaaattgtaac

SEQ ID NO: 245912 - DNA, 25 bp, Artificial
  probe
  misc_feature (1)..(25): SEQ ID NO: 5447; WAN024GHO_at; Start 1667; Stop 1691
tcttctctaaaaatggatgggtaca

SEQ ID NO: 245913 - DNA, 25 bp, Artificial
  probe
  misc_feature (1)..(25): SEQ ID NO: 5447; WAN024GHO_at; Start 439; Stop 463
ttgtctgaccttgagcgctacttcg

SEQ ID NO: 245914 - DNA, 25 bp, Artificial
  probe
  misc_feature (1)..(25): SEQ ID NO: 5447; WAN024GHO_at; Start 1005; Stop 1029
taaaggtggcttcccagctgacaag

SEQ ID NO: 245915 - DNA, 25 bp, Artificial
  probe
  misc_feature (1)..(25): SEQ ID NO: 5447; WAN024GHO_at; Start 1768; Stop 1792
tggtctagctatgcacaaagtcgta

SEQ ID NO: 245916 - DNA, 25 bp, Artificial
  probe
  misc_feature (1)..(25): SEQ ID NO: 5447; WAN024GHO_at; Start 2319; Stop 2343
gaaagtttggatcaaccctgactgt

SEQ ID NO: 245917 - DNA, 25 bp, Artificial
  probe
  misc_feature (1)..(25): SEQ ID NO: 5447; WAN024GHO_at; Start 1293; Stop 1317
caaagaactctttgcgactgagcgt

SEQ ID NO: 245918 - DNA, 25 bp, Artificial
  probe
  misc_feature (1)..(25): SEQ ID NO: 5447; WAN024GHO_at; Start 2248; Stop 2272
tcacctcgtgtaccaaatgaaggcg

SEQ ID NO: 245919 - DNA, 25 bp, Artificial
  probe
  misc_feature (1)..(25): SEQ ID NO: 5447; WAN024GHO_at; Start 676; Stop 700
caattgtcagactttgaagaaggcg

SEQ ID NO: 245920 - DNA, 25 bp, Artificial
  probe
  misc_feature (1)..(25): SEQ ID NO: 5447; WAN024GHO_at; Start 2178; Stop 2202
tgaaatcttggacgaactcaaagcg

SEQ ID NO: 245921 - DNA, 25 bp, Artificial
  probe
  misc_feature (1)..(25): SEQ ID NO: 5447; WAN024GHO_at; Start 1369; Stop 1393
gactacactcgtttgccagcctttg

SEQ ID NO: 245922 - DNA, 25 bp, Artificial
  probe
  misc_feature (1)..(25): SEQ ID NO: 5447; WAN024GHO_at; Start 863; Stop 887
tcttggctgacaaaaaaggtcttga

SEQ ID NO: 245923 - DNA, 25 bp, Artificial
  probe
  misc_feature (1)..(25): SEQ ID NO: 5447; WAN024GHO_at; Start 1267; Stop 1291
caaggttcagaagctcttgcagcca

SEQ ID NO: 245924 - DNA, 25 bp, Artificial
  probe
  misc_feature (1)..(25): SEQ ID NO: 5447; WAN024GHO_at; Start 690; Stop 714
tgaagaaggcgtgaaagcagacgac

SEQ ID NO: 245925 - DNA, 25 bp, Artificial
  probe
  misc_feature (1)..(25): SEQ ID NO: 5447; WAN024GHO_at; Start 1393; Stop 1417
gcagaacgtgaagctatccaagaag

SEQ ID NO: 245926 - DNA, 25 bp, Artificial
  probe
  misc_feature (1)..(25): SEQ ID NO: 5447; WAN024GHO_at; Start 1200; Stop 1224
gaaccactttgcctttgcagttgaa

SEQ ID NO: 245927 - DNA, 25 bp, Artificial
  probe
  misc_feature (1)..(25): SEQ ID NO: 5447; WAN024GHO_at; Start 1173; Stop 1197
taatgaagaatttgaaccagcactc

SEQ ID NO: 245928 - DNA, 25 bp, Artificial
  probe
  misc_feature (1)..(25): SEQ ID NO: 5447; WAN024GHO_at; Start 205; Stop 229
cctcgtttgggcgaattccgtgaat

SEQ ID NO: 245929 - DNA, 25 bp, Artificial
  probe
  misc_feature (1)..(25): SEQ ID NO: 5447; WAN024GHO_at; Start 1637; Stop 1661
agtacttcggtcaaaacttgtcagg

SEQ ID NO: 245930 - DNA, 25 bp, Artificial
  probe
  misc_feature (1)..(25): SEQ ID NO: 5447; WAN024GHO_at; Start 1839; Stop 1863
taactggtcattcccacgtgaagac

SEQ ID NO: 245931 - DNA, 25 bp, Artificial
  probe
  misc_feature (1)..(25): SEQ ID NO: 5447; WAN024GHO_at; Start 2345; Stop 2369
gtttgaaaacacgtggtatcccaga

SEQ ID NO: 245932 - DNA, 25 bp, Artificial
  probe
  misc_feature (1)..(25): SEQ ID NO: 5447; WAN024GHO_at; Start 295; Stop 319
aaagacttgcgtgctaaacactgga

SEQ ID NO: 245933 - DNA, 25 bp, Artificial
  probe
  misc_feature (1)..(25): SEQ ID NO: 5447; WAN024GHO_at; Start 2208; Stop 2232
cttccaaacagaagtgggacctggg

SEQ ID NO: 245934 - DNA, 25 bp, Artificial
  probe
  misc_feature (1)..(25): SEQ ID NO: 5447; WAN024GHO_at; Start 2385; Stop 2409
gatccgccttgttgaagcagctaaa

SEQ ID NO: 245935 - DNA, 25 bp, Artificial
  probe
  misc_feature (1)..(25): SEQ ID NO: 5447; WAN024GHO_at; Start 455; Stop 479
gctacttcgctttgggacgtggtta

SEQ ID NO: 245936 - DNA, 25 bp, Artificial
  probe
  misc_feature (1)..(25): SEQ ID NO: 5447; WAN024GHO_at; Start 1682; Stop 1706
gatgggtacaatcatacggtatgcg

SEQ ID NO: 245937 - DNA, 25 bp, Artificial
  probe
  misc_feature (1)..(25): SEQ ID NO: 5447; WAN024GHO_at; Start 2290; Stop 2314
gaagccatccttgctaaagtgccaa

SEQ ID NO: 245938 - DNA, 25 bp, Artificial
  probe
  misc_feature (1)..(25): SEQ ID NO: 5447; WAN024GHO_at; Start 1341; Stop 1365
tgcgcgtatcgctggcttgacagac

SEQ ID NO: 245939 - DNA, 25 bp, Artificial
  probe
  misc_feature (1)..(25): SEQ ID NO: 5447; WAN024GHO_at; Start 785; Stop 809
tccaattggatgaagcggctcttgt

SEQ ID NO: 245940 - DNA, 25 bp, Artificial
  probe
  misc_feature (1)..(25): SEQ ID NO: 5447; WAN024GHO_at; Start 1927; Stop 1951
gaagctgctggtgtgaaaatcatcc

SEQ ID NO: 245941 - DNA, 25 bp, Artificial
  probe
  misc_feature (1)..(25): SEQ ID NO: 5447; WAN024GHO_at; Start 1960; Stop 1984
gaggctgctcttcgtgaaaaattgc

SEQ ID NO: 245942 - DNA, 25 bp, Artificial
  probe
  misc_feature (1)..(25): SEQ ID NO: 5456; WAN024GHP_at; Start 18; Stop 42
caagttcctctttcaaaaggtggca

SEQ ID NO: 245943 - DNA, 25 bp, Artificial
  probe
  misc_feature (1)..(25): SEQ ID NO: 5456; WAN024GHP_at; Start 34; Stop 58
aaggtggcagtgcatttaatgcgtc

SEQ ID NO: 245944 - DNA, 25 bp, Artificial
  probe
  misc_feature (1)..(25): SEQ ID NO: 5456; WAN024GHP_at; Start 26; Stop 50
tctttcaaaaggtggcagtgcattt

SEQ ID NO: 245945 - DNA, 25 bp, Artificial
  probe
  misc_feature (1)..(25): SEQ ID NO: 5456; WAN024GHP_at; Start 40; Stop 64
gcagtgcatttaatgcgtccctatg

SEQ ID NO: 245946 - DNA, 25 bp, Artificial
  probe
  misc_feature (1)..(25): SEQ ID NO: 5456; WAN024GHP_at; Start 61; Stop 85
tatgagagcttatttttgcaagtgc

SEQ ID NO: 245947 - DNA, 25 bp, Artificial
  probe
  misc_feature (1)..(25): SEQ ID NO: 5456; WAN024GHP_at; Start 4; Stop 28
gactttggctattccaagttcctct

SEQ ID NO: 245948 - DNA, 25 bp, Artificial
  probe
  misc_feature (1)..(25): SEQ ID NO: 5456; WAN024GHP_at; Start 19; Stop 43
aagttcctctttcaaaaggtggcag

SEQ ID NO: 245949 - DNA, 25 bp, Artificial
  probe
  misc_feature (1)..(25): SEQ ID NO: 5456; WAN024GHP_at; Start 44; Stop 68
tgcatttaatgcgtccctatgagag

SEQ ID NO: 245950 - DNA, 25 bp, Artificial
  probe
  misc_feature (1)..(25): SEQ ID NO: 5456; WAN024GHP_at; Start 31; Stop 55
caaaaggtggcagtgcatttaatgc

SEQ ID NO: 245951 - DNA, 25 bp, Artificial
  probe
  misc_feature (1)..(25): SEQ ID NO: 5456; WAN024GHP_at; Start 79; Stop 103
caagtgctccatgacgcactaacta

SEQ ID NO: 245952 - DNA, 25 bp, Artificial
  probe
  misc_feature (1)..(25): SEQ ID NO: 5456; WAN024GHP_at; Start 46; Stop 70
catttaatgcgtccctatgagagct

SEQ ID NO: 245953 - DNA, 25 bp, Artificial
  probe
  misc_feature (1)..(25): SEQ ID NO: 5456; WAN024GHP_at; Start 54; Stop 78
gcgtccctatgagagcttatttttg

SEQ ID NO: 245954 - DNA, 25 bp, Artificial
  probe
  misc_feature (1)..(25): SEQ ID NO: 5456; WAN024GHP_at; Start 25; Stop 49
ctctttcaaaaggtggcagtgcatt

SEQ ID NO: 245955 - DNA, 25 bp, Artificial
  probe
  misc_feature (1)..(25): SEQ ID NO: 5456; WAN024GHP_at; Start 23; Stop 47
tcctctttcaaaaggtggcagtgca

SEQ ID NO: 245956 - DNA, 25 bp, Artificial
  probe
  misc_feature (1)..(25): SEQ ID NO: 5456; WAN024GHP_at; Start 38; Stop 62
tggcagtgcatttaatgcgtcccta

SEQ ID NO: 245957 - DNA, 25 bp, Artificial
  probe
  misc_feature (1)..(25): SEQ ID NO: 5456; WAN024GHP_at; Start 51; Stop 75
aatgcgtccctatgagagcttattt

SEQ ID NO: 245958 - DNA, 25 bp, Artificial
  probe
  misc_feature (1)..(25): SEQ ID NO: 5456; WAN024GHP_at; Start 50; Stop 74
taatgcgtccctatgagagcttatt

SEQ ID NO: 245959 - DNA, 25 bp, Artificial
  probe
  misc_feature (1)..(25): SEQ ID NO: 5456; WAN024GHP_at; Start 2; Stop 26
tggactttggctattccaagttcct

SEQ ID NO: 245960 - DNA, 25 bp, Artificial
  probe
  misc_feature (1)..(25): SEQ ID NO: 5456; WAN024GHP_at; Start 48; Stop 72
tttaatgcgtccctatgagagctta

SEQ ID NO: 245961 - DNA, 25 bp, Artificial
  probe
  misc_feature (1)..(25): SEQ ID NO: 5456; WAN024GHP_at; Start 21; Stop 45
gttcctctttcaaaaggtggcagtg

SEQ ID NO: 245962 - DNA, 25 bp, Artificial
  probe
  misc_feature (1)..(25): SEQ ID NO: 5456; WAN024GHP_at; Start 71; Stop 95
tatttttgcaagtgctccatgacgc

SEQ ID NO: 245963 - DNA, 25 bp, Artificial
  probe
  misc_feature (1)..(25): SEQ ID NO: 5456; WAN024GHP_at; Start 73; Stop 97
tttttgcaagtgctccatgacgcac

SEQ ID NO: 245964 - DNA, 25 bp, Artificial
  probe
  misc_feature (1)..(25): SEQ ID NO: 5456; WAN024GHP_at; Start 58; Stop 82
ccctatgagagcttatttttgcaag

SEQ ID NO: 245965 - DNA, 25 bp, Artificial
  probe
  misc_feature (1)..(25): SEQ ID NO: 5456; WAN024GHP_at; Start 56; Stop 80
gtccctatgagagcttatttttgca

SEQ ID NO: 245966 - DNA, 25 bp, Artificial
  probe
  misc_feature (1)..(25): SEQ ID NO: 5456; WAN024GHP_at; Start 81; Stop 105
agtgctccatgacgcactaactaat

SEQ ID NO: 245967 - DNA, 25 bp, Artificial
  probe
  misc_feature (1)..(25): SEQ ID NO: 5456; WAN024GHP_at; Start 77; Stop 101
tgcaagtgctccatgacgcactaac

SEQ ID NO: 245968 - DNA, 25 bp, Artificial
  probe
  misc_feature (1)..(25): SEQ ID NO: 5456; WAN024GHP_at; Start 36; Stop 60
ggtggcagtgcatttaatgcgtccc

SEQ ID NO: 245969 - DNA, 25 bp, Artificial
  probe
  misc_feature (1)..(25): SEQ ID NO: 5456; WAN024GHP_at; Start 27; Stop 51
ctttcaaaaggtggcagtgcattta

SEQ ID NO: 245970 - DNA, 25 bp, Artificial
  probe
  misc_feature (1)..(25): SEQ ID NO: 5456; WAN024GHP_at; Start 75; Stop 99
tttgcaagtgctccatgacgcacta

SEQ ID NO: 245971 - DNA, 25 bp, Artificial
  probe
  misc_feature (1)..(25): SEQ ID NO: 5456; WAN024GHP_at; Start 45; Stop 69
gcatttaatgcgtccctatgagagc

SEQ ID NO: 245972 - DNA, 25 bp, Artificial
  probe
  misc_feature (1)..(25): SEQ ID NO: 5456; WAN024GHP_at; Start 64; Stop 88
gagagcttatttttgcaagtgctcc

SEQ ID NO: 245973 - DNA, 25 bp, Artificial
  probe
  misc_feature (1)..(25): SEQ ID NO: 5456; WAN024GHP_at; Start 24; Stop 48
cctctttcaaaaggtggcagtgcat

SEQ ID NO: 245974 - DNA, 25 bp, Artificial
  probe
  misc_feature (1)..(25): SEQ ID NO: 5456; WAN024GHP_at; Start 42; Stop 66
agtgcatttaatgcgtccctatgag

SEQ ID NO: 245975 - DNA, 25 bp, Artificial
  probe
  misc_feature (1)..(25): SEQ ID NO: 5456; WAN024GHP_at; Start 68; Stop 92
gcttatttttgcaagtgctccatga

SEQ ID NO: 245976 - DNA, 25 bp, Artificial
  probe
  misc_feature (1)..(25): SEQ ID NO: 1773; WAN024GHQ_at; Start 466; Stop 490
catcaagttggactttctatggcca

SEQ ID NO: 245977 - DNA, 25 bp, Artificial
  probe
  misc_feature (1)..(25): SEQ ID NO: 1773; WAN024GHQ_at; Start 742; Stop 766
tatccaaaggctattattgcaggtg

SEQ ID NO: 245978 - DNA, 25 bp, Artificial
  probe
  misc_feature (1)..(25): SEQ ID NO: 1773; WAN024GHQ_at; Start 118; Stop 142
gcacagatttatgccttccccttag

SEQ ID NO: 245979 - DNA, 25 bp, Artificial
  probe
  misc_feature (1)..(25): SEQ ID NO: 1773; WAN024GHQ_at; Start 7; Stop 31
aaaacatttctctctgccctttcgg

SEQ ID NO: 245980 - DNA, 25 bp, Artificial
  probe
  misc_feature (1)..(25): SEQ ID NO: 1773; WAN024GHQ_at; Start 727; Stop 751
caattggcttcaaaatatccaaagg

SEQ ID NO: 245981 - DNA, 25 bp, Artificial
  probe
  misc_feature (1)..(25): SEQ ID NO: 1773; WAN024GHQ_at; Start 670; Stop 694
cctcctctgccaggtttaatggaaa

SEQ ID NO: 245982 - DNA, 25 bp, Artificial
  probe
  misc_feature (1)..(25): SEQ ID NO: 1773; WAN024GHQ_at; Start 684; Stop 708
tttaatggaaatctggaagcaagac

SEQ ID NO: 245983 - DNA, 25 bp, Artificial
  probe
  misc_feature (1)..(25): SEQ ID NO: 1773; WAN024GHQ_at; Start 134; Stop 158
tccccttagctactgcaactatggc

SEQ ID NO: 245984 - DNA, 25 bp, Artificial
  probe
  misc_feature (1)..(25): SEQ ID NO: 1773; WAN024GHQ_at; Start 851; Stop 875
gaggaacttggaatagccaaagtcc

SEQ ID NO: 245985 - DNA, 25 bp, Artificial
  probe
  misc_feature (1)..(25): SEQ ID NO: 1773; WAN024GHQ_at; Start 771; Stop 795
taatgcaactatgcgtcatggagca

SEQ ID NO: 245986 - DNA, 25 bp, Artificial
  probe
  misc_feature (1)..(25): SEQ ID NO: 1773; WAN024GHQ_at; Start 347; Stop 371
tagaagcacaacatattgagcgaat

SEQ ID NO: 245987 - DNA, 25 bp, Artificial
  probe
  misc_feature (1)..(25): SEQ ID NO: 1773; WAN024GHQ_at; Start 695; Stop 719
tctggaagcaagacttaaacatcat

SEQ ID NO: 245988 - DNA, 25 bp, Artificial
  probe
  misc_feature (1)..(25): SEQ ID NO: 1773; WAN024GHQ_at; Start 391; Stop 415
gatatggctatattccctgaactag

SEQ ID NO: 245989 - DNA, 25 bp, Artificial
  probe
  misc_feature (1)..(25): SEQ ID NO: 1773; WAN024GHQ_at; Start 320; Stop 344
tagtaacttggaacgtcgctaatca

SEQ ID NO: 245990 - DNA, 25 bp, Artificial
  probe
  misc_feature (1)..(25): SEQ ID NO: 1773; WAN024GHQ_at; Start 330; Stop 354
gaacgtcgctaatcaaatagaagca

SEQ ID NO: 245991 - DNA, 25 bp, Artificial
  probe
  misc_feature (1)..(25): SEQ ID NO: 1773; WAN024GHQ_at; Start 637; Stop 661
aatataccagatatcattgccttgc

SEQ ID NO: 245992 - DNA, 25 bp, Artificial
  probe
  misc_feature (1)..(25): SEQ ID NO: 1773; WAN024GHQ_at; Start 710; Stop 734
taaacatcattcataatcaattggc

SEQ ID NO: 245993 - DNA, 25 bp, Artificial
  probe
  misc_feature (1)..(25): SEQ ID NO: 1773; WAN024GHQ_at; Start 592; Stop 616
catacaacacggttcgggacaattg

SEQ ID NO: 245994 - DNA, 25 bp, Artificial
  probe
  misc_feature (1)..(25): SEQ ID NO: 1773; WAN024GHQ_at; Start 622; Stop 646
cattcgagaaaacaaaatataccag

SEQ ID NO: 245995 - DNA, 25 bp, Artificial
  probe
  misc_feature (1)..(25): SEQ ID NO: 1773; WAN024GHQ_at; Start 761; Stop 785
caggtgattttaatgcaactatgcg

SEQ ID NO: 245996 - DNA, 25 bp, Artificial
  probe
  misc_feature (1)..(25): SEQ ID NO: 1773; WAN024GHQ_at; Start 439; Stop 463
gaaaaccagagaatcaaactattgt

SEQ ID NO: 245997 - DNA, 25 bp, Artificial
  probe
  misc_feature (1)..(25): SEQ ID NO: 1773; WAN024GHQ_at; Start 532; Stop 556
gctcctgtgactgtgattgtcaaga

SEQ ID NO: 245998 - DNA, 25 bp, Artificial
  probe
  misc_feature (1)..(25): SEQ ID NO: 1773; WAN024GHQ_at; Start 496; Stop 520
gatattttcacttctccacctacca

SEQ ID NO: 245999 - DNA, 25 bp, Artificial
  probe
  misc_feature (1)..(25): SEQ ID NO: 1773; WAN024GHQ_at; Start 786; Stop 810
tcatggagcacttgcaaaaataagc

SEQ ID NO: 246000 - DNA, 25 bp, Artificial
  probe
  misc_feature (1)..(25): SEQ ID NO: 1773; WAN024GHQ_at; Start 908; Stop 932
tattgcctaaaaaccactactatgt

SEQ ID NO: 246001 - DNA, 25 bp, Artificial
  probe
  misc_feature (1)..(25): SEQ ID NO: 1773; WAN024GHQ_at; Start 516; Stop 540
taccaatagtggaatagctcctgtg

SEQ ID NO: 246002 - DNA, 25 bp, Artificial
  probe
  misc_feature (1)..(25): SEQ ID NO: 1773; WAN024GHQ_at; Start 209; Stop 233
aacaaatacggttttactctggcat

SEQ ID NO: 246003 - DNA, 25 bp, Artificial
  probe
  misc_feature (1)..(25): SEQ ID NO: 1773; WAN024GHQ_at; Start 579; Stop 603
agctaaaacttttcatacaacacgg

SEQ ID NO: 246004 - DNA, 25 bp, Artificial
  probe
  misc_feature (1)..(25): SEQ ID NO: 1773; WAN024GHQ_at; Start 607; Stop 631
gggacaattgtattacattcgagaa

SEQ ID NO: 246005 - DNA, 25 bp, Artificial
  probe
  misc_feature (1)..(25): SEQ ID NO: 1773; WAN024GHQ_at; Start 423; Stop 447
tatcagaggtgagcaagaaaaccag

SEQ ID NO: 246006 - DNA, 25 bp, Artificial
  probe
  misc_feature (1)..(25): SEQ ID NO: 1773; WAN024GHQ_at; Start 481; Stop 505
tctatggccaactatgatattttca

SEQ ID NO: 246007 - DNA, 25 bp, Artificial
  probe
  misc_feature (1)..(25): SEQ ID NO: 1773; WAN024GHQ_at; Start 409; Stop 433
gaactagctaccaatatcagaggtg

SEQ ID NO: 246008 - DNA, 25 bp, Artificial
  probe
  misc_feature (1)..(25): SEQ ID NO: 1773; WAN024GHQ_at; Start 557; Stop 581
aaagttatggtttctatacagaagc

SEQ ID NO: 246009 - DNA, 25 bp, Artificial
  probe
  misc_feature (1)..(25): SEQ ID NO: 1773; WAN024GHQ_at; Start 800; Stop 824
caaaaataagctctcatagggacgc

SEQ ID NO: 246010 - DNA, 25 bp, Artificial
  probe
  misc_feature (1)..(25): SEQ ID NO: 802; WAN024GHR_at; Start 197; Stop 221
ctggttcatctgacaagggatatgc

SEQ ID NO: 246011 - DNA, 25 bp, Artificial
  probe
  misc_feature (1)..(25): SEQ ID NO: 802; WAN024GHR_at; Start 268; Stop 292
gagaaagttgcattctactataatg

SEQ ID NO: 246012 - DNA, 25 bp, Artificial
  probe
  misc_feature (1)..(25): SEQ ID NO: 802; WAN024GHR_at; Start 153; Stop 177
tcacccttcaaaataccatagttca

SEQ ID NO: 246013 - DNA, 25 bp, Artificial
  probe
  misc_feature (1)..(25): SEQ ID NO: 802; WAN024GHR_at; Start 191; Stop 215
gaaaaactggttcatctgacaaggg

SEQ ID NO: 246014 - DNA, 25 bp, Artificial
  probe
  misc_feature (1)..(25): SEQ ID NO: 802; WAN024GHR_at; Start 182; Stop 206
ttgttagcagaaaaactggttcatc

SEQ ID NO: 246015 - DNA, 25 bp, Artificial
  probe
  misc_feature (1)..(25): SEQ ID NO: 802; WAN024GHR_at; Start 84; Stop 108
cgttcaatacccagaaggtggtgtt

SEQ ID NO: 246016 - DNA, 25 bp, Artificial
  probe
  misc_feature (1)..(25): SEQ ID NO: 802; WAN024GHR_at; Start 174; Stop 198
ttcaacagttgttagcagaaaaact

SEQ ID NO: 246017 - DNA, 25 bp, Artificial
  probe
  misc_feature (1)..(25): SEQ ID NO: 802; WAN024GHR_at; Start 36; Stop 60
gagcattgcagcaacattaggtgga

SEQ ID NO: 246018 - DNA, 25 bp, Artificial
  probe
  misc_feature (1)..(25): SEQ ID NO: 802; WAN024GHR_at; Start 264; Stop 288
gggagagaaagttgcattctactat

SEQ ID NO: 246019 - DNA, 25 bp, Artificial
  probe
  misc_feature (1)..(25): SEQ ID NO: 802; WAN024GHR_at; Start 113; Stop 137
cttatggttcaggtaacggtggtgc

SEQ ID NO: 246020 - DNA, 25 bp, Artificial
  probe
  misc_feature (1)..(25): SEQ ID NO: 802; WAN024GHR_at; Start 120; Stop 144
ttcaggtaacggtggtgcttactca

SEQ ID NO: 246021 - DNA, 25 bp, Artificial
  probe
  misc_feature (1)..(25): SEQ ID NO: 802; WAN024GHR_at; Start 93; Stop 117
cccagaaggtggtgtttggacttat

SEQ ID NO: 246022 - DNA, 25 bp, Artificial
  probe
  misc_feature (1)..(25): SEQ ID NO: 802; WAN024GHR_at; Start 217; Stop 241
tatgctggtgctggagggacttctc

SEQ ID NO: 246023 - DNA, 25 bp, Artificial
  probe
  misc_feature (1)..(25): SEQ ID NO: 802; WAN024GHR_at; Start 88; Stop 112
caatacccagaaggtggtgtttgga

SEQ ID NO: 246024 - DNA, 25 bp, Artificial
  probe
  misc_feature (1)..(25): SEQ ID NO: 802; WAN024GHR_at; Start 109; Stop 133
tggacttatggttcaggtaacggtg

SEQ ID NO: 246025 - DNA, 25 bp, Artificial
  probe
  misc_feature (1)..(25): SEQ ID NO: 802; WAN024GHR_at; Start 160; Stop 184
tcaaaataccatagttcaacagttg

SEQ ID NO: 246026 - DNA, 25 bp, Artificial
  probe
  misc_feature (1)..(25): SEQ ID NO: 802; WAN024GHR_at; Start 247; Stop 271
tggattcgtacttcttggggagaga

SEQ ID NO: 246027 - DNA, 25 bp, Artificial
  probe
  misc_feature (1)..(25): SEQ ID NO: 802; WAN024GHR_at; Start 129; Stop 153
cggtggtgcttactcaaactactat

SEQ ID NO: 246028 - DNA, 25 bp, Artificial
  probe
  misc_feature (1)..(25): SEQ ID NO: 802; WAN024GHR_at; Start 122; Stop 146
caggtaacggtggtgcttactcaaa

SEQ ID NO: 246029 - DNA, 25 bp, Artificial
  probe
  misc_feature (1)..(25): SEQ ID NO: 802; WAN024GHR_at; Start 115; Stop 139
tatggttcaggtaacggtggtgctt

SEQ ID NO: 246030 - DNA, 25 bp, Artificial
  probe
  misc_feature (1)..(25): SEQ ID NO: 802; WAN024GHR_at; Start 135; Stop 159
tgcttactcaaactactatcaccct

SEQ ID NO: 246031 - DNA, 25 bp, Artificial
  probe
  misc_feature (1)..(25): SEQ ID NO: 802; WAN024GHR_at; Start 131; Stop 155
gtggtgcttactcaaactactatca

SEQ ID NO: 246032 - DNA, 25 bp, Artificial
  probe
  misc_feature (1)..(25): SEQ ID NO: 802; WAN024GHR_at; Start 126; Stop 150
taacggtggtgcttactcaaactac

SEQ ID NO: 246033 - DNA, 25 bp, Artificial
  probe
  misc_feature (1)..(25): SEQ ID NO: 802; WAN024GHR_at; Start 22; Stop 46
ttagctcttgtagcgagcattgcag

SEQ ID NO: 246034 - DNA, 25 bp, Artificial
  probe
  misc_feature (1)..(25): SEQ ID NO: 802; WAN024GHR_at; Start 99; Stop 123
aggtggtgtttggacttatggttca

SEQ ID NO: 246035 - DNA, 25 bp, Artificial
  probe
  misc_feature (1)..(25): SEQ ID NO: 802; WAN024GHR_at; Start 203; Stop 227
catctgacaagggatatgctggtgc

SEQ ID NO: 246036 - DNA, 25 bp, Artificial
  probe
  misc_feature (1)..(25): SEQ ID NO: 802; WAN024GHR_at; Start 168; Stop 192
ccatagttcaacagttgttagcaga

SEQ ID NO: 246037 - DNA, 25 bp, Artificial
  probe
  misc_feature (1)..(25): SEQ ID NO: 802; WAN024GHR_at; Start 27; Stop 51
tcttgtagcgagcattgcagcaaca

SEQ ID NO: 246038 - DNA, 25 bp, Artificial
  probe
  misc_feature (1)..(25): SEQ ID NO: 802; WAN024GHR_at; Start 142; Stop 166
tcaaactactatcacccttcaaaat

SEQ ID NO: 246039 - DNA, 25 bp, Artificial
  probe
  misc_feature (1)..(25): SEQ ID NO: 802; WAN024GHR_at; Start 32; Stop 56
tagcgagcattgcagcaacattagg

SEQ ID NO: 246040 - DNA, 25 bp, Artificial
  probe
  misc_feature (1)..(25): SEQ ID NO: 802; WAN024GHR_at; Start 194; Stop 218
aaactggttcatctgacaagggata

SEQ ID NO: 246041 - DNA, 25 bp, Artificial
  probe
  misc_feature (1)..(25): SEQ ID NO: 802; WAN024GHR_at; Start 200; Stop 224
gttcatctgacaagggatatgctgg

SEQ ID NO: 246042 - DNA, 25 bp, Artificial
  probe
  misc_feature (1)..(25): SEQ ID NO: 802; WAN024GHR_at; Start 205; Stop 229
tctgacaagggatatgctggtgctg

SEQ ID NO: 246043 - DNA, 25 bp, Artificial
  probe
  misc_feature (1)..(25): SEQ ID NO: 802; WAN024GHR_at; Start 25; Stop 49
gctcttgtagcgagcattgcagcaa

SEQ ID NO: 246044 - DNA, 25 bp, Artificial
  probe
  misc_feature (1)..(25): SEQ ID NO: 1972; WAN024GHS_at; Start 27; Stop 51
gacacgcggtaccatccgttttcat

SEQ ID NO: 246045 - DNA, 25 bp, Artificial
  probe
  misc_feature (1)..(25): SEQ ID NO: 1972; WAN024GHS_at; Start 6; Stop 30
aaaaactccactcggagcgttgaca

SEQ ID NO: 246046 - DNA, 25 bp, Artificial
  probe
  misc_feature (1)..(25): SEQ ID NO: 1972; WAN024GHS_at; Start 56; Stop 80
caagtcagaccttcatttctaaatc

SEQ ID NO: 246047 - DNA, 25 bp, Artificial
  probe
  misc_feature (1)..(25): SEQ ID NO: 1972; WAN024GHS_at; Start 63; Stop 87
gaccttcatttctaaatccatgcgc

SEQ ID NO: 246048 - DNA, 25 bp, Artificial
  probe
  misc_feature (1)..(25): SEQ ID NO: 1972; WAN024GHS_at; Start 3; Stop 27
gccaaaaactccactcggagcgttg

SEQ ID NO: 246049 - DNA, 25 bp, Artificial
  probe
  misc_feature (1)..(25): SEQ ID NO: 1972; WAN024GHS_at; Start 18; Stop 42
cggagcgttgacacgcggtaccatc

SEQ ID NO: 246050 - DNA, 25 bp, Artificial
  probe
  misc_feature (1)..(25): SEQ ID NO: 1972; WAN024GHS_at; Start 8; Stop 32
aaactccactcggagcgttgacacg

SEQ ID NO: 246051 - DNA, 25 bp, Artificial
  probe
  misc_feature (1)..(25): SEQ ID NO: 1972; WAN024GHS_at; Start 5; Stop 29
caaaaactccactcggagcgttgac

SEQ ID NO: 246052 - DNA, 25 bp, Artificial
  probe
  misc_feature (1)..(25): SEQ ID NO: 1972; WAN024GHS_at; Start 15; Stop 39
actcggagcgttgacacgcggtacc

SEQ ID NO: 246053 - DNA, 25 bp, Artificial
  probe
  misc_feature (1)..(25): SEQ ID NO: 1972; WAN024GHS_at; Start 26; Stop 50
tgacacgcggtaccatccgttttca

SEQ ID NO: 246054 - DNA, 25 bp, Artificial
  probe
  misc_feature (1)..(25): SEQ ID NO: 1972; WAN024GHS_at; Start 23; Stop 47
cgttgacacgcggtaccatccgttt

SEQ ID NO: 246055 - DNA, 25 bp, Artificial
  probe
  misc_feature (1)..(25): SEQ ID NO: 1972; WAN024GHS_at; Start 41; Stop 65
tccgttttcatctgacaagtcagac

SEQ ID NO: 246056 - DNA, 25 bp, Artificial
  probe
  misc_feature (1)..(25): SEQ ID NO: 1972; WAN024GHS_at; Start 51; Stop 75
tctgacaagtcagaccttcatttct

SEQ ID NO: 246057 - DNA, 25 bp, Artificial
  probe
  misc_feature (1)..(25): SEQ ID NO: 1972; WAN024GHS_at; Start 25; Stop 49
ttgacacgcggtaccatccgttttc

SEQ ID NO: 246058 - DNA, 25 bp, Artificial
  probe
  misc_feature (1)..(25): SEQ ID NO: 1972; WAN024GHS_at; Start 9; Stop 33
aactccactcggagcgttgacacgc

SEQ ID NO: 246059 - DNA, 25 bp, Artificial
  probe
  misc_feature (1)..(25): SEQ ID NO: 1972; WAN024GHS_at; Start 39; Stop 63
catccgttttcatctgacaagtcag

SEQ ID NO: 246060 - DNA, 25 bp, Artificial
  probe
  misc_feature (1)..(25): SEQ ID NO: 1972; WAN024GHS_at; Start 36; Stop 60
taccatccgttttcatctgacaagt

SEQ ID NO: 246061 - DNA, 25 bp, Artificial
  probe
  misc_feature (1)..(25): SEQ ID NO: 1972; WAN024GHS_at; Start 17; Stop 41
tcggagcgttgacacgcggtaccat

SEQ ID NO: 246062 - DNA, 25 bp, Artificial
  probe
  misc_feature (1)..(25): SEQ ID NO: 1972; WAN024GHS_at; Start 2; Stop 26
tgccaaaaactccactcggagcgtt

SEQ ID NO: 246063 - DNA, 25 bp, Artificial
  probe
  misc_feature (1)..(25): SEQ ID NO: 1972; WAN024GHS_at; Start 34; Stop 58
ggtaccatccgttttcatctgacaa

SEQ ID NO: 246064 - DNA, 25 bp, Artificial
  probe
  misc_feature (1)..(25): SEQ ID NO: 1972; WAN024GHS_at; Start 13; Stop 37
ccactcggagcgttgacacgcggta

SEQ ID NO: 246065 - DNA, 25 bp, Artificial
  probe
  misc_feature (1)..(25): SEQ ID NO: 1972; WAN024GHS_at; Start 66; Stop 90
cttcatttctaaatccatgcgcaag

SEQ ID NO: 246066 - DNA, 25 bp, Artificial
  probe
  misc_feature (1)..(25): SEQ ID NO: 1972; WAN024GHS_at; Start 62; Stop 86
agaccttcatttctaaatccatgcg

SEQ ID NO: 246067 - DNA, 25 bp, Artificial
  probe
  misc_feature (1)..(25): SEQ ID NO: 1972; WAN024GHS_at; Start 46; Stop 70
tttcatctgacaagtcagaccttca

SEQ ID NO: 246068 - DNA, 25 bp, Artificial
  probe
  misc_feature (1)..(25): SEQ ID NO: 1972; WAN024GHS_at; Start 1; Stop 25
atgccaaaaactccactcggagcgt

SEQ ID NO: 246069 - DNA, 25 bp, Artificial
  probe
  misc_feature (1)..(25): SEQ ID NO: 1972; WAN024GHS_at; Start 54; Stop 78
gacaagtcagaccttcatttctaaa

SEQ ID NO: 246070 - DNA, 25 bp, Artificial
  probe
  misc_feature (1)..(25): SEQ ID NO: 1972; WAN024GHS_at; Start 33; Stop 57
cggtaccatccgttttcatctgaca

SEQ ID NO: 246071 - DNA, 25 bp, Artificial
  probe
  misc_feature (1)..(25): SEQ ID NO: 1972; WAN024GHS_at; Start 19; Stop 43
ggagcgttgacacgcggtaccatcc

SEQ ID NO: 246072 - DNA, 25 bp, Artificial
  probe
  misc_feature (1)..(25): SEQ ID NO: 1972; WAN024GHS_at; Start 58; Stop 82
agtcagaccttcatttctaaatcca

SEQ ID NO: 246073 - DNA, 25 bp, Artificial
  probe
  misc_feature (1)..(25): SEQ ID NO: 1972; WAN024GHS_at; Start 14; Stop 38
cactcggagcgttgacacgcggtac

SEQ ID NO: 246074 - DNA, 25 bp, Artificial
  probe
  misc_feature (1)..(25): SEQ ID NO: 1972; WAN024GHS_at; Start 12; Stop 36
tccactcggagcgttgacacgcggt

SEQ ID NO: 246075 - DNA, 25 bp, Artificial
  probe
  misc_feature (1)..(25): SEQ ID NO: 1972; WAN024GHS_at; Start 35; Stop 59
gtaccatccgttttcatctgacaag

SEQ ID NO: 246076 - DNA, 25 bp, Artificial
  probe
  misc_feature (1)..(25): SEQ ID NO: 1972; WAN024GHS_at; Start 30; Stop 54
acgcggtaccatccgttttcatctg

SEQ ID NO: 246077 - DNA, 25 bp, Artificial
  probe
  misc_feature (1)..(25): SEQ ID NO: 1972; WAN024GHS_at; Start 43; Stop 67
cgttttcatctgacaagtcagacct

SEQ ID NO: 246078 - DNA, 25 bp, Artificial
  probe
  misc_feature (1)..(25): SEQ ID NO: 5599; WAN024GHT_at; Start 741; Stop 765
gagccgcgactttcttttcttccaa

SEQ ID NO: 246079 - DNA, 25 bp, Artificial
  probe
  misc_feature (1)..(25): SEQ ID NO: 5599; WAN024GHT_at; Start 440; Stop 464
cctttagaaaaatcatgggcatcca

SEQ ID NO: 246080 - DNA, 25 bp, Artificial
  probe
  misc_feature (1)..(25): SEQ ID NO: 5599; WAN024GHT_at; Start 851; Stop 875
gaaacatctttcatccctttgagga

SEQ ID NO: 246081 - DNA, 25 bp, Artificial
  probe
  misc_feature (1)..(25): SEQ ID NO: 5599; WAN024GHT_at; Start 77; Stop 101
ccagagtatacagtcgcatcgatac

SEQ ID NO: 246082 - DNA, 25 bp, Artificial
  probe
  misc_feature (1)..(25): SEQ ID NO: 5599; WAN024GHT_at; Start 878; Stop 902
tcagtgagcgaaccctttttaccaa

SEQ ID NO: 246083 - DNA, 25 bp, Artificial
  probe
  misc_feature (1)..(25): SEQ ID NO: 5599; WAN024GHT_at; Start 576; Stop 600
caaagttatagtagtcttgctccac

SEQ ID NO: 246084 - DNA, 25 bp, Artificial
  probe
  misc_feature (1)..(25): SEQ ID NO: 5599; WAN024GHT_at; Start 318; Stop 342
gatcagccatagagatatttttccc

SEQ ID NO: 246085 - DNA, 25 bp, Artificial
  probe
  misc_feature (1)..(25): SEQ ID NO: 5599; WAN024GHT_at; Start 392; Stop 416
tccgtatcgcgacggaagacacgcc

SEQ ID NO: 246086 - DNA, 25 bp, Artificial
  probe
  misc_feature (1)..(25): SEQ ID NO: 5599; WAN024GHT_at; Start 28; Stop 52
tccataacggagcatagctacacgc

SEQ ID NO: 246087 - DNA, 25 bp, Artificial
  probe
  misc_feature (1)..(25): SEQ ID NO: 5599; WAN024GHT_at; Start 489; Stop 513
tgtgggtacggagcaagatttcttc

SEQ ID NO: 246088 - DNA, 25 bp, Artificial
  probe
  misc_feature (1)..(25): SEQ ID NO: 5599; WAN024GHT_at; Start 523; Stop 547
gaaagtatcctgcatatcacgagct

SEQ ID NO: 246089 - DNA, 25 bp, Artificial
  probe
  misc_feature (1)..(25): SEQ ID NO: 5599; WAN024GHT_at; Start 539; Stop 563
tcacgagctgggtggtcttttggaa

SEQ ID NO: 246090 - DNA, 25 bp, Artificial
  probe
  misc_feature (1)..(25): SEQ ID NO: 5599; WAN024GHT_at; Start 287; Stop 311
ttttggacaatcaactgaagcgttc

SEQ ID NO: 246091 - DNA, 25 bp, Artificial
  probe
  misc_feature (1)..(25): SEQ ID NO: 5599; WAN024GHT_at; Start 690; Stop 714
tcgcaactggacgacctggaagcgt

SEQ ID NO: 246092 - DNA, 25 bp, Artificial
  probe
  misc_feature (1)..(25): SEQ ID NO: 5599; WAN024GHT_at; Start 206; Stop 230
gaaacatccacctcaacagatggct

SEQ ID NO: 246093 - DNA, 25 bp, Artificial
  probe
  misc_feature (1)..(25): SEQ ID NO: 5599; WAN024GHT_at; Start 419; Stop 443
ggcgagatcatcttcaaaggacctt

SEQ ID NO: 246094 - DNA, 25 bp, Artificial
  probe
  misc_feature (1)..(25): SEQ ID NO: 5599; WAN024GHT_at; Start 112; Stop 136
aaggacacgtgggtgaaccataccg

SEQ ID NO: 246095 - DNA, 25 bp, Artificial
  probe
  misc_feature (1)..(25): SEQ ID NO: 5599; WAN024GHT_at; Start 724; Stop 748
actctcgctagccagttgagccgcg

SEQ ID NO: 246096 - DNA, 25 bp, Artificial
  probe
  misc_feature (1)..(25): SEQ ID NO: 5599; WAN024GHT_at; Start 894; Stop 918
ttttaccaaggacagagacacgcaa

SEQ ID NO: 246097 - DNA, 25 bp, Artificial
  probe
  misc_feature (1)..(25): SEQ ID NO: 5599; WAN024GHT_at; Start 303; Stop 327
gaagcgttccttgaagatcagccat

SEQ ID NO: 246098 - DNA, 25 bp, Artificial
  probe
  misc_feature (1)..(25): SEQ ID NO: 5599; WAN024GHT_at; Start 1014; Stop 1038
tatttcctccatcagtctctcgtag

SEQ ID NO: 246099 - DNA, 25 bp, Artificial
  probe
  misc_feature (1)..(25): SEQ ID NO: 5599; WAN024GHT_at; Start 248; Stop 272
gatggacgcaaacgaatttgacgct

SEQ ID NO: 246100 - DNA, 25 bp, Artificial
  probe
  misc_feature (1)..(25): SEQ ID NO: 5599; WAN024GHT_at; Start 349; Stop 373
caagccttcgatttggtggaattgg

SEQ ID NO: 246101 - DNA, 25 bp, Artificial
  probe
  misc_feature (1)..(25): SEQ ID NO: 5599; WAN024GHT_at; Start 866; Stop 890
cctttgaggatttcagtgagcgaac

SEQ ID NO: 246102 - DNA, 25 bp, Artificial
  probe
  misc_feature (1)..(25): SEQ ID NO: 5599; WAN024GHT_at; Start 465; Stop 489
tagcacgcgcctgaactggagacgt

SEQ ID NO: 246103 - DNA, 25 bp, Artificial
  probe
  misc_feature (1)..(25): SEQ ID NO: 5599; WAN024GHT_at; Start 222; Stop 246
cagatggctctgtgaatgggaagta

SEQ ID NO: 246104 - DNA, 25 bp, Artificial
  probe
  misc_feature (1)..(25): SEQ ID NO: 5599; WAN024GHT_at; Start 670; Stop 694
caaaacgtgacggtgaccagtcgca

SEQ ID NO: 246105 - DNA, 25 bp, Artificial
  probe
  misc_feature (1)..(25): SEQ ID NO: 5599; WAN024GHT_at; Start 832; Stop 856
gattggacgcatctcagcagaaaca

SEQ ID NO: 246106 - DNA, 25 bp, Artificial
  probe
  misc_feature (1)..(25): SEQ ID NO: 5599; WAN024GHT_at; Start 817; Stop 841
gacgtgtttcccgatgattggacgc

SEQ ID NO: 246107 - DNA, 25 bp, Artificial
  probe
  misc_feature (1)..(25): SEQ ID NO: 5599; WAN024GHT_at; Start 375; Stop 399
gactgtgggtcgcatcgtccgtatc

SEQ ID NO: 246108 - DNA, 25 bp, Artificial
  probe
  misc_feature (1)..(25): SEQ ID NO: 5599; WAN024GHT_at; Start 616; Stop 640
gacttgataacccataccgatgaag

SEQ ID NO: 246109 - DNA, 25 bp, Artificial
  probe
  misc_feature (1)..(25): SEQ ID NO: 5599; WAN024GHT_at; Start 796; Stop 820
caagacatcacgagcttcattgacg

SEQ ID NO: 246110 - DNA, 25 bp, Artificial
  probe
  misc_feature (1)..(25): SEQ ID NO: 5599; WAN024GHT_at; Start 51; Stop 75
gctcttgtccaagaccaaaggcaaa

SEQ ID NO: 246111 - DNA, 25 bp, Artificial
  probe
  misc_feature (1)..(25): SEQ ID NO: 5599; WAN024GHT_at; Start 97; Stop 121
gataccactcatttcaaggacacgt

SEQ ID NO: 246112 - DNA, 25 bp, Artificial
  probe
  misc_feature (1)..(25): SEQ ID NO: 2630; WAN024GHU_at; Start 980; Stop 1004
tccttgaaatgagtggtatcgatgc

SEQ ID NO: 246113 - DNA, 25 bp, Artificial
  probe
  misc_feature (1)..(25): SEQ ID NO: 2630; WAN024GHU_at; Start 617; Stop 641
ttcaggcgcgtgctatggatgccca

SEQ ID NO: 246114 - DNA, 25 bp, Artificial
  probe
  misc_feature (1)..(25): SEQ ID NO: 2630; WAN024GHU_at; Start 194; Stop 218
ttggtaaaaagggttcgctcactga

SEQ ID NO: 246115 - DNA, 25 bp, Artificial
  probe
  misc_feature (1)..(25): SEQ ID NO: 2630; WAN024GHU_at; Start 963; Stop 987
tatggttcacccacgtgtccttgaa

SEQ ID NO: 246116 - DNA, 25 bp, Artificial
  probe
  misc_feature (1)..(25): SEQ ID NO: 2630; WAN024GHU_at; Start 766; Stop 790
tctatggctgatcttcaaggaacgc

SEQ ID NO: 246117 - DNA, 25 bp, Artificial
  probe
  misc_feature (1)..(25): SEQ ID NO: 2630; WAN024GHU_at; Start 486; Stop 510
tggttttgaagtggagcaagactac

SEQ ID NO: 246118 - DNA, 25 bp, Artificial
  probe
  misc_feature (1)..(25): SEQ ID NO: 2630; WAN024GHU_at; Start 103; Stop 127
ttaaaagcgcttcgcgaagaaacgc

SEQ ID NO: 246119 - DNA, 25 bp, Artificial
  probe
  misc_feature (1)..(25): SEQ ID NO: 2630; WAN024GHU_at; Start 519; Stop 543
tgaacgtatgaaccttccaaaagac

SEQ ID NO: 246120 - DNA, 25 bp, Artificial
  probe
  misc_feature (1)..(25): SEQ ID NO: 2630; WAN024GHU_at; Start 995; Stop 1019
gtatcgatgcgactgtatactctgg

SEQ ID NO: 246121 - DNA, 25 bp, Artificial
  probe
  misc_feature (1)..(25): SEQ ID NO: 2630; WAN024GHU_at; Start 1045; Stop 1069
cgtgtagctatgctccgttatggaa

SEQ ID NO: 246122 - DNA, 25 bp, Artificial
  probe
  misc_feature (1)..(25): SEQ ID NO: 2630; WAN024GHU_at; Start 266; Stop 290
tcgggaaacacgtcaatgaagctcg

SEQ ID NO: 246123 - DNA, 25 bp, Artificial
  probe
  misc_feature (1)..(25): SEQ ID NO: 2630; WAN024GHU_at; Start 238; Stop 262
gatgtttctgctgagatgcgtccaa

SEQ ID NO: 246124 - DNA, 25 bp, Artificial
  probe
  misc_feature (1)..(25): SEQ ID NO: 2630; WAN024GHU_at; Start 175; Stop 199
gatttgcgtgtctctgtccttggta

SEQ ID NO: 246125 - DNA, 25 bp, Artificial
  probe
  misc_feature (1)..(25): SEQ ID NO: 2630; WAN024GHU_at; Start 861; Stop 885
cacagagccatctgttgaggtggat

SEQ ID NO: 246126 - DNA, 25 bp, Artificial
  probe
  misc_feature (1)..(25): SEQ ID NO: 2630; WAN024GHU_at; Start 661; Stop 685
ttgaagatgatctcgccagggcgtg

SEQ ID NO: 246127 - DNA, 25 bp, Artificial
  probe
  misc_feature (1)..(25): SEQ ID NO: 2630; WAN024GHU_at; Start 398; Stop 422
cagttgcgactggtcaccgtcacgt

SEQ ID NO: 246128 - DNA, 25 bp, Artificial
  probe
  misc_feature (1)..(25): SEQ ID NO: 2630; WAN024GHU_at; Start 541; Stop 565
gaccacccagctcgtgatatgcagg

SEQ ID NO: 246129 - DNA, 25 bp, Artificial
  probe
  misc_feature (1)..(25): SEQ ID NO: 2630; WAN024GHU_at; Start 1075; Stop 1099
gatatccgtggattctaccaaggag

SEQ ID NO: 246130 - DNA, 25 bp, Artificial
  probe
  misc_feature (1)..(25): SEQ ID NO: 2630; WAN024GHU_at; Start 820; Stop 844
gaagagcgtcaaattcgtttgcgtc

SEQ ID NO: 246131 - DNA, 25 bp, Artificial
  probe
  misc_feature (1)..(25): SEQ ID NO: 2630; WAN024GHU_at; Start 781; Stop 805
caaggaacgcttcagttgattgtcc

SEQ ID NO: 246132 - DNA, 25 bp, Artificial
  probe
  misc_feature (1)..(25): SEQ ID NO: 2630; WAN024GHU_at; Start 805; Stop 829
caaaaaatgtttggtgaagagcgtc

SEQ ID NO: 246133 - DNA, 25 bp, Artificial
  probe
  misc_feature (1)..(25): SEQ ID NO: 2630; WAN024GHU_at; Start 57; Stop 81
tctacgagagactgatggaggaaat

SEQ ID NO: 246134 - DNA, 25 bp, Artificial
  probe
  misc_feature (1)..(25): SEQ ID NO: 2630; WAN024GHU_at; Start 582; Stop 606
tgaagaaatcttgctccgtacccac

SEQ ID NO: 246135 - DNA, 25 bp, Artificial
  probe
  misc_feature (1)..(25): SEQ ID NO: 2630; WAN024GHU_at; Start 221; Stop 245
tcctcaaagggatgaaagatgtttc

SEQ ID NO: 246136 - DNA, 25 bp, Artificial
  probe
  misc_feature (1)..(25): SEQ ID NO: 2630; WAN024GHU_at; Start 5; Stop 29
taccgcgtgtcaacgctccgagtgg

SEQ ID NO: 246137 - DNA, 25 bp, Artificial
  probe
  misc_feature (1)..(25): SEQ ID NO: 2630; WAN024GHU_at; Start 376; Stop 400
gatgtgacgcttccaggtcgtccag

SEQ ID NO: 246138 - DNA, 25 bp, Artificial
  probe
  misc_feature (1)..(25): SEQ ID NO: 2630; WAN024GHU_at; Start 458; Stop 482
tcatcggtatgggttatcaagtcgt

SEQ ID NO: 246139 - DNA, 25 bp, Artificial
  probe
  misc_feature (1)..(25): SEQ ID NO: 2630; WAN024GHU_at; Start 677; Stop 701
cagggcgtgtcttccgtcgcgatac

SEQ ID NO: 246140 - DNA, 25 bp, Artificial
  probe
  misc_feature (1)..(25): SEQ ID NO: 2630; WAN024GHU_at; Start 1030; Stop 1054
ggtcttggacaagagcgtgtagcta

SEQ ID NO: 246141 - DNA, 25 bp, Artificial
  probe
  misc_feature (1)..(25): SEQ ID NO: 2630; WAN024GHU_at; Start 327; Stop 351
gctcttggaagaaaagaaagtcgcg

SEQ ID NO: 246142 - DNA, 25 bp, Artificial
  probe
  misc_feature (1)..(25): SEQ ID NO: 2630; WAN024GHU_at; Start 632; Stop 656
tggatgcccatgatttttctaaagg

SEQ ID NO: 246143 - DNA, 25 bp, Artificial
  probe
  misc_feature (1)..(25): SEQ ID NO: 2630; WAN024GHU_at; Start 724; Stop 748
caattccaccaaatcgaaggcttgg

SEQ ID NO: 246144 - DNA, 25 bp, Artificial
  probe
  misc_feature (1)..(25): SEQ ID NO: 2630; WAN024GHU_at; Start 254; Stop 278
tgcgtccaatcatcgggaaacacgt

SEQ ID NO: 246145 - DNA, 25 bp, Artificial
  probe
  misc_feature (1)..(25): SEQ ID NO: 2630; WAN024GHU_at; Start 1096; Stop 1120
ggagatgtccgcttctcagaacagt

SEQ ID NO: 246146 - DNA, 25 bp, Artificial
  probe
  misc_feature (1)..(25): SEQ ID NO: 6562; WAN024GHV_at; Start 369; Stop 393
tagccatggttatacgggttcaaat

SEQ ID NO: 246147 - DNA, 25 bp, Artificial
  probe
  misc_feature (1)..(25): SEQ ID NO: 6562; WAN024GHV_at; Start 67; Stop 91
aatcaagatttgatagctccgccag

SEQ ID NO: 246148 - DNA, 25 bp, Artificial
  probe
  misc_feature (1)..(25): SEQ ID NO: 6562; WAN024GHV_at; Start 537; Stop 561
taaacgctctaaagatttactgctc

SEQ ID NO: 246149 - DNA, 25 bp, Artificial
  probe
  misc_feature (1)..(25): SEQ ID NO: 6562; WAN024GHV_at; Start 958; Stop 982
cacttagaatttcggcagttaggga

SEQ ID NO: 246150 - DNA, 25 bp, Artificial
  probe
  misc_feature (1)..(25): SEQ ID NO: 6562; WAN024GHV_at; Start 458; Stop 482
gggtcctcattcgtatcattgacgt

SEQ ID NO: 246151 - DNA, 25 bp, Artificial
  probe
  misc_feature (1)..(25): SEQ ID NO: 6562; WAN024GHV_at; Start 430; Stop 454
ggtgagctaacagtgcgaacttcga

SEQ ID NO: 246152 - DNA, 25 bp, Artificial
  probe
  misc_feature (1)..(25): SEQ ID NO: 6562; WAN024GHV_at; Start 264; Stop 288
gacggatcggctcattgatatccaa

SEQ ID NO: 246153 - DNA, 25 bp, Artificial
  probe
  misc_feature (1)..(25): SEQ ID NO: 6562; WAN024GHV_at; Start 1005; Stop 1029
tttctttagaagaccctggcatgac

SEQ ID NO: 246154 - DNA, 25 bp, Artificial
  probe
  misc_feature (1)..(25): SEQ ID NO: 6562; WAN024GHV_at; Start 872; Stop 896
tagctgaggtttttggcgatgagtc

SEQ ID NO: 246155 - DNA, 25 bp, Artificial
  probe
  misc_feature (1)..(25): SEQ ID NO: 6562; WAN024GHV_at; Start 285; Stop 309
ccaattctggaaaatagctcttact

SEQ ID NO: 246156 - DNA, 25 bp, Artificial
  probe
  misc_feature (1)..(25): SEQ ID NO: 6562; WAN024GHV_at; Start 397; Stop 421
cagtggttctttagaaatgctacca

SEQ ID NO: 246157 - DNA, 25 bp, Artificial
  probe
  misc_feature (1)..(25): SEQ ID NO: 6562; WAN024GHV_at; Start 1173; Stop 1197
tttatcgtccattgagcaatactcg

SEQ ID NO: 246158 - DNA, 25 bp, Artificial
  probe
  misc_feature (1)..(25): SEQ ID NO: 6562; WAN024GHV_at; Start 1188; Stop 1212
gcaatactcgtttacaacaatcagt

SEQ ID NO: 246159 - DNA, 25 bp, Artificial
  probe
  misc_feature (1)..(25): SEQ ID NO: 6562; WAN024GHV_at; Start 647; Stop 671
taatggcctatattcagcaaaaacg

SEQ ID NO: 246160 - DNA, 25 bp, Artificial
  probe
  misc_feature (1)..(25): SEQ ID NO: 6562; WAN024GHV_at; Start 973; Stop 997
cagttagggattactatgggtaacg

SEQ ID NO: 246161 - DNA, 25 bp, Artificial
  probe
  misc_feature (1)..(25): SEQ ID NO: 6562; WAN024GHV_at; Start 412; Stop 436
aatgctaccagttatgaaggtgagc

SEQ ID NO: 246162 - DNA, 25 bp, Artificial
  probe
  misc_feature (1)..(25): SEQ ID NO: 6562; WAN024GHV_at; Start 354; Stop 378
tcataatcttgcacttagccatggt

SEQ ID NO: 246163 - DNA, 25 bp, Artificial
  probe
  misc_feature (1)..(25): SEQ ID NO: 6562; WAN024GHV_at; Start 231; Stop 255
taattcgcctagtctaaataccaag

SEQ ID NO: 246164 - DNA, 25 bp, Artificial
  probe
  misc_feature (1)..(25): SEQ ID NO: 6562; WAN024GHV_at; Start 1304; Stop 1328
tctctgacacaagtattaaatcgga

SEQ ID NO: 246165 - DNA, 25 bp, Artificial
  probe
  misc_feature (1)..(25): SEQ ID NO: 6562; WAN024GHV_at; Start 1094; Stop 1118
tgaaattaagaaagagccgtgctgg

SEQ ID NO: 246166 - DNA, 25 bp, Artificial
  probe
  misc_feature (1)..(25): SEQ ID NO: 6562; WAN024GHV_at; Start 443; Stop 467
tgcgaacttcgattcgggtcctcat

SEQ ID NO: 246167 - DNA, 25 bp, Artificial
  probe
  misc_feature (1)..(25): SEQ ID NO: 6562; WAN024GHV_at; Start 1109; Stop 1133
gccgtgctggttttaaattggatat

SEQ ID NO: 246168 - DNA, 25 bp, Artificial
  probe
  misc_feature (1)..(25): SEQ ID NO: 6562; WAN024GHV_at; Start 252; Stop 276
caagattaaagtgacggatcggctc

SEQ ID NO: 246169 - DNA, 25 bp, Artificial
  probe
  misc_feature (1)..(25): SEQ ID NO: 6562; WAN024GHV_at; Start 632; Stop 656
taattgcgtatgttgtaatggccta

SEQ ID NO: 246170 - DNA, 25 bp, Artificial
  probe
  misc_feature (1)..(25): SEQ ID NO: 6562; WAN024GHV_at; Start 727; Stop 751
ggcttgatagctgggattcctacct

SEQ ID NO: 246171 - DNA, 25 bp, Artificial
  probe
  misc_feature (1)..(25): SEQ ID NO: 6562; WAN024GHV_at; Start 815; Stop 839
cctatttaggaggttcgattcagca

SEQ ID NO: 246172 - DNA, 25 bp, Artificial
  probe
  misc_feature (1)..(25): SEQ ID NO: 6562; WAN024GHV_at; Start 711; Stop 735
gagacttggttttgtaggcttgata

SEQ ID NO: 246173 - DNA, 25 bp, Artificial
  probe
  misc_feature (1)..(25): SEQ ID NO: 6562; WAN024GHV_at; Start 1018; Stop 1042
ccctggcatgactttgggttagtcg

SEQ ID NO: 246174 - DNA, 25 bp, Artificial
  probe
  misc_feature (1)..(25): SEQ ID NO: 6562; WAN024GHV_at; Start 1277; Stop 1301
tccacagaggaaaactagtaattaa

SEQ ID NO: 246175 - DNA, 25 bp, Artificial
  probe
  misc_feature (1)..(25): SEQ ID NO: 6562; WAN024GHV_at; Start 670; Stop 694
cgaaaagttggctgggataaggtca

SEQ ID NO: 246176 - DNA, 25 bp, Artificial
  probe
  misc_feature (1)..(25): SEQ ID NO: 6562; WAN024GHV_at; Start 684; Stop 708
ggataaggtcatctcccataaatat

SEQ ID NO: 246177 - DNA, 25 bp, Artificial
  probe
  misc_feature (1)..(25): SEQ ID NO: 6562; WAN024GHV_at; Start 130; Stop 154
gcccttattaatgtgcaaaactgga

SEQ ID NO: 246178 - DNA, 25 bp, Artificial
  probe
  misc_feature (1)..(25): SEQ ID NO: 6562; WAN024GHV_at; Start 78; Stop 102
gatagctccgccagttgtcatgtct

SEQ ID NO: 246179 - DNA, 25 bp, Artificial
  probe
  misc_feature (1)..(25): SEQ ID NO: 6562; WAN024GHV_at; Start 764; Stop 788
tattcttatctggacgttctacgac

SEQ ID NO: 246180 - DNA, 25 bp, Artificial
  probe
  misc_feature (1)..(25): SEQ ID NO: 1644; WAN024GHW_at; Start 604; Stop 628
ggaggccggcaagatattattaaaa

SEQ ID NO: 246181 - DNA, 25 bp, Artificial
  probe
  misc_feature (1)..(25): SEQ ID NO: 1644; WAN024GHW_at; Start 958; Stop 982
catttagaatttcggacactaggag

SEQ ID NO: 246182 - DNA, 25 bp, Artificial
  probe
  misc_feature (1)..(25): SEQ ID NO: 1644; WAN024GHW_at; Start 82; Stop 106
gctcctccagtagttatgtctgtaa

SEQ ID NO: 246183 - DNA, 25 bp, Artificial
  probe
  misc_feature (1)..(25): SEQ ID NO: 1644; WAN024GHW_at; Start 819; Stop 843
tctaggaggctcaattcagcatttt

SEQ ID NO: 246184 - DNA, 25 bp, Artificial
  probe
  misc_feature (1)..(25): SEQ ID NO: 1644; WAN024GHW_at; Start 1011; Stop 1035
tagaagacccttgcatgattttggt

SEQ ID NO: 246185 - DNA, 25 bp, Artificial
  probe
  misc_feature (1)..(25): SEQ ID NO: 1644; WAN024GHW_at; Start 775; Stop 799
ggtcgttcaacgactaggacgctat

SEQ ID NO: 246186 - DNA, 25 bp, Artificial
  probe
  misc_feature (1)..(25): SEQ ID NO: 1644; WAN024GHW_at; Start 1173; Stop 1197
tttatcatcaatcgagcaatactcg

SEQ ID NO: 246187 - DNA, 25 bp, Artificial
  probe
  misc_feature (1)..(25): SEQ ID NO: 1644; WAN024GHW_at; Start 173; Stop 197
tagcctatattctcataattagtgg

SEQ ID NO: 246188 - DNA, 25 bp, Artificial
  probe
  misc_feature (1)..(25): SEQ ID NO: 1644; WAN024GHW_at; Start 425; Stop 449
atgaaggtgaattgacagtgcgaac

SEQ ID NO: 246189 - DNA, 25 bp, Artificial
  probe
  misc_feature (1)..(25): SEQ ID NO: 1644; WAN024GHW_at; Start 670; Stop 694
cggaaagttggatggaatagagtca

SEQ ID NO: 246190 - DNA, 25 bp, Artificial
  probe
  misc_feature (1)..(25): SEQ ID NO: 1644; WAN024GHW_at; Start 265; Stop 289
gctgatcgattaattgatatccaat

SEQ ID NO: 246191 - DNA, 25 bp, Artificial
  probe
  misc_feature (1)..(25): SEQ ID NO: 1644; WAN024GHW_at; Start 804; Stop 828
gagtgtttcgacctatctaggaggc

SEQ ID NO: 246192 - DNA, 25 bp, Artificial
  probe
  misc_feature (1)..(25): SEQ ID NO: 1644; WAN024GHW_at; Start 871; Stop 895
cctggtgaagtttttggcagtgaaa

SEQ ID NO: 246193 - DNA, 25 bp, Artificial
  probe
  misc_feature (1)..(25): SEQ ID NO: 1644; WAN024GHW_at; Start 529; Stop 553
tatcgccataaacgccctaaagaca

SEQ ID NO: 246194 - DNA, 25 bp, Artificial
  probe
  misc_feature (1)..(25): SEQ ID NO: 1644; WAN024GHW_at; Start 1094; Stop 1118
tagttctgagaaagaaacaggttgg

SEQ ID NO: 246195 - DNA, 25 bp, Artificial
  probe
  misc_feature (1)..(25): SEQ ID NO: 1644; WAN024GHW_at; Start 856; Stop 880
gaaaatccattagatcctggtgaag

SEQ ID NO: 246196 - DNA, 25 bp, Artificial
  probe
  misc_feature (1)..(25): SEQ ID NO: 1644; WAN024GHW_at; Start 457; Stop 481
cgagttctcattcgtgttattgacg

SEQ ID NO: 246197 - DNA, 25 bp, Artificial
  probe
  misc_feature (1)..(25): SEQ ID NO: 1644; WAN024GHW_at; Start 249; Stop 273
tactgaggttaagattgctgatcga

SEQ ID NO: 246198 - DNA, 25 bp, Artificial
  probe
  misc_feature (1)..(25): SEQ ID NO: 1644; WAN024GHW_at; Start 411; Stop 435
aaatgcaacgagttatgaaggtgaa

SEQ ID NO: 246199 - DNA, 25 bp, Artificial
  probe
  misc_feature (1)..(25): SEQ ID NO: 1644; WAN024GHW_at; Start 1186; Stop 1210
gagcaatactcgttcacaatgatta

SEQ ID NO: 246200 - DNA, 25 bp, Artificial
  probe
  misc_feature (1)..(25): SEQ ID NO: 1644; WAN024GHW_at; Start 129; Stop 153
tgcactggttaattcaaaaaactgg

SEQ ID NO: 246201 - DNA, 25 bp, Artificial
  probe
  misc_feature (1)..(25): SEQ ID NO: 1644; WAN024GHW_at; Start 792; Stop 816
gacgctatttgagagtgtttcgacc

SEQ ID NO: 246202 - DNA, 25 bp, Artificial
  probe
  misc_feature (1)..(25): SEQ ID NO: 1644; WAN024GHW_at; Start 888; Stop 912
cagtgaaacattggtgcctatatta

SEQ ID NO: 246203 - DNA, 25 bp, Artificial
  probe
  misc_feature (1)..(25): SEQ ID NO: 1644; WAN024GHW_at; Start 396; Stop 420
tcagtggttttttagaaatgcaacg

SEQ ID NO: 246204 - DNA, 25 bp, Artificial
  probe
  misc_feature (1)..(25): SEQ ID NO: 1644; WAN024GHW_at; Start 925; Stop 949
gaaatgggcctagttaattatcgta

SEQ ID NO: 246205 - DNA, 25 bp, Artificial
  probe
  misc_feature (1)..(25): SEQ ID NO: 1644; WAN024GHW_at; Start 353; Stop 377
tatacaaccttgttcttagtaatgg

SEQ ID NO: 246206 - DNA, 25 bp, Artificial
  probe
  misc_feature (1)..(25): SEQ ID NO: 1644; WAN024GHW_at; Start 336; Stop 360
tctttacaggaaggaaatatacaac

SEQ ID NO: 246207 - DNA, 25 bp, Artificial
  probe
  misc_feature (1)..(25): SEQ ID NO: 1644; WAN024GHW_at; Start 1248; Stop 1272
tatggctatcttttactggtgtaca

SEQ ID NO: 246208 - DNA, 25 bp, Artificial
  probe
  misc_feature (1)..(25): SEQ ID NO: 1644; WAN024GHW_at; Start 727; Stop 751
ggtttaatagcaggtattccagcat

SEQ ID NO: 246209 - DNA, 25 bp, Artificial
  probe
  misc_feature (1)..(25): SEQ ID NO: 1644; WAN024GHW_at; Start 70; Stop 94
caagatttaattgctcctccagtag

SEQ ID NO: 246210 - DNA, 25 bp, Artificial
  probe
  misc_feature (1)..(25): SEQ ID NO: 1644; WAN024GHW_at; Start 590; Stop 614
aaactttaatatcaggaggccggca

SEQ ID NO: 246211 - DNA, 25 bp, Artificial
  probe
  misc_feature (1)..(25): SEQ ID NO: 1644; WAN024GHW_at; Start 1262; Stop 1286
actggtgtacagattttaaaagagg

SEQ ID NO: 246212 - DNA, 25 bp, Artificial
  probe
  misc_feature (1)..(25): SEQ ID NO: 1644; WAN024GHW_at; Start 648; Stop 672
catgatgtatatccaacaaaaacgg

SEQ ID NO: 246213 - DNA, 25 bp, Artificial
  probe
  misc_feature (1)..(25): SEQ ID NO: 1644; WAN024GHW_at; Start 970; Stop 994
cggacactaggagttactgtaggaa

SEQ ID NO: 246214 - DNA, 25 bp, Artificial
  probe
  misc_feature (1)..(25): SEQ ID NO: 6501; WAN024GHX_at; Start 175; Stop 199
gaatcaggaataattaatgccgacg

SEQ ID NO: 246215 - DNA, 25 bp, Artificial
  probe
  misc_feature (1)..(25): SEQ ID NO: 6501; WAN024GHX_at; Start 581; Stop 605
tatcagggcatatcaaacgagctcc

SEQ ID NO: 246216 - DNA, 25 bp, Artificial
  probe
  misc_feature (1)..(25): SEQ ID NO: 6501; WAN024GHX_at; Start 305; Stop 329
gatactcggtctacttttttggagc

SEQ ID NO: 246217 - DNA, 25 bp, Artificial
  probe
  misc_feature (1)..(25): SEQ ID NO: 6501; WAN024GHX_at; Start 189; Stop 213
taatgccgacggtgcttcagtagtt

SEQ ID NO: 246218 - DNA, 25 bp, Artificial
  probe
  misc_feature (1)..(25): SEQ ID NO: 6501; WAN024GHX_at; Start 578; Stop 602
tactatcagggcatatcaaacgagc

SEQ ID NO: 246219 - DNA, 25 bp, Artificial
  probe
  misc_feature (1)..(25): SEQ ID NO: 6501; WAN024GHX_at; Start 630; Stop 654
agagtggttgtttcgtgtggcaaat

SEQ ID NO: 246220 - DNA, 25 bp, Artificial
  probe
  misc_feature (1)..(25): SEQ ID NO: 6501; WAN024GHX_at; Start 227; Stop 251
ttttaggaacaccagttcctgagcg

SEQ ID NO: 246221 - DNA, 25 bp, Artificial
  probe
  misc_feature (1)..(25): SEQ ID NO: 6501; WAN024GHX_at; Start 370; Stop 394
gaaagatatccagctctaaatgttg

SEQ ID NO: 246222 - DNA, 25 bp, Artificial
  probe
  misc_feature (1)..(25): SEQ ID NO: 6501; WAN024GHX_at; Start 237; Stop 261
accagttcctgagcgagttgctgga

SEQ ID NO: 246223 - DNA, 25 bp, Artificial
  probe
  misc_feature (1)..(25): SEQ ID NO: 6501; WAN024GHX_at; Start 607; Stop 631
ttatggatgcaaaatgctcacctag

SEQ ID NO: 246224 - DNA, 25 bp, Artificial
  probe
  misc_feature (1)..(25): SEQ ID NO: 6501; WAN024GHX_at; Start 363; Stop 387
ttttgaagaaagatatccagctcta

SEQ ID NO: 246225 - DNA, 25 bp, Artificial
  probe
  misc_feature (1)..(25): SEQ ID NO: 6501; WAN024GHX_at; Start 290; Stop 314
tgtctaatgaaaaaggatactcggt

SEQ ID NO: 246226 - DNA, 25 bp, Artificial
  probe
  misc_feature (1)..(25): SEQ ID NO: 6501; WAN024GHX_at; Start 256; Stop 280
gctggaatagacttgatgaaacatt

SEQ ID NO: 246227 - DNA, 25 bp, Artificial
  probe
  misc_feature (1)..(25): SEQ ID NO: 6501; WAN024GHX_at; Start 585; Stop 609
agggcatatcaaacgagctccatta

SEQ ID NO: 246228 - DNA, 25 bp, Artificial
  probe
  misc_feature (1)..(25): SEQ ID NO: 6501; WAN024GHX_at; Start 233; Stop 257
gaacaccagttcctgagcgagttgc

SEQ ID NO: 246229 - DNA, 25 bp, Artificial
  probe
  misc_feature (1)..(25): SEQ ID NO: 6501; WAN024GHX_at; Start 270; Stop 294
gatgaaacatttactagagttgtct

SEQ ID NO: 246230 - DNA, 25 bp, Artificial
  probe
  misc_feature (1)..(25): SEQ ID NO: 6501; WAN024GHX_at; Start 612; Stop 636
gatgcaaaatgctcacctagagtgg

SEQ ID NO: 246231 - DNA, 25 bp, Artificial
  probe
  misc_feature (1)..(25): SEQ ID NO: 6501; WAN024GHX_at; Start 334; Stop 358
gaagacgttttacaagatatgttaa

SEQ ID NO: 246232 - DNA, 25 bp, Artificial
  probe
  misc_feature (1)..(25): SEQ ID NO: 6501; WAN024GHX_at; Start 202; Stop 226
gcttcagtagttttagcgagtaagt

SEQ ID NO: 246233 - DNA, 25 bp, Artificial
  probe
  misc_feature (1)..(25): SEQ ID NO: 6501; WAN024GHX_at; Start 616; Stop 640
caaaatgctcacctagagtggttgt

SEQ ID NO: 246234 - DNA, 25 bp, Artificial
  probe
  misc_feature (1)..(25): SEQ ID NO: 6501; WAN024GHX_at; Start 566; Stop 590
gaagttttgatgtactatcagggca

SEQ ID NO: 246235 - DNA, 25 bp, Artificial
  probe
  misc_feature (1)..(25): SEQ ID NO: 6501; WAN024GHX_at; Start 496; Stop 520
cctaagaaagaatatattatccaat

SEQ ID NO: 246236 - DNA, 25 bp, Artificial
  probe
  misc_feature (1)..(25): SEQ ID NO: 6501; WAN024GHX_at; Start 685; Stop 709
gtagggaatgtttcatttataagaa

SEQ ID NO: 246237 - DNA, 25 bp, Artificial
  probe
  misc_feature (1)..(25): SEQ ID NO: 6501; WAN024GHX_at; Start 196; Stop 220
gacggtgcttcagtagttttagcga

SEQ ID NO: 246238 - DNA, 25 bp, Artificial
  probe
  misc_feature (1)..(25): SEQ ID NO: 6501; WAN024GHX_at; Start 642; Stop 666
tcgtgtggcaaatgagcctaaacgt

SEQ ID NO: 246239 - DNA, 25 bp, Artificial
  probe
  misc_feature (1)..(25): SEQ ID NO: 6501; WAN024GHX_at; Start 15; Stop 39
tcaaatattaggaattactatagat

SEQ ID NO: 246240 - DNA, 25 bp, Artificial
  probe
  misc_feature (1)..(25): SEQ ID NO: 6501; WAN024GHX_at; Start 294; Stop 318
taatgaaaaaggatactcggtctac

SEQ ID NO: 246241 - DNA, 25 bp, Artificial
  probe
  misc_feature (1)..(25): SEQ ID NO: 6501; WAN024GHX_at; Start 281; Stop 305
tactagagttgtctaatgaaaaagg

SEQ ID NO: 246242 - DNA, 25 bp, Artificial
  probe
  misc_feature (1)..(25): SEQ ID NO: 6501; WAN024GHX_at; Start 447; Stop 471
agatattaaagagaaaaaaccagat

SEQ ID NO: 246243 - DNA, 25 bp, Artificial
  probe
  misc_feature (1)..(25): SEQ ID NO: 6501; WAN024GHX_at; Start 418; Stop 442
tcgcctgaagatgaaaaacatattc

SEQ ID NO: 246244 - DNA, 25 bp, Artificial
  probe
  misc_feature (1)..(25): SEQ ID NO: 6501; WAN024GHX_at; Start 376; Stop 400
tatccagctctaaatgttgttggct

SEQ ID NO: 246245 - DNA, 25 bp, Artificial
  probe
  misc_feature (1)..(25): SEQ ID NO: 6501; WAN024GHX_at; Start 181; Stop 205
ggaataattaatgccgacggtgctt

SEQ ID NO: 246246 - DNA, 25 bp, Artificial
  probe
  misc_feature (1)..(25): SEQ ID NO: 6501; WAN024GHX_at; Start 482; Stop 506
taggaattacttctcctaagaaaga

SEQ ID NO: 246247 - DNA, 25 bp, Artificial
  probe
  misc_feature (1)..(25): SEQ ID NO: 6501; WAN024GHX_at; Start 250; Stop 274
cgagttgctggaatagacttgatga

SEQ ID NO: 246248 - DNA, 25 bp, Artificial
  probe
  misc_feature (1)..(25): SEQ ID NO: 6567; WAN024GHY_at; Start 661; Stop 685
gatggagagcttagaactgaactag

SEQ ID NO: 246249 - DNA, 25 bp, Artificial
  probe
  misc_feature (1)..(25): SEQ ID NO: 6567; WAN024GHY_at; Start 1055; Stop 1079
tgtatcaaaaactaatgggagatcc

SEQ ID NO: 246250 - DNA, 25 bp, Artificial
  probe
  misc_feature (1)..(25): SEQ ID NO: 6567; WAN024GHY_at; Start 280; Stop 304
catactcatcatcgaatggctgctt

SEQ ID NO: 246251 - DNA, 25 bp, Artificial
  probe
  misc_feature (1)..(25): SEQ ID NO: 6567; WAN024GHY_at; Start 789; Stop 813
ctcagtatttgagggatttggccta

SEQ ID NO: 246252 - DNA, 25 bp, Artificial
  probe
  misc_feature (1)..(25): SEQ ID NO: 6567; WAN024GHY_at; Start 845; Stop 869
caatgattgcaacagatatttcagg

SEQ ID NO: 246253 - DNA, 25 bp, Artificial
  probe
  misc_feature (1)..(25): SEQ ID NO: 6567; WAN024GHY_at; Start 926; Stop 950
gagccttagcttctgctattgaggg

SEQ ID NO: 246254 - DNA, 25 bp, Artificial
  probe
  misc_feature (1)..(25): SEQ ID NO: 6567; WAN024GHY_at; Start 475; Stop 499
gacagtactgtcatctataacggag

SEQ ID NO: 246255 - DNA, 25 bp, Artificial
  probe
  misc_feature (1)..(25): SEQ ID NO: 6567; WAN024GHY_at; Start 79; Stop 103
taccagttgagttctgatttgcaag

SEQ ID NO: 246256 - DNA, 25 bp, Artificial
  probe
  misc_feature (1)..(25): SEQ ID NO: 6567; WAN024GHY_at; Start 971; Stop 995
ttagaacaaagttagctactcaggc

SEQ ID NO: 246257 - DNA, 25 bp, Artificial
  probe
  misc_feature (1)..(25): SEQ ID NO: 6567; WAN024GHY_at; Start 571; Stop 595
gcaagattatctgaacaaaagggct

SEQ ID NO: 246258 - DNA, 25 bp, Artificial
  probe
  misc_feature (1)..(25): SEQ ID NO: 6567; WAN024GHY_at; Start 100; Stop 124
caagatgagtttgatagtgtacaca

SEQ ID NO: 246259 - DNA, 25 bp, Artificial
  probe
  misc_feature (1)..(25): SEQ ID NO: 6567; WAN024GHY_at; Start 413; Stop 437
cctacagtattgcagttagtcaagc

SEQ ID NO: 246260 - DNA, 25 bp, Artificial
  probe
  misc_feature (1)..(25): SEQ ID NO: 6567; WAN024GHY_at; Start 647; Stop 671
tatttatcgttggtgatggagagct

SEQ ID NO: 246261 - DNA, 25 bp, Artificial
  probe
  misc_feature (1)..(25): SEQ ID NO: 6567; WAN024GHY_at; Start 892; Stop 916
gaaaatggtgtgttggttccgctta

SEQ ID NO: 246262 - DNA, 25 bp, Artificial
  probe
  misc_feature (1)..(25): SEQ ID NO: 6567; WAN024GHY_at; Start 610; Stop 634
gatgcgatgtctctgatttcaaaag

SEQ ID NO: 246263 - DNA, 25 bp, Artificial
  probe
  misc_feature (1)..(25): SEQ ID NO: 6567; WAN024GHY_at; Start 338; Stop 362
aattaatccacgtctatactgccca

SEQ ID NO: 246264 - DNA, 25 bp, Artificial
  probe
  misc_feature (1)..(25): SEQ ID NO: 6567; WAN024GHY_at; Start 395; Stop 419
gattttcactgaaaaatgcctacag

SEQ ID NO: 246265 - DNA, 25 bp, Artificial
  probe
  misc_feature (1)..(25): SEQ ID NO: 6567; WAN024GHY_at; Start 803; Stop 827
gatttggcctagttgctattgaagc

SEQ ID NO: 246266 - DNA, 25 bp, Artificial
  probe
  misc_feature (1)..(25): SEQ ID NO: 6567; WAN024GHY_at; Start 148; Stop 172
gaacgagaattagcagcccaaggaa

SEQ ID NO: 246267 - DNA, 25 bp, Artificial
  probe
  misc_feature (1)..(25): SEQ ID NO: 6567; WAN024GHY_at; Start 132; Stop 156
tacaggaggcctttgggaacgagaa

SEQ ID NO: 246268 - DNA, 25 bp, Artificial
  probe
  misc_feature (1)..(25): SEQ ID NO: 6567; WAN024GHY_at; Start 506; Stop 530
taaagcagacaaataaacaggttga

SEQ ID NO: 246269 - DNA, 25 bp, Artificial
  probe
  misc_feature (1)..(25): SEQ ID NO: 6567; WAN024GHY_at; Start 169; Stop 193
ggaattatccatcataaaatccagg

SEQ ID NO: 246270 - DNA, 25 bp, Artificial
  probe
  misc_feature (1)..(25): SEQ ID NO: 6567; WAN024GHY_at; Start 985; Stop 1009
gctactcaggctaaaaaagattatg

SEQ ID NO: 246271 - DNA, 25 bp, Artificial
  probe
  misc_feature (1)..(25): SEQ ID NO: 6567; WAN024GHY_at; Start 204; Stop 228
caaaaatccttttacagtgttgaag

SEQ ID NO: 246272 - DNA, 25 bp, Artificial
  probe
  misc_feature (1)..(25): SEQ ID NO: 6567; WAN024GHY_at; Start 953; Stop 977
tgtcgactgacttgcaacttagaac

SEQ ID NO: 246273 - DNA, 25 bp, Artificial
  probe
  misc_feature (1)..(25): SEQ ID NO: 6567; WAN024GHY_at; Start 909; Stop 933
tccgcttaaagatgctagagcctta

SEQ ID NO: 246274 - DNA, 25 bp, Artificial
  probe
  misc_feature (1)..(25): SEQ ID NO: 6567; WAN024GHY_at; Start 183; Stop 207
taaaatccaggatatagacagcaaa

SEQ ID NO: 246275 - DNA, 25 bp, Artificial
  probe
  misc_feature (1)..(25): SEQ ID NO: 6567; WAN024GHY_at; Start 119; Stop 143
tacacattgcttctacaggaggcct

SEQ ID NO: 246276 - DNA, 25 bp, Artificial
  probe
  misc_feature (1)..(25): SEQ ID NO: 6567; WAN024GHY_at; Start 492; Stop 516
taacggagtaatcttaaagcagaca

SEQ ID NO: 246277 - DNA, 25 bp, Artificial
  probe
  misc_feature (1)..(25): SEQ ID NO: 6567; WAN024GHY_at; Start 261; Stop 285
taatgatatcactctggtccatact

SEQ ID NO: 246278 - DNA, 25 bp, Artificial
  probe
  misc_feature (1)..(25): SEQ ID NO: 6567; WAN024GHY_at; Start 592; Stop 616
ggcttgaactatcttattgatgcga

SEQ ID NO: 246279 - DNA, 25 bp, Artificial
  probe
  misc_feature (1)..(25): SEQ ID NO: 6567; WAN024GHY_at; Start 772; Stop 796
gatttttgtgtcttaccctcagtat

SEQ ID NO: 246280 - DNA, 25 bp, Artificial
  probe
  misc_feature (1)..(25): SEQ ID NO: 6567; WAN024GHY_at; Start 357; Stop 381
tgcccataatgttttcaaagataag

SEQ ID NO: 246281 - DNA, 25 bp, Artificial
  probe
  misc_feature (1)..(25): SEQ ID NO: 6567; WAN024GHY_at; Start 62; Stop 86
gcgctgagaggattgtgtaccagtt

SEQ ID NO: 246282 - DNA, 25 bp, Artificial
  probe
  misc_feature (1)..(25): SEQ ID NO: 7585; WAN024GHZ_at; Start 410; Stop 434
cagccactattaacaacaaattaca

SEQ ID NO: 246283 - DNA, 25 bp, Artificial
  probe
  misc_feature (1)..(25): SEQ ID NO: 7585; WAN024GHZ_at; Start 58; Stop 82
ggaatgcctcgaaaagattatgaaa

SEQ ID NO: 246284 - DNA, 25 bp, Artificial
  probe
  misc_feature (1)..(25): SEQ ID NO: 7585; WAN024GHZ_at; Start 553; Stop 577
tttgagaacttagaaataagttgcc

SEQ ID NO: 246285 - DNA, 25 bp, Artificial
  probe
  misc_feature (1)..(25): SEQ ID NO: 7585; WAN024GHZ_at; Start 500; Stop 524
gagaacgtgaacttgctagaaaaga

SEQ ID NO: 246286 - DNA, 25 bp, Artificial
  probe
  misc_feature (1)..(25): SEQ ID NO: 7585; WAN024GHZ_at; Start 623; Stop 647
tgaagttaccaaaagaagctgaacg

SEQ ID NO: 246287 - DNA, 25 bp, Artificial
  probe
  misc_feature (1)..(25): SEQ ID NO: 7585; WAN024GHZ_at; Start 113; Stop 137
cagaacatgttgttttgagacttca

SEQ ID NO: 246288 - DNA, 25 bp, Artificial
  probe
  misc_feature (1)..(25): SEQ ID NO: 7585; WAN024GHZ_at; Start 460; Stop 484
gaaactagttcaatagtagggaatg

SEQ ID NO: 246289 - DNA, 25 bp, Artificial
  probe
  misc_feature (1)..(25): SEQ ID NO: 7585; WAN024GHZ_at; Start 509; Stop 533
aacttgctagaaaagaagtattcgg

SEQ ID NO: 246290 - DNA, 25 bp, Artificial
  probe
  misc_feature (1)..(25): SEQ ID NO: 7585; WAN024GHZ_at; Start 222; Stop 246
tattttccctttggatggttatcca

SEQ ID NO: 246291 - DNA, 25 bp, Artificial
  probe
  misc_feature (1)..(25): SEQ ID NO: 7585; WAN024GHZ_at; Start 322; Stop 346
gatcgtctacatgacagagatcggg

SEQ ID NO: 246292 - DNA, 25 bp, Artificial
  probe
  misc_feature (1)..(25): SEQ ID NO: 7585; WAN024GHZ_at; Start 102; Stop 126
caaggaacttccagaacatgttgtt

SEQ ID NO: 246293 - DNA, 25 bp, Artificial
  probe
  misc_feature (1)..(25): SEQ ID NO: 7585; WAN024GHZ_at; Start 304; Stop 328
tctaaaatttcggtaatcgatcgtc

SEQ ID NO: 246294 - DNA, 25 bp, Artificial
  probe
  misc_feature (1)..(25): SEQ ID NO: 7585; WAN024GHZ_at; Start 358; Stop 382
aatgcaattgtgagtatatcaaaag

SEQ ID NO: 246295 - DNA, 25 bp, Artificial
  probe
  misc_feature (1)..(25): SEQ ID NO: 7585; WAN024GHZ_at; Start 206; Stop 230
gtagtccattcatagatattttccc

SEQ ID NO: 246296 - DNA, 25 bp, Artificial
  probe
  misc_feature (1)..(25): SEQ ID NO: 7585; WAN024GHZ_at; Start 530; Stop 554
tcggtgaaccacaattactagagtt

SEQ ID NO: 246297 - DNA, 25 bp, Artificial
  probe
  misc_feature (1)..(25): SEQ ID NO: 7585; WAN024GHZ_at; Start 15; Stop 39
tcgtcataaaggatttattccttgg

SEQ ID NO: 246298 - DNA, 25 bp, Artificial
  probe
  misc_feature (1)..(25): SEQ ID NO: 7585; WAN024GHZ_at; Start 153; Stop 177
taatacctctattatggatacatcc

SEQ ID NO: 246299 - DNA, 25 bp, Artificial
  probe
  misc_feature (1)..(25): SEQ ID NO: 7585; WAN024GHZ_at; Start 169; Stop 193
gatacatccttacaaattccatttg

SEQ ID NO: 246300 - DNA, 25 bp, Artificial
  probe
  misc_feature (1)..(25): SEQ ID NO: 7585; WAN024GHZ_at; Start 565; Stop 589
gaaataagttgccatgctaacccag

SEQ ID NO: 246301 - DNA, 25 bp, Artificial
  probe
  misc_feature (1)..(25): SEQ ID NO: 7585; WAN024GHZ_at; Start 476; Stop 500
tagggaatgtactaggttcatacag

SEQ ID NO: 246302 - DNA, 25 bp, Artificial
  probe
  misc_feature (1)..(25): SEQ ID NO: 7585; WAN024GHZ_at; Start 2; Stop 26
tgctaggagtaattcgtcataaagg

SEQ ID NO: 246303 - DNA, 25 bp, Artificial
  probe
  misc_feature (1)..(25): SEQ ID NO: 7585; WAN024GHZ_at; Start 188; Stop 212
catttggagatgaactatgtagtcc

SEQ ID NO: 246304 - DNA, 25 bp, Artificial
  probe
  misc_feature (1)..(25): SEQ ID NO: 7585; WAN024GHZ_at; Start 135; Stop 159
tcatgatgataatttaggtaatacc

SEQ ID NO: 246305 - DNA, 25 bp, Artificial
  probe
  misc_feature (1)..(25): SEQ ID NO: 7585; WAN024GHZ_at; Start 523; Stop 547
gaagtattcggtgaaccacaattac

SEQ ID NO: 246306 - DNA, 25 bp, Artificial
  probe
  misc_feature (1)..(25): SEQ ID NO: 7585; WAN024GHZ_at; Start 279; Stop 303
caaaattaaattctatcgtgcactt

SEQ ID NO: 246307 - DNA, 25 bp, Artificial
  probe
  misc_feature (1)..(25): SEQ ID NO: 7585; WAN024GHZ_at; Start 575; Stop 599
gccatgctaacccagatgaatattt

SEQ ID NO: 246308 - DNA, 25 bp, Artificial
  probe
  misc_feature (1)..(25): SEQ ID NO: 7585; WAN024GHZ_at; Start 612; Stop 636
cggtgattacatgaagttaccaaaa

SEQ ID NO: 246309 - DNA, 25 bp, Artificial
  probe
  misc_feature (1)..(25): SEQ ID NO: 7585; WAN024GHZ_at; Start 292; Stop 316
tatcgtgcactttctaaaatttcgg

SEQ ID NO: 246310 - DNA, 25 bp, Artificial
  probe
  misc_feature (1)..(25): SEQ ID NO: 7585; WAN024GHZ_at; Start 89; Stop 113
tgtctatttgtaacaaggaacttcc

SEQ ID NO: 246311 - DNA, 25 bp, Artificial
  probe
  misc_feature (1)..(25): SEQ ID NO: 7585; WAN024GHZ_at; Start 485; Stop 509
tactaggttcatacagagaacgtga

SEQ ID NO: 246312 - DNA, 25 bp, Artificial
  probe
  misc_feature (1)..(25): SEQ ID NO: 7585; WAN024GHZ_at; Start 315; Stop 339
ggtaatcgatcgtctacatgacaga

SEQ ID NO: 246313 - DNA, 25 bp, Artificial
  probe
  misc_feature (1)..(25): SEQ ID NO: 7585; WAN024GHZ_at; Start 235; Stop 259
gatggttatccagatgatcgttttc

SEQ ID NO: 246314 - DNA, 25 bp, Artificial
  probe
  misc_feature (1)..(25): SEQ ID NO: 7585; WAN024GHZ_at; Start 48; Stop 72
tatggatttaggaatgcctcgaaaa

SEQ ID NO: 246315 - DNA, 25 bp, Artificial
  probe
  misc_feature (1)..(25): SEQ ID NO: 7585; WAN024GHZ_at; Start 538; Stop 562
ccacaattactagagtttgagaact

SEQ ID NO: 246316 - DNA, 25 bp, Artificial
  probe
  misc_feature (1)..(25): SEQ ID NO: 7081; WAN024GI2_at; Start 373; Stop 397
gaagaagttttgcaggatatgttac

SEQ ID NO: 246317 - DNA, 25 bp, Artificial
  probe
  misc_feature (1)..(25): SEQ ID NO: 7081; WAN024GI2_at; Start 404; Stop 428
tcaaagaagagtatccaaatctacg

SEQ ID NO: 246318 - DNA, 25 bp, Artificial
  probe
  misc_feature (1)..(25): SEQ ID NO: 7081; WAN024GI2_at; Start 693; Stop 717
tgaaccaaagcgtctctttaaacga

SEQ ID NO: 246319 - DNA, 25 bp, Artificial
  probe
  misc_feature (1)..(25): SEQ ID NO: 7081; WAN024GI2_at; Start 171; Stop 195
taatcaatgtcaattagatgacgtc

SEQ ID NO: 246320 - DNA, 25 bp, Artificial
  probe
  misc_feature (1)..(25): SEQ ID NO: 7081; WAN024GI2_at; Start 233; Stop 257
cagatggtgcatcagtagttctagc

SEQ ID NO: 246321 - DNA, 25 bp, Artificial
  probe
  misc_feature (1)..(25): SEQ ID NO: 7081; WAN024GI2_at; Start 151; Stop 175
ggcgtaaacgctgataagattaatc

SEQ ID NO: 246322 - DNA, 25 bp, Artificial
  probe
  misc_feature (1)..(25): SEQ ID NO: 7081; WAN024GI2_at; Start 584; Stop 608
ccatttttatgggtgtaggtggtag

SEQ ID NO: 246323 - DNA, 25 bp, Artificial
  probe
  misc_feature (1)..(25): SEQ ID NO: 7081; WAN024GI2_at; Start 630; Stop 654
tattcaacgagcaccactttggatg

SEQ ID NO: 246324 - DNA, 25 bp, Artificial
  probe
  misc_feature (1)..(25): SEQ ID NO: 7081; WAN024GI2_at; Start 669; Stop 693
agagtggttgtttcgagtcgctaat

SEQ ID NO: 246325 - DNA, 25 bp, Artificial
  probe
  misc_feature (1)..(25): SEQ ID NO: 7081; WAN024GI2_at; Start 437; Stop 461
gacatcgtaatggttatttttcgga

SEQ ID NO: 246326 - DNA, 25 bp, Artificial
  probe
  misc_feature (1)..(25): SEQ ID NO: 7081; WAN024GI2_at; Start 419; Stop 443
caaatctacgagttgctggacatcg

SEQ ID NO: 246327 - DNA, 25 bp, Artificial
  probe
  misc_feature (1)..(25): SEQ ID NO: 7081; WAN024GI2_at; Start 118; Stop 142
tttgtcattgaaaaacgtcctcttc

SEQ ID NO: 246328 - DNA, 25 bp, Artificial
  probe
  misc_feature (1)..(25): SEQ ID NO: 7081; WAN024GI2_at; Start 84; Stop 108
aacaatggatgaaacagtagaggcg

SEQ ID NO: 246329 - DNA, 25 bp, Artificial
  probe
  misc_feature (1)..(25): SEQ ID NO: 7081; WAN024GI2_at; Start 466; Stop 490
gatgagcaagatattcaggaagata

SEQ ID NO: 246330 - DNA, 25 bp, Artificial
  probe
  misc_feature (1)..(25): SEQ ID NO: 7081; WAN024GI2_at; Start 326; Stop 350
aattagcggatgagaaatcttattc

SEQ ID NO: 246331 - DNA, 25 bp, Artificial
  probe
  misc_feature (1)..(25): SEQ ID NO: 7081; WAN024GI2_at; Start 99; Stop 123
agtagaggcggttgagaattttgtc

SEQ ID NO: 246332 - DNA, 25 bp, Artificial
  probe
  misc_feature (1)..(25): SEQ ID NO: 7081; WAN024GI2_at; Start 274; Stop 298
taccaagttccagagcgagttgctg

SEQ ID NO: 246333 - DNA, 25 bp, Artificial
  probe
  misc_feature (1)..(25): SEQ ID NO: 7081; WAN024GI2_at; Start 640; Stop 664
gcaccactttggatgcaaaaatcaa

SEQ ID NO: 246334 - DNA, 25 bp, Artificial
  probe
  misc_feature (1)..(25): SEQ ID NO: 7081; WAN024GI2_at; Start 346; Stop 370
tattctgtgtatttctttggtgcta

SEQ ID NO: 246335 - DNA, 25 bp, Artificial
  probe
  misc_feature (1)..(25): SEQ ID NO: 7081; WAN024GI2_at; Start 562; Stop 586
tttatgggcaatgaagtaaattcca

SEQ ID NO: 246336 - DNA, 25 bp, Artificial
  probe
  misc_feature (1)..(25): SEQ ID NO: 7081; WAN024GI2_at; Start 263; Stop 287
gatttttgggctaccaagttccaga

SEQ ID NO: 246337 - DNA, 25 bp, Artificial
  probe
  misc_feature (1)..(25): SEQ ID NO: 7081; WAN024GI2_at; Start 69; Stop 93
caggattgaccccttaacaatggat

SEQ ID NO: 246338 - DNA, 25 bp, Artificial
  probe
  misc_feature (1)..(25): SEQ ID NO: 7081; WAN024GI2_at; Start 501; Stop 525
gaaccctgactttgtatttgttgga

SEQ ID NO: 246339 - DNA, 25 bp, Artificial
  probe
  misc_feature (1)..(25): SEQ ID NO: 7081; WAN024GI2_at; Start 218; Stop 242
ctgaaattatcaatgcagatggtgc

SEQ ID NO: 246340 - DNA, 25 bp, Artificial
  probe
  misc_feature (1)..(25): SEQ ID NO: 7081; WAN024GI2_at; Start 654; Stop 678
gcaaaaatcaaatctagagtggttg

SEQ ID NO: 246341 - DNA, 25 bp, Artificial
  probe
  misc_feature (1)..(25): SEQ ID NO: 7081; WAN024GI2_at; Start 530; Stop 554
cctctccgaaaaaagaatacatcat

SEQ ID NO: 246342 - DNA, 25 bp, Artificial
  probe
  misc_feature (1)..(25): SEQ ID NO: 7081; WAN024GI2_at; Start 599; Stop 623
taggtggtagttttgacgtattgtc

SEQ ID NO: 246343 - DNA, 25 bp, Artificial
  probe
  misc_feature (1)..(25): SEQ ID NO: 7081; WAN024GI2_at; Start 515; Stop 539
tatttgttggaatcacctctccgaa

SEQ ID NO: 246344 - DNA, 25 bp, Artificial
  probe
  misc_feature (1)..(25): SEQ ID NO: 7081; WAN024GI2_at; Start 248; Stop 272
tagttctagcctctcgatttttggg

SEQ ID NO: 246345 - DNA, 25 bp, Artificial
  probe
  misc_feature (1)..(25): SEQ ID NO: 7081; WAN024GI2_at; Start 451; Stop 475
tatttttcggaggaagatgagcaag

SEQ ID NO: 246346 - DNA, 25 bp, Artificial
  probe
  misc_feature (1)..(25): SEQ ID NO: 7081; WAN024GI2_at; Start 617; Stop 641
tattgtccggtcatattcaacgagc

SEQ ID NO: 246347 - DNA, 25 bp, Artificial
  probe
  misc_feature (1)..(25): SEQ ID NO: 7081; WAN024GI2_at; Start 681; Stop 705
tcgagtcgctaatgaaccaaagcgt

SEQ ID NO: 246348 - DNA, 25 bp, Artificial
  probe
  misc_feature (1)..(25): SEQ ID NO: 7081; WAN024GI2_at; Start 138; Stop 162
tcttcatttaatgggcgtaaacgct

SEQ ID NO: 246349 - DNA, 25 bp, Artificial
  probe
  misc_feature (1)..(25): SEQ ID NO: 7081; WAN024GI2_at; Start 289; Stop 313
cgagttgctggaattgatttaatgc

SEQ ID NO: 246350 - DNA, 25 bp, Artificial
  probe
  misc_feature (1)..(25): SEQ ID NO: 876; WAN024GI3_at; Start 107; Stop 131
ggactttaattggtgcggttaggca

SEQ ID NO: 246351 - DNA, 25 bp, Artificial
  probe
  misc_feature (1)..(25): SEQ ID NO: 876; WAN024GI3_at; Start 3; Stop 27
gaaagaactaactactcgagagatg

SEQ ID NO: 246352 - DNA, 25 bp, Artificial
  probe
  misc_feature (1)..(25): SEQ ID NO: 876; WAN024GI3_at; Start 245; Stop 269
tattcaatcgagaagagtgtccaga

SEQ ID NO: 246353 - DNA, 25 bp, Artificial
  probe
  misc_feature (1)..(25): SEQ ID NO: 876; WAN024GI3_at; Start 66; Stop 90
tatttgtgaaaaacaccattttcgc

SEQ ID NO: 246354 - DNA, 25 bp, Artificial
  probe
  misc_feature (1)..(25): SEQ ID NO: 876; WAN024GI3_at; Start 431; Stop 455
tatcgtcgttttgttatcaggcaac

SEQ ID NO: 246355 - DNA, 25 bp, Artificial
  probe
  misc_feature (1)..(25): SEQ ID NO: 876; WAN024GI3_at; Start 157; Stop 181
gatgttgacattatgatgcctcgac

SEQ ID NO: 246356 - DNA, 25 bp, Artificial
  probe
  misc_feature (1)..(25): SEQ ID NO: 876; WAN024GI3_at; Start 17; Stop 41
ctcgagagatgcaagaagtatcgtt

SEQ ID NO: 246357 - DNA, 25 bp, Artificial
  probe
  misc_feature (1)..(25): SEQ ID NO: 876; WAN024GI3_at; Start 367; Stop 391
ccctatgatggtttgggagatacga

SEQ ID NO: 246358 - DNA, 25 bp, Artificial
  probe
  misc_feature (1)..(25): SEQ ID NO: 876; WAN024GI3_at; Start 721; Stop 745
gaatttgataaagttctacggcatg

SEQ ID NO: 246359 - DNA, 25 bp, Artificial
  probe
  misc_feature (1)..(25): SEQ ID NO: 876; WAN024GI3_at; Start 475; Stop 499
gaaacgacaacatcaacttttagga

SEQ ID NO: 246360 - DNA, 25 bp, Artificial
  probe
  misc_feature (1)..(25): SEQ ID NO: 876; WAN024GI3_at; Start 385; Stop 409
gatacgaaagaagaggcggttgact

SEQ ID NO: 246361 - DNA, 25 bp, Artificial
  probe
  misc_feature (1)..(25): SEQ ID NO: 876; WAN024GI3_at; Start 573; Stop 597
gttagccagagttaaagactacgat

SEQ ID NO: 246362 - DNA, 25 bp, Artificial
  probe
  misc_feature (1)..(25): SEQ ID NO: 876; WAN024GI3_at; Start 736; Stop 760
ctacggcatgaatatggagattaca

SEQ ID NO: 246363 - DNA, 25 bp, Artificial
  probe
  misc_feature (1)..(25): SEQ ID NO: 876; WAN024GI3_at; Start 259; Stop 283
gagtgtccagaatatccttatatga

SEQ ID NO: 246364 - DNA, 25 bp, Artificial
  probe
  misc_feature (1)..(25): SEQ ID NO: 876; WAN024GI3_at; Start 288; Stop 312
tcgaattagtgatcagagataccgg

SEQ ID NO: 246365 - DNA, 25 bp, Artificial
  probe
  misc_feature (1)..(25): SEQ ID NO: 876; WAN024GI3_at; Start 547; Stop 571
gattacttccaaaagcaactagcca

SEQ ID NO: 246366 - DNA, 25 bp, Artificial
  probe
  misc_feature (1)..(25): SEQ ID NO: 876; WAN024GI3_at; Start 769; Stop 793
cctccagagaaggatagagtagggc

SEQ ID NO: 246367 - DNA, 25 bp, Artificial
  probe
  misc_feature (1)..(25): SEQ ID NO: 876; WAN024GI3_at; Start 171; Stop 195
gatgcctcgaccagattatgaccgc

SEQ ID NO: 246368 - DNA, 25 bp, Artificial
  probe
  misc_feature (1)..(25): SEQ ID NO: 876; WAN024GI3_at; Start 754; Stop 778
gattacatgattttgcctccagaga

SEQ ID NO: 246369 - DNA, 25 bp, Artificial
  probe
  misc_feature (1)..(25): SEQ ID NO: 876; WAN024GI3_at; Start 86; Stop 110
ttcgctatgctttgatttacgggac

SEQ ID NO: 246370 - DNA, 25 bp, Artificial
  probe
  misc_feature (1)..(25): SEQ ID NO: 876; WAN024GI3_at; Start 221; Stop 245
tcgccgattatccacatttaaaagt

SEQ ID NO: 246371 - DNA, 25 bp, Artificial
  probe
  misc_feature (1)..(25): SEQ ID NO: 876; WAN024GI3_at; Start 121; Stop 145
gcggttaggcataaagggtatattc

SEQ ID NO: 246372 - DNA, 25 bp, Artificial
  probe
  misc_feature (1)..(25): SEQ ID NO: 876; WAN024GI3_at; Start 42; Stop 66
ggagattttacacacgattgctagt

SEQ ID NO: 246373 - DNA, 25 bp, Artificial
  probe
  misc_feature (1)..(25): SEQ ID NO: 876; WAN024GI3_at; Start 673; Stop 697
gagactattttggttccttttgaga

SEQ ID NO: 246374 - DNA, 25 bp, Artificial
  probe
  misc_feature (1)..(25): SEQ ID NO: 876; WAN024GI3_at; Start 202; Stop 226
gagtatttgaaggaaaatatcgccg

SEQ ID NO: 246375 - DNA, 25 bp, Artificial
  probe
  misc_feature (1)..(25): SEQ ID NO: 876; WAN024GI3_at; Start 189; Stop 213
tgaccgcctattggagtatttgaag

SEQ ID NO: 246376 - DNA, 25 bp, Artificial
  probe
  misc_feature (1)..(25): SEQ ID NO: 876; WAN024GI3_at; Start 460; Stop 484
gaacattttgcgattgaaacgacaa

SEQ ID NO: 246377 - DNA, 25 bp, Artificial
  probe
  misc_feature (1)..(25): SEQ ID NO: 876; WAN024GI3_at; Start 445; Stop 469
tatcaggcaactagagaacattttg

SEQ ID NO: 246378 - DNA, 25 bp, Artificial
  probe
  misc_feature (1)..(25): SEQ ID NO: 876; WAN024GI3_at; Start 785; Stop 809
gagtagggcatcactattttaaagc

SEQ ID NO: 246379 - DNA, 25 bp, Artificial
  probe
  misc_feature (1)..(25): SEQ ID NO: 876; WAN024GI3_at; Start 655; Stop 679
ccgcgtgaatggtttgatgagacta

SEQ ID NO: 246380 - DNA, 25 bp, Artificial
  probe
  misc_feature (1)..(25): SEQ ID NO: 876; WAN024GI3_at; Start 642; Stop 666
aaaagatatttttccgcgtgaatgg

SEQ ID NO: 246381 - DNA, 25 bp, Artificial
  probe
  misc_feature (1)..(25): SEQ ID NO: 876; WAN024GI3_at; Start 594; Stop 618
cgataacagtgaatatgtaggttgc

SEQ ID NO: 246382 - DNA, 25 bp, Artificial
  probe
  misc_feature (1)..(25): SEQ ID NO: 876; WAN024GI3_at; Start 301; Stop 325
cagagataccggattgagatggaaa

SEQ ID NO: 246383 - DNA, 25 bp, Artificial
  probe
  misc_feature (1)..(25): SEQ ID NO: 876; WAN024GI3_at; Start 561; Stop 585
gcaactagccaagttagccagagtt

SEQ ID NO: 246384 - DNA, 25 bp, Artificial
  probe
  misc_feature (1)..(25): SEQ ID NO: 2432; WAN024GI4_at; Start 647; Stop 671
caagctgtaaggattcacatacaaa

SEQ ID NO: 246385 - DNA, 25 bp, Artificial
  probe
  misc_feature (1)..(25): SEQ ID NO: 2432; WAN024GI4_at; Start 162; Stop 186
ggcaatccgtcataaagggtttatc

SEQ ID NO: 246386 - DNA, 25 bp, Artificial
  probe
  misc_feature (1)..(25): SEQ ID NO: 2432; WAN024GI4_at; Start 840; Stop 864
tcctgttgataagagagagcaacat

SEQ ID NO: 246387 - DNA, 25 bp, Artificial
  probe
  misc_feature (1)..(25): SEQ ID NO: 2432; WAN024GI4_at; Start 673; Stop 697
tatgtatccatacctacaggaagga

SEQ ID NO: 246388 - DNA, 25 bp, Artificial
  probe
  misc_feature (1)..(25): SEQ ID NO: 2432; WAN024GI4_at; Start 137; Stop 161
ctttaagtggaggtagcattttagg

SEQ ID NO: 246389 - DNA, 25 bp, Artificial
  probe
  misc_feature (1)..(25): SEQ ID NO: 2432; WAN024GI4_at; Start 363; Stop 387
gaaatacgatcattcggctgaggag

SEQ ID NO: 246390 - DNA, 25 bp, Artificial
  probe
  misc_feature (1)..(25): SEQ ID NO: 2432; WAN024GI4_at; Start 870; Stop 894
tttagagttgagttacggagaagaa

SEQ ID NO: 246391 - DNA, 25 bp, Artificial
  probe
  misc_feature (1)..(25): SEQ ID NO: 2432; WAN024GI4_at; Start 376; Stop 400
tcggctgaggagtgcggtatttcta

SEQ ID NO: 246392 - DNA, 25 bp, Artificial
  probe
  misc_feature (1)..(25): SEQ ID NO: 2432; WAN024GI4_at; Start 287; Stop 311
ttcaatcagcaaaaagtcatccaga

SEQ ID NO: 246393 - DNA, 25 bp, Artificial
  probe
  misc_feature (1)..(25): SEQ ID NO: 2432; WAN024GI4_at; Start 714; Stop 738
gacttacttgcgagagaatatgaat

SEQ ID NO: 246394 - DNA, 25 bp, Artificial
  probe
  misc_feature (1)..(25): SEQ ID NO: 2432; WAN024GI4_at; Start 613; Stop 637
gaaaagtggttgaattggcttgata

SEQ ID NO: 246395 - DNA, 25 bp, Artificial
  probe
  misc_feature (1)..(25): SEQ ID NO: 2432; WAN024GI4_at; Start 111; Stop 135
ttttgatgaaaatgggatagcgtat

SEQ ID NO: 246396 - DNA, 25 bp, Artificial
  probe
  misc_feature (1)..(25): SEQ ID NO: 2432; WAN024GI4_at; Start 60; Stop 84
gaaaaaataccaatcagaattgttg

SEQ ID NO: 246397 - DNA, 25 bp, Artificial
  probe
  misc_feature (1)..(25): SEQ ID NO: 2432; WAN024GI4_at; Start 238; Stop 262
ctattttctctatttgagtcagaca

SEQ ID NO: 246398 - DNA, 25 bp, Artificial
  probe
  misc_feature (1)..(25): SEQ ID NO: 2432; WAN024GI4_at; Start 423; Stop 447
tgtatacaataatccagtgaaacga

SEQ ID NO: 246399 - DNA, 25 bp, Artificial
  probe
  misc_feature (1)..(25): SEQ ID NO: 2432; WAN024GI4_at; Start 209; Stop 233
tcaatattccgagggaaagttacga

SEQ ID NO: 246400 - DNA, 25 bp, Artificial
  probe
  misc_feature (1)..(25): SEQ ID NO: 2432; WAN024GI4_at; Start 634; Stop 658
gataaatgtaattcaagctgtaagg

SEQ ID NO: 246401 - DNA, 25 bp, Artificial
  probe
  misc_feature (1)..(25): SEQ ID NO: 2432; WAN024GI4_at; Start 774; Stop 798
gaatgttcctgtttggtcagaagag

SEQ ID NO: 246402 - DNA, 25 bp, Artificial
  probe
  misc_feature (1)..(25): SEQ ID NO: 2432; WAN024GI4_at; Start 468; Stop 492
tatgtttttgacttttgccttggct

SEQ ID NO: 246403 - DNA, 25 bp, Artificial
  probe
  misc_feature (1)..(25): SEQ ID NO: 2432; WAN024GI4_at; Start 483; Stop 507
tgccttggcttctgtacgagaaaca

SEQ ID NO: 246404 - DNA, 25 bp, Artificial
  probe
  misc_feature (1)..(25): SEQ ID NO: 2432; WAN024GI4_at; Start 816; Stop 840
cggtaaagattatatggtcgttcct

SEQ ID NO: 246405 - DNA, 25 bp, Artificial
  probe
  misc_feature (1)..(25): SEQ ID NO: 2432; WAN024GI4_at; Start 760; Stop 784
gaaactttgatggtgaatgttcctg

SEQ ID NO: 246406 - DNA, 25 bp, Artificial
  probe
  misc_feature (1)..(25): SEQ ID NO: 2432; WAN024GI4_at; Start 597; Stop 621
tggaattattccaattgaaaagtgg

SEQ ID NO: 246407 - DNA, 25 bp, Artificial
  probe
  misc_feature (1)..(25): SEQ ID NO: 2432; WAN024GI4_at; Start 828; Stop 852
tatggtcgttcctcctgttgataag

SEQ ID NO: 246408 - DNA, 25 bp, Artificial
  probe
  misc_feature (1)..(25): SEQ ID NO: 2432; WAN024GI4_at; Start 700; Stop 724
cactttagacgcgagacttacttgc

SEQ ID NO: 246409 - DNA, 25 bp, Artificial
  probe
  misc_feature (1)..(25): SEQ ID NO: 2432; WAN024GI4_at; Start 514; Stop 538
catgccctgatgaaggaaatgttta

SEQ ID NO: 246410 - DNA, 25 bp, Artificial
  probe
  misc_feature (1)..(25): SEQ ID NO: 2432; WAN024GI4_at; Start 346; Stop 370
ggaacagttgctcgtaggaaatacg

SEQ ID NO: 246411 - DNA, 25 bp, Artificial
  probe
  misc_feature (1)..(25): SEQ ID NO: 2432; WAN024GI4_at; Start 687; Stop 711
tacaggaaggaaacactttagacgc

SEQ ID NO: 246412 - DNA, 25 bp, Artificial
  probe
  misc_feature (1)..(25): SEQ ID NO: 2432; WAN024GI4_at; Start 199; Stop 223
gatgttgatatcaatattccgaggg

SEQ ID NO: 246413 - DNA, 25 bp, Artificial
  probe
  misc_feature (1)..(25): SEQ ID NO: 2432; WAN024GI4_at; Start 443; Stop 467
aacgattctttcaaggttatacaag

SEQ ID NO: 246414 - DNA, 25 bp, Artificial
  probe
  misc_feature (1)..(25): SEQ ID NO: 2432; WAN024GI4_at; Start 124; Stop 148
gggatagcgtattctttaagtggag

SEQ ID NO: 246415 - DNA, 25 bp, Artificial
  probe
  misc_feature (1)..(25): SEQ ID NO: 2432; WAN024GI4_at; Start 529; Stop 553
gaaatgtttagactggaaggtagaa

SEQ ID NO: 246416 - DNA, 25 bp, Artificial
  probe
  misc_feature (1)..(25): SEQ ID NO: 2432; WAN024GI4_at; Start 316; Stop 340
ggacttcatgtttctcaaattagaa

SEQ ID NO: 246417 - DNA, 25 bp, Artificial
  probe
  misc_feature (1)..(25): SEQ ID NO: 2432; WAN024GI4_at; Start 253; Stop 277
gagtcagacaatagtcttagtcgta

SEQ ID NO: 246418 - DNA, 25 bp, Artificial
  probe
  misc_feature (1)..(25): SEQ ID NO: 1360; WAN024GI5_at; Start 739; Stop 763
tcggattatatggaattaccaccaa

SEQ ID NO: 246419 - DNA, 25 bp, Artificial
  probe
  misc_feature (1)..(25): SEQ ID NO: 1360; WAN024GI5_at; Start 691; Stop 715
tatagtgttcctgcgaaattagaag

SEQ ID NO: 246420 - DNA, 25 bp, Artificial
  probe
  misc_feature (1)..(25): SEQ ID NO: 1360; WAN024GI5_at; Start 451; Stop 475
tcaagttgcagaagtttttataaaa

SEQ ID NO: 246421 - DNA, 25 bp, Artificial
  probe
  misc_feature (1)..(25): SEQ ID NO: 1360; WAN024GI5_at; Start 27; Stop 51
tgaaacattaatcgaaattttagac

SEQ ID NO: 246422 - DNA, 25 bp, Artificial
  probe
  misc_feature (1)..(25): SEQ ID NO: 1360; WAN024GI5_at; Start 370; Stop 394
gatttcgtagagaatccggactctt

SEQ ID NO: 246423 - DNA, 25 bp, Artificial
  probe
  misc_feature (1)..(25): SEQ ID NO: 1360; WAN024GI5_at; Start 747; Stop 771
tatggaattaccaccaatagaaaaa

SEQ ID NO: 246424 - DNA, 25 bp, Artificial
  probe
  misc_feature (1)..(25): SEQ ID NO: 1360; WAN024GI5_at; Start 368; Stop 392
tagatttcgtagagaatccggactc

SEQ ID NO: 246425 - DNA, 25 bp, Artificial
  probe
  misc_feature (1)..(25): SEQ ID NO: 1360; WAN024GI5_at; Start 760; Stop 784
ccaatagaaaaaagagtcactcatc

SEQ ID NO: 246426 - DNA, 25 bp, Artificial
  probe
  misc_feature (1)..(25): SEQ ID NO: 1360; WAN024GI5_at; Start 696; Stop 720
tgttcctgcgaaattagaagattat

SEQ ID NO: 246427 - DNA, 25 bp, Artificial
  probe
  misc_feature (1)..(25): SEQ ID NO: 1360; WAN024GI5_at; Start 598; Stop 622
tttattggtcaatatgatgaaagta

SEQ ID NO: 246428 - DNA, 25 bp, Artificial
  probe
  misc_feature (1)..(25): SEQ ID NO: 1360; WAN024GI5_at; Start 769; Stop 793
aaaagagtcactcatcaaccaataa

SEQ ID NO: 246429 - DNA, 25 bp, Artificial
  probe
  misc_feature (1)..(25): SEQ ID NO: 1360; WAN024GI5_at; Start 66; Stop 90
ttgtgaaaaacatgaattaacttat

SEQ ID NO: 246430 - DNA, 25 bp, Artificial
  probe
  misc_feature (1)..(25): SEQ ID NO: 1360; WAN024GI5_at; Start 220; Stop 244
caatctatatttagtcttcaaaatg

SEQ ID NO: 246431 - DNA, 25 bp, Artificial
  probe
  misc_feature (1)..(25): SEQ ID NO: 1360; WAN024GI5_at; Start 19; Stop 43
cagttacatgaaacattaatcgaaa

SEQ ID NO: 246432 - DNA, 25 bp, Artificial
  probe
  misc_feature (1)..(25): SEQ ID NO: 1360; WAN024GI5_at; Start 357; Stop 381
tatttttccactagatttcgtagag

SEQ ID NO: 246433 - DNA, 25 bp, Artificial
  probe
  misc_feature (1)..(25): SEQ ID NO: 1360; WAN024GI5_at; Start 510; Stop 534
tattatgagtattcctaccctgttt

SEQ ID NO: 246434 - DNA, 25 bp, Artificial
  probe
  misc_feature (1)..(25): SEQ ID NO: 1360; WAN024GI5_at; Start 347; Stop 371
tttacattgatatttttccactaga

SEQ ID NO: 246435 - DNA, 25 bp, Artificial
  probe
  misc_feature (1)..(25): SEQ ID NO: 1360; WAN024GI5_at; Start 742; Stop 766
gattatatggaattaccaccaatag

SEQ ID NO: 246436 - DNA, 25 bp, Artificial
  probe
  misc_feature (1)..(25): SEQ ID NO: 1360; WAN024GI5_at; Start 320; Stop 344
ttgatgttgaatatgagaataacgg

SEQ ID NO: 246437 - DNA, 25 bp, Artificial
  probe
  misc_feature (1)..(25): SEQ ID NO: 1360; WAN024GI5_at; Start 235; Stop 259
cttcaaaatgaagataacgagccga

SEQ ID NO: 246438 - DNA, 25 bp, Artificial
  probe
  misc_feature (1)..(25): SEQ ID NO: 1360; WAN024GI5_at; Start 700; Stop 724
cctgcgaaattagaagattatttaa

SEQ ID NO: 246439 - DNA, 25 bp, Artificial
  probe
  misc_feature (1)..(25): SEQ ID NO: 1360; WAN024GI5_at; Start 505; Stop 529
gaaaatattatgagtattcctaccc

SEQ ID NO: 246440 - DNA, 25 bp, Artificial
  probe
  misc_feature (1)..(25): SEQ ID NO: 1360; WAN024GI5_at; Start 758; Stop 782
caccaatagaaaaaagagtcactca

SEQ ID NO: 246441 - DNA, 25 bp, Artificial
  probe
  misc_feature (1)..(25): SEQ ID NO: 1360; WAN024GI5_at; Start 236; Stop 260
ttcaaaatgaagataacgagccgaa

SEQ ID NO: 246442 - DNA, 25 bp, Artificial
  probe
  misc_feature (1)..(25): SEQ ID NO: 1360; WAN024GI5_at; Start 32; Stop 56
cattaatcgaaattttagactttgt

SEQ ID NO: 246443 - DNA, 25 bp, Artificial
  probe
  misc_feature (1)..(25): SEQ ID NO: 1360; WAN024GI5_at; Start 363; Stop 387
tccactagatttcgtagagaatccg

SEQ ID NO: 246444 - DNA, 25 bp, Artificial
  probe
  misc_feature (1)..(25): SEQ ID NO: 1360; WAN024GI5_at; Start 438; Stop 462
tattttaaaattttcaagttgcaga

SEQ ID NO: 246445 - DNA, 25 bp, Artificial
  probe
  misc_feature (1)..(25): SEQ ID NO: 1360; WAN024GI5_at; Start 755; Stop 779
taccaccaatagaaaaaagagtcac

SEQ ID NO: 246446 - DNA, 25 bp, Artificial
  probe
  misc_feature (1)..(25): SEQ ID NO: 1360; WAN024GI5_at; Start 47; Stop 71
tagactttgtaaaagaaatttgtga

SEQ ID NO: 246447 - DNA, 25 bp, Artificial
  probe
  misc_feature (1)..(25): SEQ ID NO: 1360; WAN024GI5_at; Start 119; Stop 143
caaaacgccattgtggatttattcc

SEQ ID NO: 246448 - DNA, 25 bp, Artificial
  probe
  misc_feature (1)..(25): SEQ ID NO: 1360; WAN024GI5_at; Start 365; Stop 389
cactagatttcgtagagaatccgga

SEQ ID NO: 246449 - DNA, 25 bp, Artificial
  probe
  misc_feature (1)..(25): SEQ ID NO: 1360; WAN024GI5_at; Start 313; Stop 337
aagattcttgatgttgaatatgaga

SEQ ID NO: 246450 - DNA, 25 bp, Artificial
  probe
  misc_feature (1)..(25): SEQ ID NO: 1360; WAN024GI5_at; Start 15; Stop 39
taaacagttacatgaaacattaatc

SEQ ID NO: 246451 - DNA, 25 bp, Artificial
  probe
  misc_feature (1)..(25): SEQ ID NO: 1360; WAN024GI5_at; Start 766; Stop 790
gaaaaaagagtcactcatcaaccaa

SEQ ID NO: 246452 - DNA, 25 bp, Artificial
  probe
  misc_feature (1)..(25): SEQ ID NO: 723; WAN024GI6_at; Start 457; Stop 481
catgatgtaggaatcagtgatagta

SEQ ID NO: 246453 - DNA, 25 bp, Artificial
  probe
  misc_feature (1)..(25): SEQ ID NO: 723; WAN024GI6_at; Start 919; Stop 943
gatgatgttgccttagcgagagcga

SEQ ID NO: 246454 - DNA, 25 bp, Artificial
  probe
  misc_feature (1)..(25): SEQ ID NO: 723; WAN024GI6_at; Start 30; Stop 54
tctacatatttctcgtacaatggat

SEQ ID NO: 246455 - DNA, 25 bp, Artificial
  probe
  misc_feature (1)..(25): SEQ ID NO: 723; WAN024GI6_at; Start 505; Stop 529
tttgaaaaaactgataagctagttg

SEQ ID NO: 246456 - DNA, 25 bp, Artificial
  probe
  misc_feature (1)..(25): SEQ ID NO: 723; WAN024GI6_at; Start 48; Stop 72
aatggatattggtggtgcagaacgt

SEQ ID NO: 246457 - DNA, 25 bp, Artificial
  probe
  misc_feature (1)..(25): SEQ ID NO: 723; WAN024GI6_at; Start 273; Stop 297
cattgttcacactcatcatcggatg

SEQ ID NO: 246458 - DNA, 25 bp, Artificial
  probe
  misc_feature (1)..(25): SEQ ID NO: 723; WAN024GI6_at; Start 876; Stop 900
tgaagtagtcaataacaaaaatggg

SEQ ID NO: 246459 - DNA, 25 bp, Artificial
  probe
  misc_feature (1)..(25): SEQ ID NO: 723; WAN024GI6_at; Start 126; Stop 150
cgcttcaacaggtggactatgggag

SEQ ID NO: 246460 - DNA, 25 bp, Artificial
  probe
  misc_feature (1)..(25): SEQ ID NO: 723; WAN024GI6_at; Start 891; Stop 915
caaaaatgggattcttgttcctgtt

SEQ ID NO: 246461 - DNA, 25 bp, Artificial
  probe
  misc_feature (1)..(25): SEQ ID NO: 723; WAN024GI6_at; Start 650; Stop 674
tcattgtcggagatggagagcttcg

SEQ ID NO: 246462 - DNA, 25 bp, Artificial
  probe
  misc_feature (1)..(25): SEQ ID NO: 723; WAN024GI6_at; Start 282; Stop 306
cactcatcatcggatggctgccttt

SEQ ID NO: 246463 - DNA, 25 bp, Artificial
  probe
  misc_feature (1)..(25): SEQ ID NO: 723; WAN024GI6_at; Start 112; Stop 136
gatagtgtccatgtcgcttcaacag

SEQ ID NO: 246464 - DNA, 25 bp, Artificial
  probe
  misc_feature (1)..(25): SEQ ID NO: 723; WAN024GI6_at; Start 61; Stop 85
ggtgcagaacgtattgtatatcaat

SEQ ID NO: 246465 - DNA, 25 bp, Artificial
  probe
  misc_feature (1)..(25): SEQ ID NO: 723; WAN024GI6_at; Start 762; Stop 786
caatagttttgattacttagtgtca

SEQ ID NO: 246466 - DNA, 25 bp, Artificial
  probe
  misc_feature (1)..(25): SEQ ID NO: 723; WAN024GI6_at; Start 199; Stop 223
gacagtaagaatcccctaactatgg

SEQ ID NO: 246467 - DNA, 25 bp, Artificial
  probe
  misc_feature (1)..(25): SEQ ID NO: 723; WAN024GI6_at; Start 577; Stop 601
ttatcagagcaaaaaggattgacct

SEQ ID NO: 246468 - DNA, 25 bp, Artificial
  probe
  misc_feature (1)..(25): SEQ ID NO: 723; WAN024GI6_at; Start 562; Stop 586
gggtgtattgctaggttatcagagc

SEQ ID NO: 246469 - DNA, 25 bp, Artificial
  probe
  misc_feature (1)..(25): SEQ ID NO: 723; WAN024GI6_at; Start 338; Stop 362
agttgatacatgtttacactgcaca

SEQ ID NO: 246470 - DNA, 25 bp, Artificial
  probe
  misc_feature (1)..(25): SEQ ID NO: 723; WAN024GI6_at; Start 934; Stop 958
gcgagagcgattgaaaagcttgcga

SEQ ID NO: 246471 - DNA, 25 bp, Artificial
  probe
  misc_feature (1)..(25): SEQ ID NO: 723; WAN024GI6_at; Start 592; Stop 616
ggattgacctacctaattgatgcga

SEQ ID NO: 246472 - DNA, 25 bp, Artificial
  probe
  misc_feature (1)..(25): SEQ ID NO: 723; WAN024GI6_at; Start 294; Stop 318
gatggctgccttttatattcgcttg

SEQ ID NO: 246473 - DNA, 25 bp, Artificial
  probe
  misc_feature (1)..(25): SEQ ID NO: 723; WAN024GI6_at; Start 140; Stop 164
gactatgggagagcaaacttttatc

SEQ ID NO: 246474 - DNA, 25 bp, Artificial
  probe
  misc_feature (1)..(25): SEQ ID NO: 723; WAN024GI6_at; Start 779; Stop 803
tagtgtcatcatctttatatgaggg

SEQ ID NO: 246475 - DNA, 25 bp, Artificial
  probe
  misc_feature (1)..(25): SEQ ID NO: 723; WAN024GI6_at; Start 690; Stop 714
caaggtgaaacaattaaatcttcaa

SEQ ID NO: 246476 - DNA, 25 bp, Artificial
  probe
  misc_feature (1)..(25): SEQ ID NO: 723; WAN024GI6_at; Start 157; Stop 181
cttttatcaaaaggagttcaacatc

SEQ ID NO: 246477 - DNA, 25 bp, Artificial
  probe
  misc_feature (1)..(25): SEQ ID NO: 723; WAN024GI6_at; Start 213; Stop 237
cctaactatggtaaagatcctttca

SEQ ID NO: 246478 - DNA, 25 bp, Artificial
  probe
  misc_feature (1)..(25): SEQ ID NO: 723; WAN024GI6_at; Start 906; Stop 930
tgttcctgttaaggatgatgttgcc

SEQ ID NO: 246479 - DNA, 25 bp, Artificial
  probe
  misc_feature (1)..(25): SEQ ID NO: 723; WAN024GI6_at; Start 313; Stop 337
cgcttgttgaaaatcattaatccta

SEQ ID NO: 246480 - DNA, 25 bp, Artificial
  probe
  misc_feature (1)..(25): SEQ ID NO: 723; WAN024GI6_at; Start 190; Stop 214
ttagatgttgacagtaagaatcccc

SEQ ID NO: 246481 - DNA, 25 bp, Artificial
  probe
  misc_feature (1)..(25): SEQ ID NO: 723; WAN024GI6_at; Start 612; Stop 636
tgcgatgtctttagtgaaacacagg

SEQ ID NO: 246482 - DNA, 25 bp, Artificial
  probe
  misc_feature (1)..(25): SEQ ID NO: 723; WAN024GI6_at; Start 972; Stop 996
tagagaaaaactcgcttatcaagca

SEQ ID NO: 246483 - DNA, 25 bp, Artificial
  probe
  misc_feature (1)..(25): SEQ ID NO: 723; WAN024GI6_at; Start 169; Stop 193
ggagttcaacatcataaaattttag

SEQ ID NO: 246484 - DNA, 25 bp, Artificial
  probe
  misc_feature (1)..(25): SEQ ID NO: 723; WAN024GI6_at; Start 1039; Stop 1063
gataattatcggagactttatagaa

SEQ ID NO: 246485 - DNA, 25 bp, Artificial
  probe
  misc_feature (1)..(25): SEQ ID NO: 723; WAN024GI6_at; Start 98; Stop 122
tgaaagatgaatttgatagtgtcca

SEQ ID NO: 246486 - DNA, 25 bp, Artificial
  probe
  misc_feature (1)..(25): SEQ ID NO: 1247; WAN024GI7_at; Start 574; Stop 598
gatgtattatcaggacacattaaac

SEQ ID NO: 246487 - DNA, 25 bp, Artificial
  probe
  misc_feature (1)..(25): SEQ ID NO: 1247; WAN024GI7_at; Start 622; Stop 646
ttgaatctggaatggttgttccgtg

SEQ ID NO: 246488 - DNA, 25 bp, Artificial
  probe
  misc_feature (1)..(25): SEQ ID NO: 1247; WAN024GI7_at; Start 537; Stop 561
gattaatgctgtctttatgggtgtt

SEQ ID NO: 246489 - DNA, 25 bp, Artificial
  probe
  misc_feature (1)..(25): SEQ ID NO: 1247; WAN024GI7_at; Start 578; Stop 602
tattatcaggacacattaaacgagc

SEQ ID NO: 246490 - DNA, 25 bp, Artificial
  probe
  misc_feature (1)..(25): SEQ ID NO: 1247; WAN024GI7_at; Start 632; Stop 656
aatggttgttccgtgtagttaatga

SEQ ID NO: 246491 - DNA, 25 bp, Artificial
  probe
  misc_feature (1)..(25): SEQ ID NO: 1247; WAN024GI7_at; Start 614; Stop 638
tgcaaaaattgaatctggaatggtt

SEQ ID NO: 246492 - DNA, 25 bp, Artificial
  probe
  misc_feature (1)..(25): SEQ ID NO: 1247; WAN024GI7_at; Start 567; Stop 591
cagttttgatgtattatcaggacac

SEQ ID NO: 246493 - DNA, 25 bp, Artificial
  probe
  misc_feature (1)..(25): SEQ ID NO: 1247; WAN024GI7_at; Start 620; Stop 644
aattgaatctggaatggttgttccg

SEQ ID NO: 246494 - DNA, 25 bp, Artificial
  probe
  misc_feature (1)..(25): SEQ ID NO: 1247; WAN024GI7_at; Start 548; Stop 572
tctttatgggtgttggtggcagttt

SEQ ID NO: 246495 - DNA, 25 bp, Artificial
  probe
  misc_feature (1)..(25): SEQ ID NO: 1247; WAN024GI7_at; Start 581; Stop 605
tatcaggacacattaaacgagctcc

SEQ ID NO: 246496 - DNA, 25 bp, Artificial
  probe
  misc_feature (1)..(25): SEQ ID NO: 1247; WAN024GI7_at; Start 569; Stop 593
gttttgatgtattatcaggacacat

SEQ ID NO: 246497 - DNA, 25 bp, Artificial
  probe
  misc_feature (1)..(25): SEQ ID NO: 1247; WAN024GI7_at; Start 549; Stop 573
ctttatgggtgttggtggcagtttt

SEQ ID NO: 246498 - DNA, 25 bp, Artificial
  probe
  misc_feature (1)..(25): SEQ ID NO: 1247; WAN024GI7_at; Start 625; Stop 649
aatctggaatggttgttccgtgtag

SEQ ID NO: 246499 - DNA, 25 bp, Artificial
  probe
  misc_feature (1)..(25): SEQ ID NO: 1247; WAN024GI7_at; Start 583; Stop 607
tcaggacacattaaacgagctccat

SEQ ID NO: 246500 - DNA, 25 bp, Artificial
  probe
  misc_feature (1)..(25): SEQ ID NO: 1247; WAN024GI7_at; Start 634; Stop 658
tggttgttccgtgtagttaatgaac

SEQ ID NO: 246501 - DNA, 25 bp, Artificial
  probe
  misc_feature (1)..(25): SEQ ID NO: 1247; WAN024GI7_at; Start 628; Stop 652
ctggaatggttgttccgtgtagtta

SEQ ID NO: 246502 - DNA, 25 bp, Artificial
  probe
  misc_feature (1)..(25): SEQ ID NO: 1247; WAN024GI7_at; Start 607; Stop 631
ttatggatgcaaaaattgaatctgg

SEQ ID NO: 246503 - DNA, 25 bp, Artificial
  probe
  misc_feature (1)..(25): SEQ ID NO: 1247; WAN024GI7_at; Start 580; Stop 604
ttatcaggacacattaaacgagctc

SEQ ID NO: 246504 - DNA, 25 bp, Artificial
  probe
  misc_feature (1)..(25): SEQ ID NO: 1247; WAN024GI7_at; Start 565; Stop 589
ggcagttttgatgtattatcaggac

SEQ ID NO: 246505 - DNA, 25 bp, Artificial
  probe
  misc_feature (1)..(25): SEQ ID NO: 1247; WAN024GI7_at; Start 374; Stop 398
gatatcctaatcttaatgttgttgg

SEQ ID NO: 246506 - DNA, 25 bp, Artificial
  probe
  misc_feature (1)..(25): SEQ ID NO: 1247; WAN024GI7_at; Start 370; Stop 394
caaagatatcctaatcttaatgttg

SEQ ID NO: 246507 - DNA, 25 bp, Artificial
  probe
  misc_feature (1)..(25): SEQ ID NO: 1247; WAN024GI7_at; Start 616; Stop 640
caaaaattgaatctggaatggttgt

SEQ ID NO: 246508 - DNA, 25 bp, Artificial
  probe
  misc_feature (1)..(25): SEQ ID NO: 1247; WAN024GI7_at; Start 708; Stop 732
gcgagttttagatgaaaagcgaaaa

SEQ ID NO: 246509 - DNA, 25 bp, Artificial
  probe
  misc_feature (1)..(25): SEQ ID NO: 1247; WAN024GI7_at; Start 709; Stop 733
cgagttttagatgaaaagcgaaaat

SEQ ID NO: 246510 - DNA, 25 bp, Artificial
  probe
  misc_feature (1)..(25): SEQ ID NO: 1247; WAN024GI7_at; Start 378; Stop 402
tcctaatcttaatgttgttggctat

SEQ ID NO: 246511 - DNA, 25 bp, Artificial
  probe
  misc_feature (1)..(25): SEQ ID NO: 1247; WAN024GI7_at; Start 584; Stop 608
caggacacattaaacgagctccatt

SEQ ID NO: 246512 - DNA, 25 bp, Artificial
  probe
  misc_feature (1)..(25): SEQ ID NO: 1247; WAN024GI7_at; Start 344; Stop 368
tacaagatatgctaaaagtttttaa

SEQ ID NO: 246513 - DNA, 25 bp, Artificial
  probe
  misc_feature (1)..(25): SEQ ID NO: 1247; WAN024GI7_at; Start 612; Stop 636
gatgcaaaaattgaatctggaatgg

SEQ ID NO: 246514 - DNA, 25 bp, Artificial
  probe
  misc_feature (1)..(25): SEQ ID NO: 1247; WAN024GI7_at; Start 585; Stop 609
aggacacattaaacgagctccatta

SEQ ID NO: 246515 - DNA, 25 bp, Artificial
  probe
  misc_feature (1)..(25): SEQ ID NO: 1247; WAN024GI7_at; Start 638; Stop 662
tgttccgtgtagttaatgaacccaa

SEQ ID NO: 246516 - DNA, 25 bp, Artificial
  probe
  misc_feature (1)..(25): SEQ ID NO: 1247; WAN024GI7_at; Start 418; Stop 442
tcacctgaagatgaaaaaaagattc

SEQ ID NO: 246517 - DNA, 25 bp, Artificial
  probe
  misc_feature (1)..(25): SEQ ID NO: 1247; WAN024GI7_at; Start 608; Stop 632
tatggatgcaaaaattgaatctgga

SEQ ID NO: 246518 - DNA, 25 bp, Artificial
  probe
  misc_feature (1)..(25): SEQ ID NO: 1247; WAN024GI7_at; Start 534; Stop 558
tgggattaatgctgtctttatgggt

SEQ ID NO: 246519 - DNA, 25 bp, Artificial
  probe
  misc_feature (1)..(25): SEQ ID NO: 1247; WAN024GI7_at; Start 624; Stop 648
gaatctggaatggttgttccgtgta

SEQ ID NO: 246520 - DNA, 25 bp, Artificial
  probe
  misc_feature (1)..(25): SEQ ID NO: 1586; WAN024GI8_at; Start 404; Stop 428
gaaatggctatttttctgaagagga

SEQ ID NO: 246521 - DNA, 25 bp, Artificial
  probe
  misc_feature (1)..(25): SEQ ID NO: 1586; WAN024GI8_at; Start 608; Stop 632
tatggatgcaaaagtcaaatttaga

SEQ ID NO: 246522 - DNA, 25 bp, Artificial
  probe
  misc_feature (1)..(25): SEQ ID NO: 1586; WAN024GI8_at; Start 2; Stop 26
tgagggatagaatccaacttttagg

SEQ ID NO: 246523 - DNA, 25 bp, Artificial
  probe
  misc_feature (1)..(25): SEQ ID NO: 1586; WAN024GI8_at; Start 720; Stop 744
agcaaaaagaggtgtaaaatattga

SEQ ID NO: 246524 - DNA, 25 bp, Artificial
  probe
  misc_feature (1)..(25): SEQ ID NO: 1586; WAN024GI8_at; Start 357; Stop 381
caaagtatttaagagagattatcca

SEQ ID NO: 246525 - DNA, 25 bp, Artificial
  probe
  misc_feature (1)..(25): SEQ ID NO: 1586; WAN024GI8_at; Start 334; Stop 358
gaagaagttttgcaagatatgctca

SEQ ID NO: 246526 - DNA, 25 bp, Artificial
  probe
  misc_feature (1)..(25): SEQ ID NO: 1586; WAN024GI8_at; Start 76; Stop 100
caatatgtattagaaaaaagaccac

SEQ ID NO: 246527 - DNA, 25 bp, Artificial
  probe
  misc_feature (1)..(25): SEQ ID NO: 1586; WAN024GI8_at; Start 540; Stop 564
caattcggtatttatgggagttggc

SEQ ID NO: 246528 - DNA, 25 bp, Artificial
  probe
  misc_feature (1)..(25): SEQ ID NO: 1586; WAN024GI8_at; Start 574; Stop 598
gatgtcttgtctggtcatatccaac

SEQ ID NO: 246529 - DNA, 25 bp, Artificial
  probe
  misc_feature (1)..(25): SEQ ID NO: 1586; WAN024GI8_at; Start 602; Stop 626
cacctctatggatgcaaaagtcaaa

SEQ ID NO: 246530 - DNA, 25 bp, Artificial
  probe
  misc_feature (1)..(25): SEQ ID NO: 1586; WAN024GI8_at; Start 586; Stop 610
ggtcatatccaacgagcacctctat

SEQ ID NO: 246531 - DNA, 25 bp, Artificial
  probe
  misc_feature (1)..(25): SEQ ID NO: 1586; WAN024GI8_at; Start 516; Stop 540
tcaaaaatttatggatagtggcgtc

SEQ ID NO: 246532 - DNA, 25 bp, Artificial
  probe
  misc_feature (1)..(25): SEQ ID NO: 1586; WAN024GI8_at; Start 529; Stop 553
gatagtggcgtcaattcggtattta

SEQ ID NO: 246533 - DNA, 25 bp, Artificial
  probe
  misc_feature (1)..(25): SEQ ID NO: 1586; WAN024GI8_at; Start 367; Stop 391
aagagagattatccaaatttgatag

SEQ ID NO: 246534 - DNA, 25 bp, Artificial
  probe
  misc_feature (1)..(25): SEQ ID NO: 1586; WAN024GI8_at; Start 380; Stop 404
caaatttgatagttattggacacag

SEQ ID NO: 246535 - DNA, 25 bp, Artificial
  probe
  misc_feature (1)..(25): SEQ ID NO: 1586; WAN024GI8_at; Start 563; Stop 587
gcggtagttttgatgtcttgtctgg

SEQ ID NO: 246536 - DNA, 25 bp, Artificial
  probe
  misc_feature (1)..(25): SEQ ID NO: 1586; WAN024GI8_at; Start 523; Stop 547
tttatggatagtggcgtcaattcgg

SEQ ID NO: 246537 - DNA, 25 bp, Artificial
  probe
  misc_feature (1)..(25): SEQ ID NO: 1586; WAN024GI8_at; Start 420; Stop 444
tgaagaggatgaacaagctattcaa

SEQ ID NO: 246538 - DNA, 25 bp, Artificial
  probe
  misc_feature (1)..(25): SEQ ID NO: 1586; WAN024GI8_at; Start 462; Stop 486
gaaccctgattttgtgtttattgga

SEQ ID NO: 246539 - DNA, 25 bp, Artificial
  probe
  misc_feature (1)..(25): SEQ ID NO: 1586; WAN024GI8_at; Start 594; Stop 618
ccaacgagcacctctatggatgcaa

SEQ ID NO: 246540 - DNA, 25 bp, Artificial
  probe
  misc_feature (1)..(25): SEQ ID NO: 1586; WAN024GI8_at; Start 557; Stop 581
gagttggcggtagttttgatgtctt

SEQ ID NO: 246541 - DNA, 25 bp, Artificial
  probe
  misc_feature (1)..(25): SEQ ID NO: 1586; WAN024GI8_at; Start 89; Stop 113
aaaaaagaccactacacttgatggg

SEQ ID NO: 246542 - DNA, 25 bp, Artificial
  probe
  misc_feature (1)..(25): SEQ ID NO: 1586; WAN024GI8_at; Start 416; Stop 440
tttctgaagaggatgaacaagctat

SEQ ID NO: 246543 - DNA, 25 bp, Artificial
  probe
  misc_feature (1)..(25): SEQ ID NO: 1586; WAN024GI8_at; Start 629; Stop 653
tagagtggttattccgtgtagctaa

SEQ ID NO: 246544 - DNA, 25 bp, Artificial
  probe
  misc_feature (1)..(25): SEQ ID NO: 1586; WAN024GI8_at; Start 688; Stop 712
gggaatatttcattcataggaaaag

SEQ ID NO: 246545 - DNA, 25 bp, Artificial
  probe
  misc_feature (1)..(25): SEQ ID NO: 1586; WAN024GI8_at; Start 345; Stop 369
gcaagatatgctcaaagtatttaag

SEQ ID NO: 246546 - DNA, 25 bp, Artificial
  probe
  misc_feature (1)..(25): SEQ ID NO: 1586; WAN024GI8_at; Start 578; Stop 602
tcttgtctggtcatatccaacgagc

SEQ ID NO: 246547 - DNA, 25 bp, Artificial
  probe
  misc_feature (1)..(25): SEQ ID NO: 1586; WAN024GI8_at; Start 642; Stop 666
ccgtgtagctaatgagcctaaacgt

SEQ ID NO: 246548 - DNA, 25 bp, Artificial
  probe
  misc_feature (1)..(25): SEQ ID NO: 1586; WAN024GI8_at; Start 622; Stop 646
tcaaatttagagtggttattccgtg

SEQ ID NO: 246549 - DNA, 25 bp, Artificial
  probe
  misc_feature (1)..(25): SEQ ID NO: 1586; WAN024GI8_at; Start 635; Stop 659
ggttattccgtgtagctaatgagcc

SEQ ID NO: 246550 - DNA, 25 bp, Artificial
  probe
  misc_feature (1)..(25): SEQ ID NO: 1586; WAN024GI8_at; Start 391; Stop 415
gttattggacacagaaatggctatt

SEQ ID NO: 246551 - DNA, 25 bp, Artificial
  probe
  misc_feature (1)..(25): SEQ ID NO: 1586; WAN024GI8_at; Start 476; Stop 500
tgtttattggaattacgtctcctaa

SEQ ID NO: 246552 - DNA, 25 bp, Artificial
  probe
  misc_feature (1)..(25): SEQ ID NO: 1586; WAN024GI8_at; Start 638; Stop 662
tattccgtgtagctaatgagcctaa

SEQ ID NO: 246553 - DNA, 25 bp, Artificial
  probe
  misc_feature (1)..(25): SEQ ID NO: 1586; WAN024GI8_at; Start 42; Stop 66
gcttacgatgaatgaaacgatagat

SEQ ID NO: 246554 - DNA, 25 bp, Artificial
  probe
  misc_feature (1)..(25): SEQ ID NO: 2766; WAN024GI9_at; Start 30; Stop 54
aaacatctctgtaaaacgggtcata

SEQ ID NO: 246555 - DNA, 25 bp, Artificial
  probe
  misc_feature (1)..(25): SEQ ID NO: 2766; WAN024GI9_at; Start 41; Stop 65
taaaacgggtcatattatctctatt

SEQ ID NO: 246556 - DNA, 25 bp, Artificial
  probe
  misc_feature (1)..(25): SEQ ID NO: 2766; WAN024GI9_at; Start 187; Stop 211
gcattgtggtttagtattcgtttta

SEQ ID NO: 246557 - DNA, 25 bp, Artificial
  probe
  misc_feature (1)..(25): SEQ ID NO: 2766; WAN024GI9_at; Start 172; Stop 196
ctttgcgcaattacggcattgtggt

SEQ ID NO: 246558 - DNA, 25 bp, Artificial
  probe
  misc_feature (1)..(25): SEQ ID NO: 2766; WAN024GI9_at; Start 176; Stop 200
gcgcaattacggcattgtggtttag

SEQ ID NO: 246559 - DNA, 25 bp, Artificial
  probe
  misc_feature (1)..(25): SEQ ID NO: 2766; WAN024GI9_at; Start 194; Stop 218
ggtttagtattcgttttatgatcat

SEQ ID NO: 246560 - DNA, 25 bp, Artificial
  probe
  misc_feature (1)..(25): SEQ ID NO: 2766; WAN024GI9_at; Start 89; Stop 113
tatcaattggatttactttatctcc

SEQ ID NO: 246561 - DNA, 25 bp, Artificial
  probe
  misc_feature (1)..(25): SEQ ID NO: 2766; WAN024GI9_at; Start 170; Stop 194
tactttgcgcaattacggcattgtg

SEQ ID NO: 246562 - DNA, 25 bp, Artificial
  probe
  misc_feature (1)..(25): SEQ ID NO: 2766; WAN024GI9_at; Start 161; Stop 185
tatcttttttactttgcgcaattac

SEQ ID NO: 246563 - DNA, 25 bp, Artificial
  probe
  misc_feature (1)..(25): SEQ ID NO: 2766; WAN024GI9_at; Start 205; Stop 229
cgttttatgatcataaaatttccct

SEQ ID NO: 246564 - DNA, 25 bp, Artificial
  probe
  misc_feature (1)..(25): SEQ ID NO: 2766; WAN024GI9_at; Start 177; Stop 201
cgcaattacggcattgtggtttagt

SEQ ID NO: 246565 - DNA, 25 bp, Artificial
  probe
  misc_feature (1)..(25): SEQ ID NO: 2766; WAN024GI9_at; Start 15; Stop 39
caaaggaacgttaataaacatctct

SEQ ID NO: 246566 - DNA, 25 bp, Artificial
  probe
  misc_feature (1)..(25): SEQ ID NO: 2766; WAN024GI9_at; Start 168; Stop 192
tttactttgcgcaattacggcattg

SEQ ID NO: 246567 - DNA, 25 bp, Artificial
  probe
  misc_feature (1)..(25): SEQ ID NO: 2766; WAN024GI9_at; Start 19; Stop 43
ggaacgttaataaacatctctgtaa

SEQ ID NO: 246568 - DNA, 25 bp, Artificial
  probe
  misc_feature (1)..(25): SEQ ID NO: 2766; WAN024GI9_at; Start 74; Stop 98
aaaaacttttctcaatatcaattgg

SEQ ID NO: 246569 - DNA, 25 bp, Artificial
  probe
  misc_feature (1)..(25): SEQ ID NO: 2766; WAN024GI9_at; Start 33; Stop 57
catctctgtaaaacgggtcatatta

SEQ ID NO: 246570 - DNA, 25 bp, Artificial
  probe
  misc_feature (1)..(25): SEQ ID NO: 2766; WAN024GI9_at; Start 183; Stop 207
tacggcattgtggtttagtattcgt

SEQ ID NO: 246571 - DNA, 25 bp, Artificial
  probe
  misc_feature (1)..(25): SEQ ID NO: 2766; WAN024GI9_at; Start 1; Stop 25
atgtacaccaactccaaaggaacgt

SEQ ID NO: 246572 - DNA, 25 bp, Artificial
  probe
  misc_feature (1)..(25): SEQ ID NO: 2766; WAN024GI9_at; Start 141; Stop 165
tccaaaaagaagaatatcgatatct

SEQ ID NO: 246573 - DNA, 25 bp, Artificial
  probe
  misc_feature (1)..(25): SEQ ID NO: 2766; WAN024GI9_at; Start 179; Stop 203
caattacggcattgtggtttagtat

SEQ ID NO: 246574 - DNA, 25 bp, Artificial
  probe
  misc_feature (1)..(25): SEQ ID NO: 2766; WAN024GI9_at; Start 37; Stop 61
tctgtaaaacgggtcatattatctc

SEQ ID NO: 246575 - DNA, 25 bp, Artificial
  probe
  misc_feature (1)..(25): SEQ ID NO: 2766; WAN024GI9_at; Start 173; Stop 197
tttgcgcaattacggcattgtggtt

SEQ ID NO: 246576 - DNA, 25 bp, Artificial
  probe
  misc_feature (1)..(25): SEQ ID NO: 2766; WAN024GI9_at; Start 171; Stop 195
actttgcgcaattacggcattgtgg

SEQ ID NO: 246577 - DNA, 25 bp, Artificial
  probe
  misc_feature (1)..(25): SEQ ID NO: 2766; WAN024GI9_at; Start 158; Stop 182
cgatatcttttttactttgcgcaat

SEQ ID NO: 246578 - DNA, 25 bp, Artificial
  probe
  misc_feature (1)..(25): SEQ ID NO: 2766; WAN024GI9_at; Start 29; Stop 53
taaacatctctgtaaaacgggtcat

SEQ ID NO: 246579 - DNA, 25 bp, Artificial
  probe
  misc_feature (1)..(25): SEQ ID NO: 2766; WAN024GI9_at; Start 155; Stop 179
tatcgatatcttttttactttgcgc

SEQ ID NO: 246580 - DNA, 25 bp, Artificial
  probe
  misc_feature (1)..(25): SEQ ID NO: 2766; WAN024GI9_at; Start 48; Stop 72
ggtcatattatctctatttttgaga

SEQ ID NO: 246581 - DNA, 25 bp, Artificial
  probe
  misc_feature (1)..(25): SEQ ID NO: 2766; WAN024GI9_at; Start 46; Stop 70
cgggtcatattatctctatttttga

SEQ ID NO: 246582 - DNA, 25 bp, Artificial
  probe
  misc_feature (1)..(25): SEQ ID NO: 2766; WAN024GI9_at; Start 31; Stop 55
aacatctctgtaaaacgggtcatat

SEQ ID NO: 246583 - DNA, 25 bp, Artificial
  probe
  misc_feature (1)..(25): SEQ ID NO: 2766; WAN024GI9_at; Start 137; Stop 161
cccttccaaaaagaagaatatcgat

SEQ ID NO: 246584 - DNA, 25 bp, Artificial
  probe
  misc_feature (1)..(25): SEQ ID NO: 2766; WAN024GI9_at; Start 39; Stop 63
tgtaaaacgggtcatattatctcta

SEQ ID NO: 246585 - DNA, 25 bp, Artificial
  probe
  misc_feature (1)..(25): SEQ ID NO: 2766; WAN024GI9_at; Start 185; Stop 209
cggcattgtggtttagtattcgttt

SEQ ID NO: 246586 - DNA, 25 bp, Artificial
  probe
  misc_feature (1)..(25): SEQ ID NO: 2766; WAN024GI9_at; Start 120; Stop 144
tcttccaaaagctattccccttcca

SEQ ID NO: 246587 - DNA, 25 bp, Artificial
  probe
  misc_feature (1)..(25): SEQ ID NO: 2766; WAN024GI9_at; Start 20; Stop 44
gaacgttaataaacatctctgtaaa

SEQ ID NO: 246588 - DNA, 25 bp, Artificial
  probe
  misc_feature (1)..(25): SEQ ID NO: 1720; WAN024GIA_at; Start 712; Stop 736
cctagagaatatgaatgtggtgaac

SEQ ID NO: 246589 - DNA, 25 bp, Artificial
  probe
  misc_feature (1)..(25): SEQ ID NO: 1720; WAN024GIA_at; Start 805; Stop 829
gctcatattcgtcgcttaacaaaaa

SEQ ID NO: 246590 - DNA, 25 bp, Artificial
  probe
  misc_feature (1)..(25): SEQ ID NO: 1720; WAN024GIA_at; Start 555; Stop 579
cattcaagatttctattgtactgag

SEQ ID NO: 246591 - DNA, 25 bp, Artificial
  probe
  misc_feature (1)..(25): SEQ ID NO: 1720; WAN024GIA_at; Start 566; Stop 590
tctattgtactgagtttaaccaaga

SEQ ID NO: 246592 - DNA, 25 bp, Artificial
  probe
  misc_feature (1)..(25): SEQ ID NO: 1720; WAN024GIA_at; Start 454; Stop 478
gaagctgcattcatagcgctacatt

SEQ ID NO: 246593 - DNA, 25 bp, Artificial
  probe
  misc_feature (1)..(25): SEQ ID NO: 1720; WAN024GIA_at; Start 575; Stop 599
ctgagtttaaccaagattctattga

SEQ ID NO: 246594 - DNA, 25 bp, Artificial
  probe
  misc_feature (1)..(25): SEQ ID NO: 1720; WAN024GIA_at; Start 10; Stop 34
aaacgaatactaaaccacaatgccg

SEQ ID NO: 246595 - DNA, 25 bp, Artificial
  probe
  misc_feature (1)..(25): SEQ ID NO: 1720; WAN024GIA_at; Start 679; Stop 703
gaagacttgttagcattaatgaaaa

SEQ ID NO: 246596 - DNA, 25 bp, Artificial
  probe
  misc_feature (1)..(25): SEQ ID NO: 1720; WAN024GIA_at; Start 539; Stop 563
tgggaattgagaaaatcattcaaga

SEQ ID NO: 246597 - DNA, 25 bp, Artificial
  probe
  misc_feature (1)..(25): SEQ ID NO: 1720; WAN024GIA_at; Start 336; Stop 360
tattatttcgaatcccctacgctgg

SEQ ID NO: 246598 - DNA, 25 bp, Artificial
  probe
  misc_feature (1)..(25): SEQ ID NO: 1720; WAN024GIA_at; Start 204; Stop 228
ggagttggtgtacatcaccgaaaaa

SEQ ID NO: 246599 - DNA, 25 bp, Artificial
  probe
  misc_feature (1)..(25): SEQ ID NO: 1720; WAN024GIA_at; Start 465; Stop 489
catagcgctacattttgttaatgct

SEQ ID NO: 246600 - DNA, 25 bp, Artificial
  probe
  misc_feature (1)..(25): SEQ ID NO: 1720; WAN024GIA_at; Start 195; Stop 219
cgttcctttggagttggtgtacatc

SEQ ID NO: 246601 - DNA, 25 bp, Artificial
  probe
  misc_feature (1)..(25): SEQ ID NO: 1720; WAN024GIA_at; Start 177; Stop 201
tacagagatgtttattaacgttcct

SEQ ID NO: 246602 - DNA, 25 bp, Artificial
  probe
  misc_feature (1)..(25): SEQ ID NO: 1720; WAN024GIA_at; Start 427; Stop 451
gagttaggtattgaacttccaattg

SEQ ID NO: 246603 - DNA, 25 bp, Artificial
  probe
  misc_feature (1)..(25): SEQ ID NO: 1720; WAN024GIA_at; Start 3; Stop 27
gatcataaaacgaatactaaaccac

SEQ ID NO: 246604 - DNA, 25 bp, Artificial
  probe
  misc_feature (1)..(25): SEQ ID NO: 1720; WAN024GIA_at; Start 508; Stop 532
caagagtcgtataaaatcactgaaa

SEQ ID NO: 246605 - DNA, 25 bp, Artificial
  probe
  misc_feature (1)..(25): SEQ ID NO: 1720; WAN024GIA_at; Start 525; Stop 549
cactgaaataattatgggaattgag

SEQ ID NO: 246606 - DNA, 25 bp, Artificial
  probe
  misc_feature (1)..(25): SEQ ID NO: 1720; WAN024GIA_at; Start 626; Stop 650
aattatttgcccatcgcttggttga

SEQ ID NO: 246607 - DNA, 25 bp, Artificial
  probe
  misc_feature (1)..(25): SEQ ID NO: 1720; WAN024GIA_at; Start 18; Stop 42
actaaaccacaatgccgtaattgcg

SEQ ID NO: 246608 - DNA, 25 bp, Artificial
  probe
  misc_feature (1)..(25): SEQ ID NO: 1720; WAN024GIA_at; Start 787; Stop 811
gaattagtttatttgatggctcata

SEQ ID NO: 246609 - DNA, 25 bp, Artificial
  probe
  misc_feature (1)..(25): SEQ ID NO: 1720; WAN024GIA_at; Start 162; Stop 186
taatatgacccgttttacagagatg

SEQ ID NO: 246610 - DNA, 25 bp, Artificial
  probe
  misc_feature (1)..(25): SEQ ID NO: 1720; WAN024GIA_at; Start 27; Stop 51
caatgccgtaattgcgcaaagtaaa

SEQ ID NO: 246611 - DNA, 25 bp, Artificial
  probe
  misc_feature (1)..(25): SEQ ID NO: 1720; WAN024GIA_at; Start 496; Stop 520
gaaaataattttcaagagtcgtata

SEQ ID NO: 246612 - DNA, 25 bp, Artificial
  probe
  misc_feature (1)..(25): SEQ ID NO: 1720; WAN024GIA_at; Start 800; Stop 824
tgatggctcatattcgtcgcttaac

SEQ ID NO: 246613 - DNA, 25 bp, Artificial
  probe
  misc_feature (1)..(25): SEQ ID NO: 1720; WAN024GIA_at; Start 769; Stop 793
tatttgctgacttctagtgaattag

SEQ ID NO: 246614 - DNA, 25 bp, Artificial
  probe
  misc_feature (1)..(25): SEQ ID NO: 1720; WAN024GIA_at; Start 39; Stop 63
tgcgcaaagtaaaaaagatatcgat

SEQ ID NO: 246615 - DNA, 25 bp, Artificial
  probe
  misc_feature (1)..(25): SEQ ID NO: 1720; WAN024GIA_at; Start 211; Stop 235
gtgtacatcaccgaaaaaataatta

SEQ ID NO: 246616 - DNA, 25 bp, Artificial
  probe
  misc_feature (1)..(25): SEQ ID NO: 1720; WAN024GIA_at; Start 149; Stop 173
tcaaaaatagagataatatgacccg

SEQ ID NO: 246617 - DNA, 25 bp, Artificial
  probe
  misc_feature (1)..(25): SEQ ID NO: 1720; WAN024GIA_at; Start 695; Stop 719
taatgaaaaataaatatcctagaga

SEQ ID NO: 246618 - DNA, 25 bp, Artificial
  probe
  misc_feature (1)..(25): SEQ ID NO: 1720; WAN024GIA_at; Start 121; Stop 145
ccaattgatattgagaaaagttttt

SEQ ID NO: 246619 - DNA, 25 bp, Artificial
  probe
  misc_feature (1)..(25): SEQ ID NO: 1720; WAN024GIA_at; Start 106; Stop 130
ggagataaagtaaatccaattgata

SEQ ID NO: 246620 - DNA, 25 bp, Artificial
  probe
  misc_feature (1)..(25): SEQ ID NO: 1720; WAN024GIA_at; Start 58; Stop 82
atcgatattcttctttttggaaggg

SEQ ID NO: 246621 - DNA, 25 bp, Artificial
  probe
  misc_feature (1)..(25): SEQ ID NO: 1720; WAN024GIA_at; Start 652; Stop 676
aatacaacttattgtgacgatgatg

SEQ ID NO: 246622 - DNA, 25 bp, Artificial
  probe
  misc_feature (1)..(25): SEQ ID NO: 3080; WAN024GIB_at; Start 13; Stop 37
gaaatcttcagaagtaaagatagtc

SEQ ID NO: 246623 - DNA, 25 bp, Artificial
  probe
  misc_feature (1)..(25): SEQ ID NO: 3080; WAN024GIB_at; Start 31; Stop 55
gatagtctactcctgcttgaaaaag

SEQ ID NO: 246624 - DNA, 25 bp, Artificial
  probe
  misc_feature (1)..(25): SEQ ID NO: 3080; WAN024GIB_at; Start 21; Stop 45
cagaagtaaagatagtctactcctg

SEQ ID NO: 246625 - DNA, 25 bp, Artificial
  probe
  misc_feature (1)..(25): SEQ ID NO: 3080; WAN024GIB_at; Start 60; Stop 84
accagaaatagtacgtagggtagcg

SEQ ID NO: 246626 - DNA, 25 bp, Artificial
  probe
  misc_feature (1)..(25): SEQ ID NO: 3080; WAN024GIB_at; Start 2; Stop 26
tgtttcatctagaaatcttcagaag

SEQ ID NO: 246627 - DNA, 25 bp, Artificial
  probe
  misc_feature (1)..(25): SEQ ID NO: 3080; WAN024GIB_at; Start 29; Stop 53
aagatagtctactcctgcttgaaaa

SEQ ID NO: 246628 - DNA, 25 bp, Artificial
  probe
  misc_feature (1)..(25): SEQ ID NO: 3080; WAN024GIB_at; Start 4; Stop 28
tttcatctagaaatcttcagaagta

SEQ ID NO: 246629 - DNA, 25 bp, Artificial
  probe
  misc_feature (1)..(25): SEQ ID NO: 3080; WAN024GIB_at; Start 33; Stop 57
tagtctactcctgcttgaaaaagaa

SEQ ID NO: 246630 - DNA, 25 bp, Artificial
  probe
  misc_feature (1)..(25): SEQ ID NO: 3080; WAN024GIB_at; Start 32; Stop 56
atagtctactcctgcttgaaaaaga

SEQ ID NO: 246631 - DNA, 25 bp, Artificial
  probe
  misc_feature (1)..(25): SEQ ID NO: 3080; WAN024GIB_at; Start 27; Stop 51
taaagatagtctactcctgcttgaa

SEQ ID NO: 246632 - DNA, 25 bp, Artificial
  probe
  misc_feature (1)..(25): SEQ ID NO: 3080; WAN024GIB_at; Start 23; Stop 47
gaagtaaagatagtctactcctgct

SEQ ID NO: 246633 - DNA, 25 bp, Artificial
  probe
  misc_feature (1)..(25): SEQ ID NO: 3080; WAN024GIB_at; Start 20; Stop 44
tcagaagtaaagatagtctactcct

SEQ ID NO: 246634 - DNA, 25 bp, Artificial
  probe
  misc_feature (1)..(25): SEQ ID NO: 3080; WAN024GIB_at; Start 3; Stop 27
gtttcatctagaaatcttcagaagt

SEQ ID NO: 246635 - DNA, 25 bp, Artificial
  probe
  misc_feature (1)..(25): SEQ ID NO: 3080; WAN024GIB_at; Start 11; Stop 35
tagaaatcttcagaagtaaagatag

SEQ ID NO: 246636 - DNA, 25 bp, Artificial
  probe
  misc_feature (1)..(25): SEQ ID NO: 3080; WAN024GIB_at; Start 30; Stop 54
agatagtctactcctgcttgaaaaa

SEQ ID NO: 246637 - DNA, 25 bp, Artificial
  probe
  misc_feature (1)..(25): SEQ ID NO: 3080; WAN024GIB_at; Start 18; Stop 42
cttcagaagtaaagatagtctactc

SEQ ID NO: 246638 - DNA, 25 bp, Artificial
  probe
  misc_feature (1)..(25): SEQ ID NO: 3080; WAN024GIB_at; Start 25; Stop 49
agtaaagatagtctactcctgcttg

SEQ ID NO: 246639 - DNA, 25 bp, Artificial
  probe
  misc_feature (1)..(25): SEQ ID NO: 3080; WAN024GIB_at; Start 22; Stop 46
agaagtaaagatagtctactcctgc

SEQ ID NO: 246640 - DNA, 25 bp, Artificial
  probe
  misc_feature (1)..(25): SEQ ID NO: 3080; WAN024GIB_at; Start 6; Stop 30
tcatctagaaatcttcagaagtaaa

SEQ ID NO: 246641 - DNA, 25 bp, Artificial
  probe
  misc_feature (1)..(25): SEQ ID NO: 3080; WAN024GIB_at; Start 26; Stop 50
gtaaagatagtctactcctgcttga

SEQ ID NO: 246642 - DNA, 25 bp, Artificial
  probe
  misc_feature (1)..(25): SEQ ID NO: 3080; WAN024GIB_at; Start 17; Stop 41
tcttcagaagtaaagatagtctact

SEQ ID NO: 246643 - DNA, 25 bp, Artificial
  probe
  misc_feature (1)..(25): SEQ ID NO: 3080; WAN024GIB_at; Start 62; Stop 86
cagaaatagtacgtagggtagcgat

SEQ ID NO: 246644 - DNA, 25 bp, Artificial
  probe
  misc_feature (1)..(25): SEQ ID NO: 3080; WAN024GIB_at; Start 35; Stop 59
gtctactcctgcttgaaaaagaaaa

SEQ ID NO: 246645 - DNA, 25 bp, Artificial
  probe
  misc_feature (1)..(25): SEQ ID NO: 3080; WAN024GIB_at; Start 9; Stop 33
tctagaaatcttcagaagtaaagat

SEQ ID NO: 246646 - DNA, 25 bp, Artificial
  probe
  misc_feature (1)..(25): SEQ ID NO: 3080; WAN024GIB_at; Start 34; Stop 58
agtctactcctgcttgaaaaagaaa

SEQ ID NO: 246647 - DNA, 25 bp, Artificial
  probe
  misc_feature (1)..(25): SEQ ID NO: 3080; WAN024GIB_at; Start 15; Stop 39
aatcttcagaagtaaagatagtcta

SEQ ID NO: 246648 - DNA, 25 bp, Artificial
  probe
  misc_feature (1)..(25): SEQ ID NO: 3080; WAN024GIB_at; Start 16; Stop 40
atcttcagaagtaaagatagtctac

SEQ ID NO: 246649 - DNA, 25 bp, Artificial
  probe
  misc_feature (1)..(25): SEQ ID NO: 3080; WAN024GIB_at; Start 24; Stop 48
aagtaaagatagtctactcctgctt

SEQ ID NO: 246650 - DNA, 25 bp, Artificial
  probe
  misc_feature (1)..(25): SEQ ID NO: 3080; WAN024GIB_at; Start 7; Stop 31
catctagaaatcttcagaagtaaag

SEQ ID NO: 246651 - DNA, 25 bp, Artificial
  probe
  misc_feature (1)..(25): SEQ ID NO: 3080; WAN024GIB_at; Start 36; Stop 60
tctactcctgcttgaaaaagaaaaa

SEQ ID NO: 246652 - DNA, 25 bp, Artificial
  probe
  misc_feature (1)..(25): SEQ ID NO: 3080; WAN024GIB_at; Start 19; Stop 43
ttcagaagtaaagatagtctactcc

SEQ ID NO: 246653 - DNA, 25 bp, Artificial
  probe
  misc_feature (1)..(25): SEQ ID NO: 3080; WAN024GIB_at; Start 63; Stop 87
agaaatagtacgtagggtagcgatc

SEQ ID NO: 246654 - DNA, 25 bp, Artificial
  probe
  misc_feature (1)..(25): SEQ ID NO: 3080; WAN024GIB_at; Start 28; Stop 52
aaagatagtctactcctgcttgaaa

SEQ ID NO: 246655 - DNA, 25 bp, Artificial
  probe
  misc_feature (1)..(25): SEQ ID NO: 3080; WAN024GIB_at; Start 61; Stop 85
ccagaaatagtacgtagggtagcga

SEQ ID NO: 246656 - DNA, 25 bp, Artificial
  probe
  misc_feature (1)..(25): SEQ ID NO: 7285; WAN024GIC_at; Start 44; Stop 68
gcagctcagttcttgccatccttct

SEQ ID NO: 246657 - DNA, 25 bp, Artificial
  probe
  misc_feature (1)..(25): SEQ ID NO: 7285; WAN024GIC_at; Start 134; Stop 158
tgatatccatctcccatgaaatagg

SEQ ID NO: 246658 - DNA, 25 bp, Artificial
  probe
  misc_feature (1)..(25): SEQ ID NO: 7285; WAN024GIC_at; Start 249; Stop 273
aaataccgtcttcctcaacaatcct

SEQ ID NO: 246659 - DNA, 25 bp, Artificial
  probe
  misc_feature (1)..(25): SEQ ID NO: 7285; WAN024GIC_at; Start 58; Stop 82
gccatccttcttcctcgcttttttg

SEQ ID NO: 246660 - DNA, 25 bp, Artificial
  probe
  misc_feature (1)..(25): SEQ ID NO: 7285; WAN024GIC_at; Start 130; Stop 154
gcgctgatatccatctcccatgaaa

SEQ ID NO: 246661 - DNA, 25 bp, Artificial
  probe
  misc_feature (1)..(25): SEQ ID NO: 7285; WAN024GIC_at; Start 180; Stop 204
taaaatgtcccttttcatccaggag

SEQ ID NO: 246662 - DNA, 25 bp, Artificial
  probe
  misc_feature (1)..(25): SEQ ID NO: 7285; WAN024GIC_at; Start 214; Stop 238
aacaagtcgctcaagaatcttggca

SEQ ID NO: 246663 - DNA, 25 bp, Artificial
  probe
  misc_feature (1)..(25): SEQ ID NO: 7285; WAN024GIC_at; Start 4; Stop 28
cggactcgtaaaacgagacgttctg

SEQ ID NO: 246664 - DNA, 25 bp, Artificial
  probe
  misc_feature (1)..(25): SEQ ID NO: 7285; WAN024GIC_at; Start 90; Stop 114
tgcccttcatatctacacgcttgtc

SEQ ID NO: 246665 - DNA, 25 bp, Artificial
  probe
  misc_feature (1)..(25): SEQ ID NO: 7285; WAN024GIC_at; Start 114; Stop 138
ccagatagcgataaacgcgctgata

SEQ ID NO: 246666 - DNA, 25 bp, Artificial
  probe
  misc_feature (1)..(25): SEQ ID NO: 7285; WAN024GIC_at; Start 108; Stop 132
gcttgtccagatagcgataaacgcg

SEQ ID NO: 246667 - DNA, 25 bp, Artificial
  probe
  misc_feature (1)..(25): SEQ ID NO: 7285; WAN024GIC_at; Start 225; Stop 249
caagaatcttggcaaagatgtggca

SEQ ID NO: 246668 - DNA, 25 bp, Artificial
  probe
  misc_feature (1)..(25): SEQ ID NO: 7285; WAN024GIC_at; Start 267; Stop 291
caatcctatctacccgacaatctaa

SEQ ID NO: 246669 - DNA, 25 bp, Artificial
  probe
  misc_feature (1)..(25): SEQ ID NO: 7285; WAN024GIC_at; Start 139; Stop 163
tccatctcccatgaaataggttggg

SEQ ID NO: 246670 - DNA, 25 bp, Artificial
  probe
  misc_feature (1)..(25): SEQ ID NO: 7285; WAN024GIC_at; Start 246; Stop 270
ggcaaataccgtcttcctcaacaat

SEQ ID NO: 246671 - DNA, 25 bp, Artificial
  probe
  misc_feature (1)..(25): SEQ ID NO: 7285; WAN024GIC_at; Start 69; Stop 93
tcctcgcttttttgatgaaactgcc

SEQ ID NO: 246672 - DNA, 25 bp, Artificial
  probe
  misc_feature (1)..(25): SEQ ID NO: 7285; WAN024GIC_at; Start 186; Stop 210
gtcccttttcatccaggagttctgg

SEQ ID NO: 246673 - DNA, 25 bp, Artificial
  probe
  misc_feature (1)..(25): SEQ ID NO: 7285; WAN024GIC_at; Start 111; Stop 135
tgtccagatagcgataaacgcgctg

SEQ ID NO: 246674 - DNA, 25 bp, Artificial
  probe
  misc_feature (1)..(25): SEQ ID NO: 7285; WAN024GIC_at; Start 125; Stop 149
taaacgcgctgatatccatctccca

SEQ ID NO: 246675 - DNA, 25 bp, Artificial
  probe
  misc_feature (1)..(25): SEQ ID NO: 7285; WAN024GIC_at; Start 121; Stop 145
gcgataaacgcgctgatatccatct

SEQ ID NO: 246676 - DNA, 25 bp, Artificial
  probe
  misc_feature (1)..(25): SEQ ID NO: 7285; WAN024GIC_at; Start 2; Stop 26
tgcggactcgtaaaacgagacgttc

SEQ ID NO: 246677 - DNA, 25 bp, Artificial
  probe
  misc_feature (1)..(25): SEQ ID NO: 7285; WAN024GIC_at; Start 28; Stop 52
gtttcgattttatctggcagctcag

SEQ ID NO: 246678 - DNA, 25 bp, Artificial
  probe
  misc_feature (1)..(25): SEQ ID NO: 7285; WAN024GIC_at; Start 85; Stop 109
gaaactgcccttcatatctacacgc

SEQ ID NO: 246679 - DNA, 25 bp, Artificial
  probe
  misc_feature (1)..(25): SEQ ID NO: 7285; WAN024GIC_at; Start 231; Stop 255
tcttggcaaagatgtggcaaatacc

SEQ ID NO: 246680 - DNA, 25 bp, Artificial
  probe
  misc_feature (1)..(25): SEQ ID NO: 7285; WAN024GIC_at; Start 263; Stop 287
tcaacaatcctatctacccgacaat

SEQ ID NO: 246681 - DNA, 25 bp, Artificial
  probe
  misc_feature (1)..(25): SEQ ID NO: 7285; WAN024GIC_at; Start 211; Stop 235
ggcaacaagtcgctcaagaatcttg

SEQ ID NO: 246682 - DNA, 25 bp, Artificial
  probe
  misc_feature (1)..(25): SEQ ID NO: 7285; WAN024GIC_at; Start 17; Stop 41
cgagacgttctgtttcgattttatc

SEQ ID NO: 246683 - DNA, 25 bp, Artificial
  probe
  misc_feature (1)..(25): SEQ ID NO: 7285; WAN024GIC_at; Start 74; Stop 98
gcttttttgatgaaactgcccttca

SEQ ID NO: 246684 - DNA, 25 bp, Artificial
  probe
  misc_feature (1)..(25): SEQ ID NO: 7285; WAN024GIC_at; Start 234; Stop 258
tggcaaagatgtggcaaataccgtc

SEQ ID NO: 246685 - DNA, 25 bp, Artificial
  probe
  misc_feature (1)..(25): SEQ ID NO: 7285; WAN024GIC_at; Start 197; Stop 221
tccaggagttctggggcaacaagtc

SEQ ID NO: 246686 - DNA, 25 bp, Artificial
  probe
  misc_feature (1)..(25): SEQ ID NO: 7285; WAN024GIC_at; Start 99; Stop 123
tatctacacgcttgtccagatagcg

SEQ ID NO: 246687 - DNA, 25 bp, Artificial
  probe
  misc_feature (1)..(25): SEQ ID NO: 7285; WAN024GIC_at; Start 103; Stop 127
tacacgcttgtccagatagcgataa

SEQ ID NO: 246688 - DNA, 25 bp, Artificial
  probe
  misc_feature (1)..(25): SEQ ID NO: 7285; WAN024GIC_at; Start 35; Stop 59
ttttatctggcagctcagttcttgc

SEQ ID NO: 246689 - DNA, 25 bp, Artificial
  probe
  misc_feature (1)..(25): SEQ ID NO: 7285; WAN024GIC_at; Start 241; Stop 265
gatgtggcaaataccgtcttcctca

SEQ ID NO: 246690 - DNA, 25 bp, Artificial
  probe
  misc_feature (1)..(25): SEQ ID NO: 4029; WAN024GID_at; Start 417; Stop 441
caaaaaagcgaggaagaaggatggc

SEQ ID NO: 246691 - DNA, 25 bp, Artificial
  probe
  misc_feature (1)..(25): SEQ ID NO: 4029; WAN024GID_at; Start 253; Stop 277
cacatctttgccaagattcttgagc

SEQ ID NO: 246692 - DNA, 25 bp, Artificial
  probe
  misc_feature (1)..(25): SEQ ID NO: 4029; WAN024GID_at; Start 406; Stop 430
ggcagtttcatcaaaaaagcgagga

SEQ ID NO: 246693 - DNA, 25 bp, Artificial
  probe
  misc_feature (1)..(25): SEQ ID NO: 4029; WAN024GID_at; Start 321; Stop 345
aaatcaactgtttgccccaacctat

SEQ ID NO: 246694 - DNA, 25 bp, Artificial
  probe
  misc_feature (1)..(25): SEQ ID NO: 4029; WAN024GID_at; Start 85; Stop 109
tctatgcttgcgatggagcaggctg

SEQ ID NO: 246695 - DNA, 25 bp, Artificial
  probe
  misc_feature (1)..(25): SEQ ID NO: 4029; WAN024GID_at; Start 27; Stop 51
tgccgcagagcagatcaaacagtat

SEQ ID NO: 246696 - DNA, 25 bp, Artificial
  probe
  misc_feature (1)..(25): SEQ ID NO: 4029; WAN024GID_at; Start 60; Stop 84
tactgtgaatatttctgatgaaact

SEQ ID NO: 246697 - DNA, 25 bp, Artificial
  probe
  misc_feature (1)..(25): SEQ ID NO: 4029; WAN024GID_at; Start 228; Stop 252
gattgttgaggaagacggtatttgc

SEQ ID NO: 246698 - DNA, 25 bp, Artificial
  probe
  misc_feature (1)..(25): SEQ ID NO: 4029; WAN024GID_at; Start 98; Stop 122
tggagcaggctggttttatcagtca

SEQ ID NO: 246699 - DNA, 25 bp, Artificial
  probe
  misc_feature (1)..(25): SEQ ID NO: 4029; WAN024GID_at; Start 244; Stop 268
ggtatttgccacatctttgccaaga

SEQ ID NO: 246700 - DNA, 25 bp, Artificial
  probe
  misc_feature (1)..(25): SEQ ID NO: 4029; WAN024GID_at; Start 146; Stop 170
gagtgcattatgaaatttctgaacg

SEQ ID NO: 246701 - DNA, 25 bp, Artificial
  probe
  misc_feature (1)..(25): SEQ ID NO: 4029; WAN024GID_at; Start 329; Stop 353
tgtttgccccaacctatttcatggg

SEQ ID NO: 246702 - DNA, 25 bp, Artificial
  probe
  misc_feature (1)..(25): SEQ ID NO: 4029; WAN024GID_at; Start 267; Stop 291
gattcttgagcgacttgttgcccca

SEQ ID NO: 246703 - DNA, 25 bp, Artificial
  probe
  misc_feature (1)..(25): SEQ ID NO: 4029; WAN024GID_at; Start 296; Stop 320
tcctggatgaaaagggacattttaa

SEQ ID NO: 246704 - DNA, 25 bp, Artificial
  probe
  misc_feature (1)..(25): SEQ ID NO: 4029; WAN024GID_at; Start 106; Stop 130
gctggttttatcagtcatcaggaga

SEQ ID NO: 246705 - DNA, 25 bp, Artificial
  probe
  misc_feature (1)..(25): SEQ ID NO: 4029; WAN024GID_at; Start 183; Stop 207
tattttagacgcctgtccacttgtt

SEQ ID NO: 246706 - DNA, 25 bp, Artificial
  probe
  misc_feature (1)..(25): SEQ ID NO: 4029; WAN024GID_at; Start 190; Stop 214
gacgcctgtccacttgttttagatt

SEQ ID NO: 246707 - DNA, 25 bp, Artificial
  probe
  misc_feature (1)..(25): SEQ ID NO: 4029; WAN024GID_at; Start 116; Stop 140
tcagtcatcaggagaaattggaacg

SEQ ID NO: 246708 - DNA, 25 bp, Artificial
  probe
  misc_feature (1)..(25): SEQ ID NO: 4029; WAN024GID_at; Start 347; Stop 371
tcatgggagatggatatcagcgcgt

SEQ ID NO: 246709 - DNA, 25 bp, Artificial
  probe
  misc_feature (1)..(25): SEQ ID NO: 4029; WAN024GID_at; Start 361; Stop 385
tatcagcgcgtttatcgctatctgg

SEQ ID NO: 246710 - DNA, 25 bp, Artificial
  probe
  misc_feature (1)..(25): SEQ ID NO: 4029; WAN024GID_at; Start 311; Stop 335
gacattttaaaaatcaactgtttgc

SEQ ID NO: 246711 - DNA, 25 bp, Artificial
  probe
  misc_feature (1)..(25): SEQ ID NO: 4029; WAN024GID_at; Start 354; Stop 378
agatggatatcagcgcgtttatcgc

SEQ ID NO: 246712 - DNA, 25 bp, Artificial
  probe
  misc_feature (1)..(25): SEQ ID NO: 4029; WAN024GID_at; Start 32; Stop 56
cagagcagatcaaacagtatcaaaa

SEQ ID NO: 246713 - DNA, 25 bp, Artificial
  probe
  misc_feature (1)..(25): SEQ ID NO: 4029; WAN024GID_at; Start 128; Stop 152
agaaattggaacgtttgggagtgca

SEQ ID NO: 246714 - DNA, 25 bp, Artificial
  probe
  misc_feature (1)..(25): SEQ ID NO: 4029; WAN024GID_at; Start 76; Stop 100
gatgaaacttctatgcttgcgatgg

SEQ ID NO: 246715 - DNA, 25 bp, Artificial
  probe
  misc_feature (1)..(25): SEQ ID NO: 4029; WAN024GID_at; Start 390; Stop 414
gcgtgtagatatgaagggcagtttc

SEQ ID NO: 246716 - DNA, 25 bp, Artificial
  probe
  misc_feature (1)..(25): SEQ ID NO: 4029; WAN024GID_at; Start 234; Stop 258
tgaggaagacggtatttgccacatc

SEQ ID NO: 246717 - DNA, 25 bp, Artificial
  probe
  misc_feature (1)..(25): SEQ ID NO: 4029; WAN024GID_at; Start 20; Stop 44
gagagaatgccgcagagcagatcaa

SEQ ID NO: 246718 - DNA, 25 bp, Artificial
  probe
  misc_feature (1)..(25): SEQ ID NO: 4029; WAN024GID_at; Start 154; Stop 178
tatgaaatttctgaacgaactcaga

SEQ ID NO: 246719 - DNA, 25 bp, Artificial
  probe
  misc_feature (1)..(25): SEQ ID NO: 4029; WAN024GID_at; Start 337; Stop 361
ccaacctatttcatgggagatggat

SEQ ID NO: 246720 - DNA, 25 bp, Artificial
  probe
  misc_feature (1)..(25): SEQ ID NO: 4029; WAN024GID_at; Start 9; Stop 33
agtcgttgcgagagagaatgccgca

SEQ ID NO: 246721 - DNA, 25 bp, Artificial
  probe
  misc_feature (1)..(25): SEQ ID NO: 4029; WAN024GID_at; Start 270; Stop 294
tcttgagcgacttgttgccccagaa

SEQ ID NO: 246722 - DNA, 25 bp, Artificial
  probe
  misc_feature (1)..(25): SEQ ID NO: 4029; WAN024GID_at; Start 402; Stop 426
gaagggcagtttcatcaaaaaagcg

SEQ ID NO: 246723 - DNA, 25 bp, Artificial
  probe
  misc_feature (1)..(25): SEQ ID NO: 4029; WAN024GID_at; Start 136; Stop 160
gaacgtttgggagtgcattatgaaa

SEQ ID NO: 246724 - DNA, 25 bp, Artificial
  probe
  misc_feature (1)..(25): SEQ ID NO: 2401; WAN024GIE_at; Start 106; Stop 130
gaggtcgcctatccagcaggttttc

SEQ ID NO: 246725 - DNA, 25 bp, Artificial
  probe
  misc_feature (1)..(25): SEQ ID NO: 2401; WAN024GIE_at; Start 462; Stop 486
taccctcgaagctcgcataagagac

SEQ ID NO: 246726 - DNA, 25 bp, Artificial
  probe
  misc_feature (1)..(25): SEQ ID NO: 2401; WAN024GIE_at; Start 450; Stop 474
aaagcttggctttaccctcgaagct

SEQ ID NO: 246727 - DNA, 25 bp, Artificial
  probe
  misc_feature (1)..(25): SEQ ID NO: 2401; WAN024GIE_at; Start 118; Stop 142
ccagcaggttttcctccagtcaaga

SEQ ID NO: 246728 - DNA, 25 bp, Artificial
  probe
  misc_feature (1)..(25): SEQ ID NO: 2401; WAN024GIE_at; Start 406; Stop 430
ctaacttgctttggatataaccttc

SEQ ID NO: 246729 - DNA, 25 bp, Artificial
  probe
  misc_feature (1)..(25): SEQ ID NO: 2401; WAN024GIE_at; Start 458; Stop 482
gctttaccctcgaagctcgcataag

SEQ ID NO: 246730 - DNA, 25 bp, Artificial
  probe
  misc_feature (1)..(25): SEQ ID NO: 2401; WAN024GIE_at; Start 411; Stop 435
ttgctttggatataaccttcaaagt

SEQ ID NO: 246731 - DNA, 25 bp, Artificial
  probe
  misc_feature (1)..(25): SEQ ID NO: 2401; WAN024GIE_at; Start 97; Stop 121
agtttgccagaggtcgcctatccag

SEQ ID NO: 246732 - DNA, 25 bp, Artificial
  probe
  misc_feature (1)..(25): SEQ ID NO: 2401; WAN024GIE_at; Start 166; Stop 190
ctggagcacattcttccggagcgta

SEQ ID NO: 246733 - DNA, 25 bp, Artificial
  probe
  misc_feature (1)..(25): SEQ ID NO: 2401; WAN024GIE_at; Start 456; Stop 480
tggctttaccctcgaagctcgcata

SEQ ID NO: 246734 - DNA, 25 bp, Artificial
  probe
  misc_feature (1)..(25): SEQ ID NO: 2401; WAN024GIE_at; Start 35; Stop 59
cagaacgtctcgttttacgagtccg

SEQ ID NO: 246735 - DNA, 25 bp, Artificial
  probe
  misc_feature (1)..(25): SEQ ID NO: 2401; WAN024GIE_at; Start 165; Stop 189
tctggagcacattcttccggagcgt

SEQ ID NO: 246736 - DNA, 25 bp, Artificial
  probe
  misc_feature (1)..(25): SEQ ID NO: 2401; WAN024GIE_at; Start 454; Stop 478
cttggctttaccctcgaagctcgca

SEQ ID NO: 246737 - DNA, 25 bp, Artificial
  probe
  misc_feature (1)..(25): SEQ ID NO: 2401; WAN024GIE_at; Start 403; Stop 427
gaactaacttgctttggatataacc

SEQ ID NO: 246738 - DNA, 25 bp, Artificial
  probe
  misc_feature (1)..(25): SEQ ID NO: 2401; WAN024GIE_at; Start 392; Stop 416
ttcacaagattgaactaacttgctt

SEQ ID NO: 246739 - DNA, 25 bp, Artificial
  probe
  misc_feature (1)..(25): SEQ ID NO: 2401; WAN024GIE_at; Start 103; Stop 127
ccagaggtcgcctatccagcaggtt

SEQ ID NO: 246740 - DNA, 25 bp, Artificial
  probe
  misc_feature (1)..(25): SEQ ID NO: 2401; WAN024GIE_at; Start 463; Stop 487
accctcgaagctcgcataagagacc

SEQ ID NO: 246741 - DNA, 25 bp, Artificial
  probe
  misc_feature (1)..(25): SEQ ID NO: 2401; WAN024GIE_at; Start 105; Stop 129
agaggtcgcctatccagcaggtttt

SEQ ID NO: 246742 - DNA, 25 bp, Artificial
  probe
  misc_feature (1)..(25): SEQ ID NO: 2401; WAN024GIE_at; Start 452; Stop 476
agcttggctttaccctcgaagctcg

SEQ ID NO: 246743 - DNA, 25 bp, Artificial
  probe
  misc_feature (1)..(25): SEQ ID NO: 2401; WAN024GIE_at; Start 99; Stop 123
tttgccagaggtcgcctatccagca

SEQ ID NO: 246744 - DNA, 25 bp, Artificial
  probe
  misc_feature (1)..(25): SEQ ID NO: 2401; WAN024GIE_at; Start 163; Stop 187
tatctggagcacattcttccggagc

SEQ ID NO: 246745 - DNA, 25 bp, Artificial
  probe
  misc_feature (1)..(25): SEQ ID NO: 2401; WAN024GIE_at; Start 398; Stop 422
agattgaactaacttgctttggata

SEQ ID NO: 246746 - DNA, 25 bp, Artificial
  probe
  misc_feature (1)..(25): SEQ ID NO: 2401; WAN024GIE_at; Start 94; Stop 118
gctagtttgccagaggtcgcctatc

SEQ ID NO: 246747 - DNA, 25 bp, Artificial
  probe
  misc_feature (1)..(25): SEQ ID NO: 2401; WAN024GIE_at; Start 160; Stop 184
tattatctggagcacattcttccgg

SEQ ID NO: 246748 - DNA, 25 bp, Artificial
  probe
  misc_feature (1)..(25): SEQ ID NO: 2401; WAN024GIE_at; Start 162; Stop 186
ttatctggagcacattcttccggag

SEQ ID NO: 246749 - DNA, 25 bp, Artificial
  probe
  misc_feature (1)..(25): SEQ ID NO: 2401; WAN024GIE_at; Start 96; Stop 120
tagtttgccagaggtcgcctatcca

SEQ ID NO: 246750 - DNA, 25 bp, Artificial
  probe
  misc_feature (1)..(25): SEQ ID NO: 2401; WAN024GIE_at; Start 108; Stop 132
ggtcgcctatccagcaggttttcct

SEQ ID NO: 246751 - DNA, 25 bp, Artificial
  probe
  misc_feature (1)..(25): SEQ ID NO: 2401; WAN024GIE_at; Start 396; Stop 420
caagattgaactaacttgctttgga

SEQ ID NO: 246752 - DNA, 25 bp, Artificial
  probe
  misc_feature (1)..(25): SEQ ID NO: 2401; WAN024GIE_at; Start 460; Stop 484
tttaccctcgaagctcgcataagag

SEQ ID NO: 246753 - DNA, 25 bp, Artificial
  probe
  misc_feature (1)..(25): SEQ ID NO: 2401; WAN024GIE_at; Start 115; Stop 139
tatccagcaggttttcctccagtca

SEQ ID NO: 246754 - DNA, 25 bp, Artificial
  probe
  misc_feature (1)..(25): SEQ ID NO: 2401; WAN024GIE_at; Start 408; Stop 432
aacttgctttggatataaccttcaa

SEQ ID NO: 246755 - DNA, 25 bp, Artificial
  probe
  misc_feature (1)..(25): SEQ ID NO: 2401; WAN024GIE_at; Start 104; Stop 128
cagaggtcgcctatccagcaggttt

SEQ ID NO: 246756 - DNA, 25 bp, Artificial
  probe
  misc_feature (1)..(25): SEQ ID NO: 2401; WAN024GIE_at; Start 117; Stop 141
tccagcaggttttcctccagtcaag

SEQ ID NO: 246757 - DNA, 25 bp, Artificial
  probe
  misc_feature (1)..(25): SEQ ID NO: 2401; WAN024GIE_at; Start 148; Stop 172
gaagatgagatttattatctggagc

SEQ ID NO: 246758 - DNA, 25 bp, Artificial
  probe
  misc_feature (1)..(25): SEQ ID NO: 2229; WAN024GIF_at; Start 172; Stop 196
gacccaagcttcaaattccttcata

SEQ ID NO: 246759 - DNA, 25 bp, Artificial
  probe
  misc_feature (1)..(25): SEQ ID NO: 2229; WAN024GIF_at; Start 84; Stop 108
tggcatctttggcacgctcgtcctg

SEQ ID NO: 246760 - DNA, 25 bp, Artificial
  probe
  misc_feature (1)..(25): SEQ ID NO: 2229; WAN024GIF_at; Start 36; Stop 60
taccaagcaagaactgataagcatc

SEQ ID NO: 246761 - DNA, 25 bp, Artificial
  probe
  misc_feature (1)..(25): SEQ ID NO: 2229; WAN024GIF_at; Start 160; Stop 184
gatttgggtattgacccaagcttca

SEQ ID NO: 246762 - DNA, 25 bp, Artificial
  probe
  misc_feature (1)..(25): SEQ ID NO: 2229; WAN024GIF_at; Start 98; Stop 122
cgctcgtcctggtcttcttcgtaaa

SEQ ID NO: 246763 - DNA, 25 bp, Artificial
  probe
  misc_feature (1)..(25): SEQ ID NO: 2229; WAN024GIF_at; Start 59; Stop 83
tccaagcgactctcgtagcgaatca

SEQ ID NO: 246764 - DNA, 25 bp, Artificial
  probe
  misc_feature (1)..(25): SEQ ID NO: 2229; WAN024GIF_at; Start 193; Stop 217
cataaattcttgttcgtaactcatt

SEQ ID NO: 246765 - DNA, 25 bp, Artificial
  probe
  misc_feature (1)..(25): SEQ ID NO: 2229; WAN024GIF_at; Start 62; Stop 86
aagcgactctcgtagcgaatcatgg

SEQ ID NO: 246766 - DNA, 25 bp, Artificial
  probe
  misc_feature (1)..(25): SEQ ID NO: 2229; WAN024GIF_at; Start 79; Stop 103
aatcatggcatctttggcacgctcg

SEQ ID NO: 246767 - DNA, 25 bp, Artificial
  probe
  misc_feature (1)..(25): SEQ ID NO: 2229; WAN024GIF_at; Start 50; Stop 74
tgataagcatccaagcgactctcgt

SEQ ID NO: 246768 - DNA, 25 bp, Artificial
  probe
  misc_feature (1)..(25): SEQ ID NO: 2229; WAN024GIF_at; Start 27; Stop 51
tttcaaacttaccaagcaagaactg

SEQ ID NO: 246769 - DNA, 25 bp, Artificial
  probe
  misc_feature (1)..(25): SEQ ID NO: 2229; WAN024GIF_at; Start 165; Stop 189
gggtattgacccaagcttcaaattc

SEQ ID NO: 246770 - DNA, 25 bp, Artificial
  probe
  misc_feature (1)..(25): SEQ ID NO: 2229; WAN024GIF_at; Start 54; Stop 78
aagcatccaagcgactctcgtagcg

SEQ ID NO: 246771 - DNA, 25 bp, Artificial
  probe
  misc_feature (1)..(25): SEQ ID NO: 2229; WAN024GIF_at; Start 86; Stop 110
gcatctttggcacgctcgtcctggt

SEQ ID NO: 246772 - DNA, 25 bp, Artificial
  probe
  misc_feature (1)..(25): SEQ ID NO: 2229; WAN024GIF_at; Start 100; Stop 124
ctcgtcctggtcttcttcgtaaact

SEQ ID NO: 246773 - DNA, 25 bp, Artificial
  probe
  misc_feature (1)..(25): SEQ ID NO: 2229; WAN024GIF_at; Start 38; Stop 62
ccaagcaagaactgataagcatcca

SEQ ID NO: 246774 - DNA, 25 bp, Artificial
  probe
  misc_feature (1)..(25): SEQ ID NO: 2229; WAN024GIF_at; Start 69; Stop 93
tctcgtagcgaatcatggcatcttt

SEQ ID NO: 246775 - DNA, 25 bp, Artificial
  probe
  misc_feature (1)..(25): SEQ ID NO: 2229; WAN024GIF_at; Start 89; Stop 113
tctttggcacgctcgtcctggtctt

SEQ ID NO: 246776 - DNA, 25 bp, Artificial
  probe
  misc_feature (1)..(25): SEQ ID NO: 2229; WAN024GIF_at; Start 156; Stop 180
tcatgatttgggtattgacccaagc

SEQ ID NO: 246777 - DNA, 25 bp, Artificial
  probe
  misc_feature (1)..(25): SEQ ID NO: 2229; WAN024GIF_at; Start 152; Stop 176
ttaatcatgatttgggtattgaccc

SEQ ID NO: 246778 - DNA, 25 bp, Artificial
  probe
  misc_feature (1)..(25): SEQ ID NO: 2229; WAN024GIF_at; Start 81; Stop 105
tcatggcatctttggcacgctcgtc

SEQ ID NO: 246779 - DNA, 25 bp, Artificial
  probe
  misc_feature (1)..(25): SEQ ID NO: 2229; WAN024GIF_at; Start 30; Stop 54
caaacttaccaagcaagaactgata

SEQ ID NO: 246780 - DNA, 25 bp, Artificial
  probe
  misc_feature (1)..(25): SEQ ID NO: 2229; WAN024GIF_at; Start 56; Stop 80
gcatccaagcgactctcgtagcgaa

SEQ ID NO: 246781 - DNA, 25 bp, Artificial
  probe
  misc_feature (1)..(25): SEQ ID NO: 2229; WAN024GIF_at; Start 46; Stop 70
gaactgataagcatccaagcgactc

SEQ ID NO: 246782 - DNA, 25 bp, Artificial
  probe
  misc_feature (1)..(25): SEQ ID NO: 2229; WAN024GIF_at; Start 64; Stop 88
gcgactctcgtagcgaatcatggca

SEQ ID NO: 246783 - DNA, 25 bp, Artificial
  probe
  misc_feature (1)..(25): SEQ ID NO: 2229; WAN024GIF_at; Start 77; Stop 101
cgaatcatggcatctttggcacgct

SEQ ID NO: 246784 - DNA, 25 bp, Artificial
  probe
  misc_feature (1)..(25): SEQ ID NO: 2229; WAN024GIF_at; Start 94; Stop 118
ggcacgctcgtcctggtcttcttcg

SEQ ID NO: 246785 - DNA, 25 bp, Artificial
  probe
  misc_feature (1)..(25): SEQ ID NO: 2229; WAN024GIF_at; Start 42; Stop 66
gcaagaactgataagcatccaagcg

SEQ ID NO: 246786 - DNA, 25 bp, Artificial
  probe
  misc_feature (1)..(25): SEQ ID NO: 2229; WAN024GIF_at; Start 188; Stop 212
tccttcataaattcttgttcgtaac

SEQ ID NO: 246787 - DNA, 25 bp, Artificial
  probe
  misc_feature (1)..(25): SEQ ID NO: 2229; WAN024GIF_at; Start 72; Stop 96
cgtagcgaatcatggcatctttggc

SEQ ID NO: 246788 - DNA, 25 bp, Artificial
  probe
  misc_feature (1)..(25): SEQ ID NO: 2229; WAN024GIF_at; Start 21; Stop 45
tgaagttttcaaacttaccaagcaa

SEQ ID NO: 246789 - DNA, 25 bp, Artificial
  probe
  misc_feature (1)..(25): SEQ ID NO: 2229; WAN024GIF_at; Start 75; Stop 99
agcgaatcatggcatctttggcacg

SEQ ID NO: 246790 - DNA, 25 bp, Artificial
  probe
  misc_feature (1)..(25): SEQ ID NO: 2229; WAN024GIF_at; Start 200; Stop 224
tcttgttcgtaactcattttttctc

SEQ ID NO: 246791 - DNA, 25 bp, Artificial
  probe
  misc_feature (1)..(25): SEQ ID NO: 2229; WAN024GIF_at; Start 66; Stop 90
gactctcgtagcgaatcatggcatc

SEQ ID NO: 246792 - DNA, 25 bp, Artificial
  probe
  misc_feature (1)..(25): SEQ ID NO: 1642; WAN024GIG_at; Start 157; Stop 181
gatgcttatcagttcttgcttggta

SEQ ID NO: 246793 - DNA, 25 bp, Artificial
  probe
  misc_feature (1)..(25): SEQ ID NO: 1642; WAN024GIG_at; Start 151; Stop 175
cgcttggatgcttatcagttcttgc

SEQ ID NO: 246794 - DNA, 25 bp, Artificial
  probe
  misc_feature (1)..(25): SEQ ID NO: 1642; WAN024GIG_at; Start 129; Stop 153
tgccatgattcgctacgagagtcgc

SEQ ID NO: 246795 - DNA, 25 bp, Artificial
  probe
  misc_feature (1)..(25): SEQ ID NO: 1642; WAN024GIG_at; Start 93; Stop 117
agtttacgaagaagaccaggacgag

SEQ ID NO: 246796 - DNA, 25 bp, Artificial
  probe
  misc_feature (1)..(25): SEQ ID NO: 1642; WAN024GIG_at; Start 5; Stop 29
gttacgaacaagaatttatgaagga

SEQ ID NO: 246797 - DNA, 25 bp, Artificial
  probe
  misc_feature (1)..(25): SEQ ID NO: 1642; WAN024GIG_at; Start 41; Stop 65
gggtcaatacccaaatcatgattaa

SEQ ID NO: 246798 - DNA, 25 bp, Artificial
  probe
  misc_feature (1)..(25): SEQ ID NO: 1642; WAN024GIG_at; Start 34; Stop 58
gaagcttgggtcaatacccaaatca

SEQ ID NO: 246799 - DNA, 25 bp, Artificial
  probe
  misc_feature (1)..(25): SEQ ID NO: 1642; WAN024GIG_at; Start 147; Stop 171
gagtcgcttggatgcttatcagttc

SEQ ID NO: 246800 - DNA, 25 bp, Artificial
  probe
  misc_feature (1)..(25): SEQ ID NO: 1642; WAN024GIG_at; Start 107; Stop 131
accaggacgagcgtgccaaagatgc

SEQ ID NO: 246801 - DNA, 25 bp, Artificial
  probe
  misc_feature (1)..(25): SEQ ID NO: 1642; WAN024GIG_at; Start 125; Stop 149
aagatgccatgattcgctacgagag

SEQ ID NO: 246802 - DNA, 25 bp, Artificial
  probe
  misc_feature (1)..(25): SEQ ID NO: 1642; WAN024GIG_at; Start 114; Stop 138
cgagcgtgccaaagatgccatgatt

SEQ ID NO: 246803 - DNA, 25 bp, Artificial
  probe
  misc_feature (1)..(25): SEQ ID NO: 1642; WAN024GIG_at; Start 173; Stop 197
tgcttggtaagtttgaaaacttcaa

SEQ ID NO: 246804 - DNA, 25 bp, Artificial
  probe
  misc_feature (1)..(25): SEQ ID NO: 1642; WAN024GIG_at; Start 98; Stop 122
acgaagaagaccaggacgagcgtgc

SEQ ID NO: 246805 - DNA, 25 bp, Artificial
  probe
  misc_feature (1)..(25): SEQ ID NO: 1642; WAN024GIG_at; Start 2; Stop 26
tgagttacgaacaagaatttatgaa

SEQ ID NO: 246806 - DNA, 25 bp, Artificial
  probe
  misc_feature (1)..(25): SEQ ID NO: 1642; WAN024GIG_at; Start 209; Stop 233
gattccatgatttgccagaaggctt

SEQ ID NO: 246807 - DNA, 25 bp, Artificial
  probe
  misc_feature (1)..(25): SEQ ID NO: 1642; WAN024GIG_at; Start 95; Stop 119
tttacgaagaagaccaggacgagcg

SEQ ID NO: 246808 - DNA, 25 bp, Artificial
  probe
  misc_feature (1)..(25): SEQ ID NO: 1642; WAN024GIG_at; Start 207; Stop 231
gggattccatgatttgccagaaggc

SEQ ID NO: 246809 - DNA, 25 bp, Artificial
  probe
  misc_feature (1)..(25): SEQ ID NO: 1642; WAN024GIG_at; Start 204; Stop 228
caagggattccatgatttgccagaa

SEQ ID NO: 246810 - DNA, 25 bp, Artificial
  probe
  misc_feature (1)..(25): SEQ ID NO: 1642; WAN024GIG_at; Start 132; Stop 156
catgattcgctacgagagtcgcttg

SEQ ID NO: 246811 - DNA, 25 bp, Artificial
  probe
  misc_feature (1)..(25): SEQ ID NO: 1642; WAN024GIG_at; Start 223; Stop 247
ccagaaggcttgtttggtgagcgaa

SEQ ID NO: 246812 - DNA, 25 bp, Artificial
  probe
  misc_feature (1)..(25): SEQ ID NO: 1642; WAN024GIG_at; Start 142; Stop 166
tacgagagtcgcttggatgcttatc

SEQ ID NO: 246813 - DNA, 25 bp, Artificial
  probe
  misc_feature (1)..(25): SEQ ID NO: 1642; WAN024GIG_at; Start 123; Stop 147
caaagatgccatgattcgctacgag

SEQ ID NO: 246814 - DNA, 25 bp, Artificial
  probe
  misc_feature (1)..(25): SEQ ID NO: 1642; WAN024GIG_at; Start 112; Stop 136
gacgagcgtgccaaagatgccatga

SEQ ID NO: 246815 - DNA, 25 bp, Artificial
  probe
  misc_feature (1)..(25): SEQ ID NO: 1642; WAN024GIG_at; Start 118; Stop 142
cgtgccaaagatgccatgattcgct

SEQ ID NO: 246816 - DNA, 25 bp, Artificial
  probe
  misc_feature (1)..(25): SEQ ID NO: 1642; WAN024GIG_at; Start 166; Stop 190
cagttcttgcttggtaagtttgaaa

SEQ ID NO: 246817 - DNA, 25 bp, Artificial
  probe
  misc_feature (1)..(25): SEQ ID NO: 1642; WAN024GIG_at; Start 229; Stop 253
ggcttgtttggtgagcgaaattatt

SEQ ID NO: 246818 - DNA, 25 bp, Artificial
  probe
  misc_feature (1)..(25): SEQ ID NO: 1642; WAN024GIG_at; Start 214; Stop 238
catgatttgccagaaggcttgtttg

SEQ ID NO: 246819 - DNA, 25 bp, Artificial
  probe
  misc_feature (1)..(25): SEQ ID NO: 1642; WAN024GIG_at; Start 134; Stop 158
tgattcgctacgagagtcgcttgga

SEQ ID NO: 246820 - DNA, 25 bp, Artificial
  probe
  misc_feature (1)..(25): SEQ ID NO: 1642; WAN024GIG_at; Start 28; Stop 52
gaatttgaagcttgggtcaataccc

SEQ ID NO: 246821 - DNA, 25 bp, Artificial
  probe
  misc_feature (1)..(25): SEQ ID NO: 1642; WAN024GIG_at; Start 235; Stop 259
tttggtgagcgaaattattaactaa

SEQ ID NO: 246822 - DNA, 25 bp, Artificial
  probe
  misc_feature (1)..(25): SEQ ID NO: 1642; WAN024GIG_at; Start 102; Stop 126
agaagaccaggacgagcgtgccaaa

SEQ ID NO: 246823 - DNA, 25 bp, Artificial
  probe
  misc_feature (1)..(25): SEQ ID NO: 1642; WAN024GIG_at; Start 44; Stop 68
tcaatacccaaatcatgattaacga

SEQ ID NO: 246824 - DNA, 25 bp, Artificial
  probe
  misc_feature (1)..(25): SEQ ID NO: 1642; WAN024GIG_at; Start 138; Stop 162
tcgctacgagagtcgcttggatgct

SEQ ID NO: 246825 - DNA, 25 bp, Artificial
  probe
  misc_feature (1)..(25): SEQ ID NO: 1642; WAN024GIG_at; Start 21; Stop 45
tatgaaggaatttgaagcttgggtc

SEQ ID NO: 246826 - DNA, 25 bp, Artificial
  probe
  misc_feature (1)..(25): SEQ ID NO: 6730; WAN024GIH_at; Start 216; Stop 240
gcccgtaaaggtcgcatcaaagcga

SEQ ID NO: 246827 - DNA, 25 bp, Artificial
  probe
  misc_feature (1)..(25): SEQ ID NO: 6730; WAN024GIH_at; Start 189; Stop 213
cataagggaaatctcgatggctgac

SEQ ID NO: 246828 - DNA, 25 bp, Artificial
  probe
  misc_feature (1)..(25): SEQ ID NO: 6730; WAN024GIH_at; Start 58; Stop 82
tgcccagggtgttcggtatctaaaa

SEQ ID NO: 246829 - DNA, 25 bp, Artificial
  probe
  misc_feature (1)..(25): SEQ ID NO: 6730; WAN024GIH_at; Start 208; Stop 232
gctgacacgcccgtaaaggtcgcat

SEQ ID NO: 246830 - DNA, 25 bp, Artificial
  probe
  misc_feature (1)..(25): SEQ ID NO: 6730; WAN024GIH_at; Start 221; Stop 245
taaaggtcgcatcaaagcgatcttg

SEQ ID NO: 246831 - DNA, 25 bp, Artificial
  probe
  misc_feature (1)..(25): SEQ ID NO: 6730; WAN024GIH_at; Start 132; Stop 156
gagttccataacatcttcaaaagtg

SEQ ID NO: 246832 - DNA, 25 bp, Artificial
  probe
  misc_feature (1)..(25): SEQ ID NO: 6730; WAN024GIH_at; Start 203; Stop 227
cgatggctgacacgcccgtaaaggt

SEQ ID NO: 246833 - DNA, 25 bp, Artificial
  probe
  misc_feature (1)..(25): SEQ ID NO: 6730; WAN024GIH_at; Start 40; Stop 64
ttaaagacacgaactgggtgcccag

SEQ ID NO: 246834 - DNA, 25 bp, Artificial
  probe
  misc_feature (1)..(25): SEQ ID NO: 6730; WAN024GIH_at; Start 36; Stop 60
ttccttaaagacacgaactgggtgc

SEQ ID NO: 246835 - DNA, 25 bp, Artificial
  probe
  misc_feature (1)..(25): SEQ ID NO: 6730; WAN024GIH_at; Start 47; Stop 71
cacgaactgggtgcccagggtgttc

SEQ ID NO: 246836 - DNA, 25 bp, Artificial
  probe
  misc_feature (1)..(25): SEQ ID NO: 6730; WAN024GIH_at; Start 113; Stop 137
gattggcatggacatcacagagttc

SEQ ID NO: 246837 - DNA, 25 bp, Artificial
  probe
  misc_feature (1)..(25): SEQ ID NO: 6730; WAN024GIH_at; Start 169; Stop 193
gagttcatcagctcgtgctccataa

SEQ ID NO: 246838 - DNA, 25 bp, Artificial
  probe
  misc_feature (1)..(25): SEQ ID NO: 6730; WAN024GIH_at; Start 195; Stop 219
ggaaatctcgatggctgacacgccc

SEQ ID NO: 246839 - DNA, 25 bp, Artificial
  probe
  misc_feature (1)..(25): SEQ ID NO: 6730; WAN024GIH_at; Start 140; Stop 164
taacatcttcaaaagtgacgcccga

SEQ ID NO: 246840 - DNA, 25 bp, Artificial
  probe
  misc_feature (1)..(25): SEQ ID NO: 6730; WAN024GIH_at; Start 198; Stop 222
aatctcgatggctgacacgcccgta

SEQ ID NO: 246841 - DNA, 25 bp, Artificial
  probe
  misc_feature (1)..(25): SEQ ID NO: 6730; WAN024GIH_at; Start 151; Stop 175
aaagtgacgcccgaatccgagttca

SEQ ID NO: 246842 - DNA, 25 bp, Artificial
  probe
  misc_feature (1)..(25): SEQ ID NO: 6730; WAN024GIH_at; Start 86; Stop 110
cgacacctttgatagcatttttaaa

SEQ ID NO: 246843 - DNA, 25 bp, Artificial
  probe
  misc_feature (1)..(25): SEQ ID NO: 6730; WAN024GIH_at; Start 107; Stop 131
taaaaagattggcatggacatcaca

SEQ ID NO: 246844 - DNA, 25 bp, Artificial
  probe
  misc_feature (1)..(25): SEQ ID NO: 6730; WAN024GIH_at; Start 145; Stop 169
tcttcaaaagtgacgcccgaatccg

SEQ ID NO: 246845 - DNA, 25 bp, Artificial
  probe
  misc_feature (1)..(25): SEQ ID NO: 6730; WAN024GIH_at; Start 155; Stop 179
tgacgcccgaatccgagttcatcag

SEQ ID NO: 246846 - DNA, 25 bp, Artificial
  probe
  misc_feature (1)..(25): SEQ ID NO: 6730; WAN024GIH_at; Start 15; Stop 39
tgcacggagggccaaattttcttcc

SEQ ID NO: 246847 - DNA, 25 bp, Artificial
  probe
  misc_feature (1)..(25): SEQ ID NO: 6730; WAN024GIH_at; Start 122; Stop 146
ggacatcacagagttccataacatc

SEQ ID NO: 246848 - DNA, 25 bp, Artificial
  probe
  misc_feature (1)..(25): SEQ ID NO: 6730; WAN024GIH_at; Start 7; Stop 31
atcaaagctgcacggagggccaaat

SEQ ID NO: 246849 - DNA, 25 bp, Artificial
  probe
  misc_feature (1)..(25): SEQ ID NO: 6730; WAN024GIH_at; Start 1; Stop 25
atgcgaatcaaagctgcacggaggg

SEQ ID NO: 246850 - DNA, 25 bp, Artificial
  probe
  misc_feature (1)..(25): SEQ ID NO: 6730; WAN024GIH_at; Start 11; Stop 35
aagctgcacggagggccaaattttc

SEQ ID NO: 246851 - DNA, 25 bp, Artificial
  probe
  misc_feature (1)..(25): SEQ ID NO: 6730; WAN024GIH_at; Start 101; Stop 125
catttttaaaaagattggcatggac

SEQ ID NO: 246852 - DNA, 25 bp, Artificial
  probe
  misc_feature (1)..(25): SEQ ID NO: 6730; WAN024GIH_at; Start 191; Stop 215
taagggaaatctcgatggctgacac

SEQ ID NO: 246853 - DNA, 25 bp, Artificial
  probe
  misc_feature (1)..(25): SEQ ID NO: 6730; WAN024GIH_at; Start 174; Stop 198
catcagctcgtgctccataagggaa

SEQ ID NO: 246854 - DNA, 25 bp, Artificial
  probe
  misc_feature (1)..(25): SEQ ID NO: 6730; WAN024GIH_at; Start 78; Stop 102
taaaacttcgacacctttgatagca

SEQ ID NO: 246855 - DNA, 25 bp, Artificial
  probe
  misc_feature (1)..(25): SEQ ID NO: 6730; WAN024GIH_at; Start 67; Stop 91
tgttcggtatctaaaacttcgacac

SEQ ID NO: 246856 - DNA, 25 bp, Artificial
  probe
  misc_feature (1)..(25): SEQ ID NO: 6730; WAN024GIH_at; Start 163; Stop 187
gaatccgagttcatcagctcgtgct

SEQ ID NO: 246857 - DNA, 25 bp, Artificial
  probe
  misc_feature (1)..(25): SEQ ID NO: 6730; WAN024GIH_at; Start 211; Stop 235
gacacgcccgtaaaggtcgcatcaa

SEQ ID NO: 246858 - DNA, 25 bp, Artificial
  probe
  misc_feature (1)..(25): SEQ ID NO: 6730; WAN024GIH_at; Start 176; Stop 200
tcagctcgtgctccataagggaaat

SEQ ID NO: 246859 - DNA, 25 bp, Artificial
  probe
  misc_feature (1)..(25): SEQ ID NO: 6730; WAN024GIH_at; Start 182; Stop 206
cgtgctccataagggaaatctcgat

SEQ ID NO: 246860 - DNA, 25 bp, Artificial
  probe
  misc_feature (1)..(25): SEQ ID NO: 4247; WAN024GII_at; Start 238; Stop 262
gacaaaggtaatctccatagggaga

SEQ ID NO: 246861 - DNA, 25 bp, Artificial
  probe
  misc_feature (1)..(25): SEQ ID NO: 4247; WAN024GII_at; Start 234; Stop 258
tattgacaaaggtaatctccatagg

SEQ ID NO: 246862 - DNA, 25 bp, Artificial
  probe
  misc_feature (1)..(25): SEQ ID NO: 4247; WAN024GII_at; Start 184; Stop 208
catctcatcagctggcgtattgtca

SEQ ID NO: 246863 - DNA, 25 bp, Artificial
  probe
  misc_feature (1)..(25): SEQ ID NO: 4247; WAN024GII_at; Start 181; Stop 205
aatcatctcatcagctggcgtattg

SEQ ID NO: 246864 - DNA, 25 bp, Artificial
  probe
  misc_feature (1)..(25): SEQ ID NO: 4247; WAN024GII_at; Start 4; Stop 28
tactgcagcataggtgatgtggaca

SEQ ID NO: 246865 - DNA, 25 bp, Artificial
  probe
  misc_feature (1)..(25): SEQ ID NO: 4247; WAN024GII_at; Start 178; Stop 202
gaaaatcatctcatcagctggcgta

SEQ ID NO: 246866 - DNA, 25 bp, Artificial
  probe
  misc_feature (1)..(25): SEQ ID NO: 4247; WAN024GII_at; Start 173; Stop 197
cgtttgaaaatcatctcatcagctg

SEQ ID NO: 246867 - DNA, 25 bp, Artificial
  probe
  misc_feature (1)..(25): SEQ ID NO: 4247; WAN024GII_at; Start 264; Stop 288
gattgaggatgagattggcctgctc

SEQ ID NO: 246868 - DNA, 25 bp, Artificial
  probe
  misc_feature (1)..(25): SEQ ID NO: 4247; WAN024GII_at; Start 176; Stop 200
ttgaaaatcatctcatcagctggcg

SEQ ID NO: 246869 - DNA, 25 bp, Artificial
  probe
  misc_feature (1)..(25): SEQ ID NO: 4247; WAN024GII_at; Start 244; Stop 268
ggtaatctccatagggagatgattg

SEQ ID NO: 246870 - DNA, 25 bp, Artificial
  probe
  misc_feature (1)..(25): SEQ ID NO: 4247; WAN024GII_at; Start 139; Stop 163
gagttcgacattgcgcccgacttgg

SEQ ID NO: 246871 - DNA, 25 bp, Artificial
  probe
  misc_feature (1)..(25): SEQ ID NO: 4247; WAN024GII_at; Start 179; Stop 203
aaaatcatctcatcagctggcgtat

SEQ ID NO: 246872 - DNA, 25 bp, Artificial
  probe
  misc_feature (1)..(25): SEQ ID NO: 4247; WAN024GII_at; Start 189; Stop 213
catcagctggcgtattgtcattgta

SEQ ID NO: 246873 - DNA, 25 bp, Artificial
  probe
  misc_feature (1)..(25): SEQ ID NO: 4247; WAN024GII_at; Start 207; Stop 231
cattgtaatactggaaaatatcttc

SEQ ID NO: 246874 - DNA, 25 bp, Artificial
  probe
  misc_feature (1)..(25): SEQ ID NO: 4247; WAN024GII_at; Start 9; Stop 33
cagcataggtgatgtggacaaactt

SEQ ID NO: 246875 - DNA, 25 bp, Artificial
  probe
  misc_feature (1)..(25): SEQ ID NO: 4247; WAN024GII_at; Start 7; Stop 31
tgcagcataggtgatgtggacaaac

SEQ ID NO: 246876 - DNA, 25 bp, Artificial
  probe
  misc_feature (1)..(25): SEQ ID NO: 4247; WAN024GII_at; Start 230; Stop 254
tctttattgacaaaggtaatctcca

SEQ ID NO: 246877 - DNA, 25 bp, Artificial
  probe
  misc_feature (1)..(25): SEQ ID NO: 4247; WAN024GII_at; Start 197; Stop 221
ggcgtattgtcattgtaatactgga

SEQ ID NO: 246878 - DNA, 25 bp, Artificial
  probe
  misc_feature (1)..(25): SEQ ID NO: 4247; WAN024GII_at; Start 47; Stop 71
gacttgaaccacatttcatacttgt

SEQ ID NO: 246879 - DNA, 25 bp, Artificial
  probe
  misc_feature (1)..(25): SEQ ID NO: 4247; WAN024GII_at; Start 267; Stop 291
tgaggatgagattggcctgctcgac

SEQ ID NO: 246880 - DNA, 25 bp, Artificial
  probe
  misc_feature (1)..(25): SEQ ID NO: 4247; WAN024GII_at; Start 146; Stop 170
acattgcgcccgacttgggacggcg

SEQ ID NO: 246881 - DNA, 25 bp, Artificial
  probe
  misc_feature (1)..(25): SEQ ID NO: 4247; WAN024GII_at; Start 251; Stop 275
tccatagggagatgattgaggatga

SEQ ID NO: 246882 - DNA, 25 bp, Artificial
  probe
  misc_feature (1)..(25): SEQ ID NO: 4247; WAN024GII_at; Start 38; Stop 62
cgcgactcagacttgaaccacattt

SEQ ID NO: 246883 - DNA, 25 bp, Artificial
  probe
  misc_feature (1)..(25): SEQ ID NO: 4247; WAN024GII_at; Start 41; Stop 65
gactcagacttgaaccacatttcat

SEQ ID NO: 246884 - DNA, 25 bp, Artificial
  probe
  misc_feature (1)..(25): SEQ ID NO: 4247; WAN024GII_at; Start 262; Stop 286
atgattgaggatgagattggcctgc

SEQ ID NO: 246885 - DNA, 25 bp, Artificial
  probe
  misc_feature (1)..(25): SEQ ID NO: 4247; WAN024GII_at; Start 240; Stop 264
caaaggtaatctccatagggagatg

SEQ ID NO: 246886 - DNA, 25 bp, Artificial
  probe
  misc_feature (1)..(25): SEQ ID NO: 4247; WAN024GII_at; Start 249; Stop 273
tctccatagggagatgattgaggat

SEQ ID NO: 246887 - DNA, 25 bp, Artificial
  probe
  misc_feature (1)..(25): SEQ ID NO: 4247; WAN024GII_at; Start 2; Stop 26
tgtactgcagcataggtgatgtgga

SEQ ID NO: 246888 - DNA, 25 bp, Artificial
  probe
  misc_feature (1)..(25): SEQ ID NO: 4247; WAN024GII_at; Start 192; Stop 216
cagctggcgtattgtcattgtaata

SEQ ID NO: 246889 - DNA, 25 bp, Artificial
  probe
  misc_feature (1)..(25): SEQ ID NO: 4247; WAN024GII_at; Start 220; Stop 244
gaaaatatcttctttattgacaaag

SEQ ID NO: 246890 - DNA, 25 bp, Artificial
  probe
  misc_feature (1)..(25): SEQ ID NO: 4247; WAN024GII_at; Start 268; Stop 292
gaggatgagattggcctgctcgact

SEQ ID NO: 246891 - DNA, 25 bp, Artificial
  probe
  misc_feature (1)..(25): SEQ ID NO: 4247; WAN024GII_at; Start 36; Stop 60
ctcgcgactcagacttgaaccacat

SEQ ID NO: 246892 - DNA, 25 bp, Artificial
  probe
  misc_feature (1)..(25): SEQ ID NO: 4247; WAN024GII_at; Start 237; Stop 261
tgacaaaggtaatctccatagggag

SEQ ID NO: 246893 - DNA, 25 bp, Artificial
  probe
  misc_feature (1)..(25): SEQ ID NO: 4247; WAN024GII_at; Start 137; Stop 161
cagagttcgacattgcgcccgactt

SEQ ID NO: 246894 - DNA, 25 bp, Artificial
  probe
  misc_feature (1)..(25): SEQ ID NO: 2754; WAN024GIJ_at; Start 1207; Stop 1231
aagtttgtccacatcacctatgctg

SEQ ID NO: 246895 - DNA, 25 bp, Artificial
  probe
  misc_feature (1)..(25): SEQ ID NO: 2754; WAN024GIJ_at; Start 890; Stop 914
aaaaggaagctgtgctggaccgcca

SEQ ID NO: 246896 - DNA, 25 bp, Artificial
  probe
  misc_feature (1)..(25): SEQ ID NO: 2754; WAN024GIJ_at; Start 519; Stop 543
gattagggaactctttcaaacagct

SEQ ID NO: 246897 - DNA, 25 bp, Artificial
  probe
  misc_feature (1)..(25): SEQ ID NO: 2754; WAN024GIJ_at; Start 823; Stop 847
gaaggtcaagttcaacaagtcatag

SEQ ID NO: 246898 - DNA, 25 bp, Artificial
  probe
  misc_feature (1)..(25): SEQ ID NO: 2754; WAN024GIJ_at; Start 723; Stop 747
tggctatgccatcatccgtccgtca

SEQ ID NO: 246899 - DNA, 25 bp, Artificial
  probe
  misc_feature (1)..(25): SEQ ID NO: 2754; WAN024GIJ_at; Start 183; Stop 207
ggaactctgtgatgtccatgccaat

SEQ ID NO: 246900 - DNA, 25 bp, Artificial
  probe
  misc_feature (1)..(25): SEQ ID NO: 2754; WAN024GIJ_at; Start 940; Stop 964
tatctttcagtcgagcaggccaatc

SEQ ID NO: 246901 - DNA, 25 bp, Artificial
  probe
  misc_feature (1)..(25): SEQ ID NO: 2754; WAN024GIJ_at; Start 793; Stop 817
gcagaggagcctgtacagctagata

SEQ ID NO: 246902 - DNA, 25 bp, Artificial
  probe
  misc_feature (1)..(25): SEQ ID NO: 2754; WAN024GIJ_at; Start 481; Stop 505
gattcacctcccaaagttatgtggg

SEQ ID NO: 246903 - DNA, 25 bp, Artificial
  probe
  misc_feature (1)..(25): SEQ ID NO: 2754; WAN024GIJ_at; Start 1178; Stop 1202
aaatgtggttcaagtctgagtcgcg

SEQ ID NO: 246904 - DNA, 25 bp, Artificial
  probe
  misc_feature (1)..(25): SEQ ID NO: 2754; WAN024GIJ_at; Start 806; Stop 830
tacagctagatacggcagaaggtca

SEQ ID NO: 246905 - DNA, 25 bp, Artificial
  probe
  misc_feature (1)..(25): SEQ ID NO: 2754; WAN024GIJ_at; Start 852; Stop 876
gccagaaggccattttaccattacc

SEQ ID NO: 246906 - DNA, 25 bp, Artificial
  probe
  misc_feature (1)..(25): SEQ ID NO: 2754; WAN024GIJ_at; Start 446; Stop 470
aactcttctttcctatcatggagcg

SEQ ID NO: 246907 - DNA, 25 bp, Artificial
  probe
  misc_feature (1)..(25): SEQ ID NO: 2754; WAN024GIJ_at; Start 919; Stop 943
caacaggcttttggtaatggctatc

SEQ ID NO: 246908 - DNA, 25 bp, Artificial
  probe
  misc_feature (1)..(25): SEQ ID NO: 2754; WAN024GIJ_at; Start 1291; Stop 1315
ccctaccgtgagattgatacggact

SEQ ID NO: 246909 - DNA, 25 bp, Artificial
  probe
  misc_feature (1)..(25): SEQ ID NO: 2754; WAN024GIJ_at; Start 905; Stop 929
tggaccgccatagtcaacaggcttt

SEQ ID NO: 246910 - DNA, 25 bp, Artificial
  probe
  misc_feature (1)..(25): SEQ ID NO: 2754; WAN024GIJ_at; Start 118; Stop 142
gagatttcccttatggagcacgagc

SEQ ID NO: 246911 - DNA, 25 bp, Artificial
  probe
  misc_feature (1)..(25): SEQ ID NO: 2754; WAN024GIJ_at; Start 601; Stop 625
gaagcttttgcgacagagtttgaaa

SEQ ID NO: 246912 - DNA, 25 bp, Artificial
  probe
  misc_feature (1)..(25): SEQ ID NO: 2754; WAN024GIJ_at; Start 1078; Stop 1102
caagtcgggcgcaatgtcgaactct

SEQ ID NO: 246913 - DNA, 25 bp, Artificial
  probe
  misc_feature (1)..(25): SEQ ID NO: 2754; WAN024GIJ_at; Start 213; Stop 237
taaaaatgctatcaaaggtgtcgaa

SEQ ID NO: 246914 - DNA, 25 bp, Artificial
  probe
  misc_feature (1)..(25): SEQ ID NO: 2754; WAN024GIJ_at; Start 838; Stop 862
caagtcatagatacgccagaaggcc

SEQ ID NO: 246915 - DNA, 25 bp, Artificial
  probe
  misc_feature (1)..(25): SEQ ID NO: 2754; WAN024GIJ_at; Start 1038; Stop 1062
tacgccagctgatgagatgattttc

SEQ ID NO: 246916 - DNA, 25 bp, Artificial
  probe
  misc_feature (1)..(25): SEQ ID NO: 2754; WAN024GIJ_at; Start 1024; Stop 1048
tattacaatgacaatacgccagctg

SEQ ID NO: 246917 - DNA, 25 bp, Artificial
  probe
  misc_feature (1)..(25): SEQ ID NO: 2754; WAN024GIJ_at; Start 779; Stop 803
ttgaggaaaagattgcagaggagcc

SEQ ID NO: 246918 - DNA, 25 bp, Artificial
  probe
  misc_feature (1)..(25): SEQ ID NO: 2754; WAN024GIJ_at; Start 1276; Stop 1300
gttcaggatatccagccctaccgtg

SEQ ID NO: 246919 - DNA, 25 bp, Artificial
  probe
  misc_feature (1)..(25): SEQ ID NO: 2754; WAN024GIJ_at; Start 629; Stop 653
tgattttcaaggaagagtccatcct

SEQ ID NO: 246920 - DNA, 25 bp, Artificial
  probe
  misc_feature (1)..(25): SEQ ID NO: 2754; WAN024GIJ_at; Start 565; Stop 589
ccagaagtgtcaattagcagtgtaa

SEQ ID NO: 246921 - DNA, 25 bp, Artificial
  probe
  misc_feature (1)..(25): SEQ ID NO: 2754; WAN024GIJ_at; Start 52; Stop 76
aatggcgcctctcctgagtcggttc

SEQ ID NO: 246922 - DNA, 25 bp, Artificial
  probe
  misc_feature (1)..(25): SEQ ID NO: 2754; WAN024GIJ_at; Start 461; Stop 485
tcatggagcgctatggacacgattc

SEQ ID NO: 246923 - DNA, 25 bp, Artificial
  probe
  misc_feature (1)..(25): SEQ ID NO: 2754; WAN024GIJ_at; Start 738; Stop 762
ccgtccgtcagagaaatgggtgcca

SEQ ID NO: 246924 - DNA, 25 bp, Artificial
  probe
  misc_feature (1)..(25): SEQ ID NO: 2754; WAN024GIJ_at; Start 315; Stop 339
tcgcattcgtagattgttagatacc

SEQ ID NO: 246925 - DNA, 25 bp, Artificial
  probe
  misc_feature (1)..(25): SEQ ID NO: 2754; WAN024GIJ_at; Start 980; Stop 1004
tccctatggagattacctttgtcaa

SEQ ID NO: 246926 - DNA, 25 bp, Artificial
  probe
  misc_feature (1)..(25): SEQ ID NO: 2754; WAN024GIJ_at; Start 1221; Stop 1245
cacctatgctgcagtacacgatgaa

SEQ ID NO: 246927 - DNA, 25 bp, Artificial
  probe
  misc_feature (1)..(25): SEQ ID NO: 2754; WAN024GIJ_at; Start 881; Stop 905
cccctaaggaaaaggaagctgtgct

SEQ ID NO: 246928 - DNA, 25 bp, Artificial
  probe
  misc_feature (1)..(25): SEQ ID NO: 4081; WAN024GIK_at; Start 28; Stop 52
cctgctagcttagaaccctgtttaa

SEQ ID NO: 246929 - DNA, 25 bp, Artificial
  probe
  misc_feature (1)..(25): SEQ ID NO: 4081; WAN024GIK_at; Start 74; Stop 98
tattgcgcattaagggattggcaag

SEQ ID NO: 246930 - DNA, 25 bp, Artificial
  probe
  misc_feature (1)..(25): SEQ ID NO: 4081; WAN024GIK_at; Start 57; Stop 81
tactttacgaccaactgtattgcgc

SEQ ID NO: 246931 - DNA, 25 bp, Artificial
  probe
  misc_feature (1)..(25): SEQ ID NO: 4081; WAN024GIK_at; Start 49; Stop 73
ttaagtgatactttacgaccaactg

SEQ ID NO: 246932 - DNA, 25 bp, Artificial
  probe
  misc_feature (1)..(25): SEQ ID NO: 4081; WAN024GIK_at; Start 143; Stop 167
gcttgtccaccacttctgcaacagg

SEQ ID NO: 246933 - DNA, 25 bp, Artificial
  probe
  misc_feature (1)..(25): SEQ ID NO: 4081; WAN024GIK_at; Start 116; Stop 140
ccactagaatttccaagacttctgg

SEQ ID NO: 246934 - DNA, 25 bp, Artificial
  probe
  misc_feature (1)..(25): SEQ ID NO: 4081; WAN024GIK_at; Start 132; Stop 156
gacttctggatgcttgtccaccact

SEQ ID NO: 246935 - DNA, 25 bp, Artificial
  probe
  misc_feature (1)..(25): SEQ ID NO: 4081; WAN024GIK_at; Start 20; Stop 44
taggagttcctgctagcttagaacc

SEQ ID NO: 246936 - DNA, 25 bp, Artificial
  probe
  misc_feature (1)..(25): SEQ ID NO: 4081; WAN024GIK_at; Start 187; Stop 211
ttgtccatgacgacctccattgtat

SEQ ID NO: 246937 - DNA, 25 bp, Artificial
  probe
  misc_feature (1)..(25): SEQ ID NO: 4081; WAN024GIK_at; Start 176; Stop 200
catcgatgatattgtccatgacgac

SEQ ID NO: 246938 - DNA, 25 bp, Artificial
  probe
  misc_feature (1)..(25): SEQ ID NO: 4081; WAN024GIK_at; Start 183; Stop 207
gatattgtccatgacgacctccatt

SEQ ID NO: 246939 - DNA, 25 bp, Artificial
  probe
  misc_feature (1)..(25): SEQ ID NO: 4081; WAN024GIK_at; Start 13; Stop 37
ttgtccataggagttcctgctagct

SEQ ID NO: 246940 - DNA, 25 bp, Artificial
  probe
  misc_feature (1)..(25): SEQ ID NO: 4081; WAN024GIK_at; Start 62; Stop 86
tacgaccaactgtattgcgcattaa

SEQ ID NO: 246941 - DNA, 25 bp, Artificial
  probe
  misc_feature (1)..(25): SEQ ID NO: 4081; WAN024GIK_at; Start 23; Stop 47
gagttcctgctagcttagaaccctg

SEQ ID NO: 246942 - DNA, 25 bp, Artificial
  probe
  misc_feature (1)..(25): SEQ ID NO: 4081; WAN024GIK_at; Start 149; Stop 173
ccaccacttctgcaacaggaattga

SEQ ID NO: 246943 - DNA, 25 bp, Artificial
  probe
  misc_feature (1)..(25): SEQ ID NO: 4081; WAN024GIK_at; Start 71; Stop 95
ctgtattgcgcattaagggattggc

SEQ ID NO: 246944 - DNA, 25 bp, Artificial
  probe
  misc_feature (1)..(25): SEQ ID NO: 4081; WAN024GIK_at; Start 174; Stop 198
cacatcgatgatattgtccatgacg

SEQ ID NO: 246945 - DNA, 25 bp, Artificial
  probe
  misc_feature (1)..(25): SEQ ID NO: 4081; WAN024GIK_at; Start 153; Stop 177
cacttctgcaacaggaattgacaca

SEQ ID NO: 246946 - DNA, 25 bp, Artificial
  probe
  misc_feature (1)..(25): SEQ ID NO: 4081; WAN024GIK_at; Start 157; Stop 181
tctgcaacaggaattgacacatcga

SEQ ID NO: 246947 - DNA, 25 bp, Artificial
  probe
  misc_feature (1)..(25): SEQ ID NO: 4081; WAN024GIK_at; Start 161; Stop 185
caacaggaattgacacatcgatgat

SEQ ID NO: 246948 - DNA, 25 bp, Artificial
  probe
  misc_feature (1)..(25): SEQ ID NO: 4081; WAN024GIK_at; Start 108; Stop 132
acccaactccactagaatttccaag

SEQ ID NO: 246949 - DNA, 25 bp, Artificial
  probe
  misc_feature (1)..(25): SEQ ID NO: 4081; WAN024GIK_at; Start 146; Stop 170
tgtccaccacttctgcaacaggaat

SEQ ID NO: 246950 - DNA, 25 bp, Artificial
  probe
  misc_feature (1)..(25): SEQ ID NO: 4081; WAN024GIK_at; Start 139; Stop 163
ggatgcttgtccaccacttctgcaa

SEQ ID NO: 246951 - DNA, 25 bp, Artificial
  probe
  misc_feature (1)..(25): SEQ ID NO: 4081; WAN024GIK_at; Start 1; Stop 25
gtgcgtacaatcttgtccataggag

SEQ ID NO: 246952 - DNA, 25 bp, Artificial
  probe
  misc_feature (1)..(25): SEQ ID NO: 4081; WAN024GIK_at; Start 65; Stop 89
gaccaactgtattgcgcattaaggg

SEQ ID NO: 246953 - DNA, 25 bp, Artificial
  probe
  misc_feature (1)..(25): SEQ ID NO: 4081; WAN024GIK_at; Start 18; Stop 42
cataggagttcctgctagcttagaa

SEQ ID NO: 246954 - DNA, 25 bp, Artificial
  probe
  misc_feature (1)..(25): SEQ ID NO: 4081; WAN024GIK_at; Start 9; Stop 33
aatcttgtccataggagttcctgct

SEQ ID NO: 246955 - DNA, 25 bp, Artificial
  probe
  misc_feature (1)..(25): SEQ ID NO: 4081; WAN024GIK_at; Start 164; Stop 188
caggaattgacacatcgatgatatt

SEQ ID NO: 246956 - DNA, 25 bp, Artificial
  probe
  misc_feature (1)..(25): SEQ ID NO: 4081; WAN024GIK_at; Start 130; Stop 154
aagacttctggatgcttgtccacca

SEQ ID NO: 246957 - DNA, 25 bp, Artificial
  probe
  misc_feature (1)..(25): SEQ ID NO: 4081; WAN024GIK_at; Start 180; Stop 204
gatgatattgtccatgacgacctcc

SEQ ID NO: 246958 - DNA, 25 bp, Artificial
  probe
  misc_feature (1)..(25): SEQ ID NO: 4081; WAN024GIK_at; Start 4; Stop 28
cgtacaatcttgtccataggagttc

SEQ ID NO: 246959 - DNA, 25 bp, Artificial
  probe
  misc_feature (1)..(25): SEQ ID NO: 4081; WAN024GIK_at; Start 120; Stop 144
tagaatttccaagacttctggatgc

SEQ ID NO: 246960 - DNA, 25 bp, Artificial
  probe
  misc_feature (1)..(25): SEQ ID NO: 4081; WAN024GIK_at; Start 127; Stop 151
tccaagacttctggatgcttgtcca

SEQ ID NO: 246961 - DNA, 25 bp, Artificial
  probe
  misc_feature (1)..(25): SEQ ID NO: 4081; WAN024GIK_at; Start 35; Stop 59
gcttagaaccctgtttaagtgatac

SEQ ID NO: 246962 - DNA, 25 bp, Artificial
  probe
  misc_feature (1)..(25): SEQ ID NO: 2293; WAN024GIL_at; Start 200; Stop 224
tacgcacactggaagcgaatggcta

SEQ ID NO: 246963 - DNA, 25 bp, Artificial
  probe
  misc_feature (1)..(25): SEQ ID NO: 2293; WAN024GIL_at; Start 183; Stop 207
tcctatggacaagattgtacgcaca

SEQ ID NO: 246964 - DNA, 25 bp, Artificial
  probe
  misc_feature (1)..(25): SEQ ID NO: 2293; WAN024GIL_at; Start 211; Stop 235
gaagcgaatggctacgaagtgattg

SEQ ID NO: 246965 - DNA, 25 bp, Artificial
  probe
  misc_feature (1)..(25): SEQ ID NO: 2293; WAN024GIL_at; Start 9; Stop 33
cgtcatggacaatatcatcgatgtg

SEQ ID NO: 246966 - DNA, 25 bp, Artificial
  probe
  misc_feature (1)..(25): SEQ ID NO: 2293; WAN024GIL_at; Start 206; Stop 230
cactggaagcgaatggctacgaagt

SEQ ID NO: 246967 - DNA, 25 bp, Artificial
  probe
  misc_feature (1)..(25): SEQ ID NO: 2293; WAN024GIL_at; Start 64; Stop 88
catccagaagtcttggaaattctag

SEQ ID NO: 246968 - DNA, 25 bp, Artificial
  probe
  misc_feature (1)..(25): SEQ ID NO: 2293; WAN024GIL_at; Start 163; Stop 187
ggttctaagctagcaggaactccta

SEQ ID NO: 246969 - DNA, 25 bp, Artificial
  probe
  misc_feature (1)..(25): SEQ ID NO: 2293; WAN024GIL_at; Start 24; Stop 48
catcgatgtgtcaattcctgttgca

SEQ ID NO: 246970 - DNA, 25 bp, Artificial
  probe
  misc_feature (1)..(25): SEQ ID NO: 2293; WAN024GIL_at; Start 179; Stop 203
gaactcctatggacaagattgtacg

SEQ ID NO: 246971 - DNA, 25 bp, Artificial
  probe
  misc_feature (1)..(25): SEQ ID NO: 2293; WAN024GIL_at; Start 137; Stop 161
ttggtcgtaaagtatcacttaaaca

SEQ ID NO: 246972 - DNA, 25 bp, Artificial
  probe
  misc_feature (1)..(25): SEQ ID NO: 2293; WAN024GIL_at; Start 134; Stop 158
cagttggtcgtaaagtatcacttaa

SEQ ID NO: 246973 - DNA, 25 bp, Artificial
  probe
  misc_feature (1)..(25): SEQ ID NO: 2293; WAN024GIL_at; Start 193; Stop 217
aagattgtacgcacactggaagcga

SEQ ID NO: 246974 - DNA, 25 bp, Artificial
  probe
  misc_feature (1)..(25): SEQ ID NO: 2293; WAN024GIL_at; Start 58; Stop 82
gacaagcatccagaagtcttggaaa

SEQ ID NO: 246975 - DNA, 25 bp, Artificial
  probe
  misc_feature (1)..(25): SEQ ID NO: 2293; WAN024GIL_at; Start 40; Stop 64
cctgttgcagaagtggtggacaagc

SEQ ID NO: 246976 - DNA, 25 bp, Artificial
  probe
  misc_feature (1)..(25): SEQ ID NO: 2293; WAN024GIL_at; Start 204; Stop 228
cacactggaagcgaatggctacgaa

SEQ ID NO: 246977 - DNA, 25 bp, Artificial
  probe
  misc_feature (1)..(25): SEQ ID NO: 2293; WAN024GIL_at; Start 125; Stop 149
tgcgcaatacagttggtcgtaaagt

SEQ ID NO: 246978 - DNA, 25 bp, Artificial
  probe
  misc_feature (1)..(25): SEQ ID NO: 2293; WAN024GIL_at; Start 223; Stop 247
tacgaagtgattggattagactaac

SEQ ID NO: 246979 - DNA, 25 bp, Artificial
  probe
  misc_feature (1)..(25): SEQ ID NO: 2293; WAN024GIL_at; Start 35; Stop 59
caattcctgttgcagaagtggtgga

SEQ ID NO: 246980 - DNA, 25 bp, Artificial
  probe
  misc_feature (1)..(25): SEQ ID NO: 2293; WAN024GIL_at; Start 4; Stop 28
gaggtcgtcatggacaatatcatcg

SEQ ID NO: 246981 - DNA, 25 bp, Artificial
  probe
  misc_feature (1)..(25): SEQ ID NO: 2293; WAN024GIL_at; Start 129; Stop 153
caatacagttggtcgtaaagtatca

SEQ ID NO: 246982 - DNA, 25 bp, Artificial
  probe
  misc_feature (1)..(25): SEQ ID NO: 2293; WAN024GIL_at; Start 168; Stop 192
taagctagcaggaactcctatggac

SEQ ID NO: 246983 - DNA, 25 bp, Artificial
  probe
  misc_feature (1)..(25): SEQ ID NO: 2293; WAN024GIL_at; Start 173; Stop 197
tagcaggaactcctatggacaagat

SEQ ID NO: 246984 - DNA, 25 bp, Artificial
  probe
  misc_feature (1)..(25): SEQ ID NO: 2293; WAN024GIL_at; Start 28; Stop 52
gatgtgtcaattcctgttgcagaag

SEQ ID NO: 246985 - DNA, 25 bp, Artificial
  probe
  misc_feature (1)..(25): SEQ ID NO: 2293; WAN024GIL_at; Start 44; Stop 68
ttgcagaagtggtggacaagcatcc

SEQ ID NO: 246986 - DNA, 25 bp, Artificial
  probe
  misc_feature (1)..(25): SEQ ID NO: 2293; WAN024GIL_at; Start 188; Stop 212
tggacaagattgtacgcacactgga

SEQ ID NO: 246987 - DNA, 25 bp, Artificial
  probe
  misc_feature (1)..(25): SEQ ID NO: 2293; WAN024GIL_at; Start 53; Stop 77
tggtggacaagcatccagaagtctt

SEQ ID NO: 246988 - DNA, 25 bp, Artificial
  probe
  misc_feature (1)..(25): SEQ ID NO: 2293; WAN024GIL_at; Start 1; Stop 25
atggaggtcgtcatggacaatatca

SEQ ID NO: 246989 - DNA, 25 bp, Artificial
  probe
  misc_feature (1)..(25): SEQ ID NO: 2293; WAN024GIL_at; Start 47; Stop 71
cagaagtggtggacaagcatccaga

SEQ ID NO: 246990 - DNA, 25 bp, Artificial
  probe
  misc_feature (1)..(25): SEQ ID NO: 2293; WAN024GIL_at; Start 68; Stop 92
cagaagtcttggaaattctagtgga

SEQ ID NO: 246991 - DNA, 25 bp, Artificial
  probe
  misc_feature (1)..(25): SEQ ID NO: 2293; WAN024GIL_at; Start 226; Stop 250
gaagtgattggattagactaactaa

SEQ ID NO: 246992 - DNA, 25 bp, Artificial
  probe
  misc_feature (1)..(25): SEQ ID NO: 2293; WAN024GIL_at; Start 190; Stop 214
gacaagattgtacgcacactggaag

SEQ ID NO: 246993 - DNA, 25 bp, Artificial
  probe
  misc_feature (1)..(25): SEQ ID NO: 2293; WAN024GIL_at; Start 19; Stop 43
aatatcatcgatgtgtcaattcctg

SEQ ID NO: 246994 - DNA, 25 bp, Artificial
  probe
  misc_feature (1)..(25): SEQ ID NO: 2293; WAN024GIL_at; Start 198; Stop 222
tgtacgcacactggaagcgaatggc

SEQ ID NO: 246995 - DNA, 25 bp, Artificial
  probe
  misc_feature (1)..(25): SEQ ID NO: 2293; WAN024GIL_at; Start 215; Stop 239
cgaatggctacgaagtgattggatt

SEQ ID NO: 246996 - DNA, 25 bp, Artificial
  probe
  misc_feature (1)..(25): SEQ ID NO: 6895; WAN024GIM_at; Start 7; Stop 31
ctcataaaaactctagctaaaattt

SEQ ID NO: 246997 - DNA, 25 bp, Artificial
  probe
  misc_feature (1)..(25): SEQ ID NO: 6895; WAN024GIM_at; Start 2; Stop 26
tgggactcataaaaactctagctaa

SEQ ID NO: 246998 - DNA, 25 bp, Artificial
  probe
  misc_feature (1)..(25): SEQ ID NO: 6895; WAN024GIM_at; Start 80; Stop 104
taaagaaagatgataatgccgttgt

SEQ ID NO: 246999 - DNA, 25 bp, Artificial
  probe
  misc_feature (1)..(25): SEQ ID NO: 6895; WAN024GIM_at; Start 127; Stop 151
gccgacaagttaatggatacggctc

SEQ ID NO: 247000 - DNA, 25 bp, Artificial
  probe
  misc_feature (1)..(25): SEQ ID NO: 6895; WAN024GIM_at; Start 92; Stop 116
ataatgccgttgtcggtctggggaa

SEQ ID NO: 247001 - DNA, 25 bp, Artificial
  probe
  misc_feature (1)..(25): SEQ ID NO: 6895; WAN024GIM_at; Start 122; Stop 146
ttattgccgacaagttaatggatac

SEQ ID NO: 247002 - DNA, 25 bp, Artificial
  probe
  misc_feature (1)..(25): SEQ ID NO: 6895; WAN024GIM_at; Start 123; Stop 147
tattgccgacaagttaatggatacg

SEQ ID NO: 247003 - DNA, 25 bp, Artificial
  probe
  misc_feature (1)..(25): SEQ ID NO: 6895; WAN024GIM_at; Start 85; Stop 109
aaagatgataatgccgttgtcggtc

SEQ ID NO: 247004 - DNA, 25 bp, Artificial
  probe
  misc_feature (1)..(25): SEQ ID NO: 6895; WAN024GIM_at; Start 78; Stop 102
gataaagaaagatgataatgccgtt

SEQ ID NO: 247005 - DNA, 25 bp, Artificial
  probe
  misc_feature (1)..(25): SEQ ID NO: 6895; WAN024GIM_at; Start 6; Stop 30
actcataaaaactctagctaaaatt

SEQ ID NO: 247006 - DNA, 25 bp, Artificial
  probe
  misc_feature (1)..(25): SEQ ID NO: 6895; WAN024GIM_at; Start 118; Stop 142
ctttttattgccgacaagttaatgg

SEQ ID NO: 247007 - DNA, 25 bp, Artificial
  probe
  misc_feature (1)..(25): SEQ ID NO: 6895; WAN024GIM_at; Start 1; Stop 25
atgggactcataaaaactctagcta

SEQ ID NO: 247008 - DNA, 25 bp, Artificial
  probe
  misc_feature (1)..(25): SEQ ID NO: 6895; WAN024GIM_at; Start 3; Stop 27
gggactcataaaaactctagctaaa

SEQ ID NO: 247009 - DNA, 25 bp, Artificial
  probe
  misc_feature (1)..(25): SEQ ID NO: 6895; WAN024GIM_at; Start 125; Stop 149
ttgccgacaagttaatggatacggc

SEQ ID NO: 247010 - DNA, 25 bp, Artificial
  probe
  misc_feature (1)..(25): SEQ ID NO: 6895; WAN024GIM_at; Start 124; Stop 148
attgccgacaagttaatggatacgg

SEQ ID NO: 247011 - DNA, 25 bp, Artificial
  probe
  misc_feature (1)..(25): SEQ ID NO: 6895; WAN024GIM_at; Start 120; Stop 144
ttttattgccgacaagttaatggat

SEQ ID NO: 247012 - DNA, 25 bp, Artificial
  probe
  misc_feature (1)..(25): SEQ ID NO: 6895; WAN024GIM_at; Start 119; Stop 143
tttttattgccgacaagttaatgga

SEQ ID NO: 247013 - DNA, 25 bp, Artificial
  probe
  misc_feature (1)..(25): SEQ ID NO: 6895; WAN024GIM_at; Start 89; Stop 113
atgataatgccgttgtcggtctggg

SEQ ID NO: 247014 - DNA, 25 bp, Artificial
  probe
  misc_feature (1)..(25): SEQ ID NO: 6895; WAN024GIM_at; Start 81; Stop 105
aaagaaagatgataatgccgttgtc

SEQ ID NO: 247015 - DNA, 25 bp, Artificial
  probe
  misc_feature (1)..(25): SEQ ID NO: 6895; WAN024GIM_at; Start 5; Stop 29
gactcataaaaactctagctaaaat

SEQ ID NO: 247016 - DNA, 25 bp, Artificial
  probe
  misc_feature (1)..(25): SEQ ID NO: 6895; WAN024GIM_at; Start 84; Stop 108
gaaagatgataatgccgttgtcggt

SEQ ID NO: 247017 - DNA, 25 bp, Artificial
  probe
  misc_feature (1)..(25): SEQ ID NO: 6895; WAN024GIM_at; Start 77; Stop 101
cgataaagaaagatgataatgccgt

SEQ ID NO: 247018 - DNA, 25 bp, Artificial
  probe
  misc_feature (1)..(25): SEQ ID NO: 6895; WAN024GIM_at; Start 82; Stop 106
aagaaagatgataatgccgttgtcg

SEQ ID NO: 247019 - DNA, 25 bp, Artificial
  probe
  misc_feature (1)..(25): SEQ ID NO: 6895; WAN024GIM_at; Start 95; Stop 119
atgccgttgtcggtctggggaaact

SEQ ID NO: 247020 - DNA, 25 bp, Artificial
  probe
  misc_feature (1)..(25): SEQ ID NO: 6895; WAN024GIM_at; Start 8; Stop 32
tcataaaaactctagctaaaattta

SEQ ID NO: 247021 - DNA, 25 bp, Artificial
  probe
  misc_feature (1)..(25): SEQ ID NO: 6895; WAN024GIM_at; Start 10; Stop 34
ataaaaactctagctaaaatttatg

SEQ ID NO: 247022 - DNA, 25 bp, Artificial
  probe
  misc_feature (1)..(25): SEQ ID NO: 6895; WAN024GIM_at; Start 79; Stop 103
ataaagaaagatgataatgccgttg

SEQ ID NO: 247023 - DNA, 25 bp, Artificial
  probe
  misc_feature (1)..(25): SEQ ID NO: 6895; WAN024GIM_at; Start 4; Stop 28
ggactcataaaaactctagctaaaa

SEQ ID NO: 247024 - DNA, 25 bp, Artificial
  probe
  misc_feature (1)..(25): SEQ ID NO: 6895; WAN024GIM_at; Start 83; Stop 107
agaaagatgataatgccgttgtcgg

SEQ ID NO: 247025 - DNA, 25 bp, Artificial
  probe
  misc_feature (1)..(25): SEQ ID NO: 6895; WAN024GIM_at; Start 88; Stop 112
gatgataatgccgttgtcggtctgg

SEQ ID NO: 247026 - DNA, 25 bp, Artificial
  probe
  misc_feature (1)..(25): SEQ ID NO: 6895; WAN024GIM_at; Start 121; Stop 145
tttattgccgacaagttaatggata

SEQ ID NO: 247027 - DNA, 25 bp, Artificial
  probe
  misc_feature (1)..(25): SEQ ID NO: 6895; WAN024GIM_at; Start 76; Stop 100
acgataaagaaagatgataatgccg

SEQ ID NO: 247028 - DNA, 25 bp, Artificial
  probe
  misc_feature (1)..(25): SEQ ID NO: 6895; WAN024GIM_at; Start 126; Stop 150
tgccgacaagttaatggatacggct

SEQ ID NO: 247029 - DNA, 25 bp, Artificial
  probe
  misc_feature (1)..(25): SEQ ID NO: 6895; WAN024GIM_at; Start 75; Stop 99
aacgataaagaaagatgataatgcc

SEQ ID NO: 247030 - DNA, 25 bp, Artificial
  probe
  misc_feature (1)..(25): SEQ ID NO: 7221; WAN024GIN_at; Start 12; Stop 36
ttggatgatcatttcctttgcagtt

SEQ ID NO: 247031 - DNA, 25 bp, Artificial
  probe
  misc_feature (1)..(25): SEQ ID NO: 7221; WAN024GIN_at; Start 22; Stop 46
atttcctttgcagttcaattgctgt

SEQ ID NO: 247032 - DNA, 25 bp, Artificial
  probe
  misc_feature (1)..(25): SEQ ID NO: 7221; WAN024GIN_at; Start 17; Stop 41
tgatcatttcctttgcagttcaatt

SEQ ID NO: 247033 - DNA, 25 bp, Artificial
  probe
  misc_feature (1)..(25): SEQ ID NO: 7221; WAN024GIN_at; Start 64; Stop 88
aagatattggattggctctttaaac

SEQ ID NO: 247034 - DNA, 25 bp, Artificial
  probe
  misc_feature (1)..(25): SEQ ID NO: 7221; WAN024GIN_at; Start 23; Stop 47
tttcctttgcagttcaattgctgtt

SEQ ID NO: 247035 - DNA, 25 bp, Artificial
  probe
  misc_feature (1)..(25): SEQ ID NO: 7221; WAN024GIN_at; Start 67; Stop 91
atattggattggctctttaaactta

SEQ ID NO: 247036 - DNA, 25 bp, Artificial
  probe
  misc_feature (1)..(25): SEQ ID NO: 7221; WAN024GIN_at; Start 20; Stop 44
tcatttcctttgcagttcaattgct

SEQ ID NO: 247037 - DNA, 25 bp, Artificial
  probe
  misc_feature (1)..(25): SEQ ID NO: 7221; WAN024GIN_at; Start 16; Stop 40
atgatcatttcctttgcagttcaat

SEQ ID NO: 247038 - DNA, 25 bp, Artificial
  probe
  misc_feature (1)..(25): SEQ ID NO: 7221; WAN024GIN_at; Start 36; Stop 60
tcaattgctgttttacaagatatta

SEQ ID NO: 247039 - DNA, 25 bp, Artificial
  probe
  misc_feature (1)..(25): SEQ ID NO: 7221; WAN024GIN_at; Start 65; Stop 89
agatattggattggctctttaaact

SEQ ID NO: 247040 - DNA, 25 bp, Artificial
  probe
  misc_feature (1)..(25): SEQ ID NO: 7221; WAN024GIN_at; Start 57; Stop 81
attatttaagatattggattggctc

SEQ ID NO: 247041 - DNA, 25 bp, Artificial
  probe
  misc_feature (1)..(25): SEQ ID NO: 7221; WAN024GIN_at; Start 11; Stop 35
tttggatgatcatttcctttgcagt

SEQ ID NO: 247042 - DNA, 25 bp, Artificial
  probe
  misc_feature (1)..(25): SEQ ID NO: 7221; WAN024GIN_at; Start 58; Stop 82
ttatttaagatattggattggctct

SEQ ID NO: 247043 - DNA, 25 bp, Artificial
  probe
  misc_feature (1)..(25): SEQ ID NO: 7221; WAN024GIN_at; Start 5; Stop 29
aattcttttggatgatcatttcctt

SEQ ID NO: 247044 - DNA, 25 bp, Artificial
  probe
  misc_feature (1)..(25): SEQ ID NO: 7221; WAN024GIN_at; Start 25; Stop 49
tcctttgcagttcaattgctgtttt

SEQ ID NO: 247045 - DNA, 25 bp, Artificial
  probe
  misc_feature (1)..(25): SEQ ID NO: 7221; WAN024GIN_at; Start 9; Stop 33
cttttggatgatcatttcctttgca

SEQ ID NO: 247046 - DNA, 25 bp, Artificial
  probe
  misc_feature (1)..(25): SEQ ID NO: 7221; WAN024GIN_at; Start 56; Stop 80
tattatttaagatattggattggct

SEQ ID NO: 247047 - DNA, 25 bp, Artificial
  probe
  misc_feature (1)..(25): SEQ ID NO: 7221; WAN024GIN_at; Start 18; Stop 42
gatcatttcctttgcagttcaattg

SEQ ID NO: 247048 - DNA, 25 bp, Artificial
  probe
  misc_feature (1)..(25): SEQ ID NO: 7221; WAN024GIN_at; Start 59; Stop 83
tatttaagatattggattggctctt

SEQ ID NO: 247049 - DNA, 25 bp, Artificial
  probe
  misc_feature (1)..(25): SEQ ID NO: 7221; WAN024GIN_at; Start 8; Stop 32
tcttttggatgatcatttcctttgc

SEQ ID NO: 247050 - DNA, 25 bp, Artificial
  probe
  misc_feature (1)..(25): SEQ ID NO: 7221; WAN024GIN_at; Start 3; Stop 27
gaaattcttttggatgatcatttcc

SEQ ID NO: 247051 - DNA, 25 bp, Artificial
  probe
  misc_feature (1)..(25): SEQ ID NO: 7221; WAN024GIN_at; Start 63; Stop 87
taagatattggattggctctttaaa

SEQ ID NO: 247052 - DNA, 25 bp, Artificial
  probe
  misc_feature (1)..(25): SEQ ID NO: 7221; WAN024GIN_at; Start 13; Stop 37
tggatgatcatttcctttgcagttc

SEQ ID NO: 247053 - DNA, 25 bp, Artificial
  probe
  misc_feature (1)..(25): SEQ ID NO: 7221; WAN024GIN_at; Start 24; Stop 48
ttcctttgcagttcaattgctgttt

SEQ ID NO: 247054 - DNA, 25 bp, Artificial
  probe
  misc_feature (1)..(25): SEQ ID NO: 7221; WAN024GIN_at; Start 15; Stop 39
gatgatcatttcctttgcagttcaa

SEQ ID NO: 247055 - DNA, 25 bp, Artificial
  probe
  misc_feature (1)..(25): SEQ ID NO: 7221; WAN024GIN_at; Start 68; Stop 92
tattggattggctctttaaacttat

SEQ ID NO: 247056 - DNA, 25 bp, Artificial
  probe
  misc_feature (1)..(25): SEQ ID NO: 7221; WAN024GIN_at; Start 69; Stop 93
attggattggctctttaaacttatc

SEQ ID NO: 247057 - DNA, 25 bp, Artificial
  probe
  misc_feature (1)..(25): SEQ ID NO: 7221; WAN024GIN_at; Start 19; Stop 43
atcatttcctttgcagttcaattgc

SEQ ID NO: 247058 - DNA, 25 bp, Artificial
  probe
  misc_feature (1)..(25): SEQ ID NO: 7221; WAN024GIN_at; Start 21; Stop 45
catttcctttgcagttcaattgctg

SEQ ID NO: 247059 - DNA, 25 bp, Artificial
  probe
  misc_feature (1)..(25): SEQ ID NO: 7221; WAN024GIN_at; Start 14; Stop 38
ggatgatcatttcctttgcagttca

SEQ ID NO: 247060 - DNA, 25 bp, Artificial
  probe
  misc_feature (1)..(25): SEQ ID NO: 7221; WAN024GIN_at; Start 4; Stop 28
aaattcttttggatgatcatttcct

SEQ ID NO: 247061 - DNA, 25 bp, Artificial
  probe
  misc_feature (1)..(25): SEQ ID NO: 7221; WAN024GIN_at; Start 61; Stop 85
tttaagatattggattggctcttta

SEQ ID NO: 247062 - DNA, 25 bp, Artificial
  probe
  misc_feature (1)..(25): SEQ ID NO: 7221; WAN024GIN_at; Start 10; Stop 34
ttttggatgatcatttcctttgcag

SEQ ID NO: 247063 - DNA, 25 bp, Artificial
  probe
  misc_feature (1)..(25): SEQ ID NO: 7221; WAN024GIN_at; Start 49; Stop 73
tacaagatattatttaagatattgg

SEQ ID NO: 247064 - DNA, 25 bp, Artificial
  probe
  misc_feature (1)..(25): SEQ ID NO: 2756; WAN024GIO_at; Start 86; Stop 110
aagctgaccatgtcgttgttggtct

SEQ ID NO: 247065 - DNA, 25 bp, Artificial
  probe
  misc_feature (1)..(25): SEQ ID NO: 2756; WAN024GIO_at; Start 89; Stop 113
ctgaccatgtcgttgttggtctggg

SEQ ID NO: 247066 - DNA, 25 bp, Artificial
  probe
  misc_feature (1)..(25): SEQ ID NO: 2756; WAN024GIO_at; Start 78; Stop 102
gataaagaaagctgaccatgtcgtt

SEQ ID NO: 247067 - DNA, 25 bp, Artificial
  probe
  misc_feature (1)..(25): SEQ ID NO: 2756; WAN024GIO_at; Start 87; Stop 111
agctgaccatgtcgttgttggtctg

SEQ ID NO: 247068 - DNA, 25 bp, Artificial
  probe
  misc_feature (1)..(25): SEQ ID NO: 2756; WAN024GIO_at; Start 88; Stop 112
gctgaccatgtcgttgttggtctgg

SEQ ID NO: 247069 - DNA, 25 bp, Artificial
  probe
  misc_feature (1)..(25): SEQ ID NO: 2756; WAN024GIO_at; Start 80; Stop 104
taaagaaagctgaccatgtcgttgt

SEQ ID NO: 247070 - DNA, 25 bp, Artificial
  probe
  misc_feature (1)..(25): SEQ ID NO: 2756; WAN024GIO_at; Start 84; Stop 108
gaaagctgaccatgtcgttgttggt

SEQ ID NO: 247071 - DNA, 25 bp, Artificial
  probe
  misc_feature (1)..(25): SEQ ID NO: 2756; WAN024GIO_at; Start 77; Stop 101
cgataaagaaagctgaccatgtcgt

SEQ ID NO: 247072 - DNA, 25 bp, Artificial
  probe
  misc_feature (1)..(25): SEQ ID NO: 2756; WAN024GIO_at; Start 82; Stop 106
aagaaagctgaccatgtcgttgttg

SEQ ID NO: 247073 - DNA, 25 bp, Artificial
  probe
  misc_feature (1)..(25): SEQ ID NO: 2756; WAN024GIO_at; Start 81; Stop 105
aaagaaagctgaccatgtcgttgtt

SEQ ID NO: 247074 - DNA, 25 bp, Artificial
  probe
  misc_feature (1)..(25): SEQ ID NO: 2756; WAN024GIO_at; Start 79; Stop 103
ataaagaaagctgaccatgtcgttg

SEQ ID NO: 247075 - DNA, 25 bp, Artificial
  probe
  misc_feature (1)..(25): SEQ ID NO: 2756; WAN024GIO_at; Start 74; Stop 98
aaacgataaagaaagctgaccatgt

SEQ ID NO: 247076 - DNA, 25 bp, Artificial
  probe
  misc_feature (1)..(25): SEQ ID NO: 2756; WAN024GIO_at; Start 85; Stop 109
aaagctgaccatgtcgttgttggtc

SEQ ID NO: 247077 - DNA, 25 bp, Artificial
  probe
  misc_feature (1)..(25): SEQ ID NO: 2756; WAN024GIO_at; Start 76; Stop 100
acgataaagaaagctgaccatgtcg

SEQ ID NO: 247078 - DNA, 25 bp, Artificial
  probe
  misc_feature (1)..(25): SEQ ID NO: 2756; WAN024GIO_at; Start 75; Stop 99
aacgataaagaaagctgaccatgtc

SEQ ID NO: 247079 - DNA, 25 bp, Artificial
  probe
  misc_feature (1)..(25): SEQ ID NO: 2756; WAN024GIO_at; Start 83; Stop 107
agaaagctgaccatgtcgttgttgg

SEQ ID NO: 247080 - DNA, 25 bp, Artificial
  probe
  misc_feature (1)..(25): SEQ ID NO: 4198; WAN024GIP_at; Start 72; Stop 96
taaacactatcttgtaaaacagcaa

SEQ ID NO: 247081 - DNA, 25 bp, Artificial
  probe
  misc_feature (1)..(25): SEQ ID NO: 4198; WAN024GIP_at; Start 269; Stop 293
acggcattatcatctttctttatcg

SEQ ID NO: 247082 - DNA, 25 bp, Artificial
  probe
  misc_feature (1)..(25): SEQ ID NO: 4198; WAN024GIP_at; Start 261; Stop 285
gaccgacaacggcattatcatcttt

SEQ ID NO: 247083 - DNA, 25 bp, Artificial
  probe
  misc_feature (1)..(25): SEQ ID NO: 4198; WAN024GIP_at; Start 200; Stop 224
tctggcttaatgagccaccgagccg

SEQ ID NO: 247084 - DNA, 25 bp, Artificial
  probe
  misc_feature (1)..(25): SEQ ID NO: 4198; WAN024GIP_at; Start 208; Stop 232
aatgagccaccgagccgtatccatt

SEQ ID NO: 247085 - DNA, 25 bp, Artificial
  probe
  misc_feature (1)..(25): SEQ ID NO: 4198; WAN024GIP_at; Start 114; Stop 138
tgatcatccaaaagaatttcacaat

SEQ ID NO: 247086 - DNA, 25 bp, Artificial
  probe
  misc_feature (1)..(25): SEQ ID NO: 4198; WAN024GIP_at; Start 58; Stop 82
ccaatccaatatcttaaacactatc

SEQ ID NO: 247087 - DNA, 25 bp, Artificial
  probe
  misc_feature (1)..(25): SEQ ID NO: 4198; WAN024GIP_at; Start 197; Stop 221
tcctctggcttaatgagccaccgag

SEQ ID NO: 247088 - DNA, 25 bp, Artificial
  probe
  misc_feature (1)..(25): SEQ ID NO: 4198; WAN024GIP_at; Start 27; Stop 51
cttggattaccatctagataagttt

SEQ ID NO: 247089 - DNA, 25 bp, Artificial
  probe
  misc_feature (1)..(25): SEQ ID NO: 4198; WAN024GIP_at; Start 130; Stop 154
tttcacaatcccaataatcggtttg

SEQ ID NO: 247090 - DNA, 25 bp, Artificial
  probe
  misc_feature (1)..(25): SEQ ID NO: 4198; WAN024GIP_at; Start 271; Stop 295
ggcattatcatctttctttatcgtt

SEQ ID NO: 247091 - DNA, 25 bp, Artificial
  probe
  misc_feature (1)..(25): SEQ ID NO: 4198; WAN024GIP_at; Start 201; Stop 225
ctggcttaatgagccaccgagccgt

SEQ ID NO: 247092 - DNA, 25 bp, Artificial
  probe
  misc_feature (1)..(25): SEQ ID NO: 4198; WAN024GIP_at; Start 251; Stop 275
agtttccccagaccgacaacggcat

SEQ ID NO: 247093 - DNA, 25 bp, Artificial
  probe
  misc_feature (1)..(25): SEQ ID NO: 4198; WAN024GIP_at; Start 135; Stop 159
caatcccaataatcggtttgataaa

SEQ ID NO: 247094 - DNA, 25 bp, Artificial
  probe
  misc_feature (1)..(25): SEQ ID NO: 4198; WAN024GIP_at; Start 31; Stop 55
gattaccatctagataagtttaaag

SEQ ID NO: 247095 - DNA, 25 bp, Artificial
  probe
  misc_feature (1)..(25): SEQ ID NO: 4198; WAN024GIP_at; Start 62; Stop 86
tccaatatcttaaacactatcttgt

SEQ ID NO: 247096 - DNA, 25 bp, Artificial
  probe
  misc_feature (1)..(25): SEQ ID NO: 4198; WAN024GIP_at; Start 120; Stop 144
tccaaaagaatttcacaatcccaat

SEQ ID NO: 247097 - DNA, 25 bp, Artificial
  probe
  misc_feature (1)..(25): SEQ ID NO: 4198; WAN024GIP_at; Start 279; Stop 303
catctttctttatcgttttcattac

SEQ ID NO: 247098 - DNA, 25 bp, Artificial
  probe
  misc_feature (1)..(25): SEQ ID NO: 4198; WAN024GIP_at; Start 69; Stop 93
tcttaaacactatcttgtaaaacag

SEQ ID NO: 247099 - DNA, 25 bp, Artificial
  probe
  misc_feature (1)..(25): SEQ ID NO: 4198; WAN024GIP_at; Start 117; Stop 141
tcatccaaaagaatttcacaatccc

SEQ ID NO: 247100 - DNA, 25 bp, Artificial
  probe
  misc_feature (1)..(25): SEQ ID NO: 4198; WAN024GIP_at; Start 127; Stop 151
gaatttcacaatcccaataatcggt

SEQ ID NO: 247101 - DNA, 25 bp, Artificial
  probe
  misc_feature (1)..(25): SEQ ID NO: 4198; WAN024GIP_at; Start 257; Stop 281
cccagaccgacaacggcattatcat

SEQ ID NO: 247102 - DNA, 25 bp, Artificial
  probe
  misc_feature (1)..(25): SEQ ID NO: 4198; WAN024GIP_at; Start 126; Stop 150
agaatttcacaatcccaataatcgg

SEQ ID NO: 247103 - DNA, 25 bp, Artificial
  probe
  misc_feature (1)..(25): SEQ ID NO: 4198; WAN024GIP_at; Start 133; Stop 157
cacaatcccaataatcggtttgata

SEQ ID NO: 247104 - DNA, 25 bp, Artificial
  probe
  misc_feature (1)..(25): SEQ ID NO: 4198; WAN024GIP_at; Start 209; Stop 233
atgagccaccgagccgtatccatta

SEQ ID NO: 247105 - DNA, 25 bp, Artificial
  probe
  misc_feature (1)..(25): SEQ ID NO: 4198; WAN024GIP_at; Start 254; Stop 278
ttccccagaccgacaacggcattat

SEQ ID NO: 247106 - DNA, 25 bp, Artificial
  probe
  misc_feature (1)..(25): SEQ ID NO: 4198; WAN024GIP_at; Start 263; Stop 287
ccgacaacggcattatcatctttct

SEQ ID NO: 247107 - DNA, 25 bp, Artificial
  probe
  misc_feature (1)..(25): SEQ ID NO: 4198; WAN024GIP_at; Start 265; Stop 289
gacaacggcattatcatctttcttt

SEQ ID NO: 247108 - DNA, 25 bp, Artificial
  probe
  misc_feature (1)..(25): SEQ ID NO: 4198; WAN024GIP_at; Start 75; Stop 99
acactatcttgtaaaacagcaattg

SEQ ID NO: 247109 - DNA, 25 bp, Artificial
  probe
  misc_feature (1)..(25): SEQ ID NO: 4198; WAN024GIP_at; Start 204; Stop 228
gcttaatgagccaccgagccgtatc

SEQ ID NO: 247110 - DNA, 25 bp, Artificial
  probe
  misc_feature (1)..(25): SEQ ID NO: 4198; WAN024GIP_at; Start 207; Stop 231
taatgagccaccgagccgtatccat

SEQ ID NO: 247111 - DNA, 25 bp, Artificial
  probe
  misc_feature (1)..(25): SEQ ID NO: 4198; WAN024GIP_at; Start 212; Stop 236
agccaccgagccgtatccattaact

SEQ ID NO: 247112 - DNA, 25 bp, Artificial
  probe
  misc_feature (1)..(25): SEQ ID NO: 4198; WAN024GIP_at; Start 203; Stop 227
ggcttaatgagccaccgagccgtat

SEQ ID NO: 247113 - DNA, 25 bp, Artificial
  probe
  misc_feature (1)..(25): SEQ ID NO: 4198; WAN024GIP_at; Start 205; Stop 229
cttaatgagccaccgagccgtatcc

SEQ ID NO: 247114 - DNA, 25 bp, Artificial
  probe
  misc_feature (1)..(25): SEQ ID NO: 4801; WAN024GIQ_at; Start 88; Stop 112
aatcttccaaaaaggatacggatag

SEQ ID NO: 247115 - DNA, 25 bp, Artificial
  probe
  misc_feature (1)..(25): SEQ ID NO: 4801; WAN024GIQ_at; Start 90; Stop 114
tcttccaaaaaggatacggatagta

SEQ ID NO: 247116 - DNA, 25 bp, Artificial
  probe
  misc_feature (1)..(25): SEQ ID NO: 4801; WAN024GIQ_at; Start 51; Stop 75
ccttatatggatgacttaattagaa

SEQ ID NO: 247117 - DNA, 25 bp, Artificial
  probe
  misc_feature (1)..(25): SEQ ID NO: 4801; WAN024GIQ_at; Start 52; Stop 76
cttatatggatgacttaattagaaa

SEQ ID NO: 247118 - DNA, 25 bp, Artificial
  probe
  misc_feature (1)..(25): SEQ ID NO: 4801; WAN024GIQ_at; Start 34; Stop 58
tagttggtatatttggtccttatat

SEQ ID NO: 247119 - DNA, 25 bp, Artificial
  probe
  misc_feature (1)..(25): SEQ ID NO: 4801; WAN024GIQ_at; Start 56; Stop 80
tatggatgacttaattagaaaaata

SEQ ID NO: 247120 - DNA, 25 bp, Artificial
  probe
  misc_feature (1)..(25): SEQ ID NO: 4801; WAN024GIQ_at; Start 39; Stop 63
ggtatatttggtccttatatggatg

SEQ ID NO: 247121 - DNA, 25 bp, Artificial
  probe
  misc_feature (1)..(25): SEQ ID NO: 4801; WAN024GIQ_at; Start 89; Stop 113
atcttccaaaaaggatacggatagt

SEQ ID NO: 247122 - DNA, 25 bp, Artificial
  probe
  misc_feature (1)..(25): SEQ ID NO: 4801; WAN024GIQ_at; Start 58; Stop 82
tggatgacttaattagaaaaatatt

SEQ ID NO: 247123 - DNA, 25 bp, Artificial
  probe
  misc_feature (1)..(25): SEQ ID NO: 4801; WAN024GIQ_at; Start 94; Stop 118
ccaaaaaggatacggatagtactct

SEQ ID NO: 247124 - DNA, 25 bp, Artificial
  probe
  misc_feature (1)..(25): SEQ ID NO: 4801; WAN024GIQ_at; Start 42; Stop 66
atatttggtccttatatggatgact

SEQ ID NO: 247125 - DNA, 25 bp, Artificial
  probe
  misc_feature (1)..(25): SEQ ID NO: 4801; WAN024GIQ_at; Start 46; Stop 70
ttggtccttatatggatgacttaat

SEQ ID NO: 247126 - DNA, 25 bp, Artificial
  probe
  misc_feature (1)..(25): SEQ ID NO: 4801; WAN024GIQ_at; Start 32; Stop 56
agtagttggtatatttggtccttat

SEQ ID NO: 247127 - DNA, 25 bp, Artificial
  probe
  misc_feature (1)..(25): SEQ ID NO: 4801; WAN024GIQ_at; Start 37; Stop 61
ttggtatatttggtccttatatgga

SEQ ID NO: 247128 - DNA, 25 bp, Artificial
  probe
  misc_feature (1)..(25): SEQ ID NO: 4801; WAN024GIQ_at; Start 47; Stop 71
tggtccttatatggatgacttaatt

SEQ ID NO: 247129 - DNA, 25 bp, Artificial
  probe
  misc_feature (1)..(25): SEQ ID NO: 4801; WAN024GIQ_at; Start 98; Stop 122
aaaggatacggatagtactctctaa

SEQ ID NO: 247130 - DNA, 25 bp, Artificial
  probe
  misc_feature (1)..(25): SEQ ID NO: 4801; WAN024GIQ_at; Start 31; Stop 55
tagtagttggtatatttggtcctta

SEQ ID NO: 247131 - DNA, 25 bp, Artificial
  probe
  misc_feature (1)..(25): SEQ ID NO: 4801; WAN024GIQ_at; Start 20; Stop 44
tattattggtttagtagttggtata

SEQ ID NO: 247132 - DNA, 25 bp, Artificial
  probe
  misc_feature (1)..(25): SEQ ID NO: 4801; WAN024GIQ_at; Start 44; Stop 68
atttggtccttatatggatgactta

SEQ ID NO: 247133 - DNA, 25 bp, Artificial
  probe
  misc_feature (1)..(25): SEQ ID NO: 4801; WAN024GIQ_at; Start 96; Stop 120
aaaaaggatacggatagtactctct

SEQ ID NO: 247134 - DNA, 25 bp, Artificial
  probe
  misc_feature (1)..(25): SEQ ID NO: 4801; WAN024GIQ_at; Start 45; Stop 69
tttggtccttatatggatgacttaa

SEQ ID NO: 247135 - DNA, 25 bp, Artificial
  probe
  misc_feature (1)..(25): SEQ ID NO: 4801; WAN024GIQ_at; Start 93; Stop 117
tccaaaaaggatacggatagtactc

SEQ ID NO: 247136 - DNA, 25 bp, Artificial
  probe
  misc_feature (1)..(25): SEQ ID NO: 4801; WAN024GIQ_at; Start 54; Stop 78
tatatggatgacttaattagaaaaa

SEQ ID NO: 247137 - DNA, 25 bp, Artificial
  probe
  misc_feature (1)..(25): SEQ ID NO: 4801; WAN024GIQ_at; Start 50; Stop 74
tccttatatggatgacttaattaga

SEQ ID NO: 247138 - DNA, 25 bp, Artificial
  probe
  misc_feature (1)..(25): SEQ ID NO: 4801; WAN024GIQ_at; Start 38; Stop 62
tggtatatttggtccttatatggat

SEQ ID NO: 247139 - DNA, 25 bp, Artificial
  probe
  misc_feature (1)..(25): SEQ ID NO: 4801; WAN024GIQ_at; Start 48; Stop 72
ggtccttatatggatgacttaatta

SEQ ID NO: 247140 - DNA, 25 bp, Artificial
  probe
  misc_feature (1)..(25): SEQ ID NO: 4801; WAN024GIQ_at; Start 36; Stop 60
gttggtatatttggtccttatatgg

SEQ ID NO: 247141 - DNA, 25 bp, Artificial
  probe
  misc_feature (1)..(25): SEQ ID NO: 4801; WAN024GIQ_at; Start 62; Stop 86
tgacttaattagaaaaatattttca

SEQ ID NO: 247142 - DNA, 25 bp, Artificial
  probe
  misc_feature (1)..(25): SEQ ID NO: 4801; WAN024GIQ_at; Start 41; Stop 65
tatatttggtccttatatggatgac

SEQ ID NO: 247143 - DNA, 25 bp, Artificial
  probe
  misc_feature (1)..(25): SEQ ID NO: 4801; WAN024GIQ_at; Start 40; Stop 64
gtatatttggtccttatatggatga

SEQ ID NO: 247144 - DNA, 25 bp, Artificial
  probe
  misc_feature (1)..(25): SEQ ID NO: 4801; WAN024GIQ_at; Start 43; Stop 67
tatttggtccttatatggatgactt

SEQ ID NO: 247145 - DNA, 25 bp, Artificial
  probe
  misc_feature (1)..(25): SEQ ID NO: 4801; WAN024GIQ_at; Start 33; Stop 57
gtagttggtatatttggtccttata

SEQ ID NO: 247146 - DNA, 25 bp, Artificial
  probe
  misc_feature (1)..(25): SEQ ID NO: 4801; WAN024GIQ_at; Start 97; Stop 121
aaaaggatacggatagtactctcta

SEQ ID NO: 247147 - DNA, 25 bp, Artificial
  probe
  misc_feature (1)..(25): SEQ ID NO: 4801; WAN024GIQ_at; Start 49; Stop 73
gtccttatatggatgacttaattag

SEQ ID NO: 247148 - DNA, 25 bp, Artificial
  probe
  misc_feature (1)..(25): SEQ ID NO: 1689; WAN024GIR_at; Start 189; Stop 213
agcggttccattcacccctaacatt

SEQ ID NO: 247149 - DNA, 25 bp, Artificial
  probe
  misc_feature (1)..(25): SEQ ID NO: 1689; WAN024GIR_at; Start 51; Stop 75
tcccttggtaagattcacaccaaat

SEQ ID NO: 247150 - DNA, 25 bp, Artificial
  probe
  misc_feature (1)..(25): SEQ ID NO: 1689; WAN024GIR_at; Start 177; Stop 201
acgtagcaaagcagcggttccattc

SEQ ID NO: 247151 - DNA, 25 bp, Artificial
  probe
  misc_feature (1)..(25): SEQ ID NO: 1689; WAN024GIR_at; Start 140; Stop 164
ttttcattacctgtttggcaattgt

SEQ ID NO: 247152 - DNA, 25 bp, Artificial
  probe
  misc_feature (1)..(25): SEQ ID NO: 1689; WAN024GIR_at; Start 43; Stop 67
gccaaccctcccttggtaagattca

SEQ ID NO: 247153 - DNA, 25 bp, Artificial
  probe
  misc_feature (1)..(25): SEQ ID NO: 1689; WAN024GIR_at; Start 114; Stop 138
ctttgttaaagctttattaggcact

SEQ ID NO: 247154 - DNA, 25 bp, Artificial
  probe
  misc_feature (1)..(25): SEQ ID NO: 1689; WAN024GIR_at; Start 54; Stop 78
cttggtaagattcacaccaaatatt

SEQ ID NO: 247155 - DNA, 25 bp, Artificial
  probe
  misc_feature (1)..(25): SEQ ID NO: 1689; WAN024GIR_at; Start 1; Stop 25
atgataccacccaagataggaataa

SEQ ID NO: 247156 - DNA, 25 bp, Artificial
  probe
  misc_feature (1)..(25): SEQ ID NO: 1689; WAN024GIR_at; Start 62; Stop 86
gattcacaccaaatatttttaagac

SEQ ID NO: 247157 - DNA, 25 bp, Artificial
  probe
  misc_feature (1)..(25): SEQ ID NO: 1689; WAN024GIR_at; Start 113; Stop 137
tctttgttaaagctttattaggcac

SEQ ID NO: 247158 - DNA, 25 bp, Artificial
  probe
  misc_feature (1)..(25): SEQ ID NO: 1689; WAN024GIR_at; Start 11; Stop 35
ccaagataggaataaatttccccat

SEQ ID NO: 247159 - DNA, 25 bp, Artificial
  probe
  misc_feature (1)..(25): SEQ ID NO: 1689; WAN024GIR_at; Start 144; Stop 168
cattacctgtttggcaattgttata

SEQ ID NO: 247160 - DNA, 25 bp, Artificial
  probe
  misc_feature (1)..(25): SEQ ID NO: 1689; WAN024GIR_at; Start 3; Stop 27
gataccacccaagataggaataaat

SEQ ID NO: 247161 - DNA, 25 bp, Artificial
  probe
  misc_feature (1)..(25): SEQ ID NO: 1689; WAN024GIR_at; Start 53; Stop 77
ccttggtaagattcacaccaaatat

SEQ ID NO: 247162 - DNA, 25 bp, Artificial
  probe
  misc_feature (1)..(25): SEQ ID NO: 1689; WAN024GIR_at; Start 200; Stop 224
tcacccctaacattacgcctagata

SEQ ID NO: 247163 - DNA, 25 bp, Artificial
  probe
  misc_feature (1)..(25): SEQ ID NO: 1689; WAN024GIR_at; Start 49; Stop 73
cctcccttggtaagattcacaccaa

SEQ ID NO: 247164 - DNA, 25 bp, Artificial
  probe
  misc_feature (1)..(25): SEQ ID NO: 1689; WAN024GIR_at; Start 201; Stop 225
cacccctaacattacgcctagataa

SEQ ID NO: 247165 - DNA, 25 bp, Artificial
  probe
  misc_feature (1)..(25): SEQ ID NO: 1689; WAN024GIR_at; Start 12; Stop 36
caagataggaataaatttccccatt

SEQ ID NO: 247166 - DNA, 25 bp, Artificial
  probe
  misc_feature (1)..(25): SEQ ID NO: 1689; WAN024GIR_at; Start 109; Stop 133
agcgtctttgttaaagctttattag

SEQ ID NO: 247167 - DNA, 25 bp, Artificial
  probe
  misc_feature (1)..(25): SEQ ID NO: 1689; WAN024GIR_at; Start 199; Stop 223
ttcacccctaacattacgcctagat

SEQ ID NO: 247168 - DNA, 25 bp, Artificial
  probe
  misc_feature (1)..(25): SEQ ID NO: 1689; WAN024GIR_at; Start 2; Stop 26
tgataccacccaagataggaataaa

SEQ ID NO: 247169 - DNA, 25 bp, Artificial
  probe
  misc_feature (1)..(25): SEQ ID NO: 1689; WAN024GIR_at; Start 33; Stop 57
cattcctttggccaaccctcccttg

SEQ ID NO: 247170 - DNA, 25 bp, Artificial
  probe
  misc_feature (1)..(25): SEQ ID NO: 1689; WAN024GIR_at; Start 185; Stop 209
aagcagcggttccattcacccctaa

SEQ ID NO: 247171 - DNA, 25 bp, Artificial
  probe
  misc_feature (1)..(25): SEQ ID NO: 1689; WAN024GIR_at; Start 56; Stop 80
tggtaagattcacaccaaatatttt

SEQ ID NO: 247172 - DNA, 25 bp, Artificial
  probe
  misc_feature (1)..(25): SEQ ID NO: 1689; WAN024GIR_at; Start 142; Stop 166
ttcattacctgtttggcaattgtta

SEQ ID NO: 247173 - DNA, 25 bp, Artificial
  probe
  misc_feature (1)..(25): SEQ ID NO: 1689; WAN024GIR_at; Start 58; Stop 82
gtaagattcacaccaaatattttta

SEQ ID NO: 247174 - DNA, 25 bp, Artificial
  probe
  misc_feature (1)..(25): SEQ ID NO: 1689; WAN024GIR_at; Start 178; Stop 202
cgtagcaaagcagcggttccattca

SEQ ID NO: 247175 - DNA, 25 bp, Artificial
  probe
  misc_feature (1)..(25): SEQ ID NO: 1689; WAN024GIR_at; Start 184; Stop 208
aaagcagcggttccattcaccccta

SEQ ID NO: 247176 - DNA, 25 bp, Artificial
  probe
  misc_feature (1)..(25): SEQ ID NO: 1689; WAN024GIR_at; Start 52; Stop 76
cccttggtaagattcacaccaaata

SEQ ID NO: 247177 - DNA, 25 bp, Artificial
  probe
  misc_feature (1)..(25): SEQ ID NO: 1689; WAN024GIR_at; Start 106; Stop 130
caaagcgtctttgttaaagctttat

SEQ ID NO: 247178 - DNA, 25 bp, Artificial
  probe
  misc_feature (1)..(25): SEQ ID NO: 1689; WAN024GIR_at; Start 4; Stop 28
ataccacccaagataggaataaatt

SEQ ID NO: 247179 - DNA, 25 bp, Artificial
  probe
  misc_feature (1)..(25): SEQ ID NO: 1689; WAN024GIR_at; Start 190; Stop 214
gcggttccattcacccctaacatta

SEQ ID NO: 247180 - DNA, 25 bp, Artificial
  probe
  misc_feature (1)..(25): SEQ ID NO: 1689; WAN024GIR_at; Start 176; Stop 200
cacgtagcaaagcagcggttccatt

SEQ ID NO: 247181 - DNA, 25 bp, Artificial
  probe
  misc_feature (1)..(25): SEQ ID NO: 1689; WAN024GIR_at; Start 198; Stop 222
attcacccctaacattacgcctaga

SEQ ID NO: 247182 - DNA, 25 bp, Artificial
  probe
  misc_feature (1)..(25): SEQ ID NO: 1681; WAN024GIS_at; Start 32; Stop 56
tgtatatggctgaacaagacttagc

SEQ ID NO: 247183 - DNA, 25 bp, Artificial
  probe
  misc_feature (1)..(25): SEQ ID NO: 1681; WAN024GIS_at; Start 596; Stop 620
ttggtgtgaatcttaccaagggagg

SEQ ID NO: 247184 - DNA, 25 bp, Artificial
  probe
  misc_feature (1)..(25): SEQ ID NO: 1681; WAN024GIS_at; Start 252; Stop 276
agcgagtgggacttctgttttggca

SEQ ID NO: 247185 - DNA, 25 bp, Artificial
  probe
  misc_feature (1)..(25): SEQ ID NO: 1681; WAN024GIS_at; Start 589; Stop 613
aaaatatttggtgtgaatcttacca

SEQ ID NO: 247186 - DNA, 25 bp, Artificial
  probe
  misc_feature (1)..(25): SEQ ID NO: 1681; WAN024GIS_at; Start 430; Stop 454
aataccctcttgctttatctaggcg

SEQ ID NO: 247187 - DNA, 25 bp, Artificial
  probe
  misc_feature (1)..(25): SEQ ID NO: 1681; WAN024GIS_at; Start 372; Stop 396
tatttatggttatgaggatctttgg

SEQ ID NO: 247188 - DNA, 25 bp, Artificial
  probe
  misc_feature (1)..(25): SEQ ID NO: 1681; WAN024GIS_at; Start 536; Stop 560
ctaataaagctttaacaaagacgct

SEQ ID NO: 247189 - DNA, 25 bp, Artificial
  probe
  misc_feature (1)..(25): SEQ ID NO: 1681; WAN024GIS_at; Start 23; Stop 47
taaggagtttgtatatggctgaaca

SEQ ID NO: 247190 - DNA, 25 bp, Artificial
  probe
  misc_feature (1)..(25): SEQ ID NO: 1681; WAN024GIS_at; Start 501; Stop 525
tataacaattgccaaacaggtaatg

SEQ ID NO: 247191 - DNA, 25 bp, Artificial
  probe
  misc_feature (1)..(25): SEQ ID NO: 1681; WAN024GIS_at; Start 43; Stop 67
gaacaagacttagctatgcaagtat

SEQ ID NO: 247192 - DNA, 25 bp, Artificial
  probe
  misc_feature (1)..(25): SEQ ID NO: 1681; WAN024GIS_at; Start 675; Stop 699
tggtttaacctttgcaactatgaaa

SEQ ID NO: 247193 - DNA, 25 bp, Artificial
  probe
  misc_feature (1)..(25): SEQ ID NO: 1681; WAN024GIS_at; Start 779; Stop 803
caatccgaaaagaggctgaaatcat

SEQ ID NO: 247194 - DNA, 25 bp, Artificial
  probe
  misc_feature (1)..(25): SEQ ID NO: 1681; WAN024GIS_at; Start 751; Stop 775
gaagttcaatatcaagaagatgttg

SEQ ID NO: 247195 - DNA, 25 bp, Artificial
  probe
  misc_feature (1)..(25): SEQ ID NO: 1681; WAN024GIS_at; Start 775; Stop 799
gaaacaatccgaaaagaggctgaaa

SEQ ID NO: 247196 - DNA, 25 bp, Artificial
  probe
  misc_feature (1)..(25): SEQ ID NO: 1681; WAN024GIS_at; Start 505; Stop 529
acaattgccaaacaggtaatgaaaa

SEQ ID NO: 247197 - DNA, 25 bp, Artificial
  probe
  misc_feature (1)..(25): SEQ ID NO: 1681; WAN024GIS_at; Start 312; Stop 336
tccagctgatgtggctcaattttat

SEQ ID NO: 247198 - DNA, 25 bp, Artificial
  probe
  misc_feature (1)..(25): SEQ ID NO: 1681; WAN024GIS_at; Start 120; Stop 144
agtggataagttttccaaagaattg

SEQ ID NO: 247199 - DNA, 25 bp, Artificial
  probe
  misc_feature (1)..(25): SEQ ID NO: 1681; WAN024GIS_at; Start 247; Stop 271
ttattagcgagtgggacttctgttt

SEQ ID NO: 247200 - DNA, 25 bp, Artificial
  probe
  misc_feature (1)..(25): SEQ ID NO: 1681; WAN024GIS_at; Start 414; Stop 438
gagtgaagatgctcaaaataccctc

SEQ ID NO: 247201 - DNA, 25 bp, Artificial
  probe
  misc_feature (1)..(25): SEQ ID NO: 1681; WAN024GIS_at; Start 300; Stop 324
ggcaattaccattccagctgatgtg

SEQ ID NO: 247202 - DNA, 25 bp, Artificial
  probe
  misc_feature (1)..(25): SEQ ID NO: 1681; WAN024GIS_at; Start 671; Stop 695
caggtggtttaacctttgcaactat

SEQ ID NO: 247203 - DNA, 25 bp, Artificial
  probe
  misc_feature (1)..(25): SEQ ID NO: 1681; WAN024GIS_at; Start 306; Stop 330
taccattccagctgatgtggctcaa

SEQ ID NO: 247204 - DNA, 25 bp, Artificial
  probe
  misc_feature (1)..(25): SEQ ID NO: 1681; WAN024GIS_at; Start 531; Stop 555
agtgcctaataaagctttaacaaag

SEQ ID NO: 247205 - DNA, 25 bp, Artificial
  probe
  misc_feature (1)..(25): SEQ ID NO: 1681; WAN024GIS_at; Start 284; Stop 308
ctggagggcttgctatggcaattac

SEQ ID NO: 247206 - DNA, 25 bp, Artificial
  probe
  misc_feature (1)..(25): SEQ ID NO: 1681; WAN024GIS_at; Start 406; Stop 430
gaggagttgagtgaagatgctcaaa

SEQ ID NO: 247207 - DNA, 25 bp, Artificial
  probe
  misc_feature (1)..(25): SEQ ID NO: 1681; WAN024GIS_at; Start 645; Stop 669
tattcctatcttgggtggtatcatt

SEQ ID NO: 247208 - DNA, 25 bp, Artificial
  probe
  misc_feature (1)..(25): SEQ ID NO: 1681; WAN024GIS_at; Start 258; Stop 282
tgggacttctgttttggcaggatta

SEQ ID NO: 247209 - DNA, 25 bp, Artificial
  probe
  misc_feature (1)..(25): SEQ ID NO: 1681; WAN024GIS_at; Start 771; Stop 795
tgttgaaacaatccgaaaagaggct

SEQ ID NO: 247210 - DNA, 25 bp, Artificial
  probe
  misc_feature (1)..(25): SEQ ID NO: 1681; WAN024GIS_at; Start 2; Stop 26
tgataaggtgcaaaaaagaaataag

SEQ ID NO: 247211 - DNA, 25 bp, Artificial
  probe
  misc_feature (1)..(25): SEQ ID NO: 1681; WAN024GIS_at; Start 39; Stop 63
ggctgaacaagacttagctatgcaa

SEQ ID NO: 247212 - DNA, 25 bp, Artificial
  probe
  misc_feature (1)..(25): SEQ ID NO: 1681; WAN024GIS_at; Start 421; Stop 445
gatgctcaaaataccctcttgcttt

SEQ ID NO: 247213 - DNA, 25 bp, Artificial
  probe
  misc_feature (1)..(25): SEQ ID NO: 1681; WAN024GIS_at; Start 287; Stop 311
gagggcttgctatggcaattaccat

SEQ ID NO: 247214 - DNA, 25 bp, Artificial
  probe
  misc_feature (1)..(25): SEQ ID NO: 1681; WAN024GIS_at; Start 349; Stop 373
aaattggctcaagaattaggttata

SEQ ID NO: 247215 - DNA, 25 bp, Artificial
  probe
  misc_feature (1)..(25): SEQ ID NO: 1681; WAN024GIS_at; Start 742; Stop 766
aactatagtgaagttcaatatcaag

SEQ ID NO: 247216 - DNA, 25 bp, Artificial
  probe
  misc_feature (1)..(25): SEQ ID NO: 5573; WAN024GIT_at; Start 43; Stop 67
gtaataaaccttggcaacagacaag

SEQ ID NO: 247217 - DNA, 25 bp, Artificial
  probe
  misc_feature (1)..(25): SEQ ID NO: 5573; WAN024GIT_at; Start 33; Stop 57
tcaaaatggtgtaataaaccttggc

SEQ ID NO: 247218 - DNA, 25 bp, Artificial
  probe
  misc_feature (1)..(25): SEQ ID NO: 5573; WAN024GIT_at; Start 64; Stop 88
caagtcacccagcatctgaacatct

SEQ ID NO: 247219 - DNA, 25 bp, Artificial
  probe
  misc_feature (1)..(25): SEQ ID NO: 5573; WAN024GIT_at; Start 23; Stop 47
gcaaggttactcaaaatggtgtaat

SEQ ID NO: 247220 - DNA, 25 bp, Artificial
  probe
  misc_feature (1)..(25): SEQ ID NO: 5573; WAN024GIT_at; Start 17; Stop 41
tccgaagcaaggttactcaaaatgg

SEQ ID NO: 247221 - DNA, 25 bp, Artificial
  probe
  misc_feature (1)..(25): SEQ ID NO: 5573; WAN024GIT_at; Start 148; Stop 172
ttcacgcttgatttccatgcccaca

SEQ ID NO: 247222 - DNA, 25 bp, Artificial
  probe
  misc_feature (1)..(25): SEQ ID NO: 5573; WAN024GIT_at; Start 51; Stop 75
ccttggcaacagacaagtcacccag

SEQ ID NO: 247223 - DNA, 25 bp, Artificial
  probe
  misc_feature (1)..(25): SEQ ID NO: 5573; WAN024GIT_at; Start 62; Stop 86
gacaagtcacccagcatctgaacat

SEQ ID NO: 247224 - DNA, 25 bp, Artificial
  probe
  misc_feature (1)..(25): SEQ ID NO: 5573; WAN024GIT_at; Start 216; Stop 240
tttgaaccaaaagctaggccagcag

SEQ ID NO: 247225 - DNA, 25 bp, Artificial
  probe
  misc_feature (1)..(25): SEQ ID NO: 5573; WAN024GIT_at; Start 2; Stop 26
tgggctttttggttatccgaagcaa

SEQ ID NO: 247226 - DNA, 25 bp, Artificial
  probe
  misc_feature (1)..(25): SEQ ID NO: 5573; WAN024GIT_at; Start 134; Stop 158
aaaatctcattgacttcacgcttga

SEQ ID NO: 247227 - DNA, 25 bp, Artificial
  probe
  misc_feature (1)..(25): SEQ ID NO: 5573; WAN024GIT_at; Start 199; Stop 223
gatattcctttctctactttgaacc

SEQ ID NO: 247228 - DNA, 25 bp, Artificial
  probe
  misc_feature (1)..(25): SEQ ID NO: 5573; WAN024GIT_at; Start 121; Stop 145
gactttcttttgcaaaatctcattg

SEQ ID NO: 247229 - DNA, 25 bp, Artificial
  probe
  misc_feature (1)..(25): SEQ ID NO: 5573; WAN024GIT_at; Start 102; Stop 126
cttggacacgtggatcacggacttt

SEQ ID NO: 247230 - DNA, 25 bp, Artificial
  probe
  misc_feature (1)..(25): SEQ ID NO: 5573; WAN024GIT_at; Start 109; Stop 133
acgtggatcacggactttcttttgc

SEQ ID NO: 247231 - DNA, 25 bp, Artificial
  probe
  misc_feature (1)..(25): SEQ ID NO: 5573; WAN024GIT_at; Start 90; Stop 114
tgatggtcacaccttggacacgtgg

SEQ ID NO: 247232 - DNA, 25 bp, Artificial
  probe
  misc_feature (1)..(25): SEQ ID NO: 5573; WAN024GIT_at; Start 96; Stop 120
tcacaccttggacacgtggatcacg

SEQ ID NO: 247233 - DNA, 25 bp, Artificial
  probe
  misc_feature (1)..(25): SEQ ID NO: 5573; WAN024GIT_at; Start 113; Stop 137
ggatcacggactttcttttgcaaaa

SEQ ID NO: 247234 - DNA, 25 bp, Artificial
  probe
  misc_feature (1)..(25): SEQ ID NO: 5573; WAN024GIT_at; Start 213; Stop 237
tactttgaaccaaaagctaggccag

SEQ ID NO: 247235 - DNA, 25 bp, Artificial
  probe
  misc_feature (1)..(25): SEQ ID NO: 5573; WAN024GIT_at; Start 47; Stop 71
taaaccttggcaacagacaagtcac

SEQ ID NO: 247236 - DNA, 25 bp, Artificial
  probe
  misc_feature (1)..(25): SEQ ID NO: 5573; WAN024GIT_at; Start 98; Stop 122
acaccttggacacgtggatcacgga

SEQ ID NO: 247237 - DNA, 25 bp, Artificial
  probe
  misc_feature (1)..(25): SEQ ID NO: 5573; WAN024GIT_at; Start 140; Stop 164
tcattgacttcacgcttgatttcca

SEQ ID NO: 247238 - DNA, 25 bp, Artificial
  probe
  misc_feature (1)..(25): SEQ ID NO: 5573; WAN024GIT_at; Start 12; Stop 36
ggttatccgaagcaaggttactcaa

SEQ ID NO: 247239 - DNA, 25 bp, Artificial
  probe
  misc_feature (1)..(25): SEQ ID NO: 5573; WAN024GIT_at; Start 153; Stop 177
gcttgatttccatgcccacacgatc

SEQ ID NO: 247240 - DNA, 25 bp, Artificial
  probe
  misc_feature (1)..(25): SEQ ID NO: 5573; WAN024GIT_at; Start 144; Stop 168
tgacttcacgcttgatttccatgcc

SEQ ID NO: 247241 - DNA, 25 bp, Artificial
  probe
  misc_feature (1)..(25): SEQ ID NO: 5573; WAN024GIT_at; Start 10; Stop 34
ttggttatccgaagcaaggttactc

SEQ ID NO: 247242 - DNA, 25 bp, Artificial
  probe
  misc_feature (1)..(25): SEQ ID NO: 5573; WAN024GIT_at; Start 195; Stop 219
ccatgatattcctttctctactttg

SEQ ID NO: 247243 - DNA, 25 bp, Artificial
  probe
  misc_feature (1)..(25): SEQ ID NO: 5573; WAN024GIT_at; Start 20; Stop 44
gaagcaaggttactcaaaatggtgt

SEQ ID NO: 247244 - DNA, 25 bp, Artificial
  probe
  misc_feature (1)..(25): SEQ ID NO: 5573; WAN024GIT_at; Start 56; Stop 80
gcaacagacaagtcacccagcatct

SEQ ID NO: 247245 - DNA, 25 bp, Artificial
  probe
  misc_feature (1)..(25): SEQ ID NO: 5573; WAN024GIT_at; Start 54; Stop 78
tggcaacagacaagtcacccagcat

SEQ ID NO: 247246 - DNA, 25 bp, Artificial
  probe
  misc_feature (1)..(25): SEQ ID NO: 5573; WAN024GIT_at; Start 40; Stop 64
ggtgtaataaaccttggcaacagac

SEQ ID NO: 247247 - DNA, 25 bp, Artificial
  probe
  misc_feature (1)..(25): SEQ ID NO: 5573; WAN024GIT_at; Start 131; Stop 155
tgcaaaatctcattgacttcacgct

SEQ ID NO: 247248 - DNA, 25 bp, Artificial
  probe
  misc_feature (1)..(25): SEQ ID NO: 5573; WAN024GIT_at; Start 117; Stop 141
cacggactttcttttgcaaaatctc

SEQ ID NO: 247249 - DNA, 25 bp, Artificial
  probe
  misc_feature (1)..(25): SEQ ID NO: 5573; WAN024GIT_at; Start 93; Stop 117
tggtcacaccttggacacgtggatc

SEQ ID NO: 247250 - DNA, 25 bp, Artificial
  probe
  misc_feature (1)..(25): SEQ ID NO: 5645; WAN024GIU_at; Start 169; Stop 193
gccaaggtttattacaccattttga

SEQ ID NO: 247251 - DNA, 25 bp, Artificial
  probe
  misc_feature (1)..(25): SEQ ID NO: 5645; WAN024GIU_at; Start 222; Stop 246
ccaaatcgggcttgaaaaagcaact

SEQ ID NO: 247252 - DNA, 25 bp, Artificial
  probe
  misc_feature (1)..(25): SEQ ID NO: 5645; WAN024GIU_at; Start 163; Stop 187
tctgttgccaaggtttattacacca

SEQ ID NO: 247253 - DNA, 25 bp, Artificial
  probe
  misc_feature (1)..(25): SEQ ID NO: 5645; WAN024GIU_at; Start 201; Stop 225
tgcttcggataaccaaaaagcccaa

SEQ ID NO: 247254 - DNA, 25 bp, Artificial
  probe
  misc_feature (1)..(25): SEQ ID NO: 5645; WAN024GIU_at; Start 7; Stop 31
caaagtagagaaaggaatatcatgg

SEQ ID NO: 247255 - DNA, 25 bp, Artificial
  probe
  misc_feature (1)..(25): SEQ ID NO: 5645; WAN024GIU_at; Start 106; Stop 130
cgtgatccacgtgtccaaggtgtga

SEQ ID NO: 247256 - DNA, 25 bp, Artificial
  probe
  misc_feature (1)..(25): SEQ ID NO: 5645; WAN024GIU_at; Start 54; Stop 78
tgtgggcatggaaatcaagcgtgaa

SEQ ID NO: 247257 - DNA, 25 bp, Artificial
  probe
  misc_feature (1)..(25): SEQ ID NO: 5645; WAN024GIU_at; Start 307; Stop 331
ttcgtcaaagacgagtccatcgagt

SEQ ID NO: 247258 - DNA, 25 bp, Artificial
  probe
  misc_feature (1)..(25): SEQ ID NO: 5645; WAN024GIU_at; Start 337; Stop 361
aacaagattgacgagatgctacgca

SEQ ID NO: 247259 - DNA, 25 bp, Artificial
  probe
  misc_feature (1)..(25): SEQ ID NO: 5645; WAN024GIU_at; Start 298; Stop 322
gatttgaccttcgtcaaagacgagt

SEQ ID NO: 247260 - DNA, 25 bp, Artificial
  probe
  misc_feature (1)..(25): SEQ ID NO: 5645; WAN024GIU_at; Start 259; Stop 283
cgtgaacttggtcgcaatttgaaat

SEQ ID NO: 247261 - DNA, 25 bp, Artificial
  probe
  misc_feature (1)..(25): SEQ ID NO: 5645; WAN024GIU_at; Start 112; Stop 136
ccacgtgtccaaggtgtgaccatca

SEQ ID NO: 247262 - DNA, 25 bp, Artificial
  probe
  misc_feature (1)..(25): SEQ ID NO: 5645; WAN024GIU_at; Start 238; Stop 262
aaagcaactggtaccatcaaacgtg

SEQ ID NO: 247263 - DNA, 25 bp, Artificial
  probe
  misc_feature (1)..(25): SEQ ID NO: 5645; WAN024GIU_at; Start 358; Stop 382
cgcaatctggataagaactaactaa

SEQ ID NO: 247264 - DNA, 25 bp, Artificial
  probe
  misc_feature (1)..(25): SEQ ID NO: 5645; WAN024GIU_at; Start 311; Stop 335
tcaaagacgagtccatcgagtatgg

SEQ ID NO: 247265 - DNA, 25 bp, Artificial
  probe
  misc_feature (1)..(25): SEQ ID NO: 5645; WAN024GIU_at; Start 64; Stop 88
gaaatcaagcgtgaagtcaatgaga

SEQ ID NO: 247266 - DNA, 25 bp, Artificial
  probe
  misc_feature (1)..(25): SEQ ID NO: 5645; WAN024GIU_at; Start 49; Stop 73
gatcgtgtgggcatggaaatcaagc

SEQ ID NO: 247267 - DNA, 25 bp, Artificial
  probe
  misc_feature (1)..(25): SEQ ID NO: 5645; WAN024GIU_at; Start 331; Stop 355
tatggaaacaagattgacgagatgc

SEQ ID NO: 247268 - DNA, 25 bp, Artificial
  probe
  misc_feature (1)..(25): SEQ ID NO: 5645; WAN024GIU_at; Start 183; Stop 207
caccattttgagtaaccttgcttcg

SEQ ID NO: 247269 - DNA, 25 bp, Artificial
  probe
  misc_feature (1)..(25): SEQ ID NO: 5645; WAN024GIU_at; Start 351; Stop 375
gatgctacgcaatctggataagaac

SEQ ID NO: 247270 - DNA, 25 bp, Artificial
  probe
  misc_feature (1)..(25): SEQ ID NO: 5645; WAN024GIU_at; Start 245; Stop 269
ctggtaccatcaaacgtgaacttgg

SEQ ID NO: 247271 - DNA, 25 bp, Artificial
  probe
  misc_feature (1)..(25): SEQ ID NO: 5645; WAN024GIU_at; Start 289; Stop 313
aaaatcccagatttgaccttcgtca

SEQ ID NO: 247272 - DNA, 25 bp, Artificial
  probe
  misc_feature (1)..(25): SEQ ID NO: 5645; WAN024GIU_at; Start 224; Stop 248
aaatcgggcttgaaaaagcaactgg

SEQ ID NO: 247273 - DNA, 25 bp, Artificial
  probe
  misc_feature (1)..(25): SEQ ID NO: 5645; WAN024GIU_at; Start 153; Stop 177
gggtgacttgtctgttgccaaggtt

SEQ ID NO: 247274 - DNA, 25 bp, Artificial
  probe
  misc_feature (1)..(25): SEQ ID NO: 5645; WAN024GIU_at; Start 251; Stop 275
ccatcaaacgtgaacttggtcgcaa

SEQ ID NO: 247275 - DNA, 25 bp, Artificial
  probe
  misc_feature (1)..(25): SEQ ID NO: 5645; WAN024GIU_at; Start 72; Stop 96
gcgtgaagtcaatgagattttgcaa

SEQ ID NO: 247276 - DNA, 25 bp, Artificial
  probe
  misc_feature (1)..(25): SEQ ID NO: 5645; WAN024GIU_at; Start 344; Stop 368
ttgacgagatgctacgcaatctgga

SEQ ID NO: 247277 - DNA, 25 bp, Artificial
  probe
  misc_feature (1)..(25): SEQ ID NO: 5645; WAN024GIU_at; Start 192; Stop 216
gagtaaccttgcttcggataaccaa

SEQ ID NO: 247278 - DNA, 25 bp, Artificial
  probe
  misc_feature (1)..(25): SEQ ID NO: 5645; WAN024GIU_at; Start 3; Stop 27
ggttcaaagtagagaaaggaatatc

SEQ ID NO: 247279 - DNA, 25 bp, Artificial
  probe
  misc_feature (1)..(25): SEQ ID NO: 5645; WAN024GIU_at; Start 80; Stop 104
tcaatgagattttgcaaaagaaagt

SEQ ID NO: 247280 - DNA, 25 bp, Artificial
  probe
  misc_feature (1)..(25): SEQ ID NO: 5645; WAN024GIU_at; Start 324; Stop 348
catcgagtatggaaacaagattgac

SEQ ID NO: 247281 - DNA, 25 bp, Artificial
  probe
  misc_feature (1)..(25): SEQ ID NO: 5645; WAN024GIU_at; Start 274; Stop 298
aatttgaaattgtacaaaatcccag

SEQ ID NO: 247282 - DNA, 25 bp, Artificial
  probe
  misc_feature (1)..(25): SEQ ID NO: 5645; WAN024GIU_at; Start 316; Stop 340
gacgagtccatcgagtatggaaaca

SEQ ID NO: 247283 - DNA, 25 bp, Artificial
  probe
  misc_feature (1)..(25): SEQ ID NO: 5645; WAN024GIU_at; Start 59; Stop 83
gcatggaaatcaagcgtgaagtcaa

SEQ ID NO: 247284 - DNA, 25 bp, Artificial
  probe
  misc_feature (1)..(25): SEQ ID NO: 5812; WAN024GIV_at; Start 59; Stop 83
tctacgaccaagacaacaccgtcaa

SEQ ID NO: 247285 - DNA, 25 bp, Artificial
  probe
  misc_feature (1)..(25): SEQ ID NO: 5812; WAN024GIV_at; Start 167; Stop 191
gcaacggcagtatttttagcaagga

SEQ ID NO: 247286 - DNA, 25 bp, Artificial
  probe
  misc_feature (1)..(25): SEQ ID NO: 5812; WAN024GIV_at; Start 38; Stop 62
ggcatggttccttcataggcatcta

SEQ ID NO: 247287 - DNA, 25 bp, Artificial
  probe
  misc_feature (1)..(25): SEQ ID NO: 5812; WAN024GIV_at; Start 152; Stop 176
cgagttccgttgtaagcaacggcag

SEQ ID NO: 247288 - DNA, 25 bp, Artificial
  probe
  misc_feature (1)..(25): SEQ ID NO: 5812; WAN024GIV_at; Start 2; Stop 26
tgttccaaggcttttttcaatacga

SEQ ID NO: 247289 - DNA, 25 bp, Artificial
  probe
  misc_feature (1)..(25): SEQ ID NO: 5812; WAN024GIV_at; Start 171; Stop 195
cggcagtatttttagcaaggatggt

SEQ ID NO: 247290 - DNA, 25 bp, Artificial
  probe
  misc_feature (1)..(25): SEQ ID NO: 5812; WAN024GIV_at; Start 144; Stop 168
tgttgatacgagttccgttgtaagc

SEQ ID NO: 247291 - DNA, 25 bp, Artificial
  probe
  misc_feature (1)..(25): SEQ ID NO: 5812; WAN024GIV_at; Start 89; Stop 113
ttcatgatacgctcaacttctccac

SEQ ID NO: 247292 - DNA, 25 bp, Artificial
  probe
  misc_feature (1)..(25): SEQ ID NO: 5812; WAN024GIV_at; Start 24; Stop 48
cgaaacgagtttgtggcatggttcc

SEQ ID NO: 247293 - DNA, 25 bp, Artificial
  probe
  misc_feature (1)..(25): SEQ ID NO: 5812; WAN024GIV_at; Start 50; Stop 74
tcataggcatctacgaccaagacaa

SEQ ID NO: 247294 - DNA, 25 bp, Artificial
  probe
  misc_feature (1)..(25): SEQ ID NO: 5812; WAN024GIV_at; Start 30; Stop 54
gagtttgtggcatggttccttcata

SEQ ID NO: 247295 - DNA, 25 bp, Artificial
  probe
  misc_feature (1)..(25): SEQ ID NO: 5812; WAN024GIV_at; Start 164; Stop 188
taagcaacggcagtatttttagcaa

SEQ ID NO: 247296 - DNA, 25 bp, Artificial
  probe
  misc_feature (1)..(25): SEQ ID NO: 5812; WAN024GIV_at; Start 40; Stop 64
catggttccttcataggcatctacg

SEQ ID NO: 247297 - DNA, 25 bp, Artificial
  probe
  misc_feature (1)..(25): SEQ ID NO: 5812; WAN024GIV_at; Start 16; Stop 40
tttcaatacgaaacgagtttgtggc

SEQ ID NO: 247298 - DNA, 25 bp, Artificial
  probe
  misc_feature (1)..(25): SEQ ID NO: 5812; WAN024GIV_at; Start 125; Stop 149
tgtcctggtgtgtccataatgttga

SEQ ID NO: 247299 - DNA, 25 bp, Artificial
  probe
  misc_feature (1)..(25): SEQ ID NO: 5812; WAN024GIV_at; Start 128; Stop 152
cctggtgtgtccataatgttgatac

SEQ ID NO: 247300 - DNA, 25 bp, Artificial
  probe
  misc_feature (1)..(25): SEQ ID NO: 5812; WAN024GIV_at; Start 148; Stop 172
gatacgagttccgttgtaagcaacg

SEQ ID NO: 247301 - DNA, 25 bp, Artificial
  probe
  misc_feature (1)..(25): SEQ ID NO: 5812; WAN024GIV_at; Start 135; Stop 159
tgtccataatgttgatacgagttcc

SEQ ID NO: 247302 - DNA, 25 bp, Artificial
  probe
  misc_feature (1)..(25): SEQ ID NO: 5812; WAN024GIV_at; Start 121; Stop 145
cgcgtgtcctggtgtgtccataatg

SEQ ID NO: 247303 - DNA, 25 bp, Artificial
  probe
  misc_feature (1)..(25): SEQ ID NO: 5812; WAN024GIV_at; Start 85; Stop 109
cattttcatgatacgctcaacttct

SEQ ID NO: 247304 - DNA, 25 bp, Artificial
  probe
  misc_feature (1)..(25): SEQ ID NO: 5812; WAN024GIV_at; Start 28; Stop 52
acgagtttgtggcatggttccttca

SEQ ID NO: 247305 - DNA, 25 bp, Artificial
  probe
  misc_feature (1)..(25): SEQ ID NO: 5812; WAN024GIV_at; Start 43; Stop 67
ggttccttcataggcatctacgacc

SEQ ID NO: 247306 - DNA, 25 bp, Artificial
  probe
  misc_feature (1)..(25): SEQ ID NO: 5812; WAN024GIV_at; Start 81; Stop 105
caaccattttcatgatacgctcaac

SEQ ID NO: 247307 - DNA, 25 bp, Artificial
  probe
  misc_feature (1)..(25): SEQ ID NO: 5812; WAN024GIV_at; Start 56; Stop 80
gcatctacgaccaagacaacaccgt

SEQ ID NO: 247308 - DNA, 25 bp, Artificial
  probe
  misc_feature (1)..(25): SEQ ID NO: 5812; WAN024GIV_at; Start 159; Stop 183
cgttgtaagcaacggcagtattttt

SEQ ID NO: 247309 - DNA, 25 bp, Artificial
  probe
  misc_feature (1)..(25): SEQ ID NO: 5812; WAN024GIV_at; Start 53; Stop 77
taggcatctacgaccaagacaacac

SEQ ID NO: 247310 - DNA, 25 bp, Artificial
  probe
  misc_feature (1)..(25): SEQ ID NO: 5812; WAN024GIV_at; Start 34; Stop 58
ttgtggcatggttccttcataggca

SEQ ID NO: 247311 - DNA, 25 bp, Artificial
  probe
  misc_feature (1)..(25): SEQ ID NO: 5812; WAN024GIV_at; Start 119; Stop 143
tccgcgtgtcctggtgtgtccataa

SEQ ID NO: 247312 - DNA, 25 bp, Artificial
  probe
  misc_feature (1)..(25): SEQ ID NO: 5812; WAN024GIV_at; Start 116; Stop 140
aagtccgcgtgtcctggtgtgtcca

SEQ ID NO: 247313 - DNA, 25 bp, Artificial
  probe
  misc_feature (1)..(25): SEQ ID NO: 5812; WAN024GIV_at; Start 70; Stop 94
gacaacaccgtcaaccattttcatg

SEQ ID NO: 247314 - DNA, 25 bp, Artificial
  probe
  misc_feature (1)..(25): SEQ ID NO: 5812; WAN024GIV_at; Start 46; Stop 70
tccttcataggcatctacgaccaag

SEQ ID NO: 247315 - DNA, 25 bp, Artificial
  probe
  misc_feature (1)..(25): SEQ ID NO: 5812; WAN024GIV_at; Start 64; Stop 88
gaccaagacaacaccgtcaaccatt

SEQ ID NO: 247316 - DNA, 25 bp, Artificial
  probe
  misc_feature (1)..(25): SEQ ID NO: 5812; WAN024GIV_at; Start 138; Stop 162
ccataatgttgatacgagttccgtt

SEQ ID NO: 247317 - DNA, 25 bp, Artificial
  probe
  misc_feature (1)..(25): SEQ ID NO: 5812; WAN024GIV_at; Start 75; Stop 99
caccgtcaaccattttcatgatacg

SEQ ID NO: 247318 - DNA, 25 bp, Artificial
  probe
  misc_feature (1)..(25): SEQ ID NO: 5671; WAN024GIW_at; Start 30; Stop 54
cagatttgagttccccagctttaag

SEQ ID NO: 247319 - DNA, 25 bp, Artificial
  probe
  misc_feature (1)..(25): SEQ ID NO: 5671; WAN024GIW_at; Start 191; Stop 215
ggtgcttcgttcaaacctgtgatag

SEQ ID NO: 247320 - DNA, 25 bp, Artificial
  probe
  misc_feature (1)..(25): SEQ ID NO: 5671; WAN024GIW_at; Start 24; Stop 48
cattaacagatttgagttccccagc

SEQ ID NO: 247321 - DNA, 25 bp, Artificial
  probe
  misc_feature (1)..(25): SEQ ID NO: 5671; WAN024GIW_at; Start 170; Stop 194
gcaaagtggtcacccgccatcggtg

SEQ ID NO: 247322 - DNA, 25 bp, Artificial
  probe
  misc_feature (1)..(25): SEQ ID NO: 5671; WAN024GIW_at; Start 156; Stop 180
catcctcgtaaacggcaaagtggtc

SEQ ID NO: 247323 - DNA, 25 bp, Artificial
  probe
  misc_feature (1)..(25): SEQ ID NO: 5671; WAN024GIW_at; Start 103; Stop 127
tttcatgagggcacgtttggcacgc

SEQ ID NO: 247324 - DNA, 25 bp, Artificial
  probe
  misc_feature (1)..(25): SEQ ID NO: 5671; WAN024GIW_at; Start 37; Stop 61
gagttccccagctttaagggtatca

SEQ ID NO: 247325 - DNA, 25 bp, Artificial
  probe
  misc_feature (1)..(25): SEQ ID NO: 5671; WAN024GIW_at; Start 9; Stop 33
cagccttgatgataacattaacaga

SEQ ID NO: 247326 - DNA, 25 bp, Artificial
  probe
  misc_feature (1)..(25): SEQ ID NO: 5671; WAN024GIW_at; Start 78; Stop 102
taacacgttgggtagcttgacgttg

SEQ ID NO: 247327 - DNA, 25 bp, Artificial
  probe
  misc_feature (1)..(25): SEQ ID NO: 5671; WAN024GIW_at; Start 201; Stop 225
tcaaacctgtgatagagactggtgt

SEQ ID NO: 247328 - DNA, 25 bp, Artificial
  probe
  misc_feature (1)..(25): SEQ ID NO: 5671; WAN024GIW_at; Start 181; Stop 205
acccgccatcggtgcttcgttcaaa

SEQ ID NO: 247329 - DNA, 25 bp, Artificial
  probe
  misc_feature (1)..(25): SEQ ID NO: 5671; WAN024GIW_at; Start 118; Stop 142
tttggcacgctcttcacctgctgca

SEQ ID NO: 247330 - DNA, 25 bp, Artificial
  probe
  misc_feature (1)..(25): SEQ ID NO: 5671; WAN024GIW_at; Start 1; Stop 25
ttgtacatcagccttgatgataaca

SEQ ID NO: 247331 - DNA, 25 bp, Artificial
  probe
  misc_feature (1)..(25): SEQ ID NO: 5671; WAN024GIW_at; Start 149; Stop 173
gatttttcatcctcgtaaacggcaa

SEQ ID NO: 247332 - DNA, 25 bp, Artificial
  probe
  misc_feature (1)..(25): SEQ ID NO: 5671; WAN024GIW_at; Start 176; Stop 200
tggtcacccgccatcggtgcttcgt

SEQ ID NO: 247333 - DNA, 25 bp, Artificial
  probe
  misc_feature (1)..(25): SEQ ID NO: 5671; WAN024GIW_at; Start 42; Stop 66
ccccagctttaagggtatcaaagag

SEQ ID NO: 247334 - DNA, 25 bp, Artificial
  probe
  misc_feature (1)..(25): SEQ ID NO: 5671; WAN024GIW_at; Start 63; Stop 87
agaggttttcaaggctaacacgttg

SEQ ID NO: 247335 - DNA, 25 bp, Artificial
  probe
  misc_feature (1)..(25): SEQ ID NO: 5671; WAN024GIW_at; Start 130; Stop 154
ttcacctgctgcacgcgcagatttt

SEQ ID NO: 247336 - DNA, 25 bp, Artificial
  probe
  misc_feature (1)..(25): SEQ ID NO: 5671; WAN024GIW_at; Start 146; Stop 170
gcagatttttcatcctcgtaaacgg

SEQ ID NO: 247337 - DNA, 25 bp, Artificial
  probe
  misc_feature (1)..(25): SEQ ID NO: 5671; WAN024GIW_at; Start 204; Stop 228
aacctgtgatagagactggtgttga

SEQ ID NO: 247338 - DNA, 25 bp, Artificial
  probe
  misc_feature (1)..(25): SEQ ID NO: 5671; WAN024GIW_at; Start 59; Stop 83
tcaaagaggttttcaaggctaacac

SEQ ID NO: 247339 - DNA, 25 bp, Artificial
  probe
  misc_feature (1)..(25): SEQ ID NO: 5671; WAN024GIW_at; Start 69; Stop 93
tttcaaggctaacacgttgggtagc

SEQ ID NO: 247340 - DNA, 25 bp, Artificial
  probe
  misc_feature (1)..(25): SEQ ID NO: 5671; WAN024GIW_at; Start 109; Stop 133
gagggcacgtttggcacgctcttca

SEQ ID NO: 247341 - DNA, 25 bp, Artificial
  probe
  misc_feature (1)..(25): SEQ ID NO: 5671; WAN024GIW_at; Start 165; Stop 189
aaacggcaaagtggtcacccgccat

SEQ ID NO: 247342 - DNA, 25 bp, Artificial
  probe
  misc_feature (1)..(25): SEQ ID NO: 5671; WAN024GIW_at; Start 198; Stop 222
cgttcaaacctgtgatagagactgg

SEQ ID NO: 247343 - DNA, 25 bp, Artificial
  probe
  misc_feature (1)..(25): SEQ ID NO: 5671; WAN024GIW_at; Start 75; Stop 99
ggctaacacgttgggtagcttgacg

SEQ ID NO: 247344 - DNA, 25 bp, Artificial
  probe
  misc_feature (1)..(25): SEQ ID NO: 5671; WAN024GIW_at; Start 105; Stop 129
tcatgagggcacgtttggcacgctc

SEQ ID NO: 247345 - DNA, 25 bp, Artificial
  probe
  misc_feature (1)..(25): SEQ ID NO: 5671; WAN024GIW_at; Start 45; Stop 69
cagctttaagggtatcaaagaggtt

SEQ ID NO: 247346 - DNA, 25 bp, Artificial
  probe
  misc_feature (1)..(25): SEQ ID NO: 5671; WAN024GIW_at; Start 139; Stop 163
tgcacgcgcagatttttcatcctcg

SEQ ID NO: 247347 - DNA, 25 bp, Artificial
  probe
  misc_feature (1)..(25): SEQ ID NO: 5671; WAN024GIW_at; Start 113; Stop 137
gcacgtttggcacgctcttcacctg

SEQ ID NO: 247348 - DNA, 25 bp, Artificial
  probe
  misc_feature (1)..(25): SEQ ID NO: 5671; WAN024GIW_at; Start 83; Stop 107
cgttgggtagcttgacgttgtttca

SEQ ID NO: 247349 - DNA, 25 bp, Artificial
  probe
  misc_feature (1)..(25): SEQ ID NO: 5671; WAN024GIW_at; Start 154; Stop 178
ttcatcctcgtaaacggcaaagtgg

SEQ ID NO: 247350 - DNA, 25 bp, Artificial
  probe
  misc_feature (1)..(25): SEQ ID NO: 5671; WAN024GIW_at; Start 187; Stop 211
catcggtgcttcgttcaaacctgtg

SEQ ID NO: 247351 - DNA, 25 bp, Artificial
  probe
  misc_feature (1)..(25): SEQ ID NO: 5671; WAN024GIW_at; Start 92; Stop 116
gcttgacgttgtttcatgagggcac

SEQ ID NO: 247352 - DNA, 25 bp, Artificial
  probe
  misc_feature (1)..(25): SEQ ID NO: 5184; WAN024GIX_at; Start 351; Stop 375
gataaggtgtttaacaccaacctga

SEQ ID NO: 247353 - DNA, 25 bp, Artificial
  probe
  misc_feature (1)..(25): SEQ ID NO: 5184; WAN024GIX_at; Start 124; Stop 148
tcagtgtcacgttctggttctggga

SEQ ID NO: 247354 - DNA, 25 bp, Artificial
  probe
  misc_feature (1)..(25): SEQ ID NO: 5184; WAN024GIX_at; Start 131; Stop 155
cacgttctggttctgggatatactc

SEQ ID NO: 247355 - DNA, 25 bp, Artificial
  probe
  misc_feature (1)..(25): SEQ ID NO: 5184; WAN024GIX_at; Start 17; Stop 41
cgatttcgtcgttgactttaacgat

SEQ ID NO: 247356 - DNA, 25 bp, Artificial
  probe
  misc_feature (1)..(25): SEQ ID NO: 5184; WAN024GIX_at; Start 29; Stop 53
tgactttaacgataccacggtcgat

SEQ ID NO: 247357 - DNA, 25 bp, Artificial
  probe
  misc_feature (1)..(25): SEQ ID NO: 5184; WAN024GIX_at; Start 218; Stop 242
taagtgctgaaccttggataactgg

SEQ ID NO: 247358 - DNA, 25 bp, Artificial
  probe
  misc_feature (1)..(25): SEQ ID NO: 5184; WAN024GIX_at; Start 47; Stop 71
ggtcgatacgtcctgaagcaactgt

SEQ ID NO: 247359 - DNA, 25 bp, Artificial
  probe
  misc_feature (1)..(25): SEQ ID NO: 5184; WAN024GIX_at; Start 270; Stop 294
tgacaataggtcacggatttccatt

SEQ ID NO: 247360 - DNA, 25 bp, Artificial
  probe
  misc_feature (1)..(25): SEQ ID NO: 5184; WAN024GIX_at; Start 66; Stop 90
aactgtaccacgtccagtgattgag

SEQ ID NO: 247361 - DNA, 25 bp, Artificial
  probe
  misc_feature (1)..(25): SEQ ID NO: 5184; WAN024GIX_at; Start 142; Stop 166
tctgggatatactcatcaactgtgt

SEQ ID NO: 247362 - DNA, 25 bp, Artificial
  probe
  misc_feature (1)..(25): SEQ ID NO: 5184; WAN024GIX_at; Start 78; Stop 102
tccagtgattgagaatacgtcctcg

SEQ ID NO: 247363 - DNA, 25 bp, Artificial
  probe
  misc_feature (1)..(25): SEQ ID NO: 5184; WAN024GIX_at; Start 87; Stop 111
tgagaatacgtcctcgactggaaga

SEQ ID NO: 247364 - DNA, 25 bp, Artificial
  probe
  misc_feature (1)..(25): SEQ ID NO: 5184; WAN024GIX_at; Start 182; Stop 206
cgatgtcttcgtatttagagtcacc

SEQ ID NO: 247365 - DNA, 25 bp, Artificial
  probe
  misc_feature (1)..(25): SEQ ID NO: 5184; WAN024GIX_at; Start 305; Stop 329
caagcaattcttcgtcgtcaaccaa

SEQ ID NO: 247366 - DNA, 25 bp, Artificial
  probe
  misc_feature (1)..(25): SEQ ID NO: 5184; WAN024GIX_at; Start 60; Stop 84
tgaagcaactgtaccacgtccagtg

SEQ ID NO: 247367 - DNA, 25 bp, Artificial
  probe
  misc_feature (1)..(25): SEQ ID NO: 5184; WAN024GIX_at; Start 110; Stop 134
gaagcaatggtttgtcagtgtcacg

SEQ ID NO: 247368 - DNA, 25 bp, Artificial
  probe
  misc_feature (1)..(25): SEQ ID NO: 5184; WAN024GIX_at; Start 258; Stop 282
gaagtcgtattctgacaataggtca

SEQ ID NO: 247369 - DNA, 25 bp, Artificial
  probe
  misc_feature (1)..(25): SEQ ID NO: 5184; WAN024GIX_at; Start 316; Stop 340
tcgtcgtcaaccaagtcaactttgt

SEQ ID NO: 247370 - DNA, 25 bp, Artificial
  probe
  misc_feature (1)..(25): SEQ ID NO: 5184; WAN024GIX_at; Start 3; Stop 27
gataccaacgatttcgatttcgtcg

SEQ ID NO: 247371 - DNA, 25 bp, Artificial
  probe
  misc_feature (1)..(25): SEQ ID NO: 5184; WAN024GIX_at; Start 225; Stop 249
tgaaccttggataactggaagatcg

SEQ ID NO: 247372 - DNA, 25 bp, Artificial
  probe
  misc_feature (1)..(25): SEQ ID NO: 5184; WAN024GIX_at; Start 39; Stop 63
gataccacggtcgatacgtcctgaa

SEQ ID NO: 247373 - DNA, 25 bp, Artificial
  probe
  misc_feature (1)..(25): SEQ ID NO: 5184; WAN024GIX_at; Start 168; Stop 192
catcaattccataacgatgtcttcg

SEQ ID NO: 247374 - DNA, 25 bp, Artificial
  probe
  misc_feature (1)..(25): SEQ ID NO: 5184; WAN024GIX_at; Start 284; Stop 308
ggatttccatttcaaccaattcaag

SEQ ID NO: 247375 - DNA, 25 bp, Artificial
  probe
  misc_feature (1)..(25): SEQ ID NO: 5184; WAN024GIX_at; Start 327; Stop 351
caagtcaactttgttcatgaagacg

SEQ ID NO: 247376 - DNA, 25 bp, Artificial
  probe
  misc_feature (1)..(25): SEQ ID NO: 5184; WAN024GIX_at; Start 242; Stop 266
gaagatcgtcacctgggaagtcgta

SEQ ID NO: 247377 - DNA, 25 bp, Artificial
  probe
  misc_feature (1)..(25): SEQ ID NO: 5184; WAN024GIX_at; Start 53; Stop 77
tacgtcctgaagcaactgtaccacg

SEQ ID NO: 247378 - DNA, 25 bp, Artificial
  probe
  misc_feature (1)..(25): SEQ ID NO: 5184; WAN024GIX_at; Start 297; Stop 321
aaccaattcaagcaattcttcgtcg

SEQ ID NO: 247379 - DNA, 25 bp, Artificial
  probe
  misc_feature (1)..(25): SEQ ID NO: 5184; WAN024GIX_at; Start 191; Stop 215
cgtatttagagtcaccttcaagagc

SEQ ID NO: 247380 - DNA, 25 bp, Artificial
  probe
  misc_feature (1)..(25): SEQ ID NO: 5184; WAN024GIX_at; Start 203; Stop 227
caccttcaagagctttaagtgctga

SEQ ID NO: 247381 - DNA, 25 bp, Artificial
  probe
  misc_feature (1)..(25): SEQ ID NO: 5184; WAN024GIX_at; Start 251; Stop 275
cacctgggaagtcgtattctgacaa

SEQ ID NO: 247382 - DNA, 25 bp, Artificial
  probe
  misc_feature (1)..(25): SEQ ID NO: 5184; WAN024GIX_at; Start 97; Stop 121
tcctcgactggaagaagcaatggtt

SEQ ID NO: 247383 - DNA, 25 bp, Artificial
  probe
  misc_feature (1)..(25): SEQ ID NO: 5184; WAN024GIX_at; Start 236; Stop 260
taactggaagatcgtcacctgggaa

SEQ ID NO: 247384 - DNA, 25 bp, Artificial
  probe
  misc_feature (1)..(25): SEQ ID NO: 5184; WAN024GIX_at; Start 338; Stop 362
tgttcatgaagacgataaggtgttt

SEQ ID NO: 247385 - DNA, 25 bp, Artificial
  probe
  misc_feature (1)..(25): SEQ ID NO: 5184; WAN024GIX_at; Start 157; Stop 181
tcaactgtgttcatcaattccataa

SEQ ID NO: 247386 - DNA, 25 bp, Artificial
  probe
  misc_feature (1)..(25): SEQ ID NO: 2687; WAN024GIY_at; Start 90; Stop 114
caataattcgtcaaccagggttgtt

SEQ ID NO: 247387 - DNA, 25 bp, Artificial
  probe
  misc_feature (1)..(25): SEQ ID NO: 2687; WAN024GIY_at; Start 118; Stop 142
ccgtggtcaacgtgggcgataatcg

SEQ ID NO: 247388 - DNA, 25 bp, Artificial
  probe
  misc_feature (1)..(25): SEQ ID NO: 2687; WAN024GIY_at; Start 37; Stop 61
tccatagcacgctctgccaattcag

SEQ ID NO: 247389 - DNA, 25 bp, Artificial
  probe
  misc_feature (1)..(25): SEQ ID NO: 2687; WAN024GIY_at; Start 114; Stop 138
tttaccgtggtcaacgtgggcgata

SEQ ID NO: 247390 - DNA, 25 bp, Artificial
  probe
  misc_feature (1)..(25): SEQ ID NO: 2687; WAN024GIY_at; Start 26; Stop 50
tatcgtttgagtccatagcacgctc

SEQ ID NO: 247391 - DNA, 25 bp, Artificial
  probe
  misc_feature (1)..(25): SEQ ID NO: 2687; WAN024GIY_at; Start 124; Stop 148
tcaacgtgggcgataatcgcaatgt

SEQ ID NO: 247392 - DNA, 25 bp, Artificial
  probe
  misc_feature (1)..(25): SEQ ID NO: 2687; WAN024GIY_at; Start 68; Stop 92
catcaagcgtttctgattgtttcaa

SEQ ID NO: 247393 - DNA, 25 bp, Artificial
  probe
  misc_feature (1)..(25): SEQ ID NO: 2687; WAN024GIY_at; Start 174; Stop 198
catgatttcctctataatattcaaa

SEQ ID NO: 247394 - DNA, 25 bp, Artificial
  probe
  misc_feature (1)..(25): SEQ ID NO: 2687; WAN024GIY_at; Start 131; Stop 155
gggcgataatcgcaatgttacggat

SEQ ID NO: 247395 - DNA, 25 bp, Artificial
  probe
  misc_feature (1)..(25): SEQ ID NO: 2687; WAN024GIY_at; Start 151; Stop 175
cggatatcttctcttaattttgtca

SEQ ID NO: 247396 - DNA, 25 bp, Artificial
  probe
  misc_feature (1)..(25): SEQ ID NO: 2687; WAN024GIY_at; Start 22; Stop 46
tcgatatcgtttgagtccatagcac

SEQ ID NO: 247397 - DNA, 25 bp, Artificial
  probe
  misc_feature (1)..(25): SEQ ID NO: 2687; WAN024GIY_at; Start 141; Stop 165
cgcaatgttacggatatcttctctt

SEQ ID NO: 247398 - DNA, 25 bp, Artificial
  probe
  misc_feature (1)..(25): SEQ ID NO: 2687; WAN024GIY_at; Start 161; Stop 185
ctcttaattttgtcatgatttcctc

SEQ ID NO: 247399 - DNA, 25 bp, Artificial
  probe
  misc_feature (1)..(25): SEQ ID NO: 2687; WAN024GIY_at; Start 38; Stop 62
ccatagcacgctctgccaattcagt

SEQ ID NO: 247400 - DNA, 25 bp, Artificial
  probe
  misc_feature (1)..(25): SEQ ID NO: 2687; WAN024GIY_at; Start 31; Stop 55
tttgagtccatagcacgctctgcca

SEQ ID NO: 247401 - DNA, 25 bp, Artificial
  probe
  misc_feature (1)..(25): SEQ ID NO: 2687; WAN024GIY_at; Start 88; Stop 112
ttcaataattcgtcaaccagggttg

SEQ ID NO: 247402 - DNA, 25 bp, Artificial
  probe
  misc_feature (1)..(25): SEQ ID NO: 2687; WAN024GIY_at; Start 133; Stop 157
gcgataatcgcaatgttacggatat

SEQ ID NO: 247403 - DNA, 25 bp, Artificial
  probe
  misc_feature (1)..(25): SEQ ID NO: 2687; WAN024GIY_at; Start 137; Stop 161
taatcgcaatgttacggatatcttc

SEQ ID NO: 247404 - DNA, 25 bp, Artificial
  probe
  misc_feature (1)..(25): SEQ ID NO: 2687; WAN024GIY_at; Start 207; Stop 231
tctaactgaacgattataccataat

SEQ ID NO: 247405 - DNA, 25 bp, Artificial
  probe
  misc_feature (1)..(25): SEQ ID NO: 2687; WAN024GIY_at; Start 24; Stop 48
gatatcgtttgagtccatagcacgc

SEQ ID NO: 247406 - DNA, 25 bp, Artificial
  probe
  misc_feature (1)..(25): SEQ ID NO: 2687; WAN024GIY_at; Start 143; Stop 167
caatgttacggatatcttctcttaa

SEQ ID NO: 247407 - DNA, 25 bp, Artificial
  probe
  misc_feature (1)..(25): SEQ ID NO: 2687; WAN024GIY_at; Start 71; Stop 95
caagcgtttctgattgtttcaataa

SEQ ID NO: 247408 - DNA, 25 bp, Artificial
  probe
  misc_feature (1)..(25): SEQ ID NO: 2687; WAN024GIY_at; Start 214; Stop 238
gaacgattataccataatttcaaat

SEQ ID NO: 247409 - DNA, 25 bp, Artificial
  probe
  misc_feature (1)..(25): SEQ ID NO: 2687; WAN024GIY_at; Start 202; Stop 226
tattttctaactgaacgattatacc

SEQ ID NO: 247410 - DNA, 25 bp, Artificial
  probe
  misc_feature (1)..(25): SEQ ID NO: 2687; WAN024GIY_at; Start 33; Stop 57
tgagtccatagcacgctctgccaat

SEQ ID NO: 247411 - DNA, 25 bp, Artificial
  probe
  misc_feature (1)..(25): SEQ ID NO: 2687; WAN024GIY_at; Start 85; Stop 109
tgtttcaataattcgtcaaccaggg

SEQ ID NO: 247412 - DNA, 25 bp, Artificial
  probe
  misc_feature (1)..(25): SEQ ID NO: 2687; WAN024GIY_at; Start 28; Stop 52
tcgtttgagtccatagcacgctctg

SEQ ID NO: 247413 - DNA, 25 bp, Artificial
  probe
  misc_feature (1)..(25): SEQ ID NO: 2687; WAN024GIY_at; Start 116; Stop 140
taccgtggtcaacgtgggcgataat

SEQ ID NO: 247414 - DNA, 25 bp, Artificial
  probe
  misc_feature (1)..(25): SEQ ID NO: 2687; WAN024GIY_at; Start 119; Stop 143
cgtggtcaacgtgggcgataatcgc

SEQ ID NO: 247415 - DNA, 25 bp, Artificial
  probe
  misc_feature (1)..(25): SEQ ID NO: 2687; WAN024GIY_at; Start 34; Stop 58
gagtccatagcacgctctgccaatt

SEQ ID NO: 247416 - DNA, 25 bp, Artificial
  probe
  misc_feature (1)..(25): SEQ ID NO: 2687; WAN024GIY_at; Start 64; Stop 88
cgtgcatcaagcgtttctgattgtt

SEQ ID NO: 247417 - DNA, 25 bp, Artificial
  probe
  misc_feature (1)..(25): SEQ ID NO: 2687; WAN024GIY_at; Start 29; Stop 53
cgtttgagtccatagcacgctctgc

SEQ ID NO: 247418 - DNA, 25 bp, Artificial
  probe
  misc_feature (1)..(25): SEQ ID NO: 2687; WAN024GIY_at; Start 21; Stop 45
ttcgatatcgtttgagtccatagca

SEQ ID NO: 247419 - DNA, 25 bp, Artificial
  probe
  misc_feature (1)..(25): SEQ ID NO: 2687; WAN024GIY_at; Start 128; Stop 152
cgtgggcgataatcgcaatgttacg

SEQ ID NO: 247420 - DNA, 25 bp, Artificial
  probe
  misc_feature (1)..(25): SEQ ID NO: 4132; WAN024GIZ_at; Start 7; Stop 31
ccgcttgatttgaacgtttatcctc

SEQ ID NO: 247421 - DNA, 25 bp, Artificial
  probe
  misc_feature (1)..(25): SEQ ID NO: 4132; WAN024GIZ_at; Start 15; Stop 39
tttgaacgtttatcctcttgctgac

SEQ ID NO: 247422 - DNA, 25 bp, Artificial
  probe
  misc_feature (1)..(25): SEQ ID NO: 4132; WAN024GIZ_at; Start 3; Stop 27
ggagccgcttgatttgaacgtttat

SEQ ID NO: 247423 - DNA, 25 bp, Artificial
  probe
  misc_feature (1)..(25): SEQ ID NO: 4132; WAN024GIZ_at; Start 13; Stop 37
gatttgaacgtttatcctcttgctg

SEQ ID NO: 247424 - DNA, 25 bp, Artificial
  probe
  misc_feature (1)..(25): SEQ ID NO: 4132; WAN024GIZ_at; Start 19; Stop 43
aacgtttatcctcttgctgacggcg

SEQ ID NO: 247425 - DNA, 25 bp, Artificial
  probe
  misc_feature (1)..(25): SEQ ID NO: 4132; WAN024GIZ_at; Start 5; Stop 29
agccgcttgatttgaacgtttatcc

SEQ ID NO: 247426 - DNA, 25 bp, Artificial
  probe
  misc_feature (1)..(25): SEQ ID NO: 4132; WAN024GIZ_at; Start 20; Stop 44
acgtttatcctcttgctgacggcgc

SEQ ID NO: 247427 - DNA, 25 bp, Artificial
  probe
  misc_feature (1)..(25): SEQ ID NO: 4132; WAN024GIZ_at; Start 11; Stop 35
ttgatttgaacgtttatcctcttgc

SEQ ID NO: 247428 - DNA, 25 bp, Artificial
  probe
  misc_feature (1)..(25): SEQ ID NO: 4132; WAN024GIZ_at; Start 22; Stop 46
gtttatcctcttgctgacggcgctc

SEQ ID NO: 247429 - DNA, 25 bp, Artificial
  probe
  misc_feature (1)..(25): SEQ ID NO: 4132; WAN024GIZ_at; Start 6; Stop 30
gccgcttgatttgaacgtttatcct

SEQ ID NO: 247430 - DNA, 25 bp, Artificial
  probe
  misc_feature (1)..(25): SEQ ID NO: 4132; WAN024GIZ_at; Start 21; Stop 45
cgtttatcctcttgctgacggcgct

SEQ ID NO: 247431 - DNA, 25 bp, Artificial
  probe
  misc_feature (1)..(25): SEQ ID NO: 4132; WAN024GIZ_at; Start 14; Stop 38
atttgaacgtttatcctcttgctga

SEQ ID NO: 247432 - DNA, 25 bp, Artificial
  probe
  misc_feature (1)..(25): SEQ ID NO: 4132; WAN024GIZ_at; Start 10; Stop 34
cttgatttgaacgtttatcctcttg

SEQ ID NO: 247433 - DNA, 25 bp, Artificial
  probe
  misc_feature (1)..(25): SEQ ID NO: 4132; WAN024GIZ_at; Start 8; Stop 32
cgcttgatttgaacgtttatcctct

SEQ ID NO: 247434 - DNA, 25 bp, Artificial
  probe
  misc_feature (1)..(25): SEQ ID NO: 4132; WAN024GIZ_at; Start 12; Stop 36
tgatttgaacgtttatcctcttgct

SEQ ID NO: 247435 - DNA, 25 bp, Artificial
  probe
  misc_feature (1)..(25): SEQ ID NO: 4132; WAN024GIZ_at; Start 9; Stop 33
gcttgatttgaacgtttatcctctt

SEQ ID NO: 247436 - DNA, 25 bp, Artificial
  probe
  misc_feature (1)..(25): SEQ ID NO: 4132; WAN024GIZ_at; Start 4; Stop 28
gagccgcttgatttgaacgtttatc

SEQ ID NO: 247437 - DNA, 25 bp, Artificial
  probe
  misc_feature (1)..(25): SEQ ID NO: 4132; WAN024GIZ_at; Start 16; Stop 40
ttgaacgtttatcctcttgctgacg

SEQ ID NO: 247438 - DNA, 25 bp, Artificial
  probe
  misc_feature (1)..(25): SEQ ID NO: 4132; WAN024GIZ_at; Start 17; Stop 41
tgaacgtttatcctcttgctgacgg

SEQ ID NO: 247439 - DNA, 25 bp, Artificial
  probe
  misc_feature (1)..(25): SEQ ID NO: 4132; WAN024GIZ_at; Start 18; Stop 42
gaacgtttatcctcttgctgacggc

SEQ ID NO: 247440 - DNA, 25 bp, Artificial
  probe
  misc_feature (1)..(25): SEQ ID NO: 5403; WAN024GJ2_at; Start 289; Stop 313
ttccttggctacagctggttttact

SEQ ID NO: 247441 - DNA, 25 bp, Artificial
  probe
  misc_feature (1)..(25): SEQ ID NO: 5403; WAN024GJ2_at; Start 261; Stop 285
gagtgactggctcagctggttttgc

SEQ ID NO: 247442 - DNA, 25 bp, Artificial
  probe
  misc_feature (1)..(25): SEQ ID NO: 5403; WAN024GJ2_at; Start 290; Stop 314
tccttggctacagctggttttactg

SEQ ID NO: 247443 - DNA, 25 bp, Artificial
  probe
  misc_feature (1)..(25): SEQ ID NO: 5403; WAN024GJ2_at; Start 296; Stop 320
gctacagctggttttactggttcag

SEQ ID NO: 247444 - DNA, 25 bp, Artificial
  probe
  misc_feature (1)..(25): SEQ ID NO: 5403; WAN024GJ2_at; Start 223; Stop 247
acgactttgcggtttagccgctact

SEQ ID NO: 247445 - DNA, 25 bp, Artificial
  probe
  misc_feature (1)..(25): SEQ ID NO: 5403; WAN024GJ2_at; Start 221; Stop 245
ttacgactttgcggtttagccgcta

SEQ ID NO: 247446 - DNA, 25 bp, Artificial
  probe
  misc_feature (1)..(25): SEQ ID NO: 5403; WAN024GJ2_at; Start 293; Stop 317
ttggctacagctggttttactggtt

SEQ ID NO: 247447 - DNA, 25 bp, Artificial
  probe
  misc_feature (1)..(25): SEQ ID NO: 5403; WAN024GJ2_at; Start 263; Stop 287
gtgactggctcagctggttttgcct

SEQ ID NO: 247448 - DNA, 25 bp, Artificial
  probe
  misc_feature (1)..(25): SEQ ID NO: 5403; WAN024GJ2_at; Start 224; Stop 248
cgactttgcggtttagccgctactt

SEQ ID NO: 247449 - DNA, 25 bp, Artificial
  probe
  misc_feature (1)..(25): SEQ ID NO: 5403; WAN024GJ2_at; Start 260; Stop 284
ggagtgactggctcagctggttttg

SEQ ID NO: 247450 - DNA, 25 bp, Artificial
  probe
  misc_feature (1)..(25): SEQ ID NO: 5403; WAN024GJ2_at; Start 299; Stop 323
acagctggttttactggttcagact

SEQ ID NO: 247451 - DNA, 25 bp, Artificial
  probe
  misc_feature (1)..(25): SEQ ID NO: 5403; WAN024GJ2_at; Start 292; Stop 316
cttggctacagctggttttactggt

SEQ ID NO: 247452 - DNA, 25 bp, Artificial
  probe
  misc_feature (1)..(25): SEQ ID NO: 5403; WAN024GJ2_at; Start 294; Stop 318
tggctacagctggttttactggttc

SEQ ID NO: 247453 - DNA, 25 bp, Artificial
  probe
  misc_feature (1)..(25): SEQ ID NO: 5403; WAN024GJ2_at; Start 298; Stop 322
tacagctggttttactggttcagac

SEQ ID NO: 247454 - DNA, 25 bp, Artificial
  probe
  misc_feature (1)..(25): SEQ ID NO: 5403; WAN024GJ2_at; Start 288; Stop 312
cttccttggctacagctggttttac

SEQ ID NO: 247455 - DNA, 25 bp, Artificial
  probe
  misc_feature (1)..(25): SEQ ID NO: 5403; WAN024GJ2_at; Start 257; Stop 281
ttcggagtgactggctcagctggtt

SEQ ID NO: 247456 - DNA, 25 bp, Artificial
  probe
  misc_feature (1)..(25): SEQ ID NO: 5403; WAN024GJ2_at; Start 254; Stop 278
gttttcggagtgactggctcagctg

SEQ ID NO: 247457 - DNA, 25 bp, Artificial
  probe
  misc_feature (1)..(25): SEQ ID NO: 5403; WAN024GJ2_at; Start 264; Stop 288
tgactggctcagctggttttgcctc

SEQ ID NO: 247458 - DNA, 25 bp, Artificial
  probe
  misc_feature (1)..(25): SEQ ID NO: 5403; WAN024GJ2_at; Start 310; Stop 334
tactggttcagacttttcggctttc

SEQ ID NO: 247459 - DNA, 25 bp, Artificial
  probe
  misc_feature (1)..(25): SEQ ID NO: 5403; WAN024GJ2_at; Start 311; Stop 335
actggttcagacttttcggctttct

SEQ ID NO: 247460 - DNA, 25 bp, Artificial
  probe
  misc_feature (1)..(25): SEQ ID NO: 5403; WAN024GJ2_at; Start 300; Stop 324
cagctggttttactggttcagactt

SEQ ID NO: 247461 - DNA, 25 bp, Artificial
  probe
  misc_feature (1)..(25): SEQ ID NO: 5403; WAN024GJ2_at; Start 258; Stop 282
tcggagtgactggctcagctggttt

SEQ ID NO: 247462 - DNA, 25 bp, Artificial
  probe
  misc_feature (1)..(25): SEQ ID NO: 5403; WAN024GJ2_at; Start 297; Stop 321
ctacagctggttttactggttcaga

SEQ ID NO: 247463 - DNA, 25 bp, Artificial
  probe
  misc_feature (1)..(25): SEQ ID NO: 5403; WAN024GJ2_at; Start 291; Stop 315
ccttggctacagctggttttactgg

SEQ ID NO: 247464 - DNA, 25 bp, Artificial
  probe
  misc_feature (1)..(25): SEQ ID NO: 5403; WAN024GJ2_at; Start 256; Stop 280
tttcggagtgactggctcagctggt

SEQ ID NO: 247465 - DNA, 25 bp, Artificial
  probe
  misc_feature (1)..(25): SEQ ID NO: 5403; WAN024GJ2_at; Start 259; Stop 283
cggagtgactggctcagctggtttt

SEQ ID NO: 247466 - DNA, 25 bp, Artificial
  probe
  misc_feature (1)..(25): SEQ ID NO: 5403; WAN024GJ2_at; Start 255; Stop 279
ttttcggagtgactggctcagctgg

SEQ ID NO: 247467 - DNA, 25 bp, Artificial
  probe
  misc_feature (1)..(25): SEQ ID NO: 5403; WAN024GJ2_at; Start 301; Stop 325
agctggttttactggttcagacttt

SEQ ID NO: 247468 - DNA, 25 bp, Artificial
  probe
  misc_feature (1)..(25): SEQ ID NO: 5403; WAN024GJ2_at; Start 222; Stop 246
tacgactttgcggtttagccgctac

SEQ ID NO: 247469 - DNA, 25 bp, Artificial
  probe
  misc_feature (1)..(25): SEQ ID NO: 5403; WAN024GJ2_at; Start 220; Stop 244
attacgactttgcggtttagccgct

SEQ ID NO: 247470 - DNA, 25 bp, Artificial
  probe
  misc_feature (1)..(25): SEQ ID NO: 5403; WAN024GJ2_at; Start 262; Stop 286
agtgactggctcagctggttttgcc

SEQ ID NO: 247471 - DNA, 25 bp, Artificial
  probe
  misc_feature (1)..(25): SEQ ID NO: 5403; WAN024GJ2_at; Start 253; Stop 277
tgttttcggagtgactggctcagct

SEQ ID NO: 247472 - DNA, 25 bp, Artificial
  probe
  misc_feature (1)..(25): SEQ ID NO: 5403; WAN024GJ2_at; Start 295; Stop 319
ggctacagctggttttactggttca

SEQ ID NO: 247473 - DNA, 25 bp, Artificial
  probe
  misc_feature (1)..(25): SEQ ID NO: 2963; WAN024GJ3_at; Start 60; Stop 84
gatgtcttccatacctgaaacggca

SEQ ID NO: 247474 - DNA, 25 bp, Artificial
  probe
  misc_feature (1)..(25): SEQ ID NO: 2963; WAN024GJ3_at; Start 103; Stop 127
gcttcttggatttcacgacgttcca

SEQ ID NO: 247475 - DNA, 25 bp, Artificial
  probe
  misc_feature (1)..(25): SEQ ID NO: 2963; WAN024GJ3_at; Start 213; Stop 237
aactgtaccacggaagacacgaccg

SEQ ID NO: 247476 - DNA, 25 bp, Artificial
  probe
  misc_feature (1)..(25): SEQ ID NO: 2963; WAN024GJ3_at; Start 46; Stop 70
gtttcaccgacaaagatgtcttcca

SEQ ID NO: 247477 - DNA, 25 bp, Artificial
  probe
  misc_feature (1)..(25): SEQ ID NO: 2963; WAN024GJ3_at; Start 109; Stop 133
tggatttcacgacgttccaaaccaa

SEQ ID NO: 247478 - DNA, 25 bp, Artificial
  probe
  misc_feature (1)..(25): SEQ ID NO: 2963; WAN024GJ3_at; Start 19; Stop 43
gcttctactgcatctgtcggagtga

SEQ ID NO: 247479 - DNA, 25 bp, Artificial
  probe
  misc_feature (1)..(25): SEQ ID NO: 2963; WAN024GJ3_at; Start 54; Stop 78
gacaaagatgtcttccatacctgaa

SEQ ID NO: 247480 - DNA, 25 bp, Artificial
  probe
  misc_feature (1)..(25): SEQ ID NO: 2963; WAN024GJ3_at; Start 71; Stop 95
tacctgaaacggcaatcaagtcacc

SEQ ID NO: 247481 - DNA, 25 bp, Artificial
  probe
  misc_feature (1)..(25): SEQ ID NO: 2963; WAN024GJ3_at; Start 216; Stop 240
tgtaccacggaagacacgaccgata

SEQ ID NO: 247482 - DNA, 25 bp, Artificial
  probe
  misc_feature (1)..(25): SEQ ID NO: 2963; WAN024GJ3_at; Start 35; Stop 59
tcggagtgatggtttcaccgacaaa

SEQ ID NO: 247483 - DNA, 25 bp, Artificial
  probe
  misc_feature (1)..(25): SEQ ID NO: 2963; WAN024GJ3_at; Start 6; Stop 30
taggattggaagagcttctactgca

SEQ ID NO: 247484 - DNA, 25 bp, Artificial
  probe
  misc_feature (1)..(25): SEQ ID NO: 2963; WAN024GJ3_at; Start 22; Stop 46
tctactgcatctgtcggagtgatgg

SEQ ID NO: 247485 - DNA, 25 bp, Artificial
  probe
  misc_feature (1)..(25): SEQ ID NO: 2963; WAN024GJ3_at; Start 243; Stop 267
gatacgtccaacgaagtcattgtag

SEQ ID NO: 247486 - DNA, 25 bp, Artificial
  probe
  misc_feature (1)..(25): SEQ ID NO: 2963; WAN024GJ3_at; Start 92; Stop 116
cacccgctttggcttcttggatttc

SEQ ID NO: 247487 - DNA, 25 bp, Artificial
  probe
  misc_feature (1)..(25): SEQ ID NO: 2963; WAN024GJ3_at; Start 209; Stop 233
ccttaactgtaccacggaagacacg

SEQ ID NO: 247488 - DNA, 25 bp, Artificial
  probe
  misc_feature (1)..(25): SEQ ID NO: 2963; WAN024GJ3_at; Start 2; Stop 26
tgtgtaggattggaagagcttctac

SEQ ID NO: 247489 - DNA, 25 bp, Artificial
  probe
  misc_feature (1)..(25): SEQ ID NO: 2963; WAN024GJ3_at; Start 67; Stop 91
tccatacctgaaacggcaatcaagt

SEQ ID NO: 247490 - DNA, 25 bp, Artificial
  probe
  misc_feature (1)..(25): SEQ ID NO: 2963; WAN024GJ3_at; Start 78; Stop 102
aacggcaatcaagtcacccgctttg

SEQ ID NO: 247491 - DNA, 25 bp, Artificial
  probe
  misc_feature (1)..(25): SEQ ID NO: 2963; WAN024GJ3_at; Start 225; Stop 249
gaagacacgaccgataccgatacgt

SEQ ID NO: 247492 - DNA, 25 bp, Artificial
  probe
  misc_feature (1)..(25): SEQ ID NO: 2963; WAN024GJ3_at; Start 88; Stop 112
aagtcacccgctttggcttcttgga

SEQ ID NO: 247493 - DNA, 25 bp, Artificial
  probe
  misc_feature (1)..(25): SEQ ID NO: 2963; WAN024GJ3_at; Start 81; Stop 105
ggcaatcaagtcacccgctttggct

SEQ ID NO: 247494 - DNA, 25 bp, Artificial
  probe
  misc_feature (1)..(25): SEQ ID NO: 2963; WAN024GJ3_at; Start 221; Stop 245
cacggaagacacgaccgataccgat

SEQ ID NO: 247495 - DNA, 25 bp, Artificial
  probe
  misc_feature (1)..(25): SEQ ID NO: 2963; WAN024GJ3_at; Start 42; Stop 66
gatggtttcaccgacaaagatgtct

SEQ ID NO: 247496 - DNA, 25 bp, Artificial
  probe
  misc_feature (1)..(25): SEQ ID NO: 2963; WAN024GJ3_at; Start 237; Stop 261
gataccgatacgtccaacgaagtca

SEQ ID NO: 247497 - DNA, 25 bp, Artificial
  probe
  misc_feature (1)..(25): SEQ ID NO: 2963; WAN024GJ3_at; Start 228; Stop 252
gacacgaccgataccgatacgtcca

SEQ ID NO: 247498 - DNA, 25 bp, Artificial
  probe
  misc_feature (1)..(25): SEQ ID NO: 2963; WAN024GJ3_at; Start 13; Stop 37
ggaagagcttctactgcatctgtcg

SEQ ID NO: 247499 - DNA, 25 bp, Artificial
  probe
  misc_feature (1)..(25): SEQ ID NO: 2963; WAN024GJ3_at; Start 97; Stop 121
gctttggcttcttggatttcacgac

SEQ ID NO: 247500 - DNA, 25 bp, Artificial
  probe
  misc_feature (1)..(25): SEQ ID NO: 2963; WAN024GJ3_at; Start 233; Stop 257
gaccgataccgatacgtccaacgaa

SEQ ID NO: 247501 - DNA, 25 bp, Artificial
  probe
  misc_feature (1)..(25): SEQ ID NO: 2963; WAN024GJ3_at; Start 101; Stop 125
tggcttcttggatttcacgacgttc

SEQ ID NO: 247502 - DNA, 25 bp, Artificial
  probe
  misc_feature (1)..(25): SEQ ID NO: 2963; WAN024GJ3_at; Start 62; Stop 86
tgtcttccatacctgaaacggcaat

SEQ ID NO: 247503 - DNA, 25 bp, Artificial
  probe
  misc_feature (1)..(25): SEQ ID NO: 2963; WAN024GJ3_at; Start 75; Stop 99
tgaaacggcaatcaagtcacccgct

SEQ ID NO: 247504 - DNA, 25 bp, Artificial
  probe
  misc_feature (1)..(25): SEQ ID NO: 2963; WAN024GJ3_at; Start 16; Stop 40
agagcttctactgcatctgtcggag

SEQ ID NO: 247505 - DNA, 25 bp, Artificial
  probe
  misc_feature (1)..(25): SEQ ID NO: 2963; WAN024GJ3_at; Start 29; Stop 53
catctgtcggagtgatggtttcacc

SEQ ID NO: 247506 - DNA, 25 bp, Artificial
  probe
  misc_feature (1)..(25): SEQ ID NO: 2963; WAN024GJ3_at; Start 37; Stop 61
ggagtgatggtttcaccgacaaaga

SEQ ID NO: 247507 - DNA, 25 bp, Artificial
  probe
  misc_feature (1)..(25): SEQ ID NO: 5800; WAN024GJ4_at; Start 217; Stop 241
tcacgagagttttcaccgatgatca

SEQ ID NO: 247508 - DNA, 25 bp, Artificial
  probe
  misc_feature (1)..(25): SEQ ID NO: 5800; WAN024GJ4_at; Start 39; Stop 63
tttacgcaaacggatagactcaggc

SEQ ID NO: 247509 - DNA, 25 bp, Artificial
  probe
  misc_feature (1)..(25): SEQ ID NO: 5800; WAN024GJ4_at; Start 43; Stop 67
cgcaaacggatagactcaggcgtta

SEQ ID NO: 247510 - DNA, 25 bp, Artificial
  probe
  misc_feature (1)..(25): SEQ ID NO: 5800; WAN024GJ4_at; Start 108; Stop 132
ttcaagtgtcaagatacgaggcgtc

SEQ ID NO: 247511 - DNA, 25 bp, Artificial
  probe
  misc_feature (1)..(25): SEQ ID NO: 5800; WAN024GJ4_at; Start 130; Stop 154
gtcttgataacagctgtttggtcct

SEQ ID NO: 247512 - DNA, 25 bp, Artificial
  probe
  misc_feature (1)..(25): SEQ ID NO: 5800; WAN024GJ4_at; Start 201; Stop 225
aactgtcaagtcattttcacgagag

SEQ ID NO: 247513 - DNA, 25 bp, Artificial
  probe
  misc_feature (1)..(25): SEQ ID NO: 5800; WAN024GJ4_at; Start 10; Stop 34
ttctcacgctctgctttgttaagga

SEQ ID NO: 247514 - DNA, 25 bp, Artificial
  probe
  misc_feature (1)..(25): SEQ ID NO: 5800; WAN024GJ4_at; Start 84; Stop 108
gtcgttcaagaactcaagagactct

SEQ ID NO: 247515 - DNA, 25 bp, Artificial
  probe
  misc_feature (1)..(25): SEQ ID NO: 5800; WAN024GJ4_at; Start 174; Stop 198
ggtcatttgttttgccttcgtgatg

SEQ ID NO: 247516 - DNA, 25 bp, Artificial
  probe
  misc_feature (1)..(25): SEQ ID NO: 5800; WAN024GJ4_at; Start 72; Stop 96
catgtactcatcgtcgttcaagaac

SEQ ID NO: 247517 - DNA, 25 bp, Artificial
  probe
  misc_feature (1)..(25): SEQ ID NO: 5800; WAN024GJ4_at; Start 97; Stop 121
tcaagagactcttcaagtgtcaaga

SEQ ID NO: 247518 - DNA, 25 bp, Artificial
  probe
  misc_feature (1)..(25): SEQ ID NO: 5800; WAN024GJ4_at; Start 151; Stop 175
tccttagtagctgaacgaacgttgg

SEQ ID NO: 247519 - DNA, 25 bp, Artificial
  probe
  misc_feature (1)..(25): SEQ ID NO: 5800; WAN024GJ4_at; Start 186; Stop 210
tgccttcgtgatgttaactgtcaag

SEQ ID NO: 247520 - DNA, 25 bp, Artificial
  probe
  misc_feature (1)..(25): SEQ ID NO: 5800; WAN024GJ4_at; Start 148; Stop 172
tggtccttagtagctgaacgaacgt

SEQ ID NO: 247521 - DNA, 25 bp, Artificial
  probe
  misc_feature (1)..(25): SEQ ID NO: 5800; WAN024GJ4_at; Start 211; Stop 235
tcattttcacgagagttttcaccga

SEQ ID NO: 247522 - DNA, 25 bp, Artificial
  probe
  misc_feature (1)..(25): SEQ ID NO: 5800; WAN024GJ4_at; Start 119; Stop 143
agatacgaggcgtcttgataacagc

SEQ ID NO: 247523 - DNA, 25 bp, Artificial
  probe
  misc_feature (1)..(25): SEQ ID NO: 5800; WAN024GJ4_at; Start 22; Stop 46
gctttgttaaggatttgtttacgca

SEQ ID NO: 247524 - DNA, 25 bp, Artificial
  probe
  misc_feature (1)..(25): SEQ ID NO: 5800; WAN024GJ4_at; Start 158; Stop 182
tagctgaacgaacgttggtcatttg

SEQ ID NO: 247525 - DNA, 25 bp, Artificial
  probe
  misc_feature (1)..(25): SEQ ID NO: 5800; WAN024GJ4_at; Start 14; Stop 38
cacgctctgctttgttaaggatttg

SEQ ID NO: 247526 - DNA, 25 bp, Artificial
  probe
  misc_feature (1)..(25): SEQ ID NO: 5800; WAN024GJ4_at; Start 79; Stop 103
tcatcgtcgttcaagaactcaagag

SEQ ID NO: 247527 - DNA, 25 bp, Artificial
  probe
  misc_feature (1)..(25): SEQ ID NO: 5800; WAN024GJ4_at; Start 110; Stop 134
caagtgtcaagatacgaggcgtctt

SEQ ID NO: 247528 - DNA, 25 bp, Artificial
  probe
  misc_feature (1)..(25): SEQ ID NO: 5800; WAN024GJ4_at; Start 142; Stop 166
gctgtttggtccttagtagctgaac

SEQ ID NO: 247529 - DNA, 25 bp, Artificial
  probe
  misc_feature (1)..(25): SEQ ID NO: 5800; WAN024GJ4_at; Start 166; Stop 190
cgaacgttggtcatttgttttgcct

SEQ ID NO: 247530 - DNA, 25 bp, Artificial
  probe
  misc_feature (1)..(25): SEQ ID NO: 5800; WAN024GJ4_at; Start 225; Stop 249
gttttcaccgatgatcattccttca

SEQ ID NO: 247531 - DNA, 25 bp, Artificial
  probe
  misc_feature (1)..(25): SEQ ID NO: 5800; WAN024GJ4_at; Start 3; Stop 27
gttagctttctcacgctctgctttg

SEQ ID NO: 247532 - DNA, 25 bp, Artificial
  probe
  misc_feature (1)..(25): SEQ ID NO: 5800; WAN024GJ4_at; Start 207; Stop 231
caagtcattttcacgagagttttca

SEQ ID NO: 247533 - DNA, 25 bp, Artificial
  probe
  misc_feature (1)..(25): SEQ ID NO: 5800; WAN024GJ4_at; Start 49; Stop 73
cggatagactcaggcgttacttcca

SEQ ID NO: 247534 - DNA, 25 bp, Artificial
  probe
  misc_feature (1)..(25): SEQ ID NO: 5800; WAN024GJ4_at; Start 220; Stop 244
cgagagttttcaccgatgatcattc

SEQ ID NO: 247535 - DNA, 25 bp, Artificial
  probe
  misc_feature (1)..(25): SEQ ID NO: 5800; WAN024GJ4_at; Start 137; Stop 161
taacagctgtttggtccttagtagc

SEQ ID NO: 247536 - DNA, 25 bp, Artificial
  probe
  misc_feature (1)..(25): SEQ ID NO: 5800; WAN024GJ4_at; Start 33; Stop 57
gatttgtttacgcaaacggatagac

SEQ ID NO: 247537 - DNA, 25 bp, Artificial
  probe
  misc_feature (1)..(25): SEQ ID NO: 5800; WAN024GJ4_at; Start 101; Stop 125
gagactcttcaagtgtcaagatacg

SEQ ID NO: 247538 - DNA, 25 bp, Artificial
  probe
  misc_feature (1)..(25): SEQ ID NO: 5800; WAN024GJ4_at; Start 58; Stop 82
tcaggcgttacttccatgtactcat

SEQ ID NO: 247539 - DNA, 25 bp, Artificial
  probe
  misc_feature (1)..(25): SEQ ID NO: 5800; WAN024GJ4_at; Start 53; Stop 77
tagactcaggcgttacttccatgta

SEQ ID NO: 247540 - DNA, 25 bp, Artificial
  probe
  misc_feature (1)..(25): SEQ ID NO: 5800; WAN024GJ4_at; Start 189; Stop 213
cttcgtgatgttaactgtcaagtca

SEQ ID NO: 247541 - DNA, 25 bp, Artificial
  probe
  misc_feature (1)..(25): SEQ ID NO: 4321; WAN024GJ5_at; Start 247; Stop 271
gatttccacatcgtcagcttctgct

SEQ ID NO: 247542 - DNA, 25 bp, Artificial
  probe
  misc_feature (1)..(25): SEQ ID NO: 4321; WAN024GJ5_at; Start 51; Stop 75
taacacggactttagagtcacgggc

SEQ ID NO: 247543 - DNA, 25 bp, Artificial
  probe
  misc_feature (1)..(25): SEQ ID NO: 4321; WAN024GJ5_at; Start 222; Stop 246
ccttgtagataatgctgtgaagacg

SEQ ID NO: 247544 - DNA, 25 bp, Artificial
  probe
  misc_feature (1)..(25): SEQ ID NO: 4321; WAN024GJ5_at; Start 178; Stop 202
tggatcaagcatccctttcatagct

SEQ ID NO: 247545 - DNA, 25 bp, Artificial
  probe
  misc_feature (1)..(25): SEQ ID NO: 4321; WAN024GJ5_at; Start 140; Stop 164
cggataaccgcttcaccaataactt

SEQ ID NO: 247546 - DNA, 25 bp, Artificial
  probe
  misc_feature (1)..(25): SEQ ID NO: 4321; WAN024GJ5_at; Start 206; Stop 230
tccatctcttcgataaccttgtaga

SEQ ID NO: 247547 - DNA, 25 bp, Artificial
  probe
  misc_feature (1)..(25): SEQ ID NO: 4321; WAN024GJ5_at; Start 300; Stop 324
cgttgaaaccaacgataaaggcatt

SEQ ID NO: 247548 - DNA, 25 bp, Artificial
  probe
  misc_feature (1)..(25): SEQ ID NO: 4321; WAN024GJ5_at; Start 58; Stop 82
gactttagagtcacgggcaacctta

SEQ ID NO: 247549 - DNA, 25 bp, Artificial
  probe
  misc_feature (1)..(25): SEQ ID NO: 4321; WAN024GJ5_at; Start 7; Stop 31
caagcttgcgagttcaccatcatag

SEQ ID NO: 247550 - DNA, 25 bp, Artificial
  probe
  misc_feature (1)..(25): SEQ ID NO: 4321; WAN024GJ5_at; Start 37; Stop 61
gacaccatcacggataacacggact

SEQ ID NO: 247551 - DNA, 25 bp, Artificial
  probe
  misc_feature (1)..(25): SEQ ID NO: 4321; WAN024GJ5_at; Start 240; Stop 264
gaagacggatttccacatcgtcagc

SEQ ID NO: 247552 - DNA, 25 bp, Artificial
  probe
  misc_feature (1)..(25): SEQ ID NO: 4321; WAN024GJ5_at; Start 26; Stop 50
tcatagataacgacaccatcacgga

SEQ ID NO: 247553 - DNA, 25 bp, Artificial
  probe
  misc_feature (1)..(25): SEQ ID NO: 4321; WAN024GJ5_at; Start 109; Stop 133
agttcccactttagacaccttgaag

SEQ ID NO: 247554 - DNA, 25 bp, Artificial
  probe
  misc_feature (1)..(25): SEQ ID NO: 4321; WAN024GJ5_at; Start 65; Stop 89
gagtcacgggcaaccttaccgttga

SEQ ID NO: 247555 - DNA, 25 bp, Artificial
  probe
  misc_feature (1)..(25): SEQ ID NO: 4321; WAN024GJ5_at; Start 196; Stop 220
catagcttcttccatctcttcgata

SEQ ID NO: 247556 - DNA, 25 bp, Artificial
  probe
  misc_feature (1)..(25): SEQ ID NO: 4321; WAN024GJ5_at; Start 87; Stop 111
tgataaccataaatccaccgatagt

SEQ ID NO: 247557 - DNA, 25 bp, Artificial
  probe
  misc_feature (1)..(25): SEQ ID NO: 4321; WAN024GJ5_at; Start 122; Stop 146
gacaccttgaaggtttcacggataa

SEQ ID NO: 247558 - DNA, 25 bp, Artificial
  probe
  misc_feature (1)..(25): SEQ ID NO: 4321; WAN024GJ5_at; Start 167; Stop 191
tcttcaaattctggatcaagcatcc

SEQ ID NO: 247559 - DNA, 25 bp, Artificial
  probe
  misc_feature (1)..(25): SEQ ID NO: 4321; WAN024GJ5_at; Start 149; Stop 173
gcttcaccaataactttttcttcaa

SEQ ID NO: 247560 - DNA, 25 bp, Artificial
  probe
  misc_feature (1)..(25): SEQ ID NO: 4321; WAN024GJ5_at; Start 130; Stop 154
gaaggtttcacggataaccgcttca

SEQ ID NO: 247561 - DNA, 25 bp, Artificial
  probe
  misc_feature (1)..(25): SEQ ID NO: 4321; WAN024GJ5_at; Start 33; Stop 57
taacgacaccatcacggataacacg

SEQ ID NO: 247562 - DNA, 25 bp, Artificial
  probe
  misc_feature (1)..(25): SEQ ID NO: 4321; WAN024GJ5_at; Start 186; Stop 210
gcatccctttcatagcttcttccat

SEQ ID NO: 247563 - DNA, 25 bp, Artificial
  probe
  misc_feature (1)..(25): SEQ ID NO: 4321; WAN024GJ5_at; Start 98; Stop 122
aatccaccgatagttcccactttag

SEQ ID NO: 247564 - DNA, 25 bp, Artificial
  probe
  misc_feature (1)..(25): SEQ ID NO: 4321; WAN024GJ5_at; Start 268; Stop 292
tgcttgttgacgagcttgtggtgta

SEQ ID NO: 247565 - DNA, 25 bp, Artificial
  probe
  misc_feature (1)..(25): SEQ ID NO: 4321; WAN024GJ5_at; Start 261; Stop 285
cagcttctgcttgttgacgagcttg

SEQ ID NO: 247566 - DNA, 25 bp, Artificial
  probe
  misc_feature (1)..(25): SEQ ID NO: 4321; WAN024GJ5_at; Start 231; Stop 255
taatgctgtgaagacggatttccac

SEQ ID NO: 247567 - DNA, 25 bp, Artificial
  probe
  misc_feature (1)..(25): SEQ ID NO: 4321; WAN024GJ5_at; Start 253; Stop 277
cacatcgtcagcttctgcttgttga

SEQ ID NO: 247568 - DNA, 25 bp, Artificial
  probe
  misc_feature (1)..(25): SEQ ID NO: 4321; WAN024GJ5_at; Start 303; Stop 327
tgaaaccaacgataaaggcatttga

SEQ ID NO: 247569 - DNA, 25 bp, Artificial
  probe
  misc_feature (1)..(25): SEQ ID NO: 4321; WAN024GJ5_at; Start 13; Stop 37
tgcgagttcaccatcatagataacg

SEQ ID NO: 247570 - DNA, 25 bp, Artificial
  probe
  misc_feature (1)..(25): SEQ ID NO: 4321; WAN024GJ5_at; Start 286; Stop 310
tggtgtagggcgtacgttgaaacca

SEQ ID NO: 247571 - DNA, 25 bp, Artificial
  probe
  misc_feature (1)..(25): SEQ ID NO: 4321; WAN024GJ5_at; Start 1; Stop 25
gtgtttcaagcttgcgagttcacca

SEQ ID NO: 247572 - DNA, 25 bp, Artificial
  probe
  misc_feature (1)..(25): SEQ ID NO: 4321; WAN024GJ5_at; Start 216; Stop 240
cgataaccttgtagataatgctgtg

SEQ ID NO: 247573 - DNA, 25 bp, Artificial
  probe
  misc_feature (1)..(25): SEQ ID NO: 4321; WAN024GJ5_at; Start 44; Stop 68
tcacggataacacggactttagagt

SEQ ID NO: 247574 - DNA, 25 bp, Artificial
  probe
  misc_feature (1)..(25): SEQ ID NO: 4321; WAN024GJ5_at; Start 73; Stop 97
ggcaaccttaccgttgataaccata

SEQ ID NO: 247575 - DNA, 25 bp, Artificial
  probe
  misc_feature (1)..(25): SEQ ID NO: 5161; WAN024GJ6_at; Start 219; Stop 243
gtggttgatggcttcaatagtctga

SEQ ID NO: 247576 - DNA, 25 bp, Artificial
  probe
  misc_feature (1)..(25): SEQ ID NO: 5161; WAN024GJ6_at; Start 206; Stop 230
tagctgcttttgagtggttgatggc

SEQ ID NO: 247577 - DNA, 25 bp, Artificial
  probe
  misc_feature (1)..(25): SEQ ID NO: 5161; WAN024GJ6_at; Start 141; Stop 165
gataacgcgttctgggttagcacct

SEQ ID NO: 247578 - DNA, 25 bp, Artificial
  probe
  misc_feature (1)..(25): SEQ ID NO: 5161; WAN024GJ6_at; Start 33; Stop 57
tgtttccaacaattcttcgatattt

SEQ ID NO: 247579 - DNA, 25 bp, Artificial
  probe
  misc_feature (1)..(25): SEQ ID NO: 5161; WAN024GJ6_at; Start 130; Stop 154
gccaattcaccgataacgcgttctg

SEQ ID NO: 247580 - DNA, 25 bp, Artificial
  probe
  misc_feature (1)..(25): SEQ ID NO: 5161; WAN024GJ6_at; Start 211; Stop 235
gcttttgagtggttgatggcttcaa

SEQ ID NO: 247581 - DNA, 25 bp, Artificial
  probe
  misc_feature (1)..(25): SEQ ID NO: 5161; WAN024GJ6_at; Start 160; Stop 184
gcacctggtttatcaatcttgttaa

SEQ ID NO: 247582 - DNA, 25 bp, Artificial
  probe
  misc_feature (1)..(25): SEQ ID NO: 5161; WAN024GJ6_at; Start 112; Stop 136
gacatcacaccatgctctgccaatt

SEQ ID NO: 247583 - DNA, 25 bp, Artificial
  probe
  misc_feature (1)..(25): SEQ ID NO: 5161; WAN024GJ6_at; Start 139; Stop 163
ccgataacgcgttctgggttagcac

SEQ ID NO: 247584 - DNA, 25 bp, Artificial
  probe
  misc_feature (1)..(25): SEQ ID NO: 5161; WAN024GJ6_at; Start 209; Stop 233
ctgcttttgagtggttgatggcttc

SEQ ID NO: 247585 - DNA, 25 bp, Artificial
  probe
  misc_feature (1)..(25): SEQ ID NO: 5161; WAN024GJ6_at; Start 216; Stop 240
tgagtggttgatggcttcaatagtc

SEQ ID NO: 247586 - DNA, 25 bp, Artificial
  probe
  misc_feature (1)..(25): SEQ ID NO: 5161; WAN024GJ6_at; Start 137; Stop 161
caccgataacgcgttctgggttagc

SEQ ID NO: 247587 - DNA, 25 bp, Artificial
  probe
  misc_feature (1)..(25): SEQ ID NO: 5161; WAN024GJ6_at; Start 27; Stop 51
aaggactgtttccaacaattcttcg

SEQ ID NO: 247588 - DNA, 25 bp, Artificial
  probe
  misc_feature (1)..(25): SEQ ID NO: 5161; WAN024GJ6_at; Start 142; Stop 166
ataacgcgttctgggttagcacctg
